United States Patent Application Publication US 2024/0254659 A1 - sequence listing, part 3

SEQ ID NO: 28582 - protein, 85 aa, unidentified
  REGION 1..85: note = Description of Unknown:cds_NZ_WFIY01000004.1_cds_WP_162309148.1_765 target sequence
SSVFEKYFNNSIIYEPEIYSDGYTFIKNGIPSVTLEGYYKEYHSIDDEIIPSEEVCISSLVLSINKILNDENVEQIRYDMLKNEL

SEQ ID NO: 28583 - protein, 85 aa, unidentified
  REGION 1..85: note = Description of Unknown:cds_NZ_WFIY01000004.1_cds_WP_162309148.1_765 target sequence
MQFMSTTQAPMRTYLLNILDNLNNKEIYENLLKLYGGILPRDSLAIVKLFHKLAGIQYEKPVYVEGKPALKISSNDKLYLRSIAK

SEQ ID NO: 28584 - protein, 85 aa, unidentified
  REGION 1..85: note = Description of Unknown:cds_NZ_WFIY01000004.1_cds_WP_155863200.1_1140 target sequence
NRSPFSGIDSLKLTFNHIKIWYTSGMGFFTDAYDLFIIGAIIDIFKAYNLPGFQLNSFYEGILASSAIITAVLGQIIFGILGDKI

SEQ ID NO: 28585 - protein, 85 aa, unidentified
  REGION 1..85: note = Description of Unknown:cds_NZ_WFIY01000004.1_cds_WP_155863200.1_1140 target sequence
GRKKVYGVEASLLSAGAFLSAFSPNLLWLIIFRMIMGVGIGGDYPISATIMSEYANVKDRGKLISLVFANQGIGTLVAVAVGAIS

SEQ ID NO: 28586 - protein, 85 aa, unidentified
  REGION 1..85: note = Description of Unknown:cds_NZ_WFIY01000004.1_cds_WP_155863200.1_1140 target sequence
TYTLPPDIAWRVMAGVGAIPAATVIYLRRKVPETPRYAALVKGDLKEAEKSASFLGAKLNLSKIEVKKMSFSEFLDKYWKLLIGT

SEQ ID NO: 28587 - protein, 85 aa, unidentified
  REGION 1..85: note = Description of Unknown:cds_NZ_WFIY01000004.1_cds_WP_155863200.1_1140 target sequence
AGTWLILDMAYYGTGIYSGPIVSSILGQPSSVGQEIVFAGIPFMVGFFGYFTAVALMDKLGRKVIQTQGFVMMAIIYLIVSAVMI

SEQ ID NO: 28588 - protein, 85 aa, unidentified
  REGION 1..85: note = Description of Unknown:cds_NZ_WFIY01000004.1_cds_WP_155863200.1_1140 target sequence
VTYTSKGPKVSGFLIPAEAAFMLYALSFFFIDFGPNTTTFVIPAEVYPTSYRTTGHGISAAAGKIGAAITTYLFPTLLTIMGLKE

SEQ ID NO: 28589 - protein, 84 aa, unidentified
  REGION 1..84: note = Description of Unknown:cds_NZ_WFIY01000004.1_cds_WP_155863200.1_1140 target sequence
YPTSYRTTGHGISAAAGKIGAAITTYLFPTLLTIMGLKELLIMLSLLSILGAVITIVFVKEPKMKSLEELTGELKGEKEEEEKA

SEQ ID NO: 28590 - protein, 85 aa, unidentified
  REGION 1..85: note = Description of Unknown:cds_NZ_WFIY01000004.1_cds_WP_155863200.1_1140 target sequence
FFTDAYDLFIIGAIIDIFKAYNLPGFQLNSFYEGILASSAIITAVLGQIIFGILGDKIGRKKVYGVEASLLSAGAFLSAFSPNLL

SEQ ID NO: 28591 - protein, 85 aa, unidentified
  REGION 1..85: note = Description of Unknown:cds_NZ_WFIY01000004.1_cds_WP_155863200.1_1140 target sequence
WLIIFRMIMGVGIGGDYPISATIMSEYANVKDRGKLISLVFANQGIGTLVAVAVGAISTYTLPPDIAWRVMAGVGAIPAATVIYL

SEQ ID NO: 28592 - protein, 85 aa, unidentified
  REGION 1..85: note = Description of Unknown:cds_NZ_WFIY01000004.1_cds_WP_155863200.1_1140 target sequence
RRKVPETPRYAALVKGDLKEAEKSASFLGAKLNLSKIEVKKMSFSEFLDKYWKLLIGTAGTWLILDMAYYGTGIYSGPIVSSILG

SEQ ID NO: 28593 - protein, 85 aa, unidentified
  REGION 1..85: note = Description of Unknown:cds_NZ_WFIY01000004.1_cds_WP_155863200.1_1140 target sequence
QPSSVGQEIVFAGIPFMVGFFGYFTAVALMDKLGRKVIQTQGFVMMAIIYLIVSAVMIVTYTSKGPKVSGFLIPAEAAFMLYALS

SEQ ID NO: 28594 - protein, 85 aa, unidentified
  REGION 1..85: note = Description of Unknown:cds_NZ_WFIY01000004.1_cds_WP_155863200.1_1140 target sequence
FFFIDFGPNTTTFVIPAEVYPTSYRTTGHGISAAAGKIGAAITTYLFPTLLTIMGLKELLIMLSLLSILGAVITIVFVKEPKMKS

SEQ ID NO: 28595 - protein, 85 aa, unidentified
  REGION 1..85: note = Description of Unknown:cds_NZ_WFIY01000004.1_cds_WP_155863841.1_1737 target sequence
SLVLQEYEAIHKELRDEGFIRTDYIHSDKLWNPKIMTMKREDLEKLKTFRLKRIVKWAWDHSEFYRKFWKSKGFEPDMIKDWRDV

SEQ ID NO: 28596 - protein, 85 aa, unidentified
  REGION 1..85: note = Description of Unknown:cds_NZ_WFIY01000004.1_cds_WP_155863841.1_1737 target sequence
VKIPILRKDELRKDLQSNPPFGTIMVPELARRIRFVGATSGSTGMPTFQGWGALELDYFEEGQARYLWTFADVKPTTVYANYLNM

SEQ ID NO: 28597 - protein, 85 aa, unidentified
  REGION 1..85: note = Description of Unknown:cds_NZ_WFIY01000004.1_cds_WP_155863841.1_1737 target sequence
SGFYSWGPPLVETAMWRCGATAIAGGGETYFSWKNRHNLIFKLWKVDVLATTPWLHRLIGEEAVKEGWETPFKVLLLHGGAAAEN

SEQ ID NO: 28598 - protein, 85 aa, unidentified
  REGION 1..85: note = Description of Unknown:cds_NZ_WFIY01000004.1_cds_WP_155863841.1_1737 target sequence
TKKKLFAVHPNARLAISVWGTTDGHMAIEVPNLPGQLVVWEDMEIFDIVDPKTDEPAAEGERGELIATLLNHFTMPLIRYSLGDY

SEQ ID NO: 28599 - protein, 85 aa, unidentified
  REGION 1..85: note = Description of Unknown:cds_NZ_WFIY01000004.1_cds_WP_155863841.1_1737 target sequence
VKNEFLTDPDPTYGITHMRFAEPIPGRVEWMFKVKGKLLLPIYVEDAVNEIPDTTGMFNIFVYDNEMDKLKIRIETTRNPDRKYD

SEQ ID NO: 28600 - protein, 84 aa, unidentified
  REGION 1..84: note = Description of Unknown:cds_NZ_WFIY01000004.1_cds_WP_155863841.1_1737 target sequence
AVNEIPDTTGMFNIFVYDNEMDKLKIRIETTRNPDRKYDEEARQKLAERIGLDKDDVEIEWVKPGETIWTGYKLQVFVDQRKKK

SEQ ID NO: 28601 - protein, 85 aa, unidentified
  REGION 1..85: note = Description of Unknown:cds_NZ_WFIY01000004.1_cds_WP_155863841.1_1737 target sequence
DKLWNPKIMTMKREDLEKLKTFRLKRIVKWAWDHSEFYRKFWKSKGFEPDMIKDWRDVVKIPILRKDELRKDLQSNPPFGTIMVP

SEQ ID NO: 28602 - protein, 85 aa, unidentified
  REGION 1..85: note = Description of Unknown:cds_NZ_WFIY01000004.1_cds_WP_155863841.1_1737 target sequence
ELARRIRFVGATSGSTGMPTFQGWGALELDYFEEGQARYLWTFADVKPTTVYANYLNMSGFYSWGPPLVETAMWRCGATAIAGGG

SEQ ID NO: 28603 - protein, 85 aa, unidentified
  REGION 1..85: note = Description of Unknown:cds_NZ_WFIY01000004.1_cds_WP_155863841.1_1737 target sequence
ETYFSWKNRHNLIFKLWKVDVLATTPWLHRLIGEEAVKEGWETPFKVLLLHGGAAAENTKKKLFAVHPNARLAISVWGTTDGHMA

SEQ ID NO: 28604 - protein, 85 aa, unidentified
  REGION 1..85: note = Description of Unknown:cds_NZ_WFIY01000004.1_cds_WP_155863841.1_1737 target sequence
IEVPNLPGQLVVWEDMEIFDIVDPKTDEPAAEGERGELIATLLNHFTMPLIRYSLGDYVKNEFLTDPDPTYGITHMRFAEPIPGR

SEQ ID NO: 28605 - protein, 85 aa, unidentified
  REGION 1..85: note = Description of Unknown:cds_NZ_WFIY01000004.1_cds_WP_155863841.1_1737 target sequence
VEWMFKVKGKLLLPIYVEDAVNEIPDTTGMFNIFVYDNEMDKLKIRIETTRNPDRKYDEEARQKLAERIGLDKDDVEIEWVKPGE

SEQ ID NO: 28606 - protein, 85 aa, unidentified
  REGION 1..85: note = Description of Unknown:cds_NC_030656.1_cds_YP_009268744.1_29 target sequence
QSTKQVITEYLGREPEISSYYLISAYYKNITKILKFNKTVFISLLRKNKRKFFSHQTNATPTAISKRVSEYFSKQKHTIQVGKIL

SEQ ID NO: 28607 - protein, 85 aa, unidentified
  REGION 1..85: note = Description of Unknown:cds_NC_030656.1_cds_YP_009268744.1_29 target sequence
SIIELQTVLVTTYTQTLGVLTTKAPSLYSSVMTLNVSCTVILAKTAVESYNVATPNSKVMGRHNASDLVNSVNELMDEYLRRHNK

SEQ ID NO: 28608 - protein, 85 aa, unidentified
  REGION 1..85: note = Description of Unknown:cds_NC_030656.1_cds_YP_009268744.1_29 target sequence
SCLCYGSYSLHLLNSDIEYGDIDIVQTNSRTFLINMAFLIYFITGRQVTLLKVPYLKNYIVLHDEDGKHILDSFNIRQSTMDAVP

SEQ ID NO: 28609 - protein, 85 aa, unidentified
  REGION 1..85: note = Description of Unknown:cds_NC_030656.1_cds_YP_009268744.1_29 target sequence
KILINNIYIIDPLIQLMTMLKMLSQIDRLEDLAKNPLKLIERLSTLLEYARVELCVNFSEKADGFPLFATIDEVSRIVTVDCRPL

SEQ ID NO: 28610 - protein, 85 aa, unidentified
  REGION 1..85: note = Description of Unknown:cds_NC_030656.1_cds_YP_009268744.1_29 target sequence
NSSFNQAKVYLDETVLAHDILYMNSDENVLDFESITNSAFLVSKNVLYTYFSNTILLSNENVIHDISRRAITAHIILFLLLTDYE

SEQ ID NO: 28611 - protein, 84 aa, unidentified
  REGION 1..84: note = Description of Unknown:cds_NC_030656.1_cds_YP_009268744.1_29 target sequence
LYTYFSNTILLSNENVIHDISRRAITAHIILFLLLTDYESGKKAVSLLLKSLISTKESIFKVISRDKKTGNHSIIDISKDIISH

SEQ ID NO: 28612 - protein, 85 aa, unidentified
  REGION 1..85: note = Description of Unknown:cds_NC_030656.1_cds_YP_009268744.1_29 target sequence
KNITKILKFNKTVFISLLRKNKRKFFSHQTNATPTAISKRVSEYFSKQKHTIQVGKILSIIELQTVLVTTYTQTLGVLTTKAPSL

SEQ ID NO: 28613 - protein, 85 aa, unidentified
  REGION 1..85: note = Description of Unknown:cds_NC_030656.1_cds_YP_009268744.1_29 target sequence
YSSVMTLNVSCTVILAKTAVESYNVATPNSKVMGRHNASDLVNSVNELMDEYLRRHNKSCLCYGSYSLHLLNSDIEYGDIDIVQT

SEQ ID NO: 28614 - protein, 85 aa, unidentified
  REGION 1..85: note = Description of Unknown:cds_NC_030656.1_cds_YP_009268744.1_29 target sequence
NSRTFLINMAFLIYFITGRQVTLLKVPYLKNYIVLHDEDGKHILDSFNIRQSTMDAVPKILINNIYIIDPLIQLMTMLKMLSQID

SEQ ID NO: 28615 - protein, 85 aa, unidentified
  REGION 1..85: note = Description of Unknown:cds_NC_030656.1_cds_YP_009268744.1_29 target sequence
RLEDLAKNPLKLIERLSTLLEYARVELCVNFSEKADGFPLFATIDEVSRIVTVDCRPLNSSFNQAKVYLDETVLAHDILYMNSDE

SEQ ID NO: 28616 - protein, 85 aa, unidentified
  REGION 1..85: note = Description of Unknown:cds_NC_030656.1_cds_YP_009268744.1_29 target sequence
NVLDFESITNSAFLVSKNVLYTYFSNTILLSNENVIHDISRRAITAHIILFLLLTDYESGKKAVSLLLKSLISTKESIFKVISRD

SEQ ID NO: 28617 - protein, 85 aa, unidentified
  REGION 1..85: note = Description of Unknown:hvTR_P52441 target sequence
FYLKKLLRQLLAPLCKHGSYTHLQLFVMGEACVPGKCVLTMFLTNKKFLNKEVTEKFYNEFFAIWLRCRPETRLITKRLFNKMVM

SEQ ID NO: 28618 - protein, 85 aa, unidentified
  REGION 1..85: note = Description of Unknown:hvTR_P52441 target sequence
TKGLFVLLAYLYFVYRQCKVLELLSLYKLKTIKWVDVETRFRVYPPYKLNKLLEMPSFSEINELHMFLFEQQLLLPIPTHVNLPC

SEQ ID NO: 28619 - protein, 85 aa, unidentified
  REGION 1..85: note = Description of Unknown:hvTR_P52441 target sequence
MRLFCLRDYEQTETVMLRYRQREHVLSFPSMLRKYALKSPAGNFMFTMAKALVENFCFSADRYLIPVEHNNLVPMVPSKPERGDF

SEQ ID NO: 28620 - protein, 85 aa, unidentified
  REGION 1..85: note = Description of Unknown:hvTR_P52441 target sequence
PKILTFALATSLKDGLATSVISLPVMCYCKTKCSRFILEESYICVICAKCGHCLNSGKEKLCSPQGFSLSSMFYFRDKQEKNLIY

SEQ ID NO: 28621 - protein, 85 aa, unidentified
  REGION 1..85: note = Description of Unknown:hvTR_P52441 target sequence
SMHTDVMYCSLCGSQQLVFERIYEMSEHCVLGMKVKTVSWKAVIGTNSACTILNDNVKFDVIVPCSCRSCYSTVHLYNVTVKKLL

SEQ ID NO: 28622 - protein, 84 aa, unidentified
  REGION 1..84: note = Description of Unknown:hvTR_P52441 target sequence
TNSACTILNDNVKFDVIVPCSCRSCYSTVHLYNVTVKKLLRLVSHGSDFQCQRCQHSFRETCLDLEDCVNICQGCQISQNVRCI

SEQ ID NO: 28623 - protein, 85 aa, unidentified
  REGION 1..85: note = Description of Unknown:hvTR_P52441 target sequence
MGEACVPGKCVLTMFLTNKKFLNKEVTEKFYNEFFAIWLRCRPETRLITKRLFNKMVMTKGLFVLLAYLYFVYRQCKVLELLSLY

SEQ ID NO: 28624 - protein, 85 aa, unidentified
  REGION 1..85: note = Description of Unknown:hvTR_P52441 target sequence
KLKTIKWVDVETRFRVYPPYKLNKLLEMPSFSEINELHMFLFEQQLLLPIPTHVNLPCMRLFCLRDYEQTETVMLRYRQREHVLS

SEQ ID NO: 28625 - protein, 85 aa, unidentified
  REGION 1..85: note = Description of Unknown:hvTR_P52441 target sequence
FPSMLRKYALKSPAGNFMFTMAKALVENFCFSADRYLIPVEHNNLVPMVPSKPERGDFPKILTFALATSLKDGLATSVISLPVMC

SEQ ID NO: 28626 - protein, 85 aa, unidentified
  REGION 1..85: note = Description of Unknown:hvTR_P52441 target sequence
YCKTKCSRFILEESYICVICAKCGHCLNSGKEKLCSPQGFSLSSMFYFRDKQEKNLIYSMHTDVMYCSLCGSQQLVFERIYEMSE

SEQ ID NO: 28627 - protein, 85 aa, unidentified
  REGION 1..85: note = Description of Unknown:hvTR_P52441 target sequence
HCVLGMKVKTVSWKAVIGTNSACTILNDNVKFDVIVPCSCRSCYSTVHLYNVTVKKLLRLVSHGSDFQCQRCQHSFRETCLDLED

SEQ ID NO: 28628 - protein, 85 aa, unidentified
  REGION 1..85: note = Description of Unknown:hvTR_Q9QJ36 target sequence
FYLKKLLRQLLAPLCKHGPYTHLQLFVMGDACVPGKCVLTMFLTNKKFLNKEVTEKFYNEFFAIWLRCRPETRFITKRLFNKMVM

SEQ ID NO: 28629 - protein, 85 aa, unidentified
  REGION 1..85: note = Description of Unknown:hvTR_Q9QJ36 target sequence
TKGLFVLLAYLYFVYRQCKVLELLSLYKLKRIKWMDVETRFRVYPSYKLNKLLEMPSFSEINELHMFLFEQQLLLPIPTHVNLPC

SEQ ID NO: 28630 - protein, 85 aa, unidentified
  REGION 1..85: note = Description of Unknown:hvTR_Q9QJ36 target sequence
MRLFCLRDYEQTETVMLRYRQREHVLSFPSMLQKYALKSPAGNFMFTMAKALVENFCFSADRYLIPVEHNNLVPMVPSKPERGDF

SEQ ID NO: 28631 - protein, 85 aa, unidentified; identical to SEQ ID NO: 28620
  REGION 1..85: note = Description of Unknown:hvTR_Q9QJ36 target sequence

SEQ ID NO: 28632 - protein, 85 aa, unidentified
  REGION 1..85: note = Description of Unknown:hvTR_Q9QJ36 target sequence
SMHTDVMYCSLCGSQQLVFERIYEMSEHCVLGMKVETVSWKAVIGTNSACTILNDNVKFDVIVPCSCRSCYSTVHLYNVTVKKLL

SEQ ID NO: 28633 - protein, 84 aa, unidentified
  REGION 1..84: note = Description of Unknown:hvTR_Q9QJ36 target sequence
TNSACTILNDNVKFDVIVPCSCRSCYSTVHLYNVTVKKLLRLVSHGSDFQCQHCQHSFRETCLDLEDCVNICQGCQISQNVRCI

SEQ ID NO: 28634 - protein, 85 aa, unidentified
  REGION 1..85: note = Description of Unknown:hvTR_Q9QJ36 target sequence
MGDACVPGKCVLTMFLTNKKFLNKEVTEKFYNEFFAIWLRCRPETRFITKRLFNKMVMTKGLFVLLAYLYFVYRQCKVLELLSLY

SEQ ID NO: 28635 - protein, 85 aa, unidentified
  REGION 1..85: note = Description of Unknown:hvTR_Q9QJ36 target sequence
KLKRIKWMDVETRFRVYPSYKLNKLLEMPSFSEINELHMFLFEQQLLLPIPTHVNLPCMRLFCLRDYEQTETVMLRYRQREHVLS

SEQ ID NO: 28636 - protein, 85 aa, unidentified
  REGION 1..85: note = Description of Unknown:hvTR_Q9QJ36 target sequence
FPSMLQKYALKSPAGNFMFTMAKALVENFCFSADRYLIPVEHNNLVPMVPSKPERGDFPKILTFALATSLKDGLATSVISLPVMC

SEQ ID NO: 28637 - protein, 85 aa, unidentified; identical to SEQ ID NO: 28626
  REGION 1..85: note = Description of Unknown:hvTR_Q9QJ36 target sequence

SEQ ID NO: 28638 - protein, 85 aa, unidentified
  REGION 1..85: note = Description of Unknown:hvTR_Q9QJ36 target sequence
HCVLGMKVETVSWKAVIGTNSACTILNDNVKFDVIVPCSCRSCYSTVHLYNVTVKKLLRLVSHGSDFQCQHCQHSFRETCLDLED

SEQ ID NO: 28639 - protein, 85 aa, unidentified
  REGION 1..85: note = Description of Unknown:cds_NC_010495.1_cds_YP_001742041.1_4 target sequence
SKIDALNAYIRDRVASNNRAIQQQRLCVGGKNLDQKHDRLWAECGYPQEITAEMFRYAYERHPAAAAGINRIINKCWQKYPEVVE

SEQ ID NO: 28640 - protein, 85 aa, unidentified
  REGION 1..85: note = Description of Unknown:cds_NC_010495.1_cds_YP_001742041.1_4 target sequence
DGEDDKNSTPWELSINNMMKRAYPFIKEADKRNAINRYSAVILQVRDGRQWSEPVDVTKTRRIKDKSIVRFIPVWEEQLRVSAWN

SEQ ID NO: 28641 - protein, 85 aa, unidentified
  REGION 1..85: note = Description of Unknown:cds_NC_010495.1_cds_YP_001742041.1_4 target sequence
NDETSEDYGMPEMYEYQESAVEDFDSDGKPERSVQIHPDRIIILAEGGFDGSMFSGIPMLRAGYNSLIDMAKVSGSSAEGFLKNA

SEQ ID NO: 28642 - protein, 85 aa, unidentified
  REGION 1..85: note = Description of Unknown:cds_NC_010495.1_cds_YP_001742041.1_4 target sequence
SRQLAVNYTKDNVTPASLAQSMGVDIEELTDIMNENIEALNSGIDAAMFTMGADAKVLAVTPADPKPTWEVAANQFAASMALPFT

SEQ ID NO: 28643 - protein, 85 aa, unidentified
  REGION 1..85: note = Description of Unknown:cds_NC_010495.1_cds_YP_001742041.1_4 target sequence
VIFGQQTGRLASDEDKMQEAMTAKQRRETWVDYVISMFVERMIQFGIVDKAPANGYKVKWDDLLAPSELDKAELLTKLATANKSF

SEQ ID NO: 28644 - protein, 84 aa, unidentified
  REGION 1..84: note = Description of Unknown:cds_NC_010495.1_cds_YP_001742041.1_4 target sequence
GIVDKAPANGYKVKWDDLLAPSELDKAELLTKLATANKSFFDAGQSALLTVDEARGMVGMEPIELDESYREDTPPEDENEDTPV

SEQ ID NO: 28645 - protein, 85 aa, unidentified
  REGION 1..85: note = Description of Unknown:cds_NC_010495.1_cds_YP_001742041.1_4 target sequence
VGGKNLDQKHDRLWAECGYPQEITAEMFRYAYERHPAAAAGINRIINKCWQKYPEVVEDGEDDKNSTPWELSINNMMKRAYPFIK

SEQ ID NO: 28646 - protein, 85 aa, unidentified
  REGION 1..85: note = Description of Unknown:cds_NC_010495.1_cds_YP_001742041.1_4 target sequence
EADKRNAINRYSAVILQVRDGRQWSEPVDVTKTRRIKDKSIVRFIPVWEEQLRVSAWNNDETSEDYGMPEMYEYQESAVEDFDSD

SEQ ID NO: 28647 - protein, 85 aa, unidentified
  REGION 1..85: note = Description of Unknown:cds_NC_010495.1_cds_YP_001742041.1_4 target sequence
GKPERSVQIHPDRIIILAEGGFDGSMFSGIPMLRAGYNSLIDMAKVSGSSAEGFLKNASRQLAVNYTKDNVTPASLAQSMGVDIE

SEQ ID NO: 28648 - protein, 85 aa, unidentified
  REGION 1..85: note = Description of Unknown:cds_NC_010495.1_cds_YP_001742041.1_4 target sequence
ELTDIMNENIEALNSGIDAAMFTMGADAKVLAVTPADPKPTWEVAANQFAASMALPFTVIFGQQTGRLASDEDKMQEAMTAKQRR

SEQ ID NO: 28649 - protein, 85 aa, unidentified
  REGION 1..85: note = Description of Unknown:cds_NC_010495.1_cds_YP_001742041.1_4 target sequence
ETWVDYVISMFVERMIQFGIVDKAPANGYKVKWDDLLAPSELDKAELLTKLATANKSFFDAGQSALLTVDEARGMVGMEPIELDE

SEQ ID NO: 28650 - protein, 85 aa, unidentified
  REGION 1..85: note = Description of Unknown:cds_NZ_WFIY01000004.1_cds_WP_155862593.1_366 target sequence
GVETVPSLRYLGGIIGTLLEGVITLDCMQENCVKEGLKRYNSMESFQRYEIYPAISASRGVLKDASNSPERIFRQGIMIKTTDTG

SEQ ID NO: 28651 - protein, 85 aa, unidentified
  REGION 1..85: note = Description of Unknown:cds_NZ_WFIY01000004.1_cds_WP_155862593.1_366 target sequence
EWFYIGGISPYWGHEQLIVYQGGSEASSQGKLNKSVIDDFVDKGGLGVVPLYKEKVPSVWYNPVLFKDCQGSFGIFWNYLGEFQG

SEQ ID NO: 28652 - protein, 85 aa, unidentified
  REGION 1..85: note = Description of Unknown:cds_NZ_WFIY01000004.1_cds_WP_155862593.1_366 target sequence
GVLSIFSNAPNILRYAEDLIKARKASLTYSSYGHYYLSRAAENDVMRPASDRYPYIYFALGTNPLVAKTHGLQIYPGFTFDTVTS

SEQ ID NO: 28653 - protein, 85 aa, unidentified
  REGION 1..85: note = Description of Unknown:cds_NZ_WFIY01000004.1_cds_WP_155862593.1_366 target sequence
DVSSCCCKIMPEPYCKSSFLDYIKFNEIDIGAPVYATLPCGTSCSTFGLAGLIMGISSMSVNNVQLIYLTIAQPPSDLTTSAIIE

SEQ ID NO: 28654 - protein, 85 aa, unidentified
  REGION 1..85: note = Description of Unknown:cds_NZ_WFIY01000004.1_cds_WP_155862593.1_366 target sequence
WAREMNIYDSLSKLFEAGKRFKKAIADLSTAFPQFIATAAALTVDWLESYDDGLKQAEDKAKELNELYNKVVEELAGKPPSITNR

SEQ ID NO: 28655 - protein, 84 aa, unidentified
  REGION 1..84: note = Description of Unknown:cds_NZ_WFIY01000004.1_cds_WP_155862593.1_366 target sequence
DWLESYDDGLKQAEDKAKELNELYNKVVEELAGKPPSITNRYVYDQWWKFKTRVEKCAKEIIVEYPDITYDELVKEVENCAEFE

SEQ ID NO: 28656 - protein, 85 aa, unidentified
  REGION 1..85: note = Description of Unknown:cds_NZ_WFIY01000004.1_cds_WP_155862593.1_366 target sequence
MQENCVKEGLKRYNSMESFQRYEIYPAISASRGVLKDASNSPERIFRQGIMIKTTDTGEWFYIGGISPYWGHEQLIVYQGGSEAS

SEQ ID NO: 28657 - protein, 85 aa, unidentified
  REGION 1..85: note = Description of Unknown:cds_NZ_WFIY01000004.1_cds_WP_155862593.1_366 target sequence
SQGKLNKSVIDDFVDKGGLGVVPLYKEKVPSVWYNPVLFKDCQGSFGIFWNYLGEFQGGVLSIFSNAPNILRYAEDLIKARKASL

SEQ ID NO: 28658 - protein, 85 aa, unidentified
  REGION 1..85: note = Description of Unknown:cds_NZ_WFIY01000004.1_cds_WP_155862593.1_366 target sequence
TYSSYGHYYLSRAAENDVMRPASDRYPYIYFALGTNPLVAKTHGLQIYPGFTFDTVTSDVSSCCCKIMPEPYCKSSFLDYIKFNE

SEQ ID NO: 28659 - protein, 85 aa, unidentified
  REGION 1..85: note = Description of Unknown:cds_NZ_WFIY01000004.1_cds_WP_155862593.1_366 target sequence
IDIGAPVYATLPCGTSCSTFGLAGLIMGISSMSVNNVQLIYLTIAQPPSDLTTSAIIEWAREMNIYDSLSKLFEAGKRFKKAIAD

SEQ ID NO: 28660 - protein, 85 aa, unidentified
  REGION 1..85: note = Description of Unknown:cds_NZ_WFIY01000004.1_cds_WP_155862593.1_366 target sequence
LSTAFPQFIATAAALTVDWLESYDDGLKQAEDKAKELNELYNKVVEELAGKPPSITNRYVYDQWWKFKTRVEKCAKEIIVEYPDI

SEQ ID NO: 28661 - protein, 85 aa, unidentified
  REGION 1..85: note = Description of Unknown:cds_NZ_WFIY01000004.1_cds_1116 target sequence
LLVIRVFNTLGRKFEDFSTVENGIVKMYVCGPTVYDYVHIGHGRTFVAYDAIVRYLRLKGYNVIRIQNITDIDDKIINRAKETGK

SEQ ID NO: 28662 - protein, 85 aa, unidentified
  REGION 1..85: note = Description of Unknown:cds_NZ_WFIY01000004.1_cds_1116 target sequence
SWEEIVDYYAKDYLENLSLLKVKIDLHPRVTQHIKEIIDFIQGLIEKGHAYVAPSGSVYFDVDTYPHYGELSNTKKDQWNQGEEF

SEQ ID NO: 28663 - protein, 85 aa, unidentified
  REGION 1..85: note = Description of Unknown:cds_NZ_WFIY01000004.1_cds_1116 target sequence
VKEKRHPYDFALWKAWKPGEPYWESPWGKGRPGWHIECSTMSTRYLGEQFDIHGGGMDLIFPHHENERAQTESLTGKLWVRYWMH

SEQ ID NO: 28664 - protein, 85 aa, unidentified
  REGION 1..85: note = Description of Unknown:cds_NZ_WFIY01000004.1_cds_1116 target sequence
VAFLNIRGEKMSKSLGNIITLKDALKKYGADVLRYWYLSSHYRSPIDFSEENLEQSKVSLQRLKDAVAILKDILKEGPKSYSKDE

SEQ ID NO: 28665 - protein, 85 aa, unidentified
  REGION 1..85: note = Description of Unknown:cds_NZ_WFIY01000004.1_cds_1116 target sequence
DIKVQREIIQKIREFDEAMSNDFDTATALKKIHEIANIVFSKLQNSRDFLGASIALDGFRIFNEVFGVMDEEMGLAYERIYEVID

SEQ ID NO: 28666 - protein, 84 aa, unidentified
  REGION 1..84: note = Description of Unknown:cds_NZ_WFIY01000004.1_cds_1116 target sequence
SRDFLGASIALDGFRIFNEVFGVMDEEMGLAYERIYEVIDGIIEVRNLLRQKKMYDLSDQIRSILESHGIKVLDTKDKSTWRFQ

SEQ ID NO: 28667 - protein, 85 aa, unidentified
  REGION 1..85: note = Description of Unknown:cds_NZ_WFIY01000004.1_cds_1116 target sequence
YVCGPTVYDYVHIGHGRTFVAYDAIVRYLRLKGYNVIRIQNITDIDDKIINRAKETGKSWEEIVDYYAKDYLENLSLLKVKIDLH

SEQ ID NO: 28668 - protein, 85 aa, unidentified
  REGION 1..85: note = Description of Unknown:cds_NZ_WFIY01000004.1_cds_1116 target sequence
PRVTQHIKEIIDFIQGLIEKGHAYVAPSGSVYFDVDTYPHYGELSNTKKDQWNQGEEFVKEKRHPYDFALWKAWKPGEPYWESPW

SEQ ID NO: 28669 - protein, 85 aa, unidentified
  REGION 1..85: note = Description of Unknown:cds_NZ_WFIY01000004.1_cds_1116 target sequence
GKGRPGWHIECSTMSTRYLGEQFDIHGGGMDLIFPHHENERAQTESLTGKLWVRYWMHVAFLNIRGEKMSKSLGNIITLKDALKK

SEQ ID NO: 28670 - protein, 85 aa, unidentified
  REGION 1..85: note = Description of Unknown:cds_NZ_WFIY01000004.1_cds_1116 target sequence
YGADVLRYWYLSSHYRSPIDFSEENLEQSKVSLQRLKDAVAILKDILKEGPKSYSKDEDIKVQREIIQKIREFDEAMSNDFDTAT

SEQ ID NO: 28671 - protein, 85 aa, unidentified
  REGION 1..85: note = Description of Unknown:cds_NZ_WFIY01000004.1_cds_1116 target sequence
ALKKIHEIANIVFSKLQNSRDFLGASIALDGFRIFNEVFGVMDEEMGLAYERIYEVIDGIIEVRNLLRQKKMYDLSDQIRSILES

SEQ ID NO: 28672 - protein, 85 aa, unidentified
  REGION 1..85: note = Description of Unknown:cds_NZ_WFIY01000004.1_cds_WP_155864062.1_1999 target sequence
KVVIVGAGIGGLSTALYLSKKGEEVTVIEKLDQPGGRARSFSYEEFSFDMGPSWYLMPEVFEKFFHEVGEEPPQIMKLNPLFSLY

SEQ ID NO: 28673 - protein, 85 aa, unidentified
  REGION 1..85: note = Description of Unknown:cds_NZ_WFIY01000004.1_cds_WP_155864062.1_1999 target sequence
TGKLNVLERKEEFYDDLSQFKDFESYLEDTQFMYNLAMEKFLFKEVKFSDFLDPTIIKNLKRFPIFTSLDSFNRKYFSDDFLLKA

SEQ ID NO: 28674 - protein, 85 aa, unidentified
  REGION 1..85: note = Description of Unknown:cds_NZ_WFIY01000004.1_cds_WP_155864062.1_1999 target sequence
LDFSSVFLGGSPFNIPAFYAMVNYAIYGKGVYYPKGGFAGYVKKLFEACKRSGVQFKFNREVNKIDVDNDKVISVRSGEYVERGD

SEQ ID NO: 28675 - protein, 85 aa, unidentified
  REGION 1..85: note = Description of Unknown:cds_NZ_WFIY01000004.1_cds_WP_155864062.1_1999 target sequence
VFIFNMDYHYADTLLPIEYTMRGESYWERRKLSPSAILAYVGVEGEINATHHGIFINGDWKLHFDSISKGKELDPENMSYYVSYR

SEQ ID NO: 28676 - protein, 85 aa, unidentified
  REGION 1..85: note = Description of Unknown:cds_NZ_WFIY01000004.1_cds_WP_155864062.1_1999 target sequence
KATDSSLKGKDLVFLIPTPAGLSLPNYQVYVRKVIDDFKAKTRSNFQIKYEKIYTAVNFEEDYNAYKGSAFGLAHTLDQTGPFRL

SEQ ID NO: 28677 - protein, 84 aa, unidentified
  REGION 1..84: note = Description of Unknown:cds_NZ_WFIY01000004.1_cds_WP_155864062.1_1999 target sequence
NFQIKYEKIYTAVNFEEDYNAYKGSAFGLAHTLDQTGPFRLPMKNRKLKNLFYVGQYTQPGIGVPMVTISAMIVGDKVLNWSKK

SEQ ID NO: 28678 - protein, 85 aa, unidentified
  REGION 1..85: note = Description of Unknown:cds_NZ_WFIY01000004.1_cds_WP_155864062.1_1999 target sequence
IEKLDQPGGRARSFSYEEFSFDMGPSWYLMPEVFEKFFHEVGEEPPQIMKLNPLFSLYTGKLNVLERKEEFYDDLSQFKDFESYL

SEQ ID NO: 28679 - protein, 85 aa, unidentified
  REGION 1..85: note = Description of Unknown:cds_NZ_WFIY01000004.1_cds_WP_155864062.1_1999 target sequence
EDTQFMYNLAMEKFLFKEVKFSDFLDPTIIKNLKRFPIFTSLDSFNRKYFSDDFLLKALDFSSVFLGGSPFNIPAFYAMVNYAIY

SEQ ID NO: 28680 - protein, 85 aa, unidentified
  REGION 1..85: note = Description of Unknown:cds_NZ_WFIY01000004.1_cds_WP_155864062.1_1999 target sequence
GKGVYYPKGGFAGYVKKLFEACKRSGVQFKFNREVNKIDVDNDKVISVRSGEYVERGDVFIFNMDYHYADTLLPIEYTMRGESYW

SEQ ID NO: 28681 - protein, 85 aa, unidentified
  REGION 1..85: note = Description of Unknown:cds_NZ_WFIY01000004.1_cds_WP_155864062.1_1999 target sequence
ERRKLSPSAILAYVGVEGEINATHHGIFINGDWKLHFDSISKGKELDPENMSYYVSYRKATDSSLKGKDLVFLIPTPAGLSLPNY

SEQ ID NO: 28682 - protein, 85 aa, unidentified
  REGION 1..85: note = Description of Unknown:cds_NZ_WFIY01000004.1_cds_WP_155864062.1_1999 target sequence
QVYVRKVIDDFKAKTRSNFQIKYEKIYTAVNFEEDYNAYKGSAFGLAHTLDQTGPFRLPMKNRKLKNLFYVGQYTQPGIGVPMVT

SEQ ID NO: 28683 - protein, 85 aa, unidentified
  REGION 1..85: note = Description of Unknown:cds_NZ_WFIY01000004.1_cds_WP_155864308.1_2304 target sequence
NPIKNALKSLSVTITNVLIALIFFIVTAKISNPAFFGKVAIIQLLEVVTSAFFYFIPGQIITREISYLYAKKEVNKGVVGKFLSF

SEQ ID NO: 28684 - protein, 85 aa, unidentified
  REGION 1..85: note = Description of Unknown:cds_NZ_WFIY01000004.1_cds_WP_155864308.1_2304 target sequence
PFLAIPVFLLFLLFPNYVKLAIPYLFLYLLNNVLVAIMIGMDMFTETAITGNLFLIIRWGISIIAVLSHNIYLFVEIWILGGVLS

SEQ ID NO: 28685 - protein, 85 aa, unidentified
  REGION 1..85: note = Description of Unknown:cds_NZ_WFIY01000004.1_cds_WP_155864308.1_2304 target sequence
VLLNYSFLSRKVGLVLPSLDFAFLFKHFKEGLPLYLSSSANFLSSQGDRVTTAYLLGSYYLGLYQFSALVAGVPAMVLGALGGVL

SEQ ID NO: 28686 - protein, 85 aa, unidentified
  REGION 1..85: note = Description of Unknown:cds_NZ_WFIY01000004.1_cds_WP_155864308.1_2304 target sequence
LPTASFYKALGSDEKKMSSISFRVLALISFLSVIISIPIAILVVERFFPDYTEGIRVLILLLLATTLPFPINSLTNFIIAAKKSL

SEQ ID NO: 28687 - protein, 85 aa, unidentified
  REGION 1..85: note = Description of Unknown:cds_NZ_WFIY01000004.1_cds_WP_155864308.1_2304 target sequence
RPFLFLSLLNAGVVLLTSFLLIPRIGIMGGAISQVIVAVISSSFILVYALRTSTFILGKREGILLTAMPLIALYEVFVDPPYLDL

SEQ ID NO: 28688 - protein, 84 aa, unidentified
  REGION 1..84: note = Description of Unknown:cds_NZ_WFIY01000004.1_cds_WP_155864308.1_2304 target sequence
ILVYALRTSTFILGKREGILLTAMPLIALYEVFVDPPYLDLLLLLSVIVLFKLFKIISTEEVRLIESFLPSKLKFIASLLKVIN

SEQ ID NO: 28689 - protein, 85 aa, unidentified
  REGION 1..85: note = Description of Unknown:cds_NZ_WFIY01000004.1_cds_WP_155864308.1_2304 target sequence
AKISNPAFFGKVAIIQLLEVVTSAFFYFIPGQIITREISYLYAKKEVNKGVVGKFLSFPFLAIPVFLLFLLFPNYVKLAIPYLFL

SEQ ID NO: 28690 - protein, 85 aa, unidentified
  REGION 1..85: note = Description of Unknown:cds_NZ_WFIY01000004.1_cds_WP_155864308.1_2304 target sequence
YLLNNVLVAIMIGMDMFTETAITGNLFLIIRWGISIIAVLSHNIYLFVEIWILGGVLSVLLNYSFLSRKVGLVLPSLDFAFLFKH

SEQ ID NO: 28691 - protein, 85 aa, unidentified
  REGION 1..85: note = Description of Unknown:cds_NZ_WFIY01000004.1_cds_WP_155864308.1_2304 target sequence
FKEGLPLYLSSSANFLSSQGDRVTTAYLLGSYYLGLYQFSALVAGVPAMVLGALGGVLLPTASFYKALGSDEKKMSSISFRVLAL

SEQ ID NO: 28692 - protein, 85 aa, unidentified
  REGION 1..85: note = Description of Unknown:cds_NZ_WFIY01000004.1_cds_WP_155864308.1_2304 target sequence
ISFLSVIISIPIAILVVERFFPDYTEGIRVLILLLLATTLPFPINSLTNFIIAAKKSLRPFLFLSLLNAGVVLLTSFLLIPRIGI

SEQ ID NO: 28693 - protein, 85 aa, unidentified
  REGION 1..85: note = Description of Unknown:cds_NZ_WFIY01000004.1_cds_WP_155864308.1_2304 target sequence
MGGAISQVIVAVISSSFILVYALRTSTFILGKREGILLTAMPLIALYEVFVDPPYLDLLLLLSVIVLFKLFKIISTEEVRLIESF

SEQ ID NO: 28694 - protein, 85 aa, unidentified
  REGION 1..85: note = Description of Unknown:cds_NZ_WFIY01000001.1_cds_WP_155862273.1_2382 target sequence
NPIKNALKSLSVTATNVLIALIFFIVTAKISNPAFFGKVAIIQLLEVVTFTFFYFIPHQVITREISYLYAKKEVNKGVVGKFLSF

SEQ ID NO: 28695 - protein, 85 aa, unidentified
  REGION 1..85: note = Description of Unknown:cds_NZ_WFIY01000001.1_cds_WP_155862273.1_2382 target sequence
PFLAIPVFLIFLLFPNYVKLAIPYLFLYLLNNVLVAIMIGMDMFTETAITGNLFLIIRWGISIIAVLSHNIYLFVEIWILGGVLS

SEQ ID NO: 28696 - protein, 85 aa, unidentified
  REGION 1..85: note = Description of Unknown:cds_NZ_WFIY01000001.1_cds_WP_155862273.1_2382 target sequence
VLLNYSFLSRKVGLVLPSLDFAFLFKHFKEGLPLYLSSSATFLSSQGDRVTTAYLLGSYYLGLYQFSALVAGVPAMVLGALGGVL

SEQ ID NO: 28697 - protein, 85 aa, unidentified
  REGION 1..85: note = Description of Unknown:cds_NZ_WFIY01000001.1_cds_WP_155862273.1_2382 target sequence
LPTASFYKALGSDEKKMSSISFRVLALISFLSVIISIPVAILVVERFFPDYTEGIRVLILLLLATTLPFPINSLTNFIIAAKKSL

SEQ ID NO: 28698 - protein, 85 aa, unidentified
  REGION 1..85: note = Description of Unknown:cds_NZ_WFIY01000001.1_cds_WP_155862273.1_2382 target sequence
RPFLFLSLLNASVVLLTSFLLIPRIGIMGGAISQVIVAVISSSFILVYALRTSTFILGKREGILLTAMPLIALYEVFVDPPYLDL

SEQ ID NO: 28699 - protein, 84 aa, unidentified; identical to SEQ ID NO: 28688
  REGION 1..84: note = Description of Unknown:cds_NZ_WFIY01000001.1_cds_WP_155862273.1_2382 target sequence

SEQ ID NO: 28700 - protein, 85 aa, unidentified
  REGION 1..85: note = Description of Unknown:cds_NZ_WFIY01000001.1_cds_WP_155862273.1_2382 target sequence
AKISNPAFFGKVAIIQLLEVVTFTFFYFIPHQVITREISYLYAKKEVNKGVVGKFLSFPFLAIPVFLIFLLFPNYVKLAIPYLFL

SEQ ID NO: 28701 - protein, 85 aa, unidentified; identical to SEQ ID NO: 28690
  REGION 1..85: note = Description of Unknown:cds_NZ_WFIY01000001.1_cds_WP_155862273.1_2382 target sequence

SEQ ID NO: 28702 - protein, 85 aa, unidentified
  REGION 1..85: note = Description of Unknown:cds_NZ_WFIY01000001.1_cds_WP_155862273.1_2382 target sequence
FKEGLPLYLSSSATFLSSQGDRVTTAYLLGSYYLGLYQFSALVAGVPAMVLGALGGVLLPTASFYKALGSDEKKMSSISFRVLAL

SEQ ID NO: 28703 - protein, 85 aa, unidentified
  REGION 1..85: note = Description of Unknown:cds_NZ_WFIY01000001.1_cds_WP_155862273.1_2382 target sequence
ISFLSVIISIPVAILVVERFFPDYTEGIRVLILLLLATTLPFPINSLTNFIIAAKKSLRPFLFLSLLNASVVLLTSFLLIPRIGI

SEQ ID NO: 28704 - protein, 85 aa, unidentified; identical to SEQ ID NO: 28693
  REGION 1..85: note = Description of Unknown:cds_NZ_WFIY01000001.1_cds_WP_155862273.1_2382 target sequence

SEQ ID NO: 28705 - protein, 85 aa, unidentified
  REGION 1..85: note = Description of Unknown:cds_NZ_WFIY01000004.1_cds_WP_155863106.1_1023 target sequence
LSENEIKIIDFLKKKDNKSAYSTELSSIIPETAVFSLAYLLKDKGYVNVKEEEKEDIILTKEGEERLKEGLPEDNLMNFLKGESK

SEQ ID NO: 28706 - protein, 85 aa, unidentified
  REGION 1..85: note = Description of Unknown:cds_NZ_WFIY01000004.1_cds_WP_155863106.1_1023 target sequence
KIQEIAKSFKDFNIALSWAKKKGLVKVDKGEIIPLKSSYISPEYIVLKKISSSQDLSEEDKKYLKELENRGLIEIKKNKVLLLTL

SEQ ID NO: 28707 - protein, 85 aa, unidentified
  REGION 1..85: note = Description of Unknown:cds_NZ_WFIY01000004.1_cds_WP_155863106.1_1023 target sequence
LKEPEIRPAITYLTPELLRNKEWTKYELKEYNVEALPPFIPLGKKHYFKEFLEHVKDVMVSLGFKEVKSDFVEMEFYNFDMLFQA

SEQ ID NO: 28708 - protein, 85 aa, unidentified
  REGION 1..85: note = Description of Unknown:cds_NZ_WFIY01000004.1_cds_WP_155863106.1_1023 target sequence
QDHPAREIHDSFKVDGKGELSNQSLVKRVKEVHEKWWKYNWNQEVAKSLVLRSQTTATTARVLSTSPNKEIKVFTIGKVFRPDAI

SEQ ID NO: 28709 - protein, 85 aa, unidentified
  REGION 1..85: note = Description of Unknown:cds_NZ_WFIY01000004.1_cds_WP_155863106.1_1023 target sequence
DATHLIEFHQLDGLVIEENFNFRELLSTLRAIFSGIGIKEVKFKPAYFPFTEPSVEVYGYIQGLGWVEMAGAGLLRPEVTEPAGV

SEQ ID NO: 28710 - protein, 84 aa, unidentified
  REGION 1..84: note = Description of Unknown:cds_NZ_WFIY01000004.1_cds_WP_155863106.1_1023 target sequence
KPAYFPFTEPSVEVYGYIQGLGWVEMAGAGLLRPEVTEPAGVTMPAGAWGLGLDRLAMLFLGIKDIRDLYSDDIEYLRNRKVEY

SEQ ID NO: 28711 - protein, 85 aa, unidentified
  REGION 1..85: note = Description of Unknown:cds_NZ_WFIY01000004.1_cds_WP_155863106.1_1023 target sequence
IIPETAVFSLAYLLKDKGYVNVKEEEKEDIILTKEGEERLKEGLPEDNLMNFLKGESKKIQEIAKSFKDFNIALSWAKKKGLVKV

SEQ ID NO: 28712 - protein, 85 aa, unidentified
  REGION 1..85: note = Description of Unknown:cds_NZ_WFIY01000004.1_cds_WP_155863106.1_1023 target sequence
DKGEIIPLKSSYISPEYIVLKKISSSQDLSEEDKKYLKELENRGLIEIKKNKVLLLTLLKEPEIRPAITYLTPELLRNKEWTKYE

SEQ ID NO: 28713 - protein, 85 aa, unidentified
  REGION 1..85: note = Description of Unknown:cds_NZ_WFIY01000004.1_cds_WP_155863106.1_1023 target sequence
LKEYNVEALPPFIPLGKKHYFKEFLEHVKDVMVSLGFKEVKSDFVEMEFYNFDMLFQAQDHPAREIHDSFKVDGKGELSNQSLVK

SEQ ID NO: 28714 - protein, 85 aa, unidentified
  REGION 1..85: note = Description of Unknown:cds_NZ_WFIY01000004.1_cds_WP_155863106.1_1023 target sequence
RVKEVHEKWWKYNWNQEVAKSLVLRSQTTATTARVLSTSPNKEIKVFTIGKVFRPDAIDATHLIEFHQLDGLVIEENFNFRELLS

SEQ ID NO: 28715 - protein, 85 aa, unidentified
  REGION 1..85: note = Description of Unknown:cds_NZ_WFIY01000004.1_cds_WP_155863106.1_1023 target sequence
TLRAIFSGIGIKEVKFKPAYFPFTEPSVEVYGYIQGLGWVEMAGAGLLRPEVTEPAGVTMPAGAWGLGLDRLAMLFLGIKDIRDL

SEQ ID NO: 28716 - protein, 85 aa, unidentified
  REGION 1..85: note = Description of Unknown:cds_NZ_WFIY01000004.1_cds_WP_155864087.1_2032 target sequence
DRVSLVTLIVVLGTMMAAIDSTIVILALPVMLQCLHTDLLTLIWIILIYLLTIAVLTTQLGRLGDRFGRGKIYNLGFLIFTIGSA

SEQ ID NO: 28717 - protein, 85 aa, unidentified
  REGION 1..85: note = Description of Unknown:cds_NZ_WFIY01000004.1_cds_WP_155864087.1_2032 target sequence
LCGASPNASFLISSRAVQAIGASMLQANSGAIIADNYPPNRRGKAYGYTSIGWNVGAILGIILGGILTTFVGWRYIFYINVPIGI

SEQ ID NO: 28718 - protein, 85 aa, unidentified
  REGION 1..85: note = Description of Unknown:cds_NZ_WFIY01000004.1_cds_WP_155864087.1_2032 target sequence
IATILGLREIKDSRMVNAKFDILGVIILASSLILITYGASEIAGVGITPFNLFLIILGIILLFPFYLVEKRQPFPVIDFKVFKNR

SEQ ID NO: 28719 - protein, 85 aa, unidentified
  REGION 1..85: note = Description of Unknown:cds_NZ_WFIY01000004.1_cds_WP_155864087.1_2032 target sequence
VLTASLLASFLQSSGYLATAFILIMYLQGIRGLTPFNASLLLVPGYVLASMVGPITGRLSDKIGARIPATIGIGLMIIAAFIYSN

SEQ ID NO: 28720 - protein, 85 aa, unidentified
  REGION 1..85: note = Description of Unknown:cds_NZ_WFIY01000004.1_cds_WP_155864087.1_2032 target sequence
LTLTTPYYVIIVTSIIGGLGSSFFYPANNSAIMSNAPRSIYGGISGIMRTLANIGILISYVIAISIASISIPRYVAFEVFLGTYS

SEQ ID NO: 28721 - protein, 84 aa, unidentified
  REGION 1..84: note = Description of Unknown:cds_NZ_WFIY01000004.1_cds_WP_155864087.1_2032 target sequence
ISGIMRTLANIGILISYVIAISIASISIPRYVAFEVFLGTYSLGELSSKFLIGIHSAFYASIVILSIALVLSAIRGKEERSYLS

SEQ ID NO: 28722 - protein, 85 aa, unidentified
  REGION 1..85: note = Description of Unknown:cds_NZ_WFIY01000004.1_cds_WP_155864087.1_2032 target sequence
LPVMLQCLHTDLLTLIWIILIYLLTIAVLTTQLGRLGDRFGRGKIYNLGFLIFTIGSALCGASPNASFLISSRAVQAIGASMLQA

SEQ ID NO: 28723 - protein, 85 aa, unidentified
  REGION 1..85: note = Description of Unknown:cds_NZ_WFIY01000004.1_cds_WP_155864087.1_2032 target sequence
NSGAIIADNYPPNRRGKAYGYTSIGWNVGAILGIILGGILTTFVGWRYIFYINVPIGIIATILGLREIKDSRMVNAKFDILGVII

SEQ ID NO: 28724 - protein, 85 aa, unidentified
  REGION 1..85: note = Description of Unknown:cds_NZ_WFIY01000004.1_cds_WP_155864087.1_2032 target sequence
LASSLILITYGASEIAGVGITPFNLFLIILGIILLFPFYLVEKRQPFPVIDFKVFKNRVLTASLLASFLQSSGYLATAFILIMYL

SEQ ID NO: 28725 - protein, 85 aa, unidentified
  REGION 1..85: note = Description of Unknown:cds_NZ_WFIY01000004.1_cds_WP_155864087.1_2032 target sequence
QGIRGLTPFNASLLLVPGYVLASMVGPITGRLSDKIGARIPATIGIGLMIIAAFIYSNLTLTTPYYVIIVTSIIGGLGSSFFYPA

SEQ ID NO: 28726 - protein, 85 aa, unidentified
  REGION 1..85: note = Description of Unknown:cds_NZ_WFIY01000004.1_cds_WP_155864087.1_2032 target sequence
NNSAIMSNAPRSIYGGISGIMRTLANIGILISYVIAISIASISIPRYVAFEVFLGTYSLGELSSKFLIGIHSAFYASIVILSIAL

SEQ ID NO: 28727 - protein, 85 aa, unidentified
  REGION 1..85: note = Description of Unknown:cds_NZ_WFIY01000004.1_cds_WP_155864477.1_2048 target sequence
ATHVLFTYWAIALPFFIISAEYLAYKKNDPYYLAIAKRWSVVMAVLFAVGSAAGAAIAVEFITVWYKWMYLVNQIDILPFDIEVL

SEQ ID NO: 28728 - protein, 85 aa, unidentified
  REGION 1..85: note = Description of Unknown:cds_NZ_WFIY01000004.1_cds_WP_155864477.1_2048 target sequence
AFFSEVIFLALYLYGWDRMSRTAHMIVGGLIGLGSSASAVLIILVNSWMNTPTGFNIQAYLQNGQLVGVDPLAASLPTIALAEVP

SEQ ID NO: 28729 - protein, 85 aa, unidentified
  REGION 1..85: note = Description of Unknown:cds_NZ_WFIY01000004.1_cds_WP_155864477.1_2048 target sequence
MGLAGAWFVGFGSIAGYFAFRKLTKKDMTTDEKEYYNRGLKLATYLGALDAIFLAWAGDNAGKMLYLYQPLKLATLEGVMQTAAG

SEQ ID NO: 28730 - protein, 85 aa, unidentified
  REGION 1..85: note = Description of Unknown:cds_NZ_WFIY01000004.1_cds_WP_155864477.1_2048 target sequence
APMQVGPITIPNLLSLLATWPPNPHATVLGYSSFVQTDWDPIWYISHTAYDLHATLGIIGALVVWILAYSFWKQPKNALFKAFGL

SEQ ID NO: 28731 - protein, 85 aa, unidentified
  REGION 1..85: note = Description of Unknown:cds_NZ_WFIY01000004.1_cds_WP_155864477.1_2048 target sequence
DNPAEKKIPLYAMFFLGWLQVVAWEAGWVAAETGRQPFVIWGPMVQTASGLYEIQAVMLTADAFNNSPEVLPIGIAIMVVLALAV

SEQ ID NO: 28732 - protein, 84 aa, unidentified
  REGION 1..84: note = Description of Unknown:cds_NZ_WFIY01000004.1_cds_WP_155864477.1_2048 target sequence
MVQTASGLYEIQAVMLTADAFNNSPEVLPIGIAIMVVLALAVAGTIYMLKKLFTGKEVSADVSSARLIMAANVGGSSSLNVKRK

SEQ ID NO: 28733 - protein, 85 aa, unidentified
  REGION 1..85: note = Description of Unknown:cds_NZ_WFIY01000004.1_cds_WP_155864477.1_2048 target sequence
NDPYYLAIAKRWSVVMAVLFAVGSAAGAAIAVEFITVWYKWMYLVNQIDILPFDIEVLAFFSEVIFLALYLYGWDRMSRTAHMIV

SEQ ID NO: 28734 - protein, 85 aa, unidentified
  REGION 1..85: note = Description of Unknown:cds_NZ_WFIY01000004.1_cds_WP_155864477.1_2048 target sequence
GGLIGLGSSASAVLIILVNSWMNTPTGFNIQAYLQNGQLVGVDPLAASLPTIALAEVPMGLAGAWFVGFGSIAGYFAFRKLTKKD

SEQ ID NO: 28735 - protein, 85 aa, unidentified
  REGION 1..85: note = Description of Unknown:cds_NZ_WFIY01000004.1_cds_WP_155864477.1_2048 target sequence
MTTDEKEYYNRGLKLATYLGALDAIFLAWAGDNAGKMLYLYQPLKLATLEGVMQTAAGAPMQVGPITIPNLLSLLATWPPNPHAT

SEQ ID NO: 28736 - protein, 85 aa, unidentified
  REGION 1..85: note = Description of Unknown:cds_NZ_WFIY01000004.1_cds_WP_155864477.1_2048 target sequence
VLGYSSFVQTDWDPIWYISHTAYDLHATLGIIGALVVWILAYSFWKQPKNALFKAFGLDNPAEKKIPLYAMFFLGWLQVVAWEAG

SEQ ID NO: 28737 - protein, 85 aa, unidentified
  REGION 1..85: note = Description of Unknown:cds_NZ_WFIY01000004.1_cds_WP_155864477.1_2048 target sequence
WVAAETGRQPFVIWGPMVQTASGLYEIQAVMLTADAFNNSPEVLPIGIAIMVVLALAVAGTIYMLKKLFTGKEVSADVSSARLIM

SEQ ID NO: 28738 - protein, 85 aa, unidentified
  REGION 1..85: note = Description of Unknown:hvTR_Q6QCJ5 target sequence
DTILAGGSGTSDASDNTCTICMSTVSDLGKTMPCLHDFCFVCIRAWTSTSVQCPLCRCPVQSILHKIVSDTSYKEYEVHPSDDDG

SEQ ID NO: 28739 - protein, 85 aa, unidentified
  REGION 1..85: note = Description of Unknown:hvTR_Q6QCJ5 target sequence
FSEPSFEDSIDILPGDVIDLLPPSPGPSRESIQQPTSRSSREPIQSPNPGPLQSSAREPTAESPSDSQQDSIQPPTRDSSPGVTK

SEQ ID NO: 28740 - protein, 85 aa, unidentified
  REGION 1..85: note = Description of Unknown:hvTR_Q6QCJ5 target sequence
TCSTASFLRKVFFKDQPAVRSATPVVYGSIESAQQPRTGGQDYRDRPVSVGINQDPRTMDRLPFRATDRGTEGNARFPCYMQPLL

SEQ ID NO: 28741 - protein, 85 aa, unidentified
  REGION 1..85: note = Description of Unknown:hvTR_Q6QCJ5 target sequence
GWLDDQLAELYQPEIVEPTKMLILNYIGIYGRDEAGLKTSLRCLLHDSTGPFVTNMLFLLDRCTDPTRLTMQTWTWKDTAIQLIT

SEQ ID NO: 28742 - protein, 85 aa, unidentified
  REGION 1..85: note = Description of Unknown:hvTR_Q6QCJ5 target sequence
GPIVRPETTSTGETSRGDERDTRLVNTPQKVRLFSVLPGIKPGSARGAKRRLFHTGRDVKRCLTIDLTSESDSACKGSKTRKVAS

SEQ ID NO: 28743 - protein, 84 aa, unidentified
  REGION 1..84: note = Description of Unknown:hvTR_Q6QCJ5 target sequence
GSARGAKRRLFHTGRDVKRCLTIDLTSESDSACKGSKTRKVASPQGESNTPSTSGSTSGSLKHLTKKSSAGKAGKGIPNKMKKS

SEQ ID NO: 28744 - protein, 85 aa, unidentified
  REGION 1..85: note = Description of Unknown:hvTR_Q6QCJ5 target sequence
LGKTMPCLHDFCFVCIRAWTSTSVQCPLCRCPVQSILHKIVSDTSYKEYEVHPSDDDGFSEPSFEDSIDILPGDVIDLLPPSPGP

SEQ ID NO: 28745 - protein, 85 aa, unidentified
  REGION 1..85: note = Description of Unknown:hvTR_Q6QCJ5 target sequence
SRESIQQPTSRSSREPIQSPNPGPLQSSAREPTAESPSDSQQDSIQPPTRDSSPGVTKTCSTASFLRKVFFKDQPAVRSATPVVY

SEQ ID NO: 28746 - protein, 85 aa, unidentified
  REGION 1..85: note = Description of Unknown:hvTR_Q6QCJ5 target sequence
GSIESAQQPRTGGQDYRDRPVSVGINQDPRTMDRLPFRATDRGTEGNARFPCYMQPLLGWLDDQLAELYQPEIVEPTKMLILNYI

SEQ ID NO: 28747 - protein, 85 aa, unidentified
  REGION 1..85: note = Description of Unknown:hvTR_Q6QCJ5 target sequence
GIYGRDEAGLKTSLRCLLHDSTGPFVTNMLFLLDRCTDPTRLTMQTWTWKDTAIQLITGPIVRPETTSTGETSRGDERDTRLVNT

SEQ ID NO: 28748 - protein, 85 aa, unidentified
  REGION 1..85: note = Description of Unknown:hvTR_Q6QCJ5 target sequence
PQKVRLFSVLPGIKPGSARGAKRRLFHTGRDVKRCLTIDLTSESDSACKGSKTRKVASPQGESNTPSTSGSTSGSLKHLTKKSSA

SEQ ID NO: 28749 - protein, 85 aa, unidentified
  REGION 1..85: note = Description of Unknown:cds_NZ_WFIY01000004.1_cds_WP_155862714.1_514 target sequence
RLSKGSISLKEAYGQAMAVTAPLGSVVSTSTAAILYAGYSVVFTTLLALLGSALWIYTLTRYTSKLASAGGFYTYGYSAWRSKKI

SEQ ID NO: 28750 - protein, 85 aa, unidentified
  REGION 1..85: note = Description of Unknown:cds_NZ_WFIY01000004.1_cds_WP_155862714.1_514 target sequence
SFFEALIEAFAYSFLNAVNAITAYLIISISLGIFGISLTPIEEGIIIFLAILYPTIISLSHIKFVLGKIVSISATAEAALLIAMF

SEQ ID NO: 28751 - protein, 85 aa, unidentified
  REGION 1..85: note = Description of Unknown:cds_NZ_WFIY01000004.1_cds_WP_155862714.1_514 target sequence
AFSLTKGFHFNYLTPGNVPAHDLATAFVLSMVSISGAGAATYLGEEAKNPTKTVTLGMWLSLLIGGTAMFLGTYALVALWNGPLS

SEQ ID NO: 28752 - protein, 85 aa, unidentified
  REGION 1..85: note = Description of Unknown:cds_NZ_WFIY01000004.1_cds_WP_155862714.1_514 target sequence
ALSNSPQPLIYEMYSFGVLPLLIALIMSINSLFASNIGTTLGAARIIFNLSREKSAPVIFSKVNKSHEPVIATIFVGSITGLVTV

SEQ ID NO: 28753 - protein, 85 aa, unidentified
  REGION 1..85: note = Description of Unknown:cds_NZ_WFIY01000004.1_cds_WP_155862714.1_514 target sequence
LSVIFLGINTAFADISAITGILWLSGRIIDGFGVPVFYYRIGQLGLFNAIIPLIATGLNLWGVTETISVPDIASIVILTSTMVVL

SEQ ID NO: 28754 - protein, 84 aa, unidentified
  REGION 1..84: note = Description of Unknown:cds_NZ_WFIY01000004.1_cds_WP_155862714.1_514 target sequence
QLGLFNAIIPLIATGLNLWGVTETISVPDIASIVILTSTMVVLVGWYLLKGRKGNPGSLVVDDNNEVISIDEYLKKLKEKSVTT

SEQ ID NO: 28755 - protein, 85 aa, unidentified
  REGION 1..85: note = Description of Unknown:cds_NZ_WFIY01000004.1_cds_WP_155862714.1_514 target sequence
STSTAAILYAGYSVVFTTLLALLGSALWIYTLTRYTSKLASAGGFYTYGYSAWRSKKISFFEALIEAFAYSFLNAVNAITAYLII

SEQ ID NO: 28756 - protein, 85 aa, unidentified
  REGION 1..85: note = Description of Unknown:cds_NZ_WFIY01000004.1_cds_WP_155862714.1_514 target sequence
SISLGIFGISLTPIEEGIIIFLAILYPTIISLSHIKFVLGKIVSISATAEAALLIAMFAFSLTKGFHFNYLTPGNVPAHDLATAF

SEQ ID NO: 28757 - protein, 85 aa, unidentified
  REGION 1..85: note = Description of Unknown:cds_NZ_WFIY01000004.1_cds_WP_155862714.1_514 target sequence
VLSMVSISGAGAATYLGEEAKNPTKTVTLGMWLSLLIGGTAMFLGTYALVALWNGPLSALSNSPQPLIYEMYSFGVLPLLIALIM

SEQ ID NO: 28758 - protein, 85 aa, unidentified
  REGION 1..85: note = Description of Unknown:cds_NZ_WFIY01000004.1_cds_WP_155862714.1_514 target sequence
SINSLFASNIGTTLGAARIIFNLSREKSAPVIFSKVNKSHEPVIATIFVGSITGLVTVLSVIFLGINTAFADISAITGILWLSGR

SEQ ID NO: 28759 - protein, 85 aa, unidentified
  REGION 1..85: note = Description of Unknown:cds_NZ_WFIY01000004.1_cds_WP_155862714.1_514 target sequence
IIDGFGVPVFYYRIGQLGLFNAIIPLIATGLNLWGVTETISVPDIASIVILTSTMVVLVGWYLLKGRKGNPGSLVVDDNNEVISI

SEQ ID NO: 28760 - protein, 85 aa, unidentified
  REGION 1..85: note = Description of Unknown:cds_NZ_WFIY01000004.1_cds_WP_155863081.1_993 target sequence
KYIKSKKHKRYRFPKDCEEGLPYTEVIEDGKRIKVCENFEKYFHYSNHFSINFSSSIIHSKFLRSQFILNNIPRFLNLPEYYNEN

SEQ ID NO: 28761 - protein, 85 aa, unidentified
  REGION 1..85: note = Description of Unknown:cds_NZ_WFIY01000004.1_cds_WP_155863081.1_993 target sequence
REIKIEINDKIDEIIIGEGISGLSALENCKNCILISPNFDDEIFLDPLCKDCSLKDKIKSIIKNNSNKIVYGRFIGRFDEGLVFR

SEQ ID NO: 28762 - protein, 85 aa, unidentified
  REGION 1..85: note = Description of Unknown:cds_NZ_WFIY01000004.1_cds_WP_155863081.1_993 target sequence
LKDNYLVIRKPAKVILASGSRFLPPVFPGNDLPGIISRRMYLKFLNLFKNVVVIGSTDDAIRTALISKSKIFLKKGTENFSKKYL

SEQ ID NO: 28763 - protein, 85 aa, unidentified
  REGION 1..85: note = Description of Unknown:cds_NZ_WFIY01000004.1_cds_WP_155863081.1_993 target sequence
ELAENEGIDILEVNELKASRKGKKIVLYHDYGKEIVDAIVFAIVRQPRIEIANNLGIEYNFYHKSHIYLPVHNINGKVNDNYYVT

SEQ ID NO: 28764 - protein, 85 aa, unidentified
  REGION 1..85: note = Description of Unknown:cds_NZ_WFIY01000004.1_cds_WP_155863081.1_993 target sequence
GGMRGIYDYELSFLSGKIIFNEAIDEFYAELKETYLYHYYNKRGEEESSSISPYFFGNGYVCECEDIKLKDVEEQYKKGYRTVEE

SEQ ID NO: 28765 - protein, 84 aa, unidentified
  REGION 1..84: note = Description of Unknown:cds_NZ_WFIY01000004.1_cds_WP_155863081.1_993 target sequence
RGEEESSSISPYFFGNGYVCECEDIKLKDVEEQYKKGYRTVEEMKRTLGISTGYCQGKICSFLVGDYLNSNKLITFRSPLYSMW

SEQ ID NO: 28766 - protein, 85 aa, unidentified
  REGION 1..85: note = Description of Unknown:cds_NZ_WFIY01000004.1_cds_WP_155863081.1_993 target sequence
EDGKRIKVCENFEKYFHYSNHFSINFSSSIIHSKFLRSQFILNNIPRFLNLPEYYNENREIKIEINDKIDEIIIGEGISGLSALE

SEQ ID NO: 28767 - protein, 85 aa, unidentified
  REGION 1..85: note = Description of Unknown:cds_NZ_WFIY01000004.1_cds_WP_155863081.1_993 target sequence
NCKNCILISPNFDDEIFLDPLCKDCSLKDKIKSIIKNNSNKIVYGRFIGRFDEGLVFRLKDNYLVIRKPAKVILASGSRFLPPVF

SEQ ID NO: 28768 - protein, 85 aa, unidentified
  REGION 1..85: note = Description of Unknown:cds_NZ_WFIY01000004.1_cds_WP_155863081.1_993 target sequence
PGNDLPGIISRRMYLKFLNLFKNVVVIGSTDDAIRTALISKSKIFLKKGTENFSKKYLELAENEGIDILEVNELKASRKGKKIVL

SEQ ID NO: 28769 - protein, 85 aa, unidentified
  REGION 1..85: note = Description of Unknown:cds_NZ_WFIY01000004.1_cds_WP_155863081.1_993 target sequence
YHDYGKEIVDAIVFAIVRQPRIEIANNLGIEYNFYHKSHIYLPVHNINGKVNDNYYVTGGMRGIYDYELSFLSGKIIFNEAIDEF

SEQ ID NO: 28770 - protein, 85 aa, unidentified
  REGION 1..85: note = Description of Unknown:cds_NZ_WFIY01000004.1_cds_WP_155863081.1_993 target sequence
YAELKETYLYHYYNKRGEEESSSISPYFFGNGYVCECEDIKLKDVEEQYKKGYRTVEEMKRTLGISTGYCQGKICSFLVGDYLNS

SEQ ID NO: 28771 - protein, 85 aa, unidentified
  REGION 1..85: note = Description of Unknown:cds_NZ_WFIY01000004.1_cds_WP_205737145.1_1572 target sequence
VKLLIVRYDEIGVKSDVVRKKLEKLLIDNLKASASYFSCGEVKAEKGQGRIYLYGNIDCLKISSSKVFGVKSVSPAEKITFQNLN

SEQ ID NO: 28772 - protein, 85 aa, unidentified
  REGION 1..85: note = Description of Unknown:cds_NZ_WFIY01000004.1_cds_WP_205737145.1_1572 target sequence
EIVDFAEKLWKNKIEGKRFAIRVRRVGKHDFTSIEAAARIADRFHGKVDLENPEAEVFVEIRQNEAYFYDEIIKGPGGLPLGSEG

SEQ ID NO: 28773 - protein, 85 aa, unidentified
  REGION 1..85: note = Description of Unknown:cds_NZ_WFIY01000004.1_cds_WP_205737145.1_1572 target sequence
KALALVSGGIDSPVASWMIMKRGVALDILHCNISGPNNLSSIMKVIDKIKEWSQGYTPRVFIVDCGKIMEAIMKKVDIRLWSVAF

SEQ ID NO: 28774 - protein, 85 aa, unidentified
  REGION 1..85: note = Description of Unknown:cds_NZ_WFIY01000004.1_cds_WP_205737145.1_1572 target sequence
KRALYLIAINYASKIGAKAIVTGESLGQVSSQTLSVLSGLQHKIDLLFLRPLIGFDKDEIIKLAREIGTFELSTKVPEYCALFSH

SEQ ID NO: 28775 - protein, 85 aa, unidentified
  REGION 1..85: note = Description of Unknown:cds_NZ_WFIY01000004.1_cds_WP_205737145.1_1572 target sequence
KPRTKVTIEEIEKIDEALKEAIEETLKESEQMQTENYNVQIYLDKLPTSLQNTVIIDLRKEEEYKKSHLPNAIRLDPWEVMDFVL

SEQ ID NO: 28776 - protein, 84 aa, unidentified
  REGION 1..84: note = Description of Unknown:cds_NZ_WFIY01000004.1_cds_WP_205737145.1_1572 target sequence
DKLPTSLQNTVIIDLRKEEEYKKSHLPNAIRLDPWEVMDFVLKTGKDKTYILYCEKGVVSGDLAYRLKKMGYNAFALKNPTLAA

SEQ ID NO: 28777 - protein, 85 aa, unidentified
  REGION 1..85: note = Description of Unknown:cds_NZ_WFIY01000004.1_cds_WP_205737145.1_1572 target sequence
DNLKASASYFSCGEVKAEKGQGRIYLYGNIDCLKISSSKVFGVKSVSPAEKITFQNLNEIVDFAEKLWKNKIEGKRFAIRVRRVG

SEQ ID NO: 28778 - protein, 85 aa, unidentified
  REGION 1..85: note = Description of Unknown:cds_NZ_WFIY01000004.1_cds_WP_205737145.1_1572 target sequence
KHDFTSIEAAARIADRFHGKVDLENPEAEVFVEIRQNEAYFYDEIIKGPGGLPLGSEGKALALVSGGIDSPVASWMIMKRGVALD

SEQ ID NO: 28779 - protein, 85 aa, unidentified
  REGION 1..85: note = Description of Unknown:cds_NZ_WFIY01000004.1_cds_WP_205737145.1_1572 target sequence
ILHCNISGPNNLSSIMKVIDKIKEWSQGYTPRVFIVDCGKIMEAIMKKVDIRLWSVAFKRALYLIAINYASKIGAKAIVTGESLG

SEQ ID NO: 28780 - protein, 85 aa, unidentified
  REGION 1..85: note = Description of Unknown:cds_NZ_WFIY01000004.1_cds_WP_205737145.1_1572 target sequence
QVSSQTLSVLSGLQHKIDLLFLRPLIGFDKDEIIKLAREIGTFELSTKVPEYCALFSHKPRTKVTIEEIEKIDEALKEAIEETLK

SEQ ID NO: 28781 - protein, 85 aa, unidentified
  REGION 1..85: note = Description of Unknown:cds_NZ_WFIY01000004.1_cds_WP_205737145.1_1572 target sequence
ESEQMQTENYNVQIYLDKLPTSLQNTVIIDLRKEEEYKKSHLPNAIRLDPWEVMDFVLKTGKDKTYILYCEKGVVSGDLAYRLKK

SEQ ID NO: 28782 - protein, 85 aa, unidentified
  REGION 1..85: note = Description of Unknown:cds_NZ_WFIY01000004.1_cds_WP_155862641.1_422 target sequence
ETTLNVREFSNISMIKGPLMVVKGVTDAGYNELVEIEMENGEKRRGIVVDSQLGMAVVQVFEGTTGISPTGTNVKFLGRGLEVKI

SEQ ID NO: 28783 - protein, 85 aa, unidentified
  REGION 1..85: note = Description of Unknown:cds_NZ_WFIY01000004.1_cds_WP_155862641.1_422 target sequence
SDEMLGRVFNPLGEPLDNGPPVISGEKRDINGSAINPAVRDYPEEFIQTGISAIDGLNSLLRGQKLPIFSGSGLPANILAAQIAK

SEQ ID NO: 28784 - protein, 85 aa, unidentified
  REGION 1..85: note = Description of Unknown:cds_NZ_WFIY01000004.1_cds_WP_155862641.1_422 target sequence
QATVRGEESNFAVVFAAIGIRYDDALFFRKFFEETGAINRVAMFMTLANEPPVVKILTPRTALTLAEYLAFEKDMHVLAILIDMT

SEQ ID NO: 28785 - protein, 85 aa, unidentified
  REGION 1..85: note = Description of Unknown:cds_NZ_WFIY01000004.1_cds_WP_155862641.1_422 target sequence
NYCESLREISAAKEEVPGRGGYPGYMYTDLATIYERAGKVKGKKGSITQMPILTMPNDDMTHPIPDLTGYITEGQIVLDRSLYNK

SEQ ID NO: 28786 - protein, 85 aa, unidentified
  REGION 1..85: note = Description of Unknown:cds_NZ_WFIY01000004.1_cds_WP_155862641.1_422 target sequence
GIYPPINVLMSLSRLMKDGIGEGKTREDHKDLANQLFAAYAKAVDTRGLAAIIGEDSLSETDRKYLLFGDAFERKFVNQGVNENR

SEQ ID NO: 28787 - protein, 84 aa, unidentified
  REGION 1..84: note = Description of Unknown:cds_NZ_WFIY01000004.1_cds_WP_155862641.1_422 target sequence
KAVDTRGLAAIIGEDSLSETDRKYLLFGDAFERKFVNQGVNENRDIETTLDIGWEILSILPERELTNIKEAYIKKYHPAYRGKK

SEQ ID NO: 28788 - protein, 85 aa, unidentified
  REGION 1..85: note = Description of Unknown:cds_NZ_WFIY01000004.1_cds_WP_155862641.1_422 target sequence
AGYNELVEIEMENGEKRRGIVVDSQLGMAVVQVFEGTTGISPTGTNVKFLGRGLEVKISDEMLGRVFNPLGEPLDNGPPVISGEK

SEQ ID NO: 28789 - protein, 85 aa, unidentified
  REGION 1..85: note = Description of Unknown:cds_NZ_WFIY01000004.1_cds_WP_155862641.1_422 target sequence
RDINGSAINPAVRDYPEEFIQTGISAIDGLNSLLRGQKLPIFSGSGLPANILAAQIAKQATVRGEESNFAVVFAAIGIRYDDALF

SEQ ID NO: 28790 - protein, 85 aa, unidentified
  REGION 1..85: note = Description of Unknown:cds_NZ_WFIY01000004.1_cds_WP_155862641.1_422 target sequence
FRKFFEETGAINRVAMFMTLANEPPVVKILTPRTALTLAEYLAFEKDMHVLAILIDMTNYCESLREISAAKEEVPGRGGYPGYMY

SEQ ID NO: 28791 - protein, 85 aa, unidentified
  REGION 1..85: note = Description of Unknown:cds_NZ_WFIY01000004.1_cds_WP_155862641.1_422 target sequence
TDLATIYERAGKVKGKKGSITQMPILTMPNDDMTHPIPDLTGYITEGQIVLDRSLYNKGIYPPINVLMSLSRLMKDGIGEGKTRE

SEQ ID NO: 28792 - protein, 85 aa, unidentified
  REGION 1..85: note = Description of Unknown:cds_NZ_WFIY01000004.1_cds_WP_155862641.1_422 target sequence
DHKDLANQLFAAYAKAVDTRGLAAIIGEDSLSETDRKYLLFGDAFERKFVNQGVNENRDIETTLDIGWEILSILPERELTNIKEA

SEQ ID NO: 28793 - protein, 85 aa, unidentified
  REGION 1..85: note = Description of Unknown:cds_NZ_WFIY01000004.1_cds_WP_155862971.1_841 target sequence
YDVVIIGGGPAGLFAAYELANALQGKSDYKILLVDKGVRASKRSCPLLTPKEKCTFCNPCHINYGIGGAGTFSSGIINLRPDIGG

SEQ ID NO: 28794 - protein, 85 aa, unidentified
  REGION 1..85: note = Description of Unknown:cds_NZ_WFIY01000004.1_cds_WP_155862971.1_841 target sequence
DLHELMRSWDAAQQLINYVDEIFVKFGAPKDRLFKPDPEKTKEIQKKAAKVGAEFVPIVQRHIGTDKSPQVIENLTNYIEQNGIK

SEQ ID NO: 28795 - protein, 85 aa, unidentified
  REGION 1..85: note = Description of Unknown:cds_NZ_WFIY01000004.1_cds_WP_155862971.1_841 target sequence
ISELTDVYQIEKTGNSFNLKTSKGEIESKIVLVAPGRAGAKWFYEQTKRLGVDTVPGPLDIGVRVEVESFVMDELTSAVWDPKII

SEQ ID NO: 28796 - protein, 85 aa, unidentified
  REGION 1..85: note = Description of Unknown:cds_NZ_WFIY01000004.1_cds_WP_155862971.1_841 target sequence
MYSKKYDDKVRTFCVNPRGFIMKEVYDDGTIGVNGETYVDRKSNNTNFAFLATIKLSDPLEDTIEYGKSIARLMTRLGGEKPILQ

SEQ ID NO: 28797 - protein, 85 aa, unidentified
  REGION 1..85: note = Description of Unknown:cds_NZ_WFIY01000004.1_cds_WP_155862971.1_841 target sequence
RLIDFEKGRRSTWERINRSTVKPTLRDVTPGDISMGLPYRIISDLIEGLERLDNIASGIYSSNTLLYAPEIKYYSVKTVVDSNME

SEQ ID NO: 28798 - protein, 84 aa, unidentified
  REGION 1..84: note = Description of Unknown:cds_NZ_WFIY01000004.1_cds_WP_155862971.1_841 target sequence
ISDLIEGLERLDNIASGIYSSNTLLYAPEIKYYSVKTVVDSNMETVVDNLFVAGDGAGLSRGINVAAATGILAARGIINKLGLS

SEQ ID NO: 28799 - protein, 85 aa, unidentified
  REGION 1..85: note = Description of Unknown:cds_NZ_WFIY01000004.1_cds_WP_155862971.1_841 target sequence
DYKILLVDKGVRASKRSCPLLTPKEKCTFCNPCHINYGIGGAGTFSSGIINLRPDIGGDLHELMRSWDAAQQLINYVDEIFVKFG

SEQ ID NO: 28800 - protein, 85 aa, unidentified
  REGION 1..85: note = Description of Unknown:cds_NZ_WFIY01000004.1_cds_WP_155862971.1_841 target sequence
APKDRLFKPDPEKTKEIQKKAAKVGAEFVPIVQRHIGTDKSPQVIENLTNYIEQNGIKISELTDVYQIEKTGNSFNLKTSKGEIE

SEQ ID NO: 28801 - protein, 85 aa, unidentified
  REGION 1..85: note = Description of Unknown:cds_NZ_WFIY01000004.1_cds_WP_155862971.1_841 target sequence
SKIVLVAPGRAGAKWFYEQTKRLGVDTVPGPLDIGVRVEVESFVMDELTSAVWDPKIIMYSKKYDDKVRTFCVNPRGFIMKEVYD

SEQ ID NO: 28802 - protein, 85 aa, unidentified
  REGION 1..85: note = Description of Unknown:cds_NZ_WFIY01000004.1_cds_WP_155862971.1_841 target sequence
DGTIGVNGETYVDRKSNNTNFAFLATIKLSDPLEDTIEYGKSIARLMTRLGGEKPILQRLIDFEKGRRSTWERINRSTVKPTLRD

SEQ ID NO: 28803 - protein, 85 aa, unidentified
  REGION 1..85: note = Description of Unknown:cds_NZ_WFIY01000004.1_cds_WP_155862971.1_841 target sequence
VTPGDISMGLPYRIISDLIEGLERLDNIASGIYSSNTLLYAPEIKYYSVKTVVDSNMETVVDNLFVAGDGAGLSRGINVAAATGI

SEQ ID NO: 28804 - protein, 85 aa, unidentified
  REGION 1..85: note = Description of Unknown:cds_NZ_WFIY01000004.1_cds_WP_155863616.1_1516 target sequence
KGVSKSIIALIIVVIVIIAAAGVYYVISHKSTTSISTTSSVTLTVVTFSGESAKFIQCAGNLFSEEHPGVTVKVICYPFSEYINQ

SEQ ID NO: 28805 - protein, 85 aa, unidentified
  REGION 1..85: note = Description of Unknown:cds_NZ_WFIY01000004.1_cds_WP_155863616.1_1516 target sequence
EKTALLAHSTEYDIIGFTSTSAQEVAPYLICLNESMFNMSDIIMPQEDFGGIIYNSTTGKTEMIGIAYETAVYLTAYKECIFCNA

SEQ ID NO: 28806 - protein, 85 aa, unidentified
  REGION 1..85: note = Description of Unknown:cds_NZ_WFIY01000004.1_cds_WP_155863616.1_1516 target sequence
TLAEEFYNEYHMNFSPTTWENWTIVLDVDYFLTSHGITKYGFLIDDHVSHGIIDAYPAVFGWYYERCPQLTQGKIGGIPGYNIMF

SEQ ID NO: 28807 - protein, 85 aa, unidentified
  REGION 1..85: note = Description of Unknown:cds_NZ_WFIY01000004.1_cds_WP_155863616.1_1516 target sequence
ESYILPGYSYPLPSFNSTAGIEALETYYDLVSYEPSPSLIQICYGDFAQFYPDAAGAFIFTSQLTCLNTTEREHTYLAPLPGDYA

SEQ ID NO: 28808 - protein, 85 aa, unidentified
  REGION 1..85: note = Description of Unknown:cds_NZ_WFIY01000004.1_cds_WP_155863616.1_1516 target sequence
ETGTDFLGVSKYSLHKQLAEEFLAFLVSPQVQKLAFLKFGKFPISKEAFQDLMGNTSLPSYEREWLTQVYRAAEEAWANPPNIPP

SEQ ID NO: 28809 - protein, 84 aa, unidentified
  REGION 1..84: note = Description of Unknown:cds_NZ_WFIY01000004.1_cds_WP_155863616.1_1516 target sequence
FPISKEAFQDLMGNTSLPSYEREWLTQVYRAAEEAWANPPNIPPTYTCLIPYFNCEVHCYLIGKISAQEALNIAAQDWIKAVSG

SEQ ID NO: 28810 - protein, 85 aa, unidentified
  REGION 1..85: note = Description of Unknown:cds_NZ_WFIY01000004.1_cds_WP_155863616.1_1516 target sequence
SHKSTTSISTTSSVTLTVVTFSGESAKFIQCAGNLFSEEHPGVTVKVICYPFSEYINQEKTALLAHSTEYDIIGFTSTSAQEVAP

SEQ ID NO: 28811 - protein, 85 aa, unidentified
  REGION 1..85: note = Description of Unknown:cds_NZ_WFIY01000004.1_cds_WP_155863616.1_1516 target sequence
YLICLNESMFNMSDIIMPQEDFGGIIYNSTTGKTEMIGIAYETAVYLTAYKECIFCNATLAEEFYNEYHMNFSPTTWENWTIVLD

SEQ ID NO: 28812 - protein, 85 aa, unidentified
  REGION 1..85: note = Description of Unknown:cds_NZ_WFIY01000004.1_cds_WP_155863616.1_1516 target sequence
VDYFLTSHGITKYGFLIDDHVSHGIIDAYPAVFGWYYERCPQLTQGKIGGIPGYNIMFESYILPGYSYPLPSFNSTAGIEALETY

SEQ ID NO: 28813 - protein, 85 aa, unidentified
  REGION 1..85: note = Description of Unknown:cds_NZ_WFIY01000004.1_cds_WP_155863616.1_1516 target sequence
YDLVSYEPSPSLIQICYGDFAQFYPDAAGAFIFTSQLTCLNTTEREHTYLAPLPGDYAETGTDFLGVSKYSLHKQLAEEFLAFLV

SEQ ID NO: 28814 - protein, 85 aa, unidentified
  REGION 1..85: note = Description of Unknown:cds_NZ_WFIY01000004.1_cds_WP_155863616.1_1516 target sequence
SPQVQKLAFLKFGKFPISKEAFQDLMGNTSLPSYEREWLTQVYRAAEEAWANPPNIPPTYTCLIPYFNCEVHCYLIGKISAQEAL

SEQ ID NO: 28815 - protein, 85 aa, unidentified
  REGION 1..85: note = Description of Unknown:cds_NZ_WFIY01000004.1_cds_WP_155862892.1_737 target sequence
SFIDFLAALGKDLPAVRKPRHKPNLNQKIMWSVLAVIVYLVMSSVPLYGIQSTSLSNFLIEQVIFASTAGTLAQLGIGPIITAGL

SEQ ID NO: 28816 - protein, 85 aa, unidentified
  REGION 1..85: note = Description of Unknown:cds_NZ_WFIY01000004.1_cds_WP_155862892.1_737 target sequence
IMQILVGSKLINIDLGNEDDRAKFTEAQKGLAFIFILIEASLFGYVLTKGAIITSVQIELATIITAQLVAATFFILLLDEMIQKG

SEQ ID NO: 28817 - protein, 85 aa, unidentified
  REGION 1..85: note = Description of Unknown:cds_NZ_WFIY01000004.1_cds_WP_155862892.1_737 target sequence
WGLGSGVSLFILAGVMKIIFWYMFGIVTVSSQNLPIGFFPTLISLIASHGNLLSIIVNTTKPFEPDLVGLVSTITLIILIVYLTS

SEQ ID NO: 28818 - protein, 85 aa, unidentified
  REGION 1..85: note = Description of Unknown:cds_NZ_WFIY01000004.1_cds_WP_155862892.1_737 target sequence
INIQIPVTSQRLRGIRRTIPLNFLYVSSIPVIFVSVLGADIQLFASLSSYSNSTLASILNDIASAFEFPPPNSKIPHSVYAVVLD

SEQ ID NO: 28819 - protein, 85 aa, unidentified
  REGION 1..85: note = Description of Unknown:cds_NZ_WFIY01000004.1_cds_WP_155862892.1_737 target sequence
PVGAVIYAIVFITLGVLFGLIWVEVAGLDPATQAKQLVEAGIEIPGMRSNTKMIEAILSKYIYPLAFFSSLIVSVIAVGATFLGV

SEQ ID NO: 28820 - protein, 84 aa, unidentified
  REGION 1..84: note = Description of Unknown:cds_NZ_WFIY01000004.1_cds_WP_155862892.1_737 target sequence
GIEIPGMRSNTKMIEAILSKYIYPLAFFSSLIVSVIAVGATFLGVYGTGVGILLAVTIAIQYYSLLAYERSIEMYPLLRRLVGE

SEQ ID NO: 28821 - protein, 85 aa, unidentified
  REGION 1..85: note = Description of Unknown:cds_NZ_WFIY01000004.1_cds_WP_155862892.1_737 target sequence
KIMWSVLAVIVYLVMSSVPLYGIQSTSLSNFLIEQVIFASTAGTLAQLGIGPIITAGLIMQILVGSKLINIDLGNEDDRAKFTEA

SEQ ID NO: 28822 - protein, 85 aa, unidentified
  REGION 1..85: note = Description of Unknown:cds_NZ_WFIY01000004.1_cds_WP_155862892.1_737 target sequence
QKGLAFIFILIEASLFGYVLTKGAIITSVQIELATIITAQLVAATFFILLLDEMIQKGWGLGSGVSLFILAGVMKIIFWYMFGIV

SEQ ID NO: 28823 - protein, 85 aa, unidentified
  REGION 1..85: note = Description of Unknown:cds_NZ_WFIY01000004.1_cds_WP_155862892.1_737 target sequence
TVSSQNLPIGFFPTLISLIASHGNLLSIIVNTTKPFEPDLVGLVSTITLIILIVYLTSINIQIPVTSQRLRGIRRTIPLNFLYVS

SEQ ID NO: 28824 - protein, 85 aa, unidentified
  REGION 1..85: note = Description of Unknown:cds_NZ_WFIY01000004.1_cds_WP_155862892.1_737 target sequence
SIPVIFVSVLGADIQLFASLSSYSNSTLASILNDIASAFEFPPPNSKIPHSVYAVVLDPVGAVIYAIVFITLGVLFGLIWVEVAG

SEQ ID NO: 28825 - protein, 85 aa, unidentified
  REGION 1..85: note = Description of Unknown:cds_NZ_WFIY01000004.1_cds_WP_155862892.1_737 target sequence
LDPATQAKQLVEAGIEIPGMRSNTKMIEAILSKYIYPLAFFSSLIVSVIAVGATFLGVYGTGVGILLAVTIAIQYYSLLAYERSI

SEQ ID NO: 28826 - protein, 85 aa, unidentified
  REGION 1..85: note = Description of Unknown:cds_NZ_WFIY01000004.1_cds_WP_162309160.1_1303 target sequence
TYDLLLKNVKAFTTSGPFEGDIAIKDGKISKIGGDIQEQADKTIDLSGKYLVPGLIDGHTHMEFPFMGEVTADDFYYGSRAAIAG

SEQ ID NO: 28827 - protein, 85 aa, unidentified
  REGION 1..85: note = Description of Unknown:cds_NZ_WFIY01000004.1_cds_WP_162309160.1_1303 target sequence
GVTTIVDFVTPAKGQDLLSAYEKWSNNADPKVVSDYGLHMIIREVNTKILEQIPEVINKGVVSFKLFMAYKNELMLPDGELYKLI

SEQ ID NO: 28828 - protein, 85 aa, unidentified
  REGION 1..85: note = Description of Unknown:cds_NZ_WFIY01000004.1_cds_WP_162309160.1_1303 target sequence
KRISDFGGVTGIHAENGEIINELIQEFLSEGKIDPIYHYYSRPDIMEIEATNRIASIASMIGKDVKMYIVHTSTGEAVDIISSYR

SEQ ID NO: 28829 - protein, 85 aa, unidentified
  REGION 1..85: note = Description of Unknown:cds_NZ_WFIY01000004.1_cds_WP_162309160.1_1303 target sequence
RQGFKFFNETAPHYLTLNTDFLKRPDGYRYVMSPPLRSDEQRTKLWIRLASGDIFTIGSDHCVYSDAQKKRYKEEVPPFNEIPNG

SEQ ID NO: 28830 - protein, 85 aa, unidentified
  REGION 1..85: note = Description of Unknown:cds_NZ_WFIY01000004.1_cds_WP_162309160.1_1303 target sequence
VPGTENILPILFYYGVKKGIISMERFVEVTSYNPARLFGLYPRKGTIMPGSDADFAVIDPNRKVRISADVLHSNINYTIYDGMEV

SEQ ID NO: 28831 - protein, 84 aa, unidentified
  REGION 1..84: note = Description of Unknown:cds_NZ_WFIY01000004.1_cds_WP_162309160.1_1303 target sequence
LYPRKGTIMPGSDADFAVIDPNRKVRISADVLHSNINYTIYDGMEVEGWNVMTIRRGEVVYEEGQVIGKKGSGKYIPGKTPILL

SEQ ID NO: 28832 - protein, 85 aa, unidentified
  REGION 1..85: note = Description of Unknown:cds_NZ_WFIY01000004.1_cds_WP_162309160.1_1303 target sequence
KISKIGGDIQEQADKTIDLSGKYLVPGLIDGHTHMEFPFMGEVTADDFYYGSRAAIAGGVTTIVDFVTPAKGQDLLSAYEKWSNN

SEQ ID NO: 28833 - protein, 85 aa, unidentified
  REGION 1..85: note = Description of Unknown:cds_NZ_WFIY01000004.1_cds_WP_162309160.1_1303 target sequence
ADPKVVSDYGLHMIIREVNTKILEQIPEVINKGVVSFKLFMAYKNELMLPDGELYKLIKRISDFGGVTGIHAENGEIINELIQEF

SEQ ID NO: 28834 - protein, 85 aa, unidentified
  REGION 1..85: note = Description of Unknown:cds_NZ_WFIY01000004.1_cds_WP_162309160.1_1303 target sequence
LSEGKIDPIYHYYSRPDIMEIEATNRIASIASMIGKDVKMYIVHTSTGEAVDIISSYRRQGFKFFNETAPHYLTLNTDFLKRPDG

SEQ ID NO: 28835 - protein, 85 aa, unidentified
  REGION 1..85: note = Description of Unknown:cds_NZ_WFIY01000004.1_cds_WP_162309160.1_1303 target sequence
YRYVMSPPLRSDEQRTKLWIRLASGDIFTIGSDHCVYSDAQKKRYKEEVPPFNEIPNGVPGTENILPILFYYGVKKGIISMERFV

SEQ ID NO: 28836 - protein, 85 aa, unidentified
  REGION 1..85: note = Description of Unknown:cds_NZ_WFIY01000004.1_cds_WP_162309160.1_1303 target sequence
EVTSYNPARLFGLYPRKGTIMPGSDADFAVIDPNRKVRISADVLHSNINYTIYDGMEVEGWNVMTIRRGEVVYEEGQVIGKKGSG

SEQ ID NO: 28837 - protein, 85 aa, unidentified
  REGION 1..85: note = Description of Unknown:cds_NZ_WFIY01000004.1_cds_WP_155862394.1_131 target sequence
CSVSGALILNPKNYDKIERKFAEILKNAEDRGRDSFGIIVVQSDGTTKSVKSLGRPSEQEEKLYGILDEKSRVIIANNRAEPTTE

SEQ ID NO: 28838 - protein, 85 aa, unidentified
  REGION 1..85: note = Description of Unknown:cds_NZ_WFIY01000004.1_cds_WP_155862394.1_131 target sequence
FVNKKTEKDIQPFEGERFIVTHNGIIANDKELEKKFGVKRESNIDTAVIPPILDKFWKGDLPTLKDLLSEIRGSFAFIIADKKNP

SEQ ID NO: 28839 - protein, 85 aa, unidentified
  REGION 1..85: note = Description of Unknown:cds_NZ_WFIY01000004.1_cds_WP_155862394.1_131 target sequence
NKIYVAQNFKPVYMMYDYELGAIFFTSLDDYFSQSPLDKVNITKLEPYSIVSVDSSLKIEKIDLIKSKDKKKVLVIASGGLDSTV

SEQ ID NO: 28840 - protein, 85 aa, unidentified
  REGION 1..85: note = Description of Unknown:cds_NZ_WFIY01000004.1_cds_WP_155862394.1_131 target sequence
AATYLLRQGHEITLLHFNYRHKAEEKEREAIRKISEYLQVPYIEIDTDLFKIIGHTTLLKGGGEIVKERQGEEGAEFAHEWVPAR

SEQ ID NO: 28841 - protein, 85 aa, unidentified
  REGION 1..85: note = Description of Unknown:cds_NZ_WFIY01000004.1_cds_WP_155862394.1_131 target sequence
NLIFFSVALAIAEAYGFDAIASGINLEEAGAYPDNEMEFVRLFSKLSPYATGPNKKIEVMMPVGNLVKHEIVKLGVEIGAPLHLT

SEQ ID NO: 28842 - protein, 84 aa, unidentified
  REGION 1..84: note = Description of Unknown:cds_NZ_WFIY01000004.1_cds_WP_155862394.1_131 target sequence
FVRLFSKLSPYATGPNKKIEVMMPVGNLVKHEIVKLGVEIGAPLHLTWSCYEGGEKHCGKCGPCYMRKMAFKINGLKDPVEYEN

SEQ ID NO: 28843 - protein, 85 aa, unidentified
  REGION 1..85: note = Description of Unknown:cds_NZ_WFIY01000004.1_cds_WP_155862394.1_131 target sequence
AEDRGRDSFGIIVVQSDGTTKSVKSLGRPSEQEEKLYGILDEKSRVIIANNRAEPTTEFVNKKTEKDIQPFEGERFIVTHNGIIA

SEQ ID NO: 28844 - protein, 85 aa, unidentified
  REGION 1..85: note = Description of Unknown:cds_NZ_WFIY01000004.1_cds_WP_155862394.1_131 target sequence
NDKELEKKFGVKRESNIDTAVIPPILDKFWKGDLPTLKDLLSEIRGSFAFIIADKKNPNKIYVAQNFKPVYMMYDYELGAIFFTS

SEQ ID NO: 28845 - protein, 85 aa, unidentified
  REGION 1..85: note = Description of Unknown:cds_NZ_WFIY01000004.1_cds_WP_155862394.1_131 target sequence
LDDYFSQSPLDKVNITKLEPYSIVSVDSSLKIEKIDLIKSKDKKKVLVIASGGLDSTVAATYLLRQGHEITLLHFNYRHKAEEKE

SEQ ID NO: 28846 - protein, 85 aa, unidentified
  REGION 1..85: note = Description of Unknown:cds_NZ_WFIY01000004.1_cds_WP_155862394.1_131 target sequence
REAIRKISEYLQVPYIEIDTDLFKIIGHTTLLKGGGEIVKERQGEEGAEFAHEWVPARNLIFFSVALAIAEAYGFDAIASGINLE

SEQ ID NO: 28847 - protein, 85 aa, unidentified
  REGION 1..85: note = Description of Unknown:cds_NZ_WFIY01000004.1_cds_WP_155862394.1_131 target sequence
EAGAYPDNEMEFVRLFSKLSPYATGPNKKIEVMMPVGNLVKHEIVKLGVEIGAPLHLTWSCYEGGEKHCGKCGPCYMRKMAFKIN

SEQ ID NO: 28848 - protein, 85 aa, unidentified
  REGION 1..85: note = Description of Unknown:cds_NZ_WFIY01000004.1_cds_WP_155863383.1_1356 target sequence
NVKLWVWTIVFILIGGGIMFYGMSYNPLAWAQGFVSFTEPNDEPIPWGLLVIGYIFFGVIGTGVSTYNSLYELFNKNHKERNPFD

SEQ ID NO: 28849 - protein, 85 aa, unidentified
  REGION 1..85: note = Description of Unknown:cds_NZ_WFIY01000004.1_cds_WP_155863383.1_1356 target sequence
KIKLRNEWLALAVLIPGWIMVFASTYKPAEALFIYLSFRSTSRIAWNGVLYALVGIGIIAEILALIGEKIKEEGKRGILDRFLAW

SEQ ID NO: 28850 - protein, 85 aa, unidentified
  REGION 1..85: note = Description of Unknown:cds_NZ_WFIY01000004.1_cds_WP_155863383.1_1356 target sequence
LSSKTTFEIPGMLKLVVDIDALIVGYAILAELILDANLGSVFGYLSTWVYEFGPFMSILLVVASFYAGIAMISFITPLYSWLRRP

SEQ ID NO: 28851 - protein, 85 aa, unidentified
  REGION 1..85: note = Description of Unknown:cds_NZ_WFIY01000004.1_cds_WP_155863383.1_1356 target sequence
TAITPTPAKPIATHISGSGSIDPEEDNTVFKVLARDGLLATIGIGFLVLWWVWLTATNQETLPWAELLINGSWSLVFWIGLVLIG

SEQ ID NO: 28852 - protein, 85 aa, unidentified
  REGION 1..85: note = Description of Unknown:cds_NZ_WFIY01000004.1_cds_WP_155863383.1_1356 target sequence
IIIPIILYSIAYKKESKGWLFASSIFVLLGWFVLITLADVIPQAISWYYSVSPVSPPGSTWAYELRSNFNGVSQYTQLPFAISQY

SEQ ID NO: 28853 - protein, 84 aa, unidentified
  REGION 1..84: note = Description of Unknown:cds_NZ_WFIY01000004.1_cds_WP_155863383.1_1356 target sequence
DVIPQAISWYYSVSPVSPPGSTWAYELRSNFNGVSQYTQLPFAISQYDLVWFAGSVLFLLGVYTLGVLLLPLEEEEKPKHWFFK

SEQ ID NO: 28854 - protein, 85 aa, unidentified
  REGION 1..85: note = Description of Unknown:cds_NZ_WFIY01000004.1_cds_WP_155863383.1_1356 target sequence
LAWAQGFVSFTEPNDEPIPWGLLVIGYIFFGVIGTGVSTYNSLYELFNKNHKERNPFDKIKLRNEWLALAVLIPGWIMVFASTYK

SEQ ID NO: 28855 - protein, 85 aa, unidentified
  REGION 1..85: note = Description of Unknown:cds_NZ_WFIY01000004.1_cds_WP_155863383.1_1356 target sequence
PAEALFIYLSFRSTSRIAWNGVLYALVGIGIIAEILALIGEKIKEEGKRGILDRFLAWLSSKTTFEIPGMLKLVVDIDALIVGYA

SEQ ID NO: 28856 - protein, 85 aa, unidentified
  REGION 1..85: note = Description of Unknown:cds_NZ_WFIY01000004.1_cds_WP_155863383.1_1356 target sequence
ILAELILDANLGSVFGYLSTWVYEFGPFMSILLVVASFYAGIAMISFITPLYSWLRRPTAITPTPAKPIATHISGSGSIDPEEDN

SEQ ID NO: 28857 - protein, 85 aa, unidentified
  REGION 1..85: note = Description of Unknown:cds_NZ_WFIY01000004.1_cds_WP_155863383.1_1356 target sequence
TVFKVLARDGLLATIGIGFLVLWWVWLTATNQETLPWAELLINGSWSLVFWIGLVLIGIIIPIILYSIAYKKESKGWLFASSIFV

SEQ ID NO: 28858 - protein, 85 aa, unidentified
  REGION 1..85: note = Description of Unknown:cds_NZ_WFIY01000004.1_cds_WP_155863383.1_1356 target sequence
LLGWFVLITLADVIPQAISWYYSVSPVSPPGSTWAYELRSNFNGVSQYTQLPFAISQYDLVWFAGSVLFLLGVYTLGVLLLPLEE

SEQ ID NO: 28859 - protein, 85 aa, unidentified
  REGION 1..85: note = Description of Unknown:cds_NC_024711.1_cds_YP_009052498.1_17 target sequence
KNIVEESYSKLINKWGSKDYKGIGTIHCVQPLDYSEIISRVITLMRNKNPNLKILIVTDNWKRRTEIVDGLKNHNINIDTINILT

SEQ ID NO: 28860 - protein, 85 aa, unidentified
  REGION 1..85: note = Description of Unknown:cds_NC_024711.1_cds_YP_009052498.1_17 target sequence
HTYVNSRYNYSYDISIVVGVNEWNLSCNTVFNHARFKLMIITKDTIDTAKLKEIYTNIPPINDNISSSGINAMRALLPVEEYREP

SEQ ID NO: 28861 - protein, 85 aa, unidentified
  REGION 1..85: note = Description of Unknown:cds_NC_024711.1_cds_YP_009052498.1_17 target sequence
ILFVNQDDITNYDKYTEFITQTIQVFGNLDNIKCARNGTQDGRSAIQYITEIAEYNGWSADMDMTNPFSKQIDECYNPLVLAERV

SEQ ID NO: 28862 - protein, 85 aa, unidentified
  REGION 1..85: note = Description of Unknown:cds_NC_024711.1_cds_YP_009052498.1_17 target sequence
KTFYNIVRERMLICSDNVCKLERIVEIIKDNPDKRFLIISKRGEYAATVTKYINDKLGEICGDYHDKIEDKVLVDSNGIPVLYKS

SEQ ID NO: 28863 - protein, 85 aa, unidentified
  REGION 1..85: note = Description of Unknown:cds_NC_024711.1_cds_YP_009052498.1_17 target sequence
GSKKRQPRIIKSKAISTLNLKSFNDGLLRVLSIKNNSTDSLETSVDEWILTSPLCDTIDELIYRYNNVNCSQSKLKVHKLYIAGT

SEQ ID NO: 28864 - protein, 84 aa, unidentified
  REGION 1..84: note = Description of Unknown:cds_NC_024711.1_cds_YP_009052498.1_17 target sequence
STDSLETSVDEWILTSPLCDTIDELIYRYNNVNCSQSKLKVHKLYIAGTIEEASLKKEKLSANHEVIQNVNSDISAQNFDDIVC

SEQ ID NO: 28865 - protein, 85 aa, unidentified
  REGION 1..85: note = Description of Unknown:cds_NC_024711.1_cds_YP_009052498.1_17 target sequence
CVQPLDYSEIISRVITLMRNKNPNLKILIVTDNWKRRTEIVDGLKNHNINIDTINILTHTYVNSRYNYSYDISIVVGVNEWNLSC

SEQ ID NO: 28866 - protein, 85 aa, unidentified
  REGION 1..85: note = Description of Unknown:cds_NC_024711.1_cds_YP_009052498.1_17 target sequence
NTVFNHARFKLMIITKDTIDTAKLKEIYTNIPPINDNISSSGINAMRALLPVEEYREPILFVNQDDITNYDKYTEFITQTIQVFG

SEQ ID NO: 28867 - protein, 85 aa, unidentified
  REGION 1..85: note = Description of Unknown:cds_NC_024711.1_cds_YP_009052498.1_17 target sequence
NLDNIKCARNGTQDGRSAIQYITEIAEYNGWSADMDMTNPFSKQIDECYNPLVLAERVKTFYNIVRERMLICSDNVCKLERIVEI

SEQ ID NO: 28868 - protein, 85 aa, unidentified
  REGION 1..85: note = Description of Unknown:cds_NC_024711.1_cds_YP_009052498.1_17 target sequence
IKDNPDKRFLIISKRGEYAATVTKYINDKLGEICGDYHDKIEDKVLVDSNGIPVLYKSGSKKRQPRIIKSKAISTLNLKSFNDGL

SEQ ID NO: 28869 - protein, 85 aa, unidentified
  REGION 1..85: note = Description of Unknown:cds_NC_024711.1_cds_YP_009052498.1_17 target sequence
LRVLSIKNNSTDSLETSVDEWILTSPLCDTIDELIYRYNNVNCSQSKLKVHKLYIAGTIEEASLKKEKLSANHEVIQNVNSDISA

SEQ ID NO: 28870 - protein, 85 aa, unidentified
  REGION 1..85: note = Description of Unknown:cds_NZ_WFIY01000004.1_cds_WP_155863273.1_1228 target sequence
ASVKGNLEIYIARLDRLPGWGLSYIIFWALGFSFFITLYDVINVGFALPYIPFITSNSEASLVASLGLFGYVVGAPIFSFLSDRI

SEQ ID NO: 28871 - protein, 85 aa, unidentified
  REGION 1..85: note = Description of Unknown:cds_NZ_WFIY01000004.1_cds_WP_155863273.1_1228 target sequence
GRKPAMVFTSFLIAIGSFGDAFSVNFPMLSLFRFITGMAIGADLVLVMTYIAEMSPAKKRGIYSNIAFIAGYAGLGIGPYIAAEV

SEQ ID NO: 28872 - protein, 85 aa, unidentified
  REGION 1..85: note = Description of Unknown:cds_NZ_WFIY01000004.1_cds_WP_155863273.1_1228 target sequence
VTTIPNIGWRIVFMIGGILAVGALLIRAYAPESLRFLAFHGKLEEAEKLISTMEEISMKRYKIDKLPDPIIMNYKPPKENPLKIL

SEQ ID NO: 28873 - protein, 85 aa, unidentified
  REGION 1..85: note = Description of Unknown:cds_NZ_WFIY01000004.1_cds_WP_155863273.1_1228 target sequence
LKPIYLKRLIVLFLLSFWFYFIDYPFLVLTPTWLKANLGYSSSQLSYAIFLFGLSGLGVILGSIILRFFIDRYDRRKLAIVDALF

SEQ ID NO: 28874 - protein, 85 aa, unidentified
  REGION 1..85: note = Description of Unknown:cds_NZ_WFIY01000004.1_cds_WP_155863273.1_1228 target sequence
YMIGAIIMSIGAVGHNFTTFFIGSFVAETIGVGWFNVYYLLDVDNFPTIARATGYSLTDGIGHLGGALGLLSLLPLANSLGNISV

SEQ ID NO: 28875 - protein, 84 aa, unidentified
  REGION 1..84: note = Description of Unknown:cds_NZ_WFIY01000004.1_cds_WP_155863273.1_1228 target sequence
VYYLLDVDNFPTIARATGYSLTDGIGHLGGALGLLSLLPLANSLGNISVWGILWIPALIMGGLTLIFTPKTTGFRLEEVNENKI

SEQ ID NO: 28876 - protein, 85 aa, unidentified
  REGION 1..85: note = Description of Unknown:cds_NZ_WFIY01000004.1_cds_WP_155863273.1_1228 target sequence
WALGFSFFITLYDVINVGFALPYIPFITSNSEASLVASLGLFGYVVGAPIFSFLSDRIGRKPAMVFTSFLIAIGSFGDAFSVNFP

SEQ ID NO: 28877 - protein, 85 aa, unidentified
  REGION 1..85: note = Description of Unknown:cds_NZ_WFIY01000004.1_cds_WP_155863273.1_1228 target sequence
MLSLFRFITGMAIGADLVLVMTYIAEMSPAKKRGIYSNIAFIAGYAGLGIGPYIAAEVVTTIPNIGWRIVFMIGGILAVGALLIR

SEQ ID NO: 28878 - protein, 85 aa, unidentified
  REGION 1..85: note = Description of Unknown:cds_NZ_WFIY01000004.1_cds_WP_155863273.1_1228 target sequence
AYAPESLRFLAFHGKLEEAEKLISTMEEISMKRYKIDKLPDPIIMNYKPPKENPLKILLKPIYLKRLIVLFLLSFWFYFIDYPFL

SEQ ID NO: 28879 - protein, 85 aa, unidentified
  REGION 1..85: note = Description of Unknown:cds_NZ_WFIY01000004.1_cds_WP_155863273.1_1228 target sequence
VLTPTWLKANLGYSSSQLSYAIFLFGLSGLGVILGSIILRFFIDRYDRRKLAIVDALFYMIGAIIMSIGAVGHNFTTFFIGSFVA

SEQ ID NO: 28880 - protein, 85 aa, unidentified
  REGION 1..85: note = Description of Unknown:cds_NZ_WFIY01000004.1_cds_WP_155863273.1_1228 target sequence
ETIGVGWFNVYYLLDVDNFPTIARATGYSLTDGIGHLGGALGLLSLLPLANSLGNISVWGILWIPALIMGGLTLIFTPKTTGFRL

SEQ ID NO: 28881 - protein, 85 aa, unidentified
  REGION 1..85: note = Description of Unknown:cds_NZ_WFIY01000004.1_cds_WP_155864144.1_2097 target sequence
EEVFERFRKNLEIYNKMGLNPLSLATGCAVKVDLIDTVYPALEKIKNKLENIEILPREDADIFITREKMEIKRIIGGGDFDADRG

SEQ ID NO: 28882 - protein, 85 aa, unidentified
  REGION 1..85: note = Description of Unknown:cds_NZ_WFIY01000004.1_cds_WP_155864144.1_2097 target sequence
VSLIQVNQDTAGNPEKFANFLLKAYSSIRSRRKLTIGKGHSIVTTIPSAEVAVLDLIKLDGNKINSYTLANNDTIQIVDPLEDPG

SEQ ID NO: 28883 - protein, 85 aa, unidentified
  REGION 1..85: note = Description of Unknown:cds_NZ_WFIY01000004.1_cds_WP_155864144.1_2097 target sequence
SQMQVDVAISNSLNDLFTKGAYQNLRMLPLFDAPNSDLKERIMKNYENYSEKYNIPIINDVQPNTKSLMLGATVLGESDHELPTY

SEQ ID NO: 28884 - protein, 85 aa, unidentified
  REGION 1..85: note = Description of Unknown:cds_NZ_WFIY01000004.1_cds_WP_155864144.1_2097 target sequence
YNKVEEGDEIIVTRPIGELAPINVYLWILVVPEVLELMESRGISFNRLEKVKMEVIEQMRKPNIPTAKVIYNYLPEFGKEFDREN

SEQ ID NO: 28885 - protein, 85 aa, unidentified
  REGION 1..85: note = Description of Unknown:cds_NZ_WFIY01000004.1_cds_WP_155864144.1_2097 target sequence
YITMTTDVTGPGIFVIKEFAEKAGIDVKLDKIPVIDEEIAEFATEGFIIPNSTSGTNGATVIFCSKKISDNIMEDLQKEGLKPIK

SEQ ID NO: 28886 - protein, 84 aa, unidentified
  REGION 1..84: note = Description of Unknown:cds_NZ_WFIY01000004.1_cds_WP_155864144.1_2097 target sequence
DEEIAEFATEGFIIPNSTSGTNGATVIFCSKKISDNIMEDLQKEGLKPIKIGKVLGKGKGVVHVNKDIERFIHRKNVLSHFKID

SEQ ID NO: 28887 - protein, 85 aa, unidentified
  REGION 1..85: note = Description of Unknown:cds_NZ_WFIY01000004.1_cds_WP_155864144.1_2097 target sequence
CAVKVDLIDTVYPALEKIKNKLENIEILPREDADIFITREKMEIKRIIGGGDFDADRGVSLIQVNQDTAGNPEKFANFLLKAYSS

SEQ ID NO: 28888 - protein, 85 aa, unidentified
  REGION 1..85: note = Description of Unknown:cds_NZ_WFIY01000004.1_cds_WP_155864144.1_2097 target sequence
IRSRRKLTIGKGHSIVTTIPSAEVAVLDLIKLDGNKINSYTLANNDTIQIVDPLEDPGSQMQVDVAISNSLNDLFTKGAYQNLRM

SEQ ID NO: 28889 - protein, 85 aa, unidentified
  REGION 1..85: note = Description of Unknown:cds_NZ_WFIY01000004.1_cds_WP_155864144.1_2097 target sequence
LPLFDAPNSDLKERIMKNYENYSEKYNIPIINDVQPNTKSLMLGATVLGESDHELPTYYNKVEEGDEIIVTRPIGELAPINVYLW

SEQ ID NO: 28890 - protein, 85 aa, unidentified
  REGION 1..85: note = Description of Unknown:cds_NZ_WFIY01000004.1_cds_WP_155864144.1_2097 target sequence
ILVVPEVLELMESRGISFNRLEKVKMEVIEQMRKPNIPTAKVIYNYLPEFGKEFDRENYITMTTDVTGPGIFVIKEFAEKAGIDV

SEQ ID NO: 28891 - protein, 85 aa, unidentified
  REGION 1..85: note = Description of Unknown:cds_NZ_WFIY01000004.1_cds_WP_155864144.1_2097 target sequence
KLDKIPVIDEEIAEFATEGFIIPNSTSGTNGATVIFCSKKISDNIMEDLQKEGLKPIKIGKVLGKGKGVVHVNKDIERFIHRKNV

SEQ ID NO: 28892 - protein, 85 aa, unidentified
  REGION 1..85: note = Description of Unknown:cds_NZ_WFIY01000004.1_cds_WP_155862427.1_169 target sequence
LKVGILDSTLREGEQTPGVVFTTEQRVEIAKALSELGVSMIEAGHPAVSPDIYEGIKRIVKLKKEGEITPEIVGHSRAVKKDIEI

SEQ ID NO: 28893 - protein, 85 aa, unidentified
  REGION 1..85: note = Description of Unknown:cds_NZ_WFIY01000004.1_cds_WP_155862427.1_169 target sequence
AAELEVDRIAIFYGISDIHLKAKTGKTREEALSIIAEAVSYAKEHGAKVRFTAEDATRADLEYLTQVIKTARDAGADRIGIADTV

SEQ ID NO: 28894 - protein, 85 aa, unidentified
  REGION 1..85: note = Description of Unknown:cds_NZ_WFIY01000004.1_cds_WP_155862427.1_169 target sequence
GILYPSKTRELFSYLSKIPGVEYDIHAHNDLGLAVANSLAAVEGGATIIHATVNGLGERVGITPLQVIAAALKYHFNVEVVKLEL

SEQ ID NO: 28895 - protein, 85 aa, unidentified
  REGION 1..85: note = Description of Unknown:cds_NZ_WFIY01000004.1_cds_WP_155862427.1_169 target sequence
LPKISSLVEKYSGIPTPPNFPITGDYAFLHKAGIHVQGILNDPRTYEFMPPETFGRNRDYVIDKYTGKHALKDRFERLGVSLSEE

SEQ ID NO: 28896 - protein, 85 aa, unidentified
  REGION 1..85: note = Description of Unknown:cds_NZ_WFIY01000004.1_cds_WP_155862427.1_169 target sequence
ELEQVLAKIKSNPNVRFYRDVDLLEIAEEVTGRILKPRPPEKVEALISIKCDSNVYTTAVTRKISVIPGVKEVMEISGDYDILAK

SEQ ID NO: 28897 - protein, 84 aa, unidentified
  REGION 1..84: note = Description of Unknown:cds_NZ_WFIY01000004.1_cds_WP_155862427.1_169 target sequence
KPRPPEKVEALISIKCDSNVYTTAVTRKISVIPGVKEVMEISGDYDILAKIEAKDPTELNNIIESIRSVKGVSSTLTSLVLKKM

SEQ ID NO: 28898 - protein, 85 aa, unidentified
  REGION 1..85: note = Description of Unknown:cds_NZ_WFIY01000004.1_cds_WP_155862427.1_169 target sequence
EIAKALSELGVSMIEAGHPAVSPDIYEGIKRIVKLKKEGEITPEIVGHSRAVKKDIEIAAELEVDRIAIFYGISDIHLKAKTGKT

SEQ ID NO: 28899 - protein, 85 aa, unidentified
  REGION 1..85: note = Description of Unknown:cds_NZ_WFIY01000004.1_cds_WP_155862427.1_169 target sequence
REEALSIIAEAVSYAKEHGAKVRFTAEDATRADLEYLTQVIKTARDAGADRIGIADTVGILYPSKTRELFSYLSKIPGVEYDIHA

SEQ ID NO: 28900 - protein, 85 aa, unidentified
  REGION 1..85: note = Description of Unknown:cds_NZ_WFIY01000004.1_cds_WP_155862427.1_169 target sequence
HNDLGLAVANSLAAVEGGATIIHATVNGLGERVGITPLQVIAAALKYHFNVEVVKLELLPKISSLVEKYSGIPTPPNFPITGDYA

SEQ ID NO: 28901 - protein, 85 aa, unidentified
  REGION 1..85: note = Description of Unknown:cds_NZ_WFIY01000004.1_cds_WP_155862427.1_169 target sequence
FLHKAGIHVQGILNDPRTYEFMPPETFGRNRDYVIDKYTGKHALKDRFERLGVSLSEEELEQVLAKIKSNPNVRFYRDVDLLEIA

SEQ ID NO: 28902 - protein, 85 aa, unidentified
  REGION 1..85: note = Description of Unknown:cds_NZ_WFIY01000004.1_cds_WP_155862427.1_169 target sequence
EEVTGRILKPRPPEKVEALISIKCDSNVYTTAVTRKISVIPGVKEVMEISGDYDILAKIEAKDPTELNNIIESIRSVKGVSSTLT

SEQ ID NO: 28903 - protein, 85 aa, unidentified
  REGION 1..85: note = Description of Unknown:cds_NZ_WFIY01000004.1_cds_WP_155863116.1_1034 target sequence
NSFNIITQIIVFVIPSLILLYQYIFFKLGYNRIDVIDVNPKDLPLLSIIVPTKGERPELIQGLLNNLAEVDWDKSKMEVIIVSDD

SEQ ID NO: 28904 - protein, 85 aa, unidentified
  REGION 1..85: note = Description of Unknown:cds_NZ_WFIY01000004.1_cds_WP_155863116.1_1034 target sequence
SPEYFEEMKEKIIPPQGLEVRMYRREKKLGFKSGALAYGFERSRGDLILTLDVDARVRKDSIKKAYLHMLQFNCDAVTMKWIGYS

SEQ ID NO: 28905 - protein, 85 aa, unidentified
  REGION 1..85: note = Description of Unknown:cds_NZ_WFIY01000004.1_cds_WP_155863116.1_1034 target sequence
HNSYSLLAKGIMVSTIIADNSILRGRDRANLKVFPVGCGTMFKKSAIEEVGPWDYSMIQDDLEIGARLINRGKRICSSDSIVFVE

SEQ ID NO: 28906 - protein, 85 aa, unidentified
  REGION 1..85: note = Description of Unknown:cds_NZ_WFIY01000004.1_cds_WP_155863116.1_1034 target sequence
VPDNLLAFYIQQTRWAMGSIEVLTRRFKQIITSKANILQKIDALLFLLQYVPIALTFIAALLISVYSFLGKGDPLNSIPLFTLWA

SEQ ID NO: 28907 - protein, 85 aa, unidentified
  REGION 1..85: note = Description of Unknown:cds_NZ_WFIY01000004.1_cds_WP_155863116.1_1034 target sequence
IALGIYAYNFIKVARDSGLRLIEALRSLGKVSAYTVSISPFITLSIFSAFKKSRNYIITPKGKAGKTRIIYIILAFGLLFLFASI

SEQ ID NO: 28908 - protein, 84 aa, unidentified
  REGION 1..84: note = Description of Unknown:cds_NZ_WFIY01000004.1_cds_WP_155863116.1_1034 target sequence
TVSISPFITLSIFSAFKKSRNYIITPKGKAGKTRIIYIILAFGLLFLFASINYLIHQEFIAGLWLLYYSLAYIFTFSSYKQEIK

SEQ ID NO: 28909 - protein, 85 aa, unidentified
  REGION 1..85: note = Description of Unknown:cds_NZ_WFIY01000004.1_cds_WP_155863116.1_1034 target sequence
LGYNRIDVIDVNPKDLPLLSIIVPTKGERPELIQGLLNNLAEVDWDKSKMEVIIVSDDSPEYFEEMKEKIIPPQGLEVRMYRREK

SEQ ID NO: 28910 - protein, 85 aa, unidentified
  REGION 1..85: note = Description of Unknown:cds_NZ_WFIY01000004.1_cds_WP_155863116.1_1034 target sequence
KLGFKSGALAYGFERSRGDLILTLDVDARVRKDSIKKAYLHMLQFNCDAVTMKWIGYSHNSYSLLAKGIMVSTIIADNSILRGRD

SEQ ID NO: 28911 - protein, 85 aa, unidentified
  REGION 1..85: note = Description of Unknown:cds_NZ_WFIY01000004.1_cds_WP_155863116.1_1034 target sequence
RANLKVFPVGCGTMFKKSAIEEVGPWDYSMIQDDLEIGARLINRGKRICSSDSIVFVEVPDNLLAFYIQQTRWAMGSIEVLTRRF

SEQ ID NO: 28912 - protein, 85 aa, unidentified
  REGION 1..85: note = Description of Unknown:cds_NZ_WFIY01000004.1_cds_WP_155863116.1_1034 target sequence
KQIITSKANILQKIDALLFLLQYVPIALTFIAALLISVYSFLGKGDPLNSIPLFTLWAIALGIYAYNFIKVARDSGLRLIEALRS

SEQ ID NO: 28913 - protein, 85 aa, unidentified
  REGION 1..85: note = Description of Unknown:cds_NZ_WFIY01000004.1_cds_WP_155863116.1_1034 target sequence
LGKVSAYTVSISPFITLSIFSAFKKSRNYIITPKGKAGKTRIIYIILAFGLLFLFASINYLIHQEFIAGLWLLYYSLAYIFTFSS

SEQ ID NO: 28914 - protein, 85 aa, unidentified
  REGION 1..85: note = Description of Unknown:cds_NZ_WFIY01000004.1_cds_WP_155863206.1_1147 target sequence
KLSDVFKPLDDKKFDMFHIKSLLTTGMGVFTDGYDLSSIGIVIGAVLASFGLHSKTPEYNYWEGLVSSSALIGAAIGAIIFGILA

SEQ ID NO: 28915 - protein, 85 aa, unidentified
  REGION 1..85: note = Description of Unknown:cds_NZ_WFIY01000004.1_cds_WP_155863206.1_1147 target sequence
NKGRKTFYGIDVALLSIGAILQAFVSSPLELVLVRGLLGLGVGADYVLSPMIMAEHANAKDRGKIIALGFGLMWGFGATVAAGIY

SEQ ID NO: 28916 - protein, 85 aa, unidentified
  REGION 1..85: note = Description of Unknown:cds_NZ_WFIY01000004.1_cds_WP_155863206.1_1147 target sequence
LVLTSLGYSLDIVWRVVLAAGAIPAASVIYLRRKIPETSRYLARIKGDMKAFENVVKQVAGKEVRVAENLKDENSFSEYFEKQWK

SEQ ID NO: 28917 - protein, 85 aa, unidentified
  REGION 1..85: note = Description of Unknown:cds_NZ_WFIY01000004.1_cds_WP_155863206.1_1147 target sequence
VFIAAASLWFLFDLSAYTGILFGPTTIAKSVGINNPAVFQFVMEFFFTVPGGLLALATIDRVGRRPMQIIGFVGMAGSLMSFSFF

SEQ ID NO: 28918 - protein, 85 aa, unidentified
  REGION 1..85: note = Description of Unknown:cds_NZ_WFIY01000004.1_cds_WP_155863206.1_1147 target sequence
RPLLPAFLALTVYGMYNFFMQAGPGSISAAGMLGVELAPTKVRGTVQSITVAAGRTGATIAGLIVPTIILPSVGVDGLTLILSLL

SEQ ID NO: 28919 - protein, 84 aa, unidentified
  REGION 1..84: note = Description of Unknown:cds_NZ_WFIY01000004.1_cds_WP_155863206.1_1147 target sequence
GVELAPTKVRGTVQSITVAAGRTGATIAGLIVPTIILPSVGVDGLTLILSLLTFLAAAITYFFIPETKGKPLEESSMENQYVKV

SEQ ID NO: 28920 - protein, 85 aa, unidentified
  REGION 1..85: note = Description of Unknown:cds_NZ_WFIY01000004.1_cds_WP_155863206.1_1147 target sequence
GVFTDGYDLSSIGIVIGAVLASFGLHSKTPEYNYWEGLVSSSALIGAAIGAIIFGILANKGRKTFYGIDVALLSIGAILQAFVSS

SEQ ID NO: 28921 - protein, 85 aa, unidentified
  REGION 1..85: note = Description of Unknown:cds_NZ_WFIY01000004.1_cds_WP_155863206.1_1147 target sequence
PLELVLVRGLLGLGVGADYVLSPMIMAEHANAKDRGKIIALGFGLMWGFGATVAAGIYLVLTSLGYSLDIVWRVVLAAGAIPAAS

SEQ ID NO: 28922 - protein, 85 aa, unidentified
  REGION 1..85: note = Description of Unknown:cds_NZ_WFIY01000004.1_cds_WP_155863206.1_1147 target sequence
VIYLRRKIPETSRYLARIKGDMKAFENVVKQVAGKEVRVAENLKDENSFSEYFEKQWKVFIAAASLWFLFDLSAYTGILFGPTTI

SEQ ID NO: 28923 - protein, 85 aa, unidentified
  REGION 1..85: note = Description of Unknown:cds_NZ_WFIY01000004.1_cds_WP_155863206.1_1147 target sequence
AKSVGINNPAVFQFVMEFFFTVPGGLLALATIDRVGRRPMQIIGFVGMAGSLMSFSFFRPLLPAFLALTVYGMYNFFMQAGPGSI

SEQ ID NO: 28924 - protein, 85 aa, unidentified
  REGION 1..85: note = Description of Unknown:cds_NZ_WFIY01000004.1_cds_WP_155863206.1_1147 target sequence
SAAGMLGVELAPTKVRGTVQSITVAAGRTGATIAGLIVPTIILPSVGVDGLTLILSLLTFLAAAITYFFIPETKGKPLEESSMEN

SEQ ID NO: 28925 - protein, 13 aa, unidentified
  REGION 1..13: note = Description of Unknown:cds_NZ_WFIY01000004.1_cds_2305 target sequence
PPSSGQLYEDEER

SEQ ID NO: 28926 - protein, 85 aa, unidentified
  REGION 1..85: note = Description of Unknown:cds_NZ_WFIY01000004.1_cds_2305 target sequence
SKYYEKYKAKLGVNAQAVLQKNNEAWSSFFSLLKLKKEGKLPHINRVSPPRYWKDRETKKRRLILIVRQDRYEVDAENHKLILKD

SEQ ID NO: 28927 - protein, 85 aa, unidentified
  REGION 1..85: note = Description of Unknown:cds_NZ_WFIY01000004.1_cds_2305 target sequence
FDMEIDFVGRLRWYGKQGRLEIIFDETRNAWYAHIPVEVGVEEAGKKSKHVVKGERKAIQISKPKGNKVASIDLGINVIASAVVN

SEQ ID NO: 28928 - protein, 85 aa, unidentified
  REGION 1..85: note = Description of Unknown:cds_NZ_WFIY01000004.1_cds_2305 target sequence
DGTWLLYKGVRTKEDYFYFQRRISEVQSLADRTRNVSEGEAYLELLREKRRLFKKLTRRLTHLYRNLDSHLIKTLHELGVSIIYL

SEQ ID NO: 28929 - protein, 85 aa, unidentified
  REGION 1..85: note = Description of Unknown:cds_NZ_WFIY01000004.1_cds_2305 target sequence
GYPFNIVQEKGNKFTVNMWSYRKLMESIELKAQEYGMKVYEVVEYNTSKYCAYHGVEVKRNPRGVVICPKGHKLHSDLNGALNIL

SEQ ID NO: 28930 - protein, 84 aa, unidentified
  REGION 1..84: note = Description of Unknown:cds_NZ_WFIY01000004.1_cds_2305 target sequence
EYGMKVYEVVEYNTSKYCAYHGVEVKRNPRGVVICPKGHKLHSDLNGALNILKKATRILVKALKKPLSFIVDHNRVAPTKGCNP

SEQ ID NO: 28931 - protein, 85 aa, unidentified
  REGION 1..85: note = Description of Unknown:cds_NZ_WFIY01000004.1_cds_2305 target sequence
EVKYSNQRTNVVRLLPNGFQERKLRRLANLSAKLFNEVDYERRQQFFHEEVVDIKGTWSKYYEKYKAKLGVNAQAVLQKNNEAWS

SEQ ID NO: 28932 - protein, 85 aa, unidentified
  REGION 1..85: note = Description of Unknown:cds_NZ_WFIY01000004.1_cds_2305 target sequence
SFFSLLKLKKEGKLPHINRVSPPRYWKDRETKKRRLILIVRQDRYEVDAENHKLILKDFDMEIDFVGRLRWYGKQGRLEIIFDET

SEQ ID NO: 28933 - protein, 85 aa, unidentified
  REGION 1..85: note = Description of Unknown:cds_NZ_WFIY01000004.1_cds_2305 target sequence
RNAWYAHIPVEVGVEEAGKKSKHVVKGERKAIQISKPKGNKVASIDLGINVIASAVVNDGTWLLYKGVRTKEDYFYFQRRISEVQ

SEQ ID NO: 28934 - protein, 85 aa, unidentified
  REGION 1..85: note = Description of Unknown:cds_NZ_WFIY01000004.1_cds_2305 target sequence
SLADRTRNVSEGEAYLELLREKRRLFKKLTRRLTHLYRNLDSHLIKTLHELGVSIIYLGYPFNIVQEKGNKFTVNMWSYRKLMES

SEQ ID NO: 28935 - protein, 85 aa, unidentified
  REGION 1..85: note = Description of Unknown:cds_NZ_WFIY01000004.1_cds_2305 target sequence
IELKAQEYGMKVYEVVEYNTSKYCAYHGVEVKRNPRGVVICPKGHKLHSDLNGALNILKKATRILVKALKKPLSFIVDHNRVAPT

SEQ ID NO: 28936 - protein, 85 aa, unidentified
  REGION 1..85: note = Description of Unknown:cds_NZ_WFIY01000004.1_cds_WP_155862563.1_332 target sequence
SLATVLYEWYKKNPSKTFLGGDRSLTYQQVVDEVRRTASLISPGETVAHIMFNSTKSVINYLSVYWAGGKVVAIDPLTSAEDLKF

SEQ ID NO: 28937 - protein, 85 aa, unidentified
  REGION 1..85: note = Description of Unknown:cds_NZ_WFIY01000004.1_cds_WP_155862563.1_332 target sequence
ILEDSQPSLVFTDHEVYEREKNVLKDYKVIIDSANGSYEQTSPYEYREDEVGLIYYYAGIAGRTMQVLHSAERVELNSASLYKAL

SEQ ID NO: 28938 - protein, 85 aa, unidentified
  REGION 1..85: note = Description of Unknown:cds_NZ_WFIY01000004.1_cds_WP_155862563.1_332 target sequence
GVKDISSILTVPLAHVLGNSVLGITLEAGGFMYILRKFDPKETISAIDKFSINYLATVPMVYDALAKEKEGNLDSLRLCISTAAP

SEQ ID NO: 28939 - protein, 85 aa, unidentified
  REGION 1..85: note = Description of Unknown:cds_NZ_WFIY01000004.1_cds_WP_155862563.1_332 target sequence
LFPSTIKAFKERFNKDIVQQYGFTEGLVITYQPPEFSQVISIGKPLPNAEVKVVKDNGEEAKIGETGELWVKAPWLMLGYKDEEE

SEQ ID NO: 28940 - protein, 85 aa, unidentified
  REGION 1..85: note = Description of Unknown:cds_NZ_WFIY01000004.1_cds_WP_155862563.1_332 target sequence
TRRVFEGEWLKTGDLVSMDEKGLLYFKGVKKRMLKYKGYPIFPRDLEEILLSHPLVKEAYVYGEDAGNLGTQPVAKVIVKEYKKG

SEQ ID NO: 28941 - protein, 84 aa, unidentified
  REGION 1..84: note = Description of Unknown:cds_NZ_WFIY01000004.1_cds_WP_155862563.1_332 target sequence
MLKYKGYPIFPRDLEEILLSHPLVKEAYVYGEDAGNLGTQPVAKVIVKEYKKGLEDELLNYVNQRVAFYKRLKKVYIVDKIERN

SEQ ID NO: 28942 - protein, 85 aa, unidentified
  REGION 1..85: note = Description of Unknown:cds_NZ_WFIY01000004.1_cds_WP_155862563.1_332 target sequence
QQVVDEVRRTASLISPGETVAHIMFNSTKSVINYLSVYWAGGKVVAIDPLTSAEDLKFILEDSQPSLVFTDHEVYEREKNVLKDY

SEQ ID NO: 28943 - protein, 85 aa, unidentified
  REGION 1..85: note = Description of Unknown:cds_NZ_WFIY01000004.1_cds_WP_155862563.1_332 target sequence
KVIIDSANGSYEQTSPYEYREDEVGLIYYYAGIAGRTMQVLHSAERVELNSASLYKALGVKDISSILTVPLAHVLGNSVLGITLE

SEQ ID NO: 28944 - protein, 85 aa, unidentified
  REGION 1..85: note = Description of Unknown:cds_NZ_WFIY01000004.1_cds_WP_155862563.1_332 target sequence
AGGFMYILRKFDPKETISAIDKFSINYLATVPMVYDALAKEKEGNLDSLRLCISTAAPLFPSTIKAFKERFNKDIVQQYGFTEGL

SEQ ID NO: 28945 - protein, 85 aa, unidentified
  REGION 1..85: note = Description of Unknown:cds_NZ_WFIY01000004.1_cds_WP_155862563.1_332 target sequence
VITYQPPEFSQVISIGKPLPNAEVKVVKDNGEEAKIGETGELWVKAPWLMLGYKDEEETRRVFEGEWLKTGDLVSMDEKGLLYFK

SEQ ID NO: 28946 - protein, 85 aa, unidentified
  REGION 1..85: note = Description of Unknown:cds_NZ_WFIY01000004.1_cds_WP_155862563.1_332 target sequence
GVKKRMLKYKGYPIFPRDLEEILLSHPLVKEAYVYGEDAGNLGTQPVAKVIVKEYKKGLEDELLNYVNQRVAFYKRLKKVYIVDK

SEQ ID NO: 28947 - protein, 85 aa, unidentified
  REGION 1..85: note = Description of Unknown:cds_NZ_WFIY01000004.1_cds_WP_155862628.1_408 target sequence
LTQDLPIIILSIMLLFSAIAVLFIKEFRKAFYLTLSVNIIGIIILSFFWIIGFVGYTIFSCTLYLDNVGYLFSIIVLIGTTVVVL

SEQ ID NO: 28948 - protein, 85 aa, unidentified
  REGION 1..85: note = Description of Unknown:cds_NZ_WFIY01000004.1_cds_WP_155862628.1_408 target sequence
GGKSHIESWSTRSSMLSLLLLTGLGLVYMAFAYNILIILGAWGISSAASYAITMLRKDYKSVDAGIKYLIMGLISSSFMIFGFAL

SEQ ID NO: 28949 - protein, 85 aa, unidentified
  REGION 1..85: note = Description of Unknown:cds_NZ_WFIY01000004.1_cds_WP_155862628.1_408 target sequence
YFLSVNTFSLNYSTIKYPYLFMLGISLLSIAFFFKLGAFPFQGWLPEVYINADRISVSFISSVGKLLGIIPLLRIISLGDPTQNI

SEQ ID NO: 28950 - protein, 85 aa, unidentified
  REGION 1..85: note = Description of Unknown:cds_NZ_WFIY01000004.1_cds_WP_155862628.1_408 target sequence
ITFFVVLFSIMAILSMFVGNIIAFSRRDLPSILAFSSIAQMGFILIGFVALKVNTQIAEAGLITQSLAYVIAQAGLFNFVNYIEK

SEQ ID NO: 28951 - protein, 85 aa, unidentified
  REGION 1..85: note = Description of Unknown:cds_NZ_WFIY01000004.1_cds_WP_155862628.1_408 target sequence
VSGTARFEGLRGLAKSDRGLATSVSILVLSLLGIPPIIGFWGKLFLFESVYLYPWLIIIAVLNSAISAGYYIPVIREMFREGELS

SEQ ID NO: 28952 - protein, 84 aa, unidentified
  REGION 1..84: note = Description of Unknown:cds_NZ_WFIY01000004.1_cds_WP_155862628.1_408 target sequence
GIPPIIGFWGKLFLFESVYLYPWLIIIAVLNSAISAGYYIPVIREMFREGELSFVESEERDSVIFSAILSIGIGIISPLILVIV

SEQ ID NO: 28953 - protein, 85 aa, unidentified
  REGION 1..85: note = Description of Unknown:cds_NZ_WFIY01000004.1_cds_WP_155862628.1_408 target sequence
RKAFYLTLSVNIIGIIILSFFWIIGFVGYTIFSCTLYLDNVGYLFSIIVLIGTTVVVLGGKSHIESWSTRSSMLSLLLLTGLGLV

SEQ ID NO: 28954 - protein, 85 aa, unidentified
  REGION 1..85: note = Description of Unknown:cds_NZ_WFIY01000004.1_cds_WP_155862628.1_408 target sequence
YMAFAYNILIILGAWGISSAASYAITMLRKDYKSVDAGIKYLIMGLISSSFMIFGFALYFLSVNTFSLNYSTIKYPYLFMLGISL

SEQ ID NO: 28955 - protein, 85 aa, unidentified
  REGION 1..85: note = Description of Unknown:cds_NZ_WFIY01000004.1_cds_WP_155862628.1_408 target sequence
LSIAFFFKLGAFPFQGWLPEVYINADRISVSFISSVGKLLGIIPLLRIISLGDPTQNIITFFVVLFSIMAILSMFVGNIIAFSRR

SEQ ID NO: 28956 - protein, 85 aa, unidentified
  REGION 1..85: note = Description of Unknown:cds_NZ_WFIY01000004.1_cds_WP_155862628.1_408 target sequence
DLPSILAFSSIAQMGFILIGFVALKVNTQIAEAGLITQSLAYVIAQAGLFNFVNYIEKVSGTARFEGLRGLAKSDRGLATSVSIL

SEQ ID NO: 28957 - protein, 85 aa, unidentified
  REGION 1..85: note = Description of Unknown:cds_NZ_WFIY01000004.1_cds_WP_155862628.1_408 target sequence
VLSLLGIPPIIGFWGKLFLFESVYLYPWLIIIAVLNSAISAGYYIPVIREMFREGELSFVESEERDSVIFSAILSIGIGIISPLI

SEQ ID NO: 28958 - protein, 85 aa, unidentified
  REGION 1..85: note = Description of Unknown:cds_NZ_WFIY01000004.1_cds_WP_155864073.1_2012 target sequence
NPIIYDFKRSFFRLSVLIFLVVFAVLGIGIGYLVYNASIANLPRSSYYDLNFVGVTFNYNGTVIICGYVFDNQGNPLVATVELLS

SEQ ID NO: 28959 - protein, 85 aa, unidentified
  REGION 1..85: note = Description of Unknown:cds_NZ_WFIY01000004.1_cds_WP_155864073.1_2012 target sequence
HTGKVISITQSNSSGFFVIQGSNASCIAVKYSTYQEKANISSSEAYKTISITPQQPFHIIYNITEFYNYKSNSGNILVIITGVKG

SEQ ID NO: 28960 - protein, 85 aa, unidentified
  REGION 1..85: note = Description of Unknown:cds_NZ_WFIY01000004.1_cds_WP_155864073.1_2012 target sequence
CVGKLILVSIFKRGILNLTFYNERLKTIGSCTINYSSYITITKLKIKPGTQFISIEGGNAPAFGFRTMLEYYPIPYIEYAINQGV

SEQ ID NO: 28961 - protein, 85 aa, unidentified
  REGION 1..85: note = Description of Unknown:cds_NZ_WFIY01000004.1_cds_WP_155864073.1_2012 target sequence
ISTSSLFQLFFPIIMIYLAYVLYSKLIDGGAVEFIISRPLTRADFYLTRLTSGLLTGVVTSIIFSLIVGDTFSALVHYFPSFVVS

SEQ ID NO: 28962 - protein, 85 aa, unidentified
  REGION 1..85: note = Description of Unknown:cds_NZ_WFIY01000004.1_cds_WP_155864073.1_2012 target sequence
MMIIELVSILSFYYILSFMLSNFIKSASATLGISIALFFIIRIVEGLLPIFLPTNVVNIVGYYVNPTSICSVAMYLSTHLTLAGA

SEQ ID NO: 28963 - protein, 84 aa, unidentified
  REGION 1..84: note = Description of Unknown:cds_NZ_WFIY01000004.1_cds_WP_155864073.1_2012 target sequence
ISIALFFIIRIVEGLLPIFLPTNVVNIVGYYVNPTSICSVAMYLSTHLTLAGAPFNLGISIAAQLAWLIGLSLLGYLKFRRMDL

SEQ ID NO: 28964 - protein, 85 aa, unidentified
  REGION 1..85: note = Description of Unknown:cds_NZ_WFIY01000004.1_cds_WP_155864073.1_2012 target sequence
IGIGYLVYNASIANLPRSSYYDLNFVGVTFNYNGTVIICGYVFDNQGNPLVATVELLSHTGKVISITQSNSSGFFVIQGSNASCI

SEQ ID NO: 28965 - protein, 85 aa, unidentified
  REGION 1..85: note = Description of Unknown:cds_NZ_WFIY01000004.1_cds_WP_155864073.1_2012 target sequence
AVKYSTYQEKANISSSEAYKTISITPQQPFHIIYNITEFYNYKSNSGNILVIITGVKGCVGKLILVSIFKRGILNLTFYNERLKT

SEQ ID NO: 28966 - protein, 85 aa, unidentified
  REGION 1..85: note = Description of Unknown:cds_NZ_WFIY01000004.1_cds_WP_155864073.1_2012 target sequence
IGSCTINYSSYITITKLKIKPGTQFISIEGGNAPAFGFRTMLEYYPIPYIEYAINQGVISTSSLFQLFFPIIMIYLAYVLYSKLI

SEQ ID NO: 28967 - protein, 85 aa, unidentified
  REGION 1..85: note = Description of Unknown:cds_NZ_WFIY01000004.1_cds_WP_155864073.1_2012 target sequence
DGGAVEFIISRPLTRADFYLTRLTSGLLTGVVTSIIFSLIVGDTFSALVHYFPSFVVSMMIIELVSILSFYYILSFMLSNFIKSA

SEQ ID NO: 28968 - protein, 85 aa, unidentified
  REGION 1..85: note = Description of Unknown:cds_NZ_WFIY01000004.1_cds_WP_155864073.1_2012 target sequence
SATLGISIALFFIIRIVEGLLPIFLPTNVVNIVGYYVNPTSICSVAMYLSTHLTLAGAPFNLGISIAAQLAWLIGLSLLGYLKFR

SEQ ID NO: 28969 - protein, 85 aa, unidentified
  REGION 1..85: note = Description of Unknown:cds_NZ_WFIY01000004.1_cds_WP_155864241.1_2217 target sequence
APSSGQLYEDEEREPTSTPAMPEEGVYKVEHSGKRTNVVRLLPNGFQERKLRRLANLSAKLFNEVNYERRQQFFHEGKVDFKGTW

SEQ ID NO: 28970 - protein, 85 aa, unidentified
  REGION 1..85: note = Description of Unknown:cds_NZ_WFIY01000004.1_cds_WP_155864241.1_2217 target sequence
SKYYEKYKDKLGVNAQAILQKNNEAWSSFFSLLKLKKEGKLPPHMNRVSPPRYWKDRETKKRKLILIIRQDRYEVDAENHKLILK

SEQ ID NO: 28971 - protein, 85 aa, unidentified
  REGION 1..85: note = Description of Unknown:cds_NZ_WFIY01000004.1_cds_WP_155864241.1_2217 target sequence
DFKMEIDFVGRLKWYGKQGRLEIIFDETKNAWYAHIPVEVGVEEAGKKSKHVVKGERKSIQIAKPNGDKLASIDLGINVIASVVV

SEQ ID NO: 28972 - protein, 85 aa, unidentified
  REGION 1..85: note = Description of Unknown:cds_NZ_WFIY01000004.1_cds_WP_155864241.1_2217 target sequence
NDGTWLLYKGVRTKEDYFYFQRRISEVQSLADRTKNLGEHEAYLELLREERRLFKKLTRRLLHLYRNLASHLIRTLHELGVSTIY

SEQ ID NO: 28973 - protein, 85 aa, unidentified
  REGION 1..85: note = Description of Unknown:cds_NZ_WFIY01000004.1_cds_WP_155864241.1_2217 target sequence
LGYPFNIVKEKGNKFTVNIWSYRKLMESIELKAQEYGMKVFEVVEYNTSKYCAYHDVEVKRKPRGVVNCPLGHKLHSDLNGALNI

SEQ ID NO: 28974 - protein, 84 aa, unidentified
  REGION 1..84: note = Description of Unknown:cds_NZ_WFIY01000004.1_cds_WP_155864241.1_2217 target sequence
AQEYGMKVFEVVEYNTSKYCAYHDVEVKRKPRGVVNCPLGHKLHSDLNGALNILKKAVGVIINAVKKPLSFIVDHNRVAPIKGV

SEQ ID NO: 28975 - protein, 85 aa, unidentified
  REGION 1..85: note = Description of Unknown:cds_NZ_WFIY01000004.1_cds_WP_155864241.1_2217 target sequence
KVEHSGKRTNVVRLLPNGFQERKLRRLANLSAKLFNEVNYERRQQFFHEGKVDFKGTWSKYYEKYKDKLGVNAQAILQKNNEAWS

SEQ ID NO: 28976 - protein, 85 aa, unidentified
  REGION 1..85: note = Description of Unknown:cds_NZ_WFIY01000004.1_cds_WP_155864241.1_2217 target sequence
SFFSLLKLKKEGKLPPHMNRVSPPRYWKDRETKKRKLILIIRQDRYEVDAENHKLILKDFKMEIDFVGRLKWYGKQGRLEIIFDE

SEQ ID NO: 28977 - protein, 85 aa, unidentified
  REGION 1..85: note = Description of Unknown:cds_NZ_WFIY01000004.1_cds_WP_155864241.1_2217 target sequence
TKNAWYAHIPVEVGVEEAGKKSKHVVKGERKSIQIAKPNGDKLASIDLGINVIASVVVNDGTWLLYKGVRTKEDYFYFQRRISEV

SEQ ID NO: 28978 - protein, 85 aa, unidentified
  REGION 1..85: note = Description of Unknown:cds_NZ_WFIY01000004.1_cds_WP_155864241.1_2217 target sequence
QSLADRTKNLGEHEAYLELLREERRLFKKLTRRLLHLYRNLASHLIRTLHELGVSTIYLGYPFNIVKEKGNKFTVNIWSYRKLME

SEQ ID NO: 28979 - protein, 85 aa, unidentified
  REGION 1..85: note = Description of Unknown:cds_NZ_WFIY01000004.1_cds_WP_155864241.1_2217 target sequence
SIELKAQEYGMKVFEVVEYNTSKYCAYHDVEVKRKPRGVVNCPLGHKLHSDLNGALNILKKAVGVIINAVKKPLSFIVDHNRVAP

SEQ ID NO: 28980 - protein, 85 aa, unidentified
  REGION 1..85: note = Description of Unknown:cds_NC_007409.1_cds_YP_319871.1_40 target sequence
PPSSGQLLGDEEREPTSTPAIPEEGVYKVKYSNRRTNIVRLLPNGFQERKLRRLADLSAKLFNEVNYERRQQFFHEGKVDIKGTY

SEQ ID NO: 28981 - protein, 85 aa, unidentified
  REGION 1..85: note = Description of Unknown:cds_NC_007409.1_cds_YP_319871.1_40 target sequence
KKYYEKYKEKLRTNAQAVLNKNNEAWSSFFSLLNLKKEGKLPQHIKHVSPPGYCKDRKTKKRKLILIVRQDRYKVDAENNKLILK

SEQ ID NO: 28982 - protein, 85 aa, unidentified
  REGION 1..85: note = Description of Unknown:cds_NC_007409.1_cds_YP_319871.1_40 target sequence
DFNMEIEFVGRLRWYGKQGRLEIIFDETRNAWYAHIPVEVGVEETGKKSKHVVKGERKSIQIAKPKGNKVASIDLGINVIASVVV

SEQ ID NO: 28983 - protein, 85 aa, unidentified
  REGION 1..85: note = Description of Unknown:cds_NC_007409.1_cds_YP_319871.1_40 target sequence
SDGTWLLYKGIRTKEDYFYFHKRIAEVQSLADRTRNIGEYEAYLELLREERRLFKKLKRRLLHLYRNLASHLIKTLHELGVSTIY

SEQ ID NO: 28984 - protein, 85 aa, unidentified
  REGION 1..85: note = Description of Unknown:cds_NC_007409.1_cds_YP_319871.1_40 target sequence
LGNPFNIVQEKGDNFMTDKWPYRKLMHAIELKAQEYGMKVYEVDEYNTTKYCAYHDVKVKRNPRGVVICPKGHKLHSDLNGALNI

SEQ ID NO: 28985 - protein, 84 aa, unidentified
  REGION 1..84: note = Description of Unknown:cds_NC_007409.1_cds_YP_319871.1_40 target sequence
AQEYGMKVYEVDEYNTTKYCAYHDVKVKRNPRGVVICPKGHKLHSDLNGALNILKKAVGVVVNEVKKPLSFIVDHNRVAPIKGV

SEQ ID NO: 28986 - protein, 85 aa, unidentified
  REGION 1..85: note = Description of Unknown:cds_NC_007409.1_cds_YP_319871.1_40 target sequence
KVKYSNRRTNIVRLLPNGFQERKLRRLADLSAKLFNEVNYERRQQFFHEGKVDIKGTYKKYYEKYKEKLRTNAQAVLNKNNEAWS

SEQ ID NO: 28987 - protein, 85 aa, unidentified
  REGION 1..85: note = Description of Unknown:cds_NC_007409.1_cds_YP_319871.1_40 target sequence
SFFSLLNLKKEGKLPQHIKHVSPPGYCKDRKTKKRKLILIVRQDRYKVDAENNKLILKDFNMEIEFVGRLRWYGKQGRLEIIFDE

SEQ ID NO: 28988 - protein, 85 aa, unidentified
  REGION 1..85: note = Description of Unknown:cds_NC_007409.1_cds_YP_319871.1_40 target sequence
TRNAWYAHIPVEVGVEETGKKSKHVVKGERKSIQIAKPKGNKVASIDLGINVIASVVVSDGTWLLYKGIRTKEDYFYFHKRIAEV

SEQ ID NO: 28989 - protein, 85 aa, unidentified
  REGION 1..85: note = Description of Unknown:cds_NC_007409.1_cds_YP_319871.1_40 target sequence
QSLADRTRNIGEYEAYLELLREERRLFKKLKRRLLHLYRNLASHLIKTLHELGVSTIYLGNPFNIVQEKGDNFMTDKWPYRKLMH

SEQ ID NO: 28990 - protein, 85 aa, unidentified
  REGION 1..85: note = Description of Unknown:cds_NC_007409.1_cds_YP_319871.1_40 target sequence
AIELKAQEYGMKVYEVDEYNTTKYCAYHDVKVKRNPRGVVICPKGHKLHSDLNGALNILKKAVGVVVNEVKKPLSFIVDHNRVAP

SEQ ID NO: 28991 - protein, 85 aa, unidentified
  REGION 1..85: note = Description of Unknown:cds_NC_001906.3_cds_NP_047108.1_3 target sequence
IQELEREGSHPGGSLRLREPPQSSGNSRNQPDRQLKTGDAASPGGVQRPGTPMPKSRIMPIKKGHRREVSICWDGRRAWVEEWCN

SEQ ID NO: 28992 - protein, 84 aa, unidentified
  REGION 1..84: note = Description of Unknown:cds_NC_001906.3_cds_NP_047108.1_3 target sequence
RQLKTGDAASPGGVQRPGTPMPKSRIMPIKKGHRREVSICWDGRRAWVEEWCNPVCSRITPQPRKQECYCGECPTECSQCCHEE

SEQ ID NO: 28993 - protein, 85 aa, unidentified
  REGION 1..85: note = Description of Unknown:cds_NC_001906.3_cds_NP_047108.1_3 target sequence
RNQPDRQLKTGDAASPGGVQRPGTPMPKSRIMPIKKGHRREVSICWDGRRAWVEEWCNPVCSRITPQPRKQECYCGECPTECSQC

SEQ ID NO: 28994 - protein, 85 aa, unidentified
  REGION 1..85: note = Description of Unknown:cds_NC_002728.1_cds_NP_112023.1_3 target sequence
IRELLKENSLINCQQGKDAQPPYHWSIERSISPDKTEIVNGAVQTADRQRPGTPMPKSRGIPIKKGHRREISICWDGKRAWVEEW

SEQ ID NO: 28995 - protein, 84 aa, unidentified
  REGION 1..84: note = Description of Unknown:cds_NC_002728.1_cds_NP_112023.1_3 target sequence
SPDKTEIVNGAVQTADRQRPGTPMPKSRGIPIKKGHRREISICWDGKRAWVEEWCNPACSRITPLPRRQECQCGECPTECFHCG

SEQ ID NO: 28996 - protein, 85 aa, unidentified
  REGION 1..85: note = Description of Unknown:cds_NC_002728.1_cds_NP_112023.1_3 target sequence
ERSISPDKTEIVNGAVQTADRQRPGTPMPKSRGIPIKKGHRREISICWDGKRAWVEEWCNPACSRITPLPRRQECQCGECPTECF

SEQ ID NO: 28997 - protein, 85 aa, unidentified
  REGION 1..85: note = Description of Unknown:cds_NZ_WFIY01000004.1_cds_WP_155862975.1_845 target sequence
NICPLDWRYGSDEMRKIFSREGIIRYRIQVEIALLYALKDLGYVSQEDINVVEKVSENIDLSEIDKLEEKLGHDVMAMVVWLAEK

SEQ ID NO: 28998 - protein, 85 aa, unidentified
  REGION 1..85: note = Description of Unknown:cds_NZ_WFIY01000004.1_cds_WP_155862975.1_845 target sequence
SGESGKFIHFGATSYDIVDTAYALMFRDALNIIERKLLEILDTLSQMSIKYKDTIMIGRTHGQHALPITLGFKFANYVYELSRSL

SEQ ID NO: 28999 - protein, 85 aa, unidentified
  REGION 1..85: note = Description of Unknown:cds_NZ_WFIY01000004.1_cds_WP_155862975.1_845 target sequence
ERIKDTERRLIKGKFAGAVGTMAAWGDKGRIIEEKVMQKLGLTPHEISTQVAPRDGFAEIISDLAILASQLDRFALEVRELMRPE

SEQ ID NO: 29000 - protein, 85 aa, unidentified
  REGION 1..85: note = Description of Unknown:cds_NZ_WFIY01000004.1_cds_WP_155862975.1_845 target sequence
IRELSEGVGNRVGSSTMPHKENPVTAEKISGLAKVIRGLCLTELENIPLWHERDLTNSSSERIVLSHAFLIIDEMLDSMLSLLHN

SEQ ID NO: 29001 - protein, 85 aa, unidentified
  REGION 1..85: note = Description of Unknown:cds_NZ_WFIY01000004.1_cds_WP_155862975.1_845 target sequence
LIVYPENMKKNIEITKGLIMAESLMINLTLKGMPRHIAHELSMKLSRDAENNGRSLLEEAMENEVIKKYFTADEIRRILDPNNYL

SEQ ID NO: 29002 - protein, 84 aa, unidentified
  REGION 1..84: note = Description of Unknown:cds_NZ_WFIY01000004.1_cds_WP_155862975.1_845 target sequence
GMPRHIAHELSMKLSRDAENNGRSLLEEAMENEVIKKYFTADEIRRILDPNNYLGQTEYLIQRAIKYYEKLKQEYNLKIQNTNS

SEQ ID NO: 29003 - protein, 85 aa, unidentified
  REGION 1..85: note = Description of Unknown:cds_NZ_WFIY01000004.1_cds_WP_155862975.1_845 target sequence
IQVEIALLYALKDLGYVSQEDINVVEKVSENIDLSEIDKLEEKLGHDVMAMVVWLAEKSGESGKFIHFGATSYDIVDTAYALMFR

SEQ ID NO: 29004 - protein, 85 aa, unidentified
  REGION 1..85: note = Description of Unknown:cds_NZ_WFIY01000004.1_cds_WP_155862975.1_845 target sequence
DALNIIERKLLEILDTLSQMSIKYKDTIMIGRTHGQHALPITLGFKFANYVYELSRSLERIKDTERRLIKGKFAGAVGTMAAWGD

SEQ ID NO: 29005 - protein, 85 aa, unidentified
  REGION 1..85: note = Description of Unknown:cds_NZ_WFIY01000004.1_cds_WP_155862975.1_845 target sequence
KGRIIEEKVMQKLGLTPHEISTQVAPRDGFAEIISDLAILASQLDRFALEVRELMRPEIRELSEGVGNRVGSSTMPHKENPVTAE

SEQ ID NO: 29006 - protein, 85 aa, unidentified
  REGION 1..85: note = Description of Unknown:cds_NZ_WFIY01000004.1_cds_WP_155862975.1_845 target sequence
KISGLAKVIRGLCLTELENIPLWHERDLTNSSSERIVLSHAFLIIDEMLDSMLSLLHNLIVYPENMKKNIEITKGLIMAESLMIN

SEQ ID NO: 29007 - protein, 85 aa, unidentified
  REGION 1..85: note = Description of Unknown:cds_NZ_WFIY01000004.1_cds_WP_155862975.1_845 target sequence
LTLKGMPRHIAHELSMKLSRDAENNGRSLLEEAMENEVIKKYFTADEIRRILDPNNYLGQTEYLIQRAIKYYEKLKQEYNLKIQN

SEQ ID NO: 29008 - protein, 85 aa, unidentified
  REGION 1..85: note = Description of Unknown:cds_NZ_WFIY01000004.1_cds_WP_155862664.1_457 target sequence
SWSLLELIRNNPDELIDSLKKRNMDASLALKAVELDKKWRSILQEVEKLRHQHNEINSQIPKLKPEERKAKIEEAKKLLQVLEAK

SEQ ID NO: 29009 - protein, 85 aa, unidentified
  REGION 1..85: note = Description of Unknown:cds_NZ_WFIY01000004.1_cds_WP_155862664.1_457 target sequence
EKELKEIEEQRDEILRSLPNIISPDVPVGPDDTYNVPIKFWGKFKVYEKDLEEFKKQLNGAQVEYEIINWKPVGHADMLENVLKL

SEQ ID NO: 29010 - protein, 85 aa, unidentified
  REGION 1..85: note = Description of Unknown:cds_NZ_WFIY01000004.1_cds_WP_155862664.1_457 target sequence
GNTEKASQVAGSRFYYLFDDLVWLDFALLLYAIDTMTSKGYRLVLPPYMLRGEVIHAVIDLDTFKDAIYKIENDDLYLIATAEHP

SEQ ID NO: 29011 - protein, 85 aa, unidentified
  REGION 1..85: note = Description of Unknown:cds_NZ_WFIY01000004.1_cds_WP_155862664.1_457 target sequence
LAALYYKEDIEKEELPIKLVGISPAFRREAGAANKDLKGIFRVHQFHKVEQFIFSLPEDSWKYHQELLSNAEEIFQGLGIPYRIV

SEQ ID NO: 29012 - protein, 85 aa, unidentified
  REGION 1..85: note = Description of Unknown:cds_NZ_WFIY01000004.1_cds_WP_155862664.1_457 target sequence
NIASGDLGACAAKKYDLEAWMPAQAKFREMVSCSNCTDWQAFRMKIRYVDRKNNKKGYVHTLNSTAVASTRTITAILENFQNEDG

SEQ ID NO: 29013 - protein, 84 aa, unidentified
  REGION 1..84: note = Description of Unknown:cds_NZ_WFIY01000004.1_cds_WP_155862664.1_457 target sequence
VSCSNCTDWQAFRMKIRYVDRKNNKKGYVHTLNSTAVASTRTITAILENFQNEDGTVEIPKVLRKYLEPFKAAPKDYIYPRKKK

SEQ ID NO: 29014 - protein, 85 aa, unidentified
  REGION 1..85: note = Description of Unknown:cds_NZ_WFIY01000004.1_cds_WP_155862664.1_457 target sequence
LALKAVELDKKWRSILQEVEKLRHQHNEINSQIPKLKPEERKAKIEEAKKLLQVLEAKEKELKEIEEQRDEILRSLPNIISPDVP

SEQ ID NO: 29015 - protein, 85 aa, unidentified
  REGION 1..85: note = Description of Unknown:cds_NZ_WFIY01000004.1_cds_WP_155862664.1_457 target sequence
VGPDDTYNVPIKFWGKFKVYEKDLEEFKKQLNGAQVEYEIINWKPVGHADMLENVLKLGNTEKASQVAGSRFYYLFDDLVWLDFA

SEQ ID NO: 29016 - protein, 85 aa, unidentified
  REGION 1..85: note = Description of Unknown:cds_NZ_WFIY01000004.1_cds_WP_155862664.1_457 target sequence
LLLYAIDTMTSKGYRLVLPPYMLRGEVIHAVIDLDTFKDAIYKIENDDLYLIATAEHPLAALYYKEDIEKEELPIKLVGISPAFR

SEQ ID NO: 29017 - protein, 85 aa, unidentified
  REGION 1..85: note = Description of Unknown:cds_NZ_WFIY01000004.1_cds_WP_155862664.1_457 target sequence
REAGAANKDLKGIFRVHQFHKVEQFIFSLPEDSWKYHQELLSNAEEIFQGLGIPYRIVNIASGDLGACAAKKYDLEAWMPAQAKF

SEQ ID NO: 29018 - protein, 85 aa, unidentified
  REGION 1..85: note = Description of Unknown:cds_NZ_WFIY01000004.1_cds_WP_155862664.1_457 target sequence
REMVSCSNCTDWQAFRMKIRYVDRKNNKKGYVHTLNSTAVASTRTITAILENFQNEDGTVEIPKVLRKYLEPFKAAPKDYIYPRK

SEQ ID NO: 29019 - protein, 85 aa, unidentified
  REGION 1..85: note = Description of Unknown:cds_NZ_WFIY01000004.1_cds_WP_155864373.1_530 target sequence
SDSGKSFITAGLVRLLGGIPFKSQNMSLNSFPSEEGGEIAFIQAFQAIGAGLKPSSYMNPILLKPSSSGKIEVIFFGKSLGNLRP

SEQ ID NO: 29020 - protein, 85 aa, unidentified
  REGION 1..85: note = Description of Unknown:cds_NZ_WFIY01000004.1_cds_WP_155864373.1_530 target sequence
EDYYKMIPSFWDKIKKSIKENYVIEAAGGIEPNFMERDLTAFLPMKEGIPAILVLDIDRGGAFSSAYGVYQMLPPSVRNSLKGFI

SEQ ID NO: 29021 - protein, 85 aa, unidentified
  REGION 1..85: note = Description of Unknown:cds_NZ_WFIY01000004.1_cds_WP_155864373.1_530 target sequence
INKFRGSPSLLDSAIKWLTERTGMKFLGTIPYFDEELILPEDSMNIKDFGEGGEASIAIINYPYISNFNEFFALLKSNASVRFVN

SEQ ID NO: 29022 - protein, 85 aa, unidentified
  REGION 1..85: note = Description of Unknown:cds_NZ_WFIY01000004.1_cds_WP_155864373.1_530 target sequence
NPKKLRKDDILILPGSRNTYESLVWLKERGFLEEIRKRQVLGVCGGFQIMGKRLIDPFGIESGEPREYDGIGIFDFVVKFEEEKV

SEQ ID NO: 29023 - protein, 85 aa, unidentified
  REGION 1..85: note = Description of Unknown:cds_NZ_WFIY01000004.1_cds_WP_155864373.1_530 target sequence
VSTSEGLLQDGSIIKGYEIRRGRIVYEGNDKPLLTIVRRNNKDVDVKDGSLKEDKLGLSIHGSLYSKNLLENFGVKIFSKSMEEE

SEQ ID NO: 29024 - protein, 84 aa, unidentified
  REGION 1..84: note = Description of Unknown:cds_NZ_WFIY01000004.1_cds_WP_155864373.1_530 target sequence
KPLLTIVRRNNKDVDVKDGSLKEDKLGLSIHGSLYSKNLLENFGVKIFSKSMEEEIISMAEKIEKIIKQNVDIDEIKEIYTQGK

SEQ ID NO: 29025 - protein, 85 aa, unidentified
  REGION 1..85: note = Description of Unknown:cds_NZ_WFIY01000004.1_cds_WP_155864373.1_530 target sequence
LNSFPSEEGGEIAFIQAFQAIGAGLKPSSYMNPILLKPSSSGKIEVIFFGKSLGNLRPEDYYKMIPSFWDKIKKSIKENYVIEAA

SEQ ID NO: 29026 - protein, 85 aa, unidentified
  REGION 1..85: note = Description of Unknown:cds_NZ_WFIY01000004.1_cds_WP_155864373.1_530 target sequence
GGIEPNFMERDLTAFLPMKEGIPAILVLDIDRGGAFSSAYGVYQMLPPSVRNSLKGFIINKFRGSPSLLDSAIKWLTERTGMKFL

SEQ ID NO: 29027 - protein, 85 aa, unidentified
  REGION 1..85: note = Description of Unknown:cds_NZ_WFIY01000004.1_cds_WP_155864373.1_530 target sequence
GTIPYFDEELILPEDSMNIKDFGEGGEASIAIINYPYISNFNEFFALLKSNASVRFVNNPKKLRKDDILILPGSRNTYESLVWLK

SEQ ID NO: 29028 - protein, 85 aa, unidentified
  REGION 1..85: note = Description of Unknown:cds_NZ_WFIY01000004.1_cds_WP_155864373.1_530 target sequence
ERGFLEEIRKRQVLGVCGGFQIMGKRLIDPFGIESGEPREYDGIGIFDFVVKFEEEKVVSTSEGLLQDGSIIKGYEIRRGRIVYE

SEQ ID NO: 29029 - protein, 85 aa, unidentified
  REGION 1..85: note = Description of Unknown:cds_NZ_WFIY01000004.1_cds_WP_155864373.1_530 target sequence
GNDKPLLTIVRRNNKDVDVKDGSLKEDKLGLSIHGSLYSKNLLENFGVKIFSKSMEEEIISMAEKIEKIIKQNVDIDEIKEIYTQ

SEQ ID NO: 29030 - protein, 85 aa, unidentified
  REGION 1..85: note = Description of Unknown:cds_NZ_WFIY01000004.1_cds_WP_155863366.1_1338 target sequence
SVTMGQESINLDALKRAIDDVFYSQIDSTILYYLQSCVNCKACEAACPFTPTSLKYSPVNKAEIARQLYRSRFTVWGKTIGRIIG

SEQ ID NO: 29031 - protein, 85 aa, unidentified
  REGION 1..85: note = Description of Unknown:cds_NZ_WFIY01000004.1_cds_WP_155863366.1_1338 target sequence
GSKKYLNLEEAETMADYVWHCTNCGACMFVCPMAIDSGALIDLLRQVAFRAGMAPKIYTDIEQLEVSGKYWDIPVFRDAWNNLIL

SEQ ID NO: 29032 - protein, 85 aa, unidentified
  REGION 1..85: note = Description of Unknown:cds_NZ_WFIY01000004.1_cds_WP_155863366.1_1338 target sequence
KMKEVIGKDIPLDKKNSEVLFYASIYEAMVYPDVLVKVAKILDMLGKDWTFMSKPLGIRPPVGLVIGDKEGALNVMKKVYAYFTE

SEQ ID NO: 29033 - protein, 85 aa, unidentified
  REGION 1..85: note = Description of Unknown:cds_NZ_WFIY01000004.1_cds_WP_155863366.1_1338 target sequence
MSPKYVMLTAGGFEYPALRYTMHEVLKVQPKYEVVHVTELLAKWYEAKEFEIEPIDEVITWHDPCQLGRRGGVFEAPRVLMKALS

SEQ ID NO: 29034 - protein, 85 aa, unidentified
  REGION 1..85: note = Description of Unknown:cds_NZ_WFIY01000004.1_cds_WP_155863366.1_1338 target sequence
KNFKELPSHGVNSFCCSRGGGGCGLPSMVENMAKVIGIPISEKDKKFLDSTLEPLIKAGKIKVNEINKIKASEVLTGCPVCIESI

SEQ ID NO: 29035 - protein, 84 aa, unidentified
  REGION 1..84: note = Description of Unknown:cds_NZ_WFIY01000004.1_cds_WP_155863366.1_1338 target sequence
NMAKVIGIPISEKDKKFLDSTLEPLIKAGKIKVNEINKIKASEVLTGCPVCIESIGFSIDYYHANAKVNHIIELLADRIKVTKK

SEQ ID NO: 29036 - protein, 85 aa, unidentified
  REGION 1..85: note = Description of Unknown:cds_NZ_WFIY01000004.1_cds_WP_155863366.1_1338 target sequence
STILYYLQSCVNCKACEAACPFTPTSLKYSPVNKAEIARQLYRSRFTVWGKTIGRIIGGSKKYLNLEEAETMADYVWHCTNCGAC

SEQ ID NO: 29037 - protein, 85 aa, unidentified
  REGION 1..85: note = Description of Unknown:cds_NZ_WFIY01000004.1_cds_WP_155863366.1_1338 target sequence
MFVCPMAIDSGALIDLLRQVAFRAGMAPKIYTDIEQLEVSGKYWDIPVFRDAWNNLILKMKEVIGKDIPLDKKNSEVLFYASIYE

SEQ ID NO: 29038 - protein, 85 aa, unidentified
  REGION 1..85: note = Description of Unknown:cds_NZ_WFIY01000004.1_cds_WP_155863366.1_1338 target sequence
AMVYPDVLVKVAKILDMLGKDWTFMSKPLGIRPPVGLVIGDKEGALNVMKKVYAYFTEMSPKYVMLTAGGFEYPALRYTMHEVLK

SEQ ID NO: 29039 - protein, 85 aa, unidentified
  REGION 1..85: note = Description of Unknown:cds_NZ_WFIY01000004.1_cds_WP_155863366.1_1338 target sequence
VQPKYEVVHVTELLAKWYEAKEFEIEPIDEVITWHDPCQLGRRGGVFEAPRVLMKALSKNFKELPSHGVNSFCCSRGGGGCGLPS

SEQ ID NO: 29040 - protein, 85 aa, unidentified
  REGION 1..85: note = Description of Unknown:cds_NZ_WFIY01000004.1_cds_WP_155863366.1_1338 target sequence
MVENMAKVIGIPISEKDKKFLDSTLEPLIKAGKIKVNEINKIKASEVLTGCPVCIESIGFSIDYYHANAKVNHIIELLADRIKVT

SEQ ID NO: 29041 - protein, 85 aa, unidentified
  REGION 1..85: note = Description of Unknown:cds_NZ_WFIY01000004.1_cds_WP_155863714.1_1575 target sequence
RLEWRNVLVSGMGVFTDGYNLYSISLAYYFISSSFHFVNLTLGLIIASSYYGAALSALLFGIIADKQGRKIMYGIDTALMTIGAL

SEQ ID NO: 29042 - protein, 85 aa, unidentified
  REGION 1..85: note = Description of Unknown:cds_NZ_WFIY01000004.1_cds_WP_155863714.1_1575 target sequence
LQAFSENIPELFVSRLILGMGIGADYVLSPIIVAENARAENRGKLMVITFAFMWGLGAVAAAFVEQMLILLHLPSYIIWRVVLGF

SEQ ID NO: 29043 - protein, 85 aa, unidentified
  REGION 1..85: note = Description of Unknown:cds_NZ_WFIY01000004.1_cds_WP_155863714.1_1575 target sequence
GAVPAFSVIFLRRRIYETILFVSRVKPLEKDIKGIEKEIGKKLTIVKDTTPFIKRLKSSTLLIIASSILWMLYDMYSSTFSVYGP

SEQ ID NO: 29044 - protein, 85 aa, unidentified
  REGION 1..85: note = Description of Unknown:cds_NZ_WFIY01000004.1_cds_WP_155863714.1_1575 target sequence
IVIAGNLGISAIEFTYIAQFAAGIPGQLICMSTIDKVGRKPLIVIGYAGVSFWLMMYFLLLYDPSLFGLHIAVPPNPLCAAKSLV

SEQ ID NO: 29045 - protein, 85 aa, unidentified
  REGION 1..85: note = Description of Unknown:cds_NZ_WFIY01000004.1_cds_WP_155863714.1_1575 target sequence
GEAALLGFTFYLLNYLFSAIGPASIIGSAMVTPEIVPTKIRGTSQAISVSADRLSAALVSTAFPLLLAKYGLATMIGIYSLIALI

SEQ ID NO: 29046 - protein, 84 aa, unidentified
  REGION 1..84: note = Description of Unknown:cds_NZ_WFIY01000004.1_cds_WP_155863714.1_1575 target sequence
VTPEIVPTKIRGTSQAISVSADRLSAALVSTAFPLLLAKYGLATMIGIYSLIALISSLITLFFIPETKKKELEVFENVTINQET

SEQ ID NO: 29047 - protein, 85 aa, unidentified
  REGION 1..85: note = Description of Unknown:cds_NZ_WFIY01000004.1_cds_WP_155863714.1_1575 target sequence
YYFISSSFHFVNLTLGLIIASSYYGAALSALLFGIIADKQGRKIMYGIDTALMTIGALLQAFSENIPELFVSRLILGMGIGADYV

SEQ ID NO: 29048 - protein, 85 aa, unidentified
  REGION 1..85: note = Description of Unknown:cds_NZ_WFIY01000004.1_cds_WP_155863714.1_1575 target sequence
LSPIIVAENARAENRGKLMVITFAFMWGLGAVAAAFVEQMLILLHLPSYIIWRVVLGFGAVPAFSVIFLRRRIYETILFVSRVKP

SEQ ID NO: 29049 - protein, 85 aa, unidentified
  REGION 1..85: note = Description of Unknown:cds_NZ_WFIY01000004.1_cds_WP_155863714.1_1575 target sequence
LEKDIKGIEKEIGKKLTIVKDTTPFIKRLKSSTLLIIASSILWMLYDMYSSTFSVYGPIVIAGNLGISAIEFTYIAQFAAGIPGQ

SEQ ID NO: 29050 - protein, 85 aa, unidentified
  REGION 1..85: note = Description of Unknown:cds_NZ_WFIY01000004.1_cds_WP_155863714.1_1575 target sequence
LICMSTIDKVGRKPLIVIGYAGVSFWLMMYFLLLYDPSLFGLHIAVPPNPLCAAKSLVGEAALLGFTFYLLNYLFSAIGPASIIG

SEQ ID NO: 29051 - protein, 85 aa, unidentified
  REGION 1..85: note = Description of Unknown:cds_NZ_WFIY01000004.1_cds_WP_155863714.1_1575 target sequence
SAMVTPEIVPTKIRGTSQAISVSADRLSAALVSTAFPLLLAKYGLATMIGIYSLIALISSLITLFFIPETKKKELEVFENVTINQ

SEQ ID NO: 29052 - protein, 85 aa, unidentified
  REGION 1..85: note = Description of Unknown:cds_NZ_WFIY01000004.1_cds_WP_155863098.1_1014 target sequence
GKLFGTDGVRGIINKELTIELAQKLGQAIGTFFGKGSTILIGRDARAGGDMYTRAVESGLLSTGVKVYEGGFAPTPALQYAVKTL

SEQ ID NO: 29053 - protein, 85 aa, unidentified
  REGION 1..85: note = Description of Unknown:cds_NZ_WFIY01000004.1_cds_WP_155863098.1_1014 target sequence
GYDAGVIITASHNPAEYNGIKVIDKDGVEISRDKENEIEDIYFSGKFYSEDWRALTYDVKKEDRVIDNYVKGILSHVDVEKIRKK

SEQ ID NO: 29054 - protein, 85 aa, unidentified
  REGION 1..85: note = Description of Unknown:cds_NZ_WFIY01000004.1_cds_WP_155863098.1_1014 target sequence
NFKVLIDGANSVGSITSPIVARELGCKIYGINTNLDPLFPARTPEPTFDSLKDTAEIAKELKIDLGVAHDGDADRAIFIDSQGRV

SEQ ID NO: 29055 - protein, 85 aa, unidentified
  REGION 1..85: note = Description of Unknown:cds_NZ_WFIY01000004.1_cds_WP_155863098.1_1014 target sequence
QWGDRSGALLSYWASTKENNFPRRIFTAVSSSVLVQDYLKKYNIEVVWTKVGSVDIAHKLMEEKGIAGFEENGGFIFPLHQYVRD

SEQ ID NO: 29056 - protein, 85 aa, unidentified
  REGION 1..85: note = Description of Unknown:cds_NZ_WFIY01000004.1_cds_WP_155863098.1_1014 target sequence
GAMSFALMLEMLASENISSAELFDTLPKYYTVKTKVYINKNTDVEKIYEAVKSTYSQGNIITIDGVKIITPDYWFLVRKSGTEPI

SEQ ID NO: 29057 - protein, 84 aa, unidentified
  REGION 1..84: note = Description of Unknown:cds_NZ_WFIY01000004.1_cds_WP_155863098.1_1014 target sequence
YTVKTKVYINKNTDVEKIYEAVKSTYSQGNIITIDGVKIITPDYWFLVRKSGTEPIIRVMVEAKDKEKAENLANELVKLVGSLI

SEQ ID NO: 29058 - protein, 85 aa, unidentified
  REGION 1..85: note = Description of Unknown:cds_NZ_WFIY01000004.1_cds_WP_155863098.1_1014 target sequence
AIGTFFGKGSTILIGRDARAGGDMYTRAVESGLLSTGVKVYEGGFAPTPALQYAVKTLGYDAGVIITASHNPAEYNGIKVIDKDG

SEQ ID NO: 29059 - protein, 85 aa, unidentified
  REGION 1..85: note = Description of Unknown:cds_NZ_WFIY01000004.1_cds_WP_155863098.1_1014 target sequence
VEISRDKENEIEDIYFSGKFYSEDWRALTYDVKKEDRVIDNYVKGILSHVDVEKIRKKNFKVLIDGANSVGSITSPIVARELGCK

SEQ ID NO: 29060 - protein, 85 aa, unidentified
  REGION 1..85: note = Description of Unknown:cds_NZ_WFIY01000004.1_cds_WP_155863098.1_1014 target sequence
IYGINTNLDPLFPARTPEPTFDSLKDTAEIAKELKIDLGVAHDGDADRAIFIDSQGRVQWGDRSGALLSYWASTKENNFPRRIFT

SEQ ID NO: 29061 - protein, 85 aa, unidentified
  REGION 1..85: note = Description of Unknown:cds_NZ_WFIY01000004.1_cds_WP_155863098.1_1014 target sequence
AVSSSVLVQDYLKKYNIEVVWTKVGSVDIAHKLMEEKGIAGFEENGGFIFPLHQYVRDGAMSFALMLEMLASENISSAELFDTLP

SEQ ID NO: 29062 - protein, 85 aa, unidentified
  REGION 1..85: note = Description of Unknown:cds_NZ_WFIY01000004.1_cds_WP_155863098.1_1014 target sequence
KYYTVKTKVYINKNTDVEKIYEAVKSTYSQGNIITIDGVKIITPDYWFLVRKSGTEPIIRVMVEAKDKEKAENLANELVKLVGSL

SEQ ID NO: 29063 - protein, 85 aa, unidentified
  REGION 1..85: note = Description of Unknown:cds_NZ_WFIY01000004.1_cds_WP_155863707.1_1565 target sequence
IVDVLIAGAGGAGYPAAFRLDKAGLKVVMADPKGELGGNCLYQGCVPSKTLRELAHLYVRAKKLLGFNETISFEKAQDHKDFVQE

SEQ ID NO: 29064 - protein, 85 aa, unidentified
  REGION 1..85: note = Description of Unknown:cds_NZ_WFIY01000004.1_cds_WP_155863707.1_1565 target sequence
TRFKQHKQELAESSIEFYKGEVEIIDNHHAIIKDEKGDVQVEYKYLILATGSEPFKPKFPGSEYCITSDDLYKYKTSIRKLPKEM

SEQ ID NO: 29065 - protein, 85 aa, unidentified
  REGION 1..85: note = Description of Unknown:cds_NZ_WFIY01000004.1_cds_WP_155863707.1_1565 target sequence
IIIGGGYIALETASIMNALGTKVHVLVRSDRVLRGLDSRLVSSLLSMLDKNIDIRFNSPVIEVQKIGDKDEYKVIYSEKSEKKEI

SEQ ID NO: 29066 - protein, 85 aa, unidentified
  REGION 1..85: note = Description of Unknown:cds_NZ_WFIY01000004.1_cds_WP_155863707.1_1565 target sequence
SANLVMLATGRRPAYPKGTEKLGLAIGKTGIMVDETIATNVKNVYAPGDVNGRSMFFHSAVRQSLVSAHNILAGTPIDYMDFQSV

SEQ ID NO: 29067 - protein, 85 aa, unidentified
  REGION 1..85: note = Description of Unknown:cds_NZ_WFIY01000004.1_cds_WP_155863707.1_1565 target sequence
PISVFTIPSIAYVGILPEEAKRRGIDIIEASYPLSKDSRAQMYDEAEGEVRLFFERGSLRIIGGWIIGIDAPTMINEIGIAVANG

SEQ ID NO: 29068 - protein, 84 aa, unidentified
  REGION 1..84: note = Description of Unknown:cds_NZ_WFIY01000004.1_cds_WP_155863707.1_1565 target sequence
ASYPLSKDSRAQMYDEAEGEVRLFFERGSLRIIGGWIIGIDAPTMINEIGIAVANGLTARQMANYADQHPMSNESISYAARSIF

SEQ ID NO: 29069 - protein, 85 aa, unidentified
  REGION 1..85: note = Description of Unknown:cds_NZ_WFIY01000004.1_cds_WP_155863707.1_1565 target sequence
VMADPKGELGGNCLYQGCVPSKTLRELAHLYVRAKKLLGFNETISFEKAQDHKDFVQETRFKQHKQELAESSIEFYKGEVEIIDN

SEQ ID NO: 29070 - protein, 85 aa, unidentified
  REGION 1..85: note = Description of Unknown:cds_NZ_WFIY01000004.1_cds_WP_155863707.1_1565 target sequence
HHAIIKDEKGDVQVEYKYLILATGSEPFKPKFPGSEYCITSDDLYKYKTSIRKLPKEMIIIGGGYIALETASIMNALGTKVHVLV

SEQ ID NO: 29071 - protein, 85 aa, unidentified
  REGION 1..85: note = Description of Unknown:cds_NZ_WFIY01000004.1_cds_WP_155863707.1_1565 target sequence
RSDRVLRGLDSRLVSSLLSMLDKNIDIRFNSPVIEVQKIGDKDEYKVIYSEKSEKKEISANLVMLATGRRPAYPKGTEKLGLAIG

SEQ ID NO: 29072 - protein, 85 aa, unidentified
  REGION 1..85: note = Description of Unknown:cds_NZ_WFIY01000004.1_cds_WP_155863707.1_1565 target sequence
KTGIMVDETIATNVKNVYAPGDVNGRSMFFHSAVRQSLVSAHNILAGTPIDYMDFQSVPISVFTIPSIAYVGILPEEAKRRGIDI

SEQ ID NO: 29073 - protein, 85 aa, unidentified
  REGION 1..85: note = Description of Unknown:cds_NZ_WFIY01000004.1_cds_WP_155863707.1_1565 target sequence
IEASYPLSKDSRAQMYDEAEGEVRLFFERGSLRIIGGWIIGIDAPTMINEIGIAVANGLTARQMANYADQHPMSNESISYAARSI

SEQ ID NO: 29074 - protein, 85 aa, unidentified
  REGION 1..85: note = Description of Unknown:cds_NZ_WFIY01000004.1_cds_WP_155863266.1_1220 target sequence
AGEEKTKSRFDDYSIRPVPKESRYGFYNIFLVFSSVYGAIAVIWAGGALGYELTFSQAILAVISGTIVLAILGALIAAVGSYSGL

SEQ ID NO: 29075 - protein, 85 aa, unidentified
  REGION 1..85: note = Description of Unknown:cds_NZ_WFIY01000004.1_cds_WP_155863266.1_1220 target sequence
STYVMWRFPLGRWGGKIAGLLLITITTGIGWYAVETWLFGIVMSEIFPNNPLFSVGVASIWGGILMIIMTYVGYRMLSFLSYFTI

SEQ ID NO: 29076 - protein, 85 aa, unidentified
  REGION 1..85: note = Description of Unknown:cds_NZ_WFIY01000004.1_cds_WP_155863266.1_1220 target sequence
PFHIWLIGIGIAIVLALKGGIPAVFAASPAHETNLLYGISSVIGLYIAGTIISPDIARFAKSPKDASTAWISHIIFLYPFLILGG

SEQ ID NO: 29077 - protein, 85 aa, unidentified
  REGION 1..85: note = Description of Unknown:cds_NZ_WFIY01000004.1_cds_WP_155863266.1_1220 target sequence
VAIVLVTGSYLITNAMLDLGMGIGVLLIIVFGQFIINTDNLYSGSLSLVNLYPIRREIASIINGVIGTAIAAYIGFTAGSSIVPF

SEQ ID NO: 29078 - protein, 85 aa, unidentified
  REGION 1..85: note = Description of Unknown:cds_NZ_WFIY01000004.1_cds_WP_155863266.1_1220 target sequence
ENFISLLGDFLPAMGGILIADFYVVKSFLTKMRNPHERYQFMPGNIYYNLNIAGVLALALGSIVGYFVSVGIPAINSLLTGFLSY

SEQ ID NO: 29079 - protein, 84 aa, unidentified
  REGION 1..84: note = Description of Unknown:cds_NZ_WFIY01000004.1_cds_WP_155863266.1_1220 target sequence
LTKMRNPHERYQFMPGNIYYNLNIAGVLALALGSIVGYFVSVGIPAINSLLTGFLSYIIIYYVFIKMGRKPEIFPYVYRGGDLK

SEQ ID NO: 29080 - protein, 85 aa, unidentified
  REGION 1..85: note = Description of Unknown:cds_NZ_WFIY01000004.1_cds_WP_155863266.1_1220 target sequence
NIFLVFSSVYGAIAVIWAGGALGYELTFSQAILAVISGTIVLAILGALIAAVGSYSGLSTYVMWRFPLGRWGGKIAGLLLITITT

SEQ ID NO: 29081 - protein, 85 aa, unidentified
  REGION 1..85: note = Description of Unknown:cds_NZ_WFIY01000004.1_cds_WP_155863266.1_1220 target sequence
GIGWYAVETWLFGIVMSEIFPNNPLFSVGVASIWGGILMIIMTYVGYRMLSFLSYFTIPFHIWLIGIGIAIVLALKGGIPAVFAA

SEQ ID NO: 29082 - protein, 85 aa, unidentified
  REGION 1..85: note = Description of Unknown:cds_NZ_WFIY01000004.1_cds_WP_155863266.1_1220 target sequence
SPAHETNLLYGISSVIGLYIAGTIISPDIARFAKSPKDASTAWISHIIFLYPFLILGGVAIVLVTGSYLITNAMLDLGMGIGVLL

SEQ ID NO: 29083 - protein, 85 aa, unidentified
  REGION 1..85: note = Description of Unknown:cds_NZ_WFIY01000004.1_cds_WP_155863266.1_1220 target sequence
IIVFGQFIINTDNLYSGSLSLVNLYPIRREIASIINGVIGTAIAAYIGFTAGSSIVPFENFISLLGDFLPAMGGILIADFYVVKS

SEQ ID NO: 29084 - protein, 85 aa, unidentified
  REGION 1..85: note = Description of Unknown:cds_NZ_WFIY01000004.1_cds_WP_155863266.1_1220 target sequence
FLTKMRNPHERYQFMPGNIYYNLNIAGVLALALGSIVGYFVSVGIPAINSLLTGFLSYIIIYYVFIKMGRKPEIFPYVYRGGDLK

SEQ ID NO: 29085 - protein, 85 aa, unidentified
  REGION 1..85: note = Description of Unknown:cds_NZ_WFIY01000004.1_cds_WP_155864286.1_2279 target sequence
LKNSHPHFLLMSSISRVALLGLIGTIVEWYDYYLFIYAALLAFPTLFFPSKSYLISMLASVSSYAIAFFARPLGATVFGHIGDRL

SEQ ID NO: 29086 - protein, 85 aa, unidentified
  REGION 1..85: note = Description of Unknown:cds_NZ_WFIY01000004.1_cds_WP_155864286.1_2279 target sequence
GRRHALSFDLVLVGIAMVSVGLMPTYATIGIIAPVAIFAFRFLQGLGVGGEWGGVATWVSEHVTSKRALITSLIEIASPIGFIGA

SEQ ID NO: 29087 - protein, 85 aa, unidentified
  REGION 1..85: note = Description of Unknown:cds_NZ_WFIY01000004.1_cds_WP_155864286.1_2279 target sequence
ATILLAFSKDFVTIGWRIGFLVGGSVAFLGAFLRYLATESLPFEKIKSEGKISKVPSIEVFKYAWKPILLLMLAIGSVFMAVYIP

SEQ ID NO: 29088 - protein, 85 aa, unidentified
  REGION 1..85: note = Description of Unknown:cds_NZ_WFIY01000004.1_cds_WP_155864286.1_2279 target sequence
ATVMPSLYLKAVGKSLGYPEYVNFLGLQMPITSALIYVFAIAGLVSTPIFGYLGDKIGRKASLILGDVLIAAFAYPYVYGFLSGN

SEQ ID NO: 29089 - protein, 85 aa, unidentified
  REGION 1..85: note = Description of Unknown:cds_NZ_WFIY01000004.1_cds_WP_155864286.1_2279 target sequence
LGLLFIMQFLIGFAAYGPYASMAAFYPESFPTKYRYSGASYGMQLAAAVEGGLMPILLVGLLGLPSQYLANSWIVITFLALWGII

SEQ ID NO: 29090 - protein, 84 aa, unidentified
  REGION 1..84: note = Description of Unknown:cds_NZ_WFIY01000004.1_cds_WP_155864286.1_2279 target sequence
SFPTKYRYSGASYGMQLAAAVEGGLMPILLVGLLGLPSQYLANSWIVITFLALWGIISALATLGLKETKGTQLAEEKVTDKVIS

SEQ ID NO: 29091 - protein, 85 aa, unidentified
  REGION 1..85: note = Description of Unknown:cds_NZ_WFIY01000004.1_cds_WP_155864286.1_2279 target sequence
EWYDYYLFIYAALLAFPTLFFPSKSYLISMLASVSSYAIAFFARPLGATVFGHIGDRLGRRHALSFDLVLVGIAMVSVGLMPTYA

SEQ ID NO: 29092 - protein, 85 aa, unidentified
  REGION 1..85: note = Description of Unknown:cds_NZ_WFIY01000004.1_cds_WP_155864286.1_2279 target sequence
TIGIIAPVAIFAFRFLQGLGVGGEWGGVATWVSEHVTSKRALITSLIEIASPIGFIGAATILLAFSKDFVTIGWRIGFLVGGSVA

SEQ ID NO: 29093 - protein, 85 aa, unidentified
  REGION 1..85: note = Description of Unknown:cds_NZ_WFIY01000004.1_cds_WP_155864286.1_2279 target sequence
FLGAFLRYLATESLPFEKIKSEGKISKVPSIEVFKYAWKPILLLMLAIGSVFMAVYIPATVMPSLYLKAVGKSLGYPEYVNFLGL

SEQ ID NO: 29094 - protein, 85 aa, unidentified
  REGION 1..85: note = Description of Unknown:cds_NZ_WFIY01000004.1_cds_WP_155864286.1_2279 target sequence
QMPITSALIYVFAIAGLVSTPIFGYLGDKIGRKASLILGDVLIAAFAYPYVYGFLSGNLGLLFIMQFLIGFAAYGPYASMAAFYP

SEQ ID NO: 29095 - protein, 85 aa, unidentified
  REGION 1..85: note = Description of Unknown:cds_NZ_WFIY01000004.1_cds_WP_155864286.1_2279 target sequence
ESFPTKYRYSGASYGMQLAAAVEGGLMPILLVGLLGLPSQYLANSWIVITFLALWGIISALATLGLKETKGTQLAEEKVTDKVIS

SEQ ID NO: 29096 - protein, 85 aa, unidentified
  REGION 1..85: note = Description of Unknown:hvTR_P12540 target sequence
LPCRSTGRRHALQHQPPQFKAHTGQRSTRSASIHRDRNNPDAHITSLEGQNPRPFGCSPPRSLQQQPAKPPQRGSLLDRDGIENI

SEQ ID NO: 29097 - protein, 85 aa, unidentified
  REGION 1..85: note = Description of Unknown:hvTR_P12540 target sequence
TELWDRLQLLKQTLDHMPMADGLKPLKNFKSLQELLSLGGERLLGELAKQNIRVRQMMNEVAPLLHEDGSCTSLNYHLQPVIGVI

SEQ ID NO: 29098 - protein, 85 aa, unidentified
  REGION 1..85: note = Description of Unknown:hvTR_P12540 target sequence
YGPTGCGKSQLLRNLLSAQLVTPAPETVFFIVPQVDMIPPSEIKSWEMQICEGNYVPGPEGTIIPQSGTLCPKFVKLSYDDLTLD

SEQ ID NO: 29099 - protein, 85 aa, unidentified
  REGION 1..85: note = Description of Unknown:hvTR_P12540 target sequence
HNYDVSDPENIFAQAAARGPIAIIMDECMENLGSHKGVSKFFHAFPSKLHDKFPKCTGYTVFVVLHNMNPRRDLAGNIANLKIQS

SEQ ID NO: 29100 - protein, 85 aa, unidentified
  REGION 1..85: note = Description of Unknown:hvTR_P12540 target sequence
KLHIMSPRMHPTQLNRFINTYTKGLPLAISLLLKDIFNHHAQRCCYDWIIYNTNPEHEALQWSYLHPKDGLMPMYLNIQAHLYKI

SEQ ID NO: 29101 - protein, 84 aa, unidentified
  REGION 1..84: note = Description of Unknown:hvTR_P12540 target sequence
AISLLLKDIFNHHAQRCCYDWIIYNTNPEHEALQWSYLHPKDGLMPMYLNIQAHLYKILEHIHRVLNDRERWSRAYHVRKNKYQ

SEQ ID NO: 29102 - protein, 85 aa, unidentified
  REGION 1..85: note = Description of Unknown:hvTR_P12540 target sequence
TRSASIHRDRNNPDAHITSLEGQNPRPFGCSPPRSLQQQPAKPPQRGSLLDRDGIENITELWDRLQLLKQTLDHMPMADGLKPLK

SEQ ID NO: 29103 - protein, 85 aa, unidentified
  REGION 1..85: note = Description of Unknown:hvTR_P12540 target sequence
NFKSLQELLSLGGERLLGELAKQNIRVRQMMNEVAPLLHEDGSCTSLNYHLQPVIGVIYGPTGCGKSQLLRNLLSAQLVTPAPET

SEQ ID NO: 29104 - protein, 85 aa, unidentified
  REGION 1..85: note = Description of Unknown:hvTR_P12540 target sequence
VFFIVPQVDMIPPSEIKSWEMQICEGNYVPGPEGTIIPQSGTLCPKFVKLSYDDLTLDHNYDVSDPENIFAQAAARGPIAIIMDE

SEQ ID NO: 29105 - protein, 85 aa, unidentified
  REGION 1..85: note = Description of Unknown:hvTR_P12540 target sequence
CMENLGSHKGVSKFFHAFPSKLHDKFPKCTGYTVFVVLHNMNPRRDLAGNIANLKIQSKLHIMSPRMHPTQLNRFINTYTKGLPL

SEQ ID NO: 29106 - protein, 85 aa, unidentified
  REGION 1..85: note = Description of Unknown:hvTR_Q6QCQ2 target sequence
ASASIPTDPDVSTICEDFMNLLPDEPSDDFALEVTDWANDEAIGSTPGEDSTTSRTVYVERTADTAYNPRYSKRRHGRRESYHHN

SEQ ID NO: 29107 - protein, 85 aa, unidentified
  REGION 1..85: note = Description of Unknown:hvTR_Q6QCQ2 target sequence
RPKTLVVVLPDSNHHGGRDVETGYARIERGHRRSSRSYNTQSSRKHRDRSLSNRRRRPTTPPAMTTGERNDQTHDESYRLRFSKR

SEQ ID NO: 29108 - protein, 85 aa, unidentified
  REGION 1..85: note = Description of Unknown:hvTR_Q6QCQ2 target sequence
DARRERIRKEYDIPVDRITGRAIEVVSTAGASVTIDSVRHLDETIEKLVVRYATIQEGDSWASGGCFPGIKQNTSWPELMLYGHE

SEQ ID NO: 29109 - protein, 85 aa, unidentified
  REGION 1..85: note = Description of Unknown:hvTR_Q6QCQ2 target sequence
LYRTFESYKMDSRIARALRERVIRGESLIEALESADELLTWIKMLAAKNLPIYTNNPIVATSKSLLENLKLKLGPFVRCLLLNRD

SEQ ID NO: 29110 - protein, 85 aa, unidentified
  REGION 1..85: note = Description of Unknown:hvTR_Q6QCQ2 target sequence
NDLGSRTLPELLRQQRFSDITCITTYMFVMIARIANIVVRGSKFVEYDDISCNVQVLQEYTPGSCLAGVLEALITHQRECGRVEC

SEQ ID NO: 29111 - protein, 84 aa, unidentified
  REGION 1..84: note = Description of Unknown:hvTR_Q6QCQ2 target sequence
FVMIARIANIVVRGSKFVEYDDISCNVQVLQEYTPGSCLAGVLEALITHQRECGRVECTLSTWAGHLSDARPYGKYFKCSTFNC

SEQ ID NO: 29112 - protein, 85 aa, unidentified
  REGION 1..85: note = Description of Unknown:hvTR_Q6QCQ2 target sequence
DDFALEVTDWANDEAIGSTPGEDSTTSRTVYVERTADTAYNPRYSKRRHGRRESYHHNRPKTLVVVLPDSNHHGGRDVETGYARI

SEQ ID NO: 29113 - protein, 85 aa, unidentified
  REGION 1..85: note = Description of Unknown:hvTR_Q6QCQ2 target sequence
ERGHRRSSRSYNTQSSRKHRDRSLSNRRRRPTTPPAMTTGERNDQTHDESYRLRFSKRDARRERIRKEYDIPVDRITGRAIEVVS

SEQ ID NO: 29114 - protein, 85 aa, unidentified
  REGION 1..85: note = Description of Unknown:hvTR_Q6QCQ2 target sequence
TAGASVTIDSVRHLDETIEKLVVRYATIQEGDSWASGGCFPGIKQNTSWPELMLYGHELYRTFESYKMDSRIARALRERVIRGES

SEQ ID NO: 29115 - protein, 85 aa, unidentified
  REGION 1..85: note = Description of Unknown:hvTR_Q6QCQ2 target sequence
LIEALESADELLTWIKMLAAKNLPIYTNNPIVATSKSLLENLKLKLGPFVRCLLLNRDNDLGSRTLPELLRQQRFSDITCITTYM

SEQ ID NO: 29116 - protein, 85 aa, unidentified
  REGION 1..85: note = Description of Unknown:cds_NZ_WFIY01000004.1_cds_WP_155863936.1_1853 target sequence
TGFLIGIDYDDPIVKYRGDRILYTLKKISGKDSNIDPDFLVDTYYVHYLPLPILKSKSEISQGDAIKYALLDMTLSSDLVLKNRN

SEQ ID NO: 29117 - protein, 85 aa, unidentified
  REGION 1..85: note = Description of Unknown:cds_NZ_WFIY01000004.1_cds_WP_155863936.1_1853 target sequence
YSIANSAVSMALSVSYIQNLIEELERIRRTSQSAEEREAAEQILNGLMKGSQGKEGGEQKEQQGQTNDATKKLLKQVHEKALSKA

SEQ ID NO: 29118 - protein, 85 aa, unidentified
  REGION 1..85: note = Description of Unknown:cds_NZ_WFIY01000004.1_cds_WP_155863936.1_1853 target sequence
AEDANAVRSMQRIIGGNGAGTGSVLNFEGDVHEVLRLARNTEIKKILEFLSGIPKLGSLTKKKTTRYSKGELYGYEEGSDLERIV

SEQ ID NO: 29119 - protein, 85 aa, unidentified
  REGION 1..85: note = Description of Unknown:cds_NZ_WFIY01000004.1_cds_WP_155863936.1_1853 target sequence
PSELAMPEDLFYVRLAESQLLLYQKQIKESLGPIYLLLDKSGSMDGEKILWAKAVALALYSRARRENRDFYLRFFDNIPYPLIKV

SEQ ID NO: 29120 - protein, 85 aa, unidentified
  REGION 1..85: note = Description of Unknown:cds_NZ_WFIY01000004.1_cds_WP_155863936.1_1853 target sequence
IKNAKSKDVIKMIEYIGKIRGGGGTDISRSVISACEDIKEGHVKGVSEVIILTDGEDKIAETTVRRSLKDANATLISVMIRGDNA

SEQ ID NO: 29121 - protein, 84 aa, unidentified
  REGION 1..84: note = Description of Unknown:cds_NZ_WFIY01000004.1_cds_WP_155863936.1_1853 target sequence
SRSVISACEDIKEGHVKGVSEVIILTDGEDKIAETTVRRSLKDANATLISVMIRGDNADLRRISDTYLVVYKLDQNDLLKVVEA

SEQ ID NO: 29122 - protein, 85 aa, unidentified
  REGION 1..85: note = Description of Unknown:cds_NZ_WFIY01000004.1_cds_WP_155863936.1_1853 target sequence
ISGKDSNIDPDFLVDTYYVHYLPLPILKSKSEISQGDAIKYALLDMTLSSDLVLKNRNYSIANSAVSMALSVSYIQNLIEELERI

SEQ ID NO: 29123 - protein, 85 aa, unidentified
  REGION 1..85: note = Description of Unknown:cds_NZ_WFIY01000004.1_cds_WP_155863936.1_1853 target sequence
RRTSQSAEEREAAEQILNGLMKGSQGKEGGEQKEQQGQTNDATKKLLKQVHEKALSKAAEDANAVRSMQRIIGGNGAGTGSVLNF

SEQ ID NO: 29124 - protein, 85 aa, unidentified
  REGION 1..85: note = Description of Unknown:cds_NZ_WFIY01000004.1_cds_WP_155863936.1_1853 target sequence
EGDVHEVLRLARNTEIKKILEFLSGIPKLGSLTKKKTTRYSKGELYGYEEGSDLERIVPSELAMPEDLFYVRLAESQLLLYQKQI

SEQ ID NO: 29125 - protein, 85 aa, unidentified
  REGION 1..85: note = Description of Unknown:cds_NZ_WFIY01000004.1_cds_WP_155863936.1_1853 target sequence
KESLGPIYLLLDKSGSMDGEKILWAKAVALALYSRARRENRDFYLRFFDNIPYPLIKVIKNAKSKDVIKMIEYIGKIRGGGGTDI

SEQ ID NO: 29126 - protein, 85 aa, unidentified
  REGION 1..85: note = Description of Unknown:cds_NZ_WFIY01000004.1_cds_WP_155863943.1_1861 target sequence
LKNNYDVLIIGGGFAGATTAWHLANQGLKVLLIDSKPWNRIGDKPCGDAVSKEHFDNLGMPYPEGEQLEQKIEGIKLYSPDMKTE

SEQ ID NO: 29127 - protein, 85 aa, unidentified
  REGION 1..85: note = Description of Unknown:cds_NZ_WFIY01000004.1_cds_WP_155863943.1_1861 target sequence
WTVKGEGFEINAPAYTQRLLKEASNRGVEVLDMTTAMKPIFEDGFVKGAILFDRRHNQQIEVRAKVVVEATGYSMSFRSKLPQGL

SEQ ID NO: 29128 - protein, 85 aa, unidentified
  REGION 1..85: note = Description of Unknown:cds_NZ_WFIY01000004.1_cds_WP_155863943.1_1861 target sequence
PVTESLDDKDADIAYREVAYTKDDIDEPQYLKIFVNQKASPGGYWWYFPKGKNKVNIGLGIQGGMGYPSIYTFYDKYLNEFGSDV

SEQ ID NO: 29129 - protein, 85 aa, unidentified
  REGION 1..85: note = Description of Unknown:cds_NZ_WFIY01000004.1_cds_WP_155863943.1_1861 target sequence
DRNRLIVKGGALVPTRRPISTLAWNGILVVGDSAFTANPVHGGGKGSAMISGYCAAKAILNAFEVGDFSAKTLWSANLCYIERYG

SEQ ID NO: 29130 - protein, 85 aa, unidentified
  REGION 1..85: note = Description of Unknown:cds_NZ_WFIY01000004.1_cds_WP_155863943.1_1861 target sequence
AKQASLELFRRFLQKLSDDDINYGMRKKVIKEEDLLEASAKGDLQLSVAEKAMRIIAGLGRPSLLMKLKVVAEYMQKAKDLYREY

SEQ ID NO: 29131 - protein, 84 aa, unidentified
  REGION 1..84: note = Description of Unknown:cds_NZ_WFIY01000004.1_cds_WP_155863943.1_1861 target sequence
VIKEEDLLEASAKGDLQLSVAEKAMRIIAGLGRPSLLMKLKVVAEYMQKAKDLYREYPSDPNNLEHWKSEVNKLLLDFENLMNK

SEQ ID NO: 29132 - protein, 85 aa, unidentified
  REGION 1..85: note = Description of Unknown:cds_NZ_WFIY01000004.1_cds_WP_155863943.1_1861 target sequence
LKVLLIDSKPWNRIGDKPCGDAVSKEHFDNLGMPYPEGEQLEQKIEGIKLYSPDMKTEWTVKGEGFEINAPAYTQRLLKEASNRG

SEQ ID NO: 29133 - protein, 85 aa, unidentified
  REGION 1..85: note = Description of Unknown:cds_NZ_WFIY01000004.1_cds_WP_155863943.1_1861 target sequence
VEVLDMTTAMKPIFEDGFVKGAILFDRRHNQQIEVRAKVVVEATGYSMSFRSKLPQGLPVTESLDDKDADIAYREVAYTKDDIDE

SEQ ID NO: 29134 - protein, 85 aa, unidentified
  REGION 1..85: note = Description of Unknown:cds_NZ_WFIY01000004.1_cds_WP_155863943.1_1861 target sequence
PQYLKIFVNQKASPGGYWWYFPKGKNKVNIGLGIQGGMGYPSIYTFYDKYLNEFGSDVDRNRLIVKGGALVPTRRPISTLAWNGI

SEQ ID NO: 29135 - protein, 85 aa, unidentified
  REGION 1..85: note = Description of Unknown:cds_NZ_WFIY01000004.1_cds_WP_155863943.1_1861 target sequence
LVVGDSAFTANPVHGGGKGSAMISGYCAAKAILNAFEVGDFSAKTLWSANLCYIERYGAKQASLELFRRFLQKLSDDDINYGMRK

SEQ ID NO: 29136 - protein, 85 aa, unidentified
  REGION 1..85: note = Description of Unknown:cds_NZ_WFIY01000004.1_cds_WP_155863943.1_1861 target sequence
KVIKEEDLLEASAKGDLQLSVAEKAMRIIAGLGRPSLLMKLKVVAEYMQKAKDLYREYPSDPNNLEHWKSEVNKLLLDFENLMNK

SEQ ID NO: 29137 - protein, 85 aa, unidentified
  REGION 1..85: note = Description of Unknown:cds_NC_030656.1_cds_YP_009268723.1_8 target sequence
ADFHYCNCFTQFVKLCSYDLVSRMIQENPNCVYQLSDFNMTALHHAVTDVIDIEIVELLVSNGAIVNAKNDFGETPLHLLMKQKH

SEQ ID NO: 29138 - protein, 85 aa, unidentified
  REGION 1..85: note = Description of Unknown:cds_NC_030656.1_cds_YP_009268723.1_8 target sequence
VPVNVLKYLLFKEASLYEETNLGKTPVHYYLQNGILTKAVLKILIMHSVRFDQSFDMYGRKPIHYYLIRETIDCNMLPLLLKNCD

SEQ ID NO: 29139 - protein, 85 aa, unidentified
  REGION 1..85: note = Description of Unknown:cds_NC_030656.1_cds_YP_009268723.1_8 target sequence
MQHEDVLSNNMLHYYLSYNANPKLKIFRILHESGVHFKPVNVFNETLAYLAIMCNNEKIIYYLLGKDSFFVDEITTNGNTCLAIA

SEQ ID NO: 29140 - protein, 85 aa, unidentified
  REGION 1..85: note = Description of Unknown:cds_NC_030656.1_cds_YP_009268723.1_8 target sequence
ISSLNYNLVSLIINLQPKVSNVIYSIKKTIPLFENENVYKEGFKCFKKCIKYVASVSTVNIASAFENQTNTLALPCKICAYAAMD

SEQ ID NO: 29141 - protein, 85 aa, unidentified
  REGION 1..85: note = Description of Unknown:cds_NC_030656.1_cds_YP_009268723.1_8 target sequence
EIYNMKHFVLSKNLSVYDLVFKKNSDSLLYRFYKHPSLISFSKKEIYGLKICRMISRASFINDAVNKIIQFLNSTESGWNALPYD

SEQ ID NO: 29142 - protein, 84 aa, unidentified
  REGION 1..84: note = Description of Unknown:cds_NC_030656.1_cds_YP_009268723.1_8 target sequence
LLYRFYKHPSLISFSKKEIYGLKICRMISRASFINDAVNKIIQFLNSTESGWNALPYDIKEKIILNLSFVNIIKLDDSLNNYEL

SEQ ID NO: 29143 - protein, 85 aa, unidentified
  REGION 1..85: note = Description of Unknown:cds_NC_030656.1_cds_YP_009268723.1_8 target sequence
NPNCVYQLSDFNMTALHHAVTDVIDIEIVELLVSNGAIVNAKNDFGETPLHLLMKQKHVPVNVLKYLLFKEASLYEETNLGKTPV

SEQ ID NO: 29144 - protein, 85 aa, unidentified
  REGION 1..85: note = Description of Unknown:cds_NC_030656.1_cds_YP_009268723.1_8 target sequence
HYYLQNGILTKAVLKILIMHSVRFDQSFDMYGRKPIHYYLIRETIDCNMLPLLLKNCDMQHEDVLSNNMLHYYLSYNANPKLKIF

SEQ ID NO: 29145 - protein, 85 aa, unidentified
  REGION 1..85: note = Description of Unknown:cds_NC_030656.1_cds_YP_009268723.1_8 target sequence
RILHESGVHFKPVNVFNETLAYLAIMCNNEKIIYYLLGKDSFFVDEITTNGNTCLAIAISSLNYNLVSLIINLQPKVSNVIYSIK

SEQ ID NO: 29146 - protein, 85 aa, unidentified
  REGION 1..85: note = Description of Unknown:cds_NC_030656.1_cds_YP_009268723.1_8 target sequence
KTIPLFENENVYKEGFKCFKKCIKYVASVSTVNIASAFENQTNTLALPCKICAYAAMDEIYNMKHFVLSKNLSVYDLVFKKNSDS

SEQ ID NO: 29147 - protein, 85 aa, unidentified
  REGION 1..85: note = Description of Unknown:cds_NC_025251.1_cds_YP_009091809.1_1 target sequence
DSDKIVFKVHNQLVSVKPEVIVDQYEYKYPAIRDQKKPSITLGKAPDLNKAYKSILSGINAARLDPDDVCSYLAAAMELFEGICP

SEQ ID NO: 29148 - protein, 85 aa, unidentified
  REGION 1..85: note = Description of Unknown:cds_NC_025251.1_cds_YP_009091809.1_1 target sequence
EDWLSYGILIARKGEKITPATLVNIQRTNIEGNWALTGGYDLTRDPTVAEHASLVGLLLCLYRLSKVSGQNTGNYKTNIADRMEQ

SEQ ID NO: 29149 - protein, 85 aa, unidentified
  REGION 1..85: note = Description of Unknown:cds_NC_025251.1_cds_YP_009091809.1_1 target sequence
IFETAPFVKIVEHHTLMTTHKMCANWSTIPNFRFLAGTYDMFFSRIEHLFSAIRVGTVVTAYEDCSGLVSFTGFIKQINLTAREA

SEQ ID NO: 29150 - protein, 85 aa, unidentified
  REGION 1..85: note = Description of Unknown:cds_NC_025251.1_cds_YP_009091809.1_1 target sequence
ILYFFHKNFEEEIKRMFEPGQETAVPHSYFIHFRSLGLSGKSPYSSNAVGHVFNLIHFVGCYMGQIRSLNATVISSCAPHEMSVL

SEQ ID NO: 29151 - protein, 85 aa, unidentified
  REGION 1..85: note = Description of Unknown:cds_NC_025251.1_cds_YP_009091809.1_1 target sequence
GGYLGEEFFGKGTFERRFFRDEKELRDYEAAESVKNDVALADDGTVNSDDEDFFSGETRSPEAVYAKIMMNGGKLKKSHIRRYVS

SEQ ID NO: 29152 - protein, 84 aa, unidentified
  REGION 1..84: note = Description of Unknown:cds_NC_025251.1_cds_YP_009091809.1_1 target sequence
DYEAAESVKNDVALADDGTVNSDDEDFFSGETRSPEAVYAKIMMNGGKLKKSHIRRYVSVSSNHQARPNSFAEFLNKTYLGDQR

SEQ ID NO: 29153 - protein, 85 aa, unidentified
  REGION 1..85: note = Description of Unknown:cds_NC_025251.1_cds_YP_009091809.1_1 target sequence
KYPAIRDQKKPSITLGKAPDLNKAYKSILSGINAARLDPDDVCSYLAAAMELFEGICPEDWLSYGILIARKGEKITPATLVNIQR

SEQ ID NO: 29154 - protein, 85 aa, unidentified
  REGION 1..85: note = Description of Unknown:cds_NC_025251.1_cds_YP_009091809.1_1 target sequence
TNIEGNWALTGGYDLTRDPTVAEHASLVGLLLCLYRLSKVSGQNTGNYKTNIADRMEQIFETAPFVKIVEHHTLMTTHKMCANWS

SEQ ID NO: 29155 - protein, 85 aa, unidentified
  REGION 1..85: note = Description of Unknown:cds_NC_025251.1_cds_YP_009091809.1_1 target sequence
TIPNFRFLAGTYDMFFSRIEHLFSAIRVGTVVTAYEDCSGLVSFTGFIKQINLTAREAILYFFHKNFEEEIKRMFEPGQETAVPH

SEQ ID NO: 29156 - protein, 85 aa, unidentified
  REGION 1..85: note = Description of Unknown:cds_NC_025251.1_cds_YP_009091809.1_1 target sequence
SYFIHFRSLGLSGKSPYSSNAVGHVFNLIHFVGCYMGQIRSLNATVISSCAPHEMSVLGGYLGEEFFGKGTFERRFFRDEKELRD

SEQ ID NO: 29157 - protein, 85 aa, unidentified
  REGION 1..85: note = Description of Unknown:cds_NC_020808.1_cds_YP_007641392.1_1 target sequence
DSDKIVFKVHNQLVSVKPEVITDQYEYKYPAIGNQKKPSITLGKAPDLNKAYKSILSGMNAAKLDPDDVCSYLAAAMELFEGVCP

SEQ ID NO: 29158 - protein, 85 aa, unidentified
  REGION 1..85: note = Description of Unknown:cds_NC_020808.1_cds_YP_007641392.1_1 target sequence
DDWASYGILIAKKGDKITPTTLVDIIRTDVEGNWAQTGGQDLTRDPTTAEHASLVGLLLCLYRLSKIVGQNTGNYKTNVADRMEQ

SEQ ID NO: 29159 - protein, 85 aa, unidentified
  REGION 1..85: note = Description of Unknown:cds_NC_020808.1_cds_YP_007641392.1_1 target sequence
IFETAPFVKVVEHHTLMTTHKMCANWSTIPNFRFLAGTYDMFFSRIEHLYSAIRVGTVVTAYEDCSGLVSFTGFIKQINLTAREA

SEQ ID NO: 29160 - protein, 85 aa, unidentified; identical to SEQ ID NO: 29150
  REGION 1..85: note = Description of Unknown:cds_NC_020808.1_cds_YP_007641392.1_1 target sequence

SEQ ID NO: 29161 - protein, 85 aa, unidentified
  REGION 1..85: note = Description of Unknown:cds_NC_020808.1_cds_YP_007641392.1_1 target sequence
GGYLGEEFFGKGTFERRFFRDEKELQDYELAEATKTDLALADDGTVNSDDEDFFSGETRSPEAVYTRIMMNGGRLKKSHIRRYVS

SEQ ID NO: 29162 - protein, 84 aa, unidentified
  REGION 1..84: note = Description of Unknown:cds_NC_020808.1_cds_YP_007641392.1_1 target sequence
DYELAEATKTDLALADDGTVNSDDEDFFSGETRSPEAVYTRIMMNGGRLKKSHIRRYVSVSSNHQARPNSFAEFLNKTYSGDQR

SEQ ID NO: 29163 - protein, 85 aa, unidentified
  REGION 1..85: note = Description of Unknown:cds_NC_020808.1_cds_YP_007641392.1_1 target sequence
KYPAIGNQKKPSITLGKAPDLNKAYKSILSGMNAAKLDPDDVCSYLAAAMELFEGVCPDDWASYGILIAKKGDKITPTTLVDIIR

SEQ ID NO: 29164 - protein, 85 aa, unidentified
  REGION 1..85: note = Description of Unknown:cds_NC_020808.1_cds_YP_007641392.1_1 target sequence
TDVEGNWAQTGGQDLTRDPTTAEHASLVGLLLCLYRLSKIVGQNTGNYKTNVADRMEQIFETAPFVKVVEHHTLMTTHKMCANWS

SEQ ID NO: 29165 - protein, 85 aa, unidentified
  REGION 1..85: note = Description of Unknown:cds_NC_020808.1_cds_YP_007641392.1_1 target sequence
TIPNFRFLAGTYDMFFSRIEHLYSAIRVGTVVTAYEDCSGLVSFTGFIKQINLTAREAILYFFHKNFEEEIKRMFEPGQETAVPH

SEQ ID NO: 29166 - protein, 85 aa, unidentified
  REGION 1..85: note = Description of Unknown:cds_NC_020808.1_cds_YP_007641392.1_1 target sequence
SYFIHFRSLGLSGKSPYSSNAVGHVFNLIHFVGCYMGQIRSLNATVISSCAPHEMSVLGGYLGEEFFGKGTFERRFFRDEKELQD

SEQ ID NO: 29167 - protein, 85 aa, unidentified
  REGION 1..85: note = Description of Unknown:cds_NC_025385.1_cds_YP_009094327.1_1 target sequence
DADRIVFKVKNQLVSVKPEVIVDQYEYKYPAIVDRQKPSITLGKAPDLNKAYKSILSGLTAAKLDPDDVCSYLAAAMELFDGTCP

SEQ ID NO: 29168 - protein, 85 aa, unidentified
  REGION 1..85: note = Description of Unknown:cds_NC_025385.1_cds_YP_009094327.1_1 target sequence
DDWTSYGILIAKKGDKITPATLVNIQRTDVEGNWALTGGLDLTRDPTVAEHASLVGLLLSLYRLSKVSGQNTGNYKTNVADRMEQ

SEQ ID NO: 29169 - protein, 85 aa, unidentified
  REGION 1..85: note = Description of Unknown:cds_NC_025385.1_cds_YP_009094327.1_1 target sequence
IFETAPFAKIVEHHTLMTTHKMCANWSTIPNFRFLAGTYDMFFSRIEHLYSAIRVGTVVTAYEDCSGLVSFTGFIKQINLTAKEA

SEQ ID NO: 29170 - protein, 85 aa, unidentified; identical to SEQ ID NO: 29150
  REGION 1..85: note = Description of Unknown:cds_NC_025385.1_cds_YP_009094327.1_1 target sequence

SEQ ID NO: 29171 - protein, 85 aa, unidentified
  REGION 1..85: note = Description of Unknown:cds_NC_025385.1_cds_YP_009094327.1_1 target sequence
GGYLGEEFFGKGTFERRFFRDEKELKEYEAAESVKTDTALADDGTVNSDDEDFFSGETRSPEAVYTRIMMNGGRLKKSHIRRYVS

SEQ ID NO: 29172 - protein, 84 aa, unidentified
  REGION 1..84: note = Description of Unknown:cds_NC_025385.1_cds_YP_009094327.1_1 target sequence
EYEAAESVKTDTALADDGTVNSDDEDFFSGETRSPEAVYTRIMMNGGRLKKSHIRRYVSVSSNHQARPNSFAEFLNKTYSSDPR

SEQ ID NO: 29173 - protein, 85 aa, unidentified
  REGION 1..85: note = Description of Unknown:cds_NC_025385.1_cds_YP_009094327.1_1 target sequence
KYPAIVDRQKPSITLGKAPDLNKAYKSILSGLTAAKLDPDDVCSYLAAAMELFDGTCPDDWTSYGILIAKKGDKITPATLVNIQR

SEQ ID NO: 29174 - protein, 85 aa, unidentified
  REGION 1..85: note = Description of Unknown:cds_NC_025385.1_cds_YP_009094327.1_1 target sequence
TDVEGNWALTGGLDLTRDPTVAEHASLVGLLLSLYRLSKVSGQNTGNYKTNVADRMEQIFETAPFAKIVEHHTLMTTHKMCANWS

SEQ ID NO: 29175 - protein, 85 aa, unidentified
  REGION 1..85: note = Description of Unknown:cds_NC_025385.1_cds_YP_009094327.1_1 target sequence
TIPNFRFLAGTYDMFFSRIEHLYSAIRVGTVVTAYEDCSGLVSFTGFIKQINLTAKEAILYFFHKNFEEEIKRMFEPGQETAVPH

SEQ ID NO: 29176 - protein, 85 aa, unidentified
  REGION 1..85: note = Description of Unknown:cds_NC_025385.1_cds_YP_009094327.1_1 target sequence
SYFIHFRSLGLSGKSPYSSNAVGHVFNLIHFVGCYMGQIRSLNATVISSCAPHEMSVLGGYLGEEFFGKGTFERRFFRDEKELKE

SEQ ID NO: 29177 - protein, 85 aa, unidentified
  REGION 1..85: note = Description of Unknown:cds_NC_020809.1_cds_YP_007641397.1_1 target sequence
DSDRIVFKVHNQLVSLKPEVISDQYEYKYPAIDDKKKPSITLGKAPDLKTAYKSILSGMNAAKLDPDDVCSYLAAAMVFFEGICP

SEQ ID NO: 29178 - protein, 85 aa, unidentified
  REGION 1..85: note = Description of Unknown:cds_NC_020809.1_cds_YP_007641397.1_1 target sequence
EDWTSYGINIAKKGDKITPAVLVDIQRTNTEGNWAQAGGQDLTRDPTTPEHASLVGLLLCLYRLSKIVGQNTGNYKTNVAERMEQ

SEQ ID NO: 29179 - protein, 85 aa, unidentified
  REGION 1..85: note = Description of Unknown:cds_NC_020809.1_cds_YP_007641397.1_1 target sequence
IFETAPFVKIVEHHTLMTTHKMCANWSTIPNFRFLAGVYDMFFSRIEHLYSAIRVGTVVTAYEDCSGLVSFTTFIRQINLTARDA

SEQ ID NO: 29180 - protein, 85 aa, unidentified
  REGION 1..85: note = Description of Unknown:cds_NC_020809.1_cds_YP_007641397.1_1 target sequence
VLYFFHKNFEEEIKRMFEPGQETAVPHSYFIHFRSLGLSGKSPYSSNAVGHTFNLIHFVGCYMGQVRSLNATVIQSCAPHEMSVL

SEQ ID NO: 29181 - protein, 85 aa, unidentified
  REGION 1..85: note = Description of Unknown:cds_NC_020809.1_cds_YP_007641397.1_1 target sequence
GGYLGEEFFGRGTFERRFFRDEKELQDYEAAEATKIDLALEDDGTVNSDDEDFFSGETRSPEAVYSRIMMSGGRLKKSHIKRYIS

SEQ ID NO: 29182 - protein, 84 aa, unidentified
  REGION 1..84: note = Description of Unknown:cds_NC_020809.1_cds_YP_007641397.1_1 target sequence
DYEAAEATKIDLALEDDGTVNSDDEDFFSGETRSPEAVYSRIMMSGGRLKKSHIKRYISVSSNHQARPNSFAEFLNKTYASDTR

SEQ ID NO: 29183 - protein, 85 aa, unidentified
  REGION 1..85: note = Description of Unknown:cds_NC_020809.1_cds_YP_007641397.1_1 target sequence
KYPAIDDKKKPSITLGKAPDLKTAYKSILSGMNAAKLDPDDVCSYLAAAMVFFEGICPEDWTSYGINIAKKGDKITPAVLVDIQR

SEQ ID NO: 29184 - protein, 85 aa, unidentified
  REGION 1..85: note = Description of Unknown:cds_NC_020809.1_cds_YP_007641397.1_1 target sequence
TNTEGNWAQAGGQDLTRDPTTPEHASLVGLLLCLYRLSKIVGQNTGNYKTNVAERMEQIFETAPFVKIVEHHTLMTTHKMCANWS

SEQ ID NO: 29185 - protein, 85 aa, unidentified
  REGION 1..85: note = Description of Unknown:cds_NC_020809.1_cds_YP_007641397.1_1 target sequence
TIPNFRFLAGVYDMFFSRIEHLYSAIRVGTVVTAYEDCSGLVSFTTFIRQINLTARDAVLYFFHKNFEEEIKRMFEPGQETAVPH

SEQ ID NO: 29186 - protein, 85 aa, unidentified
  REGION 1..85: note = Description of Unknown:cds_NC_020809.1_cds_YP_007641397.1_1 target sequence
SYFIHFRSLGLSGKSPYSSNAVGHTFNLIHFVGCYMGQVRSLNATVIQSCAPHEMSVLGGYLGEEFFGRGTFERRFFRDEKELQD

SEQ ID NO: 29187 - protein, 85 aa, unidentified
  REGION 1..85: note = Description of Unknown:cds_NC_020810.1_cds_YP_007641402.1_1 target sequence
DAERIVFKVRNQLVSVKPEVISDQYEYKYPAITDKKKPSITLGRAPDLKTAYKSILSGMNAAKLDPDDVCSYLAGAMILFEGVCP

SEQ ID NO: 29188 - protein, 85 aa, unidentified
  REGION 1..85: note = Description of Unknown:cds_NC_020810.1_cds_YP_007641402.1_1 target sequence
EDWVSYGIHIARKGDKITPATLVDIVRTNTEGNWAQTGGQELTRDPTISEHASLVGLLLCLYRLSKIVGQNTGNYKTNVADRMEQ

SEQ ID NO: 29189 - protein, 85 aa, unidentified
  REGION 1..85: note = Description of Unknown:cds_NC_020810.1_cds_YP_007641402.1_1 target sequence
IFETAPFVKIVEHHTLMTTHKMCANWSTIPNFRFLAGTYDMFFSRVDHLYSAIRVGTVVTAYEDCSGLVSFTGFIKQINLTAREA

SEQ ID NO: 29190 - protein, 85 aa, unidentified
  REGION 1..85: note = Description of Unknown:cds_NC_020810.1_cds_YP_007641402.1_1 target sequence
ILYFFHKNFEEEIKRMFEPGQETAVPHSYFIHFRSLGLSGKSPYSSNAVGHVFNLIHFVGCYMGQIRSLNATVIQSCAPHEMSVL

SEQ ID NO: 29191 - protein, 85 aa, unidentified
  REGION 1..85: note = Description of Unknown:cds_NC_020810.1_cds_YP_007641402.1_1 target sequence
GGYLGEEFFGKGTFERRFFRDEKELQDYEEAEATKIEAALADDGTVNSDDEDFFSGDTRSPEAVYTRIMMNGGRLKGAHIRRYVS

SEQ ID NO: 29192 - protein, 84 aa, unidentified
  REGION 1..84: note = Description of Unknown:cds_NC_020810.1_cds_YP_007641402.1_1 target sequence
DYEEAEATKIEAALADDGTVNSDDEDFFSGDTRSPEAVYTRIMMNGGRLKGAHIRRYVSVSSSHQARPNSFAEFLNKTYSSDSR

SEQ ID NO: 29193 - protein, 85 aa, unidentified
  REGION 1..85: note = Description of Unknown:cds_NC_020810.1_cds_YP_007641402.1_1 target sequence
KYPAITDKKKPSITLGRAPDLKTAYKSILSGMNAAKLDPDDVCSYLAGAMILFEGVCPEDWVSYGIHIARKGDKITPATLVDIVR

SEQ ID NO: 29194 - protein, 85 aa, unidentified
  REGION 1..85: note = Description of Unknown:cds_NC_020810.1_cds_YP_007641402.1_1 target sequence
TNTEGNWAQTGGQELTRDPTISEHASLVGLLLCLYRLSKIVGQNTGNYKTNVADRMEQIFETAPFVKIVEHHTLMTTHKMCANWS

SEQ ID NO: 29195 - protein, 85 aa, unidentified
  REGION 1..85: note = Description of Unknown:cds_NC_020810.1_cds_YP_007641402.1_1 target sequence
TIPNFRFLAGTYDMFFSRVDHLYSAIRVGTVVTAYEDCSGLVSFTGFIKQINLTAREAILYFFHKNFEEEIKRMFEPGQETAVPH

SEQ ID NO: 29196 - protein, 85 aa, unidentified
  REGION 1..85: note = Description of Unknown:cds_NC_020810.1_cds_YP_007641402.1_1 target sequence
SYFIHFRSLGLSGKSPYSSNAVGHVFNLIHFVGCYMGQIRSLNATVIQSCAPHEMSVLGGYLGEEFFGKGTFERRFFRDEKELQD

SEQ ID NO: 29197 - protein, 85 aa, unidentified
  REGION 1..85: note = Description of Unknown:hvTR_Q7T5C5 target sequence
PANLSKNDAESVGFSPSSSPIQKKTKRRCVPIPSLSDSDTESDCSSAVVTPGGGDAGSARGSRRPRARGSPRVAGGMYFIDDEAE

SEQ ID NO: 29198 - protein, 85 aa, unidentified
  REGION 1..85: note = Description of Unknown:hvTR_Q7T5C5 target sequence
SGSEPDSEPETEADLESVSEADLESVSEADLESVSELTSGVGSDTASDSSSECSGDELREDRPRQIRINIRLVSSPDRRAGVVFP

SEQ ID NO: 29199 - protein, 85 aa, unidentified
  REGION 1..85: note = Description of Unknown:hvTR_Q7T5C5 target sequence
ESRGTRSSPGAEAPPPEGHPRSERRAPRARNERWELDLPYMRRSINQMFRLLRRSADPHGAANRLRRLIRDSYLMGYTRRRLEPG

SEQ ID NO: 29200 - protein, 85 aa, unidentified
  REGION 1..85: note = Description of Unknown:hvTR_Q7T5C5 target sequence
MWSHMLQVGGGRAFRLRNVIEGVVSDVGDEGGILALPPSPREHHGVACDHGHTDSSDDDDRLGLSDPDTIDDSDATLESDAEGAT

SEQ ID NO: 29201 - protein, 85 aa, unidentified
  REGION 1..85: note = Description of Unknown:hvTR_Q7T5C5 target sequence
PSGSEDPMTPSGTAANGAPRGVATDGASAADAPRSLTSRLEKEFAAFDWTSDEGSQPWLSSVVADTSSAERRRADSPGPRREKDT

SEQ ID NO: 29202 - protein, 84 aa, unidentified
  REGION 1..84: note = Description of Unknown:hvTR_Q7T5C5 target sequence
GASAADAPRSLTSRLEKEFAAFDWTSDEGSQPWLSSVVADTSSAERRRADSPGPRREKDTPGSCRRMRFPTTCPYPCGHTFLRM

SEQ ID NO: 29203 - protein, 85 aa, unidentified
  REGION 1..85: note = Description of Unknown:hvTR_Q7T5C5 target sequence
RCVPIPSLSDSDTESDCSSAVVTPGGGDAGSARGSRRPRARGSPRVAGGMYFIDDEAESGSEPDSEPETEADLESVSEADLESVS

SEQ ID NO: 29204 - protein, 85 aa, unidentified
  REGION 1..85: note = Description of Unknown:hvTR_Q7T5C5 target sequence
EADLESVSELTSGVGSDTASDSSSECSGDELREDRPRQIRINIRLVSSPDRRAGVVFPESRGTRSSPGAEAPPPEGHPRSERRAP

SEQ ID NO: 29205 - protein, 85 aa, unidentified
  REGION 1..85: note = Description of Unknown:hvTR_Q7T5C5 target sequence
RARNERWELDLPYMRRSINQMFRLLRRSADPHGAANRLRRLIRDSYLMGYTRRRLEPGMWSHMLQVGGGRAFRLRNVIEGVVSDV

SEQ ID NO: 29206 - protein, 85 aa, unidentified
  REGION 1..85: note = Description of Unknown:hvTR_Q7T5C5 target sequence
GDEGGILALPPSPREHHGVACDHGHTDSSDDDDRLGLSDPDTIDDSDATLESDAEGATPSGSEDPMTPSGTAANGAPRGVATDGA

SEQ ID NO: 29207 - protein, 85 aa, unidentified
  REGION 1..85: note = Description of Unknown:hvTR_Q66453 target sequence
EDWVSYGIHIARKGDKITPATLVDIVRTNTEGNWAQTGGQDLTRDPTISEHASLVGLLLCLYRLSKIVGQNTGNYKTNVADRMEQ

SEQ ID NO: 29208 - protein, 85 aa, unidentified
  REGION 1..85: note = Description of Unknown:hvTR_Q66453 target sequence
QDYEEAEATKIEAALADDGTVNSDDEDFFSGDTRSPEAVYTRIMMNGGRLKGAHIRRYVSVSSSHQARPNSFAEFLNKTYSSDSR

SEQ ID NO: 29209 - protein, 85 aa, unidentified
  REGION 1..85: note = Description of Unknown:hvTR_Q66453 target sequence
TNTEGNWAQTGGQDLTRDPTISEHASLVGLLLCLYRLSKIVGQNTGNYKTNVADRMEQIFETAPFVKIVEHHTLMTTHKMCANWS

SEQ ID NO: 29210 - protein, 85 aa, unidentified
  REGION 1..85: note = Description of Unknown:hvTR_P06025 target sequence
DADKIVFKVNNQVVSLKPEIIVDQYEYKYPAIKDLKKPCITLGKAPDLNKAYKSVLSCMSAAKLDPDDVCSYLAAAMQFFEGTCP

SEQ ID NO: 29211 - protein, 85 aa, unidentified
  REGION 1..85: note = Description of Unknown:hvTR_P06025 target sequence
EDWTSYGIVIARKGDKITPGSLVEIKRTDVEGNWALTGGMELTRDPTVPEHASLVGLLLSLYRLSKISGQSTGNYKTNIADRIEQ

SEQ ID NO: 29212 - protein, 85 aa, unidentified
  REGION 1..85: note = Description of Unknown:hvTR_P06025 target sequence
IFETAPFVKIVEHHTLMTTHKMCANWSTIPNFRFLAGTYDMFFSRIEHLYSAIRVGTVVTAYEDCSGLVSFTGFIKQINLTAREA

SEQ ID NO: 29213 - protein, 85 aa, unidentified
  REGION 1..85: note = Description of Unknown:hvTR_P06025 target sequence
ILYFFHKNFEEEIRRMFEPGQETAVPHSYFIHFRSLGLSGKSPYSSNAVGHVFNLIHFVGCYMGQVRSLNATVIAACAPHEMSVL

SEQ ID NO: 29214 - protein, 85 aa, unidentified
  REGION 1..85: note = Description of Unknown:hvTR_P06025 target sequence
GGYLGEEFFGKGTFERRFFRDEKELQEYEAAELTKTDVALADDGTVNSDDEDYFSGETRSPEAVYTRIIMNGGRLKRSHIRRYVS

SEQ ID NO: 29215 - protein, 84 aa, unidentified
  REGION 1..84: note = Description of Unknown:hvTR_P06025 target sequence
QEYEAAELTKTDVALADDGTVNSDDEDYFSGETRSPEAVYTRIIMNGGRLKRSHIRRYVSVSSNHQARPNSFAEFLNKTYSSDS

SEQ ID NO: 29216 - protein, 85 aa, unidentified
  REGION 1..85: note = Description of Unknown:hvTR_P06025 target sequence
KYPAIKDLKKPCITLGKAPDLNKAYKSVLSCMSAAKLDPDDVCSYLAAAMQFFEGTCPEDWTSYGIVIARKGDKITPGSLVEIKR

SEQ ID NO: 29217 - protein, 85 aa, unidentified
  REGION 1..85: note = Description of Unknown:hvTR_P06025 target sequence
TDVEGNWALTGGMELTRDPTVPEHASLVGLLLSLYRLSKISGQSTGNYKTNIADRIEQIFETAPFVKIVEHHTLMTTHKMCANWS

SEQ ID NO: 29218 - protein, 85 aa, unidentified
  REGION 1..85: note = Description of Unknown:hvTR_P06025 target sequence
TIPNFRFLAGTYDMFFSRIEHLYSAIRVGTVVTAYEDCSGLVSFTGFIKQINLTAREAILYFFHKNFEEEIRRMFEPGQETAVPH

SEQ ID NO: 29219 - protein, 85 aa, unidentified
  REGION 1..85: note = Description of Unknown:hvTR_P06025 target sequence
SYFIHFRSLGLSGKSPYSSNAVGHVFNLIHFVGCYMGQVRSLNATVIAACAPHEMSVLGGYLGEEFFGKGTFERRFFRDEKELQE

SEQ ID NO: 29220 - protein, 85 aa, unidentified
  REGION 1..85: note = Description of Unknown:cds_NC_031955.1_cds_YP_009325412.1_1 target sequence
DSEQVVFKTKREIVVLKPEVISDQYEYKYPAIQNREKPSITLRKAPDLNIAYKSVLSAFNTAKLDQEDVCSYLAAAMRLFEGQCP

SEQ ID NO: 29221 - protein, 85 aa, unidentified
  REGION 1..85: note = Description of Unknown:cds_NC_031955.1_cds_YP_009325412.1_1 target sequence
EDWTSYGIMIARQGDTINPGNLVNIQRTDQEGNWAQAAGSGVMRDPTVAEHASLVGLLLCLYRLSKIVGQNTANYKTNVADRMEQ

SEQ ID NO: 29222 - protein, 85 aa, unidentified
  REGION 1..85: note = Description of Unknown:cds_NC_031955.1_cds_YP_009325412.1_1 target sequence
IFETAPFAKIIEHHTLMTTHKMCANWSTIPNFRFLAGTYDMFFSRIDHLYGAIRVGTVVTAYEDCTGLVSFTGFLKQINLTASEA

SEQ ID NO: 29223 - protein, 85 aa, unidentified
  REGION 1..85: note = Description of Unknown:cds_NC_031955.1_cds_YP_009325412.1_1 target sequence
MLYFFHKNFEEEFKRMFRPGQETATPHSYFVHFRSLGLSGKSPYSSNAVGHMFNLIHFVGCYMGQIRSLNATVIQTCAPHEMSVL

SEQ ID NO: 29224 - protein, 85 aa, unidentified
  REGION 1..85: note = Description of Unknown:cds_NC_031955.1_cds_YP_009325412.1_1 target sequence
GGYLGEEFFGKGTFERRFFRSVDEMRTYEELEEKRIDAALEDDATVDSEDEDNWSGESRSPEAVFNRIMMNKGRLRPAHIRRYRG

SEQ ID NO: 29225 - protein, 84 aa, unidentified
  REGION 1..84: note = Description of Unknown:cds_NC_031955.1_cds_YP_009325412.1_1 target sequence
RTYEELEEKRIDAALEDDATVDSEDEDNWSGESRSPEAVFNRIMMNKGRLRPAHIRRYRGVSANHQARPNSFAEFLTKVYSDTS

SEQ ID NO: 29226 - protein, 85 aa, unidentified
  REGION 1..85: note = Description of Unknown:cds_NC_031955.1_cds_YP_009325412.1_1 target sequence
KYPAIQNREKPSITLRKAPDLNIAYKSVLSAFNTAKLDQEDVCSYLAAAMRLFEGQCPEDWTSYGIMIARQGDTINPGNLVNIQR

SEQ ID NO: 29227 - protein, 85 aa, unidentified
  REGION 1..85: note = Description of Unknown:cds_NC_031955.1_cds_YP_009325412.1_1 target sequence
TDQEGNWAQAAGSGVMRDPTVAEHASLVGLLLCLYRLSKIVGQNTANYKTNVADRMEQIFETAPFAKIIEHHTLMTTHKMCANWS

SEQ ID NO: 29228 - protein, 85 aa, unidentified
  REGION 1..85: note = Description of Unknown:cds_NC_031955.1_cds_YP_009325412.1_1 target sequence
TIPNFRFLAGTYDMFFSRIDHLYGAIRVGTVVTAYEDCTGLVSFTGFLKQINLTASEAMLYFFHKNFEEEFKRMFRPGQETATPH

SEQ ID NO: 29229 - protein, 85 aa, unidentified
  REGION 1..85: note = Description of Unknown:cds_NC_031955.1_cds_YP_009325412.1_1 target sequence
SYFVHFRSLGLSGKSPYSSNAVGHMFNLIHFVGCYMGQIRSLNATVIQTCAPHEMSVLGGYLGEEFFGKGTFERRFFRSVDEMRT

SEQ ID NO: 29230 - protein, 85 aa, unidentified
  REGION 1..85: note = Description of Unknown:cds_NZ_WFIY01000004.1_cds_WP_155862313.1_34 target sequence
SNEKVKGNVIGRMERLPLSRIHYKFLLLVMGGEWVETLMLLGNGVIAAVLSSVLFSSITIAVTAITTAFFLGETLGSVLFGRLAD

SEQ ID NO: 29231 - protein, 85 aa, unidentified
  REGION 1..85: note = Description of Unknown:cds_NZ_WFIY01000004.1_cds_WP_155862313.1_34 target sequence
LKGRRTVFLVNLLLFGFGSIIAGFMSNFYVIAALMFIAGIGVGGEFPLVDTYTSEMMPAKFRGRGVALVYTLAVTSAPVIALITY

SEQ ID NO: 29232 - protein, 85 aa, unidentified
  REGION 1..85: note = Description of Unknown:cds_NZ_WFIY01000004.1_cds_WP_155862313.1_34 target sequence
FSSHPLNYYSWRIPLWFMGAAALIVWALRTRLDESPRWLESKGRIAEADAIVEKWENEVLREGKTLPEPEKTEVVEEHSKISELF

SEQ ID NO: 29233 - protein, 85 aa, unidentified
  REGION 1..85: note = Description of Unknown:cds_NZ_WFIY01000004.1_cds_WP_155862313.1_34 target sequence
SRSLRKITIMMIIFQFFQSGIFYGFVVLAPEFLLDKGISLVNTLLFSILIDTGFIAGSIFNYFIIDKVDRKYGIIGSAISAGILG

SEQ ID NO: 29234 - protein, 85 aa, unidentified
  REGION 1..85: note = Description of Unknown:cds_NZ_WFIY01000004.1_cds_WP_155862313.1_34 target sequence
TAFALTSSIALTVLLGFLVAFSLWNFSNFFHTYQAEIFPTRVRSTGAGLVYSISRFSTSILVLMITAFFLPLGLVATFGIIWVFI

SEQ ID NO: 29235 - protein, 84 aa, unidentified
  REGION 1..84: note = Description of Unknown:cds_NZ_WFIY01000004.1_cds_WP_155862313.1_34 target sequence
FSNFFHTYQAEIFPTRVRSTGAGLVYSISRFSTSILVLMITAFFLPLGLVATFGIIWVFIAIVSLDIGIFGPKTTGRKLEDISK

SEQ ID NO: 29236 - protein, 85 aa, unidentified
  REGION 1..85: note = Description of Unknown:cds_NZ_WFIY01000004.1_cds_WP_155862313.1_34 target sequence
LVMGGEWVETLMLLGNGVIAAVLSSVLFSSITIAVTAITTAFFLGETLGSVLFGRLADLKGRRTVFLVNLLLFGFGSIIAGFMSN

SEQ ID NO: 29237 - protein, 85 aa, unidentified
  REGION 1..85: note = Description of Unknown:cds_NZ_WFIY01000004.1_cds_WP_155862313.1_34 target sequence
FYVIAALMFIAGIGVGGEFPLVDTYTSEMMPAKFRGRGVALVYTLAVTSAPVIALITYFSSHPLNYYSWRIPLWFMGAAALIVWA

SEQ ID NO: 29238 - protein, 85 aa, unidentified
  REGION 1..85: note = Description of Unknown:cds_NZ_WFIY01000004.1_cds_WP_155862313.1_34 target sequence
LRTRLDESPRWLESKGRIAEADAIVEKWENEVLREGKTLPEPEKTEVVEEHSKISELFSRSLRKITIMMIIFQFFQSGIFYGFVV

SEQ ID NO: 29239 - protein, 85 aa, unidentified
  REGION 1..85: note = Description of Unknown:cds_NZ_WFIY01000004.1_cds_WP_155862313.1_34 target sequence
LAPEFLLDKGISLVNTLLFSILIDTGFIAGSIFNYFIIDKVDRKYGIIGSAISAGILGTAFALTSSIALTVLLGFLVAFSLWNFS

SEQ ID NO: 29240 - protein, 85 aa, unidentified
  REGION 1..85: note = Description of Unknown:cds_NZ_WFIY01000004.1_cds_WP_155862515.1_275 target sequence
DYHPWLPNLDYENEMIREIGVNSIDDLFKDIPEEIKLKRLLNVGYSKPLSEYEIYLRLLELENKNTKLRMPPFLGGGVCPHYVPE

SEQ ID NO: 29241 - protein, 85 aa, unidentified
  REGION 1..85: note = Description of Unknown:cds_NZ_WFIY01000004.1_cds_WP_155862515.1_275 target sequence
AVKFVISRSEFYTSYTPYQPEISQGLLQALFEYQSLMADLLEMEVVNSSMYEWGSALAEAVLMAYRINGKKKVVIPASINPYHKK

SEQ ID NO: 29242 - protein, 85 aa, unidentified
  REGION 1..85: note = Description of Unknown:cds_NZ_WFIY01000004.1_cds_WP_155862515.1_275 target sequence
VLETWTYGKEIKIKEIPYTNEGKINLEVAEKEIDEETSAVYIQQPNFFGIFETDIEEIVDLAKKKGAITIMGVNPLSLSLIKPPG

SEQ ID NO: 29243 - protein, 85 aa, unidentified
  REGION 1..85: note = Description of Unknown:cds_NZ_WFIY01000004.1_cds_WP_155862515.1_275 target sequence
EYDIDIAVGDGQELGLPLNFGGPYMGIFATKWDGKLVRQMPGRLVGLTTDSEGKRGYTLILQTREQFTRREKATSNITTNEALMA

SEQ ID NO: 29244 - protein, 85 aa, unidentified
  REGION 1..85: note = Description of Unknown:cds_NZ_WFIY01000004.1_cds_WP_155862515.1_275 target sequence
IANAVYISLLGKSGLRKLAEEIYKRSHYALLEFEKKGIGKRKFNSDFFEEFTVSFPISYGKIHENLKARGIYGGLKISDNDAIFC

SEQ ID NO: 29245 - protein, 84 aa, unidentified
  REGION 1..84: note = Description of Unknown:cds_NZ_WFIY01000004.1_cds_WP_155862515.1_275 target sequence
SHYALLEFEKKGIGKRKFNSDFFEEFTVSFPISYGKIHENLKARGIYGGLKISDNDAIFCVTEVHTKRMIDEMIEEVKKIVETS

SEQ ID NO: 29246 - protein, 85 aa, unidentified
  REGION 1..85: note = Description of Unknown:cds_NZ_WFIY01000004.1_cds_WP_155862515.1_275 target sequence
FKDIPEEIKLKRLLNVGYSKPLSEYEIYLRLLELENKNTKLRMPPFLGGGVCPHYVPEAVKFVISRSEFYTSYTPYQPEISQGLL

SEQ ID NO: 29247 - protein, 85 aa, unidentified
  REGION 1..85: note = Description of Unknown:cds_NZ_WFIY01000004.1_cds_WP_155862515.1_275 target sequence
QALFEYQSLMADLLEMEVVNSSMYEWGSALAEAVLMAYRINGKKKVVIPASINPYHKKVLETWTYGKEIKIKEIPYTNEGKINLE

SEQ ID NO: 29248 - protein, 85 aa, unidentified
  REGION 1..85: note = Description of Unknown:cds_NZ_WFIY01000004.1_cds_WP_155862515.1_275 target sequence
VAEKEIDEETSAVYIQQPNFFGIFETDIEEIVDLAKKKGAITIMGVNPLSLSLIKPPGEYDIDIAVGDGQELGLPLNFGGPYMGI

SEQ ID NO: 29249 - protein, 85 aa, unidentified
  REGION 1..85: note = Description of Unknown:cds_NZ_WFIY01000004.1_cds_WP_155862515.1_275 target sequence
FATKWDGKLVRQMPGRLVGLTTDSEGKRGYTLILQTREQFTRREKATSNITTNEALMAIANAVYISLLGKSGLRKLAEEIYKRSH

SEQ ID NO: 29250 - protein, 85 aa, unidentified
  REGION 1..85: note = Description of Unknown:cds_NZ_WFIY01000004.1_cds_WP_155862764.1_577 target sequence
KRKLVVIIMLILIFLLIIILHSFSSLLYYHNNQRQSSYSSISKEIRNMYNLTIYEISFTSPYDKNTTLFEGSPSHVYFIPIKAGF

SEQ ID NO: 29251 - protein, 85 aa, unidentified
  REGION 1..85: note = Description of Unknown:cds_NZ_WFIY01000004.1_cds_WP_155862764.1_577 target sequence
FILNVTTAIIVPPSVYHCLLLVTTSGPMNLANRQLCSCQGCVYAINISNGEIVWFEKFNNQIMTQPIVINCIVIIGLGNNIFQNC

SEQ ID NO: 29252 - protein, 85 aa, unidentified
  REGION 1..85: note = Description of Unknown:cds_NZ_WFIY01000004.1_cds_WP_155862764.1_577 target sequence
HVRGTGDNAIIALNATNGKILWEYKTLGEDMPTPAFYDGKIIEANGNGQVIALNLDGEVCWCKNITSYDSMSSPLLVNDVVYFGS

SEQ ID NO: 29253 - protein, 85 aa, unidentified
  REGION 1..85: note = Description of Unknown:cds_NZ_WFIY01000004.1_cds_WP_155862764.1_577 target sequence
ANPYVFWAINATNGKTAWYINFSSIYPSLGGLDDSSPAYCNGVVVSAYTIRTNVSIKEILFAVNATSGKILWCIDEGCTKIPPNL

SEQ ID NO: 29254 - protein, 85 aa, unidentified
  REGION 1..85: note = Description of Unknown:cds_NZ_WFIY01000004.1_cds_WP_155862764.1_577 target sequence
ESPPPTIFDGVVYHDSPVGILYAVNLTSGKIIWTFNTGFTVDNPEIYEGKIIIQNASGYLFVLSSEGYLIKGFQTPVMPGPGNML

SEQ ID NO: 29255 - protein, 84 aa, unidentified
  REGION 1..84: note = Description of Unknown:cds_NZ_WFIY01000004.1_cds_WP_155862764.1_577 target sequence
LTSGKIIWTFNTGFTVDNPEIYEGKIIIQNASGYLFVLSSEGYLIKGFQTPVMPGPGNMLLTCNSLILVGVNGIVDSLPLYCLT

SEQ ID NO: 29256 - protein, 85 aa, unidentified
  REGION 1..85: note = Description of Unknown:cds_NZ_WFIY01000004.1_cds_WP_155862764.1_577 target sequence
YYHNNQRQSSYSSISKEIRNMYNLTIYEISFTSPYDKNTTLFEGSPSHVYFIPIKAGFFILNVTTAIIVPPSVYHCLLLVTTSGP

SEQ ID NO: 29257 - protein, 85 aa, unidentified
  REGION 1..85: note = Description of Unknown:cds_NZ_WFIY01000004.1_cds_WP_155862764.1_577 target sequence
MNLANRQLCSCQGCVYAINISNGEIVWFEKFNNQIMTQPIVINCIVIIGLGNNIFQNCHVRGTGDNAIIALNATNGKILWEYKTL

SEQ ID NO: 29258 - protein, 85 aa, unidentified
  REGION 1..85: note = Description of Unknown:cds_NZ_WFIY01000004.1_cds_WP_155862764.1_577 target sequence
GEDMPTPAFYDGKIIEANGNGQVIALNLDGEVCWCKNITSYDSMSSPLLVNDVVYFGSANPYVFWAINATNGKTAWYINFSSIYP

SEQ ID NO: 29259 - protein, 85 aa, unidentified
  REGION 1..85: note = Description of Unknown:cds_NZ_WFIY01000004.1_cds_WP_155862764.1_577 target sequence
SLGGLDDSSPAYCNGVVVSAYTIRTNVSIKEILFAVNATSGKILWCIDEGCTKIPPNLESPPPTIFDGVVYHDSPVGILYAVNLT

SEQ ID NO: 29260 - protein, 85 aa, unidentified
  REGION 1..85: note = Description of Unknown:cds_NZ_WFIY01000004.1_cds_WP_155863159.1_1088 target sequence
TLPWIIKYRPKSLNDVENQDDVKQELKRWIESWLSGKPENKALLLYGPPGTGKTTLAQALAHDYGLELLEMNASDSRNLEAIKNI

SEQ ID NO: 29261 - protein, 85 aa, unidentified
  REGION 1..85: note = Description of Unknown:cds_NZ_WFIY01000004.1_cds_WP_155863159.1_1088 target sequence
AQRAAVSGSLFGIKGKLIFLDEVDGINARQDMGAIPAIAELVQKTRYPVLLAANDPWDPSLRELRNLAKLVEVKKLGKYALRKIL

SEQ ID NO: 29262 - protein, 85 aa, unidentified
  REGION 1..85: note = Description of Unknown:cds_NZ_WFIY01000004.1_cds_WP_155863159.1_1088 target sequence
GKICTSEKLQCDDDALDEIIEISDGDARYAINLLEATAEGFKKVTVESVKEFARRKESELDPFETVRGVFWAKYAWQAKNAVTSS

SEQ ID NO: 29263 - protein, 85 aa, unidentified
  REGION 1..85: note = Description of Unknown:cds_NZ_WFIY01000004.1_cds_WP_155863159.1_1088 target sequence
QVDYDLLMKWFSENIPVQYDNMEDVYRAYDALARASIFLSRAKTSSWDMLSYTFDMMGPGVAMAEIEKQNPGWKPKWRKYQFPQT

SEQ ID NO: 29264 - protein, 85 aa, unidentified
  REGION 1..85: note = Description of Unknown:cds_NZ_WFIY01000004.1_cds_WP_155863159.1_1088 target sequence
IQLLSKSKSNREIRDKIVSKIASKIHSSENKTLNDVYPLFLQFYKKYEDKLSKDMDLSPDEINFLNEISGRSQEAEEEKEETSYS

SEQ ID NO: 29265 - protein, 84 aa, unidentified
  REGION 1..84: note = Description of Unknown:cds_NZ_WFIY01000004.1_cds_WP_155863159.1_1088 target sequence
HSSENKTLNDVYPLFLQFYKKYEDKLSKDMDLSPDEINFLNEISGRSQEAEEEKEETSYSKTGATSKRYYSSGGRGYTTKRKKS

SEQ ID NO: 29266 - protein, 85 aa, unidentified
  REGION 1..85: note = Description of Unknown:cds_NZ_WFIY01000004.1_cds_WP_155863159.1_1088 target sequence
RWIESWLSGKPENKALLLYGPPGTGKTTLAQALAHDYGLELLEMNASDSRNLEAIKNIAQRAAVSGSLFGIKGKLIFLDEVDGIN

SEQ ID NO: 29267 - protein, 85 aa, unidentified
  REGION 1..85: note = Description of Unknown:cds_NZ_WFIY01000004.1_cds_WP_155863159.1_1088 target sequence
ARQDMGAIPAIAELVQKTRYPVLLAANDPWDPSLRELRNLAKLVEVKKLGKYALRKILGKICTSEKLQCDDDALDEIIEISDGDA

SEQ ID NO: 29268 - protein, 85 aa, unidentified
  REGION 1..85: note = Description of Unknown:cds_NZ_WFIY01000004.1_cds_WP_155863159.1_1088 target sequence
RYAINLLEATAEGFKKVTVESVKEFARRKESELDPFETVRGVFWAKYAWQAKNAVTSSQVDYDLLMKWFSENIPVQYDNMEDVYR

SEQ ID NO: 29269 - protein, 85 aa, unidentified
  REGION 1..85: note = Description of Unknown:cds_NZ_WFIY01000004.1_cds_WP_155863159.1_1088 target sequence
AYDALARASIFLSRAKTSSWDMLSYTFDMMGPGVAMAEIEKQNPGWKPKWRKYQFPQTIQLLSKSKSNREIRDKIVSKIASKIHS

SEQ ID NO: 29270 - protein, 85 aa, unidentified
  REGION 1..85: note = Description of Unknown:cds_NZ_WFIY01000004.1_cds_WP_155863246.1_1194 target sequence
IPIKLDPTFYPSPKLAMKAPREKLAYVACLYEGTGVDKNDFIAVIDVDEKSPTYSKIIGKVEMPYKGDELHHFGWNACSSSLCPN

SEQ ID NO: 29271 - protein, 85 aa, unidentified
  REGION 1..85: note = Description of Unknown:cds_NZ_WFIY01000004.1_cds_WP_155863246.1_1194 target sequence
GNPALERRYLVVPGLRSSRIYIIDVKTNPVKPKIVKIVEPKEVIERSGYSRLHTVHCGPNGIYISALGNSEGEGPGGILVLDHFT

SEQ ID NO: 29272 - protein, 85 aa, unidentified
  REGION 1..85: note = Description of Unknown:cds_NZ_WFIY01000004.1_cds_WP_155863246.1_1194 target sequence
FDVLGKWEMDRGDQYFAYDFWWNLPNEVMVTSEWGVPNTIENGLKLEDLKEGYGNRIHFWDLHKRRKIQSLTLGEENRMALELRP

SEQ ID NO: 29273 - protein, 85 aa, unidentified
  REGION 1..85: note = Description of Unknown:cds_NZ_WFIY01000004.1_cds_WP_155863246.1_1194 target sequence
FHDPTKLMGFVNIVVSTKDLSSSVWLWYYEDKKWNAEKVIEIPAEKSEGNLPEILKPFKMIPPLVTDIDLSLDDKYLYVSCWGTG

SEQ ID NO: 29274 - protein, 85 aa, unidentified
  REGION 1..85: note = Description of Unknown:cds_NZ_WFIY01000004.1_cds_WP_155863246.1_1194 target sequence
EVRKYDVSNPFKPVLIGKVKIGGIGSGKTGGPQMLEISRDGKRIYVTNSLYSTWDNQFYPEGIRGWMIKLNSEEGLSQDKDFFVD

SEQ ID NO: 29275 - protein, 84 aa, unidentified
  REGION 1..84: note = Description of Unknown:cds_NZ_WFIY01000004.1_cds_WP_155863246.1_1194 target sequence
SGKTGGPQMLEISRDGKRIYVTNSLYSTWDNQFYPEGIRGWMIKLNSEEGLSQDKDFFVDFGEARAHQVRLSGGDASSDSYCYP

SEQ ID NO: 29276 - protein, 85 aa, unidentified
  REGION 1..85: note = Description of Unknown:cds_NZ_WFIY01000004.1_cds_WP_155863246.1_1194 target sequence
ACLYEGTGVDKNDFIAVIDVDEKSPTYSKIIGKVEMPYKGDELHHFGWNACSSSLCPNGNPALERRYLVVPGLRSSRIYIIDVKT

SEQ ID NO: 29277 - protein, 85 aa, unidentified
  REGION 1..85: note = Description of Unknown:cds_NZ_WFIY01000004.1_cds_WP_155863246.1_1194 target sequence
NPVKPKIVKIVEPKEVIERSGYSRLHTVHCGPNGIYISALGNSEGEGPGGILVLDHFTFDVLGKWEMDRGDQYFAYDFWWNLPNE

SEQ ID NO: 29278 - protein, 85 aa, unidentified
  REGION 1..85: note = Description of Unknown:cds_NZ_WFIY01000004.1_cds_WP_155863246.1_1194 target sequence
VMVTSEWGVPNTIENGLKLEDLKEGYGNRIHFWDLHKRRKIQSLTLGEENRMALELRPFHDPTKLMGFVNIVVSTKDLSSSVWLW

SEQ ID NO: 29279 - protein, 85 aa, unidentified
  REGION 1..85: note = Description of Unknown:cds_NZ_WFIY01000004.1_cds_WP_155863246.1_1194 target sequence
YYEDKKWNAEKVIEIPAEKSEGNLPEILKPFKMIPPLVTDIDLSLDDKYLYVSCWGTGEVRKYDVSNPFKPVLIGKVKIGGIGSG

SEQ ID NO: 29280 - protein, 85 aa, unidentified
  REGION 1..85: note = Description of Unknown:cds_NZ_WFIY01000004.1_cds_WP_155863538.1_1476 target sequence
EPESFSSNSYKAIVSQFTGFLLDAYDLTMILGIAPVIAKVLLPPASSLIATFSVILSYSITIIFRPLGSAIFGHLGDKIGRKGDL

SEQ ID NO: 29281 - protein, 85 aa, unidentified
  REGION 1..85: note = Description of Unknown:cds_NZ_WFIY01000004.1_cds_WP_155863538.1_1476 target sequence
IITILGLGIASALTSTLPTYATVGILSFILFIIIRIAVGIFAGGEYAAGHPFAMEWTPFKWRGLISGIVQGGFSFGAALAAVVEA

SEQ ID NO: 29282 - protein, 85 aa, unidentified
  REGION 1..85: note = Description of Unknown:cds_NZ_WFIY01000004.1_cds_WP_155863538.1_1476 target sequence
AFIGFFGVKALDSYAWRYLFLTSLVPAVIALIIRITMKETPVFEDVRANKLIRKSPFLDLFRKPYRRDFFQVMLYMTGLFFSAYA

SEQ ID NO: 29283 - protein, 85 aa, unidentified
  REGION 1..85: note = Description of Unknown:cds_NZ_WFIY01000004.1_cds_WP_155863538.1_1476 target sequence
LFAYVPTILENSPSIYSLGEAETIYSYGTYAAFAGAVTIGALSQIVGRRKITIIWAIITAIISIPIYYLLIYSATIGSAALSTLA

SEQ ID NO: 29284 - protein, 85 aa, unidentified
  REGION 1..85: note = Description of Unknown:cds_NZ_WFIY01000004.1_cds_WP_155863538.1_1476 target sequence
VIIIGFLTQAPWGIVPIYLSERFKASMRASGVGFGYSSGIFIGGWFSIYVPLMHQYLFKSFDTPTNVWFSTAVLLILGALLVGVG

SEQ ID NO: 29285 - protein, 84 aa, unidentified
  REGION 1..84: note = Description of Unknown:cds_NZ_WFIY01000004.1_cds_WP_155863538.1_1476 target sequence
SMRASGVGFGYSSGIFIGGWFSIYVPLMHQYLFKSFDTPTNVWFSTAVLLILGALLVGVGIYLGPETLGTKLTEEVEEGKVTPQ

SEQ ID NO: 29286 - protein, 85 aa, unidentified
  REGION 1..85: note = Description of Unknown:cds_NZ_WFIY01000004.1_cds_WP_155863538.1_1476 target sequence
TMILGIAPVIAKVLLPPASSLIATFSVILSYSITIIFRPLGSAIFGHLGDKIGRKGDLIITILGLGIASALTSTLPTYATVGILS

SEQ ID NO: 29287 - protein, 85 aa, unidentified
  REGION 1..85: note = Description of Unknown:cds_NZ_WFIY01000004.1_cds_WP_155863538.1_1476 target sequence
FILFIIIRIAVGIFAGGEYAAGHPFAMEWTPFKWRGLISGIVQGGFSFGAALAAVVEAAFIGFFGVKALDSYAWRYLFLTSLVPA

SEQ ID NO: 29288 - protein, 85 aa, unidentified
  REGION 1..85: note = Description of Unknown:cds_NZ_WFIY01000004.1_cds_WP_155863538.1_1476 target sequence
VIALIIRITMKETPVFEDVRANKLIRKSPFLDLFRKPYRRDFFQVMLYMTGLFFSAYALFAYVPTILENSPSIYSLGEAETIYSY

SEQ ID NO: 29289 - protein, 85 aa, unidentified
  REGION 1..85: note = Description of Unknown:cds_NZ_WFIY01000004.1_cds_WP_155863538.1_1476 target sequence
GTYAAFAGAVTIGALSQIVGRRKITIIWAIITAIISIPIYYLLIYSATIGSAALSTLAVIIIGFLTQAPWGIVPIYLSERFKASM

SEQ ID NO: 29290 - protein, 85 aa, unidentified
  REGION 1..85: note = Description of Unknown:cds_NZ_WFIY01000004.1_cds_WP_155864276.1_2269 target sequence
RKKIPLLIALVAMLFSIMLAFENVPLAQSSPTIVAYKVVGSANLANPGSCSFWSDIPWVNLSLTANIPNAPTSGLTHYILVKAAW

SEQ ID NO: 29291 - protein, 85 aa, unidentified
  REGION 1..85: note = Description of Unknown:cds_NZ_WFIY01000004.1_cds_WP_155864276.1_2269 target sequence
NGSDIFILVKWPAPHPAFGAWSAAAAALYPPATGPGLFRIIELMPGTTYKLLTNCTGYVSIVNGKSENGRLAFSYKGVTVLAPND

SEQ ID NO: 29292 - protein, 85 aa, unidentified
  REGION 1..85: note = Description of Unknown:cds_NZ_WFIY01000004.1_cds_WP_155864276.1_2269 target sequence
TQIQVLSNGTILFYHSPRPMEYVFYCNGLFYGYYTNSTWYYPDRVAMMWYMGTGTPTMDGMNIGGKYPGQVYDGYNLSVAGGSFK

SEQ ID NO: 29293 - protein, 85 aa, unidentified
  REGION 1..85: note = Description of Unknown:cds_NZ_WFIY01000004.1_cds_WP_155864276.1_2269 target sequence
MPGGAANIWMWVSGATWNNATYDPAFKVHLWANESLTGLPYTDPDCGGFAVPLYTNNTNMYEVDCAGIWYSPVQSSGLNGSLFMI

SEQ ID NO: 29294 - protein, 85 aa, unidentified
  REGION 1..85: note = Description of Unknown:cds_NZ_WFIY01000004.1_cds_WP_155864276.1_2269 target sequence
RTGAKWCNGYWTVEFVRSLTVPSNIAKYEPQITLNTTYYVAFAVWQGREGETLFDKSIVTPFVTLALSTASHPTPPPPLVINPTL

SEQ ID NO: 29295 - protein, 84 aa, unidentified
  REGION 1..84: note = Description of Unknown:cds_NZ_WFIY01000004.1_cds_WP_155864276.1_2269 target sequence
AKYEPQITLNTTYYVAFAVWQGREGETLFDKSIVTPFVTLALSTASHPTPPPPLVINPTLMTVTVVGVVVAVVALAIIWIVYRK

SEQ ID NO: 29296 - protein, 85 aa, unidentified
  REGION 1..85: note = Description of Unknown:cds_NZ_WFIY01000004.1_cds_WP_155864276.1_2269 target sequence
QSSPTIVAYKVVGSANLANPGSCSFWSDIPWVNLSLTANIPNAPTSGLTHYILVKAAWNGSDIFILVKWPAPHPAFGAWSAAAAA

SEQ ID NO: 29297 - protein, 85 aa, unidentified
  REGION 1..85: note = Description of Unknown:cds_NZ_WFIY01000004.1_cds_WP_155864276.1_2269 target sequence
LYPPATGPGLFRIIELMPGTTYKLLTNCTGYVSIVNGKSENGRLAFSYKGVTVLAPNDTQIQVLSNGTILFYHSPRPMEYVFYCN

SEQ ID NO: 29298 - protein, 85 aa, unidentified
  REGION 1..85: note = Description of Unknown:cds_NZ_WFIY01000004.1_cds_WP_155864276.1_2269 target sequence
GLFYGYYTNSTWYYPDRVAMMWYMGTGTPTMDGMNIGGKYPGQVYDGYNLSVAGGSFKMPGGAANIWMWVSGATWNNATYDPAFK

SEQ ID NO: 29299 - protein, 85 aa, unidentified
  REGION 1..85: note = Description of Unknown:cds_NZ_WFIY01000004.1_cds_WP_155864276.1_2269 target sequence
VHLWANESLTGLPYTDPDCGGFAVPLYTNNTNMYEVDCAGIWYSPVQSSGLNGSLFMIRTGAKWCNGYWTVEFVRSLTVPSNIAK

SEQ ID NO: 29300 - protein, 85 aa, unidentified
  REGION 1..85: note = Description of Unknown:cds_NC_029316.1_cds_YP_009230336.1_83 target sequence
ERIEVEINNPEILEYIKKLGTNNVYLVGGTVRDILTGKKPKDLDFVVTDFDKALKLAEEMNLPIHEDGIRFGVLRIGDKYDFASL

SEQ ID NO: 29301 - protein, 85 aa, unidentified
  REGION 1..85: note = Description of Unknown:cds_NC_029316.1_cds_YP_009230336.1_83 target sequence
RKERYDTVSKPTVELGASLEEDARRRDFTINDLYGKIVGIHGNKLVMEILDFNNGLEDLRNHTLRFVGNPQERIDEDPLRILRGI

SEQ ID NO: 29302 - protein, 85 aa, unidentified
  REGION 1..85: note = Description of Unknown:cds_NC_029316.1_cds_YP_009230336.1_83 target sequence
RFILYGYKMSPDQLEIMKKNISKLDKLPIERIRDEILKILKVNPAEGFKLLDEFGLLKYLYGEHYEALKNTYHDNRGAHHGEDVI

SEQ ID NO: 29303 - protein, 85 aa, unidentified
  REGION 1..85: note = Description of Unknown:cds_NC_029316.1_cds_YP_009230336.1_83 target sequence
EHTYEALKRLRNPDIETILAVIYHDVGKPYTRSEKNGKIMFIGHAKKSAEIAKELMKRLKLPNNIIKDVTNLIEMHMDFNLAQNN

SEQ ID NO: 29304 - protein, 85 aa, unidentified
  REGION 1..85: note = Description of Unknown:cds_NC_029316.1_cds_YP_009230336.1_83 target sequence
EKNQAQLITKLMSLYYWNPEKVREIYNKLVELSHADTGSENILNMSNRITEPIITGEEIANTFGVSGNILKHLKERAYTLQLLGY

SEQ ID NO: 29305 - protein, 84 aa, unidentified
  REGION 1..84: note = Description of Unknown:cds_NC_029316.1_cds_YP_009230336.1_83 target sequence
YNKLVELSHADTGSENILNMSNRITEPIITGEEIANTFGVSGNILKHLKERAYTLQLLGYDKDEIMKMLKGDHKLYEFKKLLEN

SEQ ID NO: 29306 - protein, 85 aa, unidentified
  REGION 1..85: note = Description of Unknown:cds_NC_029316.1_cds_YP_009230336.1_83 target sequence
GGTVRDILTGKKPKDLDFVVTDFDKALKLAEEMNLPIHEDGIRFGVLRIGDKYDFASLRKERYDTVSKPTVELGASLEEDARRRD

SEQ ID NO: 29307 - protein, 85 aa, unidentified
  REGION 1..85: note = Description of Unknown:cds_NC_029316.1_cds_YP_009230336.1_83 target sequence
FTINDLYGKIVGIHGNKLVMEILDFNNGLEDLRNHTLRFVGNPQERIDEDPLRILRGIRFILYGYKMSPDQLEIMKKNISKLDKL

SEQ ID NO: 29308 - protein, 85 aa, unidentified
  REGION 1..85: note = Description of Unknown:cds_NC_029316.1_cds_YP_009230336.1_83 target sequence
PIERIRDEILKILKVNPAEGFKLLDEFGLLKYLYGEHYEALKNTYHDNRGAHHGEDVIEHTYEALKRLRNPDIETILAVIYHDVG

SEQ ID NO: 29309 - protein, 85 aa, unidentified
  REGION 1..85: note = Description of Unknown:cds_NC_029316.1_cds_YP_009230336.1_83 target sequence
KPYTRSEKNGKIMFIGHAKKSAEIAKELMKRLKLPNNIIKDVTNLIEMHMDFNLAQNNEKNQAQLITKLMSLYYWNPEKVREIYN

SEQ ID NO: 29310 - protein, 85 aa, unidentified
  REGION 1..85: note = Description of Unknown:cds_NC_031988.1_cds_YP_009325514.1_1 target sequence
DADKIVFKVNNQVVSVKPEVIVDQYEYKYPAIRDQKKPSITLGKAPDLNKAYKSVLSGMNAAKLDPDDVCSYLAAAMELFEGICP

SEQ ID NO: 29311 - protein, 85 aa, unidentified
  REGION 1..85: note = Description of Unknown:cds_NC_031988.1_cds_YP_009325514.1_1 target sequence
EDWTSYGILIARKGDKITPATLVDIKRTDIEGNWALTGGQDLTRDPTVAEHASLVGLLLSLYRLSKISGQNTGNYKTNIADRIEQ

SEQ ID NO: 29312 - protein, 85 aa, unidentified
  REGION 1..85: note = Description of Unknown:cds_NC_031988.1_cds_YP_009325514.1_1 target sequence
IFETAPFVKIVEHHTLMTTHKMCANWSTIPNFRFLTGTYDMFFSRVEHLYSAIRVGTVVTAYEDCSGLVSFTGFIKQINLTAREA

SEQ ID NO: 29313 - protein, 85 aa, unidentified
  REGION 1..85: note = Description of Unknown:cds_NC_031988.1_cds_YP_009325514.1_1 target sequence
ILYFFHKNFEEEIKRMFEPGQETAVPHSYFIHFRSLGLSGKSPYSSNAVGHVFNLIHFVGCYMGQVRSLNATVIATCAPHEMSVL

SEQ ID NO: 29314 - protein, 85 aa, unidentified
  REGION 1..85: note = Description of Unknown:cds_NC_031988.1_cds_YP_009325514.1_1 target sequence
GGYLGEEFFGKGTFERRFFRDERELQDYEAAESMKTDMALADDATVNSDDEDFFSGETRSPEAVYTRIMMNGGRLKKSHIKRYVS

SEQ ID NO: 29315 - protein, 84 aa, unidentified
  REGION 1..84: note = Description of Unknown:cds_NC_031988.1_cds_YP_009325514.1_1 target sequence
QDYEAAESMKTDMALADDATVNSDDEDFFSGETRSPEAVYTRIMMNGGRLKKSHIKRYVSVSSNHQSRPNSFAEFLNKTYSNDP

SEQ ID NO: 29316 - protein, 85 aa, unidentified
  REGION 1..85: note = Description of Unknown:cds_NC_031988.1_cds_YP_009325514.1_1 target sequence
KYPAIRDQKKPSITLGKAPDLNKAYKSVLSGMNAAKLDPDDVCSYLAAAMELFEGICPEDWTSYGILIARKGDKITPATLVDIKR

SEQ ID NO: 29317 - protein, 85 aa, unidentified
  REGION 1..85: note = Description of Unknown:cds_NC_031988.1_cds_YP_009325514.1_1 target sequence
TDIEGNWALTGGQDLTRDPTVAEHASLVGLLLSLYRLSKISGQNTGNYKTNIADRIEQIFETAPFVKIVEHHTLMTTHKMCANWS

SEQ ID NO: 29318 - protein, 85 aa, unidentified
  REGION 1..85: note = Description of Unknown:cds_NC_031988.1_cds_YP_009325514.1_1 target sequence
TIPNFRFLTGTYDMFFSRVEHLYSAIRVGTVVTAYEDCSGLVSFTGFIKQINLTAREAILYFFHKNFEEEIKRMFEPGQETAVPH

SEQ ID NO: 29319 - protein, 85 aa, unidentified
  REGION 1..85: note = Description of Unknown:cds_NC_031988.1_cds_YP_009325514.1_1 target sequence
SYFIHFRSLGLSGKSPYSSNAVGHVFNLIHFVGCYMGQVRSLNATVIATCAPHEMSVLGGYLGEEFFGKGTFERRFFRDERELQD

SEQ ID NO: 29320 - protein, 85 aa, unidentified
  REGION 1..85: note = Description of Unknown:cds_NC_025377.1_cds_YP_009094268.1_1 target sequence
DSEHIVFRVRNEIVTLKPEVISDQYEYKYPAITDKKKPSITLGRAPDLSIAYRSILSGFNAAKLDPDDVCSYLAAAMPLFEGVCP

SEQ ID NO: 29321 - protein, 85 aa, unidentified
  REGION 1..85: note = Description of Unknown:cds_NC_025377.1_cds_YP_009094268.1_1 target sequence
EDWISYGIIIARKGDKINPSHLVDIMRTEVEGNWSQSGGADVTRNPTVAEHASLVGLLLCLYRLSKIVGQNTANYKTNVADRMEQ

SEQ ID NO: 29322 - protein, 85 aa, unidentified
  REGION 1..85: note = Description of Unknown:cds_NC_025377.1_cds_YP_009094268.1_1 target sequence
IFETAPFVKIIEHHTLMTTHKMCANWSTIPNFRFLVGTYDMFFSRIDHLYSALRVGTVVTAYEDCTGLVSFTAFLKQINLSARDA

SEQ ID NO: 29323 - protein, 85 aa, unidentified
  REGION 1..85: note = Description of Unknown:cds_NC_025377.1_cds_YP_009094268.1_1 target sequence
ILYFFHKNFEEEIRRMFRPNQETAVPHSYFIHFRSLGLSGKSPYSSNAVGHVFNLIHFVGCYMGQVRSLNATVIQTCAPHEMSVL

SEQ ID NO: 29324 - protein, 85 aa, unidentified
  REGION 1..85: note = Description of Unknown:cds_NC_025377.1_cds_YP_009094268.1_1 target sequence
GGYLGEEFFGKGTFERRFFRDERELQDHLEAEEAKIDIALADDATVDSGDEDFYGGESRSPEAVYNRIIMNKGRLKKLHIKRYRS

SEQ ID NO: 29325 - protein, 84 aa, unidentified
  REGION 1..84: note = Description of Unknown:cds_NC_025377.1_cds_YP_009094268.1_1 target sequence
QDHLEAEEAKIDIALADDATVDSGDEDFYGGESRSPEAVYNRIIMNKGRLKKLHIKRYRSVSSNHQARPNTFAEFLNKVYSDDN

SEQ ID NO: 29326 - protein, 85 aa, unidentified
  REGION 1..85: note = Description of Unknown:cds_NC_025377.1_cds_YP_009094268.1_1 target sequence
KYPAITDKKKPSITLGRAPDLSIAYRSILSGFNAAKLDPDDVCSYLAAAMPLFEGVCPEDWISYGIIIARKGDKINPSHLVDIMR

SEQ ID NO: 29327 - protein, 85 aa, unidentified
  REGION 1..85: note = Description of Unknown:cds_NC_025377.1_cds_YP_009094268.1_1 target sequence
TEVEGNWSQSGGADVTRNPTVAEHASLVGLLLCLYRLSKIVGQNTANYKTNVADRMEQIFETAPFVKIIEHHTLMTTHKMCANWS

SEQ ID NO: 29328 - protein, 85 aa, unidentified
  REGION 1..85: note = Description of Unknown:cds_NC_025377.1_cds_YP_009094268.1_1 target sequence
TIPNFRFLVGTYDMFFSRIDHLYSALRVGTVVTAYEDCTGLVSFTAFLKQINLSARDAILYFFHKNFEEEIRRMFRPNQETAVPH

SEQ ID NO: 29329 - protein, 85 aa, unidentified
  REGION 1..85: note = Description of Unknown:cds_NC_025377.1_cds_YP_009094268.1_1 target sequence
SYFIHFRSLGLSGKSPYSSNAVGHVFNLIHFVGCYMGQVRSLNATVIQTCAPHEMSVLGGYLGEEFFGKGTFERRFFRDERELQD

SEQ ID NO: 29330 - protein, 85 aa, unidentified
  REGION 1..85: note = Description of Unknown:cds_NC_020807.1_cds_YP_007641387.1_1 target sequence
DSDKIVFKVHNQIVSLKPEIISDQYEYKYPAITDGKKPGITLGKAPDLSTAYKSILSGMNAAKLDPDDVCSYLAAAMQFFEGVCP

SEQ ID NO: 29331 - protein, 85 aa, unidentified
  REGION 1..85: note = Description of Unknown:cds_NC_020807.1_cds_YP_007641387.1_1 target sequence
EDWVSYGIIIAKKGETITPNVLVDITRTNVEGNWAQAGGADMTRDPTIAEHASLVGLLLCLYRLSKIVGQNTANYKTNVADRMEQ

SEQ ID NO: 29332 - protein, 85 aa, unidentified
  REGION 1..85: note = Description of Unknown:cds_NC_020807.1_cds_YP_007641387.1_1 target sequence
IFETAPFIKVVEHHTLMTTHKMCANWSTIPNFRFLAGTYDMFFARIEHLYSAIRVGTVVTAYEDCSGLVSFTGFIKQINLSARDA

SEQ ID NO: 29333 - protein, 85 aa, unidentified
  REGION 1..85: note = Description of Unknown:cds_NC_020807.1_cds_YP_007641387.1_1 target sequence
LLYFFHKNFEEEIKRMFEPGQETAVPHSYFIHFRALGLSGKSPYSSNAVGHTFNLIHFIGCYMGQIRSLNATVIQTCAPHEMSVL

SEQ ID NO: 29334 - protein, 85 aa, unidentified
  REGION 1..85: note = Description of Unknown:cds_NC_020807.1_cds_YP_007641387.1_1 target sequence
GGYLGEEFFGKGTFERRFFRDEKEMQDYAELEGAKVEASLADDGTVDSDDEEFFSGETRSPEAVYSRIMMNNGRLRKSHIQRYVS

SEQ ID NO: 29335 - protein, 84 aa, unidentified
  REGION 1..84: note = Description of Unknown:cds_NC_020807.1_cds_YP_007641387.1_1 target sequence
QDYAELEGAKVEASLADDGTVDSDDEEFFSGETRSPEAVYSRIMMNNGRLRKSHIQRYVSVSSNHQARPNSFAEFLNKVYSESS

SEQ ID NO: 29336 - protein, 85 aa, unidentified
  REGION 1..85: note = Description of Unknown:cds_NC_020807.1_cds_YP_007641387.1_1 target sequence
KYPAITDGKKPGITLGKAPDLSTAYKSILSGMNAAKLDPDDVCSYLAAAMQFFEGVCPEDWVSYGIIIAKKGETITPNVLVDITR

SEQ ID NO: 29337 - protein, 85 aa, unidentified
  REGION 1..85: note = Description of Unknown:cds_NC_020807.1_cds_YP_007641387.1_1 target sequence
TNVEGNWAQAGGADMTRDPTIAEHASLVGLLLCLYRLSKIVGQNTANYKTNVADRMEQIFETAPFIKVVEHHTLMTTHKMCANWS

SEQ ID NO: 29338 - protein, 85 aa, unidentified
  REGION 1..85: note = Description of Unknown:cds_NC_020807.1_cds_YP_007641387.1_1 target sequence
TIPNFRFLAGTYDMFFARIEHLYSAIRVGTVVTAYEDCSGLVSFTGFIKQINLSARDALLYFFHKNFEEEIKRMFEPGQETAVPH

SEQ ID NO: 29339 - protein, 85 aa, unidentified
  REGION 1..85: note = Description of Unknown:cds_NC_020807.1_cds_YP_007641387.1_1 target sequence
SYFIHFRALGLSGKSPYSSNAVGHTFNLIHFIGCYMGQIRSLNATVIQTCAPHEMSVLGGYLGEEFFGKGTFERRFFRDEKEMQD

SEQ ID NO: 29340 - protein, 85 aa, unidentified
  REGION 1..85: note = Description of Unknown:cds_NC_025365.1_cds_YP_009094179.1_1 target sequence
DSEKIVFKVRNQVVSLKPEIISDQYEYKYPAILDGRKPGITLGRAPDLNTAYKSILSGMNAAKLDPDDVCSYLAAAMQLFEGVCP

SEQ ID NO: 29341 - protein, 85 aa, unidentified
  REGION 1..85: note = Description of Unknown:cds_NC_025365.1_cds_YP_009094179.1_1 target sequence
EDWTSYGIVIAKKGDKITPEDLIDVTRTNVEGNWAQTGGTDMTRDPTSAEHASLVGLLLCLYRLSKIVGQNTANYKTNVADRMEQ

SEQ ID NO: 29342 - protein, 85 aa, unidentified
  REGION 1..85: note = Description of Unknown:cds_NC_025365.1_cds_YP_009094179.1_1 target sequence
IFETAPFVKIVEHHTLMTTHKMCANWSTIPNFRFLAGAYDMYFARIEHLYSAIRVGTVVTAYEDCSGLVSFTGFIKQINLSARDA

SEQ ID NO: 29343 - protein, 85 aa, unidentified
  REGION 1..85: note = Description of Unknown:cds_NC_025365.1_cds_YP_009094179.1_1 target sequence
LLYFFHKNFEEEIRRMFEPGQETAIPHSYFIHFRALGLSGKSPYSSNAVGHTFNLIHFIGCYMGQIRSLNATVIQACAPHEMSVL

SEQ ID NO: 29344 - protein, 85 aa, unidentified
  REGION 1..85: note = Description of Unknown:cds_NC_025365.1_cds_YP_009094179.1_1 target sequence
GGYLGEEFFGKGTFERRFFRDEKEMQDYAELEGIKIEAALADDGTVDSDDEDFFSGETRSPEAVYSRIMMNNGRLKRSHIRRYIS

SEQ ID NO: 29345 - protein, 84 aa, unidentified
  REGION 1..84: note = Description of Unknown:cds_NC_025365.1_cds_YP_009094179.1_1 target sequence
QDYAELEGIKIEAALADDGTVDSDDEDFFSGETRSPEAVYSRIMMNNGRLKRSHIRRYISVSSNHQARPNSFAEFLNKVYSDGS

SEQ ID NO: 29346 - protein, 85 aa, unidentified
  REGION 1..85: note = Description of Unknown:cds_NC_025365.1_cds_YP_009094179.1_1 target sequence
KYPAILDGRKPGITLGRAPDLNTAYKSILSGMNAAKLDPDDVCSYLAAAMQLFEGVCPEDWTSYGIVIAKKGDKITPEDLIDVTR

SEQ ID NO: 29347 - protein, 85 aa, unidentified
  REGION 1..85: note = Description of Unknown:cds_NC_025365.1_cds_YP_009094179.1_1 target sequence
TNVEGNWAQTGGTDMTRDPTSAEHASLVGLLLCLYRLSKIVGQNTANYKTNVADRMEQIFETAPFVKIVEHHTLMTTHKMCANWS

SEQ ID NO: 29348 - protein, 85 aa, unidentified
  REGION 1..85: note = Description of Unknown:cds_NC_025365.1_cds_YP_009094179.1_1 target sequence
TIPNFRFLAGAYDMYFARIEHLYSAIRVGTVVTAYEDCSGLVSFTGFIKQINLSARDALLYFFHKNFEEEIRRMFEPGQETAIPH

SEQ ID NO: 29349 - protein, 85 aa, unidentified
  REGION 1..85: note = Description of Unknown:cds_NC_025365.1_cds_YP_009094179.1_1 target sequence
SYFIHFRALGLSGKSPYSSNAVGHTFNLIHFIGCYMGQIRSLNATVIQACAPHEMSVLGGYLGEEFFGKGTFERRFFRDEKEMQD

SEQ ID NO: 29350 - protein, 85 aa, unidentified
  REGION 1..85: note = Description of Unknown:cds_NC_003243.1_cds_NP_478339.1_1 target sequence
ESDKIAFKINNQLVSVKPEVIVDQYEYKYPAIKDQRKPSITLGKAPDLNKAYKSILSGMNAAKLDPDDVCSYLAAAMELFEGICP

SEQ ID NO: 29351 - protein, 85 aa, unidentified
  REGION 1..85: note = Description of Unknown:cds_NC_003243.1_cds_NP_478339.1_1 target sequence
EDWTSYGILIARKGDKITPATLVDIRRTDIQGSWALAGGQDFTRDPTIAEHASLVGLLLSLYRLSKISGQNTGNYKTNIADRIEQ

SEQ ID NO: 29352 - protein, 85 aa, unidentified
  REGION 1..85: note = Description of Unknown:cds_NC_003243.1_cds_NP_478339.1_1 target sequence
IFETAPFAKIVEHHTLMTTHKMCANWSTIPNFRFLAGTYDMFFSRVEHLYSAIRVGTVVTAYEDCSGLVSFTGFIKQINLTAREA

SEQ ID NO: 29353 - protein, 85 aa, unidentified
  REGION 1..85: note = Description of Unknown:cds_NC_003243.1_cds_NP_478339.1_1 target sequence
ILYFFHKNFEEEIRRMFEPGQETAVPHSYFIHFRSLGLSGKSPYSSNAVGHVFNLIHFVGCYMGQIRSLNATVISTCAPHEMSVL

SEQ ID NO: 29354 - protein, 85 aa, unidentified
  REGION 1..85: note = Description of Unknown:cds_NC_003243.1_cds_NP_478339.1_1 target sequence
GGYLGEEFFGKGTFERRFFRDEKELQDYEAAEAMKIDLALADDGTVNSYDEDYLSGETRSPEAVYTRIMMNGGRLKKSHIRRYIS

SEQ ID NO: 29355 - protein, 84 aa, unidentified
  REGION 1..84: note = Description of Unknown:cds_NC_003243.1_cds_NP_478339.1_1 target sequence
QDYEAAEAMKIDLALADDGTVNSYDEDYLSGETRSPEAVYTRIMMNGGRLKKSHIRRYISVSSNHQSRPNSFAEFLNKTYSSDS

SEQ ID NO: 29356 - protein, 85 aa, unidentified
  REGION 1..85: note = Description of Unknown:cds_NC_003243.1_cds_NP_478339.1_1 target sequence
KYPAIKDQRKPSITLGKAPDLNKAYKSILSGMNAAKLDPDDVCSYLAAAMELFEGICPEDWTSYGILIARKGDKITPATLVDIRR

SEQ ID NO: 29357 - protein, 85 aa, unidentified
  REGION 1..85: note = Description of Unknown:cds_NC_003243.1_cds_NP_478339.1_1 target sequence
TDIQGSWALAGGQDFTRDPTIAEHASLVGLLLSLYRLSKISGQNTGNYKTNIADRIEQIFETAPFAKIVEHHTLMTTHKMCANWS

SEQ ID NO: 29358 - protein, 85 aa, unidentified
  REGION 1..85: note = Description of Unknown:cds_NC_003243.1_cds_NP_478339.1_1 target sequence
TIPNFRFLAGTYDMFFSRVEHLYSAIRVGTVVTAYEDCSGLVSFTGFIKQINLTAREAILYFFHKNFEEEIRRMFEPGQETAVPH

SEQ ID NO: 29359 - protein, 85 aa, unidentified
  REGION 1..85: note = Description of Unknown:cds_NC_003243.1_cds_NP_478339.1_1 target sequence
SYFIHFRSLGLSGKSPYSSNAVGHVFNLIHFVGCYMGQIRSLNATVISTCAPHEMSVLGGYLGEEFFGKGTFERRFFRDEKELQD

SEQ ID NO: 29360 - protein, 85 aa, unidentified
  REGION 1..85: note = Description of Unknown:hvTR_P03272 target sequence
ETRGRRPAALQHQQDQPQAHPGQRAARSAPLHRDPDYADEDPAPVERHDPGPSGRAPTTAVQRKPPQPAKRGDMLDRDAVEHVTE

SEQ ID NO: 29361 - protein, 85 aa, unidentified
  REGION 1..85: note = Description of Unknown:hvTR_P03272 target sequence
LWDRLELLGQTLKSMPTADGLKPLKNFASLQELLSLGGERLLAHLVRENMQVRDMLNEVAPLLRDDGSCSSLNYQLQPVIGVIYG

SEQ ID NO: 29362 - protein, 85 aa, unidentified
  REGION 1..85: note = Description of Unknown:hvTR_P03272 target sequence
PTGCGKSQLLRNLLSSQLISPTPETVFFIAPQVDMIPPSELKAWEMQICEGNYAPGPDGTIIPQSGTLRPRFVKMAYDDLILEHN

SEQ ID NO: 29363 - protein, 85 aa, unidentified
  REGION 1..85: note = Description of Unknown:hvTR_P03272 target sequence
YDVSDPRNIFAQAAARGPIAIIMDECMENLGGHKGVSKFFHAFPSKLHDKFPKCTGYTVLVVLHNMNPRRDMAGNIANLKIQSKM

SEQ ID NO: 29364 - protein, 85 aa, unidentified
  REGION 1..85: note = Description of Unknown:hvTR_P03272 target sequence
HLISPRMHPSQLNRFVNTYTKGLPLAISLLLKDIFRHHAQRSCYDWIIYNTTPQHEALQWCYLHPRDGLMPMYLNIQSHLYHVLE

SEQ ID NO: 29365 - protein, 84 aa, unidentified
  REGION 1..84: note = Description of Unknown:hvTR_P03272 target sequence
LAISLLLKDIFRHHAQRSCYDWIIYNTTPQHEALQWCYLHPRDGLMPMYLNIQSHLYHVLEKIHRTLNDRDRWSRAYRARKTPK

SEQ ID NO: 29366 - protein, 85 aa, unidentified
  REGION 1..85: note = Description of Unknown:hvTR_P03272 target sequence
SAPLHRDPDYADEDPAPVERHDPGPSGRAPTTAVQRKPPQPAKRGDMLDRDAVEHVTELWDRLELLGQTLKSMPTADGLKPLKNF

SEQ ID NO: 29367 - protein, 85 aa, unidentified
  REGION 1..85: note = Description of Unknown:hvTR_P03272 target sequence
ASLQELLSLGGERLLAHLVRENMQVRDMLNEVAPLLRDDGSCSSLNYQLQPVIGVIYGPTGCGKSQLLRNLLSSQLISPTPETVF

SEQ ID NO: 29368 - protein, 85 aa, unidentified
  REGION 1..85: note = Description of Unknown:hvTR_P03272 target sequence
FIAPQVDMIPPSELKAWEMQICEGNYAPGPDGTIIPQSGTLRPRFVKMAYDDLILEHNYDVSDPRNIFAQAAARGPIAIIMDECM

SEQ ID NO: 29369 - protein, 85 aa, unidentified
  REGION 1..85: note = Description of Unknown:hvTR_P03272 target sequence
ENLGGHKGVSKFFHAFPSKLHDKFPKCTGYTVLVVLHNMNPRRDMAGNIANLKIQSKMHLISPRMHPSQLNRFVNTYTKGLPLAI

SEQ ID NO: 29370 - protein, 85 aa, unidentified
  REGION 1..85: note = Description of Unknown:hvTR_Q77Q82 target sequence
DPGQRPNPFGAPGAIPKKPCLSQGSPGTSGSGAPCDEPSRSESPGEGPSGTGGSAAAGDITRQAVVAAITEWSRTRQLRISTGAS

SEQ ID NO: 29371 - protein, 85 aa, unidentified
  REGION 1..85: note = Description of Unknown:hvTR_Q77Q82 target sequence
EGKASIKDWIVCQVNSGKFPGVEWEDEERTRFRIPVTPLADPCFEWRRDGELGVVYIRERGNMPVDASFKGTRGRRRMLAALRRT

SEQ ID NO: 29372 - protein, 85 aa, unidentified
  REGION 1..85: note = Description of Unknown:hvTR_Q77Q82 target sequence
RGLQEIGKGISQDGHHFLVFRVRKPEEEQCVECGVVAGAVHDFNNMARLLQEGFFSPGQCLPGEIVTPVPSCTTAEGQEAVIDWG

SEQ ID NO: 29373 - protein, 85 aa, unidentified
  REGION 1..85: note = Description of Unknown:hvTR_Q77Q82 target sequence
RLFIRMYYNGEQVHELLTTSQSGCRISSALRRDPAVHYCAVGSPGQVWLPNVPNLACEIAKRELCDTLDACAKGILLTSSCNGIF

SEQ ID NO: 29374 - protein, 85 aa, unidentified
  REGION 1..85: note = Description of Unknown:hvTR_Q77Q82 target sequence
CVCYHNGPVHFIGNTVPPDSGPLLLPQGKPTRIFNPNTFLVGLANSPLPAPSHVTCPLVKLWLGKPVAVGKLEPHAPSPRDFAAR

SEQ ID NO: 29375 - protein, 84 aa, unidentified
  REGION 1..84: note = Description of Unknown:hvTR_Q77Q82 target sequence
LPQGKPTRIFNPNTFLVGLANSPLPAPSHVTCPLVKLWLGKPVAVGKLEPHAPSPRDFAARCSNFSDACVVLEIMPKPLWDAMQ

SEQ ID NO: 29376 - protein, 85 aa, unidentified
  REGION 1..85: note = Description of Unknown:hvTR_Q77Q82 target sequence
TSGSGAPCDEPSRSESPGEGPSGTGGSAAAGDITRQAVVAAITEWSRTRQLRISTGASEGKASIKDWIVCQVNSGKFPGVEWEDE

SEQ ID NO: 29377 - protein, 85 aa, unidentified
  REGION 1..85: note = Description of Unknown:hvTR_Q77Q82 target sequence
ERTRFRIPVTPLADPCFEWRRDGELGVVYIRERGNMPVDASFKGTRGRRRMLAALRRTRGLQEIGKGISQDGHHFLVFRVRKPEE

SEQ ID NO: 29378 - protein, 85 aa, unidentified
  REGION 1..85: note = Description of Unknown:hvTR_Q77Q82 target sequence
EQCVECGVVAGAVHDFNNMARLLQEGFFSPGQCLPGEIVTPVPSCTTAEGQEAVIDWGRLFIRMYYNGEQVHELLTTSQSGCRIS

SEQ ID NO: 29379 - protein, 85 aa, unidentified
  REGION 1..85: note = Description of Unknown:hvTR_Q77Q82 target sequence
SALRRDPAVHYCAVGSPGQVWLPNVPNLACEIAKRELCDTLDACAKGILLTSSCNGIFCVCYHNGPVHFIGNTVPPDSGPLLLPQ

SEQ ID NO: 29380 - protein, 85 aa, unidentified
  REGION 1..85: note = Description of Unknown:cds_NZ_WFIY01000004.1_cds_WP_155862434.1_177 target sequence
LLDNLRDAVRKFLTGSSSYDKAVEDFIKELQKSLISADVNVKLVFSLTNKIKERLKNEKPPTYIERREWFIKIVYDELSNLFGGD

SEQ ID NO: 29381 - protein, 85 aa, unidentified
  REGION 1..85: note = Description of Unknown:cds_NZ_WFIY01000004.1_cds_WP_155862434.1_177 target sequence
KEPKVIPDKIPYVIMLVGVQGTGKTTTAGKLAYFYKKKGFKVGLVGADVYRPAALEQLQQLGQQIGVPVYGEPGEKDAVGIAKRG

SEQ ID NO: 29382 - protein, 85 aa, unidentified
  REGION 1..85: note = Description of Unknown:cds_NZ_WFIY01000004.1_cds_WP_155862434.1_177 target sequence
VEKFLREKMEIIIVDTAGRHGYGEEAALLEEMKNIYEAIKPDEVTLVIDASIGQKAYDLASKFNQASKIGTIIITKMDGTAKGGG

SEQ ID NO: 29383 - protein, 85 aa, unidentified
  REGION 1..85: note = Description of Unknown:cds_NZ_WFIY01000004.1_cds_WP_155862434.1_177 target sequence
ALSAVAATGATIKFIGTGEKIDELEVFNPRRFVARILGMGDIETILEKIKEVENYDKMQKKMEEVISGKGKLTLRDVYNQLIALR

SEQ ID NO: 29384 - protein, 85 aa, unidentified
  REGION 1..85: note = Description of Unknown:cds_NZ_WFIY01000004.1_cds_WP_155862434.1_177 target sequence
KMGPLSKLFQLLPGIGMLGQIPEDQLKVGEEKMRKWLAIMNSMTYEELDNPSIIDKSRMRRIALGSGTEIEDVKELIEHYNLMQR

SEQ ID NO: 29385 - protein, 84 aa, unidentified
  REGION 1..84: note = Description of Unknown:cds_NZ_WFIY01000004.1_cds_WP_155862434.1_177 target sequence
LKVGEEKMRKWLAIMNSMTYEELDNPSIIDKSRMRRIALGSGTEIEDVKELIEHYNLMQRTIKMLKRRKKDVEKLLGQFGGEST

SEQ ID NO: 29386 - protein, 85 aa, unidentified
  REGION 1..85: note = Description of Unknown:cds_NZ_WFIY01000004.1_cds_WP_155862434.1_177 target sequence
KELQKSLISADVNVKLVFSLTNKIKERLKNEKPPTYIERREWFIKIVYDELSNLFGGDKEPKVIPDKIPYVIMLVGVQGTGKTTT

SEQ ID NO: 29387 - protein, 85 aa, unidentified
  REGION 1..85: note = Description of Unknown:cds_NZ_WFIY01000004.1_cds_WP_155862434.1_177 target sequence
AGKLAYFYKKKGFKVGLVGADVYRPAALEQLQQLGQQIGVPVYGEPGEKDAVGIAKRGVEKFLREKMEIIIVDTAGRHGYGEEAA

SEQ ID NO: 29388 - protein, 85 aa, unidentified
  REGION 1..85: note = Description of Unknown:cds_NZ_WFIY01000004.1_cds_WP_155862434.1_177 target sequence
LLEEMKNIYEAIKPDEVTLVIDASIGQKAYDLASKFNQASKIGTIIITKMDGTAKGGGALSAVAATGATIKFIGTGEKIDELEVF

SEQ ID NO: 29389 - protein, 85 aa, unidentified
  REGION 1..85: note = Description of Unknown:cds_NZ_WFIY01000004.1_cds_WP_155862434.1_177 target sequence
NPRRFVARILGMGDIETILEKIKEVENYDKMQKKMEEVISGKGKLTLRDVYNQLIALRKMGPLSKLFQLLPGIGMLGQIPEDQLK

SEQ ID NO: 29390 - protein, 85 aa, unidentified
  REGION 1..85: note = Description of Unknown:cds_NZ_WFIY01000004.1_cds_WP_155862680.1_476 target sequence
DFDVIVVGGGVGGYSASLRAAELGKKVAIIEKDEIGGECINRACIPSKTLIDAVKILNKIKKATWIKASATLDYEELSRFKDKII

SEQ ID NO: 29391 - protein, 85 aa, unidentified
  REGION 1..85: note = Description of Unknown:cds_NZ_WFIY01000004.1_cds_WP_155862680.1_476 target sequence
ETVKEKMIKNLENRSVTIIKGKGEIKREGEIDVNGKTYTADKIVIATGSSPISLPAFPLNGKNVLDPWTAMNLPSLPQKIVIVGG

SEQ ID NO: 29392 - protein, 85 aa, unidentified
  REGION 1..85: note = Description of Unknown:cds_NZ_WFIY01000004.1_cds_WP_155862680.1_476 target sequence
GVAGVELATLFKAMGKDVTILELMPQLLPGFDKDIANETKKRLEERGVKIYLQANSKIIESGDKVVFDVTLPSSNEKVSGDLAVI

SEQ ID NO: 29393 - protein, 85 aa, unidentified
  REGION 1..85: note = Description of Unknown:cds_NZ_WFIY01000004.1_cds_WP_155862680.1_476 target sequence
TIGRKPNTEGLDLNAVHVNVDKRGYIIVNDRAETSNPRYYAVGDVAGMPLSATKAWKQGIVAGDNIGGISSTMPKYSPISIFADL

SEQ ID NO: 29394 - protein, 85 aa, unidentified
  REGION 1..85: note = Description of Unknown:cds_NZ_WFIY01000004.1_cds_WP_155862680.1_476 target sequence
EIGSVGKTLDDLKKDNIEGKEITVKMEDIPRAWTLNETEGFLKIVVSENKIVGAHMVGEGATEVINTLSLALEAGLTVDDLYKVL

SEQ ID NO: 29395 - protein, 84 aa, unidentified
  REGION 1..84: note = Description of Unknown:cds_NZ_WFIY01000004.1_cds_WP_155862680.1_476 target sequence
KMEDIPRAWTLNETEGFLKIVVSENKIVGAHMVGEGATEVINTLSLALEAGLTVDDLYKVLFSHPTVTEIISEAMQRLKYGEVY

SEQ ID NO: 29396 - protein, 85 aa, unidentified
  REGION 1..85: note = Description of Unknown:cds_NZ_WFIY01000004.1_cds_WP_155862680.1_476 target sequence
AIIEKDEIGGECINRACIPSKTLIDAVKILNKIKKATWIKASATLDYEELSRFKDKIIETVKEKMIKNLENRSVTIIKGKGEIKR

SEQ ID NO: 29397 - protein, 85 aa, unidentified
  REGION 1..85: note = Description of Unknown:cds_NZ_WFIY01000004.1_cds_WP_155862680.1_476 target sequence
EGEIDVNGKTYTADKIVIATGSSPISLPAFPLNGKNVLDPWTAMNLPSLPQKIVIVGGGVAGVELATLFKAMGKDVTILELMPQL

SEQ ID NO: 29398 - protein, 85 aa, unidentified
  REGION 1..85: note = Description of Unknown:cds_NZ_WFIY01000004.1_cds_WP_155862680.1_476 target sequence
LPGFDKDIANETKKRLEERGVKIYLQANSKIIESGDKVVFDVTLPSSNEKVSGDLAVITIGRKPNTEGLDLNAVHVNVDKRGYII

SEQ ID NO: 29399 - protein, 85 aa, unidentified
  REGION 1..85: note = Description of Unknown:cds_NZ_WFIY01000004.1_cds_WP_155862680.1_476 target sequence
VNDRAETSNPRYYAVGDVAGMPLSATKAWKQGIVAGDNIGGISSTMPKYSPISIFADLEIGSVGKTLDDLKKDNIEGKEITVKME

SEQ ID NO: 29400 - protein, 85 aa, unidentified
  REGION 1..85: note = Description of Unknown:cds_NZ_WFIY01000004.1_cds_WP_155863292.1_1249 target sequence
NNNANRSVSEIMDNLQKMPISTWLFMVISASYFFVEYDLFDLSYVLPAIISTFKISSTLASLALTSTFIGGVIGELSGGYLSDNF

SEQ ID NO: 29401 - protein, 85 aa, unidentified
  REGION 1..85: note = Description of Unknown:cds_NZ_WFIY01000004.1_cds_WP_155863292.1_1249 target sequence
GRKFMLIIGLVTYSISTILSALSVNILMLIITRFFVGWGTYVDFNSVITYLAEMSPKHSRGKIISYSSSIGIALGALVVTVVSYL

SEQ ID NO: 29402 - protein, 85 aa, unidentified
  REGION 1..85: note = Description of Unknown:cds_NZ_WFIY01000004.1_cds_WP_155863292.1_1249 target sequence
LAPIPNIGWRLVFILGGIVGITFAVLRKDLPESPRWLEKKGKLDKAKLTLEKLHINIQEPLIPLIPSNYNNSHKSSPLANLKILV

SEQ ID NO: 29403 - protein, 85 aa, unidentified
  REGION 1..85: note = Description of Unknown:cds_NZ_WFIY01000004.1_cds_WP_155863292.1_1249 target sequence
DKSHLKYFLIFLISWIMFYSAFDGEGITVPTILTEHGYTLASTLRFFVVSGSVAFVFYVISALTAEKTQRKYLATLAALLTGIFM

SEQ ID NO: 29404 - protein, 85 aa, unidentified
  REGION 1..85: note = Description of Unknown:cds_NZ_WFIY01000004.1_cds_WP_155863292.1_1249 target sequence
ALLGTLYNAILIYVSLASLSSLGAFIFPYTYLLTVEHFPTEVRATAFAFTDGIAHLLLAFMPIIILTVSAKYGFFNTMLILAVMM

SEQ ID NO: 29405 - protein, 84 aa, unidentified
  REGION 1..84: note = Description of Unknown:cds_NZ_WFIY01000004.1_cds_WP_155863292.1_1249 target sequence
FIFPYTYLLTVEHFPTEVRATAFAFTDGIAHLLLAFMPIIILTVSAKYGFFNTMLILAVMMIVGGILLLFTKATTGKSLDETSK

SEQ ID NO: 29406 - protein, 85 aa, unidentified
  REGION 1..85: note = Description of Unknown:cds_NZ_WFIY01000004.1_cds_WP_155863292.1_1249 target sequence
ISASYFFVEYDLFDLSYVLPAIISTFKISSTLASLALTSTFIGGVIGELSGGYLSDNFGRKFMLIIGLVTYSISTILSALSVNIL

SEQ ID NO: 29407 - protein, 85 aa, unidentified
  REGION 1..85: note = Description of Unknown:cds_NZ_WFIY01000004.1_cds_WP_155863292.1_1249 target sequence
MLIITRFFVGWGTYVDFNSVITYLAEMSPKHSRGKIISYSSSIGIALGALVVTVVSYLLAPIPNIGWRLVFILGGIVGITFAVLR

SEQ ID NO: 29408 - protein, 85 aa, unidentified
  REGION 1..85: note = Description of Unknown:cds_NZ_WFIY01000004.1_cds_WP_155863292.1_1249 target sequence
KDLPESPRWLEKKGKLDKAKLTLEKLHINIQEPLIPLIPSNYNNSHKSSPLANLKILVDKSHLKYFLIFLISWIMFYSAFDGEGI

SEQ ID NO: 29409 - protein, 85 aa, unidentified
  REGION 1..85: note = Description of Unknown:cds_NZ_WFIY01000004.1_cds_WP_155863292.1_1249 target sequence
TVPTILTEHGYTLASTLRFFVVSGSVAFVFYVISALTAEKTQRKYLATLAALLTGIFMALLGTLYNAILIYVSLASLSSLGAFIF

SEQ ID NO: 29410 - protein, 85 aa, unidentified
  REGION 1..85: note = Description of Unknown:cds_NZ_WFIY01000004.1_cds_WP_155863871.1_1775 target sequence
VEIKEIKKAPEIEKASIHSHITGLGLDEHGKAIFKADGMVGQEEAREAAGLVVQLVKQGKMAGKGILLVGPSGTGKTALAVAIAK

SEQ ID NO: 29411 - protein, 85 aa, unidentified
  REGION 1..85: note = Description of Unknown:cds_NZ_WFIY01000004.1_cds_WP_155863871.1_1775 target sequence
ELGEDTPFTAINASELYSTELKKTEVLMQAIRKSIGVRVREKRLVYEGEVKELRIKVAKSRLNPYVQVPREAEITLKTKDDEMKL

SEQ ID NO: 29412 - protein, 85 aa, unidentified
  REGION 1..85: note = Description of Unknown:cds_NZ_WFIY01000004.1_cds_WP_155863871.1_1775 target sequence
TAGESIAEQLVRLGVRKGDVIWIDAETGQVVKTGRSKEVAKYDIGGGGVEVPSGPVKKEKELTSTFTLHDLDLNLAARQISFTAI

SEQ ID NO: 29413 - protein, 85 aa, unidentified
  REGION 1..85: note = Description of Unknown:cds_NZ_WFIY01000004.1_cds_WP_155863871.1_1775 target sequence
FSLFSEREISDDIRKEVDKLVKDMINKGNAELIPGVLFIDDAHMLDIEAFSFLTKALESELSPILILATNRGMTKIRGTDIESPH

SEQ ID NO: 29414 - protein, 85 aa, unidentified
  REGION 1..85: note = Description of Unknown:cds_NZ_WFIY01000004.1_cds_WP_155863871.1_1775 target sequence
GIPLDLLDRLLIIPTKPYNEKEIREIISIRAEELNIELDPQALDELAKIGSQESLRYAVQLLEPANLIAIRNGRNVIKPEDIKEV

SEQ ID NO: 29415 - protein, 84 aa, unidentified
  REGION 1..84: note = Description of Unknown:cds_NZ_WFIY01000004.1_cds_WP_155863871.1_1775 target sequence
EIISIRAEELNIELDPQALDELAKIGSQESLRYAVQLLEPANLIAIRNGRNVIKPEDIKEVYRYFADVKRSVNYVKEYENLLLK

SEQ ID NO: 29416 - protein, 85 aa, unidentified
  REGION 1..85: note = Description of Unknown:cds_NZ_WFIY01000004.1_cds_WP_155863871.1_1775 target sequence
EHGKAIFKADGMVGQEEAREAAGLVVQLVKQGKMAGKGILLVGPSGTGKTALAVAIAKELGEDTPFTAINASELYSTELKKTEVL

SEQ ID NO: 29417 - protein, 85 aa, unidentified
  REGION 1..85: note = Description of Unknown:cds_NZ_WFIY01000004.1_cds_WP_155863871.1_1775 target sequence
MQAIRKSIGVRVREKRLVYEGEVKELRIKVAKSRLNPYVQVPREAEITLKTKDDEMKLTAGESIAEQLVRLGVRKGDVIWIDAET

SEQ ID NO: 29418 - protein, 85 aa, unidentified
  REGION 1..85: note = Description of Unknown:cds_NZ_WFIY01000004.1_cds_WP_155863871.1_1775 target sequence
GQVVKTGRSKEVAKYDIGGGGVEVPSGPVKKEKELTSTFTLHDLDLNLAARQISFTAIFSLFSEREISDDIRKEVDKLVKDMINK

SEQ ID NO: 29419 - protein, 85 aa, unidentified
  REGION 1..85: note = Description of Unknown:cds_NZ_WFIY01000004.1_cds_WP_155863871.1_1775 target sequence
GNAELIPGVLFIDDAHMLDIEAFSFLTKALESELSPILILATNRGMTKIRGTDIESPHGIPLDLLDRLLIIPTKPYNEKEIREII

SEQ ID NO: 29420 - protein, 85 aa, unidentified
  REGION 1..85: note = Description of Unknown:hvTR_P03273.1 target sequence
ETKGRRSAAVLDQQDESEAHPRKRPTRRAPLHRDGNNPDSDAATMEGSDPGSAGRPSSDSLLQEPSQPAKRGGLLDRDAIEHITE

SEQ ID NO: 29421 - protein, 85 aa, unidentified
  REGION 1..85: note = Description of Unknown:hvTR_P03273.1 target sequence
LWDRLELLQQTLSKMPMADGLKPLKNFSSLQELLSLGGERLLTDLVRENIHVREMMNEVAPLLREDGSCRSLNYHLQPVIGVIYG

SEQ ID NO: 29422 - protein, 85 aa, unidentified
  REGION 1..85: note = Description of Unknown:hvTR_P03273.1 target sequence
PTGCGKSQLLRNLLSSQLITPAPETVFFIAPQVDMIPPSELKAWEMQICEGNYAPGPQGTFIPQSGTLRPKFIKMAYDDLTQEHN

SEQ ID NO: 29423 - protein, 85 aa, unidentified
  REGION 1..85: note = Description of Unknown:hvTR_P03273.1 target sequence
YDVSDPRNVFARAAAHGPIAIIMDECMENLGGHKGVSKFFHAFPSKLHDRFPKCTGYTVLVVLHNMNPRRDLGGNIANLKIQSKM

SEQ ID NO: 29424 - protein, 85 aa, unidentified
  REGION 1..85: note = Description of Unknown:hvTR_P03273.1 target sequence
HIISPRMHPSQLNRFVNTYTKGLPVAISLLLKDIVQHHALRPCYDWVIYNTTPEQEALQWSHLHPRDGLMPMYLNIQSHLYRVLE

SEQ ID NO: 29425 - protein, 84 aa, unidentified
  REGION 1..84: note = Description of Unknown:hvTR_P03273.1 target sequence
PVAISLLLKDIVQHHALRPCYDWVIYNTTPEQEALQWSHLHPRDGLMPMYLNIQSHLYRVLEKIHRVLNDRNRWSRAYRARKIK

SEQ ID NO: 29426 - protein, 85 aa, unidentified
  REGION 1..85: note = Description of Unknown:hvTR_P03273.1 target sequence
RAPLHRDGNNPDSDAATMEGSDPGSAGRPSSDSLLQEPSQPAKRGGLLDRDAIEHITELWDRLELLQQTLSKMPMADGLKPLKNF

SEQ ID NO: 29427 - protein, 85 aa, unidentified
  REGION 1..85: note = Description of Unknown:hvTR_P03273.1 target sequence
SSLQELLSLGGERLLTDLVRENIHVREMMNEVAPLLREDGSCRSLNYHLQPVIGVIYGPTGCGKSQLLRNLLSSQLITPAPETVF

SEQ ID NO: 29428 - protein, 85 aa, unidentified
  REGION 1..85: note = Description of Unknown:hvTR_P03273.1 target sequence
FIAPQVDMIPPSELKAWEMQICEGNYAPGPQGTFIPQSGTLRPKFIKMAYDDLTQEHNYDVSDPRNVFARAAAHGPIAIIMDECM

SEQ ID NO: 29429 - protein, 85 aa, unidentified
  REGION 1..85: note = Description of Unknown:hvTR_P03273.1 target sequence
ENLGGHKGVSKFFHAFPSKLHDRFPKCTGYTVLVVLHNMNPRRDLGGNIANLKIQSKMHIISPRMHPSQLNRFVNTYTKGLPVAI

SEQ ID NO: 29430 - protein, 85 aa, unidentified
  REGION 1..85: note = Description of Unknown:hvTR_P89083.2 target sequence
ETRGRRPCPFQHQQDESQAHPCKRPARGPPLHRDGDHPHADPETLEGHDAGRAGRPSSRALQSQSSQPPKRGSLLDRDAVEHVTE

SEQ ID NO: 29431 - protein, 85 aa, unidentified
  REGION 1..85: note = Description of Unknown:hvTR_P89083.2 target sequence
LWDRLELLSQTLAKMPMADGLKPLKNFASLQELLSLGGDRLLGELVRENLQVRDMLNEVAPLLRDDGSCMSLNYHLQPVIGVIYG

SEQ ID NO: 29432 - protein, 85 aa, unidentified
  REGION 1..85: note = Description of Unknown:hvTR_P89083.2 target sequence
PTGCGKSQLLRNLLSSQLITPAPETVFFIAPQVDMIPPSEMKAWEMQICEGNFAPGPEGTIVPQSGTLRPKFIKMSYDDLTQEHN

SEQ ID NO: 29433 - protein, 85 aa, unidentified
  REGION 1..85: note = Description of Unknown:hvTR_P89083.2 target sequence
YDVSDPRNVFAKAAAHGPIAIIMDECMENLGGHKGVSKFFHAFPSKLHDKFPKCTGYTVLVVLHNMNPRRDLGGNIANLKIQAKL

SEQ ID NO: 29434 - protein, 85 aa, unidentified
  REGION 1..85: note = Description of Unknown:hvTR_P89083.2 target sequence
HIISPRMHPSQLNRFANTYTKGLPVAISLLLKDIIQHHAQRPCYDWIIYNTTPEHEAMQWCYLHPRDGLMPMYLNIQSHLYRVLE

SEQ ID NO: 29435 - protein, 84 aa, unidentified
  REGION 1..84: note = Description of Unknown:hvTR_P89083.2 target sequence
PVAISLLLKDIIQHHAQRPCYDWIIYNTTPEHEAMQWCYLHPRDGLMPMYLNIQSHLYRVLEKIHRTLNDRERWTRAYRARKNK

SEQ ID NO: 29436 - protein, 85 aa, unidentified
  REGION 1..85: note = Description of Unknown:hvTR_P89083.2 target sequence
GPPLHRDGDHPHADPETLEGHDAGRAGRPSSRALQSQSSQPPKRGSLLDRDAVEHVTELWDRLELLSQTLAKMPMADGLKPLKNF

SEQ ID NO: 29437 - protein, 85 aa, unidentified
  REGION 1..85: note = Description of Unknown:hvTR_P89083.2 target sequence
ASLQELLSLGGDRLLGELVRENLQVRDMLNEVAPLLRDDGSCMSLNYHLQPVIGVIYGPTGCGKSQLLRNLLSSQLITPAPETVF

SEQ ID NO: 29438 - protein, 85 aa, unidentified
  REGION 1..85: note = Description of Unknown:hvTR_P89083.2 target sequence
FIAPQVDMIPPSEMKAWEMQICEGNFAPGPEGTIVPQSGTLRPKFIKMSYDDLTQEHNYDVSDPRNVFAKAAAHGPIAIIMDECM

SEQ ID NO: 29439 - protein, 85 aa, unidentified
  REGION 1..85: note = Description of Unknown:hvTR_P89083.2 target sequence
ENLGGHKGVSKFFHAFPSKLHDKFPKCTGYTVLVVLHNMNPRRDLGGNIANLKIQAKLHIISPRMHPSQLNRFANTYTKGLPVAI

SEQ ID NO: 29440 - protein, 85 aa, unidentified
  REGION 1..85: note = Description of Unknown:hvTR_Q5GFC2 target sequence
ETRGRRSGAVLDQPDEPEAHPRKRPARRAPLYRDGDHPDADAATLEGPDPGRAGRPSSGALLPQSPQPAKRGGLLDRDAVEHITE

SEQ ID NO: 29441 - protein, 85 aa, unidentified
  REGION 1..85: note = Description of Unknown:hvTR_Q5GFC2 target sequence
LWDRLELLQQTLSKMPMADGLKPLKNFASLQELLSLGGERLLAELVRENMHVRQMMNEVAPLLREDGSCVSLNYHLQPVIGVIYG

SEQ ID NO: 29442 - protein, 85 aa, unidentified
  REGION 1..85: note = Description of Unknown:hvTR_Q5GFC2 target sequence
PTGCGKSQLLRNLLSAQLISPAPETVFFIAPQVDMIPPSELKAWEMQICEGNYAPGIEGTFVPQSGTLRPKFIKMAYEDLTQDHN

SEQ ID NO: 29443 - protein, 85 aa, unidentified
  REGION 1..85: note = Description of Unknown:hvTR_Q5GFC2 target sequence
YDVSDPRNVFAQAAAHGPIAIIMDECMENLGGHKGVSKFFHAFPSKLHDKFPKCTGYTVLVVLHNMNPRRDLGGNIANLKIQAKM

SEQ ID NO: 29444 - protein, 85 aa, unidentified
  REGION 1..85: note = Description of Unknown:hvTR_Q5GFC2 target sequence
HLISPRMHPSQLNRFVNTYTKGLPVAISLLLKDIVQHHALRPCYDWVIYNTTPEHEALQWSYLHPRDGLMPMYLNIQSHLYRVLE

SEQ ID NO: 29445 - protein, 84 aa, unidentified
  REGION 1..84: note = Description of Unknown:hvTR_Q5GFC2 target sequence
PVAISLLLKDIVQHHALRPCYDWVIYNTTPEHEALQWSYLHPRDGLMPMYLNIQSHLYRVLEKIHRVLNDRGRWSRAYRARKIK

SEQ ID NO: 29446 - protein, 85 aa, unidentified
  REGION 1..85: note = Description of Unknown:hvTR_Q5GFC2 target sequence
RAPLYRDGDHPDADAATLEGPDPGRAGRPSSGALLPQSPQPAKRGGLLDRDAVEHITELWDRLELLQQTLSKMPMADGLKPLKNF

SEQ ID NO: 29447 - protein, 85 aa, unidentified
  REGION 1..85: note = Description of Unknown:hvTR_Q5GFC2 target sequence
ASLQELLSLGGERLLAELVRENMHVRQMMNEVAPLLREDGSCVSLNYHLQPVIGVIYGPTGCGKSQLLRNLLSAQLISPAPETVF

SEQ ID NO: 29448 - protein, 85 aa, unidentified
  REGION 1..85: note = Description of Unknown:hvTR_Q5GFC2 target sequence
FIAPQVDMIPPSELKAWEMQICEGNYAPGIEGTFVPQSGTLRPKFIKMAYEDLTQDHNYDVSDPRNVFAQAAAHGPIAIIMDECM

SEQ ID NO: 29449 - protein, 85 aa, unidentified
  REGION 1..85: note = Description of Unknown:hvTR_Q5GFC2 target sequence
ENLGGHKGVSKFFHAFPSKLHDKFPKCTGYTVLVVLHNMNPRRDLGGNIANLKIQAKMHLISPRMHPSQLNRFVNTYTKGLPVAI

SEQ ID NO: 29450 - protein, 85 aa, unidentified
  REGION 1..85: note = Description of Unknown:hvTR_P33469 target sequence
SFTPGKQSSSRASSGNRSGNGILKWADQSDQFRNVQTRGRRAQPKQTATSQQPSGGNVVPYYSWFSGITQFQKGKEFEFVEGQGV

SEQ ID NO: 29451 - protein, 85 aa, unidentified
  REGION 1..85: note = Description of Unknown:hvTR_P33469 target sequence
PIAPGVPATEAKGYWYRHNRRSFKTADGNQRQLLPRWYFYYLGTGPHAKDQYGTDIDGVYWVASNQADVNTPADIVDRDPSSDEA

SEQ ID NO: 29452 - protein, 85 aa, unidentified
  REGION 1..85: note = Description of Unknown:hvTR_P33469 target sequence
IPTRFPPGTVLPQGYYIEGSGRSAPNSRSTSRTSSRASSAGSRSRANSGNRTPTSGVTPDMADQIASLVLAKLGKDATKPQQVTK

SEQ ID NO: 29453 - protein, 85 aa, unidentified
  REGION 1..85: note = Description of Unknown:hvTR_P33469 target sequence
HTAKEVRQKILNKPRQKRSPNKQCTVQQCFGKRGPNQNFGGGEMLKLGTSDPQFPILAELAPTAGAFFFGSRLELAKVQNLSGNP

SEQ ID NO: 29454 - protein, 85 aa, unidentified
  REGION 1..85: note = Description of Unknown:hvTR_P33469 target sequence
DEPQKDVYELRYNGAIRFDSTLSGFETIMKVLNENLNAYQQQDGMMNMSPKPQRQRGHKNGQGENDNISVAVPKSRVQQNKSREL

SEQ ID NO: 29455 - protein, 84 aa, unidentified
  REGION 1..84: note = Description of Unknown:hvTR_P33469 target sequence
GFETIMKVLNENLNAYQQQDGMMNMSPKPQRQRGHKNGQGENDNISVAVPKSRVQQNKSRELTAEDISLLKKMDEPYTEDTSEI

SEQ ID NO: 29456 - protein, 85 aa, unidentified
  REGION 1..85: note = Description of Unknown:hvTR_P33469 target sequence
QSDQFRNVQTRGRRAQPKQTATSQQPSGGNVVPYYSWFSGITQFQKGKEFEFVEGQGVPIAPGVPATEAKGYWYRHNRRSFKTAD

SEQ ID NO: 29457 - protein, 85 aa, unidentified
  REGION 1..85: note = Description of Unknown:hvTR_P33469 target sequence
GNQRQLLPRWYFYYLGTGPHAKDQYGTDIDGVYWVASNQADVNTPADIVDRDPSSDEAIPTRFPPGTVLPQGYYIEGSGRSAPNS

SEQ ID NO: 29458 - protein, 85 aa, unidentified
  REGION 1..85: note = Description of Unknown:hvTR_P33469 target sequence
RSTSRTSSRASSAGSRSRANSGNRTPTSGVTPDMADQIASLVLAKLGKDATKPQQVTKHTAKEVRQKILNKPRQKRSPNKQCTVQ

SEQ ID NO: 29459 - protein, 85 aa, unidentified
  REGION 1..85: note = Description of Unknown:hvTR_P33469 target sequence
QCFGKRGPNQNFGGGEMLKLGTSDPQFPILAELAPTAGAFFFGSRLELAKVQNLSGNPDEPQKDVYELRYNGAIRFDSTLSGFET

SEQ ID NO: 29460 - protein, 85 aa, unidentified
  REGION 1..85: note = Description of Unknown:cds_NZ_WFIY01000004.1_cds_WP_155862687.1_485 target sequence
KIKENCGIFATIGENSVKYTYEGLKLLQHRGQESAGISYVEDGIKTIKGLGLVEEALNEREVLQIKSKFSIGHVRYSTTGKTTLQ

SEQ ID NO: 29461 - protein, 85 aa, unidentified
  REGION 1..85: note = Description of Unknown:cds_NZ_WFIY01000004.1_cds_WP_155862687.1_485 target sequence
EAQPLNNEKLSIAFNGTIANYFEFGNYSTDTEFILDFLSKDVKEGKDIVYAIKHFMDVADGAYSMVILDDKNRILAVRDPKGFRP

SEQ ID NO: 29462 - protein, 85 aa, unidentified
  REGION 1..85: note = Description of Unknown:cds_NZ_WFIY01000004.1_cds_WP_155862687.1_485 target sequence
LVMGKIGENIVFSSEDSAIKQLGGNVIRDVLPGEIILVNPDGKILSDKVPSTSFHTCAFEYIYFSRADSKIDGVSVYMSRIRLGE

SEQ ID NO: 29463 - protein, 85 aa, unidentified
  REGION 1..85: note = Description of Unknown:cds_NZ_WFIY01000004.1_cds_WP_155862687.1_485 target sequence
ILAKNHPAKADIVVPVPESSRPIAIGYSKESKIPLEEALIRTIVSKRSFIMPTNDKRKSVLEEKFGIVEDVVKGKRIVLIDDSIV

SEQ ID NO: 29464 - protein, 85 aa, unidentified
  REGION 1..85: note = Description of Unknown:cds_NZ_WFIY01000004.1_cds_WP_155862687.1_485 target sequence
RGNTMKRIITLLRNSGAEEIHVRVGSPMIKYPCYMGIDFPSRSELIASNKNEDEIAKILGADSIEYLTVDEMKKAIGRDSLCTAC

SEQ ID NO: 29465 - protein, 84 aa, unidentified
  REGION 1..84: note = Description of Unknown:cds_NZ_WFIY01000004.1_cds_WP_155862687.1_485 target sequence
VGSPMIKYPCYMGIDFPSRSELIASNKNEDEIAKILGADSIEYLTVDEMKKAIGRDSLCTACFTGIYPLKRNYPLQVMESVFNR

SEQ ID NO: 29466 - protein, 85 aa, unidentified
  REGION 1..85: note = Description of Unknown:cds_NZ_WFIY01000004.1_cds_WP_155862687.1_485 target sequence
QHRGQESAGISYVEDGIKTIKGLGLVEEALNEREVLQIKSKFSIGHVRYSTTGKTTLQEAQPLNNEKLSIAFNGTIANYFEFGNY

SEQ ID NO: 29467 - protein, 85 aa, unidentified
  REGION 1..85: note = Description of Unknown:cds_NZ_WFIY01000004.1_cds_WP_155862687.1_485 target sequence
STDTEFILDFLSKDVKEGKDIVYAIKHFMDVADGAYSMVILDDKNRILAVRDPKGFRPLVMGKIGENIVFSSEDSAIKQLGGNVI

SEQ ID NO: 29468 - protein, 85 aa, unidentified
  REGION 1..85: note = Description of Unknown:cds_NZ_WFIY01000004.1_cds_WP_155862687.1_485 target sequence
RDVLPGEIILVNPDGKILSDKVPSTSFHTCAFEYIYFSRADSKIDGVSVYMSRIRLGEILAKNHPAKADIVVPVPESSRPIAIGY

SEQ ID NO: 29469 - protein, 85 aa, unidentified
  REGION 1..85: note = Description of Unknown:cds_NZ_WFIY01000004.1_cds_WP_155862687.1_485 target sequence
SKESKIPLEEALIRTIVSKRSFIMPTNDKRKSVLEEKFGIVEDVVKGKRIVLIDDSIVRGNTMKRIITLLRNSGAEEIHVRVGSP

SEQ ID NO: 29470 - protein, 85 aa, unidentified
  REGION 1..85: note = Description of Unknown:cds_NZ_WFIY01000004.1_cds_1756 target sequence
VVRLSYYKGLLLSDYYAPGLKWSDEFKKYIGFAYKYRDVLEYFKREEIKIEDNVLDTLPFPMIEDKITLRDYQAKALFFWNRAGK

SEQ ID NO: 29471 - protein, 85 aa, unidentified
  REGION 1..85: note = Description of Unknown:cds_NZ_WFIY01000004.1_cds_1756 target sequence
RGIIVLPTGAGKTAVGIKAITKVKASTLILVPTIDLLDQWYEKIKDALNYSPGRIGGGYDELKAITVITYDSAYTRVEEIGNKFA

SEQ ID NO: 29472 - protein, 85 aa, unidentified
  REGION 1..85: note = Description of Unknown:cds_NZ_WFIY01000004.1_cds_1756 target sequence
FVIFDEVHHLPSEGYSQVAQMLASPYRLGLTATPEREDSRHRLLPDLVGPVVFRLRASELAGKYLAEFEIKKIYVSLTDDEKKKY

SEQ ID NO: 29473 - protein, 85 aa, unidentified
  REGION 1..85: note = Description of Unknown:cds_NZ_WFIY01000004.1_cds_1756 target sequence
EELRKKLKQFLSSRNMQLDSLESFHKLVKLAGRDPEAREALLAWHTALRISVNSKAKIEKLRELLNEYNNKENKIIIFTRDVEMA

SEQ ID NO: 29474 - protein, 85 aa, unidentified
  REGION 1..85: note = Description of Unknown:cds_NZ_WFIY01000004.1_cds_1756 target sequence
YNVSREFLIPVVTYKTPKDERSEILRKFKEGKYKVIVASSVFDEGVDIPDANIGIVLGGYGTSRQMLQRLGRILRKKEGEKNKAL

SEQ ID NO: 29475 - protein, 84 aa, unidentified
  REGION 1..84: note = Description of Unknown:cds_NZ_WFIY01000004.1_cds_1756 target sequence
LRKFKEGKYKVIVASSVFDEGVDIPDANIGIVLGGYGTSRQMLQRLGRILRKKEGEKNKALLIEIITKGTSDYNLSKRRHRATV

SEQ ID NO: 29476 - protein, 85 aa, unidentified
  REGION 1..85: note = Description of Unknown:cds_NZ_WFIY01000004.1_cds_1756 target sequence
KYIGFAYKYRDVLEYFKREEIKIEDNVLDTLPFPMIEDKITLRDYQAKALFFWNRAGKRGIIVLPTGAGKTAVGIKAITKVKAST

SEQ ID NO: 29477 - protein, 85 aa, unidentified
  REGION 1..85: note = Description of Unknown:cds_NZ_WFIY01000004.1_cds_1756 target sequence
LILVPTIDLLDQWYEKIKDALNYSPGRIGGGYDELKAITVITYDSAYTRVEEIGNKFAFVIFDEVHHLPSEGYSQVAQMLASPYR

SEQ ID NO: 29478 - protein, 85 aa, unidentified
  REGION 1..85: note = Description of Unknown:cds_NZ_WFIY01000004.1_cds_1756 target sequence
LGLTATPEREDSRHRLLPDLVGPVVFRLRASELAGKYLAEFEIKKIYVSLTDDEKKKYEELRKKLKQFLSSRNMQLDSLESFHKL

SEQ ID NO: 29479 - protein, 85 aa, unidentified
  REGION 1..85: note = Description of Unknown:cds_NZ_WFIY01000004.1_cds_1756 target sequence
VKLAGRDPEAREALLAWHTALRISVNSKAKIEKLRELLNEYNNKENKIIIFTRDVEMAYNVSREFLIPVVTYKTPKDERSEILRK

SEQ ID NO: 29480 - protein, 85 aa, unidentified
  REGION 1..85: note = Description of Unknown:cds_NZ_WFIY01000004.1_cds_WP_155864095.1_2041 target sequence
KSINLSLVVDENFNPLPTYKQLAISIAKVAGKNNKISLASLVGWPLLAVKSEAGGYYIFDETGKFSTSINSLILQDYNKIISMIE

SEQ ID NO: 29481 - protein, 85 aa, unidentified
  REGION 1..85: note = Description of Unknown:cds_NZ_WFIY01000004.1_cds_WP_155864095.1_2041 target sequence
KTSDESQVLELMNSIRWDEVRGSSTIHFDFVMDQEFKNLLKLGSSQLPLQILDRKLKDIDVQFLISDIQGAVNKIISEIDLIEKI

SEQ ID NO: 29482 - protein, 85 aa, unidentified
  REGION 1..85: note = Description of Unknown:cds_NZ_WFIY01000004.1_cds_WP_155864095.1_2041 target sequence
KEKISEIIAIIKGKRVEKRRQIESEYDAKIMAKNEELKKVVNSEKTKVEEEIKQYSSQLYSKLPDIEVLIAKAELDKEAGFIDST

SEQ ID NO: 29483 - protein, 85 aa, unidentified
  REGION 1..85: note = Description of Unknown:cds_NZ_WFIY01000004.1_cds_WP_155864095.1_2041 target sequence
SSVNSIKEKYLNEISEKLNEIKEKHKIEIRRLRSELNELNSMKQKDLNKINEEIKKLDELQQSIISKLNNVENSEKVILDKLQKL

SEQ ID NO: 29484 - protein, 85 aa, unidentified
  REGION 1..85: note = Description of Unknown:cds_NZ_WFIY01000004.1_cds_WP_155864095.1_2041 target sequence
PKFISILVEDRAEIVVPLLIAQIDSRKVILPPQIYKGGKKGFFGGIFRKDPSEISEDVEGGEIFVNSFDLTVQDNLRNYKDLIEK

SEQ ID NO: 29485 - protein, 84 aa, unidentified
  REGION 1..84: note = Description of Unknown:cds_NZ_WFIY01000004.1_cds_WP_155864095.1_2041 target sequence
DSRKVILPPQIYKGGKKGFFGGIFRKDPSEISEDVEGGEIFVNSFDLTVQDNLRNYKDLIEKGLQELYEEGWSVRRSLDEYYIR

SEQ ID NO: 29486 - protein, 85 aa, unidentified
  REGION 1..85: note = Description of Unknown:cds_NZ_WFIY01000004.1_cds_WP_155864095.1_2041 target sequence
KVAGKNNKISLASLVGWPLLAVKSEAGGYYIFDETGKFSTSINSLILQDYNKIISMIEKTSDESQVLELMNSIRWDEVRGSSTIH

SEQ ID NO: 29487 - protein, 85 aa, unidentified
  REGION 1..85: note = Description of Unknown:cds_NZ_WFIY01000004.1_cds_WP_155864095.1_2041 target sequence
FDFVMDQEFKNLLKLGSSQLPLQILDRKLKDIDVQFLISDIQGAVNKIISEIDLIEKIKEKISEIIAIIKGKRVEKRRQIESEYD

SEQ ID NO: 29488 - protein, 85 aa, unidentified
  REGION 1..85: note = Description of Unknown:cds_NZ_WFIY01000004.1_cds_WP_155864095.1_2041 target sequence
AKIMAKNEELKKVVNSEKTKVEEEIKQYSSQLYSKLPDIEVLIAKAELDKEAGFIDSTSSVNSIKEKYLNEISEKLNEIKEKHKI

SEQ ID NO: 29489 - protein, 85 aa, unidentified
  REGION 1..85: note = Description of Unknown:cds_NZ_WFIY01000004.1_cds_WP_155864095.1_2041 target sequence
EIRRLRSELNELNSMKQKDLNKINEEIKKLDELQQSIISKLNNVENSEKVILDKLQKLPKFISILVEDRAEIVVPLLIAQIDSRK

SEQ ID NO: 29490 - protein, 85 aa, unidentified
  REGION 1..85: note = Description of Unknown:cds_NZ_WFIY01000004.1_cds_WP_155863915.1_1827 target sequence
IKNVALTVAGIDTGNGAGAETDIRVFEMLGVHGVMAITAITAQNTKGISDIEVMKPDFLRKQIKVIKNDFDIKSVKIGMIYNKDQ

SEQ ID NO: 29491 - protein, 85 aa, unidentified
  REGION 1..85: note = Description of Unknown:cds_NZ_WFIY01000004.1_cds_WP_155863915.1_1827 target sequence
FKVVNEELSGYKIITDPVIYAKDGTQLINDVDEYKKLILKISTIITPNAVEASILSGIKIDTIKDAEEAIKKLYEEYGVPFVIIK

SEQ ID NO: 29492 - protein, 85 aa, unidentified
  REGION 1..85: note = Description of Unknown:cds_NZ_WFIY01000004.1_cds_WP_155863915.1_1827 target sequence
GGHMKGEYSFDILFDGKEFYEIGYPRLNKKDTHGTGSVFASVIAGKIAKGEEVINAFREARKILQDAIDYGLEIGHGIGPIDPLV

SEQ ID NO: 29493 - protein, 85 aa, unidentified
  REGION 1..85: note = Description of Unknown:cds_NZ_WFIY01000004.1_cds_WP_155863915.1_1827 target sequence
YNEKKSQKYQVIEDMTKIGDFIENEEKFWKLIPEVQSNVAHSISPQYVEDLNDIATFRGRIIRRWDRKVIVGYPAVFGNPTHTAR

SEQ ID NO: 29494 - protein, 85 aa, unidentified
  REGION 1..85: note = Description of Unknown:cds_NZ_WFIY01000004.1_cds_WP_155863915.1_1827 target sequence
LLLAIILNYRIGNTLINIRYDEKILSAFKSLGYEIIEINRELEPQLGEGKTMQWIIEYIKTQYGIKNNLPNVIFDKGMKGKEAMI

SEQ ID NO: 29495 - protein, 84 aa, unidentified
  REGION 1..84: note = Description of Unknown:cds_NZ_WFIY01000004.1_cds_WP_155863915.1_1827 target sequence
KILSAFKSLGYEIIEINRELEPQLGEGKTMQWIIEYIKTQYGIKNNLPNVIFDKGMKGKEAMIRFWTNSADEMIESLRLVCKSL

SEQ ID NO: 29496 - protein, 85 aa, unidentified
  REGION 1..85: note = Description of Unknown:cds_NZ_WFIY01000004.1_cds_WP_155863915.1_1827 target sequence
MLGVHGVMAITAITAQNTKGISDIEVMKPDFLRKQIKVIKNDFDIKSVKIGMIYNKDQFKVVNEELSGYKIITDPVIYAKDGTQL

SEQ ID NO: 29497 - protein, 85 aa, unidentified
  REGION 1..85: note = Description of Unknown:cds_NZ_WFIY01000004.1_cds_WP_155863915.1_1827 target sequence
INDVDEYKKLILKISTIITPNAVEASILSGIKIDTIKDAEEAIKKLYEEYGVPFVIIKGGHMKGEYSFDILFDGKEFYEIGYPRL

SEQ ID NO: 29498 - protein, 85 aa, unidentified
  REGION 1..85: note = Description of Unknown:cds_NZ_WFIY01000004.1_cds_WP_155863915.1_1827 target sequence
NKKDTHGTGSVFASVIAGKIAKGEEVINAFREARKILQDAIDYGLEIGHGIGPIDPLVYNEKKSQKYQVIEDMTKIGDFIENEEK

SEQ ID NO: 29499 - protein, 85 aa, unidentified
  REGION 1..85: note = Description of Unknown:cds_NZ_WFIY01000004.1_cds_WP_155863915.1_1827 target sequence
FWKLIPEVQSNVAHSISPQYVEDLNDIATFRGRIIRRWDRKVIVGYPAVFGNPTHTARLLLAIILNYRIGNTLINIRYDEKILSA

SEQ ID NO: 29500 - protein, 85 aa, unidentified
  REGION 1..85: note = Description of Unknown:cds_NZ_WFIY01000004.1_cds_WP_155864093.1_2039 target sequence
ICNIPKVTVTTWNSNNVILVGPTYKQYLEKALNSIKNNDIASIIGQPGMGKTTILKKVQEIVKDSLYMDLASKNEIEEEFWSKID

SEQ ID NO: 29501 - protein, 85 aa, unidentified
  REGION 1..85: note = Description of Unknown:cds_NZ_WFIY01000004.1_cds_WP_155864093.1_2039 target sequence
KNEIRQKVLPRLDKKKYGYTFWKRLLGIKFEDWLMKACGKYNDPLLRLYCFDYQKDFDGMIKAINDLKEVEHLSLLIDEVRENHI

SEQ ID NO: 29502 - protein, 85 aa, unidentified
  REGION 1..85: note = Description of Unknown:cds_NZ_WFIY01000004.1_cds_WP_155864093.1_2039 target sequence
PKIHRLINSGLGVPILMAVPTEVYSKITDLAIRRRLDESRISLDNALTSEDIKEIVDAYCHEISEDLFPIVLSLWNGRELNTVSS

SEQ ID NO: 29503 - protein, 85 aa, unidentified
  REGION 1..85: note = Description of Unknown:cds_NZ_WFIY01000004.1_cds_WP_155864093.1_2039 target sequence
ILQFMKSEVEKFEKECSNSQDVINCVKEKLKESHSLKNPEEESKQLEKMIRDLLSSLSKEFQITYVHPRGKRAEIKGKYVTLGIF

SEQ ID NO: 29504 - protein, 85 aa, unidentified
  REGION 1..85: note = Description of Unknown:cds_NZ_WFIY01000004.1_cds_WP_155864093.1_2039 target sequence
FIKEGNAYVGLVKLLNDDRTDDEEVKLLSMLEKVEHEKKEYPVEKRFIITNSQKLNVDNTVTKIELTTMEAIRILQGDSEILEEK

SEQ ID NO: 29505 - protein, 84 aa, unidentified
  REGION 1..84: note = Description of Unknown:cds_NZ_WFIY01000004.1_cds_WP_155864093.1_2039 target sequence
EEVKLLSMLEKVEHEKKEYPVEKRFIITNSQKLNVDNTVTKIELTTMEAIRILQGDSEILEEKLKEILNSFNTKASSASVVVST

SEQ ID NO: 29506 - protein, 85 aa, unidentified
  REGION 1..85: note = Description of Unknown:cds_NZ_WFIY01000004.1_cds_WP_155864093.1_2039 target sequence
LEKALNSIKNNDIASIIGQPGMGKTTILKKVQEIVKDSLYMDLASKNEIEEEFWSKIDKNEIRQKVLPRLDKKKYGYTFWKRLLG

SEQ ID NO: 29507 - protein, 85 aa, unidentified
  REGION 1..85: note = Description of Unknown:cds_NZ_WFIY01000004.1_cds_WP_155864093.1_2039 target sequence
IKFEDWLMKACGKYNDPLLRLYCFDYQKDFDGMIKAINDLKEVEHLSLLIDEVRENHIPKIHRLINSGLGVPILMAVPTEVYSKI

SEQ ID NO: 29508 - protein, 85 aa, unidentified
  REGION 1..85: note = Description of Unknown:cds_NZ_WFIY01000004.1_cds_WP_155864093.1_2039 target sequence
TDLAIRRRLDESRISLDNALTSEDIKEIVDAYCHEISEDLFPIVLSLWNGRELNTVSSILQFMKSEVEKFEKECSNSQDVINCVK

SEQ ID NO: 29509 - protein, 85 aa, unidentified
  REGION 1..85: note = Description of Unknown:cds_NZ_WFIY01000004.1_cds_WP_155864093.1_2039 target sequence
EKLKESHSLKNPEEESKQLEKMIRDLLSSLSKEFQITYVHPRGKRAEIKGKYVTLGIFFIKEGNAYVGLVKLLNDDRTDDEEVKL

SEQ ID NO: 29510 - protein, 85 aa, unidentified
  REGION 1..85: note = Description of Unknown:hvTR_P48752 target sequence
ETRGRRRAFSHQQDEPEENPGKRPTRSAPLYRHRNQPNANPATLERHYPCSTGRPPTGTVQPKPSQPPQPRSLLDRDAIDHITEL

SEQ ID NO: 29511 - protein, 85 aa, unidentified
  REGION 1..85: note = Description of Unknown:hvTR_P48752 target sequence
WDRLYLLRQSLEKMTMADGLKPLKHFRSLEELLSLGGERLLQDLVKENQHVRSMMNEVTPLLREDGSCISLNYQLQPVIGVIYGP

SEQ ID NO: 29512 - protein, 85 aa, unidentified
  REGION 1..85: note = Description of Unknown:hvTR_P48752 target sequence
TGCGKSQLLRNLLSTQLINPPPETVFFIAPQVDMIPPSEIKAWEMQICEGNYAPGPEGTIIPQSGTLLPRFIKMAYDELTLEQNY

SEQ ID NO: 29513 - protein, 85 aa, unidentified
  REGION 1..85: note = Description of Unknown:hvTR_P48752 target sequence
DVSHPDNIFAKAASQGPIAIIMDECMENLGGHKGVSKFFHAFPSKLHDKFPKCTGYTVLVVLHNMNPRRDLGGNIANLKIQAKMH

SEQ ID NO: 29514 - protein, 85 aa, unidentified
  REGION 1..85: note = Description of Unknown:hvTR_P48752 target sequence
LISPRMHPSQLNRFVNTFTKGLPLAISLLLKDIFQFHAQKPCYDWIIYNTTPEHDALQWSYLHPRDGLMPMYLNIQAHLYRVLEN

SEQ ID NO: 29515 - protein, 84 aa, unidentified
  REGION 1..84: note = Description of Unknown:hvTR_P48752 target sequence
LPLAISLLLKDIFQFHAQKPCYDWIIYNTTPEHDALQWSYLHPRDGLMPMYLNIQAHLYRVLENIHKVLNDRDRWSRAYRKRNK

SEQ ID NO: 29516 - protein, 85 aa, unidentified
  REGION 1..85: note = Description of Unknown:hvTR_P48752 target sequence
APLYRHRNQPNANPATLERHYPCSTGRPPTGTVQPKPSQPPQPRSLLDRDAIDHITELWDRLYLLRQSLEKMTMADGLKPLKHFR

SEQ ID NO: 29517 - protein, 85 aa, unidentified
  REGION 1..85: note = Description of Unknown:hvTR_P48752 target sequence
SLEELLSLGGERLLQDLVKENQHVRSMMNEVTPLLREDGSCISLNYQLQPVIGVIYGPTGCGKSQLLRNLLSTQLINPPPETVFF

SEQ ID NO: 29518 - protein, 85 aa, unidentified
  REGION 1..85: note = Description of Unknown:hvTR_P48752 target sequence
IAPQVDMIPPSEIKAWEMQICEGNYAPGPEGTIIPQSGTLLPRFIKMAYDELTLEQNYDVSHPDNIFAKAASQGPIAIIMDECME

SEQ ID NO: 29519 - protein, 85 aa, unidentified
  REGION 1..85: note = Description of Unknown:hvTR_P48752 target sequence
NLGGHKGVSKFFHAFPSKLHDKFPKCTGYTVLVVLHNMNPRRDLGGNIANLKIQAKMHLISPRMHPSQLNRFVNTFTKGLPLAIS

SEQ ID NO: 29520 - protein, 85 aa, unidentified
  REGION 1..85: note = Description of Unknown:cds_NZ_WFIY01000004.1_cds_WP_155863845.1_1741 target sequence
VDKIILGFEVHQPFRIRKDAFWNPRFRGNVLERFFDMELNKEIFNRVKRKCYIPATKIILEEIENAEDEGREVKFFFSLSGTFIE

SEQ ID NO: 29521 - protein, 85 aa, unidentified
  REGION 1..85: note = Description of Unknown:cds_NZ_WFIY01000004.1_cds_WP_155863845.1_1741 target sequence
QAEKWGKDVLELFQVLSSTKKVEFLGQTYYHSITSLWEDKTEWKEQVREQKEIIKEYFKQEPQVFENTELLTNPQILDMVEEIGY

SEQ ID NO: 29522 - protein, 85 aa, unidentified
  REGION 1..85: note = Description of Unknown:cds_NZ_WFIY01000004.1_cds_WP_155863845.1_1741 target sequence
KGIIMEGKESTLNGKSPNFVYRRKGLTILFRNYRLSDDIAFRFSLRNWDQYPLTADKFANWVKDSPGQVVTIFVDYETFGEHHWP

SEQ ID NO: 29523 - protein, 85 aa, unidentified
  REGION 1..85: note = Description of Unknown:cds_NZ_WFIY01000004.1_cds_WP_155863845.1_1741 target sequence
ESGILDFLRWLPRELNKRGVKFALPRELINESYYDIDIQGTSSWADINKDESSWLGNIMQWAYDEAVRRAEMPSKELGGDYLKAW

SEQ ID NO: 29524 - protein, 85 aa, unidentified
  REGION 1..85: note = Description of Unknown:cds_NZ_WFIY01000004.1_cds_WP_155863845.1_1741 target sequence
KYFTTSDNYYYLFTGGGGPAEVHNYFNAYSTPVDAFINEFYAINAFLNEELHKLGINNEPFFFVKNGKRSSVAWNKKEFEEIIKR

SEQ ID NO: 29525 - protein, 84 aa, unidentified
  REGION 1..84: note = Description of Unknown:cds_NZ_WFIY01000004.1_cds_WP_155863845.1_1741 target sequence
VHNYFNAYSTPVDAFINEFYAINAFLNEELHKLGINNEPFFFVKNGKRSSVAWNKKEFEEIIKRDESLKDHLKYLKEWLGNEKD

SEQ ID NO: 29526 - protein, 85 aa, unidentified
  REGION 1..85: note = Description of Unknown:cds_NZ_WFIY01000004.1_cds_WP_155863845.1_1741 target sequence
GNVLERFFDMELNKEIFNRVKRKCYIPATKIILEEIENAEDEGREVKFFFSLSGTFIEQAEKWGKDVLELFQVLSSTKKVEFLGQ

SEQ ID NO: 29527 - protein, 85 aa, unidentified
  REGION 1..85: note = Description of Unknown:cds_NZ_WFIY01000004.1_cds_WP_155863845.1_1741 target sequence
TYYHSITSLWEDKTEWKEQVREQKEIIKEYFKQEPQVFENTELLTNPQILDMVEEIGYKGIIMEGKESTLNGKSPNFVYRRKGLT

SEQ ID NO: 29528 - protein, 85 aa, unidentified
  REGION 1..85: note = Description of Unknown:cds_NZ_WFIY01000004.1_cds_WP_155863845.1_1741 target sequence
ILFRNYRLSDDIAFRFSLRNWDQYPLTADKFANWVKDSPGQVVTIFVDYETFGEHHWPESGILDFLRWLPRELNKRGVKFALPRE

SEQ ID NO: 29529 - protein, 85 aa, unidentified
  REGION 1..85: note = Description of Unknown:cds_NZ_WFIY01000004.1_cds_WP_155863845.1_1741 target sequence
LINESYYDIDIQGTSSWADINKDESSWLGNIMQWAYDEAVRRAEMPSKELGGDYLKAWKYFTTSDNYYYLFTGGGGPAEVHNYFN

SEQ ID NO: 29530 - protein, 85 aa, unidentified
  REGION 1..85: note = Description of Unknown:vpeps_6IBG_1 target sequence
AKRGRKPKELVPGPGSIDPSDVPKLEGASVPVMSTSYDVVVDREFDELLQGKDGLLVYHKMLSDGTVKNALNYIFGRIRSAKWYV

SEQ ID NO: 29531 - protein, 85 aa, unidentified
  REGION 1..85: note = Description of Unknown:vpeps_6IBG_1 target sequence
EPASTDPEDIAIAAFIHAQLGIDDASVGKYPFGRLFAIYENAYIYGMAAGEIVLTLGADGKLILDKIVPIHPFNIDEVLYDEEGG

SEQ ID NO: 29532 - protein, 85 aa, unidentified
  REGION 1..85: note = Description of Unknown:vpeps_6IBG_1 target sequence
PKALKLSGEVKGGSQFVSGLEIPIWKTVVFLHNDDGSFTGQSALRAAVPHWLAKRALILLINHGLERFMIGVPTLTIPKSVRQGT

SEQ ID NO: 29533 - protein, 85 aa, unidentified
  REGION 1..85: note = Description of Unknown:vpeps_6IBG_1 target sequence
KQWEAAKEIVKNFVQKPRHGIILPDDWKFDTVDLKSAMPDAIPYLTYHDAGIARALGIDFNTVQLNMGVQAINIGEFVSLTQQTI

SEQ ID NO: 29534 - protein, 85 aa, unidentified
  REGION 1..85: note = Description of Unknown:vpeps_6IBG_1 target sequence
ISLQREFASAVNLYLIPKLVLPNWPSATRFPRLTFEMEERNDFSAAANLMGMLINAVKDSEDIPTELKALIDALPSKMRRALGVV

SEQ ID NO: 29535 - protein, 85 aa, unidentified
  REGION 1..85: note = Description of Unknown:vpeps_6IBG_1 target sequence
LPNWPSATRFPRLTFEMEERNDFSAAANLMGMLINAVKDSEDIPTELKALIDALPSKMRRALGVVDEVREAVRQPADLEHHHHHH

SEQ ID NO: 29536 - protein, 85 aa, unidentified
  REGION 1..85: note = Description of Unknown:vpeps_6IBG_1 target sequence
ASVPVMSTSYDVVVDREFDELLQGKDGLLVYHKMLSDGTVKNALNYIFGRIRSAKWYVEPASTDPEDIAIAAFIHAQLGIDDASV

SEQ ID NO: 29537 - protein, 85 aa, unidentified
  REGION 1..85: note = Description of Unknown:vpeps_6IBG_1 target sequence
GKYPFGRLFAIYENAYIYGMAAGEIVLTLGADGKLILDKIVPIHPFNIDEVLYDEEGGPKALKLSGEVKGGSQFVSGLEIPIWKT

SEQ ID NO: 29538 - protein, 85 aa, unidentified
  REGION 1..85: note = Description of Unknown:vpeps_6IBG_1 target sequence
VVFLHNDDGSFTGQSALRAAVPHWLAKRALILLINHGLERFMIGVPTLTIPKSVRQGTKQWEAAKEIVKNFVQKPRHGIILPDDW

SEQ ID NO: 29539 - protein, 85 aa, unidentified
  REGION 1..85: note = Description of Unknown:vpeps_6IBG_1 target sequence
KFDTVDLKSAMPDAIPYLTYHDAGIARALGIDFNTVQLNMGVQAINIGEFVSLTQQTIISLQREFASAVNLYLIPKLVLPNWPSA

SEQ ID NO: 29540 - protein, 85 aa, unidentified
  REGION 1..85: note = Description of Unknown:cds_NZ_WFIY01000004.1_cds_WP_155862482.1_238 target sequence
IIIKIGGSIQKDEKDYELISEKVEKYSNNEDKVLIVTSAMKGITNDLISATENRDKSTEIIGNIYDKHIKILSKVADGPEFEIAF

SEQ ID NO: 29541 - protein, 85 aa, unidentified
  REGION 1..85: note = Description of Unknown:cds_NZ_WFIY01000004.1_cds_WP_155862482.1_238 target sequence
KDLSKMADELFKIAWSIRVLDEITPRVRDYILSFGERMATIVLNAALRSRRLDSIAYPEPPLVTDNNFGEANVLEDLTLKEINNK

SEQ ID NO: 29542 - protein, 85 aa, unidentified
  REGION 1..85: note = Description of Unknown:cds_NZ_WFIY01000004.1_cds_WP_155862482.1_238 target sequence
IISKKSKILIIPGFIGKTIDERYTTIGRGGSDYTATLLGKLLSVENVRLITEVPGIMTADPRKIESAITIKRLSLEEAVELAQMG

SEQ ID NO: 29543 - protein, 85 aa, unidentified
  REGION 1..85: note = Description of Unknown:cds_NZ_WFIY01000004.1_cds_WP_155862482.1_238 target sequence
AKRLHPRTFEPMFSSNMKVTIEGLYDEGETIVSGSCEDEDKLKGVTILDDLKMINIESTRIVGKIGSAARIMTEAKNSNVNIVSI

SEQ ID NO: 29544 - protein, 85 aa, unidentified
  REGION 1..85: note = Description of Unknown:cds_NZ_WFIY01000004.1_cds_WP_155862482.1_238 target sequence
SQPASETTISLVVNSNDAEILATKLKEIKDIDSIEIKDVSAVSIVGCGLRNNEIFKEVENVALQYEILSMSRGLKNVSATFIVKK

SEQ ID NO: 29545 - protein, 84 aa, unidentified
  REGION 1..84: note = Description of Unknown:cds_NZ_WFIY01000004.1_cds_WP_155862482.1_238 target sequence
LATKLKEIKDIDSIEIKDVSAVSIVGCGLRNNEIFKEVENVALQYEILSMSRGLKNVSATFIVKKEEGYNLAKSLHEVVLKWIN

SEQ ID NO: 29546 - protein, 85 aa, unidentified
  REGION 1..85: note = Description of Unknown:cds_NZ_WFIY01000004.1_cds_WP_155862482.1_238 target sequence
NNEDKVLIVTSAMKGITNDLISATENRDKSTEIIGNIYDKHIKILSKVADGPEFEIAFKDLSKMADELFKIAWSIRVLDEITPRV

SEQ ID NO: 29547 - protein, 85 aa, unidentified
  REGION 1..85: note = Description of Unknown:cds_NZ_WFIY01000004.1_cds_WP_155862482.1_238 target sequence
RDYILSFGERMATIVLNAALRSRRLDSIAYPEPPLVTDNNFGEANVLEDLTLKEINNKIISKKSKILIIPGFIGKTIDERYTTIG

SEQ ID NO: 29548 - protein, 85 aa, unidentified
  REGION 1..85: note = Description of Unknown:cds_NZ_WFIY01000004.1_cds_WP_155862482.1_238 target sequence
RGGSDYTATLLGKLLSVENVRLITEVPGIMTADPRKIESAITIKRLSLEEAVELAQMGAKRLHPRTFEPMFSSNMKVTIEGLYDE

SEQ ID NO: 29549 - protein, 85 aa, unidentified
  REGION 1..85: note = Description of Unknown:cds_NZ_WFIY01000004.1_cds_WP_155862482.1_238 target sequence
GETIVSGSCEDEDKLKGVTILDDLKMINIESTRIVGKIGSAARIMTEAKNSNVNIVSISQPASETTISLVVNSNDAEILATKLKE

SEQ ID NO: 29550 - protein, 85 aa, unidentified
  REGION 1..85: note = Description of Unknown:cds_NZ_WFIY01000004.1_cds_WP_155862692.1_492 target sequence
LYRKWGSSEDEVVLFTSSIDSDKEIIEEVKLTMKAHVIELYLNKIISKEIAGKILSAINDFKEIPSGYEDVHEALEDYIIKKVGE

SEQ ID NO: 29551 - protein, 85 aa, unidentified
  REGION 1..85: note = Description of Unknown:cds_NZ_WFIY01000004.1_cds_WP_155862692.1_492 target sequence
EGGWIGLGRSRNDHVATALRLKAREELLSILDEIIKLREVLLNKAEQFLNVIFPAFTHLQPAQPTTFGHYLSYIEEELYSAWEII

SEQ ID NO: 29552 - protein, 85 aa, unidentified
  REGION 1..85: note = Description of Unknown:cds_NZ_WFIY01000004.1_cds_WP_155862692.1_492 target sequence
FSNLKLVNRSPLGSGAIVGSTVNINREREAEMLGFDDIITNTISASSSRIDLISSVSGMVILSLILSRIAEDMIIFSSMKLVKLP

SEQ ID NO: 29553 - protein, 85 aa, unidentified
  REGION 1..85: note = Description of Unknown:cds_NZ_WFIY01000004.1_cds_WP_155862692.1_492 target sequence
DNQVSTSSLMPQKRNPVTMEIMRAKAGELIGFFTSLSSIYKGLPSGYDLDMQEMNKYYWYSFNYVKSSLSVMKSLFENIEILPAT

SEQ ID NO: 29554 - protein, 85 aa, unidentified
  REGION 1..85: note = Description of Unknown:cds_NZ_WFIY01000004.1_cds_WP_155862692.1_492 target sequence
LDNSMLATDEAESISLQGIPYRKAYFEVSSKVMKGIFTPSINFKESINLKKTEGSPNPEILKNDIKKAKDRIEENKMRLNEFKTK

SEQ ID NO: 29555 - protein, 84 aa, unidentified
  REGION 1..84: note = Description of Unknown:cds_NZ_WFIY01000004.1_cds_WP_155862692.1_492 target sequence
YRKAYFEVSSKVMKGIFTPSINFKESINLKKTEGSPNPEILKNDIKKAKDRIEENKMRLNEFKTKISNKISQLKAIENDLQEGL

SEQ ID NO: 29556 - protein, 85 aa, unidentified
  REGION 1..85: note = Description of Unknown:cds_NZ_WFIY01000004.1_cds_WP_155862692.1_492 target sequence
EVKLTMKAHVIELYLNKIISKEIAGKILSAINDFKEIPSGYEDVHEALEDYIIKKVGEEGGWIGLGRSRNDHVATALRLKAREEL

SEQ ID NO: 29557 - protein, 85 aa, unidentified
  REGION 1..85: note = Description of Unknown:cds_NZ_WFIY01000004.1_cds_WP_155862692.1_492 target sequence
LSILDEIIKLREVLLNKAEQFLNVIFPAFTHLQPAQPTTFGHYLSYIEEELYSAWEIIFSNLKLVNRSPLGSGAIVGSTVNINRE

SEQ ID NO: 29558 - protein, 85 aa, unidentified
  REGION 1..85: note = Description of Unknown:cds_NZ_WFIY01000004.1_cds_WP_155862692.1_492 target sequence
REAEMLGFDDIITNTISASSSRIDLISSVSGMVILSLILSRIAEDMIIFSSMKLVKLPDNQVSTSSLMPQKRNPVTMEIMRAKAG

SEQ ID NO: 29559 - protein, 85 aa, unidentified
  REGION 1..85: note = Description of Unknown:cds_NZ_WFIY01000004.1_cds_WP_155862692.1_492 target sequence
ELIGFFTSLSSIYKGLPSGYDLDMQEMNKYYWYSFNYVKSSLSVMKSLFENIEILPATLDNSMLATDEAESISLQGIPYRKAYFE

SEQ ID NO: 29560 - protein, 85 aa, unidentified
  REGION 1..85: note = Description of Unknown:cds_NZ_WFIY01000004.1_cds_WP_155862711.1_511 target sequence
IEVLKKAENLGAIFADVRHYRYDELSLVVTENRKYVTTNGVDDGYSLRVLYNGNWGYSNSTKLDDEEVRNAINSAYGDEKVNITF

SEQ ID NO: 29561 - protein, 85 aa, unidentified
  REGION 1..85: note = Description of Unknown:cds_NZ_WFIY01000004.1_cds_WP_155862711.1_511 target sequence
LPPKKDKIVIKQEKPLSKSLEEIMSDLDKIKEELLKDERVKSVNVRYFHEGVKKDYASTEGREIHQEYVLSGISISAVAREGDIV

SEQ ID NO: 29562 - protein, 85 aa, unidentified
  REGION 1..85: note = Description of Unknown:cds_NZ_WFIY01000004.1_cds_WP_155862711.1_511 target sequence
ASSFYSAYTYKGYPLEVFDINQMIETLRKRLNNQLKGKTPKAGEFDVVLGPDVVGVFSHEALGHLAEADLAVNGILSQLRGKKIA

SEQ ID NO: 29563 - protein, 85 aa, unidentified
  REGION 1..85: note = Description of Unknown:cds_NZ_WFIY01000004.1_cds_WP_155862711.1_511 target sequence
PDYVSVHDSPKMDYNMAIGITPYDDEGVEGREVKIVEKGVVSEFLVDRYYSTFLGERPTGNARAEDFRSPILIRMRNTFMLPGDR

SEQ ID NO: 29564 - protein, 85 aa, unidentified
  REGION 1..85: note = Description of Unknown:cds_NZ_WFIY01000004.1_cds_WP_155862711.1_511 target sequence
KVDELISEIKEGYYIVSPLGGQTSPDGTFQFGIQEGYYIHNGEIGEPIRNMGISGYTIETLGRIKGVSKEFDVWPGFCGKGGQSV

SEQ ID NO: 29565 - protein, 84 aa, unidentified
  REGION 1..84: note = Description of Unknown:cds_NZ_WFIY01000004.1_cds_WP_155862711.1_511 target sequence
GQTSPDGTFQFGIQEGYYIHNGEIGEPIRNMGISGYTIETLGRIKGVSKEFDVWPGFCGKGGQSVPVGTGGPYISVKVKVGGYV

SEQ ID NO: 29566 - protein, 85 aa, unidentified
  REGION 1..85: note = Description of Unknown:cds_NZ_WFIY01000004.1_cds_WP_155862711.1_511 target sequence
VVTENRKYVTTNGVDDGYSLRVLYNGNWGYSNSTKLDDEEVRNAINSAYGDEKVNITFLPPKKDKIVIKQEKPLSKSLEEIMSDL

SEQ ID NO: 29567 - protein, 85 aa, unidentified
  REGION 1..85: note = Description of Unknown:cds_NZ_WFIY01000004.1_cds_WP_155862711.1_511 target sequence
DKIKEELLKDERVKSVNVRYFHEGVKKDYASTEGREIHQEYVLSGISISAVAREGDIVASSFYSAYTYKGYPLEVFDINQMIETL

SEQ ID NO: 29568 - protein, 85 aa, unidentified
  REGION 1..85: note = Description of Unknown:cds_NZ_WFIY01000004.1_cds_WP_155862711.1_511 target sequence
RKRLNNQLKGKTPKAGEFDVVLGPDVVGVFSHEALGHLAEADLAVNGILSQLRGKKIAPDYVSVHDSPKMDYNMAIGITPYDDEG

SEQ ID NO: 29569 - protein, 85 aa, unidentified
  REGION 1..85: note = Description of Unknown:cds_NZ_WFIY01000004.1_cds_WP_155862711.1_511 target sequence
VEGREVKIVEKGVVSEFLVDRYYSTFLGERPTGNARAEDFRSPILIRMRNTFMLPGDRKVDELISEIKEGYYIVSPLGGQTSPDG

SEQ ID NO: 29570 - protein, 85 aa, unidentified
  REGION 1..85: note = Description of Unknown:cds_NZ_WFIY01000004.1_cds_WP_155862792.1_611 target sequence
KYSADEIIEVVRMLSEEDLDIRSVTLSVNTLPFISDDINKTLEKFNSLNSLLEKFSYSVDKVSEKYGVKIVTKRVAVSPVQYFLE

SEQ ID NO: 29571 - protein, 85 aa, unidentified
  REGION 1..85: note = Description of Unknown:cds_NZ_WFIY01000004.1_cds_WP_155862792.1_611 target sequence
VLGESNGIKIGEKLEELAEKNGIDYISGYSAFADRGFTKGSLSIINTLAEVMNSTRRLTGMINAASTFSGLNSDAVKKFVDQIFN

SEQ ID NO: 29572 - protein, 85 aa, unidentified
  REGION 1..85: note = Description of Unknown:cds_NZ_WFIY01000004.1_cds_WP_155862792.1_611 target sequence
MKPEASSRVSILSNAPPDSPFVPSAHHGIGMPDMMINVAVSGPGVIENAIKRSSPSSLEELHDIIKRSAFKISRLGELIGKAVSK

SEQ ID NO: 29573 - protein, 85 aa, unidentified
  REGION 1..85: note = Description of Unknown:cds_NZ_WFIY01000004.1_cds_WP_155862792.1_611 target sequence
EMGVPFGSVDLSLAPSPKVGDSVAGIIEAMGIERMGGHGSLSALAILMDAIKKGGSMATSHVGGLSSAFIPVSEDSIMAERALEG

SEQ ID NO: 29574 - protein, 85 aa, unidentified
  REGION 1..85: note = Description of Unknown:cds_NZ_WFIY01000004.1_cds_WP_155862792.1_611 target sequence
YVDFFTLLALSSVCNSGIDMVGVSKKQGKDKVIGLIMDVLSLGITLNKILGVRVIPVDSEPGTVIDLGGLLGKVVVMRLKDVNVE

SEQ ID NO: 29575 - protein, 84 aa, unidentified
  REGION 1..84: note = Description of Unknown:cds_NZ_WFIY01000004.1_cds_WP_155862792.1_611 target sequence
VGVSKKQGKDKVIGLIMDVLSLGITLNKILGVRVIPVDSEPGTVIDLGGLLGKVVVMRLKDVNVERFTSLNGFIPNTIKRLEAG

SEQ ID NO: 29576 - protein, 85 aa, unidentified
  REGION 1..85: note = Description of Unknown:cds_NZ_WFIY01000004.1_cds_WP_155862792.1_611 target sequence
VNTLPFISDDINKTLEKFNSLNSLLEKFSYSVDKVSEKYGVKIVTKRVAVSPVQYFLEVLGESNGIKIGEKLEELAEKNGIDYIS

SEQ ID NO: 29577 - protein, 85 aa, unidentified
  REGION 1..85: note = Description of Unknown:cds_NZ_WFIY01000004.1_cds_WP_155862792.1_611 target sequence
GYSAFADRGFTKGSLSIINTLAEVMNSTRRLTGMINAASTFSGLNSDAVKKFVDQIFNMKPEASSRVSILSNAPPDSPFVPSAHH

SEQ ID NO: 29578 - protein, 85 aa, unidentified
  REGION 1..85: note = Description of Unknown:cds_NZ_WFIY01000004.1_cds_WP_155862792.1_611 target sequence
GIGMPDMMINVAVSGPGVIENAIKRSSPSSLEELHDIIKRSAFKISRLGELIGKAVSKEMGVPFGSVDLSLAPSPKVGDSVAGII

SEQ ID NO: 29579 - protein, 85 aa, unidentified
  REGION 1..85: note = Description of Unknown:cds_NZ_WFIY01000004.1_cds_WP_155862792.1_611 target sequence
EAMGIERMGGHGSLSALAILMDAIKKGGSMATSHVGGLSSAFIPVSEDSIMAERALEGYVDFFTLLALSSVCNSGIDMVGVSKKQ

SEQ ID NO: 29580 - protein, 85 aa, unidentified
  REGION 1..85: note = Description of Unknown:cds_NZ_WFIY01000004.1_cds_WP_155863183.1_1114 target sequence
MLKYTLVVLALLVAIPFTQILSFALPSSPPLTTNTIITEIPYYSHLKYLISIYNETTENSTIKMKFIANYTADYNVISQYNGIIE

SEQ ID NO: 29581 - protein, 85 aa, unidentified
  REGION 1..85: note = Description of Unknown:cds_NZ_WFIY01000004.1_cds_WP_155863183.1_1114 target sequence
VNYSISKIFSKYNLSTFNMSNITFLRPGIFNVTLLNDALCFHYPYIYPGLLYNSSAYYLYFVATKFNFPLGYVNETKVTINNLTL

SEQ ID NO: 29582 - protein, 85 aa, unidentified
  REGION 1..85: note = Description of Unknown:cds_NZ_WFIY01000004.1_cds_WP_155863183.1_1114 target sequence
IAYKYHNLSTFSTINQYFYVLCNGIGYNFNYTFSYKIGNKTYNLYANFLLKCLSGNSSTQLKYLGNQLEEAFKPYVYLDCTYSSL

SEQ ID NO: 29583 - protein, 85 aa, unidentified
  REGION 1..85: note = Description of Unknown:cds_NZ_WFIY01000004.1_cds_WP_155863183.1_1114 target sequence
YAGLTPNTYREIFYPYIFANGYFIYRYAILSFIAGQPVESSYFELSLVIGNYTDLPITFLVCNSSNIIWENEEFTRVNVTSLNIL

SEQ ID NO: 29584 - protein, 85 aa, unidentified
  REGION 1..85: note = Description of Unknown:cds_NZ_WFIY01000004.1_cds_WP_155863183.1_1114 target sequence
GKTYNNVIEYENISTKSFTILYFYNGTLIEEESGNIDGNSYNVNEKVVFVGNSMIPLNLTYPNYFDYTNTNLPYKAIDPSLALEV

SEQ ID NO: 29585 - protein, 84 aa, unidentified
  REGION 1..84: note = Description of Unknown:cds_NZ_WFIY01000004.1_cds_WP_155863183.1_1114 target sequence
LYFYNGTLIEEESGNIDGNSYNVNEKVVFVGNSMIPLNLTYPNYFDYTNTNLPYKAIDPSLALEVSIIITMIIVALIVLLYKRK

SEQ ID NO: 29586 - protein, 85 aa, unidentified
  REGION 1..85: note = Description of Unknown:cds_NZ_WFIY01000004.1_cds_WP_155863183.1_1114 target sequence
SPPLTTNTIITEIPYYSHLKYLISIYNETTENSTIKMKFIANYTADYNVISQYNGIIEVNYSISKIFSKYNLSTFNMSNITFLRP

SEQ ID NO: 29587 - protein, 85 aa, unidentified
  REGION 1..85: note = Description of Unknown:cds_NZ_WFIY01000004.1_cds_WP_155863183.1_1114 target sequence
GIFNVTLLNDALCFHYPYIYPGLLYNSSAYYLYFVATKFNFPLGYVNETKVTINNLTLIAYKYHNLSTFSTINQYFYVLCNGIGY

SEQ ID NO: 29588 - protein, 85 aa, unidentified
  REGION 1..85: note = Description of Unknown:cds_NZ_WFIY01000004.1_cds_WP_155863183.1_1114 target sequence
NFNYTFSYKIGNKTYNLYANFLLKCLSGNSSTQLKYLGNQLEEAFKPYVYLDCTYSSLYAGLTPNTYREIFYPYIFANGYFIYRY

SEQ ID NO: 29589 - protein, 85 aa, unidentified
  REGION 1..85: note = Description of Unknown:cds_NZ_WFIY01000004.1_cds_WP_155863183.1_1114 target sequence
AILSFIAGQPVESSYFELSLVIGNYTDLPITFLVCNSSNIIWENEEFTRVNVTSLNILGKTYNNVIEYENISTKSFTILYFYNGT

SEQ ID NO: 29590 - protein, 85 aa, unidentified
  REGION 1..85: note = Description of Unknown:cds_NZ_WFIY01000004.1_cds_WP_155863852.1_1748 target sequence
RKTKIIATLGPSSIDKVKELSQYVDIFRINFAHGDTESHKEYFEKIKEYSEASILVDLPGPKIRVGDIKGKIVLKPGDKVVFSPY

SEQ ID NO: 29591 - protein, 85 aa, unidentified
  REGION 1..85: note = Description of Unknown:cds_NZ_WFIY01000004.1_cds_WP_155863852.1_1748 target sequence
EGIPVEDPLFYSGVKENSYVLIADGSIKINVTKVEKDRVEGVVIEGGTVTSRKGINIPDIKIPSGVTDNDLQLLKEALDLGADFI

SEQ ID NO: 29592 - protein, 85 aa, unidentified
  REGION 1..85: note = Description of Unknown:cds_NZ_WFIY01000004.1_cds_WP_155863852.1_1748 target sequence
GLSFVLSKDDVLKVKSISKDRAWIIAKIEKKNAVENLKDIIKAADGVMVARGDLGVEIGLENLPFIQKKIIRLSKLYGKPVILAT

SEQ ID NO: 29593 - protein, 85 aa, unidentified
  REGION 1..85: note = Description of Unknown:cds_NZ_WFIY01000004.1_cds_WP_155863852.1_1748 target sequence
QVLESMVNNPIPTRAEVIDISNSVSEGVDAIMLSDETAAGNYPVEAVKTLHDIILAVEKRVKTVRPPPLTGDDAIAVASVNVAEI

SEQ ID NO: 29594 - protein, 85 aa, unidentified
  REGION 1..85: note = Description of Unknown:cds_NZ_WFIY01000004.1_cds_WP_155863852.1_1748 target sequence
SKAKLLVVHSRSGTSIIRISRLRPKVPIIGLSPNKELIRKLKMCWGVYPFLTEKTLITLNDIITYAEEISKKFVKCNDNIVITGG

SEQ ID NO: 29595 - protein, 84 aa, unidentified
  REGION 1..84: note = Description of Unknown:cds_NZ_WFIY01000004.1_cds_WP_155863852.1_1748 target sequence
RLRPKVPIIGLSPNKELIRKLKMCWGVYPFLTEKTLITLNDIITYAEEISKKFVKCNDNIVITGGDPTLEEGRTDFIKLHQIVC

SEQ ID NO: 29596 - protein, 85 aa, unidentified
  REGION 1..85: note = Description of Unknown:cds_NZ_WFIY01000004.1_cds_WP_155863852.1_1748 target sequence
RINFAHGDTESHKEYFEKIKEYSEASILVDLPGPKIRVGDIKGKIVLKPGDKVVFSPYEGIPVEDPLFYSGVKENSYVLIADGSI

SEQ ID NO: 29597 - protein, 85 aa, unidentified
  REGION 1..85: note = Description of Unknown:cds_NZ_WFIY01000004.1_cds_WP_155863852.1_1748 target sequence
KINVTKVEKDRVEGVVIEGGTVTSRKGINIPDIKIPSGVTDNDLQLLKEALDLGADFIGLSFVLSKDDVLKVKSISKDRAWIIAK

SEQ ID NO: 29598 - protein, 85 aa, unidentified
  REGION 1..85: note = Description of Unknown:cds_NZ_WFIY01000004.1_cds_WP_155863852.1_1748 target sequence
IEKKNAVENLKDIIKAADGVMVARGDLGVEIGLENLPFIQKKIIRLSKLYGKPVILATQVLESMVNNPIPTRAEVIDISNSVSEG

SEQ ID NO: 29599 - protein, 85 aa, unidentified
  REGION 1..85: note = Description of Unknown:cds_NZ_WFIY01000004.1_cds_WP_155863852.1_1748 target sequence
VDAIMLSDETAAGNYPVEAVKTLHDIILAVEKRVKTVRPPPLTGDDAIAVASVNVAEISKAKLLVVHSRSGTSIIRISRLRPKVP

SEQ ID NO: 29600 - protein, 85 aa, unidentified
  REGION 1..85: note = Description of Unknown:cds_NZ_WFIY01000004.1_cds_WP_155864118.1_2069 target sequence
RINLNKRLRLFLIFTLLILAIALTYTNVVALEASSHPILIGYQTVAYDSIYYSGLMTPNPFSHGINVTICKPIIKYENLSVLASI

SEQ ID NO: 29601 - protein, 85 aa, unidentified
  REGION 1..85: note = Description of Unknown:cds_NZ_WFIY01000004.1_cds_WP_155864118.1_2069 target sequence
ILYSNYSKILGTNELINVTHFPEYIAKYLLIDVKNVSCFKYNVILYDVGVYNITLLSGTAKGQLLLPVSALSYALNNFSKYIPGN

SEQ ID NO: 29602 - protein, 85 aa, unidentified
  REGION 1..85: note = Description of Unknown:cds_NZ_WFIY01000004.1_cds_WP_155864118.1_2069 target sequence
YEIIVRLCYNNKTSCTIIYSQGNCLNLKINNIVIAYEGKIKENYINTTGNSFPLQLLQELCIHVRSYPNYSNLTCYEIVVNTTLG

SEQ ID NO: 29603 - protein, 85 aa, unidentified
  REGION 1..85: note = Description of Unknown:cds_NZ_WFIY01000004.1_cds_WP_155864118.1_2069 target sequence
SLIYKKGIANSSIIPLNVTNISNYVSELLYKYGVYSSGFDIIVYIKNKSGNYTLDPYIVISNNAGFITITSYNSTVNMPVYLKED

SEQ ID NO: 29604 - protein, 85 aa, unidentified
  REGION 1..85: note = Description of Unknown:cds_NZ_WFIY01000004.1_cds_WP_155864118.1_2069 target sequence
FNRLNFIYSALPAAALILLLSLTKNKEESLKERTMRKLRKVKKILIETSEKPFVKEVIRVNDVDDIIKYSANLGKPIILYKGKNV

SEQ ID NO: 29605 - protein, 84 aa, unidentified
  REGION 1..84: note = Description of Unknown:cds_NZ_WFIY01000004.1_cds_WP_155864118.1_2069 target sequence
LSLTKNKEESLKERTMRKLRKVKKILIETSEKPFVKEVIRVNDVDDIIKYSANLGKPIILYKGKNVLEVWSIDNDIGYVYSVNY

SEQ ID NO: 29606 - protein, 85 aa, unidentified
  REGION 1..85: note = Description of Unknown:cds_NZ_WFIY01000004.1_cds_WP_155864118.1_2069 target sequence
VVALEASSHPILIGYQTVAYDSIYYSGLMTPNPFSHGINVTICKPIIKYENLSVLASIILYSNYSKILGTNELINVTHFPEYIAK

SEQ ID NO: 29607 - protein, 85 aa, unidentified
  REGION 1..85: note = Description of Unknown:cds_NZ_WFIY01000004.1_cds_WP_155864118.1_2069 target sequence
YLLIDVKNVSCFKYNVILYDVGVYNITLLSGTAKGQLLLPVSALSYALNNFSKYIPGNYEIIVRLCYNNKTSCTIIYSQGNCLNL

SEQ ID NO: 29608 - protein, 85 aa, unidentified
  REGION 1..85: note = Description of Unknown:cds_NZ_WFIY01000004.1_cds_WP_155864118.1_2069 target sequence
KINNIVIAYEGKIKENYINTTGNSFPLQLLQELCIHVRSYPNYSNLTCYEIVVNTTLGSLIYKKGIANSSIIPLNVTNISNYVSE

SEQ ID NO: 29609 - protein, 85 aa, unidentified
  REGION 1..85: note = Description of Unknown:cds_NZ_WFIY01000004.1_cds_WP_155864118.1_2069 target sequence
LLYKYGVYSSGFDIIVYIKNKSGNYTLDPYIVISNNAGFITITSYNSTVNMPVYLKEDFNRLNFIYSALPAAALILLLSLTKNKE

SEQ ID NO: 29610 - protein, 85 aa, unidentified
  REGION 1..85: note = Description of Unknown:cds_NZ_WFIY01000004.1_cds_WP_013776487.1_2238 target sequence
SEQENVDKKLQEEIKNAFPYADVVDWNEVYQRIIYRYSTPHGLQHVKEEMEKLEDEGEIIVHHIKPYNNPVKMQSLNGFPKTIPT

SEQ ID NO: 29611 - protein, 85 aa, unidentified
  REGION 1..85: note = Description of Unknown:cds_NZ_WFIY01000004.1_cds_WP_013776487.1_2238 target sequence
TRLWNHKSCGQCGHIPGYPTSVFWIMNKLEIDYMDEPHQTSCTGWNYHASGASNPVALAGVYVRNMWRAYEIDYFPLIHCGTSFG

SEQ ID NO: 29612 - protein, 85 aa, unidentified
  REGION 1..85: note = Description of Unknown:cds_NZ_WFIY01000004.1_cds_WP_013776487.1_2238 target sequence
HYKEVRNMIILHKEVREKLRPIMRKLGMDIVIPEEVVHYSEWLYTMSKKAAQHKKYDLSNIKVAVHTPCHVYKLVPEDTIYDPEV

SEQ ID NO: 29613 - protein, 85 aa, unidentified
  REGION 1..85: note = Description of Unknown:cds_NZ_WFIY01000004.1_cds_WP_013776487.1_2238 target sequence
WQGRRPAAPTGTVQNFGAKIVDYSTWWDCCGFGFRHILTEREFSRSFALFKKVIPAVEEAHADVFVTSDTGCVTTLDKSQWAGKA

SEQ ID NO: 29614 - protein, 85 aa, unidentified
  REGION 1..85: note = Description of Unknown:cds_NZ_WFIY01000004.1_cds_WP_013776487.1_2238 target sequence
HGFNYNLPVLSDAQFAAIAMGADPYKIGQIHWHATDVEGFLRKIGVPVDDYKEKFLQYLADLREGKAQPEYLYKPHRKIDFYLAL

SEQ ID NO: 29615 - protein, 84 aa, unidentified
  REGION 1..84: note = Description of Unknown:cds_NZ_WFIY01000004.1_cds_WP_013776487.1_2238 target sequence
MGADPYKIGQIHWHATDVEGFLRKIGVPVDDYKEKFLQYLADLREGKAQPEYLYKPHRKIDFYLALPERVKWYKGESAQTAKSS

SEQ ID NO: 29616 - protein, 85 aa, unidentified
  REGION 1..85: note = Description of Unknown:cds_NZ_WFIY01000004.1_cds_WP_013776487.1_2238 target sequence
EVYQRIIYRYSTPHGLQHVKEEMEKLEDEGEIIVHHIKPYNNPVKMQSLNGFPKTIPTTRLWNHKSCGQCGHIPGYPTSVFWIMN

SEQ ID NO: 29617 - protein, 85 aa, unidentified
  REGION 1..85: note = Description of Unknown:cds_NZ_WFIY01000004.1_cds_WP_013776487.1_2238 target sequence
KLEIDYMDEPHQTSCTGWNYHASGASNPVALAGVYVRNMWRAYEIDYFPLIHCGTSFGHYKEVRNMIILHKEVREKLRPIMRKLG

SEQ ID NO: 29618 - protein, 85 aa, unidentified
  REGION 1..85: note = Description of Unknown:cds_NZ_WFIY01000004.1_cds_WP_013776487.1_2238 target sequence
MDIVIPEEVVHYSEWLYTMSKKAAQHKKYDLSNIKVAVHTPCHVYKLVPEDTIYDPEVWQGRRPAAPTGTVQNFGAKIVDYSTWW

SEQ ID NO: 29619 - protein, 85 aa, unidentified
  REGION 1..85: note = Description of Unknown:cds_NZ_WFIY01000004.1_cds_WP_013776487.1_2238 target sequence
DCCGFGFRHILTEREFSRSFALFKKVIPAVEEAHADVFVTSDTGCVTTLDKSQWAGKAHGFNYNLPVLSDAQFAAIAMGADPYKI

SEQ ID NO: 29620 - protein, 85 aa, unidentified
  REGION 1..85: note = Description of Unknown:cds_NZ_WFIY01000004.1_cds_WP_155863297.1_1255 target sequence
TEVKGNRQVGLVAGTIAFFAGFAAVALYGTTVHKIEPILHLNIVEVAWLVAIPLVTGAFLRIPFSALVDTWGGRRVIFLQLIISI

SEQ ID NO: 29621 - protein, 85 aa, unidentified
  REGION 1..85: note = Description of Unknown:cds_NZ_WFIY01000004.1_cds_WP_155863297.1_1255 target sequence
IGVLGIISTLYKLRYLSDLEAYWLLLLFGALAGTGISIFSSGITYVSYWYPEKKQGTALGIYAGLGNTAPGIFTAIIPYALLSLG

SEQ ID NO: 29622 - protein, 85 aa, unidentified
  REGION 1..85: note = Description of Unknown:cds_NZ_WFIY01000004.1_cds_WP_155863297.1_1255 target sequence
LIGAYEGWLAFLVAMTILFVLIGYDNYYQQLLKKGYKPDEAKSKASALGQEVFPTNAKATLKYAIRKWQTWLLVTMYFTSFGGFE

SEQ ID NO: 29623 - protein, 85 aa, unidentified
  REGION 1..85: note = Description of Unknown:cds_NZ_WFIY01000004.1_cds_WP_155863297.1_1255 target sequence
ALTEWFPTYWTKYIGISLLEAGILTGIVYSLLAALIRVLGGFLSDKFGGERISIMSYTILIVGSSIMISAHSLPFAIIGEIVMAI

SEQ ID NO: 29624 - protein, 85 aa, unidentified
  REGION 1..85: note = Description of Unknown:cds_NZ_WFIY01000004.1_cds_WP_155863297.1_1255 target sequence
GMGIANAAVYKLVPKYEPDAIGGASGLVGGLGSAGGLILPPVLAYFVLTLGKIGYSLGFSVYMTLGLISLAFSVVLWNKYHKFKD

SEQ ID NO: 29625 - protein, 84 aa, unidentified
  REGION 1..84: note = Description of Unknown:cds_NZ_WFIY01000004.1_cds_WP_155863297.1_1255 target sequence
DAIGGASGLVGGLGSAGGLILPPVLAYFVLTLGKIGYSLGFSVYMTLGLISLAFSVVLWNKYHKFKDKIRVIEATTQSSDKKLT

SEQ ID NO: 29626 - protein, 85 aa, unidentified
  REGION 1..85: note = Description of Unknown:cds_NZ_WFIY01000004.1_cds_WP_155863297.1_1255 target sequence
YGTTVHKIEPILHLNIVEVAWLVAIPLVTGAFLRIPFSALVDTWGGRRVIFLQLIISIIGVLGIISTLYKLRYLSDLEAYWLLLL

SEQ ID NO: 29627 - protein, 85 aa, unidentified
  REGION 1..85: note = Description of Unknown:cds_NZ_WFIY01000004.1_cds_WP_155863297.1_1255 target sequence
FGALAGTGISIFSSGITYVSYWYPEKKQGTALGIYAGLGNTAPGIFTAIIPYALLSLGLIGAYEGWLAFLVAMTILFVLIGYDNY

SEQ ID NO: 29628 - protein, 85 aa, unidentified
  REGION 1..85: note = Description of Unknown:cds_NZ_WFIY01000004.1_cds_WP_155863297.1_1255 target sequence
YQQLLKKGYKPDEAKSKASALGQEVFPTNAKATLKYAIRKWQTWLLVTMYFTSFGGFEALTEWFPTYWTKYIGISLLEAGILTGI

SEQ ID NO: 29629 - protein, 85 aa, unidentified
  REGION 1..85: note = Description of Unknown:cds_NZ_WFIY01000004.1_cds_WP_155863297.1_1255 target sequence
VYSLLAALIRVLGGFLSDKFGGERISIMSYTILIVGSSIMISAHSLPFAIIGEIVMAIGMGIANAAVYKLVPKYEPDAIGGASGL

SEQ ID NO: 29630 - protein, 85 aa, unidentified
  REGION 1..85: note = Description of Unknown:cds_NZ_WFIY01000004.1_cds_WP_155863333.1_1299 target sequence
IEEYNPWWISKERIAEIEIYRKYEESEVKWVPDVIGKVSLSPYSLNFIFGPRQVGKSTALILLIKKLLDEGKINPKAIFYFSCDK

SEQ ID NO: 29631 - protein, 85 aa, unidentified
  REGION 1..85: note = Description of Unknown:cds_NZ_WFIY01000004.1_cds_WP_155863333.1_1299 target sequence
LADYKELDEILEEYIKFRKANNISSSFIFLDEITYPKEWYRALKSRIDKGDFRNDVLVVTGSLSMSAKREIEAFPGRRGKGKNLL

SEQ ID NO: 29632 - protein, 85 aa, unidentified
  REGION 1..85: note = Description of Unknown:cds_NZ_WFIY01000004.1_cds_WP_155863333.1_1299 target sequence
MFPLPFSKYIELFNVKIQKGDLSFVLSNYMRNIQFLHELNDLLEKYLITGGFPNAIRDYVKYGKVSEETISDFISSIVSEVNKLK

SEQ ID NO: 29633 - protein, 85 aa, unidentified
  REGION 1..85: note = Description of Unknown:cds_NZ_WFIY01000004.1_cds_WP_155863333.1_1299 target sequence
RSETFFKLTIKGIIERTSSDFSYHTLSRSFGVGTVKTAISYVELLQKLYLLKILEQVDLQGNVLIRKEKKFYFIDPFIYRAFAFW

SEQ ID NO: 29634 - protein, 85 aa, unidentified
  REGION 1..85: note = Description of Unknown:cds_NZ_WFIY01000004.1_cds_WP_155863333.1_1299 target sequence
TLTNLPEESRLVESVVIHHLSRIYDTFYTKAKGEIDAVVKNGEEMLGFEVKFGNVKAEKKILGRMKRVYILSKDKVEDNVIPVSI

SEQ ID NO: 29635 - protein, 84 aa, unidentified
  REGION 1..84: note = Description of Unknown:cds_NZ_WFIY01000004.1_cds_WP_155863333.1_1299 target sequence
HLSRIYDTFYTKAKGEIDAVVKNGEEMLGFEVKFGNVKAEKKILGRMKRVYILSKDKVEDNVIPVSIFLGMLDIPQAIELKVLT

SEQ ID NO: 29636 - protein, 85 aa, unidentified
  REGION 1..85: note = Description of Unknown:cds_NZ_WFIY01000004.1_cds_WP_155863333.1_1299 target sequence
VKWVPDVIGKVSLSPYSLNFIFGPRQVGKSTALILLIKKLLDEGKINPKAIFYFSCDKLADYKELDEILEEYIKFRKANNISSSF

SEQ ID NO: 29637 - protein, 85 aa, unidentified
  REGION 1..85: note = Description of Unknown:cds_NZ_WFIY01000004.1_cds_WP_155863333.1_1299 target sequence
IFLDEITYPKEWYRALKSRIDKGDFRNDVLVVTGSLSMSAKREIEAFPGRRGKGKNLLMFPLPFSKYIELFNVKIQKGDLSFVLS

SEQ ID NO: 29638 - protein, 85 aa, unidentified
  REGION 1..85: note = Description of Unknown:cds_NZ_WFIY01000004.1_cds_WP_155863333.1_1299 target sequence
NYMRNIQFLHELNDLLEKYLITGGFPNAIRDYVKYGKVSEETISDFISSIVSEVNKLKRSETFFKLTIKGIIERTSSDFSYHTLS

SEQ ID NO: 29639 - protein, 85 aa, unidentified
  REGION 1..85: note = Description of Unknown:cds_NZ_WFIY01000004.1_cds_WP_155863333.1_1299 target sequence
RSFGVGTVKTAISYVELLQKLYLLKILEQVDLQGNVLIRKEKKFYFIDPFIYRAFAFWTLTNLPEESRLVESVVIHHLSRIYDTF

SEQ ID NO: 29640 - protein, 85 aa, unidentified
  REGION 1..85: note = Description of Unknown:cds_NZ_WFIY01000004.1_cds_WP_155863431.1_1409 target sequence
KLSRREFLKLSGVTALGTTLAASGLTYEELVSKAQDSDQPINIIWTGNGWCGGNTIAFIDAMNPSVEDVITGVYFDGKPITLRQP

SEQ ID NO: 29641 - protein, 85 aa, unidentified
  REGION 1..85: note = Description of Unknown:cds_NZ_WFIY01000004.1_cds_WP_155863431.1_1409 target sequence
SIQELGNVNLVYHPILMPQDSMAYATMEMALNGELDPYVLVVEGTLFDEFGLYSRDVYNGVPYSYKKNQFWCSAGRKPDGSALLC

SEQ ID NO: 29642 - protein, 85 aa, unidentified
  REGION 1..85: note = Description of Unknown:cds_NZ_WFIY01000004.1_cds_WP_155863431.1_1409 target sequence
EEFVFNLMKNAYAVVATGACATYGGIPATTNGLGKRSPTYAMGMLDDPYRGIYGFPYYAYQVYQKDLAPDIIDEDIFSVTNSPIN

SEQ ID NO: 29643 - protein, 85 aa, unidentified
  REGION 1..85: note = Description of Unknown:cds_NZ_WFIY01000004.1_cds_WP_155863431.1_1409 target sequence
TAWPGPSYHWKSKGGLPIIAIAADPPAGDWIMRTLLSVVLYARGLGPNPADDLDVFNRPKFFYGNETHQNCPRAGFFAEGQFAYK

SEQ ID NO: 29644 - protein, 85 aa, unidentified
  REGION 1..85: note = Description of Unknown:cds_NZ_WFIY01000004.1_cds_WP_155863431.1_1409 target sequence
FGDPQCTYSLGCKGTEANSPAPRLGWVGGVGGCTRGGVCIACTAPGFPDLYEPFYAPPNAPTIPSTSLFAAAAAAGILVGIGSYA

SEQ ID NO: 29645 - protein, 84 aa, unidentified
  REGION 1..84: note = Description of Unknown:cds_NZ_WFIY01000004.1_cds_WP_155863431.1_1409 target sequence
SPAPRLGWVGGVGGCTRGGVCIACTAPGFPDLYEPFYAPPNAPTIPSTSLFAAAAAAGILVGIGSYAFSRKRRSPPKIQGGGGK

SEQ ID NO: 29646 - protein, 85 aa, unidentified
  REGION 1..85: note = Description of Unknown:cds_NZ_WFIY01000004.1_cds_WP_155863431.1_1409 target sequence
EELVSKAQDSDQPINIIWTGNGWCGGNTIAFIDAMNPSVEDVITGVYFDGKPITLRQPSIQELGNVNLVYHPILMPQDSMAYATM

SEQ ID NO: 29647 - protein, 85 aa, unidentified
  REGION 1..85: note = Description of Unknown:cds_NZ_WFIY01000004.1_cds_WP_155863431.1_1409 target sequence
EMALNGELDPYVLVVEGTLFDEFGLYSRDVYNGVPYSYKKNQFWCSAGRKPDGSALLCEEFVFNLMKNAYAVVATGACATYGGIP

SEQ ID NO: 29648 - protein, 85 aa, unidentified
  REGION 1..85: note = Description of Unknown:cds_NZ_WFIY01000004.1_cds_WP_155863431.1_1409 target sequence
ATTNGLGKRSPTYAMGMLDDPYRGIYGFPYYAYQVYQKDLAPDIIDEDIFSVTNSPINTAWPGPSYHWKSKGGLPIIAIAADPPA

SEQ ID NO: 29649 - protein, 85 aa, unidentified
  REGION 1..85: note = Description of Unknown:cds_NZ_WFIY01000004.1_cds_WP_155863431.1_1409 target sequence
GDWIMRTLLSVVLYARGLGPNPADDLDVFNRPKFFYGNETHQNCPRAGFFAEGQFAYKFGDPQCTYSLGCKGTEANSPAPRLGWV

SEQ ID NO: 29650 - protein, 85 aa, unidentified
  REGION 1..85: note = Description of Unknown:cds_NZ_WFIY01000004.1_cds_WP_155864088.1_2033 target sequence
SKEKEESHYQEPKRVIGLKDLVFLSVGGQSPFLSILTYGVSAFLYGSYFAPIAIVIGTILVLLNGMVIYKLSIRYTKSGGYYTYA

SEQ ID NO: 29651 - protein, 85 aa, unidentified
  REGION 1..85: note = Description of Unknown:cds_NZ_WFIY01000004.1_cds_WP_155864088.1_2033 target sequence
YYSLTKRLGFETGWIYLVYSVLYGSAYILGATFVLHHVLQINPWIIALTIFGVSSIFALTGIKPSAKYAIVASVIEIGIMATLAV

SEQ ID NO: 29652 - protein, 85 aa, unidentified
  REGION 1..85: note = Description of Unknown:cds_NZ_WFIY01000004.1_cds_WP_155864088.1_2033 target sequence
LFLKSTSFAFYNPFNYHISIGTLALAILFGSGIPTGYGSITPLSGEVKDPKRTIPLAIVIVILLGGLLAAFDVYAIGDHLLYYHI

SEQ ID NO: 29653 - protein, 85 aa, unidentified
  REGION 1..85: note = Description of Unknown:cds_NZ_WFIY01000004.1_cds_WP_155864088.1_2033 target sequence
SPTSTDLLSLIESRFGIITFAFVIFAAANDGILATLSFMLATSRTAYAMSTHGFLPSIFSKFESERGPVFASLLTIVLYLITIVS

SEQ ID NO: 29654 - protein, 85 aa, unidentified
  REGION 1..85: note = Description of Unknown:cds_NZ_WFIY01000004.1_cds_WP_155864088.1_2033 target sequence
SLYLTGLRPYLAFEEVAEIAVLSNLLVHIAADSSLFKISLKRLRRRLVEISLALAAIGITAWNMIETISSTTPVLVYIFMTFIIM

SEQ ID NO: 29655 - protein, 84 aa, unidentified
  REGION 1..84: note = Description of Unknown:cds_NZ_WFIY01000004.1_cds_WP_155864088.1_2033 target sequence
IAVLSNLLVHIAADSSLFKISLKRLRRRLVEISLALAAIGITAWNMIETISSTTPVLVYIFMTFIIMGFLAAEVIEMEREEQED

SEQ ID NO: 29656 - protein, 85 aa, unidentified
  REGION 1..85: note = Description of Unknown:cds_NZ_WFIY01000004.1_cds_WP_155864088.1_2033 target sequence
GQSPFLSILTYGVSAFLYGSYFAPIAIVIGTILVLLNGMVIYKLSIRYTKSGGYYTYAYYSLTKRLGFETGWIYLVYSVLYGSAY

SEQ ID NO: 29657 - protein, 85 aa, unidentified
  REGION 1..85: note = Description of Unknown:cds_NZ_WFIY01000004.1_cds_WP_155864088.1_2033 target sequence
ILGATFVLHHVLQINPWIIALTIFGVSSIFALTGIKPSAKYAIVASVIEIGIMATLAVLFLKSTSFAFYNPFNYHISIGTLALAI

SEQ ID NO: 29658 - protein, 85 aa, unidentified
  REGION 1..85: note = Description of Unknown:cds_NZ_WFIY01000004.1_cds_WP_155864088.1_2033 target sequence
LFGSGIPTGYGSITPLSGEVKDPKRTIPLAIVIVILLGGLLAAFDVYAIGDHLLYYHISPTSTDLLSLIESRFGIITFAFVIFAA

SEQ ID NO: 29659 - protein, 85 aa, unidentified
  REGION 1..85: note = Description of Unknown:cds_NZ_WFIY01000004.1_cds_WP_155864088.1_2033 target sequence
ANDGILATLSFMLATSRTAYAMSTHGFLPSIFSKFESERGPVFASLLTIVLYLITIVSSLYLTGLRPYLAFEEVAEIAVLSNLLV

SEQ ID NO: 29660 - protein, 85 aa, unidentified
  REGION 1..85: note = Description of Unknown:cds_NZ_WFIY01000004.1_cds_WP_013776492.1_2233 target sequence
GMYVVIGGGSAGYVAGSVLGREGKEVVVIEKGKFGGVCVNSGCVPSIFLSDISFLFSRLNEIGNYKGLEISVTDSKENFFSKRNE

SEQ ID NO: 29661 - protein, 85 aa, unidentified
  REGION 1..85: note = Description of Unknown:cds_NZ_WFIY01000004.1_cds_WP_013776492.1_2233 target sequence
IIEYLSNAGKELVKNSGAEVIEGEAKIVSPNEVEVEGKRIAFDKLIIATGSIPLKPSIKGIERAISEDEAINLNYVPSSLVVIGG

SEQ ID NO: 29662 - protein, 85 aa, unidentified
  REGION 1..85: note = Description of Unknown:cds_NZ_WFIY01000004.1_cds_WP_013776492.1_2233 target sequence
GYAGVEIAQIYARLGSEVTLITRGKIMKYLDEDGQKIIKDSLEWDGVELIENCEVEEIREHEVVTKKGMRKKGEVVVYATGRKPN

SEQ ID NO: 29663 - protein, 85 aa, unidentified
  REGION 1..85: note = Description of Unknown:cds_NZ_WFIY01000004.1_cds_WP_013776492.1_2233 target sequence
FPKGIDKLGIKYNDNGIVVNDLLQTTNSRVYSAGDVIDKEKKVAHVAMLEGIISALNSMGKMERINYFSVPQVVYTDPQIGVVGD

SEQ ID NO: 29664 - protein, 85 aa, unidentified
  REGION 1..85: note = Description of Unknown:cds_NZ_WFIY01000004.1_cds_WP_013776492.1_2233 target sequence
RKLAVKECKFPLSATTRAIIKGLREGYAKIGIDERGKIVYGEVVADVAEELVNELAIAIKAGMTCKDLAFTALVHPSLSESMINA

SEQ ID NO: 29665 - protein, 84 aa, unidentified
  REGION 1..84: note = Description of Unknown:cds_NZ_WFIY01000004.1_cds_WP_013776492.1_2233 target sequence
IIKGLREGYAKIGIDERGKIVYGEVVADVAEELVNELAIAIKAGMTCKDLAFTALVHPSLSESMINACRGFFNLDVDRFKDKNA

SEQ ID NO: 29666 - protein, 85 aa, unidentified
  REGION 1..85: note = Description of Unknown:cds_NZ_WFIY01000004.1_cds_WP_013776492.1_2233 target sequence
VIEKGKFGGVCVNSGCVPSIFLSDISFLFSRLNEIGNYKGLEISVTDSKENFFSKRNEIIEYLSNAGKELVKNSGAEVIEGEAKI

SEQ ID NO: 29667 - protein, 85 aa, unidentified
  REGION 1..85: note = Description of Unknown:cds_NZ_WFIY01000004.1_cds_WP_013776492.1_2233 target sequence
VSPNEVEVEGKRIAFDKLIIATGSIPLKPSIKGIERAISEDEAINLNYVPSSLVVIGGGYAGVEIAQIYARLGSEVTLITRGKIM

SEQ ID NO: 29668 - protein, 85 aa, unidentified
  REGION 1..85: note = Description of Unknown:cds_NZ_WFIY01000004.1_cds_WP_013776492.1_2233 target sequence
KYLDEDGQKIIKDSLEWDGVELIENCEVEEIREHEVVTKKGMRKKGEVVVYATGRKPNFPKGIDKLGIKYNDNGIVVNDLLQTTN

SEQ ID NO: 29669 - protein, 85 aa, unidentified
  REGION 1..85: note = Description of Unknown:cds_NZ_WFIY01000004.1_cds_WP_013776492.1_2233 target sequence
SRVYSAGDVIDKEKKVAHVAMLEGIISALNSMGKMERINYFSVPQVVYTDPQIGVVGDRKLAVKECKFPLSATTRAIIKGLREGY

SEQ ID NO: 29670 - protein, 85 aa, unidentified
  REGION 1..85: note = Description of Unknown:cds_NZ_WFIY01000004.1_cds_WP_155862611.1_388 target sequence
ATQISEAKSGNVTEEMKIIAKLEGESPEKIRDRVAKGRVVIFKNIVRQNLERYTAIGEGLFTKVNVNLGASTDHYDENEELEKVE

SEQ ID NO: 29671 - protein, 85 aa, unidentified
  REGION 1..85: note = Description of Unknown:cds_NZ_WFIY01000004.1_cds_WP_155862611.1_388 target sequence
IANKFGADTIMDLTDGGDIDGMRRKVLAKAKMPVGTVPIYQLYYEMVTKRKYVIDFTEDDLFNVIEKHFKDGVDFVTVHTGVTLD

SEQ ID NO: 29672 - protein, 85 aa, unidentified
  REGION 1..85: note = Description of Unknown:cds_NZ_WFIY01000004.1_cds_WP_155862611.1_388 target sequence
LAKKAAEQKRTAGIVSRGGTILAAWEIYNEKENPLYANFDYLLELAKEYDVVLSLGDALRPGGIDDAHDELHVGELLVNARLAKK

SEQ ID NO: 29673 - protein, 85 aa, unidentified
  REGION 1..85: note = Description of Unknown:cds_NZ_WFIY01000004.1_cds_WP_155862611.1_388 target sequence
AIEKGVQVMIEGPGHMPLDQIEMDIKLEKQLTGGVPYYVLGILPTDIAAGYDHIAGAIGGALAAAYGADMLCYLTPAEHLSLPTP

SEQ ID NO: 29674 - protein, 85 aa, unidentified
  REGION 1..85: note = Description of Unknown:cds_NZ_WFIY01000004.1_cds_WP_155862611.1_388 target sequence
EQVKDGLIAFKIAAHTGDIIKLGEKARKLDTEMSKARASLNWQKMFSLTFDEERARRIYRQYKKFEAGSCTMCGDLCVYLVLPRA

SEQ ID NO: 29675 - protein, 84 aa, unidentified
  REGION 1..84: note = Description of Unknown:cds_NZ_WFIY01000004.1_cds_WP_155862611.1_388 target sequence
DIIKLGEKARKLDTEMSKARASLNWQKMFSLTFDEERARRIYRQYKKFEAGSCTMCGDLCVYLVLPRALNKKRYANQKASTENR

SEQ ID NO: 29676 - protein, 85 aa, unidentified
  REGION 1..85: note = Description of Unknown:cds_NZ_WFIY01000004.1_cds_WP_155862611.1_388 target sequence
EKIRDRVAKGRVVIFKNIVRQNLERYTAIGEGLFTKVNVNLGASTDHYDENEELEKVEIANKFGADTIMDLTDGGDIDGMRRKVL

SEQ ID NO: 29677 - protein, 85 aa, unidentified
  REGION 1..85: note = Description of Unknown:cds_NZ_WFIY01000004.1_cds_WP_155862611.1_388 target sequence
AKAKMPVGTVPIYQLYYEMVTKRKYVIDFTEDDLFNVIEKHFKDGVDFVTVHTGVTLDLAKKAAEQKRTAGIVSRGGTILAAWEI

SEQ ID NO: 29678 - protein, 85 aa, unidentified
  REGION 1..85: note = Description of Unknown:cds_NZ_WFIY01000004.1_cds_WP_155862611.1_388 target sequence
YNEKENPLYANFDYLLELAKEYDVVLSLGDALRPGGIDDAHDELHVGELLVNARLAKKAIEKGVQVMIEGPGHMPLDQIEMDIKL

SEQ ID NO: 29679 - protein, 85 aa, unidentified
  REGION 1..85: note = Description of Unknown:cds_NZ_WFIY01000004.1_cds_WP_155862611.1_388 target sequence
EKQLTGGVPYYVLGILPTDIAAGYDHIAGAIGGALAAAYGADMLCYLTPAEHLSLPTPEQVKDGLIAFKIAAHTGDIIKLGEKAR

SEQ ID NO: 29680 - protein, 85 aa, unidentified
  REGION 1..85: note = Description of Unknown:hvTR_Q5MQC6 target sequence
SYTPGHYAGSRSSSGNRSGILKKTSWADQSERNYQTFNRGRKTQPKFTVSTQPQGNTIPHYSWFSGITQFQKGRDFKFSDGQGVP

SEQ ID NO: 29681 - protein, 85 aa, unidentified
  REGION 1..85: note = Description of Unknown:hvTR_Q5MQC6 target sequence
IAFGVPPSEAKGYWYRHSRRSFKTADGQQKQLLPRWYFYYLGTGPYANASYGESLEGVFWVANHQADTSTPSDVSSRDPTTQEAI

SEQ ID NO: 29682 - protein, 85 aa, unidentified
  REGION 1..85: note = Description of Unknown:hvTR_Q5MQC6 target sequence
PTRFPPGTILPQGYYVEGSGRSASNSRPGSRSQSRGPNNRSLSRSNSNFRHSDSIVKPDMADEIANLVLAKLGKDSKPQQVTKQN

SEQ ID NO: 29683 - protein, 85 aa, unidentified
  REGION 1..85: note = Description of Unknown:hvTR_Q5MQC6 target sequence
AKEIRHKILTKPRQKRTPNKHCNVQQCFGKRGPSQNFGNAEMLKLGTNDPQFPILAELAPTPGAFFFGSKLDLVKRDSEADSPVK

SEQ ID NO: 29684 - protein, 85 aa, unidentified
  REGION 1..85: note = Description of Unknown:hvTR_Q5MQC6 target sequence
DVFELHYSGSIRFDSTLPGFETIMKVLEENLNAYVNSNQNTDSDSLSSKPQRKRGVKQLPEQFDSLNLSAGTQHISNDFTPEDHS

SEQ ID NO: 29685 - protein, 84 aa, unidentified
  REGION 1..84: note = Description of Unknown:hvTR_Q5MQC6 target sequence
LPGFETIMKVLEENLNAYVNSNQNTDSDSLSSKPQRKRGVKQLPEQFDSLNLSAGTQHISNDFTPEDHSLLATLDDPYVEDSVA

SEQ ID NO: 29686 - protein, 85 aa, unidentified
  REGION 1..85: note = Description of Unknown:hvTR_Q5MQC6 target sequence
DQSERNYQTFNRGRKTQPKFTVSTQPQGNTIPHYSWFSGITQFQKGRDFKFSDGQGVPIAFGVPPSEAKGYWYRHSRRSFKTADG

SEQ ID NO: 29687 - protein, 85 aa, unidentified
  REGION 1..85: note = Description of Unknown:hvTR_Q5MQC6 target sequence
QQKQLLPRWYFYYLGTGPYANASYGESLEGVFWVANHQADTSTPSDVSSRDPTTQEAIPTRFPPGTILPQGYYVEGSGRSASNSR

SEQ ID NO: 29688 - protein, 85 aa, unidentified
  REGION 1..85: note = Description of Unknown:hvTR_Q5MQC6 target sequence
PGSRSQSRGPNNRSLSRSNSNFRHSDSIVKPDMADEIANLVLAKLGKDSKPQQVTKQNAKEIRHKILTKPRQKRTPNKHCNVQQC

SEQ ID NO: 29689 - protein, 85 aa, unidentified
  REGION 1..85: note = Description of Unknown:hvTR_Q5MQC6 target sequence
FGKRGPSQNFGNAEMLKLGTNDPQFPILAELAPTPGAFFFGSKLDLVKRDSEADSPVKDVFELHYSGSIRFDSTLPGFETIMKVL

SEQ ID NO: 29690 - protein, 85 aa, unidentified
  REGION 1..85: note = Description of Unknown:cds_NZ_WFIY01000004.1_cds_WP_155862774.1_588 target sequence
KGLSAVIGMVFLLIVMIAVLLPLALTVTSTTSKEEENINAIQPLQIEVEEQMSEVNTENSPIGFYYCNVTGEALLVYYSSPPIPL

SEQ ID NO: 29691 - protein, 85 aa, unidentified
  REGION 1..85: note = Description of Unknown:cds_NZ_WFIY01000004.1_cds_WP_155862774.1_588 target sequence
NISYFLGYKGGYIQIIDPQPTRTTWNKYPALEYQIGNFNKLAMVTTLGNIIYADPMPHSQESSSSSYDPSYWVYVLKTPYTSYTN

SEQ ID NO: 29692 - protein, 85 aa, unidentified
  REGION 1..85: note = Description of Unknown:cds_NZ_WFIY01000004.1_cds_WP_155862774.1_588 target sequence
PSTVQICNNPSAITNDWKPCGINNAVLIVLKQSHKPLCINLTIHFTCMFGTRCRHRGDVGTTVGIYSGSFYGQIEFGNYFLDAGS

SEQ ID NO: 29693 - protein, 85 aa, unidentified
  REGION 1..85: note = Description of Unknown:cds_NZ_WFIY01000004.1_cds_WP_155862774.1_588 target sequence
GVWPFEGFQCILLNVSHGYVSRTANCIGLGVLTSCSYLALKTKVNFLACKVYNYLLNIYINCNCQIYIKLYEICNGKYIPIKLPY

SEQ ID NO: 29694 - protein, 85 aa, unidentified
  REGION 1..85: note = Description of Unknown:cds_NZ_WFIY01000004.1_cds_WP_155862774.1_588 target sequence
ITPKFISSWCWFLKPLPKYEGNYNETEWGYTKCLINVPKSTSCVVPFGEIKAKAMWVGCKICGFCPVEYPYDPIGVTVEIMWGEC

SEQ ID NO: 29695 - protein, 84 aa, unidentified
  REGION 1..84: note = Description of Unknown:cds_NZ_WFIY01000004.1_cds_WP_155862774.1_588 target sequence
PKYEGNYNETEWGYTKCLINVPKSTSCVVPFGEIKAKAMWVGCKICGFCPVEYPYDPIGVTVEIMWGECIYVSGFQIAGYNTFT

SEQ ID NO: 29696 - protein, 85 aa, unidentified
  REGION 1..85: note = Description of Unknown:cds_NZ_WFIY01000004.1_cds_WP_155862774.1_588 target sequence
TSTTSKEEENINAIQPLQIEVEEQMSEVNTENSPIGFYYCNVTGEALLVYYSSPPIPLNISYFLGYKGGYIQIIDPQPTRTTWNK

SEQ ID NO: 29697 - protein, 85 aa, unidentified
  REGION 1..85: note = Description of Unknown:cds_NZ_WFIY01000004.1_cds_WP_155862774.1_588 target sequence
YPALEYQIGNFNKLAMVTTLGNIIYADPMPHSQESSSSSYDPSYWVYVLKTPYTSYTNPSTVQICNNPSAITNDWKPCGINNAVL

SEQ ID NO: 29698 - protein, 85 aa, unidentified
  REGION 1..85: note = Description of Unknown:cds_NZ_WFIY01000004.1_cds_WP_155862774.1_588 target sequence
IVLKQSHKPLCINLTIHFTCMFGTRCRHRGDVGTTVGIYSGSFYGQIEFGNYFLDAGSGVWPFEGFQCILLNVSHGYVSRTANCI

SEQ ID NO: 29699 - protein, 85 aa, unidentified
  REGION 1..85: note = Description of Unknown:cds_NZ_WFIY01000004.1_cds_WP_155862774.1_588 target sequence
GLGVLTSCSYLALKTKVNFLACKVYNYLLNIYINCNCQIYIKLYEICNGKYIPIKLPYITPKFISSWCWFLKPLPKYEGNYNETE

SEQ ID NO: 29700 - protein, 85 aa, unidentified
  REGION 1..85: note = Description of Unknown:cds_NZ_WFIY01000004.1_cds_WP_155862871.1_709 target sequence
KYTEVAPKLFMNTGTRFPRKIIWAMGLVKLACARANAKLNLLDKDIAKAIEDASIEVMEGKHDEKVVLDVFQTGSGTGLNMNINE

SEQ ID NO: 29701 - protein, 85 aa, unidentified
  REGION 1..85: note = Description of Unknown:cds_NZ_WFIY01000004.1_cds_WP_155862871.1_709 target sequence
IIAERASELSGKKIHPNDHVNMSQSSNDVVPTAIRIAAVSNAIENLMPSLREIISSLNEKSKEYENVIKSGRTHLRDALPITLGQ

SEQ ID NO: 29702 - protein, 85 aa, unidentified
  REGION 1..85: note = Description of Unknown:cds_NZ_WFIY01000004.1_cds_WP_155862871.1_709 target sequence
ELSAYYDALSHDLEQLNNVIEYVKELPIGGTAVGTGLNAHPKFTEVVIQEINELTSLNFKTSNKFRSMRFLTDLLLLSGVMRNIA

SEQ ID NO: 29703 - protein, 85 aa, unidentified
  REGION 1..85: note = Description of Unknown:cds_NZ_WFIY01000004.1_cds_WP_155862871.1_709 target sequence
IELYRIGQDFRLMFSGPFTSIGEIDIPTQEEIAGSSIMPGKTNPVTVEATLLVSSEVVGLDQANQMASMLGEFELAMGVPLIGYN

SEQ ID NO: 29704 - protein, 85 aa, unidentified
  REGION 1..85: note = Description of Unknown:cds_NZ_WFIY01000004.1_cds_WP_155862871.1_709 target sequence
IILQENLLSEALRKFSSLVINGMKPNVEKMKRYAESSPSLITVISPIVGYDKASQIGKMLVKGMSIREALREMGFSEEEINRILD

SEQ ID NO: 29705 - protein, 84 aa, unidentified
  REGION 1..84: note = Description of Unknown:cds_NZ_WFIY01000004.1_cds_WP_155862871.1_709 target sequence
SLVINGMKPNVEKMKRYAESSPSLITVISPIVGYDKASQIGKMLVKGMSIREALREMGFSEEEINRILDLEQLVKAGIPAKSQK

SEQ ID NO: 29706 - protein, 85 aa, unidentified
  REGION 1..85: note = Description of Unknown:cds_NZ_WFIY01000004.1_cds_WP_155862871.1_709 target sequence
VKLACARANAKLNLLDKDIAKAIEDASIEVMEGKHDEKVVLDVFQTGSGTGLNMNINEIIAERASELSGKKIHPNDHVNMSQSSN

SEQ ID NO: 29707 - protein, 85 aa, unidentified
  REGION 1..85: note = Description of Unknown:cds_NZ_WFIY01000004.1_cds_WP_155862871.1_709 target sequence
DVVPTAIRIAAVSNAIENLMPSLREIISSLNEKSKEYENVIKSGRTHLRDALPITLGQELSAYYDALSHDLEQLNNVIEYVKELP

SEQ ID NO: 29708 - protein, 85 aa, unidentified
  REGION 1..85: note = Description of Unknown:cds_NZ_WFIY01000004.1_cds_WP_155862871.1_709 target sequence
IGGTAVGTGLNAHPKFTEVVIQEINELTSLNFKTSNKFRSMRFLTDLLLLSGVMRNIAIELYRIGQDFRLMFSGPFTSIGEIDIP

SEQ ID NO: 29709 - protein, 85 aa, unidentified
  REGION 1..85: note = Description of Unknown:cds_NZ_WFIY01000004.1_cds_WP_155862871.1_709 target sequence
TQEEIAGSSIMPGKTNPVTVEATLLVSSEVVGLDQANQMASMLGEFELAMGVPLIGYNIILQENLLSEALRKFSSLVINGMKPNV

SEQ ID NO: 29710 - protein, 85 aa, unidentified
  REGION 1..85: note = Description of Unknown:cds_NZ_WFIY01000004.1_cds_WP_155863222.1_1168 target sequence
NEDIVKLVKEHTFGTWKVQKTWNPLNVDKAEGVYFYVNGKKILDLSSQLVNVNLGYGNKEVIKSIEDQLEKLQYISPAFATEVRA

SEQ ID NO: 29711 - protein, 85 aa, unidentified
  REGION 1..85: note = Description of Unknown:cds_NZ_WFIY01000004.1_cds_WP_155863222.1_1168 target sequence
RAVKSLLEVMPSNLTKFFFSTSGTEANEAAIKIARFYKSPSYKILSRYRSYHGSTLGSLALTGDYRRWYAEPNVAPGVVKIPEPY

SEQ ID NO: 29712 - protein, 85 aa, unidentified
  REGION 1..85: note = Description of Unknown:cds_NZ_WFIY01000004.1_cds_WP_155863222.1_1168 target sequence
CYRCPFKLKYPECNLACVNYVDYVIKNEGNVAGVIVEPITGTNGVVVPPKEYLPTLRKITRENDVLLITDEVMTGWGRVGEWFAV

SEQ ID NO: 29713 - protein, 85 aa, unidentified
  REGION 1..85: note = Description of Unknown:cds_NZ_WFIY01000004.1_cds_WP_155863222.1_1168 target sequence
NLWGVQPDILTTAKGASASYVPIGITAVSKEIADFFEDKMFAHGHTFEAHPVSLSAIPAVVEEYKRMDLLAHVKAMGSYLGERLK

SEQ ID NO: 29714 - protein, 85 aa, unidentified
  REGION 1..85: note = Description of Unknown:cds_NZ_WFIY01000004.1_cds_WP_155863222.1_1168 target sequence
ELKERHKSIGDVRGVGLFWAIEFVKDGKQTPFGTYEDKYEGKVTEVDVLAKKLLDEGVYVFNGPSWFVISPPLIIKKEEIDEGIE

SEQ ID NO: 29715 - protein, 84 aa, unidentified
  REGION 1..84: note = Description of Unknown:cds_NZ_WFIY01000004.1_cds_WP_155863222.1_1168 target sequence
LFWAIEFVKDGKQTPFGTYEDKYEGKVTEVDVLAKKLLDEGVYVFNGPSWFVISPPLIIKKEEIDEGIEKLDEKIKYLDEKFLG

SEQ ID NO: 29716 - protein, 85 aa, unidentified
  REGION 1..85: note = Description of Unknown:cds_NZ_WFIY01000004.1_cds_WP_155863222.1_1168 target sequence
DKAEGVYFYVNGKKILDLSSQLVNVNLGYGNKEVIKSIEDQLEKLQYISPAFATEVRARAVKSLLEVMPSNLTKFFFSTSGTEAN

SEQ ID NO: 29717 - protein, 85 aa, unidentified
  REGION 1..85: note = Description of Unknown:cds_NZ_WFIY01000004.1_cds_WP_155863222.1_1168 target sequence
EAAIKIARFYKSPSYKILSRYRSYHGSTLGSLALTGDYRRWYAEPNVAPGVVKIPEPYCYRCPFKLKYPECNLACVNYVDYVIKN

SEQ ID NO: 29718 - protein, 85 aa, unidentified
  REGION 1..85: note = Description of Unknown:cds_NZ_WFIY01000004.1_cds_WP_155863222.1_1168 target sequence
EGNVAGVIVEPITGTNGVVVPPKEYLPTLRKITRENDVLLITDEVMTGWGRVGEWFAVNLWGVQPDILTTAKGASASYVPIGITA

SEQ ID NO: 29719 - protein, 85 aa, unidentified
  REGION 1..85: note = Description of Unknown:cds_NZ_WFIY01000004.1_cds_WP_155863222.1_1168 target sequence
VSKEIADFFEDKMFAHGHTFEAHPVSLSAIPAVVEEYKRMDLLAHVKAMGSYLGERLKELKERHKSIGDVRGVGLFWAIEFVKDG

SEQ ID NO: 29720 - protein, 85 aa, unidentified
  REGION 1..85: note = Description of Unknown:cds_NC_030656.1_cds_YP_009268733.1_18 target sequence
TEETTSLEIFPWNRDSLRKDITVLGDDIYLNYAISQIDTSQSWAPPVKLIRYFRNFSKDSLNKIINDDYVNPSYFQMKNKKFIPL

SEQ ID NO: 29721 - protein, 85 aa, unidentified
  REGION 1..85: note = Description of Unknown:cds_NC_030656.1_cds_YP_009268733.1_18 target sequence
NDDLYHVATGGYGIVFKIEEYIVKFVFETKSFLTDIDTASEYTIPRFLYNNLKGDEKQFIVCALAMGINYKMNFLHLLYKRVLSM

SEQ ID NO: 29722 - protein, 85 aa, unidentified
  REGION 1..85: note = Description of Unknown:cds_NC_030656.1_cds_YP_009268733.1_18 target sequence
IVLIFKIMDNKELNLDFSQKIFLQKFNERKNDTTFVKLISYFYPSVVQSNINIINHFSHLVHFFEHEKRSKYEYDRGNIIIFPLA

SEQ ID NO: 29723 - protein, 85 aa, unidentified
  REGION 1..85: note = Description of Unknown:cds_NC_030656.1_cds_YP_009268733.1_18 target sequence
RCSADQITQENVSMFGFKSVSEYIKFLFLQVSLLYIKIYELPGCDNFMHADLKPDNILIFDSKKVIKIHVGKKTYTFKEPIRCAV

SEQ ID NO: 29724 - protein, 85 aa, unidentified
  REGION 1..85: note = Description of Unknown:cds_NC_030656.1_cds_YP_009268733.1_18 target sequence
NDFDFARVCQIKNTKIKGNIKEPQNWFYDFHFLVHTLLRAYPEVTEDKDFLSTLEEFVMCCTKTTCEKFRLKTPITHPISFLKKI

SEQ ID NO: 29725 - protein, 84 aa, unidentified
  REGION 1..84: note = Description of Unknown:cds_NC_030656.1_cds_YP_009268733.1_18 target sequence
IKGNIKEPQNWFYDFHFLVHTLLRAYPEVTEDKDFLSTLEEFVMCCTKTTCEKFRLKTPITHPISFLKKIITRDIFSQWINGSD

SEQ ID NO: 29726 - protein, 85 aa, unidentified
  REGION 1..85: note = Description of Unknown:cds_NC_030656.1_cds_YP_009268733.1_18 target sequence
IYLNYAISQIDTSQSWAPPVKLIRYFRNFSKDSLNKIINDDYVNPSYFQMKNKKFIPLNDDLYHVATGGYGIVFKIEEYIVKFVF

SEQ ID NO: 29727 - protein, 85 aa, unidentified
  REGION 1..85: note = Description of Unknown:cds_NC_030656.1_cds_YP_009268733.1_18 target sequence
ETKSFLTDIDTASEYTIPRFLYNNLKGDEKQFIVCALAMGINYKMNFLHLLYKRVLSMIVLIFKIMDNKELNLDFSQKIFLQKFN

SEQ ID NO: 29728 - protein, 85 aa, unidentified
  REGION 1..85: note = Description of Unknown:cds_NC_030656.1_cds_YP_009268733.1_18 target sequence
ERKNDTTFVKLISYFYPSVVQSNINIINHFSHLVHFFEHEKRSKYEYDRGNIIIFPLARCSADQITQENVSMFGFKSVSEYIKFL

SEQ ID NO: 29729 - protein, 85 aa, unidentified
  REGION 1..85: note = Description of Unknown:cds_NC_030656.1_cds_YP_009268733.1_18 target sequence
FLQVSLLYIKIYELPGCDNFMHADLKPDNILIFDSKKVIKIHVGKKTYTFKEPIRCAVNDFDFARVCQIKNTKIKGNIKEPQNWF

SEQ ID NO: 29730 - protein, 85 aa, unidentified
  REGION 1..85: note = Description of Unknown:cds_NZ_WFIY01000004.1_cds_WP_155862462.1_215 target sequence
LEGYRGSALQSLLQINADIGDLIEIEKNGNTYKGILMPSYSPYDDIIVIKLDNGYNIGVSIISAKIKLIKKKSESQKETQEVSKS

SEQ ID NO: 29731 - protein, 85 aa, unidentified
  REGION 1..85: note = Description of Unknown:cds_NZ_WFIY01000004.1_cds_WP_155862462.1_215 target sequence
TKSEIKIISTGGTIVSKIEYETGAVRPALSTEDIIKFMPEINNIAKISAEILFAILSENMTPEHWIKIAEAVKRAFKEGNEGVVI

SEQ ID NO: 29732 - protein, 85 aa, unidentified
  REGION 1..85: note = Description of Unknown:cds_NZ_WFIY01000004.1_cds_WP_155862462.1_215 target sequence
AHGTDTMAYTASALAFSLKLPGPVVLVGSQRSSDRPSSDAAINLYSSVLLAKKAPFGEVVINMHGESSDTYTLAHRGVKVRKMHT

SEQ ID NO: 29733 - protein, 85 aa, unidentified
  REGION 1..85: note = Description of Unknown:cds_NZ_WFIY01000004.1_cds_WP_155862462.1_215 target sequence
SRRDAFQSINDKPLAKVGWKENKVEILRSDYIPKRDEVEEDAKFDTHVFLLKYYPGLTPDILEYLMDKKIRGVILEGTGLGHVAT

SEQ ID NO: 29734 - protein, 85 aa, unidentified
  REGION 1..85: note = Description of Unknown:cds_NZ_WFIY01000004.1_cds_WP_155862462.1_215 target sequence
SFVDYIKKMTKDGVFVGMTSQCLFGRVNMNVYTTGRLLQEAGVVPLEDMLPEVAIVKLMWVLAHESDQEKVKKLMLTNLVGEINP

SEQ ID NO: 29735 - protein, 84 aa, unidentified
  REGION 1..84: note = Description of Unknown:cds_NZ_WFIY01000004.1_cds_WP_155862462.1_215 target sequence
FVGMTSQCLFGRVNMNVYTTGRLLQEAGVVPLEDMLPEVAIVKLMWVLAHESDQEKVKKLMLTNLVGEINPRHSLDFFPRWNYD

SEQ ID NO: 29736 - protein, 85 aa, unidentified
  REGION 1..85: note = Description of Unknown:cds_NZ_WFIY01000004.1_cds_WP_155862462.1_215 target sequence
NGNTYKGILMPSYSPYDDIIVIKLDNGYNIGVSIISAKIKLIKKKSESQKETQEVSKSTKSEIKIISTGGTIVSKIEYETGAVRP

SEQ ID NO: 29737 - protein, 85 aa, unidentified
  REGION 1..85: note = Description of Unknown:cds_NZ_WFIY01000004.1_cds_WP_155862462.1_215 target sequence
ALSTEDIIKFMPEINNIAKISAEILFAILSENMTPEHWIKIAEAVKRAFKEGNEGVVIAHGTDTMAYTASALAFSLKLPGPVVLV

SEQ ID NO: 29738 - protein, 85 aa, unidentified
  REGION 1..85: note = Description of Unknown:cds_NZ_WFIY01000004.1_cds_WP_155862462.1_215 target sequence
GSQRSSDRPSSDAAINLYSSVLLAKKAPFGEVVINMHGESSDTYTLAHRGVKVRKMHTSRRDAFQSINDKPLAKVGWKENKVEIL

SEQ ID NO: 29739 - protein, 85 aa, unidentified
  REGION 1..85: note = Description of Unknown:cds_NZ_WFIY01000004.1_cds_WP_155862462.1_215 target sequence
RSDYIPKRDEVEEDAKFDTHVFLLKYYPGLTPDILEYLMDKKIRGVILEGTGLGHVATSFVDYIKKMTKDGVFVGMTSQCLFGRV

SEQ ID NO: 29740 - protein, 85 aa, unidentified
  REGION 1..85: note = Description of Unknown:cds_NZ_WFIY01000004.1_cds_WP_155864124.1_2075 target sequence
NDQKPVGINKGRTKIKLSTLDLFFLSFGGQAPFISLLTFGTVMISLVGTQGAFAMLIATAVVALNGIVINRLSSRFKRGGGYYTY

SEQ ID NO: 29741 - protein, 85 aa, unidentified
  REGION 1..85: note = Description of Unknown:cds_NZ_WFIY01000004.1_cds_WP_155864124.1_2075 target sequence
AYYALTERLGTSTGWVYLAYALSYGGTLLAGGAYVLYSILRMLPFTPSILLNQWLLALIVSGLASTLVIAGVKASAKYAMIMSTA

SEQ ID NO: 29742 - protein, 85 aa, unidentified
  REGION 1..85: note = Description of Unknown:cds_NZ_WFIY01000004.1_cds_WP_155864124.1_2075 target sequence
EMIALVSLAIFFLRDSGWHFYNPFNISLSSSLFEAVVFGLGIPTGYGSIAPLGYDASSKSIGKVAVAVVFYGGLLAVFFFYSLGA

SEQ ID NO: 29743 - protein, 85 aa, unidentified
  REGION 1..85: note = Description of Unknown:cds_NZ_WFIY01000004.1_cds_WP_155864124.1_2075 target sequence
LDFTGNLVQYLLSDFGIAGAIILGFISLNDGILGGMSYILANSRTLKAMSEDKVFPSILAKDIKGKPLYAEILIAGIFTSAVVTL

SEQ ID NO: 29744 - protein, 85 aa, unidentified
  REGION 1..85: note = Description of Unknown:cds_NZ_WFIY01000004.1_cds_WP_155864124.1_2075 target sequence
TNFMGLYGVFVILGGLAGIFNLFIHSSANLSLVRITAKRAKKHWWELTIGILATLVSIVVLLYSFTGFSPIMINIFLGWIVLGFF

SEQ ID NO: 29745 - protein, 84 aa, unidentified
  REGION 1..84: note = Description of Unknown:cds_NZ_WFIY01000004.1_cds_WP_155864124.1_2075 target sequence
GLAGIFNLFIHSSANLSLVRITAKRAKKHWWELTIGILATLVSIVVLLYSFTGFSPIMINIFLGWIVLGFFYLEIKEMLSSTED

SEQ ID NO: 29746 - protein, 85 aa, unidentified
  REGION 1..85: note = Description of Unknown:cds_NZ_WFIY01000004.1_cds_WP_155864124.1_2075 target sequence
GGQAPFISLLTFGTVMISLVGTQGAFAMLIATAVVALNGIVINRLSSRFKRGGGYYTYAYYALTERLGTSTGWVYLAYALSYGGT

SEQ ID NO: 29747 - protein, 85 aa, unidentified
  REGION 1..85: note = Description of Unknown:cds_NZ_WFIY01000004.1_cds_WP_155864124.1_2075 target sequence
LLAGGAYVLYSILRMLPFTPSILLNQWLLALIVSGLASTLVIAGVKASAKYAMIMSTAEMIALVSLAIFFLRDSGWHFYNPFNIS

SEQ ID NO: 29748 - protein, 85 aa, unidentified
  REGION 1..85: note = Description of Unknown:cds_NZ_WFIY01000004.1_cds_WP_155864124.1_2075 target sequence
LSSSLFEAVVFGLGIPTGYGSIAPLGYDASSKSIGKVAVAVVFYGGLLAVFFFYSLGALDFTGNLVQYLLSDFGIAGAIILGFIS

SEQ ID NO: 29749 - protein, 85 aa, unidentified
  REGION 1..85: note = Description of Unknown:cds_NZ_WFIY01000004.1_cds_WP_155864124.1_2075 target sequence
LNDGILGGMSYILANSRTLKAMSEDKVFPSILAKDIKGKPLYAEILIAGIFTSAVVTLTNFMGLYGVFVILGGLAGIFNLFIHSS

SEQ ID NO: 29750 - protein, 85 aa, unidentified
  REGION 1..85: note = Description of Unknown:cds_NC_035460.1_cds_YP_009408009.1_58 target sequence
GIKNLKSLLLKCESLKEIAATSKKYNGVFVDTMSFYVSIAHCSNNEEDLNKLFLKYVNIWLREGDEVYLFIDKGEIRIKEQLRIK

SEQ ID NO: 29751 - protein, 85 aa, unidentified
  REGION 1..85: note = Description of Unknown:cds_NC_035460.1_cds_YP_009408009.1_58 target sequence
RRSAANQTINRKQNEITTITNELSNLHISNNFYEEIKTESELKIKQLTFQVFLANTINIKHMLEKALVSLSNNNNVKIIYCDGID

SEQ ID NO: 29752 - protein, 85 aa, unidentified
  REGION 1..85: note = Description of Unknown:cds_NC_035460.1_cds_YP_009408009.1_58 target sequence
AEFKMCADAKKKADTTGQWPLLVSNDQDTLLFSSCDSLPKTIKNISHIYKYLPCSMTLYLAKLTALVNGCDFFPGLYGACITPKI

SEQ ID NO: 29753 - protein, 85 aa, unidentified
  REGION 1..85: note = Description of Unknown:cds_NC_035460.1_cds_YP_009408009.1_58 target sequence
LDKMKLFYDFTLENIVKSLVVKNFTNKTFNIVDVNSIINFINSYSSIDSNIYSNTPPYGCTIQEFLFSCLYSQWNKFSKNVFKNT

SEQ ID NO: 29754 - protein, 85 aa, unidentified
  REGION 1..85: note = Description of Unknown:cds_NC_035460.1_cds_YP_009408009.1_58 target sequence
TVENNLIYNLVPCQNISTDDIIKLSKIVDNKSVKVDLHNLKTIATIFGYKINKKVYKTYFGIYKLKDILLCYDDLFYFNDKIIIE

SEQ ID NO: 29755 - protein, 84 aa, unidentified
  REGION 1..84: note = Description of Unknown:cds_NC_035460.1_cds_YP_009408009.1_58 target sequence
QNISTDDIIKLSKIVDNKSVKVDLHNLKTIATIFGYKINKKVYKTYFGIYKLKDILLCYDDLFYFNDKIIIENNLKCNVINIGK

SEQ ID NO: 29756 - protein, 85 aa, unidentified
  REGION 1..85: note = Description of Unknown:cds_NC_035460.1_cds_YP_009408009.1_58 target sequence
VFVDTMSFYVSIAHCSNNEEDLNKLFLKYVNIWLREGDEVYLFIDKGEIRIKEQLRIKRRSAANQTINRKQNEITTITNELSNLH

SEQ ID NO: 29757 - protein, 85 aa, unidentified
  REGION 1..85: note = Description of Unknown:cds_NC_035460.1_cds_YP_009408009.1_58 target sequence
ISNNFYEEIKTESELKIKQLTFQVFLANTINIKHMLEKALVSLSNNNNVKIIYCDGIDAEFKMCADAKKKADTTGQWPLLVSNDQ

SEQ ID NO: 29758 - protein, 85 aa, unidentified
  REGION 1..85: note = Description of Unknown:cds_NC_035460.1_cds_YP_009408009.1_58 target sequence
DTLLFSSCDSLPKTIKNISHIYKYLPCSMTLYLAKLTALVNGCDFFPGLYGACITPKILDKMKLFYDFTLENIVKSLVVKNFTNK

SEQ ID NO: 29759 - protein, 85 aa, unidentified
  REGION 1..85: note = Description of Unknown:cds_NC_035460.1_cds_YP_009408009.1_58 target sequence
TFNIVDVNSIINFINSYSSIDSNIYSNTPPYGCTIQEFLFSCLYSQWNKFSKNVFKNTTVENNLIYNLVPCQNISTDDIIKLSKI

SEQ ID NO: 29760 - protein, 85 aa, unidentified
  REGION 1..85: note = Description of Unknown:cds_NC_030656.1_cds_YP_009268774.1_59 target sequence
GIKNLKLLLVNQHTLKQCVEFPNGKYPGVFVDTMSIFMTLAYACGSQEELICAFAEKIQYWKSLGSDVILFVDKGEITIKTKLRE

SEQ ID NO: 29761 - protein, 85 aa, unidentified
  REGION 1..85: note = Description of Unknown:cds_NC_030656.1_cds_YP_009268774.1_59 target sequence
KRKKVLTAAVEKKITDRDSILETIKCLENNQDEFADEMLADAQLKLEKKMFHISLGESVFVNNLVGKIISMLGEDVTVKVCEGID

SEQ ID NO: 29762 - protein, 85 aa, unidentified
  REGION 1..85: note = Description of Unknown:cds_NC_030656.1_cds_YP_009268774.1_59 target sequence
AEMQMCIDAYQVAVETGLWPILASGDQDALLFATIDDLPKYFDTLSCIYEFLPCAYSAYISKLAVLANGCDFFPGLKGIMLTQKS

SEQ ID NO: 29763 - protein, 85 aa, unidentified
  REGION 1..85: note = Description of Unknown:cds_NC_030656.1_cds_YP_009268774.1_59 target sequence
IENMELFETFNAENAAISLATRNLVYTKGFDTLKAPCDEIVDFINRYAAGDITIYDDSLLEECDARCFIFTALRKKWLEFFKYGD

SEQ ID NO: 29764 - protein, 85 aa, unidentified
  REGION 1..85: note = Description of Unknown:cds_NC_030656.1_cds_YP_009268774.1_59 target sequence
NIKKLSIPKQLVLLLEERVRISKNDIDTLVNIIYDESIRTDLAISNVVEILGYEVNSDSEIPVIGISESLGILLYLSNDIYLNET

SEQ ID NO: 29765 - protein, 84 aa, unidentified
  REGION 1..84: note = Description of Unknown:cds_NC_030656.1_cds_YP_009268774.1_59 target sequence
LLEERVRISKNDIDTLVNIIYDESIRTDLAISNVVEILGYEVNSDSEIPVIGISESLGILLYLSNDIYLNETRIIKTTDVIKIG

SEQ ID NO: 29766 - protein, 85 aa, unidentified
  REGION 1..85: note = Description of Unknown:cds_NC_030656.1_cds_YP_009268774.1_59 target sequence
GVFVDTMSIFMTLAYACGSQEELICAFAEKIQYWKSLGSDVILFVDKGEITIKTKLREKRKKVLTAAVEKKITDRDSILETIKCL

SEQ ID NO: 29767 - protein, 85 aa, unidentified
  REGION 1..85: note = Description of Unknown:cds_NC_030656.1_cds_YP_009268774.1_59 target sequence
ENNQDEFADEMLADAQLKLEKKMFHISLGESVFVNNLVGKIISMLGEDVTVKVCEGIDAEMQMCIDAYQVAVETGLWPILASGDQ

SEQ ID NO: 29768 - protein, 85 aa, unidentified
  REGION 1..85: note = Description of Unknown:cds_NC_030656.1_cds_YP_009268774.1_59 target sequence
DALLFATIDDLPKYFDTLSCIYEFLPCAYSAYISKLAVLANGCDFFPGLKGIMLTQKSIENMELFETFNAENAAISLATRNLVYT

SEQ ID NO: 29769 - protein, 85 aa, unidentified
  REGION 1..85: note = Description of Unknown:cds_NC_030656.1_cds_YP_009268774.1_59 target sequence
KGFDTLKAPCDEIVDFINRYAAGDITIYDDSLLEECDARCFIFTALRKKWLEFFKYGDNIKKLSIPKQLVLLLEERVRISKNDID

SEQ ID NO: 29770 - protein, 85 aa, unidentified
  REGION 1..85: note = Description of Unknown:cds_NZ_WFIY01000004.1_cds_WP_155862992.1_868 target sequence
SAPQKPHLNLIVIGHVDHGKSTLVGRLLMDRGFLDEKTIKEAEEAAKKLGKESEKYAFLLDRLKEERERGVTISLTFMKFETKKY

SEQ ID NO: 29771 - protein, 85 aa, unidentified
  REGION 1..85: note = Description of Unknown:cds_NZ_WFIY01000004.1_cds_WP_155862992.1_868 target sequence
FFTIIDAPGHRDFIKNMITGASQADAAIIAVSAKKGEFEAGMSEEGQTREHIILAKTMGINQVVVAVTKMDLTEPPYSEKRYNEV

SEQ ID NO: 29772 - protein, 85 aa, unidentified
  REGION 1..85: note = Description of Unknown:cds_NZ_WFIY01000004.1_cds_WP_155862992.1_868 target sequence
KDTVSKFMKAFGYDVSKIPFVPVVSPTGENVTHRSEHMPWYNGPTLEEALDMFEVPKKPIDKPLRIPIQDVYSKSGVGTVPVGKV

SEQ ID NO: 29773 - protein, 85 aa, unidentified
  REGION 1..85: note = Description of Unknown:cds_NZ_WFIY01000004.1_cds_WP_155862992.1_868 target sequence
ESGVLKVNDIVVFMPVGKKGEVRSIETHYTRLEKAEPGDNIGFNVRGVEKKDIKRGDVAGHLDNPPTVADEFTARIIVVWHPTAI

SEQ ID NO: 29774 - protein, 85 aa, unidentified
  REGION 1..85: note = Description of Unknown:cds_NZ_WFIY01000004.1_cds_WP_155862992.1_868 target sequence
AVGYTPVLHVHTASVACKITELVQKLDPKTGKVVEDHPQFLKQGDSAIVKFKPIKPLCVEKFSDFPALGRFAIRDMGKTVGVGVI

SEQ ID NO: 29775 - protein, 84 aa, unidentified
  REGION 1..84: note = Description of Unknown:cds_NZ_WFIY01000004.1_cds_WP_155862992.1_868 target sequence
ASVACKITELVQKLDPKTGKVVEDHPQFLKQGDSAIVKFKPIKPLCVEKFSDFPALGRFAIRDMGKTVGVGVITDIKPMKVEIK

SEQ ID NO: 29776 - protein, 85 aa, unidentified
  REGION 1..85: note = Description of Unknown:cds_NZ_WFIY01000004.1_cds_WP_155862992.1_868 target sequence
LMDRGFLDEKTIKEAEEAAKKLGKESEKYAFLLDRLKEERERGVTISLTFMKFETKKYFFTIIDAPGHRDFIKNMITGASQADAA

SEQ ID NO: 29777 - protein, 85 aa, unidentified
  REGION 1..85: note = Description of Unknown:cds_NZ_WFIY01000004.1_cds_WP_155862992.1_868 target sequence
IIAVSAKKGEFEAGMSEEGQTREHIILAKTMGINQVVVAVTKMDLTEPPYSEKRYNEVKDTVSKFMKAFGYDVSKIPFVPVVSPT

SEQ ID NO: 29778 - protein, 85 aa, unidentified
  REGION 1..85: note = Description of Unknown:cds_NZ_WFIY01000004.1_cds_WP_155862992.1_868 target sequence
GENVTHRSEHMPWYNGPTLEEALDMFEVPKKPIDKPLRIPIQDVYSKSGVGTVPVGKVESGVLKVNDIVVFMPVGKKGEVRSIET

SEQ ID NO: 29779 - protein, 85 aa, unidentified
  REGION 1..85: note = Description of Unknown:cds_NZ_WFIY01000004.1_cds_WP_155862992.1_868 target sequence
HYTRLEKAEPGDNIGFNVRGVEKKDIKRGDVAGHLDNPPTVADEFTARIIVVWHPTAIAVGYTPVLHVHTASVACKITELVQKLD

SEQ ID NO: 29780 - protein, 85 aa, unidentified
  REGION 1..85: note = Description of Unknown:cds_NZ_WFIY01000004.1_cds_1266 target sequence
EFSKEELEFFLSKYQEFLKIPSISATGEGIRDASSWLKEFMEELGIKTEIVETKGHPVVYGKVNNGGSKTLLVYNHYDVQPVDPI

SEQ ID NO: 29781 - protein, 12 aa, unidentified
  REGION 1..12: note = Description of Unknown:cds_NZ_WFIY01000004.1_cds_1266 target sequence
NEWKYPPFSATI

SEQ ID NO: 29782 - protein, 85 aa, unidentified
  REGION 1..85: note = Description of Unknown:cds_NZ_WFIY01000004.1_cds_1266 target sequence
TKGRPMIVLGVKGLVYVQITVRIGERDVHSSVAPLIKNPVWELIKILNTIYDGEKVKIKGFYEDIEPLSKEVEELLDKIELDVEE

SEQ ID NO: 29783 - protein, 85 aa, unidentified
  REGION 1..85: note = Description of Unknown:cds_NZ_WFIY01000004.1_cds_1266 target sequence
YRKSLGVYYLNYKDRKEVVKALYTCPSCNIDGIFAGYIGQGSKTIVPSYAMAKMDFRLVPKQDPEKIYKELEKIVKAMGGEIVEM

SEQ ID NO: 29784 - protein, 85 aa, unidentified
  REGION 1..85: note = Description of Unknown:cds_NZ_WFIY01000004.1_cds_1266 target sequence
GLEKPVRTSPNTTVVKAMISSAIKAYSKDPAILPNAAGTQPMGLFYDLGIKEIVSAIGVGTPSSNAHAPNENVRLENFYKAIEHS

SEQ ID NO: 29785 - protein, 84 aa, unidentified
  REGION 1..84: note = Description of Unknown:cds_NZ_WFIY01000004.1_cds_1266 target sequence
TVVKAMISSAIKAYSKDPAILPNAAGTQPMGLFYDLGIKEIVSAIGVGTPSSNAHAPNENVRLENFYKAIEHSLYFYQDYESLG

SEQ ID NO: 29786 - protein, 70 aa, unidentified
  REGION 1..70: note = Description of Unknown:cds_NZ_WFIY01000004.1_cds_1266 target sequence
EGIRDASSWLKEFMEELGIKTEIVETKGHPVVYGKVNNGGSKTLLVYNHYDVQPVDPINEWKYPPFSATI

SEQ ID NO: 29787 - protein, 85 aa, unidentified
  REGION 1..85: note = Description of Unknown:cds_NZ_WFIY01000004.1_cds_1266 target sequence
TLIARLLAFSKYKGKLNFNFVFEGEEEIGSIHLNEFIQSRKEELSKSSAVIMEGAGLDTKGRPMIVLGVKGLVYVQITVRIGERD

SEQ ID NO: 29788 - protein, 85 aa, unidentified
  REGION 1..85: note = Description of Unknown:cds_NZ_WFIY01000004.1_cds_1266 target sequence
VHSSVAPLIKNPVWELIKILNTIYDGEKVKIKGFYEDIEPLSKEVEELLDKIELDVEEYRKSLGVYYLNYKDRKEVVKALYTCPS

SEQ ID NO: 29789 - protein, 85 aa, unidentified
  REGION 1..85: note = Description of Unknown:cds_NZ_WFIY01000004.1_cds_1266 target sequence
CNIDGIFAGYIGQGSKTIVPSYAMAKMDFRLVPKQDPEKIYKELEKIVKAMGGEIVEMGLEKPVRTSPNTTVVKAMISSAIKAYS

SEQ ID NO: 29790 - protein, 85 aa, unidentified
  REGION 1..85: note = Description of Unknown:cds_NZ_WFIY01000004.1_cds_WP_155863771.1_1646 target sequence
NSLLSLSLILLLLLPLSSVALVHSFTIGDPAYPSGMSFFPLTNVIYTTYVMGTVNITSLNIGNSYLPSGMFFAKGNASLQLNAMI

SEQ ID NO: 29791 - protein, 85 aa, unidentified
  REGION 1..85: note = Description of Unknown:cds_NZ_WFIY01000004.1_cds_WP_155863771.1_1646 target sequence
DGKYWAQDVALFHEINNKEFEITMIINLWNLSGPFKILKNNITTYQGLGVYLYQGPTFNVTLPLHFSLFMNATKALEFGYCINGK

SEQ ID NO: 29792 - protein, 85 aa, unidentified
  REGION 1..85: note = Description of Unknown:cds_NZ_WFIY01000004.1_cds_WP_155863771.1_1646 target sequence
KYVYQILPYFGNFQIGGLSILGLPNDLEFVWGGPGCGSQVCMSGNMSEEIYYLQQGKLVIPSSAFSVGLDTAESAYGLKVFANFE

SEQ ID NO: 29793 - protein, 85 aa, unidentified
  REGION 1..85: note = Description of Unknown:cds_NZ_WFIY01000004.1_cds_WP_155863771.1_1646 target sequence
NISSPFACVTKGINSPSVLWPIPPSIIVQSNGSIKHVRLCINGFPLSNQEVEVLVPSANLSSPIPFTSVKELGYTNSTGEITFNI

SEQ ID NO: 29794 - protein, 85 aa, unidentified
  REGION 1..85: note = Description of Unknown:cds_NZ_WFIY01000004.1_cds_WP_155863771.1_1646 target sequence
STQSLYIIYYPGNYTLSSAYDISSPLLSHLVSSMKSAYDSLVNFLKSYNFKHALSSSFSRIKYKSQSVNIDYLLLEYIGAFVVGI

SEQ ID NO: 29795 - protein, 84 aa, unidentified
  REGION 1..84: note = Description of Unknown:cds_NZ_WFIY01000004.1_cds_WP_155863771.1_1646 target sequence
NYTLSSAYDISSPLLSHLVSSMKSAYDSLVNFLKSYNFKHALSSSFSRIKYKSQSVNIDYLLLEYIGAFVVGILVSAILAKYKF

SEQ ID NO: 29796 - protein, 85 aa, unidentified
  REGION 1..85: note = Description of Unknown:cds_NZ_WFIY01000004.1_cds_WP_155863771.1_1646 target sequence
GDPAYPSGMSFFPLTNVIYTTYVMGTVNITSLNIGNSYLPSGMFFAKGNASLQLNAMIDGKYWAQDVALFHEINNKEFEITMIIN

SEQ ID NO: 29797 - protein, 85 aa, unidentified
  REGION 1..85: note = Description of Unknown:cds_NZ_WFIY01000004.1_cds_WP_155863771.1_1646 target sequence
LWNLSGPFKILKNNITTYQGLGVYLYQGPTFNVTLPLHFSLFMNATKALEFGYCINGKKYVYQILPYFGNFQIGGLSILGLPNDL

SEQ ID NO: 29798 - protein, 85 aa, unidentified
  REGION 1..85: note = Description of Unknown:cds_NZ_WFIY01000004.1_cds_WP_155863771.1_1646 target sequence
EFVWGGPGCGSQVCMSGNMSEEIYYLQQGKLVIPSSAFSVGLDTAESAYGLKVFANFENISSPFACVTKGINSPSVLWPIPPSII

SEQ ID NO: 29799 - protein, 85 aa, unidentified
  REGION 1..85: note = Description of Unknown:cds_NZ_WFIY01000004.1_cds_WP_155863771.1_1646 target sequence
VQSNGSIKHVRLCINGFPLSNQEVEVLVPSANLSSPIPFTSVKELGYTNSTGEITFNISTQSLYIIYYPGNYTLSSAYDISSPLL

SEQ ID NO: 29800 - protein, 85 aa, unidentified
  REGION 1..85: note = Description of Unknown:cds_NC_035460.1_cds_YP_009407977.1_26 target sequence
TADDASPDYQWFSPVKVDSTILGDEIYFSYAMSQIDINQSWTPNVRLLKYFKNFNIEILNKICNSEYVNPSFFQQKDERFLALND

SEQ ID NO: 29801 - protein, 85 aa, unidentified
  REGION 1..85: note = Description of Unknown:cds_NC_035460.1_cds_YP_009407977.1_26 target sequence
DLYHISTGGYGIVFRLDNYVIKFVYELNKQFSPIDTTTEYTIPKFLVNNLKGDEKKLIVCALAMGLNYNLSFLHSLYKRVLHMLV

SEQ ID NO: 29802 - protein, 85 aa, unidentified
  REGION 1..85: note = Description of Unknown:cds_NC_035460.1_cds_YP_009407977.1_26 target sequence
YLIQIMDNQKLNLHYSHKLFLKSFLEKKSELNFVKLISYFYPTVIQSNINIINNFTHIFHFFEHEKRSNFAFDRGNIIIFPLAKC

SEQ ID NO: 29803 - protein, 85 aa, unidentified
  REGION 1..85: note = Description of Unknown:cds_NC_035460.1_cds_YP_009407977.1_26 target sequence
SADKVTEHMALSFGFSSLVEYTKFLFLQMALLYIKIYELPHCDNFIHVDLKPDNILLFNETKPLTIKFKTFTFTFKESIRAALND

SEQ ID NO: 29804 - protein, 85 aa, unidentified
  REGION 1..85: note = Description of Unknown:cds_NC_035460.1_cds_YP_009407977.1_26 target sequence
FDFSKVATIQNKKVNASIKIEHNWYYDFHFFTHTLLKTYPEIEEDEEFKNALYELIMSCSKTTCEKYRLRVSILHPISFLEKFVT

SEQ ID NO: 29805 - protein, 84 aa, unidentified
  REGION 1..84: note = Description of Unknown:cds_NC_035460.1_cds_YP_009407977.1_26 target sequence
KVNASIKIEHNWYYDFHFFTHTLLKTYPEIEEDEEFKNALYELIMSCSKTTCEKYRLRVSILHPISFLEKFVTRNIFSHWLNGE

SEQ ID NO: 29806 - protein, 85 aa, unidentified
  REGION 1..85: note = Description of Unknown:cds_NC_035460.1_cds_YP_009407977.1_26 target sequence
FSYAMSQIDINQSWTPNVRLLKYFKNFNIEILNKICNSEYVNPSFFQQKDERFLALNDDLYHISTGGYGIVFRLDNYVIKFVYEL

SEQ ID NO: 29807 - protein, 85 aa, unidentified
  REGION 1..85: note = Description of Unknown:cds_NC_035460.1_cds_YP_009407977.1_26 target sequence
NKQFSPIDTTTEYTIPKFLVNNLKGDEKKLIVCALAMGLNYNLSFLHSLYKRVLHMLVYLIQIMDNQKLNLHYSHKLFLKSFLEK

SEQ ID NO: 29808 - protein, 85 aa, unidentified
  REGION 1..85: note = Description of Unknown:cds_NC_035460.1_cds_YP_009407977.1_26 target sequence
KSELNFVKLISYFYPTVIQSNINIINNFTHIFHFFEHEKRSNFAFDRGNIIIFPLAKCSADKVTEHMALSFGFSSLVEYTKFLFL

SEQ ID NO: 29809 - protein, 85 aa, unidentified
  REGION 1..85: note = Description of Unknown:cds_NC_035460.1_cds_YP_009407977.1_26 target sequence
QMALLYIKIYELPHCDNFIHVDLKPDNILLFNETKPLTIKFKTFTFTFKESIRAALNDFDFSKVATIQNKKVNASIKIEHNWYYD

SEQ ID NO: 29810 - protein, 85 aa, unidentified
  REGION 1..85: note = Description of Unknown:cds_NC_024711.1_cds_YP_009052552.1_75 target sequence
PNFDSFGFNGETSNGDGKPTDDITDLDTGKTGQLDADGNPIDDITNNGNGDGNSDSNANKDNQSSSSTGGKPNDKANDTDAEHGL

SEQ ID NO: 29811 - protein, 85 aa, unidentified
  REGION 1..85: note = Description of Unknown:cds_NC_024711.1_cds_YP_009052552.1_75 target sequence
EEGTIIEDGDNKYTVDKDGNLIDDKGNIFKAKNEVAAYLKEFEVEDTKEENTIDVKSIQELVGVSVTSEDGKPVAFDNTPQGVAS

SEQ ID NO: 29812 - protein, 85 aa, unidentified
  REGION 1..85: note = Description of Unknown:cds_NC_024711.1_cds_YP_009052552.1_75 target sequence
YIQSVIDLKRDEFAQAGVNKLFEDYPIVGDFLNYYVANGNSFEGFGELRDRSGIEVDENNVSQQEAIVREAFKEFNRRGNVDKYI

SEQ ID NO: 29813 - protein, 85 aa, unidentified
  REGION 1..85: note = Description of Unknown:cds_NC_024711.1_cds_YP_009052552.1_75 target sequence
QYLKDSNELFNVAKEELEALQKADNEMREANAKEAMRVKAEEEKQLVEFWNGVKDCIDKRQIAGYRIPETVIIERNGKQISTTPE

SEQ ID NO: 29814 - protein, 85 aa, unidentified
  REGION 1..85: note = Description of Unknown:cds_NC_024711.1_cds_YP_009052552.1_75 target sequence
DFFNYVYQVDDKGLSRYENDLMKLSPAERRDEELLKAWLKYTGKGYDSLIEMAVSDKEAKKLKLTASQRKSTKGAIKITKPDSKK

SEQ ID NO: 29815 - protein, 84 aa, unidentified
  REGION 1..84: note = Description of Unknown:cds_NC_024711.1_cds_YP_009052552.1_75 target sequence
KGLSRYENDLMKLSPAERRDEELLKAWLKYTGKGYDSLIEMAVSDKEAKKLKLTASQRKSTKGAIKITKPDSKKDALKDERFGY

SEQ ID NO: 29816 - protein, 85 aa, unidentified
  REGION 1..85: note = Description of Unknown:cds_NC_024711.1_cds_YP_009052552.1_75 target sequence
TGKTGQLDADGNPIDDITNNGNGDGNSDSNANKDNQSSSSTGGKPNDKANDTDAEHGLEEGTIIEDGDNKYTVDKDGNLIDDKGN

SEQ ID NO: 29817 - protein, 85 aa, unidentified
  REGION 1..85: note = Description of Unknown:cds_NC_024711.1_cds_YP_009052552.1_75 target sequence
IFKAKNEVAAYLKEFEVEDTKEENTIDVKSIQELVGVSVTSEDGKPVAFDNTPQGVASYIQSVIDLKRDEFAQAGVNKLFEDYPI

SEQ ID NO: 29818 - protein, 85 aa, unidentified
  REGION 1..85: note = Description of Unknown:cds_NC_024711.1_cds_YP_009052552.1_75 target sequence
VGDFLNYYVANGNSFEGFGELRDRSGIEVDENNVSQQEAIVREAFKEFNRRGNVDKYIQYLKDSNELFNVAKEELEALQKADNEM

SEQ ID NO: 29819 - protein, 85 aa, unidentified
  REGION 1..85: note = Description of Unknown:cds_NC_024711.1_cds_YP_009052552.1_75 target sequence
REANAKEAMRVKAEEEKQLVEFWNGVKDCIDKRQIAGYRIPETVIIERNGKQISTTPEDFFNYVYQVDDKGLSRYENDLMKLSPA

SEQ ID NO: 29820 - protein, 85 aa, unidentified
  REGION 1..85: note = Description of Unknown:cds_NZ_WFIY01000004.1_cds_WP_155863187.1_1119 target sequence
DKVVVLGGGAAGMSASSRVRRLNPEAEITVFEETKMVSHAPCGVPYFVEGLFNDENLFMTYTPSFFIEKRKINVKINEKVEEVDL

SEQ ID NO: 29821 - protein, 85 aa, unidentified
  REGION 1..85: note = Description of Unknown:cds_NZ_WFIY01000004.1_cds_WP_155863187.1_1119 target sequence
SSRVVKVNENGTRKNVEFDYLVITLGSKPKKVKEEGDRIFYAHHPANAVELRKALWSLNKIAIIGGGILGVEMAEALSNIGKKVI

SEQ ID NO: 29822 - protein, 85 aa, unidentified
  REGION 1..85: note = Description of Unknown:cds_NZ_WFIY01000004.1_cds_WP_155863187.1_1119 target sequence
LIHRGGYVLNKMLDEDMGKVITSSMDVELRLNESLEEIKEGGRLVITDKGKYEVDGTLIAIGVEPNVDLVKDQLKIGETGAIWVD

SEQ ID NO: 29823 - protein, 85 aa, unidentified
  REGION 1..85: note = Description of Unknown:cds_NZ_WFIY01000004.1_cds_WP_155863187.1_1119 target sequence
SHMRTSVRNVYAAGDVAESIHMVTKKPIWMPFAPVANKMGFVAGSNIAGKEMEFPGVVGTMITKYKDYFIAKTGISEAEAKRYGI

SEQ ID NO: 29824 - protein, 85 aa, unidentified
  REGION 1..85: note = Description of Unknown:cds_NZ_WFIY01000004.1_cds_WP_155863187.1_1119 target sequence
KVYSAMIKSKTRARYYPGGKDIYVKLIAEEGSNKIVGGQIIGGEEVLGRIDMLAAIIMKGFTVEETFFVEMGYLPAIATVWDPVI

SEQ ID NO: 29825 - protein, 84 aa, unidentified
  REGION 1..84: note = Description of Unknown:cds_NZ_WFIY01000004.1_cds_WP_155863187.1_1119 target sequence
RARYYPGGKDIYVKLIAEEGSNKIVGGQIIGGEEVLGRIDMLAAIIMKGFTVEETFFVEMGYLPAIATVWDPVIIATRQLMKAE

SEQ ID NO: 29826 - protein, 85 aa, unidentified
  REGION 1..85: note = Description of Unknown:cds_NZ_WFIY01000004.1_cds_WP_155863187.1_1119 target sequence
ITVFEETKMVSHAPCGVPYFVEGLFNDENLFMTYTPSFFIEKRKINVKINEKVEEVDLSSRVVKVNENGTRKNVEFDYLVITLGS

SEQ ID NO: 29827 - protein, 85 aa, unidentified
  REGION 1..85: note = Description of Unknown:cds_NZ_WFIY01000004.1_cds_WP_155863187.1_1119 target sequence
KPKKVKEEGDRIFYAHHPANAVELRKALWSLNKIAIIGGGILGVEMAEALSNIGKKVILIHRGGYVLNKMLDEDMGKVITSSMDV

SEQ ID NO: 29828 - protein, 85 aa, unidentified
  REGION 1..85: note = Description of Unknown:cds_NZ_WFIY01000004.1_cds_WP_155863187.1_1119 target sequence
ELRLNESLEEIKEGGRLVITDKGKYEVDGTLIAIGVEPNVDLVKDQLKIGETGAIWVDSHMRTSVRNVYAAGDVAESIHMVTKKP

SEQ ID NO: 29829 - protein, 85 aa, unidentified
  REGION 1..85: note = Description of Unknown:cds_NZ_WFIY01000004.1_cds_WP_155863187.1_1119 target sequence
IWMPFAPVANKMGFVAGSNIAGKEMEFPGVVGTMITKYKDYFIAKTGISEAEAKRYGIKVYSAMIKSKTRARYYPGGKDIYVKLI

SEQ ID NO: 29830 - protein, 85 aa, unidentified
  REGION 1..85: note = Description of Unknown:cds_NZ_WFIY01000004.1_cds_WP_155863238.1_1186 target sequence
IKIKRTNKASFLEYEEEHYKTLLSDLERIPDFFKYVQLINELAYREGFTFYTGNYYRSIKIDPIPRILKKEEFWKIYEGLKSRTE

SEQ ID NO: 29831 - protein, 85 aa, unidentified
  REGION 1..85: note = Description of Unknown:cds_NZ_WFIY01000004.1_cds_WP_155863238.1_1186 target sequence
AINKFLYSYYHGDKVVVPEDLIETSPYFRPEMMGFDPPKGIYVYIFGEDLVKVKGIPYILEDNVRIPSGMSYAIKAHELTERVLG

SEQ ID NO: 29832 - protein, 85 aa, unidentified
  REGION 1..85: note = Description of Unknown:cds_NZ_WFIY01000004.1_cds_WP_155863238.1_1186 target sequence
DKFSVKGNEGDGLEKLKKTLTSASDTRDPVIAILTDGTYNSAYFEHKFYSDKLDLLLVEPSDINIREGEVTVSTLEGEVHVDVIY

SEQ ID NO: 29833 - protein, 85 aa, unidentified
  REGION 1..85: note = Description of Unknown:cds_NZ_WFIY01000004.1_cds_WP_155863238.1_1186 target sequence
RRIEDLDFLTPGLMNAYLRGWVNIVNAPGTGIADDKITFCFMPQIMEELGIKEGVRQPFSFPIGTTREDIEEKIKNMVIKRREGY

SEQ ID NO: 29834 - protein, 85 aa, unidentified
  REGION 1..85: note = Description of Unknown:cds_NZ_WFIY01000004.1_cds_WP_155863238.1_1186 target sequence
GGSGTFVLHDMSEEEKKKVLNEVRKSPEEFMAQELLDFDTVISAIGDSFYQAYADLRFFVFVNDSSTSILSRVAPVGSRVTNNSS

SEQ ID NO: 29835 - protein, 84 aa, unidentified
  REGION 1..84: note = Description of Unknown:cds_NZ_WFIY01000004.1_cds_WP_155863238.1_1186 target sequence
SEEEKKKVLNEVRKSPEEFMAQELLDFDTVISAIGDSFYQAYADLRFFVFVNDSSTSILSRVAPVGSRVTNNSSGGLVKPVWIV

SEQ ID NO: 29836 - protein, 85 aa, unidentified
  REGION 1..85: note = Description of Unknown:cds_NZ_WFIY01000004.1_cds_WP_155863238.1_1186 target sequence
RIPDFFKYVQLINELAYREGFTFYTGNYYRSIKIDPIPRILKKEEFWKIYEGLKSRTEAINKFLYSYYHGDKVVVPEDLIETSPY

SEQ ID NO: 29837 - protein, 85 aa, unidentified
  REGION 1..85: note = Description of Unknown:cds_NZ_WFIY01000004.1_cds_WP_155863238.1_1186 target sequence
FRPEMMGFDPPKGIYVYIFGEDLVKVKGIPYILEDNVRIPSGMSYAIKAHELTERVLGDKFSVKGNEGDGLEKLKKTLTSASDTR

SEQ ID NO: 29838 - protein, 85 aa, unidentified
  REGION 1..85: note = Description of Unknown:cds_NZ_WFIY01000004.1_cds_WP_155863238.1_1186 target sequence
DPVIAILTDGTYNSAYFEHKFYSDKLDLLLVEPSDINIREGEVTVSTLEGEVHVDVIYRRIEDLDFLTPGLMNAYLRGWVNIVNA

SEQ ID NO: 29839 - protein, 85 aa, unidentified
  REGION 1..85: note = Description of Unknown:cds_NZ_WFIY01000004.1_cds_WP_155863238.1_1186 target sequence
PGTGIADDKITFCFMPQIMEELGIKEGVRQPFSFPIGTTREDIEEKIKNMVIKRREGYGGSGTFVLHDMSEEEKKKVLNEVRKSP

SEQ ID NO: 29840 - protein, 85 aa, unidentified
  REGION 1..85: note = Description of Unknown:cds_NZ_WFIY01000004.1_cds_WP_155864086.1_2031 target sequence
EELLDIEHSKEEREDFAGYKISPKMIFFPKNESEVVRIVKYAYTHNIPVVPWGSGSSLTGATACKDCILVDLSKMDEILEINDVD

SEQ ID NO: 29841 - protein, 85 aa, unidentified
  REGION 1..85: note = Description of Unknown:cds_NZ_WFIY01000004.1_cds_WP_155864086.1_2031 target sequence
WYVRVQPGVKLIDLYEAVESKGFFFPPDPASFFLCTVGGAISEGSGGMRGVKYGPFREWVLSLRVVLPTGEVVKVGEPLRKNRAG

SEQ ID NO: 29842 - protein, 85 aa, unidentified
  REGION 1..85: note = Description of Unknown:cds_NZ_WFIY01000004.1_cds_WP_155864086.1_2031 target sequence
YDLTHLFVGSEGTLGIITEAWLRIIPKPRKKIYTVKVLLPDFSTVADNIIGIRKARILPEFSEYIDADVIKALNRNLNAGLEESE

SEQ ID NO: 29843 - protein, 85 aa, unidentified
  REGION 1..85: note = Description of Unknown:cds_NZ_WFIY01000004.1_cds_WP_155864086.1_2031 target sequence
GGMLLISIEEDQLQDLLKVLKGKVEVLEGDEAERLYSLRSQAAIAVKAETRTFYAEDIVVPISKLPEAISKLNEIAKKHNTKFYI

SEQ ID NO: 29844 - protein, 85 aa, unidentified
  REGION 1..85: note = Description of Unknown:cds_NZ_WFIY01000004.1_cds_WP_155864086.1_2031 target sequence
ISHIGDGNLHPNIVVDDEKEMEEIFNEIAKVAIDLGGSVTGEHGVGIQKAKMMSEQIKSHNGEKVLDLMMGIKRMLDPKDILNPD

SEQ ID NO: 29845 - protein, 84 aa, unidentified
  REGION 1..84: note = Description of Unknown:cds_NZ_WFIY01000004.1_cds_WP_155864086.1_2031 target sequence
NIVVDDEKEMEEIFNEIAKVAIDLGGSVTGEHGVGIQKAKMMSEQIKSHNGEKVLDLMMGIKRMLDPKDILNPDKYVELAYKFK

SEQ ID NO: 29846 - protein, 85 aa, unidentified
  REGION 1..85: note = Description of Unknown:cds_NZ_WFIY01000004.1_cds_WP_155864086.1_2031 target sequence
FPKNESEVVRIVKYAYTHNIPVVPWGSGSSLTGATACKDCILVDLSKMDEILEINDVDWYVRVQPGVKLIDLYEAVESKGFFFPP

SEQ ID NO: 29847 - protein, 85 aa, unidentified
  REGION 1..85: note = Description of Unknown:cds_NZ_WFIY01000004.1_cds_WP_155864086.1_2031 target sequence
DPASFFLCTVGGAISEGSGGMRGVKYGPFREWVLSLRVVLPTGEVVKVGEPLRKNRAGYDLTHLFVGSEGTLGIITEAWLRIIPK

SEQ ID NO: 29848 - protein, 85 aa, unidentified
  REGION 1..85: note = Description of Unknown:cds_NZ_WFIY01000004.1_cds_WP_155864086.1_2031 target sequence
PRKKIYTVKVLLPDFSTVADNIIGIRKARILPEFSEYIDADVIKALNRNLNAGLEESEGGMLLISIEEDQLQDLLKVLKGKVEVL

SEQ ID NO: 29849 - protein, 85 aa, unidentified
  REGION 1..85: note = Description of Unknown:cds_NZ_WFIY01000004.1_cds_WP_155864086.1_2031 target sequence
EGDEAERLYSLRSQAAIAVKAETRTFYAEDIVVPISKLPEAISKLNEIAKKHNTKFYIISHIGDGNLHPNIVVDDEKEMEEIFNE

SEQ ID NO: 29850 - protein, 85 aa, unidentified
  REGION 1..85: note = Description of Unknown:cds_NC_030656.1_cds_YP_009268768.1_53 target sequence
DRYTDLVINKIPELGFTNLLYNIYSVVGLCTPLDVSKFATNCNGYVVERFDKSKSAGLVSCIPIGELLALAKNNLLKVIPEVQKP

SEQ ID NO: 29851 - protein, 85 aa, unidentified
  REGION 1..85: note = Description of Unknown:cds_NC_030656.1_cds_YP_009268768.1_53 target sequence
ITESTTLDEELEKKKELVLALKRQYPNFKDVINLPSKIPLSFYFKPQLREKVSHAIDFSQMNLNVDDLAKIGIHTGINPKVVKLQ

SEQ ID NO: 29852 - protein, 85 aa, unidentified
  REGION 1..85: note = Description of Unknown:cds_NC_030656.1_cds_YP_009268768.1_53 target sequence
IRPEIDAWMTNRSIASLVAPFAYKSEVTYLGQFNFNFMNKVPVYEKTEKFRRDLMYYTIKDAVSTATTRYVMFGFCYFSHWKCAI

SEQ ID NO: 29853 - protein, 85 aa, unidentified
  REGION 1..85: note = Description of Unknown:cds_NC_030656.1_cds_YP_009268768.1_53 target sequence
YDKENKLIAFYDSAGNNPQQFYHYENFYFYSFSDGFNLNKKHSVLEQINCDVDVMMRFFVDCFGAKKGCINYEVNQLLESECGMF

SEQ ID NO: 29854 - protein, 85 aa, unidentified
  REGION 1..85: note = Description of Unknown:cds_NC_030656.1_cds_YP_009268768.1_53 target sequence
SSLFMILCAINPPDSFRSLRQTYTFFRFLADKKMTMLKSILFNVQEQTIETTKTKSEGIKEYVRMERWTKKSIKVLEEKITSRIN

SEQ ID NO: 29855 - protein, 84 aa, unidentified
  REGION 1..84: note = Description of Unknown:cds_NC_030656.1_cds_YP_009268768.1_53 target sequence
PPDSFRSLRQTYTFFRFLADKKMTMLKSILFNVQEQTIETTKTKSEGIKEYVRMERWTKKSIKVLEEKITSRINSLLVNYEPVC

SEQ ID NO: 29856 - protein, 85 aa, unidentified
  REGION 1..85: note = Description of Unknown:cds_NC_030656.1_cds_YP_009268768.1_53 target sequence
GLCTPLDVSKFATNCNGYVVERFDKSKSAGLVSCIPIGELLALAKNNLLKVIPEVQKPITESTTLDEELEKKKELVLALKRQYPN

SEQ ID NO: 29857 - protein, 85 aa, unidentified
  REGION 1..85: note = Description of Unknown:cds_NC_030656.1_cds_YP_009268768.1_53 target sequence
FKDVINLPSKIPLSFYFKPQLREKVSHAIDFSQMNLNVDDLAKIGIHTGINPKVVKLQIRPEIDAWMTNRSIASLVAPFAYKSEV

SEQ ID NO: 29858 - protein, 85 aa, unidentified
  REGION 1..85: note = Description of Unknown:cds_NC_030656.1_cds_YP_009268768.1_53 target sequence
TYLGQFNFNFMNKVPVYEKTEKFRRDLMYYTIKDAVSTATTRYVMFGFCYFSHWKCAIYDKENKLIAFYDSAGNNPQQFYHYENF

SEQ ID NO: 29859 - protein, 85 aa, unidentified
  REGION 1..85: note = Description of Unknown:cds_NC_030656.1_cds_YP_009268768.1_53 target sequence
YFYSFSDGFNLNKKHSVLEQINCDVDVMMRFFVDCFGAKKGCINYEVNQLLESECGMFSSLFMILCAINPPDSFRSLRQTYTFFR

SEQ ID NO: 29860 - protein, 85 aa, unidentified
  REGION 1..85: note = Description of Unknown:hvTR_Q98278 target sequence
FQRVPDLEVDAVLELGDFCIQDTRGAPRESAHYVARHRRLFVNRSKDDERKLALGFFLPRLPFLTGREIHHLFQCVDTVKHVHIT

SEQ ID NO: 29861 - protein, 85 aa, unidentified
  REGION 1..85: note = Description of Unknown:hvTR_Q98278 target sequence
KKNNVIVAPYVILITMAARGYRLTETLLEMFFPELHKESSKKFRFATQIQIIQEKLGYAPGGYYVYEFECYYATVGLLLQSYHGE

SEQ ID NO: 29862 - protein, 85 aa, unidentified
  REGION 1..85: note = Description of Unknown:hvTR_Q98278 target sequence
RDPGELFDARRVSSLVKALAEITYRLYCIHLRSQSVQWSISASTLINQIVNTVLLTLQTLQARALACGEVLTCTLARDSGFPSQQ

SEQ ID NO: 29863 - protein, 85 aa, unidentified
  REGION 1..85: note = Description of Unknown:hvTR_Q98278 target sequence
FAHYADALALLVADMRRVQSCKANRHDQQVLLSFCRVGGREPALAPEARAAPVSVSASMFAARDLRARQRTRTRARAQRARLADA

SEQ ID NO: 29864 - protein, 85 aa, unidentified
  REGION 1..85: note = Description of Unknown:hvTR_Q98278 target sequence
NVPPAGRPGAALPAGTPGVLASPSALAPRDGAPRAPTWQGQRTAAVARADEPPAIALPVLAPPASEHPQTLPALAAPNTLSGKEA

SEQ ID NO: 29865 - protein, 84 aa, unidentified
  REGION 1..84: note = Description of Unknown:hvTR_Q98278 target sequence
ALPAGTPGVLASPSALAPRDGAPRAPTWQGQRTAAVARADEPPAIALPVLAPPASEHPQTLPALAAPNTLSGKEACKCRAKRRA

SEQ ID NO: 29866 - protein, 85 aa, unidentified
  REGION 1..85: note = Description of Unknown:hvTR_Q98278 target sequence
RESAHYVARHRRLFVNRSKDDERKLALGFFLPRLPFLTGREIHHLFQCVDTVKHVHITKKNNVIVAPYVILITMAARGYRLTETL

SEQ ID NO: 29867 - protein, 85 aa, unidentified
  REGION 1..85: note = Description of Unknown:hvTR_Q98278 target sequence
LEMFFPELHKESSKKFRFATQIQIIQEKLGYAPGGYYVYEFECYYATVGLLLQSYHGERDPGELFDARRVSSLVKALAEITYRLY

SEQ ID NO: 29868 - protein, 85 aa, unidentified
  REGION 1..85: note = Description of Unknown:hvTR_Q98278 target sequence
CIHLRSQSVQWSISASTLINQIVNTVLLTLQTLQARALACGEVLTCTLARDSGFPSQQFAHYADALALLVADMRRVQSCKANRHD

SEQ ID NO: 29869 - protein, 85 aa, unidentified
  REGION 1..85: note = Description of Unknown:hvTR_Q98278 target sequence
QQVLLSFCRVGGREPALAPEARAAPVSVSASMFAARDLRARQRTRTRARAQRARLADANVPPAGRPGAALPAGTPGVLASPSALA

SEQ ID NO: 29870 - protein, 85 aa, unidentified
  REGION 1..85: note = Description of Unknown:cds_NZ_WFIY01000004.1_cds_1477 target sequence
VNVLIISLIVVPIIANVFFIKGIKYSTIASGIAEVLISLLLFGKIPIICNFYVTSLTWYFIIMVSSIYLLSALFSINYLKGERTK

SEQ ID NO: 29871 - protein, 85 aa, unidentified
  REGION 1..85: note = Description of Unknown:cds_NZ_WFIY01000004.1_cds_1477 target sequence
ISERTFFLLLNFFVSSMLFTLVINNLGLMWVGIEATTISTILLVITEGTEIAMEVGWRYTIIVSAGVTFAFISIILVYYSTHSLT

SEQ ID NO: 29872 - protein, 85 aa, unidentified
  REGION 1..85: note = Description of Unknown:cds_NZ_WFIY01000004.1_cds_1477 target sequence
VSYLVMNHYSSLTLKITSAIALVGFGTKVGIFPVNTWLPDAHSEAPAPISAMFSGVLLPVALYVLYQFYKICPIFTLYSWIAVIS

SEQ ID NO: 29873 - protein, 85 aa, unidentified
  REGION 1..85: note = Description of Unknown:cds_NZ_WFIY01000004.1_cds_1477 target sequence
IVIASISMASQVFFKRLFAYSTIENMNLALLGLASGQILGAVILLISHAFGKAGAFYSSGLLIKTYESKRIEEYGLWKNKFIPYS

SEQ ID NO: 29874 - protein, 85 aa, unidentified
  REGION 1..85: note = Description of Unknown:cds_NZ_WFIY01000004.1_cds_1477 target sequence
LLLSSLAVTGAPPFGTFIGEFLILSSLIEKCVIEFVIVLIALSAAFISVNYHVSKMTFKGERDSLNEDKTLGIISLISAIISLGI

SEQ ID NO: 29875 - protein, 84 aa, unidentified
  REGION 1..84: note = Description of Unknown:cds_NZ_WFIY01000004.1_cds_1477 target sequence
PPFGTFIGEFLILSSLIEKCVIEFVIVLIALSAAFISVNYHVSKMTFKGERDSLNEDKTLGIISLISAIISLGIGIFIIAWWSL

SEQ ID NO: 29876 - protein, 85 aa, unidentified
  REGION 1..85: note = Description of Unknown:cds_NZ_WFIY01000004.1_cds_1477 target sequence
IASGIAEVLISLLLFGKIPIICNFYVTSLTWYFIIMVSSIYLLSALFSINYLKGERTKISERTFFLLLNFFVSSMLFTLVINNLG

SEQ ID NO: 29877 - protein, 85 aa, unidentified
  REGION 1..85: note = Description of Unknown:cds_NZ_WFIY01000004.1_cds_1477 target sequence
LMWVGIEATTISTILLVITEGTEIAMEVGWRYTIIVSAGVTFAFISIILVYYSTHSLTVSYLVMNHYSSLTLKITSAIALVGFGT

SEQ ID NO: 29878 - protein, 85 aa, unidentified
  REGION 1..85: note = Description of Unknown:cds_NZ_WFIY01000004.1_cds_1477 target sequence
KVGIFPVNTWLPDAHSEAPAPISAMFSGVLLPVALYVLYQFYKICPIFTLYSWIAVISIVIASISMASQVFFKRLFAYSTIENMN

SEQ ID NO: 29879 - protein, 85 aa, unidentified
  REGION 1..85: note = Description of Unknown:cds_NZ_WFIY01000004.1_cds_1477 target sequence
LALLGLASGQILGAVILLISHAFGKAGAFYSSGLLIKTYESKRIEEYGLWKNKFIPYSLLLSSLAVTGAPPFGTFIGEFLILSSL

SEQ ID NO: 29880 - protein, 85 aa, unidentified
  REGION 1..85: note = Description of Unknown:cds_NZ_WFIY01000004.1_cds_WP_155864244.1_2220 target sequence
KDLVIIGYGAAGFASLIEANELGIKPVLIGYGPIGGTCVNVGCVPSKRLLHLGEKGRDFFSSFEDTKQFVNRSRKEKYEDVLSYY

SEQ ID NO: 29881 - protein, 85 aa, unidentified
  REGION 1..85: note = Description of Unknown:cds_NZ_WFIY01000004.1_cds_WP_155864244.1_2220 target sequence
DVELIEGKAYFISPHEVKVGDKVIEGKKFIIATGSSPFIPEIPGLKDLGYWTNVEALNPDRKISSLVIIGGRAEALEFSQMYRNF

SEQ ID NO: 29882 - protein, 85 aa, unidentified
  REGION 1..85: note = Description of Unknown:cds_NZ_WFIY01000004.1_cds_WP_155864244.1_2220 target sequence
GVEVAILQRSKTLIPDWEPEISLEIQKVLEEKGIYVVTDVKVKEVKKGEGGKVVVTNKGEVEAEEILMATGRKPNVDLNLSSAGV

SEQ ID NO: 29883 - protein, 85 aa, unidentified
  REGION 1..85: note = Description of Unknown:cds_NZ_WFIY01000004.1_cds_WP_155864244.1_2220 target sequence
ELNEKGGIKVNDELQTTNPNIYAAGDVIGDKMLEALAGYEGTVAVRNAIKGEHKKIDFLSVPQVIFTRPNLARVGLNSFDGDFDS

SEQ ID NO: 29884 - protein, 85 aa, unidentified
  REGION 1..85: note = Description of Unknown:cds_NZ_WFIY01000004.1_cds_WP_155864244.1_2220 target sequence
RTVKMKDIVKAQIIDEEKGLIKMVVEKGSKRIMGVHVMAENAAEFIGEAALAIKHRMTIDDIIDTVHVFPTVAESLRIVALAFYK

SEQ ID NO: 29885 - protein, 84 aa, unidentified
  REGION 1..84: note = Description of Unknown:cds_NZ_WFIY01000004.1_cds_WP_155864244.1_2220 target sequence
AQIIDEEKGLIKMVVEKGSKRIMGVHVMAENAAEFIGEAALAIKHRMTIDDIIDTVHVFPTVAESLRIVALAFYKDVKKLSCCV

SEQ ID NO: 29886 - protein, 85 aa, unidentified
  REGION 1..85: note = Description of Unknown:cds_NZ_WFIY01000004.1_cds_WP_155864244.1_2220 target sequence
LIGYGPIGGTCVNVGCVPSKRLLHLGEKGRDFFSSFEDTKQFVNRSRKEKYEDVLSYYDVELIEGKAYFISPHEVKVGDKVIEGK

SEQ ID NO: 29887 - protein, 85 aa, unidentified
  REGION 1..85: note = Description of Unknown:cds_NZ_WFIY01000004.1_cds_WP_155864244.1_2220 target sequence
KFIIATGSSPFIPEIPGLKDLGYWTNVEALNPDRKISSLVIIGGRAEALEFSQMYRNFGVEVAILQRSKTLIPDWEPEISLEIQK

SEQ ID NO: 29888 - protein, 85 aa, unidentified
  REGION 1..85: note = Description of Unknown:cds_NZ_WFIY01000004.1_cds_WP_155864244.1_2220 target sequence
VLEEKGIYVVTDVKVKEVKKGEGGKVVVTNKGEVEAEEILMATGRKPNVDLNLSSAGVELNEKGGIKVNDELQTTNPNIYAAGDV

SEQ ID NO: 29889 - protein, 85 aa, unidentified
  REGION 1..85: note = Description of Unknown:cds_NZ_WFIY01000004.1_cds_WP_155864244.1_2220 target sequence
IGDKMLEALAGYEGTVAVRNAIKGEHKKIDFLSVPQVIFTRPNLARVGLNSFDGDFDSRTVKMKDIVKAQIIDEEKGLIKMVVEK

SEQ ID NO: 29890 - protein, 85 aa, unidentified
  REGION 1..85: note = Description of Unknown:cds_NC_030656.1_cds_YP_009268831.1_116 target sequence
TALSDLTSLKELLRLRNCLHLADAETIDRYNTIVDWAMQTYWFVDVTKLSTPCTSLDSYYTKAVSPIYLNEGTYTFSRVHFGNTF

SEQ ID NO: 29891 - protein, 85 aa, unidentified
  REGION 1..85: note = Description of Unknown:cds_NC_030656.1_cds_YP_009268831.1_116 target sequence
IFSKSSMLELETGIAPNIDDDFKEKCLNVLKLDPCCVLKFSMLCESWILEDAISTIHEPELIFNAAKENNLLVTPILRVKVLKKT

SEQ ID NO: 29892 - protein, 85 aa, unidentified
  REGION 1..85: note = Description of Unknown:cds_NC_030656.1_cds_YP_009268831.1_116 target sequence
LFEELDFKAVYLALSNIAKKDNDLSIHKAESICCSNDNDKSWRKIIDFNKTQYIKVTAFSKIKIGDNLYMPILKTNSGNRIMPKD

SEQ ID NO: 29893 - protein, 85 aa, unidentified
  REGION 1..85: note = Description of Unknown:cds_NC_030656.1_cds_YP_009268831.1_116 target sequence
VNHLVASRVKVGSFVSIKKTPEGLMLSNTVYDQSETRGNALRRILQTFGSNIFVNGKYLSRASTVDTKLLCEKLKLPICHTKEDL

SEQ ID NO: 29894 - protein, 85 aa, unidentified
  REGION 1..85: note = Description of Unknown:cds_NC_030656.1_cds_YP_009268831.1_116 target sequence
INSIKNNKKVSKQLFDKSPMEMTRLCLSYPEKELIELVNNINFETSDGIITRYSLEDTTCLENPTIETLYCNFAQFVTVFNIFAT

SEQ ID NO: 29895 - protein, 84 aa, unidentified
  REGION 1..84: note = Description of Unknown:cds_NC_030656.1_cds_YP_009268831.1_116 target sequence
SKQLFDKSPMEMTRLCLSYPEKELIELVNNINFETSDGIITRYSLEDTTCLENPTIETLYCNFAQFVTVFNIFATVYNLNSDAD

SEQ ID NO: 29896 - protein, 85 aa, unidentified
  REGION 1..85: note = Description of Unknown:cds_NC_030656.1_cds_YP_009268831.1_116 target sequence
DRYNTIVDWAMQTYWFVDVTKLSTPCTSLDSYYTKAVSPIYLNEGTYTFSRVHFGNTFIFSKSSMLELETGIAPNIDDDFKEKCL

SEQ ID NO: 29897 - protein, 85 aa, unidentified
  REGION 1..85: note = Description of Unknown:cds_NC_030656.1_cds_YP_009268831.1_116 target sequence
NVLKLDPCCVLKFSMLCESWILEDAISTIHEPELIFNAAKENNLLVTPILRVKVLKKTLFEELDFKAVYLALSNIAKKDNDLSIH

SEQ ID NO: 29898 - protein, 85 aa, unidentified
  REGION 1..85: note = Description of Unknown:cds_NC_030656.1_cds_YP_009268831.1_116 target sequence
KAESICCSNDNDKSWRKIIDFNKTQYIKVTAFSKIKIGDNLYMPILKTNSGNRIMPKDVNHLVASRVKVGSFVSIKKTPEGLMLS

SEQ ID NO: 29899 - protein, 85 aa, unidentified
  REGION 1..85: note = Description of Unknown:cds_NC_030656.1_cds_YP_009268831.1_116 target sequence
NTVYDQSETRGNALRRILQTFGSNIFVNGKYLSRASTVDTKLLCEKLKLPICHTKEDLINSIKNNKKVSKQLFDKSPMEMTRLCL

SEQ ID NO: 29900 - protein, 85 aa, unidentified
  REGION 1..85: note = Description of Unknown:cds_NZ_WFIY01000004.1_cds_WP_155862352.1_83 target sequence
QDLINEFLGPILGYTIEKYDNVVITKLINYVNYDLLESHISTQYVKARYNIKLPIEFTPLLRYLENVVPAGGKGETEEESLMGAI

SEQ ID NO: 29901 - protein, 85 aa, unidentified
  REGION 1..85: note = Description of Unknown:cds_NZ_WFIY01000004.1_cds_WP_155862352.1_83 target sequence
GEFLERFYGYSIFFDDNTSIFGRVGELKEQFNVLSTRYKFFSKEQLRKFFFFKDYSDDAFVTFTKAISYKDNKTIYVPSQIVYLT

SEQ ID NO: 29902 - protein, 85 aa, unidentified
  REGION 1..85: note = Description of Unknown:cds_NZ_WFIY01000004.1_cds_WP_155862352.1_83 target sequence
DLIRPGEDLIAYATTGGLSYHEDFEKAFLHGLLEYLERDAINISWISRISPLKIRIPEKLKRKFKVLENKDVVCLRFINEFKGLF

SEQ ID NO: 29903 - protein, 85 aa, unidentified
  REGION 1..85: note = Description of Unknown:cds_NZ_WFIY01000004.1_cds_WP_155862352.1_83 target sequence
VIGCLGFVNGFYVGGAAADITVEDALRRAIYEVYQSISSFSKVSDEEIKLAKKLNKDLLVDFGLVPLYYTYVKKEFLMDYLNNLN

SEQ ID NO: 29904 - protein, 85 aa, unidentified
  REGION 1..85: note = Description of Unknown:cds_NZ_WFIY01000004.1_cds_WP_155862352.1_83 target sequence
TVSYEELEREESLTYKDLVEELLNHGYDIIYKDFNIEKYVGKGKLIRVIIPDLTPAHIPYLPFLGHERYYNIRKIMGLKEEVELF

SEQ ID NO: 29905 - protein, 84 aa, unidentified
  REGION 1..84: note = Description of Unknown:cds_NZ_WFIY01000004.1_cds_WP_155862352.1_83 target sequence
EESLTYKDLVEELLNHGYDIIYKDFNIEKYVGKGKLIRVIIPDLTPAHIPYLPFLGHERYYNIRKIMGLKEEVELFTDEPVPFP

SEQ ID NO: 29906 - protein, 85 aa, unidentified
  REGION 1..85: note = Description of Unknown:cds_NZ_WFIY01000004.1_cds_WP_155862352.1_83 target sequence
INYVNYDLLESHISTQYVKARYNIKLPIEFTPLLRYLENVVPAGGKGETEEESLMGAIGEFLERFYGYSIFFDDNTSIFGRVGEL

SEQ ID NO: 29907 - protein, 85 aa, unidentified
  REGION 1..85: note = Description of Unknown:cds_NZ_WFIY01000004.1_cds_WP_155862352.1_83 target sequence
KEQFNVLSTRYKFFSKEQLRKFFFFKDYSDDAFVTFTKAISYKDNKTIYVPSQIVYLTDLIRPGEDLIAYATTGGLSYHEDFEKA

SEQ ID NO: 29908 - protein, 85 aa, unidentified
  REGION 1..85: note = Description of Unknown:cds_NZ_WFIY01000004.1_cds_WP_155862352.1_83 target sequence
FLHGLLEYLERDAINISWISRISPLKIRIPEKLKRKFKVLENKDVVCLRFINEFKGLFVIGCLGFVNGFYVGGAAADITVEDALR

SEQ ID NO: 29909 - protein, 85 aa, unidentified
  REGION 1..85: note = Description of Unknown:cds_NZ_WFIY01000004.1_cds_WP_155862352.1_83 target sequence
RAIYEVYQSISSFSKVSDEEIKLAKKLNKDLLVDFGLVPLYYTYVKKEFLMDYLNNLNTVSYEELEREESLTYKDLVEELLNHGY

SEQ ID NO: 29910 - protein, 85 aa, unidentified
  REGION 1..85: note = Description of Unknown:cds_NZ_WFIY01000004.1_cds_WP_155863008.1_887 target sequence
THIPRILISSDRSGSGKTLISSGLMRALSKRIKVRPFKAGPDFIDTGYHKIATRGIPSINLDLFIMGKENVINSLIKYSKGYDIS

SEQ ID NO: 29911 - protein, 85 aa, unidentified
  REGION 1..85: note = Description of Unknown:cds_NZ_WFIY01000004.1_cds_WP_155863008.1_887 target sequence
IIEGVMGLYDGIGLDYSTYQLSEITKTPIILIINCENIGSTAGAIIKGLRDYGNAKIAGVIFNKISSEGHFNYCKSSVKDVKVLG

SEQ ID NO: 29912 - protein, 85 aa, unidentified
  REGION 1..85: note = Description of Unknown:cds_NZ_WFIY01000004.1_cds_WP_155863008.1_887 target sequence
YIPFSKDVIVPSRHLGLYTTEDYNPEKAIDAISKLLEEYVDIDKIIEIANSAEDLPEVNDLETLDTEKKVAAIAYDAAFNFYYQE

SEQ ID NO: 29913 - protein, 85 aa, unidentified
  REGION 1..85: note = Description of Unknown:cds_NZ_WFIY01000004.1_cds_WP_155863008.1_887 target sequence
NIDILKRKFQIKFFSPLNNETVEDPDLIYIGGGYPELYLKELESSITSSWIKKESYKGTKILAECGGLMYTSKYIIGFDSKKYNM

SEQ ID NO: 29914 - protein, 85 aa, unidentified
  REGION 1..85: note = Description of Unknown:cds_NZ_WFIY01000004.1_cds_WP_155863008.1_887 target sequence
SNIFDLGISAKGKLTIGYTELLTLEDSILSKKGEKIRGHEFHVSFPVEVNEEKFIFKNIRGKGIKNGYDGVKVQETLATYTHFHF

SEQ ID NO: 29915 - protein, 84 aa, unidentified
  REGION 1..84: note = Description of Unknown:cds_NZ_WFIY01000004.1_cds_WP_155863008.1_887 target sequence
AKGKLTIGYTELLTLEDSILSKKGEKIRGHEFHVSFPVEVNEEKFIFKNIRGKGIKNGYDGVKVQETLATYTHFHFASLQNSAF

SEQ ID NO: 29916 - protein, 85 aa, unidentified
  REGION 1..85: note = Description of Unknown:cds_NZ_WFIY01000004.1_cds_WP_155863008.1_887 target sequence
LSKRIKVRPFKAGPDFIDTGYHKIATRGIPSINLDLFIMGKENVINSLIKYSKGYDISIIEGVMGLYDGIGLDYSTYQLSEITKT

SEQ ID NO: 29917 - protein, 85 aa, unidentified
  REGION 1..85: note = Description of Unknown:cds_NZ_WFIY01000004.1_cds_WP_155863008.1_887 target sequence
PIILIINCENIGSTAGAIIKGLRDYGNAKIAGVIFNKISSEGHFNYCKSSVKDVKVLGYIPFSKDVIVPSRHLGLYTTEDYNPEK

SEQ ID NO: 29918 - protein, 85 aa, unidentified
  REGION 1..85: note = Description of Unknown:cds_NZ_WFIY01000004.1_cds_WP_155863008.1_887 target sequence
AIDAISKLLEEYVDIDKIIEIANSAEDLPEVNDLETLDTEKKVAAIAYDAAFNFYYQENIDILKRKFQIKFFSPLNNETVEDPDL

SEQ ID NO: 29919 - protein, 85 aa, unidentified
  REGION 1..85: note = Description of Unknown:cds_NZ_WFIY01000004.1_cds_WP_155863008.1_887 target sequence
IYIGGGYPELYLKELESSITSSWIKKESYKGTKILAECGGLMYTSKYIIGFDSKKYNMSNIFDLGISAKGKLTIGYTELLTLEDS

SEQ ID NO: 29920 - protein, 85 aa, unidentified
  REGION 1..85: note = Description of Unknown:cds_NZ_WFIY01000004.1_cds_WP_155862398.1_135 target sequence
RITINTQTPPIRFRLSYKDIVEKYGELDLPLDISTLSSEDYYISVGGVARMMLGLIDKFGGKAKWVALGPGYPPYVKMNDIDVYF

SEQ ID NO: 29921 - protein, 85 aa, unidentified
  REGION 1..85: note = Description of Unknown:cds_NZ_WFIY01000004.1_cds_WP_155862398.1_135 target sequence
VDLDPKSLAGYTRFKEGIYNESHGIARYNLNGRDYIEYATYNWLSAQKLLELYSDTDVYFINDFQQLLVGGIIGPSAPAVLWYHI

SEQ ID NO: 29922 - protein, 85 aa, unidentified
  REGION 1..85: note = Description of Unknown:cds_NZ_WFIY01000004.1_cds_WP_155862398.1_135 target sequence
PFVPEMLNEKLRNFLIRSFEGFDAVIVSTKRDLEGLVRTGAKVKVKQIYPYIDPSYYNTNVSKSDVENVERKFGINDDDKVVLVV

SEQ ID NO: 29923 - protein, 85 aa, unidentified
  REGION 1..85: note = Description of Unknown:cds_NZ_WFIY01000004.1_cds_WP_155862398.1_135 target sequence
ARMDPIKSQDIAIQAIKNLDVKLVLAGDGSFTSKSLGHDKASIWSRKLRELARDLKVENKVIFTGYVSDEELMALYKRANAVALP

SEQ ID NO: 29924 - protein, 85 aa, unidentified
  REGION 1..85: note = Description of Unknown:cds_NZ_WFIY01000004.1_cds_WP_155862398.1_135 target sequence
SRIEGFGLTVCEGWLFKKPVVVSKGAGVSELVIDGGNGYTFRTYEEMAEGISKALKEEDKLGSLGYETVKKCLIDNEFDSIKAVL

SEQ ID NO: 29925 - protein, 84 aa, unidentified
  REGION 1..84: note = Description of Unknown:cds_NZ_WFIY01000004.1_cds_WP_155862398.1_135 target sequence
TVCEGWLFKKPVVVSKGAGVSELVIDGGNGYTFRTYEEMAEGISKALKEEDKLGSLGYETVKKCLIDNEFDSIKAVLEEAASEY

SEQ ID NO: 29926 - protein, 85 aa, unidentified
  REGION 1..85: note = Description of Unknown:cds_NZ_WFIY01000004.1_cds_WP_155862398.1_135 target sequence
DLPLDISTLSSEDYYISVGGVARMMLGLIDKFGGKAKWVALGPGYPPYVKMNDIDVYFVDLDPKSLAGYTRFKEGIYNESHGIAR

SEQ ID NO: 29927 - protein, 85 aa, unidentified
  REGION 1..85: note = Description of Unknown:cds_NZ_WFIY01000004.1_cds_WP_155862398.1_135 target sequence
YNLNGRDYIEYATYNWLSAQKLLELYSDTDVYFINDFQQLLVGGIIGPSAPAVLWYHIPFVPEMLNEKLRNFLIRSFEGFDAVIV

SEQ ID NO: 29928 - protein, 85 aa, unidentified
  REGION 1..85: note = Description of Unknown:cds_NZ_WFIY01000004.1_cds_WP_155862398.1_135 target sequence
STKRDLEGLVRTGAKVKVKQIYPYIDPSYYNTNVSKSDVENVERKFGINDDDKVVLVVARMDPIKSQDIAIQAIKNLDVKLVLAG

SEQ ID NO: 29929 - protein, 85 aa, unidentified
  REGION 1..85: note = Description of Unknown:cds_NZ_WFIY01000004.1_cds_WP_155862398.1_135 target sequence
DGSFTSKSLGHDKASIWSRKLRELARDLKVENKVIFTGYVSDEELMALYKRANAVALPSRIEGFGLTVCEGWLFKKPVVVSKGAG

SEQ ID NO: 29930 - protein, 85 aa, unidentified
  REGION 1..85: note = Description of Unknown:cds_NZ_WFIY01000004.1_cds_WP_155864097.1_2043 target sequence
RFDIEIYLITSTLVSAFTFIYITSIFLFSSLKKGKISLPLEVSENVTAVIPVYNEDVKLFRKVIQSVKREKIPFIVVGDGVTEPY

SEQ ID NO: 29931 - protein, 85 aa, unidentified
  REGION 1..85: note = Description of Unknown:cds_NZ_WFIY01000004.1_cds_WP_155864097.1_2043 target sequence
KSIVEGEGGIFISIKKGGKRKAIKEGIKLVNTPYVLLLDSDTILPQGGIKRLISRLQGKVVAVSPEIRLIRGKSKLAYYSSEVVH

SEQ ID NO: 29932 - protein, 85 aa, unidentified
  REGION 1..85: note = Description of Unknown:cds_NZ_WFIY01000004.1_cds_WP_155864097.1_2043 target sequence
FLRRISYKALSIFGSVLTLNGQCILAKTEVIKPFILSKEYDGVKLFRFSTILGDDRQLTNYVYKLGFKAEIVDDVIVKTKAPDSI

SEQ ID NO: 29933 - protein, 85 aa, unidentified
  REGION 1..85: note = Description of Unknown:cds_NZ_WFIY01000004.1_cds_WP_155864097.1_2043 target sequence
SAFFKQLIRWYRANNFFMIKEFFDGSIFKKGIFYSFSLVYWNSLPILIIISNLTFMEITLRHILSHPKLLDKILEDPIHAFYFII

SEQ ID NO: 29934 - protein, 85 aa, unidentified
  REGION 1..85: note = Description of Unknown:cds_NZ_WFIY01000004.1_cds_WP_155864097.1_2043 target sequence
VRRIENFMHLFYVDPSFIYRHIDPFYFEIFMLHNIFAELSSIASSIMLLVIFAHFRKNIKGFIMGLAAFPLMFFAELIAMFTMWK

SEQ ID NO: 29935 - protein, 84 aa, unidentified
  REGION 1..84: note = Description of Unknown:cds_NZ_WFIY01000004.1_cds_WP_155864097.1_2043 target sequence
HLFYVDPSFIYRHIDPFYFEIFMLHNIFAELSSIASSIMLLVIFAHFRKNIKGFIMGLAAFPLMFFAELIAMFTMWKKKWEGRQ

SEQ ID NO: 29936 - protein, 85 aa, unidentified
  REGION 1..85: note = Description of Unknown:cds_NZ_WFIY01000004.1_cds_WP_155864097.1_2043 target sequence
FSSLKKGKISLPLEVSENVTAVIPVYNEDVKLFRKVIQSVKREKIPFIVVGDGVTEPYKSIVEGEGGIFISIKKGGKRKAIKEGI

SEQ ID NO: 29937 - protein, 85 aa, unidentified
  REGION 1..85: note = Description of Unknown:cds_NZ_WFIY01000004.1_cds_WP_155864097.1_2043 target sequence
KLVNTPYVLLLDSDTILPQGGIKRLISRLQGKVVAVSPEIRLIRGKSKLAYYSSEVVHFLRRISYKALSIFGSVLTLNGQCILAK

SEQ ID NO: 29938 - protein, 85 aa, unidentified
  REGION 1..85: note = Description of Unknown:cds_NZ_WFIY01000004.1_cds_WP_155864097.1_2043 target sequence
TEVIKPFILSKEYDGVKLFRFSTILGDDRQLTNYVYKLGFKAEIVDDVIVKTKAPDSISAFFKQLIRWYRANNFFMIKEFFDGSI

SEQ ID NO: 29939 - protein, 85 aa, unidentified
  REGION 1..85: note = Description of Unknown:cds_NZ_WFIY01000004.1_cds_WP_155864097.1_2043 target sequence
FKKGIFYSFSLVYWNSLPILIIISNLTFMEITLRHILSHPKLLDKILEDPIHAFYFIIVRRIENFMHLFYVDPSFIYRHIDPFYF

SEQ ID NO: 29940 - protein, 85 aa, unidentified
  REGION 1..85: note = Description of Unknown:cds_NC_030656.1_cds_YP_009268722.1_7 target sequence
NCKEQTSAYLVESIPEGMEFLSGTVSASTFDTWLKLLSMTEKSLLIASFYWSLDDGSPNVMAIQGRTILETILKLPSKGVDVKIA

SEQ ID NO: 29941 - protein, 85 aa, unidentified
  REGION 1..85: note = Description of Unknown:cds_NC_030656.1_cds_YP_009268722.1_7 target sequence
VNKPKTSQVSPDLVKLMNQGCGVKFVDVTKLTGGILHTKFWIVDGRHIYIGSANQDWRSLTEVKEIGIVLFNNSCLAKDLTKIFY

SEQ ID NO: 29942 - protein, 85 aa, unidentified
  REGION 1..85: note = Description of Unknown:cds_NC_030656.1_cds_YP_009268722.1_7 target sequence
TYWFLTDFIPSSWSSCYETKINMITPLNTYINGVLTSIFIASSPMEFSPLSRTNDIDSLTHCIQTANKFVHVSVMNYEPVLYTDN

SEQ ID NO: 29943 - protein, 85 aa, unidentified
  REGION 1..85: note = Description of Unknown:cds_NC_030656.1_cds_YP_009268722.1_7 target sequence
GQIYWPNINDEIIKYAIEKKLEIKLLISCWERSSFSMRSFLLSLNSLRDNKKNIQVKLFIVPNIDPPIPYTRVNHTKYMVTDNTA

SEQ ID NO: 29944 - protein, 85 aa, unidentified
  REGION 1..85: note = Description of Unknown:cds_NC_030656.1_cds_YP_009268722.1_7 target sequence
YIGTSNWTGNYFTETCGVSVNIVPSDNINIRKQLEDVFQRDWNSKYSFYLTDTVDDCRCRLLKHPAGECKFIKSKINISIDDRGL

SEQ ID NO: 29945 - protein, 84 aa, unidentified
  REGION 1..84: note = Description of Unknown:cds_NC_030656.1_cds_YP_009268722.1_7 target sequence
GNYFTETCGVSVNIVPSDNINIRKQLEDVFQRDWNSKYSFYLTDTVDDCRCRLLKHPAGECKFIKSKINISIDDRGLPEYEYID

SEQ ID NO: 29946 - protein, 85 aa, unidentified
  REGION 1..85: note = Description of Unknown:cds_NC_030656.1_cds_YP_009268722.1_7 target sequence
STFDTWLKLLSMTEKSLLIASFYWSLDDGSPNVMAIQGRTILETILKLPSKGVDVKIAVNKPKTSQVSPDLVKLMNQGCGVKFVD

SEQ ID NO: 29947 - protein, 85 aa, unidentified
  REGION 1..85: note = Description of Unknown:cds_NC_030656.1_cds_YP_009268722.1_7 target sequence
VTKLTGGILHTKFWIVDGRHIYIGSANQDWRSLTEVKEIGIVLFNNSCLAKDLTKIFYTYWFLTDFIPSSWSSCYETKINMITPL

SEQ ID NO: 29948 - protein, 85 aa, unidentified
  REGION 1..85: note = Description of Unknown:cds_NC_030656.1_cds_YP_009268722.1_7 target sequence
NTYINGVLTSIFIASSPMEFSPLSRTNDIDSLTHCIQTANKFVHVSVMNYEPVLYTDNGQIYWPNINDEIIKYAIEKKLEIKLLI

SEQ ID NO: 29949 - protein, 85 aa, unidentified
  REGION 1..85: note = Description of Unknown:cds_NC_030656.1_cds_YP_009268722.1_7 target sequence
SCWERSSFSMRSFLLSLNSLRDNKKNIQVKLFIVPNIDPPIPYTRVNHTKYMVTDNTAYIGTSNWTGNYFTETCGVSVNIVPSDN

SEQ ID NO: 29950 - protein, 85 aa, unidentified
  REGION 1..85: note = Description of Unknown:cds_NC_005224.1_cds_NP_941984.1_2 target sequence
SDLTDIQEDITRHEQQLIVARQKLKDAERAVEVDPDDVNKNTLQARQQTVSALEDKLADYKRRMADAVSRKKMDTKPTDPTGIEP

SEQ ID NO: 29951 - protein, 85 aa, unidentified
  REGION 1..85: note = Description of Unknown:cds_NC_005224.1_cds_NP_941984.1_2 target sequence
DDHLKERSSLRYGNVLDVNAIDIEEPSGQTADWYTIGVYVIGFTLPIILKALYMLSTRGRQTVKENKGTRIRFKDDTSFEDINGI

SEQ ID NO: 29952 - protein, 85 aa, unidentified
  REGION 1..85: note = Description of Unknown:cds_NC_005224.1_cds_NP_941984.1_2 target sequence
RRPKHLYVSMPTAQSTMKAEELTPGRFRTIVCGLFPTQIQVRNIMSPVMGVIGFSFFVKDWSERIREFMEKECPFIKPEVKPGTP

SEQ ID NO: 29953 - protein, 85 aa, unidentified
  REGION 1..85: note = Description of Unknown:cds_NC_005224.1_cds_NP_941984.1_2 target sequence
AQEIEMLKRNKIYFMQRQDVLDKNHVADIDKLIDYAASGDPTSPDNIDSPNAPWVFACAPDRCPPTCIYVAGMAELGAFFSILQD

SEQ ID NO: 29954 - protein, 85 aa, unidentified
  REGION 1..85: note = Description of Unknown:cds_NC_005224.1_cds_NP_941984.1_2 target sequence
MRNTIMASKTVGTAEEKLKKKSSFYQSYLRRTQSMGIQLDQRIILLFMLEWGKEMVDHFHLGDDMDPELRGLAQALIDQKVKEIS

SEQ ID NO: 29955 - protein, 84 aa, unidentified
  REGION 1..84: note = Description of Unknown:cds_NC_005224.1_cds_NP_941984.1_2 target sequence
KTVGTAEEKLKKKSSFYQSYLRRTQSMGIQLDQRIILLFMLEWGKEMVDHFHLGDDMDPELRGLAQALIDQKVKEISNQEPLKI

SEQ ID NO: 29956 - protein, 85 aa, unidentified
  REGION 1..85: note = Description of Unknown:cds_NC_005224.1_cds_NP_941984.1_2 target sequence
ERAVEVDPDDVNKNTLQARQQTVSALEDKLADYKRRMADAVSRKKMDTKPTDPTGIEPDDHLKERSSLRYGNVLDVNAIDIEEPS

SEQ ID NO: 29957 - protein, 85 aa, unidentified
  REGION 1..85: note = Description of Unknown:cds_NC_005224.1_cds_NP_941984.1_2 target sequence
GQTADWYTIGVYVIGFTLPIILKALYMLSTRGRQTVKENKGTRIRFKDDTSFEDINGIRRPKHLYVSMPTAQSTMKAEELTPGRF

SEQ ID NO: 29958 - protein, 85 aa, unidentified
  REGION 1..85: note = Description of Unknown:cds_NC_005224.1_cds_NP_941984.1_2 target sequence
RTIVCGLFPTQIQVRNIMSPVMGVIGFSFFVKDWSERIREFMEKECPFIKPEVKPGTPAQEIEMLKRNKIYFMQRQDVLDKNHVA

SEQ ID NO: 29959 - protein, 85 aa, unidentified
  REGION 1..85: note = Description of Unknown:cds_NC_005224.1_cds_NP_941984.1_2 target sequence
DIDKLIDYAASGDPTSPDNIDSPNAPWVFACAPDRCPPTCIYVAGMAELGAFFSILQDMRNTIMASKTVGTAEEKLKKKSSFYQS

SEQ ID NO: 29960 - protein, 85 aa, unidentified
  REGION 1..85: note = Description of Unknown:cds_NZ_WFIY01000004.1_cds_WP_155862962.1_826 target sequence
KYVIGIDDHDSPNRGCTTHFATNLIKILYKNGIKLLDFPYLIRLNPNIPWKTRGNAAIKLIVESDKDREEIADIVWNASLDYVNN

SEQ ID NO: 29961 - protein, 85 aa, unidentified
  REGION 1..85: note = Description of Unknown:cds_NZ_WFIY01000004.1_cds_WP_155862962.1_826 target sequence
VSQGLKYGRKPGMAIVNYDSSHILENFYVKAVSDVITQSFMENYIKKTNTIVRGSRGIIGSLAAIGFEGNYTFELLTYRKEENWE

SEQ ID NO: 29962 - protein, 85 aa, unidentified
  REGION 1..85: note = Description of Unknown:cds_NZ_WFIY01000004.1_cds_WP_155862962.1_826 target sequence
KKRKIDLDSLIAFDEKFFPKVFANVDYIKKRPLILSHGGDPVFYGIRGIDPEILLKGIDMIQIKDEEIENFMIFKSNQGTDAHII

SEQ ID NO: 29963 - protein, 85 aa, unidentified
  REGION 1..85: note = Description of Unknown:cds_NZ_WFIY01000004.1_cds_WP_155862962.1_826 target sequence
KPGDKMYQTYYGKLTVKDVEIIPGGDVILRTENCLTVFVYRETGELNSMAKSLLPGDEIIVIGAIKPSSKYGKIIDAERIEILSL

SEQ ID NO: 29964 - protein, 85 aa, unidentified
  REGION 1..85: note = Description of Unknown:cds_NZ_WFIY01000004.1_cds_WP_155862962.1_826 target sequence
SNKVEYRNPKCPICGHSSESIGKNKGYRCRKCGYKFSSEKEIIEIPRDISLGTYQTRYYRHLTKPIFLEFYNNYRKETEILNKIL

SEQ ID NO: 29965 - protein, 84 aa, unidentified
  REGION 1..84: note = Description of Unknown:cds_NZ_WFIY01000004.1_cds_WP_155862962.1_826 target sequence
NPKCPICGHSSESIGKNKGYRCRKCGYKFSSEKEIIEIPRDISLGTYQTRYYRHLTKPIFLEFYNNYRKETEILNKILNVLLRN

SEQ ID NO: 29966 - protein, 85 aa, unidentified
  REGION 1..85: note = Description of Unknown:cds_NZ_WFIY01000004.1_cds_WP_155862962.1_826 target sequence
LYKNGIKLLDFPYLIRLNPNIPWKTRGNAAIKLIVESDKDREEIADIVWNASLDYVNNVSQGLKYGRKPGMAIVNYDSSHILENF

SEQ ID NO: 29967 - protein, 85 aa, unidentified
  REGION 1..85: note = Description of Unknown:cds_NZ_WFIY01000004.1_cds_WP_155862962.1_826 target sequence
YVKAVSDVITQSFMENYIKKTNTIVRGSRGIIGSLAAIGFEGNYTFELLTYRKEENWEKKRKIDLDSLIAFDEKFFPKVFANVDY

SEQ ID NO: 29968 - protein, 85 aa, unidentified
  REGION 1..85: note = Description of Unknown:cds_NZ_WFIY01000004.1_cds_WP_155862962.1_826 target sequence
IKKRPLILSHGGDPVFYGIRGIDPEILLKGIDMIQIKDEEIENFMIFKSNQGTDAHIIKPGDKMYQTYYGKLTVKDVEIIPGGDV

SEQ ID NO: 29969 - protein, 85 aa, unidentified
  REGION 1..85: note = Description of Unknown:cds_NZ_WFIY01000004.1_cds_WP_155862962.1_826 target sequence
ILRTENCLTVFVYRETGELNSMAKSLLPGDEIIVIGAIKPSSKYGKIIDAERIEILSLSNKVEYRNPKCPICGHSSESIGKNKGY

SEQ ID NO: 29970 - protein, 85 aa, unidentified
  REGION 1..85: note = Description of Unknown:cds_NZ_WFIY01000004.1_cds_WP_155863917.1_1830 target sequence
QVSIFLGFLLVFSSLLSSSWLFLQVYYIKSIKGEGIENRIDLQSQNKHKISIIIAIRNEEADTINELIQNLRNIDYDNYEVIIIS

SEQ ID NO: 29971 - protein, 85 aa, unidentified
  REGION 1..85: note = Description of Unknown:cds_NZ_WFIY01000004.1_cds_WP_155863917.1_1830 target sequence
DDPPEKFREILSNISKIPENVKIIRRSENKGRKAGALNYGVNISSGEYLVFLDVEARVENDFLIRISKYLTQFDAIAMRLRVRNK

SEQ ID NO: 29972 - protein, 85 aa, unidentified
  REGION 1..85: note = Description of Unknown:cds_NZ_WFIY01000004.1_cds_WP_155863917.1_1830 target sequence
GNCVENAYYQMTEHSMNALFLARDRKNFIIFPNGSAFAIKRRIFERIGGWKDGAITEDLEMGIRLALSNVKVKFINNIVVYTLSP

SEQ ID NO: 29973 - protein, 85 aa, unidentified
  REGION 1..85: note = Description of Unknown:cds_NZ_WFIY01000004.1_cds_WP_155863917.1_1830 target sequence
FTLSDLYFQIKRWAYGSGELFFEGLLLLRKGLRGLEGFLYVIQWGIYSVFIFFLMLISALGFIVSISPYFYFISILIYFISILVY

SEQ ID NO: 29974 - protein, 85 aa, unidentified
  REGION 1..85: note = Description of Unknown:cds_NZ_WFIY01000004.1_cds_WP_155863917.1_1830 target sequence
SINFKVNSYNLHKISSVVLWSSLLGFIQGFLHIGTKWRVTPKTNKSKDELPICIRIFGILLFIISFLELSKGLIFESLILFSLFL

SEQ ID NO: 29975 - protein, 84 aa, unidentified
  REGION 1..84: note = Description of Unknown:cds_NZ_WFIY01000004.1_cds_WP_155863917.1_1830 target sequence
SYNLHKISSVVLWSSLLGFIQGFLHIGTKWRVTPKTNKSKDELPICIRIFGILLFIISFLELSKGLIFESLILFSLFLSIAIVQ

SEQ ID NO: 29976 - protein, 85 aa, unidentified
  REGION 1..85: note = Description of Unknown:cds_NZ_WFIY01000004.1_cds_WP_155863917.1_1830 target sequence
IKSIKGEGIENRIDLQSQNKHKISIIIAIRNEEADTINELIQNLRNIDYDNYEVIIISDDPPEKFREILSNISKIPENVKIIRRS

SEQ ID NO: 29977 - protein, 85 aa, unidentified
  REGION 1..85: note = Description of Unknown:cds_NZ_WFIY01000004.1_cds_WP_155863917.1_1830 target sequence
ENKGRKAGALNYGVNISSGEYLVFLDVEARVENDFLIRISKYLTQFDAIAMRLRVRNKGNCVENAYYQMTEHSMNALFLARDRKN

SEQ ID NO: 29978 - protein, 85 aa, unidentified
  REGION 1..85: note = Description of Unknown:cds_NZ_WFIY01000004.1_cds_WP_155863917.1_1830 target sequence
FIIFPNGSAFAIKRRIFERIGGWKDGAITEDLEMGIRLALSNVKVKFINNIVVYTLSPFTLSDLYFQIKRWAYGSGELFFEGLLL

SEQ ID NO: 29979 - protein, 85 aa, unidentified
  REGION 1..85: note = Description of Unknown:cds_NZ_WFIY01000004.1_cds_WP_155863917.1_1830 target sequence
LRKGLRGLEGFLYVIQWGIYSVFIFFLMLISALGFIVSISPYFYFISILIYFISILVYSINFKVNSYNLHKISSVVLWSSLLGFI

SEQ ID NO: 29980 - protein, 85 aa, unidentified
  REGION 1..85: note = Description of Unknown:cds_NZ_WFIY01000004.1_cds_WP_155864209.1_2175 target sequence
CEFQEYTVSKYGDKPKVEGKVWKDALSEIKDSILKRKDIVITIVGAPGMGKTTLLNAVYDELKESYIIYLDLVNSTSLSSSAWNF

SEQ ID NO: 29981 - protein, 85 aa, unidentified
  REGION 1..85: note = Description of Unknown:cds_NZ_WFIY01000004.1_cds_WP_155864209.1_2175 target sequence
ILMTKLNERIRTNAFNLLYDHKEEIGYTGFARIREFPNWLRHLCLKEAWSEAYGYAERLYCMKYSKDVDGLIEFLKDLQNLGAVG

SEQ ID NO: 29982 - protein, 85 aa, unidentified
  REGION 1..85: note = Description of Unknown:cds_NZ_WFIY01000004.1_cds_WP_155864209.1_2175 target sequence
LLLDEMKAEEGLLKELHKLINEVKLPIIVTMTPDVMSKINDSALVRRLTERQIELKLNYSDKADILKAYCEEYYKELSEIEEVAS

SEQ ID NO: 29983 - protein, 85 aa, unidentified
  REGION 1..85: note = Description of Unknown:cds_NZ_WFIY01000004.1_cds_WP_155864209.1_2175 target sequence
ASSVNQLLDKARIAYKNALDKCKDEYKKEECVRRELTKAFDIGDPMEASRQLEDKIREGLLELKNELGITFVHTKGKRIDDLHVI

SEQ ID NO: 29984 - protein, 85 aa, unidentified
  REGION 1..85: note = Description of Unknown:cds_NZ_WFIY01000004.1_cds_WP_155864209.1_2175 target sequence
VDIYFETANAAYIGDIKLSNKDTLNNIENVKKLEKLDHYDDLPVKKFIVTNQTNVNIKNFKLIYVSNEDIKRIIEGDKEKRNELV

SEQ ID NO: 29985 - protein, 84 aa, unidentified
  REGION 1..84: note = Description of Unknown:cds_NZ_WFIY01000004.1_cds_WP_155864209.1_2175 target sequence
ANAAYIGDIKLSNKDTLNNIENVKKLEKLDHYDDLPVKKFIVTNQTNVNIKNFKLIYVSNEDIKRIIEGDKEKRNELVRRIMEI

SEQ ID NO: 29986 - protein, 85 aa, unidentified
  REGION 1..85: note = Description of Unknown:cds_NZ_WFIY01000004.1_cds_WP_155864209.1_2175 target sequence
EIKDSILKRKDIVITIVGAPGMGKTTLLNAVYDELKESYIIYLDLVNSTSLSSSAWNFILMTKLNERIRTNAFNLLYDHKEEIGY

SEQ ID NO: 29987 - protein, 85 aa, unidentified
  REGION 1..85: note = Description of Unknown:cds_NZ_WFIY01000004.1_cds_WP_155864209.1_2175 target sequence
TGFARIREFPNWLRHLCLKEAWSEAYGYAERLYCMKYSKDVDGLIEFLKDLQNLGAVGLLLDEMKAEEGLLKELHKLINEVKLPI

SEQ ID NO: 29988 - protein, 85 aa, unidentified
  REGION 1..85: note = Description of Unknown:cds_NZ_WFIY01000004.1_cds_WP_155864209.1_2175 target sequence
IVTMTPDVMSKINDSALVRRLTERQIELKLNYSDKADILKAYCEEYYKELSEIEEVASASSVNQLLDKARIAYKNALDKCKDEYK

SEQ ID NO: 29989 - protein, 85 aa, unidentified
  REGION 1..85: note = Description of Unknown:cds_NZ_WFIY01000004.1_cds_WP_155864209.1_2175 target sequence
KEECVRRELTKAFDIGDPMEASRQLEDKIREGLLELKNELGITFVHTKGKRIDDLHVIVDIYFETANAAYIGDIKLSNKDTLNNI

SEQ ID NO: 29990 - protein, 85 aa, unidentified
  REGION 1..85: note = Description of Unknown:cds_NC_035460.1_cds_YP_009407978.1_27 target sequence
TTFLRSILRRSKNCSQHDNIDNSNQTLVKNDSKWLGSGILSLLKKHSYIDIDTKGNNILTDTVFVARLPSNYIDIVDESEFDEGF

SEQ ID NO: 29991 - protein, 85 aa, unidentified
  REGION 1..85: note = Description of Unknown:cds_NC_035460.1_cds_YP_009407978.1_27 target sequence
QEELDEDKNVIYSWKKTQPKLDLNFLLDDDHMFDIDEYFLIKLKHGNGFNKGAIFVGNNIGFNTILCLKTSGVTGLYIPNTLHLK

SEQ ID NO: 29992 - protein, 85 aa, unidentified
  REGION 1..85: note = Description of Unknown:cds_NC_035460.1_cds_YP_009407978.1_27 target sequence
PNVRAGDYVIARSSRGISFLPQVGGESIFLIVTITPSRILTESGIFITPLSDAGSTEPAKVLISNRRRRAIELIDEVINDRKELE

SEQ ID NO: 29993 - protein, 85 aa, unidentified
  REGION 1..85: note = Description of Unknown:cds_NC_035460.1_cds_YP_009407978.1_27 target sequence
SIYLKTYMLSELIKIYKSDYSKKVQCILTDNLKKANGHVNELVDVINDKLILDKKRKTTVTSNSLSAACHRKRVIFSSQLEQINN

SEQ ID NO: 29994 - protein, 85 aa, unidentified
  REGION 1..85: note = Description of Unknown:cds_NC_035460.1_cds_YP_009407978.1_27 target sequence
FFDIVDNDINNVSNCSLEFLMIDDIKNKSYYMKKLWEKIEQNATTIDKLLEGNSDSVNNYVANLVLKSESAKTREEIINNLQALS

SEQ ID NO: 29995 - protein, 84 aa, unidentified
  REGION 1..84: note = Description of Unknown:cds_NC_035460.1_cds_YP_009407978.1_27 target sequence
DINNVSNCSLEFLMIDDIKNKSYYMKKLWEKIEQNATTIDKLLEGNSDSVNNYVANLVLKSESAKTREEIINNLQALSRIGFRI

SEQ ID NO: 29996 - protein, 85 aa, unidentified
  REGION 1..85: note = Description of Unknown:cds_NC_035460.1_cds_YP_009407978.1_27 target sequence
VKNDSKWLGSGILSLLKKHSYIDIDTKGNNILTDTVFVARLPSNYIDIVDESEFDEGFQEELDEDKNVIYSWKKTQPKLDLNFLL

SEQ ID NO: 29997 - protein, 85 aa, unidentified
  REGION 1..85: note = Description of Unknown:cds_NC_035460.1_cds_YP_009407978.1_27 target sequence
DDDHMFDIDEYFLIKLKHGNGFNKGAIFVGNNIGFNTILCLKTSGVTGLYIPNTLHLKPNVRAGDYVIARSSRGISFLPQVGGES

SEQ ID NO: 29998 - protein, 85 aa, unidentified
  REGION 1..85: note = Description of Unknown:cds_NC_035460.1_cds_YP_009407978.1_27 target sequence
IFLIVTITPSRILTESGIFITPLSDAGSTEPAKVLISNRRRRAIELIDEVINDRKELESIYLKTYMLSELIKIYKSDYSKKVQCI

SEQ ID NO: 29999 - protein, 85 aa, unidentified
  REGION 1..85: note = Description of Unknown:cds_NC_035460.1_cds_YP_009407978.1_27 target sequence
LTDNLKKANGHVNELVDVINDKLILDKKRKTTVTSNSLSAACHRKRVIFSSQLEQINNFFDIVDNDINNVSNCSLEFLMIDDIKN

SEQ ID NO: 30000 - protein, 85 aa, unidentified
  REGION 1..85: note = Description of Unknown:hvTR_Q5Y0P2 target sequence
PTDTSAFASASANPSPPPSPVLNGSRRRCFRLPSLSDSDSEGSSGAVVLGGGEAGLESGGATDQRSRVRGGLRVAGGMYFIDDEA

SEQ ID NO: 30001 - protein, 85 aa, unidentified
  REGION 1..85: note = Description of Unknown:hvTR_Q5Y0P2 target sequence
EEASELESEPETDTDFESVSEADLESVSEVTSGLGSDSDSDSDGSADEPRAGRPQPIRINIRLVSSPDRRAGVVFPESRGTRSSP

SEQ ID NO: 30002 - protein, 85 aa, unidentified
  REGION 1..85: note = Description of Unknown:hvTR_Q5Y0P2 target sequence
GTEPPPSERPDGSERRATRASEGHHPDEWSPDLPYLRRSINGMFRLLRRGINPRGAADRLRRLVRDCYLLGYTRHRLEPGMWPRM

SEQ ID NO: 30003 - protein, 85 aa, unidentified
  REGION 1..85: note = Description of Unknown:hvTR_Q5Y0P2 target sequence
LQVGGGQAARLRNVIENVVLRAGDAGEILPMPPSPREHHGVACDRSDASDAASDDDSRLGPGDDDTPDDSDATLESASDDERAAA

SEQ ID NO: 30004 - protein, 85 aa, unidentified
  REGION 1..85: note = Description of Unknown:hvTR_Q5Y0P2 target sequence
PPGAASGGPPEENAPGSVASRLRREFVAFDWTPEEGSQPWLSSVVADTSSAERRRGDSPGPCRERETGGCRRMRFSTTCPYPCGR

SEQ ID NO: 30005 - protein, 84 aa, unidentified
  REGION 1..84: note = Description of Unknown:hvTR_Q5Y0P2 target sequence
GGPPEENAPGSVASRLRREFVAFDWTPEEGSQPWLSSVVADTSSAERRRGDSPGPCRERETGGCRRMRFSTTCPYPCGRTFLRM

SEQ ID NO: 30006 - protein, 85 aa, unidentified
  REGION 1..85: note = Description of Unknown:hvTR_Q5Y0P2 target sequence
RCFRLPSLSDSDSEGSSGAVVLGGGEAGLESGGATDQRSRVRGGLRVAGGMYFIDDEAEEASELESEPETDTDFESVSEADLESV

SEQ ID NO: 30007 - protein, 85 aa, unidentified
  REGION 1..85: note = Description of Unknown:hvTR_Q5Y0P2 target sequence
SEVTSGLGSDSDSDSDGSADEPRAGRPQPIRINIRLVSSPDRRAGVVFPESRGTRSSPGTEPPPSERPDGSERRATRASEGHHPD

SEQ ID NO: 30008 - protein, 85 aa, unidentified
  REGION 1..85: note = Description of Unknown:hvTR_Q5Y0P2 target sequence
EWSPDLPYLRRSINGMFRLLRRGINPRGAADRLRRLVRDCYLLGYTRHRLEPGMWPRMLQVGGGQAARLRNVIENVVLRAGDAGE

SEQ ID NO: 30009 - protein, 85 aa, unidentified
  REGION 1..85: note = Description of Unknown:hvTR_Q5Y0P2 target sequence
ILPMPPSPREHHGVACDRSDASDAASDDDSRLGPGDDDTPDDSDATLESASDDERAAAPPGAASGGPPEENAPGSVASRLRREFV

SEQ ID NO: 30010 - protein, 85 aa, unidentified
  REGION 1..85: note = Description of Unknown:cds_NC_024711.1_cds_YP_009052502.2_21 target sequence
LYVRGLGTILVPSPLFLYVHDKGQIRNIMKRNISNTILTKDYIFSKVSQITIFSTYTGISVEDIQHCIDTGEFISSPFREDTHPS

SEQ ID NO: 30011 - protein, 85 aa, unidentified
  REGION 1..85: note = Description of Unknown:cds_NC_024711.1_cds_YP_009052502.2_21 target sequence
FGFRYDNRNKLKGRDFAGYWWGDCIDAAATVLSEIVHKQIDISIKSQFLFVLKHIAYTFRNIIYGQDKDENNDYNIARAISNVRN

SEQ ID NO: 30012 - protein, 85 aa, unidentified
  REGION 1..85: note = Description of Unknown:cds_NC_024711.1_cds_YP_009052502.2_21 target sequence
HKPIIELVTRPWNNLDAKYWGQFGVNLNFLNTHFVYPVDQFYINRSTNPIPKYFYDKDKTDLCYGYVLGQDKRGIVNVKLYFPNR

SEQ ID NO: 30013 - protein, 85 aa, unidentified
  REGION 1..85: note = Description of Unknown:cds_NC_024711.1_cds_YP_009052502.2_21 target sequence
NKKTEVKFITNSNTIEGVINLELDNYDVIIITKSTKDRLSLECYLKSINHSILYGGSTLESKTIGVVNIPHETYKLRQIEYDWLR

SEQ ID NO: 30014 - protein, 85 aa, unidentified
  REGION 1..85: note = Description of Unknown:cds_NC_024711.1_cds_YP_009052502.2_21 target sequence
SKLNRNGFLISLMDNDRTGLMEAVILKNDYDIIPIIIPKELGVKDFAELRSSYSTNVINELTQQVIKYIEENYGEETEFTWDTEE

SEQ ID NO: 30015 - protein, 84 aa, unidentified
  REGION 1..84: note = Description of Unknown:cds_NC_024711.1_cds_YP_009052502.2_21 target sequence
FLISLMDNDRTGLMEAVILKNDYDIIPIIIPKELGVKDFAELRSSYSTNVINELTQQVIKYIEENYGEETEFTWDTEESNTLPY

SEQ ID NO: 30016 - protein, 85 aa, unidentified
  REGION 1..85: note = Description of Unknown:cds_NC_024711.1_cds_YP_009052502.2_21 target sequence
IMKRNISNTILTKDYIFSKVSQITIFSTYTGISVEDIQHCIDTGEFISSPFREDTHPSFGFRYDNRNKLKGRDFAGYWWGDCIDA

SEQ ID NO: 30017 - protein, 85 aa, unidentified
  REGION 1..85: note = Description of Unknown:cds_NC_024711.1_cds_YP_009052502.2_21 target sequence
AATVLSEIVHKQIDISIKSQFLFVLKHIAYTFRNIIYGQDKDENNDYNIARAISNVRNHKPIIELVTRPWNNLDAKYWGQFGVNL

SEQ ID NO: 30018 - protein, 85 aa, unidentified
  REGION 1..85: note = Description of Unknown:cds_NC_024711.1_cds_YP_009052502.2_21 target sequence
NFLNTHFVYPVDQFYINRSTNPIPKYFYDKDKTDLCYGYVLGQDKRGIVNVKLYFPNRNKKTEVKFITNSNTIEGVINLELDNYD

SEQ ID NO: 30019 - protein, 85 aa, unidentified
  REGION 1..85: note = Description of Unknown:cds_NC_024711.1_cds_YP_009052502.2_21 target sequence
VIIITKSTKDRLSLECYLKSINHSILYGGSTLESKTIGVVNIPHETYKLRQIEYDWLRSKLNRNGFLISLMDNDRTGLMEAVILK

SEQ ID NO: 30020 - protein, 85 aa, unidentified
  REGION 1..85: note = Description of Unknown:cds_NZ_WFIY01000004.1_cds_WP_155862531.1_295 target sequence
ELPEELTKVIQLTKEQNTWRRTETINLIASENVMSPLAEAVYMSDFMSRYAEGKPYKRFYQGTKYVDEIESLAIELMNEVTPAKN

SEQ ID NO: 30021 - protein, 85 aa, unidentified
  REGION 1..85: note = Description of Unknown:cds_NZ_WFIY01000004.1_cds_WP_155862531.1_295 target sequence
SDLRPISGTIANAAVFRILANPGDKALIAPVQAGSHVSHTKFGTLGALGIQHIEMPFDKENINVDVDKAIKMIEEVKPKFVVLGG

SEQ ID NO: 30022 - protein, 85 aa, unidentified
  REGION 1..85: note = Description of Unknown:cds_NZ_WFIY01000004.1_cds_WP_155862531.1_295 target sequence
SLYLFPHPTKELAPHVHAVGAKLVYDAAHVYGLIVGKAWSNPLDEGADVMTTSTHKTFPGPQGGSILSNDDELFKEISRTIFPWF

SEQ ID NO: 30023 - protein, 85 aa, unidentified
  REGION 1..85: note = Description of Unknown:cds_NZ_WFIY01000004.1_cds_WP_155862531.1_295 target sequence
VSNHHLHRLPATAVTLIEMKYFGKDYASQITKNAKKLAEALAERGFKVVGEHLGYTKSHQVAVNVRELGGGAKIAKLLEEANIIV

SEQ ID NO: 30024 - protein, 85 aa, unidentified
  REGION 1..85: note = Description of Unknown:cds_NZ_WFIY01000004.1_cds_WP_155862531.1_295 target sequence
NKNLLPCDTPETVSNPSGLRIGVQEMTRYGMKEDEMDEIAELMKKVAIDGKDPKEVKKEVIELRKRFLEVKYTFNVDLSSYSSKS

SEQ ID NO: 30025 - protein, 84 aa, unidentified
  REGION 1..84: note = Description of Unknown:cds_NZ_WFIY01000004.1_cds_WP_155862531.1_295 target sequence
CDTPETVSNPSGLRIGVQEMTRYGMKEDEMDEIAELMKKVAIDGKDPKEVKKEVIELRKRFLEVKYTFNVDLSSYSSKSIPMII

SEQ ID NO: 30026 - protein, 85 aa, unidentified
  REGION 1..85: note = Description of Unknown:cds_NZ_WFIY01000004.1_cds_WP_155862531.1_295 target sequence
IASENVMSPLAEAVYMSDFMSRYAEGKPYKRFYQGTKYVDEIESLAIELMNEVTPAKNSDLRPISGTIANAAVFRILANPGDKAL

SEQ ID NO: 30027 - protein, 85 aa, unidentified
  REGION 1..85: note = Description of Unknown:cds_NZ_WFIY01000004.1_cds_WP_155862531.1_295 target sequence
IAPVQAGSHVSHTKFGTLGALGIQHIEMPFDKENINVDVDKAIKMIEEVKPKFVVLGGSLYLFPHPTKELAPHVHAVGAKLVYDA

SEQ ID NO: 30028 - protein, 85 aa, unidentified
  REGION 1..85: note = Description of Unknown:cds_NZ_WFIY01000004.1_cds_WP_155862531.1_295 target sequence
AHVYGLIVGKAWSNPLDEGADVMTTSTHKTFPGPQGGSILSNDDELFKEISRTIFPWFVSNHHLHRLPATAVTLIEMKYFGKDYA

SEQ ID NO: 30029 - protein, 85 aa, unidentified
  REGION 1..85: note = Description of Unknown:cds_NZ_WFIY01000004.1_cds_WP_155862531.1_295 target sequence
SQITKNAKKLAEALAERGFKVVGEHLGYTKSHQVAVNVRELGGGAKIAKLLEEANIIVNKNLLPCDTPETVSNPSGLRIGVQEMT

SEQ ID NO: 30030 - protein, 85 aa, unidentified
  REGION 1..85: note = Description of Unknown:cds_NZ_WFIY01000004.1_cds_WP_155863071.1_977 target sequence
LKSDFVAEISPEQDGKEVTVAGWVHTIRDLGGKKFILLRDRSGLGQIVIDKSNTKAFELSKDLTQESVILVKGIVKADKRAPNGV

SEQ ID NO: 30031 - protein, 85 aa, unidentified
  REGION 1..85: note = Description of Unknown:cds_NZ_WFIY01000004.1_cds_WP_155863071.1_977 target sequence
EIHANELEILSKAKAPLPLDVSGKVNADLDTRLRERLLDLRRLEMEAVIKIQSEAIRAFREYLYSQKFVEIFTPKIIATATEGGA

SEQ ID NO: 30032 - protein, 85 aa, unidentified
  REGION 1..85: note = Description of Unknown:cds_NZ_WFIY01000004.1_cds_WP_155863071.1_977 target sequence
QLFPVIYFGKEAFLAQSPQLYKELLAGTIERVFEVAPAWRAEESDTPYHLSEFLSADIEVAFADYNDIMNIVENTLDFMVNKVRN

SEQ ID NO: 30033 - protein, 85 aa, unidentified
  REGION 1..85: note = Description of Unknown:cds_NZ_WFIY01000004.1_cds_WP_155863071.1_977 target sequence
NCQKELKILNHTLPEIKKPIRRITYSEAIEILQSAGVNIKFGDDIGTPEQRILHQKLNEDLYFIIDWPSTARPFYTRRKSNNPEL

SEQ ID NO: 30034 - protein, 85 aa, unidentified
  REGION 1..85: note = Description of Unknown:cds_NZ_WFIY01000004.1_cds_WP_155863071.1_977 target sequence
SESFDLIYRWVEIASGSSRNYKREVLEEELKSRGLNIASFEFFLKWFDYGMPPHAGVGIGVQRLMMLFTGLQNVKEISLFPRDKK

SEQ ID NO: 30035 - protein, 84 aa, unidentified
  REGION 1..84: note = Description of Unknown:cds_NZ_WFIY01000004.1_cds_WP_155863071.1_977 target sequence
LIYRWVEIASGSSRNYKREVLEEELKSRGLNIASFEFFLKWFDYGMPPHAGVGIGVQRLMMLFTGLQNVKEISLFPRDKKRLVP

SEQ ID NO: 30036 - protein, 85 aa, unidentified
  REGION 1..85: note = Description of Unknown:cds_NZ_WFIY01000004.1_cds_WP_155863071.1_977 target sequence
RDLGGKKFILLRDRSGLGQIVIDKSNTKAFELSKDLTQESVILVKGIVKADKRAPNGVEIHANELEILSKAKAPLPLDVSGKVNA

SEQ ID NO: 30037 - protein, 85 aa, unidentified
  REGION 1..85: note = Description of Unknown:cds_NZ_WFIY01000004.1_cds_WP_155863071.1_977 target sequence
DLDTRLRERLLDLRRLEMEAVIKIQSEAIRAFREYLYSQKFVEIFTPKIIATATEGGAQLFPVIYFGKEAFLAQSPQLYKELLAG

SEQ ID NO: 30038 - protein, 85 aa, unidentified
  REGION 1..85: note = Description of Unknown:cds_NZ_WFIY01000004.1_cds_WP_155863071.1_977 target sequence
TIERVFEVAPAWRAEESDTPYHLSEFLSADIEVAFADYNDIMNIVENTLDFMVNKVRNNCQKELKILNHTLPEIKKPIRRITYSE

SEQ ID NO: 30039 - protein, 85 aa, unidentified
  REGION 1..85: note = Description of Unknown:cds_NZ_WFIY01000004.1_cds_WP_155863071.1_977 target sequence
AIEILQSAGVNIKFGDDIGTPEQRILHQKLNEDLYFIIDWPSTARPFYTRRKSNNPELSESFDLIYRWVEIASGSSRNYKREVLE

SEQ ID NO: 30040 - protein, 85 aa, unidentified
  REGION 1..85: note = Description of Unknown:hvTR_F5HG20 target sequence
ALDQRWDRFLVSWFGLDEAQLTAHRVFEGENGVPVEEYVAFVIFGERGFQGNMPSWARHLLDRPSLAQAIAVLRAGSDTVAKQAQ

SEQ ID NO: 30041 - protein, 85 aa, unidentified
  REGION 1..85: note = Description of Unknown:hvTR_F5HG20 target sequence
ICAAQQLLGAHVWVVVTLSRAQAADHARAIPRHVWAKYLSLPFSKACAQLCKLLALCSRFPLVTCCSKPPPSLPWLRKKWHGPLP

SEQ ID NO: 30042 - protein, 85 aa, unidentified
  REGION 1..85: note = Description of Unknown:hvTR_F5HG20 target sequence
RRPLLEVPSPTRRGVAATEDGNGLGIGAADTGLREALERVAPTVPCGNPFDAMLGSLCFLSLIKSRHVVLPACEQEGPGLVRNLG

SEQ ID NO: 30043 - protein, 85 aa, unidentified
  REGION 1..85: note = Description of Unknown:hvTR_F5HG20 target sequence
RRLLAYNVLSPCVSIPVICSRVARAALAKRARCARAVVCMECGHCLNFGRGKFHTVNFPPTNVFFSRDRKEKQFTICATTGRIYC

SEQ ID NO: 30044 - protein, 85 aa, unidentified
  REGION 1..85: note = Description of Unknown:hvTR_F5HG20 target sequence
SYCGSEHMRVYPLCDITGRGTLARVVIRAVLANNAALAIRDLDQTVSFVVPCLGTPDCEAALLKHRDVRGLLQLTSQLLEFCCGK

SEQ ID NO: 30045 - protein, 84 aa, unidentified
  REGION 1..84: note = Description of Unknown:hvTR_F5HG20 target sequence
SEHMRVYPLCDITGRGTLARVVIRAVLANNAALAIRDLDQTVSFVVPCLGTPDCEAALLKHRDVRGLLQLTSQLLEFCCGKCSS

SEQ ID NO: 30046 - protein, 85 aa, unidentified
  REGION 1..85: note = Description of Unknown:hvTR_F5HG20 target sequence
EGENGVPVEEYVAFVIFGERGFQGNMPSWARHLLDRPSLAQAIAVLRAGSDTVAKQAQICAAQQLLGAHVWVVVTLSRAQAADHA

SEQ ID NO: 30047 - protein, 85 aa, unidentified
  REGION 1..85: note = Description of Unknown:hvTR_F5HG20 target sequence
RAIPRHVWAKYLSLPFSKACAQLCKLLALCSRFPLVTCCSKPPPSLPWLRKKWHGPLPRRPLLEVPSPTRRGVAATEDGNGLGIG

SEQ ID NO: 30048 - protein, 85 aa, unidentified
  REGION 1..85: note = Description of Unknown:hvTR_F5HG20 target sequence
AADTGLREALERVAPTVPCGNPFDAMLGSLCFLSLIKSRHVVLPACEQEGPGLVRNLGRRLLAYNVLSPCVSIPVICSRVARAAL

SEQ ID NO: 30049 - protein, 85 aa, unidentified
  REGION 1..85: note = Description of Unknown:hvTR_F5HG20 target sequence
AKRARCARAVVCMECGHCLNFGRGKFHTVNFPPTNVFFSRDRKEKQFTICATTGRIYCSYCGSEHMRVYPLCDITGRGTLARVVI

SEQ ID NO: 30050 - protein, 85 aa, unidentified
  REGION 1..85: note = Description of Unknown:cds_NZ_WFIY01000004.1_cds_WP_155863203.1_1144 target sequence
QVGQELKEKGIDILRFTWVGLDGYIRAKGAYVDHVDEMVKTGIGLTKAMFSFTPMDTLSPYGSFGPEDEDVFLVPDLSTLSIFPP

SEQ ID NO: 30051 - protein, 85 aa, unidentified
  REGION 1..85: note = Description of Unknown:cds_NZ_WFIY01000004.1_cds_WP_155863203.1_1144 target sequence
SAMVICNLYSNGKPWEYDVRSTLKSTLDKIKEEYGYEFRSSFEIEFYLVKDKKPYDDARCFDPSAFYNNPVISEIAKLVDDNGID

SEQ ID NO: 30052 - protein, 85 aa, unidentified
  REGION 1..85: note = Description of Unknown:cds_NZ_WFIY01000004.1_cds_WP_155863203.1_1144 target sequence
ILRIIKEYGPGQYEFDVLHKDSLRSADEVVIFKEIARQVAIRHGIEANFMPKPFNKLAGSGLHLNLSIWKGNSNLFFDEKDKLGL

SEQ ID NO: 30053 - protein, 85 aa, unidentified
  REGION 1..85: note = Description of Unknown:cds_NZ_WFIY01000004.1_cds_WP_155863203.1_1144 target sequence
SEIAYNFIAGIIEHAKALTAIAAPTINSYKRLVPGSWAPTKIAYGYNNKSSMLRIPTPYPGMSSIDRRIEYRVPDPSTNPYLLLT

SEQ ID NO: 30054 - protein, 85 aa, unidentified
  REGION 1..85: note = Description of Unknown:cds_NZ_WFIY01000004.1_cds_WP_155863203.1_1144 target sequence
ALIQAGMDGIERGLKPPSPVNENAYYRKDIEDLPRNLREALNELNKDSILKEKIGNKIVDEFIKVKTAEVEEYESYVTDWEYEVY

SEQ ID NO: 30055 - protein, 84 aa, unidentified
  REGION 1..84: note = Description of Unknown:cds_NZ_WFIY01000004.1_cds_WP_155863203.1_1144 target sequence
AGMDGIERGLKPPSPVNENAYYRKDIEDLPRNLREALNELNKDSILKEKIGNKIVDEFIKVKTAEVEEYESYVTDWEYEVYRKL

SEQ ID NO: 30056 - protein, 85 aa, unidentified
  REGION 1..85: note = Description of Unknown:cds_NZ_WFIY01000004.1_cds_WP_155863203.1_1144 target sequence
KGAYVDHVDEMVKTGIGLTKAMFSFTPMDTLSPYGSFGPEDEDVFLVPDLSTLSIFPPSAMVICNLYSNGKPWEYDVRSTLKSTL

SEQ ID NO: 30057 - protein, 85 aa, unidentified
  REGION 1..85: note = Description of Unknown:cds_NZ_WFIY01000004.1_cds_WP_155863203.1_1144 target sequence
DKIKEEYGYEFRSSFEIEFYLVKDKKPYDDARCFDPSAFYNNPVISEIAKLVDDNGIDILRIIKEYGPGQYEFDVLHKDSLRSAD

SEQ ID NO: 30058 - protein, 85 aa, unidentified
  REGION 1..85: note = Description of Unknown:cds_NZ_WFIY01000004.1_cds_WP_155863203.1_1144 target sequence
EVVIFKEIARQVAIRHGIEANFMPKPFNKLAGSGLHLNLSIWKGNSNLFFDEKDKLGLSEIAYNFIAGIIEHAKALTAIAAPTIN

SEQ ID NO: 30059 - protein, 85 aa, unidentified
  REGION 1..85: note = Description of Unknown:cds_NZ_WFIY01000004.1_cds_WP_155863203.1_1144 target sequence
SYKRLVPGSWAPTKIAYGYNNKSSMLRIPTPYPGMSSIDRRIEYRVPDPSTNPYLLLTALIQAGMDGIERGLKPPSPVNENAYYR

SEQ ID NO: 30060 - protein, 85 aa, unidentified
  REGION 1..85: note = Description of Unknown:cds_NC_029316.1_cds_YP_009230290.1_37 target sequence
VLKNLRLNNFQPQEEYVYLTYSLKNNKKEETKILLENYRVLLQKALDWLWERTKIERKEVKKGKKVLTKIKITLPKKKEVYKTLR

SEQ ID NO: 30061 - protein, 85 aa, unidentified
  REGION 1..85: note = Description of Unknown:cds_NC_029316.1_cds_YP_009230290.1_37 target sequence
DELEKINKLASHYVDKAISDAYSILNSWRRRAEKGQASLRKPTLRKVYVRVKSTLRKVEGESVRITVRPYEYVTFSWSHKWFSRR

SEQ ID NO: 30062 - protein, 85 aa, unidentified
  REGION 1..85: note = Description of Unknown:cds_NC_029316.1_cds_YP_009230290.1_37 target sequence
VEGLELGEPVIKEDKVHLPFRYKLPWSTPLDFLSIDSNLYTLDAYDGEKFITFSMKELYSLKFGMELKRSRIQSFASKHGRKGKV

SEQ ID NO: 30063 - protein, 85 aa, unidentified
  REGION 1..85: note = Description of Unknown:cds_NC_029316.1_cds_YP_009230290.1_37 target sequence
LMRKYSHRERNRVLDYVHKFVNKLLEIYPVTIFAVEKLNKQSMFQDANDKLSKKVSRTVWRTIHRVLKYKAPLYGSFVKEVDPHL

SEQ ID NO: 30064 - protein, 85 aa, unidentified
  REGION 1..85: note = Description of Unknown:cds_NC_029316.1_cds_YP_009230290.1_37 target sequence
TSKSCPRCGWVSRKVGRTFRCERCGFTLDRQLNASLNIYLKMCGFPHILGIPRLWVGVIPLKGRRGNGFPRDSVEAQGLRIDIKY

SEQ ID NO: 30065 - protein, 84 aa, unidentified
  REGION 1..84: note = Description of Unknown:cds_NC_029316.1_cds_YP_009230290.1_37 target sequence
PRCGWVSRKVGRTFRCERCGFTLDRQLNASLNIYLKMCGFPHILGIPRLWVGVIPLKGRRGNGFPRDSVEAQGLRIDIKYYEIL

SEQ ID NO: 30066 - protein, 85 aa, unidentified
  REGION 1..85: note = Description of Unknown:cds_NC_029316.1_cds_YP_009230290.1_37 target sequence
KEETKILLENYRVLLQKALDWLWERTKIERKEVKKGKKVLTKIKITLPKKKEVYKTLRDELEKINKLASHYVDKAISDAYSILNS

SEQ ID NO: 30067 - protein, 85 aa, unidentified
  REGION 1..85: note = Description of Unknown:cds_NC_029316.1_cds_YP_009230290.1_37 target sequence
WRRRAEKGQASLRKPTLRKVYVRVKSTLRKVEGESVRITVRPYEYVTFSWSHKWFSRRVEGLELGEPVIKEDKVHLPFRYKLPWS

SEQ ID NO: 30068 - protein, 85 aa, unidentified
  REGION 1..85: note = Description of Unknown:cds_NC_029316.1_cds_YP_009230290.1_37 target sequence
TPLDFLSIDSNLYTLDAYDGEKFITFSMKELYSLKFGMELKRSRIQSFASKHGRKGKVLMRKYSHRERNRVLDYVHKFVNKLLEI

SEQ ID NO: 30069 - protein, 85 aa, unidentified
  REGION 1..85: note = Description of Unknown:cds_NC_029316.1_cds_YP_009230290.1_37 target sequence
YPVTIFAVEKLNKQSMFQDANDKLSKKVSRTVWRTIHRVLKYKAPLYGSFVKEVDPHLTSKSCPRCGWVSRKVGRTFRCERCGFT

SEQ ID NO: 30070 - protein, 85 aa, unidentified
  REGION 1..85: note = Description of Unknown:cds_NC_034400.1_cds_YP_009361846.1_3 target sequence
ASVKELEEEQQRIERELSIAQAKLTDAKSKITESDKPDDLDIKMFNERAETVSNLRQRLEETKRMIAEDIKKSVNQKPQKKGTDL

SEQ ID NO: 30071 - protein, 85 aa, unidentified
  REGION 1..85: note = Description of Unknown:cds_NC_034400.1_cds_YP_009361846.1_3 target sequence
DDDEHLTERSSLRYGNVIDLNDTDIDEPSGSSADWISIVGYLLSFSLVIILKALYMLTTRGRQTIKENKGNRIRFKDDSSFTEKG

SEQ ID NO: 30072 - protein, 85 aa, unidentified
  REGION 1..85: note = Description of Unknown:cds_NC_034400.1_cds_YP_009361846.1_3 target sequence
GVKIPKHLYVSLPTGQSSMKADEITPGRYKTAVCGLYPAEAKARKLVSPVMGVIGFNALVDKWEDTVSEMMLEPCQFIEGNLMSQ

SEQ ID NO: 30073 - protein, 85 aa, unidentified
  REGION 1..85: note = Description of Unknown:cds_NC_034400.1_cds_YP_009361846.1_3 target sequence
PEDLTNAAYFAKREEDLRGVRSPDMVQLYDLAKSAGCKLVNDITEPHAPWVFACAPDRCPPTALYVAGLAELGAFFSILQDMRNT

SEQ ID NO: 30074 - protein, 85 aa, unidentified
  REGION 1..85: note = Description of Unknown:cds_NC_034400.1_cds_YP_009361846.1_3 target sequence
IMASKLVGTAEEKLKRKSSFYQSYLRRTQSMGIQLDQRIIVIFMLSWGKMMTDHFHLGDDMDADLRKVCQSLIDEKVKQISNQDA

SEQ ID NO: 30075 - protein, 84 aa, unidentified
  REGION 1..84: note = Description of Unknown:cds_NC_034400.1_cds_YP_009361846.1_3 target sequence
KLVGTAEEKLKRKSSFYQSYLRRTQSMGIQLDQRIIVIFMLSWGKMMTDHFHLGDDMDADLRKVCQSLIDEKVKQISNQDALKL

SEQ ID NO: 30076 - protein, 85 aa, unidentified
  REGION 1..85: note = Description of Unknown:cds_NC_034400.1_cds_YP_009361846.1_3 target sequence
KSKITESDKPDDLDIKMFNERAETVSNLRQRLEETKRMIAEDIKKSVNQKPQKKGTDLDDDEHLTERSSLRYGNVIDLNDTDIDE

SEQ ID NO: 30077 - protein, 85 aa, unidentified
  REGION 1..85: note = Description of Unknown:cds_NC_034400.1_cds_YP_009361846.1_3 target sequence
PSGSSADWISIVGYLLSFSLVIILKALYMLTTRGRQTIKENKGNRIRFKDDSSFTEKGGVKIPKHLYVSLPTGQSSMKADEITPG

SEQ ID NO: 30078 - protein, 85 aa, unidentified
  REGION 1..85: note = Description of Unknown:cds_NC_034400.1_cds_YP_009361846.1_3 target sequence
RYKTAVCGLYPAEAKARKLVSPVMGVIGFNALVDKWEDTVSEMMLEPCQFIEGNLMSQPEDLTNAAYFAKREEDLRGVRSPDMVQ

SEQ ID NO: 30079 - protein, 85 aa, unidentified
  REGION 1..85: note = Description of Unknown:cds_NC_034400.1_cds_YP_009361846.1_3 target sequence
LYDLAKSAGCKLVNDITEPHAPWVFACAPDRCPPTALYVAGLAELGAFFSILQDMRNTIMASKLVGTAEEKLKRKSSFYQSYLRR

SEQ ID NO: 30080 - protein, 85 aa, unidentified
  REGION 1..85: note = Description of Unknown:cds_NC_005236.1_cds_NP_942556.1_3 target sequence
ATMEEIQREISAHEGQLVIARQKVKDAEKQYEKDPDDLNKRALHDRESVAASIQSKIDELKRQLADRIAAGKNIGQDRDPTGVEP

SEQ ID NO: 30081 - protein, 85 aa, unidentified
  REGION 1..85: note = Description of Unknown:cds_NC_005236.1_cds_NP_942556.1_3 target sequence
GDHLKERSALSYGNTLDLNSLDIDEPTGQTADWLTIIVYLTSFVVPIILKALYMLTTRGRQTSKDNKGMRIRFKDDSSYEDVNGI

SEQ ID NO: 30082 - protein, 85 aa, unidentified
  REGION 1..85: note = Description of Unknown:cds_NC_005236.1_cds_NP_942556.1_3 target sequence
RKPKHLYVSMPNAQSSMKAEEITPGRFRTAVCGLYPAQIKARNMVSPVMSVVGFLALAKDWTSRIEEWLGAPCKFMAESPIAGSL

SEQ ID NO: 30083 - protein, 85 aa, unidentified
  REGION 1..85: note = Description of Unknown:cds_NC_005236.1_cds_NP_942556.1_3 target sequence
SGNPVNRDYIRQRQGALAGMEPKEFQALRQHSKDAGCTLVEHIESPSSIWVFAGAPDRCPPTCLFVGGMAELGAFFSILQDMRNT

SEQ ID NO: 30084 - protein, 85 aa, unidentified
  REGION 1..85: note = Description of Unknown:cds_NC_005236.1_cds_NP_942556.1_3 target sequence
IMASKTVGTADEKLRKKSSFYQSYLRRTQSMGIQLDQRIIVMFMVAWGKEAVDNFHLGDDMDPELRSLAQILIDQKVKEISNQEP

SEQ ID NO: 30085 - protein, 84 aa, unidentified
  REGION 1..84: note = Description of Unknown:cds_NC_005236.1_cds_NP_942556.1_3 target sequence
KTVGTADEKLRKKSSFYQSYLRRTQSMGIQLDQRIIVMFMVAWGKEAVDNFHLGDDMDPELRSLAQILIDQKVKEISNQEPMKL

SEQ ID NO: 30086 - protein, 85 aa, unidentified
  REGION 1..85: note = Description of Unknown:cds_NC_005236.1_cds_NP_942556.1_3 target sequence
EKQYEKDPDDLNKRALHDRESVAASIQSKIDELKRQLADRIAAGKNIGQDRDPTGVEPGDHLKERSALSYGNTLDLNSLDIDEPT

SEQ ID NO: 30087 - protein, 85 aa, unidentified
  REGION 1..85: note = Description of Unknown:cds_NC_005236.1_cds_NP_942556.1_3 target sequence
GQTADWLTIIVYLTSFVVPIILKALYMLTTRGRQTSKDNKGMRIRFKDDSSYEDVNGIRKPKHLYVSMPNAQSSMKAEEITPGRF

SEQ ID NO: 30088 - protein, 85 aa, unidentified
  REGION 1..85: note = Description of Unknown:cds_NC_005236.1_cds_NP_942556.1_3 target sequence
RTAVCGLYPAQIKARNMVSPVMSVVGFLALAKDWTSRIEEWLGAPCKFMAESPIAGSLSGNPVNRDYIRQRQGALAGMEPKEFQA

SEQ ID NO: 30089 - protein, 85 aa, unidentified
  REGION 1..85: note = Description of Unknown:cds_NC_005236.1_cds_NP_942556.1_3 target sequence
LRQHSKDAGCTLVEHIESPSSIWVFAGAPDRCPPTCLFVGGMAELGAFFSILQDMRNTIMASKTVGTADEKLRKKSSFYQSYLRR

SEQ ID NO: 30090 - protein, 85 aa, unidentified
  REGION 1..85: note = Description of Unknown:cds_NZ_WFIY01000004.1_cds_WP_155863877.1_1781 target sequence
LIKDELLEILKSGRVDYVRVEFIDLLGNVRGRSLRRAEFENLILKDSGLPYPESLLMLDYTDTPIKSRYGDVLALPDPSTFIILP

SEQ ID NO: 30091 - protein, 85 aa, unidentified
  REGION 1..85: note = Description of Unknown:cds_NZ_WFIY01000004.1_cds_WP_155863877.1_1781 target sequence
YLERTARVLSYITLPDLTPSPFCSRGLLKRAIDKLEEKGLSIQVSFEPTFYLVKENGNGISPADEAKAFSPEGLMEEQSFLRDVI

SEQ ID NO: 30092 - protein, 85 aa, unidentified
  REGION 1..85: note = Description of Unknown:cds_NZ_WFIY01000004.1_cds_WP_155863877.1_1781 target sequence
KYLESVGVQVETINKHYGPAQYEIRFAEKDALSAADSLVTAREVIRDSARIYKLFSTFMPKPFSNYPSSSMDVYIKLISNDGKDI

SEQ ID NO: 30093 - protein, 85 aa, unidentified
  REGION 1..85: note = Description of Unknown:cds_NZ_WFIY01000004.1_cds_WP_155863877.1_1781 target sequence
MSNVNDPKGLGLSDIAYNFLAGIIEHIGSIMAFASPTINSYKRFRETVTPSLLGLGTERHFIIRMPSNFRDSKSVEFRLADPLAN

SEQ ID NO: 30094 - protein, 85 aa, unidentified
  REGION 1..85: note = Description of Unknown:cds_NZ_WFIY01000004.1_cds_WP_155863877.1_1781 target sequence
SYLLLSAIIYAGLDGIERKLDVEPNIELGSLPSNLEDALRKLNNDNYIKYSIGAELISSYIELKNREIESYNNYITDWEVKAYLK

SEQ ID NO: 30095 - protein, 84 aa, unidentified
  REGION 1..84: note = Description of Unknown:cds_NZ_WFIY01000004.1_cds_WP_155863877.1_1781 target sequence
LSAIIYAGLDGIERKLDVEPNIELGSLPSNLEDALRKLNNDNYIKYSIGAELISSYIELKNREIESYNNYITDWEVKAYLKAGW

SEQ ID NO: 30096 - protein, 85 aa, unidentified
  REGION 1..85: note = Description of Unknown:cds_NZ_WFIY01000004.1_cds_WP_155863877.1_1781 target sequence
NVRGRSLRRAEFENLILKDSGLPYPESLLMLDYTDTPIKSRYGDVLALPDPSTFIILPYLERTARVLSYITLPDLTPSPFCSRGL

SEQ ID NO: 30097 - protein, 85 aa, unidentified
  REGION 1..85: note = Description of Unknown:cds_NZ_WFIY01000004.1_cds_WP_155863877.1_1781 target sequence
LKRAIDKLEEKGLSIQVSFEPTFYLVKENGNGISPADEAKAFSPEGLMEEQSFLRDVIKYLESVGVQVETINKHYGPAQYEIRFA

SEQ ID NO: 30098 - protein, 85 aa, unidentified
  REGION 1..85: note = Description of Unknown:cds_NZ_WFIY01000004.1_cds_WP_155863877.1_1781 target sequence
EKDALSAADSLVTAREVIRDSARIYKLFSTFMPKPFSNYPSSSMDVYIKLISNDGKDIMSNVNDPKGLGLSDIAYNFLAGIIEHI

SEQ ID NO: 30099 - protein, 85 aa, unidentified
  REGION 1..85: note = Description of Unknown:cds_NZ_WFIY01000004.1_cds_WP_155863877.1_1781 target sequence
GSIMAFASPTINSYKRFRETVTPSLLGLGTERHFIIRMPSNFRDSKSVEFRLADPLANSYLLLSAIIYAGLDGIERKLDVEPNIE

SEQ ID NO: 30100 - protein, 85 aa, unidentified
  REGION 1..85: note = Description of Unknown:cds_NZ_WFIY01000004.1_cds_WP_155864079.1_2019 target sequence
SSQFLVHYNKEVVKKEIFEFSKNRWIALYGKTMIRYNDKEPLSISSPEEVPSLVKRFNARTVYATAGKYEKVNKENVSGDKIFAY

SEQ ID NO: 30101 - protein, 85 aa, unidentified
  REGION 1..85: note = Description of Unknown:cds_NZ_WFIY01000004.1_cds_WP_155864079.1_2019 target sequence
TPFFDIDTKIDKWEYAIKAADVIISALDKEGVSMSVYLLWSGEGIHVRINENAIPKDYDPLTAAHAIVQYVLKKVKDEIKKLSDE

SEQ ID NO: 30102 - protein, 85 aa, unidentified
  REGION 1..85: note = Description of Unknown:cds_NZ_WFIY01000004.1_cds_WP_155864079.1_2019 target sequence
SGGVLKIDELIDAKRIFTAPLSFHKELNYVAVCFSPDKLHEFNLDWAKPDSFRHEEGVFSRYVEDETEELLSKAILEYKPTHEGI

SEQ ID NO: 30103 - protein, 85 aa, unidentified
  REGION 1..85: note = Description of Unknown:cds_NZ_WFIY01000004.1_cds_WP_155864079.1_2019 target sequence
KPERRTTPQGKIGRFQVMGIVQAARYYVLYGDLPKAESFGLNRAIFYAWAKYYGKGYTPKVTGQKLPAEFRKDRILVTVAGEQVY

SEQ ID NO: 30104 - protein, 85 aa, unidentified
  REGION 1..85: note = Description of Unknown:cds_NZ_WFIY01000004.1_cds_WP_155864079.1_2019 target sequence
QNPENGLFVIGDKEQTPEDYNREIKEKINAVIPYDKAWEATVKYVSSFPKEVLQNQREFYQKVYLPIRDAFIEKVVNRKSGLDAF

SEQ ID NO: 30105 - protein, 84 aa, unidentified
  REGION 1..84: note = Description of Unknown:cds_NZ_WFIY01000004.1_cds_WP_155864079.1_2019 target sequence
ENGLFVIGDKEQTPEDYNREIKEKINAVIPYDKAWEATVKYVSSFPKEVLQNQREFYQKVYLPIRDAFIEKVVNRKSGLDAFFK

SEQ ID NO: 30106 - protein, 85 aa, unidentified
  REGION 1..85: note = Description of Unknown:cds_NZ_WFIY01000004.1_cds_WP_155864079.1_2019 target sequence
LYGKTMIRYNDKEPLSISSPEEVPSLVKRFNARTVYATAGKYEKVNKENVSGDKIFAYTPFFDIDTKIDKWEYAIKAADVIISAL

SEQ ID NO: 30107 - protein, 85 aa, unidentified
  REGION 1..85: note = Description of Unknown:cds_NZ_WFIY01000004.1_cds_WP_155864079.1_2019 target sequence
DKEGVSMSVYLLWSGEGIHVRINENAIPKDYDPLTAAHAIVQYVLKKVKDEIKKLSDESGGVLKIDELIDAKRIFTAPLSFHKEL

SEQ ID NO: 30108 - protein, 85 aa, unidentified
  REGION 1..85: note = Description of Unknown:cds_NZ_WFIY01000004.1_cds_WP_155864079.1_2019 target sequence
NYVAVCFSPDKLHEFNLDWAKPDSFRHEEGVFSRYVEDETEELLSKAILEYKPTHEGIKPERRTTPQGKIGRFQVMGIVQAARYY

SEQ ID NO: 30109 - protein, 85 aa, unidentified
  REGION 1..85: note = Description of Unknown:cds_NZ_WFIY01000004.1_cds_WP_155864079.1_2019 target sequence
VLYGDLPKAESFGLNRAIFYAWAKYYGKGYTPKVTGQKLPAEFRKDRILVTVAGEQVYQNPENGLFVIGDKEQTPEDYNREIKEK

SEQ ID NO: 30110 - protein, 85 aa, unidentified
  REGION 1..85: note = Description of Unknown:cds_NZ_WFIY01000004.1_cds_WP_155864198.1_2161 target sequence
FKHKDTLIEIKQGFNEIGGNFIIIKNKDNNVVFDQGIRFSRFKKFYNATIQPSSVTEMKKLKIIPPSDEYSKIFISHLHLDHLGV

SEQ ID NO: 30111 - protein, 85 aa, unidentified
  REGION 1..85: note = Description of Unknown:cds_NZ_WFIY01000004.1_cds_WP_155864198.1_2161 target sequence
LHSLNLGTTLYVPDTEVFEKFIGPYKESNNWTAYISPPIGVKVVDVKGNNDNVTPLSVEHSAYPAYALYYDSGDTRILYSGDLRI

SEQ ID NO: 30112 - protein, 85 aa, unidentified
  REGION 1..85: note = Description of Unknown:cds_NZ_WFIY01000004.1_cds_WP_155864198.1_2161 target sequence
SSPLRLLDPQLHERLHHKTILEEYDEKGLDTDVLLLEGTNFSSASSPIQPHYFLEQIDNIFDSHENSLIIVSVDPIDLEGLATLL

SEQ ID NO: 30113 - protein, 85 aa, unidentified
  REGION 1..85: note = Description of Unknown:cds_NZ_WFIY01000004.1_cds_WP_155864198.1_2161 target sequence
LKTKIRNRIPIFLGRRIIEMASFWNSKFQIVDKAYQIVDKAYQFRSEPIEFDIIDKEEVVKSPKDYVIFTAKGNLINLGRDLGDA

SEQ ID NO: 30114 - protein, 85 aa, unidentified
  REGION 1..85: note = Description of Unknown:cds_NZ_WFIY01000004.1_cds_WP_155864198.1_2161 target sequence
SKGSVIISTSTESKNETGEDESVEDNWYRMLGFITYRLRLSGHYYPYELKRILDTVKPKEVIPIHTEATDVMCDYVNKLGYKCAN

SEQ ID NO: 30115 - protein, 84 aa, unidentified
  REGION 1..84: note = Description of Unknown:cds_NZ_WFIY01000004.1_cds_WP_155864198.1_2161 target sequence
SVIISTSTESKNETGEDESVEDNWYRMLGFITYRLRLSGHYYPYELKRILDTVKPKEVIPIHTEATDVMCDYVNKLGYKCANTA

SEQ ID NO: 30116 - protein, 85 aa, unidentified
  REGION 1..85: note = Description of Unknown:cds_NZ_WFIY01000004.1_cds_WP_155864198.1_2161 target sequence
DNNVVFDQGIRFSRFKKFYNATIQPSSVTEMKKLKIIPPSDEYSKIFISHLHLDHLGVLHSLNLGTTLYVPDTEVFEKFIGPYKE

SEQ ID NO: 30117 - protein, 85 aa, unidentified
  REGION 1..85: note = Description of Unknown:cds_NZ_WFIY01000004.1_cds_WP_155864198.1_2161 target sequence
SNNWTAYISPPIGVKVVDVKGNNDNVTPLSVEHSAYPAYALYYDSGDTRILYSGDLRISSPLRLLDPQLHERLHHKTILEEYDEK

SEQ ID NO: 30118 - protein, 85 aa, unidentified
  REGION 1..85: note = Description of Unknown:cds_NZ_WFIY01000004.1_cds_WP_155864198.1_2161 target sequence
GLDTDVLLLEGTNFSSASSPIQPHYFLEQIDNIFDSHENSLIIVSVDPIDLEGLATLLLKTKIRNRIPIFLGRRIIEMASFWNSK

SEQ ID NO: 30119 - protein, 85 aa, unidentified
  REGION 1..85: note = Description of Unknown:cds_NZ_WFIY01000004.1_cds_WP_155864198.1_2161 target sequence
FQIVDKAYQIVDKAYQFRSEPIEFDIIDKEEVVKSPKDYVIFTAKGNLINLGRDLGDASKGSVIISTSTESKNETGEDESVEDNW

SEQ ID NO: 30120 - protein, 85 aa, unidentified
  REGION 1..85: note = Description of Unknown:cds_NC_035460.1_cds_YP_009408003.1_52 target sequence
DRYTDLVVSKIPELGFTNLLSYIYSVAGLSSSIDISKFTTNCNGYIIDKFDKSKTAGKIACVPISILLELVDKKILSMPKINNDS

SEQ ID NO: 30121 - protein, 85 aa, unidentified
  REGION 1..85: note = Description of Unknown:cds_NC_035460.1_cds_YP_009408003.1_52 target sequence
VEAEYIIKTELVKDLKKKYNTVEKVFELETSIPIEYFYKPKLREKISKAIDFSQMDLPTDALTKKGFITGVNPKIVKMKIVPEKS

SEQ ID NO: 30122 - protein, 85 aa, unidentified
  REGION 1..85: note = Description of Unknown:cds_NC_035460.1_cds_YP_009408003.1_52 target sequence
AWMSNKSIHKLVTQFAYKSEVDYIGQYDLRFLNSVPIYEKFDTFLHKHVLAYVLKEKISTSTARYVMFGFCYLSHWKCVIFDKQK

SEQ ID NO: 30123 - protein, 85 aa, unidentified
  REGION 1..85: note = Description of Unknown:cds_NC_035460.1_cds_YP_009408003.1_52 target sequence
LIVCFYDSGGNIPSNFHHYNNFYFYSFSDGYNLNEESSELDNSNGDVDVLFRFFMYSFNAKLGCINQEINQLMESECGMFISIFM

SEQ ID NO: 30124 - protein, 85 aa, unidentified
  REGION 1..85: note = Description of Unknown:cds_NC_035460.1_cds_YP_009408003.1_52 target sequence
ILCTFTPPNDFKSLRKIYTFFKFLADKKVTLFKSILFNLKDINIDVELVDNDGIREYKKMEAWTKKSITVMYNKITSSINNLLNL

SEQ ID NO: 30125 - protein, 84 aa, unidentified
  REGION 1..84: note = Description of Unknown:cds_NC_035460.1_cds_YP_009408003.1_52 target sequence
TFTPPNDFKSLRKIYTFFKFLADKKVTLFKSILFNLKDINIDVELVDNDGIREYKKMEAWTKKSITVMYNKITSSINNLLNLNE

SEQ ID NO: 30126 - protein, 85 aa, unidentified
  REGION 1..85: note = Description of Unknown:cds_NC_035460.1_cds_YP_009408003.1_52 target sequence
GLSSSIDISKFTTNCNGYIIDKFDKSKTAGKIACVPISILLELVDKKILSMPKINNDSVEAEYIIKTELVKDLKKKYNTVEKVFE

SEQ ID NO: 30127 - protein, 85 aa, unidentified
  REGION 1..85: note = Description of Unknown:cds_NC_035460.1_cds_YP_009408003.1_52 target sequence
LETSIPIEYFYKPKLREKISKAIDFSQMDLPTDALTKKGFITGVNPKIVKMKIVPEKSAWMSNKSIHKLVTQFAYKSEVDYIGQY

SEQ ID NO: 30128 - protein, 85 aa, unidentified
  REGION 1..85: note = Description of Unknown:cds_NC_035460.1_cds_YP_009408003.1_52 target sequence
DLRFLNSVPIYEKFDTFLHKHVLAYVLKEKISTSTARYVMFGFCYLSHWKCVIFDKQKLIVCFYDSGGNIPSNFHHYNNFYFYSF

SEQ ID NO: 30129 - protein, 85 aa, unidentified
  REGION 1..85: note = Description of Unknown:cds_NC_035460.1_cds_YP_009408003.1_52 target sequence
SDGYNLNEESSELDNSNGDVDVLFRFFMYSFNAKLGCINQEINQLMESECGMFISIFMILCTFTPPNDFKSLRKIYTFFKFLADK

SEQ ID NO: 30130 - protein, 85 aa, unidentified
  REGION 1..85: note = Description of Unknown:cds_NC_003466.1_cds_NP_604471.1_3 target sequence
STLQELQENITAHEQQLVTARQKLKDAEKAVEVDPDDVNKSTLQSRRAAVSTLETKLGELKRQLADLVAAQKLATKPVDPTGLEP

SEQ ID NO: 30131 - protein, 85 aa, unidentified
  REGION 1..85: note = Description of Unknown:cds_NC_003466.1_cds_NP_604471.1_3 target sequence
DDHLKEKSSLRYGNVLDVNSIDLEEPSGQTADWKAIGAYILGFAIPIILKALYMLSTRGRQTVKDNKGTRIRFKDDSSFEEVNGI

SEQ ID NO: 30132 - protein, 85 aa, unidentified
  REGION 1..85: note = Description of Unknown:cds_NC_003466.1_cds_NP_604471.1_3 target sequence
RKPKHLYVSMPTAQSTMKAEEITPGRFRTIACGLFPAQVKARNIISPVMGVIGFGFFVKDWMDRIEEFLAAECPFLPKPKVASEA

SEQ ID NO: 30133 - protein, 85 aa, unidentified
  REGION 1..85: note = Description of Unknown:cds_NC_003466.1_cds_NP_604471.1_3 target sequence
FMSTNKMYFLNRQRQVNESKVQDIIDLIDHAETESATLFTEIATPHSVWVFACAPDRCPPTALYVAGVPELGAFFSILQDMRNTI

SEQ ID NO: 30134 - protein, 85 aa, unidentified
  REGION 1..85: note = Description of Unknown:cds_NC_003466.1_cds_NP_604471.1_3 target sequence
MASKSVGTAEEKLKKKSAFYQSYLRRTQSMGIQLDQKIIILYMLSWGKEAVNHFHLGDDMDPELRQLAQSLIDTKVKEISNQEPL

SEQ ID NO: 30135 - protein, 84 aa, unidentified
  REGION 1..84: note = Description of Unknown:cds_NC_003466.1_cds_NP_604471.1_3 target sequence
KSVGTAEEKLKKKSAFYQSYLRRTQSMGIQLDQKIIILYMLSWGKEAVNHFHLGDDMDPELRQLAQSLIDTKVKEISNQEPLKL

SEQ ID NO: 30136 - protein, 85 aa, unidentified
  REGION 1..85: note = Description of Unknown:cds_NC_003466.1_cds_NP_604471.1_3 target sequence
EKAVEVDPDDVNKSTLQSRRAAVSTLETKLGELKRQLADLVAAQKLATKPVDPTGLEPDDHLKEKSSLRYGNVLDVNSIDLEEPS

SEQ ID NO: 30137 - protein, 85 aa, unidentified
  REGION 1..85: note = Description of Unknown:cds_NC_003466.1_cds_NP_604471.1_3 target sequence
GQTADWKAIGAYILGFAIPIILKALYMLSTRGRQTVKDNKGTRIRFKDDSSFEEVNGIRKPKHLYVSMPTAQSTMKAEEITPGRF

SEQ ID NO: 30138 - protein, 85 aa, unidentified
  REGION 1..85: note = Description of Unknown:cds_NC_003466.1_cds_NP_604471.1_3 target sequence
RTIACGLFPAQVKARNIISPVMGVIGFGFFVKDWMDRIEEFLAAECPFLPKPKVASEAFMSTNKMYFLNRQRQVNESKVQDIIDL

SEQ ID NO: 30139 - protein, 85 aa, unidentified
  REGION 1..85: note = Description of Unknown:cds_NC_003466.1_cds_NP_604471.1_3 target sequence
IDHAETESATLFTEIATPHSVWVFACAPDRCPPTALYVAGVPELGAFFSILQDMRNTIMASKSVGTAEEKLKKKSAFYQSYLRRT

SEQ ID NO: 30140 - protein, 85 aa, unidentified
  REGION 1..85: note = Description of Unknown:cds_NZ_WFIY01000004.1_cds_WP_155864175.1_2133 target sequence
NGQLLGVTRETYAGYSIRAYDKGILYFSSSSDPENLELKKIQGEGWEELEDEEVFSGKYEVKQIKPFDLVPIDEKIKYFKDLYER

SEQ ID NO: 30141 - protein, 85 aa, unidentified
  REGION 1..85: note = Description of Unknown:cds_NZ_WFIY01000004.1_cds_WP_155864175.1_2133 target sequence
VKSLDIKSKLVNFNILYSESVEEKRIMFKDGSKVEGFVPRINVVYSFVLKYMDKTVTVHSDEFGASGGLELLDSWKIGDKLEEKM

SEQ ID NO: 30142 - protein, 85 aa, unidentified
  REGION 1..85: note = Description of Unknown:cds_NZ_WFIY01000004.1_cds_WP_155864175.1_2133 target sequence
KEVDRVLTKGKTPREGRTDIVLSSLLAGIMAHESVGHPFEADRVLGREGAQAGLSYLKDINTRKIGSNAVSVIDDPTLPNSNGFF

SEQ ID NO: 30143 - protein, 85 aa, unidentified
  REGION 1..85: note = Description of Unknown:cds_NZ_WFIY01000004.1_cds_WP_155864175.1_2133 target sequence
LIDDEGVKARAKYLIKDGEINELLQDRFSSPKFKTKSNGSARAMSFDREPIIRMSNTFFQPGDMSFKELIEDVKEGVYFKSYMEW

SEQ ID NO: 30144 - protein, 85 aa, unidentified
  REGION 1..85: note = Description of Unknown:cds_NZ_WFIY01000004.1_cds_WP_155864175.1_2133 target sequence
NIDDMRLGERYVGLEAYEIKNREIGDPLLFPVLEGKTTEFLPAVDAADRELKFYAGICGKGDPDQAIPVWLGGPDLRLRNVRVKV

SEQ ID NO: 30145 - protein, 84 aa, unidentified
  REGION 1..84: note = Description of Unknown:cds_NZ_WFIY01000004.1_cds_WP_155864175.1_2133 target sequence
DDMRLGERYVGLEAYEIKNREIGDPLLFPVLEGKTTEFLPAVDAADRELKFYAGICGKGDPDQAIPVWLGGPDLRLRNVRVKVM

SEQ ID NO: 30146 - protein, 85 aa, unidentified
  REGION 1..85: note = Description of Unknown:cds_NZ_WFIY01000004.1_cds_WP_155864175.1_2133 target sequence
SSSSDPENLELKKIQGEGWEELEDEEVFSGKYEVKQIKPFDLVPIDEKIKYFKDLYERVKSLDIKSKLVNFNILYSESVEEKRIM

SEQ ID NO: 30147 - protein, 85 aa, unidentified
  REGION 1..85: note = Description of Unknown:cds_NZ_WFIY01000004.1_cds_WP_155864175.1_2133 target sequence
FKDGSKVEGFVPRINVVYSFVLKYMDKTVTVHSDEFGASGGLELLDSWKIGDKLEEKMKEVDRVLTKGKTPREGRTDIVLSSLLA

SEQ ID NO: 30148 - protein, 85 aa, unidentified
  REGION 1..85: note = Description of Unknown:cds_NZ_WFIY01000004.1_cds_WP_155864175.1_2133 target sequence
GIMAHESVGHPFEADRVLGREGAQAGLSYLKDINTRKIGSNAVSVIDDPTLPNSNGFFLIDDEGVKARAKYLIKDGEINELLQDR

SEQ ID NO: 30149 - protein, 85 aa, unidentified
  REGION 1..85: note = Description of Unknown:cds_NZ_WFIY01000004.1_cds_WP_155864175.1_2133 target sequence
FSSPKFKTKSNGSARAMSFDREPIIRMSNTFFQPGDMSFKELIEDVKEGVYFKSYMEWNIDDMRLGERYVGLEAYEIKNREIGDP

SEQ ID NO: 30150 - protein, 85 aa, unidentified
  REGION 1..85: note = Description of Unknown:cds_NZ_WFIY01000004.1_cds_WP_155864186.1_2146 target sequence
SSILCSKLHSAVEYGNLLQVKMLLALHCNPNVKDKSGYAPLHYAVKFNYIDLAKILLDHGADPNIKDKLGNTPLHYAIEKGNLEI

SEQ ID NO: 30151 - protein, 85 aa, unidentified
  REGION 1..85: note = Description of Unknown:cds_NZ_WFIY01000004.1_cds_WP_155864186.1_2146 target sequence
AELLIRHGADFNVIDNEGNTLLHYAANNGHPGVVELLLERGVDPKAENVLGRVPLHVAAGNGSIRVVQLFIAHGVNPNVKDKYGI

SEQ ID NO: 30152 - protein, 85 aa, unidentified
  REGION 1..85: note = Description of Unknown:cds_NZ_WFIY01000004.1_cds_WP_155864186.1_2146 target sequence
SPLHEASKNGHADVVEFLLSRGADPNIKDKLGNTPLHYACEKGFADVVEVLLKNNANPNLKGDQDKTPLHFAAEKGNSKIVEILL

SEQ ID NO: 30153 - protein, 85 aa, unidentified
  REGION 1..85: note = Description of Unknown:cds_NZ_WFIY01000004.1_cds_WP_155864186.1_2146 target sequence
KYNANPNVKDRFSKAPLHYSAINGHLEVTKALLKHNADPDVKDRVGNTPLHQSSERGHVEIVKILLSHGADINIRGEQGRYPIHF

SEQ ID NO: 30154 - protein, 85 aa, unidentified
  REGION 1..85: note = Description of Unknown:cds_NZ_WFIY01000004.1_cds_WP_155864186.1_2146 target sequence
AAKNGHASVVKYLLEKGADPNAKDDEGKTPLHYASESDRIDVVKVLLEYGADPNIKDKFGKSPLRYASKKGNSEIAKLLVSYATK

SEQ ID NO: 30155 - protein, 84 aa, unidentified
  REGION 1..84: note = Description of Unknown:cds_NZ_WFIY01000004.1_cds_WP_155864186.1_2146 target sequence
KNGHASVVKYLLEKGADPNAKDDEGKTPLHYASESDRIDVVKVLLEYGADPNIKDKFGKSPLRYASKKGNSEIAKLLVSYATKE

SEQ ID NO: 30156 - protein, 85 aa, unidentified
  REGION 1..85: note = Description of Unknown:cds_NZ_WFIY01000004.1_cds_WP_155864186.1_2146 target sequence
CNPNVKDKSGYAPLHYAVKFNYIDLAKILLDHGADPNIKDKLGNTPLHYAIEKGNLEIAELLIRHGADFNVIDNEGNTLLHYAAN

SEQ ID NO: 30157 - protein, 85 aa, unidentified
  REGION 1..85: note = Description of Unknown:cds_NZ_WFIY01000004.1_cds_WP_155864186.1_2146 target sequence
NGHPGVVELLLERGVDPKAENVLGRVPLHVAAGNGSIRVVQLFIAHGVNPNVKDKYGISPLHEASKNGHADVVEFLLSRGADPNI

SEQ ID NO: 30158 - protein, 85 aa, unidentified
  REGION 1..85: note = Description of Unknown:cds_NZ_WFIY01000004.1_cds_WP_155864186.1_2146 target sequence
KDKLGNTPLHYACEKGFADVVEVLLKNNANPNLKGDQDKTPLHFAAEKGNSKIVEILLKYNANPNVKDRFSKAPLHYSAINGHLE

SEQ ID NO: 30159 - protein, 85 aa, unidentified
  REGION 1..85: note = Description of Unknown:cds_NZ_WFIY01000004.1_cds_WP_155864186.1_2146 target sequence
VTKALLKHNADPDVKDRVGNTPLHQSSERGHVEIVKILLSHGADINIRGEQGRYPIHFAAKNGHASVVKYLLEKGADPNAKDDEG

SEQ ID NO: 30160 - protein, 85 aa, unidentified
  REGION 1..85: note = Description of Unknown:cds_NZ_WFIY01000004.1_cds_WP_155864196.1_2159 target sequence
NKKDHEEHVKKLLFDFGLSNQYMEVKEILNKNGSNTSGSYAYFFNAGNVTSNIVKRVFLNNYKKWSRNDVQFTPIYIPVQDRIVT

SEQ ID NO: 30161 - protein, 85 aa, unidentified
  REGION 1..85: note = Description of Unknown:cds_NZ_WFIY01000004.1_cds_WP_155864196.1_2159 target sequence
LKYWGRKYKKIFSAEANKVIQFDSNLTCYPSGICNFEELDKELRDDEIKKALGLYWTFSLSLPYEERNLFLGNTFITVGNDELKI

SEQ ID NO: 30162 - protein, 85 aa, unidentified
  REGION 1..85: note = Description of Unknown:cds_NZ_WFIY01000004.1_cds_WP_155864196.1_2159 target sequence
SKIYHTFIVEQDNNFNYLDINFTLKKVQKPKEQNYMTFILIKSIVLESINKNNNKYNKEIKLVPYYDKGHFNDVDIYSRLAFLIL

SEQ ID NO: 30163 - protein, 85 aa, unidentified
  REGION 1..85: note = Description of Unknown:cds_NZ_WFIY01000004.1_cds_WP_155864196.1_2159 target sequence
RSMYLKKTIDNFDFLNIGNLNEFKKIFDDLFKKLFIINSNIKIEFNVEKLFKCKDLEIRKNGRSIRMFIIDDKGDIIFVHPLIAI

SEQ ID NO: 30164 - protein, 85 aa, unidentified
  REGION 1..85: note = Description of Unknown:cds_NZ_WFIY01000004.1_cds_WP_155864196.1_2159 target sequence
SFLSDSKNSEIYEILVNNILGNSMKRKEFIKTMLDNYSSRHHLLLENIRNLLGYNKLEYIELSKMISMLKSIYTSVLLNKLDGIS

SEQ ID NO: 30165 - protein, 84 aa, unidentified
  REGION 1..84: note = Description of Unknown:cds_NZ_WFIY01000004.1_cds_WP_155864196.1_2159 target sequence
LSDSKNSEIYEILVNNILGNSMKRKEFIKTMLDNYSSRHHLLLENIRNLLGYNKLEYIELSKMISMLKSIYTSVLLNKLDGISN

SEQ ID NO: 30166 - protein, 85 aa, unidentified
  REGION 1..85: note = Description of Unknown:cds_NZ_WFIY01000004.1_cds_WP_155864196.1_2159 target sequence
ILNKNGSNTSGSYAYFFNAGNVTSNIVKRVFLNNYKKWSRNDVQFTPIYIPVQDRIVTLKYWGRKYKKIFSAEANKVIQFDSNLT

SEQ ID NO: 30167 - protein, 85 aa, unidentified
  REGION 1..85: note = Description of Unknown:cds_NZ_WFIY01000004.1_cds_WP_155864196.1_2159 target sequence
CYPSGICNFEELDKELRDDEIKKALGLYWTFSLSLPYEERNLFLGNTFITVGNDELKISKIYHTFIVEQDNNFNYLDINFTLKKV

SEQ ID NO: 30168 - protein, 85 aa, unidentified
  REGION 1..85: note = Description of Unknown:cds_NZ_WFIY01000004.1_cds_WP_155864196.1_2159 target sequence
QKPKEQNYMTFILIKSIVLESINKNNNKYNKEIKLVPYYDKGHFNDVDIYSRLAFLILRSMYLKKTIDNFDFLNIGNLNEFKKIF

SEQ ID NO: 30169 - protein, 85 aa, unidentified
  REGION 1..85: note = Description of Unknown:cds_NZ_WFIY01000004.1_cds_WP_155864196.1_2159 target sequence
DDLFKKLFIINSNIKIEFNVEKLFKCKDLEIRKNGRSIRMFIIDDKGDIIFVHPLIAISFLSDSKNSEIYEILVNNILGNSMKRK

SEQ ID NO: 30170 - protein, 85 aa, unidentified
  REGION 1..85: note = Description of Unknown:cds_NZ_WFIY01000004.1_cds_WP_155864353.1_27 target sequence
LVIAVVGGIEYYLATYHPTTKVTINYYDDLAPSEAKAFDDYIIPQFEKLYPNITVHLTVESAPDIVSTIEALEKGNDVGATVIAE

SEQ ID NO: 30171 - protein, 85 aa, unidentified
  REGION 1..85: note = Description of Unknown:cds_NZ_WFIY01000004.1_cds_WP_155864353.1_27 target sequence
DNMIIGELLCAGDLMNLTPYESIISPPSMIPSMVNLMHYEQSVYHGIYFIPFRGNIPLVWYNKTVFNELHLTPPQNWTQLLQDAK

SEQ ID NO: 30172 - protein, 85 aa, unidentified
  REGION 1..85: note = Description of Unknown:cds_NZ_WFIY01000004.1_cds_WP_155864353.1_27 target sequence
IIYQKTGVKPIMFQGHGGASTATELYQWMVQAGGNPFVFNDSGDIEAFTFLDELSSYMNPAYIHGYWGSYKGLADGEYYILDYQW

SEQ ID NO: 30173 - protein, 85 aa, unidentified
  REGION 1..85: note = Description of Unknown:cds_NZ_WFIY01000004.1_cds_WP_155864353.1_27 target sequence
PYIYATMKSEGINVTNIGFYPGPAGPVNNDHLVGGDVLAIPKGATHLHDLLIFIKFLLSTQVQRDIITILGEPAVNAKAYQNLPS

SEQ ID NO: 30174 - protein, 85 aa, unidentified
  REGION 1..85: note = Description of Unknown:cds_NZ_WFIY01000004.1_cds_WP_155864353.1_27 target sequence
NISALFKAEEEAFQSAFFREPVPWISYWNTVADKVFDQIVVDHAPISEIHSILNEANAEMYTYLKTTYNSTVANEYEQGVFAPLY

SEQ ID NO: 30175 - protein, 84 aa, unidentified
  REGION 1..84: note = Description of Unknown:cds_NZ_WFIY01000004.1_cds_WP_155864353.1_27 target sequence
SALFKAEEEAFQSAFFREPVPWISYWNTVADKVFDQIVVDHAPISEIHSILNEANAEMYTYLKTTYNSTVANEYEQGVFAPLYG

SEQ ID NO: 30176 - protein, 85 aa, unidentified
  REGION 1..85: note = Description of Unknown:cds_NZ_WFIY01000004.1_cds_WP_155864353.1_27 target sequence
DDLAPSEAKAFDDYIIPQFEKLYPNITVHLTVESAPDIVSTIEALEKGNDVGATVIAEDNMIIGELLCAGDLMNLTPYESIISPP

SEQ ID NO: 30177 - protein, 85 aa, unidentified
  REGION 1..85: note = Description of Unknown:cds_NZ_WFIY01000004.1_cds_WP_155864353.1_27 target sequence
SMIPSMVNLMHYEQSVYHGIYFIPFRGNIPLVWYNKTVFNELHLTPPQNWTQLLQDAKIIYQKTGVKPIMFQGHGGASTATELYQ

SEQ ID NO: 30178 - protein, 85 aa, unidentified
  REGION 1..85: note = Description of Unknown:cds_NZ_WFIY01000004.1_cds_WP_155864353.1_27 target sequence
WMVQAGGNPFVFNDSGDIEAFTFLDELSSYMNPAYIHGYWGSYKGLADGEYYILDYQWPYIYATMKSEGINVTNIGFYPGPAGPV

SEQ ID NO: 30179 - protein, 85 aa, unidentified
  REGION 1..85: note = Description of Unknown:cds_NZ_WFIY01000004.1_cds_WP_155864353.1_27 target sequence
NNDHLVGGDVLAIPKGATHLHDLLIFIKFLLSTQVQRDIITILGEPAVNAKAYQNLPSNISALFKAEEEAFQSAFFREPVPWISY

SEQ ID NO: 30180 - protein, 85 aa, unidentified
  REGION 1..85: note = Description of Unknown:cds_NZ_WFIY01000004.1_cds_WP_155862947.1_806 target sequence
VSYEPLRGMKDYFGEDAEKIRYIEEQFSKIVKKSGYMEAITPILEEFELFALKGGEELRNTMYTFVDKGGREVALRPEFTPSIVR

SEQ ID NO: 30181 - protein, 85 aa, unidentified
  REGION 1..85: note = Description of Unknown:cds_NZ_WFIY01000004.1_cds_WP_155862947.1_806 target sequence
LFLNSMQHLPKPIRLYYIGTVYRYDEPQFGRYREFRQAGIEMLGESSINADLEVLSILWEFFKKIGLENITIKINNIAIYRELFS

SEQ ID NO: 30182 - protein, 85 aa, unidentified
  REGION 1..85: note = Description of Unknown:cds_NZ_WFIY01000004.1_cds_WP_155862947.1_806 target sequence
MLKMSEDQEDHLLHLIDKGNKDSVIEYLSKISEYKILNIIREMLYNSISKESDFIELIKDLNNEHSKVLENQISRLFKIYEILAK

SEQ ID NO: 30183 - protein, 85 aa, unidentified
  REGION 1..85: note = Description of Unknown:cds_NZ_WFIY01000004.1_cds_WP_155862947.1_806 target sequence
LNVPIKIDLSLVRGLAYYTGVIFEVTHPSVSFSIAGGGRYDNLVQLYGGPSTPSIGFAIGVERVLSVLQNLKIKDNVRKIAIIPL

SEQ ID NO: 30184 - protein, 85 aa, unidentified
  REGION 1..85: note = Description of Unknown:cds_NZ_WFIY01000004.1_cds_WP_155862947.1_806 target sequence
NENVIDYALKVLFILHENDIPAILNTKNISLSKIIPILLDMNVNIAIIIGENEKKENKVSIKDLTTRQQSSISLNDLLPYIRQII

SEQ ID NO: 30185 - protein, 84 aa, unidentified
  REGION 1..84: note = Description of Unknown:cds_NZ_WFIY01000004.1_cds_WP_155862947.1_806 target sequence
ENVIDYALKVLFILHENDIPAILNTKNISLSKIIPILLDMNVNIAIIIGENEKKENKVSIKDLTTRQQSSISLNDLLPYIRQII

SEQ ID NO: 30186 - protein, 85 aa, unidentified
  REGION 1..85: note = Description of Unknown:cds_NZ_WFIY01000004.1_cds_WP_155862947.1_806 target sequence
SKIVKKSGYMEAITPILEEFELFALKGGEELRNTMYTFVDKGGREVALRPEFTPSIVRLFLNSMQHLPKPIRLYYIGTVYRYDEP

SEQ ID NO: 30187 - protein, 85 aa, unidentified
  REGION 1..85: note = Description of Unknown:cds_NZ_WFIY01000004.1_cds_WP_155862947.1_806 target sequence
QFGRYREFRQAGIEMLGESSINADLEVLSILWEFFKKIGLENITIKINNIAIYRELFSMLKMSEDQEDHLLHLIDKGNKDSVIEY

SEQ ID NO: 30188 - protein, 85 aa, unidentified
  REGION 1..85: note = Description of Unknown:cds_NZ_WFIY01000004.1_cds_WP_155862947.1_806 target sequence
LSKISEYKILNIIREMLYNSISKESDFIELIKDLNNEHSKVLENQISRLFKIYEILAKLNVPIKIDLSLVRGLAYYTGVIFEVTH

SEQ ID NO: 30189 - protein, 85 aa, unidentified
  REGION 1..85: note = Description of Unknown:cds_NZ_WFIY01000004.1_cds_WP_155862947.1_806 target sequence
PSVSFSIAGGGRYDNLVQLYGGPSTPSIGFAIGVERVLSVLQNLKIKDNVRKIAIIPLNENVIDYALKVLFILHENDIPAILNTK

SEQ ID NO: 30190 - protein, 85 aa, unidentified
  REGION 1..85: note = Description of Unknown:cds_NC_005830.1_cds_YP_003740.1_15 target sequence
TFVEDFLSSYTFSYNPRNLETLLLGLGIKDTEGAKRAIRLGSDPKYFQVYMMYNDKAKLITRIMQFNADKYGMKLTFQNGLSVKL

SEQ ID NO: 30191 - protein, 85 aa, unidentified
  REGION 1..85: note = Description of Unknown:cds_NC_005830.1_cds_YP_003740.1_15 target sequence
SPKVLAESVDDFFDMLDQWFIVSVEKDEIGVLVKSVKPVKPKTDVDIDEDFLKKVEAEVPLYIFLIASFGYKIPDKTTYNVYRDY

SEQ ID NO: 30192 - protein, 85 aa, unidentified
  REGION 1..85: note = Description of Unknown:cds_NC_005830.1_cds_YP_003740.1_15 target sequence
ILGRFIHLFRPSSNIPLHIAELSNRGTGKTTTFLIMRDFLGYYYTTEPPTLPFLVYDSKTKQQGIVATKNGIIFDEVQDWSGDRV

SEQ ID NO: 30193 - protein, 85 aa, unidentified
  REGION 1..85: note = Description of Unknown:cds_NC_005830.1_cds_YP_003740.1_15 target sequence
KAILSVLDTGMENCTWNRSVSGSSETINRCIPIVFLGNENYISIDFYQAPSNLQQYIAEKSSMLEEVLLNKYPDIFPTKAFLDRF

SEQ ID NO: 30194 - protein, 85 aa, unidentified
  REGION 1..85: note = Description of Unknown:cds_NC_005830.1_cds_YP_003740.1_15 target sequence
ARIAVGNNFPSFTETITGKVLFPTILRKLIRELQKRIDRESPLNNDYEGRTRRRVEDVGQVLKGLGVDLDKPELVYAWTRFVGVQ

SEQ ID NO: 30195 - protein, 84 aa, unidentified
  REGION 1..84: note = Description of Unknown:cds_NC_005830.1_cds_YP_003740.1_15 target sequence
RIAVGNNFPSFTETITGKVLFPTILRKLIRELQKRIDRESPLNNDYEGRTRRRVEDVGQVLKGLGVDLDKPELVYAWTRFVGVQ

SEQ ID NO: 30196 - protein, 85 aa, unidentified
  REGION 1..85: note = Description of Unknown:cds_NC_005830.1_cds_YP_003740.1_15 target sequence
IKDTEGAKRAIRLGSDPKYFQVYMMYNDKAKLITRIMQFNADKYGMKLTFQNGLSVKLSPKVLAESVDDFFDMLDQWFIVSVEKD

SEQ ID NO: 30197 - protein, 85 aa, unidentified
  REGION 1..85: note = Description of Unknown:cds_NC_005830.1_cds_YP_003740.1_15 target sequence
EIGVLVKSVKPVKPKTDVDIDEDFLKKVEAEVPLYIFLIASFGYKIPDKTTYNVYRDYILGRFIHLFRPSSNIPLHIAELSNRGT

SEQ ID NO: 30198 - protein, 85 aa, unidentified
  REGION 1..85: note = Description of Unknown:cds_NC_005830.1_cds_YP_003740.1_15 target sequence
GKTTTFLIMRDFLGYYYTTEPPTLPFLVYDSKTKQQGIVATKNGIIFDEVQDWSGDRVKAILSVLDTGMENCTWNRSVSGSSETI

SEQ ID NO: 30199 - protein, 85 aa, unidentified
  REGION 1..85: note = Description of Unknown:cds_NC_005830.1_cds_YP_003740.1_15 target sequence
NRCIPIVFLGNENYISIDFYQAPSNLQQYIAEKSSMLEEVLLNKYPDIFPTKAFLDRFARIAVGNNFPSFTETITGKVLFPTILR

SEQ ID NO: 30200 - protein, 85 aa, unidentified
  REGION 1..85: note = Description of Unknown:cds_NZ_WFIY01000004.1_cds_WP_155862986.1_858 target sequence
LDYDKLAIEVSSKYKGKIQILPKVPIRSLEDFAVLYTPGVAAVSKEISKNPDLSFQYTYRWNSIAVVTDGTRVLGLGNIGPEAAM

SEQ ID NO: 30201 - protein, 85 aa, unidentified
  REGION 1..85: note = Description of Unknown:cds_NZ_WFIY01000004.1_cds_WP_155862986.1_858 target sequence
PVMEGKALLFKYLGGVDAIPLPIGTKDPDKIIETVKILEPAFGGINLEDIESPKCFYILDKLREELHIPVWHDDQQGTAGATLAG

SEQ ID NO: 30202 - protein, 85 aa, unidentified
  REGION 1..85: note = Description of Unknown:cds_NZ_WFIY01000004.1_cds_WP_155862986.1_858 target sequence
LISALEIVGKSPTKIKIVFYGVGAANIATARLLKSYGIPYSNMVLIDTKGPLYRGREDEEEIKNTNPWKYELLKESNKDNVTTVE

SEQ ID NO: 30203 - protein, 85 aa, unidentified
  REGION 1..85: note = Description of Unknown:cds_NZ_WFIY01000004.1_cds_WP_155862986.1_858 target sequence
KAFEGADVLIAASKPGPHTIDPKLISKMNKDAIVFALANPIPEIWPDEAKKAGARIVGTGRSDLPNQINNSLIFPAVFRGALDVR

SEQ ID NO: 30204 - protein, 85 aa, unidentified
  REGION 1..85: note = Description of Unknown:cds_NZ_WFIY01000004.1_cds_WP_155862986.1_858 target sequence
AKTITDDMVIAAARELSAFAREKGLSEDYIIPKMTEWEVYPRVAAAVGIKAVQQGIARVNLSYEEIYNNARQMIENARKLLASLT

SEQ ID NO: 30205 - protein, 84 aa, unidentified
  REGION 1..84: note = Description of Unknown:cds_NZ_WFIY01000004.1_cds_WP_155862986.1_858 target sequence
KTITDDMVIAAARELSAFAREKGLSEDYIIPKMTEWEVYPRVAAAVGIKAVQQGIARVNLSYEEIYNNARQMIENARKLLASLT

SEQ ID NO: 30206 - protein, 85 aa, unidentified
  REGION 1..85: note = Description of Unknown:cds_NZ_WFIY01000004.1_cds_WP_155862986.1_858 target sequence
SLEDFAVLYTPGVAAVSKEISKNPDLSFQYTYRWNSIAVVTDGTRVLGLGNIGPEAAMPVMEGKALLFKYLGGVDAIPLPIGTKD

SEQ ID NO: 30207 - protein, 85 aa, unidentified
  REGION 1..85: note = Description of Unknown:cds_NZ_WFIY01000004.1_cds_WP_155862986.1_858 target sequence
PDKIIETVKILEPAFGGINLEDIESPKCFYILDKLREELHIPVWHDDQQGTAGATLAGLISALEIVGKSPTKIKIVFYGVGAANI

SEQ ID NO: 30208 - protein, 85 aa, unidentified
  REGION 1..85: note = Description of Unknown:cds_NZ_WFIY01000004.1_cds_WP_155862986.1_858 target sequence
ATARLLKSYGIPYSNMVLIDTKGPLYRGREDEEEIKNTNPWKYELLKESNKDNVTTVEKAFEGADVLIAASKPGPHTIDPKLISK

SEQ ID NO: 30209 - protein, 85 aa, unidentified
  REGION 1..85: note = Description of Unknown:cds_NZ_WFIY01000004.1_cds_WP_155862986.1_858 target sequence
MNKDAIVFALANPIPEIWPDEAKKAGARIVGTGRSDLPNQINNSLIFPAVFRGALDVRAKTITDDMVIAAARELSAFAREKGLSE

SEQ ID NO: 30210 - protein, 85 aa, unidentified
  REGION 1..85: note = Description of Unknown:cds_NZ_WFIY01000004.1_cds_WP_155864433.1_1502 target sequence
LFSSLAVGFFMWGIIASIAPLFYPQVNQVWFLVVPIIAQLVGDLAISRLSDIRLGRKGTFFLTMGLYGTGALIIFGVSQAVVSGI

SEQ ID NO: 30211 - protein, 85 aa, unidentified
  REGION 1..85: note = Description of Unknown:cds_NZ_WFIY01000004.1_cds_WP_155864433.1_1502 target sequence
ISSSSPVFLPLVVLGIVLGYLGIEGEVPTALSYAGETMPLSLRETMLVFLPNFNNIGAMVAAAISYLTYYLSSSYLLELRTLGIL

SEQ ID NO: 30212 - protein, 85 aa, unidentified
  REGION 1..85: note = Description of Unknown:cds_NZ_WFIY01000004.1_cds_WP_155864433.1_1502 target sequence
AIVMVGFAIVMRYLTPESVRWLVKAGKKEEAEKEIKYFVAEVKHVIPGGVNKVSLGFRYAFLSIIGVSQYLTYGLMAYIIADYYF

SEQ ID NO: 30213 - protein, 85 aa, unidentified
  REGION 1..85: note = Description of Unknown:cds_NZ_WFIY01000004.1_cds_WP_155864433.1_1502 target sequence
HGIVVDEIVFIANLGASIAGIIASFLVKYIPTRKFAVLSFLGGTLTMIPILLLISGVVPFSLGMFYVILLFNMAFSELGWATRTV

SEQ ID NO: 30214 - protein, 85 aa, unidentified
  REGION 1..85: note = Description of Unknown:cds_NZ_WFIY01000004.1_cds_WP_155864433.1_1502 target sequence
LEPLLMPIKSRAFYIGLIRVAPMLAYAGSLYLTSGFSATQFVIYNLGLWALGLGGSLAWYYKGYDTNMIPIEETAGDTAYIERKE

SEQ ID NO: 30215 - protein, 84 aa, unidentified
  REGION 1..84: note = Description of Unknown:cds_NZ_WFIY01000004.1_cds_WP_155864433.1_1502 target sequence
EPLLMPIKSRAFYIGLIRVAPMLAYAGSLYLTSGFSATQFVIYNLGLWALGLGGSLAWYYKGYDTNMIPIEETAGDTAYIERKE

SEQ ID NO: 30216 - protein, 85 aa, unidentified
  REGION 1..85: note = Description of Unknown:cds_NZ_WFIY01000004.1_cds_WP_155864433.1_1502 target sequence
QVWFLVVPIIAQLVGDLAISRLSDIRLGRKGTFFLTMGLYGTGALIIFGVSQAVVSGIISSSSPVFLPLVVLGIVLGYLGIEGEV

SEQ ID NO: 30217 - protein, 85 aa, unidentified
  REGION 1..85: note = Description of Unknown:cds_NZ_WFIY01000004.1_cds_WP_155864433.1_1502 target sequence
PTALSYAGETMPLSLRETMLVFLPNFNNIGAMVAAAISYLTYYLSSSYLLELRTLGILAIVMVGFAIVMRYLTPESVRWLVKAGK

SEQ ID NO: 30218 - protein, 85 aa, unidentified
  REGION 1..85: note = Description of Unknown:cds_NZ_WFIY01000004.1_cds_WP_155864433.1_1502 target sequence
KEEAEKEIKYFVAEVKHVIPGGVNKVSLGFRYAFLSIIGVSQYLTYGLMAYIIADYYFHGIVVDEIVFIANLGASIAGIIASFLV

SEQ ID NO: 30219 - protein, 85 aa, unidentified
  REGION 1..85: note = Description of Unknown:cds_NZ_WFIY01000004.1_cds_WP_155864433.1_1502 target sequence
KYIPTRKFAVLSFLGGTLTMIPILLLISGVVPFSLGMFYVILLFNMAFSELGWATRTVLEPLLMPIKSRAFYIGLIRVAPMLAYA

SEQ ID NO: 30220 - protein, 85 aa, unidentified
  REGION 1..85: note = Description of Unknown:cds_NZ_WFIY01000004.1_cds_WP_155864487.1_2204 target sequence
NPKKVIRETEKYLATTTRDPETYPIILDRGEGVWLYDIEGNKYLDFTSGIGVNNLGWPSHPEVIKTAIAQMAKLAHAAGNDFYNL

SEQ ID NO: 30221 - protein, 85 aa, unidentified
  REGION 1..85: note = Description of Unknown:cds_NZ_WFIY01000004.1_cds_WP_155864487.1_2204 target sequence
PQLELARKLAICSPGNFEKKVFFSNSGTEAVEASIKLVKRRERKYLISFIGAFHGRTFGSVSLTASKPIQKAEVGPFLPVIYVPY

SEQ ID NO: 30222 - protein, 85 aa, unidentified
  REGION 1..85: note = Description of Unknown:cds_NZ_WFIY01000004.1_cds_WP_155864487.1_2204 target sequence
PNPFKNPWHINGYEDPNSLIDRVIEYIEDYIFAHVVPPEEIGGIFFEPIQGEGGYVVPPRGFFQALQRLARKYGIYLIDDEVQMG

SEQ ID NO: 30223 - protein, 85 aa, unidentified
  REGION 1..85: note = Description of Unknown:cds_NZ_WFIY01000004.1_cds_WP_155864487.1_2204 target sequence
MGRTGKLFAIENFNAEPDVITLAKALGGGLVPIGATIFRAELDFKPGMHSNTFGGNALACAIGSKVIEITKDLLPHVNEVGKIFR

SEQ ID NO: 30224 - protein, 84 aa, unidentified
  REGION 1..84: note = Description of Unknown:cds_NZ_WFIY01000004.1_cds_WP_155864487.1_2204 target sequence
DELSTMDVDDVRGMGLAWGIEFGRIYNRKIRDTVIQEAARRGLLLLPAGEGAIRIIPPLIISGEEAKKGLAILKKVISDATKLT

SEQ ID NO: 30225 - protein, 85 aa, unidentified
  REGION 1..85: note = Description of Unknown:cds_NZ_WFIY01000004.1_cds_WP_155864487.1_2204 target sequence
DRGEGVWLYDIEGNKYLDFTSGIGVNNLGWPSHPEVIKTAIAQMAKLAHAAGNDFYNLPQLELARKLAICSPGNFEKKVFFSNSG

SEQ ID NO: 30226 - protein, 85 aa, unidentified
  REGION 1..85: note = Description of Unknown:cds_NZ_WFIY01000004.1_cds_WP_155864487.1_2204 target sequence
TEAVEASIKLVKRRERKYLISFIGAFHGRTFGSVSLTASKPIQKAEVGPFLPVIYVPYPNPFKNPWHINGYEDPNSLIDRVIEYI

SEQ ID NO: 30227 - protein, 85 aa, unidentified
  REGION 1..85: note = Description of Unknown:cds_NZ_WFIY01000004.1_cds_WP_155864487.1_2204 target sequence
EDYIFAHVVPPEEIGGIFFEPIQGEGGYVVPPRGFFQALQRLARKYGIYLIDDEVQMGMGRTGKLFAIENFNAEPDVITLAKALG

SEQ ID NO: 30228 - protein, 85 aa, unidentified
  REGION 1..85: note = Description of Unknown:cds_NZ_WFIY01000004.1_cds_WP_155864487.1_2204 target sequence
GGLVPIGATIFRAELDFKPGMHSNTFGGNALACAIGSKVIEITKDLLPHVNEVGKIFRDELSTMDVDDVRGMGLAWGIEFGRIYN

SEQ ID NO: 30229 - protein, 85 aa, unidentified
  REGION 1..85: note = Description of Unknown:cds_NC_035460.1_cds_YP_009408069.1_118 target sequence
ATATDLSNLKELLKLYKSLNIANSETREKYNSLVEWAISKYWKIGISVVVNLNTSIDRYYNVKQCKSFDLNINKYLFMPMCFGTV

SEQ ID NO: 30230 - protein, 85 aa, unidentified
  REGION 1..85: note = Description of Unknown:cds_NC_035460.1_cds_YP_009408069.1_118 target sequence
YIYSNGSMMELGSGNVYQLNKVFKDKCDKILNEFEIEFLRFVLYKNIWILEDAILQYASVIDVFNFAKNIGIETVPYLFLNVTKT

SEQ ID NO: 30231 - protein, 85 aa, unidentified
  REGION 1..85: note = Description of Unknown:cds_NC_035460.1_cds_YP_009408069.1_118 target sequence
TIFNNSDYNAIENILKDINSKYYIVSLCYIINNTLKRNIIDFYKTGYVFIESIDVEHINDNKYIPQLTTKSGEIILIKDIEHLIS

SEQ ID NO: 30232 - protein, 85 aa, unidentified
  REGION 1..85: note = Description of Unknown:cds_NC_035460.1_cds_YP_009408069.1_118 target sequence
CKVKSKSFITVKRKQSFSILCNNGGTSTETRAEALYRIIKEIGNEYFVNGKYLSKVNNIGIKQLANKLDIKEECKTLSDLVKVIN

SEQ ID NO: 30233 - protein, 84 aa, unidentified
  REGION 1..84: note = Description of Unknown:cds_NC_035460.1_cds_YP_009408069.1_118 target sequence
TCSTVKDKLKSISPFDLTRICLEYPENDFITLVNNMHFHIENSKVLSFKLENINCLNNPSIETIYSSFNQFVVLFNILVDAKKQ

SEQ ID NO: 30234 - protein, 85 aa, unidentified
  REGION 1..85: note = Description of Unknown:cds_NC_035460.1_cds_YP_009408069.1_118 target sequence
EKYNSLVEWAISKYWKIGISVVVNLNTSIDRYYNVKQCKSFDLNINKYLFMPMCFGTVYIYSNGSMMELGSGNVYQLNKVFKDKC

SEQ ID NO: 30235 - protein, 85 aa, unidentified
  REGION 1..85: note = Description of Unknown:cds_NC_035460.1_cds_YP_009408069.1_118 target sequence
DKILNEFEIEFLRFVLYKNIWILEDAILQYASVIDVFNFAKNIGIETVPYLFLNVTKTTIFNNSDYNAIENILKDINSKYYIVSL

SEQ ID NO: 30236 - protein, 85 aa, unidentified
  REGION 1..85: note = Description of Unknown:cds_NC_035460.1_cds_YP_009408069.1_118 target sequence
CYIINNTLKRNIIDFYKTGYVFIESIDVEHINDNKYIPQLTTKSGEIILIKDIEHLISCKVKSKSFITVKRKQSFSILCNNGGTS

SEQ ID NO: 30237 - protein, 85 aa, unidentified
  REGION 1..85: note = Description of Unknown:cds_NC_035460.1_cds_YP_009408069.1_118 target sequence
TETRAEALYRIIKEIGNEYFVNGKYLSKVNNIGIKQLANKLDIKEECKTLSDLVKVINTCSTVKDKLKSISPFDLTRICLEYPEN

SEQ ID NO: 30238 - protein, 85 aa, unidentified
  REGION 1..85: note = Description of Unknown:cds_NC_009884.1_cds_YP_001496940.1_15 target sequence
TSLQEYMVPIVVDGEVPPEIYVALRGTDKDKVKRMWTNANNPFALAKACSRGSAEIVGKPSSVYLKQYRSATYYVLQYPSGKLLL

SEQ ID NO: 30239 - protein, 85 aa, unidentified
  REGION 1..85: note = Description of Unknown:cds_NC_009884.1_cds_YP_001496940.1_15 target sequence
PVDEVDESVVDDIQNELLYVSVVRKNNLYFVTDIEPLVTKSKVERGEELREVADANGVSPDDLPALGYGYVTTSSSKIFTGTDKM

SEQ ID NO: 30240 - protein, 85 aa, unidentified
  REGION 1..85: note = Description of Unknown:cds_NC_009884.1_cds_YP_001496940.1_15 target sequence
IRNDAVNRLSLLMLLRFFTTAKVGGMPVHAFELTTPNTGKTTFAVRNIYLVNWGYIDEAPSFARLVMDAKTSALGLVFRNDGVFI

SEQ ID NO: 30241 - protein, 85 aa, unidentified
  REGION 1..85: note = Description of Unknown:cds_NC_009884.1_cds_YP_001496940.1_15 target sequence
DEIDKYGSNMRDVIHIMLTGMSHGVWKRAKGDTDAPSIVRRIPVYFAGNKDSSTLGTMSTRNYIKNVLVSMKLYQSLVDALLDRI

SEQ ID NO: 30242 - protein, 84 aa, unidentified
  REGION 1..84: note = Description of Unknown:cds_NC_009884.1_cds_YP_001496940.1_15 target sequence
AITIANEAEINASDYVSGYVIADTYLRGYISYVSSQATKMYKDLGIGNGRERQNINAINALCVATTNFDHCDEFAKSVSSGFLV

SEQ ID NO: 30243 - protein, 85 aa, unidentified
  REGION 1..85: note = Description of Unknown:cds_NC_009884.1_cds_YP_001496940.1_15 target sequence
DKDKVKRMWTNANNPFALAKACSRGSAEIVGKPSSVYLKQYRSATYYVLQYPSGKLLLPVDEVDESVVDDIQNELLYVSVVRKNN

SEQ ID NO: 30244 - protein, 85 aa, unidentified
  REGION 1..85: note = Description of Unknown:cds_NC_009884.1_cds_YP_001496940.1_15 target sequence
LYFVTDIEPLVTKSKVERGEELREVADANGVSPDDLPALGYGYVTTSSSKIFTGTDKMIRNDAVNRLSLLMLLRFFTTAKVGGMP

SEQ ID NO: 30245 - protein, 85 aa, unidentified
  REGION 1..85: note = Description of Unknown:cds_NC_009884.1_cds_YP_001496940.1_15 target sequence
VHAFELTTPNTGKTTFAVRNIYLVNWGYIDEAPSFARLVMDAKTSALGLVFRNDGVFIDEIDKYGSNMRDVIHIMLTGMSHGVWK

SEQ ID NO: 30246 - protein, 85 aa, unidentified
  REGION 1..85: note = Description of Unknown:cds_NC_009884.1_cds_YP_001496940.1_15 target sequence
RAKGDTDAPSIVRRIPVYFAGNKDSSTLGTMSTRNYIKNVLVSMKLYQSLVDALLDRIAITIANEAEINASDYVSGYVIADTYLR

SEQ ID NO: 30247 - protein, 85 aa, unidentified
  REGION 1..85: note = Description of Unknown:cds_NZ_WFIY01000004.1_cds_WP_155862489.1_247 target sequence
AIEREEILPKYWYNIIPDLPKPLPPPRDPPDAEFSRIDLLRKIMPKEVLRQQFTVERFIKIPEEVREAYLNIGRPTPLMRAKRLE

SEQ ID NO: 30248 - protein, 85 aa, unidentified
  REGION 1..85: note = Description of Unknown:cds_NZ_WFIY01000004.1_cds_WP_155862489.1_247 target sequence
EMLNTPAKIYFKFEGATPTGSHKINTALPQAYFAKAEGVNHVVTETGAGQWGTAVALAARMYNMESTIFMVKVSYEQKPQRRTIM

SEQ ID NO: 30249 - protein, 85 aa, unidentified
  REGION 1..85: note = Description of Unknown:cds_NZ_WFIY01000004.1_cds_WP_155862489.1_247 target sequence
ELYGGKVYASPTNLTEYGKKVLAENPSHPGSLGVAMSEAIEYALTNNYRYLVGSVLDVAILHQSVIGQEAMKQLDILGEEPDILI

SEQ ID NO: 30250 - protein, 85 aa, unidentified
  REGION 1..85: note = Description of Unknown:cds_NZ_WFIY01000004.1_cds_WP_155862489.1_247 target sequence
GCVGGGSNFGGFAFPFLGAKRGEKFIAVGSYEIPKFSQGDYMYDFPDSAGLLPMVKMITLGKDYVPPPIYAGGLRYHGAAPSLSL

SEQ ID NO: 30251 - protein, 84 aa, unidentified
  REGION 1..84: note = Description of Unknown:cds_NZ_WFIY01000004.1_cds_WP_155862489.1_247 target sequence
LLIKEGIVEWREYSEPEIFEAARLFAEAQGIVPAPESAHAIKAVIDEALKAKKNHERKVIVFNLSGHGLLDLPNYESMMKRLLK

SEQ ID NO: 30252 - protein, 85 aa, unidentified
  REGION 1..85: note = Description of Unknown:cds_NZ_WFIY01000004.1_cds_WP_155862489.1_247 target sequence
DPPDAEFSRIDLLRKIMPKEVLRQQFTVERFIKIPEEVREAYLNIGRPTPLMRAKRLEEMLNTPAKIYFKFEGATPTGSHKINTA

SEQ ID NO: 30253 - protein, 85 aa, unidentified
  REGION 1..85: note = Description of Unknown:cds_NZ_WFIY01000004.1_cds_WP_155862489.1_247 target sequence
LPQAYFAKAEGVNHVVTETGAGQWGTAVALAARMYNMESTIFMVKVSYEQKPQRRTIMELYGGKVYASPTNLTEYGKKVLAENPS

SEQ ID NO: 30254 - protein, 85 aa, unidentified
  REGION 1..85: note = Description of Unknown:cds_NZ_WFIY01000004.1_cds_WP_155862489.1_247 target sequence
HPGSLGVAMSEAIEYALTNNYRYLVGSVLDVAILHQSVIGQEAMKQLDILGEEPDILIGCVGGGSNFGGFAFPFLGAKRGEKFIA

SEQ ID NO: 30255 - protein, 85 aa, unidentified
  REGION 1..85: note = Description of Unknown:cds_NZ_WFIY01000004.1_cds_WP_155862489.1_247 target sequence
VGSYEIPKFSQGDYMYDFPDSAGLLPMVKMITLGKDYVPPPIYAGGLRYHGAAPSLSLLIKEGIVEWREYSEPEIFEAARLFAEA

SEQ ID NO: 30256 - protein, 85 aa, unidentified
  REGION 1..85: note = Description of Unknown:cds_NZ_WFIY01000004.1_cds_WP_155863426.1_1406 target sequence
AERKSECGGFKVEGGKVKISRQIVSRTLDEMTPYDVWGLQECMRCGVCRYACPFWLVTKEATDIPAWRTYEINKLFSMYYTGYGI

SEQ ID NO: 30257 - protein, 85 aa, unidentified
  REGION 1..85: note = Description of Unknown:cds_NZ_WFIY01000004.1_cds_WP_155863426.1_1406 target sequence
VARVLRLRRLKKKEYLSWRESAYNCTACGACTDVSPLEIPNWYTALLMRRILHYTGMNIPDVEKWAENTKKIGNAMGMDKTEWEN

SEQ ID NO: 30258 - protein, 85 aa, unidentified
  REGION 1..85: note = Description of Unknown:cds_NZ_WFIY01000004.1_cds_WP_155863426.1_1406 target sequence
NAKSAGLSVDQKDAEILYVPSALEAQDINILSQIGSIAQGLRSKLTVSSEISDVGYYSYFAGDFETARAQFTKIYEEAKRLNVKK

SEQ ID NO: 30259 - protein, 85 aa, unidentified
  REGION 1..85: note = Description of Unknown:cds_NZ_WFIY01000004.1_cds_WP_155863426.1_1406 target sequence
ILTSDGAALFFLRWQGPKSLHYKPEIIVEHLTETVYNNMVKGNVKLDKADINDDITVHDSEFLSRLGGVEKPPREVLKAIIPKFK

SEQ ID NO: 30260 - protein, 84 aa, unidentified
  REGION 1..84: note = Description of Unknown:cds_NZ_WFIY01000004.1_cds_WP_155863426.1_1406 target sequence
KEPKQKPSSYSLFTCGHHLELINEKKEIVSKMRAYVAGQLGNLAKAVVTLDPNCKLSLENAVKENQGISKVYYYTEILAKAIKS

SEQ ID NO: 30261 - protein, 85 aa, unidentified
  REGION 1..85: note = Description of Unknown:cds_NZ_WFIY01000004.1_cds_WP_155863426.1_1406 target sequence
LDEMTPYDVWGLQECMRCGVCRYACPFWLVTKEATDIPAWRTYEINKLFSMYYTGYGIVARVLRLRRLKKKEYLSWRESAYNCTA

SEQ ID NO: 30262 - protein, 85 aa, unidentified
  REGION 1..85: note = Description of Unknown:cds_NZ_WFIY01000004.1_cds_WP_155863426.1_1406 target sequence
CGACTDVSPLEIPNWYTALLMRRILHYTGMNIPDVEKWAENTKKIGNAMGMDKTEWENNAKSAGLSVDQKDAEILYVPSALEAQD

SEQ ID NO: 30263 - protein, 85 aa, unidentified
  REGION 1..85: note = Description of Unknown:cds_NZ_WFIY01000004.1_cds_WP_155863426.1_1406 target sequence
INILSQIGSIAQGLRSKLTVSSEISDVGYYSYFAGDFETARAQFTKIYEEAKRLNVKKILTSDGAALFFLRWQGPKSLHYKPEII

SEQ ID NO: 30264 - protein, 85 aa, unidentified
  REGION 1..85: note = Description of Unknown:cds_NZ_WFIY01000004.1_cds_WP_155863426.1_1406 target sequence
VEHLTETVYNNMVKGNVKLDKADINDDITVHDSEFLSRLGGVEKPPREVLKAIIPKFKEPKQKPSSYSLFTCGHHLELINEKKEI

SEQ ID NO: 30265 - protein, 85 aa, unidentified
  REGION 1..85: note = Description of Unknown:cds_NC_043126.1_cds_YP_009664869.1_3 target sequence
ATGRDLQDELEQIEQEITQAKAKYEKQKAAIGEEPDTIELKVLQQREETIHMLEEKRKELLQRIAQQMKSPRQPVKGRDLDEDEH

SEQ ID NO: 30266 - protein, 85 aa, unidentified
  REGION 1..85: note = Description of Unknown:cds_NC_043126.1_cds_YP_009664869.1_3 target sequence
LSERSTLRYGNVIDLEELDIDEPAGGSADWLAIGIYIFSFPVQLLLKTLYILTTRGRQTIKENKGNRLRFKDSSSTMDVNGVKTP

SEQ ID NO: 30267 - protein, 85 aa, unidentified
  REGION 1..85: note = Description of Unknown:cds_NC_043126.1_cds_YP_009664869.1_3 target sequence
RHLYISLPTAQSSMKTEEITPGRYRTVACGILSGEMRARKLVSPVMGVIGFNYLAEKWGEYIDAFLMKQSPHLPVSTGSPESATN

SEQ ID NO: 30268 - protein, 85 aa, unidentified
  REGION 1..85: note = Description of Unknown:cds_NC_043126.1_cds_YP_009664869.1_3 target sequence
FAYLIQRQDVLNKSKTVEYLELWEQAEKAGRHLVDRIESPLTPWLFAGSPDRCPPTSLYVAGIAELGAFFSILQDIRNAIMASKL

SEQ ID NO: 30269 - protein, 84 aa, unidentified
  REGION 1..84: note = Description of Unknown:cds_NC_043126.1_cds_YP_009664869.1_3 target sequence
KLVGTAEEKLKRKSSFYQSYLRRTQSMGVQLDQRIIILYMMEWGKMMVDHFHLGDDMDSELRKACQSLIDEKVAQVSNQEALKL

SEQ ID NO: 30270 - protein, 85 aa, unidentified
  REGION 1..85: note = Description of Unknown:cds_NC_043126.1_cds_YP_009664869.1_3 target sequence
KAAIGEEPDTIELKVLQQREETIHMLEEKRKELLQRIAQQMKSPRQPVKGRDLDEDEHLSERSTLRYGNVIDLEELDIDEPAGGS

SEQ ID NO: 30271 - protein, 85 aa, unidentified
  REGION 1..85: note = Description of Unknown:cds_NC_043126.1_cds_YP_009664869.1_3 target sequence
ADWLAIGIYIFSFPVQLLLKTLYILTTRGRQTIKENKGNRLRFKDSSSTMDVNGVKTPRHLYISLPTAQSSMKTEEITPGRYRTV

SEQ ID NO: 30272 - protein, 85 aa, unidentified
  REGION 1..85: note = Description of Unknown:cds_NC_043126.1_cds_YP_009664869.1_3 target sequence
ACGILSGEMRARKLVSPVMGVIGFNYLAEKWGEYIDAFLMKQSPHLPVSTGSPESATNFAYLIQRQDVLNKSKTVEYLELWEQAE

SEQ ID NO: 30273 - protein, 85 aa, unidentified
  REGION 1..85: note = Description of Unknown:cds_NC_043126.1_cds_YP_009664869.1_3 target sequence
KAGRHLVDRIESPLTPWLFAGSPDRCPPTSLYVAGIAELGAFFSILQDIRNAIMASKLVGTAEEKLKRKSSFYQSYLRRTQSMGV

SEQ ID NO: 30274 - protein, 85 aa, unidentified
  REGION 1..85: note = Description of Unknown:hvTR_P59595 target sequence
SDNGPQSNQRSAPRITFGGPTDSTDNNQNGGRNGARPKQRRPQGLPNNTASWFTALTQHGKEELRFPRGQGVPINTNSGPDDQIG

SEQ ID NO: 30275 - protein, 85 aa, unidentified
  REGION 1..85: note = Description of Unknown:hvTR_P59595 target sequence
YYRRATRRVRGGDGKMKELSPRWYFYYLGTGPEASLPYGANKEGIVWVATEGALNTPKDHIGTRNPNNNAATVLQLPQGTTLPKG

SEQ ID NO: 30276 - protein, 85 aa, unidentified
  REGION 1..85: note = Description of Unknown:hvTR_P59595 target sequence
FYAEGSRGGSQASSRSSSRSRGNSRNSTPGSSRGNSPARMASGGGETALALLLLDRLNQLESKVSGKGQQQQGQTVTKKSAAEAS

SEQ ID NO: 30277 - protein, 85 aa, unidentified
  REGION 1..85: note = Description of Unknown:hvTR_P59595 target sequence
KKPRQKRTATKQYNVTQAFGRRGPEQTQGNFGDQDLIRQGTDYKHWPQIAQFAPSASAFFGMSRIGMEVTPSGTWLTYHGAIKLD

SEQ ID NO: 30278 - protein, 84 aa, unidentified
  REGION 1..84: note = Description of Unknown:hvTR_P59595 target sequence
KLDDKDPQFKDNVILLNKHIDAYKTFPPTEPKKDKKKKTDEAQPLPQRQKKQPTVTLLPAADMDDFSRQLQNSMSGASADSTQA

SEQ ID NO: 30279 - protein, 85 aa, unidentified
  REGION 1..85: note = Description of Unknown:hvTR_P59595 target sequence
QNGGRNGARPKQRRPQGLPNNTASWFTALTQHGKEELRFPRGQGVPINTNSGPDDQIGYYRRATRRVRGGDGKMKELSPRWYFYY

SEQ ID NO: 30280 - protein, 85 aa, unidentified
  REGION 1..85: note = Description of Unknown:hvTR_P59595 target sequence
LGTGPEASLPYGANKEGIVWVATEGALNTPKDHIGTRNPNNNAATVLQLPQGTTLPKGFYAEGSRGGSQASSRSSSRSRGNSRNS

SEQ ID NO: 30281 - protein, 85 aa, unidentified
  REGION 1..85: note = Description of Unknown:hvTR_P59595 target sequence
TPGSSRGNSPARMASGGGETALALLLLDRLNQLESKVSGKGQQQQGQTVTKKSAAEASKKPRQKRTATKQYNVTQAFGRRGPEQT

SEQ ID NO: 30282 - protein, 85 aa, unidentified
  REGION 1..85: note = Description of Unknown:hvTR_P59595 target sequence
QGNFGDQDLIRQGTDYKHWPQIAQFAPSASAFFGMSRIGMEVTPSGTWLTYHGAIKLDDKDPQFKDNVILLNKHIDAYKTFPPTE

SEQ ID NO: 30283 - protein, 85 aa, unidentified
  REGION 1..85: note = Description of Unknown:cds_NZ_WFIY01000004.1_cds_WP_155863272.1_1227 target sequence
ILDKIDKIVNEYKEEIIDNLRQLIKIPTENPPGLNYNEFVTYASKWLSSLGYSTEVIKVPNAELPKLAKLGYGDRPNLIATTGKG

SEQ ID NO: 30284 - protein, 85 aa, unidentified
  REGION 1..85: note = Description of Unknown:cds_NZ_WFIY01000004.1_cds_WP_155863272.1_1227 target sequence
KLSIAFNGHYDVVPAGEGWSVNPYDAVVINDRIYGRGASDMKSGIVAQIYSVEVLKKIVNVDQAFKIRHFLVPDEETVGNENAGT

SEQ ID NO: 30285 - protein, 85 aa, unidentified
  REGION 1..85: note = Description of Unknown:cds_NZ_WFIY01000004.1_cds_WP_155863272.1_1227 target sequence
YFVIREGYLSKSNTDYVIFTEPSGVENICNGHRGSLWGFIKILGKKAHGGSPQLGIDAIRKSTEVLTQLYSLQDKLSNKRTKYNI

SEQ ID NO: 30286 - protein, 85 aa, unidentified
  REGION 1..85: note = Description of Unknown:cds_NZ_WFIY01000004.1_cds_WP_155863272.1_1227 target sequence
IPSNVKSPSLIVGQIKCGDWVNMVADECTFGFVRRLIPEEKLENARKEIINILESKKARDPEFKYEYDEYYAVDTIVEDTKNPLY

SEQ ID NO: 30287 - protein, 84 aa, unidentified
  REGION 1..84: note = Description of Unknown:cds_NZ_WFIY01000004.1_cds_WP_155863272.1_1227 target sequence
PLYESLSEAITSVLNVKPKIGLLAATFDMRFTHYEGIPAVNYGPGKIELAHATDEYVNIADLLNSIKVLSLTLYLLGKKYGMLN

SEQ ID NO: 30288 - protein, 85 aa, unidentified
  REGION 1..85: note = Description of Unknown:cds_NZ_WFIY01000004.1_cds_WP_155863272.1_1227 target sequence
TENPPGLNYNEFVTYASKWLSSLGYSTEVIKVPNAELPKLAKLGYGDRPNLIATTGKGKLSIAFNGHYDVVPAGEGWSVNPYDAV

SEQ ID NO: 30289 - protein, 85 aa, unidentified
  REGION 1..85: note = Description of Unknown:cds_NZ_WFIY01000004.1_cds_WP_155863272.1_1227 target sequence
VINDRIYGRGASDMKSGIVAQIYSVEVLKKIVNVDQAFKIRHFLVPDEETVGNENAGTYFVIREGYLSKSNTDYVIFTEPSGVEN

SEQ ID NO: 30290 - protein, 85 aa, unidentified
  REGION 1..85: note = Description of Unknown:cds_NZ_WFIY01000004.1_cds_WP_155863272.1_1227 target sequence
ICNGHRGSLWGFIKILGKKAHGGSPQLGIDAIRKSTEVLTQLYSLQDKLSNKRTKYNIIPSNVKSPSLIVGQIKCGDWVNMVADE

SEQ ID NO: 30291 - protein, 85 aa, unidentified
  REGION 1..85: note = Description of Unknown:cds_NZ_WFIY01000004.1_cds_WP_155863272.1_1227 target sequence
CTFGFVRRLIPEEKLENARKEIINILESKKARDPEFKYEYDEYYAVDTIVEDTKNPLYESLSEAITSVLNVKPKIGLLAATFDMR

SEQ ID NO: 30292 - protein, 85 aa, unidentified
  REGION 1..85: note = Description of Unknown:cds_NZ_WFIY01000004.1_cds_WP_155864103.1_2051 target sequence
QKIRPFFVSSAGFFLDGYDLSVISFALYFIAQEMKLSSSQEGLVSSASLMGMTIGALLFGFLADKVGRKKLMGVDLVFFMTFGIT

SEQ ID NO: 30293 - protein, 85 aa, unidentified
  REGION 1..85: note = Description of Unknown:cds_NZ_WFIY01000004.1_cds_WP_155864103.1_2051 target sequence
SAFSQNFTQLFISRLLLGIGIGGDYPISSTIISEFSPAVNRGKYLVASISLYWIGTLVASIANLAFLSLYEFWRYTFLFGALISL

SEQ ID NO: 30294 - protein, 85 aa, unidentified
  REGION 1..85: note = Description of Unknown:cds_NZ_WFIY01000004.1_cds_WP_155864103.1_2051 target sequence
PIILLRIKLDESPRWLASKGMLVTEKFNPLAENKGINGIKELFENPLLPYVLAVSIVWFLFDVASYGIGLYYPLVLREFAFPSNV

SEQ ID NO: 30295 - protein, 85 aa, unidentified
  REGION 1..85: note = Description of Unknown:cds_NZ_WFIY01000004.1_cds_WP_155864103.1_2051 target sequence
EVLYVTMAIAGGALLGYLIAVSAIDSLGRRKVLLTGLGGMAFLLIIGGITKIGGFLLVPYFMTFVALEQWAGAVTLFYPTEIFPT

SEQ ID NO: 30296 - protein, 84 aa, unidentified
  REGION 1..84: note = Description of Unknown:cds_NZ_WFIY01000004.1_cds_WP_155864103.1_2051 target sequence
FPTSVRSTAQGFATSVSRIGAILGVYFFPSMVSSVGFSSSLIIFGITSTLALAISFLTYKETRKKELEEISLGKIILINNNNKK

SEQ ID NO: 30297 - protein, 85 aa, unidentified
  REGION 1..85: note = Description of Unknown:cds_NZ_WFIY01000004.1_cds_WP_155864103.1_2051 target sequence
YFIAQEMKLSSSQEGLVSSASLMGMTIGALLFGFLADKVGRKKLMGVDLVFFMTFGITSAFSQNFTQLFISRLLLGIGIGGDYPI

SEQ ID NO: 30298 - protein, 85 aa, unidentified
  REGION 1..85: note = Description of Unknown:cds_NZ_WFIY01000004.1_cds_WP_155864103.1_2051 target sequence
SSTIISEFSPAVNRGKYLVASISLYWIGTLVASIANLAFLSLYEFWRYTFLFGALISLPIILLRIKLDESPRWLASKGMLVTEKF

SEQ ID NO: 30299 - protein, 85 aa, unidentified
  REGION 1..85: note = Description of Unknown:cds_NZ_WFIY01000004.1_cds_WP_155864103.1_2051 target sequence
NPLAENKGINGIKELFENPLLPYVLAVSIVWFLFDVASYGIGLYYPLVLREFAFPSNVEVLYVTMAIAGGALLGYLIAVSAIDSL

SEQ ID NO: 30300 - protein, 85 aa, unidentified
  REGION 1..85: note = Description of Unknown:cds_NZ_WFIY01000004.1_cds_WP_155864103.1_2051 target sequence
GRRKVLLTGLGGMAFLLIIGGITKIGGFLLVPYFMTFVALEQWAGAVTLFYPTEIFPTSVRSTAQGFATSVSRIGAILGVYFFPS

SEQ ID NO: 30301 - protein, 85 aa, unidentified
  REGION 1..85: note = Description of Unknown:cds_NZ_WFIY01000004.1_cds_WP_155864236.1_2207 target sequence
ELAELLAEYSTSISYEDLGEEEIHEAKRRIIDSLGVAKASINSKPAEIIRRLDIKGNYPMIGYKKGSPDYASFYNTFLIRYLDFN

SEQ ID NO: 30302 - protein, 85 aa, unidentified
  REGION 1..85: note = Description of Unknown:cds_NZ_WFIY01000004.1_cds_WP_155864236.1_2207 target sequence
DTYLSKEPLHPSDIIGGILTLGEKGRDIILSIVIGYEVGTRLCDSASLRLRGFDHVNFTQIASAVALSKLLNLNKEQTINAISMT

SEQ ID NO: 30303 - protein, 85 aa, unidentified
  REGION 1..85: note = Description of Unknown:cds_NZ_WFIY01000004.1_cds_WP_155864236.1_2207 target sequence
VIPHVALRQSRVGKLSMWKAGATAEAIRNSVFAVLLAKEGFTGPEKPFSGEKGFKLIAELDYSPFERMGTRKILQTSIKKYPVEY

SEQ ID NO: 30304 - protein, 85 aa, unidentified
  REGION 1..85: note = Description of Unknown:cds_NZ_WFIY01000004.1_cds_WP_155864236.1_2207 target sequence
HAQALVEAILNLKYEGEIKKIIVETYEAGKSILADEEKWNPETKETADHSIPFITATTLMLRKMWLENYSLIGDEKVKELMKKVE

SEQ ID NO: 30305 - protein, 84 aa, unidentified
  REGION 1..84: note = Description of Unknown:cds_NZ_WFIY01000004.1_cds_WP_155864236.1_2207 target sequence
KVEVVENPEYTKVYPRELPTKITIITDKGKFENEVRSPRGYYNNPMSDEEVEEKALKLGLTREVINKIWNLENENEVDKIVGSI

SEQ ID NO: 30306 - protein, 85 aa, unidentified
  REGION 1..85: note = Description of Unknown:cds_NZ_WFIY01000004.1_cds_WP_155864236.1_2207 target sequence
RRIIDSLGVAKASINSKPAEIIRRLDIKGNYPMIGYKKGSPDYASFYNTFLIRYLDFNDTYLSKEPLHPSDIIGGILTLGEKGRD

SEQ ID NO: 30307 - protein, 85 aa, unidentified
  REGION 1..85: note = Description of Unknown:cds_NZ_WFIY01000004.1_cds_WP_155864236.1_2207 target sequence
IILSIVIGYEVGTRLCDSASLRLRGFDHVNFTQIASAVALSKLLNLNKEQTINAISMTVIPHVALRQSRVGKLSMWKAGATAEAI

SEQ ID NO: 30308 - protein, 85 aa, unidentified
  REGION 1..85: note = Description of Unknown:cds_NZ_WFIY01000004.1_cds_WP_155864236.1_2207 target sequence
RNSVFAVLLAKEGFTGPEKPFSGEKGFKLIAELDYSPFERMGTRKILQTSIKKYPVEYHAQALVEAILNLKYEGEIKKIIVETYE

SEQ ID NO: 30309 - protein, 85 aa, unidentified
  REGION 1..85: note = Description of Unknown:cds_NZ_WFIY01000004.1_cds_WP_155864236.1_2207 target sequence
AGKSILADEEKWNPETKETADHSIPFITATTLMLRKMWLENYSLIGDEKVKELMKKVEVVENPEYTKVYPRELPTKITIITDKGK

SEQ ID NO: 30310 - protein, 85 aa, unidentified
  REGION 1..85: note = Description of Unknown:cds_NC_010438.1_cds_YP_001718616.1_7 target sequence
ASVSFSDEPRGRSGRVPLSLFAPLRTTDGSLFFRAMPQNGVPKGFGNKDQQVGYWNEQVRWRMKRGQRQNLPSNWHFYYHGTGPH

SEQ ID NO: 30311 - protein, 85 aa, unidentified
  REGION 1..85: note = Description of Unknown:cds_NC_010438.1_cds_YP_001718616.1_7 target sequence
ADAKFREKIQGVFWVAKQGSKVAPTDLPTRKRNQPTIEPQFDFDLPKNIEIVTAPSQPNSRSNSRSQSSGGSKSRANSQSRDNSD

SEQ ID NO: 30312 - protein, 85 aa, unidentified
  REGION 1..85: note = Description of Unknown:cds_NC_010438.1_cds_YP_001718616.1_7 target sequence
QQKTPKGSTNNSGSNSQERSQKSKKGKGSTDQDDLVNAVRQALMGLGFQPQGNSGKNGGKKSAPSSGKSTPKDSRSKSPARPQST

SEQ ID NO: 30313 - protein, 85 aa, unidentified
  REGION 1..85: note = Description of Unknown:cds_NC_010438.1_cds_YP_001718616.1_7 target sequence
KKQLDKPEWKRVPNKSESVTACFGPRDVSRNFGTKGLVAEGVEYSHFPQIAELLPTQAALAFGSRVEVKDFKDEVEIKFHYKMNV

SEQ ID NO: 30314 - protein, 84 aa, unidentified
  REGION 1..84: note = Description of Unknown:cds_NC_010438.1_cds_YP_001718616.1_7 target sequence
MNVPKENKNLQVFLDQVDAYLDPSREEKPKEQRKSKEKKKEEAPAQLNPAAPVFTPPVVLPDAVANVEFDMVDEVIDADHESFA

SEQ ID NO: 30315 - protein, 85 aa, unidentified
  REGION 1..85: note = Description of Unknown:cds_NC_010438.1_cds_YP_001718616.1_7 target sequence
DGSLFFRAMPQNGVPKGFGNKDQQVGYWNEQVRWRMKRGQRQNLPSNWHFYYHGTGPHADAKFREKIQGVFWVAKQGSKVAPTDL

SEQ ID NO: 30316 - protein, 85 aa, unidentified
  REGION 1..85: note = Description of Unknown:cds_NC_010438.1_cds_YP_001718616.1_7 target sequence
PTRKRNQPTIEPQFDFDLPKNIEIVTAPSQPNSRSNSRSQSSGGSKSRANSQSRDNSDQQKTPKGSTNNSGSNSQERSQKSKKGK

SEQ ID NO: 30317 - protein, 85 aa, unidentified
  REGION 1..85: note = Description of Unknown:cds_NC_010438.1_cds_YP_001718616.1_7 target sequence
GSTDQDDLVNAVRQALMGLGFQPQGNSGKNGGKKSAPSSGKSTPKDSRSKSPARPQSTKKQLDKPEWKRVPNKSESVTACFGPRD

SEQ ID NO: 30318 - protein, 85 aa, unidentified
  REGION 1..85: note = Description of Unknown:cds_NC_010438.1_cds_YP_001718616.1_7 target sequence
VSRNFGTKGLVAEGVEYSHFPQIAELLPTQAALAFGSRVEVKDFKDEVEIKFHYKMNVPKENKNLQVFLDQVDAYLDPSREEKPK

SEQ ID NO: 30319 - protein, 85 aa, unidentified
  REGION 1..85: note = Description of Unknown:cds_NZ_WFIY01000004.1_cds_WP_155862408.1_147 target sequence
SYHLKILGGGQEVGRAAIEVAGPDGSIVLDYGVNFNPDDTPNFPLQEMPSKVKAFIVSHAHLDHVGALPIYQISGSKPIYGTSIT

SEQ ID NO: 30320 - protein, 85 aa, unidentified
  REGION 1..85: note = Description of Unknown:cds_NZ_WFIY01000004.1_cds_WP_155862408.1_147 target sequence
KEIGELILKDFLKISGPKVPYEWVEVKKTLDNFNTIKYNEEFEIGSFRIKTSSAGHIPGSAITVIKTDKGDVTYTGDINITNTKL

SEQ ID NO: 30321 - protein, 85 aa, unidentified
  REGION 1..85: note = Description of Unknown:cds_NZ_WFIY01000004.1_cds_WP_155862408.1_147 target sequence
MKPADLDIMRDSRVIVTEATYGKFNHPQRKSVEDEFYNAIMEVLEEGGTVLVPAFSLSRSQEILSLLAERNIPYPVYYDGMVKTI

SEQ ID NO: 30322 - protein, 85 aa, unidentified
  REGION 1..85: note = Description of Unknown:cds_NZ_WFIY01000004.1_cds_WP_155862408.1_147 target sequence
MEIMINNPEYINNYEALKKAYNEFHYVNGLQDRKKAYKSNGVIVASAGMLKGGPAVYYFKKIADNPKNAVFLVSYQADNTPGRKL

SEQ ID NO: 30323 - protein, 84 aa, unidentified
  REGION 1..84: note = Description of Unknown:cds_NZ_WFIY01000004.1_cds_WP_155862408.1_147 target sequence
GRKLLELGKFDEESPLLKARLQLFDFSSHAGRDQLMQILKASKSLEKVVVVHSSADSAQYFADHVKQELGVEVIVPENGQEIQL

SEQ ID NO: 30324 - protein, 85 aa, unidentified
  REGION 1..85: note = Description of Unknown:cds_NZ_WFIY01000004.1_cds_WP_155862408.1_147 target sequence
VLDYGVNFNPDDTPNFPLQEMPSKVKAFIVSHAHLDHVGALPIYQISGSKPIYGTSITKEIGELILKDFLKISGPKVPYEWVEVK

SEQ ID NO: 30325 - protein, 85 aa, unidentified
  REGION 1..85: note = Description of Unknown:cds_NZ_WFIY01000004.1_cds_WP_155862408.1_147 target sequence
KTLDNFNTIKYNEEFEIGSFRIKTSSAGHIPGSAITVIKTDKGDVTYTGDINITNTKLMKPADLDIMRDSRVIVTEATYGKFNHP

SEQ ID NO: 30326 - protein, 85 aa, unidentified
  REGION 1..85: note = Description of Unknown:cds_NZ_WFIY01000004.1_cds_WP_155862408.1_147 target sequence
QRKSVEDEFYNAIMEVLEEGGTVLVPAFSLSRSQEILSLLAERNIPYPVYYDGMVKTIMEIMINNPEYINNYEALKKAYNEFHYV

SEQ ID NO: 30327 - protein, 85 aa, unidentified
  REGION 1..85: note = Description of Unknown:cds_NZ_WFIY01000004.1_cds_WP_155862408.1_147 target sequence
NGLQDRKKAYKSNGVIVASAGMLKGGPAVYYFKKIADNPKNAVFLVSYQADNTPGRKLLELGKFDEESPLLKARLQLFDFSSHAG

SEQ ID NO: 30328 - protein, 85 aa, unidentified
  REGION 1..85: note = Description of Unknown:hvTR_P04485 target sequence
ADISPGAFAPCVKARRPALRSPPLGTRKRKRPSRPLSSESEVESDTALESEVESETASDSTESGDQDEAPRIGGRRAPRRLGGRF

SEQ ID NO: 30329 - protein, 85 aa, unidentified
  REGION 1..85: note = Description of Unknown:hvTR_P04485 target sequence
FLDMSAESTTGTETDASVSDDPDDTSDWSYDDIPPRPKRARVNLRLTSSPDRRDGVIFPKMGRVRSTRETQPRAPTPSAPSPNAM

SEQ ID NO: 30330 - protein, 85 aa, unidentified
  REGION 1..85: note = Description of Unknown:hvTR_P04485 target sequence
LRRSVRQAQRRSSARWTPDLGYMRQCINQLFRVLRVARDPHGSANRLRHLIRDCYLMGYCRARLAPRTWCRLLQVSGGTWGMHLR

SEQ ID NO: 30331 - protein, 85 aa, unidentified
  REGION 1..85: note = Description of Unknown:hvTR_P04485 target sequence
NTIREVEARFDATAEPVCKLPCLETRRYGPECDLSNLEIHLSATSDDEISDATDLEAAGSDHTLASQSDTEDAPSPVTLETPEPR

SEQ ID NO: 30332 - protein, 84 aa, unidentified
  REGION 1..84: note = Description of Unknown:hvTR_P04485 target sequence
TPEPRGSLAVRLEDEFGEFDWTPQEGSQPWLSAVVADTSSVERPGPSDSGAGRAAEDRKCLDGCRKMRFSTACPYPCSDTFLRP

SEQ ID NO: 30333 - protein, 85 aa, unidentified
  REGION 1..85: note = Description of Unknown:hvTR_P04485 target sequence
KRKRPSRPLSSESEVESDTALESEVESETASDSTESGDQDEAPRIGGRRAPRRLGGRFFLDMSAESTTGTETDASVSDDPDDTSD

SEQ ID NO: 30334 - protein, 85 aa, unidentified
  REGION 1..85: note = Description of Unknown:hvTR_P04485 target sequence
WSYDDIPPRPKRARVNLRLTSSPDRRDGVIFPKMGRVRSTRETQPRAPTPSAPSPNAMLRRSVRQAQRRSSARWTPDLGYMRQCI

SEQ ID NO: 30335 - protein, 85 aa, unidentified
  REGION 1..85: note = Description of Unknown:hvTR_P04485 target sequence
NQLFRVLRVARDPHGSANRLRHLIRDCYLMGYCRARLAPRTWCRLLQVSGGTWGMHLRNTIREVEARFDATAEPVCKLPCLETRR

SEQ ID NO: 30336 - protein, 85 aa, unidentified
  REGION 1..85: note = Description of Unknown:hvTR_P04485 target sequence
YGPECDLSNLEIHLSATSDDEISDATDLEAAGSDHTLASQSDTEDAPSPVTLETPEPRGSLAVRLEDEFGEFDWTPQEGSQPWLS

SEQ ID NO: 30337 - protein, 85 aa, unidentified
  REGION 1..85: note = Description of Unknown:cds_NZ_WFIY01000004.1_cds_WP_155863049.1_945 target sequence
VDLEGIARRLQKDEARKEIIKWLEFYKGKRDINERIADSIITEVENSKKASIYEPVLSGIKAGDAGLGSRGIGDHIIHQKILEIA

SEQ ID NO: 30338 - protein, 85 aa, unidentified
  REGION 1..85: note = Description of Unknown:cds_NZ_WFIY01000004.1_cds_WP_155863049.1_945 target sequence
GKKEFEDAGIADDIIASIDGIHSRLSYFPFLAGFHATKATLRDIMVKGAEPLGVIVDIHLADDADVSYLLDFEAGVTTVTDFLGV

SEQ ID NO: 30339 - protein, 85 aa, unidentified
  REGION 1..85: note = Description of Unknown:cds_NZ_WFIY01000004.1_cds_WP_155863049.1_945 target sequence
PILAGSTLRIGGDLVLGERISGGVGAIGKLKSKFFARHNVREGMKIVMTQGNGGGTISATAIYYGFPEVIEETLSLDELVTCKII

SEQ ID NO: 30340 - protein, 85 aa, unidentified
  REGION 1..85: note = Description of Unknown:cds_NZ_WFIY01000004.1_cds_WP_155863049.1_945 target sequence
SNNPSIAESMTDVTNGGLRMDAIEISEANKLSFIIDSEKFLHLINPKVLKMLNELQIDPFGISIDSILIFTNNEDKVLELLNKNK

SEQ ID NO: 30341 - protein, 84 aa, unidentified
  REGION 1..84: note = Description of Unknown:cds_NZ_WFIY01000004.1_cds_WP_155863049.1_945 target sequence
LNKNKIKADVIGYVTTYKGYPILTEDGKRLEARFRESPYTPVKKVIGNYSPYTIDDIEKHLSNAVKFSKIRKENVLKNLKSHFA

SEQ ID NO: 30342 - protein, 85 aa, unidentified
  REGION 1..85: note = Description of Unknown:cds_NZ_WFIY01000004.1_cds_WP_155863049.1_945 target sequence
GKRDINERIADSIITEVENSKKASIYEPVLSGIKAGDAGLGSRGIGDHIIHQKILEIAGKKEFEDAGIADDIIASIDGIHSRLSY

SEQ ID NO: 30343 - protein, 85 aa, unidentified
  REGION 1..85: note = Description of Unknown:cds_NZ_WFIY01000004.1_cds_WP_155863049.1_945 target sequence
FPFLAGFHATKATLRDIMVKGAEPLGVIVDIHLADDADVSYLLDFEAGVTTVTDFLGVPILAGSTLRIGGDLVLGERISGGVGAI

SEQ ID NO: 30344 - protein, 85 aa, unidentified
  REGION 1..85: note = Description of Unknown:cds_NZ_WFIY01000004.1_cds_WP_155863049.1_945 target sequence
GKLKSKFFARHNVREGMKIVMTQGNGGGTISATAIYYGFPEVIEETLSLDELVTCKIISNNPSIAESMTDVTNGGLRMDAIEISE

SEQ ID NO: 30345 - protein, 85 aa, unidentified
  REGION 1..85: note = Description of Unknown:cds_NZ_WFIY01000004.1_cds_WP_155863049.1_945 target sequence
ANKLSFIIDSEKFLHLINPKVLKMLNELQIDPFGISIDSILIFTNNEDKVLELLNKNKIKADVIGYVTTYKGYPILTEDGKRLEA

SEQ ID NO: 30346 - protein, 85 aa, unidentified
  REGION 1..85: note = Description of Unknown:cds_NZ_WFIY01000004.1_cds_WP_155863182.1_1113 target sequence
AIEEVLSSNLYTQQIKKLYKVGEILGLQDDQLEALATPERVIQVKIQVPSSNGKIKTFTGWRSQHNSALGPYKGGVRYHPNVTQD

SEQ ID NO: 30347 - protein, 85 aa, unidentified
  REGION 1..85: note = Description of Unknown:cds_NZ_WFIY01000004.1_cds_WP_155863182.1_1113 target sequence
EVIALSMIMTWKNSLLQLPYGGGKAGIRVDPKSLSRTELEILSRNFIDALYKYIGSDLDIPAPDVNTDSQIMAWFLDEYIKVSGR

SEQ ID NO: 30348 - protein, 85 aa, unidentified
  REGION 1..85: note = Description of Unknown:cds_NZ_WFIY01000004.1_cds_WP_155863182.1_1113 target sequence
VDLGAFTGKPVELGGISVREYSTGLGVAHITKLAAEKFLDGIEGKRVIIQGFGNLGSFAAKFLSEMGAKIVGVSDSKGGVIDYNG

SEQ ID NO: 30349 - protein, 85 aa, unidentified
  REGION 1..85: note = Description of Unknown:cds_NZ_WFIY01000004.1_cds_WP_155863182.1_1113 target sequence
LDFNKLMEVKKTTGSVINYPEGKKVTNDELLISECDILIPGALENVINKFNAPKIKAKLIVEGANGPLTADADEIMKQRGIPVVP

SEQ ID NO: 30350 - protein, 84 aa, unidentified
  REGION 1..84: note = Description of Unknown:cds_NZ_WFIY01000004.1_cds_WP_155863182.1_1113 target sequence
IPVVPDILANSGGVVGSYVEWANNKMGEIIEEEEAKKLILNRMEKAFSEMYSKYNKLGDQDLRTSAMVVAVERVVNAMKARGLI

SEQ ID NO: 30351 - protein, 85 aa, unidentified
  REGION 1..85: note = Description of Unknown:cds_NZ_WFIY01000004.1_cds_WP_155863182.1_1113 target sequence
QDDQLEALATPERVIQVKIQVPSSNGKIKTFTGWRSQHNSALGPYKGGVRYHPNVTQDEVIALSMIMTWKNSLLQLPYGGGKAGI

SEQ ID NO: 30352 - protein, 85 aa, unidentified
  REGION 1..85: note = Description of Unknown:cds_NZ_WFIY01000004.1_cds_WP_155863182.1_1113 target sequence
RVDPKSLSRTELEILSRNFIDALYKYIGSDLDIPAPDVNTDSQIMAWFLDEYIKVSGRVDLGAFTGKPVELGGISVREYSTGLGV

SEQ ID NO: 30353 - protein, 85 aa, unidentified
  REGION 1..85: note = Description of Unknown:cds_NZ_WFIY01000004.1_cds_WP_155863182.1_1113 target sequence
AHITKLAAEKFLDGIEGKRVIIQGFGNLGSFAAKFLSEMGAKIVGVSDSKGGVIDYNGLDFNKLMEVKKTTGSVINYPEGKKVTN

SEQ ID NO: 30354 - protein, 85 aa, unidentified
  REGION 1..85: note = Description of Unknown:cds_NZ_WFIY01000004.1_cds_WP_155863182.1_1113 target sequence
DELLISECDILIPGALENVINKFNAPKIKAKLIVEGANGPLTADADEIMKQRGIPVVPDILANSGGVVGSYVEWANNKMGEIIEE

SEQ ID NO: 30355 - protein, 85 aa, unidentified
  REGION 1..85: note = Description of Unknown:cds_NZ_WFIY01000004.1_cds_WP_155863209.1_1150 target sequence
LSAVIDAGYNSFRLSIYDVFQNNTFRLLGSLKYFVRIGEGIKEGSKISDDKIKTAEKAFIAFKNLINTKGVKNVKAVGTSAFRYA

SEQ ID NO: 30356 - protein, 85 aa, unidentified
  REGION 1..85: note = Description of Unknown:cds_NZ_WFIY01000004.1_cds_WP_155863209.1_1150 target sequence
LNGEEVSDKLSEILGEDLRIISGEEEGRFSATGVINTLPITEDAIIFEIGGGSLEIAKIQAGNITKVYQLPIGALKLATYSEKEI

SEQ ID NO: 30357 - protein, 85 aa, unidentified
  REGION 1..85: note = Description of Unknown:cds_NZ_WFIY01000004.1_cds_WP_155863209.1_1150 target sequence
RKIVSDEISTISITPSKLVIGSGGNMRALAKLDEKISGFPSDSIHGYVVPSSQISKYAKVLFSLDIEERSALPGISKERAYTIHS

SEQ ID NO: 30358 - protein, 85 aa, unidentified
  REGION 1..85: note = Description of Unknown:cds_NZ_WFIY01000004.1_cds_WP_155863209.1_1150 target sequence
GAVIIDELLQHFNADKVMVSAFGMREGVLTDGVKLDRYKWLEAIAFYHYLDPPWDVFYDSEKKVKGEMGFYVGSAAFISSVFKMS

SEQ ID NO: 30359 - protein, 84 aa, unidentified
  REGION 1..84: note = Description of Unknown:cds_NZ_WFIY01000004.1_cds_WP_155863209.1_1150 target sequence
VFKMSEYLNPYDACYRMTRTAIIPGFTQKEILTIGLICKAAKGKIKKKNIKSVGLDFKKKELYEYGKIVKEIVETYPLGVRWSG

SEQ ID NO: 30360 - protein, 85 aa, unidentified
  REGION 1..85: note = Description of Unknown:cds_NZ_WFIY01000004.1_cds_WP_155863209.1_1150 target sequence
LGSLKYFVRIGEGIKEGSKISDDKIKTAEKAFIAFKNLINTKGVKNVKAVGTSAFRYALNGEEVSDKLSEILGEDLRIISGEEEG

SEQ ID NO: 30361 - protein, 85 aa, unidentified
  REGION 1..85: note = Description of Unknown:cds_NZ_WFIY01000004.1_cds_WP_155863209.1_1150 target sequence
RFSATGVINTLPITEDAIIFEIGGGSLEIAKIQAGNITKVYQLPIGALKLATYSEKEIRKIVSDEISTISITPSKLVIGSGGNMR

SEQ ID NO: 30362 - protein, 85 aa, unidentified
  REGION 1..85: note = Description of Unknown:cds_NZ_WFIY01000004.1_cds_WP_155863209.1_1150 target sequence
ALAKLDEKISGFPSDSIHGYVVPSSQISKYAKVLFSLDIEERSALPGISKERAYTIHSGAVIIDELLQHFNADKVMVSAFGMREG

SEQ ID NO: 30363 - protein, 85 aa, unidentified
  REGION 1..85: note = Description of Unknown:cds_NZ_WFIY01000004.1_cds_WP_155863209.1_1150 target sequence
VLTDGVKLDRYKWLEAIAFYHYLDPPWDVFYDSEKKVKGEMGFYVGSAAFISSVFKMSEYLNPYDACYRMTRTAIIPGFTQKEIL

SEQ ID NO: 30364 - protein, 85 aa, unidentified
  REGION 1..85: note = Description of Unknown:cds_NZ_WFIY01000004.1_cds_WP_155863368.1_1340 target sequence
SFKISRRDFLKLALTATMLTAPEWDKAVAKAVDMIKNGDVNIVWFEAQACEGNTTAIIQATDPSVVEVLFGASPLVGPGSVKISF

SEQ ID NO: 30365 - protein, 85 aa, unidentified
  REGION 1..85: note = Description of Unknown:cds_NZ_WFIY01000004.1_cds_WP_155863368.1_1340 target sequence
WPSIMPQQGEQAVQILEDVIAGNYNPYVLVLEGSFPDETTAQQYNPNNPGYFGMLGPKTLNQWVAELLPNAVAVLAVGNCASYGG

SEQ ID NO: 30366 - protein, 85 aa, unidentified
  REGION 1..85: note = Description of Unknown:cds_NZ_WFIY01000004.1_cds_WP_155863368.1_1340 target sequence
LIADKVYQPPPKFITPSWSPSPTGAIGFFDDPLRGYKGLLSRFYEDNYLNAQAGAAPFYTFVKNPNAYLDITPSPSASVKPAIAV

SEQ ID NO: 30367 - protein, 85 aa, unidentified
  REGION 1..85: note = Description of Unknown:cds_NZ_WFIY01000004.1_cds_WP_155863368.1_1340 target sequence
PGCPANGNGIMRTLANLVLWAGGLAPLPELDQYWRPLYFFKYTVHEQCPRAAWYAAGDFRTQPGQPTSACLFEVGCKGPVSNCPW

SEQ ID NO: 30368 - protein, 84 aa, unidentified
  REGION 1..84: note = Description of Unknown:cds_NZ_WFIY01000004.1_cds_WP_155863368.1_1340 target sequence
SNCPWNKYGWVGGIGGPTRTGAVCIGCTMPGFSDLYEPFYKPLQVPVPSSTLTTAGLIAGGIAIGAVAGIAEKKIVQKGKLRGS

SEQ ID NO: 30369 - protein, 85 aa, unidentified
  REGION 1..85: note = Description of Unknown:cds_NZ_WFIY01000004.1_cds_WP_155863368.1_1340 target sequence
VAKAVDMIKNGDVNIVWFEAQACEGNTTAIIQATDPSVVEVLFGASPLVGPGSVKISFWPSIMPQQGEQAVQILEDVIAGNYNPY

SEQ ID NO: 30370 - protein, 85 aa, unidentified
  REGION 1..85: note = Description of Unknown:cds_NZ_WFIY01000004.1_cds_WP_155863368.1_1340 target sequence
VLVLEGSFPDETTAQQYNPNNPGYFGMLGPKTLNQWVAELLPNAVAVLAVGNCASYGGLIADKVYQPPPKFITPSWSPSPTGAIG

SEQ ID NO: 30371 - protein, 85 aa, unidentified
  REGION 1..85: note = Description of Unknown:cds_NZ_WFIY01000004.1_cds_WP_155863368.1_1340 target sequence
FFDDPLRGYKGLLSRFYEDNYLNAQAGAAPFYTFVKNPNAYLDITPSPSASVKPAIAVPGCPANGNGIMRTLANLVLWAGGLAPL

SEQ ID NO: 30372 - protein, 85 aa, unidentified
  REGION 1..85: note = Description of Unknown:cds_NZ_WFIY01000004.1_cds_WP_155863368.1_1340 target sequence
PELDQYWRPLYFFKYTVHEQCPRAAWYAAGDFRTQPGQPTSACLFEVGCKGPVSNCPWNKYGWVGGIGGPTRTGAVCIGCTMPGF

SEQ ID NO: 30373 - protein, 85 aa, unidentified
  REGION 1..85: note = Description of Unknown:cds_NZ_WFIY01000004.1_cds_WP_155863726.1_1591 target sequence
RILLHSYLLEAGSGGVKRNREVIKYWKKYVDEIIYVPLLGDMRRASEDEEFRKKMYNEIKALGLEIPEKVNEVIDSEVIKRVPLN

SEQ ID NO: 30374 - protein, 85 aa, unidentified
  REGION 1..85: note = Description of Unknown:cds_NZ_WFIY01000004.1_cds_WP_155863726.1_1591 target sequence
MSKLKFDLYSNITQYKINSEISKIMGKIDADIYYAQQEFPQMVDFLTKIAKNRNVGALIHIENFLGSLTEDLSHFYRAYKSMGLS

SEQ ID NO: 30375 - protein, 85 aa, unidentified
  REGION 1..85: note = Description of Unknown:cds_NZ_WFIY01000004.1_cds_WP_155863726.1_1591 target sequence
GIMYACYVTFLRSYPRRRKWVELINSRKVKFAFSVSEPLAEIYPFMRKIYTRVLKPGNAFDKKLLDFRDKGKEDYSVFYARLSPA

SEQ ID NO: 30376 - protein, 85 aa, unidentified
  REGION 1..85: note = Description of Unknown:cds_NZ_WFIY01000004.1_cds_WP_155863726.1_1591 target sequence
KGVLELLKIWRKIDENKKLVIMGKFSDKRVEKLFMKNKPKNVEYLGFVSQDKLIDVVSKAKVLVYPSHSDSFSLTILESLALGTP

SEQ ID NO: 30377 - protein, 84 aa, unidentified
  REGION 1..84: note = Description of Unknown:cds_NZ_WFIY01000004.1_cds_WP_155863726.1_1591 target sequence
ALGTPVIAYKIPGIRRIYEGLNAVKLVKEGDLAQFRQEIRKIYDMPTKEYEDLINDKKLWEFLDEHSSWEKVALNELEELKKVV

SEQ ID NO: 30378 - protein, 85 aa, unidentified
  REGION 1..85: note = Description of Unknown:cds_NZ_WFIY01000004.1_cds_WP_155863726.1_1591 target sequence
KYVDEIIYVPLLGDMRRASEDEEFRKKMYNEIKALGLEIPEKVNEVIDSEVIKRVPLNMSKLKFDLYSNITQYKINSEISKIMGK

SEQ ID NO: 30379 - protein, 85 aa, unidentified
  REGION 1..85: note = Description of Unknown:cds_NZ_WFIY01000004.1_cds_WP_155863726.1_1591 target sequence
IDADIYYAQQEFPQMVDFLTKIAKNRNVGALIHIENFLGSLTEDLSHFYRAYKSMGLSGIMYACYVTFLRSYPRRRKWVELINSR

SEQ ID NO: 30380 - protein, 85 aa, unidentified
  REGION 1..85: note = Description of Unknown:cds_NZ_WFIY01000004.1_cds_WP_155863726.1_1591 target sequence
KVKFAFSVSEPLAEIYPFMRKIYTRVLKPGNAFDKKLLDFRDKGKEDYSVFYARLSPAKGVLELLKIWRKIDENKKLVIMGKFSD

SEQ ID NO: 30381 - protein, 85 aa, unidentified
  REGION 1..85: note = Description of Unknown:cds_NZ_WFIY01000004.1_cds_WP_155863726.1_1591 target sequence
KRVEKLFMKNKPKNVEYLGFVSQDKLIDVVSKAKVLVYPSHSDSFSLTILESLALGTPVIAYKIPGIRRIYEGLNAVKLVKEGDL

SEQ ID NO: 30382 - protein, 85 aa, unidentified
  REGION 1..85: note = Description of Unknown:cds_NZ_WFIY01000002.1_cds_WP_155862280.1_2375 target sequence
IFEFLEMFYMIVTRTFLYWPIHFIIFLVAATFIRGYLARTYKPHTEGLKRENVKVSVVIPEYNEDLDIFEKVIKSAVENKPDEII

SEQ ID NO: 30383 - protein, 85 aa, unidentified
  REGION 1..85: note = Description of Unknown:cds_NZ_WFIY01000002.1_cds_WP_155862280.1_2375 target sequence
IVYEDERKEIEKIAKKYKTKGVNIIDFYPGIRLGKRASLALAWMIAKGDIIVQLDSDTIMQPGAINEIVKPFSDPKVAGVQGHPL

SEQ ID NO: 30384 - protein, 85 aa, unidentified
  REGION 1..85: note = Description of Unknown:cds_NZ_WFIY01000002.1_cds_WP_155862280.1_2375 target sequence
LFRTGGKIPYILGQIIELSRDIVCKMLDGELVVIDGKIAAYRRDFLIKNIKEFLIEKWGKRKIIVADDRALTFLANIQGYKTVYQ

SEQ ID NO: 30385 - protein, 85 aa, unidentified
  REGION 1..85: note = Description of Unknown:cds_NZ_WFIY01000002.1_cds_WP_155862280.1_2375 target sequence
STALGLSAAQPTLTKFILQQLRWARSGYLYLIKDIKTGLFFKSTRRYRFQMLTYLLAPVSFTVAWVQTLLANVEVVNIIGAYINS

SEQ ID NO: 30386 - protein, 84 aa, unidentified
  REGION 1..84: note = Description of Unknown:cds_NZ_WFIY01000002.1_cds_WP_155862280.1_2375 target sequence
AYINSIVSLNIPIILYSIFVFILGLTMTLNFSLKALGIDYNEIKKLSITAFDYVILGIIGLFVIYPMSLYAMLTYRNVTSWLTR

SEQ ID NO: 30387 - protein, 85 aa, unidentified
  REGION 1..85: note = Description of Unknown:cds_NZ_WFIY01000002.1_cds_WP_155862280.1_2375 target sequence
VAATFIRGYLARTYKPHTEGLKRENVKVSVVIPEYNEDLDIFEKVIKSAVENKPDEIIIVYEDERKEIEKIAKKYKTKGVNIIDF

SEQ ID NO: 30388 - protein, 85 aa, unidentified
  REGION 1..85: note = Description of Unknown:cds_NZ_WFIY01000002.1_cds_WP_155862280.1_2375 target sequence
YPGIRLGKRASLALAWMIAKGDIIVQLDSDTIMQPGAINEIVKPFSDPKVAGVQGHPLLFRTGGKIPYILGQIIELSRDIVCKML

SEQ ID NO: 30389 - protein, 85 aa, unidentified
  REGION 1..85: note = Description of Unknown:cds_NZ_WFIY01000002.1_cds_WP_155862280.1_2375 target sequence
DGELVVIDGKIAAYRRDFLIKNIKEFLIEKWGKRKIIVADDRALTFLANIQGYKTVYQSTALGLSAAQPTLTKFILQQLRWARSG

SEQ ID NO: 30390 - protein, 85 aa, unidentified
  REGION 1..85: note = Description of Unknown:cds_NZ_WFIY01000002.1_cds_WP_155862280.1_2375 target sequence
YLYLIKDIKTGLFFKSTRRYRFQMLTYLLAPVSFTVAWVQTLLANVEVVNIIGAYINSIVSLNIPIILYSIFVFILGLTMTLNFS

SEQ ID NO: 30391 - protein, 85 aa, unidentified
  REGION 1..85: note = Description of Unknown:hvTR_P0DTC9 target sequence
SDNGPQNQRNAPRITFGGPSDSTGSNQNGERSGARSKQRRPQGLPNNTASWFTALTQHGKEDLKFPRGQGVPINTNSSPDDQIGY

SEQ ID NO: 30392 - protein, 85 aa, unidentified
  REGION 1..85: note = Description of Unknown:hvTR_P0DTC9 target sequence
YRRATRRIRGGDGKMKDLSPRWYFYYLGTGPEAGLPYGANKDGIIWVATEGALNTPKDHIGTRNPANNAAIVLQLPQGTTLPKGF

SEQ ID NO: 30393 - protein, 85 aa, unidentified
  REGION 1..85: note = Description of Unknown:hvTR_P0DTC9 target sequence
YAEGSRGGSQASSRSSSRSRNSSRNSTPGSSRGTSPARMAGNGGDAALALLLLDRLNQLESKMSGKGQQQQGQTVTKKSAAEASK

SEQ ID NO: 30394 - protein, 85 aa, unidentified
  REGION 1..85: note = Description of Unknown:hvTR_P0DTC9 target sequence
KPRQKRTATKAYNVTQAFGRRGPEQTQGNFGDQELIRQGTDYKHWPQIAQFAPSASAFFGMSRIGMEVTPSGTWLTYTGAIKLDD

SEQ ID NO: 30395 - protein, 84 aa, unidentified
  REGION 1..84: note = Description of Unknown:hvTR_P0DTC9 target sequence
AIKLDDKDPNFKDQVILLNKHIDAYKTFPPTEPKKDKKKKADETQALPQRQKKQQTVTLLPAADLDDFSKQLQQSMSSADSTQA

SEQ ID NO: 30396 - protein, 85 aa, unidentified
  REGION 1..85: note = Description of Unknown:hvTR_P0DTC9 target sequence
NGERSGARSKQRRPQGLPNNTASWFTALTQHGKEDLKFPRGQGVPINTNSSPDDQIGYYRRATRRIRGGDGKMKDLSPRWYFYYL

SEQ ID NO: 30397 - protein, 85 aa, unidentified
  REGION 1..85: note = Description of Unknown:hvTR_P0DTC9 target sequence
GTGPEAGLPYGANKDGIIWVATEGALNTPKDHIGTRNPANNAAIVLQLPQGTTLPKGFYAEGSRGGSQASSRSSSRSRNSSRNST

SEQ ID NO: 30398 - protein, 85 aa, unidentified
  REGION 1..85: note = Description of Unknown:hvTR_P0DTC9 target sequence
PGSSRGTSPARMAGNGGDAALALLLLDRLNQLESKMSGKGQQQQGQTVTKKSAAEASKKPRQKRTATKAYNVTQAFGRRGPEQTQ

SEQ ID NO: 30399 - protein, 85 aa, unidentified
  REGION 1..85: note = Description of Unknown:hvTR_P0DTC9 target sequence
GNFGDQELIRQGTDYKHWPQIAQFAPSASAFFGMSRIGMEVTPSGTWLTYTGAIKLDDKDPNFKDQVILLNKHIDAYKTFPPTEP

SEQ ID NO: 30400 - protein, 85 aa, unidentified
  REGION 1..85: note = Description of Unknown:cds_NZ_WFIY01000004.1_cds_WP_155863074.1_986 target sequence
SILNEIENRYFAIIYTYKTIGFDNLSSHYLRENEISLIHNIVGSQMAIIQTCNRIEIYLYSEDPDTPTKLLNFLDQVHGKKISID

SEQ ID NO: 30401 - protein, 85 aa, unidentified
  REGION 1..85: note = Description of Unknown:cds_NZ_WFIY01000004.1_cds_WP_155863074.1_986 target sequence
ATILTGSKAIEHLFEVASGIDSMAIGEYEILSQVRLSLENAKKLHMIGKELEILFERAIKVGRRVRQQTNISKGKVGLYSIAIEL

SEQ ID NO: 30402 - protein, 85 aa, unidentified
  REGION 1..85: note = Description of Unknown:cds_NZ_WFIY01000004.1_cds_WP_155863074.1_986 target sequence
AKTRVDLKTANIAVIGAGQIGSRLVSMLNSEGAKNVTILNRTIEKAKELAEKYGYSYSNLDFSKLADFDVIFSAIFYPRVIRIDN

SEQ ID NO: 30403 - protein, 85 aa, unidentified
  REGION 1..85: note = Description of Unknown:cds_NZ_WFIY01000004.1_cds_WP_155863074.1_986 target sequence
KFIIDLSSPPIFQGNEVYTLKNLQQISEEIRKKRLSELSKAKDIIEEGIRDFILDYENLKYDMIVSQIMKNIEEIRQNEVKKALK

SEQ ID NO: 30404 - protein, 84 aa, unidentified
  REGION 1..84: note = Description of Unknown:cds_NZ_WFIY01000004.1_cds_WP_155863074.1_986 target sequence
VKKALKELNGDNAEEVLNAMTKSMVKKMFYPLLSKIKEAVRNNETNYINLILELFNNGKLSDSKTKKIEEKQVNKRYDSRNQSN

SEQ ID NO: 30405 - protein, 85 aa, unidentified
  REGION 1..85: note = Description of Unknown:cds_NZ_WFIY01000004.1_cds_WP_155863074.1_986 target sequence
HYLRENEISLIHNIVGSQMAIIQTCNRIEIYLYSEDPDTPTKLLNFLDQVHGKKISIDATILTGSKAIEHLFEVASGIDSMAIGE

SEQ ID NO: 30406 - protein, 85 aa, unidentified
  REGION 1..85: note = Description of Unknown:cds_NZ_WFIY01000004.1_cds_WP_155863074.1_986 target sequence
YEILSQVRLSLENAKKLHMIGKELEILFERAIKVGRRVRQQTNISKGKVGLYSIAIELAKTRVDLKTANIAVIGAGQIGSRLVSM

SEQ ID NO: 30407 - protein, 85 aa, unidentified
  REGION 1..85: note = Description of Unknown:cds_NZ_WFIY01000004.1_cds_WP_155863074.1_986 target sequence
LNSEGAKNVTILNRTIEKAKELAEKYGYSYSNLDFSKLADFDVIFSAIFYPRVIRIDNKFIIDLSSPPIFQGNEVYTLKNLQQIS

SEQ ID NO: 30408 - protein, 85 aa, unidentified
  REGION 1..85: note = Description of Unknown:cds_NZ_WFIY01000004.1_cds_WP_155863074.1_986 target sequence
EEIRKKRLSELSKAKDIIEEGIRDFILDYENLKYDMIVSQIMKNIEEIRQNEVKKALKELNGDNAEEVLNAMTKSMVKKMFYPLL

SEQ ID NO: 30409 - protein, 85 aa, unidentified
  REGION 1..85: note = Description of Unknown:cds_NZ_WFIY01000004.1_cds_WP_155864007.1_1935 target sequence
RAIIIGAGHNGLIASYYLRKAGFEVLIFDNKFGGMTDTTVIKGVKVSRASYVLGLMPKKFIDEFEIPVIEQDPIQTIWLEDRIIP

SEQ ID NO: 30410 - protein, 85 aa, unidentified
  REGION 1..85: note = Description of Unknown:cds_NZ_WFIY01000004.1_cds_WP_155864007.1_1935 target sequence
FWRNREKRIKELIKAGEDKFPEFEEKIFKFKKLLEEKFTFVITPPSEKEVIEEAKNAGIEEVMRPSKEFLSKYLSRDLHDFFIYP

SEQ ID NO: 30411 - protein, 85 aa, unidentified
  REGION 1..85: note = Description of Unknown:cds_NZ_WFIY01000004.1_cds_WP_155864007.1_1935 target sequence
GMEDSPAYLVAYFYDDWSFVKGGMGTVAEKIFEKANKLGVNFVREKVDKILVEHDRAVGVKVGDKVYKADVILSTASPAETMKLA

SEQ ID NO: 30412 - protein, 85 aa, unidentified
  REGION 1..85: note = Description of Unknown:cds_NZ_WFIY01000004.1_cds_WP_155864007.1_1935 target sequence
EYEHKFTLGKNRWVKYNVILKEFPKVNERIKNFVNSIIDFEGGEVVIPSTVDDRGGIIMEFMGNYEEVIERFKGEIVYVDKLDAR

SEQ ID NO: 30413 - protein, 84 aa, unidentified
  REGION 1..84: note = Description of Unknown:cds_NZ_WFIY01000004.1_cds_WP_155864007.1_1935 target sequence
DKLDARIAEEIYNLPAGNLNHLPMKEPYLFDGRPEKGWGYKTPIKDLYLGGAGTYPGGQVSGIPGYNSARLIVKEKLGKEIEDI

SEQ ID NO: 30414 - protein, 85 aa, unidentified
  REGION 1..85: note = Description of Unknown:cds_NZ_WFIY01000004.1_cds_WP_155864007.1_1935 target sequence
FDNKFGGMTDTTVIKGVKVSRASYVLGLMPKKFIDEFEIPVIEQDPIQTIWLEDRIIPFWRNREKRIKELIKAGEDKFPEFEEKI

SEQ ID NO: 30415 - protein, 85 aa, unidentified
  REGION 1..85: note = Description of Unknown:cds_NZ_WFIY01000004.1_cds_WP_155864007.1_1935 target sequence
FKFKKLLEEKFTFVITPPSEKEVIEEAKNAGIEEVMRPSKEFLSKYLSRDLHDFFIYPGMEDSPAYLVAYFYDDWSFVKGGMGTV

SEQ ID NO: 30416 - protein, 85 aa, unidentified
  REGION 1..85: note = Description of Unknown:cds_NZ_WFIY01000004.1_cds_WP_155864007.1_1935 target sequence
AEKIFEKANKLGVNFVREKVDKILVEHDRAVGVKVGDKVYKADVILSTASPAETMKLAEYEHKFTLGKNRWVKYNVILKEFPKVN

SEQ ID NO: 30417 - protein, 85 aa, unidentified
  REGION 1..85: note = Description of Unknown:cds_NZ_WFIY01000004.1_cds_WP_155864007.1_1935 target sequence
ERIKNFVNSIIDFEGGEVVIPSTVDDRGGIIMEFMGNYEEVIERFKGEIVYVDKLDARIAEEIYNLPAGNLNHLPMKEPYLFDGR

SEQ ID NO: 30418 - protein, 85 aa, unidentified
  REGION 1..85: note = Description of Unknown:cds_NZ_WFIY01000004.1_cds_WP_155862332.1_58 target sequence
KKIIINIEGSVNSGKSTLLGYLLWKYSTNKDYIAQKTRLFQIYNKQYKVPVQEYLANLIQITSDETIRQMTSKSHAVNITIGDLQ

SEQ ID NO: 30419 - protein, 85 aa, unidentified
  REGION 1..85: note = Description of Unknown:cds_NZ_WFIY01000004.1_cds_WP_155862332.1_58 target sequence
LIAIDIGGHNRYTYQAHLSTVESDTTLFAIPVDEIKEKAYLKNTMLTHLITTYLVRKAFGRTPEFHVIITKIDMEKDYDKYVSQV

SEQ ID NO: 30420 - protein, 85 aa, unidentified
  REGION 1..85: note = Description of Unknown:cds_NZ_WFIY01000004.1_cds_WP_155862332.1_58 target sequence
KSDLDRIGKILGMTDARFYYYTSSIIVKGINDIQAEGQYEELLKNLESTVQTRINSSKTVFHARDVMNPTENIKVLAGRVMSGKI

SEQ ID NO: 30421 - protein, 85 aa, unidentified
  REGION 1..85: note = Description of Unknown:cds_NZ_WFIY01000004.1_cds_WP_155862332.1_58 target sequence
QKNDVLNTPYGEQKVIQIEEFGQKIYAADPTSYIAIRFERDNFPLNFKGGEVLGNFEYFSNGEITLLDLRDTMKRIQEEFELKDE

SEQ ID NO: 30422 - protein, 84 aa, unidentified
  REGION 1..84: note = Description of Unknown:cds_NZ_WFIY01000004.1_cds_WP_155862332.1_58 target sequence
EFELKDEQYYNPPSKIQKGTKFYTTINGYRTALKVEDVISEESKKLRLKVKIEDRVDKISVFGEIRNTGITYEENNKIWGAFIL

SEQ ID NO: 30423 - protein, 85 aa, unidentified
  REGION 1..85: note = Description of Unknown:cds_NZ_WFIY01000004.1_cds_WP_155862332.1_58 target sequence
TNKDYIAQKTRLFQIYNKQYKVPVQEYLANLIQITSDETIRQMTSKSHAVNITIGDLQLIAIDIGGHNRYTYQAHLSTVESDTTL

SEQ ID NO: 30424 - protein, 85 aa, unidentified
  REGION 1..85: note = Description of Unknown:cds_NZ_WFIY01000004.1_cds_WP_155862332.1_58 target sequence
FAIPVDEIKEKAYLKNTMLTHLITTYLVRKAFGRTPEFHVIITKIDMEKDYDKYVSQVKSDLDRIGKILGMTDARFYYYTSSIIV

SEQ ID NO: 30425 - protein, 85 aa, unidentified
  REGION 1..85: note = Description of Unknown:cds_NZ_WFIY01000004.1_cds_WP_155862332.1_58 target sequence
KGINDIQAEGQYEELLKNLESTVQTRINSSKTVFHARDVMNPTENIKVLAGRVMSGKIQKNDVLNTPYGEQKVIQIEEFGQKIYA

SEQ ID NO: 30426 - protein, 85 aa, unidentified
  REGION 1..85: note = Description of Unknown:cds_NZ_WFIY01000004.1_cds_WP_155862332.1_58 target sequence
ADPTSYIAIRFERDNFPLNFKGGEVLGNFEYFSNGEITLLDLRDTMKRIQEEFELKDEQYYNPPSKIQKGTKFYTTINGYRTALK

SEQ ID NO: 30427 - protein, 85 aa, unidentified
  REGION 1..85: note = Description of Unknown:cds_NZ_WFIY01000004.1_cds_WP_155862492.1_251 target sequence
NVYPITSFAQPYEVFKCVRANEDFAALLESVSGPQNKARYSIIAWGKKDYLSSEYSEDIADKLYSISTYGGFSIPEFNAYIGYVS

SEQ ID NO: 30428 - protein, 85 aa, unidentified
  REGION 1..85: note = Description of Unknown:cds_NZ_WFIY01000004.1_cds_WP_155862492.1_251 target sequence
YDAVRNWETVKDIKPVAESWPNGEFFLPENVIIYDHNSAKVYVNGDIPEISSCGEIGNIKFSSYDQSMNKNEFEDAVNEILEYIR

SEQ ID NO: 30429 - protein, 85 aa, unidentified
  REGION 1..85: note = Description of Unknown:cds_NZ_WFIY01000004.1_cds_WP_155862492.1_251 target sequence
NGYAFQVVLSRFYRFTFNGDLMRFYYNLRKINPSPYMFYLKFKERELIGSSPELLFSVQNGIVESYPIAGTRPRGNTPEEDFELE

SEQ ID NO: 30430 - protein, 85 aa, unidentified
  REGION 1..85: note = Description of Unknown:cds_NZ_WFIY01000004.1_cds_WP_155862492.1_251 target sequence
QELLSSEKERAEHLMLVDLARNDIGRVCYPGTVKVPDFMYIEKYSHVQHIVSRVIGTLKKGFTPVDVLKSTFPAGTVSGAPKPMA

SEQ ID NO: 30431 - protein, 84 aa, unidentified
  REGION 1..84: note = Description of Unknown:cds_NZ_WFIY01000004.1_cds_WP_155862492.1_251 target sequence
GAPKPMAMNIIETLEPFKRGPYAGAVGFISKDSAEFAISIRSAFVNKDIFRIQAGAGIVYDSIPEMEYFETEHKMRALKVAMGV

SEQ ID NO: 30432 - protein, 85 aa, unidentified
  REGION 1..85: note = Description of Unknown:cds_NZ_WFIY01000004.1_cds_WP_155862492.1_251 target sequence
LESVSGPQNKARYSIIAWGKKDYLSSEYSEDIADKLYSISTYGGFSIPEFNAYIGYVSYDAVRNWETVKDIKPVAESWPNGEFFL

SEQ ID NO: 30433 - protein, 85 aa, unidentified
  REGION 1..85: note = Description of Unknown:cds_NZ_WFIY01000004.1_cds_WP_155862492.1_251 target sequence
PENVIIYDHNSAKVYVNGDIPEISSCGEIGNIKFSSYDQSMNKNEFEDAVNEILEYIRNGYAFQVVLSRFYRFTFNGDLMRFYYN

SEQ ID NO: 30434 - protein, 85 aa, unidentified
  REGION 1..85: note = Description of Unknown:cds_NZ_WFIY01000004.1_cds_WP_155862492.1_251 target sequence
LRKINPSPYMFYLKFKERELIGSSPELLFSVQNGIVESYPIAGTRPRGNTPEEDFELEQELLSSEKERAEHLMLVDLARNDIGRV

SEQ ID NO: 30435 - protein, 85 aa, unidentified
  REGION 1..85: note = Description of Unknown:cds_NZ_WFIY01000004.1_cds_WP_155862492.1_251 target sequence
CYPGTVKVPDFMYIEKYSHVQHIVSRVIGTLKKGFTPVDVLKSTFPAGTVSGAPKPMAMNIIETLEPFKRGPYAGAVGFISKDSA

SEQ ID NO: 30436 - protein, 85 aa, unidentified
  REGION 1..85: note = Description of Unknown:cds_NZ_WFIY01000004.1_cds_WP_155862402.1_139 target sequence
LRITSEWSKLRTVLVHEPGIEMFYGILDPDAFLYMRRFNIEKAINQHKQMVNKLKEMGIEVLKIKELINEKATSDKEFRKLLEKI

SEQ ID NO: 30437 - protein, 85 aa, unidentified
  REGION 1..85: note = Description of Unknown:cds_NZ_WFIY01000004.1_cds_WP_155862402.1_139 target sequence
ALNYIKYEGDGKAEENLSRVKKDLEKLDSNTLFNIILLNPTVLSHEALGTSEAVTRILNEEPLANLYFTRDQAIITDKGVVIGRM

SEQ ID NO: 30438 - protein, 85 aa, unidentified
  REGION 1..85: note = Description of Unknown:cds_NZ_WFIY01000004.1_cds_WP_155862402.1_139 target sequence
SKRIRMRETEIIKLVFHALSEKPLKEISEPAFLEGGDYMPFKDFAIFGTGDRTSISGIMQAIDFTNFNEIVIAYNPEIEETEDYM

SEQ ID NO: 30439 - protein, 85 aa, unidentified
  REGION 1..85: note = Description of Unknown:cds_NZ_WFIY01000004.1_cds_WP_155862402.1_139 target sequence
LTMHLDMYLNSPKEGVIISNSTILSKTLAHIYERKENGISLKERTNLLEFFKKKGYRILEISLAEQLSYATNFLTIENGRILSPK

SEQ ID NO: 30440 - protein, 84 aa, unidentified
  REGION 1..84: note = Description of Unknown:cds_NZ_WFIY01000004.1_cds_WP_155862402.1_139 target sequence
NGRILSPKVANNMINIIEYLERKGYNNLLNEVKEDYNRHVVNNDFFPNRKDIKDEGIDFEEIDVSELTGGFGGIHCMTMPIKRE

SEQ ID NO: 30441 - protein, 85 aa, unidentified
  REGION 1..85: note = Description of Unknown:cds_NZ_WFIY01000004.1_cds_WP_155862402.1_139 target sequence
DPDAFLYMRRFNIEKAINQHKQMVNKLKEMGIEVLKIKELINEKATSDKEFRKLLEKIALNYIKYEGDGKAEENLSRVKKDLEKL

SEQ ID NO: 30442 - protein, 85 aa, unidentified
  REGION 1..85: note = Description of Unknown:cds_NZ_WFIY01000004.1_cds_WP_155862402.1_139 target sequence
DSNTLFNIILLNPTVLSHEALGTSEAVTRILNEEPLANLYFTRDQAIITDKGVVIGRMSKRIRMRETEIIKLVFHALSEKPLKEI

SEQ ID NO: 30443 - protein, 85 aa, unidentified
  REGION 1..85: note = Description of Unknown:cds_NZ_WFIY01000004.1_cds_WP_155862402.1_139 target sequence
SEPAFLEGGDYMPFKDFAIFGTGDRTSISGIMQAIDFTNFNEIVIAYNPEIEETEDYMLTMHLDMYLNSPKEGVIISNSTILSKT

SEQ ID NO: 30444 - protein, 85 aa, unidentified
  REGION 1..85: note = Description of Unknown:cds_NZ_WFIY01000004.1_cds_WP_155862402.1_139 target sequence
LAHIYERKENGISLKERTNLLEFFKKKGYRILEISLAEQLSYATNFLTIENGRILSPKVANNMINIIEYLERKGYNNLLNEVKED

SEQ ID NO: 30445 - protein, 85 aa, unidentified
  REGION 1..85: note = Description of Unknown:cds_NZ_WFIY01000004.1_cds_WP_155862511.1_271 target sequence
LSDKFIIKKIKGIEILDSRGNRTIRVFVETEGGIKSFGDAPAGASKGSREAIELRDSKGGVKPAIDSVNYFINDALRGFDVRRQE

SEQ ID NO: 30446 - protein, 85 aa, unidentified
  REGION 1..85: note = Description of Unknown:cds_NZ_WFIY01000004.1_cds_WP_155862511.1_271 target sequence
DIDRTLIQLDGTDNKSKLGANAIIATSIAVAKTAAKALGLEIFQYIGGGRKHRIPVPLLNILNGGLHAGNNLKIQEFIIIPLKFN

SEQ ID NO: 30447 - protein, 85 aa, unidentified
  REGION 1..85: note = Description of Unknown:cds_NZ_WFIY01000004.1_cds_WP_155862511.1_271 target sequence
KFSEALFASTEVYKQLKNLVSEKFGKIYTALGDEGGVSPPLNKTEEALELLSNAVKKAGYEGEFFFGMDAASSDFYNEKEGVYEI

SEQ ID NO: 30448 - protein, 85 aa, unidentified
  REGION 1..85: note = Description of Unknown:cds_NZ_WFIY01000004.1_cds_WP_155862511.1_271 target sequence
DGTKKSAEEMIDYYSELAGKYPILYLEDPFNENDFEHFAELQSKLKNTIITGDDLYTTNVKYLKKGIENKSTRGVIVKPNQIGTL

SEQ ID NO: 30449 - protein, 84 aa, unidentified
  REGION 1..84: note = Description of Unknown:cds_NZ_WFIY01000004.1_cds_WP_155862511.1_271 target sequence
PNQIGTLTETYEFFDTARENSIKTIISHRSGETEDSFIADLAVGLNSDFIKTGAPARGERTAKYNRILEIENEYEIEYGNKNII

SEQ ID NO: 30450 - protein, 85 aa, unidentified
  REGION 1..85: note = Description of Unknown:cds_NZ_WFIY01000004.1_cds_WP_155862511.1_271 target sequence
VETEGGIKSFGDAPAGASKGSREAIELRDSKGGVKPAIDSVNYFINDALRGFDVRRQEDIDRTLIQLDGTDNKSKLGANAIIATS

SEQ ID NO: 30451 - protein, 85 aa, unidentified
  REGION 1..85: note = Description of Unknown:cds_NZ_WFIY01000004.1_cds_WP_155862511.1_271 target sequence
IAVAKTAAKALGLEIFQYIGGGRKHRIPVPLLNILNGGLHAGNNLKIQEFIIIPLKFNKFSEALFASTEVYKQLKNLVSEKFGKI

SEQ ID NO: 30452 - protein, 85 aa, unidentified
  REGION 1..85: note = Description of Unknown:cds_NZ_WFIY01000004.1_cds_WP_155862511.1_271 target sequence
YTALGDEGGVSPPLNKTEEALELLSNAVKKAGYEGEFFFGMDAASSDFYNEKEGVYEIDGTKKSAEEMIDYYSELAGKYPILYLE

SEQ ID NO: 30453 - protein, 85 aa, unidentified
  REGION 1..85: note = Description of Unknown:cds_NZ_WFIY01000004.1_cds_WP_155862511.1_271 target sequence
DPFNENDFEHFAELQSKLKNTIITGDDLYTTNVKYLKKGIENKSTRGVIVKPNQIGTLTETYEFFDTARENSIKTIISHRSGETE

SEQ ID NO: 30454 - protein, 85 aa, unidentified
  REGION 1..85: note = Description of Unknown:cds_NZ_WFIY01000004.1_cds_WP_155862589.1_362 target sequence
SEELLKKVLDKIKPTREDEEKVKLIVNEVIDRLNGLDAEIHGSFRKGTWLKGDADVDVFVFFPKSVGKEYISTEAIKILRDRLSG

SEQ ID NO: 30455 - protein, 85 aa, unidentified
  REGION 1..85: note = Description of Unknown:cds_NZ_WFIY01000004.1_cds_WP_155862589.1_362 target sequence
FNITTAYAEHPYLIVNHKGIEIDIVPALKIEEGEKPITAVDRTPFHTEFINSHLSEEQKDEVRLLKRFMKGIGVYGAEIKVRGFS

SEQ ID NO: 30456 - protein, 85 aa, unidentified
  REGION 1..85: note = Description of Unknown:cds_NZ_WFIY01000004.1_cds_WP_155862589.1_362 target sequence
GYVTELLIVKFGSFLEVLKNASKWRPPVKIFIVKPERDFKCPLILPDPVDPSRNAGAAVSLKRLAEFSIASRYFLKNPSEKFFFP

SEQ ID NO: 30457 - protein, 85 aa, unidentified
  REGION 1..85: note = Description of Unknown:cds_NZ_WFIY01000004.1_cds_WP_155862589.1_362 target sequence
PEPAGDKIKGDVLVTKIEILDNNVVEDLLWGQVNKSVEKIFNILRNYGYRVIDVQAYGNTKNLVFALQLESKEIGNYKLNQGPPF

SEQ ID NO: 30458 - protein, 84 aa, unidentified
  REGION 1..84: note = Description of Unknown:cds_NZ_WFIY01000004.1_cds_WP_155862589.1_362 target sequence
KLNQGPPFYMDLDDFISKNDNIWVGEDGRLYSIKERRNDKIEDIVKSAISLKYNYKVVEQYWLDREPKEPCLKAFLRKTPTWLK

SEQ ID NO: 30459 - protein, 85 aa, unidentified
  REGION 1..85: note = Description of Unknown:cds_NZ_WFIY01000004.1_cds_WP_155862589.1_362 target sequence
EVIDRLNGLDAEIHGSFRKGTWLKGDADVDVFVFFPKSVGKEYISTEAIKILRDRLSGFNITTAYAEHPYLIVNHKGIEIDIVPA

SEQ ID NO: 30460 - protein, 85 aa, unidentified
  REGION 1..85: note = Description of Unknown:cds_NZ_WFIY01000004.1_cds_WP_155862589.1_362 target sequence
LKIEEGEKPITAVDRTPFHTEFINSHLSEEQKDEVRLLKRFMKGIGVYGAEIKVRGFSGYVTELLIVKFGSFLEVLKNASKWRPP

SEQ ID NO: 30461 - protein, 85 aa, unidentified
  REGION 1..85: note = Description of Unknown:cds_NZ_WFIY01000004.1_cds_WP_155862589.1_362 target sequence
VKIFIVKPERDFKCPLILPDPVDPSRNAGAAVSLKRLAEFSIASRYFLKNPSEKFFFPPEPAGDKIKGDVLVTKIEILDNNVVED

SEQ ID NO: 30462 - protein, 85 aa, unidentified
  REGION 1..85: note = Description of Unknown:cds_NZ_WFIY01000004.1_cds_WP_155862589.1_362 target sequence
LLWGQVNKSVEKIFNILRNYGYRVIDVQAYGNTKNLVFALQLESKEIGNYKLNQGPPFYMDLDDFISKNDNIWVGEDGRLYSIKE

SEQ ID NO: 30463 - protein, 85 aa, unidentified
  REGION 1..85: note = Description of Unknown:cds_NZ_WFIY01000004.1_cds_WP_155863924.1_1838 target sequence
KVYFETYGCALNKGDTYIMMTLLKQRNHEIVNNPNEADVIVLNTCDVRLETGERMKSRIKELRKFGKKLVVAGCFSGAEPGVVKT

SEQ ID NO: 30464 - protein, 85 aa, unidentified
  REGION 1..85: note = Description of Unknown:cds_NZ_WFIY01000004.1_cds_WP_155863924.1_1838 target sequence
LAPEASIIGPQALTKIVDAVEGEKVFSINAERSEITPRVFEGKIAIIPIADGCAGDCSFCITKLARRTLRSYSMRSIVEAVKEAV

SEQ ID NO: 30465 - protein, 85 aa, unidentified
  REGION 1..85: note = Description of Unknown:cds_NZ_WFIY01000004.1_cds_WP_155863924.1_1838 target sequence
KNGAVEIELTGQDAAAYGLDLGGKIKLSDLLNEVLSIEGDFMIRIGMMTPEQFARDIDGILEAMRDPKLFKFLHLPVQSGDDNVL

SEQ ID NO: 30466 - protein, 85 aa, unidentified
  REGION 1..85: note = Description of Unknown:cds_NZ_WFIY01000004.1_cds_WP_155863924.1_1838 target sequence
KLMNRKYTVDEYKELVKEARSKIPNINITTDIIIGHPGEDENAFENTLELMKEIKFERVHLAMYSIRPNTRSALMKQVPDAVKKE

SEQ ID NO: 30467 - protein, 84 aa, unidentified
  REGION 1..84: note = Description of Unknown:cds_NZ_WFIY01000004.1_cds_WP_155863924.1_1838 target sequence
VPDAVKKERMKIAYKLYEDISLSIHKEYLNKRTKVITTEKGKKGSIIGRTLNYIPVILNGVEIGKWYDVEITDYSFFDLRGAVV

SEQ ID NO: 30468 - protein, 85 aa, unidentified
  REGION 1..85: note = Description of Unknown:cds_NZ_WFIY01000004.1_cds_WP_155863924.1_1838 target sequence
HEIVNNPNEADVIVLNTCDVRLETGERMKSRIKELRKFGKKLVVAGCFSGAEPGVVKTLAPEASIIGPQALTKIVDAVEGEKVFS

SEQ ID NO: 30469 - protein, 85 aa, unidentified
  REGION 1..85: note = Description of Unknown:cds_NZ_WFIY01000004.1_cds_WP_155863924.1_1838 target sequence
INAERSEITPRVFEGKIAIIPIADGCAGDCSFCITKLARRTLRSYSMRSIVEAVKEAVKNGAVEIELTGQDAAAYGLDLGGKIKL

SEQ ID NO: 30470 - protein, 85 aa, unidentified
  REGION 1..85: note = Description of Unknown:cds_NZ_WFIY01000004.1_cds_WP_155863924.1_1838 target sequence
SDLLNEVLSIEGDFMIRIGMMTPEQFARDIDGILEAMRDPKLFKFLHLPVQSGDDNVLKLMNRKYTVDEYKELVKEARSKIPNIN

SEQ ID NO: 30471 - protein, 85 aa, unidentified
  REGION 1..85: note = Description of Unknown:cds_NZ_WFIY01000004.1_cds_WP_155863924.1_1838 target sequence
ITTDIIIGHPGEDENAFENTLELMKEIKFERVHLAMYSIRPNTRSALMKQVPDAVKKERMKIAYKLYEDISLSIHKEYLNKRTKV

SEQ ID NO: 30472 - protein, 85 aa, unidentified
  REGION 1..85: note = Description of Unknown:cds_NZ_WFIY01000001.1_cds_WP_155862271.1_2380 target sequence
SYVLIRAPNIFMKNCIGGAEYVTLNWLKRFKKIRYEIVPDIDSVYLDLCINKRFKKDDVLEIIDKLNLPVNNTILDYYLDCKLHN

SEQ ID NO: 30473 - protein, 85 aa, unidentified
  REGION 1..85: note = Description of Unknown:cds_NZ_WFIY01000001.1_cds_WP_155862271.1_2380 target sequence
NNAYIFKKILDNEIVLDTKIGSDMLIPQFFKKHILDFVNGRPAGYDFLYYSLKYSKKYIGVLQAMGDIPLSLKFYIYHFKGLLNY

SEQ ID NO: 30474 - protein, 85 aa, unidentified
  REGION 1..85: note = Description of Unknown:cds_NZ_WFIY01000001.1_cds_WP_155862271.1_2380 target sequence
LESSKEFISLLANVIKQKTWRRALIRSKDKVHILTPSKGAIKKVGLDKLDYTVIFPYVGLDSTILNYACKNKDTYAVFFARPSRI

SEQ ID NO: 30475 - protein, 85 aa, unidentified
  REGION 1..85: note = Description of Unknown:cds_NZ_WFIY01000001.1_cds_WP_155862271.1_2380 target sequence
KGILEAIKIFKMARENGYLQKLYIIGGNLNDVTSKYKGETDVVSLGRISKGEVYRILSKAQVNIYPSISDAFGITILESLGVCTP

SEQ ID NO: 30476 - protein, 84 aa, unidentified
  REGION 1..84: note = Description of Unknown:cds_NZ_WFIY01000001.1_cds_WP_155862271.1_2380 target sequence
ESLGVCTPVVMYYNEANYEYFSKSKLVRIVKPFNKYEFLNKIKEVRSSMEMDEYTRNLVQSHLDWNRVVNNVEERLLTILDNIR

SEQ ID NO: 30477 - protein, 85 aa, unidentified
  REGION 1..85: note = Description of Unknown:cds_NZ_WFIY01000001.1_cds_WP_155862271.1_2380 target sequence
KRFKKIRYEIVPDIDSVYLDLCINKRFKKDDVLEIIDKLNLPVNNTILDYYLDCKLHNNNAYIFKKILDNEIVLDTKIGSDMLIP

SEQ ID NO: 30478 - protein, 85 aa, unidentified
  REGION 1..85: note = Description of Unknown:cds_NZ_WFIY01000001.1_cds_WP_155862271.1_2380 target sequence
QFFKKHILDFVNGRPAGYDFLYYSLKYSKKYIGVLQAMGDIPLSLKFYIYHFKGLLNYLESSKEFISLLANVIKQKTWRRALIRS

SEQ ID NO: 30479 - protein, 85 aa, unidentified
  REGION 1..85: note = Description of Unknown:cds_NZ_WFIY01000001.1_cds_WP_155862271.1_2380 target sequence
KDKVHILTPSKGAIKKVGLDKLDYTVIFPYVGLDSTILNYACKNKDTYAVFFARPSRIKGILEAIKIFKMARENGYLQKLYIIGG

SEQ ID NO: 30480 - protein, 85 aa, unidentified
  REGION 1..85: note = Description of Unknown:cds_NZ_WFIY01000001.1_cds_WP_155862271.1_2380 target sequence
NLNDVTSKYKGETDVVSLGRISKGEVYRILSKAQVNIYPSISDAFGITILESLGVCTPVVMYYNEANYEYFSKSKLVRIVKPFNK

SEQ ID NO: 30481 - protein, 85 aa, unidentified
  REGION 1..85: note = Description of Unknown:cds_NZ_WFIY01000004.1_cds_WP_155863076.1_988 target sequence
LSSELWKEALRYFPGGVNSPVRAAVKPYPFYVSYGKGAYIYTEDGNSLIDYVLGYGPLILGHANEYVKEKVIEQIEKGWLFGIPS

SEQ ID NO: 30482 - protein, 85 aa, unidentified
  REGION 1..85: note = Description of Unknown:cds_NZ_WFIY01000004.1_cds_WP_155863076.1_988 target sequence
RVEIELAKKISLHMPSIEKIRFVNSGTEATMNAIRLARGYTKRDKILKFNGNYHGAHDYALVDAGSAASEFGVPNSEGIPEEVLK

SEQ ID NO: 30483 - protein, 85 aa, unidentified
  REGION 1..85: note = Description of Unknown:cds_NZ_WFIY01000004.1_cds_WP_155863076.1_988 target sequence
TVIVCEYNDLQCVEKKLKNEDVAAVIVEPVMGNMGVIPPEKDFLKGLREITSTYNTLLIFDEVITGFRLSMGGAQEYFGVTADLT

SEQ ID NO: 30484 - protein, 85 aa, unidentified
  REGION 1..85: note = Description of Unknown:cds_NZ_WFIY01000004.1_cds_WP_155863076.1_988 target sequence
TLGKIIGGGFPIGAFGGKREIMDMLTPSGKVFNAGTFNANPISMSAGLATLEVMERENVIEKTTYVAEKVTEELERIKYPHVINR

SEQ ID NO: 30485 - protein, 84 aa, unidentified
  REGION 1..84: note = Description of Unknown:cds_NZ_WFIY01000004.1_cds_WP_155863076.1_988 target sequence
KYPHVINRVKNMFQIFFGVEKVSNATEARRAKKEVYLQFQINLMKNGVYFPPSQFESVFTSLAHYDDNIISDTILAIKKSSELS

SEQ ID NO: 30486 - protein, 85 aa, unidentified
  REGION 1..85: note = Description of Unknown:cds_NZ_WFIY01000004.1_cds_WP_155863076.1_988 target sequence
YPFYVSYGKGAYIYTEDGNSLIDYVLGYGPLILGHANEYVKEKVIEQIEKGWLFGIPSRVEIELAKKISLHMPSIEKIRFVNSGT

SEQ ID NO: 30487 - protein, 85 aa, unidentified
  REGION 1..85: note = Description of Unknown:cds_NZ_WFIY01000004.1_cds_WP_155863076.1_988 target sequence
EATMNAIRLARGYTKRDKILKFNGNYHGAHDYALVDAGSAASEFGVPNSEGIPEEVLKTVIVCEYNDLQCVEKKLKNEDVAAVIV

SEQ ID NO: 30488 - protein, 85 aa, unidentified
  REGION 1..85: note = Description of Unknown:cds_NZ_WFIY01000004.1_cds_WP_155863076.1_988 target sequence
EPVMGNMGVIPPEKDFLKGLREITSTYNTLLIFDEVITGFRLSMGGAQEYFGVTADLTTLGKIIGGGFPIGAFGGKREIMDMLTP

SEQ ID NO: 30489 - protein, 85 aa, unidentified
  REGION 1..85: note = Description of Unknown:cds_NZ_WFIY01000004.1_cds_WP_155863076.1_988 target sequence
SGKVFNAGTFNANPISMSAGLATLEVMERENVIEKTTYVAEKVTEELERIKYPHVINRVKNMFQIFFGVEKVSNATEARRAKKEV

SEQ ID NO: 30490 - protein, 85 aa, unidentified
  REGION 1..85: note = Description of Unknown:cds_NZ_WFIY01000004.1_cds_WP_155863308.1_1268 target sequence
IKYSTKWMYLVIPFNMAIGPISTLVTLQILTLGGNAIDVAYVISLGNAVLIPASIMWGFLADRMDRKKQILLSFAGTALPLLLMP

SEQ ID NO: 30491 - protein, 85 aa, unidentified
  REGION 1..85: note = Description of Unknown:cds_NZ_WFIY01000004.1_cds_WP_155863308.1_1268 target sequence
FFNSISFVAINYSLLVFMSTASTTPFNLLVMESAEKKHWGSLFSKFSFFSSIGMLLGLLASTFLVIFLKLYEVEEILGILTLGTL

SEQ ID NO: 30492 - protein, 85 aa, unidentified
  REGION 1..85: note = Description of Unknown:cds_NZ_WFIY01000004.1_cds_WP_155863308.1_1268 target sequence
IAGFKLVPRPVITFERTAMVQHKESFMIRIRHLPLFFLHLPNIHSFKVFSISRLTKKPINYIPLLYLGLIIFYISSGIFNTVYPA

SEQ ID NO: 30493 - protein, 85 aa, unidentified
  REGION 1..85: note = Description of Unknown:cds_NZ_WFIY01000004.1_cds_WP_155863308.1_1268 target sequence
GLYVKGLEKSEVLLVITVGMIFQILGFRISSSLLEAEEESKIAHLSLILRGSSYVVLGAFSIFFLGYPILISGLIFYPLAAGIAY

SEQ ID NO: 30494 - protein, 84 aa, unidentified
  REGION 1..84: note = Description of Unknown:cds_NZ_WFIY01000004.1_cds_WP_155863308.1_1268 target sequence
YPLAAGIAYSLFYSSSTAMIFKIVGERQQGRGLGVYSTVVGISLFLGSLVSGYITHYLGYGIDFIIAGLLLLADSYLFRYLEEG

SEQ ID NO: 30495 - protein, 85 aa, unidentified
  REGION 1..85: note = Description of Unknown:cds_NZ_WFIY01000004.1_cds_WP_155863308.1_1268 target sequence
QILTLGGNAIDVAYVISLGNAVLIPASIMWGFLADRMDRKKQILLSFAGTALPLLLMPFFNSISFVAINYSLLVFMSTASTTPFN

SEQ ID NO: 30496 - protein, 85 aa, unidentified
  REGION 1..85: note = Description of Unknown:cds_NZ_WFIY01000004.1_cds_WP_155863308.1_1268 target sequence
LLVMESAEKKHWGSLFSKFSFFSSIGMLLGLLASTFLVIFLKLYEVEEILGILTLGTLIAGFKLVPRPVITFERTAMVQHKESFM

SEQ ID NO: 30497 - protein, 85 aa, unidentified
  REGION 1..85: note = Description of Unknown:cds_NZ_WFIY01000004.1_cds_WP_155863308.1_1268 target sequence
IRIRHLPLFFLHLPNIHSFKVFSISRLTKKPINYIPLLYLGLIIFYISSGIFNTVYPAGLYVKGLEKSEVLLVITVGMIFQILGF

SEQ ID NO: 30498 - protein, 85 aa, unidentified
  REGION 1..85: note = Description of Unknown:cds_NZ_WFIY01000004.1_cds_WP_155863308.1_1268 target sequence
RISSSLLEAEEESKIAHLSLILRGSSYVVLGAFSIFFLGYPILISGLIFYPLAAGIAYSLFYSSSTAMIFKIVGERQQGRGLGVY

SEQ ID NO: 30499 - protein, 85 aa, unidentified
  REGION 1..85: note = Description of Unknown:cds_NC_025809.1_cds_YP_009110704.1_8 target sequence
ARAVFDFFTTLFGNRGLPTDQRQLTSLLTSSNSPWQKQYSPLALSLTSSTISTSQQPFPGSAWYQESMLFSALLPPVLVNQDAWR

SEQ ID NO: 30500 - protein, 85 aa, unidentified
  REGION 1..85: note = Description of Unknown:cds_NC_025809.1_cds_YP_009110704.1_8 target sequence
DANYKRFCWTDAALSGLVAAPDPPRAPPYVPVSGAWFDLTQYPRWANRRRELETKYPLLLRITLLNMMQNGPLVYVETWPNMLSG

SEQ ID NO: 30501 - protein, 85 aa, unidentified
  REGION 1..85: note = Description of Unknown:cds_NC_025809.1_cds_YP_009110704.1_8 target sequence
ALVNFAMSCYGKDFREIAMVLAQSCSNMPFAPESSYDQQMRMMVSLWILSYIGVVHQNATIAGFFFSTKTRGVRDEAWTLFYNTN

SEQ ID NO: 30502 - protein, 85 aa, unidentified
  REGION 1..85: note = Description of Unknown:cds_NC_025809.1_cds_YP_009110704.1_8 target sequence
GQRLNITQRHFGYFCARSADWNADSSWLAASQLSALIMSCRQFPLLANQGVVNQAQNRPGYSSPNGVPVRELQLLACTTECIRSH

SEQ ID NO: 30503 - protein, 84 aa, unidentified
  REGION 1..84: note = Description of Unknown:cds_NC_025809.1_cds_YP_009110704.1_8 target sequence
CTTECIRSHVQAGLIDQAKGQTLTQNATDVNQVLQREIDDIKAADDALYNQNPEYARRLKPFQARSWTVGQSMQSLAALAAFAT

SEQ ID NO: 30504 - protein, 85 aa, unidentified
  REGION 1..85: note = Description of Unknown:cds_NC_025809.1_cds_YP_009110704.1_8 target sequence
LTSSNSPWQKQYSPLALSLTSSTISTSQQPFPGSAWYQESMLFSALLPPVLVNQDAWRDANYKRFCWTDAALSGLVAAPDPPRAP

SEQ ID NO: 30505 - protein, 85 aa, unidentified
  REGION 1..85: note = Description of Unknown:cds_NC_025809.1_cds_YP_009110704.1_8 target sequence
PYVPVSGAWFDLTQYPRWANRRRELETKYPLLLRITLLNMMQNGPLVYVETWPNMLSGALVNFAMSCYGKDFREIAMVLAQSCSN

SEQ ID NO: 30506 - protein, 85 aa, unidentified
  REGION 1..85: note = Description of Unknown:cds_NC_025809.1_cds_YP_009110704.1_8 target sequence
MPFAPESSYDQQMRMMVSLWILSYIGVVHQNATIAGFFFSTKTRGVRDEAWTLFYNTNGQRLNITQRHFGYFCARSADWNADSSW

SEQ ID NO: 30507 - protein, 85 aa, unidentified
  REGION 1..85: note = Description of Unknown:cds_NC_025809.1_cds_YP_009110704.1_8 target sequence
LAASQLSALIMSCRQFPLLANQGVVNQAQNRPGYSSPNGVPVRELQLLACTTECIRSHVQAGLIDQAKGQTLTQNATDVNQVLQR

SEQ ID NO: 30508 - protein, 85 aa, unidentified
  REGION 1..85: note = Description of Unknown:cds_NC_038659.1_cds_YP_009507777.1_10 target sequence
ARAVFDFFTTLFGNRGLPTDQRQLTSLLTSSNSPWQKQYSPLALSLTSSTISTPQQPFPGSAWYQESMLFSALLPPVLVNQDAWR

SEQ ID NO: 30509 - protein, 85 aa, unidentified
  REGION 1..85: note = Description of Unknown:cds_NC_038659.1_cds_YP_009507777.1_10 target sequence
DANYKRFCWTDSALSGLVAAPDPPRAPPYVPVSGAWFDLTQYPRWANRRRELETKYPLLLRITLLNMMQNGPLVYVETWPNMLSG

SEQ ID NO: 30510 - protein, 85 aa, unidentified
  REGION 1..85: note = Description of Unknown:cds_NC_038659.1_cds_YP_009507777.1_10 target sequence
SLVNFAMSCYGKDFREIAMVLAQSCSNMPFAPESSYDQQMRMMVSLWILSYIGVVHQNATIAGFFFSTKTRGVRDEAWTLFYNTN

SEQ ID NO: 30511 - protein, 85 aa, unidentified
  REGION 1..85: note = Description of Unknown:cds_NC_038659.1_cds_YP_009507777.1_10 target sequence
GQRLNITQRHFGYFCARSADWNADSSWLAASQLSALIMSCRQFPLLANQGVVNQAQNRPGYSSPNGVPVRELQLLACATECIRSH

SEQ ID NO: 30512 - protein, 84 aa, unidentified
  REGION 1..84: note = Description of Unknown:cds_NC_038659.1_cds_YP_009507777.1_10 target sequence
CATECIRSHVQAGLIDQVKGQTLTQNATDVNQVLQREIDDIKAADDALYNQNPEYARRLKPFQARSWTVGQSMQSLAALAAFAT

SEQ ID NO: 30513 - protein, 85 aa, unidentified
  REGION 1..85: note = Description of Unknown:cds_NC_038659.1_cds_YP_009507777.1_10 target sequence
LTSSNSPWQKQYSPLALSLTSSTISTPQQPFPGSAWYQESMLFSALLPPVLVNQDAWRDANYKRFCWTDSALSGLVAAPDPPRAP

SEQ ID NO: 30514 - protein, 85 aa, unidentified
  REGION 1..85: note = Description of Unknown:cds_NC_038659.1_cds_YP_009507777.1_10 target sequence
PYVPVSGAWFDLTQYPRWANRRRELETKYPLLLRITLLNMMQNGPLVYVETWPNMLSGSLVNFAMSCYGKDFREIAMVLAQSCSN

SEQ ID NO: 30515 - protein, 85 aa, unidentified; identical to SEQ ID NO: 30506
  REGION 1..85: note = Description of Unknown:cds_NC_038659.1_cds_YP_009507777.1_10 target sequence

SEQ ID NO: 30516 - protein, 85 aa, unidentified
  REGION 1..85: note = Description of Unknown:cds_NC_038659.1_cds_YP_009507777.1_10 target sequence
LAASQLSALIMSCRQFPLLANQGVVNQAQNRPGYSSPNGVPVRELQLLACATECIRSHVQAGLIDQVKGQTLTQNATDVNQVLQR

SEQ ID NO: 30517 - protein, 85 aa, unidentified
  REGION 1..85: note = Description of Unknown:cds_NZ_WFIY01000004.1_cds_WP_155862712.1_512 target sequence
FEILDKAKNQGYSAEIFYVKRTEFSINEEKQIYSRFLKEEGYGLRVFKDGKVGFAYSTRLDENLLDNAIKSWKASEKDEANQIPE

SEQ ID NO: 30518 - protein, 85 aa, unidentified
  REGION 1..85: note = Description of Unknown:cds_NZ_WFIY01000004.1_cds_WP_155862712.1_512 target sequence
PNKVNYLNLYKKFDLSEVVKEKIRELEELKEKKINIVTLNSTAWVSEVGIVSTEGMNLSEKRSGISVSVSANYKDSTYVGPEIYE

SEQ ID NO: 30519 - protein, 85 aa, unidentified
  REGION 1..85: note = Description of Unknown:cds_NZ_WFIY01000004.1_cds_WP_155862712.1_512 target sequence
TRSFRDPSTSIDEMKDSILEKVQITSERTTLDFKPKSVILTPKAVYYLVFPLLSHAISLENYYRHRSPLKEGELINEELRIIDNP

SEQ ID NO: 30520 - protein, 85 aa, unidentified
  REGION 1..85: note = Description of Unknown:cds_NZ_WFIY01000004.1_cds_WP_155862712.1_512 target sequence
LIENSVYSRSFDGEGQQSLNNEIINASVKKFLSNYYWSIKAKRENTASASRGYSSMPYIYPSNLEFYVRDEEDNLSEEGKVYVDE

SEQ ID NO: 30521 - protein, 84 aa, unidentified
  REGION 1..84: note = Description of Unknown:cds_NZ_WFIY01000004.1_cds_WP_155862712.1_512 target sequence
SEEGKVYVDEIQGVHTSNFDTGEFSVVGSVSWIIKDGKKISLKEIVITSNLKDLLKGIQRTSKKRLMIGNVSTGELEIQGLSVV

SEQ ID NO: 30522 - protein, 85 aa, unidentified
  REGION 1..85: note = Description of Unknown:cds_NZ_WFIY01000004.1_cds_WP_155862712.1_512 target sequence
EEKQIYSRFLKEEGYGLRVFKDGKVGFAYSTRLDENLLDNAIKSWKASEKDEANQIPEPNKVNYLNLYKKFDLSEVVKEKIRELE

SEQ ID NO: 30523 - protein, 85 aa, unidentified
  REGION 1..85: note = Description of Unknown:cds_NZ_WFIY01000004.1_cds_WP_155862712.1_512 target sequence
ELKEKKINIVTLNSTAWVSEVGIVSTEGMNLSEKRSGISVSVSANYKDSTYVGPEIYETRSFRDPSTSIDEMKDSILEKVQITSE

SEQ ID NO: 30524 - protein, 85 aa, unidentified
  REGION 1..85: note = Description of Unknown:cds_NZ_WFIY01000004.1_cds_WP_155862712.1_512 target sequence
RTTLDFKPKSVILTPKAVYYLVFPLLSHAISLENYYRHRSPLKEGELINEELRIIDNPLIENSVYSRSFDGEGQQSLNNEIINAS

SEQ ID NO: 30525 - protein, 85 aa, unidentified
  REGION 1..85: note = Description of Unknown:cds_NZ_WFIY01000004.1_cds_WP_155862712.1_512 target sequence
VKKFLSNYYWSIKAKRENTASASRGYSSMPYIYPSNLEFYVRDEEDNLSEEGKVYVDEIQGVHTSNFDTGEFSVVGSVSWIIKDG

SEQ ID NO: 30526 - protein, 85 aa, unidentified
  REGION 1..85: note = Description of Unknown:cds_NZ_WFIY01000004.1_cds_WP_155863015.1_895 target sequence
LPWPKVQPEVNIGVVGHVDHGKTTLVQALTGIWTSKHSEELKRGMTIKLGYAEASFGICKNCKKPDAYVNEESCRQCGSDEEPEF

SEQ ID NO: 30527 - protein, 85 aa, unidentified
  REGION 1..85: note = Description of Unknown:cds_NZ_WFIY01000004.1_cds_WP_155863015.1_895 target sequence
LRRVSFLDAPGHEILMATMLSGTAILDGAILVVAANEPFPQPQTREHFVALGIVGIKNLVIVQNKIDVVTKDQAIAQYKQITEFI

SEQ ID NO: 30528 - protein, 85 aa, unidentified
  REGION 1..85: note = Description of Unknown:cds_NZ_WFIY01000004.1_cds_WP_155863015.1_895 target sequence
KGTWAEGSPIIPVSALHKINIDALIEAIEERIPTPKRDLTKTPIMLVVRSFDVNKPGTTFDKLVGGVVGGSIIQGKFSIGQEIKI

SEQ ID NO: 30529 - protein, 85 aa, unidentified
  REGION 1..85: note = Description of Unknown:cds_NZ_WFIY01000004.1_cds_WP_155863015.1_895 target sequence
LPGIRVEDKGKVTYEPIYSKIASLRFGDLEVNEAKPGGLVAVGTYLDPSVTKADSLMGNMVTDAKADIPVLWNIRVEYNLLERVV

SEQ ID NO: 30530 - protein, 84 aa, unidentified
  REGION 1..84: note = Description of Unknown:cds_NZ_WFIY01000004.1_cds_WP_155863015.1_895 target sequence
EYNLLERVVGSKDLVKVEPIRNKEVLMITVGSATTLGTVTHAKSNEIELELKKPIPVWENNLRLVISRQVGGRWRLVGWGQIKI

SEQ ID NO: 30531 - protein, 85 aa, unidentified
  REGION 1..85: note = Description of Unknown:cds_NZ_WFIY01000004.1_cds_WP_155863015.1_895 target sequence
ALTGIWTSKHSEELKRGMTIKLGYAEASFGICKNCKKPDAYVNEESCRQCGSDEEPEFLRRVSFLDAPGHEILMATMLSGTAILD

SEQ ID NO: 30532 - protein, 85 aa, unidentified
  REGION 1..85: note = Description of Unknown:cds_NZ_WFIY01000004.1_cds_WP_155863015.1_895 target sequence
GAILVVAANEPFPQPQTREHFVALGIVGIKNLVIVQNKIDVVTKDQAIAQYKQITEFIKGTWAEGSPIIPVSALHKINIDALIEA

SEQ ID NO: 30533 - protein, 85 aa, unidentified
  REGION 1..85: note = Description of Unknown:cds_NZ_WFIY01000004.1_cds_WP_155863015.1_895 target sequence
IEERIPTPKRDLTKTPIMLVVRSFDVNKPGTTFDKLVGGVVGGSIIQGKFSIGQEIKILPGIRVEDKGKVTYEPIYSKIASLRFG

SEQ ID NO: 30534 - protein, 85 aa, unidentified
  REGION 1..85: note = Description of Unknown:cds_NZ_WFIY01000004.1_cds_WP_155863015.1_895 target sequence
DLEVNEAKPGGLVAVGTYLDPSVTKADSLMGNMVTDAKADIPVLWNIRVEYNLLERVVGSKDLVKVEPIRNKEVLMITVGSATTL

SEQ ID NO: 30535 - protein, 85 aa, unidentified
  REGION 1..85: note = Description of Unknown:cds_NZ_WFIY01000004.1_cds_WP_155863018.1_900 target sequence
KKYKILLIIADGLGDRQVKSLSNKTPLEVADKPNIKELLKSSLVGLMDPIGPGIVAGSDTSHMAIFGVDPHRYYRGRGALEALGT

SEQ ID NO: 30536 - protein, 85 aa, unidentified
  REGION 1..85: note = Description of Unknown:cds_NZ_WFIY01000004.1_cds_WP_155863018.1_900 target sequence
GAYLTEGDIAFRGNFATVDENMNVIDRRAGRKIDESEQLVNELNQKIGEIDGVKVTFYKATEHRVAVVLSGKDLSDKISDTDPHE

SEQ ID NO: 30537 - protein, 85 aa, unidentified
  REGION 1..85: note = Description of Unknown:cds_NZ_WFIY01000004.1_cds_WP_155863018.1_900 target sequence
VGHKIKESIPLDNSISARRTAEIVNNLTKRIYDVLSTSVYNKNRIERGEPPANIILLRGASKFVELPKLYNYTGLKGVAVSATAL

SEQ ID NO: 30538 - protein, 85 aa, unidentified
  REGION 1..85: note = Description of Unknown:cds_NZ_WFIY01000004.1_cds_WP_155863018.1_900 target sequence
IKGVCKAIGMDVFTPKGATGGIDTNYDAKADKVIELLKDDKYDFIFLHIKATDAASHDGKAEEKVKAIEKIDYIIGKILNNVGRE

SEQ ID NO: 30539 - protein, 84 aa, unidentified
  REGION 1..84: note = Description of Unknown:cds_NZ_WFIY01000004.1_cds_WP_155863018.1_900 target sequence
GKILNNVGREIVIMFTGDHATPIELKEHSGDPVPVLLYVPDNIIPDYVSDFNEREARKGSLKIIGLDVMNLLLNYSNRATKYGA

SEQ ID NO: 30540 - protein, 85 aa, unidentified
  REGION 1..85: note = Description of Unknown:cds_NZ_WFIY01000004.1_cds_WP_155863018.1_900 target sequence
EVADKPNIKELLKSSLVGLMDPIGPGIVAGSDTSHMAIFGVDPHRYYRGRGALEALGTGAYLTEGDIAFRGNFATVDENMNVIDR

SEQ ID NO: 30541 - protein, 85 aa, unidentified
  REGION 1..85: note = Description of Unknown:cds_NZ_WFIY01000004.1_cds_WP_155863018.1_900 target sequence
RAGRKIDESEQLVNELNQKIGEIDGVKVTFYKATEHRVAVVLSGKDLSDKISDTDPHEVGHKIKESIPLDNSISARRTAEIVNNL

SEQ ID NO: 30542 - protein, 85 aa, unidentified
  REGION 1..85: note = Description of Unknown:cds_NZ_WFIY01000004.1_cds_WP_155863018.1_900 target sequence
TKRIYDVLSTSVYNKNRIERGEPPANIILLRGASKFVELPKLYNYTGLKGVAVSATALIKGVCKAIGMDVFTPKGATGGIDTNYD

SEQ ID NO: 30543 - protein, 85 aa, unidentified
  REGION 1..85: note = Description of Unknown:cds_NZ_WFIY01000004.1_cds_WP_155863018.1_900 target sequence
AKADKVIELLKDDKYDFIFLHIKATDAASHDGKAEEKVKAIEKIDYIIGKILNNVGREIVIMFTGDHATPIELKEHSGDPVPVLL

SEQ ID NO: 30544 - protein, 85 aa, unidentified
  REGION 1..85: note = Description of Unknown:cds_NZ_WFIY01000004.1_cds_WP_155863064.1_969 target sequence
DYKIKDIKLAEQGRKQIEWAEMHMPALMSVRKELKERQSLKGVRISAVLHVTKETAALVRTLKEAGAEVALAGSNPLSTQDDVAA

SEQ ID NO: 30545 - protein, 85 aa, unidentified
  REGION 1..85: note = Description of Unknown:cds_NZ_WFIY01000004.1_cds_WP_155863064.1_969 target sequence
ALVEDGIKVFAWKGESEEDYYSNIKEILKYEPNIVMDDGGDLHAYIHEKCQSLKIIGGTEETTTGVIRLKAMEESKVLKYPVIAV

SEQ ID NO: 30546 - protein, 85 aa, unidentified
  REGION 1..85: note = Description of Unknown:cds_NZ_WFIY01000004.1_cds_WP_155863064.1_969 target sequence
NNAFTKYLFDNRIGTGQSAIDGILRATNILIAGKVAVVVGYGWVGRGIATRLRGMGARVIVVEASPLRALEAVMDGFDVMPMSKA

SEQ ID NO: 30547 - protein, 85 aa, unidentified
  REGION 1..85: note = Description of Unknown:cds_NZ_WFIY01000004.1_cds_WP_155863064.1_969 target sequence
AEVGEIFVTATGNINVISKEHILKMKNGAVLANAGHFNVEIDVKGLKEIAKSVRNIRPYLDEYELPNGNKVYLLADGRLVNLAAA

SEQ ID NO: 30548 - protein, 84 aa, unidentified
  REGION 1..84: note = Description of Unknown:cds_NZ_WFIY01000004.1_cds_WP_155863064.1_969 target sequence
DGRLVNLAAAEGHPSEVMDLSFSNQALSVEYIYNNRDKLEIKVYNVPQEIDEKVALLKLKGMGIEIEQMTEEQKEYMKQWKYGT

SEQ ID NO: 30549 - protein, 85 aa, unidentified
  REGION 1..85: note = Description of Unknown:cds_NZ_WFIY01000004.1_cds_WP_155863064.1_969 target sequence
MSVRKELKERQSLKGVRISAVLHVTKETAALVRTLKEAGAEVALAGSNPLSTQDDVAAALVEDGIKVFAWKGESEEDYYSNIKEI

SEQ ID NO: 30550 - protein, 85 aa, unidentified
  REGION 1..85: note = Description of Unknown:cds_NZ_WFIY01000004.1_cds_WP_155863064.1_969 target sequence
LKYEPNIVMDDGGDLHAYIHEKCQSLKIIGGTEETTTGVIRLKAMEESKVLKYPVIAVNNAFTKYLFDNRIGTGQSAIDGILRAT

SEQ ID NO: 30551 - protein, 85 aa, unidentified
  REGION 1..85: note = Description of Unknown:cds_NZ_WFIY01000004.1_cds_WP_155863064.1_969 target sequence
NILIAGKVAVVVGYGWVGRGIATRLRGMGARVIVVEASPLRALEAVMDGFDVMPMSKAAEVGEIFVTATGNINVISKEHILKMKN

SEQ ID NO: 30552 - protein, 85 aa, unidentified
  REGION 1..85: note = Description of Unknown:cds_NZ_WFIY01000004.1_cds_WP_155863064.1_969 target sequence
GAVLANAGHFNVEIDVKGLKEIAKSVRNIRPYLDEYELPNGNKVYLLADGRLVNLAAAEGHPSEVMDLSFSNQALSVEYIYNNRD

SEQ ID NO: 30553 - protein, 85 aa, unidentified
  REGION 1..85: note = Description of Unknown:cds_NZ_WFIY01000004.1_cds_WP_155864031.1_1965 target sequence
PQTLTEKILSRASGKEVSPGDVIEAKTDIVAFHDLTGYHVIEVMEKAGIEKVFDKSKIVIAFDHLAPPPDVRSAEIQVMIRKFVK

SEQ ID NO: 30554 - protein, 85 aa, unidentified
  REGION 1..85: note = Description of Unknown:cds_NZ_WFIY01000004.1_cds_WP_155864031.1_1965 target sequence
KMGLPNFHDINFGIMHEVLLEKYALPGQVIVAADSHTTTSGAVGAFAQGMGASDIAAAVITGKTWLVVPTPFKVELKGSPGKWIT

SEQ ID NO: 30555 - protein, 85 aa, unidentified
  REGION 1..85: note = Description of Unknown:cds_NZ_WFIY01000004.1_cds_WP_155864031.1_1965 target sequence
GKDVALKLLQEFKADYFNGMSIEVYVENPSTFPMDYRATVSNMGIEMNADALMFIPDEETKNYIKTMRGYEPALVTPDPGAKYAD

SEQ ID NO: 30556 - protein, 85 aa, unidentified
  REGION 1..85: note = Description of Unknown:cds_NZ_WFIY01000004.1_cds_WP_155864031.1_1965 target sequence
EYTIELSKLEPLVAVPYSVDNVKTVNEVEGKEVDQVFIGSCTNGRLSDIEIAAKILKDKKVKTRCIAIPASYEMFRRAMDLGYIE

SEQ ID NO: 30557 - protein, 84 aa, unidentified
  REGION 1..84: note = Description of Unknown:cds_NZ_WFIY01000004.1_cds_WP_155864031.1_1965 target sequence
RRAMDLGYIETLVNAGCIVTYGTCGPCLGGHFGVAGPGETIVSTSNRNFRGRMGSNDSKVYLANPAVAAASALEGKITDPRSIA

SEQ ID NO: 30558 - protein, 85 aa, unidentified
  REGION 1..85: note = Description of Unknown:cds_NZ_WFIY01000004.1_cds_WP_155864031.1_1965 target sequence
DIVAFHDLTGYHVIEVMEKAGIEKVFDKSKIVIAFDHLAPPPDVRSAEIQVMIRKFVKKMGLPNFHDINFGIMHEVLLEKYALPG

SEQ ID NO: 30559 - protein, 85 aa, unidentified
  REGION 1..85: note = Description of Unknown:cds_NZ_WFIY01000004.1_cds_WP_155864031.1_1965 target sequence
QVIVAADSHTTTSGAVGAFAQGMGASDIAAAVITGKTWLVVPTPFKVELKGSPGKWITGKDVALKLLQEFKADYFNGMSIEVYVE

SEQ ID NO: 30560 - protein, 85 aa, unidentified
  REGION 1..85: note = Description of Unknown:cds_NZ_WFIY01000004.1_cds_WP_155864031.1_1965 target sequence
NPSTFPMDYRATVSNMGIEMNADALMFIPDEETKNYIKTMRGYEPALVTPDPGAKYADEYTIELSKLEPLVAVPYSVDNVKTVNE

SEQ ID NO: 30561 - protein, 85 aa, unidentified
  REGION 1..85: note = Description of Unknown:cds_NZ_WFIY01000004.1_cds_WP_155864031.1_1965 target sequence
VEGKEVDQVFIGSCTNGRLSDIEIAAKILKDKKVKTRCIAIPASYEMFRRAMDLGYIETLVNAGCIVTYGTCGPCLGGHFGVAGP

SEQ ID NO: 30562 - protein, 85 aa, unidentified
  REGION 1..85: note = Description of Unknown:cds_NC_034440.1_cds_YP_009361864.1_10 target sequence
ATPAAPRAVSFADNNDNSNNNQSRGRGRNPKPRPAPNNTVSWYTGLTQHGKVSLSFPPGQGVPLNANSTPAQNAGYWRRQDRKIN

SEQ ID NO: 30563 - protein, 85 aa, unidentified
  REGION 1..85: note = Description of Unknown:cds_NC_034440.1_cds_YP_009361864.1_10 target sequence
TGNGTKSLAPRWYFYYTGTGPEANLPFRAVKDGIIWVHEDGATDAPSTFGTRNPNNDAAIVTQFAPGTKLPKNFHIEGTGGNSQS

SEQ ID NO: 30564 - protein, 85 aa, unidentified
  REGION 1..85: note = Description of Unknown:cds_NC_034440.1_cds_YP_009361864.1_10 target sequence
SSRASSASRNSSRSNSRGSRSGNSSRGTSPGPSGVGAVGGEMLYLDLLNRLQALESGKTKQAQPKVITKKDAVAAKNKMRHKRVA

SEQ ID NO: 30565 - protein, 85 aa, unidentified
  REGION 1..85: note = Description of Unknown:cds_NC_034440.1_cds_YP_009361864.1_10 target sequence
TKGFNMVQAFGLRGPGDLQGNFGDLQLNKLGTEDPRWPQIAELAPSASAFIGMSQFKLTHQSNDTDGAPVYFLRYSGAIKLDPKN

SEQ ID NO: 30566 - protein, 84 aa, unidentified
  REGION 1..84: note = Description of Unknown:cds_NC_034440.1_cds_YP_009361864.1_10 target sequence
SGAIKLDPKNPNYNKWLELIEQNVDAYKTFPKKEKKQKAPKEEPSDQMNVQPPKEQRVQGSITQRSRTPRPSVQPGPMTDVNTD

SEQ ID NO: 30567 - protein, 85 aa, unidentified
  REGION 1..85: note = Description of Unknown:cds_NC_034440.1_cds_YP_009361864.1_10 target sequence
RNPKPRPAPNNTVSWYTGLTQHGKVSLSFPPGQGVPLNANSTPAQNAGYWRRQDRKINTGNGTKSLAPRWYFYYTGTGPEANLPF

SEQ ID NO: 30568 - protein, 85 aa, unidentified
  REGION 1..85: note = Description of Unknown:cds_NC_034440.1_cds_YP_009361864.1_10 target sequence
RAVKDGIIWVHEDGATDAPSTFGTRNPNNDAAIVTQFAPGTKLPKNFHIEGTGGNSQSSSRASSASRNSSRSNSRGSRSGNSSRG

SEQ ID NO: 30569 - protein, 85 aa, unidentified
  REGION 1..85: note = Description of Unknown:cds_NC_034440.1_cds_YP_009361864.1_10 target sequence
TSPGPSGVGAVGGEMLYLDLLNRLQALESGKTKQAQPKVITKKDAVAAKNKMRHKRVATKGFNMVQAFGLRGPGDLQGNFGDLQL

SEQ ID NO: 30570 - protein, 85 aa, unidentified
  REGION 1..85: note = Description of Unknown:cds_NC_034440.1_cds_YP_009361864.1_10 target sequence
NKLGTEDPRWPQIAELAPSASAFIGMSQFKLTHQSNDTDGAPVYFLRYSGAIKLDPKNPNYNKWLELIEQNVDAYKTFPKKEKKQ

SEQ ID NO: 30571 - protein, 85 aa, unidentified
  REGION 1..85: note = Description of Unknown:cds_NC_016144.1_cds_YP_004928138.1_4 target sequence
VPTYPYSSLLDWRPPPNTLPWILNLVVFYTIAWLPGGVSGIPLGLLGNNSITQTVVDNVVCKEHLATTDQLQAIGLGLEGLGEHA

SEQ ID NO: 30572 - protein, 85 aa, unidentified
  REGION 1..85: note = Description of Unknown:cds_NC_016144.1_cds_YP_004928138.1_4 target sequence
DLPTATKRWGFRSDVIPKIVGYTAGEWVENCYNLEITKKDGHPCLPSPPTGLLGYPRCRYVHRAKGAGPCPGGNAFHKHGSFFLY

SEQ ID NO: 30573 - protein, 85 aa, unidentified
  REGION 1..85: note = Description of Unknown:cds_NC_016144.1_cds_YP_004928138.1_4 target sequence
HGMASTVIYHGVTFTEGTIAFLIVPKDAPRLKAGLGTGFSHQAENQNPNNQFRTTTLDYDVMSPWMDNATFFFRAREDTSMLIQT

SEQ ID NO: 30574 - protein, 85 aa, unidentified
  REGION 1..85: note = Description of Unknown:cds_NC_016144.1_cds_YP_004928138.1_4 target sequence
RYPPANLELVQERLANLTGDQADPSKMEEIVAEVLTLELGDWSGWTTKKTAVQTIRLRNPSPASGSTKDKTGQKPMTDHQEFILQ

SEQ ID NO: 30575 - protein, 84 aa, unidentified
  REGION 1..84: note = Description of Unknown:cds_NC_016144.1_cds_YP_004928138.1_4 target sequence
MTDHQEFILQPHSAVGQPCLWNILRTPGRNPARRHRRETPPTMSITAAPGSGYKPYIQAIPLVKFRCHWEGLRHVCRRYPSWVQ

SEQ ID NO: 30576 - protein, 85 aa, unidentified
  REGION 1..85: note = Description of Unknown:cds_NC_016144.1_cds_YP_004928138.1_4 target sequence
FYTIAWLPGGVSGIPLGLLGNNSITQTVVDNVVCKEHLATTDQLQAIGLGLEGLGEHADLPTATKRWGFRSDVIPKIVGYTAGEW

SEQ ID NO: 30577 - protein, 85 aa, unidentified
  REGION 1..85: note = Description of Unknown:cds_NC_016144.1_cds_YP_004928138.1_4 target sequence
VENCYNLEITKKDGHPCLPSPPTGLLGYPRCRYVHRAKGAGPCPGGNAFHKHGSFFLYHGMASTVIYHGVTFTEGTIAFLIVPKD

SEQ ID NO: 30578 - protein, 85 aa, unidentified
  REGION 1..85: note = Description of Unknown:cds_NC_016144.1_cds_YP_004928138.1_4 target sequence
APRLKAGLGTGFSHQAENQNPNNQFRTTTLDYDVMSPWMDNATFFFRAREDTSMLIQTRYPPANLELVQERLANLTGDQADPSKM

SEQ ID NO: 30579 - protein, 85 aa, unidentified
  REGION 1..85: note = Description of Unknown:cds_NC_016144.1_cds_YP_004928138.1_4 target sequence
EEIVAEVLTLELGDWSGWTTKKTAVQTIRLRNPSPASGSTKDKTGQKPMTDHQEFILQPHSAVGQPCLWNILRTPGRNPARRHRR

SEQ ID NO: 30580 - protein, 85 aa, unidentified
  REGION 1..85: note = Description of Unknown:cds_NZ_WFIY01000004.1_cds_WP_155862528.1_292 target sequence
LIKVNDLEIPTLDDISFSGNKLLVRIDINSPVDPKTGKLIDDSRIKAYNETIKELVNKGNSLVLISHQGRPGDSDFISLEEHAEL

SEQ ID NO: 30581 - protein, 85 aa, unidentified
  REGION 1..85: note = Description of Unknown:cds_NZ_WFIY01000004.1_cds_WP_155862528.1_292 target sequence
LSKYLDMNVEFVEDVMGPYARERIKNMKSGEVILLDNVRFVSEELIEAPPAQHAKSFLVKRLSPLFDGYVNDAFATAHRSQASIV

SEQ ID NO: 30582 - protein, 85 aa, unidentified
  REGION 1..85: note = Description of Unknown:cds_NZ_WFIY01000004.1_cds_WP_155862528.1_292 target sequence
GFPMVLKSTAGRVMEKEVSALAKIFNADEFPKVFVLGGGKVLDSIRIIENLVKRRLADRILTGGLIAELFAAAKGLDLGKENMQI

SEQ ID NO: 30583 - protein, 85 aa, unidentified
  REGION 1..85: note = Description of Unknown:cds_NZ_WFIY01000004.1_cds_WP_155862528.1_292 target sequence
LEKKGLISLIPRARKILLSGGPIEIPVDFKVEKEGKVVEEPSNKVTGVIKDIGSTTMGIYSSFIKDAKVIVMRGPMGVIEDERFR

SEQ ID NO: 30584 - protein, 84 aa, unidentified
  REGION 1..84: note = Description of Unknown:cds_NZ_WFIY01000004.1_cds_WP_155862528.1_292 target sequence
MGVIEDERFREGSKKLLDSALESQGYLIIGGGHMISMLGGGSEINPSKVHVSTGGGALLLFLAGERLPALEALDLSYKEVVKKK

SEQ ID NO: 30585 - protein, 85 aa, unidentified
  REGION 1..85: note = Description of Unknown:cds_NZ_WFIY01000004.1_cds_WP_155862528.1_292 target sequence
INSPVDPKTGKLIDDSRIKAYNETIKELVNKGNSLVLISHQGRPGDSDFISLEEHAELLSKYLDMNVEFVEDVMGPYARERIKNM

SEQ ID NO: 30586 - protein, 85 aa, unidentified
  REGION 1..85: note = Description of Unknown:cds_NZ_WFIY01000004.1_cds_WP_155862528.1_292 target sequence
KSGEVILLDNVRFVSEELIEAPPAQHAKSFLVKRLSPLFDGYVNDAFATAHRSQASIVGFPMVLKSTAGRVMEKEVSALAKIFNA

SEQ ID NO: 30587 - protein, 85 aa, unidentified
  REGION 1..85: note = Description of Unknown:cds_NZ_WFIY01000004.1_cds_WP_155862528.1_292 target sequence
DEFPKVFVLGGGKVLDSIRIIENLVKRRLADRILTGGLIAELFAAAKGLDLGKENMQILEKKGLISLIPRARKILLSGGPIEIPV

SEQ ID NO: 30588 - protein, 85 aa, unidentified
  REGION 1..85: note = Description of Unknown:cds_NZ_WFIY01000004.1_cds_WP_155862528.1_292 target sequence
DFKVEKEGKVVEEPSNKVTGVIKDIGSTTMGIYSSFIKDAKVIVMRGPMGVIEDERFREGSKKLLDSALESQGYLIIGGGHMISM

SEQ ID NO: 30589 - protein, 85 aa, unidentified
  REGION 1..85: note = Description of Unknown:cds_NZ_WFIY01000004.1_cds_WP_205737137.1_962 target sequence
LNLFMTHPSKRIIGEISDELKGKKVLLGVSASISLYKSLDLARELMRRGAEIKVMMTPSASKLISPEMFTWATGNKTIVKIGGKL

SEQ ID NO: 30590 - protein, 85 aa, unidentified
  REGION 1..85: note = Description of Unknown:cds_NZ_WFIY01000004.1_cds_WP_205737137.1_962 target sequence
EHIQLAEEFDVMIIAPSTMNIITKLAYGITDNNLVLTAINFLQLNKKVILVPAMHLQMWNSPQLQSAIEILRKNNNVEIIEPNLV

SEQ ID NO: 30591 - protein, 85 aa, unidentified
  REGION 1..85: note = Description of Unknown:cds_NZ_WFIY01000004.1_cds_WP_205737137.1_962 target sequence
NNLAHYPDIGYLTSRITSYILREKDLRGLKIVVTAGPTREYMDPVRFITNPSSGTMGVSIANEAYFRGAEVVLVHGPLSSHLHPY

SEQ ID NO: 30592 - protein, 85 aa, unidentified
  REGION 1..85: note = Description of Unknown:cds_NZ_WFIY01000004.1_cds_WP_205737137.1_962 target sequence
SPTIEVETTEEMLKNVVNLVEKEKFNIVILAGAPADYKFKVIRGEKIDSHTEVPKVELEKTPKISEYIRGKAFVVGFSAETVNND

SEQ ID NO: 30593 - protein, 84 aa, unidentified
  REGION 1..84: note = Description of Unknown:cds_NZ_WFIY01000004.1_cds_WP_205737137.1_962 target sequence
GFSAETVNNDDELIEKAKIKKERHGFNMIVANNVKRKDIGFSSEYNEVIVITNSEIIKIPKSYKTIIARKLLDIVREEFIKSKV

SEQ ID NO: 30594 - protein, 85 aa, unidentified
  REGION 1..85: note = Description of Unknown:cds_NZ_WFIY01000004.1_cds_WP_205737137.1_962 target sequence
GVSASISLYKSLDLARELMRRGAEIKVMMTPSASKLISPEMFTWATGNKTIVKIGGKLEHIQLAEEFDVMIIAPSTMNIITKLAY

SEQ ID NO: 30595 - protein, 85 aa, unidentified
  REGION 1..85: note = Description of Unknown:cds_NZ_WFIY01000004.1_cds_WP_205737137.1_962 target sequence
GITDNNLVLTAINFLQLNKKVILVPAMHLQMWNSPQLQSAIEILRKNNNVEIIEPNLVNNLAHYPDIGYLTSRITSYILREKDLR

SEQ ID NO: 30596 - protein, 85 aa, unidentified
  REGION 1..85: note = Description of Unknown:cds_NZ_WFIY01000004.1_cds_WP_205737137.1_962 target sequence
GLKIVVTAGPTREYMDPVRFITNPSSGTMGVSIANEAYFRGAEVVLVHGPLSSHLHPYSPTIEVETTEEMLKNVVNLVEKEKFNI

SEQ ID NO: 30597 - protein, 85 aa, unidentified
  REGION 1..85: note = Description of Unknown:cds_NZ_WFIY01000004.1_cds_WP_205737137.1_962 target sequence
VILAGAPADYKFKVIRGEKIDSHTEVPKVELEKTPKISEYIRGKAFVVGFSAETVNNDDELIEKAKIKKERHGFNMIVANNVKRK

SEQ ID NO: 30598 - protein, 85 aa, unidentified
  REGION 1..85: note = Description of Unknown:cds_NZ_WFIY01000004.1_cds_WP_155863305.1_1263 target sequence
LIKNVKFQEDDNKSHSIYINDEGIIECIDCDKKDGEVIDAKGRLISKPFVNPHAHLGYALTLNYARHNLSGTLIEGVEIIREEVS

SEQ ID NO: 30599 - protein, 85 aa, unidentified
  REGION 1..85: note = Description of Unknown:cds_NZ_WFIY01000004.1_cds_WP_155863305.1_1263 target sequence
QKITQDDLEKRLGKIIKMHFINGVFYVRSHDPVWNDVVFKMLKARANPLVDIQVVAFPSPGFFFDENLEKIRKALEEGAEVVGLI

SEQ ID NO: 30600 - protein, 85 aa, unidentified
  REGION 1..85: note = Description of Unknown:cds_NZ_WFIY01000004.1_cds_WP_155863305.1_1263 target sequence
PHSERSYDDGVKSVKIAFDLAVEYNKLIDGHVDETDDPNSRFSEVVAREALSRGIGYRTSISHMTASHSYDNWYFHKLTLLLRES

SEQ ID NO: 30601 - protein, 85 aa, unidentified
  REGION 1..85: note = Description of Unknown:cds_NZ_WFIY01000004.1_cds_WP_155863305.1_1263 target sequence
GVSIISNPIVSMHLQGRYDNYPKRRGVARIRELINSGINVALGSDNVADPIYPLGDYNMLRVAQEAFLVDHFTSNEVEKLLNLIT

SEQ ID NO: 30602 - protein, 84 aa, unidentified
  REGION 1..84: note = Description of Unknown:cds_NZ_WFIY01000004.1_cds_WP_155863305.1_1263 target sequence
NEVEKLLNLITTNAYKAMQLKEPEVKPGNKAEFLILQTKTIYDAIRTALPPFLVVRGKHYAMNEIKIRIDEIEETDKIINIIDK

SEQ ID NO: 30603 - protein, 85 aa, unidentified
  REGION 1..85: note = Description of Unknown:cds_NZ_WFIY01000004.1_cds_WP_155863305.1_1263 target sequence
IDCDKKDGEVIDAKGRLISKPFVNPHAHLGYALTLNYARHNLSGTLIEGVEIIREEVSQKITQDDLEKRLGKIIKMHFINGVFYV

SEQ ID NO: 30604 - protein, 85 aa, unidentified
  REGION 1..85: note = Description of Unknown:cds_NZ_WFIY01000004.1_cds_WP_155863305.1_1263 target sequence
RSHDPVWNDVVFKMLKARANPLVDIQVVAFPSPGFFFDENLEKIRKALEEGAEVVGLIPHSERSYDDGVKSVKIAFDLAVEYNKL

SEQ ID NO: 30605 - protein, 85 aa, unidentified
  REGION 1..85: note = Description of Unknown:cds_NZ_WFIY01000004.1_cds_WP_155863305.1_1263 target sequence
IDGHVDETDDPNSRFSEVVAREALSRGIGYRTSISHMTASHSYDNWYFHKLTLLLRESGVSIISNPIVSMHLQGRYDNYPKRRGV

SEQ ID NO: 30606 - protein, 85 aa, unidentified
  REGION 1..85: note = Description of Unknown:cds_NZ_WFIY01000004.1_cds_WP_155863305.1_1263 target sequence
ARIRELINSGINVALGSDNVADPIYPLGDYNMLRVAQEAFLVDHFTSNEVEKLLNLITTNAYKAMQLKEPEVKPGNKAEFLILQT

SEQ ID NO: 30607 - protein, 85 aa, unidentified
  REGION 1..85: note = Description of Unknown:cds_NZ_WFIY01000004.1_cds_WP_155863311.1_1273 target sequence
NVEEAKRIVADQKELVEEKLSQNYIKRDVGDVERFLRIPNVLAILGVRRSGKSTLSLMLMKELKVKFAYLNFDDESLFGITTEDL

SEQ ID NO: 30608 - protein, 85 aa, unidentified
  REGION 1..85: note = Description of Unknown:cds_NZ_WFIY01000004.1_cds_WP_155863311.1_1273 target sequence
RNIEQAIYEVYGNDVIYLVFDEIHNVKGWELFISRLRESKRIIITGSNSKMLSGELATALTGRHSDIVLFPFSFREYLRFRNINV

SEQ ID NO: 30609 - protein, 85 aa, unidentified
  REGION 1..85: note = Description of Unknown:cds_NZ_WFIY01000004.1_cds_WP_155863311.1_1273 target sequence
ENPISTRDVVTVKVALEKYLEEGGFPEALIIGKDQVDVIYNDILFKDVVFRYKIREMGKFKEFSRSIISYYSSEVSLSKLTKVVN

SEQ ID NO: 30610 - protein, 85 aa, unidentified
  REGION 1..85: note = Description of Unknown:cds_NZ_WFIY01000004.1_cds_WP_155863311.1_1273 target sequence
VDKKTIDLWAFGLENSYLIYFLPRYGEKLKERLTFNKKVYVVDPGVVSRIALRARDKGRVIENVVAIKLLRENQLKGLYYIKGKD

SEQ ID NO: 30611 - protein, 84 aa, unidentified
  REGION 1..84: note = Description of Unknown:cds_NZ_WFIY01000004.1_cds_WP_155863311.1_1273 target sequence
LKGLYYIKGKDFEVDFYDELNSRLIQVTYAVDKVEEREIKGLMKANELVKARELIVVTYDIEGKEEREGKEIKFIPLYKFLLKY

SEQ ID NO: 30612 - protein, 85 aa, unidentified
  REGION 1..85: note = Description of Unknown:cds_NZ_WFIY01000004.1_cds_WP_155863311.1_1273 target sequence
DVGDVERFLRIPNVLAILGVRRSGKSTLSLMLMKELKVKFAYLNFDDESLFGITTEDLRNIEQAIYEVYGNDVIYLVFDEIHNVK

SEQ ID NO: 30613 - protein, 85 aa, unidentified
  REGION 1..85: note = Description of Unknown:cds_NZ_WFIY01000004.1_cds_WP_155863311.1_1273 target sequence
GWELFISRLRESKRIIITGSNSKMLSGELATALTGRHSDIVLFPFSFREYLRFRNINVENPISTRDVVTVKVALEKYLEEGGFPE

SEQ ID NO: 30614 - protein, 85 aa, unidentified
  REGION 1..85: note = Description of Unknown:cds_NZ_WFIY01000004.1_cds_WP_155863311.1_1273 target sequence
ALIIGKDQVDVIYNDILFKDVVFRYKIREMGKFKEFSRSIISYYSSEVSLSKLTKVVNVDKKTIDLWAFGLENSYLIYFLPRYGE

SEQ ID NO: 30615 - protein, 85 aa, unidentified
  REGION 1..85: note = Description of Unknown:cds_NZ_WFIY01000004.1_cds_WP_155863311.1_1273 target sequence
KLKERLTFNKKVYVVDPGVVSRIALRARDKGRVIENVVAIKLLRENQLKGLYYIKGKDFEVDFYDELNSRLIQVTYAVDKVEERE

SEQ ID NO: 30616 - protein, 85 aa, unidentified
  REGION 1..85: note = Description of Unknown:cds_NZ_WFIY01000004.1_cds_WP_155863438.1_1412 target sequence
DWKEALKDDRLKAVLFWTDWCEDCDYVKKEFEKVYNPYFAFVEVNADERPDLALRYSPQIFPSISIISKGNVIGGIYGKVNAETI

SEQ ID NO: 30617 - protein, 85 aa, unidentified
  REGION 1..85: note = Description of Unknown:cds_NZ_WFIY01000004.1_cds_WP_155863438.1_1412 target sequence
GEVLLKVLDLSLGGGVLVKPNSPKVERTKYTIDEAIRTIRRNCLAMFDIYYGGFEKEPKYFLPNVLIFLIELGDNYSLEVAKYTA

SEQ ID NO: 30618 - protein, 85 aa, unidentified
  REGION 1..85: note = Description of Unknown:cds_NZ_WFIY01000004.1_cds_WP_155863438.1_1412 target sequence
EAAIYYLWDEGFYPYAKSYDWKIHPNFKLLDVNAEAIIALLKLYEKTKDDYFLEYAIETGNWILKNKIDGLYPIAIVDRKIIKKY

SEQ ID NO: 30619 - protein, 85 aa, unidentified
  REGION 1..85: note = Description of Unknown:cds_NZ_WFIY01000004.1_cds_WP_155863438.1_1412 target sequence
YIDVNSKIGEALIYLFKFTQDKKFLDEAISLKNKLLSYSSWSHLLNSNVPLFFLDLAYLLRFLSYFKEGDIVINLAKSKYSSEDG

SEQ ID NO: 30620 - protein, 84 aa, unidentified
  REGION 1..84: note = Description of Unknown:cds_NZ_WFIY01000004.1_cds_WP_155863438.1_1412 target sequence
LAKSKYSSEDGTFYDVDFSIANEEMIGRYKIMFENAVFAQGLLNLGYFEEARKIADYFLDSFYEFNYVDQAEYGRLLVRLNEAS

SEQ ID NO: 30621 - protein, 85 aa, unidentified
  REGION 1..85: note = Description of Unknown:cds_NZ_WFIY01000004.1_cds_WP_155863438.1_1412 target sequence
KKEFEKVYNPYFAFVEVNADERPDLALRYSPQIFPSISIISKGNVIGGIYGKVNAETIGEVLLKVLDLSLGGGVLVKPNSPKVER

SEQ ID NO: 30622 - protein, 85 aa, unidentified
  REGION 1..85: note = Description of Unknown:cds_NZ_WFIY01000004.1_cds_WP_155863438.1_1412 target sequence
TKYTIDEAIRTIRRNCLAMFDIYYGGFEKEPKYFLPNVLIFLIELGDNYSLEVAKYTAEAAIYYLWDEGFYPYAKSYDWKIHPNF

SEQ ID NO: 30623 - protein, 85 aa, unidentified
  REGION 1..85: note = Description of Unknown:cds_NZ_WFIY01000004.1_cds_WP_155863438.1_1412 target sequence
KLLDVNAEAIIALLKLYEKTKDDYFLEYAIETGNWILKNKIDGLYPIAIVDRKIIKKYYIDVNSKIGEALIYLFKFTQDKKFLDE

SEQ ID NO: 30624 - protein, 85 aa, unidentified
  REGION 1..85: note = Description of Unknown:cds_NZ_WFIY01000004.1_cds_WP_155863438.1_1412 target sequence
AISLKNKLLSYSSWSHLLNSNVPLFFLDLAYLLRFLSYFKEGDIVINLAKSKYSSEDGTFYDVDFSIANEEMIGRYKIMFENAVF

SEQ ID NO: 30625 - protein, 85 aa, unidentified
  REGION 1..85: note = Description of Unknown:cds_NZ_WFIY01000004.1_cds_WP_155863787.1_1668 target sequence
LSILEVYSLQNKPIISCSLIDDNGNEKEILIISLEDNGIHVYKNIEEKDNHYILPPIPQIDLLIKEVIDEVAEELNVKSIVFKFG

SEQ ID NO: 30626 - protein, 85 aa, unidentified
  REGION 1..85: note = Description of Unknown:cds_NZ_WFIY01000004.1_cds_WP_155863787.1_1668 target sequence
NNEEDEEQTDKLVLSEEWYDAEKLALAASKHTALLSDIDSKIIIGIVKFSSFLYAATILRKEDTFPLMQIVLKTDSEIPLLKIYN

SEQ ID NO: 30627 - protein, 85 aa, unidentified
  REGION 1..85: note = Description of Unknown:cds_NZ_WFIY01000004.1_cds_WP_155863787.1_1668 target sequence
EMGQLVEERREKIDNFENYVRSLINSDEVAIVYKESLEEIPSPIEVTTNKGDKLYVGVIFKYFIGFLPSSTIKDREISIHNRKKL

SEQ ID NO: 30628 - protein, 85 aa, unidentified
  REGION 1..85: note = Description of Unknown:cds_NZ_WFIY01000004.1_cds_WP_155863787.1_1668 target sequence
AKMLRALLYLDKMGKNGGTEIIIGRKGVPLTKLKEQINLIKNRVENILHKLYNLNEINYYGINESVIDELIKYDEELSDGDLSLG

SEQ ID NO: 30629 - protein, 84 aa, unidentified
  REGION 1..84: note = Description of Unknown:cds_NZ_WFIY01000004.1_cds_WP_155863787.1_1668 target sequence
ELSDGDLSLGIRVLPVAFIVTASNKQEFDNQMNRILNGPTSDGYDILDEYVRRNVSSYFIGYLMSLEEALIIYGDIINEMNNNG

SEQ ID NO: 30630 - protein, 85 aa, unidentified
  REGION 1..85: note = Description of Unknown:cds_NZ_WFIY01000004.1_cds_WP_155863787.1_1668 target sequence
EILIISLEDNGIHVYKNIEEKDNHYILPPIPQIDLLIKEVIDEVAEELNVKSIVFKFGNNEEDEEQTDKLVLSEEWYDAEKLALA

SEQ ID NO: 30631 - protein, 85 aa, unidentified
  REGION 1..85: note = Description of Unknown:cds_NZ_WFIY01000004.1_cds_WP_155863787.1_1668 target sequence
ASKHTALLSDIDSKIIIGIVKFSSFLYAATILRKEDTFPLMQIVLKTDSEIPLLKIYNEMGQLVEERREKIDNFENYVRSLINSD

SEQ ID NO: 30632 - protein, 85 aa, unidentified
  REGION 1..85: note = Description of Unknown:cds_NZ_WFIY01000004.1_cds_WP_155863787.1_1668 target sequence
EVAIVYKESLEEIPSPIEVTTNKGDKLYVGVIFKYFIGFLPSSTIKDREISIHNRKKLAKMLRALLYLDKMGKNGGTEIIIGRKG

SEQ ID NO: 30633 - protein, 85 aa, unidentified
  REGION 1..85: note = Description of Unknown:cds_NZ_WFIY01000004.1_cds_WP_155863787.1_1668 target sequence
VPLTKLKEQINLIKNRVENILHKLYNLNEINYYGINESVIDELIKYDEELSDGDLSLGIRVLPVAFIVTASNKQEFDNQMNRILN

SEQ ID NO: 30634 - protein, 85 aa, unidentified
  REGION 1..85: note = Description of Unknown:cds_NZ_WFIY01000004.1_cds_WP_155863844.1_1740 target sequence
EWKIEDVKVIIPIGGEATRLRPLTIETSKATVRLLNRPLIEFSLYELAKQGIKEFIFGVRGYVNYRSLFDTFKEGIGFSARYKIK

SEQ ID NO: 30635 - protein, 85 aa, unidentified
  REGION 1..85: note = Description of Unknown:cds_NZ_WFIY01000004.1_cds_WP_155863844.1_1740 target sequence
PRVHFKYQPRVDSVGNADSVRINMEYYRINDITLIIQGDNIFRLDVKKLINYHLEKKAMMTIVLKKWNNVEEFGVADVDKDLRIK

SEQ ID NO: 30636 - protein, 85 aa, unidentified
  REGION 1..85: note = Description of Unknown:cds_NZ_WFIY01000004.1_cds_WP_155863844.1_1740 target sequence
RFVEKPKKEEAPSNLINTGIYVLSPDIKKVFESEDVIRMREEGKMDFGKDIIPYLIDHDYPVYGYITEDIWFDVGTPDRYLDAMQ

SEQ ID NO: 30637 - protein, 85 aa, unidentified
  REGION 1..85: note = Description of Unknown:cds_NZ_WFIY01000004.1_cds_WP_155863844.1_1740 target sequence
TLLATLPDSEIGGKRIDENKRIFVQGTSPDSIRRRNIIISKYKKGKIKVEGNALIGRHCQIGNGIYIENSVIDNFTIVKNNVKIV

SEQ ID NO: 30638 - protein, 84 aa, unidentified
  REGION 1..84: note = Description of Unknown:cds_NZ_WFIY01000004.1_cds_WP_155863844.1_1740 target sequence
FTIVKNNVKIVKSSIMDRVYLGNNVEIQNSIIGRHVEIKDGVKIINSVIADDVTIGENSEIVNSRIYPHRVINSGSKLHDTILT

SEQ ID NO: 30639 - protein, 85 aa, unidentified
  REGION 1..85: note = Description of Unknown:cds_NZ_WFIY01000004.1_cds_WP_155863844.1_1740 target sequence
SKATVRLLNRPLIEFSLYELAKQGIKEFIFGVRGYVNYRSLFDTFKEGIGFSARYKIKPRVHFKYQPRVDSVGNADSVRINMEYY

SEQ ID NO: 30640 - protein, 85 aa, unidentified
  REGION 1..85: note = Description of Unknown:cds_NZ_WFIY01000004.1_cds_WP_155863844.1_1740 target sequence
RINDITLIIQGDNIFRLDVKKLINYHLEKKAMMTIVLKKWNNVEEFGVADVDKDLRIKRFVEKPKKEEAPSNLINTGIYVLSPDI

SEQ ID NO: 30641 - protein, 85 aa, unidentified
  REGION 1..85: note = Description of Unknown:cds_NZ_WFIY01000004.1_cds_WP_155863844.1_1740 target sequence
KKVFESEDVIRMREEGKMDFGKDIIPYLIDHDYPVYGYITEDIWFDVGTPDRYLDAMQTLLATLPDSEIGGKRIDENKRIFVQGT

SEQ ID NO: 30642 - protein, 85 aa, unidentified
  REGION 1..85: note = Description of Unknown:cds_NZ_WFIY01000004.1_cds_WP_155863844.1_1740 target sequence
SPDSIRRRNIIISKYKKGKIKVEGNALIGRHCQIGNGIYIENSVIDNFTIVKNNVKIVKSSIMDRVYLGNNVEIQNSIIGRHVEI

SEQ ID NO: 30643 - protein, 85 aa, unidentified
  REGION 1..85: note = Description of Unknown:hvTR_P89474 target sequence
ADIPPDPPALNTTPANHAPPSPPPGSRKRRRPVLPSSSESEGKPDTESESSSTESSEDEAGDLRGGRRRSPRELGGRYFLDLSAE

SEQ ID NO: 30644 - protein, 85 aa, unidentified
  REGION 1..85: note = Description of Unknown:hvTR_P89474 target sequence
STTGTESEGTGPSDDDDDDASDGWLVDTPPRKSKRPRINLRLTSSPDRRAGVVFPEVWRSDRPIRAAQPQAPASLPGIAHAHRRS

SEQ ID NO: 30645 - protein, 85 aa, unidentified
  REGION 1..85: note = Description of Unknown:hvTR_P89474 target sequence
ARQAQMRSGAAWTLDLHYIRQCVNQLFRILRAAPNPPGSANRLRHLVRDCYLMGYCRTRLGPRTWGRLLQISGGTWDVRLRNAIR

SEQ ID NO: 30646 - protein, 85 aa, unidentified
  REGION 1..85: note = Description of Unknown:hvTR_P89474 target sequence
EVEAHFEPAAEPVCELPCLNARRYGPECDVGNLETNGGSTSDDEISDATDSDDTLASHSDTEGGPSPAGRENPESASGGAIAARL

SEQ ID NO: 30647 - protein, 84 aa, unidentified
  REGION 1..84: note = Description of Unknown:hvTR_P89474 target sequence
ESASGGAIAARLECEFGTFDWTSEEGSQPWLSAVVADTSSAERSGLPAPGACRATEAPEREDGCRKMRFPAACPYPCGHTFLRP

SEQ ID NO: 30648 - protein, 85 aa, unidentified
  REGION 1..85: note = Description of Unknown:hvTR_P89474 target sequence
KRRRPVLPSSSESEGKPDTESESSSTESSEDEAGDLRGGRRRSPRELGGRYFLDLSAESTTGTESEGTGPSDDDDDDASDGWLVD

SEQ ID NO: 30649 - protein, 85 aa, unidentified
  REGION 1..85: note = Description of Unknown:hvTR_P89474 target sequence
TPPRKSKRPRINLRLTSSPDRRAGVVFPEVWRSDRPIRAAQPQAPASLPGIAHAHRRSARQAQMRSGAAWTLDLHYIRQCVNQLF

SEQ ID NO: 30650 - protein, 85 aa, unidentified
  REGION 1..85: note = Description of Unknown:hvTR_P89474 target sequence
RILRAAPNPPGSANRLRHLVRDCYLMGYCRTRLGPRTWGRLLQISGGTWDVRLRNAIREVEAHFEPAAEPVCELPCLNARRYGPE

SEQ ID NO: 30651 - protein, 85 aa, unidentified
  REGION 1..85: note = Description of Unknown:hvTR_P89474 target sequence
CDVGNLETNGGSTSDDEISDATDSDDTLASHSDTEGGPSPAGRENPESASGGAIAARLECEFGTFDWTSEEGSQPWLSAVVADTS

SEQ ID NO: 30652 - protein, 85 aa, unidentified
  REGION 1..85: note = Description of Unknown:hvTR_Q8QXN6 target sequence
RDEECVVAFDEALLGGAAPGRPPVVAVPRAASPDALYQRLISDLAFDEGPALLGAMERWNEDLFSCLPGNEDLYARLVMLSASAD

SEQ ID NO: 30653 - protein, 85 aa, unidentified
  REGION 1..85: note = Description of Unknown:hvTR_Q8QXN6 target sequence
EVAAQVRAPTADASVDLGVPGAEPMPRVPAVEEELPAYVAAVERFFVSTLRAREERYARLLDAYCRAVLRYLHAQARRDEGKLRQ

SEQ ID NO: 30654 - protein, 85 aa, unidentified
  REGION 1..85: note = Description of Unknown:hvTR_Q8QXN6 target sequence
LVRGRYYRDVARLAPWLFLHLYVATARELSWRLHADQVVAQDVFMSLRYEWDQARQLTCLFHPVLFNHGVVLLSGAPVPAAQLRA

SEQ ID NO: 30655 - protein, 85 aa, unidentified
  REGION 1..85: note = Description of Unknown:hvTR_Q8QXN6 target sequence
VNHRRRELGLPLVRAGLIEEDGADLVEEPPFSAALPRAAGYLSHQVRIKMEAYSREYRDHTYCRPPSPVASYGSTAEALLPPPSP

SEQ ID NO: 30656 - protein, 84 aa, unidentified
  REGION 1..84: note = Description of Unknown:hvTR_Q8QXN6 target sequence
STAEALLPPPSPSAVLPCDPTPPARVSAAPLITTVTLAEAEEDGALTTAAPAAAVATATVASPGPATPAYHLIPRDALNRMFEM

SEQ ID NO: 30657 - protein, 85 aa, unidentified
  REGION 1..85: note = Description of Unknown:hvTR_Q8QXN6 target sequence
PRAASPDALYQRLISDLAFDEGPALLGAMERWNEDLFSCLPGNEDLYARLVMLSASADEVAAQVRAPTADASVDLGVPGAEPMPR

SEQ ID NO: 30658 - protein, 85 aa, unidentified
  REGION 1..85: note = Description of Unknown:hvTR_Q8QXN6 target sequence
VPAVEEELPAYVAAVERFFVSTLRAREERYARLLDAYCRAVLRYLHAQARRDEGKLRQLVRGRYYRDVARLAPWLFLHLYVATAR

SEQ ID NO: 30659 - protein, 85 aa, unidentified
  REGION 1..85: note = Description of Unknown:hvTR_Q8QXN6 target sequence
ELSWRLHADQVVAQDVFMSLRYEWDQARQLTCLFHPVLFNHGVVLLSGAPVPAAQLRAVNHRRRELGLPLVRAGLIEEDGADLVE

SEQ ID NO: 30660 - protein, 85 aa, unidentified
  REGION 1..85: note = Description of Unknown:hvTR_Q8QXN6 target sequence
EPPFSAALPRAAGYLSHQVRIKMEAYSREYRDHTYCRPPSPVASYGSTAEALLPPPSPSAVLPCDPTPPARVSAAPLITTVTLAE

SEQ ID NO: 30661 - protein, 85 aa, unidentified
  REGION 1..85: note = Description of Unknown:cds_NZ_WFIY01000004.1_cds_WP_155863307.1_1267 target sequence
EEGIKSFIAEWLTSPLPNIIERDLSLPLDKDYIITVTGGRRSGKTFLLYQTIKKIIEGGLASREEILYVDFDDYRLKNVTVNDLD

SEQ ID NO: 30662 - protein, 85 aa, unidentified
  REGION 1..85: note = Description of Unknown:cds_NZ_WFIY01000004.1_cds_WP_155863307.1_1267 target sequence
KIILSFEELTGKTPKYIFFDEIQDVKNYGSWFRKRLNARIFLSGSSSQLTPLNIANELRGRSVNYEVYPLSFKEFLRFKGFIYNP

SEQ ID NO: 30663 - protein, 85 aa, unidentified
  REGION 1..85: note = Description of Unknown:cds_NZ_WFIY01000004.1_cds_WP_155863307.1_1267 target sequence
LMDYTLQRGKILSLLREYLQFGSYPAVVLEEDKVRLLRSYFDSVIVRDLSIVKPSVAETFASFLIANYSNPITVNRVYNYIKGLG

SEQ ID NO: 30664 - protein, 85 aa, unidentified
  REGION 1..85: note = Description of Unknown:cds_NZ_WFIY01000004.1_cds_WP_155863307.1_1267 target sequence
IKIGKDTILELFSKAKETYFSFLVEEFEKSESKRRANPKKLYIIDTGYPTALGYEFSISRAMENVVYIELLRRGCKEVFYWKGKK

SEQ ID NO: 30665 - protein, 84 aa, unidentified
  REGION 1..84: note = Description of Unknown:cds_NZ_WFIY01000004.1_cds_WP_155863307.1_1267 target sequence
GCKEVFYWKGKKREVDFVVSKNFEPKILIQVTYATDKIEEREIEGLKEASSSLKAEEGIIITWDYEGKVNGFKAIPLWKWLLHR

SEQ ID NO: 30666 - protein, 85 aa, unidentified
  REGION 1..85: note = Description of Unknown:cds_NZ_WFIY01000004.1_cds_WP_155863307.1_1267 target sequence
LDKDYIITVTGGRRSGKTFLLYQTIKKIIEGGLASREEILYVDFDDYRLKNVTVNDLDKIILSFEELTGKTPKYIFFDEIQDVKN

SEQ ID NO: 30667 - protein, 85 aa, unidentified
  REGION 1..85: note = Description of Unknown:cds_NZ_WFIY01000004.1_cds_WP_155863307.1_1267 target sequence
YGSWFRKRLNARIFLSGSSSQLTPLNIANELRGRSVNYEVYPLSFKEFLRFKGFIYNPLMDYTLQRGKILSLLREYLQFGSYPAV

SEQ ID NO: 30668 - protein, 85 aa, unidentified
  REGION 1..85: note = Description of Unknown:cds_NZ_WFIY01000004.1_cds_WP_155863307.1_1267 target sequence
VLEEDKVRLLRSYFDSVIVRDLSIVKPSVAETFASFLIANYSNPITVNRVYNYIKGLGIKIGKDTILELFSKAKETYFSFLVEEF

SEQ ID NO: 30669 - protein, 85 aa, unidentified
  REGION 1..85: note = Description of Unknown:cds_NZ_WFIY01000004.1_cds_WP_155863307.1_1267 target sequence
EKSESKRRANPKKLYIIDTGYPTALGYEFSISRAMENVVYIELLRRGCKEVFYWKGKKREVDFVVSKNFEPKILIQVTYATDKIE

SEQ ID NO: 30670 - protein, 85 aa, unidentified
  REGION 1..85: note = Description of Unknown:cds_NZ_WFIY01000004.1_cds_WP_155864330.1_2339 target sequence
ECAVIPINRSDFTFESAFSSVVRTYELVRYKKLLILYADFNDVHLRKLERLFEEFKSHGVEVVKEKLGVMKFDEFKKMIEDETGG

SEQ ID NO: 30671 - protein, 85 aa, unidentified
  REGION 1..85: note = Description of Unknown:cds_NZ_WFIY01000004.1_cds_WP_155864330.1_2339 target sequence
CDKVFLVPTSGANIIAVYLTLLHSSDSNKYPLINYLFAFGPWIRYYYPFVPRSLEKALLIGHSQLHGVNLDLNLEDYVERDLEFT

SEQ ID NO: 30672 - protein, 85 aa, unidentified
  REGION 1..85: note = Description of Unknown:cds_NZ_WFIY01000004.1_cds_WP_155864330.1_2339 target sequence
ALIQLTAYELNKFNLEETNISLRVNGKEILNTSNVDYDKAKKYLAFAIQDSNIRESVFKLAGAYKILVDGEEIEKVAYGRPLLID

SEQ ID NO: 30673 - protein, 85 aa, unidentified
  REGION 1..85: note = Description of Unknown:cds_NZ_WFIY01000004.1_cds_WP_155864330.1_2339 target sequence
TNLIYFGIHTHEIRDLVIPYCVHNEVLMTVNRKDGEETFSDAVFLVYDTLRAKSRMLPSESTICDIAIPKIEADLIKNYLVVTAD

SEQ ID NO: 30674 - protein, 84 aa, unidentified
  REGION 1..84: note = Description of Unknown:cds_NZ_WFIY01000004.1_cds_WP_155864330.1_2339 target sequence
DLIKNYLVVTADKRAYDRWKRLAISEYAEVKLASVREERTSYAEVTSVIFNLASILHFMKFKDVEVCMDNKCVKVDEVAKKLQR

SEQ ID NO: 30675 - protein, 85 aa, unidentified
  REGION 1..85: note = Description of Unknown:cds_NZ_WFIY01000004.1_cds_WP_155864330.1_2339 target sequence
VRYKKLLILYADFNDVHLRKLERLFEEFKSHGVEVVKEKLGVMKFDEFKKMIEDETGGCDKVFLVPTSGANIIAVYLTLLHSSDS

SEQ ID NO: 30676 - protein, 85 aa, unidentified
  REGION 1..85: note = Description of Unknown:cds_NZ_WFIY01000004.1_cds_WP_155864330.1_2339 target sequence
NKYPLINYLFAFGPWIRYYYPFVPRSLEKALLIGHSQLHGVNLDLNLEDYVERDLEFTALIQLTAYELNKFNLEETNISLRVNGK

SEQ ID NO: 30677 - protein, 85 aa, unidentified
  REGION 1..85: note = Description of Unknown:cds_NZ_WFIY01000004.1_cds_WP_155864330.1_2339 target sequence
EILNTSNVDYDKAKKYLAFAIQDSNIRESVFKLAGAYKILVDGEEIEKVAYGRPLLIDTNLIYFGIHTHEIRDLVIPYCVHNEVL

SEQ ID NO: 30678 - protein, 85 aa, unidentified
  REGION 1..85: note = Description of Unknown:cds_NZ_WFIY01000004.1_cds_WP_155864330.1_2339 target sequence
MTVNRKDGEETFSDAVFLVYDTLRAKSRMLPSESTICDIAIPKIEADLIKNYLVVTADKRAYDRWKRLAISEYAEVKLASVREER

SEQ ID NO: 30679 - protein, 85 aa, unidentified
  REGION 1..85: note = Description of Unknown:cds_NC_019843.3_cds_YP_009047211.1_10 target sequence
ASPAAPRAVSFADNNDITNTNLSRGRGRNPKPRAAPNNTVSWYTGLTQHGKVPLTFPPGQGVPLNANSTPAQNAGYWRRQDRKIN

SEQ ID NO: 30680 - protein, 85 aa, unidentified
  REGION 1..85: note = Description of Unknown:cds_NC_019843.3_cds_YP_009047211.1_10 target sequence
TGNGIKQLAPRWYFYYTGTGPEAALPFRAVKDGIVWVHEDGATDAPSTFGTRNPNNDSAIVTQFAPGTKLPKNFHIEGTGGNSQS

SEQ ID NO: 30681 - protein, 85 aa, unidentified
  REGION 1..85: note = Description of Unknown:cds_NC_019843.3_cds_YP_009047211.1_10 target sequence
SSRASSLSRNSSRSSSQGSRSGNSTRGTSPGPSGIGAVGGDLLYLDLLNRLQALESGKVKQSQPKVITKKDAAAAKNKMRHKRTS

SEQ ID NO: 30682 - protein, 85 aa, unidentified
  REGION 1..85: note = Description of Unknown:cds_NC_019843.3_cds_YP_009047211.1_10 target sequence
TKSFNMVQAFGLRGPGDLQGNFGDLQLNKLGTEDPRWPQIAELAPTASAFMGMSQFKLTHQNNDDHGNPVYFLRYSGAIKLDPKN

SEQ ID NO: 30683 - protein, 84 aa, unidentified
  REGION 1..84: note = Description of Unknown:cds_NC_019843.3_cds_YP_009047211.1_10 target sequence
RYSGAIKLDPKNPNYNKWLELLEQNIDAYKTFPKKEKKQKAPKEESTDQMSEPPKEQRVQGSITQRTRTRPSVQPGPMIDVNTD

SEQ ID NO: 30684 - protein, 85 aa, unidentified
  REGION 1..85: note = Description of Unknown:cds_NC_019843.3_cds_YP_009047211.1_10 target sequence
RNPKPRAAPNNTVSWYTGLTQHGKVPLTFPPGQGVPLNANSTPAQNAGYWRRQDRKINTGNGIKQLAPRWYFYYTGTGPEAALPF

SEQ ID NO: 30685 - protein, 85 aa, unidentified
  REGION 1..85: note = Description of Unknown:cds_NC_019843.3_cds_YP_009047211.1_10 target sequence
RAVKDGIVWVHEDGATDAPSTFGTRNPNNDSAIVTQFAPGTKLPKNFHIEGTGGNSQSSSRASSLSRNSSRSSSQGSRSGNSTRG

SEQ ID NO: 30686 - protein, 85 aa, unidentified
  REGION 1..85: note = Description of Unknown:cds_NC_019843.3_cds_YP_009047211.1_10 target sequence
TSPGPSGIGAVGGDLLYLDLLNRLQALESGKVKQSQPKVITKKDAAAAKNKMRHKRTSTKSFNMVQAFGLRGPGDLQGNFGDLQL

SEQ ID NO: 30687 - protein, 85 aa, unidentified
  REGION 1..85: note = Description of Unknown:cds_NC_019843.3_cds_YP_009047211.1_10 target sequence
NKLGTEDPRWPQIAELAPTASAFMGMSQFKLTHQNNDDHGNPVYFLRYSGAIKLDPKNPNYNKWLELLEQNIDAYKTFPKKEKKQ

SEQ ID NO: 30688 - protein, 85 aa, unidentified
  REGION 1..85: note = Description of Unknown:cds_NC_009884.1_cds_YP_001496961.1_36 target sequence
IYGEVTLTIIDNDKKVKIRKKNTIVNLSALLPLITSTTSTAGSIITPYIQTNAGNIPVTYSVQPYESGYVFIFTGSFSQPSNIIS

SEQ ID NO: 30689 - protein, 85 aa, unidentified
  REGION 1..85: note = Description of Unknown:cds_NC_009884.1_cds_YP_001496961.1_36 target sequence
AFLYPSSLSTFQQPIASIVYSREITGVTSIEWAIYVDDATGLLYNALLPNIITSTNFLSALYADDGNTNALLTLGAYQHYVYAYF

SEQ ID NO: 30690 - protein, 85 aa, unidentified
  REGION 1..85: note = Description of Unknown:cds_NC_009884.1_cds_YP_001496961.1_36 target sequence
SDATISKAINYINAHYFTFIDYTTSPSAITIGNNFALQLVPASTGQHTVFYYLWNSQNFTMQFSFSSGSSPLADGFVVCMYATTP

SEQ ID NO: 30691 - protein, 85 aa, unidentified
  REGION 1..85: note = Description of Unknown:cds_NC_009884.1_cds_YP_001496961.1_36 target sequence
PIALNTSSVTGMTNGTLAYGEGNQICVEFDPYSSQPISVTQWNGSGYVSTLLSSSGAGTGTSMTANDIFVLEITVSGTTMTVTVT

SEQ ID NO: 30692 - protein, 84 aa, unidentified
  REGION 1..84: note = Description of Unknown:cds_NC_009884.1_cds_YP_001496961.1_36 target sequence
TVSGTTMTVTVTDVTANKTIASQSVTLPFTPPSYGYAIITARNENDYANWSLVNIVDWYPYSIQIPTSYVSPQLLPITAIFNTD

SEQ ID NO: 30693 - protein, 85 aa, unidentified
  REGION 1..85: note = Description of Unknown:cds_NC_009884.1_cds_YP_001496961.1_36 target sequence
SALLPLITSTTSTAGSIITPYIQTNAGNIPVTYSVQPYESGYVFIFTGSFSQPSNIISAFLYPSSLSTFQQPIASIVYSREITGV

SEQ ID NO: 30694 - protein, 85 aa, unidentified
  REGION 1..85: note = Description of Unknown:cds_NC_009884.1_cds_YP_001496961.1_36 target sequence
TSIEWAIYVDDATGLLYNALLPNIITSTNFLSALYADDGNTNALLTLGAYQHYVYAYFSDATISKAINYINAHYFTFIDYTTSPS

SEQ ID NO: 30695 - protein, 85 aa, unidentified
  REGION 1..85: note = Description of Unknown:cds_NC_009884.1_cds_YP_001496961.1_36 target sequence
AITIGNNFALQLVPASTGQHTVFYYLWNSQNFTMQFSFSSGSSPLADGFVVCMYATTPPIALNTSSVTGMTNGTLAYGEGNQICV

SEQ ID NO: 30696 - protein, 85 aa, unidentified
  REGION 1..85: note = Description of Unknown:cds_NC_009884.1_cds_YP_001496961.1_36 target sequence
EFDPYSSQPISVTQWNGSGYVSTLLSSSGAGTGTSMTANDIFVLEITVSGTTMTVTVTDVTANKTIASQSVTLPFTPPSYGYAII

SEQ ID NO: 30697 - protein, 85 aa, unidentified
  REGION 1..85: note = Description of Unknown:cds_NZ_WFIY01000004.1_cds_WP_155862838.1_671 target sequence
KIRIRGIYATALTYMLSKNFEIVQQSPQIAERFMQEIIREPADITFKDGEDKGSLIVIGSADNFENYLKEIFPYSIVWKSPVKLY

SEQ ID NO: 30698 - protein, 85 aa, unidentified
  REGION 1..85: note = Description of Unknown:cds_NZ_WFIY01000004.1_cds_WP_155862838.1_671 target sequence
SLIETQNCKYQNYDVEPCLEKGIVIKPPTDGRKIILSPPKAVSKFAMVWRGEGKTFFSEHIAPEERKRLLNISTKYNKKGYNVKW

SEQ ID NO: 30699 - protein, 85 aa, unidentified
  REGION 1..85: note = Description of Unknown:cds_NZ_WFIY01000004.1_cds_WP_155862838.1_671 target sequence
RSNAQFEKNYLLEKDLENLMFKYENNDFSKQGCDFYLINLSLEDKLELDKIRSLVVPTINFHHMLKLSRSREVDIAESGKDNVTQ

SEQ ID NO: 30700 - protein, 85 aa, unidentified
  REGION 1..85: note = Description of Unknown:cds_NZ_WFIY01000004.1_cds_WP_155862838.1_671 target sequence
ILESLIKDYMGIEHIKINGRRIFLKPGKVIEKRVSDNGYFLLLRREISGNGYYDGLGIRKEEGDYDIMEIDSRKWHEVHNYYSKD

SEQ ID NO: 30701 - protein, 84 aa, unidentified
  REGION 1..84: note = Description of Unknown:cds_NZ_WFIY01000004.1_cds_WP_155862838.1_671 target sequence
RKWHEVHNYYSKDGTLKGKYINISTPPELLDGKIRYIDLEVDIIIKNGEKIIIDEDKLEENKKYLSYKMLERIKKEIEYVMTAY

SEQ ID NO: 30702 - protein, 85 aa, unidentified
  REGION 1..85: note = Description of Unknown:cds_NZ_WFIY01000004.1_cds_WP_155862838.1_671 target sequence
QIAERFMQEIIREPADITFKDGEDKGSLIVIGSADNFENYLKEIFPYSIVWKSPVKLYSLIETQNCKYQNYDVEPCLEKGIVIKP

SEQ ID NO: 30703 - protein, 85 aa, unidentified
  REGION 1..85: note = Description of Unknown:cds_NZ_WFIY01000004.1_cds_WP_155862838.1_671 target sequence
PTDGRKIILSPPKAVSKFAMVWRGEGKTFFSEHIAPEERKRLLNISTKYNKKGYNVKWRSNAQFEKNYLLEKDLENLMFKYENND

SEQ ID NO: 30704 - protein, 85 aa, unidentified
  REGION 1..85: note = Description of Unknown:cds_NZ_WFIY01000004.1_cds_WP_155862838.1_671 target sequence
FSKQGCDFYLINLSLEDKLELDKIRSLVVPTINFHHMLKLSRSREVDIAESGKDNVTQILESLIKDYMGIEHIKINGRRIFLKPG

SEQ ID NO: 30705 - protein, 85 aa, unidentified
  REGION 1..85: note = Description of Unknown:cds_NZ_WFIY01000004.1_cds_WP_155862838.1_671 target sequence
KVIEKRVSDNGYFLLLRREISGNGYYDGLGIRKEEGDYDIMEIDSRKWHEVHNYYSKDGTLKGKYINISTPPELLDGKIRYIDLE

SEQ ID NO: 30706 - protein, 85 aa, unidentified
  REGION 1..85: note = Description of Unknown:cds_NZ_WFIY01000004.1_cds_WP_155863157.1_1086 target sequence
ALPSDIINSSLNSPSVLKDGSKLNPDYIPERLPHREDKLKELTIAFRDIVNDPGKSSVRVVITGRTGTGKTVTARIFGKAFAEQV

SEQ ID NO: 30707 - protein, 85 aa, unidentified
  REGION 1..85: note = Description of Unknown:cds_NZ_WFIY01000004.1_cds_WP_155863157.1_1086 target sequence
KNRGIKVEYVHVNCHRERTLYLITLKIAEQLKLSIPPRGLSSQEVFKIIHEYLERRNIYVIITLDEFDYFLNSSPPEDIYFIVRL

SEQ ID NO: 30708 - protein, 85 aa, unidentified
  REGION 1..85: note = Description of Unknown:cds_NZ_WFIY01000004.1_cds_WP_155863157.1_1086 target sequence
YDELAVNVKRVSYIFIIRDLTTLSSLDKTVRDHIARDIIEFPPYKSNELYDILQDRVKMAFYDGTVSDDAVKFISDINGFDKGGS

SEQ ID NO: 30709 - protein, 85 aa, unidentified
  REGION 1..85: note = Description of Unknown:cds_NZ_WFIY01000004.1_cds_WP_155863157.1_1086 target sequence
GNARLSIETLELAGRIADAEGSPIVTVEHAKKANSRLNEEASIILDELNYLELHPMLLVKALINLSKREKKESFPIGEVEDEYSR

SEQ ID NO: 30710 - protein, 84 aa, unidentified
  REGION 1..84: note = Description of Unknown:cds_NZ_WFIY01000004.1_cds_WP_155863157.1_1086 target sequence
SFPIGEVEDEYSRLCELLGVEPRRHTQVFEYMRRLKLMGIINTQQSGKGMRGRTTLLSLTFPASQELDDYVTKLIGALKNSEQK

SEQ ID NO: 30711 - protein, 85 aa, unidentified
  REGION 1..85: note = Description of Unknown:cds_NZ_WFIY01000004.1_cds_WP_155863157.1_1086 target sequence
IPERLPHREDKLKELTIAFRDIVNDPGKSSVRVVITGRTGTGKTVTARIFGKAFAEQVKNRGIKVEYVHVNCHRERTLYLITLKI

SEQ ID NO: 30712 - protein, 85 aa, unidentified
  REGION 1..85: note = Description of Unknown:cds_NZ_WFIY01000004.1_cds_WP_155863157.1_1086 target sequence
AEQLKLSIPPRGLSSQEVFKIIHEYLERRNIYVIITLDEFDYFLNSSPPEDIYFIVRLYDELAVNVKRVSYIFIIRDLTTLSSLD

SEQ ID NO: 30713 - protein, 85 aa, unidentified
  REGION 1..85: note = Description of Unknown:cds_NZ_WFIY01000004.1_cds_WP_155863157.1_1086 target sequence
KTVRDHIARDIIEFPPYKSNELYDILQDRVKMAFYDGTVSDDAVKFISDINGFDKGGSGNARLSIETLELAGRIADAEGSPIVTV

SEQ ID NO: 30714 - protein, 85 aa, unidentified
  REGION 1..85: note = Description of Unknown:cds_NZ_WFIY01000004.1_cds_WP_155863157.1_1086 target sequence
EHAKKANSRLNEEASIILDELNYLELHPMLLVKALINLSKREKKESFPIGEVEDEYSRLCELLGVEPRRHTQVFEYMRRLKLMGI

SEQ ID NO: 30715 - protein, 85 aa, unidentified
  REGION 1..85: note = Description of Unknown:cds_NZ_WFIY01000004.1_cds_WP_155863277.1_1233 target sequence
QYDIAIKNGNVFTGTELIGKMNIYITNGKISKVSKEDLNAKQEIDAKDMLVMPGLIDAHMHISGLKGGSLLKIMFEKPEYRALRA

SEQ ID NO: 30716 - protein, 85 aa, unidentified
  REGION 1..85: note = Description of Unknown:cds_NZ_WFIY01000004.1_cds_WP_155863277.1_1233 target sequence
TKWLEKLLLAGFTTVRDCGEPISISLKRAVNEGYIKGPKIIASGKPITQTFGHGEFSHDIPLEFSISLGFSEICDGTESCIHAAR

SEQ ID NO: 30717 - protein, 85 aa, unidentified
  REGION 1..85: note = Description of Unknown:cds_NZ_WFIY01000004.1_cds_WP_155863277.1_1233 target sequence
KVLRDGSDFIKIFATGGVLSQRDRPDMPQLSFDEIRAIVNEAEKAGTYVAAHAHGDKGARIAIEAGIKTLEHGSLLKEDTLKLML

SEQ ID NO: 30718 - protein, 85 aa, unidentified
  REGION 1..85: note = Description of Unknown:cds_NZ_WFIY01000004.1_cds_WP_155863277.1_1233 target sequence
EKNISLTPTLTITEIIYKYGKTIGVDEWGLEKIIEVRENLHKVLRKAKELGITIITGTDMGFETGLEDYDIGKNWTEILLLTEVG

SEQ ID NO: 30719 - protein, 84 aa, unidentified
  REGION 1..84: note = Description of Unknown:cds_NZ_WFIY01000004.1_cds_WP_155863277.1_1233 target sequence
KNWTEILLLTEVGGLSNEEALRAATYNSAEALGLNSGLIDEGKDADIIVIDGNPLENIKDVAKVTHVIKQGKLEVLDSKIINNY

SEQ ID NO: 30720 - protein, 85 aa, unidentified
  REGION 1..85: note = Description of Unknown:cds_NZ_WFIY01000004.1_cds_WP_155863277.1_1233 target sequence
GKISKVSKEDLNAKQEIDAKDMLVMPGLIDAHMHISGLKGGSLLKIMFEKPEYRALRATKWLEKLLLAGFTTVRDCGEPISISLK

SEQ ID NO: 30721 - protein, 85 aa, unidentified
  REGION 1..85: note = Description of Unknown:cds_NZ_WFIY01000004.1_cds_WP_155863277.1_1233 target sequence
RAVNEGYIKGPKIIASGKPITQTFGHGEFSHDIPLEFSISLGFSEICDGTESCIHAARKVLRDGSDFIKIFATGGVLSQRDRPDM

SEQ ID NO: 30722 - protein, 85 aa, unidentified
  REGION 1..85: note = Description of Unknown:cds_NZ_WFIY01000004.1_cds_WP_155863277.1_1233 target sequence
PQLSFDEIRAIVNEAEKAGTYVAAHAHGDKGARIAIEAGIKTLEHGSLLKEDTLKLMLEKNISLTPTLTITEIIYKYGKTIGVDE

SEQ ID NO: 30723 - protein, 85 aa, unidentified
  REGION 1..85: note = Description of Unknown:cds_NZ_WFIY01000004.1_cds_WP_155863277.1_1233 target sequence
WGLEKIIEVRENLHKVLRKAKELGITIITGTDMGFETGLEDYDIGKNWTEILLLTEVGGLSNEEALRAATYNSAEALGLNSGLID

SEQ ID NO: 30724 - protein, 85 aa, unidentified
  REGION 1..85: note = Description of Unknown:cds_NZ_WFIY01000004.1_cds_WP_155863775.1_1653 target sequence
YKIPEDGEKIQFKDGKWITPNKPIILYIEGDGIGPEIVKSTIDVINKAVELKYKDNREIKWVEVLAGNKAAQLVGDRFPKDTQDM

SEQ ID NO: 30725 - protein, 85 aa, unidentified
  REGION 1..85: note = Description of Unknown:cds_NZ_WFIY01000004.1_cds_WP_155863775.1_1653 target sequence
LKEYRVVLKGPMETPIGKGWKSVNVAIRIMLDLYANIRPVKYIEGLESPIKNPERVNMIIFRENTDDLYRGIEYPYNSPEAEKIR

SEQ ID NO: 30726 - protein, 85 aa, unidentified
  REGION 1..85: note = Description of Unknown:cds_NZ_WFIY01000004.1_cds_WP_155863775.1_1653 target sequence
KFIREELKVDVEDDTGIGFKIISKFKTQRITRMAIKYALQNSRKRITIMHKGNVMKYTEGAFREWAYETAINEFRDFIVTEEEVT

SEQ ID NO: 30727 - protein, 85 aa, unidentified
  REGION 1..85: note = Description of Unknown:cds_NZ_WFIY01000004.1_cds_WP_155863775.1_1653 target sequence
TKYGGKIPDGKILINDRIADNMFQQIITRPEDYDIILAPNVNGDYISDAAGALIGNIGMLGGANVGDDAGMFEAVHGTAPKYAGK

SEQ ID NO: 30728 - protein, 84 aa, unidentified
  REGION 1..84: note = Description of Unknown:cds_NZ_WFIY01000004.1_cds_WP_155863775.1_1653 target sequence
EAVHGTAPKYAGKNVANPTGMIRGGELMLRFMGWVEAADLIDKAIVEAIKQKKVTQDLARYMNVKPLSTTEYTQELLNIMETLV

SEQ ID NO: 30729 - protein, 85 aa, unidentified
  REGION 1..85: note = Description of Unknown:cds_NZ_WFIY01000004.1_cds_WP_155863775.1_1653 target sequence
IEGDGIGPEIVKSTIDVINKAVELKYKDNREIKWVEVLAGNKAAQLVGDRFPKDTQDMLKEYRVVLKGPMETPIGKGWKSVNVAI

SEQ ID NO: 30730 - protein, 85 aa, unidentified
  REGION 1..85: note = Description of Unknown:cds_NZ_WFIY01000004.1_cds_WP_155863775.1_1653 target sequence
RIMLDLYANIRPVKYIEGLESPIKNPERVNMIIFRENTDDLYRGIEYPYNSPEAEKIRKFIREELKVDVEDDTGIGFKIISKFKT

SEQ ID NO: 30731 - protein, 85 aa, unidentified
  REGION 1..85: note = Description of Unknown:cds_NZ_WFIY01000004.1_cds_WP_155863775.1_1653 target sequence
QRITRMAIKYALQNSRKRITIMHKGNVMKYTEGAFREWAYETAINEFRDFIVTEEEVTTKYGGKIPDGKILINDRIADNMFQQII

SEQ ID NO: 30732 - protein, 85 aa, unidentified
  REGION 1..85: note = Description of Unknown:cds_NZ_WFIY01000004.1_cds_WP_155863775.1_1653 target sequence
TRPEDYDIILAPNVNGDYISDAAGALIGNIGMLGGANVGDDAGMFEAVHGTAPKYAGKNVANPTGMIRGGELMLRFMGWVEAADL

SEQ ID NO: 30733 - protein, 85 aa, unidentified
  REGION 1..85: note = Description of Unknown:cds_NC_030656.1_cds_YP_009268734.1_19 target sequence
SFLKRIQRIFSRSRGTRTESQDLIVSSVVDSSSATSSMLSVKSADSQQKITYVESINNSLTLKDDVFCGKSPLSAKELIPNPRPD

SEQ ID NO: 30734 - protein, 85 aa, unidentified
  REGION 1..85: note = Description of Unknown:cds_NC_030656.1_cds_YP_009268734.1_19 target sequence
STEFSKLIINNSSLSFLLDDDGMFEVGSCFIVNLEAGSSLVKKVMQFGHYNNYLAVICLKNTGISGYCIPNTNYVTKQSSVGDFT

SEQ ID NO: 30735 - protein, 85 aa, unidentified
  REGION 1..85: note = Description of Unknown:cds_NC_030656.1_cds_YP_009268734.1_19 target sequence
VSRALNGVRFFQQIGGESSYLLVTLVPSKKLHTRGFRVTRPLMHCRTTMAELYKMIEDDREKAIKLLENVIDNRIAIESAYFNMC

SEQ ID NO: 30736 - protein, 85 aa, unidentified
  REGION 1..85: note = Description of Unknown:cds_NC_030656.1_cds_YP_009268734.1_19 target sequence
QAEDMFRTFKVKGCVFGKKLIDKSLLELQESFESYVRTRSSSIGNSTNKLEQRNKINNNIACISNLFSTDEKDNKTILYAIQSYI

SEQ ID NO: 30737 - protein, 84 aa, unidentified
  REGION 1..84: note = Description of Unknown:cds_NC_030656.1_cds_YP_009268734.1_19 target sequence
DNKTILYAIQSYIDRILDELDNLFNELNELVTNLSKAANTDVSCLNAYVIKKVRESQIIKRRNELLSKYYVLDKIGFPEAEVLI

SEQ ID NO: 30738 - protein, 85 aa, unidentified
  REGION 1..85: note = Description of Unknown:cds_NC_030656.1_cds_YP_009268734.1_19 target sequence
VVDSSSATSSMLSVKSADSQQKITYVESINNSLTLKDDVFCGKSPLSAKELIPNPRPDSTEFSKLIINNSSLSFLLDDDGMFEVG

SEQ ID NO: 30739 - protein, 85 aa, unidentified
  REGION 1..85: note = Description of Unknown:cds_NC_030656.1_cds_YP_009268734.1_19 target sequence
SCFIVNLEAGSSLVKKVMQFGHYNNYLAVICLKNTGISGYCIPNTNYVTKQSSVGDFTVSRALNGVRFFQQIGGESSYLLVTLVP

SEQ ID NO: 30740 - protein, 85 aa, unidentified
  REGION 1..85: note = Description of Unknown:cds_NC_030656.1_cds_YP_009268734.1_19 target sequence
SKKLHTRGFRVTRPLMHCRTTMAELYKMIEDDREKAIKLLENVIDNRIAIESAYFNMCQAEDMFRTFKVKGCVFGKKLIDKSLLE

SEQ ID NO: 30741 - protein, 85 aa, unidentified
  REGION 1..85: note = Description of Unknown:cds_NC_030656.1_cds_YP_009268734.1_19 target sequence
LQESFESYVRTRSSSIGNSTNKLEQRNKINNNIACISNLFSTDEKDNKTILYAIQSYIDRILDELDNLFNELNELVTNLSKAANT

SEQ ID NO: 30742 - protein, 85 aa, unidentified; identical to SEQ ID NO: 30679
  REGION 1..85: note = Description of Unknown:hvTR_K9N4V7 target sequence

SEQ ID NO: 30743 - protein, 85 aa, unidentified
  REGION 1..85: note = Description of Unknown:hvTR_K9N4V7 target sequence
SSRASSVSRNSSRSSSQGSRSGNSTRGTSPGPSGIGAVGGDLLYLDLLNRLQALESGKVKQSQPKVITKKDAAAAKNKMRHKRTS

SEQ ID NO: 30744 - protein, 84 aa, unidentified
  REGION 1..84: note = Description of Unknown:hvTR_K9N4V7 target sequence
FLRYSGAIKLDPKNPNYNKWLELLEQNIDAYKTFPKKEKKQKAPKEESTDQMSEPPKEHRVQGTQRTRTRPSVQPGPMIDVNTD

SEQ ID NO: 30745 - protein, 85 aa, unidentified; identical to SEQ ID NO: 30684
  REGION 1..85: note = Description of Unknown:hvTR_K9N4V7 target sequence

SEQ ID NO: 30746 - protein, 85 aa, unidentified
  REGION 1..85: note = Description of Unknown:hvTR_K9N4V7 target sequence
RAVKDGIVWVHEDGATDAPSTFGTRNPNNDSAIVTQFAPGTKLPKNFHIEGTGGNSQSSSRASSVSRNSSRSSSQGSRSGNSTRG

SEQ ID NO: 30747 - protein, 85 aa, unidentified
  REGION 1..85: note = Description of Unknown:hvTR_P19893.1 target sequence
LPLIKQEDIKPEPDFTIQYRNKIIDTAGCIVISDSEEEQGEEVETRGATASSPSTGSGTPRVTSPTHPLSQMNHPPLPDPLGRPD

SEQ ID NO: 30748 - protein, 85 aa, unidentified
  REGION 1..85: note = Description of Unknown:hvTR_P19893.1 target sequence
EDSSSSSSSSCSSASDSESESEEMKCSSGGGASVTSSHHGRGGFGGAASSSLLSCGHQSSGGASTGPRKKKSKRISELDNEKVRN

SEQ ID NO: 30749 - protein, 85 aa, unidentified
  REGION 1..85: note = Description of Unknown:hvTR_P19893.1 target sequence
IMKDKNTPFCTPNVQTRRGRVKIDEVSRMFRNTNRSLEYKNLPFTIPSMHQVLDEAIKACKTMQVNNKGIQIIYTRNHEVKSEVD

SEQ ID NO: 30750 - protein, 85 aa, unidentified
  REGION 1..85: note = Description of Unknown:hvTR_P19893.1 target sequence
AVRCRLGTMCNLALSTPFLMEHTMPVTHPPEVAQRTADACNEGVKAAWSLKELHTHQLCPRSSDYRNMIIHAATPVDLLGALNLC

SEQ ID NO: 30751 - protein, 85 aa, unidentified
  REGION 1..85: note = Description of Unknown:hvTR_P19893.1 target sequence
GCIVISDSEEEQGEEVETRGATASSPSTGSGTPRVTSPTHPLSQMNHPPLPDPLGRPDEDSSSSSSSSCSSASDSESESEEMKCS

SEQ ID NO: 30752 - protein, 85 aa, unidentified
  REGION 1..85: note = Description of Unknown:hvTR_P19893.1 target sequence
SGGGASVTSSHHGRGGFGGAASSSLLSCGHQSSGGASTGPRKKKSKRISELDNEKVRNIMKDKNTPFCTPNVQTRRGRVKIDEVS

SEQ ID NO: 30753 - protein, 85 aa, unidentified
  REGION 1..85: note = Description of Unknown:hvTR_P19893.1 target sequence
RMFRNTNRSLEYKNLPFTIPSMHQVLDEAIKACKTMQVNNKGIQIIYTRNHEVKSEVDAVRCRLGTMCNLALSTPFLMEHTMPVT

SEQ ID NO: 30754 - protein, 85 aa, unidentified
  REGION 1..85: note = Description of Unknown:hvTR_P19893.1 target sequence
HPPEVAQRTADACNEGVKAAWSLKELHTHQLCPRSSDYRNMIIHAATPVDLLGALNLCLPLMQKFPKQVMVRIFSTNQGGFMLPI

SEQ ID NO: 30755 - protein, 85 aa, unidentified
  REGION 1..85: note = Description of Unknown:cds_NZ_WFIY01000004.1_cds_WP_155862782.1_597 target sequence
AINIIVNGKGKYNLDYNCQLYYGYFDLQDLINSLSILDPSGYLKIRRMLAWNLYFHLSRNYSDQLRNLYYVIYEISAIIRELNFR

SEQ ID NO: 30756 - protein, 85 aa, unidentified
  REGION 1..85: note = Description of Unknown:cds_NZ_WFIY01000004.1_cds_WP_155862782.1_597 target sequence
NINPAFALPSILDKINTSMRLEWKNGEFSLKDPLNISCEIDINNEINKLLKIEIESKGKISVKESEIKSLNQMDLYKLSSVKGLN

SEQ ID NO: 30757 - protein, 85 aa, unidentified
  REGION 1..85: note = Description of Unknown:cds_NZ_WFIY01000004.1_cds_WP_155862782.1_597 target sequence
LESEFYYKDGKVNVKINLKFKPENKGLNKEIKAEELNKVLRITAKEVNERAINSHEVFEDFMVGIMEALIQPFLDKYKNELTEIL

SEQ ID NO: 30758 - protein, 85 aa, unidentified
  REGION 1..85: note = Description of Unknown:cds_NZ_WFIY01000004.1_cds_WP_155862782.1_597 target sequence
GFKELLYIPPGRHFILNAEESALNNEEIAQLFSDSCQLAINRIKEGKSSFYDNFSLPISIKGGLVFYEDSQITSLSSRSIKSLAT

SEQ ID NO: 30759 - protein, 84 aa, unidentified
  REGION 1..84: note = Description of Unknown:cds_NZ_WFIY01000004.1_cds_WP_155862782.1_597 target sequence
ITSLSSRSIKSLATLILEVNSLKDQALVVIESPEEFLLDEDKKRVVDIIIRMLEKGNKVIIHTWDKKILEYFKDCQVYKNEKLV

SEQ ID NO: 30760 - protein, 85 aa, unidentified
  REGION 1..85: note = Description of Unknown:cds_NZ_WFIY01000004.1_cds_WP_155862782.1_597 target sequence
QDLINSLSILDPSGYLKIRRMLAWNLYFHLSRNYSDQLRNLYYVIYEISAIIRELNFRNINPAFALPSILDKINTSMRLEWKNGE

SEQ ID NO: 30761 - protein, 85 aa, unidentified
  REGION 1..85: note = Description of Unknown:cds_NZ_WFIY01000004.1_cds_WP_155862782.1_597 target sequence
FSLKDPLNISCEIDINNEINKLLKIEIESKGKISVKESEIKSLNQMDLYKLSSVKGLNLESEFYYKDGKVNVKINLKFKPENKGL

SEQ ID NO: 30762 - protein, 85 aa, unidentified
  REGION 1..85: note = Description of Unknown:cds_NZ_WFIY01000004.1_cds_WP_155862782.1_597 target sequence
NKEIKAEELNKVLRITAKEVNERAINSHEVFEDFMVGIMEALIQPFLDKYKNELTEILGFKELLYIPPGRHFILNAEESALNNEE

SEQ ID NO: 30763 - protein, 85 aa, unidentified
  REGION 1..85: note = Description of Unknown:cds_NZ_WFIY01000004.1_cds_WP_155862782.1_597 target sequence
IAQLFSDSCQLAINRIKEGKSSFYDNFSLPISIKGGLVFYEDSQITSLSSRSIKSLATLILEVNSLKDQALVVIESPEEFLLDED

SEQ ID NO: 30764 - protein, 85 aa, unidentified
  REGION 1..85: note = Description of Unknown:cds_NZ_WFIY01000004.1_cds_WP_155863960.1_1882 target sequence
KIGILLFSIILLSSGIIISAVSTITKQCELISYGYGSVANPPQYWREELWSVLNKGMPSAYIILNGTRTVNLSNISSVSLNSSYF

SEQ ID NO: 30765 - protein, 85 aa, unidentified
  REGION 1..85: note = Description of Unknown:cds_NZ_WFIY01000004.1_cds_WP_155863960.1_1882 target sequence
YVYVIKGYIQPYAYLSPIGLLLIFLGTATGFRGMILLIQERALGELSKGYAVGGSIYKYVIKRLASFVISMTIVSSVVIILEAIH

SEQ ID NO: 30766 - protein, 85 aa, unidentified
  REGION 1..85: note = Description of Unknown:cds_NZ_WFIY01000004.1_cds_WP_155863960.1_1882 target sequence
GVCITKSISELITFSMGYSRHYGISVTSLLLTSLAFTSLLTGIAFALTVYLSPFLVMKAILGSSLINSLLRRWKYIGNALASWVI

SEQ ID NO: 30767 - protein, 85 aa, unidentified
  REGION 1..85: note = Description of Unknown:cds_NZ_WFIY01000004.1_cds_WP_155863960.1_1882 target sequence
AIGLIYLFHVYLNVLPIGSPRGHLIYYLILPLVSLFFPFIGIFANRILLSVSKVPQEFVAKGLSRDVLVFRHILGNLTVVTLSSI

SEQ ID NO: 30768 - protein, 84 aa, unidentified
  REGION 1..84: note = Description of Unknown:cds_NZ_WFIY01000004.1_cds_WP_155863960.1_1882 target sequence
HILGNLTVVTLSSISAAFVEMLIAEFLVEAIFAWPGLGYLIRIGVDYDDFKIVEGVLMIYSSIVIFSNFIADVIYGIIDPRVTR

SEQ ID NO: 30769 - protein, 85 aa, unidentified
  REGION 1..85: note = Description of Unknown:cds_NZ_WFIY01000004.1_cds_WP_155863960.1_1882 target sequence
CELISYGYGSVANPPQYWREELWSVLNKGMPSAYIILNGTRTVNLSNISSVSLNSSYFYVYVIKGYIQPYAYLSPIGLLLIFLGT

SEQ ID NO: 30770 - protein, 85 aa, unidentified
  REGION 1..85: note = Description of Unknown:cds_NZ_WFIY01000004.1_cds_WP_155863960.1_1882 target sequence
ATGFRGMILLIQERALGELSKGYAVGGSIYKYVIKRLASFVISMTIVSSVVIILEAIHGVCITKSISELITFSMGYSRHYGISVT

SEQ ID NO: 30771 - protein, 85 aa, unidentified
  REGION 1..85: note = Description of Unknown:cds_NZ_WFIY01000004.1_cds_WP_155863960.1_1882 target sequence
SLLLTSLAFTSLLTGIAFALTVYLSPFLVMKAILGSSLINSLLRRWKYIGNALASWVIAIGLIYLFHVYLNVLPIGSPRGHLIYY

SEQ ID NO: 30772 - protein, 85 aa, unidentified
  REGION 1..85: note = Description of Unknown:cds_NZ_WFIY01000004.1_cds_WP_155863960.1_1882 target sequence
LILPLVSLFFPFIGIFANRILLSVSKVPQEFVAKGLSRDVLVFRHILGNLTVVTLSSISAAFVEMLIAEFLVEAIFAWPGLGYLI

SEQ ID NO: 30773 - protein, 85 aa, unidentified
  REGION 1..85: note = Description of Unknown:hvTR_P09265 target sequence
ECNLGTEHPSTDTWNRSKTEQAVVDAFDESLFGDVASDIGFETSLYSHAVKTAPSPPWVASPKILYQQLIRDLDFSEGPRLLSCL

SEQ ID NO: 30774 - protein, 85 aa, unidentified
  REGION 1..85: note = Description of Unknown:hvTR_P09265 target sequence
ETWNEDLFSCFPINEDLYSDMMVLSPDPDDVISTVSTKDHVEMFNLTTRGSVRLPSPPKQPTGLPAYVQEVQDSFTVELRAREEA

SEQ ID NO: 30775 - protein, 85 aa, unidentified
  REGION 1..85: note = Description of Unknown:hvTR_P09265 target sequence
YTKLLVTYCKSIIRYLQGTAKRTTIGLNIQNPDQKAYTQLRQSILLRYYREVASLARLLYLHLYLTVTREFSWRLYASQSAHPDV

SEQ ID NO: 30776 - protein, 85 aa, unidentified
  REGION 1..85: note = Description of Unknown:hvTR_P09265 target sequence
FAALKFTWTERRQFTCAFHPVLCNHGIVLLEGKPLTASALREINYRRRELGLPLVRCGLVEENKSPLVQQPSFSVHLPRSVGFLT

SEQ ID NO: 30777 - protein, 84 aa, unidentified
  REGION 1..84: note = Description of Unknown:hvTR_P09265 target sequence
PSFSVHLPRSVGFLTHHIKRKLDAYAVKHPQEPRHVRADHPYAKVVENRNYGSSIEAMILAPPSPSEILPGDPPRPPTCGFLTR

SEQ ID NO: 30778 - protein, 85 aa, unidentified
  REGION 1..85: note = Description of Unknown:hvTR_P09265 target sequence
DESLFGDVASDIGFETSLYSHAVKTAPSPPWVASPKILYQQLIRDLDFSEGPRLLSCLETWNEDLFSCFPINEDLYSDMMVLSPD

SEQ ID NO: 30779 - protein, 85 aa, unidentified
  REGION 1..85: note = Description of Unknown:hvTR_P09265 target sequence
PDDVISTVSTKDHVEMFNLTTRGSVRLPSPPKQPTGLPAYVQEVQDSFTVELRAREEAYTKLLVTYCKSIIRYLQGTAKRTTIGL

SEQ ID NO: 30780 - protein, 85 aa, unidentified
  REGION 1..85: note = Description of Unknown:hvTR_P09265 target sequence
NIQNPDQKAYTQLRQSILLRYYREVASLARLLYLHLYLTVTREFSWRLYASQSAHPDVFAALKFTWTERRQFTCAFHPVLCNHGI

SEQ ID NO: 30781 - protein, 85 aa, unidentified
  REGION 1..85: note = Description of Unknown:hvTR_P09265 target sequence
VLLEGKPLTASALREINYRRRELGLPLVRCGLVEENKSPLVQQPSFSVHLPRSVGFLTHHIKRKLDAYAVKHPQEPRHVRADHPY

SEQ ID NO: 30782 - protein, 85 aa, unidentified
  REGION 1..85: note = Description of Unknown:hvTR_P29129 target sequence
GCTVSRRRTTTAEASSAWGIFGFYRPRSPSPPPQRLSLPLTVMDCPICLDVAATEAQTLPCMHKFCLDCIQRWTLTSTACPLCNA

SEQ ID NO: 30783 - protein, 85 aa, unidentified
  REGION 1..85: note = Description of Unknown:hvTR_P29129 target sequence
RVTSILHHVDSDASFVETPVEGATDVDGEEDEPVGGGFAVIWGEDYTEEVRHEEAEGQGSGSGSRARPRVPVFNWLYGQVSTVIE

SEQ ID NO: 30784 - protein, 85 aa, unidentified
  REGION 1..85: note = Description of Unknown:hvTR_P29129 target sequence
SDPIREAVVDNIVEIIQEHGMNRQRVTEAMLPMFGANTHALVDTLFDISAQWMRRMQRRAPMSHQGVNYIDTSESEAHSDSEVSS

SEQ ID NO: 30785 - protein, 85 aa, unidentified
  REGION 1..85: note = Description of Unknown:hvTR_P29129 target sequence
PDEEDSGASSSGVHTEDLTEASESADDQRPAPRRSPRRARRAAVLRREQRRTRCLRRGRTGGQAQGETPEAPSSGEGSSAQHGAS

SEQ ID NO: 30786 - protein, 84 aa, unidentified
  REGION 1..84: note = Description of Unknown:hvTR_P29129 target sequence
APSSGEGSSAQHGASGAGAGPGSANTAASARSSPSSSPSSSMRRPSPSASAPETAAPRGGPPASSSSGSPRSATIFIDLTQDDD

SEQ ID NO: 30787 - protein, 85 aa, unidentified
  REGION 1..85: note = Description of Unknown:hvTR_P29129 target sequence
SPSPPPQRLSLPLTVMDCPICLDVAATEAQTLPCMHKFCLDCIQRWTLTSTACPLCNARVTSILHHVDSDASFVETPVEGATDVD

SEQ ID NO: 30788 - protein, 85 aa, unidentified
  REGION 1..85: note = Description of Unknown:hvTR_P29129 target sequence
GEEDEPVGGGFAVIWGEDYTEEVRHEEAEGQGSGSGSRARPRVPVFNWLYGQVSTVIESDPIREAVVDNIVEIIQEHGMNRQRVT

SEQ ID NO: 30789 - protein, 85 aa, unidentified
  REGION 1..85: note = Description of Unknown:hvTR_P29129 target sequence
EAMLPMFGANTHALVDTLFDISAQWMRRMQRRAPMSHQGVNYIDTSESEAHSDSEVSSPDEEDSGASSSGVHTEDLTEASESADD

SEQ ID NO: 30790 - protein, 85 aa, unidentified
  REGION 1..85: note = Description of Unknown:hvTR_P29129 target sequence
QRPAPRRSPRRARRAAVLRREQRRTRCLRRGRTGGQAQGETPEAPSSGEGSSAQHGASGAGAGPGSANTAASARSSPSSSPSSSM

SEQ ID NO: 30791 - protein, 85 aa, unidentified
  REGION 1..85: note = Description of Unknown:cds_NZ_WFIY01000004.1_cds_WP_155862368.1_100 target sequence
ITYTAPMWVGLIIGFIIGAAAEIWGISNPETLIRLAKWEDRLFVTCIALGFAIGTPVLFGLYAAGVGFHWGPKPFYVIGVLIGGL

SEQ ID NO: 30792 - protein, 85 aa, unidentified
  REGION 1..85: note = Description of Unknown:cds_NZ_WFIY01000004.1_cds_WP_155862368.1_100 target sequence
FFGAGLALSGYFPGSIWMALGEGRRDAIYAVFGAILGAATWTALYQTPAGQWLTTVGNFGSLIIGATHPSGKEYLIPWDGLTPLD

SEQ ID NO: 30793 - protein, 85 aa, unidentified
  REGION 1..85: note = Description of Unknown:cds_NZ_WFIY01000004.1_cds_WP_155862368.1_100 target sequence
LFGISIIYAIGMFLLAYYLPRYKGGVRSCLRANIERRLTPQEIQMHQETARFLTEGGLPYSENSLAKKLNEYYAVEDNVTRWFMV

SEQ ID NO: 30794 - protein, 85 aa, unidentified
  REGION 1..85: note = Description of Unknown:cds_NZ_WFIY01000004.1_cds_WP_155862368.1_100 target sequence
SVAGIVALTVVAEMFLHQIFGESTTDSWIAGHLFMPTFKYSQIVFKGIGWEPYSDIGTLMGAFFSAVFLTRRFTAFRDIIPPSWA

SEQ ID NO: 30795 - protein, 84 aa, unidentified
  REGION 1..84: note = Description of Unknown:cds_NZ_WFIY01000004.1_cds_WP_155862368.1_100 target sequence
RRFTAFRDIIPPSWAERFGTNPAKRFLGSFGGAYLMLFGARMADGCASGHILSGDLEMALSGLEFTAAVFASMLITAHYVYKKR

SEQ ID NO: 30796 - protein, 85 aa, unidentified
  REGION 1..85: note = Description of Unknown:cds_NZ_WFIY01000004.1_cds_WP_155862368.1_100 target sequence
NPETLIRLAKWEDRLFVTCIALGFAIGTPVLFGLYAAGVGFHWGPKPFYVIGVLIGGLFFGAGLALSGYFPGSIWMALGEGRRDA

SEQ ID NO: 30797 - protein, 85 aa, unidentified
  REGION 1..85: note = Description of Unknown:cds_NZ_WFIY01000004.1_cds_WP_155862368.1_100 target sequence
IYAVFGAILGAATWTALYQTPAGQWLTTVGNFGSLIIGATHPSGKEYLIPWDGLTPLDLFGISIIYAIGMFLLAYYLPRYKGGVR

SEQ ID NO: 30798 - protein, 85 aa, unidentified
  REGION 1..85: note = Description of Unknown:cds_NZ_WFIY01000004.1_cds_WP_155862368.1_100 target sequence
SCLRANIERRLTPQEIQMHQETARFLTEGGLPYSENSLAKKLNEYYAVEDNVTRWFMVSVAGIVALTVVAEMFLHQIFGESTTDS

SEQ ID NO: 30799 - protein, 85 aa, unidentified
  REGION 1..85: note = Description of Unknown:cds_NZ_WFIY01000004.1_cds_WP_155862368.1_100 target sequence
WIAGHLFMPTFKYSQIVFKGIGWEPYSDIGTLMGAFFSAVFLTRRFTAFRDIIPPSWAERFGTNPAKRFLGSFGGAYLMLFGARM

SEQ ID NO: 30800 - protein, 85 aa, unidentified
  REGION 1..85: note = Description of Unknown:cds_NZ_WFIY01000004.1_cds_WP_155862382.1_119 target sequence
KLIRDPIHGYIEISDKLNKIISDPYFQRLRYIKQTAMAYMVYPSMLHSRFEHSLGVMHLAREFARYVISNSGLKDEEGLIQMIAL

SEQ ID NO: 30801 - protein, 85 aa, unidentified
  REGION 1..85: note = Description of Unknown:cds_NZ_WFIY01000004.1_cds_WP_155862382.1_119 target sequence
TGLLHDIGHVAFSHTFENFLLLANQVYGLKVKEEGKKTHVNYGIYLIENVLGSIIDKEFAEFYPDPVKFIIDVLKENPRTYEEKL

SEQ ID NO: 30802 - protein, 85 aa, unidentified
  REGION 1..85: note = Description of Unknown:cds_NZ_WFIY01000004.1_cds_WP_155862382.1_119 target sequence
ALSLISNYVDADRSDYLLRDSYYAGVSYGRFDIERLKRFLVFIDGKLAIYSKATPIVEQFLLSRMYMFENVYFHSVTGVYNAILS

SEQ ID NO: 30803 - protein, 85 aa, unidentified
  REGION 1..85: note = Description of Unknown:cds_NZ_WFIY01000004.1_cds_WP_155862382.1_119 target sequence
HAMVEMLEKNIISLPTEPKDFLQLLDIEIYSNLDKVKEEFKNAIMFRQGYRRIKYDITGKCLEKFNEIKDEIYEDMKKSQGLFLY

SEQ ID NO: 30804 - protein, 84 aa, unidentified
  REGION 1..84: note = Description of Unknown:cds_NZ_WFIY01000004.1_cds_WP_155862382.1_119 target sequence
EIYEDMKKSQGLFLYHEFNDVPYEEKEEAVYIFDGERVEKLTSVSPIIRSLSEIKKAIIAYSSKAEKIAEKYENVIQECKTLGP

SEQ ID NO: 30805 - protein, 85 aa, unidentified
  REGION 1..85: note = Description of Unknown:cds_NZ_WFIY01000004.1_cds_WP_155862382.1_119 target sequence
RLRYIKQTAMAYMVYPSMLHSRFEHSLGVMHLAREFARYVISNSGLKDEEGLIQMIALTGLLHDIGHVAFSHTFENFLLLANQVY

SEQ ID NO: 30806 - protein, 85 aa, unidentified
  REGION 1..85: note = Description of Unknown:cds_NZ_WFIY01000004.1_cds_WP_155862382.1_119 target sequence
GLKVKEEGKKTHVNYGIYLIENVLGSIIDKEFAEFYPDPVKFIIDVLKENPRTYEEKLALSLISNYVDADRSDYLLRDSYYAGVS

SEQ ID NO: 30807 - protein, 85 aa, unidentified
  REGION 1..85: note = Description of Unknown:cds_NZ_WFIY01000004.1_cds_WP_155862382.1_119 target sequence
YGRFDIERLKRFLVFIDGKLAIYSKATPIVEQFLLSRMYMFENVYFHSVTGVYNAILSHAMVEMLEKNIISLPTEPKDFLQLLDI

SEQ ID NO: 30808 - protein, 85 aa, unidentified
  REGION 1..85: note = Description of Unknown:cds_NZ_WFIY01000004.1_cds_WP_155862382.1_119 target sequence
EIYSNLDKVKEEFKNAIMFRQGYRRIKYDITGKCLEKFNEIKDEIYEDMKKSQGLFLYHEFNDVPYEEKEEAVYIFDGERVEKLT

SEQ ID NO: 30809 - protein, 85 aa, unidentified
  REGION 1..85: note = Description of Unknown:cds_NZ_WFIY01000004.1_cds_WP_155863144.1_1067 target sequence
NITIIGSGPAGIYSAIASAKLGNKVRLIEKNDKLGGTCVLYGCIPSKAMLHPLFLKYFAEETGRELNFSFSEIQKIAKNVVNRLS

SEQ ID NO: 30810 - protein, 85 aa, unidentified
  REGION 1..85: note = Description of Unknown:cds_NZ_WFIY01000004.1_cds_WP_155863144.1_1067 target sequence
KGVEYMLESYGIEVIHGKAQLKGGNIQVGGQTIPSDKLIVATGTEKPQIEGTIASDDLPYLDKEFSKVLVIGGGAGGVEYAWLLK

SEQ ID NO: 30811 - protein, 85 aa, unidentified
  REGION 1..85: note = Description of Unknown:cds_NZ_WFIY01000004.1_cds_WP_155863144.1_1067 target sequence
MSGKEVSIVEKSDSLLPYLDEDLKKAVTAYFKKIGIKLYLSSEITLGDKPRIGNEELPQSDIILYTFGRKPALEGFEELPHEKWV

SEQ ID NO: 30812 - protein, 85 aa, unidentified
  REGION 1..85: note = Description of Unknown:cds_NZ_WFIY01000004.1_cds_WP_155863144.1_1067 target sequence
KVDKRMYTGVNNIYAAGDITGTFTAHEAIHEGFVAGLNASGIEKYYNPEAVPKVIYTEPQIAYVGNTKGKCVKINMTEIPRAIAE

SEQ ID NO: 30813 - protein, 84 aa, unidentified
  REGION 1..84: note = Description of Unknown:cds_NZ_WFIY01000004.1_cds_WP_155863144.1_1067 target sequence
CVKINMTEIPRAIAEGLTEGFLKVCTEGKKITGAVAFSHDAENIITLISMFINYGIDIDKAIDFIEPHPSYLEAVFEALLRLNS

SEQ ID NO: 30814 - protein, 85 aa, unidentified
  REGION 1..85: note = Description of Unknown:cds_NZ_WFIY01000004.1_cds_WP_155863144.1_1067 target sequence
IEKNDKLGGTCVLYGCIPSKAMLHPLFLKYFAEETGRELNFSFSEIQKIAKNVVNRLSKGVEYMLESYGIEVIHGKAQLKGGNIQ

SEQ ID NO: 30815 - protein, 85 aa, unidentified
  REGION 1..85: note = Description of Unknown:cds_NZ_WFIY01000004.1_cds_WP_155863144.1_1067 target sequence
VGGQTIPSDKLIVATGTEKPQIEGTIASDDLPYLDKEFSKVLVIGGGAGGVEYAWLLKMSGKEVSIVEKSDSLLPYLDEDLKKAV

SEQ ID NO: 30816 - protein, 85 aa, unidentified
  REGION 1..85: note = Description of Unknown:cds_NZ_WFIY01000004.1_cds_WP_155863144.1_1067 target sequence
TAYFKKIGIKLYLSSEITLGDKPRIGNEELPQSDIILYTFGRKPALEGFEELPHEKWVKVDKRMYTGVNNIYAAGDITGTFTAHE

SEQ ID NO: 30817 - protein, 85 aa, unidentified
  REGION 1..85: note = Description of Unknown:cds_NZ_WFIY01000004.1_cds_WP_155863144.1_1067 target sequence
AIHEGFVAGLNASGIEKYYNPEAVPKVIYTEPQIAYVGNTKGKCVKINMTEIPRAIAEGLTEGFLKVCTEGKKITGAVAFSHDAE

SEQ ID NO: 30818 - protein, 85 aa, unidentified
  REGION 1..85: note = Description of Unknown:cds_NZ_WFIY01000004.1_cds_WP_155863318.1_1282 target sequence
LIKNAKLLDGRIVNIKIEGERITCIGNCIGDEIIDAENKLVIPPYFNMHFHLDSAFTSVRNNSGTLWEGIRIWQEIRGKLTEDEV

SEQ ID NO: 30819 - protein, 85 aa, unidentified
  REGION 1..85: note = Description of Unknown:cds_NZ_WFIY01000004.1_cds_WP_155863318.1_1282 target sequence
YRNAITAVKLMVVYGTLWIRTHVDVTEKSLKLLRVIKKVKEDMKDIAEIQITAFPQDGIYTDKGNDEILRRAIEEGADNVGLIPH

SEQ ID NO: 30820 - protein, 85 aa, unidentified
  REGION 1..85: note = Description of Unknown:cds_NZ_WFIY01000004.1_cds_WP_155863318.1_1282 target sequence
NEITREDGVKSIKFAFELAREYNKDVDGHIDETDDPNSRFLEVLAKETINNSWEGRVTAGHVTAMHSWDPAYRFRILPTVSRAGI

SEQ ID NO: 30821 - protein, 85 aa, unidentified
  REGION 1..85: note = Description of Unknown:cds_NZ_WFIY01000004.1_cds_WP_155863318.1_1282 target sequence
TVVPNPLINAVLQGRLEGYPKRRGNAPIKEMMKFNVNVALGHDCIMDPWYPLGTGNMLQVLFMAIHMDQLTEGEELLNSINLITF

SEQ ID NO: 30822 - protein, 84 aa, unidentified
  REGION 1..84: note = Description of Unknown:cds_NZ_WFIY01000004.1_cds_WP_155863318.1_1282 target sequence
TEGEELLNSINLITFNSAKAWRVKNYGIKEGNEANLLITNADDVIDLLRFMEPPKFVIRKGKIIAKDGKYILFNGKWEEVKRKP

SEQ ID NO: 30823 - protein, 85 aa, unidentified
  REGION 1..85: note = Description of Unknown:cds_NZ_WFIY01000004.1_cds_WP_155863318.1_1282 target sequence
CIGDEIIDAENKLVIPPYFNMHFHLDSAFTSVRNNSGTLWEGIRIWQEIRGKLTEDEVYRNAITAVKLMVVYGTLWIRTHVDVTE

SEQ ID NO: 30824 - protein, 85 aa, unidentified
  REGION 1..85: note = Description of Unknown:cds_NZ_WFIY01000004.1_cds_WP_155863318.1_1282 target sequence
KSLKLLRVIKKVKEDMKDIAEIQITAFPQDGIYTDKGNDEILRRAIEEGADNVGLIPHNEITREDGVKSIKFAFELAREYNKDVD

SEQ ID NO: 30825 - protein, 85 aa, unidentified
  REGION 1..85: note = Description of Unknown:cds_NZ_WFIY01000004.1_cds_WP_155863318.1_1282 target sequence
GHIDETDDPNSRFLEVLAKETINNSWEGRVTAGHVTAMHSWDPAYRFRILPTVSRAGITVVPNPLINAVLQGRLEGYPKRRGNAP

SEQ ID NO: 30826 - protein, 85 aa, unidentified
  REGION 1..85: note = Description of Unknown:cds_NZ_WFIY01000004.1_cds_WP_155863318.1_1282 target sequence
IKEMMKFNVNVALGHDCIMDPWYPLGTGNMLQVLFMAIHMDQLTEGEELLNSINLITFNSAKAWRVKNYGIKEGNEANLLITNAD

SEQ ID NO: 30827 - protein, 85 aa, unidentified
  REGION 1..85: note = Description of Unknown:cds_NZ_WFIY01000004.1_cds_WP_155864418.1_1311 target sequence
LGNIIGAGIFVMAGSIIYLAGPGALLSFIVTGLLAMSIGLNSAELASKFPNTEGGVYSFAKLTMGDTVGFLVGWMRMISYSISGA

SEQ ID NO: 30828 - protein, 85 aa, unidentified
  REGION 1..85: note = Description of Unknown:cds_NZ_WFIY01000004.1_cds_WP_155864418.1_1311 target sequence
ATALGFASYLPFPSLDYVIAGVLIIALGLIYLAGLKLASEIETALVIINIIGLVSFISFSILVGKFVSSHFTPIAPHGIQGILSG

SEQ ID NO: 30829 - protein, 85 aa, unidentified
  REGION 1..85: note = Description of Unknown:cds_NZ_WFIY01000004.1_cds_WP_155864418.1_1311 target sequence
ASLAFFAYSGFNTIATLTPDVEDGERKVPKAIILSLIVTSILYILVVFSMLYVLPWQVYGTQGNPLSFALQQIHAPTYVVILIST

SEQ ID NO: 30830 - protein, 85 aa, unidentified
  REGION 1..85: note = Description of Unknown:cds_NZ_WFIY01000004.1_cds_WP_155864418.1_1311 target sequence
TAIIATVTVTLSTIIATVRTLKQMAEDDLIPRRFSKDTLSSVVVLGIMISSLALGNVEVIGLVSNFGTVFSYITTAAAVIISRRR

SEQ ID NO: 30831 - protein, 84 aa, unidentified
  REGION 1..84: note = Description of Unknown:cds_NZ_WFIY01000004.1_cds_WP_155864418.1_1311 target sequence
YITTAAAVIISRRRGMHGKFSAPAYPVLQMISIILSLVVIVSLGKESLMLGAVSLIIGLLIHEVHVQINVIEKGKRLSPHGKLE

SEQ ID NO: 30832 - protein, 85 aa, unidentified
  REGION 1..85: note = Description of Unknown:cds_NZ_WFIY01000004.1_cds_WP_155864418.1_1311 target sequence
FIVTGLLAMSIGLNSAELASKFPNTEGGVYSFAKLTMGDTVGFLVGWMRMISYSISGAATALGFASYLPFPSLDYVIAGVLIIAL

SEQ ID NO: 30833 - protein, 85 aa, unidentified
  REGION 1..85: note = Description of Unknown:cds_NZ_WFIY01000004.1_cds_WP_155864418.1_1311 target sequence
GLIYLAGLKLASEIETALVIINIIGLVSFISFSILVGKFVSSHFTPIAPHGIQGILSGASLAFFAYSGFNTIATLTPDVEDGERK

SEQ ID NO: 30834 - protein, 85 aa, unidentified
  REGION 1..85: note = Description of Unknown:cds_NZ_WFIY01000004.1_cds_WP_155864418.1_1311 target sequence
VPKAIILSLIVTSILYILVVFSMLYVLPWQVYGTQGNPLSFALQQIHAPTYVVILISTTAIIATVTVTLSTIIATVRTLKQMAED

SEQ ID NO: 30835 - protein, 85 aa, unidentified
  REGION 1..85: note = Description of Unknown:cds_NZ_WFIY01000004.1_cds_WP_155864418.1_1311 target sequence
DLIPRRFSKDTLSSVVVLGIMISSLALGNVEVIGLVSNFGTVFSYITTAAAVIISRRRGMHGKFSAPAYPVLQMISIILSLVVIV

SEQ ID NO: 30836 - protein, 85 aa, unidentified
  REGION 1..85: note = Description of Unknown:cds_NZ_WFIY01000004.1_cds_WP_155863720.1_1585 target sequence
KLGIVYNNFLAPRFAGGGAQHAYEVVKRLAKYFNIVYYPSSPVFIWDKEVLIDKVKEIEREGIKVAPEFYSILDEQNKFKAAGIK

SEQ ID NO: 30837 - protein, 85 aa, unidentified
  REGION 1..85: note = Description of Unknown:cds_NZ_WFIY01000004.1_cds_WP_155863720.1_1585 target sequence
KFILADKIAKEVSKRYTVDVDFLYEPDHTSFDIFYLGKETKFGLTLHVPLFYNDSIKYLRRLIKFYKFNPYTGKGFYTRFLYNEL

SEQ ID NO: 30838 - protein, 85 aa, unidentified
  REGION 1..85: note = Description of Unknown:cds_NZ_WFIY01000004.1_cds_WP_155863720.1_1585 target sequence
YSKPKYRRLLKKYKPSFIAAVSEGPLKESGIKGEILYPGNAFDPELLKYRNRGKEDYIVFWSRLNQDKGIHEIPDILKRTQVKLP

SEQ ID NO: 30839 - protein, 85 aa, unidentified
  REGION 1..85: note = Description of Unknown:cds_NZ_WFIY01000004.1_cds_WP_155863720.1_1585 target sequence
RKLKLVLMGRFFDKYNEKLFWKKVKKYGLNVEYLGFVPREKLYDVVSRAKLFIYPTHVDGFSLVVLEALALGTPVVAYGIPAIRS

SEQ ID NO: 30840 - protein, 84 aa, unidentified
  REGION 1..84: note = Description of Unknown:cds_NZ_WFIY01000004.1_cds_WP_155863720.1_1585 target sequence
LGTPVVAYGIPAIRSVYSGLKAVKIVEEFDQEEMSKKAYEILSLNEKQIEEIMNESKLLDFLRLHSSWDNVANSVRNLILKYAN

SEQ ID NO: 30841 - protein, 85 aa, unidentified
  REGION 1..85: note = Description of Unknown:cds_NZ_WFIY01000004.1_cds_WP_155863720.1_1585 target sequence
RLAKYFNIVYYPSSPVFIWDKEVLIDKVKEIEREGIKVAPEFYSILDEQNKFKAAGIKKFILADKIAKEVSKRYTVDVDFLYEPD

SEQ ID NO: 30842 - protein, 85 aa, unidentified
  REGION 1..85: note = Description of Unknown:cds_NZ_WFIY01000004.1_cds_WP_155863720.1_1585 target sequence
HTSFDIFYLGKETKFGLTLHVPLFYNDSIKYLRRLIKFYKFNPYTGKGFYTRFLYNELYSKPKYRRLLKKYKPSFIAAVSEGPLK

SEQ ID NO: 30843 - protein, 85 aa, unidentified
  REGION 1..85: note = Description of Unknown:cds_NZ_WFIY01000004.1_cds_WP_155863720.1_1585 target sequence
ESGIKGEILYPGNAFDPELLKYRNRGKEDYIVFWSRLNQDKGIHEIPDILKRTQVKLPRKLKLVLMGRFFDKYNEKLFWKKVKKY

SEQ ID NO: 30844 - protein, 85 aa, unidentified
  REGION 1..85: note = Description of Unknown:cds_NZ_WFIY01000004.1_cds_WP_155863720.1_1585 target sequence
GLNVEYLGFVPREKLYDVVSRAKLFIYPTHVDGFSLVVLEALALGTPVVAYGIPAIRSVYSGLKAVKIVEEFDQEEMSKKAYEIL

SEQ ID NO: 30845 - protein, 85 aa, unidentified
  REGION 1..85: note = Description of Unknown:cds_NZ_WFIY01000004.1_cds_WP_155862461.1_213 target sequence
KLYLVEHAIGTFAFDEDGKLVDYVLNPKDIGKLVEILLNHEKGEPFPSTLELISKLKPEEVVVENEAEIPKLKVKASATLNHKAA

SEQ ID NO: 30846 - protein, 85 aa, unidentified
  REGION 1..85: note = Description of Unknown:cds_NZ_WFIY01000004.1_cds_WP_155862461.1_213 target sequence
KMFRSSLVKFALDSKFASSEGELYSFLYQLSFEYTRRKLRTAAQKRDLLAIQAVRAMDDIDKSINLFSERLREWYSLHFPELDKL

SEQ ID NO: 30847 - protein, 85 aa, unidentified
  REGION 1..85: note = Description of Unknown:cds_NZ_WFIY01000004.1_cds_WP_155862461.1_213 target sequence
VEDHETYAKIVSTFGYRDNITLEGLKSINIDEKQAKKILDAASKSIGADISEDDINSIKQLSNAILSLYNIRNSLSDYVESVMKE

SEQ ID NO: 30848 - protein, 85 aa, unidentified
  REGION 1..85: note = Description of Unknown:cds_NZ_WFIY01000004.1_cds_WP_155862461.1_213 target sequence
VAPNITALVGANLGARLLSLAGSLEEFAKMPASTIQVLGAEKALFRALRSGGRPPKHGVIFQFPAIHSSPRWQRGKIARALAAKL

SEQ ID NO: 30849 - protein, 84 aa, unidentified
  REGION 1..84: note = Description of Unknown:cds_NZ_WFIY01000004.1_cds_WP_155862461.1_213 target sequence
PRWQRGKIARALAAKLAIAARVDNYSGRFIGDQLVEQLNKRIEEIKTKYAQPPPRKPQPQAPKQKNFKKGGGGGKKNKGKKGKR

SEQ ID NO: 30850 - protein, 85 aa, unidentified
  REGION 1..85: note = Description of Unknown:cds_NZ_WFIY01000004.1_cds_WP_155862461.1_213 target sequence
KDIGKLVEILLNHEKGEPFPSTLELISKLKPEEVVVENEAEIPKLKVKASATLNHKAAKMFRSSLVKFALDSKFASSEGELYSFL

SEQ ID NO: 30851 - protein, 85 aa, unidentified
  REGION 1..85: note = Description of Unknown:cds_NZ_WFIY01000004.1_cds_WP_155862461.1_213 target sequence
YQLSFEYTRRKLRTAAQKRDLLAIQAVRAMDDIDKSINLFSERLREWYSLHFPELDKLVEDHETYAKIVSTFGYRDNITLEGLKS

SEQ ID NO: 30852 - protein, 85 aa, unidentified
  REGION 1..85: note = Description of Unknown:cds_NZ_WFIY01000004.1_cds_WP_155862461.1_213 target sequence
INIDEKQAKKILDAASKSIGADISEDDINSIKQLSNAILSLYNIRNSLSDYVESVMKEVAPNITALVGANLGARLLSLAGSLEEF

SEQ ID NO: 30853 - protein, 85 aa, unidentified
  REGION 1..85: note = Description of Unknown:cds_NZ_WFIY01000004.1_cds_WP_155862461.1_213 target sequence
AKMPASTIQVLGAEKALFRALRSGGRPPKHGVIFQFPAIHSSPRWQRGKIARALAAKLAIAARVDNYSGRFIGDQLVEQLNKRIE

SEQ ID NO: 30854 - protein, 85 aa, unidentified
  REGION 1..85: note = Description of Unknown:cds_NZ_WFIY01000004.1_cds_WP_155862532.1_296 target sequence
NIDDVVEKAVKGEIELHEIDNFLEANAAMVARRLALEKILGISLPSIGSTILDYSEIKNRNAENVIGGIQIPVGVVGPLKINGDY

SEQ ID NO: 30855 - protein, 85 aa, unidentified
  REGION 1..85: note = Description of Unknown:cds_NZ_WFIY01000004.1_cds_WP_155862532.1_296 target sequence
AKGNFYVPLATTEGALIASVNRGCKAITKAGGAKVKIIFDGMARAPVFKLPNIDSVVNFLQWINKNLDKIKEVAESTTSHGKLKE

SEQ ID NO: 30856 - protein, 85 aa, unidentified
  REGION 1..85: note = Description of Unknown:cds_NZ_WFIY01000004.1_cds_WP_155862532.1_296 target sequence
IQPFVLGNNVWLRFVFETGDAMGMNMATIASEAICNFIESEFTEAKCVAVSGNMCSDKKQSMVNSIFGRGKTVIAEALIPSTILK

SEQ ID NO: 30857 - protein, 85 aa, unidentified
  REGION 1..85: note = Description of Unknown:cds_NZ_WFIY01000004.1_cds_WP_155862532.1_296 target sequence
EVLRTTAEAIHEVNLRKNLLGSARAGNIYQFNAHFANIIAAIFLATGQDMAQVVESSSGYTWTEVRGEDLYISVTLPSLEVGTVG

SEQ ID NO: 30858 - protein, 84 aa, unidentified
  REGION 1..84: note = Description of Unknown:cds_NZ_WFIY01000004.1_cds_WP_155862532.1_296 target sequence
LYISVTLPSLEVGTVGGGTRLPTQREALSIMGVAGGGNPPGSNAKKFAEIIASTVLAGELNLLSALGNKELGRAHKMLGRGIKA

SEQ ID NO: 30859 - protein, 85 aa, unidentified
  REGION 1..85: note = Description of Unknown:cds_NZ_WFIY01000004.1_cds_WP_155862532.1_296 target sequence
AMVARRLALEKILGISLPSIGSTILDYSEIKNRNAENVIGGIQIPVGVVGPLKINGDYAKGNFYVPLATTEGALIASVNRGCKAI

SEQ ID NO: 30860 - protein, 85 aa, unidentified
  REGION 1..85: note = Description of Unknown:cds_NZ_WFIY01000004.1_cds_WP_155862532.1_296 target sequence
TKAGGAKVKIIFDGMARAPVFKLPNIDSVVNFLQWINKNLDKIKEVAESTTSHGKLKEIQPFVLGNNVWLRFVFETGDAMGMNMA

SEQ ID NO: 30861 - protein, 85 aa, unidentified
  REGION 1..85: note = Description of Unknown:cds_NZ_WFIY01000004.1_cds_WP_155862532.1_296 target sequence
TIASEAICNFIESEFTEAKCVAVSGNMCSDKKQSMVNSIFGRGKTVIAEALIPSTILKEVLRTTAEAIHEVNLRKNLLGSARAGN

SEQ ID NO: 30862 - protein, 85 aa, unidentified
  REGION 1..85: note = Description of Unknown:cds_NZ_WFIY01000004.1_cds_WP_155862532.1_296 target sequence
IYQFNAHFANIIAAIFLATGQDMAQVVESSSGYTWTEVRGEDLYISVTLPSLEVGTVGGGTRLPTQREALSIMGVAGGGNPPGSN

SEQ ID NO: 30863 - protein, 85 aa, unidentified
  REGION 1..85: note = Description of Unknown:cds_NZ_WFIY01000004.1_cds_WP_155864376.1_590 target sequence
TKVLVLGGRFGALTPAYTLKRLVGSKAEIKLINESRFSWLRLDLPHVSIGVKDVDQFKLDLSQALPEKGIEFQEGKVIKIDAKNN

SEQ ID NO: 30864 - protein, 85 aa, unidentified
  REGION 1..85: note = Description of Unknown:cds_NZ_WFIY01000004.1_cds_WP_155864376.1_590 target sequence
EVIYKKPDGSIEEEEYDYVIVGIGAHLGTELIKGWDKYGYSVCEPDFALKLRDRLATFQGGNVTIGSGYFYQGRNPRPKVPENLA

SEQ ID NO: 30865 - protein, 85 aa, unidentified
  REGION 1..85: note = Description of Unknown:cds_NZ_WFIY01000004.1_cds_WP_155864376.1_590 target sequence
PFSDAACEGPVFEMSLMLHGYFKKKGILDKVKMTVYSPGEYLSDLSSEARKAVGEMYKQLGITLVQNFRVREITEQEIIDEKGNK

SEQ ID NO: 30866 - protein, 85 aa, unidentified
  REGION 1..85: note = Description of Unknown:cds_NZ_WFIY01000004.1_cds_WP_155864376.1_590 target sequence
LPSDLSIILPPYTGNPALKNSTPDLVDDGGFIPTDLNMVSIKYDNVYASGDANSMTVPKLAYLAVKTGRIAAQHLANRLGVQTKI

SEQ ID NO: 30867 - protein, 84 aa, unidentified
  REGION 1..84: note = Description of Unknown:cds_NZ_WFIY01000004.1_cds_WP_155864376.1_590 target sequence
IAAQHLANRLGVQTKIDKYDPAVVCIADNPLEGYGVAVSDNTMYKGTHSTAVPSPVNSIKKELFVKYFMWSKGDLALEKYFGEW

SEQ ID NO: 30868 - protein, 85 aa, unidentified
  REGION 1..85: note = Description of Unknown:cds_NZ_WFIY01000004.1_cds_WP_155864376.1_590 target sequence
EIKLINESRFSWLRLDLPHVSIGVKDVDQFKLDLSQALPEKGIEFQEGKVIKIDAKNNEVIYKKPDGSIEEEEYDYVIVGIGAHL

SEQ ID NO: 30869 - protein, 85 aa, unidentified
  REGION 1..85: note = Description of Unknown:cds_NZ_WFIY01000004.1_cds_WP_155864376.1_590 target sequence
GTELIKGWDKYGYSVCEPDFALKLRDRLATFQGGNVTIGSGYFYQGRNPRPKVPENLAPFSDAACEGPVFEMSLMLHGYFKKKGI

SEQ ID NO: 30870 - protein, 85 aa, unidentified
  REGION 1..85: note = Description of Unknown:cds_NZ_WFIY01000004.1_cds_WP_155864376.1_590 target sequence
LDKVKMTVYSPGEYLSDLSSEARKAVGEMYKQLGITLVQNFRVREITEQEIIDEKGNKLPSDLSIILPPYTGNPALKNSTPDLVD

SEQ ID NO: 30871 - protein, 85 aa, unidentified
  REGION 1..85: note = Description of Unknown:cds_NZ_WFIY01000004.1_cds_WP_155864376.1_590 target sequence
DGGFIPTDLNMVSIKYDNVYASGDANSMTVPKLAYLAVKTGRIAAQHLANRLGVQTKIDKYDPAVVCIADNPLEGYGVAVSDNTM

SEQ ID NO: 30872 - protein, 85 aa, unidentified
  REGION 1..85: note = Description of Unknown:cds_NZ_WFIY01000004.1_cds_WP_155863165.1_1094 target sequence
TKVLVLGGRFGALTAAYTLKRLVGSKADVKVINKSRFSYFRPALPHVAIGVRDVDELKVDLSEALPEKGIQFQEGTVEKIDAKSS

SEQ ID NO: 30873 - protein, 85 aa, unidentified
  REGION 1..85: note = Description of Unknown:cds_NZ_WFIY01000004.1_cds_WP_155863165.1_1094 target sequence
MVYYTKPDGSMAEEEYDYVIVGIGAHLATELVKGWDKYGYSVCEPEFATKLREKLESFQGGNIAIGSGPFYQGHNPKPKVPENFV

SEQ ID NO: 30874 - protein, 85 aa, unidentified
  REGION 1..85: note = Description of Unknown:cds_NZ_WFIY01000004.1_cds_WP_155863165.1_1094 target sequence
PNADSACEGPVFEVSLMLHGYFKKKGMLDKVHVTVFSPGEYLSDLSPNSRKAVASIYNQLGIKLVHNFRIKEIKEHEIVDEKGNT

SEQ ID NO: 30875 - protein, 85 aa, unidentified
  REGION 1..85: note = Description of Unknown:cds_NZ_WFIY01000004.1_cds_WP_155863165.1_1094 target sequence
IPADITILLPPYTGNPALKNSTPDLIDDGGFIPTDLNMVSIKYDNVYAVGDANSMTVPKLGYLAVMTGRIAAQHLANRLGVPTKV

SEQ ID NO: 30876 - protein, 84 aa, unidentified
  REGION 1..84: note = Description of Unknown:cds_NZ_WFIY01000004.1_cds_WP_155863165.1_1094 target sequence
IAAQHLANRLGVPTKVDKYYPTIVCVADNPYEGYAVAVKDDTWYGGTVSIADPAAVNHLKKELFTKYYMWTKGDMALEKFLASW

SEQ ID NO: 30877 - protein, 85 aa, unidentified
  REGION 1..85: note = Description of Unknown:cds_NZ_WFIY01000004.1_cds_WP_155863165.1_1094 target sequence
DVKVINKSRFSYFRPALPHVAIGVRDVDELKVDLSEALPEKGIQFQEGTVEKIDAKSSMVYYTKPDGSMAEEEYDYVIVGIGAHL

SEQ ID NO: 30878 - protein, 85 aa, unidentified
  REGION 1..85: note = Description of Unknown:cds_NZ_WFIY01000004.1_cds_WP_155863165.1_1094 target sequence
ATELVKGWDKYGYSVCEPEFATKLREKLESFQGGNIAIGSGPFYQGHNPKPKVPENFVPNADSACEGPVFEVSLMLHGYFKKKGM

SEQ ID NO: 30879 - protein, 85 aa, unidentified
  REGION 1..85: note = Description of Unknown:cds_NZ_WFIY01000004.1_cds_WP_155863165.1_1094 target sequence
LDKVHVTVFSPGEYLSDLSPNSRKAVASIYNQLGIKLVHNFRIKEIKEHEIVDEKGNTIPADITILLPPYTGNPALKNSTPDLID

SEQ ID NO: 30880 - protein, 85 aa, unidentified
  REGION 1..85: note = Description of Unknown:cds_NZ_WFIY01000004.1_cds_WP_155863165.1_1094 target sequence
DGGFIPTDLNMVSIKYDNVYAVGDANSMTVPKLGYLAVMTGRIAAQHLANRLGVPTKVDKYYPTIVCVADNPYEGYAVAVKDDTW

SEQ ID NO: 30881 - protein, 85 aa, unidentified
  REGION 1..85: note = Description of Unknown:cds_NC_007409.1_cds_YP_319841.1_10 target sequence
PDVGIRFRAFADEPTIRELKSQLRLACEIYNTLRWADIYFYQRDGKGLSKTELRQLALDLRKQDDEYKRIYSQAVQQIADRFYDA

SEQ ID NO: 30882 - protein, 85 aa, unidentified
  REGION 1..85: note = Description of Unknown:cds_NC_007409.1_cds_YP_319841.1_10 target sequence
KKRFLKGLARYPREKKPHKWYSLVYPQSGWKVLETREIRTKSKKNKKKIMTLQLANLGVFKVIVHRDFPLDKVKRVIVKLTPSER

SEQ ID NO: 30883 - protein, 85 aa, unidentified
  REGION 1..85: note = Description of Unknown:cds_NC_007409.1_cds_YP_319841.1_10 target sequence
VYISFVVDQEYPQLPKTNKTVGIDVGIEKLLITSDGEYVPNLRPYEKALNKTRKLHKALSRKKFLSHNWFKAKIKLARAYEHLKN

SEQ ID NO: 30884 - protein, 85 aa, unidentified
  REGION 1..85: note = Description of Unknown:cds_NC_007409.1_cds_YP_319841.1_10 target sequence
LRRDIYMKLGKYFAEHYDVVVMEDIQVKQLVGKSYKKMRMRLHDVAFYELRSIMEYQLRKYGKELRLVDPAFTSMTCAKCGYVKK

SEQ ID NO: 30885 - protein, 84 aa, unidentified
  REGION 1..84: note = Description of Unknown:cds_NC_007409.1_cds_YP_319841.1_10 target sequence
PAFTSMTCAKCGYVKKDLTLADRIFVCPKCGWTVDRDYNASLNILKRSGWEPPLAPVELRPLPLVKSQWQGGALKQEASPFRVG

SEQ ID NO: 30886 - protein, 85 aa, unidentified
  REGION 1..85: note = Description of Unknown:cds_NC_007409.1_cds_YP_319841.1_10 target sequence
EIYNTLRWADIYFYQRDGKGLSKTELRQLALDLRKQDDEYKRIYSQAVQQIADRFYDAKKRFLKGLARYPREKKPHKWYSLVYPQ

SEQ ID NO: 30887 - protein, 85 aa, unidentified
  REGION 1..85: note = Description of Unknown:cds_NC_007409.1_cds_YP_319841.1_10 target sequence
SGWKVLETREIRTKSKKNKKKIMTLQLANLGVFKVIVHRDFPLDKVKRVIVKLTPSERVYISFVVDQEYPQLPKTNKTVGIDVGI

SEQ ID NO: 30888 - protein, 85 aa, unidentified
  REGION 1..85: note = Description of Unknown:cds_NC_007409.1_cds_YP_319841.1_10 target sequence
EKLLITSDGEYVPNLRPYEKALNKTRKLHKALSRKKFLSHNWFKAKIKLARAYEHLKNLRRDIYMKLGKYFAEHYDVVVMEDIQV

SEQ ID NO: 30889 - protein, 85 aa, unidentified
  REGION 1..85: note = Description of Unknown:cds_NC_007409.1_cds_YP_319841.1_10 target sequence
KQLVGKSYKKMRMRLHDVAFYELRSIMEYQLRKYGKELRLVDPAFTSMTCAKCGYVKKDLTLADRIFVCPKCGWTVDRDYNASLN

SEQ ID NO: 30890 - protein, 85 aa, unidentified
  REGION 1..85: note = Description of Unknown:cds_NZ_WFIY01000004.1_cds_WP_155862419.1_160 target sequence
ILGVLGSNKLVTTTNAILTEIFTGIKQIDKIIILSEEKTKKDYTKLKEIVKVIGINSEIEEIELGKGLKNWREKLKNVDIDIADI

SEQ ID NO: 30891 - protein, 85 aa, unidentified
  REGION 1..85: note = Description of Unknown:cds_NZ_WFIY01000004.1_cds_WP_155862419.1_160 target sequence
TPGRKYMAYSIIAYSKAKEVRYVYIKEESKGYHVFGYIPFNEMEVVNMRTGEKINFDPPQTIKGLPNDNELSTTATDALINIYSL

SEQ ID NO: 30892 - protein, 85 aa, unidentified
  REGION 1..85: note = Description of Unknown:cds_NZ_WFIY01000004.1_cds_WP_155862419.1_160 target sequence
LGKVTIENSYREIQEFEISDAKDENEELCLLRSGFLRYKEEDEIKEEAQKGSFFIADTNTYIKIGPRLKFLTYPGYRLLASRATY

SEQ ID NO: 30893 - protein, 85 aa, unidentified
  REGION 1..85: note = Description of Unknown:cds_NZ_WFIY01000004.1_cds_WP_155862419.1_160 target sequence
NELQNKTSSTQKDEKLYHFYMGMESYRLLHTPPISEDRRFGDTNLLEESKRLKSELPEKLVLITADVMLANSARSKGVSTILLRN

SEQ ID NO: 30894 - protein, 84 aa, unidentified
  REGION 1..84: note = Description of Unknown:cds_NZ_WFIY01000004.1_cds_WP_155862419.1_160 target sequence
LANSARSKGVSTILLRNINKGKGDIGVYLNCVKYFTQNSIMVEGKRVAEIPKVREYEEKIRIKTIKEDLNYPYLLSITEKFLKS

SEQ ID NO: 30895 - protein, 85 aa, unidentified
  REGION 1..85: note = Description of Unknown:cds_NZ_WFIY01000004.1_cds_WP_155862419.1_160 target sequence
IDKIIILSEEKTKKDYTKLKEIVKVIGINSEIEEIELGKGLKNWREKLKNVDIDIADITPGRKYMAYSIIAYSKAKEVRYVYIKE

SEQ ID NO: 30896 - protein, 85 aa, unidentified
  REGION 1..85: note = Description of Unknown:cds_NZ_WFIY01000004.1_cds_WP_155862419.1_160 target sequence
ESKGYHVFGYIPFNEMEVVNMRTGEKINFDPPQTIKGLPNDNELSTTATDALINIYSLLGKVTIENSYREIQEFEISDAKDENEE

SEQ ID NO: 30897 - protein, 85 aa, unidentified
  REGION 1..85: note = Description of Unknown:cds_NZ_WFIY01000004.1_cds_WP_155862419.1_160 target sequence
LCLLRSGFLRYKEEDEIKEEAQKGSFFIADTNTYIKIGPRLKFLTYPGYRLLASRATYNELQNKTSSTQKDEKLYHFYMGMESYR

SEQ ID NO: 30898 - protein, 85 aa, unidentified
  REGION 1..85: note = Description of Unknown:cds_NZ_WFIY01000004.1_cds_WP_155862419.1_160 target sequence
LLHTPPISEDRRFGDTNLLEESKRLKSELPEKLVLITADVMLANSARSKGVSTILLRNINKGKGDIGVYLNCVKYFTQNSIMVEG

SEQ ID NO: 30899 - protein, 85 aa, unidentified
  REGION 1..85: note = Description of Unknown:cds_NZ_WFIY01000004.1_cds_WP_155863129.1_1050 target sequence
LEVFNKTYTLKNCSFVVDSEKVLENVNIVIDNDKIKNVGKEIEGDEIDCSEYVVTPGFVNSHTHSAMIFLRGYYDDSELQEWLDK

SEQ ID NO: 30900 - protein, 85 aa, unidentified
  REGION 1..85: note = Description of Unknown:cds_NZ_WFIY01000004.1_cds_WP_155863129.1_1050 target sequence
MWEKERSAGKNILRLSSELAVLEMLSSGTTAFVDMYFNPEDIIEISQQYGIRAAAGYTFLDKIFDPEEVAKMQRRLRETNLFKPI

SEQ ID NO: 30901 - protein, 85 aa, unidentified
  REGION 1..85: note = Description of Unknown:cds_NZ_WFIY01000004.1_cds_WP_155863129.1_1050 target sequence
INVHSIYAVNEKTLLLAKDLAEEQNTWINIHLSETRKEIYETKLRKGKFPVEYLRSLGITKFQAVHLGWVASWEIDMLKDSVAVT

SEQ ID NO: 30902 - protein, 85 aa, unidentified
  REGION 1..85: note = Description of Unknown:cds_NZ_WFIY01000004.1_cds_WP_155863129.1_1050 target sequence
HCPTSNMKLATAGAFPFYEMMNAGINVTIGTDGPASNNSLDIIREMKNAVLLQRHSYWDTRIKAMHVFKATTENGYKLFGIKGGL

SEQ ID NO: 30903 - protein, 84 aa, unidentified
  REGION 1..84: note = Description of Unknown:cds_NZ_WFIY01000004.1_cds_WP_155863129.1_1050 target sequence
ATTENGYKLFGIKGGLIKEDYVADLVLFNKYDLYPLKKDRLLSNIVYYATGENVNKIIINGKIIDKKTIKEKIHELAKKLNELI

SEQ ID NO: 30904 - protein, 85 aa, unidentified
  REGION 1..85: note = Description of Unknown:cds_NZ_WFIY01000004.1_cds_WP_155863129.1_1050 target sequence
IVIDNDKIKNVGKEIEGDEIDCSEYVVTPGFVNSHTHSAMIFLRGYYDDSELQEWLDKMWEKERSAGKNILRLSSELAVLEMLSS

SEQ ID NO: 30905 - protein, 85 aa, unidentified
  REGION 1..85: note = Description of Unknown:cds_NZ_WFIY01000004.1_cds_WP_155863129.1_1050 target sequence
GTTAFVDMYFNPEDIIEISQQYGIRAAAGYTFLDKIFDPEEVAKMQRRLRETNLFKPIINVHSIYAVNEKTLLLAKDLAEEQNTW

SEQ ID NO: 30906 - protein, 85 aa, unidentified
  REGION 1..85: note = Description of Unknown:cds_NZ_WFIY01000004.1_cds_WP_155863129.1_1050 target sequence
INIHLSETRKEIYETKLRKGKFPVEYLRSLGITKFQAVHLGWVASWEIDMLKDSVAVTHCPTSNMKLATAGAFPFYEMMNAGINV

SEQ ID NO: 30907 - protein, 85 aa, unidentified
  REGION 1..85: note = Description of Unknown:cds_NZ_WFIY01000004.1_cds_WP_155863129.1_1050 target sequence
TIGTDGPASNNSLDIIREMKNAVLLQRHSYWDTRIKAMHVFKATTENGYKLFGIKGGLIKEDYVADLVLFNKYDLYPLKKDRLLS

SEQ ID NO: 30908 - protein, 85 aa, unidentified
  REGION 1..85: note = Description of Unknown:cds_NZ_WFIY01000004.1_cds_WP_155864440.1_1580 target sequence
FSALLFGVVSLPISTLLSLEILNLGGNTIDVDYAISLSNAVLIPASLFWGYASDRFDIRSIILIGFGASSVSLYLMALACSIILL

SEQ ID NO: 30909 - protein, 85 aa, unidentified
  REGION 1..85: note = Description of Unknown:cds_NZ_WFIY01000004.1_cds_WP_155864440.1_1580 target sequence
IILYAIFTFFSVSYSTPMNLLVMETTEKSRWAESFSKLSMLTSIGNLVGLILSTILVIFIHIYEIYIVLSVFSIAAFISAYLFTP

SEQ ID NO: 30910 - protein, 85 aa, unidentified
  REGION 1..85: note = Description of Unknown:cds_NZ_WFIY01000004.1_cds_WP_155864440.1_1580 target sequence
RVFMGIERVSIVHHKESFFTRLKMHPLFFVHIPPNLHNFKMFRLSRLLKKPINYLPLLYLAIFIFYISSGLFNTLYPVSLYTKGL

SEQ ID NO: 30911 - protein, 85 aa, unidentified
  REGION 1..85: note = Description of Unknown:cds_NZ_WFIY01000004.1_cds_WP_155864440.1_1580 target sequence
DKSIVLGIITEGMIAEILTFHLIGKYLEKKDERETSFRALLLRGSSYIAMGISIILPASFTEILGMLFYPLAAGVAFSAYYSASN

SEQ ID NO: 30912 - protein, 84 aa, unidentified
  REGION 1..84: note = Description of Unknown:cds_NZ_WFIY01000004.1_cds_WP_155864440.1_1580 target sequence
YPLAAGVAFSAYYSASNTLIFKAIGGRNQGRSLGVYSTLVGVALFLGSFASGFISTKFGFTTNFAIAGILLFISAFIFKMLEEG

SEQ ID NO: 30913 - protein, 85 aa, unidentified
  REGION 1..85: note = Description of Unknown:cds_NZ_WFIY01000004.1_cds_WP_155864440.1_1580 target sequence
TIDVDYAISLSNAVLIPASLFWGYASDRFDIRSIILIGFGASSVSLYLMALACSIILLIILYAIFTFFSVSYSTPMNLLVMETTE

SEQ ID NO: 30914 - protein, 85 aa, unidentified
  REGION 1..85: note = Description of Unknown:cds_NZ_WFIY01000004.1_cds_WP_155864440.1_1580 target sequence
KSRWAESFSKLSMLTSIGNLVGLILSTILVIFIHIYEIYIVLSVFSIAAFISAYLFTPRVFMGIERVSIVHHKESFFTRLKMHPL

SEQ ID NO: 30915 - protein, 85 aa, unidentified
  REGION 1..85: note = Description of Unknown:cds_NZ_WFIY01000004.1_cds_WP_155864440.1_1580 target sequence
FFVHIPPNLHNFKMFRLSRLLKKPINYLPLLYLAIFIFYISSGLFNTLYPVSLYTKGLDKSIVLGIITEGMIAEILTFHLIGKYL

SEQ ID NO: 30916 - protein, 85 aa, unidentified
  REGION 1..85: note = Description of Unknown:cds_NZ_WFIY01000004.1_cds_WP_155864440.1_1580 target sequence
EKKDERETSFRALLLRGSSYIAMGISIILPASFTEILGMLFYPLAAGVAFSAYYSASNTLIFKAIGGRNQGRSLGVYSTLVGVAL

SEQ ID NO: 30917 - protein, 85 aa, unidentified
  REGION 1..85: note = Description of Unknown:cds_NZ_WFIY01000004.1_cds_WP_155863750.1_1622 target sequence
IEKYEKIIGEDELYGLVKIAEKLKDFSILHVNSTRAGGGVAEILNRMVPLMRDLGLNVDWKVIRGDTEFFRVTKSFHNSLQNGYG

SEQ ID NO: 30918 - protein, 85 aa, unidentified
  REGION 1..85: note = Description of Unknown:cds_NZ_WFIY01000004.1_cds_WP_155863750.1_1622 target sequence
ELPPNAFETYEKWQEINANEIPLDYDIIMIHDPQPLGLIKFRKKGKWIFRCHIDISNPYAPVWEFLKKKIENYDSMIISTPAFAR

SEQ ID NO: 30919 - protein, 85 aa, unidentified
  REGION 1..85: note = Description of Unknown:cds_NZ_WFIY01000004.1_cds_WP_155863750.1_1622 target sequence
DDISIPQFIIPPSIDPLSIKNQPIPEITVKRILYKYGIDTERPLVVQISRFDYAKDPIGVIKSFKLAKEHIDGLQLAYVGSPATD

SEQ ID NO: 30920 - protein, 85 aa, unidentified
  REGION 1..85: note = Description of Unknown:cds_NZ_WFIY01000004.1_cds_WP_155863750.1_1622 target sequence
DPEGEEVYEKTVKEAGDDKDIHLLMLPPYSDLEINAFQTGASVVLQKSIKEGFGLTVSEAMWKKKVVIGGRTGGIPLQIIHGITG

SEQ ID NO: 30921 - protein, 84 aa, unidentified
  REGION 1..84: note = Description of Unknown:cds_NZ_WFIY01000004.1_cds_WP_155863750.1_1622 target sequence
GGRTGGIPLQIIHGITGYLVDNVEGAAHYIIHTLKNPEISKKIGENAHKHVKNNFLITRHMREYMSVMLYVIGRNEEMKSPTLQ

SEQ ID NO: 30922 - protein, 85 aa, unidentified
  REGION 1..85: note = Description of Unknown:cds_NZ_WFIY01000004.1_cds_WP_155863750.1_1622 target sequence
ILHVNSTRAGGGVAEILNRMVPLMRDLGLNVDWKVIRGDTEFFRVTKSFHNSLQNGYGELPPNAFETYEKWQEINANEIPLDYDI

SEQ ID NO: 30923 - protein, 85 aa, unidentified
  REGION 1..85: note = Description of Unknown:cds_NZ_WFIY01000004.1_cds_WP_155863750.1_1622 target sequence
IMIHDPQPLGLIKFRKKGKWIFRCHIDISNPYAPVWEFLKKKIENYDSMIISTPAFARDDISIPQFIIPPSIDPLSIKNQPIPEI

SEQ ID NO: 30924 - protein, 85 aa, unidentified
  REGION 1..85: note = Description of Unknown:cds_NZ_WFIY01000004.1_cds_WP_155863750.1_1622 target sequence
TVKRILYKYGIDTERPLVVQISRFDYAKDPIGVIKSFKLAKEHIDGLQLAYVGSPATDDPEGEEVYEKTVKEAGDDKDIHLLMLP

SEQ ID NO: 30925 - protein, 85 aa, unidentified
  REGION 1..85: note = Description of Unknown:cds_NZ_WFIY01000004.1_cds_WP_155863750.1_1622 target sequence
PYSDLEINAFQTGASVVLQKSIKEGFGLTVSEAMWKKKVVIGGRTGGIPLQIIHGITGYLVDNVEGAAHYIIHTLKNPEISKKIG

SEQ ID NO: 30926 - protein, 85 aa, unidentified
  REGION 1..85: note = Description of Unknown:cds_NZ_WFIY01000004.1_cds_WP_155864176.1_2134 target sequence
RGFDEHAIFKTKREVTVIKFVNGKVSAIQRLDDEVSYVLLKKGNKYIIMEGKDPDLNFSNVINVMEEPMLSPKISENTGEYKFVK

SEQ ID NO: 30927 - protein, 85 aa, unidentified
  REGION 1..85: note = Description of Unknown:cds_NZ_WFIY01000004.1_cds_WP_155864176.1_2134 target sequence
LDDKIEKMRENPEDVISLVLNSKYPISGIVNITRSTVSLSTSKGFSGSDARNSIDGYFRTFNGEFTGQWAFASSTYSESTIKESI

SEQ ID NO: 30928 - protein, 85 aa, unidentified
  REGION 1..85: note = Description of Unknown:cds_NZ_WFIY01000004.1_cds_WP_155864176.1_2134 target sequence
NTACEMASITKKAEVDDGVYNVVLSPLVFGNLMNYLARMSSGLSIMMGNSIFSRYKPEDKIASEKFTFSDVPKADMPNAVEFDME

SEQ ID NO: 30929 - protein, 85 aa, unidentified
  REGION 1..85: note = Description of Unknown:cds_NZ_WFIY01000004.1_cds_WP_155864176.1_2134 target sequence
ATFTKNKKIIDHGVFKTPLLNNEVAETMNLESTGNAGWVNPIPWTLEVDEGDVGKDSLLSGNVIFFNNNWYTRFQNYVEGNFSTV

SEQ ID NO: 30930 - protein, 84 aa, unidentified
  REGION 1..84: note = Description of Unknown:cds_NZ_WFIY01000004.1_cds_WP_155864176.1_2134 target sequence
NWYTRFQNYVEGNFSTVGRDAIIVYKNGNVEGVAGRLRIADSIPNIIGNIEEVSKERYLVKWWDSRIPVLSPYVLVRDVKITRA

SEQ ID NO: 30931 - protein, 85 aa, unidentified
  REGION 1..85: note = Description of Unknown:cds_NZ_WFIY01000004.1_cds_WP_155864176.1_2134 target sequence
IQRLDDEVSYVLLKKGNKYIIMEGKDPDLNFSNVINVMEEPMLSPKISENTGEYKFVKLDDKIEKMRENPEDVISLVLNSKYPIS

SEQ ID NO: 30932 - protein, 85 aa, unidentified
  REGION 1..85: note = Description of Unknown:cds_NZ_WFIY01000004.1_cds_WP_155864176.1_2134 target sequence
GIVNITRSTVSLSTSKGFSGSDARNSIDGYFRTFNGEFTGQWAFASSTYSESTIKESINTACEMASITKKAEVDDGVYNVVLSPL

SEQ ID NO: 30933 - protein, 85 aa, unidentified
  REGION 1..85: note = Description of Unknown:cds_NZ_WFIY01000004.1_cds_WP_155864176.1_2134 target sequence
VFGNLMNYLARMSSGLSIMMGNSIFSRYKPEDKIASEKFTFSDVPKADMPNAVEFDMEATFTKNKKIIDHGVFKTPLLNNEVAET

SEQ ID NO: 30934 - protein, 85 aa, unidentified
  REGION 1..85: note = Description of Unknown:cds_NZ_WFIY01000004.1_cds_WP_155864176.1_2134 target sequence
MNLESTGNAGWVNPIPWTLEVDEGDVGKDSLLSGNVIFFNNNWYTRFQNYVEGNFSTVGRDAIIVYKNGNVEGVAGRLRIADSIP

SEQ ID NO: 30935 - protein, 85 aa, unidentified
  REGION 1..85: note = Description of Unknown:hvTR_P16812.2 target sequence
NFIITTRDFSNDDSVLRAAEMRDNVAGSISKAYKGTVRAEGKKKLLLKHLPVPPGGCSRRNSNLFVFCTERDYRKFHQGIAQLKR

SEQ ID NO: 30936 - protein, 85 aa, unidentified
  REGION 1..85: note = Description of Unknown:hvTR_P16812.2 target sequence
APAELDPHEIQQVTASIRCRLQPSLREPPTPADELQTAVSRVCALFNQLVFTAQLRHYCEHQDKVVSYARDELTKRCGEKSALGV

SEQ ID NO: 30937 - protein, 85 aa, unidentified
  REGION 1..85: note = Description of Unknown:hvTR_P16812.2 target sequence
EVHQLVALLPHERHRELCHVLIGLLHQTPHMWARSIRLIGHLRHYLQNSFLHLLMNSGLDIAQVFDGCYHSEAYRMLFQIGHTDS

SEQ ID NO: 30938 - protein, 85 aa, unidentified
  REGION 1..85: note = Description of Unknown:hvTR_P16812.2 target sequence
VSAALELSHGAAAGPPEADENNDEGEEDDDELRHSDPAPLHESKKPRNARRPRTRVPPHEQKPEENEEEEEELFPSCKATAAFLR

SEQ ID NO: 30939 - protein, 85 aa, unidentified
  REGION 1..85: note = Description of Unknown:hvTR_P16812.2 target sequence
SISKAYKGTVRAEGKKKLLLKHLPVPPGGCSRRNSNLFVFCTERDYRKFHQGIAQLKRAPAELDPHEIQQVTASIRCRLQPSLRE

SEQ ID NO: 30940 - protein, 85 aa, unidentified
  REGION 1..85: note = Description of Unknown:hvTR_P16812.2 target sequence
PPTPADELQTAVSRVCALFNQLVFTAQLRHYCEHQDKVVSYARDELTKRCGEKSALGVEVHQLVALLPHERHRELCHVLIGLLHQ

SEQ ID NO: 30941 - protein, 85 aa, unidentified
  REGION 1..85: note = Description of Unknown:hvTR_P16812.2 target sequence
TPHMWARSIRLIGHLRHYLQNSFLHLLMNSGLDIAQVFDGCYHSEAYRMLFQIGHTDSVSAALELSHGAAAGPPEADENNDEGEE

SEQ ID NO: 30942 - protein, 85 aa, unidentified
  REGION 1..85: note = Description of Unknown:hvTR_P16812.2 target sequence
DDDELRHSDPAPLHESKKPRNARRPRTRVPPHEQKPEENEEEEEELFPSCKATAAFLRAEPSVSNDDGNGGERCDTLATALRHRA

SEQ ID NO: 30943 - protein, 85 aa, unidentified
  REGION 1..85: note = Description of Unknown:cds_NZ_WFIY01000004.1_cds_45 target sequence
VSFDADVIIVGGGLSGLSAGITAVMEGLNVILLERGEYSGAKNVSGGRMYIHALKMLIPDALERAPLERPITKETFEIFCDKNRK

SEQ ID NO: 30944 - protein, 85 aa, unidentified
  REGION 1..85: note = Description of Unknown:cds_NZ_WFIY01000004.1_cds_45 target sequence
ITFSFEEKDKKNSFSVLRSKFDRWLASEAENLGLLISYSTLVLNAYREGEGITLETNRGTLKAPLIIDASGVTSIVFRLLGLRKF

SEQ ID NO: 30945 - protein, 85 aa, unidentified
  REGION 1..85: note = Description of Unknown:cds_NZ_WFIY01000004.1_cds_45 target sequence
TPDKWMLGVKEIIKTDVNLPENEGEVRTIVGAIKGVKGGGFVYTNKDTLSVGMAVTFDSLPKSEFPAKDLVEAFRERIGIEGEIL

SEQ ID NO: 30946 - protein, 85 aa, unidentified
  REGION 1..85: note = Description of Unknown:cds_NZ_WFIY01000004.1_cds_45 target sequence
EYSAHAIPYYGFKNLPPLYDKNLIAVGDSAGFLINDGFTIRGMDLAIGSGMIAGLAAKKIVESRNFSNTEVYYEMLKDSFVLKHL

SEQ ID NO: 30947 - protein, 84 aa, unidentified
  REGION 1..84: note = Description of Unknown:cds_NZ_WFIY01000004.1_cds_45 target sequence
TEVYYEMLKDSFVLKHLELAYNRFELINSPLTLSTYPEILCNVLSDMFTVEENRNTLINDFIYRLKEKGIPLSQTVRDLWKAIK

SEQ ID NO: 30948 - protein, 85 aa, unidentified
  REGION 1..85: note = Description of Unknown:cds_NZ_WFIY01000004.1_cds_45 target sequence
LNVILLERGEYSGAKNVSGGRMYIHALKMLIPDALERAPLERPITKETFEIFCDKNRKITFSFEEKDKKNSFSVLRSKFDRWLAS

SEQ ID NO: 30949 - protein, 85 aa, unidentified
  REGION 1..85: note = Description of Unknown:cds_NZ_WFIY01000004.1_cds_45 target sequence
EAENLGLLISYSTLVLNAYREGEGITLETNRGTLKAPLIIDASGVTSIVFRLLGLRKFTPDKWMLGVKEIIKTDVNLPENEGEVR

SEQ ID NO: 30950 - protein, 85 aa, unidentified
  REGION 1..85: note = Description of Unknown:cds_NZ_WFIY01000004.1_cds_45 target sequence
TIVGAIKGVKGGGFVYTNKDTLSVGMAVTFDSLPKSEFPAKDLVEAFRERIGIEGEILEYSAHAIPYYGFKNLPPLYDKNLIAVG

SEQ ID NO: 30951 - protein, 85 aa, unidentified
  REGION 1..85: note = Description of Unknown:cds_NZ_WFIY01000004.1_cds_45 target sequence
DSAGFLINDGFTIRGMDLAIGSGMIAGLAAKKIVESRNFSNTEVYYEMLKDSFVLKHLELAYNRFELINSPLTLSTYPEILCNVL

SEQ ID NO: 30952 - protein, 85 aa, unidentified
  REGION 1..85: note = Description of Unknown:cds_NZ_WFIY01000004.1_cds_WP_155862479.1_235 target sequence
LRAIPAELCVKCKGNKLLCGLRACPILERFRSTISVVNKVYNKNEIEGSTPPSIVIGEKNYPKISVSFNIPPDIYGEEAKNYENP

SEQ ID NO: 30953 - protein, 85 aa, unidentified
  REGION 1..85: note = Description of Unknown:cds_NZ_WFIY01000004.1_cds_WP_155862479.1_235 target sequence
KGWWGKASIYDIINYRTSLLSNIFEVKIEDVWKLYEKELSLAAVSEKPVQSESKIDGTILPKLRFDGYVLPRGPSAKTQNLEVIE

SEQ ID NO: 30954 - protein, 85 aa, unidentified
  REGION 1..85: note = Description of Unknown:cds_NZ_WFIY01000004.1_cds_WP_155862479.1_235 target sequence
NPKINKTLDKLIFDDIKAEDAVVKLYHDIKDVYTIINALSLGLLGVKKNRKLVPTRWAITAVDSIIAKNLLQKIRNYQEISEVEV

SEQ ID NO: 30955 - protein, 85 aa, unidentified
  REGION 1..85: note = Description of Unknown:cds_NZ_WFIY01000004.1_cds_WP_155862479.1_235 target sequence
YYQKYLGNYFHVILYPSAYQVSWIEIWHPLSLWASELTISELTENYWGEYSTMDGGYMAARLAVLEYLDNIKRSAGVIIIREITS

SEQ ID NO: 30956 - protein, 84 aa, unidentified
  REGION 1..84: note = Description of Unknown:cds_NZ_WFIY01000004.1_cds_WP_155862479.1_235 target sequence
DNIKRSAGVIIIREITSEYFAPLGNWHIRETVRKAMENKIGKFQDLENAISFVNQRLNAKKIDLKDLNSIKRILKQKSIDQFFK

SEQ ID NO: 30957 - protein, 85 aa, unidentified
  REGION 1..85: note = Description of Unknown:cds_NZ_WFIY01000004.1_cds_WP_155862479.1_235 target sequence
ERFRSTISVVNKVYNKNEIEGSTPPSIVIGEKNYPKISVSFNIPPDIYGEEAKNYENPKGWWGKASIYDIINYRTSLLSNIFEVK

SEQ ID NO: 30958 - protein, 85 aa, unidentified
  REGION 1..85: note = Description of Unknown:cds_NZ_WFIY01000004.1_cds_WP_155862479.1_235 target sequence
IEDVWKLYEKELSLAAVSEKPVQSESKIDGTILPKLRFDGYVLPRGPSAKTQNLEVIENPKINKTLDKLIFDDIKAEDAVVKLYH

SEQ ID NO: 30959 - protein, 85 aa, unidentified
  REGION 1..85: note = Description of Unknown:cds_NZ_WFIY01000004.1_cds_WP_155862479.1_235 target sequence
DIKDVYTIINALSLGLLGVKKNRKLVPTRWAITAVDSIIAKNLLQKIRNYQEISEVEVYYQKYLGNYFHVILYPSAYQVSWIEIW

SEQ ID NO: 30960 - protein, 85 aa, unidentified
  REGION 1..85: note = Description of Unknown:cds_NZ_WFIY01000004.1_cds_WP_155862479.1_235 target sequence
HPLSLWASELTISELTENYWGEYSTMDGGYMAARLAVLEYLDNIKRSAGVIIIREITSEYFAPLGNWHIRETVRKAMENKIGKFQ

SEQ ID NO: 30961 - protein, 85 aa, unidentified
  REGION 1..85: note = Description of Unknown:cds_NZ_WFIY01000004.1_cds_WP_170283905.1_1124 target sequence
NYLSLAAMIITYSLIATRGITKIPPWASMFFGGVLMIVLGVLTPEKALSAINLDVILFLITIFTFASSLEVSGFLKYIAYAIISK

SEQ ID NO: 30962 - protein, 85 aa, unidentified
  REGION 1..85: note = Description of Unknown:cds_NZ_WFIY01000004.1_cds_WP_170283905.1_1124 target sequence
FKRPDKVLFSVLVTSGLLSNLVTNDGLSASWTPVILEMKKEMKIDEKPFLYALAFGVTIGSVMLPTGNPQNLLIALDSGIKNPFL

SEQ ID NO: 30963 - protein, 85 aa, unidentified
  REGION 1..85: note = Description of Unknown:cds_NZ_WFIY01000004.1_cds_WP_170283905.1_1124 target sequence
VFIEYLSIPTLLNLVLTYPILRLMFRKYLPNLTFNPDKIEIENKRLAYSSFILLLITIVLFFTLSYVGIDILLGSLITSSILLLI

SEQ ID NO: 30964 - protein, 85 aa, unidentified
  REGION 1..85: note = Description of Unknown:cds_NZ_WFIY01000004.1_cds_WP_170283905.1_1124 target sequence
SPERRDIVRRIDWSTIIFFIGLFIFTEGILCGGVIAEMSKFLPPPTSVLLIFISSILLSQILSNVPLVAIYIPIMFEYHSTSIAD

SEQ ID NO: 30965 - protein, 84 aa, unidentified
  REGION 1..84: note = Description of Unknown:cds_NZ_WFIY01000004.1_cds_WP_170283905.1_1124 target sequence
VAIYIPIMFEYHSTSIADWLALAAGSTIAGNLTLIGAASNIIISEASENRGGKGFGFFEFIAYSLPVLLLNSFILYLFLLLEAP

SEQ ID NO: 30966 - protein, 85 aa, unidentified
  REGION 1..85: note = Description of Unknown:cds_NZ_WFIY01000004.1_cds_WP_170283905.1_1124 target sequence
SMFFGGVLMIVLGVLTPEKALSAINLDVILFLITIFTFASSLEVSGFLKYIAYAIISKFKRPDKVLFSVLVTSGLLSNLVTNDGL

SEQ ID NO: 30967 - protein, 85 aa, unidentified
  REGION 1..85: note = Description of Unknown:cds_NZ_WFIY01000004.1_cds_WP_170283905.1_1124 target sequence
SASWTPVILEMKKEMKIDEKPFLYALAFGVTIGSVMLPTGNPQNLLIALDSGIKNPFLVFIEYLSIPTLLNLVLTYPILRLMFRK

SEQ ID NO: 30968 - protein, 85 aa, unidentified
  REGION 1..85: note = Description of Unknown:cds_NZ_WFIY01000004.1_cds_WP_170283905.1_1124 target sequence
YLPNLTFNPDKIEIENKRLAYSSFILLLITIVLFFTLSYVGIDILLGSLITSSILLLISPERRDIVRRIDWSTIIFFIGLFIFTE

SEQ ID NO: 30969 - protein, 85 aa, unidentified
  REGION 1..85: note = Description of Unknown:cds_NZ_WFIY01000004.1_cds_WP_170283905.1_1124 target sequence
GILCGGVIAEMSKFLPPPTSVLLIFISSILLSQILSNVPLVAIYIPIMFEYHSTSIADWLALAAGSTIAGNLTLIGAASNIIISE

SEQ ID NO: 30970 - protein, 85 aa, unidentified
  REGION 1..85: note = Description of Unknown:vpeps_4AMQ_1 target sequence
SYYHHHHHHLESTSLYKKAGLRMLIFTYKLERYIKNKILPKILVVPDRDKYQIKGSFRRRIPYITDIDIVNNVHPEYDDTNIYQR

SEQ ID NO: 30971 - protein, 85 aa, unidentified
  REGION 1..85: note = Description of Unknown:vpeps_4AMQ_1 target sequence
IVDLINSFTNDNQIKLIYVICGTDDRFLLTEYSDEEIEKIKILLNPTELVELNNVLSKYQDDLNKKVFYINEIIWDLYKLRWTSS

SEQ ID NO: 30972 - protein, 85 aa, unidentified
  REGION 1..85: note = Description of Unknown:vpeps_4AMQ_1 target sequence
EVLAGKKILRGGIEVSFQDVVKNNSILLLQYFVKIEYYPIGFDIAVRYKPINLITAYQNAAFYQLKLANYSKEYYFMLFPLRFYF

SEQ ID NO: 30973 - protein, 85 aa, unidentified
  REGION 1..85: note = Description of Unknown:vpeps_4AMQ_1 target sequence
KNDPTISKQLEYIIETKFGLYKQLLVRIDSYRTIYESGNLDLDTAKSIIISIIKDIRKLNGIDMNIIDKIQEVSNNSAGQDKIIA

SEQ ID NO: 30974 - protein, 85 aa, unidentified
  REGION 1..85: note = Description of Unknown:vpeps_4AMQ_1 target sequence
DKIQEVSNNSAGQDKIIAWNTLLTQLYTNINKSVNKQSKKYFTRYINIIPKEDRKLCCLEEEHVLQSGGINFESTNFLTKKKLIY

SEQ ID NO: 30975 - protein, 85 aa, unidentified
  REGION 1..85: note = Description of Unknown:vpeps_4AMQ_1 target sequence
YKLERYIKNKILPKILVVPDRDKYQIKGSFRRRIPYITDIDIVNNVHPEYDDTNIYQRIVDLINSFTNDNQIKLIYVICGTDDRF

SEQ ID NO: 30976 - protein, 85 aa, unidentified
  REGION 1..85: note = Description of Unknown:vpeps_4AMQ_1 target sequence
LLTEYSDEEIEKIKILLNPTELVELNNVLSKYQDDLNKKVFYINEIIWDLYKLRWTSSEVLAGKKILRGGIEVSFQDVVKNNSIL

SEQ ID NO: 30977 - protein, 85 aa, unidentified
  REGION 1..85: note = Description of Unknown:vpeps_4AMQ_1 target sequence
LLQYFVKIEYYPIGFDIAVRYKPINLITAYQNAAFYQLKLANYSKEYYFMLFPLRFYFKNDPTISKQLEYIIETKFGLYKQLLVR

SEQ ID NO: 30978 - protein, 85 aa, unidentified
  REGION 1..85: note = Description of Unknown:vpeps_4AMQ_1 target sequence
IDSYRTIYESGNLDLDTAKSIIISIIKDIRKLNGIDMNIIDKIQEVSNNSAGQDKIIAWNTLLTQLYTNINKSVNKQSKKYFTRY

SEQ ID NO: 30979 - protein, 85 aa, unidentified
  REGION 1..85: note = Description of Unknown:cds_NZ_WFIY01000004.1_cds_1315 target sequence
VKLRVKVNYATYSALKEVEKEYREVLEEAVNYGLTKNTTSFIRIKAGIYKTEREKHRDLPSHYIYTACEDASERLDSFNKLKKRG

SEQ ID NO: 30980 - protein, 85 aa, unidentified
  REGION 1..85: note = Description of Unknown:cds_NZ_WFIY01000004.1_cds_1315 target sequence
RSYTDIPSVRRVTVHLDDHLWKFSLSVISIATKRGRVFISPIFPKIFWRYYNNGWLIASEARFKLLKGNVVEFFIVFKKDVKSYD

SEQ ID NO: 30981 - protein, 85 aa, unidentified
  REGION 1..85: note = Description of Unknown:cds_NZ_WFIY01000004.1_cds_1315 target sequence
PRGFIPVDLNENSVSVLVDGKPLLLETNTRMITLGYEYKRRSITNGRSTKDREVRRKLRKLRERDKKLDVRRKFAKLIVKEAFGS

SEQ ID NO: 30982 - protein, 85 aa, unidentified
  REGION 1..85: note = Description of Unknown:cds_NZ_WFIY01000004.1_cds_1315 target sequence
RSAIVLEDLPKRVPEHMVKGVKDKQLRLRIYRSAFSSMKNAIVEKAREFGVPVILVNPTYTSSICPVHGSKIIYQPDGGSAPRVG

SEQ ID NO: 30983 - protein, 84 aa, unidentified
  REGION 1..84: note = Description of Unknown:cds_NZ_WFIY01000004.1_cds_1315 target sequence
HGSKIIYQPDGGSAPRVGVCGKGGERWHRDVVALYNLRKRAGDVSPVPLGSKESHDPPVVKAGRWLRAKSLHLIMINKMSEMKV

SEQ ID NO: 30984 - protein, 85 aa, unidentified
  REGION 1..85: note = Description of Unknown:cds_NZ_WFIY01000004.1_cds_1315 target sequence
EAVNYGLTKNTTSFIRIKAGIYKTEREKHRDLPSHYIYTACEDASERLDSFNKLKKRGRSYTDIPSVRRVTVHLDDHLWKFSLSV

SEQ ID NO: 30985 - protein, 85 aa, unidentified
  REGION 1..85: note = Description of Unknown:cds_NZ_WFIY01000004.1_cds_1315 target sequence
ISIATKRGRVFISPIFPKIFWRYYNNGWLIASEARFKLLKGNVVEFFIVFKKDVKSYDPRGFIPVDLNENSVSVLVDGKPLLLET

SEQ ID NO: 30986 - protein, 85 aa, unidentified
  REGION 1..85: note = Description of Unknown:cds_NZ_WFIY01000004.1_cds_1315 target sequence
NTRMITLGYEYKRRSITNGRSTKDREVRRKLRKLRERDKKLDVRRKFAKLIVKEAFGSRSAIVLEDLPKRVPEHMVKGVKDKQLR

SEQ ID NO: 30987 - protein, 85 aa, unidentified
  REGION 1..85: note = Description of Unknown:cds_NZ_WFIY01000004.1_cds_1315 target sequence
LRIYRSAFSSMKNAIVEKAREFGVPVILVNPTYTSSICPVHGSKIIYQPDGGSAPRVGVCGKGGERWHRDVVALYNLRKRAGDVS

SEQ ID NO: 30988 - protein, 85 aa, unidentified
  REGION 1..85: note = Description of Unknown:cds_NC_024711.1_cds_YP_009052505.1_24 target sequence
NKLYRRNNNGVPTVWWAELDSGTNSITVFYGLVRGNIRKEVYAVTQKDGQKELESRYNDKIKKGYTYLDELCDMQGLPPVEDGDN

SEQ ID NO: 30989 - protein, 85 aa, unidentified
  REGION 1..85: note = Description of Unknown:cds_NC_024711.1_cds_YP_009052505.1_24 target sequence
DTLFNFLNTYLPKDLSNGNTNLLLPMLAKTYSGNVWKKVSCMYGQYKINGLRCIVTAYTQNDMFKPVRLRFQSREGLIWHTLGYL

SEQ ID NO: 30990 - protein, 85 aa, unidentified
  REGION 1..85: note = Description of Unknown:cds_NC_024711.1_cds_YP_009052505.1_24 target sequence
EDYLLATINTNIIDDMINGFAALDGEVYLPGYTINQINHFVKDANCIENKLLQFWCYDIMMEGDQAHRNMYRYHIKKPTSFNNIE

SEQ ID NO: 30991 - protein, 85 aa, unidentified
  REGION 1..85: note = Description of Unknown:cds_NC_024711.1_cds_YP_009052505.1_24 target sequence
EHYNNKEQLIILPSIYINNNDKAIKARNNFINIGFEGLILRNTETDYQYGRRRANYMEKFKDATEGDFIIIDIYKEKKRDLPILL

SEQ ID NO: 30992 - protein, 84 aa, unidentified
  REGION 1..84: note = Description of Unknown:cds_NC_024711.1_cds_YP_009052505.1_24 target sequence
GDFIIIDIYKEKKRDLPILLCKNDINDEKFETRLSTSHIVQQEVLFDSQSYIGRTVHIDYGERSGVTRVPSHIKNVVINGDTRL

SEQ ID NO: 30993 - protein, 85 aa, unidentified
  REGION 1..85: note = Description of Unknown:cds_NC_024711.1_cds_YP_009052505.1_24 target sequence
VFYGLVRGNIRKEVYAVTQKDGQKELESRYNDKIKKGYTYLDELCDMQGLPPVEDGDNDTLFNFLNTYLPKDLSNGNTNLLLPML

SEQ ID NO: 30994 - protein, 85 aa, unidentified
  REGION 1..85: note = Description of Unknown:cds_NC_024711.1_cds_YP_009052505.1_24 target sequence
AKTYSGNVWKKVSCMYGQYKINGLRCIVTAYTQNDMFKPVRLRFQSREGLIWHTLGYLEDYLLATINTNIIDDMINGFAALDGEV

SEQ ID NO: 30995 - protein, 85 aa, unidentified
  REGION 1..85: note = Description of Unknown:cds_NC_024711.1_cds_YP_009052505.1_24 target sequence
YLPGYTINQINHFVKDANCIENKLLQFWCYDIMMEGDQAHRNMYRYHIKKPTSFNNIEEHYNNKEQLIILPSIYINNNDKAIKAR

SEQ ID NO: 30996 - protein, 85 aa, unidentified
  REGION 1..85: note = Description of Unknown:cds_NC_024711.1_cds_YP_009052505.1_24 target sequence
NNFINIGFEGLILRNTETDYQYGRRRANYMEKFKDATEGDFIIIDIYKEKKRDLPILLCKNDINDEKFETRLSTSHIVQQEVLFD

SEQ ID NO: 30997 - protein, 85 aa, unidentified
  REGION 1..85: note = Description of Unknown:cds_NZ_WFIY01000004.1_cds_WP_155862930.1_783 target sequence
LQVVILAAGKGERLEPITHTRPKPFVPLLGSTLIERTINSIKERNIGNEILVVIPSDYPEEYKEFYSRLKDVKLVKQKTDYGTAS

SEQ ID NO: 30998 - protein, 85 aa, unidentified
  REGION 1..85: note = Description of Unknown:cds_NZ_WFIY01000004.1_cds_WP_155862930.1_783 target sequence
ALLSVRDEIKDEEFLLIYGDILVDENAIEKVSSAARNAILGVKVNNPRDFGVLNISEDGYLKNILEKPQNPPSNLINGGIYKLSS

SEQ ID NO: 30999 - protein, 85 aa, unidentified
  REGION 1..85: note = Description of Unknown:cds_NZ_WFIY01000004.1_cds_WP_155862930.1_783 target sequence
KIFEYIDKISKSVRGEYELTDAINLFSSENKIEIIKYDGLWMDIGKPWDIIDANKALLDIEKPRILGEVEDGVKIKGKVIIEEGA

SEQ ID NO: 31000 - protein, 85 aa, unidentified
  REGION 1..85: note = Description of Unknown:cds_NZ_WFIY01000004.1_cds_WP_155862930.1_783 target sequence
RVLHGTYIEGPVFIGKNSIIGPNSYLRPYTVLCGNNKIGASVEVKASVIMENTKVPHLSYVGDSVISEDVNFGAGTLVANLRFDE

SEQ ID NO: 31001 - protein, 84 aa, unidentified
  REGION 1..84: note = Description of Unknown:cds_NZ_WFIY01000004.1_cds_WP_155862930.1_783 target sequence
SEDVNFGAGTLVANLRFDEAEVKVFIKGERVSSGRKKLGTFIGAHVRTGINVSILPGVKIGAYAKIYPGAVVNRDVKKGEFYKG

SEQ ID NO: 31002 - protein, 85 aa, unidentified
  REGION 1..85: note = Description of Unknown:cds_NZ_WFIY01000004.1_cds_WP_155862930.1_783 target sequence
LLGSTLIERTINSIKERNIGNEILVVIPSDYPEEYKEFYSRLKDVKLVKQKTDYGTASALLSVRDEIKDEEFLLIYGDILVDENA

SEQ ID NO: 31003 - protein, 85 aa, unidentified
  REGION 1..85: note = Description of Unknown:cds_NZ_WFIY01000004.1_cds_WP_155862930.1_783 target sequence
IEKVSSAARNAILGVKVNNPRDFGVLNISEDGYLKNILEKPQNPPSNLINGGIYKLSSKIFEYIDKISKSVRGEYELTDAINLFS

SEQ ID NO: 31004 - protein, 85 aa, unidentified
  REGION 1..85: note = Description of Unknown:cds_NZ_WFIY01000004.1_cds_WP_155862930.1_783 target sequence
SENKIEIIKYDGLWMDIGKPWDIIDANKALLDIEKPRILGEVEDGVKIKGKVIIEEGARVLHGTYIEGPVFIGKNSIIGPNSYLR

SEQ ID NO: 31005 - protein, 85 aa, unidentified
  REGION 1..85: note = Description of Unknown:cds_NZ_WFIY01000004.1_cds_WP_155862930.1_783 target sequence
PYTVLCGNNKIGASVEVKASVIMENTKVPHLSYVGDSVISEDVNFGAGTLVANLRFDEAEVKVFIKGERVSSGRKKLGTFIGAHV

SEQ ID NO: 31006 - protein, 85 aa, unidentified
  REGION 1..85: note = Description of Unknown:cds_NZ_WFIY01000004.1_cds_WP_155862969.1_838 target sequence
TYIKYFDEIVKIRERISPYIHETPLDYSTTFSRMANSNVYLKLENLQKTGSFKVRGAFSKLLTLSDEEKKRGVIAVSAGNHAQGV

SEQ ID NO: 31007 - protein, 85 aa, unidentified
  REGION 1..85: note = Description of Unknown:cds_NZ_WFIY01000004.1_cds_WP_155862969.1_838 target sequence
AYASKVLGIKSVIVMPETAPISKYLSTKSYGAEVILYGSYLHESMSKAEEIIKERNLVLVHPYDDINVILGQGTLGLEILSQISP

SEQ ID NO: 31008 - protein, 85 aa, unidentified
  REGION 1..85: note = Description of Unknown:cds_NZ_WFIY01000004.1_cds_WP_155862969.1_838 target sequence
DVVVVPVGGGGLISGVSIALKAKNRNIKIIGVQSSASPSLKISKDLGRLTEIEPSYSIADGILVKTPSKLTFDIISELVDDIVLV

SEQ ID NO: 31009 - protein, 85 aa, unidentified
  REGION 1..85: note = Description of Unknown:cds_NZ_WFIY01000004.1_cds_WP_155862969.1_838 target sequence
DDDEIACAMSLLLERAKTLVEGAGAASLAAILSSKIKLNPSQKVVSILSGGNVDLSLLSHIIEKNLYKIKRIVKVKVIVPDKPGY

SEQ ID NO: 31010 - protein, 84 aa, unidentified
  REGION 1..84: note = Description of Unknown:cds_NZ_WFIY01000004.1_cds_WP_155862969.1_838 target sequence
LYKIKRIVKVKVIVPDKPGYLNKVLSYVAKIRGNIIDVVHDRISSDVKPGYTKIYVMFEISSTNAISELILDLAKEGIDAKIVD

SEQ ID NO: 31011 - protein, 85 aa, unidentified
  REGION 1..85: note = Description of Unknown:cds_NZ_WFIY01000004.1_cds_WP_155862969.1_838 target sequence
STTFSRMANSNVYLKLENLQKTGSFKVRGAFSKLLTLSDEEKKRGVIAVSAGNHAQGVAYASKVLGIKSVIVMPETAPISKYLST

SEQ ID NO: 31012 - protein, 85 aa, unidentified
  REGION 1..85: note = Description of Unknown:cds_NZ_WFIY01000004.1_cds_WP_155862969.1_838 target sequence
KSYGAEVILYGSYLHESMSKAEEIIKERNLVLVHPYDDINVILGQGTLGLEILSQISPDVVVVPVGGGGLISGVSIALKAKNRNI

SEQ ID NO: 31013 - protein, 85 aa, unidentified
  REGION 1..85: note = Description of Unknown:cds_NZ_WFIY01000004.1_cds_WP_155862969.1_838 target sequence
KIIGVQSSASPSLKISKDLGRLTEIEPSYSIADGILVKTPSKLTFDIISELVDDIVLVDDDEIACAMSLLLERAKTLVEGAGAAS

SEQ ID NO: 31014 - protein, 85 aa, unidentified
  REGION 1..85: note = Description of Unknown:cds_NZ_WFIY01000004.1_cds_WP_155862969.1_838 target sequence
LAAILSSKIKLNPSQKVVSILSGGNVDLSLLSHIIEKNLYKIKRIVKVKVIVPDKPGYLNKVLSYVAKIRGNIIDVVHDRISSDV

SEQ ID NO: 31015 - protein, 85 aa, unidentified
  REGION 1..85: note = Description of Unknown:cds_NZ_WFIY01000004.1_cds_WP_155864301.1_2295 target sequence
ITMRRNSLTTGRNELKFIKFFGPAWLVMMADMDASSIIGAAQTGALFKYGFIWIMLLLAIPLYIVQEVSGRIGIATGKGLGEVIR

SEQ ID NO: 31016 - protein, 85 aa, unidentified
  REGION 1..85: note = Description of Unknown:cds_NZ_WFIY01000004.1_cds_WP_155864301.1_2295 target sequence
ENYSKKLAILMALPMALTDAVTYAIEYLGIGIGLEVIGIPLILSIPLIYVVHIVIVTKRKYIQAERFLLLISAFLIISLFATLFL

SEQ ID NO: 31017 - protein, 85 aa, unidentified
  REGION 1..85: note = Description of Unknown:cds_NZ_WFIY01000004.1_cds_WP_155864301.1_2295 target sequence
RGIKPYSPFYFSPSPQFLFLMAATVGAVVMPFMLFFQASATAIKLKEIGYCKCKDTAIRHMRKETLLGAVFTEILMVVVEMAFAG

SEQ ID NO: 31018 - protein, 85 aa, unidentified
  REGION 1..85: note = Description of Unknown:cds_NZ_WFIY01000004.1_cds_WP_155864301.1_2295 target sequence
INVDPSTFASPQELSSVLTPLAGSLSPVIFGFGLISSGFLALVVISLGSAWGVAEALNVKNVNIIYIAESVPAVILTLLVPSANL

SEQ ID NO: 31019 - protein, 84 aa, unidentified
  REGION 1..84: note = Description of Unknown:cds_NZ_WFIY01000004.1_cds_WP_155864301.1_2295 target sequence
YIAESVPAVILTLLVPSANLVCIVLDLLVFFVYALIGPIIILGIISRNKKIMGEYASRGISYFAYWISSIILIIIAIISSLSSI

SEQ ID NO: 31020 - protein, 85 aa, unidentified
  REGION 1..85: note = Description of Unknown:cds_NZ_WFIY01000004.1_cds_WP_155864301.1_2295 target sequence
MMADMDASSIIGAAQTGALFKYGFIWIMLLLAIPLYIVQEVSGRIGIATGKGLGEVIRENYSKKLAILMALPMALTDAVTYAIEY

SEQ ID NO: 31021 - protein, 85 aa, unidentified
  REGION 1..85: note = Description of Unknown:cds_NZ_WFIY01000004.1_cds_WP_155864301.1_2295 target sequence
LGIGIGLEVIGIPLILSIPLIYVVHIVIVTKRKYIQAERFLLLISAFLIISLFATLFLRGIKPYSPFYFSPSPQFLFLMAATVGA

SEQ ID NO: 31022 - protein, 85 aa, unidentified
  REGION 1..85: note = Description of Unknown:cds_NZ_WFIY01000004.1_cds_WP_155864301.1_2295 target sequence
VVMPFMLFFQASATAIKLKEIGYCKCKDTAIRHMRKETLLGAVFTEILMVVVEMAFAGINVDPSTFASPQELSSVLTPLAGSLSP

SEQ ID NO: 31023 - protein, 85 aa, unidentified
  REGION 1..85: note = Description of Unknown:cds_NZ_WFIY01000004.1_cds_WP_155864301.1_2295 target sequence
VIFGFGLISSGFLALVVISLGSAWGVAEALNVKNVNIIYIAESVPAVILTLLVPSANLVCIVLDLLVFFVYALIGPIIILGIISR

SEQ ID NO: 31024 - protein, 85 aa, unidentified
  REGION 1..85: note = Description of Unknown:hvTR_P03191 target sequence
ETTQTLRFKTKALAVLSKCYDHAQTHLKGGVLQVNLLSVNYGGPRLAAVANAGTAGLISFEVSPDAVAEWQNHQSPEEAPAAVSF

SEQ ID NO: 31025 - protein, 85 aa, unidentified
  REGION 1..85: note = Description of Unknown:hvTR_P03191 target sequence
RNLAYGRTCVLGKELFGSAVEQASLQFYKRPQGGSRPEFVKLTMEYDDKVSKSHHTCALMPYMPPASDRLRNEQMIGQVLLMPKT

SEQ ID NO: 31026 - protein, 85 aa, unidentified
  REGION 1..85: note = Description of Unknown:hvTR_P03191 target sequence
ASSLQKWARQQGSGGVKVTLNPDLYVTTYTSGEACLTLDYKPLSVGPYEAFTGPVAKAQDVGAVEAHVVCSVAADSLAAALSLCR

SEQ ID NO: 31027 - protein, 85 aa, unidentified
  REGION 1..85: note = Description of Unknown:hvTR_P03191 target sequence
IPAVSVPILRFYRSGIIAVVAGLLTSAGDLPLDLSVILFNHASEEAAASTASEPEDKSPRVQPLGTGLQQRPRHTVSPSPSPPPP

SEQ ID NO: 31028 - protein, 84 aa, unidentified
  REGION 1..84: note = Description of Unknown:hvTR_P03191 target sequence
GTGLQQRPRHTVSPSPSPPPPPRTPTWESPARPETPSPAIPSHSSNTALERPLAVQLARKRTSSEARQKQKHPKKVKQAFNPLI

SEQ ID NO: 31029 - protein, 85 aa, unidentified
  REGION 1..85: note = Description of Unknown:hvTR_P03191 target sequence
KGGVLQVNLLSVNYGGPRLAAVANAGTAGLISFEVSPDAVAEWQNHQSPEEAPAAVSFRNLAYGRTCVLGKELFGSAVEQASLQF

SEQ ID NO: 31030 - protein, 85 aa, unidentified
  REGION 1..85: note = Description of Unknown:hvTR_P03191 target sequence
YKRPQGGSRPEFVKLTMEYDDKVSKSHHTCALMPYMPPASDRLRNEQMIGQVLLMPKTASSLQKWARQQGSGGVKVTLNPDLYVT

SEQ ID NO: 31031 - protein, 85 aa, unidentified
  REGION 1..85: note = Description of Unknown:hvTR_P03191 target sequence
TYTSGEACLTLDYKPLSVGPYEAFTGPVAKAQDVGAVEAHVVCSVAADSLAAALSLCRIPAVSVPILRFYRSGIIAVVAGLLTSA

SEQ ID NO: 31032 - protein, 85 aa, unidentified
  REGION 1..85: note = Description of Unknown:hvTR_P03191 target sequence
GDLPLDLSVILFNHASEEAAASTASEPEDKSPRVQPLGTGLQQRPRHTVSPSPSPPPPPRTPTWESPARPETPSPAIPSHSSNTA

SEQ ID NO: 31033 - protein, 85 aa, unidentified
  REGION 1..85: note = Description of Unknown:cds_NZ_WFIY01000004.1_cds_WP_155862834.1_663 target sequence
KAYDIISYLLEHAENGSIAALTTEDNIPILLTKNDEYSFTAYICTQDGEVKTIKKIFDKTTFHRAILDFIDEAEEYIGKEITDVK

SEQ ID NO: 31034 - protein, 85 aa, unidentified
  REGION 1..85: note = Description of Unknown:cds_NZ_WFIY01000004.1_cds_WP_155862834.1_663 target sequence
ISDVALFTNCIPKREERKPREKKDNLSDMIGELRKVSEPFYVVPLLSNQGKLIAYVPEIGATNYFNFMVNNVSIVNGKIEPASPD

SEQ ID NO: 31035 - protein, 85 aa, unidentified
  REGION 1..85: note = Description of Unknown:cds_NZ_WFIY01000004.1_cds_WP_155862834.1_663 target sequence
LKLLYLVLFTNKLDPHNGNPLTTLDNITFFTAVFIDNGDKGKGEFEGKSVNKRVGKFFLSTYKGGLRTEELEFFDLSSLNKGRLY

SEQ ID NO: 31036 - protein, 85 aa, unidentified
  REGION 1..85: note = Description of Unknown:cds_NZ_WFIY01000004.1_cds_WP_155862834.1_663 target sequence
AGLFVKKDEKILRIGGISLVDFHNSGKLEINEYLFASFSQSARNGILDFSNYDKLFSNFLNLAISKSDARSLLKDVIEIHSMMTD

SEQ ID NO: 31037 - protein, 84 aa, unidentified
  REGION 1..84: note = Description of Unknown:cds_NZ_WFIY01000004.1_cds_WP_155862834.1_663 target sequence
SKSDARSLLKDVIEIHSMMTDMPFTLQNANNKISIVDPISFWYYSIKGEDIRECNDCPLKDKVNLRKEIFNTLRRRGWLNAFFI

SEQ ID NO: 31038 - protein, 85 aa, unidentified
  REGION 1..85: note = Description of Unknown:cds_NZ_WFIY01000004.1_cds_WP_155862834.1_663 target sequence
PILLTKNDEYSFTAYICTQDGEVKTIKKIFDKTTFHRAILDFIDEAEEYIGKEITDVKISDVALFTNCIPKREERKPREKKDNLS

SEQ ID NO: 31039 - protein, 85 aa, unidentified
  REGION 1..85: note = Description of Unknown:cds_NZ_WFIY01000004.1_cds_WP_155862834.1_663 target sequence
DMIGELRKVSEPFYVVPLLSNQGKLIAYVPEIGATNYFNFMVNNVSIVNGKIEPASPDLKLLYLVLFTNKLDPHNGNPLTTLDNI

SEQ ID NO: 31040 - protein, 85 aa, unidentified
  REGION 1..85: note = Description of Unknown:cds_NZ_WFIY01000004.1_cds_WP_155862834.1_663 target sequence
TFFTAVFIDNGDKGKGEFEGKSVNKRVGKFFLSTYKGGLRTEELEFFDLSSLNKGRLYAGLFVKKDEKILRIGGISLVDFHNSGK

SEQ ID NO: 31041 - protein, 85 aa, unidentified
  REGION 1..85: note = Description of Unknown:cds_NZ_WFIY01000004.1_cds_WP_155862834.1_663 target sequence
LEINEYLFASFSQSARNGILDFSNYDKLFSNFLNLAISKSDARSLLKDVIEIHSMMTDMPFTLQNANNKISIVDPISFWYYSIKG

SEQ ID NO: 31042 - protein, 85 aa, unidentified
  REGION 1..85: note = Description of Unknown:cds_NZ_WFIY01000004.1_cds_WP_155864431.1_1452 target sequence
LESLYKAIEDQKDFIISLYKEFIPIKALGPENGGEGEYSRAMKLKEIMEKYFDEVKEIDVKDERVPSKVRPNLIGTIKGRDQSKT

SEQ ID NO: 31043 - protein, 85 aa, unidentified
  REGION 1..85: note = Description of Unknown:cds_NZ_WFIY01000004.1_cds_WP_155864431.1_1452 target sequence
LWIIAHMDTVPEGDRSLWKFDPFDVTVEGDYIYGRGVEDDGQAIVLGITLAKVLKELNLTPNINFSLLISADEETGSKYGVSYLA

SEQ ID NO: 31044 - protein, 85 aa, unidentified
  REGION 1..85: note = Description of Unknown:cds_NZ_WFIY01000004.1_cds_WP_155864431.1_1452 target sequence
KNYSLFNKDDIILIPDAGNPEGSMIEVAEKSILWLKFTVIGKQAHASTPEKGINAHLLSMILGVTLYEELHEKYDAKNELFEPPT

SEQ ID NO: 31045 - protein, 85 aa, unidentified
  REGION 1..85: note = Description of Unknown:cds_NZ_WFIY01000004.1_cds_WP_155864431.1_1452 target sequence
STFEITKVEKNVENVNTIPGKHTFYMDCRILPQYDVDDVLNTINEIVKRFEAENNCKVEVEVVNREDTTRPTDENSDTVKLLKNA

SEQ ID NO: 31046 - protein, 84 aa, unidentified
  REGION 1..84: note = Description of Unknown:cds_NZ_WFIY01000004.1_cds_WP_155864431.1_1452 target sequence
EDTTRPTDENSDTVKLLKNAIKAVKGIDAKAIGIGGGTYAKYLRSLGLNPVVWMTCDETAHEPNEYVRISYILSDLKVISYMLM

SEQ ID NO: 31047 - protein, 85 aa, unidentified
  REGION 1..85: note = Description of Unknown:cds_NZ_WFIY01000004.1_cds_WP_155864431.1_1452 target sequence
LGPENGGEGEYSRAMKLKEIMEKYFDEVKEIDVKDERVPSKVRPNLIGTIKGRDQSKTLWIIAHMDTVPEGDRSLWKFDPFDVTV

SEQ ID NO: 31048 - protein, 85 aa, unidentified
  REGION 1..85: note = Description of Unknown:cds_NZ_WFIY01000004.1_cds_WP_155864431.1_1452 target sequence
EGDYIYGRGVEDDGQAIVLGITLAKVLKELNLTPNINFSLLISADEETGSKYGVSYLAKNYSLFNKDDIILIPDAGNPEGSMIEV

SEQ ID NO: 31049 - protein, 85 aa, unidentified
  REGION 1..85: note = Description of Unknown:cds_NZ_WFIY01000004.1_cds_WP_155864431.1_1452 target sequence
AEKSILWLKFTVIGKQAHASTPEKGINAHLLSMILGVTLYEELHEKYDAKNELFEPPTSTFEITKVEKNVENVNTIPGKHTFYMD

SEQ ID NO: 31050 - protein, 85 aa, unidentified
  REGION 1..85: note = Description of Unknown:cds_NZ_WFIY01000004.1_cds_WP_155864431.1_1452 target sequence
CRILPQYDVDDVLNTINEIVKRFEAENNCKVEVEVVNREDTTRPTDENSDTVKLLKNAIKAVKGIDAKAIGIGGGTYAKYLRSLG

SEQ ID NO: 31051 - protein, 48 aa, unidentified
  REGION 1..48: note = Description of Unknown:cds_NZ_WFIY01000004.1_cds_2170 target sequence
NILAIGNMFNLSGASVHIINVLKELAKMGNEVTLYVPSFLVKEDYNVF

SEQ ID NO: 31052 - protein, 4 aa, unidentified
  REGION 1..4: note = Description of Unknown:cds_NZ_WFIY01000004.1_cds_2170 target sequence
GGII

SEQ ID NO: 31053 - protein, 22 aa, unidentified
  REGION 1..22: note = Description of Unknown:cds_NZ_WFIY01000004.1_cds_2170 target sequence
ARRNFEGYSFRFQSSSLFVKYR

SEQ ID NO: 31054 - protein, 63 aa, unidentified
  REGION 1..63: note = Description of Unknown:cds_NZ_WFIY01000004.1_cds_2170 target sequence
GKFFNERDKRLLIGNHKIEYRGYRPIEGLYDTVSRAKVLIYSSRWIFLSSLRYFSFRYVNCSL

SEQ ID NO: 31055 - protein, 14 aa, unidentified
  REGION 1..14: note = Description of Unknown:cds_NZ_WFIY01000004.1_cds_2170 target sequence
YPCNKVSLFWVETS

SEQ ID NO: 31056 - protein, 21 aa, unidentified
  REGION 1..21: note = Description of Unknown:cds_NZ_WFIY01000004.1_cds_2170 target sequence
MGNEVTLYVPSFLVKEDYNVF

SEQ ID NO: 31057 - protein, 5 aa, unidentified
  REGION 1..5: note = Description of Unknown:cds_NZ_WFIY01000004.1_cds_2170 target sequence
CMKIV

SEQ ID NO: 31058 - protein, 6 aa, unidentified
  REGION 1..6: note = Description of Unknown:cds_NZ_WFIY01000004.1_cds_2170 target sequence
VNIMLN

SEQ ID NO: 31059 - protein, 36 aa, unidentified
  REGION 1..36: note = Description of Unknown:cds_NZ_WFIY01000004.1_cds_2170 target sequence
GLYDTVSRAKVLIYSSRWIFLSSLRYFSFRYVNCSL

SEQ ID NO: 31060 - protein, 85 aa, unidentified
  REGION 1..85: note = Description of Unknown:cds_NZ_WFIY01000004.1_cds_WP_155863093.1_1006 target sequence
KNIVVEPARIQDINSLPVELVERKGTGHPDYIADSASEEASRKLSLYYLKKFGTILHHNLDKTLVVGGQAQPEFKGGEVIQPIYI

SEQ ID NO: 31061 - protein, 85 aa, unidentified
  REGION 1..85: note = Description of Unknown:cds_NZ_WFIY01000004.1_cds_WP_155863093.1_1006 target sequence
IVAGRATTEVRTEDGIQNVPVGTIIVESVKNWIKNNFRYLDPEKHVIVDYKVGKGSADLVGIFNKGKTVPLSNDTSFGVGFAPFS

SEQ ID NO: 31062 - protein, 85 aa, unidentified
  REGION 1..85: note = Description of Unknown:cds_NZ_WFIY01000004.1_cds_WP_155863093.1_1006 target sequence
TLEELVYQTERMLNSKEVKSELPEIGEDIKVMGLRKGKEIDLTVAMSTISQLIDDTNHYLAVKEEAKQKILDLASRLAPDYKVNV

SEQ ID NO: 31063 - protein, 85 aa, unidentified
  REGION 1..85: note = Description of Unknown:cds_NZ_WFIY01000004.1_cds_WP_155863093.1_1006 target sequence
YINTGDRVDQGILYLTVTGTSAEHGDDGMTGRGNRGVGLITPMRPMSLEATAGKNPVNHVGKIYNVMAMLISKKIIEETKIRNVQ

SEQ ID NO: 31064 - protein, 84 aa, unidentified
  REGION 1..84: note = Description of Unknown:cds_NZ_WFIY01000004.1_cds_WP_155863093.1_1006 target sequence
YNVMAMLISKKIIEETKIRNVQVEVLGQIGRPINDPLVVNVEVSTENGKISDDLKNEINGIVDEYLESFSKITELILNGKVSMF

SEQ ID NO: 31065 - protein, 85 aa, unidentified
  REGION 1..85: note = Description of Unknown:cds_NZ_WFIY01000004.1_cds_WP_155863093.1_1006 target sequence
HPDYIADSASEEASRKLSLYYLKKFGTILHHNLDKTLVVGGQAQPEFKGGEVIQPIYIIVAGRATTEVRTEDGIQNVPVGTIIVE

SEQ ID NO: 31066 - protein, 85 aa, unidentified
  REGION 1..85: note = Description of Unknown:cds_NZ_WFIY01000004.1_cds_WP_155863093.1_1006 target sequence
SVKNWIKNNFRYLDPEKHVIVDYKVGKGSADLVGIFNKGKTVPLSNDTSFGVGFAPFSTLEELVYQTERMLNSKEVKSELPEIGE

SEQ ID NO: 31067 - protein, 85 aa, unidentified
  REGION 1..85: note = Description of Unknown:cds_NZ_WFIY01000004.1_cds_WP_155863093.1_1006 target sequence
DIKVMGLRKGKEIDLTVAMSTISQLIDDTNHYLAVKEEAKQKILDLASRLAPDYKVNVYINTGDRVDQGILYLTVTGTSAEHGDD

SEQ ID NO: 31068 - protein, 85 aa, unidentified
  REGION 1..85: note = Description of Unknown:cds_NZ_WFIY01000004.1_cds_WP_155863093.1_1006 target sequence
GMTGRGNRGVGLITPMRPMSLEATAGKNPVNHVGKIYNVMAMLISKKIIEETKIRNVQVEVLGQIGRPINDPLVVNVEVSTENGK

SEQ ID NO: 31069 - protein, 85 aa, unidentified
  REGION 1..85: note = Description of Unknown:cds_NZ_WFIY01000004.1_cds_WP_155863993.1_1918 target sequence
PDDFGFKYLLISRIFRSIGLIFVTISSPLYLKALGYSPLLIGLVFSAVVGFTAILSLSLGFLGDRKGYKKSLMIAEGISTLGVLL

SEQ ID NO: 31070 - protein, 85 aa, unidentified
  REGION 1..85: note = Description of Unknown:cds_NZ_WFIY01000004.1_cds_WP_155863993.1_1918 target sequence
LVITPTSSFTLLALSLMLAGITGSATGMRGLFSPGLTALVATNWKEDFERVRKIGLLSSVASLSSIGGSLMLTFMDYLPFGKIGN

SEQ ID NO: 31071 - protein, 85 aa, unidentified
  REGION 1..85: note = Description of Unknown:cds_NZ_WFIY01000004.1_cds_WP_155863993.1_1918 target sequence
YKFLFFISFISLILSFTFLLFVKENREKRRIKKEKIMKKSSLKYVSKVILSNSIGAVGIGMSIPLLSLWFSLFYHATDSEIGEIF

SEQ ID NO: 31072 - protein, 85 aa, unidentified
  REGION 1..85: note = Description of Unknown:cds_NZ_WFIY01000004.1_cds_WP_155863993.1_1918 target sequence
TLNYVFMSLGSFLATRIKGNILRLASLTRIMNGVFLIVMALSPYLFLAGLMYILRGLNAGFGAPNRTAVNIKGISPEDYGTASSL

SEQ ID NO: 31073 - protein, 84 aa, unidentified
  REGION 1..84: note = Description of Unknown:cds_NZ_WFIY01000004.1_cds_WP_155863993.1_1918 target sequence
PNRTAVNIKGISPEDYGTASSLQGLATRFSQMSSSIGGYLMEINLPLPLEIGGLLQAISGIIYLKLFRKDVEERSIDAETKTVQ

SEQ ID NO: 31074 - protein, 85 aa, unidentified
  REGION 1..85: note = Description of Unknown:cds_NZ_WFIY01000004.1_cds_WP_155863993.1_1918 target sequence
PLYLKALGYSPLLIGLVFSAVVGFTAILSLSLGFLGDRKGYKKSLMIAEGISTLGVLLLVITPTSSFTLLALSLMLAGITGSATG

SEQ ID NO: 31075 - protein, 85 aa, unidentified
  REGION 1..85: note = Description of Unknown:cds_NZ_WFIY01000004.1_cds_WP_155863993.1_1918 target sequence
MRGLFSPGLTALVATNWKEDFERVRKIGLLSSVASLSSIGGSLMLTFMDYLPFGKIGNYKFLFFISFISLILSFTFLLFVKENRE

SEQ ID NO: 31076 - protein, 85 aa, unidentified
  REGION 1..85: note = Description of Unknown:cds_NZ_WFIY01000004.1_cds_WP_155863993.1_1918 target sequence
KRRIKKEKIMKKSSLKYVSKVILSNSIGAVGIGMSIPLLSLWFSLFYHATDSEIGEIFTLNYVFMSLGSFLATRIKGNILRLASL

SEQ ID NO: 31077 - protein, 85 aa, unidentified
  REGION 1..85: note = Description of Unknown:cds_NZ_WFIY01000004.1_cds_WP_155863993.1_1918 target sequence
TRIMNGVFLIVMALSPYLFLAGLMYILRGLNAGFGAPNRTAVNIKGISPEDYGTASSLQGLATRFSQMSSSIGGYLMEINLPLPL

SEQ ID NO: 31078 - protein, 85 aa, unidentified
  REGION 1..85: note = Description of Unknown:cds_NC_030656.1_cds_YP_009268777.1_62 target sequence
IDEQRASCLYSTISSSIVRSVTKGIIKNPNSLEKLARSVYNCDAAKRDQLLSALYAKIEADISVSDTLTLLTILKRLKPHSAYVY

SEQ ID NO: 31079 - protein, 85 aa, unidentified
  REGION 1..85: note = Description of Unknown:cds_NC_030656.1_cds_YP_009268777.1_62 target sequence
NLNEFDRLYCSLMRFTHCNSFFNVFQHTVNSTLSVLITLILSNQLFYAADIVESVENYLFNTQKPLSVELFELLQMKYALINLVQ

SEQ ID NO: 31080 - protein, 85 aa, unidentified
  REGION 1..85: note = Description of Unknown:cds_NC_030656.1_cds_YP_009268777.1_62 target sequence
YKMFPVILGKPVQVIGGSPIHDNVAESTQIEVEKMIDMPIKCDAINDMYKFLAEKGIAASINQAEFMAGLKIQEVQDLATTVETA

SEQ ID NO: 31081 - protein, 85 aa, unidentified
  REGION 1..85: note = Description of Unknown:cds_NC_030656.1_cds_YP_009268777.1_62 target sequence
LQTQPVQQIARRPSPQLSIQQNQAQLYNQQQQILNTAKDFNDGKILNGRVTSPLGNAENTSEFIKLSDSELTKYSILEYLYAIRV

SEQ ID NO: 31082 - protein, 84 aa, unidentified
  REGION 1..84: note = Description of Unknown:cds_NC_030656.1_cds_YP_009268777.1_62 target sequence
IKLSDSELTKYSILEYLYAIRVLANAIKTRSLACASKGITVNINSPFKSLTVPQKISDTLSKVPAKSVQTCAITNQRQQQFIRP

SEQ ID NO: 31083 - protein, 85 aa, unidentified
  REGION 1..85: note = Description of Unknown:cds_NC_030656.1_cds_YP_009268777.1_62 target sequence
NPNSLEKLARSVYNCDAAKRDQLLSALYAKIEADISVSDTLTLLTILKRLKPHSAYVYNLNEFDRLYCSLMRFTHCNSFFNVFQH

SEQ ID NO: 31084 - protein, 85 aa, unidentified
  REGION 1..85: note = Description of Unknown:cds_NC_030656.1_cds_YP_009268777.1_62 target sequence
TVNSTLSVLITLILSNQLFYAADIVESVENYLFNTQKPLSVELFELLQMKYALINLVQYKMFPVILGKPVQVIGGSPIHDNVAES

SEQ ID NO: 31085 - protein, 85 aa, unidentified
  REGION 1..85: note = Description of Unknown:cds_NC_030656.1_cds_YP_009268777.1_62 target sequence
TQIEVEKMIDMPIKCDAINDMYKFLAEKGIAASINQAEFMAGLKIQEVQDLATTVETALQTQPVQQIARRPSPQLSIQQNQAQLY

SEQ ID NO: 31086 - protein, 85 aa, unidentified
  REGION 1..85: note = Description of Unknown:cds_NC_030656.1_cds_YP_009268777.1_62 target sequence
NQQQQILNTAKDFNDGKILNGRVTSPLGNAENTSEFIKLSDSELTKYSILEYLYAIRVLANAIKTRSLACASKGITVNINSPFKS

SEQ ID NO: 31087 - protein, 85 aa, unidentified
  REGION 1..85: note = Description of Unknown:cds_NZ_WFIY01000004.1_cds_WP_170283901.1_1027 target sequence
AKWSKFLSKDTALLKTSEIRDLLKLTEGKNVISLAGGLPDPSTFPAEDIKNITDYVLQNYASRALQYSATAGIPELRKELVNLSS

SEQ ID NO: 31088 - protein, 85 aa, unidentified
  REGION 1..85: note = Description of Unknown:cds_NZ_WFIY01000004.1_cds_WP_170283901.1_1027 target sequence
QRGITGINENNIFVTVGSQEALFILFNIFVDPGDHVFVEMPSYLAALNILRARNPQFHGIPLTEKGPDLDKFEEELRRLKAEGKS

SEQ ID NO: 31089 - protein, 85 aa, unidentified
  REGION 1..85: note = Description of Unknown:cds_NZ_WFIY01000004.1_cds_WP_170283901.1_1027 target sequence
PKLLYIIPTAQNPGGTTLDMEGRKRVLELASQYDFLIVEDDAYGFLVFEGESPAPIKALDKEGRVIYTGTFSKILAPGFRLGWIV

SEQ ID NO: 31090 - protein, 85 aa, unidentified
  REGION 1..85: note = Description of Unknown:cds_NZ_WFIY01000004.1_cds_WP_170283901.1_1027 target sequence
ADEEIIHNVELYKQNVDLHTPSFTQFIAAEAIKRNVIQNNIPKVRQLYREKRDVMLQAIEEYFPKDASWSKPVGGMFVFAWLPEK

SEQ ID NO: 31091 - protein, 84 aa, unidentified
  REGION 1..84: note = Description of Unknown:cds_NZ_WFIY01000004.1_cds_WP_170283901.1_1027 target sequence
FPKDASWSKPVGGMFVFAWLPEKIDALNMLPKALERGVAYVPGSSFYYDYSGRNTMRLNFSFPPKEKLVEGIRILGQVIKEELA

SEQ ID NO: 31092 - protein, 85 aa, unidentified
  REGION 1..85: note = Description of Unknown:cds_NZ_WFIY01000004.1_cds_WP_170283901.1_1027 target sequence
GKNVISLAGGLPDPSTFPAEDIKNITDYVLQNYASRALQYSATAGIPELRKELVNLSSQRGITGINENNIFVTVGSQEALFILFN

SEQ ID NO: 31093 - protein, 85 aa, unidentified
  REGION 1..85: note = Description of Unknown:cds_NZ_WFIY01000004.1_cds_WP_170283901.1_1027 target sequence
IFVDPGDHVFVEMPSYLAALNILRARNPQFHGIPLTEKGPDLDKFEEELRRLKAEGKSPKLLYIIPTAQNPGGTTLDMEGRKRVL

SEQ ID NO: 31094 - protein, 85 aa, unidentified
  REGION 1..85: note = Description of Unknown:cds_NZ_WFIY01000004.1_cds_WP_170283901.1_1027 target sequence
ELASQYDFLIVEDDAYGFLVFEGESPAPIKALDKEGRVIYTGTFSKILAPGFRLGWIVADEEIIHNVELYKQNVDLHTPSFTQFI

SEQ ID NO: 31095 - protein, 85 aa, unidentified
  REGION 1..85: note = Description of Unknown:cds_NZ_WFIY01000004.1_cds_WP_170283901.1_1027 target sequence
AAEAIKRNVIQNNIPKVRQLYREKRDVMLQAIEEYFPKDASWSKPVGGMFVFAWLPEKIDALNMLPKALERGVAYVPGSSFYYDY

SEQ ID NO: 31096 - protein, 85 aa, unidentified
  REGION 1..85: note = Description of Unknown:cds_NZ_WFIY01000004.1_cds_WP_155863299.1_1257 target sequence
LAIKGKLFNGEKIIDEGVVLIEEGKIVKVGKDVDTSGVKVIEGEFITPGLIDAHVHFFGVSNDNVLEWNITSEGLSTARSVSDMI

SEQ ID NO: 31097 - protein, 85 aa, unidentified
  REGION 1..85: note = Description of Unknown:cds_NZ_WFIY01000004.1_cds_WP_155863299.1_1257 target sequence
RLLSAGFTTVRDLGSKSAVYLSKAEKEGTIIGPRVIASGYSIAETGGNDDPKDLPLEMAQRLSYSFYCDSPWECRKAVRLAIRQG

SEQ ID NO: 31098 - protein, 85 aa, unidentified
  REGION 1..85: note = Description of Unknown:cds_NZ_WFIY01000004.1_cds_WP_155863299.1_1257 target sequence
AGVIKVYASGAFSQGGKVKVALTVDDLKAVVDEAHKAGLKVASHAYGEEAIANSIEAGVDTIEHGLGLTESLAKEIKRKGICYIP

SEQ ID NO: 31099 - protein, 85 aa, unidentified
  REGION 1..85: note = Description of Unknown:cds_NZ_WFIY01000004.1_cds_WP_155863299.1_1257 target sequence
TLAAYDVNPKISKLDEEIREKREELIRRHFTDDMKIAVEYELKIAAGTDYVGSAERPHGMNYKEIVLLSKYMPLEKALSSATSIA

SEQ ID NO: 31100 - protein, 84 aa, unidentified
  REGION 1..84: note = Description of Unknown:cds_NZ_WFIY01000004.1_cds_WP_155863299.1_1257 target sequence
KEIVLLSKYMPLEKALSSATSIAGECLGINAGKLKEAYIADIAIFGKVNSAEDLNPFNVKYTIRKGRLYDSKVLRDLFWDTIKR

SEQ ID NO: 31101 - protein, 85 aa, unidentified
  REGION 1..85: note = Description of Unknown:cds_NZ_WFIY01000004.1_cds_WP_155863299.1_1257 target sequence
KVGKDVDTSGVKVIEGEFITPGLIDAHVHFFGVSNDNVLEWNITSEGLSTARSVSDMIRLLSAGFTTVRDLGSKSAVYLSKAEKE

SEQ ID NO: 31102 - protein, 85 aa, unidentified
  REGION 1..85: note = Description of Unknown:cds_NZ_WFIY01000004.1_cds_WP_155863299.1_1257 target sequence
GTIIGPRVIASGYSIAETGGNDDPKDLPLEMAQRLSYSFYCDSPWECRKAVRLAIRQGAGVIKVYASGAFSQGGKVKVALTVDDL

SEQ ID NO: 31103 - protein, 85 aa, unidentified
  REGION 1..85: note = Description of Unknown:cds_NZ_WFIY01000004.1_cds_WP_155863299.1_1257 target sequence
KAVVDEAHKAGLKVASHAYGEEAIANSIEAGVDTIEHGLGLTESLAKEIKRKGICYIPTLAAYDVNPKISKLDEEIREKREELIR

SEQ ID NO: 31104 - protein, 85 aa, unidentified
  REGION 1..85: note = Description of Unknown:cds_NZ_WFIY01000004.1_cds_WP_155863299.1_1257 target sequence
RHFTDDMKIAVEYELKIAAGTDYVGSAERPHGMNYKEIVLLSKYMPLEKALSSATSIAGECLGINAGKLKEAYIADIAIFGKVNS

SEQ ID NO: 31105 - protein, 85 aa, unidentified
  REGION 1..85: note = Description of Unknown:cds_NZ_WFIY01000004.1_cds_WP_155862688.1_486 target sequence
AGIVGILAFDKIWNISKFMKYSLMGLQHRGYSSSGYAILNDKISSGHFSSPPEDIEINEHGWAGIGYTGSKGEYPMVFDDVALVI

SEQ ID NO: 31106 - protein, 85 aa, unidentified
  REGION 1..85: note = Description of Unknown:cds_NZ_WFIY01000004.1_cds_WP_155862688.1_486 target sequence
DGVIKEDPKLVADKILSSPEGLKDVRGAFSLIALTSEGKIIAYRDESGLKPLAIGGFGFDMAIIASEMTAMSVIGGEFRREINPG

SEQ ID NO: 31107 - protein, 85 aa, unidentified
  REGION 1..85: note = Description of Unknown:cds_NZ_WFIY01000004.1_cds_WP_155862688.1_486 target sequence
EMIILDKYNIESKKLKEPRKSYCSIEYIYQARIDSFVNEKSIYELRIRIGEELARERPIDADTVIGVPDTAIPFAIGYSRVTGIP

SEQ ID NO: 31108 - protein, 85 aa, unidentified
  REGION 1..85: note = Description of Unknown:cds_NZ_WFIY01000004.1_cds_WP_155862688.1_486 target sequence
LDLGFTRTGSPIRTMLASNDFMKIVGVQLKLNVIKSAVFGKRVILIDDSMVTGTTLKNTIFSLRKMGAKEVHVLIGSPKLISYCP

SEQ ID NO: 31109 - protein, 84 aa, unidentified
  REGION 1..84: note = Description of Unknown:cds_NZ_WFIY01000004.1_cds_WP_155862688.1_486 target sequence
SLRKMGAKEVHVLIGSPKLISYCPYGVEVPQSSELIAANLSEEEIAKVLGADSIYWLSIDGLYKVIGSKQLCLGCMLNSYPKVI

SEQ ID NO: 31110 - protein, 85 aa, unidentified
  REGION 1..85: note = Description of Unknown:cds_NZ_WFIY01000004.1_cds_WP_155862688.1_486 target sequence
HRGYSSSGYAILNDKISSGHFSSPPEDIEINEHGWAGIGYTGSKGEYPMVFDDVALVIDGVIKEDPKLVADKILSSPEGLKDVRG

SEQ ID NO: 31111 - protein, 85 aa, unidentified
  REGION 1..85: note = Description of Unknown:cds_NZ_WFIY01000004.1_cds_WP_155862688.1_486 target sequence
AFSLIALTSEGKIIAYRDESGLKPLAIGGFGFDMAIIASEMTAMSVIGGEFRREINPGEMIILDKYNIESKKLKEPRKSYCSIEY

SEQ ID NO: 31112 - protein, 85 aa, unidentified
  REGION 1..85: note = Description of Unknown:cds_NZ_WFIY01000004.1_cds_WP_155862688.1_486 target sequence
IYQARIDSFVNEKSIYELRIRIGEELARERPIDADTVIGVPDTAIPFAIGYSRVTGIPLDLGFTRTGSPIRTMLASNDFMKIVGV

SEQ ID NO: 31113 - protein, 85 aa, unidentified
  REGION 1..85: note = Description of Unknown:cds_NZ_WFIY01000004.1_cds_WP_155862688.1_486 target sequence
QLKLNVIKSAVFGKRVILIDDSMVTGTTLKNTIFSLRKMGAKEVHVLIGSPKLISYCPYGVEVPQSSELIAANLSEEEIAKVLGA

SEQ ID NO: 31114 - protein, 85 aa, unidentified
  REGION 1..85: note = Description of Unknown:cds_NZ_WFIY01000004.1_cds_WP_155862929.1_782 target sequence
ITVGLIGKTNVGKSTFFSAATLVDVEIANRPFVTIEPNVGMAYVKTLCVHNEFKVKCSPRNSICIGDYRFIPIKLVDVAGLIPGA

SEQ ID NO: 31115 - protein, 85 aa, unidentified
  REGION 1..85: note = Description of Unknown:cds_NZ_WFIY01000004.1_cds_WP_155862929.1_782 target sequence
HEGRGLGNKFLDDLRKADVLIHVIDASGSTNEEGVPVEPGSRDPEEDIKFVEDEINEWFISIIKKDWEKFARVTDLGNKDPIDAL

SEQ ID NO: 31116 - protein, 85 aa, unidentified
  REGION 1..85: note = Description of Unknown:cds_NZ_WFIY01000004.1_cds_WP_155862929.1_782 target sequence
LSKLSGLSINREQIIQSLKESKLENVKFMQWSEEDIRRFGITLRQISKPIVIAANKDDIPIARKNIDRLKEKYKFLIPTSAEAEL

SEQ ID NO: 31117 - protein, 85 aa, unidentified
  REGION 1..85: note = Description of Unknown:cds_NZ_WFIY01000004.1_cds_WP_155862929.1_782 target sequence
ALRKAAKNGLIDYIPGEKEFKIKTSNLPEKQRKALDYIKTNVLDVYGNTGVQQAINEAVFGALNMITVFPVEDERKLTDRNGNVL

SEQ ID NO: 31118 - protein, 84 aa, unidentified
  REGION 1..84: note = Description of Unknown:cds_NZ_WFIY01000004.1_cds_WP_155862929.1_782 target sequence
ALNMITVFPVEDERKLTDRNGNVLPDAILIKKGSTPKDLAAVIHSDLAKGFLYAIDARKKIRVGENYQLQDRDVIKIVSSLAHG

SEQ ID NO: 31119 - protein, 85 aa, unidentified
  REGION 1..85: note = Description of Unknown:cds_NZ_WFIY01000004.1_cds_WP_155862929.1_782 target sequence
ANRPFVTIEPNVGMAYVKTLCVHNEFKVKCSPRNSICIGDYRFIPIKLVDVAGLIPGAHEGRGLGNKFLDDLRKADVLIHVIDAS

SEQ ID NO: 31120 - protein, 85 aa, unidentified
  REGION 1..85: note = Description of Unknown:cds_NZ_WFIY01000004.1_cds_WP_155862929.1_782 target sequence
GSTNEEGVPVEPGSRDPEEDIKFVEDEINEWFISIIKKDWEKFARVTDLGNKDPIDALLSKLSGLSINREQIIQSLKESKLENVK

SEQ ID NO: 31121 - protein, 85 aa, unidentified
  REGION 1..85: note = Description of Unknown:cds_NZ_WFIY01000004.1_cds_WP_155862929.1_782 target sequence
FMQWSEEDIRRFGITLRQISKPIVIAANKDDIPIARKNIDRLKEKYKFLIPTSAEAELALRKAAKNGLIDYIPGEKEFKIKTSNL

SEQ ID NO: 31122 - protein, 85 aa, unidentified
  REGION 1..85: note = Description of Unknown:cds_NZ_WFIY01000004.1_cds_WP_155862929.1_782 target sequence
PEKQRKALDYIKTNVLDVYGNTGVQQAINEAVFGALNMITVFPVEDERKLTDRNGNVLPDAILIKKGSTPKDLAAVIHSDLAKGF

SEQ ID NO: 31123 - protein, 85 aa, unidentified
  REGION 1..85: note = Description of Unknown:cds_NZ_WFIY01000004.1_cds_WP_155864409.1_1160 target sequence
IIQLSEAKKYLPEDYVISHEVTEEEKEGENKIEIELLNDFKPVVEPLSFSQEFNSIASLDSSTRYLRDISVNLVILGMSIYSNRK

SEQ ID NO: 31124 - protein, 85 aa, unidentified
  REGION 1..85: note = Description of Unknown:cds_NZ_WFIY01000004.1_cds_WP_155864409.1_1160 target sequence
GFIDFPITKEIPYIGVNTYRKILDKISTGMNFIKMKNEINYPFDENYKLDDVADEMRTEAENIGLSEVIIDHDLVILDGPIYPTP

SEQ ID NO: 31125 - protein, 85 aa, unidentified
  REGION 1..85: note = Description of Unknown:cds_NZ_WFIY01000004.1_cds_WP_155864409.1_1160 target sequence
LELTEELDLSSTSRLCHQLAYASLVNKRISLLRDNVIGVVKRLENSGKLWKDEKIMDEFKKRGKNIKGLKDPTILELIDYEFCRK

SEQ ID NO: 31126 - protein, 85 aa, unidentified
  REGION 1..85: note = Description of Unknown:cds_NZ_WFIY01000004.1_cds_WP_155864409.1_1160 target sequence
SGRHSYACIIGPFKIDYNLHVEGPKDCHKADGNTTYLSNVPAKYAYYVILRKPYVPTTYFRIEGLNKDFLERGMRTALSRLSNRL

SEQ ID NO: 31127 - protein, 84 aa, unidentified
  REGION 1..84: note = Description of Unknown:cds_NZ_WFIY01000004.1_cds_WP_155864409.1_1160 target sequence
IEGLNKDFLERGMRTALSRLSNRLIPTFIELVDNRAKRISAGLFITAYEVASSYLSIIHDDKLAYDTMVLEFLTGSQQNLTNLL

SEQ ID NO: 31128 - protein, 85 aa, unidentified
  REGION 1..85: note = Description of Unknown:cds_NZ_WFIY01000004.1_cds_WP_155864409.1_1160 target sequence
GENKIEIELLNDFKPVVEPLSFSQEFNSIASLDSSTRYLRDISVNLVILGMSIYSNRKGFIDFPITKEIPYIGVNTYRKILDKIS

SEQ ID NO: 31129 - protein, 85 aa, unidentified
  REGION 1..85: note = Description of Unknown:cds_NZ_WFIY01000004.1_cds_WP_155864409.1_1160 target sequence
TGMNFIKMKNEINYPFDENYKLDDVADEMRTEAENIGLSEVIIDHDLVILDGPIYPTPLELTEELDLSSTSRLCHQLAYASLVNK

SEQ ID NO: 31130 - protein, 85 aa, unidentified
  REGION 1..85: note = Description of Unknown:cds_NZ_WFIY01000004.1_cds_WP_155864409.1_1160 target sequence
RISLLRDNVIGVVKRLENSGKLWKDEKIMDEFKKRGKNIKGLKDPTILELIDYEFCRKSGRHSYACIIGPFKIDYNLHVEGPKDC

SEQ ID NO: 31131 - protein, 85 aa, unidentified
  REGION 1..85: note = Description of Unknown:cds_NZ_WFIY01000004.1_cds_WP_155864409.1_1160 target sequence
HKADGNTTYLSNVPAKYAYYVILRKPYVPTTYFRIEGLNKDFLERGMRTALSRLSNRLIPTFIELVDNRAKRISAGLFITAYEVA

SEQ ID NO: 31132 - protein, 85 aa, unidentified
  REGION 1..85: note = Description of Unknown:cds_NZ_WFIY01000004.1_cds_WP_155863291.1_1248 target sequence
IPRISENELWNRLNNLRKKMTELNLDAIYLTNLSNIFYLTNLYILSTERPFVLVIPKDGEITLISPLLEKDHIETMNKIIGRKYF

SEQ ID NO: 31133 - protein, 85 aa, unidentified
  REGION 1..85: note = Description of Unknown:cds_NZ_WFIY01000004.1_cds_WP_155863291.1_1248 target sequence
YFDFPGEPHVILFIRDTILDLAKEYNIKRLGMDNLAGAPSYWGYYGPLLSEILSKNGIEITSIKDLIEEMRIIKGEEEINLIKMS

SEQ ID NO: 31134 - protein, 85 aa, unidentified
  REGION 1..85: note = Description of Unknown:cds_NZ_WFIY01000004.1_cds_WP_155863291.1_1248 target sequence
GYWASKAIEIAMNYIKPGKYDWEISFEASLEASKKIKEYFGEDYKPIKSIYPLVVGFRGQVGEYSAFPHVLSTYRRIKEGDILGI

SEQ ID NO: 31135 - protein, 85 aa, unidentified
  REGION 1..85: note = Description of Unknown:cds_NZ_WFIY01000004.1_cds_WP_155863291.1_1248 target sequence
GSGPDIGGYSAELERTLFVKYANDAHKSMYEKMMKLRETALNAIEPYGNIKDVDKAVREKAKELGVQEYLRHHVGHGLGIEVHER

SEQ ID NO: 31136 - protein, 84 aa, unidentified
  REGION 1..84: note = Description of Unknown:cds_NZ_WFIY01000004.1_cds_WP_155863291.1_1248 target sequence
KELGVQEYLRHHVGHGLGIEVHERPFIDIGYDGKFLPGMVFSVEPGIYVPGLGGYRHSDTVLVRENGIELLTKFPDNLEELTIK

SEQ ID NO: 31137 - protein, 85 aa, unidentified
  REGION 1..85: note = Description of Unknown:cds_NZ_WFIY01000004.1_cds_WP_155863291.1_1248 target sequence
IYLTNLSNIFYLTNLYILSTERPFVLVIPKDGEITLISPLLEKDHIETMNKIIGRKYFYFDFPGEPHVILFIRDTILDLAKEYNI

SEQ ID NO: 31138 - protein, 85 aa, unidentified
  REGION 1..85: note = Description of Unknown:cds_NZ_WFIY01000004.1_cds_WP_155863291.1_1248 target sequence
KRLGMDNLAGAPSYWGYYGPLLSEILSKNGIEITSIKDLIEEMRIIKGEEEINLIKMSGYWASKAIEIAMNYIKPGKYDWEISFE

SEQ ID NO: 31139 - protein, 85 aa, unidentified
  REGION 1..85: note = Description of Unknown:cds_NZ_WFIY01000004.1_cds_WP_155863291.1_1248 target sequence
ASLEASKKIKEYFGEDYKPIKSIYPLVVGFRGQVGEYSAFPHVLSTYRRIKEGDILGIGSGPDIGGYSAELERTLFVKYANDAHK

SEQ ID NO: 31140 - protein, 85 aa, unidentified
  REGION 1..85: note = Description of Unknown:cds_NZ_WFIY01000004.1_cds_WP_155863291.1_1248 target sequence
SMYEKMMKLRETALNAIEPYGNIKDVDKAVREKAKELGVQEYLRHHVGHGLGIEVHERPFIDIGYDGKFLPGMVFSVEPGIYVPG

SEQ ID NO: 31141 - protein, 85 aa, unidentified
  REGION 1..85: note = Description of Unknown:cds_NZ_WFIY01000004.1_cds_WP_155864174.1_2132 target sequence
FEIERRECEEIRNLKGWRLIYGRRKVGKTYLATRCLEYDDYYLISRTLNIIHENDEIPLDDGINKIISLLKEGKKIILDEFQRLP

SEQ ID NO: 31142 - protein, 85 aa, unidentified
  REGION 1..85: note = Description of Unknown:cds_NZ_WFIY01000004.1_cds_WP_155864174.1_2132 target sequence
EKYLDLLATVYPNGTLILLASSLGVLSKVIDRNSPLLGYVIPYKMGIIKFSDALASVKDPYKALLFRDPWIIEHASDWSDIERNP

SEQ ID NO: 31143 - protein, 85 aa, unidentified
  REGION 1..85: note = Description of Unknown:cds_NZ_WFIY01000004.1_cds_WP_155864174.1_2132 target sequence
QSFYYITKGLIGEIFQEEDRKLTQTYEAILLEVAEGMWNSSMISAKLQAGMDINPSKASSYLDTLFKVGLIKKIRVYKGGKGSEW

SEQ ID NO: 31144 - protein, 85 aa, unidentified
  REGION 1..85: note = Description of Unknown:cds_NZ_WFIY01000004.1_cds_WP_155864174.1_2132 target sequence
YHDLDSPIMSVTFYAEAKYKVSEKGNKIVDLTYPISKEIQFSIGEMLAEYYNAELAYIPQGDIDVVLLKKGKPFIAYEVKNKFTE

SEQ ID NO: 31145 - protein, 84 aa, unidentified
  REGION 1..84: note = Description of Unknown:cds_NZ_WFIY01000004.1_cds_WP_155864174.1_2132 target sequence
GDIDVVLLKKGKPFIAYEVKNKFTEKDARKAIERIKDFGISRAGLVGVLEDPPNSEDSIGPERLIEIANEIKKREHNKGSVSLW

SEQ ID NO: 31146 - protein, 85 aa, unidentified
  REGION 1..85: note = Description of Unknown:cds_NZ_WFIY01000004.1_cds_WP_155864174.1_2132 target sequence
KTYLATRCLEYDDYYLISRTLNIIHENDEIPLDDGINKIISLLKEGKKIILDEFQRLPEKYLDLLATVYPNGTLILLASSLGVLS

SEQ ID NO: 31147 - protein, 85 aa, unidentified
  REGION 1..85: note = Description of Unknown:cds_NZ_WFIY01000004.1_cds_WP_155864174.1_2132 target sequence
KVIDRNSPLLGYVIPYKMGIIKFSDALASVKDPYKALLFRDPWIIEHASDWSDIERNPQSFYYITKGLIGEIFQEEDRKLTQTYE

SEQ ID NO: 31148 - protein, 85 aa, unidentified
  REGION 1..85: note = Description of Unknown:cds_NZ_WFIY01000004.1_cds_WP_155864174.1_2132 target sequence
AILLEVAEGMWNSSMISAKLQAGMDINPSKASSYLDTLFKVGLIKKIRVYKGGKGSEWYHDLDSPIMSVTFYAEAKYKVSEKGNK

SEQ ID NO: 31149 - protein, 85 aa, unidentified
  REGION 1..85: note = Description of Unknown:cds_NZ_WFIY01000004.1_cds_WP_155864174.1_2132 target sequence
IVDLTYPISKEIQFSIGEMLAEYYNAELAYIPQGDIDVVLLKKGKPFIAYEVKNKFTEKDARKAIERIKDFGISRAGLVGVLEDP

SEQ ID NO: 31150 - protein, 85 aa, unidentified
  REGION 1..85: note = Description of Unknown:hvTR_P22044 target sequence
SFEISVEEIEELIETGNLNIDHALKELGATSQSSLNKPPSQSSRTEGNDGGTKISRNPAPVEAPAHTSTAQRSHNEENESGRQNL

SEQ ID NO: 31151 - protein, 85 aa, unidentified
  REGION 1..85: note = Description of Unknown:hvTR_P22044 target sequence
DSLSMISNKPQTGTLLMGSDTQLPSPSKTYQGLILDAKKRALNEPRRDQKITNEHGSMNDTRIFKRGGNIDTRKEAWVTQNQRSR

SEQ ID NO: 31152 - protein, 85 aa, unidentified
  REGION 1..85: note = Description of Unknown:hvTR_P22044 target sequence
TQPPLQDIEESTRFHGLTEEPQYPSGAIHAAHQSNQLPLSKNAHVEDVPKFANYASEILDAIKALEVRLDRIEGKVDKIMLTQNT

SEQ ID NO: 31153 - protein, 85 aa, unidentified
  REGION 1..85: note = Description of Unknown:hvTR_P22044 target sequence
IQQTKNDTQQIKGSLATIEGLITTMKIMDPGVPSKVSLRSLNKESEQVPIIVTGNGDVSKFVDQDNTITLDSLARPILSGTKQKT

SEQ ID NO: 31154 - protein, 84 aa, unidentified
  REGION 1..84: note = Description of Unknown:hvTR_P22044 target sequence
KFVDQDNTITLDSLARPILSGTKQKTDERRAGVRIDALKITVSEMIRDLFGDCDKSKKLLESINMATTEQDINLIKTNALRSIT

SEQ ID NO: 31155 - protein, 85 aa, unidentified
  REGION 1..85: note = Description of Unknown:hvTR_P22044 target sequence
GATSQSSLNKPPSQSSRTEGNDGGTKISRNPAPVEAPAHTSTAQRSHNEENESGRQNLDSLSMISNKPQTGTLLMGSDTQLPSPS

SEQ ID NO: 31156 - protein, 85 aa, unidentified
  REGION 1..85: note = Description of Unknown:hvTR_P22044 target sequence
KTYQGLILDAKKRALNEPRRDQKITNEHGSMNDTRIFKRGGNIDTRKEAWVTQNQRSRTQPPLQDIEESTRFHGLTEEPQYPSGA

SEQ ID NO: 31157 - protein, 85 aa, unidentified
  REGION 1..85: note = Description of Unknown:hvTR_P22044 target sequence
IHAAHQSNQLPLSKNAHVEDVPKFANYASEILDAIKALEVRLDRIEGKVDKIMLTQNTIQQTKNDTQQIKGSLATIEGLITTMKI

SEQ ID NO: 31158 - protein, 85 aa, unidentified
  REGION 1..85: note = Description of Unknown:hvTR_P22044 target sequence
MDPGVPSKVSLRSLNKESEQVPIIVTGNGDVSKFVDQDNTITLDSLARPILSGTKQKTDERRAGVRIDALKITVSEMIRDLFGDC

SEQ ID NO: 31159 - protein, 85 aa, unidentified
  REGION 1..85: note = Description of Unknown:hvTR_P21738 target sequence
SFEISVEEIDELIETGNLNIDYALKELGATSQPPPNRPLSQISKTEENNDETRTSKNSASAEAPAHASSPLRSHNEESEPGKQSS

SEQ ID NO: 31160 - protein, 85 aa, unidentified
  REGION 1..85: note = Description of Unknown:hvTR_P21738 target sequence
DGFSMISNRPQTGMLLMGSDTQSPSPSKTYQGLILDAKKRALNEPRRNQKTTNEHGNTNDTWIFKRGGNIATKKEAWVTQNQRSK

SEQ ID NO: 31161 - protein, 85 aa, unidentified
  REGION 1..85: note = Description of Unknown:hvTR_P21738 target sequence
IQSSFQDIEESTRFHGSMEEPQYQSGAIHVAHQSNQLPPSKNVHVEDVPKFANYALEILDAIKALEVRLDRIEGKVDKIMLTQNT

SEQ ID NO: 31162 - protein, 85 aa, unidentified
  REGION 1..85: note = Description of Unknown:hvTR_P21738 target sequence
IQQTKNDTQQIKGSLATIEGLITTMKIMDPGVPSKVSLRSLNKGPEQVPIIVTGTGDVSKFVDQDNTITLDPLARPILSGTKQIT

SEQ ID NO: 31163 - protein, 84 aa, unidentified
  REGION 1..84: note = Description of Unknown:hvTR_P21738 target sequence
KFVDQDNTITLDPLARPILSGTKQITDERRAGVRIDALKITVSEMIRDLFGDCDKSRKLLESINMATTEQDINSIKTNALRSIT

SEQ ID NO: 31164 - protein, 85 aa, unidentified
  REGION 1..85: note = Description of Unknown:hvTR_P21738 target sequence
GATSQPPPNRPLSQISKTEENNDETRTSKNSASAEAPAHASSPLRSHNEESEPGKQSSDGFSMISNRPQTGMLLMGSDTQSPSPS

SEQ ID NO: 31165 - protein, 85 aa, unidentified
  REGION 1..85: note = Description of Unknown:hvTR_P21738 target sequence
KTYQGLILDAKKRALNEPRRNQKTTNEHGNTNDTWIFKRGGNIATKKEAWVTQNQRSKIQSSFQDIEESTRFHGSMEEPQYQSGA

SEQ ID NO: 31166 - protein, 85 aa, unidentified
  REGION 1..85: note = Description of Unknown:hvTR_P21738 target sequence
IHVAHQSNQLPPSKNVHVEDVPKFANYALEILDAIKALEVRLDRIEGKVDKIMLTQNTIQQTKNDTQQIKGSLATIEGLITTMKI

SEQ ID NO: 31167 - protein, 85 aa, unidentified
  REGION 1..85: note = Description of Unknown:hvTR_P21738 target sequence
MDPGVPSKVSLRSLNKGPEQVPIIVTGTGDVSKFVDQDNTITLDPLARPILSGTKQITDERRAGVRIDALKITVSEMIRDLFGDC

SEQ ID NO: 31168 - protein, 85 aa, unidentified
  REGION 1..85: note = Description of Unknown:cds_NZ_WFIY01000004.1_cds_WP_155863278.1_1234 target sequence
ILGNLKTIDGRTISIEINENIISKVYYDKKLGKDLEGRLVIPGFVDSHAHIDSNFLLDVCEPVESTKFIEVLERLVECKENLSVD

SEQ ID NO: 31169 - protein, 85 aa, unidentified
  REGION 1..85: note = Description of Unknown:cds_NZ_WFIY01000004.1_cds_WP_155863278.1_1234 target sequence
QIYSLSKKSIEYYLLNGSLFVRTHIRINGKKGLERLKIANKLKKEYNNLIHLQIIGFFESENYFDEDSKELIYKAIEVSVDGLGA

SEQ ID NO: 31170 - protein, 85 aa, unidentified
  REGION 1..85: note = Description of Unknown:cds_NZ_WFIY01000004.1_cds_WP_155863278.1_1234 target sequence
EPHLQPSLEDRKRLIKFLFDAAIENKLKLDFHADYSDDPNSRVSEIIVSEALKRGIKGVSLSHLVSLHSYNQDYAERLMKWMKNA

SEQ ID NO: 31171 - protein, 85 aa, unidentified
  REGION 1..85: note = Description of Unknown:cds_NZ_WFIY01000004.1_cds_WP_155863278.1_1234 target sequence
DVNVIVAPITELEESGSFENYPKKRGLPRVNELLEHGINVAIGHNDIQNHFNPLGIGDMLHAIFTLAISDYMFFPTQIEKLFYMA

SEQ ID NO: 31172 - protein, 84 aa, unidentified
  REGION 1..84: note = Description of Unknown:cds_NZ_WFIY01000004.1_cds_WP_155863278.1_1234 target sequence
LHAIFTLAISDYMFFPTQIEKLFYMATYNGAKALQLEKYGMAENMPANLVILDAKSPIDAVRKSSPARLVISNGKLVHSGGISL

SEQ ID NO: 31173 - protein, 85 aa, unidentified
  REGION 1..85: note = Description of Unknown:cds_NZ_WFIY01000004.1_cds_WP_155863278.1_1234 target sequence
DKKLGKDLEGRLVIPGFVDSHAHIDSNFLLDVCEPVESTKFIEVLERLVECKENLSVDQIYSLSKKSIEYYLLNGSLFVRTHIRI

SEQ ID NO: 31174 - protein, 85 aa, unidentified
  REGION 1..85: note = Description of Unknown:cds_NZ_WFIY01000004.1_cds_WP_155863278.1_1234 target sequence
NGKKGLERLKIANKLKKEYNNLIHLQIIGFFESENYFDEDSKELIYKAIEVSVDGLGAEPHLQPSLEDRKRLIKFLFDAAIENKL

SEQ ID NO: 31175 - protein, 85 aa, unidentified
  REGION 1..85: note = Description of Unknown:cds_NZ_WFIY01000004.1_cds_WP_155863278.1_1234 target sequence
KLDFHADYSDDPNSRVSEIIVSEALKRGIKGVSLSHLVSLHSYNQDYAERLMKWMKNADVNVIVAPITELEESGSFENYPKKRGL

SEQ ID NO: 31176 - protein, 85 aa, unidentified
  REGION 1..85: note = Description of Unknown:cds_NZ_WFIY01000004.1_cds_WP_155863278.1_1234 target sequence
PRVNELLEHGINVAIGHNDIQNHFNPLGIGDMLHAIFTLAISDYMFFPTQIEKLFYMATYNGAKALQLEKYGMAENMPANLVILD

SEQ ID NO: 31177 - protein, 85 aa, unidentified
  REGION 1..85: note = Description of Unknown:cds_NZ_WFIY01000004.1_cds_WP_155863659.1_1538 target sequence
SERPVSNYVGSYISWIMDSYDLGAVVITSTLLEKLFYPTLGTLGAVLPIVFTVLFRPLGGFIFGYIADKYGRKRTLIFTVLGYSL

SEQ ID NO: 31178 - protein, 85 aa, unidentified
  REGION 1..85: note = Description of Unknown:cds_NZ_WFIY01000004.1_cds_WP_155863659.1_1538 target sequence
SIGITSILPTYYQIGILASILLSLLRILQGIFIGGDVSSSFTTAMESVRKMRGLFGGIMQSGTLVGFVVVDLLFAYFASIPNLAA

SEQ ID NO: 31179 - protein, 85 aa, unidentified
  REGION 1..85: note = Description of Unknown:cds_NZ_WFIY01000004.1_cds_WP_155863659.1_1538 target sequence
DSWRYIFAIGVLPAALAVFIRSRMTEPKIYVESKKDDPIKGLKPLRQTILVMIGFWIMIYAGPQFAPVFFGEYIHLTQAEIGKYA

SEQ ID NO: 31180 - protein, 85 aa, unidentified
  REGION 1..85: note = Description of Unknown:cds_NZ_WFIY01000004.1_cds_WP_155863659.1_1538 target sequence
FYMNLAGIPAMIIAGGISDFLGRKFTGIGYVLLATIGAGIFYFSGFSLFTVILFGFLINFPSALTPAYLAERFKTFSRATGVGFS

SEQ ID NO: 31181 - protein, 84 aa, unidentified
  REGION 1..84: note = Description of Unknown:cds_NZ_WFIY01000004.1_cds_WP_155863659.1_1538 target sequence
FPSALTPAYLAERFKTFSRATGVGFSYNGAFIAAGFSQLFISLVSARLPLNASAFSILTLGSIIAILGLALGPETLKNNELTMY

SEQ ID NO: 31182 - protein, 85 aa, unidentified
  REGION 1..85: note = Description of Unknown:cds_NZ_WFIY01000004.1_cds_WP_155863659.1_1538 target sequence
TSTLLEKLFYPTLGTLGAVLPIVFTVLFRPLGGFIFGYIADKYGRKRTLIFTVLGYSLSIGITSILPTYYQIGILASILLSLLRI

SEQ ID NO: 31183 - protein, 85 aa, unidentified
  REGION 1..85: note = Description of Unknown:cds_NZ_WFIY01000004.1_cds_WP_155863659.1_1538 target sequence
LQGIFIGGDVSSSFTTAMESVRKMRGLFGGIMQSGTLVGFVVVDLLFAYFASIPNLAADSWRYIFAIGVLPAALAVFIRSRMTEP

SEQ ID NO: 31184 - protein, 85 aa, unidentified
  REGION 1..85: note = Description of Unknown:cds_NZ_WFIY01000004.1_cds_WP_155863659.1_1538 target sequence
KIYVESKKDDPIKGLKPLRQTILVMIGFWIMIYAGPQFAPVFFGEYIHLTQAEIGKYAFYMNLAGIPAMIIAGGISDFLGRKFTG

SEQ ID NO: 31185 - protein, 85 aa, unidentified
  REGION 1..85: note = Description of Unknown:cds_NZ_WFIY01000004.1_cds_WP_155863659.1_1538 target sequence
IGYVLLATIGAGIFYFSGFSLFTVILFGFLINFPSALTPAYLAERFKTFSRATGVGFSYNGAFIAAGFSQLFISLVSARLPLNAS

SEQ ID NO: 31186 - protein, 85 aa, unidentified
  REGION 1..85: note = Description of Unknown:cds_NZ_WFIY01000004.1_cds_WP_155864217.1_2185 target sequence
KIISGNEAVALAVKLARVGVVGIYPITPQTSIIEKLAEMKANGELDAEIIRVESEHAAMASTFGAAIAGVRAFTATSSQGLLYMH

SEQ ID NO: 31187 - protein, 85 aa, unidentified
  REGION 1..85: note = Description of Unknown:cds_NZ_WFIY01000004.1_cds_WP_155864217.1_2185 target sequence
EMTWWVAGSRVPVVMVVATRAVGAPWNIWDENTDFMSERDSGWLMAFASNPQEALDLTLQAFRISEDERVYLPMMVGMDGFILSH

SEQ ID NO: 31188 - protein, 85 aa, unidentified
  REGION 1..85: note = Description of Unknown:cds_NZ_WFIY01000004.1_cds_WP_155864217.1_2185 target sequence
MKTNVNIPSQDDVDLFLPSRKQPFVLDSESPVGMGNIFPPIEYMKLRHSIHEAILHSEEVIRKVGIEYQKITGINNYSTLNVKYK

SEQ ID NO: 31189 - protein, 85 aa, unidentified
  REGION 1..85: note = Description of Unknown:cds_NZ_WFIY01000004.1_cds_WP_155864217.1_2185 target sequence
LDDADYAVVLMGAWAGDAMEAIDELRKQGLSVGLYRIRYIRPWSEEEITLALKDKKAILVIDRATSMGRGGPLYLELKSTLHHEQ

SEQ ID NO: 31190 - protein, 84 aa, unidentified
  REGION 1..84: note = Description of Unknown:cds_NZ_WFIY01000004.1_cds_WP_155864217.1_2185 target sequence
VIDRATSMGRGGPLYLELKSTLHHEQMCGVISGLGGVLLNKGDFKEIISRFVERAKQGNAKGITWYYPKGGEKIELKSPRYVEE

SEQ ID NO: 31191 - protein, 85 aa, unidentified
  REGION 1..85: note = Description of Unknown:cds_NZ_WFIY01000004.1_cds_WP_155864217.1_2185 target sequence
PQTSIIEKLAEMKANGELDAEIIRVESEHAAMASTFGAAIAGVRAFTATSSQGLLYMHEMTWWVAGSRVPVVMVVATRAVGAPWN

SEQ ID NO: 31192 - protein, 85 aa, unidentified
  REGION 1..85: note = Description of Unknown:cds_NZ_WFIY01000004.1_cds_WP_155864217.1_2185 target sequence
IWDENTDFMSERDSGWLMAFASNPQEALDLTLQAFRISEDERVYLPMMVGMDGFILSHMKTNVNIPSQDDVDLFLPSRKQPFVLD

SEQ ID NO: 31193 - protein, 85 aa, unidentified
  REGION 1..85: note = Description of Unknown:cds_NZ_WFIY01000004.1_cds_WP_155864217.1_2185 target sequence
SESPVGMGNIFPPIEYMKLRHSIHEAILHSEEVIRKVGIEYQKITGINNYSTLNVKYKLDDADYAVVLMGAWAGDAMEAIDELRK

SEQ ID NO: 31194 - protein, 85 aa, unidentified
  REGION 1..85: note = Description of Unknown:cds_NZ_WFIY01000004.1_cds_WP_155864217.1_2185 target sequence
QGLSVGLYRIRYIRPWSEEEITLALKDKKAILVIDRATSMGRGGPLYLELKSTLHHEQMCGVISGLGGVLLNKGDFKEIISRFVE

SEQ ID NO: 31195 - protein, 85 aa, unidentified
  REGION 1..85: note = Description of Unknown:hvTR_C7B7D5 target sequence
NQSDLTERLDALQTALMNIYEEAPTDLPSQIRHFDLLRKQSVLEYYVRKEGYTQLGLYHIPTLKVSEYHAKEAIKMGIVLRSLQK

SEQ ID NO: 31196 - protein, 85 aa, unidentified
  REGION 1..85: note = Description of Unknown:hvTR_C7B7D5 target sequence
SPYADEEWSLQDVNADFFNSPPRNCFKKGGYDVEVWFDHNPLNTFPYTNWTWIYYQDDEENWHKVQGETDYNGLFYRETDGTVVY

SEQ ID NO: 31197 - protein, 85 aa, unidentified
  REGION 1..85: note = Description of Unknown:hvTR_C7B7D5 target sequence
FLLFESDAARYGTKNEWTVNVKNEQISLPANSNGRRSSSGTPTHSTTNSVAEPGPSRSTEEADGRRTPQAQTQSVGASKKPSSVG

SEQ ID NO: 31198 - protein, 85 aa, unidentified
  REGION 1..85: note = Description of Unknown:hvTR_C7B7D5 target sequence
RRRRRKQGKQTPSKRRRTGGGSGDEADSGGISAEEVGSSHRSVARSGLSRLERLQKEARDPYIILVRGPQNTLKCWRYRIQTKAN

SEQ ID NO: 31199 - protein, 84 aa, unidentified
  REGION 1..84: note = Description of Unknown:hvTR_C7B7D5 target sequence
RDPYIILVRGPQNTLKCWRYRIQTKANFPFLYISTVWKWVTKDAVGHEGRVLIAFLSKESRDLFANSVHFPKNTTHSYGSLDAL

SEQ ID NO: 31200 - protein, 85 aa, unidentified
  REGION 1..85: note = Description of Unknown:hvTR_C7B7D5 target sequence
PSQIRHFDLLRKQSVLEYYVRKEGYTQLGLYHIPTLKVSEYHAKEAIKMGIVLRSLQKSPYADEEWSLQDVNADFFNSPPRNCFK

SEQ ID NO: 31201 - protein, 85 aa, unidentified
  REGION 1..85: note = Description of Unknown:hvTR_C7B7D5 target sequence
KGGYDVEVWFDHNPLNTFPYTNWTWIYYQDDEENWHKVQGETDYNGLFYRETDGTVVYFLLFESDAARYGTKNEWTVNVKNEQIS

SEQ ID NO: 31202 - protein, 85 aa, unidentified
  REGION 1..85: note = Description of Unknown:hvTR_C7B7D5 target sequence
LPANSNGRRSSSGTPTHSTTNSVAEPGPSRSTEEADGRRTPQAQTQSVGASKKPSSVGRRRRRKQGKQTPSKRRRTGGGSGDEAD

SEQ ID NO: 31203 - protein, 85 aa, unidentified
  REGION 1..85: note = Description of Unknown:hvTR_C7B7D5 target sequence
SGGISAEEVGSSHRSVARSGLSRLERLQKEARDPYIILVRGPQNTLKCWRYRIQTKANFPFLYISTVWKWVTKDAVGHEGRVLIA

SEQ ID NO: 31204 - protein, 85 aa, unidentified
  REGION 1..85: note = Description of Unknown:vpeps_5YET_1 target sequence
EVATYEDLISHKHDYPKEIYKESHYIRRNTRLDVIKKIPQFEQKSKEWLKQRTESLTATAISVVFDEDPYKHPIVILLDKCGRGL

SEQ ID NO: 31205 - protein, 85 aa, unidentified
  REGION 1..85: note = Description of Unknown:vpeps_5YET_1 target sequence
PFVENKFVHHGNKYEQIGTMFYSFRNNVEVGEYGLLQHSGHKFIAASPDGICSKKANTGGLSKLVGRLLEIKFPFSREINNSGDL

SEQ ID NO: 31206 - protein, 85 aa, unidentified
  REGION 1..85: note = Description of Unknown:vpeps_5YET_1 target sequence
DGDICPHYYFLQVQTQLYVTEMDECDFLQCKIDEYDSWEDFVKDSNPIVPGLSKTTNLEKGCLIQLSDKNLIGSDDKEKCLYNSK

SEQ ID NO: 31207 - protein, 85 aa, unidentified
  REGION 1..85: note = Description of Unknown:vpeps_5YET_1 target sequence
YIYPPKLHMTNEEIEKWISSEIMNYHNNDLSENYMIDRVIYWRLSQVTCNLIKLNKEAFEEKIPLLQQFWDYVLFYRQHSDKLDK

SEQ ID NO: 31208 - protein, 85 aa, unidentified
  REGION 1..85: note = Description of Unknown:vpeps_5YET_1 target sequence
EEKIPLLQQFWDYVLFYRQHSDKLDKLIKFVEKVKEDNSAEIFSYINEDFLSLNKDSKYEPLYQEETEWRKKYNQIKAKKAQMYK

SEQ ID NO: 31209 - protein, 85 aa, unidentified
  REGION 1..85: note = Description of Unknown:vpeps_5YET_1 target sequence
RNTRLDVIKKIPQFEQKSKEWLKQRTESLTATAISVVFDEDPYKHPIVILLDKCGRGLPFVENKFVHHGNKYEQIGTMFYSFRNN

SEQ ID NO: 31210 - protein, 85 aa, unidentified
  REGION 1..85: note = Description of Unknown:vpeps_5YET_1 target sequence
VEVGEYGLLQHSGHKFIAASPDGICSKKANTGGLSKLVGRLLEIKFPFSREINNSGDLDGDICPHYYFLQVQTQLYVTEMDECDF

SEQ ID NO: 31211 - protein, 85 aa, unidentified
  REGION 1..85: note = Description of Unknown:vpeps_5YET_1 target sequence
LQCKIDEYDSWEDFVKDSNPIVPGLSKTTNLEKGCLIQLSDKNLIGSDDKEKCLYNSKYIYPPKLHMTNEEIEKWISSEIMNYHN

SEQ ID NO: 31212 - protein, 85 aa, unidentified
  REGION 1..85: note = Description of Unknown:vpeps_5YET_1 target sequence
NDLSENYMIDRVIYWRLSQVTCNLIKLNKEAFEEKIPLLQQFWDYVLFYRQHSDKLDKLIKFVEKVKEDNSAEIFSYINEDFLSL

SEQ ID NO: 31213 - protein, 85 aa, unidentified
  REGION 1..85: note = Description of Unknown:cds_NZ_WFIY01000004.1_cds_WP_155862495.1_254 target sequence
SFSQAIGNLTGESTLLYQEIARRVEKEKGIKTINFGIGQPDVVTFKRIREEAKKALDEGYTGYTPAKGIDELRQKIADFLSQKYG

SEQ ID NO: 31214 - protein, 85 aa, unidentified
  REGION 1..85: note = Description of Unknown:cds_NZ_WFIY01000004.1_cds_WP_155862495.1_254 target sequence
DIIKKDEVIITPGAKTALFLAFLLYINPGDEVILFDPAFYSYAEVVKLLGGKPVYVNINFNKEKGFYIDIDDLNSKITVKTKMIV

SEQ ID NO: 31215 - protein, 85 aa, unidentified
  REGION 1..85: note = Description of Unknown:cds_NZ_WFIY01000004.1_cds_WP_155862495.1_254 target sequence
LNNPHNPTGMVFEPKQIIEIQEIAKERKIILLSDEIYDYFIYEGEMRSVLQDSGWRDYVIYINGFSKTFSMTGWRLGYVVAKKEI

SEQ ID NO: 31216 - protein, 85 aa, unidentified
  REGION 1..85: note = Description of Unknown:cds_NZ_WFIY01000004.1_cds_WP_155862495.1_254 target sequence
IDKMGILAANIYTCPTSFAQKGALAAFDSFDEVKEMIKLFKKRRDVMFSELSKIKSIEVYKSPGAFYIFPNMEEVVKKVGSSKEL

SEQ ID NO: 31217 - protein, 84 aa, unidentified
  REGION 1..84: note = Description of Unknown:cds_NZ_WFIY01000004.1_cds_WP_155862495.1_254 target sequence
VYKSPGAFYIFPNMEEVVKKVGSSKELAIKLIEEAGVITIPGEVFPLNVGKNFLRFSFAIDEDKIKEGVKRIKDVIEKIVDEKS

SEQ ID NO: 31218 - protein, 85 aa, unidentified
  REGION 1..85: note = Description of Unknown:cds_NZ_WFIY01000004.1_cds_WP_155862495.1_254 target sequence
KGIKTINFGIGQPDVVTFKRIREEAKKALDEGYTGYTPAKGIDELRQKIADFLSQKYGDIIKKDEVIITPGAKTALFLAFLLYIN

SEQ ID NO: 31219 - protein, 85 aa, unidentified
  REGION 1..85: note = Description of Unknown:cds_NZ_WFIY01000004.1_cds_WP_155862495.1_254 target sequence
PGDEVILFDPAFYSYAEVVKLLGGKPVYVNINFNKEKGFYIDIDDLNSKITVKTKMIVLNNPHNPTGMVFEPKQIIEIQEIAKER

SEQ ID NO: 31220 - protein, 85 aa, unidentified
  REGION 1..85: note = Description of Unknown:cds_NZ_WFIY01000004.1_cds_WP_155862495.1_254 target sequence
KIILLSDEIYDYFIYEGEMRSVLQDSGWRDYVIYINGFSKTFSMTGWRLGYVVAKKEIIDKMGILAANIYTCPTSFAQKGALAAF

SEQ ID NO: 31221 - protein, 85 aa, unidentified
  REGION 1..85: note = Description of Unknown:cds_NZ_WFIY01000004.1_cds_WP_155862495.1_254 target sequence
DSFDEVKEMIKLFKKRRDVMFSELSKIKSIEVYKSPGAFYIFPNMEEVVKKVGSSKELAIKLIEEAGVITIPGEVFPLNVGKNFL

SEQ ID NO: 31222 - protein, 85 aa, unidentified
  REGION 1..85: note = Description of Unknown:cds_NZ_WFIY01000004.1_cds_WP_155863046.1_941 target sequence
KYIIKLYFETEGIVDKPDVIGAIFGQTENLFGEEFDLRELQDKGRLGRIVVEMETKGGKTKGTIEIPSNLDRIETALIASMVESV

SEQ ID NO: 31223 - protein, 85 aa, unidentified
  REGION 1..85: note = Description of Unknown:cds_NZ_WFIY01000004.1_cds_WP_155863046.1_941 target sequence
EKIGPYPAKFELKEIQDIRAEKLKKIIDRAKEILTNWSKEKTLDIKEVLNEISSAVKTGEITEFGPEKLPAGPDVLTDPNLIIVE

SEQ ID NO: 31224 - protein, 85 aa, unidentified
  REGION 1..85: note = Description of Unknown:cds_NZ_WFIY01000004.1_cds_WP_155863046.1_941 target sequence
GRADVINLLRYGYRNTVAVEGASGKIPQSIIDLSKQKNTVIAFLDGDHGGDLILKELLNANVKIDYVARAPQGREVEELTGKEIA

SEQ ID NO: 31225 - protein, 85 aa, unidentified
  REGION 1..85: note = Description of Unknown:cds_NZ_WFIY01000004.1_cds_WP_155863046.1_941 target sequence
KALSNMVPISQYLKKQQETPQVVVKTPEETVTVIQPPKEVEIQIPPSALEEIKKLPGTLEGIMFDENWNPVEKVQVRDIIPKLEA

SEQ ID NO: 31226 - protein, 84 aa, unidentified
  REGION 1..84: note = Description of Unknown:cds_NZ_WFIY01000004.1_cds_WP_155863046.1_941 target sequence
LEGIMFDENWNPVEKVQVRDIIPKLEAMSENKVAYIVFDGVITQRLLELAASKKVKLLVGVRIGGINKSLDNVKILTMSDILTS

SEQ ID NO: 31227 - protein, 85 aa, unidentified
  REGION 1..85: note = Description of Unknown:cds_NZ_WFIY01000004.1_cds_WP_155863046.1_941 target sequence
ENLFGEEFDLRELQDKGRLGRIVVEMETKGGKTKGTIEIPSNLDRIETALIASMVESVEKIGPYPAKFELKEIQDIRAEKLKKII

SEQ ID NO: 31228 - protein, 85 aa, unidentified
  REGION 1..85: note = Description of Unknown:cds_NZ_WFIY01000004.1_cds_WP_155863046.1_941 target sequence
DRAKEILTNWSKEKTLDIKEVLNEISSAVKTGEITEFGPEKLPAGPDVLTDPNLIIVEGRADVINLLRYGYRNTVAVEGASGKIP

SEQ ID NO: 31229 - protein, 85 aa, unidentified
  REGION 1..85: note = Description of Unknown:cds_NZ_WFIY01000004.1_cds_WP_155863046.1_941 target sequence
QSIIDLSKQKNTVIAFLDGDHGGDLILKELLNANVKIDYVARAPQGREVEELTGKEIAKALSNMVPISQYLKKQQETPQVVVKTP

SEQ ID NO: 31230 - protein, 85 aa, unidentified
  REGION 1..85: note = Description of Unknown:cds_NZ_WFIY01000004.1_cds_WP_155863046.1_941 target sequence
EETVTVIQPPKEVEIQIPPSALEEIKKLPGTLEGIMFDENWNPVEKVQVRDIIPKLEAMSENKVAYIVFDGVITQRLLELAASKK

SEQ ID NO: 31231 - protein, 85 aa, unidentified
  REGION 1..85: note = Description of Unknown:cds_NZ_WFIY01000004.1_cds_WP_155864419.1_1319 target sequence
LVDQRARLERKFENERIIERDVPNLKKYLSHPNVLAILGVRRSGKSTLAEMLLRGENFGYINFDDDRLAGIKVEDLHKVEKAIYE

SEQ ID NO: 31232 - protein, 85 aa, unidentified
  REGION 1..85: note = Description of Unknown:cds_NZ_WFIY01000004.1_cds_WP_155864419.1_1319 target sequence
LFGEVEYFLFDEIQNVEGWELFVNRLREEGKRIIITGSNSKLLSGELATALTGRHINFTLFPFSFSEYLRFKGVKIERIKDTFTT

SEQ ID NO: 31233 - protein, 85 aa, unidentified
  REGION 1..85: note = Description of Unknown:cds_NZ_WFIY01000004.1_cds_WP_155864419.1_1319 target sequence
PSEGVIKRELENYMRVGGFPEVLKISEDFIFSIFSDIVYKDVVQRLRIKRIELFKAFAVNVIKYYSNEISLSKLSKTLKLSNNTV

SEQ ID NO: 31234 - protein, 85 aa, unidentified
  REGION 1..85: note = Description of Unknown:cds_NZ_WFIY01000004.1_cds_WP_155864419.1_1319 target sequence
EEWFNGLVNAYVIITSERFTNKPREGITSPKKVYVVDPGFISSIALDSSKGRIMENLVALKLSRMGENLFYFKGDNYEIDFFTRD

SEQ ID NO: 31235 - protein, 84 aa, unidentified
  REGION 1..84: note = Description of Unknown:cds_NZ_WFIY01000004.1_cds_WP_155864419.1_1319 target sequence
LKLSRMGENLFYFKGDNYEIDFFTRDKAIQVTYASGKDEIPKREIEGLNKVKARDKIVITWDYEDKIREINFIPIWKFLLDSND

SEQ ID NO: 31236 - protein, 85 aa, unidentified
  REGION 1..85: note = Description of Unknown:cds_NZ_WFIY01000004.1_cds_WP_155864419.1_1319 target sequence
YLSHPNVLAILGVRRSGKSTLAEMLLRGENFGYINFDDDRLAGIKVEDLHKVEKAIYELFGEVEYFLFDEIQNVEGWELFVNRLR

SEQ ID NO: 31237 - protein, 85 aa, unidentified
  REGION 1..85: note = Description of Unknown:cds_NZ_WFIY01000004.1_cds_WP_155864419.1_1319 target sequence
EEGKRIIITGSNSKLLSGELATALTGRHINFTLFPFSFSEYLRFKGVKIERIKDTFTTPSEGVIKRELENYMRVGGFPEVLKISE

SEQ ID NO: 31238 - protein, 85 aa, unidentified
  REGION 1..85: note = Description of Unknown:cds_NZ_WFIY01000004.1_cds_WP_155864419.1_1319 target sequence
DFIFSIFSDIVYKDVVQRLRIKRIELFKAFAVNVIKYYSNEISLSKLSKTLKLSNNTVEEWFNGLVNAYVIITSERFTNKPREGI

SEQ ID NO: 31239 - protein, 85 aa, unidentified
  REGION 1..85: note = Description of Unknown:cds_NZ_WFIY01000004.1_cds_WP_155864419.1_1319 target sequence
TSPKKVYVVDPGFISSIALDSSKGRIMENLVALKLSRMGENLFYFKGDNYEIDFFTRDKAIQVTYASGKDEIPKREIEGLNKVKA

SEQ ID NO: 31240 - protein, 85 aa, unidentified
  REGION 1..85: note = Description of Unknown:hvTR_Q89270 target sequence
ELVGWLVDKGITSEKQWIQEDQASYISFNAASNSRSQIKAALDNAGKIMSLTKTAPDYLVGQQPVEDISSNRIYKILELNGYDPQ

SEQ ID NO: 31241 - protein, 85 aa, unidentified
  REGION 1..85: note = Description of Unknown:hvTR_Q89270 target sequence
YAASVFLGWATKKFGKRNTIWLFGPATTGKTNIAEAIAHTVPFYGCVNWTNENFPFNDCVDKMVIWWEEGKMTAKVVESAKAILG

SEQ ID NO: 31242 - protein, 85 aa, unidentified
  REGION 1..85: note = Description of Unknown:hvTR_Q89270 target sequence
GSKVRVDQKCKSSAQIDPTPVIVTSNTNMCAVIDGNSTTFEHQQPLQDRMFKFELTRRLDHDFGKVTKQEVKDFFRWAKDHVVEV

SEQ ID NO: 31243 - protein, 85 aa, unidentified
  REGION 1..85: note = Description of Unknown:hvTR_Q89270 target sequence
EHEFYVKKGGAKKRPAPSDADISEPKRVRESVAQPSTSDAEASINYADRYQNKCSRHVGMNLMLFPCRQCERMNQNSNICFTHGQ

SEQ ID NO: 31244 - protein, 85 aa, unidentified
  REGION 1..85: note = Description of Unknown:hvTR_Q89270 target sequence
FNAASNSRSQIKAALDNAGKIMSLTKTAPDYLVGQQPVEDISSNRIYKILELNGYDPQYAASVFLGWATKKFGKRNTIWLFGPAT

SEQ ID NO: 31245 - protein, 85 aa, unidentified
  REGION 1..85: note = Description of Unknown:hvTR_Q89270 target sequence
TGKTNIAEAIAHTVPFYGCVNWTNENFPFNDCVDKMVIWWEEGKMTAKVVESAKAILGGSKVRVDQKCKSSAQIDPTPVIVTSNT

SEQ ID NO: 31246 - protein, 85 aa, unidentified
  REGION 1..85: note = Description of Unknown:hvTR_Q89270 target sequence
NMCAVIDGNSTTFEHQQPLQDRMFKFELTRRLDHDFGKVTKQEVKDFFRWAKDHVVEVEHEFYVKKGGAKKRPAPSDADISEPKR

SEQ ID NO: 31247 - protein, 85 aa, unidentified
  REGION 1..85: note = Description of Unknown:hvTR_Q89270 target sequence
VRESVAQPSTSDAEASINYADRYQNKCSRHVGMNLMLFPCRQCERMNQNSNICFTHGQKDCLECFPVSESQPVSVVKKAYQKLCY

SEQ ID NO: 31248 - protein, 85 aa, unidentified
  REGION 1..85: note = Description of Unknown:cds_NZ_WFIY01000004.1_cds_WP_155864460.1_1762 target sequence
LTFAFQSSLASTFYAAILGVLIYLLWVMLGYNYSKIVATTGGIYDFARTASTETVGKIAGWLYWISYAIYLPSVTTYLTGIVLPS

SEQ ID NO: 31249 - protein, 85 aa, unidentified
  REGION 1..85: note = Description of Unknown:cds_NZ_WFIY01000004.1_cds_WP_155864460.1_1762 target sequence
VFNISPSLLAVIEVTIPIILTILLISGIKPPLFYALITSTIEVFLITVLGIKVISITGIKLPQYNIPQYNFWTGALAVAFTLAGG

SEQ ID NO: 31250 - protein, 85 aa, unidentified
  REGION 1..85: note = Description of Unknown:cds_NZ_WFIY01000004.1_cds_WP_155864460.1_1762 target sequence
GASFFLGYEAKGRGKTVGSSYLTAFSIASIVVIFASYFETAAAGFSNSGISNLLSVTQYPGFYISQEYLGSTFSIIFFVFTINSL

SEQ ID NO: 31251 - protein, 85 aa, unidentified
  REGION 1..85: note = Description of Unknown:cds_NZ_WFIY01000004.1_cds_WP_155864460.1_1762 target sequence
LGSAIAAYVALSRLTYSLTSRKMLTSIIIVAIFFISFNLIASITGQYCLVYQYTTEASLVTLFSSHAIVSAVYPLFVKKFYKLNL

SEQ ID NO: 31252 - protein, 84 aa, unidentified
  REGION 1..84: note = Description of Unknown:cds_NZ_WFIY01000004.1_cds_WP_155864460.1_1762 target sequence
LVTLFSSHAIVSAVYPLFVKKFYKLNLPSVLLGLSSTILMAYGLYSNLIPYEYPNTLIGIVSLISGVILGIVSNILKPILYRKN

SEQ ID NO: 31253 - protein, 85 aa, unidentified
  REGION 1..85: note = Description of Unknown:cds_NZ_WFIY01000004.1_cds_WP_155864460.1_1762 target sequence
MLGYNYSKIVATTGGIYDFARTASTETVGKIAGWLYWISYAIYLPSVTTYLTGIVLPSVFNISPSLLAVIEVTIPIILTILLISG

SEQ ID NO: 31254 - protein, 85 aa, unidentified
  REGION 1..85: note = Description of Unknown:cds_NZ_WFIY01000004.1_cds_WP_155864460.1_1762 target sequence
IKPPLFYALITSTIEVFLITVLGIKVISITGIKLPQYNIPQYNFWTGALAVAFTLAGGGASFFLGYEAKGRGKTVGSSYLTAFSI

SEQ ID NO: 31255 - protein, 85 aa, unidentified
  REGION 1..85: note = Description of Unknown:cds_NZ_WFIY01000004.1_cds_WP_155864460.1_1762 target sequence
ASIVVIFASYFETAAAGFSNSGISNLLSVTQYPGFYISQEYLGSTFSIIFFVFTINSLLGSAIAAYVALSRLTYSLTSRKMLTSI

SEQ ID NO: 31256 - protein, 85 aa, unidentified
  REGION 1..85: note = Description of Unknown:cds_NZ_WFIY01000004.1_cds_WP_155864460.1_1762 target sequence
IIVAIFFISFNLIASITGQYCLVYQYTTEASLVTLFSSHAIVSAVYPLFVKKFYKLNLPSVLLGLSSTILMAYGLYSNLIPYEYP

SEQ ID NO: 31257 - protein, 85 aa, unidentified
  REGION 1..85: note = Description of Unknown:cds_NZ_WFIY01000004.1_cds_WP_155864475.1_2026 target sequence
VAVSPFNSRFSLANKSDSDFLALLPFDDDKIITALIIGSFIVNIIFLSIFIFWFIEALGIIGVIVIPSFALISSSLPAILFNLDN

SEQ ID NO: 31258 - protein, 85 aa, unidentified
  REGION 1..85: note = Description of Unknown:cds_NZ_WFIY01000004.1_cds_WP_155864475.1_2026 target sequence
KRKVLVDLVIIFWLISAIFDFPLSPLSMFYGYFEGYAISYLFALAIFIIAIRKFNFSSYSNIIISSEKEEVKDQISFKSYNPFIL

SEQ ID NO: 31259 - protein, 85 aa, unidentified
  REGION 1..85: note = Description of Unknown:cds_NZ_WFIY01000004.1_cds_WP_155864475.1_2026 target sequence
TLIRNIRIIEIGGRVNWMGMNTLISKRVDLWKVILGSSILAGVLYIILNHINELNFIFFYILFGGWFIMIMIASASFITEPLWLD

SEQ ID NO: 31260 - protein, 85 aa, unidentified
  REGION 1..85: note = Description of Unknown:cds_NZ_WFIY01000004.1_cds_WP_155864475.1_2026 target sequence
LNVMTPLEFARYYLISKAVSIAIILSPFAILSLLFGYIGNALGLVVFIPLSSIFIMSVYARYYQQRYNMPLNVSPIRFLVSLLTS

SEQ ID NO: 31261 - protein, 84 aa, unidentified
  REGION 1..84: note = Description of Unknown:cds_NZ_WFIY01000004.1_cds_WP_155864475.1_2026 target sequence
VYARYYQQRYNMPLNVSPIRFLVSLLTSIPLIPLVILAFIPKCLIFCLLFILPLTLFYVSISFPFLLSNSYWESTIEKIVTSVT

SEQ ID NO: 31262 - protein, 85 aa, unidentified
  REGION 1..85: note = Description of Unknown:cds_NZ_WFIY01000004.1_cds_WP_155864475.1_2026 target sequence
DDKIITALIIGSFIVNIIFLSIFIFWFIEALGIIGVIVIPSFALISSSLPAILFNLDNKRKVLVDLVIIFWLISAIFDFPLSPLS

SEQ ID NO: 31263 - protein, 85 aa, unidentified
  REGION 1..85: note = Description of Unknown:cds_NZ_WFIY01000004.1_cds_WP_155864475.1_2026 target sequence
MFYGYFEGYAISYLFALAIFIIAIRKFNFSSYSNIIISSEKEEVKDQISFKSYNPFILTLIRNIRIIEIGGRVNWMGMNTLISKR

SEQ ID NO: 31264 - protein, 85 aa, unidentified
  REGION 1..85: note = Description of Unknown:cds_NZ_WFIY01000004.1_cds_WP_155864475.1_2026 target sequence
VDLWKVILGSSILAGVLYIILNHINELNFIFFYILFGGWFIMIMIASASFITEPLWLDLNVMTPLEFARYYLISKAVSIAIILSP

SEQ ID NO: 31265 - protein, 85 aa, unidentified
  REGION 1..85: note = Description of Unknown:cds_NZ_WFIY01000004.1_cds_WP_155864475.1_2026 target sequence
FAILSLLFGYIGNALGLVVFIPLSSIFIMSVYARYYQQRYNMPLNVSPIRFLVSLLTSIPLIPLVILAFIPKCLIFCLLFILPLT

SEQ ID NO: 31266 - protein, 85 aa, unidentified
  REGION 1..85: note = Description of Unknown:cds_NZ_WFIY01000004.1_cds_WP_155864220.1_2188 target sequence
ERQLGFIFDHNKCIICNACVNACTQAYGYHWRKLPIFQIDGYKTALSIACNHCRDPKCMKVCPTQAIRKEDNGIVHIIKERCIGC

SEQ ID NO: 31267 - protein, 85 aa, unidentified
  REGION 1..85: note = Description of Unknown:cds_NZ_WFIY01000004.1_cds_WP_155864220.1_2188 target sequence
NYCTWACPYEALEMGNDSMTKCDLCMNRLGKGLPYCVEVCPTGALAFGWIEGGNEVNYLPPFEITKPNFKVIPPKEGKIKGEYTK

SEQ ID NO: 31268 - protein, 85 aa, unidentified
  REGION 1..85: note = Description of Unknown:cds_NZ_WFIY01000004.1_cds_WP_155864220.1_2188 target sequence
EKGEKNYLGLLSFTIGSQVSLFYSLLKLPFYLPISIAILLVTLLLSINHSKFFSRSINMIYGLKNSWLSREVIFSLLSVLFFTLT

SEQ ID NO: 31269 - protein, 85 aa, unidentified
  REGION 1..85: note = Description of Unknown:cds_NZ_WFIY01000004.1_cds_WP_155864220.1_2188 target sequence
LIYSPMYYLAEVSLTIGVASSILIYMLKSRPSWYNVDTPVSFIGSGLTIVLPLAYFFTHYIVFIIIGAFVGVLEIITAHEKSKKF

SEQ ID NO: 31270 - protein, 84 aa, unidentified
  REGION 1..84: note = Description of Unknown:cds_NZ_WFIY01000004.1_cds_WP_155864220.1_2188 target sequence
THYIVFIIIGAFVGVLEIITAHEKSKKFNTHERIAYNVPYVAIFTASLLFSPLSIVASAIAVYSEVNYRREFFKKVIYYGIPNY

SEQ ID NO: 31271 - protein, 85 aa, unidentified
  REGION 1..85: note = Description of Unknown:cds_NZ_WFIY01000004.1_cds_WP_155864220.1_2188 target sequence
GYHWRKLPIFQIDGYKTALSIACNHCRDPKCMKVCPTQAIRKEDNGIVHIIKERCIGCNYCTWACPYEALEMGNDSMTKCDLCMN

SEQ ID NO: 31272 - protein, 85 aa, unidentified
  REGION 1..85: note = Description of Unknown:cds_NZ_WFIY01000004.1_cds_WP_155864220.1_2188 target sequence
RLGKGLPYCVEVCPTGALAFGWIEGGNEVNYLPPFEITKPNFKVIPPKEGKIKGEYTKEKGEKNYLGLLSFTIGSQVSLFYSLLK

SEQ ID NO: 31273 - protein, 85 aa, unidentified
  REGION 1..85: note = Description of Unknown:cds_NZ_WFIY01000004.1_cds_WP_155864220.1_2188 target sequence
LPFYLPISIAILLVTLLLSINHSKFFSRSINMIYGLKNSWLSREVIFSLLSVLFFTLTLIYSPMYYLAEVSLTIGVASSILIYML

SEQ ID NO: 31274 - protein, 85 aa, unidentified
  REGION 1..85: note = Description of Unknown:cds_NZ_WFIY01000004.1_cds_WP_155864220.1_2188 target sequence
KSRPSWYNVDTPVSFIGSGLTIVLPLAYFFTHYIVFIIIGAFVGVLEIITAHEKSKKFNTHERIAYNVPYVAIFTASLLFSPLSI

SEQ ID NO: 31275 - protein, 85 aa, unidentified
  REGION 1..85: note = Description of Unknown:cds_NC_040411.1_cds_YP_009551537.1_6 target sequence
DVLYSLSKTLKDARDKIVEGTLYSNVSDLIQQFNQMLITMNGNEFQTGGIGNLPVRTWNFEFGLLGTTLLNLDANYVETARTTIE

SEQ ID NO: 31276 - protein, 85 aa, unidentified
  REGION 1..85: note = Description of Unknown:cds_NC_040411.1_cds_YP_009551537.1_6 target sequence
YFVDFIDNVCMDEMVRESQRNGIAPQSDALRKLSGIKFKRINFDNSSEYIENWNLQSRRQRTGFTFHKPNIFPYSASFTLNRSQP

SEQ ID NO: 31277 - protein, 85 aa, unidentified
  REGION 1..85: note = Description of Unknown:cds_NC_040411.1_cds_YP_009551537.1_6 target sequence
QHDNLMGTMWLNAGSEIQVAGFDYSCAINAPANTQQFEHVVQLRRVLTTATITLLPDAERFSFPRVINSADGATTWYFNPVILRP

SEQ ID NO: 31278 - protein, 85 aa, unidentified
  REGION 1..85: note = Description of Unknown:cds_NC_040411.1_cds_YP_009551537.1_6 target sequence
NNVEVEFLLNGQIINTYQARFGTIIARNFDTIRLSFQLMRPPNMTAAVAALFPNAQPFEHHATVGLTLRIDSAICESVLADATET

SEQ ID NO: 31279 - protein, 84 aa, unidentified
  REGION 1..84: note = Description of Unknown:cds_NC_040411.1_cds_YP_009551537.1_6 target sequence
FEHHATVGLTLRIDSAICESVLADATETMLANVTAVRQEYAIPVGPVFPPGMNWTDLITNYSPSREDNLQRVFTVASIRSMLIK

SEQ ID NO: 31280 - protein, 85 aa, unidentified
  REGION 1..85: note = Description of Unknown:cds_NC_040411.1_cds_YP_009551537.1_6 target sequence
DLIQQFNQMLITMNGNEFQTGGIGNLPVRTWNFEFGLLGTTLLNLDANYVETARTTIEYFVDFIDNVCMDEMVRESQRNGIAPQS

SEQ ID NO: 31281 - protein, 85 aa, unidentified
  REGION 1..85: note = Description of Unknown:cds_NC_040411.1_cds_YP_009551537.1_6 target sequence
DALRKLSGIKFKRINFDNSSEYIENWNLQSRRQRTGFTFHKPNIFPYSASFTLNRSQPQHDNLMGTMWLNAGSEIQVAGFDYSCA

SEQ ID NO: 31282 - protein, 85 aa, unidentified
  REGION 1..85: note = Description of Unknown:cds_NC_040411.1_cds_YP_009551537.1_6 target sequence
INAPANTQQFEHVVQLRRVLTTATITLLPDAERFSFPRVINSADGATTWYFNPVILRPNNVEVEFLLNGQIINTYQARFGTIIAR

SEQ ID NO: 31283 - protein, 85 aa, unidentified
  REGION 1..85: note = Description of Unknown:cds_NC_040411.1_cds_YP_009551537.1_6 target sequence
NFDTIRLSFQLMRPPNMTAAVAALFPNAQPFEHHATVGLTLRIDSAICESVLADATETMLANVTAVRQEYAIPVGPVFPPGMNWT

SEQ ID NO: 31284 - protein, 85 aa, unidentified
  REGION 1..85: note = Description of Unknown:cds_NC_011509.2_cds_YP_002302229.1_6 target sequence
DVLYSLSKTLKDARDKIVEGTLYSNVSDLIQQFNQMIITMNGNEFQTGGIGNLPIRNWNFNFGLLGTTLLNLDANYVETARNTID

SEQ ID NO: 31285 - protein, 85 aa, unidentified
  REGION 1..85: note = Description of Unknown:cds_NC_011509.2_cds_YP_002302229.1_6 target sequence
YFVDFVDNVCMDEMVRESQRNGIAPQSDSLRKLSAIKFKRINFDNSSEYIENWNLQNRRQRTGFTFHKPNIFPYSASFTLNRSQP

SEQ ID NO: 31286 - protein, 85 aa, unidentified
  REGION 1..85: note = Description of Unknown:cds_NC_011509.2_cds_YP_002302229.1_6 target sequence
AHDNLMGTMWLNAGSEIQVAGFDYSCAINAPANIQQFEHIVPLRRVLTTATITLLPDAERFSFPRVINSADGATTWFFNPVILRP

SEQ ID NO: 31287 - protein, 85 aa, unidentified
  REGION 1..85: note = Description of Unknown:cds_NC_011509.2_cds_YP_002302229.1_6 target sequence
NNVEVEFLLNGQIINTYQARFGTIVARNFDTIRLSFQLMRPPNMTPAVAVLFPNAQPFEHHATVGLTLRIESAVCESVLADASET

SEQ ID NO: 31288 - protein, 84 aa, unidentified
  REGION 1..84: note = Description of Unknown:cds_NC_011509.2_cds_YP_002302229.1_6 target sequence
FEHHATVGLTLRIESAVCESVLADASETLLANVTSVRQEYAIPVGPVFPPGMNWTDLITNYSPSREDNLQRVFTVASIRSMLIK

SEQ ID NO: 31289 - protein, 85 aa, unidentified
  REGION 1..85: note = Description of Unknown:cds_NC_011509.2_cds_YP_002302229.1_6 target sequence
DLIQQFNQMIITMNGNEFQTGGIGNLPIRNWNFNFGLLGTTLLNLDANYVETARNTIDYFVDFVDNVCMDEMVRESQRNGIAPQS

SEQ ID NO: 31290 - protein, 85 aa, unidentified
  REGION 1..85: note = Description of Unknown:cds_NC_011509.2_cds_YP_002302229.1_6 target sequence
DSLRKLSAIKFKRINFDNSSEYIENWNLQNRRQRTGFTFHKPNIFPYSASFTLNRSQPAHDNLMGTMWLNAGSEIQVAGFDYSCA

SEQ ID NO: 31291 - protein, 85 aa, unidentified
  REGION 1..85: note = Description of Unknown:cds_NC_011509.2_cds_YP_002302229.1_6 target sequence
INAPANIQQFEHIVPLRRVLTTATITLLPDAERFSFPRVINSADGATTWFFNPVILRPNNVEVEFLLNGQIINTYQARFGTIVAR

SEQ ID NO: 31292 - protein, 85 aa, unidentified
  REGION 1..85: note = Description of Unknown:cds_NC_011509.2_cds_YP_002302229.1_6 target sequence
NFDTIRLSFQLMRPPNMTPAVAVLFPNAQPFEHHATVGLTLRIESAVCESVLADASETLLANVTSVRQEYAIPVGPVFPPGMNWT

SEQ ID NO: 31293 - protein, 85 aa, unidentified
  REGION 1..85: note = Description of Unknown:cds_NZ_WFIY01000004.1_cds_WP_155862660.1_452 target sequence
IIKGLPKSRPISFDQVLDKVSEIVEKVKKEGDKALIEFTEKFDGVKLDNIKVTREEIHASASLLSEDIKKAIDVVSEQIKEFHTS

SEQ ID NO: 31294 - protein, 85 aa, unidentified
  REGION 1..85: note = Description of Unknown:cds_NZ_WFIY01000004.1_cds_WP_155862660.1_452 target sequence
IKPPQIGGGKSGVDFGIIWTPLERVGIYVPGGKKLYPSTLLMAGIPAIVAGVEELYVATPTKGKIDPAIAYIAEKLNVKEIYKIG

SEQ ID NO: 31295 - protein, 85 aa, unidentified
  REGION 1..85: note = Description of Unknown:cds_NZ_WFIY01000004.1_cds_WP_155862660.1_452 target sequence
GAQAIAALAYGTESVKKVDKIVGPGNVYVQAAKYIVSKDVGIDGIEGPTELVIVADDSADSEQIYLDLLAQGEHGNSTLLVLIST

SEQ ID NO: 31296 - protein, 85 aa, unidentified
  REGION 1..85: note = Description of Unknown:cds_NZ_WFIY01000004.1_cds_WP_155862660.1_452 target sequence
SDRVLREVEEKVSSSDLTFYLVKARDLEEAITYANSIAPEHLSLQVSSPREALKMVRNAGAVTLGRTPPAIIDYSAGPDHILPTN

SEQ ID NO: 31297 - protein, 84 aa, unidentified
  REGION 1..84: note = Description of Unknown:cds_NZ_WFIY01000004.1_cds_WP_155862660.1_452 target sequence
RNAGAVTLGRTPPAIIDYSAGPDHILPTNSWAKFKGGLTVYDFLKPISFAQANNPDRELINAAITLARYEGFEIHSKSIGERYV

SEQ ID NO: 31298 - protein, 85 aa, unidentified
  REGION 1..85: note = Description of Unknown:cds_NZ_WFIY01000004.1_cds_WP_155862660.1_452 target sequence
KKEGDKALIEFTEKFDGVKLDNIKVTREEIHASASLLSEDIKKAIDVVSEQIKEFHTSIKPPQIGGGKSGVDFGIIWTPLERVGI

SEQ ID NO: 31299 - protein, 85 aa, unidentified
  REGION 1..85: note = Description of Unknown:cds_NZ_WFIY01000004.1_cds_WP_155862660.1_452 target sequence
YVPGGKKLYPSTLLMAGIPAIVAGVEELYVATPTKGKIDPAIAYIAEKLNVKEIYKIGGAQAIAALAYGTESVKKVDKIVGPGNV

SEQ ID NO: 31300 - protein, 85 aa, unidentified
  REGION 1..85: note = Description of Unknown:cds_NZ_WFIY01000004.1_cds_WP_155862660.1_452 target sequence
YVQAAKYIVSKDVGIDGIEGPTELVIVADDSADSEQIYLDLLAQGEHGNSTLLVLISTSDRVLREVEEKVSSSDLTFYLVKARDL

SEQ ID NO: 31301 - protein, 85 aa, unidentified
  REGION 1..85: note = Description of Unknown:cds_NZ_WFIY01000004.1_cds_WP_155862660.1_452 target sequence
EEAITYANSIAPEHLSLQVSSPREALKMVRNAGAVTLGRTPPAIIDYSAGPDHILPTNSWAKFKGGLTVYDFLKPISFAQANNPD

SEQ ID NO: 31302 - protein, 85 aa, unidentified
  REGION 1..85: note = Description of Unknown:cds_NZ_WFIY01000004.1_cds_550 target sequence
IVLYVIVILSSLVSAWSIYNSFLAIVGIRWNPKEYKNPSGVSFSLIIPAKNEEKVLGRLLDRLENQEYDRSKYEIIVVEDGSTDK

SEQ ID NO: 31303 - protein, 85 aa, unidentified
  REGION 1..85: note = Description of Unknown:cds_NZ_WFIY01000004.1_cds_550 target sequence
TLEVCNSYKLMYDNISCIHLESNTRRVINGKSRALNYALRIAKGEIIGIFDADTVPRLDTLAYASVKFEDPKVAGVQGRLVPINV

SEQ ID NO: 31304 - protein, 85 aa, unidentified
  REGION 1..85: note = Description of Unknown:cds_NZ_WFIY01000004.1_cds_550 target sequence
RESAIARFASLEELFYEYSISGRARLGFFVPLEGTCSFIRKSVLEGLGGWNENSLTEDLDLSLKIISSGYKIIYSPSIVAWREVP

SEQ ID NO: 31305 - protein, 85 aa, unidentified
  REGION 1..85: note = Description of Unknown:cds_NZ_WFIY01000004.1_cds_550 target sequence
VSLRMLIKQRLRWYRGHFEVSLKVEKVKFDWRVIDAILIVATPVFMVLNLVNYSLVLLYPSEIYIVVVSLISFASFLSLLLGIMI

SEQ ID NO: 31306 - protein, 84 aa, unidentified
  REGION 1..84: note = Description of Unknown:cds_NZ_WFIY01000004.1_cds_550 target sequence
LYPSEIYIVVVSLISFASFLSLLLGIMISRKHMIEEFYPILSFIYMNLVVILNLIAISLELLRMPKKWIKTERTGNITVRIHDS

SEQ ID NO: 31307 - protein, 85 aa, unidentified
  REGION 1..85: note = Description of Unknown:cds_NZ_WFIY01000004.1_cds_550 target sequence
IRWNPKEYKNPSGVSFSLIIPAKNEEKVLGRLLDRLENQEYDRSKYEIIVVEDGSTDKTLEVCNSYKLMYDNISCIHLESNTRRV

SEQ ID NO: 31308 - protein, 85 aa, unidentified
  REGION 1..85: note = Description of Unknown:cds_NZ_WFIY01000004.1_cds_550 target sequence
INGKSRALNYALRIAKGEIIGIFDADTVPRLDTLAYASVKFEDPKVAGVQGRLVPINVRESAIARFASLEELFYEYSISGRARLG

SEQ ID NO: 31309 - protein, 85 aa, unidentified
  REGION 1..85: note = Description of Unknown:cds_NZ_WFIY01000004.1_cds_550 target sequence
FFVPLEGTCSFIRKSVLEGLGGWNENSLTEDLDLSLKIISSGYKIIYSPSIVAWREVPVSLRMLIKQRLRWYRGHFEVSLKVEKV

SEQ ID NO: 31310 - protein, 85 aa, unidentified
  REGION 1..85: note = Description of Unknown:cds_NZ_WFIY01000004.1_cds_550 target sequence
KFDWRVIDAILIVATPVFMVLNLVNYSLVLLYPSEIYIVVVSLISFASFLSLLLGIMISRKHMIEEFYPILSFIYMNLVVILNLI

SEQ ID NO: 31311 - protein, 85 aa, unidentified
  REGION 1..85: note = Description of Unknown:cds_NZ_WFIY01000004.1_cds_WP_155862783.1_598 target sequence
KHYIHATISSSLAWAGNIYDLLLITYVYGVLEKVFNLNYFEISILFSLGLIGRVIGGMVFGKYADTIGRKPVLMIGTGGYALFQG

SEQ ID NO: 31312 - protein, 85 aa, unidentified
  REGION 1..85: note = Description of Unknown:cds_NZ_WFIY01000004.1_cds_WP_155862783.1_598 target sequence
LMAFSPNVILLFIFRLIEGIFMGAEWTAGTVIAYEQAPRSLKGFVTGIVQAGYGIGYSLTGITYLIFVSNIVTDWRIFLLTGALP

SEQ ID NO: 31313 - protein, 85 aa, unidentified
  REGION 1..85: note = Description of Unknown:cds_NZ_WFIY01000004.1_cds_WP_155862783.1_598 target sequence
LLLLPYIQLKVKDTKEGSSKIAIRYRDYMGILLKATLGMSGMFTAYFAVFGNYTEVAEVDHLPDYVLGILMTIANLILAFSFILF

SEQ ID NO: 31314 - protein, 85 aa, unidentified
  REGION 1..85: note = Description of Unknown:cds_NZ_WFIY01000004.1_cds_WP_155862783.1_598 target sequence
GRLADRYDKKKLIYIGLIGLMVGLPFAVPVLSILINVIGMSLGVIIFAFFTGFWPLMPLLLADAVPAEVRGFLSGFAYNAGGFVG

SEQ ID NO: 31315 - protein, 84 aa, unidentified
  REGION 1..84: note = Description of Unknown:cds_NZ_WFIY01000004.1_cds_WP_155862783.1_598 target sequence
MPLLLADAVPAEVRGFLSGFAYNAGGFVGGIADIIIGLLTSIYGINTISKWVDGFGFASVLLVLVSVITWPKSGAKARVIMIEQ

SEQ ID NO: 31316 - protein, 85 aa, unidentified
  REGION 1..85: note = Description of Unknown:cds_NZ_WFIY01000004.1_cds_WP_155862783.1_598 target sequence
YGVLEKVFNLNYFEISILFSLGLIGRVIGGMVFGKYADTIGRKPVLMIGTGGYALFQGLMAFSPNVILLFIFRLIEGIFMGAEWT

SEQ ID NO: 31317 - protein, 85 aa, unidentified
  REGION 1..85: note = Description of Unknown:cds_NZ_WFIY01000004.1_cds_WP_155862783.1_598 target sequence
AGTVIAYEQAPRSLKGFVTGIVQAGYGIGYSLTGITYLIFVSNIVTDWRIFLLTGALPLLLLPYIQLKVKDTKEGSSKIAIRYRD

SEQ ID NO: 31318 - protein, 85 aa, unidentified
  REGION 1..85: note = Description of Unknown:cds_NZ_WFIY01000004.1_cds_WP_155862783.1_598 target sequence
YMGILLKATLGMSGMFTAYFAVFGNYTEVAEVDHLPDYVLGILMTIANLILAFSFILFGRLADRYDKKKLIYIGLIGLMVGLPFA

SEQ ID NO: 31319 - protein, 85 aa, unidentified
  REGION 1..85: note = Description of Unknown:cds_NZ_WFIY01000004.1_cds_WP_155862783.1_598 target sequence
VPVLSILINVIGMSLGVIIFAFFTGFWPLMPLLLADAVPAEVRGFLSGFAYNAGGFVGGIADIIIGLLTSIYGINTISKWVDGFG

SEQ ID NO: 31320 - protein, 85 aa, unidentified
  REGION 1..85: note = Description of Unknown:cds_NZ_WFIY01000004.1_cds_WP_013775582.1_828 target sequence
SDIIDEVLSSVKNSNIFKNRQYLSPDYIPDELPHREEQIKKIASILAQVYRGERPNNIFIYGLTGTGKTAVTKFVLNKLYEKIKS

SEQ ID NO: 31321 - protein, 85 aa, unidentified
  REGION 1..85: note = Description of Unknown:cds_NZ_WFIY01000004.1_cds_WP_013775582.1_828 target sequence
FKYIYVNTRQSDTPYRILADIIESFGEKVPFTGLSTAELYRRMLKILNDEHTIIIIVLDEIDAMVEKHGDDILYRLTRINTELNN

SEQ ID NO: 31322 - protein, 85 aa, unidentified
  REGION 1..85: note = Description of Unknown:cds_NZ_WFIY01000004.1_cds_WP_013775582.1_828 target sequence
AKVSLIGITNDVKFVDNLDPRVRSSLSEEELVFPPYNAEELEDILRRRASLAFKDGVISDDIIRLCAALAARDHGDARRALDLLR

SEQ ID NO: 31323 - protein, 85 aa, unidentified
  REGION 1..85: note = Description of Unknown:cds_NZ_WFIY01000004.1_cds_WP_013775582.1_828 target sequence
VAGEIAERQGDTKITEDHIEKARIEIERDRVYEIISTLPFHSKIVLISILNGLKYKNTLTTGEVYEIYKKLTSEMGTECVTQRRV

SEQ ID NO: 31324 - protein, 84 aa, unidentified
  REGION 1..84: note = Description of Unknown:cds_NZ_WFIY01000004.1_cds_WP_013775582.1_828 target sequence
NTLTTGEVYEIYKKLTSEMGTECVTQRRVSDILNELDMVGIITATVINRGRYGKTKEVKLAVDKATIIRALKDNDEKLISLIKV

SEQ ID NO: 31325 - protein, 85 aa, unidentified
  REGION 1..85: note = Description of Unknown:cds_NZ_WFIY01000004.1_cds_WP_013775582.1_828 target sequence
IPDELPHREEQIKKIASILAQVYRGERPNNIFIYGLTGTGKTAVTKFVLNKLYEKIKSFKYIYVNTRQSDTPYRILADIIESFGE

SEQ ID NO: 31326 - protein, 85 aa, unidentified
  REGION 1..85: note = Description of Unknown:cds_NZ_WFIY01000004.1_cds_WP_013775582.1_828 target sequence
KVPFTGLSTAELYRRMLKILNDEHTIIIIVLDEIDAMVEKHGDDILYRLTRINTELNNAKVSLIGITNDVKFVDNLDPRVRSSLS

SEQ ID NO: 31327 - protein, 85 aa, unidentified
  REGION 1..85: note = Description of Unknown:cds_NZ_WFIY01000004.1_cds_WP_013775582.1_828 target sequence
EEELVFPPYNAEELEDILRRRASLAFKDGVISDDIIRLCAALAARDHGDARRALDLLRVAGEIAERQGDTKITEDHIEKARIEIE

SEQ ID NO: 31328 - protein, 85 aa, unidentified
  REGION 1..85: note = Description of Unknown:cds_NZ_WFIY01000004.1_cds_WP_013775582.1_828 target sequence
RDRVYEIISTLPFHSKIVLISILNGLKYKNTLTTGEVYEIYKKLTSEMGTECVTQRRVSDILNELDMVGIITATVINRGRYGKTK

SEQ ID NO: 31329 - protein, 85 aa, unidentified
  REGION 1..85: note = Description of Unknown:cds_NZ_WFIY01000004.1_cds_WP_155863204.1_1145 target sequence
NITEIAEKLLKDSESIENDVIAIRRILHENPELPFQETNTSRLIEEKLRSLGIQTRRLSTTVIGLIDSGKPGKTVALRVQISALP

SEQ ID NO: 31330 - protein, 85 aa, unidentified
  REGION 1..85: note = Description of Unknown:cds_NZ_WFIY01000004.1_cds_WP_155863204.1_1145 target sequence
ITEKTNLQFSSKIPGIMHACGHDANVAMLLGAAQLLVKNKDLLSGKVKLIFQAGEEEDLGAKEVISNNELDDVDYVFGLHVSPFI

SEQ ID NO: 31331 - protein, 85 aa, unidentified
  REGION 1..85: note = Description of Unknown:cds_NZ_WFIY01000004.1_cds_WP_155863204.1_1145 target sequence
PSGFFATRKGALMPSSSNFKIRVKGLGGHVSSPHSTLDPIFISAQIVNLLHGLTSRIVNPLDGFTLSITSIHSGTKSNIIPDEAV

SEQ ID NO: 31332 - protein, 85 aa, unidentified
  REGION 1..85: note = Description of Unknown:cds_NZ_WFIY01000004.1_cds_WP_155863204.1_1145 target sequence
MEGTVRGFDVFTIEKVKSKIKSLVDSLCKSFNADCEVTFSDNCPPLINYPEITSRAMDILSNLRRPIVEIEPVMLADDFSRYLQL

SEQ ID NO: 31333 - protein, 84 aa, unidentified
  REGION 1..84: note = Description of Unknown:cds_NZ_WFIY01000004.1_cds_WP_155863204.1_1145 target sequence
MDILSNLRRPIVEIEPVMLADDFSRYLQLKPGCYIFIGTRNLEKGCIYPTHSPMFKLDEDILKYGSAALALLAISFSKEESTFK

SEQ ID NO: 31334 - protein, 85 aa, unidentified
  REGION 1..85: note = Description of Unknown:cds_NZ_WFIY01000004.1_cds_WP_155863204.1_1145 target sequence
HENPELPFQETNTSRLIEEKLRSLGIQTRRLSTTVIGLIDSGKPGKTVALRVQISALPITEKTNLQFSSKIPGIMHACGHDANVA

SEQ ID NO: 31335 - protein, 85 aa, unidentified
  REGION 1..85: note = Description of Unknown:cds_NZ_WFIY01000004.1_cds_WP_155863204.1_1145 target sequence
MLLGAAQLLVKNKDLLSGKVKLIFQAGEEEDLGAKEVISNNELDDVDYVFGLHVSPFIPSGFFATRKGALMPSSSNFKIRVKGLG

SEQ ID NO: 31336 - protein, 85 aa, unidentified
  REGION 1..85: note = Description of Unknown:cds_NZ_WFIY01000004.1_cds_WP_155863204.1_1145 target sequence
GHVSSPHSTLDPIFISAQIVNLLHGLTSRIVNPLDGFTLSITSIHSGTKSNIIPDEAVMEGTVRGFDVFTIEKVKSKIKSLVDSL

SEQ ID NO: 31337 - protein, 85 aa, unidentified
  REGION 1..85: note = Description of Unknown:cds_NZ_WFIY01000004.1_cds_WP_155863204.1_1145 target sequence
CKSFNADCEVTFSDNCPPLINYPEITSRAMDILSNLRRPIVEIEPVMLADDFSRYLQLKPGCYIFIGTRNLEKGCIYPTHSPMFK

SEQ ID NO: 31338 - protein, 85 aa, unidentified
  REGION 1..85: note = Description of Unknown:cds_NZ_WFIY01000004.1_cds_WP_155863239.1_1187 target sequence
EILRREYNDVKNFSSWTLVYGRRKVGKSFLVRKYVNYDLYYVITRDLQAYFPTDNSFRNLNEAFSLTIKALRENKTVVIDEFQRM

SEQ ID NO: 31339 - protein, 85 aa, unidentified
  REGION 1..85: note = Description of Unknown:cds_NZ_WFIY01000004.1_cds_WP_155863239.1_1187 target sequence
PEKYWDGLSVEHPNGKLILVGSSFRIMQKLVDRQSPLLGLVLPYRLEIIHYSDVLSQVGNPLLSLIYRDPWTLSFVKSVKDLEDK

SEQ ID NO: 31340 - protein, 85 aa, unidentified
  REGION 1..85: note = Description of Unknown:cds_NZ_WFIY01000004.1_cds_WP_155863239.1_1187 target sequence
AYQLYMVTKALIGEIFEEEERQLTSLYEAILLSLAEGEWNTAIIAGSLNSKGFNVTPSSVSGYLETLQNMGLVEKIPIYGEKKRA

SEQ ID NO: 31341 - protein, 85 aa, unidentified
  REGION 1..85: note = Description of Unknown:cds_NZ_WFIY01000004.1_cds_WP_155863239.1_1187 target sequence
RWYYKISSPIISLIFYAEAKYNVSFTENVGELPIGREVQFSIGDLLAEKHSATLAYSPYEDIDIVLLDKGKPIIGYEVKLGEFSK

SEQ ID NO: 31342 - protein, 84 aa, unidentified
  REGION 1..84: note = Description of Unknown:cds_NZ_WFIY01000004.1_cds_WP_155863239.1_1187 target sequence
SPYEDIDIVLLDKGKPIIGYEVKLGEFSKAEAEKSIERIRRAGIPKAGLISLSEKPNFNADEELGPEDLVRISRDVFQKYVIRR

SEQ ID NO: 31343 - protein, 85 aa, unidentified
  REGION 1..85: note = Description of Unknown:cds_NZ_WFIY01000004.1_cds_WP_155863239.1_1187 target sequence
SFLVRKYVNYDLYYVITRDLQAYFPTDNSFRNLNEAFSLTIKALRENKTVVIDEFQRMPEKYWDGLSVEHPNGKLILVGSSFRIM

SEQ ID NO: 31344 - protein, 85 aa, unidentified
  REGION 1..85: note = Description of Unknown:cds_NZ_WFIY01000004.1_cds_WP_155863239.1_1187 target sequence
QKLVDRQSPLLGLVLPYRLEIIHYSDVLSQVGNPLLSLIYRDPWTLSFVKSVKDLEDKAYQLYMVTKALIGEIFEEEERQLTSLY

SEQ ID NO: 31345 - protein, 85 aa, unidentified
  REGION 1..85: note = Description of Unknown:cds_NZ_WFIY01000004.1_cds_WP_155863239.1_1187 target sequence
EAILLSLAEGEWNTAIIAGSLNSKGFNVTPSSVSGYLETLQNMGLVEKIPIYGEKKRARWYYKISSPIISLIFYAEAKYNVSFTE

SEQ ID NO: 31346 - protein, 85 aa, unidentified
  REGION 1..85: note = Description of Unknown:cds_NZ_WFIY01000004.1_cds_WP_155863239.1_1187 target sequence
NVGELPIGREVQFSIGDLLAEKHSATLAYSPYEDIDIVLLDKGKPIIGYEVKLGEFSKAEAEKSIERIRRAGIPKAGLISLSEKP

SEQ ID NO: 31347 - protein, 85 aa, unidentified
  REGION 1..85: note = Description of Unknown:cds_NZ_WFIY01000004.1_cds_WP_155864281.1_2274 target sequence
LSKYNIFLDDYKIMFNTLTGYAIRLTDEEMEKLKKGEVPEELKDIIEEGFSATFDEFLQKFRKEVLEPTLVLTYRCNFDCVYCFQ

SEQ ID NO: 31348 - protein, 85 aa, unidentified
  REGION 1..85: note = Description of Unknown:cds_NZ_WFIY01000004.1_cds_WP_155864281.1_2274 target sequence
KAFRNNSSVSDKVVRGFIKYVRTNAKGRKVRVTYFGGEPLLELGKIKEISTQLSDLKYSFSIVTNGSLLTRHVFEELKSLGLTHV

SEQ ID NO: 31349 - protein, 85 aa, unidentified
  REGION 1..85: note = Description of Unknown:cds_NZ_WFIY01000004.1_cds_WP_155864281.1_2274 target sequence
QITLDGPKEVHDKRRYFVGGKGSYDIILKNLKEIQDEVNVVLRVNIDVNNLDSFRDLLKDLKQNGITKVRLDPHLVHDNVFRNEY

SEQ ID NO: 31350 - protein, 85 aa, unidentified
  REGION 1..85: note = Description of Unknown:cds_NZ_WFIY01000004.1_cds_WP_155864281.1_2274 target sequence
WDYTFPKDEEGEILVKLWETAKDEGFEIPQDVFRLGLCVAHFDEDIVVDPFGNIYPCWAFTGNPLYVKGYLTEDGDVVIYEKLSG

SEQ ID NO: 31351 - protein, 84 aa, unidentified
  REGION 1..84: note = Description of Unknown:cds_NZ_WFIY01000004.1_cds_WP_155864281.1_2274 target sequence
CWAFTGNPLYVKGYLTEDGDVVIYEKLSGQRALNLWKKCKDCPYMPLCLGGCRFFSVLNKKGFDGIDCRKKSYEAIMKLLKYFV

SEQ ID NO: 31352 - protein, 85 aa, unidentified
  REGION 1..85: note = Description of Unknown:cds_NZ_WFIY01000004.1_cds_WP_155864281.1_2274 target sequence
EEMEKLKKGEVPEELKDIIEEGFSATFDEFLQKFRKEVLEPTLVLTYRCNFDCVYCFQKAFRNNSSVSDKVVRGFIKYVRTNAKG

SEQ ID NO: 31353 - protein, 85 aa, unidentified
  REGION 1..85: note = Description of Unknown:cds_NZ_WFIY01000004.1_cds_WP_155864281.1_2274 target sequence
RKVRVTYFGGEPLLELGKIKEISTQLSDLKYSFSIVTNGSLLTRHVFEELKSLGLTHVQITLDGPKEVHDKRRYFVGGKGSYDII

SEQ ID NO: 31354 - protein, 85 aa, unidentified
  REGION 1..85: note = Description of Unknown:cds_NZ_WFIY01000004.1_cds_WP_155864281.1_2274 target sequence
LKNLKEIQDEVNVVLRVNIDVNNLDSFRDLLKDLKQNGITKVRLDPHLVHDNVFRNEYWDYTFPKDEEGEILVKLWETAKDEGFE

SEQ ID NO: 31355 - protein, 85 aa, unidentified
  REGION 1..85: note = Description of Unknown:cds_NZ_WFIY01000004.1_cds_WP_155864281.1_2274 target sequence
IPQDVFRLGLCVAHFDEDIVVDPFGNIYPCWAFTGNPLYVKGYLTEDGDVVIYEKLSGQRALNLWKKCKDCPYMPLCLGGCRFFS

SEQ ID NO: 31356 - protein, 85 aa, unidentified
  REGION 1..85: note = Description of Unknown:cds_NZ_WFIY01000004.1_cds_WP_155862608.1_385 target sequence
LIAKISRSYIEGKIRAPPSKSLGIRLIFLSLLTKVNLYTSQELSDDILVAKNAVNTLKNGGDYVYLGGSATTLRMLIPIALALGK

SEQ ID NO: 31357 - protein, 85 aa, unidentified
  REGION 1..85: note = Description of Unknown:cds_NZ_WFIY01000004.1_cds_WP_155862608.1_385 target sequence
KIKIDGDETLRRRPLNAIIKALRSAKFSSNSLPLTIEGKLEEETVIEGWESSQYISGLIYAYHIIGGGKIRIIPPISSKSYIEMT

SEQ ID NO: 31358 - protein, 85 aa, unidentified
  REGION 1..85: note = Description of Unknown:cds_NZ_WFIY01000004.1_cds_WP_155862608.1_385 target sequence
IDLFNRIGSDVKFEGNEILINPRPLRGYEGEIPGDYALASFYALASLLTGGRIEIFGLYDPPKYFGDHNIVEIFSNMGAKSYYSS

SEQ ID NO: 31359 - protein, 85 aa, unidentified
  REGION 1..85: note = Description of Unknown:cds_NZ_WFIY01000004.1_cds_WP_155862608.1_385 target sequence
SWIVESTDEYYPIKINVNDVPDLAVSIATLSSVANGCSEIQGIERLRIKESDRVSTIISTLSAFGVNAKYVNDSITIKGVRKEKI

SEQ ID NO: 31360 - protein, 84 aa, unidentified
  REGION 1..84: note = Description of Unknown:cds_NZ_WFIY01000004.1_cds_WP_155862608.1_385 target sequence
IISTLSAFGVNAKYVNDSITIKGVRKEKILKGSITCPSDHRIAMMAGVLSLINGGEVDDAECVKKSNPFFWQDLIKLGGKISLE

SEQ ID NO: 31361 - protein, 85 aa, unidentified
  REGION 1..85: note = Description of Unknown:cds_NZ_WFIY01000004.1_cds_WP_155862608.1_385 target sequence
FLSLLTKVNLYTSQELSDDILVAKNAVNTLKNGGDYVYLGGSATTLRMLIPIALALGKKIKIDGDETLRRRPLNAIIKALRSAKF

SEQ ID NO: 31362 - protein, 85 aa, unidentified
  REGION 1..85: note = Description of Unknown:cds_NZ_WFIY01000004.1_cds_WP_155862608.1_385 target sequence
SSNSLPLTIEGKLEEETVIEGWESSQYISGLIYAYHIIGGGKIRIIPPISSKSYIEMTIDLFNRIGSDVKFEGNEILINPRPLRG

SEQ ID NO: 31363 - protein, 85 aa, unidentified
  REGION 1..85: note = Description of Unknown:cds_NZ_WFIY01000004.1_cds_WP_155862608.1_385 target sequence
YEGEIPGDYALASFYALASLLTGGRIEIFGLYDPPKYFGDHNIVEIFSNMGAKSYYSSSWIVESTDEYYPIKINVNDVPDLAVSI

SEQ ID NO: 31364 - protein, 85 aa, unidentified
  REGION 1..85: note = Description of Unknown:cds_NZ_WFIY01000004.1_cds_WP_155862608.1_385 target sequence
ATLSSVANGCSEIQGIERLRIKESDRVSTIISTLSAFGVNAKYVNDSITIKGVRKEKILKGSITCPSDHRIAMMAGVLSLINGGE

SEQ ID NO: 31365 - protein, 85 aa, unidentified
  REGION 1..85: note = Description of Unknown:cds_NZ_WFIY01000004.1_cds_WP_155864375.1_548 target sequence
TIAGSDSGGGAGLQADLKTFTSLGVFGTVIVTGLTAQNTFEVTRVMEVPPDFIEAQFDAVMKDLNPRYAKTGMLASTKVIETVKK

SEQ ID NO: 31366 - protein, 85 aa, unidentified
  REGION 1..85: note = Description of Unknown:cds_NZ_WFIY01000004.1_cds_WP_155864375.1_548 target sequence
KVEEYKINLILDPVMVAKSGASLVTEDVVSSIKLLMRDSLIITPNKFEAEKLIGKKIESEEGLKKSARELYEKYSVNVVVKGGSQ

SEQ ID NO: 31367 - protein, 85 aa, unidentified
  REGION 1..85: note = Description of Unknown:cds_NZ_WFIY01000004.1_cds_WP_155864375.1_548 target sequence
FGLDYAIIDGEELELKGEKIETNNTHGSGDVFSASITAYLAKGFKLKDAVKKAREFTTFAIKYSLDLGKGHGPVDPFAYPEALIE

SEQ ID NO: 31368 - protein, 85 aa, unidentified
  REGION 1..85: note = Description of Unknown:cds_NZ_WFIY01000004.1_cds_WP_155864375.1_548 target sequence
KEIAREELEDLLYFIEKKEEKTFKDLISENDKSNVGYLTKYGDFVTLAGGIIRYLDWLKIDGPLLVNWKKNDIYEALKRSGKKIG

SEQ ID NO: 31369 - protein, 84 aa, unidentified
  REGION 1..84: note = Description of Unknown:cds_NZ_WFIY01000004.1_cds_WP_155864375.1_548 target sequence
DWLKIDGPLLVNWKKNDIYEALKRSGKKIGVIISPNDKILSLAEENKIKLSESGINSDAITINGKIILVADSVEELKKKIEGLK

SEQ ID NO: 31370 - protein, 85 aa, unidentified
  REGION 1..85: note = Description of Unknown:cds_NZ_WFIY01000004.1_cds_WP_155864375.1_548 target sequence
TVIVTGLTAQNTFEVTRVMEVPPDFIEAQFDAVMKDLNPRYAKTGMLASTKVIETVKKKVEEYKINLILDPVMVAKSGASLVTED

SEQ ID NO: 31371 - protein, 85 aa, unidentified
  REGION 1..85: note = Description of Unknown:cds_NZ_WFIY01000004.1_cds_WP_155864375.1_548 target sequence
VVSSIKLLMRDSLIITPNKFEAEKLIGKKIESEEGLKKSARELYEKYSVNVVVKGGSQFGLDYAIIDGEELELKGEKIETNNTHG

SEQ ID NO: 31372 - protein, 85 aa, unidentified
  REGION 1..85: note = Description of Unknown:cds_NZ_WFIY01000004.1_cds_WP_155864375.1_548 target sequence
SGDVFSASITAYLAKGFKLKDAVKKAREFTTFAIKYSLDLGKGHGPVDPFAYPEALIEKEIAREELEDLLYFIEKKEEKTFKDLI

SEQ ID NO: 31373 - protein, 85 aa, unidentified
  REGION 1..85: note = Description of Unknown:cds_NZ_WFIY01000004.1_cds_WP_155864375.1_548 target sequence
SENDKSNVGYLTKYGDFVTLAGGIIRYLDWLKIDGPLLVNWKKNDIYEALKRSGKKIGVIISPNDKILSLAEENKIKLSESGINS

SEQ ID NO: 31374 - protein, 85 aa, unidentified
  REGION 1..85: note = Description of Unknown:cds_NZ_WFIY01000004.1_cds_WP_155863141.1_1063 target sequence
NFSIIDKILEYADPYNALMEKVKVEKDKIIVQGKEYKFSKPLMIAVGKASYKMAKFFLDRIEPVDYLVITPHGSNLPLKNVIEAG

SEQ ID NO: 31375 - protein, 85 aa, unidentified
  REGION 1..85: note = Description of Unknown:cds_NZ_WFIY01000004.1_cds_WP_155863141.1_1063 target sequence
HPQVDEFSLKAGERVKEMLTTEDYDLLIFLLSGGASALLEDPVIPLEEYRKINDRLIKSGLEITKINIVRKHLSRLKGGSLAKLS

SEQ ID NO: 31376 - protein, 85 aa, unidentified
  REGION 1..85: note = Description of Unknown:cds_NZ_WFIY01000004.1_cds_WP_155863141.1_1063 target sequence
KAKVLTLIVSDVPGNDLGSIGSGYTVADKSTVKDAKEILEDIGLPEYSRYLIETPKEVNADNYIILDNMDVLKKISSHLYNPLIL

SEQ ID NO: 31377 - protein, 85 aa, unidentified
  REGION 1..85: note = Description of Unknown:cds_NZ_WFIY01000004.1_cds_WP_155863141.1_1063 target sequence
TSQVVGEAKDLGKFIASIYKSILQYSIPFKKGSIIIGGEPEVTITGRFGKGGRNGEVALSLLQEARGNYEFYAIATDGIDGNSEY

SEQ ID NO: 31378 - protein, 84 aa, unidentified
  REGION 1..84: note = Description of Unknown:cds_NZ_WFIY01000004.1_cds_WP_155863141.1_1063 target sequence
EVALSLLQEARGNYEFYAIATDGIDGNSEYAGCVIRGDMNISYEEIEESLKNHSSYELLERYSAVIKTGLTYTNVNNVYILMVD

SEQ ID NO: 31379 - protein, 85 aa, unidentified
  REGION 1..85: note = Description of Unknown:cds_NZ_WFIY01000004.1_cds_WP_155863141.1_1063 target sequence
KIIVQGKEYKFSKPLMIAVGKASYKMAKFFLDRIEPVDYLVITPHGSNLPLKNVIEAGHPQVDEFSLKAGERVKEMLTTEDYDLL

SEQ ID NO: 31380 - protein, 85 aa, unidentified
  REGION 1..85: note = Description of Unknown:cds_NZ_WFIY01000004.1_cds_WP_155863141.1_1063 target sequence
IFLLSGGASALLEDPVIPLEEYRKINDRLIKSGLEITKINIVRKHLSRLKGGSLAKLSKAKVLTLIVSDVPGNDLGSIGSGYTVA

SEQ ID NO: 31381 - protein, 85 aa, unidentified
  REGION 1..85: note = Description of Unknown:cds_NZ_WFIY01000004.1_cds_WP_155863141.1_1063 target sequence
DKSTVKDAKEILEDIGLPEYSRYLIETPKEVNADNYIILDNMDVLKKISSHLYNPLILTSQVVGEAKDLGKFIASIYKSILQYSI

SEQ ID NO: 31382 - protein, 85 aa, unidentified
  REGION 1..85: note = Description of Unknown:cds_NZ_WFIY01000004.1_cds_WP_155863141.1_1063 target sequence
PFKKGSIIIGGEPEVTITGRFGKGGRNGEVALSLLQEARGNYEFYAIATDGIDGNSEYAGCVIRGDMNISYEEIEESLKNHSSYE

SEQ ID NO: 31383 - protein, 85 aa, unidentified
  REGION 1..85: note = Description of Unknown:cds_NZ_WFIY01000004.1_cds_1156 target sequence
VIEEKLKEVYGIDKYGKNIPEWAEKIKYEFVDEVMQDKLREAKIWINELYKVFEELQERLKVKGMLFSREMKSFLEDPRRHLVKK

SEQ ID NO: 31384 - protein, 85 aa, unidentified
  REGION 1..85: note = Description of Unknown:cds_NZ_WFIY01000004.1_cds_1156 target sequence
LFIYYHDLIRGKLSVDDFIVKGRQAIVSSFNSNMRSIYQSWGLASIVLLLAEKGNYELIYPEHGYLDFDRSGKQKSGTIPPNIVL

SEQ ID NO: 31385 - protein, 85 aa, unidentified
  REGION 1..85: note = Description of Unknown:cds_NZ_WFIY01000004.1_cds_1156 target sequence
GNVVASFSFFLEAPRPITWEDGGDLEKVWKFYSLVRPDMLIYEGTEINIVDPQGDIPIKRPDYIVEYKELPNWWKRWRYLKDYKP

SEQ ID NO: 31386 - protein, 85 aa, unidentified
  REGION 1..85: note = Description of Unknown:cds_NZ_WFIY01000004.1_cds_1156 target sequence
LDGNEWRARWLKGLYEGFAEILGVEAKDLPSFSEGKSKRIKEYKVIELYEAIYKPRKGGVVISRVPVEDGVKKEIINNNVFLIDD

SEQ ID NO: 31387 - protein, 84 aa, unidentified
  REGION 1..84: note = Description of Unknown:cds_NZ_WFIY01000004.1_cds_1156 target sequence
KGGVVISRVPVEDGVKKEIINNNVFLIDDVGFDRKKLEILVERMTKGIKASYDVRELAYKFAMSRKEEFIEWMKSQGLCWETSS

SEQ ID NO: 31388 - protein, 85 aa, unidentified
  REGION 1..85: note = Description of Unknown:cds_NZ_WFIY01000004.1_cds_1156 target sequence
YEFVDEVMQDKLREAKIWINELYKVFEELQERLKVKGMLFSREMKSFLEDPRRHLVKKLFIYYHDLIRGKLSVDDFIVKGRQAIV

SEQ ID NO: 31389 - protein, 85 aa, unidentified
  REGION 1..85: note = Description of Unknown:cds_NZ_WFIY01000004.1_cds_1156 target sequence
SSFNSNMRSIYQSWGLASIVLLLAEKGNYELIYPEHGYLDFDRSGKQKSGTIPPNIVLGNVVASFSFFLEAPRPITWEDGGDLEK

SEQ ID NO: 31390 - protein, 85 aa, unidentified
  REGION 1..85: note = Description of Unknown:cds_NZ_WFIY01000004.1_cds_1156 target sequence
VWKFYSLVRPDMLIYEGTEINIVDPQGDIPIKRPDYIVEYKELPNWWKRWRYLKDYKPLDGNEWRARWLKGLYEGFAEILGVEAK

SEQ ID NO: 31391 - protein, 85 aa, unidentified
  REGION 1..85: note = Description of Unknown:cds_NZ_WFIY01000004.1_cds_1156 target sequence
DLPSFSEGKSKRIKEYKVIELYEAIYKPRKGGVVISRVPVEDGVKKEIINNNVFLIDDVGFDRKKLEILVERMTKGIKASYDVRE

SEQ ID NO: 31392 - protein, 85 aa, unidentified
  REGION 1..85: note = Description of Unknown:cds_NZ_WFIY01000004.1_cds_WP_155863362.1_1334 target sequence
ELPKQIDALFRENSELAKSITEQIHKLAPIVSKEIDREKIKIMNFCGSHEWVTTHYGLRALMPETVELIPGPGCPVCVTPSSDIE

SEQ ID NO: 31393 - protein, 85 aa, unidentified
  REGION 1..85: note = Description of Unknown:cds_NZ_WFIY01000004.1_cds_WP_155863362.1_1334 target sequence
NVIKLAMEGYTVYTFGDVFKLPTVKHYKKDEVGSLAAARALGADVRIVYSFVDAIEDAKKSGKPSVFFGIGFETTTPSYAVLFEK

SEQ ID NO: 31394 - protein, 85 aa, unidentified
  REGION 1..85: note = Description of Unknown:cds_NZ_WFIY01000004.1_cds_WP_155863362.1_1334 target sequence
EKVPKNLLFYSSLKLTAPAAEFAVRLHKSKGLVPVSGVIGPGHVSSIIGAISWDFFPREYKIPAVVTGFEPIDVLAGVLKILQDL

SEQ ID NO: 31395 - protein, 85 aa, unidentified
  REGION 1..85: note = Description of Unknown:cds_NZ_WFIY01000004.1_cds_WP_155863362.1_1334 target sequence
HSGEITYTNLEYKRVVKYQGNVFAQVEINKVFKPVDAIWRGIGSIPKSGLDLREEYSMYNAREQLGIKEKPWDYDLPPGCRCNEV

SEQ ID NO: 31396 - protein, 84 aa, unidentified
  REGION 1..84: note = Description of Unknown:cds_NZ_WFIY01000004.1_cds_WP_155863362.1_1334 target sequence
YSMYNAREQLGIKEKPWDYDLPPGCRCNEVTLGIAYPTDCPMFMKACTPARPWGPCMVSMEGACAVWARFGSTERITKIVSEVK

SEQ ID NO: 31397 - protein, 85 aa, unidentified
  REGION 1..85: note = Description of Unknown:cds_NZ_WFIY01000004.1_cds_WP_155863362.1_1334 target sequence
APIVSKEIDREKIKIMNFCGSHEWVTTHYGLRALMPETVELIPGPGCPVCVTPSSDIENVIKLAMEGYTVYTFGDVFKLPTVKHY

SEQ ID NO: 31398 - protein, 85 aa, unidentified
  REGION 1..85: note = Description of Unknown:cds_NZ_WFIY01000004.1_cds_WP_155863362.1_1334 target sequence
KKDEVGSLAAARALGADVRIVYSFVDAIEDAKKSGKPSVFFGIGFETTTPSYAVLFEKEKVPKNLLFYSSLKLTAPAAEFAVRLH

SEQ ID NO: 31399 - protein, 85 aa, unidentified
  REGION 1..85: note = Description of Unknown:cds_NZ_WFIY01000004.1_cds_WP_155863362.1_1334 target sequence
KSKGLVPVSGVIGPGHVSSIIGAISWDFFPREYKIPAVVTGFEPIDVLAGVLKILQDLHSGEITYTNLEYKRVVKYQGNVFAQVE

SEQ ID NO: 31400 - protein, 85 aa, unidentified
  REGION 1..85: note = Description of Unknown:cds_NZ_WFIY01000004.1_cds_WP_155863362.1_1334 target sequence
INKVFKPVDAIWRGIGSIPKSGLDLREEYSMYNAREQLGIKEKPWDYDLPPGCRCNEVTLGIAYPTDCPMFMKACTPARPWGPCM

SEQ ID NO: 31401 - protein, 85 aa, unidentified
  REGION 1..85: note = Description of Unknown:cds_NZ_WFIY01000004.1_cds_WP_155863733.1_1600 target sequence
EIGTPLLEGSKKLMLLGSGELGKEIAIEAQRMGIEVIAVDRYDMAPAMHVAHRKYVIDMMDPSALKSIVKRENPDGIITEIEAIN

SEQ ID NO: 31402 - protein, 85 aa, unidentified
  REGION 1..85: note = Description of Unknown:cds_NZ_WFIY01000004.1_cds_WP_155863733.1_1600 target sequence
TDALIDLEDSGYKIIPNAQAVKICMNRIELRRLAAEKLKVPTTTYAFAESAEEVRKACRDIGFPCLIKPEMSSSGHGHVLINKED

SEQ ID NO: 31403 - protein, 85 aa, unidentified
  REGION 1..85: note = Description of Unknown:cds_NZ_WFIY01000004.1_cds_WP_155863733.1_1600 target sequence
EIEEAYKESISHARGKSKRVIVEEYVKIDTELTILTYRYNTGKGIVTKTFPPVEHQRPSYYYVESWQPATVQDEIAEKAKSYAIK

SEQ ID NO: 31404 - protein, 85 aa, unidentified
  REGION 1..85: note = Description of Unknown:cds_NZ_WFIY01000004.1_cds_WP_155863733.1_1600 target sequence
VVEELGGVGIFGVEIIKSGNRVLFSEVSPRPHDTGMVTMASQDISEFQVHVRSALGLPTPEVRLLTPAASHVILAEREEWNPKYL

SEQ ID NO: 31405 - protein, 84 aa, unidentified
  REGION 1..84: note = Description of Unknown:cds_NZ_WFIY01000004.1_cds_WP_155863733.1_1600 target sequence
GLPTPEVRLLTPAASHVILAEREEWNPKYLNLEKALEIPGVQVRLFGKPYSYEKRRMGVVLATGSTIEEAKEKARKAAALILVE

SEQ ID NO: 31406 - protein, 85 aa, unidentified
  REGION 1..85: note = Description of Unknown:cds_NZ_WFIY01000004.1_cds_WP_155863733.1_1600 target sequence
EAQRMGIEVIAVDRYDMAPAMHVAHRKYVIDMMDPSALKSIVKRENPDGIITEIEAINTDALIDLEDSGYKIIPNAQAVKICMNR

SEQ ID NO: 31407 - protein, 85 aa, unidentified
  REGION 1..85: note = Description of Unknown:cds_NZ_WFIY01000004.1_cds_WP_155863733.1_1600 target sequence
IELRRLAAEKLKVPTTTYAFAESAEEVRKACRDIGFPCLIKPEMSSSGHGHVLINKEDEIEEAYKESISHARGKSKRVIVEEYVK

SEQ ID NO: 31408 - protein, 85 aa, unidentified
  REGION 1..85: note = Description of Unknown:cds_NZ_WFIY01000004.1_cds_WP_155863733.1_1600 target sequence
IDTELTILTYRYNTGKGIVTKTFPPVEHQRPSYYYVESWQPATVQDEIAEKAKSYAIKVVEELGGVGIFGVEIIKSGNRVLFSEV

SEQ ID NO: 31409 - protein, 85 aa, unidentified
  REGION 1..85: note = Description of Unknown:cds_NZ_WFIY01000004.1_cds_WP_155863733.1_1600 target sequence
SPRPHDTGMVTMASQDISEFQVHVRSALGLPTPEVRLLTPAASHVILAEREEWNPKYLNLEKALEIPGVQVRLFGKPYSYEKRRM

SEQ ID NO: 31410 - protein, 85 aa, unidentified
  REGION 1..85: note = Description of Unknown:cds_NZ_WFIY01000004.1_cds_WP_155864461.1_1770 target sequence
FIQMLTVIVSMTFAIRASNNMIATTLPLFSKYYFHFTQSEVGILSALLSLGTFITSGIINSRLQSNTRRKFFIISSVAYAVILPI

SEQ ID NO: 31411 - protein, 85 aa, unidentified
  REGION 1..85: note = Description of Unknown:cds_NZ_WFIY01000004.1_cds_WP_155864461.1_1770 target sequence
FYFANSLTIWIVSLLAGLSLGSIMPNIITYAGLLDDRKARERLLSIYTLALSASLVAGPAIETAVLTHFAIPYVFLFFEPFAILS

SEQ ID NO: 31412 - protein, 85 aa, unidentified
  REGION 1..85: note = Description of Unknown:cds_NZ_WFIY01000004.1_cds_WP_155864461.1_1770 target sequence
AILSFFIKFPEENSNSARVSVFNNPGFKTAVINILTYNIPFSVILTFGGIYAVDYLHVSFAEVTALFSLFFTTSFLARIYLSIRP

SEQ ID NO: 31413 - protein, 85 aa, unidentified
  REGION 1..85: note = Description of Unknown:cds_NZ_WFIY01000004.1_cds_WP_155864461.1_1770 target sequence
PQSVRLHAIAAISMTTIGLLAILFSNNLIIFSIALLILGFPHGLTYPLSVISISRTFKPYERNAANSIFFAIMMIIGIITPTISG

SEQ ID NO: 31414 - protein, 84 aa, unidentified
  REGION 1..84: note = Description of Unknown:cds_NZ_WFIY01000004.1_cds_WP_155864461.1_1770 target sequence
TFKPYERNAANSIFFAIMMIIGIITPTISGFVAELIGIKYLFGTLIPVILILLALLNRYVGYVDKVILEETRKNSLSISKDSKA

SEQ ID NO: 31415 - protein, 85 aa, unidentified
  REGION 1..85: note = Description of Unknown:cds_NZ_WFIY01000004.1_cds_WP_155864461.1_1770 target sequence
LFSKYYFHFTQSEVGILSALLSLGTFITSGIINSRLQSNTRRKFFIISSVAYAVILPIFYFANSLTIWIVSLLAGLSLGSIMPNI

SEQ ID NO: 31416 - protein, 85 aa, unidentified
  REGION 1..85: note = Description of Unknown:cds_NZ_WFIY01000004.1_cds_WP_155864461.1_1770 target sequence
ITYAGLLDDRKARERLLSIYTLALSASLVAGPAIETAVLTHFAIPYVFLFFEPFAILSAILSFFIKFPEENSNSARVSVFNNPGF

SEQ ID NO: 31417 - protein, 85 aa, unidentified
  REGION 1..85: note = Description of Unknown:cds_NZ_WFIY01000004.1_cds_WP_155864461.1_1770 target sequence
KTAVINILTYNIPFSVILTFGGIYAVDYLHVSFAEVTALFSLFFTTSFLARIYLSIRPPQSVRLHAIAAISMTTIGLLAILFSNN

SEQ ID NO: 31418 - protein, 85 aa, unidentified
  REGION 1..85: note = Description of Unknown:cds_NZ_WFIY01000004.1_cds_WP_155864461.1_1770 target sequence
LIIFSIALLILGFPHGLTYPLSVISISRTFKPYERNAANSIFFAIMMIIGIITPTISGFVAELIGIKYLFGTLIPVILILLALLN

SEQ ID NO: 31419 - protein, 85 aa, unidentified
  REGION 1..85: note = Description of Unknown:cds_NZ_WFIY01000004.1_cds_WP_155863925.1_1839 target sequence
TEVYIASAVRTPIGKFGGVFKDISPVDLGAIAIKEALKRANVDPKRVDIVIMGNILRAAFGQDLARQAAVKAGIPYEIDGYSVDM

SEQ ID NO: 31420 - protein, 85 aa, unidentified
  REGION 1..85: note = Description of Unknown:cds_NZ_WFIY01000004.1_cds_WP_155863925.1_1839 target sequence
VCSSGMMSITNAVELIKTGDADIVVAGGMESMSQAALAVRSHVRWGVKMLMGKQLEFVDTMLMDGLTDPFNMKLMGEEADMVAKA

SEQ ID NO: 31421 - protein, 85 aa, unidentified
  REGION 1..85: note = Description of Unknown:cds_NZ_WFIY01000004.1_cds_WP_155863925.1_1839 target sequence
HNFTRQELDEVAYQSHKRAAEATEKGLFASEIVPVEVNGTLITKDEGIRADTSIEKLAKLKPAFSKDGFHTAGNSSQLSDGASAL

SEQ ID NO: 31422 - protein, 85 aa, unidentified
  REGION 1..85: note = Description of Unknown:cds_NZ_WFIY01000004.1_cds_WP_155863925.1_1839 target sequence
VLVSEKAVKELGIDPIAKVLGFSWAGIESWRFTEAPIFAVKKLLQKLNMDISKFDYFENNEAFAVNSVLANRYLGIPYDKLNVFG

SEQ ID NO: 31423 - protein, 84 aa, unidentified
  REGION 1..84: note = Description of Unknown:cds_NZ_WFIY01000004.1_cds_WP_155863925.1_1839 target sequence
YFENNEAFAVNSVLANRYLGIPYDKLNVFGGAIALGHPIGASGARIVTTLINVLSKMKGERGIASICHGTGGSTAMAIELLRPL

SEQ ID NO: 31424 - protein, 85 aa, unidentified
  REGION 1..85: note = Description of Unknown:cds_NZ_WFIY01000004.1_cds_WP_155863925.1_1839 target sequence
LGAIAIKEALKRANVDPKRVDIVIMGNILRAAFGQDLARQAAVKAGIPYEIDGYSVDMVCSSGMMSITNAVELIKTGDADIVVAG

SEQ ID NO: 31425 - protein, 85 aa, unidentified
  REGION 1..85: note = Description of Unknown:cds_NZ_WFIY01000004.1_cds_WP_155863925.1_1839 target sequence
GMESMSQAALAVRSHVRWGVKMLMGKQLEFVDTMLMDGLTDPFNMKLMGEEADMVAKAHNFTRQELDEVAYQSHKRAAEATEKGL

SEQ ID NO: 31426 - protein, 85 aa, unidentified
  REGION 1..85: note = Description of Unknown:cds_NZ_WFIY01000004.1_cds_WP_155863925.1_1839 target sequence
FASEIVPVEVNGTLITKDEGIRADTSIEKLAKLKPAFSKDGFHTAGNSSQLSDGASALVLVSEKAVKELGIDPIAKVLGFSWAGI

SEQ ID NO: 31427 - protein, 85 aa, unidentified
  REGION 1..85: note = Description of Unknown:cds_NZ_WFIY01000004.1_cds_WP_155863925.1_1839 target sequence
ESWRFTEAPIFAVKKLLQKLNMDISKFDYFENNEAFAVNSVLANRYLGIPYDKLNVFGGAIALGHPIGASGARIVTTLINVLSKM

SEQ ID NO: 31428 - protein, 85 aa, unidentified
  REGION 1..85: note = Description of Unknown:cds_NZ_WFIY01000004.1_cds_WP_155864043.1_1977 target sequence
TRKILMHVGPETIDYDVLLGGVKGDVGFTSKEFVDAMSFSLKFLRKLMGVSESYQPFIIPGGGTSAMESVTSLLRKGDKVLVVSN

SEQ ID NO: 31429 - protein, 85 aa, unidentified
  REGION 1..85: note = Description of Unknown:cds_NZ_WFIY01000004.1_cds_WP_155864043.1_1977 target sequence
GVFGNRWIDIFSRYPVNVKALKAKAGYYVKPEEIEEEVKKDNYTMVTMTHVETSTGVREPIAEVTKRIRDYVDLIVVDGVASVGG

SEQ ID NO: 31430 - protein, 85 aa, unidentified
  REGION 1..85: note = Description of Unknown:cds_NZ_WFIY01000004.1_cds_WP_155864043.1_1977 target sequence
EEVRAEDWKVDVFLTASQKAIGTPPGAGLLVVSENATKRLGEDSVAGYYLNLKNWLGVMQSMEKGKASYFSTLPVHLILMIKKAF

SEQ ID NO: 31431 - protein, 85 aa, unidentified
  REGION 1..85: note = Description of Unknown:cds_NZ_WFIY01000004.1_cds_WP_155864043.1_1977 target sequence
ELIETEGIENRIRRHEIVSSAVRKGIEALGLEIVAKTPEAYSNTVTGVMLKKANPNDLLSMSLAEGIEFAPGVHPDLAGKYFRIG

SEQ ID NO: 31432 - protein, 84 aa, unidentified
  REGION 1..84: note = Description of Unknown:cds_NZ_WFIY01000004.1_cds_WP_155864043.1_1977 target sequence
NDLLSMSLAEGIEFAPGVHPDLAGKYFRIGHMGWVNINDVISAIAVIERVLSKLGEPINFGEGVKAVQEYLINGISISSSNIAP

SEQ ID NO: 31433 - protein, 85 aa, unidentified
  REGION 1..85: note = Description of Unknown:cds_NZ_WFIY01000004.1_cds_WP_155864043.1_1977 target sequence
FTSKEFVDAMSFSLKFLRKLMGVSESYQPFIIPGGGTSAMESVTSLLRKGDKVLVVSNGVFGNRWIDIFSRYPVNVKALKAKAGY

SEQ ID NO: 31434 - protein, 85 aa, unidentified
  REGION 1..85: note = Description of Unknown:cds_NZ_WFIY01000004.1_cds_WP_155864043.1_1977 target sequence
YVKPEEIEEEVKKDNYTMVTMTHVETSTGVREPIAEVTKRIRDYVDLIVVDGVASVGGEEVRAEDWKVDVFLTASQKAIGTPPGA

SEQ ID NO: 31435 - protein, 85 aa, unidentified
  REGION 1..85: note = Description of Unknown:cds_NZ_WFIY01000004.1_cds_WP_155864043.1_1977 target sequence
GLLVVSENATKRLGEDSVAGYYLNLKNWLGVMQSMEKGKASYFSTLPVHLILMIKKAFELIETEGIENRIRRHEIVSSAVRKGIE

SEQ ID NO: 31436 - protein, 85 aa, unidentified
  REGION 1..85: note = Description of Unknown:cds_NZ_WFIY01000004.1_cds_WP_155864043.1_1977 target sequence
ALGLEIVAKTPEAYSNTVTGVMLKKANPNDLLSMSLAEGIEFAPGVHPDLAGKYFRIGHMGWVNINDVISAIAVIERVLSKLGEP

SEQ ID NO: 31437 - protein, 85 aa, unidentified
  REGION 1..85: note = Description of Unknown:cds_NC_039223.1_cds_YP_009513195.1_2 target sequence
ATFTDAEIDDIFETSGTVIDSIITAQGKSAETVGRSAIPQGKTKALSTAWEKHGSVQPHASQDAPDQQDRTEKQPSTPEQATPHN

SEQ ID NO: 31438 - protein, 85 aa, unidentified
  REGION 1..85: note = Description of Unknown:cds_NC_039223.1_cds_YP_009513195.1_2 target sequence
NPPITSTEPPPTQAASETSDTQLKTGASNSLLSMLDKLSNKSSNAKKGPWSGPQEGHHQPPAQQHGNQPSYGSNQGRPQHQAKAV

SEQ ID NO: 31439 - protein, 85 aa, unidentified
  REGION 1..85: note = Description of Unknown:cds_NC_039223.1_cds_YP_009513195.1_2 target sequence
PGNRGTDENTAYHGQRKESQPSAGATPHAPQSGQSQDNTPVPVDRVQLPADFAQAMMSMMEALSQKVSKVDHQLDLVLKQTSSIP

SEQ ID NO: 31440 - protein, 85 aa, unidentified
  REGION 1..85: note = Description of Unknown:cds_NC_039223.1_cds_YP_009513195.1_2 target sequence
MMRSEIQQLKTSVAIMEANLGMMKILDPGCANVSSLSDLRAVARSHPVLVSGPGDPSPYMTQGGEMTLNKLSQPVQHPSELIKSA

SEQ ID NO: 31441 - protein, 84 aa, unidentified
  REGION 1..84: note = Description of Unknown:cds_NC_039223.1_cds_YP_009513195.1_2 target sequence
PSPYMTQGGEMTLNKLSQPVQHPSELIKSATASGPDMGVEKDTVRALITSRPMHPSSSAKLLSKLDAARSIEEIRKIKRLALNG

SEQ ID NO: 31442 - protein, 85 aa, unidentified
  REGION 1..85: note = Description of Unknown:cds_NC_039223.1_cds_YP_009513195.1_2 target sequence
KSAETVGRSAIPQGKTKALSTAWEKHGSVQPHASQDAPDQQDRTEKQPSTPEQATPHNNPPITSTEPPPTQAASETSDTQLKTGA

SEQ ID NO: 31443 - protein, 85 aa, unidentified
  REGION 1..85: note = Description of Unknown:cds_NC_039223.1_cds_YP_009513195.1_2 target sequence
SNSLLSMLDKLSNKSSNAKKGPWSGPQEGHHQPPAQQHGNQPSYGSNQGRPQHQAKAVPGNRGTDENTAYHGQRKESQPSAGATP

SEQ ID NO: 31444 - protein, 85 aa, unidentified
  REGION 1..85: note = Description of Unknown:cds_NC_039223.1_cds_YP_009513195.1_2 target sequence
HAPQSGQSQDNTPVPVDRVQLPADFAQAMMSMMEALSQKVSKVDHQLDLVLKQTSSIPMMRSEIQQLKTSVAIMEANLGMMKILD

SEQ ID NO: 31445 - protein, 85 aa, unidentified
  REGION 1..85: note = Description of Unknown:cds_NC_039223.1_cds_YP_009513195.1_2 target sequence
PGCANVSSLSDLRAVARSHPVLVSGPGDPSPYMTQGGEMTLNKLSQPVQHPSELIKSATASGPDMGVEKDTVRALITSRPMHPSS

SEQ ID NO: 31446 - protein, 85 aa, unidentified
  REGION 1..85: note = Description of Unknown:cds_NZ_WFIY01000004.1_cds_WP_155863317.1_1281 target sequence
DIEKLKKDVLEIEDKIIEIRRKIHEYPELSYKEYNTAKLVAETLKSLGIEVKVGVGLPTAVVGILKTSKPGKVVALRADMDALPV

SEQ ID NO: 31447 - protein, 85 aa, unidentified
  REGION 1..85: note = Description of Unknown:cds_NZ_WFIY01000004.1_cds_WP_155863317.1_1281 target sequence
EEMTDLPFKSKVKGVMHACGHDTHVAMLLGGAMLLAKNINMLSGEVRFIFQPAEEDGGLGGAKPMIDAGVMDGVDYVFGLHISSA

SEQ ID NO: 31448 - protein, 85 aa, unidentified
  REGION 1..85: note = Description of Unknown:cds_NZ_WFIY01000004.1_cds_WP_155863317.1_1281 target sequence
YPAGVFATRKGPLMATPDAFKIIVHGKGGHGSAPHETIDPIYISLLIANAIYGITARQIDPVQPFIISITSIHSGTKDNIIPDDA

SEQ ID NO: 31449 - protein, 85 aa, unidentified
  REGION 1..85: note = Description of Unknown:cds_NZ_WFIY01000004.1_cds_WP_155863317.1_1281 target sequence
IMEGTIRSLDENVRKKALDYMERIVSSICSIYGAECRVEFMKDVYPITVNDPETTEEVMKILGNISKVEETQPILGAEDFSRFLQ

SEQ ID NO: 31450 - protein, 84 aa, unidentified
  REGION 1..84: note = Description of Unknown:cds_NZ_WFIY01000004.1_cds_WP_155863317.1_1281 target sequence
TEEVMKILGNISKVEETQPILGAEDFSRFLQKAKGTYFFLGTRNEKLGCIYPNHSSKFCVDESVLKLGALAHAALAIEFTNKKE

SEQ ID NO: 31451 - protein, 85 aa, unidentified
  REGION 1..85: note = Description of Unknown:cds_NZ_WFIY01000004.1_cds_WP_155863317.1_1281 target sequence
ELSYKEYNTAKLVAETLKSLGIEVKVGVGLPTAVVGILKTSKPGKVVALRADMDALPVEEMTDLPFKSKVKGVMHACGHDTHVAM

SEQ ID NO: 31452 - protein, 85 aa, unidentified
  REGION 1..85: note = Description of Unknown:cds_NZ_WFIY01000004.1_cds_WP_155863317.1_1281 target sequence
LLGGAMLLAKNINMLSGEVRFIFQPAEEDGGLGGAKPMIDAGVMDGVDYVFGLHISSAYPAGVFATRKGPLMATPDAFKIIVHGK

SEQ ID NO: 31453 - protein, 85 aa, unidentified
  REGION 1..85: note = Description of Unknown:cds_NZ_WFIY01000004.1_cds_WP_155863317.1_1281 target sequence
GGHGSAPHETIDPIYISLLIANAIYGITARQIDPVQPFIISITSIHSGTKDNIIPDDAIMEGTIRSLDENVRKKALDYMERIVSS

SEQ ID NO: 31454 - protein, 85 aa, unidentified
  REGION 1..85: note = Description of Unknown:cds_NZ_WFIY01000004.1_cds_WP_155863317.1_1281 target sequence
ICSIYGAECRVEFMKDVYPITVNDPETTEEVMKILGNISKVEETQPILGAEDFSRFLQKAKGTYFFLGTRNEKLGCIYPNHSSKF

SEQ ID NO: 31455 - protein, 85 aa, unidentified
  REGION 1..85: note = Description of Unknown:cds_NZ_WFIY01000004.1_cds_WP_155862364.1_96 target sequence
DVRRKLRILIITSLAHFNNDGTFLIFPLLIVYYSTVDRISLIILGSMSIIYTLLSGLLSPLIGDFADKHNVDSALMSLGIFLEGL

SEQ ID NO: 31456 - protein, 85 aa, unidentified
  REGION 1..85: note = Description of Unknown:cds_NZ_WFIY01000004.1_cds_WP_155862364.1_96 target sequence
AIGIFGISFMFPSIALIALGSTLLGIGQAFYHPIGGAILSRTFGKEAGRALGINGSLGSLGRSLMPSIVTFLILGLGEITGLLTV

SEQ ID NO: 31457 - protein, 85 aa, unidentified
  REGION 1..85: note = Description of Unknown:cds_NZ_WFIY01000004.1_cds_WP_155862364.1_96 target sequence
SAYMVLSAMIIFVGLKFYKRESIDVRKSKEKLEKAFYKFLIILGSIVFIRSMFITGTTTFVGEFVYDVYHSKELAGIFLTIGFLG

SEQ ID NO: 31458 - protein, 85 aa, unidentified
  REGION 1..85: note = Description of Unknown:cds_NZ_WFIY01000004.1_cds_WP_155862364.1_96 target sequence
SVLGQPAFGWLTERKGGRYAFIVSSLLTIVTFIGFLAFAENLILSLSFYTIFTFSAFSSFPVLLGYVSQTFPKNFYTVANSYIWG

SEQ ID NO: 31459 - protein, 84 aa, unidentified
  REGION 1..84: note = Description of Unknown:cds_NZ_WFIY01000004.1_cds_WP_155862364.1_96 target sequence
FSAFSSFPVLLGYVSQTFPKNFYTVANSYIWGIGVTVGGAGGNALITVLLGLRYTILSSFYIMLGLAIFSAILMPLIPKRVSTP

SEQ ID NO: 31460 - protein, 85 aa, unidentified
  REGION 1..85: note = Description of Unknown:cds_NZ_WFIY01000004.1_cds_WP_155862364.1_96 target sequence
LLIVYYSTVDRISLIILGSMSIIYTLLSGLLSPLIGDFADKHNVDSALMSLGIFLEGLAIGIFGISFMFPSIALIALGSTLLGIG

SEQ ID NO: 31461 - protein, 85 aa, unidentified
  REGION 1..85: note = Description of Unknown:cds_NZ_WFIY01000004.1_cds_WP_155862364.1_96 target sequence
QAFYHPIGGAILSRTFGKEAGRALGINGSLGSLGRSLMPSIVTFLILGLGEITGLLTVSAYMVLSAMIIFVGLKFYKRESIDVRK

SEQ ID NO: 31462 - protein, 85 aa, unidentified
  REGION 1..85: note = Description of Unknown:cds_NZ_WFIY01000004.1_cds_WP_155862364.1_96 target sequence
SKEKLEKAFYKFLIILGSIVFIRSMFITGTTTFVGEFVYDVYHSKELAGIFLTIGFLGSVLGQPAFGWLTERKGGRYAFIVSSLL

SEQ ID NO: 31463 - protein, 85 aa, unidentified
  REGION 1..85: note = Description of Unknown:cds_NZ_WFIY01000004.1_cds_WP_155862364.1_96 target sequence
TIVTFIGFLAFAENLILSLSFYTIFTFSAFSSFPVLLGYVSQTFPKNFYTVANSYIWGIGVTVGGAGGNALITVLLGLRYTILSS

SEQ ID NO: 31464 - protein, 85 aa, unidentified
  REGION 1..85: note = Description of Unknown:cds_NZ_WFIY01000004.1_cds_WP_155862483.1_239 target sequence
KCLDCGYETDINQKIITCPRCGGLLEIKVKLKGFSFSNLKGRGVWRYKDAIPGNYSKIVSINEGNTPLIPSRNYKQTFYKFEGAN

SEQ ID NO: 31465 - protein, 85 aa, unidentified
  REGION 1..85: note = Description of Unknown:cds_NZ_WFIY01000004.1_cds_WP_155862483.1_239 target sequence
PTGSFKDRGMTVAVSSAVNTGYKVVAAASTGNTAASAAAYASRAGLRIYLVLPKGKVALGKLAQSILYGATILEVNGSFDVAMTS

SEQ ID NO: 31466 - protein, 85 aa, unidentified
  REGION 1..85: note = Description of Unknown:cds_NZ_WFIY01000004.1_cds_WP_155862483.1_239 target sequence
VMRLYKDLGIVYPLNSFNPWRLEGQKTIAYEIAEEIGEPDNVIVPVGNAGNIYAIWKGFTELQEAGVISKVPRMIGVQAEGAAPI

SEQ ID NO: 31467 - protein, 85 aa, unidentified
  REGION 1..85: note = Description of Unknown:cds_NZ_WFIY01000004.1_cds_WP_155862483.1_239 target sequence
AKAIEKGLNEPEFFENPETIATAIRIGKPVNWKKAIKAIKSSKGTAISVSDQEIIDAQKRLAREEGIGAEPASAAALAGYDKAIK

SEQ ID NO: 31468 - protein, 84 aa, unidentified
  REGION 1..84: note = Description of Unknown:cds_NZ_WFIY01000004.1_cds_WP_155862483.1_239 target sequence
IIDAQKRLAREEGIGAEPASAAALAGYDKAIKEGIVDKDQKNVLILTGHALKDPDAMLRLDARRILINPEHIENIVLGEINDNN

SEQ ID NO: 31469 - protein, 85 aa, unidentified
  REGION 1..85: note = Description of Unknown:cds_NZ_WFIY01000004.1_cds_WP_155862483.1_239 target sequence
KVKLKGFSFSNLKGRGVWRYKDAIPGNYSKIVSINEGNTPLIPSRNYKQTFYKFEGANPTGSFKDRGMTVAVSSAVNTGYKVVAA

SEQ ID NO: 31470 - protein, 85 aa, unidentified
  REGION 1..85: note = Description of Unknown:cds_NZ_WFIY01000004.1_cds_WP_155862483.1_239 target sequence
ASTGNTAASAAAYASRAGLRIYLVLPKGKVALGKLAQSILYGATILEVNGSFDVAMTSVMRLYKDLGIVYPLNSFNPWRLEGQKT

SEQ ID NO: 31471 - protein, 85 aa, unidentified
  REGION 1..85: note = Description of Unknown:cds_NZ_WFIY01000004.1_cds_WP_155862483.1_239 target sequence
IAYEIAEEIGEPDNVIVPVGNAGNIYAIWKGFTELQEAGVISKVPRMIGVQAEGAAPIAKAIEKGLNEPEFFENPETIATAIRIG

SEQ ID NO: 31472 - protein, 85 aa, unidentified
  REGION 1..85: note = Description of Unknown:cds_NZ_WFIY01000004.1_cds_WP_155862483.1_239 target sequence
KPVNWKKAIKAIKSSKGTAISVSDQEIIDAQKRLAREEGIGAEPASAAALAGYDKAIKEGIVDKDQKNVLILTGHALKDPDAMLR

SEQ ID NO: 31473 - protein, 85 aa, unidentified
  REGION 1..85: note = Description of Unknown:cds_NZ_WFIY01000004.1_cds_WP_155863310.1_1271 target sequence
QKYIHAVTSSTLAWAGNIYDLVLITYAYTFLNKIVGISYLDLTIIFSLGLIGRVIGASIFGKIADTRGRKIVALTGTAGYSIFQA

SEQ ID NO: 31474 - protein, 85 aa, unidentified
  REGION 1..85: note = Description of Unknown:cds_NZ_WFIY01000004.1_cds_WP_155863310.1_1271 target sequence
FFALTVSFPLMAFFRTIEGIFMGAQWTSGTVLAIEQAPKQKLQFVNSIVQAGYALGYALTGVTYIFMSSDLTSISGYRIFMLTGS

SEQ ID NO: 31475 - protein, 85 aa, unidentified
  REGION 1..85: note = Description of Unknown:cds_NZ_WFIY01000004.1_cds_WP_155863310.1_1271 target sequence
LPLILVPYIYFKVTEEFKPSVVAQKVRVKDYFPYFIRASLAMSGMFIAYLAIFSIYPDFAGFSGFPAYYVGLLMAIANAIQGTSY

SEQ ID NO: 31476 - protein, 85 aa, unidentified
  REGION 1..85: note = Description of Unknown:cds_NZ_WFIY01000004.1_cds_WP_155863310.1_1271 target sequence
VIFGRLSYRFGVFKLIYVGIAGLLVASFLSMPIFTPLKTLPIMSAGVYLYAFAVGFWPLISGIAASSVPPEVRAFLTGTAYNIGA

SEQ ID NO: 31477 - protein, 84 aa, unidentified
  REGION 1..84: note = Description of Unknown:cds_NZ_WFIY01000004.1_cds_WP_155863310.1_1271 target sequence
VGFWPLISGIAASSVPPEVRAFLTGTAYNIGAVAGGIVSAMIGGIIEAFGMASLPYFVDGIEFASLAVVFVSMFTWPIRIENRA

SEQ ID NO: 31478 - protein, 85 aa, unidentified
  REGION 1..85: note = Description of Unknown:cds_NZ_WFIY01000004.1_cds_WP_155863310.1_1271 target sequence
YTFLNKIVGISYLDLTIIFSLGLIGRVIGASIFGKIADTRGRKIVALTGTAGYSIFQAFFALTVSFPLMAFFRTIEGIFMGAQWT

SEQ ID NO: 31479 - protein, 85 aa, unidentified
  REGION 1..85: note = Description of Unknown:cds_NZ_WFIY01000004.1_cds_WP_155863310.1_1271 target sequence
SGTVLAIEQAPKQKLQFVNSIVQAGYALGYALTGVTYIFMSSDLTSISGYRIFMLTGSLPLILVPYIYFKVTEEFKPSVVAQKVR

SEQ ID NO: 31480 - protein, 85 aa, unidentified
  REGION 1..85: note = Description of Unknown:cds_NZ_WFIY01000004.1_cds_WP_155863310.1_1271 target sequence
VKDYFPYFIRASLAMSGMFIAYLAIFSIYPDFAGFSGFPAYYVGLLMAIANAIQGTSYVIFGRLSYRFGVFKLIYVGIAGLLVAS

SEQ ID NO: 31481 - protein, 85 aa, unidentified
  REGION 1..85: note = Description of Unknown:cds_NZ_WFIY01000004.1_cds_WP_155863310.1_1271 target sequence
FLSMPIFTPLKTLPIMSAGVYLYAFAVGFWPLISGIAASSVPPEVRAFLTGTAYNIGAVAGGIVSAMIGGIIEAFGMASLPYFVD

SEQ ID NO: 31482 - protein, 85 aa, unidentified
  REGION 1..85: note = Description of Unknown:cds_NZ_WFIY01000004.1_cds_WP_155863352.1_1323 target sequence
KIQEIEPIVLTSKEKGGATWASTMILVRVTTSNGAVGYGEAVPTLRVISVYNAIKQVSKTFIGKEVEEVEKNYHEWYKQDFYLAR

SEQ ID NO: 31483 - protein, 85 aa, unidentified
  REGION 1..85: note = Description of Unknown:cds_NZ_WFIY01000004.1_cds_WP_155863352.1_1323 target sequence
SFESATAVSAIDIASWDILGKELGSPIYKLLGGKFRDKVLVYANGWYSDCVTPEDFANKAKEVVKMGYKGLKFDPFGQYYDWIDE

SEQ ID NO: 31484 - protein, 85 aa, unidentified
  REGION 1..85: note = Description of Unknown:cds_NZ_WFIY01000004.1_cds_WP_155863352.1_1323 target sequence
KGLREAEERVKAVREAVGDEVYIMIEHHGRFNANSAIKIAHVLEKYNPLFMEEPVHHEDIEGYKKYRSSTKVTVALGERLISLKE

SEQ ID NO: 31485 - protein, 85 aa, unidentified
  REGION 1..85: note = Description of Unknown:cds_NZ_WFIY01000004.1_cds_WP_155863352.1_1323 target sequence
AMFYIDNRLADVLQPDITNIGGVTIARKVVALAEANDVEIAFHNAFGSIQNAVSIQLSAVIPNLLILENFYDWFPQWKRDLVYNG

SEQ ID NO: 31486 - protein, 84 aa, unidentified
  REGION 1..84: note = Description of Unknown:cds_NZ_WFIY01000004.1_cds_WP_155863352.1_1323 target sequence
SIQLSAVIPNLLILENFYDWFPQWKRDLVYNGTPVEDGYVKVPEKPGIGVDVNEKLLEELKAEPIPLEVGEEPVWVVKNTWRGY

SEQ ID NO: 31487 - protein, 85 aa, unidentified
  REGION 1..85: note = Description of Unknown:cds_NZ_WFIY01000004.1_cds_WP_155863352.1_1323 target sequence
RVTTSNGAVGYGEAVPTLRVISVYNAIKQVSKTFIGKEVEEVEKNYHEWYKQDFYLARSFESATAVSAIDIASWDILGKELGSPI

SEQ ID NO: 31488 - protein, 85 aa, unidentified
  REGION 1..85: note = Description of Unknown:cds_NZ_WFIY01000004.1_cds_WP_155863352.1_1323 target sequence
YKLLGGKFRDKVLVYANGWYSDCVTPEDFANKAKEVVKMGYKGLKFDPFGQYYDWIDEKGLREAEERVKAVREAVGDEVYIMIEH

SEQ ID NO: 31489 - protein, 85 aa, unidentified
  REGION 1..85: note = Description of Unknown:cds_NZ_WFIY01000004.1_cds_WP_155863352.1_1323 target sequence
HGRFNANSAIKIAHVLEKYNPLFMEEPVHHEDIEGYKKYRSSTKVTVALGERLISLKEAMFYIDNRLADVLQPDITNIGGVTIAR

SEQ ID NO: 31490 - protein, 85 aa, unidentified
  REGION 1..85: note = Description of Unknown:cds_NZ_WFIY01000004.1_cds_WP_155863352.1_1323 target sequence
KVVALAEANDVEIAFHNAFGSIQNAVSIQLSAVIPNLLILENFYDWFPQWKRDLVYNGTPVEDGYVKVPEKPGIGVDVNEKLLEE

SEQ ID NO: 31491 - protein, 85 aa, unidentified
  REGION 1..85: note = Description of Unknown:cds_NZ_WFIY01000004.1_cds_WP_155863831.1_1724 target sequence
RLEELNSKYNAFITIAEIKGRDKGKLKGLTFGIKDIILTKGIKTTAGSKILKDYIPNRNAWIVDKILEEGGTIVGKTNTHEFAIG

SEQ ID NO: 31492 - protein, 85 aa, unidentified
  REGION 1..85: note = Description of Unknown:cds_NZ_WFIY01000004.1_cds_WP_155863831.1_1724 target sequence
ATNTSSIAGPARNPYDPERISGGSSGGSAVAVALKMVDVGVGTDTGGSIRIPASLCGVIGFKPTTGIIPIDGVIPFSWTLDTIGF

SEQ ID NO: 31493 - protein, 85 aa, unidentified
  REGION 1..85: note = Description of Unknown:cds_NZ_WFIY01000004.1_cds_WP_155863831.1_1724 target sequence
ITRDIPTLRRVLDSVIPPENKRVLVSKVRTRPRLGVFLFKDDPASNSLKSILNKLSSYFDLIDIRLNFLEGFGSNVRGTIALAEG

SEQ ID NO: 31494 - protein, 85 aa, unidentified
  REGION 1..85: note = Description of Unknown:cds_NZ_WFIY01000004.1_cds_WP_155863831.1_1724 target sequence
SSYHRDWIESTPGMYFPDVKELLMQGLQIRAIDYIDALRARRVIFEEYVRAFDNVDAIISPTTKIPAPKISEVVGREKEYRKLLV

SEQ ID NO: 31495 - protein, 84 aa, unidentified
  REGION 1..84: note = Description of Unknown:cds_NZ_WFIY01000004.1_cds_WP_155863831.1_1724 target sequence
NVDAIISPTTKIPAPKISEVVGREKEYRKLLVSNTELFNLVNAPSISLPVTKVNDLPIGLMVSGLPYEDGVVLDIAEKILELTE

SEQ ID NO: 31496 - protein, 85 aa, unidentified
  REGION 1..85: note = Description of Unknown:cds_NZ_WFIY01000004.1_cds_WP_155863831.1_1724 target sequence
GLTFGIKDIILTKGIKTTAGSKILKDYIPNRNAWIVDKILEEGGTIVGKTNTHEFAIGATNTSSIAGPARNPYDPERISGGSSGG

SEQ ID NO: 31497 - protein, 85 aa, unidentified
  REGION 1..85: note = Description of Unknown:cds_NZ_WFIY01000004.1_cds_WP_155863831.1_1724 target sequence
SAVAVALKMVDVGVGTDTGGSIRIPASLCGVIGFKPTTGIIPIDGVIPFSWTLDTIGFITRDIPTLRRVLDSVIPPENKRVLVSK

SEQ ID NO: 31498 - protein, 85 aa, unidentified
  REGION 1..85: note = Description of Unknown:cds_NZ_WFIY01000004.1_cds_WP_155863831.1_1724 target sequence
VRTRPRLGVFLFKDDPASNSLKSILNKLSSYFDLIDIRLNFLEGFGSNVRGTIALAEGSSYHRDWIESTPGMYFPDVKELLMQGL

SEQ ID NO: 31499 - protein, 85 aa, unidentified
  REGION 1..85: note = Description of Unknown:cds_NZ_WFIY01000004.1_cds_WP_155863831.1_1724 target sequence
QIRAIDYIDALRARRVIFEEYVRAFDNVDAIISPTTKIPAPKISEVVGREKEYRKLLVSNTELFNLVNAPSISLPVTKVNDLPIG

SEQ ID NO: 31500 - protein, 85 aa, unidentified
  REGION 1..85: note = Description of Unknown:cds_NZ_WFIY01000004.1_cds_WP_155864222.1_2191 target sequence
VFPFNSIEEFKVNITQDHELFRKAVREFCERDVLPLVEKGEKEKDIPRDLKDKAKEIGLYGLDVPVEYGGQGGDYLYNLIASEEM

SEQ ID NO: 31501 - protein, 85 aa, unidentified
  REGION 1..85: note = Description of Unknown:cds_NZ_WFIY01000004.1_cds_WP_155864222.1_2191 target sequence
SRVWPSFATFFLINWMFTHAILTFGNEEQKRKYVTEVAKGEKIAAFANTEPNAGTDVAGIQTTAKKVNDHYVINGKKIFITNGDI

SEQ ID NO: 31502 - protein, 85 aa, unidentified
  REGION 1..85: note = Description of Unknown:cds_NZ_WFIY01000004.1_cds_WP_155864222.1_2191 target sequence
ADYYLVTARTYAGNPRWKGISMFIVDKDNVKIEGRIETTGLKASHTAEISFNEAKVPEENLLGEDGMGFKYAVASFDYARTIVSA

SEQ ID NO: 31503 - protein, 85 aa, unidentified
  REGION 1..85: note = Description of Unknown:cds_NZ_WFIY01000004.1_cds_WP_155864222.1_2191 target sequence
QAVGIAQAALEKMIEYSVQRTSFGEKIASFQNVQQHISESLADLYASRLLTYWAGNLKEGNDYVIVASIAKFFSTEAAERVVLRA

SEQ ID NO: 31504 - protein, 84 aa, unidentified
  REGION 1..84: note = Description of Unknown:cds_NZ_WFIY01000004.1_cds_WP_155864222.1_2191 target sequence
AGNLKEGNDYVIVASIAKFFSTEAAERVVLRAMRVFGGYGVAEATGLERMLRDLQILKTYEGTNDIQRLSAAKFLIRKKLGVEI

SEQ ID NO: 31505 - protein, 85 aa, unidentified
  REGION 1..85: note = Description of Unknown:cds_NZ_WFIY01000004.1_cds_WP_155864222.1_2191 target sequence
FCERDVLPLVEKGEKEKDIPRDLKDKAKEIGLYGLDVPVEYGGQGGDYLYNLIASEEMSRVWPSFATFFLINWMFTHAILTFGNE

SEQ ID NO: 31506 - protein, 85 aa, unidentified
  REGION 1..85: note = Description of Unknown:cds_NZ_WFIY01000004.1_cds_WP_155864222.1_2191 target sequence
EQKRKYVTEVAKGEKIAAFANTEPNAGTDVAGIQTTAKKVNDHYVINGKKIFITNGDIADYYLVTARTYAGNPRWKGISMFIVDK

SEQ ID NO: 31507 - protein, 85 aa, unidentified
  REGION 1..85: note = Description of Unknown:cds_NZ_WFIY01000004.1_cds_WP_155864222.1_2191 target sequence
DNVKIEGRIETTGLKASHTAEISFNEAKVPEENLLGEDGMGFKYAVASFDYARTIVSAQAVGIAQAALEKMIEYSVQRTSFGEKI

SEQ ID NO: 31508 - protein, 85 aa, unidentified
  REGION 1..85: note = Description of Unknown:cds_NZ_WFIY01000004.1_cds_WP_155864222.1_2191 target sequence
ASFQNVQQHISESLADLYASRLLTYWAGNLKEGNDYVIVASIAKFFSTEAAERVVLRAMRVFGGYGVAEATGLERMLRDLQILKT

SEQ ID NO: 31509 - protein, 85 aa, unidentified
  REGION 1..85: note = Description of Unknown:cds_NZ_WFIY01000004.1_cds_WP_155864366.1_402 target sequence
EVEVVPVQGELNVGPQHPGSGHMRILVKLNGDIVEDCELDVGYVHRAVEKLGENRNYMHLIPLVERPAILDSIHMNMGYIMAVEK

SEQ ID NO: 31510 - protein, 85 aa, unidentified
  REGION 1..85: note = Description of Unknown:cds_NZ_WFIY01000004.1_cds_WP_155864366.1_402 target sequence
ILNVDVPERALYLRSFAAEVNRIASHLYGLGILGIFLGHSTAFMWGFGDREVWLQILEALTGARVTNSYIIPGGVRRDLTPSIIE

SEQ ID NO: 31511 - protein, 85 aa, unidentified
  REGION 1..85: note = Description of Unknown:cds_NZ_WFIY01000004.1_cds_WP_155864366.1_402 target sequence
MTKKAINYMRKKIKDWEKIFLKNPTIMDRLQNVGVMTREQAIEWGAVGPNLRASGVNFDVRKAEPYAAYSKLDFEIPVYKEGDGY

SEQ ID NO: 31512 - protein, 85 aa, unidentified
  REGION 1..85: note = Description of Unknown:cds_NZ_WFIY01000004.1_cds_WP_155864366.1_402 target sequence
ARTLVRFEEMEQSMRILEQIIKDIPEGPILADRFLKQIPPIRMKKWVQGQGRIVLPGYYASFRPPRGEAAARVEASRGELFYYVV

SEQ ID NO: 31513 - protein, 84 aa, unidentified
  REGION 1..84: note = Description of Unknown:cds_NZ_WFIY01000004.1_cds_WP_155864366.1_402 target sequence
IVLPGYYASFRPPRGEAAARVEASRGELFYYVVSDGSPKPYRLRMITPSYRAIYVFKNLCKGARYADIVSIYGSLDYFPPEADR

SEQ ID NO: 31514 - protein, 85 aa, unidentified
  REGION 1..85: note = Description of Unknown:cds_NZ_WFIY01000004.1_cds_WP_155864366.1_402 target sequence
KLNGDIVEDCELDVGYVHRAVEKLGENRNYMHLIPLVERPAILDSIHMNMGYIMAVEKILNVDVPERALYLRSFAAEVNRIASHL

SEQ ID NO: 31515 - protein, 85 aa, unidentified
  REGION 1..85: note = Description of Unknown:cds_NZ_WFIY01000004.1_cds_WP_155864366.1_402 target sequence
YGLGILGIFLGHSTAFMWGFGDREVWLQILEALTGARVTNSYIIPGGVRRDLTPSIIEMTKKAINYMRKKIKDWEKIFLKNPTIM

SEQ ID NO: 31516 - protein, 85 aa, unidentified
  REGION 1..85: note = Description of Unknown:cds_NZ_WFIY01000004.1_cds_WP_155864366.1_402 target sequence
DRLQNVGVMTREQAIEWGAVGPNLRASGVNFDVRKAEPYAAYSKLDFEIPVYKEGDGYARTLVRFEEMEQSMRILEQIIKDIPEG

SEQ ID NO: 31517 - protein, 85 aa, unidentified
  REGION 1..85: note = Description of Unknown:cds_NZ_WFIY01000004.1_cds_WP_155864366.1_402 target sequence
PILADRFLKQIPPIRMKKWVQGQGRIVLPGYYASFRPPRGEAAARVEASRGELFYYVVSDGSPKPYRLRMITPSYRAIYVFKNLC

SEQ ID NO: 31518 - protein, 85 aa, unidentified
  REGION 1..85: note = Description of Unknown:cds_NZ_WFIY01000004.1_cds_WP_155862691.1_491 target sequence
KIVLAYSGGLDTTVSIRWLKEKYQADVITVSVDVGQKEDFKKLEERAYIAGSSKHYTIDAKEEFVEKFVKYDIIMNGLYEDVYPL

SEQ ID NO: 31519 - protein, 85 aa, unidentified
  REGION 1..85: note = Description of Unknown:cds_NZ_WFIY01000004.1_cds_WP_155862691.1_491 target sequence
STALARPLIAEKVVEIAKKEGTEYIAHGSTSKGNDQVRFDLAIKAHMPDAKIITPARSWNMTRETEIKYAKERGIPIKEESNKYS

SEQ ID NO: 31520 - protein, 85 aa, unidentified
  REGION 1..85: note = Description of Unknown:cds_NZ_WFIY01000004.1_cds_WP_155862691.1_491 target sequence
IDENLWGRSIEGDIIEDPSKEVPEDAFELTRKTSTKSKEKIIITFEKGVPVALNGEKMPLLNLIDNLNKIAGSLGFGRVDHLENR

SEQ ID NO: 31521 - protein, 85 aa, unidentified
  REGION 1..85: note = Description of Unknown:cds_NZ_WFIY01000004.1_cds_WP_155862691.1_491 target sequence
VVGFKSREVYEAPAALCLIYAHKDLEKTVYTPLELRFKKSIDSQWSDLVYQGLWYEPLRETLQKVGVDMNNWVTGEVEVEIGENG

SEQ ID NO: 31522 - protein, 84 aa, unidentified
  REGION 1..84: note = Description of Unknown:cds_NZ_WFIY01000004.1_cds_WP_155862691.1_491 target sequence
LWYEPLRETLQKVGVDMNNWVTGEVEVEIGENGLRILGRNSPYSPYSDKIASYNKGWYPTEEMAKGFIEIWGMHSLLARKVRSS

SEQ ID NO: 31523 - protein, 85 aa, unidentified
  REGION 1..85: note = Description of Unknown:cds_NZ_WFIY01000004.1_cds_WP_155862691.1_491 target sequence
ITVSVDVGQKEDFKKLEERAYIAGSSKHYTIDAKEEFVEKFVKYDIIMNGLYEDVYPLSTALARPLIAEKVVEIAKKEGTEYIAH

SEQ ID NO: 31524 - protein, 85 aa, unidentified
  REGION 1..85: note = Description of Unknown:cds_NZ_WFIY01000004.1_cds_WP_155862691.1_491 target sequence
GSTSKGNDQVRFDLAIKAHMPDAKIITPARSWNMTRETEIKYAKERGIPIKEESNKYSIDENLWGRSIEGDIIEDPSKEVPEDAF

SEQ ID NO: 31525 - protein, 85 aa, unidentified
  REGION 1..85: note = Description of Unknown:cds_NZ_WFIY01000004.1_cds_WP_155862691.1_491 target sequence
ELTRKTSTKSKEKIIITFEKGVPVALNGEKMPLLNLIDNLNKIAGSLGFGRVDHLENRVVGFKSREVYEAPAALCLIYAHKDLEK

SEQ ID NO: 31526 - protein, 85 aa, unidentified
  REGION 1..85: note = Description of Unknown:cds_NZ_WFIY01000004.1_cds_WP_155862691.1_491 target sequence
TVYTPLELRFKKSIDSQWSDLVYQGLWYEPLRETLQKVGVDMNNWVTGEVEVEIGENGLRILGRNSPYSPYSDKIASYNKGWYPT

SEQ ID NO: 31527 - protein, 85 aa, unidentified
  REGION 1..85: note = Description of Unknown:cds_NZ_WFIY01000004.1_cds_WP_155862781.1_596 target sequence
QRYIHATISAFFSWAGNIYDLLIVTYVYYYFQKCLGLNTVEGTLLFALGLIFRVIGGYAFGKIADRRGRKPILAIGTAGYSAFQS

SEQ ID NO: 31528 - protein, 85 aa, unidentified
  REGION 1..85: note = Description of Unknown:cds_NZ_WFIY01000004.1_cds_WP_155862781.1_596 target sequence
LMAFSPNAVILLIARAFQGLFMGAQWTAGTVIAYEQAPPSARGLINGIVQAGYGVGYALTGVAFIVFSQSMGGIGWRLFLLTGSI

SEQ ID NO: 31529 - protein, 85 aa, unidentified
  REGION 1..85: note = Description of Unknown:cds_NZ_WFIY01000004.1_cds_WP_155862781.1_596 target sequence
PIILLPYIILKVTDVKVSRKTISNTNVKEYTKILIRASIVISGMFFSYYSIFAVYPGLAEYLGLSKDFIGLMMTVANIFLAISFI

SEQ ID NO: 31530 - protein, 85 aa, unidentified
  REGION 1..85: note = Description of Unknown:cds_NZ_WFIY01000004.1_cds_WP_155862781.1_596 target sequence
VYGRVADFINKRKLIIYGVIGEMIGLPMMLPIIVKSAELMLIGLLVYSIATGFWPLAPLLIVESVPPEVRSALTGLSYNLGSVVG

SEQ ID NO: 31531 - protein, 84 aa, unidentified
  REGION 1..84: note = Description of Unknown:cds_NZ_WFIY01000004.1_cds_WP_155862781.1_596 target sequence
FWPLAPLLIVESVPPEVRSALTGLSYNLGSVVGGVGSITMGTLVQIFGLANSPLFGNILGYSSLLIVLITLLTWPRGTVITKNK

SEQ ID NO: 31532 - protein, 85 aa, unidentified
  REGION 1..85: note = Description of Unknown:cds_NZ_WFIY01000004.1_cds_WP_155862781.1_596 target sequence
YYYFQKCLGLNTVEGTLLFALGLIFRVIGGYAFGKIADRRGRKPILAIGTAGYSAFQSLMAFSPNAVILLIARAFQGLFMGAQWT

SEQ ID NO: 31533 - protein, 85 aa, unidentified
  REGION 1..85: note = Description of Unknown:cds_NZ_WFIY01000004.1_cds_WP_155862781.1_596 target sequence
AGTVIAYEQAPPSARGLINGIVQAGYGVGYALTGVAFIVFSQSMGGIGWRLFLLTGSIPIILLPYIILKVTDVKVSRKTISNTNV

SEQ ID NO: 31534 - protein, 85 aa, unidentified
  REGION 1..85: note = Description of Unknown:cds_NZ_WFIY01000004.1_cds_WP_155862781.1_596 target sequence
KEYTKILIRASIVISGMFFSYYSIFAVYPGLAEYLGLSKDFIGLMMTVANIFLAISFIVYGRVADFINKRKLIIYGVIGEMIGLP

SEQ ID NO: 31535 - protein, 85 aa, unidentified
  REGION 1..85: note = Description of Unknown:cds_NZ_WFIY01000004.1_cds_WP_155862781.1_596 target sequence
MMLPIIVKSAELMLIGLLVYSIATGFWPLAPLLIVESVPPEVRSALTGLSYNLGSVVGGVGSITMGTLVQIFGLANSPLFGNILG

SEQ ID NO: 31536 - protein, 85 aa, unidentified
  REGION 1..85: note = Description of Unknown:cds_NZ_WFIY01000004.1_cds_WP_155862988.1_862 target sequence
INEEDKKYLEEKLSSLSGKIPDSVIQKLRDAIVSYPANITKEEIDKIINLTLKDYDVSLINPGEAAGVVAAQSIGEPGTQMTLRT

SEQ ID NO: 31537 - protein, 85 aa, unidentified
  REGION 1..85: note = Description of Unknown:cds_NZ_WFIY01000004.1_cds_WP_155862988.1_862 target sequence
FHFAGVRELNVTLGLPRLIEIVDARKVPSTPMMTIYLTDEYKTDREKAISIARKIEYTKIENVVDSTSIDMASMALIIHLDEKML

SEQ ID NO: 31538 - protein, 85 aa, unidentified
  REGION 1..85: note = Description of Unknown:cds_NZ_WFIY01000004.1_cds_WP_155862988.1_862 target sequence
KDKGIEPDEVEKVIRKLKLGDFTIDRPDELTITVTFQNMDSITGLFKAREKILNTKIKGIKGIKRAIVQKRGDEYVIITDGSNLE

SEQ ID NO: 31539 - protein, 85 aa, unidentified
  REGION 1..85: note = Description of Unknown:cds_NZ_WFIY01000004.1_cds_WP_155862988.1_862 target sequence
GVLGIKGVDVSRIETNNLHEVENVLGIEAARELITREIKKVLDEQGLDVDIRHVELVADIMTRTGEVRQIGRHGVTGEKTSVFAK

SEQ ID NO: 31540 - protein, 84 aa, unidentified
  REGION 1..84: note = Description of Unknown:cds_NZ_WFIY01000004.1_cds_WP_155862988.1_862 target sequence
HVELVADIMTRTGEVRQIGRHGVTGEKTSVFAKAAFEVTVKHLLDAAARGDVEEFRGVVENIIIGQPIKLGTGMVELLMKPGAR

SEQ ID NO: 31541 - protein, 85 aa, unidentified
  REGION 1..85: note = Description of Unknown:cds_NZ_WFIY01000004.1_cds_WP_155862988.1_862 target sequence
LRDAIVSYPANITKEEIDKIINLTLKDYDVSLINPGEAAGVVAAQSIGEPGTQMTLRTFHFAGVRELNVTLGLPRLIEIVDARKV

SEQ ID NO: 31542 - protein, 85 aa, unidentified
  REGION 1..85: note = Description of Unknown:cds_NZ_WFIY01000004.1_cds_WP_155862988.1_862 target sequence
PSTPMMTIYLTDEYKTDREKAISIARKIEYTKIENVVDSTSIDMASMALIIHLDEKMLKDKGIEPDEVEKVIRKLKLGDFTIDRP

SEQ ID NO: 31543 - protein, 85 aa, unidentified
  REGION 1..85: note = Description of Unknown:cds_NZ_WFIY01000004.1_cds_WP_155862988.1_862 target sequence
DELTITVTFQNMDSITGLFKAREKILNTKIKGIKGIKRAIVQKRGDEYVIITDGSNLEGVLGIKGVDVSRIETNNLHEVENVLGI

SEQ ID NO: 31544 - protein, 85 aa, unidentified
  REGION 1..85: note = Description of Unknown:cds_NZ_WFIY01000004.1_cds_WP_155862988.1_862 target sequence
EAARELITREIKKVLDEQGLDVDIRHVELVADIMTRTGEVRQIGRHGVTGEKTSVFAKAAFEVTVKHLLDAAARGDVEEFRGVVE

SEQ ID NO: 31545 - protein, 85 aa, unidentified
  REGION 1..85: note = Description of Unknown:cds_NZ_WFIY01000004.1_cds_WP_155863101.1_1018 target sequence
KKIYDEIHGYITLGDAEIEIVDSPEFQRLRRIKQTSLAYIVYPGATHTRFSHSLGTFYLASKVGEKLYNSGEINAEELQDLKMAS

SEQ ID NO: 31546 - protein, 85 aa, unidentified
  REGION 1..85: note = Description of Unknown:cds_NZ_WFIY01000004.1_cds_WP_155863101.1_1018 target sequence
LLHDIGQFPFSHAIEGYYLSQGFGNKELREYILEKSEIKDILEKYGFSISRILDIYHGNSLLSSIIDGEVDVDRIDYLMRDSRHT

SEQ ID NO: 31547 - protein, 85 aa, unidentified
  REGION 1..85: note = Description of Unknown:cds_NZ_WFIY01000004.1_cds_WP_155863101.1_1018 target sequence
GVQLGKLDLDRLIDTIFYTQSGITVEDKGIISLENFYISRLHMYQAVYYHKTILGYELFLRKLYEHMINYCNKDLKDSLNIKEMV

SEQ ID NO: 31548 - protein, 85 aa, unidentified
  REGION 1..85: note = Description of Unknown:cds_NZ_WFIY01000004.1_cds_WP_155863101.1_1018 target sequence
KEGLFPYWDDEWVISSLYNCLTEDIPLSIIQKIKNFMDRKGPKVVYDEVSYKEEKGYLEDIRNQLEKVGIPSDSIYPFEEKISII

SEQ ID NO: 31549 - protein, 84 aa, unidentified
  REGION 1..84: note = Description of Unknown:cds_NZ_WFIY01000004.1_cds_WP_155863101.1_1018 target sequence
EEKGYLEDIRNQLEKVGIPSDSIYPFEEKISIIDKNKIKILSKGREKKLKDYSTTLLHEIPDFILIRRVYVDYEYAKKAREVLS

SEQ ID NO: 31550 - protein, 85 aa, unidentified
  REGION 1..85: note = Description of Unknown:cds_NZ_WFIY01000004.1_cds_WP_155863101.1_1018 target sequence
RLRRIKQTSLAYIVYPGATHTRFSHSLGTFYLASKVGEKLYNSGEINAEELQDLKMASLLHDIGQFPFSHAIEGYYLSQGFGNKE

SEQ ID NO: 31551 - protein, 85 aa, unidentified
  REGION 1..85: note = Description of Unknown:cds_NZ_WFIY01000004.1_cds_WP_155863101.1_1018 target sequence
LREYILEKSEIKDILEKYGFSISRILDIYHGNSLLSSIIDGEVDVDRIDYLMRDSRHTGVQLGKLDLDRLIDTIFYTQSGITVED

SEQ ID NO: 31552 - protein, 85 aa, unidentified
  REGION 1..85: note = Description of Unknown:cds_NZ_WFIY01000004.1_cds_WP_155863101.1_1018 target sequence
KGIISLENFYISRLHMYQAVYYHKTILGYELFLRKLYEHMINYCNKDLKDSLNIKEMVKEGLFPYWDDEWVISSLYNCLTEDIPL

SEQ ID NO: 31553 - protein, 85 aa, unidentified
  REGION 1..85: note = Description of Unknown:cds_NZ_WFIY01000004.1_cds_WP_155863101.1_1018 target sequence
SIIQKIKNFMDRKGPKVVYDEVSYKEEKGYLEDIRNQLEKVGIPSDSIYPFEEKISIIDKNKIKILSKGREKKLKDYSTTLLHEI

SEQ ID NO: 31554 - protein, 85 aa, unidentified
  REGION 1..85: note = Description of Unknown:cds_NZ_WFIY01000004.1_cds_WP_155864417.1_1283 target sequence
KEYIHATIASTLSWAGNIYDLLLITYVYSYLEIAFSLNYLDISILFALGLIGRVIGGMIFGKYADLMGRKPVMIIGTGGYALFQG

SEQ ID NO: 31555 - protein, 85 aa, unidentified
  REGION 1..85: note = Description of Unknown:cds_NZ_WFIY01000004.1_cds_WP_155864417.1_1283 target sequence
LMAFSPNALLLFVFRGLEGLFMGAAWTAGMVLAYEKAPVSARGFVTGIYQAGYGIGYALTAVTYFIFLSSLASNWRLFLLTGAFP

SEQ ID NO: 31556 - protein, 85 aa, unidentified
  REGION 1..85: note = Description of Unknown:cds_NZ_WFIY01000004.1_cds_WP_155864417.1_1283 target sequence
LILLPYIQLKVGESIKKTEVEKPRYKDYLDVLIKATLAMSGMFISYFSVFGNYTTIALYYAKMPPYFLATLMLVANIILAGSFVL

SEQ ID NO: 31557 - protein, 85 aa, unidentified
  REGION 1..85: note = Description of Unknown:cds_NZ_WFIY01000004.1_cds_WP_155864417.1_1283 target sequence
FGKLADKINKRKLIYAGVIGLFVSIPFSVPIFSFLINPYIMFIGTVGFAFSTGFWPVMPLLLADSVPINVRGFLSGFAYNMGGLM

SEQ ID NO: 31558 - protein, 84 aa, unidentified
  REGION 1..84: note = Description of Unknown:cds_NZ_WFIY01000004.1_cds_WP_155864417.1_1283 target sequence
GFWPVMPLLLADSVPINVRGFLSGFAYNMGGLMGGIANIILGLISSLYGISALAKSIDGFVIFSLILVFVSVITWPRRKIVINN

SEQ ID NO: 31559 - protein, 85 aa, unidentified
  REGION 1..85: note = Description of Unknown:cds_NZ_WFIY01000004.1_cds_WP_155864417.1_1283 target sequence
YSYLEIAFSLNYLDISILFALGLIGRVIGGMIFGKYADLMGRKPVMIIGTGGYALFQGLMAFSPNALLLFVFRGLEGLFMGAAWT

SEQ ID NO: 31560 - protein, 85 aa, unidentified
  REGION 1..85: note = Description of Unknown:cds_NZ_WFIY01000004.1_cds_WP_155864417.1_1283 target sequence
AGMVLAYEKAPVSARGFVTGIYQAGYGIGYALTAVTYFIFLSSLASNWRLFLLTGAFPLILLPYIQLKVGESIKKTEVEKPRYKD

SEQ ID NO: 31561 - protein, 85 aa, unidentified
  REGION 1..85: note = Description of Unknown:cds_NZ_WFIY01000004.1_cds_WP_155864417.1_1283 target sequence
YLDVLIKATLAMSGMFISYFSVFGNYTTIALYYAKMPPYFLATLMLVANIILAGSFVLFGKLADKINKRKLIYAGVIGLFVSIPF

SEQ ID NO: 31562 - protein, 85 aa, unidentified
  REGION 1..85: note = Description of Unknown:cds_NZ_WFIY01000004.1_cds_WP_155864417.1_1283 target sequence
SVPIFSFLINPYIMFIGTVGFAFSTGFWPVMPLLLADSVPINVRGFLSGFAYNMGGLMGGIANIILGLISSLYGISALAKSIDGF

SEQ ID NO: 31563 - protein, 85 aa, unidentified
  REGION 1..85: note = Description of Unknown:cds_NZ_WFIY01000004.1_cds_WP_155863578.1_1496 target sequence
EANIRYIVLSRIFRSLPLSYMSFLVPLYLHKIGIPTFLIGIYFLIATISTSFLLVLSGFLGDAYGKRNILLLLSILFSLNLFIFA

SEQ ID NO: 31564 - protein, 85 aa, unidentified
  REGION 1..85: note = Description of Unknown:cds_NZ_WFIY01000004.1_cds_WP_155863578.1_1496 target sequence
FIKIPLVVFLTSVLGIGTASGGGIGGGAGGGPFNPLQTALIADYSRPEERTKLYSINFAAATISAFAGGLISDLITTVYPPSISY

SEQ ID NO: 31565 - protein, 85 aa, unidentified
  REGION 1..85: note = Description of Unknown:cds_NZ_WFIY01000004.1_cds_WP_155863578.1_1496 target sequence
SLLFTLGFIISLFSIFFVYLIDKDHGTGKISIPKASFSSISKISIAGSLGSIGLGMVMPLIPLWFKLDFDATESEISYLYSISYS

SEQ ID NO: 31566 - protein, 85 aa, unidentified
  REGION 1..85: note = Description of Unknown:cds_NZ_WFIY01000004.1_cds_WP_155863578.1_1496 target sequence
LVGISFLFADKIEKVIGRVKSISILRGLSSLFLLLIPFSPTFFIASILFLARGVTYTITIPMRQSLAMDVFSDKERASGTSITGL

SEQ ID NO: 31567 - protein, 84 aa, unidentified
  REGION 1..84: note = Description of Unknown:cds_NZ_WFIY01000004.1_cds_WP_155863578.1_1496 target sequence
GVTYTITIPMRQSLAMDVFSDKERASGTSITGLARRIPYGLGSLISGALFSVGLFTLSIFLGGVISLFDPLLYYVFFRNYEKRE

SEQ ID NO: 31568 - protein, 85 aa, unidentified
  REGION 1..85: note = Description of Unknown:cds_NZ_WFIY01000004.1_cds_WP_155863578.1_1496 target sequence
YLHKIGIPTFLIGIYFLIATISTSFLLVLSGFLGDAYGKRNILLLLSILFSLNLFIFAFIKIPLVVFLTSVLGIGTASGGGIGGG

SEQ ID NO: 31569 - protein, 85 aa, unidentified
  REGION 1..85: note = Description of Unknown:cds_NZ_WFIY01000004.1_cds_WP_155863578.1_1496 target sequence
AGGGPFNPLQTALIADYSRPEERTKLYSINFAAATISAFAGGLISDLITTVYPPSISYSLLFTLGFIISLFSIFFVYLIDKDHGT

SEQ ID NO: 31570 - protein, 85 aa, unidentified
  REGION 1..85: note = Description of Unknown:cds_NZ_WFIY01000004.1_cds_WP_155863578.1_1496 target sequence
GKISIPKASFSSISKISIAGSLGSIGLGMVMPLIPLWFKLDFDATESEISYLYSISYSLVGISFLFADKIEKVIGRVKSISILRG

SEQ ID NO: 31571 - protein, 85 aa, unidentified
  REGION 1..85: note = Description of Unknown:cds_NZ_WFIY01000004.1_cds_WP_155863578.1_1496 target sequence
LSSLFLLLIPFSPTFFIASILFLARGVTYTITIPMRQSLAMDVFSDKERASGTSITGLARRIPYGLGSLISGALFSVGLFTLSIF

SEQ ID NO: 31572 - protein, 85 aa, unidentified
  REGION 1..85: note = Description of Unknown:cds_NZ_WFIY01000004.1_cds_WP_155864228.1_2197 target sequence
KVNLYLNKRVAIIGAGLTLFRRRLLETPQEIAWEAASKALEEAGLELKDIDCVVIGSAPDAFDGVHLKGEYLSHGSGGIRKPVSR

SEQ ID NO: 31573 - protein, 85 aa, unidentified
  REGION 1..85: note = Description of Unknown:cds_NZ_WFIY01000004.1_cds_WP_155864228.1_2197 target sequence
VYVGGATGVMTAIAGWYHVASGLCQKVLAVAEEKMSPARPHPQSVFKYIWDPILEKPLNPNLIWIFAMEMHRYMSKYGIKKEEIA

SEQ ID NO: 31574 - protein, 85 aa, unidentified
  REGION 1..85: note = Description of Unknown:cds_NZ_WFIY01000004.1_cds_WP_155864228.1_2197 target sequence
LVSVKNKRNALNNPYAQLGANITVDDVLNSEVLVWPVQLLDVSPVSDGGAAIVLASEDVARRYTDTPVWVEGVGWTLDNTEWPAR

SEQ ID NO: 31575 - protein, 85 aa, unidentified
  REGION 1..85: note = Description of Unknown:cds_NZ_WFIY01000004.1_cds_WP_155864228.1_2197 target sequence
DLSYARYVEFAARMAYKIAGIERPNKEIDVVEPYDPFDYKELHHLEALQLAKRGEAPTLLKEGVFDIDGDIPSSPSGGLLGVGNP

SEQ ID NO: 31576 - protein, 84 aa, unidentified
  REGION 1..84: note = Description of Unknown:cds_NZ_WFIY01000004.1_cds_WP_155864228.1_2197 target sequence
RGEAPTLLKEGVFDIDGDIPSSPSGGLLGVGNPIAAAGLMKVISIYWQLKGTAGKMQVKRPVHTGLAQAWGDLMQAGTVIVLRN

SEQ ID NO: 31577 - protein, 85 aa, unidentified
  REGION 1..85: note = Description of Unknown:cds_NZ_WFIY01000004.1_cds_WP_155864228.1_2197 target sequence
PQEIAWEAASKALEEAGLELKDIDCVVIGSAPDAFDGVHLKGEYLSHGSGGIRKPVSRVYVGGATGVMTAIAGWYHVASGLCQKV

SEQ ID NO: 31578 - protein, 85 aa, unidentified
  REGION 1..85: note = Description of Unknown:cds_NZ_WFIY01000004.1_cds_WP_155864228.1_2197 target sequence
LAVAEEKMSPARPHPQSVFKYIWDPILEKPLNPNLIWIFAMEMHRYMSKYGIKKEEIALVSVKNKRNALNNPYAQLGANITVDDV

SEQ ID NO: 31579 - protein, 85 aa, unidentified
  REGION 1..85: note = Description of Unknown:cds_NZ_WFIY01000004.1_cds_WP_155864228.1_2197 target sequence
LNSEVLVWPVQLLDVSPVSDGGAAIVLASEDVARRYTDTPVWVEGVGWTLDNTEWPARDLSYARYVEFAARMAYKIAGIERPNKE

SEQ ID NO: 31580 - protein, 85 aa, unidentified
  REGION 1..85: note = Description of Unknown:cds_NZ_WFIY01000004.1_cds_WP_155864228.1_2197 target sequence
IDVVEPYDPFDYKELHHLEALQLAKRGEAPTLLKEGVFDIDGDIPSSPSGGLLGVGNPIAAAGLMKVISIYWQLKGTAGKMQVKR

SEQ ID NO: 31581 - protein, 85 aa, unidentified
  REGION 1..85: note = Description of Unknown:cds_NZ_WFIY01000004.1_cds_WP_155863526.1_1469 target sequence
KKIVIVGGGIAGMGIANTLADKLKGKAEITVINKEDFYFAGPSRPLILTGEQNYHRIIRGYENVGVKGIKLVVGNVYKVDPDNRK

SEQ ID NO: 31582 - protein, 85 aa, unidentified
  REGION 1..85: note = Description of Unknown:cds_NZ_WFIY01000004.1_cds_WP_155863526.1_1469 target sequence
VYVSESTFGNKDLVLDYDYLVLTPGIVFDGSKITGYEKYWWKNTTVYDPGRVNVLKERLWTQNEGTVIVYAPKAPYRCAPAPTET

SEQ ID NO: 31583 - protein, 85 aa, unidentified
  REGION 1..85: note = Description of Unknown:cds_NZ_WFIY01000004.1_cds_WP_155863526.1_1469 target sequence
TLLAHTVLTHRGVRQKFNIIHIDANDKTQPPFIMDIVKQTYDKAGIQLVTNQEITEIGEDYVVTSSGEKYKYTILAMLEPNRAPK

SEQ ID NO: 31584 - protein, 85 aa, unidentified
  REGION 1..85: note = Description of Unknown:cds_NZ_WFIY01000004.1_cds_WP_155863526.1_1469 target sequence
FIDEAGLGKGFVDIRSPQDLRHPKYDDVLSAGDAAKLPFPKNQEIAFESAMFAANKILEMEGVSEKVPVQYAFVGWAYMGNLEGK

SEQ ID NO: 31585 - protein, 84 aa, unidentified
  REGION 1..84: note = Description of Unknown:cds_NZ_WFIY01000004.1_cds_WP_155863526.1_1469 target sequence
FAANKILEMEGVSEKVPVQYAFVGWAYMGNLEGKLETLSLQFQMDLTTQPPKPTKDPQLKRDYTLQKDRWEQAYLEKLFGYKAI

SEQ ID NO: 31586 - protein, 85 aa, unidentified
  REGION 1..85: note = Description of Unknown:cds_NZ_WFIY01000004.1_cds_WP_155863526.1_1469 target sequence
EITVINKEDFYFAGPSRPLILTGEQNYHRIIRGYENVGVKGIKLVVGNVYKVDPDNRKVYVSESTFGNKDLVLDYDYLVLTPGIV

SEQ ID NO: 31587 - protein, 85 aa, unidentified
  REGION 1..85: note = Description of Unknown:cds_NZ_WFIY01000004.1_cds_WP_155863526.1_1469 target sequence
FDGSKITGYEKYWWKNTTVYDPGRVNVLKERLWTQNEGTVIVYAPKAPYRCAPAPTETTLLAHTVLTHRGVRQKFNIIHIDANDK

SEQ ID NO: 31588 - protein, 85 aa, unidentified
  REGION 1..85: note = Description of Unknown:cds_NZ_WFIY01000004.1_cds_WP_155863526.1_1469 target sequence
TQPPFIMDIVKQTYDKAGIQLVTNQEITEIGEDYVVTSSGEKYKYTILAMLEPNRAPKFIDEAGLGKGFVDIRSPQDLRHPKYDD

SEQ ID NO: 31589 - protein, 85 aa, unidentified
  REGION 1..85: note = Description of Unknown:cds_NZ_WFIY01000004.1_cds_WP_155863526.1_1469 target sequence
VLSAGDAAKLPFPKNQEIAFESAMFAANKILEMEGVSEKVPVQYAFVGWAYMGNLEGKLETLSLQFQMDLTTQPPKPTKDPQLKR

SEQ ID NO: 31590 - protein, 85 aa, unidentified
  REGION 1..85: note = Description of Unknown:cds_NZ_WFIY01000004.1_cds_WP_170283911.1_1819 target sequence
LMKDLIKKEWTDVKRDRKLLLGSILLPLILLPLIGVILFAAIVSQPPIIDIINDNYDNIKYVKELCSYIQSNGGIVYINSTQPAD

SEQ ID NO: 31591 - protein, 85 aa, unidentified
  REGION 1..85: note = Description of Unknown:cds_NZ_WFIY01000004.1_cds_WP_170283911.1_1819 target sequence
VEVIFPSCFYENISNINRTAIVYISYVISSRSSALQLVENGLYNILYNTSIQRIKYLENISHTEVSPSIIRDPLEVALLYKLPTG

SEQ ID NO: 31592 - protein, 85 aa, unidentified
  REGION 1..85: note = Description of Unknown:cds_NZ_WFIY01000004.1_cds_WP_170283911.1_1819 target sequence
EQASYQQSQFSQLARIVAIILFPAATPVIFFVSDSIMGEKERKTLESLLASPISSRAFIFSKLIISIILGLISSIGDLIGLVVFS

SEQ ID NO: 31593 - protein, 85 aa, unidentified
  REGION 1..85: note = Description of Unknown:cds_NZ_WFIY01000004.1_cds_WP_170283911.1_1819 target sequence
LFAPYIIGESITFSATFAILVIIVYLTMILLTASMSIIVLLLLGGSSRNVQIINFIITSFGMIASFSSLFLNFGDLSYPLSLILG

SEQ ID NO: 31594 - protein, 84 aa, unidentified
  REGION 1..84: note = Description of Unknown:cds_NZ_WFIY01000004.1_cds_WP_170283911.1_1819 target sequence
INFIITSFGMIASFSSLFLNFGDLSYPLSLILGIPYVQLVASIMFYVFGLIEESIFSISITLLASIFLLLLASRFLDSERLLLK

SEQ ID NO: 31595 - protein, 85 aa, unidentified
  REGION 1..85: note = Description of Unknown:cds_NZ_WFIY01000004.1_cds_WP_170283911.1_1819 target sequence
LILLPLIGVILFAAIVSQPPIIDIINDNYDNIKYVKELCSYIQSNGGIVYINSTQPADVEVIFPSCFYENISNINRTAIVYISYV

SEQ ID NO: 31596 - protein, 85 aa, unidentified
  REGION 1..85: note = Description of Unknown:cds_NZ_WFIY01000004.1_cds_WP_170283911.1_1819 target sequence
ISSRSSALQLVENGLYNILYNTSIQRIKYLENISHTEVSPSIIRDPLEVALLYKLPTGEQASYQQSQFSQLARIVAIILFPAATP

SEQ ID NO: 31597 - protein, 85 aa, unidentified
  REGION 1..85: note = Description of Unknown:cds_NZ_WFIY01000004.1_cds_WP_170283911.1_1819 target sequence
VIFFVSDSIMGEKERKTLESLLASPISSRAFIFSKLIISIILGLISSIGDLIGLVVFSLFAPYIIGESITFSATFAILVIIVYLT

SEQ ID NO: 31598 - protein, 85 aa, unidentified
  REGION 1..85: note = Description of Unknown:cds_NZ_WFIY01000004.1_cds_WP_170283911.1_1819 target sequence
MILLTASMSIIVLLLLGGSSRNVQIINFIITSFGMIASFSSLFLNFGDLSYPLSLILGIPYVQLVASIMFYVFGLIEESIFSISI

SEQ ID NO: 31599 - protein, 85 aa, unidentified
  REGION 1..85: note = Description of Unknown:cds_NZ_WFIY01000004.1_cds_WP_155864067.1_2004 target sequence
SVKPRSILTLWFSSNTAVAKYAIGLIPAVLGLSPLLTIISLLLGNLSASIVLGIATSMGPKFNKEQIRISEDVFNKGWKTFSFLN

SEQ ID NO: 31600 - protein, 85 aa, unidentified
  REGION 1..85: note = Description of Unknown:cds_NZ_WFIY01000004.1_cds_WP_155864067.1_2004 target sequence
FLNTLGWFIVNVTLGGFALSVLTNNIVLGGIIIVITDIFVVIFGSSFIHKFESYASVLLILLGIFVTLDVTAKSIHTPTGSSISS

SEQ ID NO: 31601 - protein, 85 aa, unidentified
  REGION 1..85: note = Description of Unknown:cds_NZ_WFIY01000004.1_cds_WP_155864067.1_2004 target sequence
FWLVFLTSFGAILSWSPYASDYSKGINLNLKKSLLYTSFGVTIPSVWLSYIGYLSALAIGKASPIADVLGVLGKYSIAGVAIMIL

SEQ ID NO: 31602 - protein, 85 aa, unidentified
  REGION 1..85: note = Description of Unknown:cds_NZ_WFIY01000004.1_cds_WP_155864067.1_2004 target sequence
GIVSADALNLYTNTVALTSIVKTNKRIATLIAGVLGFVIFYFIYQDFLNFLINFLSSLGYWISPWIGILIAYTMKKKDWKIAWLS

SEQ ID NO: 31603 - protein, 84 aa, unidentified
  REGION 1..84: note = Description of Unknown:cds_NZ_WFIY01000004.1_cds_WP_155864067.1_2004 target sequence
INFLSSLGYWISPWIGILIAYTMKKKDWKIAWLSFATAIILGLPFMNLKQYGIPYEGPISSILGGIDVSQIIMLIVSIIMYIIL

SEQ ID NO: 31604 - protein, 85 aa, unidentified
  REGION 1..85: note = Description of Unknown:cds_NZ_WFIY01000004.1_cds_WP_155864067.1_2004 target sequence
AVLGLSPLLTIISLLLGNLSASIVLGIATSMGPKFNKEQIRISEDVFNKGWKTFSFLNFLNTLGWFIVNVTLGGFALSVLTNNIV

SEQ ID NO: 31605 - protein, 85 aa, unidentified
  REGION 1..85: note = Description of Unknown:cds_NZ_WFIY01000004.1_cds_WP_155864067.1_2004 target sequence
LGGIIIVITDIFVVIFGSSFIHKFESYASVLLILLGIFVTLDVTAKSIHTPTGSSISSFWLVFLTSFGAILSWSPYASDYSKGIN

SEQ ID NO: 31606 - protein, 85 aa, unidentified
  REGION 1..85: note = Description of Unknown:cds_NZ_WFIY01000004.1_cds_WP_155864067.1_2004 target sequence
LNLKKSLLYTSFGVTIPSVWLSYIGYLSALAIGKASPIADVLGVLGKYSIAGVAIMILGIVSADALNLYTNTVALTSIVKTNKRI

SEQ ID NO: 31607 - protein, 85 aa, unidentified
  REGION 1..85: note = Description of Unknown:cds_NZ_WFIY01000004.1_cds_WP_155864067.1_2004 target sequence
ATLIAGVLGFVIFYFIYQDFLNFLINFLSSLGYWISPWIGILIAYTMKKKDWKIAWLSFATAIILGLPFMNLKQYGIPYEGPISS

SEQ ID NO: 31608 - protein, 85 aa, unidentified
  REGION 1..85: note = Description of Unknown:vpeps_5YEU_1 target sequence
ATYEDLISHKHDYPKEIYKESHYIRRNTRLDVIKKIPQFEQKSKEWLKQRTESLTATAISVVFDEDPYKHPIVILLDKCGRGLPF

SEQ ID NO: 31609 - protein, 85 aa, unidentified
  REGION 1..85: note = Description of Unknown:vpeps_5YEU_1 target sequence
VENKFVHHGNKYEQIGTMFYSFRNNVEVGEYGLLQHSGHKFIAASPDGICSKKANTGGLSKLVGRLLEIKFPFSREINNSGDLDG

SEQ ID NO: 31610 - protein, 85 aa, unidentified
  REGION 1..85: note = Description of Unknown:vpeps_5YEU_1 target sequence
DICPHYYFLQVQTQLYVTEMDECDFLQCKIDEYDSWEDFVKDSNPIVPGLSKTTNLEKGCLIQLSDKNLIGSDDKEKCLYNSKYI

SEQ ID NO: 31611 - protein, 85 aa, unidentified
  REGION 1..85: note = Description of Unknown:vpeps_5YEU_1 target sequence
YPPKLHMTNEEIAAWISSEIANYHNNDLSENYMIDAVIYWRLSQVTCNLIKLNKEAFEEKIPLLQQFWDYVLFYRQHSDKLDKLI

SEQ ID NO: 31612 - protein, 85 aa, unidentified
  REGION 1..85: note = Description of Unknown:vpeps_5YEU_1 target sequence
LNKEAFEEKIPLLQQFWDYVLFYRQHSDKLDKLIKFVEKVKEDNSAEIFSYINEDFLSLNKDSKYEPLYQEETEWRKKYNQIKAK

SEQ ID NO: 31613 - protein, 85 aa, unidentified
  REGION 1..85: note = Description of Unknown:vpeps_5YEU_1 target sequence
TRLDVIKKIPQFEQKSKEWLKQRTESLTATAISVVFDEDPYKHPIVILLDKCGRGLPFVENKFVHHGNKYEQIGTMFYSFRNNVE

SEQ ID NO: 31614 - protein, 85 aa, unidentified
  REGION 1..85: note = Description of Unknown:vpeps_5YEU_1 target sequence
VGEYGLLQHSGHKFIAASPDGICSKKANTGGLSKLVGRLLEIKFPFSREINNSGDLDGDICPHYYFLQVQTQLYVTEMDECDFLQ

SEQ ID NO: 31615 - protein, 85 aa, unidentified
  REGION 1..85: note = Description of Unknown:vpeps_5YEU_1 target sequence
CKIDEYDSWEDFVKDSNPIVPGLSKTTNLEKGCLIQLSDKNLIGSDDKEKCLYNSKYIYPPKLHMTNEEIAAWISSEIANYHNND

SEQ ID NO: 31616 - protein, 85 aa, unidentified
  REGION 1..85: note = Description of Unknown:vpeps_5YEU_1 target sequence
LSENYMIDAVIYWRLSQVTCNLIKLNKEAFEEKIPLLQQFWDYVLFYRQHSDKLDKLIKFVEKVKEDNSAEIFSYINEDFLSLNK

SEQ ID NO: 31617 - protein, 85 aa, unidentified
  REGION 1..85: note = Description of Unknown:cds_NZ_WFIY01000004.1_cds_WP_155862333.1_59 target sequence
YLISLLGNGDTGKTTSFAKFLLKNNYFLEHQEEAVKNAKFDAEINGKPEDYYQFLLYVSPQEKIEERTIYTAQKIMAYYQGKFLP

SEQ ID NO: 31618 - protein, 85 aa, unidentified
  REGION 1..85: note = Description of Unknown:cds_NZ_WFIY01000004.1_cds_WP_155862333.1_59 target sequence
FRTISYLKFTGEKYERVIIDSPYKDGFAKGYVTFSLQDIGGQFDLFDKQINGLRISDAVIYFADDKTTQKDAENHAKMISAFKLP

SEQ ID NO: 31619 - protein, 85 aa, unidentified
  REGION 1..85: note = Description of Unknown:cds_NZ_WFIY01000004.1_cds_WP_155862333.1_59 target sequence
TFVVINKEDILKEKAVDKLNMILTTFQEYKINVVDKIITSALYKEEEIVKFLENAIKWTIQKEIKTYDKNVFGVIRNVNRSIATM

SEQ ID NO: 31620 - protein, 85 aa, unidentified
  REGION 1..85: note = Description of Unknown:cds_NZ_WFIY01000004.1_cds_WP_155862333.1_59 target sequence
RAYTSLSMPKNSQQYLYTQRKKRFFPNKVKSVEFALKETRMIHKGELVGVAFSENPLPSVVFKEEEHIRNPITNIHLERPLQEGE

SEQ ID NO: 31621 - protein, 84 aa, unidentified
  REGION 1..84: note = Description of Unknown:cds_NZ_WFIY01000004.1_cds_WP_155862333.1_59 target sequence
AFSENPLPSVVFKEEEHIRNPITNIHLERPLQEGEILFSSFIHSIKGEKYGNLILNEGIGVNELFVIDTINQTIKEIYDLTEFF

SEQ ID NO: 31622 - protein, 85 aa, unidentified
  REGION 1..85: note = Description of Unknown:cds_NZ_WFIY01000004.1_cds_WP_155862333.1_59 target sequence
LEHQEEAVKNAKFDAEINGKPEDYYQFLLYVSPQEKIEERTIYTAQKIMAYYQGKFLPFRTISYLKFTGEKYERVIIDSPYKDGF

SEQ ID NO: 31623 - protein, 85 aa, unidentified
  REGION 1..85: note = Description of Unknown:cds_NZ_WFIY01000004.1_cds_WP_155862333.1_59 target sequence
AKGYVTFSLQDIGGQFDLFDKQINGLRISDAVIYFADDKTTQKDAENHAKMISAFKLPTFVVINKEDILKEKAVDKLNMILTTFQ

SEQ ID NO: 31624 - protein, 85 aa, unidentified
  REGION 1..85: note = Description of Unknown:cds_NZ_WFIY01000004.1_cds_WP_155862333.1_59 target sequence
EYKINVVDKIITSALYKEEEIVKFLENAIKWTIQKEIKTYDKNVFGVIRNVNRSIATMRAYTSLSMPKNSQQYLYTQRKKRFFPN

SEQ ID NO: 31625 - protein, 85 aa, unidentified
  REGION 1..85: note = Description of Unknown:cds_NZ_WFIY01000004.1_cds_WP_155862333.1_59 target sequence
KVKSVEFALKETRMIHKGELVGVAFSENPLPSVVFKEEEHIRNPITNIHLERPLQEGEILFSSFIHSIKGEKYGNLILNEGIGVN

SEQ ID NO: 31626 - protein, 85 aa, unidentified
  REGION 1..85: note = Description of Unknown:cds_NZ_WFIY01000004.1_cds_WP_155862606.1_383 target sequence
PGNSLGKALTITTFGESHGPAIGVVIDGIPAGLPLSKEDIEFELSFRRPGKLFVSGRREKDEPEIISGIYNGRTTGAPVAIIIRN

SEQ ID NO: 31627 - protein, 85 aa, unidentified
  REGION 1..85: note = Description of Unknown:cds_NZ_WFIY01000004.1_cds_WP_155862606.1_383 target sequence
TDVISSLYEEVHYKPRPGHADLPYIMKYGFENWDYRGGGRASARETATRVAAGAIAKKLLMLTNTVIAGHLVSLGNVELEEKVSF

SEQ ID NO: 31628 - protein, 85 aa, unidentified
  REGION 1..85: note = Description of Unknown:cds_NZ_WFIY01000004.1_cds_WP_155862606.1_383 target sequence
EDILCSKYSPVRASKKSLEEKYEKLLMEATKEGDSYGGVAEIVVNNPPIGLGEPVFDKIKADLAKAVMSIPAVVGFEYGLGFKAA

SEQ ID NO: 31629 - protein, 85 aa, unidentified
  REGION 1..85: note = Description of Unknown:cds_NZ_WFIY01000004.1_cds_WP_155862606.1_383 target sequence
HMRGSEANDEIILKDGKLGWKYNNAGGILGGLTNGEQIILRCAFKPTSSIRKPQKTIDLRTMKETEISVIGRHDPAVAIRGVAVV

SEQ ID NO: 31630 - protein, 84 aa, unidentified
  REGION 1..84: note = Description of Unknown:cds_NZ_WFIY01000004.1_cds_WP_155862606.1_383 target sequence
RKPQKTIDLRTMKETEISVIGRHDPAVAIRGVAVVEAMVALVLVDHAIRAGIIPQVRLDDKQVSIIEENWKRYINTCRPTEGSQ

SEQ ID NO: 31631 - protein, 85 aa, unidentified
  REGION 1..85: note = Description of Unknown:cds_NZ_WFIY01000004.1_cds_WP_155862606.1_383 target sequence
GIPAGLPLSKEDIEFELSFRRPGKLFVSGRREKDEPEIISGIYNGRTTGAPVAIIIRNTDVISSLYEEVHYKPRPGHADLPYIMK

SEQ ID NO: 31632 - protein, 85 aa, unidentified
  REGION 1..85: note = Description of Unknown:cds_NZ_WFIY01000004.1_cds_WP_155862606.1_383 target sequence
YGFENWDYRGGGRASARETATRVAAGAIAKKLLMLTNTVIAGHLVSLGNVELEEKVSFEDILCSKYSPVRASKKSLEEKYEKLLM

SEQ ID NO: 31633 - protein, 85 aa, unidentified
  REGION 1..85: note = Description of Unknown:cds_NZ_WFIY01000004.1_cds_WP_155862606.1_383 target sequence
EATKEGDSYGGVAEIVVNNPPIGLGEPVFDKIKADLAKAVMSIPAVVGFEYGLGFKAAHMRGSEANDEIILKDGKLGWKYNNAGG

SEQ ID NO: 31634 - protein, 85 aa, unidentified
  REGION 1..85: note = Description of Unknown:cds_NZ_WFIY01000004.1_cds_WP_155862606.1_383 target sequence
ILGGLTNGEQIILRCAFKPTSSIRKPQKTIDLRTMKETEISVIGRHDPAVAIRGVAVVEAMVALVLVDHAIRAGIIPQVRLDDKQ

SEQ ID NO: 31635 - protein, 85 aa, unidentified
  REGION 1..85: note = Description of Unknown:cds_NZ_WFIY01000004.1_cds_WP_155862747.1_558 target sequence
YSLDPEDTSFFDSSKLKSEFVRQASVCHGCRLCFNYCFVFPKLFSITDKKGPKELTLEDLFSIVPDCFHCKMCYNNCPYTPPHEF

SEQ ID NO: 31636 - protein, 85 aa, unidentified
  REGION 1..85: note = Description of Unknown:cds_NZ_WFIY01000004.1_cds_WP_155862747.1_558 target sequence
NMDFAHLMDWAWLYYKQKTGLSLRDYLFEAVNVPFKKIVSKIYPYTKGFLGIKEDAPMPQMSDKGFKPRVGKIENPVAKVILFHT

SEQ ID NO: 31637 - protein, 85 aa, unidentified
  REGION 1..85: note = Description of Unknown:cds_NZ_WFIY01000004.1_cds_WP_155862747.1_558 target sequence
CLIENFYPDLGQDVIEVYNKLGIEVKLANFLCCGAPMLDVGDAKMLKKVAEFNSSILENFIKQGYDVVSPIPTCSLMIEEYKNVI

SEQ ID NO: 31638 - protein, 85 aa, unidentified
  REGION 1..85: note = Description of Unknown:cds_NZ_WFIY01000004.1_cds_WP_155862747.1_558 target sequence
NKEIKVYDAMEYLLKLNREGKIKLPRSFNKTVLYHTPCHLKYLKIGLPGVAIMRSLGAKVEIADKGCSGIDGGWGLRNYDKAKII

SEQ ID NO: 31639 - protein, 84 aa, unidentified
  REGION 1..84: note = Description of Unknown:cds_NZ_WFIY01000004.1_cds_WP_155862747.1_558 target sequence
AIMRSLGAKVEIADKGCSGIDGGWGLRNYDKAKIIGKKMMEVFSQSKAEVFVTECPLAGLQIFKASGKRPLHPIQVLKEALSIG

SEQ ID NO: 31640 - protein, 85 aa, unidentified
  REGION 1..85: note = Description of Unknown:cds_NZ_WFIY01000004.1_cds_WP_155862747.1_558 target sequence
HGCRLCFNYCFVFPKLFSITDKKGPKELTLEDLFSIVPDCFHCKMCYNNCPYTPPHEFNMDFAHLMDWAWLYYKQKTGLSLRDYL

SEQ ID NO: 31641 - protein, 85 aa, unidentified
  REGION 1..85: note = Description of Unknown:cds_NZ_WFIY01000004.1_cds_WP_155862747.1_558 target sequence
FEAVNVPFKKIVSKIYPYTKGFLGIKEDAPMPQMSDKGFKPRVGKIENPVAKVILFHTCLIENFYPDLGQDVIEVYNKLGIEVKL

SEQ ID NO: 31642 - protein, 85 aa, unidentified
  REGION 1..85: note = Description of Unknown:cds_NZ_WFIY01000004.1_cds_WP_155862747.1_558 target sequence
ANFLCCGAPMLDVGDAKMLKKVAEFNSSILENFIKQGYDVVSPIPTCSLMIEEYKNVINKEIKVYDAMEYLLKLNREGKIKLPRS

SEQ ID NO: 31643 - protein, 85 aa, unidentified
  REGION 1..85: note = Description of Unknown:cds_NZ_WFIY01000004.1_cds_WP_155862747.1_558 target sequence
FNKTVLYHTPCHLKYLKIGLPGVAIMRSLGAKVEIADKGCSGIDGGWGLRNYDKAKIIGKKMMEVFSQSKAEVFVTECPLAGLQI

SEQ ID NO: 31644 - protein, 85 aa, unidentified
  REGION 1..85: note = Description of Unknown:cds_NZ_WFIY01000004.1_cds_WP_155862941.1_799 target sequence
LSGEIDVSRDNNEDYEQIIKLLEEKINALQAETESLRKELNYYKSELEKLLSPPLIEAVVLDILDDGKVVVRSTSGPNLIVTVSS

SEQ ID NO: 31645 - protein, 85 aa, unidentified
  REGION 1..85: note = Description of Unknown:cds_NZ_WFIY01000004.1_cds_WP_155862941.1_799 target sequence
DIDIKSLKIGQSVALNQRGSAIVKILPERNDPFVKSMEVLEKPNVRYEDIGGLSQQIQELREVIELPLKNPEIFKELGIQPPKGV

SEQ ID NO: 31646 - protein, 85 aa, unidentified
  REGION 1..85: note = Description of Unknown:cds_NZ_WFIY01000004.1_cds_WP_155862941.1_799 target sequence
LLYGPPGTGKTMLAKAVATESNATFIHVVASEFAQKFVGEGARVVREVFELARKKAPSIVFIDEIDAIGAKRIDLGTSGEREVQR

SEQ ID NO: 31647 - protein, 85 aa, unidentified
  REGION 1..85: note = Description of Unknown:cds_NZ_WFIY01000004.1_cds_WP_155862941.1_799 target sequence
TLMQLLAELDGFQPLDNVKIIGATNRIDILDPALLRPGRFDRIIEIPLPDFNGRKEIFRIYISKMKVSKDVDINILAKLTEGFSG

SEQ ID NO: 31648 - protein, 84 aa, unidentified
  REGION 1..84: note = Description of Unknown:cds_NZ_WFIY01000004.1_cds_WP_155862941.1_799 target sequence
NGRKEIFRIYISKMKVSKDVDINILAKLTEGFSGADIKNVCTEAGYLAIRENKRIIEMNHFIEAINKVKSKRKEEFKGREEKYT

SEQ ID NO: 31649 - protein, 85 aa, unidentified
  REGION 1..85: note = Description of Unknown:cds_NZ_WFIY01000004.1_cds_WP_155862941.1_799 target sequence
ALQAETESLRKELNYYKSELEKLLSPPLIEAVVLDILDDGKVVVRSTSGPNLIVTVSSDIDIKSLKIGQSVALNQRGSAIVKILP

SEQ ID NO: 31650 - protein, 85 aa, unidentified
  REGION 1..85: note = Description of Unknown:cds_NZ_WFIY01000004.1_cds_WP_155862941.1_799 target sequence
ERNDPFVKSMEVLEKPNVRYEDIGGLSQQIQELREVIELPLKNPEIFKELGIQPPKGVLLYGPPGTGKTMLAKAVATESNATFIH

SEQ ID NO: 31651 - protein, 85 aa, unidentified
  REGION 1..85: note = Description of Unknown:cds_NZ_WFIY01000004.1_cds_WP_155862941.1_799 target sequence
VVASEFAQKFVGEGARVVREVFELARKKAPSIVFIDEIDAIGAKRIDLGTSGEREVQRTLMQLLAELDGFQPLDNVKIIGATNRI

SEQ ID NO: 31652 - protein, 85 aa, unidentified
  REGION 1..85: note = Description of Unknown:cds_NZ_WFIY01000004.1_cds_WP_155862941.1_799 target sequence
DILDPALLRPGRFDRIIEIPLPDFNGRKEIFRIYISKMKVSKDVDINILAKLTEGFSGADIKNVCTEAGYLAIRENKRIIEMNHF

SEQ ID NO: 31653 - protein, 85 aa, unidentified
  REGION 1..85: note = Description of Unknown:cds_NZ_WFIY01000004.1_cds_WP_155863261.1_1215 target sequence
LFDVRPKEDKKDLYDRDKEVDEVKESVNRKVWIAVYGMRRVGKTSVVNVAVNDPRYIVIKLNLMRIYDPKKKKYPKTFFVSLFLE

SEQ ID NO: 31654 - protein, 85 aa, unidentified
  REGION 1..85: note = Description of Unknown:cds_NZ_WFIY01000004.1_cds_WP_155863261.1_1215 target sequence
SINEAVKKYTLGGRLIRFVSNVLGVDENSFIDFNLVKIRPRLKKFRGEDVSSTIRELDLLAGDNKRTLVLIFDEAQELMKVNGIN

SEQ ID NO: 31655 - protein, 85 aa, unidentified
  REGION 1..85: note = Description of Unknown:cds_NZ_WFIY01000004.1_cds_WP_155863261.1_1215 target sequence
FSSVFHDIYDYCRNTTVIFTGSSVGILENMLKSLEYEKPFFGRFIRRIRIERFNEQLSRDFLLKGFAEEGITVQEDVINDALRRF

SEQ ID NO: 31656 - protein, 85 aa, unidentified
  REGION 1..85: note = Description of Unknown:cds_NZ_WFIY01000004.1_cds_WP_155863261.1_1215 target sequence
DGIPGWLTFFGSEYSFRIRHGEKQVNVDDIEKMAVEEVRKEAKDFILGTQSPERYSAAILALDRLGGKGSVADVTKVVSSILSEV

SEQ ID NO: 31657 - protein, 84 aa, unidentified
  REGION 1..84: note = Description of Unknown:cds_NZ_WFIY01000004.1_cds_WP_155863261.1_1215 target sequence
SPERYSAAILALDRLGGKGSVADVTKVVSSILSEVPEPRIYEILNRLVNMGFIEKENEEYSLPKDEPDRKGLVLAGKDVMSLVT

SEQ ID NO: 31658 - protein, 85 aa, unidentified
  REGION 1..85: note = Description of Unknown:cds_NZ_WFIY01000004.1_cds_WP_155863261.1_1215 target sequence
NRKVWIAVYGMRRVGKTSVVNVAVNDPRYIVIKLNLMRIYDPKKKKYPKTFFVSLFLESINEAVKKYTLGGRLIRFVSNVLGVDE

SEQ ID NO: 31659 - protein, 85 aa, unidentified
  REGION 1..85: note = Description of Unknown:cds_NZ_WFIY01000004.1_cds_WP_155863261.1_1215 target sequence
NSFIDFNLVKIRPRLKKFRGEDVSSTIRELDLLAGDNKRTLVLIFDEAQELMKVNGINFSSVFHDIYDYCRNTTVIFTGSSVGIL

SEQ ID NO: 31660 - protein, 85 aa, unidentified
  REGION 1..85: note = Description of Unknown:cds_NZ_WFIY01000004.1_cds_WP_155863261.1_1215 target sequence
ENMLKSLEYEKPFFGRFIRRIRIERFNEQLSRDFLLKGFAEEGITVQEDVINDALRRFDGIPGWLTFFGSEYSFRIRHGEKQVNV

SEQ ID NO: 31661 - protein, 85 aa, unidentified
  REGION 1..85: note = Description of Unknown:cds_NZ_WFIY01000004.1_cds_WP_155863261.1_1215 target sequence
DDIEKMAVEEVRKEAKDFILGTQSPERYSAAILALDRLGGKGSVADVTKVVSSILSEVPEPRIYEILNRLVNMGFIEKENEEYSL

SEQ ID NO: 31662 - protein, 85 aa, unidentified
  REGION 1..85: note = Description of Unknown:hvTR_P15130 target sequence
ATVKWADASEPQRGRQGRIPYSLYSPLLVDSEQSWKVIPRNLVPINKKDKNKLIGYWNVQKRFRTRKGKRVDLSPKLHFYYLGTG

SEQ ID NO: 31663 - protein, 85 aa, unidentified
  REGION 1..85: note = Description of Unknown:hvTR_P15130 target sequence
PHKDAKFRERVEGVVWVAVDGAKTEPTGHGARRKNSEPEIPHFNQKLPNGVTVVEEPDSRAPSRSQSRSQSRGPGESKPQSRNPS

SEQ ID NO: 31664 - protein, 85 aa, unidentified
  REGION 1..85: note = Description of Unknown:hvTR_P15130 target sequence
SDRYHNSQDDIMKAVAAALKSLGFDKPQEKDKKSAKTGTPKPSRNQSPASSQTSAKSLARSQSSETKEQKHEIEKPRWKRQPNDD

SEQ ID NO: 31665 - protein, 85 aa, unidentified
  REGION 1..85: note = Description of Unknown:hvTR_P15130 target sequence
VTSNVTQCFGPRDLDHNFGSAGVVANGVKAKGYPQFAELVPSTAAMLFDSHIVSKESGNTVVLTFTTRVTVPKDHPHLGKFLEEL

SEQ ID NO: 31666 - protein, 84 aa, unidentified
  REGION 1..84: note = Description of Unknown:hvTR_P15130 target sequence
SHIVSKESGNTVVLTFTTRVTVPKDHPHLGKFLEELNAFTREMQQQPLLNPSALEFNPSQTSPATAEPVRDEFSIETDIIDEVN

SEQ ID NO: 31667 - protein, 85 aa, unidentified
  REGION 1..85: note = Description of Unknown:hvTR_P15130 target sequence
LVDSEQSWKVIPRNLVPINKKDKNKLIGYWNVQKRFRTRKGKRVDLSPKLHFYYLGTGPHKDAKFRERVEGVVWVAVDGAKTEPT

SEQ ID NO: 31668 - protein, 85 aa, unidentified
  REGION 1..85: note = Description of Unknown:hvTR_P15130 target sequence
GHGARRKNSEPEIPHFNQKLPNGVTVVEEPDSRAPSRSQSRSQSRGPGESKPQSRNPSSDRYHNSQDDIMKAVAAALKSLGFDKP

SEQ ID NO: 31669 - protein, 85 aa, unidentified
  REGION 1..85: note = Description of Unknown:hvTR_P15130 target sequence
QEKDKKSAKTGTPKPSRNQSPASSQTSAKSLARSQSSETKEQKHEIEKPRWKRQPNDDVTSNVTQCFGPRDLDHNFGSAGVVANG

SEQ ID NO: 31670 - protein, 85 aa, unidentified
  REGION 1..85: note = Description of Unknown:hvTR_P15130 target sequence
VKAKGYPQFAELVPSTAAMLFDSHIVSKESGNTVVLTFTTRVTVPKDHPHLGKFLEELNAFTREMQQQPLLNPSALEFNPSQTSP

SEQ ID NO: 31671 - protein, 85 aa, unidentified
  REGION 1..85: note = Description of Unknown:vpeps_4XUL_1 target sequence
GSSHHHHHHSLEVLFQGPGSLIYTYKLEKYVRTKIFPKILLIPDKNRYIIKGSFRRRVPFVTDIDVVNNVYPEISRENIYDEIIK

SEQ ID NO: 31672 - protein, 85 aa, unidentified
  REGION 1..85: note = Description of Unknown:vpeps_4XUL_1 target sequence
LVNNIQSDPNIILAYLSCGTDERFKISTGSSKELSNIQSLLPDNEKNEFQLVLNKYYNDQQKKLFFLNELIWDHYKLRWKPEDVL

SEQ ID NO: 31673 - protein, 85 aa, unidentified
  REGION 1..85: note = Description of Unknown:vpeps_4XUL_1 target sequence
IGSMNLANNVSVNFRETVENNSTILLQYYVKLGSYPVGIDVVINYQKIDLTPAYKNAALYQLQLANYSREYYYMLFPLRYYFKNN

SEQ ID NO: 31674 - protein, 85 aa, unidentified
  REGION 1..85: note = Description of Unknown:vpeps_4XUL_1 target sequence
QDISQRLENIIEKKYGLYKQLMVRIDDYHTLYKSGNLKIDMATNIVIGILRDIEKLPGFESDTIYQIKKVATNNSPSIKIEEWDI

SEQ ID NO: 31675 - protein, 85 aa, unidentified
  REGION 1..85: note = Description of Unknown:vpeps_4XUL_1 target sequence
RDIEKLPGFESDTIYQIKKVATNNSPSIKIEEWDILLKVLYQEINTAVNNKSRKYFYRYIAMVPPQDRSKNYISENQDMRLKMVN

SEQ ID NO: 31676 - protein, 85 aa, unidentified
  REGION 1..85: note = Description of Unknown:vpeps_4XUL_1 target sequence
EKYVRTKIFPKILLIPDKNRYIIKGSFRRRVPFVTDIDVVNNVYPEISRENIYDEIIKLVNNIQSDPNIILAYLSCGTDERFKIS

SEQ ID NO: 31677 - protein, 85 aa, unidentified
  REGION 1..85: note = Description of Unknown:vpeps_4XUL_1 target sequence
TGSSKELSNIQSLLPDNEKNEFQLVLNKYYNDQQKKLFFLNELIWDHYKLRWKPEDVLIGSMNLANNVSVNFRETVENNSTILLQ

SEQ ID NO: 31678 - protein, 85 aa, unidentified
  REGION 1..85: note = Description of Unknown:vpeps_4XUL_1 target sequence
YYVKLGSYPVGIDVVINYQKIDLTPAYKNAALYQLQLANYSREYYYMLFPLRYYFKNNQDISQRLENIIEKKYGLYKQLMVRIDD

SEQ ID NO: 31679 - protein, 85 aa, unidentified
  REGION 1..85: note = Description of Unknown:vpeps_4XUL_1 target sequence
YHTLYKSGNLKIDMATNIVIGILRDIEKLPGFESDTIYQIKKVATNNSPSIKIEEWDILLKVLYQEINTAVNNKSRKYFYRYIAM

SEQ ID NO: 31680 - protein, 85 aa, unidentified
  REGION 1..85: note = Description of Unknown:cds_NC_002645.1_cds_NP_073556.1_8 target sequence
ATVKWADASEPQRGRQGRIPYSLYSPLLVDSEQPWKVIPRNLVPINKKDKNKLIGYWNVQKRFRTRKGKRVDLSPKLHFYYLGTG

SEQ ID NO: 31681 - protein, 85 aa, unidentified
  REGION 1..85: note = Description of Unknown:cds_NC_002645.1_cds_NP_073556.1_8 target sequence
PHKDAKFRERVEGVVWVAVDGAKTEPTGYGVRRKNSEPEIPHFNQKLPNGVTVVEEPDSRAPSRSQSRSQSRGRGESKPQSRNPS

SEQ ID NO: 31682 - protein, 85 aa, unidentified
  REGION 1..85: note = Description of Unknown:cds_NC_002645.1_cds_NP_073556.1_8 target sequence
SDRNHNSQDDIMKAVAAALKSLGFDKPQEKDKKSAKTGTPKPSRNQSPASSQTSAKSLARSQSSETKEQKHEMQKPRWKRQPNDD

SEQ ID NO: 31683 - protein, 84 aa, unidentified
  REGION 1..84: note = Description of Unknown:cds_NC_002645.1_cds_NP_073556.1_8 target sequence
SHIVSKESGNTVVLTFTTRVTVPKDHPHLGKFLEELNAFTREMQQHPLLNPSALEFNPSQTSPATAEPVRDEVSIETDIIDEVN

SEQ ID NO: 31684 - protein, 85 aa, unidentified
  REGION 1..85: note = Description of Unknown:cds_NC_002645.1_cds_NP_073556.1_8 target sequence
LVDSEQPWKVIPRNLVPINKKDKNKLIGYWNVQKRFRTRKGKRVDLSPKLHFYYLGTGPHKDAKFRERVEGVVWVAVDGAKTEPT

SEQ ID NO: 31685 - protein, 85 aa, unidentified
  REGION 1..85: note = Description of Unknown:cds_NC_002645.1_cds_NP_073556.1_8 target sequence
GYGVRRKNSEPEIPHFNQKLPNGVTVVEEPDSRAPSRSQSRSQSRGRGESKPQSRNPSSDRNHNSQDDIMKAVAAALKSLGFDKP

SEQ ID NO: 31686 - protein, 85 aa, unidentified
  REGION 1..85: note = Description of Unknown:cds_NC_002645.1_cds_NP_073556.1_8 target sequence
QEKDKKSAKTGTPKPSRNQSPASSQTSAKSLARSQSSETKEQKHEMQKPRWKRQPNDDVTSNVTQCFGPRDLDHNFGSAGVVANG

SEQ ID NO: 31687 - protein, 85 aa, unidentified
  REGION 1..85: note = Description of Unknown:cds_NC_002645.1_cds_NP_073556.1_8 target sequence
VKAKGYPQFAELVPSTAAMLFDSHIVSKESGNTVVLTFTTRVTVPKDHPHLGKFLEELNAFTREMQQHPLLNPSALEFNPSQTSP

SEQ ID NO: 31688 - protein, 85 aa, unidentified
  REGION 1..85: note = Description of Unknown:cds_NZ_WFIY01000004.1_cds_WP_155864491.1_2335 target sequence
SRAIPRDVPKEELLTNLSIPNILAILGVRRSGKSTLSLLLLKDKNFAYVDFDDERLRNLKSDDLHIVEQAIYELYGNVDYILFDE

SEQ ID NO: 31689 - protein, 85 aa, unidentified
  REGION 1..85: note = Description of Unknown:cds_NZ_WFIY01000004.1_cds_WP_155864491.1_2335 target sequence
IQNIQGWEPFVSRLRKTKRIILTGSNSKLLSGELATSLTGRHVDFTLFPFSFKEFLRFKGVNYSEPLTTRERAEIKNYLRDYMSI

SEQ ID NO: 31690 - protein, 85 aa, unidentified
  REGION 1..85: note = Description of Unknown:cds_NZ_WFIY01000004.1_cds_WP_155864491.1_2335 target sequence
GGFPEALLLNSRQIVNSIYNDILFKDVVQRLKIKRISRFKDFSSAIISLYSSEVSLNRIARMLRIDYKTVDEWFYGLTSSYLIYS

SEQ ID NO: 31691 - protein, 85 aa, unidentified
  REGION 1..85: note = Description of Unknown:cds_NZ_WFIY01000004.1_cds_WP_155864491.1_2335 target sequence
VERYTGKLSRIAENKKVYVVDMGIIQEVSIKKDMGRLMENLVAIHLLRKNQNKGVYFVKGEDYEVDFLDEKNGELIQVTYDEEGI

SEQ ID NO: 31692 - protein, 84 aa, unidentified
  REGION 1..84: note = Description of Unknown:cds_NZ_WFIY01000004.1_cds_WP_155864491.1_2335 target sequence
NQNKGVYFVKGEDYEVDFLDEKNGELIQVTYDEEGIKERELSALTKASSSLGFKPKIVTWDMEEIMDYNGKKIELEPLWKFLLR

SEQ ID NO: 31693 - protein, 85 aa, unidentified
  REGION 1..85: note = Description of Unknown:cds_NZ_WFIY01000004.1_cds_WP_155864491.1_2335 target sequence
VRRSGKSTLSLLLLKDKNFAYVDFDDERLRNLKSDDLHIVEQAIYELYGNVDYILFDEIQNIQGWEPFVSRLRKTKRIILTGSNS

SEQ ID NO: 31694 - protein, 85 aa, unidentified
  REGION 1..85: note = Description of Unknown:cds_NZ_WFIY01000004.1_cds_WP_155864491.1_2335 target sequence
KLLSGELATSLTGRHVDFTLFPFSFKEFLRFKGVNYSEPLTTRERAEIKNYLRDYMSIGGFPEALLLNSRQIVNSIYNDILFKDV

SEQ ID NO: 31695 - protein, 85 aa, unidentified
  REGION 1..85: note = Description of Unknown:cds_NZ_WFIY01000004.1_cds_WP_155864491.1_2335 target sequence
VQRLKIKRISRFKDFSSAIISLYSSEVSLNRIARMLRIDYKTVDEWFYGLTSSYLIYSVERYTGKLSRIAENKKVYVVDMGIIQE

SEQ ID NO: 31696 - protein, 85 aa, unidentified
  REGION 1..85: note = Description of Unknown:cds_NZ_WFIY01000004.1_cds_WP_155864491.1_2335 target sequence
VSIKKDMGRLMENLVAIHLLRKNQNKGVYFVKGEDYEVDFLDEKNGELIQVTYDEEGIKERELSALTKASSSLGFKPKIVTWDME

SEQ ID NO: 31697 - protein, 85 aa, unidentified
  REGION 1..85: note = Description of Unknown:cds_NZ_WFIY01000004.1_cds_WP_155862751.1_563 target sequence
PKNEFIYLATVIFTLTFAIRASNNMLITTIPLISAYIFHFSSVLIGVLSSILSISSFISSFFVNSRLDNLRRRELFLISSATYAV

SEQ ID NO: 31698 - protein, 85 aa, unidentified
  REGION 1..85: note = Description of Unknown:cds_NZ_WFIY01000004.1_cds_WP_155862751.1_563 target sequence
VFPLFFVANCILVFILSFIAGFSLGILFPNIITLSGSLDDRKMSERMLALYTTALSLSLIISPGLESLILQRFSLREAFLFFSFL

SEQ ID NO: 31699 - protein, 85 aa, unidentified
  REGION 1..85: note = Description of Unknown:cds_NZ_WFIY01000004.1_cds_WP_155862751.1_563 target sequence
AFLVLFISLKVRYPESHERREISAKAREILFSPRFLAPFFNNLMYDIPFAFIEVFGGIYAIEYFNASYSMATFLFTLYFLTSFIG

SEQ ID NO: 31700 - protein, 85 aa, unidentified
  REGION 1..85: note = Description of Unknown:cds_NZ_WFIY01000004.1_cds_WP_155862751.1_563 target sequence
RVLFTLRAPRNVFRIILLNVALSVIGLFLAFISFNVILYIISLLILGIPHGLTYPSSLVIIRRNFKDEERSAANSYFTGILMGLG

SEQ ID NO: 31701 - protein, 84 aa, unidentified
  REGION 1..84: note = Description of Unknown:cds_NZ_WFIY01000004.1_cds_WP_155862751.1_563 target sequence
PHGLTYPSSLVIIRRNFKDEERSAANSYFTGILMGLGGIVPIIMGGIVSLIGIRLSFLVLTIVVLVFFSLFFIKQREIKNKDSS

SEQ ID NO: 31702 - protein, 85 aa, unidentified
  REGION 1..85: note = Description of Unknown:cds_NZ_WFIY01000004.1_cds_WP_155862751.1_563 target sequence
TTIPLISAYIFHFSSVLIGVLSSILSISSFISSFFVNSRLDNLRRRELFLISSATYAVVFPLFFVANCILVFILSFIAGFSLGIL

SEQ ID NO: 31703 - protein, 85 aa, unidentified
  REGION 1..85: note = Description of Unknown:cds_NZ_WFIY01000004.1_cds_WP_155862751.1_563 target sequence
FPNIITLSGSLDDRKMSERMLALYTTALSLSLIISPGLESLILQRFSLREAFLFFSFLAFLVLFISLKVRYPESHERREISAKAR

SEQ ID NO: 31704 - protein, 85 aa, unidentified
  REGION 1..85: note = Description of Unknown:cds_NZ_WFIY01000004.1_cds_WP_155862751.1_563 target sequence
EILFSPRFLAPFFNNLMYDIPFAFIEVFGGIYAIEYFNASYSMATFLFTLYFLTSFIGRVLFTLRAPRNVFRIILLNVALSVIGL

SEQ ID NO: 31705 - protein, 85 aa, unidentified
  REGION 1..85: note = Description of Unknown:cds_NZ_WFIY01000004.1_cds_WP_155862751.1_563 target sequence
FLAFISFNVILYIISLLILGIPHGLTYPSSLVIIRRNFKDEERSAANSYFTGILMGLGGIVPIIMGGIVSLIGIRLSFLVLTIVV

SEQ ID NO: 31706 - protein, 85 aa, unidentified
  REGION 1..85: note = Description of Unknown:cds_NZ_WFIY01000004.1_cds_WP_155863688.1_1551 target sequence
SRKYVDIVFYSLLAVIVATYTYFTIKTFLPINAYIGDEVWYPTAAYNILKLIFHISPPMYFPYPDKPDIETFINICHPPLAKYIM

SEQ ID NO: 31707 - protein, 85 aa, unidentified
  REGION 1..85: note = Description of Unknown:cds_NZ_WFIY01000004.1_cds_WP_155863688.1_1551 target sequence
GMFIIFMGYSPLSWRLPSWIIGDLILITGFFFTREILGKDLIGNLGGIFTSIILASCPNLWVLHGIAMLDIYVAFFSFLSLYFLL

SEQ ID NO: 31708 - protein, 85 aa, unidentified
  REGION 1..85: note = Description of Unknown:cds_NZ_WFIY01000004.1_cds_WP_155863688.1_1551 target sequence
KNKLLFSAIFLGLAIASKEPAVMLIFPALYYIGEIERKPIKRAYLGLGIPALVYLVISLPIIIYEGGPLAWLHAKIANTVVWDIS

SEQ ID NO: 31709 - protein, 85 aa, unidentified
  REGION 1..85: note = Description of Unknown:cds_NZ_WFIY01000004.1_cds_WP_155863688.1_1551 target sequence
NGHISLDAVTQISEPWDWFLNIHPFNMGHGLYANVNPIIMILWVVTTPLAFVMKNLKMIMTTMFAWSEWLGFVLVYVLGNHTQFS

SEQ ID NO: 31710 - protein, 84 aa, unidentified
  REGION 1..84: note = Description of Unknown:cds_NZ_WFIY01000004.1_cds_WP_155863688.1_1551 target sequence
LAFVMKNLKMIMTTMFAWSEWLGFVLVYVLGNHTQFSFYVTDFAPFVDSYIVIVLFMIARRFYVKKGEEKNIEENKQNYSGGIS

SEQ ID NO: 31711 - protein, 85 aa, unidentified
  REGION 1..85: note = Description of Unknown:cds_NZ_WFIY01000004.1_cds_WP_155863688.1_1551 target sequence
FLPINAYIGDEVWYPTAAYNILKLIFHISPPMYFPYPDKPDIETFINICHPPLAKYIMGMFIIFMGYSPLSWRLPSWIIGDLILI

SEQ ID NO: 31712 - protein, 85 aa, unidentified
  REGION 1..85: note = Description of Unknown:cds_NZ_WFIY01000004.1_cds_WP_155863688.1_1551 target sequence
TGFFFTREILGKDLIGNLGGIFTSIILASCPNLWVLHGIAMLDIYVAFFSFLSLYFLLKNKLLFSAIFLGLAIASKEPAVMLIFP

SEQ ID NO: 31713 - protein, 85 aa, unidentified
  REGION 1..85: note = Description of Unknown:cds_NZ_WFIY01000004.1_cds_WP_155863688.1_1551 target sequence
ALYYIGEIERKPIKRAYLGLGIPALVYLVISLPIIIYEGGPLAWLHAKIANTVVWDISNGHISLDAVTQISEPWDWFLNIHPFNM

SEQ ID NO: 31714 - protein, 85 aa, unidentified
  REGION 1..85: note = Description of Unknown:cds_NZ_WFIY01000004.1_cds_WP_155863688.1_1551 target sequence
GHGLYANVNPIIMILWVVTTPLAFVMKNLKMIMTTMFAWSEWLGFVLVYVLGNHTQFSFYVTDFAPFVDSYIVIVLFMIARRFYV

SEQ ID NO: 31715 - protein, 85 aa, unidentified
  REGION 1..85: note = Description of Unknown:cds_NZ_WFIY01000004.1_cds_WP_155863840.1_1736 target sequence
KFAVVGSGTMGHGIAEVLAIYGHQVKLIDISWDILNRAKQRMEESLRKFYEKGTVKEDPSVILSRIEMSTSYDVAKDIDFAIEAV

SEQ ID NO: 31716 - protein, 85 aa, unidentified
  REGION 1..85: note = Description of Unknown:cds_NZ_WFIY01000004.1_cds_WP_155863840.1_1736 target sequence
PEILDLKRKVFQSLDEIAPKEAILATNTSSIPISEIAEFTSRKDKVIGMHFFNPPQIMKLVEVIPSKYTSEDTANKTVELARSLG

SEQ ID NO: 31717 - protein, 85 aa, unidentified
  REGION 1..85: note = Description of Unknown:cds_NZ_WFIY01000004.1_cds_WP_155863840.1_1736 target sequence
KVPVKLRIEVPGFIGNRIFLRLMQEACREVESGEASIEEVDSCARNKIGLPMGIFELSDYVGLDIDVDLWENIVKRGTSDVPCKL

SEQ ID NO: 31718 - protein, 85 aa, unidentified
  REGION 1..85: note = Description of Unknown:cds_NZ_WFIY01000004.1_cds_WP_155863840.1_1736 target sequence
FKEKVARKELGVKSGKGFYEYPGNKYLKVKLPATSKVDPARLLSLAVNEAAWLVENNIVKPSEVDDVMKYGYNFPKGLLEIADEL

SEQ ID NO: 31719 - protein, 84 aa, unidentified
  REGION 1..84: note = Description of Unknown:cds_NZ_WFIY01000004.1_cds_WP_155863840.1_1736 target sequence
EAAWLVENNIVKPSEVDDVMKYGYNFPKGLLEIADELGIDNILKNLEDIYNKGYSAYKPQGLLIRMVKEGKIGKKSGEGFYKYA

SEQ ID NO: 31720 - protein, 85 aa, unidentified
  REGION 1..85: note = Description of Unknown:cds_NZ_WFIY01000004.1_cds_WP_155863840.1_1736 target sequence
IDISWDILNRAKQRMEESLRKFYEKGTVKEDPSVILSRIEMSTSYDVAKDIDFAIEAVPEILDLKRKVFQSLDEIAPKEAILATN

SEQ ID NO: 31721 - protein, 85 aa, unidentified
  REGION 1..85: note = Description of Unknown:cds_NZ_WFIY01000004.1_cds_WP_155863840.1_1736 target sequence
TSSIPISEIAEFTSRKDKVIGMHFFNPPQIMKLVEVIPSKYTSEDTANKTVELARSLGKVPVKLRIEVPGFIGNRIFLRLMQEAC

SEQ ID NO: 31722 - protein, 85 aa, unidentified
  REGION 1..85: note = Description of Unknown:cds_NZ_WFIY01000004.1_cds_WP_155863840.1_1736 target sequence
REVESGEASIEEVDSCARNKIGLPMGIFELSDYVGLDIDVDLWENIVKRGTSDVPCKLFKEKVARKELGVKSGKGFYEYPGNKYL

SEQ ID NO: 31723 - protein, 85 aa, unidentified
  REGION 1..85: note = Description of Unknown:cds_NZ_WFIY01000004.1_cds_WP_155863840.1_1736 target sequence
KVKLPATSKVDPARLLSLAVNEAAWLVENNIVKPSEVDDVMKYGYNFPKGLLEIADELGIDNILKNLEDIYNKGYSAYKPQGLLI

SEQ ID NO: 31724 - protein, 85 aa, unidentified
  REGION 1..85: note = Description of Unknown:hvTR_P27552 target sequence
SQMERLLERLDYIQEQILTLYEKDSVDLEDHIRLWNLLRRENAIWYVLRQEGHARVGGRAVPAMTVSEANAKFAIEMQIKLESLK

SEQ ID NO: 31725 - protein, 85 aa, unidentified
  REGION 1..85: note = Description of Unknown:hvTR_P27552 target sequence
ASPYAAEGWSLQETTKERYLAEPSRTFKKLGQPVTLMFDNDPENLTEVVLWKWVYYITPTDEWYKARGGIDDTGIYYIDHESVKM

SEQ ID NO: 31726 - protein, 85 aa, unidentified
  REGION 1..85: note = Description of Unknown:hvTR_P27552 target sequence
YYVRFDMEAENFSETGTVTYRLGSALVNVPEPVTVTDSSSTRERTPKVLRPQGSRRRRNEETGEPVAPAPKRRRGAYGRRSSPKA

SEQ ID NO: 31727 - protein, 85 aa, unidentified
  REGION 1..85: note = Description of Unknown:hvTR_P27552 target sequence
QRRTAASPVSRGNGGSSDFTSGESDEGHRVRHRALRKKTAGVAPAEGHYLVGAKGPVNSLRCLRYKWKNKYSGDIMYLGTTFTWT

SEQ ID NO: 31728 - protein, 84 aa, unidentified
  REGION 1..84: note = Description of Unknown:hvTR_P27552 target sequence
HYLVGAKGPVNSLRCLRYKWKNKYSGDIMYLGTTFTWTESDGTERCGSGRFFCAFSNETKREKFLKSVKIPKNIGLFRAHAEKL

SEQ ID NO: 31729 - protein, 85 aa, unidentified
  REGION 1..85: note = Description of Unknown:hvTR_P27552 target sequence
LEDHIRLWNLLRRENAIWYVLRQEGHARVGGRAVPAMTVSEANAKFAIEMQIKLESLKASPYAAEGWSLQETTKERYLAEPSRTF

SEQ ID NO: 31730 - protein, 85 aa, unidentified
  REGION 1..85: note = Description of Unknown:hvTR_P27552 target sequence
KKLGQPVTLMFDNDPENLTEVVLWKWVYYITPTDEWYKARGGIDDTGIYYIDHESVKMYYVRFDMEAENFSETGTVTYRLGSALV

SEQ ID NO: 31731 - protein, 85 aa, unidentified
  REGION 1..85: note = Description of Unknown:hvTR_P27552 target sequence
NVPEPVTVTDSSSTRERTPKVLRPQGSRRRRNEETGEPVAPAPKRRRGAYGRRSSPKAQRRTAASPVSRGNGGSSDFTSGESDEG

SEQ ID NO: 31732 - protein, 85 aa, unidentified
  REGION 1..85: note = Description of Unknown:hvTR_P27552 target sequence
HRVRHRALRKKTAGVAPAEGHYLVGAKGPVNSLRCLRYKWKNKYSGDIMYLGTTFTWTESDGTERCGSGRFFCAFSNETKREKFL

SEQ ID NO: 31733 - protein, 85 aa, unidentified
  REGION 1..85: note = Description of Unknown:cds_NZ_WFIY01000004.1_cds_WP_155862875.1_714 target sequence
KLIEFYATRGLRIVKGENQYVWDDKGRRYLDLHAGHGVAFLGHRNKIVLEYLERQMSEIITLTTAFDTPIREEMLNEMEKIKPDD

SEQ ID NO: 31734 - protein, 85 aa, unidentified
  REGION 1..85: note = Description of Unknown:cds_NZ_WFIY01000004.1_cds_WP_155862875.1_714 target sequence
LDNVFLLNSGSEAVELALKTARKITGKRKLIAFKNSFHGRTSGSLSVTWNKRYREPFEPLLEPVEFLEFNSIEDLKKIDENTAAV

SEQ ID NO: 31735 - protein, 85 aa, unidentified
  REGION 1..85: note = Description of Unknown:cds_NZ_WFIY01000004.1_cds_WP_155862875.1_714 target sequence
IVEPVQGEGGVIPAKEDFMKALRETTQEKGVLLIVDEVQTGFGRTGKVWAYQHFGIKPDIMTAGKAIGGGFPVSAVFMPDWIAEK

SEQ ID NO: 31736 - protein, 85 aa, unidentified
  REGION 1..85: note = Description of Unknown:cds_NZ_WFIY01000004.1_cds_WP_155862875.1_714 target sequence
LSEGDHGTTYGGNPFAAAAVTGAIKALLTDNVPEQARVKGEIFMKMLNEALADFKSVREVRGLGLMIGVDLRLNPGKAIKYLQDH

SEQ ID NO: 31737 - protein, 84 aa, unidentified
  REGION 1..84: note = Description of Unknown:cds_NZ_WFIY01000004.1_cds_WP_155862875.1_714 target sequence
NEALADFKSVREVRGLGLMIGVDLRLNPGKAIKYLQDHGVLSLKAGVSTIRFLSPYMITQEDMELAVNATRQGVAITEGKTVSS

SEQ ID NO: 31738 - protein, 85 aa, unidentified
  REGION 1..85: note = Description of Unknown:cds_NZ_WFIY01000004.1_cds_WP_155862875.1_714 target sequence
RYLDLHAGHGVAFLGHRNKIVLEYLERQMSEIITLTTAFDTPIREEMLNEMEKIKPDDLDNVFLLNSGSEAVELALKTARKITGK

SEQ ID NO: 31739 - protein, 85 aa, unidentified
  REGION 1..85: note = Description of Unknown:cds_NZ_WFIY01000004.1_cds_WP_155862875.1_714 target sequence
RKLIAFKNSFHGRTSGSLSVTWNKRYREPFEPLLEPVEFLEFNSIEDLKKIDENTAAVIVEPVQGEGGVIPAKEDFMKALRETTQ

SEQ ID NO: 31740 - protein, 85 aa, unidentified
  REGION 1..85: note = Description of Unknown:cds_NZ_WFIY01000004.1_cds_WP_155862875.1_714 target sequence
EKGVLLIVDEVQTGFGRTGKVWAYQHFGIKPDIMTAGKAIGGGFPVSAVFMPDWIAEKLSEGDHGTTYGGNPFAAAAVTGAIKAL

SEQ ID NO: 31741 - protein, 85 aa, unidentified
  REGION 1..85: note = Description of Unknown:cds_NZ_WFIY01000004.1_cds_WP_155862875.1_714 target sequence
LTDNVPEQARVKGEIFMKMLNEALADFKSVREVRGLGLMIGVDLRLNPGKAIKYLQDHGVLSLKAGVSTIRFLSPYMITQEDMEL

SEQ ID NO: 31742 - protein, 85 aa, unidentified
  REGION 1..85: note = Description of Unknown:cds_NC_007409.1_cds_YP_319894.1_63 target sequence
LVAQEMAQEKNLQPWEYVYDLLMPAKIPPRKRTKYIYLALAVPPTMEFNKKISKGDTEDLELPVYPVAFNTRPGNNKADRIATRK

SEQ ID NO: 31743 - protein, 85 aa, unidentified
  REGION 1..85: note = Description of Unknown:cds_NC_007409.1_cds_YP_319894.1_63 target sequence
DLLTRLGTYPTVGLYANDYDFTMLIKNLDFKSEFVPGYFPLAVLELHFERDITANPEDYGLKPIDGREWVFDPDGSYKVTSGSLF

SEQ ID NO: 31744 - protein, 85 aa, unidentified
  REGION 1..85: note = Description of Unknown:cds_NC_007409.1_cds_YP_319894.1_63 target sequence
NIAKAEIVDPNSVTINLDKNSKEFNALNGYGVVQFYIDLNNAPWEAYAKAAEECESVGGIYRHDTNEGPSYCTLPLNKEANIKAS

SEQ ID NO: 31745 - protein, 85 aa, unidentified
  REGION 1..85: note = Description of Unknown:cds_NC_007409.1_cds_YP_319894.1_63 target sequence
EFILQLYDMIKSKIASEDFLKREMTFLAPGPKQIEDFLKNEMMYQPPGPKRIPVKPVIGKTFQEMVKVAEQEMAKVAEKRDLILG

SEQ ID NO: 31746 - protein, 84 aa, unidentified
  REGION 1..84: note = Description of Unknown:cds_NC_007409.1_cds_YP_319894.1_63 target sequence
PKRIPVKPVIGKTFQEMVKVAEQEMAKVAEKRDLILGGEEKEPKQKSQEKLFNPFAIDYEMLTEEQQQQNETEEEEKNNTVKLS

SEQ ID NO: 31747 - protein, 85 aa, unidentified
  REGION 1..85: note = Description of Unknown:cds_NC_007409.1_cds_YP_319894.1_63 target sequence
PPRKRTKYIYLALAVPPTMEFNKKISKGDTEDLELPVYPVAFNTRPGNNKADRIATRKDLLTRLGTYPTVGLYANDYDFTMLIKN

SEQ ID NO: 31748 - protein, 85 aa, unidentified
  REGION 1..85: note = Description of Unknown:cds_NC_007409.1_cds_YP_319894.1_63 target sequence
LDFKSEFVPGYFPLAVLELHFERDITANPEDYGLKPIDGREWVFDPDGSYKVTSGSLFNIAKAEIVDPNSVTINLDKNSKEFNAL

SEQ ID NO: 31749 - protein, 85 aa, unidentified
  REGION 1..85: note = Description of Unknown:cds_NC_007409.1_cds_YP_319894.1_63 target sequence
NGYGVVQFYIDLNNAPWEAYAKAAEECESVGGIYRHDTNEGPSYCTLPLNKEANIKASEFILQLYDMIKSKIASEDFLKREMTFL

SEQ ID NO: 31750 - protein, 85 aa, unidentified
  REGION 1..85: note = Description of Unknown:cds_NC_007409.1_cds_YP_319894.1_63 target sequence
APGPKQIEDFLKNEMMYQPPGPKRIPVKPVIGKTFQEMVKVAEQEMAKVAEKRDLILGGEEKEPKQKSQEKLFNPFAIDYEMLTE

SEQ ID NO: 31751 - protein, 85 aa, unidentified
  REGION 1..85: note = Description of Unknown:cds_NZ_WFIY01000004.1_cds_WP_155862435.1_180 target sequence
SEFISKVDIEARKRAAEILKKKFLTLLDQINKGEPLVLEIPKRTLNNTVYDENRKLLLLGEEKLKRSFLDLNEARRFMQTTLMAS

SEQ ID NO: 31752 - protein, 85 aa, unidentified
  REGION 1..85: note = Description of Unknown:cds_NZ_WFIY01000004.1_cds_WP_155862435.1_180 target sequence
IIYDALVNNEYPTIRDLYYRGKHSIVLKAPNGKTYEENTWDEQKESDSVIVDIEVFTSLLREDMLILSKEKGKVVGDMRIRSGND

SEQ ID NO: 31753 - protein, 85 aa, unidentified
  REGION 1..85: note = Description of Unknown:cds_NZ_WFIY01000004.1_cds_WP_155862435.1_180 target sequence
VIDLSKMGHGAYSIEPTPDLIDFVDVKADFVLVVEKDAVFQQLHREGFWKKYNAILVTSAGQPDRATRRFVRRLNEELKLPVYIL

SEQ ID NO: 31754 - protein, 85 aa, unidentified
  REGION 1..85: note = Description of Unknown:cds_NZ_WFIY01000004.1_cds_WP_155862435.1_180 target sequence
TDADPYGWYIYSVFRIGSINLSYESERLATPNARFLGVSMGDIFGTPKKKAYLTEKERNAFIIKAKDYDIKRALEIKNYEWFKTK

SEQ ID NO: 31755 - protein, 84 aa, unidentified
  REGION 1..84: note = Description of Unknown:cds_NZ_WFIY01000004.1_cds_WP_155862435.1_180 target sequence
PKKKAYLTEKERNAFIIKAKDYDIKRALEIKNYEWFKTKAWQEEIDMFLQKKAKLEIEAMASKGLKFLAFQYIPEKIQTNDFIS

SEQ ID NO: 31756 - protein, 85 aa, unidentified
  REGION 1..85: note = Description of Unknown:cds_NZ_WFIY01000004.1_cds_WP_155862435.1_180 target sequence
DQINKGEPLVLEIPKRTLNNTVYDENRKLLLLGEEKLKRSFLDLNEARRFMQTTLMASIIYDALVNNEYPTIRDLYYRGKHSIVL

SEQ ID NO: 31757 - protein, 85 aa, unidentified
  REGION 1..85: note = Description of Unknown:cds_NZ_WFIY01000004.1_cds_WP_155862435.1_180 target sequence
KAPNGKTYEENTWDEQKESDSVIVDIEVFTSLLREDMLILSKEKGKVVGDMRIRSGNDVIDLSKMGHGAYSIEPTPDLIDFVDVK

SEQ ID NO: 31758 - protein, 85 aa, unidentified
  REGION 1..85: note = Description of Unknown:cds_NZ_WFIY01000004.1_cds_WP_155862435.1_180 target sequence
ADFVLVVEKDAVFQQLHREGFWKKYNAILVTSAGQPDRATRRFVRRLNEELKLPVYILTDADPYGWYIYSVFRIGSINLSYESER

SEQ ID NO: 31759 - protein, 85 aa, unidentified
  REGION 1..85: note = Description of Unknown:cds_NZ_WFIY01000004.1_cds_WP_155862435.1_180 target sequence
LATPNARFLGVSMGDIFGTPKKKAYLTEKERNAFIIKAKDYDIKRALEIKNYEWFKTKAWQEEIDMFLQKKAKLEIEAMASKGLK

SEQ ID NO: 31760 - protein, 85 aa, unidentified
  REGION 1..85: note = Description of Unknown:cds_NZ_WFIY01000004.1_cds_WP_155862548.1_317 target sequence
KFYTATEEEILSGKITDIYFDRTIKTLEHLGINNVEVRMEFHSYGLPKGYSWAVFTGLEEALKLLEGKPVTVYAMPEGTLFKEIE

SEQ ID NO: 31761 - protein, 85 aa, unidentified
  REGION 1..85: note = Description of Unknown:cds_NZ_WFIY01000004.1_cds_WP_155862548.1_317 target sequence
PVMIIEGNYLDFGVYETALLGILRHESSIATKAARIKKLAQDKTVLFFGLRALHPAIAPMADRAAYIGGSDGISGAFDKEIFDIE

SEQ ID NO: 31762 - protein, 85 aa, unidentified
  REGION 1..85: note = Description of Unknown:cds_NZ_WFIY01000004.1_cds_WP_155862548.1_317 target sequence
PSGTMPHALMLSVGDNEKAWKAFDEAMDEKVPRIALVDTFEDERTEALKAAKLLGKRLAGVRLDTPSSRRGNFRKIVQEVRWTLN

SEQ ID NO: 31763 - protein, 85 aa, unidentified
  REGION 1..85: note = Description of Unknown:cds_NZ_WFIY01000004.1_cds_WP_155862548.1_317 target sequence
INGFSHVKIFVSGGIDEDDVVELRDYVDGFGVGTSISMPPSIDLSADIVEKKIDGKWVPYTKRGKWPGAKQVYRCSGFNDVITLL

SEQ ID NO: 31764 - protein, 84 aa, unidentified
  REGION 1..84: note = Description of Unknown:cds_NZ_WFIY01000004.1_cds_WP_155862548.1_317 target sequence
DIVEKKIDGKWVPYTKRGKWPGAKQVYRCSGFNDVITLLEDKPIEGCKPLLVKYMENGKIIRDLPSLKEIRNYVLGQLKEVQTL

SEQ ID NO: 31765 - protein, 85 aa, unidentified
  REGION 1..85: note = Description of Unknown:cds_NZ_WFIY01000004.1_cds_WP_155862548.1_317 target sequence
EHLGINNVEVRMEFHSYGLPKGYSWAVFTGLEEALKLLEGKPVTVYAMPEGTLFKEIEPVMIIEGNYLDFGVYETALLGILRHES

SEQ ID NO: 31766 - protein, 85 aa, unidentified
  REGION 1..85: note = Description of Unknown:cds_NZ_WFIY01000004.1_cds_WP_155862548.1_317 target sequence
SIATKAARIKKLAQDKTVLFFGLRALHPAIAPMADRAAYIGGSDGISGAFDKEIFDIEPSGTMPHALMLSVGDNEKAWKAFDEAM

SEQ ID NO: 31767 - protein, 85 aa, unidentified
  REGION 1..85: note = Description of Unknown:cds_NZ_WFIY01000004.1_cds_WP_155862548.1_317 target sequence
DEKVPRIALVDTFEDERTEALKAAKLLGKRLAGVRLDTPSSRRGNFRKIVQEVRWTLNINGFSHVKIFVSGGIDEDDVVELRDYV

SEQ ID NO: 31768 - protein, 85 aa, unidentified
  REGION 1..85: note = Description of Unknown:cds_NZ_WFIY01000004.1_cds_WP_155862548.1_317 target sequence
DGFGVGTSISMPPSIDLSADIVEKKIDGKWVPYTKRGKWPGAKQVYRCSGFNDVITLLEDKPIEGCKPLLVKYMENGKIIRDLPS

SEQ ID NO: 31769 - protein, 85 aa, unidentified
  REGION 1..85: note = Description of Unknown:cds_NZ_WFIY01000004.1_cds_WP_155863251.1_1200 target sequence
DFEFSDEEKIFQENLRDYFSKSLRPRIREIDEKGIPKDFILDASRIGLWSLTFSEDVGGQHASFTLASIAAEEIARADFTMATAV

SEQ ID NO: 31770 - protein, 85 aa, unidentified
  REGION 1..85: note = Description of Unknown:cds_NZ_WFIY01000004.1_cds_WP_155863251.1_1200 target sequence
FFLLENSWGYILDKYGSEELRKEVLPKVASGENFLGIASTEPSGGSDVANLKTSAKKEGEKYVINGEKAYISGVMEAKEMGGGHL

SEQ ID NO: 31771 - protein, 85 aa, unidentified
  REGION 1..85: note = Description of Unknown:cds_NZ_WFIY01000004.1_cds_WP_155863251.1_1200 target sequence
TLVRTGGKGHKGISMLYVPINSEGITVSKIENMGRMGISTGIIKYDNVRIDEKFLVGEENKGFYYAMDGFNHARVLVASACIGSA

SEQ ID NO: 31772 - protein, 85 aa, unidentified
  REGION 1..85: note = Description of Unknown:cds_NZ_WFIY01000004.1_cds_WP_155863251.1_1200 target sequence
EAILEEGLKYIKEREAFGVKLKDLQSIAFEAAELYTKLEIARLLVYKSAWLLDHEEKFKDEIPKFSAMAKLIAPQTAFEVIKSVM

SEQ ID NO: 31773 - protein, 84 aa, unidentified
  REGION 1..84: note = Description of Unknown:cds_NZ_WFIY01000004.1_cds_WP_155863251.1_1200 target sequence
KSAWLLDHEEKFKDEIPKFSAMAKLIAPQTAFEVIKSVMIWFGAYGYTKDALIESGMRGLMSYLVGAEGALNIMKLIISREILK

SEQ ID NO: 31774 - protein, 85 aa, unidentified
  REGION 1..85: note = Description of Unknown:cds_NZ_WFIY01000004.1_cds_WP_155863251.1_1200 target sequence
REIDEKGIPKDFILDASRIGLWSLTFSEDVGGQHASFTLASIAAEEIARADFTMATAVFFLLENSWGYILDKYGSEELRKEVLPK

SEQ ID NO: 31775 - protein, 85 aa, unidentified
  REGION 1..85: note = Description of Unknown:cds_NZ_WFIY01000004.1_cds_WP_155863251.1_1200 target sequence
VASGENFLGIASTEPSGGSDVANLKTSAKKEGEKYVINGEKAYISGVMEAKEMGGGHLTLVRTGGKGHKGISMLYVPINSEGITV

SEQ ID NO: 31776 - protein, 85 aa, unidentified
  REGION 1..85: note = Description of Unknown:cds_NZ_WFIY01000004.1_cds_WP_155863251.1_1200 target sequence
SKIENMGRMGISTGIIKYDNVRIDEKFLVGEENKGFYYAMDGFNHARVLVASACIGSAEAILEEGLKYIKEREAFGVKLKDLQSI

SEQ ID NO: 31777 - protein, 85 aa, unidentified
  REGION 1..85: note = Description of Unknown:cds_NZ_WFIY01000004.1_cds_WP_155863251.1_1200 target sequence
AFEAAELYTKLEIARLLVYKSAWLLDHEEKFKDEIPKFSAMAKLIAPQTAFEVIKSVMIWFGAYGYTKDALIESGMRGLMSYLVG

SEQ ID NO: 31778 - protein, 85 aa, unidentified
  REGION 1..85: note = Description of Unknown:cds_NZ_WFIY01000004.1_cds_WP_155863474.1_1432 target sequence
NPLDLEAISLRINIENNVVVSAQSSGNKLRGYEKAFINKKVREVQDIIPRVLATCSQSHVSAFARAISIINHNSEILSRIAVSLE

SEQ ID NO: 31779 - protein, 85 aa, unidentified
  REGION 1..85: note = Description of Unknown:cds_NZ_WFIY01000004.1_cds_WP_155863474.1_1432 target sequence
IIESHIKHPYVYWFPYIGDRNYDFPTGERFKRIIPFSKKVKEIMEKIGGKWPSTNYLNKGFKVKLSKDDIEFLRKVVEEEVIGMK

SEQ ID NO: 31780 - protein, 85 aa, unidentified
  REGION 1..85: note = Description of Unknown:cds_NZ_WFIY01000004.1_cds_WP_155863474.1_1432 target sequence
IEEFLSINNIDELKGDLALLKKVPYWTAGIGKYLVVGFPFSATIDLSKLKDTGLDVTYNGDHVEVGPLAQALTFDGMVKSLHNKY

SEQ ID NO: 31781 - protein, 85 aa, unidentified
  REGION 1..85: note = Description of Unknown:cds_NZ_WFIY01000004.1_cds_WP_155863474.1_1432 target sequence
GPSPLLREISRIKVACKLLSELTDFDGETDGYEILGSGIGTIESIRGSLLHKVSIKDDKVNDYAIIQPTSFNASPGGALEYAVKG

SEQ ID NO: 31782 - protein, 84 aa, unidentified
  REGION 1..84: note = Description of Unknown:cds_NZ_WFIY01000004.1_cds_WP_155863474.1_1432 target sequence
GSLLHKVSIKDDKVNDYAIIQPTSFNASPGGALEYAVKGIPVKDPKNPWEISLAVSSLDSCFVTEVSIYEGSKLISKKRIGGFC

SEQ ID NO: 31783 - protein, 85 aa, unidentified
  REGION 1..85: note = Description of Unknown:cds_NZ_WFIY01000004.1_cds_WP_155863474.1_1432 target sequence
KLRGYEKAFINKKVREVQDIIPRVLATCSQSHVSAFARAISIINHNSEILSRIAVSLEIIESHIKHPYVYWFPYIGDRNYDFPTG

SEQ ID NO: 31784 - protein, 85 aa, unidentified
  REGION 1..85: note = Description of Unknown:cds_NZ_WFIY01000004.1_cds_WP_155863474.1_1432 target sequence
ERFKRIIPFSKKVKEIMEKIGGKWPSTNYLNKGFKVKLSKDDIEFLRKVVEEEVIGMKIEEFLSINNIDELKGDLALLKKVPYWT

SEQ ID NO: 31785 - protein, 85 aa, unidentified
  REGION 1..85: note = Description of Unknown:cds_NZ_WFIY01000004.1_cds_WP_155863474.1_1432 target sequence
AGIGKYLVVGFPFSATIDLSKLKDTGLDVTYNGDHVEVGPLAQALTFDGMVKSLHNKYGPSPLLREISRIKVACKLLSELTDFDG

SEQ ID NO: 31786 - protein, 85 aa, unidentified
  REGION 1..85: note = Description of Unknown:cds_NZ_WFIY01000004.1_cds_WP_155863474.1_1432 target sequence
ETDGYEILGSGIGTIESIRGSLLHKVSIKDDKVNDYAIIQPTSFNASPGGALEYAVKGIPVKDPKNPWEISLAVSSLDSCFVTEV

SEQ ID NO: 31787 - protein, 85 aa, unidentified
  REGION 1..85: note = Description of Unknown:cds_NZ_WFIY01000004.1_cds_1652 target sequence
NVIRETLKGGKGEVIKNPKVFIDPISVFTEIPYREDIIKETAISIRYFVKNDVRFSNLFLGLTGTGKTFVVRYILNEIEEVKKED

SEQ ID NO: 31788 - protein, 85 aa, unidentified
  REGION 1..85: note = Description of Unknown:cds_NZ_WFIY01000004.1_cds_1652 target sequence
EDYRNVIQAYVNCREVGGTPQAVLSVLAEKLTNDIVPKHGINLGEYIEKIKNAVEGKKAIVYLDEVDTLVKRRDGDIVLYQLLRA

SEQ ID NO: 31789 - protein, 85 aa, unidentified
  REGION 1..85: note = Description of Unknown:cds_NZ_WFIY01000004.1_cds_1652 target sequence
DAEISVIMISNDINVRDYMEPRVLSSLGPSVIFKPYDAEQLKEILSKYAEYGLFRGTYNDEILAYIAAISAKEHGDARKAVNLLF

SEQ ID NO: 31790 - protein, 85 aa, unidentified
  REGION 1..85: note = Description of Unknown:cds_NZ_WFIY01000004.1_cds_1652 target sequence
RAAQLASGEGIIRKEHVDRAIVEYEQERLVEAIKSLPFHYKLALRASLDSEDVVTAHKIYVDLCNKLKQRPLSYRRFSDIISELD

SEQ ID NO: 31791 - protein, 84 aa, unidentified
  REGION 1..84: note = Description of Unknown:cds_NZ_WFIY01000004.1_cds_1652 target sequence
LDSEDVVTAHKIYVDLCNKLKQRPLSYRRFSDIISELDMFGIIKIKILNKGRAGGIRKYIEVPDREKIMKALDENLAEEIGYEY

SEQ ID NO: 31792 - protein, 85 aa, unidentified
  REGION 1..85: note = Description of Unknown:cds_NZ_WFIY01000004.1_cds_1652 target sequence
FTEIPYREDIIKETAISIRYFVKNDVRFSNLFLGLTGTGKTFVVRYILNEIEEVKKEDEDYRNVIQAYVNCREVGGTPQAVLSVL

SEQ ID NO: 31793 - protein, 85 aa, unidentified
  REGION 1..85: note = Description of Unknown:cds_NZ_WFIY01000004.1_cds_1652 target sequence
AEKLTNDIVPKHGINLGEYIEKIKNAVEGKKAIVYLDEVDTLVKRRDGDIVLYQLLRADAEISVIMISNDINVRDYMEPRVLSSL

SEQ ID NO: 31794 - protein, 85 aa, unidentified
  REGION 1..85: note = Description of Unknown:cds_NZ_WFIY01000004.1_cds_1652 target sequence
GPSVIFKPYDAEQLKEILSKYAEYGLFRGTYNDEILAYIAAISAKEHGDARKAVNLLFRAAQLASGEGIIRKEHVDRAIVEYEQE

SEQ ID NO: 31795 - protein, 85 aa, unidentified
  REGION 1..85: note = Description of Unknown:cds_NZ_WFIY01000004.1_cds_1652 target sequence
RLVEAIKSLPFHYKLALRASLDSEDVVTAHKIYVDLCNKLKQRPLSYRRFSDIISELDMFGIIKIKILNKGRAGGIRKYIEVPDR

SEQ ID NO: 31796 - protein, 85 aa, unidentified
  REGION 1..85: note = Description of Unknown:cds_NZ_WFIY01000004.1_cds_WP_155864091.1_2036 target sequence
ITVQKNVTAMVGNHAVAYAVKQAKPQVLAVFPITPQTTMLEKLAEYIDNGELKAELIKVEGEHSALAAVYGAAVAGARVFTATSS

SEQ ID NO: 31797 - protein, 85 aa, unidentified
  REGION 1..85: note = Description of Unknown:cds_NZ_WFIY01000004.1_cds_WP_155864091.1_2036 target sequence
QGLLYMTEMIYWIGGERVPIVNAVATRALAEPWSIWDDHQDFFSKRDASWIMMMAENVQDAYDMTLQAFKISEDKRVILPVMMGF

SEQ ID NO: 31798 - protein, 85 aa, unidentified
  REGION 1..85: note = Description of Unknown:cds_NZ_WFIY01000004.1_cds_WP_155864091.1_2036 target sequence
DGFILTHTMERLEILDDETVEKFLPPREFNLIDFNDPVNVGPIALPDDYMKIKYEAMKAMEGSKEVIEEISKEYERISGRKQYGL

SEQ ID NO: 31799 - protein, 85 aa, unidentified
  REGION 1..85: note = Description of Unknown:cds_NZ_WFIY01000004.1_cds_WP_155864091.1_2036 target sequence
VECYECEDADYVFITVGAWTGDAREAVRRLRNEGKKVGLLKLRVIRPFPKERIKEALKGVQGVIVFDREYSYGYGGILANEVKSA

SEQ ID NO: 31800 - protein, 84 aa, unidentified
  REGION 1..84: note = Description of Unknown:cds_NZ_WFIY01000004.1_cds_WP_155864091.1_2036 target sequence
PFPKERIKEALKGVQGVIVFDREYSYGYGGILANEVKSAIYNSGIEVMSVIAGIGGKDVRPLHFQKVMEDVLAGRKFEERWLND

SEQ ID NO: 31801 - protein, 85 aa, unidentified
  REGION 1..85: note = Description of Unknown:cds_NZ_WFIY01000004.1_cds_WP_155864091.1_2036 target sequence
LAVFPITPQTTMLEKLAEYIDNGELKAELIKVEGEHSALAAVYGAAVAGARVFTATSSQGLLYMTEMIYWIGGERVPIVNAVATR

SEQ ID NO: 31802 - protein, 85 aa, unidentified
  REGION 1..85: note = Description of Unknown:cds_NZ_WFIY01000004.1_cds_WP_155864091.1_2036 target sequence
ALAEPWSIWDDHQDFFSKRDASWIMMMAENVQDAYDMTLQAFKISEDKRVILPVMMGFDGFILTHTMERLEILDDETVEKFLPPR

SEQ ID NO: 31803 - protein, 85 aa, unidentified
  REGION 1..85: note = Description of Unknown:cds_NZ_WFIY01000004.1_cds_WP_155864091.1_2036 target sequence
EFNLIDFNDPVNVGPIALPDDYMKIKYEAMKAMEGSKEVIEEISKEYERISGRKQYGLVECYECEDADYVFITVGAWTGDAREAV

SEQ ID NO: 31804 - protein, 85 aa, unidentified
  REGION 1..85: note = Description of Unknown:cds_NZ_WFIY01000004.1_cds_WP_155864091.1_2036 target sequence
RRLRNEGKKVGLLKLRVIRPFPKERIKEALKGVQGVIVFDREYSYGYGGILANEVKSAIYNSGIEVMSVIAGIGGKDVRPLHFQK

SEQ ID NO: 31805 - protein, 85 aa, unidentified
  REGION 1..85: note = Description of Unknown:cds_NZ_WFIY01000004.1_cds_WP_205737154.1_2312 target sequence
KISFVLIFTSIAGGVRYIFEVANGLKDRGYDVKILSLYGDHSWFKNLKVEVIYKEPMKNKLNYTLYNLYKIYNLIKRRKASTKIN

SEQ ID NO: 31806 - protein, 85 aa, unidentified
  REGION 1..85: note = Description of Unknown:cds_NZ_WFIY01000004.1_cds_WP_205737154.1_2312 target sequence
DSLLLFSSLLGVKPDIITELAEFIQNFDSDITIATYYLTAFSVWFSQKPRPFYLMQDFPELVENNEGKIGLNMFKLSLKLPFSFV

SEQ ID NO: 31807 - protein, 85 aa, unidentified
  REGION 1..85: note = Description of Unknown:cds_NZ_WFIY01000004.1_cds_WP_205737154.1_2312 target sequence
TVSSYAKQLILDNNPTARVTIAHPGVNLEVFRPRREILDDNKKRVMIILRGQKQKGDDIALEVLKTVSKKIPVHAIIVGGKGLVK

SEQ ID NO: 31808 - protein, 85 aa, unidentified
  REGION 1..85: note = Description of Unknown:cds_NZ_WFIY01000004.1_cds_WP_205737154.1_2312 target sequence
KYAKTIGIDFPHTVFSYLDDETLSKLYSSADAFLHTSYVESFGLPPLEAMACGTPVVMTDNKGSRDYAVHGYNALVSQPGDVKSL

SEQ ID NO: 31809 - protein, 84 aa, unidentified
  REGION 1..84: note = Description of Unknown:cds_NZ_WFIY01000004.1_cds_WP_205737154.1_2312 target sequence
LEAMACGTPVVMTDNKGSRDYAVHGYNALVSQPGDVKSLAENLIKVLQDDKLRERLIENGLETAKRFTWSSTVDKFEKALKEES

SEQ ID NO: 31810 - protein, 85 aa, unidentified
  REGION 1..85: note = Description of Unknown:cds_NZ_WFIY01000004.1_cds_WP_205737154.1_2312 target sequence
RGYDVKILSLYGDHSWFKNLKVEVIYKEPMKNKLNYTLYNLYKIYNLIKRRKASTKINDSLLLFSSLLGVKPDIITELAEFIQNF

SEQ ID NO: 31811 - protein, 85 aa, unidentified
  REGION 1..85: note = Description of Unknown:cds_NZ_WFIY01000004.1_cds_WP_205737154.1_2312 target sequence
DSDITIATYYLTAFSVWFSQKPRPFYLMQDFPELVENNEGKIGLNMFKLSLKLPFSFVTVSSYAKQLILDNNPTARVTIAHPGVN

SEQ ID NO: 31812 - protein, 85 aa, unidentified
  REGION 1..85: note = Description of Unknown:cds_NZ_WFIY01000004.1_cds_WP_205737154.1_2312 target sequence
LEVFRPRREILDDNKKRVMIILRGQKQKGDDIALEVLKTVSKKIPVHAIIVGGKGLVKKYAKTIGIDFPHTVFSYLDDETLSKLY

SEQ ID NO: 31813 - protein, 85 aa, unidentified
  REGION 1..85: note = Description of Unknown:cds_NZ_WFIY01000004.1_cds_WP_205737154.1_2312 target sequence
SSADAFLHTSYVESFGLPPLEAMACGTPVVMTDNKGSRDYAVHGYNALVSQPGDVKSLAENLIKVLQDDKLRERLIENGLETAKR

SEQ ID NO: 31814 - protein, 85 aa, unidentified
  REGION 1..85: note = Description of Unknown:cds_NC_035460.1_cds_YP_009408071.1_120 target sequence
NELFNFLHEIENNYIRTLFNFHLIKFDEVKCDIYLCMKECISNKNIFDKIVTSSNVKKEIKKLVYCDINLTKHIINKNAYPNYLS

SEQ ID NO: 31815 - protein, 85 aa, unidentified
  REGION 1..85: note = Description of Unknown:cds_NC_035460.1_cds_YP_009408071.1_120 target sequence
FNHTQLKCSQFFDINVEENDTSLRTLEIFEHDKSSIFSYIKTTNKKRKIDYGEIKKTVHSSSKHLCNYFSGKKSDDFLSTVIRAN

SEQ ID NO: 31816 - protein, 85 aa, unidentified
  REGION 1..85: note = Description of Unknown:cds_NC_035460.1_cds_YP_009408071.1_120 target sequence
VSQPWIKTISKRMRVDICNDSIITRGKSSILQTMEIVFTNRTCVKIFKDSTMHFILSKDKTENGCIDLINKLFLIYNIMFTFMFD

SEQ ID NO: 31817 - protein, 85 aa, unidentified
  REGION 1..85: note = Description of Unknown:cds_NC_035460.1_cds_YP_009408071.1_120 target sequence
ITQNEVFKTVANISKNILDLDLFEDKLNFISKNNNIYGIKNFKIGMFNLTYKHNIDHSVFPSLLDEDSKIKFFKGKKLNMVALKS

SEQ ID NO: 31818 - protein, 84 aa, unidentified
  REGION 1..84: note = Description of Unknown:cds_NC_035460.1_cds_YP_009408071.1_120 target sequence
FNLTYKHNIDHSVFPSLLDEDSKIKFFKGKKLNMVALKSLNDCKKNVEKAEHIMKIMKDRSAILNKIKIESESVEVLKELISLK

SEQ ID NO: 31819 - protein, 85 aa, unidentified
  REGION 1..85: note = Description of Unknown:cds_NC_035460.1_cds_YP_009408071.1_120 target sequence
EVKCDIYLCMKECISNKNIFDKIVTSSNVKKEIKKLVYCDINLTKHIINKNAYPNYLSFNHTQLKCSQFFDINVEENDTSLRTLE

SEQ ID NO: 31820 - protein, 85 aa, unidentified
  REGION 1..85: note = Description of Unknown:cds_NC_035460.1_cds_YP_009408071.1_120 target sequence
IFEHDKSSIFSYIKTTNKKRKIDYGEIKKTVHSSSKHLCNYFSGKKSDDFLSTVIRANVSQPWIKTISKRMRVDICNDSIITRGK

SEQ ID NO: 31821 - protein, 85 aa, unidentified
  REGION 1..85: note = Description of Unknown:cds_NC_035460.1_cds_YP_009408071.1_120 target sequence
SSILQTMEIVFTNRTCVKIFKDSTMHFILSKDKTENGCIDLINKLFLIYNIMFTFMFDITQNEVFKTVANISKNILDLDLFEDKL

SEQ ID NO: 31822 - protein, 85 aa, unidentified
  REGION 1..85: note = Description of Unknown:cds_NC_035460.1_cds_YP_009408071.1_120 target sequence
NFISKNNNIYGIKNFKIGMFNLTYKHNIDHSVFPSLLDEDSKIKFFKGKKLNMVALKSLNDCKKNVEKAEHIMKIMKDRSAILNK

SEQ ID NO: 31823 - protein, 85 aa, unidentified
  REGION 1..85: note = Description of Unknown:cds_NC_030656.1_cds_YP_009268736.1_21 target sequence
WPFSSVPDGANCIVVETIPKTLDLQSTNITTLECFEELIAKATKTIHIVTFCCNLRSTKDGENILSKLCDAARRGVKVVILVDYQ

SEQ ID NO: 31824 - protein, 85 aa, unidentified
  REGION 1..85: note = Description of Unknown:cds_NC_030656.1_cds_YP_009268736.1_21 target sequence
SRDTDKEILENSGVEYFKVKINNTGMSNMLGNFWTSDKERLYVGSASLTGGSLTTIKNLGLYSTCSVLAKDLENRFDTFKKLIDK

SEQ ID NO: 31825 - protein, 85 aa, unidentified
  REGION 1..85: note = Description of Unknown:cds_NC_030656.1_cds_YP_009268736.1_21 target sequence
KSSIFRKICCTPCMANTVCGVPLATDFHLDYSAGGVFFSDSPDTLLGCFRTLDYDVVIERISKAQDSIDLSLMSFVPIVKSDEVI

SEQ ID NO: 31826 - protein, 85 aa, unidentified
  REGION 1..85: note = Description of Unknown:cds_NC_030656.1_cds_YP_009268736.1_21 target sequence
VFWPNLLNALLEAAINRSVKIRVLVSHLKNNNPFSLAAISTLNAFSTENADISVRYFSNKDSDTVNNTKLLVVDSKFAHLTVANF

SEQ ID NO: 31827 - protein, 84 aa, unidentified
  REGION 1..84: note = Description of Unknown:cds_NC_030656.1_cds_YP_009268736.1_21 target sequence
TENADISVRYFSNKDSDTVNNTKLLVVDSKFAHLTVANFDGTHYKHHSFVSANAESLVLVKKLSEVFNRDWESKYSVPVAKNIN

SEQ ID NO: 31828 - protein, 85 aa, unidentified
  REGION 1..85: note = Description of Unknown:cds_NC_030656.1_cds_YP_009268736.1_21 target sequence
NITTLECFEELIAKATKTIHIVTFCCNLRSTKDGENILSKLCDAARRGVKVVILVDYQSRDTDKEILENSGVEYFKVKINNTGMS

SEQ ID NO: 31829 - protein, 85 aa, unidentified
  REGION 1..85: note = Description of Unknown:cds_NC_030656.1_cds_YP_009268736.1_21 target sequence
NMLGNFWTSDKERLYVGSASLTGGSLTTIKNLGLYSTCSVLAKDLENRFDTFKKLIDKKSSIFRKICCTPCMANTVCGVPLATDF

SEQ ID NO: 31830 - protein, 85 aa, unidentified
  REGION 1..85: note = Description of Unknown:cds_NC_030656.1_cds_YP_009268736.1_21 target sequence
HLDYSAGGVFFSDSPDTLLGCFRTLDYDVVIERISKAQDSIDLSLMSFVPIVKSDEVIVFWPNLLNALLEAAINRSVKIRVLVSH

SEQ ID NO: 31831 - protein, 85 aa, unidentified
  REGION 1..85: note = Description of Unknown:cds_NC_030656.1_cds_YP_009268736.1_21 target sequence
LKNNNPFSLAAISTLNAFSTENADISVRYFSNKDSDTVNNTKLLVVDSKFAHLTVANFDGTHYKHHSFVSANAESLVLVKKLSEV

SEQ ID NO: 31832 - protein, 85 aa, unidentified
  REGION 1..85: note = Description of Unknown:cds_NC_024711.1_cds_YP_009052550.1_73 target sequence
DFNKVNEANKAGENTPAASNINTDKQVIPPVEDGVDKQPANTVGFRDESLDEPYTEKRTITINLVTNYSLYRRVNDKTLPKRMDK

SEQ ID NO: 31833 - protein, 85 aa, unidentified
  REGION 1..85: note = Description of Unknown:cds_NC_024711.1_cds_YP_009052550.1_73 target sequence
IGSCVRSSRTLSSNKGEIESYFPALIGLAPNNENFISRVKAYLNNISVSVDELGKTFDISFFWNRKRDYLRFRAEEEAIETAYMN

SEQ ID NO: 31834 - protein, 85 aa, unidentified
  REGION 1..85: note = Description of Unknown:cds_NC_024711.1_cds_YP_009052550.1_73 target sequence
SDRKGVKELREALEAKITKLNLLESEKYKYGYPIVLDDYLIYRHCLLYKDVAKDIALINSDPSIRFYFKDDQREAERLAKHRQEI

SEQ ID NO: 31835 - protein, 85 aa, unidentified
  REGION 1..85: note = Description of Unknown:cds_NC_024711.1_cds_YP_009052550.1_73 target sequence
NSAKGNYVKLLTNSDLFDAVFIQYCVANNINIPNGMAMDTVDKQSHLDKFSTNEPAKFNKLCNDKDITIKSLIEVLISRGEFIRA

SEQ ID NO: 31836 - protein, 84 aa, unidentified
  REGION 1..84: note = Description of Unknown:cds_NC_024711.1_cds_YP_009052550.1_73 target sequence
HLDKFSTNEPAKFNKLCNDKDITIKSLIEVLISRGEFIRAIHNQNITTPDGEFIGANVKEAVTWFKNPTNSALVSAYKNKLKNI

SEQ ID NO: 31837 - protein, 85 aa, unidentified
  REGION 1..85: note = Description of Unknown:cds_NC_024711.1_cds_YP_009052550.1_73 target sequence
IPPVEDGVDKQPANTVGFRDESLDEPYTEKRTITINLVTNYSLYRRVNDKTLPKRMDKIGSCVRSSRTLSSNKGEIESYFPALIG

SEQ ID NO: 31838 - protein, 85 aa, unidentified
  REGION 1..85: note = Description of Unknown:cds_NC_024711.1_cds_YP_009052550.1_73 target sequence
LAPNNENFISRVKAYLNNISVSVDELGKTFDISFFWNRKRDYLRFRAEEEAIETAYMNSDRKGVKELREALEAKITKLNLLESEK

SEQ ID NO: 31839 - protein, 85 aa, unidentified
  REGION 1..85: note = Description of Unknown:cds_NC_024711.1_cds_YP_009052550.1_73 target sequence
YKYGYPIVLDDYLIYRHCLLYKDVAKDIALINSDPSIRFYFKDDQREAERLAKHRQEINSAKGNYVKLLTNSDLFDAVFIQYCVA

SEQ ID NO: 31840 - protein, 85 aa, unidentified
  REGION 1..85: note = Description of Unknown:cds_NC_024711.1_cds_YP_009052550.1_73 target sequence
NNINIPNGMAMDTVDKQSHLDKFSTNEPAKFNKLCNDKDITIKSLIEVLISRGEFIRAIHNQNITTPDGEFIGANVKEAVTWFKN

SEQ ID NO: 31841 - protein, 85 aa, unidentified
  REGION 1..85: note = Description of Unknown:cds_NZ_WFIY01000004.1_cds_WP_155862618.1_397 target sequence
ISEKLVSDLKFYDKPLGVFFTADNCKECDELLKKIKELPISKRLMIEEVNGLEYPEYLNRLTRGVIPTLSILSPDLGIMGVIEST

SEQ ID NO: 31842 - protein, 85 aa, unidentified
  REGION 1..85: note = Description of Unknown:cds_NZ_WFIY01000004.1_cds_WP_155862618.1_397 target sequence
DVKEIEARLREIVEAYYKGYKGERLSEFIPEPVEVGKEIIYDVMDALLASYPADFRMIEFYKFISSINKDYSKAEKVIKPLNEIS

SEQ ID NO: 31843 - protein, 85 aa, unidentified
  REGION 1..85: note = Description of Unknown:cds_NZ_WFIY01000004.1_cds_WP_155862618.1_397 target sequence
EFLLGRKKTINANSIYTTEISFYTIYGLRKVEDLLQLIGDDGIVYRSTRKQNKGLLIDEVMAGNALLTQYENTLNDVYLNYARKI

SEQ ID NO: 31844 - protein, 85 aa, unidentified
  REGION 1..85: note = Description of Unknown:cds_NZ_WFIY01000004.1_cds_WP_155862618.1_397 target sequence
YDFIVNNLPHEKGFRDTMPKDELSKITFLEPLANSEAGIFFARYWAITGEEKSADLAKKAINCAFAGSSDPRVLARISIALIKLQ

SEQ ID NO: 31845 - protein, 84 aa, unidentified
  REGION 1..84: note = Description of Unknown:cds_NZ_WFIY01000004.1_cds_WP_155862618.1_397 target sequence
AITGEEKSADLAKKAINCAFAGSSDPRVLARISIALIKLQDLIRTNEKGPYSDLRIEFSKQAQCKYLKDGKCYEKIEEIKFSYF

SEQ ID NO: 31846 - protein, 85 aa, unidentified
  REGION 1..85: note = Description of Unknown:cds_NZ_WFIY01000004.1_cds_WP_155862618.1_397 target sequence
CDELLKKIKELPISKRLMIEEVNGLEYPEYLNRLTRGVIPTLSILSPDLGIMGVIESTDVKEIEARLREIVEAYYKGYKGERLSE

SEQ ID NO: 31847 - protein, 85 aa, unidentified
  REGION 1..85: note = Description of Unknown:cds_NZ_WFIY01000004.1_cds_WP_155862618.1_397 target sequence
FIPEPVEVGKEIIYDVMDALLASYPADFRMIEFYKFISSINKDYSKAEKVIKPLNEISEFLLGRKKTINANSIYTTEISFYTIYG

SEQ ID NO: 31848 - protein, 85 aa, unidentified
  REGION 1..85: note = Description of Unknown:cds_NZ_WFIY01000004.1_cds_WP_155862618.1_397 target sequence
LRKVEDLLQLIGDDGIVYRSTRKQNKGLLIDEVMAGNALLTQYENTLNDVYLNYARKIYDFIVNNLPHEKGFRDTMPKDELSKIT

SEQ ID NO: 31849 - protein, 85 aa, unidentified
  REGION 1..85: note = Description of Unknown:cds_NZ_WFIY01000004.1_cds_WP_155862618.1_397 target sequence
FLEPLANSEAGIFFARYWAITGEEKSADLAKKAINCAFAGSSDPRVLARISIALIKLQDLIRTNEKGPYSDLRIEFSKQAQCKYL

SEQ ID NO: 31850 - protein, 85 aa, unidentified
  REGION 1..85: note = Description of Unknown:cds_NZ_WFIY01000004.1_cds_WP_155862720.1_522 target sequence
RVLILGIDGYLGWALALRLVSKNHEVYGMDNLSTRKAVEEIGSDSAFPLPAPEERVNAVKKYLDADIKFYKGDITDKEKLKEVIK

SEQ ID NO: 31851 - protein, 85 aa, unidentified
  REGION 1..85: note = Description of Unknown:cds_NZ_WFIY01000004.1_cds_WP_155862720.1_522 target sequence
ESKPDVIVDFAEQRSAPYSMKDLDHAIYTINNNLDGTLNLIYLVKEIDPSIHILKMGTMGEYGTPNFDIPESAFIEAIINGKKDK

SEQ ID NO: 31852 - protein, 85 aa, unidentified
  REGION 1..85: note = Description of Unknown:cds_NZ_WFIY01000004.1_cds_WP_155862720.1_522 target sequence
IFTPRWGGSIYHFSKIFDSYLLAYFNQLFGLTITDIMQGPVYGSRIPEIVNESLRTRFDFDEVWGTVVNRFCVEAVLGLPLTPYG

SEQ ID NO: 31853 - protein, 85 aa, unidentified
  REGION 1..85: note = Description of Unknown:cds_NZ_WFIY01000004.1_cds_WP_155862720.1_522 target sequence
KGGQTRGFISLEDSVEALRLLIEHPPKQGEYRVVNQFMEIHSVNEIAQIVKEAGEELGLHVEIKHVENPRVEAEEHYYNPERRIL

SEQ ID NO: 31854 - protein, 84 aa, unidentified
  REGION 1..84: note = Description of Unknown:cds_NZ_WFIY01000004.1_cds_WP_155862720.1_522 target sequence
IAQIVKEAGEELGLHVEIKHVENPRVEAEEHYYNPERRILESLGFTPKRFMREEVKNIIEDLLPYKERLERFKDVIMPKTKWRK

SEQ ID NO: 31855 - protein, 85 aa, unidentified
  REGION 1..85: note = Description of Unknown:cds_NZ_WFIY01000004.1_cds_WP_155862720.1_522 target sequence
GMDNLSTRKAVEEIGSDSAFPLPAPEERVNAVKKYLDADIKFYKGDITDKEKLKEVIKESKPDVIVDFAEQRSAPYSMKDLDHAI

SEQ ID NO: 31856 - protein, 85 aa, unidentified
  REGION 1..85: note = Description of Unknown:cds_NZ_WFIY01000004.1_cds_WP_155862720.1_522 target sequence
YTINNNLDGTLNLIYLVKEIDPSIHILKMGTMGEYGTPNFDIPESAFIEAIINGKKDKIFTPRWGGSIYHFSKIFDSYLLAYFNQ

SEQ ID NO: 31857 - protein, 85 aa, unidentified
  REGION 1..85: note = Description of Unknown:cds_NZ_WFIY01000004.1_cds_WP_155862720.1_522 target sequence
LFGLTITDIMQGPVYGSRIPEIVNESLRTRFDFDEVWGTVVNRFCVEAVLGLPLTPYGKGGQTRGFISLEDSVEALRLLIEHPPK

SEQ ID NO: 31858 - protein, 85 aa, unidentified
  REGION 1..85: note = Description of Unknown:cds_NZ_WFIY01000004.1_cds_WP_155862720.1_522 target sequence
QGEYRVVNQFMEIHSVNEIAQIVKEAGEELGLHVEIKHVENPRVEAEEHYYNPERRILESLGFTPKRFMREEVKNIIEDLLPYKE

SEQ ID NO: 31859 - protein, 85 aa, unidentified
  REGION 1..85: note = Description of Unknown:cds_NZ_WFIY01000004.1_cds_WP_155863935.1_1852 target sequence
GMQVDNKVLELPKKFLEALWSPFVGREEEAKVITLALLSKEHVVLIGEPGTAKSALARRAAELLNAKFFMYLLTKYTEPAELFGA

SEQ ID NO: 31860 - protein, 85 aa, unidentified
  REGION 1..85: note = Description of Unknown:cds_NZ_WFIY01000004.1_cds_WP_155863935.1_1852 target sequence
LDINALKQGVYKRITKDRLPESEIAFLDEIFNANSAILNALLSLLNERVIYDGYNIIKVPLRTLISASNRVPDEPELEALYDRLL

SEQ ID NO: 31861 - protein, 85 aa, unidentified
  REGION 1..85: note = Description of Unknown:cds_NZ_WFIY01000004.1_cds_WP_155863935.1_1852 target sequence
LRHYAKPVGEEMWKNLIESAWELEFTTKWKVESPLMTIEDLDKIYSYLTEVDLSPVKSKLLKLYAMLEEKGIHLSDRRKGKVLKI

SEQ ID NO: 31862 - protein, 85 aa, unidentified
  REGION 1..85: note = Description of Unknown:cds_NZ_WFIY01000004.1_cds_WP_155863935.1_1852 target sequence
ISAHALLNGRLKATEEDLIVLKYIAPKEIDDFEKVSALLSEELKTPIKYMRELNEIYNNIKEAGKYVDAASESDPRLIDLIRSLK

SEQ ID NO: 31863 - protein, 84 aa, unidentified
  REGION 1..84: note = Description of Unknown:cds_NZ_WFIY01000004.1_cds_WP_155863935.1_1852 target sequence
PIKYMRELNEIYNNIKEAGKYVDAASESDPRLIDLIRSLKATRDRVIALGKESGDEKVEEFSKEVSAEIDKLLEKVGRKLGIYT

SEQ ID NO: 31864 - protein, 85 aa, unidentified
  REGION 1..85: note = Description of Unknown:cds_NZ_WFIY01000004.1_cds_WP_155863935.1_1852 target sequence
EEAKVITLALLSKEHVVLIGEPGTAKSALARRAAELLNAKFFMYLLTKYTEPAELFGALDINALKQGVYKRITKDRLPESEIAFL

SEQ ID NO: 31865 - protein, 85 aa, unidentified
  REGION 1..85: note = Description of Unknown:cds_NZ_WFIY01000004.1_cds_WP_155863935.1_1852 target sequence
DEIFNANSAILNALLSLLNERVIYDGYNIIKVPLRTLISASNRVPDEPELEALYDRLLLRHYAKPVGEEMWKNLIESAWELEFTT

SEQ ID NO: 31866 - protein, 85 aa, unidentified
  REGION 1..85: note = Description of Unknown:cds_NZ_WFIY01000004.1_cds_WP_155863935.1_1852 target sequence
KWKVESPLMTIEDLDKIYSYLTEVDLSPVKSKLLKLYAMLEEKGIHLSDRRKGKVLKIISAHALLNGRLKATEEDLIVLKYIAPK

SEQ ID NO: 31867 - protein, 85 aa, unidentified
  REGION 1..85: note = Description of Unknown:cds_NZ_WFIY01000004.1_cds_WP_155863935.1_1852 target sequence
EIDDFEKVSALLSEELKTPIKYMRELNEIYNNIKEAGKYVDAASESDPRLIDLIRSLKATRDRVIALGKESGDEKVEEFSKEVSA

SEQ ID NO: 31868 - protein, 85 aa, unidentified
  REGION 1..85: note = Description of Unknown:cds_NZ_WFIY01000004.1_cds_WP_155864016.1_1945 target sequence
LSWDIAVNRAINNAVPKVYKVLREHPYIEELAKRLREAKLEVLNNLEKYVEETLQSVKNNGGNAYYVHDEKEAQEIVGKIVGKGK

SEQ ID NO: 31869 - protein, 85 aa, unidentified
  REGION 1..85: note = Description of Unknown:cds_NZ_WFIY01000004.1_cds_WP_155864016.1_1945 target sequence
IVVMGKSMVAYELGIRKYLESLGNEVWETDLGEFLIQQANEPPSHIIAPAIHMTKESVGKLLKEKLGGVDENSKVEDMVAVVRKF

SEQ ID NO: 31870 - protein, 85 aa, unidentified
  REGION 1..85: note = Description of Unknown:cds_NZ_WFIY01000004.1_cds_WP_155864016.1_1945 target sequence
LRDKFVKADVGITGANAIAADTGSVLLVENEGNIRFTTVAPQIHIAIAGVEKILPTLADAMIEPLVQSAYAGLYPPTYVNLTSGP

SEQ ID NO: 31871 - protein, 85 aa, unidentified
  REGION 1..85: note = Description of Unknown:cds_NZ_WFIY01000004.1_cds_WP_155864016.1_1945 target sequence
SSTADIEHNRVRPAHGPKEFHLILVDNGRVKANKDNVLREALLCIRCGRCHFHCPIYRAIGNIWGDPPYSGPMGAMWSYIVKGDT

SEQ ID NO: 31872 - protein, 84 aa, unidentified
  REGION 1..84: note = Description of Unknown:cds_NZ_WFIY01000004.1_cds_WP_155864016.1_1945 target sequence
CGRCHFHCPIYRAIGNIWGDPPYSGPMGAMWSYIVKGDTKPAMYCAHSGNCKEVCPMRINIPRVLEHIKNLGLHSQGKDKLDYK

SEQ ID NO: 31873 - protein, 85 aa, unidentified
  REGION 1..85: note = Description of Unknown:cds_NZ_WFIY01000004.1_cds_WP_155864016.1_1945 target sequence
IEELAKRLREAKLEVLNNLEKYVEETLQSVKNNGGNAYYVHDEKEAQEIVGKIVGKGKIVVMGKSMVAYELGIRKYLESLGNEVW

SEQ ID NO: 31874 - protein, 85 aa, unidentified
  REGION 1..85: note = Description of Unknown:cds_NZ_WFIY01000004.1_cds_WP_155864016.1_1945 target sequence
ETDLGEFLIQQANEPPSHIIAPAIHMTKESVGKLLKEKLGGVDENSKVEDMVAVVRKFLRDKFVKADVGITGANAIAADTGSVLL

SEQ ID NO: 31875 - protein, 85 aa, unidentified
  REGION 1..85: note = Description of Unknown:cds_NZ_WFIY01000004.1_cds_WP_155864016.1_1945 target sequence
VENEGNIRFTTVAPQIHIAIAGVEKILPTLADAMIEPLVQSAYAGLYPPTYVNLTSGPSSTADIEHNRVRPAHGPKEFHLILVDN

SEQ ID NO: 31876 - protein, 85 aa, unidentified
  REGION 1..85: note = Description of Unknown:cds_NZ_WFIY01000004.1_cds_WP_155864016.1_1945 target sequence
GRVKANKDNVLREALLCIRCGRCHFHCPIYRAIGNIWGDPPYSGPMGAMWSYIVKGDTKPAMYCAHSGNCKEVCPMRINIPRVLE

SEQ ID NO: 31877 - protein, 85 aa, unidentified
  REGION 1..85: note = Description of Unknown:cds_NZ_WFIY01000004.1_cds_WP_155862409.1_148 target sequence
IQLFIHASNFSYEVKEKAVEKAEEDYLPSLKKENALVVFTTVEKGDDEEIIRKAVDNIKDVFSKVKASCVIIYPYAHLSNNLSSP

SEQ ID NO: 31878 - protein, 85 aa, unidentified
  REGION 1..85: note = Description of Unknown:cds_NZ_WFIY01000004.1_cds_WP_155862409.1_148 target sequence
DVAISSLKEIEKELKDSGIETYRAPFGWYKAFSISCYGHPLSELSRRITKSEEFSKSEELEICSKFGFPSSPKATFMKIATLEYL

SEQ ID NO: 31879 - protein, 85 aa, unidentified
  REGION 1..85: note = Description of Unknown:cds_NZ_WFIY01000004.1_cds_WP_155862409.1_148 target sequence
KKVLSPSSIIISNDELKEKEGTMIIRYLKPSGRILPCINEDPKIEVIYFGEKQLDFPKEFKDSKNSLKIWDSKDGKTTIWVGNLI

SEQ ID NO: 31880 - protein, 85 aa, unidentified
  REGION 1..85: note = Description of Unknown:cds_NZ_WFIY01000004.1_cds_WP_155862409.1_148 target sequence
YYILLQAKSMSTPYLPLWISPIHVRLLPVKKDFLEKTEEFANQLLSKGVRVEIDNKDDGLGNKIRRSGIDWIPYVAIVGEREIKT

SEQ ID NO: 31881 - protein, 84 aa, unidentified
  REGION 1..84: note = Description of Unknown:cds_NZ_WFIY01000004.1_cds_WP_155862409.1_148 target sequence
LSKGVRVEIDNKDDGLGNKIRRSGIDWIPYVAIVGEREIKTSTLTVRIRKKDEQKSLTIDELYALIKDEDPLMLKQNTPVKIFD

SEQ ID NO: 31882 - protein, 85 aa, unidentified
  REGION 1..85: note = Description of Unknown:cds_NZ_WFIY01000004.1_cds_WP_155862409.1_148 target sequence
PSLKKENALVVFTTVEKGDDEEIIRKAVDNIKDVFSKVKASCVIIYPYAHLSNNLSSPDVAISSLKEIEKELKDSGIETYRAPFG

SEQ ID NO: 31883 - protein, 85 aa, unidentified
  REGION 1..85: note = Description of Unknown:cds_NZ_WFIY01000004.1_cds_WP_155862409.1_148 target sequence
WYKAFSISCYGHPLSELSRRITKSEEFSKSEELEICSKFGFPSSPKATFMKIATLEYLKKVLSPSSIIISNDELKEKEGTMIIRY

SEQ ID NO: 31884 - protein, 85 aa, unidentified
  REGION 1..85: note = Description of Unknown:cds_NZ_WFIY01000004.1_cds_WP_155862409.1_148 target sequence
LKPSGRILPCINEDPKIEVIYFGEKQLDFPKEFKDSKNSLKIWDSKDGKTTIWVGNLIYYILLQAKSMSTPYLPLWISPIHVRLL

SEQ ID NO: 31885 - protein, 85 aa, unidentified
  REGION 1..85: note = Description of Unknown:cds_NZ_WFIY01000004.1_cds_WP_155862409.1_148 target sequence
PVKKDFLEKTEEFANQLLSKGVRVEIDNKDDGLGNKIRRSGIDWIPYVAIVGEREIKTSTLTVRIRKKDEQKSLTIDELYALIKD

SEQ ID NO: 31886 - protein, 85 aa, unidentified
  REGION 1..85: note = Description of Unknown:cds_NZ_WFIY01000004.1_cds_WP_155862670.1_466 target sequence
LWIRGKIFFNNEVIDGCVNFDRKIKEIRKDCKPDIDVPQGKIIFPGSIDMHVHVRGMNLSYKENVRTATSEAAYGGVTVIVDMPN

SEQ ID NO: 31887 - protein, 85 aa, unidentified
  REGION 1..85: note = Description of Unknown:cds_NZ_WFIY01000004.1_cds_WP_155862670.1_466 target sequence
TVPYINTAERVQERLREFANFSRTDYGIYSGVTSDERVDKLPIAGYKVFPEDLEKPELQFVLSSKKLKILHPELPLSIKQFRDLR

SEQ ID NO: 31888 - protein, 85 aa, unidentified
  REGION 1..85: note = Description of Unknown:cds_NZ_WFIY01000004.1_cds_WP_155862670.1_466 target sequence
EMWQEIASLNLIYGRFHITHITNYETLIKAKELGFTTDFTPHHLLLDEIRGNCLTKVNPPIRDLTERRKLIKALFEADAVASDHA

SEQ ID NO: 31889 - protein, 85 aa, unidentified
  REGION 1..85: note = Description of Unknown:cds_NZ_WFIY01000004.1_cds_WP_155862670.1_466 target sequence
PHTLQEKMQPYELCPPGIAAVSFTTPFIYSLVKKGILSLTRAVDLVSRNPAKILGINAGEIKEGNVADFTVIDFDKDWRYHTQYS

SEQ ID NO: 31890 - protein, 84 aa, unidentified
  REGION 1..84: note = Description of Unknown:cds_NZ_WFIY01000004.1_cds_WP_155862670.1_466 target sequence
VSRNPAKILGINAGEIKEGNVADFTVIDFDKDWRYHTQYSKVVETPFDEYSLDVSIYMTIIEGKVAYDGYEVYPIRGMNLFENS

SEQ ID NO: 31891 - protein, 85 aa, unidentified
  REGION 1..85: note = Description of Unknown:cds_NZ_WFIY01000004.1_cds_WP_155862670.1_466 target sequence
RKDCKPDIDVPQGKIIFPGSIDMHVHVRGMNLSYKENVRTATSEAAYGGVTVIVDMPNTVPYINTAERVQERLREFANFSRTDYG

SEQ ID NO: 31892 - protein, 85 aa, unidentified
  REGION 1..85: note = Description of Unknown:cds_NZ_WFIY01000004.1_cds_WP_155862670.1_466 target sequence
IYSGVTSDERVDKLPIAGYKVFPEDLEKPELQFVLSSKKLKILHPELPLSIKQFRDLREMWQEIASLNLIYGRFHITHITNYETL

SEQ ID NO: 31893 - protein, 85 aa, unidentified
  REGION 1..85: note = Description of Unknown:cds_NZ_WFIY01000004.1_cds_WP_155862670.1_466 target sequence
IKAKELGFTTDFTPHHLLLDEIRGNCLTKVNPPIRDLTERRKLIKALFEADAVASDHAPHTLQEKMQPYELCPPGIAAVSFTTPF

SEQ ID NO: 31894 - protein, 85 aa, unidentified
  REGION 1..85: note = Description of Unknown:cds_NZ_WFIY01000004.1_cds_WP_155862670.1_466 target sequence
IYSLVKKGILSLTRAVDLVSRNPAKILGINAGEIKEGNVADFTVIDFDKDWRYHTQYSKVVETPFDEYSLDVSIYMTIIEGKVAY

SEQ ID NO: 31895 - protein, 85 aa, unidentified
  REGION 1..85: note = Description of Unknown:cds_NZ_WFIY01000004.1_cds_WP_170283902.1_1054 target sequence
LMLIPLEEARKIIEETEFPKPSVREVDLLDSVGKIVAEDIISIEDIPERDLSAMDGYAIRSEDFGKKLKVVGSLFPSSKEVPKIN

SEQ ID NO: 31896 - protein, 85 aa, unidentified
  REGION 1..85: note = Description of Unknown:cds_NZ_WFIY01000004.1_cds_WP_170283902.1_1054 target sequence
EGEAFYVTTGAPIPEGADAVCRVEATKREGDYVIIGEKVHKGKDIRPKGEDIKKGEKILNKGEKITPYHLGILAYEKIYKIKVLN

SEQ ID NO: 31897 - protein, 85 aa, unidentified
  REGION 1..85: note = Description of Unknown:cds_NZ_WFIY01000004.1_cds_WP_170283902.1_1054 target sequence
ISFAVFANGDELSPFHSNGEKVDSITPILIPLLSSFGNVTYLGVAKDNPDDVEKFIEKASSFDFIISIGGSSVGEKDYVKRVIEK

SEQ ID NO: 31898 - protein, 85 aa, unidentified
  REGION 1..85: note = Description of Unknown:cds_NZ_WFIY01000004.1_cds_WP_170283902.1_1054 target sequence
KGGKLLFEGVSVNVLKRGSVGLINGKPILILPGQVVSAITVFHEHGLHIISRMIGKEIRKFEEIELGEEIEIRHNMDSTFLFENK

SEQ ID NO: 31899 - protein, 84 aa, unidentified
  REGION 1..84: note = Description of Unknown:cds_NZ_WFIY01000004.1_cds_WP_170283902.1_1054 target sequence
GLHIISRMIGKEIRKFEEIELGEEIEIRHNMDSTFLFENKGGKAHPLRWGVGLYSELYKAYWFGVLKRGRKYERGEKILLQRLL

SEQ ID NO: 31900 - protein, 85 aa, unidentified
  REGION 1..85: note = Description of Unknown:cds_NZ_WFIY01000004.1_cds_WP_170283902.1_1054 target sequence
LLDSVGKIVAEDIISIEDIPERDLSAMDGYAIRSEDFGKKLKVVGSLFPSSKEVPKINEGEAFYVTTGAPIPEGADAVCRVEATK

SEQ ID NO: 31901 - protein, 85 aa, unidentified
  REGION 1..85: note = Description of Unknown:cds_NZ_WFIY01000004.1_cds_WP_170283902.1_1054 target sequence
REGDYVIIGEKVHKGKDIRPKGEDIKKGEKILNKGEKITPYHLGILAYEKIYKIKVLNISFAVFANGDELSPFHSNGEKVDSITP

SEQ ID NO: 31902 - protein, 85 aa, unidentified
  REGION 1..85: note = Description of Unknown:cds_NZ_WFIY01000004.1_cds_WP_170283902.1_1054 target sequence
ILIPLLSSFGNVTYLGVAKDNPDDVEKFIEKASSFDFIISIGGSSVGEKDYVKRVIEKKGGKLLFEGVSVNVLKRGSVGLINGKP

SEQ ID NO: 31903 - protein, 85 aa, unidentified
  REGION 1..85: note = Description of Unknown:cds_NZ_WFIY01000004.1_cds_WP_170283902.1_1054 target sequence
ILILPGQVVSAITVFHEHGLHIISRMIGKEIRKFEEIELGEEIEIRHNMDSTFLFENKGGKAHPLRWGVGLYSELYKAYWFGVLK

SEQ ID NO: 31904 - protein, 85 aa, unidentified
  REGION 1..85: note = Description of Unknown:cds_NZ_WFIY01000004.1_cds_WP_155863991.1_1916 target sequence
VTYLIEKEIGSKDEAKVRIIRRTDERLSYTFDSSRISRLYIPYSMKERMDEIIEAVDKSPFTKLSRISSEELDKVLLILRRYPNL

SEQ ID NO: 31905 - protein, 85 aa, unidentified
  REGION 1..85: note = Description of Unknown:cds_NZ_WFIY01000004.1_cds_WP_155863991.1_1916 target sequence
FNSIDFFSADDIVLSEFDEEGRINGRKRKFKVKDKIYEIMGNKSIIVKEKYYEIAKKINALKVEIMFNSYDRGFKISELGNLLMV

SEQ ID NO: 31906 - protein, 85 aa, unidentified
  REGION 1..85: note = Description of Unknown:cds_NZ_WFIY01000004.1_cds_WP_155863991.1_1916 target sequence
KSRKGYKEYFFDNFSVIIERMLKKEDIETIKKYKGKIFHFTKDYGTTLIDGIVLKKFYIDGKESDIEELRKIAGEFSAEISKHSF

SEQ ID NO: 31907 - protein, 85 aa, unidentified
  REGION 1..85: note = Description of Unknown:cds_NZ_WFIY01000004.1_cds_WP_155863991.1_1916 target sequence
SWFKGHEITTSQVQIPHTQFDYSVDDLNLLKDVSNLGKGYFVYGNLNIYSYDYGFTIKLKDGKPTFFKLNENVKNIDAKNFDIIA

SEQ ID NO: 31908 - protein, 84 aa, unidentified
  REGION 1..84: note = Description of Unknown:cds_NZ_WFIY01000004.1_cds_WP_155863991.1_1916 target sequence
NLNIYSYDYGFTIKLKDGKPTFFKLNENVKNIDAKNFDIIASEILPSGRGKVLIYTTLGFKKENKLNPIKFISKDGIRMKKISR

SEQ ID NO: 31909 - protein, 85 aa, unidentified
  REGION 1..85: note = Description of Unknown:cds_NZ_WFIY01000004.1_cds_WP_155863991.1_1916 target sequence
SYTFDSSRISRLYIPYSMKERMDEIIEAVDKSPFTKLSRISSEELDKVLLILRRYPNLFNSIDFFSADDIVLSEFDEEGRINGRK

SEQ ID NO: 31910 - protein, 85 aa, unidentified
  REGION 1..85: note = Description of Unknown:cds_NZ_WFIY01000004.1_cds_WP_155863991.1_1916 target sequence
RKFKVKDKIYEIMGNKSIIVKEKYYEIAKKINALKVEIMFNSYDRGFKISELGNLLMVKSRKGYKEYFFDNFSVIIERMLKKEDI

SEQ ID NO: 31911 - protein, 85 aa, unidentified
  REGION 1..85: note = Description of Unknown:cds_NZ_WFIY01000004.1_cds_WP_155863991.1_1916 target sequence
ETIKKYKGKIFHFTKDYGTTLIDGIVLKKFYIDGKESDIEELRKIAGEFSAEISKHSFSWFKGHEITTSQVQIPHTQFDYSVDDL

SEQ ID NO: 31912 - protein, 85 aa, unidentified
  REGION 1..85: note = Description of Unknown:cds_NZ_WFIY01000004.1_cds_WP_155863991.1_1916 target sequence
NLLKDVSNLGKGYFVYGNLNIYSYDYGFTIKLKDGKPTFFKLNENVKNIDAKNFDIIASEILPSGRGKVLIYTTLGFKKENKLNP

SEQ ID NO: 31913 - protein, 85 aa, unidentified
  REGION 1..85: note = Description of Unknown:hvTR_Q98295 target sequence
EPLLRYLHSVEDRYVRTIFNFHIRHVPDVPAIYEPIKARIAGTQLFHEVVPDVHARAGIKKFIYCDIHMTKHILNHAAYAQGAAD

SEQ ID NO: 31914 - protein, 85 aa, unidentified
  REGION 1..85: note = Description of Unknown:hvTR_Q98295 target sequence
AGRAHKMAQHFDVVLAPGADSARTRDIFLRDKSSLLSYIKTTSKKSKIDYGEIKKTIHCAGGGAAGYYSGRRSDEYLSTTVCVDS

SEQ ID NO: 31915 - protein, 85 aa, unidentified
  REGION 1..85: note = Description of Unknown:hvTR_Q98295 target sequence
ARPWIKSVSKRLRVDIARHAIVTRGKSSILQTIEVIYVNRTCVKIFKDSTVHVILSKDKAERRCVDLVDRLFGTYRALFALLHAL

SEQ ID NO: 31916 - protein, 85 aa, unidentified
  REGION 1..85: note = Description of Unknown:hvTR_Q98295 target sequence
TQHAPFRAHAAAADAVLAAPGFDEKLALIRAHAHMYGVHNFRVGMFNLTYTPHIAFTVFPSLLDHKSKIKFFKGKKLNIVALSSL

SEQ ID NO: 31917 - protein, 84 aa, unidentified
  REGION 1..84: note = Description of Unknown:hvTR_Q98295 target sequence
GMFNLTYTPHIAFTVFPSLLDHKSKIKFFKGKKLNIVALSSLQECAYYVGCAEALLRTMQLRSERLDATDVLAASVEELKELLL

SEQ ID NO: 31918 - protein, 85 aa, unidentified
  REGION 1..85: note = Description of Unknown:hvTR_Q98295 target sequence
DVPAIYEPIKARIAGTQLFHEVVPDVHARAGIKKFIYCDIHMTKHILNHAAYAQGAADAGRAHKMAQHFDVVLAPGADSARTRDI

SEQ ID NO: 31919 - protein, 85 aa, unidentified
  REGION 1..85: note = Description of Unknown:hvTR_Q98295 target sequence
FLRDKSSLLSYIKTTSKKSKIDYGEIKKTIHCAGGGAAGYYSGRRSDEYLSTTVCVDSARPWIKSVSKRLRVDIARHAIVTRGKS

SEQ ID NO: 31920 - protein, 85 aa, unidentified
  REGION 1..85: note = Description of Unknown:hvTR_Q98295 target sequence
SILQTIEVIYVNRTCVKIFKDSTVHVILSKDKAERRCVDLVDRLFGTYRALFALLHALTQHAPFRAHAAAADAVLAAPGFDEKLA

SEQ ID NO: 31921 - protein, 85 aa, unidentified
  REGION 1..85: note = Description of Unknown:hvTR_Q98295 target sequence
LIRAHAHMYGVHNFRVGMFNLTYTPHIAFTVFPSLLDHKSKIKFFKGKKLNIVALSSLQECAYYVGCAEALLRTMQLRSERLDAT

SEQ ID NO: 31922 - protein, 85 aa, unidentified
  REGION 1..85: note = Description of Unknown:hvTR_A7XCP7 target sequence
DELFCCLREIEDSYSRTIFNFHLIKTNSVCNIYETMKNKISLETMFGNIVKCDDVKNKIKKLVYCDIHITKHIINPLLYPVYNVN

SEQ ID NO: 31923 - protein, 85 aa, unidentified
  REGION 1..85: note = Description of Unknown:hvTR_A7XCP7 target sequence
NTIFNKYSNFFDINAKQNDVSLQTVEIFKRDKSSLISYVKTTNKKKKVDYGEIKKTVHGSGKNFLHYFSGKKSDEYMSTTIKYNE

SEQ ID NO: 31924 - protein, 85 aa, unidentified
  REGION 1..85: note = Description of Unknown:hvTR_A7XCP7 target sequence
TKPWIKSVSKRMRVDIINNSIITKGKSSILQTIEIVFLNRTCVKIFKDSTMHIILSKEKTELNCTGLIDKLFSVYKILFLLLYSI

SEQ ID NO: 31925 - protein, 85 aa, unidentified
  REGION 1..85: note = Description of Unknown:hvTR_A7XCP7 target sequence
TNQKEFNIIYNIANEIITSNNFEDKIHIIKLKKEEYGIKNFKIGMFNLTFIKSIPYTVFPSLLDNGSKIKFFKGKKLNIVAIKSV

SEQ ID NO: 31926 - protein, 84 aa, unidentified
  REGION 1..84: note = Description of Unknown:hvTR_A7XCP7 target sequence
GMFNLTFIKSIPYTVFPSLLDNGSKIKFFKGKKLNIVAIKSVNDCKKYVYTSNSMLKTMLKRSNILHNLNIESASVDELKSLLS

SEQ ID NO: 31927 - protein, 85 aa, unidentified
  REGION 1..85: note = Description of Unknown:hvTR_A7XCP7 target sequence
SVCNIYETMKNKISLETMFGNIVKCDDVKNKIKKLVYCDIHITKHIINPLLYPVYNVNNTIFNKYSNFFDINAKQNDVSLQTVEI

SEQ ID NO: 31928 - protein, 85 aa, unidentified
  REGION 1..85: note = Description of Unknown:hvTR_A7XCP7 target sequence
FKRDKSSLISYVKTTNKKKKVDYGEIKKTVHGSGKNFLHYFSGKKSDEYMSTTIKYNETKPWIKSVSKRMRVDIINNSIITKGKS

SEQ ID NO: 31929 - protein, 85 aa, unidentified
  REGION 1..85: note = Description of Unknown:hvTR_A7XCP7 target sequence
SILQTIEIVFLNRTCVKIFKDSTMHIILSKEKTELNCTGLIDKLFSVYKILFLLLYSITNQKEFNIIYNIANEIITSNNFEDKIH

SEQ ID NO: 31930 - protein, 85 aa, unidentified
  REGION 1..85: note = Description of Unknown:hvTR_A7XCP7 target sequence
IIKLKKEEYGIKNFKIGMFNLTFIKSIPYTVFPSLLDNGSKIKFFKGKKLNIVAIKSVNDCKKYVYTSNSMLKTMLKRSNILHNL

SEQ ID NO: 31931 - protein, 85 aa, unidentified
  REGION 1..85: note = Description of Unknown:hvTR_Q9DHJ8 target sequence
DELFCCLREIEDSYSRTIFNFHLIKTNSVCDIYETMKNKISLETMFGNIVKCDDVKNKIKKLVYCDIHITKHIINPLLYPVYNVN

SEQ ID NO: 31932 - protein, 85 aa, unidentified; identical to SEQ ID NO: 31923
  REGION 1..85: note = Description of Unknown:hvTR_Q9DHJ8 target sequence

SEQ ID NO: 31933 - protein, 85 aa, unidentified; identical to SEQ ID NO: 31924
  REGION 1..85: note = Description of Unknown:hvTR_Q9DHJ8 target sequence

SEQ ID NO: 31934 - protein, 85 aa, unidentified
  REGION 1..85: note = Description of Unknown:hvTR_Q9DHJ8 target sequence
TNQKEFNIIHNIANEIITSNNFEDKIHIIKLKKEEYGIKNFKIGMFNLTFIKSIPYTVFPSLLDNGSKIKFFKGKKLNIVAIKSV

SEQ ID NO: 31935 - protein, 84 aa, unidentified; identical to SEQ ID NO: 31926
  REGION 1..84: note = Description of Unknown:hvTR_Q9DHJ8 target sequence

SEQ ID NO: 31936 - protein, 85 aa, unidentified
  REGION 1..85: note = Description of Unknown:hvTR_Q9DHJ8 target sequence
SVCDIYETMKNKISLETMFGNIVKCDDVKNKIKKLVYCDIHITKHIINPLLYPVYNVNNTIFNKYSNFFDINAKQNDVSLQTVEI

SEQ ID NO: 31937 - protein, 85 aa, unidentified; identical to SEQ ID NO: 31928
  REGION 1..85: note = Description of Unknown:hvTR_Q9DHJ8 target sequence

SEQ ID NO: 31938 - protein, 85 aa, unidentified
  REGION 1..85: note = Description of Unknown:hvTR_Q9DHJ8 target sequence
SILQTIEIVFLNRTCVKIFKDSTMHIILSKEKTELNCTGLIDKLFSVYKILFLLLYSITNQKEFNIIHNIANEIITSNNFEDKIH

SEQ ID NO: 31939 - protein, 85 aa, unidentified
  REGION 1..85: note = Description of Unknown:cds_NZ_WFIY01000004.1_cds_WP_155862954.1_814 target sequence
KTTISVIKADIGSLAGHHVVHPDTMAAANKVLAEAKKNGIIIDYYITNVGDDMELIMTHNRGELDTKVHETAWDAFKEATKVAKD

SEQ ID NO: 31940 - protein, 85 aa, unidentified
  REGION 1..85: note = Description of Unknown:cds_NZ_WFIY01000004.1_cds_WP_155862954.1_814 target sequence
LGLYAAGQDLLSDTFSGNLKGMGPGIAEMEIEERPAEPIAIFMADKTEPGAFNYPQYKMFADPFNTAGLVIDPTMHEGYKFEILD

SEQ ID NO: 31941 - protein, 85 aa, unidentified
  REGION 1..85: note = Description of Unknown:cds_NZ_WFIY01000004.1_cds_WP_155862954.1_814 target sequence
VYAGESVTLNAPEEIYDILALIGTPSQYVIRRVYRKADNIIASVTSIERLNLLAGKYVGKDDPVMIVRVQHGFPALGEVLEAFSF

SEQ ID NO: 31942 - protein, 85 aa, unidentified
  REGION 1..85: note = Description of Unknown:cds_NZ_WFIY01000004.1_cds_WP_155862954.1_814 target sequence
PYLVPGWMRGSHYGPLMPVSQRDARATRFDGPPRLIGLGFNIKNGRLVGPSDLFDDPAFDETRRLAEQIADYMRRHGPFMPHRLE

SEQ ID NO: 31943 - protein, 84 aa, unidentified
  REGION 1..84: note = Description of Unknown:cds_NZ_WFIY01000004.1_cds_WP_155862954.1_814 target sequence
NGRLVGPSDLFDDPAFDETRRLAEQIADYMRRHGPFMPHRLEPTEMEYTTLPLIQQKLKARFKKEAGVVEAKKSIYEKQVEGGD

SEQ ID NO: 31944 - protein, 85 aa, unidentified
  REGION 1..85: note = Description of Unknown:cds_NZ_WFIY01000004.1_cds_WP_155862954.1_814 target sequence
ANKVLAEAKKNGIIIDYYITNVGDDMELIMTHNRGELDTKVHETAWDAFKEATKVAKDLGLYAAGQDLLSDTFSGNLKGMGPGIA

SEQ ID NO: 31945 - protein, 85 aa, unidentified
  REGION 1..85: note = Description of Unknown:cds_NZ_WFIY01000004.1_cds_WP_155862954.1_814 target sequence
EMEIEERPAEPIAIFMADKTEPGAFNYPQYKMFADPFNTAGLVIDPTMHEGYKFEILDVYAGESVTLNAPEEIYDILALIGTPSQ

SEQ ID NO: 31946 - protein, 85 aa, unidentified
  REGION 1..85: note = Description of Unknown:cds_NZ_WFIY01000004.1_cds_WP_155862954.1_814 target sequence
YVIRRVYRKADNIIASVTSIERLNLLAGKYVGKDDPVMIVRVQHGFPALGEVLEAFSFPYLVPGWMRGSHYGPLMPVSQRDARAT

SEQ ID NO: 31947 - protein, 85 aa, unidentified
  REGION 1..85: note = Description of Unknown:cds_NZ_WFIY01000004.1_cds_WP_155862954.1_814 target sequence
RFDGPPRLIGLGFNIKNGRLVGPSDLFDDPAFDETRRLAEQIADYMRRHGPFMPHRLEPTEMEYTTLPLIQQKLKARFKKEAGVV

SEQ ID NO: 31948 - protein, 85 aa, unidentified
  REGION 1..85: note = Description of Unknown:cds_NZ_WFIY01000004.1_cds_WP_155863494.1_1444 target sequence
ARREKNPIRATVSMKIGLSNSLLALVNNYVKALRFTLFWLKENVKNPEEKGTLSKVHEGLYEKLRKEYNLPSKVAQDCYRDALAT

SEQ ID NO: 31949 - protein, 85 aa, unidentified
  REGION 1..85: note = Description of Unknown:cds_NZ_WFIY01000004.1_cds_WP_155863494.1_1444 target sequence
YKGWYNNPKKGRFPRVYKPTVWLTPKASYSVELEKMVVKIASVGELPILGYPRNLKDYLAWEMKEARLTIKDGKAFLKVVFEKPK

SEQ ID NO: 31950 - protein, 85 aa, unidentified
  REGION 1..85: note = Description of Unknown:cds_NZ_WFIY01000004.1_cds_WP_155863494.1_1444 target sequence
VKIQPKGSVAVDINMSDIVVGKDDTHYVRIPTRLHDAYHFKSLAENLQKKYPRRWKENKRILHRIRSFHQKAKRIMEDFARKVGK

SEQ ID NO: 31951 - protein, 85 aa, unidentified
  REGION 1..85: note = Description of Unknown:cds_NZ_WFIY01000004.1_cds_WP_155863494.1_1444 target sequence
WTIEIAEDLGANVIKLENLKNLIRNVDKLPSEFHDKLYLMQYRRIQYWIEWQAKKHGLIVKYVNPRYSSVSCPKCGKKMTEIAHR

SEQ ID NO: 31952 - protein, 84 aa, unidentified
  REGION 1..84: note = Description of Unknown:cds_NZ_WFIY01000004.1_cds_WP_155863494.1_1444 target sequence
RIQYWIEWQAKKHGLIVKYVNPRYSSVSCPKCGKKMTEIAHRYFHCPSCGYENDRDVIAVTNLNGRGSLTLSTAPQMRDVNPNR

SEQ ID NO: 31953 - protein, 85 aa, unidentified
  REGION 1..85: note = Description of Unknown:cds_NZ_WFIY01000004.1_cds_WP_155863494.1_1444 target sequence
NYVKALRFTLFWLKENVKNPEEKGTLSKVHEGLYEKLRKEYNLPSKVAQDCYRDALATYKGWYNNPKKGRFPRVYKPTVWLTPKA

SEQ ID NO: 31954 - protein, 85 aa, unidentified
  REGION 1..85: note = Description of Unknown:cds_NZ_WFIY01000004.1_cds_WP_155863494.1_1444 target sequence
SYSVELEKMVVKIASVGELPILGYPRNLKDYLAWEMKEARLTIKDGKAFLKVVFEKPKVKIQPKGSVAVDINMSDIVVGKDDTHY

SEQ ID NO: 31955 - protein, 85 aa, unidentified
  REGION 1..85: note = Description of Unknown:cds_NZ_WFIY01000004.1_cds_WP_155863494.1_1444 target sequence
VRIPTRLHDAYHFKSLAENLQKKYPRRWKENKRILHRIRSFHQKAKRIMEDFARKVGKWTIEIAEDLGANVIKLENLKNLIRNVD

SEQ ID NO: 31956 - protein, 85 aa, unidentified
  REGION 1..85: note = Description of Unknown:cds_NZ_WFIY01000004.1_cds_WP_155863494.1_1444 target sequence
KLPSEFHDKLYLMQYRRIQYWIEWQAKKHGLIVKYVNPRYSSVSCPKCGKKMTEIAHRYFHCPSCGYENDRDVIAVTNLNGRGSL

SEQ ID NO: 31957 - protein, 85 aa, unidentified
  REGION 1..85: note = Description of Unknown:cds_NZ_WFIY01000004.1_cds_WP_155864078.1_2018 target sequence
LESILPNSILIDAGNRKEFTDPNFVVSLFLLPFMYEKKPEEKEYLEVIESIKFESYDELNEIRNKDFPMYATYFQQKVLNDYISG

SEQ ID NO: 31958 - protein, 85 aa, unidentified
  REGION 1..85: note = Description of Unknown:cds_NZ_WFIY01000004.1_cds_WP_155864078.1_2018 target sequence
KEYARNAISFLLNKFKDEKEAEKIKEEYEDFILDKLSLKELFKPSSYEEPKYVFPYVWKFYTPNFDEAVKKVTSGKEIVSNYMGL

SEQ ID NO: 31959 - protein, 85 aa, unidentified
  REGION 1..85: note = Description of Unknown:cds_NZ_WFIY01000004.1_cds_WP_155864078.1_2018 target sequence
TTYVILVSKGLFPFFRPYVFLSNSPPRVGLKMGEVLIDPEEITVTQLNEDRLSFSRKFLEIELGKLDSKELSSFIESKSETSKRI

SEQ ID NO: 31960 - protein, 85 aa, unidentified
  REGION 1..85: note = Description of Unknown:cds_NZ_WFIY01000004.1_cds_WP_155864078.1_2018 target sequence
LLSSLRYANWALKKSGISLEDAVHLFVKLRELIDDVERDFQKAIDNGVDFKEIKEEVKRYGWLNLEVSPAVNPLALKKSVRLISI

SEQ ID NO: 31961 - protein, 84 aa, unidentified
  REGION 1..84: note = Description of Unknown:cds_NZ_WFIY01000004.1_cds_WP_155864078.1_2018 target sequence
IDNGVDFKEIKEEVKRYGWLNLEVSPAVNPLALKKSVRLISIMKEIGDMYFIPYSIIMSAIVSTYVSGKDYKLLLYGLKTNKFI

SEQ ID NO: 31962 - protein, 85 aa, unidentified
  REGION 1..85: note = Description of Unknown:cds_NZ_WFIY01000004.1_cds_WP_155864078.1_2018 target sequence
LFLLPFMYEKKPEEKEYLEVIESIKFESYDELNEIRNKDFPMYATYFQQKVLNDYISGKEYARNAISFLLNKFKDEKEAEKIKEE

SEQ ID NO: 31963 - protein, 85 aa, unidentified
  REGION 1..85: note = Description of Unknown:cds_NZ_WFIY01000004.1_cds_WP_155864078.1_2018 target sequence
YEDFILDKLSLKELFKPSSYEEPKYVFPYVWKFYTPNFDEAVKKVTSGKEIVSNYMGLTTYVILVSKGLFPFFRPYVFLSNSPPR

SEQ ID NO: 31964 - protein, 85 aa, unidentified
  REGION 1..85: note = Description of Unknown:cds_NZ_WFIY01000004.1_cds_WP_155864078.1_2018 target sequence
VGLKMGEVLIDPEEITVTQLNEDRLSFSRKFLEIELGKLDSKELSSFIESKSETSKRILLSSLRYANWALKKSGISLEDAVHLFV

SEQ ID NO: 31965 - protein, 85 aa, unidentified
  REGION 1..85: note = Description of Unknown:cds_NZ_WFIY01000004.1_cds_WP_155864078.1_2018 target sequence
KLRELIDDVERDFQKAIDNGVDFKEIKEEVKRYGWLNLEVSPAVNPLALKKSVRLISIMKEIGDMYFIPYSIIMSAIVSTYVSGK

SEQ ID NO: 31966 - protein, 85 aa, unidentified
  REGION 1..85: note = Description of Unknown:cds_NZ_WFIY01000004.1_cds_WP_155864207.1_2173 target sequence
ARRDKNPIRATVSMKIGLSDPLLALVNNYVKALRFALFWMKENVKDPNEKGTLSKVHEGLYEKLRKEYNLPSKVAEDCYRDALAI

SEQ ID NO: 31967 - protein, 85 aa, unidentified
  REGION 1..85: note = Description of Unknown:cds_NZ_WFIY01000004.1_cds_WP_155864207.1_2173 target sequence
YKSWYNNPKRGRFPRVYKPTVWLTPKASYSVDLDRMVVKIASVCELPILGYPRNLKDYSTWEMKEARLTIKDGKAFLKVTFEKEE

SEQ ID NO: 31968 - protein, 85 aa, unidentified
  REGION 1..85: note = Description of Unknown:cds_NZ_WFIY01000004.1_cds_WP_155864207.1_2173 target sequence
EKVKPKDSVAVDVNMNDIVVGKDDSHYVRIPTRLHDAYHFKSLAEHLQKKYPKRWKENKRILHRIRYFHQKAKRIMEDFARKVGR

SEQ ID NO: 31969 - protein, 85 aa, unidentified
  REGION 1..85: note = Description of Unknown:cds_NZ_WFIY01000004.1_cds_WP_155864207.1_2173 target sequence
WTIEIAEKLGANVIKLENLKNLIKDVDKLPSEFRDKLYLMQYRRIQYWIEWQAKKHGMIVKYVNPSYSSVSCPKCGKKMIEMAYR

SEQ ID NO: 31970 - protein, 84 aa, unidentified
  REGION 1..84: note = Description of Unknown:cds_NZ_WFIY01000004.1_cds_WP_155864207.1_2173 target sequence
RIQYWIEWQAKKHGMIVKYVNPSYSSVSCPKCGKKMIEMAYRYFHCPSCGYENDRDVIAVTNLNGRGSLTLSTAPQMRDVNPNR

SEQ ID NO: 31971 - protein, 85 aa, unidentified
  REGION 1..85: note = Description of Unknown:cds_NZ_WFIY01000004.1_cds_WP_155864207.1_2173 target sequence
NYVKALRFALFWMKENVKDPNEKGTLSKVHEGLYEKLRKEYNLPSKVAEDCYRDALAIYKSWYNNPKRGRFPRVYKPTVWLTPKA

SEQ ID NO: 31972 - protein, 85 aa, unidentified
  REGION 1..85: note = Description of Unknown:cds_NZ_WFIY01000004.1_cds_WP_155864207.1_2173 target sequence
SYSVDLDRMVVKIASVCELPILGYPRNLKDYSTWEMKEARLTIKDGKAFLKVTFEKEEEKVKPKDSVAVDVNMNDIVVGKDDSHY

SEQ ID NO: 31973 - protein, 85 aa, unidentified
  REGION 1..85: note = Description of Unknown:cds_NZ_WFIY01000004.1_cds_WP_155864207.1_2173 target sequence
VRIPTRLHDAYHFKSLAEHLQKKYPKRWKENKRILHRIRYFHQKAKRIMEDFARKVGRWTIEIAEKLGANVIKLENLKNLIKDVD

SEQ ID NO: 31974 - protein, 85 aa, unidentified
  REGION 1..85: note = Description of Unknown:cds_NZ_WFIY01000004.1_cds_WP_155864207.1_2173 target sequence
KLPSEFRDKLYLMQYRRIQYWIEWQAKKHGMIVKYVNPSYSSVSCPKCGKKMIEMAYRYFHCPSCGYENDRDVIAVTNLNGRGSL

SEQ ID NO: 31975 - protein, 85 aa, unidentified
  REGION 1..85: note = Description of Unknown:cds_NZ_WFIY01000004.1_cds_WP_155864291.1_2284 target sequence
ARRDKNPIRATVSMKIGLSDSLLALVNNYVKALRFTLFWMKENVKDPNEKGTLSKVHEGLYEKLKKEYNLPSKVAEDCYRDALAT

SEQ ID NO: 31976 - protein, 85 aa, unidentified
  REGION 1..85: note = Description of Unknown:cds_NZ_WFIY01000004.1_cds_WP_155864291.1_2284 target sequence
YKSWYNNPKKGRFPRVYKPTVWLTPKQSYNVVLEKMTVKIAGVGVLPILGYPRNLKDYSTWEMKEARLTIKDGKAFLKVVFEKPK

SEQ ID NO: 31977 - protein, 85 aa, unidentified
  REGION 1..85: note = Description of Unknown:cds_NZ_WFIY01000004.1_cds_WP_155864291.1_2284 target sequence
VKIEPKGSVAIDVNMSEIVVGKDDTHYVRIPTRLHDAYHFKTLAENLQKKYPRRWKQNRRILHRIHSFHQKAKRIMEDFARKVGR

SEQ ID NO: 31978 - protein, 85 aa, unidentified
  REGION 1..85: note = Description of Unknown:cds_NZ_WFIY01000004.1_cds_WP_155864291.1_2284 target sequence
WTIEIAKKLGANVIKLENLKNLIRNVNKLPAEFHDKLYLMQYRRIQYWIEWQARKHGMIVKYVNPSYSSVSCPKCGKKMIEMAYR

SEQ ID NO: 31979 - protein, 84 aa, unidentified
  REGION 1..84: note = Description of Unknown:cds_NZ_WFIY01000004.1_cds_WP_155864291.1_2284 target sequence
RIQYWIEWQARKHGMIVKYVNPSYSSVSCPKCGKKMIEMAYRYFHCPSCGYENDRDVIAVTNLNGRGSLTLSTAPQMRDVNPNR

SEQ ID NO: 31980 - protein, 85 aa, unidentified
  REGION 1..85: note = Description of Unknown:cds_NZ_WFIY01000004.1_cds_WP_155864291.1_2284 target sequence
NYVKALRFTLFWMKENVKDPNEKGTLSKVHEGLYEKLKKEYNLPSKVAEDCYRDALATYKSWYNNPKKGRFPRVYKPTVWLTPKQ

SEQ ID NO: 31981 - protein, 85 aa, unidentified
  REGION 1..85: note = Description of Unknown:cds_NZ_WFIY01000004.1_cds_WP_155864291.1_2284 target sequence
SYNVVLEKMTVKIAGVGVLPILGYPRNLKDYSTWEMKEARLTIKDGKAFLKVVFEKPKVKIEPKGSVAIDVNMSEIVVGKDDTHY

SEQ ID NO: 31982 - protein, 85 aa, unidentified
  REGION 1..85: note = Description of Unknown:cds_NZ_WFIY01000004.1_cds_WP_155864291.1_2284 target sequence
VRIPTRLHDAYHFKTLAENLQKKYPRRWKQNRRILHRIHSFHQKAKRIMEDFARKVGRWTIEIAKKLGANVIKLENLKNLIRNVN

SEQ ID NO: 31983 - protein, 85 aa, unidentified
  REGION 1..85: note = Description of Unknown:cds_NZ_WFIY01000004.1_cds_WP_155864291.1_2284 target sequence
KLPAEFHDKLYLMQYRRIQYWIEWQARKHGMIVKYVNPSYSSVSCPKCGKKMIEMAYRYFHCPSCGYENDRDVIAVTNLNGRGSL

SEQ ID NO: 31984 - protein, 85 aa, unidentified
  REGION 1..85: note = Description of Unknown:cds_NZ_WFIY01000004.1_cds_WP_155864293.1_2286 target sequence
RLVVGTNFDDKLIDELKKYPVRYIFGSKTKTLTGHGRASFVLPQVDEERLKEHIQIAHDAGIKFLYTMNTATLNGKEYSQKFLES

SEQ ID NO: 31985 - protein, 85 aa, unidentified
  REGION 1..85: note = Description of Unknown:cds_NZ_WFIY01000004.1_cds_WP_155864293.1_2286 target sequence
LKKEIDSLVNLGVDGFIVAMPFLVHFIKNEYPDVEISISSFSRVYNIREFEEYVNMGADTIILHEDDNRNFSLLSSLSKYRNKVD

SEQ ID NO: 31986 - protein, 85 aa, unidentified
  REGION 1..85: note = Description of Unknown:cds_NZ_WFIY01000004.1_cds_WP_155864293.1_2286 target sequence
IELILNNSCLWGCPYRRTHDIISSVTSQSDSEVNVWFEYPILFCATDVRNDLANIIRMRWIRPEDLRHYEELGIDRFKIASRNKK

SEQ ID NO: 31987 - protein, 85 aa, unidentified
  REGION 1..85: note = Description of Unknown:cds_NZ_WFIY01000004.1_cds_WP_155864293.1_2286 target sequence
TDWIIRAVKAYSQGRYEGNLLDIVSYPQGRAVPAVMKKINGPKDYDVLTQVYVDNTKFPPNWLSYFKYNSCETRSCEECRYCDII

SEQ ID NO: 31988 - protein, 84 aa, unidentified
  REGION 1..84: note = Description of Unknown:cds_NZ_WFIY01000004.1_cds_WP_155864293.1_2286 target sequence
DYDVLTQVYVDNTKFPPNWLSYFKYNSCETRSCEECRYCDIIAEKVITVQGKPLSEISLPKIKPPIELIPRFSKDASNEGNKDH

SEQ ID NO: 31989 - protein, 85 aa, unidentified
  REGION 1..85: note = Description of Unknown:cds_NZ_WFIY01000004.1_cds_WP_155864293.1_2286 target sequence
KTKTLTGHGRASFVLPQVDEERLKEHIQIAHDAGIKFLYTMNTATLNGKEYSQKFLESLKKEIDSLVNLGVDGFIVAMPFLVHFI

SEQ ID NO: 31990 - protein, 85 aa, unidentified
  REGION 1..85: note = Description of Unknown:cds_NZ_WFIY01000004.1_cds_WP_155864293.1_2286 target sequence
KNEYPDVEISISSFSRVYNIREFEEYVNMGADTIILHEDDNRNFSLLSSLSKYRNKVDIELILNNSCLWGCPYRRTHDIISSVTS

SEQ ID NO: 31991 - protein, 85 aa, unidentified
  REGION 1..85: note = Description of Unknown:cds_NZ_WFIY01000004.1_cds_WP_155864293.1_2286 target sequence
QSDSEVNVWFEYPILFCATDVRNDLANIIRMRWIRPEDLRHYEELGIDRFKIASRNKKTDWIIRAVKAYSQGRYEGNLLDIVSYP

SEQ ID NO: 31992 - protein, 85 aa, unidentified
  REGION 1..85: note = Description of Unknown:cds_NZ_WFIY01000004.1_cds_WP_155864293.1_2286 target sequence
QGRAVPAVMKKINGPKDYDVLTQVYVDNTKFPPNWLSYFKYNSCETRSCEECRYCDIIAEKVITVQGKPLSEISLPKIKPPIELI

SEQ ID NO: 31993 - protein, 85 aa, unidentified
  REGION 1..85: note = Description of Unknown:cds_NC_007409.1_cds_YP_319874.1_43 target sequence
ARREKNPIRATVSMKIGLSDSLLAFVNNYVRALRFSIFWMKENVKNPNEKGTLSKVHEGLYGKLKEDYNLPPKVSADCYRDALAI

SEQ ID NO: 31994 - protein, 85 aa, unidentified
  REGION 1..85: note = Description of Unknown:cds_NC_007409.1_cds_YP_319874.1_43 target sequence
YKSWYNNPKRGRFPRVYKPTVWLTPKRSYTVDLDRMVVKITSVGELPILGYPRNLKEYANWDMKEARLTIRDGKAFLKVVFEKPK

SEQ ID NO: 31995 - protein, 85 aa, unidentified
  REGION 1..85: note = Description of Unknown:cds_NC_007409.1_cds_YP_319874.1_43 target sequence
VKIQPKGSVAVDINMSEIVVGKDDSHYVRIPTRLHESHHFKTLAENLQKKYPRRWKENKRILHRIRSFHHKAKLIMEDFARKVGK

SEQ ID NO: 31996 - protein, 85 aa, unidentified
  REGION 1..85: note = Description of Unknown:cds_NC_007409.1_cds_YP_319874.1_43 target sequence
WVVEIAWDLGANVIKLENLKNLIRNVNKLSAEFRDKLYLMQYHRIQYWIEWQARKHGMNVEYVNPSYSSVSCPKCGRKMVEIAHR

SEQ ID NO: 31997 - protein, 84 aa, unidentified
  REGION 1..84: note = Description of Unknown:cds_NC_007409.1_cds_YP_319874.1_43 target sequence
RIQYWIEWQARKHGMNVEYVNPSYSSVSCPKCGRKMVEIAHRYFHCPSCGYENDRDVIAIMNLNGRGSLTLSTAPQMRDVIPNR

SEQ ID NO: 31998 - protein, 85 aa, unidentified
  REGION 1..85: note = Description of Unknown:cds_NC_007409.1_cds_YP_319874.1_43 target sequence
NYVRALRFSIFWMKENVKNPNEKGTLSKVHEGLYGKLKEDYNLPPKVSADCYRDALAIYKSWYNNPKRGRFPRVYKPTVWLTPKR

SEQ ID NO: 31999 - protein, 85 aa, unidentified
  REGION 1..85: note = Description of Unknown:cds_NC_007409.1_cds_YP_319874.1_43 target sequence
SYTVDLDRMVVKITSVGELPILGYPRNLKEYANWDMKEARLTIRDGKAFLKVVFEKPKVKIQPKGSVAVDINMSEIVVGKDDSHY

SEQ ID NO: 32000 - protein, 85 aa, unidentified
  REGION 1..85: note = Description of Unknown:cds_NC_007409.1_cds_YP_319874.1_43 target sequence
VRIPTRLHESHHFKTLAENLQKKYPRRWKENKRILHRIRSFHHKAKLIMEDFARKVGKWVVEIAWDLGANVIKLENLKNLIRNVN

SEQ ID NO: 32001 - protein, 85 aa, unidentified
  REGION 1..85: note = Description of Unknown:cds_NC_007409.1_cds_YP_319874.1_43 target sequence
KLSAEFRDKLYLMQYHRIQYWIEWQARKHGMNVEYVNPSYSSVSCPKCGRKMVEIAHRYFHCPSCGYENDRDVIAIMNLNGRGSL

SEQ ID NO: 32002 - protein, 85 aa, unidentified
  REGION 1..85: note = Description of Unknown:cds_NC_007409.1_cds_YP_319899.1_68 target sequence
ARREKNPIRATVAMNIGLSDSLLAFVNNYVKALRFSLFWMKENVKNPNEKGALSKVHEGLYEKLRKEYNLPSKVTEDCYRDALAI

SEQ ID NO: 32003 - protein, 85 aa, unidentified
  REGION 1..85: note = Description of Unknown:cds_NC_007409.1_cds_YP_319899.1_68 target sequence
YKSWYNNPKKGRFPRVYKPTVWLTPKQSYTVDLEKMTVRIASVGELPILGYPRNLKEYANWKMKEARLTIKDGKALLKVTFEKEE

SEQ ID NO: 32004 - protein, 85 aa, unidentified
  REGION 1..85: note = Description of Unknown:cds_NC_007409.1_cds_YP_319899.1_68 target sequence
EKVKPKDSVAVDINMNDIVVGKDDTHYVRIPTRLHDAHHFKSLAENLQKKYPRRWKQNRRILHRARSFHQKAKLIMEDYARKVGK

SEQ ID NO: 32005 - protein, 85 aa, unidentified
  REGION 1..85: note = Description of Unknown:cds_NC_007409.1_cds_YP_319899.1_68 target sequence
WVVEIAEGLGANVIKLEDLKNLIKDVNKLPAEFRDKLYLMQYRRIQYWIEWQAKKHGMIVEFVNPSYSSVSCPKCGHKMVEIAYR

SEQ ID NO: 32006 - protein, 84 aa, unidentified
  REGION 1..84: note = Description of Unknown:cds_NC_007409.1_cds_YP_319899.1_68 target sequence
RIQYWIEWQAKKHGMIVEFVNPSYSSVSCPKCGHKMVEIAYRYFHCPSCGYENDRDVIAIMNLNGRGSLTLSTAPQMRDVAPNR

SEQ ID NO: 32007 - protein, 85 aa, unidentified
  REGION 1..85: note = Description of Unknown:cds_NC_007409.1_cds_YP_319899.1_68 target sequence
NYVKALRFSLFWMKENVKNPNEKGALSKVHEGLYEKLRKEYNLPSKVTEDCYRDALAIYKSWYNNPKKGRFPRVYKPTVWLTPKQ

SEQ ID NO: 32008 - protein, 85 aa, unidentified
  REGION 1..85: note = Description of Unknown:cds_NC_007409.1_cds_YP_319899.1_68 target sequence
SYTVDLEKMTVRIASVGELPILGYPRNLKEYANWKMKEARLTIKDGKALLKVTFEKEEEKVKPKDSVAVDINMNDIVVGKDDTHY

SEQ ID NO: 32009 - protein, 85 aa, unidentified
  REGION 1..85: note = Description of Unknown:cds_NC_007409.1_cds_YP_319899.1_68 target sequence
VRIPTRLHDAHHFKSLAENLQKKYPRRWKQNRRILHRARSFHQKAKLIMEDYARKVGKWVVEIAEGLGANVIKLEDLKNLIKDVN

SEQ ID NO: 32010 - protein, 85 aa, unidentified
  REGION 1..85: note = Description of Unknown:cds_NC_007409.1_cds_YP_319899.1_68 target sequence
KLPAEFRDKLYLMQYRRIQYWIEWQAKKHGMIVEFVNPSYSSVSCPKCGHKMVEIAYRYFHCPSCGYENDRDVIAIMNLNGRGSL

SEQ ID NO: 32011 - protein, 85 aa, unidentified
  REGION 1..85: note = Description of Unknown:hvTR_Q8QMT0 target sequence
DNLFTFLHEIEDRYARTIFNFHLISCDEIGDIYGLMKERISSEDMFDNIVYNKDIHPAIKKLVYCDIQLTKHIINQNTYPVFNDS

SEQ ID NO: 32012 - protein, 85 aa, unidentified
  REGION 1..85: note = Description of Unknown:hvTR_Q8QMT0 target sequence
SQVKCCHYFDINSDNSNISSRTVEIFEREKSSLVSYIKTTNKKRKVNYGEIKKTVHGGTNANYFSGKKSDEYLSTTVRSNINQPW

SEQ ID NO: 32013 - protein, 85 aa, unidentified
  REGION 1..85: note = Description of Unknown:hvTR_Q8QMT0 target sequence
IKTISKRMRVDIINHSIVTRGKSSILQTIEIIFTNRTCVKIFKDSTMHIILSKDKDEKGCIHMIDKLFYVYYNLFLLFEDIIQNE

SEQ ID NO: 32014 - protein, 85 aa, unidentified
  REGION 1..85: note = Description of Unknown:hvTR_Q8QMT0 target sequence
YFKEVANIVNHVLTATALDEKLFLIKKMAEHDVYGVSNFKIGMFNLTFIKSLDHTVFPSLLDEDSKIKFFKGKKLNIVALRSLED

SEQ ID NO: 32015 - protein, 84 aa, unidentified
  REGION 1..84: note = Description of Unknown:hvTR_Q8QMT0 target sequence
MFNLTFIKSLDHTVFPSLLDEDSKIKFFKGKKLNIVALRSLEDCINYVTKSENMIEMMKERSTILNSIDIETESVDRLKELLLK

SEQ ID NO: 32016 - protein, 85 aa, unidentified
  REGION 1..85: note = Description of Unknown:hvTR_Q8QMT0 target sequence
EIGDIYGLMKERISSEDMFDNIVYNKDIHPAIKKLVYCDIQLTKHIINQNTYPVFNDSSQVKCCHYFDINSDNSNISSRTVEIFE

SEQ ID NO: 32017 - protein, 85 aa, unidentified
  REGION 1..85: note = Description of Unknown:hvTR_Q8QMT0 target sequence
REKSSLVSYIKTTNKKRKVNYGEIKKTVHGGTNANYFSGKKSDEYLSTTVRSNINQPWIKTISKRMRVDIINHSIVTRGKSSILQ

SEQ ID NO: 32018 - protein, 85 aa, unidentified
  REGION 1..85: note = Description of Unknown:hvTR_Q8QMT0 target sequence
TIEIIFTNRTCVKIFKDSTMHIILSKDKDEKGCIHMIDKLFYVYYNLFLLFEDIIQNEYFKEVANIVNHVLTATALDEKLFLIKK

SEQ ID NO: 32019 - protein, 85 aa, unidentified
  REGION 1..85: note = Description of Unknown:hvTR_Q8QMT0 target sequence
MAEHDVYGVSNFKIGMFNLTFIKSLDHTVFPSLLDEDSKIKFFKGKKLNIVALRSLEDCINYVTKSENMIEMMKERSTILNSIDI

SEQ ID NO: 32020 - protein, 85 aa, unidentified; identical to SEQ ID NO: 32011
  REGION 1..85: note = Description of Unknown:hvTR_Q8V4V4 target sequence

SEQ ID NO: 32021 - protein, 85 aa, unidentified
  REGION 1..85: note = Description of Unknown:hvTR_Q8V4V4 target sequence
SQVKCCHYFDINSDNSNISSRTVEIFESEKSSLVSYIKTTNKKRKVNYGEIKKTVHGGTNANYFSGKKSDEYLSTTVRSNINQPW

SEQ ID NO: 32022 - protein, 85 aa, unidentified
  REGION 1..85: note = Description of Unknown:hvTR_Q8V4V4 target sequence
IKTISKRMRVDIINHSIVTRGKSSILQTIEIIFTNRTCVKIFKDSTMHIILSKDKDEKGCINMIDKLFYVYYNLFLLFEDIIQNE

SEQ ID NO: 32023 - protein, 85 aa, unidentified
  REGION 1..85: note = Description of Unknown:hvTR_Q8V4V4 target sequence
YFKEVANVVNHVLMATALDEKLFLIKKMAEHDVYGVSNFKIGMFNLTFIKSLDHTVFPSLLDEDSKIKFFKGKKLNIVALRSLED

SEQ ID NO: 32024 - protein, 84 aa, unidentified
  REGION 1..84: note = Description of Unknown:hvTR_Q8V4V4 target sequence
MFNLTFIKSLDHTVFPSLLDEDSKIKFFKGKKLNIVALRSLEDCTNYVTKSENMIEMMKERSTILNSIDIETESVDRLKELLLK

SEQ ID NO: 32025 - protein, 85 aa, unidentified; identical to SEQ ID NO: 32016
  REGION 1..85: note = Description of Unknown:hvTR_Q8V4V4 target sequence

SEQ ID NO: 32026 - protein, 85 aa, unidentified
  REGION 1..85: note = Description of Unknown:hvTR_Q8V4V4 target sequence
SEKSSLVSYIKTTNKKRKVNYGEIKKTVHGGTNANYFSGKKSDEYLSTTVRSNINQPWIKTISKRMRVDIINHSIVTRGKSSILQ

SEQ ID NO: 32027 - protein, 85 aa, unidentified
  REGION 1..85: note = Description of Unknown:hvTR_Q8V4V4 target sequence
TIEIIFTNRTCVKIFKDSTMHIILSKDKDEKGCINMIDKLFYVYYNLFLLFEDIIQNEYFKEVANVVNHVLMATALDEKLFLIKK

SEQ ID NO: 32028 - protein, 85 aa, unidentified
  REGION 1..85: note = Description of Unknown:hvTR_Q8V4V4 target sequence
MAEHDVYGVSNFKIGMFNLTFIKSLDHTVFPSLLDEDSKIKFFKGKKLNIVALRSLEDCTNYVTKSENMIEMMKERSTILNSIDI

SEQ ID NO: 32029 - protein, 85 aa, unidentified
  REGION 1..85: note = Description of Unknown:hvTR_P20998 target sequence
DNLFTFLHEIEDRYARTIFNFHLISCDEIGDIYGLMKERISSEDMFDNIVYNKDIHHAIKKLVYCDIQLTKHIINQNTYPVFNDS

SEQ ID NO: 32030 - protein, 85 aa, unidentified; identical to SEQ ID NO: 32012
  REGION 1..85: note = Description of Unknown:hvTR_P20998 target sequence

SEQ ID NO: 32031 - protein, 85 aa, unidentified; identical to SEQ ID NO: 32013
  REGION 1..85: note = Description of Unknown:hvTR_P20998 target sequence

SEQ ID NO: 32032 - protein, 85 aa, unidentified
  REGION 1..85: note = Description of Unknown:hvTR_P20998 target sequence
YFKEVANVVNHVLTATALDEKLFLIKKMAEHDVYGVSNFKIGMFNLTFIKSLDHTVFPSLLDEDSKIKFFKGKKLNIVALRSLED

SEQ ID NO: 32033 - protein, 85 aa, unidentified
  REGION 1..85: note = Description of Unknown:hvTR_P20998 target sequence
EIGDIYGLMKERISSEDMFDNIVYNKDIHHAIKKLVYCDIQLTKHIINQNTYPVFNDSSQVKCCHYFDINSDNSNISSRTVEIFE

SEQ ID NO: 32034 - protein, 85 aa, unidentified; identical to SEQ ID NO: 32017
  REGION 1..85: note = Description of Unknown:hvTR_P20998 target sequence

SEQ ID NO: 32035 - protein, 85 aa, unidentified
  REGION 1..85: note = Description of Unknown:hvTR_P20998 target sequence
TIEIIFTNRTCVKIFKDSTMHIILSKDKDEKGCIHMIDKLFYVYYNLFLLFEDIIQNEYFKEVANVVNHVLTATALDEKLFLIKK

SEQ ID NO: 32036 - protein, 85 aa, unidentified
  REGION 1..85: note = Description of Unknown:hvTR_P0DSR9 target sequence
DNLFTFLHEIEDRYTRTIFNFHLISCDEIGDIYGLMKERISSEDMFDNIVYNKDIHPAIKKLVYCDIQLTKHIINQNTYPVFNDS

SEQ ID NO: 32037 - protein, 85 aa, unidentified; identical to SEQ ID NO: 32012
  REGION 1..85: note = Description of Unknown:hvTR_P0DSR9 target sequence

SEQ ID NO: 32038 - protein, 85 aa, unidentified
  REGION 1..85: note = Description of Unknown:hvTR_P0DSR9 target sequence
IKTISKRMRVNIINHSIVTRGKSSILQTIEIIFTNRTCVKIFKDSTMHIILSKDKDEKGCIHMIDKLFYVYYNLFLLFEDIIQNE

SEQ ID NO: 32039 - protein, 85 aa, unidentified
  REGION 1..85: note = Description of Unknown:hvTR_P0DSR9 target sequence
YFKEVANVVNHVLTATALDEKLFLIKKMAKHDVYGVSNFKIGMFNLTFIKSLDHTVFPSLLDEDSKIKFFKGKKLNIVALRSLED

SEQ ID NO: 32040 - protein, 84 aa, unidentified
  REGION 1..84: note = Description of Unknown:hvTR_P0DSR9 target sequence
MFNLTFIKSLDHTVFPSLLDEDSKIKFFKGKKLNIVALRSLEDCINYVTKSENMIEMMKERSTILNSIDIETESVDRLKDLLLK

SEQ ID NO: 32041 - protein, 85 aa, unidentified; identical to SEQ ID NO: 32016
  REGION 1..85: note = Description of Unknown:hvTR_P0DSR9 target sequence

SEQ ID NO: 32042 - protein, 85 aa, unidentified
  REGION 1..85: note = Description of Unknown:hvTR_P0DSR9 target sequence
REKSSLVSYIKTTNKKRKVNYGEIKKTVHGGTNANYFSGKKSDEYLSTTVRSNINQPWIKTISKRMRVNIINHSIVTRGKSSILQ

SEQ ID NO: 32043 - protein, 85 aa, unidentified; identical to SEQ ID NO: 32035
  REGION 1..85: note = Description of Unknown:hvTR_P0DSR9 target sequence

SEQ ID NO: 32044 - protein, 85 aa, unidentified
  REGION 1..85: note = Description of Unknown:hvTR_P0DSR9 target sequence
MAKHDVYGVSNFKIGMFNLTFIKSLDHTVFPSLLDEDSKIKFFKGKKLNIVALRSLEDCINYVTKSENMIEMMKERSTILNSIDI

SEQ ID NO: 32045 - protein, 85 aa, unidentified
  REGION 1..85: note = Description of Unknown:hvTR_Q6TUQ4 target sequence
DELFYFLTTIEDDYSRTIFNFHLVKSGDVCNIYDTMKNKISSETMFEDIVKCDDVRRNIKKLVYCDIHITKHIINQSLYPVYNVG

SEQ ID NO: 32046 - protein, 85 aa, unidentified
  REGION 1..85: note = Description of Unknown:hvTR_Q6TUQ4 target sequence
NVFNKYSHFFDINSSQSDVSLRTVEIFERDKSSLISYVKTTNKKKKVDYGEIKKTVYGSGKNFLNYFSGKKSDEYMSTTVRYDNT

SEQ ID NO: 32047 - protein, 85 aa, unidentified
  REGION 1..85: note = Description of Unknown:hvTR_Q6TUQ4 target sequence
NPWIKSVSKRMRVDIVNNAIITKGKSSILQTIEIVFLNRTCVKIFKDSTMHIILSKERRELGCVGLIDKLFSVYKILFLLLYTVT

SEQ ID NO: 32048 - protein, 85 aa, unidentified
  REGION 1..85: note = Description of Unknown:hvTR_Q6TUQ4 target sequence
KQKEFSIIYNTSNEIMTSNSFEDKIKIIKSKKDDYGIKNFKIGMFNLTFTKPIPYTVFPSLLDNGSKIKFFKGKKLNIVAIKSVN

SEQ ID NO: 32049 - protein, 84 aa, unidentified
  REGION 1..84: note = Description of Unknown:hvTR_Q6TUQ4 target sequence
GMFNLTFTKPIPYTVFPSLLDNGSKIKFFKGKKLNIVAIKSVNDCKKYVRISNHMLKTMLDRSNILHNLNIESASVDQLKSLLS

SEQ ID NO: 32050 - protein, 85 aa, unidentified
  REGION 1..85: note = Description of Unknown:hvTR_Q6TUQ4 target sequence
DVCNIYDTMKNKISSETMFEDIVKCDDVRRNIKKLVYCDIHITKHIINQSLYPVYNVGNVFNKYSHFFDINSSQSDVSLRTVEIF

SEQ ID NO: 32051 - protein, 85 aa, unidentified
  REGION 1..85: note = Description of Unknown:hvTR_Q6TUQ4 target sequence
ERDKSSLISYVKTTNKKKKVDYGEIKKTVYGSGKNFLNYFSGKKSDEYMSTTVRYDNTNPWIKSVSKRMRVDIVNNAIITKGKSS

SEQ ID NO: 32052 - protein, 85 aa, unidentified
  REGION 1..85: note = Description of Unknown:hvTR_Q6TUQ4 target sequence
ILQTIEIVFLNRTCVKIFKDSTMHIILSKERRELGCVGLIDKLFSVYKILFLLLYTVTKQKEFSIIYNTSNEIMTSNSFEDKIKI

SEQ ID NO: 32053 - protein, 85 aa, unidentified
  REGION 1..85: note = Description of Unknown:hvTR_Q6TUQ4 target sequence
IKSKKDDYGIKNFKIGMFNLTFTKPIPYTVFPSLLDNGSKIKFFKGKKLNIVAIKSVNDCKKYVRISNHMLKTMLDRSNILHNLN

SEQ ID NO: 32054 - protein, 85 aa, unidentified
  REGION 1..85: note = Description of Unknown:cds_NZ_WFIY01000004.1_cds_WP_155862520.1_283 target sequence
PLVDIDSAKSFLSSLENRSEREELFSIYERLPYQLINDSPTVKHYTRWENLDKLNLKIESLDRKGGVNYPSIPGYVRVVIHNNLV

SEQ ID NO: 32055 - protein, 85 aa, unidentified
  REGION 1..85: note = Description of Unknown:cds_NZ_WFIY01000004.1_cds_WP_155862520.1_283 target sequence
KETPLEFSSSVGNSLIKPEDHKLVSLTLSLSRKLEIKQGGKYLIYHYTDLEGNFSPINVEIKVPEGESTDVIYYSENKGKSMNSA

SEQ ID NO: 32056 - protein, 85 aa, unidentified
  REGION 1..85: note = Description of Unknown:cds_NZ_WFIY01000004.1_cds_WP_155862520.1_283 target sequence
VISALVSKNSSLNLTLVNKGNSSYNFVYSKAKIEGSINTYIISSGFSEGHVEYHSYLEEGAQAFFSSRALGVENNNIDVITNVYH

SEQ ID NO: 32057 - protein, 85 aa, unidentified
  REGION 1..85: note = Description of Unknown:cds_NZ_WFIY01000004.1_cds_WP_155862520.1_283 target sequence
DGPKSVSNGFMKSVSSGSSFVVTRGDARINEQAIDSSTSIIGKAIMLGESTAVVAPMLEVRTGRVITAKHSASVSKVPEDLIFYL

SEQ ID NO: 32058 - protein, 84 aa, unidentified
  REGION 1..84: note = Description of Unknown:cds_NZ_WFIY01000004.1_cds_WP_155862520.1_283 target sequence
KAIMLGESTAVVAPMLEVRTGRVITAKHSASVSKVPEDLIFYLQNRGFDKKSAEGLIIRGFMEEEGDTEIVKKLIDEIITSLGY

SEQ ID NO: 32059 - protein, 85 aa, unidentified
  REGION 1..85: note = Description of Unknown:cds_NZ_WFIY01000004.1_cds_WP_155862520.1_283 target sequence
YERLPYQLINDSPTVKHYTRWENLDKLNLKIESLDRKGGVNYPSIPGYVRVVIHNNLVKETPLEFSSSVGNSLIKPEDHKLVSLT

SEQ ID NO: 32060 - protein, 85 aa, unidentified
  REGION 1..85: note = Description of Unknown:cds_NZ_WFIY01000004.1_cds_WP_155862520.1_283 target sequence
LSLSRKLEIKQGGKYLIYHYTDLEGNFSPINVEIKVPEGESTDVIYYSENKGKSMNSAVISALVSKNSSLNLTLVNKGNSSYNFV

SEQ ID NO: 32061 - protein, 85 aa, unidentified
  REGION 1..85: note = Description of Unknown:cds_NZ_WFIY01000004.1_cds_WP_155862520.1_283 target sequence
YSKAKIEGSINTYIISSGFSEGHVEYHSYLEEGAQAFFSSRALGVENNNIDVITNVYHDGPKSVSNGFMKSVSSGSSFVVTRGDA

SEQ ID NO: 32062 - protein, 85 aa, unidentified
  REGION 1..85: note = Description of Unknown:cds_NZ_WFIY01000004.1_cds_WP_155862520.1_283 target sequence
RINEQAIDSSTSIIGKAIMLGESTAVVAPMLEVRTGRVITAKHSASVSKVPEDLIFYLQNRGFDKKSAEGLIIRGFMEEEGDTEI

SEQ ID NO: 32063 - protein, 85 aa, unidentified
  REGION 1..85: note = Description of Unknown:cds_NZ_WFIY01000004.1_cds_WP_155863228.1_1175 target sequence
KFGFSISSFQFEELNQNSDWYLWLTDYVNLSSKKVVKELPTKNFYLSRYKEVHDLAVNLNASIWRMNLSWGRLFPSKDKVSQETL

SEQ ID NO: 32064 - protein, 85 aa, unidentified
  REGION 1..85: note = Description of Unknown:cds_NZ_WFIY01000004.1_cds_WP_155863228.1_1175 target sequence
SKYKEILKDLKDKGFEVILCLNHFDLPLWIHDPIVARDSLLTQGPLGWYSSSTVEEFVKFSRFIHDNFSEYVDLWCTFNEPNLLV

SEQ ID NO: 32065 - protein, 85 aa, unidentified
  REGION 1..85: note = Description of Unknown:cds_NZ_WFIY01000004.1_cds_WP_155863228.1_1175 target sequence
TFAYLQGIFPPGISSRRAYETSLNNVIRAHQEVYNELKGEKVGIVYNIPAVQGSSAVENEIFEFLRKIDFDWLGVNYYTRLVTDE

SEQ ID NO: 32066 - protein, 85 aa, unidentified
  REGION 1..85: note = Description of Unknown:cds_NZ_WFIY01000004.1_cds_WP_155863228.1_1175 target sequence
KGIPLEGYGPFCQFGSREGREVSDYGWEIYPEGLTDVLKKASNFGKPILITENGVADEKDRIRPRFIIDHVNAIKKSGVNVEAYM

SEQ ID NO: 32067 - protein, 84 aa, unidentified
  REGION 1..84: note = Description of Unknown:cds_NZ_WFIY01000004.1_cds_WP_155863228.1_1175 target sequence
NFGKPILITENGVADEKDRIRPRFIIDHVNAIKKSGVNVEAYMYWSLYDNFEWNFGYKMKFGLYDINLNPRPSAFIFKELQEIT

SEQ ID NO: 32068 - protein, 85 aa, unidentified
  REGION 1..85: note = Description of Unknown:cds_NZ_WFIY01000004.1_cds_WP_155863228.1_1175 target sequence
VNLSSKKVVKELPTKNFYLSRYKEVHDLAVNLNASIWRMNLSWGRLFPSKDKVSQETLSKYKEILKDLKDKGFEVILCLNHFDLP

SEQ ID NO: 32069 - protein, 85 aa, unidentified
  REGION 1..85: note = Description of Unknown:cds_NZ_WFIY01000004.1_cds_WP_155863228.1_1175 target sequence
LWIHDPIVARDSLLTQGPLGWYSSSTVEEFVKFSRFIHDNFSEYVDLWCTFNEPNLLVTFAYLQGIFPPGISSRRAYETSLNNVI

SEQ ID NO: 32070 - protein, 85 aa, unidentified
  REGION 1..85: note = Description of Unknown:cds_NZ_WFIY01000004.1_cds_WP_155863228.1_1175 target sequence
RAHQEVYNELKGEKVGIVYNIPAVQGSSAVENEIFEFLRKIDFDWLGVNYYTRLVTDEKGIPLEGYGPFCQFGSREGREVSDYGW

SEQ ID NO: 32071 - protein, 85 aa, unidentified
  REGION 1..85: note = Description of Unknown:cds_NZ_WFIY01000004.1_cds_WP_155863228.1_1175 target sequence
EIYPEGLTDVLKKASNFGKPILITENGVADEKDRIRPRFIIDHVNAIKKSGVNVEAYMYWSLYDNFEWNFGYKMKFGLYDINLNP

SEQ ID NO: 32072 - protein, 85 aa, unidentified
  REGION 1..85: note = Description of Unknown:cds_NZ_WFIY01000004.1_cds_WP_155863387.1_1362 target sequence
KKIVILGGGIGGTILANRLAKKLSSEINKGNVEITVLDKRDYHVYQPSQLLVALGIEDYDQLIRPERSLLEPSIKFYSGNKGDVR

SEQ ID NO: 32073 - protein, 85 aa, unidentified
  REGION 1..85: note = Description of Unknown:cds_NZ_WFIY01000004.1_cds_WP_155863387.1_1362 target sequence
KIDLANHKVISADGTEYNYDYLIISTGSHLAWNEIKGYREHALSVWYLDDVLKIKQAIDSFKGGTIVINVARLPIKCPVAPVELT

SEQ ID NO: 32074 - protein, 85 aa, unidentified
  REGION 1..85: note = Description of Unknown:cds_NZ_WFIY01000004.1_cds_WP_155863387.1_1362 target sequence
LILHDLLRKKGIRDKSRIIYTYPAPGVFGIKQANDLFTEMFKERGIEIVSNYVVDYVENNTLVSQSGEKIKFDLLLGVPPHKGAD

SEQ ID NO: 32075 - protein, 85 aa, unidentified
  REGION 1..85: note = Description of Unknown:cds_NZ_WFIY01000004.1_cds_WP_155863387.1_1362 target sequence
VLSGLEIADRRNWIDVDKYTLNVKGYDNVYAIGDATSLPISKSGSVAHFESGPVAENIVHDILGTSGKVLYDGSVFCFCVGGIGT

SEQ ID NO: 32076 - protein, 84 aa, unidentified
  REGION 1..84: note = Description of Unknown:cds_NZ_WFIY01000004.1_cds_WP_155863387.1_1362 target sequence
SGSVAHFESGPVAENIVHDILGTSGKVLYDGSVFCFCVGGIGTSSYIRYNYDYVLPVVTPTKTIWWMKLMYDRMYWSLTARAVI

SEQ ID NO: 32077 - protein, 85 aa, unidentified
  REGION 1..85: note = Description of Unknown:cds_NZ_WFIY01000004.1_cds_WP_155863387.1_1362 target sequence
NKGNVEITVLDKRDYHVYQPSQLLVALGIEDYDQLIRPERSLLEPSIKFYSGNKGDVRKIDLANHKVISADGTEYNYDYLIISTG

SEQ ID NO: 32078 - protein, 85 aa, unidentified
  REGION 1..85: note = Description of Unknown:cds_NZ_WFIY01000004.1_cds_WP_155863387.1_1362 target sequence
SHLAWNEIKGYREHALSVWYLDDVLKIKQAIDSFKGGTIVINVARLPIKCPVAPVELTLILHDLLRKKGIRDKSRIIYTYPAPGV

SEQ ID NO: 32079 - protein, 85 aa, unidentified
  REGION 1..85: note = Description of Unknown:cds_NZ_WFIY01000004.1_cds_WP_155863387.1_1362 target sequence
FGIKQANDLFTEMFKERGIEIVSNYVVDYVENNTLVSQSGEKIKFDLLLGVPPHKGADVLSGLEIADRRNWIDVDKYTLNVKGYD

SEQ ID NO: 32080 - protein, 85 aa, unidentified
  REGION 1..85: note = Description of Unknown:cds_NZ_WFIY01000004.1_cds_WP_155863387.1_1362 target sequence
NVYAIGDATSLPISKSGSVAHFESGPVAENIVHDILGTSGKVLYDGSVFCFCVGGIGTSSYIRYNYDYVLPVVTPTKTIWWMKLM

SEQ ID NO: 32081 - protein, 85 aa, unidentified
  REGION 1..85: note = Description of Unknown:cds_NC_030656.1_cds_YP_009268833.1_118 target sequence
DDLLCFLHSIENIFARTIFNFHLTNTQLLNDIYGYMQRRITSTNSFSSVVADMPEKNLIKKIVYCDIQLTKHLLNHEAYPNYEQQ

SEQ ID NO: 32082 - protein, 85 aa, unidentified
  REGION 1..85: note = Description of Unknown:cds_NC_030656.1_cds_YP_009268833.1_118 target sequence
PVSKRTGKYFDVSSEQDDHSLITASIFERDRSSLVSYIKTTNKKQKINYGEIKKTITNSSGNSLGYFSGRKGDDYLSTEIKANAE

SEQ ID NO: 32083 - protein, 85 aa, unidentified
  REGION 1..85: note = Description of Unknown:cds_NC_030656.1_cds_YP_009268833.1_118 target sequence
KPWIKSILKHMKIEINYDSIITKGKSSILQTIEIIFTHRTCVKIFKDSTIHIILSKDKNECGCVGMIDKLFSTYKILFMLFNAAS

SEQ ID NO: 32084 - protein, 85 aa, unidentified
  REGION 1..85: note = Description of Unknown:cds_NC_030656.1_cds_YP_009268833.1_118 target sequence
DNPMFMNWVKVANDIVTATNFNDKIKIITENKDMYGIGNFRIGMFNLTYKPKITHTVFPSMLSSNNKIKFFKGKKLNLVALRSLE

SEQ ID NO: 32085 - protein, 84 aa, unidentified
  REGION 1..84: note = Description of Unknown:cds_NC_030656.1_cds_YP_009268833.1_118 target sequence
GMFNLTYKPKITHTVFPSMLSSNNKIKFFKGKKLNLVALRSLEDCMENVSHAQLVLSEMKSKAERLSSINVDTELVEILKDLLI

SEQ ID NO: 32086 - protein, 85 aa, unidentified
  REGION 1..85: note = Description of Unknown:cds_NC_030656.1_cds_YP_009268833.1_118 target sequence
LLNDIYGYMQRRITSTNSFSSVVADMPEKNLIKKIVYCDIQLTKHLLNHEAYPNYEQQPVSKRTGKYFDVSSEQDDHSLITASIF

SEQ ID NO: 32087 - protein, 85 aa, unidentified
  REGION 1..85: note = Description of Unknown:cds_NC_030656.1_cds_YP_009268833.1_118 target sequence
ERDRSSLVSYIKTTNKKQKINYGEIKKTITNSSGNSLGYFSGRKGDDYLSTEIKANAEKPWIKSILKHMKIEINYDSIITKGKSS

SEQ ID NO: 32088 - protein, 85 aa, unidentified
  REGION 1..85: note = Description of Unknown:cds_NC_030656.1_cds_YP_009268833.1_118 target sequence
ILQTIEIIFTHRTCVKIFKDSTIHIILSKDKNECGCVGMIDKLFSTYKILFMLFNAASDNPMFMNWVKVANDIVTATNFNDKIKI

SEQ ID NO: 32089 - protein, 85 aa, unidentified
  REGION 1..85: note = Description of Unknown:cds_NC_030656.1_cds_YP_009268833.1_118 target sequence
ITENKDMYGIGNFRIGMFNLTYKPKITHTVFPSMLSSNNKIKFFKGKKLNLVALRSLEDCMENVSHAQLVLSEMKSKAERLSSIN

SEQ ID NO: 32090 - protein, 85 aa, unidentified
  REGION 1..85: note = Description of Unknown:hvTR_Q6TV88 target sequence
LGLFSFLRSVEDSYRRTIFNFHISHSAEVGDVYGVLRDRILGATTFEEVAPAGLGASLAKVVYCDISTTKHIVNHAAFAPRARPT

SEQ ID NO: 32091 - protein, 85 aa, unidentified
  REGION 1..85: note = Description of Unknown:hvTR_Q6TV88 target sequence
RRGAALSQFFDVHVGDDACSRRTAEIFDQERSSLVSYVKTTAKRCKIDYGEIKRTIHGGRQSYFAGRRSDDYMCTTVRTDPSKPW

SEQ ID NO: 32092 - protein, 85 aa, unidentified
  REGION 1..85: note = Description of Unknown:hvTR_Q6TV88 target sequence
IKSISKQLRVDILHHSISTRGKSSILQTIEIVLTNRTCVKIFKDSTMHIILSKDDSERGCADLVDKLFGTYAITFRVIAAITGTA

SEQ ID NO: 32093 - protein, 85 aa, unidentified
  REGION 1..85: note = Description of Unknown:hvTR_Q6TV88 target sequence
CFAEVAEASARVLALDGADAKIAAIEDMRHAYGVRNFKIGMFNLTYTGAIEHTVFPSLIPADSRIKFFKGKKLNIVAVRSTEEGR

SEQ ID NO: 32094 - protein, 84 aa, unidentified
  REGION 1..84: note = Description of Unknown:hvTR_Q6TV88 target sequence
FNLTYTGAIEHTVFPSLIPADSRIKFFKGKKLNIVAVRSTEEGRECVDQAQALLALMRERSARLEAVDVTAASVDFLKELLVSG

SEQ ID NO: 32095 - protein, 85 aa, unidentified
  REGION 1..85: note = Description of Unknown:hvTR_Q6TV88 target sequence
EVGDVYGVLRDRILGATTFEEVAPAGLGASLAKVVYCDISTTKHIVNHAAFAPRARPTRRGAALSQFFDVHVGDDACSRRTAEIF

SEQ ID NO: 32096 - protein, 85 aa, unidentified
  REGION 1..85: note = Description of Unknown:hvTR_Q6TV88 target sequence
DQERSSLVSYVKTTAKRCKIDYGEIKRTIHGGRQSYFAGRRSDDYMCTTVRTDPSKPWIKSISKQLRVDILHHSISTRGKSSILQ

SEQ ID NO: 32097 - protein, 85 aa, unidentified
  REGION 1..85: note = Description of Unknown:hvTR_Q6TV88 target sequence
TIEIVLTNRTCVKIFKDSTMHIILSKDDSERGCADLVDKLFGTYAITFRVIAAITGTACFAEVAEASARVLALDGADAKIAAIED

SEQ ID NO: 32098 - protein, 85 aa, unidentified
  REGION 1..85: note = Description of Unknown:hvTR_Q6TV88 target sequence
MRHAYGVRNFKIGMFNLTYTGAIEHTVFPSLIPADSRIKFFKGKKLNIVAVRSTEEGRECVDQAQALLALMRERSARLEAVDVTA

SEQ ID NO: 32099 - protein, 85 aa, unidentified
  REGION 1..85: note = Description of Unknown:cds_NZ_WFIY01000004.1_cds_WP_155862841.1_674 target sequence
TLSLRVDVSHKYSFENEVRMIFKILLVPEKISIATGFHYIILLDASGSMEGLKIEKAKNGAIELFKKIPQGNKVTFIKFATNVDI

SEQ ID NO: 32100 - protein, 85 aa, unidentified
  REGION 1..85: note = Description of Unknown:cds_NZ_WFIY01000004.1_cds_WP_155862841.1_674 target sequence
VKEFSDPLDLTSEVQQITSGGQTSLFTALLIAFKIAVKYNMPAYILLLTDGNPTDVTDLKAYEKMNIPKNVQIISFGIGDDYNEE

SEQ ID NO: 32101 - protein, 85 aa, unidentified
  REGION 1..85: note = Description of Unknown:cds_NZ_WFIY01000004.1_cds_WP_155862841.1_674 target sequence
LLKILSDRTGSVFYHIEEASEIPEKLPKAAKTKIAGKNIVVDIVTESSVKLLNYPSLPVKINAAEGVIKILGETIIPPKYSGNFM

SEQ ID NO: 32102 - protein, 85 aa, unidentified
  REGION 1..85: note = Description of Unknown:cds_NZ_WFIY01000004.1_cds_WP_155862841.1_674 target sequence
TIKVNYEDPAKNAQDALMHIITLKPAQDQQTFVSGINKDVIMEYEYYSTLQKYAEDVNAGNLVEATRTLKKMEELAQQTRRLEII

SEQ ID NO: 32103 - protein, 84 aa, unidentified
  REGION 1..84: note = Description of Unknown:cds_NZ_WFIY01000004.1_cds_WP_155862841.1_674 target sequence
MEYEYYSTLQKYAEDVNAGNLVEATRTLKKMEELAQQTRRLEIIETTKRLSADLETTKRISSTEQTKRLSKEVSSEVTRKLRGE

SEQ ID NO: 32104 - protein, 85 aa, unidentified
  REGION 1..85: note = Description of Unknown:cds_NZ_WFIY01000004.1_cds_WP_155862841.1_674 target sequence
PEKISIATGFHYIILLDASGSMEGLKIEKAKNGAIELFKKIPQGNKVTFIKFATNVDIVKEFSDPLDLTSEVQQITSGGQTSLFT

SEQ ID NO: 32105 - protein, 85 aa, unidentified
  REGION 1..85: note = Description of Unknown:cds_NZ_WFIY01000004.1_cds_WP_155862841.1_674 target sequence
ALLIAFKIAVKYNMPAYILLLTDGNPTDVTDLKAYEKMNIPKNVQIISFGIGDDYNEELLKILSDRTGSVFYHIEEASEIPEKLP

SEQ ID NO: 32106 - protein, 85 aa, unidentified
  REGION 1..85: note = Description of Unknown:cds_NZ_WFIY01000004.1_cds_WP_155862841.1_674 target sequence
KAAKTKIAGKNIVVDIVTESSVKLLNYPSLPVKINAAEGVIKILGETIIPPKYSGNFMTIKVNYEDPAKNAQDALMHIITLKPAQ

SEQ ID NO: 32107 - protein, 85 aa, unidentified
  REGION 1..85: note = Description of Unknown:cds_NZ_WFIY01000004.1_cds_WP_155862841.1_674 target sequence
DQQTFVSGINKDVIMEYEYYSTLQKYAEDVNAGNLVEATRTLKKMEELAQQTRRLEIIETTKRLSADLETTKRISSTEQTKRLSK

SEQ ID NO: 32108 - protein, 85 aa, unidentified
  REGION 1..85: note = Description of Unknown:cds_NZ_WFIY01000004.1_cds_WP_155863103.1_1020 target sequence
LDIILNILAFAQSANNGAAFTFELLYMLFFIVIIAISFIPGLQQQYQMMFMSKDVEKNLNIIENYLKDAKSIAEKLLKEKNFQDP

SEQ ID NO: 32109 - protein, 85 aa, unidentified
  REGION 1..85: note = Description of Unknown:cds_NZ_WFIY01000004.1_cds_WP_155863103.1_1020 target sequence
KAFLDRVIDRFVIDPVSIEPTDIINRMKLLLRTNEDTVRQMITKYSPNIDPMSRSQIEVSIEVINALNMIYKVIRHYFLLAKKLK

SEQ ID NO: 32110 - protein, 85 aa, unidentified
  REGION 1..85: note = Description of Unknown:cds_NZ_WFIY01000004.1_cds_WP_155863103.1_1020 target sequence
NLMIMYQLQAVAPIYAKLAEAYGKAQKVFLQGIPVGDGLGPLVASRFLMNINDKWSPSKDTIAGSMEFEGRKLIVVKAEGPMATV

SEQ ID NO: 32111 - protein, 85 aa, unidentified
  REGION 1..85: note = Description of Unknown:cds_NZ_WFIY01000004.1_cds_WP_155863103.1_1020 target sequence
GEPGEAVQNIVEKEGNKVARIITIDAALKLEGEETGSIAEGMGVAMGDPGPEKIAIERVAAKYNIPIDAVIVKMSMEEAITEMRK

SEQ ID NO: 32112 - protein, 84 aa, unidentified
  REGION 1..84: note = Description of Unknown:cds_NZ_WFIY01000004.1_cds_WP_155863103.1_1020 target sequence
MGVAMGDPGPEKIAIERVAAKYNIPIDAVIVKMSMEEAITEMRKEVYEAADKVVNYVKNIILERTKPGDTVVLVGVGNTVGIAQ

SEQ ID NO: 32113 - protein, 85 aa, unidentified
  REGION 1..85: note = Description of Unknown:cds_NZ_WFIY01000004.1_cds_WP_155863103.1_1020 target sequence
LFFIVIIAISFIPGLQQQYQMMFMSKDVEKNLNIIENYLKDAKSIAEKLLKEKNFQDPKAFLDRVIDRFVIDPVSIEPTDIINRM

SEQ ID NO: 32114 - protein, 85 aa, unidentified
  REGION 1..85: note = Description of Unknown:cds_NZ_WFIY01000004.1_cds_WP_155863103.1_1020 target sequence
KLLLRTNEDTVRQMITKYSPNIDPMSRSQIEVSIEVINALNMIYKVIRHYFLLAKKLKNLMIMYQLQAVAPIYAKLAEAYGKAQK

SEQ ID NO: 32115 - protein, 85 aa, unidentified
  REGION 1..85: note = Description of Unknown:cds_NZ_WFIY01000004.1_cds_WP_155863103.1_1020 target sequence
VFLQGIPVGDGLGPLVASRFLMNINDKWSPSKDTIAGSMEFEGRKLIVVKAEGPMATVGEPGEAVQNIVEKEGNKVARIITIDAA

SEQ ID NO: 32116 - protein, 85 aa, unidentified
  REGION 1..85: note = Description of Unknown:cds_NZ_WFIY01000004.1_cds_WP_155863103.1_1020 target sequence
LKLEGEETGSIAEGMGVAMGDPGPEKIAIERVAAKYNIPIDAVIVKMSMEEAITEMRKEVYEAADKVVNYVKNIILERTKPGDTV

SEQ ID NO: 32117 - protein, 85 aa, unidentified
  REGION 1..85: note = Description of Unknown:cds_NC_035460.1_cds_YP_009408002.1_51 target sequence
NNFIKQAASKLLKPTIKLIQKNENKSYKECIISFDFEDFYYCNNIIFNKNLNTVDDVIKSWTILNSFTYEKYILKGLIKIIKKYS

SEQ ID NO: 32118 - protein, 85 aa, unidentified
  REGION 1..85: note = Description of Unknown:cds_NC_035460.1_cds_YP_009408002.1_51 target sequence
YINDIYFLPIGWLTGTGEIPTSHVVIKVLLTDYFSHFKNKIKEYLTSYSVLNLIIQTDKESVLKTFMFPDILPMALITLYPFDVE

SEQ ID NO: 32119 - protein, 85 aa, unidentified
  REGION 1..85: note = Description of Unknown:cds_NC_035460.1_cds_YP_009408002.1_51 target sequence
YILIVLFFGTCDESYCGITYITSKDMLSTVIEILKPITTEINVICDDITKTFTVKYSDSSQVEKFPSTTLIPICEIITPFNNDKF

SEQ ID NO: 32120 - protein, 85 aa, unidentified
  REGION 1..85: note = Description of Unknown:cds_NC_035460.1_cds_YP_009408002.1_51 target sequence
FIPQKIQPVNISTYISKKIVSLIDLPSYVDIKCISKNGVDYITHINTKKLKTVLIIAKDDFLKDVIFSGTFKKENLIWKGAYTYR

SEQ ID NO: 32121 - protein, 84 aa, unidentified
  REGION 1..84: note = Description of Unknown:cds_NC_035460.1_cds_YP_009408002.1_51 target sequence
ITHINTKKLKTVLIIAKDDFLKDVIFSGTFKKENLIWKGAYTYRIIESNFIVPELKVSNKGKRYVKKYTYNNSTFTTKTGSYIV

SEQ ID NO: 32122 - protein, 85 aa, unidentified
  REGION 1..85: note = Description of Unknown:cds_NC_035460.1_cds_YP_009408002.1_51 target sequence
KECIISFDFEDFYYCNNIIFNKNLNTVDDVIKSWTILNSFTYEKYILKGLIKIIKKYSYINDIYFLPIGWLTGTGEIPTSHVVIK

SEQ ID NO: 32123 - protein, 85 aa, unidentified
  REGION 1..85: note = Description of Unknown:cds_NC_035460.1_cds_YP_009408002.1_51 target sequence
VLLTDYFSHFKNKIKEYLTSYSVLNLIIQTDKESVLKTFMFPDILPMALITLYPFDVEYILIVLFFGTCDESYCGITYITSKDML

SEQ ID NO: 32124 - protein, 85 aa, unidentified
  REGION 1..85: note = Description of Unknown:cds_NC_035460.1_cds_YP_009408002.1_51 target sequence
STVIEILKPITTEINVICDDITKTFTVKYSDSSQVEKFPSTTLIPICEIITPFNNDKFFIPQKIQPVNISTYISKKIVSLIDLPS

SEQ ID NO: 32125 - protein, 85 aa, unidentified
  REGION 1..85: note = Description of Unknown:cds_NC_035460.1_cds_YP_009408002.1_51 target sequence
YVDIKCISKNGVDYITHINTKKLKTVLIIAKDDFLKDVIFSGTFKKENLIWKGAYTYRIIESNFIVPELKVSNKGKRYVKKYTYN

SEQ ID NO: 32126 - protein, 85 aa, unidentified
  REGION 1..85: note = Description of Unknown:cds_NC_030656.1_cds_YP_009268767.1_52 target sequence
NQFVKHSASNIKKPTKLLTFQSNLSMKQCTVNFNFLAFYYNNELIFTKQTNTLDDVAKSLLILNSFKYEHQILKKIIKSIRDLPS

SEQ ID NO: 32127 - protein, 85 aa, unidentified
  REGION 1..85: note = Description of Unknown:cds_NC_030656.1_cds_YP_009268767.1_52 target sequence
AYISDFYFTPIGWLAGVGDRQSTHAAIRFVYQGNAVTVEKKIREILSKYAVNQISFSHITSELVLPVVEAPATAPTSVITFYPLD

SEQ ID NO: 32128 - protein, 85 aa, unidentified
  REGION 1..85: note = Description of Unknown:cds_NC_030656.1_cds_YP_009268767.1_52 target sequence
PKYAIAILFFGRVEDFHCGIIYTFSKDYLADVVAYIRRISTSVHIINDEIGKFSTVTLSGNKEGMANIPAQITALCEIEHEFDTS

SEQ ID NO: 32129 - protein, 85 aa, unidentified
  REGION 1..85: note = Description of Unknown:cds_NC_030656.1_cds_YP_009268767.1_52 target sequence
NLYHVAPTVDASTLIPKKIINILDLPSNVEIRCVHKNYMDIITHIGGKKLDIILVIAKDKFLRDVVFEGTFEKENVIWRNKYTYR

SEQ ID NO: 32130 - protein, 84 aa, unidentified
  REGION 1..84: note = Description of Unknown:cds_NC_030656.1_cds_YP_009268767.1_52 target sequence
ITHIGGKKLDIILVIAKDKFLRDVVFEGTFEKENVIWRNKYTYRITKSSFNAPTLKATKSRNKPQSNFSVVPLNFKTKALTYII

SEQ ID NO: 32131 - protein, 85 aa, unidentified
  REGION 1..85: note = Description of Unknown:cds_NC_030656.1_cds_YP_009268767.1_52 target sequence
QCTVNFNFLAFYYNNELIFTKQTNTLDDVAKSLLILNSFKYEHQILKKIIKSIRDLPSAYISDFYFTPIGWLAGVGDRQSTHAAI

SEQ ID NO: 32132 - protein, 85 aa, unidentified
  REGION 1..85: note = Description of Unknown:cds_NC_030656.1_cds_YP_009268767.1_52 target sequence
RFVYQGNAVTVEKKIREILSKYAVNQISFSHITSELVLPVVEAPATAPTSVITFYPLDPKYAIAILFFGRVEDFHCGIIYTFSKD

SEQ ID NO: 32133 - protein, 85 aa, unidentified
  REGION 1..85: note = Description of Unknown:cds_NC_030656.1_cds_YP_009268767.1_52 target sequence
YLADVVAYIRRISTSVHIINDEIGKFSTVTLSGNKEGMANIPAQITALCEIEHEFDTSNLYHVAPTVDASTLIPKKIINILDLPS

SEQ ID NO: 32134 - protein, 85 aa, unidentified
  REGION 1..85: note = Description of Unknown:cds_NC_030656.1_cds_YP_009268767.1_52 target sequence
NVEIRCVHKNYMDIITHIGGKKLDIILVIAKDKFLRDVVFEGTFEKENVIWRNKYTYRITKSSFNAPTLKATKSRNKPQSNFSVV

SEQ ID NO: 32135 - protein, 85 aa, unidentified
  REGION 1..85: note = Description of Unknown:cds_NC_030656.1_cds_YP_009268792.1_77 target sequence
AQRLRPNLKDDPPSPEKYYAFVIPIVDRKATEVFPTLTYLFDGDSTPDDRTTNIYKNVNQGHNFKCLNEGSNSLGADPPTPQPQP

SEQ ID NO: 32136 - protein, 85 aa, unidentified
  REGION 1..85: note = Description of Unknown:cds_NC_030656.1_cds_YP_009268792.1_77 target sequence
QPQPQPTPTPPSPSGDHVITVTLWHVTKDDLEHDKDYPHFFSNSCKALCANETKYRLTQHFSLWEHYVNEIDKSKQQKTPPPPDP

SEQ ID NO: 32137 - protein, 85 aa, unidentified
  REGION 1..85: note = Description of Unknown:cds_NC_030656.1_cds_YP_009268792.1_77 target sequence
ENEFVIIVEDDNTVLKPELLKPLIMAMKSQKIDIIQFGDTVTAPGLSPINLTLLVQNPPIYGYVGGIDFSLSAYIVRLSALYGIY

SEQ ID NO: 32138 - protein, 85 aa, unidentified
  REGION 1..85: note = Description of Unknown:cds_NC_030656.1_cds_YP_009268792.1_77 target sequence
KNIINTGGSSAGLSFEISKIESELNLTRYVVSNPSEILRHEPYYVIQKRLGGMSGCFWQKLGLWLSKWYPKLVYFSTTPIFSIMG

SEQ ID NO: 32139 - protein, 84 aa, unidentified
  REGION 1..84: note = Description of Unknown:cds_NC_030656.1_cds_YP_009268792.1_77 target sequence
PYYVIQKRLGGMSGCFWQKLGLWLSKWYPKLVYFSTTPIFSIMGLFDVNVVDIIILIYIAFLIIFYVRSPFLWFIAGLLLTAII

SEQ ID NO: 32140 - protein, 85 aa, unidentified
  REGION 1..85: note = Description of Unknown:cds_NC_030656.1_cds_YP_009268792.1_77 target sequence
RKATEVFPTLTYLFDGDSTPDDRTTNIYKNVNQGHNFKCLNEGSNSLGADPPTPQPQPQPQPQPTPTPPSPSGDHVITVTLWHVT

SEQ ID NO: 32141 - protein, 85 aa, unidentified
  REGION 1..85: note = Description of Unknown:cds_NC_030656.1_cds_YP_009268792.1_77 target sequence
KDDLEHDKDYPHFFSNSCKALCANETKYRLTQHFSLWEHYVNEIDKSKQQKTPPPPDPENEFVIIVEDDNTVLKPELLKPLIMAM

SEQ ID NO: 32142 - protein, 85 aa, unidentified
  REGION 1..85: note = Description of Unknown:cds_NC_030656.1_cds_YP_009268792.1_77 target sequence
KSQKIDIIQFGDTVTAPGLSPINLTLLVQNPPIYGYVGGIDFSLSAYIVRLSALYGIYKNIINTGGSSAGLSFEISKIESELNLT

SEQ ID NO: 32143 - protein, 85 aa, unidentified
  REGION 1..85: note = Description of Unknown:cds_NC_030656.1_cds_YP_009268792.1_77 target sequence
RYVVSNPSEILRHEPYYVIQKRLGGMSGCFWQKLGLWLSKWYPKLVYFSTTPIFSIMGLFDVNVVDIIILIYIAFLIIFYVRSPF

SEQ ID NO: 32144 - protein, 85 aa, unidentified
  REGION 1..85: note = Description of Unknown:hvTR_Q6TVM0 target sequence
LALFEFLRSVEDCYRRTIFNFHIAHSAEAGDVYGVLRDRILAATRFEEVAPPGLADALAKVVYCDISTTKHLVNHAAFAARARSA

SEQ ID NO: 32145 - protein, 85 aa, unidentified
  REGION 1..85: note = Description of Unknown:hvTR_Q6TVM0 target sequence
RRGGSLAQFFDVHVGEDAESRRTAEIFDRERSSLVSYVKTTAKRCKIDYGEIKRTIHGGRQTYFSGRRSDDFLSTTVRADPSKPW

SEQ ID NO: 32146 - protein, 85 aa, unidentified
  REGION 1..85: note = Description of Unknown:hvTR_Q6TVM0 target sequence
IKSISKQLRVDILHHAICTRGKSSILQTIEVVLTNRTCVKIFKDSTMHIILSKDDRERGLADLADKLFGTYATTFRVIAAITGNA

SEQ ID NO: 32147 - protein, 85 aa, unidentified
  REGION 1..85: note = Description of Unknown:hvTR_Q6TVM0 target sequence
CFAAVADAAARVVALPDADAKLEAVRGLADCYGVRNFKIGMFNLTFTGAIEHTVFPSLIPAESKIKFFKGKKLNIVAVRSTEEGR

SEQ ID NO: 32148 - protein, 84 aa, unidentified
  REGION 1..84: note = Description of Unknown:hvTR_Q6TVM0 target sequence
MFNLTFTGAIEHTVFPSLIPAESKIKFFKGKKLNIVAVRSTEEGRECVEQAQALLAAMRERSARLAAADVATASVDFLKELLGA

SEQ ID NO: 32149 - protein, 85 aa, unidentified
  REGION 1..85: note = Description of Unknown:hvTR_Q6TVM0 target sequence
EAGDVYGVLRDRILAATRFEEVAPPGLADALAKVVYCDISTTKHLVNHAAFAARARSARRGGSLAQFFDVHVGEDAESRRTAEIF

SEQ ID NO: 32150 - protein, 85 aa, unidentified
  REGION 1..85: note = Description of Unknown:hvTR_Q6TVM0 target sequence
DRERSSLVSYVKTTAKRCKIDYGEIKRTIHGGRQTYFSGRRSDDFLSTTVRADPSKPWIKSISKQLRVDILHHAICTRGKSSILQ

SEQ ID NO: 32151 - protein, 85 aa, unidentified
  REGION 1..85: note = Description of Unknown:hvTR_Q6TVM0 target sequence
TIEVVLTNRTCVKIFKDSTMHIILSKDDRERGLADLADKLFGTYATTFRVIAAITGNACFAAVADAAARVVALPDADAKLEAVRG

SEQ ID NO: 32152 - protein, 85 aa, unidentified
  REGION 1..85: note = Description of Unknown:hvTR_Q6TVM0 target sequence
LADCYGVRNFKIGMFNLTFTGAIEHTVFPSLIPAESKIKFFKGKKLNIVAVRSTEEGRECVEQAQALLAAMRERSARLAAADVAT

SEQ ID NO: 32153 - protein, 85 aa, unidentified
  REGION 1..85: note = Description of Unknown:hvTR_D3IZP8 target sequence
LALFEFLRSVEDCYRRTIFNFHIAHSAEAGDVYGVLRDRILAATRFEEVAPPGLADALAKVVYCDISTTKHLVNPAAFAERARPA

SEQ ID NO: 32154 - protein, 85 aa, unidentified
  REGION 1..85: note = Description of Unknown:hvTR_D3IZP8 target sequence
RRGGNLAQFFDVHVGDDAESRRTAEIFDRERSSLISYVKTTAKRCKIDYGEIKRTIHGGRQTYFSGRRSDDFLSTTVRADPSKPW

SEQ ID NO: 32155 - protein, 85 aa, unidentified
  REGION 1..85: note = Description of Unknown:hvTR_D3IZP8 target sequence
IKSISKQLRVDILHHAICTRGKSSILQTIEIVLTNRTCVKIFKDSTMHIILSKDERERGLADLADKLFGTYATTFRVIAAITGTA

SEQ ID NO: 32156 - protein, 85 aa, unidentified
  REGION 1..85: note = Description of Unknown:hvTR_D3IZP8 target sequence
CFAAVADAAARVVALPDADAKLAAVRGLADCYGVRNFKIGMFNLTFTGAIAHTVFPSLIPAESKIKFFKGKKLNIVAVRSTEEGR

SEQ ID NO: 32157 - protein, 84 aa, unidentified
  REGION 1..84: note = Description of Unknown:hvTR_D3IZP8 target sequence
MFNLTFTGAIAHTVFPSLIPAESKIKFFKGKKLNIVAVRSTEEGRECVEQAQALLAAMRERSARLAAADVATASVDFLKELLGP

SEQ ID NO: 32158 - protein, 85 aa, unidentified
  REGION 1..85: note = Description of Unknown:hvTR_D3IZP8 target sequence
EAGDVYGVLRDRILAATRFEEVAPPGLADALAKVVYCDISTTKHLVNPAAFAERARPARRGGNLAQFFDVHVGDDAESRRTAEIF

SEQ ID NO: 32159 - protein, 85 aa, unidentified
  REGION 1..85: note = Description of Unknown:hvTR_D3IZP8 target sequence
DRERSSLISYVKTTAKRCKIDYGEIKRTIHGGRQTYFSGRRSDDFLSTTVRADPSKPWIKSISKQLRVDILHHAICTRGKSSILQ

SEQ ID NO: 32160 - protein, 85 aa, unidentified
  REGION 1..85: note = Description of Unknown:hvTR_D3IZP8 target sequence
TIEIVLTNRTCVKIFKDSTMHIILSKDERERGLADLADKLFGTYATTFRVIAAITGTACFAAVADAAARVVALPDADAKLAAVRG

SEQ ID NO: 32161 - protein, 85 aa, unidentified
  REGION 1..85: note = Description of Unknown:hvTR_D3IZP8 target sequence
LADCYGVRNFKIGMFNLTFTGAIAHTVFPSLIPAESKIKFFKGKKLNIVAVRSTEEGRECVEQAQALLAAMRERSARLAAADVAT

SEQ ID NO: 32162 - protein, 85 aa, unidentified
  REGION 1..85: note = Description of Unknown:cds_NZ_WFIY01000004.1_cds_WP_155862788.1_604 target sequence
KRIIIAGGGIAGTIVANRLARQLSPELEKGEVEIIVINASDRHIYQPGQLLIPFGVTDTGEIIRDEKELLDPKIRLIIKEISKID

SEQ ID NO: 32163 - protein, 85 aa, unidentified
  REGION 1..85: note = Description of Unknown:cds_NZ_WFIY01000004.1_cds_WP_155862788.1_604 target sequence
VQNHSVITADGTAYNYDELVIATGSHLQWDEVPGYRAVYSPWDLESAQKLREVLQSFTGGTVVINVAKLPHKCPVAPMELTLMLD

SEQ ID NO: 32164 - protein, 85 aa, unidentified
  REGION 1..85: note = Description of Unknown:cds_NZ_WFIY01000004.1_cds_WP_155862788.1_604 target sequence
DYLRRRGLREKTEIIYTYPVPGVFGIKTTNDVMIKIFEQRGIKVISPFNVTRVNPEEKTIESQEGEKIKFDLALGVPPHKGAKVI

SEQ ID NO: 32165 - protein, 85 aa, unidentified
  REGION 1..85: note = Description of Unknown:cds_NZ_WFIY01000004.1_cds_WP_155862788.1_604 target sequence
EDSGIGDRRNWVPTDKFTLRMKDHSDVYVIGDTTDLPISKAGSTADFESYVVAGNIVNDIRGNNSTKLFDGSVFCYIATGLDSGT

SEQ ID NO: 32166 - protein, 84 aa, unidentified
  REGION 1..84: note = Description of Unknown:cds_NZ_WFIY01000004.1_cds_WP_155862788.1_604 target sequence
AGSTADFESYVVAGNIVNDIRGNNSTKLFDGSVFCYIATGLDSGTYIRFNYNYPPVPPPPSYVHWWGKLLYNKLYWTVTAKAIV

SEQ ID NO: 32167 - protein, 85 aa, unidentified
  REGION 1..85: note = Description of Unknown:cds_NZ_WFIY01000004.1_cds_WP_155862788.1_604 target sequence
EKGEVEIIVINASDRHIYQPGQLLIPFGVTDTGEIIRDEKELLDPKIRLIIKEISKIDVQNHSVITADGTAYNYDELVIATGSHL

SEQ ID NO: 32168 - protein, 85 aa, unidentified
  REGION 1..85: note = Description of Unknown:cds_NZ_WFIY01000004.1_cds_WP_155862788.1_604 target sequence
QWDEVPGYRAVYSPWDLESAQKLREVLQSFTGGTVVINVAKLPHKCPVAPMELTLMLDDYLRRRGLREKTEIIYTYPVPGVFGIK

SEQ ID NO: 32169 - protein, 85 aa, unidentified
  REGION 1..85: note = Description of Unknown:cds_NZ_WFIY01000004.1_cds_WP_155862788.1_604 target sequence
TTNDVMIKIFEQRGIKVISPFNVTRVNPEEKTIESQEGEKIKFDLALGVPPHKGAKVIEDSGIGDRRNWVPTDKFTLRMKDHSDV

SEQ ID NO: 32170 - protein, 85 aa, unidentified
  REGION 1..85: note = Description of Unknown:cds_NZ_WFIY01000004.1_cds_WP_155862788.1_604 target sequence
YVIGDTTDLPISKAGSTADFESYVVAGNIVNDIRGNNSTKLFDGSVFCYIATGLDSGTYIRFNYNYPPVPPPPSYVHWWGKLLYN

SEQ ID NO: 32171 - protein, 85 aa, unidentified
  REGION 1..85: note = Description of Unknown:cds_NZ_WFIY01000004.1_cds_625 target sequence
VSSNFSVTPWEVKGKVDYDKLIVQFGTQKITPELKERIKKITGDLHVMLRRDVFFSHRDLDLVLKDYEEGKGFFLYTGRAPSLGM

SEQ ID NO: 32172 - protein, 85 aa, unidentified
  REGION 1..85: note = Description of Unknown:cds_NZ_WFIY01000004.1_cds_625 target sequence
HIGHLVPFIFTKWLQEKFKVNLYIEITDDEKFMRNPELTLEQTRQFAYDNILDIIAVGFDPDRTFIFQDTEYIRNMYPLATKIAK

SEQ ID NO: 32173 - protein, 85 aa, unidentified
  REGION 1..85: note = Description of Unknown:cds_NZ_WFIY01000004.1_cds_625 target sequence
KLTFSEVKATFGLENSSNIGIIFYPALQIAPTMFEKKRCLIPAGIDQDPYWRLQRDIAESLGYYKAAQIHSKFLPPLTGPEGKMS

SEQ ID NO: 32174 - protein, 85 aa, unidentified
  REGION 1..85: note = Description of Unknown:cds_NZ_WFIY01000004.1_cds_625 target sequence
SSIPESAIYLTDDPKTVERKIMKYAFSGGQPTVELHRKYGGNPEIDVSFQWLYMFFEEDDNKIKKIEEDYRSGKMLTGELKQILI

SEQ ID NO: 32175 - protein, 84 aa, unidentified
  REGION 1..84: note = Description of Unknown:cds_NZ_WFIY01000004.1_cds_625 target sequence
NPEIDVSFQWLYMFFEEDDNKIKKIEEDYRSGKMLTGELKQILIDKLNKFLEEHRAKREEAKELVNTFKYEGKLAKEMWNKIHE

SEQ ID NO: 32176 - protein, 85 aa, unidentified
  REGION 1..85: note = Description of Unknown:cds_NZ_WFIY01000004.1_cds_625 target sequence
QKITPELKERIKKITGDLHVMLRRDVFFSHRDLDLVLKDYEEGKGFFLYTGRAPSLGMHIGHLVPFIFTKWLQEKFKVNLYIEIT

SEQ ID NO: 32177 - protein, 85 aa, unidentified
  REGION 1..85: note = Description of Unknown:cds_NZ_WFIY01000004.1_cds_625 target sequence
DDEKFMRNPELTLEQTRQFAYDNILDIIAVGFDPDRTFIFQDTEYIRNMYPLATKIAKKLTFSEVKATFGLENSSNIGIIFYPAL

SEQ ID NO: 32178 - protein, 85 aa, unidentified
  REGION 1..85: note = Description of Unknown:cds_NZ_WFIY01000004.1_cds_625 target sequence
QIAPTMFEKKRCLIPAGIDQDPYWRLQRDIAESLGYYKAAQIHSKFLPPLTGPEGKMSSSIPESAIYLTDDPKTVERKIMKYAFS

SEQ ID NO: 32179 - protein, 85 aa, unidentified
  REGION 1..85: note = Description of Unknown:cds_NZ_WFIY01000004.1_cds_625 target sequence
GGQPTVELHRKYGGNPEIDVSFQWLYMFFEEDDNKIKKIEEDYRSGKMLTGELKQILIDKLNKFLEEHRAKREEAKELVNTFKYE

SEQ ID NO: 32180 - protein, 85 aa, unidentified
  REGION 1..85: note = Description of Unknown:cds_NZ_WFIY01000004.1_cds_WP_155863120.1_1039 target sequence
GCKVTISQVDDVLNYTVEEPTLTLEEEKALKSQVQLPQNSIEKINYYREKMEKFGNLTCLMLDKNVEEIECIDISKPLNVKIKGL

SEQ ID NO: 32181 - protein, 85 aa, unidentified
  REGION 1..85: note = Description of Unknown:cds_NZ_WFIY01000004.1_cds_WP_155863120.1_1039 target sequence
GRATTNIKVSRDEILDIFSKFMDSKNYRRIGEFIIIENDKFRGIIKVKEDINFNIIKNDNYSESITELISEGYLNKYSATYLWHI

SEQ ID NO: 32182 - protein, 85 aa, unidentified
  REGION 1..85: note = Description of Unknown:cds_NZ_WFIY01000004.1_cds_WP_155863120.1_1039 target sequence
IENSGIIIINGNKRIANSLAFSLVNLVYNKFNKIVVVSKSKIRKLNELIILNGVKNLDIIDYYNPDLVLFDYVNSDVITKIIDLN

SEQ ID NO: 32183 - protein, 85 aa, unidentified
  REGION 1..85: note = Description of Unknown:cds_NZ_WFIY01000004.1_cds_WP_155863120.1_1039 target sequence
IQNKGVIVLSGFPDNTTFLSSLLKFQLLSLSKLPTVLVEIIGNYVNIHELYSTRTKVRVRKVCKKGIMNKKEFNYSIILKNKINT

SEQ ID NO: 32184 - protein, 84 aa, unidentified
  REGION 1..84: note = Description of Unknown:cds_NZ_WFIY01000004.1_cds_WP_155863120.1_1039 target sequence
IGNYVNIHELYSTRTKVRVRKVCKKGIMNKKEFNYSIILKNKINTNNLDLKISIIENLTNNNILDKYEIREKVAKIGEKIEPEI

SEQ ID NO: 32185 - protein, 85 aa, unidentified
  REGION 1..85: note = Description of Unknown:cds_NZ_WFIY01000004.1_cds_WP_155863120.1_1039 target sequence
KALKSQVQLPQNSIEKINYYREKMEKFGNLTCLMLDKNVEEIECIDISKPLNVKIKGLGRATTNIKVSRDEILDIFSKFMDSKNY

SEQ ID NO: 32186 - protein, 85 aa, unidentified
  REGION 1..85: note = Description of Unknown:cds_NZ_WFIY01000004.1_cds_WP_155863120.1_1039 target sequence
RRIGEFIIIENDKFRGIIKVKEDINFNIIKNDNYSESITELISEGYLNKYSATYLWHIIENSGIIIINGNKRIANSLAFSLVNLV

SEQ ID NO: 32187 - protein, 85 aa, unidentified
  REGION 1..85: note = Description of Unknown:cds_NZ_WFIY01000004.1_cds_WP_155863120.1_1039 target sequence
YNKFNKIVVVSKSKIRKLNELIILNGVKNLDIIDYYNPDLVLFDYVNSDVITKIIDLNIQNKGVIVLSGFPDNTTFLSSLLKFQL

SEQ ID NO: 32188 - protein, 85 aa, unidentified
  REGION 1..85: note = Description of Unknown:cds_NZ_WFIY01000004.1_cds_WP_155863120.1_1039 target sequence
LSLSKLPTVLVEIIGNYVNIHELYSTRTKVRVRKVCKKGIMNKKEFNYSIILKNKINTNNLDLKISIIENLTNNNILDKYEIREK

SEQ ID NO: 32189 - protein, 85 aa, unidentified
  REGION 1..85: note = Description of Unknown:cds_NZ_WFIY01000004.1_cds_WP_155863976.1_1900 target sequence
EIEGIADLPLHTGHVPPWLIPIMRRLSRAILDIMLIEWGPQKVVERLSNPLWFQAFNNVIGMDWDSSGSTTVTLGILKEVVNPKE

SEQ ID NO: 32190 - protein, 85 aa, unidentified
  REGION 1..85: note = Description of Unknown:cds_NZ_WFIY01000004.1_cds_WP_155863976.1_1900 target sequence
DGLAVLGGKGKNALKVPEELHSLNFDIDADKLANISRLVAKVDTTLVQDGHQLYHHSMLVTEKGYWGIIQQGMNEETKFARRYHW

SEQ ID NO: 32191 - protein, 85 aa, unidentified
  REGION 1..85: note = Description of Unknown:cds_NZ_WFIY01000004.1_cds_WP_155863976.1_1900 target sequence
KNTENFTVDPHEAIAGKKGIAVNIIEKQKENTRKLVLDLLRQDPRKIINELQQAKAILKGQATIESWINGASFVGISKEAKIIYM

SEQ ID NO: 32192 - protein, 85 aa, unidentified
  REGION 1..85: note = Description of Unknown:cds_NZ_WFIY01000004.1_cds_WP_155863976.1_1900 target sequence
RPLDERKIKPILEKLYESNPENLEGALLEGLGPSTARALYLISDLIYREPPSYNDPVNMPYDPFKYAYAIGGKDGIPYPVNRRVA

SEQ ID NO: 32193 - protein, 84 aa, unidentified
  REGION 1..84: note = Description of Unknown:cds_NZ_WFIY01000004.1_cds_WP_155863976.1_1900 target sequence
LISDLIYREPPSYNDPVNMPYDPFKYAYAIGGKDGIPYPVNRRVAEEVIITLEDIIQKAKLESNEKKFSLNKLRGLSIGIKEGS

SEQ ID NO: 32194 - protein, 85 aa, unidentified
  REGION 1..85: note = Description of Unknown:cds_NZ_WFIY01000004.1_cds_WP_155863976.1_1900 target sequence
RAILDIMLIEWGPQKVVERLSNPLWFQAFNNVIGMDWDSSGSTTVTLGILKEVVNPKEDGLAVLGGKGKNALKVPEELHSLNFDI

SEQ ID NO: 32195 - protein, 85 aa, unidentified
  REGION 1..85: note = Description of Unknown:cds_NZ_WFIY01000004.1_cds_WP_155863976.1_1900 target sequence
DADKLANISRLVAKVDTTLVQDGHQLYHHSMLVTEKGYWGIIQQGMNEETKFARRYHWKNTENFTVDPHEAIAGKKGIAVNIIEK

SEQ ID NO: 32196 - protein, 85 aa, unidentified
  REGION 1..85: note = Description of Unknown:cds_NZ_WFIY01000004.1_cds_WP_155863976.1_1900 target sequence
QKENTRKLVLDLLRQDPRKIINELQQAKAILKGQATIESWINGASFVGISKEAKIIYMRPLDERKIKPILEKLYESNPENLEGAL

SEQ ID NO: 32197 - protein, 85 aa, unidentified
  REGION 1..85: note = Description of Unknown:cds_NZ_WFIY01000004.1_cds_WP_155863976.1_1900 target sequence
LEGLGPSTARALYLISDLIYREPPSYNDPVNMPYDPFKYAYAIGGKDGIPYPVNRRVAEEVIITLEDIIQKAKLESNEKKFSLNK

SEQ ID NO: 32198 - protein, 85 aa, unidentified
  REGION 1..85: note = Description of Unknown:cds_NC_035460.1_cds_YP_009408064.1_113 target sequence
GNAVVTGINIATYTADKSIKYMYLDFNYPQYNKRISFYEENKVYNDESQTVIEPKFCLEKGQPIEQCGLFLSDMLSKKYVLTNGL

SEQ ID NO: 32199 - protein, 85 aa, unidentified
  REGION 1..85: note = Description of Unknown:cds_NC_035460.1_cds_YP_009408064.1_113 target sequence
PCRTFKFRPGSLIIYDKNITEKYLDSSLPSSASQYIGKGHRCKFVKRDFMAMDSDVIRCCTTSNKQNCPNILNNNYETENCDNIM

SEQ ID NO: 32200 - protein, 85 aa, unidentified
  REGION 1..85: note = Description of Unknown:cds_NC_035460.1_cds_YP_009408064.1_113 target sequence
SKFCKSNPDNINCLEWLRTNRKIALSTYADICSKHMDQRYCSEFIRVVRPDNYTFGDTALLNFCKNHRGNRNCWCVFQPNSQLDT

SEQ ID NO: 32201 - protein, 85 aa, unidentified
  REGION 1..85: note = Description of Unknown:cds_NC_035460.1_cds_YP_009408064.1_113 target sequence
DINGRYLGPKVCWLHECTDETRDRKWLLFDQDVQRSRCKYIGCSININSLILKNSNANLIADCSGNKVNMGDINPGTPMFKTQLN

SEQ ID NO: 32202 - protein, 84 aa, unidentified
  REGION 1..84: note = Description of Unknown:cds_NC_035460.1_cds_YP_009408064.1_113 target sequence
IGCSININSLILKNSNANLIADCSGNKVNMGDINPGTPMFKTQLNIPELPSFLIVFFILSILFYFISIYGRNKIKTNVINVHRR

SEQ ID NO: 32203 - protein, 85 aa, unidentified
  REGION 1..85: note = Description of Unknown:cds_NC_035460.1_cds_YP_009408064.1_113 target sequence
YPQYNKRISFYEENKVYNDESQTVIEPKFCLEKGQPIEQCGLFLSDMLSKKYVLTNGLPCRTFKFRPGSLIIYDKNITEKYLDSS

SEQ ID NO: 32204 - protein, 85 aa, unidentified
  REGION 1..85: note = Description of Unknown:cds_NC_035460.1_cds_YP_009408064.1_113 target sequence
LPSSASQYIGKGHRCKFVKRDFMAMDSDVIRCCTTSNKQNCPNILNNNYETENCDNIMSKFCKSNPDNINCLEWLRTNRKIALST

SEQ ID NO: 32205 - protein, 85 aa, unidentified
  REGION 1..85: note = Description of Unknown:cds_NC_035460.1_cds_YP_009408064.1_113 target sequence
YADICSKHMDQRYCSEFIRVVRPDNYTFGDTALLNFCKNHRGNRNCWCVFQPNSQLDTDINGRYLGPKVCWLHECTDETRDRKWL

SEQ ID NO: 32206 - protein, 85 aa, unidentified
  REGION 1..85: note = Description of Unknown:cds_NC_035460.1_cds_YP_009408064.1_113 target sequence
LFDQDVQRSRCKYIGCSININSLILKNSNANLIADCSGNKVNMGDINPGTPMFKTQLNIPELPSFLIVFFILSILFYFISIYGRN

SEQ ID NO: 32207 - protein, 85 aa, unidentified
  REGION 1..85: note = Description of Unknown:cds_NZ_WFIY01000004.1_cds_WP_155862457.1_209 target sequence
RLVEIKEGKARIFIPDPKEYEKNGKFDPSWAPVFYNPRMTFNRDISVIAVSVISPKSIIDALAASGIRGIRYYLESNSPIEEIIF

SEQ ID NO: 32208 - protein, 85 aa, unidentified
  REGION 1..85: note = Description of Unknown:cds_NZ_WFIY01000004.1_cds_WP_155862457.1_209 target sequence
NDKSKVAVDLIRKNVEVNGVKVAKITNRDANSLLYEVITDYVDIDPFGSPSPFILSSVNAVKNGGHVAYTATDLAPLEGSAKKSC

SEQ ID NO: 32209 - protein, 85 aa, unidentified
  REGION 1..85: note = Description of Unknown:cds_NZ_WFIY01000004.1_cds_WP_155862457.1_209 target sequence
KRKYDVNNSKLSFSKEVGIRVLLSKIVREAAILEKAVEPIFAFYNDYYYRLIIRVTRGAKKADESIEKLGYFYECEKCGFSGSSK

SEQ ID NO: 32210 - protein, 85 aa, unidentified
  REGION 1..85: note = Description of Unknown:cds_NZ_WFIY01000004.1_cds_WP_155862457.1_209 target sequence
DPIEKCPRCGNKVKISGPVWLGKINDDSFVHKMMDYLQNFSYIKNFEAISILLHKILQENKYPPGYYNLEFIASKYKINVPAREK

SEQ ID NO: 32211 - protein, 84 aa, unidentified
  REGION 1..84: note = Description of Unknown:cds_NZ_WFIY01000004.1_cds_WP_155862457.1_209 target sequence
FSYIKNFEAISILLHKILQENKYPPGYYNLEFIASKYKINVPAREKIIECLGEASQTHFSSKGIKTSKSFDEILECMKTLANKV

SEQ ID NO: 32212 - protein, 85 aa, unidentified
  REGION 1..85: note = Description of Unknown:cds_NZ_WFIY01000004.1_cds_WP_155862457.1_209 target sequence
PSWAPVFYNPRMTFNRDISVIAVSVISPKSIIDALAASGIRGIRYYLESNSPIEEIIFNDKSKVAVDLIRKNVEVNGVKVAKITN

SEQ ID NO: 32213 - protein, 85 aa, unidentified
  REGION 1..85: note = Description of Unknown:cds_NZ_WFIY01000004.1_cds_WP_155862457.1_209 target sequence
RDANSLLYEVITDYVDIDPFGSPSPFILSSVNAVKNGGHVAYTATDLAPLEGSAKKSCKRKYDVNNSKLSFSKEVGIRVLLSKIV

SEQ ID NO: 32214 - protein, 85 aa, unidentified
  REGION 1..85: note = Description of Unknown:cds_NZ_WFIY01000004.1_cds_WP_155862457.1_209 target sequence
REAAILEKAVEPIFAFYNDYYYRLIIRVTRGAKKADESIEKLGYFYECEKCGFSGSSKDPIEKCPRCGNKVKISGPVWLGKINDD

SEQ ID NO: 32215 - protein, 85 aa, unidentified
  REGION 1..85: note = Description of Unknown:cds_NZ_WFIY01000004.1_cds_WP_155862457.1_209 target sequence
SFVHKMMDYLQNFSYIKNFEAISILLHKILQENKYPPGYYNLEFIASKYKINVPAREKIIECLGEASQTHFSSKGIKTSKSFDEI

SEQ ID NO: 32216 - protein, 85 aa, unidentified
  REGION 1..85: note = Description of Unknown:cds_NZ_WFIY01000004.1_cds_WP_155864029.1_1961 target sequence
FCSQRILVLTIITSKGSVEVDKREIVGLLGRNGSGKTTLLKSVLCNSQNQVILDGKDFCKEKDYSKVSLVLQEPYSQILAETAKE

SEQ ID NO: 32217 - protein, 85 aa, unidentified
  REGION 1..85: note = Description of Unknown:cds_NZ_WFIY01000004.1_cds_WP_155864029.1_1961 target sequence
EVELLSRYHRVNEKIVKNIMGEYYDKKFLELSDGYKRRFVISTTLASMPEYVLLDEPFANLDKYSTVEVKEIIPKGTLIAEHRVK

SEQ ID NO: 32218 - protein, 85 aa, unidentified
  REGION 1..85: note = Description of Unknown:cds_NZ_WFIY01000004.1_cds_WP_155864029.1_1961 target sequence
EIRDMLDRVYLLEDKIEEIDKEKLYDENFLKSHGLRGFKLSKIESELGKEILDVQTTKARIKVRESEVLCLIGRNGAGKTTTLKQ

SEQ ID NO: 32219 - protein, 85 aa, unidentified
  REGION 1..85: note = Description of Unknown:cds_NZ_WFIY01000004.1_cds_WP_155864029.1_1961 target sequence
LVGKVYVIFQNPDLQFFCTTVKEEVKGREDVLSLFNLKDKEDRSPYTLSYGEKMRVLIASAYASGRKVIALDEPSVGMDGNSLLS

SEQ ID NO: 32220 - protein, 84 aa, unidentified
  REGION 1..84: note = Description of Unknown:cds_NZ_WFIY01000004.1_cds_WP_155864029.1_1961 target sequence
KEDRSPYTLSYGEKMRVLIASAYASGRKVIALDEPSVGMDGNSLLSFYEMIKLLKEEKRGIIIATHDEDIISMCDSIINLDKSF

SEQ ID NO: 32221 - protein, 85 aa, unidentified
  REGION 1..85: note = Description of Unknown:cds_NZ_WFIY01000004.1_cds_WP_155864029.1_1961 target sequence
LLGRNGSGKTTLLKSVLCNSQNQVILDGKDFCKEKDYSKVSLVLQEPYSQILAETAKEEVELLSRYHRVNEKIVKNIMGEYYDKK

SEQ ID NO: 32222 - protein, 85 aa, unidentified
  REGION 1..85: note = Description of Unknown:cds_NZ_WFIY01000004.1_cds_WP_155864029.1_1961 target sequence
FLELSDGYKRRFVISTTLASMPEYVLLDEPFANLDKYSTVEVKEIIPKGTLIAEHRVKEIRDMLDRVYLLEDKIEEIDKEKLYDE

SEQ ID NO: 32223 - protein, 85 aa, unidentified
  REGION 1..85: note = Description of Unknown:cds_NZ_WFIY01000004.1_cds_WP_155864029.1_1961 target sequence
NFLKSHGLRGFKLSKIESELGKEILDVQTTKARIKVRESEVLCLIGRNGAGKTTTLKQLVGKVYVIFQNPDLQFFCTTVKEEVKG

SEQ ID NO: 32224 - protein, 85 aa, unidentified
  REGION 1..85: note = Description of Unknown:cds_NZ_WFIY01000004.1_cds_WP_155864029.1_1961 target sequence
REDVLSLFNLKDKEDRSPYTLSYGEKMRVLIASAYASGRKVIALDEPSVGMDGNSLLSFYEMIKLLKEEKRGIIIATHDEDIISM

SEQ ID NO: 32225 - protein, 85 aa, unidentified
  REGION 1..85: note = Description of Unknown:cds_NZ_WFIY01000004.1_cds_WP_155862779.1_594 target sequence
KSKESEQVLVIFITSLSFFLSYFSRIAWSIVSVYSSLKPTELQDSIIFSLFFIGYVIVQIPSGFIANGYPKVTSIISLLGLSFAS

SEQ ID NO: 32226 - protein, 85 aa, unidentified
  REGION 1..85: note = Description of Unknown:cds_NZ_WFIY01000004.1_cds_WP_155862779.1_594 target sequence
FLSGYANSIVFEYFSSILMGLFAGWIYPTTIRILSCKFSGKELPIAIGYYSLAWPLSIVLAGVTLPYLSINFGWRFPYYLISIIS

SEQ ID NO: 32227 - protein, 85 aa, unidentified
  REGION 1..85: note = Description of Unknown:cds_NZ_WFIY01000004.1_cds_WP_155862779.1_594 target sequence
LFTALSYLPMPIKNSKIERKSLFLVAKNRNVIIVSFSGFLFFLSYWIITLYAYKYFLTLGMNSYIAGLTYSMLALAGIPSTVIAG

SEQ ID NO: 32228 - protein, 85 aa, unidentified
  REGION 1..85: note = Description of Unknown:cds_NZ_WFIY01000004.1_cds_WP_155862779.1_594 target sequence
YIIRKIGIKNSLAFFEGIYGLLTFNLSYYLSMIQIFIIASIMGFVRFIITPANSSAVSVIDRKNAGSVSGFANFFWQSSGILAPL

SEQ ID NO: 32229 - protein, 84 aa, unidentified
  REGION 1..84: note = Description of Unknown:cds_NZ_WFIY01000004.1_cds_WP_155862779.1_594 target sequence
ASIMGFVRFIITPANSSAVSVIDRKNAGSVSGFANFFWQSSGILAPLIASIIITSLGFKLLWLFSGFIIILSSTIYLFLLKIKE

SEQ ID NO: 32230 - protein, 85 aa, unidentified
  REGION 1..85: note = Description of Unknown:cds_NZ_WFIY01000004.1_cds_WP_155862779.1_594 target sequence
WSIVSVYSSLKPTELQDSIIFSLFFIGYVIVQIPSGFIANGYPKVTSIISLLGLSFASFLSGYANSIVFEYFSSILMGLFAGWIY

SEQ ID NO: 32231 - protein, 85 aa, unidentified
  REGION 1..85: note = Description of Unknown:cds_NZ_WFIY01000004.1_cds_WP_155862779.1_594 target sequence
PTTIRILSCKFSGKELPIAIGYYSLAWPLSIVLAGVTLPYLSINFGWRFPYYLISIISLFTALSYLPMPIKNSKIERKSLFLVAK

SEQ ID NO: 32232 - protein, 85 aa, unidentified
  REGION 1..85: note = Description of Unknown:cds_NZ_WFIY01000004.1_cds_WP_155862779.1_594 target sequence
NRNVIIVSFSGFLFFLSYWIITLYAYKYFLTLGMNSYIAGLTYSMLALAGIPSTVIAGYIIRKIGIKNSLAFFEGIYGLLTFNLS

SEQ ID NO: 32233 - protein, 85 aa, unidentified
  REGION 1..85: note = Description of Unknown:cds_NZ_WFIY01000004.1_cds_WP_155862779.1_594 target sequence
YYLSMIQIFIIASIMGFVRFIITPANSSAVSVIDRKNAGSVSGFANFFWQSSGILAPLIASIIITSLGFKLLWLFSGFIIILSST

SEQ ID NO: 32234 - protein, 85 aa, unidentified
  REGION 1..85: note = Description of Unknown:cds_NZ_WFIY01000004.1_cds_WP_155863193.1_1125 target sequence
FELSKELEEYRNKVRDYTQKVVKDYAKTMDETNDGGDKIVKDFGEMDLLGMKIPTKYGGLGLGEIAFAIATEELGSESGGASHSL

SEQ ID NO: 32235 - protein, 85 aa, unidentified
  REGION 1..85: note = Description of Unknown:cds_NZ_WFIY01000004.1_cds_WP_155863193.1_1125 target sequence
HTQLNALQLLLSIGGDSAKDWIERGVKAKEIYAVALTEPTAGSDLGALQTTAKPDGNELVLNGEKIFTSAASFSTKMVVLARTSG

SEQ ID NO: 32236 - protein, 85 aa, unidentified
  REGION 1..85: note = Description of Unknown:cds_NZ_WFIY01000004.1_cds_WP_155863193.1_1125 target sequence
NPGDKNGISLLLIDSKLPGIEIHKLDLMGIRGAGVSYVKFNNVRIPKDSIIGKEGDAFRGAIKALMISRNGYAGIAVGIARGAVE

SEQ ID NO: 32237 - protein, 85 aa, unidentified
  REGION 1..85: note = Description of Unknown:cds_NZ_WFIY01000004.1_cds_WP_155863193.1_1125 target sequence
EAINRASTRKQFGKALIEQEWIGFNLADAYIKVEAARLLTWRAASLLDKGVEALTEASMAKYFAAVTAAETTRTALHIFGGHGLN

SEQ ID NO: 32238 - protein, 84 aa, unidentified
  REGION 1..84: note = Description of Unknown:cds_NZ_WFIY01000004.1_cds_WP_155863193.1_1125 target sequence
LTWRAASLLDKGVEALTEASMAKYFAAVTAAETTRTALHIFGGHGLNRGSKVERLYRDAKIMEIAEGTNEMQLLAVSRSFQQKK

SEQ ID NO: 32239 - protein, 85 aa, unidentified
  REGION 1..85: note = Description of Unknown:cds_NZ_WFIY01000004.1_cds_WP_155863193.1_1125 target sequence
TMDETNDGGDKIVKDFGEMDLLGMKIPTKYGGLGLGEIAFAIATEELGSESGGASHSLHTQLNALQLLLSIGGDSAKDWIERGVK

SEQ ID NO: 32240 - protein, 85 aa, unidentified
  REGION 1..85: note = Description of Unknown:cds_NZ_WFIY01000004.1_cds_WP_155863193.1_1125 target sequence
AKEIYAVALTEPTAGSDLGALQTTAKPDGNELVLNGEKIFTSAASFSTKMVVLARTSGNPGDKNGISLLLIDSKLPGIEIHKLDL

SEQ ID NO: 32241 - protein, 85 aa, unidentified
  REGION 1..85: note = Description of Unknown:cds_NZ_WFIY01000004.1_cds_WP_155863193.1_1125 target sequence
MGIRGAGVSYVKFNNVRIPKDSIIGKEGDAFRGAIKALMISRNGYAGIAVGIARGAVEEAINRASTRKQFGKALIEQEWIGFNLA

SEQ ID NO: 32242 - protein, 85 aa, unidentified
  REGION 1..85: note = Description of Unknown:cds_NZ_WFIY01000004.1_cds_WP_155863193.1_1125 target sequence
DAYIKVEAARLLTWRAASLLDKGVEALTEASMAKYFAAVTAAETTRTALHIFGGHGLNRGSKVERLYRDAKIMEIAEGTNEMQLL

SEQ ID NO: 32243 - protein, 85 aa, unidentified
  REGION 1..85: note = Description of Unknown:cds_NZ_WFIY01000004.1_cds_WP_155863587.1_1500 target sequence
NVLILGSGYAGLTVAHRIRDYLKTIDVTIISRSAIVRENTIFPLLLTDEIKVEDTEFNAKEVMERKGVNFVEAEVEAVEDGEVKT

SEQ ID NO: 32244 - protein, 85 aa, unidentified
  REGION 1..85: note = Description of Unknown:cds_NZ_WFIY01000004.1_cds_WP_155863587.1_1500 target sequence
SKGTFDYDYLFIALGGAYEENFEKIKGHEHAYMHHTLEGFLGLKKELSEAEDGVKIFVGNAKNSPIEGPSYQVALISEFILRKKG

SEQ ID NO: 32245 - protein, 85 aa, unidentified
  REGION 1..85: note = Description of Unknown:cds_NZ_WFIY01000004.1_cds_WP_155863587.1_1500 target sequence
IKGEVYLATQSPRGVFGPIPDPKISEIANKYFEKRGIHLLKGKYVTEIRKDKVVLNDGEEIEADIKSVLPTLSAPKAVKEFTDDS

SEQ ID NO: 32246 - protein, 85 aa, unidentified
  REGION 1..85: note = Description of Unknown:cds_NZ_WFIY01000004.1_cds_WP_155863587.1_1500 target sequence
GFIPVSFPSFSYNERIFALGDSAKGMVGPKTARSAMVSAENATYAFLKKMGISVDKPYYSQGVLCIMEGGDDGGIVRFDKNSKKN

SEQ ID NO: 32247 - protein, 84 aa, unidentified
  REGION 1..84: note = Description of Unknown:cds_NZ_WFIY01000004.1_cds_WP_155863587.1_1500 target sequence
AENATYAFLKKMGISVDKPYYSQGVLCIMEGGDDGGIVRFDKNSKKNVSFILFGKQYVTIKKIYSRLLVNNAFNVPYHASLPFI

SEQ ID NO: 32248 - protein, 85 aa, unidentified
  REGION 1..85: note = Description of Unknown:cds_NZ_WFIY01000004.1_cds_WP_155863587.1_1500 target sequence
TIISRSAIVRENTIFPLLLTDEIKVEDTEFNAKEVMERKGVNFVEAEVEAVEDGEVKTSKGTFDYDYLFIALGGAYEENFEKIKG

SEQ ID NO: 32249 - protein, 85 aa, unidentified
  REGION 1..85: note = Description of Unknown:cds_NZ_WFIY01000004.1_cds_WP_155863587.1_1500 target sequence
HEHAYMHHTLEGFLGLKKELSEAEDGVKIFVGNAKNSPIEGPSYQVALISEFILRKKGIKGEVYLATQSPRGVFGPIPDPKISEI

SEQ ID NO: 32250 - protein, 85 aa, unidentified
  REGION 1..85: note = Description of Unknown:cds_NZ_WFIY01000004.1_cds_WP_155863587.1_1500 target sequence
ANKYFEKRGIHLLKGKYVTEIRKDKVVLNDGEEIEADIKSVLPTLSAPKAVKEFTDDSGFIPVSFPSFSYNERIFALGDSAKGMV

SEQ ID NO: 32251 - protein, 85 aa, unidentified
  REGION 1..85: note = Description of Unknown:cds_NZ_WFIY01000004.1_cds_WP_155863587.1_1500 target sequence
GPKTARSAMVSAENATYAFLKKMGISVDKPYYSQGVLCIMEGGDDGGIVRFDKNSKKNVSFILFGKQYVTIKKIYSRLLVNNAFN

SEQ ID NO: 32252 - protein, 85 aa, unidentified
  REGION 1..85: note = Description of Unknown:cds_NZ_WFIY01000004.1_cds_WP_155864245.1_2222 target sequence
KVLFLLVILIIFIPTVYAGYDYGYEFGYVQTCGIQSIVSLYNISLEPGSPGISIQENVCLNINGSNVFVQNVIEPVMLTKYGYDV

SEQ ID NO: 32253 - protein, 85 aa, unidentified
  REGION 1..85: note = Description of Unknown:cds_NZ_WFIY01000004.1_cds_WP_155864245.1_2222 target sequence
IWTTSVYYDGAYHMFCHSGIIGYTFNITTIWTNTSNALCIEFFISNTTLTLNKTCVIMGKFFGIIYSGYNAGTVIGGYGNSAVAE

SEQ ID NO: 32254 - protein, 85 aa, unidentified
  REGION 1..85: note = Description of Unknown:cds_NZ_WFIY01000004.1_cds_WP_155864245.1_2222 target sequence
LAKGFNVSIREYYRYNNNWYVPPVAYSGVWSTGESAINGYAYFSKGTVWITYGNAGIQELYNFSVVIVNNTVYTFPRGSLWIANG

SEQ ID NO: 32255 - protein, 85 aa, unidentified
  REGION 1..85: note = Description of Unknown:cds_NZ_WFIY01000004.1_cds_WP_155864245.1_2222 target sequence
RFFVNSTPLENVTIRPFYYFNYSFIPKKEILISFDNYTEIDCVKSKSFYLPFPEVVYFYENGSCVGKFISTNITYIASMVQSSYT

SEQ ID NO: 32256 - protein, 84 aa, unidentified
  REGION 1..84: note = Description of Unknown:cds_NZ_WFIY01000004.1_cds_WP_155864245.1_2222 target sequence
EIDCVKSKSFYLPFPEVVYFYENGSCVGKFISTNITYIASMVQSSYTKSIAHTINVNKTDKIVIVIIGILFITLIFLLFRKRYL

SEQ ID NO: 32257 - protein, 85 aa, unidentified
  REGION 1..85: note = Description of Unknown:cds_NZ_WFIY01000004.1_cds_WP_155864245.1_2222 target sequence
YVQTCGIQSIVSLYNISLEPGSPGISIQENVCLNINGSNVFVQNVIEPVMLTKYGYDVIWTTSVYYDGAYHMFCHSGIIGYTFNI

SEQ ID NO: 32258 - protein, 85 aa, unidentified
  REGION 1..85: note = Description of Unknown:cds_NZ_WFIY01000004.1_cds_WP_155864245.1_2222 target sequence
TTIWTNTSNALCIEFFISNTTLTLNKTCVIMGKFFGIIYSGYNAGTVIGGYGNSAVAELAKGFNVSIREYYRYNNNWYVPPVAYS

SEQ ID NO: 32259 - protein, 85 aa, unidentified
  REGION 1..85: note = Description of Unknown:cds_NZ_WFIY01000004.1_cds_WP_155864245.1_2222 target sequence
GVWSTGESAINGYAYFSKGTVWITYGNAGIQELYNFSVVIVNNTVYTFPRGSLWIANGRFFVNSTPLENVTIRPFYYFNYSFIPK

SEQ ID NO: 32260 - protein, 85 aa, unidentified
  REGION 1..85: note = Description of Unknown:cds_NZ_WFIY01000004.1_cds_WP_155864245.1_2222 target sequence
KEILISFDNYTEIDCVKSKSFYLPFPEVVYFYENGSCVGKFISTNITYIASMVQSSYTKSIAHTINVNKTDKIVIVIIGILFITL

SEQ ID NO: 32261 - protein, 85 aa, unidentified
  REGION 1..85: note = Description of Unknown:cds_NC_009884.1_cds_YP_001496947.1_22 target sequence
VKFHIIYPKPNIVYTNMLSVTAGCRNCSFDYVSSLFKKYVNKYYNVVSNVEYSMSLSTRLVIADLWYVLENINALSVPSRAVLWL

SEQ ID NO: 32262 - protein, 85 aa, unidentified
  REGION 1..85: note = Description of Unknown:cds_NC_009884.1_cds_YP_001496947.1_22 target sequence
DTAWVWSNRTVPSNARNYLVLTTSQWNADILTKLGIDNAIVPRAIDDDYAVKYFNNIVVNNNDDDNVIDKKHGDGDSEVDGKFNV

SEQ ID NO: 32263 - protein, 85 aa, unidentified
  REGION 1..85: note = Description of Unknown:cds_NC_009884.1_cds_YP_001496947.1_22 target sequence
SGDSSDVTSNVVTTNVIGDVTDNKKYDVVAIMTGSSDGHKNEQLLLKILDALHLRKTSFLVCALPQCDAKPFSLTDDEKYELLSQ

SEQ ID NO: 32264 - protein, 85 aa, unidentified
  REGION 1..85: note = Description of Unknown:cds_NC_009884.1_cds_YP_001496947.1_22 target sequence
SRLFAWLSESEGFGIPPVEAMSVGTPVVHFDSIYVNTPLVNAPIHFPLSVHGFKKRESPTVHGKYFASPVYNFDEIVSEFKDALS

SEQ ID NO: 32265 - protein, 84 aa, unidentified
  REGION 1..84: note = Description of Unknown:cds_NC_009884.1_cds_YP_001496947.1_22 target sequence
VNAPIHFPLSVHGFKKRESPTVHGKYFASPVYNFDEIVSEFKDALSVATSLTVKDRIALHEYVMRNYSHKVILPELKKYMGGSF

SEQ ID NO: 32266 - protein, 85 aa, unidentified
  REGION 1..85: note = Description of Unknown:cds_NC_009884.1_cds_YP_001496947.1_22 target sequence
SFDYVSSLFKKYVNKYYNVVSNVEYSMSLSTRLVIADLWYVLENINALSVPSRAVLWLDTAWVWSNRTVPSNARNYLVLTTSQWN

SEQ ID NO: 32267 - protein, 85 aa, unidentified
  REGION 1..85: note = Description of Unknown:cds_NC_009884.1_cds_YP_001496947.1_22 target sequence
ADILTKLGIDNAIVPRAIDDDYAVKYFNNIVVNNNDDDNVIDKKHGDGDSEVDGKFNVSGDSSDVTSNVVTTNVIGDVTDNKKYD

SEQ ID NO: 32268 - protein, 85 aa, unidentified
  REGION 1..85: note = Description of Unknown:cds_NC_009884.1_cds_YP_001496947.1_22 target sequence
VVAIMTGSSDGHKNEQLLLKILDALHLRKTSFLVCALPQCDAKPFSLTDDEKYELLSQSRLFAWLSESEGFGIPPVEAMSVGTPV

SEQ ID NO: 32269 - protein, 85 aa, unidentified
  REGION 1..85: note = Description of Unknown:cds_NC_009884.1_cds_YP_001496947.1_22 target sequence
VHFDSIYVNTPLVNAPIHFPLSVHGFKKRESPTVHGKYFASPVYNFDEIVSEFKDALSVATSLTVKDRIALHEYVMRNYSHKVIL

SEQ ID NO: 32270 - protein, 85 aa, unidentified
  REGION 1..85: note = Description of Unknown:cds_NC_025410.1_cds_YP_009094495.1_4 target sequence
ASLIGASIPIPVNPDSGKSNLKPFPIIKAPADQSGHTGKIVRQIRIKNLTPKGSTEIPITFMNTYGFIKPIWTHGEFFSEFHRNN

SEQ ID NO: 32271 - protein, 85 aa, unidentified
  REGION 1..85: note = Description of Unknown:cds_NC_025410.1_cds_YP_009094495.1_4 target sequence
STPSLTACMLPFGTGPFVDNPSKLLGDLEKIQINVKKSASLREEVIFDIKTIPFAFTKFQIGRERIICVSSDRYVKCPGKLTSGV

SEQ ID NO: 32272 - protein, 85 aa, unidentified
  REGION 1..85: note = Description of Unknown:cds_NC_025410.1_cds_YP_009094495.1_4 target sequence
EYSYCIAFISLTFCPESYKFRVARPLQQLRTSYMRAIQLEIIMKIDCAPDSPIKRNLIYDKENDIYIASVWLHLCNILKGKNHFK

SEQ ID NO: 32273 - protein, 85 aa, unidentified
  REGION 1..85: note = Description of Unknown:cds_NC_025410.1_cds_YP_009094495.1_4 target sequence
TYDDTYFANKCRKMQLVCGIADMWGPTIIVHSKGRIPKSAAPYFNSKGWACHPLSEIAPSITKILWSVGATILQVNAVLQPSDIS

SEQ ID NO: 32274 - protein, 84 aa, unidentified
  REGION 1..84: note = Description of Unknown:cds_NC_025410.1_cds_YP_009094495.1_4 target sequence
SAAPYFNSKGWACHPLSEIAPSITKILWSVGATILQVNAVLQPSDISSAAGTSDLIYPKVKINPDLAEERGIKWNPLRKAVHST

SEQ ID NO: 32275 - protein, 85 aa, unidentified
  REGION 1..85: note = Description of Unknown:cds_NC_025410.1_cds_YP_009094495.1_4 target sequence
KAPADQSGHTGKIVRQIRIKNLTPKGSTEIPITFMNTYGFIKPIWTHGEFFSEFHRNNSTPSLTACMLPFGTGPFVDNPSKLLGD

SEQ ID NO: 32276 - protein, 85 aa, unidentified
  REGION 1..85: note = Description of Unknown:cds_NC_025410.1_cds_YP_009094495.1_4 target sequence
LEKIQINVKKSASLREEVIFDIKTIPFAFTKFQIGRERIICVSSDRYVKCPGKLTSGVEYSYCIAFISLTFCPESYKFRVARPLQ

SEQ ID NO: 32277 - protein, 85 aa, unidentified
  REGION 1..85: note = Description of Unknown:cds_NC_025410.1_cds_YP_009094495.1_4 target sequence
QLRTSYMRAIQLEIIMKIDCAPDSPIKRNLIYDKENDIYIASVWLHLCNILKGKNHFKTYDDTYFANKCRKMQLVCGIADMWGPT

SEQ ID NO: 32278 - protein, 85 aa, unidentified
  REGION 1..85: note = Description of Unknown:cds_NC_025410.1_cds_YP_009094495.1_4 target sequence
IIVHSKGRIPKSAAPYFNSKGWACHPLSEIAPSITKILWSVGATILQVNAVLQPSDISSAAGTSDLIYPKVKINPDLAEERGIKW

SEQ ID NO: 32279 - protein, 85 aa, unidentified
  REGION 1..85: note = Description of Unknown:hvTR_Q6Q1R8 target sequence
ASVNWADDRAARKKFPPPSFYMPLLVSSDKAPYRVIPRNLVPIGKGNKDEQIGYWNVQERWRMRRGQRVDLPPKVHFYYLGTGPH

SEQ ID NO: 32280 - protein, 85 aa, unidentified
  REGION 1..85: note = Description of Unknown:hvTR_Q6Q1R8 target sequence
KDLKFRQRSDGVVWVAKEGAKTVNTSLGNRKRNQKPLEPKFSIALPPELSVVEFEDRSNNSSRASSRSSTRNNSRDSSRSTSRQQ

SEQ ID NO: 32281 - protein, 85 aa, unidentified
  REGION 1..85: note = Description of Unknown:hvTR_Q6Q1R8 target sequence
SRTRSDSNQSSSDLVAAVTLALKNLGFDNQSKSPSSSGTSTPKKPNKPLSQPRADKPSQLKKPRWKRVPTREENVIQCFGPRDFN

SEQ ID NO: 32282 - protein, 85 aa, unidentified
  REGION 1..85: note = Description of Unknown:hvTR_Q6Q1R8 target sequence
HNMGDSDLVQNGVDAKGFPQLAELIPNQAALFFDSEVSTDEVGDNVQITYTYKMLVAKDNKNLPKFIEQISAFTKPSSIKEMQSQ

SEQ ID NO: 32283 - protein, 84 aa, unidentified
  REGION 1..84: note = Description of Unknown:hvTR_Q6Q1R8 target sequence
STDEVGDNVQITYTYKMLVAKDNKNLPKFIEQISAFTKPSSIKEMQSQSSHVAQNTVLNASIPESKPLADDDSAIIEIVNEVLH

SEQ ID NO: 32284 - protein, 85 aa, unidentified
  REGION 1..85: note = Description of Unknown:hvTR_Q6Q1R8 target sequence
SDKAPYRVIPRNLVPIGKGNKDEQIGYWNVQERWRMRRGQRVDLPPKVHFYYLGTGPHKDLKFRQRSDGVVWVAKEGAKTVNTSL

SEQ ID NO: 32285 - protein, 85 aa, unidentified
  REGION 1..85: note = Description of Unknown:hvTR_Q6Q1R8 target sequence
GNRKRNQKPLEPKFSIALPPELSVVEFEDRSNNSSRASSRSSTRNNSRDSSRSTSRQQSRTRSDSNQSSSDLVAAVTLALKNLGF

SEQ ID NO: 32286 - protein, 85 aa, unidentified
  REGION 1..85: note = Description of Unknown:hvTR_Q6Q1R8 target sequence
DNQSKSPSSSGTSTPKKPNKPLSQPRADKPSQLKKPRWKRVPTREENVIQCFGPRDFNHNMGDSDLVQNGVDAKGFPQLAELIPN

SEQ ID NO: 32287 - protein, 85 aa, unidentified
  REGION 1..85: note = Description of Unknown:hvTR_Q6Q1R8 target sequence
QAALFFDSEVSTDEVGDNVQITYTYKMLVAKDNKNLPKFIEQISAFTKPSSIKEMQSQSSHVAQNTVLNASIPESKPLADDDSAI

SEQ ID NO: 32288 - protein, 85 aa, unidentified
  REGION 1..85: note = Description of Unknown:cds_NZ_WFIY01000004.1_cds_WP_155862733.1_540 target sequence
VSRIGKEIEISPVELASQLAKKAKINLASGSPDPRVIPISEIREAYNEVLEDVKSLFYPGAGGQEELKKEIEEHYLQFLGLSKGE

SEQ ID NO: 32289 - protein, 85 aa, unidentified
  REGION 1..85: note = Description of Unknown:cds_NZ_WFIY01000004.1_cds_WP_155862733.1_540 target sequence
DEIVITSGAQHAMELLGKYFLENDVIAVENPTFIETFNAIKLRSSVAIPIDLDDKGIKVDELEEFLKIVKINLLYVIPNCHNPAG

SEQ ID NO: 32290 - protein, 85 aa, unidentified
  REGION 1..85: note = Description of Unknown:cds_NZ_WFIY01000004.1_cds_WP_155862733.1_540 target sequence
VNLDEERRKYIVELAEKYNFYVLEDDPYRPIAGCVPKPIKYFDKNGRVIYISSFSKILAPGLRIGFILANKEIAEKISLLEQLDF

SEQ ID NO: 32291 - protein, 85 aa, unidentified
  REGION 1..85: note = Description of Unknown:cds_NZ_WFIY01000004.1_cds_WP_155862733.1_540 target sequence
STSTVNQYVVARLIRKGIVMRRMKELYEYYSRKMKILKDSLIDHGLTKFNDPKCGFFLLLDLEKDSWKVFNNAIQLGLSFVPAKP

SEQ ID NO: 32292 - protein, 84 aa, unidentified
  REGION 1..84: note = Description of Unknown:cds_NZ_WFIY01000004.1_cds_WP_155862733.1_540 target sequence
KDSLIDHGLTKFNDPKCGFFLLLDLEKDSWKVFNNAIQLGLSFVPAKPFFLRGGDTMARLSITMSNEEEIKEGVSILKKAIQMT

SEQ ID NO: 32293 - protein, 85 aa, unidentified
  REGION 1..85: note = Description of Unknown:cds_NZ_WFIY01000004.1_cds_WP_155862733.1_540 target sequence
ASGSPDPRVIPISEIREAYNEVLEDVKSLFYPGAGGQEELKKEIEEHYLQFLGLSKGEDEIVITSGAQHAMELLGKYFLENDVIA

SEQ ID NO: 32294 - protein, 85 aa, unidentified
  REGION 1..85: note = Description of Unknown:cds_NZ_WFIY01000004.1_cds_WP_155862733.1_540 target sequence
VENPTFIETFNAIKLRSSVAIPIDLDDKGIKVDELEEFLKIVKINLLYVIPNCHNPAGVNLDEERRKYIVELAEKYNFYVLEDDP

SEQ ID NO: 32295 - protein, 85 aa, unidentified
  REGION 1..85: note = Description of Unknown:cds_NZ_WFIY01000004.1_cds_WP_155862733.1_540 target sequence
YRPIAGCVPKPIKYFDKNGRVIYISSFSKILAPGLRIGFILANKEIAEKISLLEQLDFSTSTVNQYVVARLIRKGIVMRRMKELY

SEQ ID NO: 32296 - protein, 85 aa, unidentified
  REGION 1..85: note = Description of Unknown:cds_NZ_WFIY01000004.1_cds_WP_155862733.1_540 target sequence
EYYSRKMKILKDSLIDHGLTKFNDPKCGFFLLLDLEKDSWKVFNNAIQLGLSFVPAKPFFLRGGDTMARLSITMSNEEEIKEGVS

SEQ ID NO: 32297 - protein, 85 aa, unidentified
  REGION 1..85: note = Description of Unknown:cds_NZ_WFIY01000004.1_cds_WP_155864399.1_1070 target sequence
AITLALITITSRATNNMVTTTLTPLGKYVFGLTNLMAGLLESLIYISTFISTSYLNPRMNARVRRNAFIASNLAIVIILVLYYFS

SEQ ID NO: 32298 - protein, 85 aa, unidentified
  REGION 1..85: note = Description of Unknown:cds_NZ_WFIY01000004.1_cds_WP_155864399.1_1070 target sequence
NAELIWLITPLAGISFGLILPNLITSASLVKDKKTAERLLGLYSTSLSISLIIGPSLETYILHLTGSYKMVFLAFTPLALIGAGI

SEQ ID NO: 32299 - protein, 85 aa, unidentified
  REGION 1..85: note = Description of Unknown:cds_NZ_WFIY01000004.1_cds_WP_155864399.1_1070 target sequence
AWTIKFPNVKREKYGLSVLKNKGFITSVLSITTYNVPFAAFTAFLTIYAIEKFHVSSAIGYSSYIPFFVLSFLTRSFMTIRPFNS

SEQ ID NO: 32300 - protein, 85 aa, unidentified
  REGION 1..85: note = Description of Unknown:cds_NZ_WFIY01000004.1_cds_WP_155864399.1_1070 target sequence
LKYPLLISIIITAFGLGFMVFAPSFMSFLIMMALLGIPHGSIFPMSTVMIARATTQEERNAVNSYFLAYNNILFTSIPAIIGFLS

SEQ ID NO: 32301 - protein, 84 aa, unidentified
  REGION 1..84: note = Description of Unknown:cds_NZ_WFIY01000004.1_cds_WP_155864399.1_1070 target sequence
PHGSIFPMSTVMIARATTQEERNAVNSYFLAYNNILFTSIPAIIGFLSGFIGLGYSMLLLEIPVIVSAVIFFVKYWSDPIINRR

SEQ ID NO: 32302 - protein, 85 aa, unidentified
  REGION 1..85: note = Description of Unknown:cds_NZ_WFIY01000004.1_cds_WP_155864399.1_1070 target sequence
YVFGLTNLMAGLLESLIYISTFISTSYLNPRMNARVRRNAFIASNLAIVIILVLYYFSNAELIWLITPLAGISFGLILPNLITSA

SEQ ID NO: 32303 - protein, 85 aa, unidentified
  REGION 1..85: note = Description of Unknown:cds_NZ_WFIY01000004.1_cds_WP_155864399.1_1070 target sequence
SLVKDKKTAERLLGLYSTSLSISLIIGPSLETYILHLTGSYKMVFLAFTPLALIGAGIAWTIKFPNVKREKYGLSVLKNKGFITS

SEQ ID NO: 32304 - protein, 85 aa, unidentified
  REGION 1..85: note = Description of Unknown:cds_NZ_WFIY01000004.1_cds_WP_155864399.1_1070 target sequence
VLSITTYNVPFAAFTAFLTIYAIEKFHVSSAIGYSSYIPFFVLSFLTRSFMTIRPFNSLKYPLLISIIITAFGLGFMVFAPSFMS

SEQ ID NO: 32305 - protein, 85 aa, unidentified
  REGION 1..85: note = Description of Unknown:cds_NZ_WFIY01000004.1_cds_WP_155864399.1_1070 target sequence
FLIMMALLGIPHGSIFPMSTVMIARATTQEERNAVNSYFLAYNNILFTSIPAIIGFLSGFIGLGYSMLLLEIPVIVSAVIFFVKY

SEQ ID NO: 32306 - protein, 85 aa, unidentified
  REGION 1..85: note = Description of Unknown:cds_NZ_WFIY01000004.1_cds_WP_155863213.1_1155 target sequence
VDRFNKIFIINNGFSAFGLNLIDMTLLWILYLALKNPILYIPVASANPVGTLLLSSFIGYIADKYDRKKLLIISGTIHRVLPIFI

SEQ ID NO: 32307 - protein, 85 aa, unidentified
  REGION 1..85: note = Description of Unknown:cds_NZ_WFIY01000004.1_cds_WP_155863213.1_1155 target sequence
IYFVIISFNPVLAVILYVVRTGLMIVTSNTITPSFIQNLPEDKMKKVMFYNRIVKESSTILSIVIWPLLYTFYSGWTVIPGIILA

SEQ ID NO: 32308 - protein, 85 aa, unidentified
  REGION 1..85: note = Description of Unknown:cds_NZ_WFIY01000004.1_cds_WP_155863213.1_1155 target sequence
TIGFILISTLPLGGKGGNKVKFREALKEYRRREIFFISMTNAISQGALGMVYLYSAAIIQILHGNTIQYTLAQLGFYLSWIIGPW

SEQ ID NO: 32309 - protein, 85 aa, unidentified
  REGION 1..85: note = Description of Unknown:cds_NZ_WFIY01000004.1_cds_WP_155863213.1_1155 target sequence
IMTKFNNVTKLVVTSFAMYFLVFIVLSLKNPWLIGLSTGSVGIGDSLTEIIWIKAMRMARQELMASVLGIDEFITAGFRLGYGSI

SEQ ID NO: 32310 - protein, 84 aa, unidentified
  REGION 1..84: note = Description of Unknown:cds_NZ_WFIY01000004.1_cds_WP_155863213.1_1155 target sequence
GSVGIGDSLTEIIWIKAMRMARQELMASVLGIDEFITAGFRLGYGSIAGTLYATDFLVVPIIGVITIAGVALAYIKNDVWKMKI

SEQ ID NO: 32311 - protein, 85 aa, unidentified
  REGION 1..85: note = Description of Unknown:cds_NZ_WFIY01000004.1_cds_WP_155863213.1_1155 target sequence
WILYLALKNPILYIPVASANPVGTLLLSSFIGYIADKYDRKKLLIISGTIHRVLPIFIIYFVIISFNPVLAVILYVVRTGLMIVT

SEQ ID NO: 32312 - protein, 85 aa, unidentified
  REGION 1..85: note = Description of Unknown:cds_NZ_WFIY01000004.1_cds_WP_155863213.1_1155 target sequence
SNTITPSFIQNLPEDKMKKVMFYNRIVKESSTILSIVIWPLLYTFYSGWTVIPGIILATIGFILISTLPLGGKGGNKVKFREALK

SEQ ID NO: 32313 - protein, 85 aa, unidentified
  REGION 1..85: note = Description of Unknown:cds_NZ_WFIY01000004.1_cds_WP_155863213.1_1155 target sequence
EYRRREIFFISMTNAISQGALGMVYLYSAAIIQILHGNTIQYTLAQLGFYLSWIIGPWIMTKFNNVTKLVVTSFAMYFLVFIVLS

SEQ ID NO: 32314 - protein, 85 aa, unidentified
  REGION 1..85: note = Description of Unknown:cds_NZ_WFIY01000004.1_cds_WP_155863213.1_1155 target sequence
LKNPWLIGLSTGSVGIGDSLTEIIWIKAMRMARQELMASVLGIDEFITAGFRLGYGSIAGTLYATDFLVVPIIGVITIAGVALAY

SEQ ID NO: 32315 - protein, 85 aa, unidentified
  REGION 1..85: note = Description of Unknown:cds_NZ_WFIY01000004.1_cds_WP_155863250.1_1199 target sequence
SEVSKGLENVFIKATSLTYIDGEAGILRYGGYDINDLVENCEYEEIIHLMLFGDLPTASQLQKIKEKINESYNVPYQVFEVLEKL

SEQ ID NO: 32316 - protein, 85 aa, unidentified
  REGION 1..85: note = Description of Unknown:cds_NZ_WFIY01000004.1_cds_WP_155863250.1_1199 target sequence
PHDADAVGMLETAFSMLSSFYNYPWKKDENKWRAIEIIAKTSTLVSNIYRIKEGLRPRLPEPSDSYARTFLETAFSRKPSDEEVK

SEQ ID NO: 32317 - protein, 85 aa, unidentified
  REGION 1..85: note = Description of Unknown:cds_NZ_WFIY01000004.1_cds_WP_155863250.1_1199 target sequence
AMNATLIIYADHEVPASTTAALVTASTLSDMYSCMVSALAALKGPLHGGAAEATFEQLKEIGDESKIEEWFDRKIIKEKNRLMGF

SEQ ID NO: 32318 - protein, 85 aa, unidentified
  REGION 1..85: note = Description of Unknown:cds_NZ_WFIY01000004.1_cds_WP_155863250.1_1199 target sequence
GHRVYKTYDPRAKIFKKYAEEIAKTPEAKKYLRIATKLEELGIKHFAEKRIYPNVDFYSGIVFYSLGFPEYMFTTLFALSRVLGW

SEQ ID NO: 32319 - protein, 84 aa, unidentified
  REGION 1..84: note = Description of Unknown:cds_NZ_WFIY01000004.1_cds_WP_155863250.1_1199 target sequence
LEELGIKHFAEKRIYPNVDFYSGIVFYSLGFPEYMFTTLFALSRVLGWLAHIIEYVEEQHRLIRPRALYVGPIKRDFIPLKYRE

SEQ ID NO: 32320 - protein, 85 aa, unidentified
  REGION 1..85: note = Description of Unknown:cds_NZ_WFIY01000004.1_cds_WP_155863250.1_1199 target sequence
RYGGYDINDLVENCEYEEIIHLMLFGDLPTASQLQKIKEKINESYNVPYQVFEVLEKLPHDADAVGMLETAFSMLSSFYNYPWKK

SEQ ID NO: 32321 - protein, 85 aa, unidentified
  REGION 1..85: note = Description of Unknown:cds_NZ_WFIY01000004.1_cds_WP_155863250.1_1199 target sequence
DENKWRAIEIIAKTSTLVSNIYRIKEGLRPRLPEPSDSYARTFLETAFSRKPSDEEVKAMNATLIIYADHEVPASTTAALVTAST

SEQ ID NO: 32322 - protein, 85 aa, unidentified
  REGION 1..85: note = Description of Unknown:cds_NZ_WFIY01000004.1_cds_WP_155863250.1_1199 target sequence
LSDMYSCMVSALAALKGPLHGGAAEATFEQLKEIGDESKIEEWFDRKIIKEKNRLMGFGHRVYKTYDPRAKIFKKYAEEIAKTPE

SEQ ID NO: 32323 - protein, 85 aa, unidentified
  REGION 1..85: note = Description of Unknown:cds_NZ_WFIY01000004.1_cds_WP_155863250.1_1199 target sequence
AKKYLRIATKLEELGIKHFAEKRIYPNVDFYSGIVFYSLGFPEYMFTTLFALSRVLGWLAHIIEYVEEQHRLIRPRALYVGPIKR

SEQ ID NO: 32324 - protein, 85 aa, unidentified
  REGION 1..85: note = Description of Unknown:cds_NZ_WFIY01000004.1_cds_WP_162309155.1_1232 target sequence
IILALIPWFLEAYDSELYFFASPYIINTLKISQSYIGITASVFAIGIAVFSMVGGYLFDKISPKYVIVSAVGLFTIFTILTGYVS

SEQ ID NO: 32325 - protein, 85 aa, unidentified
  REGION 1..85: note = Description of Unknown:cds_NZ_WFIY01000004.1_cds_WP_162309155.1_1232 target sequence
NGIELVIYRFLVGVGVGIFQPATAAFAGDLLNTTRALRIGANSVAFGIGLFVAPYVISPFLPNFSLPFLISGIMSIISLALFFYF

SEQ ID NO: 32326 - protein, 85 aa, unidentified
  REGION 1..85: note = Description of Unknown:cds_NZ_WFIY01000004.1_cds_WP_162309155.1_1232 target sequence
VPVNYREEVRERIDIRKIINLNTIILSIIILSFGIALFAFLGYYSDYLLYGINLSKSEATIIASMNGLGELAFLLPIALLSDKVS

SEQ ID NO: 32327 - protein, 85 aa, unidentified
  REGION 1..85: note = Description of Unknown:cds_NZ_WFIY01000004.1_cds_WP_162309155.1_1232 target sequence
RKISLILSSAILTLASIGLFIGYTGYLQMVLLTIAWGAGYGGLIVSVISFSQDIVPDEVVGSVTGFMFLTFNIGAIFGAPLMGLL

SEQ ID NO: 32328 - protein, 84 aa, unidentified
  REGION 1..84: note = Description of Unknown:cds_NZ_WFIY01000004.1_cds_WP_162309155.1_1232 target sequence
AGYGGLIVSVISFSQDIVPDEVVGSVTGFMFLTFNIGAIFGAPLMGLLVQSYGFERAGLLAIALPSFISLLLAVIIRHKNGKKD

SEQ ID NO: 32329 - protein, 85 aa, unidentified
  REGION 1..85: note = Description of Unknown:cds_NZ_WFIY01000004.1_cds_WP_162309155.1_1232 target sequence
TLKISQSYIGITASVFAIGIAVFSMVGGYLFDKISPKYVIVSAVGLFTIFTILTGYVSNGIELVIYRFLVGVGVGIFQPATAAFA

SEQ ID NO: 32330 - protein, 85 aa, unidentified
  REGION 1..85: note = Description of Unknown:cds_NZ_WFIY01000004.1_cds_WP_162309155.1_1232 target sequence
GDLLNTTRALRIGANSVAFGIGLFVAPYVISPFLPNFSLPFLISGIMSIISLALFFYFVPVNYREEVRERIDIRKIINLNTIILS

SEQ ID NO: 32331 - protein, 85 aa, unidentified
  REGION 1..85: note = Description of Unknown:cds_NZ_WFIY01000004.1_cds_WP_162309155.1_1232 target sequence
IIILSFGIALFAFLGYYSDYLLYGINLSKSEATIIASMNGLGELAFLLPIALLSDKVSRKISLILSSAILTLASIGLFIGYTGYL

SEQ ID NO: 32332 - protein, 85 aa, unidentified
  REGION 1..85: note = Description of Unknown:cds_NZ_WFIY01000004.1_cds_WP_162309155.1_1232 target sequence
QMVLLTIAWGAGYGGLIVSVISFSQDIVPDEVVGSVTGFMFLTFNIGAIFGAPLMGLLVQSYGFERAGLLAIALPSFISLLLAVI

SEQ ID NO: 32333 - protein, 85 aa, unidentified
  REGION 1..85: note = Description of Unknown:cds_NZ_WFIY01000004.1_cds_WP_155863540.1_1478 target sequence
RRKIGKLGKFCLYNDGYVECEEKIEKSAYTPAYGSFDFVYGPSAGGLMESVRLDIITFGEYIRDVIVNPYYKSRTIKIKGKEIND

SEQ ID NO: 32334 - protein, 85 aa, unidentified
  REGION 1..85: note = Description of Unknown:cds_NZ_WFIY01000004.1_cds_WP_155863540.1_1478 target sequence
ALLYIERINAPFTASHTIAFLMAIEKALGIEVPYELLLDRIAEIELERIRNNLLVIERLTEAAGFQVPMSSLLWLVEKVNRIIGK

SEQ ID NO: 32335 - protein, 85 aa, unidentified
  REGION 1..85: note = Description of Unknown:cds_NZ_WFIY01000004.1_cds_WP_155863540.1_1478 target sequence
YFGHRYFFGVNYYGGINVEEGKIKDLEIIEKEFNELFNSLIESRIFIDRLQGNGIIKNEDSIGPAARAANLEYDARNEEIGLPYK

SEQ ID NO: 32336 - protein, 85 aa, unidentified
  REGION 1..85: note = Description of Unknown:cds_NZ_WFIY01000004.1_cds_WP_155863540.1_1478 target sequence
DLGFKISTYDSADAFGRFIVRGKEIFESLNMLSRINLKKIEYTNRLAEGKAVGRVESPSGDLAYYVEVNNKGKISEIYLLSPSSI

SEQ ID NO: 32337 - protein, 84 aa, unidentified
  REGION 1..84: note = Description of Unknown:cds_NZ_WFIY01000004.1_cds_WP_155863540.1_1478 target sequence
KKIEYTNRLAEGKAVGRVESPSGDLAYYVEVNNKGKISEIYLLSPSSINIRLFSKSMVKNIFTDLPFNWESFGIWISEIGVKFE

SEQ ID NO: 32338 - protein, 85 aa, unidentified
  REGION 1..85: note = Description of Unknown:cds_NZ_WFIY01000004.1_cds_WP_155863540.1_1478 target sequence
AYTPAYGSFDFVYGPSAGGLMESVRLDIITFGEYIRDVIVNPYYKSRTIKIKGKEINDALLYIERINAPFTASHTIAFLMAIEKA

SEQ ID NO: 32339 - protein, 85 aa, unidentified
  REGION 1..85: note = Description of Unknown:cds_NZ_WFIY01000004.1_cds_WP_155863540.1_1478 target sequence
LGIEVPYELLLDRIAEIELERIRNNLLVIERLTEAAGFQVPMSSLLWLVEKVNRIIGKYFGHRYFFGVNYYGGINVEEGKIKDLE

SEQ ID NO: 32340 - protein, 85 aa, unidentified
  REGION 1..85: note = Description of Unknown:cds_NZ_WFIY01000004.1_cds_WP_155863540.1_1478 target sequence
IIEKEFNELFNSLIESRIFIDRLQGNGIIKNEDSIGPAARAANLEYDARNEEIGLPYKDLGFKISTYDSADAFGRFIVRGKEIFE

SEQ ID NO: 32341 - protein, 85 aa, unidentified
  REGION 1..85: note = Description of Unknown:cds_NZ_WFIY01000004.1_cds_WP_155863540.1_1478 target sequence
SLNMLSRINLKKIEYTNRLAEGKAVGRVESPSGDLAYYVEVNNKGKISEIYLLSPSSINIRLFSKSMVKNIFTDLPFNWESFGIW

SEQ ID NO: 32342 - protein, 85 aa, unidentified
  REGION 1..85: note = Description of Unknown:cds_NZ_WFIY01000004.1_cds_WP_155863602.1_1508 target sequence
LTKKQLALISVGTSLSFWDIFNVPYIENEASSQLGSINSTLILSAEMIGYFTGGAINGLIASKYGRKIGIILSMLLIFLGSTIGF

SEQ ID NO: 32343 - protein, 85 aa, unidentified
  REGION 1..85: note = Description of Unknown:cds_NZ_WFIY01000004.1_cds_WP_155863602.1_1508 target sequence
FSTSFLQLAIAEFIIGFGIEGEVAVVPAYVSEMSSANFRGRAVGLTTLGGFLMSLIVGPVAVIAGDNWRILFLPSLMISAFALIF

SEQ ID NO: 32344 - protein, 85 aa, unidentified
  REGION 1..85: note = Description of Unknown:cds_NZ_WFIY01000004.1_cds_WP_155863602.1_1508 target sequence
RLTLPESKMWEEKRREKMVWDNTVLLFLAIWFTSYFAGYSLFSTPVFSLLSNKGFSNTSLYFTYILYGDPLGVTLASILNDKLER

SEQ ID NO: 32345 - protein, 85 aa, unidentified
  REGION 1..85: note = Description of Unknown:cds_NZ_WFIY01000004.1_cds_WP_155863602.1_1508 target sequence
KFSSSASNLLSGIAIISMPLLGGVSLLIAGFIAMFFQGFKFPTMYAYTAENLGTKIRTLGYGIADGIGHLGGAIGPVLFTLTYEY

SEQ ID NO: 32346 - protein, 84 aa, unidentified
  REGION 1..84: note = Description of Unknown:cds_NZ_WFIY01000004.1_cds_WP_155863602.1_1508 target sequence
GFKFPTMYAYTAENLGTKIRTLGYGIADGIGHLGGAIGPVLFTLTYEYNASYSFMLIGIVSMISGVMLLKGARVKGKSLEEIKG

SEQ ID NO: 32347 - protein, 85 aa, unidentified
  REGION 1..85: note = Description of Unknown:cds_NZ_WFIY01000004.1_cds_WP_155863602.1_1508 target sequence
NEASSQLGSINSTLILSAEMIGYFTGGAINGLIASKYGRKIGIILSMLLIFLGSTIGFFSTSFLQLAIAEFIIGFGIEGEVAVVP

SEQ ID NO: 32348 - protein, 85 aa, unidentified
  REGION 1..85: note = Description of Unknown:cds_NZ_WFIY01000004.1_cds_WP_155863602.1_1508 target sequence
AYVSEMSSANFRGRAVGLTTLGGFLMSLIVGPVAVIAGDNWRILFLPSLMISAFALIFRLTLPESKMWEEKRREKMVWDNTVLLF

SEQ ID NO: 32349 - protein, 85 aa, unidentified
  REGION 1..85: note = Description of Unknown:cds_NZ_WFIY01000004.1_cds_WP_155863602.1_1508 target sequence
LAIWFTSYFAGYSLFSTPVFSLLSNKGFSNTSLYFTYILYGDPLGVTLASILNDKLERKFSSSASNLLSGIAIISMPLLGGVSLL

SEQ ID NO: 32350 - protein, 85 aa, unidentified
  REGION 1..85: note = Description of Unknown:cds_NZ_WFIY01000004.1_cds_WP_155863602.1_1508 target sequence
IAGFIAMFFQGFKFPTMYAYTAENLGTKIRTLGYGIADGIGHLGGAIGPVLFTLTYEYNASYSFMLIGIVSMISGVMLLKGARVK

SEQ ID NO: 32351 - protein, 85 aa, unidentified
  REGION 1..85: note = Description of Unknown:cds_NZ_WFIY01000004.1_cds_2129 target sequence
ARRGSRNPIRATVAMNIGISDSLLALVDRYVKALRFALYWMKENVKNPEEKDTLSKVHEGLYEKLKEDYNLPSKVAEDCYRNALA

SEQ ID NO: 32352 - protein, 6 aa, unidentified
  REGION 1..6: note = Description of Unknown:cds_NZ_WFIY01000004.1_cds_2129 target sequence
TYKSLA

SEQ ID NO: 32353 - protein, 85 aa, unidentified
  REGION 1..85: note = Description of Unknown:cds_NZ_WFIY01000004.1_cds_2129 target sequence
KVKIEPKGSVAIDVNMSDIVVDKDDSHYVRIPTRLHDAHHFKTLAENLQKKYSKRWGQNRRILHRIRSFHQKAKRIIEDFARKVS

SEQ ID NO: 32354 - protein, 85 aa, unidentified
  REGION 1..85: note = Description of Unknown:cds_NZ_WFIY01000004.1_cds_2129 target sequence
RWTIEFAEDLGANVIKLENLKNLIRNVNKLSSEFRDRLYLMQYRRIQYWIEWQARKHGMIVKYVNPKYSSVSCPKCGKKMIEIAY

SEQ ID NO: 32355 - protein, 84 aa, unidentified
  REGION 1..84: note = Description of Unknown:cds_NZ_WFIY01000004.1_cds_2129 target sequence
LYLMQYRRIQYWIEWQARKHGMIVKYVNPKYSSVSCPKCGKKMIEIAYRYFHCPSCGYENDRDVIAIMNLNGRGSLTLSTAHQM

SEQ ID NO: 32356 - protein, 64 aa, unidentified
  REGION 1..64: note = Description of Unknown:cds_NZ_WFIY01000004.1_cds_2129 target sequence
DRYVKALRFALYWMKENVKNPEEKDTLSKVHEGLYEKLKEDYNLPSKVAEDCYRNALATYKSLA

SEQ ID NO: 32357 - protein, 8 aa, unidentified
  REGION 1..8: note = Description of Unknown:cds_NZ_WFIY01000004.1_cds_2129 target sequence
GKLYCRLR

SEQ ID NO: 32358 - protein, 85 aa, unidentified
  REGION 1..85: note = Description of Unknown:cds_NZ_WFIY01000004.1_cds_2129 target sequence
YVRIPTRLHDAHHFKTLAENLQKKYSKRWGQNRRILHRIRSFHQKAKRIIEDFARKVSRWTIEFAEDLGANVIKLENLKNLIRNV

SEQ ID NO: 32359 - protein, 85 aa, unidentified
  REGION 1..85: note = Description of Unknown:cds_NZ_WFIY01000004.1_cds_2129 target sequence
NKLSSEFRDRLYLMQYRRIQYWIEWQARKHGMIVKYVNPKYSSVSCPKCGKKMIEIAYRYFHCPSCGYENDRDVIAIMNLNGRGS

SEQ ID NO: 32360 - protein, 85 aa, unidentified
  REGION 1..85: note = Description of Unknown:cds_NZ_WFIY01000004.1_cds_WP_155864227.1_2196 target sequence
LNQIAIIGVGWYGFKPSTPEVSFREMVFEASTRAYQDAGNINPRNYVDSFISCQEDFWEGISISDEFAPDQLGGALRPTMTVAGD

SEQ ID NO: 32361 - protein, 85 aa, unidentified
  REGION 1..85: note = Description of Unknown:cds_NZ_WFIY01000004.1_cds_WP_155864227.1_2196 target sequence
SLQGLAHAFMHINSGIADIVAIEAHSKASDILTYSEIVKLSMDPIYVRSINPQNFHFIAGLDAVKFMERKKISREDLAMVVEKNK

SEQ ID NO: 32362 - protein, 85 aa, unidentified
  REGION 1..85: note = Description of Unknown:cds_NZ_WFIY01000004.1_cds_WP_155864227.1_2196 target sequence
SSGLSSPRASYASKISAQDVLSKEFIVYPLSELDIAPLVDGAIVIVVSTEEIARKLKKDDYVVVKGISYATDSSNLETSELGKAN

SEQ ID NO: 32363 - protein, 85 aa, unidentified
  REGION 1..85: note = Description of Unknown:cds_NZ_WFIY01000004.1_cds_WP_155864227.1_2196 target sequence
YMRIASDLAYKMANVTSPRKYFDAVFVDDRYSYKELQHLEGLRISDDPSKDLNEGNFSPQGEIPVNPLGGHLAKGVPLEASGFSL

SEQ ID NO: 32364 - protein, 84 aa, unidentified
  REGION 1..84: note = Description of Unknown:cds_NZ_WFIY01000004.1_cds_WP_155864227.1_2196 target sequence
LEGLRISDDPSKDLNEGNFSPQGEIPVNPLGGHLAKGVPLEASGFSLLLDAIDYIKQGKIEKALVGSWRGIPTFSGSVVVVEKP

SEQ ID NO: 32365 - protein, 85 aa, unidentified
  REGION 1..85: note = Description of Unknown:cds_NZ_WFIY01000004.1_cds_WP_155864227.1_2196 target sequence
FEASTRAYQDAGNINPRNYVDSFISCQEDFWEGISISDEFAPDQLGGALRPTMTVAGDSLQGLAHAFMHINSGIADIVAIEAHSK

SEQ ID NO: 32366 - protein, 85 aa, unidentified
  REGION 1..85: note = Description of Unknown:cds_NZ_WFIY01000004.1_cds_WP_155864227.1_2196 target sequence
ASDILTYSEIVKLSMDPIYVRSINPQNFHFIAGLDAVKFMERKKISREDLAMVVEKNKSSGLSSPRASYASKISAQDVLSKEFIV

SEQ ID NO: 32367 - protein, 85 aa, unidentified
  REGION 1..85: note = Description of Unknown:cds_NZ_WFIY01000004.1_cds_WP_155864227.1_2196 target sequence
YPLSELDIAPLVDGAIVIVVSTEEIARKLKKDDYVVVKGISYATDSSNLETSELGKANYMRIASDLAYKMANVTSPRKYFDAVFV

SEQ ID NO: 32368 - protein, 85 aa, unidentified
  REGION 1..85: note = Description of Unknown:cds_NZ_WFIY01000004.1_cds_WP_155864227.1_2196 target sequence
DDRYSYKELQHLEGLRISDDPSKDLNEGNFSPQGEIPVNPLGGHLAKGVPLEASGFSLLLDAIDYIKQGKIEKALVGSWRGIPTF

SEQ ID NO: 32369 - protein, 85 aa, unidentified
  REGION 1..85: note = Description of Unknown:cds_NC_025350.1_cds_YP_009094077.1_4 target sequence
AGRQATIPVPINFESPKNYLNAFPIVQADPSVSGEAGKLLKQIRFKDLTLRGSTEAPISFVNSYGFIKPLRTREEFFSEMHKPSQ

SEQ ID NO: 32370 - protein, 85 aa, unidentified
  REGION 1..85: note = Description of Unknown:cds_NC_025350.1_cds_YP_009094077.1_4 target sequence
APCLTACCLPFGAGPAIEHPDKIMDDLDKVFIVVRKSASTIEECVFDIRKLPSSLSRHQLAGNRVLCVASDKYIKAPCKLTSGMD

SEQ ID NO: 32371 - protein, 85 aa, unidentified
  REGION 1..85: note = Description of Unknown:cds_NC_025350.1_cds_YP_009094077.1_4 target sequence
YTYNIVFLSITHCPPSQKFRVPMPIQSLRAKVMRSVHLEIMIKVDCDKNSPITKNLIYDPSNDIWMASIWFHLCNFYKGSKPFKE

SEQ ID NO: 32372 - protein, 85 aa, unidentified
  REGION 1..85: note = Description of Unknown:cds_NC_025350.1_cds_YP_009094077.1_4 target sequence
YDDQHFASKCRAMGLEVGLVDFWGPTFLVKAHGKIPHAARPFFGKHGWVCHPMMDCAPAISKSLWALSISILQVNAVLQASDLNQ

SEQ ID NO: 32373 - protein, 84 aa, unidentified
  REGION 1..84: note = Description of Unknown:cds_NC_025350.1_cds_YP_009094077.1_4 target sequence
AARPFFGKHGWVCHPMMDCAPAISKSLWALSISILQVNAVLQASDLNQMIRMTDVVFPKVKINPDIAGVQKTRWNPVKKLVTID

SEQ ID NO: 32374 - protein, 85 aa, unidentified
  REGION 1..85: note = Description of Unknown:cds_NC_025350.1_cds_YP_009094077.1_4 target sequence
ADPSVSGEAGKLLKQIRFKDLTLRGSTEAPISFVNSYGFIKPLRTREEFFSEMHKPSQAPCLTACCLPFGAGPAIEHPDKIMDDL

SEQ ID NO: 32375 - protein, 85 aa, unidentified
  REGION 1..85: note = Description of Unknown:cds_NC_025350.1_cds_YP_009094077.1_4 target sequence
DKVFIVVRKSASTIEECVFDIRKLPSSLSRHQLAGNRVLCVASDKYIKAPCKLTSGMDYTYNIVFLSITHCPPSQKFRVPMPIQS

SEQ ID NO: 32376 - protein, 85 aa, unidentified
  REGION 1..85: note = Description of Unknown:cds_NC_025350.1_cds_YP_009094077.1_4 target sequence
LRAKVMRSVHLEIMIKVDCDKNSPITKNLIYDPSNDIWMASIWFHLCNFYKGSKPFKEYDDQHFASKCRAMGLEVGLVDFWGPTF

SEQ ID NO: 32377 - protein, 85 aa, unidentified
  REGION 1..85: note = Description of Unknown:cds_NC_025350.1_cds_YP_009094077.1_4 target sequence
LVKAHGKIPHAARPFFGKHGWVCHPMMDCAPAISKSLWALSISILQVNAVLQASDLNQMIRMTDVVFPKVKINPDIAGVQKTRWN

SEQ ID NO: 32378 - protein, 85 aa, unidentified
  REGION 1..85: note = Description of Unknown:cds_NZ_WFIY01000004.1_cds_WP_155863455.1_1422 target sequence
SEEYLSLLKYYRDPKLAKAIKIKIDELSRKIEENVMIMHVCGSHEWTITHYGIRTLLPDNIEVRAGPGCPVCITPATDIDDAVKL

SEQ ID NO: 32379 - protein, 85 aa, unidentified
  REGION 1..85: note = Description of Unknown:cds_NZ_WFIY01000004.1_cds_WP_155863455.1_1422 target sequence
ALDGVVITTYGDMSRARGTKMSLQDAKALGGDVRIIYGVQDAVKMARKEPEKEFLFFAVGMDTTAPATAFELLKGVPKNLSFLVS

SEQ ID NO: 32380 - protein, 85 aa, unidentified
  REGION 1..85: note = Description of Unknown:cds_NZ_WFIY01000004.1_cds_WP_155863455.1_1422 target sequence
YRYTPAIQGSVMESNVLGIDAFISAGHSATITGLKPYYEYFLRSKKPMVATGFEPIDVLMAIYMILKQIDEGRPKIENEYTRSVT

SEQ ID NO: 32381 - protein, 85 aa, unidentified
  REGION 1..85: note = Description of Unknown:cds_NZ_WFIY01000004.1_cds_WP_155863455.1_1422 target sequence
WEGNVKAQEVMEKVFDLEDGYVRGVAIFPKAGFRLKDEFRKYDAREQYGLKDRSKTADEYVAGARCGEVVMGLIDPPECPLYMKT

SEQ ID NO: 32382 - protein, 84 aa, unidentified
  REGION 1..84: note = Description of Unknown:cds_NZ_WFIY01000004.1_cds_WP_155863455.1_1422 target sequence
DEFRKYDAREQYGLKDRSKTADEYVAGARCGEVVMGLIDPPECPLYMKTCKPDDPKGAPMVSQEGTCWIWAMHKIVNVAPRCKR

SEQ ID NO: 32383 - protein, 85 aa, unidentified
  REGION 1..85: note = Description of Unknown:cds_NZ_WFIY01000004.1_cds_WP_155863455.1_1422 target sequence
SRKIEENVMIMHVCGSHEWTITHYGIRTLLPDNIEVRAGPGCPVCITPATDIDDAVKLALDGVVITTYGDMSRARGTKMSLQDAK

SEQ ID NO: 32384 - protein, 85 aa, unidentified
  REGION 1..85: note = Description of Unknown:cds_NZ_WFIY01000004.1_cds_WP_155863455.1_1422 target sequence
ALGGDVRIIYGVQDAVKMARKEPEKEFLFFAVGMDTTAPATAFELLKGVPKNLSFLVSYRYTPAIQGSVMESNVLGIDAFISAGH

SEQ ID NO: 32385 - protein, 85 aa, unidentified
  REGION 1..85: note = Description of Unknown:cds_NZ_WFIY01000004.1_cds_WP_155863455.1_1422 target sequence
SATITGLKPYYEYFLRSKKPMVATGFEPIDVLMAIYMILKQIDEGRPKIENEYTRSVTWEGNVKAQEVMEKVFDLEDGYVRGVAI

SEQ ID NO: 32386 - protein, 85 aa, unidentified
  REGION 1..85: note = Description of Unknown:cds_NZ_WFIY01000004.1_cds_WP_155863455.1_1422 target sequence
FPKAGFRLKDEFRKYDAREQYGLKDRSKTADEYVAGARCGEVVMGLIDPPECPLYMKTCKPDDPKGAPMVSQEGTCWIWAMHKIV

SEQ ID NO: 32387 - protein, 85 aa, unidentified
  REGION 1..85: note = Description of Unknown:cds_NZ_WFIY01000004.1_cds_WP_155863825.1_1718 target sequence
QILHISDTHLGARKYNLDSREEDIYETFTQLIDYAIKEHVDAIIHTGDLFDTYHPQMTAMKVAIDNLKRIQGKIPFIGIAGDHDT

SEQ ID NO: 32388 - protein, 85 aa, unidentified
  REGION 1..85: note = Description of Unknown:cds_NZ_WFIY01000004.1_cds_WP_155863825.1_1718 target sequence
PKRKGAIYPQRILAESLNLLVFLTGDEKGYEINKDNIRLRIYGIKHIPTVARETLLKKLSSIKPEGDRNILMLHQGLRSKLPYEG

SEQ ID NO: 32389 - protein, 85 aa, unidentified
  REGION 1..85: note = Description of Unknown:cds_NZ_WFIY01000004.1_cds_WP_155863825.1_1718 target sequence
AWQLEEGELPKGFDYYAFGHFHSRSIENLGDGKLGIAGSPDIIRDDEIEAWEKDGKGGYLIDLSKKEVEIQKINTDIRPQKIVTI

SEQ ID NO: 32390 - protein, 85 aa, unidentified
  REGION 1..85: note = Description of Unknown:cds_NZ_WFIY01000004.1_cds_WP_155863825.1_1718 target sequence
NTKNLDNEINDLIKIFSKCKKKPILHIILEGEAVSKSLLFKKLSILESVTEFYRVAKDNTTYGEEKNVDLPKDSTISQIIMNYLK

SEQ ID NO: 32391 - protein, 84 aa, unidentified
  REGION 1..84: note = Description of Unknown:cds_NZ_WFIY01000004.1_cds_WP_155863825.1_1718 target sequence
SLLFKKLSILESVTEFYRVAKDNTTYGEEKNVDLPKDSTISQIIMNYLKNFGYTEEESKLILEIINNYDSDDIYTIIKKFAGVQ

SEQ ID NO: 32392 - protein, 85 aa, unidentified
  REGION 1..85: note = Description of Unknown:cds_NZ_WFIY01000004.1_cds_WP_155863825.1_1718 target sequence
FTQLIDYAIKEHVDAIIHTGDLFDTYHPQMTAMKVAIDNLKRIQGKIPFIGIAGDHDTPKRKGAIYPQRILAESLNLLVFLTGDE

SEQ ID NO: 32393 - protein, 85 aa, unidentified
  REGION 1..85: note = Description of Unknown:cds_NZ_WFIY01000004.1_cds_WP_155863825.1_1718 target sequence
KGYEINKDNIRLRIYGIKHIPTVARETLLKKLSSIKPEGDRNILMLHQGLRSKLPYEGAWQLEEGELPKGFDYYAFGHFHSRSIE

SEQ ID NO: 32394 - protein, 85 aa, unidentified
  REGION 1..85: note = Description of Unknown:cds_NZ_WFIY01000004.1_cds_WP_155863825.1_1718 target sequence
NLGDGKLGIAGSPDIIRDDEIEAWEKDGKGGYLIDLSKKEVEIQKINTDIRPQKIVTINTKNLDNEINDLIKIFSKCKKKPILHI

SEQ ID NO: 32395 - protein, 85 aa, unidentified
  REGION 1..85: note = Description of Unknown:cds_NZ_WFIY01000004.1_cds_WP_155863825.1_1718 target sequence
ILEGEAVSKSLLFKKLSILESVTEFYRVAKDNTTYGEEKNVDLPKDSTISQIIMNYLKNFGYTEEESKLILEIINNYDSDDIYTI

SEQ ID NO: 32396 - protein, 85 aa, unidentified
  REGION 1..85: note = Description of Unknown:cds_NC_035460.1_cds_YP_009407971.1_20 target sequence
AYFLLFILFLINNIYCFDIVSVNDGENVNICICDFNITSVNWTFTPHNYNVFSYTNYNIPIHNLSLPIPQNFNSTPPFFNLISIT

SEQ ID NO: 32397 - protein, 85 aa, unidentified
  REGION 1..85: note = Description of Unknown:cds_NC_035460.1_cds_YP_009407971.1_20 target sequence
NGTSLNTDKRNNIYKGLSKRINPFNNTCLNITNVSYDDSGLYIAFYYKNNNIRYNYTAQLNVNVRQPTIDLKAIVINNETNLCRV

SEQ ID NO: 32398 - protein, 85 aa, unidentified
  REGION 1..85: note = Description of Unknown:cds_NC_035460.1_cds_YP_009407971.1_20 target sequence
LVTCDANHITSTASIFLGNMYVGKTALLSEIRYVNTNKTLFGYNYHPHNINYDEISLSLYATINKLEPVSDNYTYYCSVKTHHLS

SEQ ID NO: 32399 - protein, 85 aa, unidentified
  REGION 1..85: note = Description of Unknown:cds_NC_035460.1_cds_YP_009407971.1_20 target sequence
CNVSLDIKHLCTYKTYNNAVIKESSCSNIHQIRHSRSIHTNSKVNKQVGIDTSDIIIIIVIVCILLCIFLTLYLFVKWDEFIKAF

SEQ ID NO: 32400 - protein, 84 aa, unidentified
  REGION 1..84: note = Description of Unknown:cds_NC_035460.1_cds_YP_009407971.1_20 target sequence
SIHTNSKVNKQVGIDTSDIIIIIVIVCILLCIFLTLYLFVKWDEFIKAFKNIKLRIINILFRRSFTPLNNVYYTEENQVGVNVE

SEQ ID NO: 32401 - protein, 85 aa, unidentified
  REGION 1..85: note = Description of Unknown:cds_NC_035460.1_cds_YP_009407971.1_20 target sequence
VNICICDFNITSVNWTFTPHNYNVFSYTNYNIPIHNLSLPIPQNFNSTPPFFNLISITNGTSLNTDKRNNIYKGLSKRINPFNNT

SEQ ID NO: 32402 - protein, 85 aa, unidentified
  REGION 1..85: note = Description of Unknown:cds_NC_035460.1_cds_YP_009407971.1_20 target sequence
CLNITNVSYDDSGLYIAFYYKNNNIRYNYTAQLNVNVRQPTIDLKAIVINNETNLCRVLVTCDANHITSTASIFLGNMYVGKTAL

SEQ ID NO: 32403 - protein, 85 aa, unidentified
  REGION 1..85: note = Description of Unknown:cds_NC_035460.1_cds_YP_009407971.1_20 target sequence
LSEIRYVNTNKTLFGYNYHPHNINYDEISLSLYATINKLEPVSDNYTYYCSVKTHHLSCNVSLDIKHLCTYKTYNNAVIKESSCS

SEQ ID NO: 32404 - protein, 85 aa, unidentified
  REGION 1..85: note = Description of Unknown:cds_NC_035460.1_cds_YP_009407971.1_20 target sequence
NIHQIRHSRSIHTNSKVNKQVGIDTSDIIIIIVIVCILLCIFLTLYLFVKWDEFIKAFKNIKLRIINILFRRSFTPLNNVYYTEE

SEQ ID NO: 32405 - protein, 85 aa, unidentified
  REGION 1..85: note = Description of Unknown:cds_NC_025348.1_cds_YP_009094064.1_4 target sequence
AHRQATVSIKVNHESEKNHLRPFPIVQLPPSPGGSRGRLTRQIRIKDLTPAGSTEPSLTFINTYGFAKPLRTRTEFFSELHKPDS

SEQ ID NO: 32406 - protein, 85 aa, unidentified
  REGION 1..85: note = Description of Unknown:cds_NC_025348.1_cds_YP_009094064.1_4 target sequence
LPSVTACTLPFGAGPNIEHPMRLLDEIEKVHIVMRKSASAREEIVFNVCRLPPILSKHHIATQKLVCISSEKYLKAPGKMISGMD

SEQ ID NO: 32407 - protein, 85 aa, unidentified
  REGION 1..85: note = Description of Unknown:cds_NC_025348.1_cds_YP_009094064.1_4 target sequence
YNYHIAFISVVYCPASLKFRVMRPLQLLRSSTMRSIQLEVILVIECSDNSPATRNLIFDDESKTWRASVWFHLCNILKSNKSAEK

SEQ ID NO: 32408 - protein, 85 aa, unidentified
  REGION 1..85: note = Description of Unknown:cds_NC_025348.1_cds_YP_009094064.1_4 target sequence
YDDHYFNEKCKKMDLEVGIADMWGPTFLVKAHGKIPKTAQVYFSPKGWSCHPLVDAAPALSKILWSTGARIVNVNAILQPSDLGQ

SEQ ID NO: 32409 - protein, 84 aa, unidentified
  REGION 1..84: note = Description of Unknown:cds_NC_025348.1_cds_YP_009094064.1_4 target sequence
KTAQVYFSPKGWSCHPLVDAAPALSKILWSTGARIVNVNAILQPSDLGQLVQVSDVIYPKVKINKKLMNTAPSRWNPVKKAVLA

SEQ ID NO: 32410 - protein, 85 aa, unidentified
  REGION 1..85: note = Description of Unknown:cds_NC_025348.1_cds_YP_009094064.1_4 target sequence
LPPSPGGSRGRLTRQIRIKDLTPAGSTEPSLTFINTYGFAKPLRTRTEFFSELHKPDSLPSVTACTLPFGAGPNIEHPMRLLDEI

SEQ ID NO: 32411 - protein, 85 aa, unidentified
  REGION 1..85: note = Description of Unknown:cds_NC_025348.1_cds_YP_009094064.1_4 target sequence
EKVHIVMRKSASAREEIVFNVCRLPPILSKHHIATQKLVCISSEKYLKAPGKMISGMDYNYHIAFISVVYCPASLKFRVMRPLQL

SEQ ID NO: 32412 - protein, 85 aa, unidentified
  REGION 1..85: note = Description of Unknown:cds_NC_025348.1_cds_YP_009094064.1_4 target sequence
LRSSTMRSIQLEVILVIECSDNSPATRNLIFDDESKTWRASVWFHLCNILKSNKSAEKYDDHYFNEKCKKMDLEVGIADMWGPTF

SEQ ID NO: 32413 - protein, 85 aa, unidentified
  REGION 1..85: note = Description of Unknown:cds_NC_025348.1_cds_YP_009094064.1_4 target sequence
LVKAHGKIPKTAQVYFSPKGWSCHPLVDAAPALSKILWSTGARIVNVNAILQPSDLGQLVQVSDVIYPKVKINKKLMNTAPSRWN

SEQ ID NO: 32414 - protein, 85 aa, unidentified
  REGION 1..85: note = Description of Unknown:cds_NZ_WFIY01000004.1_cds_1847 target sequence
VKDSTKAVKEDIEDSTKAITTPIYQTVAFMFPEGEKFRYSREANPTTLELGKKIAELEGAEMGIAFSSGMGAITTTLFTLLTPGK

SEQ ID NO: 32415 - protein, 85 aa, unidentified
  REGION 1..85: note = Description of Unknown:cds_NZ_WFIY01000004.1_cds_1847 target sequence
SLLVTMDMFGRSLRFCKDFLVNWGVKVTISKPGNENLLEIAKRSHFDVIFVESITNPLLRVINLPELSKIAKENNSILVVDSTFA

SEQ ID NO: 32416 - protein, 85 aa, unidentified
  REGION 1..85: note = Description of Unknown:cds_NZ_WFIY01000004.1_cds_1847 target sequence
TPINQKPIELGADIVIHSASKFIAGHNDVIAGLAAGKEELMKNVDLMRRTLGTSLEPFPAYLVIRGMKTLKIRMDVINRNAEQIA

SEQ ID NO: 32417 - protein, 85 aa, unidentified
  REGION 1..85: note = Description of Unknown:cds_NZ_WFIY01000004.1_cds_1847 target sequence
EFLEDHPKVTKVYYPGLKSHPDYEIARKVLKGFGGVVSFEVRGGKDEALKVMRSTKVIIPAQSLGGVNSLISHPPTMSHRTLTLE

SEQ ID NO: 32418 - protein, 84 aa, unidentified
  REGION 1..84: note = Description of Unknown:cds_NZ_WFIY01000004.1_cds_1847 target sequence
VSFEVRGGKDEALKVMRSTKVIIPAQSLGGVNSLISHPPTMSHRTLTLEERKIIGINDSLLRLSVGIEDVEDLIEDLAQALSKI

SEQ ID NO: 32419 - protein, 85 aa, unidentified
  REGION 1..85: note = Description of Unknown:cds_NZ_WFIY01000004.1_cds_1847 target sequence
AFMFPEGEKFRYSREANPTTLELGKKIAELEGAEMGIAFSSGMGAITTTLFTLLTPGKSLLVTMDMFGRSLRFCKDFLVNWGVKV

SEQ ID NO: 32420 - protein, 85 aa, unidentified
  REGION 1..85: note = Description of Unknown:cds_NZ_WFIY01000004.1_cds_1847 target sequence
TISKPGNENLLEIAKRSHFDVIFVESITNPLLRVINLPELSKIAKENNSILVVDSTFATPINQKPIELGADIVIHSASKFIAGHN

SEQ ID NO: 32421 - protein, 85 aa, unidentified
  REGION 1..85: note = Description of Unknown:cds_NZ_WFIY01000004.1_cds_1847 target sequence
DVIAGLAAGKEELMKNVDLMRRTLGTSLEPFPAYLVIRGMKTLKIRMDVINRNAEQIAEFLEDHPKVTKVYYPGLKSHPDYEIAR

SEQ ID NO: 32422 - protein, 85 aa, unidentified
  REGION 1..85: note = Description of Unknown:cds_NZ_WFIY01000004.1_cds_1847 target sequence
KVLKGFGGVVSFEVRGGKDEALKVMRSTKVIIPAQSLGGVNSLISHPPTMSHRTLTLEERKIIGINDSLLRLSVGIEDVEDLIED

SEQ ID NO: 32423 - protein, 85 aa, unidentified
  REGION 1..85: note = Description of Unknown:cds_NZ_WFIY01000004.1_cds_WP_155864161.1_2115 target sequence
KPLRTYIMIRNFALNLSQPFISFVSAAFGISGENLAIVSSAGSALPSFIQFVMGFFNLRGKIITFYGTLAAGLLWISLSFIPFGV

SEQ ID NO: 32424 - protein, 85 aa, unidentified
  REGION 1..85: note = Description of Unknown:cds_NZ_WFIY01000004.1_cds_WP_155864161.1_2115 target sequence
FFVVIYVILEASLGISAYGWYLIMERVSNTSRGKILAQYSFYSVIGGIIATLITGFIVNKEFNEVRYFFLISGSLFILSSLISLE

SEQ ID NO: 32425 - protein, 85 aa, unidentified
  REGION 1..85: note = Description of Unknown:cds_NZ_WFIY01000004.1_cds_WP_155864161.1_2115 target sequence
FDVDYSKEPLKGLSLNKELSKFLIITFLFDVVWSMAWPLFPLAQVYLFNMDFENIAIINLIANFSTLLLQRKIGELVDKNRRLMM

SEQ ID NO: 32426 - protein, 85 aa, unidentified
  REGION 1..85: note = Description of Unknown:cds_NZ_WFIY01000004.1_cds_WP_155864161.1_2115 target sequence
FLGRLALSVFPLAYALSTSVYEIYLANVVAGFTSSINSTAYLSYIYDNSKDVRKGIGLYNAVSGLGDIIGSSIGAFGVEELEFLG

SEQ ID NO: 32427 - protein, 84 aa, unidentified
  REGION 1..84: note = Description of Unknown:cds_NZ_WFIY01000004.1_cds_WP_155864161.1_2115 target sequence
INSTAYLSYIYDNSKDVRKGIGLYNAVSGLGDIIGSSIGAFGVEELEFLGIFLAIKIMMLIVASLRAIASFFYLKIQEVKPVKF

SEQ ID NO: 32428 - protein, 85 aa, unidentified
  REGION 1..85: note = Description of Unknown:cds_NZ_WFIY01000004.1_cds_WP_155864161.1_2115 target sequence
FGISGENLAIVSSAGSALPSFIQFVMGFFNLRGKIITFYGTLAAGLLWISLSFIPFGVFFVVIYVILEASLGISAYGWYLIMERV

SEQ ID NO: 32429 - protein, 85 aa, unidentified
  REGION 1..85: note = Description of Unknown:cds_NZ_WFIY01000004.1_cds_WP_155864161.1_2115 target sequence
SNTSRGKILAQYSFYSVIGGIIATLITGFIVNKEFNEVRYFFLISGSLFILSSLISLEFDVDYSKEPLKGLSLNKELSKFLIITF

SEQ ID NO: 32430 - protein, 85 aa, unidentified
  REGION 1..85: note = Description of Unknown:cds_NZ_WFIY01000004.1_cds_WP_155864161.1_2115 target sequence
LFDVVWSMAWPLFPLAQVYLFNMDFENIAIINLIANFSTLLLQRKIGELVDKNRRLMMFLGRLALSVFPLAYALSTSVYEIYLAN

SEQ ID NO: 32431 - protein, 85 aa, unidentified
  REGION 1..85: note = Description of Unknown:cds_NZ_WFIY01000004.1_cds_WP_155864161.1_2115 target sequence
VVAGFTSSINSTAYLSYIYDNSKDVRKGIGLYNAVSGLGDIIGSSIGAFGVEELEFLGIFLAIKIMMLIVASLRAIASFFYLKIQ

SEQ ID NO: 32432 - protein, 85 aa, unidentified
  REGION 1..85: note = Description of Unknown:cds_NC_039198.1_cds_YP_009512975.1_4 target sequence
ALRQATIPIAVDNESEKNNLNPFPIVPITRDDGSPTGRLVRQLRIKNLTPRGSTELPLTFINTYGFIKPLMTYTEFYSELHHQSS

SEQ ID NO: 32433 - protein, 85 aa, unidentified
  REGION 1..85: note = Description of Unknown:cds_NC_039198.1_cds_YP_009512975.1_4 target sequence
TPCLTACMIPFGAGPYIENPHRILDECDKVNIVVRKSASVKEEIIFDVRRLPPLFNRHQISGNRLICVPSEKYVKSPGKMTAGTD

SEQ ID NO: 32434 - protein, 85 aa, unidentified
  REGION 1..85: note = Description of Unknown:cds_NC_039198.1_cds_YP_009512975.1_4 target sequence
YSYQIAFVSLTFCPESQKFRVARPLQTIRSPIMRSVQLEVILKVDCAANSPLKRFLIVSPDSKEYFASVWFHVCNLYRGNKPFKS

SEQ ID NO: 32435 - protein, 85 aa, unidentified
  REGION 1..85: note = Description of Unknown:cds_NC_039198.1_cds_YP_009512975.1_4 target sequence
YDDTYFSEKCRAMQLECGIVDMWGPTLVVKAHGKIPKMAKPFFSSKGWSCHAFADSAPTLAKALWSVGAQITQVNAILQPSDLHQ

SEQ ID NO: 32436 - protein, 84 aa, unidentified
  REGION 1..84: note = Description of Unknown:cds_NC_039198.1_cds_YP_009512975.1_4 target sequence
PKMAKPFFSSKGWSCHAFADSAPTLAKALWSVGAQITQVNAILQPSDLHQLVQVSDVIWPKVKLDEKIQLYAAAKWNPFKKSAN

SEQ ID NO: 32437 - protein, 85 aa, unidentified
  REGION 1..85: note = Description of Unknown:cds_NC_039198.1_cds_YP_009512975.1_4 target sequence
ITRDDGSPTGRLVRQLRIKNLTPRGSTELPLTFINTYGFIKPLMTYTEFYSELHHQSSTPCLTACMIPFGAGPYIENPHRILDEC

SEQ ID NO: 32438 - protein, 85 aa, unidentified
  REGION 1..85: note = Description of Unknown:cds_NC_039198.1_cds_YP_009512975.1_4 target sequence
DKVNIVVRKSASVKEEIIFDVRRLPPLFNRHQISGNRLICVPSEKYVKSPGKMTAGTDYSYQIAFVSLTFCPESQKFRVARPLQT

SEQ ID NO: 32439 - protein, 85 aa, unidentified
  REGION 1..85: note = Description of Unknown:cds_NC_039198.1_cds_YP_009512975.1_4 target sequence
IRSPIMRSVQLEVILKVDCAANSPLKRFLIVSPDSKEYFASVWFHVCNLYRGNKPFKSYDDTYFSEKCRAMQLECGIVDMWGPTL

SEQ ID NO: 32440 - protein, 85 aa, unidentified
  REGION 1..85: note = Description of Unknown:cds_NC_039198.1_cds_YP_009512975.1_4 target sequence
VVKAHGKIPKMAKPFFSSKGWSCHAFADSAPTLAKALWSVGAQITQVNAILQPSDLHQLVQVSDVIWPKVKLDEKIQLYAAAKWN

SEQ ID NO: 32441 - protein, 85 aa, unidentified
  REGION 1..85: note = Description of Unknown:cds_NC_030656.1_cds_YP_009268753.1_38 target sequence
ESYYYSPPRDGLVYLVTGGCGFLGEHIVKMLLERESRLKELRILDIEYKDWLNELVFKFRSVEIVFIKASITDNDIVLNATAGVD

SEQ ID NO: 32442 - protein, 85 aa, unidentified
  REGION 1..85: note = Description of Unknown:cds_NC_030656.1_cds_YP_009268753.1_38 target sequence
LIIHTACIVDVFGKFSDRQIMEVNVTGTKNLLEACITNGVGYFIFTSSMEAVGPNTDREPFIGDEDTAYTVKHPHVYSRSKAEAE

SEQ ID NO: 32443 - protein, 85 aa, unidentified
  REGION 1..85: note = Description of Unknown:cds_NC_030656.1_cds_YP_009268753.1_38 target sequence
KLVLSYNGRAVCGGRFMTTAAIRPTGVYGEGDALTMKSFHQAKKLRNKMYRTISPTVEHSRVYVGNAAWMHVLLAKQMPYKSKIV

SEQ ID NO: 32444 - protein, 85 aa, unidentified
  REGION 1..85: note = Description of Unknown:cds_NC_030656.1_cds_YP_009268753.1_38 target sequence
GGQVYYTYDNSPTGLSYEDFNLLFFKFFGVKLVGETKPVIPHNMLKALAYVNKGIQTCLKPFCKFTPMLNPATLAIATTTFAVKT

SEQ ID NO: 32445 - protein, 84 aa, unidentified
  REGION 1..84: note = Description of Unknown:cds_NC_030656.1_cds_YP_009268753.1_38 target sequence
TKPVIPHNMLKALAYVNKGIQTCLKPFCKFTPMLNPATLAIATTTFAVKTNKANEHFGYRAVYCWEASQLRTIKWIFNTELLEV

SEQ ID NO: 32446 - protein, 85 aa, unidentified
  REGION 1..85: note = Description of Unknown:cds_NC_030656.1_cds_YP_009268753.1_38 target sequence
VKMLLERESRLKELRILDIEYKDWLNELVFKFRSVEIVFIKASITDNDIVLNATAGVDLIIHTACIVDVFGKFSDRQIMEVNVTG

SEQ ID NO: 32447 - protein, 85 aa, unidentified
  REGION 1..85: note = Description of Unknown:cds_NC_030656.1_cds_YP_009268753.1_38 target sequence
TKNLLEACITNGVGYFIFTSSMEAVGPNTDREPFIGDEDTAYTVKHPHVYSRSKAEAEKLVLSYNGRAVCGGRFMTTAAIRPTGV

SEQ ID NO: 32448 - protein, 85 aa, unidentified
  REGION 1..85: note = Description of Unknown:cds_NC_030656.1_cds_YP_009268753.1_38 target sequence
YGEGDALTMKSFHQAKKLRNKMYRTISPTVEHSRVYVGNAAWMHVLLAKQMPYKSKIVGGQVYYTYDNSPTGLSYEDFNLLFFKF

SEQ ID NO: 32449 - protein, 85 aa, unidentified
  REGION 1..85: note = Description of Unknown:cds_NC_030656.1_cds_YP_009268753.1_38 target sequence
FGVKLVGETKPVIPHNMLKALAYVNKGIQTCLKPFCKFTPMLNPATLAIATTTFAVKTNKANEHFGYRAVYCWEASQLRTIKWIF

SEQ ID NO: 32450 - protein, 85 aa, unidentified
  REGION 1..85: note = Description of Unknown:cds_NZ_WFIY01000004.1_cds_WP_155863880.1_1784 target sequence
LKILIKAGIAFLKDSAPVTNAYIGVNDGKIEAISKRELEEYDDAELIVGGFDRLVSPGFVTTQSFIQLYPFRYRIFSGKTNPNDL

SEQ ID NO: 32451 - protein, 85 aa, unidentified
  REGION 1..85: note = Description of Unknown:cds_NZ_WFIY01000004.1_cds_WP_155863880.1_1784 target sequence
ISTMTSKDAYYFSLLGAYHLLRSGITTVVVTEPFVEQAARAVKTVGLRPIVSAEIGCNWIKGDWKKNFESLYSKWISKDESGIVL

SEQ ID NO: 32452 - protein, 85 aa, unidentified
  REGION 1..85: note = Description of Unknown:cds_NZ_WFIY01000004.1_cds_WP_155863880.1_1784 target sequence
KLCDEDEAEEAMAISNEYKLPILVDRNVNLEKINNISPYTIALGGGSRKDLEKIRKNNLNLAFTPSLEVCKFTLGAYKPSISIDL

SEQ ID NO: 32453 - protein, 85 aa, unidentified
  REGION 1..85: note = Description of Unknown:cds_NZ_WFIY01000004.1_cds_WP_155863880.1_1784 target sequence
TPKFDIRNEMGIAASRLLLTAEEAFKAVTDWGYSQLKMNGGISVGNTTDIIIFEVNEPPSYPIDKEAPYESLIYSSYSLETVIIN

SEQ ID NO: 32454 - protein, 84 aa, unidentified
  REGION 1..84: note = Description of Unknown:cds_NZ_WFIY01000004.1_cds_WP_155863880.1_1784 target sequence
LKMNGGISVGNTTDIIIFEVNEPPSYPIDKEAPYESLIYSSYSLETVIINGEAVLDGGVPLNVGTKDIEEANRKVEEIGKVEKN

SEQ ID NO: 32455 - protein, 85 aa, unidentified
  REGION 1..85: note = Description of Unknown:cds_NZ_WFIY01000004.1_cds_WP_155863880.1_1784 target sequence
GKIEAISKRELEEYDDAELIVGGFDRLVSPGFVTTQSFIQLYPFRYRIFSGKTNPNDLISTMTSKDAYYFSLLGAYHLLRSGITT

SEQ ID NO: 32456 - protein, 85 aa, unidentified
  REGION 1..85: note = Description of Unknown:cds_NZ_WFIY01000004.1_cds_WP_155863880.1_1784 target sequence
VVVTEPFVEQAARAVKTVGLRPIVSAEIGCNWIKGDWKKNFESLYSKWISKDESGIVLKLCDEDEAEEAMAISNEYKLPILVDRN

SEQ ID NO: 32457 - protein, 85 aa, unidentified
  REGION 1..85: note = Description of Unknown:cds_NZ_WFIY01000004.1_cds_WP_155863880.1_1784 target sequence
VNLEKINNISPYTIALGGGSRKDLEKIRKNNLNLAFTPSLEVCKFTLGAYKPSISIDLTPKFDIRNEMGIAASRLLLTAEEAFKA

SEQ ID NO: 32458 - protein, 85 aa, unidentified
  REGION 1..85: note = Description of Unknown:cds_NZ_WFIY01000004.1_cds_WP_155863880.1_1784 target sequence
VTDWGYSQLKMNGGISVGNTTDIIIFEVNEPPSYPIDKEAPYESLIYSSYSLETVIINGEAVLDGGVPLNVGTKDIEEANRKVEE

SEQ ID NO: 32459 - protein, 85 aa, unidentified
  REGION 1..85: note = Description of Unknown:cds_NC_030656.1_cds_YP_009268815.1_100 target sequence
DKLKTLYEKFYCISKTYLESETGQQTDDPEFDVDVSTLMSIVPVLEQKVCEISPSLTDAEVIKLMKYCNYQLFTFWFMRSNAVVK

SEQ ID NO: 32460 - protein, 85 aa, unidentified
  REGION 1..85: note = Description of Unknown:cds_NC_030656.1_cds_YP_009268815.1_100 target sequence
SVYNKLSECEKKDFICTFKEMLTVTQTLIMLNNMYNNIKHDTEDIVADSKKILEIITQIKSLSGEGRIYHLLNSHYSFIVRTVNK

SEQ ID NO: 32461 - protein, 85 aa, unidentified
  REGION 1..85: note = Description of Unknown:cds_NC_030656.1_cds_YP_009268815.1_100 target sequence
IFSDENYLLKLVAVFDSEMVNNKQKLEEYRQLLTISTESLKHGIKCISELTFSISVEPNKYTTFFRKVLSNIIIFQNNSDLNATK

SEQ ID NO: 32462 - protein, 85 aa, unidentified
  REGION 1..85: note = Description of Unknown:cds_NC_030656.1_cds_YP_009268815.1_100 target sequence
FITSVSKMYILVYSQLKGNDDVRILLSNVLESLKTKVSPEDIKSRGVRNIQSLIGYISDHKSVYKSILEQEYTTREDNIVNLLQQ

SEQ ID NO: 32463 - protein, 84 aa, unidentified
  REGION 1..84: note = Description of Unknown:cds_NC_030656.1_cds_YP_009268815.1_100 target sequence
TKVSPEDIKSRGVRNIQSLIGYISDHKSVYKSILEQEYTTREDNIVNLLQQIVNNNNICYNSEVLNVCDLIKTAKESFFDKLSK

SEQ ID NO: 32464 - protein, 85 aa, unidentified
  REGION 1..85: note = Description of Unknown:cds_NC_030656.1_cds_YP_009268815.1_100 target sequence
DPEFDVDVSTLMSIVPVLEQKVCEISPSLTDAEVIKLMKYCNYQLFTFWFMRSNAVVKSVYNKLSECEKKDFICTFKEMLTVTQT

SEQ ID NO: 32465 - protein, 85 aa, unidentified
  REGION 1..85: note = Description of Unknown:cds_NC_030656.1_cds_YP_009268815.1_100 target sequence
LIMLNNMYNNIKHDTEDIVADSKKILEIITQIKSLSGEGRIYHLLNSHYSFIVRTVNKIFSDENYLLKLVAVFDSEMVNNKQKLE

SEQ ID NO: 32466 - protein, 85 aa, unidentified
  REGION 1..85: note = Description of Unknown:cds_NC_030656.1_cds_YP_009268815.1_100 target sequence
EYRQLLTISTESLKHGIKCISELTFSISVEPNKYTTFFRKVLSNIIIFQNNSDLNATKFITSVSKMYILVYSQLKGNDDVRILLS

SEQ ID NO: 32467 - protein, 85 aa, unidentified
  REGION 1..85: note = Description of Unknown:cds_NC_030656.1_cds_YP_009268815.1_100 target sequence
NVLESLKTKVSPEDIKSRGVRNIQSLIGYISDHKSVYKSILEQEYTTREDNIVNLLQQIVNNNNICYNSEVLNVCDLIKTAKESF

SEQ ID NO: 32468 - protein, 85 aa, unidentified
  REGION 1..85: note = Description of Unknown:cds_NZ_WFIY01000004.1_cds_WP_155864354.1_48 target sequence
IPVSVMVTDTGTVSFKIKGRYGRDSPSKFSEVFRPIVTWNLTYKCNLRCLHCYINASPNAPDGLSTEEALNLVDQMAEIGIPMII

SEQ ID NO: 32469 - protein, 85 aa, unidentified
  REGION 1..85: note = Description of Unknown:cds_NZ_WFIY01000004.1_cds_WP_155864354.1_48 target sequence
MSGGEPLMRRDFFTIASYATNKGIKLSLSTNGTLISESVARKLKDLGFVYVGISLDSYSPEFHDKFRGVQGAFNMAIKGIKNALN

SEQ ID NO: 32470 - protein, 85 aa, unidentified
  REGION 1..85: note = Description of Unknown:cds_NZ_WFIY01000004.1_cds_WP_155864354.1_48 target sequence
AGLNVGLRFTLTKENILDVDNYIELAVKLGVSRITFYHLSASGRGKELKDWMYTPEEYKIFIDKIIHYAKELRGKIEIETTLGTF

SEQ ID NO: 32471 - protein, 85 aa, unidentified
  REGION 1..85: note = Description of Unknown:cds_NZ_WFIY01000004.1_cds_WP_155864354.1_48 target sequence
DGIYIAKYLNDKKLLDFVKSTGGCGRKMISIYPNGDVFPCQFIDFVKLGNIKEKPLKEILKNIPDIFVSTENYLKGEKCGTCEYK

SEQ ID NO: 32472 - protein, 84 aa, unidentified
  REGION 1..84: note = Description of Unknown:cds_NZ_WFIY01000004.1_cds_WP_155864354.1_48 target sequence
NGDVFPCQFIDFVKLGNIKEKPLKEILKNIPDIFVSTENYLKGEKCGTCEYKEYCKGGDRSRAYYWDGSIYGDDPLCPLRELHI

SEQ ID NO: 32473 - protein, 85 aa, unidentified
  REGION 1..85: note = Description of Unknown:cds_NZ_WFIY01000004.1_cds_WP_155864354.1_48 target sequence
KFSEVFRPIVTWNLTYKCNLRCLHCYINASPNAPDGLSTEEALNLVDQMAEIGIPMIIMSGGEPLMRRDFFTIASYATNKGIKLS

SEQ ID NO: 32474 - protein, 85 aa, unidentified
  REGION 1..85: note = Description of Unknown:cds_NZ_WFIY01000004.1_cds_WP_155864354.1_48 target sequence
LSTNGTLISESVARKLKDLGFVYVGISLDSYSPEFHDKFRGVQGAFNMAIKGIKNALNAGLNVGLRFTLTKENILDVDNYIELAV

SEQ ID NO: 32475 - protein, 85 aa, unidentified
  REGION 1..85: note = Description of Unknown:cds_NZ_WFIY01000004.1_cds_WP_155864354.1_48 target sequence
KLGVSRITFYHLSASGRGKELKDWMYTPEEYKIFIDKIIHYAKELRGKIEIETTLGTFDGIYIAKYLNDKKLLDFVKSTGGCGRK

SEQ ID NO: 32476 - protein, 85 aa, unidentified
  REGION 1..85: note = Description of Unknown:cds_NZ_WFIY01000004.1_cds_WP_155864354.1_48 target sequence
MISIYPNGDVFPCQFIDFVKLGNIKEKPLKEILKNIPDIFVSTENYLKGEKCGTCEYKEYCKGGDRSRAYYWDGSIYGDDPLCPL

SEQ ID NO: 32477 - protein, 85 aa, unidentified
  REGION 1..85: note = Description of Unknown:cds_NZ_WFIY01000004.1_cds_WP_155863001.1_879 target sequence
ENCKVLNVRKVLIGEDLEVKDNANIEICDGYITHIGNGFSSNAESFTSGIAIPSLVNSHVHMLDYAFPEIGIDKTIKELVGDPNS

SEQ ID NO: 32478 - protein, 85 aa, unidentified
  REGION 1..85: note = Description of Unknown:cds_NZ_WFIY01000004.1_cds_WP_155863001.1_879 target sequence
LKYELLSKQNEKDLINFSLNFISNSINFGVTTIADFRELGIFGSKIALDIKRKLKGINYIILGRLEKNEFNDKNLVHLAEIDDGF

SEQ ID NO: 32479 - protein, 85 aa, unidentified
  REGION 1..85: note = Description of Unknown:cds_NZ_WFIY01000004.1_cds_WP_155863001.1_879 target sequence
GVSSISTYSLEELMKISEIFKNKIRAAHISETLKQNLKKDLEFFMKYLRPNLIIHGTWLSDDELLILKEKNVSLVLCPRSNLWFS

SEQ ID NO: 32480 - protein, 85 aa, unidentified
  REGION 1..85: note = Description of Unknown:cds_NZ_WFIY01000004.1_cds_WP_155863001.1_879 target sequence
TGIPRIANAIKLGVNILLGTDNAAWLSPNLWKEMELALLISRLQDPLSNYSKEILKATTVNARLFGTNKIDEGEKSNFIIIDGEK

SEQ ID NO: 32481 - protein, 84 aa, unidentified
  REGION 1..84: note = Description of Unknown:cds_NZ_WFIY01000004.1_cds_WP_155863001.1_879 target sequence
MELALLISRLQDPLSNYSKEILKATTVNARLFGTNKIDEGEKSNFIIIDGEKTGILRAHDVYSAIIKRGSEGNITYAEQPRILA

SEQ ID NO: 32482 - protein, 85 aa, unidentified
  REGION 1..85: note = Description of Unknown:cds_NZ_WFIY01000004.1_cds_WP_155863001.1_879 target sequence
CDGYITHIGNGFSSNAESFTSGIAIPSLVNSHVHMLDYAFPEIGIDKTIKELVGDPNSLKYELLSKQNEKDLINFSLNFISNSIN

SEQ ID NO: 32483 - protein, 85 aa, unidentified
  REGION 1..85: note = Description of Unknown:cds_NZ_WFIY01000004.1_cds_WP_155863001.1_879 target sequence
FGVTTIADFRELGIFGSKIALDIKRKLKGINYIILGRLEKNEFNDKNLVHLAEIDDGFGVSSISTYSLEELMKISEIFKNKIRAA

SEQ ID NO: 32484 - protein, 85 aa, unidentified
  REGION 1..85: note = Description of Unknown:cds_NZ_WFIY01000004.1_cds_WP_155863001.1_879 target sequence
HISETLKQNLKKDLEFFMKYLRPNLIIHGTWLSDDELLILKEKNVSLVLCPRSNLWFSTGIPRIANAIKLGVNILLGTDNAAWLS

SEQ ID NO: 32485 - protein, 85 aa, unidentified
  REGION 1..85: note = Description of Unknown:cds_NZ_WFIY01000004.1_cds_WP_155863001.1_879 target sequence
PNLWKEMELALLISRLQDPLSNYSKEILKATTVNARLFGTNKIDEGEKSNFIIIDGEKTGILRAHDVYSAIIKRGSEGNITYAEQ

SEQ ID NO: 32486 - protein, 85 aa, unidentified
  REGION 1..85: note = Description of Unknown:cds_NZ_WFIY01000004.1_cds_WP_205737162.1_1393 target sequence
LDRLYIYSVRLDLLLKNLTKIVLFYIIELTITVVLFIYLFKLSSEVGNIEVQIHGVSATFFMLGILAYLFGLRHAVDADHLAAID

SEQ ID NO: 32487 - protein, 85 aa, unidentified
  REGION 1..85: note = Description of Unknown:cds_NZ_WFIY01000004.1_cds_WP_205737162.1_1393 target sequence
NSTRKLVQEGKPSLFTGLFFSLGHSTIVILLSVALTIVTRAVESSIPTLENIGSITGTLVSGLFLYIIGFLNLVVLFEIYELFKQ

SEQ ID NO: 32488 - protein, 85 aa, unidentified
  REGION 1..85: note = Description of Unknown:cds_NZ_WFIY01000004.1_cds_WP_205737162.1_1393 target sequence
AKLGKLDEAKLNEALLKRGFMNRFFKGLFKIVNTQYYLCPIGLLFGLGFEKASETALLALSAGAAGVFSKIPLWSLLFFPFLFTA

SEQ ID NO: 32489 - protein, 85 aa, unidentified
  REGION 1..85: note = Description of Unknown:cds_NZ_WFIY01000004.1_cds_WP_205737162.1_1393 target sequence
AMTLLDTTDGFFMNGAYRWAFMGNPIRKVWYNLTMTSISIIVAYLVGTLELLALIQSEFGLSGWFWDNIAAISEGAWWGNIGIII

SEQ ID NO: 32490 - protein, 84 aa, unidentified
  REGION 1..84: note = Description of Unknown:cds_NZ_WFIY01000004.1_cds_WP_205737162.1_1393 target sequence
MTSISIIVAYLVGTLELLALIQSEFGLSGWFWDNIAAISEGAWWGNIGIIIIMCFAITWMISIIMYKFRISKYEEQHERNLSRL

SEQ ID NO: 32491 - protein, 85 aa, unidentified
  REGION 1..85: note = Description of Unknown:cds_NZ_WFIY01000004.1_cds_WP_205737162.1_1393 target sequence
ELTITVVLFIYLFKLSSEVGNIEVQIHGVSATFFMLGILAYLFGLRHAVDADHLAAIDNSTRKLVQEGKPSLFTGLFFSLGHSTI

SEQ ID NO: 32492 - protein, 85 aa, unidentified
  REGION 1..85: note = Description of Unknown:cds_NZ_WFIY01000004.1_cds_WP_205737162.1_1393 target sequence
VILLSVALTIVTRAVESSIPTLENIGSITGTLVSGLFLYIIGFLNLVVLFEIYELFKQAKLGKLDEAKLNEALLKRGFMNRFFKG

SEQ ID NO: 32493 - protein, 85 aa, unidentified
  REGION 1..85: note = Description of Unknown:cds_NZ_WFIY01000004.1_cds_WP_205737162.1_1393 target sequence
LFKIVNTQYYLCPIGLLFGLGFEKASETALLALSAGAAGVFSKIPLWSLLFFPFLFTAAMTLLDTTDGFFMNGAYRWAFMGNPIR

SEQ ID NO: 32494 - protein, 85 aa, unidentified
  REGION 1..85: note = Description of Unknown:cds_NZ_WFIY01000004.1_cds_WP_205737162.1_1393 target sequence
KVWYNLTMTSISIIVAYLVGTLELLALIQSEFGLSGWFWDNIAAISEGAWWGNIGIIIIMCFAITWMISIIMYKFRISKYEEQHE

SEQ ID NO: 32495 - protein, 85 aa, unidentified
  REGION 1..85: note = Description of Unknown:cds_NZ_WFIY01000004.1_cds_WP_155864444.1_1602 target sequence
LEELYVEPQVVANPNDRLRDILPKMKEKNQWVVPVVLHKKVIGLLTYKDLLKRRVSLDAKVITLSSPSITIDEKDDFSKVIAKFY

SEQ ID NO: 32496 - protein, 85 aa, unidentified
  REGION 1..85: note = Description of Unknown:cds_NZ_WFIY01000004.1_cds_WP_155864444.1_1602 target sequence
TTKARAIPAVNKNKELIGIITRESVIKYLLDTNQIESNKKAREYMSSPALTIEAEESIARARWLMIRDNISRLPVTREKKLEGIV

SEQ ID NO: 32497 - protein, 85 aa, unidentified
  REGION 1..85: note = Description of Unknown:cds_NZ_WFIY01000004.1_cds_WP_155864444.1_1602 target sequence
SSRDIVNALYSINEKKRSSILTEEERIMAMSVKEIMTSPVISVKGSDSLKSVAELLLKKNISGAPVLEGDFIEGVISTIDIIKSL

SEQ ID NO: 32498 - protein, 85 aa, unidentified
  REGION 1..85: note = Description of Unknown:cds_NZ_WFIY01000004.1_cds_WP_155864444.1_1602 target sequence
ESKYNLTMPIEAKLTSGLKKEEIKAEIDGVIERYLSKLEKMTDIINFKVSFKETAKSQNKTLYKTTVTVSTKEGNFIASETDWDP

SEQ ID NO: 32499 - protein, 84 aa, unidentified
  REGION 1..84: note = Description of Unknown:cds_NZ_WFIY01000004.1_cds_WP_155864444.1_1602 target sequence
LSKLEKMTDIINFKVSFKETAKSQNKTLYKTTVTVSTKEGNFIASETDWDPIVAVKKAVEKVENNLIKKLKKIDKSKKVTKEEE

SEQ ID NO: 32500 - protein, 85 aa, unidentified
  REGION 1..85: note = Description of Unknown:cds_NZ_WFIY01000004.1_cds_WP_155864444.1_1602 target sequence
KNQWVVPVVLHKKVIGLLTYKDLLKRRVSLDAKVITLSSPSITIDEKDDFSKVIAKFYTTKARAIPAVNKNKELIGIITRESVIK

SEQ ID NO: 32501 - protein, 85 aa, unidentified
  REGION 1..85: note = Description of Unknown:cds_NZ_WFIY01000004.1_cds_WP_155864444.1_1602 target sequence
YLLDTNQIESNKKAREYMSSPALTIEAEESIARARWLMIRDNISRLPVTREKKLEGIVSSRDIVNALYSINEKKRSSILTEEERI

SEQ ID NO: 32502 - protein, 85 aa, unidentified
  REGION 1..85: note = Description of Unknown:cds_NZ_WFIY01000004.1_cds_WP_155864444.1_1602 target sequence
MAMSVKEIMTSPVISVKGSDSLKSVAELLLKKNISGAPVLEGDFIEGVISTIDIIKSLESKYNLTMPIEAKLTSGLKKEEIKAEI

SEQ ID NO: 32503 - protein, 85 aa, unidentified
  REGION 1..85: note = Description of Unknown:cds_NZ_WFIY01000004.1_cds_WP_155864444.1_1602 target sequence
DGVIERYLSKLEKMTDIINFKVSFKETAKSQNKTLYKTTVTVSTKEGNFIASETDWDPIVAVKKAVEKVENNLIKKLKKIDKSKK

SEQ ID NO: 32504 - protein, 85 aa, unidentified
  REGION 1..85: note = Description of Unknown:cds_NC_004074.1_cds_NP_665868.1_5 target sequence
ALRQATIPINVDTESEKNNLNPFPIVPITKEDGSPTGRLVKQLRIKNLTPRGSTELPLTFINTYGFIKPLMTYTEFFSTHLRTPS

SEQ ID NO: 32505 - protein, 85 aa, unidentified
  REGION 1..85: note = Description of Unknown:cds_NC_004074.1_cds_NP_665868.1_5 target sequence
CLTACMIPFGAGPFIENPHRILDKCDRVNIVVRKSASVKEEIIFDVRRLPPLFNRHQISGNRLICVPSEKYVKSPGKMIAGTDYA

SEQ ID NO: 32506 - protein, 85 aa, unidentified
  REGION 1..85: note = Description of Unknown:cds_NC_004074.1_cds_NP_665868.1_5 target sequence
YQIAFVSLTFCPESQKFRVARPLQTIRSPIMRSVQLEVILKIDCAANSPLKRFLIISPNSKDCFASVWFHICNLYRGNKPFKAYD

SEQ ID NO: 32507 - protein, 85 aa, unidentified
  REGION 1..85: note = Description of Unknown:cds_NC_004074.1_cds_NP_665868.1_5 target sequence
DTYFSQKCRAMQLECGIVDMWGPTLVVKAHGKIPKMARPFFSSKGWSCHAFADAAPTLAKALWSVGAQITQVNAILQPSDLHQLV

SEQ ID NO: 32508 - protein, 84 aa, unidentified
  REGION 1..84: note = Description of Unknown:cds_NC_004074.1_cds_NP_665868.1_5 target sequence
PKMARPFFSSKGWSCHAFADAAPTLAKALWSVGAQITQVNAILQPSDLHQLVQISDVIWPKVKLDEKIQSYAAAKWNPFKKSTN

SEQ ID NO: 32509 - protein, 85 aa, unidentified
  REGION 1..85: note = Description of Unknown:cds_NC_004074.1_cds_NP_665868.1_5 target sequence
ITKEDGSPTGRLVKQLRIKNLTPRGSTELPLTFINTYGFIKPLMTYTEFFSTHLRTPSCLTACMIPFGAGPFIENPHRILDKCDR

SEQ ID NO: 32510 - protein, 85 aa, unidentified
  REGION 1..85: note = Description of Unknown:cds_NC_004074.1_cds_NP_665868.1_5 target sequence
VNIVVRKSASVKEEIIFDVRRLPPLFNRHQISGNRLICVPSEKYVKSPGKMIAGTDYAYQIAFVSLTFCPESQKFRVARPLQTIR

SEQ ID NO: 32511 - protein, 85 aa, unidentified
  REGION 1..85: note = Description of Unknown:cds_NC_004074.1_cds_NP_665868.1_5 target sequence
SPIMRSVQLEVILKIDCAANSPLKRFLIISPNSKDCFASVWFHICNLYRGNKPFKAYDDTYFSQKCRAMQLECGIVDMWGPTLVV

SEQ ID NO: 32512 - protein, 85 aa, unidentified
  REGION 1..85: note = Description of Unknown:cds_NC_004074.1_cds_NP_665868.1_5 target sequence
KAHGKIPKMARPFFSSKGWSCHAFADAAPTLAKALWSVGAQITQVNAILQPSDLHQLVQISDVIWPKVKLDEKIQSYAAAKWNPF

SEQ ID NO: 32513 - protein, 85 aa, unidentified
  REGION 1..85: note = Description of Unknown:cds_NZ_WFIY01000004.1_cds_WP_155862342.1_69 target sequence
EYIRLEGIIGLIIVVGILLAIVAIGPHFSSTIQTGPSKFKVISAELLCVCKNYIIKATIEASGIPEGSHDNLYEVILNGTTYYAF

SEQ ID NO: 32514 - protein, 85 aa, unidentified
  REGION 1..85: note = Description of Unknown:cds_NZ_WFIY01000004.1_cds_WP_155862342.1_69 target sequence
YKESNDGQVVWYHNGTHTYEIYLSTSNTTYSPPANLQKGAYKATFISQQGKCTITISFGVAPKPQLKIIQAEILNVSGLYVLKTE

SEQ ID NO: 32515 - protein, 85 aa, unidentified
  REGION 1..85: note = Description of Unknown:cds_NZ_WFIY01000004.1_cds_WP_155862342.1_69 target sequence
VNASIPVGYIYFYEAILNGTTYYIFYHPKGYTLCPVYYIHKSGVYNVSLYIYPKNFTAPTNVTPIEIKPGIYKVIFVTSVGNFSV

SEQ ID NO: 32516 - protein, 85 aa, unidentified
  REGION 1..85: note = Description of Unknown:cds_NZ_WFIY01000004.1_cds_WP_155862342.1_69 target sequence
IAKTVTTTSTPQFSVENTAKESVVNGLTQLNFTITATTPLGGHICVYEICINGHNYTVYYEPKVSTSAIGVYVEQGTKTYCFYIN

SEQ ID NO: 32517 - protein, 84 aa, unidentified
  REGION 1..84: note = Description of Unknown:cds_NZ_WFIY01000004.1_cds_WP_155862342.1_69 target sequence
TITATTPLGGHICVYEICINGHNYTVYYEPKVSTSAIGVYVEQGTKTYCFYINGTVSAGTYAIKFYYCYEGVYYVYSEEITIIS

SEQ ID NO: 32518 - protein, 85 aa, unidentified
  REGION 1..85: note = Description of Unknown:cds_NZ_WFIY01000004.1_cds_WP_155862342.1_69 target sequence
FSSTIQTGPSKFKVISAELLCVCKNYIIKATIEASGIPEGSHDNLYEVILNGTTYYAFYKESNDGQVVWYHNGTHTYEIYLSTSN

SEQ ID NO: 32519 - protein, 85 aa, unidentified
  REGION 1..85: note = Description of Unknown:cds_NZ_WFIY01000004.1_cds_WP_155862342.1_69 target sequence
TTYSPPANLQKGAYKATFISQQGKCTITISFGVAPKPQLKIIQAEILNVSGLYVLKTEVNASIPVGYIYFYEAILNGTTYYIFYH

SEQ ID NO: 32520 - protein, 85 aa, unidentified
  REGION 1..85: note = Description of Unknown:cds_NZ_WFIY01000004.1_cds_WP_155862342.1_69 target sequence
PKGYTLCPVYYIHKSGVYNVSLYIYPKNFTAPTNVTPIEIKPGIYKVIFVTSVGNFSVIAKTVTTTSTPQFSVENTAKESVVNGL

SEQ ID NO: 32521 - protein, 85 aa, unidentified
  REGION 1..85: note = Description of Unknown:cds_NZ_WFIY01000004.1_cds_WP_155862342.1_69 target sequence
TQLNFTITATTPLGGHICVYEICINGHNYTVYYEPKVSTSAIGVYVEQGTKTYCFYINGTVSAGTYAIKFYYCYEGVYYVYSEEI

SEQ ID NO: 32522 - protein, 85 aa, unidentified
  REGION 1..85: note = Description of Unknown:cds_NZ_WFIY01000004.1_cds_WP_155862505.1_264 target sequence
LILIPGPVNVPQSVSFAATKVVNHRSDEFREVVKSLEEKMIKHFDSSRVALLTGSGTLAVESMVFSVLRRGEKVIVFTYGEFSNR

SEQ ID NO: 32523 - protein, 85 aa, unidentified
  REGION 1..85: note = Description of Unknown:cds_NZ_WFIY01000004.1_cds_WP_155862505.1_264 target sequence
LLDSINRRGCITKVYSKPAGEGFSLEDVKVALDENKDADAVALVHNETSTGIAFRNLGEVAKLVKNSGKKLVVDSVSGFAAYEID

SEQ ID NO: 32524 - protein, 85 aa, unidentified
  REGION 1..85: note = Description of Unknown:cds_NZ_WFIY01000004.1_cds_WP_155862505.1_264 target sequence
VNKWHIDAIATGSQKALASIPGMGFVALSEEGVNELHGDDMPNYLNLRLALKFQDKHETPFTPSTGAFFASLRAAEILEMEGLEN

SEQ ID NO: 32525 - protein, 85 aa, unidentified
  REGION 1..85: note = Description of Unknown:cds_NZ_WFIY01000004.1_cds_WP_155862505.1_264 target sequence
RIKRHEACSRYLRSVLSSINFSLFGNESNFSNTVVAGVPPIPSKTLREELKKRGIEISGGMGELKDKIIRVGILGVVDDRAISRL

SEQ ID NO: 32526 - protein, 84 aa, unidentified
  REGION 1..84: note = Description of Unknown:cds_NZ_WFIY01000004.1_cds_WP_155862505.1_264 target sequence
VVAGVPPIPSKTLREELKKRGIEISGGMGELKDKIIRVGILGVVDDRAISRLLLSLSDVLKQDIEIKPPADCKLPEFLRQEVIW

SEQ ID NO: 32527 - protein, 85 aa, unidentified
  REGION 1..85: note = Description of Unknown:cds_NZ_WFIY01000004.1_cds_WP_155862505.1_264 target sequence
EFREVVKSLEEKMIKHFDSSRVALLTGSGTLAVESMVFSVLRRGEKVIVFTYGEFSNRLLDSINRRGCITKVYSKPAGEGFSLED

SEQ ID NO: 32528 - protein, 85 aa, unidentified
  REGION 1..85: note = Description of Unknown:cds_NZ_WFIY01000004.1_cds_WP_155862505.1_264 target sequence
VKVALDENKDADAVALVHNETSTGIAFRNLGEVAKLVKNSGKKLVVDSVSGFAAYEIDVNKWHIDAIATGSQKALASIPGMGFVA

SEQ ID NO: 32529 - protein, 85 aa, unidentified
  REGION 1..85: note = Description of Unknown:cds_NZ_WFIY01000004.1_cds_WP_155862505.1_264 target sequence
LSEEGVNELHGDDMPNYLNLRLALKFQDKHETPFTPSTGAFFASLRAAEILEMEGLENRIKRHEACSRYLRSVLSSINFSLFGNE

SEQ ID NO: 32530 - protein, 85 aa, unidentified
  REGION 1..85: note = Description of Unknown:cds_NZ_WFIY01000004.1_cds_WP_155862505.1_264 target sequence
SNFSNTVVAGVPPIPSKTLREELKKRGIEISGGMGELKDKIIRVGILGVVDDRAISRLLLSLSDVLKQDIEIKPPADCKLPEFLR

SEQ ID NO: 32531 - protein, 85 aa, unidentified
  REGION 1..85: note = Description of Unknown:cds_NZ_WFIY01000004.1_cds_WP_155863484.1_1439 target sequence
LESIKPMSKGQEELLNALTNSNYNIIGVFGPTGTGKSLFSLAYSIDAVSTGKFRKLIVAKPIVDVVTQEELTRKEYDKYEDMVKD

SEQ ID NO: 32532 - protein, 85 aa, unidentified
  REGION 1..85: note = Description of Unknown:cds_NZ_WFIY01000004.1_cds_WP_155863484.1_1439 target sequence
YIKDVLGGFAEEKTIDDLFSSGKIEVLDSRYLRGRSFNDSIIFLDDVQLMKPESVLELFIRSGKNSRLIIAGDPVFQTLSNEADS

SEQ ID NO: 32533 - protein, 85 aa, unidentified
  REGION 1..85: note = Description of Unknown:cds_NZ_WFIY01000004.1_cds_WP_155863484.1_1439 target sequence
SEIIREVLLNEKDAKVVDLGIKDIVRAGTKRGIRLLLEYKLRSRKLSEAEKKVMDSAKIRAPDADIITVVEFSEEKKKLNITSEH

SEQ ID NO: 32534 - protein, 85 aa, unidentified
  REGION 1..85: note = Description of Unknown:cds_NZ_WFIY01000004.1_cds_WP_155863484.1_1439 target sequence
VPDALIVVKEGNAGRLIGKSGERINGIESDTKMKVRVVELKLDFKDMIRAVHPLPWVVKHVEDVDFQGNELVVRLKKESGGFIGQ

SEQ ID NO: 32535 - protein, 84 aa, unidentified
  REGION 1..84: note = Description of Unknown:cds_NZ_WFIY01000004.1_cds_WP_155863484.1_1439 target sequence
MKVRVVELKLDFKDMIRAVHPLPWVVKHVEDVDFQGNELVVRLKKESGGFIGQKGVNIRLVEYVIKQMFNVGVRVIQPNEENQS

SEQ ID NO: 32536 - protein, 85 aa, unidentified
  REGION 1..85: note = Description of Unknown:cds_NZ_WFIY01000004.1_cds_WP_155863484.1_1439 target sequence
VFGPTGTGKSLFSLAYSIDAVSTGKFRKLIVAKPIVDVVTQEELTRKEYDKYEDMVKDYIKDVLGGFAEEKTIDDLFSSGKIEVL

SEQ ID NO: 32537 - protein, 85 aa, unidentified
  REGION 1..85: note = Description of Unknown:cds_NZ_WFIY01000004.1_cds_WP_155863484.1_1439 target sequence
DSRYLRGRSFNDSIIFLDDVQLMKPESVLELFIRSGKNSRLIIAGDPVFQTLSNEADSSEIIREVLLNEKDAKVVDLGIKDIVRA

SEQ ID NO: 32538 - protein, 85 aa, unidentified
  REGION 1..85: note = Description of Unknown:cds_NZ_WFIY01000004.1_cds_WP_155863484.1_1439 target sequence
GTKRGIRLLLEYKLRSRKLSEAEKKVMDSAKIRAPDADIITVVEFSEEKKKLNITSEHVPDALIVVKEGNAGRLIGKSGERINGI

SEQ ID NO: 32539 - protein, 85 aa, unidentified
  REGION 1..85: note = Description of Unknown:cds_NZ_WFIY01000004.1_cds_WP_155863484.1_1439 target sequence
ESDTKMKVRVVELKLDFKDMIRAVHPLPWVVKHVEDVDFQGNELVVRLKKESGGFIGQKGVNIRLVEYVIKQMFNVGVRVIQPNE

SEQ ID NO: 32540 - protein, 85 aa, unidentified
  REGION 1..85: note = Description of Unknown:cds_NZ_WFIY01000004.1_cds_WP_155864203.1_2168 target sequence
DVTFYSHEFKLFIFSILSFIVIHYFLTTFYITLPYTCNYEVIDVIVNLVVYSLVLSLLTYKLFRGNEPGKYYIIWFWSIFLNYYF

SEQ ID NO: 32541 - protein, 85 aa, unidentified
  REGION 1..85: note = Description of Unknown:cds_NZ_WFIY01000004.1_cds_WP_155864203.1_2168 target sequence
FNVSLYFPFDLGILTGVISALLYSIPPSLVMSAVRMKNKDLTWSLSTPQLWAGTVMFASLFLLSFYTGINIDFFIYGALAGLLLS

SEQ ID NO: 32542 - protein, 85 aa, unidentified
  REGION 1..85: note = Description of Unknown:cds_NZ_WFIY01000004.1_cds_WP_155864203.1_2168 target sequence
FIAVGTMETMVNLSLIPLFVIAFYYTGKSIYYVTPYTLLLVFGGSLLIFWASMKPAIIINRFTGEVTPLGVVSSISLSFFFPIIL

SEQ ID NO: 32543 - protein, 85 aa, unidentified
  REGION 1..85: note = Description of Unknown:cds_NZ_WFIY01000004.1_cds_WP_155864203.1_2168 target sequence
LALWYIARTIAFNYSDYISPVTLSTFPIIFLPTVIGNTLVDYLKGKKLDKMMRYYGGKTGGIIGGVGLADGLWLDLVGLMIYYLT

SEQ ID NO: 32544 - protein, 84 aa, unidentified
  REGION 1..84: note = Description of Unknown:cds_NZ_WFIY01000004.1_cds_WP_155864203.1_2168 target sequence
TVIGNTLVDYLKGKKLDKMMRYYGGKTGGIIGGVGLADGLWLDLVGLMIYYLTALRFGFIDGTTLYLLIIVPVITILLRFGRIA

SEQ ID NO: 32545 - protein, 85 aa, unidentified
  REGION 1..85: note = Description of Unknown:cds_NZ_WFIY01000004.1_cds_WP_155864203.1_2168 target sequence
TFYITLPYTCNYEVIDVIVNLVVYSLVLSLLTYKLFRGNEPGKYYIIWFWSIFLNYYFFNVSLYFPFDLGILTGVISALLYSIPP

SEQ ID NO: 32546 - protein, 85 aa, unidentified
  REGION 1..85: note = Description of Unknown:cds_NZ_WFIY01000004.1_cds_WP_155864203.1_2168 target sequence
SLVMSAVRMKNKDLTWSLSTPQLWAGTVMFASLFLLSFYTGINIDFFIYGALAGLLLSFIAVGTMETMVNLSLIPLFVIAFYYTG

SEQ ID NO: 32547 - protein, 85 aa, unidentified
  REGION 1..85: note = Description of Unknown:cds_NZ_WFIY01000004.1_cds_WP_155864203.1_2168 target sequence
KSIYYVTPYTLLLVFGGSLLIFWASMKPAIIINRFTGEVTPLGVVSSISLSFFFPIILLALWYIARTIAFNYSDYISPVTLSTFP

SEQ ID NO: 32548 - protein, 85 aa, unidentified
  REGION 1..85: note = Description of Unknown:cds_NZ_WFIY01000004.1_cds_WP_155864203.1_2168 target sequence
IIFLPTVIGNTLVDYLKGKKLDKMMRYYGGKTGGIIGGVGLADGLWLDLVGLMIYYLTALRFGFIDGTTLYLLIIVPVITILLRF

SEQ ID NO: 32549 - protein, 85 aa, unidentified
  REGION 1..85: note = Description of Unknown:cds_NC_035460.1_cds_YP_009408053.1_102 target sequence
DKLKSVYIEFYQISKEYLERETCEQTSELNIDSDITTLMNMIPILEKKVCAITSEITDEQIITMMKYCNYKLFSFWFLKSGAVVK

SEQ ID NO: 32550 - protein, 85 aa, unidentified
  REGION 1..85: note = Description of Unknown:cds_NC_035460.1_cds_YP_009408053.1_102 target sequence
SVYNKLSEKDKINFKNIFKNILLNIQTLISLNNMYSNLKQDTADIVSDSRKIIEIVNHIKNAKCDSSAYQLLQNNYSFIIKTVNK

SEQ ID NO: 32551 - protein, 85 aa, unidentified
  REGION 1..85: note = Description of Unknown:cds_NC_035460.1_cds_YP_009408053.1_102 target sequence
ILSDENYLLKMIAVFDSNLITDKNKLNEYREIFTISSESVIYGIRCVSDLDISSVNVENNKYTSFFKKVLTNVILFQNNDLNAQK

SEQ ID NO: 32552 - protein, 85 aa, unidentified
  REGION 1..85: note = Description of Unknown:cds_NC_035460.1_cds_YP_009408053.1_102 target sequence
FINIVSKLYVLIYTQLTSNPLMAQLLNDVLESVKSKVSIDDIKQRGINNIQTLIKFISENRISYKSIIAEEYSKREDIIIELLQN

SEQ ID NO: 32553 - protein, 84 aa, unidentified
  REGION 1..84: note = Description of Unknown:cds_NC_035460.1_cds_YP_009408053.1_102 target sequence
VKSKVSIDDIKQRGINNIQTLIKFISENRISYKSIIAEEYSKREDIIIELLQNIINENNIVYHNESVNVKKLIELTKERFCISV

SEQ ID NO: 32554 - protein, 85 aa, unidentified
  REGION 1..85: note = Description of Unknown:cds_NC_035460.1_cds_YP_009408053.1_102 target sequence
ELNIDSDITTLMNMIPILEKKVCAITSEITDEQIITMMKYCNYKLFSFWFLKSGAVVKSVYNKLSEKDKINFKNIFKNILLNIQT

SEQ ID NO: 32555 - protein, 85 aa, unidentified
  REGION 1..85: note = Description of Unknown:cds_NC_035460.1_cds_YP_009408053.1_102 target sequence
LISLNNMYSNLKQDTADIVSDSRKIIEIVNHIKNAKCDSSAYQLLQNNYSFIIKTVNKILSDENYLLKMIAVFDSNLITDKNKLN

SEQ ID NO: 32556 - protein, 85 aa, unidentified
  REGION 1..85: note = Description of Unknown:cds_NC_035460.1_cds_YP_009408053.1_102 target sequence
EYREIFTISSESVIYGIRCVSDLDISSVNVENNKYTSFFKKVLTNVILFQNNDLNAQKFINIVSKLYVLIYTQLTSNPLMAQLLN

SEQ ID NO: 32557 - protein, 85 aa, unidentified
  REGION 1..85: note = Description of Unknown:cds_NC_035460.1_cds_YP_009408053.1_102 target sequence
DVLESVKSKVSIDDIKQRGINNIQTLIKFISENRISYKSIIAEEYSKREDIIIELLQNIINENNIVYHNESVNVKKLIELTKERF

SEQ ID NO: 32558 - protein, 85 aa, unidentified
  REGION 1..85: note = Description of Unknown:cds_NZ_WFIY01000004.1_cds_WP_155862422.1_164 target sequence
STAPIPIPIPEGAVGAIAGIIGGLVTYGSIRDTATCTGMQIKEKGFSYEFYPALATSLRVTKSTKNIFQVIRHGIIIRTQEGNYY

SEQ ID NO: 32559 - protein, 85 aa, unidentified
  REGION 1..85: note = Description of Unknown:cds_NZ_WFIY01000004.1_cds_WP_155862422.1_164 target sequence
YVGGKSNYWASARSFQAFQGGTIFYNNTRALATKIRGKESNIVVLRMRTNRISSAWLQPNPPEGCKTPIVGWFLDGLESIAAGAI

SEQ ID NO: 32560 - protein, 85 aa, unidentified
  REGION 1..85: note = Description of Unknown:cds_NZ_WFIY01000004.1_cds_WP_155862422.1_164 target sequence
MTNYIPYYTSLPISSTSIPGSLISVSGGHYSADALAAVLLNISKIPPFPYMVIVTASKQASFEVPPAVQRGSAYVLFPASVMDDL

SEQ ID NO: 32561 - protein, 85 aa, unidentified
  REGION 1..85: note = Description of Unknown:cds_NZ_WFIY01000004.1_cds_WP_155862422.1_164 target sequence
CKFFLAGDFEKYCSELVSDTSYNEALIGAPLFMSFSCPSGCKSVGLIGLVFDGNMLSVGGYSFGNLLIVEPPHPYTDAGMLTYAD

SEQ ID NO: 32562 - protein, 84 aa, unidentified
  REGION 1..84: note = Description of Unknown:cds_NZ_WFIY01000004.1_cds_WP_155862422.1_164 target sequence
FMSFSCPSGCKSVGLIGLVFDGNMLSVGGYSFGNLLIVEPPHPYTDAGMLTYADKFGVRDVLDLSIRVLRVLRGLLVLLFQRME

SEQ ID NO: 32563 - protein, 85 aa, unidentified
  REGION 1..85: note = Description of Unknown:cds_NZ_WFIY01000004.1_cds_WP_155862422.1_164 target sequence
GSIRDTATCTGMQIKEKGFSYEFYPALATSLRVTKSTKNIFQVIRHGIIIRTQEGNYYYVGGKSNYWASARSFQAFQGGTIFYNN

SEQ ID NO: 32564 - protein, 85 aa, unidentified
  REGION 1..85: note = Description of Unknown:cds_NZ_WFIY01000004.1_cds_WP_155862422.1_164 target sequence
TRALATKIRGKESNIVVLRMRTNRISSAWLQPNPPEGCKTPIVGWFLDGLESIAAGAIMTNYIPYYTSLPISSTSIPGSLISVSG

SEQ ID NO: 32565 - protein, 85 aa, unidentified
  REGION 1..85: note = Description of Unknown:cds_NZ_WFIY01000004.1_cds_WP_155862422.1_164 target sequence
GHYSADALAAVLLNISKIPPFPYMVIVTASKQASFEVPPAVQRGSAYVLFPASVMDDLCKFFLAGDFEKYCSELVSDTSYNEALI

SEQ ID NO: 32566 - protein, 85 aa, unidentified
  REGION 1..85: note = Description of Unknown:cds_NZ_WFIY01000004.1_cds_WP_155862422.1_164 target sequence
GAPLFMSFSCPSGCKSVGLIGLVFDGNMLSVGGYSFGNLLIVEPPHPYTDAGMLTYADKFGVRDVLDLSIRVLRVLRGLLVLLFQ

SEQ ID NO: 32567 - protein, 85 aa, unidentified
  REGION 1..85: note = Description of Unknown:cds_NZ_WFIY01000004.1_cds_WP_155862655.1_447 target sequence
LYKKFLNLFPPFYQGFRIAPTEIPKWLKEAKEYDYSDIKEGIRLHLNESPYSPPNFIIQEVEKYLSQGNRYQHPDLTSRFKELAA

SEQ ID NO: 32568 - protein, 85 aa, unidentified
  REGION 1..85: note = Description of Unknown:cds_NZ_WFIY01000004.1_cds_WP_155862655.1_447 target sequence
EYNKVEPSNIFPTPGGDGALRAIFYNFLNPGDTVTYNFPSYSMYSVYSAVRGLKVNKINLVEDGDWWKEDIDKLLDFAKKSKLVV

SEQ ID NO: 32569 - protein, 85 aa, unidentified
  REGION 1..85: note = Description of Unknown:cds_NZ_WFIY01000004.1_cds_WP_155862655.1_447 target sequence
IDDPNNPTGSPMLKANKDLISILAESINGFLVLDEAYYEFSGYTAASLVNEYPNVMIVRTLSKAFSLASYRVGYLIANKEVVDAL

SEQ ID NO: 32570 - protein, 85 aa, unidentified
  REGION 1..85: note = Description of Unknown:cds_NZ_WFIY01000004.1_cds_WP_155862655.1_447 target sequence
TKTSTPFDVALPSLIAGITALENPSYARKIVNEITENREYLYSSLKKLGLKVYKSVTNFLFVKDNRDLLNPLMERKIAIRKPIDG

SEQ ID NO: 32571 - protein, 84 aa, unidentified
  REGION 1..84: note = Description of Unknown:cds_NZ_WFIY01000004.1_cds_WP_155862655.1_447 target sequence
EITENREYLYSSLKKLGLKVYKSVTNFLFVKDNRDLLNPLMERKIAIRKPIDGFYRITVGTREQCEILVKALGEILESGDSKQR

SEQ ID NO: 32572 - protein, 85 aa, unidentified
  REGION 1..85: note = Description of Unknown:cds_NZ_WFIY01000004.1_cds_WP_155862655.1_447 target sequence
KEAKEYDYSDIKEGIRLHLNESPYSPPNFIIQEVEKYLSQGNRYQHPDLTSRFKELAAEYNKVEPSNIFPTPGGDGALRAIFYNF

SEQ ID NO: 32573 - protein, 85 aa, unidentified
  REGION 1..85: note = Description of Unknown:cds_NZ_WFIY01000004.1_cds_WP_155862655.1_447 target sequence
LNPGDTVTYNFPSYSMYSVYSAVRGLKVNKINLVEDGDWWKEDIDKLLDFAKKSKLVVIDDPNNPTGSPMLKANKDLISILAESI

SEQ ID NO: 32574 - protein, 85 aa, unidentified
  REGION 1..85: note = Description of Unknown:cds_NZ_WFIY01000004.1_cds_WP_155862655.1_447 target sequence
NGFLVLDEAYYEFSGYTAASLVNEYPNVMIVRTLSKAFSLASYRVGYLIANKEVVDALTKTSTPFDVALPSLIAGITALENPSYA

SEQ ID NO: 32575 - protein, 85 aa, unidentified
  REGION 1..85: note = Description of Unknown:cds_NZ_WFIY01000004.1_cds_WP_155862655.1_447 target sequence
RKIVNEITENREYLYSSLKKLGLKVYKSVTNFLFVKDNRDLLNPLMERKIAIRKPIDGFYRITVGTREQCEILVKALGEILESGD

SEQ ID NO: 32576 - protein, 85 aa, unidentified
  REGION 1..85: note = Description of Unknown:cds_NZ_WFIY01000004.1_cds_529 target sequence
VFNPESFIEEVKPQILKEVREEKILAAISGGVDSTTAAVLMYKILGKQLLPIMIDTGFLRKDEARKVKDMLKDILPLQVVDKSEE

SEQ ID NO: 32577 - protein, 85 aa, unidentified
  REGION 1..85: note = Description of Unknown:cds_NZ_WFIY01000004.1_cds_529 target sequence
FISALEGISDAEEKRKKFRDLFYSTLSAIAKENGIKYLVQGTIAADWVETQGGIKTQHNVLVQLGINTEETWGFKVIEPLADLYK

SEQ ID NO: 32578 - protein, 85 aa, unidentified
  REGION 1..85: note = Description of Unknown:cds_NZ_WFIY01000004.1_cds_529 target sequence
DEVRALARYLGLPKEISERQPFPGPGLLIRVVGKLTREKLEIEREVNDVVENELKDMGYSQYFSVIIDSQKSLDNIISMEANVPV

SEQ ID NO: 32579 - protein, 85 aa, unidentified
  REGION 1..85: note = Description of Unknown:cds_NZ_WFIY01000004.1_cds_529 target sequence
YVYNTRATGVKGDVRSYGKIASIPLIDDYEKVREIVQKITKYDVTHVGMIINDKKDGKYSIGIRAVLTQDFMTADFAKIEISKLQ

SEQ ID NO: 32580 - protein, 84 aa, unidentified
  REGION 1..84: note = Description of Unknown:cds_NZ_WFIY01000004.1_cds_529 target sequence
REIVQKITKYDVTHVGMIINDKKDGKYSIGIRAVLTQDFMTADFAKIEISKLQEIGEKIMEINKEIKEVFYDVTSKPPATIEYE

SEQ ID NO: 32581 - protein, 85 aa, unidentified
  REGION 1..85: note = Description of Unknown:cds_NZ_WFIY01000004.1_cds_529 target sequence
ISGGVDSTTAAVLMYKILGKQLLPIMIDTGFLRKDEARKVKDMLKDILPLQVVDKSEEFISALEGISDAEEKRKKFRDLFYSTLS

SEQ ID NO: 32582 - protein, 85 aa, unidentified
  REGION 1..85: note = Description of Unknown:cds_NZ_WFIY01000004.1_cds_529 target sequence
AIAKENGIKYLVQGTIAADWVETQGGIKTQHNVLVQLGINTEETWGFKVIEPLADLYKDEVRALARYLGLPKEISERQPFPGPGL

SEQ ID NO: 32583 - protein, 85 aa, unidentified
  REGION 1..85: note = Description of Unknown:cds_NZ_WFIY01000004.1_cds_529 target sequence
LIRVVGKLTREKLEIEREVNDVVENELKDMGYSQYFSVIIDSQKSLDNIISMEANVPVYVYNTRATGVKGDVRSYGKIASIPLID

SEQ ID NO: 32584 - protein, 85 aa, unidentified
  REGION 1..85: note = Description of Unknown:cds_NZ_WFIY01000004.1_cds_529 target sequence
DYEKVREIVQKITKYDVTHVGMIINDKKDGKYSIGIRAVLTQDFMTADFAKIEISKLQEIGEKIMEINKEIKEVFYDVTSKPPAT

SEQ ID NO: 32585 - protein, 85 aa, unidentified
  REGION 1..85: note = Description of Unknown:cds_NZ_WFIY01000004.1_cds_WP_155863975.1_1899 target sequence
LELRKGLEDIAIKETEITYIDGVLGRLYYRGYSIYDLAEFSNFEETAYLIWFGKLPNKKELQEIKETLAEEREIPEYITEFIKNV

SEQ ID NO: 32586 - protein, 85 aa, unidentified
  REGION 1..85: note = Description of Unknown:cds_NZ_WFIY01000004.1_cds_WP_155863975.1_1899 target sequence
RKDANPMDVLRTAVSMLGIEDKSNEELWKKAVKLTAKIPTIISYFDRVRKGLDIVHPDPSLSHAENFLYMMRGEKPNPIDSRTMD

SEQ ID NO: 32587 - protein, 85 aa, unidentified
  REGION 1..85: note = Description of Unknown:cds_NZ_WFIY01000004.1_cds_WP_155863975.1_1899 target sequence
VAMILHMDHEMNASTFACLVVASTLSDLYSAITAGISALKGPLHGGANAEALKQFMEIGSKDKVEEYILKKLETGQRIMGFGHRI

SEQ ID NO: 32588 - protein, 85 aa, unidentified
  REGION 1..85: note = Description of Unknown:cds_NZ_WFIY01000004.1_cds_WP_155863975.1_1899 target sequence
YKTYDPRAKILKEYARNLAKEKGKMELFEIAEKVDEIGCKILGKKNIYPNVDFYAGLVFYFLGFDPDLFPTVFASARIVGWTAHV

SEQ ID NO: 32589 - protein, 84 aa, unidentified
  REGION 1..84: note = Description of Unknown:cds_NZ_WFIY01000004.1_cds_WP_155863975.1_1899 target sequence
KVDEIGCKILGKKNIYPNVDFYAGLVFYFLGFDPDLFPTVFASARIVGWTAHVMEYLKDNKLIRPKAIYKGEIGRKYINVENRE

SEQ ID NO: 32590 - protein, 85 aa, unidentified
  REGION 1..85: note = Description of Unknown:cds_NZ_WFIY01000004.1_cds_WP_155863975.1_1899 target sequence
YYRGYSIYDLAEFSNFEETAYLIWFGKLPNKKELQEIKETLAEEREIPEYITEFIKNVRKDANPMDVLRTAVSMLGIEDKSNEEL

SEQ ID NO: 32591 - protein, 85 aa, unidentified
  REGION 1..85: note = Description of Unknown:cds_NZ_WFIY01000004.1_cds_WP_155863975.1_1899 target sequence
WKKAVKLTAKIPTIISYFDRVRKGLDIVHPDPSLSHAENFLYMMRGEKPNPIDSRTMDVAMILHMDHEMNASTFACLVVASTLSD

SEQ ID NO: 32592 - protein, 85 aa, unidentified
  REGION 1..85: note = Description of Unknown:cds_NZ_WFIY01000004.1_cds_WP_155863975.1_1899 target sequence
LYSAITAGISALKGPLHGGANAEALKQFMEIGSKDKVEEYILKKLETGQRIMGFGHRIYKTYDPRAKILKEYARNLAKEKGKMEL

SEQ ID NO: 32593 - protein, 85 aa, unidentified
  REGION 1..85: note = Description of Unknown:cds_NZ_WFIY01000004.1_cds_WP_155863975.1_1899 target sequence
FEIAEKVDEIGCKILGKKNIYPNVDFYAGLVFYFLGFDPDLFPTVFASARIVGWTAHVMEYLKDNKLIRPKAIYKGEIGRKYINV

SEQ ID NO: 32594 - protein, 85 aa, unidentified
  REGION 1..85: note = Description of Unknown:cds_NZ_WFIY01000004.1_cds_WP_155864071.1_2010 target sequence
ILTADEATFYSLSPLPERILPIARKNRYPPYGLRKIEAITNSIILPPSKIRKPDILGIYVNDPLALTQPSLAIKEAFGENPRFYY

SEQ ID NO: 32595 - protein, 85 aa, unidentified
  REGION 1..85: note = Description of Unknown:cds_NZ_WFIY01000004.1_cds_WP_155864071.1_2010 target sequence
SFQKFSAKIRELKSRFKFKVIVGGPGAWELVEKKEDWIDTIVVGEAENVIHKAIAEDGIIIGTPAEKFYPIKAPSAMAEVEVMRG

SEQ ID NO: 32596 - protein, 85 aa, unidentified
  REGION 1..85: note = Description of Unknown:cds_NZ_WFIY01000004.1_cds_WP_155864071.1_2010 target sequence
NRKIPREVILSEMKIQSIQGKVNLISPDLFSYGDEEEIISLLKMSSKFGKVFFNQISLKGISKVDLRQVSRILNLNEKNYRTPVL

SEQ ID NO: 32597 - protein, 85 aa, unidentified
  REGION 1..85: note = Description of Unknown:cds_NZ_WFIY01000004.1_cds_WP_155864071.1_2010 target sequence
SKEPGVCNVKVEGDEIKELNNNFIYPMIFIPSDSISSLEGYKALVIPLPNERDEYYEALYKSWNISRKIIKNRIIISLVDKIILK

SEQ ID NO: 32598 - protein, 84 aa, unidentified
  REGION 1..84: note = Description of Unknown:cds_NZ_WFIY01000004.1_cds_WP_155864071.1_2010 target sequence
SDSISSLEGYKALVIPLPNERDEYYEALYKSWNISRKIIKNRIIISLVDKIILKNKETKGEFLRKLNVRSPIFLLQLFSLLLKS

SEQ ID NO: 32599 - protein, 85 aa, unidentified
  REGION 1..85: note = Description of Unknown:cds_NZ_WFIY01000004.1_cds_WP_155864071.1_2010 target sequence
YPPYGLRKIEAITNSIILPPSKIRKPDILGIYVNDPLALTQPSLAIKEAFGENPRFYYSFQKFSAKIRELKSRFKFKVIVGGPGA

SEQ ID NO: 32600 - protein, 85 aa, unidentified
  REGION 1..85: note = Description of Unknown:cds_NZ_WFIY01000004.1_cds_WP_155864071.1_2010 target sequence
WELVEKKEDWIDTIVVGEAENVIHKAIAEDGIIIGTPAEKFYPIKAPSAMAEVEVMRGNRKIPREVILSEMKIQSIQGKVNLISP

SEQ ID NO: 32601 - protein, 85 aa, unidentified
  REGION 1..85: note = Description of Unknown:cds_NZ_WFIY01000004.1_cds_WP_155864071.1_2010 target sequence
DLFSYGDEEEIISLLKMSSKFGKVFFNQISLKGISKVDLRQVSRILNLNEKNYRTPVLSKEPGVCNVKVEGDEIKELNNNFIYPM

SEQ ID NO: 32602 - protein, 85 aa, unidentified
  REGION 1..85: note = Description of Unknown:cds_NZ_WFIY01000004.1_cds_WP_155864071.1_2010 target sequence
IFIPSDSISSLEGYKALVIPLPNERDEYYEALYKSWNISRKIIKNRIIISLVDKIILKNKETKGEFLRKLNVRSPIFLLQLFSLL

SEQ ID NO: 32603 - protein, 85 aa, unidentified
  REGION 1..85: note = Description of Unknown:cds_NZ_WFIY01000004.1_cds_WP_155864226.1_2195 target sequence
SESSLIIQSLREFLRREVESVSAKIDKEDFYPREIVKKLGELGFLIPLYSNLSHYDMVKTLEEIAKVSGSLALIADAQGELAGEM

SEQ ID NO: 32604 - protein, 85 aa, unidentified
  REGION 1..85: note = Description of Unknown:cds_NZ_WFIY01000004.1_cds_WP_155864226.1_2195 target sequence
IRLYGNDLQRKSFLEPMSKGEIIASLALSEPSGGSDIGSMKTYAEKKGSWIVSGRKMWITQGIYADIFITVARTGNSRKDLSVFI

SEQ ID NO: 32605 - protein, 85 aa, unidentified
  REGION 1..85: note = Description of Unknown:cds_NZ_WFIY01000004.1_cds_WP_155864226.1_2195 target sequence
IPRGKCIETSKIEVMGNRGTGTAEVIFHECEVPEDYVIGEVNNGWEMINSVLEVGRLAISGIAIGLAERALEEAFQWANSREAFG

SEQ ID NO: 32606 - protein, 85 aa, unidentified
  REGION 1..85: note = Description of Unknown:cds_NZ_WFIY01000004.1_cds_WP_155864226.1_2195 target sequence
NKLYNFQGIRWYFADSIAKINSLKALAKEVSRKFDENSNDKGVYVSMLKLLSAEIAQEIVDTSLQILGGLGYAKGSSVERIYRDV

SEQ ID NO: 32607 - protein, 84 aa, unidentified
  REGION 1..84: note = Description of Unknown:cds_NZ_WFIY01000004.1_cds_WP_155864226.1_2195 target sequence
RKFDENSNDKGVYVSMLKLLSAEIAQEIVDTSLQILGGLGYAKGSSVERIYRDVRVMRIGEGSDEIQRHIISKYSEKYGIPILD

SEQ ID NO: 32608 - protein, 85 aa, unidentified
  REGION 1..85: note = Description of Unknown:cds_NZ_WFIY01000004.1_cds_WP_155864226.1_2195 target sequence
EDFYPREIVKKLGELGFLIPLYSNLSHYDMVKTLEEIAKVSGSLALIADAQGELAGEMIRLYGNDLQRKSFLEPMSKGEIIASLA

SEQ ID NO: 32609 - protein, 85 aa, unidentified
  REGION 1..85: note = Description of Unknown:cds_NZ_WFIY01000004.1_cds_WP_155864226.1_2195 target sequence
LSEPSGGSDIGSMKTYAEKKGSWIVSGRKMWITQGIYADIFITVARTGNSRKDLSVFIIPRGKCIETSKIEVMGNRGTGTAEVIF

SEQ ID NO: 32610 - protein, 85 aa, unidentified
  REGION 1..85: note = Description of Unknown:cds_NZ_WFIY01000004.1_cds_WP_155864226.1_2195 target sequence
HECEVPEDYVIGEVNNGWEMINSVLEVGRLAISGIAIGLAERALEEAFQWANSREAFGNKLYNFQGIRWYFADSIAKINSLKALA

SEQ ID NO: 32611 - protein, 85 aa, unidentified
  REGION 1..85: note = Description of Unknown:cds_NZ_WFIY01000004.1_cds_WP_155864226.1_2195 target sequence
KEVSRKFDENSNDKGVYVSMLKLLSAEIAQEIVDTSLQILGGLGYAKGSSVERIYRDVRVMRIGEGSDEIQRHIISKYSEKYGIP

SEQ ID NO: 32612 - protein, 85 aa, unidentified
  REGION 1..85: note = Description of Unknown:cds_NZ_WFIY01000004.1_cds_WP_155864238.1_2209 target sequence
IQISRGLENVIIKETSLTYIDGEKGVLRYRGYNIEDLAENCEYEEVVHLMLFGELPNAKQLQEVKEKINQSYEVPLEVLEAMQKL

SEQ ID NO: 32613 - protein, 85 aa, unidentified
  REGION 1..85: note = Description of Unknown:cds_NZ_WFIY01000004.1_cds_WP_155864238.1_2209 target sequence
PRDADPISLMETAFSIMSIWGKRINRLTALDIIAKASTIVSNVYRIKEGLKTKIPEPSESYAKSFLEATFFKKPSADEVKAMNTA

SEQ ID NO: 32614 - protein, 85 aa, unidentified
  REGION 1..85: note = Description of Unknown:cds_NZ_WFIY01000004.1_cds_WP_155864238.1_2209 target sequence
LILYTDHEVPASTTAALVSASTLTDIYSCITSALSALKGPLHGGAAEEAFKQFVEIGSPDNVEKWFEENIIKSKKRLMGFGHRVY

SEQ ID NO: 32615 - protein, 85 aa, unidentified
  REGION 1..85: note = Description of Unknown:cds_NZ_WFIY01000004.1_cds_WP_155864238.1_2209 target sequence
KTYDPRAKIFKKMAYSLAKEESKKYLQIAEKLEELGVRYFSQKKIYPNTDFYSGIVFYSLGFPIYMFTSLFALSRILGWLAHVIE

SEQ ID NO: 32616 - protein, 84 aa, unidentified
  REGION 1..84: note = Description of Unknown:cds_NZ_WFIY01000004.1_cds_WP_155864238.1_2209 target sequence
LEELGVRYFSQKKIYPNTDFYSGIVFYSLGFPIYMFTSLFALSRILGWLAHVIEYLENQPAIIWPRALYVGPEKRDFIPLSQRG

SEQ ID NO: 32617 - protein, 85 aa, unidentified
  REGION 1..85: note = Description of Unknown:cds_NZ_WFIY01000004.1_cds_WP_155864238.1_2209 target sequence
RYRGYNIEDLAENCEYEEVVHLMLFGELPNAKQLQEVKEKINQSYEVPLEVLEAMQKLPRDADPISLMETAFSIMSIWGKRINRL

SEQ ID NO: 32618 - protein, 85 aa, unidentified
  REGION 1..85: note = Description of Unknown:cds_NZ_WFIY01000004.1_cds_WP_155864238.1_2209 target sequence
TALDIIAKASTIVSNVYRIKEGLKTKIPEPSESYAKSFLEATFFKKPSADEVKAMNTALILYTDHEVPASTTAALVSASTLTDIY

SEQ ID NO: 32619 - protein, 85 aa, unidentified
  REGION 1..85: note = Description of Unknown:cds_NZ_WFIY01000004.1_cds_WP_155864238.1_2209 target sequence
SCITSALSALKGPLHGGAAEEAFKQFVEIGSPDNVEKWFEENIIKSKKRLMGFGHRVYKTYDPRAKIFKKMAYSLAKEESKKYLQ

SEQ ID NO: 32620 - protein, 85 aa, unidentified
  REGION 1..85: note = Description of Unknown:cds_NZ_WFIY01000004.1_cds_WP_155864238.1_2209 target sequence
IAEKLEELGVRYFSQKKIYPNTDFYSGIVFYSLGFPIYMFTSLFALSRILGWLAHVIEYLENQPAIIWPRALYVGPEKRDFIPLS

SEQ ID NO: 32621 - protein, 85 aa, unidentified
  REGION 1..85: note = Description of Unknown:cds_NC_035460.1_cds_YP_009407980.1_29 target sequence
WPFFSKPPTGAKCKLVETIPKSMQITTKHMLTSECFYEIITRAKKFINIASFCCNLKTSDEGKMIFNRLKEAAAAGICITILVDH

SEQ ID NO: 32622 - protein, 85 aa, unidentified
  REGION 1..85: note = Description of Unknown:cds_NC_035460.1_cds_YP_009407980.1_29 target sequence
QSGHKDEEECIKNKIKYIKTKIGKDTDPGVLLGSFWVSDNQRLYIGNASLTGGSISNIKTLGIYSDYGPLAVDLQRRFDTFKTFN

SEQ ID NO: 32623 - protein, 85 aa, unidentified
  REGION 1..85: note = Description of Unknown:cds_NC_035460.1_cds_YP_009407980.1_29 target sequence
SEKSIFDIFSTACCLPASTKYHIYNPIGGVFFSDSPEHLIGMSRTLDADVVMTKLSKATKSIDIELLSLVPIIRDNDKTTFWPNI

SEQ ID NO: 32624 - protein, 85 aa, unidentified
  REGION 1..85: note = Description of Unknown:cds_NC_035460.1_cds_YP_009407980.1_29 target sequence
YNAIICAAINRGVKIRLLVGSWNKNDIYVMSSVKSLQAMCINNDVTVKLFHEKNNTKVLIVDDEFVHITSANFDGTHYLHHAFVS

SEQ ID NO: 32625 - protein, 84 aa, unidentified
  REGION 1..84: note = Description of Unknown:cds_NC_035460.1_cds_YP_009407980.1_29 target sequence
SVKSLQAMCINNDVTVKLFHEKNNTKVLIVDDEFVHITSANFDGTHYLHHAFVSFNTIEPSLVKSVIEIFERDWSASENTMVLN

SEQ ID NO: 32626 - protein, 85 aa, unidentified
  REGION 1..85: note = Description of Unknown:cds_NC_035460.1_cds_YP_009407980.1_29 target sequence
KHMLTSECFYEIITRAKKFINIASFCCNLKTSDEGKMIFNRLKEAAAAGICITILVDHQSGHKDEEECIKNKIKYIKTKIGKDTD

SEQ ID NO: 32627 - protein, 85 aa, unidentified
  REGION 1..85: note = Description of Unknown:cds_NC_035460.1_cds_YP_009407980.1_29 target sequence
PGVLLGSFWVSDNQRLYIGNASLTGGSISNIKTLGIYSDYGPLAVDLQRRFDTFKTFNSEKSIFDIFSTACCLPASTKYHIYNPI

SEQ ID NO: 32628 - protein, 85 aa, unidentified
  REGION 1..85: note = Description of Unknown:cds_NC_035460.1_cds_YP_009407980.1_29 target sequence
GGVFFSDSPEHLIGMSRTLDADVVMTKLSKATKSIDIELLSLVPIIRDNDKTTFWPNIYNAIICAAINRGVKIRLLVGSWNKNDI

SEQ ID NO: 32629 - protein, 85 aa, unidentified
  REGION 1..85: note = Description of Unknown:cds_NC_035460.1_cds_YP_009407980.1_29 target sequence
YVMSSVKSLQAMCINNDVTVKLFHEKNNTKVLIVDDEFVHITSANFDGTHYLHHAFVSFNTIEPSLVKSVIEIFERDWSASENTM

SEQ ID NO: 32630 - protein, 85 aa, unidentified
  REGION 1..85: note = Description of Unknown:cds_NC_009489.1_cds_YP_001249275.1_6 target sequence
ARHAKIPLGLPDEPEPRTLRAFPLVMTEGPGGKGRLMKQLRISKIQSSNIGDHIITFINTYGFVRRNWTYTQFVSERHTASVQPV

SEQ ID NO: 32631 - protein, 85 aa, unidentified
  REGION 1..85: note = Description of Unknown:cds_NC_009489.1_cds_YP_001249275.1_6 target sequence
VTSCMLPFGCGPDIQHPEALIEHLEHCTIKVRKSASLKEEIYFEVQVLPKIFEPYQIAKQNYMCVSSEKYVKAPGKIVAGVDYLY

SEQ ID NO: 32632 - protein, 85 aa, unidentified
  REGION 1..85: note = Description of Unknown:cds_NC_009489.1_cds_YP_001249275.1_6 target sequence
FPTFISLTYCAEEMKFRVAKPIAQARTSFMRSIHLEVILSFACQEDSPIAKSLAKDKETGRFIASVWIHLCNISKNRPITKEYDD

SEQ ID NO: 32633 - protein, 85 aa, unidentified
  REGION 1..85: note = Description of Unknown:cds_NC_009489.1_cds_YP_001249275.1_6 target sequence
KYFAQKILAMKLTVGLVDMWGPTVIVHAEGKIPKSALLFFNKKGKACHPLAEVAPTVAKHAWSVGCTIIEANAIMQESDLKGLGQ

SEQ ID NO: 32634 - protein, 84 aa, unidentified
  REGION 1..84: note = Description of Unknown:cds_NC_009489.1_cds_YP_001249275.1_6 target sequence
IPKSALLFFNKKGKACHPLAEVAPTVAKHAWSVGCTIIEANAIMQESDLKGLGQMDDIVFRKVSLNPEALSLKSSRWNPFTKQQ

SEQ ID NO: 32635 - protein, 85 aa, unidentified
  REGION 1..85: note = Description of Unknown:cds_NC_009489.1_cds_YP_001249275.1_6 target sequence
EGPGGKGRLMKQLRISKIQSSNIGDHIITFINTYGFVRRNWTYTQFVSERHTASVQPVVTSCMLPFGCGPDIQHPEALIEHLEHC

SEQ ID NO: 32636 - protein, 85 aa, unidentified
  REGION 1..85: note = Description of Unknown:cds_NC_009489.1_cds_YP_001249275.1_6 target sequence
TIKVRKSASLKEEIYFEVQVLPKIFEPYQIAKQNYMCVSSEKYVKAPGKIVAGVDYLYFPTFISLTYCAEEMKFRVAKPIAQART

SEQ ID NO: 32637 - protein, 85 aa, unidentified
  REGION 1..85: note = Description of Unknown:cds_NC_009489.1_cds_YP_001249275.1_6 target sequence
SFMRSIHLEVILSFACQEDSPIAKSLAKDKETGRFIASVWIHLCNISKNRPITKEYDDKYFAQKILAMKLTVGLVDMWGPTVIVH

SEQ ID NO: 32638 - protein, 85 aa, unidentified
  REGION 1..85: note = Description of Unknown:cds_NC_009489.1_cds_YP_001249275.1_6 target sequence
AEGKIPKSALLFFNKKGKACHPLAEVAPTVAKHAWSVGCTIIEANAIMQESDLKGLGQMDDIVFRKVSLNPEALSLKSSRWNPFT

SEQ ID NO: 32639 - protein, 85 aa, unidentified
  REGION 1..85: note = Description of Unknown:cds_NZ_WFIY01000004.1_cds_WP_155862507.1_267 target sequence
SAPIMLEEMARKYAIAAVRADKEGNRDEAIAYYKKAIDVLTQIVVLYPDSPTRQAYEQMIDEYKKRVSVLENMLPETPQEDNSQK

SEQ ID NO: 32640 - protein, 85 aa, unidentified
  REGION 1..85: note = Description of Unknown:cds_NZ_WFIY01000004.1_cds_WP_155862507.1_267 target sequence
TDDELIMKEKPKVSFSDIVGLDDVKEALKEAIIYPSKRPDLFPLGWPRGILLYGPPGNGKTMLAAAVANEIDSYFIHVDAASIMS

SEQ ID NO: 32641 - protein, 85 aa, unidentified
  REGION 1..85: note = Description of Unknown:cds_NZ_WFIY01000004.1_cds_WP_155862507.1_267 target sequence
KWLGEAEKNVAKIFNTAREYSKKDNKPAIIFVDEIDALLGTYTSEVGGEVRVRNQFLKEMDGIMDKNENYMVYVIGATNKPWRLD

SEQ ID NO: 32642 - protein, 85 aa, unidentified
  REGION 1..85: note = Description of Unknown:cds_NZ_WFIY01000004.1_cds_WP_155862507.1_267 target sequence
EPFLRRFQKRIYVPLPDFNQRLALFKYYTSKVKLGNVDLQELAKITEGYSASDIRDIVQSAHMRVVKEMFEKNLSEPREITMDDF

SEQ ID NO: 32643 - protein, 84 aa, unidentified
  REGION 1..84: note = Description of Unknown:cds_NZ_WFIY01000004.1_cds_WP_155862507.1_267 target sequence
KVKLGNVDLQELAKITEGYSASDIRDIVQSAHMRVVKEMFEKNLSEPREITMDDFKEVLKIRKPSVNQELIKAYEAWTEKFKAL

SEQ ID NO: 32644 - protein, 85 aa, unidentified
  REGION 1..85: note = Description of Unknown:cds_NZ_WFIY01000004.1_cds_WP_155862507.1_267 target sequence
EAIAYYKKAIDVLTQIVVLYPDSPTRQAYEQMIDEYKKRVSVLENMLPETPQEDNSQKTDDELIMKEKPKVSFSDIVGLDDVKEA

SEQ ID NO: 32645 - protein, 85 aa, unidentified
  REGION 1..85: note = Description of Unknown:cds_NZ_WFIY01000004.1_cds_WP_155862507.1_267 target sequence
LKEAIIYPSKRPDLFPLGWPRGILLYGPPGNGKTMLAAAVANEIDSYFIHVDAASIMSKWLGEAEKNVAKIFNTAREYSKKDNKP

SEQ ID NO: 32646 - protein, 85 aa, unidentified
  REGION 1..85: note = Description of Unknown:cds_NZ_WFIY01000004.1_cds_WP_155862507.1_267 target sequence
AIIFVDEIDALLGTYTSEVGGEVRVRNQFLKEMDGIMDKNENYMVYVIGATNKPWRLDEPFLRRFQKRIYVPLPDFNQRLALFKY

SEQ ID NO: 32647 - protein, 85 aa, unidentified
  REGION 1..85: note = Description of Unknown:cds_NZ_WFIY01000004.1_cds_WP_155862507.1_267 target sequence
YTSKVKLGNVDLQELAKITEGYSASDIRDIVQSAHMRVVKEMFEKNLSEPREITMDDFKEVLKIRKPSVNQELIKAYEAWTEKFK

SEQ ID NO: 32648 - protein, 85 aa, unidentified
  REGION 1..85: note = Description of Unknown:cds_NZ_WFIY01000004.1_cds_WP_155862693.1_493 target sequence
ICKRGYKGYIYLEDGTLIEGCGFGAKGIRAGEVVFTTSMNGYPESLTDPSYRGQILIITHPLVGNYGIPKPIVENGILRNFESER

SEQ ID NO: 32649 - protein, 85 aa, unidentified
  REGION 1..85: note = Description of Unknown:cds_NZ_WFIY01000004.1_cds_WP_155862693.1_493 target sequence
IQVEGLVVAEETDPYKWNSQMSLHDWLKSEGVPGVSDVDTRMLVKKVRNKGVMMGVISSGIELDEPKKYLEKKYDEIDFTQFTSP

SEQ ID NO: 32650 - protein, 85 aa, unidentified
  REGION 1..85: note = Description of Unknown:cds_NZ_WFIY01000004.1_cds_WP_155862693.1_493 target sequence
KSPIIHQGSGKGIIVVVDCGIKHGILYQLNSRGYTVVRVPCNFTANQIMDYSPQGVVFGNGPGNPKLLQGLIKTYKDIVEYKIPI

SEQ ID NO: 32651 - protein, 85 aa, unidentified
  REGION 1..85: note = Description of Unknown:cds_NZ_WFIY01000004.1_cds_WP_155862693.1_493 target sequence
MGICLGHQITSLALGGNVRKMKYGHRAINKPIIDVTDNKCYITTHNHGYGVFKEDVPKDMKVWFYNPDDGVVEGMIHNKLPIITT

SEQ ID NO: 32652 - protein, 84 aa, unidentified
  REGION 1..84: note = Description of Unknown:cds_NZ_WFIY01000004.1_cds_WP_155862693.1_493 target sequence
PIIDVTDNKCYITTHNHGYGVFKEDVPKDMKVWFYNPDDGVVEGMIHNKLPIITTQFHPEARPGPWDVTWVFDKFKKVIESGRP

SEQ ID NO: 32653 - protein, 85 aa, unidentified
  REGION 1..85: note = Description of Unknown:cds_NZ_WFIY01000004.1_cds_WP_155862693.1_493 target sequence
IRAGEVVFTTSMNGYPESLTDPSYRGQILIITHPLVGNYGIPKPIVENGILRNFESERIQVEGLVVAEETDPYKWNSQMSLHDWL

SEQ ID NO: 32654 - protein, 85 aa, unidentified
  REGION 1..85: note = Description of Unknown:cds_NZ_WFIY01000004.1_cds_WP_155862693.1_493 target sequence
KSEGVPGVSDVDTRMLVKKVRNKGVMMGVISSGIELDEPKKYLEKKYDEIDFTQFTSPKSPIIHQGSGKGIIVVVDCGIKHGILY

SEQ ID NO: 32655 - protein, 85 aa, unidentified
  REGION 1..85: note = Description of Unknown:cds_NZ_WFIY01000004.1_cds_WP_155862693.1_493 target sequence
QLNSRGYTVVRVPCNFTANQIMDYSPQGVVFGNGPGNPKLLQGLIKTYKDIVEYKIPIMGICLGHQITSLALGGNVRKMKYGHRA

SEQ ID NO: 32656 - protein, 85 aa, unidentified
  REGION 1..85: note = Description of Unknown:cds_NZ_WFIY01000004.1_cds_WP_155862693.1_493 target sequence
INKPIIDVTDNKCYITTHNHGYGVFKEDVPKDMKVWFYNPDDGVVEGMIHNKLPIITTQFHPEARPGPWDVTWVFDKFKKVIESG

SEQ ID NO: 32657 - protein, 85 aa, unidentified
  REGION 1..85: note = Description of Unknown:vpeps_5X55_1 target sequence
SKKNVDPFSDSDSSSEPPSIFSSDNEENSDVDNSVIINDKNTKSDEADIKYMDEDESSDSESESESKKKSKKSKKSKKSKKSVTK

SEQ ID NO: 32658 - protein, 85 aa, unidentified
  REGION 1..85: note = Description of Unknown:vpeps_5X55_1 target sequence
KKNNLLVGNRIITEYILIDANNYHFKSWIECFPDCKVNLKLLLFRPEWFDFFKYVESKTYFPQLESKLSSYLEKRQRIVPYPELL

SEQ ID NO: 32659 - protein, 85 aa, unidentified
  REGION 1..85: note = Description of Unknown:vpeps_5X55_1 target sequence
FNTMNVLPPGKIKVVILGQDPYPGSCISGVPYAMGCSFSVPLNCPVPKSLANIYTNLIKFNHMRKAPKHGCLASWILQGTFMINS

SEQ ID NO: 32660 - protein, 85 aa, unidentified
  REGION 1..85: note = Description of Unknown:vpeps_5X55_1 target sequence
AFTTVLNESGVHARTWESFTADLIDYLTDNYDDLIFVAWGAHAHKLCQRVDPKKHYIITSSHPSPYSVSNTMTSMSYGPNPKKVT

SEQ ID NO: 32661 - protein, 85 aa, unidentified
  REGION 1..85: note = Description of Unknown:vpeps_5X55_1 target sequence
NYDDLIFVAWGAHAHKLCQRVDPKKHYIITSSHPSPYSVSNTMTSMSYGPNPKKVTYPSFNSVDHFGKINEHLKSRNKKPIFWDL

SEQ ID NO: 32662 - protein, 85 aa, unidentified
  REGION 1..85: note = Description of Unknown:vpeps_5X55_1 target sequence
NSDVDNSVIINDKNTKSDEADIKYMDEDESSDSESESESKKKSKKSKKSKKSKKSVTKKKNNLLVGNRIITEYILIDANNYHFKS

SEQ ID NO: 32663 - protein, 85 aa, unidentified
  REGION 1..85: note = Description of Unknown:vpeps_5X55_1 target sequence
WIECFPDCKVNLKLLLFRPEWFDFFKYVESKTYFPQLESKLSSYLEKRQRIVPYPELLFNTMNVLPPGKIKVVILGQDPYPGSCI

SEQ ID NO: 32664 - protein, 85 aa, unidentified
  REGION 1..85: note = Description of Unknown:vpeps_5X55_1 target sequence
SGVPYAMGCSFSVPLNCPVPKSLANIYTNLIKFNHMRKAPKHGCLASWILQGTFMINSAFTTVLNESGVHARTWESFTADLIDYL

SEQ ID NO: 32665 - protein, 85 aa, unidentified
  REGION 1..85: note = Description of Unknown:vpeps_5X55_1 target sequence
TDNYDDLIFVAWGAHAHKLCQRVDPKKHYIITSSHPSPYSVSNTMTSMSYGPNPKKVTYPSFNSVDHFGKINEHLKSRNKKPIFW

SEQ ID NO: 32666 - protein, 85 aa, unidentified
  REGION 1..85: note = Description of Unknown:cds_NZ_WFIY01000004.1_cds_WP_155863323.1_1289 target sequence
LTNRREVLKISFSAFFADLGYQAAVASFPIILVFYFHAPIFVYGIAESLNYGGGSLMSLLGGYLADKYGRKKIGVIGNSLIVILS

SEQ ID NO: 32667 - protein, 85 aa, unidentified
  REGION 1..85: note = Description of Unknown:cds_NZ_WFIY01000004.1_cds_WP_155863323.1_1289 target sequence
FTGLAANYIQAIILFMLGWWFRNFRTPARRAMVSEVTQENERSEAYGILHALDIGGAALAILYLTIALYLGIKATVVVLLTAIPL

SEQ ID NO: 32668 - protein, 85 aa, unidentified
  REGION 1..85: note = Description of Unknown:cds_NZ_WFIY01000004.1_cds_WP_155863323.1_1289 target sequence
VISTILLAMVKAGGKGKPKLMVRKGWILVISTMFFAFSQYSFGFPIITTAEFTHKLYLATITYGVFLVSSALFGYIFGKLRLSEY

SEQ ID NO: 32669 - protein, 85 aa, unidentified
  REGION 1..85: note = Description of Unknown:cds_NZ_WFIY01000004.1_cds_WP_155863323.1_1289 target sequence
KALAFLGYLLASLASLGFAFLSPLGLIGIYPLSFLMGIAVASTETFEPTIISKLSKGEVGTSMGALSLGRSIGLLIGNTAMGFLY

SEQ ID NO: 32670 - protein, 84 aa, unidentified
  REGION 1..84: note = Description of Unknown:cds_NZ_WFIY01000004.1_cds_WP_155863323.1_1289 target sequence
YPLSFLMGIAVASTETFEPTIISKLSKGEVGTSMGALSLGRSIGLLIGNTAMGFLYQISFSYAYAFASIMSFIAFMIVLTSLRE

SEQ ID NO: 32671 - protein, 85 aa, unidentified
  REGION 1..85: note = Description of Unknown:cds_NZ_WFIY01000004.1_cds_WP_155863323.1_1289 target sequence
FPIILVFYFHAPIFVYGIAESLNYGGGSLMSLLGGYLADKYGRKKIGVIGNSLIVILSFTGLAANYIQAIILFMLGWWFRNFRTP

SEQ ID NO: 32672 - protein, 85 aa, unidentified
  REGION 1..85: note = Description of Unknown:cds_NZ_WFIY01000004.1_cds_WP_155863323.1_1289 target sequence
ARRAMVSEVTQENERSEAYGILHALDIGGAALAILYLTIALYLGIKATVVVLLTAIPLVISTILLAMVKAGGKGKPKLMVRKGWI

SEQ ID NO: 32673 - protein, 85 aa, unidentified
  REGION 1..85: note = Description of Unknown:cds_NZ_WFIY01000004.1_cds_WP_155863323.1_1289 target sequence
LVISTMFFAFSQYSFGFPIITTAEFTHKLYLATITYGVFLVSSALFGYIFGKLRLSEYKALAFLGYLLASLASLGFAFLSPLGLI

SEQ ID NO: 32674 - protein, 85 aa, unidentified
  REGION 1..85: note = Description of Unknown:cds_NZ_WFIY01000004.1_cds_WP_155863323.1_1289 target sequence
GIYPLSFLMGIAVASTETFEPTIISKLSKGEVGTSMGALSLGRSIGLLIGNTAMGFLYQISFSYAYAFASIMSFIAFMIVLTSLR

SEQ ID NO: 32675 - protein, 85 aa, unidentified
  REGION 1..85: note = Description of Unknown:cds_NC_030656.1_cds_YP_009268826.1_111 target sequence
GAGSSITSVFVQKTDVRGELEMVIDEDSAGVRYIIPFSEESEVISDNSKDVINPRFCLQDNMDPNYCGTYLSPSISKEYIQVKGD

SEQ ID NO: 32676 - protein, 85 aa, unidentified
  REGION 1..85: note = Description of Unknown:cds_NC_030656.1_cds_YP_009268826.1_111 target sequence
PCKSFSFRPGSVIKYNEPVSDSVKAYVKTGYLCKFVKSPLSADDKYKSCCTNPTPLCPNRLNNNFETDDCDLVMSSACKDDPNNI

SEQ ID NO: 32677 - protein, 85 aa, unidentified
  REGION 1..85: note = Description of Unknown:cds_NC_030656.1_cds_YP_009268826.1_111 target sequence
LCLDWLRKKRKIALSTYSDICAKNMDSRYCSEFIRIVRPENYAFGDSSLINYCNDHSSNKNCWCVNPPKVFADDKKNRFLGPRVC

SEQ ID NO: 32678 - protein, 85 aa, unidentified
  REGION 1..85: note = Description of Unknown:cds_NC_030656.1_cds_YP_009268826.1_111 target sequence
WKHECTDNTRDRKWLLYNQDVQRTRCRYVGCSINIDSLTMEKSNVSLISNCHAGIPILGDVDPGNYTDKNKSKEANYALISIPVV

SEQ ID NO: 32679 - protein, 84 aa, unidentified
  REGION 1..84: note = Description of Unknown:cds_NC_030656.1_cds_YP_009268826.1_111 target sequence
GCSINIDSLTMEKSNVSLISNCHAGIPILGDVDPGNYTDKNKSKEANYALISIPVVFVVIMVIVYFICVYSRSRLKTNIINVTR

SEQ ID NO: 32680 - protein, 85 aa, unidentified
  REGION 1..85: note = Description of Unknown:cds_NC_030656.1_cds_YP_009268826.1_111 target sequence
SAGVRYIIPFSEESEVISDNSKDVINPRFCLQDNMDPNYCGTYLSPSISKEYIQVKGDPCKSFSFRPGSVIKYNEPVSDSVKAYV

SEQ ID NO: 32681 - protein, 85 aa, unidentified
  REGION 1..85: note = Description of Unknown:cds_NC_030656.1_cds_YP_009268826.1_111 target sequence
KTGYLCKFVKSPLSADDKYKSCCTNPTPLCPNRLNNNFETDDCDLVMSSACKDDPNNILCLDWLRKKRKIALSTYSDICAKNMDS

SEQ ID NO: 32682 - protein, 85 aa, unidentified
  REGION 1..85: note = Description of Unknown:cds_NC_030656.1_cds_YP_009268826.1_111 target sequence
RYCSEFIRIVRPENYAFGDSSLINYCNDHSSNKNCWCVNPPKVFADDKKNRFLGPRVCWKHECTDNTRDRKWLLYNQDVQRTRCR

SEQ ID NO: 32683 - protein, 85 aa, unidentified
  REGION 1..85: note = Description of Unknown:cds_NC_030656.1_cds_YP_009268826.1_111 target sequence
YVGCSINIDSLTMEKSNVSLISNCHAGIPILGDVDPGNYTDKNKSKEANYALISIPVVFVVIMVIVYFICVYSRSRLKTNIINVT

SEQ ID NO: 32684 - protein, 85 aa, unidentified
  REGION 1..85: note = Description of Unknown:cds_NZ_WFIY01000004.1_cds_978 target sequence
ITINSIDIAVGIERHLHEWPTIDAEIPRPEGFRVIEEINYKPCIEWKGEKSGKYAVYLLEKTNVDHFTAMYELTKILKRKVNYIG

SEQ ID NO: 32685 - protein, 85 aa, unidentified
  REGION 1..85: note = Description of Unknown:cds_NZ_WFIY01000004.1_cds_978 target sequence
IKDTNAITSQIVYTDSSSTVQEFESDGIKLKFLGYSNQKFNHTGNIFTIKLVTSKFDEVIERIKVINKDPFIPAFVGYQRFGTRR

SEQ ID NO: 32686 - protein, 85 aa, unidentified
  REGION 1..85: note = Description of Unknown:cds_NZ_WFIY01000004.1_cds_978 target sequence
PMTHVIGYYIVKKDWYNAVMSILAYPFYSESDLMKDLRKMIMEGNYKEALSFIPSKFKQERVLLKNLIKDNNFFLALKNSFIPLS

SEQ ID NO: 32687 - protein, 85 aa, unidentified
  REGION 1..85: note = Description of Unknown:cds_NZ_WFIY01000004.1_cds_978 target sequence
FYVEAYQSYLFNKFLSRKMNDIGKNSVLGIYSDIRKCDEICKEIYDEEGIDPSNFKIKELKINKPQLVRKAFTKVRSLKADEKNN

SEQ ID NO: 32688 - protein, 84 aa, unidentified
  REGION 1..84: note = Description of Unknown:cds_NZ_WFIY01000004.1_cds_978 target sequence
IYSDIRKCDEICKEIYDEEGIDPSNFKIKELKINKPQLVRKAFTKVRSLKADEKNNEISFALDRGMYATVFLVELLNIDARKIT

SEQ ID NO: 32689 - protein, 85 aa, unidentified
  REGION 1..85: note = Description of Unknown:cds_NZ_WFIY01000004.1_cds_978 target sequence
RPEGFRVIEEINYKPCIEWKGEKSGKYAVYLLEKTNVDHFTAMYELTKILKRKVNYIGIKDTNAITSQIVYTDSSSTVQEFESDG

SEQ ID NO: 32690 - protein, 85 aa, unidentified
  REGION 1..85: note = Description of Unknown:cds_NZ_WFIY01000004.1_cds_978 target sequence
IKLKFLGYSNQKFNHTGNIFTIKLVTSKFDEVIERIKVINKDPFIPAFVGYQRFGTRRPMTHVIGYYIVKKDWYNAVMSILAYPF

SEQ ID NO: 32691 - protein, 85 aa, unidentified
  REGION 1..85: note = Description of Unknown:cds_NZ_WFIY01000004.1_cds_978 target sequence
YSESDLMKDLRKMIMEGNYKEALSFIPSKFKQERVLLKNLIKDNNFFLALKNSFIPLSFYVEAYQSYLFNKFLSRKMNDIGKNSV

SEQ ID NO: 32692 - protein, 85 aa, unidentified
  REGION 1..85: note = Description of Unknown:cds_NZ_WFIY01000004.1_cds_978 target sequence
LGIYSDIRKCDEICKEIYDEEGIDPSNFKIKELKINKPQLVRKAFTKVRSLKADEKNNEISFALDRGMYATVFLVELLNIDARKI

SEQ ID NO: 32693 - protein, 85 aa, unidentified
  REGION 1..85: note = Description of Unknown:cds_NZ_WFIY01000004.1_cds_WP_155863799.1_1682 target sequence
FWEDFRELVPATKNYIYLNHAALSPTPLPVLYETFRYLYEVSKSGTIADNEEQKDELFHIRKNISNLIKADPLEISLIPNTSFGI

SEQ ID NO: 32694 - protein, 85 aa, unidentified
  REGION 1..85: note = Description of Unknown:cds_NZ_WFIY01000004.1_cds_WP_155863799.1_1682 target sequence
NVVAHGLEYDDKSNIVTDSLEFPATVYPFLKIKKLEKRIVNASPYDIEDKIIENIDENTKIVSISHVSFNTGVRIDVQKIVTKAK

SEQ ID NO: 32695 - protein, 85 aa, unidentified
  REGION 1..85: note = Description of Unknown:cds_NZ_WFIY01000004.1_cds_WP_155863799.1_1682 target sequence
KVGALVLLDIIQSAGAIKINVKDLGIDFAVAGGYKWLMSPQGSGFMYIRKGLLEDPPFYGWKSAKNYLDFDPTKFELENGPRRIE

SEQ ID NO: 32696 - protein, 85 aa, unidentified
  REGION 1..85: note = Description of Unknown:cds_NZ_WFIY01000004.1_cds_WP_155863799.1_1682 target sequence
IGTIDIAANLGLSKSAEIISSHEDEIEKRVLQLSAYAIDIAEDKKFEVITPKEKRAGIVVIKVKKPKEIASRLAQRNIIVSPRGE

SEQ ID NO: 32697 - protein, 84 aa, unidentified
  REGION 1..84: note = Description of Unknown:cds_NZ_WFIY01000004.1_cds_WP_155863799.1_1682 target sequence
RVLQLSAYAIDIAEDKKFEVITPKEKRAGIVVIKVKKPKEIASRLAQRNIIVSPRGEGIRISTHFYNTEEEIEKTINSISQEVS

SEQ ID NO: 32698 - protein, 85 aa, unidentified
  REGION 1..85: note = Description of Unknown:cds_NZ_WFIY01000004.1_cds_WP_155863799.1_1682 target sequence
LPVLYETFRYLYEVSKSGTIADNEEQKDELFHIRKNISNLIKADPLEISLIPNTSFGINVVAHGLEYDDKSNIVTDSLEFPATVY

SEQ ID NO: 32699 - protein, 85 aa, unidentified
  REGION 1..85: note = Description of Unknown:cds_NZ_WFIY01000004.1_cds_WP_155863799.1_1682 target sequence
PFLKIKKLEKRIVNASPYDIEDKIIENIDENTKIVSISHVSFNTGVRIDVQKIVTKAKKVGALVLLDIIQSAGAIKINVKDLGID

SEQ ID NO: 32700 - protein, 85 aa, unidentified
  REGION 1..85: note = Description of Unknown:cds_NZ_WFIY01000004.1_cds_WP_155863799.1_1682 target sequence
FAVAGGYKWLMSPQGSGFMYIRKGLLEDPPFYGWKSAKNYLDFDPTKFELENGPRRIEIGTIDIAANLGLSKSAEIISSHEDEIE

SEQ ID NO: 32701 - protein, 85 aa, unidentified
  REGION 1..85: note = Description of Unknown:cds_NZ_WFIY01000004.1_cds_WP_155863799.1_1682 target sequence
KRVLQLSAYAIDIAEDKKFEVITPKEKRAGIVVIKVKKPKEIASRLAQRNIIVSPRGEGIRISTHFYNTEEEIEKTINSISQEVS

SEQ ID NO: 32702 - protein, 85 aa, unidentified
  REGION 1..85: note = Description of Unknown:cds_NC_035464.1_cds_YP_009408164.1_18 target sequence
NYTWYVQNQDPSTIQFCVMQSGGYNNCTSIPGNSTEPFTIPDMDVQIYGTPTGYYVYYSSVGVKTSTKSLPSSGSTITVPPYTGC

SEQ ID NO: 32703 - protein, 85 aa, unidentified
  REGION 1..85: note = Description of Unknown:cds_NC_035464.1_cds_YP_009408164.1_18 target sequence
DPLLTQGQGYPPLVPCSSPLIFLKSESTPAMFIENWGAETSGFSYGYGIAGSQLAIATGPNWVYYRQYPQAQVYLIGNWKVVNGN

SEQ ID NO: 32704 - protein, 85 aa, unidentified
  REGION 1..85: note = Description of Unknown:cds_NC_035464.1_cds_YP_009408164.1_18 target sequence
YVDMDSGKTFCGCQGKSVYVIPTSDLPGPSSGTTSTGTSTTGTSTSTTGTPTGTSTQQTTQPTTGILNVANQCSTGVVVYAGGKT

SEQ ID NO: 32705 - protein, 85 aa, unidentified
  REGION 1..85: note = Description of Unknown:cds_NC_035464.1_cds_YP_009408164.1_18 target sequence
AYAPPYHSISLEVPIPTGYTLISQGQTVGKGTVYQSGEYVSPSSCPSVSPTPSPTPTPSPTGGQTTSTTTTTTTTQTTSTQTTQN

SEQ ID NO: 32706 - protein, 84 aa, unidentified
  REGION 1..84: note = Description of Unknown:cds_NC_035464.1_cds_YP_009408164.1_18 target sequence
GKGTVYQSGEYVSPSSCPSVSPTPSPTPTPSPTGGQTTSTTTTTTTTQTTSTQTTQNTQPPTTPSMSWGLILLLVILGALALSS

SEQ ID NO: 32707 - protein, 85 aa, unidentified
  REGION 1..85: note = Description of Unknown:cds_NC_035464.1_cds_YP_009408164.1_18 target sequence
TSIPGNSTEPFTIPDMDVQIYGTPTGYYVYYSSVGVKTSTKSLPSSGSTITVPPYTGCDPLLTQGQGYPPLVPCSSPLIFLKSES

SEQ ID NO: 32708 - protein, 85 aa, unidentified
  REGION 1..85: note = Description of Unknown:cds_NC_035464.1_cds_YP_009408164.1_18 target sequence
TPAMFIENWGAETSGFSYGYGIAGSQLAIATGPNWVYYRQYPQAQVYLIGNWKVVNGNYVDMDSGKTFCGCQGKSVYVIPTSDLP

SEQ ID NO: 32709 - protein, 85 aa, unidentified
  REGION 1..85: note = Description of Unknown:cds_NC_035464.1_cds_YP_009408164.1_18 target sequence
GPSSGTTSTGTSTTGTSTSTTGTPTGTSTQQTTQPTTGILNVANQCSTGVVVYAGGKTAYAPPYHSISLEVPIPTGYTLISQGQT

SEQ ID NO: 32710 - protein, 85 aa, unidentified
  REGION 1..85: note = Description of Unknown:cds_NC_035464.1_cds_YP_009408164.1_18 target sequence
VGKGTVYQSGEYVSPSSCPSVSPTPSPTPTPSPTGGQTTSTTTTTTTTQTTSTQTTQNTQPPTTPSMSWGLILLLVILGALALSS

SEQ ID NO: 32711 - protein, 85 aa, unidentified
  REGION 1..85: note = Description of Unknown:cds_NC_024711.1_cds_YP_009052539.1_62 target sequence
SLTLGRQGGIAQPLKKRTVGQINIAHVYDGANHIWPTSVIHFSDFTSVQLRYIWGSDDGQDLDTKSYYVNSPINSLNYVAVGWSW

SEQ ID NO: 32712 - protein, 85 aa, unidentified
  REGION 1..85: note = Description of Unknown:cds_NC_024711.1_cds_YP_009052539.1_62 target sequence
NLSQIPYLYWGGDNTNSGAECVMFNIESMIDLEDKMPDIMKMNLCANWYGSLSRGHVTVECTAYKGGVIVHAWQLKNHEIDVDNR

SEQ ID NO: 32713 - protein, 85 aa, unidentified
  REGION 1..85: note = Description of Unknown:cds_NC_024711.1_cds_YP_009052539.1_62 target sequence
GMFIFPLADGTINMPDGHGGYKECWYGEVIKRVAKSNNEVKYFRINPVNDKTIGLDNIKIIRHGGGYIHRDGYCWYENQPNDKYK

SEQ ID NO: 32714 - protein, 85 aa, unidentified
  REGION 1..85: note = Description of Unknown:cds_NC_024711.1_cds_YP_009052539.1_62 target sequence
VWNNQVNTTGTPLTLDKPTLNITSDDNYSYEYHTVLLNEDNTVYNDNYTDNYKFRFGFIAGNSEFRGQQTIQCYVGTQGGKADDG

SEQ ID NO: 32715 - protein, 84 aa, unidentified
  REGION 1..84: note = Description of Unknown:cds_NC_024711.1_cds_YP_009052539.1_62 target sequence
YSYEYHTVLLNEDNTVYNDNYTDNYKFRFGFIAGNSEFRGQQTIQCYVGTQGGKADDGKTSIGEIKYTKLNKIGELTIYSPIES

SEQ ID NO: 32716 - protein, 85 aa, unidentified
  REGION 1..85: note = Description of Unknown:cds_NC_024711.1_cds_YP_009052539.1_62 target sequence
YDGANHIWPTSVIHFSDFTSVQLRYIWGSDDGQDLDTKSYYVNSPINSLNYVAVGWSWNLSQIPYLYWGGDNTNSGAECVMFNIE

SEQ ID NO: 32717 - protein, 85 aa, unidentified
  REGION 1..85: note = Description of Unknown:cds_NC_024711.1_cds_YP_009052539.1_62 target sequence
SMIDLEDKMPDIMKMNLCANWYGSLSRGHVTVECTAYKGGVIVHAWQLKNHEIDVDNRGMFIFPLADGTINMPDGHGGYKECWYG

SEQ ID NO: 32718 - protein, 85 aa, unidentified
  REGION 1..85: note = Description of Unknown:cds_NC_024711.1_cds_YP_009052539.1_62 target sequence
EVIKRVAKSNNEVKYFRINPVNDKTIGLDNIKIIRHGGGYIHRDGYCWYENQPNDKYKVWNNQVNTTGTPLTLDKPTLNITSDDN

SEQ ID NO: 32719 - protein, 85 aa, unidentified
  REGION 1..85: note = Description of Unknown:cds_NZ_WFIY01000004.1_cds_WP_205737129.1_197 target sequence
YYFKLTIMVVSTLRIDTLSRIMEEMEKEKYHIIGNHSAYKKCHWTHEALTEGRYCYKGKFYGIESHRCVQMTPTAAWCWFRCIHC

SEQ ID NO: 32720 - protein, 85 aa, unidentified
  REGION 1..85: note = Description of Unknown:cds_NZ_WFIY01000004.1_cds_WP_205737129.1_197 target sequence
WRLEPEDIGLEWDETKLPITDDPEYIAEKSIEEHKRAVSGYLGRKGVDPNMAKEAMKPAHVAISLTGEPTLYDRLGELIHEYHKR

SEQ ID NO: 32721 - protein, 85 aa, unidentified
  REGION 1..85: note = Description of Unknown:cds_NZ_WFIY01000004.1_cds_WP_205737129.1_197 target sequence
GLTTFLVTSGVRPDVLASLEEEPTQLFVSIQAPNERKHKLINRPIVANSWNLFLKTLEILPSFSSPTVIRMTMIKGFNMSEEDAK

SEQ ID NO: 32722 - protein, 85 aa, unidentified
  REGION 1..85: note = Description of Unknown:cds_NZ_WFIY01000004.1_cds_WP_205737129.1_197 target sequence
DFAKLIEIAMPTYIEVKAYMHVGPSTLRLSRDAMPRHSEVREFAKLMEKYTGYKIISEHVPSRIVLLSKLDKPIQIGNAWSDKWN

SEQ ID NO: 32723 - protein, 84 aa, unidentified
  REGION 1..84: note = Description of Unknown:cds_NZ_WFIY01000004.1_cds_WP_205737129.1_197 target sequence
RLSRDAMPRHSEVREFAKLMEKYTGYKIISEHVPSRIVLLSKLDKPIQIGNAWSDKWNWATKDTEDDIHGEYAEAELGSGNNQC

SEQ ID NO: 32724 - protein, 85 aa, unidentified
  REGION 1..85: note = Description of Unknown:cds_NZ_WFIY01000004.1_cds_WP_205737129.1_197 target sequence
EKYHIIGNHSAYKKCHWTHEALTEGRYCYKGKFYGIESHRCVQMTPTAAWCWFRCIHCWRLEPEDIGLEWDETKLPITDDPEYIA

SEQ ID NO: 32725 - protein, 85 aa, unidentified
  REGION 1..85: note = Description of Unknown:cds_NZ_WFIY01000004.1_cds_WP_205737129.1_197 target sequence
EKSIEEHKRAVSGYLGRKGVDPNMAKEAMKPAHVAISLTGEPTLYDRLGELIHEYHKRGLTTFLVTSGVRPDVLASLEEEPTQLF

SEQ ID NO: 32726 - protein, 85 aa, unidentified
  REGION 1..85: note = Description of Unknown:cds_NZ_WFIY01000004.1_cds_WP_205737129.1_197 target sequence
VSIQAPNERKHKLINRPIVANSWNLFLKTLEILPSFSSPTVIRMTMIKGFNMSEEDAKDFAKLIEIAMPTYIEVKAYMHVGPSTL

SEQ ID NO: 32727 - protein, 85 aa, unidentified
  REGION 1..85: note = Description of Unknown:cds_NZ_WFIY01000004.1_cds_WP_155863082.1_994 target sequence
IIIGAGAHGLSLAYHLVKKGVKGIILVEQSRIGYGSSSRNASRFRYHFYSRENIEFALEGIKYLISQKKELKYNPLIYKTGYLWL

SEQ ID NO: 32728 - protein, 85 aa, unidentified
  REGION 1..85: note = Description of Unknown:cds_NZ_WFIY01000004.1_cds_WP_155863082.1_994 target sequence
LHDENLIGNFKKLHSLWSSYSIGGKFLECKEFEFLRVDGTCYFAPQDGAFHHDYMIYSYYEEIKDKVDIKYGKVSKILYNNGKIT

SEQ ID NO: 32729 - protein, 85 aa, unidentified
  REGION 1..85: note = Description of Unknown:cds_NZ_WFIY01000004.1_cds_WP_155863082.1_994 target sequence
GIKLESGEEIKDNEVVVTAGAWSGELLKTANINLPIYPDRKEIFITEDVKFRIKPLVIDFKREIYFSHTLKGEIIGGIEKEDIGF

SEQ ID NO: 32730 - protein, 85 aa, unidentified
  REGION 1..85: note = Description of Unknown:cds_NZ_WFIY01000004.1_cds_WP_155863082.1_994 target sequence
KEFSISFLDSIEYLKRLREVVKGIEGIGILRGWSGYYEMTPDHSHVMGYGNDWPEGLFIDAGYSGHGMMFAPYAGKIMADLIADG

SEQ ID NO: 32731 - protein, 84 aa, unidentified
  REGION 1..84: note = Description of Unknown:cds_NZ_WFIY01000004.1_cds_WP_155863082.1_994 target sequence
GILRGWSGYYEMTPDHSHVMGYGNDWPEGLFIDAGYSGHGMMFAPYAGKIMADLIADGEKNRFIQIFSPDRFNEEKLIEEKMVI

SEQ ID NO: 32732 - protein, 85 aa, unidentified
  REGION 1..85: note = Description of Unknown:cds_NZ_WFIY01000004.1_cds_WP_155863082.1_994 target sequence
EQSRIGYGSSSRNASRFRYHFYSRENIEFALEGIKYLISQKKELKYNPLIYKTGYLWLLHDENLIGNFKKLHSLWSSYSIGGKFL

SEQ ID NO: 32733 - protein, 85 aa, unidentified
  REGION 1..85: note = Description of Unknown:cds_NZ_WFIY01000004.1_cds_WP_155863082.1_994 target sequence
ECKEFEFLRVDGTCYFAPQDGAFHHDYMIYSYYEEIKDKVDIKYGKVSKILYNNGKITGIKLESGEEIKDNEVVVTAGAWSGELL

SEQ ID NO: 32734 - protein, 85 aa, unidentified
  REGION 1..85: note = Description of Unknown:cds_NZ_WFIY01000004.1_cds_WP_155863082.1_994 target sequence
KTANINLPIYPDRKEIFITEDVKFRIKPLVIDFKREIYFSHTLKGEIIGGIEKEDIGFKEFSISFLDSIEYLKRLREVVKGIEGI

SEQ ID NO: 32735 - protein, 85 aa, unidentified
  REGION 1..85: note = Description of Unknown:cds_NZ_WFIY01000004.1_cds_WP_155863397.1_1373 target sequence
KRWDMQLKNIGNKNLFFIVLFYTINIALTAYLFYFLFNLPKMSIKIQTDTGQLIGTFITLGVLAYTFGLRHAVDADHLAAIDNTT

SEQ ID NO: 32736 - protein, 85 aa, unidentified
  REGION 1..85: note = Description of Unknown:cds_NZ_WFIY01000004.1_cds_WP_155863397.1_1373 target sequence
RKLLQEGKDPYFLGTFFSLGHSTVVILLSVMLMIATRYVVNNLTNIENIGSIIGTLVSGGFLYIIGFLNLLVVLELYNIYKTVRK

SEQ ID NO: 32737 - protein, 85 aa, unidentified
  REGION 1..85: note = Description of Unknown:cds_NZ_WFIY01000004.1_cds_WP_155863397.1_1373 target sequence
EKTIDDQKLNEILLKRGFMNRFFGKLFKIITKQYQMYIIGFLFGLGFDTATEVAILAISATLAGAFASIPMTTILALPLLFTLGM

SEQ ID NO: 32738 - protein, 85 aa, unidentified
  REGION 1..85: note = Description of Unknown:cds_NZ_WFIY01000004.1_cds_WP_155863397.1_1373 target sequence
SLVDTADGIFMRLAYGWAFRNALGKIWYNLTMTLISIVIAYGIGTIELLGLLACEYNLSGFFWDQVAALNNAYWETIGYFIIGTF

SEQ ID NO: 32739 - protein, 84 aa, unidentified
  REGION 1..84: note = Description of Unknown:cds_NZ_WFIY01000004.1_cds_WP_155863397.1_1373 target sequence
YNLTMTLISIVIAYGIGTIELLGLLACEYNLSGFFWDQVAALNNAYWETIGYFIIGTFAITWAISGILYKYKINRGHLDVNNRK

SEQ ID NO: 32740 - protein, 85 aa, unidentified
  REGION 1..85: note = Description of Unknown:cds_NZ_WFIY01000004.1_cds_WP_155863397.1_1373 target sequence
LTAYLFYFLFNLPKMSIKIQTDTGQLIGTFITLGVLAYTFGLRHAVDADHLAAIDNTTRKLLQEGKDPYFLGTFFSLGHSTVVIL

SEQ ID NO: 32741 - protein, 85 aa, unidentified
  REGION 1..85: note = Description of Unknown:cds_NZ_WFIY01000004.1_cds_WP_155863397.1_1373 target sequence
LSVMLMIATRYVVNNLTNIENIGSIIGTLVSGGFLYIIGFLNLLVVLELYNIYKTVRKEKTIDDQKLNEILLKRGFMNRFFGKLF

SEQ ID NO: 32742 - protein, 85 aa, unidentified
  REGION 1..85: note = Description of Unknown:cds_NZ_WFIY01000004.1_cds_WP_155863397.1_1373 target sequence
KIITKQYQMYIIGFLFGLGFDTATEVAILAISATLAGAFASIPMTTILALPLLFTLGMSLVDTADGIFMRLAYGWAFRNALGKIW

SEQ ID NO: 32743 - protein, 85 aa, unidentified
  REGION 1..85: note = Description of Unknown:cds_NZ_WFIY01000004.1_cds_WP_155863524.1_1468 target sequence
HSHLKVFYEESFPILKLTHKLPILKRGRGNRVWDIEGKEYIDFDMSNGDALLGYGNPELVNSILGGSSNQKETIEKLKRRFSLRS

SEQ ID NO: 32744 - protein, 85 aa, unidentified
  REGION 1..85: note = Description of Unknown:cds_NZ_WFIY01000004.1_cds_WP_155863524.1_1468 target sequence
VKIFSSEKQAKAYAINLARQLSGKRKIIRFGQNDLIKKCDLGEEIIAEWNNLDYLEKIVRQNYDIAAIIFEPIATHMGLILPENG

SEQ ID NO: 32745 - protein, 85 aa, unidentified
  REGION 1..85: note = Description of Unknown:cds_NZ_WFIY01000004.1_cds_WP_155863524.1_1468 target sequence
FLKGVMEISKEYGIITIADEIKTGGKYYNGASGYLKIKPDIILFGRALAGSIPIGIVGINYKEEDYVRASPISIKALEVTLDELN

SEQ ID NO: 32746 - protein, 85 aa, unidentified
  REGION 1..85: note = Description of Unknown:cds_NZ_WFIY01000004.1_cds_WP_155863524.1_1468 target sequence
EQSMYEMMRLNDILVKGYKDLIEDNKIKASVTSWGISGTIYFRESPPRRYSEFLEINVKKWNKYFKGMLESGIIPMNNYDSQWSI

SEQ ID NO: 32747 - protein, 84 aa, unidentified
  REGION 1..84: note = Description of Unknown:cds_NZ_WFIY01000004.1_cds_WP_155863524.1_1468 target sequence
KASVTSWGISGTIYFRESPPRRYSEFLEINVKKWNKYFKGMLESGIIPMNNYDSQWSISKVHTEEDIRVHLEKLNNVIKTVLSH

SEQ ID NO: 32748 - protein, 85 aa, unidentified
  REGION 1..85: note = Description of Unknown:cds_NZ_WFIY01000004.1_cds_WP_155863524.1_1468 target sequence
RGNRVWDIEGKEYIDFDMSNGDALLGYGNPELVNSILGGSSNQKETIEKLKRRFSLRSVKIFSSEKQAKAYAINLARQLSGKRKI

SEQ ID NO: 32749 - protein, 85 aa, unidentified
  REGION 1..85: note = Description of Unknown:cds_NZ_WFIY01000004.1_cds_WP_155863524.1_1468 target sequence
IRFGQNDLIKKCDLGEEIIAEWNNLDYLEKIVRQNYDIAAIIFEPIATHMGLILPENGFLKGVMEISKEYGIITIADEIKTGGKY

SEQ ID NO: 32750 - protein, 85 aa, unidentified
  REGION 1..85: note = Description of Unknown:cds_NZ_WFIY01000004.1_cds_WP_155863524.1_1468 target sequence
YNGASGYLKIKPDIILFGRALAGSIPIGIVGINYKEEDYVRASPISIKALEVTLDELNEQSMYEMMRLNDILVKGYKDLIEDNKI

SEQ ID NO: 32751 - protein, 85 aa, unidentified
  REGION 1..85: note = Description of Unknown:cds_NZ_WFIY01000004.1_cds_WP_155864202.1_2166 target sequence
ANYKLALTALLTIFLFSALAIYSISFVLPEFISSFGGLASFAIPLSWIGGAIGGLLMGIFGDTKGKRLSLLISILLFVFPILGNV

SEQ ID NO: 32752 - protein, 85 aa, unidentified
  REGION 1..85: note = Description of Unknown:cds_NZ_WFIY01000004.1_cds_WP_155864202.1_2166 target sequence
VVDNVVLFYLIWFLIGFGVNAVNGISYVYAAELSPPSIRGLIGSIMQGLYFLGAILGLLISFVTKETIFPYYTIIFVLSAISIPL

SEQ ID NO: 32753 - protein, 85 aa, unidentified
  REGION 1..85: note = Description of Unknown:cds_NZ_WFIY01000004.1_cds_WP_155864202.1_2166 target sequence
WFLIPESKWKAKFSFRVSREFVKVTVFGSLFSIGAFLLLVPLVSLSFTLFSSLKLNAYAVILIGFIIGMIGFTIAGSISDRIGRK

SEQ ID NO: 32754 - protein, 85 aa, unidentified
  REGION 1..85: note = Description of Unknown:cds_NZ_WFIY01000004.1_cds_WP_155864202.1_2166 target sequence
KASYLFAGISVFSSLLFFSGLVIASFILLMFGSSFFAYFGIWMSEIYPINFKATGTNITLFLGRLLGGGFGVTLVLLLPFGLERD

SEQ ID NO: 32755 - protein, 84 aa, unidentified
  REGION 1..84: note = Description of Unknown:cds_NZ_WFIY01000004.1_cds_WP_155864202.1_2166 target sequence
LLMFGSSFFAYFGIWMSEIYPINFKATGTNITLFLGRLLGGGFGVTLVLLLPFGLERDLSLTVLISSIIVLLSATQLPETVKTQ

SEQ ID NO: 32756 - protein, 85 aa, unidentified
  REGION 1..85: note = Description of Unknown:cds_NZ_WFIY01000004.1_cds_WP_155864202.1_2166 target sequence
LPEFISSFGGLASFAIPLSWIGGAIGGLLMGIFGDTKGKRLSLLISILLFVFPILGNVVVDNVVLFYLIWFLIGFGVNAVNGISY

SEQ ID NO: 32757 - protein, 85 aa, unidentified
  REGION 1..85: note = Description of Unknown:cds_NZ_WFIY01000004.1_cds_WP_155864202.1_2166 target sequence
VYAAELSPPSIRGLIGSIMQGLYFLGAILGLLISFVTKETIFPYYTIIFVLSAISIPLWFLIPESKWKAKFSFRVSREFVKVTVF

SEQ ID NO: 32758 - protein, 85 aa, unidentified
  REGION 1..85: note = Description of Unknown:cds_NZ_WFIY01000004.1_cds_WP_155864202.1_2166 target sequence
GSLFSIGAFLLLVPLVSLSFTLFSSLKLNAYAVILIGFIIGMIGFTIAGSISDRIGRKKASYLFAGISVFSSLLFFSGLVIASFI

SEQ ID NO: 32759 - protein, 85 aa, unidentified
  REGION 1..85: note = Description of Unknown:cds_NZ_WFIY01000004.1_cds_WP_155864233.1_2203 target sequence
IKKFTVIGAGTMGHGIAELAAIAGYDVWVNDISDEILLNARNKIAWSLSKLKKQEALERIHFTTNQEEALKDTDFMVEAVIEDIK

SEQ ID NO: 32760 - protein, 85 aa, unidentified
  REGION 1..85: note = Description of Unknown:cds_NZ_WFIY01000004.1_cds_WP_155864233.1_2203 target sequence
VKSQVFNKASKLVSETAVLASNTSSIPISEIAKAVDRQERVIGMHFFNPPVLMPLVEIIRGEKTSEETVRIALDVAKNMGKETIL

SEQ ID NO: 32761 - protein, 85 aa, unidentified
  REGION 1..85: note = Description of Unknown:cds_NZ_WFIY01000004.1_cds_WP_155864233.1_2203 target sequence
INKDIPGFLVTRIMFRVNEVGCWLLDNKMAEVKDIDYTAIQVLQFPMGVFLLQDYVGLDVSYLIQKALIERGFEVYYCKSFEQKY

SEQ ID NO: 32762 - protein, 85 aa, unidentified
  REGION 1..85: note = Description of Unknown:cds_NZ_WFIY01000004.1_cds_WP_155864233.1_2203 target sequence
NSKEFGMKSGKGFYTYKGKIIEPTLENAKLVDPALLVSSAINESYRLIRLRIVSKEDVGKGCKLGLNWPKTPEEYLKEFGLSTII

SEQ ID NO: 32763 - protein, 84 aa, unidentified
  REGION 1..84: note = Description of Unknown:cds_NZ_WFIY01000004.1_cds_WP_155864233.1_2203 target sequence
AKLVDPALLVSSAINESYRLIRLRIVSKEDVGKGCKLGLNWPKTPEEYLKEFGLSTIIRNLKMLYESTGLPHFIPDEELTRSYS

SEQ ID NO: 32764 - protein, 85 aa, unidentified
  REGION 1..85: note = Description of Unknown:cds_NZ_WFIY01000004.1_cds_WP_155864233.1_2203 target sequence
WVNDISDEILLNARNKIAWSLSKLKKQEALERIHFTTNQEEALKDTDFMVEAVIEDIKVKSQVFNKASKLVSETAVLASNTSSIP

SEQ ID NO: 32765 - protein, 85 aa, unidentified
  REGION 1..85: note = Description of Unknown:cds_NZ_WFIY01000004.1_cds_WP_155864233.1_2203 target sequence
ISEIAKAVDRQERVIGMHFFNPPVLMPLVEIIRGEKTSEETVRIALDVAKNMGKETILINKDIPGFLVTRIMFRVNEVGCWLLDN

SEQ ID NO: 32766 - protein, 85 aa, unidentified
  REGION 1..85: note = Description of Unknown:cds_NZ_WFIY01000004.1_cds_WP_155864233.1_2203 target sequence
KMAEVKDIDYTAIQVLQFPMGVFLLQDYVGLDVSYLIQKALIERGFEVYYCKSFEQKYNSKEFGMKSGKGFYTYKGKIIEPTLEN

SEQ ID NO: 32767 - protein, 85 aa, unidentified
  REGION 1..85: note = Description of Unknown:cds_NC_035460.1_cds_YP_009408012.1_61 target sequence
IKESKQSLIFDIVSKTIVESVCKYIPVNKNYIESKAKQFYQCSQQQKEVLTNSIFNKCEHDINLTSTDELVKILYSLEKHSPHVC

SEQ ID NO: 32768 - protein, 85 aa, unidentified
  REGION 1..85: note = Description of Unknown:cds_NC_035460.1_cds_YP_009408012.1_61 target sequence
NITEFKRLFNSLYRFTHSQSFFTTCLPTITATLSTLITMIITNKLIYAADMIEQIETYLFDNQKSMSQDLNDLLSFKYGLINIAQ

SEQ ID NO: 32769 - protein, 85 aa, unidentified
  REGION 1..85: note = Description of Unknown:cds_NC_035460.1_cds_YP_009408012.1_61 target sequence
YKIFPKILGTEESTDLIAGSNNTLDVETHVSNIINMPVKSSIVSEMYNFLLKRGISPYNNEAEFTAGLKIEELDTIKQMSSPDAT

SEQ ID NO: 32770 - protein, 85 aa, unidentified
  REGION 1..85: note = Description of Unknown:cds_NC_035460.1_cds_YP_009408012.1_61 target sequence
MKIVPLNNQEKVTMAVSNLLKTAHDKSKGYIQDGAVSSPITNNKSIGSFIPFSDIDLHKFAILEYLYIMRVMASCIKKKQTIDKG

SEQ ID NO: 32771 - protein, 84 aa, unidentified
  REGION 1..84: note = Description of Unknown:cds_NC_035460.1_cds_YP_009408012.1_61 target sequence
KGYIQDGAVSSPITNNKSIGSFIPFSDIDLHKFAILEYLYIMRVMASCIKKKQTIDKGNSTTLNINAPFKVCVPTGSLNLKHLP

SEQ ID NO: 32772 - protein, 85 aa, unidentified
  REGION 1..85: note = Description of Unknown:cds_NC_035460.1_cds_YP_009408012.1_61 target sequence
NKNYIESKAKQFYQCSQQQKEVLTNSIFNKCEHDINLTSTDELVKILYSLEKHSPHVCNITEFKRLFNSLYRFTHSQSFFTTCLP

SEQ ID NO: 32773 - protein, 85 aa, unidentified
  REGION 1..85: note = Description of Unknown:cds_NC_035460.1_cds_YP_009408012.1_61 target sequence
TITATLSTLITMIITNKLIYAADMIEQIETYLFDNQKSMSQDLNDLLSFKYGLINIAQYKIFPKILGTEESTDLIAGSNNTLDVE

SEQ ID NO: 32774 - protein, 85 aa, unidentified
  REGION 1..85: note = Description of Unknown:cds_NC_035460.1_cds_YP_009408012.1_61 target sequence
THVSNIINMPVKSSIVSEMYNFLLKRGISPYNNEAEFTAGLKIEELDTIKQMSSPDATMKIVPLNNQEKVTMAVSNLLKTAHDKS

SEQ ID NO: 32775 - protein, 85 aa, unidentified
  REGION 1..85: note = Description of Unknown:cds_NC_025807.1_cds_YP_009110702.1_9 target sequence
ERSMRVGVSRNAAGTGSQTILRGFALLRCVLSADSRQATRAVQSHFPGLGRMTKCLSPLTALSADRTVRHVNVSNVLSRDVKVLA

SEQ ID NO: 32776 - protein, 85 aa, unidentified
  REGION 1..85: note = Description of Unknown:cds_NC_025807.1_cds_YP_009110702.1_9 target sequence
DYALTCHHPGDLPATLTPVGLEAAKLVIAKFSERGMDLSHVLPPDASSYSPIVMCHLIARVMSGFVPMRGNDFGLEGQIDLLAAE

SEQ ID NO: 32777 - protein, 85 aa, unidentified
  REGION 1..85: note = Description of Unknown:cds_NC_025807.1_cds_YP_009110702.1_9 target sequence
LVPFSFMLPFLVNDDASAIAVPTARVEDMLQDISKLNQLDAAFGVESRSDQRMTKDVAEDLSRSLNELPSSENRGRMPWKLMLAF

SEQ ID NO: 32778 - protein, 85 aa, unidentified
  REGION 1..85: note = Description of Unknown:cds_NC_025807.1_cds_YP_009110702.1_9 target sequence
LTFQLKLELDALADQRSELQSQAHVTSFGAKLFQQMSLFSTLDSELLSLALAIKDSGLVMNPIQILTKWQSIRTGSDTINSASFS

SEQ ID NO: 32779 - protein, 84 aa, unidentified
  REGION 1..84: note = Description of Unknown:cds_NC_025807.1_cds_YP_009110702.1_9 target sequence
FGAKLFQQMSLFSTLDSELLSLALAIKDSGLVMNPIQILTKWQSIRTGSDTINSASFSVVVRAGNWVLMKGEDAALTVRPGRIA

SEQ ID NO: 32780 - protein, 85 aa, unidentified
  REGION 1..85: note = Description of Unknown:cds_NC_025807.1_cds_YP_009110702.1_9 target sequence
RCVLSADSRQATRAVQSHFPGLGRMTKCLSPLTALSADRTVRHVNVSNVLSRDVKVLADYALTCHHPGDLPATLTPVGLEAAKLV

SEQ ID NO: 32781 - protein, 85 aa, unidentified
  REGION 1..85: note = Description of Unknown:cds_NC_025807.1_cds_YP_009110702.1_9 target sequence
IAKFSERGMDLSHVLPPDASSYSPIVMCHLIARVMSGFVPMRGNDFGLEGQIDLLAAELVPFSFMLPFLVNDDASAIAVPTARVE

SEQ ID NO: 32782 - protein, 85 aa, unidentified
  REGION 1..85: note = Description of Unknown:cds_NC_025807.1_cds_YP_009110702.1_9 target sequence
DMLQDISKLNQLDAAFGVESRSDQRMTKDVAEDLSRSLNELPSSENRGRMPWKLMLAFLTFQLKLELDALADQRSELQSQAHVTS

SEQ ID NO: 32783 - protein, 85 aa, unidentified
  REGION 1..85: note = Description of Unknown:cds_NC_038663.1_cds_YP_009507781.1_11 target sequence
ERSMRVGVSRNAAGTGSQTILRGFALLRCVLSADSRQATRAVQSHFPGLGRMTKCLSPLTALSADRTVRHVNVSTVLSRDVKVLA

SEQ ID NO: 32784 - protein, 85 aa, unidentified
  REGION 1..85: note = Description of Unknown:cds_NC_038663.1_cds_YP_009507781.1_11 target sequence
DYALTCHHPGDLPATLTPVGLEAARLVIAKFSERGMDLSHVLPPDASSYSPIVICHLIARVMSGFVPMRGNDFGLEGQIDLLAAE

SEQ ID NO: 32785 - protein, 85 aa, unidentified
  REGION 1..85: note = Description of Unknown:cds_NC_038663.1_cds_YP_009507781.1_11 target sequence
LVPFSFMLPFLVNDDASAIAVPTARVEDMLQDISKLNQLDAAFGVESRSDQRMTKDVAEDSSRSLNELPSSENRGRMPWKLMLAF

SEQ ID NO: 32786 - protein, 85 aa, unidentified
  REGION 1..85: note = Description of Unknown:cds_NC_038663.1_cds_YP_009507781.1_11 target sequence
LTFQLKLELDALADQRSELQSQAHVTSFGAKLFQQMSLFSTLDSELLSLVLAIKDSGLVMNPIQILTKWQSIRTGSDTINPASFS

SEQ ID NO: 32787 - protein, 84 aa, unidentified
  REGION 1..84: note = Description of Unknown:cds_NC_038663.1_cds_YP_009507781.1_11 target sequence
FGAKLFQQMSLFSTLDSELLSLVLAIKDSGLVMNPIQILTKWQSIRTGSDTINPASFSVVVRAGNWVLMKGEDAALTVRPGRIA

SEQ ID NO: 32788 - protein, 85 aa, unidentified
  REGION 1..85: note = Description of Unknown:cds_NC_038663.1_cds_YP_009507781.1_11 target sequence
RCVLSADSRQATRAVQSHFPGLGRMTKCLSPLTALSADRTVRHVNVSTVLSRDVKVLADYALTCHHPGDLPATLTPVGLEAARLV

SEQ ID NO: 32789 - protein, 85 aa, unidentified
  REGION 1..85: note = Description of Unknown:cds_NC_038663.1_cds_YP_009507781.1_11 target sequence
IAKFSERGMDLSHVLPPDASSYSPIVICHLIARVMSGFVPMRGNDFGLEGQIDLLAAELVPFSFMLPFLVNDDASAIAVPTARVE

SEQ ID NO: 32790 - protein, 85 aa, unidentified
  REGION 1..85: note = Description of Unknown:cds_NC_038663.1_cds_YP_009507781.1_11 target sequence
DMLQDISKLNQLDAAFGVESRSDQRMTKDVAEDSSRSLNELPSSENRGRMPWKLMLAFLTFQLKLELDALADQRSELQSQAHVTS

SEQ ID NO: 32791 - protein, 85 aa, unidentified
  REGION 1..85: note = Description of Unknown:cds_NZ_WFIY01000004.1_cds_WP_155863895.1_1801 target sequence
SLELPNYEKNIYSLACGIADFLGVKRNCLNKLNITGKRLALVLLDGFGWNIMNRAGVVKKEAEKIQTVFPSTTSTVLTTLFTALT

SEQ ID NO: 32792 - protein, 85 aa, unidentified
  REGION 1..85: note = Description of Unknown:cds_NZ_WFIY01000004.1_cds_WP_155863895.1_1801 target sequence
PGEHGILGYNTFVKRLGGIINTLKYTHPSIDERDSIQEAVPFEKAFPEVKSYLGEVKDRKTIEIVPKGISNTQFSNATHGKTSET

SEQ ID NO: 32793 - protein, 85 aa, unidentified
  REGION 1..85: note = Description of Unknown:cds_NZ_WFIY01000004.1_cds_WP_155863895.1_1801 target sequence
KEYADIWDAVYTFTQVLQQNSYDFIYLYIPDVDTLAHKYGPYAEPTLNAAKEIFESVYNVSTKLANVGNYTIVITADHGHVEVTN

SEQ ID NO: 32794 - protein, 85 aa, unidentified
  REGION 1..85: note = Description of Unknown:cds_NZ_WFIY01000004.1_cds_WP_155863895.1_1801 target sequence
NVNVNDDKEFLSMLEIPPYGDSRALFLKSRYDMKTYLYHRFNLRVFTKDEFPTLLGRIGNVELPDYIAVPLDNTAYIFDYKENGE

SEQ ID NO: 32795 - protein, 84 aa, unidentified
  REGION 1..84: note = Description of Unknown:cds_NZ_WFIY01000004.1_cds_WP_155863895.1_1801 target sequence
LKSRYDMKTYLYHRFNLRVFTKDEFPTLLGRIGNVELPDYIAVPLDNTAYIFDYKENGEYGKLKGHHGGLLQEEFEIPLVMING

SEQ ID NO: 32796 - protein, 85 aa, unidentified
  REGION 1..85: note = Description of Unknown:cds_NZ_WFIY01000004.1_cds_WP_155863895.1_1801 target sequence
CLNKLNITGKRLALVLLDGFGWNIMNRAGVVKKEAEKIQTVFPSTTSTVLTTLFTALTPGEHGILGYNTFVKRLGGIINTLKYTH

SEQ ID NO: 32797 - protein, 85 aa, unidentified
  REGION 1..85: note = Description of Unknown:cds_NZ_WFIY01000004.1_cds_WP_155863895.1_1801 target sequence
PSIDERDSIQEAVPFEKAFPEVKSYLGEVKDRKTIEIVPKGISNTQFSNATHGKTSETKEYADIWDAVYTFTQVLQQNSYDFIYL

SEQ ID NO: 32798 - protein, 85 aa, unidentified
  REGION 1..85: note = Description of Unknown:cds_NZ_WFIY01000004.1_cds_WP_155863895.1_1801 target sequence
YIPDVDTLAHKYGPYAEPTLNAAKEIFESVYNVSTKLANVGNYTIVITADHGHVEVTNNVNVNDDKEFLSMLEIPPYGDSRALFL

SEQ ID NO: 32799 - protein, 85 aa, unidentified
  REGION 1..85: note = Description of Unknown:hvTR_P03120 target sequence
ETLCQRLNVCQDKILTHYENDSTDLRDHIDYWKHMRLECAIYYKAREMGFKHINHQVVPTLAVSKNKALQAIELQLTLETIYNSQ

SEQ ID NO: 32800 - protein, 85 aa, unidentified
  REGION 1..85: note = Description of Unknown:hvTR_P03120 target sequence
YSNEKWTLQDVSLEVYLTAPTGCIKKHGYTVEVQFDGDICNTMHYTNWTHIYICEEASVTVVEGQVDYYGLYYVHEGIRTYFVQF

SEQ ID NO: 32801 - protein, 85 aa, unidentified
  REGION 1..85: note = Description of Unknown:hvTR_P03120 target sequence
KDDAEKYSKNKVWEVHAGGQVILCPTSVFSSNEVSSPEIIRQHLANHPAATHTKAVALGTEETQTTIQRPRSEPDTGNPCHTTKL

SEQ ID NO: 32802 - protein, 85 aa, unidentified
  REGION 1..85: note = Description of Unknown:hvTR_P03120 target sequence
LHRDSVDSAPILTAFNSSHKGRINCNSNTTPIVHLKGDANTLKCLRYRFKKHCTLYTAVSSTWHWTGHNVKHKSAIVTLTYDSEW

SEQ ID NO: 32803 - protein, 84 aa, unidentified
  REGION 1..84: note = Description of Unknown:hvTR_P03120 target sequence
NSNTTPIVHLKGDANTLKCLRYRFKKHCTLYTAVSSTWHWTGHNVKHKSAIVTLTYDSEWQRDQFLSQVKIPKTITVSTGFMSI

SEQ ID NO: 32804 - protein, 85 aa, unidentified
  REGION 1..85: note = Description of Unknown:hvTR_P03120 target sequence
HIDYWKHMRLECAIYYKAREMGFKHINHQVVPTLAVSKNKALQAIELQLTLETIYNSQYSNEKWTLQDVSLEVYLTAPTGCIKKH

SEQ ID NO: 32805 - protein, 85 aa, unidentified
  REGION 1..85: note = Description of Unknown:hvTR_P03120 target sequence
GYTVEVQFDGDICNTMHYTNWTHIYICEEASVTVVEGQVDYYGLYYVHEGIRTYFVQFKDDAEKYSKNKVWEVHAGGQVILCPTS

SEQ ID NO: 32806 - protein, 85 aa, unidentified
  REGION 1..85: note = Description of Unknown:hvTR_P03120 target sequence
VFSSNEVSSPEIIRQHLANHPAATHTKAVALGTEETQTTIQRPRSEPDTGNPCHTTKLLHRDSVDSAPILTAFNSSHKGRINCNS

SEQ ID NO: 32807 - protein, 85 aa, unidentified
  REGION 1..85: note = Description of Unknown:cds_NZ_WFIY01000004.1_cds_WP_155863057.1_958 target sequence
ITNRKLEHVEICLYEDVEGYIPTLLDDVILIHQAMPCLSFNEINTSVKFLNKEISAPLMVTGMTGGNEALGKINATIAEVIEELR

SEQ ID NO: 32808 - protein, 85 aa, unidentified
  REGION 1..85: note = Description of Unknown:cds_NZ_WFIY01000004.1_cds_WP_155863057.1_958 target sequence
LAMGVGSQRIAIERADARESFKIVRKKAPTSPIIANIGAPQLAKGYGLKELKEAVSMIEADAIAVHLNPAQELFQPEGEPEYPGD

SEQ ID NO: 32809 - protein, 85 aa, unidentified
  REGION 1..85: note = Description of Unknown:cds_NZ_WFIY01000004.1_cds_WP_155863057.1_958 target sequence
ILIKLKDISKELGVPIIIKETGTGISMETAIKFKEIGIRYFDVSGQGGTSWIAVEMVRDKRKNNWKKESAELFAGWGIPTAASII

SEQ ID NO: 32810 - protein, 85 aa, unidentified
  REGION 1..85: note = Description of Unknown:cds_NZ_WFIY01000004.1_cds_WP_155863057.1_958 target sequence
ETRFAVPDAFIIGSGGIRNGLQIAKAIALGADIAGMASPVLKKAVEGKESLVSFFNKVIFELKAAMMLTGAKNVEELKRVPVVIW

SEQ ID NO: 32811 - protein, 84 aa, unidentified
  REGION 1..84: note = Description of Unknown:cds_NZ_WFIY01000004.1_cds_WP_155863057.1_958 target sequence
AIALGADIAGMASPVLKKAVEGKESLVSFFNKVIFELKAAMMLTGAKNVEELKRVPVVIWKELREWMESRGISLSTYEKLRKRE

SEQ ID NO: 32812 - protein, 85 aa, unidentified
  REGION 1..85: note = Description of Unknown:cds_NZ_WFIY01000004.1_cds_WP_155863057.1_958 target sequence
VILIHQAMPCLSFNEINTSVKFLNKEISAPLMVTGMTGGNEALGKINATIAEVIEELRLAMGVGSQRIAIERADARESFKIVRKK

SEQ ID NO: 32813 - protein, 85 aa, unidentified
  REGION 1..85: note = Description of Unknown:cds_NZ_WFIY01000004.1_cds_WP_155863057.1_958 target sequence
APTSPIIANIGAPQLAKGYGLKELKEAVSMIEADAIAVHLNPAQELFQPEGEPEYPGDILIKLKDISKELGVPIIIKETGTGISM

SEQ ID NO: 32814 - protein, 85 aa, unidentified
  REGION 1..85: note = Description of Unknown:cds_NZ_WFIY01000004.1_cds_WP_155863057.1_958 target sequence
ETAIKFKEIGIRYFDVSGQGGTSWIAVEMVRDKRKNNWKKESAELFAGWGIPTAASIIETRFAVPDAFIIGSGGIRNGLQIAKAI

SEQ ID NO: 32815 - protein, 85 aa, unidentified
  REGION 1..85: note = Description of Unknown:cds_NZ_WFIY01000004.1_cds_WP_155864468.1_1926 target sequence
SFNSLYQYSWNALEPLLREGFNVSIVEISLGFSLFTIFSSGFQPLGGNFADKIGPRKVALLSSILSALGFLGTSFSPSVYIFFIF

SEQ ID NO: 32816 - protein, 85 aa, unidentified
  REGION 1..85: note = Description of Unknown:cds_NZ_WFIY01000004.1_cds_WP_155864468.1_1926 target sequence
WSLGSIGEGILYGIASNLAVKWFKKRMAFATGLVSLGFGLGSAFANPFILMSGNFRLVTLIIGLTELIILPILSLLIEYPKLESG

SEQ ID NO: 32817 - protein, 85 aa, unidentified
  REGION 1..85: note = Description of Unknown:cds_NZ_WFIY01000004.1_cds_WP_155864468.1_1926 target sequence
KSPKEAVLSRTFWFIYLSFVTATIPLLVISSSLSIIGKALPFQELSILISIFPILSGSGRPIFGHIADKLGVIKTTVIVDTIIIL

SEQ ID NO: 32818 - protein, 85 aa, unidentified
  REGION 1..85: note = Description of Unknown:cds_NZ_WFIY01000004.1_cds_WP_155864468.1_1926 target sequence
GGASLLFSQIIPAVVIIGLAGGAVITLYFNVSGIVFGTRYSTVNNGILYTGKAVAGFLGSVIFNYIFLLSPFLAYLFIIISSTVG

SEQ ID NO: 32819 - protein, 84 aa, unidentified
  REGION 1..84: note = Description of Unknown:cds_NZ_WFIY01000004.1_cds_WP_155864468.1_1926 target sequence
TLYFNVSGIVFGTRYSTVNNGILYTGKAVAGFLGSVIFNYIFLLSPFLAYLFIIISSTVGAVTLYGIFHHAQPAEGSSQIRRGL

SEQ ID NO: 32820 - protein, 85 aa, unidentified
  REGION 1..85: note = Description of Unknown:cds_NZ_WFIY01000004.1_cds_WP_155864468.1_1926 target sequence
ISLGFSLFTIFSSGFQPLGGNFADKIGPRKVALLSSILSALGFLGTSFSPSVYIFFIFWSLGSIGEGILYGIASNLAVKWFKKRM

SEQ ID NO: 32821 - protein, 85 aa, unidentified
  REGION 1..85: note = Description of Unknown:cds_NZ_WFIY01000004.1_cds_WP_155864468.1_1926 target sequence
AFATGLVSLGFGLGSAFANPFILMSGNFRLVTLIIGLTELIILPILSLLIEYPKLESGKSPKEAVLSRTFWFIYLSFVTATIPLL

SEQ ID NO: 32822 - protein, 85 aa, unidentified
  REGION 1..85: note = Description of Unknown:cds_NZ_WFIY01000004.1_cds_WP_155864468.1_1926 target sequence
VISSSLSIIGKALPFQELSILISIFPILSGSGRPIFGHIADKLGVIKTTVIVDTIIILGGASLLFSQIIPAVVIIGLAGGAVITL

SEQ ID NO: 32823 - protein, 85 aa, unidentified
  REGION 1..85: note = Description of Unknown:cds_NZ_WFIY01000004.1_cds_WP_155864068.1_2007 target sequence
KVSLKELKENFNPKLKPIIWNDDKNTLTLLDQSALPFETTYIELKDPEGISSAIKLMKVRGAPAIGITAAYGMVTALTSDTPSTL

SEQ ID NO: 32824 - protein, 85 aa, unidentified
  REGION 1..85: note = Description of Unknown:cds_NZ_WFIY01000004.1_cds_WP_155864068.1_2007 target sequence
EEAIEKLTKAKKVLDQARPTAVNLTWATSNMLNNANRYIEQGEAKSVNELILLLKRDAKKVFDDELEAELQMGIYGLEKINDGDT

SEQ ID NO: 32825 - protein, 85 aa, unidentified
  REGION 1..85: note = Description of Unknown:cds_NZ_WFIY01000004.1_cds_WP_155864068.1_2007 target sequence
ILTQCNAGGLATGTGLGTALAPVKVAHMLGIKVSVIAPETRPWLQGSRLTVYELMTDGIPVTLIADTAVGLVMYKGMVNSVMVGA

SEQ ID NO: 32826 - protein, 85 aa, unidentified
  REGION 1..85: note = Description of Unknown:cds_NZ_WFIY01000004.1_cds_WP_155864068.1_2007 target sequence
DRILSDGHVFNKIGTFKEAVIAHELGIPFYALAPISTFDLKSRVDDVKIEERDPDEVRTIRGIPIAPEGVKVYNPVFDVTPPKYV

SEQ ID NO: 32827 - protein, 84 aa, unidentified
  REGION 1..84: note = Description of Unknown:cds_NZ_WFIY01000004.1_cds_WP_155864068.1_2007 target sequence
GIPFYALAPISTFDLKSRVDDVKIEERDPDEVRTIRGIPIAPEGVKVYNPVFDVTPPKYVTAIITEKGIIYPPFDKNIRKIVEK

SEQ ID NO: 32828 - protein, 85 aa, unidentified
  REGION 1..85: note = Description of Unknown:cds_NZ_WFIY01000004.1_cds_WP_155864068.1_2007 target sequence
TLLDQSALPFETTYIELKDPEGISSAIKLMKVRGAPAIGITAAYGMVTALTSDTPSTLEEAIEKLTKAKKVLDQARPTAVNLTWA

SEQ ID NO: 32829 - protein, 85 aa, unidentified
  REGION 1..85: note = Description of Unknown:cds_NZ_WFIY01000004.1_cds_WP_155864068.1_2007 target sequence
TSNMLNNANRYIEQGEAKSVNELILLLKRDAKKVFDDELEAELQMGIYGLEKINDGDTILTQCNAGGLATGTGLGTALAPVKVAH

SEQ ID NO: 32830 - protein, 85 aa, unidentified
  REGION 1..85: note = Description of Unknown:cds_NZ_WFIY01000004.1_cds_WP_155864068.1_2007 target sequence
MLGIKVSVIAPETRPWLQGSRLTVYELMTDGIPVTLIADTAVGLVMYKGMVNSVMVGADRILSDGHVFNKIGTFKEAVIAHELGI

SEQ ID NO: 32831 - protein, 85 aa, unidentified
  REGION 1..85: note = Description of Unknown:cds_NC_029316.1_cds_YP_009230293.1_40 target sequence
WTKVEKEEMEKALSMIKSKYRIDDTIAELIADVFFILKGKEVTEEGKKLVEKINEFFRENEEILRVILESELPDDYLIRISALII

SEQ ID NO: 32832 - protein, 85 aa, unidentified
  REGION 1..85: note = Description of Unknown:cds_NC_029316.1_cds_YP_009230293.1_40 target sequence
LSLKGGKKGDAYEIIQEVINKYHEQKKTAYVLYKYSGVFISPQKLEKIPNVKDIIRGLKIIEGSIGSNTKINGIYPGFEGLDFTQ

SEQ ID NO: 32833 - protein, 85 aa, unidentified
  REGION 1..85: note = Description of Unknown:cds_NC_029316.1_cds_YP_009230293.1_40 target sequence
NFYDANRNEKALALIDDDILIYKLLNGFKKYPGYSKGFPSVYVLIDSSQSMSVLNRLSTAKAIALAVVKNSLINKYKVRVGFFNE

SEQ ID NO: 32834 - protein, 85 aa, unidentified
  REGION 1..85: note = Description of Unknown:cds_NC_029316.1_cds_YP_009230293.1_40 target sequence
ALREIIELKTQESLERFLKIEAEGVTDIEYSLSQFIEIAEPASSVLLITDALDEISGNIITKLKAKRIILNVIQLFGVYNERLVT

SEQ ID NO: 32835 - protein, 84 aa, unidentified
  REGION 1..84: note = Description of Unknown:cds_NC_029316.1_cds_YP_009230293.1_40 target sequence
TDIEYSLSQFIEIAEPASSVLLITDALDEISGNIITKLKAKRIILNVIQLFGVYNERLVTITKSTGGLYVTVNDLKELKNKIIM

SEQ ID NO: 32836 - protein, 85 aa, unidentified
  REGION 1..85: note = Description of Unknown:cds_NC_029316.1_cds_YP_009230293.1_40 target sequence
ELIADVFFILKGKEVTEEGKKLVEKINEFFRENEEILRVILESELPDDYLIRISALIILSLKGGKKGDAYEIIQEVINKYHEQKK

SEQ ID NO: 32837 - protein, 85 aa, unidentified
  REGION 1..85: note = Description of Unknown:cds_NC_029316.1_cds_YP_009230293.1_40 target sequence
TAYVLYKYSGVFISPQKLEKIPNVKDIIRGLKIIEGSIGSNTKINGIYPGFEGLDFTQNFYDANRNEKALALIDDDILIYKLLNG

SEQ ID NO: 32838 - protein, 85 aa, unidentified
  REGION 1..85: note = Description of Unknown:cds_NC_029316.1_cds_YP_009230293.1_40 target sequence
FKKYPGYSKGFPSVYVLIDSSQSMSVLNRLSTAKAIALAVVKNSLINKYKVRVGFFNEALREIIELKTQESLERFLKIEAEGVTD

SEQ ID NO: 32839 - protein, 85 aa, unidentified
  REGION 1..85: note = Description of Unknown:cds_NC_039345.1_cds_YP_009513278.1_5 target sequence
YIEGKRSNTTGRLIWQVNSRVDTDVGEWAFWENKKTSKRAFHVKSCLSQLYQEQLTLNTTRTRRSIHQAQTPTPQSMTTPNWLQK

SEQ ID NO: 32840 - protein, 84 aa, unidentified
  REGION 1..84: note = Description of Unknown:cds_NC_039345.1_cds_YP_009513278.1_5 target sequence
GEWAFWENKKTSKRAFHVKSCLSQLYQEQLTLNTTRTRRSIHQAQTPTPQSMTTPNWLQKIPLTWFNCNVRDGKRYCRPQYPKP

SEQ ID NO: 32841 - protein, 85 aa, unidentified
  REGION 1..85: note = Description of Unknown:cds_NZ_WFIY01000004.1_cds_WP_155862940.1_797 target sequence
KAILFSSEEYLDEAKILSETAGYEIVSIYKLPKKPNPSYYIQEDKLNKLKNENIDAIIVFDLLKPRHFINLNKELGGKMKILDKL

SEQ ID NO: 32842 - protein, 85 aa, unidentified
  REGION 1..85: note = Description of Unknown:cds_NZ_WFIY01000004.1_cds_WP_155862940.1_797 target sequence
LLLLEIFALHAGSKEAQLQIELAKLKYELPIIKDVYKKHKISEQQGLLGAGVYGVESILRLYHRKIAKISKELMHIKELRESQVK

SEQ ID NO: 32843 - protein, 85 aa, unidentified
  REGION 1..85: note = Description of Unknown:cds_NZ_WFIY01000004.1_cds_WP_155862940.1_797 target sequence
QHESNGIPTVAITGYTNAGKTSIFNILTGLHQKVDSSMFTTTAPKRFKISINGQKLMLVDTVGFIRGIPPQIIEAFFVTLSEIKY

SEQ ID NO: 32844 - protein, 85 aa, unidentified
  REGION 1..85: note = Description of Unknown:cds_NZ_WFIY01000004.1_cds_WP_155862940.1_797 target sequence
ADIILLVVDISLEDTLILEMLKSSFSTLRELGISGKPILIVANKTDKIPYEEIDRRSDLIYKISNEIYSPIIGIIPFSAKTLYNL

SEQ ID NO: 32845 - protein, 84 aa, unidentified
  REGION 1..84: note = Description of Unknown:cds_NZ_WFIY01000004.1_cds_WP_155862940.1_797 target sequence
FSTLRELGISGKPILIVANKTDKIPYEEIDRRSDLIYKISNEIYSPIIGIIPFSAKTLYNLSNLKTKIAESLLMYYNQEKKEIT

SEQ ID NO: 32846 - protein, 85 aa, unidentified
  REGION 1..85: note = Description of Unknown:cds_NZ_WFIY01000004.1_cds_WP_155862940.1_797 target sequence
IYKLPKKPNPSYYIQEDKLNKLKNENIDAIIVFDLLKPRHFINLNKELGGKMKILDKLLLLLEIFALHAGSKEAQLQIELAKLKY

SEQ ID NO: 32847 - protein, 85 aa, unidentified
  REGION 1..85: note = Description of Unknown:cds_NZ_WFIY01000004.1_cds_WP_155862940.1_797 target sequence
ELPIIKDVYKKHKISEQQGLLGAGVYGVESILRLYHRKIAKISKELMHIKELRESQVKQHESNGIPTVAITGYTNAGKTSIFNIL

SEQ ID NO: 32848 - protein, 85 aa, unidentified
  REGION 1..85: note = Description of Unknown:cds_NZ_WFIY01000004.1_cds_WP_155862940.1_797 target sequence
TGLHQKVDSSMFTTTAPKRFKISINGQKLMLVDTVGFIRGIPPQIIEAFFVTLSEIKYADIILLVVDISLEDTLILEMLKSSFST

SEQ ID NO: 32849 - protein, 85 aa, unidentified
  REGION 1..85: note = Description of Unknown:cds_NZ_WFIY01000004.1_cds_WP_155863569.1_1492 target sequence
LIELTKKLISFKTYNDNELYECALFIKDYLENQGFKAEIKEYVKGYPVVISSSGKGRPLMLNGHFDVVPPGGGWTLDPFVPKIVD

SEQ ID NO: 32850 - protein, 85 aa, unidentified
  REGION 1..85: note = Description of Unknown:cds_NZ_WFIY01000004.1_cds_WP_155863569.1_1492 target sequence
DKIYGRGATDMKAGLAVLMETYVSMADKLDYPLLFTAVPDEETGGKKGSKFLAEEFSPFFVIIGEPTGSGRINIGEKGLLQIKIK

SEQ ID NO: 32851 - protein, 85 aa, unidentified
  REGION 1..85: note = Description of Unknown:cds_NZ_WFIY01000004.1_cds_WP_155863569.1_1492 target sequence
ERGKSAHGSTPSLGDNSILKLIDDILVLEKEINDFSVNIPKELEEAVNNVKEIDDKIFGDVRKITFNPGVIKGGTKVNVVPDYAE

SEQ ID NO: 32852 - protein, 85 aa, unidentified
  REGION 1..85: note = Description of Unknown:cds_NZ_WFIY01000004.1_cds_WP_155863569.1_1492 target sequence
VEIDMRIPPGITTGEVLEKIRVKGEIEVINSSEPNYTSLPFFLGLKPFITPYATDGRYFRLKGIPTIVYGPGELNKLHSSDEYVR

SEQ ID NO: 32853 - protein, 84 aa, unidentified
  REGION 1..84: note = Description of Unknown:cds_NZ_WFIY01000004.1_cds_WP_155863569.1_1492 target sequence
EIEVINSSEPNYTSLPFFLGLKPFITPYATDGRYFRLKGIPTIVYGPGELNKLHSSDEYVRISDINASFEKLKEILRNLVPKFL

SEQ ID NO: 32854 - protein, 85 aa, unidentified
  REGION 1..85: note = Description of Unknown:cds_NZ_WFIY01000004.1_cds_WP_155863569.1_1492 target sequence
DYLENQGFKAEIKEYVKGYPVVISSSGKGRPLMLNGHFDVVPPGGGWTLDPFVPKIVDDKIYGRGATDMKAGLAVLMETYVSMAD

SEQ ID NO: 32855 - protein, 85 aa, unidentified
  REGION 1..85: note = Description of Unknown:cds_NZ_WFIY01000004.1_cds_WP_155863569.1_1492 target sequence
KLDYPLLFTAVPDEETGGKKGSKFLAEEFSPFFVIIGEPTGSGRINIGEKGLLQIKIKERGKSAHGSTPSLGDNSILKLIDDILV

SEQ ID NO: 32856 - protein, 85 aa, unidentified
  REGION 1..85: note = Description of Unknown:cds_NZ_WFIY01000004.1_cds_WP_155863569.1_1492 target sequence
LEKEINDFSVNIPKELEEAVNNVKEIDDKIFGDVRKITFNPGVIKGGTKVNVVPDYAEVEIDMRIPPGITTGEVLEKIRVKGEIE

SEQ ID NO: 32857 - protein, 85 aa, unidentified
  REGION 1..85: note = Description of Unknown:cds_NZ_WFIY01000004.1_cds_WP_155863636.1_1527 target sequence
PNLEEIISKNGYVAITGYPFSGKKYKLYRSIEKLRNMSFCIVYHRLSISNENQWKDLKNIQKGVDSYELEAFDKQNFDKIKDKIK

SEQ ID NO: 32858 - protein, 85 aa, unidentified
  REGION 1..85: note = Description of Unknown:cds_NZ_WFIY01000004.1_cds_WP_155863636.1_1527 target sequence
GKTVIILFPKILGQEQSKELREVIEEIKKDSKVIIVARDYVYDYVFGSRKKQKLKAPKEIKVVCDKEEANIILNTLGGASLSDDL

SEQ ID NO: 32859 - protein, 85 aa, unidentified
  REGION 1..85: note = Description of Unknown:cds_NZ_WFIY01000004.1_cds_WP_155863636.1_1527 target sequence
KNRILRYARINHGPYRGYYFPSLIIEGVRKMDEIGDSTTNRIEKFEKELAELGFSASIVTSSRKIIFEQMTKNVIKSIIKFLGKF

SEQ ID NO: 32860 - protein, 85 aa, unidentified
  REGION 1..85: note = Description of Unknown:cds_NZ_WFIY01000004.1_cds_WP_155863636.1_1527 target sequence
IPRFLLLIGIGLGSVILNYLNGFMFLLLLIVGAVIIGVVLTLLSNNPGKKSFIGEIIKWYSTWRNLPQEKREYIAYQYDKIFDLP

SEQ ID NO: 32861 - protein, 84 aa, unidentified
  REGION 1..84: note = Description of Unknown:cds_NZ_WFIY01000004.1_cds_WP_155863636.1_1527 target sequence
FLLLLIVGAVIIGVVLTLLSNNPGKKSFIGEIIKWYSTWRNLPQEKREYIAYQYDKIFDLPPGESLNIINNVLENRLLYYKVNS

SEQ ID NO: 32862 - protein, 85 aa, unidentified
  REGION 1..85: note = Description of Unknown:cds_NZ_WFIY01000004.1_cds_WP_155863636.1_1527 target sequence
YRSIEKLRNMSFCIVYHRLSISNENQWKDLKNIQKGVDSYELEAFDKQNFDKIKDKIKGKTVIILFPKILGQEQSKELREVIEEI

SEQ ID NO: 32863 - protein, 85 aa, unidentified
  REGION 1..85: note = Description of Unknown:cds_NZ_WFIY01000004.1_cds_WP_155863636.1_1527 target sequence
KKDSKVIIVARDYVYDYVFGSRKKQKLKAPKEIKVVCDKEEANIILNTLGGASLSDDLKNRILRYARINHGPYRGYYFPSLIIEG

SEQ ID NO: 32864 - protein, 85 aa, unidentified
  REGION 1..85: note = Description of Unknown:cds_NZ_WFIY01000004.1_cds_WP_155863636.1_1527 target sequence
VRKMDEIGDSTTNRIEKFEKELAELGFSASIVTSSRKIIFEQMTKNVIKSIIKFLGKFIPRFLLLIGIGLGSVILNYLNGFMFLL

SEQ ID NO: 32865 - protein, 85 aa, unidentified
  REGION 1..85: note = Description of Unknown:cds_NZ_WFIY01000004.1_cds_WP_155864257.1_2248 target sequence
SWRFASLPPQDGYHMVTSFVSVADYVSRGGKDTLMVFYAKEPFVNVGVNQEVWLEVNLDFTKQHNIPVVRRDLGGGTVVITPGEH

SEQ ID NO: 32866 - protein, 85 aa, unidentified
  REGION 1..85: note = Description of Unknown:cds_NZ_WFIY01000004.1_cds_WP_155864257.1_2248 target sequence
DFFIVIKQEEAPSDPQSLYKKYLTPIVNVIRSYGLDAQLKEQDIVVNGKKISGNGAMTYEKAVVIAGNILLSFDADFVSKCIKVP

SEQ ID NO: 32867 - protein, 85 aa, unidentified
  REGION 1..85: note = Description of Unknown:cds_NZ_WFIY01000004.1_cds_WP_155864257.1_2248 target sequence
SEKFRDKIAKDMSEWLTSMEKELGYVPDRNELNKKIKEEFEKELGIKFEDSSLTPEEIELWDKLAEEKKREEWIYYKDNRHPDLR

SEQ ID NO: 32868 - protein, 85 aa, unidentified
  REGION 1..85: note = Description of Unknown:cds_NZ_WFIY01000004.1_cds_WP_155864257.1_2248 target sequence
TDRCVKISSAVAVCHVDYKARKLIRITVKIVNKKIDEVSISGDFFIMSPKEFLDKLEDSLQGVEVSKINEKIDEVFRLEKPVIFG

SEQ ID NO: 32869 - protein, 84 aa, unidentified
  REGION 1..84: note = Description of Unknown:cds_NZ_WFIY01000004.1_cds_WP_155864257.1_2248 target sequence
RITVKIVNKKIDEVSISGDFFIMSPKEFLDKLEDSLQGVEVSKINEKIDEVFRLEKPVIFGFTADDLKKAFEEILNKPEIREII

SEQ ID NO: 32870 - protein, 85 aa, unidentified
  REGION 1..85: note = Description of Unknown:cds_NZ_WFIY01000004.1_cds_WP_155864257.1_2248 target sequence
RGGKDTLMVFYAKEPFVNVGVNQEVWLEVNLDFTKQHNIPVVRRDLGGGTVVITPGEHDFFIVIKQEEAPSDPQSLYKKYLTPIV

SEQ ID NO: 32871 - protein, 85 aa, unidentified
  REGION 1..85: note = Description of Unknown:cds_NZ_WFIY01000004.1_cds_WP_155864257.1_2248 target sequence
NVIRSYGLDAQLKEQDIVVNGKKISGNGAMTYEKAVVIAGNILLSFDADFVSKCIKVPSEKFRDKIAKDMSEWLTSMEKELGYVP

SEQ ID NO: 32872 - protein, 85 aa, unidentified
  REGION 1..85: note = Description of Unknown:cds_NZ_WFIY01000004.1_cds_WP_155864257.1_2248 target sequence
DRNELNKKIKEEFEKELGIKFEDSSLTPEEIELWDKLAEEKKREEWIYYKDNRHPDLRTDRCVKISSAVAVCHVDYKARKLIRIT

SEQ ID NO: 32873 - protein, 85 aa, unidentified
  REGION 1..85: note = Description of Unknown:cds_NC_002549.1_cds_NP_066247.1_5 target sequence
NETIYTSGKRSNTTGKLIWKVNPEIDTTIGEWAFWETKKTSLEKFAVKSCLSQLYQTEPKTSVVRVRRELLPTQGPTQQLKTTKS

SEQ ID NO: 32874 - protein, 84 aa, unidentified
  REGION 1..84: note = Description of Unknown:cds_NC_002549.1_cds_NP_066247.1_5 target sequence
IDTTIGEWAFWETKKTSLEKFAVKSCLSQLYQTEPKTSVVRVRRELLPTQGPTQQLKTTKSWLQKIPLQWFKCTVKEGKLQCRI

SEQ ID NO: 32875 - protein, 85 aa, unidentified
  REGION 1..85: note = Description of Unknown:cds_NC_039223.1_cds_YP_009513196.1_3 target sequence
DSSRTIGLYFDFALPSSSLLAFPIVLQDTGDGKKQITPQYRIQRLDSWTDSKEDSVFIITYGFIFQIGNEEATVGVINDNPRHEL

SEQ ID NO: 32876 - protein, 85 aa, unidentified
  REGION 1..85: note = Description of Unknown:cds_NC_039223.1_cds_YP_009513196.1_3 target sequence
LSSAMLCLGSVPNDGDLVELARACLTMVVTCKKSATNTERIVFSVVQAPRVLQSCMVVANRYSSVNAVKHVKAPEKIPGSGTLEY

SEQ ID NO: 32877 - protein, 85 aa, unidentified
  REGION 1..85: note = Description of Unknown:cds_NC_039223.1_cds_YP_009513196.1_3 target sequence
KVNFVSLTVVPRRDVYRIPTAVLKVSGSSLYNLALNVTIDVDVDPKSPLVKSLSKSDSGYYANLFLHIGLMSTVDKKGKKVTFDK

SEQ ID NO: 32878 - protein, 85 aa, unidentified
  REGION 1..85: note = Description of Unknown:cds_NC_039223.1_cds_YP_009513196.1_3 target sequence
IEEKIRRLNLSVGLSDVLGPSVLVKARGARTKLLAPFFSSSGTACYPIANASPQVAKILWSQTAHLRSVKVIIQAGTQRAVAVTA

SEQ ID NO: 32879 - protein, 84 aa, unidentified
  REGION 1..84: note = Description of Unknown:cds_NC_039223.1_cds_YP_009513196.1_3 target sequence
KARGARTKLLAPFFSSSGTACYPIANASPQVAKILWSQTAHLRSVKVIIQAGTQRAVAVTADHEVTSTKIERRHAIAKYNPFRK

SEQ ID NO: 32880 - protein, 85 aa, unidentified
  REGION 1..85: note = Description of Unknown:cds_NC_039223.1_cds_YP_009513196.1_3 target sequence
DTGDGKKQITPQYRIQRLDSWTDSKEDSVFIITYGFIFQIGNEEATVGVINDNPRHELLSSAMLCLGSVPNDGDLVELARACLTM

SEQ ID NO: 32881 - protein, 85 aa, unidentified
  REGION 1..85: note = Description of Unknown:cds_NC_039223.1_cds_YP_009513196.1_3 target sequence
VVTCKKSATNTERIVFSVVQAPRVLQSCMVVANRYSSVNAVKHVKAPEKIPGSGTLEYKVNFVSLTVVPRRDVYRIPTAVLKVSG

SEQ ID NO: 32882 - protein, 85 aa, unidentified
  REGION 1..85: note = Description of Unknown:cds_NC_039223.1_cds_YP_009513196.1_3 target sequence
SSLYNLALNVTIDVDVDPKSPLVKSLSKSDSGYYANLFLHIGLMSTVDKKGKKVTFDKIEEKIRRLNLSVGLSDVLGPSVLVKAR

SEQ ID NO: 32883 - protein, 85 aa, unidentified
  REGION 1..85: note = Description of Unknown:cds_NZ_WFIY01000004.1_cds_WP_155862859.1_697 target sequence
SYQHLSKLKIGILGGGQLGWMLILEGRKFPFEFYVLGNKDEPACRIADKCFSEDQYKELVDSSDIVTFEFEHVSEKALDYAEEKG

SEQ ID NO: 32884 - protein, 85 aa, unidentified
  REGION 1..85: note = Description of Unknown:cds_NZ_WFIY01000004.1_cds_WP_155862859.1_697 target sequence
KLYPKINSVELKRERYKEKEFLRDHGFPVPRFYVANDGEEALKILKDEFNNEGVLKKSRGGYDGKGQYFIHRDVDKYQFIKNMKC

SEQ ID NO: 32885 - protein, 85 aa, unidentified
  REGION 1..85: note = Description of Unknown:cds_NZ_WFIY01000004.1_cds_WP_155862859.1_697 target sequence
KFVVEEYVNFDFEASIIATRSRREFKAFTPTFNYNEKGILVYNYGPYYNEKMIEIADRLTRELDYIGTIGIEFFVRGNEVLINEI

SEQ ID NO: 32886 - protein, 85 aa, unidentified
  REGION 1..85: note = Description of Unknown:cds_NZ_WFIY01000004.1_cds_WP_155862859.1_697 target sequence
APRVHNTGHYTLDGAETSQFEQHIRAIADLDLGSTRILSPSGMVNILGVGEVPKDVLKFGKVYWYGKSEVRKRRKMGHVNIIGDN

SEQ ID NO: 32887 - protein, 84 aa, unidentified
  REGION 1..84: note = Description of Unknown:cds_NZ_WFIY01000004.1_cds_WP_155862859.1_697 target sequence
IRAIADLDLGSTRILSPSGMVNILGVGEVPKDVLKFGKVYWYGKSEVRKRRKMGHVNIIGDNLEDVKEKIDNVMKIIYPQGLDL

SEQ ID NO: 32888 - protein, 85 aa, unidentified
  REGION 1..85: note = Description of Unknown:cds_NZ_WFIY01000004.1_cds_WP_155862859.1_697 target sequence
KFPFEFYVLGNKDEPACRIADKCFSEDQYKELVDSSDIVTFEFEHVSEKALDYAEEKGKLYPKINSVELKRERYKEKEFLRDHGF

SEQ ID NO: 32889 - protein, 85 aa, unidentified
  REGION 1..85: note = Description of Unknown:cds_NZ_WFIY01000004.1_cds_WP_155862859.1_697 target sequence
PVPRFYVANDGEEALKILKDEFNNEGVLKKSRGGYDGKGQYFIHRDVDKYQFIKNMKCKFVVEEYVNFDFEASIIATRSRREFKA

SEQ ID NO: 32890 - protein, 85 aa, unidentified
  REGION 1..85: note = Description of Unknown:cds_NZ_WFIY01000004.1_cds_WP_155862859.1_697 target sequence
FTPTFNYNEKGILVYNYGPYYNEKMIEIADRLTRELDYIGTIGIEFFVRGNEVLINEIAPRVHNTGHYTLDGAETSQFEQHIRAI

SEQ ID NO: 32891 - protein, 85 aa, unidentified
  REGION 1..85: note = Description of Unknown:cds_NZ_WFIY01000004.1_cds_WP_162309151.1_1120 target sequence
EILNSIVVNYVSKYLAITSLDDYVELNSTTSPSVLENEDIFFEVHPSSFTQEIYAVDGSSRSFVSGKGIISVSAVAISSSSIPIY

SEQ ID NO: 32892 - protein, 85 aa, unidentified
  REGION 1..85: note = Description of Unknown:cds_NZ_WFIY01000004.1_cds_WP_162309151.1_1120 target sequence
GVYPSLDGEKELELKEPFIAVASSVSENSKIDPYLYFGPYVSPISITGDPFYSTEGFEVIESEIRSVLETKALNVVKGKGKIIVD

SEQ ID NO: 32893 - protein, 85 aa, unidentified
  REGION 1..85: note = Description of Unknown:cds_NZ_WFIY01000004.1_cds_WP_162309151.1_1120 target sequence
GPLFPSYLYLTSKFKEKILEERKKIIDSNFIGIVKRLDKSRVLIDSIDDRTRSIIYQKFRIDPKIFLSDESFILHLVRFNYSPPY

SEQ ID NO: 32894 - protein, 85 aa, unidentified
  REGION 1..85: note = Description of Unknown:cds_NZ_WFIY01000004.1_cds_WP_162309151.1_1120 target sequence
KILALGPFSKRICNNTTVYMYYLIIPFHPYVSKFSILRIETLTKDPTILGMIASMGITKDGIPPLLALADFKAKKTSLALYRYIV

SEQ ID NO: 32895 - protein, 84 aa, unidentified
  REGION 1..84: note = Description of Unknown:cds_NZ_WFIY01000004.1_cds_WP_162309151.1_1120 target sequence
LIIPFHPYVSKFSILRIETLTKDPTILGMIASMGITKDGIPPLLALADFKAKKTSLALYRYIVSIVERLGIQASFYSRLSGELA

SEQ ID NO: 32896 - protein, 85 aa, unidentified
  REGION 1..85: note = Description of Unknown:cds_NZ_WFIY01000004.1_cds_WP_162309151.1_1120 target sequence
STTSPSVLENEDIFFEVHPSSFTQEIYAVDGSSRSFVSGKGIISVSAVAISSSSIPIYGVYPSLDGEKELELKEPFIAVASSVSE

SEQ ID NO: 32897 - protein, 85 aa, unidentified
  REGION 1..85: note = Description of Unknown:cds_NZ_WFIY01000004.1_cds_WP_162309151.1_1120 target sequence
NSKIDPYLYFGPYVSPISITGDPFYSTEGFEVIESEIRSVLETKALNVVKGKGKIIVDGPLFPSYLYLTSKFKEKILEERKKIID

SEQ ID NO: 32898 - protein, 85 aa, unidentified
  REGION 1..85: note = Description of Unknown:cds_NZ_WFIY01000004.1_cds_WP_162309151.1_1120 target sequence
SNFIGIVKRLDKSRVLIDSIDDRTRSIIYQKFRIDPKIFLSDESFILHLVRFNYSPPYKILALGPFSKRICNNTTVYMYYLIIPF

SEQ ID NO: 32899 - protein, 85 aa, unidentified
  REGION 1..85: note = Description of Unknown:cds_NZ_WFIY01000004.1_cds_WP_155863442.1_1414 target sequence
LIIVISSIIAYSQTSNIGCVAYTIFLNNETTVAGRSSNVFCQISPTYLVECSKGNVFVAAVNKIYEISPYGKVINSLNISGVEYL

SEQ ID NO: 32900 - protein, 85 aa, unidentified
  REGION 1..85: note = Description of Unknown:cds_NZ_WFIY01000004.1_cds_WP_155863442.1_1414 target sequence
CYYNSTLIATSGTLPNKTITLINLRNMSIKTIATCFYPLAISAVNNTIYVGSYGYVYSLNNCRISQVLKVPGKVTSITTNGKILF

SEQ ID NO: 32901 - protein, 85 aa, unidentified
  REGION 1..85: note = Description of Unknown:cds_NZ_WFIY01000004.1_cds_WP_155863442.1_1414 target sequence
ISGFNFTKNQGFIVFYPSVYSPIYFNTFPNYIFYYNCSLYVAADEYIFIINLYTHKINYIEVQGEEFEGITIKNGLIYVTSDSLY

SEQ ID NO: 32902 - protein, 85 aa, unidentified
  REGION 1..85: note = Description of Unknown:cds_NZ_WFIY01000004.1_cds_WP_155863442.1_1414 target sequence
GPDYVLVLNGTRILGKIYVGITPIGIIYDNVSKFIFVSNFFDGTISIISNSSPHGTSYMLNLPPFACCEKGASNSYNNFQFLPII

SEQ ID NO: 32903 - protein, 84 aa, unidentified
  REGION 1..84: note = Description of Unknown:cds_NZ_WFIY01000004.1_cds_WP_155863442.1_1414 target sequence
IGIIYDNVSKFIFVSNFFDGTISIISNSSPHGTSYMLNLPPFACCEKGASNSYNNFQFLPIIILGSIFLIILIDKGIKYLKSKF

SEQ ID NO: 32904 - protein, 85 aa, unidentified
  REGION 1..85: note = Description of Unknown:cds_NZ_WFIY01000004.1_cds_WP_155863442.1_1414 target sequence
NETTVAGRSSNVFCQISPTYLVECSKGNVFVAAVNKIYEISPYGKVINSLNISGVEYLCYYNSTLIATSGTLPNKTITLINLRNM

SEQ ID NO: 32905 - protein, 85 aa, unidentified
  REGION 1..85: note = Description of Unknown:cds_NZ_WFIY01000004.1_cds_WP_155863442.1_1414 target sequence
SIKTIATCFYPLAISAVNNTIYVGSYGYVYSLNNCRISQVLKVPGKVTSITTNGKILFISGFNFTKNQGFIVFYPSVYSPIYFNT

SEQ ID NO: 32906 - protein, 85 aa, unidentified
  REGION 1..85: note = Description of Unknown:cds_NZ_WFIY01000004.1_cds_WP_155863442.1_1414 target sequence
FPNYIFYYNCSLYVAADEYIFIINLYTHKINYIEVQGEEFEGITIKNGLIYVTSDSLYGPDYVLVLNGTRILGKIYVGITPIGII

SEQ ID NO: 32907 - protein, 85 aa, unidentified
  REGION 1..85: note = Description of Unknown:cds_NZ_WFIY01000004.1_cds_WP_155863839.1_1735 target sequence
KGAVLYKYNEPLKIEDNLQIQSPKEGEVKVKIVATGMCHSDVNVFEGKTPVPPPVIAGHEIAGIVEEVGPGVTRVKPGDRVVSAF

SEQ ID NO: 32908 - protein, 85 aa, unidentified
  REGION 1..85: note = Description of Unknown:cds_NZ_WFIY01000004.1_cds_WP_155863839.1_1735 target sequence
IHPCGKCRNCISGHENLCETFSAVRLKGTMMDGTTRVRLDGKEVRTFLGGGFAEYAVVGENALTVVPPEVDLEKIAVLGCAGLTG

SEQ ID NO: 32909 - protein, 85 aa, unidentified
  REGION 1..85: note = Description of Unknown:cds_NZ_WFIY01000004.1_cds_WP_155863839.1_1735 target sequence
YGAVNSAKIEPGESVAVIGVGGVGLSVIQLLKASGAGRIIAVGTKKWKLDRAIELGATDVINSKETDPTKAIKELTNGGADVVIE

SEQ ID NO: 32910 - protein, 85 aa, unidentified
  REGION 1..85: note = Description of Unknown:cds_NZ_WFIY01000004.1_cds_WP_155863839.1_1735 target sequence
AGGNEETIKIAMDSVRIGGRVVLVGLPPVNAMIPFRVASIVRNGITIIGNYGGRPRIDMPRLLDLVRLGKYDPSKLVTGRFKLEE

SEQ ID NO: 32911 - protein, 84 aa, unidentified
  REGION 1..84: note = Description of Unknown:cds_NZ_WFIY01000004.1_cds_WP_155863839.1_1735 target sequence
LVGLPPVNAMIPFRVASIVRNGITIIGNYGGRPRIDMPRLLDLVRLGKYDPSKLVTGRFKLEEINEAVKLLNQGEAIRSLIIPD

SEQ ID NO: 32912 - protein, 85 aa, unidentified
  REGION 1..85: note = Description of Unknown:cds_NZ_WFIY01000004.1_cds_WP_155863839.1_1735 target sequence
VKVKIVATGMCHSDVNVFEGKTPVPPPVIAGHEIAGIVEEVGPGVTRVKPGDRVVSAFIHPCGKCRNCISGHENLCETFSAVRLK

SEQ ID NO: 32913 - protein, 85 aa, unidentified
  REGION 1..85: note = Description of Unknown:cds_NZ_WFIY01000004.1_cds_WP_155863839.1_1735 target sequence
GTMMDGTTRVRLDGKEVRTFLGGGFAEYAVVGENALTVVPPEVDLEKIAVLGCAGLTGYGAVNSAKIEPGESVAVIGVGGVGLSV

SEQ ID NO: 32914 - protein, 85 aa, unidentified
  REGION 1..85: note = Description of Unknown:cds_NZ_WFIY01000004.1_cds_WP_155863839.1_1735 target sequence
IQLLKASGAGRIIAVGTKKWKLDRAIELGATDVINSKETDPTKAIKELTNGGADVVIEAGGNEETIKIAMDSVRIGGRVVLVGLP

SEQ ID NO: 32915 - protein, 85 aa, unidentified
  REGION 1..85: note = Description of Unknown:cds_NC_007409.1_cds_YP_319895.1_64 target sequence
VAMQPWEYVYKLLMPEKAPTDWQKTFTKNIYLALAVPLTKEFEEKIEKGDIKDLKLPVYPVAFDVRFDRNAWVRETDILDILTRS

SEQ ID NO: 32916 - protein, 85 aa, unidentified
  REGION 1..85: note = Description of Unknown:cds_NC_007409.1_cds_YP_319895.1_64 target sequence
GLYDNDYDFVTPINYNPRSLRYLDFDNSIPGYFPLADLELHFKRDITANPEDYGLKPIDGYKWELDRDGSYKVTSGSLFNVREAK

SEQ ID NO: 32917 - protein, 85 aa, unidentified
  REGION 1..85: note = Description of Unknown:cds_NC_007409.1_cds_YP_319895.1_64 target sequence
NSGRYSVLFLDDNPRKFNMLNGFGIVRFYISLWEAPEEVRAKAKEECESAGGIYQYDYPVAYCVLPLNKKEANIKASDFILQLNE

SEQ ID NO: 32918 - protein, 85 aa, unidentified
  REGION 1..85: note = Description of Unknown:cds_NC_007409.1_cds_YP_319895.1_64 target sequence
MVKSKITSEDFLKHVMVYQLPDDMVHQFPGSEQIPVKPVIGKTFQEMVKVAAKDLILGGEEKEPKQESQEQLFNPFTIDEMLTEE

SEQ ID NO: 32919 - protein, 84 aa, unidentified
  REGION 1..84: note = Description of Unknown:cds_NC_007409.1_cds_YP_319895.1_64 target sequence
MVHQFPGSEQIPVKPVIGKTFQEMVKVAAKDLILGGEEKEPKQESQEQLFNPFTIDEMLTEEQQQQQEEENNATEEEGDTVKLG

SEQ ID NO: 32920 - protein, 85 aa, unidentified
  REGION 1..85: note = Description of Unknown:cds_NC_007409.1_cds_YP_319895.1_64 target sequence
KNIYLALAVPLTKEFEEKIEKGDIKDLKLPVYPVAFDVRFDRNAWVRETDILDILTRSGLYDNDYDFVTPINYNPRSLRYLDFDN

SEQ ID NO: 32921 - protein, 85 aa, unidentified
  REGION 1..85: note = Description of Unknown:cds_NC_007409.1_cds_YP_319895.1_64 target sequence
SIPGYFPLADLELHFKRDITANPEDYGLKPIDGYKWELDRDGSYKVTSGSLFNVREAKNSGRYSVLFLDDNPRKFNMLNGFGIVR

SEQ ID NO: 32922 - protein, 85 aa, unidentified
  REGION 1..85: note = Description of Unknown:cds_NC_007409.1_cds_YP_319895.1_64 target sequence
FYISLWEAPEEVRAKAKEECESAGGIYQYDYPVAYCVLPLNKKEANIKASDFILQLNEMVKSKITSEDFLKHVMVYQLPDDMVHQ

SEQ ID NO: 32923 - protein, 85 aa, unidentified
  REGION 1..85: note = Description of Unknown:hvTR_Q85232 target sequence
EDSGNSSGSEASRSGSEERRPVRERLGSRPPERRPVRARLGAIRRRRGGRGGRAARQALRQRRRQQQQQQRQQQHQRRRQEADRP

SEQ ID NO: 32924 - protein, 85 aa, unidentified
  REGION 1..85: note = Description of Unknown:hvTR_Q85232 target sequence
DGGPDAPPDRLSESARAAVSATHARVGATRVNELFASARHDLSRPVFNDGFRAAGSSPWAAVLEFGAEQFTPDGRRVTWETLMFH

SEQ ID NO: 32925 - protein, 85 aa, unidentified
  REGION 1..85: note = Description of Unknown:hvTR_Q85232 target sequence
GADLHRLFEVRPHATEAARVLREMVLLNEGLTESLASADETLTWVKLILTKGLTLRTLDPIVATAGAVLQNLRLKLGPFLRCYLR

SEQ ID NO: 32926 - protein, 85 aa, unidentified
  REGION 1..85: note = Description of Unknown:hvTR_Q85232 target sequence
DTPVDELVRRRRLRDVRCIVTYTLVMLARIARVVERGSSCVLPEDLGDSPVPLEEYVPGACLGGIMDALDSHKTGCDAPTCRLTC

SEQ ID NO: 32927 - protein, 84 aa, unidentified
  REGION 1..84: note = Description of Unknown:hvTR_Q85232 target sequence
YTLVMLARIARVVERGSSCVLPEDLGDSPVPLEEYVPGACLGGIMDALDSHKTGCDAPTCRLTCSYTLVPVYMHGKYFYCNHLF

SEQ ID NO: 32928 - protein, 85 aa, unidentified
  REGION 1..85: note = Description of Unknown:hvTR_Q85232 target sequence
SRPPERRPVRARLGAIRRRRGGRGGRAARQALRQRRRQQQQQQRQQQHQRRRQEADRPDGGPDAPPDRLSESARAAVSATHARVG

SEQ ID NO: 32929 - protein, 85 aa, unidentified
  REGION 1..85: note = Description of Unknown:hvTR_Q85232 target sequence
ATRVNELFASARHDLSRPVFNDGFRAAGSSPWAAVLEFGAEQFTPDGRRVTWETLMFHGADLHRLFEVRPHATEAARVLREMVLL

SEQ ID NO: 32930 - protein, 85 aa, unidentified
  REGION 1..85: note = Description of Unknown:hvTR_Q85232 target sequence
NEGLTESLASADETLTWVKLILTKGLTLRTLDPIVATAGAVLQNLRLKLGPFLRCYLRDTPVDELVRRRRLRDVRCIVTYTLVML

SEQ ID NO: 32931 - protein, 85 aa, unidentified
  REGION 1..85: note = Description of Unknown:cds_NZ_WFIY01000004.1_cds_WP_155862318.1_42 target sequence
SEETELIIQSSSEVAKQLDSTSEEQGIFPRKNLELLAQQGFMGILIPKPYGMGLPARVFVEVVKNIAKVSPSTAWIYVTHVAATM

SEQ ID NO: 32932 - protein, 85 aa, unidentified
  REGION 1..85: note = Description of Unknown:cds_NZ_WFIY01000004.1_cds_WP_155862318.1_42 target sequence
AFNTFASQTLKDKYMNDLVNGKLLIGAAGTESVGGAINAVLNTTAELKGDKYVINGNKTFITGVGELDLFMIITKIVGQQKPGVI

SEQ ID NO: 32933 - protein, 85 aa, unidentified
  REGION 1..85: note = Description of Unknown:cds_NZ_WFIY01000004.1_cds_WP_155862318.1_42 target sequence
LVEKGQTKVGQKFVSLGMKGVSWGELILENAEVSKDNFIVDDAVKFLGVLGRVGMLGVSAISLGLAEGAFEEALNHVKSRKLGQN

SEQ ID NO: 32934 - protein, 85 aa, unidentified
  REGION 1..85: note = Description of Unknown:cds_NZ_WFIY01000004.1_cds_WP_155862318.1_42 target sequence
TLGSFEGVQIYLAEMSAKIEAMRQLLYYAADQLSTQNPLPAVLKARIFITENALDVIDKALRITGGHGFSNALKIEKYYRDARAP

SEQ ID NO: 32935 - protein, 84 aa, unidentified
  REGION 1..84: note = Description of Unknown:cds_NZ_WFIY01000004.1_cds_WP_155862318.1_42 target sequence
MRQLLYYAADQLSTQNPLPAVLKARIFITENALDVIDKALRITGGHGFSNALKIEKYYRDARAPMLHFQTLEISKKVLGGILVS

SEQ ID NO: 32936 - protein, 85 aa, unidentified
  REGION 1..85: note = Description of Unknown:cds_NZ_WFIY01000004.1_cds_WP_155862318.1_42 target sequence
FPRKNLELLAQQGFMGILIPKPYGMGLPARVFVEVVKNIAKVSPSTAWIYVTHVAATMAFNTFASQTLKDKYMNDLVNGKLLIGA

SEQ ID NO: 32937 - protein, 85 aa, unidentified
  REGION 1..85: note = Description of Unknown:cds_NZ_WFIY01000004.1_cds_WP_155862318.1_42 target sequence
AGTESVGGAINAVLNTTAELKGDKYVINGNKTFITGVGELDLFMIITKIVGQQKPGVILVEKGQTKVGQKFVSLGMKGVSWGELI

SEQ ID NO: 32938 - protein, 85 aa, unidentified
  REGION 1..85: note = Description of Unknown:cds_NZ_WFIY01000004.1_cds_WP_155862318.1_42 target sequence
LENAEVSKDNFIVDDAVKFLGVLGRVGMLGVSAISLGLAEGAFEEALNHVKSRKLGQNTLGSFEGVQIYLAEMSAKIEAMRQLLY

SEQ ID NO: 32939 - protein, 85 aa, unidentified
  REGION 1..85: note = Description of Unknown:cds_NZ_WFIY01000004.1_cds_WP_155864360.1_245 target sequence
IRIAIAGLGNCASMLIQGIEYYKNKGDNYYEGLITPIIGNYKVTDIEVVAAFDISKNKIGKDIAEAIFQPPNITPRIVEMKKTGV

SEQ ID NO: 32940 - protein, 85 aa, unidentified
  REGION 1..85: note = Description of Unknown:cds_NZ_WFIY01000004.1_cds_WP_155864360.1_245 target sequence
KVSPGPVLDGVAPHMKSIFNPIQEQVNIEDVVNVLKESKADILINLLPVGSEEASRAYARAALEAGVAFINAIPVFIASDPTGKF

SEQ ID NO: 32941 - protein, 85 aa, unidentified
  REGION 1..85: note = Description of Unknown:cds_NZ_WFIY01000004.1_cds_WP_155864360.1_245 target sequence
PEEFAKRGLPIAGDDIKGQVGATIFHRAITSLFMLRGVKVEETYQLNVGGNTDFLNMKTEERLQSKRISKTKAVTSTLDNEEEIE

SEQ ID NO: 32942 - protein, 85 aa, unidentified
  REGION 1..85: note = Description of Unknown:cds_NZ_WFIY01000004.1_cds_WP_155864360.1_245 target sequence
KEGKIRIGPSDYIPFLGNTKVAYIYVKGSGFAGMPIKVEASLEVDDKSNCAAVLVDVIRAVKLALDRKIGGPLIKVSAFYFKHPP

SEQ ID NO: 32943 - protein, 84 aa, unidentified
  REGION 1..84: note = Description of Unknown:cds_NZ_WFIY01000004.1_cds_WP_155864360.1_245 target sequence
AYIYVKGSGFAGMPIKVEASLEVDDKSNCAAVLVDVIRAVKLALDRKIGGPLIKVSAFYFKHPPIQAKNDEEAYKWFDEFVRNM

SEQ ID NO: 32944 - protein, 85 aa, unidentified
  REGION 1..85: note = Description of Unknown:cds_NZ_WFIY01000004.1_cds_WP_155864360.1_245 target sequence
NYYEGLITPIIGNYKVTDIEVVAAFDISKNKIGKDIAEAIFQPPNITPRIVEMKKTGVKVSPGPVLDGVAPHMKSIFNPIQEQVN

SEQ ID NO: 32945 - protein, 85 aa, unidentified
  REGION 1..85: note = Description of Unknown:cds_NZ_WFIY01000004.1_cds_WP_155864360.1_245 target sequence
IEDVVNVLKESKADILINLLPVGSEEASRAYARAALEAGVAFINAIPVFIASDPTGKFPEEFAKRGLPIAGDDIKGQVGATIFHR

SEQ ID NO: 32946 - protein, 85 aa, unidentified
  REGION 1..85: note = Description of Unknown:cds_NZ_WFIY01000004.1_cds_WP_155864360.1_245 target sequence
AITSLFMLRGVKVEETYQLNVGGNTDFLNMKTEERLQSKRISKTKAVTSTLDNEEEIEKEGKIRIGPSDYIPFLGNTKVAYIYVK

SEQ ID NO: 32947 - protein, 85 aa, unidentified
  REGION 1..85: note = Description of Unknown:cds_NC_025810.1_cds_YP_009110705.1_10 target sequence
EVRTPNFHSFVESAYSSYLTRPDTWNPSTLWETGQFVTPDVIRLGNAYCCAQCCGVLYYGYRPINLYPFPHHRCHQLHRRETSPL

SEQ ID NO: 32948 - protein, 85 aa, unidentified
  REGION 1..85: note = Description of Unknown:cds_NC_025810.1_cds_YP_009110705.1_10 target sequence
LKVVRVGRTTDMVREHYAVWLQSLVDHLSDEKNIQDKEPMSSRVASEVLRNDVAISGDFWRGTLDLSPHDSAQSIHDSMDKLSEV

SEQ ID NO: 32949 - protein, 85 aa, unidentified
  REGION 1..85: note = Description of Unknown:cds_NC_025810.1_cds_YP_009110705.1_10 target sequence
AGTHGLLPDCLLNVATHDHTALRMTAPVLNIYDQLDNARRSVLSATVTQMPKETADEHKLQGHVTKEVAAAALLKPEHVIVTPIM

SEQ ID NO: 32950 - protein, 85 aa, unidentified
  REGION 1..85: note = Description of Unknown:cds_NC_025810.1_cds_YP_009110705.1_10 target sequence
AGLPVLARSHQPSLRVGMPLVESTQKASLYRSLPHQLAHGYHSDTFRTMFGLSANEAESRLIGHHRTMLCTLPAIETSSTAVARA

SEQ ID NO: 32951 - protein, 84 aa, unidentified
  REGION 1..84: note = Description of Unknown:cds_NC_025810.1_cds_YP_009110705.1_10 target sequence
ESTQKASLYRSLPHQLAHGYHSDTFRTMFGLSANEAESRLIGHHRTMLCTLPAIETSSTAVARATTSPLSIVSSDKVTMHECSG

SEQ ID NO: 32952 - protein, 85 aa, unidentified
  REGION 1..85: note = Description of Unknown:cds_NC_025810.1_cds_YP_009110705.1_10 target sequence
STLWETGQFVTPDVIRLGNAYCCAQCCGVLYYGYRPINLYPFPHHRCHQLHRRETSPLLKVVRVGRTTDMVREHYAVWLQSLVDH

SEQ ID NO: 32953 - protein, 85 aa, unidentified
  REGION 1..85: note = Description of Unknown:cds_NC_025810.1_cds_YP_009110705.1_10 target sequence
LSDEKNIQDKEPMSSRVASEVLRNDVAISGDFWRGTLDLSPHDSAQSIHDSMDKLSEVAGTHGLLPDCLLNVATHDHTALRMTAP

SEQ ID NO: 32954 - protein, 85 aa, unidentified
  REGION 1..85: note = Description of Unknown:cds_NC_025810.1_cds_YP_009110705.1_10 target sequence
VLNIYDQLDNARRSVLSATVTQMPKETADEHKLQGHVTKEVAAAALLKPEHVIVTPIMAGLPVLARSHQPSLRVGMPLVESTQKA

SEQ ID NO: 32955 - protein, 85 aa, unidentified; identical to SEQ ID NO: 32947
  REGION 1..85: note = Description of Unknown:cds_NC_038658.1_cds_YP_009507776.1_12 target sequence

SEQ ID NO: 32956 - protein, 85 aa, unidentified; identical to SEQ ID NO: 32948
  REGION 1..85: note = Description of Unknown:cds_NC_038658.1_cds_YP_009507776.1_12 target sequence

SEQ ID NO: 32957 - protein, 85 aa, unidentified
  REGION 1..85: note = Description of Unknown:cds_NC_038658.1_cds_YP_009507776.1_12 target sequence
AGTHGLLPDCLLNVATHDHSALKMTAPVLNIYDQVDNARRLIFSDTVTQMLKETADAHKLQRHVNKEVAGVALLKPEHVIVTPIM

SEQ ID NO: 32958 - protein, 85 aa, unidentified
  REGION 1..85: note = Description of Unknown:cds_NC_038658.1_cds_YP_009507776.1_12 target sequence
AGLPVLDRSHQPSMRVGMPIVESTQKASLYRSMPHQLVNGYHFDTFRTMFGLSANEAKSRMIGHHRIMLCTLPAIETSSTAVARA

SEQ ID NO: 32959 - protein, 84 aa, unidentified
  REGION 1..84: note = Description of Unknown:cds_NC_038658.1_cds_YP_009507776.1_12 target sequence
ESTQKASLYRSMPHQLVNGYHFDTFRTMFGLSANEAKSRMIGHHRIMLCTLPAIETSSTAVARATTSPLSIVSSDKVTMHECSG

SEQ ID NO: 32960 - protein, 85 aa, unidentified; identical to SEQ ID NO: 32952
  REGION 1..85: note = Description of Unknown:cds_NC_038658.1_cds_YP_009507776.1_12 target sequence

SEQ ID NO: 32961 - protein, 85 aa, unidentified
  REGION 1..85: note = Description of Unknown:cds_NC_038658.1_cds_YP_009507776.1_12 target sequence
LSDEKNIQDKEPMSSRVASEVLRNDVAISGDFWRGTLDLSPHDSAQSIHDSMDKLSEVAGTHGLLPDCLLNVATHDHSALKMTAP

SEQ ID NO: 32962 - protein, 85 aa, unidentified
  REGION 1..85: note = Description of Unknown:cds_NC_038658.1_cds_YP_009507776.1_12 target sequence
VLNIYDQVDNARRLIFSDTVTQMLKETADAHKLQRHVNKEVAGVALLKPEHVIVTPIMAGLPVLDRSHQPSMRVGMPIVESTQKA

SEQ ID NO: 32963 - protein, 85 aa, unidentified
  REGION 1..85: note = Description of Unknown:cds_NC_038931.1_cds_YP_009509150.1_34 target sequence
VSYQITINNNTTSNVQNIVIADPNLASLGENVVFSDSQGPLSSLYVYDGVWVVKLRSPLSPGQSITITASSGTPNIDPTIALYYN

SEQ ID NO: 32964 - protein, 85 aa, unidentified
  REGION 1..85: note = Description of Unknown:cds_NC_038931.1_cds_YP_009509150.1_34 target sequence
NGSSYSNLTLVGSPTVSIVQDFGGYAISAYASGDFFLVASPTGFTPSSSRLLVVDRWATTPTSLDAVGLRLYADTNDWFGVVRKY

SEQ ID NO: 32965 - protein, 85 aa, unidentified
  REGION 1..85: note = Description of Unknown:cds_NC_038931.1_cds_YP_009509150.1_34 target sequence
INGAQNVSIEQKISGTYSVVNEIDISQFAAFTDPLVMYLSINGSTANVKVYKQGSNIGTVSGNYSTTPYGNPSMAGYGTVDKHYA

SEQ ID NO: 32966 - protein, 85 aa, unidentified
  REGION 1..85: note = Description of Unknown:cds_NC_038931.1_cds_YP_009509150.1_34 target sequence
NFIVLPYEPDPQVTVTPISSPSPTPTPTPTPTPTPTYDITYVVFDVTPSPTPTPTLTSTPTPTPTPTYDITYVIFDVTPSPTPTP

SEQ ID NO: 32967 - protein, 84 aa, unidentified
  REGION 1..84: note = Description of Unknown:cds_NC_038931.1_cds_YP_009509150.1_34 target sequence
SPTPTPTPTPTPTPTYDITYVVFDVTPSPTPTPTLTSTPTPTPTPTYDITYVIFDVTPSPTPTPTPTPTPTPTPTPTSTTSSNI

SEQ ID NO: 32968 - protein, 85 aa, unidentified
  REGION 1..85: note = Description of Unknown:cds_NC_038931.1_cds_YP_009509150.1_34 target sequence
LGENVVFSDSQGPLSSLYVYDGVWVVKLRSPLSPGQSITITASSGTPNIDPTIALYYNNGSSYSNLTLVGSPTVSIVQDFGGYAI

SEQ ID NO: 32969 - protein, 85 aa, unidentified
  REGION 1..85: note = Description of Unknown:cds_NC_038931.1_cds_YP_009509150.1_34 target sequence
SAYASGDFFLVASPTGFTPSSSRLLVVDRWATTPTSLDAVGLRLYADTNDWFGVVRKYINGAQNVSIEQKISGTYSVVNEIDISQ

SEQ ID NO: 32970 - protein, 85 aa, unidentified
  REGION 1..85: note = Description of Unknown:cds_NC_038931.1_cds_YP_009509150.1_34 target sequence
FAAFTDPLVMYLSINGSTANVKVYKQGSNIGTVSGNYSTTPYGNPSMAGYGTVDKHYANFIVLPYEPDPQVTVTPISSPSPTPTP

SEQ ID NO: 32971 - protein, 85 aa, unidentified
  REGION 1..85: note = Description of Unknown:cds_NC_025351.1_cds_YP_009094084.1_4 target sequence
DPSDLRRIIMEDDKSLVNNDDSTETDFLEKTWREGSKIDKITPEVDENGNMVPKYVVFNPGKNERKTSGYQYMICYGFIEDGPIN

SEQ ID NO: 32972 - protein, 85 aa, unidentified
  REGION 1..85: note = Description of Unknown:cds_NC_025351.1_cds_YP_009094084.1_4 target sequence
GSPRVKGNIRTTASFPLGVGKTYSSPEEILQELTTLKITVRRTAGSNEKLVYGITGPLNHLYPWYKVLTGGSIFSAVKVCRNVDQ

SEQ ID NO: 32973 - protein, 85 aa, unidentified
  REGION 1..85: note = Description of Unknown:cds_NC_025351.1_cds_YP_009094084.1_4 target sequence
ILLDRPQILRVFFLSITKLTDKGVYMIPKSVLDFRSDNSMAFNLLVYLKIDTDITKAGIRGIVNKEGERITSFMLHIGNFTRRGG

SEQ ID NO: 32974 - protein, 85 aa, unidentified
  REGION 1..85: note = Description of Unknown:cds_NC_025351.1_cds_YP_009094084.1_4 target sequence
KHYSVEYCKRKIDKMKLTFALGTIGGLSLHIRIDGRISKRLQAQVGFQRNICYSLMDTNPWLNKLTWNNSCEIHKVTAVIQPSVP

SEQ ID NO: 32975 - protein, 84 aa, unidentified
  REGION 1..84: note = Description of Unknown:cds_NC_025351.1_cds_YP_009094084.1_4 target sequence
LGTIGGLSLHIRIDGRISKRLQAQVGFQRNICYSLMDTNPWLNKLTWNNSCEIHKVTAVIQPSVPKDFMLYEDILIDNTGKILK

SEQ ID NO: 32976 - protein, 85 aa, unidentified
  REGION 1..85: note = Description of Unknown:cds_NC_025351.1_cds_YP_009094084.1_4 target sequence
LEKTWREGSKIDKITPEVDENGNMVPKYVVFNPGKNERKTSGYQYMICYGFIEDGPINGSPRVKGNIRTTASFPLGVGKTYSSPE

SEQ ID NO: 32977 - protein, 85 aa, unidentified
  REGION 1..85: note = Description of Unknown:cds_NC_025351.1_cds_YP_009094084.1_4 target sequence
EILQELTTLKITVRRTAGSNEKLVYGITGPLNHLYPWYKVLTGGSIFSAVKVCRNVDQILLDRPQILRVFFLSITKLTDKGVYMI

SEQ ID NO: 32978 - protein, 85 aa, unidentified
  REGION 1..85: note = Description of Unknown:cds_NC_025351.1_cds_YP_009094084.1_4 target sequence
PKSVLDFRSDNSMAFNLLVYLKIDTDITKAGIRGIVNKEGERITSFMLHIGNFTRRGGKHYSVEYCKRKIDKMKLTFALGTIGGL

SEQ ID NO: 32979 - protein, 85 aa, unidentified
  REGION 1..85: note = Description of Unknown:cds_NZ_WFIY01000004.1_cds_WP_155863233.1_1180 target sequence
AHVKLEDIWKIYKEKKKTVEVLRGINLEIEKGDFVVILGPSGEGKTTILRIIAGLLKQDKGHVYLRGKLADDMSPKDRNIAMVPQ

SEQ ID NO: 32980 - protein, 85 aa, unidentified
  REGION 1..85: note = Description of Unknown:cds_NZ_WFIY01000004.1_cds_WP_155863233.1_1180 target sequence
NYAVYPFMNVFDNIAFPLKIEHVPKEEIRKRVLEVAEMLKIDNLLNRRPSQLSGGQLQRVAIARALVKNADIILMDEPLSNLDAQ

SEQ ID NO: 32981 - protein, 85 aa, unidentified
  REGION 1..85: note = Description of Unknown:cds_NZ_WFIY01000004.1_cds_WP_155863233.1_1180 target sequence
IRVLAREELKELQQKLGPTIIYVTHDQAEALSLATKLALLHNGKIQAYGDPLELYRQPNNSWVASFLGNPAMNLIRSEIAGEKIE

SEQ ID NO: 32982 - protein, 85 aa, unidentified
  REGION 1..85: note = Description of Unknown:cds_NZ_WFIY01000004.1_cds_WP_155863233.1_1180 target sequence
FDGQAIPLPERFKGIISSNKVILGIRPENIEISQDGDIEGVVELVEELGSFTITHVRVGNDIIKVIDKAFIKREKGEKVKLKFDY

SEQ ID NO: 32983 - protein, 84 aa, unidentified
  REGION 1..84: note = Description of Unknown:cds_NZ_WFIY01000004.1_cds_WP_155863233.1_1180 target sequence
VILGIRPENIEISQDGDIEGVVELVEELGSFTITHVRVGNDIIKVIDKAFIKREKGEKVKLKFDYSRIELFDAESGVNLMIKNG

SEQ ID NO: 32984 - protein, 85 aa, unidentified
  REGION 1..85: note = Description of Unknown:cds_NZ_WFIY01000004.1_cds_WP_155863233.1_1180 target sequence
EIEKGDFVVILGPSGEGKTTILRIIAGLLKQDKGHVYLRGKLADDMSPKDRNIAMVPQNYAVYPFMNVFDNIAFPLKIEHVPKEE

SEQ ID NO: 32985 - protein, 85 aa, unidentified
  REGION 1..85: note = Description of Unknown:cds_NZ_WFIY01000004.1_cds_WP_155863233.1_1180 target sequence
IRKRVLEVAEMLKIDNLLNRRPSQLSGGQLQRVAIARALVKNADIILMDEPLSNLDAQIRVLAREELKELQQKLGPTIIYVTHDQ

SEQ ID NO: 32986 - protein, 85 aa, unidentified
  REGION 1..85: note = Description of Unknown:cds_NZ_WFIY01000004.1_cds_WP_155863233.1_1180 target sequence
AEALSLATKLALLHNGKIQAYGDPLELYRQPNNSWVASFLGNPAMNLIRSEIAGEKIEFDGQAIPLPERFKGIISSNKVILGIRP

SEQ ID NO: 32987 - protein, 85 aa, unidentified
  REGION 1..85: note = Description of Unknown:cds_NZ_WFIY01000004.1_cds_WP_155863271.1_1226 target sequence
ETYRLKIGDINNLAIGSSLLGSGGGGDPYIGVSMLKNELEKRKTNVEIIIGINELSKNEYLVSTAMMGATTISIEKPPNGNEVLR

SEQ ID NO: 32988 - protein, 85 aa, unidentified
  REGION 1..85: note = Description of Unknown:cds_NZ_WFIY01000004.1_cds_WP_155863271.1_1226 target sequence
AIRTYISVTGKNISYITPVEVGGENSITPLISSLKTGIPVLDGDGMGRAFPELQMTTFYIYGISPSPLVLVDERDNVSVIYGIDG

SEQ ID NO: 32989 - protein, 85 aa, unidentified
  REGION 1..85: note = Description of Unknown:cds_NZ_WFIY01000004.1_cds_WP_155863271.1_1226 target sequence
LWSERIARAVTLRYGGSSYVISYGMSLRDYATSYIPNTLSLSIKIGELLNEHKLDEVLDKLHGVILFKGKIADVWKGLDKGFSKG

SEQ ID NO: 32990 - protein, 85 aa, unidentified
  REGION 1..85: note = Description of Unknown:cds_NZ_WFIY01000004.1_cds_WP_155863271.1_1226 target sequence
YVLIEGLDEYKNMNLRIHFQNEFIIAIINESVVTSAPDIISLLDLFSLKPITTDRVKYGQKVIVVGIPAHEKLKTEKALKYVGPK

SEQ ID NO: 32991 - protein, 84 aa, unidentified
  REGION 1..84: note = Description of Unknown:cds_NZ_WFIY01000004.1_cds_WP_155863271.1_1226 target sequence
NEFIIAIINESVVTSAPDIISLLDLFSLKPITTDRVKYGQKVIVVGIPAHEKLKTEKALKYVGPKAFGYDIDYSPLASKKKLFL

SEQ ID NO: 32992 - protein, 85 aa, unidentified
  REGION 1..85: note = Description of Unknown:cds_NZ_WFIY01000004.1_cds_WP_155863271.1_1226 target sequence
PYIGVSMLKNELEKRKTNVEIIIGINELSKNEYLVSTAMMGATTISIEKPPNGNEVLRAIRTYISVTGKNISYITPVEVGGENSI

SEQ ID NO: 32993 - protein, 85 aa, unidentified
  REGION 1..85: note = Description of Unknown:cds_NZ_WFIY01000004.1_cds_WP_155863271.1_1226 target sequence
TPLISSLKTGIPVLDGDGMGRAFPELQMTTFYIYGISPSPLVLVDERDNVSVIYGIDGLWSERIARAVTLRYGGSSYVISYGMSL

SEQ ID NO: 32994 - protein, 85 aa, unidentified
  REGION 1..85: note = Description of Unknown:cds_NZ_WFIY01000004.1_cds_WP_155863271.1_1226 target sequence
RDYATSYIPNTLSLSIKIGELLNEHKLDEVLDKLHGVILFKGKIADVWKGLDKGFSKGYVLIEGLDEYKNMNLRIHFQNEFIIAI

SEQ ID NO: 32995 - protein, 85 aa, unidentified
  REGION 1..85: note = Description of Unknown:cds_NZ_WFIY01000004.1_cds_WP_155863850.1_1746 target sequence
KVAIVGGGIVGLFTAYFLKKEGVEVTIFEKADLGSYSIHAAGLIEPYRFDKINSTNMIIKMLKYSLRGATYIRNVNKFWLKELLR

SEQ ID NO: 32996 - protein, 85 aa, unidentified
  REGION 1..85: note = Description of Unknown:cds_NZ_WFIY01000004.1_cds_WP_155863850.1_1746 target sequence
NLNKNPPEDAWKTMREMAEFSLKAYKEMAEERNDFDYKDDGLYEVYLNEEDLEKGLEEEKKSPFNPKFEKVDFEGFAGAIFFPEL

SEQ ID NO: 32997 - protein, 85 aa, unidentified
  REGION 1..85: note = Description of Unknown:cds_NZ_WFIY01000004.1_cds_WP_155863850.1_1746 target sequence
SRISTEKFIDRMRNELKGVKIVNKDIQNLGELKDFDEIVLASGVWTTKFISNLPVTAFKGYGYRVKGIPKYNKPLVLVDDGIAIS

SEQ ID NO: 32998 - protein, 85 aa, unidentified
  REGION 1..85: note = Description of Unknown:cds_NZ_WFIY01000004.1_cds_WP_155863850.1_1746 target sequence
PFEDYIKITGGFDADSSYDSSRAQLVLDKSSRIVDISYIYEMNMGFRPCSPDGFPIIGKSGNVTVATGACRLGWSYAPAMGKYTT

SEQ ID NO: 32999 - protein, 84 aa, unidentified
  REGION 1..84: note = Description of Unknown:cds_NZ_WFIY01000004.1_cds_WP_155863850.1_1746 target sequence
SRAQLVLDKSSRIVDISYIYEMNMGFRPCSPDGFPIIGKSGNVTVATGACRLGWSYAPAMGKYTTDLVLGRLKDLGYISRYVKF

SEQ ID NO: 33000 - protein, 85 aa, unidentified
  REGION 1..85: note = Description of Unknown:cds_NZ_WFIY01000004.1_cds_WP_155863850.1_1746 target sequence
FEKADLGSYSIHAAGLIEPYRFDKINSTNMIIKMLKYSLRGATYIRNVNKFWLKELLRNLNKNPPEDAWKTMREMAEFSLKAYKE

SEQ ID NO: 33001 - protein, 85 aa, unidentified
  REGION 1..85: note = Description of Unknown:cds_NZ_WFIY01000004.1_cds_WP_155863850.1_1746 target sequence
MAEERNDFDYKDDGLYEVYLNEEDLEKGLEEEKKSPFNPKFEKVDFEGFAGAIFFPELSRISTEKFIDRMRNELKGVKIVNKDIQ

SEQ ID NO: 33002 - protein, 85 aa, unidentified
  REGION 1..85: note = Description of Unknown:cds_NZ_WFIY01000004.1_cds_WP_155863850.1_1746 target sequence
NLGELKDFDEIVLASGVWTTKFISNLPVTAFKGYGYRVKGIPKYNKPLVLVDDGIAISPFEDYIKITGGFDADSSYDSSRAQLVL

SEQ ID NO: 33003 - protein, 85 aa, unidentified
  REGION 1..85: note = Description of Unknown:cds_NC_030656.1_cds_YP_009268720.1_5 target sequence
DMTPQNTFEIRSNGLVKVKTFLPEYLNGIKAMIRCAISRNVEWRDSKVYNTNSKKEEISEDRKSKQVTILASDVSKYYLSCLRAL

SEQ ID NO: 33004 - protein, 85 aa, unidentified
  REGION 1..85: note = Description of Unknown:cds_NC_030656.1_cds_YP_009268720.1_5 target sequence
LTESTNHYADNVLIDKYVTVVEYLEGDYFNRHTDYENIVSNNCAEHHLVLYLDTPLKGGETCVEIENTVTMSKSDILFDKRLPHW

SEQ ID NO: 33005 - protein, 85 aa, unidentified
  REGION 1..85: note = Description of Unknown:cds_NC_030656.1_cds_YP_009268720.1_5 target sequence
SNTVTEGVKKVALINVLIKYSSGGIKLFDVPLNYKSLSFYDTEGTRDYCYCSIIINDPLAKANSFDIIINRAGHCILTAVNHRVV

SEQ ID NO: 33006 - protein, 85 aa, unidentified
  REGION 1..85: note = Description of Unknown:cds_NC_030656.1_cds_YP_009268720.1_5 target sequence
RNQSVYKKFNDLCLDKFFDTYTVFEYFNEYFDNDDDKNIAWKNISPKNKKILIPRKRSDYKFIKKIVRNSKKINSEIFYYTMSGK

SEQ ID NO: 33007 - protein, 84 aa, unidentified
  REGION 1..84: note = Description of Unknown:cds_NC_030656.1_cds_YP_009268720.1_5 target sequence
YTVFEYFNEYFDNDDDKNIAWKNISPKNKKILIPRKRSDYKFIKKIVRNSKKINSEIFYYTMSGKCNSEVKYVSFTVSRFYFSA

SEQ ID NO: 33008 - protein, 85 aa, unidentified
  REGION 1..85: note = Description of Unknown:cds_NC_030656.1_cds_YP_009268720.1_5 target sequence
GIKAMIRCAISRNVEWRDSKVYNTNSKKEEISEDRKSKQVTILASDVSKYYLSCLRALLTESTNHYADNVLIDKYVTVVEYLEGD

SEQ ID NO: 33009 - protein, 85 aa, unidentified
  REGION 1..85: note = Description of Unknown:cds_NC_030656.1_cds_YP_009268720.1_5 target sequence
YFNRHTDYENIVSNNCAEHHLVLYLDTPLKGGETCVEIENTVTMSKSDILFDKRLPHWSNTVTEGVKKVALINVLIKYSSGGIKL

SEQ ID NO: 33010 - protein, 85 aa, unidentified
  REGION 1..85: note = Description of Unknown:cds_NC_030656.1_cds_YP_009268720.1_5 target sequence
FDVPLNYKSLSFYDTEGTRDYCYCSIIINDPLAKANSFDIIINRAGHCILTAVNHRVVRNQSVYKKFNDLCLDKFFDTYTVFEYF

SEQ ID NO: 33011 - protein, 85 aa, unidentified
  REGION 1..85: note = Description of Unknown:cds_NZ_WFIY01000004.1_cds_WP_155864024.1_1955 target sequence
KAIVVKPHQAGMEVKDVNIEEKVGKGQVLVKTLYTGVCGTDRGIVGNKLSFTRPQEGWSELILGHEAFGQVEEVGEGVKELKKGD

SEQ ID NO: 33012 - protein, 85 aa, unidentified
  REGION 1..85: note = Description of Unknown:cds_NZ_WFIY01000004.1_cds_WP_155864024.1_1955 target sequence
YVVPVVRRGCGVCLNCKIGKQDFCETGNFVEAGIRGKNGFMREEFVDDEVYLVKVPEAIKDIAVLTEPLSNVVKAIEEVMYIQQR

SEQ ID NO: 33013 - protein, 85 aa, unidentified
  REGION 1..85: note = Description of Unknown:cds_NZ_WFIY01000004.1_cds_WP_155864024.1_1955 target sequence
MIWNCEDGAYDCRNAYVVGTGPIGTFFSLLLRTYGFNVYMLNKRDPSPAEEYVSTRIEAEFVNTTKGVDHLPKADIIVDTSGFPS

SEQ ID NO: 33014 - protein, 85 aa, unidentified
  REGION 1..85: note = Description of Unknown:cds_NZ_WFIY01000004.1_cds_WP_155864024.1_1955 target sequence
AFVPLMHKMNKNSILVLFGTQTGDKVQIDADLVTFMVENNIAVVGSVNANKWHFKSAVNYLTMWKEKYGDLLNRMITTVVPPEDA

SEQ ID NO: 33015 - protein, 84 aa, unidentified
  REGION 1..84: note = Description of Unknown:cds_NZ_WFIY01000004.1_cds_WP_155864024.1_1955 target sequence
TQTGDKVQIDADLVTFMVENNIAVVGSVNANKWHFKSAVNYLTMWKEKYGDLLNRMITTVVPPEDAKEILENKPKGEIKSVIKW

SEQ ID NO: 33016 - protein, 85 aa, unidentified
  REGION 1..85: note = Description of Unknown:cds_NZ_WFIY01000004.1_cds_WP_155864024.1_1955 target sequence
VLVKTLYTGVCGTDRGIVGNKLSFTRPQEGWSELILGHEAFGQVEEVGEGVKELKKGDYVVPVVRRGCGVCLNCKIGKQDFCETG

SEQ ID NO: 33017 - protein, 85 aa, unidentified
  REGION 1..85: note = Description of Unknown:cds_NZ_WFIY01000004.1_cds_WP_155864024.1_1955 target sequence
NFVEAGIRGKNGFMREEFVDDEVYLVKVPEAIKDIAVLTEPLSNVVKAIEEVMYIQQRMIWNCEDGAYDCRNAYVVGTGPIGTFF

SEQ ID NO: 33018 - protein, 85 aa, unidentified
  REGION 1..85: note = Description of Unknown:cds_NZ_WFIY01000004.1_cds_WP_155864024.1_1955 target sequence
SLLLRTYGFNVYMLNKRDPSPAEEYVSTRIEAEFVNTTKGVDHLPKADIIVDTSGFPSAFVPLMHKMNKNSILVLFGTQTGDKVQ

SEQ ID NO: 33019 - protein, 85 aa, unidentified
  REGION 1..85: note = Description of Unknown:cds_NZ_WFIY01000004.1_cds_2239 target sequence
VAGEKVLVIGSGPAGLSATKELLNMGVDVVIVEKESYLGGTPKKLKYSLLFPELRPASEVIDPLIKSADGAKKYMESIVESAKPE

SEQ ID NO: 33020 - protein, 85 aa, unidentified
  REGION 1..85: note = Description of Unknown:cds_NZ_WFIY01000004.1_cds_2239 target sequence
GKGFVVTIKDKTGKTTTEKVSAIIAASGFEHFDSRRKYEYGYGIIPNIYQISDIERMLSENKLVTTKGTPPKRVAILLCVGSRDA

SEQ ID NO: 33021 - protein, 85 aa, unidentified
  REGION 1..85: note = Description of Unknown:cds_NZ_WFIY01000004.1_cds_2239 target sequence
TVGNTYCSRVCCAVSIKQAMEIKQRIPDAVVHIYYMDIRTYGLMEDKLYWRSQLEYRVGFIRGRISEFMRGPNDTVIIKGEDTMN

SEQ ID NO: 33022 - protein, 85 aa, unidentified
  REGION 1..85: note = Description of Unknown:cds_NZ_WFIY01000004.1_cds_2239 target sequence
LNRALVVPYDMVILANGMELGLGSKQVAKALGLEFEEHGFVKPLDPDRLPVQSTRKGIFLAGAITGPKTIADSITEGQAAAMKAY

SEQ ID NO: 33023 - protein, 84 aa, unidentified
  REGION 1..84: note = Description of Unknown:cds_NZ_WFIY01000004.1_cds_2239 target sequence
GLGSKQVAKALGLEFEEHGFVKPLDPDRLPVQSTRKGIFLAGAITGPKTIADSITEGQAAAMKAYEYITKGVWEEPVKVEVVEH

SEQ ID NO: 33024 - protein, 85 aa, unidentified
  REGION 1..85: note = Description of Unknown:cds_NZ_WFIY01000004.1_cds_2239 target sequence
DVVIVEKESYLGGTPKKLKYSLLFPELRPASEVIDPLIKSADGAKKYMESIVESAKPEGKGFVVTIKDKTGKTTTEKVSAIIAAS

SEQ ID NO: 33025 - protein, 85 aa, unidentified
  REGION 1..85: note = Description of Unknown:cds_NZ_WFIY01000004.1_cds_2239 target sequence
GFEHFDSRRKYEYGYGIIPNIYQISDIERMLSENKLVTTKGTPPKRVAILLCVGSRDATVGNTYCSRVCCAVSIKQAMEIKQRIP

SEQ ID NO: 33026 - protein, 85 aa, unidentified
  REGION 1..85: note = Description of Unknown:cds_NZ_WFIY01000004.1_cds_2239 target sequence
DAVVHIYYMDIRTYGLMEDKLYWRSQLEYRVGFIRGRISEFMRGPNDTVIIKGEDTMNLNRALVVPYDMVILANGMELGLGSKQV

SEQ ID NO: 33027 - protein, 85 aa, unidentified
  REGION 1..85: note = Description of Unknown:cds_NZ_WFIY01000004.1_cds_WP_155863738.1_1608 target sequence
KKKVVVVGGGNAGSIVANKLAKNADLEVTVIEPSEYHYYQPGTVDIVGGIGKEEEMIKNTSDLLHARWIKNYVTKVDVENHTVFL

SEQ ID NO: 33028 - protein, 85 aa, unidentified
  REGION 1..85: note = Description of Unknown:cds_NZ_WFIY01000004.1_cds_WP_155863738.1_1608 target sequence
KSGDKIDYDYVVIAAGVRNIKLEGFPEWHTIEGAKLMKTMADNFEGKKIVVGYFGLIKCPAAPFELSFILKQRFPKAEITLINPV

SEQ ID NO: 33029 - protein, 85 aa, unidentified
  REGION 1..85: note = Description of Unknown:cds_NZ_WFIY01000004.1_cds_WP_155863738.1_1608 target sequence
AQPPQIQKPMAEILGKIAKELGVQVIRGFKIKEIDRQNKIIESENGEKINYDLAFIDTPIRAGEEFSNLVDNSGLIPVNRETLRF

SEQ ID NO: 33030 - protein, 85 aa, unidentified
  REGION 1..85: note = Description of Unknown:cds_NZ_WFIY01000004.1_cds_WP_155863738.1_1608 target sequence
KDYDNVFAIGDITNITTPPKTGAIAHFEANYVVKEIQNDLYGQGKGKFDGSAACAVYSGYGKGAFIYMNYEKSYALGPSSIFFIA

SEQ ID NO: 33031 - protein, 84 aa, unidentified
  REGION 1..84: note = Description of Unknown:cds_NZ_WFIY01000004.1_cds_WP_155863738.1_1608 target sequence
PKTGAIAHFEANYVVKEIQNDLYGQGKGKFDGSAACAVYSGYGKGAFIYMNYEKSYALGPSSIFFIAKKTFAHIYWLTVEGKLI

SEQ ID NO: 33032 - protein, 85 aa, unidentified
  REGION 1..85: note = Description of Unknown:cds_NZ_WFIY01000004.1_cds_WP_155863738.1_1608 target sequence
VTVIEPSEYHYYQPGTVDIVGGIGKEEEMIKNTSDLLHARWIKNYVTKVDVENHTVFLKSGDKIDYDYVVIAAGVRNIKLEGFPE

SEQ ID NO: 33033 - protein, 85 aa, unidentified
  REGION 1..85: note = Description of Unknown:cds_NZ_WFIY01000004.1_cds_WP_155863738.1_1608 target sequence
WHTIEGAKLMKTMADNFEGKKIVVGYFGLIKCPAAPFELSFILKQRFPKAEITLINPVAQPPQIQKPMAEILGKIAKELGVQVIR

SEQ ID NO: 33034 - protein, 85 aa, unidentified
  REGION 1..85: note = Description of Unknown:cds_NZ_WFIY01000004.1_cds_WP_155863738.1_1608 target sequence
GFKIKEIDRQNKIIESENGEKINYDLAFIDTPIRAGEEFSNLVDNSGLIPVNRETLRFKDYDNVFAIGDITNITTPPKTGAIAHF

SEQ ID NO: 33035 - protein, 85 aa, unidentified
  REGION 1..85: note = Description of Unknown:hvTR_Q89743 target sequence
RHLPFHGMPLRVQMFCAFFIRSETTDKNKATPTITFMVSCCFVWVKRLFYRVGRIHHVQSLTYARPITALDSCLYVCCGYGEKLQ

SEQ ID NO: 33036 - protein, 85 aa, unidentified
  REGION 1..85: note = Description of Unknown:hvTR_Q89743 target sequence
PVGFVKSYVTNSQLDTLRVLLVGKDGAVYVHHMRAARLCRLASSTTEFTRRGLQRDAVTYEEDLELPDQRMCGTNARHLFDVIAA

SEQ ID NO: 33037 - protein, 85 aa, unidentified
  REGION 1..85: note = Description of Unknown:hvTR_Q89743 target sequence
AADEHNLLTVGGLCQTHAGVSCNLLETVGDPWTAVPAARMTLTVPQVQYRLWPEARRDLRRHLYAGHPLGPWLVCGVLSRERETQ

SEQ ID NO: 33038 - protein, 85 aa, unidentified
  REGION 1..85: note = Description of Unknown:hvTR_Q89743 target sequence
KPSPPIRTTVGNVPTPGPREVEIAWVVLTLAGPLLAFWPDTGKICRLANSFSTLWKMGPRAMRGHWTYSAPGRHLPGDAWPLCEH

SEQ ID NO: 33039 - protein, 84 aa, unidentified
  REGION 1..84: note = Description of Unknown:hvTR_Q89743 target sequence
PREVEIAWVVLTLAGPLLAFWPDTGKICRLANSFSTLWKMGPRAMRGHWTYSAPGRHLPGDAWPLCEHVRPQVGKLPRKRAYLD

SEQ ID NO: 33040 - protein, 85 aa, unidentified
  REGION 1..85: note = Description of Unknown:hvTR_Q89743 target sequence
NKATPTITFMVSCCFVWVKRLFYRVGRIHHVQSLTYARPITALDSCLYVCCGYGEKLQPVGFVKSYVTNSQLDTLRVLLVGKDGA

SEQ ID NO: 33041 - protein, 85 aa, unidentified
  REGION 1..85: note = Description of Unknown:hvTR_Q89743 target sequence
VYVHHMRAARLCRLASSTTEFTRRGLQRDAVTYEEDLELPDQRMCGTNARHLFDVIAAAADEHNLLTVGGLCQTHAGVSCNLLET

SEQ ID NO: 33042 - protein, 85 aa, unidentified
  REGION 1..85: note = Description of Unknown:hvTR_Q89743 target sequence
VGDPWTAVPAARMTLTVPQVQYRLWPEARRDLRRHLYAGHPLGPWLVCGVLSRERETQKPSPPIRTTVGNVPTPGPREVEIAWVV

SEQ ID NO: 33043 - protein, 85 aa, unidentified
  REGION 1..85: note = Description of Unknown:cds_NZ_WFIY01000004.1_cds_WP_155862433.1_176 target sequence
SKNSLDNLEEKALELLKKYPLCDSCLGRCFAKLGYRFTNKERGKAIKTYLVLELDRKIKDHELEDLNEIKEILFNMGKEYSGIFE

SEQ ID NO: 33044 - protein, 85 aa, unidentified
  REGION 1..85: note = Description of Unknown:cds_NZ_WFIY01000004.1_cds_WP_155862433.1_176 target sequence
IYFSNEKFQERTCYICNSEIDEIKEDFFKKALDFLKKQGKVKYVLGVKLSEQLSRLENEFIFSNGLIYYESIRNEIKREVGKMLA

SEQ ID NO: 33045 - protein, 85 aa, unidentified
  REGION 1..85: note = Description of Unknown:cds_NZ_WFIY01000004.1_cds_WP_155862433.1_176 target sequence
KEGYEPCIENPDVDIIYDLGTRSIYTISKKYKTLYLYSRLSRRVPISSWYGKDSLEEEFNGKEILVPFTEPSEVRILDEYPLIIS

SEQ ID NO: 33046 - protein, 85 aa, unidentified
  REGION 1..85: note = Description of Unknown:cds_NZ_WFIY01000004.1_cds_WP_155862433.1_176 target sequence
DEDREEIEVKGYFMRKIGKIAGREISAIMTAKPEKRMYSVLIYSKEEIGERVLGNIKLLTVEARDFKELKEKLKDIKGEIISIDL

SEQ ID NO: 33047 - protein, 84 aa, unidentified
  REGION 1..84: note = Description of Unknown:cds_NZ_WFIY01000004.1_cds_WP_155862433.1_176 target sequence
GKIAGREISAIMTAKPEKRMYSVLIYSKEEIGERVLGNIKLLTVEARDFKELKEKLKDIKGEIISIDLLESEGKHKILENKLTL

SEQ ID NO: 33048 - protein, 85 aa, unidentified
  REGION 1..85: note = Description of Unknown:cds_NZ_WFIY01000004.1_cds_WP_155862433.1_176 target sequence
RCFAKLGYRFTNKERGKAIKTYLVLELDRKIKDHELEDLNEIKEILFNMGKEYSGIFEIYFSNEKFQERTCYICNSEIDEIKEDF

SEQ ID NO: 33049 - protein, 85 aa, unidentified
  REGION 1..85: note = Description of Unknown:cds_NZ_WFIY01000004.1_cds_WP_155862433.1_176 target sequence
FKKALDFLKKQGKVKYVLGVKLSEQLSRLENEFIFSNGLIYYESIRNEIKREVGKMLAKEGYEPCIENPDVDIIYDLGTRSIYTI

SEQ ID NO: 33050 - protein, 85 aa, unidentified
  REGION 1..85: note = Description of Unknown:cds_NZ_WFIY01000004.1_cds_WP_155862433.1_176 target sequence
SKKYKTLYLYSRLSRRVPISSWYGKDSLEEEFNGKEILVPFTEPSEVRILDEYPLIISDEDREEIEVKGYFMRKIGKIAGREISA

SEQ ID NO: 33051 - protein, 85 aa, unidentified
  REGION 1..85: note = Description of Unknown:cds_NZ_WFIY01000004.1_cds_WP_155863041.1_934 target sequence
DISLYTFAIGFVIFWGLILAFRKRLEPKGFIIYPLFLMWKKSTRSLWFPRLASSKPFKIYEKIAMILGILAMIGGITMIYYVIFG

SEQ ID NO: 33052 - protein, 85 aa, unidentified
  REGION 1..85: note = Description of Unknown:cds_NZ_WFIY01000004.1_cds_WP_155863041.1_934 target sequence
LIFHPQSTTVRLEPIIPGVTISLSCLPYILLALGISVTLHELSHAVSATSNKINVKSGGFILLGIFPGAFVEPEDEEFMASSLPA

SEQ ID NO: 33053 - protein, 85 aa, unidentified
  REGION 1..85: note = Description of Unknown:cds_NZ_WFIY01000004.1_cds_WP_155863041.1_934 target sequence
KIKILAAGIAVNLILAGIFFPLAIFLPGYFSQGLLIEGVIPHSSAYNASIQAGDVILSVNGIRTNTFNSLTTALNQSTNYTIVLK

SEQ ID NO: 33054 - protein, 85 aa, unidentified
  REGION 1..85: note = Description of Unknown:cds_NZ_WFIY01000004.1_cds_WP_155863041.1_934 target sequence
APNGSTIVKHAEAKNHFLGVYVTYYFPPSVRPFLLFVTWMFIINFSLALFNAAPLIITDGGKIFTELLKKISSQNGEKMSMAIQA

SEQ ID NO: 33055 - protein, 84 aa, unidentified
  REGION 1..84: note = Description of Unknown:cds_NZ_WFIY01000004.1_cds_WP_155863041.1_934 target sequence
LGVYVTYYFPPSVRPFLLFVTWMFIINFSLALFNAAPLIITDGGKIFTELLKKISSQNGEKMSMAIQAFLLMSLVYAIMLSITA

SEQ ID NO: 33056 - protein, 85 aa, unidentified
  REGION 1..85: note = Description of Unknown:cds_NZ_WFIY01000004.1_cds_WP_155863041.1_934 target sequence
KGFIIYPLFLMWKKSTRSLWFPRLASSKPFKIYEKIAMILGILAMIGGITMIYYVIFGLIFHPQSTTVRLEPIIPGVTISLSCLP

SEQ ID NO: 33057 - protein, 85 aa, unidentified
  REGION 1..85: note = Description of Unknown:cds_NZ_WFIY01000004.1_cds_WP_155863041.1_934 target sequence
YILLALGISVTLHELSHAVSATSNKINVKSGGFILLGIFPGAFVEPEDEEFMASSLPAKIKILAAGIAVNLILAGIFFPLAIFLP

SEQ ID NO: 33058 - protein, 85 aa, unidentified
  REGION 1..85: note = Description of Unknown:cds_NZ_WFIY01000004.1_cds_WP_155863041.1_934 target sequence
GYFSQGLLIEGVIPHSSAYNASIQAGDVILSVNGIRTNTFNSLTTALNQSTNYTIVLKAPNGSTIVKHAEAKNHFLGVYVTYYFP

SEQ ID NO: 33059 - protein, 85 aa, unidentified
  REGION 1..85: note = Description of Unknown:cds_NZ_WFIY01000004.1_cds_WP_155864194.1_2156 target sequence
LMRYWGRKPLKLIDELMNDVEGTVVDPFGGSGTIILSALKHDNKGIYLDINPYAWLVAFVNIVKIDAEEFMSKGEEVLENLPEVR

SEQ ID NO: 33060 - protein, 85 aa, unidentified
  REGION 1..85: note = Description of Unknown:cds_NZ_WFIY01000004.1_cds_WP_155864194.1_2156 target sequence
KRALRNDYLYYPNGKPFWKKRNVERVSQFFSPGNFRKLYSILKAIDNVKTSPEVKISLYGAFCSSLFKASKMNRKNAGSWGVPSY

SEQ ID NO: 33061 - protein, 85 aa, unidentified
  REGION 1..85: note = Description of Unknown:cds_NZ_WFIY01000004.1_cds_WP_155864194.1_2156 target sequence
WIPERHDETDALEAFSSEVKRFYSYFKRNKGYELHQDVELMIKNALSFKYDKDLILFTDPPFFDEVQYMELSFFYWAWLRESKFR

SEQ ID NO: 33062 - protein, 85 aa, unidentified
  REGION 1..85: note = Description of Unknown:cds_NZ_WFIY01000004.1_cds_WP_155864194.1_2156 target sequence
DVAKEILGEDISFKMHYEMIVNPKRGINYTEYLKLLENFIVKTRKMKKKYLLFHYDKDELKQRVIMLAKEKWSRIKIEDIEIINQ

SEQ ID NO: 33063 - protein, 84 aa, unidentified
  REGION 1..84: note = Description of Unknown:cds_NZ_WFIY01000004.1_cds_WP_155864194.1_2156 target sequence
EMIVNPKRGINYTEYLKLLENFIVKTRKMKKKYLLFHYDKDELKQRVIMLAKEKWSRIKIEDIEIINQRNIGHKGGKKYILIYS

SEQ ID NO: 33064 - protein, 85 aa, unidentified
  REGION 1..85: note = Description of Unknown:cds_NZ_WFIY01000004.1_cds_WP_155864194.1_2156 target sequence
FGGSGTIILSALKHDNKGIYLDINPYAWLVAFVNIVKIDAEEFMSKGEEVLENLPEVRKRALRNDYLYYPNGKPFWKKRNVERVS

SEQ ID NO: 33065 - protein, 85 aa, unidentified
  REGION 1..85: note = Description of Unknown:cds_NZ_WFIY01000004.1_cds_WP_155864194.1_2156 target sequence
QFFSPGNFRKLYSILKAIDNVKTSPEVKISLYGAFCSSLFKASKMNRKNAGSWGVPSYWIPERHDETDALEAFSSEVKRFYSYFK

SEQ ID NO: 33066 - protein, 85 aa, unidentified
  REGION 1..85: note = Description of Unknown:cds_NZ_WFIY01000004.1_cds_WP_155864194.1_2156 target sequence
RNKGYELHQDVELMIKNALSFKYDKDLILFTDPPFFDEVQYMELSFFYWAWLRESKFRDVAKEILGEDISFKMHYEMIVNPKRGI

SEQ ID NO: 33067 - protein, 85 aa, unidentified
  REGION 1..85: note = Description of Unknown:cds_NZ_WFIY01000004.1_cds_WP_155864337.1_2350 target sequence
PSLNEIYNVLKGKEKLNYDYRSFSNDGMYKAFIGLMDRVREGVCTPFVLKEYVVVTCPRKEESYVIGVDGNKIFVLKPRTMISDN

SEQ ID NO: 33068 - protein, 85 aa, unidentified
  REGION 1..85: note = Description of Unknown:cds_NZ_WFIY01000004.1_cds_WP_155864337.1_2350 target sequence
STDELVRRTIGFDKFIGELNYSLPSGFDSLRVRVQGEIVFDFKAYRNEDEMISDIAISTKRKLEEVALTKASNILSIMLDNHIEV

SEQ ID NO: 33069 - protein, 85 aa, unidentified
  REGION 1..85: note = Description of Unknown:cds_NZ_WFIY01000004.1_cds_WP_155864337.1_2350 target sequence
VDNKSLALQSIDKDELKFIEMLLNNTVKRRVDEGNRKVLVFDSPLVNISVNDVLDVIRRVKKPESVEVEHGSHSIYFYSVFPLKL

SEQ ID NO: 33070 - protein, 85 aa, unidentified
  REGION 1..85: note = Description of Unknown:cds_NZ_WFIY01000004.1_cds_WP_155864337.1_2350 target sequence
KTRMSVFVGQIPVMVNLPSLDDQEDFPIGLDIISRINLILWDDAYYLPGGQYVTVSHPEHGEVKIKVDQPLKLTIREIDAERELH

SEQ ID NO: 33071 - protein, 84 aa, unidentified
  REGION 1..84: note = Description of Unknown:cds_NZ_WFIY01000004.1_cds_WP_155864337.1_2350 target sequence
PSLDDQEDFPIGLDIISRINLILWDDAYYLPGGQYVTVSHPEHGEVKIKVDQPLKLTIREIDAERELHYVGAERERRSHHFLEI

SEQ ID NO: 33072 - protein, 85 aa, unidentified
  REGION 1..85: note = Description of Unknown:cds_NZ_WFIY01000004.1_cds_WP_155864337.1_2350 target sequence
MYKAFIGLMDRVREGVCTPFVLKEYVVVTCPRKEESYVIGVDGNKIFVLKPRTMISDNSTDELVRRTIGFDKFIGELNYSLPSGF

SEQ ID NO: 33073 - protein, 85 aa, unidentified
  REGION 1..85: note = Description of Unknown:cds_NZ_WFIY01000004.1_cds_WP_155864337.1_2350 target sequence
DSLRVRVQGEIVFDFKAYRNEDEMISDIAISTKRKLEEVALTKASNILSIMLDNHIEVVDNKSLALQSIDKDELKFIEMLLNNTV

SEQ ID NO: 33074 - protein, 85 aa, unidentified
  REGION 1..85: note = Description of Unknown:cds_NZ_WFIY01000004.1_cds_WP_155864337.1_2350 target sequence
KRRVDEGNRKVLVFDSPLVNISVNDVLDVIRRVKKPESVEVEHGSHSIYFYSVFPLKLKTRMSVFVGQIPVMVNLPSLDDQEDFP

SEQ ID NO: 33075 - protein, 85 aa, unidentified
  REGION 1..85: note = Description of Unknown:cds_NC_010495.1_cds_YP_001742054.1_17 target sequence
EKIIFTKDLVANSAVVADQWKHLTIDRKVFCNAEAELAKTYGVNATALVTKDYWREVDNVTTRVFRNEAGQDMMADLMGIAANIN

SEQ ID NO: 33076 - protein, 85 aa, unidentified
  REGION 1..85: note = Description of Unknown:cds_NC_010495.1_cds_YP_001742054.1_17 target sequence
IGKTVAISRIASDAGKVVRTLSGQEPEDLDKTRYDYTGDVIPIFKTGYSREWRELLGMQSEGFDPLLDDQANVTFNLRSDMAQYL

SEQ ID NO: 33077 - protein, 85 aa, unidentified
  REGION 1..85: note = Description of Unknown:cds_NC_010495.1_cds_YP_001742054.1_17 target sequence
LTGDQTLNVNGVYTGYGITNHPNTVQVDLSTDSPGLNIDLQTATPDEIVTFFNQDFQAILDAQNVFEQVTLWVSPAVRRSFMRPY

SEQ ID NO: 33078 - protein, 85 aa, unidentified
  REGION 1..85: note = Description of Unknown:cds_NC_010495.1_cds_YP_001742054.1_17 target sequence
SNAAGFKGGTVEQYITQFGNGRIGKIGTNFLLTGNHFVGYVRNDMYIRPRVAQPVSTYAAARDNPHDNFNFMVWSAFGLQIRKDF

SEQ ID NO: 33079 - protein, 84 aa, unidentified
  REGION 1..84: note = Description of Unknown:cds_NC_010495.1_cds_YP_001742054.1_17 target sequence
FGNGRIGKIGTNFLLTGNHFVGYVRNDMYIRPRVAQPVSTYAAARDNPHDNFNFMVWSAFGLQIRKDFTGKSKVFNGYGNQAAK

SEQ ID NO: 33080 - protein, 85 aa, unidentified
  REGION 1..85: note = Description of Unknown:cds_NC_010495.1_cds_YP_001742054.1_17 target sequence
KVFCNAEAELAKTYGVNATALVTKDYWREVDNVTTRVFRNEAGQDMMADLMGIAANINIGKTVAISRIASDAGKVVRTLSGQEPE

SEQ ID NO: 33081 - protein, 85 aa, unidentified
  REGION 1..85: note = Description of Unknown:cds_NC_010495.1_cds_YP_001742054.1_17 target sequence
DLDKTRYDYTGDVIPIFKTGYSREWRELLGMQSEGFDPLLDDQANVTFNLRSDMAQYLLTGDQTLNVNGVYTGYGITNHPNTVQV

SEQ ID NO: 33082 - protein, 85 aa, unidentified
  REGION 1..85: note = Description of Unknown:cds_NC_010495.1_cds_YP_001742054.1_17 target sequence
DLSTDSPGLNIDLQTATPDEIVTFFNQDFQAILDAQNVFEQVTLWVSPAVRRSFMRPYSNAAGFKGGTVEQYITQFGNGRIGKIG

SEQ ID NO: 33083 - protein, 85 aa, unidentified
  REGION 1..85: note = Description of Unknown:cds_NZ_WFIY01000004.1_cds_WP_155862464.1_217 target sequence
DEELPPNPRDDEKAFVGPIMINFSIPFINIDTVKLSDEDLNIAQLPQLLKLSNVKKVLWKYKAKIIGVDGSEILAEGEDNIKEPF

SEQ ID NO: 33084 - protein, 85 aa, unidentified
  REGION 1..85: note = Description of Unknown:cds_NZ_WFIY01000004.1_cds_WP_155862464.1_217 target sequence
IVLTPLEINAIPWSFTKIDEKALINLVKDLIPCDEGDGYFNPSPWERKALIEERWYYFRPGEITGNLNIRTQGYELAGYKIESNF

SEQ ID NO: 33085 - protein, 85 aa, unidentified
  REGION 1..85: note = Description of Unknown:cds_NZ_WFIY01000004.1_cds_WP_155862464.1_217 target sequence
YNPKFYFLNPFYIEESRYPISASSFVSLQSDSALSIISSDPFNMKFNLGKIEIESERPVYIIKSRRWNEIKPARISWDLKNDIIR

SEQ ID NO: 33086 - protein, 85 aa, unidentified
  REGION 1..85: note = Description of Unknown:cds_NZ_WFIY01000004.1_cds_WP_155862464.1_217 target sequence
LDCKPKYNVSIYKIEPSSVIPLYFDYKNGELSLILENFSDDDIISTLIFSGRIESVKADGEELITEFDRVRIPIRRWGIKNVRIK

SEQ ID NO: 33087 - protein, 84 aa, unidentified
  REGION 1..84: note = Description of Unknown:cds_NZ_WFIY01000004.1_cds_WP_155862464.1_217 target sequence
SSVIPLYFDYKNGELSLILENFSDDDIISTLIFSGRIESVKADGEELITEFDRVRIPIRRWGIKNVRIKIRRLIEPYLKRKIIA

SEQ ID NO: 33088 - protein, 85 aa, unidentified
  REGION 1..85: note = Description of Unknown:cds_NZ_WFIY01000004.1_cds_WP_155862464.1_217 target sequence
INIDTVKLSDEDLNIAQLPQLLKLSNVKKVLWKYKAKIIGVDGSEILAEGEDNIKEPFIVLTPLEINAIPWSFTKIDEKALINLV

SEQ ID NO: 33089 - protein, 85 aa, unidentified
  REGION 1..85: note = Description of Unknown:cds_NZ_WFIY01000004.1_cds_WP_155862464.1_217 target sequence
KDLIPCDEGDGYFNPSPWERKALIEERWYYFRPGEITGNLNIRTQGYELAGYKIESNFYNPKFYFLNPFYIEESRYPISASSFVS

SEQ ID NO: 33090 - protein, 85 aa, unidentified
  REGION 1..85: note = Description of Unknown:cds_NZ_WFIY01000004.1_cds_WP_155862464.1_217 target sequence
LQSDSALSIISSDPFNMKFNLGKIEIESERPVYIIKSRRWNEIKPARISWDLKNDIIRLDCKPKYNVSIYKIEPSSVIPLYFDYK

SEQ ID NO: 33091 - protein, 85 aa, unidentified
  REGION 1..85: note = Description of Unknown:cds_NZ_WFIY01000004.1_cds_WP_155862616.1_395 target sequence
VSAIILAGGYATRLRPLSLTKPKALFPVLGKPILDYILEGLENAGIHNVYLSLRVMADKILSHVDGKNVTPIIEKEPLGDAGALK

SEQ ID NO: 33092 - protein, 85 aa, unidentified
  REGION 1..85: note = Description of Unknown:cds_NZ_WFIY01000004.1_cds_WP_155862616.1_395 target sequence
FVSTQAKLDDVVIVIYGDIYSEVNFLDLLKFHAQSECPVTLLATKVNNPRRYGVLLTEDNKLIEIIEKPSNPISNLINGGVYVFN

SEQ ID NO: 33093 - protein, 85 aa, unidentified
  REGION 1..85: note = Description of Unknown:cds_NZ_WFIY01000004.1_cds_WP_155862616.1_395 target sequence
KNILNFIQGPSISRNFLPKILEKYCVSVYKYDGIWADIGTPYDYMKLNFELLGKRFPRGYISNTAKVSERATLTPPYFISDGVII

SEQ ID NO: 33094 - protein, 85 aa, unidentified
  REGION 1..85: note = Description of Unknown:cds_NZ_WFIY01000004.1_cds_WP_155862616.1_395 target sequence
GEDSYIDSNSIIGKGSVIKNGVYIGESLLMENVLVSENSFIKGSIIADKCKIGKWNHIREETIFGEEVITHDGILINKKNIILPN

SEQ ID NO: 33095 - protein, 84 aa, unidentified
  REGION 1..84: note = Description of Unknown:cds_NZ_WFIY01000004.1_cds_WP_155862616.1_395 target sequence
VIKNGVYIGESLLMENVLVSENSFIKGSIIADKCKIGKWNHIREETIFGEEVITHDGILINKKNIILPNKEVTESIYEEDKIIL

SEQ ID NO: 33096 - protein, 85 aa, unidentified
  REGION 1..85: note = Description of Unknown:cds_NZ_WFIY01000004.1_cds_WP_155862616.1_395 target sequence
VLGKPILDYILEGLENAGIHNVYLSLRVMADKILSHVDGKNVTPIIEKEPLGDAGALKFVSTQAKLDDVVIVIYGDIYSEVNFLD

SEQ ID NO: 33097 - protein, 85 aa, unidentified
  REGION 1..85: note = Description of Unknown:cds_NZ_WFIY01000004.1_cds_WP_155862616.1_395 target sequence
LLKFHAQSECPVTLLATKVNNPRRYGVLLTEDNKLIEIIEKPSNPISNLINGGVYVFNKNILNFIQGPSISRNFLPKILEKYCVS

SEQ ID NO: 33098 - protein, 85 aa, unidentified
  REGION 1..85: note = Description of Unknown:cds_NZ_WFIY01000004.1_cds_WP_155862616.1_395 target sequence
VYKYDGIWADIGTPYDYMKLNFELLGKRFPRGYISNTAKVSERATLTPPYFISDGVIIGEDSYIDSNSIIGKGSVIKNGVYIGES

SEQ ID NO: 33099 - protein, 85 aa, unidentified
  REGION 1..85: note = Description of Unknown:cds_NZ_WFIY01000004.1_cds_WP_155862844.1_677 target sequence
LTISLKIKTSHKYVSRNDRNEVGILIYIVPEKYSVNANIRYIIAVDNSPSMKDHNKFETAVNSAQTLLSHIPSANNVIIILFSNH

SEQ ID NO: 33100 - protein, 85 aa, unidentified
  REGION 1..85: note = Description of Unknown:cds_NZ_WFIY01000004.1_cds_WP_155862844.1_677 target sequence
PEIIYNGPGGNQVSIPRKFGGTTRLHEAIRKILEIASDGIPTKAILLTDGKPTDKTNVSDYEALQIPTNLTFISIGIGKDYNEVI

SEQ ID NO: 33101 - protein, 85 aa, unidentified
  REGION 1..85: note = Description of Unknown:cds_NZ_WFIY01000004.1_cds_WP_155862844.1_677 target sequence
LKRLSDKSAGVFYHIEDVSQMPNVLEEQRTTSTYALNLTLDLPQGFYPFNYELPIFIPIVDKLIAIYGTMIIDPGNLPVNLTFTA

SEQ ID NO: 33102 - protein, 85 aa, unidentified
  REGION 1..85: note = Description of Unknown:cds_NZ_WFIY01000004.1_cds_WP_155862844.1_677 target sequence
NYTDPVDSQYKVISSTITLERAEDDIVRSTINSDVLAEIKYYRLLKEYGDMLAKGKDTTRIMAELMQTAKETGNQALIEETQKLT

SEQ ID NO: 33103 - protein, 84 aa, unidentified
  REGION 1..84: note = Description of Unknown:cds_NZ_WFIY01000004.1_cds_WP_155862844.1_677 target sequence
TLERAEDDIVRSTINSDVLAEIKYYRLLKEYGDMLAKGKDTTRIMAELMQTAKETGNQALIEETQKLTGYAKADLSEVTKKMRS

SEQ ID NO: 33104 - protein, 85 aa, unidentified
  REGION 1..85: note = Description of Unknown:cds_NZ_WFIY01000004.1_cds_WP_155862844.1_677 target sequence
IVPEKYSVNANIRYIIAVDNSPSMKDHNKFETAVNSAQTLLSHIPSANNVIIILFSNHPEIIYNGPGGNQVSIPRKFGGTTRLHE

SEQ ID NO: 33105 - protein, 85 aa, unidentified
  REGION 1..85: note = Description of Unknown:cds_NZ_WFIY01000004.1_cds_WP_155862844.1_677 target sequence
AIRKILEIASDGIPTKAILLTDGKPTDKTNVSDYEALQIPTNLTFISIGIGKDYNEVILKRLSDKSAGVFYHIEDVSQMPNVLEE

SEQ ID NO: 33106 - protein, 85 aa, unidentified
  REGION 1..85: note = Description of Unknown:cds_NZ_WFIY01000004.1_cds_WP_155862844.1_677 target sequence
QRTTSTYALNLTLDLPQGFYPFNYELPIFIPIVDKLIAIYGTMIIDPGNLPVNLTFTANYTDPVDSQYKVISSTITLERAEDDIV

SEQ ID NO: 33107 - protein, 85 aa, unidentified
  REGION 1..85: note = Description of Unknown:cds_NZ_WFIY01000004.1_cds_WP_155863563.1_1489 target sequence
RSTQVGIILFIIILIVVAAIGIYLNSEISALSSSYNSLASKYNALKSESYTMNSSYASLKANYTELSNNYNELKSYFTALLEHYE

SEQ ID NO: 33108 - protein, 85 aa, unidentified
  REGION 1..85: note = Description of Unknown:cds_NZ_WFIY01000004.1_cds_WP_155863563.1_1489 target sequence
SLNESFYGNKSMLLSELNLEDGYATAYQVLEYLASSNAKEISNMFCPNVTGFISVGKINGSFSGIVNVNKMFSQVFAYPIVRAFL

SEQ ID NO: 33109 - protein, 85 aa, unidentified
  REGION 1..85: note = Description of Unknown:cds_NZ_WFIY01000004.1_cds_WP_155863563.1_1489 target sequence
CCGVVYNTSHCLIISALVKYCNVNSTGGTTFIYVLYHMTLSNQSMFTWKISSIDVYNYFNEIQYQMALDGLTYIHAICSKDTPVI

SEQ ID NO: 33110 - protein, 85 aa, unidentified
  REGION 1..85: note = Description of Unknown:cds_NZ_WFIY01000004.1_cds_WP_155863563.1_1489 target sequence
SELGIGQFPSYVFFCTNLPLAGNYTVSELNSLLKNVTTFNIRIDYYNFTAVGNCLTGVIYAYVKMIYNGHTFCGELKISEHAKVQ

SEQ ID NO: 33111 - protein, 84 aa, unidentified
  REGION 1..84: note = Description of Unknown:cds_NZ_WFIY01000004.1_cds_WP_155863563.1_1489 target sequence
NLPLAGNYTVSELNSLLKNVTTFNIRIDYYNFTAVGNCLTGVIYAYVKMIYNGHTFCGELKISEHAKVQANGLPEIYQVSFCKM

SEQ ID NO: 33112 - protein, 85 aa, unidentified
  REGION 1..85: note = Description of Unknown:cds_NZ_WFIY01000004.1_cds_WP_155863563.1_1489 target sequence
ISALSSSYNSLASKYNALKSESYTMNSSYASLKANYTELSNNYNELKSYFTALLEHYESLNESFYGNKSMLLSELNLEDGYATAY

SEQ ID NO: 33113 - protein, 85 aa, unidentified
  REGION 1..85: note = Description of Unknown:cds_NZ_WFIY01000004.1_cds_WP_155863563.1_1489 target sequence
QVLEYLASSNAKEISNMFCPNVTGFISVGKINGSFSGIVNVNKMFSQVFAYPIVRAFLCCGVVYNTSHCLIISALVKYCNVNSTG

SEQ ID NO: 33114 - protein, 85 aa, unidentified
  REGION 1..85: note = Description of Unknown:cds_NZ_WFIY01000004.1_cds_WP_155863563.1_1489 target sequence
GTTFIYVLYHMTLSNQSMFTWKISSIDVYNYFNEIQYQMALDGLTYIHAICSKDTPVISELGIGQFPSYVFFCTNLPLAGNYTVS

SEQ ID NO: 33115 - protein, 85 aa, unidentified
  REGION 1..85: note = Description of Unknown:cds_NZ_WFIY01000004.1_cds_WP_155862411.1_151 target sequence
KAIVLAAGKGEGLRPYTEKEQKEAITILGKAIISHVLYGLKKAGIDEVVIVTNEHEKQIQEAINIDIPFETVRQKRSGITGAVLD

SEQ ID NO: 33116 - protein, 85 aa, unidentified
  REGION 1..85: note = Description of Unknown:cds_NZ_WFIY01000004.1_cds_WP_155862411.1_151 target sequence
GMDKIPDDEFLLAFGDIIAEPEFYMNLMNSYITGNSKAVFSLVPVSEGMQTYGLARIVDNRIEIVNEGSTLALAGAYIIPKGDFT

SEQ ID NO: 33117 - protein, 85 aa, unidentified
  REGION 1..85: note = Description of Unknown:cds_NZ_WFIY01000004.1_cds_WP_155862411.1_151 target sequence
DILEYFKKISPFSRYFIWSGKWIDIGYPEDLINAIEVLLSDLNNSIISDKAEISKTAVIGKKVIIEDNAIIDDYAVIKGPAYIGK

SEQ ID NO: 33118 - protein, 85 aa, unidentified
  REGION 1..85: note = Description of Unknown:cds_NZ_WFIY01000004.1_cds_WP_155862411.1_151 target sequence
NAYIGNYSLIRDYSSIESEAKIGAYCEVTHSLVEPRAEIGSKSYLTYTIVGRGAKIGASVITVSYPANPVRGRERKLGALISPNE

SEQ ID NO: 33119 - protein, 84 aa, unidentified
  REGION 1..84: note = Description of Unknown:cds_NZ_WFIY01000004.1_cds_WP_155862411.1_151 target sequence
IESEAKIGAYCEVTHSLVEPRAEIGSKSYLTYTIVGRGAKIGASVITVSYPANPVRGRERKLGALISPNEEIYHGQIIGPNYRK

SEQ ID NO: 33120 - protein, 85 aa, unidentified
  REGION 1..85: note = Description of Unknown:cds_NZ_WFIY01000004.1_cds_WP_155862411.1_151 target sequence
LGKAIISHVLYGLKKAGIDEVVIVTNEHEKQIQEAINIDIPFETVRQKRSGITGAVLDGMDKIPDDEFLLAFGDIIAEPEFYMNL

SEQ ID NO: 33121 - protein, 85 aa, unidentified
  REGION 1..85: note = Description of Unknown:cds_NZ_WFIY01000004.1_cds_WP_155862411.1_151 target sequence
MNSYITGNSKAVFSLVPVSEGMQTYGLARIVDNRIEIVNEGSTLALAGAYIIPKGDFTDILEYFKKISPFSRYFIWSGKWIDIGY

SEQ ID NO: 33122 - protein, 85 aa, unidentified
  REGION 1..85: note = Description of Unknown:cds_NZ_WFIY01000004.1_cds_WP_155862411.1_151 target sequence
PEDLINAIEVLLSDLNNSIISDKAEISKTAVIGKKVIIEDNAIIDDYAVIKGPAYIGKNAYIGNYSLIRDYSSIESEAKIGAYCE

SEQ ID NO: 33123 - protein, 85 aa, unidentified
  REGION 1..85: note = Description of Unknown:cds_NZ_WFIY01000004.1_cds_WP_155862533.1_298 target sequence
TDVLVYDSSMIKIDRYYEKNLVDLVAEVMSKFNSQIKPDAVIIANAYSETTVNQVLLASKISSMLGFSGFTIRIENGDASGGAAI

SEQ ID NO: 33124 - protein, 85 aa, unidentified
  REGION 1..85: note = Description of Unknown:cds_NZ_WFIY01000004.1_cds_WP_155862533.1_298 target sequence
ETAYYMIKSGLVKSILLIGVEKMGDFPTSYLNEIIAENLDEKFGYREGLTLQPFAALQMKQYMKTYGVDYDYFTQWPLAMHKYGS

SEQ ID NO: 33125 - protein, 85 aa, unidentified
  REGION 1..85: note = Description of Unknown:cds_NZ_WFIY01000004.1_cds_WP_155862533.1_298 target sequence
ENPFAYLKFQVDKKTIEESQIISEPLRLFDTSPRADGAAAVLLTNEEFKPEIKVKITDVSSAVSEFTTLSMPAVRQAYSRFREYK

SEQ ID NO: 33126 - protein, 85 aa, unidentified
  REGION 1..85: note = Description of Unknown:cds_NZ_WFIY01000004.1_cds_WP_155862533.1_298 target sequence
ADFMEIHDSYSINAALILEEIGFEKGKSLNMLDSIQVNYSGGLKSRGYPGGATGIYQLAESFMQLAGSFPGKRAQGEKGVVISTD

SEQ ID NO: 33127 - protein, 84 aa, unidentified
  REGION 1..84: note = Description of Unknown:cds_NZ_WFIY01000004.1_cds_WP_155862533.1_298 target sequence
LILEEIGFEKGKSLNMLDSIQVNYSGGLKSRGYPGGATGIYQLAESFMQLAGSFPGKRAQGEKGVVISTDDLGTSAYVIGLKRC

SEQ ID NO: 33128 - protein, 85 aa, unidentified
  REGION 1..85: note = Description of Unknown:cds_NZ_WFIY01000004.1_cds_WP_155862533.1_298 target sequence
VMSKFNSQIKPDAVIIANAYSETTVNQVLLASKISSMLGFSGFTIRIENGDASGGAAIETAYYMIKSGLVKSILLIGVEKMGDFP

SEQ ID NO: 33129 - protein, 85 aa, unidentified
  REGION 1..85: note = Description of Unknown:cds_NZ_WFIY01000004.1_cds_WP_155862533.1_298 target sequence
TSYLNEIIAENLDEKFGYREGLTLQPFAALQMKQYMKTYGVDYDYFTQWPLAMHKYGSENPFAYLKFQVDKKTIEESQIISEPLR

SEQ ID NO: 33130 - protein, 85 aa, unidentified
  REGION 1..85: note = Description of Unknown:cds_NZ_WFIY01000004.1_cds_WP_155862533.1_298 target sequence
LFDTSPRADGAAAVLLTNEEFKPEIKVKITDVSSAVSEFTTLSMPAVRQAYSRFREYKADFMEIHDSYSINAALILEEIGFEKGK

SEQ ID NO: 33131 - protein, 85 aa, unidentified
  REGION 1..85: note = Description of Unknown:cds_NZ_WFIY01000004.1_cds_WP_155863047.1_942 target sequence
LEDKLSLITRNVEEIVTLDDLKKKLENNEKLKGYIGFEPSGLFHIGWLIWAQKVKDLSNAGVNMTLLMATWHAWINDKLNGDMEL

SEQ ID NO: 33132 - protein, 85 aa, unidentified
  REGION 1..85: note = Description of Unknown:cds_NZ_WFIY01000004.1_cds_WP_155863047.1_942 target sequence
IKLAGKYAIDVLSAYGLDMSKINVVDAEDMVKDKVYWELVLKVAKNTTLARMKRALTIMGRKSDEAELDTSKLFYPAMQVSDIFY

SEQ ID NO: 33133 - protein, 85 aa, unidentified
  REGION 1..85: note = Description of Unknown:cds_NZ_WFIY01000004.1_cds_WP_155863047.1_942 target sequence
LDVDIALGGTDQRKAHMLAREIAEKFHRKKVIAIHTPLLVGLKGGQRMGNVEEDDLLSEIKMSKSKPENAIFINDSPEEVTAKIM

SEQ ID NO: 33134 - protein, 85 aa, unidentified
  REGION 1..85: note = Description of Unknown:cds_NZ_WFIY01000004.1_cds_WP_155863047.1_942 target sequence
RAYCPSRVVELNPILQINKYIIFTNVNKLKVERDIKYGGDIEFNSYEELEKAFAEGKLHPMDLKMATARKLNEILEPIRKKLNTP

SEQ ID NO: 33135 - protein, 84 aa, unidentified
  REGION 1..84: note = Description of Unknown:cds_NZ_WFIY01000004.1_cds_WP_155863047.1_942 target sequence
INKYIIFTNVNKLKVERDIKYGGDIEFNSYEELEKAFAEGKLHPMDLKMATARKLNEILEPIRKKLNTPEYEELVSKISKNVSR

SEQ ID NO: 33136 - protein, 85 aa, unidentified
  REGION 1..85: note = Description of Unknown:cds_NZ_WFIY01000004.1_cds_WP_155863047.1_942 target sequence
NEKLKGYIGFEPSGLFHIGWLIWAQKVKDLSNAGVNMTLLMATWHAWINDKLNGDMELIKLAGKYAIDVLSAYGLDMSKINVVDA

SEQ ID NO: 33137 - protein, 85 aa, unidentified
  REGION 1..85: note = Description of Unknown:cds_NZ_WFIY01000004.1_cds_WP_155863047.1_942 target sequence
EDMVKDKVYWELVLKVAKNTTLARMKRALTIMGRKSDEAELDTSKLFYPAMQVSDIFYLDVDIALGGTDQRKAHMLAREIAEKFH

SEQ ID NO: 33138 - protein, 85 aa, unidentified
  REGION 1..85: note = Description of Unknown:cds_NZ_WFIY01000004.1_cds_WP_155863047.1_942 target sequence
RKKVIAIHTPLLVGLKGGQRMGNVEEDDLLSEIKMSKSKPENAIFINDSPEEVTAKIMRAYCPSRVVELNPILQINKYIIFTNVN

SEQ ID NO: 33139 - protein, 85 aa, unidentified
  REGION 1..85: note = Description of Unknown:cds_NZ_WFIY01000004.1_cds_WP_155863122.1_1041 target sequence
LIKDFLTTLLYFVEEKGYPLPVAFKKTKEIKKVKGMNYDKLYEISRLLLLSYNSLKGKRSKKVDQFLQGNYEILLPSWAREELSR

SEQ ID NO: 33140 - protein, 85 aa, unidentified
  REGION 1..85: note = Description of Unknown:cds_NZ_WFIY01000004.1_cds_WP_155863122.1_1041 target sequence
YLDVEYLERSLRIKNTWVRINTLKADVDKVLKSLENQGVNFEVDKDVYYLIKVENESALKKTKEFANFEVIIQDKASVLTVESLE

SEQ ID NO: 33141 - protein, 85 aa, unidentified
  REGION 1..85: note = Description of Unknown:cds_NZ_WFIY01000004.1_cds_WP_155863122.1_1041 target sequence
VGKGDKIIDLSSAPGNKASQIMQLGENSVELFLADIDINRLKREVDLLKKMGVNMNKIHIIHQDSTNNSMLRSDKVLLDAPCSSS

SEQ ID NO: 33142 - protein, 85 aa, unidentified
  REGION 1..85: note = Description of Unknown:cds_NZ_WFIY01000004.1_cds_WP_155863122.1_1041 target sequence
GMISNEPAIMVNLTREKVTYYSQLQRKMIDEARKTINADYLIYAVCSLFPEEGEEHFMNLKTEKPKIPGERPYIDGVNGIRLFPH

SEQ ID NO: 33143 - protein, 84 aa, unidentified
  REGION 1..84: note = Description of Unknown:cds_NZ_WFIY01000004.1_cds_WP_155863122.1_1041 target sequence
KVTYYSQLQRKMIDEARKTINADYLIYAVCSLFPEEGEEHFMNLKTEKPKIPGERPYIDGVNGIRLFPHINFTEGFFITKILLQ

SEQ ID NO: 33144 - protein, 85 aa, unidentified
  REGION 1..85: note = Description of Unknown:cds_NZ_WFIY01000004.1_cds_WP_155863122.1_1041 target sequence
KEIKKVKGMNYDKLYEISRLLLLSYNSLKGKRSKKVDQFLQGNYEILLPSWAREELSRYLDVEYLERSLRIKNTWVRINTLKADV

SEQ ID NO: 33145 - protein, 85 aa, unidentified
  REGION 1..85: note = Description of Unknown:cds_NZ_WFIY01000004.1_cds_WP_155863122.1_1041 target sequence
DKVLKSLENQGVNFEVDKDVYYLIKVENESALKKTKEFANFEVIIQDKASVLTVESLEVGKGDKIIDLSSAPGNKASQIMQLGEN

SEQ ID NO: 33146 - protein, 85 aa, unidentified
  REGION 1..85: note = Description of Unknown:cds_NZ_WFIY01000004.1_cds_WP_155863122.1_1041 target sequence
SVELFLADIDINRLKREVDLLKKMGVNMNKIHIIHQDSTNNSMLRSDKVLLDAPCSSSGMISNEPAIMVNLTREKVTYYSQLQRK

SEQ ID NO: 33147 - protein, 85 aa, unidentified
  REGION 1..85: note = Description of Unknown:cds_NZ_WFIY01000004.1_cds_WP_155864453.1_1658 target sequence
RRILKAAILGATGLVGIEYVRMLSQHPYIKPAYLAGKGSVGKPYGEVVRWQTIGQIPKEVADMEVKPTDPKLMDDVDIVFSPLPQ

SEQ ID NO: 33148 - protein, 85 aa, unidentified
  REGION 1..85: note = Description of Unknown:cds_NZ_WFIY01000004.1_cds_WP_155864453.1_1658 target sequence
GAAGPIEEQFAKEGFPVISNSPDHRFDPDVPMLIPELNPHTISLIDEQRKKRDWKGFIVTTPLCTAQGAAIPLAPIFMNFKMTGA

SEQ ID NO: 33149 - protein, 85 aa, unidentified
  REGION 1..85: note = Description of Unknown:cds_NZ_WFIY01000004.1_cds_WP_155864453.1_1658 target sequence
YITTIQSLSGAGYPGIPSLDVVDNILPLGDKYDAKTIKEITRIFSEVKRNVNDPPLEEVALDATTHRIATIHGHYEVSYVTFKED

SEQ ID NO: 33150 - protein, 85 aa, unidentified
  REGION 1..85: note = Description of Unknown:cds_NZ_WFIY01000004.1_cds_WP_155864453.1_1658 target sequence
VNIEKIRETLENFRGEPQDLKLPTAPEKPIIVRNEDTRPQVYFDRWAGDPPGMSVVVGRLKQISNRTIRMVSLIHNTIRGAAGGG

SEQ ID NO: 33151 - protein, 84 aa, unidentified
  REGION 1..84: note = Description of Unknown:cds_NZ_WFIY01000004.1_cds_WP_155864453.1_1658 target sequence
EPQDLKLPTAPEKPIIVRNEDTRPQVYFDRWAGDPPGMSVVVGRLKQISNRTIRMVSLIHNTIRGAAGGGILTAELLIAKGYIE

SEQ ID NO: 33152 - protein, 85 aa, unidentified
  REGION 1..85: note = Description of Unknown:cds_NZ_WFIY01000004.1_cds_WP_155864453.1_1658 target sequence
YIKPAYLAGKGSVGKPYGEVVRWQTIGQIPKEVADMEVKPTDPKLMDDVDIVFSPLPQGAAGPIEEQFAKEGFPVISNSPDHRFD

SEQ ID NO: 33153 - protein, 85 aa, unidentified
  REGION 1..85: note = Description of Unknown:cds_NZ_WFIY01000004.1_cds_WP_155864453.1_1658 target sequence
PDVPMLIPELNPHTISLIDEQRKKRDWKGFIVTTPLCTAQGAAIPLAPIFMNFKMTGAYITTIQSLSGAGYPGIPSLDVVDNILP

SEQ ID NO: 33154 - protein, 85 aa, unidentified
  REGION 1..85: note = Description of Unknown:cds_NZ_WFIY01000004.1_cds_WP_155864453.1_1658 target sequence
LGDKYDAKTIKEITRIFSEVKRNVNDPPLEEVALDATTHRIATIHGHYEVSYVTFKEDVNIEKIRETLENFRGEPQDLKLPTAPE

SEQ ID NO: 33155 - protein, 85 aa, unidentified
  REGION 1..85: note = Description of Unknown:cds_NZ_WFIY01000001.1_cds_WP_155862275.1_2385 target sequence
KIGVFEPIPVNLSIIGGGGVVLRNVLAILKKRGYIVHLFSPFTDKATSTLLSNVTDKIISFNFKKLQNDLLIYGIARLSTILFYL

SEQ ID NO: 33156 - protein, 85 aa, unidentified
  REGION 1..85: note = Description of Unknown:cds_NZ_WFIY01000001.1_cds_WP_155862275.1_2385 target sequence
LHNFFNYSYDYTICNTYDNLIGSFDLGYVHFPARKYFSLKDIKKVKSITELIDFITSAKFGESTRIIAANSSFTMKRLKEKINRS

SEQ ID NO: 33157 - protein, 85 aa, unidentified
  REGION 1..85: note = Description of Unknown:cds_NZ_WFIY01000001.1_cds_WP_155862275.1_2385 target sequence
AIVLYPPVKIVECENVNEKDDLVVSVGRIVRDKNYDLVINVAKNFSQLKFIIIGRVQDSKYYNELLSRSPSNVYFLTNASEEDKR

SEQ ID NO: 33158 - protein, 85 aa, unidentified
  REGION 1..85: note = Description of Unknown:cds_NZ_WFIY01000001.1_cds_WP_155862275.1_2385 target sequence
KILCKAKVIFHAKIDEPFGISVVEGMSAGAVPVVHKSGGTWLDIVEGGRYGYGYLTEEEAIEALKQALSDYSLRREVVEKAKLFD

SEQ ID NO: 33159 - protein, 84 aa, unidentified
  REGION 1..84: note = Description of Unknown:cds_NZ_WFIY01000001.1_cds_WP_155862275.1_2385 target sequence
EPFGISVVEGMSAGAVPVVHKSGGTWLDIVEGGRYGYGYLTEEEAIEALKQALSDYSLRREVVEKAKLFDVKNFEDNFLKITNL

SEQ ID NO: 33160 - protein, 85 aa, unidentified
  REGION 1..85: note = Description of Unknown:cds_NZ_WFIY01000001.1_cds_WP_155862275.1_2385 target sequence
ILKKRGYIVHLFSPFTDKATSTLLSNVTDKIISFNFKKLQNDLLIYGIARLSTILFYLLHNFFNYSYDYTICNTYDNLIGSFDLG

SEQ ID NO: 33161 - protein, 85 aa, unidentified
  REGION 1..85: note = Description of Unknown:cds_NZ_WFIY01000001.1_cds_WP_155862275.1_2385 target sequence
YVHFPARKYFSLKDIKKVKSITELIDFITSAKFGESTRIIAANSSFTMKRLKEKINRSAIVLYPPVKIVECENVNEKDDLVVSVG

SEQ ID NO: 33162 - protein, 85 aa, unidentified
  REGION 1..85: note = Description of Unknown:cds_NZ_WFIY01000001.1_cds_WP_155862275.1_2385 target sequence
RIVRDKNYDLVINVAKNFSQLKFIIIGRVQDSKYYNELLSRSPSNVYFLTNASEEDKRKILCKAKVIFHAKIDEPFGISVVEGMS

SEQ ID NO: 33163 - protein, 85 aa, unidentified
  REGION 1..85: note = Description of Unknown:cds_NZ_WFIY01000001.1_cds_WP_155862276.1_2386 target sequence
KVLLVAFGDINDPKNGYLIRVSTIYKCLSKEHEATVIQFVNSKASNNKEFINVEIGKNYFSYAVKIIFKSLFSIKLIKSHDKVVV

SEQ ID NO: 33164 - protein, 85 aa, unidentified
  REGION 1..85: note = Description of Unknown:cds_NZ_WFIY01000001.1_cds_WP_155862276.1_2386 target sequence
EGSIFLPFIITAKLLRKNVIYDTHGSIVEVSKGLKGIKNFIFRRVIGGLLDSLSTKLSDVVIAVSEDDAQIFRKYTRNKRKVMVV

SEQ ID NO: 33165 - protein, 85 aa, unidentified
  REGION 1..85: note = Description of Unknown:cds_NZ_WFIY01000001.1_cds_WP_155862276.1_2386 target sequence
RHSIDIENIPFYEVPNERVRRAIFVGNLHSIQNYEAVKIILKVAERVKDVEFIIVGDGKELFANYPPNVKFVGEVPSLNEYYKEA

SEQ ID NO: 33166 - protein, 85 aa, unidentified
  REGION 1..85: note = Description of Unknown:cds_NZ_WFIY01000001.1_cds_WP_155862276.1_2386 target sequence
DICFIPLTTGTGIKTKVLECMAYGRPIITTKKGVEGIINYQQLDGVYVVLDANNIDDYISLLTQIRLKRSYENLREYVIENYSTE

SEQ ID NO: 33167 - protein, 84 aa, unidentified
  REGION 1..84: note = Description of Unknown:cds_NZ_WFIY01000001.1_cds_WP_155862276.1_2386 target sequence
KVLECMAYGRPIITTKKGVEGIINYQQLDGVYVVLDANNIDDYISLLTQIRLKRSYENLREYVIENYSTESLCKNLLRIIPQKW

SEQ ID NO: 33168 - protein, 85 aa, unidentified
  REGION 1..85: note = Description of Unknown:cds_NZ_WFIY01000001.1_cds_WP_155862276.1_2386 target sequence
LSKEHEATVIQFVNSKASNNKEFINVEIGKNYFSYAVKIIFKSLFSIKLIKSHDKVVVEGSIFLPFIITAKLLRKNVIYDTHGSI

SEQ ID NO: 33169 - protein, 85 aa, unidentified
  REGION 1..85: note = Description of Unknown:cds_NZ_WFIY01000001.1_cds_WP_155862276.1_2386 target sequence
VEVSKGLKGIKNFIFRRVIGGLLDSLSTKLSDVVIAVSEDDAQIFRKYTRNKRKVMVVRHSIDIENIPFYEVPNERVRRAIFVGN

SEQ ID NO: 33170 - protein, 85 aa, unidentified
  REGION 1..85: note = Description of Unknown:cds_NZ_WFIY01000001.1_cds_WP_155862276.1_2386 target sequence
LHSIQNYEAVKIILKVAERVKDVEFIIVGDGKELFANYPPNVKFVGEVPSLNEYYKEADICFIPLTTGTGIKTKVLECMAYGRPI

SEQ ID NO: 33171 - protein, 85 aa, unidentified
  REGION 1..85: note = Description of Unknown:cds_NC_029316.1_cds_YP_009230308.1_55 target sequence
YNVLLKVSRLGDLKIYDPIFNLFPRDQRIMEELKESIKKDGLREPIVVDSDNYIIDGMTRYLVLKELAKESDEYSKVLTLQYTDL

SEQ ID NO: 33172 - protein, 85 aa, unidentified
  REGION 1..85: note = Description of Unknown:cds_NC_029316.1_cds_YP_009230308.1_55 target sequence
RITKDPQTAKLLALVLNVIRRPMKLEELTNYIEEIYKIRGSTSQTARIDNDIDKKIEETLQNITKKKVSIDDVKYMVLWVKSHYP

SEQ ID NO: 33173 - protein, 85 aa, unidentified
  REGION 1..85: note = Description of Unknown:cds_NC_029316.1_cds_YP_009230308.1_55 target sequence
HIYNYTKKKGIVFNKREIEKLLSLTKNFANDFTDEDLDLIFSNIRKVITDYYAELKNAKNAGEFMSKLGELLEREKAKKTEKLSV

SEQ ID NO: 33174 - protein, 85 aa, unidentified
  REGION 1..85: note = Description of Unknown:cds_NC_029316.1_cds_YP_009230308.1_55 target sequence
KTEKKRSGDHKDDRKESDNKKEERRIEKNSNAVQQQYINKEELCKYVDLVSFRKFIDKLEEKVKKNEEVEIDRDLFYSIKTILEN

SEQ ID NO: 33175 - protein, 84 aa, unidentified
  REGION 1..84: note = Description of Unknown:cds_NC_029316.1_cds_YP_009230308.1_55 target sequence
ESDNKKEERRIEKNSNAVQQQYINKEELCKYVDLVSFRKFIDKLEEKVKKNEEVEIDRDLFYSIKTILENELPDGTAFKYFKVV

SEQ ID NO: 33176 - protein, 85 aa, unidentified
  REGION 1..85: note = Description of Unknown:cds_NC_029316.1_cds_YP_009230308.1_55 target sequence
RIMEELKESIKKDGLREPIVVDSDNYIIDGMTRYLVLKELAKESDEYSKVLTLQYTDLRITKDPQTAKLLALVLNVIRRPMKLEE

SEQ ID NO: 33177 - protein, 85 aa, unidentified
  REGION 1..85: note = Description of Unknown:cds_NC_029316.1_cds_YP_009230308.1_55 target sequence
LTNYIEEIYKIRGSTSQTARIDNDIDKKIEETLQNITKKKVSIDDVKYMVLWVKSHYPHIYNYTKKKGIVFNKREIEKLLSLTKN

SEQ ID NO: 33178 - protein, 85 aa, unidentified
  REGION 1..85: note = Description of Unknown:cds_NC_029316.1_cds_YP_009230308.1_55 target sequence
FANDFTDEDLDLIFSNIRKVITDYYAELKNAKNAGEFMSKLGELLEREKAKKTEKLSVKTEKKRSGDHKDDRKESDNKKEERRIE

SEQ ID NO: 33179 - protein, 85 aa, unidentified
  REGION 1..85: note = Description of Unknown:cds_NZ_WFIY01000004.1_cds_WP_155864456.1_1686 target sequence
KGYSIFFARIIYAISWFYLAPAIPYIIFTFKVPLNLAGVIPFSFFLGSGSMQIPSAFISSKLGSRNTLVLGLFIMSLSAFLIGVS

SEQ ID NO: 33180 - protein, 85 aa, unidentified
  REGION 1..85: note = Description of Unknown:cds_NZ_WFIY01000004.1_cds_WP_155864456.1_1686 target sequence
RVFYQILVFYFIAGVGASMFFSTGAAILAYLNETKVSTALGVYNSMFALGGIIGLNWIILDEKLGFSISSVILSILTILAAIVNI

SEQ ID NO: 33181 - protein, 85 aa, unidentified
  REGION 1..85: note = Description of Unknown:cds_NZ_WFIY01000004.1_cds_WP_155864456.1_1686 target sequence
NKPNLKMNWKIIKDKNSFIIGVASAGVWGIYYVVGELFPSFAKFYLGIQILQSTEFTSILLLSSMLGGLLGFLGDRMDKIKLLII

SEQ ID NO: 33182 - protein, 85 aa, unidentified
  REGION 1..85: note = Description of Unknown:cds_NZ_WFIY01000004.1_cds_WP_155864456.1_1686 target sequence
SSLLGSIPALLLYTKYYILGIIIIGLFNELSISIVYAVASIGKGINSGISLAEVNSLNILIGSLFEPIGSLVGNMIWAVTTILSI

SEQ ID NO: 33183 - protein, 84 aa, unidentified
  REGION 1..84: note = Description of Unknown:cds_NZ_WFIY01000004.1_cds_WP_155864456.1_1686 target sequence
KYYILGIIIIGLFNELSISIVYAVASIGKGINSGISLAEVNSLNILIGSLFEPIGSLVGNMIWAVTTILSIIPLILLKKLKVNV

SEQ ID NO: 33184 - protein, 85 aa, unidentified
  REGION 1..85: note = Description of Unknown:cds_NZ_WFIY01000004.1_cds_WP_155864456.1_1686 target sequence
FTFKVPLNLAGVIPFSFFLGSGSMQIPSAFISSKLGSRNTLVLGLFIMSLSAFLIGVSRVFYQILVFYFIAGVGASMFFSTGAAI

SEQ ID NO: 33185 - protein, 85 aa, unidentified
  REGION 1..85: note = Description of Unknown:cds_NZ_WFIY01000004.1_cds_WP_155864456.1_1686 target sequence
LAYLNETKVSTALGVYNSMFALGGIIGLNWIILDEKLGFSISSVILSILTILAAIVNINKPNLKMNWKIIKDKNSFIIGVASAGV

SEQ ID NO: 33186 - protein, 85 aa, unidentified
  REGION 1..85: note = Description of Unknown:cds_NZ_WFIY01000004.1_cds_WP_155864456.1_1686 target sequence
WGIYYVVGELFPSFAKFYLGIQILQSTEFTSILLLSSMLGGLLGFLGDRMDKIKLLIISSLLGSIPALLLYTKYYILGIIIIGLF

SEQ ID NO: 33187 - protein, 85 aa, unidentified
  REGION 1..85: note = Description of Unknown:cds_NZ_WFIY01000004.1_cds_WP_155863873.1_1777 target sequence
IVLFVDFDYFFAQVEEVLNPELKGKPVAVCVFSGRFKDSGAIATANYEARKLGIKSGMPIPKAKEIAPNAIYLPIRKDLYKQVSD

SEQ ID NO: 33188 - protein, 85 aa, unidentified
  REGION 1..85: note = Description of Unknown:cds_NZ_WFIY01000004.1_cds_WP_155863873.1_1777 target sequence
RIMYGILSKYSSKIEIASIDEAYLDITDRVKDYYEAYQLGKKIKDEIYQKEKITVTIGIAPNKVFAKIIAEMNKPNGLGILKPEE

SEQ ID NO: 33189 - protein, 85 aa, unidentified
  REGION 1..85: note = Description of Unknown:cds_NZ_WFIY01000004.1_cds_WP_155863873.1_1777 target sequence
VEGFIRSLPIEEVPGVGDSIYSKLKEMEIKYLYDVLKVDFEKLKKEIGKSKASYLYSLANNTYAEPVKEKVRKHIGRYVTMKKNS

SEQ ID NO: 33190 - protein, 85 aa, unidentified
  REGION 1..85: note = Description of Unknown:cds_NZ_WFIY01000004.1_cds_WP_155863873.1_1777 target sequence
RDIKEILPYLKRAIDEAYSKTNGGIPKTLAVVAIMEDLDIVSREKTFNFGISKDRAYLEAEKLLEEIIKSDKRRLRRVGVRLGKI

SEQ ID NO: 33191 - protein, 84 aa, unidentified
  REGION 1..84: note = Description of Unknown:cds_NZ_WFIY01000004.1_cds_WP_155863873.1_1777 target sequence
DEAYSKTNGGIPKTLAVVAIMEDLDIVSREKTFNFGISKDRAYLEAEKLLEEIIKSDKRRLRRVGVRLGKIYKSTTLDNFFNNV

SEQ ID NO: 33192 - protein, 85 aa, unidentified
  REGION 1..85: note = Description of Unknown:cds_NZ_WFIY01000004.1_cds_WP_155863873.1_1777 target sequence
AVCVFSGRFKDSGAIATANYEARKLGIKSGMPIPKAKEIAPNAIYLPIRKDLYKQVSDRIMYGILSKYSSKIEIASIDEAYLDIT

SEQ ID NO: 33193 - protein, 85 aa, unidentified
  REGION 1..85: note = Description of Unknown:cds_NZ_WFIY01000004.1_cds_WP_155863873.1_1777 target sequence
DRVKDYYEAYQLGKKIKDEIYQKEKITVTIGIAPNKVFAKIIAEMNKPNGLGILKPEEVEGFIRSLPIEEVPGVGDSIYSKLKEM

SEQ ID NO: 33194 - protein, 85 aa, unidentified
  REGION 1..85: note = Description of Unknown:cds_NZ_WFIY01000004.1_cds_WP_155863873.1_1777 target sequence
EIKYLYDVLKVDFEKLKKEIGKSKASYLYSLANNTYAEPVKEKVRKHIGRYVTMKKNSRDIKEILPYLKRAIDEAYSKTNGGIPK

SEQ ID NO: 33195 - protein, 85 aa, unidentified
  REGION 1..85: note = Description of Unknown:cds_NZ_WFIY01000004.1_cds_WP_155863920.1_1833 target sequence
VTNLPAEAKAKWLKVMDAKTPEEKIKAIQDFLSSVPKHKGTENLVYWARRRLAELREESERQRKKKSGSFSFFVEKEGAGQIIVL

SEQ ID NO: 33196 - protein, 85 aa, unidentified
  REGION 1..85: note = Description of Unknown:cds_NZ_WFIY01000004.1_cds_WP_155863920.1_1833 target sequence
GREELKNPLVRKITNVKQDPKDFPIPAMTYYEDVGIQLVNPPPVILDSKLIVSKIIGLIRNTDGLLFVVEDKNEFLKFKEFLESN

SEQ ID NO: 33197 - protein, 85 aa, unidentified
  REGION 1..85: note = Description of Unknown:cds_NZ_WFIY01000004.1_cds_WP_155863920.1_1833 target sequence
NIILGKPKGKVIIEKLRSGKEGIRIILLGKLVNTDENEIRKYLQDFGLKSAIVKIIGEVSLDDVEKSIFETITYKPAVVVSLNPF

SEQ ID NO: 33198 - protein, 85 aa, unidentified
  REGION 1..85: note = Description of Unknown:cds_NZ_WFIY01000004.1_cds_WP_155863920.1_1833 target sequence
DYPGIPVITKIDNLPKYLFDSLDIIRVYTKEPGEEPSKDPLILKRGSTVLDVAKKLHSSLYENFKYARIWGKSAKFPGQKVGEDH

SEQ ID NO: 33199 - protein, 84 aa, unidentified
  REGION 1..84: note = Description of Unknown:cds_NZ_WFIY01000004.1_cds_WP_155863920.1_1833 target sequence
PKYLFDSLDIIRVYTKEPGEEPSKDPLILKRGSTVLDVAKKLHSSLYENFKYARIWGKSAKFPGQKVGEDHVLEDKDIVEIHTK

SEQ ID NO: 33200 - protein, 85 aa, unidentified
  REGION 1..85: note = Description of Unknown:cds_NZ_WFIY01000004.1_cds_WP_155863920.1_1833 target sequence
IQDFLSSVPKHKGTENLVYWARRRLAELREESERQRKKKSGSFSFFVEKEGAGQIIVLGREELKNPLVRKITNVKQDPKDFPIPA

SEQ ID NO: 33201 - protein, 85 aa, unidentified
  REGION 1..85: note = Description of Unknown:cds_NZ_WFIY01000004.1_cds_WP_155863920.1_1833 target sequence
MTYYEDVGIQLVNPPPVILDSKLIVSKIIGLIRNTDGLLFVVEDKNEFLKFKEFLESNNIILGKPKGKVIIEKLRSGKEGIRIIL

SEQ ID NO: 33202 - protein, 85 aa, unidentified
  REGION 1..85: note = Description of Unknown:cds_NZ_WFIY01000004.1_cds_WP_155863920.1_1833 target sequence
LGKLVNTDENEIRKYLQDFGLKSAIVKIIGEVSLDDVEKSIFETITYKPAVVVSLNPFDYPGIPVITKIDNLPKYLFDSLDIIRV

SEQ ID NO: 33203 - protein, 85 aa, unidentified
  REGION 1..85: note = Description of Unknown:cds_NZ_WFIY01000004.1_cds_WP_155863953.1_1874 target sequence
LKVLLKELKKWSAPATVLLSLYIPPGRPIADVLNNLRQEASISQNIKLKRTRDAVESAISAAIDRLTSIPKVPDNGLVLFCGENF

SEQ ID NO: 33204 - protein, 85 aa, unidentified
  REGION 1..85: note = Description of Unknown:cds_NZ_WFIY01000004.1_cds_WP_155863953.1_1874 target sequence
ETEEFKCYMFSPPEKITVYFYRTDKFFHLEFLEDMVEENEVYGLIIVERDTATIGILRGTRIEELEEIEGYVPGKHMMGGQSQRR

SEQ ID NO: 33205 - protein, 85 aa, unidentified
  REGION 1..85: note = Description of Unknown:cds_NZ_WFIY01000004.1_cds_WP_155863953.1_1874 target sequence
IDRIIEELYHDFLKEVGEKVNSYFLPYLEEKKLKGILLGGPGYAKNDFYEGDYMEYRLKKLVLEPLIDVGDQGEAGLREMVMKAK

SEQ ID NO: 33206 - protein, 85 aa, unidentified
  REGION 1..85: note = Description of Unknown:cds_NZ_WFIY01000004.1_cds_WP_155863953.1_1874 target sequence
DLLRNQKYVEVENLLDEIKYHLAKDDGLVVYGKEEIKKAMDMGALEALIVHEDNEEDSLTKEAEKFGTKVYVINDEVPEAEWIKK

SEQ ID NO: 33207 - protein, 84 aa, unidentified
  REGION 1..84: note = Description of Unknown:cds_NZ_WFIY01000004.1_cds_WP_155863953.1_1874 target sequence
DEIKYHLAKDDGLVVYGKEEIKKAMDMGALEALIVHEDNEEDSLTKEAEKFGTKVYVINDEVPEAEWIKKTFGGSIGKLRFRIE

SEQ ID NO: 33208 - protein, 85 aa, unidentified
  REGION 1..85: note = Description of Unknown:cds_NZ_WFIY01000004.1_cds_WP_155863953.1_1874 target sequence
PIADVLNNLRQEASISQNIKLKRTRDAVESAISAAIDRLTSIPKVPDNGLVLFCGENFETEEFKCYMFSPPEKITVYFYRTDKFF

SEQ ID NO: 33209 - protein, 85 aa, unidentified
  REGION 1..85: note = Description of Unknown:cds_NZ_WFIY01000004.1_cds_WP_155863953.1_1874 target sequence
HLEFLEDMVEENEVYGLIIVERDTATIGILRGTRIEELEEIEGYVPGKHMMGGQSQRRIDRIIEELYHDFLKEVGEKVNSYFLPY

SEQ ID NO: 33210 - protein, 85 aa, unidentified
  REGION 1..85: note = Description of Unknown:cds_NZ_WFIY01000004.1_cds_WP_155863953.1_1874 target sequence
LEEKKLKGILLGGPGYAKNDFYEGDYMEYRLKKLVLEPLIDVGDQGEAGLREMVMKAKDLLRNQKYVEVENLLDEIKYHLAKDDG

SEQ ID NO: 33211 - protein, 85 aa, unidentified
  REGION 1..85: note = Description of Unknown:hvTR_P24444 target sequence
WVMSQVRSMEPDLTLAAVYQAAANLTEQDKEIFAEAVKTAFSVCSSAAPSARLRMIETPTQNFMFVTSVIPSGVTSGEKKTKLNI

SEQ ID NO: 33212 - protein, 85 aa, unidentified
  REGION 1..85: note = Description of Unknown:hvTR_P24444 target sequence
DAALDNLALSFANKKSKKMARTYLLQNVLRTQDQQVAISGKYILYTKKHIETSLMIDKTKLVKKILEYAETPNLLGYTDVRDLEC

SEQ ID NO: 33213 - protein, 85 aa, unidentified
  REGION 1..85: note = Description of Unknown:hvTR_P24444 target sequence
LLWLVFCGPKSFCQSDSCFGYSKTGYNAAFPNLLPPYLYECGQNNGLFFGIVQAYVFSWYSDFDFSALEISERARRRIRSLLYDL

SEQ ID NO: 33214 - protein, 85 aa, unidentified
  REGION 1..85: note = Description of Unknown:hvTR_P24444 target sequence
KQKFAEQEVSVLSVASQMCIFCALYKQNKLSLEYVSGDLKTSVFSPIIIKDCLCAQTTISTTQMLPGTKSSAIFPVYDLRKLLGA

SEQ ID NO: 33215 - protein, 84 aa, unidentified
  REGION 1..84: note = Description of Unknown:hvTR_P24444 target sequence
VASQMCIFCALYKQNKLSLEYVSGDLKTSVFSPIIIKDCLCAQTTISTTQMLPGTKSSAIFPVYDLRKLLGALVISEGSVKFDI

SEQ ID NO: 33216 - protein, 85 aa, unidentified
  REGION 1..85: note = Description of Unknown:hvTR_P24444 target sequence
QDKEIFAEAVKTAFSVCSSAAPSARLRMIETPTQNFMFVTSVIPSGVTSGEKKTKLNIDAALDNLALSFANKKSKKMARTYLLQN

SEQ ID NO: 33217 - protein, 85 aa, unidentified
  REGION 1..85: note = Description of Unknown:hvTR_P24444 target sequence
VLRTQDQQVAISGKYILYTKKHIETSLMIDKTKLVKKILEYAETPNLLGYTDVRDLECLLWLVFCGPKSFCQSDSCFGYSKTGYN

SEQ ID NO: 33218 - protein, 85 aa, unidentified
  REGION 1..85: note = Description of Unknown:hvTR_P24444 target sequence
AAFPNLLPPYLYECGQNNGLFFGIVQAYVFSWYSDFDFSALEISERARRRIRSLLYDLKQKFAEQEVSVLSVASQMCIFCALYKQ

SEQ ID NO: 33219 - protein, 85 aa, unidentified
  REGION 1..85: note = Description of Unknown:hvTR_Q9WT06 target sequence
WVMSQVRSMEPDLTLAAVYQAAANLTEQDKEIFSEAVKTAFSVCSSAAPSARLRMIETPTQNFMFVTSVIPSGVPSGEKKTKLNI

SEQ ID NO: 33220 - protein, 85 aa, unidentified
  REGION 1..85: note = Description of Unknown:hvTR_Q9WT06 target sequence
DAALDNLALSFANKKSKKMARTYLLQNVSRTQDQQVAISGTYILYTKKHIETSLMLDKTKLVKQILEYAETPNLLGYTDVRDLEC

SEQ ID NO: 33221 - protein, 85 aa, unidentified; identical to SEQ ID NO: 33213
  REGION 1..85: note = Description of Unknown:hvTR_Q9WT06 target sequence

SEQ ID NO: 33222 - protein, 85 aa, unidentified
  REGION 1..85: note = Description of Unknown:hvTR_Q9WT06 target sequence
KQKFSEQEISVLPVASQMCIFCALYKQNKLSLEYVSGDLKTSVFSPIIIKDCLCVQTTISTTQMLPGTKSSAIFPVYDLRKLLSA

SEQ ID NO: 33223 - protein, 84 aa, unidentified
  REGION 1..84: note = Description of Unknown:hvTR_Q9WT06 target sequence
VASQMCIFCALYKQNKLSLEYVSGDLKTSVFSPIIIKDCLCVQTTISTTQMLPGTKSSAIFPVYDLRKLLSALVISEGSVRFDI

SEQ ID NO: 33224 - protein, 85 aa, unidentified
  REGION 1..85: note = Description of Unknown:hvTR_Q9WT06 target sequence
QDKEIFSEAVKTAFSVCSSAAPSARLRMIETPTQNFMFVTSVIPSGVPSGEKKTKLNIDAALDNLALSFANKKSKKMARTYLLQN

SEQ ID NO: 33225 - protein, 85 aa, unidentified
  REGION 1..85: note = Description of Unknown:hvTR_Q9WT06 target sequence
VSRTQDQQVAISGTYILYTKKHIETSLMLDKTKLVKQILEYAETPNLLGYTDVRDLECLLWLVFCGPKSFCQSDSCFGYSKTGYN

SEQ ID NO: 33226 - protein, 85 aa, unidentified
  REGION 1..85: note = Description of Unknown:hvTR_Q9WT06 target sequence
AAFPNLLPPYLYECGQNNGLFFGIVQAYVFSWYSDFDFSALEISERARRRIRSLLYDLKQKFSEQEISVLPVASQMCIFCALYKQ

SEQ ID NO: 33227 - protein, 85 aa, unidentified
  REGION 1..85: note = Description of Unknown:hvTR_P14079 target sequence
AHFPGFGQSLLFGYPVYVFGDCVQGDWCPISGGLCSARLHRHALLATCPEHQITWDPIDGRVIGSALQFLIPRLPSFPTQRTSKT

SEQ ID NO: 33228 - protein, 85 aa, unidentified
  REGION 1..85: note = Description of Unknown:hvTR_P14079 target sequence
LKVLTPPITHTTPNIPPSFLQAMRKYSPFRNGYMEPTLGQHLPTLSFPDPGLRPQNLYTLWGGSVVCMYLYQLSPPITWPLLPHV

SEQ ID NO: 33229 - protein, 85 aa, unidentified
  REGION 1..85: note = Description of Unknown:hvTR_P14079 target sequence
IFCHPGQLGAFLTNVPYKRIEKLLYKISLTTGALIILPEDCLPTTLFQPARAPVTLTAWQNGLLPFHSTLTTPGLIWTFTDGTPM

SEQ ID NO: 33230 - protein, 85 aa, unidentified
  REGION 1..85: note = Description of Unknown:hvTR_P14079 target sequence
ISGPCPKDGQPSLVLQSSSFIFHKFQTKAYHPSFLLSHGLIQYSSFHNLHLLFEEYTNIPISLLFNEKEADDNDHEPQISPGGLE

SEQ ID NO: 33231 - protein, 84 aa, unidentified
  REGION 1..84: note = Description of Unknown:hvTR_P14079 target sequence
VLQSSSFIFHKFQTKAYHPSFLLSHGLIQYSSFHNLHLLFEEYTNIPISLLFNEKEADDNDHEPQISPGGLEPLSEKHFRETEV

SEQ ID NO: 33232 - protein, 85 aa, unidentified
  REGION 1..85: note = Description of Unknown:hvTR_P14079 target sequence
CPISGGLCSARLHRHALLATCPEHQITWDPIDGRVIGSALQFLIPRLPSFPTQRTSKTLKVLTPPITHTTPNIPPSFLQAMRKYS

SEQ ID NO: 33233 - protein, 85 aa, unidentified
  REGION 1..85: note = Description of Unknown:hvTR_P14079 target sequence
PFRNGYMEPTLGQHLPTLSFPDPGLRPQNLYTLWGGSVVCMYLYQLSPPITWPLLPHVIFCHPGQLGAFLTNVPYKRIEKLLYKI

SEQ ID NO: 33234 - protein, 85 aa, unidentified
  REGION 1..85: note = Description of Unknown:hvTR_P14079 target sequence
SLTTGALIILPEDCLPTTLFQPARAPVTLTAWQNGLLPFHSTLTTPGLIWTFTDGTPMISGPCPKDGQPSLVLQSSSFIFHKFQT

SEQ ID NO: 33235 - protein, 85 aa, unidentified
  REGION 1..85: note = Description of Unknown:cds_NC_024711.1_cds_YP_009052511.1_33 target sequence
YKVKGKPWAYSGAIDVSDCATAKEVMLKAGLNFNVAKCELVGKMPIKLTGTDEELDRIIKEQKEGAHVFGTDIYRKCDNAFATYR

SEQ ID NO: 33236 - protein, 85 aa, unidentified
  REGION 1..85: note = Description of Unknown:cds_NC_024711.1_cds_YP_009052511.1_33 target sequence
TDYNIPLGVVKSKYTIVQNNDAFNFFDDAIGKNSAIWQTAGFWGNGERIFVSAKLPNNILVKGDPVENYLVFTNTHDGSGGVKIL

SEQ ID NO: 33237 - protein, 85 aa, unidentified
  REGION 1..85: note = Description of Unknown:cds_NC_024711.1_cds_YP_009052511.1_33 target sequence
FTPIRVICQNTLNAAIRTSSNYVSFRHTTSVHNKISVAQEILGISKIKSEEFGQYCNLLANIKVTDEDVIQFIGENLLTSDEIQR

SEQ ID NO: 33238 - protein, 85 aa, unidentified
  REGION 1..85: note = Description of Unknown:cds_NC_024711.1_cds_YP_009052511.1_33 target sequence
LKDTGHTIKDIAYRSGLALTDSKISSRKMNVISDTYSYYFDGPGQRDILGTAWGAVNAISGYYSNIDNIEGTKRFDSICYGDKSR

SEQ ID NO: 33239 - protein, 84 aa, unidentified
  REGION 1..84: note = Description of Unknown:cds_NC_024711.1_cds_YP_009052511.1_33 target sequence
RSGLALTDSKISSRKMNVISDTYSYYFDGPGQRDILGTAWGAVNAISGYYSNIDNIEGTKRFDSICYGDKSRKIENAFALAEAL

SEQ ID NO: 33240 - protein, 85 aa, unidentified
  REGION 1..85: note = Description of Unknown:cds_NC_024711.1_cds_YP_009052511.1_33 target sequence
KAGLNFNVAKCELVGKMPIKLTGTDEELDRIIKEQKEGAHVFGTDIYRKCDNAFATYRTDYNIPLGVVKSKYTIVQNNDAFNFFD

SEQ ID NO: 33241 - protein, 85 aa, unidentified
  REGION 1..85: note = Description of Unknown:cds_NC_024711.1_cds_YP_009052511.1_33 target sequence
DAIGKNSAIWQTAGFWGNGERIFVSAKLPNNILVKGDPVENYLVFTNTHDGSGGVKILFTPIRVICQNTLNAAIRTSSNYVSFRH

SEQ ID NO: 33242 - protein, 85 aa, unidentified
  REGION 1..85: note = Description of Unknown:cds_NC_024711.1_cds_YP_009052511.1_33 target sequence
TTSVHNKISVAQEILGISKIKSEEFGQYCNLLANIKVTDEDVIQFIGENLLTSDEIQRLKDTGHTIKDIAYRSGLALTDSKISSR

SEQ ID NO: 33243 - protein, 85 aa, unidentified
  REGION 1..85: note = Description of Unknown:cds_NZ_WFIY01000004.1_cds_WP_162309144.1_174 target sequence
VVEYTLYHHSFEVLGGSERVAIAVLSTLKSMGFKVKLVTLYIDVEKVKKWDKNFVVPDEIVVKKFPIKFGLYKALFTSILTRPGN

SEQ ID NO: 33244 - protein, 85 aa, unidentified
  REGION 1..85: note = Description of Unknown:cds_NZ_WFIY01000004.1_cds_WP_162309144.1_174 target sequence
TFSTIGDITNADYSYIHFPWSLTDNLKIINAEDNEPYIKNMKMRAYFLPYKYFHRLFFSKSKSKLLANSTWTGKILELSGYSYEV

SEQ ID NO: 33245 - protein, 85 aa, unidentified
  REGION 1..85: note = Description of Unknown:cds_NZ_WFIY01000004.1_cds_WP_162309144.1_174 target sequence
LYPPVEVGEYLKIKGNRDPKLVLSISRIAPEKNLENLFSVAKVLKDFTFVLLGSSGRSKKYLEEVKSISGKLGNVKIVEDFTHDD

SEQ ID NO: 33246 - protein, 85 aa, unidentified
  REGION 1..85: note = Description of Unknown:cds_NZ_WFIY01000004.1_cds_WP_162309144.1_174 target sequence
IINYLSKAKVYFHPKVNEHFGISIVEAMSAGLIPVVHKSGGAWLDIVKEGKYGFGYSNVEEAANAIIEASKYENDFRDVTLNFSF

SEQ ID NO: 33247 - protein, 84 aa, unidentified
  REGION 1..84: note = Description of Unknown:cds_NZ_WFIY01000004.1_cds_WP_162309144.1_174 target sequence
KVNEHFGISIVEAMSAGLIPVVHKSGGAWLDIVKEGKYGFGYSNVEEAANAIIEASKYENDFRDVTLNFSFDKFKERLSKILTR

SEQ ID NO: 33248 - protein, 85 aa, unidentified
  REGION 1..85: note = Description of Unknown:cds_NZ_WFIY01000004.1_cds_WP_162309144.1_174 target sequence
LKSMGFKVKLVTLYIDVEKVKKWDKNFVVPDEIVVKKFPIKFGLYKALFTSILTRPGNTFSTIGDITNADYSYIHFPWSLTDNLK

SEQ ID NO: 33249 - protein, 85 aa, unidentified
  REGION 1..85: note = Description of Unknown:cds_NZ_WFIY01000004.1_cds_WP_162309144.1_174 target sequence
IINAEDNEPYIKNMKMRAYFLPYKYFHRLFFSKSKSKLLANSTWTGKILELSGYSYEVLYPPVEVGEYLKIKGNRDPKLVLSISR

SEQ ID NO: 33250 - protein, 85 aa, unidentified
  REGION 1..85: note = Description of Unknown:cds_NZ_WFIY01000004.1_cds_WP_162309144.1_174 target sequence
IAPEKNLENLFSVAKVLKDFTFVLLGSSGRSKKYLEEVKSISGKLGNVKIVEDFTHDDIINYLSKAKVYFHPKVNEHFGISIVEA

SEQ ID NO: 33251 - protein, 85 aa, unidentified
  REGION 1..85: note = Description of Unknown:cds_NZ_WFIY01000004.1_cds_WP_155862476.1_232 target sequence
LKIGLIVNPYAGSGGRLGYKGSDDLYIENPEIENRVKRFLDVVNNNIEFVSPKFKMGEYFLRKFGKKYEAINTGKEKSTREDTII

SEQ ID NO: 33252 - protein, 85 aa, unidentified
  REGION 1..85: note = Description of Unknown:cds_NZ_WFIY01000004.1_cds_WP_155862476.1_232 target sequence
SARLLSDITNLIVFVGGDGTARDVVEGSQSKVPILGVPAGVKMHSGVFAINPETAGMLVNAYAEGMANIVEAEVLDIDEDAYRKG

SEQ ID NO: 33253 - protein, 85 aa, unidentified
  REGION 1..85: note = Description of Unknown:cds_NZ_WFIY01000004.1_cds_WP_155862476.1_232 target sequence
IYKVKLYYITKTINFKGLLVHSKEEISSPSYELDEIAEYIIDNMDDSVFYIMGPGSTVKAIEEKLGYTTNFLSTDLFLGKRLIKS

SEQ ID NO: 33254 - protein, 85 aa, unidentified
  REGION 1..85: note = Description of Unknown:cds_NZ_WFIY01000004.1_cds_WP_155862476.1_232 target sequence
GVNYMELLQLTGELKIILTPIGGQGFLIGRGNQEIGPEILKRSGKDNIIVVSSKEKISRIDCLRIDSGDPNVDKLLQGIYKVIVG

SEQ ID NO: 33255 - protein, 84 aa, unidentified
  REGION 1..84: note = Description of Unknown:cds_NZ_WFIY01000004.1_cds_WP_155862476.1_232 target sequence
KIILTPIGGQGFLIGRGNQEIGPEILKRSGKDNIIVVSSKEKISRIDCLRIDSGDPNVDKLLQGIYKVIVGYNEFYTIKTCSMT

SEQ ID NO: 33256 - protein, 85 aa, unidentified
  REGION 1..85: note = Description of Unknown:cds_NZ_WFIY01000004.1_cds_WP_155862476.1_232 target sequence
ENPEIENRVKRFLDVVNNNIEFVSPKFKMGEYFLRKFGKKYEAINTGKEKSTREDTIISARLLSDITNLIVFVGGDGTARDVVEG

SEQ ID NO: 33257 - protein, 85 aa, unidentified
  REGION 1..85: note = Description of Unknown:cds_NZ_WFIY01000004.1_cds_WP_155862476.1_232 target sequence
SQSKVPILGVPAGVKMHSGVFAINPETAGMLVNAYAEGMANIVEAEVLDIDEDAYRKGIYKVKLYYITKTINFKGLLVHSKEEIS

SEQ ID NO: 33258 - protein, 85 aa, unidentified
  REGION 1..85: note = Description of Unknown:cds_NZ_WFIY01000004.1_cds_WP_155862476.1_232 target sequence
SPSYELDEIAEYIIDNMDDSVFYIMGPGSTVKAIEEKLGYTTNFLSTDLFLGKRLIKSGVNYMELLQLTGELKIILTPIGGQGFL

SEQ ID NO: 33259 - protein, 85 aa, unidentified
  REGION 1..85: note = Description of Unknown:cds_NZ_WFIY01000004.1_cds_WP_155862623.1_403 target sequence
IGNLISLIRFYFFYPSFFVVIIFPGLLFTGILLLTTIWFERKAAARVQMRIGPYYASKRLGGYLQLIADALKFVFSEVIIPSGVN

SEQ ID NO: 33260 - protein, 85 aa, unidentified
  REGION 1..85: note = Description of Unknown:cds_NZ_WFIY01000004.1_cds_WP_155862623.1_403 target sequence
ETLFTIAPVLLLLVSILPFAAIPVSVIPQSGSVFSIYYHDFYDPNIGYGVLAGIFTCYNLLLILALESIYPIFVVFLAWVTNNRF

SEQ ID NO: 33261 - protein, 85 aa, unidentified
  REGION 1..85: note = Description of Unknown:cds_NZ_WFIY01000004.1_cds_WP_155862623.1_403 target sequence
AIVGAVRETFLSVSYDALILIATLSMAIEYHTLDLAVIVQKGIPGAIVNPIAAFIFIVGMLIGSSRFPFDIVEAETELVIGPYTE

SEQ ID NO: 33262 - protein, 85 aa, unidentified
  REGION 1..85: note = Description of Unknown:cds_NZ_WFIY01000004.1_cds_WP_155862623.1_403 target sequence
YSGFLFVLTMAGSYVGNFIYSLVFADLFLGGWYPFSGLPGAAFLTFKAVLLLFFSVFLRGVYGRYRIDQALRGSWKYLFPLSLIS

SEQ ID NO: 33263 - protein, 84 aa, unidentified
  REGION 1..84: note = Description of Unknown:cds_NZ_WFIY01000004.1_cds_WP_155862623.1_403 target sequence
YVGNFIYSLVFADLFLGGWYPFSGLPGAAFLTFKAVLLLFFSVFLRGVYGRYRIDQALRGSWKYLFPLSLISLITGTLVGYLWL

SEQ ID NO: 33264 - protein, 85 aa, unidentified
  REGION 1..85: note = Description of Unknown:cds_NZ_WFIY01000004.1_cds_WP_155862623.1_403 target sequence
FTGILLLTTIWFERKAAARVQMRIGPYYASKRLGGYLQLIADALKFVFSEVIIPSGVNETLFTIAPVLLLLVSILPFAAIPVSVI

SEQ ID NO: 33265 - protein, 85 aa, unidentified
  REGION 1..85: note = Description of Unknown:cds_NZ_WFIY01000004.1_cds_WP_155862623.1_403 target sequence
PQSGSVFSIYYHDFYDPNIGYGVLAGIFTCYNLLLILALESIYPIFVVFLAWVTNNRFAIVGAVRETFLSVSYDALILIATLSMA

SEQ ID NO: 33266 - protein, 85 aa, unidentified
  REGION 1..85: note = Description of Unknown:cds_NZ_WFIY01000004.1_cds_WP_155862623.1_403 target sequence
IEYHTLDLAVIVQKGIPGAIVNPIAAFIFIVGMLIGSSRFPFDIVEAETELVIGPYTEYSGFLFVLTMAGSYVGNFIYSLVFADL

SEQ ID NO: 33267 - protein, 85 aa, unidentified
  REGION 1..85: note = Description of Unknown:cds_NZ_WFIY01000004.1_cds_WP_155863264.1_1218 target sequence
ETYYIRINDVDNLTTGASFLGSGGGGDPYIGGLMLKRELKSKGELEIIRRPKSNKAFVLGSAMMGAPIVMIEKIPSSSEAKKALE

SEQ ID NO: 33268 - protein, 85 aa, unidentified
  REGION 1..85: note = Description of Unknown:cds_NZ_WFIY01000004.1_cds_WP_155863264.1_1218 target sequence
IYSYVMNKLIDYITPLEIGGVNSTIPLITSAKTGIPIVDGDGMGRAFPELQMTTFYFYGVSPSPMVIFDERGNTSVIQGIDGYWT

SEQ ID NO: 33269 - protein, 85 aa, unidentified
  REGION 1..85: note = Description of Unknown:cds_NZ_WFIY01000004.1_cds_WP_155863264.1_1218 target sequence
EKIARIITVRFGGSAYIALYGMNMEDYLKNAVLDTLTLALEIGELLNDKKLDQVLDKLKAEILFKGKVIDVYRKVEKGFSKGYVV

SEQ ID NO: 33270 - protein, 85 aa, unidentified
  REGION 1..85: note = Description of Unknown:cds_NZ_WFIY01000004.1_cds_WP_155863264.1_1218 target sequence
IEGIESYYNKTLQIDFQNEFLIARTNNEILVTVPDLIVVLDLFNQKPITTDRLKYGQKVIVIGVPANEKLRTEEALKYIGPKAFG

SEQ ID NO: 33271 - protein, 84 aa, unidentified
  REGION 1..84: note = Description of Unknown:cds_NZ_WFIY01000004.1_cds_WP_155863264.1_1218 target sequence
IDFQNEFLIARTNNEILVTVPDLIVVLDLFNQKPITTDRLKYGQKVIVIGVPANEKLRTEEALKYIGPKAFGYNIEYIPIDKRL

SEQ ID NO: 33272 - protein, 85 aa, unidentified
  REGION 1..85: note = Description of Unknown:cds_NZ_WFIY01000004.1_cds_WP_155863264.1_1218 target sequence
PYIGGLMLKRELKSKGELEIIRRPKSNKAFVLGSAMMGAPIVMIEKIPSSSEAKKALEIYSYVMNKLIDYITPLEIGGVNSTIPL

SEQ ID NO: 33273 - protein, 85 aa, unidentified
  REGION 1..85: note = Description of Unknown:cds_NZ_WFIY01000004.1_cds_WP_155863264.1_1218 target sequence
ITSAKTGIPIVDGDGMGRAFPELQMTTFYFYGVSPSPMVIFDERGNTSVIQGIDGYWTEKIARIITVRFGGSAYIALYGMNMEDY

SEQ ID NO: 33274 - protein, 85 aa, unidentified
  REGION 1..85: note = Description of Unknown:cds_NZ_WFIY01000004.1_cds_WP_155863264.1_1218 target sequence
LKNAVLDTLTLALEIGELLNDKKLDQVLDKLKAEILFKGKVIDVYRKVEKGFSKGYVVIEGIESYYNKTLQIDFQNEFLIARTNN

SEQ ID NO: 33275 - protein, 85 aa, unidentified
  REGION 1..85: note = Description of Unknown:cds_NZ_WFIY01000004.1_cds_WP_155863761.1_1635 target sequence
NLIIIMILISSILLDLGILIQIYAENKKFFKEPKEGNYRGNISIIIPVRGIDENFEENVKSLLNQDIKPLEIIYVIDPDDPYRET

SEQ ID NO: 33276 - protein, 85 aa, unidentified
  REGION 1..85: note = Description of Unknown:cds_NZ_WFIY01000004.1_cds_WP_155863761.1_1635 target sequence
IENILKKYNVKIVHTFYNCNTCSGKIRAQISGLLRSNGDIIVFGDSDTWYPKYWLRELTLPLSKYMATTTFSFASPARLTLKNLV

SEQ ID NO: 33277 - protein, 85 aa, unidentified
  REGION 1..85: note = Description of Unknown:cds_NZ_WFIY01000004.1_cds_WP_155863761.1_1635 target sequence
RAGFWTLGIESQAIGGTFLWGGSMAFRRNFFNKDVIKSLSKEWCDDCTLTRIVKERKGKIGFIGNAIPLNIYDEHNLFKWAQRQV

SEQ ID NO: 33278 - protein, 85 aa, unidentified
  REGION 1..85: note = Description of Unknown:cds_NZ_WFIY01000004.1_cds_WP_155863761.1_1635 target sequence
LTVKIYSYRGARAFIPFGLYMVILLISLILVKNFLLLLPFLLWIIKNLLRGRRLGRKAILPSLLSIIGIYFAWIVLILSWRKKEI

SEQ ID NO: 33279 - protein, 84 aa, unidentified
  REGION 1..84: note = Description of Unknown:cds_NZ_WFIY01000004.1_cds_WP_155863761.1_1635 target sequence
FIPFGLYMVILLISLILVKNFLLLLPFLLWIIKNLLRGRRLGRKAILPSLLSIIGIYFAWIVLILSWRKKEIIWRDKIYIVENK

SEQ ID NO: 33280 - protein, 85 aa, unidentified
  REGION 1..85: note = Description of Unknown:cds_NZ_WFIY01000004.1_cds_WP_155863761.1_1635 target sequence
KFFKEPKEGNYRGNISIIIPVRGIDENFEENVKSLLNQDIKPLEIIYVIDPDDPYRETIENILKKYNVKIVHTFYNCNTCSGKIR

SEQ ID NO: 33281 - protein, 85 aa, unidentified
  REGION 1..85: note = Description of Unknown:cds_NZ_WFIY01000004.1_cds_WP_155863761.1_1635 target sequence
AQISGLLRSNGDIIVFGDSDTWYPKYWLRELTLPLSKYMATTTFSFASPARLTLKNLVRAGFWTLGIESQAIGGTFLWGGSMAFR

SEQ ID NO: 33282 - protein, 85 aa, unidentified
  REGION 1..85: note = Description of Unknown:cds_NZ_WFIY01000004.1_cds_WP_155863761.1_1635 target sequence
RNFFNKDVIKSLSKEWCDDCTLTRIVKERKGKIGFIGNAIPLNIYDEHNLFKWAQRQVLTVKIYSYRGARAFIPFGLYMVILLIS

SEQ ID NO: 33283 - protein, 85 aa, unidentified
  REGION 1..85: note = Description of Unknown:cds_NC_038931.1_cds_YP_009509141.1_25 target sequence
MLFFTNMIVDGNYTVYEDANLAIYIPPGSDFDYIFTKNGQFILQIIAQGIGVIFQQTVNYTGPGLYKFQVSSGGVITQITPITID

SEQ ID NO: 33284 - protein, 85 aa, unidentified
  REGION 1..85: note = Description of Unknown:cds_NC_038931.1_cds_YP_009509141.1_25 target sequence
IIIGNNIVIYEFQGIIIPGDQASTMGLTVNEVSYPGQGLFIVQGYPWYMYNPNYPVVFAPIGYTGLFMGIDNVVMERRTVSPTNM

SEQ ID NO: 33285 - protein, 85 aa, unidentified
  REGION 1..85: note = Description of Unknown:cds_NC_038931.1_cds_YP_009509141.1_25 target sequence
FLQPDGKVPYAYQLTITIQNANAQQIIQAFNQAIEFAAGMGAVAYEITSNNQITFYIIFISPTSWWVVALVFVVALALLAAAVFV

SEQ ID NO: 33286 - protein, 85 aa, unidentified
  REGION 1..85: note = Description of Unknown:cds_NC_038931.1_cds_YP_009509141.1_25 target sequence
DKLTKGVAMDMQAQAISNAYNANTQAFQQCISSCYQQTSGRTQCINNCYANYVKVLTMLGAQFGSLNQVLSQPTLSFSGQTNVSV

SEQ ID NO: 33287 - protein, 84 aa, unidentified
  REGION 1..84: note = Description of Unknown:cds_NC_038931.1_cds_YP_009509141.1_25 target sequence
AQAISNAYNANTQAFQQCISSCYQQTSGRTQCINNCYANYVKVLTMLGAQFGSLNQVLSQPTLSFSGQTNVSVQTNWATVAALR

SEQ ID NO: 33288 - protein, 85 aa, unidentified
  REGION 1..85: note = Description of Unknown:cds_NC_038931.1_cds_YP_009509141.1_25 target sequence
GSDFDYIFTKNGQFILQIIAQGIGVIFQQTVNYTGPGLYKFQVSSGGVITQITPITIDIIIGNNIVIYEFQGIIIPGDQASTMGL

SEQ ID NO: 33289 - protein, 85 aa, unidentified
  REGION 1..85: note = Description of Unknown:cds_NC_038931.1_cds_YP_009509141.1_25 target sequence
TVNEVSYPGQGLFIVQGYPWYMYNPNYPVVFAPIGYTGLFMGIDNVVMERRTVSPTNMFLQPDGKVPYAYQLTITIQNANAQQII

SEQ ID NO: 33290 - protein, 85 aa, unidentified
  REGION 1..85: note = Description of Unknown:cds_NC_038931.1_cds_YP_009509141.1_25 target sequence
QAFNQAIEFAAGMGAVAYEITSNNQITFYIIFISPTSWWVVALVFVVALALLAAAVFVDKLTKGVAMDMQAQAISNAYNANTQAF

SEQ ID NO: 33291 - protein, 85 aa, unidentified
  REGION 1..85: note = Description of Unknown:cds_NC_002728.1_cds_NP_112025.1_6 target sequence
EPDIKSISSESMEGVSDFSPSSWEHGGYLDKVEPEIDENGSMIPKYKIYTPGANERKYNNYMYLICYGFVEDVERTPETGKRKKI

SEQ ID NO: 33292 - protein, 85 aa, unidentified
  REGION 1..85: note = Description of Unknown:cds_NC_002728.1_cds_NP_112025.1_6 target sequence
RTIAAYPLGVGKSASHPQDLLEELCSLKVTVRRTAGSTEKIVFGSSGPLNHLVPWKKVLTSGSIFNAVKVCRNVDQIQLDKHQAL

SEQ ID NO: 33293 - protein, 85 aa, unidentified
  REGION 1..85: note = Description of Unknown:cds_NC_002728.1_cds_NP_112025.1_6 target sequence
RIFFLSITKLNDSGIYMIPRTMLEFRRNNAIAFNLLVYLKIDADLSKMGIQGSLDKDGFKVASFMLHLGNFVRRAGKYYSVDYCR

SEQ ID NO: 33294 - protein, 85 aa, unidentified
  REGION 1..85: note = Description of Unknown:cds_NC_002728.1_cds_NP_112025.1_6 target sequence
RKIDRMKLQFSLGSIGGLSLHIKINGVISKRLFAQMGFQKNLCFSLMDINPWLNRLTWNNSCEISRVAAVLQPSIPREFMIYDDV

SEQ ID NO: 33295 - protein, 84 aa, unidentified
  REGION 1..84: note = Description of Unknown:cds_NC_002728.1_cds_NP_112025.1_6 target sequence
GSIGGLSLHIKINGVISKRLFAQMGFQKNLCFSLMDINPWLNRLTWNNSCEISRVAAVLQPSIPREFMIYDDVFIDNTGRILKG

SEQ ID NO: 33296 - protein, 85 aa, unidentified
  REGION 1..85: note = Description of Unknown:cds_NC_002728.1_cds_NP_112025.1_6 target sequence
YLDKVEPEIDENGSMIPKYKIYTPGANERKYNNYMYLICYGFVEDVERTPETGKRKKIRTIAAYPLGVGKSASHPQDLLEELCSL

SEQ ID NO: 33297 - protein, 85 aa, unidentified
  REGION 1..85: note = Description of Unknown:cds_NC_002728.1_cds_NP_112025.1_6 target sequence
KVTVRRTAGSTEKIVFGSSGPLNHLVPWKKVLTSGSIFNAVKVCRNVDQIQLDKHQALRIFFLSITKLNDSGIYMIPRTMLEFRR

SEQ ID NO: 33298 - protein, 85 aa, unidentified
  REGION 1..85: note = Description of Unknown:cds_NC_002728.1_cds_NP_112025.1_6 target sequence
NNAIAFNLLVYLKIDADLSKMGIQGSLDKDGFKVASFMLHLGNFVRRAGKYYSVDYCRRKIDRMKLQFSLGSIGGLSLHIKINGV

SEQ ID NO: 33299 - protein, 85 aa, unidentified
  REGION 1..85: note = Description of Unknown:cds_NZ_WFIY01000004.1_cds_WP_155862704.1_504 target sequence
SKEAVLYRKEGNRVRCLACARRCLIGEGQIGFCGVRSVRNGKLYLDVYGKVAAAHVDPIEKKPLVHFYPGSKVFSFSTYGCNWMC

SEQ ID NO: 33300 - protein, 85 aa, unidentified
  REGION 1..85: note = Description of Unknown:cds_NZ_WFIY01000004.1_cds_WP_155862704.1_504 target sequence
MYCQNYDLSQRRRPEGYEVSPEELVDMAIAYEAEGITYTYNEPAIFAEFAHDTGVIARKRGLFNTMVSNGYWTEELVDYVKDFLD

SEQ ID NO: 33301 - protein, 85 aa, unidentified
  REGION 1..85: note = Description of Unknown:cds_NZ_WFIY01000004.1_cds_WP_155862704.1_504 target sequence
AVTIDFKGNGEEKFMKRYTGASGPEPILETIRELNKNGIHVEITDLVIPQIGDDLKAAENLLKKIMDILGPDVPIHFLRFHPDYK

SEQ ID NO: 33302 - protein, 85 aa, unidentified
  REGION 1..85: note = Description of Unknown:cds_NZ_WFIY01000004.1_cds_WP_155862704.1_504 target sequence
LDYLPWTPVETLEKHYNLAKSLGFNYVYIGNVPGHPYESTYCPKCHNLVIGRDGFRITEWHLTEDMRCQYCGYKLPIVGKLSKHA

SEQ ID NO: 33303 - protein, 84 aa, unidentified
  REGION 1..84: note = Description of Unknown:cds_NZ_WFIY01000004.1_cds_WP_155862704.1_504 target sequence
EKHYNLAKSLGFNYVYIGNVPGHPYESTYCPKCHNLVIGRDGFRITEWHLTEDMRCQYCGYKLPIVGKLSKHAFEEDRFEPVFI

SEQ ID NO: 33304 - protein, 85 aa, unidentified
  REGION 1..85: note = Description of Unknown:cds_NZ_WFIY01000004.1_cds_WP_155862704.1_504 target sequence
GQIGFCGVRSVRNGKLYLDVYGKVAAAHVDPIEKKPLVHFYPGSKVFSFSTYGCNWMCMYCQNYDLSQRRRPEGYEVSPEELVDM

SEQ ID NO: 33305 - protein, 85 aa, unidentified
  REGION 1..85: note = Description of Unknown:cds_NZ_WFIY01000004.1_cds_WP_155862704.1_504 target sequence
AIAYEAEGITYTYNEPAIFAEFAHDTGVIARKRGLFNTMVSNGYWTEELVDYVKDFLDAVTIDFKGNGEEKFMKRYTGASGPEPI

SEQ ID NO: 33306 - protein, 85 aa, unidentified
  REGION 1..85: note = Description of Unknown:cds_NZ_WFIY01000004.1_cds_WP_155862704.1_504 target sequence
LETIRELNKNGIHVEITDLVIPQIGDDLKAAENLLKKIMDILGPDVPIHFLRFHPDYKLDYLPWTPVETLEKHYNLAKSLGFNYV

SEQ ID NO: 33307 - protein, 85 aa, unidentified
  REGION 1..85: note = Description of Unknown:cds_NZ_WFIY01000004.1_cds_WP_155862734.1_541 target sequence
DRIRKLQNMMKDRGIDYVIIGPTSNMFYLTNFSEEQMERPLFFVVSEGHSYFLAPKLYEEQLSKYNFEIISYADGEDPYSKMDLN

SEQ ID NO: 33308 - protein, 85 aa, unidentified
  REGION 1..85: note = Description of Unknown:cds_NZ_WFIY01000004.1_cds_WP_155862734.1_541 target sequence
TNSIIAIDDQLWSVFTINLIRKFNPSNLIPASTLLKELRMRKDKEEINIMEEGLKIAENSFLQFLNNIKEGSSECKLADRLEEIF

SEQ ID NO: 33309 - protein, 85 aa, unidentified
  REGION 1..85: note = Description of Unknown:cds_NZ_WFIY01000004.1_cds_WP_155862734.1_541 target sequence
KENGADGVSFKTILTSGPNTSMPHLRCTDRKVRRGDVIIVDFGIKYRGYCTDTTRVVSLGNPSDEVKKIHEIVLNAQESAEKAKN

SEQ ID NO: 33310 - protein, 85 aa, unidentified
  REGION 1..85: note = Description of Unknown:cds_NZ_WFIY01000004.1_cds_WP_155862734.1_541 target sequence
GMKGKEIDSIARGIIAKAGYSQFFIHRTGHGIGIDVHEDPYISQDSEQIIEQNMTFTIEPGIYLPGKFGIRIEDMVVMGEKEARP

SEQ ID NO: 33311 - protein, 84 aa, unidentified
  REGION 1..84: note = Description of Unknown:cds_NZ_WFIY01000004.1_cds_WP_155862734.1_541 target sequence
GIIAKAGYSQFFIHRTGHGIGIDVHEDPYISQDSEQIIEQNMTFTIEPGIYLPGKFGIRIEDMVVMGEKEARPLNKLEKEIYVI

SEQ ID NO: 33312 - protein, 85 aa, unidentified
  REGION 1..85: note = Description of Unknown:cds_NZ_WFIY01000004.1_cds_WP_155862734.1_541 target sequence
YLTNFSEEQMERPLFFVVSEGHSYFLAPKLYEEQLSKYNFEIISYADGEDPYSKMDLNTNSIIAIDDQLWSVFTINLIRKFNPSN

SEQ ID NO: 33313 - protein, 85 aa, unidentified
  REGION 1..85: note = Description of Unknown:cds_NZ_WFIY01000004.1_cds_WP_155862734.1_541 target sequence
LIPASTLLKELRMRKDKEEINIMEEGLKIAENSFLQFLNNIKEGSSECKLADRLEEIFKENGADGVSFKTILTSGPNTSMPHLRC

SEQ ID NO: 33314 - protein, 85 aa, unidentified
  REGION 1..85: note = Description of Unknown:cds_NZ_WFIY01000004.1_cds_WP_155862734.1_541 target sequence
TDRKVRRGDVIIVDFGIKYRGYCTDTTRVVSLGNPSDEVKKIHEIVLNAQESAEKAKNGMKGKEIDSIARGIIAKAGYSQFFIHR

SEQ ID NO: 33315 - protein, 85 aa, unidentified
  REGION 1..85: note = Description of Unknown:cds_NZ_WFIY01000004.1_cds_WP_155862776.1_591 target sequence
QIAVRLLWNSAVPKMAIEEARNTKWKLIIYRDAGGNYKLDGVNYLILRKRGEKGFFTPLFSFITSIYAKHRGKEATVDLDLILRA

SEQ ID NO: 33316 - protein, 85 aa, unidentified
  REGION 1..85: note = Description of Unknown:cds_NZ_WFIY01000004.1_cds_WP_155862776.1_591 target sequence
TKIRGPTLYHDQFAGITGYVRKLRYGEDYAVYLHETSLPLKGVKYFLPKKIEEKVLRNAKVIITNSMWNKKTLEEYGIKSEVIYP

SEQ ID NO: 33317 - protein, 85 aa, unidentified
  REGION 1..85: note = Description of Unknown:cds_NZ_WFIY01000004.1_cds_WP_155862776.1_591 target sequence
GCYPVSKLPESRERIVLAVSTWDSGRKPEIYGEIAKRIKGKMVMAGSWAREDTLKEFLRKYGDYVTVTGKISEEKLVELYSKALV

SEQ ID NO: 33318 - protein, 85 aa, unidentified
  REGION 1..85: note = Description of Unknown:cds_NZ_WFIY01000004.1_cds_WP_155862776.1_591 target sequence
LVRFGFNERGPGLGVIEAMAYGVPVIVNEGLGSKELIKQGENGFVVRDWEEAVDRINETLENWHKMSVNAWNTAKDLSWENHAEK

SEQ ID NO: 33319 - protein, 84 aa, unidentified
  REGION 1..84: note = Description of Unknown:cds_NZ_WFIY01000004.1_cds_WP_155862776.1_591 target sequence
LGVIEAMAYGVPVIVNEGLGSKELIKQGENGFVVRDWEEAVDRINETLENWHKMSVNAWNTAKDLSWENHAEKLKEILCQTFEC

SEQ ID NO: 33320 - protein, 85 aa, unidentified
  REGION 1..85: note = Description of Unknown:cds_NZ_WFIY01000004.1_cds_WP_155862776.1_591 target sequence
IIYRDAGGNYKLDGVNYLILRKRGEKGFFTPLFSFITSIYAKHRGKEATVDLDLILRATKIRGPTLYHDQFAGITGYVRKLRYGE

SEQ ID NO: 33321 - protein, 85 aa, unidentified
  REGION 1..85: note = Description of Unknown:cds_NZ_WFIY01000004.1_cds_WP_155862776.1_591 target sequence
DYAVYLHETSLPLKGVKYFLPKKIEEKVLRNAKVIITNSMWNKKTLEEYGIKSEVIYPGCYPVSKLPESRERIVLAVSTWDSGRK

SEQ ID NO: 33322 - protein, 85 aa, unidentified
  REGION 1..85: note = Description of Unknown:cds_NZ_WFIY01000004.1_cds_WP_155862776.1_591 target sequence
PEIYGEIAKRIKGKMVMAGSWAREDTLKEFLRKYGDYVTVTGKISEEKLVELYSKALVLVRFGFNERGPGLGVIEAMAYGVPVIV

SEQ ID NO: 33323 - protein, 85 aa, unidentified
  REGION 1..85: note = Description of Unknown:cds_NZ_WFIY01000004.1_cds_WP_155863294.1_1252 target sequence
INLAYGIPELKLLPIEIIKEASARVLNEEYDKALQYVDAQGIYEVREAIADFLKLRGVRAKPENIILTAGAKEALFLLSYLFNDV

SEQ ID NO: 33324 - protein, 85 aa, unidentified
  REGION 1..85: note = Description of Unknown:cds_NZ_WFIY01000004.1_cds_WP_155863294.1_1252 target sequence
SIESPTYQGFISILKFKGLTNVYSVPISEDGINVESLEKIVRNHKFQFFYTVTINNPTGYVTTDYTKKEIIELPEKYGFRIIEDD

SEQ ID NO: 33325 - protein, 85 aa, unidentified
  REGION 1..85: note = Description of Unknown:cds_NZ_WFIY01000004.1_cds_WP_155863294.1_1252 target sequence
IYGFFSYEEDVKTFRSFSDPVIYVSSFSKILSPGLRVGFILVNDEDLLNKLIKIKMEVNHQISSLDQLIVKNVIRDPRFLDNLDK

SEQ ID NO: 33326 - protein, 85 aa, unidentified
  REGION 1..85: note = Description of Unknown:cds_NZ_WFIY01000004.1_cds_WP_155863294.1_1252 target sequence
AKKAYKEKRDLAMKIISEEFPESVQCTFPRGGFFTFCSGLNYKRLQGVQVVGGDKFYFEKGLGEDSFRISFSSLNKEELEKDLLE

SEQ ID NO: 33327 - protein, 84 aa, unidentified
  REGION 1..84: note = Description of Unknown:cds_NZ_WFIY01000004.1_cds_WP_155863294.1_1252 target sequence
MKIISEEFPESVQCTFPRGGFFTFCSGLNYKRLQGVQVVGGDKFYFEKGLGEDSFRISFSSLNKEELEKDLLEFATILKEIRKN

SEQ ID NO: 33328 - protein, 85 aa, unidentified
  REGION 1..85: note = Description of Unknown:cds_NZ_WFIY01000004.1_cds_WP_155863294.1_1252 target sequence
EEYDKALQYVDAQGIYEVREAIADFLKLRGVRAKPENIILTAGAKEALFLLSYLFNDVSIESPTYQGFISILKFKGLTNVYSVPI

SEQ ID NO: 33329 - protein, 85 aa, unidentified
  REGION 1..85: note = Description of Unknown:cds_NZ_WFIY01000004.1_cds_WP_155863294.1_1252 target sequence
SEDGINVESLEKIVRNHKFQFFYTVTINNPTGYVTTDYTKKEIIELPEKYGFRIIEDDIYGFFSYEEDVKTFRSFSDPVIYVSSF

SEQ ID NO: 33330 - protein, 85 aa, unidentified
  REGION 1..85: note = Description of Unknown:cds_NZ_WFIY01000004.1_cds_WP_155863294.1_1252 target sequence
SKILSPGLRVGFILVNDEDLLNKLIKIKMEVNHQISSLDQLIVKNVIRDPRFLDNLDKAKKAYKEKRDLAMKIISEEFPESVQCT

SEQ ID NO: 33331 - protein, 85 aa, unidentified
  REGION 1..85: note = Description of Unknown:cds_NC_001906.3_cds_NP_047110.2_5 target sequence
DFSVSDNLDDPIEGVSDFSPTSWENGGYLDKVEPEIDKHGSMIPKYKIYTPGANERKFNNYMYMICYGFVEDVERSPESGKRKKI

SEQ ID NO: 33332 - protein, 85 aa, unidentified
  REGION 1..85: note = Description of Unknown:cds_NC_001906.3_cds_NP_047110.2_5 target sequence
RTIAAYPLGVGKSTSHPQDLLEELCSLKVTVRRTAGATEKIVFGSSGPLHHLLPWKKILTGGSIFNAVKVCRNVDQIQLENQQSL

SEQ ID NO: 33333 - protein, 85 aa, unidentified
  REGION 1..85: note = Description of Unknown:cds_NC_001906.3_cds_NP_047110.2_5 target sequence
RIFFLSITKLNDSGIYMIPRTMLEFRRNNAIAFNLLVYLKIDADLAKAGIQGSFDKDGTKVASFMLHLGNFVRRAGKYYSVEYCK

SEQ ID NO: 33334 - protein, 85 aa, unidentified
  REGION 1..85: note = Description of Unknown:cds_NC_001906.3_cds_NP_047110.2_5 target sequence
RKIDRMKLQFSLGSIGGLSLHIKINGVISKRLFAQMGFQKNLCFSLMDINPWLNRLTWNNSCEISRVAAVLQPSVPREFMIYDDV

SEQ ID NO: 33335 - protein, 84 aa, unidentified
  REGION 1..84: note = Description of Unknown:cds_NC_001906.3_cds_NP_047110.2_5 target sequence
GSIGGLSLHIKINGVISKRLFAQMGFQKNLCFSLMDINPWLNRLTWNNSCEISRVAAVLQPSVPREFMIYDDVFIDNTGKILKG

SEQ ID NO: 33336 - protein, 85 aa, unidentified
  REGION 1..85: note = Description of Unknown:cds_NC_001906.3_cds_NP_047110.2_5 target sequence
YLDKVEPEIDKHGSMIPKYKIYTPGANERKFNNYMYMICYGFVEDVERSPESGKRKKIRTIAAYPLGVGKSTSHPQDLLEELCSL

SEQ ID NO: 33337 - protein, 85 aa, unidentified
  REGION 1..85: note = Description of Unknown:cds_NC_001906.3_cds_NP_047110.2_5 target sequence
KVTVRRTAGATEKIVFGSSGPLHHLLPWKKILTGGSIFNAVKVCRNVDQIQLENQQSLRIFFLSITKLNDSGIYMIPRTMLEFRR

SEQ ID NO: 33338 - protein, 85 aa, unidentified
  REGION 1..85: note = Description of Unknown:cds_NC_001906.3_cds_NP_047110.2_5 target sequence
NNAIAFNLLVYLKIDADLAKAGIQGSFDKDGTKVASFMLHLGNFVRRAGKYYSVEYCKRKIDRMKLQFSLGSIGGLSLHIKINGV

SEQ ID NO: 33339 - protein, 85 aa, unidentified
  REGION 1..85: note = Description of Unknown:cds_NZ_WFIY01000004.1_cds_WP_155862323.1_49 target sequence
SFERAPHLVFWEVTKACPLACKHCRANAIQNPLPGELTTAEGKKLLEEISTFGKVVVVFTGGDPLSRSDIFELMDYAKQLGLITS

SEQ ID NO: 33340 - protein, 85 aa, unidentified
  REGION 1..85: note = Description of Unknown:cds_NZ_WFIY01000004.1_cds_WP_155862323.1_49 target sequence
IAPAPSYKLNEDNIRKIKEVGVTYMSISLDGAKPETHDWLRGLTSYKYAINGIKEGLKQGLTVQVNTLIWKGSYPELPQIAKILH

SEQ ID NO: 33341 - protein, 85 aa, unidentified
  REGION 1..85: note = Description of Unknown:cds_NZ_WFIY01000004.1_cds_WP_155862323.1_49 target sequence
DLGVKVWEIFFLIPVGRGSVELDIPKENYKKVINFLLEVSKYNIIVRTVEGPFFRRAKLEYPEGFENNELIEELRKLLGKPPKED

SEQ ID NO: 33342 - protein, 85 aa, unidentified
  REGION 1..85: note = Description of Unknown:cds_NZ_WFIY01000004.1_cds_WP_155862323.1_49 target sequence
VDKSIVPTRDGSGVIFISYDGEIYPSGFLPLSLGNVRKDSIVKIYRESHILKLIKEGKLKGKCGSCKYVNVCGGSRARAYAVYGD

SEQ ID NO: 33343 - protein, 84 aa, unidentified
  REGION 1..84: note = Description of Unknown:cds_NZ_WFIY01000004.1_cds_WP_155862323.1_49 target sequence
SGVIFISYDGEIYPSGFLPLSLGNVRKDSIVKIYRESHILKLIKEGKLKGKCGSCKYVNVCGGSRARAYAVYGDPLEEDPACPY

SEQ ID NO: 33344 - protein, 85 aa, unidentified
  REGION 1..85: note = Description of Unknown:cds_NZ_WFIY01000004.1_cds_WP_155862323.1_49 target sequence
AIQNPLPGELTTAEGKKLLEEISTFGKVVVVFTGGDPLSRSDIFELMDYAKQLGLITSIAPAPSYKLNEDNIRKIKEVGVTYMSI

SEQ ID NO: 33345 - protein, 85 aa, unidentified
  REGION 1..85: note = Description of Unknown:cds_NZ_WFIY01000004.1_cds_WP_155862323.1_49 target sequence
SLDGAKPETHDWLRGLTSYKYAINGIKEGLKQGLTVQVNTLIWKGSYPELPQIAKILHDLGVKVWEIFFLIPVGRGSVELDIPKE

SEQ ID NO: 33346 - protein, 85 aa, unidentified
  REGION 1..85: note = Description of Unknown:cds_NZ_WFIY01000004.1_cds_WP_155862323.1_49 target sequence
NYKKVINFLLEVSKYNIIVRTVEGPFFRRAKLEYPEGFENNELIEELRKLLGKPPKEDVDKSIVPTRDGSGVIFISYDGEIYPSG

SEQ ID NO: 33347 - protein, 85 aa, unidentified
  REGION 1..85: note = Description of Unknown:cds_NZ_WFIY01000004.1_cds_WP_155864358.1_162 target sequence
LLFDERPKDRKEDLFDREKEVEEIISNIKRPLLLISGVRRIGKTSVLLVSLNELKENYILIDCRKLKENYGRKELYSLFSEALSS

SEQ ID NO: 33348 - protein, 85 aa, unidentified
  REGION 1..85: note = Description of Unknown:cds_NZ_WFIY01000004.1_cds_WP_155864358.1_162 target sequence
KLSYLKDVLEKVKGINIAGNYVELKWGGKNYISLSSLFDELNKKRLIIAIDEAQRLRGPLSKEIKDAIAHAYDYDKNLTFILTGS

SEQ ID NO: 33349 - protein, 85 aa, unidentified
  REGION 1..85: note = Description of Unknown:cds_NZ_WFIY01000004.1_cds_WP_155864358.1_162 target sequence
EVGLLHELIDVENENSPVYGRYYLEITLDRFNKEKSKEFLQRGFQELSIKVEDKVIEEIIDYFDGIPGWLTFAGNEYATMGKIEE

SEQ ID NO: 33350 - protein, 85 aa, unidentified
  REGION 1..85: note = Description of Unknown:cds_NZ_WFIY01000004.1_cds_WP_155864358.1_162 target sequence
VKKTAVKVAKGELENLIEEKTKKVSYITGKRYRNALKCLAKGENSWSKLLSCMEKEEGSTISTSVLDNIIQNLEKMSIIKDYEFL

SEQ ID NO: 33351 - protein, 84 aa, unidentified
  REGION 1..84: note = Description of Unknown:cds_NZ_WFIY01000004.1_cds_WP_155864358.1_162 target sequence
LENLIEEKTKKVSYITGKRYRNALKCLAKGENSWSKLLSCMEKEEGSTISTSVLDNIIQNLEKMSIIKDYEFLDPVYKEASKLL

SEQ ID NO: 33352 - protein, 85 aa, unidentified
  REGION 1..85: note = Description of Unknown:cds_NZ_WFIY01000004.1_cds_WP_155864358.1_162 target sequence
IKRPLLLISGVRRIGKTSVLLVSLNELKENYILIDCRKLKENYGRKELYSLFSEALSSKLSYLKDVLEKVKGINIAGNYVELKWG

SEQ ID NO: 33353 - protein, 85 aa, unidentified
  REGION 1..85: note = Description of Unknown:cds_NZ_WFIY01000004.1_cds_WP_155864358.1_162 target sequence
GKNYISLSSLFDELNKKRLIIAIDEAQRLRGPLSKEIKDAIAHAYDYDKNLTFILTGSEVGLLHELIDVENENSPVYGRYYLEIT

SEQ ID NO: 33354 - protein, 85 aa, unidentified
  REGION 1..85: note = Description of Unknown:cds_NZ_WFIY01000004.1_cds_WP_155864358.1_162 target sequence
LDRFNKEKSKEFLQRGFQELSIKVEDKVIEEIIDYFDGIPGWLTFAGNEYATMGKIEEVKKTAVKVAKGELENLIEEKTKKVSYI

SEQ ID NO: 33355 - protein, 85 aa, unidentified
  REGION 1..85: note = Description of Unknown:cds_NZ_WFIY01000004.1_cds_WP_155863142.1_1065 target sequence
TLILKVDPLNPEIDKIREAAKYIKLGGIVAFPTETVYGLGGDAYNPEAAIKVFKAKNRPMDNPLIVHIADLNQLFDVAKDIPDIV

SEQ ID NO: 33356 - protein, 85 aa, unidentified
  REGION 1..85: note = Description of Unknown:cds_NZ_WFIY01000004.1_cds_WP_155863142.1_1065 target sequence
LDMAQKVWPGPLTFVLKKTDKVPKETTGGLDTVAVRMPAHPIALQLIRESGVPIAAPSANLATKPSPTKAEHVISDLNGRVDVII

SEQ ID NO: 33357 - protein, 85 aa, unidentified
  REGION 1..85: note = Description of Unknown:cds_NZ_WFIY01000004.1_cds_WP_155863142.1_1065 target sequence
DGGDTFFGVESTIINMTVNPPVLLRPGPFTLEELHQFLPEIVIPEQLIKGGEFTVALAPGMKYRHYAPSKKLLLVENYSIFKEVV

SEQ ID NO: 33358 - protein, 85 aa, unidentified
  REGION 1..85: note = Description of Unknown:cds_NZ_WFIY01000004.1_cds_WP_155863142.1_1065 target sequence
KLLRSKYKVAVLCTTEDFKDFDEPRIILGSRENLYEIAKNLFDSFRKLDRLDVDMGVMEGVPEKGIGFAIMNRARKASGFSIIKT

SEQ ID NO: 33359 - protein, 84 aa, unidentified
  REGION 1..84: note = Description of Unknown:cds_NZ_WFIY01000004.1_cds_WP_155863142.1_1065 target sequence
LCTTEDFKDFDEPRIILGSRENLYEIAKNLFDSFRKLDRLDVDMGVMEGVPEKGIGFAIMNRARKASGFSIIKTLDDVKKYVEI

SEQ ID NO: 33360 - protein, 85 aa, unidentified
  REGION 1..85: note = Description of Unknown:cds_NZ_WFIY01000004.1_cds_WP_155863142.1_1065 target sequence
IVAFPTETVYGLGGDAYNPEAAIKVFKAKNRPMDNPLIVHIADLNQLFDVAKDIPDIVLDMAQKVWPGPLTFVLKKTDKVPKETT

SEQ ID NO: 33361 - protein, 85 aa, unidentified
  REGION 1..85: note = Description of Unknown:cds_NZ_WFIY01000004.1_cds_WP_155863142.1_1065 target sequence
GGLDTVAVRMPAHPIALQLIRESGVPIAAPSANLATKPSPTKAEHVISDLNGRVDVIIDGGDTFFGVESTIINMTVNPPVLLRPG

SEQ ID NO: 33362 - protein, 85 aa, unidentified
  REGION 1..85: note = Description of Unknown:cds_NZ_WFIY01000004.1_cds_WP_155863142.1_1065 target sequence
PFTLEELHQFLPEIVIPEQLIKGGEFTVALAPGMKYRHYAPSKKLLLVENYSIFKEVVKLLRSKYKVAVLCTTEDFKDFDEPRII

SEQ ID NO: 33363 - protein, 85 aa, unidentified
  REGION 1..85: note = Description of Unknown:cds_NZ_WFIY01000004.1_cds_1638 target sequence
VLWLVFTSGKCNLKCDYCGGSFPKDVVPWNVKYDINKLKSLIERDPEATVIFYGGEPLSNPKFIMKFLDYIKAKRYGIQTNGTLI

SEQ ID NO: 33364 - protein, 85 aa, unidentified
  REGION 1..85: note = Description of Unknown:cds_NZ_WFIY01000004.1_cds_1638 target sequence
KLLPENYWKKINVALLSIDGRKEITEKHRGKYIYDIVVKNARYLKSLGIETIARMTVTQDSDIFEEVTHLLRLGIFDKIHWQLNV

SEQ ID NO: 33365 - protein, 85 aa, unidentified
  REGION 1..85: note = Description of Unknown:cds_NZ_WFIY01000004.1_cds_1638 target sequence
IWSDKWNVEKWAKESYLPGIKKLVDLFLEELKKGKVIKIIPILGVLSAYFFGGYKGSPCGAGYKSVAITTDGRILSCPIAVWENW

SEQ ID NO: 33366 - protein, 85 aa, unidentified
  REGION 1..85: note = Description of Unknown:cds_NZ_WFIY01000004.1_cds_1638 target sequence
AVLGNVNSGFRLLEDPLPEICKKCEFKEYCGGRCLYSMKENYWGEEGFKEVDEITKEYLKTVLSIIPTIKELIEQGIIKLSDLKY

SEQ ID NO: 33367 - protein, 84 aa, unidentified
  REGION 1..84: note = Description of Unknown:cds_NZ_WFIY01000004.1_cds_1638 target sequence
LEDPLPEICKKCEFKEYCGGRCLYSMKENYWGEEGFKEVDEITKEYLKTVLSIIPTIKELIEQGIIKLSDLKYDPTLDSTEVIP

SEQ ID NO: 33368 - protein, 85 aa, unidentified
  REGION 1..85: note = Description of Unknown:cds_NZ_WFIY01000004.1_cds_1638 target sequence
PWNVKYDINKLKSLIERDPEATVIFYGGEPLSNPKFIMKFLDYIKAKRYGIQTNGTLIKLLPENYWKKINVALLSIDGRKEITEK

SEQ ID NO: 33369 - protein, 85 aa, unidentified
  REGION 1..85: note = Description of Unknown:cds_NZ_WFIY01000004.1_cds_1638 target sequence
HRGKYIYDIVVKNARYLKSLGIETIARMTVTQDSDIFEEVTHLLRLGIFDKIHWQLNVIWSDKWNVEKWAKESYLPGIKKLVDLF

SEQ ID NO: 33370 - protein, 85 aa, unidentified
  REGION 1..85: note = Description of Unknown:cds_NZ_WFIY01000004.1_cds_1638 target sequence
LEELKKGKVIKIIPILGVLSAYFFGGYKGSPCGAGYKSVAITTDGRILSCPIAVWENWAVLGNVNSGFRLLEDPLPEICKKCEFK

SEQ ID NO: 33371 - protein, 85 aa, unidentified
  REGION 1..85: note = Description of Unknown:cds_NC_035460.1_cds_YP_009408095.1_144 target sequence
TIYAVTGGNGFIGRAIVQTIIDYDKTATEVRVLDLNHTVVFNTESSSIKLCTIKCDITNYKEFINAVKGVDVLIHSAAIVDVFGK

SEQ ID NO: 33372 - protein, 85 aa, unidentified
  REGION 1..85: note = Description of Unknown:cds_NC_035460.1_cds_YP_009408095.1_144 target sequence
YDENIIYRVNFHGTKNVISACLKVDIPYLIYTSSMEVVGPNNNGEPFTGNEYTYYNSQHTHPYPKSKQAAEKLVLSANGLRTEMG

SEQ ID NO: 33373 - protein, 85 aa, unidentified
  REGION 1..85: note = Description of Unknown:cds_NC_035460.1_cds_YP_009408095.1_144 target sequence
YILKTCALRPTGVYGEGCELLKKIYQKCKSQRNKMFMTVNKGVIHSRVYVGNVAWMHLLISKELINDSRLGGNVYFCYDNSFKCE

SEQ ID NO: 33374 - protein, 85 aa, unidentified
  REGION 1..85: note = Description of Unknown:cds_NC_035460.1_cds_YP_009408095.1_144 target sequence
YDKFNLMILNYLNIKKGKRIPKYLLKCVAKTNNIIHRIYKEYTPMLNSYTLTMANTCFNVCTNKAQIDFNYKPLFSFEEAIHKTV

SEQ ID NO: 33375 - protein, 84 aa, unidentified
  REGION 1..84: note = Description of Unknown:cds_NC_035460.1_cds_YP_009408095.1_144 target sequence
LNIKKGKRIPKYLLKCVAKTNNIIHRIYKEYTPMLNSYTLTMANTCFNVCTNKAQIDFNYKPLFSFEEAIHKTVLWLKKEVDGE

SEQ ID NO: 33376 - protein, 85 aa, unidentified
  REGION 1..85: note = Description of Unknown:cds_NC_035460.1_cds_YP_009408095.1_144 target sequence
TEVRVLDLNHTVVFNTESSSIKLCTIKCDITNYKEFINAVKGVDVLIHSAAIVDVFGKYDENIIYRVNFHGTKNVISACLKVDIP

SEQ ID NO: 33377 - protein, 85 aa, unidentified
  REGION 1..85: note = Description of Unknown:cds_NC_035460.1_cds_YP_009408095.1_144 target sequence
YLIYTSSMEVVGPNNNGEPFTGNEYTYYNSQHTHPYPKSKQAAEKLVLSANGLRTEMGYILKTCALRPTGVYGEGCELLKKIYQK

SEQ ID NO: 33378 - protein, 85 aa, unidentified
  REGION 1..85: note = Description of Unknown:cds_NC_035460.1_cds_YP_009408095.1_144 target sequence
CKSQRNKMFMTVNKGVIHSRVYVGNVAWMHLLISKELINDSRLGGNVYFCYDNSFKCEYDKFNLMILNYLNIKKGKRIPKYLLKC

SEQ ID NO: 33379 - protein, 85 aa, unidentified
  REGION 1..85: note = Description of Unknown:cds_NC_003214.2_cds_NP_445708.1_43 target sequence
VEIKDLQCNIFIPDPLSIKHMKIALVRDLTNNSFGRQATLLEKGLKELGHEVTSFEKNSIRKEDLPPGFDDYIYYTIFNTQLFWK

SEQ ID NO: 33380 - protein, 85 aa, unidentified
  REGION 1..85: note = Description of Unknown:cds_NC_003214.2_cds_NP_445708.1_43 target sequence
GIPKHGKNIVFEVADTDAISSVALYFFRHQPVDKIIVPSQWSKNAFYTLKLPIPQPIYVIPHALNPSMFSYPPKEMPHPCVLAIL

SEQ ID NO: 33381 - protein, 85 aa, unidentified
  REGION 1..85: note = Description of Unknown:cds_NC_003214.2_cds_NP_445708.1_43 target sequence
PHSWDRKGGDIVVNVFRELMNSGYHFYPLILVSNMLEPRLRGLNAVKTPLPDPDYYSLFAGCDILFYPVRGGAFEIPVIEALALG

SEQ ID NO: 33382 - protein, 85 aa, unidentified
  REGION 1..85: note = Description of Unknown:cds_NC_003214.2_cds_NP_445708.1_43 target sequence
LDVVVTEKGAWSEWILNNDDVYWIKVNKKVKLWYTNLFHVGYFLEPDYNDAYQKLVMALANWHPEKKKENLENRAILYRERYNYI

SEQ ID NO: 33383 - protein, 84 aa, unidentified
  REGION 1..84: note = Description of Unknown:cds_NC_003214.2_cds_NP_445708.1_43 target sequence
EWILNNDDVYWIKVNKKVKLWYTNLFHVGYFLEPDYNDAYQKLVMALANWHPEKKKENLENRAILYRERYNYINIAKEWEKILA

SEQ ID NO: 33384 - protein, 85 aa, unidentified
  REGION 1..85: note = Description of Unknown:cds_NC_003214.2_cds_NP_445708.1_43 target sequence
DLTNNSFGRQATLLEKGLKELGHEVTSFEKNSIRKEDLPPGFDDYIYYTIFNTQLFWKGIPKHGKNIVFEVADTDAISSVALYFF

SEQ ID NO: 33385 - protein, 85 aa, unidentified
  REGION 1..85: note = Description of Unknown:cds_NC_003214.2_cds_NP_445708.1_43 target sequence
RHQPVDKIIVPSQWSKNAFYTLKLPIPQPIYVIPHALNPSMFSYPPKEMPHPCVLAILPHSWDRKGGDIVVNVFRELMNSGYHFY

SEQ ID NO: 33386 - protein, 85 aa, unidentified
  REGION 1..85: note = Description of Unknown:cds_NC_003214.2_cds_NP_445708.1_43 target sequence
PLILVSNMLEPRLRGLNAVKTPLPDPDYYSLFAGCDILFYPVRGGAFEIPVIEALALGLDVVVTEKGAWSEWILNNDDVYWIKVN

SEQ ID NO: 33387 - protein, 85 aa, unidentified
  REGION 1..85: note = Description of Unknown:hvTR_Q0R5R1 target sequence
AHFPGFGQSLLYGYPVYVFGDCVQADWCPISGGLCSARLHRHALLATCPEHQITWDPIDGRVVSSALQYLIPRLPSFPTQRTTRT

SEQ ID NO: 33388 - protein, 85 aa, unidentified
  REGION 1..85: note = Description of Unknown:hvTR_Q0R5R1 target sequence
LKVLTPPTTAATPKIPPSFFHAVKKHTPFRNNCLELTLGEQLPAMSFPDPGLRPQNIYTMWGSSVVCLYLYQLSPPMTWPLIPHV

SEQ ID NO: 33389 - protein, 85 aa, unidentified
  REGION 1..85: note = Description of Unknown:hvTR_Q0R5R1 target sequence
IFCHPEQLGAFLTRVPTKRLEELLYKIFLSTGAIIILPENCFPTTLFQPTRAPAVQAPWHTGLLPCQKEIATPGLIWTFTDGSPM

SEQ ID NO: 33390 - protein, 85 aa, unidentified
  REGION 1..85: note = Description of Unknown:hvTR_Q0R5R1 target sequence
ISGPCPKEGQPSLVVQSSTFIFQQFQTKASHPAFLLSHKLIHYSSFHSLHLLFEEYTTIPFSLLFNEKGANVDDDEPRDGSQPPA

SEQ ID NO: 33391 - protein, 84 aa, unidentified
  REGION 1..84: note = Description of Unknown:hvTR_Q0R5R1 target sequence
PSLVVQSSTFIFQQFQTKASHPAFLLSHKLIHYSSFHSLHLLFEEYTTIPFSLLFNEKGANVDDDEPRDGSQPPARGQIAESPV

SEQ ID NO: 33392 - protein, 85 aa, unidentified
  REGION 1..85: note = Description of Unknown:hvTR_Q0R5R1 target sequence
CPISGGLCSARLHRHALLATCPEHQITWDPIDGRVVSSALQYLIPRLPSFPTQRTTRTLKVLTPPTTAATPKIPPSFFHAVKKHT

SEQ ID NO: 33393 - protein, 85 aa, unidentified
  REGION 1..85: note = Description of Unknown:hvTR_Q0R5R1 target sequence
PFRNNCLELTLGEQLPAMSFPDPGLRPQNIYTMWGSSVVCLYLYQLSPPMTWPLIPHVIFCHPEQLGAFLTRVPTKRLEELLYKI

SEQ ID NO: 33394 - protein, 85 aa, unidentified
  REGION 1..85: note = Description of Unknown:hvTR_Q0R5R1 target sequence
FLSTGAIIILPENCFPTTLFQPTRAPAVQAPWHTGLLPCQKEIATPGLIWTFTDGSPMISGPCPKEGQPSLVVQSSTFIFQQFQT

SEQ ID NO: 33395 - protein, 85 aa, unidentified
  REGION 1..85: note = Description of Unknown:cds_NZ_WFIY01000004.1_cds_WP_155862481.1_237 target sequence
DKLKVSLLGSTGMVGQKMVKMLSSHPFIELTKVSASPAKIGKKYEEAVKWIEGEIPENVKDMKLVSTEPEDHKDVDVVLSALPNE

SEQ ID NO: 33396 - protein, 85 aa, unidentified
  REGION 1..85: note = Description of Unknown:cds_NZ_WFIY01000004.1_cds_WP_155862481.1_237 target sequence
LAEDIELKLVRAGKIVVSNASPYRMDPEVPLINPEINWQHLELLKTQQNKRGWKGLLVKNPNCTAAIMSLPLKPLMELITQRKII

SEQ ID NO: 33397 - protein, 85 aa, unidentified
  REGION 1..85: note = Description of Unknown:cds_NZ_WFIY01000004.1_cds_WP_155862481.1_237 target sequence
MTTLQAVSGAGYNGLSFMSIYNNIIPYIKGEEEKIPKELGKMLGQVQDGQIINAKINARVTSIRVPIKVGHMGVINILLDDNDKI

SEQ ID NO: 33398 - protein, 85 aa, unidentified
  REGION 1..85: note = Description of Unknown:cds_NZ_WFIY01000004.1_cds_WP_155862481.1_237 target sequence
DIEEIKRELKNFKSLPQEKNLPTAPKKPIIVNEDESRPQPEIDLKIENGMAVSVGRISVENNVLRMIVLGDNLVRGAAGITILTV

SEQ ID NO: 33399 - protein, 84 aa, unidentified
  REGION 1..84: note = Description of Unknown:cds_NZ_WFIY01000004.1_cds_WP_155862481.1_237 target sequence
NFKSLPQEKNLPTAPKKPIIVNEDESRPQPEIDLKIENGMAVSVGRISVENNVLRMIVLGDNLVRGAAGITILTVEVMKELGYI

SEQ ID NO: 33400 - protein, 85 aa, unidentified
  REGION 1..85: note = Description of Unknown:cds_NZ_WFIY01000004.1_cds_WP_155862481.1_237 target sequence
IELTKVSASPAKIGKKYEEAVKWIEGEIPENVKDMKLVSTEPEDHKDVDVVLSALPNELAEDIELKLVRAGKIVVSNASPYRMDP

SEQ ID NO: 33401 - protein, 85 aa, unidentified
  REGION 1..85: note = Description of Unknown:cds_NZ_WFIY01000004.1_cds_WP_155862481.1_237 target sequence
EVPLINPEINWQHLELLKTQQNKRGWKGLLVKNPNCTAAIMSLPLKPLMELITQRKIIMTTLQAVSGAGYNGLSFMSIYNNIIPY

SEQ ID NO: 33402 - protein, 85 aa, unidentified
  REGION 1..85: note = Description of Unknown:cds_NZ_WFIY01000004.1_cds_WP_155862481.1_237 target sequence
IKGEEEKIPKELGKMLGQVQDGQIINAKINARVTSIRVPIKVGHMGVINILLDDNDKIDIEEIKRELKNFKSLPQEKNLPTAPKK

SEQ ID NO: 33403 - protein, 85 aa, unidentified
  REGION 1..85: note = Description of Unknown:cds_NZ_WFIY01000004.1_cds_WP_155862557.1_326 target sequence
RVKKLEELSQKYNNSCVIISGDPNVYYFTNYKGSGTIIYCDGVATLLVPLLEENRAREISGLDVKIYYPSNIANGILVGSLSDIL

SEQ ID NO: 33404 - protein, 85 aa, unidentified
  REGION 1..85: note = Description of Unknown:cds_NZ_WFIY01000004.1_cds_WP_155862557.1_326 target sequence
PKLITKSTVALDINWSTVSIYKLLSSKYNLIDISKDISEMRSIKDDEELEKIKKAGEITSEAMKVSMEKILEGEITEKQLSGIID

SEQ ID NO: 33405 - protein, 85 aa, unidentified
  REGION 1..85: note = Description of Unknown:cds_NZ_WFIY01000004.1_cds_WP_155862557.1_326 target sequence
YTMKASGAEDYAFPSIVASGKNSSFPHHIPTDKKILENDNVVVDIGAKFDGYCFDSTRTFNIKGEIRKIYEIVLEAQLEAIDAVT

SEQ ID NO: 33406 - protein, 85 aa, unidentified
  REGION 1..85: note = Description of Unknown:cds_NZ_WFIY01000004.1_cds_WP_155862557.1_326 target sequence
SGVNASEIDKTARKVIEKYGYGRYFVHSTGHGVGIEVHESPYISFNSNDVLKKNMVITVEPGIYIKDKFGVRIEDTLIVTNGKPE

SEQ ID NO: 33407 - protein, 84 aa, unidentified
  REGION 1..84: note = Description of Unknown:cds_NZ_WFIY01000004.1_cds_WP_155862557.1_326 target sequence
TARKVIEKYGYGRYFVHSTGHGVGIEVHESPYISFNSNDVLKKNMVITVEPGIYIKDKFGVRIEDTLIVTNGKPEVLETTYKLL

SEQ ID NO: 33408 - protein, 85 aa, unidentified
  REGION 1..85: note = Description of Unknown:cds_NZ_WFIY01000004.1_cds_WP_155862557.1_326 target sequence
FTNYKGSGTIIYCDGVATLLVPLLEENRAREISGLDVKIYYPSNIANGILVGSLSDILPKLITKSTVALDINWSTVSIYKLLSSK

SEQ ID NO: 33409 - protein, 85 aa, unidentified
  REGION 1..85: note = Description of Unknown:cds_NZ_WFIY01000004.1_cds_WP_155862557.1_326 target sequence
YNLIDISKDISEMRSIKDDEELEKIKKAGEITSEAMKVSMEKILEGEITEKQLSGIIDYTMKASGAEDYAFPSIVASGKNSSFPH

SEQ ID NO: 33410 - protein, 85 aa, unidentified
  REGION 1..85: note = Description of Unknown:cds_NZ_WFIY01000004.1_cds_WP_155862557.1_326 target sequence
HIPTDKKILENDNVVVDIGAKFDGYCFDSTRTFNIKGEIRKIYEIVLEAQLEAIDAVTSGVNASEIDKTARKVIEKYGYGRYFVH

SEQ ID NO: 33411 - protein, 85 aa, unidentified
  REGION 1..85: note = Description of Unknown:cds_NZ_WFIY01000004.1_cds_WP_155862602.1_379 target sequence
SGLEDLRKEIEEIDENIIKLLSRRFQISQQIGKIKKEKGIPITDENRESKVKEKWITLARKYGIPESFVESFLTMIFSYSKLYQI

SEQ ID NO: 33412 - protein, 85 aa, unidentified
  REGION 1..85: note = Description of Unknown:cds_NZ_WFIY01000004.1_cds_WP_155862602.1_379 target sequence
NPKSKRRIVIIGYGGMARSLSSLFKISGQEVVITGRDLKKAEALSSEFNFVTMNIDSALKWGEIIISTLPPSAYFSDFMDETYKK

SEQ ID NO: 33413 - protein, 85 aa, unidentified
  REGION 1..85: note = Description of Unknown:cds_NZ_WFIY01000004.1_cds_WP_155862602.1_379 target sequence
IKAKIFMDITSSKAKIFKDIENKSIKYNFMYISIHPLFGPYLYPVGEKVVLIPSKTSTSIVRDIYEFFMDNGLVPLISNLEDHEK

SEQ ID NO: 33414 - protein, 85 aa, unidentified
  REGION 1..85: note = Description of Unknown:cds_NZ_WFIY01000004.1_cds_WP_155862602.1_379 target sequence
AMSIVQVLPHFYLLALSSSIQELSKELGIDFKKFETTNFREIYKIINRIYEIKNVILEIQENNPYADKAREFGVRELNNLYTQLM

SEQ ID NO: 33415 - protein, 84 aa, unidentified
  REGION 1..84: note = Description of Unknown:cds_NZ_WFIY01000004.1_cds_WP_155862602.1_379 target sequence
FYLLALSSSIQELSKELGIDFKKFETTNFREIYKIINRIYEIKNVILEIQENNPYADKAREFGVRELNNLYTQLMGKKNDALHS

SEQ ID NO: 33416 - protein, 85 aa, unidentified
  REGION 1..85: note = Description of Unknown:cds_NZ_WFIY01000004.1_cds_WP_155862602.1_379 target sequence
SQQIGKIKKEKGIPITDENRESKVKEKWITLARKYGIPESFVESFLTMIFSYSKLYQINPKSKRRIVIIGYGGMARSLSSLFKIS

SEQ ID NO: 33417 - protein, 85 aa, unidentified
  REGION 1..85: note = Description of Unknown:cds_NZ_WFIY01000004.1_cds_WP_155862602.1_379 target sequence
GQEVVITGRDLKKAEALSSEFNFVTMNIDSALKWGEIIISTLPPSAYFSDFMDETYKKIKAKIFMDITSSKAKIFKDIENKSIKY

SEQ ID NO: 33418 - protein, 85 aa, unidentified
  REGION 1..85: note = Description of Unknown:cds_NZ_WFIY01000004.1_cds_WP_155862602.1_379 target sequence
NFMYISIHPLFGPYLYPVGEKVVLIPSKTSTSIVRDIYEFFMDNGLVPLISNLEDHEKAMSIVQVLPHFYLLALSSSIQELSKEL

SEQ ID NO: 33419 - protein, 85 aa, unidentified
  REGION 1..85: note = Description of Unknown:cds_NZ_WFIY01000004.1_cds_WP_155862820.1_649 target sequence
FKNLSEELTKALQEANYVNPTKVQELAIPQMLQGKSVLAQAKTGSGKTAAYLIPILEKEEQALVLTPTRELAEQVADEARKLGKY

SEQ ID NO: 33420 - protein, 85 aa, unidentified
  REGION 1..85: note = Description of Unknown:cds_NZ_WFIY01000004.1_cds_WP_155862820.1_649 target sequence
KKMSIGVIIGGVPYSGQDKEAKKDIVIGTPGRILDLWGKGHLDLSRFSVAIVDEVDRMFDMGFIDDVKMILKNANPDMYGFFSAT

SEQ ID NO: 33421 - protein, 85 aa, unidentified
  REGION 1..85: note = Description of Unknown:cds_NZ_WFIY01000004.1_cds_WP_155862820.1_649 target sequence
VPEEVESLVKEFSPNIEFLKVDDIKPVEIEHLFYEVKGWRDKISKLKDELDDNEKTIVFVNTKKKVEELYEELRDDFEISLLHGD

SEQ ID NO: 33422 - protein, 85 aa, unidentified
  REGION 1..85: note = Description of Unknown:cds_NZ_WFIY01000004.1_cds_WP_155862820.1_649 target sequence
LPQRVRLRNLSSFRRGKTNVLLSTDLASRGIDVIDVTKVINFDTPRDIETYIHRVGRTGRMGRKGIAITFYTRRDAQLILKIKDL

SEQ ID NO: 33423 - protein, 84 aa, unidentified
  REGION 1..84: note = Description of Unknown:cds_NZ_WFIY01000004.1_cds_WP_155862820.1_649 target sequence
SSFRRGKTNVLLSTDLASRGIDVIDVTKVINFDTPRDIETYIHRVGRTGRMGRKGIAITFYTRRDAQLILKIKDLIKGKKLEVQ

SEQ ID NO: 33424 - protein, 85 aa, unidentified
  REGION 1..85: note = Description of Unknown:cds_NZ_WFIY01000004.1_cds_WP_155862820.1_649 target sequence
IPQMLQGKSVLAQAKTGSGKTAAYLIPILEKEEQALVLTPTRELAEQVADEARKLGKYKKMSIGVIIGGVPYSGQDKEAKKDIVI

SEQ ID NO: 33425 - protein, 85 aa, unidentified
  REGION 1..85: note = Description of Unknown:cds_NZ_WFIY01000004.1_cds_WP_155862820.1_649 target sequence
GTPGRILDLWGKGHLDLSRFSVAIVDEVDRMFDMGFIDDVKMILKNANPDMYGFFSATVPEEVESLVKEFSPNIEFLKVDDIKPV

SEQ ID NO: 33426 - protein, 85 aa, unidentified
  REGION 1..85: note = Description of Unknown:cds_NZ_WFIY01000004.1_cds_WP_155862820.1_649 target sequence
EIEHLFYEVKGWRDKISKLKDELDDNEKTIVFVNTKKKVEELYEELRDDFEISLLHGDLPQRVRLRNLSSFRRGKTNVLLSTDLA

SEQ ID NO: 33427 - protein, 85 aa, unidentified
  REGION 1..85: note = Description of Unknown:cds_NZ_WFIY01000004.1_cds_WP_155863262.1_1216 target sequence
RFYINDLYKLAIGSAILGSGGGGNPFLGYKLLKAKMLEYNLSYVETTDDIDDSDFIIGVGGMGSPLIGIEKLPAGYEYYNSMLIL

SEQ ID NO: 33428 - protein, 85 aa, unidentified
  REGION 1..85: note = Description of Unknown:cds_NZ_WFIY01000004.1_cds_WP_155863262.1_1216 target sequence
SKFMRKRFTKISPIEIGGINSLVPFMASIFAKVPVIDGDYEGRAFPELYMTTMHFSGFSATPMAITDERGNYAIISTADNLLAEK

SEQ ID NO: 33429 - protein, 85 aa, unidentified
  REGION 1..85: note = Description of Unknown:cds_NZ_WFIY01000004.1_cds_WP_155863262.1_1216 target sequence
IARDITVRFGGRGYISIYPTNGEDYTKGAILGSVSLAYEIGNKLAEEGLDEMLSYANGRIVFQGKIIDVRKFNVSGFNIGFISLE

SEQ ID NO: 33430 - protein, 85 aa, unidentified
  REGION 1..85: note = Description of Unknown:cds_NZ_WFIY01000004.1_cds_WP_155863262.1_1216 target sequence
GLEEFKGSTATIIFKNEYLCFVKDSKCEVLSPEIITLLDYNHRNVITSDSLKYGLKVVVVTISVDKKWREIGGYEIMQKIVMNEI

SEQ ID NO: 33431 - protein, 84 aa, unidentified
  REGION 1..84: note = Description of Unknown:cds_NZ_WFIY01000004.1_cds_WP_155863262.1_1216 target sequence
TIIFKNEYLCFVKDSKCEVLSPEIITLLDYNHRNVITSDSLKYGLKVVVVTISVDKKWREIGGYEIMQKIVMNEIKRILPLPSP

SEQ ID NO: 33432 - protein, 85 aa, unidentified
  REGION 1..85: note = Description of Unknown:cds_NZ_WFIY01000004.1_cds_WP_155863262.1_1216 target sequence
GYKLLKAKMLEYNLSYVETTDDIDDSDFIIGVGGMGSPLIGIEKLPAGYEYYNSMLILSKFMRKRFTKISPIEIGGINSLVPFMA

SEQ ID NO: 33433 - protein, 85 aa, unidentified
  REGION 1..85: note = Description of Unknown:cds_NZ_WFIY01000004.1_cds_WP_155863262.1_1216 target sequence
SIFAKVPVIDGDYEGRAFPELYMTTMHFSGFSATPMAITDERGNYAIISTADNLLAEKIARDITVRFGGRGYISIYPTNGEDYTK

SEQ ID NO: 33434 - protein, 85 aa, unidentified
  REGION 1..85: note = Description of Unknown:cds_NZ_WFIY01000004.1_cds_WP_155863262.1_1216 target sequence
GAILGSVSLAYEIGNKLAEEGLDEMLSYANGRIVFQGKIIDVRKFNVSGFNIGFISLEGLEEFKGSTATIIFKNEYLCFVKDSKC

SEQ ID NO: 33435 - protein, 85 aa, unidentified
  REGION 1..85: note = Description of Unknown:cds_NZ_WFIY01000004.1_cds_WP_155863336.1_1302 target sequence
IDLSVNFNGVTFPNPFLVGSGPTTGNPQKIISAIKAGWGGVVVKTIGDSIVRKAVRPMYGAFRKNKELIAFENLELITEDPLDVW

SEQ ID NO: 33436 - protein, 85 aa, unidentified
  REGION 1..85: note = Description of Unknown:cds_NZ_WFIY01000004.1_cds_WP_155863336.1_1302 target sequence
DKYMRIIKSEIGKSSPIIVSIMGGPDYSEWVKLARWAEDRGADMLELNFGCPHGEPERKTGAFIGQHADLVFKYTKEVTSAVGIP

SEQ ID NO: 33437 - protein, 85 aa, unidentified
  REGION 1..85: note = Description of Unknown:cds_NZ_WFIY01000004.1_cds_WP_155863336.1_1302 target sequence
VIVKLTPNVTEISEIAKEAENAGAKGVTAINTVNGIIGVDIERAQPLPDVNGYSGYGGISGPAIKPIGLAAVSKIYSSTSLQISG

SEQ ID NO: 33438 - protein, 85 aa, unidentified
  REGION 1..85: note = Description of Unknown:cds_NZ_WFIY01000004.1_cds_WP_155863336.1_1302 target sequence
VGGIFDWKDAVEYIMMGSTTVQSVTYTMIKGFEFISEWKKELESFMERKGYKAIEDMIGLAAKKIRPYEFLEKVTKRRTSVDEEM

SEQ ID NO: 33439 - protein, 84 aa, unidentified
  REGION 1..84: note = Description of Unknown:cds_NZ_WFIY01000004.1_cds_WP_155863336.1_1302 target sequence
VEYIMMGSTTVQSVTYTMIKGFEFISEWKKELESFMERKGYKAIEDMIGLAAKKIRPYEFLEKVTKRRTSVDEEMSIARGEIYG

SEQ ID NO: 33440 - protein, 85 aa, unidentified
  REGION 1..85: note = Description of Unknown:cds_NZ_WFIY01000004.1_cds_WP_155863336.1_1302 target sequence
QKIISAIKAGWGGVVVKTIGDSIVRKAVRPMYGAFRKNKELIAFENLELITEDPLDVWDKYMRIIKSEIGKSSPIIVSIMGGPDY

SEQ ID NO: 33441 - protein, 85 aa, unidentified
  REGION 1..85: note = Description of Unknown:cds_NZ_WFIY01000004.1_cds_WP_155863336.1_1302 target sequence
SEWVKLARWAEDRGADMLELNFGCPHGEPERKTGAFIGQHADLVFKYTKEVTSAVGIPVIVKLTPNVTEISEIAKEAENAGAKGV

SEQ ID NO: 33442 - protein, 85 aa, unidentified
  REGION 1..85: note = Description of Unknown:cds_NZ_WFIY01000004.1_cds_WP_155863336.1_1302 target sequence
TAINTVNGIIGVDIERAQPLPDVNGYSGYGGISGPAIKPIGLAAVSKIYSSTSLQISGVGGIFDWKDAVEYIMMGSTTVQSVTYT

SEQ ID NO: 33443 - protein, 85 aa, unidentified
  REGION 1..85: note = Description of Unknown:cds_NZ_WFIY01000004.1_cds_WP_155864448.1_1623 target sequence
KKNLSPERAFDIAFKKYMQGDRKELYREFLEYIKKYLYERNVYPGISPREVDMTIKPDPMLSFPKWIFERLYALLGEEGIKGIYN

SEQ ID NO: 33444 - protein, 85 aa, unidentified
  REGION 1..85: note = Description of Unknown:cds_NZ_WFIY01000004.1_cds_WP_155864448.1_1623 target sequence
HKTWARVNELKANVNDVVRLLESEGYKVKRTEINFLLEIESSDKRISDSTAFKEGLLIPQDKSSVLAVMILDPKPYEKILEIGSA

SEQ ID NO: 33445 - protein, 85 aa, unidentified
  REGION 1..85: note = Description of Unknown:cds_NZ_WFIY01000004.1_cds_WP_155864448.1_1623 target sequence
PGVKSSLIQQLTRNKSFLISIDISEKRIMQQKKLMEKWGVHNVELIVADALHLPIRKADKVFIDAPCSNSGTINVDPSVVLRLNK

SEQ ID NO: 33446 - protein, 85 aa, unidentified
  REGION 1..85: note = Description of Unknown:cds_NZ_WFIY01000004.1_cds_WP_155864448.1_1623 target sequence
RKLHELSSIQIGILKEASKLRTQVVYITCSLFPEEGEKVVEKFERNLVRIPNEGHEGYKKSRVWLRVFRTYPHKDFSEGFFIAKL

SEQ ID NO: 33447 - protein, 84 aa, unidentified
  REGION 1..84: note = Description of Unknown:cds_NZ_WFIY01000004.1_cds_WP_155864448.1_1623 target sequence
IGILKEASKLRTQVVYITCSLFPEEGEKVVEKFERNLVRIPNEGHEGYKKSRVWLRVFRTYPHKDFSEGFFIAKLDFSSPHSFQ

SEQ ID NO: 33448 - protein, 85 aa, unidentified
  REGION 1..85: note = Description of Unknown:cds_NZ_WFIY01000004.1_cds_WP_155864448.1_1623 target sequence
EFLEYIKKYLYERNVYPGISPREVDMTIKPDPMLSFPKWIFERLYALLGEEGIKGIYNHKTWARVNELKANVNDVVRLLESEGYK

SEQ ID NO: 33449 - protein, 85 aa, unidentified
  REGION 1..85: note = Description of Unknown:cds_NZ_WFIY01000004.1_cds_WP_155864448.1_1623 target sequence
VKRTEINFLLEIESSDKRISDSTAFKEGLLIPQDKSSVLAVMILDPKPYEKILEIGSAPGVKSSLIQQLTRNKSFLISIDISEKR

SEQ ID NO: 33450 - protein, 85 aa, unidentified
  REGION 1..85: note = Description of Unknown:cds_NZ_WFIY01000004.1_cds_WP_155864448.1_1623 target sequence
IMQQKKLMEKWGVHNVELIVADALHLPIRKADKVFIDAPCSNSGTINVDPSVVLRLNKRKLHELSSIQIGILKEASKLRTQVVYI

SEQ ID NO: 33451 - protein, 85 aa, unidentified
  REGION 1..85: note = Description of Unknown:cds_NZ_WFIY01000004.1_cds_WP_155864295.1_2288 target sequence
ISLDLLKLGEVIHGSEKEKEILSILEKRMQGNSKKIEVKTKEWVISNFSVKLNGKEVASSLAPYTKGYVKGKVGREILAFPFPDH

SEQ ID NO: 33452 - protein, 85 aa, unidentified
  REGION 1..85: note = Description of Unknown:cds_NZ_WFIY01000004.1_cds_WP_155864295.1_2288 target sequence
PFKVKDFYSYALSQGAEGIIFYEEGKTRRIIMPDVKIPVIFLPFKPEGYVEIEAESFLRDSISYNLEFTVKEGNDYILLGAHVDH

SEQ ID NO: 33453 - protein, 85 aa, unidentified
  REGION 1..85: note = Description of Unknown:cds_NZ_WFIY01000004.1_cds_WP_155864295.1_2288 target sequence
WLSGFHDNLFSIDVVLNSLAEVKNHGLKVVFFSSEEGPKCCTGSLQYPKDDVFAAIIFDALYPSRVVYSSTPDLWDFAGLFPLKR

SEQ ID NO: 33454 - protein, 85 aa, unidentified
  REGION 1..85: note = Description of Unknown:cds_NZ_WFIY01000004.1_cds_WP_155864295.1_2288 target sequence
IEMPTPFSDHFSFVQKGIPSLVLYNDDLIPYYHSDKDLPNPEDKKFLTKITESVKLLLHELDKLSMKDLNERMSKFGERKFIVDY

SEQ ID NO: 33455 - protein, 84 aa, unidentified
  REGION 1..84: note = Description of Unknown:cds_NZ_WFIY01000004.1_cds_WP_155864295.1_2288 target sequence
FSFVQKGIPSLVLYNDDLIPYYHSDKDLPNPEDKKFLTKITESVKLLLHELDKLSMKDLNERMSKFGERKFIVDYVNLTTSFAS

SEQ ID NO: 33456 - protein, 85 aa, unidentified
  REGION 1..85: note = Description of Unknown:cds_NZ_WFIY01000004.1_cds_WP_155864295.1_2288 target sequence
RMQGNSKKIEVKTKEWVISNFSVKLNGKEVASSLAPYTKGYVKGKVGREILAFPFPDHPFKVKDFYSYALSQGAEGIIFYEEGKT

SEQ ID NO: 33457 - protein, 85 aa, unidentified
  REGION 1..85: note = Description of Unknown:cds_NZ_WFIY01000004.1_cds_WP_155864295.1_2288 target sequence
RRIIMPDVKIPVIFLPFKPEGYVEIEAESFLRDSISYNLEFTVKEGNDYILLGAHVDHWLSGFHDNLFSIDVVLNSLAEVKNHGL

SEQ ID NO: 33458 - protein, 85 aa, unidentified
  REGION 1..85: note = Description of Unknown:cds_NZ_WFIY01000004.1_cds_WP_155864295.1_2288 target sequence
KVVFFSSEEGPKCCTGSLQYPKDDVFAAIIFDALYPSRVVYSSTPDLWDFAGLFPLKRIEMPTPFSDHFSFVQKGIPSLVLYNDD

SEQ ID NO: 33459 - protein, 85 aa, unidentified
  REGION 1..85: note = Description of Unknown:cds_NC_003214.2_cds_NP_445717.1_52 target sequence
VSNMSSTSTSVTQPAYTEAFMSAIATSVTGVNVSQYPSPSGYHVYLSSQTGIVDNTTDVSVYNVSDTYQNNNEVTSVTFIAIFKN

SEQ ID NO: 33460 - protein, 85 aa, unidentified
  REGION 1..85: note = Description of Unknown:cds_NC_003214.2_cds_NP_445717.1_52 target sequence
LSSYTFSEILFYTQVNGQDFMQVAQFIPSSAIQKSSGYALVIMITLSIATPVYIIDAIQDVQQLCTNYCINVNCNAVGGNIETSY

SEQ ID NO: 33461 - protein, 85 aa, unidentified
  REGION 1..85: note = Description of Unknown:cds_NC_003214.2_cds_NP_445717.1_52 target sequence
LPFSLFNLVFLYLLGVNTNTVEQSPSTQQTASEYANCINSCVQYCGTNTGLECIACLSSCRTYLLENPLFTFLLANNIQNVMELL

SEQ ID NO: 33462 - protein, 85 aa, unidentified
  REGION 1..85: note = Description of Unknown:cds_NC_003214.2_cds_NP_445717.1_52 target sequence
PQGINTIYTVNVCSGKVATLTPQNFQNNLNVVSQSEIQYTIQFYLPGTNELFNALQIMISTLNTNYNYSLGVLYFTGVPLPSGET

SEQ ID NO: 33463 - protein, 84 aa, unidentified
  REGION 1..84: note = Description of Unknown:cds_NC_003214.2_cds_NP_445717.1_52 target sequence
VCSGKVATLTPQNFQNNLNVVSQSEIQYTIQFYLPGTNELFNALQIMISTLNTNYNYSLGVLYFTGVPLPSGETFILEVTVSES

SEQ ID NO: 33464 - protein, 85 aa, unidentified
  REGION 1..85: note = Description of Unknown:cds_NC_003214.2_cds_NP_445717.1_52 target sequence
VTGVNVSQYPSPSGYHVYLSSQTGIVDNTTDVSVYNVSDTYQNNNEVTSVTFIAIFKNLSSYTFSEILFYTQVNGQDFMQVAQFI

SEQ ID NO: 33465 - protein, 85 aa, unidentified
  REGION 1..85: note = Description of Unknown:cds_NC_003214.2_cds_NP_445717.1_52 target sequence
PSSAIQKSSGYALVIMITLSIATPVYIIDAIQDVQQLCTNYCINVNCNAVGGNIETSYLPFSLFNLVFLYLLGVNTNTVEQSPST

SEQ ID NO: 33466 - protein, 85 aa, unidentified
  REGION 1..85: note = Description of Unknown:cds_NC_003214.2_cds_NP_445717.1_52 target sequence
QQTASEYANCINSCVQYCGTNTGLECIACLSSCRTYLLENPLFTFLLANNIQNVMELLPQGINTIYTVNVCSGKVATLTPQNFQN

SEQ ID NO: 33467 - protein, 85 aa, unidentified
  REGION 1..85: note = Description of Unknown:cds_NZ_WFIY01000004.1_cds_WP_155862452.1_204 target sequence
AKTVIIYIDIDDDLSLAGIKSPVIGEANVKEAIDKASEIMADDSDFNSMIVAYNIYKKMKKEGQDVEIVFLAGSQKGGLEAQRKI

SEQ ID NO: 33468 - protein, 85 aa, unidentified
  REGION 1..85: note = Description of Unknown:cds_NZ_WFIY01000004.1_cds_WP_155862452.1_204 target sequence
SAQLDEIIKELNPQDSIVVYDSPEDAKALPIIQSRLKISGVQRVIVEQHRGVEETYILLGKYFKKILNEPRYSRIFLGVPGAILF

SEQ ID NO: 33469 - protein, 85 aa, unidentified
  REGION 1..85: note = Description of Unknown:cds_NZ_WFIY01000004.1_cds_WP_155862452.1_204 target sequence
AAGILEVLGLISYIVPVITILIGSAMIIRGFDLDEMMEKWWENSTIMVIAALLSSISFAISLINGYFTYISIKGNSVYVISTVIS

SEQ ID NO: 33470 - protein, 85 aa, unidentified
  REGION 1..85: note = Description of Unknown:cds_NZ_WFIY01000004.1_cds_WP_155862452.1_204 target sequence
SMLPYITFSILILLGAKALSSALDKSIKLFHDIIKISAIIISYYIITDVLKNLEEGIYIIQFQSFYALTISSMVLIFAYIILNLI

SEQ ID NO: 33471 - protein, 84 aa, unidentified
  REGION 1..84: note = Description of Unknown:cds_NZ_WFIY01000004.1_cds_WP_155862452.1_204 target sequence
ILILLGAKALSSALDKSIKLFHDIIKISAIIISYYIITDVLKNLEEGIYIIQFQSFYALTISSMVLIFAYIILNLIEKYKFSSS

SEQ ID NO: 33472 - protein, 85 aa, unidentified
  REGION 1..85: note = Description of Unknown:cds_NZ_WFIY01000004.1_cds_WP_155862452.1_204 target sequence
NVKEAIDKASEIMADDSDFNSMIVAYNIYKKMKKEGQDVEIVFLAGSQKGGLEAQRKISAQLDEIIKELNPQDSIVVYDSPEDAK

SEQ ID NO: 33473 - protein, 85 aa, unidentified
  REGION 1..85: note = Description of Unknown:cds_NZ_WFIY01000004.1_cds_WP_155862452.1_204 target sequence
ALPIIQSRLKISGVQRVIVEQHRGVEETYILLGKYFKKILNEPRYSRIFLGVPGAILFAAGILEVLGLISYIVPVITILIGSAMI

SEQ ID NO: 33474 - protein, 85 aa, unidentified
  REGION 1..85: note = Description of Unknown:cds_NZ_WFIY01000004.1_cds_WP_155862452.1_204 target sequence
IRGFDLDEMMEKWWENSTIMVIAALLSSISFAISLINGYFTYISIKGNSVYVISTVISSMLPYITFSILILLGAKALSSALDKSI

SEQ ID NO: 33475 - protein, 85 aa, unidentified
  REGION 1..85: note = Description of Unknown:cds_NZ_WFIY01000004.1_cds_WP_155862549.1_318 target sequence
EVRRVQKFGKSTLMVSLPADWVKEVGLNPGESIYLEVDEDGSLKVYPPNLKTEGSSKEMKIEIKTNVSPELISRIIYSLYILGFD

SEQ ID NO: 33476 - protein, 85 aa, unidentified
  REGION 1..85: note = Description of Unknown:cds_NZ_WFIY01000004.1_cds_WP_155862549.1_318 target sequence
KITIESTDGPFNEDVLRKVKDTVRSLIGLEIVSQDLTNLQIQSFLDPTKYSMASLVSRLSNTLKQMLHYLNLGIKEASRTFLQEV

SEQ ID NO: 33477 - protein, 85 aa, unidentified
  REGION 1..85: note = Description of Unknown:cds_NZ_WFIY01000004.1_cds_WP_155862549.1_318 target sequence
LELEKEVDRLYYLSLRQLLLAQVNRSLAYMIGVKRIQIIGNRILMKAIEEAADEISEAASDLLSLHPEDLEVLKVSWDKIDMIVD

SEQ ID NO: 33478 - protein, 85 aa, unidentified
  REGION 1..85: note = Description of Unknown:cds_NZ_WFIY01000004.1_cds_WP_155862549.1_318 target sequence
QTAVVIDHVVKVLNKEDLKLVNEVLEELRTLRRVLMTEALMAEEKIEKNNSTRVTVVFRSLNLRLYNAIRRMEPIAEIAFNRSIE

SEQ ID NO: 33479 - protein, 84 aa, unidentified
  REGION 1..84: note = Description of Unknown:cds_NZ_WFIY01000004.1_cds_WP_155862549.1_318 target sequence
VKVLNKEDLKLVNEVLEELRTLRRVLMTEALMAEEKIEKNNSTRVTVVFRSLNLRLYNAIRRMEPIAEIAFNRSIENLKEIVIE

SEQ ID NO: 33480 - protein, 85 aa, unidentified
  REGION 1..85: note = Description of Unknown:cds_NZ_WFIY01000004.1_cds_WP_155862549.1_318 target sequence
NPGESIYLEVDEDGSLKVYPPNLKTEGSSKEMKIEIKTNVSPELISRIIYSLYILGFDKITIESTDGPFNEDVLRKVKDTVRSLI

SEQ ID NO: 33481 - protein, 85 aa, unidentified
  REGION 1..85: note = Description of Unknown:cds_NZ_WFIY01000004.1_cds_WP_155862549.1_318 target sequence
GLEIVSQDLTNLQIQSFLDPTKYSMASLVSRLSNTLKQMLHYLNLGIKEASRTFLQEVLELEKEVDRLYYLSLRQLLLAQVNRSL

SEQ ID NO: 33482 - protein, 85 aa, unidentified
  REGION 1..85: note = Description of Unknown:cds_NZ_WFIY01000004.1_cds_WP_155862549.1_318 target sequence
AYMIGVKRIQIIGNRILMKAIEEAADEISEAASDLLSLHPEDLEVLKVSWDKIDMIVDQTAVVIDHVVKVLNKEDLKLVNEVLEE

SEQ ID NO: 33483 - protein, 85 aa, unidentified
  REGION 1..85: note = Description of Unknown:cds_NZ_WFIY01000004.1_cds_609 target sequence
VDIIFINHRDPFHPNAGGAENVIYEIGKRLKEVTWLSEKVKGRPDSEYIDGIKIIRKGNKFTLHFYSLIEAKRHEIVIDSIAHAV

SEQ ID NO: 33484 - protein, 85 aa, unidentified
  REGION 1..85: note = Description of Unknown:cds_NZ_WFIY01000004.1_cds_609 target sequence
PFFSYLVNDKAVALVHHVHQDVVKFELNPILAEAVRLAERRIRNYKYIISVSNTTKQDLIKKLGVDENKITVIYNGVDHNKFNPG

SEQ ID NO: 33485 - protein, 85 aa, unidentified
  REGION 1..85: note = Description of Unknown:cds_NZ_WFIY01000004.1_cds_609 target sequence
IKSEIPIVFWIGRMMKYKNPFDVIEIKRRIKNKKNVKFIVAGGGELSNEFSKIAKKEGIQYLGKIDEKTKIELYRKSWVILSTSF

SEQ ID NO: 33486 - protein, 85 aa, unidentified
  REGION 1..85: note = Description of Unknown:cds_NZ_WFIY01000004.1_cds_609 target sequence
IEGWGMTIVEGNACGTPAIAYSSGSLPEIIKQGINGFIVPYKDVNMMAKYIDYITEDENIMKELSRKSYEESLKYDWNKTAEEYR

SEQ ID NO: 33487 - protein, 84 aa, unidentified
  REGION 1..84: note = Description of Unknown:cds_NZ_WFIY01000004.1_cds_609 target sequence
GNACGTPAIAYSSGSLPEIIKQGINGFIVPYKDVNMMAKYIDYITEDENIMKELSRKSYEESLKYDWNKTAEEYRKYLENIYYR

SEQ ID NO: 33488 - protein, 85 aa, unidentified
  REGION 1..85: note = Description of Unknown:cds_NZ_WFIY01000004.1_cds_609 target sequence
KRLKEVTWLSEKVKGRPDSEYIDGIKIIRKGNKFTLHFYSLIEAKRHEIVIDSIAHAVPFFSYLVNDKAVALVHHVHQDVVKFEL

SEQ ID NO: 33489 - protein, 85 aa, unidentified
  REGION 1..85: note = Description of Unknown:cds_NZ_WFIY01000004.1_cds_609 target sequence
NPILAEAVRLAERRIRNYKYIISVSNTTKQDLIKKLGVDENKITVIYNGVDHNKFNPGIKSEIPIVFWIGRMMKYKNPFDVIEIK

SEQ ID NO: 33490 - protein, 85 aa, unidentified
  REGION 1..85: note = Description of Unknown:cds_NZ_WFIY01000004.1_cds_609 target sequence
RRIKNKKNVKFIVAGGGELSNEFSKIAKKEGIQYLGKIDEKTKIELYRKSWVILSTSFIEGWGMTIVEGNACGTPAIAYSSGSLP

SEQ ID NO: 33491 - protein, 85 aa, unidentified
  REGION 1..85: note = Description of Unknown:cds_NZ_WFIY01000004.1_cds_WP_155862879.1_719 target sequence
IRVAVIGGSGYTGGELLRILSIHSKVEITLVTSREYAGKPISLVHPNLKGILNMNFSQLSLDKIGDKADTVFLALPHKVSLNYVP

SEQ ID NO: 33492 - protein, 85 aa, unidentified
  REGION 1..85: note = Description of Unknown:cds_NZ_WFIY01000004.1_cds_WP_155862879.1_719 target sequence
KLLEMGLQVIDLSADFRLKDPEEYKKWYGIEHPYPDLLKKSVYGLPELHYEELKGAKLIASPGCNATATILALAPVVGNGISADL

SEQ ID NO: 33493 - protein, 85 aa, unidentified
  REGION 1..85: note = Description of Unknown:cds_NZ_WFIY01000004.1_cds_WP_155862879.1_719 target sequence
KFISDVKVSSSEGGMKPREGSHHPERENAIRPYEPEGHRHAAEAEQELSLLAKKPVKVSIVPHAVSSIRGALASAHAWLNDNYDD

SEQ ID NO: 33494 - protein, 85 aa, unidentified
  REGION 1..85: note = Description of Unknown:cds_NZ_WFIY01000004.1_cds_WP_155862879.1_719 target sequence
IEIWKKIAEFYRGRKFIRIIRGGLHPYPDPKYVIGSNFADIGFAQERRIMRLTMFAAIDNLVKGAAGQAVQNFNISRGFNEDEGL

SEQ ID NO: 33495 - protein, 84 aa, unidentified
  REGION 1..84: note = Description of Unknown:cds_NZ_WFIY01000004.1_cds_WP_155862879.1_719 target sequence
FYRGRKFIRIIRGGLHPYPDPKYVIGSNFADIGFAQERRIMRLTMFAAIDNLVKGAAGQAVQNFNISRGFNEDEGLRAPPLRPA

SEQ ID NO: 33496 - protein, 85 aa, unidentified
  REGION 1..85: note = Description of Unknown:cds_NZ_WFIY01000004.1_cds_WP_155862879.1_719 target sequence
ITLVTSREYAGKPISLVHPNLKGILNMNFSQLSLDKIGDKADTVFLALPHKVSLNYVPKLLEMGLQVIDLSADFRLKDPEEYKKW

SEQ ID NO: 33497 - protein, 85 aa, unidentified
  REGION 1..85: note = Description of Unknown:cds_NZ_WFIY01000004.1_cds_WP_155862879.1_719 target sequence
YGIEHPYPDLLKKSVYGLPELHYEELKGAKLIASPGCNATATILALAPVVGNGISADLKFISDVKVSSSEGGMKPREGSHHPERE

SEQ ID NO: 33498 - protein, 85 aa, unidentified
  REGION 1..85: note = Description of Unknown:cds_NZ_WFIY01000004.1_cds_WP_155862879.1_719 target sequence
NAIRPYEPEGHRHAAEAEQELSLLAKKPVKVSIVPHAVSSIRGALASAHAWLNDNYDDIEIWKKIAEFYRGRKFIRIIRGGLHPY

SEQ ID NO: 33499 - protein, 85 aa, unidentified
  REGION 1..85: note = Description of Unknown:cds_NZ_WFIY01000004.1_cds_WP_155864429.1_1419 target sequence
SNKDIITLLHGAGGSYMHSLIKNVFMKLNDNYGEVGLEMLDDAAVINDTVISTDSFIVRPIFFKGGDIGRLSVSGTVNDIAMMGG

SEQ ID NO: 33500 - protein, 85 aa, unidentified
  REGION 1..85: note = Description of Unknown:cds_NZ_WFIY01000004.1_cds_WP_155864429.1_1419 target sequence
NPIALSLAIVMEEGFPLSDLEKIVDSIKKTAEEADVHIVTGDTKVMEKGSLDKIIINTSGIGNRPPQLDYNINTLRKNRQPSRWL

SEQ ID NO: 33501 - protein, 85 aa, unidentified
  REGION 1..85: note = Description of Unknown:cds_NZ_WFIY01000004.1_cds_WP_155864429.1_1419 target sequence
VPTNLRPGDKIIVSGTIGDHEISILSSREGIGFEANVKSDVAPLNKLMLKLLEVGGIADAKDPTRGGLADLLNDWSEKSGLGIYI

SEQ ID NO: 33502 - protein, 85 aa, unidentified
  REGION 1..85: note = Description of Unknown:cds_NZ_WFIY01000004.1_cds_WP_155864429.1_1419 target sequence
KEEDIPVREEVRAAVEFLGMDILELSNEGKVVLAVSPEYEKDVLEELHSDPLGKYATTIGEVRKDISGVIMETVIGGQRYVGRPI

SEQ ID NO: 33503 - protein, 84 aa, unidentified
  REGION 1..84: note = Description of Unknown:cds_NZ_WFIY01000004.1_cds_WP_155864429.1_1419 target sequence
EVRAAVEFLGMDILELSNEGKVVLAVSPEYEKDVLEELHSDPLGKYATTIGEVRKDISGVIMETVIGGQRYVGRPIGSPVPRIC

SEQ ID NO: 33504 - protein, 85 aa, unidentified
  REGION 1..85: note = Description of Unknown:cds_NZ_WFIY01000004.1_cds_WP_155864429.1_1419 target sequence
LNDNYGEVGLEMLDDAAVINDTVISTDSFIVRPIFFKGGDIGRLSVSGTVNDIAMMGGNPIALSLAIVMEEGFPLSDLEKIVDSI

SEQ ID NO: 33505 - protein, 85 aa, unidentified
  REGION 1..85: note = Description of Unknown:cds_NZ_WFIY01000004.1_cds_WP_155864429.1_1419 target sequence
KKTAEEADVHIVTGDTKVMEKGSLDKIIINTSGIGNRPPQLDYNINTLRKNRQPSRWLVPTNLRPGDKIIVSGTIGDHEISILSS

SEQ ID NO: 33506 - protein, 85 aa, unidentified
  REGION 1..85: note = Description of Unknown:cds_NZ_WFIY01000004.1_cds_WP_155864429.1_1419 target sequence
REGIGFEANVKSDVAPLNKLMLKLLEVGGIADAKDPTRGGLADLLNDWSEKSGLGIYIKEEDIPVREEVRAAVEFLGMDILELSN

SEQ ID NO: 33507 - protein, 85 aa, unidentified
  REGION 1..85: note = Description of Unknown:cds_NZ_WFIY01000004.1_cds_WP_155863657.1_1537 target sequence
SISKTFNGVTSFIAYTLATYVMIAPAFTVKQFELPAWLGFLIVSIPFGGRVIGSLLYQRIVAILGSRLTFLSSMIALGILSIGSS

SEQ ID NO: 33508 - protein, 85 aa, unidentified
  REGION 1..85: note = Description of Unknown:cds_NZ_WFIY01000004.1_cds_WP_155863657.1_1537 target sequence
TLSVPVLILLRLLVGVAFGIATSLAVEQAVRSGNRLIIALTMSGWAFGWIGGAFSYLALGEWQLIALSGAITLPFSMLYKRVSIF

SEQ ID NO: 33509 - protein, 85 aa, unidentified
  REGION 1..85: note = Description of Unknown:cds_NZ_WFIY01000004.1_cds_WP_155863657.1_1537 target sequence
SVEVGRLGIPSISSILIFFFSFEPAFALQLAPAIVENQGGIIWLIIGYIAAIPMYIFVPVISSLLGETRTALLYTMTSAISGVTF

SEQ ID NO: 33510 - protein, 85 aa, unidentified
  REGION 1..85: note = Description of Unknown:cds_NZ_WFIY01000004.1_cds_WP_155863657.1_1537 target sequence
FLTGSPYVLVVFTAFGLGINSIAPRLAASYGASARNMGIALNTAALGGVAVPVISSFDIKFLASLFTALSMVILLVMSVKRPNAL

SEQ ID NO: 33511 - protein, 84 aa, unidentified
  REGION 1..84: note = Description of Unknown:cds_NZ_WFIY01000004.1_cds_WP_155863657.1_1537 target sequence
VVFTAFGLGINSIAPRLAASYGASARNMGIALNTAALGGVAVPVISSFDIKFLASLFTALSMVILLVMSVKRPNALLVRRLSVA

SEQ ID NO: 33512 - protein, 85 aa, unidentified
  REGION 1..85: note = Description of Unknown:cds_NZ_WFIY01000004.1_cds_WP_155863657.1_1537 target sequence
TVKQFELPAWLGFLIVSIPFGGRVIGSLLYQRIVAILGSRLTFLSSMIALGILSIGSSTLSVPVLILLRLLVGVAFGIATSLAVE

SEQ ID NO: 33513 - protein, 85 aa, unidentified
  REGION 1..85: note = Description of Unknown:cds_NZ_WFIY01000004.1_cds_WP_155863657.1_1537 target sequence
QAVRSGNRLIIALTMSGWAFGWIGGAFSYLALGEWQLIALSGAITLPFSMLYKRVSIFSVEVGRLGIPSISSILIFFFSFEPAFA

SEQ ID NO: 33514 - protein, 85 aa, unidentified
  REGION 1..85: note = Description of Unknown:cds_NZ_WFIY01000004.1_cds_WP_155863657.1_1537 target sequence
LQLAPAIVENQGGIIWLIIGYIAAIPMYIFVPVISSLLGETRTALLYTMTSAISGVTFFLTGSPYVLVVFTAFGLGINSIAPRLA

SEQ ID NO: 33515 - protein, 85 aa, unidentified
  REGION 1..85: note = Description of Unknown:cds_NZ_WFIY01000004.1_cds_WP_155864443.1_1601 target sequence
LRKTVFIWNENYLDYSFPGDHPFKSLRESMAKKLMEERGFFHEIDLENAEPVTESLLEKIHDKEYIEFVKKKSLEGKGYLDDGDT

SEQ ID NO: 33516 - protein, 85 aa, unidentified
  REGION 1..85: note = Description of Unknown:cds_NZ_WFIY01000004.1_cds_WP_155864443.1_1601 target sequence
PAFKGIYEAAILRVGGSVKALEMIEKGYEVAINLGGGFHHAKKSSASGFCVFNDVALIAKLAEKKYKVAIVDIDGHHGDGTQQLL

SEQ ID NO: 33517 - protein, 85 aa, unidentified
  REGION 1..85: note = Description of Unknown:cds_NZ_WFIY01000004.1_cds_WP_155864443.1_1601 target sequence
YDDNRVLKASLHMFHRNFFPGTGNYDEIGEGEGKGFTINVPLPPGTADDAYISAFKEVIVRKLKKFKPELIIIVEGGDSHFDDPL

SEQ ID NO: 33518 - protein, 85 aa, unidentified
  REGION 1..85: note = Description of Unknown:cds_NZ_WFIY01000004.1_cds_WP_155864443.1_1601 target sequence
VELKLSTKGYSEVINEILSIAKKFSSKIILLGGGGYNYEATARIWTITTAQLAGLDMSEVDLLHDCCFTSSTNFVKEKVNEVIKK

SEQ ID NO: 33519 - protein, 84 aa, unidentified
  REGION 1..84: note = Description of Unknown:cds_NZ_WFIY01000004.1_cds_WP_155864443.1_1601 target sequence
SEVINEILSIAKKFSSKIILLGGGGYNYEATARIWTITTAQLAGLDMSEVDLLHDCCFTSSTNFVKEKVNEVIKKLKEIHGLLD

SEQ ID NO: 33520 - protein, 85 aa, unidentified
  REGION 1..85: note = Description of Unknown:cds_NZ_WFIY01000004.1_cds_WP_155864443.1_1601 target sequence
ESMAKKLMEERGFFHEIDLENAEPVTESLLEKIHDKEYIEFVKKKSLEGKGYLDDGDTPAFKGIYEAAILRVGGSVKALEMIEKG

SEQ ID NO: 33521 - protein, 85 aa, unidentified
  REGION 1..85: note = Description of Unknown:cds_NZ_WFIY01000004.1_cds_WP_155864443.1_1601 target sequence
YEVAINLGGGFHHAKKSSASGFCVFNDVALIAKLAEKKYKVAIVDIDGHHGDGTQQLLYDDNRVLKASLHMFHRNFFPGTGNYDE

SEQ ID NO: 33522 - protein, 85 aa, unidentified
  REGION 1..85: note = Description of Unknown:cds_NZ_WFIY01000004.1_cds_WP_155864443.1_1601 target sequence
IGEGEGKGFTINVPLPPGTADDAYISAFKEVIVRKLKKFKPELIIIVEGGDSHFDDPLVELKLSTKGYSEVINEILSIAKKFSSK

SEQ ID NO: 33523 - protein, 85 aa, unidentified
  REGION 1..85: note = Description of Unknown:cds_NZ_WFIY01000004.1_cds_WP_155864318.1_2319 target sequence
KIFFLTSHLKERDGASRAIINFSKGIKQISRYEPVIISLSTSIGVNKLGNIEIINIDKGLGLLSSFRILLGSPSPLKPFKKYLHD

SEQ ID NO: 33524 - protein, 85 aa, unidentified
  REGION 1..85: note = Description of Unknown:cds_NZ_WFIY01000004.1_cds_WP_155864318.1_2319 target sequence
DGIYIVAADDIIPVSEFKDDLIYWSQGVLTSVFFWEPFIRRNKLVSALASPFLLYNAIKFSNFVKKYKVVLANSKTSAVYVSLFY

SEQ ID NO: 33525 - protein, 85 aa, unidentified
  REGION 1..85: note = Description of Unknown:cds_NZ_WFIY01000004.1_cds_WP_155864318.1_2319 target sequence
NRPPKAVVYPPLNTDFFKPSKNKEKFVLVFLKRGYPSHVDLLTKIAEKVKMKSIGYKIPNAEYLERVSDEELRDLYSSALVTLYP

SEQ ID NO: 33526 - protein, 85 aa, unidentified
  REGION 1..85: note = Description of Unknown:cds_NZ_WFIY01000004.1_cds_WP_155864318.1_2319 target sequence
IDFEYYGYIPVESMAAGTPVIAFRYSGGPAETIVDGETGWLASDEEEFYRLTIKVYNEGYPEDTSVKSRKRAEEFSIQNQTKLLL

SEQ ID NO: 33527 - protein, 84 aa, unidentified
  REGION 1..84: note = Description of Unknown:cds_NZ_WFIY01000004.1_cds_WP_155864318.1_2319 target sequence
PVESMAAGTPVIAFRYSGGPAETIVDGETGWLASDEEEFYRLTIKVYNEGYPEDTSVKSRKRAEEFSIQNQTKLLLSIIEKLKA

SEQ ID NO: 33528 - protein, 85 aa, unidentified
  REGION 1..85: note = Description of Unknown:cds_NZ_WFIY01000004.1_cds_WP_155864318.1_2319 target sequence
QISRYEPVIISLSTSIGVNKLGNIEIINIDKGLGLLSSFRILLGSPSPLKPFKKYLHDDGIYIVAADDIIPVSEFKDDLIYWSQG

SEQ ID NO: 33529 - protein, 85 aa, unidentified
  REGION 1..85: note = Description of Unknown:cds_NZ_WFIY01000004.1_cds_WP_155864318.1_2319 target sequence
VLTSVFFWEPFIRRNKLVSALASPFLLYNAIKFSNFVKKYKVVLANSKTSAVYVSLFYNRPPKAVVYPPLNTDFFKPSKNKEKFV

SEQ ID NO: 33530 - protein, 85 aa, unidentified
  REGION 1..85: note = Description of Unknown:cds_NZ_WFIY01000004.1_cds_WP_155864318.1_2319 target sequence
LVFLKRGYPSHVDLLTKIAEKVKMKSIGYKIPNAEYLERVSDEELRDLYSSALVTLYPIDFEYYGYIPVESMAAGTPVIAFRYSG

SEQ ID NO: 33531 - protein, 85 aa, unidentified
  REGION 1..85: note = Description of Unknown:cds_NZ_WFIY01000004.1_cds_WP_155864319.1_2322 target sequence
VQIENITQYPSSGERIVITEVSPSLSFTVNSPINVKITTVTQYFVNLKSPIPVYALINGSNETLSSGWYNANTNIVVENITYYPQ

SEQ ID NO: 33532 - protein, 85 aa, unidentified
  REGION 1..85: note = Description of Unknown:cds_NZ_WFIY01000004.1_cds_WP_155864319.1_2322 target sequence
QGVRYVITSIKPESFAVNNEVTVLITATKQYYVNLVSPIKVYALVNGENVTFTSGWYNEDTKIKIENITQYPAPMERIIIISINP

SEQ ID NO: 33533 - protein, 85 aa, unidentified
  REGION 1..85: note = Description of Unknown:cds_NZ_WFIY01000004.1_cds_WP_155864319.1_2322 target sequence
QSTFVVKSPINVTINVVLQYFVKVISPIPVKACVNGTLENLNSSWFNKGTTIVINNYTYYVSNEEREVIVKISPSPSVTLSSPVT

SEQ ID NO: 33534 - protein, 85 aa, unidentified
  REGION 1..85: note = Description of Unknown:cds_NZ_WFIY01000004.1_cds_WP_155864319.1_2322 target sequence
FNITTQKQYLVTINGVSKWYNAGSVITLSANVPFYEVGEFKGTYNVSPNAVIVVNGPINETLVETLNYPVVILLFTAVVLAIALA

SEQ ID NO: 33535 - protein, 84 aa, unidentified
  REGION 1..84: note = Description of Unknown:cds_NZ_WFIY01000004.1_cds_WP_155864319.1_2322 target sequence
VTINGVSKWYNAGSVITLSANVPFYEVGEFKGTYNVSPNAVIVVNGPINETLVETLNYPVVILLFTAVVLAIALAVFLVKYKLK

SEQ ID NO: 33536 - protein, 85 aa, unidentified
  REGION 1..85: note = Description of Unknown:cds_NZ_WFIY01000004.1_cds_WP_155864319.1_2322 target sequence
TVNSPINVKITTVTQYFVNLKSPIPVYALINGSNETLSSGWYNANTNIVVENITYYPQQGVRYVITSIKPESFAVNNEVTVLITA

SEQ ID NO: 33537 - protein, 85 aa, unidentified
  REGION 1..85: note = Description of Unknown:cds_NZ_WFIY01000004.1_cds_WP_155864319.1_2322 target sequence
TKQYYVNLVSPIKVYALVNGENVTFTSGWYNEDTKIKIENITQYPAPMERIIIISINPQSTFVVKSPINVTINVVLQYFVKVISP

SEQ ID NO: 33538 - protein, 85 aa, unidentified
  REGION 1..85: note = Description of Unknown:cds_NZ_WFIY01000004.1_cds_WP_155864319.1_2322 target sequence
IPVKACVNGTLENLNSSWFNKGTTIVINNYTYYVSNEEREVIVKISPSPSVTLSSPVTFNITTQKQYLVTINGVSKWYNAGSVIT

SEQ ID NO: 33539 - protein, 85 aa, unidentified
  REGION 1..85: note = Description of Unknown:cds_NZ_WFIY01000004.1_cds_WP_155862534.1_299 target sequence
RSGIVGWGSYIPRYRINVNDIAKVWGKEATTPKVLGLTEKSVPAPDEDSTTMAIEASRNALNRARINPEEIGLVLFGSESKVYAV

SEQ ID NO: 33540 - protein, 85 aa, unidentified
  REGION 1..85: note = Description of Unknown:cds_NZ_WFIY01000004.1_cds_WP_155862534.1_299 target sequence
KPTAAVLIDALGISHYSLSADMEFACRAASVGLGLALSMVESGKIKYGMVVGSDTAQSNPGDILELSSAAAAVSFIVGKSDESAA

SEQ ID NO: 33541 - protein, 85 aa, unidentified
  REGION 1..85: note = Description of Unknown:cds_NZ_WFIY01000004.1_cds_WP_155862534.1_299 target sequence
VLEGFASFNTDTPDFWRRDGMPYPLHGEAFTGEPAYFAHIISAVEKLFQDYGYKVSDFDYFVFHQPNGKFPVQVAKKLGVPLEKV

SEQ ID NO: 33542 - protein, 85 aa, unidentified
  REGION 1..85: note = Description of Unknown:cds_NZ_WFIY01000004.1_cds_WP_155862534.1_299 target sequence
KPGLVSPYIGNPYNASALLGFAKVLDIARPGQRILVAPFGSGAGADAFSFVTTENILEKQKLAHTTDYYISNKIIVTYAEYAKFT

SEQ ID NO: 33543 - protein, 84 aa, unidentified
  REGION 1..84: note = Description of Unknown:cds_NZ_WFIY01000004.1_cds_WP_155862534.1_299 target sequence
IGNPYNASALLGFAKVLDIARPGQRILVAPFGSGAGADAFSFVTTENILEKQKLAHTTDYYISNKIIVTYAEYAKFTNKYKVYE

SEQ ID NO: 33544 - protein, 85 aa, unidentified
  REGION 1..85: note = Description of Unknown:cds_NZ_WFIY01000004.1_cds_WP_155862534.1_299 target sequence
EATTPKVLGLTEKSVPAPDEDSTTMAIEASRNALNRARINPEEIGLVLFGSESKVYAVKPTAAVLIDALGISHYSLSADMEFACR

SEQ ID NO: 33545 - protein, 85 aa, unidentified
  REGION 1..85: note = Description of Unknown:cds_NZ_WFIY01000004.1_cds_WP_155862534.1_299 target sequence
AASVGLGLALSMVESGKIKYGMVVGSDTAQSNPGDILELSSAAAAVSFIVGKSDESAAVLEGFASFNTDTPDFWRRDGMPYPLHG

SEQ ID NO: 33546 - protein, 85 aa, unidentified
  REGION 1..85: note = Description of Unknown:cds_NZ_WFIY01000004.1_cds_WP_155862534.1_299 target sequence
EAFTGEPAYFAHIISAVEKLFQDYGYKVSDFDYFVFHQPNGKFPVQVAKKLGVPLEKVKPGLVSPYIGNPYNASALLGFAKVLDI

SEQ ID NO: 33547 - protein, 85 aa, unidentified
  REGION 1..85: note = Description of Unknown:cds_NZ_WFIY01000004.1_cds_WP_155862565.1_334 target sequence
LELDYDEFVIEELRKVYGRSLNSFLDSIKRPNSRLYVRVNTLKTTVDEVLQSMHGFKKDEDFPEAIYAEVKGPNKLESLDSKVIV

SEQ ID NO: 33548 - protein, 85 aa, unidentified
  REGION 1..85: note = Description of Unknown:cds_NZ_WFIY01000004.1_cds_WP_155862565.1_334 target sequence
DKKTAESVMLGADVYPPGIKKIMANEGNAVEVVSENGITVANGELVRLPGGKFMVKVYNSLYSSPKLADTKEIKEGKIYVQGKAS

SEQ ID NO: 33549 - protein, 85 aa, unidentified
  REGION 1..85: note = Description of Unknown:cds_NZ_WFIY01000004.1_cds_WP_155862565.1_334 target sequence
MHVARIIDPQPGEFIVDMTAAPGGKLSHIYQLEPRARIIGFDHTYKKVEKMKQLFKKMNVNVQVFVHDSRYLSELGIKDVDKVLI

SEQ ID NO: 33550 - protein, 85 aa, unidentified
  REGION 1..85: note = Description of Unknown:cds_NZ_WFIY01000004.1_cds_WP_155862565.1_334 target sequence
DPPCSALGLRPKVYDKKTKTDLINLHAYQKQFLNSAYEILKKGGEVIYSTCTVTEIENEEVVNDPRFDIEYMIRFHPQIHDMTGF

SEQ ID NO: 33551 - protein, 84 aa, unidentified
  REGION 1..84: note = Description of Unknown:cds_NZ_WFIY01000004.1_cds_WP_155862565.1_334 target sequence
RPKVYDKKTKTDLINLHAYQKQFLNSAYEILKKGGEVIYSTCTVTEIENEEVVNDPRFDIEYMIRFHPQIHDMTGFFIAKLKKK

SEQ ID NO: 33552 - protein, 85 aa, unidentified
  REGION 1..85: note = Description of Unknown:cds_NZ_WFIY01000004.1_cds_WP_155862565.1_334 target sequence
IKRPNSRLYVRVNTLKTTVDEVLQSMHGFKKDEDFPEAIYAEVKGPNKLESLDSKVIVDKKTAESVMLGADVYPPGIKKIMANEG

SEQ ID NO: 33553 - protein, 85 aa, unidentified
  REGION 1..85: note = Description of Unknown:cds_NZ_WFIY01000004.1_cds_WP_155862565.1_334 target sequence
NAVEVVSENGITVANGELVRLPGGKFMVKVYNSLYSSPKLADTKEIKEGKIYVQGKASMHVARIIDPQPGEFIVDMTAAPGGKLS

SEQ ID NO: 33554 - protein, 85 aa, unidentified
  REGION 1..85: note = Description of Unknown:cds_NZ_WFIY01000004.1_cds_WP_155862565.1_334 target sequence
HIYQLEPRARIIGFDHTYKKVEKMKQLFKKMNVNVQVFVHDSRYLSELGIKDVDKVLIDPPCSALGLRPKVYDKKTKTDLINLHA

SEQ ID NO: 33555 - protein, 85 aa, unidentified
  REGION 1..85: note = Description of Unknown:cds_NZ_WFIY01000004.1_cds_WP_155862973.1_843 target sequence
LIKISALASHSALDVFDGAKDEGFSTIALCKKGRERPYLEFKRIVDECILLNDFKEIPSESIQQKLISENAIIVPNRSLAVYVGY

SEQ ID NO: 33556 - protein, 85 aa, unidentified
  REGION 1..85: note = Description of Unknown:cds_NZ_WFIY01000004.1_cds_WP_155862973.1_843 target sequence
DNLENMKVKFFGNRKMLRWEERKGEKNYYKLLDEAKIRRPRIYTPDNIDSAVIVKLPESKRRVERGFFFAKNKEDFDKKLEELEK

SEQ ID NO: 33557 - protein, 85 aa, unidentified
  REGION 1..85: note = Description of Unknown:cds_NZ_WFIY01000004.1_cds_WP_155862973.1_843 target sequence
DGIIDEESIKEMVIEEFILGAYFNVNYFYSPIFNRTEIISIDRRIQSDWDEFYKLPADIQLSLNRTPRLIEVGHEPATIRESLLE

SEQ ID NO: 33558 - protein, 85 aa, unidentified
  REGION 1..85: note = Description of Unknown:cds_NZ_WFIY01000004.1_cds_WP_155862973.1_843 target sequence
KLFEIGYAFVEATQKLEPPGIIGPFTLQLSVTPDLDIVVFDVAPRIGGGTNAYMGIGSQYSKLYFGKPISLGRRIAIEIKEAINS

SEQ ID NO: 33559 - protein, 84 aa, unidentified
  REGION 1..84: note = Description of Unknown:cds_NZ_WFIY01000004.1_cds_WP_155862973.1_843 target sequence
VEATQKLEPPGIIGPFTLQLSVTPDLDIVVFDVAPRIGGGTNAYMGIGSQYSKLYFGKPISLGRRIAIEIKEAINSSLEEKVIF

SEQ ID NO: 33560 - protein, 85 aa, unidentified
  REGION 1..85: note = Description of Unknown:cds_NZ_WFIY01000004.1_cds_WP_155862973.1_843 target sequence
ALCKKGRERPYLEFKRIVDECILLNDFKEIPSESIQQKLISENAIIVPNRSLAVYVGYDNLENMKVKFFGNRKMLRWEERKGEKN

SEQ ID NO: 33561 - protein, 85 aa, unidentified
  REGION 1..85: note = Description of Unknown:cds_NZ_WFIY01000004.1_cds_WP_155862973.1_843 target sequence
YYKLLDEAKIRRPRIYTPDNIDSAVIVKLPESKRRVERGFFFAKNKEDFDKKLEELEKDGIIDEESIKEMVIEEFILGAYFNVNY

SEQ ID NO: 33562 - protein, 85 aa, unidentified
  REGION 1..85: note = Description of Unknown:cds_NZ_WFIY01000004.1_cds_WP_155862973.1_843 target sequence
FYSPIFNRTEIISIDRRIQSDWDEFYKLPADIQLSLNRTPRLIEVGHEPATIRESLLEKLFEIGYAFVEATQKLEPPGIIGPFTL

SEQ ID NO: 33563 - protein, 85 aa, unidentified
  REGION 1..85: note = Description of Unknown:cds_NZ_WFIY01000004.1_cds_WP_205737161.1_1391 target sequence
LLFYIIELIITSTFFIWLFKISSEIGNILIHIKGISSSFFTLGILAYFFGLRHAVDADHLAAIDNSTRKLVQEGKPSLFTGLFFS

SEQ ID NO: 33564 - protein, 85 aa, unidentified
  REGION 1..85: note = Description of Unknown:cds_NZ_WFIY01000004.1_cds_WP_205737161.1_1391 target sequence
LGHSTVVILLSIALMIATRIVESSIPQLENIGSIVGTLVSGFFLYIIGFLNLVVLFEIYELFKQARRGELDEAKLNDALLKRGFM

SEQ ID NO: 33565 - protein, 85 aa, unidentified
  REGION 1..85: note = Description of Unknown:cds_NZ_WFIY01000004.1_cds_WP_205737161.1_1391 target sequence
NRYFKGLFKIVNNQYYLYPIGFLFGLGFDTASETALLAISAGTAGVFTKIPLWTLLVFPFLFAAGMSLVDTTDGFFMNGAYRWAF

SEQ ID NO: 33566 - protein, 85 aa, unidentified
  REGION 1..85: note = Description of Unknown:cds_NZ_WFIY01000004.1_cds_WP_205737161.1_1391 target sequence
MGNPIRKVWYNLTMTSISIIVAYLVGSLELLGLIQSEFCLSGWFWNIIALINGDVWWGNVGILIISTFAITWIISIIIYKSRISK

SEQ ID NO: 33567 - protein, 84 aa, unidentified
  REGION 1..84: note = Description of Unknown:cds_NZ_WFIY01000004.1_cds_WP_205737161.1_1391 target sequence
WYNLTMTSISIIVAYLVGSLELLGLIQSEFCLSGWFWNIIALINGDVWWGNVGILIISTFAITWIISIIIYKSRISKYEDQYKK

SEQ ID NO: 33568 - protein, 85 aa, unidentified
  REGION 1..85: note = Description of Unknown:cds_NZ_WFIY01000004.1_cds_WP_205737161.1_1391 target sequence
ILIHIKGISSSFFTLGILAYFFGLRHAVDADHLAAIDNSTRKLVQEGKPSLFTGLFFSLGHSTVVILLSIALMIATRIVESSIPQ

SEQ ID NO: 33569 - protein, 85 aa, unidentified
  REGION 1..85: note = Description of Unknown:cds_NZ_WFIY01000004.1_cds_WP_205737161.1_1391 target sequence
LENIGSIVGTLVSGFFLYIIGFLNLVVLFEIYELFKQARRGELDEAKLNDALLKRGFMNRYFKGLFKIVNNQYYLYPIGFLFGLG

SEQ ID NO: 33570 - protein, 85 aa, unidentified
  REGION 1..85: note = Description of Unknown:cds_NZ_WFIY01000004.1_cds_WP_205737161.1_1391 target sequence
FDTASETALLAISAGTAGVFTKIPLWTLLVFPFLFAAGMSLVDTTDGFFMNGAYRWAFMGNPIRKVWYNLTMTSISIIVAYLVGS

SEQ ID NO: 33571 - protein, 85 aa, unidentified
  REGION 1..85: note = Description of Unknown:cds_NC_003214.2_cds_NP_445723.1_58 target sequence
VSGMKKNIVVQNELVQVKGRVKAITIKKEDFNEFLKLTTLRVFNKSYDVLMPPIDDMKKNTIDLNGLTIVTQNYLSLLLYQSGAT

SEQ ID NO: 33572 - protein, 85 aa, unidentified
  REGION 1..85: note = Description of Unknown:cds_NC_003214.2_cds_NP_445723.1_58 target sequence
SPSTTAQINLSTSSGSPVTLQYSSKINSNSQGLMVLLQIFEANGNLTFQYYFIGFDTTNSSYSATQAELYASAWVNTSNTGNYCA

SEQ ID NO: 33573 - protein, 85 aa, unidentified
  REGION 1..85: note = Description of Unknown:cds_NC_003214.2_cds_NP_445723.1_58 target sequence
SVNPVTMYTNLVRIAYTNISITKSATEYLFMVWLIEFENVPSYAPFAVPIFANALNLAPIAESTACGSPPPSSVTIYFYNGNCNF

SEQ ID NO: 33574 - protein, 85 aa, unidentified
  REGION 1..85: note = Description of Unknown:cds_NC_003214.2_cds_NP_445723.1_58 target sequence
TCGGNCPNGGLSSFVEYIQNNALTVEFPLQAPIQGGASNPEVFICTTLNFTYTNSTSVITQISGNESTTVTPPVSGATFYVAIVT

SEQ ID NO: 33575 - protein, 84 aa, unidentified
  REGION 1..84: note = Description of Unknown:cds_NC_003214.2_cds_NP_445723.1_58 target sequence
GLSSFVEYIQNNALTVEFPLQAPIQGGASNPEVFICTTLNFTYTNSTSVITQISGNESTTVTPPVSGATFYVAIVTISITYTVS

SEQ ID NO: 33576 - protein, 85 aa, unidentified
  REGION 1..85: note = Description of Unknown:cds_NC_003214.2_cds_NP_445723.1_58 target sequence
KEDFNEFLKLTTLRVFNKSYDVLMPPIDDMKKNTIDLNGLTIVTQNYLSLLLYQSGATSPSTTAQINLSTSSGSPVTLQYSSKIN

SEQ ID NO: 33577 - protein, 85 aa, unidentified
  REGION 1..85: note = Description of Unknown:cds_NC_003214.2_cds_NP_445723.1_58 target sequence
SNSQGLMVLLQIFEANGNLTFQYYFIGFDTTNSSYSATQAELYASAWVNTSNTGNYCASVNPVTMYTNLVRIAYTNISITKSATE

SEQ ID NO: 33578 - protein, 85 aa, unidentified
  REGION 1..85: note = Description of Unknown:cds_NC_003214.2_cds_NP_445723.1_58 target sequence
YLFMVWLIEFENVPSYAPFAVPIFANALNLAPIAESTACGSPPPSSVTIYFYNGNCNFTCGGNCPNGGLSSFVEYIQNNALTVEF

SEQ ID NO: 33579 - protein, 85 aa, unidentified
  REGION 1..85: note = Description of Unknown:cds_NZ_WFIY01000004.1_cds_WP_155863066.1_971 target sequence
EMREHIISLPERIFIGNGIISRIDEYFSELGLTGSFLIVTGSNVRRLIVSKILDKIPADVIEVQEANLDEVRKVEEFAKKHESNV

SEQ ID NO: 33580 - protein, 85 aa, unidentified
  REGION 1..85: note = Description of Unknown:cds_NZ_WFIY01000004.1_cds_WP_155863066.1_971 target sequence
ILGVGGGKAIDVAKFAAFELNKRFVSIPTAPSHDGITSPFAAIKGLGKPISMKAKEPTAIIADIDVLSSAPRRLINAGIGDTVGK

SEQ ID NO: 33581 - protein, 85 aa, unidentified
  REGION 1..85: note = Description of Unknown:cds_NZ_WFIY01000004.1_cds_WP_155863066.1_971 target sequence
IVAVRDWKLAAKLRGEYYGDYTASLALLSARHALNCTRIINKDLKYGVRLLVEALISSGVAMGMAGSTRPASGSEHLFAHAVEML

SEQ ID NO: 33582 - protein, 85 aa, unidentified
  REGION 1..85: note = Description of Unknown:cds_NZ_WFIY01000004.1_cds_WP_155863066.1_971 target sequence
YPEGPLHGELVGVGTIMMAYIHGIKWKEIRKALIRIGAPVTAKQLGVPNEIIIKALTIAHTIRPERYTILGDRGLTWASAEKVAR

SEQ ID NO: 33583 - protein, 84 aa, unidentified
  REGION 1..84: note = Description of Unknown:cds_NZ_WFIY01000004.1_cds_WP_155863066.1_971 target sequence
GELVGVGTIMMAYIHGIKWKEIRKALIRIGAPVTAKQLGVPNEIIIKALTIAHTIRPERYTILGDRGLTWASAEKVARNTGVIT

SEQ ID NO: 33584 - protein, 85 aa, unidentified
  REGION 1..85: note = Description of Unknown:cds_NZ_WFIY01000004.1_cds_WP_155863066.1_971 target sequence
SELGLTGSFLIVTGSNVRRLIVSKILDKIPADVIEVQEANLDEVRKVEEFAKKHESNVILGVGGGKAIDVAKFAAFELNKRFVSI

SEQ ID NO: 33585 - protein, 85 aa, unidentified
  REGION 1..85: note = Description of Unknown:cds_NZ_WFIY01000004.1_cds_WP_155863066.1_971 target sequence
PTAPSHDGITSPFAAIKGLGKPISMKAKEPTAIIADIDVLSSAPRRLINAGIGDTVGKIVAVRDWKLAAKLRGEYYGDYTASLAL

SEQ ID NO: 33586 - protein, 85 aa, unidentified
  REGION 1..85: note = Description of Unknown:cds_NZ_WFIY01000004.1_cds_WP_155863066.1_971 target sequence
LSARHALNCTRIINKDLKYGVRLLVEALISSGVAMGMAGSTRPASGSEHLFAHAVEMLYPEGPLHGELVGVGTIMMAYIHGIKWK

SEQ ID NO: 33587 - protein, 85 aa, unidentified
  REGION 1..85: note = Description of Unknown:cds_NZ_WFIY01000004.1_cds_WP_155864053.1_1989 target sequence
LIQTLKRFGITTGAAAAAASKASVIYLVRGEKPDSVVVPTPIGIRIEIPVEKYLEEEGKKCAEVKKFSGDNPDILDGLEIISCSE

SEQ ID NO: 33588 - protein, 85 aa, unidentified
  REGION 1..85: note = Description of Unknown:cds_NZ_WFIY01000004.1_cds_WP_155864053.1_1989 target sequence
FSSSGIQILGGKGIGVVTRPGLKLEIGEKSISPIAKQMIIDAVSEVITNGIKITIIVPKGEELAKNTMNPDVGIKDGISILGTTG

SEQ ID NO: 33589 - protein, 85 aa, unidentified
  REGION 1..85: note = Description of Unknown:cds_NZ_WFIY01000004.1_cds_WP_155864053.1_1989 target sequence
IEYPVSDEDYLEHIKAEMCVIKATGNNKIVLAPGNTSFEYAKKIYGDIVVKVGDRIGDSIKLAKDEGFSHVVIVSLPGKITKVSA

SEQ ID NO: 33590 - protein, 85 aa, unidentified
  REGION 1..85: note = Description of Unknown:cds_NZ_WFIY01000004.1_cds_WP_155864053.1_1989 target sequence
GLLNTHSKFGDARIESIVYSALVAGVPLEKLKRIAESLTISEALEFLTLEERRRVMQIVAKRVLSRLSKFGIKLGVIILSDSGEV

SEQ ID NO: 33591 - protein, 84 aa, unidentified
  REGION 1..84: note = Description of Unknown:cds_NZ_WFIY01000004.1_cds_WP_155864053.1_1989 target sequence
FGDARIESIVYSALVAGVPLEKLKRIAESLTISEALEFLTLEERRRVMQIVAKRVLSRLSKFGIKLGVIILSDSGEVLAKEGEL

SEQ ID NO: 33592 - protein, 85 aa, unidentified
  REGION 1..85: note = Description of Unknown:cds_NZ_WFIY01000004.1_cds_WP_155864053.1_1989 target sequence
VRGEKPDSVVVPTPIGIRIEIPVEKYLEEEGKKCAEVKKFSGDNPDILDGLEIISCSEFSSSGIQILGGKGIGVVTRPGLKLEIG

SEQ ID NO: 33593 - protein, 85 aa, unidentified
  REGION 1..85: note = Description of Unknown:cds_NZ_WFIY01000004.1_cds_WP_155864053.1_1989 target sequence
EKSISPIAKQMIIDAVSEVITNGIKITIIVPKGEELAKNTMNPDVGIKDGISILGTTGIEYPVSDEDYLEHIKAEMCVIKATGNN

SEQ ID NO: 33594 - protein, 85 aa, unidentified
  REGION 1..85: note = Description of Unknown:cds_NZ_WFIY01000004.1_cds_WP_155864053.1_1989 target sequence
KIVLAPGNTSFEYAKKIYGDIVVKVGDRIGDSIKLAKDEGFSHVVIVSLPGKITKVSAGLLNTHSKFGDARIESIVYSALVAGVP

SEQ ID NO: 33595 - protein, 85 aa, unidentified
  REGION 1..85: note = Description of Unknown:cds_NZ_WFIY01000004.1_cds_WP_155864261.1_2253 target sequence
ISSPDWVRLSFGADMVLGFSPGKFLKGALNTTINLLEYYPDGCKANCIYCGQAREVAKGPECKTLIRVEWPLRKLDDVLNRIKER

SEQ ID NO: 33596 - protein, 85 aa, unidentified
  REGION 1..85: note = Description of Unknown:cds_NZ_WFIY01000004.1_cds_WP_155864261.1_2253 target sequence
EGNPEYGLQRICVGQLAHPRASPDAIEITKRIREKGIELQISELVTATYTFKQHMIEMRKAGADMIDVAIDAASKRVFDQVRGKP

SEQ ID NO: 33597 - protein, 85 aa, unidentified
  REGION 1..85: note = Description of Unknown:cds_NZ_WFIY01000004.1_cds_WP_155864261.1_2253 target sequence
VRSMHRWERYIQAIDEAVEVFGKKNAGIHLIVGLGETEKEAVELIWYAHSRGAKISLFAFYPEVGTPMQNKKPVPLNVYRRIQLA

SEQ ID NO: 33598 - protein, 85 aa, unidentified
  REGION 1..85: note = Description of Unknown:cds_NZ_WFIY01000004.1_cds_WP_155864261.1_2253 target sequence
RWLIENDLVKLEDFTFDEEGKIVDINIPQDLSLKELAPAFMTSGCPGCNRPYSNERPGSVLKNYPWYPDEKQTLSAIKASKIPSL

SEQ ID NO: 33599 - protein, 84 aa, unidentified
  REGION 1..84: note = Description of Unknown:cds_NZ_WFIY01000004.1_cds_WP_155864261.1_2253 target sequence
LVKLEDFTFDEEGKIVDINIPQDLSLKELAPAFMTSGCPGCNRPYSNERPGSVLKNYPWYPDEKQTLSAIKASKIPSLIKRFVN

SEQ ID NO: 33600 - protein, 85 aa, unidentified
  REGION 1..85: note = Description of Unknown:cds_NZ_WFIY01000004.1_cds_WP_155864261.1_2253 target sequence
ALNTTINLLEYYPDGCKANCIYCGQAREVAKGPECKTLIRVEWPLRKLDDVLNRIKEREGNPEYGLQRICVGQLAHPRASPDAIE

SEQ ID NO: 33601 - protein, 85 aa, unidentified
  REGION 1..85: note = Description of Unknown:cds_NZ_WFIY01000004.1_cds_WP_155864261.1_2253 target sequence
ITKRIREKGIELQISELVTATYTFKQHMIEMRKAGADMIDVAIDAASKRVFDQVRGKPVRSMHRWERYIQAIDEAVEVFGKKNAG

SEQ ID NO: 33602 - protein, 85 aa, unidentified
  REGION 1..85: note = Description of Unknown:cds_NZ_WFIY01000004.1_cds_WP_155864261.1_2253 target sequence
IHLIVGLGETEKEAVELIWYAHSRGAKISLFAFYPEVGTPMQNKKPVPLNVYRRIQLARWLIENDLVKLEDFTFDEEGKIVDINI

SEQ ID NO: 33603 - protein, 85 aa, unidentified
  REGION 1..85: note = Description of Unknown:hvTR_P52472 target sequence
DTDIALAAIYKETTKLNEKDAKIFSEAVQTALTVCKATAPNTRLKLVETPTNNFLLVTNVVPSETSKATTEANLNIDAALEKLAS

SEQ ID NO: 33604 - protein, 85 aa, unidentified
  REGION 1..85: note = Description of Unknown:hvTR_P52472 target sequence
SFNTAVPVKSSKKYLLQNVRKMTSENIALTGSYIIYTKKHIEVAFLLDKSDFVQDILRYAETPSLLGHTDVRDLECLLWLAFCGP

SEQ ID NO: 33605 - protein, 85 aa, unidentified
  REGION 1..85: note = Description of Unknown:hvTR_P52472 target sequence
MSYCQADNCFGLNKAGYNAPFPILFPPCMYERNMNLSVFFGLLQIYVFSLYRDFSVENSNLQQGIKKRIKLVLSDLRAKERICEE

SEQ ID NO: 33606 - protein, 85 aa, unidentified
  REGION 1..85: note = Description of Unknown:hvTR_P52472 target sequence
EIGNFPLAAQICLFCALYRQNRLCMEYAANNLSMSVFSPIILKDCTFMQTTVTITQILPGSKEAIIFPVYDIGKLLSALVFSENG

SEQ ID NO: 33607 - protein, 84 aa, unidentified
  REGION 1..84: note = Description of Unknown:hvTR_P52472 target sequence
LAAQICLFCALYRQNRLCMEYAANNLSMSVFSPIILKDCTFMQTTVTITQILPGSKEAIIFPVYDIGKLLSALVFSENGVLLKL

SEQ ID NO: 33608 - protein, 85 aa, unidentified
  REGION 1..85: note = Description of Unknown:hvTR_P52472 target sequence
VQTALTVCKATAPNTRLKLVETPTNNFLLVTNVVPSETSKATTEANLNIDAALEKLASSFNTAVPVKSSKKYLLQNVRKMTSENI

SEQ ID NO: 33609 - protein, 85 aa, unidentified
  REGION 1..85: note = Description of Unknown:hvTR_P52472 target sequence
ALTGSYIIYTKKHIEVAFLLDKSDFVQDILRYAETPSLLGHTDVRDLECLLWLAFCGPMSYCQADNCFGLNKAGYNAPFPILFPP

SEQ ID NO: 33610 - protein, 85 aa, unidentified
  REGION 1..85: note = Description of Unknown:hvTR_P52472 target sequence
CMYERNMNLSVFFGLLQIYVFSLYRDFSVENSNLQQGIKKRIKLVLSDLRAKERICEEEIGNFPLAAQICLFCALYRQNRLCMEY

SEQ ID NO: 33611 - protein, 85 aa, unidentified
  REGION 1..85: note = Description of Unknown:hvTR_A0A193H3A4 target sequence
AHFPGFGQSLLYGYPVYVFGDCVQADWCPISGGLCSPRLHRHALLATCPEHQITWDPIDGRVVGSPLQYLIPRLPSFPTQRTSKT

SEQ ID NO: 33612 - protein, 85 aa, unidentified
  REGION 1..85: note = Description of Unknown:hvTR_A0A193H3A4 target sequence
LKVLTPPTTPVTPKVPPSFFQSVRRHSPYRNGCLETTLGEQLPSLAFPEPGLRPQNIYTIWGKTIVCLYIYQLSPPMTWPLIPHV

SEQ ID NO: 33613 - protein, 85 aa, unidentified
  REGION 1..85: note = Description of Unknown:hvTR_A0A193H3A4 target sequence
IFCNPRQLSAFLSNVPPKRLEELLYKLYLHTGAIIILPDDALPTTLFQPVRAPCVQTTWNTGLLPYQPNLTTPGLIWTFNDGSPM

SEQ ID NO: 33614 - protein, 85 aa, unidentified
  REGION 1..85: note = Description of Unknown:hvTR_A0A193H3A4 target sequence
ISGPCPKAGQPSLVVQSSLLIFERFQTKAYHPSYLLSHQLIQYSSFHHLYLLFDEYTTIPFSLLFKEKEGDDRDNDPSPGATTMC

SEQ ID NO: 33615 - protein, 84 aa, unidentified
  REGION 1..84: note = Description of Unknown:hvTR_A0A193H3A4 target sequence
KAGQPSLVVQSSLLIFERFQTKAYHPSYLLSHQLIQYSSFHHLYLLFDEYTTIPFSLLFKEKEGDDRDNDPSPGATTMCSQGQD

SEQ ID NO: 33616 - protein, 85 aa, unidentified
  REGION 1..85: note = Description of Unknown:hvTR_A0A193H3A4 target sequence
CPISGGLCSPRLHRHALLATCPEHQITWDPIDGRVVGSPLQYLIPRLPSFPTQRTSKTLKVLTPPTTPVTPKVPPSFFQSVRRHS

SEQ ID NO: 33617 - protein, 85 aa, unidentified
  REGION 1..85: note = Description of Unknown:hvTR_A0A193H3A4 target sequence
PYRNGCLETTLGEQLPSLAFPEPGLRPQNIYTIWGKTIVCLYIYQLSPPMTWPLIPHVIFCNPRQLSAFLSNVPPKRLEELLYKL

SEQ ID NO: 33618 - protein, 85 aa, unidentified
  REGION 1..85: note = Description of Unknown:hvTR_A0A193H3A4 target sequence
YLHTGAIIILPDDALPTTLFQPVRAPCVQTTWNTGLLPYQPNLTTPGLIWTFNDGSPMISGPCPKAGQPSLVVQSSLLIFERFQT

SEQ ID NO: 33619 - protein, 85 aa, unidentified
  REGION 1..85: note = Description of Unknown:cds_NZ_WFIY01000004.1_cds_WP_155862491.1_249 target sequence
NFKEILEKITDRQDLSINEAELIANSIMKGEIPELVSAAILSSLKTKGEASEEIIGFVRSMRANAVKVNLGDVIDTAGTGGDGLG

SEQ ID NO: 33620 - protein, 85 aa, unidentified
  REGION 1..85: note = Description of Unknown:cds_NZ_WFIY01000004.1_cds_WP_155862491.1_249 target sequence
TINVSTATAIVISQVCKVAKHGNRAASSKSGSADFLETIGYNIYVTPEKAKELISKDNFVFLFAQLYHPAMKNVATVRKTLGIRT

SEQ ID NO: 33621 - protein, 85 aa, unidentified
  REGION 1..85: note = Description of Unknown:cds_NZ_WFIY01000004.1_cds_WP_155862491.1_249 target sequence
IFNFLGPLTNPAMAKKQVMGIFSKKFMDKIATAALSLSYDKLLIIHGEPGMDEVSPLGVTTIYEVKSNKIDKYEFNFTEIIKYKP

SEQ ID NO: 33622 - protein, 85 aa, unidentified
  REGION 1..85: note = Description of Unknown:cds_NZ_WFIY01000004.1_cds_WP_155862491.1_249 target sequence
KISELLANDSRESVIKVLRAFAGKDKAVEEFIKVNSAVALYSCGHVKDFKDGYEYSSQLISTSLNKLTDIISHNGNLNIFKNFMA

SEQ ID NO: 33623 - protein, 84 aa, unidentified
  REGION 1..84: note = Description of Unknown:cds_NZ_WFIY01000004.1_cds_WP_155862491.1_249 target sequence
ANDSRESVIKVLRAFAGKDKAVEEFIKVNSAVALYSCGHVKDFKDGYEYSSQLISTSLNKLTDIISHNGNLNIFKNFMAMISGN

SEQ ID NO: 33624 - protein, 85 aa, unidentified
  REGION 1..85: note = Description of Unknown:cds_NZ_WFIY01000004.1_cds_WP_155862491.1_249 target sequence
MKGEIPELVSAAILSSLKTKGEASEEIIGFVRSMRANAVKVNLGDVIDTAGTGGDGLGTINVSTATAIVISQVCKVAKHGNRAAS

SEQ ID NO: 33625 - protein, 85 aa, unidentified
  REGION 1..85: note = Description of Unknown:cds_NZ_WFIY01000004.1_cds_WP_155862491.1_249 target sequence
SKSGSADFLETIGYNIYVTPEKAKELISKDNFVFLFAQLYHPAMKNVATVRKTLGIRTIFNFLGPLTNPAMAKKQVMGIFSKKFM

SEQ ID NO: 33626 - protein, 85 aa, unidentified
  REGION 1..85: note = Description of Unknown:cds_NZ_WFIY01000004.1_cds_WP_155862491.1_249 target sequence
DKIATAALSLSYDKLLIIHGEPGMDEVSPLGVTTIYEVKSNKIDKYEFNFTEIIKYKPKISELLANDSRESVIKVLRAFAGKDKA

SEQ ID NO: 33627 - protein, 85 aa, unidentified
  REGION 1..85: note = Description of Unknown:cds_NZ_WFIY01000004.1_cds_WP_155864361.1_276 target sequence
LFKTPLSTVEEKIGANFGEFAGWEMPMDYTSYQDEHMAVRQSAAFFDLSHMGRIRIKGKKEELDKIVTRSLLSENFRMIGPSAML

SEQ ID NO: 33628 - protein, 85 aa, unidentified
  REGION 1..85: note = Description of Unknown:cds_NZ_WFIY01000004.1_cds_WP_155864361.1_276 target sequence
NEKGGFIDDIMIYKVSDTEFLMVTNAINREKDVNWIKHNSSLEVEDLTFDYAMLAIQGRRVWELLGYKTNLQPLQFVLNSNFLGE

SEQ ID NO: 33629 - protein, 85 aa, unidentified
  REGION 1..85: note = Description of Unknown:cds_NZ_WFIY01000004.1_cds_WP_155864361.1_276 target sequence
DVFLLSRSGWTGEDGLEVWAKAEVAERIINKLMEKGIKPAGLIARDSLRQEMGFVLYGEDIDENTTPVEARYWVFDLDKNFIGKE

SEQ ID NO: 33630 - protein, 85 aa, unidentified
  REGION 1..85: note = Description of Unknown:cds_NZ_WFIY01000004.1_cds_WP_155864361.1_276 target sequence
KIDEQLKNGVKRIRVGFKLQKGIRAIPRHGYKIRILETEVGEVTSSTYSPYLGRVIGMGYINSSNAFFGFHANIEIRGKDYRAKI

SEQ ID NO: 33631 - protein, 84 aa, unidentified
  REGION 1..84: note = Description of Unknown:cds_NZ_WFIY01000004.1_cds_WP_155864361.1_276 target sequence
NGVKRIRVGFKLQKGIRAIPRHGYKIRILETEVGEVTSSTYSPYLGRVIGMGYINSSNAFFGFHANIEIRGKDYRAKISDFPLI

SEQ ID NO: 33632 - protein, 85 aa, unidentified
  REGION 1..85: note = Description of Unknown:cds_NZ_WFIY01000004.1_cds_WP_155864361.1_276 target sequence
DYTSYQDEHMAVRQSAAFFDLSHMGRIRIKGKKEELDKIVTRSLLSENFRMIGPSAMLNEKGGFIDDIMIYKVSDTEFLMVTNAI

SEQ ID NO: 33633 - protein, 85 aa, unidentified
  REGION 1..85: note = Description of Unknown:cds_NZ_WFIY01000004.1_cds_WP_155864361.1_276 target sequence
NREKDVNWIKHNSSLEVEDLTFDYAMLAIQGRRVWELLGYKTNLQPLQFVLNSNFLGEDVFLLSRSGWTGEDGLEVWAKAEVAER

SEQ ID NO: 33634 - protein, 85 aa, unidentified
  REGION 1..85: note = Description of Unknown:cds_NZ_WFIY01000004.1_cds_WP_155864361.1_276 target sequence
IINKLMEKGIKPAGLIARDSLRQEMGFVLYGEDIDENTTPVEARYWVFDLDKNFIGKEKIDEQLKNGVKRIRVGFKLQKGIRAIP

SEQ ID NO: 33635 - protein, 85 aa, unidentified
  REGION 1..85: note = Description of Unknown:cds_NZ_WFIY01000004.1_cds_WP_155862874.1_713 target sequence
QLDKESLLRKAKQYLLELASIYTPSGEEARATNFFEKVSKELNLDLKITKTKSFLLGKGDFLLASHVDTVPGFIEPKEEGGIIYG

SEQ ID NO: 33636 - protein, 85 aa, unidentified
  REGION 1..85: note = Description of Unknown:cds_NZ_WFIY01000004.1_cds_WP_155862874.1_713 target sequence
RGVVDAKGPLISMLLATWILNENGYKVQFAGLSDEENKSSGARELVNAGYSYKGIIIGEPTSTTKIVIEYRGVIHVDVICNYESQ

SEQ ID NO: 33637 - protein, 85 aa, unidentified
  REGION 1..85: note = Description of Unknown:cds_NZ_WFIY01000004.1_cds_WP_155862874.1_713 target sequence
HSSSANFNPILEVSKKLIEISQLPTTYDKPSIVPTIIKAGEYVNVTPSTVYLHFDIRYPYGFKLDDILLKLKEEFASCEIKITEQ

SEQ ID NO: 33638 - protein, 85 aa, unidentified
  REGION 1..85: note = Description of Unknown:cds_NZ_WFIY01000004.1_cds_WP_155862874.1_713 target sequence
VPPVKVNANDKIVKSLYRALLLQNIKPSLVRKAGTSDMNILSAITKNIATYGPGDSKLEHTLYEKITLEEIFIGITTYTKAIEDL

SEQ ID NO: 33639 - protein, 84 aa, unidentified
  REGION 1..84: note = Description of Unknown:cds_NZ_WFIY01000004.1_cds_WP_155862874.1_713 target sequence
NANDKIVKSLYRALLLQNIKPSLVRKAGTSDMNILSAITKNIATYGPGDSKLEHTLYEKITLEEIFIGITTYTKAIEDLCYSDC

SEQ ID NO: 33640 - protein, 85 aa, unidentified
  REGION 1..85: note = Description of Unknown:cds_NZ_WFIY01000004.1_cds_WP_155862874.1_713 target sequence
EARATNFFEKVSKELNLDLKITKTKSFLLGKGDFLLASHVDTVPGFIEPKEEGGIIYGRGVVDAKGPLISMLLATWILNENGYKV

SEQ ID NO: 33641 - protein, 85 aa, unidentified
  REGION 1..85: note = Description of Unknown:cds_NZ_WFIY01000004.1_cds_WP_155862874.1_713 target sequence
QFAGLSDEENKSSGARELVNAGYSYKGIIIGEPTSTTKIVIEYRGVIHVDVICNYESQHSSSANFNPILEVSKKLIEISQLPTTY

SEQ ID NO: 33642 - protein, 85 aa, unidentified
  REGION 1..85: note = Description of Unknown:cds_NZ_WFIY01000004.1_cds_WP_155862874.1_713 target sequence
DKPSIVPTIIKAGEYVNVTPSTVYLHFDIRYPYGFKLDDILLKLKEEFASCEIKITEQVPPVKVNANDKIVKSLYRALLLQNIKP

SEQ ID NO: 33643 - protein, 85 aa, unidentified
  REGION 1..85: note = Description of Unknown:cds_NZ_WFIY01000004.1_cds_WP_155863287.1_1243 target sequence
VARISNIIKLIIFLTLAKLLVFLPIYFISGSNFFYLITTKWDSILFETIAEYGYIKPCLFAFPPIYPLLIKLMYNIFNSYCISAF

SEQ ID NO: 33644 - protein, 85 aa, unidentified
  REGION 1..85: note = Description of Unknown:cds_NZ_WFIY01000004.1_cds_WP_155863287.1_1243 target sequence
LVTNIFGYLFPIIVYKTFNYKTSLLLELFPVYIIYSTLPYSDVIYLTAVSLTFYFLKKEKILPASIAMGFAIATFYSIAWTLPSF

SEQ ID NO: 33645 - protein, 85 aa, unidentified
  REGION 1..85: note = Description of Unknown:cds_NZ_WFIY01000004.1_cds_WP_155863287.1_1243 target sequence
IIKLKKSFLKFIIIPLLSGFSIFVWYYLSTGDPFYYFKLEKIIWGVKLVTPLCQINWLLNGWFTTQNWTILSLSLSPIDWLVRNL

SEQ ID NO: 33646 - protein, 85 aa, unidentified
  REGION 1..85: note = Description of Unknown:cds_NZ_WFIY01000004.1_cds_WP_155863287.1_1243 target sequence
GFEIFFIILTINIIRLRDDNKWLYFTYSILAISPLLFIIGTPAISIPRILLSAFPSFYSLKIEGIWLILYIIISIILTPLFVLWQ

SEQ ID NO: 33647 - protein, 84 aa, unidentified
  REGION 1..84: note = Description of Unknown:cds_NZ_WFIY01000004.1_cds_WP_155863287.1_1243 target sequence
ILTINIIRLRDDNKWLYFTYSILAISPLLFIIGTPAISIPRILLSAFPSFYSLKIEGIWLILYIIISIILTPLFVLWQIYAFFS

SEQ ID NO: 33648 - protein, 85 aa, unidentified
  REGION 1..85: note = Description of Unknown:cds_NZ_WFIY01000004.1_cds_WP_155863287.1_1243 target sequence
ISGSNFFYLITTKWDSILFETIAEYGYIKPCLFAFPPIYPLLIKLMYNIFNSYCISAFLVTNIFGYLFPIIVYKTFNYKTSLLLE

SEQ ID NO: 33649 - protein, 85 aa, unidentified
  REGION 1..85: note = Description of Unknown:cds_NZ_WFIY01000004.1_cds_WP_155863287.1_1243 target sequence
LFPVYIIYSTLPYSDVIYLTAVSLTFYFLKKEKILPASIAMGFAIATFYSIAWTLPSFIIKLKKSFLKFIIIPLLSGFSIFVWYY

SEQ ID NO: 33650 - protein, 85 aa, unidentified
  REGION 1..85: note = Description of Unknown:cds_NZ_WFIY01000004.1_cds_WP_155863287.1_1243 target sequence
LSTGDPFYYFKLEKIIWGVKLVTPLCQINWLLNGWFTTQNWTILSLSLSPIDWLVRNLGFEIFFIILTINIIRLRDDNKWLYFTY

SEQ ID NO: 33651 - protein, 85 aa, unidentified
  REGION 1..85: note = Description of Unknown:cds_NZ_WFIY01000004.1_cds_WP_155863721.1_1586 target sequence
KVNVVTHNLSNKSGEGFVVFSSIEMLKERNVDFVVSTFSKPRENYDLPVRYYLPFNFSRFDRYQRLLVWLSARKIRSDIYLNFTG

SEQ ID NO: 33652 - protein, 85 aa, unidentified
  REGION 1..85: note = Description of Unknown:cds_NZ_WFIY01000004.1_cds_WP_155863721.1_1586 target sequence
IPIPLSSRGVHIIYGGASPFEVTKYSRSLFWKLYRFPFKLALRFLKNEAKKAKFVANSFYSANTWKQLYGIEAKVIYPPVDVEDF

SEQ ID NO: 33653 - protein, 85 aa, unidentified
  REGION 1..85: note = Description of Unknown:cds_NZ_WFIY01000004.1_cds_WP_155863721.1_1586 target sequence
FKAFHESGGKYILTIARIERGKFLERTIKLSHEVGIPAIIVGYLSDTKYYKELISLKSKLNANISFVLNASKEELIQIMKDACCY

SEQ ID NO: 33654 - protein, 85 aa, unidentified
  REGION 1..85: note = Description of Unknown:cds_NZ_WFIY01000004.1_cds_WP_155863721.1_1586 target sequence
FHPTQGEHFGIPVVESMAAGLVPVVPKESGAAEIIPEFTYSTLEEAESKVKEAYIKHSSKSYEMREIASKFSKARFKEEFWQYII

SEQ ID NO: 33655 - protein, 84 aa, unidentified
  REGION 1..84: note = Description of Unknown:cds_NZ_WFIY01000004.1_cds_WP_155863721.1_1586 target sequence
EHFGIPVVESMAAGLVPVVPKESGAAEIIPEFTYSTLEEAESKVKEAYIKHSSKSYEMREIASKFSKARFKEEFWQYIINIYNK

SEQ ID NO: 33656 - protein, 85 aa, unidentified
  REGION 1..85: note = Description of Unknown:cds_NZ_WFIY01000004.1_cds_WP_155863721.1_1586 target sequence
ERNVDFVVSTFSKPRENYDLPVRYYLPFNFSRFDRYQRLLVWLSARKIRSDIYLNFTGIPIPLSSRGVHIIYGGASPFEVTKYSR

SEQ ID NO: 33657 - protein, 85 aa, unidentified
  REGION 1..85: note = Description of Unknown:cds_NZ_WFIY01000004.1_cds_WP_155863721.1_1586 target sequence
SLFWKLYRFPFKLALRFLKNEAKKAKFVANSFYSANTWKQLYGIEAKVIYPPVDVEDFFKAFHESGGKYILTIARIERGKFLERT

SEQ ID NO: 33658 - protein, 85 aa, unidentified
  REGION 1..85: note = Description of Unknown:cds_NZ_WFIY01000004.1_cds_WP_155863721.1_1586 target sequence
IKLSHEVGIPAIIVGYLSDTKYYKELISLKSKLNANISFVLNASKEELIQIMKDACCYFHPTQGEHFGIPVVESMAAGLVPVVPK

SEQ ID NO: 33659 - protein, 85 aa, unidentified
  REGION 1..85: note = Description of Unknown:cds_NZ_WFIY01000004.1_cds_WP_155863796.1_1679 target sequence
IKEVLGSFIANLKTAKNYPFILVIATTDVSLIPGITVAGASPELTHFTPAADAEFLVLGKCKVINTVPITPDGIPTPALVTRASL

SEQ ID NO: 33660 - protein, 85 aa, unidentified
  REGION 1..85: note = Description of Unknown:cds_NZ_WFIY01000004.1_cds_WP_155863796.1_1679 target sequence
SFTKVTKLVVNAGSKILPKIPFIDIGGKPGGDIRKYSLDLETTERIIENSTLLGEELSNTYDLLVIGESIPAGTTTAMAVLQGLG

SEQ ID NO: 33661 - protein, 85 aa, unidentified
  REGION 1..85: note = Description of Unknown:cds_NZ_WFIY01000004.1_cds_WP_155863796.1_1679 target sequence
YNAIDKVSSASPTNPKELKRKVVLDALKNLPSNTLGKIAKLADPMLISVAGISLGFKGKILLAGGTQMTAAAAIIKEFNKEKLKD

SEQ ID NO: 33662 - protein, 85 aa, unidentified
  REGION 1..85: note = Description of Unknown:cds_NZ_WFIY01000004.1_cds_WP_155863796.1_1679 target sequence
IAIGTTKWIVKDKCSDIISLAKQVGVSLIYADLDFSISKHKGIRVYEEGYVKEGVGAGGASILAMINGANNEDIVRKVDDMYSEL

SEQ ID NO: 33663 - protein, 84 aa, unidentified
  REGION 1..84: note = Description of Unknown:cds_NZ_WFIY01000004.1_cds_WP_155863796.1_1679 target sequence
KWIVKDKCSDIISLAKQVGVSLIYADLDFSISKHKGIRVYEEGYVKEGVGAGGASILAMINGANNEDIVRKVDDMYSELLISKN

SEQ ID NO: 33664 - protein, 85 aa, unidentified
  REGION 1..85: note = Description of Unknown:cds_NZ_WFIY01000004.1_cds_WP_155863796.1_1679 target sequence
DVSLIPGITVAGASPELTHFTPAADAEFLVLGKCKVINTVPITPDGIPTPALVTRASLSFTKVTKLVVNAGSKILPKIPFIDIGG

SEQ ID NO: 33665 - protein, 85 aa, unidentified
  REGION 1..85: note = Description of Unknown:cds_NZ_WFIY01000004.1_cds_WP_155863796.1_1679 target sequence
KPGGDIRKYSLDLETTERIIENSTLLGEELSNTYDLLVIGESIPAGTTTAMAVLQGLGYNAIDKVSSASPTNPKELKRKVVLDAL

SEQ ID NO: 33666 - protein, 85 aa, unidentified
  REGION 1..85: note = Description of Unknown:cds_NZ_WFIY01000004.1_cds_WP_155863796.1_1679 target sequence
KNLPSNTLGKIAKLADPMLISVAGISLGFKGKILLAGGTQMTAAAAIIKEFNKEKLKDIAIGTTKWIVKDKCSDIISLAKQVGVS

SEQ ID NO: 33667 - protein, 85 aa, unidentified
  REGION 1..85: note = Description of Unknown:cds_NZ_WFIY01000004.1_cds_WP_155862604.1_381 target sequence
RKISEDICCSKVDVLVNASYKDFLDSLQGKKAIFYSKNLSIDYKGDLNIPIEDGEKAKDVSNVLDLVKVLYDNGFNRGDYVIAIG

SEQ ID NO: 33668 - protein, 85 aa, unidentified
  REGION 1..85: note = Description of Unknown:cds_NZ_WFIY01000004.1_cds_WP_155862604.1_381 target sequence
GGTVLDLVGFVSSIYMRGLNLINIPTTLLGMVDAAIGGKNGVNFGNAKNILGTFYQPSAIVVDLNFIKTLPEEEIRKGLAEVIKY

SEQ ID NO: 33669 - protein, 85 aa, unidentified
  REGION 1..85: note = Description of Unknown:cds_NZ_WFIY01000004.1_cds_WP_155862604.1_381 target sequence
GLVLDKELYDYLAMNDKKILEKDEGALEEIIYKSIKDKLAVVKEDERETKGIRVVLNFGHTIGHAIEAGSNFTIPHGYAISVGMV

SEQ ID NO: 33670 - protein, 85 aa, unidentified
  REGION 1..85: note = Description of Unknown:cds_NZ_WFIY01000004.1_cds_WP_155862604.1_381 target sequence
CEAKIAEEMGYSEEGVVEDTLWILSLYGLPITPEKLPSKYSKELALASIEKDKKIRNDEILMPFPTRIGDYKVVKVPIQTVKGFA

SEQ ID NO: 33671 - protein, 84 aa, unidentified
  REGION 1..84: note = Description of Unknown:cds_NZ_WFIY01000004.1_cds_WP_155862604.1_381 target sequence
AEEMGYSEEGVVEDTLWILSLYGLPITPEKLPSKYSKELALASIEKDKKIRNDEILMPFPTRIGDYKVVKVPIQTVKGFASQCL

SEQ ID NO: 33672 - protein, 85 aa, unidentified
  REGION 1..85: note = Description of Unknown:cds_NZ_WFIY01000004.1_cds_WP_155862604.1_381 target sequence
QGKKAIFYSKNLSIDYKGDLNIPIEDGEKAKDVSNVLDLVKVLYDNGFNRGDYVIAIGGGTVLDLVGFVSSIYMRGLNLINIPTT

SEQ ID NO: 33673 - protein, 85 aa, unidentified
  REGION 1..85: note = Description of Unknown:cds_NZ_WFIY01000004.1_cds_WP_155862604.1_381 target sequence
LLGMVDAAIGGKNGVNFGNAKNILGTFYQPSAIVVDLNFIKTLPEEEIRKGLAEVIKYGLVLDKELYDYLAMNDKKILEKDEGAL

SEQ ID NO: 33674 - protein, 85 aa, unidentified
  REGION 1..85: note = Description of Unknown:cds_NZ_WFIY01000004.1_cds_WP_155862604.1_381 target sequence
EEIIYKSIKDKLAVVKEDERETKGIRVVLNFGHTIGHAIEAGSNFTIPHGYAISVGMVCEAKIAEEMGYSEEGVVEDTLWILSLY

SEQ ID NO: 33675 - protein, 85 aa, unidentified
  REGION 1..85: note = Description of Unknown:cds_NC_009884.1_cds_YP_001496927.1_2 target sequence
VKKMKGEKKAKREGYILLQEIPKLEYIFKNWNEFEDNFYVAEYNYNLKDFKFYMRKYITGIMRIWIYNYEIVMKRKGDEIEITLD

SEQ ID NO: 33676 - protein, 85 aa, unidentified
  REGION 1..85: note = Description of Unknown:cds_NC_009884.1_cds_YP_001496927.1_2 target sequence
DAKKIQCWDLMKILDQVFYPVMRFYQNTIEIEIVNNDVTYYIPIRPKEFKISLKLTENENEIKNAIANTKIKIDGKTLVIKKVGN

SEQ ID NO: 33677 - protein, 85 aa, unidentified
  REGION 1..85: note = Description of Unknown:cds_NC_009884.1_cds_YP_001496927.1_2 target sequence
KGKKYFMRRILRIPIYAKMMLKYRKITHVFAKMMLKKGILEQGEFRIMPLLKLEKLLYKKMNFRDIKYMKYFTMPIYRFNRDRVN

SEQ ID NO: 33678 - protein, 85 aa, unidentified
  REGION 1..85: note = Description of Unknown:cds_NC_009884.1_cds_YP_001496927.1_2 target sequence
LQGISYIDNFIITDYYYDGVNQIVFKLIAVDTRDPIVTTEKEVLATTLCGIDYKNNLWCVSISNLMLYWKISAVYKFMYDLDDRT

SEQ ID NO: 33679 - protein, 84 aa, unidentified
  REGION 1..84: note = Description of Unknown:cds_NC_009884.1_cds_YP_001496927.1_2 target sequence
IDNFIITDYYYDGVNQIVFKLIAVDTRDPIVTTEKEVLATTLCGIDYKNNLWCVSISNLMLYWKISAVYKFMYDLDDRTKVFEY

SEQ ID NO: 33680 - protein, 85 aa, unidentified
  REGION 1..85: note = Description of Unknown:cds_NC_009884.1_cds_YP_001496927.1_2 target sequence
FKNWNEFEDNFYVAEYNYNLKDFKFYMRKYITGIMRIWIYNYEIVMKRKGDEIEITLDDAKKIQCWDLMKILDQVFYPVMRFYQN

SEQ ID NO: 33681 - protein, 85 aa, unidentified
  REGION 1..85: note = Description of Unknown:cds_NC_009884.1_cds_YP_001496927.1_2 target sequence
TIEIEIVNNDVTYYIPIRPKEFKISLKLTENENEIKNAIANTKIKIDGKTLVIKKVGNKGKKYFMRRILRIPIYAKMMLKYRKIT

SEQ ID NO: 33682 - protein, 85 aa, unidentified
  REGION 1..85: note = Description of Unknown:cds_NC_009884.1_cds_YP_001496927.1_2 target sequence
HVFAKMMLKKGILEQGEFRIMPLLKLEKLLYKKMNFRDIKYMKYFTMPIYRFNRDRVNLQGISYIDNFIITDYYYDGVNQIVFKL

SEQ ID NO: 33683 - protein, 85 aa, unidentified
  REGION 1..85: note = Description of Unknown:cds_NZ_WFIY01000004.1_cds_WP_155862573.1_344 target sequence
NKLVIVGIIIVAIIVIGTLGYLATRTSITAKKTQVIIYVADAYAKEACCLAKCFSSATGIPVLTPPEAGGSFALARELQSPNAQV

SEQ ID NO: 33684 - protein, 85 aa, unidentified
  REGION 1..85: note = Description of Unknown:cds_NZ_WFIY01000004.1_cds_WP_155862573.1_344 target sequence
TVFMPVALSAVNDLGNENPGWAIAFVSDQITIAYTNASISSNPCAQKALYYAKEAMSTGNSSDWYEFYYILTSGKVKVGISNPNT

SEQ ID NO: 33685 - protein, 85 aa, unidentified
  REGION 1..85: note = Description of Unknown:cds_NZ_WFIY01000004.1_cds_WP_155862573.1_344 target sequence
DPAGFRAWINLEIAGHLFANNTYYFYDRMLNNHGNVTASNAAELVPDLESGAIQFLYIYRSAAVAKGLDYIQLPAKLNLGCYKCS

SEQ ID NO: 33686 - protein, 85 aa, unidentified
  REGION 1..85: note = Description of Unknown:cds_NZ_WFIY01000004.1_cds_WP_155862573.1_344 target sequence
SFYAMFNYTLNTGIVKGSPVYLFITIPKNANNYSEAIDFVTYVIEHSGILKKFDLCPLQPAILFNSTAVPPQIASLLTEGKLIEG

SEQ ID NO: 33687 - protein, 84 aa, unidentified
  REGION 1..84: note = Description of Unknown:cds_NZ_WFIY01000004.1_cds_WP_155862573.1_344 target sequence
MFNYTLNTGIVKGSPVYLFITIPKNANNYSEAIDFVTYVIEHSGILKKFDLCPLQPAILFNSTAVPPQIASLLTEGKLIEGGTL

SEQ ID NO: 33688 - protein, 85 aa, unidentified
  REGION 1..85: note = Description of Unknown:cds_NZ_WFIY01000004.1_cds_WP_155862573.1_344 target sequence
ITAKKTQVIIYVADAYAKEACCLAKCFSSATGIPVLTPPEAGGSFALARELQSPNAQVTVFMPVALSAVNDLGNENPGWAIAFVS

SEQ ID NO: 33689 - protein, 85 aa, unidentified
  REGION 1..85: note = Description of Unknown:cds_NZ_WFIY01000004.1_cds_WP_155862573.1_344 target sequence
DQITIAYTNASISSNPCAQKALYYAKEAMSTGNSSDWYEFYYILTSGKVKVGISNPNTDPAGFRAWINLEIAGHLFANNTYYFYD

SEQ ID NO: 33690 - protein, 85 aa, unidentified
  REGION 1..85: note = Description of Unknown:cds_NZ_WFIY01000004.1_cds_WP_155862573.1_344 target sequence
RMLNNHGNVTASNAAELVPDLESGAIQFLYIYRSAAVAKGLDYIQLPAKLNLGCYKCSSFYAMFNYTLNTGIVKGSPVYLFITIP

SEQ ID NO: 33691 - protein, 85 aa, unidentified
  REGION 1..85: note = Description of Unknown:cds_NZ_WFIY01000004.1_cds_WP_155862629.1_409 target sequence
IRVGLVGVGNVASALVQSIEMAKQGIEIPGILDLPIRADEIEIVTAFDVDKRKVGKKLSEAIFSKPNVVQKYVDVKNDVEVLRGP

SEQ ID NO: 33692 - protein, 85 aa, unidentified
  REGION 1..85: note = Description of Unknown:cds_NZ_WFIY01000004.1_cds_WP_155862629.1_409 target sequence
TLDGIDEQLSKVIEESEEKPVNVKEVLKENNVDVVINLLPAGADKASLFYAEESLSANSSFINATPSNVTERIGDKYKEAKIPIF

SEQ ID NO: 33693 - protein, 85 aa, unidentified
  REGION 1..85: note = Description of Unknown:cds_NZ_WFIY01000004.1_cds_WP_155862629.1_409 target sequence
GDDLLSQIGGTIFHSGIIEFLQKRGVKILRSYQIDIAGNTETFATLEDWKKDLKKKIKSSFISQRSDNAEIVAGTSDYVEFLGDR

SEQ ID NO: 33694 - protein, 85 aa, unidentified
  REGION 1..85: note = Description of Unknown:cds_NZ_WFIY01000004.1_cds_WP_155862629.1_409 target sequence
RVSYMVIEGEYAMGAKVRVDISLKTYDAPNAVQPLIDLIRLAKILKDNNIGGVIPEVCGYYFKNSPVRYKSIDEAKAHFEDFLKK

SEQ ID NO: 33695 - protein, 84 aa, unidentified
  REGION 1..84: note = Description of Unknown:cds_NZ_WFIY01000004.1_cds_WP_155862629.1_409 target sequence
MVIEGEYAMGAKVRVDISLKTYDAPNAVQPLIDLIRLAKILKDNNIGGVIPEVCGYYFKNSPVRYKSIDEAKAHFEDFLKKIIK

SEQ ID NO: 33696 - protein, 85 aa, unidentified
  REGION 1..85: note = Description of Unknown:cds_NZ_WFIY01000004.1_cds_WP_155862629.1_409 target sequence
IPGILDLPIRADEIEIVTAFDVDKRKVGKKLSEAIFSKPNVVQKYVDVKNDVEVLRGPTLDGIDEQLSKVIEESEEKPVNVKEVL

SEQ ID NO: 33697 - protein, 85 aa, unidentified
  REGION 1..85: note = Description of Unknown:cds_NZ_WFIY01000004.1_cds_WP_155862629.1_409 target sequence
KENNVDVVINLLPAGADKASLFYAEESLSANSSFINATPSNVTERIGDKYKEAKIPIFGDDLLSQIGGTIFHSGIIEFLQKRGVK

SEQ ID NO: 33698 - protein, 85 aa, unidentified
  REGION 1..85: note = Description of Unknown:cds_NZ_WFIY01000004.1_cds_WP_155862629.1_409 target sequence
ILRSYQIDIAGNTETFATLEDWKKDLKKKIKSSFISQRSDNAEIVAGTSDYVEFLGDRRVSYMVIEGEYAMGAKVRVDISLKTYD

SEQ ID NO: 33699 - protein, 85 aa, unidentified
  REGION 1..85: note = Description of Unknown:cds_NZ_WFIY01000004.1_cds_WP_155863126.1_1045 target sequence
DKKERWELAWTIFVIVLFAIVIAGTLPEDFVVGGVPSVERCLVGVPTSKIIDVHITSYQYLFKINESGGGIISDELGSPYYYNLI

SEQ ID NO: 33700 - protein, 85 aa, unidentified
  REGION 1..85: note = Description of Unknown:cds_NZ_WFIY01000004.1_cds_WP_155863126.1_1045 target sequence
IGHPGEYLNITMTSADVTSNFYFADYSDRVVTDQIVPGLVEYDVLPVPNITGAYAFLGGEYNGPWFSYQTGLLLSLPYSGYFTSG

SEQ ID NO: 33701 - protein, 85 aa, unidentified
  REGION 1..85: note = Description of Unknown:cds_NZ_WFIY01000004.1_cds_WP_155863126.1_1045 target sequence
NITAYEKQTSVAQSVALKGDPYNPPIIGPSTSFYLVGNQCGIFNDTVPGPTLITYAHKTVTVKMYMPTPDDDRNYLYNYSVNGTA

SEQ ID NO: 33702 - protein, 85 aa, unidentified
  REGION 1..85: note = Description of Unknown:cds_NZ_WFIY01000004.1_cds_WP_155863126.1_1045 target sequence
YPVTSVYVGIYAIWWNGTITLVKQVPISYGTTMCFTFNATAPAYLYGIITPVYYNYNPCGLSTKLGDLIGIQKGYIMGAWGVILV

SEQ ID NO: 33703 - protein, 84 aa, unidentified
  REGION 1..84: note = Description of Unknown:cds_NZ_WFIY01000004.1_cds_WP_155863126.1_1045 target sequence
SVYVGIYAIWWNGTITLVKQVPISYGTTMCFTFNATAPAYLYGIITPVYYNYNPCGLSTKLGDLIGIQKGYIMGAWGVILVECD

SEQ ID NO: 33704 - protein, 85 aa, unidentified
  REGION 1..85: note = Description of Unknown:cds_NZ_WFIY01000004.1_cds_WP_155863126.1_1045 target sequence
EDFVVGGVPSVERCLVGVPTSKIIDVHITSYQYLFKINESGGGIISDELGSPYYYNLIIGHPGEYLNITMTSADVTSNFYFADYS

SEQ ID NO: 33705 - protein, 85 aa, unidentified
  REGION 1..85: note = Description of Unknown:cds_NZ_WFIY01000004.1_cds_WP_155863126.1_1045 target sequence
DRVVTDQIVPGLVEYDVLPVPNITGAYAFLGGEYNGPWFSYQTGLLLSLPYSGYFTSGNITAYEKQTSVAQSVALKGDPYNPPII

SEQ ID NO: 33706 - protein, 85 aa, unidentified
  REGION 1..85: note = Description of Unknown:cds_NZ_WFIY01000004.1_cds_WP_155863126.1_1045 target sequence
GPSTSFYLVGNQCGIFNDTVPGPTLITYAHKTVTVKMYMPTPDDDRNYLYNYSVNGTAYPVTSVYVGIYAIWWNGTITLVKQVPI

SEQ ID NO: 33707 - protein, 85 aa, unidentified
  REGION 1..85: note = Description of Unknown:cds_NZ_WFIY01000004.1_cds_WP_155864312.1_2308 target sequence
EAVILHGGQGTRLRPLTHTGPKQLIKVAGKPVSQWVLEQIRDTGIRDVIIVLGDNAPTRVVEYYGDGSKFGVRITYVYQGKARGL

SEQ ID NO: 33708 - protein, 85 aa, unidentified
  REGION 1..85: note = Description of Unknown:cds_NZ_WFIY01000004.1_cds_WP_155864312.1_2308 target sequence
ADAVYKVKDVVSDKFLVYLGDNLVPYDLSKFSSFKGSASILLAKVNNPNRFGVAVIKDGRVVKLIEKPKEQISDLALVGVYGFTR

SEQ ID NO: 33709 - protein, 85 aa, unidentified
  REGION 1..85: note = Description of Unknown:cds_NZ_WFIY01000004.1_cds_WP_155864312.1_2308 target sequence
EIFDVIESLKPSWRGELEITDAIQGLIDRGREVNYEIIQGWWKDTGTPKDILEANAFLLDRYAESRIEGVVENSTVDGRVIIEKG

SEQ ID NO: 33710 - protein, 85 aa, unidentified
  REGION 1..85: note = Description of Unknown:cds_NZ_WFIY01000004.1_cds_WP_155864312.1_2308 target sequence
AVIKNSVVRGPTYIGRDTKIINSYIGPFTSIGDQSEITDSEIEYSVILDGVKIRGVTLMDSLIGNNSTVEKGGRWQKLIIGENSS

SEQ ID NO: 33711 - protein, 84 aa, unidentified
  REGION 1..84: note = Description of Unknown:cds_NZ_WFIY01000004.1_cds_WP_155864312.1_2308 target sequence
NSVVRGPTYIGRDTKIINSYIGPFTSIGDQSEITDSEIEYSVILDGVKIRGVTLMDSLIGNNSTVEKGGRWQKLIIGENSSVIL

SEQ ID NO: 33712 - protein, 85 aa, unidentified
  REGION 1..85: note = Description of Unknown:cds_NZ_WFIY01000004.1_cds_WP_155864312.1_2308 target sequence
AGKPVSQWVLEQIRDTGIRDVIIVLGDNAPTRVVEYYGDGSKFGVRITYVYQGKARGLADAVYKVKDVVSDKFLVYLGDNLVPYD

SEQ ID NO: 33713 - protein, 85 aa, unidentified
  REGION 1..85: note = Description of Unknown:cds_NZ_WFIY01000004.1_cds_WP_155864312.1_2308 target sequence
LSKFSSFKGSASILLAKVNNPNRFGVAVIKDGRVVKLIEKPKEQISDLALVGVYGFTREIFDVIESLKPSWRGELEITDAIQGLI

SEQ ID NO: 33714 - protein, 85 aa, unidentified
  REGION 1..85: note = Description of Unknown:cds_NZ_WFIY01000004.1_cds_WP_155864312.1_2308 target sequence
DRGREVNYEIIQGWWKDTGTPKDILEANAFLLDRYAESRIEGVVENSTVDGRVIIEKGAVIKNSVVRGPTYIGRDTKIINSYIGP

SEQ ID NO: 33715 - protein, 85 aa, unidentified
  REGION 1..85: note = Description of Unknown:cds_NZ_WFIY01000004.1_cds_WP_155863149.1_1077 target sequence
LVKKGIDYISKGPCKLTVIKGRILIKGIEINEKEYRQIDEESFSIVPEEESEIDTDCKILAEIPHLGWEELASQISGGKVLLLGN

SEQ ID NO: 33716 - protein, 85 aa, unidentified
  REGION 1..85: note = Description of Unknown:cds_NZ_WFIY01000004.1_cds_WP_155863149.1_1077 target sequence
TDSGKSYFSDIIHNMNKDSVIIDADVGQSRYLPTFISSTDGILEFFGDISPSRNYRLHIELIGKILDKEKHSLTIIDTDGWIRGY

SEQ ID NO: 33717 - protein, 85 aa, unidentified
  REGION 1..85: note = Description of Unknown:cds_NZ_WFIY01000004.1_cds_WP_155863149.1_1077 target sequence
KAFLHKLYMIYELDPDFIISFDEKIVDYFPSNIRKKAIMAKKIPSFLERSRAKRISYRISKYKKYFEKASIVTLEYEQVLGKKLA

SEQ ID NO: 33718 - protein, 85 aa, unidentified
  REGION 1..85: note = Description of Unknown:cds_NZ_WFIY01000004.1_cds_WP_155863149.1_1077 target sequence
EGLFVGFDEPLQLFYEEPCSGYFIEELLGGLVGIVNEGKISGAGIIKEINQDGVKILTPINKVQGVILGNISLNEEFKERRIRFS

SEQ ID NO: 33719 - protein, 84 aa, unidentified
  REGION 1..84: note = Description of Unknown:cds_NZ_WFIY01000004.1_cds_WP_155863149.1_1077 target sequence
FVGFDEPLQLFYEEPCSGYFIEELLGGLVGIVNEGKISGAGIIKEINQDGVKILTPINKVQGVILGNISLNEEFKERRIRFSKC

SEQ ID NO: 33720 - protein, 85 aa, unidentified
  REGION 1..85: note = Description of Unknown:cds_NZ_WFIY01000004.1_cds_WP_155863149.1_1077 target sequence
IEINEKEYRQIDEESFSIVPEEESEIDTDCKILAEIPHLGWEELASQISGGKVLLLGNTDSGKSYFSDIIHNMNKDSVIIDADVG

SEQ ID NO: 33721 - protein, 85 aa, unidentified
  REGION 1..85: note = Description of Unknown:cds_NZ_WFIY01000004.1_cds_WP_155863149.1_1077 target sequence
QSRYLPTFISSTDGILEFFGDISPSRNYRLHIELIGKILDKEKHSLTIIDTDGWIRGYKAFLHKLYMIYELDPDFIISFDEKIVD

SEQ ID NO: 33722 - protein, 85 aa, unidentified
  REGION 1..85: note = Description of Unknown:cds_NZ_WFIY01000004.1_cds_WP_155863149.1_1077 target sequence
YFPSNIRKKAIMAKKIPSFLERSRAKRISYRISKYKKYFEKASIVTLEYEQVLGKKLAEGLFVGFDEPLQLFYEEPCSGYFIEEL

SEQ ID NO: 33723 - protein, 85 aa, unidentified
  REGION 1..85: note = Description of Unknown:cds_NZ_WFIY01000004.1_cds_WP_155864473.1_2017 target sequence
GSNSIIISLYLLSLGLSALEIGELLSLGVLVGSFISLILSFLGDLYGRKKFVIISRLASTVSFFFLFLGIPIAYIFSLTWGAGGL

SEQ ID NO: 33724 - protein, 85 aa, unidentified
  REGION 1..85: note = Description of Unknown:cds_NZ_WFIY01000004.1_cds_WP_155864473.1_2017 target sequence
LFSLLAEKSENLDKSLGLRQSLTILFSVIGSLFPIFIEYKGILLLDVLINLIALLLVLPVREKFKGSKKLKISSVKVVSKFSTEA

SEQ ID NO: 33725 - protein, 85 aa, unidentified
  REGION 1..85: note = Description of Unknown:cds_NZ_WFIY01000004.1_cds_WP_155864473.1_2017 target sequence
IIGLGAGLVIPLMSLWFYLKFGVTGAEMSPVFAISELTLAFSSYGSVLLAERLGRVKTIVYTHSLAIVLLFLLPLSPDFLIASLI

SEQ ID NO: 33726 - protein, 85 aa, unidentified
  REGION 1..85: note = Description of Unknown:cds_NZ_WFIY01000004.1_cds_WP_155864473.1_2017 target sequence
FVSRNVLMNMTSPVFESFLLRLIPEEERGRANGIVNFMESIPRAIGPSIGGYFFNEGNLILPFFITGFLYSFATILFFIWFKREE

SEQ ID NO: 33727 - protein, 84 aa, unidentified
  REGION 1..84: note = Description of Unknown:cds_NZ_WFIY01000004.1_cds_WP_155864473.1_2017 target sequence
RNVLMNMTSPVFESFLLRLIPEEERGRANGIVNFMESIPRAIGPSIGGYFFNEGNLILPFFITGFLYSFATILFFIWFKREEHL

SEQ ID NO: 33728 - protein, 85 aa, unidentified
  REGION 1..85: note = Description of Unknown:cds_NZ_WFIY01000004.1_cds_WP_155864473.1_2017 target sequence
GVLVGSFISLILSFLGDLYGRKKFVIISRLASTVSFFFLFLGIPIAYIFSLTWGAGGLLFSLLAEKSENLDKSLGLRQSLTILFS

SEQ ID NO: 33729 - protein, 85 aa, unidentified
  REGION 1..85: note = Description of Unknown:cds_NZ_WFIY01000004.1_cds_WP_155864473.1_2017 target sequence
VIGSLFPIFIEYKGILLLDVLINLIALLLVLPVREKFKGSKKLKISSVKVVSKFSTEAIIGLGAGLVIPLMSLWFYLKFGVTGAE

SEQ ID NO: 33730 - protein, 85 aa, unidentified
  REGION 1..85: note = Description of Unknown:cds_NZ_WFIY01000004.1_cds_WP_155864473.1_2017 target sequence
MSPVFAISELTLAFSSYGSVLLAERLGRVKTIVYTHSLAIVLLFLLPLSPDFLIASLIFVSRNVLMNMTSPVFESFLLRLIPEEE

SEQ ID NO: 33731 - protein, 85 aa, unidentified
  REGION 1..85: note = Description of Unknown:cds_NZ_WFIY01000004.1_cds_WP_155864114.1_2065 target sequence
LLRAIAYIFLSLLLISIAFSLISQYFFGLPYGWNIEATNSMVPELNPGCIVFIMPLLGKPHIGEIVAYKPPFYNHYIVHEIIEEK

SEQ ID NO: 33732 - protein, 85 aa, unidentified
  REGION 1..85: note = Description of Unknown:cds_NZ_WFIY01000004.1_cds_WP_155864114.1_2065 target sequence
ACGYITKGIHNKFPDPWIVKPYWIKGFVPVILGRPLSIPYIGYAISTVDTTQGKIYALITIFGIYILLEIIDKNKIEIMQRKQYN

SEQ ID NO: 33733 - protein, 85 aa, unidentified
  REGION 1..85: note = Description of Unknown:cds_NZ_WFIY01000004.1_cds_WP_155864114.1_2065 target sequence
KLNTKLIFSTLFVLFFIVFFVIFSVNTILTRAQWTSTCAPSFLTKKEIGVSFKIGVLPECKNITLVLPVNVSKFIFKFPLAILFY

SEQ ID NO: 33734 - protein, 85 aa, unidentified
  REGION 1..85: note = Description of Unknown:cds_NZ_WFIY01000004.1_cds_WP_155864114.1_2065 target sequence
SNTSNLQLIGNKTICHSSNITFMLNSGKGGFKSTNVGFLIVPELLPYCIMEGLFSFNPLLFLVVYSAFLSSIILGIIIIISKLLS

SEQ ID NO: 33735 - protein, 84 aa, unidentified
  REGION 1..84: note = Description of Unknown:cds_NZ_WFIY01000004.1_cds_WP_155864114.1_2065 target sequence
NLQLIGNKTICHSSNITFMLNSGKGGFKSTNVGFLIVPELLPYCIMEGLFSFNPLLFLVVYSAFLSSIILGIIIIISKLLSLSY

SEQ ID NO: 33736 - protein, 85 aa, unidentified
  REGION 1..85: note = Description of Unknown:cds_NZ_WFIY01000004.1_cds_WP_155864114.1_2065 target sequence
GLPYGWNIEATNSMVPELNPGCIVFIMPLLGKPHIGEIVAYKPPFYNHYIVHEIIEEKACGYITKGIHNKFPDPWIVKPYWIKGF

SEQ ID NO: 33737 - protein, 85 aa, unidentified
  REGION 1..85: note = Description of Unknown:cds_NZ_WFIY01000004.1_cds_WP_155864114.1_2065 target sequence
VPVILGRPLSIPYIGYAISTVDTTQGKIYALITIFGIYILLEIIDKNKIEIMQRKQYNKLNTKLIFSTLFVLFFIVFFVIFSVNT

SEQ ID NO: 33738 - protein, 85 aa, unidentified
  REGION 1..85: note = Description of Unknown:cds_NZ_WFIY01000004.1_cds_WP_155864114.1_2065 target sequence
ILTRAQWTSTCAPSFLTKKEIGVSFKIGVLPECKNITLVLPVNVSKFIFKFPLAILFYSNTSNLQLIGNKTICHSSNITFMLNSG

SEQ ID NO: 33739 - protein, 85 aa, unidentified
  REGION 1..85: note = Description of Unknown:cds_NC_035460.1_cds_YP_009408103.1_152 target sequence
AVVNQNNVSTDIEINNTMFNSDWDNFDRVIYDFEKSDDNYYKACVENNIFKTDSVTVKNVIADTYNIDKSISYIAYDNYGFNLSR

SEQ ID NO: 33740 - protein, 85 aa, unidentified
  REGION 1..85: note = Description of Unknown:cds_NC_035460.1_cds_YP_009408103.1_152 target sequence
LSRFCTVVHLNNDNDFIHKKENNNFICIFNIKQTDINSHCKVIINDSHKLKCVNIPYKKYIVIEPQSFIHICGNNTYIAIIVYEK

SEQ ID NO: 33741 - protein, 85 aa, unidentified
  REGION 1..85: note = Description of Unknown:cds_NC_035460.1_cds_YP_009408103.1_152 target sequence
CNNLFLPLISNVDKNFVYISRYNRIYDELPNNSWFKFYIKFSCSYNTSVYAIMDGSVVNAIATKSTHCEISKLIYKKNIDNVTDC

SEQ ID NO: 33742 - protein, 85 aa, unidentified
  REGION 1..85: note = Description of Unknown:cds_NC_035460.1_cds_YP_009408103.1_152 target sequence
CYCCNTQELSKELYKKSLSNCVSSHYKSGLLINVNNIGNFTASYVGKCPNFEYVNIVMSIIDFMINDTSMFCGQSFHSVYLYGIS

SEQ ID NO: 33743 - protein, 84 aa, unidentified
  REGION 1..84: note = Description of Unknown:cds_NC_035460.1_cds_YP_009408103.1_152 target sequence
CNTQELSKELYKKSLSNCVSSHYKSGLLINVNNIGNFTASYVGKCPNFEYVNIVMSIIDFMINDTSMFCGQSFHSVYLYGISSK

SEQ ID NO: 33744 - protein, 85 aa, unidentified
  REGION 1..85: note = Description of Unknown:cds_NC_035460.1_cds_YP_009408103.1_152 target sequence
RVIYDFEKSDDNYYKACVENNIFKTDSVTVKNVIADTYNIDKSISYIAYDNYGFNLSRLSRFCTVVHLNNDNDFIHKKENNNFIC

SEQ ID NO: 33745 - protein, 85 aa, unidentified
  REGION 1..85: note = Description of Unknown:cds_NC_035460.1_cds_YP_009408103.1_152 target sequence
IFNIKQTDINSHCKVIINDSHKLKCVNIPYKKYIVIEPQSFIHICGNNTYIAIIVYEKCNNLFLPLISNVDKNFVYISRYNRIYD

SEQ ID NO: 33746 - protein, 85 aa, unidentified
  REGION 1..85: note = Description of Unknown:cds_NC_035460.1_cds_YP_009408103.1_152 target sequence
ELPNNSWFKFYIKFSCSYNTSVYAIMDGSVVNAIATKSTHCEISKLIYKKNIDNVTDCCYCCNTQELSKELYKKSLSNCVSSHYK

SEQ ID NO: 33747 - protein, 85 aa, unidentified
  REGION 1..85: note = Description of Unknown:cds_NC_003214.2_cds_NP_445689.1_24 target sequence
VLTMENRGIRIAERYGYKLVPHFFNLFFILDNWNNIPIGKTIVSLYNYRQKEFVEIFKKYDENIGIATVNYTNVHVIKNHNEFEI

SEQ ID NO: 33748 - protein, 85 aa, unidentified
  REGION 1..85: note = Description of Unknown:cds_NC_003214.2_cds_NP_445689.1_24 target sequence
IVYNVDSIHDHKSKYLLMLFLGNKFIFRRGKVYLYDIVIRNLIKSHDLQFKIKKINLIRVRSLFGNNIVSYYPKKELIRNSIILG

SEQ ID NO: 33749 - protein, 85 aa, unidentified
  REGION 1..85: note = Description of Unknown:cds_NC_003214.2_cds_NP_445689.1_24 target sequence
KGANDSIYVITEINNKRVLYYVKRIRKIPRLNRIALKNHKLQYQFFKMLLQKGILQKETLFPIVPLRSLFTSLRISGTSEWKFSP

SEQ ID NO: 33750 - protein, 85 aa, unidentified
  REGION 1..85: note = Description of Unknown:cds_NC_003214.2_cds_NP_445689.1_24 target sequence
LYVFNGRLVNANIYARAMNPVLIDYDYDETNQVLLKFADESYHSVLCGLDYKNMLWCITLPAITMWWRIKEVYKYVYDLDNQTKV

SEQ ID NO: 33751 - protein, 84 aa, unidentified
  REGION 1..84: note = Description of Unknown:cds_NC_003214.2_cds_NP_445689.1_24 target sequence
NGRLVNANIYARAMNPVLIDYDYDETNQVLLKFADESYHSVLCGLDYKNMLWCITLPAITMWWRIKEVYKYVYDLDNQTKVFNY

SEQ ID NO: 33752 - protein, 85 aa, unidentified
  REGION 1..85: note = Description of Unknown:cds_NC_003214.2_cds_NP_445689.1_24 target sequence
FILDNWNNIPIGKTIVSLYNYRQKEFVEIFKKYDENIGIATVNYTNVHVIKNHNEFEIIVYNVDSIHDHKSKYLLMLFLGNKFIF

SEQ ID NO: 33753 - protein, 85 aa, unidentified
  REGION 1..85: note = Description of Unknown:cds_NC_003214.2_cds_NP_445689.1_24 target sequence
RRGKVYLYDIVIRNLIKSHDLQFKIKKINLIRVRSLFGNNIVSYYPKKELIRNSIILGKGANDSIYVITEINNKRVLYYVKRIRK

SEQ ID NO: 33754 - protein, 85 aa, unidentified
  REGION 1..85: note = Description of Unknown:cds_NC_003214.2_cds_NP_445689.1_24 target sequence
IPRLNRIALKNHKLQYQFFKMLLQKGILQKETLFPIVPLRSLFTSLRISGTSEWKFSPLYVFNGRLVNANIYARAMNPVLIDYDY

SEQ ID NO: 33755 - protein, 85 aa, unidentified
  REGION 1..85: note = Description of Unknown:cds_NC_029316.1_cds_YP_009230269.1_16 target sequence
SEVDLVHLKDLVEFRDDIIKLRVALGNRIGAKKENNKWVFLRRYSVCNNHHMILLKEDEKRDKCPLCGQPVKIIEETPSNDLIER

SEQ ID NO: 33756 - protein, 85 aa, unidentified
  REGION 1..85: note = Description of Unknown:cds_NC_029316.1_cds_YP_009230269.1_16 target sequence
FMDLLRQQEIVEGLIGNAVTKFPEFTNFLAFIRGIGSANAGRLLVYAYPPKFQYSINKFRKYAGLAVMFQCPKCGYYYYAGESSN

SEQ ID NO: 33757 - protein, 85 aa, unidentified
  REGION 1..85: note = Description of Unknown:cds_NC_029316.1_cds_YP_009230269.1_16 target sequence
GKPALPSKDGWLCPNDGTKLIGTSAKNVKYNRTVKTFLLGILANNLILAGGVYAKIIKSFKEEIASKHPDWNKLRVQRTAIRKAI

SEQ ID NO: 33758 - protein, 85 aa, unidentified
  REGION 1..85: note = Description of Unknown:cds_NC_029316.1_cds_YP_009230269.1_16 target sequence
SLLISQYFAISLHYREGVPLPEAYKVVLGKEYEILRKHEDFIESPITDYYVDTKTVKYKAKFEKILEELGINREEVTTWLKKKKI

SEQ ID NO: 33759 - protein, 84 aa, unidentified
  REGION 1..84: note = Description of Unknown:cds_NC_029316.1_cds_YP_009230269.1_16 target sequence
ISQYFAISLHYREGVPLPEAYKVVLGKEYEILRKHEDFIESPITDYYVDTKTVKYKAKFEKILEELGINREEVTTWLKKKKIIK

SEQ ID NO: 33760 - protein, 85 aa, unidentified
  REGION 1..85: note = Description of Unknown:cds_NC_029316.1_cds_YP_009230269.1_16 target sequence
RIGAKKENNKWVFLRRYSVCNNHHMILLKEDEKRDKCPLCGQPVKIIEETPSNDLIERFMDLLRQQEIVEGLIGNAVTKFPEFTN

SEQ ID NO: 33761 - protein, 85 aa, unidentified
  REGION 1..85: note = Description of Unknown:cds_NC_029316.1_cds_YP_009230269.1_16 target sequence
FLAFIRGIGSANAGRLLVYAYPPKFQYSINKFRKYAGLAVMFQCPKCGYYYYAGESSNGKPALPSKDGWLCPNDGTKLIGTSAKN

SEQ ID NO: 33762 - protein, 85 aa, unidentified
  REGION 1..85: note = Description of Unknown:cds_NC_029316.1_cds_YP_009230269.1_16 target sequence
VKYNRTVKTFLLGILANNLILAGGVYAKIIKSFKEEIASKHPDWNKLRVQRTAIRKAISLLISQYFAISLHYREGVPLPEAYKVV

SEQ ID NO: 33763 - protein, 85 aa, unidentified
  REGION 1..85: note = Description of Unknown:cds_NC_030656.1_cds_YP_009268782.1_67 target sequence
DTNELRTFKTRKKNTFKNQPNSFIKDKPKNVDYEKPPQNPKPAFNQPVNKIIHNEYKDYIDNRICEYYKKIPLSIYNSSSSTYSV

SEQ ID NO: 33764 - protein, 85 aa, unidentified
  REGION 1..85: note = Description of Unknown:cds_NC_030656.1_cds_YP_009268782.1_67 target sequence
KHVSEEEASCWIELSSAVVGKFAVNFPLVIGSSSYNYGRTIFLEEFPNSKVSELNPHDYCVAVPILFQLAVALYCMYKKNIYADC

SEQ ID NO: 33765 - protein, 85 aa, unidentified
  REGION 1..85: note = Description of Unknown:cds_NC_030656.1_cds_YP_009268782.1_67 target sequence
LEFLIVTIPRTTIVYSINQMIFSTNTDSLLILSKSSRLFRAELPQSCYLNYIKTFYALRNWKHFTTDYFFEWLLRNHFDYFSKQQ

SEQ ID NO: 33766 - protein, 85 aa, unidentified
  REGION 1..85: note = Description of Unknown:cds_NC_030656.1_cds_YP_009268782.1_67 target sequence
NDLFKHKKKNSPRTQINKSTDPGTLVYVSRDDSFVVGVTLTNVSINENIRIMFSSDGLIFEVDDFNINDVYFANELFVRSQLSAI

SEQ ID NO: 33767 - protein, 84 aa, unidentified
  REGION 1..84: note = Description of Unknown:cds_NC_030656.1_cds_YP_009268782.1_67 target sequence
FKHKKKNSPRTQINKSTDPGTLVYVSRDDSFVVGVTLTNVSINENIRIMFSSDGLIFEVDDFNINDVYFANELFVRSQLSAITV

SEQ ID NO: 33768 - protein, 85 aa, unidentified
  REGION 1..85: note = Description of Unknown:cds_NC_030656.1_cds_YP_009268782.1_67 target sequence
PKNVDYEKPPQNPKPAFNQPVNKIIHNEYKDYIDNRICEYYKKIPLSIYNSSSSTYSVKHVSEEEASCWIELSSAVVGKFAVNFP

SEQ ID NO: 33769 - protein, 85 aa, unidentified
  REGION 1..85: note = Description of Unknown:cds_NC_030656.1_cds_YP_009268782.1_67 target sequence
LVIGSSSYNYGRTIFLEEFPNSKVSELNPHDYCVAVPILFQLAVALYCMYKKNIYADCLEFLIVTIPRTTIVYSINQMIFSTNTD

SEQ ID NO: 33770 - protein, 85 aa, unidentified
  REGION 1..85: note = Description of Unknown:cds_NC_030656.1_cds_YP_009268782.1_67 target sequence
SLLILSKSSRLFRAELPQSCYLNYIKTFYALRNWKHFTTDYFFEWLLRNHFDYFSKQQNDLFKHKKKNSPRTQINKSTDPGTLVY

SEQ ID NO: 33771 - protein, 85 aa, unidentified
  REGION 1..85: note = Description of Unknown:cds_NC_030656.1_cds_YP_009268820.1_105 target sequence
TAVPVTDMPSEYIVTAFSEDNYPSNKHYEITSGQMSIMRTMHNALLANKNEYDEQSSDDEETSPTPCSDMEEEVDEVEDKVSESA

SEQ ID NO: 33772 - protein, 85 aa, unidentified
  REGION 1..85: note = Description of Unknown:cds_NC_030656.1_cds_YP_009268820.1_105 target sequence
ITIPTAAAAIARTRVTPTHQDISFKKSINIMGPNGTNNEVIFTAEQKRVNITMSDLDTVLENNGHMDKFSKITSMPMHTTPSLGA

SEQ ID NO: 33773 - protein, 85 aa, unidentified
  REGION 1..85: note = Description of Unknown:cds_NC_030656.1_cds_YP_009268820.1_105 target sequence
VFDDSKRVKLLEQEVQQLRKQKAAAPSNLDNFTKILFGKVPIKTADVNKRMVIVNYANLNNVSLSIEDLNDCSDEEIERMFKTIK

SEQ ID NO: 33774 - protein, 85 aa, unidentified
  REGION 1..85: note = Description of Unknown:cds_NC_030656.1_cds_YP_009268820.1_105 target sequence
QYNEMRKKKIIITNMIIIGITILEQVLYKIGFEEVKGLSADVTSEIIDVEIGDDCEAVANKIGFSNSPVFNIVLFIVKLFVKKMK

SEQ ID NO: 33775 - protein, 84 aa, unidentified
  REGION 1..84: note = Description of Unknown:cds_NC_030656.1_cds_YP_009268820.1_105 target sequence
EMRKKKIIITNMIIIGITILEQVLYKIGFEEVKGLSADVTSEIIDVEIGDDCEAVANKIGFSNSPVFNIVLFIVKLFVKKMKII

SEQ ID NO: 33776 - protein, 85 aa, unidentified
  REGION 1..85: note = Description of Unknown:cds_NC_030656.1_cds_YP_009268820.1_105 target sequence
YEITSGQMSIMRTMHNALLANKNEYDEQSSDDEETSPTPCSDMEEEVDEVEDKVSESAITIPTAAAAIARTRVTPTHQDISFKKS

SEQ ID NO: 33777 - protein, 85 aa, unidentified
  REGION 1..85: note = Description of Unknown:cds_NC_030656.1_cds_YP_009268820.1_105 target sequence
INIMGPNGTNNEVIFTAEQKRVNITMSDLDTVLENNGHMDKFSKITSMPMHTTPSLGAVFDDSKRVKLLEQEVQQLRKQKAAAPS

SEQ ID NO: 33778 - protein, 85 aa, unidentified
  REGION 1..85: note = Description of Unknown:cds_NC_030656.1_cds_YP_009268820.1_105 target sequence
NLDNFTKILFGKVPIKTADVNKRMVIVNYANLNNVSLSIEDLNDCSDEEIERMFKTIKQYNEMRKKKIIITNMIIIGITILEQVL

SEQ ID NO: 33779 - protein, 85 aa, unidentified
  REGION 1..85: note = Description of Unknown:hvTR_B8XCN3.2 target sequence
TSNRARVTYNPPPTTTGTRSCGPELSGWISEQLMTGKIPITDIFNEIETLPSISPSIHSKIKTPSVQTRSVQTQTDPNCNHDFAE

SEQ ID NO: 33780 - protein, 85 aa, unidentified
  REGION 1..85: note = Description of Unknown:hvTR_B8XCN3.2 target sequence
VVKMLTSLTLVVQKQTLATESLEQRITDLEGSLKPVSEITKIVSALNRSCAEMVAKYDLLVMTTGRATATAAATEAYWAEHGRPP

SEQ ID NO: 33781 - protein, 85 aa, unidentified
  REGION 1..85: note = Description of Unknown:hvTR_B8XCN3.2 target sequence
PGPSLYEEDAIRTKIGKQGDMVPKEVQEAFRNLDSTALLTEENFGKPDISAKDLRNIMYDHLPGFGTAFHQLVQVICKLGKDNSS

SEQ ID NO: 33782 - protein, 85 aa, unidentified
  REGION 1..85: note = Description of Unknown:hvTR_B8XCN3.2 target sequence
LDVIHAEFQASLAEGDSPQCALIQITKRIPIFQDAAPPVIHIRSRGDIPKACQKSLRPVPPSPKIDRGWVCIFQLQDGKTLGLKI

SEQ ID NO: 33783 - protein, 84 aa, unidentified
  REGION 1..84: note = Description of Unknown:hvTR_B8XCN3.2 target sequence
DVIHAEFQASLAEGDSPQCALIQITKRIPIFQDAAPPVIHIRSRGDIPKACQKSLRPVPPSPKIDRGWVCIFQLQDGKTLGLKI

SEQ ID NO: 33784 - protein, 85 aa, unidentified
  REGION 1..85: note = Description of Unknown:hvTR_B8XCN3.2 target sequence
WISEQLMTGKIPITDIFNEIETLPSISPSIHSKIKTPSVQTRSVQTQTDPNCNHDFAEVVKMLTSLTLVVQKQTLATESLEQRIT

SEQ ID NO: 33785 - protein, 85 aa, unidentified
  REGION 1..85: note = Description of Unknown:hvTR_B8XCN3.2 target sequence
DLEGSLKPVSEITKIVSALNRSCAEMVAKYDLLVMTTGRATATAAATEAYWAEHGRPPPGPSLYEEDAIRTKIGKQGDMVPKEVQ

SEQ ID NO: 33786 - protein, 85 aa, unidentified
  REGION 1..85: note = Description of Unknown:hvTR_B8XCN3.2 target sequence
EAFRNLDSTALLTEENFGKPDISAKDLRNIMYDHLPGFGTAFHQLVQVICKLGKDNSSLDVIHAEFQASLAEGDSPQCALIQITK

SEQ ID NO: 33787 - protein, 85 aa, unidentified
  REGION 1..85: note = Description of Unknown:cds_NZ_WFIY01000004.1_cds_WP_155864406.1_1143 target sequence
DEKEFMMASSESWREEELPSLSDRIVSMNSWRPFYLMLRNYMKKLLGENFIDERNRRIKDDPVNYIKFLMEDAKIRAFVIDEGFG

SEQ ID NO: 33788 - protein, 85 aa, unidentified
  REGION 1..85: note = Description of Unknown:cds_NZ_WFIY01000004.1_cds_WP_155864406.1_1143 target sequence
KKEQEIPVKYRLLFRIETIINENLFSLPFDKAIEVFEETLRSKIKEENYAGFKSIIAYRTGLKIICDENLARNDFLDEEREWFGR

SEQ ID NO: 33789 - protein, 85 aa, unidentified
  REGION 1..85: note = Description of Unknown:cds_NZ_WFIY01000004.1_cds_WP_155864406.1_1143 target sequence
KAKGFRDYLFCKTMEIAKELDVPFQVHTGAGDRDIKLELSRPSYLTDLVRKYEGKLVLVHAGFPFHRESAWMSYLFPSVYLDVSQ

SEQ ID NO: 33790 - protein, 85 aa, unidentified
  REGION 1..85: note = Description of Unknown:cds_NZ_WFIY01000004.1_cds_WP_155864406.1_1143 target sequence
IFPFATTAGRDVLREVLQIAPANKVMYGSDAFEIPEIAWISAKLFRKYITSIVEEMENEEIIDEKDSSMIIKMIAEDNAAKLYGV

SEQ ID NO: 33791 - protein, 84 aa, unidentified
  REGION 1..84: note = Description of Unknown:cds_NZ_WFIY01000004.1_cds_WP_155864406.1_1143 target sequence
FPFATTAGRDVLREVLQIAPANKVMYGSDAFEIPEIAWISAKLFRKYITSIVEEMENEEIIDEKDSSMIIKMIAEDNAAKLYGV

SEQ ID NO: 33792 - protein, 85 aa, unidentified
  REGION 1..85: note = Description of Unknown:cds_NZ_WFIY01000004.1_cds_WP_155864406.1_1143 target sequence
MNSWRPFYLMLRNYMKKLLGENFIDERNRRIKDDPVNYIKFLMEDAKIRAFVIDEGFGKKEQEIPVKYRLLFRIETIINENLFSL

SEQ ID NO: 33793 - protein, 85 aa, unidentified
  REGION 1..85: note = Description of Unknown:cds_NZ_WFIY01000004.1_cds_WP_155864406.1_1143 target sequence
PFDKAIEVFEETLRSKIKEENYAGFKSIIAYRTGLKIICDENLARNDFLDEEREWFGRKAKGFRDYLFCKTMEIAKELDVPFQVH

SEQ ID NO: 33794 - protein, 85 aa, unidentified
  REGION 1..85: note = Description of Unknown:cds_NZ_WFIY01000004.1_cds_WP_155864406.1_1143 target sequence
TGAGDRDIKLELSRPSYLTDLVRKYEGKLVLVHAGFPFHRESAWMSYLFPSVYLDVSQIFPFATTAGRDVLREVLQIAPANKVMY

SEQ ID NO: 33795 - protein, 85 aa, unidentified
  REGION 1..85: note = Description of Unknown:cds_NZ_WFIY01000004.1_cds_WP_155864260.1_2251 target sequence
DSFRFLIERNSQAKILAGEEALLESVASGGEPTLRFVIFDPTAVLVGYHQAVEQEVNVEEVKRRGWEIGRRPTGGGTIIMGPFQL

SEQ ID NO: 33796 - protein, 85 aa, unidentified
  REGION 1..85: note = Description of Unknown:cds_NZ_WFIY01000004.1_cds_WP_155864260.1_2251 target sequence
GWEIYAESSIIGNPEEAIRKGAEGVIVTLKKLGLNANFRPKNDVEINGRKISGIGAFSIGKYVSVTGTILLDFNVNDMVSTLKLS

SEQ ID NO: 33797 - protein, 85 aa, unidentified
  REGION 1..85: note = Description of Unknown:cds_NZ_WFIY01000004.1_cds_WP_155864260.1_2251 target sequence
SEKLKDKIAKDYKERVTWINRERSPIDMEELISTAKEGFEEALKVKLIDGKYTDKEIEDINTLSLKYSSPEWIFNTRIPLKGDIK

SEQ ID NO: 33798 - protein, 85 aa, unidentified
  REGION 1..85: note = Description of Unknown:cds_NZ_WFIY01000004.1_cds_WP_155864260.1_2251 target sequence
YAEEKFPGGLVKVQAKVQGKVIEAILITGDFFVEPKRAIYDLEARLKWSLVDDIEKEVRDWYSQVKIIGIKPEDLIKVIKEAVSK

SEQ ID NO: 33799 - protein, 84 aa, unidentified
  REGION 1..84: note = Description of Unknown:cds_NZ_WFIY01000004.1_cds_WP_155864260.1_2251 target sequence
AEEKFPGGLVKVQAKVQGKVIEAILITGDFFVEPKRAIYDLEARLKWSLVDDIEKEVRDWYSQVKIIGIKPEDLIKVIKEAVSK

SEQ ID NO: 33800 - protein, 85 aa, unidentified
  REGION 1..85: note = Description of Unknown:cds_NZ_WFIY01000004.1_cds_WP_155864260.1_2251 target sequence
SGGEPTLRFVIFDPTAVLVGYHQAVEQEVNVEEVKRRGWEIGRRPTGGGTIIMGPFQLGWEIYAESSIIGNPEEAIRKGAEGVIV

SEQ ID NO: 33801 - protein, 85 aa, unidentified
  REGION 1..85: note = Description of Unknown:cds_NZ_WFIY01000004.1_cds_WP_155864260.1_2251 target sequence
TLKKLGLNANFRPKNDVEINGRKISGIGAFSIGKYVSVTGTILLDFNVNDMVSTLKLSSEKLKDKIAKDYKERVTWINRERSPID

SEQ ID NO: 33802 - protein, 85 aa, unidentified
  REGION 1..85: note = Description of Unknown:cds_NZ_WFIY01000004.1_cds_WP_155864260.1_2251 target sequence
MEELISTAKEGFEEALKVKLIDGKYTDKEIEDINTLSLKYSSPEWIFNTRIPLKGDIKYAEEKFPGGLVKVQAKVQGKVIEAILI

SEQ ID NO: 33803 - protein, 85 aa, unidentified
  REGION 1..85: note = Description of Unknown:cds_NC_035460.1_cds_YP_009408014.1_63 target sequence
GGSISVPDYVKRPIPTPKPTSEMLLDVDKMYNIIGGLRQISDILYIGKVSPEKLKILKHRFPEFIFTPSGPDNLTYVMRNIFTND

SEQ ID NO: 33804 - protein, 85 aa, unidentified
  REGION 1..85: note = Description of Unknown:cds_NC_035460.1_cds_YP_009408014.1_63 target sequence
LPTCCKSFALTYYWLHETDKTISKDFKNNSVLNSCDPDLHNSGKCDKILTEWCQSPNADKDICNHWMGSAFNRIEISSRSTLIEL

SEQ ID NO: 33805 - protein, 85 aa, unidentified
  REGION 1..85: note = Description of Unknown:cds_NC_035460.1_cds_YP_009408014.1_63 target sequence
IKSLTKLCIDKGANQPICEQWLHNLRVRKTNTADTLIDMILNSQKQEFKNKYMKCSFPTEEKKQEALKYNEARECWDIECANANI

SEQ ID NO: 33806 - protein, 85 aa, unidentified
  REGION 1..85: note = Description of Unknown:cds_NC_035460.1_cds_YP_009408014.1_63 target sequence
NFLLTENYNNLGLCSISRCNASINNLNIDKTSNVRMSCGIKNLLSPTPVNRFKVIAHNIENSFKIRYHLITILSLLVIWLLIVAL

SEQ ID NO: 33807 - protein, 84 aa, unidentified
  REGION 1..84: note = Description of Unknown:cds_NC_035460.1_cds_YP_009408014.1_63 target sequence
FLLTENYNNLGLCSISRCNASINNLNIDKTSNVRMSCGIKNLLSPTPVNRFKVIAHNIENSFKIRYHLITILSLLVIWLLIVAL

SEQ ID NO: 33808 - protein, 85 aa, unidentified
  REGION 1..85: note = Description of Unknown:cds_NC_035460.1_cds_YP_009408014.1_63 target sequence
DKMYNIIGGLRQISDILYIGKVSPEKLKILKHRFPEFIFTPSGPDNLTYVMRNIFTNDLPTCCKSFALTYYWLHETDKTISKDFK

SEQ ID NO: 33809 - protein, 85 aa, unidentified
  REGION 1..85: note = Description of Unknown:cds_NC_035460.1_cds_YP_009408014.1_63 target sequence
NNSVLNSCDPDLHNSGKCDKILTEWCQSPNADKDICNHWMGSAFNRIEISSRSTLIELIKSLTKLCIDKGANQPICEQWLHNLRV

SEQ ID NO: 33810 - protein, 85 aa, unidentified
  REGION 1..85: note = Description of Unknown:cds_NC_035460.1_cds_YP_009408014.1_63 target sequence
RKTNTADTLIDMILNSQKQEFKNKYMKCSFPTEEKKQEALKYNEARECWDIECANANINFLLTENYNNLGLCSISRCNASINNLN

SEQ ID NO: 33811 - protein, 85 aa, unidentified
  REGION 1..85: note = Description of Unknown:cds_NC_039345.1_cds_YP_009513275.1_2 target sequence
NSQRIKVINASSTQPKIQPKHGPDLSGWISEQLMTGKIPVNDIFYDTDSISSYTGIPPLAVKTQKPKRVDNDTQTDPVCQHSFDE

SEQ ID NO: 33812 - protein, 85 aa, unidentified
  REGION 1..85: note = Description of Unknown:cds_NC_039345.1_cds_YP_009513275.1_2 target sequence
VVQTLTSLTTVVQQQALATESLEQRISSLESNFKPVLDMAKTIASLQRACSEMVAKYDLLVMTTGRATATAAATEAYWKEHGQPP

SEQ ID NO: 33813 - protein, 85 aa, unidentified
  REGION 1..85: note = Description of Unknown:cds_NC_039345.1_cds_YP_009513275.1_2 target sequence
PGPSLYEEDAIRHKIETMQDVVPQAVQEAFKNLESTTSLTEENFGKPYISAKDLRDIMYDNLPGFGTAFHQLVQVICKIGKDNGL

SEQ ID NO: 33814 - protein, 85 aa, unidentified
  REGION 1..85: note = Description of Unknown:cds_NC_039345.1_cds_YP_009513275.1_2 target sequence
LDTIHAEFQASLADGDSPQCALIQITKRVPAFQEIPPPTIHIRSRGDIPRACQKSLRPVPPSPKIDRGWVCIFQLQDGKTLGLKI

SEQ ID NO: 33815 - protein, 84 aa, unidentified
  REGION 1..84: note = Description of Unknown:cds_NC_039345.1_cds_YP_009513275.1_2 target sequence
DTIHAEFQASLADGDSPQCALIQITKRVPAFQEIPPPTIHIRSRGDIPRACQKSLRPVPPSPKIDRGWVCIFQLQDGKTLGLKI

SEQ ID NO: 33816 - protein, 85 aa, unidentified
  REGION 1..85: note = Description of Unknown:cds_NC_039345.1_cds_YP_009513275.1_2 target sequence
WISEQLMTGKIPVNDIFYDTDSISSYTGIPPLAVKTQKPKRVDNDTQTDPVCQHSFDEVVQTLTSLTTVVQQQALATESLEQRIS

SEQ ID NO: 33817 - protein, 85 aa, unidentified
  REGION 1..85: note = Description of Unknown:cds_NC_039345.1_cds_YP_009513275.1_2 target sequence
SLESNFKPVLDMAKTIASLQRACSEMVAKYDLLVMTTGRATATAAATEAYWKEHGQPPPGPSLYEEDAIRHKIETMQDVVPQAVQ

SEQ ID NO: 33818 - protein, 85 aa, unidentified
  REGION 1..85: note = Description of Unknown:cds_NC_039345.1_cds_YP_009513275.1_2 target sequence
EAFKNLESTTSLTEENFGKPYISAKDLRDIMYDNLPGFGTAFHQLVQVICKIGKDNGLLDTIHAEFQASLADGDSPQCALIQITK

SEQ ID NO: 33819 - protein, 85 aa, unidentified
  REGION 1..85: note = Description of Unknown:hvTR_A0A1C4HDK9 target sequence
TTRTKGRGHTVATTQNDRMPGPELSGWISEQLMTGRIPVNDIFCDIENNPGLCYASQMQQTKPNPKMRNSQTQTDPICNHSFEEV

SEQ ID NO: 33820 - protein, 85 aa, unidentified
  REGION 1..85: note = Description of Unknown:hvTR_A0A1C4HDK9 target sequence
VQTLASLATVVQQQTIASESLEQRITSLENGLKPVYDMAKTISSLNRVCAEMVAKYDLLVMTTGRATATAAATEAYWAEHGQPPP

SEQ ID NO: 33821 - protein, 85 aa, unidentified
  REGION 1..85: note = Description of Unknown:hvTR_A0A1C4HDK9 target sequence
GPSLYEESAIRGKIESRDETVPQSVREAFNNLDSTTSLTEENFGKPDISAKDLRNIMYDHLPGFGTAFHQLVQVICKLGKDSNSL

SEQ ID NO: 33822 - protein, 84 aa, unidentified
  REGION 1..84: note = Description of Unknown:hvTR_A0A1C4HDK9 target sequence
DIIHAEFQASLAEGDSPQCALIQITKRVPIFQDAAPPVIHIRSRGDIPRACQKSLRPVPPSPKIDRGWVCVFQLQDGKTLGLKI

SEQ ID NO: 33823 - protein, 85 aa, unidentified
  REGION 1..85: note = Description of Unknown:hvTR_A0A1C4HDK9 target sequence
ISEQLMTGRIPVNDIFCDIENNPGLCYASQMQQTKPNPKMRNSQTQTDPICNHSFEEVVQTLASLATVVQQQTIASESLEQRITS

SEQ ID NO: 33824 - protein, 85 aa, unidentified
  REGION 1..85: note = Description of Unknown:hvTR_A0A1C4HDK9 target sequence
LENGLKPVYDMAKTISSLNRVCAEMVAKYDLLVMTTGRATATAAATEAYWAEHGQPPPGPSLYEESAIRGKIESRDETVPQSVRE

SEQ ID NO: 33825 - protein, 85 aa, unidentified
  REGION 1..85: note = Description of Unknown:hvTR_A0A1C4HDK9 target sequence
AFNNLDSTTSLTEENFGKPDISAKDLRNIMYDHLPGFGTAFHQLVQVICKLGKDSNSLDIIHAEFQASLAEGDSPQCALIQITKR

SEQ ID NO: 33826 - protein, 85 aa, unidentified
  REGION 1..85: note = Description of Unknown:hvTR_Q05127 target sequence
TTRTKGRGHTAATTQNDRMPGPELSGWISEQLMTGRIPVSDIFCDIENNPGLCYASQMQQTKPNPKTRNSQTQTDPICNHSFEEV

SEQ ID NO: 33827 - protein, 85 aa, unidentified; identical to SEQ ID NO: 33820
  REGION 1..85: note = Description of Unknown:hvTR_Q05127 target sequence

SEQ ID NO: 33828 - protein, 85 aa, unidentified
  REGION 1..85: note = Description of Unknown:hvTR_Q05127 target sequence
GPSLYEESAIRGKIESRDETVPQSVREAFNNLNSTTSLTEENFGKPDISAKDLRNIMYDHLPGFGTAFHQLVQVICKLGKDSNSL

SEQ ID NO: 33829 - protein, 84 aa, unidentified; identical to SEQ ID NO: 33822
  REGION 1..84: note = Description of Unknown:hvTR_Q05127 target sequence

SEQ ID NO: 33830 - protein, 85 aa, unidentified
  REGION 1..85: note = Description of Unknown:hvTR_Q05127 target sequence
ISEQLMTGRIPVSDIFCDIENNPGLCYASQMQQTKPNPKTRNSQTQTDPICNHSFEEVVQTLASLATVVQQQTIASESLEQRITS

SEQ ID NO: 33831 - protein, 85 aa, unidentified; identical to SEQ ID NO: 33824
  REGION 1..85: note = Description of Unknown:hvTR_Q05127 target sequence

SEQ ID NO: 33832 - protein, 85 aa, unidentified
  REGION 1..85: note = Description of Unknown:hvTR_Q05127 target sequence
AFNNLNSTTSLTEENFGKPDISAKDLRNIMYDHLPGFGTAFHQLVQVICKLGKDSNSLDIIHAEFQASLAEGDSPQCALIQITKR

SEQ ID NO: 33833 - protein, 85 aa, unidentified
  REGION 1..85: note = Description of Unknown:cds_NZ_WFIY01000004.1_cds_WP_155862529.1_293 target sequence
IKVALNGYGTIGKRVANAIMLQPDMKLIGIAKTSPNYEAFVAQKMGINIYVPQESVKSFDEAGIKVAGNIEDMVKEADIVVDATP

SEQ ID NO: 33834 - protein, 85 aa, unidentified
  REGION 1..85: note = Description of Unknown:cds_NZ_WFIY01000004.1_cds_WP_155862529.1_293 target sequence
NGVGAQYKELYQKFSKNAIFQGGEKANVADVSFSSLCNYNEAIGKKYIRVVSCNTTALLRTICTLNKLSKVEKVRATIVRRAADP

SEQ ID NO: 33835 - protein, 85 aa, unidentified
  REGION 1..85: note = Description of Unknown:cds_NZ_WFIY01000004.1_cds_WP_155862529.1_293 target sequence
KEVKKGPINALVPDPASVPSHHAKDVNTVLKDLDIITMAVIAPTTYMHMHLLNVTLKSQVSKEDVISQFLNTSRFLLVRGKSKVN

SEQ ID NO: 33836 - protein, 84 aa, unidentified
  REGION 1..84: note = Description of Unknown:cds_NZ_WFIY01000004.1_cds_WP_155862529.1_293 target sequence
STAEIIEVARDLGRIRNDVPEVVIFEDSIYTKGNEVFLMYAVHQESIVVPENIDAIRASLDLASAEDSIKITNTSLNIGKGYLI

SEQ ID NO: 33837 - protein, 85 aa, unidentified
  REGION 1..85: note = Description of Unknown:cds_NZ_WFIY01000004.1_cds_WP_155862529.1_293 target sequence
IGIAKTSPNYEAFVAQKMGINIYVPQESVKSFDEAGIKVAGNIEDMVKEADIVVDATPNGVGAQYKELYQKFSKNAIFQGGEKAN

SEQ ID NO: 33838 - protein, 85 aa, unidentified
  REGION 1..85: note = Description of Unknown:cds_NZ_WFIY01000004.1_cds_WP_155862529.1_293 target sequence
VADVSFSSLCNYNEAIGKKYIRVVSCNTTALLRTICTLNKLSKVEKVRATIVRRAADPKEVKKGPINALVPDPASVPSHHAKDVN

SEQ ID NO: 33839 - protein, 85 aa, unidentified
  REGION 1..85: note = Description of Unknown:cds_NZ_WFIY01000004.1_cds_WP_155862529.1_293 target sequence
TVLKDLDIITMAVIAPTTYMHMHLLNVTLKSQVSKEDVISQFLNTSRFLLVRGKSKVNSTAEIIEVARDLGRIRNDVPEVVIFED

SEQ ID NO: 33840 - protein, 85 aa, unidentified
  REGION 1..85: note = Description of Unknown:cds_NZ_WFIY01000004.1_cds_WP_155862826.1_655 target sequence
QTYELKEEIVHFISGSGIYRETREIRVNRYLTRSGWVLNKIEGKEEEIKSHEECISYISPAVKEWENLDEILSKLTDVNVTVKKV

SEQ ID NO: 33841 - protein, 85 aa, unidentified
  REGION 1..85: note = Description of Unknown:cds_NZ_WFIY01000004.1_cds_WP_155862826.1_655 target sequence
YRKIDECVEEKILNYVEYNGVKFAYSGKPSDLRAVADFLKMQSISMNERIWGLERMNVILDPEATAHLFHQFMNFLRGDNPRIKL

SEQ ID NO: 33842 - protein, 85 aa, unidentified
  REGION 1..85: note = Description of Unknown:cds_NZ_WFIY01000004.1_cds_WP_155862826.1_655 target sequence
GERISSEITVYDDPLNENLIGFSVFDDEGVRTRKKEIIGDGIVLEYLGTLTTKSGSPGNARGVLPLPDYFNLIVKPKDWGFQELI

SEQ ID NO: 33843 - protein, 84 aa, unidentified
  REGION 1..84: note = Description of Unknown:cds_NZ_WFIY01000004.1_cds_WP_155862826.1_655 target sequence
QDTKNGLLVLGVIRSEIVKNSIRLFPRNSMLIGYGGVIVREIAIPLQELTTIDAISKEVKSVYIDDYHGGIAPFIRLKARPIVY

SEQ ID NO: 33844 - protein, 85 aa, unidentified
  REGION 1..85: note = Description of Unknown:cds_NZ_WFIY01000004.1_cds_WP_155862826.1_655 target sequence
NRYLTRSGWVLNKIEGKEEEIKSHEECISYISPAVKEWENLDEILSKLTDVNVTVKKVYRKIDECVEEKILNYVEYNGVKFAYSG

SEQ ID NO: 33845 - protein, 85 aa, unidentified
  REGION 1..85: note = Description of Unknown:cds_NZ_WFIY01000004.1_cds_WP_155862826.1_655 target sequence
KPSDLRAVADFLKMQSISMNERIWGLERMNVILDPEATAHLFHQFMNFLRGDNPRIKLGERISSEITVYDDPLNENLIGFSVFDD

SEQ ID NO: 33846 - protein, 85 aa, unidentified
  REGION 1..85: note = Description of Unknown:cds_NZ_WFIY01000004.1_cds_WP_155862826.1_655 target sequence
EGVRTRKKEIIGDGIVLEYLGTLTTKSGSPGNARGVLPLPDYFNLIVKPKDWGFQELIQDTKNGLLVLGVIRSEIVKNSIRLFPR

SEQ ID NO: 33847 - protein, 85 aa, unidentified
  REGION 1..85: note = Description of Unknown:cds_NZ_WFIY01000004.1_cds_WP_155863043.1_937 target sequence
LKGNPEISLYNRDLPLGCKYCRLGSKLVVFITGECGDSCYYCPVSEERFGKDVMYANEKKTESFQDFIYEAYKMNALGAGITGGD

SEQ ID NO: 33848 - protein, 85 aa, unidentified
  REGION 1..85: note = Description of Unknown:cds_NZ_WFIY01000004.1_cds_WP_155863043.1_937 target sequence
PILHLDKVVKLIEILKSEFGEDFHIHLYTSGRYVNYDALFALQRAGLDEIRFHPVRKEYLRAVEKALNFSFDVGLEVPAIPGEEE

SEQ ID NO: 33849 - protein, 85 aa, unidentified
  REGION 1..85: note = Description of Unknown:cds_NZ_WFIY01000004.1_cds_WP_155863043.1_937 target sequence
YLNFLIKWAEEHKVKFININELEITERNFYNLNSKGITITHGLAGGKGSFELALKVLEVNVDSKLDIHYCSSVYKDVVETRTRFL

SEQ ID NO: 33850 - protein, 84 aa, unidentified
  REGION 1..84: note = Description of Unknown:cds_NZ_WFIY01000004.1_cds_WP_155863043.1_937 target sequence
RTIRYYSKPYEKYSGEGTIIKAFVRTNADLSDYGEKTSNGFYISPEFVDEVISKYNPDEVRIVEELPYGLKISDKLIYSKSKNC

SEQ ID NO: 33851 - protein, 85 aa, unidentified
  REGION 1..85: note = Description of Unknown:cds_NZ_WFIY01000004.1_cds_WP_155863043.1_937 target sequence
VVFITGECGDSCYYCPVSEERFGKDVMYANEKKTESFQDFIYEAYKMNALGAGITGGDPILHLDKVVKLIEILKSEFGEDFHIHL

SEQ ID NO: 33852 - protein, 85 aa, unidentified
  REGION 1..85: note = Description of Unknown:cds_NZ_WFIY01000004.1_cds_WP_155863043.1_937 target sequence
YTSGRYVNYDALFALQRAGLDEIRFHPVRKEYLRAVEKALNFSFDVGLEVPAIPGEEEYLNFLIKWAEEHKVKFININELEITER

SEQ ID NO: 33853 - protein, 85 aa, unidentified
  REGION 1..85: note = Description of Unknown:cds_NZ_WFIY01000004.1_cds_WP_155863043.1_937 target sequence
NFYNLNSKGITITHGLAGGKGSFELALKVLEVNVDSKLDIHYCSSVYKDVVETRTRFLRTIRYYSKPYEKYSGEGTIIKAFVRTN

SEQ ID NO: 33854 - protein, 85 aa, unidentified
  REGION 1..85: note = Description of Unknown:cds_NZ_WFIY01000004.1_cds_WP_155864051.1_1987 target sequence
LDKLSINVDTAIIIITHGSRRNTFVEDMEGVTKYIEDKLRIPVYLSHNEFTEPNWRNLVSSLLEKGINNFIFALAFLGRGNHVAK

SEQ ID NO: 33855 - protein, 85 aa, unidentified
  REGION 1..85: note = Description of Unknown:cds_NZ_WFIY01000004.1_cds_WP_155864051.1_1987 target sequence
DIMGSFGVNEFYKWVEAQYEGKKLKVYFTRPLADSPLVKLSLLYRISSALRKDNSFNFLEDPEEIEENSMELSRQKVREITGKDG

SEQ ID NO: 33856 - protein, 85 aa, unidentified
  REGION 1..85: note = Description of Unknown:cds_NZ_WFIY01000004.1_cds_WP_155864051.1_1987 target sequence
EELEIISRAVYASGNLEIARHIYISKDAIEMGVSALKSGIGILTDVKMVKAGLRWNAENYLDDAVELAKKLKITRTAAGIRIGLS

SEQ ID NO: 33857 - protein, 85 aa, unidentified
  REGION 1..85: note = Description of Unknown:cds_NZ_WFIY01000004.1_cds_WP_155864051.1_1987 target sequence
KEPKIVVIGNSPTALVEAIKMHEEEGVEIPLIVATPPGFTNAVEAKERLISTDIPCIVLRGNYGGSNIAVSIMNEIIRYARGKNG

SEQ ID NO: 33858 - protein, 84 aa, unidentified
  REGION 1..84: note = Description of Unknown:cds_NZ_WFIY01000004.1_cds_WP_155864051.1_1987 target sequence
EPKIVVIGNSPTALVEAIKMHEEEGVEIPLIVATPPGFTNAVEAKERLISTDIPCIVLRGNYGGSNIAVSIMNEIIRYARGKNG

SEQ ID NO: 33859 - protein, 85 aa, unidentified
  REGION 1..85: note = Description of Unknown:cds_NZ_WFIY01000004.1_cds_WP_155864051.1_1987 target sequence
MEGVTKYIEDKLRIPVYLSHNEFTEPNWRNLVSSLLEKGINNFIFALAFLGRGNHVAKDIMGSFGVNEFYKWVEAQYEGKKLKVY

SEQ ID NO: 33860 - protein, 85 aa, unidentified
  REGION 1..85: note = Description of Unknown:cds_NZ_WFIY01000004.1_cds_WP_155864051.1_1987 target sequence
FTRPLADSPLVKLSLLYRISSALRKDNSFNFLEDPEEIEENSMELSRQKVREITGKDGEELEIISRAVYASGNLEIARHIYISKD

SEQ ID NO: 33861 - protein, 85 aa, unidentified
  REGION 1..85: note = Description of Unknown:cds_NZ_WFIY01000004.1_cds_WP_155864051.1_1987 target sequence
AIEMGVSALKSGIGILTDVKMVKAGLRWNAENYLDDAVELAKKLKITRTAAGIRIGLSKEPKIVVIGNSPTALVEAIKMHEEEGV

SEQ ID NO: 33862 - protein, 85 aa, unidentified
  REGION 1..85: note = Description of Unknown:cds_NZ_WFIY01000004.1_cds_WP_155864100.1_2047 target sequence
NEFVLFFFIPLAWFVTAFMIEAGSVVMIPVCKYENYREKMLIVIGSLWAIIATSLVYLVVSLDTIFAPVMFVTGAVLYAPLMILI

SEQ ID NO: 33863 - protein, 85 aa, unidentified
  REGION 1..85: note = Description of Unknown:cds_NZ_WFIY01000004.1_cds_WP_155864100.1_2047 target sequence
IMLAFHHFSIGVAEGSSTLGKHSMERTFLVIALPFALIVAFLGNTLFTSVFSGYGFCVHNLLTLDITPNYTQMIFNAFNWIFFIG

SEQ ID NO: 33864 - protein, 85 aa, unidentified
  REGION 1..85: note = Description of Unknown:cds_NZ_WFIY01000004.1_cds_WP_155864100.1_2047 target sequence
VVMYVVYFTVVFYGIKERLLVGALGLTLANILFLVSTYEWLPVVFNSAVNNPGFWIYIVILYAYLYIATTRNVPFRQAWIFLLTF

SEQ ID NO: 33865 - protein, 84 aa, unidentified
  REGION 1..84: note = Description of Unknown:cds_NZ_WFIY01000004.1_cds_WP_155864100.1_2047 target sequence
IGAMMFGAFTQGRILEDIVPAGTVGPLPGVPASLLLTNAATLTAGSIVLGMAGLLVLGGITAVSYKVLYKVATERVEAKKARVQ

SEQ ID NO: 33866 - protein, 85 aa, unidentified
  REGION 1..85: note = Description of Unknown:cds_NZ_WFIY01000004.1_cds_WP_155864100.1_2047 target sequence
IPVCKYENYREKMLIVIGSLWAIIATSLVYLVVSLDTIFAPVMFVTGAVLYAPLMILIIMLAFHHFSIGVAEGSSTLGKHSMERT

SEQ ID NO: 33867 - protein, 85 aa, unidentified
  REGION 1..85: note = Description of Unknown:cds_NZ_WFIY01000004.1_cds_WP_155864100.1_2047 target sequence
FLVIALPFALIVAFLGNTLFTSVFSGYGFCVHNLLTLDITPNYTQMIFNAFNWIFFIGVVMYVVYFTVVFYGIKERLLVGALGLT

SEQ ID NO: 33868 - protein, 85 aa, unidentified
  REGION 1..85: note = Description of Unknown:cds_NZ_WFIY01000004.1_cds_WP_155864100.1_2047 target sequence
LANILFLVSTYEWLPVVFNSAVNNPGFWIYIVILYAYLYIATTRNVPFRQAWIFLLTFIGAMMFGAFTQGRILEDIVPAGTVGPL

SEQ ID NO: 33869 - protein, 85 aa, unidentified
  REGION 1..85: note = Description of Unknown:cds_NZ_WFIY01000004.1_cds_WP_155864212.1_2180 target sequence
KKSDLFLFSYSFSSIGGPLALIAQFSRGLSPLGVILSSILFFPTVYVIYHVTKEVKGEKGLYEYLLNSRKVSTAFLYFWFFSYFL

SEQ ID NO: 33870 - protein, 85 aa, unidentified
  REGION 1..85: note = Description of Unknown:cds_NZ_WFIY01000004.1_cds_WP_155864212.1_2180 target sequence
YLSYTVDYVVYYILQLDGFLATVTLVLLTLGIDLLTLTGSELWFLVFSSFIQLFLSIPIGRQVSLTDSVNLSQILPTSEAFVCIT

SEQ ID NO: 33871 - protein, 85 aa, unidentified
  REGION 1..85: note = Description of Unknown:cds_NZ_WFIY01000004.1_cds_WP_155864212.1_2180 target sequence
LTPFAKTENSNAKVIFYAYVIAVSLMAISTLFAIPKFIYYASSISAFSLIIVEFYAIKKILPRKLLIIVLLFSAMTLVSLINPYQ

SEQ ID NO: 33872 - protein, 84 aa, unidentified
  REGION 1..84: note = Description of Unknown:cds_NZ_WFIY01000004.1_cds_WP_155864212.1_2180 target sequence
YYLYTIVPSLSALYVSLGIFFSSIAFSKGGNVFLRASSIVSLVIVAYGFYTSLDFESLSVLMIEIISLLSIFGLVLYKNGRKSS

SEQ ID NO: 33873 - protein, 85 aa, unidentified
  REGION 1..85: note = Description of Unknown:cds_NZ_WFIY01000004.1_cds_WP_155864212.1_2180 target sequence
GLSPLGVILSSILFFPTVYVIYHVTKEVKGEKGLYEYLLNSRKVSTAFLYFWFFSYFLYLSYTVDYVVYYILQLDGFLATVTLVL

SEQ ID NO: 33874 - protein, 85 aa, unidentified
  REGION 1..85: note = Description of Unknown:cds_NZ_WFIY01000004.1_cds_WP_155864212.1_2180 target sequence
LTLGIDLLTLTGSELWFLVFSSFIQLFLSIPIGRQVSLTDSVNLSQILPTSEAFVCITLTPFAKTENSNAKVIFYAYVIAVSLMA

SEQ ID NO: 33875 - protein, 85 aa, unidentified
  REGION 1..85: note = Description of Unknown:cds_NZ_WFIY01000004.1_cds_WP_155864212.1_2180 target sequence
ISTLFAIPKFIYYASSISAFSLIIVEFYAIKKILPRKLLIIVLLFSAMTLVSLINPYQYYLYTIVPSLSALYVSLGIFFSSIAFS

SEQ ID NO: 33876 - protein, 85 aa, unidentified
  REGION 1..85: note = Description of Unknown:cds_NZ_WFIY01000004.1_cds_WP_155864327.1_2332 target sequence
EELKRNIVKNVTVRQLRGFNVIDHEKGEIPNLHPRKINVIVGCNKTLKTTFLEALTVALLIISPNVYNVRSTTLASTLRMDPLWH

SEQ ID NO: 33877 - protein, 85 aa, unidentified
  REGION 1..85: note = Description of Unknown:cds_NZ_WFIY01000004.1_cds_WP_155864327.1_2332 target sequence
YFLAKEGIDISLNEYRITNASLDEVSKVSPIQPLQDLALPNGFKLTRDDKVIRILRIDITVPQNSVLNIRDIAQDETKRLPNYRF

SEQ ID NO: 33878 - protein, 85 aa, unidentified
  REGION 1..85: note = Description of Unknown:cds_NZ_WFIY01000004.1_cds_WP_155864327.1_2332 target sequence
VAFSIPNPISADFINNFLSSVSFASVKDRLKKLLNLEFIGMKPDEFGRPNIVATENDVEIQFLGSGFVSLILLTLASSNDIVIYD

SEQ ID NO: 33879 - protein, 84 aa, unidentified
  REGION 1..84: note = Description of Unknown:cds_NZ_WFIY01000004.1_cds_WP_155864327.1_2332 target sequence
NIENHLHPQLMFKAIELMKESNSQWFITTQSTEFLDYLLTETDGDNVMVYEFMRRGNSIHIRQIEGSYAKKLSQELSEDLRGMC

SEQ ID NO: 33880 - protein, 85 aa, unidentified
  REGION 1..85: note = Description of Unknown:cds_NZ_WFIY01000004.1_cds_WP_155864327.1_2332 target sequence
EIPNLHPRKINVIVGCNKTLKTTFLEALTVALLIISPNVYNVRSTTLASTLRMDPLWHYFLAKEGIDISLNEYRITNASLDEVSK

SEQ ID NO: 33881 - protein, 85 aa, unidentified
  REGION 1..85: note = Description of Unknown:cds_NZ_WFIY01000004.1_cds_WP_155864327.1_2332 target sequence
VSPIQPLQDLALPNGFKLTRDDKVIRILRIDITVPQNSVLNIRDIAQDETKRLPNYRFVAFSIPNPISADFINNFLSSVSFASVK

SEQ ID NO: 33882 - protein, 85 aa, unidentified
  REGION 1..85: note = Description of Unknown:cds_NZ_WFIY01000004.1_cds_WP_155864327.1_2332 target sequence
DRLKKLLNLEFIGMKPDEFGRPNIVATENDVEIQFLGSGFVSLILLTLASSNDIVIYDNIENHLHPQLMFKAIELMKESNSQWFI

SEQ ID NO: 33883 - protein, 85 aa, unidentified
  REGION 1..85: note = Description of Unknown:cds_NZ_WFIY01000004.1_cds_WP_155864349.1_2363 target sequence
TQFRVRGEKDRIFSKGVKAEIVYVIISKGIPLFRTEGVGDISTISVVINKENYELPVILPEKIQAKLRRVMLEKLRDEYAKFDDE

SEQ ID NO: 33884 - protein, 85 aa, unidentified
  REGION 1..85: note = Description of Unknown:cds_NZ_WFIY01000004.1_cds_WP_155864349.1_2363 target sequence
FKKKILDTAKNLGYKRTGDGWNCYIAPPQERKSSTDIGMCGYCPSCTILGNITDDSMMNDINTAYGIKSRVAHDIAFSLVEYKKA

SEQ ID NO: 33885 - protein, 85 aa, unidentified
  REGION 1..85: note = Description of Unknown:cds_NZ_WFIY01000004.1_cds_WP_155864349.1_2363 target sequence
IMELTHNKVADGVSYTGQSLYSELHIAPGVVFIGKSTAYDLTKNEFEVVLDALASITRLGGGETKYGSVETRILSVKFSEKETIS

SEQ ID NO: 33886 - protein, 84 aa, unidentified
  REGION 1..84: note = Description of Unknown:cds_NZ_WFIY01000004.1_cds_WP_155864349.1_2363 target sequence
SYDIMREIVGKHKGEMMDPEDYVREVSDILKGKGFTDYSYQVNYKEAWEDSLDYAGKIREFINIVENKTGGKEKKKGKSSGGEE

SEQ ID NO: 33887 - protein, 85 aa, unidentified
  REGION 1..85: note = Description of Unknown:cds_NZ_WFIY01000004.1_cds_WP_155864349.1_2363 target sequence
KGIPLFRTEGVGDISTISVVINKENYELPVILPEKIQAKLRRVMLEKLRDEYAKFDDEFKKKILDTAKNLGYKRTGDGWNCYIAP

SEQ ID NO: 33888 - protein, 85 aa, unidentified
  REGION 1..85: note = Description of Unknown:cds_NZ_WFIY01000004.1_cds_WP_155864349.1_2363 target sequence
PQERKSSTDIGMCGYCPSCTILGNITDDSMMNDINTAYGIKSRVAHDIAFSLVEYKKAIMELTHNKVADGVSYTGQSLYSELHIA

SEQ ID NO: 33889 - protein, 85 aa, unidentified
  REGION 1..85: note = Description of Unknown:cds_NZ_WFIY01000004.1_cds_WP_155864349.1_2363 target sequence
PGVVFIGKSTAYDLTKNEFEVVLDALASITRLGGGETKYGSVETRILSVKFSEKETISSYDIMREIVGKHKGEMMDPEDYVREVS

SEQ ID NO: 33890 - protein, 85 aa, unidentified
  REGION 1..85: note = Description of Unknown:cds_NC_024711.1_cds_YP_009052501.1_20 target sequence
STEKEIKNEATVVASAEQTANAEVQTPKKRRGRGINNDLRDVTRKKFDERTDCNKANGLFIGHLEDVKVDWATLKDDVQGMPSFA

SEQ ID NO: 33891 - protein, 85 aa, unidentified
  REGION 1..85: note = Description of Unknown:cds_NC_024711.1_cds_YP_009052501.1_20 target sequence
GMSIPYLTFTFASNHENINERRYVTQRLLPAESNVETIPGGKGAWKVDNIFRFMKHIYNVFVLKGRDLTEEEIDALTLPFEDFDE

SEQ ID NO: 33892 - protein, 85 aa, unidentified
  REGION 1..85: note = Description of Unknown:cds_NC_024711.1_cds_YP_009052501.1_20 target sequence
NMQYVPVEAEEVIAGYKTVFENYVKLLNNNGKPVYNDAKGKPITIWMKLLRFVKNDGKWRAVVGSKSSFGDLGFPTFINDGVIEL

SEQ ID NO: 33893 - protein, 84 aa, unidentified
  REGION 1..84: note = Description of Unknown:cds_NC_024711.1_cds_YP_009052501.1_20 target sequence
LYKEQSAPSLHIDPYKESIVYQKSAEQAKQPNVAMPGVGVMPGVQTAAPINPVSGFNGGGDFSPFGGGNDAAGAFVNPTEDLPF

SEQ ID NO: 33894 - protein, 85 aa, unidentified
  REGION 1..85: note = Description of Unknown:cds_NC_024711.1_cds_YP_009052501.1_20 target sequence
KKRRGRGINNDLRDVTRKKFDERTDCNKANGLFIGHLEDVKVDWATLKDDVQGMPSFAGMSIPYLTFTFASNHENINERRYVTQR

SEQ ID NO: 33895 - protein, 85 aa, unidentified
  REGION 1..85: note = Description of Unknown:cds_NC_024711.1_cds_YP_009052501.1_20 target sequence
LLPAESNVETIPGGKGAWKVDNIFRFMKHIYNVFVLKGRDLTEEEIDALTLPFEDFDENMQYVPVEAEEVIAGYKTVFENYVKLL

SEQ ID NO: 33896 - protein, 85 aa, unidentified
  REGION 1..85: note = Description of Unknown:cds_NC_024711.1_cds_YP_009052501.1_20 target sequence
NNNGKPVYNDAKGKPITIWMKLLRFVKNDGKWRAVVGSKSSFGDLGFPTFINDGVIELYKEQSAPSLHIDPYKESIVYQKSAEQA

SEQ ID NO: 33897 - protein, 85 aa, unidentified
  REGION 1..85: note = Description of Unknown:cds_NZ_WFIY01000004.1_cds_WP_155862598.1_374 target sequence
ENFIKEPTPEEAKKLIESINKEESLCIRIPYNVDAILAASLIIKYMESPSAISFSSSNCELEFSEKEGGKFVRFKNTEVFIGNSS

SEQ ID NO: 33898 - protein, 85 aa, unidentified
  REGION 1..85: note = Description of Unknown:cds_NZ_WFIY01000004.1_cds_WP_155862598.1_374 target sequence
FSSIIPITTEDILPILTGISSSVVLERRNFSDWELSIMRNSENLGITIEKNLKIPSYHDAPIFISLIESFDPYIPTVTGSRENAI

SEQ ID NO: 33899 - protein, 85 aa, unidentified
  REGION 1..85: note = Description of Unknown:cds_NZ_WFIY01000004.1_cds_WP_155862598.1_374 target sequence
ALVNEIGIDELSKLTELNEGALNTLIFKIVSLIMKINPKVTRDDIITDRIFYLNYDSLELAFSFIYFLDTIGSKILVDFALNQSI

SEQ ID NO: 33900 - protein, 84 aa, unidentified
  REGION 1..84: note = Description of Unknown:cds_NZ_WFIY01000004.1_cds_WP_155862598.1_374 target sequence
IARILINKFREIIGKGFSIGQVTEDKKFFIVESNLKSPTLLQLILLQTQKVRKNKPIVIKNDNKLLTSRYFINTEKEGLIEIEG

SEQ ID NO: 33901 - protein, 85 aa, unidentified
  REGION 1..85: note = Description of Unknown:cds_NZ_WFIY01000004.1_cds_WP_155862598.1_374 target sequence
RIPYNVDAILAASLIIKYMESPSAISFSSSNCELEFSEKEGGKFVRFKNTEVFIGNSSFSSIIPITTEDILPILTGISSSVVLER

SEQ ID NO: 33902 - protein, 85 aa, unidentified
  REGION 1..85: note = Description of Unknown:cds_NZ_WFIY01000004.1_cds_WP_155862598.1_374 target sequence
RNFSDWELSIMRNSENLGITIEKNLKIPSYHDAPIFISLIESFDPYIPTVTGSRENAIALVNEIGIDELSKLTELNEGALNTLIF

SEQ ID NO: 33903 - protein, 85 aa, unidentified
  REGION 1..85: note = Description of Unknown:cds_NZ_WFIY01000004.1_cds_WP_155862598.1_374 target sequence
KIVSLIMKINPKVTRDDIITDRIFYLNYDSLELAFSFIYFLDTIGSKILVDFALNQSIARILINKFREIIGKGFSIGQVTEDKKF

SEQ ID NO: 33904 - protein, 85 aa, unidentified
  REGION 1..85: note = Description of Unknown:cds_NZ_WFIY01000004.1_cds_WP_155862909.1_760 target sequence
LGHRKLASPRRGSSGFRPRKRAKELLPTPRSWPRINSSNPILLGFVGYKVGMTHVYYINDIKGSSEYGKEVFTPVTVIETPPIIP

SEQ ID NO: 33905 - protein, 85 aa, unidentified
  REGION 1..85: note = Description of Unknown:cds_NZ_WFIY01000004.1_cds_WP_155862909.1_760 target sequence
IALRAYILGSKGEPEVLTDYWSPELPQEITRKIKSLKVNKDKLNGFLDKIKSNLNNILYLRAIIATQPKLVPALGKKKPEIVEIQ

SEQ ID NO: 33906 - protein, 85 aa, unidentified
  REGION 1..85: note = Description of Unknown:cds_NZ_WFIY01000004.1_cds_WP_155862909.1_760 target sequence
VGGGDTSAQLNYLLNILGKPVNVTDIFKEGQLVDIIGVTKGKGFQGVIKRYNVIELPRWHKHRKGSRKVGTKGPSLGTPSYVPQP

SEQ ID NO: 33907 - protein, 84 aa, unidentified
  REGION 1..84: note = Description of Unknown:cds_NZ_WFIY01000004.1_cds_WP_155862909.1_760 target sequence
GQLGFHRRTEYNKRILKISTNPQEINPAGGFVKYGLVRNPYILIQGSTIGVRKRPLFLRYPIRPYEVPAEAPKITYIDLSSKQG

SEQ ID NO: 33908 - protein, 85 aa, unidentified
  REGION 1..85: note = Description of Unknown:cds_NZ_WFIY01000004.1_cds_WP_155862909.1_760 target sequence
TPRSWPRINSSNPILLGFVGYKVGMTHVYYINDIKGSSEYGKEVFTPVTVIETPPIIPIALRAYILGSKGEPEVLTDYWSPELPQ

SEQ ID NO: 33909 - protein, 85 aa, unidentified
  REGION 1..85: note = Description of Unknown:cds_NZ_WFIY01000004.1_cds_WP_155862909.1_760 target sequence
EITRKIKSLKVNKDKLNGFLDKIKSNLNNILYLRAIIATQPKLVPALGKKKPEIVEIQVGGGDTSAQLNYLLNILGKPVNVTDIF

SEQ ID NO: 33910 - protein, 85 aa, unidentified
  REGION 1..85: note = Description of Unknown:cds_NZ_WFIY01000004.1_cds_WP_155862909.1_760 target sequence
KEGQLVDIIGVTKGKGFQGVIKRYNVIELPRWHKHRKGSRKVGTKGPSLGTPSYVPQPGQLGFHRRTEYNKRILKISTNPQEINP

SEQ ID NO: 33911 - protein, 85 aa, unidentified
  REGION 1..85: note = Description of Unknown:cds_NZ_WFIY01000004.1_cds_WP_162309158.1_1270 target sequence
KPIFILLLIILSSIIPTFYSSTSWYVKVQTCQVKIIISPYNSTDIISCLCKGKYIYAEVYELTCCKIANAIINAVKKGGEAFIVL

SEQ ID NO: 33912 - protein, 85 aa, unidentified
  REGION 1..85: note = Description of Unknown:cds_NZ_WFIY01000004.1_cds_WP_162309158.1_1270 target sequence
SSNVYGGIPSDEEQLVSELNSSGVHVKFLSGFKYVHSKVFVINNCTVILGSINPTYYGIYKDHGVDLAIYNSSIAQAFACIILDD

SEQ ID NO: 33913 - protein, 85 aa, unidentified
  REGION 1..85: note = Description of Unknown:cds_NZ_WFIY01000004.1_cds_WP_162309158.1_1270 target sequence
YYGKPVNVDYPGIVVSPINSECELSNILSQPGHLYIAMEELYPSSGFYPEIEQHERTVVTSTYSEDNCAVSQLGAVEINDMTAKI

SEQ ID NO: 33914 - protein, 84 aa, unidentified
  REGION 1..84: note = Description of Unknown:cds_NZ_WFIY01000004.1_cds_WP_162309158.1_1270 target sequence
IIVVGNYVYVGSVNLDYTSIHCNRELGIIICNPAIAHSLESLICNWAQGKSVEGNYAYQLSNPLFLLFIIIISIIVVILLKKKI

SEQ ID NO: 33915 - protein, 85 aa, unidentified
  REGION 1..85: note = Description of Unknown:cds_NZ_WFIY01000004.1_cds_WP_162309158.1_1270 target sequence
VQTCQVKIIISPYNSTDIISCLCKGKYIYAEVYELTCCKIANAIINAVKKGGEAFIVLSSNVYGGIPSDEEQLVSELNSSGVHVK

SEQ ID NO: 33916 - protein, 85 aa, unidentified
  REGION 1..85: note = Description of Unknown:cds_NZ_WFIY01000004.1_cds_WP_162309158.1_1270 target sequence
FLSGFKYVHSKVFVINNCTVILGSINPTYYGIYKDHGVDLAIYNSSIAQAFACIILDDYYGKPVNVDYPGIVVSPINSECELSNI

SEQ ID NO: 33917 - protein, 85 aa, unidentified
  REGION 1..85: note = Description of Unknown:cds_NZ_WFIY01000004.1_cds_WP_162309158.1_1270 target sequence
LSQPGHLYIAMEELYPSSGFYPEIEQHERTVVTSTYSEDNCAVSQLGAVEINDMTAKIIVVGNYVYVGSVNLDYTSIHCNRELGI

SEQ ID NO: 33918 - protein, 85 aa, unidentified
  REGION 1..85: note = Description of Unknown:cds_NZ_WFIY01000004.1_cds_WP_155863360.1_1332 target sequence
SYNKIQISHGNGGKETQQLLQRLFFSRLPLELKRVKGGVGIDYPDDGAVLQNNLVVATDSHTVNPYFFPGGDIGYLAVSGTLNDV

SEQ ID NO: 33919 - protein, 85 aa, unidentified
  REGION 1..85: note = Description of Unknown:cds_NZ_WFIY01000004.1_cds_WP_155863360.1_1332 target sequence
IMMGAKPIAMLDSIVVSEGFPIDDLEKITGSMIELLKKYNIPLVGGDFKVIEETAMKNSIIINTVGLGVVETGSPIVDAIKPGDK

SEQ ID NO: 33920 - protein, 85 aa, unidentified
  REGION 1..85: note = Description of Unknown:cds_NZ_WFIY01000004.1_cds_WP_155863360.1_1332 target sequence
IIVTGPVGVHGAVIAAMQYNISTNLKSDVRPLFELLEVFNKFKGYIHAARDPTRGGLAATLNEWAQLTGNVIVIEEAKVPVLEEV

SEQ ID NO: 33921 - protein, 84 aa, unidentified
  REGION 1..84: note = Description of Unknown:cds_NZ_WFIY01000004.1_cds_WP_155863360.1_1332 target sequence
VKAITEITGLDPLNLASEGVGVLAVDSKVEDEVLETLKSLGFEPASIGYVVEPKSEKGIVIAKTAVGGAKILEMPTGDIVPRIC

SEQ ID NO: 33922 - protein, 85 aa, unidentified
  REGION 1..85: note = Description of Unknown:cds_NZ_WFIY01000004.1_cds_WP_155863360.1_1332 target sequence
LPLELKRVKGGVGIDYPDDGAVLQNNLVVATDSHTVNPYFFPGGDIGYLAVSGTLNDVIMMGAKPIAMLDSIVVSEGFPIDDLEK

SEQ ID NO: 33923 - protein, 85 aa, unidentified
  REGION 1..85: note = Description of Unknown:cds_NZ_WFIY01000004.1_cds_WP_155863360.1_1332 target sequence
ITGSMIELLKKYNIPLVGGDFKVIEETAMKNSIIINTVGLGVVETGSPIVDAIKPGDKIIVTGPVGVHGAVIAAMQYNISTNLKS

SEQ ID NO: 33924 - protein, 85 aa, unidentified
  REGION 1..85: note = Description of Unknown:cds_NZ_WFIY01000004.1_cds_WP_155863360.1_1332 target sequence
DVRPLFELLEVFNKFKGYIHAARDPTRGGLAATLNEWAQLTGNVIVIEEAKVPVLEEVKAITEITGLDPLNLASEGVGVLAVDSK

SEQ ID NO: 33925 - protein, 85 aa, unidentified
  REGION 1..85: note = Description of Unknown:cds_NZ_WFIY01000004.1_cds_WP_155863584.1_1499 target sequence
QCSDLLKLVVEGKIDKEIGAYYDCFLSLQHFLRFNVAIKLKRKVIKIGNYVYFDLDYDRPSSFISGIDDTTGKIFTMPVRMCGIY

SEQ ID NO: 33926 - protein, 85 aa, unidentified
  REGION 1..85: note = Description of Unknown:cds_NZ_WFIY01000004.1_cds_WP_155863584.1_1499 target sequence
YETEEEIRKCMGFDYHYYEKFEYATNVKIRIQGDLVMDVIRAYDKKEELLKYVNENKENFRQLWESFVRAELGKNKEMQNAEVLI

SEQ ID NO: 33927 - protein, 85 aa, unidentified
  REGION 1..85: note = Description of Unknown:cds_NZ_WFIY01000004.1_cds_WP_155863584.1_1499 target sequence
GAYQELMDFALNTRVYKEEDRKDVIKVVKLLRIIENNVLTLAKKYGIQVHNLYEKPRSSEPERYKCIRFLDIQEFARKLREKKAE

SEQ ID NO: 33928 - protein, 84 aa, unidentified
  REGION 1..84: note = Description of Unknown:cds_NZ_WFIY01000004.1_cds_WP_155863584.1_1499 target sequence
EELSENFDNFVLSQENTVKIRIGHYTTPHEISLNGVITDVVEGRRVNALILSPQKITVKHPEHGLNEFYVPKPSYVQFRLMEPF

SEQ ID NO: 33929 - protein, 85 aa, unidentified
  REGION 1..85: note = Description of Unknown:cds_NZ_WFIY01000004.1_cds_WP_155863584.1_1499 target sequence
LQHFLRFNVAIKLKRKVIKIGNYVYFDLDYDRPSSFISGIDDTTGKIFTMPVRMCGIYYETEEEIRKCMGFDYHYYEKFEYATNV

SEQ ID NO: 33930 - protein, 85 aa, unidentified
  REGION 1..85: note = Description of Unknown:cds_NZ_WFIY01000004.1_cds_WP_155863584.1_1499 target sequence
KIRIQGDLVMDVIRAYDKKEELLKYVNENKENFRQLWESFVRAELGKNKEMQNAEVLIGAYQELMDFALNTRVYKEEDRKDVIKV

SEQ ID NO: 33931 - protein, 85 aa, unidentified
  REGION 1..85: note = Description of Unknown:cds_NZ_WFIY01000004.1_cds_WP_155863584.1_1499 target sequence
VKLLRIIENNVLTLAKKYGIQVHNLYEKPRSSEPERYKCIRFLDIQEFARKLREKKAEELSENFDNFVLSQENTVKIRIGHYTTP

SEQ ID NO: 33932 - protein, 85 aa, unidentified
  REGION 1..85: note = Description of Unknown:cds_NZ_WFIY01000004.1_cds_WP_013776496.1_2229 target sequence
IGVIWDDRFLNISFSHPMIRDIAKARIRKFRELLEGIKDEILFIKPEPAKEEDLLVVHSKEYLRKLKEASNSPYIGFLDEGDTVH

SEQ ID NO: 33933 - protein, 85 aa, unidentified
  REGION 1..85: note = Description of Unknown:cds_NZ_WFIY01000004.1_cds_WP_013776496.1_2229 target sequence
YPGMFDDVLLILGGSITAIKFSSFLDFIYVPLGGFHHALPCRAMGFCPINDIAIAAKILSKTRRVAILDVDAHHGNGLQRILYSD

SEQ ID NO: 33934 - protein, 85 aa, unidentified
  REGION 1..85: note = Description of Unknown:cds_NZ_WFIY01000004.1_cds_WP_013776496.1_2229 target sequence
EVLKINIFGYDGHFFPGDGKMDEIGEGKGKGLNLNIPLPRGSGDDAFAEALKVTQVLEDFRPDYLLVNAGVDGHKDDSLHFLNLS

SEQ ID NO: 33935 - protein, 84 aa, unidentified
  REGION 1..84: note = Description of Unknown:cds_NZ_WFIY01000004.1_cds_WP_013776496.1_2229 target sequence
SANSFNYLGQKVRRLQRELNFKVISYGGGGYGESSALCMFEYILGYLGKKDNPEEETMGNAEIVRQEVDEILKTFYSSFVKNHS

SEQ ID NO: 33936 - protein, 85 aa, unidentified
  REGION 1..85: note = Description of Unknown:cds_NZ_WFIY01000004.1_cds_WP_013776496.1_2229 target sequence
RKFRELLEGIKDEILFIKPEPAKEEDLLVVHSKEYLRKLKEASNSPYIGFLDEGDTVHYPGMFDDVLLILGGSITAIKFSSFLDF

SEQ ID NO: 33937 - protein, 85 aa, unidentified
  REGION 1..85: note = Description of Unknown:cds_NZ_WFIY01000004.1_cds_WP_013776496.1_2229 target sequence
IYVPLGGFHHALPCRAMGFCPINDIAIAAKILSKTRRVAILDVDAHHGNGLQRILYSDEVLKINIFGYDGHFFPGDGKMDEIGEG

SEQ ID NO: 33938 - protein, 85 aa, unidentified
  REGION 1..85: note = Description of Unknown:cds_NZ_WFIY01000004.1_cds_WP_013776496.1_2229 target sequence
KGKGLNLNIPLPRGSGDDAFAEALKVTQVLEDFRPDYLLVNAGVDGHKDDSLHFLNLSANSFNYLGQKVRRLQRELNFKVISYGG

SEQ ID NO: 33939 - protein, 85 aa, unidentified
  REGION 1..85: note = Description of Unknown:cds_NC_029316.1_cds_YP_009230314.1_61 target sequence
MLYIVSNSKLKSGIGRYASRLHSYFPNSKLVLFRMKPWEEPDGFDEVVQYKYFNKLGIIYDLITKRGKFSKFASKKLLHLVSPDF

SEQ ID NO: 33940 - protein, 85 aa, unidentified
  REGION 1..85: note = Description of Unknown:cds_NC_029316.1_cds_YP_009230314.1_61 target sequence
FHVANGGIGTVHDLFPLSENTAVSSYYPFYYRLYFRHEITQIKNLELVVVPSFYTARQLKRYADENGIELPKVIVIHHSVPRGFV

SEQ ID NO: 33941 - protein, 85 aa, unidentified
  REGION 1..85: note = Description of Unknown:cds_NC_029316.1_cds_YP_009230314.1_61 target sequence
NERDGNVMRIREELGLPKDKKIVINVAHDEPRKGLSVIDKIREELHKLGFMIITVNNKRGDKYFLGIDDELLIKLYIASDVYFAP

SEQ ID NO: 33942 - protein, 84 aa, unidentified
  REGION 1..84: note = Description of Unknown:cds_NC_029316.1_cds_YP_009230314.1_61 target sequence
PSIDEGFNIPIIEALANSLPVVARDISAHREIYSFNNGGILLVREEDFVPAIIKASYMKAKLNEYFLEDREREEYKKIYSKLEA

SEQ ID NO: 33943 - protein, 85 aa, unidentified
  REGION 1..85: note = Description of Unknown:cds_NC_029316.1_cds_YP_009230314.1_61 target sequence
SKLVLFRMKPWEEPDGFDEVVQYKYFNKLGIIYDLITKRGKFSKFASKKLLHLVSPDFFHVANGGIGTVHDLFPLSENTAVSSYY

SEQ ID NO: 33944 - protein, 85 aa, unidentified
  REGION 1..85: note = Description of Unknown:cds_NC_029316.1_cds_YP_009230314.1_61 target sequence
PFYYRLYFRHEITQIKNLELVVVPSFYTARQLKRYADENGIELPKVIVIHHSVPRGFVNERDGNVMRIREELGLPKDKKIVINVA

SEQ ID NO: 33945 - protein, 85 aa, unidentified
  REGION 1..85: note = Description of Unknown:cds_NC_029316.1_cds_YP_009230314.1_61 target sequence
HDEPRKGLSVIDKIREELHKLGFMIITVNNKRGDKYFLGIDDELLIKLYIASDVYFAPSIDEGFNIPIIEALANSLPVVARDISA

SEQ ID NO: 33946 - protein, 85 aa, unidentified
  REGION 1..85: note = Description of Unknown:cds_NC_035464.1_cds_YP_009408161.1_15 target sequence
LIRGQIHKLSKWELRDYARTLVPVFESHEVDGTRDMKIVDAVISYAMKGTKPWLRRGSALQGFIGPRMSVLEGYLIFPTSGIEPV

SEQ ID NO: 33947 - protein, 85 aa, unidentified
  REGION 1..85: note = Description of Unknown:cds_NC_035464.1_cds_YP_009408161.1_15 target sequence
TIQSTTLENSYLVLDIVGAGGGGGGGGGGNTTATTPFAQGGGGGGDGGRLIIRTQGPLVSGTQFTAQLGGPGGTGGGTGATGTPG

SEQ ID NO: 33948 - protein, 85 aa, unidentified
  REGION 1..85: note = Description of Unknown:cds_NC_035464.1_cds_YP_009408161.1_15 target sequence
SAPNGATQVVLGNGTLTLSVSGASAPTMPPTAGGQEAGGSGGAGGSAVFTYLPTTPIFSAIQLNPRTSFLSNYSGVLDQGIGGDG

SEQ ID NO: 33949 - protein, 84 aa, unidentified
  REGION 1..84: note = Description of Unknown:cds_NC_035464.1_cds_YP_009408161.1_15 target sequence
VGSEYFTLSNATPIFVSTPQGTRVTGGSPGGTGTSATANVPSGAIPLRGSGAGGGGGQNSSSAPTAGGNGGSGGPGPIIILVIG

SEQ ID NO: 33950 - protein, 85 aa, unidentified
  REGION 1..85: note = Description of Unknown:cds_NC_035464.1_cds_YP_009408161.1_15 target sequence
HEVDGTRDMKIVDAVISYAMKGTKPWLRRGSALQGFIGPRMSVLEGYLIFPTSGIEPVTIQSTTLENSYLVLDIVGAGGGGGGGG

SEQ ID NO: 33951 - protein, 85 aa, unidentified
  REGION 1..85: note = Description of Unknown:cds_NC_035464.1_cds_YP_009408161.1_15 target sequence
GGNTTATTPFAQGGGGGGDGGRLIIRTQGPLVSGTQFTAQLGGPGGTGGGTGATGTPGSAPNGATQVVLGNGTLTLSVSGASAPT

SEQ ID NO: 33952 - protein, 85 aa, unidentified
  REGION 1..85: note = Description of Unknown:cds_NC_035464.1_cds_YP_009408161.1_15 target sequence
MPPTAGGQEAGGSGGAGGSAVFTYLPTTPIFSAIQLNPRTSFLSNYSGVLDQGIGGDGVGSEYFTLSNATPIFVSTPQGTRVTGG

SEQ ID NO: 33953 - protein, 85 aa, unidentified
  REGION 1..85: note = Description of Unknown:cds_NC_038931.1_cds_YP_009509148.1_32 target sequence
DMILGISAYRKETKTGLRNTIYTAINTGKVKKILLGLDKPEDKEIFNDIINEFKDYIIDVVYAEGLGANRNELLVRGSEENEDYI

SEQ ID NO: 33954 - protein, 85 aa, unidentified
  REGION 1..85: note = Description of Unknown:cds_NC_038931.1_cds_YP_009509148.1_32 target sequence
CLADSHLYFITPVADIVKTMCNSQACDFKRFDFGFDVENNPLSVLNRSVHHFGQFNIDRLANNYIFSCEYKYYANNPFLCFKKSA

SEQ ID NO: 33955 - protein, 85 aa, unidentified
  REGION 1..85: note = Description of Unknown:cds_NC_038931.1_cds_YP_009509148.1_32 target sequence
IKELLNIYGGKIIPWQHYGADMEQIYVSIVRRYGRTAGKCIGTSPIYGHRATVSNTEHEFWKSRWTIKDYSEGWYQANACFLALH

SEQ ID NO: 33956 - protein, 84 aa, unidentified
  REGION 1..84: note = Description of Unknown:cds_NC_038931.1_cds_YP_009509148.1_32 target sequence
LHIPRELWNLKPRIFEPDKCKLHINFIKSTLEDSQASSRGTASMIYAVDGIDRNILNYLGKYTADSTGTVSLTNLQPGKYIAIE

SEQ ID NO: 33957 - protein, 85 aa, unidentified
  REGION 1..85: note = Description of Unknown:cds_NC_038931.1_cds_YP_009509148.1_32 target sequence
GKVKKILLGLDKPEDKEIFNDIINEFKDYIIDVVYAEGLGANRNELLVRGSEENEDYICLADSHLYFITPVADIVKTMCNSQACD

SEQ ID NO: 33958 - protein, 85 aa, unidentified
  REGION 1..85: note = Description of Unknown:cds_NC_038931.1_cds_YP_009509148.1_32 target sequence
FKRFDFGFDVENNPLSVLNRSVHHFGQFNIDRLANNYIFSCEYKYYANNPFLCFKKSAIKELLNIYGGKIIPWQHYGADMEQIYV

SEQ ID NO: 33959 - protein, 85 aa, unidentified
  REGION 1..85: note = Description of Unknown:cds_NC_038931.1_cds_YP_009509148.1_32 target sequence
SIVRRYGRTAGKCIGTSPIYGHRATVSNTEHEFWKSRWTIKDYSEGWYQANACFLALHIPRELWNLKPRIFEPDKCKLHINFIKS

SEQ ID NO: 33960 - protein, 85 aa, unidentified
  REGION 1..85: note = Description of Unknown:cds_NZ_WFIY01000004.1_cds_WP_013775867.1_533 target sequence
KAIILENGRPVLKEVPIPKLNPGDVLVKMKACGLCGTDVEKICGQYTASQPILGHEPAGIIAESTVDWLKEGDRVFAHHHVPDYE

SEQ ID NO: 33961 - protein, 85 aa, unidentified
  REGION 1..85: note = Description of Unknown:cds_NZ_WFIY01000004.1_cds_WP_013775867.1_533 target sequence
CYYCKKGSPTMCPYYRKTNLDPGGFAEYFRVPAWNVSRGGILKLPDNVSFEEGSFIEPLATVIRAQRRVFIDKDDYVLVVGAGPM

SEQ ID NO: 33962 - protein, 85 aa, unidentified
  REGION 1..85: note = Description of Unknown:cds_NZ_WFIY01000004.1_cds_WP_013775867.1_533 target sequence
GLLHVMMAKVNGAGKVYVSDISDFRNEYARKVGADEAFNPKVVKVEDEVKKLTDGRGVDVAIIASGAPSAILTALYSVRKGGRVL

SEQ ID NO: 33963 - protein, 84 aa, unidentified
  REGION 1..84: note = Description of Unknown:cds_NZ_WFIY01000004.1_cds_WP_013775867.1_533 target sequence
VLLFGVPYKGTILNYDISNLLNNEISIISSNAAVEEDTREALKVISEKKIDVMKLVTHKFRLEEFNEAVRIAKEGKTIKAIIYD

SEQ ID NO: 33964 - protein, 85 aa, unidentified
  REGION 1..85: note = Description of Unknown:cds_NZ_WFIY01000004.1_cds_WP_013775867.1_533 target sequence
KMKACGLCGTDVEKICGQYTASQPILGHEPAGIIAESTVDWLKEGDRVFAHHHVPDYECYYCKKGSPTMCPYYRKTNLDPGGFAE

SEQ ID NO: 33965 - protein, 85 aa, unidentified
  REGION 1..85: note = Description of Unknown:cds_NZ_WFIY01000004.1_cds_WP_013775867.1_533 target sequence
YFRVPAWNVSRGGILKLPDNVSFEEGSFIEPLATVIRAQRRVFIDKDDYVLVVGAGPMGLLHVMMAKVNGAGKVYVSDISDFRNE

SEQ ID NO: 33966 - protein, 85 aa, unidentified
  REGION 1..85: note = Description of Unknown:cds_NZ_WFIY01000004.1_cds_WP_013775867.1_533 target sequence
YARKVGADEAFNPKVVKVEDEVKKLTDGRGVDVAIIASGAPSAILTALYSVRKGGRVLLFGVPYKGTILNYDISNLLNNEISIIS

SEQ ID NO: 33967 - protein, 85 aa, unidentified
  REGION 1..85: note = Description of Unknown:cds_NZ_WFIY01000004.1_cds_WP_155862912.1_763 target sequence
EYRIALLPGDGIGPEIVANSKKILSKLIESYALNLQITEVEAGDSALAKYGDPLPKQTLDIINKSHIILKGPVGESAMDVVVKLR

SEQ ID NO: 33968 - protein, 85 aa, unidentified
  REGION 1..85: note = Description of Unknown:cds_NZ_WFIY01000004.1_cds_WP_155862912.1_763 target sequence
QMYDMYANIRPAKSLPNVPNKYGNVDILIVRENTEDLYKGFEFMLSDDTSIGIKVITKKASERIVRVALKYALERNKKITCVHKA

SEQ ID NO: 33969 - protein, 85 aa, unidentified
  REGION 1..85: note = Description of Unknown:cds_NZ_WFIY01000004.1_cds_WP_155862912.1_763 target sequence
NVMRITDGLFSRVCREILKGSEVKFEEMYVDAAAANLVRDPSRFDVIVTTNVYGDILSDEAAQIAGSLGLAPSANIGDSKALFEP

SEQ ID NO: 33970 - protein, 84 aa, unidentified
  REGION 1..84: note = Description of Unknown:cds_NZ_WFIY01000004.1_cds_WP_155862912.1_763 target sequence
EPVHGAAFDIAGKNIANPTAFLLSVSMMLDYIYSLSKEIKYKNASNALQNAIYEAYKEGKALTPDIGGSAKLTDFIDAIYSKIA

SEQ ID NO: 33971 - protein, 85 aa, unidentified
  REGION 1..85: note = Description of Unknown:cds_NZ_WFIY01000004.1_cds_WP_155862912.1_763 target sequence
IESYALNLQITEVEAGDSALAKYGDPLPKQTLDIINKSHIILKGPVGESAMDVVVKLRQMYDMYANIRPAKSLPNVPNKYGNVDI

SEQ ID NO: 33972 - protein, 85 aa, unidentified
  REGION 1..85: note = Description of Unknown:cds_NZ_WFIY01000004.1_cds_WP_155862912.1_763 target sequence
LIVRENTEDLYKGFEFMLSDDTSIGIKVITKKASERIVRVALKYALERNKKITCVHKANVMRITDGLFSRVCREILKGSEVKFEE

SEQ ID NO: 33973 - protein, 85 aa, unidentified
  REGION 1..85: note = Description of Unknown:cds_NZ_WFIY01000004.1_cds_WP_155862912.1_763 target sequence
MYVDAAAANLVRDPSRFDVIVTTNVYGDILSDEAAQIAGSLGLAPSANIGDSKALFEPVHGAAFDIAGKNIANPTAFLLSVSMML

SEQ ID NO: 33974 - protein, 85 aa, unidentified
  REGION 1..85: note = Description of Unknown:cds_NZ_WFIY01000004.1_cds_WP_155863044.1_938 target sequence
KVLEFDEKKGTMKVHVEDEDDLWTLHMILNKGDKVIARTSRDVSMGNEGKRVSMIIELQVEYTEFQAFTTRLRIHGIILDAPERY

SEQ ID NO: 33975 - protein, 85 aa, unidentified
  REGION 1..85: note = Description of Unknown:cds_NZ_WFIY01000004.1_cds_WP_155863044.1_938 target sequence
SIKGAHHTINLDIGDEIIIIKEKWNKSVLDRIYKQAEKKNRVLIALVDFDEYLIAIPMIQGIKILAEKSLSTPTKEEGIIEDNAR

SEQ ID NO: 33976 - protein, 85 aa, unidentified
  REGION 1..85: note = Description of Unknown:cds_NZ_WFIY01000004.1_cds_WP_155863044.1_938 target sequence
EVAKEIENYLNSYNNIDAVLIAGPGPFKEIVRKHLNTKVKVYMDSVSSATEAGLNEVLKRDIIDQIMRDYEISQSEKDLDKALML

SEQ ID NO: 33977 - protein, 84 aa, unidentified
  REGION 1..84: note = Description of Unknown:cds_NZ_WFIY01000004.1_cds_WP_155863044.1_938 target sequence
MLLNKDSGLIAYGIDETRKASEYGAVDSLLVIEDMVTENEEVQNIMEEVEKRGGKVHIIPRDSPIYFQVKNFAGILAILRFRIN

SEQ ID NO: 33978 - protein, 85 aa, unidentified
  REGION 1..85: note = Description of Unknown:cds_NZ_WFIY01000004.1_cds_WP_155863044.1_938 target sequence
ILNKGDKVIARTSRDVSMGNEGKRVSMIIELQVEYTEFQAFTTRLRIHGIILDAPERYSIKGAHHTINLDIGDEIIIIKEKWNKS

SEQ ID NO: 33979 - protein, 85 aa, unidentified
  REGION 1..85: note = Description of Unknown:cds_NZ_WFIY01000004.1_cds_WP_155863044.1_938 target sequence
VLDRIYKQAEKKNRVLIALVDFDEYLIAIPMIQGIKILAEKSLSTPTKEEGIIEDNAREVAKEIENYLNSYNNIDAVLIAGPGPF

SEQ ID NO: 33980 - protein, 85 aa, unidentified
  REGION 1..85: note = Description of Unknown:cds_NZ_WFIY01000004.1_cds_WP_155863044.1_938 target sequence
KEIVRKHLNTKVKVYMDSVSSATEAGLNEVLKRDIIDQIMRDYEISQSEKDLDKALMLLNKDSGLIAYGIDETRKASEYGAVDSL

SEQ ID NO: 33981 - protein, 85 aa, unidentified
  REGION 1..85: note = Description of Unknown:cds_NZ_WFIY01000004.1_cds_WP_170283909.1_1595 target sequence
ILNINNLAFSLLKVTIIGSGIAGSSLYYMFKKAGHNVKVIDPRIRRIFPSLIHSLLLVGKDVYLSKLALDFYKEFNVETKEFPSF

SEQ ID NO: 33982 - protein, 85 aa, unidentified
  REGION 1..85: note = Description of Unknown:cds_NZ_WFIY01000004.1_cds_WP_170283909.1_1595 target sequence
TIGKIDEKLIKLWEEYGVKIEEKNIFNSKGIYAVGGDRLVYIKRMIDEVPIIKEKASIVKKGNNAIVKVNDRYIESDIIILAAGP

SEQ ID NO: 33983 - protein, 85 aa, unidentified
  REGION 1..85: note = Description of Unknown:cds_NZ_WFIY01000004.1_cds_WP_170283909.1_1595 target sequence
WNSQIFSVPSKSYYCWASLTLTQDSKLDKMFIYDYELNFYSRPFLGLGIRTAIIGDGEAIEAKPCQRIKVDPEEVMSRARKRVGK

SEQ ID NO: 33984 - protein, 84 aa, unidentified
  REGION 1..84: note = Description of Unknown:cds_NZ_WFIY01000004.1_cds_WP_170283909.1_1595 target sequence
GKLRVIYTSGEFCEGTPDMRPAYGRLLDNLYFIGGFDGYGAEVGPGVARLLFNFITKGEEDKDYIVDRFNGIKDFKIGKEPHEL

SEQ ID NO: 33985 - protein, 85 aa, unidentified
  REGION 1..85: note = Description of Unknown:cds_NZ_WFIY01000004.1_cds_WP_170283909.1_1595 target sequence
YMFKKAGHNVKVIDPRIRRIFPSLIHSLLLVGKDVYLSKLALDFYKEFNVETKEFPSFTIGKIDEKLIKLWEEYGVKIEEKNIFN

SEQ ID NO: 33986 - protein, 85 aa, unidentified
  REGION 1..85: note = Description of Unknown:cds_NZ_WFIY01000004.1_cds_WP_170283909.1_1595 target sequence
SKGIYAVGGDRLVYIKRMIDEVPIIKEKASIVKKGNNAIVKVNDRYIESDIIILAAGPWNSQIFSVPSKSYYCWASLTLTQDSKL

SEQ ID NO: 33987 - protein, 85 aa, unidentified
  REGION 1..85: note = Description of Unknown:cds_NZ_WFIY01000004.1_cds_WP_170283909.1_1595 target sequence
DKMFIYDYELNFYSRPFLGLGIRTAIIGDGEAIEAKPCQRIKVDPEEVMSRARKRVGKLRVIYTSGEFCEGTPDMRPAYGRLLDN

SEQ ID NO: 33988 - protein, 85 aa, unidentified
  REGION 1..85: note = Description of Unknown:cds_NZ_WFIY01000004.1_cds_1814 target sequence
LGVDVIEAGFPASSEGDFIATKKILEEVGDKTEVIGLARANRNDIDKVIEAGLSSIHVFIATSEIHMKYKLKMTREEVLDRIYES

SEQ ID NO: 33989 - protein, 85 aa, unidentified
  REGION 1..85: note = Description of Unknown:cds_NZ_WFIY01000004.1_cds_1814 target sequence
VSYAKSHGLIVEFSPEDATRSDEDFLLTAIKTAIQAGADRINIPDTVGVMTPFTFYDLIKKVVNVVGDKIVSVHCHNDFGLATAN

SEQ ID NO: 33990 - protein, 85 aa, unidentified
  REGION 1..85: note = Description of Unknown:cds_NZ_WFIY01000004.1_cds_1814 target sequence
SIAGVAAGARQVHVTVNGIGERAGNASLEEVVMALKKLMHYDLNIKTWLLYETSKLVSELSGIPIPYFKAIVGENAFGHEAGIHV

SEQ ID NO: 33991 - protein, 84 aa, unidentified
  REGION 1..84: note = Description of Unknown:cds_NZ_WFIY01000004.1_cds_1814 target sequence
VHGVIENPATYEPISPEEVGNFRRLALGKHSGIHGLKKILEDQGIHLDDNKLRIVLMEIKKKAESGEKISAEDARNIAIKLLNS

SEQ ID NO: 33992 - protein, 85 aa, unidentified
  REGION 1..85: note = Description of Unknown:cds_NZ_WFIY01000004.1_cds_1814 target sequence
VGDKTEVIGLARANRNDIDKVIEAGLSSIHVFIATSEIHMKYKLKMTREEVLDRIYESVSYAKSHGLIVEFSPEDATRSDEDFLL

SEQ ID NO: 33993 - protein, 85 aa, unidentified
  REGION 1..85: note = Description of Unknown:cds_NZ_WFIY01000004.1_cds_1814 target sequence
TAIKTAIQAGADRINIPDTVGVMTPFTFYDLIKKVVNVVGDKIVSVHCHNDFGLATANSIAGVAAGARQVHVTVNGIGERAGNAS

SEQ ID NO: 33994 - protein, 85 aa, unidentified
  REGION 1..85: note = Description of Unknown:cds_NZ_WFIY01000004.1_cds_1814 target sequence
LEEVVMALKKLMHYDLNIKTWLLYETSKLVSELSGIPIPYFKAIVGENAFGHEAGIHVHGVIENPATYEPISPEEVGNFRRLALG

SEQ ID NO: 33995 - protein, 85 aa, unidentified
  REGION 1..85: note = Description of Unknown:cds_NC_009884.1_cds_YP_001496960.1_35 target sequence
DLDWLMKCKCKKMLKRLTVKVSGYVVAKITKKGSEETKLKPLVMGKHNQILNLQSLLNAFVGNSSGVTTSSYGEGITLLGANGES

SEQ ID NO: 33996 - protein, 85 aa, unidentified
  REGION 1..85: note = Description of Unknown:cds_NC_009884.1_cds_YP_001496960.1_35 target sequence
VAELAFLTVTPQPTAGGGEVIFTGLDISNSAYTTTQQVLTTESSGYDIEIATADLSFTKNSDEQLYMTWVISFTVTSNPDNVTIV

SEQ ID NO: 33997 - protein, 85 aa, unidentified
  REGION 1..85: note = Description of Unknown:cds_NC_009884.1_cds_YP_001496960.1_35 target sequence
PSLNMSFTVPPNGYYSAPSLCQYTPDNGNLKAQSATGQSSPTTSNPSGYELTTLVTSLLFTWLIYSSSPGASLEYLAFVGTNSLA

SEQ ID NO: 33998 - protein, 84 aa, unidentified
  REGION 1..84: note = Description of Unknown:cds_NC_009884.1_cds_YP_001496960.1_35 target sequence
LALAVETNTMGSVSGVQYTATTIGPNNFVTGNYIFVESSNNWTVYTRVSPNANDSTISPVFVNAVYSGLFSECTFQGIVIQFTT

SEQ ID NO: 33999 - protein, 85 aa, unidentified
  REGION 1..85: note = Description of Unknown:cds_NC_009884.1_cds_YP_001496960.1_35 target sequence
KITKKGSEETKLKPLVMGKHNQILNLQSLLNAFVGNSSGVTTSSYGEGITLLGANGESVAELAFLTVTPQPTAGGGEVIFTGLDI

SEQ ID NO: 34000 - protein, 85 aa, unidentified
  REGION 1..85: note = Description of Unknown:cds_NC_009884.1_cds_YP_001496960.1_35 target sequence
SNSAYTTTQQVLTTESSGYDIEIATADLSFTKNSDEQLYMTWVISFTVTSNPDNVTIVPSLNMSFTVPPNGYYSAPSLCQYTPDN

SEQ ID NO: 34001 - protein, 85 aa, unidentified
  REGION 1..85: note = Description of Unknown:cds_NC_009884.1_cds_YP_001496960.1_35 target sequence
GNLKAQSATGQSSPTTSNPSGYELTTLVTSLLFTWLIYSSSPGASLEYLAFVGTNSLALAVETNTMGSVSGVQYTATTIGPNNFV

SEQ ID NO: 34002 - protein, 85 aa, unidentified
  REGION 1..85: note = Description of Unknown:cds_NZ_WFIY01000004.1_cds_WP_155862293.1_6 target sequence
EFGEAIKSLFSLLSSLDQPYLGVSPTSNIEDSTPVEVEDELGECESLTTFSFLDSSSRMMNVKGANIYFASLYADLINEKLMIPI

SEQ ID NO: 34003 - protein, 85 aa, unidentified
  REGION 1..85: note = Description of Unknown:cds_NZ_WFIY01000004.1_cds_WP_155862293.1_6 target sequence
KIEVPFMAIKASDEVRKLIEGDPTLSKIIALNNVNGEPYSPDYKDDNILDELRISLENYAIEKSAYVTIVDGPIIPGPYIQMVGE

SEQ ID NO: 34004 - protein, 85 aa, unidentified
  REGION 1..85: note = Description of Unknown:cds_NZ_WFIY01000004.1_cds_WP_155862293.1_6 target sequence
PYKSAFIKLANQRKKDNLIGIVKRLNYSRKLRRSGLVNDSKLSNATDDVIVEYLGRGKDFYTTPILKEEVDIGGKKYIRYMVYVK

SEQ ID NO: 34005 - protein, 84 aa, unidentified
  REGION 1..84: note = Description of Unknown:cds_NZ_WFIY01000004.1_cds_WP_155862293.1_6 target sequence
YVKVREGVFRVESLDKDLLCKGVYTARKYSSYRGIPEFIEVADKMAKRLSASAFILAFNIARVTTGVNYEDWENLRIAELDSGE

SEQ ID NO: 34006 - protein, 85 aa, unidentified
  REGION 1..85: note = Description of Unknown:cds_NZ_WFIY01000004.1_cds_WP_155862293.1_6 target sequence
NIEDSTPVEVEDELGECESLTTFSFLDSSSRMMNVKGANIYFASLYADLINEKLMIPIKIEVPFMAIKASDEVRKLIEGDPTLSK

SEQ ID NO: 34007 - protein, 85 aa, unidentified
  REGION 1..85: note = Description of Unknown:cds_NZ_WFIY01000004.1_cds_WP_155862293.1_6 target sequence
IIALNNVNGEPYSPDYKDDNILDELRISLENYAIEKSAYVTIVDGPIIPGPYIQMVGEPYKSAFIKLANQRKKDNLIGIVKRLNY

SEQ ID NO: 34008 - protein, 85 aa, unidentified
  REGION 1..85: note = Description of Unknown:cds_NZ_WFIY01000004.1_cds_WP_155862293.1_6 target sequence
SRKLRRSGLVNDSKLSNATDDVIVEYLGRGKDFYTTPILKEEVDIGGKKYIRYMVYVKVREGVFRVESLDKDLLCKGVYTARKYS

SEQ ID NO: 34009 - protein, 85 aa, unidentified
  REGION 1..85: note = Description of Unknown:cds_NZ_WFIY01000004.1_cds_WP_155862405.1_142 target sequence
RQVCMRCGKEREGLELRCKRCGGPFKVEIEDLPFSKNLRDNFPYIKSWISLGEWNTPMIKNGDMYFKLDFLNPTGSYKDRGSVTL

SEQ ID NO: 34010 - protein, 85 aa, unidentified
  REGION 1..85: note = Description of Unknown:cds_NZ_WFIY01000004.1_cds_WP_155862405.1_142 target sequence
ISYLAENGIKAISEDSSGNAGASIAAYGSAAGMLVKIFVPSTARGNKLKQIESYGAEVVKVEGSREEVAKAAENSPYYYASHVLQ

SEQ ID NO: 34011 - protein, 85 aa, unidentified
  REGION 1..85: note = Description of Unknown:cds_NZ_WFIY01000004.1_cds_WP_155862405.1_142 target sequence
PQFRDGIRSLAYEIVRDLGWRAPDNVFLPTSAGTLLLGVLEGFRHMFNQGIIAKIPNIIAVQTEQVMPLCSKVKGIKYTPPEKVT

SEQ ID NO: 34012 - protein, 84 aa, unidentified
  REGION 1..84: note = Description of Unknown:cds_NZ_WFIY01000004.1_cds_WP_155862405.1_142 target sequence
KVTSIADALVSTNPFLLPEMTEVIRNYGDCIVVNDEEILDSWKELARKGLLVEYSSATVYSAYKKSKPEGISVLVLTGNGLKVL

SEQ ID NO: 34013 - protein, 85 aa, unidentified
  REGION 1..85: note = Description of Unknown:cds_NZ_WFIY01000004.1_cds_WP_155862405.1_142 target sequence
EIEDLPFSKNLRDNFPYIKSWISLGEWNTPMIKNGDMYFKLDFLNPTGSYKDRGSVTLISYLAENGIKAISEDSSGNAGASIAAY

SEQ ID NO: 34014 - protein, 85 aa, unidentified
  REGION 1..85: note = Description of Unknown:cds_NZ_WFIY01000004.1_cds_WP_155862405.1_142 target sequence
GSAAGMLVKIFVPSTARGNKLKQIESYGAEVVKVEGSREEVAKAAENSPYYYASHVLQPQFRDGIRSLAYEIVRDLGWRAPDNVF

SEQ ID NO: 34015 - protein, 85 aa, unidentified
  REGION 1..85: note = Description of Unknown:cds_NZ_WFIY01000004.1_cds_WP_155862405.1_142 target sequence
LPTSAGTLLLGVLEGFRHMFNQGIIAKIPNIIAVQTEQVMPLCSKVKGIKYTPPEKVTSIADALVSTNPFLLPEMTEVIRNYGDC

SEQ ID NO: 34016 - protein, 85 aa, unidentified
  REGION 1..85: note = Description of Unknown:cds_NZ_WFIY01000004.1_cds_WP_155862972.1_842 target sequence
LNILVGGFYGDEGKGKISSYLSLKDSPDIAVRTGSINAGHTVCYNNNKWKIRIIPSAFVNKSTKLMLGPGALTSITELIKELKET

SEQ ID NO: 34017 - protein, 85 aa, unidentified
  REGION 1..85: note = Description of Unknown:cds_NZ_WFIY01000004.1_cds_WP_155862972.1_842 target sequence
NSEDRFFMDYHVGIITEKEIYEERNDENLMKSVGSTGQGVGYAEAKRILRILKLAKDYPELSKYTIDVPNTLIEEIEKGSEILAE

SEQ ID NO: 34018 - protein, 85 aa, unidentified
  REGION 1..85: note = Description of Unknown:cds_NZ_WFIY01000004.1_cds_WP_155862972.1_842 target sequence
GTQGTYLSLYHGEYPYVTSRNTTSSGILSEIGIGPKYVKDIIIVFKSFVTRVGNGPLEGELSEEEAEKLGLIEIATVTGRKRRVA

SEQ ID NO: 34019 - protein, 84 aa, unidentified
  REGION 1..84: note = Description of Unknown:cds_NZ_WFIY01000004.1_cds_WP_155862972.1_842 target sequence
RVAPFNIKLAKKAIQLNTATQIAITKLDALFKGAYKVREYEKLPNEAKKWIEDLEDQLKVPITLIGTGEDAMDTIDLRKEKLGE

SEQ ID NO: 34020 - protein, 85 aa, unidentified
  REGION 1..85: note = Description of Unknown:cds_NZ_WFIY01000004.1_cds_WP_155862972.1_842 target sequence
DIAVRTGSINAGHTVCYNNNKWKIRIIPSAFVNKSTKLMLGPGALTSITELIKELKETNSEDRFFMDYHVGIITEKEIYEERNDE

SEQ ID NO: 34021 - protein, 85 aa, unidentified
  REGION 1..85: note = Description of Unknown:cds_NZ_WFIY01000004.1_cds_WP_155862972.1_842 target sequence
NLMKSVGSTGQGVGYAEAKRILRILKLAKDYPELSKYTIDVPNTLIEEIEKGSEILAEGTQGTYLSLYHGEYPYVTSRNTTSSGI

SEQ ID NO: 34022 - protein, 85 aa, unidentified
  REGION 1..85: note = Description of Unknown:cds_NZ_WFIY01000004.1_cds_WP_155862972.1_842 target sequence
LSEIGIGPKYVKDIIIVFKSFVTRVGNGPLEGELSEEEAEKLGLIEIATVTGRKRRVAPFNIKLAKKAIQLNTATQIAITKLDAL

SEQ ID NO: 34023 - protein, 85 aa, unidentified
  REGION 1..85: note = Description of Unknown:cds_NZ_WFIY01000004.1_cds_WP_155863075.1_987 target sequence
ASFPIVRPRRLRKNKLIRDMIAETSLTEKNLILPIFIKEGILEEEEIKSMPGVFRYPPNDKLIKFVESSYDNGIRNVILFGIPKY

SEQ ID NO: 34024 - protein, 85 aa, unidentified
  REGION 1..85: note = Description of Unknown:cds_NZ_WFIY01000004.1_cds_WP_155863075.1_987 target sequence
KDDIASSAYDKNGVIQTSVRLLKDTFGDKLIVITDECTDEYTSHGHCGIVKYNSKGEYLVDNDESLKIHAKIALSQAEAGADIIA

SEQ ID NO: 34025 - protein, 85 aa, unidentified
  REGION 1..85: note = Description of Unknown:cds_NZ_WFIY01000004.1_cds_WP_155863075.1_987 target sequence
PSSMMDGVVGAIRKVLDENGYTDTLIMSYSVKYASTFYSPFRDAAYSKPAFGDRKSYQMDPRNAYEALKEAKLDIEEGADILMVK

SEQ ID NO: 34026 - protein, 84 aa, unidentified
  REGION 1..84: note = Description of Unknown:cds_NZ_WFIY01000004.1_cds_WP_155863075.1_987 target sequence
MVKPAHTYLDVIRLVKDNFPDYPLAAYHVSGEYSMIKAAALNGWIDERIAVLEITTAIRRAGADLILTYYANDIAKWLKEGLPF

SEQ ID NO: 34027 - protein, 85 aa, unidentified
  REGION 1..85: note = Description of Unknown:cds_NZ_WFIY01000004.1_cds_WP_155863075.1_987 target sequence
EKNLILPIFIKEGILEEEEIKSMPGVFRYPPNDKLIKFVESSYDNGIRNVILFGIPKYKDDIASSAYDKNGVIQTSVRLLKDTFG

SEQ ID NO: 34028 - protein, 85 aa, unidentified
  REGION 1..85: note = Description of Unknown:cds_NZ_WFIY01000004.1_cds_WP_155863075.1_987 target sequence
DKLIVITDECTDEYTSHGHCGIVKYNSKGEYLVDNDESLKIHAKIALSQAEAGADIIAPSSMMDGVVGAIRKVLDENGYTDTLIM

SEQ ID NO: 34029 - protein, 85 aa, unidentified
  REGION 1..85: note = Description of Unknown:cds_NZ_WFIY01000004.1_cds_WP_155863075.1_987 target sequence
SYSVKYASTFYSPFRDAAYSKPAFGDRKSYQMDPRNAYEALKEAKLDIEEGADILMVKPAHTYLDVIRLVKDNFPDYPLAAYHVS

SEQ ID NO: 34030 - protein, 85 aa, unidentified
  REGION 1..85: note = Description of Unknown:cds_NZ_WFIY01000004.1_cds_WP_155864058.1_1995 target sequence
DRLYKYLMNLKIVGLAIVILVVIGGIAVYEVMKKTTTANETYPTTSGTSSVKLRIVSLTPSDTQDLIALGLGKYIVGLDRYSYTI

SEQ ID NO: 34031 - protein, 85 aa, unidentified
  REGION 1..85: note = Description of Unknown:cds_NZ_WFIY01000004.1_cds_WP_155864058.1_1995 target sequence
LQLVNKTSCIPSNVTVFPQIYPVNISGLIELNPTVIVGEKDLLYECINSLQKAGLKTYLTNADYASNFYQIESCICSLGKYFNET

SEQ ID NO: 34032 - protein, 85 aa, unidentified
  REGION 1..85: note = Description of Unknown:cds_NZ_WFIY01000004.1_cds_WP_155864058.1_1995 target sequence
NASKELVNWMNSKLQEFSSSGNKTVAYIDWICPNYYFWTAGGNVFINSLIQLGGGINAFGECVNYEELCPGKLIEANPDILVVNV

SEQ ID NO: 34033 - protein, 84 aa, unidentified
  REGION 1..84: note = Description of Unknown:cds_NZ_WFIY01000004.1_cds_WP_155864058.1_1995 target sequence
VNVVYNISYTKYLLSHIPGIQNVTAYKDGNIYFLCCYSSYLTNEPGPLAVYAVLLFHDIINGTAPHQITWSWIYNCIKPELPVF

SEQ ID NO: 34034 - protein, 85 aa, unidentified
  REGION 1..85: note = Description of Unknown:cds_NZ_WFIY01000004.1_cds_WP_155864058.1_1995 target sequence
VYEVMKKTTTANETYPTTSGTSSVKLRIVSLTPSDTQDLIALGLGKYIVGLDRYSYTILQLVNKTSCIPSNVTVFPQIYPVNISG

SEQ ID NO: 34035 - protein, 85 aa, unidentified
  REGION 1..85: note = Description of Unknown:cds_NZ_WFIY01000004.1_cds_WP_155864058.1_1995 target sequence
LIELNPTVIVGEKDLLYECINSLQKAGLKTYLTNADYASNFYQIESCICSLGKYFNETNASKELVNWMNSKLQEFSSSGNKTVAY

SEQ ID NO: 34036 - protein, 85 aa, unidentified
  REGION 1..85: note = Description of Unknown:cds_NZ_WFIY01000004.1_cds_WP_155864058.1_1995 target sequence
IDWICPNYYFWTAGGNVFINSLIQLGGGINAFGECVNYEELCPGKLIEANPDILVVNVVYNISYTKYLLSHIPGIQNVTAYKDGN

SEQ ID NO: 34037 - protein, 85 aa, unidentified
  REGION 1..85: note = Description of Unknown:cds_NZ_WFIY01000004.1_cds_WP_155864314.1_2311 target sequence
LISVIIIAYNRRNFLLKAVKSVANQTLDKNLYEVIVVKNFEDMTIDDIINKLGYKNIVYDTPLYGERLAIGVEESSGDILAFLED

SEQ ID NO: 34038 - protein, 85 aa, unidentified
  REGION 1..85: note = Description of Unknown:cds_NZ_WFIY01000004.1_cds_WP_155864314.1_2311 target sequence
DDEFKPEKLARVYEVFTSHKDVSYFHDTRDYLYEVDDPRIKDIVRFLEKITPHENIIIDPFDKRSKHFLLKYYGAIATTSLMATR

SEQ ID NO: 34039 - protein, 85 aa, unidentified
  REGION 1..85: note = Description of Unknown:cds_NZ_WFIY01000004.1_cds_WP_155864314.1_2311 target sequence
RECIGDKLDLLKRIEISVEFFIPAFSAECGKLYHTGERLTRYRIHQKNSSIRFTSEDELRVSNTYFRYIKDLELIISNISWKNQL

SEQ ID NO: 34040 - protein, 84 aa, unidentified
  REGION 1..84: note = Description of Unknown:cds_NZ_WFIY01000004.1_cds_WP_155864314.1_2311 target sequence
NQLRDVLKMLLLNNKIALYNSPKEIKEKLGYKQNVFGAIKDLSEWLLITHDLHGYFNLLLHTGYNSIPSKRVKMFIRKLVKGHD

SEQ ID NO: 34041 - protein, 85 aa, unidentified
  REGION 1..85: note = Description of Unknown:cds_NZ_WFIY01000004.1_cds_WP_155864314.1_2311 target sequence
DKNLYEVIVVKNFEDMTIDDIINKLGYKNIVYDTPLYGERLAIGVEESSGDILAFLEDDDEFKPEKLARVYEVFTSHKDVSYFHD

SEQ ID NO: 34042 - protein, 85 aa, unidentified
  REGION 1..85: note = Description of Unknown:cds_NZ_WFIY01000004.1_cds_WP_155864314.1_2311 target sequence
TRDYLYEVDDPRIKDIVRFLEKITPHENIIIDPFDKRSKHFLLKYYGAIATTSLMATRRECIGDKLDLLKRIEISVEFFIPAFSA

SEQ ID NO: 34043 - protein, 85 aa, unidentified
  REGION 1..85: note = Description of Unknown:cds_NZ_WFIY01000004.1_cds_WP_155864314.1_2311 target sequence
ECGKLYHTGERLTRYRIHQKNSSIRFTSEDELRVSNTYFRYIKDLELIISNISWKNQLRDVLKMLLLNNKIALYNSPKEIKEKLG

SEQ ID NO: 34044 - protein, 85 aa, unidentified
  REGION 1..85: note = Description of Unknown:cds_NC_035460.1_cds_YP_009408029.1_78 target sequence
DMISKTIDNIPIIILPIVDRAAEDVVVDPAFHNTESGALINTISKTENAGDIIKCFDTEKKLSSSVTTNINSIYKFFEWQRVSKT

SEQ ID NO: 34045 - protein, 85 aa, unidentified
  REGION 1..85: note = Description of Unknown:cds_NC_035460.1_cds_YP_009408029.1_78 target sequence
SVEGFTKFFSPFCNSICTSEAKLSMANHFSLWDDLASTNSMKTVHHDKYVVVVENDISMLNVPILYTLIESMKNHNIDILQLREA

SEQ ID NO: 34046 - protein, 85 aa, unidentified
  REGION 1..85: note = Description of Unknown:cds_NC_035460.1_cds_YP_009408029.1_78 target sequence
LYSGGNRDILSSEPALYSYKGAYDISLSCYIIKIATMLKYIEEIKKIGGISTGLYFEMSKIEQDVEINRHILNDASEYVKHEPRF

SEQ ID NO: 34047 - protein, 84 aa, unidentified
  REGION 1..84: note = Description of Unknown:cds_NC_035460.1_cds_YP_009408029.1_78 target sequence
PRFLSNKRISNMRNGLWNRVGNWLSKRFPDITYLLTMPLFSFFNLFDVTLLGVLIIIYIFILIIFNVSSKLMWFSAGTAFTYVI

SEQ ID NO: 34048 - protein, 85 aa, unidentified
  REGION 1..85: note = Description of Unknown:cds_NC_035460.1_cds_YP_009408029.1_78 target sequence
DPAFHNTESGALINTISKTENAGDIIKCFDTEKKLSSSVTTNINSIYKFFEWQRVSKTSVEGFTKFFSPFCNSICTSEAKLSMAN

SEQ ID NO: 34049 - protein, 85 aa, unidentified
  REGION 1..85: note = Description of Unknown:cds_NC_035460.1_cds_YP_009408029.1_78 target sequence
HFSLWDDLASTNSMKTVHHDKYVVVVENDISMLNVPILYTLIESMKNHNIDILQLREALYSGGNRDILSSEPALYSYKGAYDISL

SEQ ID NO: 34050 - protein, 85 aa, unidentified
  REGION 1..85: note = Description of Unknown:cds_NC_035460.1_cds_YP_009408029.1_78 target sequence
SCYIIKIATMLKYIEEIKKIGGISTGLYFEMSKIEQDVEINRHILNDASEYVKHEPRFLSNKRISNMRNGLWNRVGNWLSKRFPD

SEQ ID NO: 34051 - protein, 85 aa, unidentified
  REGION 1..85: note = Description of Unknown:cds_NC_030656.1_cds_YP_009268779.1_64 target sequence
GGGITLPERTPPPPVPTGESKLKVTDVLMAIPNLKIGDFLRIGNKENSPNVTAMLPEFALHDVGIGTLSEITRIKYNASNQFCCS

SEQ ID NO: 34052 - protein, 85 aa, unidentified
  REGION 1..85: note = Description of Unknown:cds_NC_030656.1_cds_YP_009268779.1_64 target sequence
SFKNKYYWLLPDKSISLNYKDNAVLYTCDPDTFDKGNCDMFLFNLCKTTTDNSDLCSQWIVESFNRHELPSRISITSFDKLKKML

SEQ ID NO: 34053 - protein, 85 aa, unidentified
  REGION 1..85: note = Description of Unknown:cds_NC_030656.1_cds_YP_009268779.1_64 target sequence
IDSCSKDATTQLCKSWLQALRNHRSEANDLLVDQILLSQSVDFKQKYMKCSFPSIETEEKALKINEPRECWDPECAQGEIHYMLT

SEQ ID NO: 34054 - protein, 84 aa, unidentified
  REGION 1..84: note = Description of Unknown:cds_NC_030656.1_cds_YP_009268779.1_64 target sequence
MLTKNFNNLGLCQLTRCNISINQLSMDDNSKLRMACKTNSENFSSAPVNQAEVIYKNVQDSFSINFELMIVMFFLIICITIVMF

SEQ ID NO: 34055 - protein, 85 aa, unidentified
  REGION 1..85: note = Description of Unknown:cds_NC_030656.1_cds_YP_009268779.1_64 target sequence
LMAIPNLKIGDFLRIGNKENSPNVTAMLPEFALHDVGIGTLSEITRIKYNASNQFCCSSFKNKYYWLLPDKSISLNYKDNAVLYT

SEQ ID NO: 34056 - protein, 85 aa, unidentified
  REGION 1..85: note = Description of Unknown:cds_NC_030656.1_cds_YP_009268779.1_64 target sequence
CDPDTFDKGNCDMFLFNLCKTTTDNSDLCSQWIVESFNRHELPSRISITSFDKLKKMLIDSCSKDATTQLCKSWLQALRNHRSEA

SEQ ID NO: 34057 - protein, 85 aa, unidentified
  REGION 1..85: note = Description of Unknown:cds_NC_030656.1_cds_YP_009268779.1_64 target sequence
NDLLVDQILLSQSVDFKQKYMKCSFPSIETEEKALKINEPRECWDPECAQGEIHYMLTKNFNNLGLCQLTRCNISINQLSMDDNS

SEQ ID NO: 34058 - protein, 85 aa, unidentified
  REGION 1..85: note = Description of Unknown:cds_NZ_WFIY01000004.1_cds_WP_155862645.1_428 target sequence
RLYELSFNEIEEFFYKLAEVRDIIKDSGLMSFLPEKELPEIATGTARVKHAFPIFQKGGVIMDVTNVEQAGIAEDAGATSVMVLD

SEQ ID NO: 34059 - protein, 85 aa, unidentified
  REGION 1..85: note = Description of Unknown:cds_NZ_WFIY01000004.1_cds_WP_155862645.1_428 target sequence
KLPYDVRKSGGVARMADPKIIEEVMNSITIPVMAKVRIGHYYEAKLLEALGVDTIDESEVLTPADEEHHINKWEFKVPFVNGARN

SEQ ID NO: 34060 - protein, 85 aa, unidentified
  REGION 1..85: note = Description of Unknown:cds_NZ_WFIY01000004.1_cds_WP_155862645.1_428 target sequence
LGEALRRISEGASMIRTKGEAGTGNVSEAVKHMKIINAEIGALVGMSEEDRVKKAREYQVPYQLVELTAKIKRLPVVNFAAGGIA

SEQ ID NO: 34061 - protein, 84 aa, unidentified
  REGION 1..84: note = Description of Unknown:cds_NZ_WFIY01000004.1_cds_WP_155862645.1_428 target sequence
GGIATPADAALMMWLGGDGVFVGSGIFKSQDPAERARAIVLAVAGWEYPEVVLEAQKMISEQKSMMGIDIKSLKPEELLQVRGQ

SEQ ID NO: 34062 - protein, 85 aa, unidentified
  REGION 1..85: note = Description of Unknown:cds_NZ_WFIY01000004.1_cds_WP_155862645.1_428 target sequence
GLMSFLPEKELPEIATGTARVKHAFPIFQKGGVIMDVTNVEQAGIAEDAGATSVMVLDKLPYDVRKSGGVARMADPKIIEEVMNS

SEQ ID NO: 34063 - protein, 85 aa, unidentified
  REGION 1..85: note = Description of Unknown:cds_NZ_WFIY01000004.1_cds_WP_155862645.1_428 target sequence
ITIPVMAKVRIGHYYEAKLLEALGVDTIDESEVLTPADEEHHINKWEFKVPFVNGARNLGEALRRISEGASMIRTKGEAGTGNVS

SEQ ID NO: 34064 - protein, 85 aa, unidentified
  REGION 1..85: note = Description of Unknown:cds_NZ_WFIY01000004.1_cds_WP_155862645.1_428 target sequence
EAVKHMKIINAEIGALVGMSEEDRVKKAREYQVPYQLVELTAKIKRLPVVNFAAGGIATPADAALMMWLGGDGVFVGSGIFKSQD

SEQ ID NO: 34065 - protein, 85 aa, unidentified
  REGION 1..85: note = Description of Unknown:cds_NC_024711.1_cds_YP_009052558.1_83 target sequence
ELKDKRYNDIRLIFHEEEHKYNDSLGNDYISTTTILHGYQPKFDKNYWLRKKSKELGISEKKLEEQWLTITKEACERGTNTHNGL

SEQ ID NO: 34066 - protein, 85 aa, unidentified
  REGION 1..85: note = Description of Unknown:cds_NC_024711.1_cds_YP_009052558.1_83 target sequence
EDGVKGASMFQQAINYLDKREDGVMVTIADIPNFGANYKLLNLKDFIELTNNRYPLIYDAFKMYTERGYKIYSEIGMFLIDWLIS

SEQ ID NO: 34067 - protein, 85 aa, unidentified
  REGION 1..85: note = Description of Unknown:cds_NC_024711.1_cds_YP_009052558.1_83 target sequence
GTIDILLVNEDTNCAVVGDWKTNRGGLRFSSGYYKKDKTVKPAQQTNVWVDKDERLLAPLNHLPNCNGAIYNLQLSMYAFAVEYI

SEQ ID NO: 34068 - protein, 84 aa, unidentified
  REGION 1..84: note = Description of Unknown:cds_NC_024711.1_cds_YP_009052558.1_83 target sequence
AVEYILGLTIKGIWLCHIDSDFELNEYGMPKRFSDGLYHIKENPVETTKFFTMNYLRDDINKVLKDRELQIKASGVQSQFKLAI

SEQ ID NO: 34069 - protein, 85 aa, unidentified
  REGION 1..85: note = Description of Unknown:cds_NC_024711.1_cds_YP_009052558.1_83 target sequence
DYISTTTILHGYQPKFDKNYWLRKKSKELGISEKKLEEQWLTITKEACERGTNTHNGLEDGVKGASMFQQAINYLDKREDGVMVT

SEQ ID NO: 34070 - protein, 85 aa, unidentified
  REGION 1..85: note = Description of Unknown:cds_NC_024711.1_cds_YP_009052558.1_83 target sequence
IADIPNFGANYKLLNLKDFIELTNNRYPLIYDAFKMYTERGYKIYSEIGMFLIDWLISGTIDILLVNEDTNCAVVGDWKTNRGGL

SEQ ID NO: 34071 - protein, 85 aa, unidentified
  REGION 1..85: note = Description of Unknown:cds_NC_024711.1_cds_YP_009052558.1_83 target sequence
RFSSGYYKKDKTVKPAQQTNVWVDKDERLLAPLNHLPNCNGAIYNLQLSMYAFAVEYILGLTIKGIWLCHIDSDFELNEYGMPKR

SEQ ID NO: 34072 - protein, 85 aa, unidentified
  REGION 1..85: note = Description of Unknown:cds_NZ_WFIY01000004.1_cds_WP_155862387.1_124 target sequence
KLYEYEGKLLFSKVGIKIPRGIVTEGNIDWKGKAVVKAQLLEGGRGKRGLVKVTDDVNSTIQEMRKLGINKFLVEEYIPHDREVY

SEQ ID NO: 34073 - protein, 85 aa, unidentified
  REGION 1..85: note = Description of Unknown:cds_NZ_WFIY01000004.1_cds_WP_155862387.1_124 target sequence
LSMILDRDSAEPMLIASPHGGIDIESSGNVKKFIIPIERGPRGYDIIEIEKYLGVKGLSQVIQGLYKIFTEFDAELVEINPLAVT

SEQ ID NO: 34074 - protein, 85 aa, unidentified
  REGION 1..85: note = Description of Unknown:cds_NZ_WFIY01000004.1_cds_WP_155862387.1_124 target sequence
DNGVIALDSKVILEDNALYKHQDFLKEIGREYSPDSYVELDGDIGIIGNGAGLTMATMDMVKLMGGNPADFMDVGGGADRERVRY

SEQ ID NO: 34075 - protein, 84 aa, unidentified
  REGION 1..84: note = Description of Unknown:cds_NZ_WFIY01000004.1_cds_WP_155862387.1_124 target sequence
ERVRYCVIKVGSNPKVKKILVNIYGGITRCDEVALGIVEAYDVIKKPIFVRLVGTNEEEGWKILKEHGINFYENPIDAVRDALR

SEQ ID NO: 34076 - protein, 85 aa, unidentified
  REGION 1..85: note = Description of Unknown:cds_NZ_WFIY01000004.1_cds_WP_155862387.1_124 target sequence
IDWKGKAVVKAQLLEGGRGKRGLVKVTDDVNSTIQEMRKLGINKFLVEEYIPHDREVYLSMILDRDSAEPMLIASPHGGIDIESS

SEQ ID NO: 34077 - protein, 85 aa, unidentified
  REGION 1..85: note = Description of Unknown:cds_NZ_WFIY01000004.1_cds_WP_155862387.1_124 target sequence
GNVKKFIIPIERGPRGYDIIEIEKYLGVKGLSQVIQGLYKIFTEFDAELVEINPLAVTDNGVIALDSKVILEDNALYKHQDFLKE

SEQ ID NO: 34078 - protein, 85 aa, unidentified
  REGION 1..85: note = Description of Unknown:cds_NZ_WFIY01000004.1_cds_WP_155862387.1_124 target sequence
IGREYSPDSYVELDGDIGIIGNGAGLTMATMDMVKLMGGNPADFMDVGGGADRERVRYCVIKVGSNPKVKKILVNIYGGITRCDE

SEQ ID NO: 34079 - protein, 85 aa, unidentified
  REGION 1..85: note = Description of Unknown:cds_NZ_WFIY01000004.1_cds_WP_155862677.1_473 target sequence
PSSITRKIQLTGGSTYIISLPKSWVKQLSLNPGDEIEIFQDNNLRLILSPKAREGENRVTKAIINCENATPSFAVREFIAYYMAG

SEQ ID NO: 34080 - protein, 85 aa, unidentified
  REGION 1..85: note = Description of Unknown:cds_NZ_WFIY01000004.1_cds_WP_155862677.1_473 target sequence
YDTVSFVCSRLKAEDRTIIKDMIRKRLLGSEVIEEDSNAITVQFLVNEKDLPISKAITRAASIAQNMVKDSIEALKSKDEDIAKE

SEQ ID NO: 34081 - protein, 85 aa, unidentified
  REGION 1..85: note = Description of Unknown:cds_NZ_WFIY01000004.1_cds_WP_155862677.1_473 target sequence
ILERDDEVDRFYFYVSRQLTLSVSSFEILENEGYNITQLVDIHSAIKSIERIADHASRIASLIPEVKDTDTSKPVELGERALELF

SEQ ID NO: 34082 - protein, 84 aa, unidentified
  REGION 1..84: note = Description of Unknown:cds_NZ_WFIY01000004.1_cds_WP_155862677.1_473 target sequence
ALELFKDAFESFINERRDIANKIIERDVELANLHKQISSEILNSDIKHKSALLLVSDSFRRISRYSIDLAETTINIIAKKTTGF

SEQ ID NO: 34083 - protein, 85 aa, unidentified
  REGION 1..85: note = Description of Unknown:cds_NZ_WFIY01000004.1_cds_WP_155862677.1_473 target sequence
LSLNPGDEIEIFQDNNLRLILSPKAREGENRVTKAIINCENATPSFAVREFIAYYMAGYDTVSFVCSRLKAEDRTIIKDMIRKRL

SEQ ID NO: 34084 - protein, 85 aa, unidentified
  REGION 1..85: note = Description of Unknown:cds_NZ_WFIY01000004.1_cds_WP_155862677.1_473 target sequence
LGSEVIEEDSNAITVQFLVNEKDLPISKAITRAASIAQNMVKDSIEALKSKDEDIAKEILERDDEVDRFYFYVSRQLTLSVSSFE

SEQ ID NO: 34085 - protein, 85 aa, unidentified
  REGION 1..85: note = Description of Unknown:cds_NZ_WFIY01000004.1_cds_WP_155862677.1_473 target sequence
ILENEGYNITQLVDIHSAIKSIERIADHASRIASLIPEVKDTDTSKPVELGERALELFKDAFESFINERRDIANKIIERDVELAN

SEQ ID NO: 34086 - protein, 85 aa, unidentified
  REGION 1..85: note = Description of Unknown:cds_NZ_WFIY01000004.1_cds_WP_155862966.1_834 target sequence
STIENYIKKYDKVFEISPSLKAIELSRKYGFLDYMVERYLHIFRHEAEDFLYSCNFPLKKSIRCNTLKIDCDKLESRMEQKGFEL

SEQ ID NO: 34087 - protein, 85 aa, unidentified
  REGION 1..85: note = Description of Unknown:cds_NZ_WFIY01000004.1_cds_WP_155862966.1_834 target sequence
EKVSWLKHGYIVKKAPPKPSLGATIEYLQGYYYIQGLASMVPAYVLNPSSSDIVLDMAAAPGGKTTQLSQIMNNEGLIVAVEKSR

SEQ ID NO: 34088 - protein, 85 aa, unidentified
  REGION 1..85: note = Description of Unknown:cds_NZ_WFIY01000004.1_cds_WP_155862966.1_834 target sequence
LRIASLLSNISRLGARNVLLLRSDVRTLEKTTLSFDKILLDAPCSGEGLIPEDQSRKTKTSLDDLKRFSFTQLQLISTAYKLLKK

SEQ ID NO: 34089 - protein, 84 aa, unidentified
  REGION 1..84: note = Description of Unknown:cds_NZ_WFIY01000004.1_cds_WP_155862966.1_834 target sequence
KLLKKGGELVYSTCSIAPEEDEMIVNFAIEELGMKTIKISGYPAENGIVEYNGVSFNEEVSNCIRFYPHKNGTEGFFVCHLKKC

SEQ ID NO: 34090 - protein, 85 aa, unidentified
  REGION 1..85: note = Description of Unknown:cds_NZ_WFIY01000004.1_cds_WP_155862966.1_834 target sequence
KYGFLDYMVERYLHIFRHEAEDFLYSCNFPLKKSIRCNTLKIDCDKLESRMEQKGFELEKVSWLKHGYIVKKAPPKPSLGATIEY

SEQ ID NO: 34091 - protein, 85 aa, unidentified
  REGION 1..85: note = Description of Unknown:cds_NZ_WFIY01000004.1_cds_WP_155862966.1_834 target sequence
LQGYYYIQGLASMVPAYVLNPSSSDIVLDMAAAPGGKTTQLSQIMNNEGLIVAVEKSRLRIASLLSNISRLGARNVLLLRSDVRT

SEQ ID NO: 34092 - protein, 85 aa, unidentified
  REGION 1..85: note = Description of Unknown:cds_NZ_WFIY01000004.1_cds_WP_155862966.1_834 target sequence
LEKTTLSFDKILLDAPCSGEGLIPEDQSRKTKTSLDDLKRFSFTQLQLISTAYKLLKKGGELVYSTCSIAPEEDEMIVNFAIEEL

SEQ ID NO: 34093 - protein, 85 aa, unidentified
  REGION 1..85: note = Description of Unknown:cds_NZ_WFIY01000004.1_cds_WP_155863205.1_1146 target sequence
AKVKPFISTGILRLFNRKKLPVIAGHKLLYSCNLKCKMCPFWRRKDEKLLTLEEERMMLRKLSELGVIFMGFEGGEPLLRKDLPE

SEQ ID NO: 34094 - protein, 85 aa, unidentified
  REGION 1..85: note = Description of Unknown:cds_NZ_WFIY01000004.1_cds_WP_155863205.1_1146 target sequence
ILKESHERFHTSLVTNGLLLKARFNEIKKYLDYLFVSLDGIGETHDEIRGVKGSFNKTLEGIKIAKEEVSLAISTTLTRENLDEA

SEQ ID NO: 34095 - protein, 85 aa, unidentified
  REGION 1..85: note = Description of Unknown:cds_NZ_WFIY01000004.1_cds_WP_155863205.1_1146 target sequence
EKIVNLAEELDVLVNFQVAYDYSTADKMSPEKEKLRKVLERLLYLKKEGKPIMNTKEYFEAILNSWYKGVPWTCKPWLTINIDPQ

SEQ ID NO: 34096 - protein, 84 aa, unidentified
  REGION 1..84: note = Description of Unknown:cds_NZ_WFIY01000004.1_cds_WP_155863205.1_1146 target sequence
NIDPQGRIVLPCYVLNEYTGSKRIWEIDIKSLWESYDWKKYESCNKCALSCYLEPSIFTWSNFSIVKERIIDGMISIISTSLGF

SEQ ID NO: 34097 - protein, 85 aa, unidentified
  REGION 1..85: note = Description of Unknown:cds_NZ_WFIY01000004.1_cds_WP_155863205.1_1146 target sequence
LLYSCNLKCKMCPFWRRKDEKLLTLEEERMMLRKLSELGVIFMGFEGGEPLLRKDLPEILKESHERFHTSLVTNGLLLKARFNEI

SEQ ID NO: 34098 - protein, 85 aa, unidentified
  REGION 1..85: note = Description of Unknown:cds_NZ_WFIY01000004.1_cds_WP_155863205.1_1146 target sequence
KKYLDYLFVSLDGIGETHDEIRGVKGSFNKTLEGIKIAKEEVSLAISTTLTRENLDEAEKIVNLAEELDVLVNFQVAYDYSTADK

SEQ ID NO: 34099 - protein, 85 aa, unidentified
  REGION 1..85: note = Description of Unknown:cds_NZ_WFIY01000004.1_cds_WP_155863205.1_1146 target sequence
MSPEKEKLRKVLERLLYLKKEGKPIMNTKEYFEAILNSWYKGVPWTCKPWLTINIDPQGRIVLPCYVLNEYTGSKRIWEIDIKSL

SEQ ID NO: 34100 - protein, 85 aa, unidentified
  REGION 1..85: note = Description of Unknown:cds_NZ_WFIY01000004.1_cds_WP_155863405.1_1383 target sequence
KDFVSVIITAYNRQKYLGNALNSVLNQTLDKDKFEIVVIKNFELSEINYNNIIDIYDDQEYLGEKIYKGLHESKGDIICLLDDDD

SEQ ID NO: 34101 - protein, 85 aa, unidentified
  REGION 1..85: note = Description of Unknown:cds_NZ_WFIY01000004.1_cds_WP_155863405.1_1383 target sequence
MYREDKLERVTSFFKVFHPIYYHNNFVIIDDKGNEIKIIEDYLKIPPYASFNLPEFTLAIENNRKTNIRNLLKLNVNFNSSSICV

SEQ ID NO: 34102 - protein, 85 aa, unidentified
  REGION 1..85: note = Description of Unknown:cds_NZ_WFIY01000004.1_cds_WP_155863405.1_1383 target sequence
RREILENNAQYLKKIKAVIDSFIFYSSLLSEGNILLDPARLTYYRIHTLQTSSGNTKNINEYKDSFSNLFKKAVEDFYVITEMLN

SEQ ID NO: 34103 - protein, 84 aa, unidentified
  REGION 1..84: note = Description of Unknown:cds_NZ_WFIY01000004.1_cds_WP_155863405.1_1383 target sequence
TEMLNGKTNEIINEIVNEELLRYKLLYKIFSGNNISIKTKFNIHLINYYLLSLLPTFLRNLYIKDQYNRTKKVRSFQVKSSNIL

SEQ ID NO: 34104 - protein, 85 aa, unidentified
  REGION 1..85: note = Description of Unknown:cds_NZ_WFIY01000004.1_cds_WP_155863405.1_1383 target sequence
TLDKDKFEIVVIKNFELSEINYNNIIDIYDDQEYLGEKIYKGLHESKGDIICLLDDDDMYREDKLERVTSFFKVFHPIYYHNNFV

SEQ ID NO: 34105 - protein, 85 aa, unidentified
  REGION 1..85: note = Description of Unknown:cds_NZ_WFIY01000004.1_cds_WP_155863405.1_1383 target sequence
IIDDKGNEIKIIEDYLKIPPYASFNLPEFTLAIENNRKTNIRNLLKLNVNFNSSSICVRREILENNAQYLKKIKAVIDSFIFYSS

SEQ ID NO: 34106 - protein, 85 aa, unidentified
  REGION 1..85: note = Description of Unknown:cds_NZ_WFIY01000004.1_cds_WP_155863405.1_1383 target sequence
LLSEGNILLDPARLTYYRIHTLQTSSGNTKNINEYKDSFSNLFKKAVEDFYVITEMLNGKTNEIINEIVNEELLRYKLLYKIFSG

SEQ ID NO: 34107 - protein, 85 aa, unidentified
  REGION 1..85: note = Description of Unknown:cds_NZ_WFIY01000004.1_cds_WP_155863751.1_1624 target sequence
LNSIDILNKIKKLAEEEDEKARKVDAILSLVAEDIYYGNSDLEFLEINNAINPHIACAVDGSKYQLDVGDFSLIIARAVKVKGIS

SEQ ID NO: 34108 - protein, 85 aa, unidentified
  REGION 1..85: note = Description of Unknown:cds_NZ_WFIY01000004.1_cds_WP_155863751.1_1624 target sequence
GEKGKRIPPDIKEDVKLEDNYYGEDKVGKDAILLMLTLETEILSSCSDCDVIFIDGPIIDPPTYDDNDEDLKKFHEVRKLAISTN

SEQ ID NO: 34109 - protein, 85 aa, unidentified
  REGION 1..85: note = Description of Unknown:cds_NZ_WFIY01000004.1_cds_WP_155863751.1_1624 target sequence
DKIIGIVKRFAQRFLINKLINDGYAQLIEARESYIVQNLFYKLRQKFKDYKNPRFLGWISWDSIFSSNYTADLTALGKAYMKYNI

SEQ ID NO: 34110 - protein, 84 aa, unidentified
  REGION 1..84: note = Description of Unknown:cds_NZ_WFIY01000004.1_cds_WP_155863751.1_1624 target sequence
KYNIKLYSGYFQQNAISPVARIDVLSPDNNILAYIATWSYPGINEVTILNKLADDISNVSKAEAEAYLNLLISARKILPMMRKA

SEQ ID NO: 34111 - protein, 85 aa, unidentified
  REGION 1..85: note = Description of Unknown:cds_NZ_WFIY01000004.1_cds_WP_155863751.1_1624 target sequence
LSLVAEDIYYGNSDLEFLEINNAINPHIACAVDGSKYQLDVGDFSLIIARAVKVKGISGEKGKRIPPDIKEDVKLEDNYYGEDKV

SEQ ID NO: 34112 - protein, 85 aa, unidentified
  REGION 1..85: note = Description of Unknown:cds_NZ_WFIY01000004.1_cds_WP_155863751.1_1624 target sequence
GKDAILLMLTLETEILSSCSDCDVIFIDGPIIDPPTYDDNDEDLKKFHEVRKLAISTNDKIIGIVKRFAQRFLINKLINDGYAQL

SEQ ID NO: 34113 - protein, 85 aa, unidentified
  REGION 1..85: note = Description of Unknown:cds_NZ_WFIY01000004.1_cds_WP_155863751.1_1624 target sequence
IEARESYIVQNLFYKLRQKFKDYKNPRFLGWISWDSIFSSNYTADLTALGKAYMKYNIKLYSGYFQQNAISPVARIDVLSPDNNI

SEQ ID NO: 34114 - protein, 85 aa, unidentified
  REGION 1..85: note = Description of Unknown:cds_NZ_WFIY01000004.1_cds_WP_155863875.1_1779 target sequence
IEIDGSFGEGGGEILRTSLTLSALTGKPFRIYNIRAKRKNPGLQRQHLSAVKLVKELCNAESKGDYLGSQELVFIPHEIKNEGDF

SEQ ID NO: 34115 - protein, 85 aa, unidentified
  REGION 1..85: note = Description of Unknown:cds_NZ_WFIY01000004.1_cds_WP_155863875.1_1779 target sequence
TLDVTTAGSVTLIAVAVIPLIINRNIKIRLIGGTDVPKSPTIDYMRLVYLEILKKIGIQGEIKLIKRGHYPRGGGIIELSNFKGK

SEQ ID NO: 34116 - protein, 85 aa, unidentified
  REGION 1..85: note = Description of Unknown:cds_NZ_WFIY01000004.1_cds_WP_155863875.1_1779 target sequence
GDEFEIVEMGKIEEIKGISHVSSLPSHIAERQAKSAEEFIKKFLSVNVSISLDIRQGESEGTGITLAAYGKSVMGSDSLGEKGKR

SEQ ID NO: 34117 - protein, 84 aa, unidentified
  REGION 1..84: note = Description of Unknown:cds_NZ_WFIY01000004.1_cds_WP_155863875.1_1779 target sequence
EKGKRAEKVGEEAASKLIEDLKTNAGVDRHMSDMLMLYASLYKGKFTGAMLTMHARTNAEIIRKFIQDRKIEVIEGKPFTFKVL

SEQ ID NO: 34118 - protein, 85 aa, unidentified
  REGION 1..85: note = Description of Unknown:cds_NZ_WFIY01000004.1_cds_WP_155863875.1_1779 target sequence
PFRIYNIRAKRKNPGLQRQHLSAVKLVKELCNAESKGDYLGSQELVFIPHEIKNEGDFTLDVTTAGSVTLIAVAVIPLIINRNIK

SEQ ID NO: 34119 - protein, 85 aa, unidentified
  REGION 1..85: note = Description of Unknown:cds_NZ_WFIY01000004.1_cds_WP_155863875.1_1779 target sequence
IRLIGGTDVPKSPTIDYMRLVYLEILKKIGIQGEIKLIKRGHYPRGGGIIELSNFKGKGDEFEIVEMGKIEEIKGISHVSSLPSH

SEQ ID NO: 34120 - protein, 85 aa, unidentified
  REGION 1..85: note = Description of Unknown:cds_NZ_WFIY01000004.1_cds_WP_155863875.1_1779 target sequence
IAERQAKSAEEFIKKFLSVNVSISLDIRQGESEGTGITLAAYGKSVMGSDSLGEKGKRAEKVGEEAASKLIEDLKTNAGVDRHMS

SEQ ID NO: 34121 - protein, 85 aa, unidentified
  REGION 1..85: note = Description of Unknown:cds_NZ_WFIY01000004.1_cds_WP_155864035.1_1969 target sequence
LGKIDRKTFEEVIYPHLGEIHEEVIIPPMNGVDTGAIEIDEKRVMVVKTDPVFIVPQFGFKKAAWFAVHILASDVMTSGIPPRYA

SEQ ID NO: 34122 - protein, 85 aa, unidentified
  REGION 1..85: note = Description of Unknown:cds_NZ_WFIY01000004.1_cds_WP_155864035.1_1969 target sequence
MIDLNLPPSMTDEQFKEMWIGMHEAMKEIGVMVTAGHTGRYEGVDYPMLGGFSMIGIGEKEKLGSPKKVKEGDVVIVTKGPAIEA

SEQ ID NO: 34123 - protein, 85 aa, unidentified
  REGION 1..85: note = Description of Unknown:cds_NZ_WFIY01000004.1_cds_WP_155864035.1_1969 target sequence
TALLVNLYPQYFKERLPSEVFKEAYDMYWKMSCWKDGLIASKIGIHLMHYATEGGLWNALVEVSEVTKKRIRIFEDKLFINKAVK

SEQ ID NO: 34124 - protein, 84 aa, unidentified
  REGION 1..84: note = Description of Unknown:cds_NZ_WFIY01000004.1_cds_WP_155864035.1_1969 target sequence
NKAVKEVTSLVNIDPWISISEGTMIIITDKAEVKDALLKEGIEAEIIGRVEEGEEGVYLGNKRIEKPTEDPFWRAFFDLQKKAS

SEQ ID NO: 34125 - protein, 85 aa, unidentified
  REGION 1..85: note = Description of Unknown:cds_NZ_WFIY01000004.1_cds_WP_155864035.1_1969 target sequence
PMNGVDTGAIEIDEKRVMVVKTDPVFIVPQFGFKKAAWFAVHILASDVMTSGIPPRYAMIDLNLPPSMTDEQFKEMWIGMHEAMK

SEQ ID NO: 34126 - protein, 85 aa, unidentified
  REGION 1..85: note = Description of Unknown:cds_NZ_WFIY01000004.1_cds_WP_155864035.1_1969 target sequence
EIGVMVTAGHTGRYEGVDYPMLGGFSMIGIGEKEKLGSPKKVKEGDVVIVTKGPAIEATALLVNLYPQYFKERLPSEVFKEAYDM

SEQ ID NO: 34127 - protein, 85 aa, unidentified
  REGION 1..85: note = Description of Unknown:cds_NZ_WFIY01000004.1_cds_WP_155864035.1_1969 target sequence
YWKMSCWKDGLIASKIGIHLMHYATEGGLWNALVEVSEVTKKRIRIFEDKLFINKAVKEVTSLVNIDPWISISEGTMIIITDKAE

SEQ ID NO: 34128 - protein, 85 aa, unidentified
  REGION 1..85: note = Description of Unknown:cds_NZ_WFIY01000004.1_cds_WP_162309171.1_2169 target sequence
VNCNGEQYYPDKKSGLATIGDHVIINYSKTVTLISLSQPSGSVNPTSAQPLPKVPDVWIGSTIGSYKIESLIGEGGTGYVLKGRF

SEQ ID NO: 34129 - protein, 85 aa, unidentified
  REGION 1..85: note = Description of Unknown:cds_NZ_WFIY01000004.1_cds_WP_162309171.1_2169 target sequence
SNQEVAIKVLKIDKDPDLFANLAREAFNLAELSKHPNVVKIYAINVDKLVIDKILNGDTLLYVKSPPYIVMELMKGSIYDLMMKD

SEQ ID NO: 34130 - protein, 85 aa, unidentified
  REGION 1..85: note = Description of Unknown:cds_NZ_WFIY01000004.1_cds_WP_162309171.1_2169 target sequence
EFFYSQAWRRTVIRAIKKIAEALYYMHSNGYVHMDVKPQNILIDKVPSEPAELDNVNFKLGDMGGAVRVGEKVIQFTPTYAPPEV

SEQ ID NO: 34131 - protein, 84 aa, unidentified
  REGION 1..84: note = Description of Unknown:cds_NZ_WFIY01000004.1_cds_WP_162309171.1_2169 target sequence
PPEVFLYKAMPVFDVFSLGMTLYVLLTRKIDRPDLQEMNEAFNDLSKVKVARDKLNAWSQNLDEVIRKAILLRATIKDFMNLQY

SEQ ID NO: 34132 - protein, 85 aa, unidentified
  REGION 1..85: note = Description of Unknown:cds_NZ_WFIY01000004.1_cds_WP_162309171.1_2169 target sequence
SKTVTLISLSQPSGSVNPTSAQPLPKVPDVWIGSTIGSYKIESLIGEGGTGYVLKGRFSNQEVAIKVLKIDKDPDLFANLAREAF

SEQ ID NO: 34133 - protein, 85 aa, unidentified
  REGION 1..85: note = Description of Unknown:cds_NZ_WFIY01000004.1_cds_WP_162309171.1_2169 target sequence
NLAELSKHPNVVKIYAINVDKLVIDKILNGDTLLYVKSPPYIVMELMKGSIYDLMMKDEFFYSQAWRRTVIRAIKKIAEALYYMH

SEQ ID NO: 34134 - protein, 85 aa, unidentified
  REGION 1..85: note = Description of Unknown:cds_NZ_WFIY01000004.1_cds_WP_162309171.1_2169 target sequence
SNGYVHMDVKPQNILIDKVPSEPAELDNVNFKLGDMGGAVRVGEKVIQFTPTYAPPEVFLYKAMPVFDVFSLGMTLYVLLTRKID

SEQ ID NO: 34135 - protein, 85 aa, unidentified
  REGION 1..85: note = Description of Unknown:cds_NC_035460.1_cds_YP_009408118.1_167 target sequence
WWYIITLISVSYAQIHNPFNKNCTEKRILPGDITYNNELYHIQCPQIEFKRRSIFKNNNNYTLTWVKTLNYDIVFDWHYYTQIYF

SEQ ID NO: 34136 - protein, 85 aa, unidentified
  REGION 1..85: note = Description of Unknown:cds_NC_035460.1_cds_YP_009408118.1_167 target sequence
NDKNKPIHVNNKNLIFAPISVADTGTYVCFLQNATECEYGTVIVTAENRKYYIDDNIVSMEGNTVELYCDSNSISVPEAKNNIIW

SEQ ID NO: 34137 - protein, 85 aa, unidentified
  REGION 1..85: note = Description of Unknown:cds_NC_035460.1_cds_YP_009408118.1_167 target sequence
LRHEKKIKNANNVKLILTNITKNDMGLYICKVETTYNKKVYNSFRYINLYVKPKSKIQAEIISPMGNIKAKVNSTIEINCTINTN

SEQ ID NO: 34138 - protein, 84 aa, unidentified
  REGION 1..84: note = Description of Unknown:cds_NC_035460.1_cds_YP_009408118.1_167 target sequence
TINTNELVKYAKYRLYWKINNKLPFMFSTKGIKEKSESLITDKIVNLPLEIFTNNDVFTYNFTCYYDDLDYKEQLHKTIKLIKI

SEQ ID NO: 34139 - protein, 85 aa, unidentified
  REGION 1..85: note = Description of Unknown:cds_NC_035460.1_cds_YP_009408118.1_167 target sequence
ILPGDITYNNELYHIQCPQIEFKRRSIFKNNNNYTLTWVKTLNYDIVFDWHYYTQIYFNDKNKPIHVNNKNLIFAPISVADTGTY

SEQ ID NO: 34140 - protein, 85 aa, unidentified
  REGION 1..85: note = Description of Unknown:cds_NC_035460.1_cds_YP_009408118.1_167 target sequence
VCFLQNATECEYGTVIVTAENRKYYIDDNIVSMEGNTVELYCDSNSISVPEAKNNIIWLRHEKKIKNANNVKLILTNITKNDMGL

SEQ ID NO: 34141 - protein, 85 aa, unidentified
  REGION 1..85: note = Description of Unknown:cds_NC_035460.1_cds_YP_009408118.1_167 target sequence
YICKVETTYNKKVYNSFRYINLYVKPKSKIQAEIISPMGNIKAKVNSTIEINCTINTNELVKYAKYRLYWKINNKLPFMFSTKGI

SEQ ID NO: 34142 - protein, 85 aa, unidentified
  REGION 1..85: note = Description of Unknown:cds_NZ_WFIY01000004.1_cds_WP_155862580.1_353 target sequence
NCPKEDTVSFILHQELNKIILMLFKSYYEKAELELPNDMELREFAIQPFGKDTYVRHLSFSSPLELRNFILENLPLHLFYSTAKY

SEQ ID NO: 34143 - protein, 85 aa, unidentified
  REGION 1..85: note = Description of Unknown:cds_NZ_WFIY01000004.1_cds_WP_155862580.1_353 target sequence
QIPSAKEMDEKGWMGADLQFDIDADELCEIRKINFCPVCGSEVDGEKCPKDNVETVEFAEITSGCINKALENALIIKDILKDDFG

SEQ ID NO: 34144 - protein, 85 aa, unidentified
  REGION 1..85: note = Description of Unknown:cds_NZ_WFIY01000004.1_cds_WP_155862580.1_353 target sequence
LNPELYFSGNRGFHVYVRCSGDCALLDSEDRKEIVNYIKGIGVPKYSSALPTDPGWAGRKAKGIQGVILDEEVTIDIKRLFRIPN

SEQ ID NO: 34145 - protein, 84 aa, unidentified
  REGION 1..84: note = Description of Unknown:cds_NZ_WFIY01000004.1_cds_WP_155862580.1_353 target sequence
LFRIPNSIHGKSGLLVRKIENDFEFSTSLSPFSGYVTFLPYISGKFQILGENIEFSRGIPIKLDASIGVYAHLKGLGEVKLYVR

SEQ ID NO: 34146 - protein, 85 aa, unidentified
  REGION 1..85: note = Description of Unknown:cds_NZ_WFIY01000004.1_cds_WP_155862580.1_353 target sequence
YEKAELELPNDMELREFAIQPFGKDTYVRHLSFSSPLELRNFILENLPLHLFYSTAKYQIPSAKEMDEKGWMGADLQFDIDADEL

SEQ ID NO: 34147 - protein, 85 aa, unidentified
  REGION 1..85: note = Description of Unknown:cds_NZ_WFIY01000004.1_cds_WP_155862580.1_353 target sequence
CEIRKINFCPVCGSEVDGEKCPKDNVETVEFAEITSGCINKALENALIIKDILKDDFGLNPELYFSGNRGFHVYVRCSGDCALLD

SEQ ID NO: 34148 - protein, 85 aa, unidentified
  REGION 1..85: note = Description of Unknown:cds_NZ_WFIY01000004.1_cds_WP_155862580.1_353 target sequence
SEDRKEIVNYIKGIGVPKYSSALPTDPGWAGRKAKGIQGVILDEEVTIDIKRLFRIPNSIHGKSGLLVRKIENDFEFSTSLSPFS

SEQ ID NO: 34149 - protein, 85 aa, unidentified
  REGION 1..85: note = Description of Unknown:cds_NZ_WFIY01000004.1_cds_WP_155862974.1_844 target sequence
IISTLGSHSSLQILHGAKKEGLATSVITDKNRENFYKRFNFIDEVRSYSNLDEALDLINNNNEESVFIPHGSLIEYLGMERVKKI

SEQ ID NO: 34150 - protein, 85 aa, unidentified
  REGION 1..85: note = Description of Unknown:cds_NZ_WFIY01000004.1_cds_WP_155862974.1_844 target sequence
KTPIFGNKNLFEWEANQHKKMSLLKMAKIKIPESFESPEDVDRLVIVKLPGAKGGKGYFIAKNKEEVKESLNKLLEAKLIKSIDE

SEQ ID NO: 34151 - protein, 85 aa, unidentified
  REGION 1..85: note = Description of Unknown:cds_NZ_WFIY01000004.1_cds_WP_155862974.1_844 target sequence
VIIQEYVIGIPMYFHFFYSPIFKRVEITGMDIRYETNVDGLRRLPTNLINVDPTFVVAGNIPVVARESILPKAFEYAENFVNTVK

SEQ ID NO: 34152 - protein, 84 aa, unidentified
  REGION 1..84: note = Description of Unknown:cds_NZ_WFIY01000004.1_cds_WP_155862974.1_844 target sequence
FVNTVKENVPPGMIGPFCLESIVTDSLDIVVFEFSGRIVAGTNLYVEGSPYSWLYWDEPMSVGRRIAREIKIAKLENKLGEVTT

SEQ ID NO: 34153 - protein, 85 aa, unidentified
  REGION 1..85: note = Description of Unknown:cds_NZ_WFIY01000004.1_cds_WP_155862974.1_844 target sequence
TDKNRENFYKRFNFIDEVRSYSNLDEALDLINNNNEESVFIPHGSLIEYLGMERVKKIKTPIFGNKNLFEWEANQHKKMSLLKMA

SEQ ID NO: 34154 - protein, 85 aa, unidentified
  REGION 1..85: note = Description of Unknown:cds_NZ_WFIY01000004.1_cds_WP_155862974.1_844 target sequence
KIKIPESFESPEDVDRLVIVKLPGAKGGKGYFIAKNKEEVKESLNKLLEAKLIKSIDEVIIQEYVIGIPMYFHFFYSPIFKRVEI

SEQ ID NO: 34155 - protein, 85 aa, unidentified
  REGION 1..85: note = Description of Unknown:cds_NZ_WFIY01000004.1_cds_WP_155862974.1_844 target sequence
TGMDIRYETNVDGLRRLPTNLINVDPTFVVAGNIPVVARESILPKAFEYAENFVNTVKENVPPGMIGPFCLESIVTDSLDIVVFE

SEQ ID NO: 34156 - protein, 85 aa, unidentified
  REGION 1..85: note = Description of Unknown:cds_NZ_WFIY01000004.1_cds_WP_155863558.1_1487 target sequence
LGLASYLVKRAVERLILLLIFTAFVWMLVLGIPQLLGINPAYHFINPSEFLHSKNPELAEQLAIQSIDRGLGLNYPLEVQFFIYF

SEQ ID NO: 34157 - protein, 85 aa, unidentified
  REGION 1..85: note = Description of Unknown:cds_NZ_WFIY01000004.1_cds_WP_155863558.1_1487 target sequence
IHMLTLNLGVCPVNHQSVAVCLLSALPFTVILTIPPVIFQTLASIYLGSIAAIKRNTKIDVAIMNYFIVDYNLPIFVITLFLWFL

SEQ ID NO: 34158 - protein, 85 aa, unidentified
  REGION 1..85: note = Description of Unknown:cds_NZ_WFIY01000004.1_cds_WP_155863558.1_1487 target sequence
FAVALKIYPISVYNEVQNWTNIVTDLKVFWLPWLILTFIYGFSTRGILMRNAMIENLDSDFIKYERLAGLREKIVRAHARRVSII

SEQ ID NO: 34159 - protein, 84 aa, unidentified
  REGION 1..84: note = Description of Unknown:cds_NZ_WFIY01000004.1_cds_WP_155863558.1_1487 target sequence
RVSIIPVIVRTAIDLAFAISGDFFIEVYFGIPGLGYKLFYAALGDEIMIVLGSTFLLTLYAIILLYFVDLVEFIIDPRARRSVK

SEQ ID NO: 34160 - protein, 85 aa, unidentified
  REGION 1..85: note = Description of Unknown:cds_NZ_WFIY01000004.1_cds_WP_155863558.1_1487 target sequence
LVLGIPQLLGINPAYHFINPSEFLHSKNPELAEQLAIQSIDRGLGLNYPLEVQFFIYFIHMLTLNLGVCPVNHQSVAVCLLSALP

SEQ ID NO: 34161 - protein, 85 aa, unidentified
  REGION 1..85: note = Description of Unknown:cds_NZ_WFIY01000004.1_cds_WP_155863558.1_1487 target sequence
FTVILTIPPVIFQTLASIYLGSIAAIKRNTKIDVAIMNYFIVDYNLPIFVITLFLWFLFAVALKIYPISVYNEVQNWTNIVTDLK

SEQ ID NO: 34162 - protein, 85 aa, unidentified
  REGION 1..85: note = Description of Unknown:cds_NZ_WFIY01000004.1_cds_WP_155863558.1_1487 target sequence
VFWLPWLILTFIYGFSTRGILMRNAMIENLDSDFIKYERLAGLREKIVRAHARRVSIIPVIVRTAIDLAFAISGDFFIEVYFGIP

SEQ ID NO: 34163 - protein, 85 aa, unidentified
  REGION 1..85: note = Description of Unknown:cds_NZ_WFIY01000004.1_cds_WP_155863876.1_1780 target sequence
RAAVFTEIGRPLSIEDVKKPEVKGKEVLLKVLATGLCHGDLHIIFGEWKDDIPVSPPRILGHEIVGEITEDTEHFKEGDKVLVYN

SEQ ID NO: 34164 - protein, 85 aa, unidentified
  REGION 1..85: note = Description of Unknown:cds_NZ_WFIY01000004.1_cds_WP_155863876.1_1780 target sequence
AFGCGTCKYCKRGYPQFCEKVKILGVQEDGGFAEYVKVPSEDNLIKIDNNENPIKIAPLADAGVTAYNSVKGIEEDSNVALIGTG

SEQ ID NO: 34165 - protein, 85 aa, unidentified
  REGION 1..85: note = Description of Unknown:cds_NZ_WFIY01000004.1_cds_WP_155863876.1_1780 target sequence
AVSLIALQILKSRGIKVTVVGRNQIKLNKALELGADRIIQVKQSYSEDFSARIGREKFDYIIDYIGSDETLRDIVWALDRMGELR

SEQ ID NO: 34166 - protein, 84 aa, unidentified
  REGION 1..84: note = Description of Unknown:cds_NZ_WFIY01000004.1_cds_WP_155863876.1_1780 target sequence
RMGELRIVGEFGGRMEIWEQLLVLRGLRIRGILYGSKEDMINVVKLYNEGKIKTLAVPYKLEEINQAIDDLMSGRIIGRAVIIP

SEQ ID NO: 34167 - protein, 85 aa, unidentified
  REGION 1..85: note = Description of Unknown:cds_NZ_WFIY01000004.1_cds_WP_155863876.1_1780 target sequence
LLKVLATGLCHGDLHIIFGEWKDDIPVSPPRILGHEIVGEITEDTEHFKEGDKVLVYNAFGCGTCKYCKRGYPQFCEKVKILGVQ

SEQ ID NO: 34168 - protein, 85 aa, unidentified
  REGION 1..85: note = Description of Unknown:cds_NZ_WFIY01000004.1_cds_WP_155863876.1_1780 target sequence
EDGGFAEYVKVPSEDNLIKIDNNENPIKIAPLADAGVTAYNSVKGIEEDSNVALIGTGAVSLIALQILKSRGIKVTVVGRNQIKL

SEQ ID NO: 34169 - protein, 85 aa, unidentified
  REGION 1..85: note = Description of Unknown:cds_NZ_WFIY01000004.1_cds_WP_155863876.1_1780 target sequence
NKALELGADRIIQVKQSYSEDFSARIGREKFDYIIDYIGSDETLRDIVWALDRMGELRIVGEFGGRMEIWEQLLVLRGLRIRGIL

SEQ ID NO: 34170 - protein, 85 aa, unidentified
  REGION 1..85: note = Description of Unknown:cds_NC_035460.1_cds_YP_009408115.1_164 target sequence
INFAINLFKEFNNENIIFSPPSIIATLMMIAAGANGETKKEIESIINSLPIYKTSKQLKIANRVYISKFIKYYNTYKEKIAKLNA

SEQ ID NO: 34171 - protein, 85 aa, unidentified
  REGION 1..85: note = Description of Unknown:cds_NC_035460.1_cds_YP_009408115.1_164 target sequence
DIVQVDFNNVNQTTTAINSWINSITSINNFIKSVNADTCIMFINALSFEGEWSKKFKSGDTIISDFMISETESVNVPMMSTDLNL

SEQ ID NO: 34172 - protein, 85 aa, unidentified
  REGION 1..85: note = Description of Unknown:cds_NC_035460.1_cds_YP_009408115.1_164 target sequence
NIGHLDDIDARIVEIKYKNNYNMLIIIPNKVYGIQTVIKSLSSEKITEWVSKMKQQNVSLYLPKFNIDKELDLKYYLPKIGINTL

SEQ ID NO: 34173 - protein, 84 aa, unidentified
  REGION 1..84: note = Description of Unknown:cds_NC_035460.1_cds_YP_009408115.1_164 target sequence
IGINTLFTKPDLSKITDDIVDMPIFIHKACVKVDEEGTKAAAVSSFSVVYFSCVEREIVNINKPFIFFIRKNNNISFMGKVISP

SEQ ID NO: 34174 - protein, 85 aa, unidentified
  REGION 1..85: note = Description of Unknown:cds_NC_035460.1_cds_YP_009408115.1_164 target sequence
MMIAAGANGETKKEIESIINSLPIYKTSKQLKIANRVYISKFIKYYNTYKEKIAKLNADIVQVDFNNVNQTTTAINSWINSITSI

SEQ ID NO: 34175 - protein, 85 aa, unidentified
  REGION 1..85: note = Description of Unknown:cds_NC_035460.1_cds_YP_009408115.1_164 target sequence
NNFIKSVNADTCIMFINALSFEGEWSKKFKSGDTIISDFMISETESVNVPMMSTDLNLNIGHLDDIDARIVEIKYKNNYNMLIII

SEQ ID NO: 34176 - protein, 85 aa, unidentified
  REGION 1..85: note = Description of Unknown:cds_NC_035460.1_cds_YP_009408115.1_164 target sequence
PNKVYGIQTVIKSLSSEKITEWVSKMKQQNVSLYLPKFNIDKELDLKYYLPKIGINTLFTKPDLSKITDDIVDMPIFIHKACVKV

SEQ ID NO: 34177 - protein, 85 aa, unidentified
  REGION 1..85: note = Description of Unknown:cds_NC_010495.1_cds_YP_001742083.1_46 target sequence
SLSELQKQNVAQESAGLKNAGTKRRSHISQERLREVLDYNQDTGIFTRKIKTSSRIKVGDIVGCLDVSGYLRISIDGNKYWAQRL

SEQ ID NO: 34178 - protein, 85 aa, unidentified
  REGION 1..85: note = Description of Unknown:cds_NC_010495.1_cds_YP_001742083.1_46 target sequence
AWIYVNGDNIGNAKVEHINKNRTDNRICNLRLSTEVLNEKMCSKCRSVLPATSEYFYADKSMKLGFSSICKKCSGNKGKRARYLG

SEQ ID NO: 34179 - protein, 85 aa, unidentified
  REGION 1..85: note = Description of Unknown:cds_NC_010495.1_cds_YP_001742083.1_46 target sequence
NGLKVCSKCKSVLEANEENFNKNKSSLDGLRPDCKKCQAEFRKNIYKLKKAEINEKSKRYYDKNKEKHNEKSKQWRQKNKGVVRY

SEQ ID NO: 34180 - protein, 84 aa, unidentified
  REGION 1..84: note = Description of Unknown:cds_NC_010495.1_cds_YP_001742083.1_46 target sequence
KGVVRYHQRKYKYLKRQAIPSWFEHERVLIEKVYEMAGVLGMQVDHIVPINSKLVCGLHCWHNLQLLAPSENRSKSNSYWPDMP

SEQ ID NO: 34181 - protein, 85 aa, unidentified
  REGION 1..85: note = Description of Unknown:cds_NC_010495.1_cds_YP_001742083.1_46 target sequence
ISQERLREVLDYNQDTGIFTRKIKTSSRIKVGDIVGCLDVSGYLRISIDGNKYWAQRLAWIYVNGDNIGNAKVEHINKNRTDNRI

SEQ ID NO: 34182 - protein, 85 aa, unidentified
  REGION 1..85: note = Description of Unknown:cds_NC_010495.1_cds_YP_001742083.1_46 target sequence
CNLRLSTEVLNEKMCSKCRSVLPATSEYFYADKSMKLGFSSICKKCSGNKGKRARYLGNGLKVCSKCKSVLEANEENFNKNKSSL

SEQ ID NO: 34183 - protein, 85 aa, unidentified
  REGION 1..85: note = Description of Unknown:cds_NC_010495.1_cds_YP_001742083.1_46 target sequence
DGLRPDCKKCQAEFRKNIYKLKKAEINEKSKRYYDKNKEKHNEKSKQWRQKNKGVVRYHQRKYKYLKRQAIPSWFEHERVLIEKV

SEQ ID NO: 34184 - protein, 85 aa, unidentified
  REGION 1..85: note = Description of Unknown:cds_NZ_WFIY01000004.1_cds_WP_155862538.1_304 target sequence
SLTVKQHKIPQWKIEEVKELKEKIKQYKTVIIASLDGFPTDKLHEIRKKFRDVMEIKVSKNRLFERAAKESGIDVSKIEQYLTGT

SEQ ID NO: 34185 - protein, 85 aa, unidentified
  REGION 1..85: note = Description of Unknown:cds_NZ_WFIY01000004.1_cds_WP_155862538.1_304 target sequence
NAFIFSNKNPFEISLMLSKFKLKRYALPGDKADEEVVIPAGDTGIPAGPMISVFGKLKIPTRVQDGKITITKDTVVAEPGQPIPP

SEQ ID NO: 34186 - protein, 85 aa, unidentified
  REGION 1..85: note = Description of Unknown:cds_NZ_WFIY01000004.1_cds_WP_155862538.1_304 target sequence
EIVPVLQKLGIMPVYVKLRLKVAYHDNLIIPGEQLELKLDDYKSQILESYKNALALGVEIAYPEPEILKITLGKAYRNAMALAGE

SEQ ID NO: 34187 - protein, 84 aa, unidentified
  REGION 1..84: note = Description of Unknown:cds_NZ_WFIY01000004.1_cds_WP_155862538.1_304 target sequence
AMALAGESGYITPESAQAVFSAALAKAYALAGAISGKVDLGIQIPTAQQTTAPAKEEKKEEKKEEEKKGPSEEEIAGGLSSLFG

SEQ ID NO: 34188 - protein, 85 aa, unidentified
  REGION 1..85: note = Description of Unknown:cds_NZ_WFIY01000004.1_cds_WP_155862538.1_304 target sequence
KTVIIASLDGFPTDKLHEIRKKFRDVMEIKVSKNRLFERAAKESGIDVSKIEQYLTGTNAFIFSNKNPFEISLMLSKFKLKRYAL

SEQ ID NO: 34189 - protein, 85 aa, unidentified
  REGION 1..85: note = Description of Unknown:cds_NZ_WFIY01000004.1_cds_WP_155862538.1_304 target sequence
PGDKADEEVVIPAGDTGIPAGPMISVFGKLKIPTRVQDGKITITKDTVVAEPGQPIPPEIVPVLQKLGIMPVYVKLRLKVAYHDN

SEQ ID NO: 34190 - protein, 85 aa, unidentified
  REGION 1..85: note = Description of Unknown:cds_NZ_WFIY01000004.1_cds_WP_155862538.1_304 target sequence
LIIPGEQLELKLDDYKSQILESYKNALALGVEIAYPEPEILKITLGKAYRNAMALAGESGYITPESAQAVFSAALAKAYALAGAI

SEQ ID NO: 34191 - protein, 85 aa, unidentified
  REGION 1..85: note = Description of Unknown:cds_NZ_WFIY01000004.1_cds_WP_155862550.1_319 target sequence
KIRAVTAFVADINKDKILSIANKLNFIKEEDILTKRISFPETNPNIEFSKLLDLVVDNSIIFSLISIKDKDKRLSQVKDALSAGE

SEQ ID NO: 34192 - protein, 85 aa, unidentified
  REGION 1..85: note = Description of Unknown:cds_NZ_WFIY01000004.1_cds_WP_155862550.1_319 target sequence
NIYANVLLTSPSYVDEIVNLITRLEPSEASRFGILINDYFLLTPYFPTSTADVARDSFALSLLYVNDFKERKAVQSLEKADALGK

SEQ ID NO: 34193 - protein, 85 aa, unidentified
  REGION 1..85: note = Description of Unknown:cds_NZ_WFIY01000004.1_cds_WP_155862550.1_319 target sequence
IIESKTGLKYIGIDISLSPWGEESVGGLIEERSGKKIFNRGHIWTVGELNRELFSSAWEAKVSPIGYSEVMLPVGEDTILSKRVE

SEQ ID NO: 34194 - protein, 84 aa, unidentified
  REGION 1..84: note = Description of Unknown:cds_NZ_WFIY01000004.1_cds_WP_155862550.1_319 target sequence
ILSKRVEEESLTLSQLLSMTFSCAAGLDMVGIEEDKELYKNIIKDAMAIQFVKKRPYGIRIIPSRGEKKIYIKEFGYIPTIKVV

SEQ ID NO: 34195 - protein, 85 aa, unidentified
  REGION 1..85: note = Description of Unknown:cds_NZ_WFIY01000004.1_cds_WP_155862550.1_319 target sequence
KEEDILTKRISFPETNPNIEFSKLLDLVVDNSIIFSLISIKDKDKRLSQVKDALSAGENIYANVLLTSPSYVDEIVNLITRLEPS

SEQ ID NO: 34196 - protein, 85 aa, unidentified
  REGION 1..85: note = Description of Unknown:cds_NZ_WFIY01000004.1_cds_WP_155862550.1_319 target sequence
EASRFGILINDYFLLTPYFPTSTADVARDSFALSLLYVNDFKERKAVQSLEKADALGKIIESKTGLKYIGIDISLSPWGEESVGG

SEQ ID NO: 34197 - protein, 85 aa, unidentified
  REGION 1..85: note = Description of Unknown:cds_NZ_WFIY01000004.1_cds_WP_155862550.1_319 target sequence
LIEERSGKKIFNRGHIWTVGELNRELFSSAWEAKVSPIGYSEVMLPVGEDTILSKRVEEESLTLSQLLSMTFSCAAGLDMVGIEE

SEQ ID NO: 34198 - protein, 85 aa, unidentified
  REGION 1..85: note = Description of Unknown:cds_NZ_WFIY01000004.1_cds_WP_162309156.1_1240 target sequence
NDFFKWIIKRILLAIITIYVVITATYILLYISPGNPVQIYIDSLLARGYSKEYALMKAREVFGNYVNQTAFQAYLSYINGLLHGD

SEQ ID NO: 34199 - protein, 85 aa, unidentified
  REGION 1..85: note = Description of Unknown:cds_NZ_WFIY01000004.1_cds_WP_162309156.1_1240 target sequence
LGRSLIYHEPVIKLIALEAPYTVFLVSSSLILSYVIGVLIGLLTAKYSGGKIDSLITILSAAFNSIPNYIVAIILLLFFAIYNNY

SEQ ID NO: 34200 - protein, 85 aa, unidentified
  REGION 1..85: note = Description of Unknown:cds_NZ_WFIY01000004.1_cds_WP_162309156.1_1240 target sequence
FPISGSYGIGVHPGFNLPFIINMLDHYTLPILSFSIPMIPGWILSIRSAAFSISQEDYVRYAKLRGVKSRTILLSYIGKTAVIPS

SEQ ID NO: 34201 - protein, 84 aa, unidentified
  REGION 1..84: note = Description of Unknown:cds_NZ_WFIY01000004.1_cds_WP_162309156.1_1240 target sequence
KTAVIPSFTRLMYSFGLLLGSATFIESIFGLYGIGSLYATALTSKDYPLAIGVLLVIVIISILGNILADIIYGILDPRVRVGEE

SEQ ID NO: 34202 - protein, 85 aa, unidentified
  REGION 1..85: note = Description of Unknown:cds_NZ_WFIY01000004.1_cds_WP_162309156.1_1240 target sequence
LLYISPGNPVQIYIDSLLARGYSKEYALMKAREVFGNYVNQTAFQAYLSYINGLLHGDLGRSLIYHEPVIKLIALEAPYTVFLVS

SEQ ID NO: 34203 - protein, 85 aa, unidentified
  REGION 1..85: note = Description of Unknown:cds_NZ_WFIY01000004.1_cds_WP_162309156.1_1240 target sequence
SSLILSYVIGVLIGLLTAKYSGGKIDSLITILSAAFNSIPNYIVAIILLLFFAIYNNYFPISGSYGIGVHPGFNLPFIINMLDHY

SEQ ID NO: 34204 - protein, 85 aa, unidentified
  REGION 1..85: note = Description of Unknown:cds_NZ_WFIY01000004.1_cds_WP_162309156.1_1240 target sequence
TLPILSFSIPMIPGWILSIRSAAFSISQEDYVRYAKLRGVKSRTILLSYIGKTAVIPSFTRLMYSFGLLLGSATFIESIFGLYGI

SEQ ID NO: 34205 - protein, 85 aa, unidentified
  REGION 1..85: note = Description of Unknown:cds_NZ_WFIY01000004.1_cds_WP_155863552.1_1484 target sequence
LNKNLINELKFDHNVISVENLWVRYPLSRGLFSRVYLYAVNGVSFSVQPGETLGVIGESGSGKTTLGRAILKLIEVYEGKIFWGN

SEQ ID NO: 34206 - protein, 85 aa, unidentified
  REGION 1..85: note = Description of Unknown:cds_NZ_WFIY01000004.1_cds_WP_155863552.1_1484 target sequence
IDVTKMKESKLRHLRRYFQLIQQDPYGALDPRMSVYDAVAEGLRIHKLVKSREEEEEIVYKALAQVKLTPPETFASKMPDELSGG

SEQ ID NO: 34207 - protein, 85 aa, unidentified
  REGION 1..85: note = Description of Unknown:cds_NZ_WFIY01000004.1_cds_WP_155863552.1_1484 target sequence
QRQRVVIARALVLKPKFVVADEPISMLDASTRGQILEILDNTRKENNLSILFITHDIAIASYISNRIMVLYSGKVVEMASSEEII

SEQ ID NO: 34208 - protein, 84 aa, unidentified
  REGION 1..84: note = Description of Unknown:cds_NZ_WFIY01000004.1_cds_WP_155863552.1_1484 target sequence
ASSEEIIKNPMHPYTQALIEAIPKPDPNAKVPEPKIKGEVVPLLDKPKGCVFYNRCPFAMPICKEKEPELKEIKSGHYVACHLY

SEQ ID NO: 34209 - protein, 85 aa, unidentified
  REGION 1..85: note = Description of Unknown:cds_NZ_WFIY01000004.1_cds_WP_155863552.1_1484 target sequence
SRGLFSRVYLYAVNGVSFSVQPGETLGVIGESGSGKTTLGRAILKLIEVYEGKIFWGNIDVTKMKESKLRHLRRYFQLIQQDPYG

SEQ ID NO: 34210 - protein, 85 aa, unidentified
  REGION 1..85: note = Description of Unknown:cds_NZ_WFIY01000004.1_cds_WP_155863552.1_1484 target sequence
ALDPRMSVYDAVAEGLRIHKLVKSREEEEEIVYKALAQVKLTPPETFASKMPDELSGGQRQRVVIARALVLKPKFVVADEPISML

SEQ ID NO: 34211 - protein, 85 aa, unidentified
  REGION 1..85: note = Description of Unknown:cds_NZ_WFIY01000004.1_cds_WP_155863552.1_1484 target sequence
DASTRGQILEILDNTRKENNLSILFITHDIAIASYISNRIMVLYSGKVVEMASSEEIIKNPMHPYTQALIEAIPKPDPNAKVPEP

SEQ ID NO: 34212 - protein, 85 aa, unidentified
  REGION 1..85: note = Description of Unknown:cds_NZ_WFIY01000004.1_cds_WP_155863803.1_1688 target sequence
SEYDMIIIGGGPVGLFGAFYATLRDMKTMIIDSQDELGGQLVSLYPEKMVYDVGGYPGILGYELAQKLVEQAKMFSPDIRLKEWV

SEQ ID NO: 34213 - protein, 85 aa, unidentified
  REGION 1..85: note = Description of Unknown:cds_NZ_WFIY01000004.1_cds_WP_155863803.1_1688 target sequence
EWIQKTDDNMWIVKTDKGNQFKTKTVLIAMGIGKIMPSRLGAKGELEYENKGVYYTVRRKKDFEGKRVLIVGGGDAAVDWALTLA

SEQ ID NO: 34214 - protein, 85 aa, unidentified
  REGION 1..85: note = Description of Unknown:cds_NZ_WFIY01000004.1_cds_WP_155863803.1_1688 target sequence
PIAKSVTLIHRRDQFRAHERSVKELFQVATVYTWHELKEVKGDGNKVTQAIIFDNRTKEEKTLDVDAVIISIGFKGDLGNLPKWG

SEQ ID NO: 34215 - protein, 84 aa, unidentified
  REGION 1..84: note = Description of Unknown:cds_NZ_WFIY01000004.1_cds_WP_155863803.1_1688 target sequence
GNLPKWGVAMKGRDVIVNARMETNLPGVYAAGDIALQEGAPKLALIAVGFGQVAIATSVAKKYIDPNASLFAGHSSEMDKFKKV

SEQ ID NO: 34216 - protein, 85 aa, unidentified
  REGION 1..85: note = Description of Unknown:cds_NZ_WFIY01000004.1_cds_WP_155863803.1_1688 target sequence
TMIIDSQDELGGQLVSLYPEKMVYDVGGYPGILGYELAQKLVEQAKMFSPDIRLKEWVEWIQKTDDNMWIVKTDKGNQFKTKTVL

SEQ ID NO: 34217 - protein, 85 aa, unidentified
  REGION 1..85: note = Description of Unknown:cds_NZ_WFIY01000004.1_cds_WP_155863803.1_1688 target sequence
IAMGIGKIMPSRLGAKGELEYENKGVYYTVRRKKDFEGKRVLIVGGGDAAVDWALTLAPIAKSVTLIHRRDQFRAHERSVKELFQ

SEQ ID NO: 34218 - protein, 85 aa, unidentified
  REGION 1..85: note = Description of Unknown:cds_NZ_WFIY01000004.1_cds_WP_155863803.1_1688 target sequence
VATVYTWHELKEVKGDGNKVTQAIIFDNRTKEEKTLDVDAVIISIGFKGDLGNLPKWGVAMKGRDVIVNARMETNLPGVYAAGDI

SEQ ID NO: 34219 - protein, 85 aa, unidentified
  REGION 1..85: note = Description of Unknown:cds_NZ_WFIY01000004.1_cds_WP_155863832.1_1726 target sequence
KAVVVIGHKQGYKVQEVPDPKPADDEVIIKVDRAALCYRDLLQLQGYYPRMKYPVILGHEVVGTIIQKGKKVEGFEEGDKVVSLL

SEQ ID NO: 34220 - protein, 85 aa, unidentified
  REGION 1..85: note = Description of Unknown:cds_NZ_WFIY01000004.1_cds_WP_155863832.1_1726 target sequence
YAPDGTCEYCRQGEEAYCHSRLGYSEELDGFFAEYAKIKVTSLVKVPKGTPDEGAVLVPCVTGMIYRGLMRAHLKPGETVLVTGA

SEQ ID NO: 34221 - protein, 85 aa, unidentified
  REGION 1..85: note = Description of Unknown:cds_NZ_WFIY01000004.1_cds_WP_155863832.1_1726 target sequence
SGGVGIHAVQVAKALGAKVIGVTTSEEKAPFIKKFADHVIVGKKFAEEAKKISDVHVVIDTVGTPTFDESLKSLWMGGRIVQIGN

SEQ ID NO: 34222 - protein, 84 aa, unidentified
  REGION 1..84: note = Description of Unknown:cds_NZ_WFIY01000004.1_cds_WP_155863832.1_1726 target sequence
RIVQIGNVDPSQAYQLRLGYVILKDIQIIGHASATKKDVEGALKLTAEGKIQPIIAGTVGIDEIDKGYELLKDKNKIGKVLLKP

SEQ ID NO: 34223 - protein, 85 aa, unidentified
  REGION 1..85: note = Description of Unknown:cds_NZ_WFIY01000004.1_cds_WP_155863832.1_1726 target sequence
IIKVDRAALCYRDLLQLQGYYPRMKYPVILGHEVVGTIIQKGKKVEGFEEGDKVVSLLYAPDGTCEYCRQGEEAYCHSRLGYSEE

SEQ ID NO: 34224 - protein, 85 aa, unidentified
  REGION 1..85: note = Description of Unknown:cds_NZ_WFIY01000004.1_cds_WP_155863832.1_1726 target sequence
LDGFFAEYAKIKVTSLVKVPKGTPDEGAVLVPCVTGMIYRGLMRAHLKPGETVLVTGASGGVGIHAVQVAKALGAKVIGVTTSEE

SEQ ID NO: 34225 - protein, 85 aa, unidentified
  REGION 1..85: note = Description of Unknown:cds_NZ_WFIY01000004.1_cds_WP_155863832.1_1726 target sequence
KAPFIKKFADHVIVGKKFAEEAKKISDVHVVIDTVGTPTFDESLKSLWMGGRIVQIGNVDPSQAYQLRLGYVILKDIQIIGHASA

SEQ ID NO: 34226 - protein, 85 aa, unidentified
  REGION 1..85: note = Description of Unknown:cds_NZ_WFIY01000004.1_cds_WP_155863947.1_1867 target sequence
MELAIAGGGPAGISLAYFLRGSKINATVYEGLSDVGLKPCAWGVMKGIEDYLPIPKEAIISEIKGFRIYLDGKLLYDIKGREILG

SEQ ID NO: 34227 - protein, 85 aa, unidentified
  REGION 1..85: note = Description of Unknown:cds_NZ_WFIY01000004.1_cds_WP_155863947.1_1867 target sequence
YIVNKPKFLRILGEKVDLRLNSKVVEKDGKILVNDKEIEADKVIYANGHYSFKGDYAIPAIQYITDYKIDPEIVEMYFFSDLLGY

SEQ ID NO: 34228 - protein, 85 aa, unidentified
  REGION 1..85: note = Description of Unknown:cds_NZ_WFIY01000004.1_cds_WP_155863947.1_1867 target sequence
GWIFPEEDGSKIGIGGYADVNFLKERLKSLVKGKIKAFQGAKVADYGVIEDRLSKGNYIGEALGTVYAVTGEGIRPSIISAKIMA

SEQ ID NO: 34229 - protein, 84 aa, unidentified
  REGION 1..84: note = Description of Unknown:cds_NZ_WFIY01000004.1_cds_WP_155863947.1_1867 target sequence
ISAKIMADSLLNNKDFSKEFKKSKLYWSLQIHAKVIRDSKKKGAQSIKGLERVLLKTPPELVLKFALGDFTKIDLLKIFGRMII

SEQ ID NO: 34230 - protein, 85 aa, unidentified
  REGION 1..85: note = Description of Unknown:cds_NZ_WFIY01000004.1_cds_WP_155863947.1_1867 target sequence
VYEGLSDVGLKPCAWGVMKGIEDYLPIPKEAIISEIKGFRIYLDGKLLYDIKGREILGYIVNKPKFLRILGEKVDLRLNSKVVEK

SEQ ID NO: 34231 - protein, 85 aa, unidentified
  REGION 1..85: note = Description of Unknown:cds_NZ_WFIY01000004.1_cds_WP_155863947.1_1867 target sequence
DGKILVNDKEIEADKVIYANGHYSFKGDYAIPAIQYITDYKIDPEIVEMYFFSDLLGYGWIFPEEDGSKIGIGGYADVNFLKERL

SEQ ID NO: 34232 - protein, 85 aa, unidentified
  REGION 1..85: note = Description of Unknown:cds_NZ_WFIY01000004.1_cds_WP_155863947.1_1867 target sequence
KSLVKGKIKAFQGAKVADYGVIEDRLSKGNYIGEALGTVYAVTGEGIRPSIISAKIMADSLLNNKDFSKEFKKSKLYWSLQIHAK

SEQ ID NO: 34233 - protein, 85 aa, unidentified
  REGION 1..85: note = Description of Unknown:cds_NZ_WFIY01000004.1_cds_WP_155864213.1_2181 target sequence
TIVIIGGGFAGLSAYKEKGEERAVLIDKKDYFLLTPWLIDFICGLNNNITVKYNHVIVGELNKIDFKEKKVFLGNHTIAYDKLIL

SEQ ID NO: 34234 - protein, 85 aa, unidentified
  REGION 1..85: note = Description of Unknown:cds_NZ_WFIY01000004.1_cds_WP_155864213.1_2181 target sequence
ALGHHQNLPRLKGAKEFAHKLETLDDALLLKKRLSEVKDVVIIGGGATGVELAGNIIGKNITLIQRRNRLLPTMTTASAKKAEKL

SEQ ID NO: 34235 - protein, 85 aa, unidentified
  REGION 1..85: note = Description of Unknown:cds_NZ_WFIY01000004.1_cds_WP_155864213.1_2181 target sequence
LTELGVNLLLGVEALEVQKDKVITTHGEVKSELTIFAGGLKGPDIINSIHKNRNHRMLVDKFLRSVDYKDVYGAGDCATFADSEI

SEQ ID NO: 34236 - protein, 84 aa, unidentified
  REGION 1..84: note = Description of Unknown:cds_NZ_WFIY01000004.1_cds_WP_155864213.1_2181 target sequence
TFADSEIPMSADVAVSAGRIAMRNALGEEEEFKPQRYATILRIRDEYFGDFGENYVEGNFAKLLKKIAYVESRMLVIGKNLTKS

SEQ ID NO: 34237 - protein, 85 aa, unidentified
  REGION 1..85: note = Description of Unknown:cds_NZ_WFIY01000004.1_cds_WP_155864213.1_2181 target sequence
KKDYFLLTPWLIDFICGLNNNITVKYNHVIVGELNKIDFKEKKVFLGNHTIAYDKLILALGHHQNLPRLKGAKEFAHKLETLDDA

SEQ ID NO: 34238 - protein, 85 aa, unidentified
  REGION 1..85: note = Description of Unknown:cds_NZ_WFIY01000004.1_cds_WP_155864213.1_2181 target sequence
LLLKKRLSEVKDVVIIGGGATGVELAGNIIGKNITLIQRRNRLLPTMTTASAKKAEKLLTELGVNLLLGVEALEVQKDKVITTHG

SEQ ID NO: 34239 - protein, 85 aa, unidentified
  REGION 1..85: note = Description of Unknown:cds_NZ_WFIY01000004.1_cds_WP_155864213.1_2181 target sequence
EVKSELTIFAGGLKGPDIINSIHKNRNHRMLVDKFLRSVDYKDVYGAGDCATFADSEIPMSADVAVSAGRIAMRNALGEEEEFKP

SEQ ID NO: 34240 - protein, 85 aa, unidentified
  REGION 1..85: note = Description of Unknown:cds_NZ_WFIY01000004.1_cds_WP_155864331.1_2340 target sequence
RIAEILVESSPTPFWDILKQIGVDEATGILPRWYPDWRQWRSDNPWDYSSLSNYKRMIEEAGFKLTVIEDNPPMDKIIYGLPGKE

SEQ ID NO: 34241 - protein, 85 aa, unidentified
  REGION 1..85: note = Description of Unknown:cds_NZ_WFIY01000004.1_cds_WP_155864331.1_2340 target sequence
EQLENVAKLIENMGKLKIPIWCYNWMPDGWLRTRTALRGRGGALTSGFDEEDLKEAPPPKLGKIDKATLWKNLREFLKFILPIAE

SEQ ID NO: 34242 - protein, 85 aa, unidentified
  REGION 1..85: note = Description of Unknown:cds_NZ_WFIY01000004.1_cds_WP_155864331.1_2340 target sequence
DANVKLAIHPDDPPLDEVRGVARIMNTVEAFDKLIEEFPSEYNGITFDHSIFSLMTNDLVSVVRHFLEKKRIFFVHFREVIGNKS

SEQ ID NO: 34243 - protein, 84 aa, unidentified
  REGION 1..84: note = Description of Unknown:cds_NZ_WFIY01000004.1_cds_WP_155864331.1_2340 target sequence
EVIGNKSKFEEVFIDEGMTRQFEEMREYIKHGFYGPFRVDHTPTLLGDTMQLSVPGYSVLGRIHAIGYLQGLFRAAAESLGYYQ

SEQ ID NO: 34244 - protein, 85 aa, unidentified
  REGION 1..85: note = Description of Unknown:cds_NZ_WFIY01000004.1_cds_WP_155864331.1_2340 target sequence
GILPRWYPDWRQWRSDNPWDYSSLSNYKRMIEEAGFKLTVIEDNPPMDKIIYGLPGKEEQLENVAKLIENMGKLKIPIWCYNWMP

SEQ ID NO: 34245 - protein, 85 aa, unidentified
  REGION 1..85: note = Description of Unknown:cds_NZ_WFIY01000004.1_cds_WP_155864331.1_2340 target sequence
DGWLRTRTALRGRGGALTSGFDEEDLKEAPPPKLGKIDKATLWKNLREFLKFILPIAEDANVKLAIHPDDPPLDEVRGVARIMNT

SEQ ID NO: 34246 - protein, 85 aa, unidentified
  REGION 1..85: note = Description of Unknown:cds_NZ_WFIY01000004.1_cds_WP_155864331.1_2340 target sequence
VEAFDKLIEEFPSEYNGITFDHSIFSLMTNDLVSVVRHFLEKKRIFFVHFREVIGNKSKFEEVFIDEGMTRQFEEMREYIKHGFY

SEQ ID NO: 34247 - protein, 85 aa, unidentified
  REGION 1..85: note = Description of Unknown:cds_NC_035460.1_cds_YP_009408023.1_72 target sequence
DSITMDKPLMYFNEITGSLDYDPNSSKEVAKKLPYQGQLKLMLSELFFLSKLQRHGMLDGSTILYIGSAPGTHIKYLRDHFISMG

SEQ ID NO: 34248 - protein, 85 aa, unidentified
  REGION 1..85: note = Description of Unknown:cds_NC_035460.1_cds_YP_009408023.1_72 target sequence
IVIKWILIDGRPHDKILNGLRDVTLITKFVDEAFLKSLYKQLYPSKIILISDIRSKRDGAEPSTSDLLSNYALQNMMISILKPIA

SEQ ID NO: 34249 - protein, 85 aa, unidentified
  REGION 1..85: note = Description of Unknown:cds_NC_035460.1_cds_YP_009408023.1_72 target sequence
SSLKWRCPFPDQWIQDFYIPHGNELLQPFAPSYSAEMRLISIYTTEPIKLKCITKFDAIKYEKNMFYLNKIVRNTIILNFDYPNQ

SEQ ID NO: 34250 - protein, 84 aa, unidentified
  REGION 1..84: note = Description of Unknown:cds_NC_035460.1_cds_YP_009408023.1_72 target sequence
NFDYPNQEYDFFHMYYMLKTIYTNKEFVSEKAKVLYLQHSIFKFLKIPISSTEKIQYEPTQRKIFSKNSMSKDRNIKRSVRYHK

SEQ ID NO: 34251 - protein, 85 aa, unidentified
  REGION 1..85: note = Description of Unknown:cds_NC_035460.1_cds_YP_009408023.1_72 target sequence
EVAKKLPYQGQLKLMLSELFFLSKLQRHGMLDGSTILYIGSAPGTHIKYLRDHFISMGIVIKWILIDGRPHDKILNGLRDVTLIT

SEQ ID NO: 34252 - protein, 85 aa, unidentified
  REGION 1..85: note = Description of Unknown:cds_NC_035460.1_cds_YP_009408023.1_72 target sequence
KFVDEAFLKSLYKQLYPSKIILISDIRSKRDGAEPSTSDLLSNYALQNMMISILKPIASSLKWRCPFPDQWIQDFYIPHGNELLQ

SEQ ID NO: 34253 - protein, 85 aa, unidentified
  REGION 1..85: note = Description of Unknown:cds_NC_035460.1_cds_YP_009408023.1_72 target sequence
PFAPSYSAEMRLISIYTTEPIKLKCITKFDAIKYEKNMFYLNKIVRNTIILNFDYPNQEYDFFHMYYMLKTIYTNKEFVSEKAKV

SEQ ID NO: 34254 - protein, 85 aa, unidentified
  REGION 1..85: note = Description of Unknown:cds_NC_030656.1_cds_YP_009268721.1_6 target sequence
ESNDAKTTCDIVQEPLLTPNDNRFVILPIQYPDIWSMYKKAEASFWTVEEVDLTKDLPHWKKLKPDEQYFISHVLAFFAASDGIV

SEQ ID NO: 34255 - protein, 85 aa, unidentified
  REGION 1..85: note = Description of Unknown:cds_NC_030656.1_cds_YP_009268721.1_6 target sequence
NENLVERFCNEVQVTEARCFYGFQIAIENIHSEMYSLLIDTYIQDPFEKSKLFNAIYTIPCVKKKANWALKWIKDKASSFGSRLV

SEQ ID NO: 34256 - protein, 85 aa, unidentified
  REGION 1..85: note = Description of Unknown:cds_NC_030656.1_cds_YP_009268721.1_6 target sequence
AFAAVEGIFFSGSFAAIFWLKKRGLMPGLTFSNELISRDEGLHCDFACLLFGYLVNKPSKDKIKDIITEAVTIEQEFLTYALPVR

SEQ ID NO: 34257 - protein, 84 aa, unidentified
  REGION 1..84: note = Description of Unknown:cds_NC_030656.1_cds_YP_009268721.1_6 target sequence
TYALPVRLIGINCELMSQYIEFVADRLLVALKCEKHYNATNPFDFMENISLEGKTNFFEKRVSEYQKFGVCSKSDMTFTLDVDF

SEQ ID NO: 34258 - protein, 85 aa, unidentified
  REGION 1..85: note = Description of Unknown:cds_NC_030656.1_cds_YP_009268721.1_6 target sequence
PIQYPDIWSMYKKAEASFWTVEEVDLTKDLPHWKKLKPDEQYFISHVLAFFAASDGIVNENLVERFCNEVQVTEARCFYGFQIAI

SEQ ID NO: 34259 - protein, 85 aa, unidentified
  REGION 1..85: note = Description of Unknown:cds_NC_030656.1_cds_YP_009268721.1_6 target sequence
ENIHSEMYSLLIDTYIQDPFEKSKLFNAIYTIPCVKKKANWALKWIKDKASSFGSRLVAFAAVEGIFFSGSFAAIFWLKKRGLMP

SEQ ID NO: 34260 - protein, 85 aa, unidentified
  REGION 1..85: note = Description of Unknown:cds_NC_030656.1_cds_YP_009268721.1_6 target sequence
GLTFSNELISRDEGLHCDFACLLFGYLVNKPSKDKIKDIITEAVTIEQEFLTYALPVRLIGINCELMSQYIEFVADRLLVALKCE

SEQ ID NO: 34261 - protein, 85 aa, unidentified
  REGION 1..85: note = Description of Unknown:cds_NC_030656.1_cds_YP_009268786.1_71 target sequence
TAKSLNKPFMYYDEIDGEEEYSKTIEQLAPVKFSSQGQLKLLLGELFFLNKLHVHGILDGATIIYIGSSPGTHIKWLYDYFTQIG

SEQ ID NO: 34262 - protein, 85 aa, unidentified
  REGION 1..85: note = Description of Unknown:cds_NC_030656.1_cds_YP_009268786.1_71 target sequence
IVLQWILIDGRKHDVMLSKLRYVTLVHKFCDEEYLRELKRTNKNARIVLISDIRSKKSGDEPSTEDLLSDYSLQNMMLSILKPVA

SEQ ID NO: 34263 - protein, 85 aa, unidentified
  REGION 1..85: note = Description of Unknown:cds_NC_030656.1_cds_YP_009268786.1_71 target sequence
SSLKWRCPFPDQWVKEFYIPTGREMLQPFAPPYSAELRIINIYTSDKAQLRLITIEDAKIYERKMFYYNNTVRKKVIINFDYPNQ

SEQ ID NO: 34264 - protein, 84 aa, unidentified
  REGION 1..84: note = Description of Unknown:cds_NC_030656.1_cds_YP_009268786.1_71 target sequence
NFDYPNQEYDFFLMYYILRSVYSDKKFSSTKEKVLFLQQSIFKFLKIPLTVTTKLNNEQTQHKVPSKNPVPKGKGRARPVRDNK

SEQ ID NO: 34265 - protein, 85 aa, unidentified
  REGION 1..85: note = Description of Unknown:cds_NC_030656.1_cds_YP_009268786.1_71 target sequence
LAPVKFSSQGQLKLLLGELFFLNKLHVHGILDGATIIYIGSSPGTHIKWLYDYFTQIGIVLQWILIDGRKHDVMLSKLRYVTLVH

SEQ ID NO: 34266 - protein, 85 aa, unidentified
  REGION 1..85: note = Description of Unknown:cds_NC_030656.1_cds_YP_009268786.1_71 target sequence
KFCDEEYLRELKRTNKNARIVLISDIRSKKSGDEPSTEDLLSDYSLQNMMLSILKPVASSLKWRCPFPDQWVKEFYIPTGREMLQ

SEQ ID NO: 34267 - protein, 85 aa, unidentified
  REGION 1..85: note = Description of Unknown:cds_NC_030656.1_cds_YP_009268786.1_71 target sequence
PFAPPYSAELRIINIYTSDKAQLRLITIEDAKIYERKMFYYNNTVRKKVIINFDYPNQEYDFFLMYYILRSVYSDKKFSSTKEKV

SEQ ID NO: 34268 - protein, 85 aa, unidentified
  REGION 1..85: note = Description of Unknown:hvTR_P03220 target sequence
FNAVKADMPDDPMLARRYGQCLELALEACQDTPEQFKLVETPLKSFLLVSNILPQDNRPWHEARSSGRVAEDDYDFSSLALELLP

SEQ ID NO: 34269 - protein, 85 aa, unidentified
  REGION 1..85: note = Description of Unknown:hvTR_P03220 target sequence
LNPRLPEEWQFGGQGWSSRMEPSQPEMGMGLCFEVFDGDLMRIALAWNKDEVIGQALQILAHSQTWTSLVPEDPLPWMWALFYGP

SEQ ID NO: 34270 - protein, 85 aa, unidentified
  REGION 1..85: note = Description of Unknown:hvTR_P03220 target sequence
RSHCEERHCVYAAARGKRGPILLPTAVYTPCANIEAFLAHLTRCVYALYLDVRDWKGEDIAPPFDVSRLNKMAKQLCLLPQEPFC

SEQ ID NO: 34271 - protein, 84 aa, unidentified
  REGION 1..84: note = Description of Unknown:hvTR_P03220 target sequence
LLPQEPFCITRVCLLCLLHKQNLNAQYKRPVDTYDPCLILTGEAERYMVDAVGNYREASTGTTVLYPTYDLGSIVADMVTYEDE

SEQ ID NO: 34272 - protein, 85 aa, unidentified
  REGION 1..85: note = Description of Unknown:hvTR_P03220 target sequence
ACQDTPEQFKLVETPLKSFLLVSNILPQDNRPWHEARSSGRVAEDDYDFSSLALELLPLNPRLPEEWQFGGQGWSSRMEPSQPEM

SEQ ID NO: 34273 - protein, 85 aa, unidentified
  REGION 1..85: note = Description of Unknown:hvTR_P03220 target sequence
GMGLCFEVFDGDLMRIALAWNKDEVIGQALQILAHSQTWTSLVPEDPLPWMWALFYGPRSHCEERHCVYAAARGKRGPILLPTAV

SEQ ID NO: 34274 - protein, 85 aa, unidentified
  REGION 1..85: note = Description of Unknown:hvTR_P03220 target sequence
YTPCANIEAFLAHLTRCVYALYLDVRDWKGEDIAPPFDVSRLNKMAKQLCLLPQEPFCITRVCLLCLLHKQNLNAQYKRPVDTYD

SEQ ID NO: 34275 - protein, 85 aa, unidentified
  REGION 1..85: note = Description of Unknown:cds_NZ_WFIY01000004.1_cds_WP_155862647.1_432 target sequence
LAKIYTDQDASLDPIKDKKIAVLGYGNQGRAWALNLRDSGLNVIVGLEREGNSWKQAVQDGFQPVHTEDAVKQADIIIFLIPDMV

SEQ ID NO: 34276 - protein, 85 aa, unidentified
  REGION 1..85: note = Description of Unknown:cds_NZ_WFIY01000004.1_cds_WP_155862647.1_432 target sequence
QRYVYREKVQPNMKEGADLVFAHGFNIHYKLIDPPSTSDVYMVAPKGPGATVRDFYTKGGGVPALVAVQQNPSGKAMEKALAIAK

SEQ ID NO: 34277 - protein, 85 aa, unidentified
  REGION 1..85: note = Description of Unknown:cds_NZ_WFIY01000004.1_cds_WP_155862647.1_432 target sequence
GIGATRAGVIETTFKEETETDLFGEQTTLVGGVMELMRSAFRTLVELGYQPEVAYFETINEMKMIVDIIYEKGFTGMLKAVSDTA

SEQ ID NO: 34278 - protein, 84 aa, unidentified
  REGION 1..84: note = Description of Unknown:cds_NZ_WFIY01000004.1_cds_WP_155862647.1_432 target sequence
KAVSDTAKYGGLTVGKFVINDEVRKRMLEAAEKIRSGKFAEEWIEEYNRGSPTIKEGLEEIENSLEEQTRRRLKEIIERGKPKS

SEQ ID NO: 34279 - protein, 85 aa, unidentified
  REGION 1..85: note = Description of Unknown:cds_NZ_WFIY01000004.1_cds_WP_155862647.1_432 target sequence
QGRAWALNLRDSGLNVIVGLEREGNSWKQAVQDGFQPVHTEDAVKQADIIIFLIPDMVQRYVYREKVQPNMKEGADLVFAHGFNI

SEQ ID NO: 34280 - protein, 85 aa, unidentified
  REGION 1..85: note = Description of Unknown:cds_NZ_WFIY01000004.1_cds_WP_155862647.1_432 target sequence
HYKLIDPPSTSDVYMVAPKGPGATVRDFYTKGGGVPALVAVQQNPSGKAMEKALAIAKGIGATRAGVIETTFKEETETDLFGEQT

SEQ ID NO: 34281 - protein, 85 aa, unidentified
  REGION 1..85: note = Description of Unknown:cds_NZ_WFIY01000004.1_cds_WP_155862647.1_432 target sequence
TLVGGVMELMRSAFRTLVELGYQPEVAYFETINEMKMIVDIIYEKGFTGMLKAVSDTAKYGGLTVGKFVINDEVRKRMLEAAEKI

SEQ ID NO: 34282 - protein, 85 aa, unidentified
  REGION 1..85: note = Description of Unknown:cds_NZ_WFIY01000004.1_cds_WP_155863392.1_1368 target sequence
KQVKTEEAVGKILGYDTTYVGKDGATTLLPRGHVITKEDVERLKDSGVYYVWIDEGSDDYVYEWDITPQIAQGICGENISISPGK

SEQ ID NO: 34283 - protein, 85 aa, unidentified
  REGION 1..85: note = Description of Unknown:cds_NZ_WFIY01000004.1_cds_WP_155863392.1_1368 target sequence
QGSTLLFSKVKGVITIDVERLVNFNLNQNVLLITRFNYTPVIEGDLVGVVEVIPFKMTKEEVDKLKNFGKVIDVAPFKKSKIGLV

SEQ ID NO: 34284 - protein, 85 aa, unidentified
  REGION 1..85: note = Description of Unknown:cds_NZ_WFIY01000004.1_cds_WP_155863392.1_1368 target sequence
ITGTEIYEGRKQDQYYPVIKSKADKYGWSIVYKEIVPDDEDKIINAIKKALDNGAEAVIVTGGTSVDPTDKTYIAIRKIADVISY

SEQ ID NO: 34285 - protein, 84 aa, unidentified
  REGION 1..84: note = Description of Unknown:cds_NZ_WFIY01000004.1_cds_WP_155863392.1_1368 target sequence
KIADVISYGLPIKPTTMSIVAVWNSIPIFAISAGGIYYSDYNAIDVMFTRLMAGVIPKKEDIALMGHGGLLPNFQPKMKIRSIH

SEQ ID NO: 34286 - protein, 85 aa, unidentified
  REGION 1..85: note = Description of Unknown:cds_NZ_WFIY01000004.1_cds_WP_155863392.1_1368 target sequence
LLPRGHVITKEDVERLKDSGVYYVWIDEGSDDYVYEWDITPQIAQGICGENISISPGKQGSTLLFSKVKGVITIDVERLVNFNLN

SEQ ID NO: 34287 - protein, 85 aa, unidentified
  REGION 1..85: note = Description of Unknown:cds_NZ_WFIY01000004.1_cds_WP_155863392.1_1368 target sequence
QNVLLITRFNYTPVIEGDLVGVVEVIPFKMTKEEVDKLKNFGKVIDVAPFKKSKIGLVITGTEIYEGRKQDQYYPVIKSKADKYG

SEQ ID NO: 34288 - protein, 85 aa, unidentified
  REGION 1..85: note = Description of Unknown:cds_NZ_WFIY01000004.1_cds_WP_155863392.1_1368 target sequence
WSIVYKEIVPDDEDKIINAIKKALDNGAEAVIVTGGTSVDPTDKTYIAIRKIADVISYGLPIKPTTMSIVAVWNSIPIFAISAGG

SEQ ID NO: 34289 - protein, 85 aa, unidentified
  REGION 1..85: note = Description of Unknown:cds_NZ_WFIY01000004.1_cds_WP_155863930.1_1844 target sequence
KAFIFGIGGGGDVLSALLPYVYYKRLGYEVKLGAVVWERYVEDPLPGPICKEDLVNFEEINDYVYKVCSNSYAIRGGLKVVPQLM

SEQ ID NO: 34290 - protein, 85 aa, unidentified
  REGION 1..85: note = Description of Unknown:cds_NZ_WFIY01000004.1_cds_WP_155863930.1_1844 target sequence
RVLKVVNDYGFAICNKGGDIGMSEALNDLIDKEKFDLVIGVDAGGDVLANGDEKGLGSPLIDSISLASLVSLKVKSILGIIGAGS

SEQ ID NO: 34291 - protein, 85 aa, unidentified
  REGION 1..85: note = Description of Unknown:cds_NZ_WFIY01000004.1_cds_WP_155863930.1_1844 target sequence
DGELEHEYVLRRISEVAKIGGLLDSKGIDNDVANLMGEALKIVNTEASRIPFEAFNGLYGEVKIRNGTRKVYVTPVSSVMFFLDP

SEQ ID NO: 34292 - protein, 84 aa, unidentified
  REGION 1..84: note = Description of Unknown:cds_NZ_WFIY01000004.1_cds_WP_155863930.1_1844 target sequence
SVMFFLDPKKLAQISGIYKIVAGSRSLDEANEKFHRHGIYTEYDFEKDLFEKFGFNSRNATHDELQKIREEGISRVKSGNLFNS

SEQ ID NO: 34293 - protein, 85 aa, unidentified
  REGION 1..85: note = Description of Unknown:cds_NZ_WFIY01000004.1_cds_WP_155863930.1_1844 target sequence
YEVKLGAVVWERYVEDPLPGPICKEDLVNFEEINDYVYKVCSNSYAIRGGLKVVPQLMRVLKVVNDYGFAICNKGGDIGMSEALN

SEQ ID NO: 34294 - protein, 85 aa, unidentified
  REGION 1..85: note = Description of Unknown:cds_NZ_WFIY01000004.1_cds_WP_155863930.1_1844 target sequence
DLIDKEKFDLVIGVDAGGDVLANGDEKGLGSPLIDSISLASLVSLKVKSILGIIGAGSDGELEHEYVLRRISEVAKIGGLLDSKG

SEQ ID NO: 34295 - protein, 85 aa, unidentified
  REGION 1..85: note = Description of Unknown:cds_NZ_WFIY01000004.1_cds_WP_155863930.1_1844 target sequence
IDNDVANLMGEALKIVNTEASRIPFEAFNGLYGEVKIRNGTRKVYVTPVSSVMFFLDPKKLAQISGIYKIVAGSRSLDEANEKFH

SEQ ID NO: 34296 - protein, 85 aa, unidentified
  REGION 1..85: note = Description of Unknown:cds_NZ_WFIY01000004.1_cds_WP_155864057.1_1994 target sequence
RKNYFTLFFIIITIFSFPISFILSLIYGQIYIPFKEIISPHGFYYTILFKIRLPTVIASALIGASLSIAGAIMQLLLRNPLMDPY

SEQ ID NO: 34297 - protein, 85 aa, unidentified
  REGION 1..85: note = Description of Unknown:cds_NZ_WFIY01000004.1_cds_WP_155864057.1_1994 target sequence
VSGTASGGAFGAVLAYFLLAFNLPFSWLVYISPLIAFFFSLLATLITLAIGKKTGVYGIIIGGVVVSYLFSSMLTMLLEAIEYKY

SEQ ID NO: 34298 - protein, 85 aa, unidentified
  REGION 1..85: note = Description of Unknown:cds_NZ_WFIY01000004.1_cds_WP_155864057.1_1994 target sequence
PQVPPPLFWLLGEIQIVGYEFDEVLGALVFLLIILSIIESRKLDLVHISDELSFAKKVNPSRYRMLWIIFLSIIVGLIVSQVGII

SEQ ID NO: 34299 - protein, 84 aa, unidentified
  REGION 1..84: note = Description of Unknown:cds_NZ_WFIY01000004.1_cds_WP_155864057.1_1994 target sequence
IVSQVGIIGFIGIIVPHIVRRTIGGNSSTLIPFSAILGSSIMMLSNIIASGALGFVIPVTAITSVLASPIIIYILVKGRVSEGY

SEQ ID NO: 34300 - protein, 85 aa, unidentified
  REGION 1..85: note = Description of Unknown:cds_NZ_WFIY01000004.1_cds_WP_155864057.1_1994 target sequence
GQIYIPFKEIISPHGFYYTILFKIRLPTVIASALIGASLSIAGAIMQLLLRNPLMDPYVSGTASGGAFGAVLAYFLLAFNLPFSW

SEQ ID NO: 34301 - protein, 85 aa, unidentified
  REGION 1..85: note = Description of Unknown:cds_NZ_WFIY01000004.1_cds_WP_155864057.1_1994 target sequence
LVYISPLIAFFFSLLATLITLAIGKKTGVYGIIIGGVVVSYLFSSMLTMLLEAIEYKYPQVPPPLFWLLGEIQIVGYEFDEVLGA

SEQ ID NO: 34302 - protein, 85 aa, unidentified
  REGION 1..85: note = Description of Unknown:cds_NZ_WFIY01000004.1_cds_WP_155864057.1_1994 target sequence
LVFLLIILSIIESRKLDLVHISDELSFAKKVNPSRYRMLWIIFLSIIVGLIVSQVGIIGFIGIIVPHIVRRTIGGNSSTLIPFSA

SEQ ID NO: 34303 - protein, 85 aa, unidentified
  REGION 1..85: note = Description of Unknown:cds_NZ_WFIY01000004.1_cds_WP_155864134.1_2087 target sequence
KLGSEWFPVIIGTFVLSLISWMNSILFNLPILFDVGKVIYFIALVIFIIIFYGWISRITTNWREDMENLNRISSTAFLGVILFIS

SEQ ID NO: 34304 - protein, 85 aa, unidentified
  REGION 1..85: note = Description of Unknown:cds_NZ_WFIY01000004.1_cds_WP_155864134.1_2087 target sequence
GFFFMTYVEINYEIAYALLVLYFLGYSIVFLVNVYLGYKLFTKDVRQNEISYALLVPAIALSANVILSAPLLPPSLPFISTYFVK

SEQ ID NO: 34305 - protein, 85 aa, unidentified
  REGION 1..85: note = Description of Unknown:cds_NZ_WFIY01000004.1_cds_WP_155864134.1_2087 target sequence
IVYFIMLFSVGITFFQVIFIGSIAFLSHVIYKGSSATVMIPVGAASILAINVLVFPSYNYLHLFYFPPESALTLAIMLWGFEMWN

SEQ ID NO: 34306 - protein, 84 aa, unidentified
  REGION 1..84: note = Description of Unknown:cds_NZ_WFIY01000004.1_cds_WP_155864134.1_2087 target sequence
LWGFEMWNSLVALIIAVKHIKDKPSLTSWAYVFPLAISSFSDFMLYQETSLLVFKATEVAFSLAIILLYAYSLRNTIFVLKNKV

SEQ ID NO: 34307 - protein, 85 aa, unidentified
  REGION 1..85: note = Description of Unknown:cds_NZ_WFIY01000004.1_cds_WP_155864134.1_2087 target sequence
NLPILFDVGKVIYFIALVIFIIIFYGWISRITTNWREDMENLNRISSTAFLGVILFISGFFFMTYVEINYEIAYALLVLYFLGYS

SEQ ID NO: 34308 - protein, 85 aa, unidentified
  REGION 1..85: note = Description of Unknown:cds_NZ_WFIY01000004.1_cds_WP_155864134.1_2087 target sequence
IVFLVNVYLGYKLFTKDVRQNEISYALLVPAIALSANVILSAPLLPPSLPFISTYFVKIVYFIMLFSVGITFFQVIFIGSIAFLS

SEQ ID NO: 34309 - protein, 85 aa, unidentified
  REGION 1..85: note = Description of Unknown:cds_NZ_WFIY01000004.1_cds_WP_155864134.1_2087 target sequence
HVIYKGSSATVMIPVGAASILAINVLVFPSYNYLHLFYFPPESALTLAIMLWGFEMWNSLVALIIAVKHIKDKPSLTSWAYVFPL

SEQ ID NO: 34310 - protein, 85 aa, unidentified
  REGION 1..85: note = Description of Unknown:cds_NC_035460.1_cds_YP_009407955.1_4 target sequence
EVKMFMLIVCVVITKVSSNDLFQTCQTQSSLVFSSYLQEEELYAIKCNANNNDIITWAKAGNYYSLFDWKHVVQTYTTTKKDNIY

SEQ ID NO: 34311 - protein, 85 aa, unidentified
  REGION 1..85: note = Description of Unknown:cds_NC_035460.1_cds_YP_009407955.1_4 target sequence
VDNNNLWFDKIKISDAAVYVCFVKKTDGQCSYQATVIPDVDHKNSPYYETIIKLENDNVNYTQQLDILSFPNVMHTTTWTFNNKP

SEQ ID NO: 34312 - protein, 85 aa, unidentified
  REGION 1..85: note = Description of Unknown:cds_NC_035460.1_cds_YP_009407955.1_4 target sequence
LNSTNDTQLIINSVQKSNDGIYTCNVTVTKNNNNYTSIRNTLLVVKNKTAPGAMFINKFNNVTKVKLNSVKMLFCEVDTKEDLYY

SEQ ID NO: 34313 - protein, 84 aa, unidentified
  REGION 1..84: note = Description of Unknown:cds_NC_035460.1_cds_YP_009407955.1_4 target sequence
DTKEDLYYSQYKFYWKVNNTSLETTHHISNFHQQSSFPVSDTTMMLPLKVYVTNQINNYNVSCWFETTDYNKTISQTTQLFVEK

SEQ ID NO: 34314 - protein, 85 aa, unidentified
  REGION 1..85: note = Description of Unknown:cds_NC_035460.1_cds_YP_009407955.1_4 target sequence
QSSLVFSSYLQEEELYAIKCNANNNDIITWAKAGNYYSLFDWKHVVQTYTTTKKDNIYVDNNNLWFDKIKISDAAVYVCFVKKTD

SEQ ID NO: 34315 - protein, 85 aa, unidentified
  REGION 1..85: note = Description of Unknown:cds_NC_035460.1_cds_YP_009407955.1_4 target sequence
GQCSYQATVIPDVDHKNSPYYETIIKLENDNVNYTQQLDILSFPNVMHTTTWTFNNKPLNSTNDTQLIINSVQKSNDGIYTCNVT

SEQ ID NO: 34316 - protein, 85 aa, unidentified
  REGION 1..85: note = Description of Unknown:cds_NC_035460.1_cds_YP_009407955.1_4 target sequence
VTKNNNNYTSIRNTLLVVKNKTAPGAMFINKFNNVTKVKLNSVKMLFCEVDTKEDLYYSQYKFYWKVNNTSLETTHHISNFHQQS

SEQ ID NO: 34317 - protein, 85 aa, unidentified
  REGION 1..85: note = Description of Unknown:cds_NC_035460.1_cds_YP_009408109.1_158 target sequence
TTIIENNSFDKDIFIFNNSFNDIKIKLSKLDSSTFKQVNNIKYIIKNNKYTNYIFTFIKTTLENTLTFVDEVIIDNYITLNYLNY

SEQ ID NO: 34318 - protein, 85 aa, unidentified
  REGION 1..85: note = Description of Unknown:cds_NC_035460.1_cds_YP_009408109.1_158 target sequence
LDDINYTPFASNFTIYKPYRLILNLDNETIYKKITSINYYNTIIKTNNDCIVNKSVKTIHKNKNNYIRKLIFINVLIKLKSNKIY

SEQ ID NO: 34319 - protein, 85 aa, unidentified
  REGION 1..85: note = Description of Unknown:cds_NC_035460.1_cds_YP_009408109.1_158 target sequence
STLYNNNNINFYSTEEKNQLICYCKIYTDNPHVIVDNFGCFVYKDGSCCLINRYNKLVKKIVIVPNFKEMCFNLFFNYNNNYYLS

SEQ ID NO: 34320 - protein, 84 aa, unidentified
  REGION 1..84: note = Description of Unknown:cds_NC_035460.1_cds_YP_009408109.1_158 target sequence
YNNNYYLSNDDNKNIAWTSLEKNINKWIPNITISEDKLFLQYIIDNVNKNNIDYYILTCRYYDEVNDIILKVNKFFFNVLKKSK

SEQ ID NO: 34321 - protein, 85 aa, unidentified
  REGION 1..85: note = Description of Unknown:cds_NC_035460.1_cds_YP_009408109.1_158 target sequence
SKLDSSTFKQVNNIKYIIKNNKYTNYIFTFIKTTLENTLTFVDEVIIDNYITLNYLNYLDDINYTPFASNFTIYKPYRLILNLDN

SEQ ID NO: 34322 - protein, 85 aa, unidentified
  REGION 1..85: note = Description of Unknown:cds_NC_035460.1_cds_YP_009408109.1_158 target sequence
ETIYKKITSINYYNTIIKTNNDCIVNKSVKTIHKNKNNYIRKLIFINVLIKLKSNKIYSTLYNNNNINFYSTEEKNQLICYCKIY

SEQ ID NO: 34323 - protein, 85 aa, unidentified
  REGION 1..85: note = Description of Unknown:cds_NC_035460.1_cds_YP_009408109.1_158 target sequence
TDNPHVIVDNFGCFVYKDGSCCLINRYNKLVKKIVIVPNFKEMCFNLFFNYNNNYYLSNDDNKNIAWTSLEKNINKWIPNITISE

SEQ ID NO: 34324 - protein, 85 aa, unidentified
  REGION 1..85: note = Description of Unknown:cds_NC_003214.2_cds_NP_445716.1_51 target sequence
VKLKLVEISSIIRGGANIYVNNKLVATTHNNVTPSFILSLIKSIIGVSAIYGGYFEMPSTATAKLFYKNTPVTSAVLSHTSFTEE

SEQ ID NO: 34325 - protein, 85 aa, unidentified
  REGION 1..85: note = Description of Unknown:cds_NC_003214.2_cds_NP_445716.1_51 target sequence
TISGYEHTRIIFTFSDASRTKYSFDSLQLWTASTHALLSHVSDIALTSPLKKNPQDVVQIDWWIEMESGQPFANILSYLQQQQAT

SEQ ID NO: 34326 - protein, 85 aa, unidentified
  REGION 1..85: note = Description of Unknown:cds_NC_003214.2_cds_NP_445716.1_51 target sequence
YCTSSCTIPSVVPNMVYGYSVFNAFFILLALPNVIQVARDIKTPLTNYLVEGLTLASQVKPQGITSVICYDVCNCQMTTNPQQGT

SEQ ID NO: 34327 - protein, 84 aa, unidentified
  REGION 1..84: note = Description of Unknown:cds_NC_003214.2_cds_NP_445716.1_51 target sequence
TNPQQGTVSEFIGDNYVYVAFNFNNPCPSSEYVVPISTLDLGNGYELQFAVAGVPSNGTGASALLIKIPYGKATLKNLFTHQGE

SEQ ID NO: 34328 - protein, 85 aa, unidentified
  REGION 1..85: note = Description of Unknown:cds_NC_003214.2_cds_NP_445716.1_51 target sequence
THNNVTPSFILSLIKSIIGVSAIYGGYFEMPSTATAKLFYKNTPVTSAVLSHTSFTEETISGYEHTRIIFTFSDASRTKYSFDSL

SEQ ID NO: 34329 - protein, 85 aa, unidentified
  REGION 1..85: note = Description of Unknown:cds_NC_003214.2_cds_NP_445716.1_51 target sequence
QLWTASTHALLSHVSDIALTSPLKKNPQDVVQIDWWIEMESGQPFANILSYLQQQQATYCTSSCTIPSVVPNMVYGYSVFNAFFI

SEQ ID NO: 34330 - protein, 85 aa, unidentified
  REGION 1..85: note = Description of Unknown:cds_NC_003214.2_cds_NP_445716.1_51 target sequence
LLALPNVIQVARDIKTPLTNYLVEGLTLASQVKPQGITSVICYDVCNCQMTTNPQQGTVSEFIGDNYVYVAFNFNNPCPSSEYVV

SEQ ID NO: 34331 - protein, 85 aa, unidentified
  REGION 1..85: note = Description of Unknown:hvTR_P03410 target sequence
AHFPGFGQSLLYGYPVYVFGDCVQADWCPVSGGLCSTRLHRHALLATCPEHQLTWDPIDGRVVSSPLQYLIPRLPSFPTQRTSRT

SEQ ID NO: 34332 - protein, 85 aa, unidentified
  REGION 1..85: note = Description of Unknown:hvTR_P03410 target sequence
LKVLTPPTTPVSPKVPPAFFQSMRKHTPYRNGCLEPTLGDQLPSLAFPEPGLRPQNIYTTWGKTVVCLYLYQLSPPMTWPLIPHV

SEQ ID NO: 34333 - protein, 85 aa, unidentified
  REGION 1..85: note = Description of Unknown:hvTR_P03410 target sequence
IFCHPRQLGAFLTKVPLKRLEELLYKMFLHTGTVIVLPEDDLPTTMFQPVRAPCIQTAWCTGLLPYHSILTTPGLIWTFNDGSPM

SEQ ID NO: 34334 - protein, 84 aa, unidentified
  REGION 1..84: note = Description of Unknown:hvTR_P03410 target sequence
WTFNDGSPMISGPYPKAGQPSLVVQSSLLIFEKFETKAFHPSYLLSHQLIQYSSFHNLHLLFDEYTNIPVSILFNKEEADDNGD

SEQ ID NO: 34335 - protein, 85 aa, unidentified
  REGION 1..85: note = Description of Unknown:hvTR_P03410 target sequence
CPVSGGLCSTRLHRHALLATCPEHQLTWDPIDGRVVSSPLQYLIPRLPSFPTQRTSRTLKVLTPPTTPVSPKVPPAFFQSMRKHT

SEQ ID NO: 34336 - protein, 85 aa, unidentified
  REGION 1..85: note = Description of Unknown:hvTR_P03410 target sequence
PYRNGCLEPTLGDQLPSLAFPEPGLRPQNIYTTWGKTVVCLYLYQLSPPMTWPLIPHVIFCHPRQLGAFLTKVPLKRLEELLYKM

SEQ ID NO: 34337 - protein, 85 aa, unidentified
  REGION 1..85: note = Description of Unknown:hvTR_P03410 target sequence
FLHTGTVIVLPEDDLPTTMFQPVRAPCIQTAWCTGLLPYHSILTTPGLIWTFNDGSPMISGPYPKAGQPSLVVQSSLLIFEKFET

SEQ ID NO: 34338 - protein, 85 aa, unidentified
  REGION 1..85: note = Description of Unknown:cds_NZ_WFIY01000004.1_cds_WP_155862338.1_65 target sequence
LVPWSSLYEDPFTQNIISLFLFFYGVALPIGLLLTVLGLKGLMEITRYESGKTFLYKLNPLTKVFFGIVVMSVAAVTIWWIGAIL

SEQ ID NO: 34339 - protein, 85 aa, unidentified
  REGION 1..85: note = Description of Unknown:cds_NZ_WFIY01000004.1_cds_WP_155862338.1_65 target sequence
TLVTMFLYLTLNDGKKKFAYITLLVFITIIGSTWSIAPYTPNSVLQMVFPCPTSSYTVVWVWPSYFVNIMGYEPQLTLQALIYGA

SEQ ID NO: 34340 - protein, 85 aa, unidentified
  REGION 1..85: note = Description of Unknown:cds_NZ_WFIY01000004.1_cds_WP_155862338.1_65 target sequence
QISFRITSVLVSSLLLILTTTTSDIFRMFSKVKVPLAITFSILVGVKTVPRIFEILDTSVKMQFIRGLGYGKPRVLYPLYFFYAG

SEQ ID NO: 34341 - protein, 84 aa, unidentified
  REGION 1..84: note = Description of Unknown:cds_NZ_WFIY01000004.1_cds_WP_155862338.1_65 target sequence
PLYFFYAGLMAIIPSMVYLLRGAKNLAISVDTRGFRAYESRTMLVNLPFTKYDYAMFAVMIGLIILAVLANIYGFGRSIPYVGY

SEQ ID NO: 34342 - protein, 85 aa, unidentified
  REGION 1..85: note = Description of Unknown:cds_NZ_WFIY01000004.1_cds_WP_155862338.1_65 target sequence
LPIGLLLTVLGLKGLMEITRYESGKTFLYKLNPLTKVFFGIVVMSVAAVTIWWIGAILTLVTMFLYLTLNDGKKKFAYITLLVFI

SEQ ID NO: 34343 - protein, 85 aa, unidentified
  REGION 1..85: note = Description of Unknown:cds_NZ_WFIY01000004.1_cds_WP_155862338.1_65 target sequence
TIIGSTWSIAPYTPNSVLQMVFPCPTSSYTVVWVWPSYFVNIMGYEPQLTLQALIYGAQISFRITSVLVSSLLLILTTTTSDIFR

SEQ ID NO: 34344 - protein, 85 aa, unidentified
  REGION 1..85: note = Description of Unknown:cds_NZ_WFIY01000004.1_cds_WP_155862338.1_65 target sequence
MFSKVKVPLAITFSILVGVKTVPRIFEILDTSVKMQFIRGLGYGKPRVLYPLYFFYAGLMAIIPSMVYLLRGAKNLAISVDTRGF

SEQ ID NO: 34345 - protein, 85 aa, unidentified
  REGION 1..85: note = Description of Unknown:cds_NZ_WFIY01000004.1_cds_WP_155864362.1_280 target sequence
LEEFDNSKDIETRKVQKLGSSSLFITLPKKWINKWNIKPGDKILIEISDDGSLKLLAEKIKLLSNRKTIKIDIDAIKQPIPSMVL

SEQ ID NO: 34346 - protein, 85 aa, unidentified
  REGION 1..85: note = Description of Unknown:cds_NZ_WFIY01000004.1_cds_WP_155864362.1_280 target sequence
CLYSLGYDEIVFESKKQIVQKEIEDLVSTTKQMVGAEVTEASENRVKLECLLDAEKVGLESLLRRILNIISKKVDGIISYLSGEQ

SEQ ID NO: 34347 - protein, 85 aa, unidentified
  REGION 1..85: note = Description of Unknown:cds_NZ_WFIY01000004.1_cds_WP_155864362.1_280 target sequence
PKDSELTQQEDLRRVYLMLLRHVIGSKYEVSSNLNKNFLVVMNAVILLNISRLIDRIDSTIKTTKLNEDTPILKEILQKINDLLD

SEQ ID NO: 34348 - protein, 84 aa, unidentified
  REGION 1..84: note = Description of Unknown:cds_NZ_WFIY01000004.1_cds_WP_155864362.1_280 target sequence
QKINDLLDEVIMSILFPSMKRVSNGLNLINQINSLLQAFNDKSSIVYTSVVDIISNLQLALENSSCTLFLEDMPWIERNFNVVK

SEQ ID NO: 34349 - protein, 85 aa, unidentified
  REGION 1..85: note = Description of Unknown:cds_NZ_WFIY01000004.1_cds_WP_155864362.1_280 target sequence
PKKWINKWNIKPGDKILIEISDDGSLKLLAEKIKLLSNRKTIKIDIDAIKQPIPSMVLCLYSLGYDEIVFESKKQIVQKEIEDLV

SEQ ID NO: 34350 - protein, 85 aa, unidentified
  REGION 1..85: note = Description of Unknown:cds_NZ_WFIY01000004.1_cds_WP_155864362.1_280 target sequence
STTKQMVGAEVTEASENRVKLECLLDAEKVGLESLLRRILNIISKKVDGIISYLSGEQPKDSELTQQEDLRRVYLMLLRHVIGSK

SEQ ID NO: 34351 - protein, 85 aa, unidentified
  REGION 1..85: note = Description of Unknown:cds_NZ_WFIY01000004.1_cds_WP_155864362.1_280 target sequence
YEVSSNLNKNFLVVMNAVILLNISRLIDRIDSTIKTTKLNEDTPILKEILQKINDLLDEVIMSILFPSMKRVSNGLNLINQINSL

SEQ ID NO: 34352 - protein, 85 aa, unidentified
  REGION 1..85: note = Description of Unknown:cds_NZ_WFIY01000004.1_cds_371 target sequence
VNYFFDEDKVVEEIKKRNAKKVLLQFPEGLRYFSTEIVSKLEDKIKDVEFIISGEPSWGACDIAEDEAQILGVDLIIHFGHTPYT

SEQ ID NO: 34353 - protein, 85 aa, unidentified
  REGION 1..85: note = Description of Unknown:cds_NZ_WFIY01000004.1_cds_371 target sequence
WYYPKFPTVFIPTESNLKIEEKVIDEAKELAKKYNPRKISLSATIQHAKLLPELKEHFTEFEVEIGKPSNPFMLDGQVLGCDYKA

SEQ ID NO: 34354 - protein, 85 aa, unidentified
  REGION 1..85: note = Description of Unknown:cds_NZ_WFIY01000004.1_cds_371 target sequence
IPLDVDLHINVSGGKFHALGIGLYTGKPVINIDPYSKRAEDITNEVNKILKIRYSKIMQALDAKTWVIIQGIKVGQNRPLMVKYL

SEQ ID NO: 34355 - protein, 84 aa, unidentified
  REGION 1..84: note = Description of Unknown:cds_NZ_WFIY01000004.1_cds_371 target sequence
RPLMVKYLEKKLKEKGYKVYIISNKVLNVDTLRNIDRSYIDAYVVTSCPRLPTDDLYNFEKPVLTPGEARMVINNKLEPYIFPW

SEQ ID NO: 34356 - protein, 85 aa, unidentified
  REGION 1..85: note = Description of Unknown:cds_NZ_WFIY01000004.1_cds_371 target sequence
EGLRYFSTEIVSKLEDKIKDVEFIISGEPSWGACDIAEDEAQILGVDLIIHFGHTPYTWYYPKFPTVFIPTESNLKIEEKVIDEA

SEQ ID NO: 34357 - protein, 85 aa, unidentified
  REGION 1..85: note = Description of Unknown:cds_NZ_WFIY01000004.1_cds_371 target sequence
KELAKKYNPRKISLSATIQHAKLLPELKEHFTEFEVEIGKPSNPFMLDGQVLGCDYKAIPLDVDLHINVSGGKFHALGIGLYTGK

SEQ ID NO: 34358 - protein, 85 aa, unidentified
  REGION 1..85: note = Description of Unknown:cds_NZ_WFIY01000004.1_cds_371 target sequence
PVINIDPYSKRAEDITNEVNKILKIRYSKIMQALDAKTWVIIQGIKVGQNRPLMVKYLEKKLKEKGYKVYIISNKVLNVDTLRNI

SEQ ID NO: 34359 - protein, 85 aa, unidentified
  REGION 1..85: note = Description of Unknown:cds_NZ_WFIY01000004.1_cds_WP_155863028.1_914 target sequence
KVLGIESTAHTFGVGIAEDKPPFILANIRDTYIPKSGGMKPGDLARHHATVAPDILAKALEEAKTTIEDIDGIAVALGPGMGPAL

SEQ ID NO: 34360 - protein, 85 aa, unidentified
  REGION 1..85: note = Description of Unknown:cds_NZ_WFIY01000004.1_cds_WP_155863028.1_914 target sequence
RVGAVVARALALKYNKKLIPVNHGIGHIEIGYLTTGAKDPLILYLSGGNTIITTFYEGKFRIFGETLDIALGNMMDVFVREVNLA

SEQ ID NO: 34361 - protein, 85 aa, unidentified
  REGION 1..85: note = Description of Unknown:cds_NZ_WFIY01000004.1_cds_WP_155863028.1_914 target sequence
PPYVVNGKHVIDICAENARDLIDLPYVVKGQDMSFSGLLTAALRAAKKYPIPDICYSIRENAFDMLLEATERALALTEKKEIMVV

SEQ ID NO: 34362 - protein, 84 aa, unidentified
  REGION 1..84: note = Description of Unknown:cds_NZ_WFIY01000004.1_cds_WP_155863028.1_914 target sequence
TEKKEIMVVGGVAASVSLRSKLNLLAKDWNVEIKIVPSQFSGDNGAMIAYAGLLALKSGVTIPIEESVVKPRWRIDEVDIPWRN

SEQ ID NO: 34363 - protein, 85 aa, unidentified
  REGION 1..85: note = Description of Unknown:cds_NZ_WFIY01000004.1_cds_WP_155863028.1_914 target sequence
IRDTYIPKSGGMKPGDLARHHATVAPDILAKALEEAKTTIEDIDGIAVALGPGMGPALRVGAVVARALALKYNKKLIPVNHGIGH

SEQ ID NO: 34364 - protein, 85 aa, unidentified
  REGION 1..85: note = Description of Unknown:cds_NZ_WFIY01000004.1_cds_WP_155863028.1_914 target sequence
IEIGYLTTGAKDPLILYLSGGNTIITTFYEGKFRIFGETLDIALGNMMDVFVREVNLAPPYVVNGKHVIDICAENARDLIDLPYV

SEQ ID NO: 34365 - protein, 85 aa, unidentified
  REGION 1..85: note = Description of Unknown:cds_NZ_WFIY01000004.1_cds_WP_155863028.1_914 target sequence
VKGQDMSFSGLLTAALRAAKKYPIPDICYSIRENAFDMLLEATERALALTEKKEIMVVGGVAASVSLRSKLNLLAKDWNVEIKIV

SEQ ID NO: 34366 - protein, 85 aa, unidentified
  REGION 1..85: note = Description of Unknown:cds_NZ_WFIY01000004.1_cds_WP_155864240.1_2215 target sequence
RALQFDKSGIENLKLVELPNPEVGAHDVRIKVKFAGVNPIDYFVVNYLPVKPMPHIPGAEVYGEIESVGDHVKSLKPGDRVIVYN

SEQ ID NO: 34367 - protein, 85 aa, unidentified
  REGION 1..85: note = Description of Unknown:cds_NZ_WFIY01000004.1_cds_WP_155864240.1_2215 target sequence
RLFDGTCDMCLSSMEMLCRNGGIMSVITNGGYAEYLTVPEKNVFKVPDNMSEELASSLPVAGLTAYHALKEAGVNSNDTVVVFGA

SEQ ID NO: 34368 - protein, 85 aa, unidentified
  REGION 1..85: note = Description of Unknown:cds_NZ_WFIY01000004.1_cds_WP_155864240.1_2215 target sequence
SGNTGQFAVQFAKKMGARVIAVSKKVWLKDFGADYVTTYDKVVEDVSRVTGGKMASVVINSVGSSVWDLSLSSLGVNGRLVFFGG

SEQ ID NO: 34369 - protein, 84 aa, unidentified
  REGION 1..84: note = Description of Unknown:cds_NZ_WFIY01000004.1_cds_WP_155864240.1_2215 target sequence
NGRLVFFGGIAGSEVKLDLSQIYGKHVKIIGTTGGRRIELMEILESCNDCKVKVWKTFSLEEGKDALKALFDPTRDGRILLKIQ

SEQ ID NO: 34370 - protein, 85 aa, unidentified
  REGION 1..85: note = Description of Unknown:cds_NZ_WFIY01000004.1_cds_WP_155864240.1_2215 target sequence
VRIKVKFAGVNPIDYFVVNYLPVKPMPHIPGAEVYGEIESVGDHVKSLKPGDRVIVYNRLFDGTCDMCLSSMEMLCRNGGIMSVI

SEQ ID NO: 34371 - protein, 85 aa, unidentified
  REGION 1..85: note = Description of Unknown:cds_NZ_WFIY01000004.1_cds_WP_155864240.1_2215 target sequence
TNGGYAEYLTVPEKNVFKVPDNMSEELASSLPVAGLTAYHALKEAGVNSNDTVVVFGASGNTGQFAVQFAKKMGARVIAVSKKVW

SEQ ID NO: 34372 - protein, 85 aa, unidentified
  REGION 1..85: note = Description of Unknown:cds_NZ_WFIY01000004.1_cds_WP_155864240.1_2215 target sequence
LKDFGADYVTTYDKVVEDVSRVTGGKMASVVINSVGSSVWDLSLSSLGVNGRLVFFGGIAGSEVKLDLSQIYGKHVKIIGTTGGR

SEQ ID NO: 34373 - protein, 85 aa, unidentified
  REGION 1..85: note = Description of Unknown:cds_NC_029316.1_cds_YP_009230294.1_41 target sequence
EVKIGDFVIQDRDPDKGFLYVDYENAMGGKLLRYLDYLYTSLRSGELSILITPGFVTKNGEIVPSLTPFVRMCFQGYRKRIQVQR

SEQ ID NO: 34374 - protein, 85 aa, unidentified
  REGION 1..85: note = Description of Unknown:cds_NC_029316.1_cds_YP_009230294.1_41 target sequence
LVVVVGGQGVGKSVLAIKAGANIYALNDMNENLPVEERFINYIITLYHIGIDPIELNNFIEFLKEHGLRSPYYIIDDAQLLFSTN

SEQ ID NO: 34375 - protein, 85 aa, unidentified
  REGION 1..85: note = Description of Unknown:cds_NC_029316.1_cds_YP_009230294.1_41 target sequence
VYFTNRDLYVHTSNLLTLIRSNIMTLVMTLPTDIAVLNSTIKRMEGIILTKVNDIDRFTGIALGVSSYDYSRYRMYTKTSRNRFV

SEQ ID NO: 34376 - protein, 84 aa, unidentified
  REGION 1..84: note = Description of Unknown:cds_NC_029316.1_cds_YP_009230294.1_41 target sequence
TKTSRNRFVSYYVEYNELDANGNVVPYKSREGIFSKYLPDNIYNIYNTIRENYITLIQSLSRKRINVDKSREGGDGESFIDDKE

SEQ ID NO: 34377 - protein, 85 aa, unidentified
  REGION 1..85: note = Description of Unknown:cds_NC_029316.1_cds_YP_009230294.1_41 target sequence
GGKLLRYLDYLYTSLRSGELSILITPGFVTKNGEIVPSLTPFVRMCFQGYRKRIQVQRLVVVVGGQGVGKSVLAIKAGANIYALN

SEQ ID NO: 34378 - protein, 85 aa, unidentified
  REGION 1..85: note = Description of Unknown:cds_NC_029316.1_cds_YP_009230294.1_41 target sequence
DMNENLPVEERFINYIITLYHIGIDPIELNNFIEFLKEHGLRSPYYIIDDAQLLFSTNVYFTNRDLYVHTSNLLTLIRSNIMTLV

SEQ ID NO: 34379 - protein, 85 aa, unidentified
  REGION 1..85: note = Description of Unknown:cds_NC_029316.1_cds_YP_009230294.1_41 target sequence
MTLPTDIAVLNSTIKRMEGIILTKVNDIDRFTGIALGVSSYDYSRYRMYTKTSRNRFVSYYVEYNELDANGNVVPYKSREGIFSK

SEQ ID NO: 34380 - protein, 85 aa, unidentified
  REGION 1..85: note = Description of Unknown:cds_NZ_WFIY01000004.1_cds_WP_155862603.1_380 target sequence
MLFILRNDSSTLREKIKESSASYKFLDLYGKKLALVWPDEEAEKINDDSIEMKVKTKKPYILASNEWKKEPTKVSVKDVEIGGEK

SEQ ID NO: 34381 - protein, 85 aa, unidentified
  REGION 1..85: note = Description of Unknown:cds_NZ_WFIY01000004.1_cds_WP_155862603.1_380 target sequence
IVVAAGPCAVESEEQVETVAKAVRRAGASLLRGGAFKPRTSPYSFQGLGEGGLKILRKVSDEVGLPIVTEIMDARDLPLFKQYDI

SEQ ID NO: 34382 - protein, 85 aa, unidentified
  REGION 1..85: note = Description of Unknown:cds_NZ_WFIY01000004.1_cds_WP_155862603.1_380 target sequence
DMLQIGARNAQNFTLLKEVGKFGKPVLLKRGMANTVEEWLQSAEYLLSEGNGNVVLCERGIRTFEKATRFTLDIGGMVAAKMMTH

SEQ ID NO: 34383 - protein, 84 aa, unidentified
  REGION 1..84: note = Description of Unknown:cds_NZ_WFIY01000004.1_cds_WP_155862603.1_380 target sequence
GMVAAKMMTHLPMCADPSHPAGKRELVHSLALASVAAGADMLIIEVHPNPEKALSDSEQQLTPESFEVLMNRIKALANALGRSA

SEQ ID NO: 34384 - protein, 85 aa, unidentified
  REGION 1..85: note = Description of Unknown:cds_NZ_WFIY01000004.1_cds_WP_155862603.1_380 target sequence
LYGKKLALVWPDEEAEKINDDSIEMKVKTKKPYILASNEWKKEPTKVSVKDVEIGGEKIVVAAGPCAVESEEQVETVAKAVRRAG

SEQ ID NO: 34385 - protein, 85 aa, unidentified
  REGION 1..85: note = Description of Unknown:cds_NZ_WFIY01000004.1_cds_WP_155862603.1_380 target sequence
ASLLRGGAFKPRTSPYSFQGLGEGGLKILRKVSDEVGLPIVTEIMDARDLPLFKQYDIDMLQIGARNAQNFTLLKEVGKFGKPVL

SEQ ID NO: 34386 - protein, 85 aa, unidentified
  REGION 1..85: note = Description of Unknown:cds_NZ_WFIY01000004.1_cds_WP_155862603.1_380 target sequence
LKRGMANTVEEWLQSAEYLLSEGNGNVVLCERGIRTFEKATRFTLDIGGMVAAKMMTHLPMCADPSHPAGKRELVHSLALASVAA

SEQ ID NO: 34387 - protein, 85 aa, unidentified
  REGION 1..85: note = Description of Unknown:cds_NZ_WFIY01000004.1_cds_WP_155864414.1_1214 target sequence
LYYLQRFGDLNPKIISAISRIRDADKLIQWLRENYHYRLAPIPRYEALGLKKYYVTIYSNYYRLPLLDFYNVFDGITTFIFRDIN

SEQ ID NO: 34388 - protein, 85 aa, unidentified
  REGION 1..85: note = Description of Unknown:cds_NZ_WFIY01000004.1_cds_WP_155864414.1_1214 target sequence
NPLVINMTIYFTSTSFDKVLDYLQDEGIIFHYDVHKVDEEKSYPIEYSTFNFNKGVFEGLLSSSREPFELPDLTEGFSPDDLDVK

SEQ ID NO: 34389 - protein, 85 aa, unidentified
  REGION 1..85: note = Description of Unknown:cds_NZ_WFIY01000004.1_cds_WP_155864414.1_1214 target sequence
ILGKKQARADISLKDLSSLLGVSFKDTLYHTQAHVIGKGLIKFYNVYLYKPDFRLEVNFKEEEVLEELTRIPSMYHVYKLDDKSY

SEQ ID NO: 34390 - protein, 84 aa, unidentified
  REGION 1..84: note = Description of Unknown:cds_NZ_WFIY01000004.1_cds_WP_155864414.1_1214 target sequence
VYKLDDKSYVAHILDSSSTLLSYLKFISSLKEKDTIETYLHPYDQQYMITASIPYEHFEKGRWNFNTEVMILRAEKLVKLLNNE

SEQ ID NO: 34391 - protein, 85 aa, unidentified
  REGION 1..85: note = Description of Unknown:cds_NZ_WFIY01000004.1_cds_WP_155864414.1_1214 target sequence
IQWLRENYHYRLAPIPRYEALGLKKYYVTIYSNYYRLPLLDFYNVFDGITTFIFRDINNPLVINMTIYFTSTSFDKVLDYLQDEG

SEQ ID NO: 34392 - protein, 85 aa, unidentified
  REGION 1..85: note = Description of Unknown:cds_NZ_WFIY01000004.1_cds_WP_155864414.1_1214 target sequence
IIFHYDVHKVDEEKSYPIEYSTFNFNKGVFEGLLSSSREPFELPDLTEGFSPDDLDVKILGKKQARADISLKDLSSLLGVSFKDT

SEQ ID NO: 34393 - protein, 85 aa, unidentified
  REGION 1..85: note = Description of Unknown:cds_NZ_WFIY01000004.1_cds_WP_155864414.1_1214 target sequence
LYHTQAHVIGKGLIKFYNVYLYKPDFRLEVNFKEEEVLEELTRIPSMYHVYKLDDKSYVAHILDSSSTLLSYLKFISSLKEKDTI

SEQ ID NO: 34394 - protein, 85 aa, unidentified
  REGION 1..85: note = Description of Unknown:cds_NZ_WFIY01000004.1_cds_WP_155863745.1_1616 target sequence
RNVIPTAKAIIKDNLSNKATIFFILIFPLFLTIVFAFGFAGMNHVTQVVATNSEQLAKYLNSTQLFIGITCNNEKEAILHNYIYV

SEQ ID NO: 34395 - protein, 85 aa, unidentified
  REGION 1..85: note = Description of Unknown:cds_NZ_WFIY01000004.1_cds_WP_155863745.1_1616 target sequence
NVQNNSLFNVTYPKDSKYLIPSLEAILTEYSTHDSAKVTTTQLPGFTYVDYILSGMIGVIALSNGVFGVTGVGAGYYRDKLVERL

SEQ ID NO: 34396 - protein, 85 aa, unidentified
  REGION 1..85: note = Description of Unknown:cds_NZ_WFIY01000004.1_cds_WP_155863745.1_1616 target sequence
AASPLKSYEWVISLMLYEIIITFISIVPILLLGVILGFIPIIGILFVIFLIIGTLMFSGLGAIIFGLTPKDKLFIANIAANVVTL

SEQ ID NO: 34397 - protein, 84 aa, unidentified
  REGION 1..84: note = Description of Unknown:cds_NZ_WFIY01000004.1_cds_WP_155863745.1_1616 target sequence
ANIAANVVTLPLTFLSNAFFYVSSFPSFIEILINYQPVSVLNDIIRQVTVYQQLPQPWEIIYIIIFTVLSVFLGGKLLKLREVD

SEQ ID NO: 34398 - protein, 85 aa, unidentified
  REGION 1..85: note = Description of Unknown:cds_NZ_WFIY01000004.1_cds_WP_155863745.1_1616 target sequence
PLFLTIVFAFGFAGMNHVTQVVATNSEQLAKYLNSTQLFIGITCNNEKEAILHNYIYVNVQNNSLFNVTYPKDSKYLIPSLEAIL

SEQ ID NO: 34399 - protein, 85 aa, unidentified
  REGION 1..85: note = Description of Unknown:cds_NZ_WFIY01000004.1_cds_WP_155863745.1_1616 target sequence
TEYSTHDSAKVTTTQLPGFTYVDYILSGMIGVIALSNGVFGVTGVGAGYYRDKLVERLAASPLKSYEWVISLMLYEIIITFISIV

SEQ ID NO: 34400 - protein, 85 aa, unidentified
  REGION 1..85: note = Description of Unknown:cds_NZ_WFIY01000004.1_cds_WP_155863745.1_1616 target sequence
PILLLGVILGFIPIIGILFVIFLIIGTLMFSGLGAIIFGLTPKDKLFIANIAANVVTLPLTFLSNAFFYVSSFPSFIEILINYQP

SEQ ID NO: 34401 - protein, 85 aa, unidentified
  REGION 1..85: note = Description of Unknown:cds_NC_009884.1_cds_YP_001496958.1_33 target sequence
IISKQCSNCSFDVVATQFVQWLQSYRQQQQQSGNHHVVDIILQKIGCGGDIEFIDINLWWSQCRTIDEGDAPHSVVRGDSPYAYI

SEQ ID NO: 34402 - protein, 85 aa, unidentified
  REGION 1..85: note = Description of Unknown:cds_NC_009884.1_cds_YP_001496958.1_33 target sequence
TNVSDNEISDHLLVTTSQYNASMFRKLFRHIEVVPHAYDPLEVSVVDKVKEKKFDVITIGYDTADDHKGLTVARKVALDLSLRYV

SEQ ID NO: 34403 - protein, 85 aa, unidentified
  REGION 1..85: note = Description of Unknown:cds_NC_009884.1_cds_YP_001496958.1_33 target sequence
EVSNQCDNVGVNASTSQTQIQLADNMICIPFMTLTREDVYRLIAQSRFYLALSHTEGFGLPVLESMVAGTVPIYVDGHAFHEYAK

SEQ ID NO: 34404 - protein, 84 aa, unidentified
  REGION 1..84: note = Description of Unknown:cds_NC_009884.1_cds_YP_001496958.1_33 target sequence
DGHAFHEYAKGIPIPAYSDKRVDWYNYEYEDVVEVVKSAMSTSQSEYNELSMRVKEESRHYFHPDVVYRKLINIVNKNVKSNLF

SEQ ID NO: 34405 - protein, 85 aa, unidentified
  REGION 1..85: note = Description of Unknown:cds_NC_009884.1_cds_YP_001496958.1_33 target sequence
QQQQSGNHHVVDIILQKIGCGGDIEFIDINLWWSQCRTIDEGDAPHSVVRGDSPYAYITNVSDNEISDHLLVTTSQYNASMFRKL

SEQ ID NO: 34406 - protein, 85 aa, unidentified
  REGION 1..85: note = Description of Unknown:cds_NC_009884.1_cds_YP_001496958.1_33 target sequence
FRHIEVVPHAYDPLEVSVVDKVKEKKFDVITIGYDTADDHKGLTVARKVALDLSLRYVEVSNQCDNVGVNASTSQTQIQLADNMI

SEQ ID NO: 34407 - protein, 85 aa, unidentified
  REGION 1..85: note = Description of Unknown:cds_NC_009884.1_cds_YP_001496958.1_33 target sequence
CIPFMTLTREDVYRLIAQSRFYLALSHTEGFGLPVLESMVAGTVPIYVDGHAFHEYAKGIPIPAYSDKRVDWYNYEYEDVVEVVK

SEQ ID NO: 34408 - protein, 85 aa, unidentified
  REGION 1..85: note = Description of Unknown:cds_NC_007409.1_cds_YP_319865.1_34 target sequence
LPSFVFKSRKLKHTTMQKNYDPRIAQLRGFASLSVAFYHLWTLQILPLSIFRPGWLGVPLFLELSIFLLLQRLDVNSDMKKYFAK

SEQ ID NO: 34409 - protein, 85 aa, unidentified
  REGION 1..85: note = Description of Unknown:cds_NC_007409.1_cds_YP_319865.1_34 target sequence
RIKRIYPLYYLSATAVFLVELYYFHDHVTIYELFLHYVFLSSVLAPFSFSYVFWTLQLEEWMYLFIPLIHRLSDMRKFLLAVGLI

SEQ ID NO: 34410 - protein, 85 aa, unidentified
  REGION 1..85: note = Description of Unknown:cds_NC_007409.1_cds_YP_319865.1_34 target sequence
LSSFIYGTFIVTLPYNEFHLLYFMPPFWLSAYGWGIIAYILYKNNTKLWSTRSAISFLFLIYVMYLLAPTDNEFLYELTTRVVVY

SEQ ID NO: 34411 - protein, 84 aa, unidentified
  REGION 1..84: note = Description of Unknown:cds_NC_007409.1_cds_YP_319865.1_34 target sequence
ELTTRVVVYNMVLVVFMLIILNPPKVLSKVSVFLGEISYGIYVWHLLMEELLGVVGILLGVAVAFATEFPLRRKEILLRLRQLG

SEQ ID NO: 34412 - protein, 85 aa, unidentified
  REGION 1..85: note = Description of Unknown:cds_NC_007409.1_cds_YP_319865.1_34 target sequence
RGFASLSVAFYHLWTLQILPLSIFRPGWLGVPLFLELSIFLLLQRLDVNSDMKKYFAKRIKRIYPLYYLSATAVFLVELYYFHDH

SEQ ID NO: 34413 - protein, 85 aa, unidentified
  REGION 1..85: note = Description of Unknown:cds_NC_007409.1_cds_YP_319865.1_34 target sequence
VTIYELFLHYVFLSSVLAPFSFSYVFWTLQLEEWMYLFIPLIHRLSDMRKFLLAVGLILSSFIYGTFIVTLPYNEFHLLYFMPPF

SEQ ID NO: 34414 - protein, 85 aa, unidentified
  REGION 1..85: note = Description of Unknown:cds_NC_007409.1_cds_YP_319865.1_34 target sequence
WLSAYGWGIIAYILYKNNTKLWSTRSAISFLFLIYVMYLLAPTDNEFLYELTTRVVVYNMVLVVFMLIILNPPKVLSKVSVFLGE

SEQ ID NO: 34415 - protein, 85 aa, unidentified
  REGION 1..85: note = Description of Unknown:hvTR_P35259 target sequence
WDSSYMQQVSEGLMTGKVPIDQVFGANPLEKLYKRRKPKGTVGLQCSPCLMSKATSTDDIIWDQLIVKRTLADLLIPINRQISDI

SEQ ID NO: 34416 - protein, 85 aa, unidentified
  REGION 1..85: note = Description of Unknown:hvTR_P35259 target sequence
QSTLSEVTTRVHEIERQLHEITPVLKMGRTLEAISKGMSEMLAKYDHLVISTGRTTAPAAAFDAYLNEHGVPPPQPAIFKDLGVA

SEQ ID NO: 34417 - protein, 85 aa, unidentified
  REGION 1..85: note = Description of Unknown:hvTR_P35259 target sequence
QQACSKGTMVKNATTDAADKMSKVLELSEETFSKPNLSAKDLALLLFTHLPGNNTPFHILAQVLSKIAYKSGKSGAFLDAFHQIL

SEQ ID NO: 34418 - protein, 84 aa, unidentified
  REGION 1..84: note = Description of Unknown:hvTR_P35259 target sequence
GAFLDAFHQILSEGENAQAALTRLSRTFDAFLGVVPPVIRVKNFQTVPRPSQKSLRAVPPNPTIDKGWVCVYSSEQGETRALKI

SEQ ID NO: 34419 - protein, 85 aa, unidentified
  REGION 1..85: note = Description of Unknown:hvTR_P35259 target sequence
PLEKLYKRRKPKGTVGLQCSPCLMSKATSTDDIIWDQLIVKRTLADLLIPINRQISDIQSTLSEVTTRVHEIERQLHEITPVLKM

SEQ ID NO: 34420 - protein, 85 aa, unidentified
  REGION 1..85: note = Description of Unknown:hvTR_P35259 target sequence
GRTLEAISKGMSEMLAKYDHLVISTGRTTAPAAAFDAYLNEHGVPPPQPAIFKDLGVAQQACSKGTMVKNATTDAADKMSKVLEL

SEQ ID NO: 34421 - protein, 85 aa, unidentified
  REGION 1..85: note = Description of Unknown:hvTR_P35259 target sequence
SEETFSKPNLSAKDLALLLFTHLPGNNTPFHILAQVLSKIAYKSGKSGAFLDAFHQILSEGENAQAALTRLSRTFDAFLGVVPPV

SEQ ID NO: 34422 - protein, 85 aa, unidentified
  REGION 1..85: note = Description of Unknown:hvTR_C7B270 target sequence
WDSSYMQQVSEGLMTGKVPIDQVFGTNPLEKLYKRRKPKGTVGLQCSPCLISKSTSTDDIVWDQLIVKKTLADLLIPINRQMSDI

SEQ ID NO: 34423 - protein, 85 aa, unidentified
  REGION 1..85: note = Description of Unknown:hvTR_C7B270 target sequence
QSTLSEMTTKVHEIERQLHDITPVVKMGKTLEAISKGMSEMLAKYDHLVISTGRTTAPAAAFDAYLNEHGVPPPQPAIFKDLGVA

SEQ ID NO: 34424 - protein, 85 aa, unidentified
  REGION 1..85: note = Description of Unknown:hvTR_C7B270 target sequence
QQAYSQKTMVKNQTTDAADKMSKVLELSEETFSKPNLSAKDLALLLFTHLPGNNTPFHILAQVLSKIAYKSGKSGAFLDAFHQIL

SEQ ID NO: 34425 - protein, 84 aa, unidentified
  REGION 1..84: note = Description of Unknown:hvTR_C7B270 target sequence
GAFLDAFHQILSEGENAQAALTRLSRTFDAFLGAVPPVIKVKNFQTVPRPCQKSLRAVPPNPTIDKGWVCVYSSEQGETRALKI

SEQ ID NO: 34426 - protein, 85 aa, unidentified
  REGION 1..85: note = Description of Unknown:hvTR_C7B270 target sequence
PLEKLYKRRKPKGTVGLQCSPCLISKSTSTDDIVWDQLIVKKTLADLLIPINRQMSDIQSTLSEMTTKVHEIERQLHDITPVVKM

SEQ ID NO: 34427 - protein, 85 aa, unidentified
  REGION 1..85: note = Description of Unknown:hvTR_C7B270 target sequence
GKTLEAISKGMSEMLAKYDHLVISTGRTTAPAAAFDAYLNEHGVPPPQPAIFKDLGVAQQAYSQKTMVKNQTTDAADKMSKVLEL

SEQ ID NO: 34428 - protein, 85 aa, unidentified
  REGION 1..85: note = Description of Unknown:hvTR_C7B270 target sequence
SEETFSKPNLSAKDLALLLFTHLPGNNTPFHILAQVLSKIAYKSGKSGAFLDAFHQILSEGENAQAALTRLSRTFDAFLGAVPPV

SEQ ID NO: 34429 - protein, 85 aa, unidentified
  REGION 1..85: note = Description of Unknown:hvTR_Q8JPY0 target sequence
YNNKLKVCSGPETTGWISEQLMTGKIPVTDIFIDIDNKPDQMEVRLKPSSRSSTRTCTSSSQTEVNYVPLLKKVEDTLTMLVNAT

SEQ ID NO: 34430 - protein, 85 aa, unidentified
  REGION 1..85: note = Description of Unknown:hvTR_Q8JPY0 target sequence
SRQNAAIEALENRLSTLESSLKPIQDMGKVISSLNRSCAEMVAKYDLLVMTTGRATSTAAAVDAYWKEHKQPPPGPALYEENALK

SEQ ID NO: 34431 - protein, 85 aa, unidentified
  REGION 1..85: note = Description of Unknown:hvTR_Q8JPY0 target sequence
GKIDDPNSYVPDAVQEAYKNLDSTSTLTEENFGKPYISAKDLKEIMYDHLPGFGTAFHQLVQVICKIGKDNNLLDTIHAEFQASL

SEQ ID NO: 34432 - protein, 84 aa, unidentified
  REGION 1..84: note = Description of Unknown:hvTR_Q8JPY0 target sequence
DTIHAEFQASLADGDSPQCALIQITKRVPIFQDVPPPIIHIRSRGDIPRACQKSLRPAPPSPKIDRGWVCLFKMQDGKTLGLKI

SEQ ID NO: 34433 - protein, 85 aa, unidentified
  REGION 1..85: note = Description of Unknown:hvTR_Q8JPY0 target sequence
VTDIFIDIDNKPDQMEVRLKPSSRSSTRTCTSSSQTEVNYVPLLKKVEDTLTMLVNATSRQNAAIEALENRLSTLESSLKPIQDM

SEQ ID NO: 34434 - protein, 85 aa, unidentified
  REGION 1..85: note = Description of Unknown:hvTR_Q8JPY0 target sequence
GKVISSLNRSCAEMVAKYDLLVMTTGRATSTAAAVDAYWKEHKQPPPGPALYEENALKGKIDDPNSYVPDAVQEAYKNLDSTSTL

SEQ ID NO: 34435 - protein, 85 aa, unidentified
  REGION 1..85: note = Description of Unknown:hvTR_Q8JPY0 target sequence
TEENFGKPYISAKDLKEIMYDHLPGFGTAFHQLVQVICKIGKDNNLLDTIHAEFQASLADGDSPQCALIQITKRVPIFQDVPPPI

SEQ ID NO: 34436 - protein, 85 aa, unidentified
  REGION 1..85: note = Description of Unknown:hvTR_Q5XX07 target sequence
QQDRTYRHHGPEVSGWFSEQLMTGKIPLTEVFVDVENKPSPAPITIISKNPKTTRKSDKQVQTDDASSLLTEEVKAAINSVISAV

SEQ ID NO: 34437 - protein, 85 aa, unidentified
  REGION 1..85: note = Description of Unknown:hvTR_Q5XX07 target sequence
RRQTNAIESLEGRVTTLEASLKPVQDMAKTISSLNRSCAEMVAKYDLLVMTTGRATATAAATEAYWNEHGQAPPGPSLYEDDAIK

SEQ ID NO: 34438 - protein, 85 aa, unidentified
  REGION 1..85: note = Description of Unknown:hvTR_Q5XX07 target sequence
AKLKDPNGKVPESVKQAYINLDSTSALNEENFGRPYISAKDLKEIIYDHLPGFGTAFHQLVQVICKIGKDNNILDIIHAEFQASL

SEQ ID NO: 34439 - protein, 84 aa, unidentified
  REGION 1..84: note = Description of Unknown:hvTR_Q5XX07 target sequence
DIIHAEFQASLAEGDSPQCALIQITKRIPAFQDASPPIVHIKSRGDIPKACQKSLRPVPPSPKIDRGWVCIFQFQDGKALGLKI

SEQ ID NO: 34440 - protein, 85 aa, unidentified
  REGION 1..85: note = Description of Unknown:hvTR_Q5XX07 target sequence
LTEVFVDVENKPSPAPITIISKNPKTTRKSDKQVQTDDASSLLTEEVKAAINSVISAVRRQTNAIESLEGRVTTLEASLKPVQDM

SEQ ID NO: 34441 - protein, 85 aa, unidentified
  REGION 1..85: note = Description of Unknown:hvTR_Q5XX07 target sequence
AKTISSLNRSCAEMVAKYDLLVMTTGRATATAAATEAYWNEHGQAPPGPSLYEDDAIKAKLKDPNGKVPESVKQAYINLDSTSAL

SEQ ID NO: 34442 - protein, 85 aa, unidentified
  REGION 1..85: note = Description of Unknown:hvTR_Q5XX07 target sequence
NEENFGRPYISAKDLKEIIYDHLPGFGTAFHQLVQVICKIGKDNNILDIIHAEFQASLAEGDSPQCALIQITKRIPAFQDASPPI

SEQ ID NO: 34443 - protein, 85 aa, unidentified; identical to SEQ ID NO: 34417
  REGION 1..85: note = Description of Unknown:cds_NC_001608.3_cds_YP_001531154.1_2 target sequence

SEQ ID NO: 34444 - protein, 84 aa, unidentified
  REGION 1..84: note = Description of Unknown:cds_NC_001608.3_cds_YP_001531154.1_2 target sequence
GAFLDAFHQILSEGENAQAALTRLSRTFDAFLGVVPPVIRVKNFQTVPRPCQKSLRAVPPNPTIDKGWVCVYSSEQGETRALKI

SEQ ID NO: 34445 - protein, 85 aa, unidentified; identical to SEQ ID NO: 34420
  REGION 1..85: note = Description of Unknown:cds_NC_001608.3_cds_YP_001531154.1_2 target sequence

SEQ ID NO: 34446 - protein, 85 aa, unidentified
  REGION 1..85: note = Description of Unknown:cds_NZ_WFIY01000004.1_cds_WP_155862682.1_479 target sequence
LNPFEKLNCPPKVEDLIKIVLGRLPKISGNSIKDREIRRLIYYDEQVKRYLNFVNSFPRIDNLHPFYKEALEITAGKSVDNIKIC

SEQ ID NO: 34447 - protein, 85 aa, unidentified
  REGION 1..85: note = Description of Unknown:cds_NZ_WFIY01000004.1_cds_WP_155862682.1_479 target sequence
LSIINKTSLTASSILKRYISEIRKSDETLANKLMRQAFGRVSSLLRRRKDCIDWIIDVTKSMKKIKSIDPEMPTVIIAGSPNVGK

SEQ ID NO: 34448 - protein, 85 aa, unidentified
  REGION 1..85: note = Description of Unknown:cds_NZ_WFIY01000004.1_cds_WP_155862682.1_479 target sequence
STLVSKISSAKPEIANYPFTTKEIHVGHFDINGVKVQVIDTPGILDRPMKERNQIERKAINAIKNLNGIIVFLFDISQQSLYSPK

SEQ ID NO: 34449 - protein, 84 aa, unidentified
  REGION 1..84: note = Description of Unknown:cds_NZ_WFIY01000004.1_cds_WP_155862682.1_479 target sequence
DISQQSLYSPKEQFDLLREILEFNKNVIIALNKIDSKDEKLYDEVSKMLRENSLNFMEISAENNIGIDELKEEIKKRVLEMIKQ

SEQ ID NO: 34450 - protein, 85 aa, unidentified
  REGION 1..85: note = Description of Unknown:cds_NZ_WFIY01000004.1_cds_WP_155862682.1_479 target sequence
SGNSIKDREIRRLIYYDEQVKRYLNFVNSFPRIDNLHPFYKEALEITAGKSVDNIKICLSIINKTSLTASSILKRYISEIRKSDE

SEQ ID NO: 34451 - protein, 85 aa, unidentified
  REGION 1..85: note = Description of Unknown:cds_NZ_WFIY01000004.1_cds_WP_155862682.1_479 target sequence
TLANKLMRQAFGRVSSLLRRRKDCIDWIIDVTKSMKKIKSIDPEMPTVIIAGSPNVGKSTLVSKISSAKPEIANYPFTTKEIHVG

SEQ ID NO: 34452 - protein, 85 aa, unidentified
  REGION 1..85: note = Description of Unknown:cds_NZ_WFIY01000004.1_cds_WP_155862682.1_479 target sequence
HFDINGVKVQVIDTPGILDRPMKERNQIERKAINAIKNLNGIIVFLFDISQQSLYSPKEQFDLLREILEFNKNVIIALNKIDSKD

SEQ ID NO: 34453 - protein, 85 aa, unidentified
  REGION 1..85: note = Description of Unknown:cds_NZ_WFIY01000004.1_cds_WP_155862855.1_692 target sequence
KLLLKLAISWILWGIGFYLYYPFLSIFLVRYIKPSELGFFYLTTLIFALPLPYLGGKINKKFGDKYSIILGMSLSGIGILLLPFA

SEQ ID NO: 34454 - protein, 85 aa, unidentified
  REGION 1..85: note = Description of Unknown:cds_NZ_WFIY01000004.1_cds_WP_155862855.1_692 target sequence
SSIISLYIFMIMYNSFYIALPAFYELMEIEGKSTISKIWAISVLPSIFMPSIGGIISQYLGFTYLFIISAFFIIFSFLPLIMQKE

SEQ ID NO: 34455 - protein, 85 aa, unidentified
  REGION 1..85: note = Description of Unknown:cds_NZ_WFIY01000004.1_cds_WP_155862855.1_692 target sequence
IKNADPKIEFYPIISLIILPVALSSQFIYLVIKEMYNLSDTLIGIIATFAELLGSIIAFTSSFISSKKAINISLILFSLQSLIII

SEQ ID NO: 34456 - protein, 84 aa, unidentified
  REGION 1..84: note = Description of Unknown:cds_NZ_WFIY01000004.1_cds_WP_155862855.1_692 target sequence
ILFSLQSLIIISPYFSVFYGLWESIIPLSLSISKKNYISAVTMQIVGWILGYLIASIIQSPRDAIFLSSVLSLIVLTAINFGKY

SEQ ID NO: 34457 - protein, 85 aa, unidentified
  REGION 1..85: note = Description of Unknown:cds_NZ_WFIY01000004.1_cds_WP_155862855.1_692 target sequence
LVRYIKPSELGFFYLTTLIFALPLPYLGGKINKKFGDKYSIILGMSLSGIGILLLPFASSIISLYIFMIMYNSFYIALPAFYELM

SEQ ID NO: 34458 - protein, 85 aa, unidentified
  REGION 1..85: note = Description of Unknown:cds_NZ_WFIY01000004.1_cds_WP_155862855.1_692 target sequence
EIEGKSTISKIWAISVLPSIFMPSIGGIISQYLGFTYLFIISAFFIIFSFLPLIMQKEIKNADPKIEFYPIISLIILPVALSSQF

SEQ ID NO: 34459 - protein, 85 aa, unidentified
  REGION 1..85: note = Description of Unknown:cds_NZ_WFIY01000004.1_cds_WP_155862855.1_692 target sequence
IYLVIKEMYNLSDTLIGIIATFAELLGSIIAFTSSFISSKKAINISLILFSLQSLIIISPYFSVFYGLWESIIPLSLSISKKNYI

SEQ ID NO: 34460 - protein, 85 aa, unidentified
  REGION 1..85: note = Description of Unknown:cds_NZ_WFIY01000004.1_cds_WP_155863719.1_1584 target sequence
QEEIYDVVIVGAGIAGLSAALYTSRQRMSTLVVSKDLGGQLNLTQLIENYPAISADTGLGLASKVEAQAKKFGAKFIYGEEINGL

SEQ ID NO: 34461 - protein, 85 aa, unidentified
  REGION 1..85: note = Description of Unknown:cds_NZ_WFIY01000004.1_cds_WP_155863719.1_1584 target sequence
RKEGDIFILKGLKGEYKARTVILAFGKSPRELKVPGENELKGKGVSYCAICDAAFFKDVPAAVVGEGDPGLEAVELLGKYAKPTY

SEQ ID NO: 34462 - protein, 85 aa, unidentified
  REGION 1..85: note = Description of Unknown:cds_NZ_WFIY01000004.1_cds_WP_155863719.1_1584 target sequence
YISRSFQLAGEPDLVNSVLSNKNIQLFLGYRVLEIKGNSKVQGIVIENLKTKEVKELQVEGVIIEMGYVLNTEFLKGLIKLNDKG

SEQ ID NO: 34463 - protein, 84 aa, unidentified
  REGION 1..84: note = Description of Unknown:cds_NZ_WFIY01000004.1_cds_WP_155863719.1_1584 target sequence
LKGLIKLNDKGEIIVDDLARTSMEGVFAAGDITQVPYKQAVVAAADGVKAALSAYNYLRSKQGLPPVNVDWKAEKKKTVVSFRL

SEQ ID NO: 34464 - protein, 85 aa, unidentified
  REGION 1..85: note = Description of Unknown:cds_NZ_WFIY01000004.1_cds_WP_155863719.1_1584 target sequence
MSTLVVSKDLGGQLNLTQLIENYPAISADTGLGLASKVEAQAKKFGAKFIYGEEINGLRKEGDIFILKGLKGEYKARTVILAFGK

SEQ ID NO: 34465 - protein, 85 aa, unidentified
  REGION 1..85: note = Description of Unknown:cds_NZ_WFIY01000004.1_cds_WP_155863719.1_1584 target sequence
SPRELKVPGENELKGKGVSYCAICDAAFFKDVPAAVVGEGDPGLEAVELLGKYAKPTYYISRSFQLAGEPDLVNSVLSNKNIQLF

SEQ ID NO: 34466 - protein, 85 aa, unidentified
  REGION 1..85: note = Description of Unknown:cds_NZ_WFIY01000004.1_cds_WP_155863719.1_1584 target sequence
LGYRVLEIKGNSKVQGIVIENLKTKEVKELQVEGVIIEMGYVLNTEFLKGLIKLNDKGEIIVDDLARTSMEGVFAAGDITQVPYK

SEQ ID NO: 34467 - protein, 85 aa, unidentified
  REGION 1..85: note = Description of Unknown:cds_NZ_WFIY01000004.1_cds_WP_162309166.1_1928 target sequence
VKYCPRCGTQVPDDARFCPKCGFDFSTLQQPSQQPTQPQIQPLIDTATRVSRYIPTLTKYGKLLVILAIIFEGLTTILFTVDALT

SEQ ID NO: 34468 - protein, 85 aa, unidentified
  REGION 1..85: note = Description of Unknown:cds_NZ_WFIY01000004.1_cds_WP_162309166.1_1928 target sequence
SSAKYSGSATTIAIDSLLMISAIFYLIAPIFSFPVKGLEVKKLTIILGIFAFLLLAISYILIAKETSSSSIVVRGLTIYGVPLCD

SEQ ID NO: 34469 - protein, 85 aa, unidentified
  REGION 1..85: note = Description of Unknown:cds_NZ_WFIY01000004.1_cds_WP_162309166.1_1928 target sequence
NITAGIIILIGVIFIILSIFMDLGQLVNSIIQVVGIILIYAYTYYNNFNFESFLWGVAVSIVIIFNLIPYFYKGEYAKMIVSIGY

SEQ ID NO: 34470 - protein, 84 aa, unidentified
  REGION 1..84: note = Description of Unknown:cds_NZ_WFIY01000004.1_cds_WP_162309166.1_1928 target sequence
EYAKMIVSIGYSIGILIFTIGTLITGISQVSAGAPSSYSSALLHAMYGTYLTAGVLGILAGALGILDSIFMLIYAITMKSSPPM

SEQ ID NO: 34471 - protein, 85 aa, unidentified
  REGION 1..85: note = Description of Unknown:cds_NZ_WFIY01000004.1_cds_WP_162309166.1_1928 target sequence
LQQPSQQPTQPQIQPLIDTATRVSRYIPTLTKYGKLLVILAIIFEGLTTILFTVDALTSSAKYSGSATTIAIDSLLMISAIFYLI

SEQ ID NO: 34472 - protein, 85 aa, unidentified
  REGION 1..85: note = Description of Unknown:cds_NZ_WFIY01000004.1_cds_WP_162309166.1_1928 target sequence
APIFSFPVKGLEVKKLTIILGIFAFLLLAISYILIAKETSSSSIVVRGLTIYGVPLCDNITAGIIILIGVIFIILSIFMDLGQLV

SEQ ID NO: 34473 - protein, 85 aa, unidentified
  REGION 1..85: note = Description of Unknown:cds_NZ_WFIY01000004.1_cds_WP_162309166.1_1928 target sequence
NSIIQVVGIILIYAYTYYNNFNFESFLWGVAVSIVIIFNLIPYFYKGEYAKMIVSIGYSIGILIFTIGTLITGISQVSAGAPSSY

SEQ ID NO: 34474 - protein, 85 aa, unidentified
  REGION 1..85: note = Description of Unknown:cds_NZ_WFIY01000004.1_cds_WP_155864056.1_1992 target sequence
KGKVAFIGSGPGDPELITVKAKKYIEEADVILYAGSLVNPEILNWAKRDAEIINTAELTHEEIVNIMIKKAKEGKLVARLKSGDF

SEQ ID NO: 34475 - protein, 85 aa, unidentified
  REGION 1..85: note = Description of Unknown:cds_NZ_WFIY01000004.1_cds_WP_155864056.1_1992 target sequence
SIYGALNEELQAIKKEGIDYELIPGITAAIAAASSLGIELTLPRVSQTLIITRASASVPMEGSIKDYAPFLNKGASMVIYTGVHI

SEQ ID NO: 34476 - protein, 85 aa, unidentified
  REGION 1..85: note = Description of Unknown:cds_NZ_WFIY01000004.1_cds_WP_155864056.1_1992 target sequence
IDKVVKELKEGGLSEDSPIAVVYKATWKGEEKIIKGTLKDIAEKVKKEKITRDAIIIVGKILTPEKFEFKSSAYDENHYTGFRVA

SEQ ID NO: 34477 - protein, 84 aa, unidentified
  REGION 1..84: note = Description of Unknown:cds_NZ_WFIY01000004.1_cds_WP_155864056.1_1992 target sequence
DENHYTGFRVANQDKLKYFEARYSVDKIFAEEYLKELINAVKEGRGNEKELISKMEKVLSEGKINPKLRLEAEEIIAEKKRGLA

SEQ ID NO: 34478 - protein, 85 aa, unidentified
  REGION 1..85: note = Description of Unknown:cds_NZ_WFIY01000004.1_cds_WP_155864056.1_1992 target sequence
ADVILYAGSLVNPEILNWAKRDAEIINTAELTHEEIVNIMIKKAKEGKLVARLKSGDFSIYGALNEELQAIKKEGIDYELIPGIT

SEQ ID NO: 34479 - protein, 85 aa, unidentified
  REGION 1..85: note = Description of Unknown:cds_NZ_WFIY01000004.1_cds_WP_155864056.1_1992 target sequence
AAIAAASSLGIELTLPRVSQTLIITRASASVPMEGSIKDYAPFLNKGASMVIYTGVHIIDKVVKELKEGGLSEDSPIAVVYKATW

SEQ ID NO: 34480 - protein, 85 aa, unidentified
  REGION 1..85: note = Description of Unknown:cds_NZ_WFIY01000004.1_cds_WP_155864056.1_1992 target sequence
KGEEKIIKGTLKDIAEKVKKEKITRDAIIIVGKILTPEKFEFKSSAYDENHYTGFRVANQDKLKYFEARYSVDKIFAEEYLKELI

SEQ ID NO: 34481 - protein, 85 aa, unidentified
  REGION 1..85: note = Description of Unknown:cds_NC_016144.1_cds_YP_004928137.1_3 target sequence
FSKHVTLPPPPYNPSSPEGLYYNPDAGKKHGNPHSHPVPHTEHSRASNTIRPTADFSLDYDSSSASGAISAFMLEAYVNVISNNK

SEQ ID NO: 34482 - protein, 85 aa, unidentified
  REGION 1..85: note = Description of Unknown:cds_NC_016144.1_cds_YP_004928137.1_3 target sequence
VLLKLVPLWLPLGVAGQDLYSFDSTASALLIASYTITHFGMTTRPLVRVNRLGPGIPDHPLHLLRLGNQAFLQELVLPPLQLPQF

SEQ ID NO: 34483 - protein, 85 aa, unidentified
  REGION 1..85: note = Description of Unknown:cds_NC_016144.1_cds_YP_004928137.1_3 target sequence
FTFELTELRLYTHLMPQTIWIDSAHGDRHELLRPGLSVNPRLRPILLPCKTGKKVSQHEIASPDKIKSVANYIKELKLVTLDATK

SEQ ID NO: 34484 - protein, 84 aa, unidentified
  REGION 1..84: note = Description of Unknown:cds_NC_016144.1_cds_YP_004928137.1_3 target sequence
ELKLVTLDATKGVYALEIPEPLFEKLTGKKSPQKGSSTLIPILVPRLMSKDDLGGRDLVMSTKGSCENCYYPGASPTQPGGEQS

SEQ ID NO: 34485 - protein, 85 aa, unidentified
  REGION 1..85: note = Description of Unknown:cds_NC_016144.1_cds_YP_004928137.1_3 target sequence
KKHGNPHSHPVPHTEHSRASNTIRPTADFSLDYDSSSASGAISAFMLEAYVNVISNNKVLLKLVPLWLPLGVAGQDLYSFDSTAS

SEQ ID NO: 34486 - protein, 85 aa, unidentified
  REGION 1..85: note = Description of Unknown:cds_NC_016144.1_cds_YP_004928137.1_3 target sequence
ALLIASYTITHFGMTTRPLVRVNRLGPGIPDHPLHLLRLGNQAFLQELVLPPLQLPQFFTFELTELRLYTHLMPQTIWIDSAHGD

SEQ ID NO: 34487 - protein, 85 aa, unidentified
  REGION 1..85: note = Description of Unknown:cds_NC_016144.1_cds_YP_004928137.1_3 target sequence
RHELLRPGLSVNPRLRPILLPCKTGKKVSQHEIASPDKIKSVANYIKELKLVTLDATKGVYALEIPEPLFEKLTGKKSPQKGSST

SEQ ID NO: 34488 - protein, 85 aa, unidentified
  REGION 1..85: note = Description of Unknown:cds_NZ_WFIY01000004.1_cds_WP_155863595.1_1504 target sequence
LYTLEKIIVFITFYLIFRNLFIYEITINWDAIDYMWIAAHGYMVKFLYAFSPVFPALIKGLTFLTGSYSLSSLIITNIFVILSYN

SEQ ID NO: 34489 - protein, 85 aa, unidentified
  REGION 1..85: note = Description of Unknown:cds_NZ_WFIY01000004.1_cds_WP_155863595.1_1504 target sequence
YYGFKGSIILSTFPVFVIYSTIPYSDDIALTFLILSLNLGGWLSAIALGGAIATFYNLAYTLPSFILKYKRKIWYFLPPLAAGGA

SEQ ID NO: 34490 - protein, 85 aa, unidentified
  REGION 1..85: note = Description of Unknown:cds_NZ_WFIY01000004.1_cds_WP_155863595.1_1504 target sequence
ILLAFWIFTGSPFTFFSVESKHWSAYFTTPWCQAEWILNCYSFFINSFFDPYFHLSPLVYLLRNYVFLAFYITGTILFYKKSKDV

SEQ ID NO: 34491 - protein, 84 aa, unidentified
  REGION 1..84: note = Description of Unknown:cds_NZ_WFIY01000004.1_cds_WP_155863595.1_1504 target sequence
TILFYKKSKDVFLTLYSLSIILPLFFIHGWPSISLPRLLLPAFPSLLGYVEVIFKRKAYTVIYIAISFFLTFFFTEWQVLAFFA

SEQ ID NO: 34492 - protein, 85 aa, unidentified
  REGION 1..85: note = Description of Unknown:cds_NZ_WFIY01000004.1_cds_WP_155863595.1_1504 target sequence
NWDAIDYMWIAAHGYMVKFLYAFSPVFPALIKGLTFLTGSYSLSSLIITNIFVILSYNYYGFKGSIILSTFPVFVIYSTIPYSDD

SEQ ID NO: 34493 - protein, 85 aa, unidentified
  REGION 1..85: note = Description of Unknown:cds_NZ_WFIY01000004.1_cds_WP_155863595.1_1504 target sequence
IALTFLILSLNLGGWLSAIALGGAIATFYNLAYTLPSFILKYKRKIWYFLPPLAAGGAILLAFWIFTGSPFTFFSVESKHWSAYF

SEQ ID NO: 34494 - protein, 85 aa, unidentified
  REGION 1..85: note = Description of Unknown:cds_NZ_WFIY01000004.1_cds_WP_155863595.1_1504 target sequence
TTPWCQAEWILNCYSFFINSFFDPYFHLSPLVYLLRNYVFLAFYITGTILFYKKSKDVFLTLYSLSIILPLFFIHGWPSISLPRL

SEQ ID NO: 34495 - protein, 85 aa, unidentified
  REGION 1..85: note = Description of Unknown:cds_NC_025806.1_cds_YP_009110701.1_7 target sequence
SSFTTHHSLNPQQRREVIALIMTMTQSISASRSDLSAIRSELTSLRSKVDDLSSQFASTSSALAQLSTQCNAFSVEIASHSNAIT

SEQ ID NO: 34496 - protein, 85 aa, unidentified
  REGION 1..85: note = Description of Unknown:cds_NC_025806.1_cds_YP_009110701.1_7 target sequence
TLVSTVTSHSDKMSEFTTSLTDASTKLSVVSDSVNQLSLNYKTLETDVLNAKTSLSALAAQVNSLESRLNDTTQTVPKQVLSPLA

SEQ ID NO: 34497 - protein, 85 aa, unidentified
  REGION 1..85: note = Description of Unknown:cds_NC_025806.1_cds_YP_009110701.1_7 target sequence
INEGALTLNMNPRFCSDNAGLASYSSQTLLQTFTANLSSSIPNTNLAATIIVHSHGSVSTFNLTSKHAFSPSTEKTQLTLDIRHF

SEQ ID NO: 34498 - protein, 84 aa, unidentified
  REGION 1..84: note = Description of Unknown:cds_NC_025806.1_cds_YP_009110701.1_7 target sequence
EKTQLTLDIRHFQPSPTDWSVLLAQPAFQASDFLGYAWASIAGIWSPITLVGRVSSNPKLITLQLGTNPMDRITGLVLTFSIDT

SEQ ID NO: 34499 - protein, 85 aa, unidentified
  REGION 1..85: note = Description of Unknown:cds_NC_025806.1_cds_YP_009110701.1_7 target sequence
ISASRSDLSAIRSELTSLRSKVDDLSSQFASTSSALAQLSTQCNAFSVEIASHSNAITTLVSTVTSHSDKMSEFTTSLTDASTKL

SEQ ID NO: 34500 - protein, 85 aa, unidentified
  REGION 1..85: note = Description of Unknown:cds_NC_025806.1_cds_YP_009110701.1_7 target sequence
SVVSDSVNQLSLNYKTLETDVLNAKTSLSALAAQVNSLESRLNDTTQTVPKQVLSPLAINEGALTLNMNPRFCSDNAGLASYSSQ

SEQ ID NO: 34501 - protein, 85 aa, unidentified
  REGION 1..85: note = Description of Unknown:cds_NC_025806.1_cds_YP_009110701.1_7 target sequence
TLLQTFTANLSSSIPNTNLAATIIVHSHGSVSTFNLTSKHAFSPSTEKTQLTLDIRHFQPSPTDWSVLLAQPAFQASDFLGYAWA

SEQ ID NO: 34502 - protein, 85 aa, unidentified
  REGION 1..85: note = Description of Unknown:cds_NC_016144.1_cds_YP_004928140.1_6 target sequence
AAGPLRAKEWARRQLDNTISHPVGPRPSNYHIGSNLAPQHYPSGRGFNERGRSVSRQCPGQGTQVRPRSQSMSRLTNSRITPGDW

SEQ ID NO: 34503 - protein, 85 aa, unidentified
  REGION 1..85: note = Description of Unknown:cds_NC_016144.1_cds_YP_004928140.1_6 target sequence
QCQPCDYPKARFKRVEQSLVPPAPKDICPTLKKGYLCDSQFCKKDHNLEQLTDHELLLLVARQSCISSPAAREIPRAKDCRLATP

SEQ ID NO: 34504 - protein, 85 aa, unidentified
  REGION 1..85: note = Description of Unknown:cds_NC_016144.1_cds_YP_004928140.1_6 target sequence
SLCDYQQHNQESLTLNRLCEIAQAWASMTWEDIDDKQLRALLTLSAVLVRKHSKSQLSALCENHVRREALAQDQASIVLEVYQKL

SEQ ID NO: 34505 - protein, 84 aa, unidentified
  REGION 1..84: note = Description of Unknown:cds_NC_016144.1_cds_YP_004928140.1_6 target sequence
QASIVLEVYQKLHSDKGGKFEAALWQHWDRGSLTLFIHAALRAGTTIPCESSAIVVASIMSLLSNSQNDSSEPVAEGPPGQDQQ

SEQ ID NO: 34506 - protein, 85 aa, unidentified
  REGION 1..85: note = Description of Unknown:cds_NC_016144.1_cds_YP_004928140.1_6 target sequence
SNYHIGSNLAPQHYPSGRGFNERGRSVSRQCPGQGTQVRPRSQSMSRLTNSRITPGDWQCQPCDYPKARFKRVEQSLVPPAPKDI

SEQ ID NO: 34507 - protein, 85 aa, unidentified
  REGION 1..85: note = Description of Unknown:cds_NC_016144.1_cds_YP_004928140.1_6 target sequence
CPTLKKGYLCDSQFCKKDHNLEQLTDHELLLLVARQSCISSPAAREIPRAKDCRLATPSLCDYQQHNQESLTLNRLCEIAQAWAS

SEQ ID NO: 34508 - protein, 85 aa, unidentified
  REGION 1..85: note = Description of Unknown:cds_NC_016144.1_cds_YP_004928140.1_6 target sequence
MTWEDIDDKQLRALLTLSAVLVRKHSKSQLSALCENHVRREALAQDQASIVLEVYQKLHSDKGGKFEAALWQHWDRGSLTLFIHA

SEQ ID NO: 34509 - protein, 85 aa, unidentified
  REGION 1..85: note = Description of Unknown:cds_NC_003214.2_cds_NP_445705.1_40 target sequence
LLLSSSMPLNLGKRIFGYNSYLLTDIIIYHIVINNKWIQYFLGIRLIKAYVPCEKCSYEKVAEYENFKITHNLFDADVCIDDPVL

SEQ ID NO: 34510 - protein, 85 aa, unidentified
  REGION 1..85: note = Description of Unknown:cds_NC_003214.2_cds_NP_445705.1_40 target sequence
FLKRIKGLEDEVTCLLWGDTVYDALYYKNEMAKYDNVIMASYWNYQMFEKLGYKIKGVMKRHIKPIFVGEKKDKIFVTLGESRYF

SEQ ID NO: 34511 - protein, 85 aa, unidentified
  REGION 1..85: note = Description of Unknown:cds_NC_003214.2_cds_NP_445705.1_40 target sequence
DRKNLTLIDKITREFGVRDKTIIIGNLGNPDYPTFQLSEEEKYRLYARSKFFLALSKSEGFGIPPIEAMALGVVPIYLDAHGYKE

SEQ ID NO: 34512 - protein, 84 aa, unidentified
  REGION 1..84: note = Description of Unknown:cds_NC_003214.2_cds_NP_445705.1_40 target sequence
PIYLDAHGYKENLVGIPIDPIDEYTYCVDNKHCFRVWDLSIHELRYEINHALTIGKDEYEDLSEKAKNKARGYIIATMESSDFR

SEQ ID NO: 34513 - protein, 85 aa, unidentified
  REGION 1..85: note = Description of Unknown:cds_NC_003214.2_cds_NP_445705.1_40 target sequence
IYHIVINNKWIQYFLGIRLIKAYVPCEKCSYEKVAEYENFKITHNLFDADVCIDDPVLFLKRIKGLEDEVTCLLWGDTVYDALYY

SEQ ID NO: 34514 - protein, 85 aa, unidentified
  REGION 1..85: note = Description of Unknown:cds_NC_003214.2_cds_NP_445705.1_40 target sequence
KNEMAKYDNVIMASYWNYQMFEKLGYKIKGVMKRHIKPIFVGEKKDKIFVTLGESRYFDRKNLTLIDKITREFGVRDKTIIIGNL

SEQ ID NO: 34515 - protein, 85 aa, unidentified
  REGION 1..85: note = Description of Unknown:cds_NC_003214.2_cds_NP_445705.1_40 target sequence
GNPDYPTFQLSEEEKYRLYARSKFFLALSKSEGFGIPPIEAMALGVVPIYLDAHGYKENLVGIPIDPIDEYTYCVDNKHCFRVWD

SEQ ID NO: 34516 - protein, 85 aa, unidentified
  REGION 1..85: note = Description of Unknown:cds_NC_030656.1_cds_YP_009268726.1_11 target sequence
VMKNTIIYMVFFLLGAIIQQIISPINFFEKEVKVPHFINVPYTPKLFFSPYEKKIREPNCTVTKRIEGDSVLFKAWSVTGIPKSV

SEQ ID NO: 34517 - protein, 85 aa, unidentified
  REGION 1..85: note = Description of Unknown:cds_NC_030656.1_cds_YP_009268726.1_11 target sequence
TVRYTKTNKTFTVFSPLSNSSNGYYPISNTKSSVVYRSYVVEKGLIIKKLKHSDAGVMLISIVDSTNTVITLCTKLVVEPTIDEP

SEQ ID NO: 34518 - protein, 85 aa, unidentified
  REGION 1..85: note = Description of Unknown:cds_NC_030656.1_cds_YP_009268726.1_11 target sequence
TLKITRLETDGTKCLATIRCDAEQHNTLLSFMGNGFLDTQRNITWFNTKTLIGKFIVNKKLTVSCVSINKFSVSESFTVSIDYQC

SEQ ID NO: 34519 - protein, 84 aa, unidentified
  REGION 1..84: note = Description of Unknown:cds_NC_030656.1_cds_YP_009268726.1_11 target sequence
SESFTVSIDYQCYVNQKKVSDNNACSTVRFVLDTRPCTVILISAFLILTVIACVLSYKAILQYNYYKRRKTYVNLIDVYNPNNI

SEQ ID NO: 34520 - protein, 85 aa, unidentified
  REGION 1..85: note = Description of Unknown:cds_NC_030656.1_cds_YP_009268726.1_11 target sequence
FEKEVKVPHFINVPYTPKLFFSPYEKKIREPNCTVTKRIEGDSVLFKAWSVTGIPKSVTVRYTKTNKTFTVFSPLSNSSNGYYPI

SEQ ID NO: 34521 - protein, 85 aa, unidentified
  REGION 1..85: note = Description of Unknown:cds_NC_030656.1_cds_YP_009268726.1_11 target sequence
SNTKSSVVYRSYVVEKGLIIKKLKHSDAGVMLISIVDSTNTVITLCTKLVVEPTIDEPTLKITRLETDGTKCLATIRCDAEQHNT

SEQ ID NO: 34522 - protein, 85 aa, unidentified
  REGION 1..85: note = Description of Unknown:cds_NC_030656.1_cds_YP_009268726.1_11 target sequence
LLSFMGNGFLDTQRNITWFNTKTLIGKFIVNKKLTVSCVSINKFSVSESFTVSIDYQCYVNQKKVSDNNACSTVRFVLDTRPCTV

SEQ ID NO: 34523 - protein, 85 aa, unidentified
  REGION 1..85: note = Description of Unknown:hvTR_Q2HR98 target sequence
FALSSLVSEGDPEVTSRYVKGVQLALDLSENTPGQFKLIETPLNSFLLVSNVMPEVQPICSGLPALRPDFSNLHLPRLEKLQRVL

SEQ ID NO: 34524 - protein, 85 aa, unidentified
  REGION 1..85: note = Description of Unknown:hvTR_Q2HR98 target sequence
GQGFGAAGEEIALDPSHVETHEKGQVFYNHYATEEWTWALTLNKDALLREAVDGLCDPGTWKGLLPDDPLPLLWLLFNGPASFCR

SEQ ID NO: 34525 - protein, 85 aa, unidentified
  REGION 1..85: note = Description of Unknown:hvTR_Q2HR98 target sequence
ADCCLYKQHCGYPGPVLLPGHMYAPKRDLLSFVNHALKYTKFLYGDFSGTWAAACRPPFATSRIQRVVSQMKIIDASDTYISHTC

SEQ ID NO: 34526 - protein, 84 aa, unidentified
  REGION 1..84: note = Description of Unknown:hvTR_Q2HR98 target sequence
IIDASDTYISHTCLLCHIYQQNSIIAGQGTHVGGILLLSGKGTQYITGNVQTQRCPTTGDYLIIPSYDIPAIITMIKENGLNQL

SEQ ID NO: 34527 - protein, 85 aa, unidentified
  REGION 1..85: note = Description of Unknown:hvTR_Q2HR98 target sequence
LSENTPGQFKLIETPLNSFLLVSNVMPEVQPICSGLPALRPDFSNLHLPRLEKLQRVLGQGFGAAGEEIALDPSHVETHEKGQVF

SEQ ID NO: 34528 - protein, 85 aa, unidentified
  REGION 1..85: note = Description of Unknown:hvTR_Q2HR98 target sequence
YNHYATEEWTWALTLNKDALLREAVDGLCDPGTWKGLLPDDPLPLLWLLFNGPASFCRADCCLYKQHCGYPGPVLLPGHMYAPKR

SEQ ID NO: 34529 - protein, 85 aa, unidentified
  REGION 1..85: note = Description of Unknown:hvTR_Q2HR98 target sequence
DLLSFVNHALKYTKFLYGDFSGTWAAACRPPFATSRIQRVVSQMKIIDASDTYISHTCLLCHIYQQNSIIAGQGTHVGGILLLSG

SEQ ID NO: 34530 - protein, 85 aa, unidentified
  REGION 1..85: note = Description of Unknown:cds_NZ_WFIY01000004.1_cds_WP_155862815.1_644 target sequence
SLFKKEEKKIFHIDRLPEEMKVAIKTLIDSSIPDVAKAYGFDYLYPKLGEPIFIPYGRLDGKYKSTIDAFEKILEEVEELKDNLK

SEQ ID NO: 34531 - protein, 85 aa, unidentified
  REGION 1..85: note = Description of Unknown:cds_NZ_WFIY01000004.1_cds_WP_155862815.1_644 target sequence
EYSKWYGNVKLFDHYRFTFYSYVDPNEGMKVGIGADPLSFPNSLFDVQSLCSALDKGKSIIILNPALSGYISSTCLSSFNIKFVD

SEQ ID NO: 34532 - protein, 85 aa, unidentified
  REGION 1..85: note = Description of Unknown:cds_NZ_WFIY01000004.1_cds_WP_155862815.1_644 target sequence
TISKRKDEIIDAYTWLNESFHENFDKDKVYDVELGREYMDRLFNVILSEVRNYSIESKEGDIAILPLLSYEEYGEKESIKNILQN

SEQ ID NO: 34533 - protein, 84 aa, unidentified
  REGION 1..84: note = Description of Unknown:cds_NZ_WFIY01000004.1_cds_WP_155862815.1_644 target sequence
YGEKESIKNILQNDEKYKKYIEEGRLDEISLIPILFSGSLKELNEIKDRYSKVIVISDKKIRIKIDGNVKQINDKILVIENTKS

SEQ ID NO: 34534 - protein, 85 aa, unidentified
  REGION 1..85: note = Description of Unknown:cds_NZ_WFIY01000004.1_cds_WP_155862815.1_644 target sequence
IDSSIPDVAKAYGFDYLYPKLGEPIFIPYGRLDGKYKSTIDAFEKILEEVEELKDNLKEYSKWYGNVKLFDHYRFTFYSYVDPNE

SEQ ID NO: 34535 - protein, 85 aa, unidentified
  REGION 1..85: note = Description of Unknown:cds_NZ_WFIY01000004.1_cds_WP_155862815.1_644 target sequence
GMKVGIGADPLSFPNSLFDVQSLCSALDKGKSIIILNPALSGYISSTCLSSFNIKFVDTISKRKDEIIDAYTWLNESFHENFDKD

SEQ ID NO: 34536 - protein, 85 aa, unidentified
  REGION 1..85: note = Description of Unknown:cds_NZ_WFIY01000004.1_cds_WP_155862815.1_644 target sequence
KVYDVELGREYMDRLFNVILSEVRNYSIESKEGDIAILPLLSYEEYGEKESIKNILQNDEKYKKYIEEGRLDEISLIPILFSGSL

SEQ ID NO: 34537 - protein, 85 aa, unidentified
  REGION 1..85: note = Description of Unknown:cds_NZ_WFIY01000004.1_cds_WP_205737136.1_890 target sequence
MDELPILPTTVIGSYPRPKWLREAIRLHKAGKISDEELTEAFNDAALAVLHDHYLAGIDVPTDGEVKRDEMVEYFAERLGGFKFY

SEQ ID NO: 34538 - protein, 85 aa, unidentified
  REGION 1..85: note = Description of Unknown:cds_NZ_WFIY01000004.1_cds_WP_205737136.1_890 target sequence
GPVRVWGTAYYRKPAVVGKIEYKSPLLVDEFNYTKSVSYTPNVKITITGPYTIAYWSYNEYYKDMQDLVFDLAKIINKELHNLVD

SEQ ID NO: 34539 - protein, 85 aa, unidentified
  REGION 1..85: note = Description of Unknown:cds_NZ_WFIY01000004.1_cds_WP_205737136.1_890 target sequence
AGARIIQIDEPAIHSNKKDVSWAVEAVNEAVKGINAKLVVHICYGDYRIVAPYLNEFKVDQINFALKIYNYRYLELFKKYGYEKE

SEQ ID NO: 34540 - protein, 84 aa, unidentified
  REGION 1..84: note = Description of Unknown:cds_NZ_WFIY01000004.1_cds_WP_205737136.1_890 target sequence
YLELFKKYGYEKELGLGVIDVHSRRVESAEEVAKDIKKSLKYFPAEKIWINPDCGLKLLPRSIAFQKLVNMVKGTKMVREELKK

SEQ ID NO: 34541 - protein, 85 aa, unidentified
  REGION 1..85: note = Description of Unknown:cds_NZ_WFIY01000004.1_cds_WP_205737136.1_890 target sequence
HKAGKISDEELTEAFNDAALAVLHDHYLAGIDVPTDGEVKRDEMVEYFAERLGGFKFYGPVRVWGTAYYRKPAVVGKIEYKSPLL

SEQ ID NO: 34542 - protein, 85 aa, unidentified
  REGION 1..85: note = Description of Unknown:cds_NZ_WFIY01000004.1_cds_WP_205737136.1_890 target sequence
VDEFNYTKSVSYTPNVKITITGPYTIAYWSYNEYYKDMQDLVFDLAKIINKELHNLVDAGARIIQIDEPAIHSNKKDVSWAVEAV

SEQ ID NO: 34543 - protein, 85 aa, unidentified
  REGION 1..85: note = Description of Unknown:cds_NZ_WFIY01000004.1_cds_WP_205737136.1_890 target sequence
NEAVKGINAKLVVHICYGDYRIVAPYLNEFKVDQINFALKIYNYRYLELFKKYGYEKELGLGVIDVHSRRVESAEEVAKDIKKSL

SEQ ID NO: 34544 - protein, 85 aa, unidentified
  REGION 1..85: note = Description of Unknown:cds_NZ_WFIY01000004.1_cds_WP_155863285.1_1241 target sequence
VEDEILQVQNLTVNYRLEDSIVKGIENVSFGIKRSSITAIIGESGSGKTTLLSAILGFLPQNARTSGKIIFNNEKIMENGKYSKK

SEQ ID NO: 34545 - protein, 85 aa, unidentified
  REGION 1..85: note = Description of Unknown:cds_NZ_WFIY01000004.1_cds_WP_155863285.1_1241 target sequence
FRTNRWRLISYIPQNAMSVLSPLRKIRSHFIDTAAAYNIPKEVALNSAKEILPQIGLDEKILNYYPFELSGGMKQRVVIALAIFL

SEQ ID NO: 34546 - protein, 85 aa, unidentified
  REGION 1..85: note = Description of Unknown:cds_NZ_WFIY01000004.1_cds_WP_155863285.1_1241 target sequence
RPLLTVADEPTSALDVITQKKILDLLKKINNELNITFLVSTHDISVASYVADEIIVLYNGHIVERGSKEVIINHPLHPYTLYLLS

SEQ ID NO: 34547 - protein, 84 aa, unidentified
  REGION 1..84: note = Description of Unknown:cds_NZ_WFIY01000004.1_cds_WP_155863285.1_1241 target sequence
HPLHPYTLYLLSSVISLSSKNKLIKIREKFMVKHNINRNHGCPFYSRCPFATTICSEEFPPNMRINDHEVLCNKPFEVEKSVYT

SEQ ID NO: 34548 - protein, 85 aa, unidentified
  REGION 1..85: note = Description of Unknown:cds_NZ_WFIY01000004.1_cds_WP_155863285.1_1241 target sequence
VSFGIKRSSITAIIGESGSGKTTLLSAILGFLPQNARTSGKIIFNNEKIMENGKYSKKFRTNRWRLISYIPQNAMSVLSPLRKIR

SEQ ID NO: 34549 - protein, 85 aa, unidentified
  REGION 1..85: note = Description of Unknown:cds_NZ_WFIY01000004.1_cds_WP_155863285.1_1241 target sequence
SHFIDTAAAYNIPKEVALNSAKEILPQIGLDEKILNYYPFELSGGMKQRVVIALAIFLRPLLTVADEPTSALDVITQKKILDLLK

SEQ ID NO: 34550 - protein, 85 aa, unidentified
  REGION 1..85: note = Description of Unknown:cds_NZ_WFIY01000004.1_cds_WP_155863285.1_1241 target sequence
KINNELNITFLVSTHDISVASYVADEIIVLYNGHIVERGSKEVIINHPLHPYTLYLLSSVISLSSKNKLIKIREKFMVKHNINRN

SEQ ID NO: 34551 - protein, 85 aa, unidentified
  REGION 1..85: note = Description of Unknown:cds_NZ_WFIY01000004.1_cds_WP_155863823.1_1716 target sequence
LIERAYEEFANNYPKILEKIRFYSNSINDSVKDKLKKIWIDYEPTAVNKSFIAIDGGEFVKELRVGTIFLTNAEAVYGEGVNVSS

SEQ ID NO: 34552 - protein, 85 aa, unidentified
  REGION 1..85: note = Description of Unknown:cds_NZ_WFIY01000004.1_cds_WP_155863823.1_1716 target sequence
IDNEIKMGVFRPGNFAKERISEIMNILELSLALRNGNKAEYILMDGSLRKKLNNGKDIEGEEKDLDEIINDENEEESLKNLILKS

SEQ ID NO: 34553 - protein, 85 aa, unidentified
  REGION 1..85: note = Description of Unknown:cds_NZ_WFIY01000004.1_cds_WP_155863823.1_1716 target sequence
QILISRLIQNYDGKILWISKNSKGRELFGENISDITVIESLTENPGFTLPFVHTIDEKILAKNKEVKNLEGVEISSFYIRLEKGQ

SEQ ID NO: 34554 - protein, 84 aa, unidentified
  REGION 1..84: note = Description of Unknown:cds_NZ_WFIY01000004.1_cds_WP_155863823.1_1716 target sequence
ISSFYIRLEKGQRVLKVDLTGRIDDDGIKKIMDSLYSVSIKGYPYPLLKVHYDVKVNKEDRQRILSILGLNHMRGNSWWPNQFF

SEQ ID NO: 34555 - protein, 85 aa, unidentified
  REGION 1..85: note = Description of Unknown:cds_NZ_WFIY01000004.1_cds_WP_155863823.1_1716 target sequence
NDSVKDKLKKIWIDYEPTAVNKSFIAIDGGEFVKELRVGTIFLTNAEAVYGEGVNVSSIDNEIKMGVFRPGNFAKERISEIMNIL

SEQ ID NO: 34556 - protein, 85 aa, unidentified
  REGION 1..85: note = Description of Unknown:cds_NZ_WFIY01000004.1_cds_WP_155863823.1_1716 target sequence
ELSLALRNGNKAEYILMDGSLRKKLNNGKDIEGEEKDLDEIINDENEEESLKNLILKSQILISRLIQNYDGKILWISKNSKGREL

SEQ ID NO: 34557 - protein, 85 aa, unidentified
  REGION 1..85: note = Description of Unknown:cds_NZ_WFIY01000004.1_cds_WP_155863823.1_1716 target sequence
FGENISDITVIESLTENPGFTLPFVHTIDEKILAKNKEVKNLEGVEISSFYIRLEKGQRVLKVDLTGRIDDDGIKKIMDSLYSVS

SEQ ID NO: 34558 - protein, 85 aa, unidentified
  REGION 1..85: note = Description of Unknown:cds_NC_038667.1_cds_YP_009507787.1_9 target sequence
SSFTTHHSLNPQQRREVIALIMTMTQSINASRSDLSAIRSELMSLRSTVGDLSSQFASTSSGLAQLSTQCNAFSVEIASHSNAIA

SEQ ID NO: 34559 - protein, 85 aa, unidentified
  REGION 1..85: note = Description of Unknown:cds_NC_038667.1_cds_YP_009507787.1_9 target sequence
TLVSTATSHSDKMSEFTTSLTDASSKLSVVSDSVDQLSLNYKTLETDVLNAKSSLSSLAAQVNSLESRLNDTTQTVPKQVLSPLT

SEQ ID NO: 34560 - protein, 85 aa, unidentified
  REGION 1..85: note = Description of Unknown:cds_NC_038667.1_cds_YP_009507787.1_9 target sequence
INEGALTLNMNPRFCSDSAGLASYSSQTLQTFTANLASSIPDTNLAATIIVHSHGSVSTFNLTSKHAFSPSTEKTQLTLDIRQFQ

SEQ ID NO: 34561 - protein, 84 aa, unidentified
  REGION 1..84: note = Description of Unknown:cds_NC_038667.1_cds_YP_009507787.1_9 target sequence
EKTQLTLDIRQFQPSPTDWSVLLAQPAFQASDFLGYAWASIAGIWSPITLVGRVSSNPKLITLQLGTNPMDRITGLVLTFSIDT

SEQ ID NO: 34562 - protein, 85 aa, unidentified
  REGION 1..85: note = Description of Unknown:cds_NC_038667.1_cds_YP_009507787.1_9 target sequence
INASRSDLSAIRSELMSLRSTVGDLSSQFASTSSGLAQLSTQCNAFSVEIASHSNAIATLVSTATSHSDKMSEFTTSLTDASSKL

SEQ ID NO: 34563 - protein, 85 aa, unidentified
  REGION 1..85: note = Description of Unknown:cds_NC_038667.1_cds_YP_009507787.1_9 target sequence
SVVSDSVDQLSLNYKTLETDVLNAKSSLSSLAAQVNSLESRLNDTTQTVPKQVLSPLTINEGALTLNMNPRFCSDSAGLASYSSQ

SEQ ID NO: 34564 - protein, 85 aa, unidentified
  REGION 1..85: note = Description of Unknown:cds_NC_038667.1_cds_YP_009507787.1_9 target sequence
TLQTFTANLASSIPDTNLAATIIVHSHGSVSTFNLTSKHAFSPSTEKTQLTLDIRQFQPSPTDWSVLLAQPAFQASDFLGYAWAS

SEQ ID NO: 34565 - protein, 85 aa, unidentified
  REGION 1..85: note = Description of Unknown:cds_NZ_WFIY01000004.1_cds_WP_155864372.1_528 target sequence
NLTVLKLRLGMILTSLGIFLLGFALVFAIISYFYGLSLAPAIIVGILSFLIALNIIQWLFGPYVINAMYRAVEVTPNDPKYGWLI

SEQ ID NO: 34566 - protein, 85 aa, unidentified
  REGION 1..85: note = Description of Unknown:cds_NZ_WFIY01000004.1_cds_WP_155864372.1_528 target sequence
DVVNEVAYYNRISPPPKVYIADVPFPNAFAYGSPIAGRRVAITLPLLKILNKEEIKAVLGHELGHLRHKDVELLMAIGLIPALIF

SEQ ID NO: 34567 - protein, 85 aa, unidentified
  REGION 1..85: note = Description of Unknown:cds_NZ_WFIY01000004.1_cds_WP_155864372.1_528 target sequence
WIGYSLMWSGMLGGEGGGRNNNGGILWLVGIALLAVSYIFQFFLLYLNRMREAYADVNSAETVPGGAENLQRALAKITLSIDPET

SEQ ID NO: 34568 - protein, 84 aa, unidentified
  REGION 1..84: note = Description of Unknown:cds_NZ_WFIY01000004.1_cds_WP_155864372.1_528 target sequence
RALAKITLSIDPETLERYRNKQANIANMLFFAPTEVQEDIPENNVDELIEYWKREKVPWYADFFSDHPHPAKRIQLLEKLKFSH

SEQ ID NO: 34569 - protein, 85 aa, unidentified
  REGION 1..85: note = Description of Unknown:cds_NZ_WFIY01000004.1_cds_WP_155864372.1_528 target sequence
AIISYFYGLSLAPAIIVGILSFLIALNIIQWLFGPYVINAMYRAVEVTPNDPKYGWLIDVVNEVAYYNRISPPPKVYIADVPFPN

SEQ ID NO: 34570 - protein, 85 aa, unidentified
  REGION 1..85: note = Description of Unknown:cds_NZ_WFIY01000004.1_cds_WP_155864372.1_528 target sequence
AFAYGSPIAGRRVAITLPLLKILNKEEIKAVLGHELGHLRHKDVELLMAIGLIPALIFWIGYSLMWSGMLGGEGGGRNNNGGILW

SEQ ID NO: 34571 - protein, 85 aa, unidentified
  REGION 1..85: note = Description of Unknown:cds_NZ_WFIY01000004.1_cds_WP_155864372.1_528 target sequence
LVGIALLAVSYIFQFFLLYLNRMREAYADVNSAETVPGGAENLQRALAKITLSIDPETLERYRNKQANIANMLFFAPTEVQEDIP

SEQ ID NO: 34572 - protein, 85 aa, unidentified
  REGION 1..85: note = Description of Unknown:cds_NZ_WFIY01000004.1_cds_WP_155863058.1_959 target sequence
ELDKYFDEIIKNVNEEIEKYIKGEPKELYDASIYLLKAGGKRLRPLITVASSDLFSGDRKRAYKAAAAVEILHNFTLIHDDIMDE

SEQ ID NO: 34573 - protein, 85 aa, unidentified
  REGION 1..85: note = Description of Unknown:cds_NZ_WFIY01000004.1_cds_WP_155863058.1_959 target sequence
DTLRRGMPTVHVKWGIPMAILAGDLLHAKAFEVLSEALEGLDSRRFYMGLSEFSKSVIIIAEGQAMDMEFENRQDVTEEEYLEMI

SEQ ID NO: 34574 - protein, 85 aa, unidentified
  REGION 1..85: note = Description of Unknown:cds_NZ_WFIY01000004.1_cds_WP_155863058.1_959 target sequence
KKKTAQLFSCSAFLGGLVSNAEDKDLELLKQFGLNLGIAFQIIDDILGLTADEKELGKPVYSDIREGKKTILVIKALSLASETER

SEQ ID NO: 34575 - protein, 84 aa, unidentified
  REGION 1..84: note = Description of Unknown:cds_NZ_WFIY01000004.1_cds_WP_155863058.1_959 target sequence
LVIKALSLASETERKIIIEGLGSKDQEKIVRAAEVVKSLSLNYAYEVAEEYYQKSMKALSAIGGNDIAGKALKYLAEFTIKRRK

SEQ ID NO: 34576 - protein, 85 aa, unidentified
  REGION 1..85: note = Description of Unknown:cds_NZ_WFIY01000004.1_cds_WP_155863058.1_959 target sequence
LYDASIYLLKAGGKRLRPLITVASSDLFSGDRKRAYKAAAAVEILHNFTLIHDDIMDEDTLRRGMPTVHVKWGIPMAILAGDLLH

SEQ ID NO: 34577 - protein, 85 aa, unidentified
  REGION 1..85: note = Description of Unknown:cds_NZ_WFIY01000004.1_cds_WP_155863058.1_959 target sequence
AKAFEVLSEALEGLDSRRFYMGLSEFSKSVIIIAEGQAMDMEFENRQDVTEEEYLEMIKKKTAQLFSCSAFLGGLVSNAEDKDLE

SEQ ID NO: 34578 - protein, 85 aa, unidentified
  REGION 1..85: note = Description of Unknown:cds_NZ_WFIY01000004.1_cds_WP_155863058.1_959 target sequence
LLKQFGLNLGIAFQIIDDILGLTADEKELGKPVYSDIREGKKTILVIKALSLASETERKIIIEGLGSKDQEKIVRAAEVVKSLSL

SEQ ID NO: 34579 - protein, 85 aa, unidentified
  REGION 1..85: note = Description of Unknown:cds_NZ_WFIY01000004.1_cds_WP_155863160.1_1089 target sequence
EEEILWAEKYRPRSLDDIVNQKDIVERLKRFVKEKNMPHLLFAGPPGTGKTTAALALVHDLYGDSYEQFFLELNASDERGIDVIR

SEQ ID NO: 34580 - protein, 85 aa, unidentified
  REGION 1..85: note = Description of Unknown:cds_NZ_WFIY01000004.1_cds_WP_155863160.1_1089 target sequence
NKVKEFARTMVSSSVPFKVILLDEADNMTADAQQALRRTMELYTESTRFILACNYLSKIIDPIQSRTALFRFYPLKKEDVVSRLE

SEQ ID NO: 34581 - protein, 85 aa, unidentified
  REGION 1..85: note = Description of Unknown:cds_NZ_WFIY01000004.1_cds_WP_155863160.1_1089 target sequence
YIAKEEKVEYDEKALETIYDVTMGDMRKAINTLQAASAYGKVTVETVFKVLGLAQPKEVRDMLKLALSGKFMEAREKLRSLLVTY

SEQ ID NO: 34582 - protein, 84 aa, unidentified
  REGION 1..84: note = Description of Unknown:cds_NZ_WFIY01000004.1_cds_WP_155863160.1_1089 target sequence
MEAREKLRSLLVTYGLSGEDIVKQLHRELTSNELQIPEELRVLLMDYIGEVEFRIIEGADDEIQLSALLAKIAIYGNKYVGSSK

SEQ ID NO: 34583 - protein, 85 aa, unidentified
  REGION 1..85: note = Description of Unknown:cds_NZ_WFIY01000004.1_cds_WP_155863160.1_1089 target sequence
LKRFVKEKNMPHLLFAGPPGTGKTTAALALVHDLYGDSYEQFFLELNASDERGIDVIRNKVKEFARTMVSSSVPFKVILLDEADN

SEQ ID NO: 34584 - protein, 85 aa, unidentified
  REGION 1..85: note = Description of Unknown:cds_NZ_WFIY01000004.1_cds_WP_155863160.1_1089 target sequence
MTADAQQALRRTMELYTESTRFILACNYLSKIIDPIQSRTALFRFYPLKKEDVVSRLEYIAKEEKVEYDEKALETIYDVTMGDMR

SEQ ID NO: 34585 - protein, 85 aa, unidentified
  REGION 1..85: note = Description of Unknown:cds_NZ_WFIY01000004.1_cds_WP_155863160.1_1089 target sequence
KAINTLQAASAYGKVTVETVFKVLGLAQPKEVRDMLKLALSGKFMEAREKLRSLLVTYGLSGEDIVKQLHRELTSNELQIPEELR

SEQ ID NO: 34586 - protein, 85 aa, unidentified
  REGION 1..85: note = Description of Unknown:cds_NZ_WFIY01000004.1_cds_WP_155864413.1_1209 target sequence
NPVKIIIKRDDFIFAKRLLWKMRNKETRFDEKKFMKEGKDYLIDYAEKNVGPLDPSKRAFLKGLLIGIGVIAVASAVPLINSLNP

SEQ ID NO: 34587 - protein, 85 aa, unidentified
  REGION 1..85: note = Description of Unknown:cds_NZ_WFIY01000004.1_cds_WP_155864413.1_1209 target sequence
EEVTLKKFPWMIIVNSDGVPIEASKIPVNDPEILLFEYPMLGDITFLINMGDENNNPVEIPPTNVLIPQTGKTYYFPGGVGPHKS

SEQ ID NO: 34588 - protein, 85 aa, unidentified
  REGION 1..85: note = Description of Unknown:cds_NZ_WFIY01000004.1_cds_WP_155864413.1_1209 target sequence
IVAYSAICQHLGCTPPEIHFYPPQYFKPGGVVPDFLPPSAYQAAISVGAKSVIHCDCHGSTYDPWHGAAVITGPTVRPLPYVQLY

SEQ ID NO: 34589 - protein, 84 aa, unidentified
  REGION 1..84: note = Description of Unknown:cds_NZ_WFIY01000004.1_cds_WP_155864413.1_1209 target sequence
TGPTVRPLPYVQLYWDPNTDYLYAISMNTNAPPIMDHTSDLEGAAYLDSYNENTECPKFLLSKGKKPTDCYTKIQDYGNPFQGE

SEQ ID NO: 34590 - protein, 85 aa, unidentified
  REGION 1..85: note = Description of Unknown:cds_NZ_WFIY01000004.1_cds_WP_155864413.1_1209 target sequence
RFDEKKFMKEGKDYLIDYAEKNVGPLDPSKRAFLKGLLIGIGVIAVASAVPLINSLNPEEVTLKKFPWMIIVNSDGVPIEASKIP

SEQ ID NO: 34591 - protein, 85 aa, unidentified
  REGION 1..85: note = Description of Unknown:cds_NZ_WFIY01000004.1_cds_WP_155864413.1_1209 target sequence
VNDPEILLFEYPMLGDITFLINMGDENNNPVEIPPTNVLIPQTGKTYYFPGGVGPHKSIVAYSAICQHLGCTPPEIHFYPPQYFK

SEQ ID NO: 34592 - protein, 85 aa, unidentified
  REGION 1..85: note = Description of Unknown:cds_NZ_WFIY01000004.1_cds_WP_155864413.1_1209 target sequence
PGGVVPDFLPPSAYQAAISVGAKSVIHCDCHGSTYDPWHGAAVITGPTVRPLPYVQLYWDPNTDYLYAISMNTNAPPIMDHTSDL

SEQ ID NO: 34593 - protein, 85 aa, unidentified
  REGION 1..85: note = Description of Unknown:cds_NZ_WFIY01000004.1_cds_WP_162309164.1_1587 target sequence
NNYISVIVIAHDRKKYIIDAINSVLNQKLDKDLYEIIVVKNFKDDKIDKFIENNGITKNYITEEKGVGKKAAIGIDNSSGDIICF

SEQ ID NO: 34594 - protein, 85 aa, unidentified
  REGION 1..85: note = Description of Unknown:cds_NZ_WFIY01000004.1_cds_WP_162309164.1_1587 target sequence
LDDDDMFTENKLAIVLDAFSKNNSLVYYHNNQIKIDENGKILDNPQYNSKTIISDITKKSIAFIFRNFGEFNSSSICIRKEIIDT

SEQ ID NO: 34595 - protein, 85 aa, unidentified
  REGION 1..85: note = Description of Unknown:cds_NZ_WFIY01000004.1_cds_WP_162309164.1_1587 target sequence
NMLRKLDRAVDYFYLLSALKTRREIMLDFSPLTYYRIHKSAMHFLSNTFEEIISSACNYYYEQSKAKEAIYEYFKDDNLLAQVTK

SEQ ID NO: 34596 - protein, 84 aa, unidentified
  REGION 1..84: note = Description of Unknown:cds_NZ_WFIY01000004.1_cds_WP_162309164.1_1587 target sequence
EYFKDDNLLAQVTKADVYTFTAISAILCNKSKFLPFKNSIRILDESIYFPSFRLKLFLASILNLLSNKLARDIYVKMYLRKFYN

SEQ ID NO: 34597 - protein, 85 aa, unidentified
  REGION 1..85: note = Description of Unknown:cds_NZ_WFIY01000004.1_cds_WP_162309164.1_1587 target sequence
KLDKDLYEIIVVKNFKDDKIDKFIENNGITKNYITEEKGVGKKAAIGIDNSSGDIICFLDDDDMFTENKLAIVLDAFSKNNSLVY

SEQ ID NO: 34598 - protein, 85 aa, unidentified
  REGION 1..85: note = Description of Unknown:cds_NZ_WFIY01000004.1_cds_WP_162309164.1_1587 target sequence
YHNNQIKIDENGKILDNPQYNSKTIISDITKKSIAFIFRNFGEFNSSSICIRKEIIDTNMLRKLDRAVDYFYLLSALKTRREIML

SEQ ID NO: 34599 - protein, 85 aa, unidentified
  REGION 1..85: note = Description of Unknown:cds_NZ_WFIY01000004.1_cds_WP_162309164.1_1587 target sequence
DFSPLTYYRIHKSAMHFLSNTFEEIISSACNYYYEQSKAKEAIYEYFKDDNLLAQVTKADVYTFTAISAILCNKSKFLPFKNSIR

SEQ ID NO: 34600 - protein, 85 aa, unidentified
  REGION 1..85: note = Description of Unknown:cds_NZ_WFIY01000004.1_cds_WP_155863807.1_1696 target sequence
LIPLEKLREVSKVFLFSGALLLPISIIEIYFGEIYHSAILIADSFHGFIDATSAILFSLLLNIIYRRSNKFPWGLYNLESIAVLF

SEQ ID NO: 34601 - protein, 85 aa, unidentified
  REGION 1..85: note = Description of Unknown:cds_NZ_WFIY01000004.1_cds_WP_155863807.1_1696 target sequence
VTIFIVILSINYINLIISDVNYEVPAWLSSIIYSSSVLTFVVFILEKRYSWISLVKTDLTHSKLDLFMEIVSGFAIIINEYYLTL

SEQ ID NO: 34602 - protein, 85 aa, unidentified
  REGION 1..85: note = Description of Unknown:cds_NZ_WFIY01000004.1_cds_WP_155863807.1_1696 target sequence
TVVFTIIGFILADAIRQFKEAIYSLIGINCDAPFKDRIKTILESLGINIKSIYVRKLGSFYMVYVVISLPPDCKLSNVYKIRKTV

SEQ ID NO: 34603 - protein, 84 aa, unidentified
  REGION 1..84: note = Description of Unknown:cds_NZ_WFIY01000004.1_cds_WP_155863807.1_1696 target sequence
CKLSNVYKIRKTVKRIVNSFENVAMIEVRVVPEKIKKHKLQITNDAPKVSNGNKVNETNWTKYSANFKDIENGRELIKRAVTKD

SEQ ID NO: 34604 - protein, 85 aa, unidentified
  REGION 1..85: note = Description of Unknown:cds_NZ_WFIY01000004.1_cds_WP_155863807.1_1696 target sequence
EIYFGEIYHSAILIADSFHGFIDATSAILFSLLLNIIYRRSNKFPWGLYNLESIAVLFVTIFIVILSINYINLIISDVNYEVPAW

SEQ ID NO: 34605 - protein, 85 aa, unidentified
  REGION 1..85: note = Description of Unknown:cds_NZ_WFIY01000004.1_cds_WP_155863807.1_1696 target sequence
LSSIIYSSSVLTFVVFILEKRYSWISLVKTDLTHSKLDLFMEIVSGFAIIINEYYLTLTVVFTIIGFILADAIRQFKEAIYSLIG

SEQ ID NO: 34606 - protein, 85 aa, unidentified
  REGION 1..85: note = Description of Unknown:cds_NZ_WFIY01000004.1_cds_WP_155863807.1_1696 target sequence
INCDAPFKDRIKTILESLGINIKSIYVRKLGSFYMVYVVISLPPDCKLSNVYKIRKTVKRIVNSFENVAMIEVRVVPEKIKKHKL

SEQ ID NO: 34607 - protein, 85 aa, unidentified
  REGION 1..85: note = Description of Unknown:cds_NC_040412.1_cds_YP_009551538.1_9 target sequence
YGIEYTTVLTLLISILLVNQILRRIAITMDFIIYRFLLLIVICTPLVRGQNYGINLPITGSMDTAYANSTQEEIHLTSTLCLYYP

SEQ ID NO: 34608 - protein, 85 aa, unidentified
  REGION 1..85: note = Description of Unknown:cds_NC_040412.1_cds_YP_009551538.1_9 target sequence
TEAKTEINDNSWTDTISQLLLTKGWPTGSVYFKEYTDIATFSIDPQLYCDYNLVLMKYDANLQLDMSELADLILNEWLCNPMDIT

SEQ ID NO: 34609 - protein, 85 aa, unidentified
  REGION 1..85: note = Description of Unknown:cds_NC_040412.1_cds_YP_009551538.1_9 target sequence
LYYYQQTDEANKWISMGTSCTIKVCPLNTQTLGIGCVTTNTATFEEVATAEKLVITDVVDGVNHKLDVTTSTCTIRNCKKLGPRE

SEQ ID NO: 34610 - protein, 84 aa, unidentified
  REGION 1..84: note = Description of Unknown:cds_NC_040412.1_cds_YP_009551538.1_9 target sequence
TCTIRNCKKLGPRENVAVIQVGGADVLDITADPTTKPQNERMMRVNWKKWWQVFYTVVDYVNQIIQAMSKRSRSLNTAAFYYRV

SEQ ID NO: 34611 - protein, 85 aa, unidentified
  REGION 1..85: note = Description of Unknown:cds_NC_040412.1_cds_YP_009551538.1_9 target sequence
TMDFIIYRFLLLIVICTPLVRGQNYGINLPITGSMDTAYANSTQEEIHLTSTLCLYYPTEAKTEINDNSWTDTISQLLLTKGWPT

SEQ ID NO: 34612 - protein, 85 aa, unidentified
  REGION 1..85: note = Description of Unknown:cds_NC_040412.1_cds_YP_009551538.1_9 target sequence
GSVYFKEYTDIATFSIDPQLYCDYNLVLMKYDANLQLDMSELADLILNEWLCNPMDITLYYYQQTDEANKWISMGTSCTIKVCPL

SEQ ID NO: 34613 - protein, 85 aa, unidentified
  REGION 1..85: note = Description of Unknown:cds_NC_040412.1_cds_YP_009551538.1_9 target sequence
NTQTLGIGCVTTNTATFEEVATAEKLVITDVVDGVNHKLDVTTSTCTIRNCKKLGPRENVAVIQVGGADVLDITADPTTKPQNER

SEQ ID NO: 34614 - protein, 85 aa, unidentified
  REGION 1..85: note = Description of Unknown:cds_NC_002549.1_cds_NP_066245.1_3 target sequence
RRVILPTAPPEYMEAIYPVRSNSTIARGGNSNTGFLTPESVNGDTPSNPLRPIADDTIDHASHTPGSVSSAFILEAMVNVISGPK

SEQ ID NO: 34615 - protein, 85 aa, unidentified
  REGION 1..85: note = Description of Unknown:cds_NC_002549.1_cds_NP_066245.1_3 target sequence
VLMKQIPIWLPLGVADQKTYSFDSTTAAIMLASYTITHFGKATNPLVRVNRLGPGIPDHPLRLLRIGNQAFLQEFVLPPVQLPQY

SEQ ID NO: 34616 - protein, 85 aa, unidentified
  REGION 1..85: note = Description of Unknown:cds_NC_002549.1_cds_NP_066245.1_3 target sequence
FTFDLTALKLITQPLPAATWTDDTPTGSNGALRPGISFHPKLRPILLPNKSGKKGNSADLTSPEKIQAIMTSLQDFKIVPIDPTK

SEQ ID NO: 34617 - protein, 84 aa, unidentified
  REGION 1..84: note = Description of Unknown:cds_NC_002549.1_cds_NP_066245.1_3 target sequence
SLQDFKIVPIDPTKNIMGIEVPETLVHKLTGKKVTSKNGQPIIPVLLPKYIGLDPVAPGDLTMVITQDCDTCHSPASLPAVIEK

SEQ ID NO: 34618 - protein, 85 aa, unidentified
  REGION 1..85: note = Description of Unknown:cds_NC_002549.1_cds_NP_066245.1_3 target sequence
GGNSNTGFLTPESVNGDTPSNPLRPIADDTIDHASHTPGSVSSAFILEAMVNVISGPKVLMKQIPIWLPLGVADQKTYSFDSTTA

SEQ ID NO: 34619 - protein, 85 aa, unidentified
  REGION 1..85: note = Description of Unknown:cds_NC_002549.1_cds_NP_066245.1_3 target sequence
AIMLASYTITHFGKATNPLVRVNRLGPGIPDHPLRLLRIGNQAFLQEFVLPPVQLPQYFTFDLTALKLITQPLPAATWTDDTPTG

SEQ ID NO: 34620 - protein, 85 aa, unidentified
  REGION 1..85: note = Description of Unknown:cds_NC_002549.1_cds_NP_066245.1_3 target sequence
SNGALRPGISFHPKLRPILLPNKSGKKGNSADLTSPEKIQAIMTSLQDFKIVPIDPTKNIMGIEVPETLVHKLTGKKVTSKNGQP

SEQ ID NO: 34621 - protein, 85 aa, unidentified
  REGION 1..85: note = Description of Unknown:cds_NC_039345.1_cds_YP_009513276.1_3 target sequence
RRTVIPTAPPDYTEALYPQRTNSIGSASTSTNQQYYPTDVPGGDIPSNSLRPVADDNIDHTNHTPDNVSSAFILEAMVNVISGPK

SEQ ID NO: 34622 - protein, 85 aa, unidentified
  REGION 1..85: note = Description of Unknown:cds_NC_039345.1_cds_YP_009513276.1_3 target sequence
VLMKQIPIWLPLGVADQKKYSFDSTTAAIMLASYTITHFGKTSNPLVRVNRLGPGIPDHPLRLLRLGNQAFLQEFVLPPVQLPQY

SEQ ID NO: 34623 - protein, 85 aa, unidentified
  REGION 1..85: note = Description of Unknown:cds_NC_039345.1_cds_YP_009513276.1_3 target sequence
FTFDLTALKLITQPLPAATWTDEVLLTSPNMLRPGLSFHPKLRPILLPGKPGKKGANLGLTAPDKIHAIMDHLQDLKVVPIDSSK

SEQ ID NO: 34624 - protein, 84 aa, unidentified
  REGION 1..84: note = Description of Unknown:cds_NC_039345.1_cds_YP_009513276.1_3 target sequence
HLQDLKVVPIDSSKNIVGIEVPDALVQKLTGKKPHAKNGQSIIPVLLPKYIGPDPVSASDLTMVITQDCDTCNSPASFPIASEK

SEQ ID NO: 34625 - protein, 85 aa, unidentified
  REGION 1..85: note = Description of Unknown:cds_NC_039345.1_cds_YP_009513276.1_3 target sequence
STSTNQQYYPTDVPGGDIPSNSLRPVADDNIDHTNHTPDNVSSAFILEAMVNVISGPKVLMKQIPIWLPLGVADQKKYSFDSTTA

SEQ ID NO: 34626 - protein, 85 aa, unidentified
  REGION 1..85: note = Description of Unknown:cds_NC_039345.1_cds_YP_009513276.1_3 target sequence
AIMLASYTITHFGKTSNPLVRVNRLGPGIPDHPLRLLRLGNQAFLQEFVLPPVQLPQYFTFDLTALKLITQPLPAATWTDEVLLT

SEQ ID NO: 34627 - protein, 85 aa, unidentified
  REGION 1..85: note = Description of Unknown:cds_NC_039345.1_cds_YP_009513276.1_3 target sequence
SPNMLRPGLSFHPKLRPILLPGKPGKKGANLGLTAPDKIHAIMDHLQDLKVVPIDSSKNIVGIEVPDALVQKLTGKKPHAKNGQS

SEQ ID NO: 34628 - protein, 85 aa, unidentified
  REGION 1..85: note = Description of Unknown:cds_NC_011503.2_cds_YP_002302222.1_9 target sequence
YGIEYTTVLTFLISIILLNYILKSLTRIMDFIIYRFLFIIVILSPFLRAQNYGINLPITGSMDTAYANSTQEETFLTSTLCLYYP

SEQ ID NO: 34629 - protein, 85 aa, unidentified
  REGION 1..85: note = Description of Unknown:cds_NC_011503.2_cds_YP_002302222.1_9 target sequence
TEAATEINDNSWKDTLSQLFLTKGWPTGSVYFKEYTNIASFSVDPQLYCDYNVVLMKYDATLQLDMSELADLILNEWLCNPMDIT

SEQ ID NO: 34630 - protein, 85 aa, unidentified
  REGION 1..85: note = Description of Unknown:cds_NC_011503.2_cds_YP_002302222.1_9 target sequence
LYYYQQTDEANKWISMGSSCTIKVCPLNTQTLGIGCLTTDATTFEEVATAEKLVITDVVDGVNHKLDVTTATCTIRNCKKLGPRE

SEQ ID NO: 34631 - protein, 84 aa, unidentified
  REGION 1..84: note = Description of Unknown:cds_NC_011503.2_cds_YP_002302222.1_9 target sequence
TCTIRNCKKLGPRENVAVIQVGGSDILDITADPTTAPQTERMMRINWKKWWQVFYTVVDYVDQIIQVMSKRSRSLNSAAFYYRV

SEQ ID NO: 34632 - protein, 85 aa, unidentified
  REGION 1..85: note = Description of Unknown:cds_NC_011503.2_cds_YP_002302222.1_9 target sequence
IMDFIIYRFLFIIVILSPFLRAQNYGINLPITGSMDTAYANSTQEETFLTSTLCLYYPTEAATEINDNSWKDTLSQLFLTKGWPT

SEQ ID NO: 34633 - protein, 85 aa, unidentified
  REGION 1..85: note = Description of Unknown:cds_NC_011503.2_cds_YP_002302222.1_9 target sequence
GSVYFKEYTNIASFSVDPQLYCDYNVVLMKYDATLQLDMSELADLILNEWLCNPMDITLYYYQQTDEANKWISMGSSCTIKVCPL

SEQ ID NO: 34634 - protein, 85 aa, unidentified
  REGION 1..85: note = Description of Unknown:cds_NC_011503.2_cds_YP_002302222.1_9 target sequence
NTQTLGIGCLTTDATTFEEVATAEKLVITDVVDGVNHKLDVTTATCTIRNCKKLGPRENVAVIQVGGSDILDITADPTTAPQTER

SEQ ID NO: 34635 - protein, 85 aa, unidentified
  REGION 1..85: note = Description of Unknown:cds_NC_007409.1_cds_YP_319864.1_33 target sequence
STTFRGKKEEEEEEEEEKEEKEEELFNPFKEEFLEEGKTVSEEINNPFEEEEEEEIPNPFEVETNYLPEIDKLLMLYQKGFIDKD

SEQ ID NO: 34636 - protein, 85 aa, unidentified
  REGION 1..85: note = Description of Unknown:cds_NC_007409.1_cds_YP_319864.1_33 target sequence
MVDLASKILGIELDLGDYKQIGKSLIKVPIIIIAKPSHFGEIKQEIPEAEIADPYSKKYPIISLLSLEKTINTLTNAKMPWKRFS

SEQ ID NO: 34637 - protein, 85 aa, unidentified
  REGION 1..85: note = Description of Unknown:cds_NC_007409.1_cds_YP_319864.1_33 target sequence
IFIDASYTTDIPQSAVALLNGLIDILRKAGYDVKLYTKYGEEPITLDEESASRFVSMENPNLAKILCHAKKVQGLDKTCDDSRWW

SEQ ID NO: 34638 - protein, 84 aa, unidentified
  REGION 1..84: note = Description of Unknown:cds_NC_007409.1_cds_YP_319864.1_33 target sequence
VQGLDKTCDDSRWWEYDLWGNRKKNVIDQDKVRQIALKYNVSPVLVRYIANSIGNPRSLRRYAESFNVPEQLVMDIAKELSSSS

SEQ ID NO: 34639 - protein, 85 aa, unidentified
  REGION 1..85: note = Description of Unknown:cds_NC_007409.1_cds_YP_319864.1_33 target sequence
PFKEEFLEEGKTVSEEINNPFEEEEEEEIPNPFEVETNYLPEIDKLLMLYQKGFIDKDMVDLASKILGIELDLGDYKQIGKSLIK

SEQ ID NO: 34640 - protein, 85 aa, unidentified
  REGION 1..85: note = Description of Unknown:cds_NC_007409.1_cds_YP_319864.1_33 target sequence
VPIIIIAKPSHFGEIKQEIPEAEIADPYSKKYPIISLLSLEKTINTLTNAKMPWKRFSIFIDASYTTDIPQSAVALLNGLIDILR

SEQ ID NO: 34641 - protein, 85 aa, unidentified
  REGION 1..85: note = Description of Unknown:cds_NC_007409.1_cds_YP_319864.1_33 target sequence
KAGYDVKLYTKYGEEPITLDEESASRFVSMENPNLAKILCHAKKVQGLDKTCDDSRWWEYDLWGNRKKNVIDQDKVRQIALKYNV

SEQ ID NO: 34642 - protein, 85 aa, unidentified
  REGION 1..85: note = Description of Unknown:cds_NC_007409.1_cds_YP_319901.1_70 target sequence
KFGGYFTKSVDDLKIDEELSKLIPENTMSDKIKNEIQKYGFLYPVIIDQNGFVIDGYTRVRIAKELGIKEVPVIVYIFDSPEERM

SEQ ID NO: 34643 - protein, 85 aa, unidentified
  REGION 1..85: note = Description of Unknown:cds_NC_007409.1_cds_YP_319901.1_70 target sequence
RSAIQLNVIRRHLTHEQIEQLYQKYLSTGLSPKEAVKKLDKELKQENIRIKNLEPKMRAVEILQSEAPELFELLAKYQLDPQLLL

SEQ ID NO: 34644 - protein, 85 aa, unidentified
  REGION 1..85: note = Description of Unknown:cds_NC_007409.1_cds_YP_319901.1_70 target sequence
QFYLSIKEFYDYFKQLPEEKKLEILRSERLLLQVEAEPALLKQFAEAEKFASSVTSVPTTEQEDNGDLESFYRGVDGNEEELIRS

SEQ ID NO: 34645 - protein, 84 aa, unidentified
  REGION 1..84: note = Description of Unknown:cds_NC_007409.1_cds_YP_319901.1_70 target sequence
YRGVDGNEEELIRSKEELNEALEQMGLGTEEEEAENQDEQLFSEFIEELKSGSVTAVPKSIEVYKKENGRLIKIEGEIYLKRKS

SEQ ID NO: 34646 - protein, 85 aa, unidentified
  REGION 1..85: note = Description of Unknown:cds_NC_007409.1_cds_YP_319901.1_70 target sequence
MSDKIKNEIQKYGFLYPVIIDQNGFVIDGYTRVRIAKELGIKEVPVIVYIFDSPEERMRSAIQLNVIRRHLTHEQIEQLYQKYLS

SEQ ID NO: 34647 - protein, 85 aa, unidentified
  REGION 1..85: note = Description of Unknown:cds_NC_007409.1_cds_YP_319901.1_70 target sequence
TGLSPKEAVKKLDKELKQENIRIKNLEPKMRAVEILQSEAPELFELLAKYQLDPQLLLQFYLSIKEFYDYFKQLPEEKKLEILRS

SEQ ID NO: 34648 - protein, 85 aa, unidentified
  REGION 1..85: note = Description of Unknown:cds_NC_007409.1_cds_YP_319901.1_70 target sequence
ERLLLQVEAEPALLKQFAEAEKFASSVTSVPTTEQEDNGDLESFYRGVDGNEEELIRSKEELNEALEQMGLGTEEEEAENQDEQL

SEQ ID NO: 34649 - protein, 85 aa, unidentified
  REGION 1..85: note = Description of Unknown:cds_NZ_WFIY01000004.1_cds_WP_155862415.1_156 target sequence
VRELSFLVLFMLIFVSSSIVSIEVGNAPSFILCNSGYIYVTNYNSSTVSIINPSNNEVISTIAVGSQPISMVSAGNKIYVALAGC

SEQ ID NO: 34650 - protein, 85 aa, unidentified
  REGION 1..85: note = Description of Unknown:cds_NZ_WFIY01000004.1_cds_WP_155862415.1_156 target sequence
DKIVVLENNKIIRSINLTSSPCYMAYDPKDQELFVIEPEINSLGIIKNCSLIKTINLGYQPDAIAFDPKNCLLYIGGGYNGVVYV

SEQ ID NO: 34651 - protein, 85 aa, unidentified
  REGION 1..85: note = Description of Unknown:cds_NZ_WFIY01000004.1_cds_WP_155862415.1_156 target sequence
YNTEGKLNTTYYIGGRVVYVNYCNGNIFVTSWINNELTIINSSGVFHFSAGLGPYDAIYDPSDGYIYVSDVATGSILVLSLSGSV

SEQ ID NO: 34652 - protein, 84 aa, unidentified
  REGION 1..84: note = Description of Unknown:cds_NZ_WFIY01000004.1_cds_WP_155862415.1_156 target sequence
VATGSILVLSLSGSVIHNISVGGRPSILMYKNGNIYVVNSLSNNVIIIPQVPPPPPPYCLYYLIAGGIGILVIVGYFVIKKEIR

SEQ ID NO: 34653 - protein, 85 aa, unidentified
  REGION 1..85: note = Description of Unknown:cds_NZ_WFIY01000004.1_cds_WP_155862415.1_156 target sequence
PSFILCNSGYIYVTNYNSSTVSIINPSNNEVISTIAVGSQPISMVSAGNKIYVALAGCDKIVVLENNKIIRSINLTSSPCYMAYD

SEQ ID NO: 34654 - protein, 85 aa, unidentified
  REGION 1..85: note = Description of Unknown:cds_NZ_WFIY01000004.1_cds_WP_155862415.1_156 target sequence
PKDQELFVIEPEINSLGIIKNCSLIKTINLGYQPDAIAFDPKNCLLYIGGGYNGVVYVYNTEGKLNTTYYIGGRVVYVNYCNGNI

SEQ ID NO: 34655 - protein, 85 aa, unidentified
  REGION 1..85: note = Description of Unknown:cds_NZ_WFIY01000004.1_cds_WP_155862415.1_156 target sequence
FVTSWINNELTIINSSGVFHFSAGLGPYDAIYDPSDGYIYVSDVATGSILVLSLSGSVIHNISVGGRPSILMYKNGNIYVVNSLS

SEQ ID NO: 34656 - protein, 85 aa, unidentified
  REGION 1..85: note = Description of Unknown:cds_NZ_WFIY01000004.1_cds_WP_155862697.1_497 target sequence
IKRVSVIGAGLIGSGWATLLATKGYEVSLYTDKKETLDKGIAKIKSYLEVMKNMNLVDKEPDYYMKNISPTLNMDEAIEGTDFVI

SEQ ID NO: 34657 - protein, 85 aa, unidentified
  REGION 1..85: note = Description of Unknown:cds_NZ_WFIY01000004.1_cds_WP_155862697.1_497 target sequence
EAIIEDYDAKKKVFSYLDEKLDKNVILSSSTSGLLMTEIQKAMKRYPERSVIAHPWNPPHLLPLVEIVPGEKTSQETLNVTKDFM

SEQ ID NO: 34658 - protein, 85 aa, unidentified
  REGION 1..85: note = Description of Unknown:cds_NZ_WFIY01000004.1_cds_WP_155862697.1_497 target sequence
EKLDRVVVVLKKEIPGFLGNRLAFALFREAVYLVDEGVATVEDIDKVMTAAIGLRWAFMGPFLTYHLGGGEGGLEYFFSRGFGYG

SEQ ID NO: 34659 - protein, 84 aa, unidentified
  REGION 1..84: note = Description of Unknown:cds_NZ_WFIY01000004.1_cds_WP_155862697.1_497 target sequence
EGGLEYFFSRGFGYGANEWMHTLAKYDKFPYTGVVKAVQQMKEYSFIKGKSFQELSKWRDEKLFQIYKIVWGDKKQNSNGENNK

SEQ ID NO: 34660 - protein, 85 aa, unidentified
  REGION 1..85: note = Description of Unknown:cds_NZ_WFIY01000004.1_cds_WP_155862697.1_497 target sequence
SLYTDKKETLDKGIAKIKSYLEVMKNMNLVDKEPDYYMKNISPTLNMDEAIEGTDFVIEAIIEDYDAKKKVFSYLDEKLDKNVIL

SEQ ID NO: 34661 - protein, 85 aa, unidentified
  REGION 1..85: note = Description of Unknown:cds_NZ_WFIY01000004.1_cds_WP_155862697.1_497 target sequence
SSSTSGLLMTEIQKAMKRYPERSVIAHPWNPPHLLPLVEIVPGEKTSQETLNVTKDFMEKLDRVVVVLKKEIPGFLGNRLAFALF

SEQ ID NO: 34662 - protein, 85 aa, unidentified
  REGION 1..85: note = Description of Unknown:cds_NZ_WFIY01000004.1_cds_WP_155862697.1_497 target sequence
REAVYLVDEGVATVEDIDKVMTAAIGLRWAFMGPFLTYHLGGGEGGLEYFFSRGFGYGANEWMHTLAKYDKFPYTGVVKAVQQMK

SEQ ID NO: 34663 - protein, 85 aa, unidentified
  REGION 1..85: note = Description of Unknown:cds_NZ_WFIY01000004.1_cds_WP_155863979.1_1903 target sequence
DYYAIVHNDFDGTASVAVYARAVKSLPKNVWFTEPTKVHNILSKLEPRGVYNVMIADLGLNESTFDKIVESCKKLIDQGVKIQWF

SEQ ID NO: 34664 - protein, 85 aa, unidentified
  REGION 1..85: note = Description of Unknown:cds_NZ_WFIY01000004.1_cds_WP_155863979.1_1903 target sequence
DHHVWKEEWKSKLSEIGVEVHHDTSTCGAGVVHKVMNPDDEFSSKLASADCSVDIWLHNDPMGEKLRRIVESNKDYGWKKKLIET

SEQ ID NO: 34665 - protein, 85 aa, unidentified
  REGION 1..85: note = Description of Unknown:cds_NZ_WFIY01000004.1_cds_WP_155863979.1_1903 target sequence
FYNGILWNEEFQKILEDQVDQELKGYQKLPKYYRVIEINGVKVVVAIRWKGPPDISYAAQYLMTRTGAKVFVSANGKAISFRSST

SEQ ID NO: 34666 - protein, 84 aa, unidentified
  REGION 1..84: note = Description of Unknown:cds_NZ_WFIY01000004.1_cds_WP_155863979.1_1903 target sequence
FVSANGKAISFRSSTINVRLFAAKLGGGGHPLAAGASLKIPLIYRILRRIGIISPANKWVCNVVTKVISDVGFKEYQQKDITQH

SEQ ID NO: 34667 - protein, 85 aa, unidentified
  REGION 1..85: note = Description of Unknown:cds_NZ_WFIY01000004.1_cds_WP_155863979.1_1903 target sequence
KNVWFTEPTKVHNILSKLEPRGVYNVMIADLGLNESTFDKIVESCKKLIDQGVKIQWFDHHVWKEEWKSKLSEIGVEVHHDTSTC

SEQ ID NO: 34668 - protein, 85 aa, unidentified
  REGION 1..85: note = Description of Unknown:cds_NZ_WFIY01000004.1_cds_WP_155863979.1_1903 target sequence
GAGVVHKVMNPDDEFSSKLASADCSVDIWLHNDPMGEKLRRIVESNKDYGWKKKLIETFYNGILWNEEFQKILEDQVDQELKGYQ

SEQ ID NO: 34669 - protein, 85 aa, unidentified
  REGION 1..85: note = Description of Unknown:cds_NZ_WFIY01000004.1_cds_WP_155863979.1_1903 target sequence
KLPKYYRVIEINGVKVVVAIRWKGPPDISYAAQYLMTRTGAKVFVSANGKAISFRSSTINVRLFAAKLGGGGHPLAAGASLKIPL

SEQ ID NO: 34670 - protein, 85 aa, unidentified
  REGION 1..85: note = Description of Unknown:cds_NZ_WFIY01000004.1_cds_WP_155864278.1_2271 target sequence
IKFKLNKDEKPILSPSDFYFINKLLAKMRNPKTKFDSREFVKKGEDYLFNYVDKNLGGIDEGRRRFLKGLVIGIGAAAVIGLIPG

SEQ ID NO: 34671 - protein, 85 aa, unidentified
  REGION 1..85: note = Description of Unknown:cds_NZ_WFIY01000004.1_cds_WP_155864278.1_2271 target sequence
LRVLQPPEVAAISGFPKSLLVDSSGSPILASKIPVNSPIITIYEYPLTGEPNFLLNLGDSSGKPVKLPPATVVVPQTGDKYTWPG

SEQ ID NO: 34672 - protein, 85 aa, unidentified
  REGION 1..85: note = Description of Unknown:cds_NZ_WFIY01000004.1_cds_WP_155864278.1_2271 target sequence
GVGPYGSIVSYSAICQHLGCQPPYIHFYPPNHVNSAQESAPEPDTLTPQAVAAAQSNHIPAIFHCDCHGSTYDPYHGAAVLTGPT

SEQ ID NO: 34673 - protein, 84 aa, unidentified
  REGION 1..84: note = Description of Unknown:cds_NZ_WFIY01000004.1_cds_WP_155864278.1_2271 target sequence
TYDPYHGAAVLTGPTVRPLPATILEWDSSTDYLYAVGSIGVGVYPTGSNGVPSKDPKSDLDSSFGSSVGTKTVVKETENPFSSS

SEQ ID NO: 34674 - protein, 85 aa, unidentified
  REGION 1..85: note = Description of Unknown:cds_NZ_WFIY01000004.1_cds_WP_155864278.1_2271 target sequence
MRNPKTKFDSREFVKKGEDYLFNYVDKNLGGIDEGRRRFLKGLVIGIGAAAVIGLIPGLRVLQPPEVAAISGFPKSLLVDSSGSP

SEQ ID NO: 34675 - protein, 85 aa, unidentified
  REGION 1..85: note = Description of Unknown:cds_NZ_WFIY01000004.1_cds_WP_155864278.1_2271 target sequence
ILASKIPVNSPIITIYEYPLTGEPNFLLNLGDSSGKPVKLPPATVVVPQTGDKYTWPGGVGPYGSIVSYSAICQHLGCQPPYIHF

SEQ ID NO: 34676 - protein, 85 aa, unidentified
  REGION 1..85: note = Description of Unknown:cds_NZ_WFIY01000004.1_cds_WP_155864278.1_2271 target sequence
YPPNHVNSAQESAPEPDTLTPQAVAAAQSNHIPAIFHCDCHGSTYDPYHGAAVLTGPTVRPLPATILEWDSSTDYLYAVGSIGVG

SEQ ID NO: 34677 - protein, 85 aa, unidentified
  REGION 1..85: note = Description of Unknown:cds_NZ_WFIY01000004.1_cds_WP_155864307.1_2303 target sequence
RLLLLLLTLTITLLSSVSPFTASVFVQYPKEVILGSKIPINFSLTQQEINSTAFPFISAGVREVSEEPLILEGAGIAGSFAVFKI

SEQ ID NO: 34678 - protein, 85 aa, unidentified
  REGION 1..85: note = Description of Unknown:cds_NZ_WFIY01000004.1_cds_WP_155864307.1_2303 target sequence
NSSSQVVVITFIGKDNTFLWWDPGIVVYGGNFNPHVSDLSQEDFTAVLIPFTGRLLVHTPSKGWFALSCSFPSIAPQRDGWINVT

SEQ ID NO: 34679 - protein, 85 aa, unidentified
  REGION 1..85: note = Description of Unknown:cds_NZ_WFIY01000004.1_cds_WP_155864307.1_2303 target sequence
KPFSYTAILEDVNGSICVKYVILNGEKYIVDYQTPIPWNFTYVGVRIDPSTVTVCGFYVTIPSPHQPYVVYVNGKEYTKGYTNSL

SEQ ID NO: 34680 - protein, 84 aa, unidentified
  REGION 1..84: note = Description of Unknown:cds_NZ_WFIY01000004.1_cds_WP_155864307.1_2303 target sequence
YVNGKEYTKGYTNSLGEGSFSLTVSSPFMIVNISFPSAHVFCVITISAQRDANIHVEYPILQYVLLGVSVVLVAISIIWRKRLQ

SEQ ID NO: 34681 - protein, 85 aa, unidentified
  REGION 1..85: note = Description of Unknown:cds_NZ_WFIY01000004.1_cds_WP_155864307.1_2303 target sequence
YPKEVILGSKIPINFSLTQQEINSTAFPFISAGVREVSEEPLILEGAGIAGSFAVFKINSSSQVVVITFIGKDNTFLWWDPGIVV

SEQ ID NO: 34682 - protein, 85 aa, unidentified
  REGION 1..85: note = Description of Unknown:cds_NZ_WFIY01000004.1_cds_WP_155864307.1_2303 target sequence
YGGNFNPHVSDLSQEDFTAVLIPFTGRLLVHTPSKGWFALSCSFPSIAPQRDGWINVTKPFSYTAILEDVNGSICVKYVILNGEK

SEQ ID NO: 34683 - protein, 85 aa, unidentified
  REGION 1..85: note = Description of Unknown:cds_NZ_WFIY01000004.1_cds_WP_155864307.1_2303 target sequence
YIVDYQTPIPWNFTYVGVRIDPSTVTVCGFYVTIPSPHQPYVVYVNGKEYTKGYTNSLGEGSFSLTVSSPFMIVNISFPSAHVFC

SEQ ID NO: 34684 - protein, 85 aa, unidentified
  REGION 1..85: note = Description of Unknown:cds_NZ_WFIY01000004.1_cds_WP_155862381.1_118 target sequence
KLEGEAIAPSNIAIVKYWGKRNTELNLPLNSSISISLDNLYARTKVIFSEEFSKDEVIINGKKLSEKETLNYAGRVLNIFRKIYG

SEQ ID NO: 34685 - protein, 85 aa, unidentified
  REGION 1..85: note = Description of Unknown:cds_NZ_WFIY01000004.1_cds_WP_155862381.1_118 target sequence
KNLFAKVISTTNFPPSSGLASSAAGIAALVYASNEALGLGLTQKELSKIARIGSGSACRSTEGGFVVWEKGEREDGEDSFCYQIF

SEQ ID NO: 34686 - protein, 85 aa, unidentified
  REGION 1..85: note = Description of Unknown:cds_NZ_WFIY01000004.1_cds_WP_155862381.1_118 target sequence
PHNYWEDLVDIIAIVSDEKKEVSSREGMEVTTRSSYLMKCRLDFIKETFNDVIESIRKKDEEKFFELTMRHSNSMHAVILDSWPS

SEQ ID NO: 34687 - protein, 84 aa, unidentified
  REGION 1..84: note = Description of Unknown:cds_NZ_WFIY01000004.1_cds_WP_155862381.1_118 target sequence
RHSNSMHAVILDSWPSFFYLNDMSFKIMRWVQDFGHAGYTFDAGPNPHIFTTKKHMKEVINFLQSLNLKYIITSPGQGPKVLHS

SEQ ID NO: 34688 - protein, 85 aa, unidentified
  REGION 1..85: note = Description of Unknown:cds_NZ_WFIY01000004.1_cds_WP_155862381.1_118 target sequence
PLNSSISISLDNLYARTKVIFSEEFSKDEVIINGKKLSEKETLNYAGRVLNIFRKIYGKNLFAKVISTTNFPPSSGLASSAAGIA

SEQ ID NO: 34689 - protein, 85 aa, unidentified
  REGION 1..85: note = Description of Unknown:cds_NZ_WFIY01000004.1_cds_WP_155862381.1_118 target sequence
ALVYASNEALGLGLTQKELSKIARIGSGSACRSTEGGFVVWEKGEREDGEDSFCYQIFPHNYWEDLVDIIAIVSDEKKEVSSREG

SEQ ID NO: 34690 - protein, 85 aa, unidentified
  REGION 1..85: note = Description of Unknown:cds_NZ_WFIY01000004.1_cds_WP_155862381.1_118 target sequence
MEVTTRSSYLMKCRLDFIKETFNDVIESIRKKDEEKFFELTMRHSNSMHAVILDSWPSFFYLNDMSFKIMRWVQDFGHAGYTFDA

SEQ ID NO: 34691 - protein, 85 aa, unidentified
  REGION 1..85: note = Description of Unknown:cds_NZ_WFIY01000004.1_cds_WP_155862497.1_256 target sequence
EKIAIIGGGVSGSYLAYLLSNSGYDVTLFDIKEKYFKPCGDVVPNIYKPKFEWKIKYYIKNFAFYLDGERIYDVSYRNPKWIVID

SEQ ID NO: 34692 - protein, 85 aa, unidentified
  REGION 1..85: note = Description of Unknown:cds_NZ_WFIY01000004.1_cds_WP_155862497.1_256 target sequence
KSGWINSMRKNVNQVISTNVDKSKFDLIIDAKGPYDMDRQVVYTTRALIETNEFSDEAVLEFNTKFTGFFWIFPDEEGVLNVGAG

SEQ ID NO: 34693 - protein, 85 aa, unidentified
  REGION 1..85: note = Description of Unknown:cds_NZ_WFIY01000004.1_cds_WP_155862497.1_256 target sequence
FIENKNSKDILLNYIKNKFKDYKILDLRGAPISIGGVKSKSLKIGEARGLVFPMSGEGIRPSAISAEIAYEAITKGRNFDEYLSY

SEQ ID NO: 34694 - protein, 84 aa, unidentified
  REGION 1..84: note = Description of Unknown:cds_NZ_WFIY01000004.1_cds_WP_155862497.1_256 target sequence
YEAITKGRNFDEYLSYNLTKIERRIEIQRRLLDVYMRSNINARKFLLKIFLRNDVLIDAFLEDKLDFEGILESARGIKYGSIIR

SEQ ID NO: 34695 - protein, 85 aa, unidentified
  REGION 1..85: note = Description of Unknown:cds_NZ_WFIY01000004.1_cds_WP_155862497.1_256 target sequence
LFDIKEKYFKPCGDVVPNIYKPKFEWKIKYYIKNFAFYLDGERIYDVSYRNPKWIVIDKSGWINSMRKNVNQVISTNVDKSKFDL

SEQ ID NO: 34696 - protein, 85 aa, unidentified
  REGION 1..85: note = Description of Unknown:cds_NZ_WFIY01000004.1_cds_WP_155862497.1_256 target sequence
IIDAKGPYDMDRQVVYTTRALIETNEFSDEAVLEFNTKFTGFFWIFPDEEGVLNVGAGFIENKNSKDILLNYIKNKFKDYKILDL

SEQ ID NO: 34697 - protein, 85 aa, unidentified
  REGION 1..85: note = Description of Unknown:cds_NZ_WFIY01000004.1_cds_WP_155862497.1_256 target sequence
RGAPISIGGVKSKSLKIGEARGLVFPMSGEGIRPSAISAEIAYEAITKGRNFDEYLSYNLTKIERRIEIQRRLLDVYMRSNINAR

SEQ ID NO: 34698 - protein, 85 aa, unidentified
  REGION 1..85: note = Description of Unknown:cds_NZ_WFIY01000004.1_cds_WP_155862504.1_263 target sequence
EQTTIRTNSLNKENLNILITDPVADVMLNTLKEKGFHVDYQPEISKEELMKVIENYDIIVVRSRTKVTRDIIERGKRLKIIARAG

SEQ ID NO: 34699 - protein, 85 aa, unidentified
  REGION 1..85: note = Description of Unknown:cds_NZ_WFIY01000004.1_cds_WP_155862504.1_263 target sequence
IGLDNIDTDAAEERGIKIVYAPGASTDSAVELTIGLMIAGARKMYTSMTLAKSGIFKKIEGLELAGKTLGIIGFGRIGTKVGIIA

SEQ ID NO: 34700 - protein, 85 aa, unidentified
  REGION 1..85: note = Description of Unknown:cds_NZ_WFIY01000004.1_cds_WP_155862504.1_263 target sequence
KAMGMRVLAYDIMDIKDRATQLGIIPVTLEELLKQSDVISLHVTVGKNAKPILDEKAFEIMKDNVIIVNTSRAVAVDGQALLKYI

SEQ ID NO: 34701 - protein, 84 aa, unidentified
  REGION 1..84: note = Description of Unknown:cds_NZ_WFIY01000004.1_cds_WP_155862504.1_263 target sequence
TSRAVAVDGQALLKYIKSGKVYAYAADVLWNEPPKEEWELELLKHERVTITTHIGAQTKEAQYRVAVTTTENLLNAIKELGVQF

SEQ ID NO: 34702 - protein, 85 aa, unidentified
  REGION 1..85: note = Description of Unknown:cds_NZ_WFIY01000004.1_cds_WP_155862504.1_263 target sequence
LNTLKEKGFHVDYQPEISKEELMKVIENYDIIVVRSRTKVTRDIIERGKRLKIIARAGIGLDNIDTDAAEERGIKIVYAPGASTD

SEQ ID NO: 34703 - protein, 85 aa, unidentified
  REGION 1..85: note = Description of Unknown:cds_NZ_WFIY01000004.1_cds_WP_155862504.1_263 target sequence
SAVELTIGLMIAGARKMYTSMTLAKSGIFKKIEGLELAGKTLGIIGFGRIGTKVGIIAKAMGMRVLAYDIMDIKDRATQLGIIPV

SEQ ID NO: 34704 - protein, 85 aa, unidentified
  REGION 1..85: note = Description of Unknown:cds_NZ_WFIY01000004.1_cds_WP_155862504.1_263 target sequence
TLEELLKQSDVISLHVTVGKNAKPILDEKAFEIMKDNVIIVNTSRAVAVDGQALLKYIKSGKVYAYAADVLWNEPPKEEWELELL

SEQ ID NO: 34705 - protein, 85 aa, unidentified
  REGION 1..85: note = Description of Unknown:cds_NZ_WFIY01000004.1_cds_WP_152940056.1_836 target sequence
LADQVQEKKKPKSIEDLSGVGQAVLNKLIDAGYSSLEAIAVASPQDLSVAAGIPLTTAQRIIKEARDALDIRFKTALEVKKERMN

SEQ ID NO: 34706 - protein, 85 aa, unidentified
  REGION 1..85: note = Description of Unknown:cds_NZ_WFIY01000004.1_cds_WP_152940056.1_836 target sequence
VRKITTSSQALDGLLGGGIETRTMTEFFGEFGSGKTQICHQISVNVQLPPEKGGLSGKAVYIDTEGTFRWERIEAMAKAAGLDPD

SEQ ID NO: 34707 - protein, 85 aa, unidentified
  REGION 1..85: note = Description of Unknown:cds_NZ_WFIY01000004.1_cds_WP_152940056.1_836 target sequence
TAMDNIYYMRAINSDHQIAIGDDLQEFIAKNPSVKVVIVDSVTSHFRAEYTGRENLAARQQKLNKHLHQLTRLAEIYDLAVIITN

SEQ ID NO: 34708 - protein, 84 aa, unidentified
  REGION 1..84: note = Description of Unknown:cds_NZ_WFIY01000004.1_cds_WP_152940056.1_836 target sequence
TRLAEIYDLAVIITNQVMARPDMFYGDPTVAVGGHTLYHVPGIRVQLKKSRGNKRIARIVDAPHLPEGEVVFAITEEGIRDAEE

SEQ ID NO: 34709 - protein, 85 aa, unidentified
  REGION 1..85: note = Description of Unknown:cds_NZ_WFIY01000004.1_cds_WP_152940056.1_836 target sequence
LIDAGYSSLEAIAVASPQDLSVAAGIPLTTAQRIIKEARDALDIRFKTALEVKKERMNVRKITTSSQALDGLLGGGIETRTMTEF

SEQ ID NO: 34710 - protein, 85 aa, unidentified
  REGION 1..85: note = Description of Unknown:cds_NZ_WFIY01000004.1_cds_WP_152940056.1_836 target sequence
FGEFGSGKTQICHQISVNVQLPPEKGGLSGKAVYIDTEGTFRWERIEAMAKAAGLDPDTAMDNIYYMRAINSDHQIAIGDDLQEF

SEQ ID NO: 34711 - protein, 85 aa, unidentified
  REGION 1..85: note = Description of Unknown:cds_NZ_WFIY01000004.1_cds_WP_152940056.1_836 target sequence
IAKNPSVKVVIVDSVTSHFRAEYTGRENLAARQQKLNKHLHQLTRLAEIYDLAVIITNQVMARPDMFYGDPTVAVGGHTLYHVPG

SEQ ID NO: 34712 - protein, 85 aa, unidentified
  REGION 1..85: note = Description of Unknown:cds_NZ_WFIY01000004.1_cds_WP_155864049.1_1985 target sequence
ERAWRGFAIIYASKKEIAERLCEEIKKRETPCSLFSYKEANFKNIWKCYDGIIFAMALSGAVRTICKYAQSKDKDPPVLAIDDEG

SEQ ID NO: 34713 - protein, 85 aa, unidentified
  REGION 1..85: note = Description of Unknown:cds_NZ_WFIY01000004.1_cds_WP_155864049.1_1985 target sequence
KFVIPILGAHWGANEYAEEIAKLLGSIPVITTASELSNVTSVEEFARLVNCKILNVENVVKVTSALLRGEEVCVKGLKKLPNVKG

SEQ ID NO: 34714 - protein, 85 aa, unidentified
  REGION 1..85: note = Description of Unknown:cds_NZ_WFIY01000004.1_cds_WP_155864049.1_1985 target sequence
KYKIGDNCKYFIVVGEEDREEADNVVYLKPLKLSIGVGSKIEADEKTIEEAILFALNKINADISQVEVISSVREKVGKVAERLGV

SEQ ID NO: 34715 - protein, 84 aa, unidentified
  REGION 1..84: note = Description of Unknown:cds_NZ_WFIY01000004.1_cds_WP_155864049.1_1985 target sequence
SSVREKVGKVAERLGVKFRLISLEEVNSFNDECLSPQSQKLKELGIKNVAEACALISAGKNAKLILRKIPYKGEVTVSIASIGE

SEQ ID NO: 34716 - protein, 85 aa, unidentified
  REGION 1..85: note = Description of Unknown:cds_NZ_WFIY01000004.1_cds_WP_155864049.1_1985 target sequence
RETPCSLFSYKEANFKNIWKCYDGIIFAMALSGAVRTICKYAQSKDKDPPVLAIDDEGKFVIPILGAHWGANEYAEEIAKLLGSI

SEQ ID NO: 34717 - protein, 85 aa, unidentified
  REGION 1..85: note = Description of Unknown:cds_NZ_WFIY01000004.1_cds_WP_155864049.1_1985 target sequence
PVITTASELSNVTSVEEFARLVNCKILNVENVVKVTSALLRGEEVCVKGLKKLPNVKGKYKIGDNCKYFIVVGEEDREEADNVVY

SEQ ID NO: 34718 - protein, 85 aa, unidentified
  REGION 1..85: note = Description of Unknown:cds_NZ_WFIY01000004.1_cds_WP_155864049.1_1985 target sequence
LKPLKLSIGVGSKIEADEKTIEEAILFALNKINADISQVEVISSVREKVGKVAERLGVKFRLISLEEVNSFNDECLSPQSQKLKE

SEQ ID NO: 34719 - protein, 85 aa, unidentified
  REGION 1..85: note = Description of Unknown:cds_NZ_WFIY01000004.1_cds_WP_155864328.1_2333 target sequence
NKVHVSAVGTSLLKNSLSADNVRKKVEDLGLKDWDRLKFDDDRQNKIRDNFTTLEGLLLDFLKSKGKVASAELDSLLSAIDKLQH

SEQ ID NO: 34720 - protein, 85 aa, unidentified
  REGION 1..85: note = Description of Unknown:cds_NZ_WFIY01000004.1_cds_WP_155864328.1_2333 target sequence
KKEELYVFLYTTNTWNSKLAGEVIKNYLEEEGIKSELVTVKSISSEETFYEGIEDLFDKVVYKILKFKEEGKEVYINATPGLKPE

SEQ ID NO: 34721 - protein, 85 aa, unidentified
  REGION 1..85: note = Description of Unknown:cds_NZ_WFIY01000004.1_cds_WP_155864328.1_2333 target sequence
TTFLTIAGLLAGADLIYYKYQEFNDVVILPSPPITISPRYLEWLIDFANYGYTLSEKKAEELGIPVRLLEVRNLVERKGEDAYRL

SEQ ID NO: 34722 - protein, 84 aa, unidentified
  REGION 1..84: note = Description of Unknown:cds_NZ_WFIY01000004.1_cds_WP_155864328.1_2333 target sequence
EVRNLVERKGEDAYRLKDWVRKMLGIYLPAGITSSYYKVIVEGEEEKVFNNETEAYNYMEKKKKEGKRVRVEVPNKVYFLWTLS

SEQ ID NO: 34723 - protein, 85 aa, unidentified
  REGION 1..85: note = Description of Unknown:cds_NZ_WFIY01000004.1_cds_WP_155864328.1_2333 target sequence
DLGLKDWDRLKFDDDRQNKIRDNFTTLEGLLLDFLKSKGKVASAELDSLLSAIDKLQHKKEELYVFLYTTNTWNSKLAGEVIKNY

SEQ ID NO: 34724 - protein, 85 aa, unidentified
  REGION 1..85: note = Description of Unknown:cds_NZ_WFIY01000004.1_cds_WP_155864328.1_2333 target sequence
LEEEGIKSELVTVKSISSEETFYEGIEDLFDKVVYKILKFKEEGKEVYINATPGLKPETTFLTIAGLLAGADLIYYKYQEFNDVV

SEQ ID NO: 34725 - protein, 85 aa, unidentified
  REGION 1..85: note = Description of Unknown:cds_NZ_WFIY01000004.1_cds_WP_155864328.1_2333 target sequence
ILPSPPITISPRYLEWLIDFANYGYTLSEKKAEELGIPVRLLEVRNLVERKGEDAYRLKDWVRKMLGIYLPAGITSSYYKVIVEG

SEQ ID NO: 34726 - protein, 85 aa, unidentified
  REGION 1..85: note = Description of Unknown:cds_NC_035460.1_cds_YP_009407970.1_19 target sequence
DSEPILKENPNRFVLFPIKYNDIWKMYKKAVASFWTTEEVDLTKDINDWEELTNDEQYFIKNILAFFAASDGIVNENLVERFCNE

SEQ ID NO: 34727 - protein, 85 aa, unidentified
  REGION 1..85: note = Description of Unknown:cds_NC_035460.1_cds_YP_009407970.1_19 target sequence
VQVTEARCFYGFQIAIENIHSEMYSLLIDTYIKDKEEKNKLFNAIKTMPYITKKAEWALKWITNKEASYGERLVAFAAIEGIFFS

SEQ ID NO: 34728 - protein, 85 aa, unidentified
  REGION 1..85: note = Description of Unknown:cds_NC_035460.1_cds_YP_009407970.1_19 target sequence
GSFASIFWLKKRGLMPGLTFSNELISRDEGLHCDFACLMFKHLLNPPSNDVVNKIITDAVKIEQEFLTDALPVKLIGMNSDMMKQ

SEQ ID NO: 34729 - protein, 84 aa, unidentified
  REGION 1..84: note = Description of Unknown:cds_NC_035460.1_cds_YP_009407970.1_19 target sequence
ALPVKLIGMNSDMMKQYIEFVADRLLVELTGSKIYKSKNPFDFMENISLEGKTNFFEKRVGEYQKMGVMYKIDDNNKFTLDSEF

SEQ ID NO: 34730 - protein, 85 aa, unidentified
  REGION 1..85: note = Description of Unknown:cds_NC_035460.1_cds_YP_009407970.1_19 target sequence
KKAVASFWTTEEVDLTKDINDWEELTNDEQYFIKNILAFFAASDGIVNENLVERFCNEVQVTEARCFYGFQIAIENIHSEMYSLL

SEQ ID NO: 34731 - protein, 85 aa, unidentified
  REGION 1..85: note = Description of Unknown:cds_NC_035460.1_cds_YP_009407970.1_19 target sequence
IDTYIKDKEEKNKLFNAIKTMPYITKKAEWALKWITNKEASYGERLVAFAAIEGIFFSGSFASIFWLKKRGLMPGLTFSNELISR

SEQ ID NO: 34732 - protein, 85 aa, unidentified
  REGION 1..85: note = Description of Unknown:cds_NC_035460.1_cds_YP_009407970.1_19 target sequence
DEGLHCDFACLMFKHLLNPPSNDVVNKIITDAVKIEQEFLTDALPVKLIGMNSDMMKQYIEFVADRLLVELTGSKIYKSKNPFDF

SEQ ID NO: 34733 - protein, 85 aa, unidentified
  REGION 1..85: note = Description of Unknown:cds_NZ_WFIY01000004.1_cds_WP_155862312.1_30 target sequence
IQLQELTKRYGNKVILDGVTETIETGEFFVILGPSGAGKSTLLKILAGIEKLDKGKIIVDGKDITNLPPEKRNVAMVFQNYALYP

SEQ ID NO: 34734 - protein, 85 aa, unidentified
  REGION 1..85: note = Description of Unknown:cds_NZ_WFIY01000004.1_cds_WP_155862312.1_30 target sequence
NMTVYDNIAFPLKMKRMTKDEIQKRVERVAKLLGITDILKMNVTKISGGQQQRVALARAIVREPSFYLLDEPLSNLDARVRFVAR

SEQ ID NO: 34735 - protein, 85 aa, unidentified
  REGION 1..85: note = Description of Unknown:cds_NZ_WFIY01000004.1_cds_WP_155862312.1_30 target sequence
GELKRIQKELNGTFIYVTHDQKEAMSLADRIAVLHNGKFEQVGTPTELYEYPKTKWVGEFIGDYPMNFLPGKVIGEDNIEIGFRP

SEQ ID NO: 34736 - protein, 84 aa, unidentified
  REGION 1..84: note = Description of Unknown:cds_NZ_WFIY01000004.1_cds_WP_155862312.1_30 target sequence
LPGKVIGEDNIEIGFRPEWTKIGGDLKGIVESVEVLGETTYLSCKVDEYKVIIESKEMYDIGDEVTFSIVKFRRFKDGFLIDKE

SEQ ID NO: 34737 - protein, 85 aa, unidentified
  REGION 1..85: note = Description of Unknown:cds_NZ_WFIY01000004.1_cds_WP_155862312.1_30 target sequence
FFVILGPSGAGKSTLLKILAGIEKLDKGKIIVDGKDITNLPPEKRNVAMVFQNYALYPNMTVYDNIAFPLKMKRMTKDEIQKRVE

SEQ ID NO: 34738 - protein, 85 aa, unidentified
  REGION 1..85: note = Description of Unknown:cds_NZ_WFIY01000004.1_cds_WP_155862312.1_30 target sequence
RVAKLLGITDILKMNVTKISGGQQQRVALARAIVREPSFYLLDEPLSNLDARVRFVARGELKRIQKELNGTFIYVTHDQKEAMSL

SEQ ID NO: 34739 - protein, 85 aa, unidentified
  REGION 1..85: note = Description of Unknown:cds_NZ_WFIY01000004.1_cds_WP_155862312.1_30 target sequence
ADRIAVLHNGKFEQVGTPTELYEYPKTKWVGEFIGDYPMNFLPGKVIGEDNIEIGFRPEWTKIGGDLKGIVESVEVLGETTYLSC

SEQ ID NO: 34740 - protein, 85 aa, unidentified
  REGION 1..85: note = Description of Unknown:cds_NZ_WFIY01000004.1_cds_WP_155862766.1_580 target sequence
SIVIAKNLTKKYGEFVAVDHINFEIEKGEIYGLLGPNGAGKTTTIKMLTGLTPITEGDAIIAGISVKKKPRDVKKRIGWISSEVI

SEQ ID NO: 34741 - protein, 85 aa, unidentified
  REGION 1..85: note = Description of Unknown:cds_NZ_WFIY01000004.1_cds_WP_155862766.1_580 target sequence
LDDELTAWENLEIQAKLLGVKDWQEKADQLLEYFGIKEFKNRKAGKFSTGMRKKLEVSMALLHSPEIIFMDEPTIGLDVNTRASL

SEQ ID NO: 34742 - protein, 85 aa, unidentified
  REGION 1..85: note = Description of Unknown:cds_NZ_WFIY01000004.1_cds_WP_155862766.1_580 target sequence
WNLIRQINRDYQVTILLTTHYMEEADMLCNRISIINHGKIIAQGTPEELKEKYGGDVVEIELKDIKNSVISDLESVGKVIKRENG

SEQ ID NO: 34743 - protein, 84 aa, unidentified
  REGION 1..84: note = Description of Unknown:cds_NZ_WFIY01000004.1_cds_WP_155862766.1_580 target sequence
VISDLESVGKVIKRENGKIAIKVGNAEEVLLKIVGIVGQNNIKSLKINKSSLDTVFLNLTGGSLEENEEFDARRFYAMLRRARR

SEQ ID NO: 34744 - protein, 85 aa, unidentified
  REGION 1..85: note = Description of Unknown:cds_NZ_WFIY01000004.1_cds_WP_155862766.1_580 target sequence
GEIYGLLGPNGAGKTTTIKMLTGLTPITEGDAIIAGISVKKKPRDVKKRIGWISSEVILDDELTAWENLEIQAKLLGVKDWQEKA

SEQ ID NO: 34745 - protein, 85 aa, unidentified
  REGION 1..85: note = Description of Unknown:cds_NZ_WFIY01000004.1_cds_WP_155862766.1_580 target sequence
DQLLEYFGIKEFKNRKAGKFSTGMRKKLEVSMALLHSPEIIFMDEPTIGLDVNTRASLWNLIRQINRDYQVTILLTTHYMEEADM

SEQ ID NO: 34746 - protein, 85 aa, unidentified
  REGION 1..85: note = Description of Unknown:cds_NZ_WFIY01000004.1_cds_WP_155862766.1_580 target sequence
LCNRISIINHGKIIAQGTPEELKEKYGGDVVEIELKDIKNSVISDLESVGKVIKRENGKIAIKVGNAEEVLLKIVGIVGQNNIKS

SEQ ID NO: 34747 - protein, 85 aa, unidentified
  REGION 1..85: note = Description of Unknown:cds_NZ_WFIY01000004.1_cds_WP_155862939.1_795 target sequence
LELKVVDLFSGAGGFSLGFKNQGFNIALAIDINHAAARTYAENFPSTLVLEEDIRNVTGEEIIDILGSSPDILIGSPPCEGFTAA

SEQ ID NO: 34748 - protein, 85 aa, unidentified
  REGION 1..85: note = Description of Unknown:cds_NZ_WFIY01000004.1_cds_WP_155862939.1_795 target sequence
NPSRLKNPVDRLYLDERGSLTLEFIRLVGELKPKIFVMENVPAIVETKELKDALILEFSKIGYEHIYFNFLRAEDYGNPSRRLRV

SEQ ID NO: 34749 - protein, 85 aa, unidentified
  REGION 1..85: note = Description of Unknown:cds_NZ_WFIY01000004.1_cds_WP_155862939.1_795 target sequence
FISNIQINPPKLAKKVTVHDAISDLDGRTDVPNNEIHEISEKKMLKISKLGFGDYLTMYRGSKKEIPLYIRLDPFDLAPTVLGNS

SEQ ID NO: 34750 - protein, 84 aa, unidentified
  REGION 1..84: note = Description of Unknown:cds_NZ_WFIY01000004.1_cds_WP_155862939.1_795 target sequence
IRLDPFDLAPTVLGNSRFIHPYHDRFLTVREQARLMSYPDEHVFIGSKDEQYNQIGEAVPVALSTAIASYIKVKIREEYYSWFA

SEQ ID NO: 34751 - protein, 85 aa, unidentified
  REGION 1..85: note = Description of Unknown:cds_NZ_WFIY01000004.1_cds_WP_155862939.1_795 target sequence
LAIDINHAAARTYAENFPSTLVLEEDIRNVTGEEIIDILGSSPDILIGSPPCEGFTAANPSRLKNPVDRLYLDERGSLTLEFIRL

SEQ ID NO: 34752 - protein, 85 aa, unidentified
  REGION 1..85: note = Description of Unknown:cds_NZ_WFIY01000004.1_cds_WP_155862939.1_795 target sequence
VGELKPKIFVMENVPAIVETKELKDALILEFSKIGYEHIYFNFLRAEDYGNPSRRLRVFISNIQINPPKLAKKVTVHDAISDLDG

SEQ ID NO: 34753 - protein, 85 aa, unidentified
  REGION 1..85: note = Description of Unknown:cds_NZ_WFIY01000004.1_cds_WP_155862939.1_795 target sequence
RTDVPNNEIHEISEKKMLKISKLGFGDYLTMYRGSKKEIPLYIRLDPFDLAPTVLGNSRFIHPYHDRFLTVREQARLMSYPDEHV

SEQ ID NO: 34754 - protein, 85 aa, unidentified
  REGION 1..85: note = Description of Unknown:cds_NZ_WFIY01000004.1_cds_WP_155862970.1_840 target sequence
QLDEVDKNLLMELEYHFPYSPTPFYEISRKLGISEDETIDRIKKLVDEEIIKRIGMYINFRAKGMDGALVAAQIPLENLEKYRRI

SEQ ID NO: 34755 - protein, 85 aa, unidentified
  REGION 1..85: note = Description of Unknown:cds_NZ_WFIY01000004.1_cds_WP_155862970.1_840 target sequence
ALGIRELTHNFIRNHPKYNVWFVIKAENREKLDTSIKNLMEEVNAKDYIILYSKKSLKLSVKYDIIRGISWSENNEPTLPEKIPT

SEQ ID NO: 34756 - protein, 85 aa, unidentified
  REGION 1..85: note = Description of Unknown:cds_NZ_WFIY01000004.1_cds_WP_155862970.1_840 target sequence
AEELGISKELLKALSVPLPITKRPFKEIAEKFNMTEDQLIDLIKELKDKHVVKDYGATLNGEKVGIKENAMLLIDTEDVEKACEN

SEQ ID NO: 34757 - protein, 84 aa, unidentified
  REGION 1..84: note = Description of Unknown:cds_NZ_WFIY01000004.1_cds_WP_155862970.1_840 target sequence
NAMLLIDTEDVEKACENIALHINEATHVVLRESNKPWDYLCYCMLHGKDKQVIFDAVKKVIGETDARSYMLLFSLENLKPGIVM

SEQ ID NO: 34758 - protein, 85 aa, unidentified
  REGION 1..85: note = Description of Unknown:cds_NZ_WFIY01000004.1_cds_WP_155862970.1_840 target sequence
SRKLGISEDETIDRIKKLVDEEIIKRIGMYINFRAKGMDGALVAAQIPLENLEKYRRIALGIRELTHNFIRNHPKYNVWFVIKAE

SEQ ID NO: 34759 - protein, 85 aa, unidentified
  REGION 1..85: note = Description of Unknown:cds_NZ_WFIY01000004.1_cds_WP_155862970.1_840 target sequence
NREKLDTSIKNLMEEVNAKDYIILYSKKSLKLSVKYDIIRGISWSENNEPTLPEKIPTAEELGISKELLKALSVPLPITKRPFKE

SEQ ID NO: 34760 - protein, 85 aa, unidentified
  REGION 1..85: note = Description of Unknown:cds_NZ_WFIY01000004.1_cds_WP_155862970.1_840 target sequence
IAEKFNMTEDQLIDLIKELKDKHVVKDYGATLNGEKVGIKENAMLLIDTEDVEKACENIALHINEATHVVLRESNKPWDYLCYCM

SEQ ID NO: 34761 - protein, 85 aa, unidentified
  REGION 1..85: note = Description of Unknown:cds_NZ_WFIY01000004.1_cds_WP_155863899.1_1805 target sequence
SLLPKTADIKPGEKFDVIIIGMGPAAYGAALYAGRYMLKTLVIGETPGGQLTEAGEVDDYLGLIGIQAQDMIKTFNAHIEKYNIP

SEQ ID NO: 34762 - protein, 85 aa, unidentified
  REGION 1..85: note = Description of Unknown:cds_NZ_WFIY01000004.1_cds_WP_155863899.1_1805 target sequence
VILDTVESFRREGDEYVVKTKRKGEFRATTLIVAVGVKRRKLNVPGEAEFTGRGVSYCSICDAPLFKKKVVAVVGGGDSALEGAE

SEQ ID NO: 34763 - protein, 85 aa, unidentified
  REGION 1..85: note = Description of Unknown:cds_NZ_WFIY01000004.1_cds_WP_155863899.1_1805 target sequence
LLSRYATKVYLIHRRDQFRAQPYYVELVKQKQNVEFILNSVVKEIKGEKIVKSIVVENLVTKEVKEIPVNGVFVEIGFEPPTDFA

SEQ ID NO: 34764 - protein, 84 aa, unidentified
  REGION 1..84: note = Description of Unknown:cds_NZ_WFIY01000004.1_cds_WP_155863899.1_1805 target sequence
VNGVFVEIGFEPPTDFARANNLEVDSHGYIKVDEWMRTNLPGVFAAGDCTGMWLGFRQVVTATAQGAVAAHSVFTYLNEKKGKK

SEQ ID NO: 34765 - protein, 85 aa, unidentified
  REGION 1..85: note = Description of Unknown:cds_NZ_WFIY01000004.1_cds_WP_155863899.1_1805 target sequence
GAALYAGRYMLKTLVIGETPGGQLTEAGEVDDYLGLIGIQAQDMIKTFNAHIEKYNIPVILDTVESFRREGDEYVVKTKRKGEFR

SEQ ID NO: 34766 - protein, 85 aa, unidentified
  REGION 1..85: note = Description of Unknown:cds_NZ_WFIY01000004.1_cds_WP_155863899.1_1805 target sequence
ATTLIVAVGVKRRKLNVPGEAEFTGRGVSYCSICDAPLFKKKVVAVVGGGDSALEGAELLSRYATKVYLIHRRDQFRAQPYYVEL

SEQ ID NO: 34767 - protein, 85 aa, unidentified
  REGION 1..85: note = Description of Unknown:cds_NZ_WFIY01000004.1_cds_WP_155863899.1_1805 target sequence
VKQKQNVEFILNSVVKEIKGEKIVKSIVVENLVTKEVKEIPVNGVFVEIGFEPPTDFARANNLEVDSHGYIKVDEWMRTNLPGVF

SEQ ID NO: 34768 - protein, 85 aa, unidentified
  REGION 1..85: note = Description of Unknown:vpeps_4TQG_1 target sequence
SQINDKTIMIFGGSGSLGNRLIETYINNNIIVNYSRDESKHWSMELKYKSDKLKNIIGDIRDFEKVQQSIMRINPDIIIIAAALK

SEQ ID NO: 34769 - protein, 85 aa, unidentified
  REGION 1..85: note = Description of Unknown:vpeps_4TQG_1 target sequence
HIDRCEYEINECLDTNIKGLQNVLKVTEINRSNLSNLKAVCFVSTDKACSPVNSYGMSKAICETLVVEKSKYIKDIKYVCVRYGN

SEQ ID NO: 34770 - protein, 85 aa, unidentified
  REGION 1..85: note = Description of Unknown:vpeps_4TQG_1 target sequence
VLNSRGSIIPILENKGSDPNCDHFTLTHTSMTRFIMTLDDSVKLIEYAIINGNSGEIVIPKLNSMYIKDMIELFADKYNKPIVIT

SEQ ID NO: 34771 - protein, 85 aa, unidentified
  REGION 1..85: note = Description of Unknown:vpeps_4TQG_1 target sequence
DMIELFADKYNKPIVITGLRSGERMYESLINDTQSMKTVPKGDYYHILPTYDPTIVTEEFYEYSSKQNILSKQELENYLNQVNLL

SEQ ID NO: 34772 - protein, 85 aa, unidentified
  REGION 1..85: note = Description of Unknown:vpeps_4TQG_1 target sequence
NNIIVNYSRDESKHWSMELKYKSDKLKNIIGDIRDFEKVQQSIMRINPDIIIIAAALKHIDRCEYEINECLDTNIKGLQNVLKVT

SEQ ID NO: 34773 - protein, 85 aa, unidentified
  REGION 1..85: note = Description of Unknown:vpeps_4TQG_1 target sequence
EINRSNLSNLKAVCFVSTDKACSPVNSYGMSKAICETLVVEKSKYIKDIKYVCVRYGNVLNSRGSIIPILENKGSDPNCDHFTLT

SEQ ID NO: 34774 - protein, 85 aa, unidentified
  REGION 1..85: note = Description of Unknown:vpeps_4TQG_1 target sequence
HTSMTRFIMTLDDSVKLIEYAIINGNSGEIVIPKLNSMYIKDMIELFADKYNKPIVITGLRSGERMYESLINDTQSMKTVPKGDY

SEQ ID NO: 34775 - protein, 85 aa, unidentified
  REGION 1..85: note = Description of Unknown:cds_NZ_WFIY01000004.1_cds_WP_155862567.1_336 target sequence
NRDIKAIRWFIKTQLLKDPFNPGYATFKVTSRCNLHCTFCNPEYYNGELGEGSTETIKKIIDNLRDSSIVVLSFEGGEPTIRKDI

SEQ ID NO: 34776 - protein, 85 aa, unidentified
  REGION 1..85: note = Description of Unknown:cds_NZ_WFIY01000004.1_cds_WP_155862567.1_336 target sequence
LDLLEYAHDGSFYVMLTTNGYRLNEDEFLTKLADRIDFLHYSIDEYHWNVKALDTLCKFRQYGIKVNVQTVVTRYNLNKLEDKIK

SEQ ID NO: 34777 - protein, 85 aa, unidentified
  REGION 1..85: note = Description of Unknown:cds_NZ_WFIY01000004.1_cds_WP_155862567.1_336 target sequence
KVRECNYKILVLPAVDYPNAKVKLAPDPEQLYNVLSELKKKYSSTLNNSWGFIKALKGEYPKRLVSYAITIYPNGDLPYPDDING

SEQ ID NO: 34778 - protein, 84 aa, unidentified
  REGION 1..84: note = Description of Unknown:cds_NZ_WFIY01000004.1_cds_WP_155862567.1_336 target sequence
AITIYPNGDLPYPDDINGEIVGNLSKERLNDILKSPRVKELQRKMLENQAKFEYLHLQTASFNSLRDLAEYVKDMAKWRFTGKA

SEQ ID NO: 34779 - protein, 85 aa, unidentified
  REGION 1..85: note = Description of Unknown:cds_NZ_WFIY01000004.1_cds_WP_155862567.1_336 target sequence
KVTSRCNLHCTFCNPEYYNGELGEGSTETIKKIIDNLRDSSIVVLSFEGGEPTIRKDILDLLEYAHDGSFYVMLTTNGYRLNEDE

SEQ ID NO: 34780 - protein, 85 aa, unidentified
  REGION 1..85: note = Description of Unknown:cds_NZ_WFIY01000004.1_cds_WP_155862567.1_336 target sequence
FLTKLADRIDFLHYSIDEYHWNVKALDTLCKFRQYGIKVNVQTVVTRYNLNKLEDKIKKVRECNYKILVLPAVDYPNAKVKLAPD

SEQ ID NO: 34781 - protein, 85 aa, unidentified
  REGION 1..85: note = Description of Unknown:cds_NZ_WFIY01000004.1_cds_WP_155862567.1_336 target sequence
PEQLYNVLSELKKKYSSTLNNSWGFIKALKGEYPKRLVSYAITIYPNGDLPYPDDINGEIVGNLSKERLNDILKSPRVKELQRKM

SEQ ID NO: 34782 - protein, 85 aa, unidentified
  REGION 1..85: note = Description of Unknown:cds_NZ_WFIY01000004.1_cds_WP_155862690.1_488 target sequence
VSEYKKAGVDLNKIKEIHEYIAKEISSTYRNVLLGAGHYSGVINYNGIKLALHTDGVGTKTLLALKSGIFEPVGIDCVAMNVNDL

SEQ ID NO: 34783 - protein, 85 aa, unidentified
  REGION 1..85: note = Description of Unknown:cds_NZ_WFIY01000004.1_cds_WP_155862690.1_488 target sequence
VSIGARPLALVDYLAMEKPMDDVVKGVMKGLVKGAIESEAEIVGGETAIMKDVINGFDLSCTALGVVDEIKDGHDVKPGDVILGL

SEQ ID NO: 34784 - protein, 85 aa, unidentified
  REGION 1..85: note = Description of Unknown:cds_NZ_WFIY01000004.1_cds_WP_155862690.1_488 target sequence
RSNGIHSNGYSLVRKLIDDGKISFEDWKEEIMKPTKIYVKPILSVLPMIKAAAHITGGSFSKLRRITNYHIELKMPEPQDIFKEI

SEQ ID NO: 34785 - protein, 84 aa, unidentified
  REGION 1..84: note = Description of Unknown:cds_NZ_WFIY01000004.1_cds_WP_155862690.1_488 target sequence
NYHIELKMPEPQDIFKEIEKAGVSHEEMYKVFNMGIGMVVFTSPEYKDDVMKNIQKFVEVYEIGKVSEGSGITIFTYKNAVLYL

SEQ ID NO: 34786 - protein, 85 aa, unidentified
  REGION 1..85: note = Description of Unknown:cds_NZ_WFIY01000004.1_cds_WP_155862690.1_488 target sequence
TYRNVLLGAGHYSGVINYNGIKLALHTDGVGTKTLLALKSGIFEPVGIDCVAMNVNDLVSIGARPLALVDYLAMEKPMDDVVKGV

SEQ ID NO: 34787 - protein, 85 aa, unidentified
  REGION 1..85: note = Description of Unknown:cds_NZ_WFIY01000004.1_cds_WP_155862690.1_488 target sequence
MKGLVKGAIESEAEIVGGETAIMKDVINGFDLSCTALGVVDEIKDGHDVKPGDVILGLRSNGIHSNGYSLVRKLIDDGKISFEDW

SEQ ID NO: 34788 - protein, 85 aa, unidentified
  REGION 1..85: note = Description of Unknown:cds_NZ_WFIY01000004.1_cds_WP_155862690.1_488 target sequence
KEEIMKPTKIYVKPILSVLPMIKAAAHITGGSFSKLRRITNYHIELKMPEPQDIFKEIEKAGVSHEEMYKVFNMGIGMVVFTSPE

SEQ ID NO: 34789 - protein, 85 aa, unidentified
  REGION 1..85: note = Description of Unknown:cds_NZ_WFIY01000004.1_cds_995 target sequence
SGAILLGNNFTVDGHYERNFRVVTHFHADHILQLNKSISSCIGIISTPPTLEVLSVLGYDIPKKKAMGISYGIKIAIEDEKIELV

SEQ ID NO: 34790 - protein, 85 aa, unidentified
  REGION 1..85: note = Description of Unknown:cds_NZ_WFIY01000004.1_cds_995 target sequence
QADHVFGAAQVVVTNSNGESVGYTGDFKNPGKGTPILNTDVLIVDTTYGKPAFRRKFRDEVEILFSDYVNDSLIYGPVRVYAYYG

SEQ ID NO: 34791 - protein, 85 aa, unidentified
  REGION 1..85: note = Description of Unknown:cds_NZ_WFIY01000004.1_cds_995 target sequence
KIQEAMKILRRNGISAPFIVDGKIKEITDIAIKYGLEIKDVFSAKSPEAKDIIKDGWYVEFKHFHEFKNRDSKFTNFALSGWEFS

SEQ ID NO: 34792 - protein, 84 aa, unidentified
  REGION 1..84: note = Description of Unknown:cds_NZ_WFIY01000004.1_cds_995 target sequence
NRDSKFTNFALSGWEFSSPIRDVDNKSKIVALSDHADFDELVYYVDSSSASLIVTDGGRKGYYKEFADYVNRYLNKKAISLPKD

SEQ ID NO: 34793 - protein, 85 aa, unidentified
  REGION 1..85: note = Description of Unknown:cds_NZ_WFIY01000004.1_cds_995 target sequence
ADHILQLNKSISSCIGIISTPPTLEVLSVLGYDIPKKKAMGISYGIKIAIEDEKIELVQADHVFGAAQVVVTNSNGESVGYTGDF

SEQ ID NO: 34794 - protein, 85 aa, unidentified
  REGION 1..85: note = Description of Unknown:cds_NZ_WFIY01000004.1_cds_995 target sequence
KNPGKGTPILNTDVLIVDTTYGKPAFRRKFRDEVEILFSDYVNDSLIYGPVRVYAYYGKIQEAMKILRRNGISAPFIVDGKIKEI

SEQ ID NO: 34795 - protein, 85 aa, unidentified
  REGION 1..85: note = Description of Unknown:cds_NZ_WFIY01000004.1_cds_995 target sequence
TDIAIKYGLEIKDVFSAKSPEAKDIIKDGWYVEFKHFHEFKNRDSKFTNFALSGWEFSSPIRDVDNKSKIVALSDHADFDELVYY

SEQ ID NO: 34796 - protein, 85 aa, unidentified
  REGION 1..85: note = Description of Unknown:cds_NZ_WFIY01000004.1_cds_1705 target sequence
VGLFNRKKNNYSKQVRILFTSDLHGSDIVFKKFLNAGKMYKVDALIIGGDLAGKALIPIIELNDGNYEIDGNRFSKDLLAQKISE

SEQ ID NO: 34797 - protein, 85 aa, unidentified
  REGION 1..85: note = Description of Unknown:cds_NZ_WFIY01000004.1_cds_1705 target sequence
IRNQGNYYVIVSREEFEDMKRDKRKVDEAFKNAMTEVVRTWIRIAEERYKGLNIPIYVNLGNDDPEYLFDVLDESDIMIKTEGKV

SEQ ID NO: 34798 - protein, 85 aa, unidentified
  REGION 1..85: note = Description of Unknown:cds_NZ_WFIY01000004.1_cds_1705 target sequence
VNIDKYEMVSYGYVNPTPWHTPREMPEEKLYEALKHEVEKLSNPSEAIFNFHAPPYGSNLDNAPLLDENLKPVVKGGEIVFTHVG

SEQ ID NO: 34799 - protein, 84 aa, unidentified
  REGION 1..84: note = Description of Unknown:cds_NZ_WFIY01000004.1_cds_1705 target sequence
NLKPVVKGGEIVFTHVGSQAVRKIIEETQPLLGLHGHIHESRGFDKIGRTIVINPGSEYGEGLLHAALIVLEGGKVKAYQFIIG

SEQ ID NO: 34800 - protein, 85 aa, unidentified
  REGION 1..85: note = Description of Unknown:cds_NZ_WFIY01000004.1_cds_1705 target sequence
IVFKKFLNAGKMYKVDALIIGGDLAGKALIPIIELNDGNYEIDGNRFSKDLLAQKISEIRNQGNYYVIVSREEFEDMKRDKRKVD

SEQ ID NO: 34801 - protein, 85 aa, unidentified
  REGION 1..85: note = Description of Unknown:cds_NZ_WFIY01000004.1_cds_1705 target sequence
EAFKNAMTEVVRTWIRIAEERYKGLNIPIYVNLGNDDPEYLFDVLDESDIMIKTEGKVVNIDKYEMVSYGYVNPTPWHTPREMPE

SEQ ID NO: 34802 - protein, 85 aa, unidentified
  REGION 1..85: note = Description of Unknown:cds_NZ_WFIY01000004.1_cds_1705 target sequence
EKLYEALKHEVEKLSNPSEAIFNFHAPPYGSNLDNAPLLDENLKPVVKGGEIVFTHVGSQAVRKIIEETQPLLGLHGHIHESRGF

SEQ ID NO: 34803 - protein, 85 aa, unidentified
  REGION 1..85: note = Description of Unknown:cds_NZ_WFIY01000004.1_cds_WP_155862864.1_702 target sequence
IRLNFINFESEILKDNPLQDPYIRRIGIIEPEDPIGKPIIIYLSGFLGSSLSMLNYDPLSEDILSRVERLKKEGKINGSIIVLPD

SEQ ID NO: 34804 - protein, 85 aa, unidentified
  REGION 1..85: note = Description of Unknown:cds_NZ_WFIY01000004.1_cds_WP_155862864.1_702 target sequence
MFTKVGGNQYINSQAVGFYEDFLIKELIPYLEEKYKSRKIGLIGKSSGGYGALVLGMKYNEIKAIASHSGDAYFEYVYLPMFPKV

SEQ ID NO: 34805 - protein, 85 aa, unidentified
  REGION 1..85: note = Description of Unknown:cds_NZ_WFIY01000004.1_cds_WP_155862864.1_702 target sequence
IPYLRKFSSPEEWLNNFWKKQNKKKKEDLNVLNIIGMSAFYSPSPEGKILLPFDLDSGEIIEDLWKKWLEKDPVRIIEKLGEKLK

SEQ ID NO: 34806 - protein, 84 aa, unidentified
  REGION 1..84: note = Description of Unknown:cds_NZ_WFIY01000004.1_cds_WP_155862864.1_702 target sequence
KWLEKDPVRIIEKLGEKLKNKGVFIDVGIKDEYNIQYGARILHNKMKKMGIEHYYEEYEDGHMNTSYRLDISISFIEKYLSMIS

SEQ ID NO: 34807 - protein, 85 aa, unidentified
  REGION 1..85: note = Description of Unknown:cds_NZ_WFIY01000004.1_cds_WP_155862864.1_702 target sequence
IIEPEDPIGKPIIIYLSGFLGSSLSMLNYDPLSEDILSRVERLKKEGKINGSIIVLPDMFTKVGGNQYINSQAVGFYEDFLIKEL

SEQ ID NO: 34808 - protein, 85 aa, unidentified
  REGION 1..85: note = Description of Unknown:cds_NZ_WFIY01000004.1_cds_WP_155862864.1_702 target sequence
IPYLEEKYKSRKIGLIGKSSGGYGALVLGMKYNEIKAIASHSGDAYFEYVYLPMFPKVIPYLRKFSSPEEWLNNFWKKQNKKKKE

SEQ ID NO: 34809 - protein, 85 aa, unidentified
  REGION 1..85: note = Description of Unknown:cds_NZ_WFIY01000004.1_cds_WP_155862864.1_702 target sequence
DLNVLNIIGMSAFYSPSPEGKILLPFDLDSGEIIEDLWKKWLEKDPVRIIEKLGEKLKNKGVFIDVGIKDEYNIQYGARILHNKM

SEQ ID NO: 34810 - protein, 85 aa, unidentified
  REGION 1..85: note = Description of Unknown:cds_NZ_WFIY01000004.1_cds_WP_155863466.1_1428 target sequence
KNLLWLQGGACGGNTLSVLNASDPDLFTFLFTHNVKLLWHPSLSLDNNITQILNDIISDRLHLDILIFEGTVIMGPNGTGMYDIF

SEQ ID NO: 34811 - protein, 85 aa, unidentified
  REGION 1..85: note = Description of Unknown:cds_NZ_WFIY01000004.1_cds_WP_155863466.1_1428 target sequence
AGKPMIEWLRKIATKADYIIAVGSCASFGGIPASEPNPTESTGLQFHKKDCGGFLGKNFKSRKGFPVINLSGCPVHPEWLLTTLL

SEQ ID NO: 34812 - protein, 85 aa, unidentified
  REGION 1..85: note = Description of Unknown:cds_NZ_WFIY01000004.1_cds_WP_155863466.1_1428 target sequence
LIIEDKLSQEDLDEFNRPRLFYSTTTQFGCPRQPYFTYKISTKELGHREGCLYFELGCRGPYTRSSCNNILWNNQSSKTRVGTPC

SEQ ID NO: 34813 - protein, 84 aa, unidentified
  REGION 1..84: note = Description of Unknown:cds_NZ_WFIY01000004.1_cds_WP_155863466.1_1428 target sequence
CNNILWNNQSSKTRVGTPCMGCTEFDFPSFNFFKTEKNRSGIPKRLPLGVSRGSYVTFSAVAKASAPQFLLRPLVRKGKGDWIE

SEQ ID NO: 34814 - protein, 85 aa, unidentified
  REGION 1..85: note = Description of Unknown:cds_NZ_WFIY01000004.1_cds_WP_155863466.1_1428 target sequence
TFLFTHNVKLLWHPSLSLDNNITQILNDIISDRLHLDILIFEGTVIMGPNGTGMYDIFAGKPMIEWLRKIATKADYIIAVGSCAS

SEQ ID NO: 34815 - protein, 85 aa, unidentified
  REGION 1..85: note = Description of Unknown:cds_NZ_WFIY01000004.1_cds_WP_155863466.1_1428 target sequence
FGGIPASEPNPTESTGLQFHKKDCGGFLGKNFKSRKGFPVINLSGCPVHPEWLLTTLLLIIEDKLSQEDLDEFNRPRLFYSTTTQ

SEQ ID NO: 34816 - protein, 85 aa, unidentified
  REGION 1..85: note = Description of Unknown:cds_NZ_WFIY01000004.1_cds_WP_155863466.1_1428 target sequence
FGCPRQPYFTYKISTKELGHREGCLYFELGCRGPYTRSSCNNILWNNQSSKTRVGTPCMGCTEFDFPSFNFFKTEKNRSGIPKRL

SEQ ID NO: 34817 - protein, 85 aa, unidentified
  REGION 1..85: note = Description of Unknown:cds_NZ_WFIY01000004.1_cds_1458 target sequence
NKKSIFAKFLLNSLSFFDTVEALYKRIQTEQTGEESILSDIKLLEEQKIFNIARFFETSSKAFLATYGVIIVYPVFLISTVERER

SEQ ID NO: 34818 - protein, 85 aa, unidentified
  REGION 1..85: note = Description of Unknown:cds_NZ_WFIY01000004.1_cds_1458 target sequence
LKCQRQFQKILNSLPTLLRQAVNTKKIIEKLKHDPIGKSQISDLLITTANFLRCMQKKELAEVYENIANFLKKPANERNYSDLFR

SEQ ID NO: 34819 - protein, 85 aa, unidentified
  REGION 1..85: note = Description of Unknown:cds_NZ_WFIY01000004.1_cds_1458 target sequence
LRNEITRVIQFRNEYEQLLSLIRKCLEEQEEDEVCKNLPDESKKMLEVYKEKPYLIDQILLMLDLSLQELFDGLLHTAYLARAAE

SEQ ID NO: 34820 - protein, 31 aa, unidentified
  REGION 1..31: note = Description of Unknown:cds_NZ_WFIY01000004.1_cds_1458 target sequence
LQELFDGLLHTAYLARAAETADYIIGREEAD

SEQ ID NO: 34821 - protein, 85 aa, unidentified
  REGION 1..85: note = Description of Unknown:cds_NZ_WFIY01000004.1_cds_1458 target sequence
QTEQTGEESILSDIKLLEEQKIFNIARFFETSSKAFLATYGVIIVYPVFLISTVERERLKCQRQFQKILNSLPTLLRQAVNTKKI

SEQ ID NO: 34822 - protein, 85 aa, unidentified
  REGION 1..85: note = Description of Unknown:cds_NZ_WFIY01000004.1_cds_1458 target sequence
IEKLKHDPIGKSQISDLLITTANFLRCMQKKELAEVYENIANFLKKPANERNYSDLFRLRNEITRVIQFRNEYEQLLSLIRKCLE

SEQ ID NO: 34823 - protein, 70 aa, unidentified
  REGION 1..70: note = Description of Unknown:cds_NZ_WFIY01000004.1_cds_1458 target sequence
EQEEDEVCKNLPDESKKMLEVYKEKPYLIDQILLMLDLSLQELFDGLLHTAYLARAAETADYIIGREEAD

SEQ ID NO: 34824 - protein, 85 aa, unidentified
  REGION 1..85: note = Description of Unknown:cds_NZ_WFIY01000004.1_cds_WP_155863973.1_1897 target sequence
EILEYSIFLLGLISSFIVGGNNSATSLGILISTKALKRKYSYLLSALTIFVGVSLGSYSMQSSIYGTMYSRNLDMLESAVFSVLF

SEQ ID NO: 34825 - protein, 85 aa, unidentified
  REGION 1..85: note = Description of Unknown:cds_NZ_WFIY01000004.1_cds_WP_155863973.1_1897 target sequence
ASIIAFYYLNKLGIPSSLSQMLYPSMAVLVLISRGNLGFDWVKFWFTVSSWGFSPLLAIVSSITLYLVIRRLALKRNDLFSQMKI

SEQ ID NO: 34826 - protein, 85 aa, unidentified
  REGION 1..85: note = Description of Unknown:cds_NZ_WFIY01000004.1_cds_WP_155863973.1_1897 target sequence
YKFLIVFSSAFTTFVTGANAIGIIVSAGLLSAPFYLVAPAYGIASALGIYLSSKKASIVVGFRVTRLGYISATSALVGSDIISEI

SEQ ID NO: 34827 - protein, 84 aa, unidentified
  REGION 1..84: note = Description of Unknown:cds_NZ_WFIY01000004.1_cds_WP_155863973.1_1897 target sequence
LGYISATSALVGSDIISEIFTLLGVPISITQTTMGGIIGLSFRSFGYDVKKQLSQVARGWGISPLVAIISSLAAFGVIKSVLGF

SEQ ID NO: 34828 - protein, 85 aa, unidentified
  REGION 1..85: note = Description of Unknown:cds_NZ_WFIY01000004.1_cds_WP_155863973.1_1897 target sequence
GILISTKALKRKYSYLLSALTIFVGVSLGSYSMQSSIYGTMYSRNLDMLESAVFSVLFASIIAFYYLNKLGIPSSLSQMLYPSMA

SEQ ID NO: 34829 - protein, 85 aa, unidentified
  REGION 1..85: note = Description of Unknown:cds_NZ_WFIY01000004.1_cds_WP_155863973.1_1897 target sequence
VLVLISRGNLGFDWVKFWFTVSSWGFSPLLAIVSSITLYLVIRRLALKRNDLFSQMKIYKFLIVFSSAFTTFVTGANAIGIIVSA

SEQ ID NO: 34830 - protein, 85 aa, unidentified
  REGION 1..85: note = Description of Unknown:cds_NZ_WFIY01000004.1_cds_WP_155863973.1_1897 target sequence
GLLSAPFYLVAPAYGIASALGIYLSSKKASIVVGFRVTRLGYISATSALVGSDIISEIFTLLGVPISITQTTMGGIIGLSFRSFG

SEQ ID NO: 34831 - protein, 85 aa, unidentified
  REGION 1..85: note = Description of Unknown:cds_NZ_WFIY01000004.1_cds_WP_155864083.1_2027 target sequence
DFLDEIHNVRYRLAMALKVSSFKIGDFTYIETSDPNKDFVIGEEEGKVFVLPINKDCVKFSQDIKHCLGFDYYYKEQFPWKEEVK

SEQ ID NO: 34832 - protein, 85 aa, unidentified
  REGION 1..85: note = Description of Unknown:cds_NZ_WFIY01000004.1_cds_WP_155864083.1_2027 target sequence
IGVLDRIIRILKVFNDYSEIKNYIINQEITQYEGKDYAMLEGDLYFSNPYEEFLDKLKDSDLEKIKKLSKAYQEVKNFLDMQVEN

SEQ ID NO: 34833 - protein, 85 aa, unidentified
  REGION 1..85: note = Description of Unknown:cds_NZ_WFIY01000004.1_cds_WP_155864083.1_2027 target sequence
QTSVEDIYKEIESELIKIARKYNVELDYGKSIKLYSDERISEDEEHVEEEIREPINVNSLLAKIRAKKVIERKDDFLNFLFSKEG

SEQ ID NO: 34834 - protein, 84 aa, unidentified
  REGION 1..84: note = Description of Unknown:cds_NZ_WFIY01000004.1_cds_WP_155864083.1_2027 target sequence
KKVIERKDDFLNFLFSKEGEFNIWDEIKGKGIILDEMKDKNVTVLLTYPQELEINIGGIKRKILVPKPSILFIKKDSAYFEIAR

SEQ ID NO: 34835 - protein, 85 aa, unidentified
  REGION 1..85: note = Description of Unknown:cds_NZ_WFIY01000004.1_cds_WP_155864083.1_2027 target sequence
TYIETSDPNKDFVIGEEEGKVFVLPINKDCVKFSQDIKHCLGFDYYYKEQFPWKEEVKIGVLDRIIRILKVFNDYSEIKNYIINQ

SEQ ID NO: 34836 - protein, 85 aa, unidentified
  REGION 1..85: note = Description of Unknown:cds_NZ_WFIY01000004.1_cds_WP_155864083.1_2027 target sequence
EITQYEGKDYAMLEGDLYFSNPYEEFLDKLKDSDLEKIKKLSKAYQEVKNFLDMQVENQTSVEDIYKEIESELIKIARKYNVELD

SEQ ID NO: 34837 - protein, 85 aa, unidentified
  REGION 1..85: note = Description of Unknown:cds_NZ_WFIY01000004.1_cds_WP_155864083.1_2027 target sequence
YGKSIKLYSDERISEDEEHVEEEIREPINVNSLLAKIRAKKVIERKDDFLNFLFSKEGEFNIWDEIKGKGIILDEMKDKNVTVLL

SEQ ID NO: 34838 - protein, 85 aa, unidentified
  REGION 1..85: note = Description of Unknown:cds_NZ_WFIY01000004.1_cds_2318 target sequence
VLRSTVIVTAHRRKAFIKDAIESVMENSLKPTEIIVVKNFKDYQIDSFLETYHVKNIYTDDETLGGKISLGIYQSSGDILFFLED

SEQ ID NO: 34839 - protein, 85 aa, unidentified
  REGION 1..85: note = Description of Unknown:cds_NZ_WFIY01000004.1_cds_2318 target sequence
DDLFSKDKIREVIYKFSKYDIGFYHNAQEVIHNKLTGSNLSTDNQRFMYYTSIDTRRLKELLYKFKAGFNVSSIVISRDLAMRCV

SEQ ID NO: 34840 - protein, 85 aa, unidentified
  REGION 1..85: note = Description of Unknown:cds_NZ_WFIY01000004.1_cds_2318 target sequence
DLLKNVNITVDTFLLFCAVENNLPIMIDFRKLTYYRIIMSQNSNTEVNDKLFKMQYEDSLYFKQIFSSKALRDFIEMSIIQRDFL

SEQ ID NO: 34841 - protein, 84 aa, unidentified
  REGION 1..84: note = Description of Unknown:cds_NZ_WFIY01000004.1_cds_2318 target sequence
SKALRDFIEMSIIQRDFLYKIISKKEISKRDALISMVKMLRYSLKYPNKWNFFLQGLSLLSVFSAEKSRSLYLKKVRSNSMLSI

SEQ ID NO: 34842 - protein, 85 aa, unidentified
  REGION 1..85: note = Description of Unknown:cds_NZ_WFIY01000004.1_cds_2318 target sequence
SLKPTEIIVVKNFKDYQIDSFLETYHVKNIYTDDETLGGKISLGIYQSSGDILFFLEDDDLFSKDKIREVIYKFSKYDIGFYHNA

SEQ ID NO: 34843 - protein, 85 aa, unidentified
  REGION 1..85: note = Description of Unknown:cds_NZ_WFIY01000004.1_cds_2318 target sequence
QEVIHNKLTGSNLSTDNQRFMYYTSIDTRRLKELLYKFKAGFNVSSIVISRDLAMRCVDLLKNVNITVDTFLLFCAVENNLPIMI

SEQ ID NO: 34844 - protein, 85 aa, unidentified
  REGION 1..85: note = Description of Unknown:cds_NZ_WFIY01000004.1_cds_2318 target sequence
DFRKLTYYRIIMSQNSNTEVNDKLFKMQYEDSLYFKQIFSSKALRDFIEMSIIQRDFLYKIISKKEISKRDALISMVKMLRYSLK

SEQ ID NO: 34845 - protein, 85 aa, unidentified
  REGION 1..85: note = Description of Unknown:cds_NC_035460.1_cds_YP_009408017.1_66 target sequence
NTRDRSKNKQYNNKLDKGGGGIQQDKGEKKDEYIDFIKNRLCIHEREVINLEGYCVKVNCLLKQVCEDELSCWTELSSLVKCKKS

SEQ ID NO: 34846 - protein, 85 aa, unidentified
  REGION 1..85: note = Description of Unknown:cds_NC_035460.1_cds_YP_009408017.1_66 target sequence
IGFPMLRGTKCFSYSKMLYFEQFKNTKVERLSPHVPCLPENILFQVAIILYTMHKKNIYVDEFCFDLVTIPKTTFIFSVNQLMFQ

SEQ ID NO: 34847 - protein, 85 aa, unidentified
  REGION 1..85: note = Description of Unknown:cds_NC_035460.1_cds_YP_009408017.1_66 target sequence
ICTTTLVVLSISTRPYRVELPQSCYLNYLHSFNTISRKSYDTSNYFFEWLLKNHLDFLTKQSIDIFKVKKKYISGNHINKSTEPG

SEQ ID NO: 34848 - protein, 84 aa, unidentified
  REGION 1..84: note = Description of Unknown:cds_NC_035460.1_cds_YP_009408017.1_66 target sequence
KVKKKYISGNHINKSTEPGTLVLIPKEDVYFMGITLTYVSINDNVRIIYSLDGGNILEIDDFNILDVFYSGELIVRSQTCAILI

SEQ ID NO: 34849 - protein, 85 aa, unidentified
  REGION 1..85: note = Description of Unknown:cds_NC_035460.1_cds_YP_009408017.1_66 target sequence
EKKDEYIDFIKNRLCIHEREVINLEGYCVKVNCLLKQVCEDELSCWTELSSLVKCKKSIGFPMLRGTKCFSYSKMLYFEQFKNTK

SEQ ID NO: 34850 - protein, 85 aa, unidentified
  REGION 1..85: note = Description of Unknown:cds_NC_035460.1_cds_YP_009408017.1_66 target sequence
VERLSPHVPCLPENILFQVAIILYTMHKKNIYVDEFCFDLVTIPKTTFIFSVNQLMFQICTTTLVVLSISTRPYRVELPQSCYLN

SEQ ID NO: 34851 - protein, 85 aa, unidentified
  REGION 1..85: note = Description of Unknown:cds_NC_035460.1_cds_YP_009408017.1_66 target sequence
YLHSFNTISRKSYDTSNYFFEWLLKNHLDFLTKQSIDIFKVKKKYISGNHINKSTEPGTLVLIPKEDVYFMGITLTYVSINDNVR

SEQ ID NO: 34852 - protein, 85 aa, unidentified
  REGION 1..85: note = Description of Unknown:cds_NC_024711.1_cds_YP_009052529.1_51 target sequence
IKDIDISHYYKKFIETSNDDMAKYNKELEVINKMKADCRAYIKSKNQVIKDDLKINLNEYGFQFLNDNVELINKLEQLINNRLSY

SEQ ID NO: 34853 - protein, 85 aa, unidentified
  REGION 1..85: note = Description of Unknown:cds_NC_024711.1_cds_YP_009052529.1_51 target sequence
TVGERRIVLLQLLRYCNLAKKANDYIVALKLATKRSELSLSDYKKYIHRYYSYGVHKCVLEGYAYHFKYEIGDLVINFWRYRDKP

SEQ ID NO: 34854 - protein, 85 aa, unidentified
  REGION 1..85: note = Description of Unknown:cds_NC_024711.1_cds_YP_009052529.1_51 target sequence
RDTYVDWNATRLKKQEIIDAGLKPYDKEEAEIYKIRGLKYDGIPYVVYKTNKEFYEIQLINNGTHSYSAIKFKYANYINRELRGK

SEQ ID NO: 34855 - protein, 84 aa, unidentified
  REGION 1..84: note = Description of Unknown:cds_NC_024711.1_cds_YP_009052529.1_51 target sequence
SYSAIKFKYANYINRELRGKDAKQLNSECKTVDDIFNLKLGLRSKLLVYLEREPNAPFKYIRNVNQQKYERGAHNNGNKTRYKN

SEQ ID NO: 34856 - protein, 85 aa, unidentified
  REGION 1..85: note = Description of Unknown:cds_NC_024711.1_cds_YP_009052529.1_51 target sequence
LEVINKMKADCRAYIKSKNQVIKDDLKINLNEYGFQFLNDNVELINKLEQLINNRLSYTVGERRIVLLQLLRYCNLAKKANDYIV

SEQ ID NO: 34857 - protein, 85 aa, unidentified
  REGION 1..85: note = Description of Unknown:cds_NC_024711.1_cds_YP_009052529.1_51 target sequence
ALKLATKRSELSLSDYKKYIHRYYSYGVHKCVLEGYAYHFKYEIGDLVINFWRYRDKPRDTYVDWNATRLKKQEIIDAGLKPYDK

SEQ ID NO: 34858 - protein, 85 aa, unidentified
  REGION 1..85: note = Description of Unknown:cds_NC_024711.1_cds_YP_009052529.1_51 target sequence
EEAEIYKIRGLKYDGIPYVVYKTNKEFYEIQLINNGTHSYSAIKFKYANYINRELRGKDAKQLNSECKTVDDIFNLKLGLRSKLL

SEQ ID NO: 34859 - protein, 85 aa, unidentified
  REGION 1..85: note = Description of Unknown:cds_NZ_WFIY01000004.1_cds_WP_155862336.1_62 target sequence
RIVILGGGFAGLSALKTHDSIMIDNKDYFILTHKLIDVVKTGDPSIAKIPYPKVLKATVKSIDFRKKVVITTAGEIAYDKLIISL

SEQ ID NO: 34860 - protein, 85 aa, unidentified
  REGION 1..85: note = Description of Unknown:cds_NZ_WFIY01000004.1_cds_WP_155862336.1_62 target sequence
GYSQKLIEGAVKFENIEDALRIREGLLRAKTVVIIGGGNLGVELASLAREMGKEVYLIEGQSRLLNFMSQESSAYAEKKLREMGV

SEQ ID NO: 34861 - protein, 85 aa, unidentified
  REGION 1..85: note = Description of Unknown:cds_NZ_WFIY01000004.1_cds_WP_155862336.1_62 target sequence
NVLLNTKVERIEENTVYAEDQKIRGDLIVSSIGFKGPSILKEVGLTTINDRMVVNEYLQSVDQEDVYGAGDCSTTKEFIPMSAQV

SEQ ID NO: 34862 - protein, 84 aa, unidentified
  REGION 1..84: note = Description of Unknown:cds_NZ_WFIY01000004.1_cds_WP_155862336.1_62 target sequence
VYGAGDCSTTKEFIPMSAQVAVQAGRTAMLNAIGFERKFSYRQYAIIVRIGNDYFGDLLGKFVKGRVAELAEKLGIYRAIRLLK

SEQ ID NO: 34863 - protein, 85 aa, unidentified
  REGION 1..85: note = Description of Unknown:cds_NZ_WFIY01000004.1_cds_WP_155862336.1_62 target sequence
YFILTHKLIDVVKTGDPSIAKIPYPKVLKATVKSIDFRKKVVITTAGEIAYDKLIISLGYSQKLIEGAVKFENIEDALRIREGLL

SEQ ID NO: 34864 - protein, 85 aa, unidentified
  REGION 1..85: note = Description of Unknown:cds_NZ_WFIY01000004.1_cds_WP_155862336.1_62 target sequence
RAKTVVIIGGGNLGVELASLAREMGKEVYLIEGQSRLLNFMSQESSAYAEKKLREMGVNVLLNTKVERIEENTVYAEDQKIRGDL

SEQ ID NO: 34865 - protein, 85 aa, unidentified
  REGION 1..85: note = Description of Unknown:cds_NZ_WFIY01000004.1_cds_WP_155862336.1_62 target sequence
IVSSIGFKGPSILKEVGLTTINDRMVVNEYLQSVDQEDVYGAGDCSTTKEFIPMSAQVAVQAGRTAMLNAIGFERKFSYRQYAII

SEQ ID NO: 34866 - protein, 85 aa, unidentified
  REGION 1..85: note = Description of Unknown:cds_NZ_WFIY01000004.1_cds_WP_155862750.1_562 target sequence
KIPINELKEIIIHILDKRGVEDSSVIAEHFIEAELRGHSSHGVQRVIPLVKGIELGTIERKLNYKILKSTSSSLLIDARRSIGIV

SEQ ID NO: 34867 - protein, 85 aa, unidentified
  REGION 1..85: note = Description of Unknown:cds_NZ_WFIY01000004.1_cds_WP_155862750.1_562 target sequence
LWNKIINELEFKEPISIVAVRNASHIGFLGYYTRKLAEKGYSAIMFGNAEPAVVFPGKAEKLLSTTPLSISIPSNPPVVLDMALS

SEQ ID NO: 34868 - protein, 85 aa, unidentified
  REGION 1..85: note = Description of Unknown:cds_NZ_WFIY01000004.1_cds_WP_155862750.1_562 target sequence
LTARGKIIEAQRKGEKIPYGVAVNERGEITTDPTEALKGGLLPLGGVKGFYLMLTLELLTSFLTGSAVGPEVKGVLNTENPPNKG

SEQ ID NO: 34869 - protein, 84 aa, unidentified
  REGION 1..84: note = Description of Unknown:cds_NZ_WFIY01000004.1_cds_WP_155862750.1_562 target sequence
SAVGPEVKGVLNTENPPNKGEVLIVINPKFTEEENHGIELMRKILGSLPGDRGDKLLKSSGNEINIDEKLFNTLNEMAKKNPYF

SEQ ID NO: 34870 - protein, 85 aa, unidentified
  REGION 1..85: note = Description of Unknown:cds_NZ_WFIY01000004.1_cds_WP_155862750.1_562 target sequence
EHFIEAELRGHSSHGVQRVIPLVKGIELGTIERKLNYKILKSTSSSLLIDARRSIGIVLWNKIINELEFKEPISIVAVRNASHIG

SEQ ID NO: 34871 - protein, 85 aa, unidentified
  REGION 1..85: note = Description of Unknown:cds_NZ_WFIY01000004.1_cds_WP_155862750.1_562 target sequence
FLGYYTRKLAEKGYSAIMFGNAEPAVVFPGKAEKLLSTTPLSISIPSNPPVVLDMALSLTARGKIIEAQRKGEKIPYGVAVNERG

SEQ ID NO: 34872 - protein, 85 aa, unidentified
  REGION 1..85: note = Description of Unknown:cds_NZ_WFIY01000004.1_cds_WP_155862750.1_562 target sequence
EITTDPTEALKGGLLPLGGVKGFYLMLTLELLTSFLTGSAVGPEVKGVLNTENPPNKGEVLIVINPKFTEEENHGIELMRKILGS

SEQ ID NO: 34873 - protein, 85 aa, unidentified
  REGION 1..85: note = Description of Unknown:cds_NZ_WFIY01000004.1_cds_WP_155862800.1_620 target sequence
KHGGVKWINGKPEKLRDFSVNLNPIYPDFIEDLINEAIKEKVYLYYPDNYEKLRENIAEIYDIDEEYIGVFNGASEVINLLEPRV

SEQ ID NO: 34874 - protein, 85 aa, unidentified
  REGION 1..85: note = Description of Unknown:cds_NZ_WFIY01000004.1_cds_WP_155862800.1_620 target sequence
VPEPNYVEYKRSYIYFAEERENYFIYHLQGNKVIISNPNNPTGAKIDLKEIEEFLEEGKDLVVDESFADISLVDSAKKFVKDYDN

SEQ ID NO: 34875 - protein, 85 aa, unidentified
  REGION 1..85: note = Description of Unknown:cds_NZ_WFIY01000004.1_cds_WP_155862800.1_620 target sequence
LLIISTFTKSLSIPGLRIGFTIGKRSKELEKNSPPWRINSIAYYVLSNANPKEIKDFFRKSREIVTSLLETFRINGRRVTVYKSF

SEQ ID NO: 34876 - protein, 84 aa, unidentified
  REGION 1..84: note = Description of Unknown:cds_NZ_WFIY01000004.1_cds_WP_155862800.1_620 target sequence
TSLLETFRINGRRVTVYKSFAPYVLVRFPINVRIINSYLRSKGFLIRDCSNFVGLNEFYGRISLRKDYQELINEIDEFLSNSSI

SEQ ID NO: 34877 - protein, 85 aa, unidentified
  REGION 1..85: note = Description of Unknown:cds_NZ_WFIY01000004.1_cds_WP_155862800.1_620 target sequence
DFIEDLINEAIKEKVYLYYPDNYEKLRENIAEIYDIDEEYIGVFNGASEVINLLEPRVVPEPNYVEYKRSYIYFAEERENYFIYH

SEQ ID NO: 34878 - protein, 85 aa, unidentified
  REGION 1..85: note = Description of Unknown:cds_NZ_WFIY01000004.1_cds_WP_155862800.1_620 target sequence
LQGNKVIISNPNNPTGAKIDLKEIEEFLEEGKDLVVDESFADISLVDSAKKFVKDYDNLLIISTFTKSLSIPGLRIGFTIGKRSK

SEQ ID NO: 34879 - protein, 85 aa, unidentified
  REGION 1..85: note = Description of Unknown:cds_NZ_WFIY01000004.1_cds_WP_155862800.1_620 target sequence
ELEKNSPPWRINSIAYYVLSNANPKEIKDFFRKSREIVTSLLETFRINGRRVTVYKSFAPYVLVRFPINVRIINSYLRSKGFLIR

SEQ ID NO: 34880 - protein, 85 aa, unidentified
  REGION 1..85: note = Description of Unknown:cds_NZ_WFIY01000004.1_cds_WP_155864424.1_1366 target sequence
IGWLIINLWNPQNVDVASALVIAYLLGIVHGVTPDEHTWPITFSYSVGTFSSKGGAKTGLIFSSGFTIQRSILSELAYLALAGIF

SEQ ID NO: 34881 - protein, 85 aa, unidentified
  REGION 1..85: note = Description of Unknown:cds_NZ_WFIY01000004.1_cds_WP_155864424.1_1366 target sequence
MTTAAFGITYIFVGIAMFGAGIYISRKGGYLHWHYLEKKLGEATGIHKKGSQLQQEELEHKINPAYVNEQDLTKPVPVKLAFLHG

SEQ ID NO: 34882 - protein, 85 aa, unidentified
  REGION 1..85: note = Description of Unknown:cds_NZ_WFIY01000004.1_cds_WP_155864424.1_1366 target sequence
FIAGFGFGAFALIVYTVLAPTMPNMYIGWLPGALFGLGTMTAQVMFGTIFATWLTRMKNLTYQGIAVVGKTITKTVLEYGGLAFI

SEQ ID NO: 34883 - protein, 84 aa, unidentified
  REGION 1..84: note = Description of Unknown:cds_NZ_WFIY01000004.1_cds_WP_155864424.1_1366 target sequence
AVVGKTITKTVLEYGGLAFIIGGIAILLYPPLLTYNIITPIKVHNLHSLGIGFFLVILTVVIFGIYGYKQGVKTAIKLGYTNKN

SEQ ID NO: 34884 - protein, 85 aa, unidentified
  REGION 1..85: note = Description of Unknown:cds_NZ_WFIY01000004.1_cds_WP_155864424.1_1366 target sequence
IVHGVTPDEHTWPITFSYSVGTFSSKGGAKTGLIFSSGFTIQRSILSELAYLALAGIFMTTAAFGITYIFVGIAMFGAGIYISRK

SEQ ID NO: 34885 - protein, 85 aa, unidentified
  REGION 1..85: note = Description of Unknown:cds_NZ_WFIY01000004.1_cds_WP_155864424.1_1366 target sequence
GGYLHWHYLEKKLGEATGIHKKGSQLQQEELEHKINPAYVNEQDLTKPVPVKLAFLHGFIAGFGFGAFALIVYTVLAPTMPNMYI

SEQ ID NO: 34886 - protein, 85 aa, unidentified
  REGION 1..85: note = Description of Unknown:cds_NZ_WFIY01000004.1_cds_WP_155864424.1_1366 target sequence
GWLPGALFGLGTMTAQVMFGTIFATWLTRMKNLTYQGIAVVGKTITKTVLEYGGLAFIIGGIAILLYPPLLTYNIITPIKVHNLH

SEQ ID NO: 34887 - protein, 85 aa, unidentified
  REGION 1..85: note = Description of Unknown:cds_NZ_WFIY01000004.1_cds_WP_155863554.1_1485 target sequence
LQVSNLYVKYSVGKNIKVNAINDVSFSLDKGDVLGIIGETGSGKTTLASAIMRILPDSAEVKGKIMLDNLDLLAISKKEFRTKIR

SEQ ID NO: 34888 - protein, 85 aa, unidentified
  REGION 1..85: note = Description of Unknown:cds_NZ_WFIY01000004.1_cds_WP_155863554.1_1485 target sequence
WKKISIIPQYSMNALNPIKRVGKELTEIVMEHEKVSEEKAVNRVLSLFKDLNLPEEVFFKYPDELSGGQRQRVVIASALLLNPEV

SEQ ID NO: 34889 - protein, 85 aa, unidentified
  REGION 1..85: note = Description of Unknown:cds_NZ_WFIY01000004.1_cds_WP_155863554.1_1485 target sequence
VIADEPTTALDVINQARVLNLLRNKVISASRILIYITHDIAVVAGLANKLMTLYAGRIMEIGSSEKMFKNPLHPYTQGLLSSVPD

SEQ ID NO: 34890 - protein, 84 aa, unidentified
  REGION 1..84: note = Description of Unknown:cds_NZ_WFIY01000004.1_cds_WP_155863554.1_1485 target sequence
KMFKNPLHPYTQGLLSSVPDISNGKPVHISYIKGDPPDLTKEIKGCPFYPRCPLAMDICKEEFPEPVQIDDRLVYCHAVRKDAK

SEQ ID NO: 34891 - protein, 85 aa, unidentified
  REGION 1..85: note = Description of Unknown:cds_NZ_WFIY01000004.1_cds_WP_155863554.1_1485 target sequence
LDKGDVLGIIGETGSGKTTLASAIMRILPDSAEVKGKIMLDNLDLLAISKKEFRTKIRWKKISIIPQYSMNALNPIKRVGKELTE

SEQ ID NO: 34892 - protein, 85 aa, unidentified
  REGION 1..85: note = Description of Unknown:cds_NZ_WFIY01000004.1_cds_WP_155863554.1_1485 target sequence
IVMEHEKVSEEKAVNRVLSLFKDLNLPEEVFFKYPDELSGGQRQRVVIASALLLNPEVVIADEPTTALDVINQARVLNLLRNKVI

SEQ ID NO: 34893 - protein, 85 aa, unidentified
  REGION 1..85: note = Description of Unknown:cds_NZ_WFIY01000004.1_cds_WP_155863554.1_1485 target sequence
SASRILIYITHDIAVVAGLANKLMTLYAGRIMEIGSSEKMFKNPLHPYTQGLLSSVPDISNGKPVHISYIKGDPPDLTKEIKGCP

SEQ ID NO: 34894 - protein, 85 aa, unidentified
  REGION 1..85: note = Description of Unknown:cds_NZ_WFIY01000004.1_cds_WP_155863650.1_1534 target sequence
KYLLLGLGFVSTHVAEYLSKFGEVKVTYKSLNPVKRIYAEDVLKGKAEVVKLDPLQDKEKLKEEISSSDVIVNFIGEIQGSEESL

SEQ ID NO: 34895 - protein, 85 aa, unidentified
  REGION 1..85: note = Description of Unknown:cds_NZ_WFIY01000004.1_cds_WP_155863650.1_1534 target sequence
RVANMEIPKLIAQTVGETQSNEGKKKILIHFSGLLGKTGNNVKPEEPHLQGINPSTPFEKTKYEGEKEVYQISQKYDFPLVILRP

SEQ ID NO: 34896 - protein, 85 aa, unidentified
  REGION 1..85: note = Description of Unknown:cds_NZ_WFIY01000004.1_cds_WP_155863650.1_1534 target sequence
TLVYGRYSAHIQFITMYNFAKKGIIPRLSFQFNTISAYYIAEMIKNLSDFKGRKYFYATECSPVNVTRFFELMAKGLGINRQIHL

SEQ ID NO: 34897 - protein, 84 aa, unidentified
  REGION 1..84: note = Description of Unknown:cds_NZ_WFIY01000004.1_cds_WP_155863650.1_1534 target sequence
VTRFFELMAKGLGINRQIHLYVPEFLAKLVLPSYIKSLLKYTKSTYDCTESKNLVNNLTFDENEVIKNAIFLRRLEKEKSLIPT

SEQ ID NO: 34898 - protein, 85 aa, unidentified
  REGION 1..85: note = Description of Unknown:cds_NZ_WFIY01000004.1_cds_WP_155863650.1_1534 target sequence
YKSLNPVKRIYAEDVLKGKAEVVKLDPLQDKEKLKEEISSSDVIVNFIGEIQGSEESLRVANMEIPKLIAQTVGETQSNEGKKKI

SEQ ID NO: 34899 - protein, 85 aa, unidentified
  REGION 1..85: note = Description of Unknown:cds_NZ_WFIY01000004.1_cds_WP_155863650.1_1534 target sequence
LIHFSGLLGKTGNNVKPEEPHLQGINPSTPFEKTKYEGEKEVYQISQKYDFPLVILRPTLVYGRYSAHIQFITMYNFAKKGIIPR

SEQ ID NO: 34900 - protein, 85 aa, unidentified
  REGION 1..85: note = Description of Unknown:cds_NZ_WFIY01000004.1_cds_WP_155863650.1_1534 target sequence
LSFQFNTISAYYIAEMIKNLSDFKGRKYFYATECSPVNVTRFFELMAKGLGINRQIHLYVPEFLAKLVLPSYIKSLLKYTKSTYD

SEQ ID NO: 34901 - protein, 85 aa, unidentified
  REGION 1..85: note = Description of Unknown:cds_NZ_WFIY01000004.1_cds_WP_155863736.1_1605 target sequence
ISEIVRKNYKEELFGATVYEELAKTEKNAKVKEVLEELANGEKSHASFWKEVAESRGVELEELGFFDRLRIKILKLFRRVFGLPL

SEQ ID NO: 34902 - protein, 85 aa, unidentified
  REGION 1..85: note = Description of Unknown:cds_NZ_WFIY01000004.1_cds_WP_155863736.1_1605 target sequence
TLKLVERGEISDAEKYYQLSKAAEFNDTERQKLSSIMMQELVHEDLLVQTQINADKIRDAIYAVSDGLIEVLAGVSGLSSILASP

SEQ ID NO: 34903 - protein, 85 aa, unidentified
  REGION 1..85: note = Description of Unknown:cds_NZ_WFIY01000004.1_cds_WP_155863736.1_1605 target sequence
FLVALGGIIIGVSGTISMSIGAYLSTSSENDIRKSKLKKEKLRALLGQAYSSEGNNEINKNSESVKITAISYILGALVPILPFLL

SEQ ID NO: 34904 - protein, 84 aa, unidentified
  REGION 1..84: note = Description of Unknown:cds_NZ_WFIY01000004.1_cds_WP_155863736.1_1605 target sequence
KITAISYILGALVPILPFLLGLGGLIGLITSYAFTGVVTFIVGGIIGLLSDVNPFKKGTVMAGLAIVAALVTHIIGIAFHFIGY

SEQ ID NO: 34905 - protein, 85 aa, unidentified
  REGION 1..85: note = Description of Unknown:cds_NZ_WFIY01000004.1_cds_WP_155863736.1_1605 target sequence
NAKVKEVLEELANGEKSHASFWKEVAESRGVELEELGFFDRLRIKILKLFRRVFGLPLTLKLVERGEISDAEKYYQLSKAAEFND

SEQ ID NO: 34906 - protein, 85 aa, unidentified
  REGION 1..85: note = Description of Unknown:cds_NZ_WFIY01000004.1_cds_WP_155863736.1_1605 target sequence
TERQKLSSIMMQELVHEDLLVQTQINADKIRDAIYAVSDGLIEVLAGVSGLSSILASPFLVALGGIIIGVSGTISMSIGAYLSTS

SEQ ID NO: 34907 - protein, 85 aa, unidentified
  REGION 1..85: note = Description of Unknown:cds_NZ_WFIY01000004.1_cds_WP_155863736.1_1605 target sequence
SENDIRKSKLKKEKLRALLGQAYSSEGNNEINKNSESVKITAISYILGALVPILPFLLGLGGLIGLITSYAFTGVVTFIVGGIIG

SEQ ID NO: 34908 - protein, 85 aa, unidentified
  REGION 1..85: note = Description of Unknown:cds_NZ_WFIY01000004.1_cds_WP_155864268.1_2260 target sequence
LKAIMSSNLKTLDVNATLKDAAELMVSSGIRRVPVTVAGSIIGVVSARTVIKEAISNQNWATEKLSDVAKPAITVDPDTPFRTAA

SEQ ID NO: 34909 - protein, 85 aa, unidentified
  REGION 1..85: note = Description of Unknown:cds_NZ_WFIY01000004.1_cds_WP_155864268.1_2260 target sequence
KLMLKYGVGSLIVKGQGIVTERDLAKVIPRVTIPAISVGTTNVFTLPSDSTVMDAAKSMISLGISHIPITSGSDVTGMVSLRDVL

SEQ ID NO: 34910 - protein, 85 aa, unidentified
  REGION 1..85: note = Description of Unknown:cds_NZ_WFIY01000004.1_cds_WP_155864268.1_2260 target sequence
KAIHEGNITGKLSDIASKSLVYEDIDASVEDIADLIVSKYVGAVPLFEGEPKAANLRGIVTEWDLVRLYATMVRAHVLIKAEPSK

SEQ ID NO: 34911 - protein, 84 aa, unidentified
  REGION 1..84: note = Description of Unknown:cds_NZ_WFIY01000004.1_cds_WP_155864268.1_2260 target sequence
VRLYATMVRAHVLIKAEPSKIKGLVAALMATPRVYDVAIVYGPYDLLVTIDIEDPDLIGTTVINSIASLAGVKETTTLIEAEQI

SEQ ID NO: 34912 - protein, 85 aa, unidentified
  REGION 1..85: note = Description of Unknown:cds_NZ_WFIY01000004.1_cds_WP_155864268.1_2260 target sequence
SGIRRVPVTVAGSIIGVVSARTVIKEAISNQNWATEKLSDVAKPAITVDPDTPFRTAAKLMLKYGVGSLIVKGQGIVTERDLAKV

SEQ ID NO: 34913 - protein, 85 aa, unidentified
  REGION 1..85: note = Description of Unknown:cds_NZ_WFIY01000004.1_cds_WP_155864268.1_2260 target sequence
IPRVTIPAISVGTTNVFTLPSDSTVMDAAKSMISLGISHIPITSGSDVTGMVSLRDVLKAIHEGNITGKLSDIASKSLVYEDIDA

SEQ ID NO: 34914 - protein, 85 aa, unidentified
  REGION 1..85: note = Description of Unknown:cds_NZ_WFIY01000004.1_cds_WP_155864268.1_2260 target sequence
SVEDIADLIVSKYVGAVPLFEGEPKAANLRGIVTEWDLVRLYATMVRAHVLIKAEPSKIKGLVAALMATPRVYDVAIVYGPYDLL

SEQ ID NO: 34915 - protein, 85 aa, unidentified
  REGION 1..85: note = Description of Unknown:cds_NC_035460.1_cds_YP_009407953.1_2 target sequence
IDFILTLFKSISCENTVLCVPSISGILLSLVSGIDTEPKKELNKFIKNIVSYTVSNEITLENKIYLPDNINICNNFEKEIQTYGT

SEQ ID NO: 34916 - protein, 85 aa, unidentified
  REGION 1..85: note = Description of Unknown:cds_NC_035460.1_cds_YP_009407953.1_2 target sequence
DIVKINFTNSNLIGDKINNWLPSMNFKHGLINKILSHSNIIALSLISFKGEFLYTFDVVSDKFITNERTIKIINMMYRRDYFKIK

SEQ ID NO: 34917 - protein, 85 aa, unidentified
  REGION 1..85: note = Description of Unknown:cds_NC_035460.1_cds_YP_009407953.1_2 target sequence
KQENVIIVEIPLKDFYNLVIIMPSDFNFNKIEAELTNKNILSWCDDMEMEEIKLLFPMFAFGRSYNLNSILIKMGITKLFTCFNL

SEQ ID NO: 34918 - protein, 84 aa, unidentified
  REGION 1..84: note = Description of Unknown:cds_NC_035460.1_cds_YP_009407953.1_2 target sequence
NLNSILIKMGITKLFTCFNLPNISNNVTYPTIVHKCFIDLSYDNIANNYYYDDKNIPLIKINKPFIFFIRENENIFYIGRVTNL

SEQ ID NO: 34919 - protein, 85 aa, unidentified
  REGION 1..85: note = Description of Unknown:cds_NC_035460.1_cds_YP_009407953.1_2 target sequence
LSLVSGIDTEPKKELNKFIKNIVSYTVSNEITLENKIYLPDNINICNNFEKEIQTYGTDIVKINFTNSNLIGDKINNWLPSMNFK

SEQ ID NO: 34920 - protein, 85 aa, unidentified
  REGION 1..85: note = Description of Unknown:cds_NC_035460.1_cds_YP_009407953.1_2 target sequence
HGLINKILSHSNIIALSLISFKGEFLYTFDVVSDKFITNERTIKIINMMYRRDYFKIKKQENVIIVEIPLKDFYNLVIIMPSDFN

SEQ ID NO: 34921 - protein, 85 aa, unidentified
  REGION 1..85: note = Description of Unknown:cds_NC_035460.1_cds_YP_009407953.1_2 target sequence
FNKIEAELTNKNILSWCDDMEMEEIKLLFPMFAFGRSYNLNSILIKMGITKLFTCFNLPNISNNVTYPTIVHKCFIDLSYDNIAN

SEQ ID NO: 34922 - protein, 85 aa, unidentified
  REGION 1..85: note = Description of Unknown:cds_NC_016144.1_cds_YP_004928136.1_2 target sequence
DKVTDAIMTGRLSLDTIPGFQCSAPTSRSRPTGRKCPPWEGPLIEPKTSANKSTQTENIYQSDQVLREIKQLSSILAHQITTMER

SEQ ID NO: 34923 - protein, 85 aa, unidentified
  REGION 1..85: note = Description of Unknown:cds_NC_016144.1_cds_YP_004928136.1_2 target sequence
LEGSLQSIHQQLQVVGGMAHNLTSLTTLCTEMVAKYDFLVMTTGRATATAAATEAYWKEHGKAPPGPALFEADALKARIQENPKS

SEQ ID NO: 34924 - protein, 85 aa, unidentified
  REGION 1..85: note = Description of Unknown:cds_NC_016144.1_cds_YP_004928136.1_2 target sequence
VPTDVREAFDRLEKTEEVTERTFGKPTISAKLLKELLYDHLPGYGTAFHQLAQVVCKVGKDNDLLDIIHAEFQASLAEGDSPQCA

SEQ ID NO: 34925 - protein, 84 aa, unidentified
  REGION 1..84: note = Description of Unknown:cds_NC_016144.1_cds_YP_004928136.1_2 target sequence
DIIHAEFQASLAEGDSPQCALIQITKRIPIFGETPPPVIYIKTKQEIPKACQKSLRPLPPNPKIERGWVCHYVTADGKEMGLKI

SEQ ID NO: 34926 - protein, 85 aa, unidentified
  REGION 1..85: note = Description of Unknown:cds_NC_016144.1_cds_YP_004928136.1_2 target sequence
RSRPTGRKCPPWEGPLIEPKTSANKSTQTENIYQSDQVLREIKQLSSILAHQITTMERLEGSLQSIHQQLQVVGGMAHNLTSLTT

SEQ ID NO: 34927 - protein, 85 aa, unidentified
  REGION 1..85: note = Description of Unknown:cds_NC_016144.1_cds_YP_004928136.1_2 target sequence
LCTEMVAKYDFLVMTTGRATATAAATEAYWKEHGKAPPGPALFEADALKARIQENPKSVPTDVREAFDRLEKTEEVTERTFGKPT

SEQ ID NO: 34928 - protein, 85 aa, unidentified
  REGION 1..85: note = Description of Unknown:cds_NC_016144.1_cds_YP_004928136.1_2 target sequence
ISAKLLKELLYDHLPGYGTAFHQLAQVVCKVGKDNDLLDIIHAEFQASLAEGDSPQCALIQITKRIPIFGETPPPVIYIKTKQEI

SEQ ID NO: 34929 - protein, 85 aa, unidentified
  REGION 1..85: note = Description of Unknown:cds_NC_016144.1_cds_YP_004928139.1_5 target sequence
PLGGSSACVSSIPLLGSVSNNSSIQELETSSKSATELTTPINHSQSLQLASVTNTPTPTTQSKSWTVDYNNTTPTMDPTTILTTP

SEQ ID NO: 34930 - protein, 85 aa, unidentified
  REGION 1..85: note = Description of Unknown:cds_NC_016144.1_cds_YP_004928139.1_5 target sequence
DTATIPPNNSSDHNATTTSKTRRRRQVNPVPPTITQQTSTSINTSHHPNMTTQLARHPSVQTRMQNPSCNPNLRYWTSREMSNAG

SEQ ID NO: 34931 - protein, 85 aa, unidentified
  REGION 1..85: note = Description of Unknown:cds_NC_016144.1_cds_YP_004928139.1_5 target sequence
GLAWIPWIGPGIEGGITDGIMEHQNTIVCQLRELANTTTKALQLFLRATTELRTYSILNRHAIDFLLQRWGGTCRILGPNCCIEP

SEQ ID NO: 34932 - protein, 84 aa, unidentified
  REGION 1..84: note = Description of Unknown:cds_NC_016144.1_cds_YP_004928139.1_5 target sequence
LLQRWGGTCRILGPNCCIEPHDWSANITAEINHIREDILNHHEIQPSQDPSFWTGWQQWIPTGASALGIILAILALICLCRITR

SEQ ID NO: 34933 - protein, 85 aa, unidentified
  REGION 1..85: note = Description of Unknown:cds_NC_016144.1_cds_YP_004928139.1_5 target sequence
ETSSKSATELTTPINHSQSLQLASVTNTPTPTTQSKSWTVDYNNTTPTMDPTTILTTPDTATIPPNNSSDHNATTTSKTRRRRQV

SEQ ID NO: 34934 - protein, 85 aa, unidentified
  REGION 1..85: note = Description of Unknown:cds_NC_016144.1_cds_YP_004928139.1_5 target sequence
NPVPPTITQQTSTSINTSHHPNMTTQLARHPSVQTRMQNPSCNPNLRYWTSREMSNAGGLAWIPWIGPGIEGGITDGIMEHQNTI

SEQ ID NO: 34935 - protein, 85 aa, unidentified
  REGION 1..85: note = Description of Unknown:cds_NC_016144.1_cds_YP_004928139.1_5 target sequence
VCQLRELANTTTKALQLFLRATTELRTYSILNRHAIDFLLQRWGGTCRILGPNCCIEPHDWSANITAEINHIREDILNHHEIQPS

SEQ ID NO: 34936 - protein, 85 aa, unidentified
  REGION 1..85: note = Description of Unknown:cds_NZ_WFIY01000004.1_cds_WP_155862651.1_443 target sequence
ICDVCKSREAVVYQPHTGRRLCKECFIEDIRQRVKKEAEKQGLLKASKILLAVSGGKDSLTLADTLASFIDPKRLVAFNIVEGIS

SEQ ID NO: 34937 - protein, 85 aa, unidentified
  REGION 1..85: note = Description of Unknown:cds_NZ_WFIY01000004.1_cds_WP_155862651.1_443 target sequence
GYNRKEQAEKLRKYLDDLGIELISTSFKDSVGYTLDEMVSSARAKGLNISACTFCGGFRRKLINDAGRQVKADLVATGHNLDDEA

SEQ ID NO: 34938 - protein, 85 aa, unidentified
  REGION 1..85: note = Description of Unknown:cds_NZ_WFIY01000004.1_cds_WP_155862651.1_443 target sequence
QTVIVNILRGDVKRLVRLGDVPLKLSDKFVLRVKPLRKIYEWETTMYAFLKGFEFQEVECPYISARPTLRAKVRELLYLIEQQKP

SEQ ID NO: 34939 - protein, 84 aa, unidentified
  REGION 1..84: note = Description of Unknown:cds_NZ_WFIY01000004.1_cds_WP_155862651.1_443 target sequence
ARPTLRAKVRELLYLIEQQKPGSLLRIVEEFDKISELVRQHSPKEELPTCKICGEPTSYGREICKNCELMIQSGLLPQKYLRIS

SEQ ID NO: 34940 - protein, 85 aa, unidentified
  REGION 1..85: note = Description of Unknown:cds_NZ_WFIY01000004.1_cds_WP_155862651.1_443 target sequence
EDIRQRVKKEAEKQGLLKASKILLAVSGGKDSLTLADTLASFIDPKRLVAFNIVEGISGYNRKEQAEKLRKYLDDLGIELISTSF

SEQ ID NO: 34941 - protein, 85 aa, unidentified
  REGION 1..85: note = Description of Unknown:cds_NZ_WFIY01000004.1_cds_WP_155862651.1_443 target sequence
KDSVGYTLDEMVSSARAKGLNISACTFCGGFRRKLINDAGRQVKADLVATGHNLDDEAQTVIVNILRGDVKRLVRLGDVPLKLSD

SEQ ID NO: 34942 - protein, 85 aa, unidentified
  REGION 1..85: note = Description of Unknown:cds_NZ_WFIY01000004.1_cds_WP_155862651.1_443 target sequence
KFVLRVKPLRKIYEWETTMYAFLKGFEFQEVECPYISARPTLRAKVRELLYLIEQQKPGSLLRIVEEFDKISELVRQHSPKEELP

SEQ ID NO: 34943 - protein, 85 aa, unidentified
  REGION 1..85: note = Description of Unknown:cds_NZ_WFIY01000004.1_cds_WP_155864015.1_1943 target sequence
VILAVDGGATKTVALLFDENKFKIKGIGLAGSSNFTIIGASKAEENLRKAIKEAEGDKADKAVFCLAGIGDSAEDTKRGEEMVRR

SEQ ID NO: 34944 - protein, 85 aa, unidentified
  REGION 1..85: note = Description of Unknown:cds_NZ_WFIY01000004.1_cds_WP_155864015.1_1943 target sequence
IFPNAQVYNDGVGAYRATNLFEDGGVFAPGTGSVAFYQKNGVLHRVGGWSWIFGDEGSASWIAKTAITYATRVVDGIEEKSELPH

SEQ ID NO: 34945 - protein, 85 aa, unidentified
  REGION 1..85: note = Description of Unknown:cds_NZ_WFIY01000004.1_cds_WP_155864015.1_1943 target sequence
AVEEYFKLPFREAVIKLSKEQDKRLIASFAVIVDELAQRGDPLALRVMKEASEYIVRMINRLKKEGGRVSVIGGVMNSRIIRDEI

SEQ ID NO: 34946 - protein, 84 aa, unidentified
  REGION 1..84: note = Description of Unknown:cds_NZ_WFIY01000004.1_cds_WP_155864015.1_1943 target sequence
GGRVSVIGGVMNSRIIRDEISSLGVSIFYSYQAVIGGLILAGVKMSFEERDMLAKELTQKIYNLPEEELKNYLFINIKSKYSET

SEQ ID NO: 34947 - protein, 85 aa, unidentified
  REGION 1..85: note = Description of Unknown:cds_NZ_WFIY01000004.1_cds_WP_155864015.1_1943 target sequence
GLAGSSNFTIIGASKAEENLRKAIKEAEGDKADKAVFCLAGIGDSAEDTKRGEEMVRRIFPNAQVYNDGVGAYRATNLFEDGGVF

SEQ ID NO: 34948 - protein, 85 aa, unidentified
  REGION 1..85: note = Description of Unknown:cds_NZ_WFIY01000004.1_cds_WP_155864015.1_1943 target sequence
APGTGSVAFYQKNGVLHRVGGWSWIFGDEGSASWIAKTAITYATRVVDGIEEKSELPHAVEEYFKLPFREAVIKLSKEQDKRLIA

SEQ ID NO: 34949 - protein, 85 aa, unidentified
  REGION 1..85: note = Description of Unknown:cds_NZ_WFIY01000004.1_cds_WP_155864015.1_1943 target sequence
SFAVIVDELAQRGDPLALRVMKEASEYIVRMINRLKKEGGRVSVIGGVMNSRIIRDEISSLGVSIFYSYQAVIGGLILAGVKMSF

SEQ ID NO: 34950 - protein, 85 aa, unidentified
  REGION 1..85: note = Description of Unknown:cds_NC_030656.1_cds_YP_009268795.1_80 target sequence
KGLYYKDNKLFFDKELTQNVPNSNPAYSVLKSIKIPAHLTDVVVYEQTLEEAVNGLMFVGLDSKGRKQYFYGKNHVKNRNEKRNK

SEQ ID NO: 34951 - protein, 85 aa, unidentified
  REGION 1..85: note = Description of Unknown:cds_NC_030656.1_cds_YP_009268795.1_80 target sequence
IFINVYLVINKINNFIDNNLSKPNKDNKDFKSQLAVFMLMETSFFIRMGKMRYFKDNDTVGLLTLKNKHIIISKNTVKVKFVGKK

SEQ ID NO: 34952 - protein, 85 aa, unidentified
  REGION 1..85: note = Description of Unknown:cds_NC_030656.1_cds_YP_009268795.1_80 target sequence
CIEHEFVIRKSDRLYEPILALVNKKKPDDFLFNKLNEKKVYDFVSQYNIRVKDLRTYGVNYTFLYNFWSNVQSITPIPPIKKLIS

SEQ ID NO: 34953 - protein, 84 aa, unidentified
  REGION 1..84: note = Description of Unknown:cds_NC_030656.1_cds_YP_009268795.1_80 target sequence
YNFWSNVQSITPIPPIKKLISISLSQTADTVGHTPSMSKNAYMANTVLDLVKDKSIYETINSSTFDEFLNHVIDYVKNTNVVNG

SEQ ID NO: 34954 - protein, 85 aa, unidentified
  REGION 1..85: note = Description of Unknown:cds_NC_030656.1_cds_YP_009268795.1_80 target sequence
SVLKSIKIPAHLTDVVVYEQTLEEAVNGLMFVGLDSKGRKQYFYGKNHVKNRNEKRNKIFINVYLVINKINNFIDNNLSKPNKDN

SEQ ID NO: 34955 - protein, 85 aa, unidentified
  REGION 1..85: note = Description of Unknown:cds_NC_030656.1_cds_YP_009268795.1_80 target sequence
KDFKSQLAVFMLMETSFFIRMGKMRYFKDNDTVGLLTLKNKHIIISKNTVKVKFVGKKCIEHEFVIRKSDRLYEPILALVNKKKP

SEQ ID NO: 34956 - protein, 85 aa, unidentified
  REGION 1..85: note = Description of Unknown:cds_NC_030656.1_cds_YP_009268795.1_80 target sequence
DDFLFNKLNEKKVYDFVSQYNIRVKDLRTYGVNYTFLYNFWSNVQSITPIPPIKKLISISLSQTADTVGHTPSMSKNAYMANTVL

SEQ ID NO: 34957 - protein, 85 aa, unidentified
  REGION 1..85: note = Description of Unknown:cds_NZ_WFIY01000004.1_cds_WP_155862410.1_149 target sequence
LIEVEVPLKLTLFGEHAVVYGEPAIAMAINEKMKIKIVPYHKMVLKSNSLSIKGIKVDLEEMKLESEETSRVLSYALSTINFFEK

SEQ ID NO: 34958 - protein, 85 aa, unidentified
  REGION 1..85: note = Description of Unknown:cds_NZ_WFIY01000004.1_cds_WP_155862410.1_149 target sequence
EYGTRKNALIEIESPVDPSVGLGTSAAVIVGIVGGYSRYLGYELTREEIAKISHKIELTVQGLGSRMDTYTTSLGGLIYFPKGGG

SEQ ID NO: 34959 - protein, 85 aa, unidentified
  REGION 1..85: note = Description of Unknown:cds_NZ_WFIY01000004.1_cds_WP_155862410.1_149 target sequence
YEKIRGEIRITAGYIRRIATTAEILKRVKSLKEKNPDLFNDLISSIGKTVNKAKIAIEKEDEEEIGELMYVNHGLLMSLGVTLPP

SEQ ID NO: 34960 - protein, 84 aa, unidentified
  REGION 1..84: note = Description of Unknown:cds_NZ_WFIY01000004.1_cds_WP_155862410.1_149 target sequence
IGELMYVNHGLLMSLGVTLPPIDNLVSTAKILGLKGCKISGGGGGGSTVCLEDERARILLSTIGAKIVDARISQEGVTIKEINQ

SEQ ID NO: 34961 - protein, 85 aa, unidentified
  REGION 1..85: note = Description of Unknown:cds_NZ_WFIY01000004.1_cds_WP_155862410.1_149 target sequence
AINEKMKIKIVPYHKMVLKSNSLSIKGIKVDLEEMKLESEETSRVLSYALSTINFFEKEYGTRKNALIEIESPVDPSVGLGTSAA

SEQ ID NO: 34962 - protein, 85 aa, unidentified
  REGION 1..85: note = Description of Unknown:cds_NZ_WFIY01000004.1_cds_WP_155862410.1_149 target sequence
VIVGIVGGYSRYLGYELTREEIAKISHKIELTVQGLGSRMDTYTTSLGGLIYFPKGGGYEKIRGEIRITAGYIRRIATTAEILKR

SEQ ID NO: 34963 - protein, 85 aa, unidentified
  REGION 1..85: note = Description of Unknown:cds_NZ_WFIY01000004.1_cds_WP_155862410.1_149 target sequence
VKSLKEKNPDLFNDLISSIGKTVNKAKIAIEKEDEEEIGELMYVNHGLLMSLGVTLPPIDNLVSTAKILGLKGCKISGGGGGGST

SEQ ID NO: 34964 - protein, 85 aa, unidentified
  REGION 1..85: note = Description of Unknown:cds_NC_035460.1_cds_YP_009408129.1_178 target sequence
YNRYLNIIFIIVTCSMLHIVKSNNEIIHTLKYLYIGTYKNLSTSLSIVGYFDDIPFEKYNSQNNCAYSLVDWFKLDHKSYKRNIK

SEQ ID NO: 34965 - protein, 85 aa, unidentified
  REGION 1..85: note = Description of Unknown:cds_NC_035460.1_cds_YP_009408129.1_178 target sequence
NGDDSFKSFKMNFYRLKDRYNYSDAIQQQLQLTISCECFSNRTCKNYHYKYAYNGLPFISISNNLEKWITDNVSTTDIVNKWIKN

SEQ ID NO: 34966 - protein, 85 aa, unidentified
  REGION 1..85: note = Description of Unknown:cds_NC_035460.1_cds_YP_009408129.1_178 target sequence
DEIHNMKYYLMHECTESLLYILYMSNYISYSTLQHTFISKVYSNSNFTILRCWAGRFFPSTISMFWYKNNTITNNLEEIDVRPLG

SEQ ID NO: 34967 - protein, 84 aa, unidentified
  REGION 1..84: note = Description of Unknown:cds_NC_035460.1_cds_YP_009408129.1_178 target sequence
MFWYKNNTITNNLEEIDVRPLGDGTFQKWISVNASTLDIYLYECKIKHVNISNELILKWNTAFTNTAQYVFTICITILVTVIFL

SEQ ID NO: 34968 - protein, 85 aa, unidentified
  REGION 1..85: note = Description of Unknown:cds_NC_035460.1_cds_YP_009408129.1_178 target sequence
HTLKYLYIGTYKNLSTSLSIVGYFDDIPFEKYNSQNNCAYSLVDWFKLDHKSYKRNIKNGDDSFKSFKMNFYRLKDRYNYSDAIQ

SEQ ID NO: 34969 - protein, 85 aa, unidentified
  REGION 1..85: note = Description of Unknown:cds_NC_035460.1_cds_YP_009408129.1_178 target sequence
QQLQLTISCECFSNRTCKNYHYKYAYNGLPFISISNNLEKWITDNVSTTDIVNKWIKNDEIHNMKYYLMHECTESLLYILYMSNY

SEQ ID NO: 34970 - protein, 85 aa, unidentified
  REGION 1..85: note = Description of Unknown:cds_NC_035460.1_cds_YP_009408129.1_178 target sequence
ISYSTLQHTFISKVYSNSNFTILRCWAGRFFPSTISMFWYKNNTITNNLEEIDVRPLGDGTFQKWISVNASTLDIYLYECKIKHV

SEQ ID NO: 34971 - protein, 85 aa, unidentified
  REGION 1..85: note = Description of Unknown:cds_NZ_WFIY01000004.1_cds_WP_155862650.1_437 target sequence
PIGKIATFDEGSINGSIEYSTLLKSTKVSSENRELLYTFYAEKKPIKAYIVIITETRDLTTKWRLWLNNFSLTKEFKPIDTVKVG

SEQ ID NO: 34972 - protein, 85 aa, unidentified
  REGION 1..85: note = Description of Unknown:cds_NZ_WFIY01000004.1_cds_WP_155862650.1_437 target sequence
GSYYNLNIYDVTHLAREGKNEFVVSHSSIEGIWVHIINSVLFYEVPEFKTNYKLRAGIYLIQPSEEIELDGEGKNYIVIRNPNKS

SEQ ID NO: 34973 - protein, 85 aa, unidentified
  REGION 1..85: note = Description of Unknown:cds_NZ_WFIY01000004.1_cds_WP_155862650.1_437 target sequence
ILKVVNSTGTVTTIGGSLDSDEIEVKGHLSIIHESSQRSPAFLFLHYSENSITPNISINVSGKIGRDNKAVITLYNDGEVDLDKV

SEQ ID NO: 34974 - protein, 84 aa, unidentified
  REGION 1..84: note = Description of Unknown:cds_NZ_WFIY01000004.1_cds_WP_155862650.1_437 target sequence
KIGRDNKAVITLYNDGEVDLDKVLLNAMLNGVTIHFKSFDNIKIGQKINYEFFVPKKGNVHLRIVGVKSGFRKILDKDLEWETA

SEQ ID NO: 34975 - protein, 85 aa, unidentified
  REGION 1..85: note = Description of Unknown:cds_NZ_WFIY01000004.1_cds_WP_155862650.1_437 target sequence
VSSENRELLYTFYAEKKPIKAYIVIITETRDLTTKWRLWLNNFSLTKEFKPIDTVKVGGSYYNLNIYDVTHLAREGKNEFVVSHS

SEQ ID NO: 34976 - protein, 85 aa, unidentified
  REGION 1..85: note = Description of Unknown:cds_NZ_WFIY01000004.1_cds_WP_155862650.1_437 target sequence
SIEGIWVHIINSVLFYEVPEFKTNYKLRAGIYLIQPSEEIELDGEGKNYIVIRNPNKSILKVVNSTGTVTTIGGSLDSDEIEVKG

SEQ ID NO: 34977 - protein, 85 aa, unidentified
  REGION 1..85: note = Description of Unknown:cds_NZ_WFIY01000004.1_cds_WP_155862650.1_437 target sequence
HLSIIHESSQRSPAFLFLHYSENSITPNISINVSGKIGRDNKAVITLYNDGEVDLDKVLLNAMLNGVTIHFKSFDNIKIGQKINY

SEQ ID NO: 34978 - protein, 85 aa, unidentified
  REGION 1..85: note = Description of Unknown:cds_NZ_WFIY01000004.1_cds_WP_155862810.1_637 target sequence
LKAHLFELANLIIVLDTPLSLITDVLLPNIRALEAKRLRNLGMSQSKIASTLGVTQPAVKQYLDIQDRFYLEKLYDLGLTDDEIN

SEQ ID NO: 34979 - protein, 85 aa, unidentified
  REGION 1..85: note = Description of Unknown:cds_NZ_WFIY01000004.1_cds_WP_155862810.1_637 target sequence
NILDMLTDVLLSGDIKNVMDFFTSVGLSYLSKLRFCTFHRKLNPKIPQDCSICENLYREDEEEEMNVALSMIQNEIISPLIPEVL

SEQ ID NO: 34980 - protein, 85 aa, unidentified
  REGION 1..85: note = Description of Unknown:cds_NZ_WFIY01000004.1_cds_WP_155862810.1_637 target sequence
SNIAYARKNPKSLDDIIAVAGRITKIRNIPTPASKPMWGASKHLGNILLYVSRKYPEIRSVMNIKYDEKVKKCMDELKMKYAIVG

SEQ ID NO: 34981 - protein, 84 aa, unidentified
  REGION 1..84: note = Description of Unknown:cds_NZ_WFIY01000004.1_cds_WP_155862810.1_637 target sequence
IKYDEKVKKCMDELKMKYAIVGPHDYATDEIIETAVSMVFRPCLDAVVHLGGKGVEPNTYIFGKKPVDVVKKVLNIATKYSSLS

SEQ ID NO: 34982 - protein, 85 aa, unidentified
  REGION 1..85: note = Description of Unknown:cds_NZ_WFIY01000004.1_cds_WP_155862810.1_637 target sequence
PNIRALEAKRLRNLGMSQSKIASTLGVTQPAVKQYLDIQDRFYLEKLYDLGLTDDEINNILDMLTDVLLSGDIKNVMDFFTSVGL

SEQ ID NO: 34983 - protein, 85 aa, unidentified
  REGION 1..85: note = Description of Unknown:cds_NZ_WFIY01000004.1_cds_WP_155862810.1_637 target sequence
SYLSKLRFCTFHRKLNPKIPQDCSICENLYREDEEEEMNVALSMIQNEIISPLIPEVLSNIAYARKNPKSLDDIIAVAGRITKIR

SEQ ID NO: 34984 - protein, 85 aa, unidentified
  REGION 1..85: note = Description of Unknown:cds_NZ_WFIY01000004.1_cds_WP_155862810.1_637 target sequence
NIPTPASKPMWGASKHLGNILLYVSRKYPEIRSVMNIKYDEKVKKCMDELKMKYAIVGPHDYATDEIIETAVSMVFRPCLDAVVH

SEQ ID NO: 34985 - protein, 85 aa, unidentified
  REGION 1..85: note = Description of Unknown:cds_NZ_WFIY01000004.1_cds_WP_155864396.1_960 target sequence
LPICAIIAFIITFLTTRWIIRVAKERKIVGKDVNKPNKPEVPSLGGIAIVAGFVSGTFVLLIQDQNYERIISSILLSSLLIAFLG

SEQ ID NO: 34986 - protein, 85 aa, unidentified
  REGION 1..85: note = Description of Unknown:cds_NZ_WFIY01000004.1_cds_WP_155864396.1_960 target sequence
LMDDFLNLRQSIRAFTPIFAAVPLAVFSVGHSAISIPFLGVVNLGIFYYVVVIPAALTISSNAFNMLEGLNGLGTGMGIIMSAAL

SEQ ID NO: 34987 - protein, 85 aa, unidentified
  REGION 1..85: note = Description of Unknown:cds_NZ_WFIY01000004.1_cds_WP_155864396.1_960 target sequence
AYIGLTRSGNIFVAGEMALILLASLLAFLYYNKYPAKVFIGNIGTYFVGSVIGSIGIAGYMYTALAVLYLPYVAEFILKARTRFK

SEQ ID NO: 34988 - protein, 84 aa, unidentified
  REGION 1..84: note = Description of Unknown:cds_NZ_WFIY01000004.1_cds_WP_155864396.1_960 target sequence
ALAVLYLPYVAEFILKARTRFKGVSFGKVDEDGTLYWNDKPNSLTHIVMKMGRFKEYQVVTILWIIEGIFAILAIYLQTTVIVI

SEQ ID NO: 34989 - protein, 85 aa, unidentified
  REGION 1..85: note = Description of Unknown:cds_NZ_WFIY01000004.1_cds_WP_155864396.1_960 target sequence
IVGKDVNKPNKPEVPSLGGIAIVAGFVSGTFVLLIQDQNYERIISSILLSSLLIAFLGLMDDFLNLRQSIRAFTPIFAAVPLAVF

SEQ ID NO: 34990 - protein, 85 aa, unidentified
  REGION 1..85: note = Description of Unknown:cds_NZ_WFIY01000004.1_cds_WP_155864396.1_960 target sequence
SVGHSAISIPFLGVVNLGIFYYVVVIPAALTISSNAFNMLEGLNGLGTGMGIIMSAALAYIGLTRSGNIFVAGEMALILLASLLA

SEQ ID NO: 34991 - protein, 85 aa, unidentified
  REGION 1..85: note = Description of Unknown:cds_NZ_WFIY01000004.1_cds_WP_155864396.1_960 target sequence
FLYYNKYPAKVFIGNIGTYFVGSVIGSIGIAGYMYTALAVLYLPYVAEFILKARTRFKGVSFGKVDEDGTLYWNDKPNSLTHIVM

SEQ ID NO: 34992 - protein, 85 aa, unidentified
  REGION 1..85: note = Description of Unknown:cds_NZ_WFIY01000004.1_cds_WP_155863270.1_1225 target sequence
SIQYLPKSGLYASTGLNTYARLEYTKDISNATIAIIGVPWDDLATSRPGTRYGPQGIRNASSFILPNRKYNYVLDINPFEVAKIV

SEQ ID NO: 34993 - protein, 85 aa, unidentified
  REGION 1..85: note = Description of Unknown:cds_NZ_WFIY01000004.1_cds_WP_155863270.1_1225 target sequence
DYGDVEVHAGYIEDMFNEVEKEVKEMLKKNSSVIPVVLGGDHSISLPVIRGLSSKYKKVAVVHVDAHHDSLDILYGKKYDHGTIF

SEQ ID NO: 34994 - protein, 85 aa, unidentified
  REGION 1..85: note = Description of Unknown:cds_NZ_WFIY01000004.1_cds_WP_155863270.1_1225 target sequence
RRGVEEGVIIGESSVHYGVRVFSSKEDMESVRALGYDLLTMKIIDEEGLSKTVEQLKRKVGDQPVYLSIDIDVMDPAYAPGTGYP

SEQ ID NO: 34995 - protein, 84 aa, unidentified
  REGION 1..84: note = Description of Unknown:cds_NZ_WFIY01000004.1_cds_WP_155863270.1_1225 target sequence
QPVYLSIDIDVMDPAYAPGTGYPDPGGLTSREILEFVRKLYGLNIIGMDVVEVSPPYDVAEITSTLAASIVFEGLSIISKNLKK

SEQ ID NO: 34996 - protein, 85 aa, unidentified
  REGION 1..85: note = Description of Unknown:cds_NZ_WFIY01000004.1_cds_WP_155863270.1_1225 target sequence
ISNATIAIIGVPWDDLATSRPGTRYGPQGIRNASSFILPNRKYNYVLDINPFEVAKIVDYGDVEVHAGYIEDMFNEVEKEVKEML

SEQ ID NO: 34997 - protein, 85 aa, unidentified
  REGION 1..85: note = Description of Unknown:cds_NZ_WFIY01000004.1_cds_WP_155863270.1_1225 target sequence
KKNSSVIPVVLGGDHSISLPVIRGLSSKYKKVAVVHVDAHHDSLDILYGKKYDHGTIFRRGVEEGVIIGESSVHYGVRVFSSKED

SEQ ID NO: 34998 - protein, 85 aa, unidentified
  REGION 1..85: note = Description of Unknown:cds_NZ_WFIY01000004.1_cds_WP_155863270.1_1225 target sequence
MESVRALGYDLLTMKIIDEEGLSKTVEQLKRKVGDQPVYLSIDIDVMDPAYAPGTGYPDPGGLTSREILEFVRKLYGLNIIGMDV

SEQ ID NO: 34999 - protein, 85 aa, unidentified
  REGION 1..85: note = Description of Unknown:cds_NZ_WFIY01000004.1_cds_WP_155863449.1_1418 target sequence
LILTYIAYVITMTLALSWAFDESIRGNNLGSITMVISYISTSVYLIVFSLNNLGIVLSIVVILIVIPITLRNLGFNRSYNVLLLL

SEQ ID NO: 35000 - protein, 85 aa, unidentified
  REGION 1..85: note = Description of Unknown:cds_NZ_WFIY01000004.1_cds_WP_155863449.1_1418 target sequence
INEIIMSLVYYVILRGFNNAVLALSFYGTDIPVSSLSPVNVILALIELSNSFMFFLMILPEVLYFSIRHKHYYPLLLSILALSGP

SEQ ID NO: 35001 - protein, 85 aa, unidentified
  REGION 1..85: note = Description of Unknown:cds_NZ_WFIY01000004.1_cds_WP_155863449.1_1418 target sequence
NIASEMTHSILPLPYDPIKEASVLITLLSIILSVYFSYNVVKGRMNLNSYLIFIVANIILSLSSLYYSISLNEIPYGIATLITIY

SEQ ID NO: 35002 - protein, 84 aa, unidentified
  REGION 1..84: note = Description of Unknown:cds_NZ_WFIY01000004.1_cds_WP_155863449.1_1418 target sequence
SLYYSISLNEIPYGIATLITIYIALSDIKFNLRIPTTIWLLLAIPQALWGLSIALWYNLLQFELLLGIGLSIFYIISVRLITKF

SEQ ID NO: 35003 - protein, 85 aa, unidentified
  REGION 1..85: note = Description of Unknown:cds_NZ_WFIY01000004.1_cds_WP_155863449.1_1418 target sequence
NLGSITMVISYISTSVYLIVFSLNNLGIVLSIVVILIVIPITLRNLGFNRSYNVLLLLINEIIMSLVYYVILRGFNNAVLALSFY

SEQ ID NO: 35004 - protein, 85 aa, unidentified
  REGION 1..85: note = Description of Unknown:cds_NZ_WFIY01000004.1_cds_WP_155863449.1_1418 target sequence
GTDIPVSSLSPVNVILALIELSNSFMFFLMILPEVLYFSIRHKHYYPLLLSILALSGPNIASEMTHSILPLPYDPIKEASVLITL

SEQ ID NO: 35005 - protein, 85 aa, unidentified
  REGION 1..85: note = Description of Unknown:cds_NZ_WFIY01000004.1_cds_WP_155863449.1_1418 target sequence
LSIILSVYFSYNVVKGRMNLNSYLIFIVANIILSLSSLYYSISLNEIPYGIATLITIYIALSDIKFNLRIPTTIWLLLAIPQALW

SEQ ID NO: 35006 - protein, 85 aa, unidentified
  REGION 1..85: note = Description of Unknown:cds_NZ_WFIY01000004.1_cds_WP_155864313.1_2309 target sequence
KIIVVGGAGFIGSAFVRELNKRGIKPIVVDLLTYAGRKENLIGTDYDFVQADVRSEKMHDIIKEYSPDIVINFAAETHVDRSIYK

SEQ ID NO: 35007 - protein, 85 aa, unidentified
  REGION 1..85: note = Description of Unknown:cds_NZ_WFIY01000004.1_cds_WP_155864313.1_2309 target sequence
PQDFVTTNVLGTVNLLEASRKFNFKYVHISTDEVYGEECGDENSPLKPSSPYSASKASADLFVKAYVRTYGISAVIVRPSNNYGP

SEQ ID NO: 35008 - protein, 85 aa, unidentified
  REGION 1..85: note = Description of Unknown:cds_NZ_WFIY01000004.1_cds_WP_155864313.1_2309 target sequence
RQFPEKLIPKAIIRTLLGMHVPVYGDGKAERDWIFVEDTARIIFDVVSRAEWKGEVYNIPGGQRYNVLEILKILEEVSGKEVKIK

SEQ ID NO: 35009 - protein, 84 aa, unidentified
  REGION 1..84: note = Description of Unknown:cds_NZ_WFIY01000004.1_cds_WP_155864313.1_2309 target sequence
QRYNVLEILKILEEVSGKEVKIKFVSDRPGHDRRYCMTTSMKYEVTPFKEGLRRTYEWYLNNRWWWEPLINDKFFVEDEPWLTV

SEQ ID NO: 35010 - protein, 85 aa, unidentified
  REGION 1..85: note = Description of Unknown:cds_NZ_WFIY01000004.1_cds_WP_155864313.1_2309 target sequence
VVDLLTYAGRKENLIGTDYDFVQADVRSEKMHDIIKEYSPDIVINFAAETHVDRSIYKPQDFVTTNVLGTVNLLEASRKFNFKYV

SEQ ID NO: 35011 - protein, 85 aa, unidentified
  REGION 1..85: note = Description of Unknown:cds_NZ_WFIY01000004.1_cds_WP_155864313.1_2309 target sequence
HISTDEVYGEECGDENSPLKPSSPYSASKASADLFVKAYVRTYGISAVIVRPSNNYGPRQFPEKLIPKAIIRTLLGMHVPVYGDG

SEQ ID NO: 35012 - protein, 85 aa, unidentified
  REGION 1..85: note = Description of Unknown:cds_NZ_WFIY01000004.1_cds_WP_155864313.1_2309 target sequence
KAERDWIFVEDTARIIFDVVSRAEWKGEVYNIPGGQRYNVLEILKILEEVSGKEVKIKFVSDRPGHDRRYCMTTSMKYEVTPFKE

SEQ ID NO: 35013 - protein, 85 aa, unidentified
  REGION 1..85: note = Description of Unknown:cds_NZ_WFIY01000003.1_cds_WP_155862283.1_2368 target sequence
LPPGEYKVLFINNVSKTCVTIQIYIGDGRPYPTGIADYGIQVVNGVVKPYVEKFDEVVAQIYSISAYNASLNNYGASLQLNTVLQ

SEQ ID NO: 35014 - protein, 85 aa, unidentified
  REGION 1..85: note = Description of Unknown:cds_NZ_WFIY01000003.1_cds_WP_155862283.1_2368 target sequence
VNTLYGSQEYWLQNVINFMTNTSEYSFVDNIWNFTSCYSELNSSSIIGNGGVCWFTGGLEINDYYVYATEWLNMSYPLNVALFIR

SEQ ID NO: 35015 - protein, 85 aa, unidentified
  REGION 1..85: note = Description of Unknown:cds_NZ_WFIY01000003.1_cds_WP_155862283.1_2368 target sequence
VSTVPQGVEVLFGYINSTSCVIYDNVTIKVPCVTSAYLLVSGYNTTGSRNAYDTEFVFGGEKCGEVTSFNSLNAIIYMFYVNGKD

SEQ ID NO: 35016 - protein, 84 aa, unidentified
  REGION 1..84: note = Description of Unknown:cds_NZ_WFIY01000003.1_cds_WP_155862283.1_2368 target sequence
GEVTSFNSLNAIIYMFYVNGKDVFTPKTLFPFGIDTAEASNNLFTVPYNGAYKVEVGKCNEVVLTNSCSPIVVKVNGSRARANC

SEQ ID NO: 35017 - protein, 85 aa, unidentified
  REGION 1..85: note = Description of Unknown:cds_NZ_WFIY01000003.1_cds_WP_155862283.1_2368 target sequence
GRPYPTGIADYGIQVVNGVVKPYVEKFDEVVAQIYSISAYNASLNNYGASLQLNTVLQVNTLYGSQEYWLQNVINFMTNTSEYSF

SEQ ID NO: 35018 - protein, 85 aa, unidentified
  REGION 1..85: note = Description of Unknown:cds_NZ_WFIY01000003.1_cds_WP_155862283.1_2368 target sequence
VDNIWNFTSCYSELNSSSIIGNGGVCWFTGGLEINDYYVYATEWLNMSYPLNVALFIRVSTVPQGVEVLFGYINSTSCVIYDNVT

SEQ ID NO: 35019 - protein, 85 aa, unidentified
  REGION 1..85: note = Description of Unknown:cds_NZ_WFIY01000003.1_cds_WP_155862283.1_2368 target sequence
IKVPCVTSAYLLVSGYNTTGSRNAYDTEFVFGGEKCGEVTSFNSLNAIIYMFYVNGKDVFTPKTLFPFGIDTAEASNNLFTVPYN

SEQ ID NO: 35020 - protein, 85 aa, unidentified
  REGION 1..85: note = Description of Unknown:cds_NC_040406.1_cds_YP_009551532.1_8 target sequence
AELACFCYPHLENDSYKFIPFNSLAIKCMLAAKVEKKDMDKFYNSIIYGIAPPPQFRKRYNTNDNSRGMNFESEMFIKVASLVCE

SEQ ID NO: 35021 - protein, 85 aa, unidentified
  REGION 1..85: note = Description of Unknown:cds_NC_040406.1_cds_YP_009551532.1_8 target sequence
ALNSIKVTQTDISSVLSRVVSVRHLENLVLRRENCQDVLFHSKELLIKSTLIAIGQSKEIETTATAEGGEVVFQNAAFTMWKLNY

SEQ ID NO: 35022 - protein, 85 aa, unidentified
  REGION 1..85: note = Description of Unknown:cds_NC_040406.1_cds_YP_009551532.1_8 target sequence
LDHTLMPILDSNFVEYKITLNEDKPISDIHVKELVSELRWQYNKFAAITHGKGHYRIVKYSSVANHADRVYATFRNNAKLSMNND

SEQ ID NO: 35023 - protein, 84 aa, unidentified
  REGION 1..84: note = Description of Unknown:cds_NC_040406.1_cds_YP_009551532.1_8 target sequence
VANHADRVYATFRNNAKLSMNNDFNLLDQRIIWQNWYAFTSSMKQGNALDVCKKLLFQKMKQDKNSFKGLSTDRRMDEVSQVGL

SEQ ID NO: 35024 - protein, 85 aa, unidentified
  REGION 1..85: note = Description of Unknown:cds_NC_040406.1_cds_YP_009551532.1_8 target sequence
CMLAAKVEKKDMDKFYNSIIYGIAPPPQFRKRYNTNDNSRGMNFESEMFIKVASLVCEALNSIKVTQTDISSVLSRVVSVRHLEN

SEQ ID NO: 35025 - protein, 85 aa, unidentified
  REGION 1..85: note = Description of Unknown:cds_NC_040406.1_cds_YP_009551532.1_8 target sequence
LVLRRENCQDVLFHSKELLIKSTLIAIGQSKEIETTATAEGGEVVFQNAAFTMWKLNYLDHTLMPILDSNFVEYKITLNEDKPIS

SEQ ID NO: 35026 - protein, 85 aa, unidentified
  REGION 1..85: note = Description of Unknown:cds_NC_040406.1_cds_YP_009551532.1_8 target sequence
DIHVKELVSELRWQYNKFAAITHGKGHYRIVKYSSVANHADRVYATFRNNAKLSMNNDFNLLDQRIIWQNWYAFTSSMKQGNALD

SEQ ID NO: 35027 - protein, 85 aa, unidentified
  REGION 1..85: note = Description of Unknown:cds_NC_011502.2_cds_YP_002302221.1_8 target sequence
AELACFCYPHLENDSYKFIPFNNLAIKAMLTAKVDKKDMDKFYDSIIYGIAPPPQFKKRYNTNDNSRGMNFETIMFTKVAMLICE

SEQ ID NO: 35028 - protein, 85 aa, unidentified
  REGION 1..85: note = Description of Unknown:cds_NC_011502.2_cds_YP_002302221.1_8 target sequence
ALNSLKVTQANVSNVLSRVVSIRHLENLVIRKENPQDILFHSKDLLLKSTLIAIGQSKEIETTITAEGGEIVFQNAAFTMWKLTY

SEQ ID NO: 35029 - protein, 85 aa, unidentified
  REGION 1..85: note = Description of Unknown:cds_NC_011502.2_cds_YP_002302221.1_8 target sequence
LEHQLMPILDQNFIEYKVTLNEDKPISDVHVKELVAELRWQYNKFAVITHGKGHYRIVKYSSVANHADRVYATFKSNVKTGVNND

SEQ ID NO: 35030 - protein, 84 aa, unidentified
  REGION 1..84: note = Description of Unknown:cds_NC_011502.2_cds_YP_002302221.1_8 target sequence
VANHADRVYATFKSNVKTGVNNDFNLLDQRIIWQNWYAFTSSMKQGNTLDVCKRLLFQKMKPEKNPFKGLSTDRKMDEVSQVGV

SEQ ID NO: 35031 - protein, 85 aa, unidentified
  REGION 1..85: note = Description of Unknown:cds_NC_011502.2_cds_YP_002302221.1_8 target sequence
AMLTAKVDKKDMDKFYDSIIYGIAPPPQFKKRYNTNDNSRGMNFETIMFTKVAMLICEALNSLKVTQANVSNVLSRVVSIRHLEN

SEQ ID NO: 35032 - protein, 85 aa, unidentified
  REGION 1..85: note = Description of Unknown:cds_NC_011502.2_cds_YP_002302221.1_8 target sequence
LVIRKENPQDILFHSKDLLLKSTLIAIGQSKEIETTITAEGGEIVFQNAAFTMWKLTYLEHQLMPILDQNFIEYKVTLNEDKPIS

SEQ ID NO: 35033 - protein, 85 aa, unidentified
  REGION 1..85: note = Description of Unknown:cds_NC_011502.2_cds_YP_002302221.1_8 target sequence
DVHVKELVAELRWQYNKFAVITHGKGHYRIVKYSSVANHADRVYATFKSNVKTGVNNDFNLLDQRIIWQNWYAFTSSMKQGNTLD

SEQ ID NO: 35034 - protein, 85 aa, unidentified
  REGION 1..85: note = Description of Unknown:cds_NC_010495.1_cds_YP_001742084.1_47 target sequence
RYDWKDIEQKMLGNWQAAIMSIVSVDSRVFNGKHQPCPSCSGKDRYRFDDNFKTKGDGGAICNQCGSGSGINWLMKLSGMSFPEA

SEQ ID NO: 35035 - protein, 85 aa, unidentified
  REGION 1..85: note = Description of Unknown:cds_NC_010495.1_cds_YP_001742084.1_47 target sequence
LEALGGFLNMHPREKLEAIRKELPKINYNDDFITEQEVAAIMAKTTRVAMNEWTLINGIGCDINVAIGKYGELIAVEMMRADTMK

SEQ ID NO: 35036 - protein, 85 aa, unidentified
  REGION 1..85: note = Description of Unknown:cds_NC_010495.1_cds_YP_001742084.1_47 target sequence
LCNVAFIGIDGDSFRTYFRAGYNKDSTINGKLTRGAISPIGGDNGKFIYLVSDYADAWKCHYFTGAHVWCCWSPENMWEVVRSVS

SEQ ID NO: 35037 - protein, 84 aa, unidentified
  REGION 1..84: note = Description of Unknown:cds_NC_010495.1_cds_YP_001742084.1_47 target sequence
FTGAHVWCCWSPENMWEVVRSVSDEKKARLRCIVNYKFDELCAAENAGLPVMLPDDSDTIRMAKRIRRKIYDAGELIEKMSVSR

SEQ ID NO: 35038 - protein, 85 aa, unidentified
  REGION 1..85: note = Description of Unknown:cds_NC_010495.1_cds_YP_001742084.1_47 target sequence
RVFNGKHQPCPSCSGKDRYRFDDNFKTKGDGGAICNQCGSGSGINWLMKLSGMSFPEALEALGGFLNMHPREKLEAIRKELPKIN

SEQ ID NO: 35039 - protein, 85 aa, unidentified
  REGION 1..85: note = Description of Unknown:cds_NC_010495.1_cds_YP_001742084.1_47 target sequence
YNDDFITEQEVAAIMAKTTRVAMNEWTLINGIGCDINVAIGKYGELIAVEMMRADTMKLCNVAFIGIDGDSFRTYFRAGYNKDST

SEQ ID NO: 35040 - protein, 85 aa, unidentified
  REGION 1..85: note = Description of Unknown:cds_NC_010495.1_cds_YP_001742084.1_47 target sequence
INGKLTRGAISPIGGDNGKFIYLVSDYADAWKCHYFTGAHVWCCWSPENMWEVVRSVSDEKKARLRCIVNYKFDELCAAENAGLP

SEQ ID NO: 35041 - protein, 85 aa, unidentified
  REGION 1..85: note = Description of Unknown:cds_NZ_WFIY01000004.1_cds_WP_155862380.1_117 target sequence
ISAPGKVLWIGSYAVVFGGLSHVIAINKRVRCEATPSDKLIFETTYGTFYDKGNELIESVVNVIRNHLGDVPKLKIRLFNDEDFQ

SEQ ID NO: 35042 - protein, 85 aa, unidentified
  REGION 1..85: note = Description of Unknown:cds_NZ_WFIY01000004.1_cds_WP_155862380.1_117 target sequence
INGKKTGLGSSSAATVALTACLYKQIKGRIDIDEIHLLAQEANFIRQKGIGSGFDIAAAVYGSIIYRRFTDLNKRDWKIERLRLG

SEQ ID NO: 35043 - protein, 85 aa, unidentified
  REGION 1..85: note = Description of Unknown:cds_NZ_WFIY01000004.1_cds_WP_155862380.1_117 target sequence
NKYDMLLGFSGRSSETVNLVKMFIEKKDDEKFIEFLREINIENDTAIRLLKLGKVDEASQHAKLARDLLNVLAEDVIGVKLQSKE

SEQ ID NO: 35044 - protein, 84 aa, unidentified
  REGION 1..84: note = Description of Unknown:cds_NZ_WFIY01000004.1_cds_WP_155862380.1_117 target sequence
AKLARDLLNVLAEDVIGVKLQSKEDKELIKIAEDNGAYISLLPGAGGGDVIFALGENLDEVRKKWKEKGLKLIEIKEDEGLNET

SEQ ID NO: 35045 - protein, 85 aa, unidentified
  REGION 1..85: note = Description of Unknown:cds_NZ_WFIY01000004.1_cds_WP_155862380.1_117 target sequence
KRVRCEATPSDKLIFETTYGTFYDKGNELIESVVNVIRNHLGDVPKLKIRLFNDEDFQINGKKTGLGSSSAATVALTACLYKQIK

SEQ ID NO: 35046 - protein, 85 aa, unidentified
  REGION 1..85: note = Description of Unknown:cds_NZ_WFIY01000004.1_cds_WP_155862380.1_117 target sequence
GRIDIDEIHLLAQEANFIRQKGIGSGFDIAAAVYGSIIYRRFTDLNKRDWKIERLRLGNKYDMLLGFSGRSSETVNLVKMFIEKK

SEQ ID NO: 35047 - protein, 85 aa, unidentified
  REGION 1..85: note = Description of Unknown:cds_NZ_WFIY01000004.1_cds_WP_155862380.1_117 target sequence
DDEKFIEFLREINIENDTAIRLLKLGKVDEASQHAKLARDLLNVLAEDVIGVKLQSKEDKELIKIAEDNGAYISLLPGAGGGDVI

SEQ ID NO: 35048 - protein, 85 aa, unidentified
  REGION 1..85: note = Description of Unknown:cds_NZ_WFIY01000004.1_cds_WP_155863327.1_1293 target sequence
VDIKDFKGIIELNNNSVSLFPGTKIIDVLKELENDNKELMVFPSSYHIATVGGYIGAGNVGIGAFQYGYFYHKALLSAKIISPKA

SEQ ID NO: 35049 - protein, 85 aa, unidentified
  REGION 1..85: note = Description of Unknown:cds_NZ_WFIY01000004.1_cds_WP_155863327.1_1293 target sequence
EVELRGDDILGIAQAAGTTGVVTRAEFSTVNKEDWEEQVVFCKDISCVMSTMKLLLSDPMKTRRVTIEDYDTFTRVTSKDGDRWN

SEQ ID NO: 35050 - protein, 85 aa, unidentified
  REGION 1..85: note = Description of Unknown:cds_NZ_WFIY01000004.1_cds_WP_155863327.1_1293 target sequence
VILSSKLKLGTRIDKIFDTIAFAAIYVYFNRKSPFKNYHYEAKLIDLKSFLEISTILKNKLGSSIMIHGDVMIIKSQPIVYSVFM

SEQ ID NO: 35051 - protein, 84 aa, unidentified
  REGION 1..84: note = Description of Unknown:cds_NZ_WFIY01000004.1_cds_WP_155863327.1_1293 target sequence
GSSIMIHGDVMIIKSQPIVYSVFMSDVENFDLIMSILRDYGYYYNLHSYQINDYHEDPYVMQKIIELKRKVDPLDILNRGKVRF

SEQ ID NO: 35052 - protein, 85 aa, unidentified
  REGION 1..85: note = Description of Unknown:cds_NZ_WFIY01000004.1_cds_WP_155863327.1_1293 target sequence
VLKELENDNKELMVFPSSYHIATVGGYIGAGNVGIGAFQYGYFYHKALLSAKIISPKAEVELRGDDILGIAQAAGTTGVVTRAEF

SEQ ID NO: 35053 - protein, 85 aa, unidentified
  REGION 1..85: note = Description of Unknown:cds_NZ_WFIY01000004.1_cds_WP_155863327.1_1293 target sequence
STVNKEDWEEQVVFCKDISCVMSTMKLLLSDPMKTRRVTIEDYDTFTRVTSKDGDRWNVILSSKLKLGTRIDKIFDTIAFAAIYV

SEQ ID NO: 35054 - protein, 85 aa, unidentified
  REGION 1..85: note = Description of Unknown:cds_NZ_WFIY01000004.1_cds_WP_155863327.1_1293 target sequence
YFNRKSPFKNYHYEAKLIDLKSFLEISTILKNKLGSSIMIHGDVMIIKSQPIVYSVFMSDVENFDLIMSILRDYGYYYNLHSYQI

SEQ ID NO: 35055 - protein, 85 aa, unidentified
  REGION 1..85: note = Description of Unknown:cds_NZ_WFIY01000004.1_cds_WP_155864332.1_2341 target sequence
LRIPTLRDVIKARKVISRFLYKTPLVYSKSLSSLLGCDVYLKLENTLPTKAFKVRGMVYYVNVKEVKKGIVVASTGNFAQATAYA

SEQ ID NO: 35056 - protein, 85 aa, unidentified
  REGION 1..85: note = Description of Unknown:cds_NZ_WFIY01000004.1_cds_WP_155864332.1_2341 target sequence
ANLVGKKAVIVMPQGVPTNKIEAVKELGGEVVFYGKIFDESLGYAKNLAEKEGLDFVHSVNESLLYEGVGTMHLEVLEDLPDVDL

SEQ ID NO: 35057 - protein, 85 aa, unidentified
  REGION 1..85: note = Description of Unknown:cds_NZ_WFIY01000004.1_cds_WP_155864332.1_2341 target sequence
VINPIGGGSGAGSAVIVYKSADPKIEVICVQAEGASSVYQSLKQGKIISTGIANTIAEGIATGRTYELAFTILNKRIDDVILVSD

SEQ ID NO: 35058 - protein, 84 aa, unidentified
  REGION 1..84: note = Description of Unknown:cds_NZ_WFIY01000004.1_cds_WP_155864332.1_2341 target sequence
TGRTYELAFTILNKRIDDVILVSDEEIINAVKLLFKKERIIAEPAGAASLAAAMKLKFSSKKKVVLMITGGNISDQLANKLFND

SEQ ID NO: 35059 - protein, 85 aa, unidentified
  REGION 1..85: note = Description of Unknown:cds_NZ_WFIY01000004.1_cds_WP_155864332.1_2341 target sequence
SKSLSSLLGCDVYLKLENTLPTKAFKVRGMVYYVNVKEVKKGIVVASTGNFAQATAYAANLVGKKAVIVMPQGVPTNKIEAVKEL

SEQ ID NO: 35060 - protein, 85 aa, unidentified
  REGION 1..85: note = Description of Unknown:cds_NZ_WFIY01000004.1_cds_WP_155864332.1_2341 target sequence
GGEVVFYGKIFDESLGYAKNLAEKEGLDFVHSVNESLLYEGVGTMHLEVLEDLPDVDLVINPIGGGSGAGSAVIVYKSADPKIEV

SEQ ID NO: 35061 - protein, 85 aa, unidentified
  REGION 1..85: note = Description of Unknown:cds_NZ_WFIY01000004.1_cds_WP_155864332.1_2341 target sequence
ICVQAEGASSVYQSLKQGKIISTGIANTIAEGIATGRTYELAFTILNKRIDDVILVSDEEIINAVKLLFKKERIIAEPAGAASLA

SEQ ID NO: 35062 - protein, 85 aa, unidentified
  REGION 1..85: note = Description of Unknown:cds_NC_010495.1_cds_YP_001742042.1_5 target sequence
KILRFNARLPQPRISQSLTDPLGAATSLSKMGKVITRKYKQLRSRALELFRTIPSSQTNAESSGLYFYDFSSARAATFMNELQAL

SEQ ID NO: 35063 - protein, 85 aa, unidentified
  REGION 1..85: note = Description of Unknown:cds_NC_010495.1_cds_YP_001742042.1_5 target sequence
IDEILLEGDDFGHGRMWANVFIGDAYQAGTQKANSELSSLSPVYAEQRPITTILYSEPYLNRLQLAYTQGYSDWRGLSDYSRQQL

SEQ ID NO: 35064 - protein, 85 aa, unidentified
  REGION 1..85: note = Description of Unknown:cds_NC_010495.1_cds_YP_001742042.1_5 target sequence
ASVIMEGVARGANPRDVESDIVKRVDVSHSYAKQLAQTEITGTLRQANRKEVIEARKELGIETVMLWQSALMRTTRQTHAARHGR

SEQ ID NO: 35065 - protein, 84 aa, unidentified
  REGION 1..84: note = Description of Unknown:cds_NC_010495.1_cds_YP_001742042.1_5 target sequence
ETVMLWQSALMRTTRQTHAARHGRFYTPEEIDTFYSENGNKYNCHCAQTPALVMDGKPVILESSQERLDKQREAWQSANKKPSK

SEQ ID NO: 35066 - protein, 85 aa, unidentified
  REGION 1..85: note = Description of Unknown:cds_NC_010495.1_cds_YP_001742042.1_5 target sequence
LSKMGKVITRKYKQLRSRALELFRTIPSSQTNAESSGLYFYDFSSARAATFMNELQALIDEILLEGDDFGHGRMWANVFIGDAYQ

SEQ ID NO: 35067 - protein, 85 aa, unidentified
  REGION 1..85: note = Description of Unknown:cds_NC_010495.1_cds_YP_001742042.1_5 target sequence
AGTQKANSELSSLSPVYAEQRPITTILYSEPYLNRLQLAYTQGYSDWRGLSDYSRQQLASVIMEGVARGANPRDVESDIVKRVDV

SEQ ID NO: 35068 - protein, 85 aa, unidentified
  REGION 1..85: note = Description of Unknown:cds_NC_010495.1_cds_YP_001742042.1_5 target sequence
SHSYAKQLAQTEITGTLRQANRKEVIEARKELGIETVMLWQSALMRTTRQTHAARHGRFYTPEEIDTFYSENGNKYNCHCAQTPA

SEQ ID NO: 35069 - protein, 85 aa, unidentified
  REGION 1..85: note = Description of Unknown:cds_NC_010495.1_cds_YP_001742080.1_43 target sequence
VRLEMKVYFNNELSNEDYHADTEHINGSGLWNIYDRCPAAWRYKDEADEQSKALIFGTGSHTALLEPERFDAEYARMPTKEDFGD

SEQ ID NO: 35070 - protein, 85 aa, unidentified
  REGION 1..85: note = Description of Unknown:cds_NC_010495.1_cds_YP_001742080.1_43 target sequence
DLLVTVSDMNSWAKERGIKGLSGKSKDEVIKIIRATGEPVKIYDEERLVAEINANGRILLEGNDYDAIQQMRAVIHANSYYSSLL

SEQ ID NO: 35071 - protein, 85 aa, unidentified
  REGION 1..85: note = Description of Unknown:cds_NC_010495.1_cds_YP_001742080.1_43 target sequence
SGAYAEVSIFGELNGEKAKVRFDCLTKGGDIIDYKTAVSAKPEEFFRHAARLGYFMKMAMQHDMFVAAYGHAPRSVNLLVQEKKA

SEQ ID NO: 35072 - protein, 84 aa, unidentified
  REGION 1..84: note = Description of Unknown:cds_NC_010495.1_cds_YP_001742080.1_43 target sequence
DMFVAAYGHAPRSVNLLVQEKKAPYIAVLIRLTEEQLHIGRIQLNGAMALYKACKENNSWNDYSMGNHVIEMQTPEWFKKQFNL

SEQ ID NO: 35073 - protein, 85 aa, unidentified
  REGION 1..85: note = Description of Unknown:cds_NC_010495.1_cds_YP_001742080.1_43 target sequence
SGLWNIYDRCPAAWRYKDEADEQSKALIFGTGSHTALLEPERFDAEYARMPTKEDFGDDLLVTVSDMNSWAKERGIKGLSGKSKD

SEQ ID NO: 35074 - protein, 85 aa, unidentified
  REGION 1..85: note = Description of Unknown:cds_NC_010495.1_cds_YP_001742080.1_43 target sequence
EVIKIIRATGEPVKIYDEERLVAEINANGRILLEGNDYDAIQQMRAVIHANSYYSSLLSGAYAEVSIFGELNGEKAKVRFDCLTK

SEQ ID NO: 35075 - protein, 85 aa, unidentified
  REGION 1..85: note = Description of Unknown:cds_NC_010495.1_cds_YP_001742080.1_43 target sequence
GGDIIDYKTAVSAKPEEFFRHAARLGYFMKMAMQHDMFVAAYGHAPRSVNLLVQEKKAPYIAVLIRLTEEQLHIGRIQLNGAMAL

SEQ ID NO: 35076 - protein, 85 aa, unidentified
  REGION 1..85: note = Description of Unknown:cds_NZ_WFIY01000004.1_cds_909 target sequence
AYISSISRLFKSTTLTKGLVTELLAENDWKNVLSILKERNFIEDIPATFDDAEIEIKRRAIDQIYKILNFSSSVKSAHDIVDLYY

SEQ ID NO: 35077 - protein, 85 aa, unidentified
  REGION 1..85: note = Description of Unknown:cds_NZ_WFIY01000004.1_cds_909 target sequence
YYLTLDEFKSIIAGIYNKSRPSKIVFLSKIYESNPTTIEELRSIIRGTIYSNALEYALSKNPKNLSQLESLLDFYFIDRLSSIIE

SEQ ID NO: 35078 - protein, 85 aa, unidentified
  REGION 1..85: note = Description of Unknown:cds_NZ_WFIY01000004.1_cds_909 target sequence
TFKGDWKAAAEAIICGYKDYYSASLAIRQKIVIPLTCKILPDIIRDLQSSKMEEVANILRRTQYSRNIELGDAYSALYSLYRLAR

SEQ ID NO: 35079 - protein, 84 aa, unidentified
  REGION 1..84: note = Description of Unknown:cds_NZ_WFIY01000004.1_cds_909 target sequence
TQYSRNIELGDAYSALYSLYRLARIEARKASIYAFMGSPFTPVTALAISELIKLDMEDLIIIINGLKIKMNKEAIKSRLSLEII

SEQ ID NO: 35080 - protein, 85 aa, unidentified
  REGION 1..85: note = Description of Unknown:cds_NZ_WFIY01000004.1_cds_909 target sequence
DWKNVLSILKERNFIEDIPATFDDAEIEIKRRAIDQIYKILNFSSSVKSAHDIVDLYYYYLTLDEFKSIIAGIYNKSRPSKIVFL

SEQ ID NO: 35081 - protein, 85 aa, unidentified
  REGION 1..85: note = Description of Unknown:cds_NZ_WFIY01000004.1_cds_909 target sequence
SKIYESNPTTIEELRSIIRGTIYSNALEYALSKNPKNLSQLESLLDFYFIDRLSSIIETFKGDWKAAAEAIICGYKDYYSASLAI

SEQ ID NO: 35082 - protein, 85 aa, unidentified
  REGION 1..85: note = Description of Unknown:cds_NZ_WFIY01000004.1_cds_909 target sequence
RQKIVIPLTCKILPDIIRDLQSSKMEEVANILRRTQYSRNIELGDAYSALYSLYRLARIEARKASIYAFMGSPFTPVTALAISEL

SEQ ID NO: 35083 - protein, 85 aa, unidentified
  REGION 1..85: note = Description of Unknown:cds_NZ_WFIY01000004.1_cds_1072 target sequence
VYNVLVTKKLPGNWIEYLKRECNVTLWEDIYPPPKEWILNNIEDKDGILITLTEKIDKEIIDRAKKLKVISTYSVGYDHIDIKYA

SEQ ID NO: 35084 - protein, 85 aa, unidentified
  REGION 1..85: note = Description of Unknown:cds_NZ_WFIY01000004.1_cds_1072 target sequence
KSRGIIVTYTPEVLTDATADLIFGLILSVARRICEGDSLIRKGEWKTPWYPTFMLGTEVHGKTLGIVGMGRIGKALVKRAKGFDM

SEQ ID NO: 35085 - protein, 85 aa, unidentified
  REGION 1..85: note = Description of Unknown:cds_NZ_WFIY01000004.1_cds_1072 target sequence
RIIYNSRRKHEEVDAEYVDLDYLLENSDYVVITVDLNDSTYHLINEDRLKKMKRSAFLINASRGQVVDEKALIKALQEGWIKGAG

SEQ ID NO: 35086 - protein, 84 aa, unidentified
  REGION 1..84: note = Description of Unknown:cds_NZ_WFIY01000004.1_cds_1072 target sequence
SRGQVVDEKALIKALQEGWIKGAGLDVFEIEPLPKDSPLLKLNNVVLTPHLGSATIETREKMAEIAVKNLLLALKGEKPIYEVQ

SEQ ID NO: 35087 - protein, 85 aa, unidentified
  REGION 1..85: note = Description of Unknown:cds_NZ_WFIY01000004.1_cds_1072 target sequence
EDIYPPPKEWILNNIEDKDGILITLTEKIDKEIIDRAKKLKVISTYSVGYDHIDIKYAKSRGIIVTYTPEVLTDATADLIFGLIL

SEQ ID NO: 35088 - protein, 85 aa, unidentified
  REGION 1..85: note = Description of Unknown:cds_NZ_WFIY01000004.1_cds_1072 target sequence
SVARRICEGDSLIRKGEWKTPWYPTFMLGTEVHGKTLGIVGMGRIGKALVKRAKGFDMRIIYNSRRKHEEVDAEYVDLDYLLENS

SEQ ID NO: 35089 - protein, 85 aa, unidentified
  REGION 1..85: note = Description of Unknown:cds_NZ_WFIY01000004.1_cds_1072 target sequence
DYVVITVDLNDSTYHLINEDRLKKMKRSAFLINASRGQVVDEKALIKALQEGWIKGAGLDVFEIEPLPKDSPLLKLNNVVLTPHL

SEQ ID NO: 35090 - protein, 85 aa, unidentified
  REGION 1..85: note = Description of Unknown:cds_NZ_WFIY01000004.1_cds_WP_155863939.1_1856 target sequence
SEEEKEIVVKIKRFSKEKGSWWQEYKLKVDRFTQMTEVLRRIKTEQDPTLAYRASCHMAVCGSCGMKINGEPRLACKTLALDMVK

SEQ ID NO: 35091 - protein, 85 aa, unidentified
  REGION 1..85: note = Description of Unknown:cds_NZ_WFIY01000004.1_cds_WP_155863939.1_1856 target sequence
KYGKNEITIEPMDYFPVIKDLIVDWTDFYNRMFKVKPRLYPSKEVLEGKAEHRLKPEDQRELWKFEQCIWCGLCVSACPSVKNDP

SEQ ID NO: 35092 - protein, 85 aa, unidentified
  REGION 1..85: note = Description of Unknown:cds_NZ_WFIY01000004.1_cds_WP_155863939.1_1856 target sequence
EFLGPAAHAKGYRFLADPRDTIFDERLKILIDSAWRCTYCYQCFNVCPRDIEPVTTIKKTRAYTKFLSEKTPVALTGEKHAEAIA

SEQ ID NO: 35093 - protein, 84 aa, unidentified
  REGION 1..84: note = Description of Unknown:cds_NZ_WFIY01000004.1_cds_WP_155863939.1_1856 target sequence
RAYTKFLSEKTPVALTGEKHAEAIAKSIEETGKIEEAKVYISTYGLLTAITDMIYAMQNGKLKYALVMEKKVKNIEQIRKIMGE

SEQ ID NO: 35094 - protein, 85 aa, unidentified
  REGION 1..85: note = Description of Unknown:cds_NZ_WFIY01000004.1_cds_WP_155863939.1_1856 target sequence
KVDRFTQMTEVLRRIKTEQDPTLAYRASCHMAVCGSCGMKINGEPRLACKTLALDMVKKYGKNEITIEPMDYFPVIKDLIVDWTD

SEQ ID NO: 35095 - protein, 85 aa, unidentified
  REGION 1..85: note = Description of Unknown:cds_NZ_WFIY01000004.1_cds_WP_155863939.1_1856 target sequence
FYNRMFKVKPRLYPSKEVLEGKAEHRLKPEDQRELWKFEQCIWCGLCVSACPSVKNDPEFLGPAAHAKGYRFLADPRDTIFDERL

SEQ ID NO: 35096 - protein, 85 aa, unidentified
  REGION 1..85: note = Description of Unknown:cds_NZ_WFIY01000004.1_cds_WP_155863939.1_1856 target sequence
KILIDSAWRCTYCYQCFNVCPRDIEPVTTIKKTRAYTKFLSEKTPVALTGEKHAEAIAKSIEETGKIEEAKVYISTYGLLTAITD

SEQ ID NO: 35097 - protein, 85 aa, unidentified
  REGION 1..85: note = Description of Unknown:cds_NZ_WFIY01000004.1_cds_WP_155864474.1_2023 target sequence
TFILLHFLNNNIMHIKSSEKGSNDEVITTASHQEGYFSIIGSYKSDSEYSMGEIYSIDCSFFVSPFLWNLKYADGNANLTFRNGV

SEQ ID NO: 35098 - protein, 85 aa, unidentified
  REGION 1..85: note = Description of Unknown:cds_NZ_WFIY01000004.1_cds_WP_155864474.1_2023 target sequence
LYVNVNFSHFEKITPSIPVDGYPGLMYGHEGWFPFAGTTIENPSLVLPKKVYCLPNIISTLNYSVWVQEGTIDDFSYDIWLSQNP

SEQ ID NO: 35099 - protein, 85 aa, unidentified
  REGION 1..85: note = Description of Unknown:cds_NZ_WFIY01000004.1_cds_WP_155864474.1_2023 target sequence
NTTYLAFPDIELMIWLYHNETLSSYFIKVGEVQVPICVNGSKITCTFTVYILPHTGSSNGWIGVYYLSNQNLEGKVSIPLTFFIK

SEQ ID NO: 35100 - protein, 84 aa, unidentified
  REGION 1..84: note = Description of Unknown:cds_NZ_WFIY01000004.1_cds_WP_155864474.1_2023 target sequence
WIGVYYLSNQNLEGKVSIPLTFFIKDEFQWINKIFPTINESSYYLDAIQVGMEFNDYNGIAQLGYTLYCWIMSTPQGVKILDEA

SEQ ID NO: 35101 - protein, 85 aa, unidentified
  REGION 1..85: note = Description of Unknown:cds_NZ_WFIY01000004.1_cds_WP_155864474.1_2023 target sequence
TTASHQEGYFSIIGSYKSDSEYSMGEIYSIDCSFFVSPFLWNLKYADGNANLTFRNGVLYVNVNFSHFEKITPSIPVDGYPGLMY

SEQ ID NO: 35102 - protein, 85 aa, unidentified
  REGION 1..85: note = Description of Unknown:cds_NZ_WFIY01000004.1_cds_WP_155864474.1_2023 target sequence
GHEGWFPFAGTTIENPSLVLPKKVYCLPNIISTLNYSVWVQEGTIDDFSYDIWLSQNPNTTYLAFPDIELMIWLYHNETLSSYFI

SEQ ID NO: 35103 - protein, 85 aa, unidentified
  REGION 1..85: note = Description of Unknown:cds_NZ_WFIY01000004.1_cds_WP_155864474.1_2023 target sequence
KVGEVQVPICVNGSKITCTFTVYILPHTGSSNGWIGVYYLSNQNLEGKVSIPLTFFIKDEFQWINKIFPTINESSYYLDAIQVGM

SEQ ID NO: 35104 - protein, 85 aa, unidentified
  REGION 1..85: note = Description of Unknown:cds_NC_029316.1_cds_YP_009230284.1_31 target sequence
LLKLVVLKLIVLLISFVVYIFVLVKYPDILSELLIINTAESLSTHLMPLNAVKLRYEKKVCMLYFYTLFSFVSLLLIHSLLCYLP

SEQ ID NO: 35105 - protein, 85 aa, unidentified
  REGION 1..85: note = Description of Unknown:cds_NC_029316.1_cds_YP_009230284.1_31 target sequence
AVFIFTFTDIYVNVADDRMLKYFYTIPNILLSLSLISGNLLVSYYIYVIARLIFLKPGFVKPGFDKNFFIENLKLYPNNILGLIK

SEQ ID NO: 35106 - protein, 85 aa, unidentified
  REGION 1..85: note = Description of Unknown:cds_NC_029316.1_cds_YP_009230284.1_31 target sequence
GRTQCIIASIFNPSPLFFVFNKGIKTINELSETTNRIDENPKKLAIGVMLIGVALTPFYFYLGLAVFFTAFSFLAIDNAKKLIRY

SEQ ID NO: 35107 - protein, 84 aa, unidentified
  REGION 1..84: note = Description of Unknown:cds_NC_029316.1_cds_YP_009230284.1_31 target sequence
YLGLAVFFTAFSFLAIDNAKKLIRYKKYREYNVSITLPLISILVLIVTFFISRNIMVLLSSPGVYSLTQFLISSFLIKKYGNTI

SEQ ID NO: 35108 - protein, 85 aa, unidentified
  REGION 1..85: note = Description of Unknown:cds_NC_029316.1_cds_YP_009230284.1_31 target sequence
DILSELLIINTAESLSTHLMPLNAVKLRYEKKVCMLYFYTLFSFVSLLLIHSLLCYLPAVFIFTFTDIYVNVADDRMLKYFYTIP

SEQ ID NO: 35109 - protein, 85 aa, unidentified
  REGION 1..85: note = Description of Unknown:cds_NC_029316.1_cds_YP_009230284.1_31 target sequence
NILLSLSLISGNLLVSYYIYVIARLIFLKPGFVKPGFDKNFFIENLKLYPNNILGLIKGRTQCIIASIFNPSPLFFVFNKGIKTI

SEQ ID NO: 35110 - protein, 85 aa, unidentified
  REGION 1..85: note = Description of Unknown:cds_NC_029316.1_cds_YP_009230284.1_31 target sequence
NELSETTNRIDENPKKLAIGVMLIGVALTPFYFYLGLAVFFTAFSFLAIDNAKKLIRYKKYREYNVSITLPLISILVLIVTFFIS

SEQ ID NO: 35111 - protein, 85 aa, unidentified
  REGION 1..85: note = Description of Unknown:cds_NC_011501.2_cds_YP_002302220.1_7 target sequence
LKMESTQQMAVSIINSSFEAAVVAATSALENMGIEYDYQDIYSRVKNKFDFVMDDSGVKNNLIGKAITIDQALNNKFGSAIRNRN

SEQ ID NO: 35112 - protein, 85 aa, unidentified
  REGION 1..85: note = Description of Unknown:cds_NC_011501.2_cds_YP_002302220.1_7 target sequence
WLADTSRAAKLDEDVNKLRMMLSSKGIDQKMRVLNACFSVKRIPGKSSSIIKCTKLMRDKLERGEVEVDDSFVDEKMEVDTIDWK

SEQ ID NO: 35113 - protein, 85 aa, unidentified
  REGION 1..85: note = Description of Unknown:cds_NC_011501.2_cds_YP_002302220.1_7 target sequence
SRYEQLEQRFESLKSRVNEKYNNWVLKARKMNENMHSLQNVISQQQAHIAELQVYNNKLERDLQNKIGSLTSSIEWYLRSMELDP

SEQ ID NO: 35114 - protein, 84 aa, unidentified
  REGION 1..84: note = Description of Unknown:cds_NC_011501.2_cds_YP_002302220.1_7 target sequence
RDLQNKIGSLTSSIEWYLRSMELDPEIKADIEQQINSIDAINPLHAFDDLESVIRNLISDYDKLFLMFKGLIQRCNYQYSFGCE

SEQ ID NO: 35115 - protein, 85 aa, unidentified
  REGION 1..85: note = Description of Unknown:cds_NC_011501.2_cds_YP_002302220.1_7 target sequence
ALENMGIEYDYQDIYSRVKNKFDFVMDDSGVKNNLIGKAITIDQALNNKFGSAIRNRNWLADTSRAAKLDEDVNKLRMMLSSKGI

SEQ ID NO: 35116 - protein, 85 aa, unidentified
  REGION 1..85: note = Description of Unknown:cds_NC_011501.2_cds_YP_002302220.1_7 target sequence
DQKMRVLNACFSVKRIPGKSSSIIKCTKLMRDKLERGEVEVDDSFVDEKMEVDTIDWKSRYEQLEQRFESLKSRVNEKYNNWVLK

SEQ ID NO: 35117 - protein, 85 aa, unidentified
  REGION 1..85: note = Description of Unknown:cds_NC_011501.2_cds_YP_002302220.1_7 target sequence
ARKMNENMHSLQNVISQQQAHIAELQVYNNKLERDLQNKIGSLTSSIEWYLRSMELDPEIKADIEQQINSIDAINPLHAFDDLES

SEQ ID NO: 35118 - protein, 85 aa, unidentified
  REGION 1..85: note = Description of Unknown:cds_NZ_WFIY01000004.1_cds_WP_155862822.1_651 target sequence
RCSECKEEAIIKIPYAHKYLCKEHFIQWFENRVEKTVRKYNMLEGTRKLAIAVSGGKDSTTLLHVMTKIAEKEGIEIIGITIDLG

SEQ ID NO: 35119 - protein, 85 aa, unidentified
  REGION 1..85: note = Description of Unknown:cds_NZ_WFIY01000004.1_cds_WP_155862822.1_651 target sequence
IDMGKRYSVKSVEYAIKNYEMLGVKYRIVKLKEEYGFTIDEAKVKIRRPVCSTCGLTKRYILEKVAKEEGADTLATGHNLNDIAQ

SEQ ID NO: 35120 - protein, 85 aa, unidentified
  REGION 1..85: note = Description of Unknown:cds_NZ_WFIY01000004.1_cds_WP_155862822.1_651 target sequence
YVLTGYYNGDILSLARLRPVSPAENGYIKKIKPLFLSPEKEIMTYALVKGIPFIYDSCPHTFRVGGETQDNIRRSIEEMEDKIPG

SEQ ID NO: 35121 - protein, 84 aa, unidentified
  REGION 1..84: note = Description of Unknown:cds_NZ_WFIY01000004.1_cds_WP_155862822.1_651 target sequence
HTFRVGGETQDNIRRSIEEMEDKIPGFMISLVTNFEEKFRPLMEDIPKGSLGKCKICGMPTNKDREICSFCAIRMKLTEVKVNS

SEQ ID NO: 35122 - protein, 85 aa, unidentified
  REGION 1..85: note = Description of Unknown:cds_NZ_WFIY01000004.1_cds_WP_155862822.1_651 target sequence
WFENRVEKTVRKYNMLEGTRKLAIAVSGGKDSTTLLHVMTKIAEKEGIEIIGITIDLGIDMGKRYSVKSVEYAIKNYEMLGVKYR

SEQ ID NO: 35123 - protein, 85 aa, unidentified
  REGION 1..85: note = Description of Unknown:cds_NZ_WFIY01000004.1_cds_WP_155862822.1_651 target sequence
IVKLKEEYGFTIDEAKVKIRRPVCSTCGLTKRYILEKVAKEEGADTLATGHNLNDIAQYVLTGYYNGDILSLARLRPVSPAENGY

SEQ ID NO: 35124 - protein, 85 aa, unidentified
  REGION 1..85: note = Description of Unknown:cds_NZ_WFIY01000004.1_cds_WP_155862822.1_651 target sequence
IKKIKPLFLSPEKEIMTYALVKGIPFIYDSCPHTFRVGGETQDNIRRSIEEMEDKIPGFMISLVTNFEEKFRPLMEDIPKGSLGK

SEQ ID NO: 35125 - protein, 85 aa, unidentified
  REGION 1..85: note = Description of Unknown:cds_NZ_WFIY01000004.1_cds_WP_155862976.1_846 target sequence
KLKDIGEHEFIRRSLSKYLGHNIFYDIYTEDGFTYKIDGFQLSYFFSFMDYYDIGWKAVTATVSDIITSGSKPRIILSSIGVNSE

SEQ ID NO: 35126 - protein, 85 aa, unidentified
  REGION 1..85: note = Description of Unknown:cds_NZ_WFIY01000004.1_cds_WP_155862976.1_846 target sequence
MEDKQLEAIFYGIINAAEYYEVKYVGGDLNNSEKNGWIDIAGIGKKLCDAKNNPEEGDIIIISDEIGFTSEVFISYLNNFNIPIH

SEQ ID NO: 35127 - protein, 85 aa, unidentified
  REGION 1..85: note = Description of Unknown:cds_NZ_WFIY01000004.1_cds_WP_155862976.1_846 target sequence
EISKLRVKHPIVNKNILNFYKEFCNYIVSSTDISDGLLISLQNLSDRLNYSILIEDFNINHSVYENLRRYGYGVNDILKYSGEEF

SEQ ID NO: 35128 - protein, 84 aa, unidentified
  REGION 1..84: note = Description of Unknown:cds_NZ_WFIY01000004.1_cds_WP_155862976.1_846 target sequence
NHSVYENLRRYGYGVNDILKYSGEEFSSLFVVKKEKAQEMLEWLYHYNFSSKILGKLGKEGENEIKYKGNKLAISGWDNFKGWY

SEQ ID NO: 35129 - protein, 85 aa, unidentified
  REGION 1..85: note = Description of Unknown:cds_NZ_WFIY01000004.1_cds_WP_155862976.1_846 target sequence
YTEDGFTYKIDGFQLSYFFSFMDYYDIGWKAVTATVSDIITSGSKPRIILSSIGVNSEMEDKQLEAIFYGIINAAEYYEVKYVGG

SEQ ID NO: 35130 - protein, 85 aa, unidentified
  REGION 1..85: note = Description of Unknown:cds_NZ_WFIY01000004.1_cds_WP_155862976.1_846 target sequence
DLNNSEKNGWIDIAGIGKKLCDAKNNPEEGDIIIISDEIGFTSEVFISYLNNFNIPIHEISKLRVKHPIVNKNILNFYKEFCNYI

SEQ ID NO: 35131 - protein, 85 aa, unidentified
  REGION 1..85: note = Description of Unknown:cds_NZ_WFIY01000004.1_cds_WP_155862976.1_846 target sequence
VSSTDISDGLLISLQNLSDRLNYSILIEDFNINHSVYENLRRYGYGVNDILKYSGEEFSSLFVVKKEKAQEMLEWLYHYNFSSKI

SEQ ID NO: 35132 - protein, 85 aa, unidentified
  REGION 1..85: note = Description of Unknown:cds_NZ_WFIY01000004.1_cds_WP_155863619.1_1518 target sequence
SYPYGNPYYPQGGYPPQGYPQGNPYYQQNFNSFIMCAQPIGLGGKQMMIPINHPIDLQYVAQQAVMYLMGQGFQAYPMVGQNMAV

SEQ ID NO: 35133 - protein, 85 aa, unidentified
  REGION 1..85: note = Description of Unknown:cds_NZ_WFIY01000004.1_cds_WP_155863619.1_1518 target sequence
IQAQHTSLLGDLTAGNKAYTIRICQGQGFVMVETGITNLMQDLLTVAATAGGTYLLGDDVLHSKLVELLGGGASALDLYHLYQDY

SEQ ID NO: 35134 - protein, 85 aa, unidentified
  REGION 1..85: note = Description of Unknown:cds_NZ_WFIY01000004.1_cds_WP_155863619.1_1518 target sequence
ANEEQLMNTIMMLISTAPPPPAVGQPGYPQPYGQPQGYPQQYTPQQYGQQYYPPQQAVPQNAVQPTTQQNSVQPTPQRAVQQSTK

SEQ ID NO: 35135 - protein, 84 aa, unidentified
  REGION 1..84: note = Description of Unknown:cds_NZ_WFIY01000004.1_cds_WP_155863619.1_1518 target sequence
QNAVQPTTQQNSVQPTPQRAVQQSTKIVKCWKCGEEIPEGSKFCPFCGAPQTPLKCPKCGTINSPGAKFCSNCGAPLQVEKQSS

SEQ ID NO: 35136 - protein, 85 aa, unidentified
  REGION 1..85: note = Description of Unknown:cds_NZ_WFIY01000004.1_cds_WP_155863619.1_1518 target sequence
QNFNSFIMCAQPIGLGGKQMMIPINHPIDLQYVAQQAVMYLMGQGFQAYPMVGQNMAVIQAQHTSLLGDLTAGNKAYTIRICQGQ

SEQ ID NO: 35137 - protein, 85 aa, unidentified
  REGION 1..85: note = Description of Unknown:cds_NZ_WFIY01000004.1_cds_WP_155863619.1_1518 target sequence
GFVMVETGITNLMQDLLTVAATAGGTYLLGDDVLHSKLVELLGGGASALDLYHLYQDYANEEQLMNTIMMLISTAPPPPAVGQPG

SEQ ID NO: 35138 - protein, 85 aa, unidentified
  REGION 1..85: note = Description of Unknown:cds_NZ_WFIY01000004.1_cds_WP_155863619.1_1518 target sequence
YPQPYGQPQGYPQQYTPQQYGQQYYPPQQAVPQNAVQPTTQQNSVQPTPQRAVQQSTKIVKCWKCGEEIPEGSKFCPFCGAPQTP

SEQ ID NO: 35139 - protein, 85 aa, unidentified
  REGION 1..85: note = Description of Unknown:cds_NZ_WFIY01000004.1_cds_WP_155863798.1_1681 target sequence
TDYTELIKRIKELKKEKNAIILGHNYMDYAVQLVSDFTGDSYDLAVKAMKTNADIIVFAGVYFMAEQAAALNQDKLVLSPDPKAG

SEQ ID NO: 35140 - protein, 85 aa, unidentified
  REGION 1..85: note = Description of Unknown:cds_NZ_WFIY01000004.1_cds_WP_155863798.1_1681 target sequence
CTLSDALDVETLKKFKEEYPSAPVVLYINTSIYAKALADYIVTSSTAVKIVKAIDSDIVLFGPDANLANYVEKKTGKKIIKVPPN

SEQ ID NO: 35141 - protein, 85 aa, unidentified
  REGION 1..85: note = Description of Unknown:cds_NZ_WFIY01000004.1_cds_WP_155863798.1_1681 target sequence
GRCLVHASYVKQFVEMARKKYPNAVLMAHPESPLEILEAADFVGSTNQMIKFAKESKYKEFIVATEIGMLNALKLQVPDKVFYPL

SEQ ID NO: 35142 - protein, 84 aa, unidentified
  REGION 1..84: note = Description of Unknown:cds_NZ_WFIY01000004.1_cds_WP_155863798.1_1681 target sequence
EFIVATEIGMLNALKLQVPDKVFYPLISTESCACARCPYMAMITLEKIKNSLENEVTKVIVPKDVAEKAKEAFERTMKLLEKLS

SEQ ID NO: 35143 - protein, 85 aa, unidentified
  REGION 1..85: note = Description of Unknown:cds_NZ_WFIY01000004.1_cds_WP_155863798.1_1681 target sequence
DYAVQLVSDFTGDSYDLAVKAMKTNADIIVFAGVYFMAEQAAALNQDKLVLSPDPKAGCTLSDALDVETLKKFKEEYPSAPVVLY

SEQ ID NO: 35144 - protein, 85 aa, unidentified
  REGION 1..85: note = Description of Unknown:cds_NZ_WFIY01000004.1_cds_WP_155863798.1_1681 target sequence
INTSIYAKALADYIVTSSTAVKIVKAIDSDIVLFGPDANLANYVEKKTGKKIIKVPPNGRCLVHASYVKQFVEMARKKYPNAVLM

SEQ ID NO: 35145 - protein, 85 aa, unidentified
  REGION 1..85: note = Description of Unknown:cds_NZ_WFIY01000004.1_cds_WP_155863798.1_1681 target sequence
AHPESPLEILEAADFVGSTNQMIKFAKESKYKEFIVATEIGMLNALKLQVPDKVFYPLISTESCACARCPYMAMITLEKIKNSLE

SEQ ID NO: 35146 - protein, 85 aa, unidentified
  REGION 1..85: note = Description of Unknown:cds_NZ_WFIY01000004.1_cds_WP_155862389.1_126 target sequence
SDILIIASGGGHTGFARAIAEYLPYKADFVIPKGDEMSKKMISQFADKIYEVEKFRSPSGNLSLSSFLLSMIHSMKIRKYKKVIA

SEQ ID NO: 35147 - protein, 85 aa, unidentified
  REGION 1..85: note = Description of Unknown:cds_NZ_WFIY01000004.1_cds_WP_155862389.1_126 target sequence
TGSNHSIFPSFFQFIKSSEIYVIESQDRIVTRGKAVSIISKYSKHVFLHWKEQEKLYKNGIVVGPIVEKPKYSSSDEGYILVTTG

SEQ ID NO: 35148 - protein, 85 aa, unidentified
  REGION 1..85: note = Description of Unknown:cds_NZ_WFIY01000004.1_cds_WP_155862389.1_126 target sequence
SEGFERLFDILYSLNIDNVVLQTGKVNKKYNKKGWKVFSFDPDIEKYIAKAKLVITHQGKTAMEAVVMYKKPTIIVYNKDWKYAA

SEQ ID NO: 35149 - protein, 84 aa, unidentified
  REGION 1..84: note = Description of Unknown:cds_NZ_WFIY01000004.1_cds_WP_155862389.1_126 target sequence
GKTAMEAVVMYKKPTIIVYNKDWKYAATFEDSKLYAEILGAMFLDDPSNWSTKDEILKYIENPKPPKVYSPGTERLVSVVLNDT

SEQ ID NO: 35150 - protein, 85 aa, unidentified
  REGION 1..85: note = Description of Unknown:cds_NZ_WFIY01000004.1_cds_WP_155862389.1_126 target sequence
DFVIPKGDEMSKKMISQFADKIYEVEKFRSPSGNLSLSSFLLSMIHSMKIRKYKKVIATGSNHSIFPSFFQFIKSSEIYVIESQD

SEQ ID NO: 35151 - protein, 85 aa, unidentified
  REGION 1..85: note = Description of Unknown:cds_NZ_WFIY01000004.1_cds_WP_155862389.1_126 target sequence
RIVTRGKAVSIISKYSKHVFLHWKEQEKLYKNGIVVGPIVEKPKYSSSDEGYILVTTGSEGFERLFDILYSLNIDNVVLQTGKVN

SEQ ID NO: 35152 - protein, 85 aa, unidentified
  REGION 1..85: note = Description of Unknown:cds_NZ_WFIY01000004.1_cds_WP_155862389.1_126 target sequence
KKYNKKGWKVFSFDPDIEKYIAKAKLVITHQGKTAMEAVVMYKKPTIIVYNKDWKYAATFEDSKLYAEILGAMFLDDPSNWSTKD

SEQ ID NO: 35153 - protein, 85 aa, unidentified
  REGION 1..85: note = Description of Unknown:cds_NZ_WFIY01000004.1_cds_WP_155862708.1_508 target sequence
LKLMLVGYGNVGKAFRKLLHEKKVKELENVKIAGIVTTRGLMLKDQEAFVPDKKINALEALDEVQPDVVVDMASANYKTGEPSLS

SEQ ID NO: 35154 - protein, 85 aa, unidentified
  REGION 1..85: note = Description of Unknown:cds_NZ_WFIY01000004.1_cds_WP_155862708.1_508 target sequence
LYLTALKRGIHVITTNKAPLALKYKEIINTAISHGSKIFFQATVMSGTPSINLYRILPAMKVRKIRGILNGTTNYILTRMSQGLS

SEQ ID NO: 35155 - protein, 85 aa, unidentified
  REGION 1..85: note = Description of Unknown:cds_NZ_WFIY01000004.1_cds_WP_155862708.1_508 target sequence
FNEALKEAQELGYAERDPTLDINGFDAAGKITILSNVYFSRGISINEVKFEGIGNIEIGDALKRGNKIKLIAYADENETYVKPME

SEQ ID NO: 35156 - protein, 84 aa, unidentified
  REGION 1..84: note = Description of Unknown:cds_NZ_WFIY01000004.1_cds_WP_155862708.1_508 target sequence
DALKRGNKIKLIAYADENETYVKPMEITKEDFLYNVDGVNNALEIESDIQKITIVGPGAGPLNAAYGAFSDLILLLRGENLPGL

SEQ ID NO: 35157 - protein, 85 aa, unidentified
  REGION 1..85: note = Description of Unknown:cds_NZ_WFIY01000004.1_cds_WP_155862708.1_508 target sequence
ENVKIAGIVTTRGLMLKDQEAFVPDKKINALEALDEVQPDVVVDMASANYKTGEPSLSLYLTALKRGIHVITTNKAPLALKYKEI

SEQ ID NO: 35158 - protein, 85 aa, unidentified
  REGION 1..85: note = Description of Unknown:cds_NZ_WFIY01000004.1_cds_WP_155862708.1_508 target sequence
INTAISHGSKIFFQATVMSGTPSINLYRILPAMKVRKIRGILNGTTNYILTRMSQGLSFNEALKEAQELGYAERDPTLDINGFDA

SEQ ID NO: 35159 - protein, 85 aa, unidentified
  REGION 1..85: note = Description of Unknown:cds_NZ_WFIY01000004.1_cds_WP_155862708.1_508 target sequence
AGKITILSNVYFSRGISINEVKFEGIGNIEIGDALKRGNKIKLIAYADENETYVKPMEITKEDFLYNVDGVNNALEIESDIQKIT

SEQ ID NO: 35160 - protein, 85 aa, unidentified
  REGION 1..85: note = Description of Unknown:cds_NZ_WFIY01000004.1_cds_WP_155862732.1_539 target sequence
LALLLTEKDVSSLLKFEDAYVALKEAFIALESKAGVNSKRMRTSISGSTLTCQAGGLQGYLGIKTFIKGNFVSLLFSTSGELLMI

SEQ ID NO: 35161 - protein, 85 aa, unidentified
  REGION 1..85: note = Description of Unknown:cds_NZ_WFIY01000004.1_cds_WP_155862732.1_539 target sequence
AEADRLSQIRTGSLSVLASDYIQIKYDTVGIIGLGKQGLAQVEAFYELKKIEPIVISRTQERINKALRILSSEGIKVKVAGSYKD

SEQ ID NO: 35162 - protein, 85 aa, unidentified
  REGION 1..85: note = Description of Unknown:cds_NZ_WFIY01000004.1_cds_WP_155862732.1_539 target sequence
VFLNSEVITSITSSKDPFIKLDYVRKGMHINLMGSNIPERVEAFPELIKASSIIVVEDVEQALEEAGDLILAKKMGMLDESKLVT

SEQ ID NO: 35163 - protein, 84 aa, unidentified
  REGION 1..84: note = Description of Unknown:cds_NZ_WFIY01000004.1_cds_WP_155862732.1_539 target sequence
EQALEEAGDLILAKKMGMLDESKLVTLSSVIAGKVEKKKDDDISIFKSTGIGLEDVAVMKVLYEKAKKKGIGKEIEVKGIWSRE

SEQ ID NO: 35164 - protein, 85 aa, unidentified
  REGION 1..85: note = Description of Unknown:cds_NZ_WFIY01000004.1_cds_WP_155862732.1_539 target sequence
IALESKAGVNSKRMRTSISGSTLTCQAGGLQGYLGIKTFIKGNFVSLLFSTSGELLMIAEADRLSQIRTGSLSVLASDYIQIKYD

SEQ ID NO: 35165 - protein, 85 aa, unidentified
  REGION 1..85: note = Description of Unknown:cds_NZ_WFIY01000004.1_cds_WP_155862732.1_539 target sequence
TVGIIGLGKQGLAQVEAFYELKKIEPIVISRTQERINKALRILSSEGIKVKVAGSYKDVFLNSEVITSITSSKDPFIKLDYVRKG

SEQ ID NO: 35166 - protein, 85 aa, unidentified
  REGION 1..85: note = Description of Unknown:cds_NZ_WFIY01000004.1_cds_WP_155862732.1_539 target sequence
MHINLMGSNIPERVEAFPELIKASSIIVVEDVEQALEEAGDLILAKKMGMLDESKLVTLSSVIAGKVEKKKDDDISIFKSTGIGL

SEQ ID NO: 35167 - protein, 85 aa, unidentified
  REGION 1..85: note = Description of Unknown:cds_NZ_WFIY01000004.1_cds_WP_155863546.1_1481 target sequence
NEVIIETIIQVLGVILLSPLYAGILDKLKANVSTRRGQSIFQPYYDILKLLKKESIVSINASAIFIYSPYVIFSIYVLISFVIPV

SEQ ID NO: 35168 - protein, 85 aa, unidentified
  REGION 1..85: note = Description of Unknown:cds_NZ_WFIY01000004.1_cds_WP_155863546.1_1481 target sequence
VYPQPIIFTPTVDFLGGALLFSLAAFIKIISAMDSGSNFVALGTSRAISFNFLGEATLITVFFAVALITGTNNPYVELKFAENPV

SEQ ID NO: 35169 - protein, 85 aa, unidentified
  REGION 1..85: note = Description of Unknown:cds_NZ_WFIY01000004.1_cds_WP_155863546.1_1481 target sequence
YYLALDHVFASVAFFMLWLFETGKLPVESSGLAEMGMIDDALTYEYSGKLLALLKWGSYMKQYLLGSVLLNVFILPWGLQTGILG

SEQ ID NO: 35170 - protein, 84 aa, unidentified
  REGION 1..84: note = Description of Unknown:cds_NZ_WFIY01000004.1_cds_WP_155863546.1_1481 target sequence
YMKQYLLGSVLLNVFILPWGLQTGILGAIEDLGIMFLKWLFLIFIAVVIDTSLAKLRLYKVQDFLAVAFVISILSLIFSVIEYD

SEQ ID NO: 35171 - protein, 85 aa, unidentified
  REGION 1..85: note = Description of Unknown:cds_NZ_WFIY01000004.1_cds_WP_155863546.1_1481 target sequence
LKANVSTRRGQSIFQPYYDILKLLKKESIVSINASAIFIYSPYVIFSIYVLISFVIPVVYPQPIIFTPTVDFLGGALLFSLAAFI

SEQ ID NO: 35172 - protein, 85 aa, unidentified
  REGION 1..85: note = Description of Unknown:cds_NZ_WFIY01000004.1_cds_WP_155863546.1_1481 target sequence
KIISAMDSGSNFVALGTSRAISFNFLGEATLITVFFAVALITGTNNPYVELKFAENPVYYLALDHVFASVAFFMLWLFETGKLPV

SEQ ID NO: 35173 - protein, 85 aa, unidentified
  REGION 1..85: note = Description of Unknown:cds_NZ_WFIY01000004.1_cds_WP_155863546.1_1481 target sequence
ESSGLAEMGMIDDALTYEYSGKLLALLKWGSYMKQYLLGSVLLNVFILPWGLQTGILGAIEDLGIMFLKWLFLIFIAVVIDTSLA

SEQ ID NO: 35174 - protein, 85 aa, unidentified
  REGION 1..85: note = Description of Unknown:cds_NZ_WFIY01000004.1_cds_WP_155864296.1_2289 target sequence
KNVIEPWGVNVPFLILAFIYFTIGGVSLSLDPSVHGYFMLLGAYSLYAGMILRLFFPAKKYLILHILTLVLLSIPLYPFVSVSFF

SEQ ID NO: 35175 - protein, 85 aa, unidentified
  REGION 1..85: note = Description of Unknown:cds_NZ_WFIY01000004.1_cds_WP_155864296.1_2289 target sequence
FLTIVEIWGLKDVKYYGSKFPINILVLSSPPLSFISWLLFPILGYKLLLISLLLYLLGVNEGIFSATLGLKPKFGIRQIPMLLII

SEQ ID NO: 35176 - protein, 85 aa, unidentified
  REGION 1..85: note = Description of Unknown:cds_NZ_WFIY01000004.1_cds_WP_155864296.1_2289 target sequence
PLLYLSYSLFPVVIIAYFVWLFYGAKKVRKNLSALSVVSSSVSTSIGSYFLGDVVHAFALGTMAPFFYSCITYSTSRYNYDEIYV

SEQ ID NO: 35177 - protein, 84 aa, unidentified
  REGION 1..84: note = Description of Unknown:cds_NZ_WFIY01000004.1_cds_WP_155864296.1_2289 target sequence
ALGTMAPFFYSCITYSTSRYNYDEIYVISILLSLSYFLRFVYFHISGIFFVAPSLLFLYLIKDNLTLTTLKYGMSKKYLIKKLN

SEQ ID NO: 35178 - protein, 85 aa, unidentified
  REGION 1..85: note = Description of Unknown:cds_NZ_WFIY01000004.1_cds_WP_155864296.1_2289 target sequence
LSLDPSVHGYFMLLGAYSLYAGMILRLFFPAKKYLILHILTLVLLSIPLYPFVSVSFFFLTIVEIWGLKDVKYYGSKFPINILVL

SEQ ID NO: 35179 - protein, 85 aa, unidentified
  REGION 1..85: note = Description of Unknown:cds_NZ_WFIY01000004.1_cds_WP_155864296.1_2289 target sequence
SSPPLSFISWLLFPILGYKLLLISLLLYLLGVNEGIFSATLGLKPKFGIRQIPMLLIIPLLYLSYSLFPVVIIAYFVWLFYGAKK

SEQ ID NO: 35180 - protein, 85 aa, unidentified
  REGION 1..85: note = Description of Unknown:cds_NZ_WFIY01000004.1_cds_WP_155864296.1_2289 target sequence
VRKNLSALSVVSSSVSTSIGSYFLGDVVHAFALGTMAPFFYSCITYSTSRYNYDEIYVISILLSLSYFLRFVYFHISGIFFVAPS

SEQ ID NO: 35181 - protein, 85 aa, unidentified
  REGION 1..85: note = Description of Unknown:cds_NC_035460.1_cds_YP_009408032.1_81 target sequence
REFYYKDGKLFLDSTYKQEVSKKNPTYEILKHIKIPSHLSNVIIYEQTYEQSLSRLVFIGTDAKGRKQYFYGKLHISQRNENRNK

SEQ ID NO: 35182 - protein, 85 aa, unidentified
  REGION 1..85: note = Description of Unknown:cds_NC_035460.1_cds_YP_009408032.1_81 target sequence
IFLKVYKIINSINNFIDNNISLKTIDDVQFQLAIFMLIETSFFIRIGKMCYLKENDTVGLLTLKNKHIIFEKDKILIKFIGKDKV

SEQ ID NO: 35183 - protein, 85 aa, unidentified
  REGION 1..85: note = Description of Unknown:cds_NC_035460.1_cds_YP_009408032.1_81 target sequence
SHEFIVRKTNKLYKPLKKLTNHNKMDEFLFSKLNERKVYTFMKQFNIRLKDLRTYGVNYTFLYNFWTNVRSLTPLPSVKKLISMS

SEQ ID NO: 35184 - protein, 84 aa, unidentified
  REGION 1..84: note = Description of Unknown:cds_NC_035460.1_cds_YP_009408032.1_81 target sequence
YTFLYNFWTNVRSLTPLPSVKKLISMSIKQTAEIVGHTPSISKNAYMATTVLTLLQDNKIIKSIEHSTFNEFVNLIVKHIHENN

SEQ ID NO: 35185 - protein, 85 aa, unidentified
  REGION 1..85: note = Description of Unknown:cds_NC_035460.1_cds_YP_009408032.1_81 target sequence
EILKHIKIPSHLSNVIIYEQTYEQSLSRLVFIGTDAKGRKQYFYGKLHISQRNENRNKIFLKVYKIINSINNFIDNNISLKTIDD

SEQ ID NO: 35186 - protein, 85 aa, unidentified
  REGION 1..85: note = Description of Unknown:cds_NC_035460.1_cds_YP_009408032.1_81 target sequence
VQFQLAIFMLIETSFFIRIGKMCYLKENDTVGLLTLKNKHIIFEKDKILIKFIGKDKVSHEFIVRKTNKLYKPLKKLTNHNKMDE

SEQ ID NO: 35187 - protein, 85 aa, unidentified
  REGION 1..85: note = Description of Unknown:cds_NC_035460.1_cds_YP_009408032.1_81 target sequence
FLFSKLNERKVYTFMKQFNIRLKDLRTYGVNYTFLYNFWTNVRSLTPLPSVKKLISMSIKQTAEIVGHTPSISKNAYMATTVLTL

SEQ ID NO: 35188 - protein, 85 aa, unidentified
  REGION 1..85: note = Description of Unknown:cds_NC_040405.1_cds_YP_009551531.1_7 target sequence
LKMESTQQMAVSIINSSFEAAVVAATSALENMGIQYDHNEVYTRVKSKFDFIMDDSGVKNNLIGKAVTIDQALNGKFASAIRNRN

SEQ ID NO: 35189 - protein, 85 aa, unidentified
  REGION 1..85: note = Description of Unknown:cds_NC_040405.1_cds_YP_009551531.1_7 target sequence
WMNDSHTVARLDEDVNKLRMMLSSKGIDQKIRVLNACFSVKRVPGKSSSIIKCSRLMKEKIERGEIEVDDSFVEEKMEIDTIDWK

SEQ ID NO: 35190 - protein, 85 aa, unidentified
  REGION 1..85: note = Description of Unknown:cds_NC_040405.1_cds_YP_009551531.1_7 target sequence
TRYEQLEKRFESLKCRVNEKYNSWVVKARKVNETVHSLQSVISRQQAHISDLQSYNDKLERDLQSKVESVVSSIEWYLRSMELPE

SEQ ID NO: 35191 - protein, 84 aa, unidentified
  REGION 1..84: note = Description of Unknown:cds_NC_040405.1_cds_YP_009551531.1_7 target sequence
LERDLQSKVESVVSSIEWYLRSMELPEDVKTDIEQQLNSVDRMNVLSAFDDFELIIRNLISDYDKVFLMFKGLLQRCNYSYTYE

SEQ ID NO: 35192 - protein, 85 aa, unidentified
  REGION 1..85: note = Description of Unknown:cds_NC_040405.1_cds_YP_009551531.1_7 target sequence
ALENMGIQYDHNEVYTRVKSKFDFIMDDSGVKNNLIGKAVTIDQALNGKFASAIRNRNWMNDSHTVARLDEDVNKLRMMLSSKGI

SEQ ID NO: 35193 - protein, 85 aa, unidentified
  REGION 1..85: note = Description of Unknown:cds_NC_040405.1_cds_YP_009551531.1_7 target sequence
DQKIRVLNACFSVKRVPGKSSSIIKCSRLMKEKIERGEIEVDDSFVEEKMEIDTIDWKTRYEQLEKRFESLKCRVNEKYNSWVVK

SEQ ID NO: 35194 - protein, 85 aa, unidentified
  REGION 1..85: note = Description of Unknown:cds_NC_040405.1_cds_YP_009551531.1_7 target sequence
ARKVNETVHSLQSVISRQQAHISDLQSYNDKLERDLQSKVESVVSSIEWYLRSMELPEDVKTDIEQQLNSVDRMNVLSAFDDFEL

SEQ ID NO: 35195 - protein, 85 aa, unidentified
  REGION 1..85: note = Description of Unknown:cds_NC_005830.1_cds_YP_003751.1_26 target sequence
LTSMLEIYSGCRACSYDYLSVLYEQYFRKNGIEAKYVGTLVRPTDSQKFLIDDILHGSHELMRQRKKVDFFRGDSVLYPWYDFHI

SEQ ID NO: 35196 - protein, 85 aa, unidentified
  REGION 1..85: note = Description of Unknown:cds_NC_005830.1_cds_YP_003751.1_26 target sequence
DSILIVPSNWNAEQYSKYFRKTYVLPHFVNDDAVEMIVRNEERLKEDKLRNIQYSFLTIGHNNDFDRKGIVLAKRLMDRLGISNK

SEQ ID NO: 35197 - protein, 85 aa, unidentified
  REGION 1..85: note = Description of Unknown:cds_NC_005830.1_cds_YP_003751.1_26 target sequence
LVCYSNEPFCHKEHRLTEVGKYREYYRAKFYVSLSYSESFGMTPFEAMAVGTPVIYPNCHAYAEYFKGEVGLPINCQGHSIMRIG

SEQ ID NO: 35198 - protein, 84 aa, unidentified
  REGION 1..84: note = Description of Unknown:cds_NC_005830.1_cds_YP_003751.1_26 target sequence
HAYAEYFKGEVGLPINCQGHSIMRIGDKDYNVWYFDIDEAKEIIQYADSMSDEEYIDMSIKTFEFAKQFYARNIIPKLIEIMKS

SEQ ID NO: 35199 - protein, 85 aa, unidentified
  REGION 1..85: note = Description of Unknown:cds_NC_005830.1_cds_YP_003751.1_26 target sequence
RKNGIEAKYVGTLVRPTDSQKFLIDDILHGSHELMRQRKKVDFFRGDSVLYPWYDFHIDSILIVPSNWNAEQYSKYFRKTYVLPH

SEQ ID NO: 35200 - protein, 85 aa, unidentified
  REGION 1..85: note = Description of Unknown:cds_NC_005830.1_cds_YP_003751.1_26 target sequence
FVNDDAVEMIVRNEERLKEDKLRNIQYSFLTIGHNNDFDRKGIVLAKRLMDRLGISNKLVCYSNEPFCHKEHRLTEVGKYREYYR

SEQ ID NO: 35201 - protein, 85 aa, unidentified
  REGION 1..85: note = Description of Unknown:cds_NC_005830.1_cds_YP_003751.1_26 target sequence
AKFYVSLSYSESFGMTPFEAMAVGTPVIYPNCHAYAEYFKGEVGLPINCQGHSIMRIGDKDYNVWYFDIDEAKEIIQYADSMSDE

SEQ ID NO: 35202 - protein, 85 aa, unidentified
  REGION 1..85: note = Description of Unknown:cds_NZ_WFIY01000004.1_cds_309 target sequence
KNETSGKKEESPTKEKVGIGSKLNIFNIFKYREIKEDDVDDIIEELRIELLESDVSLEVTDKILEDLKSSLIGKKVNRSEDLDEL

SEQ ID NO: 35203 - protein, 85 aa, unidentified
  REGION 1..85: note = Description of Unknown:cds_NZ_WFIY01000004.1_cds_309 target sequence
VKKSLKNSITEILEKNRFERNLIEEIKRSPKPYVIMFFGVNGVGKTTTIAKVAYMLKKAGLKVIVSASDTFRAAAQEQLAIHCQK

SEQ ID NO: 35204 - protein, 85 aa, unidentified
  REGION 1..85: note = Description of Unknown:cds_NZ_WFIY01000004.1_cds_309 target sequence
LEIPLVKGKYGGDPASVAFDAIQAAKSRGIDVVLIDTAGRMHVDKDLTEELKRIVRISKPNLKLLVIDALAGNDALEQAKYFENV

SEQ ID NO: 35205 - protein, 84 aa, unidentified
  REGION 1..84: note = Description of Unknown:cds_NZ_WFIY01000004.1_cds_309 target sequence
KPNLKLLVIDALAGNDALEQAKYFENVVDYDGVILTKVDADAKGGVVLSLAYELKKPVIFLGTGQNYDDLIPFSVDWFIERIFS

SEQ ID NO: 35206 - protein, 85 aa, unidentified
  REGION 1..85: note = Description of Unknown:cds_NZ_WFIY01000004.1_cds_309 target sequence
IFKYREIKEDDVDDIIEELRIELLESDVSLEVTDKILEDLKSSLIGKKVNRSEDLDELVKKSLKNSITEILEKNRFERNLIEEIK

SEQ ID NO: 35207 - protein, 85 aa, unidentified
  REGION 1..85: note = Description of Unknown:cds_NZ_WFIY01000004.1_cds_309 target sequence
RSPKPYVIMFFGVNGVGKTTTIAKVAYMLKKAGLKVIVSASDTFRAAAQEQLAIHCQKLEIPLVKGKYGGDPASVAFDAIQAAKS

SEQ ID NO: 35208 - protein, 85 aa, unidentified
  REGION 1..85: note = Description of Unknown:cds_NZ_WFIY01000004.1_cds_309 target sequence
RGIDVVLIDTAGRMHVDKDLTEELKRIVRISKPNLKLLVIDALAGNDALEQAKYFENVVDYDGVILTKVDADAKGGVVLSLAYEL

SEQ ID NO: 35209 - protein, 85 aa, unidentified
  REGION 1..85: note = Description of Unknown:cds_NZ_WFIY01000004.1_cds_WP_155862601.1_378 target sequence
LQGSFYSIREAFGRTLVKLGEEDKDIVVITADVGDSTRASYFREKFPDRYFNVGISEQDMVNFAAGLAAVGKKPVVADFAMFTMR

SEQ ID NO: 35210 - protein, 85 aa, unidentified
  REGION 1..85: note = Description of Unknown:cds_NZ_WFIY01000004.1_cds_WP_155862601.1_378 target sequence
AWEQIRNTTGRMNLNVKFTVTHAGYSDSGDGSSHQALEDIALMRTIPNFKVVVPADAAEVERSLPVIIKEQGPIYYRMGREYSPS

SEQ ID NO: 35211 - protein, 85 aa, unidentified
  REGION 1..85: note = Description of Unknown:cds_NZ_WFIY01000004.1_cds_WP_155862601.1_378 target sequence
ITTGMDYKFEIGKAYVLKDGDDLAIMGAGVVLWDALKAAEELEKMGISTAVINVPTIKPIDENTIEYYARKTGRIVTVEEHTIYG

SEQ ID NO: 35212 - protein, 84 aa, unidentified
  REGION 1..84: note = Description of Unknown:cds_NZ_WFIY01000004.1_cds_WP_155862601.1_378 target sequence
KPIDENTIEYYARKTGRIVTVEEHTIYGGVGSAIAEVVVQKYPVPMRFIGSITFGRSARSQRELLDYYGINAENIIKKALELMK

SEQ ID NO: 35213 - protein, 85 aa, unidentified
  REGION 1..85: note = Description of Unknown:cds_NZ_WFIY01000004.1_cds_WP_155862601.1_378 target sequence
VITADVGDSTRASYFREKFPDRYFNVGISEQDMVNFAAGLAAVGKKPVVADFAMFTMRAWEQIRNTTGRMNLNVKFTVTHAGYSD

SEQ ID NO: 35214 - protein, 85 aa, unidentified
  REGION 1..85: note = Description of Unknown:cds_NZ_WFIY01000004.1_cds_WP_155862601.1_378 target sequence
SGDGSSHQALEDIALMRTIPNFKVVVPADAAEVERSLPVIIKEQGPIYYRMGREYSPSITTGMDYKFEIGKAYVLKDGDDLAIMG

SEQ ID NO: 35215 - protein, 85 aa, unidentified
  REGION 1..85: note = Description of Unknown:cds_NZ_WFIY01000004.1_cds_WP_155862601.1_378 target sequence
AGVVLWDALKAAEELEKMGISTAVINVPTIKPIDENTIEYYARKTGRIVTVEEHTIYGGVGSAIAEVVVQKYPVPMRFIGSITFG

SEQ ID NO: 35216 - protein, 85 aa, unidentified
  REGION 1..85: note = Description of Unknown:cds_NZ_WFIY01000004.1_cds_889 target sequence
IIGSYPKSIALGKTISRYRSGKISQDKLENAILKEEEKFFNIVKDVNPECTTDGLFRWDDIVDLTFSYINGQEKGELMRFFDNNF

SEQ ID NO: 35217 - protein, 85 aa, unidentified
  REGION 1..85: note = Description of Unknown:cds_NZ_WFIY01000004.1_cds_889 target sequence
YYRKAVIKSKLTPKDEYKNILEVDKEMMKKLGLKSGLSAVILGPLTYVELSQDEYYHNVEELLFAYSSVVNEVIKGIESKVDMIE

SEQ ID NO: 35218 - protein, 85 aa, unidentified
  REGION 1..85: note = Description of Unknown:cds_NZ_WFIY01000004.1_cds_889 target sequence
IHEPSLFSKGIKKEILDKLSSAYENMLKGTRKPTLVLSYFEVLNKRLPYLFSLPVENYGVDVIENKKKLPNIYKYFKDKNVFLGV

SEQ ID NO: 35219 - protein, 84 aa, unidentified
  REGION 1..84: note = Description of Unknown:cds_NZ_WFIY01000004.1_cds_889 target sequence
GVDVIENKKKLPNIYKYFKDKNVFLGVLNTRNTKMERISTIRRMVEKAKEKGAKEIMIGNASLMDFIPEKIAKKKLMLLKKVIQ

SEQ ID NO: 35220 - protein, 85 aa, unidentified
  REGION 1..85: note = Description of Unknown:cds_NZ_WFIY01000004.1_cds_889 target sequence
LENAILKEEEKFFNIVKDVNPECTTDGLFRWDDIVDLTFSYINGQEKGELMRFFDNNFYYRKAVIKSKLTPKDEYKNILEVDKEM

SEQ ID NO: 35221 - protein, 85 aa, unidentified
  REGION 1..85: note = Description of Unknown:cds_NZ_WFIY01000004.1_cds_889 target sequence
MKKLGLKSGLSAVILGPLTYVELSQDEYYHNVEELLFAYSSVVNEVIKGIESKVDMIEIHEPSLFSKGIKKEILDKLSSAYENML

SEQ ID NO: 35222 - protein, 85 aa, unidentified
  REGION 1..85: note = Description of Unknown:cds_NZ_WFIY01000004.1_cds_889 target sequence
KGTRKPTLVLSYFEVLNKRLPYLFSLPVENYGVDVIENKKKLPNIYKYFKDKNVFLGVLNTRNTKMERISTIRRMVEKAKEKGAK

SEQ ID NO: 35223 - protein, 85 aa, unidentified
  REGION 1..85: note = Description of Unknown:cds_NZ_WFIY01000004.1_cds_WP_155862437.1_182 target sequence
KREDLLTEVVGDITLEDIKGLDKYIELFNKIYGFSAEALYRGAEILKDMQKDADLRFISFTANLVSTGLRGLFADLIRNGYFNVV

SEQ ID NO: 35224 - protein, 85 aa, unidentified
  REGION 1..85: note = Description of Unknown:cds_NZ_WFIY01000004.1_cds_WP_155862437.1_182 target sequence
ITTGGTIDHDIARSCGGKYYKGSFDYDDKMLRELRIHRLGNILVPMESYGLVVERVVKNVVDEIVKEKKEWAGYELLWEFGKRIN

SEQ ID NO: 35225 - protein, 85 aa, unidentified
  REGION 1..85: note = Description of Unknown:cds_NZ_WFIY01000004.1_cds_WP_155862437.1_182 target sequence
DPHSILKAAYEKKVPIIVPGIVDGSFGTNLFVRSQFTGLRLNLFEDMRLVKDLVFSCKRSGALIIGGGISKHHTIWWNQFKDGLD

SEQ ID NO: 35226 - protein, 84 aa, unidentified
  REGION 1..84: note = Description of Unknown:cds_NZ_WFIY01000004.1_cds_WP_155862437.1_182 target sequence
CKRSGALIIGGGISKHHTIWWNQFKDGLDYAIYLTTAQEYDGSLSGAKPREAISWNKIREHSKNVVIYGDATIILPILASALLS

SEQ ID NO: 35227 - protein, 85 aa, unidentified
  REGION 1..85: note = Description of Unknown:cds_NZ_WFIY01000004.1_cds_WP_155862437.1_182 target sequence
FNKIYGFSAEALYRGAEILKDMQKDADLRFISFTANLVSTGLRGLFADLIRNGYFNVVITTGGTIDHDIARSCGGKYYKGSFDYD

SEQ ID NO: 35228 - protein, 85 aa, unidentified
  REGION 1..85: note = Description of Unknown:cds_NZ_WFIY01000004.1_cds_WP_155862437.1_182 target sequence
DKMLRELRIHRLGNILVPMESYGLVVERVVKNVVDEIVKEKKEWAGYELLWEFGKRINDPHSILKAAYEKKVPIIVPGIVDGSFG

SEQ ID NO: 35229 - protein, 85 aa, unidentified
  REGION 1..85: note = Description of Unknown:cds_NZ_WFIY01000004.1_cds_WP_155862437.1_182 target sequence
TNLFVRSQFTGLRLNLFEDMRLVKDLVFSCKRSGALIIGGGISKHHTIWWNQFKDGLDYAIYLTTAQEYDGSLSGAKPREAISWN

SEQ ID NO: 35230 - protein, 85 aa, unidentified
  REGION 1..85: note = Description of Unknown:cds_NZ_WFIY01000004.1_cds_911 target sequence
SEIGVGLWSLATDWWAPNVNAEEILKKAYELGITFYDTGDIYGEGKAEELLAKVLGNKRDNIVILTKIGYDFYNKKGRKIEQNFN

SEQ ID NO: 35231 - protein, 85 aa, unidentified
  REGION 1..85: note = Description of Unknown:cds_NZ_WFIY01000004.1_cds_911 target sequence
IDYLEFAIKESLKRLNTDYVDILMLHNPKMNVIRNKEIFDFMQGLKKDGIVRAIGVALGPTLGWGEEGLEAIKMGYEGLEHIYNM

SEQ ID NO: 35232 - protein, 85 aa, unidentified
  REGION 1..85: note = Description of Unknown:cds_NZ_WFIY01000004.1_cds_911 target sequence
IEQYPGKEFLKYRVGNVVRVPHASDALIEDKWPIGENKNLHRSLKNIKWIEEAVNNSKGMLEFAKSKGMKLSQLAIKFVLANPNA

SEQ ID NO: 35233 - protein, 84 aa, unidentified
  REGION 1..84: note = Description of Unknown:cds_NZ_WFIY01000004.1_cds_911 target sequence
KGMLEFAKSKGMKLSQLAIKFVLANPNASTVVPNITSVKELEEFVKTEELEDLTEEDIAFISSYYEKYYKKLNDESIEETKIYK

SEQ ID NO: 35234 - protein, 85 aa, unidentified
  REGION 1..85: note = Description of Unknown:cds_NZ_WFIY01000004.1_cds_911 target sequence
AYELGITFYDTGDIYGEGKAEELLAKVLGNKRDNIVILTKIGYDFYNKKGRKIEQNFNIDYLEFAIKESLKRLNTDYVDILMLHN

SEQ ID NO: 35235 - protein, 85 aa, unidentified
  REGION 1..85: note = Description of Unknown:cds_NZ_WFIY01000004.1_cds_911 target sequence
PKMNVIRNKEIFDFMQGLKKDGIVRAIGVALGPTLGWGEEGLEAIKMGYEGLEHIYNMIEQYPGKEFLKYRVGNVVRVPHASDAL

SEQ ID NO: 35236 - protein, 85 aa, unidentified
  REGION 1..85: note = Description of Unknown:cds_NZ_WFIY01000004.1_cds_911 target sequence
IEDKWPIGENKNLHRSLKNIKWIEEAVNNSKGMLEFAKSKGMKLSQLAIKFVLANPNASTVVPNITSVKELEEFVKTEELEDLTE

SEQ ID NO: 35237 - protein, 85 aa, unidentified
  REGION 1..85: note = Description of Unknown:cds_NZ_WFIY01000004.1_cds_WP_155864277.1_2270 target sequence
LSYIKIFSIFLAISSSLAFLFEFIFPISYLPITFPYEGLLSYLGTAGLYMEVVFLGLVAIVLSNKVRSLLPLGIALLVSPSLNLI

SEQ ID NO: 35238 - protein, 85 aa, unidentified
  REGION 1..85: note = Description of Unknown:cds_NZ_WFIY01000004.1_cds_WP_155864277.1_2270 target sequence
HNYSLSPYWSFVEIMLALIGIASLIEVTIKSNRRQLLFLPTLIMVMITTYAGIDTVFLHGDLAICYLFVLIASLLGVVIYAMVYN

SEQ ID NO: 35239 - protein, 85 aa, unidentified
  REGION 1..85: note = Description of Unknown:cds_NZ_WFIY01000004.1_cds_WP_155864277.1_2270 target sequence
KIISKRAMMSYIAAIPGLFVFLPLYFLVVNNRFLEIIMNMVIPSAFGIVLYNPYNLPILLLTLSISVYTILLLAIKGNGYAGLGY

SEQ ID NO: 35240 - protein, 84 aa, unidentified
  REGION 1..84: note = Description of Unknown:cds_NZ_WFIY01000004.1_cds_WP_155864277.1_2270 target sequence
ILLLTLSISVYTILLLAIKGNGYAGLGYFIILTTAFQAITGFHLLLYLLAPFIGFSILSYREIDNERTIMDDLKKLVQRLSLNT

SEQ ID NO: 35241 - protein, 85 aa, unidentified
  REGION 1..85: note = Description of Unknown:cds_NZ_WFIY01000004.1_cds_WP_155864277.1_2270 target sequence
SYLPITFPYEGLLSYLGTAGLYMEVVFLGLVAIVLSNKVRSLLPLGIALLVSPSLNLIHNYSLSPYWSFVEIMLALIGIASLIEV

SEQ ID NO: 35242 - protein, 85 aa, unidentified
  REGION 1..85: note = Description of Unknown:cds_NZ_WFIY01000004.1_cds_WP_155864277.1_2270 target sequence
TIKSNRRQLLFLPTLIMVMITTYAGIDTVFLHGDLAICYLFVLIASLLGVVIYAMVYNKIISKRAMMSYIAAIPGLFVFLPLYFL

SEQ ID NO: 35243 - protein, 85 aa, unidentified
  REGION 1..85: note = Description of Unknown:cds_NZ_WFIY01000004.1_cds_WP_155864277.1_2270 target sequence
VVNNRFLEIIMNMVIPSAFGIVLYNPYNLPILLLTLSISVYTILLLAIKGNGYAGLGYFIILTTAFQAITGFHLLLYLLAPFIGF

SEQ ID NO: 35244 - protein, 85 aa, unidentified
  REGION 1..85: note = Description of Unknown:cds_NC_035460.1_cds_YP_009408058.1_107 target sequence
TTVPVTDFANDYTITTFSEDGYPSNKNYEITTGQMSILRTVHDTLLATPPSKLESDNESSPEIFMPGEDSPVTIIEHVSPQKTYV

SEQ ID NO: 35245 - protein, 85 aa, unidentified
  REGION 1..85: note = Description of Unknown:cds_NC_035460.1_cds_YP_009408058.1_107 target sequence
EEPTTKNEIIIAEQERRQRLNFKMIGLETVVEHKPIETTHITSMTSQTPSLGVMFDKDRRIKLLEEEVINLKKSSNNNSSKLDNF

SEQ ID NO: 35246 - protein, 85 aa, unidentified
  REGION 1..85: note = Description of Unknown:cds_NC_035460.1_cds_YP_009408058.1_107 target sequence
TKILFGKNIHKSSEINKRVAIVNYASLTKADLTLDDLEMCSEDEIDKIYKIVKQYNDNYKRRILVTHFITIGIMVLEQILLKLGF

SEQ ID NO: 35247 - protein, 84 aa, unidentified
  REGION 1..84: note = Description of Unknown:cds_NC_035460.1_cds_YP_009408058.1_107 target sequence
DNYKRRILVTHFITIGIMVLEQILLKLGFEEIRGISTELTSEIIDINIGDDCEEIANKIGISNSPVLNIIIFLVKKLITRVKFI

SEQ ID NO: 35248 - protein, 85 aa, unidentified
  REGION 1..85: note = Description of Unknown:cds_NC_035460.1_cds_YP_009408058.1_107 target sequence
YEITTGQMSILRTVHDTLLATPPSKLESDNESSPEIFMPGEDSPVTIIEHVSPQKTYVEEPTTKNEIIIAEQERRQRLNFKMIGL

SEQ ID NO: 35249 - protein, 85 aa, unidentified
  REGION 1..85: note = Description of Unknown:cds_NC_035460.1_cds_YP_009408058.1_107 target sequence
ETVVEHKPIETTHITSMTSQTPSLGVMFDKDRRIKLLEEEVINLKKSSNNNSSKLDNFTKILFGKNIHKSSEINKRVAIVNYASL

SEQ ID NO: 35250 - protein, 85 aa, unidentified
  REGION 1..85: note = Description of Unknown:cds_NC_035460.1_cds_YP_009408058.1_107 target sequence
TKADLTLDDLEMCSEDEIDKIYKIVKQYNDNYKRRILVTHFITIGIMVLEQILLKLGFEEIRGISTELTSEIIDINIGDDCEEIA

SEQ ID NO: 35251 - protein, 85 aa, unidentified
  REGION 1..85: note = Description of Unknown:cds_NC_035460.1_cds_YP_009408108.1_157 target sequence
NKNTELFTNDIIIDTFGTKWKVGPLIGFGGFGCIYYADTNINYDFSKNINNVKYVIKIEPKDSGPLFVEQVFYQRVCKPQIINKW

SEQ ID NO: 35252 - protein, 85 aa, unidentified
  REGION 1..85: note = Description of Unknown:cds_NC_035460.1_cds_YP_009408108.1_157 target sequence
ISYNKVCYLGVPRCYGFGFYNKNNRQYRFIVIDCFGCDLFTILQYNNFKLPITTVLRIGIRILNVLKFLHEHGYAHADIKAANIV

SEQ ID NO: 35253 - protein, 85 aa, unidentified
  REGION 1..85: note = Description of Unknown:cds_NC_035460.1_cds_YP_009408108.1_157 target sequence
LDKDDKNKIYLIDYGLSYRFMINNIHVACKQNPKKLHNGTLEFTSLDAHHGVSPSRRGDLEILGYCMINWCGGILPWFNIKKANL

SEQ ID NO: 35254 - protein, 84 aa, unidentified
  REGION 1..84: note = Description of Unknown:cds_NC_035460.1_cds_YP_009408108.1_157 target sequence
RGDLEILGYCMINWCGGILPWFNIKKANLVKDLKLNFMKDIVSNMNKIFNNNAPIELVNYMLYIRELEYESNPDYIFLKNILKS

SEQ ID NO: 35255 - protein, 85 aa, unidentified
  REGION 1..85: note = Description of Unknown:cds_NC_035460.1_cds_YP_009408108.1_157 target sequence
FGGFGCIYYADTNINYDFSKNINNVKYVIKIEPKDSGPLFVEQVFYQRVCKPQIINKWISYNKVCYLGVPRCYGFGFYNKNNRQY

SEQ ID NO: 35256 - protein, 85 aa, unidentified
  REGION 1..85: note = Description of Unknown:cds_NC_035460.1_cds_YP_009408108.1_157 target sequence
RFIVIDCFGCDLFTILQYNNFKLPITTVLRIGIRILNVLKFLHEHGYAHADIKAANIVLDKDDKNKIYLIDYGLSYRFMINNIHV

SEQ ID NO: 35257 - protein, 85 aa, unidentified
  REGION 1..85: note = Description of Unknown:cds_NC_035460.1_cds_YP_009408108.1_157 target sequence
ACKQNPKKLHNGTLEFTSLDAHHGVSPSRRGDLEILGYCMINWCGGILPWFNIKKANLVKDLKLNFMKDIVSNMNKIFNNNAPIE

SEQ ID NO: 35258 - protein, 85 aa, unidentified
  REGION 1..85: note = Description of Unknown:cds_NC_024711.1_cds_YP_009052499.1_18 target sequence
DEDKEVKVNDTAVAVSNSGIEKQHGVQHSVAPYQLNYMSEAEIASLEVFIKRVMRSDKCGIKSVEDGLAIAMRAKDLRLPFSTCI

SEQ ID NO: 35259 - protein, 85 aa, unidentified
  REGION 1..85: note = Description of Unknown:cds_NC_024711.1_cds_YP_009052499.1_18 target sequence
EHIHVVQGKTGVDVHIIKALLVKGSVSWEKVDNYRALYEYTDGFNAYDEDKLPFDCIKCLTPKEAQTKNAEDKDHEHIYVYPVKY

SEQ ID NO: 35260 - protein, 85 aa, unidentified
  REGION 1..85: note = Description of Unknown:cds_NC_024711.1_cds_YP_009052499.1_18 target sequence
YKDYNGNIYKEYQLNGKFEIATNTAEAKQIASTGKVPVYRIPAVPIDYITSYRFYRKIGERNMVATGEFTYKDAIVAGCFEKDTY

SEQ ID NO: 35261 - protein, 84 aa, unidentified
  REGION 1..84: note = Description of Unknown:cds_NC_024711.1_cds_YP_009052499.1_18 target sequence
RKIGERNMVATGEFTYKDAIVAGCFEKDTYKKYPKIMISHRAFVYGAREIANDLIMGCLSTEELKTMQGIDLSNEDIIDITEIQ

SEQ ID NO: 35262 - protein, 85 aa, unidentified
  REGION 1..85: note = Description of Unknown:cds_NC_024711.1_cds_YP_009052499.1_18 target sequence
HSVAPYQLNYMSEAEIASLEVFIKRVMRSDKCGIKSVEDGLAIAMRAKDLRLPFSTCIEHIHVVQGKTGVDVHIIKALLVKGSVS

SEQ ID NO: 35263 - protein, 85 aa, unidentified
  REGION 1..85: note = Description of Unknown:cds_NC_024711.1_cds_YP_009052499.1_18 target sequence
WEKVDNYRALYEYTDGFNAYDEDKLPFDCIKCLTPKEAQTKNAEDKDHEHIYVYPVKYYKDYNGNIYKEYQLNGKFEIATNTAEA

SEQ ID NO: 35264 - protein, 85 aa, unidentified
  REGION 1..85: note = Description of Unknown:cds_NC_024711.1_cds_YP_009052499.1_18 target sequence
KQIASTGKVPVYRIPAVPIDYITSYRFYRKIGERNMVATGEFTYKDAIVAGCFEKDTYKKYPKIMISHRAFVYGAREIANDLIMG

SEQ ID NO: 35265 - protein, 85 aa, unidentified
  REGION 1..85: note = Description of Unknown:cds_NZ_WFIY01000004.1_cds_WP_155862584.1_357 target sequence
KYAILSADELFISLAELKALLKRPFSYVTGVAIFDGEAKNIARRSSTIKAIGEILAISDNPKDINDALKGKCFSIKPNVIMNSDK

SEQ ID NO: 35266 - protein, 85 aa, unidentified
  REGION 1..85: note = Description of Unknown:cds_NZ_WFIY01000004.1_cds_WP_155862584.1_357 target sequence
DLFPVLYKEIVDGIQFSKKCDKLDLIFTDGIILAGIRQEERDSKSLQAHAKKPYSQSGTMDAYTSRLLVNLANPDKTILDPFAGV

SEQ ID NO: 35267 - protein, 85 aa, unidentified
  REGION 1..85: note = Description of Unknown:cds_NZ_WFIY01000004.1_cds_WP_155862584.1_357 target sequence
GSILIEASWLGYDCIGGDIDSKMIEKTKYNLKYFNYECQIIQEDISNLPIKENSVDAIVTDPPYGRSVNARDVKFDELYESLFFN

SEQ ID NO: 35268 - protein, 84 aa, unidentified
  REGION 1..84: note = Description of Unknown:cds_NZ_WFIY01000004.1_cds_WP_155862584.1_357 target sequence
DAIVTDPPYGRSVNARDVKFDELYESLFFNSAEILKKGGKLVFATDSKFDWRDKIKSSGLKVDSIHFIYLHKSLSRGIYVVEKP

SEQ ID NO: 35269 - protein, 85 aa, unidentified
  REGION 1..85: note = Description of Unknown:cds_NZ_WFIY01000004.1_cds_WP_155862584.1_357 target sequence
VTGVAIFDGEAKNIARRSSTIKAIGEILAISDNPKDINDALKGKCFSIKPNVIMNSDKDLFPVLYKEIVDGIQFSKKCDKLDLIF

SEQ ID NO: 35270 - protein, 85 aa, unidentified
  REGION 1..85: note = Description of Unknown:cds_NZ_WFIY01000004.1_cds_WP_155862584.1_357 target sequence
TDGIILAGIRQEERDSKSLQAHAKKPYSQSGTMDAYTSRLLVNLANPDKTILDPFAGVGSILIEASWLGYDCIGGDIDSKMIEKT

SEQ ID NO: 35271 - protein, 85 aa, unidentified
  REGION 1..85: note = Description of Unknown:cds_NZ_WFIY01000004.1_cds_WP_155862584.1_357 target sequence
KYNLKYFNYECQIIQEDISNLPIKENSVDAIVTDPPYGRSVNARDVKFDELYESLFFNSAEILKKGGKLVFATDSKFDWRDKIKS

SEQ ID NO: 35272 - protein, 85 aa, unidentified
  REGION 1..85: note = Description of Unknown:cds_NZ_WFIY01000004.1_cds_WP_155862635.1_416 target sequence
VAIVNTEAYPFRVSLEQVLSRYGGLSFYDVISNNGDTIKEAKERINRIIKGEDIKHYKDTKNPQLLFYSVLLILSVLGDKKIAEK

SEQ ID NO: 35273 - protein, 85 aa, unidentified
  REGION 1..85: note = Description of Unknown:cds_NZ_WFIY01000004.1_cds_WP_155862635.1_416 target sequence
VCRKEAELFAEDLEKEDEENLLEMANFLGIKVEKKKIEYHVTKGKVVLNYAIYFIDYLRLTKNLRKNSKFSLSERILKDGYVFID

SEQ ID NO: 35274 - protein, 85 aa, unidentified
  REGION 1..85: note = Description of Unknown:cds_NZ_WFIY01000004.1_cds_WP_155862635.1_416 target sequence
RKTLLSLAKEVIYEKMMSLVKPIPLSEIPDTIRDLLFLRKGITPPCISALFKKDKKSEEELKILTVYMIDIGSSTDSIITMLKNN

SEQ ID NO: 35275 - protein, 84 aa, unidentified
  REGION 1..84: note = Description of Unknown:cds_NZ_WFIY01000004.1_cds_WP_155862635.1_416 target sequence
SEEELKILTVYMIDIGSSTDSIITMLKNNGIQNPEDFLNHFIKERKTRYIVYNCTQLKKMNLCVSECGVKNPLQLYFGRLDNIS

SEQ ID NO: 35276 - protein, 85 aa, unidentified
  REGION 1..85: note = Description of Unknown:cds_NZ_WFIY01000004.1_cds_WP_155862635.1_416 target sequence
YDVISNNGDTIKEAKERINRIIKGEDIKHYKDTKNPQLLFYSVLLILSVLGDKKIAEKVCRKEAELFAEDLEKEDEENLLEMANF

SEQ ID NO: 35277 - protein, 85 aa, unidentified
  REGION 1..85: note = Description of Unknown:cds_NZ_WFIY01000004.1_cds_WP_155862635.1_416 target sequence
LGIKVEKKKIEYHVTKGKVVLNYAIYFIDYLRLTKNLRKNSKFSLSERILKDGYVFIDRKTLLSLAKEVIYEKMMSLVKPIPLSE

SEQ ID NO: 35278 - protein, 85 aa, unidentified
  REGION 1..85: note = Description of Unknown:cds_NZ_WFIY01000004.1_cds_WP_155862635.1_416 target sequence
IPDTIRDLLFLRKGITPPCISALFKKDKKSEEELKILTVYMIDIGSSTDSIITMLKNNGIQNPEDFLNHFIKERKTRYIVYNCTQ

SEQ ID NO: 35279 - protein, 85 aa, unidentified
  REGION 1..85: note = Description of Unknown:cds_NZ_WFIY01000004.1_cds_WP_155863956.1_1877 target sequence
KYEIIKIESQELKDNYLKDPYVREVLVYTPDEIEEGLPLFIELAGINWSPNVNNRFHQIMTRLLKKIKAVVVNPNFRTKYYLNQY

SEQ ID NO: 35280 - protein, 85 aa, unidentified
  REGION 1..85: note = Description of Unknown:cds_NZ_WFIY01000004.1_cds_WP_155863956.1_1877 target sequence
INSPAVGNYENFIIKELIPELKERYKVGNVALFGKSSGGFGAYTLAVRHPDVVQGFADHFGDSCFYYLYANDFVYTIKDLEGKKP

SEQ ID NO: 35281 - protein, 85 aa, unidentified
  REGION 1..85: note = Description of Unknown:cds_NZ_WFIY01000004.1_cds_WP_155863956.1_1877 target sequence
KDLLKELMAKTPSEDDMKILNVFGSSAFYSPNLNSETGFDLPFDETGEIIDKVWKKWLSFDPVKNVENYVDSLRKLKAIYLDVGK

SEQ ID NO: 35282 - protein, 84 aa, unidentified
  REGION 1..84: note = Description of Unknown:cds_NZ_WFIY01000004.1_cds_WP_155863956.1_1877 target sequence
KWLSFDPVKNVENYVDSLRKLKAIYLDVGKCDEYNLFIGMRSLHKKLQKLGIQHYYEEFKGGHFGNSSRYCTSLPYLYERLKLS

SEQ ID NO: 35283 - protein, 85 aa, unidentified
  REGION 1..85: note = Description of Unknown:cds_NZ_WFIY01000004.1_cds_WP_155863956.1_1877 target sequence
YTPDEIEEGLPLFIELAGINWSPNVNNRFHQIMTRLLKKIKAVVVNPNFRTKYYLNQYINSPAVGNYENFIIKELIPELKERYKV

SEQ ID NO: 35284 - protein, 85 aa, unidentified
  REGION 1..85: note = Description of Unknown:cds_NZ_WFIY01000004.1_cds_WP_155863956.1_1877 target sequence
GNVALFGKSSGGFGAYTLAVRHPDVVQGFADHFGDSCFYYLYANDFVYTIKDLEGKKPKDLLKELMAKTPSEDDMKILNVFGSSA

SEQ ID NO: 35285 - protein, 85 aa, unidentified
  REGION 1..85: note = Description of Unknown:cds_NZ_WFIY01000004.1_cds_WP_155863956.1_1877 target sequence
FYSPNLNSETGFDLPFDETGEIIDKVWKKWLSFDPVKNVENYVDSLRKLKAIYLDVGKCDEYNLFIGMRSLHKKLQKLGIQHYYE

SEQ ID NO: 35286 - protein, 85 aa, unidentified
  REGION 1..85: note = Description of Unknown:cds_NC_035460.1_cds_YP_009407997.1_46 target sequence
VDEDQLVLNSISARALKCYFTTKFNEMVDELVTKKYPQKKKAQSKRPETRIPIDLIKKEFVKKFSLDQYTDGVLVSLINSLVENN

SEQ ID NO: 35287 - protein, 85 aa, unidentified
  REGION 1..85: note = Description of Unknown:cds_NC_035460.1_cds_YP_009407997.1_46 target sequence
YFTTEGKLNKSACEELVLTETEKRILDKITPCSPLYIDISDVKTLSTRLKTSAKEFEYNNVVYKLQADKIEDLINQLVQNKVIKL

SEQ ID NO: 35288 - protein, 85 aa, unidentified
  REGION 1..85: note = Description of Unknown:cds_NC_035460.1_cds_YP_009407997.1_46 target sequence
DEKCSVKDSVYNIPENLVLLFKTRLFKSPQVKDNAITKTRLYDYFNRVTKPDETKIYVILKDPKIAEVLEVDTVKHGSFLYTKHS

SEQ ID NO: 35289 - protein, 84 aa, unidentified
  REGION 1..84: note = Description of Unknown:cds_NC_035460.1_cds_YP_009407997.1_46 target sequence
IYVILKDPKIAEVLEVDTVKHGSFLYTKHSMLINAISSNVDRYSKKFQESFYEKIAEFIKDNEKVNVSKVIECLIVPNITLESF

SEQ ID NO: 35290 - protein, 85 aa, unidentified
  REGION 1..85: note = Description of Unknown:cds_NC_035460.1_cds_YP_009407997.1_46 target sequence
VDELVTKKYPQKKKAQSKRPETRIPIDLIKKEFVKKFSLDQYTDGVLVSLINSLVENNYFTTEGKLNKSACEELVLTETEKRILD

SEQ ID NO: 35291 - protein, 85 aa, unidentified
  REGION 1..85: note = Description of Unknown:cds_NC_035460.1_cds_YP_009407997.1_46 target sequence
KITPCSPLYIDISDVKTLSTRLKTSAKEFEYNNVVYKLQADKIEDLINQLVQNKVIKLDEKCSVKDSVYNIPENLVLLFKTRLFK

SEQ ID NO: 35292 - protein, 85 aa, unidentified
  REGION 1..85: note = Description of Unknown:cds_NC_035460.1_cds_YP_009407997.1_46 target sequence
SPQVKDNAITKTRLYDYFNRVTKPDETKIYVILKDPKIAEVLEVDTVKHGSFLYTKHSMLINAISSNVDRYSKKFQESFYEKIAE

SEQ ID NO: 35293 - protein, 85 aa, unidentified
  REGION 1..85: note = Description of Unknown:cds_NC_030656.1_cds_YP_009268763.1_48 target sequence
MSDCEDKLVLNSISARTLKAYLTSKINDIVDELVTRRPLAKKKQQTKRTEFRIPTDLINEKFVKRFKLCQYKSGVLTSLINSLVE

SEQ ID NO: 35294 - protein, 85 aa, unidentified
  REGION 1..85: note = Description of Unknown:cds_NC_030656.1_cds_YP_009268763.1_48 target sequence
NNYFMPDGKLNLEIAKELVLTDIEVKILNSIAPSSSLYIDTSDVRVLAGRLKKPATEICFNDFTYKIDHERIEELINQMAIDGTI

SEQ ID NO: 35295 - protein, 85 aa, unidentified
  REGION 1..85: note = Description of Unknown:cds_NC_030656.1_cds_YP_009268763.1_48 target sequence
ILDDVCSVKDSVYIISKELISVIKSRMFKAPQVKDGCITKTRLYDFFNKVTKQEDPKIYVILRDPCIATILNIDIVKVGEFYYTK

SEQ ID NO: 35296 - protein, 84 aa, unidentified
  REGION 1..84: note = Description of Unknown:cds_NC_030656.1_cds_YP_009268763.1_48 target sequence
PKIYVILRDPCIATILNIDIVKVGEFYYTKHNILVNAISSNVDRCMKKFEPEFYEKLAPFVKDNEKVNVSRVVECLTIQSVNVS

SEQ ID NO: 35297 - protein, 85 aa, unidentified
  REGION 1..85: note = Description of Unknown:cds_NC_030656.1_cds_YP_009268763.1_48 target sequence
DIVDELVTRRPLAKKKQQTKRTEFRIPTDLINEKFVKRFKLCQYKSGVLTSLINSLVENNYFMPDGKLNLEIAKELVLTDIEVKI

SEQ ID NO: 35298 - protein, 85 aa, unidentified
  REGION 1..85: note = Description of Unknown:cds_NC_030656.1_cds_YP_009268763.1_48 target sequence
LNSIAPSSSLYIDTSDVRVLAGRLKKPATEICFNDFTYKIDHERIEELINQMAIDGTIILDDVCSVKDSVYIISKELISVIKSRM

SEQ ID NO: 35299 - protein, 85 aa, unidentified
  REGION 1..85: note = Description of Unknown:cds_NC_030656.1_cds_YP_009268763.1_48 target sequence
FKAPQVKDGCITKTRLYDFFNKVTKQEDPKIYVILRDPCIATILNIDIVKVGEFYYTKHNILVNAISSNVDRCMKKFEPEFYEKL

SEQ ID NO: 35300 - protein, 85 aa, unidentified
  REGION 1..85: note = Description of Unknown:cds_NC_024711.1_cds_YP_009052528.1_50 target sequence
VIKLDIKTNIMANNKTITIEHIIGKLDNDFNPDGSDWIPRVPAWCVDAMNELKVLRKVDKKMKLTVINKIAKSKCCLIDDGLKVY

SEQ ID NO: 35301 - protein, 85 aa, unidentified
  REGION 1..85: note = Description of Unknown:cds_NC_024711.1_cds_YP_009052528.1_50 target sequence
DSNGCEVPRADTSKYRCGDTESAPSSTGGQAEDESPERATNKDYLGMPDDCCPNGSRTREVIDTGKVGCNPVVYTVHNNTECPRC

SEQ ID NO: 35302 - protein, 85 aa, unidentified
  REGION 1..85: note = Description of Unknown:cds_NC_024711.1_cds_YP_009052528.1_50 target sequence
QHKVHSHCQTPRGGYDKSNHNYILIGGNTIELNFNDTCITVVYKDIETQYSDNYHCEIPVIPANGKLIQGLTYYCMARMLMRGYK

SEQ ID NO: 35303 - protein, 84 aa, unidentified
  REGION 1..84: note = Description of Unknown:cds_NC_024711.1_cds_YP_009052528.1_50 target sequence
HCEIPVIPANGKLIQGLTYYCMARMLMRGYKHPVFNLSASQYGTNPFYLWESMKKDIKTSILLDEQSDDDSGWNEFFYNFTFPK

SEQ ID NO: 35304 - protein, 85 aa, unidentified
  REGION 1..85: note = Description of Unknown:cds_NC_024711.1_cds_YP_009052528.1_50 target sequence
NDFNPDGSDWIPRVPAWCVDAMNELKVLRKVDKKMKLTVINKIAKSKCCLIDDGLKVYDSNGCEVPRADTSKYRCGDTESAPSST

SEQ ID NO: 35305 - protein, 85 aa, unidentified
  REGION 1..85: note = Description of Unknown:cds_NC_024711.1_cds_YP_009052528.1_50 target sequence
GGQAEDESPERATNKDYLGMPDDCCPNGSRTREVIDTGKVGCNPVVYTVHNNTECPRCQHKVHSHCQTPRGGYDKSNHNYILIGG

SEQ ID NO: 35306 - protein, 85 aa, unidentified
  REGION 1..85: note = Description of Unknown:cds_NC_024711.1_cds_YP_009052528.1_50 target sequence
NTIELNFNDTCITVVYKDIETQYSDNYHCEIPVIPANGKLIQGLTYYCMARMLMRGYKHPVFNLSASQYGTNPFYLWESMKKDIK

SEQ ID NO: 35307 - protein, 85 aa, unidentified
  REGION 1..85: note = Description of Unknown:cds_NZ_WFIY01000004.1_cds_WP_162309145.1_375 target sequence
NWKNIISIMLPFLALFGYSLIFHVNIILALEKINYIVILGFLSAYIAQISIISIRDKYIVKVSYKNAFKARLLGNASSLLIPGWA

SEQ ID NO: 35308 - protein, 85 aa, unidentified
  REGION 1..85: note = Description of Unknown:cds_NZ_WFIY01000004.1_cds_WP_162309145.1_375 target sequence
GQELARAAIYNLEKRNLIESLSLSIAEAPFDVISGAILFIIVLPLKFYYIEFIYIIVALGNIIGWSIGMTYIYSTAGKYVETEKK

SEQ ID NO: 35309 - protein, 85 aa, unidentified
  REGION 1..85: note = Description of Unknown:cds_NZ_WFIY01000004.1_cds_WP_162309145.1_375 target sequence
IMRLIKVDKYYFLLLQGKDSIKKSIGNKRFIIYMALSFLGYLVLSAGLYPLIPNYFYDIIIIMAYFAATLFPIPAAAGVSELALA

SEQ ID NO: 35310 - protein, 84 aa, unidentified
  REGION 1..84: note = Description of Unknown:cds_NZ_WFIY01000004.1_cds_WP_162309145.1_375 target sequence
YFYDIIIIMAYFAATLFPIPAAAGVSELALALVLPSSYVFDIIILEYVSYALGFIFLREVSFSELKKDIDKIKKDGELYKRADS

SEQ ID NO: 35311 - protein, 85 aa, unidentified
  REGION 1..85: note = Description of Unknown:cds_NZ_WFIY01000004.1_cds_WP_162309145.1_375 target sequence
LALEKINYIVILGFLSAYIAQISIISIRDKYIVKVSYKNAFKARLLGNASSLLIPGWAGQELARAAIYNLEKRNLIESLSLSIAE

SEQ ID NO: 35312 - protein, 85 aa, unidentified
  REGION 1..85: note = Description of Unknown:cds_NZ_WFIY01000004.1_cds_WP_162309145.1_375 target sequence
APFDVISGAILFIIVLPLKFYYIEFIYIIVALGNIIGWSIGMTYIYSTAGKYVETEKKIMRLIKVDKYYFLLLQGKDSIKKSIGN

SEQ ID NO: 35313 - protein, 85 aa, unidentified
  REGION 1..85: note = Description of Unknown:cds_NZ_WFIY01000004.1_cds_WP_162309145.1_375 target sequence
KRFIIYMALSFLGYLVLSAGLYPLIPNYFYDIIIIMAYFAATLFPIPAAAGVSELALALVLPSSYVFDIIILEYVSYALGFIFLR

SEQ ID NO: 35314 - protein, 85 aa, unidentified
  REGION 1..85: note = Description of Unknown:cds_NZ_WFIY01000004.1_cds_WP_155862856.1_694 target sequence
SRHFIIDCDTAEDDIMSLFMLLRYGISVEGITIVEGNISFDQEVNNALWALEFIGKEIPVYPGSQRPIVKNYRTVENVHGKGGIG

SEQ ID NO: 35315 - protein, 85 aa, unidentified
  REGION 1..85: note = Description of Unknown:cds_NZ_WFIY01000004.1_cds_WP_155862856.1_694 target sequence
DKVVKPSKLKASNKHAVDAIIELADRYAGELEFLAISPLTNLALAYLKDKSLAEKIKKVWIMGGTIYGRGNITPVAEYNIWVDPD

SEQ ID NO: 35316 - protein, 85 aa, unidentified
  REGION 1..85: note = Description of Unknown:cds_NZ_WFIY01000004.1_cds_WP_155862856.1_694 target sequence
AAKVIFSSGMDLTMVAWDLITNYTINAEEWNKIKSMNTKLSSFYIDIYTHYRNYAMTKQKMKGHPHPDLITTAIAIDSSIATKVE

SEQ ID NO: 35317 - protein, 84 aa, unidentified
  REGION 1..84: note = Description of Unknown:cds_NZ_WFIY01000004.1_cds_WP_155862856.1_694 target sequence
AMTKQKMKGHPHPDLITTAIAIDSSIATKVEKQYVDIENCECLTRGMTVIDYLGIWNKEPNANVVYEINKEKFISMLYNLLAWF

SEQ ID NO: 35318 - protein, 85 aa, unidentified
  REGION 1..85: note = Description of Unknown:cds_NZ_WFIY01000004.1_cds_WP_155862856.1_694 target sequence
VEGITIVEGNISFDQEVNNALWALEFIGKEIPVYPGSQRPIVKNYRTVENVHGKGGIGDKVVKPSKLKASNKHAVDAIIELADRY

SEQ ID NO: 35319 - protein, 85 aa, unidentified
  REGION 1..85: note = Description of Unknown:cds_NZ_WFIY01000004.1_cds_WP_155862856.1_694 target sequence
AGELEFLAISPLTNLALAYLKDKSLAEKIKKVWIMGGTIYGRGNITPVAEYNIWVDPDAAKVIFSSGMDLTMVAWDLITNYTINA

SEQ ID NO: 35320 - protein, 85 aa, unidentified
  REGION 1..85: note = Description of Unknown:cds_NZ_WFIY01000004.1_cds_WP_155862856.1_694 target sequence
EEWNKIKSMNTKLSSFYIDIYTHYRNYAMTKQKMKGHPHPDLITTAIAIDSSIATKVEKQYVDIENCECLTRGMTVIDYLGIWNK

SEQ ID NO: 35321 - protein, 85 aa, unidentified
  REGION 1..85: note = Description of Unknown:cds_NZ_WFIY01000004.1_cds_WP_155863220.1_1166 target sequence
FIDLHEDFAYANQMGKDIIHGKEQSSIEMLKNVDNNVIVFSSIFPHIDVINERSAELSSKYGFHIKSSNFSFDILLSQLKVYYYL

SEQ ID NO: 35322 - protein, 85 aa, unidentified
  REGION 1..85: note = Description of Unknown:cds_NZ_WFIY01000004.1_cds_WP_155863220.1_1166 target sequence
ERSGYVSIVRSKEDLKKPGIKFLLSLEGTDALKEYEDIYILKELHVLNLGLTWNYDTKFASSCFSKKDYGLTAEGEELVKLANKL

SEQ ID NO: 35323 - protein, 85 aa, unidentified
  REGION 1..85: note = Description of Unknown:cds_NZ_WFIY01000004.1_cds_WP_155863220.1_1166 target sequence
GIIIDLAHAGKRTVLDVCSVTSKPVIISHGNAKSLKDHERNYDDEELECVVKTGGVIGITAITSTLPEKTLKGIIENIKYIGESF

SEQ ID NO: 35324 - protein, 84 aa, unidentified
  REGION 1..84: note = Description of Unknown:cds_NZ_WFIY01000004.1_cds_WP_155863220.1_1166 target sequence
GVIGITAITSTLPEKTLKGIIENIKYIGESFGWDYVAIGTDFLGISEVPQGFENVTKIKELLIEGHEDKILWRNAYRVIEENLS

SEQ ID NO: 35325 - protein, 85 aa, unidentified
  REGION 1..85: note = Description of Unknown:cds_NZ_WFIY01000004.1_cds_WP_155863220.1_1166 target sequence
EMLKNVDNNVIVFSSIFPHIDVINERSAELSSKYGFHIKSSNFSFDILLSQLKVYYYLERSGYVSIVRSKEDLKKPGIKFLLSLE

SEQ ID NO: 35326 - protein, 85 aa, unidentified
  REGION 1..85: note = Description of Unknown:cds_NZ_WFIY01000004.1_cds_WP_155863220.1_1166 target sequence
GTDALKEYEDIYILKELHVLNLGLTWNYDTKFASSCFSKKDYGLTAEGEELVKLANKLGIIIDLAHAGKRTVLDVCSVTSKPVII

SEQ ID NO: 35327 - protein, 85 aa, unidentified
  REGION 1..85: note = Description of Unknown:cds_NZ_WFIY01000004.1_cds_WP_155863220.1_1166 target sequence
SHGNAKSLKDHERNYDDEELECVVKTGGVIGITAITSTLPEKTLKGIIENIKYIGESFGWDYVAIGTDFLGISEVPQGFENVTKI

SEQ ID NO: 35328 - protein, 85 aa, unidentified
  REGION 1..85: note = Description of Unknown:cds_NZ_WFIY01000004.1_cds_WP_155863614.1_1515 target sequence
SVELKDVSKKFGKLYALSKISLKVEKGEFFVILGPSGSGKTTLLRSIAGLEKIDEGKILIDGRDVTSLPPGKREISMVFQNFALY

SEQ ID NO: 35329 - protein, 85 aa, unidentified
  REGION 1..85: note = Description of Unknown:cds_NZ_WFIY01000004.1_cds_WP_155863614.1_1515 target sequence
PNKTVYENLSMPIENLKKDEREKIIEEVSKRLGISQLLDRYPSQLSGGQQQRVGLARALVKRSKVFLMDEPLSNLDAPQRISARK

SEQ ID NO: 35330 - protein, 85 aa, unidentified
  REGION 1..85: note = Description of Unknown:cds_NZ_WFIY01000004.1_cds_WP_155863614.1_1515 target sequence
LIKEIQLENSITTLYVTHDQTEAMALADRIAIIDQGKIIQVGSPEEIYENPVNEFVASFFGNPPMSIIHDGKGKLGIRAEDVKIG

SEQ ID NO: 35331 - protein, 84 aa, unidentified
  REGION 1..84: note = Description of Unknown:cds_NZ_WFIY01000004.1_cds_WP_155863614.1_1515 target sequence
FVASFFGNPPMSIIHDGKGKLGIRAEDVKIGEGNYKGIVKDIEFWGDRYLIYISFNNEEIKAFSSKRLKIGEEINFDFKYKVIP

SEQ ID NO: 35332 - protein, 85 aa, unidentified
  REGION 1..85: note = Description of Unknown:cds_NZ_WFIY01000004.1_cds_WP_155863614.1_1515 target sequence
EFFVILGPSGSGKTTLLRSIAGLEKIDEGKILIDGRDVTSLPPGKREISMVFQNFALYPNKTVYENLSMPIENLKKDEREKIIEE

SEQ ID NO: 35333 - protein, 85 aa, unidentified
  REGION 1..85: note = Description of Unknown:cds_NZ_WFIY01000004.1_cds_WP_155863614.1_1515 target sequence
VSKRLGISQLLDRYPSQLSGGQQQRVGLARALVKRSKVFLMDEPLSNLDAPQRISARKLIKEIQLENSITTLYVTHDQTEAMALA

SEQ ID NO: 35334 - protein, 85 aa, unidentified
  REGION 1..85: note = Description of Unknown:cds_NZ_WFIY01000004.1_cds_WP_155863614.1_1515 target sequence
DRIAIIDQGKIIQVGSPEEIYENPVNEFVASFFGNPPMSIIHDGKGKLGIRAEDVKIGEGNYKGIVKDIEFWGDRYLIYISFNNE

SEQ ID NO: 35335 - protein, 85 aa, unidentified
  REGION 1..85: note = Description of Unknown:cds_NZ_WFIY01000004.1_cds_WP_155863621.1_1520 target sequence
PKPYVAINMAELKNEPKTFEMFASVGPKVCMVTARHPGFVGFQNHIQIGVLPFGNRYGGAKMDMTKESSSVRVLQYTFWKDWKDH

SEQ ID NO: 35336 - protein, 85 aa, unidentified
  REGION 1..85: note = Description of Unknown:cds_NZ_WFIY01000004.1_cds_WP_155863621.1_1520 target sequence
EEMHRQNWSYLFRLCYSCASQMIWGPWEPIYEIIYANMPINTEMTDFTAVVGKKFAEGKPLDIPVISQPYGKRVVAFAEHSVIPG

SEQ ID NO: 35337 - protein, 85 aa, unidentified
  REGION 1..85: note = Description of Unknown:cds_NZ_WFIY01000004.1_cds_WP_155863621.1_1520 target sequence
KEKQFEDAIVRTLEMLKKAPGFLGAMVLKEIGVSGIGSMQFGAKGFHQVLENPGSLEPDPNNVMYSVPEAKNTPQQYIVHVEWAN

SEQ ID NO: 35338 - protein, 84 aa, unidentified
  REGION 1..84: note = Description of Unknown:cds_NZ_WFIY01000004.1_cds_WP_155863621.1_1520 target sequence
SLEPDPNNVMYSVPEAKNTPQQYIVHVEWANTDALMFGMGRVLLYPELRQVHDEVLDTLVYGPYIRILNPVMEGTFWREYLNEQ

SEQ ID NO: 35339 - protein, 85 aa, unidentified
  REGION 1..85: note = Description of Unknown:cds_NZ_WFIY01000004.1_cds_WP_155863621.1_1520 target sequence
KVCMVTARHPGFVGFQNHIQIGVLPFGNRYGGAKMDMTKESSSVRVLQYTFWKDWKDHEEMHRQNWSYLFRLCYSCASQMIWGPW

SEQ ID NO: 35340 - protein, 85 aa, unidentified
  REGION 1..85: note = Description of Unknown:cds_NZ_WFIY01000004.1_cds_WP_155863621.1_1520 target sequence
EPIYEIIYANMPINTEMTDFTAVVGKKFAEGKPLDIPVISQPYGKRVVAFAEHSVIPGKEKQFEDAIVRTLEMLKKAPGFLGAMV

SEQ ID NO: 35341 - protein, 85 aa, unidentified
  REGION 1..85: note = Description of Unknown:cds_NZ_WFIY01000004.1_cds_WP_155863621.1_1520 target sequence
LKEIGVSGIGSMQFGAKGFHQVLENPGSLEPDPNNVMYSVPEAKNTPQQYIVHVEWANTDALMFGMGRVLLYPELRQVHDEVLDT

SEQ ID NO: 35342 - protein, 85 aa, unidentified
  REGION 1..85: note = Description of Unknown:cds_NZ_WFIY01000004.1_cds_WP_155863932.1_1848 target sequence
SAKAEAYSSSANLGPGFDILSMAHNAFKDIVIARTIEEKGKIVIKSNNPKIPLDPEKNSAGLATKILLQEKGIDEGIEIEINKGI

SEQ ID NO: 35343 - protein, 85 aa, unidentified
  REGION 1..85: note = Description of Unknown:cds_NZ_WFIY01000004.1_cds_WP_155863932.1_1848 target sequence
PFGLGLGSSGASSVAAIAAVNELFELKLTQEEMVKYSMFGEQASSGSPHPDNVAASVYGGIIAVTSVSPVKVVKIPVNIDFKILL

SEQ ID NO: 35344 - protein, 85 aa, unidentified
  REGION 1..85: note = Description of Unknown:cds_NZ_WFIY01000004.1_cds_WP_155863932.1_1848 target sequence
ISPQGEREGKTKKAREMLPSKVDLSLYVKNSRYLSSLILGFIKGDKELIKQGLNDEIVEVAREPLYPHYKKIKEIALKNDAIGSC

SEQ ID NO: 35345 - protein, 84 aa, unidentified
  REGION 1..84: note = Description of Unknown:cds_NZ_WFIY01000004.1_cds_WP_155863932.1_1848 target sequence
DEIVEVAREPLYPHYKKIKEIALKNDAIGSCVSGAGPTVLVLYDDHTNVDKIKVESLEVCKVFGLTCNFISAQIAGGVKSERLN

SEQ ID NO: 35346 - protein, 85 aa, unidentified
  REGION 1..85: note = Description of Unknown:cds_NZ_WFIY01000004.1_cds_WP_155863932.1_1848 target sequence
KDIVIARTIEEKGKIVIKSNNPKIPLDPEKNSAGLATKILLQEKGIDEGIEIEINKGIPFGLGLGSSGASSVAAIAAVNELFELK

SEQ ID NO: 35347 - protein, 85 aa, unidentified
  REGION 1..85: note = Description of Unknown:cds_NZ_WFIY01000004.1_cds_WP_155863932.1_1848 target sequence
LTQEEMVKYSMFGEQASSGSPHPDNVAASVYGGIIAVTSVSPVKVVKIPVNIDFKILLISPQGEREGKTKKAREMLPSKVDLSLY

SEQ ID NO: 35348 - protein, 85 aa, unidentified
  REGION 1..85: note = Description of Unknown:cds_NZ_WFIY01000004.1_cds_WP_155863932.1_1848 target sequence
VKNSRYLSSLILGFIKGDKELIKQGLNDEIVEVAREPLYPHYKKIKEIALKNDAIGSCVSGAGPTVLVLYDDHTNVDKIKVESLE

SEQ ID NO: 35349 - protein, 85 aa, unidentified
  REGION 1..85: note = Description of Unknown:cds_NC_003214.2_cds_NP_445711.1_46 target sequence
LCMLLREIITHVPCVKCGFFVIFNNVKQRFKKYILIQSLLSPSYFNITDAKSFIETYSCIYKDRPMIVWIDSPYYVEHGCDMRRA

SEQ ID NO: 35350 - protein, 85 aa, unidentified
  REGION 1..85: note = Description of Unknown:cds_NC_003214.2_cds_NP_445711.1_46 target sequence
KVYVTSHYVKKLLNGTIHVDGVLRPPFNQVAYDERASNVKKEYLFTVLASEPGDGTAIRKRVKYTLDILRQLNMRNSTLVISNVG

SEQ ID NO: 35351 - protein, 85 aa, unidentified
  REGION 1..85: note = Description of Unknown:cds_NC_003214.2_cds_NP_445711.1_46 target sequence
DFDMRSYTLDEREKYRLLHKSYFYLSLSKNEGFGLPLMESMSVGTPAVYVNAFAFKEYAVGIPIDPYDVIIEETSYGKMDNYLIR

SEQ ID NO: 35352 - protein, 84 aa, unidentified
  REGION 1..84: note = Description of Unknown:cds_NC_003214.2_cds_NP_445711.1_46 target sequence
KEYAVGIPIDPYDVIIEETSYGKMDNYLIRDSDVRNALQEARECIKTSCYDELSAKALEKSKEFEMPNIEEKILSDFKSVMRHR

SEQ ID NO: 35353 - protein, 85 aa, unidentified
  REGION 1..85: note = Description of Unknown:cds_NC_003214.2_cds_NP_445711.1_46 target sequence
QRFKKYILIQSLLSPSYFNITDAKSFIETYSCIYKDRPMIVWIDSPYYVEHGCDMRRAKVYVTSHYVKKLLNGTIHVDGVLRPPF

SEQ ID NO: 35354 - protein, 85 aa, unidentified
  REGION 1..85: note = Description of Unknown:cds_NC_003214.2_cds_NP_445711.1_46 target sequence
NQVAYDERASNVKKEYLFTVLASEPGDGTAIRKRVKYTLDILRQLNMRNSTLVISNVGDFDMRSYTLDEREKYRLLHKSYFYLSL

SEQ ID NO: 35355 - protein, 85 aa, unidentified
  REGION 1..85: note = Description of Unknown:cds_NC_003214.2_cds_NP_445711.1_46 target sequence
SKNEGFGLPLMESMSVGTPAVYVNAFAFKEYAVGIPIDPYDVIIEETSYGKMDNYLIRDSDVRNALQEARECIKTSCYDELSAKA

SEQ ID NO: 35356 - protein, 85 aa, unidentified
  REGION 1..85: note = Description of Unknown:cds_NZ_WFIY01000004.1_cds_WP_155862556.1_325 target sequence
KDRFGRDLEDLRITLTHACNFSCFFCHMEGEGSEILSGLPLRDILLVAKASKDFGIKYIKLTGGEPTLRRDLIEIVKSLKSLGFE

SEQ ID NO: 35357 - protein, 85 aa, unidentified
  REGION 1..85: note = Description of Unknown:cds_NZ_WFIY01000004.1_cds_WP_155862556.1_325 target sequence
ISMTTNGVLLPKLATKLKEAGLSRVNISLHALDRKTFKKITGVDALDKVLEGIKSAINANLRPVKLNFVVNKININEVKEIIDFS

SEQ ID NO: 35358 - protein, 85 aa, unidentified
  REGION 1..85: note = Description of Unknown:cds_NZ_WFIY01000004.1_cds_WP_155862556.1_325 target sequence
EKLGIDELHLIEMHPVGLGKSSFSYHENLNIIEDYLKKNSTKVTIRNKHFRPRYYLNSGLVVEVVKPYANPIFCAGCNRIRLTVD

SEQ ID NO: 35359 - protein, 84 aa, unidentified
  REGION 1..84: note = Description of Unknown:cds_NZ_WFIY01000004.1_cds_WP_155862556.1_325 target sequence
YYLNSGLVVEVVKPYANPIFCAGCNRIRLTVDGKLKTCLYREDKVIDISGILKSGLSEDDKLELIKEAFKLAIAIREPNFKYTL

SEQ ID NO: 35360 - protein, 85 aa, unidentified
  REGION 1..85: note = Description of Unknown:cds_NZ_WFIY01000004.1_cds_WP_155862556.1_325 target sequence
MEGEGSEILSGLPLRDILLVAKASKDFGIKYIKLTGGEPTLRRDLIEIVKSLKSLGFEISMTTNGVLLPKLATKLKEAGLSRVNI

SEQ ID NO: 35361 - protein, 85 aa, unidentified
  REGION 1..85: note = Description of Unknown:cds_NZ_WFIY01000004.1_cds_WP_155862556.1_325 target sequence
SLHALDRKTFKKITGVDALDKVLEGIKSAINANLRPVKLNFVVNKININEVKEIIDFSEKLGIDELHLIEMHPVGLGKSSFSYHE

SEQ ID NO: 35362 - protein, 85 aa, unidentified
  REGION 1..85: note = Description of Unknown:cds_NZ_WFIY01000004.1_cds_WP_155862556.1_325 target sequence
NLNIIEDYLKKNSTKVTIRNKHFRPRYYLNSGLVVEVVKPYANPIFCAGCNRIRLTVDGKLKTCLYREDKVIDISGILKSGLSED

SEQ ID NO: 35363 - protein, 85 aa, unidentified
  REGION 1..85: note = Description of Unknown:cds_NZ_WFIY01000004.1_cds_WP_155863391.1_1367 target sequence
RYLILGLGFLSTHIAEYISKYGEVTVTYRSLERVKEVYYKLLREKGVNFVKLDPLNNLDLLKRIIESNDVIINTIGKFGNVDVET

SEQ ID NO: 35364 - protein, 85 aa, unidentified
  REGION 1..85: note = Description of Unknown:cds_NZ_WFIY01000004.1_cds_WP_155863391.1_1367 target sequence
AHVEIPKKVAENVQNQVLIHVSSAAATGLTGEVKEEDEHCKNVSPKTPYEISKCEGEKAVMKIAKEKGFPLAIIRPTFIYGKYGA

SEQ ID NO: 35365 - protein, 85 aa, unidentified
  REGION 1..85: note = Description of Unknown:cds_NZ_WFIY01000004.1_cds_WP_155863391.1_1367 target sequence
HVHFVLMYWLSKFGIVPSMGISLSTISANRIAEIVRVLAEAKPRGVYMYAHECELVNFDRFFEIMAEALGRKKVIKLPMNKNILP

SEQ ID NO: 35366 - protein, 84 aa, unidentified
  REGION 1..84: note = Description of Unknown:cds_NZ_WFIY01000004.1_cds_WP_155863391.1_1367 target sequence
ELVNFDRFFEIMAEALGRKKVIKLPMNKNILPPDFKCTLKYSGTRYDCTRITEYIGKVSFDEKEVSQNALFMDYLRRSGLLLAT

SEQ ID NO: 35367 - protein, 85 aa, unidentified
  REGION 1..85: note = Description of Unknown:cds_NZ_WFIY01000004.1_cds_WP_155863391.1_1367 target sequence
YRSLERVKEVYYKLLREKGVNFVKLDPLNNLDLLKRIIESNDVIINTIGKFGNVDVETAHVEIPKKVAENVQNQVLIHVSSAAAT

SEQ ID NO: 35368 - protein, 85 aa, unidentified
  REGION 1..85: note = Description of Unknown:cds_NZ_WFIY01000004.1_cds_WP_155863391.1_1367 target sequence
GLTGEVKEEDEHCKNVSPKTPYEISKCEGEKAVMKIAKEKGFPLAIIRPTFIYGKYGAHVHFVLMYWLSKFGIVPSMGISLSTIS

SEQ ID NO: 35369 - protein, 85 aa, unidentified
  REGION 1..85: note = Description of Unknown:cds_NZ_WFIY01000004.1_cds_WP_155863391.1_1367 target sequence
ANRIAEIVRVLAEAKPRGVYMYAHECELVNFDRFFEIMAEALGRKKVIKLPMNKNILPPDFKCTLKYSGTRYDCTRITEYIGKVS

SEQ ID NO: 35370 - protein, 85 aa, unidentified
  REGION 1..85: note = Description of Unknown:cds_NZ_WFIY01000004.1_cds_WP_155863695.1_1554 target sequence
LIETVDLTKIFKIKRKEIKALDSISINVEKGKIGALVGHNGAGKTTLLKILSTLVLPTSGDAFINGYSVTREEKKVRENIGLVTV

SEQ ID NO: 35371 - protein, 85 aa, unidentified
  REGION 1..85: note = Description of Unknown:cds_NZ_WFIY01000004.1_cds_WP_155863695.1_1554 target sequence
SERAFYYRLTALDNLIFFASLQGLSLGDARKRANQLLDFVGLSEWKNVPYMKFSTGMQKKLALARALMTDPPVLLMDEPTLGLDL

SEQ ID NO: 35372 - protein, 85 aa, unidentified
  REGION 1..85: note = Description of Unknown:cds_NZ_WFIY01000004.1_cds_WP_155863695.1_1554 target sequence
VSAREFRATIRKLKEKNKTILLSSHYLREIEELADIIFLIKRGKIVASGTLDELKRMTGKVLEIITHEINDEIRKFVIYSTDKDY

SEQ ID NO: 35373 - protein, 84 aa, unidentified
  REGION 1..84: note = Description of Unknown:cds_NZ_WFIY01000004.1_cds_WP_155863695.1_1554 target sequence
KRMTGKVLEIITHEINDEIRKFVIYSTDKDYILRIPETEIDKVTVHYKEVEEKDPTLDDIYIHFVGEVEEDIGRGRSRPWRLRE

SEQ ID NO: 35374 - protein, 85 aa, unidentified
  REGION 1..85: note = Description of Unknown:cds_NZ_WFIY01000004.1_cds_WP_155863695.1_1554 target sequence
VEKGKIGALVGHNGAGKTTLLKILSTLVLPTSGDAFINGYSVTREEKKVRENIGLVTVSERAFYYRLTALDNLIFFASLQGLSLG

SEQ ID NO: 35375 - protein, 85 aa, unidentified
  REGION 1..85: note = Description of Unknown:cds_NZ_WFIY01000004.1_cds_WP_155863695.1_1554 target sequence
DARKRANQLLDFVGLSEWKNVPYMKFSTGMQKKLALARALMTDPPVLLMDEPTLGLDLVSAREFRATIRKLKEKNKTILLSSHYL

SEQ ID NO: 35376 - protein, 85 aa, unidentified
  REGION 1..85: note = Description of Unknown:cds_NZ_WFIY01000004.1_cds_WP_155863695.1_1554 target sequence
REIEELADIIFLIKRGKIVASGTLDELKRMTGKVLEIITHEINDEIRKFVIYSTDKDYILRIPETEIDKVTVHYKEVEEKDPTLD

SEQ ID NO: 35377 - protein, 85 aa, unidentified
  REGION 1..85: note = Description of Unknown:cds_NZ_WFIY01000004.1_cds_WP_155864449.1_1629 target sequence
LYIDKCKLIVRFIVKVLLGIPDARIPIWELNTPLMINQLVWDNITWDNETWVDSGGYQIMVKGFSLQVDAVLKKYLSLHADNFMS

SEQ ID NO: 35378 - protein, 85 aa, unidentified
  REGION 1..85: note = Description of Unknown:cds_NZ_WFIY01000004.1_cds_WP_155864449.1_1629 target sequence
LDVPSFCTDVNEINFRNFEYLYEKINVMPIIHAYTPDGIEKAIEFYSQYTDKMAYGGIVPPSLSGSKKLVIMIYHYLRRKVKYLH

SEQ ID NO: 35379 - protein, 85 aa, unidentified
  REGION 1..85: note = Description of Unknown:cds_NZ_WFIY01000004.1_cds_WP_155864449.1_1629 target sequence
VLGAGSPYMRELFFNADSVDTATYRIKASRGLVIIPGKGERYVGDRKIVWKAKRATDEDIELLLDFLERTRFPYKVDLKNWVSRA

SEQ ID NO: 35380 - protein, 84 aa, unidentified
  REGION 1..84: note = Description of Unknown:cds_NZ_WFIY01000004.1_cds_WP_155864449.1_1629 target sequence
ATDEDIELLLDFLERTRFPYKVDLKNWVSRALINAWVLLNSKYEEHNYLIDFSRKVDKMGSDYLKGEIEEMCNAVSSSFRATNN

SEQ ID NO: 35381 - protein, 85 aa, unidentified
  REGION 1..85: note = Description of Unknown:cds_NZ_WFIY01000004.1_cds_WP_155864449.1_1629 target sequence
WELNTPLMINQLVWDNITWDNETWVDSGGYQIMVKGFSLQVDAVLKKYLSLHADNFMSLDVPSFCTDVNEINFRNFEYLYEKINV

SEQ ID NO: 35382 - protein, 85 aa, unidentified
  REGION 1..85: note = Description of Unknown:cds_NZ_WFIY01000004.1_cds_WP_155864449.1_1629 target sequence
MPIIHAYTPDGIEKAIEFYSQYTDKMAYGGIVPPSLSGSKKLVIMIYHYLRRKVKYLHVLGAGSPYMRELFFNADSVDTATYRIK

SEQ ID NO: 35383 - protein, 85 aa, unidentified
  REGION 1..85: note = Description of Unknown:cds_NZ_WFIY01000004.1_cds_WP_155864449.1_1629 target sequence
ASRGLVIIPGKGERYVGDRKIVWKAKRATDEDIELLLDFLERTRFPYKVDLKNWVSRALINAWVLLNSKYEEHNYLIDFSRKVDK

SEQ ID NO: 35384 - protein, 85 aa, unidentified
  REGION 1..85: note = Description of Unknown:cds_NZ_WFIY01000004.1_cds_WP_155863857.1_1757 target sequence
EIKPLAFESLGVRSQATFIETKDVRILVDPAVSLAPRRYGLPPHQREVDRLTELAKVITEKAREADIIIVTHYHYDHHDPGFIIP

SEQ ID NO: 35385 - protein, 85 aa, unidentified
  REGION 1..85: note = Description of Unknown:cds_NZ_WFIY01000004.1_cds_WP_155863857.1_1757 target sequence
KDIYKNKKVFIKDPKENINMSQKRVRAPRFLNSIHGLPESIETAEGKEIQIGSTKIIFSQAVPHGADERLGYVVQVAIKDGDQTV

SEQ ID NO: 35386 - protein, 85 aa, unidentified
  REGION 1..85: note = Description of Unknown:cds_NZ_WFIY01000004.1_cds_WP_155863857.1_1757 target sequence
LITSDIEGAPKDQHLEFTLKVKPNVIIIDGPLSYLLGYALKQEDLDNSIKNLERVVKEGAETMIVDHHVLRDLNYKAVLSNVYEV

SEQ ID NO: 35387 - protein, 84 aa, unidentified
  REGION 1..84: note = Description of Unknown:cds_NZ_WFIY01000004.1_cds_WP_155863857.1_1757 target sequence
RVVKEGAETMIVDHHVLRDLNYKAVLSNVYEVARSVNAKVITAAEFLNTEPLILEARRRELFKEENKPARIPRNLAQLLTAGGQ

SEQ ID NO: 35388 - protein, 85 aa, unidentified
  REGION 1..85: note = Description of Unknown:cds_NZ_WFIY01000004.1_cds_WP_155863857.1_1757 target sequence
VDPAVSLAPRRYGLPPHQREVDRLTELAKVITEKAREADIIIVTHYHYDHHDPGFIIPKDIYKNKKVFIKDPKENINMSQKRVRA

SEQ ID NO: 35389 - protein, 85 aa, unidentified
  REGION 1..85: note = Description of Unknown:cds_NZ_WFIY01000004.1_cds_WP_155863857.1_1757 target sequence
PRFLNSIHGLPESIETAEGKEIQIGSTKIIFSQAVPHGADERLGYVVQVAIKDGDQTVLITSDIEGAPKDQHLEFTLKVKPNVII

SEQ ID NO: 35390 - protein, 85 aa, unidentified
  REGION 1..85: note = Description of Unknown:cds_NZ_WFIY01000004.1_cds_WP_155863857.1_1757 target sequence
IDGPLSYLLGYALKQEDLDNSIKNLERVVKEGAETMIVDHHVLRDLNYKAVLSNVYEVARSVNAKVITAAEFLNTEPLILEARRR

SEQ ID NO: 35391 - protein, 85 aa, unidentified
  REGION 1..85: note = Description of Unknown:cds_NC_003214.2_cds_NP_445718.1_53 target sequence
VKVKVRSYFTISVEDRTKRLHNTLSAEYIYLIQGLLTQGQSYKAPYSGYTVAFTPPSNMYFVFLSNGVVVARFPAKLLSYNENIN

SEQ ID NO: 35392 - protein, 85 aa, unidentified
  REGION 1..85: note = Description of Unknown:cds_NC_003214.2_cds_NP_445718.1_53 target sequence
TVNASQCQNNLTSCNLNNLLFSLEYSSTDETNDTYTFDEVQLWADNEYMIAYASVGTTTKNVNTFVRVTWDAIVTIESDNVLYIP

SEQ ID NO: 35393 - protein, 85 aa, unidentified
  REGION 1..85: note = Description of Unknown:cds_NC_003214.2_cds_NP_445718.1_53 target sequence
GCTDFSLMLNLQLQLNNYQPYLCLNLPYIIVALTLVPYSLVPQNTFLYTQLSTLLKILNISSTQQLQLQGVQYYVVGNTVYPISQ

SEQ ID NO: 35394 - protein, 84 aa, unidentified
  REGION 1..84: note = Description of Unknown:cds_NC_003214.2_cds_NP_445718.1_53 target sequence
LKILNISSTQQLQLQGVQYYVVGNTVYPISQPYIIINTQQPNTITLFLLYGINNNYFIYTTSLSVTIQYFKLYIPTLTINMVEQ

SEQ ID NO: 35395 - protein, 85 aa, unidentified
  REGION 1..85: note = Description of Unknown:cds_NC_003214.2_cds_NP_445718.1_53 target sequence
YIYLIQGLLTQGQSYKAPYSGYTVAFTPPSNMYFVFLSNGVVVARFPAKLLSYNENINTVNASQCQNNLTSCNLNNLLFSLEYSS

SEQ ID NO: 35396 - protein, 85 aa, unidentified
  REGION 1..85: note = Description of Unknown:cds_NC_003214.2_cds_NP_445718.1_53 target sequence
TDETNDTYTFDEVQLWADNEYMIAYASVGTTTKNVNTFVRVTWDAIVTIESDNVLYIPGCTDFSLMLNLQLQLNNYQPYLCLNLP

SEQ ID NO: 35397 - protein, 85 aa, unidentified
  REGION 1..85: note = Description of Unknown:cds_NC_003214.2_cds_NP_445718.1_53 target sequence
YIIVALTLVPYSLVPQNTFLYTQLSTLLKILNISSTQQLQLQGVQYYVVGNTVYPISQPYIIINTQQPNTITLFLLYGINNNYFI

SEQ ID NO: 35398 - protein, 85 aa, unidentified
  REGION 1..85: note = Description of Unknown:hvTR_Q6TVA4 target sequence
FQPVPDMSVEADIKLGDVSVDATRAGAREKTVFFARNKRMYPHRSKDEERKLSLGFFLQRLDFLTSKEVNLQFRSLDAVKTETVL

SEQ ID NO: 35399 - protein, 85 aa, unidentified
  REGION 1..85: note = Description of Unknown:hvTR_Q6TVA4 target sequence
KKNNVLVAPYILIATLAGRGFRLTETMVEIYFPELYRETSKRFRFGAQIRIIQEFMGYATDSYHTYDFETYFAFMALVIRGADTD

SEQ ID NO: 35400 - protein, 85 aa, unidentified
  REGION 1..85: note = Description of Unknown:hvTR_Q6TVA4 target sequence
VEAFDVRPESGLVRSLTEITYRLYVMQLRSDAAQWSVSTGSVVSQVVNTVLTVVCELADRAEAEGAVPVCDLARENPLSVEDLRK

SEQ ID NO: 35401 - protein, 84 aa, unidentified
  REGION 1..84: note = Description of Unknown:hvTR_Q6TVA4 target sequence
VVCELADRAEAEGAVPVCDLARENPLSVEDLRKYGTRMRALLTTMTRARSFKINRRDRDALSRFCRLAPGATSCPTSGCSASSA

SEQ ID NO: 35402 - protein, 85 aa, unidentified
  REGION 1..85: note = Description of Unknown:hvTR_Q6TVA4 target sequence
REKTVFFARNKRMYPHRSKDEERKLSLGFFLQRLDFLTSKEVNLQFRSLDAVKTETVLKKNNVLVAPYILIATLAGRGFRLTETM

SEQ ID NO: 35403 - protein, 85 aa, unidentified
  REGION 1..85: note = Description of Unknown:hvTR_Q6TVA4 target sequence
VEIYFPELYRETSKRFRFGAQIRIIQEFMGYATDSYHTYDFETYFAFMALVIRGADTDVEAFDVRPESGLVRSLTEITYRLYVMQ

SEQ ID NO: 35404 - protein, 85 aa, unidentified
  REGION 1..85: note = Description of Unknown:hvTR_Q6TVA4 target sequence
LRSDAAQWSVSTGSVVSQVVNTVLTVVCELADRAEAEGAVPVCDLARENPLSVEDLRKYGTRMRALLTTMTRARSFKINRRDRDA

SEQ ID NO: 35405 - protein, 85 aa, unidentified
  REGION 1..85: note = Description of Unknown:cds_NZ_WFIY01000004.1_cds_WP_155862478.1_234 target sequence
LKGNSLLCLLDLEKEDIERIMEVSFLMKNFVKTNSVPKSLDGKRVALIFEKPSTRTRVSMESAIYLLGGYPIVLNKSDIQLSRGE

SEQ ID NO: 35406 - protein, 85 aa, unidentified
  REGION 1..85: note = Description of Unknown:cds_NZ_WFIY01000004.1_cds_WP_155862478.1_234 target sequence
PVEDTARVLARFVHGIGARVLSHESLIKLKEYSGLPVINLLSNLSHPLQALADFMTIKEKFGTYEKPIAFVGDGGDNVLVSLMAF

SEQ ID NO: 35407 - protein, 85 aa, unidentified
  REGION 1..85: note = Description of Unknown:cds_NZ_WFIY01000004.1_cds_WP_155862478.1_234 target sequence
VAKMGLELRVASPKELRPKPEIWKRIEEESEKSGAIIEFYDDPYFAVRGSFVVYTDVWVSMGEENIANKKKELLKNYRVTTDLMR

SEQ ID NO: 35408 - protein, 84 aa, unidentified
  REGION 1..84: note = Description of Unknown:cds_NZ_WFIY01000004.1_cds_WP_155862478.1_234 target sequence
VYTDVWVSMGEENIANKKKELLKNYRVTTDLMRYASKDAIFMHCLPAMRGEEVDAEVIDGKQSVVWDEAENRLYTAMSVLSLFI

SEQ ID NO: 35409 - protein, 85 aa, unidentified
  REGION 1..85: note = Description of Unknown:cds_NZ_WFIY01000004.1_cds_WP_155862478.1_234 target sequence
KNFVKTNSVPKSLDGKRVALIFEKPSTRTRVSMESAIYLLGGYPIVLNKSDIQLSRGEPVEDTARVLARFVHGIGARVLSHESLI

SEQ ID NO: 35410 - protein, 85 aa, unidentified
  REGION 1..85: note = Description of Unknown:cds_NZ_WFIY01000004.1_cds_WP_155862478.1_234 target sequence
KLKEYSGLPVINLLSNLSHPLQALADFMTIKEKFGTYEKPIAFVGDGGDNVLVSLMAFVAKMGLELRVASPKELRPKPEIWKRIE

SEQ ID NO: 35411 - protein, 85 aa, unidentified
  REGION 1..85: note = Description of Unknown:cds_NZ_WFIY01000004.1_cds_WP_155862478.1_234 target sequence
EESEKSGAIIEFYDDPYFAVRGSFVVYTDVWVSMGEENIANKKKELLKNYRVTTDLMRYASKDAIFMHCLPAMRGEEVDAEVIDG

SEQ ID NO: 35412 - protein, 85 aa, unidentified
  REGION 1..85: note = Description of Unknown:cds_NZ_WFIY01000004.1_cds_WP_155864374.1_546 target sequence
HHVENPDRLTRALSSLKGEKIVEPIKVEDPQIVHSEDYVEKIRNIKGEKWIDADTYANDKTYETALYALGGALKAFELQGFALVR

SEQ ID NO: 35413 - protein, 85 aa, unidentified
  REGION 1..85: note = Description of Unknown:cds_NZ_WFIY01000004.1_cds_WP_155864374.1_546 target sequence
PPGHHAGKNGRAFNAPTLGFCIFNNVAYVVRKKALKHVAIIDFDVHYGNGTQEIFYDDPEVLHIDIHQDPKTIFPGTGFPEMVGK

SEQ ID NO: 35414 - protein, 85 aa, unidentified
  REGION 1..85: note = Description of Unknown:cds_NZ_WFIY01000004.1_cds_WP_155864374.1_546 target sequence
GEAEGTKVNLLIPPRGSDDLYEELFPLIQSILEDFKPAYIIFSAGFDGFKGDGLASLNLTEYTFYNLGSLGKGKYSAGVLEGGYG

SEQ ID NO: 35415 - protein, 84 aa, unidentified
  REGION 1..84: note = Description of Unknown:cds_NZ_WFIY01000004.1_cds_WP_155864374.1_546 target sequence
GLASLNLTEYTFYNLGSLGKGKYSAGVLEGGYGIGLERGLPAFIKGLKGEIADYAEEKSPDSVKSRFFDYLEKEKEILRNYWKI

SEQ ID NO: 35416 - protein, 85 aa, unidentified
  REGION 1..85: note = Description of Unknown:cds_NZ_WFIY01000004.1_cds_WP_155864374.1_546 target sequence
EDPQIVHSEDYVEKIRNIKGEKWIDADTYANDKTYETALYALGGALKAFELQGFALVRPPGHHAGKNGRAFNAPTLGFCIFNNVA

SEQ ID NO: 35417 - protein, 85 aa, unidentified
  REGION 1..85: note = Description of Unknown:cds_NZ_WFIY01000004.1_cds_WP_155864374.1_546 target sequence
YVVRKKALKHVAIIDFDVHYGNGTQEIFYDDPEVLHIDIHQDPKTIFPGTGFPEMVGKGEAEGTKVNLLIPPRGSDDLYEELFPL

SEQ ID NO: 35418 - protein, 85 aa, unidentified
  REGION 1..85: note = Description of Unknown:cds_NZ_WFIY01000004.1_cds_WP_155864374.1_546 target sequence
IQSILEDFKPAYIIFSAGFDGFKGDGLASLNLTEYTFYNLGSLGKGKYSAGVLEGGYGIGLERGLPAFIKGLKGEIADYAEEKSP

SEQ ID NO: 35419 - protein, 85 aa, unidentified
  REGION 1..85: note = Description of Unknown:cds_NZ_WFIY01000004.1_cds_WP_155862832.1_661 target sequence
KRFSERQLIGLILTVIISAVVIGLAIFTLANLKVIPANYTLYFYATIWFVGAVLIAYLISEIVKNRLGNFIGASNATSIAFITRL

SEQ ID NO: 35420 - protein, 85 aa, unidentified
  REGION 1..85: note = Description of Unknown:cds_NZ_WFIY01000004.1_cds_WP_155862832.1_661 target sequence
LGYIIAFIGFFLLVHVSIGAALAAGGFAGLVLGLASQTVLSNIFGGIMLLFSRPYKVGDRITISTWQYGLIAPTYPPKFFSNDFL

SEQ ID NO: 35421 - protein, 85 aa, unidentified
  REGION 1..85: note = Description of Unknown:cds_NZ_WFIY01000004.1_cds_WP_155862832.1_661 target sequence
IPGYTGVVTDISLLYTTIYTDDKVPVKIPNSIMVQAAIFIHNSEEVRKIRSKYEVSKDLDPETVIKELKPKIERIEGVLEVDIKV

SEQ ID NO: 35422 - protein, 84 aa, unidentified
  REGION 1..84: note = Description of Unknown:cds_NZ_WFIY01000004.1_cds_WP_155862832.1_661 target sequence
YEVSKDLDPETVIKELKPKIERIEGVLEVDIKVLETTFTTYILGIDTLAKSIFEEPIRDQVLRITMKTIKELQIGNGQKQLAKS

SEQ ID NO: 35423 - protein, 85 aa, unidentified
  REGION 1..85: note = Description of Unknown:cds_NZ_WFIY01000004.1_cds_WP_155862832.1_661 target sequence
TLANLKVIPANYTLYFYATIWFVGAVLIAYLISEIVKNRLGNFIGASNATSIAFITRLLGYIIAFIGFFLLVHVSIGAALAAGGF

SEQ ID NO: 35424 - protein, 85 aa, unidentified
  REGION 1..85: note = Description of Unknown:cds_NZ_WFIY01000004.1_cds_WP_155862832.1_661 target sequence
AGLVLGLASQTVLSNIFGGIMLLFSRPYKVGDRITISTWQYGLIAPTYPPKFFSNDFLIPGYTGVVTDISLLYTTIYTDDKVPVK

SEQ ID NO: 35425 - protein, 85 aa, unidentified
  REGION 1..85: note = Description of Unknown:cds_NZ_WFIY01000004.1_cds_WP_155862832.1_661 target sequence
IPNSIMVQAAIFIHNSEEVRKIRSKYEVSKDLDPETVIKELKPKIERIEGVLEVDIKVLETTFTTYILGIDTLAKSIFEEPIRDQ

SEQ ID NO: 35426 - protein, 85 aa, unidentified
  REGION 1..85: note = Description of Unknown:cds_NZ_WFIY01000004.1_cds_WP_155863185.1_1117 target sequence
LENYLKWDSLFDQAIKEAKEINFEIKTDRIIFTGMGGSYIPGKIAEILDYNVDYRAITGIPRKVDENTTLIAMSYSGTTSETIQA

SEQ ID NO: 35427 - protein, 85 aa, unidentified
  REGION 1..85: note = Description of Unknown:cds_NZ_WFIY01000004.1_cds_WP_155863185.1_1117 target sequence
VKEGLEKGSKIVVISSDGNLEKIAEEHKEKIYFIKVKGLSQTRYSFPVLITPLLKILSTVSINKINLDELKEGIIENKEKYKDLG

SEQ ID NO: 35428 - protein, 85 aa, unidentified
  REGION 1..85: note = Description of Unknown:cds_NZ_WFIY01000004.1_cds_WP_155863185.1_1117 target sequence
KELSSKIIGKIPVFYASTYLPIAIRFKQEINENAKSPAFYGEIPEVNHNEVESYVRGKELLLPIVIGNDRIDDVTADVLNAERIM

SEQ ID NO: 35429 - protein, 84 aa, unidentified
  REGION 1..84: note = Description of Unknown:cds_NZ_WFIY01000004.1_cds_WP_155863185.1_1117 target sequence
SYVRGKELLLPIVIGNDRIDDVTADVLNAERIMPPSSSKLKNISSLVLLAGLTSIYLADTLKENPEKLSIIPKCRERTSVIFKG

SEQ ID NO: 35430 - protein, 85 aa, unidentified
  REGION 1..85: note = Description of Unknown:cds_NZ_WFIY01000004.1_cds_WP_155863185.1_1117 target sequence
DRIIFTGMGGSYIPGKIAEILDYNVDYRAITGIPRKVDENTTLIAMSYSGTTSETIQAVKEGLEKGSKIVVISSDGNLEKIAEEH

SEQ ID NO: 35431 - protein, 85 aa, unidentified
  REGION 1..85: note = Description of Unknown:cds_NZ_WFIY01000004.1_cds_WP_155863185.1_1117 target sequence
KEKIYFIKVKGLSQTRYSFPVLITPLLKILSTVSINKINLDELKEGIIENKEKYKDLGKELSSKIIGKIPVFYASTYLPIAIRFK

SEQ ID NO: 35432 - protein, 85 aa, unidentified
  REGION 1..85: note = Description of Unknown:cds_NZ_WFIY01000004.1_cds_WP_155863185.1_1117 target sequence
QEINENAKSPAFYGEIPEVNHNEVESYVRGKELLLPIVIGNDRIDDVTADVLNAERIMPPSSSKLKNISSLVLLAGLTSIYLADT

SEQ ID NO: 35433 - protein, 85 aa, unidentified
  REGION 1..85: note = Description of Unknown:cds_NZ_WFIY01000004.1_cds_WP_155863717.1_1581 target sequence
TGEIKLMFVTDLHGSEIAYRKALNAAKMHNVNYLIIGGDITSKNIVFIERSGDKYYFNDNEVDIKTVYEDARKYGYYIHVASKDE

SEQ ID NO: 35434 - protein, 85 aa, unidentified
  REGION 1..85: note = Description of Unknown:cds_NZ_WFIY01000004.1_cds_WP_155863717.1_1581 target sequence
IQKILENKEFFESVKRTLIEKQIDNWIKIAEEKLTGTNIKVFWSYGNDDPLYLDEVFSKYNIRDEGIFELEEGKTNTLYLISYGY

SEQ ID NO: 35435 - protein, 85 aa, unidentified
  REGION 1..85: note = Description of Unknown:cds_NZ_WFIY01000004.1_cds_WP_155863717.1_1581 target sequence
VNPTPFKSYREEPDSTIYIKGEDYLRKIDDPERAILNFHAPPYNTKLDIAIIDGKKREHVGSRGVRDLIEKYRPLLGLHGHIIES

SEQ ID NO: 35436 - protein, 84 aa, unidentified
  REGION 1..84: note = Description of Unknown:cds_NZ_WFIY01000004.1_cds_WP_155863717.1_1581 target sequence
DGKKREHVGSRGVRDLIEKYRPLLGLHGHIIESPATDKIKNTIVVNPGSLAYEGLLKYSIIVIERKLEGLLVKYKIKGAAILSG

SEQ ID NO: 35437 - protein, 85 aa, unidentified
  REGION 1..85: note = Description of Unknown:cds_NZ_WFIY01000004.1_cds_WP_155863717.1_1581 target sequence
MHNVNYLIIGGDITSKNIVFIERSGDKYYFNDNEVDIKTVYEDARKYGYYIHVASKDEIQKILENKEFFESVKRTLIEKQIDNWI

SEQ ID NO: 35438 - protein, 85 aa, unidentified
  REGION 1..85: note = Description of Unknown:cds_NZ_WFIY01000004.1_cds_WP_155863717.1_1581 target sequence
KIAEEKLTGTNIKVFWSYGNDDPLYLDEVFSKYNIRDEGIFELEEGKTNTLYLISYGYVNPTPFKSYREEPDSTIYIKGEDYLRK

SEQ ID NO: 35439 - protein, 85 aa, unidentified
  REGION 1..85: note = Description of Unknown:cds_NZ_WFIY01000004.1_cds_WP_155863717.1_1581 target sequence
IDDPERAILNFHAPPYNTKLDIAIIDGKKREHVGSRGVRDLIEKYRPLLGLHGHIIESPATDKIKNTIVVNPGSLAYEGLLKYSI

SEQ ID NO: 35440 - protein, 85 aa, unidentified
  REGION 1..85: note = Description of Unknown:cds_NC_029316.1_cds_YP_009230328.1_75 target sequence
VTPTPINNSNKRDNKPFGDAEKLARIVDQAIMQAKLQRIYDVVKDYQVNDTTSIITDDDRVGDNEEKVEDEEEVLSKSKQLDIND

SEQ ID NO: 35441 - protein, 85 aa, unidentified
  REGION 1..85: note = Description of Unknown:cds_NC_029316.1_cds_YP_009230328.1_75 target sequence
FNVTFRVPKNLRLYDQAKFTISMLKSFIEDLGVKVKYIVSDKRKLCAIEIDLGQKMHTSHERYVLSFIVNEQTSKNIVPSEVKKR

SEQ ID NO: 35442 - protein, 85 aa, unidentified
  REGION 1..85: note = Description of Unknown:cds_NC_029316.1_cds_YP_009230328.1_75 target sequence
FENEWKYLMRQLKITGFDSMTYVFVAKRKFTYGAYKLVEKMNKGVGNIIYSTDIVSAITRFFTNNKFLAIRLYNYLYKIKGNLTA

SEQ ID NO: 35443 - protein, 84 aa, unidentified
  REGION 1..84: note = Description of Unknown:cds_NC_029316.1_cds_YP_009230328.1_75 target sequence
IVSAITRFFTNNKFLAIRLYNYLYKIKGNLTANNIMKITGLISIINAIYRLLTGKVVVDKLILKTLKTPDDVIKVLDKFFRKKK

SEQ ID NO: 35444 - protein, 85 aa, unidentified
  REGION 1..85: note = Description of Unknown:cds_NC_029316.1_cds_YP_009230328.1_75 target sequence
DQAIMQAKLQRIYDVVKDYQVNDTTSIITDDDRVGDNEEKVEDEEEVLSKSKQLDINDFNVTFRVPKNLRLYDQAKFTISMLKSF

SEQ ID NO: 35445 - protein, 85 aa, unidentified
  REGION 1..85: note = Description of Unknown:cds_NC_029316.1_cds_YP_009230328.1_75 target sequence
IEDLGVKVKYIVSDKRKLCAIEIDLGQKMHTSHERYVLSFIVNEQTSKNIVPSEVKKRFENEWKYLMRQLKITGFDSMTYVFVAK

SEQ ID NO: 35446 - protein, 85 aa, unidentified
  REGION 1..85: note = Description of Unknown:cds_NC_029316.1_cds_YP_009230328.1_75 target sequence
RKFTYGAYKLVEKMNKGVGNIIYSTDIVSAITRFFTNNKFLAIRLYNYLYKIKGNLTANNIMKITGLISIINAIYRLLTGKVVVD

SEQ ID NO: 35447 - protein, 85 aa, unidentified
  REGION 1..85: note = Description of Unknown:cds_NC_005830.1_cds_YP_003756.1_31 target sequence
VTRRYRSNPAVIPVPFPVPLPITEQTTPQIPPPSPTAIQFTCFGIPIYQSPSVPKSYAVVNVVSHNVFYGCSGDTCFEGVEGVDI

SEQ ID NO: 35448 - protein, 85 aa, unidentified
  REGION 1..85: note = Description of Unknown:cds_NC_005830.1_cds_YP_003756.1_31 target sequence
RSFVFLPINLFAYIFACEAPLETQETQGTQTIIVITESKPLYNTDKVTQVNQIVQGQFTDKSEVLSINYGDVNVTDINYLSFIQT

SEQ ID NO: 35449 - protein, 85 aa, unidentified
  REGION 1..85: note = Description of Unknown:cds_NC_005830.1_cds_YP_003756.1_31 target sequence
GLQIATKFTLPLCDRISIFKTPFELAVAKTLYLEIVGKERPELTAILDFMQSLDAEISGIIETDYQEIEPNGKLTDVISKPIQNQ

SEQ ID NO: 35450 - protein, 84 aa, unidentified
  REGION 1..84: note = Description of Unknown:cds_NC_005830.1_cds_YP_003756.1_31 target sequence
DAEISGIIETDYQEIEPNGKLTDVISKPIQNQLPLQILPGLILGESYQFNTNNILMQTEIETEIGEQLYTDGITFETELTVKQS

SEQ ID NO: 35451 - protein, 85 aa, unidentified
  REGION 1..85: note = Description of Unknown:cds_NC_005830.1_cds_YP_003756.1_31 target sequence
PQIPPPSPTAIQFTCFGIPIYQSPSVPKSYAVVNVVSHNVFYGCSGDTCFEGVEGVDIRSFVFLPINLFAYIFACEAPLETQETQ

SEQ ID NO: 35452 - protein, 85 aa, unidentified
  REGION 1..85: note = Description of Unknown:cds_NC_005830.1_cds_YP_003756.1_31 target sequence
GTQTIIVITESKPLYNTDKVTQVNQIVQGQFTDKSEVLSINYGDVNVTDINYLSFIQTGLQIATKFTLPLCDRISIFKTPFELAV

SEQ ID NO: 35453 - protein, 85 aa, unidentified
  REGION 1..85: note = Description of Unknown:cds_NC_005830.1_cds_YP_003756.1_31 target sequence
AKTLYLEIVGKERPELTAILDFMQSLDAEISGIIETDYQEIEPNGKLTDVISKPIQNQLPLQILPGLILGESYQFNTNNILMQTE

SEQ ID NO: 35454 - protein, 85 aa, unidentified
  REGION 1..85: note = Description of Unknown:cds_NZ_WFIY01000004.1_cds_WP_155862373.1_107 target sequence
VDLIRFIGVLTILIIAAELLARGTENVERKFGQGIAGGVILGFLTALPETVITVYALLNREYEVAIGSAIGGNVILFTLGIGLVG

SEQ ID NO: 35455 - protein, 85 aa, unidentified
  REGION 1..85: note = Description of Unknown:cds_NZ_WFIY01000004.1_cds_WP_155862373.1_107 target sequence
LIYSFSWNRSLTMNYDYNVENNFLILNTIILAIIVFYGRFNIFTAIILSSIYILYIFYRIKKSKDEKENDKITNLSKSVIELAIG

SEQ ID NO: 35456 - protein, 85 aa, unidentified
  REGION 1..85: note = Description of Unknown:cds_NZ_WFIY01000004.1_cds_WP_155862373.1_107 target sequence
AILILAFSDLFVKCVVAISKEFNLPIAWTSLLITPIAAELEEKLSGIRLAMRNLNGGSLAIVSFVGSKIENSTLLLGLIGFFSSY

SEQ ID NO: 35457 - protein, 84 aa, unidentified
  REGION 1..84: note = Description of Unknown:cds_NZ_WFIY01000004.1_cds_WP_155862373.1_107 target sequence
RNLNGGSLAIVSFVGSKIENSTLLLGLIGFFSSYSFYNSLPELISAVIANVVGIAVLLDGKVTKYESVLLIALYFIIIYLDLIL

SEQ ID NO: 35458 - protein, 85 aa, unidentified
  REGION 1..85: note = Description of Unknown:cds_NZ_WFIY01000004.1_cds_WP_155862373.1_107 target sequence
ERKFGQGIAGGVILGFLTALPETVITVYALLNREYEVAIGSAIGGNVILFTLGIGLVGLIYSFSWNRSLTMNYDYNVENNFLILN

SEQ ID NO: 35459 - protein, 85 aa, unidentified
  REGION 1..85: note = Description of Unknown:cds_NZ_WFIY01000004.1_cds_WP_155862373.1_107 target sequence
TIILAIIVFYGRFNIFTAIILSSIYILYIFYRIKKSKDEKENDKITNLSKSVIELAIGAILILAFSDLFVKCVVAISKEFNLPIA

SEQ ID NO: 35460 - protein, 85 aa, unidentified
  REGION 1..85: note = Description of Unknown:cds_NZ_WFIY01000004.1_cds_WP_155862373.1_107 target sequence
WTSLLITPIAAELEEKLSGIRLAMRNLNGGSLAIVSFVGSKIENSTLLLGLIGFFSSYSFYNSLPELISAVIANVVGIAVLLDGK

SEQ ID NO: 35461 - protein, 85 aa, unidentified
  REGION 1..85: note = Description of Unknown:cds_NZ_WFIY01000004.1_cds_WP_155863167.1_1097 target sequence
LDKLLENALKGDELSISRVLTKIEYMTDEGMKYLEELSKKAGNAHTIGITGIPGAGKSTLISSLIEEFSKRRNKKIGVVMIDPSS

SEQ ID NO: 35462 - protein, 85 aa, unidentified
  REGION 1..85: note = Description of Unknown:cds_NZ_WFIY01000004.1_cds_WP_155863167.1_1097 target sequence
PISMGSFMGNRIRIQDKTMMNNVFIRSIASRGHLGGVSSEAIMLIEAMDGLGFNPIIVETVGAGQTDTEVVSSVHTITVVNVPGT

SEQ ID NO: 35463 - protein, 85 aa, unidentified
  REGION 1..85: note = Description of Unknown:cds_NZ_WFIY01000004.1_cds_WP_155863167.1_1097 target sequence
GDEIQALKAGIMEIGDIYVINKAEYPEADVLYDEIKFAIDSGNWDGWKPLVLKVSALKKIGIKELVDAIEAHEKYLKESGKFTKK

SEQ ID NO: 35464 - protein, 84 aa, unidentified
  REGION 1..84: note = Description of Unknown:cds_NZ_WFIY01000004.1_cds_WP_155863167.1_1097 target sequence
KVSALKKIGIKELVDAIEAHEKYLKESGKFTKKIDERRKKMIELIIRRKIDEKISEVINKEALDNWTDLLTIVNRIYDDVKKSL

SEQ ID NO: 35465 - protein, 85 aa, unidentified
  REGION 1..85: note = Description of Unknown:cds_NZ_WFIY01000004.1_cds_WP_155863167.1_1097 target sequence
DEGMKYLEELSKKAGNAHTIGITGIPGAGKSTLISSLIEEFSKRRNKKIGVVMIDPSSPISMGSFMGNRIRIQDKTMMNNVFIRS

SEQ ID NO: 35466 - protein, 85 aa, unidentified
  REGION 1..85: note = Description of Unknown:cds_NZ_WFIY01000004.1_cds_WP_155863167.1_1097 target sequence
IASRGHLGGVSSEAIMLIEAMDGLGFNPIIVETVGAGQTDTEVVSSVHTITVVNVPGTGDEIQALKAGIMEIGDIYVINKAEYPE

SEQ ID NO: 35467 - protein, 85 aa, unidentified
  REGION 1..85: note = Description of Unknown:cds_NZ_WFIY01000004.1_cds_WP_155863167.1_1097 target sequence
ADVLYDEIKFAIDSGNWDGWKPLVLKVSALKKIGIKELVDAIEAHEKYLKESGKFTKKIDERRKKMIELIIRRKIDEKISEVINK

SEQ ID NO: 35468 - protein, 85 aa, unidentified
  REGION 1..85: note = Description of Unknown:cds_NZ_WFIY01000004.1_cds_WP_155863191.1_1123 target sequence
LKLSETKVRTQNIVHYEQTNFMGRLHGGDMLKFLVDTGMLSAIKVAKTTSVIASLDNVVFKKGANLGDIIEVEAYVAYVGNTSME

SEQ ID NO: 35469 - protein, 85 aa, unidentified
  REGION 1..85: note = Description of Unknown:cds_NZ_WFIY01000004.1_cds_WP_155863191.1_1123 target sequence
VEMSAYRGDEKIVTATGVYVKIDENFRPQKVGEVIDYDNEEERAIIERAMKRRQNRIRSMKSNEDQTKGLRFRITNAVYISPDLT

SEQ ID NO: 35470 - protein, 85 aa, unidentified
  REGION 1..85: note = Description of Unknown:cds_NZ_WFIY01000004.1_cds_WP_155863191.1_1123 target sequence
YDGKIISAGKLLKMMDDLGGSLALKFIGYRGYDKYSDTVVTVAISNMSFYSPIKLGDIIEINAGLTYVGRTSLDVLINVFKNGKE

SEQ ID NO: 35471 - protein, 84 aa, unidentified
  REGION 1..84: note = Description of Unknown:cds_NZ_WFIY01000004.1_cds_WP_155863191.1_1123 target sequence
IKLGDIIEINAGLTYVGRTSLDVLINVFKNGKEKVTEAYFSYVRVDNEGKPKEMPRYYPETEVEKKLWQEAINRRNLQIKEKNL

SEQ ID NO: 35472 - protein, 85 aa, unidentified
  REGION 1..85: note = Description of Unknown:cds_NZ_WFIY01000004.1_cds_WP_155863191.1_1123 target sequence
GDMLKFLVDTGMLSAIKVAKTTSVIASLDNVVFKKGANLGDIIEVEAYVAYVGNTSMEVEMSAYRGDEKIVTATGVYVKIDENFR

SEQ ID NO: 35473 - protein, 85 aa, unidentified
  REGION 1..85: note = Description of Unknown:cds_NZ_WFIY01000004.1_cds_WP_155863191.1_1123 target sequence
PQKVGEVIDYDNEEERAIIERAMKRRQNRIRSMKSNEDQTKGLRFRITNAVYISPDLTYDGKIISAGKLLKMMDDLGGSLALKFI

SEQ ID NO: 35474 - protein, 85 aa, unidentified
  REGION 1..85: note = Description of Unknown:cds_NZ_WFIY01000004.1_cds_WP_155863191.1_1123 target sequence
GYRGYDKYSDTVVTVAISNMSFYSPIKLGDIIEINAGLTYVGRTSLDVLINVFKNGKEKVTEAYFSYVRVDNEGKPKEMPRYYPE

SEQ ID NO: 35475 - protein, 85 aa, unidentified
  REGION 1..85: note = Description of Unknown:cds_NZ_WFIY01000004.1_cds_WP_155864410.1_1202 target sequence
IKASFVGIGKIGQTIAYSAITRGIFDEVILYDIIPELPEKFEHELRHALASLRIDTEVIGTNSIDDVTGSDIVVVSAGKPRKPGM

SEQ ID NO: 35476 - protein, 85 aa, unidentified
  REGION 1..85: note = Description of Unknown:cds_NZ_WFIY01000004.1_cds_WP_155864410.1_1202 target sequence
SRRDLFADNAKIIINLAKELPKRNPGAVYVMVTNPVDMMASVFAKYSKEYVISTGDQVESMRLRAYISKILHVPVSQIDGFVGGE

SEQ ID NO: 35477 - protein, 85 aa, unidentified
  REGION 1..85: note = Description of Unknown:cds_NZ_WFIY01000004.1_cds_WP_155864410.1_1202 target sequence
HGEDAVVLWSTVTVNGKQVEDLPKEQIEKYVKSIPGDIIRVMGGTTWGPGTIIADIIKAIALNENRVMSIAVPRQYEDEIIHISI

SEQ ID NO: 35478 - protein, 84 aa, unidentified
  REGION 1..84: note = Description of Unknown:cds_NZ_WFIY01000004.1_cds_WP_155864410.1_1202 target sequence
IIADIIKAIALNENRVMSIAVPRQYEDEIIHISIPTVVGSKIGPTLEDHLSEDDRWHLIAAMKDYYSVYKDMLKSIKTEGEIAS

SEQ ID NO: 35479 - protein, 85 aa, unidentified
  REGION 1..85: note = Description of Unknown:cds_NZ_WFIY01000004.1_cds_WP_155864410.1_1202 target sequence
VILYDIIPELPEKFEHELRHALASLRIDTEVIGTNSIDDVTGSDIVVVSAGKPRKPGMSRRDLFADNAKIIINLAKELPKRNPGA

SEQ ID NO: 35480 - protein, 85 aa, unidentified
  REGION 1..85: note = Description of Unknown:cds_NZ_WFIY01000004.1_cds_WP_155864410.1_1202 target sequence
VYVMVTNPVDMMASVFAKYSKEYVISTGDQVESMRLRAYISKILHVPVSQIDGFVGGEHGEDAVVLWSTVTVNGKQVEDLPKEQI

SEQ ID NO: 35481 - protein, 85 aa, unidentified
  REGION 1..85: note = Description of Unknown:cds_NZ_WFIY01000004.1_cds_WP_155864410.1_1202 target sequence
EKYVKSIPGDIIRVMGGTTWGPGTIIADIIKAIALNENRVMSIAVPRQYEDEIIHISIPTVVGSKIGPTLEDHLSEDDRWHLIAA

SEQ ID NO: 35482 - protein, 85 aa, unidentified
  REGION 1..85: note = Description of Unknown:cds_NZ_WFIY01000004.1_cds_WP_155863817.1_1709 target sequence
PRYAIIDSDTASDDTIAILLASKFFKLLGITIVAGNVKFENEIKNALFTVEYFNLDVPVFIGSSRPIMGKWRTVEEVHGNNGIGD

SEQ ID NO: 35483 - protein, 85 aa, unidentified
  REGION 1..85: note = Description of Unknown:cds_NZ_WFIY01000004.1_cds_WP_155863817.1_1709 target sequence
WKIQEPKISPEREHAVDAIIRLSKEYEGELEILAVSPLTNLALAYLKDLNIVKRIKKVWIMGGAFSRGNTTPIAEFNFWVDPEAA

SEQ ID NO: 35484 - protein, 85 aa, unidentified
  REGION 1..85: note = Description of Unknown:cds_NZ_WFIY01000004.1_cds_WP_155863817.1_1709 target sequence
EIVLNAGFDITIVPWEIAEDAAEITDDEWKKIESINSKASTFFINVNKTLREYSKKYEGRGSIHTDSLTVTIAYDNSLILQQGEF

SEQ ID NO: 35485 - protein, 84 aa, unidentified
  REGION 1..84: note = Description of Unknown:cds_NZ_WFIY01000004.1_cds_WP_155863817.1_1709 target sequence
EYSKKYEGRGSIHTDSLTVTIAYDNSLILQQGEFKIDVETCSISRGAMLVDWYNFSKSKNAKIVLKADKQKFINYLFSILEQSA

SEQ ID NO: 35486 - protein, 85 aa, unidentified
  REGION 1..85: note = Description of Unknown:cds_NZ_WFIY01000004.1_cds_WP_155863817.1_1709 target sequence
LGITIVAGNVKFENEIKNALFTVEYFNLDVPVFIGSSRPIMGKWRTVEEVHGNNGIGDWKIQEPKISPEREHAVDAIIRLSKEYE

SEQ ID NO: 35487 - protein, 85 aa, unidentified
  REGION 1..85: note = Description of Unknown:cds_NZ_WFIY01000004.1_cds_WP_155863817.1_1709 target sequence
GELEILAVSPLTNLALAYLKDLNIVKRIKKVWIMGGAFSRGNTTPIAEFNFWVDPEAAEIVLNAGFDITIVPWEIAEDAAEITDD

SEQ ID NO: 35488 - protein, 85 aa, unidentified
  REGION 1..85: note = Description of Unknown:cds_NZ_WFIY01000004.1_cds_WP_155863817.1_1709 target sequence
EWKKIESINSKASTFFINVNKTLREYSKKYEGRGSIHTDSLTVTIAYDNSLILQQGEFKIDVETCSISRGAMLVDWYNFSKSKNA

SEQ ID NO: 35489 - protein, 85 aa, unidentified
  REGION 1..85: note = Description of Unknown:cds_NZ_WFIY01000004.1_cds_WP_155862727.1_532 target sequence
LLPILFLALAIDLLFGEPPIYIHPVVYTGKISEKLIKPYKGYGYGILIWFISVIPVEIIFSILPIYIPIIPIKLILMALFLKTTF

SEQ ID NO: 35490 - protein, 85 aa, unidentified
  REGION 1..85: note = Description of Unknown:cds_NZ_WFIY01000004.1_cds_WP_155862727.1_532 target sequence
SIKMLYDIVSKSRELDERARNLVQQIVRRDLSTADKGHIASAAIESLFESLVDGIISPLFWFLILGLPGAMLQRLANTMDSMVGY

SEQ ID NO: 35491 - protein, 85 aa, unidentified
  REGION 1..85: note = Description of Unknown:cds_NZ_WFIY01000004.1_cds_WP_155862727.1_532 target sequence
KTKELYKEGYFSAKVDTIMNYIPARLTGLLMVIAGKLLGIKQSSNPFRFLKNTQIESINARYPICIASALLGVKLEKKGYYTVGE

SEQ ID NO: 35492 - protein, 84 aa, unidentified
  REGION 1..84: note = Description of Unknown:cds_NZ_WFIY01000004.1_cds_WP_155862727.1_532 target sequence
NTQIESINARYPICIASALLGVKLEKKGYYTVGEGKLPGKEEIEKSLKLFKLTLFLFIVLLSIIYYSLYGLAFFSYPYGLVEFF

SEQ ID NO: 35493 - protein, 85 aa, unidentified
  REGION 1..85: note = Description of Unknown:cds_NZ_WFIY01000004.1_cds_WP_155862727.1_532 target sequence
TGKISEKLIKPYKGYGYGILIWFISVIPVEIIFSILPIYIPIIPIKLILMALFLKTTFSIKMLYDIVSKSRELDERARNLVQQIV

SEQ ID NO: 35494 - protein, 85 aa, unidentified
  REGION 1..85: note = Description of Unknown:cds_NZ_WFIY01000004.1_cds_WP_155862727.1_532 target sequence
RRDLSTADKGHIASAAIESLFESLVDGIISPLFWFLILGLPGAMLQRLANTMDSMVGYKTKELYKEGYFSAKVDTIMNYIPARLT

SEQ ID NO: 35495 - protein, 85 aa, unidentified
  REGION 1..85: note = Description of Unknown:cds_NZ_WFIY01000004.1_cds_WP_155862727.1_532 target sequence
GLLMVIAGKLLGIKQSSNPFRFLKNTQIESINARYPICIASALLGVKLEKKGYYTVGEGKLPGKEEIEKSLKLFKLTLFLFIVLL

SEQ ID NO: 35496 - protein, 85 aa, unidentified
  REGION 1..85: note = Description of Unknown:cds_NZ_WFIY01000004.1_cds_WP_155862963.1_830 target sequence
RTETYYNVFPWHTNHFGSLHGGIYMSWLIDTAGILMSSISKGNYLLASVDYIFLFRPARLGDVLRVIAKANATWNSSVEIEVKGC

SEQ ID NO: 35497 - protein, 85 aa, unidentified
  REGION 1..85: note = Description of Unknown:cds_NZ_WFIY01000004.1_cds_WP_155862963.1_830 target sequence
IRRGDKEELGAAGLMTYVAVDENNKPRKLDIKIPPDENAEKRRIQRLERKKQIMNDVDDILDLSFTRSYIRTIYPEHGFGNGILY

SEQ ID NO: 35498 - protein, 85 aa, unidentified
  REGION 1..85: note = Description of Unknown:cds_NZ_WFIY01000004.1_cds_WP_155862963.1_830 target sequence
AGKMYTMLDEALAIVAKLYSKGNAFTVSAGPADFISPVKIGDILEIQGAVEYTGNTSLDVGGKVYAINHYTGEKRLVTSTVFSFV

SEQ ID NO: 35499 - protein, 84 aa, unidentified
  REGION 1..84: note = Description of Unknown:cds_NZ_WFIY01000004.1_cds_WP_155862963.1_830 target sequence
EYTGNTSLDVGGKVYAINHYTGEKRLVTSTVFSFVAIDENGKPRPIPKLNPASEKEKKIFEERLKEREERIKTSKRLQSEISCD

SEQ ID NO: 35500 - protein, 85 aa, unidentified
  REGION 1..85: note = Description of Unknown:cds_NZ_WFIY01000004.1_cds_WP_155862963.1_830 target sequence
LIDTAGILMSSISKGNYLLASVDYIFLFRPARLGDVLRVIAKANATWNSSVEIEVKGCIRRGDKEELGAAGLMTYVAVDENNKPR

SEQ ID NO: 35501 - protein, 85 aa, unidentified
  REGION 1..85: note = Description of Unknown:cds_NZ_WFIY01000004.1_cds_WP_155862963.1_830 target sequence
KLDIKIPPDENAEKRRIQRLERKKQIMNDVDDILDLSFTRSYIRTIYPEHGFGNGILYAGKMYTMLDEALAIVAKLYSKGNAFTV

SEQ ID NO: 35502 - protein, 85 aa, unidentified
  REGION 1..85: note = Description of Unknown:cds_NZ_WFIY01000004.1_cds_WP_155862963.1_830 target sequence
SAGPADFISPVKIGDILEIQGAVEYTGNTSLDVGGKVYAINHYTGEKRLVTSTVFSFVAIDENGKPRPIPKLNPASEKEKKIFEE

SEQ ID NO: 35503 - protein, 12 aa, unidentified
  REGION 1..12: note = Description of Unknown:cds_NZ_WFIY01000004.1_cds_1318 target sequence
IAPSSGQLYEER

SEQ ID NO: 35504 - protein, 85 aa, unidentified
  REGION 1..85: note = Description of Unknown:cds_NZ_WFIY01000004.1_cds_1318 target sequence
KYYEKYKDKLGVNAQAVLQKNNEAWSSFFSLLKLKKEGKPPHMNRVSPPIYWKDREARKRKLILIAEVQSLADRTRNIGEGEAYL

SEQ ID NO: 35505 - protein, 85 aa, unidentified
  REGION 1..85: note = Description of Unknown:cds_NZ_WFIY01000004.1_cds_1318 target sequence
ELLREKRRLFKKLTRRLLHLYRNLASHLIKTLYELGVSTIYLGYPFNIVKEKGNKFTLNMWSYHKLMESIEYGMKVYEVVEYNTS

SEQ ID NO: 35506 - protein, 84 aa, unidentified
  REGION 1..84: note = Description of Unknown:cds_NZ_WFIY01000004.1_cds_1318 target sequence
KGNKFTLNMWSYHKLMESIEYGMKVYEVVEYNTSKYCAYHGVEVKRNPRGVVICPKGHKLHSDLNGALNILKKATRILVKVHVV

SEQ ID NO: 35507 - protein, 85 aa, unidentified
  REGION 1..85: note = Description of Unknown:cds_NZ_WFIY01000004.1_cds_1318 target sequence
VKYSEKRANVVRLLPNGFQERKLRRLANLSAKLFNEVNYERRQQFFHEGKVDFKGTWNKYYEKYKDKLGVNAQAVLQKNNEAWSS

SEQ ID NO: 35508 - protein, 85 aa, unidentified
  REGION 1..85: note = Description of Unknown:cds_NZ_WFIY01000004.1_cds_1318 target sequence
FFSLLKLKKEGKPPHMNRVSPPIYWKDREARKRKLILIAEVQSLADRTRNIGEGEAYLELLREKRRLFKKLTRRLLHLYRNLASH

SEQ ID NO: 35509 - protein, 85 aa, unidentified
  REGION 1..85: note = Description of Unknown:cds_NZ_WFIY01000004.1_cds_1318 target sequence
LIKTLYELGVSTIYLGYPFNIVKEKGNKFTLNMWSYHKLMESIEYGMKVYEVVEYNTSKYCAYHGVEVKRNPRGVVICPKGHKLH

SEQ ID NO: 35510 - protein, 85 aa, unidentified
  REGION 1..85: note = Description of Unknown:cds_NZ_WFIY01000004.1_cds_WP_155863723.1_1588 target sequence
ISVVITAYNRKEFLIDAVKSVKNANEIIVVKNFKDDKIDKLLVNEYKVKEIFCDKDNAGYFMAEGILHSSGDIICFLDDDDMFTE

SEQ ID NO: 35511 - protein, 85 aa, unidentified
  REGION 1..85: note = Description of Unknown:cds_NZ_WFIY01000004.1_cds_WP_155863723.1_1588 target sequence
NKLNVISKAFSDNDIIFSYNSRLIINEKGDKIGEEVLRDKIVDSKNIKYLFKNRIYFNSSSMCIRRRVLDKNLESLYKIRRLVDN

SEQ ID NO: 35512 - protein, 85 aa, unidentified
  REGION 1..85: note = Description of Unknown:cds_NZ_WFIY01000004.1_cds_WP_155863723.1_1588 target sequence
FFLLSAVSEKGKIRIISDKLTYYRLHSSSSRHITRNFENFITYRAKYFDDAIHDNTIMIEAFKGKAKYAAECSKKMAEIQKCLLE

SEQ ID NO: 35513 - protein, 84 aa, unidentified
  REGION 1..84: note = Description of Unknown:cds_NZ_WFIY01000004.1_cds_WP_155863723.1_1588 target sequence
AIHDNTIMIEAFKGKAKYAAECSKKMAEIQKCLLEGKRCGKLILCGIYTLKTLVYINLASFISLFLPNLPRKIEFNKYINELKI

SEQ ID NO: 35514 - protein, 85 aa, unidentified
  REGION 1..85: note = Description of Unknown:cds_NZ_WFIY01000004.1_cds_WP_155863723.1_1588 target sequence
IVVKNFKDDKIDKLLVNEYKVKEIFCDKDNAGYFMAEGILHSSGDIICFLDDDDMFTENKLNVISKAFSDNDIIFSYNSRLIINE

SEQ ID NO: 35515 - protein, 85 aa, unidentified
  REGION 1..85: note = Description of Unknown:cds_NZ_WFIY01000004.1_cds_WP_155863723.1_1588 target sequence
KGDKIGEEVLRDKIVDSKNIKYLFKNRIYFNSSSMCIRRRVLDKNLESLYKIRRLVDNFFLLSAVSEKGKIRIISDKLTYYRLHS

SEQ ID NO: 35516 - protein, 85 aa, unidentified
  REGION 1..85: note = Description of Unknown:cds_NZ_WFIY01000004.1_cds_WP_155863723.1_1588 target sequence
SSSRHITRNFENFITYRAKYFDDAIHDNTIMIEAFKGKAKYAAECSKKMAEIQKCLLEGKRCGKLILCGIYTLKTLVYINLASFI

SEQ ID NO: 35517 - protein, 85 aa, unidentified
  REGION 1..85: note = Description of Unknown:cds_NZ_WFIY01000004.1_cds_WP_155864446.1_1614 target sequence
LHKIPSGNCEICPSVGEDDAILKTTGPYIIVHSDPITESSVDPGFLSIAVACNDVNMKGAPCKWALTTLLLSSRNSLDRILSGIN

SEQ ID NO: 35518 - protein, 85 aa, unidentified
  REGION 1..85: note = Description of Unknown:cds_NZ_WFIY01000004.1_cds_WP_155864446.1_1614 target sequence
EACKILGCNVVGGHTEVVINLPSDIVVTTAFSTTDKILTARDAKDGDYIVMVGSAGIEGTWILANQFEDYLLKLGVKKETIESAK

SEQ ID NO: 35519 - protein, 85 aa, unidentified
  REGION 1..85: note = Description of Unknown:cds_NZ_WFIY01000004.1_cds_WP_155864446.1_1614 target sequence
RFKYDIIVQEKALKVAEYAVGMHDATEGGVLQAILEIAKLSNLKAVINPKLIPVRKETLEITRALSMDYLRLISSGAFLVITRNP

SEQ ID NO: 35520 - protein, 84 aa, unidentified
  REGION 1..84: note = Description of Unknown:cds_NZ_WFIY01000004.1_cds_WP_155864446.1_1614 target sequence
IPVRKETLEITRALSMDYLRLISSGAFLVITRNPEEVVNKVKESNIIGRLIKGEPSLHLEGVGDFNEDFEEELVRFESSYNGRR

SEQ ID NO: 35521 - protein, 85 aa, unidentified
  REGION 1..85: note = Description of Unknown:cds_NZ_WFIY01000004.1_cds_WP_155864446.1_1614 target sequence
YIIVHSDPITESSVDPGFLSIAVACNDVNMKGAPCKWALTTLLLSSRNSLDRILSGINEACKILGCNVVGGHTEVVINLPSDIVV

SEQ ID NO: 35522 - protein, 85 aa, unidentified
  REGION 1..85: note = Description of Unknown:cds_NZ_WFIY01000004.1_cds_WP_155864446.1_1614 target sequence
TTAFSTTDKILTARDAKDGDYIVMVGSAGIEGTWILANQFEDYLLKLGVKKETIESAKRFKYDIIVQEKALKVAEYAVGMHDATE

SEQ ID NO: 35523 - protein, 85 aa, unidentified
  REGION 1..85: note = Description of Unknown:cds_NZ_WFIY01000004.1_cds_WP_155864446.1_1614 target sequence
GGVLQAILEIAKLSNLKAVINPKLIPVRKETLEITRALSMDYLRLISSGAFLVITRNPEEVVNKVKESNIIGRLIKGEPSLHLEG

SEQ ID NO: 35524 - protein, 85 aa, unidentified
  REGION 1..85: note = Description of Unknown:cds_NZ_WFIY01000004.1_cds_WP_155864251.1_2242 target sequence
STNNPYGKVAFYPGCALDGLGKSYDVSLRLVAEDLGLKFERLDDYNCCGALEVKNVNTMAGLLLPARNLSLARKIGANAIMSACP

SEQ ID NO: 35525 - protein, 85 aa, unidentified
  REGION 1..85: note = Description of Unknown:cds_NZ_WFIY01000004.1_cds_WP_155864251.1_2242 target sequence
GCHYSLSRTQYYMSKYTKVREKVNAYLEKMGEKPYDLQLMTIHAVEFFYNTVGVEGIKAKVKRPLTGLKVAPYYGCLYTRPKPYT

SEQ ID NO: 35526 - protein, 85 aa, unidentified
  REGION 1..85: note = Description of Unknown:cds_NZ_WFIY01000004.1_cds_WP_155864251.1_2242 target sequence
LTGYMKLKDDPERPIFMDELLKALGAEVVPFEAKTMCCGGPHVYSDVEVALHLEARILKEAKRNGADMLVVDCPLGGVALETNMN

SEQ ID NO: 35527 - protein, 84 aa, unidentified
  REGION 1..84: note = Description of Unknown:cds_NZ_WFIY01000004.1_cds_WP_155864251.1_2242 target sequence
LHLEARILKEAKRNGADMLVVDCPLGGVALETNMNKIAEKYGEDLRMPIVYFTQLMAFAFGHSPEEALLTANLTNPMSILKKYL

SEQ ID NO: 35528 - protein, 85 aa, unidentified
  REGION 1..85: note = Description of Unknown:cds_NZ_WFIY01000004.1_cds_WP_155864251.1_2242 target sequence
LRLVAEDLGLKFERLDDYNCCGALEVKNVNTMAGLLLPARNLSLARKIGANAIMSACPGCHYSLSRTQYYMSKYTKVREKVNAYL

SEQ ID NO: 35529 - protein, 85 aa, unidentified
  REGION 1..85: note = Description of Unknown:cds_NZ_WFIY01000004.1_cds_WP_155864251.1_2242 target sequence
EKMGEKPYDLQLMTIHAVEFFYNTVGVEGIKAKVKRPLTGLKVAPYYGCLYTRPKPYTLTGYMKLKDDPERPIFMDELLKALGAE

SEQ ID NO: 35530 - protein, 85 aa, unidentified
  REGION 1..85: note = Description of Unknown:cds_NZ_WFIY01000004.1_cds_WP_155864251.1_2242 target sequence
VVPFEAKTMCCGGPHVYSDVEVALHLEARILKEAKRNGADMLVVDCPLGGVALETNMNKIAEKYGEDLRMPIVYFTQLMAFAFGH

SEQ ID NO: 35531 - protein, 85 aa, unidentified
  REGION 1..85: note = Description of Unknown:cds_NC_020807.1_cds_YP_007641388.1_2 target sequence
SKDLVHPSLVRAGYVELEMADETADVVNLTIASNQAHLQGEPFYVDSLPEDMNRMRLAETSGKMEVAEDDEDDCSSEDEFYLPKG

SEQ ID NO: 35532 - protein, 85 aa, unidentified
  REGION 1..85: note = Description of Unknown:cds_NC_020807.1_cds_YP_007641388.1_2 target sequence
QDPLVPFQGFLEEVGARIVKRMKSGEGFFKIWSTMTEDIKGYVLTNVMKTSSKTVENRQTQTDKQLSSNLPQELTPPKREEALNP

SEQ ID NO: 35533 - protein, 85 aa, unidentified
  REGION 1..85: note = Description of Unknown:cds_NC_020807.1_cds_YP_007641388.1_2 target sequence
KKAEERPKPSKAPEVSWTNETEEVNDIEGEVAHQVAESFSKKYKFPSRSSGIFLWNFEQLKMNLDDIVKASMNIPGVEKIAEKGG

SEQ ID NO: 35534 - protein, 84 aa, unidentified
  REGION 1..84: note = Description of Unknown:cds_NC_020807.1_cds_YP_007641388.1_2 target sequence
GIFLWNFEQLKMNLDDIVKASMNIPGVEKIAEKGGKLPLRCILGFVALDSSKRFRLLADTDKVARLMQDDINSYMARLEDVDRN

SEQ ID NO: 35535 - protein, 85 aa, unidentified
  REGION 1..85: note = Description of Unknown:cds_NC_020807.1_cds_YP_007641388.1_2 target sequence
NLTIASNQAHLQGEPFYVDSLPEDMNRMRLAETSGKMEVAEDDEDDCSSEDEFYLPKGQDPLVPFQGFLEEVGARIVKRMKSGEG

SEQ ID NO: 35536 - protein, 85 aa, unidentified
  REGION 1..85: note = Description of Unknown:cds_NC_020807.1_cds_YP_007641388.1_2 target sequence
FFKIWSTMTEDIKGYVLTNVMKTSSKTVENRQTQTDKQLSSNLPQELTPPKREEALNPKKAEERPKPSKAPEVSWTNETEEVNDI

SEQ ID NO: 35537 - protein, 85 aa, unidentified
  REGION 1..85: note = Description of Unknown:cds_NC_020807.1_cds_YP_007641388.1_2 target sequence
EGEVAHQVAESFSKKYKFPSRSSGIFLWNFEQLKMNLDDIVKASMNIPGVEKIAEKGGKLPLRCILGFVALDSSKRFRLLADTDK

SEQ ID NO: 35538 - protein, 85 aa, unidentified
  REGION 1..85: note = Description of Unknown:cds_NC_025365.1_cds_YP_009094180.1_2 target sequence
SKGLIHPSSIRSGLVDLEMAEETVDLIHKNLTDGQAHLQGEPLDVDSLPEDMRRMRLIDMSRQKDIRIGDEGESSSEDEFYLPSG

SEQ ID NO: 35539 - protein, 85 aa, unidentified
  REGION 1..85: note = Description of Unknown:cds_NC_025365.1_cds_YP_009094180.1_2 target sequence
KDPMVPLQDFLDEIGAQVVKRMKSGDGFFKIWSTVTEDIKGYISSNFTAAEPRSSDNKSVQTEPAQIQKGLPEPPSHEEKAKETQ

SEQ ID NO: 35540 - protein, 85 aa, unidentified
  REGION 1..85: note = Description of Unknown:cds_NC_025365.1_cds_YP_009094180.1_2 target sequence
ESSKNRQESKPAPSSDWDNNQEEVDDIEGEVAHQVAESFSKKYKFPSRSSGIFLWNFEQLKMNLDDIVKAALNIPGIDKIAEKGG

SEQ ID NO: 35541 - protein, 84 aa, unidentified
  REGION 1..84: note = Description of Unknown:cds_NC_025365.1_cds_YP_009094180.1_2 target sequence
GIFLWNFEQLKMNLDDIVKAALNIPGIDKIAEKGGKLPLRCILGYVSLSASKRFCLLADNDKTARLMQDDINNYIAKIEEIDKS

SEQ ID NO: 35542 - protein, 85 aa, unidentified
  REGION 1..85: note = Description of Unknown:cds_NC_025365.1_cds_YP_009094180.1_2 target sequence
HKNLTDGQAHLQGEPLDVDSLPEDMRRMRLIDMSRQKDIRIGDEGESSSEDEFYLPSGKDPMVPLQDFLDEIGAQVVKRMKSGDG

SEQ ID NO: 35543 - protein, 85 aa, unidentified
  REGION 1..85: note = Description of Unknown:cds_NC_025365.1_cds_YP_009094180.1_2 target sequence
FFKIWSTVTEDIKGYISSNFTAAEPRSSDNKSVQTEPAQIQKGLPEPPSHEEKAKETQESSKNRQESKPAPSSDWDNNQEEVDDI

SEQ ID NO: 35544 - protein, 85 aa, unidentified
  REGION 1..85: note = Description of Unknown:cds_NC_025365.1_cds_YP_009094180.1_2 target sequence
EGEVAHQVAESFSKKYKFPSRSSGIFLWNFEQLKMNLDDIVKAALNIPGIDKIAEKGGKLPLRCILGYVSLSASKRFCLLADNDK

SEQ ID NO: 35545 - protein, 85 aa, unidentified
  REGION 1..85: note = Description of Unknown:cds_NZ_WFIY01000004.1_cds_WP_155862830.1_659 target sequence
VQIFIPTLGRESIKYTLDALKTQTFRDFEIILISRKQLNINGVNKIIIQKEGYFEEAINLALENLNPDDIALFIDDDAIPSNKWV

SEQ ID NO: 35546 - protein, 85 aa, unidentified
  REGION 1..85: note = Description of Unknown:cds_NZ_WFIY01000004.1_cds_WP_155862830.1_659 target sequence
EEHLEFHDKNPLIYIASGEVVGEKWKNYPNALFKKYKNTKYMMPYNNRFNEYTGFLTKVGLSVDRDDLGSYDVEKSLAIAGVNMS

SEQ ID NO: 35547 - protein, 85 aa, unidentified
  REGION 1..85: note = Description of Unknown:cds_NZ_WFIY01000004.1_cds_WP_155862830.1_659 target sequence
LKTNFFLGYKIPTFTLRGSYNESILALHGIYLGGDSATFKGAKVYHKGNESLSRTKDPYIDKYLCLEKHVFPYAVNTIFKIDTNL

SEQ ID NO: 35548 - protein, 84 aa, unidentified
  REGION 1..84: note = Description of Unknown:cds_NZ_WFIY01000004.1_cds_WP_155862830.1_659 target sequence
ESLSRTKDPYIDKYLCLEKHVFPYAVNTIFKIDTNLLEEFISLLEEGIPKLGLSLALKGIINNYTFLQFRKELLRLYELRETVL

SEQ ID NO: 35549 - protein, 85 aa, unidentified
  REGION 1..85: note = Description of Unknown:cds_NZ_WFIY01000004.1_cds_WP_155862830.1_659 target sequence
FEIILISRKQLNINGVNKIIIQKEGYFEEAINLALENLNPDDIALFIDDDAIPSNKWVEEHLEFHDKNPLIYIASGEVVGEKWKN

SEQ ID NO: 35550 - protein, 85 aa, unidentified
  REGION 1..85: note = Description of Unknown:cds_NZ_WFIY01000004.1_cds_WP_155862830.1_659 target sequence
YPNALFKKYKNTKYMMPYNNRFNEYTGFLTKVGLSVDRDDLGSYDVEKSLAIAGVNMSLKTNFFLGYKIPTFTLRGSYNESILAL

SEQ ID NO: 35551 - protein, 85 aa, unidentified
  REGION 1..85: note = Description of Unknown:cds_NZ_WFIY01000004.1_cds_WP_155862830.1_659 target sequence
HGIYLGGDSATFKGAKVYHKGNESLSRTKDPYIDKYLCLEKHVFPYAVNTIFKIDTNLLEEFISLLEEGIPKLGLSLALKGIINN

SEQ ID NO: 35552 - protein, 85 aa, unidentified
  REGION 1..85: note = Description of Unknown:cds_NZ_WFIY01000004.1_cds_WP_155862937.1_791 target sequence
SQFGWSWHLEWQSPCEFHGHLINRVIVDLKTQYQRVMVAELARFGKVLIIDGKIQSSVADEYIYHETLVHPLMLSVENPENVLIL

SEQ ID NO: 35553 - protein, 85 aa, unidentified
  REGION 1..85: note = Description of Unknown:cds_NZ_WFIY01000004.1_cds_WP_155862937.1_791 target sequence
GGGEGATLREVLKHKTVKKATMVDIDQAVIDFAKQYLTEWHRGSFDDKRSRIIISDAKDYIEKTTETYDAIILDLTDPIKGNTSY

SEQ ID NO: 35554 - protein, 85 aa, unidentified
  REGION 1..85: note = Description of Unknown:cds_NZ_WFIY01000004.1_cds_WP_155862937.1_791 target sequence
KLYTKEFYEKIKSRLNKGGAMVTQATSPSFSLCVFSTIFNTLRQVFKLVSASIVYVPAFDGLWGFVYASDYVNPISLTKEQVNKR

SEQ ID NO: 35555 - protein, 84 aa, unidentified
  REGION 1..84: note = Description of Unknown:cds_NZ_WFIY01000004.1_cds_WP_155862937.1_791 target sequence
SASIVYVPAFDGLWGFVYASDYVNPISLTKEQVNKRIKDRIEGELRFYDGETHSMIFSMPKDIRQYLANEKRISTEENPIYVPA

SEQ ID NO: 35556 - protein, 85 aa, unidentified
  REGION 1..85: note = Description of Unknown:cds_NZ_WFIY01000004.1_cds_WP_155862937.1_791 target sequence
DLKTQYQRVMVAELARFGKVLIIDGKIQSSVADEYIYHETLVHPLMLSVENPENVLILGGGEGATLREVLKHKTVKKATMVDIDQ

SEQ ID NO: 35557 - protein, 85 aa, unidentified
  REGION 1..85: note = Description of Unknown:cds_NZ_WFIY01000004.1_cds_WP_155862937.1_791 target sequence
AVIDFAKQYLTEWHRGSFDDKRSRIIISDAKDYIEKTTETYDAIILDLTDPIKGNTSYKLYTKEFYEKIKSRLNKGGAMVTQATS

SEQ ID NO: 35558 - protein, 85 aa, unidentified
  REGION 1..85: note = Description of Unknown:cds_NZ_WFIY01000004.1_cds_WP_155862937.1_791 target sequence
PSFSLCVFSTIFNTLRQVFKLVSASIVYVPAFDGLWGFVYASDYVNPISLTKEQVNKRIKDRIEGELRFYDGETHSMIFSMPKDI

SEQ ID NO: 35559 - protein, 85 aa, unidentified
  REGION 1..85: note = Description of Unknown:cds_NZ_WFIY01000004.1_cds_WP_013775484.1_929 target sequence
SDKPQDNICPPDKIVFDADRGEYICTETGEVIEERIIDQGPEWRAFTPEEKEKRSRVGGPLNQTIHDRGLSTLIDWKDKDAIGRN

SEQ ID NO: 35560 - protein, 85 aa, unidentified
  REGION 1..85: note = Description of Unknown:cds_NZ_WFIY01000004.1_cds_WP_013775484.1_929 target sequence
LDPKRRLEVLRWRKWQIRARIQSSIDRNLAQAMNELERIGNLLGLPKSVKDEAALIYRKAVEKGLVRGRSIESVVAASIYASCRR

SEQ ID NO: 35561 - protein, 85 aa, unidentified
  REGION 1..85: note = Description of Unknown:cds_NZ_WFIY01000004.1_cds_WP_013775484.1_929 target sequence
IKIARTLDEIAQYTKANRKEVARCYRLLLRELNVEVPVSDPKDYVTRIGSLLGLSGATMKLAAEILEKAKNAGLTAGKDPAGLAA

SEQ ID NO: 35562 - protein, 84 aa, unidentified
  REGION 1..84: note = Description of Unknown:cds_NZ_WFIY01000004.1_cds_WP_013775484.1_929 target sequence
SLLGLSGATMKLAAEILEKAKNAGLTAGKDPAGLAAAAIYIAALMNDERRTQKEIAQVAGVTEVTVRNRYKELIQELKIEIQNQ

SEQ ID NO: 35563 - protein, 85 aa, unidentified
  REGION 1..85: note = Description of Unknown:cds_NZ_WFIY01000004.1_cds_WP_013775484.1_929 target sequence
TGEVIEERIIDQGPEWRAFTPEEKEKRSRVGGPLNQTIHDRGLSTLIDWKDKDAIGRNLDPKRRLEVLRWRKWQIRARIQSSIDR

SEQ ID NO: 35564 - protein, 85 aa, unidentified
  REGION 1..85: note = Description of Unknown:cds_NZ_WFIY01000004.1_cds_WP_013775484.1_929 target sequence
NLAQAMNELERIGNLLGLPKSVKDEAALIYRKAVEKGLVRGRSIESVVAASIYASCRRIKIARTLDEIAQYTKANRKEVARCYRL

SEQ ID NO: 35565 - protein, 85 aa, unidentified
  REGION 1..85: note = Description of Unknown:cds_NZ_WFIY01000004.1_cds_WP_013775484.1_929 target sequence
LLRELNVEVPVSDPKDYVTRIGSLLGLSGATMKLAAEILEKAKNAGLTAGKDPAGLAAAAIYIAALMNDERRTQKEIAQVAGVTE

SEQ ID NO: 35566 - protein, 85 aa, unidentified
  REGION 1..85: note = Description of Unknown:cds_NZ_WFIY01000004.1_cds_WP_155863174.1_1105 target sequence
ITIVVTPIEYILAIISGVLVGFSLGLIGGGGSILAVPLLLYFVGLATVPPQYASNPTLAHEYSDYVAHVALGTTALAVGLNAYIN

SEQ ID NO: 35567 - protein, 85 aa, unidentified
  REGION 1..85: note = Description of Unknown:cds_NZ_WFIY01000004.1_cds_WP_155863174.1_1105 target sequence
SYMHFRKGNVRLPEGIMFTIPGVVGAMLGGYASHITPGQSLLFFFGILMIVVALLMLRPQKQATKTIAKTQTTQISLRGFSALSI

SEQ ID NO: 35568 - protein, 85 aa, unidentified
  REGION 1..85: note = Description of Unknown:cds_NZ_WFIY01000004.1_cds_WP_155863174.1_1105 target sequence
KSLTSDVSIKKVIPTGFIVGFASGYFGIGGGFLIVPGLLFSTGLCMIKAVGTSLISVGTFGITSAAVYAYYGYVLPLVSIAYLVG

SEQ ID NO: 35569 - protein, 84 aa, unidentified
  REGION 1..84: note = Description of Unknown:cds_NZ_WFIY01000004.1_cds_WP_155863174.1_1105 target sequence
VGTSLISVGTFGITSAAVYAYYGYVLPLVSIAYLVGGIAGGYAGASIASRMPRGMLRKIFAGIIIAVAIYIMYENINGLMVLFH

SEQ ID NO: 35570 - protein, 85 aa, unidentified
  REGION 1..85: note = Description of Unknown:cds_NZ_WFIY01000004.1_cds_WP_155863174.1_1105 target sequence
GGGGSILAVPLLLYFVGLATVPPQYASNPTLAHEYSDYVAHVALGTTALAVGLNAYINSYMHFRKGNVRLPEGIMFTIPGVVGAM

SEQ ID NO: 35571 - protein, 85 aa, unidentified
  REGION 1..85: note = Description of Unknown:cds_NZ_WFIY01000004.1_cds_WP_155863174.1_1105 target sequence
LGGYASHITPGQSLLFFFGILMIVVALLMLRPQKQATKTIAKTQTTQISLRGFSALSIKSLTSDVSIKKVIPTGFIVGFASGYFG

SEQ ID NO: 35572 - protein, 85 aa, unidentified
  REGION 1..85: note = Description of Unknown:cds_NZ_WFIY01000004.1_cds_WP_155863174.1_1105 target sequence
IGGGFLIVPGLLFSTGLCMIKAVGTSLISVGTFGITSAAVYAYYGYVLPLVSIAYLVGGIAGGYAGASIASRMPRGMLRKIFAGI

SEQ ID NO: 35573 - protein, 85 aa, unidentified
  REGION 1..85: note = Description of Unknown:cds_NZ_WFIY01000004.1_cds_WP_155863260.1_1213 target sequence
KVAVVGCNGWGKVHLHALRKIGAEYYVFSRDEEKAKECMKKYDAKAYFTKYEDVLKSDVDVIDLVVSHDKHFEMGIEAMKAGKHL

SEQ ID NO: 35574 - protein, 85 aa, unidentified
  REGION 1..85: note = Description of Unknown:cds_NZ_WFIY01000004.1_cds_WP_155863260.1_1213 target sequence
MLEKPIARTVEEAKGLINFSREKGVKLMVLEQYYFDSTVRKAKELLPNLGKLALILVRSTHFNQPKGWRAVKEKMGGGALIDGGV

SEQ ID NO: 35575 - protein, 85 aa, unidentified
  REGION 1..85: note = Description of Unknown:cds_NZ_WFIY01000004.1_cds_WP_155863260.1_1213 target sequence
HFIDTLLNFGGEYEEIKSFCGNYFSNMEGEDTTIASFKFTGGHLGLLIYSWSTKNPPRVPAFEIYGENGSLIEDPNSRVPGKPYG

SEQ ID NO: 35576 - protein, 84 aa, unidentified
  REGION 1..84: note = Description of Unknown:cds_NZ_WFIY01000004.1_cds_WP_155863260.1_1213 target sequence
SWSTKNPPRVPAFEIYGENGSLIEDPNSRVPGKPYGDIIFNGERIEVEKVDPIEVELREFLKAVENNTEVPMKPEIALRDLEAS

SEQ ID NO: 35577 - protein, 85 aa, unidentified
  REGION 1..85: note = Description of Unknown:cds_NZ_WFIY01000004.1_cds_WP_155863260.1_1213 target sequence
FSRDEEKAKECMKKYDAKAYFTKYEDVLKSDVDVIDLVVSHDKHFEMGIEAMKAGKHLMLEKPIARTVEEAKGLINFSREKGVKL

SEQ ID NO: 35578 - protein, 85 aa, unidentified
  REGION 1..85: note = Description of Unknown:cds_NZ_WFIY01000004.1_cds_WP_155863260.1_1213 target sequence
MVLEQYYFDSTVRKAKELLPNLGKLALILVRSTHFNQPKGWRAVKEKMGGGALIDGGVHFIDTLLNFGGEYEEIKSFCGNYFSNM

SEQ ID NO: 35579 - protein, 85 aa, unidentified
  REGION 1..85: note = Description of Unknown:cds_NZ_WFIY01000004.1_cds_WP_155863260.1_1213 target sequence
EGEDTTIASFKFTGGHLGLLIYSWSTKNPPRVPAFEIYGENGSLIEDPNSRVPGKPYGDIIFNGERIEVEKVDPIEVELREFLKA

SEQ ID NO: 35580 - protein, 85 aa, unidentified
  REGION 1..85: note = Description of Unknown:cds_NZ_WFIY01000004.1_cds_WP_155864048.1_1984 target sequence
VKYCPKCGYPNPDDAKFCMKCGYQLPTILQQPSPNSQPPSIPTTPPERPKKELPLKAIIGLVVAVIVVLAVFIVVLPLTSPHGIS

SEQ ID NO: 35581 - protein, 85 aa, unidentified
  REGION 1..85: note = Description of Unknown:cds_NZ_WFIY01000004.1_cds_WP_155864048.1_1984 target sequence
TLASTAQSNFGGSWVTARCQSGTVTYVGNGEYKVSYLNGTTITVKNISNIPFISNSFSSTSSLTATCNVTFSKAVFALINGTING

SEQ ID NO: 35582 - protein, 85 aa, unidentified
  REGION 1..85: note = Description of Unknown:cds_NZ_WFIY01000004.1_cds_WP_155864048.1_1984 target sequence
NKAYILVIGAYWNTTPNPIYDSYNQIKSELSNNSGLILSAKAFFKAEGICVNVSIHNGMVYLYMSTSNSTFARSLISQNPDSTLA

SEQ ID NO: 35583 - protein, 84 aa, unidentified
  REGION 1..84: note = Description of Unknown:cds_NZ_WFIY01000004.1_cds_WP_155864048.1_1984 target sequence
CVNVSIHNGMVYLYMSTSNSTFARSLISQNPDSTLASQLNLTSVTALGVLEELNANEEIGVIVINMAPSESQMIPLASQVEGCL

SEQ ID NO: 35584 - protein, 85 aa, unidentified
  REGION 1..85: note = Description of Unknown:cds_NZ_WFIY01000004.1_cds_WP_155864048.1_1984 target sequence
ILQQPSPNSQPPSIPTTPPERPKKELPLKAIIGLVVAVIVVLAVFIVVLPLTSPHGISTLASTAQSNFGGSWVTARCQSGTVTYV

SEQ ID NO: 35585 - protein, 85 aa, unidentified
  REGION 1..85: note = Description of Unknown:cds_NZ_WFIY01000004.1_cds_WP_155864048.1_1984 target sequence
GNGEYKVSYLNGTTITVKNISNIPFISNSFSSTSSLTATCNVTFSKAVFALINGTINGNKAYILVIGAYWNTTPNPIYDSYNQIK

SEQ ID NO: 35586 - protein, 85 aa, unidentified
  REGION 1..85: note = Description of Unknown:cds_NZ_WFIY01000004.1_cds_WP_155864048.1_1984 target sequence
SELSNNSGLILSAKAFFKAEGICVNVSIHNGMVYLYMSTSNSTFARSLISQNPDSTLASQLNLTSVTALGVLEELNANEEIGVIV

SEQ ID NO: 35587 - protein, 85 aa, unidentified
  REGION 1..85: note = Description of Unknown:cds_NZ_WFIY01000004.1_cds_WP_155864190.1_2151 target sequence
NSTNDYLGDSHYNNFTFNTICLKNFTYHDNMFEESFYNVSISSIPTSNGMDSVARIIHIYRNGISASTYLFTTTTEFYWFNYTKN

SEQ ID NO: 35588 - protein, 85 aa, unidentified
  REGION 1..85: note = Description of Unknown:cds_NZ_WFIY01000004.1_cds_WP_155864190.1_2151 target sequence
PVGSDYNITFNANVEGIRAKGFVVEDPGNTISLLDGSINMVDKGSIINASINDGKVSMTINGSDPITVWCIYYYPGVYAFLLSTQ

SEQ ID NO: 35589 - protein, 85 aa, unidentified
  REGION 1..85: note = Description of Unknown:cds_NZ_WFIY01000004.1_cds_WP_155864190.1_2151 target sequence
YTIPTNYISLATAIINTIASVIGGSSIISGLIVGYILYYIHDFDNFANSYSNNGNVTLYLTDGSSYVNLFGFCIPTGVYMEFGAY

SEQ ID NO: 35590 - protein, 84 aa, unidentified
  REGION 1..84: note = Description of Unknown:cds_NZ_WFIY01000004.1_cds_WP_155864190.1_2151 target sequence
YSNNGNVTLYLTDGSSYVNLFGFCIPTGVYMEFGAYYNQKYIPFANTFTLFLVPNYNYGIFLYEQPHSSIAPPSPYTPPWYAFW

SEQ ID NO: 35591 - protein, 85 aa, unidentified
  REGION 1..85: note = Description of Unknown:cds_NZ_WFIY01000004.1_cds_WP_155864190.1_2151 target sequence
HDNMFEESFYNVSISSIPTSNGMDSVARIIHIYRNGISASTYLFTTTTEFYWFNYTKNPVGSDYNITFNANVEGIRAKGFVVEDP

SEQ ID NO: 35592 - protein, 85 aa, unidentified
  REGION 1..85: note = Description of Unknown:cds_NZ_WFIY01000004.1_cds_WP_155864190.1_2151 target sequence
GNTISLLDGSINMVDKGSIINASINDGKVSMTINGSDPITVWCIYYYPGVYAFLLSTQYTIPTNYISLATAIINTIASVIGGSSI

SEQ ID NO: 35593 - protein, 85 aa, unidentified
  REGION 1..85: note = Description of Unknown:cds_NZ_WFIY01000004.1_cds_WP_155864190.1_2151 target sequence
ISGLIVGYILYYIHDFDNFANSYSNNGNVTLYLTDGSSYVNLFGFCIPTGVYMEFGAYYNQKYIPFANTFTLFLVPNYNYGIFLY

SEQ ID NO: 35594 - protein, 85 aa, unidentified
  REGION 1..85: note = Description of Unknown:hvTR_Q6TVN6 target sequence
FQPVPDMAAEADIDLGDVSVDATRAGAREKTVFFARNKRMYPHRSKDEERKLSLGFFLQRLDFLTSREVNLQFRSLDALRTENVM

SEQ ID NO: 35595 - protein, 85 aa, unidentified
  REGION 1..85: note = Description of Unknown:hvTR_Q6TVN6 target sequence
KKNNVLVAPYILIATLAGRGFRMTETMVELYFPELYRETSKRFRFCAQIKVIQDFLGFAHDSYHTYDFETYFAFVALVLRGADSV

SEQ ID NO: 35596 - protein, 85 aa, unidentified
  REGION 1..85: note = Description of Unknown:hvTR_Q6TVN6 target sequence
AEAFDVRAESGLVRSLTEITYRLYVMQLRSDAAQWSVSTGAVVSQAVNTVLSVVGDLAARAEAERLTPVCDLARENPLSLDDLRK

SEQ ID NO: 35597 - protein, 84 aa, unidentified
  REGION 1..84: note = Description of Unknown:hvTR_Q6TVN6 target sequence
TVLSVVGDLAARAEAERLTPVCDLARENPLSLDDLRKYGPRLRSLLTTMARARSFKTNRRDKDTLSRFCRLTAGPSPSACRASP

SEQ ID NO: 35598 - protein, 85 aa, unidentified
  REGION 1..85: note = Description of Unknown:hvTR_Q6TVN6 target sequence
REKTVFFARNKRMYPHRSKDEERKLSLGFFLQRLDFLTSREVNLQFRSLDALRTENVMKKNNVLVAPYILIATLAGRGFRMTETM

SEQ ID NO: 35599 - protein, 85 aa, unidentified
  REGION 1..85: note = Description of Unknown:hvTR_Q6TVN6 target sequence
VELYFPELYRETSKRFRFCAQIKVIQDFLGFAHDSYHTYDFETYFAFVALVLRGADSVAEAFDVRAESGLVRSLTEITYRLYVMQ

SEQ ID NO: 35600 - protein, 85 aa, unidentified
  REGION 1..85: note = Description of Unknown:hvTR_Q6TVN6 target sequence
LRSDAAQWSVSTGAVVSQAVNTVLSVVGDLAARAEAERLTPVCDLARENPLSLDDLRKYGPRLRSLLTTMARARSFKTNRRDKDT

SEQ ID NO: 35601 - protein, 85 aa, unidentified
  REGION 1..85: note = Description of Unknown:hvTR_D3IZN2 target sequence
FQPVPDMAAEADIDLGDVSVDATRAGAREKTVFFARNKRMYPHRSKDEERKLSLGFFLQRLDFLTSREVHLQFRSLDALRTENVM

SEQ ID NO: 35602 - protein, 85 aa, unidentified
  REGION 1..85: note = Description of Unknown:hvTR_D3IZN2 target sequence
KKNNVLVAPYILIATLAGRGFRMTETMVELYFPELYRETSKRFRFCAQIKVIQDFLGFAHDSYHTYDFETYFAFVALVLRGADSE

SEQ ID NO: 35603 - protein, 85 aa, unidentified
  REGION 1..85: note = Description of Unknown:hvTR_D3IZN2 target sequence
AEAFDVRAESGLVRSLTEITYRLYVMQLRCDAAQWSVSTGSVVSQAVNTVLSVVSDLAARAEAEGLTPVCELARENPLSVADLRK

SEQ ID NO: 35604 - protein, 84 aa, unidentified
  REGION 1..84: note = Description of Unknown:hvTR_D3IZN2 target sequence
TVLSVVSDLAARAEAEGLTPVCELARENPLSVADLRKYGPRLCALLATMARARSFKMNRRDRDALSRFCRLTEGPSPSACRASP

SEQ ID NO: 35605 - protein, 85 aa, unidentified
  REGION 1..85: note = Description of Unknown:hvTR_D3IZN2 target sequence
REKTVFFARNKRMYPHRSKDEERKLSLGFFLQRLDFLTSREVHLQFRSLDALRTENVMKKNNVLVAPYILIATLAGRGFRMTETM

SEQ ID NO: 35606 - protein, 85 aa, unidentified
  REGION 1..85: note = Description of Unknown:hvTR_D3IZN2 target sequence
VELYFPELYRETSKRFRFCAQIKVIQDFLGFAHDSYHTYDFETYFAFVALVLRGADSEAEAFDVRAESGLVRSLTEITYRLYVMQ

SEQ ID NO: 35607 - protein, 85 aa, unidentified
  REGION 1..85: note = Description of Unknown:hvTR_D3IZN2 target sequence
LRCDAAQWSVSTGSVVSQAVNTVLSVVSDLAARAEAEGLTPVCELARENPLSVADLRKYGPRLCALLATMARARSFKMNRRDRDA

SEQ ID NO: 35608 - protein, 85 aa, unidentified
  REGION 1..85: note = Description of Unknown:cds_NC_001608.3_cds_YP_001531155.1_3 target sequence
ASSSNYNTYMQYLNPPPYADHGANQLIPADQLSNQQGITPNYVGDLNLDDQFKGNVCHAFTLEAIIDISAYNERTVKGVPAWLPL

SEQ ID NO: 35609 - protein, 85 aa, unidentified
  REGION 1..85: note = Description of Unknown:cds_NC_001608.3_cds_YP_001531155.1_3 target sequence
GIMSNFEYPLAHTVAALLTGSYTITQFTHNGQKFVRVNRLGTGIPAHPLRMLREGNQAFIQNMVIPRNFSTNQFTYNLTNLVLSV

SEQ ID NO: 35610 - protein, 85 aa, unidentified
  REGION 1..85: note = Description of Unknown:cds_NC_001608.3_cds_YP_001531155.1_3 target sequence
QKLPDDAWRPSKDKLIGNTMHPAVSIHPNLPPIVLPTVKKQAYRQHKNPNNGPLLAISGILHQLRVEKVPEKTSLFRISLPADMF

SEQ ID NO: 35611 - protein, 84 aa, unidentified
  REGION 1..84: note = Description of Unknown:cds_NC_001608.3_cds_YP_001531155.1_3 target sequence
PNNGPLLAISGILHQLRVEKVPEKTSLFRISLPADMFSVKEGMMKKRGENSPVVYFQAPENFPLNGFNNRQVVLAYANPTLSAV

SEQ ID NO: 35612 - protein, 85 aa, unidentified
  REGION 1..85: note = Description of Unknown:cds_NC_001608.3_cds_YP_001531155.1_3 target sequence
PADQLSNQQGITPNYVGDLNLDDQFKGNVCHAFTLEAIIDISAYNERTVKGVPAWLPLGIMSNFEYPLAHTVAALLTGSYTITQF

SEQ ID NO: 35613 - protein, 85 aa, unidentified
  REGION 1..85: note = Description of Unknown:cds_NC_001608.3_cds_YP_001531155.1_3 target sequence
THNGQKFVRVNRLGTGIPAHPLRMLREGNQAFIQNMVIPRNFSTNQFTYNLTNLVLSVQKLPDDAWRPSKDKLIGNTMHPAVSIH

SEQ ID NO: 35614 - protein, 85 aa, unidentified
  REGION 1..85: note = Description of Unknown:cds_NC_001608.3_cds_YP_001531155.1_3 target sequence
PNLPPIVLPTVKKQAYRQHKNPNNGPLLAISGILHQLRVEKVPEKTSLFRISLPADMFSVKEGMMKKRGENSPVVYFQAPENFPL

SEQ ID NO: 35615 - protein, 85 aa, unidentified
  REGION 1..85: note = Description of Unknown:cds_NZ_WFIY01000004.1_cds_WP_155862308.1_24 target sequence
MKVIKLKIKEPIAFSSRRIKSYYFSSADYLPAQTIRGAIIASKGDYSLLDSYYTSPAYPVVGEKPSVPSHAFSPAKSRKCKKYEE

SEQ ID NO: 35616 - protein, 85 aa, unidentified
  REGION 1..85: note = Description of Unknown:cds_NZ_WFIY01000004.1_cds_WP_155862308.1_24 target sequence
EKGILERLKKEGEKLLKEYPYPVEAKPKVGDLIYLTSEDEKRNYYEKVEVPSIITQHVAISKKTGSNEGGMLYAYEYKLLDKVWF

SEQ ID NO: 35617 - protein, 85 aa, unidentified
  REGION 1..85: note = Description of Unknown:cds_NZ_WFIY01000004.1_cds_WP_155862308.1_24 target sequence
LASDDLKLKDLKIGKGRNRGFGSAEVESVKEIDLEEPKDGDVVYCLSQCLPSFEKKFFDYDFIIGKTELYLGWFTRSFDGKIITG

SEQ ID NO: 35618 - protein, 84 aa, unidentified
  REGION 1..84: note = Description of Unknown:cds_NZ_WFIY01000004.1_cds_WP_155862308.1_24 target sequence
CLPSFEKKFFDYDFIIGKTELYLGWFTRSFDGKIITGQKPVIKVMSPGSLVRLNKIYDLDYLKPAGLNFMIKVSDLGELIKKVM

SEQ ID NO: 35619 - protein, 85 aa, unidentified
  REGION 1..85: note = Description of Unknown:cds_NZ_WFIY01000004.1_cds_WP_155862308.1_24 target sequence
DYLPAQTIRGAIIASKGDYSLLDSYYTSPAYPVVGEKPSVPSHAFSPAKSRKCKKYEEEKGILERLKKEGEKLLKEYPYPVEAKP

SEQ ID NO: 35620 - protein, 85 aa, unidentified
  REGION 1..85: note = Description of Unknown:cds_NZ_WFIY01000004.1_cds_WP_155862308.1_24 target sequence
KVGDLIYLTSEDEKRNYYEKVEVPSIITQHVAISKKTGSNEGGMLYAYEYKLLDKVWFLASDDLKLKDLKIGKGRNRGFGSAEVE

SEQ ID NO: 35621 - protein, 85 aa, unidentified
  REGION 1..85: note = Description of Unknown:cds_NZ_WFIY01000004.1_cds_WP_155862308.1_24 target sequence
SVKEIDLEEPKDGDVVYCLSQCLPSFEKKFFDYDFIIGKTELYLGWFTRSFDGKIITGQKPVIKVMSPGSLVRLNKIYDLDYLKP

SEQ ID NO: 35622 - protein, 85 aa, unidentified
  REGION 1..85: note = Description of Unknown:cds_NZ_WFIY01000004.1_cds_WP_155862453.1_205 target sequence
SNSATNSAEEAIYKKIAEIKDEISKLKQEKTQALEDLNKLKQKKLEKIEKLKGIRSQIDTVRNEFSLRLEELKKLKDRKQQLLQE

SEQ ID NO: 35623 - protein, 85 aa, unidentified
  REGION 1..85: note = Description of Unknown:cds_NZ_WFIY01000004.1_cds_WP_155862453.1_205 target sequence
IQGMRKQFDEIKAILQKTQGLDIDAIERRIQSLEWRLQTSSLPLDEEKRIVQKIAELEKKLGEARKMLEIKEKGTVERAEYLAKR

SEQ ID NO: 35624 - protein, 85 aa, unidentified
  REGION 1..85: note = Description of Unknown:cds_NZ_WFIY01000004.1_cds_WP_155862453.1_205 target sequence
IELSTIRQQIASIITELSQKRNILNSLKEDREKTKKEIDEINKQIEEIRNKIGNINNQIKEKNNEIENYIKQLKGEKVEATSSRP

SEQ ID NO: 35625 - protein, 84 aa, unidentified
  REGION 1..84: note = Description of Unknown:cds_NZ_WFIY01000004.1_cds_WP_155862453.1_205 target sequence
RNKIGNINNQIKEKNNEIENYIKQLKGEKVEATSSRPTREEIIEKKKKIAEEKLKSGQRLTFEELLILYGENDKEDGKDSDNIY

SEQ ID NO: 35626 - protein, 85 aa, unidentified
  REGION 1..85: note = Description of Unknown:cds_NZ_WFIY01000004.1_cds_WP_155862453.1_205 target sequence
QEKTQALEDLNKLKQKKLEKIEKLKGIRSQIDTVRNEFSLRLEELKKLKDRKQQLLQEIQGMRKQFDEIKAILQKTQGLDIDAIE

SEQ ID NO: 35627 - protein, 85 aa, unidentified
  REGION 1..85: note = Description of Unknown:cds_NZ_WFIY01000004.1_cds_WP_155862453.1_205 target sequence
RRIQSLEWRLQTSSLPLDEEKRIVQKIAELEKKLGEARKMLEIKEKGTVERAEYLAKRIELSTIRQQIASIITELSQKRNILNSL

SEQ ID NO: 35628 - protein, 85 aa, unidentified
  REGION 1..85: note = Description of Unknown:cds_NZ_WFIY01000004.1_cds_WP_155862453.1_205 target sequence
KEDREKTKKEIDEINKQIEEIRNKIGNINNQIKEKNNEIENYIKQLKGEKVEATSSRPTREEIIEKKKKIAEEKLKSGQRLTFEE

SEQ ID NO: 35629 - protein, 85 aa, unidentified
  REGION 1..85: note = Description of Unknown:cds_NZ_WFIY01000004.1_cds_WP_155863302.1_1260 target sequence
KISVEEAKELVYKIFSKVTYDEYAKYLSEELVEAEIEGHSDHGLQLIPYYIKLANGEEVDIGGQKIPPINPKGKVEISGENFVIV

SEQ ID NO: 35630 - protein, 85 aa, unidentified
  REGION 1..85: note = Description of Unknown:cds_NZ_WFIY01000004.1_cds_WP_155863302.1_1260 target sequence
NGNMTFGQVVLRRLVNYLLEKKLDYYVVIGKNISHLGRLSTFTKGLSKGNYASLIMARSPPLISLKGMKGRILGNNPISFGFPGI

SEQ ID NO: 35631 - protein, 85 aa, unidentified
  REGION 1..85: note = Description of Unknown:cds_NZ_WFIY01000004.1_cds_WP_155863302.1_1260 target sequence
IIDTALSVTSFGKVLEKYIKGEKLESKVIVNKEGELSDNPKDLLEGGALLPIGDYKGFNISLGIELFTTMFSDEEDVNPFIALVL

SEQ ID NO: 35632 - protein, 84 aa, unidentified
  REGION 1..84: note = Description of Unknown:cds_NZ_WFIY01000004.1_cds_WP_155863302.1_1260 target sequence
LLPIGDYKGFNISLGIELFTTMFSDEEDVNPFIALVLRANDNFKNVLLRLPNNYYLLNKESKLKNIKDLEIPDNLWKTLVNLAQ

SEQ ID NO: 35633 - protein, 85 aa, unidentified
  REGION 1..85: note = Description of Unknown:cds_NZ_WFIY01000004.1_cds_WP_155863302.1_1260 target sequence
SEELVEAEIEGHSDHGLQLIPYYIKLANGEEVDIGGQKIPPINPKGKVEISGENFVIVNGNMTFGQVVLRRLVNYLLEKKLDYYV

SEQ ID NO: 35634 - protein, 85 aa, unidentified
  REGION 1..85: note = Description of Unknown:cds_NZ_WFIY01000004.1_cds_WP_155863302.1_1260 target sequence
VIGKNISHLGRLSTFTKGLSKGNYASLIMARSPPLISLKGMKGRILGNNPISFGFPGIIIDTALSVTSFGKVLEKYIKGEKLESK

SEQ ID NO: 35635 - protein, 85 aa, unidentified
  REGION 1..85: note = Description of Unknown:cds_NZ_WFIY01000004.1_cds_WP_155863302.1_1260 target sequence
VIVNKEGELSDNPKDLLEGGALLPIGDYKGFNISLGIELFTTMFSDEEDVNPFIALVLRANDNFKNVLLRLPNNYYLLNKESKLK

SEQ ID NO: 35636 - protein, 85 aa, unidentified
  REGION 1..85: note = Description of Unknown:cds_NC_030656.1_cds_YP_009268839.1_124 target sequence
HRKEIVLAIDLNKSLATFIKHEFGNKIRWPSLSIGVVLSNTTTSINEEWLTSVEAMPTKKVFYEYTKDIITNKVNFCVHIKYVQQ

SEQ ID NO: 35637 - protein, 85 aa, unidentified
  REGION 1..85: note = Description of Unknown:cds_NC_030656.1_cds_YP_009268839.1_124 target sequence
SKINIVTMYDFDYYIIKDNKITKINKPSELKNTLLHSFQDFRQNNLQTIELIAFSSSTVISENLVNGLTFVDVEQFNKEYDNIKP

SEQ ID NO: 35638 - protein, 85 aa, unidentified
  REGION 1..85: note = Description of Unknown:cds_NC_030656.1_cds_YP_009268839.1_124 target sequence
SLPLERVWHLPFIVIAPNGKLKFYVETYSWIDTAKFFKEIIDILEDELIQSVRLHKLKTHSTDDQEVVKGVSMYNVTSGMLYVSD

SEQ ID NO: 35639 - protein, 84 aa, unidentified
  REGION 1..84: note = Description of Unknown:cds_NC_030656.1_cds_YP_009268839.1_124 target sequence
IQSVRLHKLKTHSTDDQEVVKGVSMYNVTSGMLYVSDLVTMCVVNFFGGDVRLHSYHKIDIGALNIDAFIDEITKAFERIRALV

SEQ ID NO: 35640 - protein, 85 aa, unidentified
  REGION 1..85: note = Description of Unknown:cds_NC_030656.1_cds_YP_009268839.1_124 target sequence
RWPSLSIGVVLSNTTTSINEEWLTSVEAMPTKKVFYEYTKDIITNKVNFCVHIKYVQQSKINIVTMYDFDYYIIKDNKITKINKP

SEQ ID NO: 35641 - protein, 85 aa, unidentified
  REGION 1..85: note = Description of Unknown:cds_NC_030656.1_cds_YP_009268839.1_124 target sequence
SELKNTLLHSFQDFRQNNLQTIELIAFSSSTVISENLVNGLTFVDVEQFNKEYDNIKPSLPLERVWHLPFIVIAPNGKLKFYVET

SEQ ID NO: 35642 - protein, 85 aa, unidentified
  REGION 1..85: note = Description of Unknown:cds_NC_030656.1_cds_YP_009268839.1_124 target sequence
YSWIDTAKFFKEIIDILEDELIQSVRLHKLKTHSTDDQEVVKGVSMYNVTSGMLYVSDLVTMCVVNFFGGDVRLHSYHKIDIGAL

SEQ ID NO: 35643 - protein, 85 aa, unidentified
  REGION 1..85: note = Description of Unknown:hvTR_Q2HR83 target sequence
TSRRPLKDHLFNHLFRYHYPSWDQILQELDTLSVATLNPDCHVPALNVEKTLYLAKTIQILVQHRQSEPYLVPAARANLAYSLQQ

SEQ ID NO: 35644 - protein, 85 aa, unidentified
  REGION 1..85: note = Description of Unknown:hvTR_Q2HR83 target sequence
LYKLGNDKIRGVINGMLPLVDAGCIGFERELIKGLPRVLTLQYPHTAPLESEPPTADCTEWCLSHFVGASGRLRSEVRDILTTHN

SEQ ID NO: 35645 - protein, 85 aa, unidentified
  REGION 1..85: note = Description of Unknown:hvTR_Q2HR83 target sequence
GTCAPSFQWMASVVKKFFLVETVIYEDFQDTDFNVQLNLCFFWTAVVQMYQRCIYEQKLVHIISTSLTLLKSTARSFFAWYDLYR

SEQ ID NO: 35646 - protein, 84 aa, unidentified
  REGION 1..84: note = Description of Unknown:hvTR_Q2HR83 target sequence
QMYQRCIYEQKLVHIISTSLTLLKSTARSFFAWYDLYRPNLGSAALVKYTEHLIRALTPDCSDVELGELCSHLHHCKHALFSIQ

SEQ ID NO: 35647 - protein, 85 aa, unidentified
  REGION 1..85: note = Description of Unknown:hvTR_Q2HR83 target sequence
ELDTLSVATLNPDCHVPALNVEKTLYLAKTIQILVQHRQSEPYLVPAARANLAYSLQQLYKLGNDKIRGVINGMLPLVDAGCIGF

SEQ ID NO: 35648 - protein, 85 aa, unidentified
  REGION 1..85: note = Description of Unknown:hvTR_Q2HR83 target sequence
ERELIKGLPRVLTLQYPHTAPLESEPPTADCTEWCLSHFVGASGRLRSEVRDILTTHNGTCAPSFQWMASVVKKFFLVETVIYED

SEQ ID NO: 35649 - protein, 85 aa, unidentified
  REGION 1..85: note = Description of Unknown:hvTR_Q2HR83 target sequence
FQDTDFNVQLNLCFFWTAVVQMYQRCIYEQKLVHIISTSLTLLKSTARSFFAWYDLYRPNLGSAALVKYTEHLIRALTPDCSDVE

SEQ ID NO: 35650 - protein, 85 aa, unidentified
  REGION 1..85: note = Description of Unknown:cds_NZ_WFIY01000004.1_cds_WP_155862719.1_521 target sequence
ILVGVDAGGTSTISIAYTCEGKFIGIGESGPGNFHNVGLENAVNNIRDAIYKSTKGLKPDVACIGLAGLDSKYDYEVLSSALKDL

SEQ ID NO: 35651 - protein, 85 aa, unidentified
  REGION 1..85: note = Description of Unknown:cds_NZ_WFIY01000004.1_cds_WP_155862719.1_521 target sequence
AKDTIIEHDSFISLYAETRGKPGIIIISGTGSVVMGYDGKRRLRVGGAGWLLSDEGSAYWIGRKALRLLVKMLDGREEKTLLADL

SEQ ID NO: 35652 - protein, 85 aa, unidentified
  REGION 1..85: note = Description of Unknown:cds_NZ_WFIY01000004.1_cds_WP_155862719.1_521 target sequence
ILQKLSASGLDDLIKWAYHEGHKIEEIASLAQVVDIAANKGDKKAQELFYLAAKEISNNAIYISKKLGIKTAYMSGGMFSSKLFK

SEQ ID NO: 35653 - protein, 84 aa, unidentified
  REGION 1..84: note = Description of Unknown:cds_NZ_WFIY01000004.1_cds_WP_155862719.1_521 target sequence
LFYLAAKEISNNAIYISKKLGIKTAYMSGGMFSSKLFKSYVVDLLKKEGIIALDKKKSPEFGALLIAFDKAGCINEPEEPHLHS

SEQ ID NO: 35654 - protein, 85 aa, unidentified
  REGION 1..85: note = Description of Unknown:cds_NZ_WFIY01000004.1_cds_WP_155862719.1_521 target sequence
ESGPGNFHNVGLENAVNNIRDAIYKSTKGLKPDVACIGLAGLDSKYDYEVLSSALKDLAKDTIIEHDSFISLYAETRGKPGIIII

SEQ ID NO: 35655 - protein, 85 aa, unidentified
  REGION 1..85: note = Description of Unknown:cds_NZ_WFIY01000004.1_cds_WP_155862719.1_521 target sequence
SGTGSVVMGYDGKRRLRVGGAGWLLSDEGSAYWIGRKALRLLVKMLDGREEKTLLADLILQKLSASGLDDLIKWAYHEGHKIEEI

SEQ ID NO: 35656 - protein, 85 aa, unidentified
  REGION 1..85: note = Description of Unknown:cds_NZ_WFIY01000004.1_cds_WP_155862719.1_521 target sequence
ASLAQVVDIAANKGDKKAQELFYLAAKEISNNAIYISKKLGIKTAYMSGGMFSSKLFKSYVVDLLKKEGIIALDKKKSPEFGALL

SEQ ID NO: 35657 - protein, 85 aa, unidentified
  REGION 1..85: note = Description of Unknown:cds_NZ_WFIY01000004.1_cds_WP_155863062.1_966 target sequence
GRNYFLDKDIIKDKNDNLYVVITNYNPPGYVFAYLKYVYTREGLWKGYERVFKKYGVKNLIKIKQNFEYEPCYGSTFPVLKISEI

SEQ ID NO: 35658 - protein, 85 aa, unidentified
  REGION 1..85: note = Description of Unknown:cds_NZ_WFIY01000004.1_cds_WP_155863062.1_966 target sequence
KNHFKPEDKIKEIIHKPTNKLEETVINMLAEMEVNLPLDKIGVTGSLLAGISHESSDVDLVIYGKKYAEDFVNVFQGFEEDKDWI

SEQ ID NO: 35659 - protein, 85 aa, unidentified
  REGION 1..85: note = Description of Unknown:cds_NZ_WFIY01000004.1_cds_WP_155863062.1_966 target sequence
FETSENYSLPIEVVKTIYSKKTRGKYKGTKYSFLFVDDQPWKYNEKVCVEVNPIKVVGENVSDYRALFYPSISTLYSQGKTFNIV

SEQ ID NO: 35660 - protein, 84 aa, unidentified
  REGION 1..84: note = Description of Unknown:cds_NZ_WFIY01000004.1_cds_WP_155863062.1_966 target sequence
CVEVNPIKVVGENVSDYRALFYPSISTLYSQGKTFNIVSYEGIYNLALYYSKKIEAFGMLMKCEDELEIVIGDKKIGGYIRPIM

SEQ ID NO: 35661 - protein, 85 aa, unidentified
  REGION 1..85: note = Description of Unknown:cds_NZ_WFIY01000004.1_cds_WP_155863062.1_966 target sequence
PGYVFAYLKYVYTREGLWKGYERVFKKYGVKNLIKIKQNFEYEPCYGSTFPVLKISEIKNHFKPEDKIKEIIHKPTNKLEETVIN

SEQ ID NO: 35662 - protein, 85 aa, unidentified
  REGION 1..85: note = Description of Unknown:cds_NZ_WFIY01000004.1_cds_WP_155863062.1_966 target sequence
MLAEMEVNLPLDKIGVTGSLLAGISHESSDVDLVIYGKKYAEDFVNVFQGFEEDKDWIFETSENYSLPIEVVKTIYSKKTRGKYK

SEQ ID NO: 35663 - protein, 85 aa, unidentified
  REGION 1..85: note = Description of Unknown:cds_NZ_WFIY01000004.1_cds_WP_155863062.1_966 target sequence
GTKYSFLFVDDQPWKYNEKVCVEVNPIKVVGENVSDYRALFYPSISTLYSQGKTFNIVSYEGIYNLALYYSKKIEAFGMLMKCED

SEQ ID NO: 35664 - protein, 85 aa, unidentified
  REGION 1..85: note = Description of Unknown:cds_NZ_WFIY01000004.1_cds_WP_155864397.1_984 target sequence
DSQGRVTSHLSGIFYRTISLLEEGVIPIYVFDGKPPELKAQELERRRKIKEEAEKKLEKAKEEGETKELKKYSQMATRLTNDMAE

SEQ ID NO: 35665 - protein, 85 aa, unidentified
  REGION 1..85: note = Description of Unknown:cds_NZ_WFIY01000004.1_cds_WP_155864397.1_984 target sequence
ESKKLLEAMGIPVVQAPSEGEAEAAYLCSQGYTWAAASQDYDSLLFGANKLIRNLTLTGKRKLPKKDVYVEIKPELIELESLLKK

SEQ ID NO: 35666 - protein, 85 aa, unidentified
  REGION 1..85: note = Description of Unknown:cds_NZ_WFIY01000004.1_cds_WP_155864397.1_984 target sequence
LGITREQLVDIGILIGTDYDPDGIKGIGPVTALRIIRKYGNIEKAVEKGELPKYILDLNINEIRSIFLNPPVVKPESSLDLKEPN

SEQ ID NO: 35667 - protein, 84 aa, unidentified
  REGION 1..84: note = Description of Unknown:cds_NZ_WFIY01000004.1_cds_WP_155864397.1_984 target sequence
KGELPKYILDLNINEIRSIFLNPPVVKPESSLDLKEPNEEEIKKILIDEHNFSEDRVTNGIERLIKAGKEAKGASRQSGLDQWF

SEQ ID NO: 35668 - protein, 85 aa, unidentified
  REGION 1..85: note = Description of Unknown:cds_NZ_WFIY01000004.1_cds_WP_155864397.1_984 target sequence
IYVFDGKPPELKAQELERRRKIKEEAEKKLEKAKEEGETKELKKYSQMATRLTNDMAEESKKLLEAMGIPVVQAPSEGEAEAAYL

SEQ ID NO: 35669 - protein, 85 aa, unidentified
  REGION 1..85: note = Description of Unknown:cds_NZ_WFIY01000004.1_cds_WP_155864397.1_984 target sequence
CSQGYTWAAASQDYDSLLFGANKLIRNLTLTGKRKLPKKDVYVEIKPELIELESLLKKLGITREQLVDIGILIGTDYDPDGIKGI

SEQ ID NO: 35670 - protein, 85 aa, unidentified
  REGION 1..85: note = Description of Unknown:cds_NZ_WFIY01000004.1_cds_WP_155864397.1_984 target sequence
GPVTALRIIRKYGNIEKAVEKGELPKYILDLNINEIRSIFLNPPVVKPESSLDLKEPNEEEIKKILIDEHNFSEDRVTNGIERLI

SEQ ID NO: 35671 - protein, 85 aa, unidentified
  REGION 1..85: note = Description of Unknown:cds_NZ_WFIY01000004.1_cds_1131 target sequence
VNWDPGAASANKGKFYTLMRFLRIEQTLFSLPMAYLGAFVAIRGIPPIQTILLIFSALFFLRIAGMTNDNLADREIDAKNPRTRT

SEQ ID NO: 35672 - protein, 85 aa, unidentified
  REGION 1..85: note = Description of Unknown:cds_NZ_WFIY01000004.1_cds_1131 target sequence
RPLVTGAIKVWEAKALIIIGLAGFFISAYFVNIWAFVLSPIVALIVMTYPYMKRYTAFANYHLASIQGLAVFSGAVASAGLYYHS

SEQ ID NO: 35673 - protein, 85 aa, unidentified
  REGION 1..85: note = Description of Unknown:cds_NZ_WFIY01000004.1_cds_1131 target sequence
LYCVLKAVPWPFVIATIFWALGFDLYNHIPDAEFDKQMGLHSFAVLLGGFALKFAGLNQLASVILDFLADFMYNLGPIAYASTIA

SEQ ID NO: 35674 - protein, 84 aa, unidentified
  REGION 1..84: note = Description of Unknown:cds_NZ_WFIY01000004.1_cds_1131 target sequence
GFALKFAGLNQLASVILDFLADFMYNLGPIAYASTIAHGLIMAYAYFLANRGNFGSAFYYNIYSSIVLGLGIDIDVLLGIPKFF

SEQ ID NO: 35675 - protein, 85 aa, unidentified
  REGION 1..85: note = Description of Unknown:cds_NZ_WFIY01000004.1_cds_1131 target sequence
LFSLPMAYLGAFVAIRGIPPIQTILLIFSALFFLRIAGMTNDNLADREIDAKNPRTRTRPLVTGAIKVWEAKALIIIGLAGFFIS

SEQ ID NO: 35676 - protein, 85 aa, unidentified
  REGION 1..85: note = Description of Unknown:cds_NZ_WFIY01000004.1_cds_1131 target sequence
AYFVNIWAFVLSPIVALIVMTYPYMKRYTAFANYHLASIQGLAVFSGAVASAGLYYHSLYCVLKAVPWPFVIATIFWALGFDLYN

SEQ ID NO: 35677 - protein, 85 aa, unidentified
  REGION 1..85: note = Description of Unknown:cds_NZ_WFIY01000004.1_cds_1131 target sequence
HIPDAEFDKQMGLHSFAVLLGGFALKFAGLNQLASVILDFLADFMYNLGPIAYASTIAHGLIMAYAYFLANRGNFGSAFYYNIYS

SEQ ID NO: 35678 - protein, 85 aa, unidentified
  REGION 1..85: note = Description of Unknown:cds_NZ_WFIY01000004.1_cds_WP_152942426.1_2037 target sequence
TEVPSYIKEKKVIRQQYFLRGNAACPGCPIPKELDLLLEVMGKKTVLVVPASCSTVIMGDIHGSPSTVPVVHSAFASAAAIASGL

SEQ ID NO: 35679 - protein, 85 aa, unidentified
  REGION 1..85: note = Description of Unknown:cds_NZ_WFIY01000004.1_cds_WP_152942426.1_2037 target sequence
SRQLKMRGEDAKVVVWAGDGATGDIGFATVSGAAERNEDILYVCYDNEAFMNTGIQRSSLTPYGAWTTTTPAGKREFKKPLPFIM

SEQ ID NO: 35680 - protein, 85 aa, unidentified
  REGION 1..85: note = Description of Unknown:cds_NZ_WFIY01000004.1_cds_WP_152942426.1_2037 target sequence
MEHKIPYVATASIAYPFDYQAKVRKAKDIQGFRYIHLLSPCPPGWRFDSSLTIEVAKLAVETGIWPLFEVINGEFQLTGISKVLL

SEQ ID NO: 35681 - protein, 84 aa, unidentified
  REGION 1..84: note = Description of Unknown:cds_NZ_WFIY01000004.1_cds_WP_152942426.1_2037 target sequence
DSSLTIEVAKLAVETGIWPLFEVINGEFQLTGISKVLLDKSKRKPITEYLKLQGRFSKMSEKDIKIMQDAVDAMWDYIAELVKR

SEQ ID NO: 35682 - protein, 85 aa, unidentified
  REGION 1..85: note = Description of Unknown:cds_NZ_WFIY01000004.1_cds_WP_152942426.1_2037 target sequence
CPIPKELDLLLEVMGKKTVLVVPASCSTVIMGDIHGSPSTVPVVHSAFASAAAIASGLSRQLKMRGEDAKVVVWAGDGATGDIGF

SEQ ID NO: 35683 - protein, 85 aa, unidentified
  REGION 1..85: note = Description of Unknown:cds_NZ_WFIY01000004.1_cds_WP_152942426.1_2037 target sequence
ATVSGAAERNEDILYVCYDNEAFMNTGIQRSSLTPYGAWTTTTPAGKREFKKPLPFIMMEHKIPYVATASIAYPFDYQAKVRKAK

SEQ ID NO: 35684 - protein, 85 aa, unidentified
  REGION 1..85: note = Description of Unknown:cds_NZ_WFIY01000004.1_cds_WP_152942426.1_2037 target sequence
DIQGFRYIHLLSPCPPGWRFDSSLTIEVAKLAVETGIWPLFEVINGEFQLTGISKVLLDKSKRKPITEYLKLQGRFSKMSEKDIK

SEQ ID NO: 35685 - protein, 85 aa, unidentified
  REGION 1..85: note = Description of Unknown:cds_NZ_WFIY01000004.1_cds_WP_155862343.1_71 target sequence
INPYADGLKEIKEGSLYEILANIISFIGAIILLLFLFAYIISSPTTTISNLQLSSSLIGILAAVIVVIIGAILSIIGIIKLRSGF

SEQ ID NO: 35686 - protein, 85 aa, unidentified
  REGION 1..85: note = Description of Unknown:cds_NZ_WFIY01000004.1_cds_WP_155862343.1_71 target sequence
NLLKNTGLDVSIGSTGATLILISLGILIVGVVTVILVVGIFFMVIAAILELIGGIMLGLGFYNLGKGLNNSTIETAGILIIIGGI

SEQ ID NO: 35687 - protein, 85 aa, unidentified
  REGION 1..85: note = Description of Unknown:cds_NZ_WFIY01000004.1_cds_WP_155862343.1_71 target sequence
IDLLISIGGLLDFIAFILIYTSINNILSKGIPFVQTFSQMLGVIKGNGYAYLNVYSNVEGTIISARIEGTAITSTFITPNKLSIG

SEQ ID NO: 35688 - protein, 84 aa, unidentified
  REGION 1..84: note = Description of Unknown:cds_NZ_WFIY01000004.1_cds_WP_155862343.1_71 target sequence
NGYAYLNVYSNVEGTIISARIEGTAITSTFITPNKLSIGNNSITVNFGNVQGLIPYSNYIVSLIVQDNSGRTILIPVNAQYQPY

SEQ ID NO: 35689 - protein, 85 aa, unidentified
  REGION 1..85: note = Description of Unknown:cds_NZ_WFIY01000004.1_cds_WP_155862343.1_71 target sequence
GAIILLLFLFAYIISSPTTTISNLQLSSSLIGILAAVIVVIIGAILSIIGIIKLRSGFNLLKNTGLDVSIGSTGATLILISLGIL

SEQ ID NO: 35690 - protein, 85 aa, unidentified
  REGION 1..85: note = Description of Unknown:cds_NZ_WFIY01000004.1_cds_WP_155862343.1_71 target sequence
IVGVVTVILVVGIFFMVIAAILELIGGIMLGLGFYNLGKGLNNSTIETAGILIIIGGIIDLLISIGGLLDFIAFILIYTSINNIL

SEQ ID NO: 35691 - protein, 85 aa, unidentified
  REGION 1..85: note = Description of Unknown:cds_NZ_WFIY01000004.1_cds_WP_155862343.1_71 target sequence
SKGIPFVQTFSQMLGVIKGNGYAYLNVYSNVEGTIISARIEGTAITSTFITPNKLSIGNNSITVNFGNVQGLIPYSNYIVSLIVQ

SEQ ID NO: 35692 - protein, 85 aa, unidentified
  REGION 1..85: note = Description of Unknown:cds_NZ_WFIY01000004.1_cds_WP_155862739.1_547 target sequence
IYVVGSYNTDYIIRVEEFPAVGETIFAKEIIVSHGGKGSNQAVSAARLGSKVRLIVAVGNDERGKDALRFWKEEGVDTSGVKIKN

SEQ ID NO: 35693 - protein, 85 aa, unidentified
  REGION 1..85: note = Description of Unknown:cds_NZ_WFIY01000004.1_cds_WP_155862739.1_547 target sequence
TYTGSAYILVNKRGETMIVVNRGANYELNEDDVELDDGILLTQMEIRENVVKKALQRFEGIRILNPAPANISDYSILNYVDILTP

SEQ ID NO: 35694 - protein, 85 aa, unidentified
  REGION 1..85: note = Description of Unknown:cds_NZ_WFIY01000004.1_cds_WP_155862739.1_547 target sequence
NEIEFKELTSADDIEYGLNILLKKVKMAVIVTLGERGALIATKDKRVLISAPKVKAIDTTGAGDVFNAALAHSLEKGEDLESAVE

SEQ ID NO: 35695 - protein, 84 aa, unidentified
  REGION 1..84: note = Description of Unknown:cds_NZ_WFIY01000004.1_cds_WP_155862739.1_547 target sequence
VLISAPKVKAIDTTGAGDVFNAALAHSLEKGEDLESAVEFANIIASYSVTKIGAIGPKWEEVREFVEKEKRNEKDRRREEERRN

SEQ ID NO: 35696 - protein, 85 aa, unidentified
  REGION 1..85: note = Description of Unknown:cds_NZ_WFIY01000004.1_cds_WP_155862739.1_547 target sequence
KEIIVSHGGKGSNQAVSAARLGSKVRLIVAVGNDERGKDALRFWKEEGVDTSGVKIKNTYTGSAYILVNKRGETMIVVNRGANYE

SEQ ID NO: 35697 - protein, 85 aa, unidentified
  REGION 1..85: note = Description of Unknown:cds_NZ_WFIY01000004.1_cds_WP_155862739.1_547 target sequence
LNEDDVELDDGILLTQMEIRENVVKKALQRFEGIRILNPAPANISDYSILNYVDILTPNEIEFKELTSADDIEYGLNILLKKVKM

SEQ ID NO: 35698 - protein, 85 aa, unidentified
  REGION 1..85: note = Description of Unknown:cds_NZ_WFIY01000004.1_cds_WP_155862739.1_547 target sequence
AVIVTLGERGALIATKDKRVLISAPKVKAIDTTGAGDVFNAALAHSLEKGEDLESAVEFANIIASYSVTKIGAIGPKWEEVREFV

SEQ ID NO: 35699 - protein, 85 aa, unidentified
  REGION 1..85: note = Description of Unknown:cds_NZ_WFIY01000004.1_cds_WP_155863679.1_1547 target sequence
IIAEGIRKKYGNKSALNGVSLKAEKGKITAILGPNGAGKTTLIRIILGLIFPDDGEVRILDKDPFKDKSIFKKIGYIQELPNLPP

SEQ ID NO: 35700 - protein, 85 aa, unidentified
  REGION 1..85: note = Description of Unknown:cds_NZ_WFIY01000004.1_cds_WP_155863679.1_1547 target sequence
FLTGREVLEFSAKIKGVDKSEIPKLLEMVGMTENADKKIAKYSKGMIQRIAIAEAMLGDPEVLIMDEPNMGTDPVLITNFRNMIK

SEQ ID NO: 35701 - protein, 85 aa, unidentified
  REGION 1..85: note = Description of Unknown:cds_NZ_WFIY01000004.1_cds_WP_155863679.1_1547 target sequence
NIAKDGRTVLMTSHEMEDVKKIADKVYFIFKGSVYFEGTVEDLIKRFLGIRVIVETDDIENLKAEATKIDFIKGVEDGEKNKVIL

SEQ ID NO: 35702 - protein, 84 aa, unidentified
  REGION 1..84: note = Description of Unknown:cds_NZ_WFIY01000004.1_cds_WP_155863679.1_1547 target sequence
FLGIRVIVETDDIENLKAEATKIDFIKGVEDGEKNKVILTLTEDRREELIKRLILAGVRIRSFYLDNELEEAYLNIVKEAMSND

SEQ ID NO: 35703 - protein, 85 aa, unidentified
  REGION 1..85: note = Description of Unknown:cds_NZ_WFIY01000004.1_cds_WP_155863679.1_1547 target sequence
ITAILGPNGAGKTTLIRIILGLIFPDDGEVRILDKDPFKDKSIFKKIGYIQELPNLPPFLTGREVLEFSAKIKGVDKSEIPKLLE

SEQ ID NO: 35704 - protein, 85 aa, unidentified
  REGION 1..85: note = Description of Unknown:cds_NZ_WFIY01000004.1_cds_WP_155863679.1_1547 target sequence
MVGMTENADKKIAKYSKGMIQRIAIAEAMLGDPEVLIMDEPNMGTDPVLITNFRNMIKNIAKDGRTVLMTSHEMEDVKKIADKVY

SEQ ID NO: 35705 - protein, 85 aa, unidentified
  REGION 1..85: note = Description of Unknown:cds_NZ_WFIY01000004.1_cds_WP_155863679.1_1547 target sequence
FIFKGSVYFEGTVEDLIKRFLGIRVIVETDDIENLKAEATKIDFIKGVEDGEKNKVILTLTEDRREELIKRLILAGVRIRSFYLD

SEQ ID NO: 35706 - protein, 85 aa, unidentified
  REGION 1..85: note = Description of Unknown:cds_NZ_WFIY01000004.1_cds_WP_155864026.1_1957 target sequence
TSVVTGGAGYIGGHLVDHLIENGEDVISIDDYSSGSYVNEKAQNIKLDLRIAYPTIPKEAIIYHLAANPDVKTSMENIYEHFERD

SEQ ID NO: 35707 - protein, 85 aa, unidentified
  REGION 1..85: note = Description of Unknown:cds_NZ_WFIY01000004.1_cds_WP_155864026.1_1957 target sequence
VKVTLNVMEMARKYDAKMVIFFSSSTVYGEGKIPTTEFDEIKPISNYGLFKVLGEEILKFYTRNYGIRGISLRLANITGGRISHG

SEQ ID NO: 35708 - protein, 85 aa, unidentified
  REGION 1..85: note = Description of Unknown:cds_NZ_WFIY01000004.1_cds_WP_155864026.1_1957 target sequence
VVIDFIKKLRKNKEVLEILGNGKQSKSYLYITDLLSAVDVIVKYFKGLYDTFNIGNDDWVTVDEIARIVEEEMGLSPKHVYVDAG

SEQ ID NO: 35709 - protein, 84 aa, unidentified
  REGION 1..84: note = Description of Unknown:cds_NZ_WFIY01000004.1_cds_WP_155864026.1_1957 target sequence
GLYDTFNIGNDDWVTVDEIARIVEEEMGLSPKHVYVDAGEGRGWKGDVRFMLLDTSKIKSFGWLPKYSSAQAVRLAVRDALDKV

SEQ ID NO: 35710 - protein, 85 aa, unidentified
  REGION 1..85: note = Description of Unknown:cds_NZ_WFIY01000004.1_cds_WP_155864026.1_1957 target sequence
SIDDYSSGSYVNEKAQNIKLDLRIAYPTIPKEAIIYHLAANPDVKTSMENIYEHFERDVKVTLNVMEMARKYDAKMVIFFSSSTV

SEQ ID NO: 35711 - protein, 85 aa, unidentified
  REGION 1..85: note = Description of Unknown:cds_NZ_WFIY01000004.1_cds_WP_155864026.1_1957 target sequence
YGEGKIPTTEFDEIKPISNYGLFKVLGEEILKFYTRNYGIRGISLRLANITGGRISHGVVIDFIKKLRKNKEVLEILGNGKQSKS

SEQ ID NO: 35712 - protein, 85 aa, unidentified
  REGION 1..85: note = Description of Unknown:cds_NZ_WFIY01000004.1_cds_WP_155864026.1_1957 target sequence
YLYITDLLSAVDVIVKYFKGLYDTFNIGNDDWVTVDEIARIVEEEMGLSPKHVYVDAGEGRGWKGDVRFMLLDTSKIKSFGWLPK

SEQ ID NO: 35713 - protein, 85 aa, unidentified
  REGION 1..85: note = Description of Unknown:cds_NC_035460.1_cds_YP_009407957.1_6 target sequence
DKNYKPPSVRKRCNSYPPFGEVVTSIFLETKQPIYRIPKCNVLTTCTIHESLHGTIYKGKFGDKTVAIKSFSQFRRSHKCMIDII

SEQ ID NO: 35714 - protein, 85 aa, unidentified
  REGION 1..85: note = Description of Unknown:cds_NC_035460.1_cds_YP_009407957.1_6 target sequence
TENFKVRKIHRNNLLNVFGYIIDVQDSLPKVSIVMEYCKYGYLRNVLDTQRELTLETRVDLIIDAAYALMCYYHYKPVYRFISTN

SEQ ID NO: 35715 - protein, 85 aa, unidentified
  REGION 1..85: note = Description of Unknown:cds_NC_035460.1_cds_YP_009407957.1_6 target sequence
CFMMTENYRLKLICYGLEKTIVIPYKKGVKQSVYMSPKIINDVFSPFTKEDDVYSFGIVMWEIITGMRPFNSKTAKEIYNMIKNG

SEQ ID NO: 35716 - protein, 84 aa, unidentified
  REGION 1..84: note = Description of Unknown:cds_NC_035460.1_cds_YP_009407957.1_6 target sequence
FTKEDDVYSFGIVMWEIITGMRPFNSKTAKEIYNMIKNGFKLSIDKSYPFVLRQLISSSLDQNPKNRPTIVDIFNKLTYYKYDK

SEQ ID NO: 35717 - protein, 85 aa, unidentified
  REGION 1..85: note = Description of Unknown:cds_NC_035460.1_cds_YP_009407957.1_6 target sequence
LETKQPIYRIPKCNVLTTCTIHESLHGTIYKGKFGDKTVAIKSFSQFRRSHKCMIDIITENFKVRKIHRNNLLNVFGYIIDVQDS

SEQ ID NO: 35718 - protein, 85 aa, unidentified
  REGION 1..85: note = Description of Unknown:cds_NC_035460.1_cds_YP_009407957.1_6 target sequence
LPKVSIVMEYCKYGYLRNVLDTQRELTLETRVDLIIDAAYALMCYYHYKPVYRFISTNCFMMTENYRLKLICYGLEKTIVIPYKK

SEQ ID NO: 35719 - protein, 85 aa, unidentified
  REGION 1..85: note = Description of Unknown:cds_NC_035460.1_cds_YP_009407957.1_6 target sequence
GVKQSVYMSPKIINDVFSPFTKEDDVYSFGIVMWEIITGMRPFNSKTAKEIYNMIKNGFKLSIDKSYPFVLRQLISSSLDQNPKN

SEQ ID NO: 35720 - protein, 85 aa, unidentified
  REGION 1..85: note = Description of Unknown:cds_NC_007409.1_cds_YP_319875.1_44 target sequence
AHFTLDTFTFNKDVRKVSFGEYNIRPPLIKPSKLTYVENGGVGKELSDGWALNFAIGCIHACPFCYVDNIHKRFTFARVGDVVQR

SEQ ID NO: 35721 - protein, 85 aa, unidentified
  REGION 1..85: note = Description of Unknown:cds_NC_007409.1_cds_YP_319875.1_44 target sequence
PWGMYFLKPRNIDEAIKKTPWKRWKGKLVMMSSTHDPYLPQLYPTSRKILEKALPAGVKFLIQTRSVLVTKDLDLLSEYKDQVIL

SEQ ID NO: 35722 - protein, 85 aa, unidentified
  REGION 1..85: note = Description of Unknown:cds_NC_007409.1_cds_YP_319875.1_44 target sequence
QVSIATLEEKFASIIEPRAPPPKARLEVLRKAKEVGLKVGVIVAPIFPPNKVREDVKEDLEMIMKELADIGVDQVFGEMLHERGM

SEQ ID NO: 35723 - protein, 84 aa, unidentified
  REGION 1..84: note = Description of Unknown:cds_NC_007409.1_cds_YP_319875.1_44 target sequence
FPPNKVREDVKEDLEMIMKELADIGVDQVFGEMLHERGMNMEYIESLLWEKVKIDKELDEELGKMFTELLNKYHLRGKWWYEKH

SEQ ID NO: 35724 - protein, 85 aa, unidentified
  REGION 1..85: note = Description of Unknown:cds_NC_007409.1_cds_YP_319875.1_44 target sequence
LIKPSKLTYVENGGVGKELSDGWALNFAIGCIHACPFCYVDNIHKRFTFARVGDVVQRPWGMYFLKPRNIDEAIKKTPWKRWKGK

SEQ ID NO: 35725 - protein, 85 aa, unidentified
  REGION 1..85: note = Description of Unknown:cds_NC_007409.1_cds_YP_319875.1_44 target sequence
LVMMSSTHDPYLPQLYPTSRKILEKALPAGVKFLIQTRSVLVTKDLDLLSEYKDQVILQVSIATLEEKFASIIEPRAPPPKARLE

SEQ ID NO: 35726 - protein, 85 aa, unidentified
  REGION 1..85: note = Description of Unknown:cds_NC_007409.1_cds_YP_319875.1_44 target sequence
VLRKAKEVGLKVGVIVAPIFPPNKVREDVKEDLEMIMKELADIGVDQVFGEMLHERGMNMEYIESLLWEKVKIDKELDEELGKMF

SEQ ID NO: 35727 - protein, 85 aa, unidentified
  REGION 1..85: note = Description of Unknown:hvTR_P14353 target sequence
DSYEKEESVASTSGIQDLQTLSELVGPENAGEGELTIAEEPEENPRRPRRYTKREVKCVSYHAYKEIEDKHPQHIKLQDWIPTPE

SEQ ID NO: 35728 - protein, 85 aa, unidentified
  REGION 1..85: note = Description of Unknown:hvTR_P14353 target sequence
EMSKSLCKRLILCGLYSAEKASEILRMPFTVSWEQSDTDPDCFIVSYTCIFCDAVIHDPMPIRWDPEVGIWVKYKPLRGIVGSAV

SEQ ID NO: 35729 - protein, 85 aa, unidentified
  REGION 1..85: note = Description of Unknown:hvTR_P14353 target sequence
FIMHKHQRNCSLVKPSTSCSEGPKPRPRHDPVLRCDMFEKHHKPRQKRPRRRSIDNESCASSSDTMANEPGSLCTNPLWNPGPLL

SEQ ID NO: 35730 - protein, 84 aa, unidentified
  REGION 1..84: note = Description of Unknown:hvTR_P14353 target sequence
QKRPRRRSIDNESCASSSDTMANEPGSLCTNPLWNPGPLLSGLLEESSNLPNLEVHMSGGPFWEEVYGDSILGPPSGSGEHSVL

SEQ ID NO: 35731 - protein, 85 aa, unidentified
  REGION 1..85: note = Description of Unknown:hvTR_P14353 target sequence
ENAGEGELTIAEEPEENPRRPRRYTKREVKCVSYHAYKEIEDKHPQHIKLQDWIPTPEEMSKSLCKRLILCGLYSAEKASEILRM

SEQ ID NO: 35732 - protein, 85 aa, unidentified
  REGION 1..85: note = Description of Unknown:hvTR_P14353 target sequence
PFTVSWEQSDTDPDCFIVSYTCIFCDAVIHDPMPIRWDPEVGIWVKYKPLRGIVGSAVFIMHKHQRNCSLVKPSTSCSEGPKPRP

SEQ ID NO: 35733 - protein, 85 aa, unidentified
  REGION 1..85: note = Description of Unknown:hvTR_P14353 target sequence
RHDPVLRCDMFEKHHKPRQKRPRRRSIDNESCASSSDTMANEPGSLCTNPLWNPGPLLSGLLEESSNLPNLEVHMSGGPFWEEVY

SEQ ID NO: 35734 - protein, 85 aa, unidentified
  REGION 1..85: note = Description of Unknown:hvTR_Q87042 target sequence
DSYQEEEPVASTSGLQDLQTLSELVGPENAGEGDLVIAEEPEENPRRPRRYTKRDVKCVSYHAYKELEDKHPHHIKLQDWIPKPE

SEQ ID NO: 35735 - protein, 85 aa, unidentified
  REGION 1..85: note = Description of Unknown:hvTR_Q87042 target sequence
EMSKSICKRLILCGLYSGEKAREILKKPFTVSWEQSETNPDCFIVSYTCIFCDAVIHDPMPVVWDSEVEIWVKYKPLRGIVGSAV

SEQ ID NO: 35736 - protein, 85 aa, unidentified
  REGION 1..85: note = Description of Unknown:hvTR_Q87042 target sequence
FIMEKHQKNCSLVKPSTSCPEGPKPRRRHDPVLRCDMFEKHHKPRPKRSRKRSIDHESCASSGDTVANESGPLCTNTFWTPGPVL

SEQ ID NO: 35737 - protein, 84 aa, unidentified
  REGION 1..84: note = Description of Unknown:hvTR_Q87042 target sequence
PKRSRKRSIDHESCASSGDTVANESGPLCTNTFWTPGPVLQGLLGESSNLPDLEVHMSGGPFWKEVYGDSILGPPSGSGEHSVL

SEQ ID NO: 35738 - protein, 85 aa, unidentified
  REGION 1..85: note = Description of Unknown:hvTR_Q87042 target sequence
ENAGEGDLVIAEEPEENPRRPRRYTKRDVKCVSYHAYKELEDKHPHHIKLQDWIPKPEEMSKSICKRLILCGLYSGEKAREILKK

SEQ ID NO: 35739 - protein, 85 aa, unidentified
  REGION 1..85: note = Description of Unknown:hvTR_Q87042 target sequence
PFTVSWEQSETNPDCFIVSYTCIFCDAVIHDPMPVVWDSEVEIWVKYKPLRGIVGSAVFIMEKHQKNCSLVKPSTSCPEGPKPRR

SEQ ID NO: 35740 - protein, 85 aa, unidentified
  REGION 1..85: note = Description of Unknown:hvTR_Q87042 target sequence
RHDPVLRCDMFEKHHKPRPKRSRKRSIDHESCASSGDTVANESGPLCTNTFWTPGPVLQGLLGESSNLPDLEVHMSGGPFWKEVY

SEQ ID NO: 35741 - protein, 85 aa, unidentified
  REGION 1..85: note = Description of Unknown:cds_NZ_WFIY01000004.1_cds_WP_155862570.1_340 target sequence
LYLDGKKLEEILSAKDAVNAVKEAFSLYYQGKVTQPQRQVLTIKGNWWGIMSSYTDFSVVVKIVNVINENKNRGLPSVQGIVILM

SEQ ID NO: 35742 - protein, 85 aa, unidentified
  REGION 1..85: note = Description of Unknown:cds_NZ_WFIY01000004.1_cds_WP_155862570.1_340 target sequence
SPDTGEPLAVIDGTILTAIRTASASVLSTELSYGNRIPTLGIIGAGLEAYYHAKIASEYLSVSRILVTARKSHIELAKKIGADAV

SEQ ID NO: 35743 - protein, 85 aa, unidentified
  REGION 1..85: note = Description of Unknown:cds_NZ_WFIY01000004.1_cds_WP_155862570.1_340 target sequence
DLQTLLKESDVIFSTTSSKEPVVLGKFLKEDFHVSSIGAHTPDAREIDDETIAKAKTYIVDSLQAVSSESGDYIQPQKKGLIKNV

SEQ ID NO: 35744 - protein, 84 aa, unidentified
  REGION 1..84: note = Description of Unknown:cds_NZ_WFIY01000004.1_cds_WP_155862570.1_340 target sequence
EIDDETIAKAKTYIVDSLQAVSSESGDYIQPQKKGLIKNVIEIGKIITEGIKIERPSIFKTVGISAQDNLAAYYAYKLSQTFSK

SEQ ID NO: 35745 - protein, 85 aa, unidentified
  REGION 1..85: note = Description of Unknown:cds_NZ_WFIY01000004.1_cds_WP_155862570.1_340 target sequence
YYQGKVTQPQRQVLTIKGNWWGIMSSYTDFSVVVKIVNVINENKNRGLPSVQGIVILMSPDTGEPLAVIDGTILTAIRTASASVL

SEQ ID NO: 35746 - protein, 85 aa, unidentified
  REGION 1..85: note = Description of Unknown:cds_NZ_WFIY01000004.1_cds_WP_155862570.1_340 target sequence
STELSYGNRIPTLGIIGAGLEAYYHAKIASEYLSVSRILVTARKSHIELAKKIGADAVDLQTLLKESDVIFSTTSSKEPVVLGKF

SEQ ID NO: 35747 - protein, 85 aa, unidentified
  REGION 1..85: note = Description of Unknown:cds_NZ_WFIY01000004.1_cds_WP_155862570.1_340 target sequence
LKEDFHVSSIGAHTPDAREIDDETIAKAKTYIVDSLQAVSSESGDYIQPQKKGLIKNVIEIGKIITEGIKIERPSIFKTVGISAQ

SEQ ID NO: 35748 - protein, 85 aa, unidentified
  REGION 1..85: note = Description of Unknown:cds_NZ_WFIY01000004.1_cds_WP_155863061.1_965 target sequence
LEDILDQLCSEVAYILSSSSIIEASVFKPGNASRIQDIKSVKYEDILLSANLANAYYRKACIRGYNSSRPLYDLLYLTIKESKKM

SEQ ID NO: 35749 - protein, 85 aa, unidentified
  REGION 1..85: note = Description of Unknown:cds_NZ_WFIY01000004.1_cds_WP_155863061.1_965 target sequence
EVNYSILGTQLLLLPISYSSLLADNVENLRRKLSEVIISLDVEDTKWFFEALKQVKLSYLGKIDVMDYRETTNKTIYEVLVFSSN

SEQ ID NO: 35750 - protein, 85 aa, unidentified
  REGION 1..85: note = Description of Unknown:cds_NZ_WFIY01000004.1_cds_WP_155863061.1_965 target sequence
MDTIARNMIRNYEYSYTAYKIIKDSESLEKGIQKAFIEILSEQPDGLIYRKYGGKIALLISHMAREVKEDFTEKKLLDFNDFLVK

SEQ ID NO: 35751 - protein, 84 aa, unidentified
  REGION 1..84: note = Description of Unknown:cds_NZ_WFIY01000004.1_cds_WP_155863061.1_965 target sequence
LIYRKYGGKIALLISHMAREVKEDFTEKKLLDFNDFLVKNNYNPGSTADIIASGIALYLLDKWYEKTRNDYPLPLPRGCSRIYK

SEQ ID NO: 35752 - protein, 85 aa, unidentified
  REGION 1..85: note = Description of Unknown:cds_NZ_WFIY01000004.1_cds_WP_155863061.1_965 target sequence
KPGNASRIQDIKSVKYEDILLSANLANAYYRKACIRGYNSSRPLYDLLYLTIKESKKMEVNYSILGTQLLLLPISYSSLLADNVE

SEQ ID NO: 35753 - protein, 85 aa, unidentified
  REGION 1..85: note = Description of Unknown:cds_NZ_WFIY01000004.1_cds_WP_155863061.1_965 target sequence
NLRRKLSEVIISLDVEDTKWFFEALKQVKLSYLGKIDVMDYRETTNKTIYEVLVFSSNMDTIARNMIRNYEYSYTAYKIIKDSES

SEQ ID NO: 35754 - protein, 85 aa, unidentified
  REGION 1..85: note = Description of Unknown:cds_NZ_WFIY01000004.1_cds_WP_155863061.1_965 target sequence
LEKGIQKAFIEILSEQPDGLIYRKYGGKIALLISHMAREVKEDFTEKKLLDFNDFLVKNNYNPGSTADIIASGIALYLLDKWYEK

SEQ ID NO: 35755 - protein, 85 aa, unidentified
  REGION 1..85: note = Description of Unknown:cds_NZ_WFIY01000004.1_cds_WP_155863114.1_1032 target sequence
QNLSSTQREILLALVELYNKGKKMIKSKEVADMIGKDEGTVRNIILGLKVLGLVESKPGPNGGYIPTLKAYEFIKNPSISPILDK

SEQ ID NO: 35756 - protein, 85 aa, unidentified
  REGION 1..85: note = Description of Unknown:cds_NZ_WFIY01000004.1_cds_WP_155863114.1_1032 target sequence
LSLYRGNVETDIKIENIELLDITNPSGNKVILKVTGDLRKIRPGDPVRLGPTPYSRLVIDGVVINADDSRKEVLIDVKRMISVPK

SEQ ID NO: 35757 - protein, 85 aa, unidentified
  REGION 1..85: note = Description of Unknown:cds_NZ_WFIY01000004.1_cds_WP_155863114.1_1032 target sequence
EKVKNIIGRRLITLKPDMTLKEASMILYKEGIRGAPVLGEGEKVLGIITTADIIKAFFEGKYDAKVSDYMKTDVITIREEEDVLE

SEQ ID NO: 35758 - protein, 84 aa, unidentified
  REGION 1..84: note = Description of Unknown:cds_NZ_WFIY01000004.1_cds_WP_155863114.1_1032 target sequence
GIITTADIIKAFFEGKYDAKVSDYMKTDVITIREEEDVLEAIRKMVIYNVGRLLVVDSMQRVIGIVTRTDILKSIAGLELLWGV

SEQ ID NO: 35759 - protein, 85 aa, unidentified
  REGION 1..85: note = Description of Unknown:cds_NZ_WFIY01000004.1_cds_WP_155863114.1_1032 target sequence
KEVADMIGKDEGTVRNIILGLKVLGLVESKPGPNGGYIPTLKAYEFIKNPSISPILDKLSLYRGNVETDIKIENIELLDITNPSG

SEQ ID NO: 35760 - protein, 85 aa, unidentified
  REGION 1..85: note = Description of Unknown:cds_NZ_WFIY01000004.1_cds_WP_155863114.1_1032 target sequence
NKVILKVTGDLRKIRPGDPVRLGPTPYSRLVIDGVVINADDSRKEVLIDVKRMISVPKEKVKNIIGRRLITLKPDMTLKEASMIL

SEQ ID NO: 35761 - protein, 85 aa, unidentified
  REGION 1..85: note = Description of Unknown:cds_NZ_WFIY01000004.1_cds_WP_155863114.1_1032 target sequence
YKEGIRGAPVLGEGEKVLGIITTADIIKAFFEGKYDAKVSDYMKTDVITIREEEDVLEAIRKMVIYNVGRLLVVDSMQRVIGIVT

SEQ ID NO: 35762 - protein, 85 aa, unidentified
  REGION 1..85: note = Description of Unknown:cds_NZ_WFIY01000004.1_cds_WP_155863865.1_1768 target sequence
LNLQISWKRQVVKLLSIIVVLAIIAVLIHFAIKFASIHFPVIVPYLDYIYLATDAAIVGIGGYFIIGVLKKVINVYFLGKMEAST

SEQ ID NO: 35763 - protein, 85 aa, unidentified
  REGION 1..85: note = Description of Unknown:cds_NZ_WFIY01000004.1_cds_WP_155863865.1_1768 target sequence
ARTISFFIDIALYSILILVILAALGVNLTGAAIGGAIGGIAIGLAAQTVLSNILSGALVTGSKTLKAGDAVLLISWIWGSPIIGE

SEQ ID NO: 35764 - protein, 85 aa, unidentified
  REGION 1..85: note = Description of Unknown:cds_NZ_WFIY01000004.1_cds_WP_155863865.1_1768 target sequence
TIKVGVLFTEVKTINGNLVKVPNSAFLGNTVFTKLEGENSLIYPLQITVNADVPADKVMDKAKNYIKDELSKQKIPYPEIYFTSK

SEQ ID NO: 35765 - protein, 84 aa, unidentified
  REGION 1..84: note = Description of Unknown:cds_NZ_WFIY01000004.1_cds_WP_155863865.1_1768 target sequence
QITVNADVPADKVMDKAKNYIKDELSKQKIPYPEIYFTSKTGGTNVFTVILHFDNLNMLNSLLSVVNNAFDKAYWDTKNEVSKT

SEQ ID NO: 35766 - protein, 85 aa, unidentified
  REGION 1..85: note = Description of Unknown:cds_NZ_WFIY01000004.1_cds_WP_155863865.1_1768 target sequence
IHFAIKFASIHFPVIVPYLDYIYLATDAAIVGIGGYFIIGVLKKVINVYFLGKMEASTARTISFFIDIALYSILILVILAALGVN

SEQ ID NO: 35767 - protein, 85 aa, unidentified
  REGION 1..85: note = Description of Unknown:cds_NZ_WFIY01000004.1_cds_WP_155863865.1_1768 target sequence
LTGAAIGGAIGGIAIGLAAQTVLSNILSGALVTGSKTLKAGDAVLLISWIWGSPIIGETIKVGVLFTEVKTINGNLVKVPNSAFL

SEQ ID NO: 35768 - protein, 85 aa, unidentified
  REGION 1..85: note = Description of Unknown:cds_NZ_WFIY01000004.1_cds_WP_155863865.1_1768 target sequence
GNTVFTKLEGENSLIYPLQITVNADVPADKVMDKAKNYIKDELSKQKIPYPEIYFTSKTGGTNVFTVILHFDNLNMLNSLLSVVN

SEQ ID NO: 35769 - protein, 85 aa, unidentified
  REGION 1..85: note = Description of Unknown:cds_NZ_WFIY01000004.1_cds_WP_155864180.1_2139 target sequence
KFYQKFLLGILLIFALFALNVFVQALKPSSLISLALRAFSIVAGGIYFTIIFSDGVREVLERRKAGTLPASAIIIPNIIKYIGYI

SEQ ID NO: 35770 - protein, 85 aa, unidentified
  REGION 1..85: note = Description of Unknown:cds_NZ_WFIY01000004.1_cds_WP_155864180.1_2139 target sequence
LVFIGVLATFGVTSAEALAGGTFAGLVFGLALQPVLENLFAGILIISTGFISIGDHIRILNSQIPYMAANLPPYKYFSREYFEQG

SEQ ID NO: 35771 - protein, 85 aa, unidentified
  REGION 1..85: note = Description of Unknown:cds_NZ_WFIY01000004.1_cds_WP_155864180.1_2139 target sequence
LEGTVIEIDLFYSRLILENGREYRIPNSLLLKSSVIDYTSKLSKKLYVSIRVEFPLDKINLNTIEEEVKEALKDFEIEEGPYLSE

SEQ ID NO: 35772 - protein, 84 aa, unidentified
  REGION 1..84: note = Description of Unknown:cds_NZ_WFIY01000004.1_cds_WP_155864180.1_2139 target sequence
LYVSIRVEFPLDKINLNTIEEEVKEALKDFEIEEGPYLSEQSDKEHVIISLRISADVNNWKKAKSEALKRILALRHKIVKEQPA

SEQ ID NO: 35773 - protein, 85 aa, unidentified
  REGION 1..85: note = Description of Unknown:cds_NZ_WFIY01000004.1_cds_WP_155864180.1_2139 target sequence
PSSLISLALRAFSIVAGGIYFTIIFSDGVREVLERRKAGTLPASAIIIPNIIKYIGYILVFIGVLATFGVTSAEALAGGTFAGLV

SEQ ID NO: 35774 - protein, 85 aa, unidentified
  REGION 1..85: note = Description of Unknown:cds_NZ_WFIY01000004.1_cds_WP_155864180.1_2139 target sequence
FGLALQPVLENLFAGILIISTGFISIGDHIRILNSQIPYMAANLPPYKYFSREYFEQGLEGTVIEIDLFYSRLILENGREYRIPN

SEQ ID NO: 35775 - protein, 85 aa, unidentified
  REGION 1..85: note = Description of Unknown:cds_NZ_WFIY01000004.1_cds_WP_155864180.1_2139 target sequence
SLLLKSSVIDYTSKLSKKLYVSIRVEFPLDKINLNTIEEEVKEALKDFEIEEGPYLSEQSDKEHVIISLRISADVNNWKKAKSEA

SEQ ID NO: 35776 - protein, 85 aa, unidentified
  REGION 1..85: note = Description of Unknown:cds_NC_035460.1_cds_YP_009408077.1_126 target sequence
FKKDKIITVELDASLASFIKHGFNNHVKWPLLNIATVLDNTTTAVNEEWLTSIEHLPTKKIFYDYTSQILRNEVKFCIYLKSEQS

SEQ ID NO: 35777 - protein, 85 aa, unidentified
  REGION 1..85: note = Description of Unknown:cds_NC_035460.1_cds_YP_009408077.1_126 target sequence
HEKKFITLYDIDYYIIDESGAFIKINKPNELKETLLHTYQEYKLKNQQNIELIAFSSGTNINEDIVDKLTFLNIEVFNKEYANIK

SEQ ID NO: 35778 - protein, 85 aa, unidentified
  REGION 1..85: note = Description of Unknown:cds_NC_035460.1_cds_YP_009408077.1_126 target sequence
PILSPNFMYNIPIIVTAPQGKLTFYIETYSWFDYKSFLIDVLNYLEGVLVADIHNHKIEVTNIDNNNVSSYNSVSGILYVKDLVT

SEQ ID NO: 35779 - protein, 84 aa, unidentified
  REGION 1..84: note = Description of Unknown:cds_NC_035460.1_cds_YP_009408077.1_126 target sequence
EGVLVADIHNHKIEVTNIDNNNVSSYNSVSGILYVKDLVTMCIVNFFGCKCRLNSYHRFDMSKVDIEIFLKALSDAFIKISKQI

SEQ ID NO: 35780 - protein, 85 aa, unidentified
  REGION 1..85: note = Description of Unknown:cds_NC_035460.1_cds_YP_009408077.1_126 target sequence
KWPLLNIATVLDNTTTAVNEEWLTSIEHLPTKKIFYDYTSQILRNEVKFCIYLKSEQSHEKKFITLYDIDYYIIDESGAFIKINK

SEQ ID NO: 35781 - protein, 85 aa, unidentified
  REGION 1..85: note = Description of Unknown:cds_NC_035460.1_cds_YP_009408077.1_126 target sequence
PNELKETLLHTYQEYKLKNQQNIELIAFSSGTNINEDIVDKLTFLNIEVFNKEYANIKPILSPNFMYNIPIIVTAPQGKLTFYIE

SEQ ID NO: 35782 - protein, 85 aa, unidentified
  REGION 1..85: note = Description of Unknown:cds_NC_035460.1_cds_YP_009408077.1_126 target sequence
TYSWFDYKSFLIDVLNYLEGVLVADIHNHKIEVTNIDNNNVSSYNSVSGILYVKDLVTMCIVNFFGCKCRLNSYHRFDMSKVDIE

SEQ ID NO: 35783 - protein, 85 aa, unidentified
  REGION 1..85: note = Description of Unknown:cds_NC_005830.1_cds_YP_003760.1_35 target sequence
TQILVKNAFSWVNIAEDVCKFIPNCKLTVIDKEAIPSVEDTNVIYIGDLMNVKTISMLERIKAKNVVLWVDETRVPKTSYSLKNL

SEQ ID NO: 35784 - protein, 85 aa, unidentified
  REGION 1..85: note = Description of Unknown:cds_NC_005830.1_cds_YP_003760.1_35 target sequence
KYNYWIVPVSQWNKEVYEEHIGHTEEIIPRCTEFRRTEGKRRGNVLFGVVSFTPGVYKRYEELLLAVDYYRKNYGELEIYAYGHT

SEQ ID NO: 35785 - protein, 85 aa, unidentified
  REGION 1..85: note = Description of Unknown:cds_NC_005830.1_cds_YP_003760.1_35 target sequence
EGLPSFPGVHNMGRLGKSEIQKLYSIADFAIELGIEAFGMPSIEAWAMQVPMLYGNVNDVRNHAYGVSIDPVDFDAIDFGEYILP

SEQ ID NO: 35786 - protein, 84 aa, unidentified
  REGION 1..84: note = Description of Unknown:cds_NC_005830.1_cds_YP_003760.1_35 target sequence
WAMQVPMLYGNVNDVRNHAYGVSIDPVDFDAIDFGEYILPVPIYDEYKLAEKIREVAEIEEVPELPEKYRCSYTAKKLISYLEA

SEQ ID NO: 35787 - protein, 85 aa, unidentified
  REGION 1..85: note = Description of Unknown:cds_NC_005830.1_cds_YP_003760.1_35 target sequence
TVIDKEAIPSVEDTNVIYIGDLMNVKTISMLERIKAKNVVLWVDETRVPKTSYSLKNLKYNYWIVPVSQWNKEVYEEHIGHTEEI

SEQ ID NO: 35788 - protein, 85 aa, unidentified
  REGION 1..85: note = Description of Unknown:cds_NC_005830.1_cds_YP_003760.1_35 target sequence
IPRCTEFRRTEGKRRGNVLFGVVSFTPGVYKRYEELLLAVDYYRKNYGELEIYAYGHTEGLPSFPGVHNMGRLGKSEIQKLYSIA

SEQ ID NO: 35789 - protein, 85 aa, unidentified
  REGION 1..85: note = Description of Unknown:cds_NC_005830.1_cds_YP_003760.1_35 target sequence
DFAIELGIEAFGMPSIEAWAMQVPMLYGNVNDVRNHAYGVSIDPVDFDAIDFGEYILPVPIYDEYKLAEKIREVAEIEEVPELPE

SEQ ID NO: 35790 - protein, 85 aa, unidentified
  REGION 1..85: note = Description of Unknown:hvTR_D0EF64 target sequence
SGSNSIMTRLRARSTSCARHHPYTRAQLPRCEENETRASMTEDHPLLPDCDTMTMHSVSCVRGLPCSASFTVLQEFLIPWDMFLN

SEQ ID NO: 35791 - protein, 85 aa, unidentified
  REGION 1..85: note = Description of Unknown:hvTR_D0EF64 target sequence
PEELRIMRRCMHLCLCCATIDIFHSQVIHGRENWVLHCHCNRQGSLQCMAGGAVLAVWFRKVILGCMINQRCPWYRQIVNMHMPK

SEQ ID NO: 35792 - protein, 85 aa, unidentified
  REGION 1..85: note = Description of Unknown:hvTR_D0EF64 target sequence
EIMYVGSVFLRERHLIYIKIWYDGHAGAIISDMSFGWSAFNYGLLNNIVIMCCTYCSNLSEIRMRCCAHRTRKLMLRAIKIMLQD

SEQ ID NO: 35793 - protein, 84 aa, unidentified
  REGION 1..84: note = Description of Unknown:hvTR_D0EF64 target sequence
LNNIVIMCCTYCSNLSEIRMRCCAHRTRKLMLRAIKIMLQDTVDPDPISSSRTERRRQRLLVGLMRHNRPIPFSDYDSHRSSSR

SEQ ID NO: 35794 - protein, 85 aa, unidentified
  REGION 1..85: note = Description of Unknown:hvTR_D0EF64 target sequence
LPRCEENETRASMTEDHPLLPDCDTMTMHSVSCVRGLPCSASFTVLQEFLIPWDMFLNPEELRIMRRCMHLCLCCATIDIFHSQV

SEQ ID NO: 35795 - protein, 85 aa, unidentified
  REGION 1..85: note = Description of Unknown:hvTR_D0EF64 target sequence
IHGRENWVLHCHCNRQGSLQCMAGGAVLAVWFRKVILGCMINQRCPWYRQIVNMHMPKEIMYVGSVFLRERHLIYIKIWYDGHAG

SEQ ID NO: 35796 - protein, 85 aa, unidentified
  REGION 1..85: note = Description of Unknown:hvTR_D0EF64 target sequence
AIISDMSFGWSAFNYGLLNNIVIMCCTYCSNLSEIRMRCCAHRTRKLMLRAIKIMLQDTVDPDPISSSRTERRRQRLLVGLMRHN

SEQ ID NO: 35797 - protein, 85 aa, unidentified
  REGION 1..85: note = Description of Unknown:cds_NZ_WFIY01000004.1_cds_WP_155862559.1_328 target sequence
KGRDRILSILKERGSLPQTELVKISGMSKSRVSEILNELEKEGIIFRKQLVGKNLIVSLNKTKFLRLGIINAAEYPFIIPFIKKL

SEQ ID NO: 35798 - protein, 85 aa, unidentified
  REGION 1..85: note = Description of Unknown:cds_NZ_WFIY01000004.1_cds_WP_155862559.1_328 target sequence
REKGVEVEVKIYDNGLQVTKDLVLGKIDMGFSPVISQIIFSKIFDIKIIAGGAKGGAGIVGESCNIGSTVMSSMETWTLAEVRNA

SEQ ID NO: 35799 - protein, 85 aa, unidentified
  REGION 1..85: note = Description of Unknown:cds_NZ_WFIY01000004.1_cds_WP_155862559.1_328 target sequence
NIIPFNSPQELVKNFETRKVPAIAIWEPYLSILESKGHKVTHVFEPNHCCTLAIRSSLEDEEKIKEIYEDAFSWFLSSKDRWISD

SEQ ID NO: 35800 - protein, 84 aa, unidentified
  REGION 1..84: note = Description of Unknown:cds_NZ_WFIY01000004.1_cds_WP_155862559.1_328 target sequence
EPNHCCTLAIRSSLEDEEKIKEIYEDAFSWFLSSKDRWISDYSNLLGEDYNIMKKASERYYFDSYLDLKEVYKNLKKMNIYIPA

SEQ ID NO: 35801 - protein, 85 aa, unidentified
  REGION 1..85: note = Description of Unknown:cds_NZ_WFIY01000004.1_cds_WP_155862559.1_328 target sequence
SKSRVSEILNELEKEGIIFRKQLVGKNLIVSLNKTKFLRLGIINAAEYPFIIPFIKKLREKGVEVEVKIYDNGLQVTKDLVLGKI

SEQ ID NO: 35802 - protein, 85 aa, unidentified
  REGION 1..85: note = Description of Unknown:cds_NZ_WFIY01000004.1_cds_WP_155862559.1_328 target sequence
DMGFSPVISQIIFSKIFDIKIIAGGAKGGAGIVGESCNIGSTVMSSMETWTLAEVRNANIIPFNSPQELVKNFETRKVPAIAIWE

SEQ ID NO: 35803 - protein, 85 aa, unidentified
  REGION 1..85: note = Description of Unknown:cds_NZ_WFIY01000004.1_cds_WP_155862559.1_328 target sequence
PYLSILESKGHKVTHVFEPNHCCTLAIRSSLEDEEKIKEIYEDAFSWFLSSKDRWISDYSNLLGEDYNIMKKASERYYFDSYLDL

SEQ ID NO: 35804 - protein, 85 aa, unidentified
  REGION 1..85: note = Description of Unknown:cds_NZ_WFIY01000004.1_cds_WP_155862673.1_469 target sequence
LRDIISSLDFSKEDFLTIFSLADEVEKGKKLKLQEEKVVATAFFEPSTRTHLSFTTAALKLGAKTIGFSSTEGISEAKGENFADT

SEQ ID NO: 35805 - protein, 85 aa, unidentified
  REGION 1..85: note = Description of Unknown:cds_NZ_WFIY01000004.1_cds_WP_155862673.1_469 target sequence
IRMLENYSDCIIIRHKFDGAAKFASEISNKPIINAGDGKHEHPTQTLIDIYTVYKSFGSPDNLTYGILGDLKYARTVNSLLRGLT

SEQ ID NO: 35806 - protein, 85 aa, unidentified
  REGION 1..85: note = Description of Unknown:cds_NZ_WFIY01000004.1_cds_WP_155862673.1_469 target sequence
RFKPRFVYLISPEPLKARKEILSELNYPYKEIDSPSEVISEIDVLYVTRIQKERFPDEMEYEKVKESYTVDENLVNQMKKDSIIL

SEQ ID NO: 35807 - protein, 84 aa, unidentified
  REGION 1..84: note = Description of Unknown:cds_NZ_WFIY01000004.1_cds_WP_155862673.1_469 target sequence
YVTRIQKERFPDEMEYEKVKESYTVDENLVNQMKKDSIILHPLPRVNEIDRRIDSKPQAKYFYQASLGVPIRMSLLYKILSGEW

SEQ ID NO: 35808 - protein, 85 aa, unidentified
  REGION 1..85: note = Description of Unknown:cds_NZ_WFIY01000004.1_cds_WP_155862673.1_469 target sequence
GKKLKLQEEKVVATAFFEPSTRTHLSFTTAALKLGAKTIGFSSTEGISEAKGENFADTIRMLENYSDCIIIRHKFDGAAKFASEI

SEQ ID NO: 35809 - protein, 85 aa, unidentified
  REGION 1..85: note = Description of Unknown:cds_NZ_WFIY01000004.1_cds_WP_155862673.1_469 target sequence
SNKPIINAGDGKHEHPTQTLIDIYTVYKSFGSPDNLTYGILGDLKYARTVNSLLRGLTRFKPRFVYLISPEPLKARKEILSELNY

SEQ ID NO: 35810 - protein, 85 aa, unidentified
  REGION 1..85: note = Description of Unknown:cds_NZ_WFIY01000004.1_cds_WP_155862673.1_469 target sequence
PYKEIDSPSEVISEIDVLYVTRIQKERFPDEMEYEKVKESYTVDENLVNQMKKDSIILHPLPRVNEIDRRIDSKPQAKYFYQASL

SEQ ID NO: 35811 - protein, 85 aa, unidentified
  REGION 1..85: note = Description of Unknown:cds_NZ_WFIY01000004.1_cds_967 target sequence
VIFAGVDPGSESYAITFVDELGRIVEYYEIPTDLIIHDSMRLVKLIRDKRPSAIALPSGHGLPLVKASKIGEKEIFLLTLADPQK

SEQ ID NO: 35812 - protein, 85 aa, unidentified
  REGION 1..85: note = Description of Unknown:cds_NZ_WFIY01000004.1_cds_967 target sequence
EGPLRSFLRAIIPEENAFTIPSVIELESVPEYRKINKIDMGTADKVASAFFYRTIFDSFVLIEIGRHFSSIIVVKDGKIIDGFGG

SEQ ID NO: 35813 - protein, 85 aa, unidentified
  REGION 1..85: note = Description of Unknown:cds_NZ_WFIY01000004.1_cds_967 target sequence
TEIPGLISPGCIDGEIAYLLCKYSRITKDTIYTQGEEKRSLEILRIISEWYSEKLDLPIIVSGKAKDKIDFGIKFEIKYKEASVG

SEQ ID NO: 35814 - protein, 84 aa, unidentified
  REGION 1..84: note = Description of Unknown:cds_NZ_WFIY01000004.1_cds_967 target sequence
IISEWYSEKLDLPIIVSGKAKDKIDFGIKFEIKYKEASVGAAFIANAIGGGIFRKYIDMLNSSGTVLDYVRLKGWEEITSLIKT

SEQ ID NO: 35815 - protein, 85 aa, unidentified
  REGION 1..85: note = Description of Unknown:cds_NZ_WFIY01000004.1_cds_967 target sequence
YEIPTDLIIHDSMRLVKLIRDKRPSAIALPSGHGLPLVKASKIGEKEIFLLTLADPQKEGPLRSFLRAIIPEENAFTIPSVIELE

SEQ ID NO: 35816 - protein, 85 aa, unidentified
  REGION 1..85: note = Description of Unknown:cds_NZ_WFIY01000004.1_cds_967 target sequence
SVPEYRKINKIDMGTADKVASAFFYRTIFDSFVLIEIGRHFSSIIVVKDGKIIDGFGGTEIPGLISPGCIDGEIAYLLCKYSRIT

SEQ ID NO: 35817 - protein, 85 aa, unidentified
  REGION 1..85: note = Description of Unknown:cds_NZ_WFIY01000004.1_cds_967 target sequence
KDTIYTQGEEKRSLEILRIISEWYSEKLDLPIIVSGKAKDKIDFGIKFEIKYKEASVGAAFIANAIGGGIFRKYIDMLNSSGTVL

SEQ ID NO: 35818 - protein, 85 aa, unidentified
  REGION 1..85: note = Description of Unknown:cds_NZ_WFIY01000004.1_cds_1880 target sequence
VLDIEKAYKLYNDYKKTGNKELLSKIEELIKGDSSIQGLNLLALVYIEKGKYDDAINALDIALKKVRDEEDKATLLFNKALALFR

SEQ ID NO: 35819 - protein, 85 aa, unidentified
  REGION 1..85: note = Description of Unknown:cds_NZ_WFIY01000004.1_cds_1880 target sequence
KGDLDSSYEILKSIPPRTSVYAHSRRFLAQVCIKKGDLRHLEEARQILESFDIPNEDLAVTYILLSRLKDKSLYKKAVEIAKSIK

SEQ ID NO: 35820 - protein, 85 aa, unidentified
  REGION 1..85: note = Description of Unknown:cds_NZ_WFIY01000004.1_cds_1880 target sequence
NERLLAEALLSSDDEKELEEALEIFRKLNDVNGEAKVLYKLSLKKPELLYEAIQRLEESGESRERQTLLYELYKRTGILNFLKEA

SEQ ID NO: 35821 - protein, 84 aa, unidentified
  REGION 1..84: note = Description of Unknown:cds_NZ_WFIY01000004.1_cds_1880 target sequence
PELLYEAIQRLEESGESRERQTLLYELYKRTGILNFLKEAIKIAEKYNDYLFLARSYVELSKRENELENLRKAVLFYERYIESL

SEQ ID NO: 35822 - protein, 85 aa, unidentified
  REGION 1..85: note = Description of Unknown:cds_NZ_WFIY01000004.1_cds_1880 target sequence
ELIKGDSSIQGLNLLALVYIEKGKYDDAINALDIALKKVRDEEDKATLLFNKALALFRKGDLDSSYEILKSIPPRTSVYAHSRRF

SEQ ID NO: 35823 - protein, 85 aa, unidentified
  REGION 1..85: note = Description of Unknown:cds_NZ_WFIY01000004.1_cds_1880 target sequence
LAQVCIKKGDLRHLEEARQILESFDIPNEDLAVTYILLSRLKDKSLYKKAVEIAKSIKNERLLAEALLSSDDEKELEEALEIFRK

SEQ ID NO: 35824 - protein, 85 aa, unidentified
  REGION 1..85: note = Description of Unknown:cds_NZ_WFIY01000004.1_cds_1880 target sequence
LNDVNGEAKVLYKLSLKKPELLYEAIQRLEESGESRERQTLLYELYKRTGILNFLKEAIKIAEKYNDYLFLARSYVELSKRENEL

SEQ ID NO: 35825 - protein, 85 aa, unidentified
  REGION 1..85: note = Description of Unknown:cds_NZ_WFIY01000004.1_cds_WP_155864002.1_1929 target sequence
KRIVTLDPATTEIVSFLDGTSRIVGVPEDADYPEEVKHKVKVTRKLVNIDNSLPSEVIDEIVRRHIKERKPLHEALWDEIYELQP

SEQ ID NO: 35826 - protein, 85 aa, unidentified
  REGION 1..85: note = Description of Unknown:cds_NZ_WFIY01000004.1_cds_WP_155864002.1_1929 target sequence
DLIVGQGICEVCALPSITTLGGRVKFSTPKNFRISRMEVYNPYTFMDIPKETMKIAKAIGRERKAEELKEQFEKSIEETKGIAKG

SEQ ID NO: 35827 - protein, 85 aa, unidentified
  REGION 1..85: note = Description of Unknown:cds_NZ_WFIY01000004.1_cds_WP_155864002.1_1929 target sequence
TKTVVIEWIKPIHLIGKWVSDMVSLMGSKPLARPGGQGGTFDWEIIREFNPDYLIISPCSFSVSRSLMEIEKITTLPGYSDLNAV

SEQ ID NO: 35828 - protein, 84 aa, unidentified
  REGION 1..84: note = Description of Unknown:cds_NZ_WFIY01000004.1_cds_WP_155864002.1_1929 target sequence
IIREFNPDYLIISPCSFSVSRSLMEIEKITTLPGYSDLNAVKEGHVYVLEPLYARASQRTLEFLNALKEIYTTGEVERKYGIRL

SEQ ID NO: 35829 - protein, 85 aa, unidentified
  REGION 1..85: note = Description of Unknown:cds_NZ_WFIY01000004.1_cds_WP_155864002.1_1929 target sequence
EDADYPEEVKHKVKVTRKLVNIDNSLPSEVIDEIVRRHIKERKPLHEALWDEIYELQPDLIVGQGICEVCALPSITTLGGRVKFS

SEQ ID NO: 35830 - protein, 85 aa, unidentified
  REGION 1..85: note = Description of Unknown:cds_NZ_WFIY01000004.1_cds_WP_155864002.1_1929 target sequence
TPKNFRISRMEVYNPYTFMDIPKETMKIAKAIGRERKAEELKEQFEKSIEETKGIAKGTKTVVIEWIKPIHLIGKWVSDMVSLMG

SEQ ID NO: 35831 - protein, 85 aa, unidentified
  REGION 1..85: note = Description of Unknown:cds_NZ_WFIY01000004.1_cds_WP_155864002.1_1929 target sequence
SKPLARPGGQGGTFDWEIIREFNPDYLIISPCSFSVSRSLMEIEKITTLPGYSDLNAVKEGHVYVLEPLYARASQRTLEFLNALK

SEQ ID NO: 35832 - protein, 85 aa, unidentified
  REGION 1..85: note = Description of Unknown:cds_NZ_WFIY01000004.1_cds_WP_155864072.1_2011 target sequence
IRVENLVKFYGNFQALKGESFTVNDGEIVGFVGLNGAGKTTTIKIATGVLYPTSGDVVIDGYSITKDKKKASENVGWVPELPIFE

SEQ ID NO: 35833 - protein, 85 aa, unidentified
  REGION 1..85: note = Description of Unknown:cds_NZ_WFIY01000004.1_cds_WP_155864072.1_2011 target sequence
QDVKALDYFVYIAGYYKIPTNEARSMGKRLFEEVGLSGRENDKLKNYSQGMKKRFALAVSLISNPKNFLFDEVLNGLDPEGIQFF

SEQ ID NO: 35834 - protein, 85 aa, unidentified
  REGION 1..85: note = Description of Unknown:cds_NZ_WFIY01000004.1_cds_WP_155864072.1_2011 target sequence
RNLALRLKKEGKAILFSSHILSEVESLADRVVFLHKGKIVKEERMEDLRKLVSTNALRVILNSPSEEALKACKDFGEPTLNNGVI

SEQ ID NO: 35835 - protein, 84 aa, unidentified
  REGION 1..84: note = Description of Unknown:cds_NZ_WFIY01000004.1_cds_WP_155864072.1_2011 target sequence
MEDLRKLVSTNALRVILNSPSEEALKACKDFGEPTLNNGVIIIQNFKGDLEDVVRALKPYGILDIGYVRQDLESLFFQIIGGNQ

SEQ ID NO: 35836 - protein, 85 aa, unidentified
  REGION 1..85: note = Description of Unknown:cds_NZ_WFIY01000004.1_cds_WP_155864072.1_2011 target sequence
IVGFVGLNGAGKTTTIKIATGVLYPTSGDVVIDGYSITKDKKKASENVGWVPELPIFEQDVKALDYFVYIAGYYKIPTNEARSMG

SEQ ID NO: 35837 - protein, 85 aa, unidentified
  REGION 1..85: note = Description of Unknown:cds_NZ_WFIY01000004.1_cds_WP_155864072.1_2011 target sequence
KRLFEEVGLSGRENDKLKNYSQGMKKRFALAVSLISNPKNFLFDEVLNGLDPEGIQFFRNLALRLKKEGKAILFSSHILSEVESL

SEQ ID NO: 35838 - protein, 85 aa, unidentified
  REGION 1..85: note = Description of Unknown:cds_NZ_WFIY01000004.1_cds_WP_155864072.1_2011 target sequence
ADRVVFLHKGKIVKEERMEDLRKLVSTNALRVILNSPSEEALKACKDFGEPTLNNGVIIIQNFKGDLEDVVRALKPYGILDIGYV

SEQ ID NO: 35839 - protein, 85 aa, unidentified
  REGION 1..85: note = Description of Unknown:cds_NZ_WFIY01000004.1_cds_WP_155864315.1_2313 target sequence
LITIVTYNPDIKFVRAMIKTIKQKGDQYNILVVDNHSKLELEELKDLTDYFVQLDKNYGLGAAYNYAIKFAKELGEDYMMFLDQD

SEQ ID NO: 35840 - protein, 85 aa, unidentified
  REGION 1..85: note = Description of Unknown:cds_NZ_WFIY01000004.1_cds_WP_155864315.1_2313 target sequence
TIILDNFAPNRVLREAKELKDIEPVILSVNIDNALVKKEIPNSNFYIAKGVVNSGMILSVNYALKQPFLNGLFLDRLDFEYTYRA

SEQ ID NO: 35841 - protein, 85 aa, unidentified
  REGION 1..85: note = Description of Unknown:cds_NZ_WFIY01000004.1_cds_WP_155864315.1_2313 target sequence
EKLGYLPLVYKERMILHKPGEGSKYYSSLCAKLLIAIMLMLHGNEKDRERYKQYGYYSNFLRYYLMLRNDIYLWLRRRIYPNFWK

SEQ ID NO: 35842 - protein, 84 aa, unidentified
  REGION 1..84: note = Description of Unknown:cds_NZ_WFIY01000004.1_cds_WP_155864315.1_2313 target sequence
EKDRERYKQYGYYSNFLRYYLMLRNDIYLWLRRRIYPNFWKMIIGDLFLMCEVLGYRKSLKWILRAIKHGLLGDLEEDNKELFF

SEQ ID NO: 35843 - protein, 85 aa, unidentified
  REGION 1..85: note = Description of Unknown:cds_NZ_WFIY01000004.1_cds_WP_155864315.1_2313 target sequence
YNILVVDNHSKLELEELKDLTDYFVQLDKNYGLGAAYNYAIKFAKELGEDYMMFLDQDTIILDNFAPNRVLREAKELKDIEPVIL

SEQ ID NO: 35844 - protein, 85 aa, unidentified
  REGION 1..85: note = Description of Unknown:cds_NZ_WFIY01000004.1_cds_WP_155864315.1_2313 target sequence
SVNIDNALVKKEIPNSNFYIAKGVVNSGMILSVNYALKQPFLNGLFLDRLDFEYTYRAEKLGYLPLVYKERMILHKPGEGSKYYS

SEQ ID NO: 35845 - protein, 85 aa, unidentified
  REGION 1..85: note = Description of Unknown:cds_NZ_WFIY01000004.1_cds_WP_155864315.1_2313 target sequence
SLCAKLLIAIMLMLHGNEKDRERYKQYGYYSNFLRYYLMLRNDIYLWLRRRIYPNFWKMIIGDLFLMCEVLGYRKSLKWILRAIK

SEQ ID NO: 35846 - protein, 85 aa, unidentified
  REGION 1..85: note = Description of Unknown:cds_NC_035460.1_cds_YP_009408110.1_159 target sequence
DDITNNLETLSLDDIFTNKFNFTELKNSSIFDQKDYTYIFDVENNLISYDTQCGNYTFLQFCNYIIIIDKSTLYINASKLCTNVN

SEQ ID NO: 35847 - protein, 85 aa, unidentified
  REGION 1..85: note = Description of Unknown:cds_NC_035460.1_cds_YP_009408110.1_159 target sequence
KLFCRWKQTILGKQSIDNIVTNELIDRDNLFIRIYKSKQTLEYYGIFVYPKLIYYITRWISVNYCNIILTMLFNYYNNLQYNIMI

SEQ ID NO: 35848 - protein, 85 aa, unidentified
  REGION 1..85: note = Description of Unknown:cds_NC_035460.1_cds_YP_009408110.1_159 target sequence
PPYSYYNVNIPHFIPIAILKQYNNNKDYSINMIFTAICEKNDMYQKLKYKNFNMINLFETKFNKFVDVECSICLEKVYDKSIDLK

SEQ ID NO: 35849 - protein, 84 aa, unidentified
  REGION 1..84: note = Description of Unknown:cds_NC_035460.1_cds_YP_009408110.1_159 target sequence
QKLKYKNFNMINLFETKFNKFVDVECSICLEKVYDKSIDLKYFGILPICSHIFCFQCICTWKKNKNTCPICRKKINIIIKCKYL

SEQ ID NO: 35850 - protein, 85 aa, unidentified
  REGION 1..85: note = Description of Unknown:cds_NC_035460.1_cds_YP_009408110.1_159 target sequence
SSIFDQKDYTYIFDVENNLISYDTQCGNYTFLQFCNYIIIIDKSTLYINASKLCTNVNKLFCRWKQTILGKQSIDNIVTNELIDR

SEQ ID NO: 35851 - protein, 85 aa, unidentified
  REGION 1..85: note = Description of Unknown:cds_NC_035460.1_cds_YP_009408110.1_159 target sequence
DNLFIRIYKSKQTLEYYGIFVYPKLIYYITRWISVNYCNIILTMLFNYYNNLQYNIMIPPYSYYNVNIPHFIPIAILKQYNNNKD

SEQ ID NO: 35852 - protein, 85 aa, unidentified
  REGION 1..85: note = Description of Unknown:cds_NC_035460.1_cds_YP_009408110.1_159 target sequence
YSINMIFTAICEKNDMYQKLKYKNFNMINLFETKFNKFVDVECSICLEKVYDKSIDLKYFGILPICSHIFCFQCICTWKKNKNTC

SEQ ID NO: 35853 - protein, 85 aa, unidentified
  REGION 1..85: note = Description of Unknown:cds_NC_039345.1_cds_YP_009513280.1_7 target sequence
HQQRTQNPHSTEAIRERGRTRTVHPPSRDSGEFRMRARSVSRDYSRGENYHQRGTSQTRAPVMFHKKKTEALLVPPAPKDICPTL

SEQ ID NO: 35854 - protein, 85 aa, unidentified
  REGION 1..85: note = Description of Unknown:cds_NC_039345.1_cds_YP_009513280.1_7 target sequence
KKGFLCDSNFCRKDHHLEGLTDRELLLLIARKTSGLVDPSVCASAPKDARLAHPTAEDFDQQSGPKMTLSLVLRIIEYWAEKDLR

SEQ ID NO: 35855 - protein, 85 aa, unidentified
  REGION 1..85: note = Description of Unknown:cds_NC_039345.1_cds_YP_009513280.1_7 target sequence
NIDDSKLRALLTLCAVTTRKFSKSQLSLLCDAHLRRESLGQDQSESVLEVYQKLHSDKGGHFEAALWQQWDRQSLVMFITAFLNI

SEQ ID NO: 35856 - protein, 84 aa, unidentified
  REGION 1..84: note = Description of Unknown:cds_NC_039345.1_cds_YP_009513280.1_7 target sequence
ESVLEVYQKLHSDKGGHFEAALWQQWDRQSLVMFITAFLNIAPQLPCESSAVVISSLKLLIPAAEHNTTGSSPTTPSWSDAADS

SEQ ID NO: 35857 - protein, 85 aa, unidentified
  REGION 1..85: note = Description of Unknown:cds_NC_039345.1_cds_YP_009513280.1_7 target sequence
RDSGEFRMRARSVSRDYSRGENYHQRGTSQTRAPVMFHKKKTEALLVPPAPKDICPTLKKGFLCDSNFCRKDHHLEGLTDRELLL

SEQ ID NO: 35858 - protein, 85 aa, unidentified
  REGION 1..85: note = Description of Unknown:cds_NC_039345.1_cds_YP_009513280.1_7 target sequence
LIARKTSGLVDPSVCASAPKDARLAHPTAEDFDQQSGPKMTLSLVLRIIEYWAEKDLRNIDDSKLRALLTLCAVTTRKFSKSQLS

SEQ ID NO: 35859 - protein, 85 aa, unidentified
  REGION 1..85: note = Description of Unknown:cds_NC_039345.1_cds_YP_009513280.1_7 target sequence
LLCDAHLRRESLGQDQSESVLEVYQKLHSDKGGHFEAALWQQWDRQSLVMFITAFLNIAPQLPCESSAVVISSLKLLIPAAEHNT

SEQ ID NO: 35860 - protein, 85 aa, unidentified
  REGION 1..85: note = Description of Unknown:hvTR_B2XY05 target sequence
SKIFINPSDIRSGLADLEMAEETVELVNRNMEDSQAHLQGVPIDVETLPEDIQRLHITDPQASLRQDMVDEQKHREDEDFYLTGR

SEQ ID NO: 35861 - protein, 85 aa, unidentified
  REGION 1..85: note = Description of Unknown:hvTR_B2XY05 target sequence
ENPLSPFQTHLDAIGLRIVRKMKTGEGFFKIWSQAVEDIVSYVALNFSIPVNKLFEDKSTQTVTEKSQQASASSAPNRHEKSSQS

SEQ ID NO: 35862 - protein, 85 aa, unidentified
  REGION 1..85: note = Description of Unknown:hvTR_B2XY05 target sequence
ARVNSKDASGPAALDWTASNEADDESVEAEIAHQIAESFSKKYKFPSRSSGIFLWNFEQLKMNLDEIVREVKEIPGVIKMAKDGM

SEQ ID NO: 35863 - protein, 84 aa, unidentified
  REGION 1..84: note = Description of Unknown:hvTR_B2XY05 target sequence
KFPSRSSGIFLWNFEQLKMNLDEIVREVKEIPGVIKMAKDGMKLPLRCMLGGVASTHSRRFQILVNPEKLGKVMQEDLDKYLTY

SEQ ID NO: 35864 - protein, 85 aa, unidentified
  REGION 1..85: note = Description of Unknown:hvTR_B2XY05 target sequence
NRNMEDSQAHLQGVPIDVETLPEDIQRLHITDPQASLRQDMVDEQKHREDEDFYLTGRENPLSPFQTHLDAIGLRIVRKMKTGEG

SEQ ID NO: 35865 - protein, 85 aa, unidentified
  REGION 1..85: note = Description of Unknown:hvTR_B2XY05 target sequence
FFKIWSQAVEDIVSYVALNFSIPVNKLFEDKSTQTVTEKSQQASASSAPNRHEKSSQSARVNSKDASGPAALDWTASNEADDESV

SEQ ID NO: 35866 - protein, 85 aa, unidentified
  REGION 1..85: note = Description of Unknown:hvTR_B2XY05 target sequence
EAEIAHQIAESFSKKYKFPSRSSGIFLWNFEQLKMNLDEIVREVKEIPGVIKMAKDGMKLPLRCMLGGVASTHSRRFQILVNPEK

SEQ ID NO: 35867 - protein, 85 aa, unidentified
  REGION 1..85: note = Description of Unknown:hvTR_A4UHP9 target sequence
SKIFVNPSALRSGLADLEMAEETVDLVNKNMEDSQAHLQGIPIDVETLPEDIKRLRIADYKQGQREEDASRQEEGEDEDFYMTES

SEQ ID NO: 35868 - protein, 85 aa, unidentified
  REGION 1..85: note = Description of Unknown:hvTR_A4UHP9 target sequence
ENSYVPLQSYLDAVGMQIVRKMKTGDGFFKIWAQAVEDIVSYVATNFPAPVNKLQADKSTQTTLEKVKQAVSSSAPNKREGPSSN

SEQ ID NO: 35869 - protein, 85 aa, unidentified
  REGION 1..85: note = Description of Unknown:hvTR_A4UHP9 target sequence
MNLDSQESSGPPGLDWAASNDEDDGSIEAEIAHQIAESFSKKYKFPSRSSGIFLWNFEQLKMNLDDIVREVKGIPGVTRMARDGM

SEQ ID NO: 35870 - protein, 84 aa, unidentified
  REGION 1..84: note = Description of Unknown:hvTR_A4UHP9 target sequence
KFPSRSSGIFLWNFEQLKMNLDDIVREVKGIPGVTRMARDGMKLPLRCMLGSVASNHSKRFQILVNSAKLGKLMQDDLNRYLAY

SEQ ID NO: 35871 - protein, 85 aa, unidentified
  REGION 1..85: note = Description of Unknown:hvTR_A4UHP9 target sequence
NKNMEDSQAHLQGIPIDVETLPEDIKRLRIADYKQGQREEDASRQEEGEDEDFYMTESENSYVPLQSYLDAVGMQIVRKMKTGDG

SEQ ID NO: 35872 - protein, 85 aa, unidentified
  REGION 1..85: note = Description of Unknown:hvTR_A4UHP9 target sequence
FFKIWAQAVEDIVSYVATNFPAPVNKLQADKSTQTTLEKVKQAVSSSAPNKREGPSSNMNLDSQESSGPPGLDWAASNDEDDGSI

SEQ ID NO: 35873 - protein, 85 aa, unidentified
  REGION 1..85: note = Description of Unknown:hvTR_A4UHP9 target sequence
EAEIAHQIAESFSKKYKFPSRSSGIFLWNFEQLKMNLDDIVREVKGIPGVTRMARDGMKLPLRCMLGSVASNHSKRFQILVNSAK

SEQ ID NO: 35874 - protein, 85 aa, unidentified
  REGION 1..85: note = Description of Unknown:cds_NZ_WFIY01000004.1_cds_WP_155862458.1_210 target sequence
TIRVNDVIRILEDEGLNYTIINYPEKNKKSIDIIVEFKRGSQEKKKLVVKTSSDKIGKDEITDLKNFSYLTQSIPLIITDETEED

SEQ ID NO: 35875 - protein, 85 aa, unidentified
  REGION 1..85: note = Description of Unknown:cds_NZ_WFIY01000004.1_cds_WP_155862458.1_210 target sequence
IAIEKDKVIGLSLFGFERLLKGDKIFVYRTRGGMFVRIRPEVLRQKMREMNYSMGDVAKMLGVSRKTIYDYENGDSDVSIEIAEK

SEQ ID NO: 35876 - protein, 85 aa, unidentified
  REGION 1..85: note = Description of Unknown:cds_NZ_WFIY01000004.1_cds_WP_155862458.1_210 target sequence
LIDIFGPEIIGDVCETYQADDKVSVDKDHKVINILESKGFKVATLKFTAVDIIASNNSKKLIITIESRNPDNSIKKIQEASKIAE

SEQ ID NO: 35877 - protein, 84 aa, unidentified
  REGION 1..84: note = Description of Unknown:cds_NZ_WFIY01000004.1_cds_WP_155862458.1_210 target sequence
TLKFTAVDIIASNNSKKLIITIESRNPDNSIKKIQEASKIAEEFNLNMIVISKSSSRAKELEKDGFKVYLDQNLDELKYEIGGD

SEQ ID NO: 35878 - protein, 85 aa, unidentified
  REGION 1..85: note = Description of Unknown:cds_NZ_WFIY01000004.1_cds_WP_155862458.1_210 target sequence
KKSIDIIVEFKRGSQEKKKLVVKTSSDKIGKDEITDLKNFSYLTQSIPLIITDETEEDIAIEKDKVIGLSLFGFERLLKGDKIFV

SEQ ID NO: 35879 - protein, 85 aa, unidentified
  REGION 1..85: note = Description of Unknown:cds_NZ_WFIY01000004.1_cds_WP_155862458.1_210 target sequence
YRTRGGMFVRIRPEVLRQKMREMNYSMGDVAKMLGVSRKTIYDYENGDSDVSIEIAEKLIDIFGPEIIGDVCETYQADDKVSVDK

SEQ ID NO: 35880 - protein, 85 aa, unidentified
  REGION 1..85: note = Description of Unknown:cds_NZ_WFIY01000004.1_cds_WP_155862458.1_210 target sequence
DHKVINILESKGFKVATLKFTAVDIIASNNSKKLIITIESRNPDNSIKKIQEASKIAEEFNLNMIVISKSSSRAKELEKDGFKVY

SEQ ID NO: 35881 - protein, 85 aa, unidentified
  REGION 1..85: note = Description of Unknown:cds_NZ_WFIY01000004.1_cds_WP_155862553.1_322 target sequence
RIVSKDLHVFEDPIELLENMWPTPLLKLKIGEDVWAKLEFYNPFSHSIKDRTAWFLFRQALENNANEIVEATSGNLGIALASLSA

SEQ ID NO: 35882 - protein, 85 aa, unidentified
  REGION 1..85: note = Description of Unknown:cds_NZ_WFIY01000004.1_cds_WP_155862553.1_322 target sequence
IFNKKFTSFIPAKAPQSFKVMMKILGAQVIQAGKSTTELLPLVKQYSKNTGAVHLDQFRNPLNYMTHYYTTAKEIDEQLEYLNKK

SEQ ID NO: 35883 - protein, 85 aa, unidentified
  REGION 1..85: note = Description of Unknown:cds_NZ_WFIY01000004.1_cds_WP_155862553.1_322 target sequence
PQRIIATAGTGGHLTGIAKYFKEKYGSDVEIIGVQPAEGERIPGIKRQDENSFIGLVKIDKMIDITRKEAVEGIVDIARSSGILI

SEQ ID NO: 35884 - protein, 84 aa, unidentified
  REGION 1..84: note = Description of Unknown:cds_NZ_WFIY01000004.1_cds_WP_155862553.1_322 target sequence
GIKRQDENSFIGLVKIDKMIDITRKEAVEGIVDIARSSGILIGISAGATVAAYKKLADDKTTVLVFPDDAFKYFMELEDIDSKI

SEQ ID NO: 35885 - protein, 85 aa, unidentified
  REGION 1..85: note = Description of Unknown:cds_NZ_WFIY01000004.1_cds_WP_155862553.1_322 target sequence
LKIGEDVWAKLEFYNPFSHSIKDRTAWFLFRQALENNANEIVEATSGNLGIALASLSAIFNKKFTSFIPAKAPQSFKVMMKILGA

SEQ ID NO: 35886 - protein, 85 aa, unidentified
  REGION 1..85: note = Description of Unknown:cds_NZ_WFIY01000004.1_cds_WP_155862553.1_322 target sequence
QVIQAGKSTTELLPLVKQYSKNTGAVHLDQFRNPLNYMTHYYTTAKEIDEQLEYLNKKPQRIIATAGTGGHLTGIAKYFKEKYGS

SEQ ID NO: 35887 - protein, 85 aa, unidentified
  REGION 1..85: note = Description of Unknown:cds_NZ_WFIY01000004.1_cds_WP_155862553.1_322 target sequence
DVEIIGVQPAEGERIPGIKRQDENSFIGLVKIDKMIDITRKEAVEGIVDIARSSGILIGISAGATVAAYKKLADDKTTVLVFPDD

SEQ ID NO: 35888 - protein, 85 aa, unidentified
  REGION 1..85: note = Description of Unknown:cds_NZ_WFIY01000004.1_cds_WP_155863039.1_930 target sequence
LYYGNIISVLSSDKEKAGKLAESLGKLHENEKLRIYYRKKGDYIRSILVPTEYPEKILQAAEAVSLSSYCVLYLPIVPSWTEGEL

SEQ ID NO: 35889 - protein, 85 aa, unidentified
  REGION 1..85: note = Description of Unknown:cds_NZ_WFIY01000004.1_cds_WP_155863039.1_930 target sequence
ALLITSAGCKGEIITEMPESDVRKLFKGLPLEEFPIHQTPEEFEGKEEDKGVVYIDKAFVVKGVGVVITGFSYTQVKVHDKLKVI

SEQ ID NO: 35890 - protein, 85 aa, unidentified
  REGION 1..85: note = Description of Unknown:cds_NZ_WFIY01000004.1_cds_WP_155863039.1_930 target sequence
PQNKEVEIKSIQVLDEDQEAVDTGIRIGFALRNVREDEMRDALLLVKSEVKTVKSFSGEIFLFPWAKIESGSYHLVADGVSVMAN

SEQ ID NO: 35891 - protein, 84 aa, unidentified
  REGION 1..84: note = Description of Unknown:cds_NZ_WFIY01000004.1_cds_WP_155863039.1_930 target sequence
LVKSEVKTVKSFSGEIFLFPWAKIESGSYHLVADGVSVMANLKINGSNVDVELSNEMPLPKRFIIVNVNAKQGKPRIAGYIIPK

SEQ ID NO: 35892 - protein, 85 aa, unidentified
  REGION 1..85: note = Description of Unknown:cds_NZ_WFIY01000004.1_cds_WP_155863039.1_930 target sequence
HENEKLRIYYRKKGDYIRSILVPTEYPEKILQAAEAVSLSSYCVLYLPIVPSWTEGELALLITSAGCKGEIITEMPESDVRKLFK

SEQ ID NO: 35893 - protein, 85 aa, unidentified
  REGION 1..85: note = Description of Unknown:cds_NZ_WFIY01000004.1_cds_WP_155863039.1_930 target sequence
GLPLEEFPIHQTPEEFEGKEEDKGVVYIDKAFVVKGVGVVITGFSYTQVKVHDKLKVIPQNKEVEIKSIQVLDEDQEAVDTGIRI

SEQ ID NO: 35894 - protein, 85 aa, unidentified
  REGION 1..85: note = Description of Unknown:cds_NZ_WFIY01000004.1_cds_WP_155863039.1_930 target sequence
GFALRNVREDEMRDALLLVKSEVKTVKSFSGEIFLFPWAKIESGSYHLVADGVSVMANLKINGSNVDVELSNEMPLPKRFIIVNV

SEQ ID NO: 35895 - protein, 85 aa, unidentified
  REGION 1..85: note = Description of Unknown:cds_NZ_WFIY01000004.1_cds_WP_155863217.1_1162 target sequence
ISIQTLLSPPQGLTLSEILIFSYILGLLHGITPDEHTWPITFSYAVGKYSTKEGMKAGFLFSLGFTIQRAFLTTLGFLGLAAIYN

SEQ ID NO: 35896 - protein, 85 aa, unidentified
  REGION 1..85: note = Description of Unknown:cds_NZ_WFIY01000004.1_cds_WP_155863217.1_1162 target sequence
EYNLDGPVYFVVGIVMAIAGSYILKGKYVHLPFDELIHKRREGENLRDVPLKMTIVHGLIAGFGFGAYATIITFLLAPQVPGLIF

SEQ ID NO: 35897 - protein, 85 aa, unidentified
  REGION 1..85: note = Description of Unknown:cds_NZ_WFIY01000004.1_cds_WP_155863217.1_1162 target sequence
APLPGAMFGLGTMTMQIILGAIFGNIIKFKGLSEEDVRYIGIKTAGRVLYYGGIVFSIVGLLIIAIPIIDCWAIPTGNPIPNLDA

SEQ ID NO: 35898 - protein, 84 aa, unidentified
  REGION 1..84: note = Description of Unknown:cds_NZ_WFIY01000004.1_cds_WP_155863217.1_1162 target sequence
TAGRVLYYGGIVFSIVGLLIIAIPIIDCWAIPTGNPIPNLDAINIGFLLVVGTVGTIGISSIIQAYREVKKSIEKNKTAKVKKI

SEQ ID NO: 35899 - protein, 85 aa, unidentified
  REGION 1..85: note = Description of Unknown:cds_NZ_WFIY01000004.1_cds_WP_155863217.1_1162 target sequence
LHGITPDEHTWPITFSYAVGKYSTKEGMKAGFLFSLGFTIQRAFLTTLGFLGLAAIYNEYNLDGPVYFVVGIVMAIAGSYILKGK

SEQ ID NO: 35900 - protein, 85 aa, unidentified
  REGION 1..85: note = Description of Unknown:cds_NZ_WFIY01000004.1_cds_WP_155863217.1_1162 target sequence
YVHLPFDELIHKRREGENLRDVPLKMTIVHGLIAGFGFGAYATIITFLLAPQVPGLIFAPLPGAMFGLGTMTMQIILGAIFGNII

SEQ ID NO: 35901 - protein, 85 aa, unidentified
  REGION 1..85: note = Description of Unknown:cds_NZ_WFIY01000004.1_cds_WP_155863217.1_1162 target sequence
KFKGLSEEDVRYIGIKTAGRVLYYGGIVFSIVGLLIIAIPIIDCWAIPTGNPIPNLDAINIGFLLVVGTVGTIGISSIIQAYREV

SEQ ID NO: 35902 - protein, 85 aa, unidentified
  REGION 1..85: note = Description of Unknown:cds_NC_029316.1_cds_YP_009230279.1_26 target sequence
DIWKFVMVYKNYPEVLFNVILNRKSKAELRNGRTVYLSAPALKALSEYYREMREYPREIEDCEGECKTPLECFILCFLKYHEWKT

SEQ ID NO: 35903 - protein, 85 aa, unidentified
  REGION 1..85: note = Description of Unknown:cds_NC_029316.1_cds_YP_009230279.1_26 target sequence
KDNYMYKNLDLGSVKLLKYYKGKLALEQTIHEVFDEQIYNDFREIKGDVVDIGAGIGDSPIFFALWGASKVLGIEPLPTPYNIAL

SEQ ID NO: 35904 - protein, 85 aa, unidentified
  REGION 1..85: note = Description of Unknown:cds_NC_029316.1_cds_YP_009230279.1_26 target sequence
ENIKLNELNNRVRILNAIINYESRVVKIKDHDAVGSAGVYVRPKGSGIAVKSVTISDLVRELDNPFMIKMDCEGCEYDILRHEKE

SEQ ID NO: 35905 - protein, 84 aa, unidentified
  REGION 1..84: note = Description of Unknown:cds_NC_029316.1_cds_YP_009230279.1_26 target sequence
KGSGIAVKSVTISDLVRELDNPFMIKMDCEGCEYDILRHEKESLKYFEKIIMEYHKKPPIKEVEELGFSLTNKNGKILIFYRKK

SEQ ID NO: 35906 - protein, 85 aa, unidentified
  REGION 1..85: note = Description of Unknown:cds_NC_029316.1_cds_YP_009230279.1_26 target sequence
ELRNGRTVYLSAPALKALSEYYREMREYPREIEDCEGECKTPLECFILCFLKYHEWKTKDNYMYKNLDLGSVKLLKYYKGKLALE

SEQ ID NO: 35907 - protein, 85 aa, unidentified
  REGION 1..85: note = Description of Unknown:cds_NC_029316.1_cds_YP_009230279.1_26 target sequence
QTIHEVFDEQIYNDFREIKGDVVDIGAGIGDSPIFFALWGASKVLGIEPLPTPYNIALENIKLNELNNRVRILNAIINYESRVVK

SEQ ID NO: 35908 - protein, 85 aa, unidentified
  REGION 1..85: note = Description of Unknown:cds_NC_029316.1_cds_YP_009230279.1_26 target sequence
IKDHDAVGSAGVYVRPKGSGIAVKSVTISDLVRELDNPFMIKMDCEGCEYDILRHEKESLKYFEKIIMEYHKKPPIKEVEELGFS

SEQ ID NO: 35909 - protein, 84 aa, unidentified
  REGION 1..84: note = Description of Unknown:cds_NC_039345.1_cds_YP_009513279.1_6 target sequence
EYETTRFGTNRSAFWFKVDNLTFVQLESRFTPQFLVELNETIYIEGKRSNTTGRLIWQVNSRVDTDVGEWAFWENKKPQKELST

SEQ ID NO: 35910 - protein, 85 aa, unidentified
  REGION 1..85: note = Description of Unknown:cds_NC_020809.1_cds_YP_007641398.1_2 target sequence
SKIFVNPSAIRAGLADLEMAEETIDLINRTIEDNQAHLQGVPIEVEALPEDMKKLQISDHQQGQPSGGATGQDGSEEEDFYMTES

SEQ ID NO: 35911 - protein, 85 aa, unidentified
  REGION 1..85: note = Description of Unknown:cds_NC_020809.1_cds_YP_007641398.1_2 target sequence
ENPYIPFQSYLDAVGIQLVRKMKTGEGFLKIWSQAAEEIVSYVAINFPLPADKESAEKSTQTVGEPLKSNSASNTPNKRSKPSTS

SEQ ID NO: 35912 - protein, 85 aa, unidentified
  REGION 1..85: note = Description of Unknown:cds_NC_020809.1_cds_YP_007641398.1_2 target sequence
TDLKAQEASGPHGIDWAASNDEDDASVEAEIAHQIAESFSKKYKFPSRSSGIFLWNFEQLKMNLDDIVGGAKEIPGVIRMAKEGN

SEQ ID NO: 35913 - protein, 84 aa, unidentified
  REGION 1..84: note = Description of Unknown:cds_NC_020809.1_cds_YP_007641398.1_2 target sequence
KFPSRSSGIFLWNFEQLKMNLDDIVGGAKEIPGVIRMAKEGNKLPLRCILGGVALTHSKRFQVLVNSEKLGRIMQEDLNKYLAN

SEQ ID NO: 35914 - protein, 85 aa, unidentified
  REGION 1..85: note = Description of Unknown:cds_NC_020809.1_cds_YP_007641398.1_2 target sequence
NRTIEDNQAHLQGVPIEVEALPEDMKKLQISDHQQGQPSGGATGQDGSEEEDFYMTESENPYIPFQSYLDAVGIQLVRKMKTGEG

SEQ ID NO: 35915 - protein, 85 aa, unidentified
  REGION 1..85: note = Description of Unknown:cds_NC_020809.1_cds_YP_007641398.1_2 target sequence
FLKIWSQAAEEIVSYVAINFPLPADKESAEKSTQTVGEPLKSNSASNTPNKRSKPSTSTDLKAQEASGPHGIDWAASNDEDDASV

SEQ ID NO: 35916 - protein, 85 aa, unidentified
  REGION 1..85: note = Description of Unknown:cds_NC_020809.1_cds_YP_007641398.1_2 target sequence
EAEIAHQIAESFSKKYKFPSRSSGIFLWNFEQLKMNLDDIVGGAKEIPGVIRMAKEGNKLPLRCILGGVALTHSKRFQVLVNSEK

SEQ ID NO: 35917 - protein, 85 aa, unidentified
  REGION 1..85: note = Description of Unknown:cds_NC_020810.1_cds_YP_007641403.1_2 target sequence
SKIFINPSDIRSGLADLEMAEETVELVNRNMEDSQAHLQGVPIDVETLPEDIQRLHITDPQASLRQDMVDEQKHQEDEDFYLTGR

SEQ ID NO: 35918 - protein, 85 aa, unidentified
  REGION 1..85: note = Description of Unknown:cds_NC_020810.1_cds_YP_007641403.1_2 target sequence
ENPLSPFQTHLDAIGLRIVRKMKTGEGFFKIWSQAVEDIVSYVALNFSIPVNKLFEDKSTQTVTEKSQQASASSAPNRHEKSSQN

SEQ ID NO: 35919 - protein, 85 aa, unidentified
  REGION 1..85: note = Description of Unknown:cds_NC_020810.1_cds_YP_007641403.1_2 target sequence
NRNMEDSQAHLQGVPIDVETLPEDIQRLHITDPQASLRQDMVDEQKHQEDEDFYLTGRENPLSPFQTHLDAIGLRIVRKMKTGEG

SEQ ID NO: 35920 - protein, 85 aa, unidentified
  REGION 1..85: note = Description of Unknown:cds_NC_020810.1_cds_YP_007641403.1_2 target sequence
FFKIWSQAVEDIVSYVALNFSIPVNKLFEDKSTQTVTEKSQQASASSAPNRHEKSSQNARVNSKDASGPAALDWTASNEADDESV

SEQ ID NO: 35921 - protein, 85 aa, unidentified
  REGION 1..85: note = Description of Unknown:hvTR_Q9QSP3 target sequence
SKIFVNPSAIRAGMADLEMAEETVDLINRNIEDNQAHLQGEPIEVDSLPEEIGKLNINEAKPQSFENNPIDIDGRMNEDFQMKEV

SEQ ID NO: 35922 - protein, 85 aa, unidentified
  REGION 1..85: note = Description of Unknown:hvTR_Q9QSP3 target sequence
EDPSIQFQSYLDNIGIQIVRKMKTGERFFKIWSQTVEEIISYVGANFPNPSGKTTESKSTQTTPKKVKPEPPSAPTEKPEQLSRT

SEQ ID NO: 35923 - protein, 85 aa, unidentified
  REGION 1..85: note = Description of Unknown:hvTR_Q9QSP3 target sequence
SMAPETTSGPLALDWSATNDDDDVSVEAEIAHQIAESFSKKYKFPSRSSGIFLYNFEQLKMNLDDIVKEARGVPGIIRLAKEGLR

SEQ ID NO: 35924 - protein, 84 aa, unidentified
  REGION 1..84: note = Description of Unknown:hvTR_Q9QSP3 target sequence
KFPSRSSGIFLYNFEQLKMNLDDIVKEARGVPGIIRLAKEGLRLPLRCILGWVASSHSKKFQLLVGSEKLSKIMQDDLNRYMSC

SEQ ID NO: 35925 - protein, 85 aa, unidentified
  REGION 1..85: note = Description of Unknown:hvTR_Q9QSP3 target sequence
NRNIEDNQAHLQGEPIEVDSLPEEIGKLNINEAKPQSFENNPIDIDGRMNEDFQMKEVEDPSIQFQSYLDNIGIQIVRKMKTGER

SEQ ID NO: 35926 - protein, 85 aa, unidentified
  REGION 1..85: note = Description of Unknown:hvTR_Q9QSP3 target sequence
FFKIWSQTVEEIISYVGANFPNPSGKTTESKSTQTTPKKVKPEPPSAPTEKPEQLSRTSMAPETTSGPLALDWSATNDDDDVSVE

SEQ ID NO: 35927 - protein, 85 aa, unidentified
  REGION 1..85: note = Description of Unknown:hvTR_Q9QSP3 target sequence
AEIAHQIAESFSKKYKFPSRSSGIFLYNFEQLKMNLDDIVKEARGVPGIIRLAKEGLRLPLRCILGWVASSHSKKFQLLVGSEKL

SEQ ID NO: 35928 - protein, 85 aa, unidentified
  REGION 1..85: note = Description of Unknown:hvTR_A4UHQ4 target sequence
SKIFVNPSAIRAGLADLEMAEETVDLVNKNIEDNQAHLQGEPIEVDALPEDMSKLQISERRPAQFTDNTGGKEEGSDEDFYMAES

SEQ ID NO: 35929 - protein, 85 aa, unidentified
  REGION 1..85: note = Description of Unknown:hvTR_A4UHQ4 target sequence
EDPYIPLQSYLEGVGIQLVRQMKTGERFFKIWSQAVEEIISYVTVHFPMPLGKSTEDKSTQTPEEKSKPSPQQAVTKKESQSSKI

SEQ ID NO: 35930 - protein, 85 aa, unidentified
  REGION 1..85: note = Description of Unknown:hvTR_A4UHQ4 target sequence
KTISQESSGPPALEWSTTNDEENASVEAEIAHQIAESFSKKYKFPSRSSGIFLFNFEQLKMNLDDIVREAKKIPGVVRLAQIGFR

SEQ ID NO: 35931 - protein, 84 aa, unidentified
  REGION 1..84: note = Description of Unknown:hvTR_A4UHQ4 target sequence
KFPSRSSGIFLFNFEQLKMNLDDIVREAKKIPGVVRLAQIGFRLPLRCILGGVGSVNSKKFQLLVNSDKLGKIMQDDLNRYLAY

SEQ ID NO: 35932 - protein, 85 aa, unidentified
  REGION 1..85: note = Description of Unknown:hvTR_A4UHQ4 target sequence
NKNIEDNQAHLQGEPIEVDALPEDMSKLQISERRPAQFTDNTGGKEEGSDEDFYMAESEDPYIPLQSYLEGVGIQLVRQMKTGER

SEQ ID NO: 35933 - protein, 85 aa, unidentified
  REGION 1..85: note = Description of Unknown:hvTR_A4UHQ4 target sequence
FFKIWSQAVEEIISYVTVHFPMPLGKSTEDKSTQTPEEKSKPSPQQAVTKKESQSSKIKTISQESSGPPALEWSTTNDEENASVE

SEQ ID NO: 35934 - protein, 85 aa, unidentified
  REGION 1..85: note = Description of Unknown:hvTR_A4UHQ4 target sequence
AEIAHQIAESFSKKYKFPSRSSGIFLFNFEQLKMNLDDIVREAKKIPGVVRLAQIGFRLPLRCILGGVGSVNSKKFQLLVNSDKL

SEQ ID NO: 35935 - protein, 85 aa, unidentified
  REGION 1..85: note = Description of Unknown:hvTR_P06747 target sequence
SKIFVNPSAIRAGLADLEMAEETVDLINRNIEDNQAHLQGEPIEVDNLPEDMGRLHLDDGKSPNPGEMAKVGEGKYREDFQMDEG

SEQ ID NO: 35936 - protein, 85 aa, unidentified
  REGION 1..85: note = Description of Unknown:hvTR_P06747 target sequence
EDPSLLFQSYLDNVGVQIVRQIRSGERFLKIWSQTVEEIISYVAVNFPNPPGKSSEDKSTQTTGRELKKETTPTPSQRESQSSKA

SEQ ID NO: 35937 - protein, 85 aa, unidentified
  REGION 1..85: note = Description of Unknown:hvTR_P06747 target sequence
RMAAQTASGPPALEWSATNEEDDLSVEAEIAHQIAESFSKKYKFPSRSSGILLYNFEQLKMNLDDIVKEAKNVPGVTRLARDGSK

SEQ ID NO: 35938 - protein, 84 aa, unidentified
  REGION 1..84: note = Description of Unknown:hvTR_P06747 target sequence
KFPSRSSGILLYNFEQLKMNLDDIVKEAKNVPGVTRLARDGSKLPLRCVLGWVALANSKKFQLLVESNKLSKIMQDDLNRYTSC

SEQ ID NO: 35939 - protein, 85 aa, unidentified
  REGION 1..85: note = Description of Unknown:hvTR_P06747 target sequence
NRNIEDNQAHLQGEPIEVDNLPEDMGRLHLDDGKSPNPGEMAKVGEGKYREDFQMDEGEDPSLLFQSYLDNVGVQIVRQIRSGER

SEQ ID NO: 35940 - protein, 85 aa, unidentified
  REGION 1..85: note = Description of Unknown:hvTR_P06747 target sequence
FLKIWSQTVEEIISYVAVNFPNPPGKSSEDKSTQTTGRELKKETTPTPSQRESQSSKARMAAQTASGPPALEWSATNEEDDLSVE

SEQ ID NO: 35941 - protein, 85 aa, unidentified
  REGION 1..85: note = Description of Unknown:hvTR_P06747 target sequence
AEIAHQIAESFSKKYKFPSRSSGILLYNFEQLKMNLDDIVKEAKNVPGVTRLARDGSKLPLRCVLGWVALANSKKFQLLVESNKL

SEQ ID NO: 35942 - protein, 85 aa, unidentified
  REGION 1..85: note = Description of Unknown:cds_NC_025251.1_cds_YP_009091810.1_2 target sequence
SKIFVNPSAIRAGLADLEMAEETVDLINRNLEDNQAHLQGEPIEVDALPEDMRRLQISEHAPCHPSEGACKKEEGSDDDFYMAES

SEQ ID NO: 35943 - protein, 85 aa, unidentified
  REGION 1..85: note = Description of Unknown:cds_NC_025251.1_cds_YP_009091810.1_2 target sequence
EDPYVPLQSYLDSVGIQIVRQMKTGERFFKIWSQTVEEIISYVTVNFPLPSGRPTEDKSTQTVGEKPRSNVQQGSAKKEDHLSKA

SEQ ID NO: 35944 - protein, 85 aa, unidentified
  REGION 1..85: note = Description of Unknown:cds_NC_025251.1_cds_YP_009091810.1_2 target sequence
KMTSQEASGPPALEWSTTNDEDDASIEAEIAHQIAESFSKKYKFPSRSSGIFLYNFEQLKMNLDDIVGEAKKIPGVTRLAQDGLK

SEQ ID NO: 35945 - protein, 84 aa, unidentified
  REGION 1..84: note = Description of Unknown:cds_NC_025251.1_cds_YP_009091810.1_2 target sequence
KFPSRSSGIFLYNFEQLKMNLDDIVGEAKKIPGVTRLAQDGLKLPLRCILGGVASTHSKKFQLLVGSDKLGKIMQDDLNRYLAY

SEQ ID NO: 35946 - protein, 85 aa, unidentified
  REGION 1..85: note = Description of Unknown:cds_NC_025251.1_cds_YP_009091810.1_2 target sequence
NRNLEDNQAHLQGEPIEVDALPEDMRRLQISEHAPCHPSEGACKKEEGSDDDFYMAESEDPYVPLQSYLDSVGIQIVRQMKTGER

SEQ ID NO: 35947 - protein, 85 aa, unidentified
  REGION 1..85: note = Description of Unknown:cds_NC_025251.1_cds_YP_009091810.1_2 target sequence
FFKIWSQTVEEIISYVTVNFPLPSGRPTEDKSTQTVGEKPRSNVQQGSAKKEDHLSKAKMTSQEASGPPALEWSTTNDEDDASIE

SEQ ID NO: 35948 - protein, 85 aa, unidentified
  REGION 1..85: note = Description of Unknown:cds_NC_025251.1_cds_YP_009091810.1_2 target sequence
AEIAHQIAESFSKKYKFPSRSSGIFLYNFEQLKMNLDDIVGEAKKIPGVTRLAQDGLKLPLRCILGGVASTHSKKFQLLVGSDKL

SEQ ID NO: 35949 - protein, 85 aa, unidentified
  REGION 1..85: note = Description of Unknown:cds_NZ_WFIY01000004.1_cds_WP_155863104.1_1021 target sequence
TDEELKIIMKVGKIAAEARDAGAKMIKPGVKVLDVCEAVEKMIIEKGAFPAFPCNLSINYEAAHYSPVIGDEKVIPEGAVVKLDI

SEQ ID NO: 35950 - protein, 85 aa, unidentified
  REGION 1..85: note = Description of Unknown:cds_NZ_WFIY01000004.1_cds_WP_155863104.1_1021 target sequence
GAQIDGYISDTAVTVVLDDKYQRLADASKEALNAAISNFKPGVSLGDIGKVIERVIRMNGYSPVRNLGGHLIRRYELHAGVFVPN

SEQ ID NO: 35951 - protein, 85 aa, unidentified
  REGION 1..85: note = Description of Unknown:cds_NZ_WFIY01000004.1_cds_WP_155863104.1_1021 target sequence
VYERNMGRIMEGNTYAIEPFATDGFGEVIEGKMETIYSAKSFVPKGLTEEEKQFLDVINKRFKTLPFSERWLSDLGDKEKVEKTL

SEQ ID NO: 35952 - protein, 84 aa, unidentified
  REGION 1..84: note = Description of Unknown:cds_NZ_WFIY01000004.1_cds_WP_155863104.1_1021 target sequence
VPKGLTEEEKQFLDVINKRFKTLPFSERWLSDLGDKEKVEKTLKNLVRKKALNSYPVLIEIRKGMVSQFEHTVYVGKDETIVIT

SEQ ID NO: 35953 - protein, 85 aa, unidentified
  REGION 1..85: note = Description of Unknown:cds_NZ_WFIY01000004.1_cds_WP_155863104.1_1021 target sequence
PGVKVLDVCEAVEKMIIEKGAFPAFPCNLSINYEAAHYSPVIGDEKVIPEGAVVKLDIGAQIDGYISDTAVTVVLDDKYQRLADA

SEQ ID NO: 35954 - protein, 85 aa, unidentified
  REGION 1..85: note = Description of Unknown:cds_NZ_WFIY01000004.1_cds_WP_155863104.1_1021 target sequence
SKEALNAAISNFKPGVSLGDIGKVIERVIRMNGYSPVRNLGGHLIRRYELHAGVFVPNVYERNMGRIMEGNTYAIEPFATDGFGE

SEQ ID NO: 35955 - protein, 85 aa, unidentified
  REGION 1..85: note = Description of Unknown:cds_NZ_WFIY01000004.1_cds_WP_155863104.1_1021 target sequence
VIEGKMETIYSAKSFVPKGLTEEEKQFLDVINKRFKTLPFSERWLSDLGDKEKVEKTLKNLVRKKALNSYPVLIEIRKGMVSQFE

SEQ ID NO: 35956 - protein, 85 aa, unidentified
  REGION 1..85: note = Description of Unknown:cds_NZ_WFIY01000004.1_cds_WP_155863231.1_1178 target sequence
TSSKNGKNEDNGFLYILPILILTIFVFILPLVYALYISFTNMNLFHLFNYNIVGLKNYAIIFECGYFWELIKNTLIWTLGSLVTM

SEQ ID NO: 35957 - protein, 85 aa, unidentified
  REGION 1..85: note = Description of Unknown:cds_NZ_WFIY01000004.1_cds_WP_155863231.1_1178 target sequence
MSLGFLLALILNQRDLKGKSIFYAFLILPWAFPGFISLLIWQGLWVDPYGMMNKLILPMLHLPRINSLISTTDAWIELILTNDWL

SEQ ID NO: 35958 - protein, 85 aa, unidentified
  REGION 1..85: note = Description of Unknown:cds_NZ_WFIY01000004.1_cds_WP_155863231.1_1178 target sequence
SFPYFMTVFYSSLQSIPHELYDLAELDGAGTLTKFFRITLPSLKRTIAFVFITSFVFTWNNFYPIFILTGGGPGISTETFIVYAY

SEQ ID NO: 35959 - protein, 84 aa, unidentified
  REGION 1..84: note = Description of Unknown:cds_NZ_WFIY01000004.1_cds_WP_155863231.1_1178 target sequence
LKRTIAFVFITSFVFTWNNFYPIFILTGGGPGISTETFIVYAYQEAFDYSNFALASAWSVISTIFVIILGLIVIKYTHILDSFS

SEQ ID NO: 35960 - protein, 85 aa, unidentified
  REGION 1..85: note = Description of Unknown:cds_NZ_WFIY01000004.1_cds_WP_155863231.1_1178 target sequence
ILPLVYALYISFTNMNLFHLFNYNIVGLKNYAIIFECGYFWELIKNTLIWTLGSLVTMMSLGFLLALILNQRDLKGKSIFYAFLI

SEQ ID NO: 35961 - protein, 85 aa, unidentified
  REGION 1..85: note = Description of Unknown:cds_NZ_WFIY01000004.1_cds_WP_155863231.1_1178 target sequence
LPWAFPGFISLLIWQGLWVDPYGMMNKLILPMLHLPRINSLISTTDAWIELILTNDWLSFPYFMTVFYSSLQSIPHELYDLAELD

SEQ ID NO: 35962 - protein, 85 aa, unidentified
  REGION 1..85: note = Description of Unknown:cds_NZ_WFIY01000004.1_cds_WP_155863231.1_1178 target sequence
GAGTLTKFFRITLPSLKRTIAFVFITSFVFTWNNFYPIFILTGGGPGISTETFIVYAYQEAFDYSNFALASAWSVISTIFVIILG

SEQ ID NO: 35963 - protein, 85 aa, unidentified
  REGION 1..85: note = Description of Unknown:cds_NZ_WFIY01000004.1_cds_WP_155863243.1_1191 target sequence
QVAEWNDWCPGCGNFGILNAEQQAISELGIDLKKVVLVSGIGCSGKLPHFVRIPISGVHTLHGRALPFAIGIKLANPELEVIVNA

SEQ ID NO: 35964 - protein, 85 aa, unidentified
  REGION 1..85: note = Description of Unknown:cds_NZ_WFIY01000004.1_cds_WP_155863243.1_1191 target sequence
GDGDQLGIGVGHFVSAGRRNVDITVIVHDNGVYGLTKGQASPTLKKGVKTKSLPKPNINDDINPLTVALASGYTFVARGYAYDVK

SEQ ID NO: 35965 - protein, 85 aa, unidentified
  REGION 1..85: note = Description of Unknown:cds_NZ_WFIY01000004.1_cds_WP_155863243.1_1191 target sequence
HLKELIKEAIKHKGLALVDVLQPCPTYNDINTKEWYDKRIYKLDWDPVVRSEEDKKKKFLQAMEKALEWGDRIPIGIFYKEERDT

SEQ ID NO: 35966 - protein, 84 aa, unidentified
  REGION 1..84: note = Description of Unknown:cds_NZ_WFIY01000004.1_cds_WP_155863243.1_1191 target sequence
LDWDPVVRSEEDKKKKFLQAMEKALEWGDRIPIGIFYKEERDTFEERISSASPSYKILPPAKVRIEKEGKPTTIIDEILKEKEV

SEQ ID NO: 35967 - protein, 85 aa, unidentified
  REGION 1..85: note = Description of Unknown:cds_NZ_WFIY01000004.1_cds_WP_155863243.1_1191 target sequence
LGIDLKKVVLVSGIGCSGKLPHFVRIPISGVHTLHGRALPFAIGIKLANPELEVIVNAGDGDQLGIGVGHFVSAGRRNVDITVIV

SEQ ID NO: 35968 - protein, 85 aa, unidentified
  REGION 1..85: note = Description of Unknown:cds_NZ_WFIY01000004.1_cds_WP_155863243.1_1191 target sequence
HDNGVYGLTKGQASPTLKKGVKTKSLPKPNINDDINPLTVALASGYTFVARGYAYDVKHLKELIKEAIKHKGLALVDVLQPCPTY

SEQ ID NO: 35969 - protein, 85 aa, unidentified
  REGION 1..85: note = Description of Unknown:cds_NZ_WFIY01000004.1_cds_WP_155863243.1_1191 target sequence
NDINTKEWYDKRIYKLDWDPVVRSEEDKKKKFLQAMEKALEWGDRIPIGIFYKEERDTFEERISSASPSYKILPPAKVRIEKEGK

SEQ ID NO: 35970 - protein, 85 aa, unidentified
  REGION 1..85: note = Description of Unknown:cds_NZ_WFIY01000004.1_cds_WP_155863812.1_1702 target sequence
VNIIIGGGITGLFTAFKISDAIIIDEKENLRNSNASLWSIIPPLCGKYFNDCLKGEDDYVKIGNEYGIYFRKTFLLRKSEKPLGG

SEQ ID NO: 35971 - protein, 85 aa, unidentified
  REGION 1..85: note = Description of Unknown:cds_NZ_WFIY01000004.1_cds_WP_155863812.1_1702 target sequence
GKMMDKKEIKEIEPSIDLDYAEYFDNSLFIDGDELLQKVGKEFPFLHAKVTKINVKGNYVESIETSAGVLKGENYIITASYLLSD

SEQ ID NO: 35972 - protein, 85 aa, unidentified
  REGION 1..85: note = Description of Unknown:cds_NZ_WFIY01000004.1_cds_WP_155863812.1_1702 target sequence
LIGNYVKLIPFKGHLIIAEPSKKLNGIVVIGDRIAVQGKKMYLNGDSKQDSSMDIDFEEVKKTISTFSNLISKSNLEIRVGFRSV

SEQ ID NO: 35973 - protein, 84 aa, unidentified
  REGION 1..84: note = Description of Unknown:cds_NZ_WFIY01000004.1_cds_WP_155863812.1_1702 target sequence
LNGDSKQDSSMDIDFEEVKKTISTFSNLISKSNLEIRVGFRSVSENNEPILIKPFENLIIVGGYRFGYAIAPYLAEKVKEMVKE

SEQ ID NO: 35974 - protein, 85 aa, unidentified
  REGION 1..85: note = Description of Unknown:cds_NZ_WFIY01000004.1_cds_WP_155863812.1_1702 target sequence
ENLRNSNASLWSIIPPLCGKYFNDCLKGEDDYVKIGNEYGIYFRKTFLLRKSEKPLGGGKMMDKKEIKEIEPSIDLDYAEYFDNS

SEQ ID NO: 35975 - protein, 85 aa, unidentified
  REGION 1..85: note = Description of Unknown:cds_NZ_WFIY01000004.1_cds_WP_155863812.1_1702 target sequence
LFIDGDELLQKVGKEFPFLHAKVTKINVKGNYVESIETSAGVLKGENYIITASYLLSDLIGNYVKLIPFKGHLIIAEPSKKLNGI

SEQ ID NO: 35976 - protein, 85 aa, unidentified
  REGION 1..85: note = Description of Unknown:cds_NZ_WFIY01000004.1_cds_WP_155863812.1_1702 target sequence
VVIGDRIAVQGKKMYLNGDSKQDSSMDIDFEEVKKTISTFSNLISKSNLEIRVGFRSVSENNEPILIKPFENLIIVGGYRFGYAI

SEQ ID NO: 35977 - protein, 85 aa, unidentified
  REGION 1..85: note = Description of Unknown:cds_NZ_WFIY01000004.1_cds_WP_155863836.1_1730 target sequence
SLQNSEMEGIKNLRSGSLFLIISVLLASIGVIIAITGGLFGFVFSLGTLSAVGAVSSIFGTLIGIVVLVLLSAIIGLIGILRIKS

SEQ ID NO: 35978 - protein, 85 aa, unidentified
  REGION 1..85: note = Description of Unknown:cds_NZ_WFIY01000004.1_cds_WP_155863836.1_1730 target sequence
GFSILKSLGRDVGIGGTGTTIYLVGLIIAIIGAFLSIILIGLPILVLAEFLILIGGILIGVGFYRVGEIYNEGLVKIGGILIIIP

SEQ ID NO: 35979 - protein, 85 aa, unidentified
  REGION 1..85: note = Description of Unknown:cds_NZ_WFIY01000004.1_cds_WP_155863836.1_1730 target sequence
VGLLNFIGFILAYIGLGKVKPLATATQQSFGPQVYQVGQGTIKNNGYAYITLYSSTPASIVSARIEGVNIMPISISPTVLQIGNN

SEQ ID NO: 35980 - protein, 84 aa, unidentified
  REGION 1..84: note = Description of Unknown:cds_NZ_WFIY01000004.1_cds_WP_155863836.1_1730 target sequence
KNNGYAYITLYSSTPASIVSARIEGVNIMPISISPTVLQIGNNEVTMFFGNLQSLSPNSPYIITFTINIGGNIINISTTAIYQP

SEQ ID NO: 35981 - protein, 85 aa, unidentified
  REGION 1..85: note = Description of Unknown:cds_NZ_WFIY01000004.1_cds_WP_155863836.1_1730 target sequence
SIGVIIAITGGLFGFVFSLGTLSAVGAVSSIFGTLIGIVVLVLLSAIIGLIGILRIKSGFSILKSLGRDVGIGGTGTTIYLVGLI

SEQ ID NO: 35982 - protein, 85 aa, unidentified
  REGION 1..85: note = Description of Unknown:cds_NZ_WFIY01000004.1_cds_WP_155863836.1_1730 target sequence
IAIIGAFLSIILIGLPILVLAEFLILIGGILIGVGFYRVGEIYNEGLVKIGGILIIIPVGLLNFIGFILAYIGLGKVKPLATATQ

SEQ ID NO: 35983 - protein, 85 aa, unidentified
  REGION 1..85: note = Description of Unknown:cds_NZ_WFIY01000004.1_cds_WP_155863836.1_1730 target sequence
QSFGPQVYQVGQGTIKNNGYAYITLYSSTPASIVSARIEGVNIMPISISPTVLQIGNNEVTMFFGNLQSLSPNSPYIITFTINIG

SEQ ID NO: 35984 - protein, 85 aa, unidentified
  REGION 1..85: note = Description of Unknown:cds_NC_031988.1_cds_YP_009325515.1_2 target sequence
SKIFVNPSAIRAGLADLEMAEETVDLINRNIEDNQAHLQGEPIEVDNLPEDLGRLHINDDKSSGQADCATKRETRVEDDFQMEEI

SEQ ID NO: 35985 - protein, 85 aa, unidentified
  REGION 1..85: note = Description of Unknown:cds_NC_031988.1_cds_YP_009325515.1_2 target sequence
EDPSIPFQSYLDNVGIQIVRQMRTGERFFKIWSQTVEEIISYVMVNFSASPGRSTEDKSTQTTPKKPKPSGVSSPSRKEDQVSKT

SEQ ID NO: 35986 - protein, 85 aa, unidentified
  REGION 1..85: note = Description of Unknown:cds_NC_031988.1_cds_YP_009325515.1_2 target sequence
KMAAQTASGPPALEWSSTNEEDDTSVEAEIAHQIAESFSKKYKFPSRSSGIFLYNFEQLKMNLDDIVKEAKKVPGVTRMAHDGSK

SEQ ID NO: 35987 - protein, 84 aa, unidentified
  REGION 1..84: note = Description of Unknown:cds_NC_031988.1_cds_YP_009325515.1_2 target sequence
KFPSRSSGIFLYNFEQLKMNLDDIVKEAKKVPGVTRMAHDGSKLPLRCILGWVALSHSKRFQLLVGPDKLNKIMQDDLNRYVAC

SEQ ID NO: 35988 - protein, 85 aa, unidentified
  REGION 1..85: note = Description of Unknown:cds_NC_031988.1_cds_YP_009325515.1_2 target sequence
NRNIEDNQAHLQGEPIEVDNLPEDLGRLHINDDKSSGQADCATKRETRVEDDFQMEEIEDPSIPFQSYLDNVGIQIVRQMRTGER

SEQ ID NO: 35989 - protein, 85 aa, unidentified
  REGION 1..85: note = Description of Unknown:cds_NC_031988.1_cds_YP_009325515.1_2 target sequence
FFKIWSQTVEEIISYVMVNFSASPGRSTEDKSTQTTPKKPKPSGVSSPSRKEDQVSKTKMAAQTASGPPALEWSSTNEEDDTSVE

SEQ ID NO: 35990 - protein, 85 aa, unidentified
  REGION 1..85: note = Description of Unknown:cds_NC_031988.1_cds_YP_009325515.1_2 target sequence
AEIAHQIAESFSKKYKFPSRSSGIFLYNFEQLKMNLDDIVKEAKKVPGVTRMAHDGSKLPLRCILGWVALSHSKRFQLLVGPDKL

SEQ ID NO: 35991 - protein, 84 aa, unidentified
  REGION 1..84: note = Description of Unknown:cds_NC_002549.1_cds_NP_066248.1_6 target sequence
YSTTIRYQATGFGTNETEYLFEVDNLTYVQLESRFTPQFLLQLNETIYTSGKRSNTTGKLIWKVNPEIDTTIGEWAFWETKKPH

SEQ ID NO: 35992 - protein, 85 aa, unidentified
  REGION 1..85: note = Description of Unknown:cds_NC_020808.1_cds_YP_007641393.1_2 target sequence
SKIFVNPSAIRAGLADLEMAEETVDLVNKNVEESQAHLQAEPIEVDALPEDMKRLQISEPKPCQLPDGTCMKEEGGDEDFYMAES

SEQ ID NO: 35993 - protein, 85 aa, unidentified
  REGION 1..85: note = Description of Unknown:cds_NC_020808.1_cds_YP_007641393.1_2 target sequence
GDPYIPLQSYLDTMGIQIVRKMKTGERFFKIWSQSVEEIISYVAVNFPVPPGKSLADKSTQTSVEKSKPASQPTQPKKEDQLSKV

SEQ ID NO: 35994 - protein, 85 aa, unidentified
  REGION 1..85: note = Description of Unknown:cds_NC_020808.1_cds_YP_007641393.1_2 target sequence
NIDSQESSGPPALDWAATNDDDDASVEAEIAHQIAESFSKKYKFPSRSSGIFLYNFEQLKMNLDDIVREAKGIPGVTRRAGDGVR

SEQ ID NO: 35995 - protein, 84 aa, unidentified
  REGION 1..84: note = Description of Unknown:cds_NC_020808.1_cds_YP_007641393.1_2 target sequence
KFPSRSSGIFLYNFEQLKMNLDDIVREAKGIPGVTRRAGDGVRLPLRCILGWVASTHSRRFQLLVNSDKLNKVMQDDINRYLAY

SEQ ID NO: 35996 - protein, 85 aa, unidentified
  REGION 1..85: note = Description of Unknown:cds_NC_020808.1_cds_YP_007641393.1_2 target sequence
NKNVEESQAHLQAEPIEVDALPEDMKRLQISEPKPCQLPDGTCMKEEGGDEDFYMAESGDPYIPLQSYLDTMGIQIVRKMKTGER

SEQ ID NO: 35997 - protein, 85 aa, unidentified
  REGION 1..85: note = Description of Unknown:cds_NC_020808.1_cds_YP_007641393.1_2 target sequence
FFKIWSQSVEEIISYVAVNFPVPPGKSLADKSTQTSVEKSKPASQPTQPKKEDQLSKVNIDSQESSGPPALDWAATNDDDDASVE

SEQ ID NO: 35998 - protein, 85 aa, unidentified
  REGION 1..85: note = Description of Unknown:cds_NC_020808.1_cds_YP_007641393.1_2 target sequence
AEIAHQIAESFSKKYKFPSRSSGIFLYNFEQLKMNLDDIVREAKGIPGVTRRAGDGVRLPLRCILGWVASTHSRRFQLLVNSDKL

SEQ ID NO: 35999 - protein, 85 aa, unidentified
  REGION 1..85: note = Description of Unknown:cds_NC_025385.1_cds_YP_009094328.1_2 target sequence
SKIFVNPSAIRAGLADLEMAEETVDLINRNVEDNQAHLQGEPIEVEALPEDMRRLHISEQKHSQLSDSACGKEEGSDDDFYMADS

SEQ ID NO: 36000 - protein, 85 aa, unidentified
  REGION 1..85: note = Description of Unknown:cds_NC_025385.1_cds_YP_009094328.1_2 target sequence
EDPYVPMQSYLDNVGIQIVKKMKTGERFFKIWSQAVEEIISYVTVNFPLPSGKSTDDKSTQTVSERSRQNPQPSSVKKEDQLSKT

SEQ ID NO: 36001 - protein, 85 aa, unidentified
  REGION 1..85: note = Description of Unknown:cds_NC_025385.1_cds_YP_009094328.1_2 target sequence
KVVSQEASGPPALEWSATNDEDDASVEAEIAHQIAESFSKKYKFPSRSSGIFLYNFEQLKTNLDDIVREAKRIPGVMRLAQDGLR

SEQ ID NO: 36002 - protein, 84 aa, unidentified
  REGION 1..84: note = Description of Unknown:cds_NC_025385.1_cds_YP_009094328.1_2 target sequence
KFPSRSSGIFLYNFEQLKTNLDDIVREAKRIPGVMRLAQDGLRLPLRCILGWVASTHSKRFQILVDSDKLSKIMQDDINRYLAY

SEQ ID NO: 36003 - protein, 85 aa, unidentified
  REGION 1..85: note = Description of Unknown:cds_NC_025385.1_cds_YP_009094328.1_2 target sequence
NRNVEDNQAHLQGEPIEVEALPEDMRRLHISEQKHSQLSDSACGKEEGSDDDFYMADSEDPYVPMQSYLDNVGIQIVKKMKTGER

SEQ ID NO: 36004 - protein, 85 aa, unidentified
  REGION 1..85: note = Description of Unknown:cds_NC_025385.1_cds_YP_009094328.1_2 target sequence
FFKIWSQAVEEIISYVTVNFPLPSGKSTDDKSTQTVSERSRQNPQPSSVKKEDQLSKTKVVSQEASGPPALEWSATNDEDDASVE

SEQ ID NO: 36005 - protein, 85 aa, unidentified
  REGION 1..85: note = Description of Unknown:cds_NC_025385.1_cds_YP_009094328.1_2 target sequence
AEIAHQIAESFSKKYKFPSRSSGIFLYNFEQLKTNLDDIVREAKRIPGVMRLAQDGLRLPLRCILGWVASTHSKRFQILVDSDKL

SEQ ID NO: 36006 - protein, 85 aa, unidentified
  REGION 1..85: note = Description of Unknown:cds_NC_025377.1_cds_YP_009094269.1_2 target sequence
SKSLIHPSDLRAGLADIEMADETVDLVYKNLSEGQAHLQGEPFDIKDLPEGVSKLQISDNVRSDTSPNEYSDEDDEEGEDEYEEV

SEQ ID NO: 36007 - protein, 85 aa, unidentified
  REGION 1..85: note = Description of Unknown:cds_NC_025377.1_cds_YP_009094269.1_2 target sequence
YDPVSAFQDFLDETGSYLISKLKKGEKIKKTWSEVSRVIYSYVMSNFPPRPPKPTTKDIAVQADLKKPNEIQKISEHKSKSEPSP

SEQ ID NO: 36008 - protein, 85 aa, unidentified
  REGION 1..85: note = Description of Unknown:cds_NC_025377.1_cds_YP_009094269.1_2 target sequence
REPVVEMHKHATLENPEDDEGALESEIAHQVAESYSKKYKFPSKSSGIFLWNFEQLKMNLDDIVQVARGVPGISQIVERGGKLPL

SEQ ID NO: 36009 - protein, 84 aa, unidentified
  REGION 1..84: note = Description of Unknown:cds_NC_025377.1_cds_YP_009094269.1_2 target sequence
SKSSGIFLWNFEQLKMNLDDIVQVARGVPGISQIVERGGKLPLRCMLGYVGLETSKRFRSLVNQDKLCKLMQEDLNAYSVSSNN

SEQ ID NO: 36010 - protein, 85 aa, unidentified
  REGION 1..85: note = Description of Unknown:cds_NC_025377.1_cds_YP_009094269.1_2 target sequence
YKNLSEGQAHLQGEPFDIKDLPEGVSKLQISDNVRSDTSPNEYSDEDDEEGEDEYEEVYDPVSAFQDFLDETGSYLISKLKKGEK

SEQ ID NO: 36011 - protein, 85 aa, unidentified
  REGION 1..85: note = Description of Unknown:cds_NC_025377.1_cds_YP_009094269.1_2 target sequence
IKKTWSEVSRVIYSYVMSNFPPRPPKPTTKDIAVQADLKKPNEIQKISEHKSKSEPSPREPVVEMHKHATLENPEDDEGALESEI

SEQ ID NO: 36012 - protein, 85 aa, unidentified
  REGION 1..85: note = Description of Unknown:cds_NC_025377.1_cds_YP_009094269.1_2 target sequence
AHQVAESYSKKYKFPSKSSGIFLWNFEQLKMNLDDIVQVARGVPGISQIVERGGKLPLRCMLGYVGLETSKRFRSLVNQDKLCKL

SEQ ID NO: 36013 - protein, 85 aa, unidentified
  REGION 1..85: note = Description of Unknown:cds_NZ_WFIY01000004.1_cds_WP_155864216.1_2184 target sequence
LSLSLRDMLKSNSLLSGTSACPGCPENMAMRMVGMALGNDVALIVIAGCSSVIQGLAPKNSYNFPVLNIAFAAGPPAASGMWRAY

SEQ ID NO: 36014 - protein, 85 aa, unidentified
  REGION 1..85: note = Description of Unknown:cds_NZ_WFIY01000004.1_cds_WP_155864216.1_2184 target sequence
RQRNKNTTVVVWAGDGGTADIGFASLSGAAERNENFIYICVDNEAYMNSGGQRSGSTPFGAYTSTTPEGKKENKKEIMFIMMDHN

SEQ ID NO: 36015 - protein, 85 aa, unidentified
  REGION 1..85: note = Description of Unknown:cds_NZ_WFIY01000004.1_cds_WP_155864216.1_2184 target sequence
IPYLATASVGYPHDFVNKLRKAKQIFGFKYVQVLTPDPYGWMFDPSKTVEVGKLAVQTCYWPLIEYDNGKLTVSPESLHCLDRST

SEQ ID NO: 36016 - protein, 84 aa, unidentified
  REGION 1..84: note = Description of Unknown:cds_NZ_WFIY01000004.1_cds_WP_155864216.1_2184 target sequence
FDPSKTVEVGKLAVQTCYWPLIEYDNGKLTVSPESLHCLDRSTRRPLKDFLQIQGRFKRITEEEYKALENYVDSMWEKIKKLMK

SEQ ID NO: 36017 - protein, 85 aa, unidentified
  REGION 1..85: note = Description of Unknown:cds_NZ_WFIY01000004.1_cds_WP_155864216.1_2184 target sequence
MAMRMVGMALGNDVALIVIAGCSSVIQGLAPKNSYNFPVLNIAFAAGPPAASGMWRAYRQRNKNTTVVVWAGDGGTADIGFASLS

SEQ ID NO: 36018 - protein, 85 aa, unidentified
  REGION 1..85: note = Description of Unknown:cds_NZ_WFIY01000004.1_cds_WP_155864216.1_2184 target sequence
GAAERNENFIYICVDNEAYMNSGGQRSGSTPFGAYTSTTPEGKKENKKEIMFIMMDHNIPYLATASVGYPHDFVNKLRKAKQIFG

SEQ ID NO: 36019 - protein, 85 aa, unidentified
  REGION 1..85: note = Description of Unknown:cds_NZ_WFIY01000004.1_cds_WP_155864216.1_2184 target sequence
FKYVQVLTPDPYGWMFDPSKTVEVGKLAVQTCYWPLIEYDNGKLTVSPESLHCLDRSTRRPLKDFLQIQGRFKRITEEEYKALEN

SEQ ID NO: 36020 - protein, 85 aa, unidentified
  REGION 1..85: note = Description of Unknown:cds_NZ_WFIY01000004.1_cds_2252 target sequence
VRPIYFYAPSLKRYENEYFTSRSGWKAISVTGTYCAFSCKHCNRRVLETMADGSTREKFEKEISTAKEGVIISGGSTARGDVPVW

SEQ ID NO: 36021 - protein, 85 aa, unidentified
  REGION 1..85: note = Description of Unknown:cds_NZ_WFIY01000004.1_cds_2252 target sequence
KYSDILRSRKDLTIIAHTGVVKNEEIARKFKESGVKIALLDMVGDNETIKEVLGQPFTVDDYLNSFKYLKKEGIKIVPHVIMGLS

SEQ ID NO: 36022 - protein, 85 aa, unidentified
  REGION 1..85: note = Description of Unknown:cds_NZ_WFIY01000004.1_cds_2252 target sequence
KKGEEGDLNAIRLLKEVNPDAVIIVGLMPLVGTAYNEISPPSPSHLINGLKLARDLFNVPVMLGCARPLGSKYSEVEKFAVDYDV

SEQ ID NO: 36023 - protein, 84 aa, unidentified
  REGION 1..84: note = Description of Unknown:cds_NZ_WFIY01000004.1_cds_2252 target sequence
PSHLINGLKLARDLFNVPVMLGCARPLGSKYSEVEKFAVDYDVDGIAFPEENTIKYAEEKGRKVILSNACCSNVVYDFILRVSI

SEQ ID NO: 36024 - protein, 85 aa, unidentified
  REGION 1..85: note = Description of Unknown:cds_NZ_WFIY01000004.1_cds_2252 target sequence
ISVTGTYCAFSCKHCNRRVLETMADGSTREKFEKEISTAKEGVIISGGSTARGDVPVWKYSDILRSRKDLTIIAHTGVVKNEEIA

SEQ ID NO: 36025 - protein, 85 aa, unidentified
  REGION 1..85: note = Description of Unknown:cds_NZ_WFIY01000004.1_cds_2252 target sequence
RKFKESGVKIALLDMVGDNETIKEVLGQPFTVDDYLNSFKYLKKEGIKIVPHVIMGLSKKGEEGDLNAIRLLKEVNPDAVIIVGL

SEQ ID NO: 36026 - protein, 85 aa, unidentified
  REGION 1..85: note = Description of Unknown:cds_NZ_WFIY01000004.1_cds_2252 target sequence
MPLVGTAYNEISPPSPSHLINGLKLARDLFNVPVMLGCARPLGSKYSEVEKFAVDYDVDGIAFPEENTIKYAEEKGRKVILSNAC

SEQ ID NO: 36027 - protein, 85 aa, unidentified
  REGION 1..85: note = Description of Unknown:hvTR_P16752 target sequence
MARDEENPAVPRVRTGKFSFTCANHLILQISEKMSRGQPLSSLRLEELKIVRLICVLLFHRGLETLLLRETMNNLGVSDHAVLSR

SEQ ID NO: 36028 - protein, 85 aa, unidentified
  REGION 1..85: note = Description of Unknown:hvTR_P16752 target sequence
KTPQPYWPHLYRELRQAFPGLDFEAAVFDETRAARLSQRLCHPRLSGGLLTRFVQRHTGLPVVFPEDLARNGNILFSLGTLYGHR

SEQ ID NO: 36029 - protein, 85 aa, unidentified
  REGION 1..85: note = Description of Unknown:hvTR_P16752 target sequence
LFRLAAFFTRHWGAEAYEPLIRIICQKMWYFYLIGTGKMRITPDAFEIQRSRHETGIFTFIMEDYRTFAGTLSRHPHRPHPQQQQ

SEQ ID NO: 36030 - protein, 84 aa, unidentified
  REGION 1..84: note = Description of Unknown:hvTR_P16752 target sequence
ITPDAFEIQRSRHETGIFTFIMEDYRTFAGTLSRHPHRPHPQQQQHHHPGPPHPPLSHPASSCLSPEAVLAARALHMPTLANDV

SEQ ID NO: 36031 - protein, 85 aa, unidentified
  REGION 1..85: note = Description of Unknown:hvTR_P16752 target sequence
LQISEKMSRGQPLSSLRLEELKIVRLICVLLFHRGLETLLLRETMNNLGVSDHAVLSRKTPQPYWPHLYRELRQAFPGLDFEAAV

SEQ ID NO: 36032 - protein, 85 aa, unidentified
  REGION 1..85: note = Description of Unknown:hvTR_P16752 target sequence
FDETRAARLSQRLCHPRLSGGLLTRFVQRHTGLPVVFPEDLARNGNILFSLGTLYGHRLFRLAAFFTRHWGAEAYEPLIRIICQK

SEQ ID NO: 36033 - protein, 85 aa, unidentified
  REGION 1..85: note = Description of Unknown:hvTR_P16752 target sequence
MWYFYLIGTGKMRITPDAFEIQRSRHETGIFTFIMEDYRTFAGTLSRHPHRPHPQQQQHHHPGPPHPPLSHPASSCLSPEAVLAA

SEQ ID NO: 36034 - protein, 85 aa, unidentified
  REGION 1..85: note = Description of Unknown:cds_NZ_WFIY01000004.1_cds_WP_155862754.1_566 target sequence
VICIQYLLLPLVYFVTIFLMIKLGYGGLAEIVKYEKRKVVINPISKIIFEIGLFVFLTRGFYTIFSLNNVELLFAFPLLLLSAIF

SEQ ID NO: 36035 - protein, 85 aa, unidentified
  REGION 1..85: note = Description of Unknown:cds_NZ_WFIY01000004.1_cds_WP_155862754.1_566 target sequence
LVLRNKIKCLAYYVGAYLLITAWVEINSFYSYGSTIYTWSCEIARIFGYSTIVTYSSLFHGILFSLYSPTLYITLLGFVFISTTN

SEQ ID NO: 36036 - protein, 85 aa, unidentified
  REGION 1..85: note = Description of Unknown:cds_NZ_WFIY01000004.1_cds_WP_155862754.1_566 target sequence
TSEVIRAFSELRIPLAITLIFSVFVKVIPQALRNMETSYKMTILRGLGYGKPFPIRLFYQLYGLMTVILPVFVYIVKGSRNLAIA

SEQ ID NO: 36037 - protein, 84 aa, unidentified
  REGION 1..84: note = Description of Unknown:cds_NZ_WFIY01000004.1_cds_WP_155862754.1_566 target sequence
TILRGLGYGKPFPIRLFYQLYGLMTVILPVFVYIVKGSRNLAIALETRGYMSKKNRTSLVKIGFHLIDYLLLFISIILFYISFS

SEQ ID NO: 36038 - protein, 85 aa, unidentified
  REGION 1..85: note = Description of Unknown:cds_NZ_WFIY01000004.1_cds_WP_155862754.1_566 target sequence
LAEIVKYEKRKVVINPISKIIFEIGLFVFLTRGFYTIFSLNNVELLFAFPLLLLSAIFLVLRNKIKCLAYYVGAYLLITAWVEIN

SEQ ID NO: 36039 - protein, 85 aa, unidentified
  REGION 1..85: note = Description of Unknown:cds_NZ_WFIY01000004.1_cds_WP_155862754.1_566 target sequence
SFYSYGSTIYTWSCEIARIFGYSTIVTYSSLFHGILFSLYSPTLYITLLGFVFISTTNTSEVIRAFSELRIPLAITLIFSVFVKV

SEQ ID NO: 36040 - protein, 85 aa, unidentified
  REGION 1..85: note = Description of Unknown:cds_NZ_WFIY01000004.1_cds_WP_155862754.1_566 target sequence
IPQALRNMETSYKMTILRGLGYGKPFPIRLFYQLYGLMTVILPVFVYIVKGSRNLAIALETRGYMSKKNRTSLVKIGFHLIDYLL

SEQ ID NO: 36041 - protein, 85 aa, unidentified
  REGION 1..85: note = Description of Unknown:cds_NZ_WFIY01000004.1_cds_1563 target sequence
DWCPGCGNFGILRAEEMAIKELGIDPKKVIVVSGIGCSGKIPHFIQLPIGGVHTLHGRSIAYATGIKLSNPSLEVIVNIGDGDGL

SEQ ID NO: 36042 - protein, 85 aa, unidentified
  REGION 1..85: note = Description of Unknown:cds_NZ_WFIY01000004.1_cds_1563 target sequence
GIGMGHFIHAGRRNIDMTVIVHDNGVYGLTKGQASPTLHRGLKTKSLPRPNINDAVNPISVALSAGYTFVARGYAYDVMHLKDLI

SEQ ID NO: 36043 - protein, 85 aa, unidentified
  REGION 1..85: note = Description of Unknown:cds_NZ_WFIY01000004.1_cds_1563 target sequence
VKAIKHKGLAFIDVLQPCPTYNDINTKEWYDKRIYKLDNDPTWDPKVKSEADQQTKFERAMLKALEWGDKIPIGVFYENELVPTF

SEQ ID NO: 36044 - protein, 84 aa, unidentified
  REGION 1..84: note = Description of Unknown:cds_NZ_WFIY01000004.1_cds_1563 target sequence
TWDPKVKSEADQQTKFERAMLKALEWGDKIPIGVFYENELVPTFEERIMQNIPNYLDYYPAKQEIEKNGESTTRIDELIKAKRV

SEQ ID NO: 36045 - protein, 85 aa, unidentified
  REGION 1..85: note = Description of Unknown:cds_NZ_WFIY01000004.1_cds_1563 target sequence
KVIVVSGIGCSGKIPHFIQLPIGGVHTLHGRSIAYATGIKLSNPSLEVIVNIGDGDGLGIGMGHFIHAGRRNIDMTVIVHDNGVY

SEQ ID NO: 36046 - protein, 85 aa, unidentified
  REGION 1..85: note = Description of Unknown:cds_NZ_WFIY01000004.1_cds_1563 target sequence
GLTKGQASPTLHRGLKTKSLPRPNINDAVNPISVALSAGYTFVARGYAYDVMHLKDLIVKAIKHKGLAFIDVLQPCPTYNDINTK

SEQ ID NO: 36047 - protein, 85 aa, unidentified
  REGION 1..85: note = Description of Unknown:cds_NZ_WFIY01000004.1_cds_1563 target sequence
EWYDKRIYKLDNDPTWDPKVKSEADQQTKFERAMLKALEWGDKIPIGVFYENELVPTFEERIMQNIPNYLDYYPAKQEIEKNGES

SEQ ID NO: 36048 - protein, 85 aa, unidentified
  REGION 1..85: note = Description of Unknown:vpeps_3TD7_1 target sequence
GSHMSLSKQVVPTHRVEIAPNSESTAKMDHSNYQHNGLITKIWGTAGWTFNHAVTFGYPLNPTSDDKRRYKNYFISLGDVLPCRL

SEQ ID NO: 36049 - protein, 85 aa, unidentified
  REGION 1..85: note = Description of Unknown:vpeps_3TD7_1 target sequence
CRESYKKFITTGKTALTNEVLRNRHTLTKWFYDVHNAVNNKLEVDYGLSYEDVVNKYESFRAKCGKPVPTVKGCVTPLDHKAFSF

SEQ ID NO: 36050 - protein, 85 aa, unidentified
  REGION 1..85: note = Description of Unknown:vpeps_3TD7_1 target sequence
KKLYYMDAPIVSLDKVENFVRIARMRGISDKYFAFLELATVLNGDFNELKKQSSWEYRNKYAQKKIRHMRENAIPSIEEQGYWKG

SEQ ID NO: 36051 - protein, 85 aa, unidentified
  REGION 1..85: note = Description of Unknown:vpeps_3TD7_1 target sequence
VLNGDFNELKKQSSWEYRNKYAQKKIRHMRENAIPSIEEQGYWKGTPTIDELKLLLFLASNLNRTEVNDAINNVERLESTHYIEN

SEQ ID NO: 36052 - protein, 85 aa, unidentified
  REGION 1..85: note = Description of Unknown:vpeps_3TD7_1 target sequence
MDHSNYQHNGLITKIWGTAGWTFNHAVTFGYPLNPTSDDKRRYKNYFISLGDVLPCRLCRESYKKFITTGKTALTNEVLRNRHTL

SEQ ID NO: 36053 - protein, 85 aa, unidentified
  REGION 1..85: note = Description of Unknown:vpeps_3TD7_1 target sequence
TKWFYDVHNAVNNKLEVDYGLSYEDVVNKYESFRAKCGKPVPTVKGCVTPLDHKAFSFKKLYYMDAPIVSLDKVENFVRIARMRG

SEQ ID NO: 36054 - protein, 85 aa, unidentified
  REGION 1..85: note = Description of Unknown:vpeps_3TD7_1 target sequence
ISDKYFAFLELATVLNGDFNELKKQSSWEYRNKYAQKKIRHMRENAIPSIEEQGYWKGTPTIDELKLLLFLASNLNRTEVNDAIN

SEQ ID NO: 36055 - protein, 85 aa, unidentified
  REGION 1..85: note = Description of Unknown:vpeps_3VK7_1 target sequence
PQGPEVALTADILEKYFKGKTLEYIDFISGRYSKSEPEGYDDFIANLPLKVSNVDTKGKFLWFELFDPNDKSNKWYIWNTFGLTG

SEQ ID NO: 36056 - protein, 85 aa, unidentified
  REGION 1..85: note = Description of Unknown:vpeps_3VK7_1 target sequence
MWSLFEAKYTRAVLSFDNELMAYFSDMRNFGTFKFSNSEKELKRKLNELGPDFLKNDDIDISKIKKYKQPIVALLMDQKKIGSGL

SEQ ID NO: 36057 - protein, 85 aa, unidentified
  REGION 1..85: note = Description of Unknown:vpeps_3VK7_1 target sequence
GNYLVAEILYRAKIDPHKLGSNLTDQEIENLWYWIKYETKLAYDSNHIGYMVNLENESSKIGRKNYHPNIHPTEKEFDFLVYRKK

SEQ ID NO: 36058 - protein, 85 aa, unidentified
  REGION 1..85: note = Description of Unknown:vpeps_3VK7_1 target sequence
KLAYDSNHIGYMVNLENESSKIGRKNYHPNIHPTEKEFDFLVYRKKKDPNGNKVIADKIIGSGKNKRTTYWAPAIQKLEHHHHHH

SEQ ID NO: 36059 - protein, 85 aa, unidentified
  REGION 1..85: note = Description of Unknown:vpeps_3VK7_1 target sequence
ISGRYSKSEPEGYDDFIANLPLKVSNVDTKGKFLWFELFDPNDKSNKWYIWNTFGLTGMWSLFEAKYTRAVLSFDNELMAYFSDM

SEQ ID NO: 36060 - protein, 85 aa, unidentified
  REGION 1..85: note = Description of Unknown:vpeps_3VK7_1 target sequence
RNFGTFKFSNSEKELKRKLNELGPDFLKNDDIDISKIKKYKQPIVALLMDQKKIGSGLGNYLVAEILYRAKIDPHKLGSNLTDQE

SEQ ID NO: 36061 - protein, 85 aa, unidentified
  REGION 1..85: note = Description of Unknown:vpeps_3VK7_1 target sequence
IENLWYWIKYETKLAYDSNHIGYMVNLENESSKIGRKNYHPNIHPTEKEFDFLVYRKKKDPNGNKVIADKIIGSGKNKRTTYWAP

SEQ ID NO: 36062 - protein, 85 aa, unidentified
  REGION 1..85: note = Description of Unknown:vpeps_3A42_1 target sequence
PEGPEVALTADILEKYFKGKTLEYIDFISGRYSKSEPEGYDDFIANLPLKVSNVDTKGKFLWFELFDPNDKSNKWYIWNTFGLTG

SEQ ID NO: 36063 - protein, 85 aa, unidentified
  REGION 1..85: note = Description of Unknown:cds_NZ_WFIY01000004.1_cds_WP_155862344.1_72 target sequence
LFTLTFILLYVVSLLLGRKINIPQIFSDGIVLILIFTISFWGGNQISAEYVGSIILVSLISSLVIVTITYFLGSFINERTEEGKI

SEQ ID NO: 36064 - protein, 85 aa, unidentified
  REGION 1..85: note = Description of Unknown:cds_NZ_WFIY01000004.1_cds_WP_155862344.1_72 target sequence
KRVDVKTQLKYLLPLIIGFSVGLIMRFHSLEISNNIFGEIIDWELYVLAVVIGISIGKELKKELMTRISRFAIFSVVIAILGGII

SEQ ID NO: 36065 - protein, 85 aa, unidentified
  REGION 1..85: note = Description of Unknown:cds_NZ_WFIY01000004.1_cds_WP_155862344.1_72 target sequence
SSVILFLFLSIKPFNLALAISLGSGWYSYTGPIVAKYYGPFYGVTAFLVNFLREQFTFSLLPIFLKIRSTPLGAVAVGGATSMDT

SEQ ID NO: 36066 - protein, 84 aa, unidentified
  REGION 1..84: note = Description of Unknown:cds_NZ_WFIY01000004.1_cds_WP_155862344.1_72 target sequence
PFYGVTAFLVNFLREQFTFSLLPIFLKIRSTPLGAVAVGGATSMDTTLGFYVDVLGYEYGLGAMINGVILTLIVPLILPIILSF

SEQ ID NO: 36067 - protein, 85 aa, unidentified
  REGION 1..85: note = Description of Unknown:cds_NZ_WFIY01000004.1_cds_WP_155862344.1_72 target sequence
DGIVLILIFTISFWGGNQISAEYVGSIILVSLISSLVIVTITYFLGSFINERTEEGKIKRVDVKTQLKYLLPLIIGFSVGLIMRF

SEQ ID NO: 36068 - protein, 85 aa, unidentified
  REGION 1..85: note = Description of Unknown:cds_NZ_WFIY01000004.1_cds_WP_155862344.1_72 target sequence
HSLEISNNIFGEIIDWELYVLAVVIGISIGKELKKELMTRISRFAIFSVVIAILGGIISSVILFLFLSIKPFNLALAISLGSGWY

SEQ ID NO: 36069 - protein, 85 aa, unidentified
  REGION 1..85: note = Description of Unknown:cds_NZ_WFIY01000004.1_cds_WP_155862344.1_72 target sequence
SYTGPIVAKYYGPFYGVTAFLVNFLREQFTFSLLPIFLKIRSTPLGAVAVGGATSMDTTLGFYVDVLGYEYGLGAMINGVILTLI

SEQ ID NO: 36070 - protein, 85 aa, unidentified
  REGION 1..85: note = Description of Unknown:cds_NZ_WFIY01000004.1_cds_WP_155863038.1_926 target sequence
SDARLLYLNDVSRKFAGFNKENSPFVILGIPMDITSSYRPGSRFAPSAIRDAAQYIEFYSLRTGIDMGEVGFNDIGDVALHPSNV

SEQ ID NO: 36071 - protein, 85 aa, unidentified
  REGION 1..85: note = Description of Unknown:cds_NZ_WFIY01000004.1_cds_WP_155863038.1_926 target sequence
EENVKRISDVVSYFSEKGKIVVSIGGEHTITVGTASGTSADCVISFDAHLDLRDDYLGYKYDHACVMRRLSEKGIKIMEIGNRAV

SEQ ID NO: 36072 - protein, 85 aa, unidentified
  REGION 1..85: note = Description of Unknown:cds_NZ_WFIY01000004.1_cds_WP_155863038.1_926 target sequence
SKEELEYARKAGVPFITSWDVELLGYKEVARKIINFTEECKRIYITYDMDSIDPSYAPGVATPEPEGLKPTTILDIVKLIADKRI

SEQ ID NO: 36073 - protein, 84 aa, unidentified
  REGION 1..84: note = Description of Unknown:cds_NZ_WFIY01000004.1_cds_WP_155863038.1_926 target sequence
CKRIYITYDMDSIDPSYAPGVATPEPEGLKPTTILDIVKLIADKRIVGFDIVEVSPPFDPSGITSVLAAKIIMETSAIIKSKLP

SEQ ID NO: 36074 - protein, 85 aa, unidentified
  REGION 1..85: note = Description of Unknown:cds_NZ_WFIY01000004.1_cds_WP_155863038.1_926 target sequence
LGIPMDITSSYRPGSRFAPSAIRDAAQYIEFYSLRTGIDMGEVGFNDIGDVALHPSNVEENVKRISDVVSYFSEKGKIVVSIGGE

SEQ ID NO: 36075 - protein, 85 aa, unidentified
  REGION 1..85: note = Description of Unknown:cds_NZ_WFIY01000004.1_cds_WP_155863038.1_926 target sequence
HTITVGTASGTSADCVISFDAHLDLRDDYLGYKYDHACVMRRLSEKGIKIMEIGNRAVSKEELEYARKAGVPFITSWDVELLGYK

SEQ ID NO: 36076 - protein, 85 aa, unidentified
  REGION 1..85: note = Description of Unknown:cds_NZ_WFIY01000004.1_cds_WP_155863038.1_926 target sequence
EVARKIINFTEECKRIYITYDMDSIDPSYAPGVATPEPEGLKPTTILDIVKLIADKRIVGFDIVEVSPPFDPSGITSVLAAKIIM

SEQ ID NO: 36077 - protein, 85 aa, unidentified
  REGION 1..85: note = Description of Unknown:cds_NZ_WFIY01000004.1_cds_WP_155863111.1_1028 target sequence
ISIIFNQGIIPKDVVERPINNDFVLVSPDKVLLTFIENSVYLGLLWVRPWTILGSIGIGKIEAVGVDVDSTLQGKNVLVLPYSRK

SEQ ID NO: 36078 - protein, 85 aa, unidentified
  REGION 1..85: note = Description of Unknown:cds_NZ_WFIY01000004.1_cds_WP_155863111.1_1028 target sequence
YGGIGTEIDGLLTEKAVIPDDAIVTLPEKFNDKVLLYPFVSIATQIVDLVKGEKVLIIGSGLLGLLTYQYLLDNSVDVSIYTDIS

SEQ ID NO: 36079 - protein, 85 aa, unidentified
  REGION 1..85: note = Description of Unknown:cds_NZ_WFIY01000004.1_cds_WP_155863111.1_1028 target sequence
GKKIQGVKEVKNLEEGKWDIVILSTMRGWARYIAERLITEEGRIIVPVFMNTWPPTLPSRSIKIYPKKMDGLLQKTEKISDKFFS

SEQ ID NO: 36080 - protein, 84 aa, unidentified
  REGION 1..84: note = Description of Unknown:cds_NZ_WFIY01000004.1_cds_WP_155863111.1_1028 target sequence
EEGRIIVPVFMNTWPPTLPSRSIKIYPKKMDGLLQKTEKISDKFFSENIAYSDDILSSIPTPKNGVIVNVKKALASYANSSLIT

SEQ ID NO: 36081 - protein, 85 aa, unidentified
  REGION 1..85: note = Description of Unknown:cds_NZ_WFIY01000004.1_cds_WP_155863111.1_1028 target sequence
PDKVLLTFIENSVYLGLLWVRPWTILGSIGIGKIEAVGVDVDSTLQGKNVLVLPYSRKYGGIGTEIDGLLTEKAVIPDDAIVTLP

SEQ ID NO: 36082 - protein, 85 aa, unidentified
  REGION 1..85: note = Description of Unknown:cds_NZ_WFIY01000004.1_cds_WP_155863111.1_1028 target sequence
EKFNDKVLLYPFVSIATQIVDLVKGEKVLIIGSGLLGLLTYQYLLDNSVDVSIYTDISGKKIQGVKEVKNLEEGKWDIVILSTMR

SEQ ID NO: 36083 - protein, 85 aa, unidentified
  REGION 1..85: note = Description of Unknown:cds_NZ_WFIY01000004.1_cds_WP_155863111.1_1028 target sequence
GWARYIAERLITEEGRIIVPVFMNTWPPTLPSRSIKIYPKKMDGLLQKTEKISDKFFSENIAYSDDILSSIPTPKNGVIVNVKKA

SEQ ID NO: 36084 - protein, 85 aa, unidentified
  REGION 1..85: note = Description of Unknown:cds_NZ_WFIY01000004.1_cds_WP_155863235.1_1183 target sequence
IRKVSGLIQGKYTYDGAGVKLYRVFGGTSTYHLTDPFLLLDFFGSSNVEDYINGFPWHPHRGIETVTYLLQGKVEHEDSEGNKGV

SEQ ID NO: 36085 - protein, 85 aa, unidentified
  REGION 1..85: note = Description of Unknown:cds_NZ_WFIY01000004.1_cds_WP_155863235.1_1183 target sequence
IYPGEAQWMTAGSGIFHQEMPKPLDESDILHTPILTTENKGLQLWINLPANKKMKSPIYRDIRRIPKVKIDKGEVKVLSGEFMGV

SEQ ID NO: 36086 - protein, 85 aa, unidentified
  REGION 1..85: note = Description of Unknown:cds_NZ_WFIY01000004.1_cds_WP_155863235.1_1183 target sequence
EGPVNAGIDVDPTYLDIKLEEEGEFRHGVHTKYTVLAFIIEGSIDFPVKVGEGNLLIFDEGDEIYIKSKGGARLLLLSGKPLREE

SEQ ID NO: 36087 - protein, 84 aa, unidentified
  REGION 1..84: note = Description of Unknown:cds_NZ_WFIY01000004.1_cds_WP_155863235.1_1183 target sequence
IEGSIDFPVKVGEGNLLIFDEGDEIYIKSKGGARLLLLSGKPLREEIAWYGPIVMNTEEQIIEALNDLRRGTFVRDKKVERITY

SEQ ID NO: 36088 - protein, 85 aa, unidentified
  REGION 1..85: note = Description of Unknown:cds_NZ_WFIY01000004.1_cds_WP_155863235.1_1183 target sequence
TSTYHLTDPFLLLDFFGSSNVEDYINGFPWHPHRGIETVTYLLQGKVEHEDSEGNKGVIYPGEAQWMTAGSGIFHQEMPKPLDES

SEQ ID NO: 36089 - protein, 85 aa, unidentified
  REGION 1..85: note = Description of Unknown:cds_NZ_WFIY01000004.1_cds_WP_155863235.1_1183 target sequence
DILHTPILTTENKGLQLWINLPANKKMKSPIYRDIRRIPKVKIDKGEVKVLSGEFMGVEGPVNAGIDVDPTYLDIKLEEEGEFRH

SEQ ID NO: 36090 - protein, 85 aa, unidentified
  REGION 1..85: note = Description of Unknown:cds_NZ_WFIY01000004.1_cds_WP_155863235.1_1183 target sequence
GVHTKYTVLAFIIEGSIDFPVKVGEGNLLIFDEGDEIYIKSKGGARLLLLSGKPLREEIAWYGPIVMNTEEQIIEALNDLRRGTF

SEQ ID NO: 36091 - protein, 85 aa, unidentified
  REGION 1..85: note = Description of Unknown:cds_NZ_WFIY01000004.1_cds_WP_155863283.1_1239 target sequence
VKNKFLISLYRLFKLIYRNKIFFVGFLIFVFYILMGTVGLLIIPYPSPSLANPFNAFQPPSLNHFPLYIFGTDYEGEPLLPEIVW

SEQ ID NO: 36092 - protein, 85 aa, unidentified
  REGION 1..85: note = Description of Unknown:cds_NZ_WFIY01000004.1_cds_WP_155863283.1_1239 target sequence
GTPFILEVTSIASVITIGVGLILGLLAGFMGRFVDLALNALFEIVLTLPGFPITLILATIIHTSNPLILAGILSMFSWAGLAKAI

SEQ ID NO: 36093 - protein, 85 aa, unidentified
  REGION 1..85: note = Description of Unknown:cds_NZ_WFIY01000004.1_cds_WP_155863283.1_1239 target sequence
RGFTYSLKKQEYITMAKILGLSKIRILKEIIYPMSSYILVHLFQDMMFYVFGLVALYTFGFLPLSNNNWGVILNFAISIGGAIYS

SEQ ID NO: 36094 - protein, 84 aa, unidentified
  REGION 1..84: note = Description of Unknown:cds_NZ_WFIY01000004.1_cds_WP_155863283.1_1239 target sequence
HLFQDMMFYVFGLVALYTFGFLPLSNNNWGVILNFAISIGGAIYSPLGFWNLIIPVIIIIIYEIGLMMMSIGLGKLVDPRLREY

SEQ ID NO: 36095 - protein, 85 aa, unidentified
  REGION 1..85: note = Description of Unknown:cds_NZ_WFIY01000004.1_cds_WP_155863283.1_1239 target sequence
IFVFYILMGTVGLLIIPYPSPSLANPFNAFQPPSLNHFPLYIFGTDYEGEPLLPEIVWGTPFILEVTSIASVITIGVGLILGLLA

SEQ ID NO: 36096 - protein, 85 aa, unidentified
  REGION 1..85: note = Description of Unknown:cds_NZ_WFIY01000004.1_cds_WP_155863283.1_1239 target sequence
GFMGRFVDLALNALFEIVLTLPGFPITLILATIIHTSNPLILAGILSMFSWAGLAKAIRGFTYSLKKQEYITMAKILGLSKIRIL

SEQ ID NO: 36097 - protein, 85 aa, unidentified
  REGION 1..85: note = Description of Unknown:cds_NZ_WFIY01000004.1_cds_WP_155863283.1_1239 target sequence
KEIIYPMSSYILVHLFQDMMFYVFGLVALYTFGFLPLSNNNWGVILNFAISIGGAIYSPLGFWNLIIPVIIIIIYEIGLMMMSIG

SEQ ID NO: 36098 - protein, 85 aa, unidentified
  REGION 1..85: note = Description of Unknown:cds_NC_030656.1_cds_YP_009268817.1_102 target sequence
YFSTMFKEVPAYQLEADVKIGDINVNVTKSRARENSSYVSKTRRLFPQRSKNDEHKLSLGFFLQRLSFLGYKETAYLFRCVDAVK

SEQ ID NO: 36099 - protein, 85 aa, unidentified
  REGION 1..85: note = Description of Unknown:cds_NC_030656.1_cds_YP_009268817.1_102 target sequence
NVSITKKNNVIIAPYIALITMASKGYKLTETMLQLYFPELYSERSKRFKFSTQIMYIQDKLGYPQSEYFVYSFEEYFSTVALIIR

SEQ ID NO: 36100 - protein, 85 aa, unidentified
  REGION 1..85: note = Description of Unknown:cds_NC_030656.1_cds_YP_009268817.1_102 target sequence
DETDTVFDSRKESSLISSLSEITYRFYLKQLKEDAIQWSVSTGTLITQMINTVLIATYEMLKQAIELNASISCKLAKETPVPFNL

SEQ ID NO: 36101 - protein, 84 aa, unidentified
  REGION 1..84: note = Description of Unknown:cds_NC_030656.1_cds_YP_009268817.1_102 target sequence
VSTGTLITQMINTVLIATYEMLKQAIELNASISCKLAKETPVPFNLLIENKNKFINFINDIKKLESFKVNKKEKDFLMTFFELN

SEQ ID NO: 36102 - protein, 85 aa, unidentified
  REGION 1..85: note = Description of Unknown:cds_NC_030656.1_cds_YP_009268817.1_102 target sequence
TKSRARENSSYVSKTRRLFPQRSKNDEHKLSLGFFLQRLSFLGYKETAYLFRCVDAVKNVSITKKNNVIIAPYIALITMASKGYK

SEQ ID NO: 36103 - protein, 85 aa, unidentified
  REGION 1..85: note = Description of Unknown:cds_NC_030656.1_cds_YP_009268817.1_102 target sequence
LTETMLQLYFPELYSERSKRFKFSTQIMYIQDKLGYPQSEYFVYSFEEYFSTVALIIRDETDTVFDSRKESSLISSLSEITYRFY

SEQ ID NO: 36104 - protein, 85 aa, unidentified
  REGION 1..85: note = Description of Unknown:cds_NC_030656.1_cds_YP_009268817.1_102 target sequence
LKQLKEDAIQWSVSTGTLITQMINTVLIATYEMLKQAIELNASISCKLAKETPVPFNLLIENKNKFINFINDIKKLESFKVNKKE

SEQ ID NO: 36105 - protein, 85 aa, unidentified
  REGION 1..85: note = Description of Unknown:vpeps_4NRW_1 target sequence
PEGPEVALTADILEKYFKGKTLEYIDFISGRYSKSEPEGYDDFIANLPLKVSNVDTKGKFLWFELFDPNDKSNKWYIWNTFGLTD

SEQ ID NO: 36106 - protein, 85 aa, unidentified
  REGION 1..85: note = Description of Unknown:vpeps_4NRW_1 target sequence
ISGRYSKSEPEGYDDFIANLPLKVSNVDTKGKFLWFELFDPNDKSNKWYIWNTFGLTDMWSLFEAKYTRAVLSFDNELMAYFSDM

SEQ ID NO: 36107 - protein, 85 aa, unidentified
  REGION 1..85: note = Description of Unknown:cds_NZ_WFIY01000004.1_cds_WP_155862804.1_630 target sequence
SSNPFRLQQPQRQPRDLRKVQPQIQGADLKIQMRMKNVKYKIAVLSGKGGVGKSFVSSNLSMALAAAGKKVGIVDVDFHGPSVPK

SEQ ID NO: 36108 - protein, 85 aa, unidentified
  REGION 1..85: note = Description of Unknown:cds_NZ_WFIY01000004.1_cds_WP_155862804.1_630 target sequence
MLGVRGQVLTADDEGIIPVNGPFGIKVVSIDFLLPKDDTPVVWRGAIKHTAIKQFLGDVKWGELDYLIIDLPPGTGDEALSVAQL

SEQ ID NO: 36109 - protein, 85 aa, unidentified
  REGION 1..85: note = Description of Unknown:cds_NZ_WFIY01000004.1_cds_WP_155862804.1_630 target sequence
VPNLTGFIIVTIPSEVSTLAVSKSVNFAKTINAKILGVIENMSYFICPADNKPYYIFGEGKGKKMAEDMGVELLGQVPLDPKIAE

SEQ ID NO: 36110 - protein, 84 aa, unidentified
  REGION 1..84: note = Description of Unknown:cds_NZ_WFIY01000004.1_cds_WP_155862804.1_630 target sequence
IENMSYFICPADNKPYYIFGEGKGKKMAEDMGVELLGQVPLDPKIAEANDLGEPFFLKYPDSPASKEFLSIADKVMKIVESNTK

SEQ ID NO: 36111 - protein, 85 aa, unidentified
  REGION 1..85: note = Description of Unknown:cds_NZ_WFIY01000004.1_cds_WP_155862804.1_630 target sequence
DLKIQMRMKNVKYKIAVLSGKGGVGKSFVSSNLSMALAAAGKKVGIVDVDFHGPSVPKMLGVRGQVLTADDEGIIPVNGPFGIKV

SEQ ID NO: 36112 - protein, 85 aa, unidentified
  REGION 1..85: note = Description of Unknown:cds_NZ_WFIY01000004.1_cds_WP_155862804.1_630 target sequence
VSIDFLLPKDDTPVVWRGAIKHTAIKQFLGDVKWGELDYLIIDLPPGTGDEALSVAQLVPNLTGFIIVTIPSEVSTLAVSKSVNF

SEQ ID NO: 36113 - protein, 85 aa, unidentified
  REGION 1..85: note = Description of Unknown:cds_NZ_WFIY01000004.1_cds_WP_155862804.1_630 target sequence
AKTINAKILGVIENMSYFICPADNKPYYIFGEGKGKKMAEDMGVELLGQVPLDPKIAEANDLGEPFFLKYPDSPASKEFLSIADK

SEQ ID NO: 36114 - protein, 85 aa, unidentified
  REGION 1..85: note = Description of Unknown:cds_NZ_WFIY01000004.1_cds_WP_155863800.1_1683 target sequence
QLADIISAITKVGGNPHAIAKITGISIINVIKSINILKYKYHLALFTGLLAENLQLQKILLLCKNSKIKLSTSKKLFFPLVNLFR

SEQ ID NO: 36115 - protein, 85 aa, unidentified
  REGION 1..85: note = Description of Unknown:cds_NZ_WFIY01000004.1_cds_WP_155863800.1_1683 target sequence
ADLEENKFMLVIYANKDTLNSIQTAVKKLRDENIVECEIFEISETKRYYRDIYCFNFDQNMWTCDRLLQFNKRGKIVKPDEEDIN

SEQ ID NO: 36116 - protein, 85 aa, unidentified
  REGION 1..85: note = Description of Unknown:cds_NZ_WFIY01000004.1_cds_WP_155863800.1_1683 target sequence
LIVKLQANPYIPYYLSPHYSHIKHVLQGFLYTLGTNDTILDVIADKEIIFHPNTLWSAKIGNKYLMEIHINSKELGKIVQKIKDH

SEQ ID NO: 36117 - protein, 84 aa, unidentified
  REGION 1..84: note = Description of Unknown:cds_NZ_WFIY01000004.1_cds_WP_155863800.1_1683 target sequence
ILDVIADKEIIFHPNTLWSAKIGNKYLMEIHINSKELGKIVQKIKDHSNEIFIVPKTPSYAEGYSIPYEIFKEKKWEFPKIVLE

SEQ ID NO: 36118 - protein, 85 aa, unidentified
  REGION 1..85: note = Description of Unknown:cds_NZ_WFIY01000004.1_cds_WP_155863800.1_1683 target sequence
INVIKSINILKYKYHLALFTGLLAENLQLQKILLLCKNSKIKLSTSKKLFFPLVNLFRADLEENKFMLVIYANKDTLNSIQTAVK

SEQ ID NO: 36119 - protein, 85 aa, unidentified
  REGION 1..85: note = Description of Unknown:cds_NZ_WFIY01000004.1_cds_WP_155863800.1_1683 target sequence
KLRDENIVECEIFEISETKRYYRDIYCFNFDQNMWTCDRLLQFNKRGKIVKPDEEDINLIVKLQANPYIPYYLSPHYSHIKHVLQ

SEQ ID NO: 36120 - protein, 85 aa, unidentified
  REGION 1..85: note = Description of Unknown:cds_NZ_WFIY01000004.1_cds_WP_155863800.1_1683 target sequence
GFLYTLGTNDTILDVIADKEIIFHPNTLWSAKIGNKYLMEIHINSKELGKIVQKIKDHSNEIFIVPKTPSYAEGYSIPYEIFKEK

SEQ ID NO: 36121 - protein, 85 aa, unidentified
  REGION 1..85: note = Description of Unknown:cds_NC_029316.1_cds_YP_009230275.1_22 target sequence
KVELVSYTKDGERVVAIASKMSRSRKGWDYHEKTMTDEEVEVWIRDAIIHGYWSPLEHSSYTFSIEGISRVASHQLVRHRIASYT

SEQ ID NO: 36122 - protein, 85 aa, unidentified
  REGION 1..85: note = Description of Unknown:cds_NC_029316.1_cds_YP_009230275.1_22 target sequence
QMSHRFAKPVDEYYQPVTPPSAEKRNEELVKKAYDDAYKYYYELLQNGVPEEDARYVLPNGVNTNIVVTMNARELYNFFALRLCS

SEQ ID NO: 36123 - protein, 85 aa, unidentified
  REGION 1..85: note = Description of Unknown:cds_NC_029316.1_cds_YP_009230275.1_22 target sequence
RAQWEIRQVAWKMLEEVKKVHPRLFKYAGANCIILNNLTSDRLMTVENVLNGIWRFEISRCPEGVYRDGIPKCILSSMGLADLYQ

SEQ ID NO: 36124 - protein, 84 aa, unidentified
  REGION 1..84: note = Description of Unknown:cds_NC_029316.1_cds_YP_009230275.1_22 target sequence
TSDRLMTVENVLNGIWRFEISRCPEGVYRDGIPKCILSSMGLADLYQCIHDCKVHFGDPGDDDSGCIAWCKKKYADGFIGQGGA

SEQ ID NO: 36125 - protein, 85 aa, unidentified
  REGION 1..85: note = Description of Unknown:cds_NC_029316.1_cds_YP_009230275.1_22 target sequence
WDYHEKTMTDEEVEVWIRDAIIHGYWSPLEHSSYTFSIEGISRVASHQLVRHRIASYTQMSHRFAKPVDEYYQPVTPPSAEKRNE

SEQ ID NO: 36126 - protein, 85 aa, unidentified
  REGION 1..85: note = Description of Unknown:cds_NC_029316.1_cds_YP_009230275.1_22 target sequence
ELVKKAYDDAYKYYYELLQNGVPEEDARYVLPNGVNTNIVVTMNARELYNFFALRLCSRAQWEIRQVAWKMLEEVKKVHPRLFKY

SEQ ID NO: 36127 - protein, 85 aa, unidentified
  REGION 1..85: note = Description of Unknown:cds_NC_029316.1_cds_YP_009230275.1_22 target sequence
AGANCIILNNLTSDRLMTVENVLNGIWRFEISRCPEGVYRDGIPKCILSSMGLADLYQCIHDCKVHFGDPGDDDSGCIAWCKKKY

SEQ ID NO: 36128 - protein, 85 aa, unidentified
  REGION 1..85: note = Description of Unknown:hvTR_P89083.1 target sequence
QTEIQSSSLRHHPYRRARLPRSDEETRASLTEQHPLLPDCDHADYHNVSSVRGLPCAAGFTLLQEFPVPWDMILTPEEIKILKRC

SEQ ID NO: 36129 - protein, 85 aa, unidentified
  REGION 1..85: note = Description of Unknown:hvTR_P89083.1 target sequence
MSVCLCPATLDLVRAQMVSGYERWILHCHCSSPGSLQCRAGGTLLAVWFRRVIYGCMFNQRFPWYRQIVNRNMPKEIMYMGSVFM

SEQ ID NO: 36130 - protein, 85 aa, unidentified
  REGION 1..85: note = Description of Unknown:hvTR_P89083.1 target sequence
RGRHLIYCRIWYDGHVGSIIPNMSFGWSALNYGLLNNMVIMCCTYCENMAEIRMRCCARRTRRLMLKAVGIIVRETCDPDPICSS

SEQ ID NO: 36131 - protein, 84 aa, unidentified
  REGION 1..84: note = Description of Unknown:hvTR_P89083.1 target sequence
MVIMCCTYCENMAEIRMRCCARRTRRLMLKAVGIIVRETCDPDPICSSRTEPRRQRLLRALMERHRPILFSEYESVRSSHSTRL

SEQ ID NO: 36132 - protein, 85 aa, unidentified
  REGION 1..85: note = Description of Unknown:hvTR_P89083.1 target sequence
ASLTEQHPLLPDCDHADYHNVSSVRGLPCAAGFTLLQEFPVPWDMILTPEEIKILKRCMSVCLCPATLDLVRAQMVSGYERWILH

SEQ ID NO: 36133 - protein, 85 aa, unidentified
  REGION 1..85: note = Description of Unknown:hvTR_P89083.1 target sequence
CHCSSPGSLQCRAGGTLLAVWFRRVIYGCMFNQRFPWYRQIVNRNMPKEIMYMGSVFMRGRHLIYCRIWYDGHVGSIIPNMSFGW

SEQ ID NO: 36134 - protein, 85 aa, unidentified
  REGION 1..85: note = Description of Unknown:hvTR_P89083.1 target sequence
SALNYGLLNNMVIMCCTYCENMAEIRMRCCARRTRRLMLKAVGIIVRETCDPDPICSSRTEPRRQRLLRALMERHRPILFSEYES

SEQ ID NO: 36135 - protein, 85 aa, unidentified
  REGION 1..85: note = Description of Unknown:hvTR_Q3I8P5 target sequence
FEPVPDLNLEASVELGEVNIDQTTPMIKENSGFISRSRRLFAHRSKDDERKLALRFFLQRLYFLDHREIHYLFRCVDAVKDVTIT

SEQ ID NO: 36136 - protein, 85 aa, unidentified
  REGION 1..85: note = Description of Unknown:hvTR_Q3I8P5 target sequence
KKNNIIVAPYIALLTIASKGCKLTETMIEAFFPELYNEHSKKFKFNSQVSIIQEKLGYQSGNYHVYDFEPYYSTVALAIRDEHSS

SEQ ID NO: 36137 - protein, 85 aa, unidentified
  REGION 1..85: note = Description of Unknown:hvTR_Q3I8P5 target sequence
GIFNIRQESYLVSSLSEITYRFYLINLKSDLVQWSASTGAVINQMVNTVLITVYDKLQLAIENDSQFTCSLAVESELPIKLLKDR

SEQ ID NO: 36138 - protein, 84 aa, unidentified
  REGION 1..84: note = Description of Unknown:hvTR_Q3I8P5 target sequence
TGAVINQMVNTVLITVYDKLQLAIENDSQFTCSLAVESELPIKLLKDRNELFTKFINELKKTSSFKISKRDKDTLLKHFTYDWS

SEQ ID NO: 36139 - protein, 85 aa, unidentified
  REGION 1..85: note = Description of Unknown:hvTR_Q3I8P5 target sequence
KENSGFISRSRRLFAHRSKDDERKLALRFFLQRLYFLDHREIHYLFRCVDAVKDVTITKKNNIIVAPYIALLTIASKGCKLTETM

SEQ ID NO: 36140 - protein, 85 aa, unidentified
  REGION 1..85: note = Description of Unknown:hvTR_Q3I8P5 target sequence
IEAFFPELYNEHSKKFKFNSQVSIIQEKLGYQSGNYHVYDFEPYYSTVALAIRDEHSSGIFNIRQESYLVSSLSEITYRFYLINL

SEQ ID NO: 36141 - protein, 85 aa, unidentified
  REGION 1..85: note = Description of Unknown:hvTR_Q3I8P5 target sequence
KSDLVQWSASTGAVINQMVNTVLITVYDKLQLAIENDSQFTCSLAVESELPIKLLKDRNELFTKFINELKKTSSFKISKRDKDTL

SEQ ID NO: 36142 - protein, 85 aa, unidentified
  REGION 1..85: note = Description of Unknown:vpeps_4ATS_1 target sequence
GSSHHHHHHSSGLVPRGSHMGEKITEEREFQSISEIPEEEIDATNDEEKLADIVENEIEKEIRKSKTRKCKTIENFYYYILRDGK

SEQ ID NO: 36143 - protein, 85 aa, unidentified
  REGION 1..85: note = Description of Unknown:vpeps_4ATS_1 target sequence
IYPASDYDIEVEKGKRSANDIYAFVETDVTRDFDEFLFDIDYGLPSISDILKFYLEKAGFRIANEVPTPNLKYYIHAVVEFGEDR

SEQ ID NO: 36144 - protein, 85 aa, unidentified
  REGION 1..85: note = Description of Unknown:vpeps_4ATS_1 target sequence
PQYLAVNIYDIDSLARALRIPQIVEQKLGNKPRTITADEFNDIERIVAEEQPILAGYTYDEALRIPYHYYVDHNNSFKDDALKIA

SEQ ID NO: 36145 - protein, 85 aa, unidentified
  REGION 1..85: note = Description of Unknown:vpeps_4ATS_1 target sequence
DEFNDIERIVAEEQPILAGYTYDEALRIPYHYYVDHNNSFKDDALKIAHAYLQLFPTPYQVCYEWKARWFNKIDCLKLERLKPSS

SEQ ID NO: 36146 - protein, 85 aa, unidentified
  REGION 1..85: note = Description of Unknown:vpeps_4ATS_1 target sequence
REFQSISEIPEEEIDATNDEEKLADIVENEIEKEIRKSKTRKCKTIENFYYYILRDGKIYPASDYDIEVEKGKRSANDIYAFVET

SEQ ID NO: 36147 - protein, 85 aa, unidentified
  REGION 1..85: note = Description of Unknown:vpeps_4ATS_1 target sequence
DVTRDFDEFLFDIDYGLPSISDILKFYLEKAGFRIANEVPTPNLKYYIHAVVEFGEDRPQYLAVNIYDIDSLARALRIPQIVEQK

SEQ ID NO: 36148 - protein, 85 aa, unidentified
  REGION 1..85: note = Description of Unknown:vpeps_4ATS_1 target sequence
LGNKPRTITADEFNDIERIVAEEQPILAGYTYDEALRIPYHYYVDHNNSFKDDALKIAHAYLQLFPTPYQVCYEWKARWFNKIDC

SEQ ID NO: 36149 - protein, 85 aa, unidentified
  REGION 1..85: note = Description of Unknown:cds_NZ_WFIY01000004.1_cds_WP_155862455.1_207 target sequence
KCPVCSSEDIRYDPERGQYICANCGAVLEDEVIDQGPEWRAYNYQDRLERERIGSPLTLKVHDQGLSTRIGYDKVKDRIKLMKMQ

SEQ ID NO: 36150 - protein, 85 aa, unidentified
  REGION 1..85: note = Description of Unknown:cds_NZ_WFIY01000004.1_cds_WP_155862455.1_207 target sequence
KLQNRIRVSSKDKKLVTYLSMLNSEASKLDLPEHVKETAAFILRKLVENGLAKRIDSYALIAAVLYYSCQVNNIPKYLQEIKTRY

SEQ ID NO: 36151 - protein, 85 aa, unidentified
  REGION 1..85: note = Description of Unknown:cds_NZ_WFIY01000004.1_cds_WP_155862455.1_207 target sequence
SLSSSELWKALERVHKVSKQLQNFKPKIKPVEYIPKIVEKLGLPQLVATKSAEMVNIMYRNGLTSGKGYLALSAAAVYLISTLMD

SEQ ID NO: 36152 - protein, 84 aa, unidentified
  REGION 1..84: note = Description of Unknown:cds_NZ_WFIY01000004.1_cds_WP_155862455.1_207 target sequence
VEKLGLPQLVATKSAEMVNIMYRNGLTSGKGYLALSAAAVYLISTLMDVKKTQKEIADSLNITEVTIRNRYKEIIKNFDIEVSL

SEQ ID NO: 36153 - protein, 85 aa, unidentified
  REGION 1..85: note = Description of Unknown:cds_NZ_WFIY01000004.1_cds_WP_155862455.1_207 target sequence
LEDEVIDQGPEWRAYNYQDRLERERIGSPLTLKVHDQGLSTRIGYDKVKDRIKLMKMQKLQNRIRVSSKDKKLVTYLSMLNSEAS

SEQ ID NO: 36154 - protein, 85 aa, unidentified
  REGION 1..85: note = Description of Unknown:cds_NZ_WFIY01000004.1_cds_WP_155862455.1_207 target sequence
KLDLPEHVKETAAFILRKLVENGLAKRIDSYALIAAVLYYSCQVNNIPKYLQEIKTRYSLSSSELWKALERVHKVSKQLQNFKPK

SEQ ID NO: 36155 - protein, 85 aa, unidentified
  REGION 1..85: note = Description of Unknown:cds_NZ_WFIY01000004.1_cds_WP_155862455.1_207 target sequence
IKPVEYIPKIVEKLGLPQLVATKSAEMVNIMYRNGLTSGKGYLALSAAAVYLISTLMDVKKTQKEIADSLNITEVTIRNRYKEII

SEQ ID NO: 36156 - protein, 85 aa, unidentified
  REGION 1..85: note = Description of Unknown:cds_NZ_WFIY01000004.1_cds_WP_155862583.1_356 target sequence
IIVGGPASNGIDEKLSEMLNVKLIKAEHKIFPDGESYIRIPESVRGEEVAIVQSTYYPQDKHLIELLLMIEAVKNLGASKIISII

SEQ ID NO: 36157 - protein, 85 aa, unidentified
  REGION 1..85: note = Description of Unknown:cds_NZ_WFIY01000004.1_cds_WP_155862583.1_356 target sequence
PYLAYARQDRRFKDGEALSLKIVLNLIYESGSDELITVEPHKPDAVISYFKGNVKIVDPTPALAREIKKEVENPFILAPDRGALE

SEQ ID NO: 36158 - protein, 85 aa, unidentified
  REGION 1..85: note = Description of Unknown:cds_NZ_WFIY01000004.1_cds_WP_155862583.1_356 target sequence
RAERLAKELNSPYSHIEKERDRTTGEVRIKEAPHLDLHGKDVVLIDDIISTGGTLAQASQLSYNLGARKVIAAATHVLLVNDAYD

SEQ ID NO: 36159 - protein, 84 aa, unidentified
  REGION 1..84: note = Description of Unknown:cds_NZ_WFIY01000004.1_cds_WP_155862583.1_356 target sequence
HGKDVVLIDDIISTGGTLAQASQLSYNLGARKVIAAATHVLLVNDAYDKLTRAGIKSIIGTNTIKVENKNVKIADISDLIAVKL

SEQ ID NO: 36160 - protein, 85 aa, unidentified
  REGION 1..85: note = Description of Unknown:cds_NZ_WFIY01000004.1_cds_WP_155862583.1_356 target sequence
HKIFPDGESYIRIPESVRGEEVAIVQSTYYPQDKHLIELLLMIEAVKNLGASKIISIIPYLAYARQDRRFKDGEALSLKIVLNLI

SEQ ID NO: 36161 - protein, 85 aa, unidentified
  REGION 1..85: note = Description of Unknown:cds_NZ_WFIY01000004.1_cds_WP_155862583.1_356 target sequence
YESGSDELITVEPHKPDAVISYFKGNVKIVDPTPALAREIKKEVENPFILAPDRGALERAERLAKELNSPYSHIEKERDRTTGEV

SEQ ID NO: 36162 - protein, 85 aa, unidentified
  REGION 1..85: note = Description of Unknown:cds_NZ_WFIY01000004.1_cds_WP_155862583.1_356 target sequence
RIKEAPHLDLHGKDVVLIDDIISTGGTLAQASQLSYNLGARKVIAAATHVLLVNDAYDKLTRAGIKSIIGTNTIKVENKNVKIAD

SEQ ID NO: 36163 - protein, 85 aa, unidentified
  REGION 1..85: note = Description of Unknown:cds_NZ_WFIY01000004.1_cds_WP_155862845.1_678 target sequence
SLALNLSLFLKKRGIDEIYINKVKRRGNSYLQDIAVNILLKGLKLRETEKLGKLKAEENNIKIFSGKGYEKVNYEISKDAKEDIQ

SEQ ID NO: 36164 - protein, 85 aa, unidentified
  REGION 1..85: note = Description of Unknown:cds_NZ_WFIY01000004.1_cds_WP_155862845.1_678 target sequence
IDFPKFPIFIIDLSLWNRHSEEEKNKLLTQLACAVTSIRKYLWDYNLSINNFPQGFSLPFLNKVRFNVMPEGKTIILNPYGEIDA

SEQ ID NO: 36165 - protein, 85 aa, unidentified
  REGION 1..85: note = Description of Unknown:cds_NZ_WFIY01000004.1_cds_WP_155862845.1_678 target sequence
TEELIRNTQTFIIGGIVDRSGWKYATYEMAKIAKYDFPHVKITLRGSTVGVPDRINKIIEIILRVYYGEKLENAILDLQSNADKF

SEQ ID NO: 36166 - protein, 84 aa, unidentified
  REGION 1..84: note = Description of Unknown:cds_NZ_WFIY01000004.1_cds_WP_155862845.1_678 target sequence
PHVKITLRGSTVGVPDRINKIIEIILRVYYGEKLENAILDLQSNADKFNRLLVEKQKGNLKEAIKWLKPSEKILRRLGIQSNSA

SEQ ID NO: 36167 - protein, 85 aa, unidentified
  REGION 1..85: note = Description of Unknown:cds_NZ_WFIY01000004.1_cds_WP_155862845.1_678 target sequence
NSYLQDIAVNILLKGLKLRETEKLGKLKAEENNIKIFSGKGYEKVNYEISKDAKEDIQIDFPKFPIFIIDLSLWNRHSEEEKNKL

SEQ ID NO: 36168 - protein, 85 aa, unidentified
  REGION 1..85: note = Description of Unknown:cds_NZ_WFIY01000004.1_cds_WP_155862845.1_678 target sequence
LTQLACAVTSIRKYLWDYNLSINNFPQGFSLPFLNKVRFNVMPEGKTIILNPYGEIDATEELIRNTQTFIIGGIVDRSGWKYATY

SEQ ID NO: 36169 - protein, 85 aa, unidentified
  REGION 1..85: note = Description of Unknown:cds_NZ_WFIY01000004.1_cds_WP_155862845.1_678 target sequence
EMAKIAKYDFPHVKITLRGSTVGVPDRINKIIEIILRVYYGEKLENAILDLQSNADKFNRLLVEKQKGNLKEAIKWLKPSEKILR

SEQ ID NO: 36170 - protein, 85 aa, unidentified
  REGION 1..85: note = Description of Unknown:cds_NZ_WFIY01000004.1_cds_WP_155863077.1_989 target sequence
LIRIAARNSQLSQVQVKVVSDYLNKLGYKTEFIGVKTKADLFANEPLYKLGKGVFEKEVNEYVIRGLADLAVHSMKDLTSNLSEE

SEQ ID NO: 36171 - protein, 85 aa, unidentified
  REGION 1..85: note = Description of Unknown:cds_NZ_WFIY01000004.1_cds_WP_155863077.1_989 target sequence
LDILATVKRDSPYDVLVSKKDVFDLDSGSVVGTSSIRRKNFMTFLRPDILVKDLRGNIDTRIKKYTSGEYEGIIIAEASILRLNL

SEQ ID NO: 36172 - protein, 85 aa, unidentified
  REGION 1..85: note = Description of Unknown:cds_NZ_WFIY01000004.1_cds_WP_155863077.1_989 target sequence
NINYFKLNPIDFTPEANQGIIAVVGKKNDERIRKLLSELHDQQTFNEAIAERSTIEIVGGGCHSPFGVYFEQIDDRLLGIASFSN

SEQ ID NO: 36173 - protein, 84 aa, unidentified
  REGION 1..84: note = Description of Unknown:cds_NZ_WFIY01000004.1_cds_WP_155863077.1_989 target sequence
LHDQQTFNEAIAERSTIEIVGGGCHSPFGVYFEQIDDRLLGIASFSNGKKKITVTIERKGKPRDVGHELGKLLLREMKNEDLIP

SEQ ID NO: 36174 - protein, 85 aa, unidentified
  REGION 1..85: note = Description of Unknown:cds_NZ_WFIY01000004.1_cds_WP_155863077.1_989 target sequence
YKTEFIGVKTKADLFANEPLYKLGKGVFEKEVNEYVIRGLADLAVHSMKDLTSNLSEELDILATVKRDSPYDVLVSKKDVFDLDS

SEQ ID NO: 36175 - protein, 85 aa, unidentified
  REGION 1..85: note = Description of Unknown:cds_NZ_WFIY01000004.1_cds_WP_155863077.1_989 target sequence
GSVVGTSSIRRKNFMTFLRPDILVKDLRGNIDTRIKKYTSGEYEGIIIAEASILRLNLNINYFKLNPIDFTPEANQGIIAVVGKK

SEQ ID NO: 36176 - protein, 85 aa, unidentified
  REGION 1..85: note = Description of Unknown:cds_NZ_WFIY01000004.1_cds_WP_155863077.1_989 target sequence
NDERIRKLLSELHDQQTFNEAIAERSTIEIVGGGCHSPFGVYFEQIDDRLLGIASFSNGKKKITVTIERKGKPRDVGHELGKLLL

SEQ ID NO: 36177 - protein, 85 aa, unidentified
  REGION 1..85: note = Description of Unknown:cds_NZ_WFIY01000004.1_cds_WP_155864434.1_1533 target sequence
VYQHLDFISAIYAGVNVVTTVGLYAPNISQMTDTEKIVLIITIIFAVGLYTSIIQSIVSTVINRSTWQDAKARWRGSHMKGHTVI

SEQ ID NO: 36178 - protein, 85 aa, unidentified
  REGION 1..85: note = Description of Unknown:cds_NZ_WFIY01000004.1_cds_WP_155864434.1_1533 target sequence
VGEGEIVASAVRRLERLGVDYIVLTPSKDIASKIRNDRVIIGDPKDDKNLLTAGILEAKNAIVSMQNDMDTLLITLKIQKINPPL

SEQ ID NO: 36179 - protein, 85 aa, unidentified
  REGION 1..85: note = Description of Unknown:cds_NZ_WFIY01000004.1_cds_WP_155864434.1_1533 target sequence
QVISVVKDSNMVDVFKTAGADIVIPNDDIVGRITAAAAISNNVAGVIFHDRSENLIIGLFEIKKEIKIKDLPSGILPLAIIEEDG

SEQ ID NO: 36180 - protein, 84 aa, unidentified
  REGION 1..84: note = Description of Unknown:cds_NZ_WFIY01000004.1_cds_WP_155864434.1_1533 target sequence
AISNNVAGVIFHDRSENLIIGLFEIKKEIKIKDLPSGILPLAIIEEDGKLNPYFEKDTLLKKGEKLVVLGDPNLFKKVKEVLGE

SEQ ID NO: 36181 - protein, 85 aa, unidentified
  REGION 1..85: note = Description of Unknown:cds_NZ_WFIY01000004.1_cds_WP_155864434.1_1533 target sequence
ISQMTDTEKIVLIITIIFAVGLYTSIIQSIVSTVINRSTWQDAKARWRGSHMKGHTVIVGEGEIVASAVRRLERLGVDYIVLTPS

SEQ ID NO: 36182 - protein, 85 aa, unidentified
  REGION 1..85: note = Description of Unknown:cds_NZ_WFIY01000004.1_cds_WP_155864434.1_1533 target sequence
KDIASKIRNDRVIIGDPKDDKNLLTAGILEAKNAIVSMQNDMDTLLITLKIQKINPPLQVISVVKDSNMVDVFKTAGADIVIPND

SEQ ID NO: 36183 - protein, 85 aa, unidentified
  REGION 1..85: note = Description of Unknown:cds_NZ_WFIY01000004.1_cds_WP_155864434.1_1533 target sequence
DIVGRITAAAAISNNVAGVIFHDRSENLIIGLFEIKKEIKIKDLPSGILPLAIIEEDGKLNPYFEKDTLLKKGEKLVVLGDPNLF

SEQ ID NO: 36184 - protein, 85 aa, unidentified
  REGION 1..85: note = Description of Unknown:hvTR_P36710 target sequence
QRDRRYRYRLAPYNKYQLPPCEEQSKATLSTSENSLWPECNSLTLHNVSEVRGIPSCVGFTVLQEWPIPWDMILTDYEMFILKKY

SEQ ID NO: 36185 - protein, 85 aa, unidentified
  REGION 1..85: note = Description of Unknown:hvTR_P36710 target sequence
MSVCMCCATINVEVTQLLHGHERWLIHCHCQRPGSLQCMSAGMLLGRWFKMAVYGALINKRCFWYREVVNHLMPKEVMYVGSTFV

SEQ ID NO: 36186 - protein, 85 aa, unidentified
  REGION 1..85: note = Description of Unknown:hvTR_P36710 target sequence
RGRHLIYFKIMYDGHAWLALEKVSFGWSAFNYGILNNMLVLCCDYCKDLSEIRMRCCARRTRLLMLKVVQVIAENTVRPLKHSRH

SEQ ID NO: 36187 - protein, 84 aa, unidentified
  REGION 1..84: note = Description of Unknown:hvTR_P36710 target sequence
NMLVLCCDYCKDLSEIRMRCCARRTRLLMLKVVQVIAENTVRPLKHSRHERYRQQLLKGLIMHHRAILFGDYNQRENPWAADGH

SEQ ID NO: 36188 - protein, 85 aa, unidentified
  REGION 1..85: note = Description of Unknown:hvTR_P36710 target sequence
TLSTSENSLWPECNSLTLHNVSEVRGIPSCVGFTVLQEWPIPWDMILTDYEMFILKKYMSVCMCCATINVEVTQLLHGHERWLIH

SEQ ID NO: 36189 - protein, 85 aa, unidentified
  REGION 1..85: note = Description of Unknown:hvTR_P36710 target sequence
CHCQRPGSLQCMSAGMLLGRWFKMAVYGALINKRCFWYREVVNHLMPKEVMYVGSTFVRGRHLIYFKIMYDGHAWLALEKVSFGW

SEQ ID NO: 36190 - protein, 85 aa, unidentified
  REGION 1..85: note = Description of Unknown:hvTR_P36710 target sequence
SAFNYGILNNMLVLCCDYCKDLSEIRMRCCARRTRLLMLKVVQVIAENTVRPLKHSRHERYRQQLLKGLIMHHRAILFGDYNQRE

SEQ ID NO: 36191 - protein, 85 aa, unidentified
  REGION 1..85: note = Description of Unknown:hvTR_Q6TUS0 target sequence
FDPVPDLNLEAFVEIGDVTVDKIKARSEELSSSFVPKNKRLFIHKTKNEERKLSLRFFISRVYFLSYKEVNYLFRCLDSISDVSI

SEQ ID NO: 36192 - protein, 85 aa, unidentified
  REGION 1..85: note = Description of Unknown:hvTR_Q6TUS0 target sequence
TKKNNVIVAPYMVLLTMSSKGYKFTDSMIELFFPEIYNEHSKKFRFNSQICIIQEKLGYQTCCYHSYEFESYYSTVALAIRNNLD

SEQ ID NO: 36193 - protein, 85 aa, unidentified
  REGION 1..85: note = Description of Unknown:hvTR_Q6TUS0 target sequence
KDIFNTREESEFVSSLSEITYRFYLINLKFNYIQWSSSTGSVINQMVNSVILAVFEFLEKCTVENKVFTCTLAIETKVPVKLLID

SEQ ID NO: 36194 - protein, 84 aa, unidentified
  REGION 1..84: note = Description of Unknown:hvTR_Q6TUS0 target sequence
SSTGSVINQMVNSVILAVFEFLEKCTVENKVFTCTLAIETKVPVKLLIDRITLIKKFVLALKCTDSFKVSKRDKREIYKYFIIT

SEQ ID NO: 36195 - protein, 85 aa, unidentified
  REGION 1..85: note = Description of Unknown:hvTR_Q6TUS0 target sequence
EELSSSFVPKNKRLFIHKTKNEERKLSLRFFISRVYFLSYKEVNYLFRCLDSISDVSITKKNNVIVAPYMVLLTMSSKGYKFTDS

SEQ ID NO: 36196 - protein, 85 aa, unidentified
  REGION 1..85: note = Description of Unknown:hvTR_Q6TUS0 target sequence
MIELFFPEIYNEHSKKFRFNSQICIIQEKLGYQTCCYHSYEFESYYSTVALAIRNNLDKDIFNTREESEFVSSLSEITYRFYLIN

SEQ ID NO: 36197 - protein, 85 aa, unidentified
  REGION 1..85: note = Description of Unknown:hvTR_Q6TUS0 target sequence
LKFNYIQWSSSTGSVINQMVNSVILAVFEFLEKCTVENKVFTCTLAIETKVPVKLLIDRITLIKKFVLALKCTDSFKVSKRDKRE

SEQ ID NO: 36198 - protein, 85 aa, unidentified
  REGION 1..85: note = Description of Unknown:cds_NZ_WFIY01000004.1_cds_WP_155864435.1_1559 target sequence
SSEVICPKDKIVFDASRGEYICTETGEVLEDKVVDEGPEWRAYTEEENRERSRAGTINIAVHDMGLSTYMDTRAKDRIKAMRLRK

SEQ ID NO: 36199 - protein, 85 aa, unidentified
  REGION 1..85: note = Description of Unknown:cds_NZ_WFIY01000004.1_cds_WP_155864435.1_1559 target sequence
LQIRSRVGTSEQRNLVKAMTILERIIDNLGLPKSVKEEAAIIYRKALEKKLIKGRSIEEVVAASVYAACRKMNIPTTLEEISKAT

SEQ ID NO: 36200 - protein, 85 aa, unidentified
  REGION 1..85: note = Description of Unknown:cds_NZ_WFIY01000004.1_cds_WP_155864435.1_1559 target sequence
SANKKEIGKAYRLLLREDVTEVPASDPKYYVMKIASLLGLSGKVMTAAMEIVERAKKAGITSGKDPASIAAAAVYIAANINGERR

SEQ ID NO: 36201 - protein, 84 aa, unidentified
  REGION 1..84: note = Description of Unknown:cds_NZ_WFIY01000004.1_cds_WP_155864435.1_1559 target sequence
LLGLSGKVMTAAMEIVERAKKAGITSGKDPASIAAAAVYIAANINGERRSQREISEVSGVTQVTIRNRYREIARELGIDIEGIN

SEQ ID NO: 36202 - protein, 85 aa, unidentified
  REGION 1..85: note = Description of Unknown:cds_NZ_WFIY01000004.1_cds_WP_155864435.1_1559 target sequence
VLEDKVVDEGPEWRAYTEEENRERSRAGTINIAVHDMGLSTYMDTRAKDRIKAMRLRKLQIRSRVGTSEQRNLVKAMTILERIID

SEQ ID NO: 36203 - protein, 85 aa, unidentified
  REGION 1..85: note = Description of Unknown:cds_NZ_WFIY01000004.1_cds_WP_155864435.1_1559 target sequence
NLGLPKSVKEEAAIIYRKALEKKLIKGRSIEEVVAASVYAACRKMNIPTTLEEISKATSANKKEIGKAYRLLLREDVTEVPASDP

SEQ ID NO: 36204 - protein, 85 aa, unidentified
  REGION 1..85: note = Description of Unknown:cds_NZ_WFIY01000004.1_cds_WP_155864435.1_1559 target sequence
KYYVMKIASLLGLSGKVMTAAMEIVERAKKAGITSGKDPASIAAAAVYIAANINGERRSQREISEVSGVTQVTIRNRYREIAREL

SEQ ID NO: 36205 - protein, 85 aa, unidentified
  REGION 1..85: note = Description of Unknown:cds_NZ_WFIY01000004.1_cds_WP_155863938.1_1855 target sequence
KVAYYPGCATHGLSKDVDVATKKVAEVLGLELVEVEDWNCCGGGFLDEYNEKAHVALNLRNLSTVERMGMDKMVTPCSVCLQSHR

SEQ ID NO: 36206 - protein, 85 aa, unidentified
  REGION 1..85: note = Description of Unknown:cds_NZ_WFIY01000004.1_cds_WP_155863938.1_1855 target sequence
LAAYKYNENKDLRKEVDKKLKEANINYSGKATAEHIVWVLVRDVGLEKIKKAVKKPLTGLRVGAYYGCQMLRPEQIMGFEPSFNP

SEQ ID NO: 36207 - protein, 85 aa, unidentified
  REGION 1..85: note = Description of Unknown:cds_NZ_WFIY01000004.1_cds_WP_155863938.1_1855 target sequence
HSMEDLIAATGATPVKFPMATACCGFPLMGSNPKVGLKLAYNVLNSAKSQNADILVHPCSLCHLQLDVTQLKVKNEFNLSWTLPA

SEQ ID NO: 36208 - protein, 84 aa, unidentified
  REGION 1..84: note = Description of Unknown:cds_NZ_WFIY01000004.1_cds_WP_155863938.1_1855 target sequence
LKLAYNVLNSAKSQNADILVHPCSLCHLQLDVTQLKVKNEFNLSWTLPAIYITQLLGLAFGFSAEELGISKLAQEVLRKKGIIQ

SEQ ID NO: 36209 - protein, 85 aa, unidentified
  REGION 1..85: note = Description of Unknown:cds_NZ_WFIY01000004.1_cds_WP_155863938.1_1855 target sequence
LGLELVEVEDWNCCGGGFLDEYNEKAHVALNLRNLSTVERMGMDKMVTPCSVCLQSHRLAAYKYNENKDLRKEVDKKLKEANINY

SEQ ID NO: 36210 - protein, 85 aa, unidentified
  REGION 1..85: note = Description of Unknown:cds_NZ_WFIY01000004.1_cds_WP_155863938.1_1855 target sequence
SGKATAEHIVWVLVRDVGLEKIKKAVKKPLTGLRVGAYYGCQMLRPEQIMGFEPSFNPHSMEDLIAATGATPVKFPMATACCGFP

SEQ ID NO: 36211 - protein, 85 aa, unidentified
  REGION 1..85: note = Description of Unknown:cds_NZ_WFIY01000004.1_cds_WP_155863938.1_1855 target sequence
LMGSNPKVGLKLAYNVLNSAKSQNADILVHPCSLCHLQLDVTQLKVKNEFNLSWTLPAIYITQLLGLAFGFSAEELGISKLAQEV

SEQ ID NO: 36212 - protein, 85 aa, unidentified
  REGION 1..85: note = Description of Unknown:cds_NZ_WFIY01000004.1_cds_WP_155864066.1_2003 target sequence
LEFRMIENMFSSEDPSVVEKIYSLDRNSIIEWMRKRETAQMKVFQTGNDDVAVVIPTADVESQRAKESMRIFSGAKIVMVESKGN

SEQ ID NO: 36213 - protein, 85 aa, unidentified
  REGION 1..85: note = Description of Unknown:cds_NZ_WFIY01000004.1_cds_WP_155864066.1_2003 target sequence
FFNYARSVNKGVSVALESSPRWVVISNDDVHGIDSFKKLKDELSTSNKGMVLAKPSRYHSYKVSLIEVKPYFLKGMYFIGKFMRI

SEQ ID NO: 36214 - protein, 85 aa, unidentified
  REGION 1..85: note = Description of Unknown:cds_NZ_WFIY01000004.1_cds_WP_155864066.1_2003 target sequence
PPAEVYGYLQMKYGAKLGVKTLTIIDSMIGLMKNFAGEVKDSFINAGSFMVLNRRVINGKVFDETFINGYEDVYLSMKMRNDMEI

SEQ ID NO: 36215 - protein, 84 aa, unidentified
  REGION 1..84: note = Description of Unknown:cds_NZ_WFIY01000004.1_cds_WP_155864066.1_2003 target sequence
EVKDSFINAGSFMVLNRRVINGKVFDETFINGYEDVYLSMKMRNDMEIVNFRIDEERGASLGFGKLRFYRSFVNEIYLNYLLWG

SEQ ID NO: 36216 - protein, 85 aa, unidentified
  REGION 1..85: note = Description of Unknown:cds_NZ_WFIY01000004.1_cds_WP_155864066.1_2003 target sequence
SIIEWMRKRETAQMKVFQTGNDDVAVVIPTADVESQRAKESMRIFSGAKIVMVESKGNFFNYARSVNKGVSVALESSPRWVVISN

SEQ ID NO: 36217 - protein, 85 aa, unidentified
  REGION 1..85: note = Description of Unknown:cds_NZ_WFIY01000004.1_cds_WP_155864066.1_2003 target sequence
DDVHGIDSFKKLKDELSTSNKGMVLAKPSRYHSYKVSLIEVKPYFLKGMYFIGKFMRIPPAEVYGYLQMKYGAKLGVKTLTIIDS

SEQ ID NO: 36218 - protein, 85 aa, unidentified
  REGION 1..85: note = Description of Unknown:cds_NZ_WFIY01000004.1_cds_WP_155864066.1_2003 target sequence
MIGLMKNFAGEVKDSFINAGSFMVLNRRVINGKVFDETFINGYEDVYLSMKMRNDMEIVNFRIDEERGASLGFGKLRFYRSFVNE

SEQ ID NO: 36219 - protein, 85 aa, unidentified
  REGION 1..85: note = Description of Unknown:cds_NC_035460.1_cds_YP_009408055.1_104 target sequence
FEPVPDLNLEANVELGEINVDKTVARVGETTNYVSKSRRLFTHKTKDDERKLALRFFLPRLYYLKYNEVNYLFRCIDTVKDVVIT

SEQ ID NO: 36220 - protein, 85 aa, unidentified
  REGION 1..85: note = Description of Unknown:cds_NC_035460.1_cds_YP_009408055.1_104 target sequence
KKNNITSVLYVVLLTMASKGYKLSESMIEMFFPELFNEKSKKFKFVSQMMSIQQKIGYTDMGNYHNYMFEQYYATIALTLRFDEY

SEQ ID NO: 36221 - protein, 85 aa, unidentified
  REGION 1..85: note = Description of Unknown:cds_NC_035460.1_cds_YP_009408055.1_104 target sequence
SEIFCTRKECQFISSFTEITYRLYLLFLKSDIIQWSSATGAIINQLINTVLITIYDYINKSIKEKKIFDCTLAKENKLPIQFLLE

SEQ ID NO: 36222 - protein, 84 aa, unidentified
  REGION 1..84: note = Description of Unknown:cds_NC_035460.1_cds_YP_009408055.1_104 target sequence
SATGAIINQLINTVLITIYDYINKSIKEKKIFDCTLAKENKLPIQFLLERKELLDRFIIDLKNTSSCKISKRDKDILDTYCIFY

SEQ ID NO: 36223 - protein, 85 aa, unidentified
  REGION 1..85: note = Description of Unknown:cds_NC_035460.1_cds_YP_009408055.1_104 target sequence
GETTNYVSKSRRLFTHKTKDDERKLALRFFLPRLYYLKYNEVNYLFRCIDTVKDVVITKKNNITSVLYVVLLTMASKGYKLSESM

SEQ ID NO: 36224 - protein, 85 aa, unidentified
  REGION 1..85: note = Description of Unknown:cds_NC_035460.1_cds_YP_009408055.1_104 target sequence
IEMFFPELFNEKSKKFKFVSQMMSIQQKIGYTDMGNYHNYMFEQYYATIALTLRFDEYSEIFCTRKECQFISSFTEITYRLYLLF

SEQ ID NO: 36225 - protein, 85 aa, unidentified
  REGION 1..85: note = Description of Unknown:cds_NC_035460.1_cds_YP_009408055.1_104 target sequence
LKSDIIQWSSATGAIINQLINTVLITIYDYINKSIKEKKIFDCTLAKENKLPIQFLLERKELLDRFIIDLKNTSSCKISKRDKDI

SEQ ID NO: 36226 - protein, 85 aa, unidentified
  REGION 1..85: note = Description of Unknown:cds_NC_035460.1_cds_YP_009408117.1_166 target sequence
FMYKNTLLDVSNTFILLSKKSSFKKLSVDNVIKNGTFYTSENCNMYTGMFDNKTIAIKEFIKYRRGYRFMYEIFNKDINICKIHQ

SEQ ID NO: 36227 - protein, 85 aa, unidentified
  REGION 1..85: note = Description of Unknown:cds_NC_035460.1_cds_YP_009408117.1_166 target sequence
DNLLLIYGYIIEKNGDHNKISIIMDYCKRGYLRDVLINEPNLMIETRIDMIIDAVYALICYYNYKPLHEYISTISYMVTENYKLK

SEQ ID NO: 36228 - protein, 85 aa, unidentified
  REGION 1..85: note = Description of Unknown:cds_NC_035460.1_cds_YP_009408117.1_166 target sequence
LLCMGLERHVYKFNKHISSAPYISLKCYNDIYSTYNKKDDIYSLGIVMWEIITGKIAFENKSSKEIRQILKNGETLSINNNNNNS

SEQ ID NO: 36229 - protein, 84 aa, unidentified
  REGION 1..84: note = Description of Unknown:cds_NC_035460.1_cds_YP_009408117.1_166 target sequence
KKDDIYSLGIVMWEIITGKIAFENKSSKEIRQILKNGETLSINNNNNNSINIINSVISEVLNHDENIRPSIETIYNKVIVSKYK

SEQ ID NO: 36230 - protein, 85 aa, unidentified
  REGION 1..85: note = Description of Unknown:cds_NC_035460.1_cds_YP_009408117.1_166 target sequence
VDNVIKNGTFYTSENCNMYTGMFDNKTIAIKEFIKYRRGYRFMYEIFNKDINICKIHQDNLLLIYGYIIEKNGDHNKISIIMDYC

SEQ ID NO: 36231 - protein, 85 aa, unidentified
  REGION 1..85: note = Description of Unknown:cds_NC_035460.1_cds_YP_009408117.1_166 target sequence
KRGYLRDVLINEPNLMIETRIDMIIDAVYALICYYNYKPLHEYISTISYMVTENYKLKLLCMGLERHVYKFNKHISSAPYISLKC

SEQ ID NO: 36232 - protein, 85 aa, unidentified
  REGION 1..85: note = Description of Unknown:cds_NC_035460.1_cds_YP_009408117.1_166 target sequence
YNDIYSTYNKKDDIYSLGIVMWEIITGKIAFENKSSKEIRQILKNGETLSINNNNNNSINIINSVISEVLNHDENIRPSIETIYN

SEQ ID NO: 36233 - protein, 85 aa, unidentified
  REGION 1..85: note = Description of Unknown:hvTR_A7XCM8 target sequence
FDPVPDLNLEATVEIGDVAIDKIKARAGESSSFVSKNKRLFIHKTKNEERKLSLRFFISRVYFLSYKEVNYLFRCLDTISDVSIT

SEQ ID NO: 36234 - protein, 85 aa, unidentified
  REGION 1..85: note = Description of Unknown:hvTR_A7XCM8 target sequence
KKNNVIVAPYMVLLTLSSKGYKFTDSMIELFFPELYNEHSKKFRFNSQICIIQEKLGYSTCCYHSYDFELYYSTIALAIRNNLDK

SEQ ID NO: 36235 - protein, 85 aa, unidentified
  REGION 1..85: note = Description of Unknown:hvTR_A7XCM8 target sequence
DIFNTREESEFVSSLSEITYRFYLINLKFNYIQWSSSTGSVINQMVNVVLLAIFDFLEKCTKENKFFTCTLAIETKVPVSLLIDR

SEQ ID NO: 36236 - protein, 84 aa, unidentified
  REGION 1..84: note = Description of Unknown:hvTR_A7XCM8 target sequence
SSTGSVINQMVNVVLLAIFDFLEKCTKENKFFTCTLAIETKVPVSLLIDRISLIKKIILDLKCTNSFKVSKRDKREIYKYFIVN

SEQ ID NO: 36237 - protein, 85 aa, unidentified
  REGION 1..85: note = Description of Unknown:hvTR_A7XCM8 target sequence
GESSSFVSKNKRLFIHKTKNEERKLSLRFFISRVYFLSYKEVNYLFRCLDTISDVSITKKNNVIVAPYMVLLTLSSKGYKFTDSM

SEQ ID NO: 36238 - protein, 85 aa, unidentified
  REGION 1..85: note = Description of Unknown:hvTR_A7XCM8 target sequence
IELFFPELYNEHSKKFRFNSQICIIQEKLGYSTCCYHSYDFELYYSTIALAIRNNLDKDIFNTREESEFVSSLSEITYRFYLINL

SEQ ID NO: 36239 - protein, 85 aa, unidentified
  REGION 1..85: note = Description of Unknown:hvTR_A7XCM8 target sequence
KFNYIQWSSSTGSVINQMVNVVLLAIFDFLEKCTKENKFFTCTLAIETKVPVSLLIDRISLIKKIILDLKCTNSFKVSKRDKREI

SEQ ID NO: 36240 - protein, 85 aa, unidentified; identical to SEQ ID NO: 36233
  REGION 1..85: note = Description of Unknown:hvTR_Q9DHL4 target sequence

SEQ ID NO: 36241 - protein, 85 aa, unidentified; identical to SEQ ID NO: 36234
  REGION 1..85: note = Description of Unknown:hvTR_Q9DHL4 target sequence

SEQ ID NO: 36242 - protein, 85 aa, unidentified; identical to SEQ ID NO: 36238
  REGION 1..85: note = Description of Unknown:hvTR_Q9DHL4 target sequence

SEQ ID NO: 36243 - protein, 85 aa, unidentified
  REGION 1..85: note = Description of Unknown:cds_NZ_WFIY01000004.1_cds_WP_155862669.1_465 target sequence
LRIANLDFKDPLIIASGIIPDVPEVMMRICENYKPTAITTKTLTLTPLEPHKPPTVIKFHDGCYMNAIGLGNPGIGIVEKINLKK

SEQ ID NO: 36244 - protein, 85 aa, unidentified
  REGION 1..85: note = Description of Unknown:cds_NZ_WFIY01000004.1_cds_WP_155862669.1_465 target sequence
CRLFVSIGGNDVEQIIYSAEIAENKADIIEINVSSPNRKGYGESISSIVHEIVKEVKSHVKKPVFVKIGPWDNALEIAGKALEAG

SEQ ID NO: 36245 - protein, 85 aa, unidentified
  REGION 1..85: note = Description of Unknown:cds_NZ_WFIY01000004.1_cds_WP_155862669.1_465 target sequence
ADGITAINTLKGLMIDTEEFKPVLSYGTGGISGKCIYPLALRIIRDLYREYEPDIIGVGGVFTFREVLGMLSVGAKLVGLGSVIL

SEQ ID NO: 36246 - protein, 84 aa, unidentified
  REGION 1..84: note = Description of Unknown:cds_NZ_WFIY01000004.1_cds_WP_155862669.1_465 target sequence
YPLALRIIRDLYREYEPDIIGVGGVFTFREVLGMLSVGAKLVGLGSVILDKGFDVIGEIRKDLMSYLDEKGLKLEDIFAIAVKK

SEQ ID NO: 36247 - protein, 85 aa, unidentified
  REGION 1..85: note = Description of Unknown:cds_NZ_WFIY01000004.1_cds_WP_155862669.1_465 target sequence
RICENYKPTAITTKTLTLTPLEPHKPPTVIKFHDGCYMNAIGLGNPGIGIVEKINLKKCRLFVSIGGNDVEQIIYSAEIAENKAD

SEQ ID NO: 36248 - protein, 85 aa, unidentified
  REGION 1..85: note = Description of Unknown:cds_NZ_WFIY01000004.1_cds_WP_155862669.1_465 target sequence
IIEINVSSPNRKGYGESISSIVHEIVKEVKSHVKKPVFVKIGPWDNALEIAGKALEAGADGITAINTLKGLMIDTEEFKPVLSYG

SEQ ID NO: 36249 - protein, 85 aa, unidentified
  REGION 1..85: note = Description of Unknown:cds_NZ_WFIY01000004.1_cds_WP_155862669.1_465 target sequence
TGGISGKCIYPLALRIIRDLYREYEPDIIGVGGVFTFREVLGMLSVGAKLVGLGSVILDKGFDVIGEIRKDLMSYLDEKGLKLED

SEQ ID NO: 36250 - protein, 85 aa, unidentified
  REGION 1..85: note = Description of Unknown:cds_NZ_WFIY01000004.1_cds_WP_155863124.1_1043 target sequence
VIFILGSGYAGLNAYYNIKGGAGKVILSRESKFIFYTAYLRNLIKNTKYEVSLNFVQKEEIKDVDISNLEIKTNKGEYKADKIII

SEQ ID NO: 36251 - protein, 85 aa, unidentified
  REGION 1..85: note = Description of Unknown:cds_NZ_WFIY01000004.1_cds_WP_155863124.1_1043 target sequence
ALGCERPNLARIMEKIRNDKEICITAEDEYDDYLALQIALYSKIAGKNVKYHGKFLSYLGNKVANVVSEVTQKYIKTCEEPNLII

SEQ ID NO: 36252 - protein, 85 aa, unidentified
  REGION 1..85: note = Description of Unknown:cds_NZ_WFIY01000004.1_cds_WP_155863124.1_1043 target sequence
EKCVPPEFTGLLSVNSYLEVKKNVYAIGDIIKGWPKLGELAMREGIYVGKRISGKLEGGFEPIYIHIVTTGREGIHIRSKVPWGI

SEQ ID NO: 36253 - protein, 84 aa, unidentified
  REGION 1..84: note = Description of Unknown:cds_NZ_WFIY01000004.1_cds_WP_155863124.1_1043 target sequence
LGELAMREGIYVGKRISGKLEGGFEPIYIHIVTTGREGIHIRSKVPWGINYQEVKVSKIRSLMKRFIEKYYIWRKGNMGFLYYL

SEQ ID NO: 36254 - protein, 85 aa, unidentified
  REGION 1..85: note = Description of Unknown:cds_NZ_WFIY01000004.1_cds_WP_155863124.1_1043 target sequence
SRESKFIFYTAYLRNLIKNTKYEVSLNFVQKEEIKDVDISNLEIKTNKGEYKADKIIIALGCERPNLARIMEKIRNDKEICITAE

SEQ ID NO: 36255 - protein, 85 aa, unidentified
  REGION 1..85: note = Description of Unknown:cds_NZ_WFIY01000004.1_cds_WP_155863124.1_1043 target sequence
DEYDDYLALQIALYSKIAGKNVKYHGKFLSYLGNKVANVVSEVTQKYIKTCEEPNLIIEKCVPPEFTGLLSVNSYLEVKKNVYAI

SEQ ID NO: 36256 - protein, 85 aa, unidentified
  REGION 1..85: note = Description of Unknown:cds_NZ_WFIY01000004.1_cds_WP_155863124.1_1043 target sequence
GDIIKGWPKLGELAMREGIYVGKRISGKLEGGFEPIYIHIVTTGREGIHIRSKVPWGINYQEVKVSKIRSLMKRFIEKYYIWRKG

SEQ ID NO: 36257 - protein, 85 aa, unidentified
  REGION 1..85: note = Description of Unknown:cds_NC_035460.1_cds_YP_009408041.1_90 target sequence
YQQSPININTHNVKYDKTLKSLVLKYNNRSATHLINTGKTIKIKCNNRFPMIISSGPLKYNYTVEEIHLHWGKDNNIGSEHTVNG

SEQ ID NO: 36258 - protein, 85 aa, unidentified
  REGION 1..85: note = Description of Unknown:cds_NC_035460.1_cds_YP_009408041.1_90 target sequence
KHFSGEIHIVHWNSSKYKNFNEAYNSPDGIAIIAIFLQIGNYNINLQQITSNAHIVSHKDLSMDIYNFNPQKLFPSNLDYWYYLG

SEQ ID NO: 36259 - protein, 85 aa, unidentified
  REGION 1..85: note = Description of Unknown:cds_NC_035460.1_cds_YP_009408041.1_90 target sequence
STTSNKHINNVHWLVFKNSVSISHSQLADLRYLKSTVYGTTPEKYIISNYKNPNKIINGLKIISSFKTMSDEECFFDKINIFTNL

SEQ ID NO: 36260 - protein, 84 aa, unidentified
  REGION 1..84: note = Description of Unknown:cds_NC_035460.1_cds_YP_009408041.1_90 target sequence
TVYGTTPEKYIISNYKNPNKIINGLKIISSFKTMSDEECFFDKINIFTNLSPLTFIISIIVFILICSIFTFSWFFYKRSQKYKI

SEQ ID NO: 36261 - protein, 85 aa, unidentified
  REGION 1..85: note = Description of Unknown:cds_NC_035460.1_cds_YP_009408041.1_90 target sequence
NRSATHLINTGKTIKIKCNNRFPMIISSGPLKYNYTVEEIHLHWGKDNNIGSEHTVNGKHFSGEIHIVHWNSSKYKNFNEAYNSP

SEQ ID NO: 36262 - protein, 85 aa, unidentified
  REGION 1..85: note = Description of Unknown:cds_NC_035460.1_cds_YP_009408041.1_90 target sequence
DGIAIIAIFLQIGNYNINLQQITSNAHIVSHKDLSMDIYNFNPQKLFPSNLDYWYYLGSTTSNKHINNVHWLVFKNSVSISHSQL

SEQ ID NO: 36263 - protein, 85 aa, unidentified
  REGION 1..85: note = Description of Unknown:cds_NC_035460.1_cds_YP_009408041.1_90 target sequence
ADLRYLKSTVYGTTPEKYIISNYKNPNKIINGLKIISSFKTMSDEECFFDKINIFTNLSPLTFIISIIVFILICSIFTFSWFFYK

SEQ ID NO: 36264 - protein, 85 aa, unidentified
  REGION 1..85: note = Description of Unknown:cds_NC_030656.1_cds_YP_009268807.1_92 target sequence
DTIESVKAQIRDGVSARMPFYENLPNIHLTLGVMQLPSLQYGTNYFLQLSKVNDLNRLPTELLSLFTHDVMIPETDIDQICKTLK

SEQ ID NO: 36265 - protein, 85 aa, unidentified
  REGION 1..85: note = Description of Unknown:cds_NC_030656.1_cds_YP_009268807.1_92 target sequence
IKSVKTHSKGIKAEAIVVDMSAKNKLYKRDRGLIKSNNFLTENNLYISDYKLITFELFRPLFDYTSEKYVIIKLPTMFGRTIVDA

SEQ ID NO: 36266 - protein, 85 aa, unidentified
  REGION 1..85: note = Description of Unknown:cds_NC_030656.1_cds_YP_009268807.1_92 target sequence
MRVYCSLFKTVRLFKCANDSWLKDSFVIVCEDPHVKNIHTVLTHFKNVTKSSTWKESNNVPFMILKDPVDGEFIDIFLNFSTKVY

SEQ ID NO: 36267 - protein, 84 aa, unidentified
  REGION 1..84: note = Description of Unknown:cds_NC_030656.1_cds_YP_009268807.1_92 target sequence
KNIHTVLTHFKNVTKSSTWKESNNVPFMILKDPVDGEFIDIFLNFSTKVYKALYVAHSLLFESMTSDSKSLENDSQRKLVKLLM

SEQ ID NO: 36268 - protein, 85 aa, unidentified
  REGION 1..85: note = Description of Unknown:cds_NC_030656.1_cds_YP_009268807.1_92 target sequence
HLTLGVMQLPSLQYGTNYFLQLSKVNDLNRLPTELLSLFTHDVMIPETDIDQICKTLKIKSVKTHSKGIKAEAIVVDMSAKNKLY

SEQ ID NO: 36269 - protein, 85 aa, unidentified
  REGION 1..85: note = Description of Unknown:cds_NC_030656.1_cds_YP_009268807.1_92 target sequence
KRDRGLIKSNNFLTENNLYISDYKLITFELFRPLFDYTSEKYVIIKLPTMFGRTIVDAMRVYCSLFKTVRLFKCANDSWLKDSFV

SEQ ID NO: 36270 - protein, 85 aa, unidentified
  REGION 1..85: note = Description of Unknown:cds_NC_030656.1_cds_YP_009268807.1_92 target sequence
IVCEDPHVKNIHTVLTHFKNVTKSSTWKESNNVPFMILKDPVDGEFIDIFLNFSTKVYKALYVAHSLLFESMTSDSKSLENDSQR

SEQ ID NO: 36271 - protein, 85 aa, unidentified
  REGION 1..85: note = Description of Unknown:hvTR_P03255.3 target sequence
RHIICHGGVITEEMAASLLDQLIEEVLADNLPPPSHFEPPTLHELYDLDVTAPEDPNEEAVSQIFPDSVMLAVQEGIDLLTFPPA

SEQ ID NO: 36272 - protein, 85 aa, unidentified
  REGION 1..85: note = Description of Unknown:hvTR_P03255.3 target sequence
PGSPEPPHLSRQPEQPEQRALGPVSMPNLVPEVIDLTCHEAGFPPSDDEDEEGEEFVLDYVEHPGHGCRSCHYHRRNTGDPDIMC

SEQ ID NO: 36273 - protein, 85 aa, unidentified
  REGION 1..85: note = Description of Unknown:hvTR_P03255.3 target sequence
SLCYMRTCGMFVYSPVSEPEPEPEPEPEPARPTRRPKMAPAILRRPTSPVSRECNSSTDSCDSGPSNTPPEIHPVVPLCPIKPVA

SEQ ID NO: 36274 - protein, 84 aa, unidentified
  REGION 1..84: note = Description of Unknown:hvTR_P03255.3 target sequence
RPKMAPAILRRPTSPVSRECNSSTDSCDSGPSNTPPEIHPVVPLCPIKPVAVRVGGRRQAVECIEDLLNEPGQPLDLSCKRPRP

SEQ ID NO: 36275 - protein, 85 aa, unidentified
  REGION 1..85: note = Description of Unknown:hvTR_P03255.3 target sequence
ADNLPPPSHFEPPTLHELYDLDVTAPEDPNEEAVSQIFPDSVMLAVQEGIDLLTFPPAPGSPEPPHLSRQPEQPEQRALGPVSMP

SEQ ID NO: 36276 - protein, 85 aa, unidentified
  REGION 1..85: note = Description of Unknown:hvTR_P03255.3 target sequence
NLVPEVIDLTCHEAGFPPSDDEDEEGEEFVLDYVEHPGHGCRSCHYHRRNTGDPDIMCSLCYMRTCGMFVYSPVSEPEPEPEPEP

SEQ ID NO: 36277 - protein, 85 aa, unidentified
  REGION 1..85: note = Description of Unknown:hvTR_P03255.3 target sequence
EPARPTRRPKMAPAILRRPTSPVSRECNSSTDSCDSGPSNTPPEIHPVVPLCPIKPVAVRVGGRRQAVECIEDLLNEPGQPLDLS

SEQ ID NO: 36278 - protein, 85 aa, unidentified
  REGION 1..85: note = Description of Unknown:hvTR_B8XCN3.1 target sequence
DSFHERGRSRTIRQSARDGPSHQVRTRSSSRDSHRSEYHTPRSSSQVRVPTVFHRKRTDSLTVPPAPKDICPTLRKGFLCDSNFC

SEQ ID NO: 36279 - protein, 85 aa, unidentified
  REGION 1..85: note = Description of Unknown:hvTR_B8XCN3.1 target sequence
KKDHQLESLTDRELLLLIARKTCGSLEQQLNITAPKDTRLANPIADDFQQKDGPKITLLTLLETAEYWSKQDIKGIDDSRLRALL

SEQ ID NO: 36280 - protein, 85 aa, unidentified
  REGION 1..85: note = Description of Unknown:hvTR_B8XCN3.1 target sequence
TLCAVMTRKFSKSQLSLLCESHLRREGLGQDQSESVLEVYQRLHSDKGGNFEAALWQQWDRQSLIMFITAFLNIALQLPCESSSV

SEQ ID NO: 36281 - protein, 84 aa, unidentified
  REGION 1..84: note = Description of Unknown:hvTR_B8XCN3.1 target sequence
SVLEVYQRLHSDKGGNFEAALWQQWDRQSLIMFITAFLNIALQLPCESSSVVISGLRLLVPQSEDTETSTYTETRAWSEEGGPH

SEQ ID NO: 36282 - protein, 85 aa, unidentified
  REGION 1..85: note = Description of Unknown:hvTR_B8XCN3.1 target sequence
SSSRDSHRSEYHTPRSSSQVRVPTVFHRKRTDSLTVPPAPKDICPTLRKGFLCDSNFCKKDHQLESLTDRELLLLIARKTCGSLE

SEQ ID NO: 36283 - protein, 85 aa, unidentified
  REGION 1..85: note = Description of Unknown:hvTR_B8XCN3.1 target sequence
QQLNITAPKDTRLANPIADDFQQKDGPKITLLTLLETAEYWSKQDIKGIDDSRLRALLTLCAVMTRKFSKSQLSLLCESHLRREG

SEQ ID NO: 36284 - protein, 85 aa, unidentified
  REGION 1..85: note = Description of Unknown:hvTR_B8XCN3.1 target sequence
LGQDQSESVLEVYQRLHSDKGGNFEAALWQQWDRQSLIMFITAFLNIALQLPCESSSVVISGLRLLVPQSEDTETSTYTETRAWS

SEQ ID NO: 36285 - protein, 85 aa, unidentified
  REGION 1..85: note = Description of Unknown:cds_NC_024711.1_cds_YP_009052508.1_28 target sequence
KIIEPKVELWQQGDDSKAHVARCARVCYGRETGNDEATIKRLINDGHWSMFRHGTYYMIANDSDKTLETIIINYANTIGFSYHYE

SEQ ID NO: 36286 - protein, 85 aa, unidentified
  REGION 1..85: note = Description of Unknown:cds_NC_024711.1_cds_YP_009052508.1_28 target sequence
KHVYYITVNGNWVLDHKTQFGYLSKYIVPIEDFRNTEIGFHMMRYTFCVDTQISTSRELNRVSPNNIAEKSTRYVYEDGSICRPH

SEQ ID NO: 36287 - protein, 85 aa, unidentified
  REGION 1..85: note = Description of Unknown:cds_NC_024711.1_cds_YP_009052508.1_28 target sequence
WLNGYDIFKDIASHYIVYKDRELDTDINHKVLTYIQSCDNSFTNYKYLVESGLHRQDARGVLPLDTATRCVYTYSLKEWRAIIDL

SEQ ID NO: 36288 - protein, 84 aa, unidentified
  REGION 1..84: note = Description of Unknown:cds_NC_024711.1_cds_YP_009052508.1_28 target sequence
IQSCDNSFTNYKYLVESGLHRQDARGVLPLDTATRCVYTYSLKEWRAIIDLRYYGTTGKPHPNAKLIAGMIRNNLMELGYDFRD

SEQ ID NO: 36289 - protein, 85 aa, unidentified
  REGION 1..85: note = Description of Unknown:cds_NC_024711.1_cds_YP_009052508.1_28 target sequence
YGRETGNDEATIKRLINDGHWSMFRHGTYYMIANDSDKTLETIIINYANTIGFSYHYEKHVYYITVNGNWVLDHKTQFGYLSKYI

SEQ ID NO: 36290 - protein, 85 aa, unidentified
  REGION 1..85: note = Description of Unknown:cds_NC_024711.1_cds_YP_009052508.1_28 target sequence
VPIEDFRNTEIGFHMMRYTFCVDTQISTSRELNRVSPNNIAEKSTRYVYEDGSICRPHWLNGYDIFKDIASHYIVYKDRELDTDI

SEQ ID NO: 36291 - protein, 85 aa, unidentified
  REGION 1..85: note = Description of Unknown:cds_NC_024711.1_cds_YP_009052508.1_28 target sequence
NHKVLTYIQSCDNSFTNYKYLVESGLHRQDARGVLPLDTATRCVYTYSLKEWRAIIDLRYYGTTGKPHPNAKLIAGMIRNNLMEL

SEQ ID NO: 36292 - protein, 85 aa, unidentified
  REGION 1..85: note = Description of Unknown:cds_NC_031955.1_cds_YP_009325413.1_2 target sequence
SKNLIRPSDIRAGLQDIEMAEDTVNLVYQNLISDQAHLKGDPIDVKSLPEQFQGITLRDNDDVEQEDEGEDSMEDEPDFDEIDPL

SEQ ID NO: 36293 - protein, 85 aa, unidentified
  REGION 1..85: note = Description of Unknown:cds_NC_031955.1_cds_YP_009325413.1_2 target sequence
EELQDFLDDLGSQMLARLKRGDKIKKIWPGVSLSIQNFVKTKFMFQIPEASSEDKATQTEMHLESSTKKLSVEVPKETPRITPKE

SEQ ID NO: 36294 - protein, 85 aa, unidentified
  REGION 1..85: note = Description of Unknown:cds_NC_031955.1_cds_YP_009325413.1_2 target sequence
TKKSDIASVEGYQATDEEAEAEVAHQIGESFAKKYKFPSRSAGIFLWNFEQLKMNLDDIVQTAMELPGVADCAKDGKRLPLRGVL

SEQ ID NO: 36295 - protein, 84 aa, unidentified
  REGION 1..84: note = Description of Unknown:cds_NC_031955.1_cds_YP_009325413.1_2 target sequence
YKFPSRSAGIFLWNFEQLKMNLDDIVQTAMELPGVADCAKDGKRLPLRGVLGYVGLKHSKKFQLLVNHDKMGQLIQKDLDTYTP

SEQ ID NO: 36296 - protein, 85 aa, unidentified
  REGION 1..85: note = Description of Unknown:cds_NC_031955.1_cds_YP_009325413.1_2 target sequence
YQNLISDQAHLKGDPIDVKSLPEQFQGITLRDNDDVEQEDEGEDSMEDEPDFDEIDPLEELQDFLDDLGSQMLARLKRGDKIKKI

SEQ ID NO: 36297 - protein, 85 aa, unidentified
  REGION 1..85: note = Description of Unknown:cds_NC_031955.1_cds_YP_009325413.1_2 target sequence
WPGVSLSIQNFVKTKFMFQIPEASSEDKATQTEMHLESSTKKLSVEVPKETPRITPKETKKSDIASVEGYQATDEEAEAEVAHQI

SEQ ID NO: 36298 - protein, 85 aa, unidentified
  REGION 1..85: note = Description of Unknown:cds_NC_031955.1_cds_YP_009325413.1_2 target sequence
GESFAKKYKFPSRSAGIFLWNFEQLKMNLDDIVQTAMELPGVADCAKDGKRLPLRGVLGYVGLKHSKKFQLLVNHDKMGQLIQKD

SEQ ID NO: 36299 - protein, 85 aa, unidentified
  REGION 1..85: note = Description of Unknown:cds_NZ_WFIY01000004.1_cds_WP_155862585.1_358 target sequence
LMEVYFIGTGGGAPSKRGLPAFLVRRQGFNLLLDCGEGTQITMINHGLNIMAINLIAITHLHADHVLGLPSLIQTMGMYSRKEKL

SEQ ID NO: 36300 - protein, 85 aa, unidentified
  REGION 1..85: note = Description of Unknown:cds_NZ_WFIY01000004.1_cds_WP_155862585.1_358 target sequence
YIIGDVKDLLNKVFEETYFEPPFKIEYVDSYEDNELKITPFKTCHTVKSQGYLIEEKDRKNIDIERLTREGIKDWRIIRQLKAGK

SEQ ID NO: 36301 - protein, 85 aa, unidentified
  REGION 1..85: note = Description of Unknown:cds_NZ_WFIY01000004.1_cds_WP_155862585.1_358 target sequence
EVIFNGKKLNPEDYLITKKGIRIAYTGDTAICDSVINSVKGVDLLIHDSTFLDDINAKEYGHSTVTDAATVAKEAGVKRLALVHI

SEQ ID NO: 36302 - protein, 84 aa, unidentified
  REGION 1..84: note = Description of Unknown:cds_NZ_WFIY01000004.1_cds_WP_155862585.1_358 target sequence
INSVKGVDLLIHDSTFLDDINAKEYGHSTVTDAATVAKEAGVKRLALVHISGRYKDAKIMEEIARRTFWKSFLPDDLSYYILKD

SEQ ID NO: 36303 - protein, 85 aa, unidentified
  REGION 1..85: note = Description of Unknown:cds_NZ_WFIY01000004.1_cds_WP_155862585.1_358 target sequence
GFNLLLDCGEGTQITMINHGLNIMAINLIAITHLHADHVLGLPSLIQTMGMYSRKEKLYIIGDVKDLLNKVFEETYFEPPFKIEY

SEQ ID NO: 36304 - protein, 85 aa, unidentified
  REGION 1..85: note = Description of Unknown:cds_NZ_WFIY01000004.1_cds_WP_155862585.1_358 target sequence
VDSYEDNELKITPFKTCHTVKSQGYLIEEKDRKNIDIERLTREGIKDWRIIRQLKAGKEVIFNGKKLNPEDYLITKKGIRIAYTG

SEQ ID NO: 36305 - protein, 85 aa, unidentified
  REGION 1..85: note = Description of Unknown:cds_NZ_WFIY01000004.1_cds_WP_155862585.1_358 target sequence
DTAICDSVINSVKGVDLLIHDSTFLDDINAKEYGHSTVTDAATVAKEAGVKRLALVHISGRYKDAKIMEEIARRTFWKSFLPDDL

SEQ ID NO: 36306 - protein, 85 aa, unidentified
  REGION 1..85: note = Description of Unknown:cds_NZ_WFIY01000004.1_cds_WP_155862600.1_376 target sequence
DRFSRQLLALGIDVQEKIMSTKVLIVGCGALGSSIAELLVRLGVKELKIVDADVVELSNLHRTHIFTEKDLMKPKVLACKEFLEK

SEQ ID NO: 36307 - protein, 85 aa, unidentified
  REGION 1..85: note = Description of Unknown:cds_NZ_WFIY01000004.1_cds_WP_155862600.1_376 target sequence
INSEVKIEPIFDIIDETNAENLVKDVDVVFDGLDNINYRLILNDACVKYEKPLIYAGISGEYGNAKLVIPGKTSCLACFLQPSDS

SEQ ID NO: 36308 - protein, 85 aa, unidentified
  REGION 1..85: note = Description of Unknown:cds_NZ_WFIY01000004.1_cds_WP_155862600.1_376 target sequence
RNACDIIGTTTVVPNFLASIQVQLFINYLRGYSEDELVIADLKDLRLDKIKMKRNPQCEACSLHEYKYLRRMDINCGLTRAEKAE

SEQ ID NO: 36309 - protein, 84 aa, unidentified
  REGION 1..84: note = Description of Unknown:cds_NZ_WFIY01000004.1_cds_WP_155862600.1_376 target sequence
DELVIADLKDLRLDKIKMKRNPQCEACSLHEYKYLRRMDINCGLTRAEKAEGDRIFSSNGVELYKYNGSYIICYNQKCFKKRIA

SEQ ID NO: 36310 - protein, 85 aa, unidentified
  REGION 1..85: note = Description of Unknown:cds_NZ_WFIY01000004.1_cds_WP_155862600.1_376 target sequence
CGALGSSIAELLVRLGVKELKIVDADVVELSNLHRTHIFTEKDLMKPKVLACKEFLEKINSEVKIEPIFDIIDETNAENLVKDVD

SEQ ID NO: 36311 - protein, 85 aa, unidentified
  REGION 1..85: note = Description of Unknown:cds_NZ_WFIY01000004.1_cds_WP_155862600.1_376 target sequence
VVFDGLDNINYRLILNDACVKYEKPLIYAGISGEYGNAKLVIPGKTSCLACFLQPSDSRNACDIIGTTTVVPNFLASIQVQLFIN

SEQ ID NO: 36312 - protein, 85 aa, unidentified
  REGION 1..85: note = Description of Unknown:cds_NZ_WFIY01000004.1_cds_WP_155862600.1_376 target sequence
YLRGYSEDELVIADLKDLRLDKIKMKRNPQCEACSLHEYKYLRRMDINCGLTRAEKAEGDRIFSSNGVELYKYNGSYIICYNQKC

SEQ ID NO: 36313 - protein, 85 aa, unidentified
  REGION 1..85: note = Description of Unknown:cds_NZ_WFIY01000004.1_cds_WP_155862765.1_579 target sequence
SKIVVGLATILVLISSAMLPTIFMANSSSSTYFMDYSINYHSYNSGKYFTTSYKESSINLNITSTKINSNKYNNTIIITGYIFTN

SEQ ID NO: 36314 - protein, 85 aa, unidentified
  REGION 1..85: note = Description of Unknown:cds_NZ_WFIY01000004.1_cds_WP_155862765.1_579 target sequence
YSSPLMTSVNNETIHYVFNFTSKYPLAKEITIFNLSSLLNMTLNITNEFKIFNITVNYKINYQPNGTESVTFNGKQYTLDSYKAF

SEQ ID NO: 36315 - protein, 85 aa, unidentified
  REGION 1..85: note = Description of Unknown:cds_NZ_WFIY01000004.1_cds_WP_155862765.1_579 target sequence
LYLSALGKNKYANITYTSTMIGNILTFQKGILYKLYLTGESQNNITFYKFLNTYSKGNETLCILLKNTNIKLDSVMMPNNNQENV

SEQ ID NO: 36316 - protein, 84 aa, unidentified
  REGION 1..84: note = Description of Unknown:cds_NZ_WFIY01000004.1_cds_WP_155862765.1_579 target sequence
LYLTGESQNNITFYKFLNTYSKGNETLCILLKNTNIKLDSVMMPNNNQENVNSTRQESIKPEEFLIPAGIISLLAAALILARKF

SEQ ID NO: 36317 - protein, 85 aa, unidentified
  REGION 1..85: note = Description of Unknown:cds_NZ_WFIY01000004.1_cds_WP_155862765.1_579 target sequence
SSSTYFMDYSINYHSYNSGKYFTTSYKESSINLNITSTKINSNKYNNTIIITGYIFTNYSSPLMTSVNNETIHYVFNFTSKYPLA

SEQ ID NO: 36318 - protein, 85 aa, unidentified
  REGION 1..85: note = Description of Unknown:cds_NZ_WFIY01000004.1_cds_WP_155862765.1_579 target sequence
KEITIFNLSSLLNMTLNITNEFKIFNITVNYKINYQPNGTESVTFNGKQYTLDSYKAFLYLSALGKNKYANITYTSTMIGNILTF

SEQ ID NO: 36319 - protein, 85 aa, unidentified
  REGION 1..85: note = Description of Unknown:cds_NZ_WFIY01000004.1_cds_WP_155862765.1_579 target sequence
QKGILYKLYLTGESQNNITFYKFLNTYSKGNETLCILLKNTNIKLDSVMMPNNNQENVNSTRQESIKPEEFLIPAGIISLLAAAL

SEQ ID NO: 36320 - protein, 85 aa, unidentified
  REGION 1..85: note = Description of Unknown:cds_NZ_WFIY01000004.1_cds_WP_155862857.1_695 target sequence
EVYNEKELYNSIKDAYLSGKKVMIIGYGKHSSPRKSDIYLKIKMDYYKIEKEGYVEAYAGASVDKIREEASEYGLLLPCLYDGSI

SEQ ID NO: 36321 - protein, 85 aa, unidentified
  REGION 1..85: note = Description of Unknown:cds_NZ_WFIY01000004.1_cds_WP_155862857.1_695 target sequence
GGLLANNEFSPLSTRYGKPYDFTDKVFFITPFGKISWKIIIGSKGRLGAIYKARLKLFPKPTKVFTFERSFSKKDETIAYVNKLM

SEQ ID NO: 36322 - protein, 85 aa, unidentified
  REGION 1..85: note = Description of Unknown:cds_NZ_WFIY01000004.1_cds_WP_155862857.1_695 target sequence
HLKPLAMLVEYDGKYTIHASYDFDAKIHGFSKDEGVATIEESNSSNGYYVTTPTIEDFMSTIENTQPIYAYTVVGSGISKLYVAD

SEQ ID NO: 36323 - protein, 84 aa, unidentified
  REGION 1..84: note = Description of Unknown:cds_NZ_WFIY01000004.1_cds_WP_155862857.1_695 target sequence
GVATIEESNSSNGYYVTTPTIEDFMSTIENTQPIYAYTVVGSGISKLYVADEDAIKKLNYFTHDDIPRVYWKLKAILDFKNIFA

SEQ ID NO: 36324 - protein, 85 aa, unidentified
  REGION 1..85: note = Description of Unknown:cds_NZ_WFIY01000004.1_cds_WP_155862857.1_695 target sequence
GKHSSPRKSDIYLKIKMDYYKIEKEGYVEAYAGASVDKIREEASEYGLLLPCLYDGSIGGLLANNEFSPLSTRYGKPYDFTDKVF

SEQ ID NO: 36325 - protein, 85 aa, unidentified
  REGION 1..85: note = Description of Unknown:cds_NZ_WFIY01000004.1_cds_WP_155862857.1_695 target sequence
FITPFGKISWKIIIGSKGRLGAIYKARLKLFPKPTKVFTFERSFSKKDETIAYVNKLMHLKPLAMLVEYDGKYTIHASYDFDAKI

SEQ ID NO: 36326 - protein, 85 aa, unidentified
  REGION 1..85: note = Description of Unknown:cds_NZ_WFIY01000004.1_cds_WP_155862857.1_695 target sequence
HGFSKDEGVATIEESNSSNGYYVTTPTIEDFMSTIENTQPIYAYTVVGSGISKLYVADEDAIKKLNYFTHDDIPRVYWKLKAILD

SEQ ID NO: 36327 - protein, 85 aa, unidentified
  REGION 1..85: note = Description of Unknown:cds_NZ_WFIY01000004.1_cds_WP_155863091.1_1004 target sequence
PSLTLAEKASLVLPEDYLVLKTFVELKDKYEYLTEEELKDRLDFTDAELRISLEKLRNLRAVSWDIIAGKRAYKITFTGLDILAI

SEQ ID NO: 36328 - protein, 85 aa, unidentified
  REGION 1..85: note = Description of Unknown:cds_NZ_WFIY01000004.1_cds_WP_155863091.1_1004 target sequence
KMLYVNKILNRLGLIIGEGKESNVYYGYDFDNNTIIVKFHRVGNSSYKNARKLRGYREKRSWVSITLDNAKNEYIALKCLSENLA

SEQ ID NO: 36329 - protein, 85 aa, unidentified
  REGION 1..85: note = Description of Unknown:cds_NZ_WFIY01000004.1_cds_WP_155863091.1_1004 target sequence
KVPKPLGYAYNAVAMEYIEGPSLLKAELNNPKEVLDSIIGSLRIAYLYCNKMVHGDLSPYNIIIGDNESPYIIDWPQWKQDDDNL

SEQ ID NO: 36330 - protein, 84 aa, unidentified
  REGION 1..84: note = Description of Unknown:cds_NZ_WFIY01000004.1_cds_WP_155863091.1_1004 target sequence
LDSIIGSLRIAYLYCNKMVHGDLSPYNIIIGDNESPYIIDWPQWKQDDDNLLNRDINNIISFFSKKYNITEDLNYVMDFIKGKA

SEQ ID NO: 36331 - protein, 85 aa, unidentified
  REGION 1..85: note = Description of Unknown:cds_NZ_WFIY01000004.1_cds_WP_155863091.1_1004 target sequence
DKYEYLTEEELKDRLDFTDAELRISLEKLRNLRAVSWDIIAGKRAYKITFTGLDILAIKMLYVNKILNRLGLIIGEGKESNVYYG

SEQ ID NO: 36332 - protein, 85 aa, unidentified
  REGION 1..85: note = Description of Unknown:cds_NZ_WFIY01000004.1_cds_WP_155863091.1_1004 target sequence
YDFDNNTIIVKFHRVGNSSYKNARKLRGYREKRSWVSITLDNAKNEYIALKCLSENLAKVPKPLGYAYNAVAMEYIEGPSLLKAE

SEQ ID NO: 36333 - protein, 85 aa, unidentified
  REGION 1..85: note = Description of Unknown:cds_NZ_WFIY01000004.1_cds_WP_155863091.1_1004 target sequence
LNNPKEVLDSIIGSLRIAYLYCNKMVHGDLSPYNIIIGDNESPYIIDWPQWKQDDDNLLNRDINNIISFFSKKYNITEDLNYVMD

SEQ ID NO: 36334 - protein, 85 aa, unidentified
  REGION 1..85: note = Description of Unknown:cds_NZ_WFIY01000004.1_cds_WP_155863194.1_1127 target sequence
LYVSRIKIIAESSNELAKRVRNSLDELGYFIVDSKEEVQVYFYPIEEIIYRVKKFSTKTPVIIGVTDDGSYVIPLFKEKCGGSFI

SEQ ID NO: 36335 - protein, 85 aa, unidentified
  REGION 1..85: note = Description of Unknown:cds_NZ_WFIY01000004.1_cds_WP_155863194.1_1127 target sequence
AGIIADLLGSQLVLTSRTSQQGVYSIQEFAWVNGLEIINREKIDELEKKLLNSGKLKVYSNNIDIHTVEGYELTRKEEDADIIIK

SEQ ID NO: 36336 - protein, 85 aa, unidentified
  REGION 1..85: note = Description of Unknown:cds_NZ_WFIY01000004.1_cds_WP_155863194.1_1127 target sequence
TDTEEEDKEIDDKRIIMKPLSLVIALSYSKDTPKEAIYYSIISTLKSINILRSTVNFIITSESKNGDKKIQDIAKSFNSTVIYVK

SEQ ID NO: 36337 - protein, 84 aa, unidentified
  REGION 1..84: note = Description of Unknown:cds_NZ_WFIY01000004.1_cds_WP_155863194.1_1127 target sequence
AIYYSIISTLKSINILRSTVNFIITSESKNGDKKIQDIAKSFNSTVIYVKEKQPCEPSLDFVNARVILKKTKRAYGVLTCLGVK

SEQ ID NO: 36338 - protein, 85 aa, unidentified
  REGION 1..85: note = Description of Unknown:cds_NZ_WFIY01000004.1_cds_WP_155863194.1_1127 target sequence
GYFIVDSKEEVQVYFYPIEEIIYRVKKFSTKTPVIIGVTDDGSYVIPLFKEKCGGSFIAGIIADLLGSQLVLTSRTSQQGVYSIQ

SEQ ID NO: 36339 - protein, 85 aa, unidentified
  REGION 1..85: note = Description of Unknown:cds_NZ_WFIY01000004.1_cds_WP_155863194.1_1127 target sequence
EFAWVNGLEIINREKIDELEKKLLNSGKLKVYSNNIDIHTVEGYELTRKEEDADIIIKTDTEEEDKEIDDKRIIMKPLSLVIALS

SEQ ID NO: 36340 - protein, 85 aa, unidentified
  REGION 1..85: note = Description of Unknown:cds_NZ_WFIY01000004.1_cds_WP_155863194.1_1127 target sequence
YSKDTPKEAIYYSIISTLKSINILRSTVNFIITSESKNGDKKIQDIAKSFNSTVIYVKEKQPCEPSLDFVNARVILKKTKRAYGV

SEQ ID NO: 36341 - protein, 85 aa, unidentified
  REGION 1..85: note = Description of Unknown:cds_NZ_WFIY01000004.1_cds_WP_155863708.1_1567 target sequence
VFVYYLIEAILSILGFYIGSELIVKGGKEIIQQGFMLGALSVLPELIILSNLLFHKNFYLALSSFFITALTIYTLGIAIVNVSVF

SEQ ID NO: 36342 - protein, 85 aa, unidentified
  REGION 1..85: note = Description of Unknown:cds_NZ_WFIY01000004.1_cds_WP_155863708.1_1567 target sequence
LKWRKRRISIVNFKERRIILIIMSILLSIFILQKINLEIGIVSLFILSYYLMLRLNEVKFSVRSLLFMLSGITILWIASNNLVFM

SEQ ID NO: 36343 - protein, 85 aa, unidentified
  REGION 1..85: note = Description of Unknown:cds_NZ_WFIY01000004.1_cds_WP_155863708.1_1567 target sequence
SSKFLPSWAFTIFLFPIVLNIQDIIVAIKGSLSSPELGSQMTLSFIVETIILSAFTLSLAGLLGGPEGVFIGINYSLLALILVST

SEQ ID NO: 36344 - protein, 84 aa, unidentified
  REGION 1..84: note = Description of Unknown:cds_NZ_WFIY01000004.1_cds_WP_155863708.1_1567 target sequence
ELGSQMTLSFIVETIILSAFTLSLAGLLGGPEGVFIGINYSLLALILVSTLMFVLFNNNNLSIKESIILLSMYSLVPMSILLHA

SEQ ID NO: 36345 - protein, 85 aa, unidentified
  REGION 1..85: note = Description of Unknown:cds_NZ_WFIY01000004.1_cds_WP_155863708.1_1567 target sequence
KEIIQQGFMLGALSVLPELIILSNLLFHKNFYLALSSFFITALTIYTLGIAIVNVSVFLKWRKRRISIVNFKERRIILIIMSILL

SEQ ID NO: 36346 - protein, 85 aa, unidentified
  REGION 1..85: note = Description of Unknown:cds_NZ_WFIY01000004.1_cds_WP_155863708.1_1567 target sequence
SIFILQKINLEIGIVSLFILSYYLMLRLNEVKFSVRSLLFMLSGITILWIASNNLVFMSSKFLPSWAFTIFLFPIVLNIQDIIVA

SEQ ID NO: 36347 - protein, 85 aa, unidentified
  REGION 1..85: note = Description of Unknown:cds_NZ_WFIY01000004.1_cds_WP_155863708.1_1567 target sequence
IKGSLSSPELGSQMTLSFIVETIILSAFTLSLAGLLGGPEGVFIGINYSLLALILVSTLMFVLFNNNNLSIKESIILLSMYSLVP

SEQ ID NO: 36348 - protein, 85 aa, unidentified
  REGION 1..85: note = Description of Unknown:cds_NC_009884.1_cds_YP_001496967.1_42 target sequence
AIAKEFLLTVLNYIANGVVNVQSSTTQAVTTLAPYQIIAIMKNNNVTVSRTTITSISVSDVVNASQEETLTIRYSGTDASPFTYT

SEQ ID NO: 36349 - protein, 85 aa, unidentified
  REGION 1..85: note = Description of Unknown:cds_NC_009884.1_cds_YP_001496967.1_42 target sequence
TDEIEIWASTQSALLYKIADIQLQTPLSKTEHDYLNIEYEIIITAGASYTTTSSMSQYTSVVTFRTLVAPILYFFALFLVPAWST

SEQ ID NO: 36350 - protein, 85 aa, unidentified
  REGION 1..85: note = Description of Unknown:cds_NC_009884.1_cds_YP_001496967.1_42 target sequence
VLKQNPTFPQSQLSNYISPSSYQGINAMYVGSNQVTIVSKLVGFGTTTVSIVVNGEVTSTQVNAPIFIGVTTPSGVLVLAYNYYS

SEQ ID NO: 36351 - protein, 84 aa, unidentified
  REGION 1..84: note = Description of Unknown:cds_NC_009884.1_cds_YP_001496967.1_42 target sequence
VTIVSKLVGFGTTTVSIVVNGEVTSTQVNAPIFIGVTTPSGVLVLAYNYYSGTISKYVSLTVTTTYGSATVINQFETKTTGGTT

SEQ ID NO: 36352 - protein, 85 aa, unidentified
  REGION 1..85: note = Description of Unknown:cds_NC_009884.1_cds_YP_001496967.1_42 target sequence
AVTTLAPYQIIAIMKNNNVTVSRTTITSISVSDVVNASQEETLTIRYSGTDASPFTYTTDEIEIWASTQSALLYKIADIQLQTPL

SEQ ID NO: 36353 - protein, 85 aa, unidentified
  REGION 1..85: note = Description of Unknown:cds_NC_009884.1_cds_YP_001496967.1_42 target sequence
SKTEHDYLNIEYEIIITAGASYTTTSSMSQYTSVVTFRTLVAPILYFFALFLVPAWSTVLKQNPTFPQSQLSNYISPSSYQGINA

SEQ ID NO: 36354 - protein, 85 aa, unidentified
  REGION 1..85: note = Description of Unknown:cds_NC_009884.1_cds_YP_001496967.1_42 target sequence
MYVGSNQVTIVSKLVGFGTTTVSIVVNGEVTSTQVNAPIFIGVTTPSGVLVLAYNYYSGTISKYVSLTVTTTYGSATVINQFETK

SEQ ID NO: 36355 - protein, 85 aa, unidentified
  REGION 1..85: note = Description of Unknown:hvTR_A0A0E3KX28 target sequence
EASYERGRPRAARQHSRDGHDHHVRARSSSRENYRGEYRQSRSASQVRVPTVFHKKRVEPLTVPPAPKDICPTLKKGFLCDSSFC

SEQ ID NO: 36356 - protein, 85 aa, unidentified
  REGION 1..85: note = Description of Unknown:hvTR_A0A0E3KX28 target sequence
KKDHQLESLTDRELLLLIARKTCGSVEQQLNITAPKDSRLANPTADDFQQEEGPKITLLTLIKTAEHWARQDIRTIEDSKLRALL

SEQ ID NO: 36357 - protein, 85 aa, unidentified
  REGION 1..85: note = Description of Unknown:hvTR_A0A0E3KX28 target sequence
TLCAVMTRKFSKSQLSLLCETHLRREGLGQDQAEPVLEVYQRLHSDKGGSFEAALWQQWDRQSLIMFITAFLNIALQLPCESSAV

SEQ ID NO: 36358 - protein, 84 aa, unidentified
  REGION 1..84: note = Description of Unknown:hvTR_A0A0E3KX28 target sequence
EPVLEVYQRLHSDKGGSFEAALWQQWDRQSLIMFITAFLNIALQLPCESSAVVVSGLRTLVPQSDNEEASTNPGTCSWSDEGTP

SEQ ID NO: 36359 - protein, 85 aa, unidentified
  REGION 1..85: note = Description of Unknown:hvTR_A0A0E3KX28 target sequence
SSSRENYRGEYRQSRSASQVRVPTVFHKKRVEPLTVPPAPKDICPTLKKGFLCDSSFCKKDHQLESLTDRELLLLIARKTCGSVE

SEQ ID NO: 36360 - protein, 85 aa, unidentified
  REGION 1..85: note = Description of Unknown:hvTR_A0A0E3KX28 target sequence
QQLNITAPKDSRLANPTADDFQQEEGPKITLLTLIKTAEHWARQDIRTIEDSKLRALLTLCAVMTRKFSKSQLSLLCETHLRREG

SEQ ID NO: 36361 - protein, 85 aa, unidentified
  REGION 1..85: note = Description of Unknown:hvTR_A0A0E3KX28 target sequence
LGQDQAEPVLEVYQRLHSDKGGSFEAALWQQWDRQSLIMFITAFLNIALQLPCESSAVVVSGLRTLVPQSDNEEASTNPGTCSWS

SEQ ID NO: 36362 - protein, 85 aa, unidentified
  REGION 1..85: note = Description of Unknown:hvTR_Q5XX03 target sequence
ERGRERGRSRNSRADQQNSTGPQFRTRSISRDKTTTDYRSSRSTSQVRVPTVFHKKGTGTLTVPPAPKDVCPTLRKGFLCDSNFC

SEQ ID NO: 36363 - protein, 85 aa, unidentified
  REGION 1..85: note = Description of Unknown:hvTR_Q5XX03 target sequence
KKDHQLESLTDRELLLLIARKTCGSTDSSLNIAAPKDLRLANPTADDFKQDGSPKLTLKLLVETAEFWANQNINEVDDAKLRALL

SEQ ID NO: 36364 - protein, 85 aa, unidentified
  REGION 1..85: note = Description of Unknown:hvTR_Q5XX03 target sequence
TLSAVLVRKFSKSQLSQLCESHLRRENLGQDQAESVLEVYQRLHSDKGGAFEAALWQQWDRQSLTMFISAFLHVALQLSCESSTV

SEQ ID NO: 36365 - protein, 84 aa, unidentified
  REGION 1..84: note = Description of Unknown:hvTR_Q5XX03 target sequence
ESVLEVYQRLHSDKGGAFEAALWQQWDRQSLTMFISAFLHVALQLSCESSTVVISGLRLLAPPSVNEGLPPAPGEYTWSEDSTT

SEQ ID NO: 36366 - protein, 85 aa, unidentified
  REGION 1..85: note = Description of Unknown:hvTR_Q5XX03 target sequence
SISRDKTTTDYRSSRSTSQVRVPTVFHKKGTGTLTVPPAPKDVCPTLRKGFLCDSNFCKKDHQLESLTDRELLLLIARKTCGSTD

SEQ ID NO: 36367 - protein, 85 aa, unidentified
  REGION 1..85: note = Description of Unknown:hvTR_Q5XX03 target sequence
SSLNIAAPKDLRLANPTADDFKQDGSPKLTLKLLVETAEFWANQNINEVDDAKLRALLTLSAVLVRKFSKSQLSQLCESHLRREN

SEQ ID NO: 36368 - protein, 85 aa, unidentified
  REGION 1..85: note = Description of Unknown:hvTR_Q5XX03 target sequence
LGQDQAESVLEVYQRLHSDKGGAFEAALWQQWDRQSLTMFISAFLHVALQLSCESSTVVISGLRLLAPPSVNEGLPPAPGEYTWS

SEQ ID NO: 36369 - protein, 85 aa, unidentified; identical to SEQ ID NO: 36136
  REGION 1..85: note = Description of Unknown:hvTR_A0A0K2YTA9 target sequence

SEQ ID NO: 36370 - protein, 85 aa, unidentified
  REGION 1..85: note = Description of Unknown:hvTR_A0A0K2YTA9 target sequence
GIFNIRQESYLVSSLSEITYRFYLINLKSDLVQWSASTGAVINQMVNTVLITVYEKLQLVIENDSQFTCSLAVESELPIKLLKDR

SEQ ID NO: 36371 - protein, 84 aa, unidentified
  REGION 1..84: note = Description of Unknown:hvTR_A0A0K2YTA9 target sequence
WSASTGAVINQMVNTVLITVYEKLQLVIENDSQFTCSLAVESELPIKLLKDRNELFTKFINELKKTSSFKISKRDKDTLLKYFT

SEQ ID NO: 36372 - protein, 85 aa, unidentified; identical to SEQ ID NO: 36140
  REGION 1..85: note = Description of Unknown:hvTR_A0A0K2YTA9 target sequence

SEQ ID NO: 36373 - protein, 85 aa, unidentified
  REGION 1..85: note = Description of Unknown:hvTR_A0A0K2YTA9 target sequence
KSDLVQWSASTGAVINQMVNTVLITVYEKLQLVIENDSQFTCSLAVESELPIKLLKDRNELFTKFINELKKTSSFKISKRDKDTL

SEQ ID NO: 36374 - protein, 85 aa, unidentified
  REGION 1..85: note = Description of Unknown:hvTR_Q98214 target sequence
RKAVPGKQQTVLLRKQDPARPTSVSSPEEAPSRLTPVSVVEFARSLSPSSAKLIEHVTLTQSQYPSCANIHITLVETLASKMVSP

SEQ ID NO: 36375 - protein, 85 aa, unidentified
  REGION 1..85: note = Description of Unknown:hvTR_Q98214 target sequence
LIVVEGEAKVFRNKAKAAEAFNKKGADAFFLRVRPSVASPMLYQLLECIYTNLRGGTRAPASMCLSTLDTMEERTFKNGFLYINK

SEQ ID NO: 36376 - protein, 85 aa, unidentified
  REGION 1..85: note = Description of Unknown:hvTR_Q98214 target sequence
LQAGIVEYTGSDCVPRVVAMLRELETLAAREPQMAKVVLAPIVLYRGSGEYKVTFALKRISMESMVHATVVDASGEHVRLVMTES

SEQ ID NO: 36377 - protein, 84 aa, unidentified
  REGION 1..84: note = Description of Unknown:hvTR_Q98214 target sequence
MAKVVLAPIVLYRGSGEYKVTFALKRISMESMVHATVVDASGEHVRLVMTESADDDERLAALGVMDTALELEDELADQDPLFNV

SEQ ID NO: 36378 - protein, 85 aa, unidentified
  REGION 1..85: note = Description of Unknown:hvTR_Q98214 target sequence
EEAPSRLTPVSVVEFARSLSPSSAKLIEHVTLTQSQYPSCANIHITLVETLASKMVSPLIVVEGEAKVFRNKAKAAEAFNKKGAD

SEQ ID NO: 36379 - protein, 85 aa, unidentified
  REGION 1..85: note = Description of Unknown:hvTR_Q98214 target sequence
AFFLRVRPSVASPMLYQLLECIYTNLRGGTRAPASMCLSTLDTMEERTFKNGFLYINKLQAGIVEYTGSDCVPRVVAMLRELETL

SEQ ID NO: 36380 - protein, 85 aa, unidentified
  REGION 1..85: note = Description of Unknown:hvTR_Q98214 target sequence
AAREPQMAKVVLAPIVLYRGSGEYKVTFALKRISMESMVHATVVDASGEHVRLVMTESADDDERLAALGVMDTALELEDELADQD

SEQ ID NO: 36381 - protein, 85 aa, unidentified; identical to SEQ ID NO: 36135
  REGION 1..85: note = Description of Unknown:hvTR_P20986 target sequence

SEQ ID NO: 36382 - protein, 85 aa, unidentified
  REGION 1..85: note = Description of Unknown:hvTR_P20986 target sequence
KKNNIIVAPYIALLTIASKGCKLTETMIEAFFPELYNEHSKKFKFNSQVSIIQEKLGYQFGNYHVYDFEPYYSTVALAIRDEHSS

SEQ ID NO: 36383 - protein, 85 aa, unidentified; identical to SEQ ID NO: 36370
  REGION 1..85: note = Description of Unknown:hvTR_P20986 target sequence

SEQ ID NO: 36384 - protein, 84 aa, unidentified; identical to SEQ ID NO: 36371
  REGION 1..84: note = Description of Unknown:hvTR_P20986 target sequence

SEQ ID NO: 36385 - protein, 85 aa, unidentified; identical to SEQ ID NO: 36139
  REGION 1..85: note = Description of Unknown:hvTR_P20986 target sequence

SEQ ID NO: 36386 - protein, 85 aa, unidentified
  REGION 1..85: note = Description of Unknown:hvTR_P20986 target sequence
IEAFFPELYNEHSKKFKFNSQVSIIQEKLGYQFGNYHVYDFEPYYSTVALAIRDEHSSGIFNIRQESYLVSSLSEITYRFYLINL

SEQ ID NO: 36387 - protein, 85 aa, unidentified; identical to SEQ ID NO: 36373
  REGION 1..85: note = Description of Unknown:hvTR_P20986 target sequence

SEQ ID NO: 36388 - protein, 85 aa, unidentified
  REGION 1..85: note = Description of Unknown:hvTR_P0DSP9 target sequence
FEPVPDLNLEASVELGEVNIDQTTPMIKENIGFISRSRRLFAHRSKDDERKLALRFFLQRLYFLDHREIHYLFRCVDAVKDVTIT

SEQ ID NO: 36389 - protein, 85 aa, unidentified; identical to SEQ ID NO: 36136
  REGION 1..85: note = Description of Unknown:hvTR_P0DSP9 target sequence

SEQ ID NO: 36390 - protein, 85 aa, unidentified
  REGION 1..85: note = Description of Unknown:hvTR_P0DSP9 target sequence
GIFNIRQESYLVSSLSEITYRFYLINLKSDLVQWSASTGAVINQMVNTVLITVYEKLQLVIENDSQFICSLAVESELPIKLLKDR

SEQ ID NO: 36391 - protein, 84 aa, unidentified
  REGION 1..84: note = Description of Unknown:hvTR_P0DSP9 target sequence
WSASTGAVINQMVNTVLITVYEKLQLVIENDSQFICSLAVESELPIKLLKDRNELFTKFINELKKTSSFKISKRDKDTLLKYFT

SEQ ID NO: 36392 - protein, 85 aa, unidentified
  REGION 1..85: note = Description of Unknown:hvTR_P0DSP9 target sequence
KENIGFISRSRRLFAHRSKDDERKLALRFFLQRLYFLDHREIHYLFRCVDAVKDVTITKKNNIIVAPYIALLTIASKGCKLTETM

SEQ ID NO: 36393 - protein, 85 aa, unidentified; identical to SEQ ID NO: 36140
  REGION 1..85: note = Description of Unknown:hvTR_P0DSP9 target sequence

SEQ ID NO: 36394 - protein, 85 aa, unidentified
  REGION 1..85: note = Description of Unknown:hvTR_P0DSP9 target sequence
KSDLVQWSASTGAVINQMVNTVLITVYEKLQLVIENDSQFICSLAVESELPIKLLKDRNELFTKFINELKKTSSFKISKRDKDTL

SEQ ID NO: 36395 - protein, 85 aa, unidentified
  REGION 1..85: note = Description of Unknown:vpeps_3A45_1 target sequence
WIKYETKLAYDSNHIGYMVNLENESSKIGRKNYHPNIHPTEKEFDFLVYRKKKDPNGNKVIADKIIGSGKNKRTTYWAPAIQKLE

SEQ ID NO: 36396 - protein, 85 aa, unidentified
  REGION 1..85: note = Description of Unknown:cds_NZ_WFIY01000004.1_cds_WP_155862656.1_448 target sequence
LKVAIPNKGRLQQPTLQFLSQVGIKPLASDERALMIPTSWDGVQLVMMRTEDIPNLVEAGAAEIGITGHDYVTESKADVEELIKL

SEQ ID NO: 36397 - protein, 85 aa, unidentified
  REGION 1..85: note = Description of Unknown:cds_NZ_WFIY01000004.1_cds_WP_155862656.1_448 target sequence
DFGKAKIVLAVPQSWDVENVEDLRRKRNGIRIATKYYNIAKEYLNKVDIDAKIVKISGAAEVMPSLGAADAIIDVVSTGTTLKLH

SEQ ID NO: 36398 - protein, 85 aa, unidentified
  REGION 1..85: note = Description of Unknown:cds_NZ_WFIY01000004.1_cds_WP_155862656.1_448 target sequence
GLKPIDEILQTYAVVIGNRYWMKSEEAERVNLVLTMMKGVISARGRKMIFMNVDDSKLEDVISSLPAMLSPAISRLSKTNAWEVI

SEQ ID NO: 36399 - protein, 84 aa, unidentified
  REGION 1..84: note = Description of Unknown:cds_NZ_WFIY01000004.1_cds_WP_155862656.1_448 target sequence
TMMKGVISARGRKMIFMNVDDSKLEDVISSLPAMLSPAISRLSKTNAWEVITVAEESQLPEVIAKAKAAGARDIVVVNIEKVVK

SEQ ID NO: 36400 - protein, 85 aa, unidentified
  REGION 1..85: note = Description of Unknown:cds_NZ_WFIY01000004.1_cds_WP_155862656.1_448 target sequence
ASDERALMIPTSWDGVQLVMMRTEDIPNLVEAGAAEIGITGHDYVTESKADVEELIKLDFGKAKIVLAVPQSWDVENVEDLRRKR

SEQ ID NO: 36401 - protein, 85 aa, unidentified
  REGION 1..85: note = Description of Unknown:cds_NZ_WFIY01000004.1_cds_WP_155862656.1_448 target sequence
NGIRIATKYYNIAKEYLNKVDIDAKIVKISGAAEVMPSLGAADAIIDVVSTGTTLKLHGLKPIDEILQTYAVVIGNRYWMKSEEA

SEQ ID NO: 36402 - protein, 85 aa, unidentified
  REGION 1..85: note = Description of Unknown:cds_NZ_WFIY01000004.1_cds_WP_155862656.1_448 target sequence
ERVNLVLTMMKGVISARGRKMIFMNVDDSKLEDVISSLPAMLSPAISRLSKTNAWEVITVAEESQLPEVIAKAKAAGARDIVVVN

SEQ ID NO: 36403 - protein, 85 aa, unidentified
  REGION 1..85: note = Description of Unknown:cds_NZ_WFIY01000004.1_cds_WP_155862884.1_725 target sequence
VNIILGGGISGLLLASLNKEESLILELQHEVGGLFATEEISGINISIIPPIVSNPNFMEGLKYHEYNPTIISEKSKYLKDKICKE

SEQ ID NO: 36404 - protein, 85 aa, unidentified
  REGION 1..85: note = Description of Unknown:cds_NZ_WFIY01000004.1_cds_WP_155862884.1_725 target sequence
CETFPSWLDFNRKKFWIDNFSEIISDLGKGVKIINEYPIIIKDKKIITNKGRSVIFDKIYNTISRKELLKLIGYNDPNLKSVSAF

SEQ ID NO: 36405 - protein, 85 aa, unidentified
  REGION 1..85: note = Description of Unknown:cds_NZ_WFIY01000004.1_cds_WP_155862884.1_725 target sequence
ITILITKGEKEWDVYINGDTGIVFSHIIRKNIESEIFVNYIYSFFTSKLPDIKKVFSDLKRTHLFSRDEILAYRSHVIKDAILYG

SEQ ID NO: 36406 - protein, 84 aa, unidentified
  REGION 1..84: note = Description of Unknown:cds_NZ_WFIY01000004.1_cds_WP_155862884.1_725 target sequence
EIFVNYIYSFFTSKLPDIKKVFSDLKRTHLFSRDEILAYRSHVIKDAILYGTPSIELDFIKNCGRLGLWKNISLEEAVDLVRKC

SEQ ID NO: 36407 - protein, 85 aa, unidentified
  REGION 1..85: note = Description of Unknown:cds_NZ_WFIY01000004.1_cds_WP_155862884.1_725 target sequence
QHEVGGLFATEEISGINISIIPPIVSNPNFMEGLKYHEYNPTIISEKSKYLKDKICKECETFPSWLDFNRKKFWIDNFSEIISDL

SEQ ID NO: 36408 - protein, 85 aa, unidentified
  REGION 1..85: note = Description of Unknown:cds_NZ_WFIY01000004.1_cds_WP_155862884.1_725 target sequence
GKGVKIINEYPIIIKDKKIITNKGRSVIFDKIYNTISRKELLKLIGYNDPNLKSVSAFITILITKGEKEWDVYINGDTGIVFSHI

SEQ ID NO: 36409 - protein, 85 aa, unidentified
  REGION 1..85: note = Description of Unknown:cds_NZ_WFIY01000004.1_cds_WP_155862884.1_725 target sequence
IRKNIESEIFVNYIYSFFTSKLPDIKKVFSDLKRTHLFSRDEILAYRSHVIKDAILYGTPSIELDFIKNCGRLGLWKNISLEEAV

SEQ ID NO: 36410 - protein, 85 aa, unidentified
  REGION 1..85: note = Description of Unknown:cds_NZ_WFIY01000004.1_cds_WP_155863021.1_903 target sequence
LISLTYLKLKEMSRKHNIEKAKKLIKTAKERGAKLIILPSLFPVGNTFEIYNNEKKMRSVVKNLAEKIPGNSTDILVKLAMEGEI

SEQ ID NO: 36411 - protein, 85 aa, unidentified
  REGION 1..85: note = Description of Unknown:cds_NZ_WFIY01000004.1_cds_WP_155863021.1_903 target sequence
HLIAGPLLEQAGPKIFLTTLVISPDGEIIGKYRKIMMSEKDVKLGISGGKEPIYVVLDKKYGVLSEDDLFSPEISRILALGGSQL

SEQ ID NO: 36412 - protein, 85 aa, unidentified
  REGION 1..85: note = Description of Unknown:cds_NZ_WFIY01000004.1_cds_WP_155863021.1_903 target sequence
IIGTTRPVNKKQDLIKYVAITRSVENGISYLINGEIIENEDGEIVGYTPTFIATPDSLVYKEAEDEDSIVLVESSMIIQNKEGVN

SEQ ID NO: 36413 - protein, 84 aa, unidentified
  REGION 1..84: note = Description of Unknown:cds_NZ_WFIY01000004.1_cds_WP_155863021.1_903 target sequence
GEIIENEDGEIVGYTPTFIATPDSLVYKEAEDEDSIVLVESSMIIQNKEGVNTRLNGIEPIIYGLCKSIKKTKMNEKPIPKPEG

SEQ ID NO: 36414 - protein, 85 aa, unidentified
  REGION 1..85: note = Description of Unknown:cds_NZ_WFIY01000004.1_cds_WP_155863021.1_903 target sequence
AKERGAKLIILPSLFPVGNTFEIYNNEKKMRSVVKNLAEKIPGNSTDILVKLAMEGEIHLIAGPLLEQAGPKIFLTTLVISPDGE

SEQ ID NO: 36415 - protein, 85 aa, unidentified
  REGION 1..85: note = Description of Unknown:cds_NZ_WFIY01000004.1_cds_WP_155863021.1_903 target sequence
IIGKYRKIMMSEKDVKLGISGGKEPIYVVLDKKYGVLSEDDLFSPEISRILALGGSQLIIGTTRPVNKKQDLIKYVAITRSVENG

SEQ ID NO: 36416 - protein, 85 aa, unidentified
  REGION 1..85: note = Description of Unknown:cds_NZ_WFIY01000004.1_cds_WP_155863021.1_903 target sequence
ISYLINGEIIENEDGEIVGYTPTFIATPDSLVYKEAEDEDSIVLVESSMIIQNKEGVNTRLNGIEPIIYGLCKSIKKTKMNEKPI

SEQ ID NO: 36417 - protein, 85 aa, unidentified
  REGION 1..85: note = Description of Unknown:cds_NZ_WFIY01000004.1_cds_WP_155863172.1_1102 target sequence
KGLLTALVTPFNSSGDLNLDALDTLIKFNLSRGVDGFWVLGTTGEFNMLSIEEKMQVAKKVIDVAKGKVLLGVNENSTYNSLKLA

SEQ ID NO: 36418 - protein, 85 aa, unidentified
  REGION 1..85: note = Description of Unknown:cds_NZ_WFIY01000004.1_cds_WP_155863172.1_1102 target sequence
KYFIDLGVNGIFSVPPIYHKPSEKGLIHYYEDLGKFGEEVYVYNIPSLVGYNIPLTVLQKLVEDGIIQGMKYTTSDFESLINYMR

SEQ ID NO: 36419 - protein, 85 aa, unidentified
  REGION 1..85: note = Description of Unknown:cds_NZ_WFIY01000004.1_cds_WP_155863172.1_1102 target sequence
FLKNLNSKFEFLAGNDKFILISLLYGVDGIVSGVSNFAPEVVSQLYKNVKEGKITEALKLQEIVDKLVEVTSLADYPSGIKIALR

SEQ ID NO: 36420 - protein, 84 aa, unidentified
  REGION 1..84: note = Description of Unknown:cds_NZ_WFIY01000004.1_cds_WP_155863172.1_1102 target sequence
VSNFAPEVVSQLYKNVKEGKITEALKLQEIVDKLVEVTSLADYPSGIKIALRYRGIDVGSSRKPLEENITADSAIYHTLKEFNL

SEQ ID NO: 36421 - protein, 85 aa, unidentified
  REGION 1..85: note = Description of Unknown:cds_NZ_WFIY01000004.1_cds_WP_155863172.1_1102 target sequence
FNLSRGVDGFWVLGTTGEFNMLSIEEKMQVAKKVIDVAKGKVLLGVNENSTYNSLKLAKYFIDLGVNGIFSVPPIYHKPSEKGLI

SEQ ID NO: 36422 - protein, 85 aa, unidentified
  REGION 1..85: note = Description of Unknown:cds_NZ_WFIY01000004.1_cds_WP_155863172.1_1102 target sequence
HYYEDLGKFGEEVYVYNIPSLVGYNIPLTVLQKLVEDGIIQGMKYTTSDFESLINYMRFLKNLNSKFEFLAGNDKFILISLLYGV

SEQ ID NO: 36423 - protein, 85 aa, unidentified
  REGION 1..85: note = Description of Unknown:cds_NZ_WFIY01000004.1_cds_WP_155863172.1_1102 target sequence
DGIVSGVSNFAPEVVSQLYKNVKEGKITEALKLQEIVDKLVEVTSLADYPSGIKIALRYRGIDVGSSRKPLEENITADSAIYHTL

SEQ ID NO: 36424 - protein, 85 aa, unidentified
  REGION 1..85: note = Description of Unknown:cds_NZ_WFIY01000004.1_cds_WP_155863809.1_1698 target sequence
VTIKVGALADSGDLYPFIPLIEGKIKPEGFNLEIEIIPTVQDVNEKVLKKEVDVSVPSAAMYPYIQDDYYIMSNAVASAVDGITG

SEQ ID NO: 36425 - protein, 85 aa, unidentified
  REGION 1..85: note = Description of Unknown:cds_NZ_WFIY01000004.1_cds_WP_155863809.1_1698 target sequence
MPILASKEMSLDEVKKSRLIVHGPNTSAFTLYKLLIGKYGKLVIIKRVLDEIKGLGTEGDVLVAVHEIKMMYAMQKLGVKYYKIG

SEQ ID NO: 36426 - protein, 85 aa, unidentified
  REGION 1..85: note = Description of Unknown:cds_NZ_WFIY01000004.1_cds_WP_155863809.1_1698 target sequence
SMWDMWKNISNNAPMPMGMVVVSKELGKDLALKFKEVYEKSKKYAEKNLQEIIPKDVEIMREAQGANLDKEIVEKTIWADIQEYN

SEQ ID NO: 36427 - protein, 84 aa, unidentified
  REGION 1..84: note = Description of Unknown:cds_NZ_WFIY01000004.1_cds_WP_155863809.1_1698 target sequence
FKEVYEKSKKYAEKNLQEIIPKDVEIMREAQGANLDKEIVEKTIWADIQEYNVPESEVIKGLETFYRLTEEKGILPKVKKLDLI

SEQ ID NO: 36428 - protein, 85 aa, unidentified
  REGION 1..85: note = Description of Unknown:cds_NZ_WFIY01000004.1_cds_WP_155863809.1_1698 target sequence
EGFNLEIEIIPTVQDVNEKVLKKEVDVSVPSAAMYPYIQDDYYIMSNAVASAVDGITGMPILASKEMSLDEVKKSRLIVHGPNTS

SEQ ID NO: 36429 - protein, 85 aa, unidentified
  REGION 1..85: note = Description of Unknown:cds_NZ_WFIY01000004.1_cds_WP_155863809.1_1698 target sequence
AFTLYKLLIGKYGKLVIIKRVLDEIKGLGTEGDVLVAVHEIKMMYAMQKLGVKYYKIGSMWDMWKNISNNAPMPMGMVVVSKELG

SEQ ID NO: 36430 - protein, 85 aa, unidentified
  REGION 1..85: note = Description of Unknown:cds_NZ_WFIY01000004.1_cds_WP_155863809.1_1698 target sequence
KDLALKFKEVYEKSKKYAEKNLQEIIPKDVEIMREAQGANLDKEIVEKTIWADIQEYNVPESEVIKGLETFYRLTEEKGILPKVK

SEQ ID NO: 36431 - protein, 85 aa, unidentified
  REGION 1..85: note = Description of Unknown:hvTR_Q8JPX6 target sequence
EHSRERGRSSNMRHNSREPYENPSRSRSLSRDPNQVDRRQPRSASQIRVPNLFHRKKTDALIVPPAPKDICPTLKKGFLCDSKFC

SEQ ID NO: 36432 - protein, 85 aa, unidentified
  REGION 1..85: note = Description of Unknown:hvTR_Q8JPX6 target sequence
KKDHQLDSLNDHELLLLIARRTCGIIESNSQITSPKDMRLANPTAEDFSQGNSPKLTLAVLLQIAEHWATRDLRQIEDSKLRALL

SEQ ID NO: 36433 - protein, 85 aa, unidentified
  REGION 1..85: note = Description of Unknown:hvTR_Q8JPX6 target sequence
TLCAVLTRKFSKSQLGLLCETHLRHEGLGQDQADSVLEVYQRLHSDKGGNFEAALWQQWDRQSLIMFISAFLNIALQIPCESSSV

SEQ ID NO: 36434 - protein, 84 aa, unidentified
  REGION 1..84: note = Description of Unknown:hvTR_Q8JPX6 target sequence
ADSVLEVYQRLHSDKGGNFEAALWQQWDRQSLIMFISAFLNIALQIPCESSSVVVSGLATLYPAQDNSTPSEATNDTTWSSTVE

SEQ ID NO: 36435 - protein, 85 aa, unidentified
  REGION 1..85: note = Description of Unknown:hvTR_Q8JPX6 target sequence
SLSRDPNQVDRRQPRSASQIRVPNLFHRKKTDALIVPPAPKDICPTLKKGFLCDSKFCKKDHQLDSLNDHELLLLIARRTCGIIE

SEQ ID NO: 36436 - protein, 85 aa, unidentified
  REGION 1..85: note = Description of Unknown:hvTR_Q8JPX6 target sequence
SNSQITSPKDMRLANPTAEDFSQGNSPKLTLAVLLQIAEHWATRDLRQIEDSKLRALLTLCAVLTRKFSKSQLGLLCETHLRHEG

SEQ ID NO: 36437 - protein, 85 aa, unidentified
  REGION 1..85: note = Description of Unknown:hvTR_Q8JPX6 target sequence
LGQDQADSVLEVYQRLHSDKGGNFEAALWQQWDRQSLIMFISAFLNIALQIPCESSSVVVSGLATLYPAQDNSTPSEATNDTTWS

SEQ ID NO: 36438 - protein, 85 aa, unidentified
  REGION 1..85: note = Description of Unknown:hvTR_V5LTE9 target sequence
KRASACTKSPSARQPTDESPNTAQAPKKFDCRAMKCIEAVEFARSLSTSQTKAIESVTLTPSQYPSCSNISVTLVESLASRLVAP

SEQ ID NO: 36439 - protein, 85 aa, unidentified
  REGION 1..85: note = Description of Unknown:hvTR_V5LTE9 target sequence
LVMLKGEFKIHASKKTDMQRQGPDSGFFARIKPVSASQMLYQLLEGIYTNILEGTRVPHSLRSFNVETSTDATFKSGCIYINRLS

SEQ ID NO: 36440 - protein, 85 aa, unidentified
  REGION 1..85: note = Description of Unknown:hvTR_V5LTE9 target sequence
GALVEFTHDDGAPSQICPIMREIEALASRDAQMATAILSPIVLYRAGCEAKVTFALKKVTMPRECTLTVLGLDGESTSVKMSETP

SEQ ID NO: 36441 - protein, 84 aa, unidentified
  REGION 1..84: note = Description of Unknown:hvTR_V5LTE9 target sequence
MATAILSPIVLYRAGCEAKVTFALKKVTMPRECTLTVLGLDGESTSVKMSETPAAFGEEQEVRGLGVVDPATLEEEDAESPFNI

SEQ ID NO: 36442 - protein, 85 aa, unidentified
  REGION 1..85: note = Description of Unknown:hvTR_V5LTE9 target sequence
KFDCRAMKCIEAVEFARSLSTSQTKAIESVTLTPSQYPSCSNISVTLVESLASRLVAPLVMLKGEFKIHASKKTDMQRQGPDSGF

SEQ ID NO: 36443 - protein, 85 aa, unidentified
  REGION 1..85: note = Description of Unknown:hvTR_V5LTE9 target sequence
FARIKPVSASQMLYQLLEGIYTNILEGTRVPHSLRSFNVETSTDATFKSGCIYINRLSGALVEFTHDDGAPSQICPIMREIEALA

SEQ ID NO: 36444 - protein, 85 aa, unidentified
  REGION 1..85: note = Description of Unknown:hvTR_V5LTE9 target sequence
SRDAQMATAILSPIVLYRAGCEAKVTFALKKVTMPRECTLTVLGLDGESTSVKMSETPAAFGEEQEVRGLGVVDPATLEEEDAES

SEQ ID NO: 36445 - protein, 85 aa, unidentified
  REGION 1..85: note = Description of Unknown:cds_NC_024711.1_cds_YP_009052548.1_71 target sequence
RQFLLAGKVAYGADLPLAAGAVAFTYLANGKETIDADGTKITDKFYINLGREANGPVVLPAYKKHLTFVKGVYQPATTFSANLTI

SEQ ID NO: 36446 - protein, 85 aa, unidentified
  REGION 1..85: note = Description of Unknown:cds_NC_024711.1_cds_YP_009052548.1_71 target sequence
GDVNAYSDYSIMIVKKGLKFNERNRWTATIHTGLNPTANDVAKKLANQINNNTVGHGIKASVAEAKITLTAESKGIDYEILGADE

SEQ ID NO: 36447 - protein, 85 aa, unidentified
  REGION 1..85: note = Description of Unknown:cds_NC_024711.1_cds_YP_009052548.1_71 target sequence
LVGISVTVTATGFPAYGDAAYITDLANKAAADAGIEYTYRDTYTELYPTYPLNPLKQPDSADAGYTIFTLRFAVPREMKTRDEVV

SEQ ID NO: 36448 - protein, 84 aa, unidentified
  REGION 1..84: note = Description of Unknown:cds_NC_024711.1_cds_YP_009052548.1_71 target sequence
AGIEYTYRDTYTELYPTYPLNPLKQPDSADAGYTIFTLRFAVPREMKTRDEVVHQIVQIAFPTGAAAIATVETILKAIATEEKA

SEQ ID NO: 36449 - protein, 85 aa, unidentified
  REGION 1..85: note = Description of Unknown:cds_NC_024711.1_cds_YP_009052548.1_71 target sequence
ANGKETIDADGTKITDKFYINLGREANGPVVLPAYKKHLTFVKGVYQPATTFSANLTIGDVNAYSDYSIMIVKKGLKFNERNRWT

SEQ ID NO: 36450 - protein, 85 aa, unidentified
  REGION 1..85: note = Description of Unknown:cds_NC_024711.1_cds_YP_009052548.1_71 target sequence
ATIHTGLNPTANDVAKKLANQINNNTVGHGIKASVAEAKITLTAESKGIDYEILGADELVGISVTVTATGFPAYGDAAYITDLAN

SEQ ID NO: 36451 - protein, 85 aa, unidentified
  REGION 1..85: note = Description of Unknown:cds_NC_024711.1_cds_YP_009052548.1_71 target sequence
KAAADAGIEYTYRDTYTELYPTYPLNPLKQPDSADAGYTIFTLRFAVPREMKTRDEVVHQIVQIAFPTGAAAIATVETILKAIAT

SEQ ID NO: 36452 - protein, 85 aa, unidentified
  REGION 1..85: note = Description of Unknown:cds_NZ_WFIY01000004.1_cds_WP_155862432.1_175 target sequence
IGLIGLGVMGWRIGANLANDKKLDIVWDRNEEKRKEFAKKYNVKEAKTPQELVQSSDIIISMLADDNAVNSVISPLAQLMKGKIL

SEQ ID NO: 36453 - protein, 85 aa, unidentified
  REGION 1..85: note = Description of Unknown:cds_NZ_WFIY01000004.1_cds_WP_155862432.1_175 target sequence
IDMSTISPSLSITLANKIKENGGVMYDAPVIGTSVFVEQKKITVLVGGPKEYFDKVKDLLSSTSNNIVYMGDNGFGLYAKLVNNL

SEQ ID NO: 36454 - protein, 85 aa, unidentified
  REGION 1..85: note = Description of Unknown:cds_NZ_WFIY01000004.1_cds_WP_155862432.1_175 target sequence
LLGAYAVALAEAYNFGIKSGLDKDKVAKILMELSSAKSPTSEIKTPKMVSGDYSTQFATKHMRKDLEIIQREAQNLKVITPMSSL

SEQ ID NO: 36455 - protein, 84 aa, unidentified
  REGION 1..84: note = Description of Unknown:cds_NZ_WFIY01000004.1_cds_WP_155862432.1_175 target sequence
LSSAKSPTSEIKTPKMVSGDYSTQFATKHMRKDLEIIQREAQNLKVITPMSSLALQFYRMAEALGYSESDYVSVLEIFKKLSPS

SEQ ID NO: 36456 - protein, 85 aa, unidentified
  REGION 1..85: note = Description of Unknown:cds_NZ_WFIY01000004.1_cds_WP_155862432.1_175 target sequence
DRNEEKRKEFAKKYNVKEAKTPQELVQSSDIIISMLADDNAVNSVISPLAQLMKGKILIDMSTISPSLSITLANKIKENGGVMYD

SEQ ID NO: 36457 - protein, 85 aa, unidentified
  REGION 1..85: note = Description of Unknown:cds_NZ_WFIY01000004.1_cds_WP_155862432.1_175 target sequence
APVIGTSVFVEQKKITVLVGGPKEYFDKVKDLLSSTSNNIVYMGDNGFGLYAKLVNNLLLGAYAVALAEAYNFGIKSGLDKDKVA

SEQ ID NO: 36458 - protein, 85 aa, unidentified
  REGION 1..85: note = Description of Unknown:cds_NZ_WFIY01000004.1_cds_WP_155862432.1_175 target sequence
KILMELSSAKSPTSEIKTPKMVSGDYSTQFATKHMRKDLEIIQREAQNLKVITPMSSLALQFYRMAEALGYSESDYVSVLEIFKK

SEQ ID NO: 36459 - protein, 85 aa, unidentified
  REGION 1..85: note = Description of Unknown:cds_NZ_WFIY01000004.1_cds_WP_155862755.1_567 target sequence
ITVEEIYGEDSWFTYFVRGNEVVHVSQIGGARKVGSISLGNRSVVIWEVPENEITNGYYVNYNPKPRLFRFTRPNILGRDLTFDL

SEQ ID NO: 36460 - protein, 85 aa, unidentified
  REGION 1..85: note = Description of Unknown:cds_NZ_WFIY01000004.1_cds_WP_155862755.1_567 target sequence
MLSKTLTPSPLLQLRPRLFGIERMPLFTFRRIAPLEEEIKSSVQKLRLRLPIINTVEAEVDAMLRPIPQERVRVLNSYSEEIYSQ

SEQ ID NO: 36461 - protein, 85 aa, unidentified
  REGION 1..85: note = Description of Unknown:cds_NZ_WFIY01000004.1_cds_WP_155862755.1_567 target sequence
WVLTKVIEAIIEMGGKLIDSFVLSIDSKIVEILYHPNPGIDIHVLVSDKREYININNIQNYKNKEVLQIDTGVRTVGKVGITVSF

SEQ ID NO: 36462 - protein, 84 aa, unidentified
  REGION 1..84: note = Description of Unknown:cds_NZ_WFIY01000004.1_cds_WP_155862755.1_567 target sequence
LYHPNPGIDIHVLVSDKREYININNIQNYKNKEVLQIDTGVRTVGKVGITVSFEGNAQFVLTPRNLEEIKKFKEEVRNEIRKKL

SEQ ID NO: 36463 - protein, 85 aa, unidentified
  REGION 1..85: note = Description of Unknown:cds_NZ_WFIY01000004.1_cds_WP_155862755.1_567 target sequence
IGGARKVGSISLGNRSVVIWEVPENEITNGYYVNYNPKPRLFRFTRPNILGRDLTFDLMLSKTLTPSPLLQLRPRLFGIERMPLF

SEQ ID NO: 36464 - protein, 85 aa, unidentified
  REGION 1..85: note = Description of Unknown:cds_NZ_WFIY01000004.1_cds_WP_155862755.1_567 target sequence
TFRRIAPLEEEIKSSVQKLRLRLPIINTVEAEVDAMLRPIPQERVRVLNSYSEEIYSQWVLTKVIEAIIEMGGKLIDSFVLSIDS

SEQ ID NO: 36465 - protein, 85 aa, unidentified
  REGION 1..85: note = Description of Unknown:cds_NZ_WFIY01000004.1_cds_WP_155862755.1_567 target sequence
KIVEILYHPNPGIDIHVLVSDKREYININNIQNYKNKEVLQIDTGVRTVGKVGITVSFEGNAQFVLTPRNLEEIKKFKEEVRNEI

SEQ ID NO: 36466 - protein, 85 aa, unidentified
  REGION 1..85: note = Description of Unknown:cds_NZ_WFIY01000004.1_cds_WP_155864130.1_2082 target sequence
NVRRVRTYIPGLDEILYGGIPERNIVLVSGGPGTGKSISAQQFIYNGLIRGEAGVYVALEEHPVSVLRSFHHFGWDVTKYEKEGK

SEQ ID NO: 36467 - protein, 85 aa, unidentified
  REGION 1..85: note = Description of Unknown:cds_NZ_WFIY01000004.1_cds_WP_155864130.1_2082 target sequence
FAIVDAFTGGYGSTAQKEKYVVKNVDDVKELADVLRQAIKDLKATRVAIDSVSTLYLTKPAMARGIVMTLKRIISGLGCTAFFVS

SEQ ID NO: 36468 - protein, 85 aa, unidentified
  REGION 1..85: note = Description of Unknown:cds_NZ_WFIY01000004.1_cds_WP_155864130.1_2082 target sequence
QVSVGERGFGGPGVEHAVDGIIRMDLDEVEGKMYRSIIVWKMRDTKISMVRHPMEITDNGIIVEWDKYLKVTNFSATVEPLPKEE

SEQ ID NO: 36469 - protein, 84 aa, unidentified
  REGION 1..84: note = Description of Unknown:cds_NZ_WFIY01000004.1_cds_WP_155864130.1_2082 target sequence
MYRSIIVWKMRDTKISMVRHPMEITDNGIIVEWDKYLKVTNFSATVEPLPKEEVDEMKKAMEEEEKAEKEKVTEEIQEVEEDEG

SEQ ID NO: 36470 - protein, 85 aa, unidentified
  REGION 1..85: note = Description of Unknown:cds_NZ_WFIY01000004.1_cds_WP_155864130.1_2082 target sequence
VSGGPGTGKSISAQQFIYNGLIRGEAGVYVALEEHPVSVLRSFHHFGWDVTKYEKEGKFAIVDAFTGGYGSTAQKEKYVVKNVDD

SEQ ID NO: 36471 - protein, 85 aa, unidentified
  REGION 1..85: note = Description of Unknown:cds_NZ_WFIY01000004.1_cds_WP_155864130.1_2082 target sequence
VKELADVLRQAIKDLKATRVAIDSVSTLYLTKPAMARGIVMTLKRIISGLGCTAFFVSQVSVGERGFGGPGVEHAVDGIIRMDLD

SEQ ID NO: 36472 - protein, 85 aa, unidentified
  REGION 1..85: note = Description of Unknown:cds_NZ_WFIY01000004.1_cds_WP_155864130.1_2082 target sequence
EVEGKMYRSIIVWKMRDTKISMVRHPMEITDNGIIVEWDKYLKVTNFSATVEPLPKEEVDEMKKAMEEEEKAEKEKVTEEIQEVE

SEQ ID NO: 36473 - protein, 85 aa, unidentified
  REGION 1..85: note = Description of Unknown:cds_NC_035460.1_cds_YP_009408045.1_94 target sequence
ELVIKYIREGTHVLLPFYETLPDLKLFLGKSPLPSLEYGASYFLQLSRVNDLNKFPTDMISLYTHDIMLPETDLNKVCELLHIQS

SEQ ID NO: 36474 - protein, 85 aa, unidentified
  REGION 1..85: note = Description of Unknown:cds_NC_035460.1_cds_YP_009408045.1_94 target sequence
VKSYGKSVKADAIIVDMSAKNKFYKKDRDIVRSNNYLTENNLYVSDYKMFTFEVFRPLFDIVNEKYCIIKLPTLIGKSVIDTLRI

SEQ ID NO: 36475 - protein, 85 aa, unidentified
  REGION 1..85: note = Description of Unknown:cds_NC_035460.1_cds_YP_009408045.1_94 target sequence
YCSLFKTVRLLKCASDSWLKDSAIMIASDIHKKNMDKFMNYIKTVTNSTTWKDSNNVQFSILSGSCEKEFINKFLDFSTKIYESL

SEQ ID NO: 36476 - protein, 84 aa, unidentified
  REGION 1..84: note = Description of Unknown:cds_NC_035460.1_cds_YP_009408045.1_94 target sequence
KNMDKFMNYIKTVTNSTTWKDSNNVQFSILSGSCEKEFINKFLDFSTKIYESLYYVHSLLYASMTSESKSIENEYQKKLSKLLL

SEQ ID NO: 36477 - protein, 85 aa, unidentified
  REGION 1..85: note = Description of Unknown:cds_NC_035460.1_cds_YP_009408045.1_94 target sequence
LGKSPLPSLEYGASYFLQLSRVNDLNKFPTDMISLYTHDIMLPETDLNKVCELLHIQSVKSYGKSVKADAIIVDMSAKNKFYKKD

SEQ ID NO: 36478 - protein, 85 aa, unidentified
  REGION 1..85: note = Description of Unknown:cds_NC_035460.1_cds_YP_009408045.1_94 target sequence
RDIVRSNNYLTENNLYVSDYKMFTFEVFRPLFDIVNEKYCIIKLPTLIGKSVIDTLRIYCSLFKTVRLLKCASDSWLKDSAIMIA

SEQ ID NO: 36479 - protein, 85 aa, unidentified
  REGION 1..85: note = Description of Unknown:cds_NC_035460.1_cds_YP_009408045.1_94 target sequence
SDIHKKNMDKFMNYIKTVTNSTTWKDSNNVQFSILSGSCEKEFINKFLDFSTKIYESLYYVHSLLYASMTSESKSIENEYQKKLS

SEQ ID NO: 36480 - protein, 85 aa, unidentified
  REGION 1..85: note = Description of Unknown:hvTR_Q2HR82 target sequence
PRMKDIPTKSSPGTDNSEKDEAVIEEDLSLNGQPFFTDNTDGGENEVSWTSSLLSTYVGCQPPAIPVCETVIDLTAPSQSGAPGD

SEQ ID NO: 36481 - protein, 85 aa, unidentified
  REGION 1..85: note = Description of Unknown:hvTR_Q2HR82 target sequence
EHLPCSLNAETKFHIPDPSWTLSHTPPRGPHISQQLPTRRSKRRLHRKFEEERLCTKAKQGAGRPVPASVVKVGNITPHYGEELT

SEQ ID NO: 36482 - protein, 85 aa, unidentified
  REGION 1..85: note = Description of Unknown:hvTR_Q2HR82 target sequence
RGDAVPAAPITPPYPRVQRPAQPTHVLFSPVFVSLKAEVCDQSHSPTRKQGRYGRVSSKAYTRQLQQALEEKDAQLCFLAARLEA

SEQ ID NO: 36483 - protein, 84 aa, unidentified
  REGION 1..84: note = Description of Unknown:hvTR_Q2HR82 target sequence
FVSLKAEVCDQSHSPTRKQGRYGRVSSKAYTRQLQQALEEKDAQLCFLAARLEAHKEQIIFLRDMLMRMCQQPASPTDAPLPPC

SEQ ID NO: 36484 - protein, 85 aa, unidentified
  REGION 1..85: note = Description of Unknown:hvTR_Q2HR82 target sequence
LSLNGQPFFTDNTDGGENEVSWTSSLLSTYVGCQPPAIPVCETVIDLTAPSQSGAPGDEHLPCSLNAETKFHIPDPSWTLSHTPP

SEQ ID NO: 36485 - protein, 85 aa, unidentified
  REGION 1..85: note = Description of Unknown:hvTR_Q2HR82 target sequence
RGPHISQQLPTRRSKRRLHRKFEEERLCTKAKQGAGRPVPASVVKVGNITPHYGEELTRGDAVPAAPITPPYPRVQRPAQPTHVL

SEQ ID NO: 36486 - protein, 85 aa, unidentified
  REGION 1..85: note = Description of Unknown:hvTR_Q2HR82 target sequence
FSPVFVSLKAEVCDQSHSPTRKQGRYGRVSSKAYTRQLQQALEEKDAQLCFLAARLEAHKEQIIFLRDMLMRMCQQPASPTDAPL

SEQ ID NO: 36487 - protein, 85 aa, unidentified
  REGION 1..85: note = Description of Unknown:cds_NZ_WFIY01000004.1_cds_337 target sequence
VKLQLGSPPSDGNYLDAFIIALKAAEAGEGTVKLYSTAVKDFLEFIKKDPKSVTSEDVNRWIIHLMSKEGKIKGTEMKRARSVTL

SEQ ID NO: 36488 - protein, 85 aa, unidentified
  REGION 1..85: note = Description of Unknown:cds_NZ_WFIY01000004.1_cds_337 target sequence
RNYVIAVRRFLKWIGINVNPVIPRARRKEIRALNEDDIKRLLEATRRLRDKLILRLFLDTGLRSKELLSLRVEDIDLKNRMIRVR

SEQ ID NO: 36489 - protein, 85 aa, unidentified
  REGION 1..85: note = Description of Unknown:cds_NZ_WFIY01000004.1_cds_337 target sequence
ETKNGEERIVFFTEETEKLLRKYLAKQGSSERLFPMTYQALYKLIKRLGERAGIKGLRPHILRHTFATIAIRKGLPLPAVQRLLG

SEQ ID NO: 36490 - protein, 84 aa, unidentified
  REGION 1..84: note = Description of Unknown:cds_NZ_WFIY01000004.1_cds_337 target sequence
LFPMTYQALYKLIKRLGERAGIKGLRPHILRHTFATIAIRKGLPLPAVQRLLGHKDIKTTQIYTHLVLEDLMQAYKKVFEENTT

SEQ ID NO: 36491 - protein, 85 aa, unidentified
  REGION 1..85: note = Description of Unknown:cds_NZ_WFIY01000004.1_cds_337 target sequence
GEGTVKLYSTAVKDFLEFIKKDPKSVTSEDVNRWIIHLMSKEGKIKGTEMKRARSVTLRNYVIAVRRFLKWIGINVNPVIPRARR

SEQ ID NO: 36492 - protein, 85 aa, unidentified
  REGION 1..85: note = Description of Unknown:cds_NZ_WFIY01000004.1_cds_337 target sequence
KEIRALNEDDIKRLLEATRRLRDKLILRLFLDTGLRSKELLSLRVEDIDLKNRMIRVRETKNGEERIVFFTEETEKLLRKYLAKQ

SEQ ID NO: 36493 - protein, 85 aa, unidentified
  REGION 1..85: note = Description of Unknown:cds_NZ_WFIY01000004.1_cds_337 target sequence
GSSERLFPMTYQALYKLIKRLGERAGIKGLRPHILRHTFATIAIRKGLPLPAVQRLLGHKDIKTTQIYTHLVLEDLMQAYKKVFE

SEQ ID NO: 36494 - protein, 85 aa, unidentified
  REGION 1..85: note = Description of Unknown:cds_NZ_WFIY01000004.1_cds_WP_155862876.1_715 target sequence
LGRVIVGVTYDLLRWEERNLIQEATKLGHKVIPIYTKDFYHLFSEDNQFQNLDVVLQRNTSHQRALSTSLIFETLGYNVINDSRT

SEQ ID NO: 36495 - protein, 85 aa, unidentified
  REGION 1..85: note = Description of Unknown:cds_NZ_WFIY01000004.1_cds_WP_155862876.1_715 target sequence
LINCENKLITTALLSRHNIKVPKTAIAFSKDKALEVASKLGYPAVIKPIEGSWGRMVAKAVDEDTLRSFLEYQDYTSVGFKNVYY

SEQ ID NO: 36496 - protein, 85 aa, unidentified
  REGION 1..85: note = Description of Unknown:cds_NZ_WFIY01000004.1_cds_WP_155862876.1_715 target sequence
IQEFVKKPDRDIRIFVIGDEAPVGIYRVNTKNWRTNTALGAIAEPLKIDDELKDLALKVKEVIGGFFLGIDVFEDKERGYLVDEV

SEQ ID NO: 36497 - protein, 84 aa, unidentified
  REGION 1..84: note = Description of Unknown:cds_NZ_WFIY01000004.1_cds_WP_155862876.1_715 target sequence
WRTNTALGAIAEPLKIDDELKDLALKVKEVIGGFFLGIDVFEDKERGYLVDEVNGVPEFKNTVRVNQFNLSEYLIRKIEEWIRK

SEQ ID NO: 36498 - protein, 85 aa, unidentified
  REGION 1..85: note = Description of Unknown:cds_NZ_WFIY01000004.1_cds_WP_155862876.1_715 target sequence
GHKVIPIYTKDFYHLFSEDNQFQNLDVVLQRNTSHQRALSTSLIFETLGYNVINDSRTLINCENKLITTALLSRHNIKVPKTAIA

SEQ ID NO: 36499 - protein, 85 aa, unidentified
  REGION 1..85: note = Description of Unknown:cds_NZ_WFIY01000004.1_cds_WP_155862876.1_715 target sequence
FSKDKALEVASKLGYPAVIKPIEGSWGRMVAKAVDEDTLRSFLEYQDYTSVGFKNVYYIQEFVKKPDRDIRIFVIGDEAPVGIYR

SEQ ID NO: 36500 - protein, 85 aa, unidentified
  REGION 1..85: note = Description of Unknown:cds_NZ_WFIY01000004.1_cds_WP_155862876.1_715 target sequence
VNTKNWRTNTALGAIAEPLKIDDELKDLALKVKEVIGGFFLGIDVFEDKERGYLVDEVNGVPEFKNTVRVNQFNLSEYLIRKIEE

SEQ ID NO: 36501 - protein, 85 aa, unidentified
  REGION 1..85: note = Description of Unknown:cds_NZ_WFIY01000004.1_cds_WP_155863232.1_1179 target sequence
KLFKYIRLAISYAILIFMVLFSVFPLYYIIMTSLSNAPNLISLDVSDLFPKHIYFTAYRELLTVNYYGGSFPLWIRNSLILASST

SEQ ID NO: 36502 - protein, 85 aa, unidentified
  REGION 1..85: note = Description of Unknown:cds_NZ_WFIY01000004.1_cds_WP_155863232.1_1179 target sequence
ALISILLAMLTGYALSRLNIPAKKTLAAFIYIVTFFPYTATAVPLYLMFAKFHMLNYIGLIIAYTPGTSIFAAFLAKLAIDSIPP

SEQ ID NO: 36503 - protein, 85 aa, unidentified
  REGION 1..85: note = Description of Unknown:cds_NZ_WFIY01000004.1_cds_WP_155863232.1_1179 target sequence
SYEEIAMVDGLSRFQVFLRIIMRLALPIVALTAILSFSGAYLDFALAYAFLLPHISDWTATIGLYYAAGLLNYASAPAYNLFAAG

SEQ ID NO: 36504 - protein, 84 aa, unidentified
  REGION 1..84: note = Description of Unknown:cds_NZ_WFIY01000004.1_cds_WP_155863232.1_1179 target sequence
TAILSFSGAYLDFALAYAFLLPHISDWTATIGLYYAAGLLNYASAPAYNLFAAGSVIMGIPLTALFIASQRMMTRAYSTLAGVK

SEQ ID NO: 36505 - protein, 85 aa, unidentified
  REGION 1..85: note = Description of Unknown:cds_NZ_WFIY01000004.1_cds_WP_155863232.1_1179 target sequence
YIIMTSLSNAPNLISLDVSDLFPKHIYFTAYRELLTVNYYGGSFPLWIRNSLILASSTALISILLAMLTGYALSRLNIPAKKTLA

SEQ ID NO: 36506 - protein, 85 aa, unidentified
  REGION 1..85: note = Description of Unknown:cds_NZ_WFIY01000004.1_cds_WP_155863232.1_1179 target sequence
AFIYIVTFFPYTATAVPLYLMFAKFHMLNYIGLIIAYTPGTSIFAAFLAKLAIDSIPPSYEEIAMVDGLSRFQVFLRIIMRLALP

SEQ ID NO: 36507 - protein, 85 aa, unidentified
  REGION 1..85: note = Description of Unknown:cds_NZ_WFIY01000004.1_cds_WP_155863232.1_1179 target sequence
IVALTAILSFSGAYLDFALAYAFLLPHISDWTATIGLYYAAGLLNYASAPAYNLFAAGSVIMGIPLTALFIASQRMMTRAYSTLA

SEQ ID NO: 36508 - protein, 85 aa, unidentified
  REGION 1..85: note = Description of Unknown:cds_NC_009884.1_cds_YP_001496968.1_43 target sequence
ISKEYISLLSALLTKGYSKVAVYSYSYSYSNYSSVSYITFNFPTGIMMVAKEGGIVQATSLASIQSLIESGGELSITYLATFTTS

SEQ ID NO: 36509 - protein, 85 aa, unidentified
  REGION 1..85: note = Description of Unknown:cds_NC_009884.1_cds_YP_001496968.1_43 target sequence
FSANEIDMYAVIGTTMLYKIASVTGSFTSSSDDNLSVEWTIDVVVGNIFNVSSGSSGVTAYSLPTGQCTSLSGQLIMYPYLVHLL

SEQ ID NO: 36510 - protein, 85 aa, unidentified
  REGION 1..85: note = Description of Unknown:cds_NC_009884.1_cds_YP_001496968.1_43 target sequence
IAYTLIPSTSFTVQSKYPNLPLATMLATVPTPTSPTQLQGITSFMYACGNTPVLCYPVYNDVGTAIITSSVNCTSLTIVALYQIG

SEQ ID NO: 36511 - protein, 84 aa, unidentified
  REGION 1..84: note = Description of Unknown:cds_NC_009884.1_cds_YP_001496968.1_43 target sequence
PTSPTQLQGITSFMYACGNTPVLCYPVYNDVGTAIITSSVNCTSLTIVALYQIGSTYLAYMQSPANVTLNVGNAYSYEFGVVIS

SEQ ID NO: 36512 - protein, 85 aa, unidentified
  REGION 1..85: note = Description of Unknown:cds_NC_009884.1_cds_YP_001496968.1_43 target sequence
SYSNYSSVSYITFNFPTGIMMVAKEGGIVQATSLASIQSLIESGGELSITYLATFTTSFSANEIDMYAVIGTTMLYKIASVTGSF

SEQ ID NO: 36513 - protein, 85 aa, unidentified
  REGION 1..85: note = Description of Unknown:cds_NC_009884.1_cds_YP_001496968.1_43 target sequence
TSSSDDNLSVEWTIDVVVGNIFNVSSGSSGVTAYSLPTGQCTSLSGQLIMYPYLVHLLIAYTLIPSTSFTVQSKYPNLPLATMLA

SEQ ID NO: 36514 - protein, 85 aa, unidentified
  REGION 1..85: note = Description of Unknown:cds_NC_009884.1_cds_YP_001496968.1_43 target sequence
TVPTPTSPTQLQGITSFMYACGNTPVLCYPVYNDVGTAIITSSVNCTSLTIVALYQIGSTYLAYMQSPANVTLNVGNAYSYEFGV

SEQ ID NO: 36515 - protein, 85 aa, unidentified
  REGION 1..85: note = Description of Unknown:cds_NC_009884.1_cds_YP_001496976.1_51 target sequence
PIINYTTFSNVYFTTIVNASLKPLLFEAYKEMVASTPLSTMFSGRSYYTVRDALSSIHLITRSSNYIPLLLPVHAPRLFPMGEYV

SEQ ID NO: 36516 - protein, 85 aa, unidentified
  REGION 1..85: note = Description of Unknown:cds_NC_009884.1_cds_YP_001496976.1_51 target sequence
EFDIYTKKPYERRNKRYTVQIRFNIWLPFGALITTNVPQRLYSLFFPIANLLFSRINVGASLDDMLETQNIPATIGIKSRTNAMV

SEQ ID NO: 36517 - protein, 85 aa, unidentified
  REGION 1..85: note = Description of Unknown:cds_NC_009884.1_cds_YP_001496976.1_51 target sequence
HNVNTVSIIITKIESSTVNSYIYDYILRYQWRFDDMGGNAYNIEICNLQILHAQSCRSNKSLYDLYNDTYREFFHTDKNRYDYFT

SEQ ID NO: 36518 - protein, 84 aa, unidentified
  REGION 1..84: note = Description of Unknown:cds_NC_009884.1_cds_YP_001496976.1_51 target sequence
RFDDMGGNAYNIEICNLQILHAQSCRSNKSLYDLYNDTYREFFHTDKNRYDYFTIFDKCPFTWKLYTPPRTPLCRTVVDTILYL

SEQ ID NO: 36519 - protein, 85 aa, unidentified
  REGION 1..85: note = Description of Unknown:cds_NC_009884.1_cds_YP_001496976.1_51 target sequence
AYKEMVASTPLSTMFSGRSYYTVRDALSSIHLITRSSNYIPLLLPVHAPRLFPMGEYVEFDIYTKKPYERRNKRYTVQIRFNIWL

SEQ ID NO: 36520 - protein, 85 aa, unidentified
  REGION 1..85: note = Description of Unknown:cds_NC_009884.1_cds_YP_001496976.1_51 target sequence
PFGALITTNVPQRLYSLFFPIANLLFSRINVGASLDDMLETQNIPATIGIKSRTNAMVHNVNTVSIIITKIESSTVNSYIYDYIL

SEQ ID NO: 36521 - protein, 85 aa, unidentified
  REGION 1..85: note = Description of Unknown:cds_NC_009884.1_cds_YP_001496976.1_51 target sequence
RYQWRFDDMGGNAYNIEICNLQILHAQSCRSNKSLYDLYNDTYREFFHTDKNRYDYFTIFDKCPFTWKLYTPPRTPLCRTVVDTI

SEQ ID NO: 36522 - protein, 85 aa, unidentified
  REGION 1..85: note = Description of Unknown:cds_NC_007409.1_cds_YP_319886.1_55 target sequence
VRILNFFEINENASDQENIISAPYDVYIPLMREKYEQIKLGRYDKTEYPENFPQQYRTGRGIAYFSEMVYEAFRGGLFNQFIVEG

SEQ ID NO: 36523 - protein, 85 aa, unidentified
  REGION 1..85: note = Description of Unknown:cds_NC_007409.1_cds_YP_319886.1_55 target sequence
QQGAGKSSFALWVARAIYGNWHDALKHVVIDPFQLRQIILVAEANSITIPLIVVDDAGLFFSKGLAYRRQTGRMQTIQRLLQVIR

SEQ ID NO: 36524 - protein, 85 aa, unidentified
  REGION 1..85: note = Description of Unknown:cds_NC_007409.1_cds_YP_319886.1_55 target sequence
TAVSNIILTTPNEEELSGIVIRQPKQYKIIIEKQNELVSKARVYEEEIQPLRGKKITRRLKLRDDIEKNLRTPLDFLEVAQNAHE

SEQ ID NO: 36525 - protein, 84 aa, unidentified
  REGION 1..84: note = Description of Unknown:cds_NC_007409.1_cds_YP_319886.1_55 target sequence
EKQNELVSKARVYEEEIQPLRGKKITRRLKLRDDIEKNLRTPLDFLEVAQNAHEVNLPRHIDDTAYQIYMKLRGLYTAIALRTS

SEQ ID NO: 36526 - protein, 85 aa, unidentified
  REGION 1..85: note = Description of Unknown:cds_NC_007409.1_cds_YP_319886.1_55 target sequence
IPLMREKYEQIKLGRYDKTEYPENFPQQYRTGRGIAYFSEMVYEAFRGGLFNQFIVEGQQGAGKSSFALWVARAIYGNWHDALKH

SEQ ID NO: 36527 - protein, 85 aa, unidentified
  REGION 1..85: note = Description of Unknown:cds_NC_007409.1_cds_YP_319886.1_55 target sequence
VVIDPFQLRQIILVAEANSITIPLIVVDDAGLFFSKGLAYRRQTGRMQTIQRLLQVIRTAVSNIILTTPNEEELSGIVIRQPKQY

SEQ ID NO: 36528 - protein, 85 aa, unidentified
  REGION 1..85: note = Description of Unknown:cds_NC_007409.1_cds_YP_319886.1_55 target sequence
KIIIEKQNELVSKARVYEEEIQPLRGKKITRRLKLRDDIEKNLRTPLDFLEVAQNAHEVNLPRHIDDTAYQIYMKLRGLYTAIAL

SEQ ID NO: 36529 - protein, 85 aa, unidentified
  REGION 1..85: note = Description of Unknown:hvTR_Q6TVT8 target sequence
KRAVSKTTVASNRAPQQEDAAPARRFGENQAMSCTDAINFAKSLSSSQTKAIDAVTLTPSQYPSCSNINVCLVESLASKLVSPLI

SEQ ID NO: 36530 - protein, 85 aa, unidentified
  REGION 1..85: note = Description of Unknown:hvTR_Q6TVT8 target sequence
VVKGEFKIYPSKKTDMQRQNDNGYFGRLKPVSASPLLYQLLENIYENIKTGVRVPPSLRNFNTETSIDNTFKSGCLYLNRLTGAL

SEQ ID NO: 36531 - protein, 85 aa, unidentified
  REGION 1..85: note = Description of Unknown:hvTR_Q6TVT8 target sequence
LEFTSDDDAQPQICPLIREIENLATRDAQMATLILAPVVFYRSGGEGKVTFAVKKITMPRECSLTVLGLEGEQTCVRMSETQPTF

SEQ ID NO: 36532 - protein, 84 aa, unidentified
  REGION 1..84: note = Description of Unknown:hvTR_Q6TVT8 target sequence
ATLILAPVVFYRSGGEGKVTFAVKKITMPRECSLTVLGLEGEQTCVRMSETQPTFTEEQDVRGLGVVDPGTGFEDEELEAPFNI

SEQ ID NO: 36533 - protein, 85 aa, unidentified
  REGION 1..85: note = Description of Unknown:hvTR_Q6TVT8 target sequence
ENQAMSCTDAINFAKSLSSSQTKAIDAVTLTPSQYPSCSNINVCLVESLASKLVSPLIVVKGEFKIYPSKKTDMQRQNDNGYFGR

SEQ ID NO: 36534 - protein, 85 aa, unidentified
  REGION 1..85: note = Description of Unknown:hvTR_Q6TVT8 target sequence
LKPVSASPLLYQLLENIYENIKTGVRVPPSLRNFNTETSIDNTFKSGCLYLNRLTGALLEFTSDDDAQPQICPLIREIENLATRD

SEQ ID NO: 36535 - protein, 85 aa, unidentified
  REGION 1..85: note = Description of Unknown:hvTR_Q6TVT8 target sequence
AQMATLILAPVVFYRSGGEGKVTFAVKKITMPRECSLTVLGLEGEQTCVRMSETQPTFTEEQDVRGLGVVDPGTGFEDEELEAPF

SEQ ID NO: 36536 - protein, 85 aa, unidentified
  REGION 1..85: note = Description of Unknown:hvTR_D3IZH9 target sequence
KRATSKTTVAASRAPQQEDAAPASRRFGENQALSCADAINFAKSLSSSQTKAIETVTLTPSQYPSCSNINVGLVESLASKLVSPL

SEQ ID NO: 36537 - protein, 85 aa, unidentified
  REGION 1..85: note = Description of Unknown:hvTR_D3IZH9 target sequence
IVVKGEFKIYVSKKSDMQRQNDSGYFARLKPVSASPLLYQLLDGIYTNIKTGTRIPQSLRSFNPDNSIDNTFKSGCMYLNRLTGA

SEQ ID NO: 36538 - protein, 85 aa, unidentified
  REGION 1..85: note = Description of Unknown:hvTR_D3IZH9 target sequence
LLEFTGDDDTQSHICPLMREIENLATRDAQMATLILAPVVFYRSGGEGKVTFAVKKITMPRECSLTVLGLEGEQTCVRMSETQPT

SEQ ID NO: 36539 - protein, 84 aa, unidentified
  REGION 1..84: note = Description of Unknown:hvTR_D3IZH9 target sequence
MATLILAPVVFYRSGGEGKVTFAVKKITMPRECSLTVLGLEGEQTCVRMSETQPTFTEEQDVRGLGVVDPSGFEDDELEAPFNI

SEQ ID NO: 36540 - protein, 85 aa, unidentified
  REGION 1..85: note = Description of Unknown:hvTR_D3IZH9 target sequence
GENQALSCADAINFAKSLSSSQTKAIETVTLTPSQYPSCSNINVGLVESLASKLVSPLIVVKGEFKIYVSKKSDMQRQNDSGYFA

SEQ ID NO: 36541 - protein, 85 aa, unidentified
  REGION 1..85: note = Description of Unknown:hvTR_D3IZH9 target sequence
RLKPVSASPLLYQLLDGIYTNIKTGTRIPQSLRSFNPDNSIDNTFKSGCMYLNRLTGALLEFTGDDDTQSHICPLMREIENLATR

SEQ ID NO: 36542 - protein, 85 aa, unidentified
  REGION 1..85: note = Description of Unknown:hvTR_D3IZH9 target sequence
DAQMATLILAPVVFYRSGGEGKVTFAVKKITMPRECSLTVLGLEGEQTCVRMSETQPTFTEEQDVRGLGVVDPSGFEDDELEAPF

SEQ ID NO: 36543 - protein, 85 aa, unidentified
  REGION 1..85: note = Description of Unknown:cds_NZ_WFIY01000004.1_cds_WP_155862564.1_333 target sequence
RLIGLSRIHITLFDLEGKYGRLDGGMGVALKYPRIVIKTGECEEINIDGVPKEKFCIEEDYPAHVGLGHTTQYLLSITRYAFEKN

SEQ ID NO: 36544 - protein, 85 aa, unidentified
  REGION 1..85: note = Description of Unknown:cds_NZ_WFIY01000004.1_cds_WP_155862564.1_333 target sequence
FQRKTSVELAKLIKRGSTSGIGVYAFEYGGFIVDGGHSLKVKKEALPSDFSTAPPPPLLLRVDFPWYIYVNIPEGRRIFGKEELT

SEQ ID NO: 36545 - protein, 85 aa, unidentified
  REGION 1..85: note = Description of Unknown:cds_NZ_WFIY01000004.1_cds_WP_155862564.1_333 target sequence
AFKNAKLEGLDTLARVVLMEFIPSVIEKDLENVLDALDRIQNLGFKKIEVSLQTDKVRELMKKLKSKGFPSGISSFGPAIYTFVN

SEQ ID NO: 36546 - protein, 84 aa, unidentified
  REGION 1..84: note = Description of Unknown:cds_NZ_WFIY01000004.1_cds_WP_155862564.1_333 target sequence
ENVLDALDRIQNLGFKKIEVSLQTDKVRELMKKLKSKGFPSGISSFGPAIYTFVNSRREGEELVSTFGGFLTEPNNKGAKVVWN

SEQ ID NO: 36547 - protein, 85 aa, unidentified
  REGION 1..85: note = Description of Unknown:cds_NZ_WFIY01000004.1_cds_WP_155862564.1_333 target sequence
VALKYPRIVIKTGECEEINIDGVPKEKFCIEEDYPAHVGLGHTTQYLLSITRYAFEKNFQRKTSVELAKLIKRGSTSGIGVYAFE

SEQ ID NO: 36548 - protein, 85 aa, unidentified
  REGION 1..85: note = Description of Unknown:cds_NZ_WFIY01000004.1_cds_WP_155862564.1_333 target sequence
YGGFIVDGGHSLKVKKEALPSDFSTAPPPPLLLRVDFPWYIYVNIPEGRRIFGKEELTAFKNAKLEGLDTLARVVLMEFIPSVIE

SEQ ID NO: 36549 - protein, 85 aa, unidentified
  REGION 1..85: note = Description of Unknown:cds_NZ_WFIY01000004.1_cds_WP_155862564.1_333 target sequence
KDLENVLDALDRIQNLGFKKIEVSLQTDKVRELMKKLKSKGFPSGISSFGPAIYTFVNSRREGEELVSTFGGFLTEPNNKGAKVV

SEQ ID NO: 36550 - protein, 85 aa, unidentified
  REGION 1..85: note = Description of Unknown:cds_NZ_WFIY01000004.1_cds_WP_155862707.1_507 target sequence
ATSPTVKLIYYAKLSKPRIIWLLDLAALAGAALSSRFILIPLISVIVGGTLASGGAMIINEGIEIDKDKVMKRTSKRPTVMGYVS

SEQ ID NO: 36551 - protein, 85 aa, unidentified
  REGION 1..85: note = Description of Unknown:cds_NZ_WFIY01000004.1_cds_WP_155862707.1_507 target sequence
KKEAIIVGSIMLVLGTVIGLIANPLTSFFILLGGLIYILVYTIWLKPRTPLNIVIGGFAGSAAAWAGYAAMTNSFTIPSLLLGLL

SEQ ID NO: 36552 - protein, 85 aa, unidentified
  REGION 1..85: note = Description of Unknown:cds_NZ_WFIY01000004.1_cds_WP_155862707.1_507 target sequence
IFMWTPGHFWSLALKYKEDYSKAGIPMLPVLLPEKDSAKYIAISNALMAPFALILYLYVGLPYLIITSIMTALLLYNSIVLFRNP

SEQ ID NO: 36553 - protein, 84 aa, unidentified
  REGION 1..84: note = Description of Unknown:cds_NZ_WFIY01000004.1_cds_WP_155862707.1_507 target sequence
LLPEKDSAKYIAISNALMAPFALILYLYVGLPYLIITSIMTALLLYNSIVLFRNPTAEEAWKSFKISAPYLAIILLTIIILKII

SEQ ID NO: 36554 - protein, 85 aa, unidentified
  REGION 1..85: note = Description of Unknown:cds_NZ_WFIY01000004.1_cds_WP_155862707.1_507 target sequence
LAGAALSSRFILIPLISVIVGGTLASGGAMIINEGIEIDKDKVMKRTSKRPTVMGYVSKKEAIIVGSIMLVLGTVIGLIANPLTS

SEQ ID NO: 36555 - protein, 85 aa, unidentified
  REGION 1..85: note = Description of Unknown:cds_NZ_WFIY01000004.1_cds_WP_155862707.1_507 target sequence
FFILLGGLIYILVYTIWLKPRTPLNIVIGGFAGSAAAWAGYAAMTNSFTIPSLLLGLLIFMWTPGHFWSLALKYKEDYSKAGIPM

SEQ ID NO: 36556 - protein, 85 aa, unidentified
  REGION 1..85: note = Description of Unknown:cds_NZ_WFIY01000004.1_cds_WP_155862707.1_507 target sequence
LPVLLPEKDSAKYIAISNALMAPFALILYLYVGLPYLIITSIMTALLLYNSIVLFRNPTAEEAWKSFKISAPYLAIILLTIIILK

SEQ ID NO: 36557 - protein, 85 aa, unidentified
  REGION 1..85: note = Description of Unknown:cds_NZ_WFIY01000004.1_cds_WP_152941599.1_1583 target sequence
LTGIPLFLSVLFSSLLAGYLGSLTGLGGGTILVPILTLYDGIPIEYATGASLISTIATSSGAASAYLKDKIINLKIGTSLQVATT

SEQ ID NO: 36558 - protein, 85 aa, unidentified
  REGION 1..85: note = Description of Unknown:cds_NZ_WFIY01000004.1_cds_WP_152941599.1_1583 target sequence
SGAIAGSLTVTYIYSHHLEPIIYVVFGIVLLGSVYPTIKRGKFEIPKNSDPDWSTKFFQMHGEYYDMALQKKVEYWGVRWVQGAL

SEQ ID NO: 36559 - protein, 85 aa, unidentified
  REGION 1..85: note = Description of Unknown:cds_NZ_WFIY01000004.1_cds_WP_152941599.1_1583 target sequence
VMFVAGYVSGLLGIGSGALKVIGMDWVMNLPIKVTTTTSNFMIGVTAATSSGIYWVFGYIQPLIAAATSIGVLIGAFIGTKTLVK

SEQ ID NO: 36560 - protein, 84 aa, unidentified
  REGION 1..84: note = Description of Unknown:cds_NZ_WFIY01000004.1_cds_WP_152941599.1_1583 target sequence
PIKVTTTTSNFMIGVTAATSSGIYWVFGYIQPLIAAATSIGVLIGAFIGTKTLVKLKNKRIRTIFTILLAFLGIQMILRGLGIY

SEQ ID NO: 36561 - protein, 85 aa, unidentified
  REGION 1..85: note = Description of Unknown:cds_NZ_WFIY01000004.1_cds_WP_152941599.1_1583 target sequence
GGTILVPILTLYDGIPIEYATGASLISTIATSSGAASAYLKDKIINLKIGTSLQVATTSGAIAGSLTVTYIYSHHLEPIIYVVFG

SEQ ID NO: 36562 - protein, 85 aa, unidentified
  REGION 1..85: note = Description of Unknown:cds_NZ_WFIY01000004.1_cds_WP_152941599.1_1583 target sequence
IVLLGSVYPTIKRGKFEIPKNSDPDWSTKFFQMHGEYYDMALQKKVEYWGVRWVQGALVMFVAGYVSGLLGIGSGALKVIGMDWV

SEQ ID NO: 36563 - protein, 85 aa, unidentified
  REGION 1..85: note = Description of Unknown:cds_NZ_WFIY01000004.1_cds_WP_152941599.1_1583 target sequence
MNLPIKVTTTTSNFMIGVTAATSSGIYWVFGYIQPLIAAATSIGVLIGAFIGTKTLVKLKNKRIRTIFTILLAFLGIQMILRGLG

SEQ ID NO: 36564 - protein, 85 aa, unidentified
  REGION 1..85: note = Description of Unknown:cds_NZ_WFIY01000004.1_cds_WP_155863949.1_1870 target sequence
LRTVDLIEFWERSKIIIDSLVTKFVDDVKDWEIMEMSKYIMKDGKRFRGTLVFLFNDALGGEEKNAYQGALATEILHSASLALDD

SEQ ID NO: 36565 - protein, 85 aa, unidentified
  REGION 1..85: note = Description of Unknown:cds_NZ_WFIY01000004.1_cds_WP_155863949.1_1870 target sequence
IVDYDLTRRGMASAWAVYTNRRVIFVSNFLIPTALKIISSYGKEALNISIELWKDTAIGALKDMYGDKREYFKTIELKTASLFKL

SEQ ID NO: 36566 - protein, 85 aa, unidentified
  REGION 1..85: note = Description of Unknown:cds_NZ_WFIY01000004.1_cds_WP_155863949.1_1870 target sequence
PAMLASFSSGKKELVDKLLEAGRVLGIIYQLIDDYVDCVKLEPEKLVGSAKQLFELTNGKVDPFVSNKYAELKSEYLRIVSSIPF

SEQ ID NO: 36567 - protein, 84 aa, unidentified
  REGION 1..84: note = Description of Unknown:cds_NZ_WFIY01000004.1_cds_WP_155863949.1_1870 target sequence
IDDYVDCVKLEPEKLVGSAKQLFELTNGKVDPFVSNKYAELKSEYLRIVSSIPFFNEYNELIMALPDFLTMGLLAESGIKNKLF

SEQ ID NO: 36568 - protein, 85 aa, unidentified
  REGION 1..85: note = Description of Unknown:cds_NZ_WFIY01000004.1_cds_WP_155863949.1_1870 target sequence
VKDWEIMEMSKYIMKDGKRFRGTLVFLFNDALGGEEKNAYQGALATEILHSASLALDDIVDYDLTRRGMASAWAVYTNRRVIFVS

SEQ ID NO: 36569 - protein, 85 aa, unidentified
  REGION 1..85: note = Description of Unknown:cds_NZ_WFIY01000004.1_cds_WP_155863949.1_1870 target sequence
NFLIPTALKIISSYGKEALNISIELWKDTAIGALKDMYGDKREYFKTIELKTASLFKLPAMLASFSSGKKELVDKLLEAGRVLGI

SEQ ID NO: 36570 - protein, 85 aa, unidentified
  REGION 1..85: note = Description of Unknown:cds_NZ_WFIY01000004.1_cds_WP_155863949.1_1870 target sequence
IYQLIDDYVDCVKLEPEKLVGSAKQLFELTNGKVDPFVSNKYAELKSEYLRIVSSIPFFNEYNELIMALPDFLTMGLLAESGIKN

SEQ ID NO: 36571 - protein, 85 aa, unidentified
  REGION 1..85: note = Description of Unknown:cds_NZ_WFIY01000004.1_cds_WP_155864272.1_2264 target sequence
MEVEFLILLLISSIIAGFLGSLTGLGGATVLVPIYTLFLGIPMAYATGASLISTIATSSGAASAYIKDRITNVRIGMSLEIATTG

SEQ ID NO: 36572 - protein, 85 aa, unidentified
  REGION 1..85: note = Description of Unknown:cds_NZ_WFIY01000004.1_cds_WP_155864272.1_2264 target sequence
GAIIGSLLAHWIYEHHLVFILFIVFGVVILSSVYPQIEKSSLELPKPMKPDWTTKIFQLYGEYYDATLRQEVKYYGIRWWLGEIV

SEQ ID NO: 36573 - protein, 85 aa, unidentified
  REGION 1..85: note = Description of Unknown:cds_NZ_WFIY01000004.1_cds_WP_155864272.1_2264 target sequence
MFFAGLISGLLGIGSGALKVIGMDWAMNLPLKVSTTTSNFMIGVTAATSSSLYWLFGYIEPALAGITAVGVIIGSYLGTKVLVKT

SEQ ID NO: 36574 - protein, 84 aa, unidentified
  REGION 1..84: note = Description of Unknown:cds_NZ_WFIY01000004.1_cds_WP_155864272.1_2264 target sequence
LKVSTTTSNFMIGVTAATSSSLYWLFGYIEPALAGITAVGVIIGSYLGTKVLVKTRNTRLRLIFIIILIFLGIEMIIRGVSLWT

SEQ ID NO: 36575 - protein, 85 aa, unidentified
  REGION 1..85: note = Description of Unknown:cds_NZ_WFIY01000004.1_cds_WP_155864272.1_2264 target sequence
ATVLVPIYTLFLGIPMAYATGASLISTIATSSGAASAYIKDRITNVRIGMSLEIATTGGAIIGSLLAHWIYEHHLVFILFIVFGV

SEQ ID NO: 36576 - protein, 85 aa, unidentified
  REGION 1..85: note = Description of Unknown:cds_NZ_WFIY01000004.1_cds_WP_155864272.1_2264 target sequence
VILSSVYPQIEKSSLELPKPMKPDWTTKIFQLYGEYYDATLRQEVKYYGIRWWLGEIVMFFAGLISGLLGIGSGALKVIGMDWAM

SEQ ID NO: 36577 - protein, 85 aa, unidentified
  REGION 1..85: note = Description of Unknown:cds_NZ_WFIY01000004.1_cds_WP_155864272.1_2264 target sequence
NLPLKVSTTTSNFMIGVTAATSSSLYWLFGYIEPALAGITAVGVIIGSYLGTKVLVKTRNTRLRLIFIIILIFLGIEMIIRGVSL

SEQ ID NO: 36578 - protein, 85 aa, unidentified
  REGION 1..85: note = Description of Unknown:cds_NC_035460.1_cds_YP_009408091.1_140 target sequence
MHSMFTILLFIGFSSNYAKPIKNSVLRNDLEHPELFTVCDRRDAYPGVSLYLNITLPKTPKTVCSYEVDKVNTNLYKVKYDQIEV

SEQ ID NO: 36579 - protein, 85 aa, unidentified
  REGION 1..85: note = Description of Unknown:cds_NC_035460.1_cds_YP_009408091.1_140 target sequence
DIDIKHCHTSLGFFYMFVKGNTLFAKIKTMDPWASENVKFVTQRQLAHIMKECRFVIHVKNNKNIDIQTIKPMDSFSGDMEELSG

SEQ ID NO: 36580 - protein, 85 aa, unidentified
  REGION 1..85: note = Description of Unknown:cds_NC_035460.1_cds_YP_009408091.1_140 target sequence
DDEDEYLDEIDVPIYPITFSSSFLKRIHDFVNYSPDFGLMSVTAEKSFEKMSIMTFYGDMCENLKTSFVTSGGFDRLDFTDKEYF

SEQ ID NO: 36581 - protein, 84 aa, unidentified
  REGION 1..84: note = Description of Unknown:cds_NC_035460.1_cds_YP_009408091.1_140 target sequence
VNYSPDFGLMSVTAEKSFEKMSIMTFYGDMCENLKTSFVTSGGFDRLDFTDKEYFEYPYTYNYENYLNYFYELETTVKGTFCTK

SEQ ID NO: 36582 - protein, 85 aa, unidentified
  REGION 1..85: note = Description of Unknown:cds_NC_035460.1_cds_YP_009408091.1_140 target sequence
NDLEHPELFTVCDRRDAYPGVSLYLNITLPKTPKTVCSYEVDKVNTNLYKVKYDQIEVDIDIKHCHTSLGFFYMFVKGNTLFAKI

SEQ ID NO: 36583 - protein, 85 aa, unidentified
  REGION 1..85: note = Description of Unknown:cds_NC_035460.1_cds_YP_009408091.1_140 target sequence
KTMDPWASENVKFVTQRQLAHIMKECRFVIHVKNNKNIDIQTIKPMDSFSGDMEELSGDDEDEYLDEIDVPIYPITFSSSFLKRI

SEQ ID NO: 36584 - protein, 85 aa, unidentified
  REGION 1..85: note = Description of Unknown:cds_NC_035460.1_cds_YP_009408091.1_140 target sequence
HDFVNYSPDFGLMSVTAEKSFEKMSIMTFYGDMCENLKTSFVTSGGFDRLDFTDKEYFEYPYTYNYENYLNYFYELETTVKGTFC

SEQ ID NO: 36585 - protein, 85 aa, unidentified
  REGION 1..85: note = Description of Unknown:cds_NC_029316.1_cds_YP_009230280.1_27 target sequence
AQEFWDENKQQIREKNAFLAKNDLYTSVIRYNVLPDEILFLRLEYDGGDITFTINKNGYKVSVDDYELGSFVLVNRNIDNSNFSQ

SEQ ID NO: 36586 - protein, 85 aa, unidentified
  REGION 1..85: note = Description of Unknown:cds_NC_029316.1_cds_YP_009230280.1_27 target sequence
QIMKILSKFGNSVDLTYTKASSEAKINGEEITVDNNKMINLIDKLFDTILSYVKNNFSSCHFTLDFDKVIIYYQYEFRNPKLNGY

SEQ ID NO: 36587 - protein, 85 aa, unidentified
  REGION 1..85: note = Description of Unknown:cds_NC_029316.1_cds_YP_009230280.1_27 target sequence
WAYTPEYIYNVSYTYGDTLTIYKKQGNDEPKEAFRIEIGIDKYSRRILSKVINLVLQSKIKTNDYEIEIEGENVTINGKHVKVED

SEQ ID NO: 36588 - protein, 84 aa, unidentified
  REGION 1..84: note = Description of Unknown:cds_NC_029316.1_cds_YP_009230280.1_27 target sequence
KEAFRIEIGIDKYSRRILSKVINLVLQSKIKTNDYEIEIEGENVTINGKHVKVEDKVVKDITDSIKNQVEYVINTVKNKLDMLG

SEQ ID NO: 36589 - protein, 85 aa, unidentified
  REGION 1..85: note = Description of Unknown:cds_NC_029316.1_cds_YP_009230280.1_27 target sequence
VIRYNVLPDEILFLRLEYDGGDITFTINKNGYKVSVDDYELGSFVLVNRNIDNSNFSQQIMKILSKFGNSVDLTYTKASSEAKIN

SEQ ID NO: 36590 - protein, 85 aa, unidentified
  REGION 1..85: note = Description of Unknown:cds_NC_029316.1_cds_YP_009230280.1_27 target sequence
GEEITVDNNKMINLIDKLFDTILSYVKNNFSSCHFTLDFDKVIIYYQYEFRNPKLNGYWAYTPEYIYNVSYTYGDTLTIYKKQGN

SEQ ID NO: 36591 - protein, 85 aa, unidentified
  REGION 1..85: note = Description of Unknown:cds_NC_029316.1_cds_YP_009230280.1_27 target sequence
DEPKEAFRIEIGIDKYSRRILSKVINLVLQSKIKTNDYEIEIEGENVTINGKHVKVEDKVVKDITDSIKNQVEYVINTVKNKLDM

SEQ ID NO: 36592 - protein, 85 aa, unidentified
  REGION 1..85: note = Description of Unknown:vpeps_3KHS_1 target sequence
TDYDLAKETAAWLNKQLQIRPVLGIVCGSGLGKIGDSLETSITVAYSDIPNFPVGSVKGHAGSLIFGSVNGVSCVCMKGRFHLYE

SEQ ID NO: 36593 - protein, 85 aa, unidentified
  REGION 1..85: note = Description of Unknown:vpeps_3KHS_1 target sequence
GHTAARATFPMRVFKALGVKIVVLTNAAGGLNPSYRPGDFMVVRDHINLPGLAGANPLTGPNDDTEGERFPSMTSVYDKTLRKYA

SEQ ID NO: 36594 - protein, 85 aa, unidentified
  REGION 1..85: note = Description of Unknown:vpeps_3KHS_1 target sequence
ISAARELGMSYATHEGVYCCVNGPSFETPAECKILRLMGSDAVGMSTAPETIVAKHGGMRCLAVSLISNVIASNCETPAEPTHEE

SEQ ID NO: 36595 - protein, 85 aa, unidentified
  REGION 1..85: note = Description of Unknown:vpeps_3KHS_1 target sequence
AECKILRLMGSDAVGMSTAPETIVAKHGGMRCLAVSLISNVIASNCETPAEPTHEEVLRAGEEASARMTALVKLVIEKIRGELPR

SEQ ID NO: 36596 - protein, 85 aa, unidentified
  REGION 1..85: note = Description of Unknown:vpeps_3KHS_1 target sequence
GSGLGKIGDSLETSITVAYSDIPNFPVGSVKGHAGSLIFGSVNGVSCVCMKGRFHLYEGHTAARATFPMRVFKALGVKIVVLTNA

SEQ ID NO: 36597 - protein, 85 aa, unidentified
  REGION 1..85: note = Description of Unknown:vpeps_3KHS_1 target sequence
AGGLNPSYRPGDFMVVRDHINLPGLAGANPLTGPNDDTEGERFPSMTSVYDKTLRKYAISAARELGMSYATHEGVYCCVNGPSFE

SEQ ID NO: 36598 - protein, 85 aa, unidentified
  REGION 1..85: note = Description of Unknown:vpeps_3KHS_1 target sequence
TPAECKILRLMGSDAVGMSTAPETIVAKHGGMRCLAVSLISNVIASNCETPAEPTHEEVLRAGEEASARMTALVKLVIEKIRGEL

SEQ ID NO: 36599 - protein, 85 aa, unidentified
  REGION 1..85: note = Description of Unknown:cds_NC_024711.1_cds_YP_009052513.1_35 target sequence
SIKFNFNSFKTVDKKESIRKGNGSVKRVCAFCGKEFITYPWRGAGKYCSHKCATDATKVEHIPNVKCCICNKPIYIKPSRFERSK

SEQ ID NO: 36600 - protein, 85 aa, unidentified
  REGION 1..85: note = Description of Unknown:cds_NC_024711.1_cds_YP_009052513.1_35 target sequence
TKMFTCSKECMGKMRSRVFVGELNPNYNNTKDRVLYTNNGKQYYHCIRHNHPYKGYLDYVPEHRLIIEEHYNLFDKKYFNIIDGK

SEQ ID NO: 36601 - protein, 85 aa, unidentified
  REGION 1..85: note = Description of Unknown:cds_NC_024711.1_cds_YP_009052513.1_35 target sequence
YYLKPEIDVHHIDKNGLNNDINNLIPLTRSEHTSIHNNEKTIIRDVDGRIKTVVFKQGELLETHNDNDNQQPSISSNAFKGSTTN

SEQ ID NO: 36602 - protein, 84 aa, unidentified
  REGION 1..84: note = Description of Unknown:cds_NC_024711.1_cds_YP_009052513.1_35 target sequence
SEHTSIHNNEKTIIRDVDGRIKTVVFKQGELLETHNDNDNQQPSISSNAFKGSTTNSRVQTDNAEDSNADTSALPSINTSDDIV

SEQ ID NO: 36603 - protein, 85 aa, unidentified
  REGION 1..85: note = Description of Unknown:cds_NC_024711.1_cds_YP_009052513.1_35 target sequence
VCAFCGKEFITYPWRGAGKYCSHKCATDATKVEHIPNVKCCICNKPIYIKPSRFERSKTKMFTCSKECMGKMRSRVFVGELNPNY

SEQ ID NO: 36604 - protein, 85 aa, unidentified
  REGION 1..85: note = Description of Unknown:cds_NC_024711.1_cds_YP_009052513.1_35 target sequence
NNTKDRVLYTNNGKQYYHCIRHNHPYKGYLDYVPEHRLIIEEHYNLFDKKYFNIIDGKYYLKPEIDVHHIDKNGLNNDINNLIPL

SEQ ID NO: 36605 - protein, 85 aa, unidentified
  REGION 1..85: note = Description of Unknown:cds_NC_024711.1_cds_YP_009052513.1_35 target sequence
TRSEHTSIHNNEKTIIRDVDGRIKTVVFKQGELLETHNDNDNQQPSISSNAFKGSTTNSRVQTDNAEDSNADTSALPSINTSDDI

SEQ ID NO: 36606 - protein, 85 aa, unidentified
  REGION 1..85: note = Description of Unknown:cds_NZ_WFIY01000004.1_cds_WP_155863055.1_955 target sequence
KRLPAVAGAFYEADPQELKDRIVWSFTHPVGPGKLPTVPKEKGKRDNLFFIVPHAGYIYSGPVAAHSYYYLASEGKPDLVIILGP

SEQ ID NO: 36607 - protein, 85 aa, unidentified
  REGION 1..85: note = Description of Unknown:cds_NZ_WFIY01000004.1_cds_WP_155863055.1_955 target sequence
NHTGYGSYVSLWNKGCWETPLGDVKIDEEMAMELVKYSEVIDIDEQAHLYEHSVEVQIPFLQFFFDSDIKIIPIVILYQTPEIAE

SEQ ID NO: 36608 - protein, 85 aa, unidentified
  REGION 1..85: note = Description of Unknown:cds_NZ_WFIY01000004.1_cds_WP_155863055.1_955 target sequence
YIAEGIYRLMQKHPEKDIVVLASSDMNHYDPYDITYKKDEMAIEKIEQLDYKGLYDVVENKDVTLCGYAPIMVAMILAKKFNKKP

SEQ ID NO: 36609 - protein, 84 aa, unidentified
  REGION 1..84: note = Description of Unknown:cds_NZ_WFIY01000004.1_cds_WP_155863055.1_955 target sequence
DPYDITYKKDEMAIEKIEQLDYKGLYDVVENKDVTLCGYAPIMVAMILAKKFNKKPYILKHATSGDTSGDKSSVVGYLAARFGS

SEQ ID NO: 36610 - protein, 85 aa, unidentified
  REGION 1..85: note = Description of Unknown:cds_NZ_WFIY01000004.1_cds_WP_155863055.1_955 target sequence
HPVGPGKLPTVPKEKGKRDNLFFIVPHAGYIYSGPVAAHSYYYLASEGKPDLVIILGPNHTGYGSYVSLWNKGCWETPLGDVKID

SEQ ID NO: 36611 - protein, 85 aa, unidentified
  REGION 1..85: note = Description of Unknown:cds_NZ_WFIY01000004.1_cds_WP_155863055.1_955 target sequence
EEMAMELVKYSEVIDIDEQAHLYEHSVEVQIPFLQFFFDSDIKIIPIVILYQTPEIAEYIAEGIYRLMQKHPEKDIVVLASSDMN

SEQ ID NO: 36612 - protein, 85 aa, unidentified
  REGION 1..85: note = Description of Unknown:cds_NZ_WFIY01000004.1_cds_WP_155863055.1_955 target sequence
HYDPYDITYKKDEMAIEKIEQLDYKGLYDVVENKDVTLCGYAPIMVAMILAKKFNKKPYILKHATSGDTSGDKSSVVGYLAARFG

SEQ ID NO: 36613 - protein, 85 aa, unidentified
  REGION 1..85: note = Description of Unknown:cds_NC_035460.1_cds_YP_009407965.1_14 target sequence
TMIHYFINEDGQYISCQYWNSTPSPSALLFISHAAAEHCKRYANIATSLQSLNIMVFSHDHVGHGRSQGDRMYVSSFNVFPRDII

SEQ ID NO: 36614 - protein, 85 aa, unidentified
  REGION 1..85: note = Description of Unknown:cds_NC_035460.1_cds_YP_009407965.1_14 target sequence
RHVDIVKKSYPNIPVYILGHSMGGTAALLAISMEPNMFAGLILLSPLVVENSECVSSLKLFTTKVLKGLAPNVIVGKINSEQITR

SEQ ID NO: 36615 - protein, 85 aa, unidentified
  REGION 1..85: note = Description of Unknown:cds_NC_035460.1_cds_YP_009407965.1_14 target sequence
NKLEVSSYNTDPYVCNGNIKVAFAAEVLKGIHNVRKIIHNISLPMFILHGTADYLCDIQGVYMLMEVIKSSDKTLRVYQDAYHSL

SEQ ID NO: 36616 - protein, 84 aa, unidentified
  REGION 1..84: note = Description of Unknown:cds_NC_035460.1_cds_YP_009407965.1_14 target sequence
GIHNVRKIIHNISLPMFILHGTADYLCDIQGVYMLMEVIKSSDKTLRVYQDAYHSLHIELPDIVASVLSEINKWLEERITNTNL

SEQ ID NO: 36617 - protein, 85 aa, unidentified
  REGION 1..85: note = Description of Unknown:cds_NC_035460.1_cds_YP_009407965.1_14 target sequence
LLFISHAAAEHCKRYANIATSLQSLNIMVFSHDHVGHGRSQGDRMYVSSFNVFPRDIIRHVDIVKKSYPNIPVYILGHSMGGTAA

SEQ ID NO: 36618 - protein, 85 aa, unidentified
  REGION 1..85: note = Description of Unknown:cds_NC_035460.1_cds_YP_009407965.1_14 target sequence
LLAISMEPNMFAGLILLSPLVVENSECVSSLKLFTTKVLKGLAPNVIVGKINSEQITRNKLEVSSYNTDPYVCNGNIKVAFAAEV

SEQ ID NO: 36619 - protein, 85 aa, unidentified
  REGION 1..85: note = Description of Unknown:cds_NC_035460.1_cds_YP_009407965.1_14 target sequence
LKGIHNVRKIIHNISLPMFILHGTADYLCDIQGVYMLMEVIKSSDKTLRVYQDAYHSLHIELPDIVASVLSEINKWLEERITNTN

SEQ ID NO: 36620 - protein, 85 aa, unidentified
  REGION 1..85: note = Description of Unknown:cds_NZ_WFIY01000004.1_cds_WP_155862371.1_105 target sequence
EKISPYSGDLYEGPIWHPTENVLYWVNILAGTIHRLDLKKSTYLEIKLKDYVSSISPRVTGGLIATSDQGFYAVNLDGDVKEIYK

SEQ ID NO: 36621 - protein, 85 aa, unidentified
  REGION 1..85: note = Description of Unknown:cds_NZ_WFIY01000004.1_cds_WP_155862371.1_105 target sequence
VKDWDLRNRFNDGKCDAVGRYWVGTMNLEEKYPTAGFYVLDTNLSFRKVLDNVTISNGLAWSSDNKTLYYIDTPTKKIFEFDFDL

SEQ ID NO: 36622 - protein, 85 aa, unidentified
  REGION 1..85: note = Description of Unknown:cds_NZ_WFIY01000004.1_cds_WP_155862371.1_105 target sequence
EKGRISNKRTLIDLSSVQGSPDGMTIDSKDNLWVALFGGGKVIKIDTKTKEIIDEIPVPTPNVTSVTFGGENLSTLYITTAKIHL

SEQ ID NO: 36623 - protein, 84 aa, unidentified
  REGION 1..84: note = Description of Unknown:cds_NZ_WFIY01000004.1_cds_WP_155862371.1_105 target sequence
KDNLWVALFGGGKVIKIDTKTKEIIDEIPVPTPNVTSVTFGGENLSTLYITTAKIHLASPDENAGYVYAEKVSATGTKINFCGI

SEQ ID NO: 36624 - protein, 85 aa, unidentified
  REGION 1..85: note = Description of Unknown:cds_NZ_WFIY01000004.1_cds_WP_155862371.1_105 target sequence
ILAGTIHRLDLKKSTYLEIKLKDYVSSISPRVTGGLIATSDQGFYAVNLDGDVKEIYKVKDWDLRNRFNDGKCDAVGRYWVGTMN

SEQ ID NO: 36625 - protein, 85 aa, unidentified
  REGION 1..85: note = Description of Unknown:cds_NZ_WFIY01000004.1_cds_WP_155862371.1_105 target sequence
LEEKYPTAGFYVLDTNLSFRKVLDNVTISNGLAWSSDNKTLYYIDTPTKKIFEFDFDLEKGRISNKRTLIDLSSVQGSPDGMTID

SEQ ID NO: 36626 - protein, 85 aa, unidentified
  REGION 1..85: note = Description of Unknown:cds_NZ_WFIY01000004.1_cds_WP_155862371.1_105 target sequence
SKDNLWVALFGGGKVIKIDTKTKEIIDEIPVPTPNVTSVTFGGENLSTLYITTAKIHLASPDENAGYVYAEKVSATGTKINFCGI

SEQ ID NO: 36627 - protein, 85 aa, unidentified
  REGION 1..85: note = Description of Unknown:cds_NZ_WFIY01000004.1_cds_WP_155863416.1_1398 target sequence
KRLSELKITILSDNFVSTIIPPLIGEWGFSALIEADGTKILYDVGNSGYPVLYNAEKLGIDLSKVDYIVLSHGHSDHTGGFSNPK

SEQ ID NO: 36628 - protein, 85 aa, unidentified
  REGION 1..85: note = Description of Unknown:cds_NZ_WFIY01000004.1_cds_WP_155863416.1_1398 target sequence
LVKKLEGKIVIAHPSVFEKKLLNWSGKLEYIGIPMSLDEMEKHFHVILTSQPLEITEGVIFSGEVKRYGYDEYTSGLFTARDSSI

SEQ ID NO: 36629 - protein, 85 aa, unidentified
  REGION 1..85: note = Description of Unknown:cds_NZ_WFIY01000004.1_cds_WP_155863416.1_1398 target sequence
SGDHMKDDAALYMNTEKGLVILTGCGHSGILNIINHAKEVTSENVYAALGGFHLLSSPKDKVVNVSEELLKLGKVGPAHCSGNLI

SEQ ID NO: 36630 - protein, 84 aa, unidentified
  REGION 1..84: note = Description of Unknown:cds_NZ_WFIY01000004.1_cds_WP_155863416.1_1398 target sequence
GILNIINHAKEVTSENVYAALGGFHLLSSPKDKVVNVSEELLKLGKVGPAHCSGNLIKSLIAEHKDKFLDAGVGKVIKFSESLQ

SEQ ID NO: 36631 - protein, 85 aa, unidentified
  REGION 1..85: note = Description of Unknown:cds_NZ_WFIY01000004.1_cds_WP_155863416.1_1398 target sequence
GFSALIEADGTKILYDVGNSGYPVLYNAEKLGIDLSKVDYIVLSHGHSDHTGGFSNPKLVKKLEGKIVIAHPSVFEKKLLNWSGK

SEQ ID NO: 36632 - protein, 85 aa, unidentified
  REGION 1..85: note = Description of Unknown:cds_NZ_WFIY01000004.1_cds_WP_155863416.1_1398 target sequence
LEYIGIPMSLDEMEKHFHVILTSQPLEITEGVIFSGEVKRYGYDEYTSGLFTARDSSISGDHMKDDAALYMNTEKGLVILTGCGH

SEQ ID NO: 36633 - protein, 85 aa, unidentified
  REGION 1..85: note = Description of Unknown:cds_NZ_WFIY01000004.1_cds_WP_155863416.1_1398 target sequence
SGILNIINHAKEVTSENVYAALGGFHLLSSPKDKVVNVSEELLKLGKVGPAHCSGNLIKSLIAEHKDKFLDAGVGKVIKFSESLQ

SEQ ID NO: 36634 - protein, 85 aa, unidentified
  REGION 1..85: note = Description of Unknown:cds_NZ_WFIY01000004.1_cds_1519 target sequence
VVKLYYIIPYVLINSLIYTFVKDGLYYASPMFFMALRFLIGGIILLPFTKQLTLNRDIFLLSIFTTLSTTFWAYGLLYVQPSESA

SEQ ID NO: 36635 - protein, 85 aa, unidentified
  REGION 1..85: note = Description of Unknown:cds_NZ_WFIY01000004.1_cds_1519 target sequence
VLSYTMPLIAIPLSALILREKTTKTEVIGILIGFSGVIIYSLNLGIYFSLIGIVLTLINAFFWALFTVYFRKLRGLNAISINAVQ

SEQ ID NO: 36636 - protein, 85 aa, unidentified
  REGION 1..85: note = Description of Unknown:cds_NZ_WFIY01000004.1_cds_1519 target sequence
LLLGSLIFFTLSPIQFYFRYSINFLVDLLYVSVLGGGISFYLWNSMLKTERVSKVTVLSFSVPAVSTAVDELRGVNVNIGMIEGI

SEQ ID NO: 36637 - protein, 84 aa, unidentified
  REGION 1..84: note = Description of Unknown:cds_NZ_WFIY01000004.1_cds_1519 target sequence
YVSVLGGGISFYLWNSMLKTERVSKVTVLSFSVPAVSTAVDELRGVNVNIGMIEGIGVMFLGILISRLEKKINKSNIVSGRFHV

SEQ ID NO: 36638 - protein, 85 aa, unidentified
  REGION 1..85: note = Description of Unknown:cds_NZ_WFIY01000004.1_cds_1519 target sequence
ASPMFFMALRFLIGGIILLPFTKQLTLNRDIFLLSIFTTLSTTFWAYGLLYVQPSESAVLSYTMPLIAIPLSALILREKTTKTEV

SEQ ID NO: 36639 - protein, 85 aa, unidentified
  REGION 1..85: note = Description of Unknown:cds_NZ_WFIY01000004.1_cds_1519 target sequence
IGILIGFSGVIIYSLNLGIYFSLIGIVLTLINAFFWALFTVYFRKLRGLNAISINAVQLLLGSLIFFTLSPIQFYFRYSINFLVD

SEQ ID NO: 36640 - protein, 85 aa, unidentified
  REGION 1..85: note = Description of Unknown:cds_NZ_WFIY01000004.1_cds_1519 target sequence
LLYVSVLGGGISFYLWNSMLKTERVSKVTVLSFSVPAVSTAVDELRGVNVNIGMIEGIGVMFLGILISRLEKKINKSNIVSGRFH

SEQ ID NO: 36641 - protein, 85 aa, unidentified
  REGION 1..85: note = Description of Unknown:cds_NZ_WFIY01000004.1_cds_WP_155862320.1_44 target sequence
KVVIYSEDPEIIKAGASYFPKEYIIGITTREVKYADELYLVDKIDEEFISNFITSLKPDVVLVGNSKRDKTIAGYVAGLLKVPII

SEQ ID NO: 36642 - protein, 85 aa, unidentified
  REGION 1..85: note = Description of Unknown:cds_NZ_WFIY01000004.1_cds_WP_155862320.1_44 target sequence
PEVMDLEGNKAKRVVYSGMGIAEIEFSYPAVIIIGRKEVQVKEKEKIKINKLEVKEGRVKILEEKSKGEQGVNLSTAEIIVSVGR

SEQ ID NO: 36643 - protein, 85 aa, unidentified
  REGION 1..85: note = Description of Unknown:cds_NZ_WFIY01000004.1_cds_WP_155862320.1_44 target sequence
GIGSKENVKYAEDLANALGAALGGSRPVTAELGWLPEDRQIGLSGNKVKPKLYIALGISGQPQHLAGIKDAKIIVAVNKDKNAPI

SEQ ID NO: 36644 - protein, 84 aa, unidentified
  REGION 1..84: note = Description of Unknown:cds_NZ_WFIY01000004.1_cds_WP_155862320.1_44 target sequence
VTAELGWLPEDRQIGLSGNKVKPKLYIALGISGQPQHLAGIKDAKIIVAVNKDKNAPIAENADYTIVGDAIEFCKIMSEKVKNK

SEQ ID NO: 36645 - protein, 85 aa, unidentified
  REGION 1..85: note = Description of Unknown:cds_NZ_WFIY01000004.1_cds_WP_155862320.1_44 target sequence
TTREVKYADELYLVDKIDEEFISNFITSLKPDVVLVGNSKRDKTIAGYVAGLLKVPIIPEVMDLEGNKAKRVVYSGMGIAEIEFS

SEQ ID NO: 36646 - protein, 85 aa, unidentified
  REGION 1..85: note = Description of Unknown:cds_NZ_WFIY01000004.1_cds_WP_155862320.1_44 target sequence
YPAVIIIGRKEVQVKEKEKIKINKLEVKEGRVKILEEKSKGEQGVNLSTAEIIVSVGRGIGSKENVKYAEDLANALGAALGGSRP

SEQ ID NO: 36647 - protein, 85 aa, unidentified
  REGION 1..85: note = Description of Unknown:cds_NZ_WFIY01000004.1_cds_WP_155862386.1_123 target sequence
LINKNTKVLVQGITGKEGSFHTKLMLEYGTKIVAGVTPGKGGSQVYGVPVYDTVKEAMQEHEIDASIIFVPAKFAVDAIYEAIDG

SEQ ID NO: 36648 - protein, 85 aa, unidentified
  REGION 1..85: note = Description of Unknown:cds_NZ_WFIY01000004.1_cds_WP_155862386.1_123 target sequence
GIPLIVVITEHIPVLDMAKVVHYAEKKGVKIIGPNCPGIIVPGESLLGIMPSRAFKKGKIGIVSRSGTLTYEVAEILKDFGQSTV

SEQ ID NO: 36649 - protein, 85 aa, unidentified
  REGION 1..85: note = Description of Unknown:cds_NZ_WFIY01000004.1_cds_WP_155862386.1_123 target sequence
IGIGGDPIIGTKMQDIVKMFDEDKDTEEIVIIGEIGGTMEEEVAKMKKEGKISKNIVAYIAGLTAPKEKRMGHAGAVVYMGLGTY

SEQ ID NO: 36650 - protein, 84 aa, unidentified
  REGION 1..84: note = Description of Unknown:cds_NZ_WFIY01000004.1_cds_WP_155862386.1_123 target sequence
IVIIGEIGGTMEEEVAKMKKEGKISKNIVAYIAGLTAPKEKRMGHAGAVVYMGLGTYESKVNAFKEAGIKVAKTPFEIKDLIFS

SEQ ID NO: 36651 - protein, 85 aa, unidentified
  REGION 1..85: note = Description of Unknown:cds_NZ_WFIY01000004.1_cds_WP_155862386.1_123 target sequence
YGTKIVAGVTPGKGGSQVYGVPVYDTVKEAMQEHEIDASIIFVPAKFAVDAIYEAIDGGIPLIVVITEHIPVLDMAKVVHYAEKK

SEQ ID NO: 36652 - protein, 85 aa, unidentified
  REGION 1..85: note = Description of Unknown:cds_NZ_WFIY01000004.1_cds_WP_155862386.1_123 target sequence
GVKIIGPNCPGIIVPGESLLGIMPSRAFKKGKIGIVSRSGTLTYEVAEILKDFGQSTVIGIGGDPIIGTKMQDIVKMFDEDKDTE

SEQ ID NO: 36653 - protein, 85 aa, unidentified
  REGION 1..85: note = Description of Unknown:cds_NZ_WFIY01000004.1_cds_WP_155862386.1_123 target sequence
EIVIIGEIGGTMEEEVAKMKKEGKISKNIVAYIAGLTAPKEKRMGHAGAVVYMGLGTYESKVNAFKEAGIKVAKTPFEIKDLIFS

SEQ ID NO: 36654 - protein, 85 aa, unidentified
  REGION 1..85: note = Description of Unknown:cds_NZ_WFIY01000004.1_cds_WP_155863353.1_1324 target sequence
EIIVPILTPFNEKGEIDGEKVKTHVENLLRKGVDIIFVNGTTGVGPALSKDEKRKMLDYVLDVTNKVIFQVGSLNMKEVLELVNY

SEQ ID NO: 36655 - protein, 85 aa, unidentified
  REGION 1..85: note = Description of Unknown:cds_NZ_WFIY01000004.1_cds_WP_155863353.1_1324 target sequence
ANEKDLIAVASYPPFYFSIPKDFIVKYFKEICKASKHPVYLYNYPGATGKDVDVNLAKEIDCIKGVKDTNPDFAHTIRYKELGIK

SEQ ID NO: 36656 - protein, 85 aa, unidentified
  REGION 1..85: note = Description of Unknown:cds_NZ_WFIY01000004.1_cds_WP_155863353.1_1324 target sequence
TYNGLENLAIASLSILDGTVVGAGNYMPELFSQLREYIKAGDMRKALDLQLKIDEIDGTTIPYGKISSMYYLVKELQGYDVGVPR

SEQ ID NO: 36657 - protein, 84 aa, unidentified
  REGION 1..84: note = Description of Unknown:cds_NZ_WFIY01000004.1_cds_WP_155863353.1_1324 target sequence
PELFSQLREYIKAGDMRKALDLQLKIDEIDGTTIPYGKISSMYYLVKELQGYDVGVPRPPMYPLEENKAKELVEKVRKIWNKSE

SEQ ID NO: 36658 - protein, 85 aa, unidentified
  REGION 1..85: note = Description of Unknown:cds_NZ_WFIY01000004.1_cds_WP_155863353.1_1324 target sequence
LLRKGVDIIFVNGTTGVGPALSKDEKRKMLDYVLDVTNKVIFQVGSLNMKEVLELVNYANEKDLIAVASYPPFYFSIPKDFIVKY

SEQ ID NO: 36659 - protein, 85 aa, unidentified
  REGION 1..85: note = Description of Unknown:cds_NZ_WFIY01000004.1_cds_WP_155863353.1_1324 target sequence
FKEICKASKHPVYLYNYPGATGKDVDVNLAKEIDCIKGVKDTNPDFAHTIRYKELGIKTYNGLENLAIASLSILDGTVVGAGNYM

SEQ ID NO: 36660 - protein, 85 aa, unidentified
  REGION 1..85: note = Description of Unknown:cds_NZ_WFIY01000004.1_cds_WP_155863872.1_1776 target sequence
RPIHLAVGKFNIDIIVKLNALPLVDSKVNTDVMEIMPGGSATNYSVAVNRLGHSAKLLAKIGKSPLVSALLTPLAEEGLGLDFLI

SEQ ID NO: 36661 - protein, 85 aa, unidentified
  REGION 1..85: note = Description of Unknown:cds_NZ_WFIY01000004.1_cds_WP_155863872.1_1776 target sequence
ECEKKPNMALILLRDDGSISIVRRTDPSLLPSLDDIKKYSGMFDVIHYASISHDVIYKDPSAKIVSYDPGPYASEYEGEEVDILY

SEQ ID NO: 36662 - protein, 85 aa, unidentified
  REGION 1..85: note = Description of Unknown:cds_NZ_WFIY01000004.1_cds_WP_155863872.1_1776 target sequence
VNEKEYESLKTKANAKIVVIKKGKEGAELIGSEECRVEALKVNVVDTTGAGDVFDAAFNVSYINTGSIEDSLRFATVAAGLKVTK

SEQ ID NO: 36663 - protein, 84 aa, unidentified
  REGION 1..84: note = Description of Unknown:cds_NZ_WFIY01000004.1_cds_WP_155863872.1_1776 target sequence
ELIGSEECRVEALKVNVVDTTGAGDVFDAAFNVSYINTGSIEDSLRFATVAAGLKVTKLGGVSSPKLEEVVKMLKDVNINVKCR

SEQ ID NO: 36664 - protein, 85 aa, unidentified
  REGION 1..85: note = Description of Unknown:cds_NZ_WFIY01000004.1_cds_WP_155863872.1_1776 target sequence
VNTDVMEIMPGGSATNYSVAVNRLGHSAKLLAKIGKSPLVSALLTPLAEEGLGLDFLIECEKKPNMALILLRDDGSISIVRRTDP

SEQ ID NO: 36665 - protein, 85 aa, unidentified
  REGION 1..85: note = Description of Unknown:cds_NZ_WFIY01000004.1_cds_WP_155863872.1_1776 target sequence
SLLPSLDDIKKYSGMFDVIHYASISHDVIYKDPSAKIVSYDPGPYASEYEGEEVDILYVNEKEYESLKTKANAKIVVIKKGKEGA

SEQ ID NO: 36666 - protein, 85 aa, unidentified
  REGION 1..85: note = Description of Unknown:cds_NZ_WFIY01000004.1_cds_2330 target sequence
VYPPDFSYVRVTTVEEATKFLESHDDARPIAGGQSLIPMLKLRVISPSYIVDLNPINTLSYISSSYSSTRIGALTRYYEILENDL

SEQ ID NO: 36667 - protein, 85 aa, unidentified
  REGION 1..85: note = Description of Unknown:cds_NZ_WFIY01000004.1_cds_2330 target sequence
VKINVPLLYQAVKVVGDMQVRNLGTIGGSTANADPSADVPTVLTALNADIILTSSSGSRSVKALDFFKGAFTTDIKEGEIITEIV

SEQ ID NO: 36668 - protein, 85 aa, unidentified
  REGION 1..85: note = Description of Unknown:cds_NZ_WFIY01000004.1_cds_2330 target sequence
LPNLEGYRTFYKKVVRRAGDFALVSLAFAIKLRGNEIEDIRLAYGGVGDKPFRALEVEKNVIGRRLNNELVEEIVSKVSNQVNPP

SEQ ID NO: 36669 - protein, 84 aa, unidentified
  REGION 1..84: note = Description of Unknown:cds_NZ_WFIY01000004.1_cds_2330 target sequence
AIKLRGNEIEDIRLAYGGVGDKPFRALEVEKNVIGRRLNNELVEEIVSKVSNQVNPPSDTRGSSWYRREVMKIITRNTIKEVMG

SEQ ID NO: 36670 - protein, 85 aa, unidentified
  REGION 1..85: note = Description of Unknown:cds_NZ_WFIY01000004.1_cds_2330 target sequence
RPIAGGQSLIPMLKLRVISPSYIVDLNPINTLSYISSSYSSTRIGALTRYYEILENDLVKINVPLLYQAVKVVGDMQVRNLGTIG

SEQ ID NO: 36671 - protein, 85 aa, unidentified
  REGION 1..85: note = Description of Unknown:cds_NZ_WFIY01000004.1_cds_2330 target sequence
GSTANADPSADVPTVLTALNADIILTSSSGSRSVKALDFFKGAFTTDIKEGEIITEIVLPNLEGYRTFYKKVVRRAGDFALVSLA

SEQ ID NO: 36672 - protein, 85 aa, unidentified
  REGION 1..85: note = Description of Unknown:cds_NZ_WFIY01000004.1_cds_2330 target sequence
FAIKLRGNEIEDIRLAYGGVGDKPFRALEVEKNVIGRRLNNELVEEIVSKVSNQVNPPSDTRGSSWYRREVMKIITRNTIKEVMG

SEQ ID NO: 36673 - protein, 85 aa, unidentified
  REGION 1..85: note = Description of Unknown:cds_NC_035460.1_cds_YP_009408114.1_163 target sequence
SKIIDQSSKYFEHVCRQIVSYFIAFNNKSTTEQTLADKLLIPKSYITKAIDTLSKEQKVVRVNYYYPVTPCWVLNESFKKDLEKT

SEQ ID NO: 36674 - protein, 85 aa, unidentified
  REGION 1..85: note = Description of Unknown:cds_NC_035460.1_cds_YP_009408114.1_163 target sequence
ISRFSGFEKKYEDFNISDNSTSNPFGDKLPDNKVIHLLSIPAVCAINEYCQYTKRTMHFNMIKVGKDHCSTYICNLTIDTVSIAS

SEQ ID NO: 36675 - protein, 85 aa, unidentified
  REGION 1..85: note = Description of Unknown:cds_NC_035460.1_cds_YP_009408114.1_163 target sequence
AHGTTKREAKENVCKISVNILFTNNQSQKSVEITDKWYDYNQNEEVCKWCDHTQSELNDDSDDSDNSDDVNDSDDVNKSDDVNKS

SEQ ID NO: 36676 - protein, 84 aa, unidentified
  REGION 1..84: note = Description of Unknown:cds_NC_035460.1_cds_YP_009408114.1_163 target sequence
QKSVEITDKWYDYNQNEEVCKWCDHTQSELNDDSDDSDNSDDVNDSDDVNKSDDVNKSDDVNESTIYYDEVDKCINYINKINQK

SEQ ID NO: 36677 - protein, 85 aa, unidentified
  REGION 1..85: note = Description of Unknown:cds_NC_035460.1_cds_YP_009408114.1_163 target sequence
KSTTEQTLADKLLIPKSYITKAIDTLSKEQKVVRVNYYYPVTPCWVLNESFKKDLEKTISRFSGFEKKYEDFNISDNSTSNPFGD

SEQ ID NO: 36678 - protein, 85 aa, unidentified
  REGION 1..85: note = Description of Unknown:cds_NC_035460.1_cds_YP_009408114.1_163 target sequence
KLPDNKVIHLLSIPAVCAINEYCQYTKRTMHFNMIKVGKDHCSTYICNLTIDTVSIASAHGTTKREAKENVCKISVNILFTNNQS

SEQ ID NO: 36679 - protein, 85 aa, unidentified
  REGION 1..85: note = Description of Unknown:hvTR_P35258.2 target sequence
QQPRGRSRTRNHQVTPTIYHETQLPSKPHYTNYHPRARSMSSTRSSAESSPTNHIPRARPPSTFNLSKPPPPPKDMCRNMKIGLP

SEQ ID NO: 36680 - protein, 85 aa, unidentified
  REGION 1..85: note = Description of Unknown:hvTR_P35258.2 target sequence
CADPTCNRDHDLDNLTNRELLLLMARKMLPNTDKTFRSPQDCGSPSLSKGLSKDKQEQTKDVLTLENLGHILSYLHRSEIGKLDE

SEQ ID NO: 36681 - protein, 85 aa, unidentified
  REGION 1..85: note = Description of Unknown:hvTR_P35258.2 target sequence
TSLRAALSLTCAGIRKTNRSLINTMTELHMNHENLPQDQNGVIKQTYTGIHLDKGGQFEAALWQGWDKRSISLFVQAALYVMNNI

SEQ ID NO: 36682 - protein, 84 aa, unidentified
  REGION 1..84: note = Description of Unknown:hvTR_P35258.2 target sequence
ELHMNHENLPQDQNGVIKQTYTGIHLDKGGQFEAALWQGWDKRSISLFVQAALYVMNNIPCESSISVQASYDHFILPQSQGKGQ

SEQ ID NO: 36683 - protein, 85 aa, unidentified
  REGION 1..85: note = Description of Unknown:hvTR_P35258.2 target sequence
PHYTNYHPRARSMSSTRSSAESSPTNHIPRARPPSTFNLSKPPPPPKDMCRNMKIGLPCADPTCNRDHDLDNLTNRELLLLMARK

SEQ ID NO: 36684 - protein, 85 aa, unidentified
  REGION 1..85: note = Description of Unknown:hvTR_P35258.2 target sequence
MLPNTDKTFRSPQDCGSPSLSKGLSKDKQEQTKDVLTLENLGHILSYLHRSEIGKLDETSLRAALSLTCAGIRKTNRSLINTMTE

SEQ ID NO: 36685 - protein, 85 aa, unidentified
  REGION 1..85: note = Description of Unknown:hvTR_C7B280 target sequence
QQPRGRSRTRNHQAIPSIYHETQLPSKPNYTNHHPRARSMSSTRSSTESSPTNHIPRARPPSTFNLSKPPPPPKDMCRNMKIGLP

SEQ ID NO: 36686 - protein, 85 aa, unidentified
  REGION 1..85: note = Description of Unknown:hvTR_C7B280 target sequence
CTDLTCNRDHDLDNLTNRELLLLMARKMLPNTDKAFKSPQDCGSPSLSKGLSKDKQEQTKDVLTLENLGHILNYLHRSEIGKLDE

SEQ ID NO: 36687 - protein, 85 aa, unidentified
  REGION 1..85: note = Description of Unknown:hvTR_C7B280 target sequence
TSLRAALSLTCAGIRKTNRSLINTMTELHINHENLPQDQNGVIKQTYTGIHLDKGGQFEAALWQGWDKRSISLFVQAALYVMNNI

SEQ ID NO: 36688 - protein, 84 aa, unidentified
  REGION 1..84: note = Description of Unknown:hvTR_C7B280 target sequence
ELHINHENLPQDQNGVIKQTYTGIHLDKGGQFEAALWQGWDKRSISLFVQAALYVMNNIPCESSISVQASYDHFILPQSQGKGQ

SEQ ID NO: 36689 - protein, 85 aa, unidentified
  REGION 1..85: note = Description of Unknown:hvTR_C7B280 target sequence
PNYTNHHPRARSMSSTRSSTESSPTNHIPRARPPSTFNLSKPPPPPKDMCRNMKIGLPCTDLTCNRDHDLDNLTNRELLLLMARK

SEQ ID NO: 36690 - protein, 85 aa, unidentified
  REGION 1..85: note = Description of Unknown:hvTR_C7B280 target sequence
MLPNTDKAFKSPQDCGSPSLSKGLSKDKQEQTKDVLTLENLGHILNYLHRSEIGKLDETSLRAALSLTCAGIRKTNRSLINTMTE

SEQ ID NO: 36691 - protein, 85 aa, unidentified
  REGION 1..85: note = Description of Unknown:cds_NZ_WFIY01000004.1_cds_WP_155862695.1_495 target sequence
RVALVVDIIRQEEKMIVKSLNDKGIQYDVINVAQEPLPFNRALDRYDVALIRAISMYRSLYSAAVFESVGVHTINSSEVITVAGD

SEQ ID NO: 36692 - protein, 85 aa, unidentified
  REGION 1..85: note = Description of Unknown:cds_NZ_WFIY01000004.1_cds_WP_155862695.1_495 target sequence
KILTYSKLFKAGVPIPDSVIAMSPDATLKAYEQIGFPLIDKPPIGSWGRMVSLIRDIFEGKTIIEHREMLGNSALKVHIVQEYIK

SEQ ID NO: 36693 - protein, 85 aa, unidentified
  REGION 1..85: note = Description of Unknown:cds_NZ_WFIY01000004.1_cds_WP_155862695.1_495 target sequence
EKNRDIRCIVIGKELLGCYARNIPPNEWRANVALGGTPSPIIIDEKLRETALKAASVVNGEFISIDILEHSSKGYVINELNDTPE

SEQ ID NO: 36694 - protein, 84 aa, unidentified
  REGION 1..84: note = Description of Unknown:cds_NZ_WFIY01000004.1_cds_WP_155862695.1_495 target sequence
EWRANVALGGTPSPIIIDEKLRETALKAASVVNGEFISIDILEHSSKGYVINELNDTPEFKGFMLATGINVAEKLVDYIVSNFS

SEQ ID NO: 36695 - protein, 85 aa, unidentified
  REGION 1..85: note = Description of Unknown:cds_NZ_WFIY01000004.1_cds_WP_155862695.1_495 target sequence
DVINVAQEPLPFNRALDRYDVALIRAISMYRSLYSAAVFESVGVHTINSSEVITVAGDKILTYSKLFKAGVPIPDSVIAMSPDAT

SEQ ID NO: 36696 - protein, 85 aa, unidentified
  REGION 1..85: note = Description of Unknown:cds_NZ_WFIY01000004.1_cds_WP_155862695.1_495 target sequence
LKAYEQIGFPLIDKPPIGSWGRMVSLIRDIFEGKTIIEHREMLGNSALKVHIVQEYIKEKNRDIRCIVIGKELLGCYARNIPPNE

SEQ ID NO: 36697 - protein, 85 aa, unidentified
  REGION 1..85: note = Description of Unknown:cds_NZ_WFIY01000004.1_cds_WP_155863995.1_1920 target sequence
IFIENLMKTFDGKEVLKGVSFEVKKGSITGFIGPNGAGKTTTIKIIAGLIRKSGGKVEVLGEDPWDNPKVHEKMSVIFTNLVYPQ

SEQ ID NO: 36698 - protein, 85 aa, unidentified
  REGION 1..85: note = Description of Unknown:cds_NZ_WFIY01000004.1_cds_WP_155863995.1_1920 target sequence
ENTVEEYLKDICRIYGADITDFVDEFKLKDHLKKKLSQLSSGLAQRVQLVASLIKNPELIIADEPTANLDPPARIEFYEEVKKLN

SEQ ID NO: 36699 - protein, 85 aa, unidentified
  REGION 1..85: note = Description of Unknown:cds_NZ_WFIY01000004.1_cds_WP_155863995.1_1920 target sequence
KRGVTFFISSHILSELEKIITDVVFINEGKITFQGKIEKALKEAEEEEILLVVNDPEKAIKIIGGKIEGSYIKVKGKVRDIVDRL

SEQ ID NO: 36700 - protein, 84 aa, unidentified
  REGION 1..84: note = Description of Unknown:cds_NZ_WFIY01000004.1_cds_WP_155863995.1_1920 target sequence
NEGKITFQGKIEKALKEAEEEEILLVVNDPEKAIKIIGGKIEGSYIKVKGKVRDIVDRLDDAGIEIISLRRSSLDDAFKKLSNI

SEQ ID NO: 36701 - protein, 85 aa, unidentified
  REGION 1..85: note = Description of Unknown:cds_NZ_WFIY01000004.1_cds_WP_155863995.1_1920 target sequence
ITGFIGPNGAGKTTTIKIIAGLIRKSGGKVEVLGEDPWDNPKVHEKMSVIFTNLVYPQENTVEEYLKDICRIYGADITDFVDEFK

SEQ ID NO: 36702 - protein, 85 aa, unidentified
  REGION 1..85: note = Description of Unknown:cds_NZ_WFIY01000004.1_cds_WP_155863995.1_1920 target sequence
LKDHLKKKLSQLSSGLAQRVQLVASLIKNPELIIADEPTANLDPPARIEFYEEVKKLNKRGVTFFISSHILSELEKIITDVVFIN

SEQ ID NO: 36703 - protein, 85 aa, unidentified
  REGION 1..85: note = Description of Unknown:cds_NC_035460.1_cds_YP_009408084.1_133 target sequence
YSIKNFSHKSYKFFANVTTNPHITEKTIIDNINNLSDIVCEQIISIYSLTVTMSEDIEEIKLSEHDPVKHFPKFYIINEDVSIET

SEQ ID NO: 36704 - protein, 85 aa, unidentified
  REGION 1..85: note = Description of Unknown:cds_NC_035460.1_cds_YP_009408084.1_133 target sequence
NEYALIICLEGSACIEYNINNIYHVKLLTNKDAIIMSLNIKHNINTIKNNYFKLAIFRYKSNKPIIYYKNIVFSEDSIIYTKFNG

SEQ ID NO: 36705 - protein, 85 aa, unidentified
  REGION 1..85: note = Description of Unknown:cds_NC_035460.1_cds_YP_009408084.1_133 target sequence
YYFAISKLCDKDNNTIIDILIVNGKLFSLPSFKYLKYANFKTFLKTYDINISSDYIDDIPKNNKIYDVLNLLITEEITNYIFKYI

SEQ ID NO: 36706 - protein, 84 aa, unidentified
  REGION 1..84: note = Description of Unknown:cds_NC_035460.1_cds_YP_009408084.1_133 target sequence
FSLPSFKYLKYANFKTFLKTYDINISSDYIDDIPKNNKIYDVLNLLITEEITNYIFKYISRQYLISIDNNIYNLIIGYCVACIK

SEQ ID NO: 36707 - protein, 85 aa, unidentified
  REGION 1..85: note = Description of Unknown:cds_NC_035460.1_cds_YP_009408084.1_133 target sequence
IIDNINNLSDIVCEQIISIYSLTVTMSEDIEEIKLSEHDPVKHFPKFYIINEDVSIETNEYALIICLEGSACIEYNINNIYHVKL

SEQ ID NO: 36708 - protein, 85 aa, unidentified
  REGION 1..85: note = Description of Unknown:cds_NC_035460.1_cds_YP_009408084.1_133 target sequence
LTNKDAIIMSLNIKHNINTIKNNYFKLAIFRYKSNKPIIYYKNIVFSEDSIIYTKFNGYYFAISKLCDKDNNTIIDILIVNGKLF

SEQ ID NO: 36709 - protein, 85 aa, unidentified
  REGION 1..85: note = Description of Unknown:cds_NZ_WFIY01000004.1_cds_WP_155863785.1_1666 target sequence
SIQSVLQELKNVNYSVISEYIIRRISEYITESGKNGGIIGLSGGIDSSVTTVLLSKATQNYFILLMPSSSTPQKDMEDAKKIINM

SEQ ID NO: 36710 - protein, 85 aa, unidentified
  REGION 1..85: note = Description of Unknown:cds_NZ_WFIY01000004.1_cds_WP_155863785.1_1666 target sequence
IGANNKYKIINIDTILESFKNEIKTNDKLVLGNIKARIRMILLYAYSQIMNYLVIGTGDKSELLLGYFTKYGDGGVDILPIGDLY

SEQ ID NO: 36711 - protein, 85 aa, unidentified
  REGION 1..85: note = Description of Unknown:cds_NZ_WFIY01000004.1_cds_WP_155863785.1_1666 target sequence
KTQVRELGRYLGLPEDIVTKPSSPALWEGQTAEGELGVSYDIIDAVLYLRVEKMMDIDSIAKELQINVDIVRKIDRMVKTSQHKR

SEQ ID NO: 36712 - protein, 84 aa, unidentified
  REGION 1..84: note = Description of Unknown:cds_NZ_WFIY01000004.1_cds_WP_155863785.1_1666 target sequence
LWEGQTAEGELGVSYDIIDAVLYLRVEKMMDIDSIAKELQINVDIVRKIDRMVKTSQHKRLPPEIFRLSGRAINSDWRYPREWI

SEQ ID NO: 36713 - protein, 85 aa, unidentified
  REGION 1..85: note = Description of Unknown:cds_NZ_WFIY01000004.1_cds_WP_155863785.1_1666 target sequence
YITESGKNGGIIGLSGGIDSSVTTVLLSKATQNYFILLMPSSSTPQKDMEDAKKIINMIGANNKYKIINIDTILESFKNEIKTND

SEQ ID NO: 36714 - protein, 85 aa, unidentified
  REGION 1..85: note = Description of Unknown:cds_NZ_WFIY01000004.1_cds_WP_155863785.1_1666 target sequence
KLVLGNIKARIRMILLYAYSQIMNYLVIGTGDKSELLLGYFTKYGDGGVDILPIGDLYKTQVRELGRYLGLPEDIVTKPSSPALW

SEQ ID NO: 36715 - protein, 85 aa, unidentified
  REGION 1..85: note = Description of Unknown:cds_NZ_WFIY01000004.1_cds_WP_155864237.1_2208 target sequence
LSEVFRKEKFLIIPGVFNPFTALLAEKVGFRAIYLSGGALTSSLGLPDIGIISLEELANEVRKIREVTQIPMIVDADTGFGEAIN

SEQ ID NO: 36716 - protein, 85 aa, unidentified
  REGION 1..85: note = Description of Unknown:cds_NZ_WFIY01000004.1_cds_WP_155864237.1_2208 target sequence
VYRTVRVLEKAGANAIQIEDQKMPKKCGHLDGKEVVERSVMVSKIKAALEARKDALIIARVDSNDVFGLEDAIERAKEYVEAGAD

SEQ ID NO: 36717 - protein, 85 aa, unidentified
  REGION 1..85: note = Description of Unknown:cds_NZ_WFIY01000004.1_cds_WP_155864237.1_2208 target sequence
IIFPEALHSKEEFAKFAKEVKAPLLANMTEFGKTPLITAKEFEELGYKYVIFPVTIFRVAAKAMKEALEVLLNEGTQKSLIDKMM

SEQ ID NO: 36718 - protein, 84 aa, unidentified
  REGION 1..84: note = Description of Unknown:cds_NZ_WFIY01000004.1_cds_WP_155864237.1_2208 target sequence
NMTEFGKTPLITAKEFEELGYKYVIFPVTIFRVAAKAMKEALEVLLNEGTQKSLIDKMMTRKEQYEIINYDFYDKLDKKLAKLL

SEQ ID NO: 36719 - protein, 85 aa, unidentified
  REGION 1..85: note = Description of Unknown:cds_NZ_WFIY01000004.1_cds_WP_155864237.1_2208 target sequence
VGFRAIYLSGGALTSSLGLPDIGIISLEELANEVRKIREVTQIPMIVDADTGFGEAINVYRTVRVLEKAGANAIQIEDQKMPKKC

SEQ ID NO: 36720 - protein, 85 aa, unidentified
  REGION 1..85: note = Description of Unknown:cds_NZ_WFIY01000004.1_cds_WP_155864237.1_2208 target sequence
GHLDGKEVVERSVMVSKIKAALEARKDALIIARVDSNDVFGLEDAIERAKEYVEAGADIIFPEALHSKEEFAKFAKEVKAPLLAN

SEQ ID NO: 36721 - protein, 85 aa, unidentified
  REGION 1..85: note = Description of Unknown:cds_NZ_WFIY01000004.1_cds_WP_155862377.1_111 target sequence
RFTQGLVNGKKTTVFVINNEFYVPDFEGIECVLEDSKNVVKAFDLFKNVKSYRKVELSKFLPAIFPGKVFLPAVNFRSHSKESSI

SEQ ID NO: 36722 - protein, 85 aa, unidentified
  REGION 1..85: note = Description of Unknown:cds_NZ_WFIY01000004.1_cds_WP_155862377.1_111 target sequence
DPPKQPYFFMKGNNSIIAHGDSIIIPKGVRKVDYEGEIGIIIGKRGKYIKKEEAMDYVFGFTIINDVSFRDYQFPEIHPYGLNWV

SEQ ID NO: 36723 - protein, 85 aa, unidentified
  REGION 1..85: note = Description of Unknown:cds_NZ_WFIY01000004.1_cds_WP_155862377.1_111 target sequence
MGKSLDTSLPLGPWVVSKDEITFPLEIITRVNGKIVQKGSTEDMIFSIEELISYLSNGITLEPGDIITTGTPAGVAEFGNKEYLK

SEQ ID NO: 36724 - protein, 84 aa, unidentified
  REGION 1..84: note = Description of Unknown:cds_NZ_WFIY01000004.1_cds_WP_155862377.1_111 target sequence
LEIITRVNGKIVQKGSTEDMIFSIEELISYLSNGITLEPGDIITTGTPAGVAEFGNKEYLKPGDVVEVEVPGIGILRNEIKNEF

SEQ ID NO: 36725 - protein, 85 aa, unidentified
  REGION 1..85: note = Description of Unknown:cds_NZ_WFIY01000004.1_cds_WP_155862377.1_111 target sequence
GIECVLEDSKNVVKAFDLFKNVKSYRKVELSKFLPAIFPGKVFLPAVNFRSHSKESSIDPPKQPYFFMKGNNSIIAHGDSIIIPK

SEQ ID NO: 36726 - protein, 85 aa, unidentified
  REGION 1..85: note = Description of Unknown:cds_NZ_WFIY01000004.1_cds_WP_155862377.1_111 target sequence
GVRKVDYEGEIGIIIGKRGKYIKKEEAMDYVFGFTIINDVSFRDYQFPEIHPYGLNWVMGKSLDTSLPLGPWVVSKDEITFPLEI

SEQ ID NO: 36727 - protein, 85 aa, unidentified
  REGION 1..85: note = Description of Unknown:cds_NZ_WFIY01000004.1_cds_WP_155863681.1_1548 target sequence
IEKIIVYEIKRAIARKKVITLIAITFLFEIGVYLSLAEFRTPRIEKLLSPIEDLLWLAGVLLPQSLLIHFISISISSGAMSEEYE

SEQ ID NO: 36728 - protein, 85 aa, unidentified
  REGION 1..85: note = Description of Unknown:cds_NZ_WFIY01000004.1_cds_WP_155863681.1_1548 target sequence
QGTVDFFMTKPITRLSFLIGKFLGGYLLVTLIYLLMVALALIFSFSFFGNQVELQYLPVVVLSILFSTLTFFSIGFMFGEIFRRS

SEQ ID NO: 36729 - protein, 85 aa, unidentified
  REGION 1..85: note = Description of Unknown:cds_NZ_WFIY01000004.1_cds_WP_155863681.1_1548 target sequence
SLAFLVSSTILIGSIIIGAVLLFVAKLTSLYFLISIAISLPAWGSTELPYIIAQGIPHATIIVEALEIFPVVPGTTIAAIAYILG

SEQ ID NO: 36730 - protein, 84 aa, unidentified
  REGION 1..84: note = Description of Unknown:cds_NZ_WFIY01000004.1_cds_WP_155863681.1_1548 target sequence
AKLTSLYFLISIAISLPAWGSTELPYIIAQGIPHATIIVEALEIFPVVPGTTIAAIAYILGYSSFAIIIAFISFLHRDIPKKVS

SEQ ID NO: 36731 - protein, 85 aa, unidentified
  REGION 1..85: note = Description of Unknown:cds_NZ_WFIY01000004.1_cds_WP_155863681.1_1548 target sequence
FEIGVYLSLAEFRTPRIEKLLSPIEDLLWLAGVLLPQSLLIHFISISISSGAMSEEYEQGTVDFFMTKPITRLSFLIGKFLGGYL

SEQ ID NO: 36732 - protein, 85 aa, unidentified
  REGION 1..85: note = Description of Unknown:cds_NZ_WFIY01000004.1_cds_WP_155863681.1_1548 target sequence
LVTLIYLLMVALALIFSFSFFGNQVELQYLPVVVLSILFSTLTFFSIGFMFGEIFRRSSLAFLVSSTILIGSIIIGAVLLFVAKL

SEQ ID NO: 36733 - protein, 85 aa, unidentified
  REGION 1..85: note = Description of Unknown:cds_NZ_WFIY01000004.1_cds_WP_155863792.1_1674 target sequence
PKIYLGTAGIPLSAKGKSTVEGVKKVKELGLNAMEVEFVQGVKMSIEKAKELGEVAKTIGVRLSVHAPYYINLCSEEKEKIEASK

SEQ ID NO: 36734 - protein, 85 aa, unidentified
  REGION 1..85: note = Description of Unknown:cds_NZ_WFIY01000004.1_cds_WP_155863792.1_1674 target sequence
NRILETATRAEAMGADAIAIHVAFYGKKSKREECLDEVKSGLGEILDKSKELGIMNVKFGIETMAKETAIGTLDEVILLSKELDR

SEQ ID NO: 36735 - protein, 85 aa, unidentified
  REGION 1..85: note = Description of Unknown:cds_NZ_WFIY01000004.1_cds_WP_155863792.1_1674 target sequence
QVIPYIDWAHTFARQGGQIDYGEILDRLTKELGLTHINSHFEGLEIRNGKYVDIHRSIVYNTPPFEPLAREILKRDISITLICES

SEQ ID NO: 36736 - protein, 84 aa, unidentified
  REGION 1..84: note = Description of Unknown:cds_NZ_WFIY01000004.1_cds_WP_155863792.1_1674 target sequence
LDRLTKELGLTHINSHFEGLEIRNGKYVDIHRSIVYNTPPFEPLAREILKRDISITLICESPELENDALRMKKILEDLGYNFGE

SEQ ID NO: 36737 - protein, 85 aa, unidentified
  REGION 1..85: note = Description of Unknown:cds_NZ_WFIY01000004.1_cds_WP_155863792.1_1674 target sequence
ELGLNAMEVEFVQGVKMSIEKAKELGEVAKTIGVRLSVHAPYYINLCSEEKEKIEASKNRILETATRAEAMGADAIAIHVAFYGK

SEQ ID NO: 36738 - protein, 85 aa, unidentified
  REGION 1..85: note = Description of Unknown:cds_NZ_WFIY01000004.1_cds_WP_155863792.1_1674 target sequence
KSKREECLDEVKSGLGEILDKSKELGIMNVKFGIETMAKETAIGTLDEVILLSKELDRQVIPYIDWAHTFARQGGQIDYGEILDR

SEQ ID NO: 36739 - protein, 85 aa, unidentified
  REGION 1..85: note = Description of Unknown:cds_NZ_WFIY01000004.1_cds_WP_155863962.1_1884 target sequence
LEYINIYGDTLNNFSLKVESNLGILGQRDSGKEEIIFYTLLLKKPKKGKILLNGNEIKEDNVNGIRWKEISAVFYNPYSMFNPIY

SEQ ID NO: 36740 - protein, 85 aa, unidentified
  REGION 1..85: note = Description of Unknown:cds_NZ_WFIY01000004.1_cds_WP_155863962.1_1884 target sequence
NIASHFAEIVMSHDIGDYNFAVDIAKEFIKILGLDSSVLEKFSYQLTPLEAKKVSLALATFLEPKYVLIDDIEFGINDNGRAVVI

SEQ ID NO: 36741 - protein, 85 aa, unidentified
  REGION 1..85: note = Description of Unknown:cds_NZ_WFIY01000004.1_cds_WP_155863962.1_1884 target sequence
NSIIDLESILSSKFIVLDNDPAVISRVSDEFVVLYKGKIIERGSNVSEVYHPYTLDLLRGEISINYLGIGCPYSDNCRYSSLKCK

SEQ ID NO: 36742 - protein, 84 aa, unidentified
  REGION 1..84: note = Description of Unknown:cds_NZ_WFIY01000004.1_cds_WP_155863962.1_1884 target sequence
SRVSDEFVVLYKGKIIERGSNVSEVYHPYTLDLLRGEISINYLGIGCPYSDNCRYSSLKCKEKEPEEIKVGNNYVKCLLYSWLK

SEQ ID NO: 36743 - protein, 85 aa, unidentified
  REGION 1..85: note = Description of Unknown:cds_NZ_WFIY01000004.1_cds_WP_155863962.1_1884 target sequence
RDSGKEEIIFYTLLLKKPKKGKILLNGNEIKEDNVNGIRWKEISAVFYNPYSMFNPIYNIASHFAEIVMSHDIGDYNFAVDIAKE

SEQ ID NO: 36744 - protein, 85 aa, unidentified
  REGION 1..85: note = Description of Unknown:cds_NZ_WFIY01000004.1_cds_WP_155863962.1_1884 target sequence
FIKILGLDSSVLEKFSYQLTPLEAKKVSLALATFLEPKYVLIDDIEFGINDNGRAVVINSIIDLESILSSKFIVLDNDPAVISRV

SEQ ID NO: 36745 - protein, 85 aa, unidentified
  REGION 1..85: note = Description of Unknown:cds_NZ_WFIY01000004.1_cds_WP_155863963.1_1885 target sequence
IVINNLYTDQLKGISLIVDGVTCVLGDWGEDKKSLISSLLGKSKYVGEIKFYKDKEIDKNQAKNFIRVIPRELEKPKIDSITFIK

SEQ ID NO: 36746 - protein, 85 aa, unidentified
  REGION 1..85: note = Description of Unknown:cds_NZ_WFIY01000004.1_cds_WP_155863963.1_1885 target sequence
VLLKNYGGNVNPESILSILNIRNDKISNLSEYEVFNLYLSSLLIGKAYFVIAEDFLELMEEQLKYKALKNLIKIVSIINGDLLLF

SEQ ID NO: 36747 - protein, 85 aa, unidentified
  REGION 1..85: note = Description of Unknown:cds_NZ_WFIY01000004.1_cds_WP_155863963.1_1885 target sequence
SSSTKNLEVCKRIYVIYGGKLIEESYGKELLHPYSLTLLNSKITIGNKKEKIPVREIGSPSDHGCPFHDYCDLMQKEKPLSIKCR

SEQ ID NO: 36748 - protein, 84 aa, unidentified
  REGION 1..84: note = Description of Unknown:cds_NZ_WFIY01000004.1_cds_WP_155863963.1_1885 target sequence
SYGKELLHPYSLTLLNSKITIGNKKEKIPVREIGSPSDHGCPFHDYCDLMQKEKPLSIKCRLQDPPMFIVKGNRVSCWYYEKYV

SEQ ID NO: 36749 - protein, 85 aa, unidentified
  REGION 1..85: note = Description of Unknown:cds_NZ_WFIY01000004.1_cds_WP_155863963.1_1885 target sequence
WGEDKKSLISSLLGKSKYVGEIKFYKDKEIDKNQAKNFIRVIPRELEKPKIDSITFIKVLLKNYGGNVNPESILSILNIRNDKIS

SEQ ID NO: 36750 - protein, 85 aa, unidentified
  REGION 1..85: note = Description of Unknown:cds_NZ_WFIY01000004.1_cds_WP_155863963.1_1885 target sequence
NLSEYEVFNLYLSSLLIGKAYFVIAEDFLELMEEQLKYKALKNLIKIVSIINGDLLLFSSSTKNLEVCKRIYVIYGGKLIEESYG

SEQ ID NO: 36751 - protein, 85 aa, unidentified
  REGION 1..85: note = Description of Unknown:cds_NZ_WFIY01000004.1_cds_WP_155863987.1_1912 target sequence
IEQIFISKLMQFLEEDYYPEDLTSRIVEGYKIRSYVRSKDEGILAGNKFIIPFLNYLGFHVKSSMVDGVEVKKGDNLLVFEGDAD

SEQ ID NO: 36752 - protein, 85 aa, unidentified
  REGION 1..85: note = Description of Unknown:cds_NZ_WFIY01000004.1_cds_WP_155863987.1_1912 target sequence
KSLSVERLVLNLLGKLSGIATATYTMVKLAREVNPTVRIAGTRKTTPGLRVFEKYAIEVGGGDPHRFNLSDAVLIKDNHLAIIGN

SEQ ID NO: 36753 - protein, 85 aa, unidentified
  REGION 1..85: note = Description of Unknown:cds_NZ_WFIY01000004.1_cds_WP_155863987.1_1912 target sequence
IEKAVKMARQIASFTKKIEIEVSSYEDAIKAYRAGVDAILLDNMSVNEIEEVVSELKGKVILEASGRITPENVKSYAKTGVDIIS

SEQ ID NO: 36754 - protein, 84 aa, unidentified
  REGION 1..84: note = Description of Unknown:cds_NZ_WFIY01000004.1_cds_WP_155863987.1_1912 target sequence
YEDAIKAYRAGVDAILLDNMSVNEIEEVVSELKGKVILEASGRITPENVKSYAKTGVDIISSGYITHSSRSLDFSMDVEVTSPQ

SEQ ID NO: 36755 - protein, 85 aa, unidentified
  REGION 1..85: note = Description of Unknown:cds_NZ_WFIY01000004.1_cds_WP_155863987.1_1912 target sequence
EGYKIRSYVRSKDEGILAGNKFIIPFLNYLGFHVKSSMVDGVEVKKGDNLLVFEGDADKSLSVERLVLNLLGKLSGIATATYTMV

SEQ ID NO: 36756 - protein, 85 aa, unidentified
  REGION 1..85: note = Description of Unknown:cds_NZ_WFIY01000004.1_cds_WP_155863987.1_1912 target sequence
KLAREVNPTVRIAGTRKTTPGLRVFEKYAIEVGGGDPHRFNLSDAVLIKDNHLAIIGNIEKAVKMARQIASFTKKIEIEVSSYED

SEQ ID NO: 36757 - protein, 85 aa, unidentified
  REGION 1..85: note = Description of Unknown:cds_NZ_WFIY01000004.1_cds_WP_155864064.1_2001 target sequence
ENILNTIFKKSSTTYYNSTLLFPREIRSDVTKLYAFVRVFDDLVDSVPQKVEEFYALRELYYKELDKGSGANVVISNFVELMRRK

SEQ ID NO: 36758 - protein, 85 aa, unidentified
  REGION 1..85: note = Description of Unknown:cds_NZ_WFIY01000004.1_cds_WP_155864064.1_2001 target sequence
GFKEEWVEAFLNSMESDLKKKVYYTIDETLSYMYGSAEVVGLMMMKILNLRDEAAYYARMLGRAMQYLNFIRDVKEDMEMGRQYL

SEQ ID NO: 36759 - protein, 85 aa, unidentified
  REGION 1..85: note = Description of Unknown:cds_NZ_WFIY01000004.1_cds_WP_155864064.1_2001 target sequence
PVNEMKEFKVSSLGECNEAFKEFIRFNLKRYFSFQKEAEIGYQMIPVRYLIPIKTAADMYKWTGMKIMADPCVVNRIKVKPKRRR

SEQ ID NO: 36760 - protein, 84 aa, unidentified
  REGION 1..84: note = Description of Unknown:cds_NZ_WFIY01000004.1_cds_WP_155864064.1_2001 target sequence
RFNLKRYFSFQKEAEIGYQMIPVRYLIPIKTAADMYKWTGMKIMADPCVVNRIKVKPKRRRVLIRGLFNFIGVPIWKLTYFYRI

SEQ ID NO: 36761 - protein, 85 aa, unidentified
  REGION 1..85: note = Description of Unknown:cds_NZ_WFIY01000004.1_cds_WP_155864064.1_2001 target sequence
SDVTKLYAFVRVFDDLVDSVPQKVEEFYALRELYYKELDKGSGANVVISNFVELMRRKGFKEEWVEAFLNSMESDLKKKVYYTID

SEQ ID NO: 36762 - protein, 85 aa, unidentified
  REGION 1..85: note = Description of Unknown:cds_NZ_WFIY01000004.1_cds_WP_155864064.1_2001 target sequence
ETLSYMYGSAEVVGLMMMKILNLRDEAAYYARMLGRAMQYLNFIRDVKEDMEMGRQYLPVNEMKEFKVSSLGECNEAFKEFIRFN

SEQ ID NO: 36763 - protein, 85 aa, unidentified
  REGION 1..85: note = Description of Unknown:cds_NC_030656.1_cds_YP_009268765.1_50 target sequence
RKTSSTGTKAAAASAVKTNKKVNEKRDMTPADVVCFAKSISKSTTKCIDYVTLTQSQYPSCSNINITLTEELSAKLTSPLIMIEG

SEQ ID NO: 36764 - protein, 85 aa, unidentified
  REGION 1..85: note = Description of Unknown:cds_NC_030656.1_cds_YP_009268765.1_50 target sequence
DGKIYKNKSNDNFRQQNCGFFLRIRPKSASPLLYQLLEHIYTNIDQNVRIPPSLSTLQVTNIVEKTIKEDFIYVNKLSGAIVEYT

SEQ ID NO: 36765 - protein, 85 aa, unidentified
  REGION 1..85: note = Description of Unknown:cds_NC_030656.1_cds_YP_009268765.1_50 target sequence
SSSSCERSRQKCILDELESLALRDPQIIKVLLVPLVVYRTGNETKITFALKKIMVEKDCSITVLDINGESAKIKMSAEDEEDEED

SEQ ID NO: 36766 - protein, 84 aa, unidentified
  REGION 1..84: note = Description of Unknown:cds_NC_030656.1_cds_YP_009268765.1_50 target sequence
PQIIKVLLVPLVVYRTGNETKITFALKKIMVEKDCSITVLDINGESAKIKMSAEDEEDEEDCVRKLCVVEDVNVEEDDDDSFNV

SEQ ID NO: 36767 - protein, 85 aa, unidentified
  REGION 1..85: note = Description of Unknown:cds_NC_030656.1_cds_YP_009268765.1_50 target sequence
MTPADVVCFAKSISKSTTKCIDYVTLTQSQYPSCSNINITLTEELSAKLTSPLIMIEGDGKIYKNKSNDNFRQQNCGFFLRIRPK

SEQ ID NO: 36768 - protein, 85 aa, unidentified
  REGION 1..85: note = Description of Unknown:cds_NC_030656.1_cds_YP_009268765.1_50 target sequence
SASPLLYQLLEHIYTNIDQNVRIPPSLSTLQVTNIVEKTIKEDFIYVNKLSGAIVEYTSSSSCERSRQKCILDELESLALRDPQI

SEQ ID NO: 36769 - protein, 85 aa, unidentified
  REGION 1..85: note = Description of Unknown:hvTR_P09255 target sequence
FCTSPATRGDSSESKPGASVDVNGKMEYGSAPGPLNGRDTSRGPGAFCTPGWEIHPARLVEDINRVFLCIAQSSGRVTRDSRRLR

SEQ ID NO: 36770 - protein, 85 aa, unidentified
  REGION 1..85: note = Description of Unknown:hvTR_P09255 target sequence
RICLDFYLMGRTRQRPTLACWEELLQLQPTQTQCLRATLMEVSHRPPRGEDGFIEAPNVPLHRSALECDVSDDGGEDDSDDDGST

SEQ ID NO: 36771 - protein, 85 aa, unidentified
  REGION 1..85: note = Description of Unknown:hvTR_P09255 target sequence
PSDVIEFRDSDAESSDGEDFIVEEESEESTDSCEPDGVPGDCYRDGDGCNTPSPKRPQRAIERYAGAETAEYTAAKALTALGEGG

SEQ ID NO: 36772 - protein, 84 aa, unidentified
  REGION 1..84: note = Description of Unknown:hvTR_P09255 target sequence
EESEESTDSCEPDGVPGDCYRDGDGCNTPSPKRPQRAIERYAGAETAEYTAAKALTALGEGGVDWKRRRHEAPRRHDIPPPHGV

SEQ ID NO: 36773 - protein, 85 aa, unidentified
  REGION 1..85: note = Description of Unknown:hvTR_P09255 target sequence
YGSAPGPLNGRDTSRGPGAFCTPGWEIHPARLVEDINRVFLCIAQSSGRVTRDSRRLRRICLDFYLMGRTRQRPTLACWEELLQL

SEQ ID NO: 36774 - protein, 85 aa, unidentified
  REGION 1..85: note = Description of Unknown:hvTR_P09255 target sequence
QPTQTQCLRATLMEVSHRPPRGEDGFIEAPNVPLHRSALECDVSDDGGEDDSDDDGSTPSDVIEFRDSDAESSDGEDFIVEEESE

SEQ ID NO: 36775 - protein, 85 aa, unidentified
  REGION 1..85: note = Description of Unknown:vpeps_4ART_1 target sequence
GEKITEEREFQSISEIPEEEIDATNDEEKLADIVENEIEKEIRKSKTRKCKTIENFYYYILRDGKIYPASDYDIEVEKGKRSAND

SEQ ID NO: 36776 - protein, 85 aa, unidentified
  REGION 1..85: note = Description of Unknown:vpeps_4ART_1 target sequence
IYAFVETDVTRDFDEFLFDIDYGLPSISDILKFYLEKAGFRIANEVPTPNLKYYIHAVVEFGEDRPQYLAVNIYDIDSLARALRI

SEQ ID NO: 36777 - protein, 85 aa, unidentified
  REGION 1..85: note = Description of Unknown:vpeps_4ART_1 target sequence
PQIVEQKLGNKPRTITADEFNDIERIVAEEQPILAGYTYDEALRIPYHYYVDHNNSFKDDALKIAHAYLQLFPTPYQVCYEWKAR

SEQ ID NO: 36778 - protein, 85 aa, unidentified
  REGION 1..85: note = Description of Unknown:vpeps_4ART_1 target sequence
ERIVAEEQPILAGYTYDEALRIPYHYYVDHNNSFKDDALKIAHAYLQLFPTPYQVCYEWKARWFNKIDCLKLERLKPSSHHHHHH

SEQ ID NO: 36779 - protein, 85 aa, unidentified
  REGION 1..85: note = Description of Unknown:vpeps_4ART_1 target sequence
EKLADIVENEIEKEIRKSKTRKCKTIENFYYYILRDGKIYPASDYDIEVEKGKRSANDIYAFVETDVTRDFDEFLFDIDYGLPSI

SEQ ID NO: 36780 - protein, 85 aa, unidentified
  REGION 1..85: note = Description of Unknown:vpeps_4ART_1 target sequence
SDILKFYLEKAGFRIANEVPTPNLKYYIHAVVEFGEDRPQYLAVNIYDIDSLARALRIPQIVEQKLGNKPRTITADEFNDIERIV

SEQ ID NO: 36781 - protein, 85 aa, unidentified
  REGION 1..85: note = Description of Unknown:cds_NZ_WFIY01000004.1_cds_WP_155863335.1_1301 target sequence
VKIAMIQMGGVESKEANIKKALDYAKSAIKDGAELIVYNELFTTQYFAATEDPKFFDLAEPDDGPTVRTFAEFSKQYKVGMVITF

SEQ ID NO: 36782 - protein, 85 aa, unidentified
  REGION 1..85: note = Description of Unknown:cds_NZ_WFIY01000004.1_cds_WP_155863335.1_1301 target sequence
FEEDKKIRGIYYDTSVFIKDGNVLGKYRKTHIPQVPGYYEKFYFKPGKDYPVFNFGEYKVGGVICYDRHFPEGIRILTLKGADIV

SEQ ID NO: 36783 - protein, 85 aa, unidentified
  REGION 1..85: note = Description of Unknown:cds_NZ_WFIY01000004.1_cds_WP_155863335.1_1301 target sequence
TIPTTTNFYPETWELELRAHAAFNTIYVVGVNRTPEVFQGREIDYFGKSLVADPMGRILKEMDSQEGYEIVDVDLNFIRERRKKA

SEQ ID NO: 36784 - protein, 84 aa, unidentified
  REGION 1..84: note = Description of Unknown:cds_NZ_WFIY01000004.1_cds_WP_155863335.1_1301 target sequence
NTIYVVGVNRTPEVFQGREIDYFGKSLVADPMGRILKEMDSQEGYEIVDVDLNFIRERRKKAPFLRDRKPENYTEISSIYIESL

SEQ ID NO: 36785 - protein, 85 aa, unidentified
  REGION 1..85: note = Description of Unknown:cds_NZ_WFIY01000004.1_cds_WP_155863335.1_1301 target sequence
AIKDGAELIVYNELFTTQYFAATEDPKFFDLAEPDDGPTVRTFAEFSKQYKVGMVITFFEEDKKIRGIYYDTSVFIKDGNVLGKY

SEQ ID NO: 36786 - protein, 85 aa, unidentified
  REGION 1..85: note = Description of Unknown:cds_NZ_WFIY01000004.1_cds_WP_155863335.1_1301 target sequence
RKTHIPQVPGYYEKFYFKPGKDYPVFNFGEYKVGGVICYDRHFPEGIRILTLKGADIVTIPTTTNFYPETWELELRAHAAFNTIY

SEQ ID NO: 36787 - protein, 85 aa, unidentified
  REGION 1..85: note = Description of Unknown:cds_NZ_WFIY01000004.1_cds_WP_155863884.1_1790 target sequence
YPPKIGYVIPDNINEAIDFLKTHDDAKVLAGGHSLIPMLKLRIIRPSYLIDITKLKELHYLNKEEKEYKLGATITHYEISKAQIP

SEQ ID NO: 36788 - protein, 85 aa, unidentified
  REGION 1..85: note = Description of Unknown:cds_NZ_WFIY01000004.1_cds_WP_155863884.1_1790 target sequence
LLSEVASKIGDPQVRNMGTIGGSISHLDPSADYPAALLVLDAKVKIKGPSGERLEEFSSFDKDMFTPDLSQGEIVTEISIPTVSG

SEQ ID NO: 36789 - protein, 85 aa, unidentified
  REGION 1..85: note = Description of Unknown:cds_NZ_WFIY01000004.1_cds_WP_155863884.1_1790 target sequence
YKYSYQKLERKAGDFAIVGVAVLIKTNGDEIEDFRIGVTGVNNKAYRSQIAEDMIKGKKINDEIIDKVAQEVANESNPTSDIRGS

SEQ ID NO: 36790 - protein, 84 aa, unidentified
  REGION 1..84: note = Description of Unknown:cds_NZ_WFIY01000004.1_cds_WP_155863884.1_1790 target sequence
IKTNGDEIEDFRIGVTGVNNKAYRSQIAEDMIKGKKINDEIIDKVAQEVANESNPTSDIRGSAEYKRKATKIMAKRAILDALKR

SEQ ID NO: 36791 - protein, 85 aa, unidentified
  REGION 1..85: note = Description of Unknown:cds_NZ_WFIY01000004.1_cds_WP_155863884.1_1790 target sequence
VLAGGHSLIPMLKLRIIRPSYLIDITKLKELHYLNKEEKEYKLGATITHYEISKAQIPLLSEVASKIGDPQVRNMGTIGGSISHL

SEQ ID NO: 36792 - protein, 85 aa, unidentified
  REGION 1..85: note = Description of Unknown:cds_NZ_WFIY01000004.1_cds_WP_155863884.1_1790 target sequence
DPSADYPAALLVLDAKVKIKGPSGERLEEFSSFDKDMFTPDLSQGEIVTEISIPTVSGYKYSYQKLERKAGDFAIVGVAVLIKTN

SEQ ID NO: 36793 - protein, 85 aa, unidentified
  REGION 1..85: note = Description of Unknown:hvTR_P35258.1 target sequence
CADPTCNRDHDLDNLTNRELLLLMARKMLPNTDKTFRMPQDCGSPSLSKGLSKDKQEQTKDVLTLENLGHILSYLHRSEIGNWMR

SEQ ID NO: 36794 - protein, 85 aa, unidentified
  REGION 1..85: note = Description of Unknown:hvTR_P35258.1 target sequence
HLRAALSLTCAGIRKTNRSLINTMTELHMNHENLPQDQNGVIKQTYTGIHLDKGGQFEAALWQGWDKRSISLFVQAALYVMNNIP

SEQ ID NO: 36795 - protein, 84 aa, unidentified
  REGION 1..84: note = Description of Unknown:hvTR_P35258.1 target sequence
TMTELHMNHENLPQDQNGVIKQTYTGIHLDKGGQFEAALWQGWDKRSISLFVQAALYVMNNIPCESSISVQASYESFYSSSKSR

SEQ ID NO: 36796 - protein, 85 aa, unidentified
  REGION 1..85: note = Description of Unknown:hvTR_P35258.1 target sequence
MLPNTDKTFRMPQDCGSPSLSKGLSKDKQEQTKDVLTLENLGHILSYLHRSEIGNWMRHLRAALSLTCAGIRKTNRSLINTMTEL

SEQ ID NO: 36797 - protein, 85 aa, unidentified
  REGION 1..85: note = Description of Unknown:cds_NZ_WFIY01000004.1_cds_438 target sequence
YLKLVRIHNVIGAAIGDFTGYVVSSAWNFNLEKLIISLIVVSLVAAGGYAINDVYDIEIDKINKPDRPLPSGRISIKNAVTLSYS

SEQ ID NO: 36798 - protein, 85 aa, unidentified
  REGION 1..85: note = Description of Unknown:cds_NZ_WFIY01000004.1_cds_438 target sequence
TMIIGSGLAFILGILQGLLAIMTSIALIYYAKTLKRQGLAGNIIVATTTALSIFYGGIAYFEGNWFERVIIPTAYSFLLTLGREL

SEQ ID NO: 36799 - protein, 85 aa, unidentified
  REGION 1..85: note = Description of Unknown:cds_NZ_WFIY01000004.1_cds_438 target sequence
VKGIEDYEGDKKYGVRTLATTKGIRFTWNIARVILLLMLAISPLPILLGFNIIYGILLIPFTFFTLKAVFAETSPRGGGEARGLL

SEQ ID NO: 36800 - protein, 84 aa, unidentified
  REGION 1..84: note = Description of Unknown:cds_NZ_WFIY01000004.1_cds_438 target sequence
IRFTWNIARVILLLMLAISPLPILLGFNIIYGILLIPFTFFTLKAVFAETSPRGGGEARGLLKGSAFIGMIAFILGSLPFKIFI

SEQ ID NO: 36801 - protein, 85 aa, unidentified
  REGION 1..85: note = Description of Unknown:cds_NZ_WFIY01000004.1_cds_438 target sequence
NFNLEKLIISLIVVSLVAAGGYAINDVYDIEIDKINKPDRPLPSGRISIKNAVTLSYSTMIIGSGLAFILGILQGLLAIMTSIAL

SEQ ID NO: 36802 - protein, 85 aa, unidentified
  REGION 1..85: note = Description of Unknown:cds_NZ_WFIY01000004.1_cds_438 target sequence
IYYAKTLKRQGLAGNIIVATTTALSIFYGGIAYFEGNWFERVIIPTAYSFLLTLGRELVKGIEDYEGDKKYGVRTLATTKGIRFT

SEQ ID NO: 36803 - protein, 85 aa, unidentified
  REGION 1..85: note = Description of Unknown:cds_NZ_WFIY01000004.1_cds_WP_155863766.1_1641 target sequence
IVRIFKDDETYVINNFNGNIYGSNAYEAGRVFYFIQKAIYSMPRLYGKVNDFKDPLDSWKRAFDETLSSMISLMLTEGRIKFYIN

SEQ ID NO: 36804 - protein, 85 aa, unidentified
  REGION 1..85: note = Description of Unknown:cds_NZ_WFIY01000004.1_cds_WP_155863766.1_1641 target sequence
FEIESEIFNIKGKIDGNKISLSSSLLKVPEGITNDLKGAILLDSFYFNHIERKRPFILPSARDGFLASFYKFVVFQSEGISGIPR

SEQ ID NO: 36805 - protein, 85 aa, unidentified
  REGION 1..85: note = Description of Unknown:cds_NZ_WFIY01000004.1_cds_WP_155863766.1_1641 target sequence
SMGIAAEFINSISINPGYKDEILGHQIVVNNEGLFIDDQPAYNSSSELLSLFALKYFLLNTTSNDVLIIEDVEAHLSNEGKTLLN

SEQ ID NO: 36806 - protein, 84 aa, unidentified
  REGION 1..84: note = Description of Unknown:cds_NZ_WFIY01000004.1_cds_WP_155863766.1_1641 target sequence
LGHQIVVNNEGLFIDDQPAYNSSSELLSLFALKYFLLNTTSNDVLIIEDVEAHLSNEGKTLLNEYLKTAKCNIVFVSNYSKFSE

SEQ ID NO: 36807 - protein, 85 aa, unidentified
  REGION 1..85: note = Description of Unknown:cds_NZ_WFIY01000004.1_cds_WP_155863766.1_1641 target sequence
AGRVFYFIQKAIYSMPRLYGKVNDFKDPLDSWKRAFDETLSSMISLMLTEGRIKFYINFEIESEIFNIKGKIDGNKISLSSSLLK

SEQ ID NO: 36808 - protein, 85 aa, unidentified
  REGION 1..85: note = Description of Unknown:cds_NZ_WFIY01000004.1_cds_WP_155863766.1_1641 target sequence
VPEGITNDLKGAILLDSFYFNHIERKRPFILPSARDGFLASFYKFVVFQSEGISGIPRSMGIAAEFINSISINPGYKDEILGHQI

SEQ ID NO: 36809 - protein, 85 aa, unidentified
  REGION 1..85: note = Description of Unknown:cds_NZ_WFIY01000004.1_cds_WP_013776488.1_2237 target sequence
ATKVLQLPDDPRFLDMSYEEQGALPEEQRNLDRLPPDQRQLAEEFWKAVKSDFRFNEYLRGCLNCGVCTSGCPAAKFYDFGPREM

SEQ ID NO: 36810 - protein, 85 aa, unidentified
  REGION 1..85: note = Description of Unknown:cds_NZ_WFIY01000004.1_cds_WP_013776488.1_2237 target sequence
IQYMMRDEADKIWEFVNKKVWACVQCYTCSMRCPFNNEIAGLIMLLREYAVQFALPSAKEILAPYRRVLYTVLTLGNQVTPDMIQ

SEQ ID NO: 36811 - protein, 85 aa, unidentified
  REGION 1..85: note = Description of Unknown:cds_NZ_WFIY01000004.1_cds_WP_013776488.1_2237 target sequence
PEAFPDWGPQAVEESKNMDVYRKAVPVDLLQRTDVGWHPSLQTAVEMMTIMFESGVMDSIKKVDPDLYDMIADIYDERKQQLEEI

SEQ ID NO: 36812 - protein, 84 aa, unidentified
  REGION 1..84: note = Description of Unknown:cds_NZ_WFIY01000004.1_cds_WP_013776488.1_2237 target sequence
KAVPVDLLQRTDVGWHPSLQTAVEMMTIMFESGVMDSIKKVDPDLYDMIADIYDERKQQLEEIKEKWEKGELKEEDLPDSWLDL

SEQ ID NO: 36813 - protein, 85 aa, unidentified
  REGION 1..85: note = Description of Unknown:cds_NZ_WFIY01000004.1_cds_WP_013776488.1_2237 target sequence
QRNLDRLPPDQRQLAEEFWKAVKSDFRFNEYLRGCLNCGVCTSGCPAAKFYDFGPREMIQYMMRDEADKIWEFVNKKVWACVQCY

SEQ ID NO: 36814 - protein, 85 aa, unidentified
  REGION 1..85: note = Description of Unknown:cds_NZ_WFIY01000004.1_cds_WP_013776488.1_2237 target sequence
TCSMRCPFNNEIAGLIMLLREYAVQFALPSAKEILAPYRRVLYTVLTLGNQVTPDMIQPEAFPDWGPQAVEESKNMDVYRKAVPV

SEQ ID NO: 36815 - protein, 85 aa, unidentified
  REGION 1..85: note = Description of Unknown:cds_NC_007409.1_cds_YP_319887.1_56 target sequence
VTTSPPPTLTNSVQPHPTTTTTTTLLPVTNLIPIILVSVFIALLLIFLLSRTSKKQPDPYLGVMSAISKHIRKKKAIALVFYIDT

SEQ ID NO: 36816 - protein, 85 aa, unidentified
  REGION 1..85: note = Description of Unknown:cds_NC_007409.1_cds_YP_319887.1_56 target sequence
TDQRIKIYPVFQKVGNVLIYLNENGETNFSVIDPKTKPLQIKVGNISYPVYFAIAGNTIKYLAKFEDLETGVKYDNISIDDPRLI

SEQ ID NO: 36817 - protein, 85 aa, unidentified
  REGION 1..85: note = Description of Unknown:cds_NC_007409.1_cds_YP_319887.1_56 target sequence
EILSKITGDVTSTYYITPTKKLTILASPEAIASVTIKRLWSPIENSIITIKEINENLTKLMEISARVLGLRLNTRLTLILMLIAV

SEQ ID NO: 36818 - protein, 84 aa, unidentified
  REGION 1..84: note = Description of Unknown:cds_NC_007409.1_cds_YP_319887.1_56 target sequence
TILASPEAIASVTIKRLWSPIENSIITIKEINENLTKLMEISARVLGLRLNTRLTLILMLIAVFLIFMVLIGTGIVHFPPPPTK

SEQ ID NO: 36819 - protein, 85 aa, unidentified
  REGION 1..85: note = Description of Unknown:cds_NC_007409.1_cds_YP_319887.1_56 target sequence
VTNLIPIILVSVFIALLLIFLLSRTSKKQPDPYLGVMSAISKHIRKKKAIALVFYIDTTDQRIKIYPVFQKVGNVLIYLNENGET

SEQ ID NO: 36820 - protein, 85 aa, unidentified
  REGION 1..85: note = Description of Unknown:cds_NC_007409.1_cds_YP_319887.1_56 target sequence
NFSVIDPKTKPLQIKVGNISYPVYFAIAGNTIKYLAKFEDLETGVKYDNISIDDPRLIEILSKITGDVTSTYYITPTKKLTILAS

SEQ ID NO: 36821 - protein, 85 aa, unidentified
  REGION 1..85: note = Description of Unknown:cds_NC_024711.1_cds_YP_009052542.2_65 target sequence
VPPFKVYKVMQDINQQLYERKSTPEGFIPVYGVVITVPTGIYINGQKEFTCDKTFDEVKEILLKGGSIIAVDNNNSRINFDRIDI

SEQ ID NO: 36822 - protein, 85 aa, unidentified
  REGION 1..85: note = Description of Unknown:cds_NC_024711.1_cds_YP_009052542.2_65 target sequence
GNNSISATITYFSPNGGGINKIDLSWDKGIARVGGGETKSINTFVAINSNQIIRSYEIGSITILLTNSGSKEEVLAAINSIFTNF

SEQ ID NO: 36823 - protein, 85 aa, unidentified
  REGION 1..85: note = Description of Unknown:cds_NC_024711.1_cds_YP_009052542.2_65 target sequence
AGFVTAIGKPNSVFHNGKYGTFNVRYTDNIIIIQWSNAKAIHHVALSEDGSYVYNTIQIVDQTLYRLSNLTIEPIVNPKIWIGTA

SEQ ID NO: 36824 - protein, 84 aa, unidentified
  REGION 1..84: note = Description of Unknown:cds_NC_024711.1_cds_YP_009052542.2_65 target sequence
NVRYTDNIIIIQWSNAKAIHHVALSEDGSYVYNTIQIVDQTLYRLSNLTIEPIVNPKIWIGTATQYAAIAQKDNNTTYIVKSDA

SEQ ID NO: 36825 - protein, 85 aa, unidentified
  REGION 1..85: note = Description of Unknown:cds_NC_024711.1_cds_YP_009052542.2_65 target sequence
IPVYGVVITVPTGIYINGQKEFTCDKTFDEVKEILLKGGSIIAVDNNNSRINFDRIDIGNNSISATITYFSPNGGGINKIDLSWD

SEQ ID NO: 36826 - protein, 85 aa, unidentified
  REGION 1..85: note = Description of Unknown:cds_NC_024711.1_cds_YP_009052542.2_65 target sequence
KGIARVGGGETKSINTFVAINSNQIIRSYEIGSITILLTNSGSKEEVLAAINSIFTNFAGFVTAIGKPNSVFHNGKYGTFNVRYT

SEQ ID NO: 36827 - protein, 85 aa, unidentified
  REGION 1..85: note = Description of Unknown:cds_NZ_WFIY01000004.1_cds_440 target sequence
LIFDRKRFPGKKCTGIISYSTFQKLEIPREFVDRDFKEIEIVINNKYSIFIKTHVLRLNREKLEKWLDQELKVIRPVNAEIRNEK

SEQ ID NO: 36828 - protein, 85 aa, unidentified
  REGION 1..85: note = Description of Unknown:cds_NZ_WFIY01000004.1_cds_440 target sequence
EVVVNSNVYHGKVIDCSGWKGKAKWIKAIEEVREPLPEMDKIRVFIDSKNPGGFSWIVPLPDKTLVGSLSYSNPKLFLPAVDKRL

SEQ ID NO: 36829 - protein, 85 aa, unidentified
  REGION 1..85: note = Description of Unknown:cds_NZ_WFIY01000004.1_cds_440 target sequence
IEIHGGSIPRVKPIKPQSSIIAFGDRTGLIKTFTGGGIFGIAELISSNNYAKTFSELSKEIRKQYYLTTLVEKSWRIWLSLARIY

SEQ ID NO: 36830 - protein, 84 aa, unidentified
  REGION 1..84: note = Description of Unknown:cds_NZ_WFIY01000004.1_cds_440 target sequence
FGDRTGLIKTFTGGGIFGIAELISSNNYAKTFSELSKEIRKQYYLTTLVEKSWRIWLSLARIYKDKTIRAEKEFDFHSMLLFSH

SEQ ID NO: 36831 - protein, 85 aa, unidentified
  REGION 1..85: note = Description of Unknown:cds_NZ_WFIY01000004.1_cds_440 target sequence
PREFVDRDFKEIEIVINNKYSIFIKTHVLRLNREKLEKWLDQELKVIRPVNAEIRNEKEVVVNSNVYHGKVIDCSGWKGKAKWIK

SEQ ID NO: 36832 - protein, 85 aa, unidentified
  REGION 1..85: note = Description of Unknown:cds_NZ_WFIY01000004.1_cds_440 target sequence
AIEEVREPLPEMDKIRVFIDSKNPGGFSWIVPLPDKTLVGSLSYSNPKLFLPAVDKRLIEIHGGSIPRVKPIKPQSSIIAFGDRT

SEQ ID NO: 36833 - protein, 85 aa, unidentified
  REGION 1..85: note = Description of Unknown:cds_NZ_WFIY01000004.1_cds_WP_155862868.1_706 target sequence
IVKTLEVLRPPIISIEDNLMQAFKRINERGIGRVIIANEKVEGILSTRDLLSVYLSFCPQNCSQGDLYKMSNMKASLYMTPNPAV

SEQ ID NO: 36834 - protein, 85 aa, unidentified
  REGION 1..85: note = Description of Unknown:cds_NZ_WFIY01000004.1_cds_WP_155862868.1_706 target sequence
VNEKDDILEAITIMVTRNFGSLPVVDDLGRPTGIVTEREMLLNFQDLEVLFPVSMFMSKKVTTINKDADLVQTTRQMLHRGFRRL

SEQ ID NO: 36835 - protein, 85 aa, unidentified
  REGION 1..85: note = Description of Unknown:cds_NZ_WFIY01000004.1_cds_WP_155862868.1_706 target sequence
PVVDDEGKVIGIVTAADCIKAASKSVEKLDPDYFFSKKVTDIMSTPPISIEEDRSINEAAATLIEKNIGSLLILDDESRPKGIIT

SEQ ID NO: 36836 - protein, 84 aa, unidentified
  REGION 1..84: note = Description of Unknown:cds_NZ_WFIY01000004.1_cds_WP_155862868.1_706 target sequence
ASKSVEKLDPDYFFSKKVTDIMSTPPISIEEDRSINEAAATLIEKNIGSLLILDDESRPKGIITERDLLIALHYQLHLQFLRKT

SEQ ID NO: 36837 - protein, 85 aa, unidentified
  REGION 1..85: note = Description of Unknown:cds_NZ_WFIY01000004.1_cds_WP_155862868.1_706 target sequence
ERGIGRVIIANEKVEGILSTRDLLSVYLSFCPQNCSQGDLYKMSNMKASLYMTPNPAVVNEKDDILEAITIMVTRNFGSLPVVDD

SEQ ID NO: 36838 - protein, 85 aa, unidentified
  REGION 1..85: note = Description of Unknown:cds_NZ_WFIY01000004.1_cds_WP_155862868.1_706 target sequence
LGRPTGIVTEREMLLNFQDLEVLFPVSMFMSKKVTTINKDADLVQTTRQMLHRGFRRLPVVDDEGKVIGIVTAADCIKAASKSVE

SEQ ID NO: 36839 - protein, 85 aa, unidentified
  REGION 1..85: note = Description of Unknown:cds_NZ_WFIY01000004.1_cds_WP_155862921.1_773 target sequence
SITPSNENIVPLIKRESILASLDRGIRADGRKFNEYRPLSITLGYAKKADGSALVKLGDTTVLAGVKVEPEEPFEDTPNQGNLVV

SEQ ID NO: 36840 - protein, 85 aa, unidentified
  REGION 1..85: note = Description of Unknown:cds_NZ_WFIY01000004.1_cds_WP_155862921.1_773 target sequence
NVELLPLAYETFEPGPPDENAIELSRVVDRSLRDSKSIDLSKLVIEPGKKIWTVWVDIYVLDYGGNILDACTLAAVSALYDTRLP

SEQ ID NO: 36841 - protein, 85 aa, unidentified
  REGION 1..85: note = Description of Unknown:cds_NZ_WFIY01000004.1_cds_WP_155862921.1_773 target sequence
KVVKEGDEIKIIKEEKGEKLPMNFPVVTVSVAKIGKHLVVDPDLDEEGIMDAKISLSYTPEGRIVGIQKTGIGTFTLTEIDNVET

SEQ ID NO: 36842 - protein, 84 aa, unidentified
  REGION 1..84: note = Description of Unknown:cds_NZ_WFIY01000004.1_cds_WP_155862921.1_773 target sequence
MNFPVVTVSVAKIGKHLVVDPDLDEEGIMDAKISLSYTPEGRIVGIQKTGIGTFTLTEIDNVETLARSVSQKLFEELKKQINIQ

SEQ ID NO: 36843 - protein, 85 aa, unidentified
  REGION 1..85: note = Description of Unknown:cds_NZ_WFIY01000004.1_cds_WP_155862921.1_773 target sequence
ADGRKFNEYRPLSITLGYAKKADGSALVKLGDTTVLAGVKVEPEEPFEDTPNQGNLVVNVELLPLAYETFEPGPPDENAIELSRV

SEQ ID NO: 36844 - protein, 85 aa, unidentified
  REGION 1..85: note = Description of Unknown:cds_NZ_WFIY01000004.1_cds_WP_155862921.1_773 target sequence
VDRSLRDSKSIDLSKLVIEPGKKIWTVWVDIYVLDYGGNILDACTLAAVSALYDTRLPKVVKEGDEIKIIKEEKGEKLPMNFPVV

SEQ ID NO: 36845 - protein, 85 aa, unidentified
  REGION 1..85: note = Description of Unknown:cds_NZ_WFIY01000004.1_cds_WP_155863164.1_1093 target sequence
LDKLGLIDVVNGLLDDEEYLGKIMGAIVNDKTLSLINNFNKITGLLDFFMDAETMDNIKYALSLVGKLKSSGIIDPIIGILQDEE

SEQ ID NO: 36846 - protein, 85 aa, unidentified
  REGION 1..85: note = Description of Unknown:cds_NZ_WFIY01000004.1_cds_WP_155863164.1_1093 target sequence
YMSKIMGAIVNDKVLELIGKWNNIVDLISDLTDDETLSAIKSVVGLLKDLNKTGILDPIKGILRDEEYMGKIMGALINDFTLNLI

SEQ ID NO: 36847 - protein, 85 aa, unidentified
  REGION 1..85: note = Description of Unknown:cds_NZ_WFIY01000004.1_cds_WP_155863164.1_1093 target sequence
SNWNQITSDLSKIDLTNFKYYIQLINSIGEGLKEGKTMDTINLVKEIAKEQSTVNLLTAIGNALKAEKVKPIGLGGLLSSLRDPQ

SEQ ID NO: 36848 - protein, 84 aa, unidentified
  REGION 1..84: note = Description of Unknown:cds_NZ_WFIY01000004.1_cds_WP_155863164.1_1093 target sequence
QLINSIGEGLKEGKTMDTINLVKEIAKEQSTVNLLTAIGNALKAEKVKPIGLGGLLSSLRDPQVQKGLGVVIEILRNIGSYYKS

SEQ ID NO: 36849 - protein, 85 aa, unidentified
  REGION 1..85: note = Description of Unknown:cds_NZ_WFIY01000004.1_cds_WP_155863164.1_1093 target sequence
VNDKTLSLINNFNKITGLLDFFMDAETMDNIKYALSLVGKLKSSGIIDPIIGILQDEEYMSKIMGAIVNDKVLELIGKWNNIVDL

SEQ ID NO: 36850 - protein, 85 aa, unidentified
  REGION 1..85: note = Description of Unknown:cds_NZ_WFIY01000004.1_cds_WP_155863164.1_1093 target sequence
ISDLTDDETLSAIKSVVGLLKDLNKTGILDPIKGILRDEEYMGKIMGALINDFTLNLISNWNQITSDLSKIDLTNFKYYIQLINS

SEQ ID NO: 36851 - protein, 85 aa, unidentified
  REGION 1..85: note = Description of Unknown:cds_NZ_WFIY01000004.1_cds_WP_155864428.1_1407 target sequence
LYWWGLNVVFPLGLLFFVFGAIYRISRYFLGRRFPSYAVSGFGSEFKEAITAIPTPFRSAARRDPFLIVETIFWHIFMLGVIIIV

SEQ ID NO: 36852 - protein, 85 aa, unidentified
  REGION 1..85: note = Description of Unknown:cds_NZ_WFIY01000004.1_cds_WP_155864428.1_1407 target sequence
GIHIIAWNYIFGTILGIPNPLWFLFKISTPEQFTSAYQMGLLGSNSYSHGGILNPLGAWNSAEVSTSTFDPWGFLAVLVNGTMMG

SEQ ID NO: 36853 - protein, 85 aa, unidentified
  REGION 1..85: note = Description of Unknown:cds_NZ_WFIY01000004.1_cds_WP_155864428.1_1407 target sequence
LLALAGITGYLVTRIIEDVTGHKRLSSSGDYIFLILLLAIVVTGLAAMYDIPIPYLGIPNQANWYGLHIALVGAFIGYVPFSKGW

SEQ ID NO: 36854 - protein, 84 aa, unidentified
  REGION 1..84: note = Description of Unknown:cds_NZ_WFIY01000004.1_cds_WP_155864428.1_1407 target sequence
KRLSSSGDYIFLILLLAIVVTGLAAMYDIPIPYLGIPNQANWYGLHIALVGAFIGYVPFSKGWHMFGYYLGKGFRGYSYGRKKE

SEQ ID NO: 36855 - protein, 85 aa, unidentified
  REGION 1..85: note = Description of Unknown:cds_NZ_WFIY01000004.1_cds_WP_155864428.1_1407 target sequence
YFLGRRFPSYAVSGFGSEFKEAITAIPTPFRSAARRDPFLIVETIFWHIFMLGVIIIVGIHIIAWNYIFGTILGIPNPLWFLFKI

SEQ ID NO: 36856 - protein, 85 aa, unidentified
  REGION 1..85: note = Description of Unknown:cds_NZ_WFIY01000004.1_cds_WP_155864428.1_1407 target sequence
STPEQFTSAYQMGLLGSNSYSHGGILNPLGAWNSAEVSTSTFDPWGFLAVLVNGTMMGLLALAGITGYLVTRIIEDVTGHKRLSS

SEQ ID NO: 36857 - protein, 85 aa, unidentified
  REGION 1..85: note = Description of Unknown:cds_NZ_WFIY01000004.1_cds_WP_155863675.1_1545 target sequence
IFTDRLTKIYKDGTRALDELSITLDGKISCILGRNGAGKTTLIRILSTQLLPTSGKALIEGFDVVKDVKKVRKIIASIPQEASPM

SEQ ID NO: 36858 - protein, 85 aa, unidentified
  REGION 1..85: note = Description of Unknown:cds_NZ_WFIY01000004.1_cds_WP_155863675.1_1545 target sequence
GIASPLEHVTMYLTARGFSISEALRTAKYVLKEVGLGDVMDKPTDELSGGMKRKVFVAMAIASNADVVFLDEPTTGLDPISRLEV

SEQ ID NO: 36859 - protein, 85 aa, unidentified
  REGION 1..85: note = Description of Unknown:cds_NZ_WFIY01000004.1_cds_WP_155863675.1_1545 target sequence
WSAIKQMKSKIILTTHYMEEAEELCEKIAIINKGKLVEYGTVEDLLSPLRGKVRVEGKGDIRVGNLSISYVDEEEAKKLVGKGVI

SEQ ID NO: 36860 - protein, 84 aa, unidentified
  REGION 1..84: note = Description of Unknown:cds_NZ_WFIY01000004.1_cds_WP_155863675.1_1545 target sequence
EELCEKIAIINKGKLVEYGTVEDLLSPLRGKVRVEGKGDIRVGNLSISYVDEEEAKKLVGKGVIIKPISLEDIMIIKGLYYEEE

SEQ ID NO: 36861 - protein, 85 aa, unidentified
  REGION 1..85: note = Description of Unknown:cds_NZ_WFIY01000004.1_cds_WP_155863675.1_1545 target sequence
ISCILGRNGAGKTTLIRILSTQLLPTSGKALIEGFDVVKDVKKVRKIIASIPQEASPMGIASPLEHVTMYLTARGFSISEALRTA

SEQ ID NO: 36862 - protein, 85 aa, unidentified
  REGION 1..85: note = Description of Unknown:cds_NZ_WFIY01000004.1_cds_WP_155863675.1_1545 target sequence
KYVLKEVGLGDVMDKPTDELSGGMKRKVFVAMAIASNADVVFLDEPTTGLDPISRLEVWSAIKQMKSKIILTTHYMEEAEELCEK

SEQ ID NO: 36863 - protein, 85 aa, unidentified
  REGION 1..85: note = Description of Unknown:cds_NZ_WFIY01000004.1_cds_WP_155864129.1_2081 target sequence
SFETDIEGLKELKDASLWFIIIEILAIIGEFASVAALVIAVIDLVLLFTIAIPKLRHAFQIFASTGKNVSKGFTGLNLILPGIVV

SEQ ID NO: 36864 - protein, 85 aa, unidentified
  REGION 1..85: note = Description of Unknown:cds_NZ_WFIY01000004.1_cds_WP_155864129.1_2081 target sequence
ELLGGALAIAGLFSSSVSLAIVGGVIVFLAAIILFIAYLLIGIDIFNLGNFYNNDMLKIGGILIIIPFISFIGWILTYVSVDEVI

SEQ ID NO: 36865 - protein, 85 aa, unidentified
  REGION 1..85: note = Description of Unknown:cds_NZ_WFIY01000004.1_cds_WP_155864129.1_2081 target sequence
NKLRGGTYVPQQFQVYQVGQGIIRLDGTANLTLFSSINVNVVSASIDNTPYTTTNIIPNVLNVGNNFITMKFAGVTGLIPGNNYY

SEQ ID NO: 36866 - protein, 84 aa, unidentified
  REGION 1..84: note = Description of Unknown:cds_NZ_WFIY01000004.1_cds_WP_155864129.1_2081 target sequence
IIRLDGTANLTLFSSINVNVVSASIDNTPYTTTNIIPNVLNVGNNFITMKFAGVTGLIPGNNYYLTIYLSNGTSIKAVVTCSST

SEQ ID NO: 36867 - protein, 85 aa, unidentified
  REGION 1..85: note = Description of Unknown:cds_NZ_WFIY01000004.1_cds_WP_155864129.1_2081 target sequence
IGEFASVAALVIAVIDLVLLFTIAIPKLRHAFQIFASTGKNVSKGFTGLNLILPGIVVELLGGALAIAGLFSSSVSLAIVGGVIV

SEQ ID NO: 36868 - protein, 85 aa, unidentified
  REGION 1..85: note = Description of Unknown:cds_NZ_WFIY01000004.1_cds_WP_155864129.1_2081 target sequence
FLAAIILFIAYLLIGIDIFNLGNFYNNDMLKIGGILIIIPFISFIGWILTYVSVDEVINKLRGGTYVPQQFQVYQVGQGIIRLDG

SEQ ID NO: 36869 - protein, 85 aa, unidentified
  REGION 1..85: note = Description of Unknown:cds_NC_035460.1_cds_YP_009408086.1_135 target sequence
EDEKMYETIPYYCSNNEINNDLLMLLHMNITSYYKKDHIDLITKQLYRHYNDIVFVKNEIKIFSTEVDNIVNIKTTENNIICKVI

SEQ ID NO: 36870 - protein, 85 aa, unidentified
  REGION 1..85: note = Description of Unknown:cds_NC_035460.1_cds_YP_009408086.1_135 target sequence
MCINSANKGGLIYMIDNFTTKRRMVHLNKNCFIVVYPNVKVSFTPVTFGCSAIAIIECIIQPLTILYTLTNNVYYTNNLKTILPK

SEQ ID NO: 36871 - protein, 85 aa, unidentified
  REGION 1..85: note = Description of Unknown:cds_NC_035460.1_cds_YP_009408086.1_135 target sequence
YDDEVIFAIKRVTDAITNKIICTQILINKEWYIIVKYNNKKLYFPSICFGKPILNFNFIANINKNDIKDIVNLSFPFNECPYKKS

SEQ ID NO: 36872 - protein, 84 aa, unidentified
  REGION 1..84: note = Description of Unknown:cds_NC_035460.1_cds_YP_009408086.1_135 target sequence
CTQILINKEWYIIVKYNNKKLYFPSICFGKPILNFNFIANINKNDIKDIVNLSFPFNECPYKKSIFGNKVVVEQILFCKIQMKK

SEQ ID NO: 36873 - protein, 85 aa, unidentified
  REGION 1..85: note = Description of Unknown:cds_NC_035460.1_cds_YP_009408086.1_135 target sequence
MNITSYYKKDHIDLITKQLYRHYNDIVFVKNEIKIFSTEVDNIVNIKTTENNIICKVIMCINSANKGGLIYMIDNFTTKRRMVHL

SEQ ID NO: 36874 - protein, 85 aa, unidentified
  REGION 1..85: note = Description of Unknown:cds_NC_035460.1_cds_YP_009408086.1_135 target sequence
NKNCFIVVYPNVKVSFTPVTFGCSAIAIIECIIQPLTILYTLTNNVYYTNNLKTILPKYDDEVIFAIKRVTDAITNKIICTQILI

SEQ ID NO: 36875 - protein, 85 aa, unidentified
  REGION 1..85: note = Description of Unknown:cds_NC_030656.1_cds_YP_009268755.1_40 target sequence
VKYAYTKIKNELLDDEETKKLSYYKTYIILAFVLAVFQTITFSFIYYGLVNHFNEYSYQLQIDVVNCLDGKNTALHRCQDIRNSL

SEQ ID NO: 36876 - protein, 85 aa, unidentified
  REGION 1..85: note = Description of Unknown:cds_NC_030656.1_cds_YP_009268755.1_40 target sequence
SSYVNKNNVQMFKDILKSVARYKKCKYSKFNTSVAHVTGNNNWNERLYPNNYSFLGNKITSWSNTSNNVVLSNSYYIDGEIIVTV

SEQ ID NO: 36877 - protein, 85 aa, unidentified
  REGION 1..85: note = Description of Unknown:cds_NC_030656.1_cds_YP_009268755.1_40 target sequence
SGLYYIYAQTYFKLIFGYNSKGNSKNIQMVQYIYKNTSSYGDPLMLMKSARSNCWDKTAEYGLYSVYQGGIHYLKKGDSVFVTVT

SEQ ID NO: 36878 - protein, 84 aa, unidentified
  REGION 1..84: note = Description of Unknown:cds_NC_030656.1_cds_YP_009268755.1_40 target sequence
GNSKNIQMVQYIYKNTSSYGDPLMLMKSARSNCWDKTAEYGLYSVYQGGIHYLKKGDSVFVTVTNKNFLAMDYRSDYFGAFLIK

SEQ ID NO: 36879 - protein, 85 aa, unidentified
  REGION 1..85: note = Description of Unknown:cds_NC_030656.1_cds_YP_009268755.1_40 target sequence
IILAFVLAVFQTITFSFIYYGLVNHFNEYSYQLQIDVVNCLDGKNTALHRCQDIRNSLSSYVNKNNVQMFKDILKSVARYKKCKY

SEQ ID NO: 36880 - protein, 85 aa, unidentified
  REGION 1..85: note = Description of Unknown:cds_NC_030656.1_cds_YP_009268755.1_40 target sequence
SKFNTSVAHVTGNNNWNERLYPNNYSFLGNKITSWSNTSNNVVLSNSYYIDGEIIVTVSGLYYIYAQTYFKLIFGYNSKGNSKNI

SEQ ID NO: 36881 - protein, 85 aa, unidentified
  REGION 1..85: note = Description of Unknown:cds_NC_024711.1_cds_YP_009052500.1_19 target sequence
KDFKKGLSFGMGIVNAGQRAVSEEPELVVVSTPGSFRMTAQVSKALGIAHGEYVMFINNCANIDNAIINKVPEVVAFCEEQGLDI

SEQ ID NO: 36882 - protein, 85 aa, unidentified
  REGION 1..85: note = Description of Unknown:cds_NC_024711.1_cds_YP_009052500.1_19 target sequence
ESPEAAMAVHAEFDIWALAKGIAELDKNGNPCTTRVRMTKNDKIKYVNTYFQETLEGALSSSNEELKAALGREGITEDEQKELLV

SEQ ID NO: 36883 - protein, 85 aa, unidentified
  REGION 1..85: note = Description of Unknown:cds_NC_024711.1_cds_YP_009052500.1_19 target sequence
SCIQGDEVAKIKGSKCANTAALSGIGVTLNFTDSNVWKQLKADMTDEEATSKNRVYTVDIDNLQEAVVNNGHKDIVVKIAMLTEY

SEQ ID NO: 36884 - protein, 84 aa, unidentified
  REGION 1..84: note = Description of Unknown:cds_NC_024711.1_cds_YP_009052500.1_19 target sequence
ALSGIGVTLNFTDSNVWKQLKADMTDEEATSKNRVYTVDIDNLQEAVVNNGHKDIVVKIAMLTEYKDEEPVRIGKKAEKEETAE

SEQ ID NO: 36885 - protein, 85 aa, unidentified
  REGION 1..85: note = Description of Unknown:cds_NC_024711.1_cds_YP_009052500.1_19 target sequence
VVVSTPGSFRMTAQVSKALGIAHGEYVMFINNCANIDNAIINKVPEVVAFCEEQGLDIESPEAAMAVHAEFDIWALAKGIAELDK

SEQ ID NO: 36886 - protein, 85 aa, unidentified
  REGION 1..85: note = Description of Unknown:cds_NC_024711.1_cds_YP_009052500.1_19 target sequence
NGNPCTTRVRMTKNDKIKYVNTYFQETLEGALSSSNEELKAALGREGITEDEQKELLVSCIQGDEVAKIKGSKCANTAALSGIGV

SEQ ID NO: 36887 - protein, 85 aa, unidentified
  REGION 1..85: note = Description of Unknown:cds_NZ_WFIY01000004.1_cds_95 target sequence
VVRGYLTILGVIIVWGISFPLSKIALYFMSPFVLTFIRFIIGGLILTAYGKGIIYGKKEAINAILNMGIFVILLNLAINYSTNPA

SEQ ID NO: 36888 - protein, 85 aa, unidentified
  REGION 1..85: note = Description of Unknown:cds_NZ_WFIY01000004.1_cds_95 target sequence
LASVLIYMQPIFVALLSRLRGEEISFPQLVGIIVSFTGIFISVDSVNFSPGSLIAIVAAILWAVGTLYYSNLKNRDIVKLNAFMS

SEQ ID NO: 36889 - protein, 85 aa, unidentified
  REGION 1..85: note = Description of Unknown:cds_NZ_WFIY01000004.1_cds_95 target sequence
LFSSLFVIPILPFDFYFKPSVLGIGVGILVAIIAQALGFIFWFSSVKELGATTASSIVILVPVSAYLFSFIILDQIPNVFQIFGS

SEQ ID NO: 36890 - protein, 84 aa, unidentified
  REGION 1..84: note = Description of Unknown:cds_NZ_WFIY01000004.1_cds_95 target sequence
LGIGVGILVAIIAQALGFIFWFSSVKELGATTASSIVILVPVSAYLFSFIILDQIPNVFQIFGSSLALIGVFISQYSRVYLSRK

SEQ ID NO: 36891 - protein, 85 aa, unidentified
  REGION 1..85: note = Description of Unknown:cds_NZ_WFIY01000004.1_cds_95 target sequence
FMSPFVLTFIRFIIGGLILTAYGKGIIYGKKEAINAILNMGIFVILLNLAINYSTNPALASVLIYMQPIFVALLSRLRGEEISFP

SEQ ID NO: 36892 - protein, 85 aa, unidentified
  REGION 1..85: note = Description of Unknown:cds_NZ_WFIY01000004.1_cds_95 target sequence
QLVGIIVSFTGIFISVDSVNFSPGSLIAIVAAILWAVGTLYYSNLKNRDIVKLNAFMSLFSSLFVIPILPFDFYFKPSVLGIGVG

SEQ ID NO: 36893 - protein, 85 aa, unidentified
  REGION 1..85: note = Description of Unknown:cds_NZ_WFIY01000004.1_cds_WP_155864336.1_2348 target sequence
NVIEVKNVWKMYGKLVANEDISMTVNEGEIVALLGPNGAGKTTLVKQIYGELSPNKGEIKVLGKKPTDRQIKKLLGVIPQECEPY

SEQ ID NO: 36894 - protein, 85 aa, unidentified
  REGION 1..85: note = Description of Unknown:cds_NZ_WFIY01000004.1_cds_WP_155864336.1_2348 target sequence
GDLTVWDNIYYMGRLKGVSKEVIKNRGEELLKRLDLSSKRNTLARDLSGGLKRRVLIAMALINDPKLLILDEPTTGLDPEARREV

SEQ ID NO: 36895 - protein, 85 aa, unidentified
  REGION 1..85: note = Description of Unknown:cds_NZ_WFIY01000004.1_cds_WP_155864336.1_2348 target sequence
WEILIDMKREGRSMLLTTHYLDEAERLADRIYFLSRRIIVEGKPAEIKEKFADWYEVIDYANGKVYKVKGEEELKRLIMNLNGKF

SEQ ID NO: 36896 - protein, 84 aa, unidentified
  REGION 1..84: note = Description of Unknown:cds_NZ_WFIY01000004.1_cds_WP_155864336.1_2348 target sequence
LDEAERLADRIYFLSRRIIVEGKPAEIKEKFADWYEVIDYANGKVYKVKGEEELKRLIMNLNGKFEVRMPSLEEIYLQVIRNAD

SEQ ID NO: 36897 - protein, 85 aa, unidentified
  REGION 1..85: note = Description of Unknown:cds_NZ_WFIY01000004.1_cds_WP_155864336.1_2348 target sequence
GEIVALLGPNGAGKTTLVKQIYGELSPNKGEIKVLGKKPTDRQIKKLLGVIPQECEPYGDLTVWDNIYYMGRLKGVSKEVIKNRG

SEQ ID NO: 36898 - protein, 85 aa, unidentified
  REGION 1..85: note = Description of Unknown:cds_NZ_WFIY01000004.1_cds_WP_155864336.1_2348 target sequence
EELLKRLDLSSKRNTLARDLSGGLKRRVLIAMALINDPKLLILDEPTTGLDPEARREVWEILIDMKREGRSMLLTTHYLDEAERL

SEQ ID NO: 36899 - protein, 85 aa, unidentified
  REGION 1..85: note = Description of Unknown:cds_NZ_WFIY01000004.1_cds_WP_155864377.1_607 target sequence
KFLERKEGTLQLINNAPKAYPGFKNYVRKKIEEEEKLLKGVLFAEDIISAMHSGYKNALAGYLRSAEESNRFIIERASLSIFVSA

SEQ ID NO: 36900 - protein, 85 aa, unidentified
  REGION 1..85: note = Description of Unknown:cds_NZ_WFIY01000004.1_cds_WP_155864377.1_607 target sequence
TEEKYLELLKERQWHVLVDEGYIIRAASEGIGRIKKATGRTLKLNKYSVYLMGAPVCRKHLKFQKYSMSIDELEDKLRVRISAKC

SEQ ID NO: 36901 - protein, 85 aa, unidentified
  REGION 1..85: note = Description of Unknown:cds_NZ_WFIY01000004.1_cds_WP_155864377.1_607 target sequence
KFCHRQADYFTLAMPKASALIGLAEYITGKSTTNLMRIYANISRVIHPYGFTDLDKDKVFTLWARDFLNIISEVNNLFNLVDNSR

SEQ ID NO: 36902 - protein, 84 aa, unidentified
  REGION 1..84: note = Description of Unknown:cds_NZ_WFIY01000004.1_cds_WP_155864377.1_607 target sequence
LIGLAEYITGKSTTNLMRIYANISRVIHPYGFTDLDKDKVFTLWARDFLNIISEVNNLFNLVDNSRGSGNNGKLTGKLIKNGKS

SEQ ID NO: 36903 - protein, 85 aa, unidentified
  REGION 1..85: note = Description of Unknown:cds_NZ_WFIY01000004.1_cds_WP_155864377.1_607 target sequence
RKKIEEEEKLLKGVLFAEDIISAMHSGYKNALAGYLRSAEESNRFIIERASLSIFVSATEEKYLELLKERQWHVLVDEGYIIRAA

SEQ ID NO: 36904 - protein, 85 aa, unidentified
  REGION 1..85: note = Description of Unknown:cds_NZ_WFIY01000004.1_cds_WP_155864377.1_607 target sequence
SEGIGRIKKATGRTLKLNKYSVYLMGAPVCRKHLKFQKYSMSIDELEDKLRVRISAKCKFCHRQADYFTLAMPKASALIGLAEYI

SEQ ID NO: 36905 - protein, 85 aa, unidentified
  REGION 1..85: note = Description of Unknown:cds_NZ_WFIY01000004.1_cds_WP_155864311.1_2307 target sequence
RVLLIGASGQLGIELNKLLSKKYQVIKVYNSSEIPDSHKMDITDFFRLEDFIIKTRPDVIINTAAMTDVDKCEVEREKAYKINAE

SEQ ID NO: 36906 - protein, 85 aa, unidentified
  REGION 1..85: note = Description of Unknown:cds_NZ_WFIY01000004.1_cds_WP_155864311.1_2307 target sequence
AVKHMVRASRVVEAYFIHVSTDYVFDGTKGNYKEEDLPNPINYYGLTKLLGETFALSYDDSLVIRTSGVFRHKGFPVYVYKTLKE

SEQ ID NO: 36907 - protein, 85 aa, unidentified
  REGION 1..85: note = Description of Unknown:cds_NZ_WFIY01000004.1_cds_WP_155864311.1_2307 target sequence
GKTVFAYKGYYSPISARKLASAIEELLALRKTGLLNVAGERISRYELALKIKEKFNLSGEVKEVDEVKGWTARRPFDSSLDSSNA

SEQ ID NO: 36908 - protein, 84 aa, unidentified
  REGION 1..84: note = Description of Unknown:cds_NZ_WFIY01000004.1_cds_WP_155864311.1_2307 target sequence
ASAIEELLALRKTGLLNVAGERISRYELALKIKEKFNLSGEVKEVDEVKGWTARRPFDSSLDSSNAKKILSVDFYSLDLEGMVL

SEQ ID NO: 36909 - protein, 85 aa, unidentified
  REGION 1..85: note = Description of Unknown:cds_NZ_WFIY01000004.1_cds_WP_155864311.1_2307 target sequence
VYNSSEIPDSHKMDITDFFRLEDFIIKTRPDVIINTAAMTDVDKCEVEREKAYKINAEAVKHMVRASRVVEAYFIHVSTDYVFDG

SEQ ID NO: 36910 - protein, 85 aa, unidentified
  REGION 1..85: note = Description of Unknown:cds_NZ_WFIY01000004.1_cds_WP_155864311.1_2307 target sequence
TKGNYKEEDLPNPINYYGLTKLLGETFALSYDDSLVIRTSGVFRHKGFPVYVYKTLKEGKTVFAYKGYYSPISARKLASAIEELL

SEQ ID NO: 36911 - protein, 85 aa, unidentified
  REGION 1..85: note = Description of Unknown:cds_NC_005830.1_cds_YP_003757.1_32 target sequence
PLNLKYFVPEQRYIILKTKGGGLVSTDREDLEMRVRDVLIKYLGKNVYDSDPRARQIIDTLSRNYRDVESWIRDSEFVMRSRAIL

SEQ ID NO: 36912 - protein, 85 aa, unidentified
  REGION 1..85: note = Description of Unknown:cds_NC_005830.1_cds_YP_003757.1_32 target sequence
KYYPHGDPYEEVKVIKTHNEATCFPIATLAYFIVTANCPTGCCGCGCHAGCNGSVGHAPYLMVGSDTSTLTYCLMPNLAQGYTQS

SEQ ID NO: 36913 - protein, 85 aa, unidentified
  REGION 1..85: note = Description of Unknown:cds_NC_005830.1_cds_YP_003757.1_32 target sequence
PSATSYYWATGVLGSSPGSGGQVYAVVTSTWNAGVLPSGTIGEVGAFQFMINQLANSVDYGTGVPNQGYVMYARVSSASGAFSPI

SEQ ID NO: 36914 - protein, 84 aa, unidentified
  REGION 1..84: note = Description of Unknown:cds_NC_005830.1_cds_YP_003757.1_32 target sequence
GGQVYAVVTSTWNAGVLPSGTIGEVGAFQFMINQLANSVDYGTGVPNQGYVMYARVSSASGAFSPISYTNTAPFTASITLYMAV

SEQ ID NO: 36915 - protein, 85 aa, unidentified
  REGION 1..85: note = Description of Unknown:cds_NC_005830.1_cds_YP_003757.1_32 target sequence
REDLEMRVRDVLIKYLGKNVYDSDPRARQIIDTLSRNYRDVESWIRDSEFVMRSRAILKYYPHGDPYEEVKVIKTHNEATCFPIA

SEQ ID NO: 36916 - protein, 85 aa, unidentified
  REGION 1..85: note = Description of Unknown:cds_NC_005830.1_cds_YP_003757.1_32 target sequence
TLAYFIVTANCPTGCCGCGCHAGCNGSVGHAPYLMVGSDTSTLTYCLMPNLAQGYTQSPSATSYYWATGVLGSSPGSGGQVYAVV

SEQ ID NO: 36917 - protein, 85 aa, unidentified
  REGION 1..85: note = Description of Unknown:cds_NZ_WFIY01000004.1_cds_WP_155862738.1_545 target sequence
PEELVEAQIVDFGRLKEIYSDILYYENYKSILKKTGGIDPPPPQSLRALPFSGRRIGPLSLIIAGNVIKIKEIGAIVKPTKEGNP

SEQ ID NO: 36918 - protein, 85 aa, unidentified
  REGION 1..85: note = Description of Unknown:cds_NZ_WFIY01000004.1_cds_WP_155862738.1_545 target sequence
VYAIVDFSQGIKVLLAYEEESPIVGIDLGIRHLFTIVAIVNHGKLYKVKYVGDKKMLDIFSKYLGESQGLVYLNDIRERVRKPVI

SEQ ID NO: 36919 - protein, 85 aa, unidentified
  REGION 1..85: note = Description of Unknown:cds_NZ_WFIY01000004.1_cds_WP_155862738.1_545 target sequence
ETVKFLEELKPKVIAIEDLRLYEAKVGKGLRAIQEILEEELFKRGMKVRRLDPRGTSKICSRCGYKKGEVLGSIFVCPSCGYKAD

SEQ ID NO: 36920 - protein, 84 aa, unidentified
  REGION 1..84: note = Description of Unknown:cds_NZ_WFIY01000004.1_cds_WP_155862738.1_545 target sequence
LRLYEAKVGKGLRAIQEILEEELFKRGMKVRRLDPRGTSKICSRCGYKKGEVLGSIFVCPSCGYKADRDFNAAYNLALKCYYTC

SEQ ID NO: 36921 - protein, 85 aa, unidentified
  REGION 1..85: note = Description of Unknown:cds_NZ_WFIY01000004.1_cds_WP_155862738.1_545 target sequence
YKSILKKTGGIDPPPPQSLRALPFSGRRIGPLSLIIAGNVIKIKEIGAIVKPTKEGNPVYAIVDFSQGIKVLLAYEEESPIVGID

SEQ ID NO: 36922 - protein, 85 aa, unidentified
  REGION 1..85: note = Description of Unknown:cds_NZ_WFIY01000004.1_cds_WP_155862738.1_545 target sequence
LGIRHLFTIVAIVNHGKLYKVKYVGDKKMLDIFSKYLGESQGLVYLNDIRERVRKPVIETVKFLEELKPKVIAIEDLRLYEAKVG

SEQ ID NO: 36923 - protein, 85 aa, unidentified
  REGION 1..85: note = Description of Unknown:cds_NZ_WFIY01000004.1_cds_1869 target sequence
VEIRDRGHTAYYIRPSKLNGIIDEEIEFTYAGKTISLDGGIIRNLGFLLTTEQLAKRIDILIEMEKSGVVFINNPQSVLLARDKF

SEQ ID NO: 36924 - protein, 85 aa, unidentified
  REGION 1..85: note = Description of Unknown:cds_NZ_WFIY01000004.1_cds_1869 target sequence
ESLMKLKRAGIPVPPTAMVEDPFEVMRLVEKWGEVVIKPVIGSLGLGSVRASDPDIAFRIAKAILSVNQPVYVQKYVKKPDRDIR

SEQ ID NO: 36925 - protein, 85 aa, unidentified
  REGION 1..85: note = Description of Unknown:cds_NZ_WFIY01000004.1_cds_1869 target sequence
AFVVGDRLLGSIYRISQGSWKTNVAQGALVQVFKPSSEIEELSLKATKVLGLDYAGIDIVEDLEGGLKILEVNAAPLWKGFSSAT

SEQ ID NO: 36926 - protein, 84 aa, unidentified
  REGION 1..84: note = Description of Unknown:cds_NZ_WFIY01000004.1_cds_1869 target sequence
WKTNVAQGALVQVFKPSSEIEELSLKATKVLGLDYAGIDIVEDLEGGLKILEVNAAPLWKGFSSATHINPAKYIVEYLIQKIKK

SEQ ID NO: 36927 - protein, 85 aa, unidentified
  REGION 1..85: note = Description of Unknown:cds_NZ_WFIY01000004.1_cds_1869 target sequence
FTYAGKTISLDGGIIRNLGFLLTTEQLAKRIDILIEMEKSGVVFINNPQSVLLARDKFESLMKLKRAGIPVPPTAMVEDPFEVMR

SEQ ID NO: 36928 - protein, 85 aa, unidentified
  REGION 1..85: note = Description of Unknown:cds_NZ_WFIY01000004.1_cds_1869 target sequence
LVEKWGEVVIKPVIGSLGLGSVRASDPDIAFRIAKAILSVNQPVYVQKYVKKPDRDIRAFVVGDRLLGSIYRISQGSWKTNVAQG

SEQ ID NO: 36929 - protein, 85 aa, unidentified
  REGION 1..85: note = Description of Unknown:cds_NZ_WFIY01000004.1_cds_WP_155863966.1_1889 target sequence
LRLFQSGGNTVGRILEGIDLGYTYPNGYKVFDHVNIETYENELIAIIGPSGIGKSTLLRILGGFVKPDHGEVRLLGKKITQPTPK

SEQ ID NO: 36930 - protein, 85 aa, unidentified
  REGION 1..85: note = Description of Unknown:cds_NZ_WFIY01000004.1_cds_WP_155863966.1_1889 target sequence
IALIHQSIVTFPWFTALENVKIGLKYKKLPKEKEDEIARKMLELVGLSGFEDFYPKQMSGGMRQRIAIARALAADPVVLLMDEPF

SEQ ID NO: 36931 - protein, 85 aa, unidentified
  REGION 1..85: note = Description of Unknown:cds_NZ_WFIY01000004.1_cds_WP_155863966.1_1889 target sequence
AHLDELTAEGLRREIYSILFNEDTSLRSAVLVSHNLNEVVELADRVYVLNGRPASVVGEVKIELDRPRKPKDDRFQAYLDQLYSL

SEQ ID NO: 36932 - protein, 84 aa, unidentified
  REGION 1..84: note = Description of Unknown:cds_NZ_WFIY01000004.1_cds_WP_155863966.1_1889 target sequence
FNEDTSLRSAVLVSHNLNEVVELADRVYVLNGRPASVVGEVKIELDRPRKPKDDRFQAYLDQLYSLLTPVEKNVEQKDRGKEDV

SEQ ID NO: 36933 - protein, 85 aa, unidentified
  REGION 1..85: note = Description of Unknown:cds_NZ_WFIY01000004.1_cds_WP_155863966.1_1889 target sequence
YKVFDHVNIETYENELIAIIGPSGIGKSTLLRILGGFVKPDHGEVRLLGKKITQPTPKIALIHQSIVTFPWFTALENVKIGLKYK

SEQ ID NO: 36934 - protein, 85 aa, unidentified
  REGION 1..85: note = Description of Unknown:cds_NZ_WFIY01000004.1_cds_WP_155863966.1_1889 target sequence
KLPKEKEDEIARKMLELVGLSGFEDFYPKQMSGGMRQRIAIARALAADPVVLLMDEPFAHLDELTAEGLRREIYSILFNEDTSLR

SEQ ID NO: 36935 - protein, 85 aa, unidentified
  REGION 1..85: note = Description of Unknown:cds_NZ_WFIY01000004.1_cds_WP_155864262.1_2254 target sequence
LLSYFSSGFPSHVKGKALDLSSDDMEYFYSPFDGRIERIEKFVVGRPNKFAKVNYDYLILLRRENGKLIKILHVEPFITVGEEIK

SEQ ID NO: 36936 - protein, 85 aa, unidentified
  REGION 1..85: note = Description of Unknown:cds_NZ_WFIY01000004.1_cds_WP_155864262.1_2254 target sequence
KGDKLGKFLINPYTGGDFLHAHIEGLRIKFPKLTKYDERGIGKVVNKCKSYFDVEIITYSTAGNLRGLGCCGGLLNASLPYAGYG

SEQ ID NO: 36937 - protein, 85 aa, unidentified
  REGION 1..85: note = Description of Unknown:cds_NZ_WFIY01000004.1_cds_WP_155864262.1_2254 target sequence
GIIGIDKVNEVKIGKMKFFVHSVKKRNIIMFEARKGLIKNWEYTPSFKVLEGKPIYGFPLFEAVLSINSLPRVRFFIKNSNFNEG

SEQ ID NO: 36938 - protein, 84 aa, unidentified
  REGION 1..84: note = Description of Unknown:cds_NZ_WFIY01000004.1_cds_WP_155864262.1_2254 target sequence
FVHSVKKRNIIMFEARKGLIKNWEYTPSFKVLEGKPIYGFPLFEAVLSINSLPRVRFFIKNSNFNEGDEVDVWELINSPSSLYS

SEQ ID NO: 36939 - protein, 85 aa, unidentified
  REGION 1..85: note = Description of Unknown:cds_NZ_WFIY01000004.1_cds_WP_155864262.1_2254 target sequence
FYSPFDGRIERIEKFVVGRPNKFAKVNYDYLILLRRENGKLIKILHVEPFITVGEEIKKGDKLGKFLINPYTGGDFLHAHIEGLR

SEQ ID NO: 36940 - protein, 85 aa, unidentified
  REGION 1..85: note = Description of Unknown:cds_NZ_WFIY01000004.1_cds_WP_155864262.1_2254 target sequence
IKFPKLTKYDERGIGKVVNKCKSYFDVEIITYSTAGNLRGLGCCGGLLNASLPYAGYGGIIGIDKVNEVKIGKMKFFVHSVKKRN

SEQ ID NO: 36941 - protein, 85 aa, unidentified; identical to SEQ ID NO: 36775
  REGION 1..85: note = Description of Unknown:cds_NC_007409.1_cds_YP_319833.1_2 target sequence

SEQ ID NO: 36942 - protein, 85 aa, unidentified; identical to SEQ ID NO: 36776
  REGION 1..85: note = Description of Unknown:cds_NC_007409.1_cds_YP_319833.1_2 target sequence

SEQ ID NO: 36943 - protein, 85 aa, unidentified; identical to SEQ ID NO: 36777
  REGION 1..85: note = Description of Unknown:cds_NC_007409.1_cds_YP_319833.1_2 target sequence

SEQ ID NO: 36944 - protein, 84 aa, unidentified
  REGION 1..84: note = Description of Unknown:cds_NC_007409.1_cds_YP_319833.1_2 target sequence
EFNDIERIVAEEQPILAGYTYDEALRIPYHYYVDHNNSFKDDALKIAHAYLQLFPTPYQVCYEWKARWFNKIDCLKLERLKPSS

SEQ ID NO: 36945 - protein, 85 aa, unidentified; identical to SEQ ID NO: 36779
  REGION 1..85: note = Description of Unknown:cds_NC_007409.1_cds_YP_319833.1_2 target sequence

SEQ ID NO: 36946 - protein, 85 aa, unidentified; identical to SEQ ID NO: 36780
  REGION 1..85: note = Description of Unknown:cds_NC_007409.1_cds_YP_319833.1_2 target sequence

SEQ ID NO: 36947 - protein, 85 aa, unidentified
  REGION 1..85: note = Description of Unknown:hvTR_Q2MG95 target sequence
LMGLGVRGDDARMTPGIHGLLLKMLKNWPLCALREDELRFLHLSLTKLLTLSVNFYLWREAVINTGNRTNRVLARKVPDEYWYLL

SEQ ID NO: 36948 - protein, 85 aa, unidentified
  REGION 1..85: note = Description of Unknown:hvTR_Q2MG95 target sequence
YRALARVGFPAEALRPGNRSRSLCLFLHDRPDVTGAVCACVWAQLGLRRAPDLSQVTLADGNLLFNLGSVLPNRLVVGVLYCLVH

SEQ ID NO: 36949 - protein, 85 aa, unidentified
  REGION 1..85: note = Description of Unknown:hvTR_Q2MG95 target sequence
WGADEHETRVRARLRPLFVAFLCLAGYLLLDRAILSDAHDYEGLWHAVALSMAAWHGLTPLPETRDEKEAKPPCDEFIYLFANDP

SEQ ID NO: 36950 - protein, 84 aa, unidentified
  REGION 1..84: note = Description of Unknown:hvTR_Q2MG95 target sequence
FVAFLCLAGYLLLDRAILSDAHDYEGLWHAVALSMAAWHGLTPLPETRDEKEAKPPCDEFIYLFANDPLQCEELAQLGATGEAR

SEQ ID NO: 36951 - protein, 85 aa, unidentified
  REGION 1..85: note = Description of Unknown:hvTR_Q2MG95 target sequence
WPLCALREDELRFLHLSLTKLLTLSVNFYLWREAVINTGNRTNRVLARKVPDEYWYLLYRALARVGFPAEALRPGNRSRSLCLFL

SEQ ID NO: 36952 - protein, 85 aa, unidentified
  REGION 1..85: note = Description of Unknown:hvTR_Q2MG95 target sequence
HDRPDVTGAVCACVWAQLGLRRAPDLSQVTLADGNLLFNLGSVLPNRLVVGVLYCLVHWGADEHETRVRARLRPLFVAFLCLAGY

SEQ ID NO: 36953 - protein, 85 aa, unidentified
  REGION 1..85: note = Description of Unknown:vpeps_4MB7_1 target sequence
VEAPRIRITYEKIRHTKNHRIVSISGPSYKRMNVDLIDYIIRKWWFAGKYIYLMLISSNKPTYVIRTHMMMHGRILVGNQDSPTK

SEQ ID NO: 36954 - protein, 85 aa, unidentified
  REGION 1..85: note = Description of Unknown:vpeps_4MB7_1 target sequence
RAFMIIQLDNDIVLRWYRSQITLLDPNCLAEIKTNYTICTTRQAIMDSIKLMKYDLSNNRFDYNLFQSHLKNGINIHSSEIITDF

SEQ ID NO: 36955 - protein, 85 aa, unidentified
  REGION 1..85: note = Description of Unknown:vpeps_4MB7_1 target sequence
LLDQEYFPGVGNILQQEALYDCKILPLKKVQDIDEPMFDCLCNSLKKIIDLLYESYKFRESGKEFGPILRIYRKSLCPLGHKTIR

SEQ ID NO: 36956 - protein, 85 aa, unidentified
  REGION 1..85: note = Description of Unknown:vpeps_4MB7_1 target sequence
LYDCKILPLKKVQDIDEPMFDCLCNSLKKIIDLLYESYKFRESGKEFGPILRIYRKSLCPLGHKTIRKKIGLRNRMTTWCPVCQL

SEQ ID NO: 36957 - protein, 85 aa, unidentified
  REGION 1..85: note = Description of Unknown:vpeps_4MB7_1 target sequence
SYKRMNVDLIDYIIRKWWFAGKYIYLMLISSNKPTYVIRTHMMMHGRILVGNQDSPTKRAFMIIQLDNDIVLRWYRSQITLLDPN

SEQ ID NO: 36958 - protein, 85 aa, unidentified
  REGION 1..85: note = Description of Unknown:vpeps_4MB7_1 target sequence
CLAEIKTNYTICTTRQAIMDSIKLMKYDLSNNRFDYNLFQSHLKNGINIHSSEIITDFLLDQEYFPGVGNILQQEALYDCKILPL

SEQ ID NO: 36959 - protein, 85 aa, unidentified
  REGION 1..85: note = Description of Unknown:cds_NZ_WFIY01000004.1_cds_WP_155862310.1_28 target sequence
LNQNLRYLFFTIPAIIYIGVFAFYPSFDAIYLSFLNNAGHFTLNNYKELFYFNIYGTILNTIIVTVGALLIQLFLGLGIASILTR

SEQ ID NO: 36960 - protein, 85 aa, unidentified
  REGION 1..85: note = Description of Unknown:cds_NZ_WFIY01000004.1_cds_WP_155862310.1_28 target sequence
EFRGKKAFSTLAIIPMGVATIVAAITFSFIFQTTGGYANSFLHFLHLPTVNWYANTWISLLVVMISDSWKNTPIVTLILLSGMMS

SEQ ID NO: 36961 - protein, 85 aa, unidentified
  REGION 1..85: note = Description of Unknown:cds_NZ_WFIY01000004.1_cds_WP_155862310.1_28 target sequence
IPKDLYYAAALDGAGPIRRFIHITLPNLKSFIAIALIIRGVSEFNIFALPLVLIGYHPPLLTTLAYELYSTTTIYLSAAAAVILL

SEQ ID NO: 36962 - protein, 84 aa, unidentified
  REGION 1..84: note = Description of Unknown:cds_NZ_WFIY01000004.1_cds_WP_155862310.1_28 target sequence
RFIHITLPNLKSFIAIALIIRGVSEFNIFALPLVLIGYHPPLLTTLAYELYSTTTIYLSAAAAVILLAFISVLIFVNIKIGGRR

SEQ ID NO: 36963 - protein, 85 aa, unidentified
  REGION 1..85: note = Description of Unknown:cds_NZ_WFIY01000004.1_cds_WP_155862310.1_28 target sequence
DAIYLSFLNNAGHFTLNNYKELFYFNIYGTILNTIIVTVGALLIQLFLGLGIASILTREFRGKKAFSTLAIIPMGVATIVAAITF

SEQ ID NO: 36964 - protein, 85 aa, unidentified
  REGION 1..85: note = Description of Unknown:cds_NZ_WFIY01000004.1_cds_WP_155862310.1_28 target sequence
SFIFQTTGGYANSFLHFLHLPTVNWYANTWISLLVVMISDSWKNTPIVTLILLSGMMSIPKDLYYAAALDGAGPIRRFIHITLPN

SEQ ID NO: 36965 - protein, 85 aa, unidentified
  REGION 1..85: note = Description of Unknown:cds_NZ_WFIY01000004.1_cds_WP_155863511.1_1461 target sequence
LIKFRSKNWITLRYNSVSDRILDMLYTPPIWSLYLSEMKREKLSSNLSITSGFFISPDIAKMISIPNYEIGKEIKLRPLENINVD

SEQ ID NO: 36966 - protein, 85 aa, unidentified
  REGION 1..85: note = Description of Unknown:cds_NZ_WFIY01000004.1_cds_WP_155863511.1_1461 target sequence
LADILMKRRSSREFNNKLKFDELSSILVYGAGKSSKDKYTGRTLRTYPSPGALYPNSVYVLVNNVDGLEKGIYYFNPDILSIYLL

SEQ ID NO: 36967 - protein, 85 aa, unidentified
  REGION 1..85: note = Description of Unknown:cds_NZ_WFIY01000004.1_cds_WP_155863511.1_1461 target sequence
SSNEERIKVIYSGFMDRDMASKASVIIFLVNNILRTVLKYGELGFKLSLIEAGIIAQNIVLLATALGKKSLIYESFIDNKLENGL

SEQ ID NO: 36968 - protein, 84 aa, unidentified
  REGION 1..84: note = Description of Unknown:cds_NZ_WFIY01000004.1_cds_WP_155863511.1_1461 target sequence
DMASKASVIIFLVNNILRTVLKYGELGFKLSLIEAGIIAQNIVLLATALGKKSLIYESFIDNKLENGLSINGVTQFISTTILLG

SEQ ID NO: 36969 - protein, 85 aa, unidentified
  REGION 1..85: note = Description of Unknown:cds_NZ_WFIY01000004.1_cds_WP_155863511.1_1461 target sequence
PPIWSLYLSEMKREKLSSNLSITSGFFISPDIAKMISIPNYEIGKEIKLRPLENINVDLADILMKRRSSREFNNKLKFDELSSIL

SEQ ID NO: 36970 - protein, 85 aa, unidentified
  REGION 1..85: note = Description of Unknown:cds_NZ_WFIY01000004.1_cds_WP_155863511.1_1461 target sequence
VYGAGKSSKDKYTGRTLRTYPSPGALYPNSVYVLVNNVDGLEKGIYYFNPDILSIYLLSSNEERIKVIYSGFMDRDMASKASVII

SEQ ID NO: 36971 - protein, 85 aa, unidentified
  REGION 1..85: note = Description of Unknown:cds_NZ_WFIY01000004.1_cds_WP_155863847.1_1743 target sequence
LVCRQGLKDGNDSLYDYGNFQVIKNEKGRYFYSEGIILKVSDISSNVLDKLIYAINKGIRYFFLEGYLLQYIPSFGYGNYFIFKT

SEQ ID NO: 36972 - protein, 85 aa, unidentified
  REGION 1..85: note = Description of Unknown:cds_NZ_WFIY01000004.1_cds_WP_155863847.1_1743 target sequence
EIKDEELNNKSLQLLEGKVSEDEYIGYLMKYQGAKGETIGVIDEFYTLTNELRLPKYEPMELTQCKELEVKFEDKYVEIFNVRFR

SEQ ID NO: 36973 - protein, 85 aa, unidentified
  REGION 1..85: note = Description of Unknown:cds_NZ_WFIY01000004.1_cds_WP_155863847.1_1743 target sequence
ILDIPYFNFLSKYISVLQIIKGSYKGEIKTSSGEGIIYHEINKIKNLTFSFTKICGKYRLDTPENCIIGDGISFHTKNKDEISQL

SEQ ID NO: 36974 - protein, 84 aa, unidentified
  REGION 1..84: note = Description of Unknown:cds_NZ_WFIY01000004.1_cds_WP_155863847.1_1743 target sequence
QIIKGSYKGEIKTSSGEGIIYHEINKIKNLTFSFTKICGKYRLDTPENCIIGDGISFHTKNKDEISQLMYCLENLKTLRDSLNL

SEQ ID NO: 36975 - protein, 85 aa, unidentified
  REGION 1..85: note = Description of Unknown:cds_NZ_WFIY01000004.1_cds_WP_155863847.1_1743 target sequence
GRYFYSEGIILKVSDISSNVLDKLIYAINKGIRYFFLEGYLLQYIPSFGYGNYFIFKTEIKDEELNNKSLQLLEGKVSEDEYIGY

SEQ ID NO: 36976 - protein, 85 aa, unidentified
  REGION 1..85: note = Description of Unknown:cds_NZ_WFIY01000004.1_cds_WP_155863847.1_1743 target sequence
LMKYQGAKGETIGVIDEFYTLTNELRLPKYEPMELTQCKELEVKFEDKYVEIFNVRFRILDIPYFNFLSKYISVLQIIKGSYKGE

SEQ ID NO: 36977 - protein, 85 aa, unidentified
  REGION 1..85: note = Description of Unknown:cds_NZ_WFIY01000004.1_cds_WP_155864469.1_1944 target sequence
PFPVDKKVCSGWAKDLHRGGDTIIYTSCMYQIEPAVGMFLKFLPSISSFKVLMPLARLVKPSKSQLDRAYKILNNIVEALEKSGI

SEQ ID NO: 36978 - protein, 85 aa, unidentified
  REGION 1..85: note = Description of Unknown:cds_NZ_WFIY01000004.1_cds_WP_155864469.1_1944 target sequence
KPGYLYEEEPYSGAILLEMGFLEEFGEYAKKIVSLFREKGVKKIITVDPHTHNALTRYQEFVKHDLEIVNYLELVNYTKKVEGEF

SEQ ID NO: 36979 - protein, 85 aa, unidentified
  REGION 1..85: note = Description of Unknown:cds_NZ_WFIY01000004.1_cds_WP_155864469.1_1944 target sequence
TIHDSCLYSRFLGLREKYRGLIEKSGIKLVEDEMITGKDTSSCCGGPLGPVDLKVSEKIAENRAKDLEKLSKRLLVVCPICYVTL

SEQ ID NO: 36980 - protein, 84 aa, unidentified
  REGION 1..84: note = Description of Unknown:cds_NZ_WFIY01000004.1_cds_WP_155864469.1_1944 target sequence
YRGLIEKSGIKLVEDEMITGKDTSSCCGGPLGPVDLKVSEKIAENRAKDLEKLSKRLLVVCPICYVTLSPHFKGEIMDIAEVIF

SEQ ID NO: 36981 - protein, 85 aa, unidentified
  REGION 1..85: note = Description of Unknown:cds_NZ_WFIY01000004.1_cds_WP_155864469.1_1944 target sequence
CMYQIEPAVGMFLKFLPSISSFKVLMPLARLVKPSKSQLDRAYKILNNIVEALEKSGIKPGYLYEEEPYSGAILLEMGFLEEFGE

SEQ ID NO: 36982 - protein, 85 aa, unidentified
  REGION 1..85: note = Description of Unknown:cds_NZ_WFIY01000004.1_cds_WP_155864469.1_1944 target sequence
YAKKIVSLFREKGVKKIITVDPHTHNALTRYQEFVKHDLEIVNYLELVNYTKKVEGEFTIHDSCLYSRFLGLREKYRGLIEKSGI

SEQ ID NO: 36983 - protein, 85 aa, unidentified
  REGION 1..85: note = Description of Unknown:cds_NC_029316.1_cds_YP_009230310.1_57 target sequence
PLPPPNSTTPHVSTTPSPTIHISPTSAVTSLFSFNFLSIILIAVVVGFVMMLLIIKLKSHRNVQLFDINARNADAIFLVVQKKTK

SEQ ID NO: 36984 - protein, 85 aa, unidentified
  REGION 1..85: note = Description of Unknown:cds_NC_029316.1_cds_YP_009230310.1_57 target sequence
KVVLVPARYIATGLFIGNTSDNDIYIIAVKPDITPFYIHGINKPFYFAVGETTVFLTMNLYTLSDLATARIFSDKSFSELIADIL

SEQ ID NO: 36985 - protein, 85 aa, unidentified
  REGION 1..85: note = Description of Unknown:cds_NC_029316.1_cds_YP_009230310.1_57 target sequence
SGSTQYTSSFVVGQYKLAITTDLSSVLDDYLISLQTSSAENIIHLLTSAGNEITNLQKISLAKQKLQTVLATNKTKLILALALTI

SEQ ID NO: 36986 - protein, 84 aa, unidentified
  REGION 1..84: note = Description of Unknown:cds_NC_029316.1_cds_YP_009230310.1_57 target sequence
AITTDLSSVLDDYLISLQTSSAENIIHLLTSAGNEITNLQKISLAKQKLQTVLATNKTKLILALALTIPIILAFVYILLHIVGK

SEQ ID NO: 36987 - protein, 85 aa, unidentified
  REGION 1..85: note = Description of Unknown:cds_NC_029316.1_cds_YP_009230310.1_57 target sequence
VTSLFSFNFLSIILIAVVVGFVMMLLIIKLKSHRNVQLFDINARNADAIFLVVQKKTKKVVLVPARYIATGLFIGNTSDNDIYII

SEQ ID NO: 36988 - protein, 85 aa, unidentified
  REGION 1..85: note = Description of Unknown:cds_NC_029316.1_cds_YP_009230310.1_57 target sequence
AVKPDITPFYIHGINKPFYFAVGETTVFLTMNLYTLSDLATARIFSDKSFSELIADILSGSTQYTSSFVVGQYKLAITTDLSSVL

SEQ ID NO: 36989 - protein, 85 aa, unidentified
  REGION 1..85: note = Description of Unknown:cds_NZ_WFIY01000004.1_cds_WP_155864364.1_377 target sequence
GERDGIPISIDELNKLKAIAERARRNVIKMQFYDHSIHVGSSLSSIEILTTLIFRYIRDGQEKINKDWLILSKGHAAPALYAVLH

SEQ ID NO: 36990 - protein, 85 aa, unidentified
  REGION 1..85: note = Description of Unknown:cds_NZ_WFIY01000004.1_cds_WP_155864364.1_377 target sequence
EKGLIKEEELWKIQAIDGLLQGHPEVYIPGVDMSTGSLGQGLSFGIGVATGIKMAKGSGRVFVIMGDGEQDEGEVWEAATHAVAR

SEQ ID NO: 36991 - protein, 85 aa, unidentified
  REGION 1..85: note = Description of Unknown:cds_NZ_WFIY01000004.1_cds_WP_155864364.1_377 target sequence
NLDNLIAFIEVNGYQLDARTSEVKPKDFLPDVYKAIGWRTFSCDGHDILSIINAVEEALKARKPAVIFAKTLRGKGFTPIENTKI

SEQ ID NO: 36992 - protein, 84 aa, unidentified
  REGION 1..84: note = Description of Unknown:cds_NZ_WFIY01000004.1_cds_WP_155864364.1_377 target sequence
DARTSEVKPKDFLPDVYKAIGWRTFSCDGHDILSIINAVEEALKARKPAVIFAKTLRGKGFTPIENTKIQRANPDVARQFLLNT

SEQ ID NO: 36993 - protein, 85 aa, unidentified
  REGION 1..85: note = Description of Unknown:cds_NZ_WFIY01000004.1_cds_WP_155864364.1_377 target sequence
IKMQFYDHSIHVGSSLSSIEILTTLIFRYIRDGQEKINKDWLILSKGHAAPALYAVLHEKGLIKEEELWKIQAIDGLLQGHPEVY

SEQ ID NO: 36994 - protein, 85 aa, unidentified
  REGION 1..85: note = Description of Unknown:cds_NZ_WFIY01000004.1_cds_WP_155864364.1_377 target sequence
IPGVDMSTGSLGQGLSFGIGVATGIKMAKGSGRVFVIMGDGEQDEGEVWEAATHAVARNLDNLIAFIEVNGYQLDARTSEVKPKD

SEQ ID NO: 36995 - protein, 85 aa, unidentified
  REGION 1..85: note = Description of Unknown:cds_NZ_WFIY01000004.1_cds_832 target sequence
RKIIAILTDFGISDNYNGVMEAVIRRINSEVDITYITPNSKNFNLYAASYLLYTSYKYFRKGSIFLVVVDPGVGTSRKALLVKSK

SEQ ID NO: 36996 - protein, 85 aa, unidentified
  REGION 1..85: note = Description of Unknown:cds_NZ_WFIY01000004.1_cds_832 target sequence
NYFFIGPDNGVLYPAASEDGIDEVIEISNPRLYLSKSISRTFHGRDIFATAAGFVSAGVNINAFGPKISKDELVKLSYDYNIIKD

SEQ ID NO: 36997 - protein, 85 aa, unidentified
  REGION 1..85: note = Description of Unknown:cds_NZ_WFIY01000004.1_cds_832 target sequence
KNLVCGKIIYIDHFGNIATSIRNVSFVDENVKIIFNNNRLNARKVNTFGESKGNELLVYKNGYGFIEIGINKENASIKLNASEGE

SEQ ID NO: 36998 - protein, 84 aa, unidentified
  REGION 1..84: note = Description of Unknown:cds_NZ_WFIY01000004.1_cds_832 target sequence
ATSIRNVSFVDENVKIIFNNNRLNARKVNTFGESKGNELLVYKNGYGFIEIGINKENASIKLNASEGEDICLEGSIQEDSSHST

SEQ ID NO: 36999 - protein, 85 aa, unidentified
  REGION 1..85: note = Description of Unknown:cds_NZ_WFIY01000004.1_cds_832 target sequence
NSEVDITYITPNSKNFNLYAASYLLYTSYKYFRKGSIFLVVVDPGVGTSRKALLVKSKNYFFIGPDNGVLYPAASEDGIDEVIEI

SEQ ID NO: 37000 - protein, 85 aa, unidentified
  REGION 1..85: note = Description of Unknown:cds_NZ_WFIY01000004.1_cds_832 target sequence
SNPRLYLSKSISRTFHGRDIFATAAGFVSAGVNINAFGPKISKDELVKLSYDYNIIKDKNLVCGKIIYIDHFGNIATSIRNVSFV

SEQ ID NO: 37001 - protein, 85 aa, unidentified
  REGION 1..85: note = Description of Unknown:cds_NZ_WFIY01000004.1_cds_1865 target sequence
VKYQKPILLIHGGAGNWKERDSEKAVKEINNALDRGFEEFKRGSSLEAVVEAISYMEDSGVFDAGRGSVKNSKGEIEMDAGLMYG

SEQ ID NO: 37002 - protein, 85 aa, unidentified
  REGION 1..85: note = Description of Unknown:cds_NZ_WFIY01000004.1_cds_1865 target sequence
NKLSIGAVAAVKVKNPIRLALQVMKDGRHVLLVGKEAEEIFPSTPLSVEDTVGAVALDIDGNLVAGTSTGGIANKLPGRVGDSPI

SEQ ID NO: 37003 - protein, 85 aa, unidentified
  REGION 1..85: note = Description of Unknown:cds_NZ_WFIY01000004.1_cds_1865 target sequence
PGAGYYATSRVAVSSTGIGEIILKILPAKEVDILVSMGLSICDAVRSVINKVTNIFGKGNIGMIGIDNNGNATAYYNTVGMARGI

SEQ ID NO: 37004 - protein, 84 aa, unidentified
  REGION 1..84: note = Description of Unknown:cds_NZ_WFIY01000004.1_cds_1865 target sequence
IGEIILKILPAKEVDILVSMGLSICDAVRSVINKVTNIFGKGNIGMIGIDNNGNATAYYNTVGMARGIKYGNGERRSFVFEGEI

SEQ ID NO: 37005 - protein, 85 aa, unidentified
  REGION 1..85: note = Description of Unknown:cds_NZ_WFIY01000004.1_cds_1865 target sequence
EINNALDRGFEEFKRGSSLEAVVEAISYMEDSGVFDAGRGSVKNSKGEIEMDAGLMYGNKLSIGAVAAVKVKNPIRLALQVMKDG

SEQ ID NO: 37006 - protein, 85 aa, unidentified
  REGION 1..85: note = Description of Unknown:cds_NZ_WFIY01000004.1_cds_1865 target sequence
RHVLLVGKEAEEIFPSTPLSVEDTVGAVALDIDGNLVAGTSTGGIANKLPGRVGDSPIPGAGYYATSRVAVSSTGIGEIILKILP

SEQ ID NO: 37007 - protein, 85 aa, unidentified
  REGION 1..85: note = Description of Unknown:cds_NZ_WFIY01000004.1_cds_WP_155864013.1_1941 target sequence
SQIDDIIKQYNSGNLNLALRKLEELVSKNPTKEAYELMAKILLEMGKDDEALEYFEKAGNKVEKARILLSRGMYSDALDELKDVN

SEQ ID NO: 37008 - protein, 85 aa, unidentified
  REGION 1..85: note = Description of Unknown:cds_NZ_WFIY01000004.1_cds_WP_155864013.1_1941 target sequence
STEAKIIKATIYLRKEDYKKVIEELNEINDELSSNPLYYKIKGIAEYYLGNYYDALRDLTRGIELYPLDSELYYYRALVKISLNE

SEQ ID NO: 37009 - protein, 85 aa, unidentified
  REGION 1..85: note = Description of Unknown:cds_NZ_WFIY01000004.1_cds_WP_155864013.1_1941 target sequence
DKEAESDINTAINLNPYYAEAYFSKGLLKEKKGKYEEAIAYYSKSIEINPEYVEAYVRRAKSYMKSGMEKEAFEDIKVVKELKEK

SEQ ID NO: 37010 - protein, 84 aa, unidentified
  REGION 1..84: note = Description of Unknown:cds_NZ_WFIY01000004.1_cds_WP_155864013.1_1941 target sequence
YYAEAYFSKGLLKEKKGKYEEAIAYYSKSIEINPEYVEAYVRRAKSYMKSGMEKEAFEDIKVVKELKEKKENIARIDIDKENDG

SEQ ID NO: 37011 - protein, 85 aa, unidentified
  REGION 1..85: note = Description of Unknown:cds_NZ_WFIY01000004.1_cds_WP_155864013.1_1941 target sequence
KNPTKEAYELMAKILLEMGKDDEALEYFEKAGNKVEKARILLSRGMYSDALDELKDVNSTEAKIIKATIYLRKEDYKKVIEELNE

SEQ ID NO: 37012 - protein, 85 aa, unidentified
  REGION 1..85: note = Description of Unknown:cds_NZ_WFIY01000004.1_cds_WP_155864013.1_1941 target sequence
INDELSSNPLYYKIKGIAEYYLGNYYDALRDLTRGIELYPLDSELYYYRALVKISLNEDKEAESDINTAINLNPYYAEAYFSKGL

SEQ ID NO: 37013 - protein, 85 aa, unidentified
  REGION 1..85: note = Description of Unknown:cds_NZ_WFIY01000004.1_cds_WP_155862325.1_51 target sequence
VRIEVVVYTAVVSAFIISLLFYPVFEVNSSIYSQELELFGFNIRFYDYSSTVFLPLPIAGVIYALLSAIVPLAWRKNRYSLYLST

SEQ ID NO: 37014 - protein, 85 aa, unidentified
  REGION 1..85: note = Description of Unknown:cds_NZ_WFIY01000004.1_cds_WP_155862325.1_51 target sequence
ILILLSISMFISSYIYDERYLFYYDYSVLPTYNGAFLIYFPKVFSFNLPFFILIASAAISSLNSVTRARWIPISKLTLLEKVLHD

SEQ ID NO: 37015 - protein, 85 aa, unidentified
  REGION 1..85: note = Description of Unknown:cds_NZ_WFIY01000004.1_cds_WP_155862325.1_51 target sequence
LRYNEIERGIVRLFTELNVPYSIEEGVISAPHLKILKDNRKIKEAFFPRRFNTSVIFIQGNKAYKIDNGELKEISLLEVIKIILQ

SEQ ID NO: 37016 - protein, 84 aa, unidentified
  REGION 1..84: note = Description of Unknown:cds_NZ_WFIY01000004.1_cds_WP_155862325.1_51 target sequence
LNVPYSIEEGVISAPHLKILKDNRKIKEAFFPRRFNTSVIFIQGNKAYKIDNGELKEISLLEVIKIILQNIEINETRIEKEEYL

SEQ ID NO: 37017 - protein, 85 aa, unidentified
  REGION 1..85: note = Description of Unknown:cds_NZ_WFIY01000004.1_cds_WP_155862325.1_51 target sequence
NSSIYSQELELFGFNIRFYDYSSTVFLPLPIAGVIYALLSAIVPLAWRKNRYSLYLSTILILLSISMFISSYIYDERYLFYYDYS

SEQ ID NO: 37018 - protein, 85 aa, unidentified
  REGION 1..85: note = Description of Unknown:cds_NZ_WFIY01000004.1_cds_WP_155862325.1_51 target sequence
VLPTYNGAFLIYFPKVFSFNLPFFILIASAAISSLNSVTRARWIPISKLTLLEKVLHDLRYNEIERGIVRLFTELNVPYSIEEGV

SEQ ID NO: 37019 - protein, 85 aa, unidentified
  REGION 1..85: note = Description of Unknown:cds_NZ_WFIY01000004.1_cds_WP_155862722.1_524 target sequence
SGSTIRLKRLFEKGKAFVVALDHGLVMGPLKGIENPVEIVSKLSNIPDALQMTPAMLKLVEENFYTRNSPMLIARLDTANVWRKE

SEQ ID NO: 37020 - protein, 85 aa, unidentified
  REGION 1..85: note = Description of Unknown:cds_NZ_WFIY01000004.1_cds_WP_155862722.1_524 target sequence
KKYSQGYYSMVYQVKEAVEAGADAVVTYLVVGYGDDRVEGYNIEALAKARAEAHDYGLPFIIEPLYVSPDNPDSIKDVNLVKYVT

SEQ ID NO: 37021 - protein, 85 aa, unidentified
  REGION 1..85: note = Description of Unknown:cds_NZ_WFIY01000004.1_cds_WP_155862722.1_524 target sequence
RLASEIGADILKVDYTGNKEEFKEVVNVAFAPILIRGGPKTKDDKEFLLMLKDAIDAGASGVTVGRNLWQSKNPTAMAKAIADVI

SEQ ID NO: 37022 - protein, 84 aa, unidentified
  REGION 1..84: note = Description of Unknown:cds_NZ_WFIY01000004.1_cds_WP_155862722.1_524 target sequence
TGNKEEFKEVVNVAFAPILIRGGPKTKDDKEFLLMLKDAIDAGASGVTVGRNLWQSKNPTAMAKAIADVIRGKSVEEALKIWVE

SEQ ID NO: 37023 - protein, 85 aa, unidentified
  REGION 1..85: note = Description of Unknown:cds_NZ_WFIY01000004.1_cds_WP_155862722.1_524 target sequence
GPLKGIENPVEIVSKLSNIPDALQMTPAMLKLVEENFYTRNSPMLIARLDTANVWRKEKKYSQGYYSMVYQVKEAVEAGADAVVT

SEQ ID NO: 37024 - protein, 85 aa, unidentified
  REGION 1..85: note = Description of Unknown:cds_NZ_WFIY01000004.1_cds_WP_155862722.1_524 target sequence
YLVVGYGDDRVEGYNIEALAKARAEAHDYGLPFIIEPLYVSPDNPDSIKDVNLVKYVTRLASEIGADILKVDYTGNKEEFKEVVN

SEQ ID NO: 37025 - protein, 85 aa, unidentified
  REGION 1..85: note = Description of Unknown:cds_NZ_WFIY01000004.1_cds_WP_155863550.1_1483 target sequence
LRAIFISVFFVIVILSLFAPLLASSNYTINYSGSFEAHYLVTTYFKAYGNASIKINEHNVSVSENFIVCNKSLAISASCINPNLT

SEQ ID NO: 37026 - protein, 85 aa, unidentified
  REGION 1..85: note = Description of Unknown:cds_NZ_WFIY01000004.1_cds_WP_155863550.1_1483 target sequence
SLFNFHIHNSYYYIINKSNSNICIKFYFTNFSIMLIPYCTMLIPYYLPINISSGNYSIVILNENILSGKVVKYNGTSIVYCKGGI

SEQ ID NO: 37027 - protein, 85 aa, unidentified
  REGION 1..85: note = Description of Unknown:cds_NZ_WFIY01000004.1_cds_WP_155863550.1_1483 target sequence
LNITFTALCLNPFHYYYIHGYYAYNKSNNILQSYENIFSGKINNANGKAPLDFVKILQLHRTYEAVVSHTSNIFTYIETGGIVII

SEQ ID NO: 37028 - protein, 84 aa, unidentified
  REGION 1..84: note = Description of Unknown:cds_NZ_WFIY01000004.1_cds_WP_155863550.1_1483 target sequence
YYIHGYYAYNKSNNILQSYENIFSGKINNANGKAPLDFVKILQLHRTYEAVVSHTSNIFTYIETGGIVIIILVLFALIIKKKFR

SEQ ID NO: 37029 - protein, 85 aa, unidentified
  REGION 1..85: note = Description of Unknown:cds_NZ_WFIY01000004.1_cds_WP_155863550.1_1483 target sequence
TINYSGSFEAHYLVTTYFKAYGNASIKINEHNVSVSENFIVCNKSLAISASCINPNLTSLFNFHIHNSYYYIINKSNSNICIKFY

SEQ ID NO: 37030 - protein, 85 aa, unidentified
  REGION 1..85: note = Description of Unknown:cds_NZ_WFIY01000004.1_cds_WP_155863550.1_1483 target sequence
FTNFSIMLIPYCTMLIPYYLPINISSGNYSIVILNENILSGKVVKYNGTSIVYCKGGILNITFTALCLNPFHYYYIHGYYAYNKS

SEQ ID NO: 37031 - protein, 85 aa, unidentified
  REGION 1..85: note = Description of Unknown:cds_NZ_WFIY01000004.1_cds_WP_155863697.1_1555 target sequence
EIKGIISKLYAFLYIRGFKVWSSYRTQVILTILSWTLPVFTYYFIGTSLGNKLVQDIHVTNYTSFFVIGLAFQGYVSSVITTISQ

SEQ ID NO: 37032 - protein, 85 aa, unidentified
  REGION 1..85: note = Description of Unknown:cds_NZ_WFIY01000004.1_cds_WP_155863697.1_1555 target sequence
RIRNEQLYGTIEYYVLSKSGVLSFLIYSAIWGFTINTINAVIILTIGDLLGVRYEINILSTLLLTLLLISSTLGIAFMSAAFTMI

SEQ ID NO: 37033 - protein, 85 aa, unidentified
  REGION 1..85: note = Description of Unknown:cds_NZ_WFIY01000004.1_cds_WP_155863697.1_1555 target sequence
IKQGNPISFFFSTFTTLLGGVVFPVTIMPSEVTYISYALPLTWALNGLRNTMLYGYGIFQVLKCIEILLLFNIILIPLGLLMYSF

SEQ ID NO: 37034 - protein, 84 aa, unidentified
  REGION 1..84: note = Description of Unknown:cds_NZ_WFIY01000004.1_cds_WP_155863697.1_1555 target sequence
TLLGGVVFPVTIMPSEVTYISYALPLTWALNGLRNTMLYGYGIFQVLKCIEILLLFNIILIPLGLLMYSFSFKKAREKGTLGEY

SEQ ID NO: 37035 - protein, 85 aa, unidentified
  REGION 1..85: note = Description of Unknown:cds_NZ_WFIY01000004.1_cds_WP_155863697.1_1555 target sequence
VILTILSWTLPVFTYYFIGTSLGNKLVQDIHVTNYTSFFVIGLAFQGYVSSVITTISQRIRNEQLYGTIEYYVLSKSGVLSFLIY

SEQ ID NO: 37036 - protein, 85 aa, unidentified
  REGION 1..85: note = Description of Unknown:cds_NZ_WFIY01000004.1_cds_WP_155863697.1_1555 target sequence
SAIWGFTINTINAVIILTIGDLLGVRYEINILSTLLLTLLLISSTLGIAFMSAAFTMIIKQGNPISFFFSTFTTLLGGVVFPVTI

SEQ ID NO: 37037 - protein, 85 aa, unidentified
  REGION 1..85: note = Description of Unknown:cds_NZ_WFIY01000004.1_cds_WP_155863881.1_1785 target sequence
GIIEDIEEEIKQNYKINSGIKLDEAYVTGAGDSFAASLVIEGKTNGRFRAIDPYDALCMNMDKPLIIVSVSGKPKSNINLARKFK

SEQ ID NO: 37038 - protein, 85 aa, unidentified
  REGION 1..85: note = Description of Unknown:cds_NZ_WFIY01000004.1_cds_WP_155863881.1_1785 target sequence
GKTKIYVITANPESELAKLADEIVYLPYKTKRVLPGTLSFMMSLSALYDIANVEEDKGCGKEIPIEDRAFFIGKGENYGIAYFAY

SEQ ID NO: 37039 - protein, 85 aa, unidentified
  REGION 1..85: note = Description of Unknown:cds_NZ_WFIY01000004.1_cds_WP_155863881.1_1785 target sequence
LKLAEIFGWSSNFERLEQFFHSPIFSSRTRQVIIFSSGDEREKEARKLMNVNLTECRGAFCNLRTFLKSLIFTMRIKNWNKIYFL

SEQ ID NO: 37040 - protein, 84 aa, unidentified
  REGION 1..84: note = Description of Unknown:cds_NZ_WFIY01000004.1_cds_WP_155863881.1_1785 target sequence
LEQFFHSPIFSSRTRQVIIFSSGDEREKEARKLMNVNLTECRGAFCNLRTFLKSLIFTMRIKNWNKIYFLEDKEILNISSAMIY

SEQ ID NO: 37041 - protein, 85 aa, unidentified
  REGION 1..85: note = Description of Unknown:cds_NZ_WFIY01000004.1_cds_WP_155863881.1_1785 target sequence
TGAGDSFAASLVIEGKTNGRFRAIDPYDALCMNMDKPLIIVSVSGKPKSNINLARKFKGKTKIYVITANPESELAKLADEIVYLP

SEQ ID NO: 37042 - protein, 85 aa, unidentified
  REGION 1..85: note = Description of Unknown:cds_NZ_WFIY01000004.1_cds_WP_155863881.1_1785 target sequence
YKTKRVLPGTLSFMMSLSALYDIANVEEDKGCGKEIPIEDRAFFIGKGENYGIAYFAYLKLAEIFGWSSNFERLEQFFHSPIFSS

SEQ ID NO: 37043 - protein, 85 aa, unidentified
  REGION 1..85: note = Description of Unknown:cds_NZ_WFIY01000004.1_cds_WP_155864187.1_2147 target sequence
IEIEGLSKSFTVRGVKVKVLDNVLLKLDKGVNCLVGPNGSGKTTLIKIIATELPPDEGIVKVEGFDVVMEKEEVRKRIAVVFDSV

SEQ ID NO: 37044 - protein, 85 aa, unidentified
  REGION 1..85: note = Description of Unknown:cds_NZ_WFIY01000004.1_cds_WP_155864187.1_2147 target sequence
SVDQDITVEDNLKFFKAISNFKGDIDNLVSEFQLDKYLKFKVSFLSAGNKKKLDLIRAIMLNRPVLLLDEPTNHLDSITAQKVWS

SEQ ID NO: 37045 - protein, 85 aa, unidentified
  REGION 1..85: note = Description of Unknown:cds_NZ_WFIY01000004.1_cds_WP_155864187.1_2147 target sequence
LLKDLNKIILVTSHTIPRLQVCDKLFVISKGKIVRYPVSRLIDVIENYRLIEVDNKRLYVKKDEIESVIKRFGSSAKKLEIRELE

SEQ ID NO: 37046 - protein, 84 aa, unidentified
  REGION 1..84: note = Description of Unknown:cds_NZ_WFIY01000004.1_cds_WP_155864187.1_2147 target sequence
IPRLQVCDKLFVISKGKIVRYPVSRLIDVIENYRLIEVDNKRLYVKKDEIESVIKRFGSSAKKLEIRELEPMDAIYYLSKISLF

SEQ ID NO: 37047 - protein, 85 aa, unidentified
  REGION 1..85: note = Description of Unknown:cds_NZ_WFIY01000004.1_cds_WP_155864187.1_2147 target sequence
DKGVNCLVGPNGSGKTTLIKIIATELPPDEGIVKVEGFDVVMEKEEVRKRIAVVFDSVSVDQDITVEDNLKFFKAISNFKGDIDN

SEQ ID NO: 37048 - protein, 85 aa, unidentified
  REGION 1..85: note = Description of Unknown:cds_NZ_WFIY01000004.1_cds_WP_155864187.1_2147 target sequence
LVSEFQLDKYLKFKVSFLSAGNKKKLDLIRAIMLNRPVLLLDEPTNHLDSITAQKVWSLLKDLNKIILVTSHTIPRLQVCDKLFV

SEQ ID NO: 37049 - protein, 85 aa, unidentified
  REGION 1..85: note = Description of Unknown:cds_NC_035460.1_cds_YP_009407991.1_40 target sequence
AAILTPDVYEVSKKLAVDQKTYFTRELSPLMKNTYLYHEYAYGWIPETAIWSSKYANLDVTEYYPITLNLLKKFEFMLDLYKGPI

SEQ ID NO: 37050 - protein, 85 aa, unidentified
  REGION 1..85: note = Description of Unknown:cds_NC_035460.1_cds_YP_009407991.1_40 target sequence
PLYEKKINTEFISNGSFSGKYVNYLRNFSLLPTNEFISFLLLTSMPIYNILFWFKTTQFDITKHTLFSNVFTTNEAHIILAKYFH

SEQ ID NO: 37051 - protein, 85 aa, unidentified
  REGION 1..85: note = Description of Unknown:cds_NC_035460.1_cds_YP_009407991.1_40 target sequence
HGGDYKPLFSRLKDITTYTMQLPTGTNKIYHPGLSVTTPSSDYELLANLSAILHLTKYDPVLMFLAFYVPGLSITTKITPAVEYL

SEQ ID NO: 37052 - protein, 84 aa, unidentified
  REGION 1..84: note = Description of Unknown:cds_NC_035460.1_cds_YP_009407991.1_40 target sequence
TTYTMQLPTGTNKIYHPGLSVTTPSSDYELLANLSAILHLTKYDPVLMFLAFYVPGLSITTKITPAVEYLMEKLNLSKKNIILV

SEQ ID NO: 37053 - protein, 85 aa, unidentified
  REGION 1..85: note = Description of Unknown:cds_NC_035460.1_cds_YP_009407991.1_40 target sequence
SPLMKNTYLYHEYAYGWIPETAIWSSKYANLDVTEYYPITLNLLKKFEFMLDLYKGPIPLYEKKINTEFISNGSFSGKYVNYLRN

SEQ ID NO: 37054 - protein, 85 aa, unidentified
  REGION 1..85: note = Description of Unknown:cds_NC_035460.1_cds_YP_009407991.1_40 target sequence
FSLLPTNEFISFLLLTSMPIYNILFWFKTTQFDITKHTLFSNVFTTNEAHIILAKYFHHGGDYKPLFSRLKDITTYTMQLPTGTN

SEQ ID NO: 37055 - protein, 85 aa, unidentified
  REGION 1..85: note = Description of Unknown:cds_NC_035460.1_cds_YP_009407999.1_48 target sequence
RKHVVQKPAVSSVNKKTDNENKTNTCASVIEFTKSLCKSTNKYIDSVTLIASQYPTCSNINIKLTNDLSSKMTSTFIVVEGETKI

SEQ ID NO: 37056 - protein, 85 aa, unidentified
  REGION 1..85: note = Description of Unknown:cds_NC_035460.1_cds_YP_009407999.1_48 target sequence
YKKKNDAKSDPFFVRIKPNAISPLMYQMLEHIYSNIREGVRVPPNLANLQISEFVEKTFVGDYMYINKLGGAVVEYTSPGSKSIT

SEQ ID NO: 37057 - protein, 85 aa, unidentified
  REGION 1..85: note = Description of Unknown:cds_NC_035460.1_cds_YP_009407999.1_48 target sequence
MSITDELEQLSKRDRQMARIIITPIVFYKNGLDVKVTFALKKLIIEREFSANVIDVDGSSGKVSMSESGEEDIVRGLGLMDTCDD

SEQ ID NO: 37058 - protein, 84 aa, unidentified
  REGION 1..84: note = Description of Unknown:cds_NC_035460.1_cds_YP_009407999.1_48 target sequence
QMARIIITPIVFYKNGLDVKVTFALKKLIIEREFSANVIDVDGSSGKVSMSESGEEDIVRGLGLMDTCDDVCDEDNVETSLFNV

SEQ ID NO: 37059 - protein, 85 aa, unidentified
  REGION 1..85: note = Description of Unknown:cds_NC_035460.1_cds_YP_009407999.1_48 target sequence
SVIEFTKSLCKSTNKYIDSVTLIASQYPTCSNINIKLTNDLSSKMTSTFIVVEGETKIYKKKNDAKSDPFFVRIKPNAISPLMYQ

SEQ ID NO: 37060 - protein, 85 aa, unidentified
  REGION 1..85: note = Description of Unknown:cds_NC_035460.1_cds_YP_009407999.1_48 target sequence
MLEHIYSNIREGVRVPPNLANLQISEFVEKTFVGDYMYINKLGGAVVEYTSPGSKSITMSITDELEQLSKRDRQMARIIITPIVF

SEQ ID NO: 37061 - protein, 85 aa, unidentified
  REGION 1..85: note = Description of Unknown:cds_NC_010495.1_cds_YP_001742058.1_21 target sequence
MKTLSKIYQDKETRNGIAVNKTYLVPVEQIYLEPGYNIREADEQHVEYFAQCWESGQPLPALTVIPDEKGIRILDGQHRYLGALR

SEQ ID NO: 37062 - protein, 85 aa, unidentified
  REGION 1..85: note = Description of Unknown:cds_NC_010495.1_cds_YP_001742058.1_21 target sequence
AIERGAPIVRIECKDFTGDEADKIAFMVSSSQGKQLDPFERAKAYTRLKGFGWTNEEIAKKVGRSVSDVQMHLSLGDVPAEVKAR

SEQ ID NO: 37063 - protein, 85 aa, unidentified
  REGION 1..85: note = Description of Unknown:cds_NC_010495.1_cds_YP_001742058.1_21 target sequence
ISAGQISYANAVAVTREHGDDAVKVIDEAVEEAKAQGKDKVTAKVLKSKKIKPVDRLIELLKPADHVILPAGHVVVEDEEFIQIP

SEQ ID NO: 37064 - protein, 84 aa, unidentified
  REGION 1..84: note = Description of Unknown:cds_NC_010495.1_cds_YP_001742058.1_21 target sequence
REHGDDAVKVIDEAVEEAKAQGKDKVTAKVLKSKKIKPVDRLIELLKPADHVILPAGHVVVEDEEFIQIPVADIHEVMAILEKM

SEQ ID NO: 37065 - protein, 85 aa, unidentified
  REGION 1..85: note = Description of Unknown:cds_NC_010495.1_cds_YP_001742058.1_21 target sequence
EQIYLEPGYNIREADEQHVEYFAQCWESGQPLPALTVIPDEKGIRILDGQHRYLGALRAIERGAPIVRIECKDFTGDEADKIAFM

SEQ ID NO: 37066 - protein, 85 aa, unidentified
  REGION 1..85: note = Description of Unknown:cds_NC_010495.1_cds_YP_001742058.1_21 target sequence
VSSSQGKQLDPFERAKAYTRLKGFGWTNEEIAKKVGRSVSDVQMHLSLGDVPAEVKARISAGQISYANAVAVTREHGDDAVKVID

SEQ ID NO: 37067 - protein, 85 aa, unidentified
  REGION 1..85: note = Description of Unknown:hvTR_Q8V516 target sequence
SKVIKKRVETSPRPTASSDSLQTCAGVIEYAKSISKSNAKCIEYVTLNASQYANCSSISIKLTDSLSSQMTSTFIMLEGETKLYK

SEQ ID NO: 37068 - protein, 85 aa, unidentified
  REGION 1..85: note = Description of Unknown:hvTR_Q8V516 target sequence
NKSKQDRSDGYFLKIKVTAASPMLYQLLEAVYGNITHKERIPNSLHSLSAETITEKTFKDESIFINKLNGAMVEYVSTGESSILR

SEQ ID NO: 37069 - protein, 85 aa, unidentified
  REGION 1..85: note = Description of Unknown:hvTR_Q8V516 target sequence
SIEGELESLSKRERQLAKAIITPVVFYRSGTETKITFALKKLIIDREVVANVIGLSGDSERVSMTENVEEDLVRNLGLVDIDDEY

SEQ ID NO: 37070 - protein, 84 aa, unidentified
  REGION 1..84: note = Description of Unknown:hvTR_Q8V516 target sequence
QLAKAIITPVVFYRSGTETKITFALKKLIIDREVVANVIGLSGDSERVSMTENVEEDLVRNLGLVDIDDEYDEDSDKEKPIFNV

SEQ ID NO: 37071 - protein, 85 aa, unidentified
  REGION 1..85: note = Description of Unknown:hvTR_Q8V516 target sequence
IEYAKSISKSNAKCIEYVTLNASQYANCSSISIKLTDSLSSQMTSTFIMLEGETKLYKNKSKQDRSDGYFLKIKVTAASPMLYQL

SEQ ID NO: 37072 - protein, 85 aa, unidentified
  REGION 1..85: note = Description of Unknown:hvTR_Q8V516 target sequence
LEAVYGNITHKERIPNSLHSLSAETITEKTFKDESIFINKLNGAMVEYVSTGESSILRSIEGELESLSKRERQLAKAIITPVVFY

SEQ ID NO: 37073 - protein, 85 aa, unidentified; identical to SEQ ID NO: 37067
  REGION 1..85: note = Description of Unknown:hvTR_P12923 target sequence

SEQ ID NO: 37074 - protein, 85 aa, unidentified
  REGION 1..85: note = Description of Unknown:hvTR_P12923 target sequence
NKSKQDRSDGYFLKIKVTAASPMLYQLLEAVYGNIKHKERIPNSLHSLSVETITEKTFKDESIFINKLNGAMVEYVSTGESSILR

SEQ ID NO: 37075 - protein, 85 aa, unidentified
  REGION 1..85: note = Description of Unknown:hvTR_P12923 target sequence
SIEGELESLSKRERQLAKAIITPVVFYRSGTETKITFALKKLIIDREVVANVIGLSGDSERVSMTENVEEDLARNLGLVDIDDEY

SEQ ID NO: 37076 - protein, 84 aa, unidentified
  REGION 1..84: note = Description of Unknown:hvTR_P12923 target sequence
QLAKAIITPVVFYRSGTETKITFALKKLIIDREVVANVIGLSGDSERVSMTENVEEDLARNLGLVDIDDEYDEDSDKEKPIFNV

SEQ ID NO: 37077 - protein, 85 aa, unidentified; identical to SEQ ID NO: 37071
  REGION 1..85: note = Description of Unknown:hvTR_P12923 target sequence

SEQ ID NO: 37078 - protein, 85 aa, unidentified
  REGION 1..85: note = Description of Unknown:hvTR_P12923 target sequence
LEAVYGNIKHKERIPNSLHSLSVETITEKTFKDESIFINKLNGAMVEYVSTGESSILRSIEGELESLSKRERQLAKAIITPVVFY

SEQ ID NO: 37079 - protein, 85 aa, unidentified; identical to SEQ ID NO: 37067
  REGION 1..85: note = Description of Unknown:hvTR_P0DOP3 target sequence

SEQ ID NO: 37080 - protein, 85 aa, unidentified
  REGION 1..85: note = Description of Unknown:hvTR_P0DOP3 target sequence
NKSKQDRSDGYFLKIKVTAASPMLYQLLEAVYGNIKHKERIPNSLHSLLVETITEKTFKDESIFINKLNGAMVEYVSTGELSILR

SEQ ID NO: 37081 - protein, 85 aa, unidentified; identical to SEQ ID NO: 37075
  REGION 1..85: note = Description of Unknown:hvTR_P0DOP3 target sequence

SEQ ID NO: 37082 - protein, 84 aa, unidentified; identical to SEQ ID NO: 37076
  REGION 1..84: note = Description of Unknown:hvTR_P0DOP3 target sequence

SEQ ID NO: 37083 - protein, 85 aa, unidentified; identical to SEQ ID NO: 37071
  REGION 1..85: note = Description of Unknown:hvTR_P0DOP3 target sequence

SEQ ID NO: 37084 - protein, 85 aa, unidentified
  REGION 1..85: note = Description of Unknown:hvTR_P0DOP3 target sequence
LEAVYGNIKHKERIPNSLHSLLVETITEKTFKDESIFINKLNGAMVEYVSTGELSILRSIEGELESLSKRERQLAKAIITPVVFY

SEQ ID NO: 37085 - protein, 85 aa, unidentified
  REGION 1..85: note = Description of Unknown:cds_NZ_WFIY01000004.1_cds_WP_155862304.1_20 target sequence
LRRVEIRGIVRNISPLRIGNRDVVDFTSITKVQLLKNSRGIPFIPGSSWKGVFRSTGEVIARKKGLKVCTGLTKETCVDKIPDFQ

SEQ ID NO: 37086 - protein, 85 aa, unidentified
  REGION 1..85: note = Description of Unknown:cds_NZ_WFIY01000004.1_cds_WP_155862304.1_20 target sequence
ELIKKDIEKAKKVFWEKTCLNCKVFGAPSILSSVYFFDSYPSNYKIGVKTIIAISRENGAVSKGALATAEYVEPNSTFSFLLLGE

SEQ ID NO: 37087 - protein, 85 aa, unidentified
  REGION 1..85: note = Description of Unknown:cds_NZ_WFIY01000004.1_cds_WP_155862304.1_20 target sequence
NMPNYAIGYILSIMKEIHYGYSQVGGYKSRGFGFVKFDKLQMRITHYSEKSGSNSSLSPLDEFDLKADYTQDELSGDEFFKKNSS

SEQ ID NO: 37088 - protein, 84 aa, unidentified
  REGION 1..84: note = Description of Unknown:cds_NZ_WFIY01000004.1_cds_WP_155862304.1_20 target sequence
EIHYGYSQVGGYKSRGFGFVKFDKLQMRITHYSEKSGSNSSLSPLDEFDLKADYTQDELSGDEFFKKNSSLLEVFNNARIQYPM

SEQ ID NO: 37089 - protein, 85 aa, unidentified
  REGION 1..85: note = Description of Unknown:cds_NZ_WFIY01000004.1_cds_WP_155862304.1_20 target sequence
SITKVQLLKNSRGIPFIPGSSWKGVFRSTGEVIARKKGLKVCTGLTKETCVDKIPDFQELIKKDIEKAKKVFWEKTCLNCKVFGA

SEQ ID NO: 37090 - protein, 85 aa, unidentified
  REGION 1..85: note = Description of Unknown:cds_NZ_WFIY01000004.1_cds_WP_155862304.1_20 target sequence
PSILSSVYFFDSYPSNYKIGVKTIIAISRENGAVSKGALATAEYVEPNSTFSFLLLGENMPNYAIGYILSIMKEIHYGYSQVGGY

SEQ ID NO: 37091 - protein, 85 aa, unidentified
  REGION 1..85: note = Description of Unknown:cds_NZ_WFIY01000004.1_cds_WP_155862474.1_229 target sequence
LPRKKKTDEENKKENNGEESKTKKKKTQKKEKFVDAEALLDEYLDEVILGLGISFLKLKPEEYKEILKEPFVAAVGQVKTKPKSK

SEQ ID NO: 37092 - protein, 85 aa, unidentified
  REGION 1..85: note = Description of Unknown:cds_NZ_WFIY01000004.1_cds_WP_155862474.1_229 target sequence
TIINRLTANRDAMMEYIAMRLVRIIDIEKMNCEQLEFVIYNTKKAIVDLAPKLYKEALKRNRKDLIDVLRYNWNLYGIVSPIICP

SEQ ID NO: 37093 - protein, 85 aa, unidentified
  REGION 1..85: note = Description of Unknown:cds_NZ_WFIY01000004.1_cds_WP_155862474.1_229 target sequence
KCGFSSIMPDLSCKVCEYVMSMKELKSQINVIQTLKDYYSLDPEGFKEILTSGYFYYTAEGPIPPSKFRPSPQVLAFEIVLNKDE

SEQ ID NO: 37094 - protein, 84 aa, unidentified
  REGION 1..84: note = Description of Unknown:cds_NZ_WFIY01000004.1_cds_WP_155862474.1_229 target sequence
CEYVMSMKELKSQINVIQTLKDYYSLDPEGFKEILTSGYFYYTAEGPIPPSKFRPSPQVLAFEIVLNKDEKKILSNIYNNPHVQ

SEQ ID NO: 37095 - protein, 85 aa, unidentified
  REGION 1..85: note = Description of Unknown:cds_NZ_WFIY01000004.1_cds_WP_155862474.1_229 target sequence
QKKEKFVDAEALLDEYLDEVILGLGISFLKLKPEEYKEILKEPFVAAVGQVKTKPKSKTIINRLTANRDAMMEYIAMRLVRIIDI

SEQ ID NO: 37096 - protein, 85 aa, unidentified
  REGION 1..85: note = Description of Unknown:cds_NZ_WFIY01000004.1_cds_WP_155862474.1_229 target sequence
EKMNCEQLEFVIYNTKKAIVDLAPKLYKEALKRNRKDLIDVLRYNWNLYGIVSPIICPKCGFSSIMPDLSCKVCEYVMSMKELKS

SEQ ID NO: 37097 - protein, 85 aa, unidentified
  REGION 1..85: note = Description of Unknown:cds_NZ_WFIY01000004.1_cds_WP_155863367.1_1339 target sequence
QIPYATYPVGNSLYPLALDLFVPTVFFFFLGASYRVFRYLVTYQKPFIPYPSSELRQVSSWNKIANLVNTFANSSRVGIKRKPVT

SEQ ID NO: 37098 - protein, 85 aa, unidentified
  REGION 1..85: note = Description of Unknown:cds_NZ_WFIY01000004.1_cds_WP_155863367.1_1339 target sequence
TGVGLLFHIALVLIIFLLAQHMVFWAYYIPPYSALFPLAIPESSEDGLLALTTPNHASITEFVHDIWGPLTVILNGQFLTFFLII

SEQ ID NO: 37099 - protein, 85 aa, unidentified
  REGION 1..85: note = Description of Unknown:cds_NZ_WFIY01000004.1_cds_WP_155863367.1_1339 target sequence
FLGIYLGHKLLLAIEGLSLRAGDWWFFVLLYIDILLGFFATAHIPSNVYWYDNLLGAHILVAEIIIATLPFTRGFHMFEFYLGKV

SEQ ID NO: 37100 - protein, 84 aa, unidentified
  REGION 1..84: note = Description of Unknown:cds_NZ_WFIY01000004.1_cds_WP_155863367.1_1339 target sequence
EGLSLRAGDWWFFVLLYIDILLGFFATAHIPSNVYWYDNLLGAHILVAEIIIATLPFTRGFHMFEFYLGKVREWYFMVYRRGEK

SEQ ID NO: 37101 - protein, 85 aa, unidentified
  REGION 1..85: note = Description of Unknown:cds_NZ_WFIY01000004.1_cds_WP_155863367.1_1339 target sequence
FFLGASYRVFRYLVTYQKPFIPYPSSELRQVSSWNKIANLVNTFANSSRVGIKRKPVTTGVGLLFHIALVLIIFLLAQHMVFWAY

SEQ ID NO: 37102 - protein, 85 aa, unidentified
  REGION 1..85: note = Description of Unknown:cds_NZ_WFIY01000004.1_cds_WP_155863367.1_1339 target sequence
YIPPYSALFPLAIPESSEDGLLALTTPNHASITEFVHDIWGPLTVILNGQFLTFFLIIFLGIYLGHKLLLAIEGLSLRAGDWWFF

SEQ ID NO: 37103 - protein, 85 aa, unidentified
  REGION 1..85: note = Description of Unknown:cds_NZ_WFIY01000004.1_cds_WP_155863951.1_1872 target sequence
LEYEKVPIAIIGGSGLYDPKIFSESKEIKVYTPYGETSDLITIGTVEGKKVAFLPRHGRRHRIPPHKINYRANIWALHELGVKWV

SEQ ID NO: 37104 - protein, 85 aa, unidentified
  REGION 1..85: note = Description of Unknown:cds_NZ_WFIY01000004.1_cds_WP_155863951.1_1872 target sequence
ISVSAVGSLRMDYKPGDFVVPDQFIDMTKKREYTFFDGPVVAHVSMADPFCNHLRKIIISAAKDLGITTHESGTYICIEGPRFST

SEQ ID NO: 37105 - protein, 85 aa, unidentified
  REGION 1..85: note = Description of Unknown:cds_NZ_WFIY01000004.1_cds_WP_155863951.1_1872 target sequence
RAESRVWKEVFKADIIGMTLVPEVNLACEMQMCYATIATITDYDVFAEVPVTAEEVTRVLNENTEKSRKLLYEVIKRIPDKPDER

SEQ ID NO: 37106 - protein, 84 aa, unidentified
  REGION 1..84: note = Description of Unknown:cds_NZ_WFIY01000004.1_cds_WP_155863951.1_1872 target sequence
IIGMTLVPEVNLACEMQMCYATIATITDYDVFAEVPVTAEEVTRVLNENTEKSRKLLYEVIKRIPDKPDERECSCCNSLKTALV

SEQ ID NO: 37107 - protein, 85 aa, unidentified
  REGION 1..85: note = Description of Unknown:cds_NZ_WFIY01000004.1_cds_WP_155863951.1_1872 target sequence
IKVYTPYGETSDLITIGTVEGKKVAFLPRHGRRHRIPPHKINYRANIWALHELGVKWVISVSAVGSLRMDYKPGDFVVPDQFIDM

SEQ ID NO: 37108 - protein, 85 aa, unidentified
  REGION 1..85: note = Description of Unknown:cds_NZ_WFIY01000004.1_cds_WP_155863951.1_1872 target sequence
TKKREYTFFDGPVVAHVSMADPFCNHLRKIIISAAKDLGITTHESGTYICIEGPRFSTRAESRVWKEVFKADIIGMTLVPEVNLA

SEQ ID NO: 37109 - protein, 85 aa, unidentified
  REGION 1..85: note = Description of Unknown:cds_NC_030656.1_cds_YP_009268751.1_36 target sequence
SGRRMWDVDAAVQIRNDDQKTFFTKGLSPVMKHTYLFHNYAYGWIPETALWSSRFADFSLLDYYPISLEFIKKIEFMLSLYKGPV

SEQ ID NO: 37110 - protein, 85 aa, unidentified
  REGION 1..85: note = Description of Unknown:cds_NC_030656.1_cds_YP_009268751.1_36 target sequence
PDYESKLNTEFVDRGSFSGRYNDFLKRFVILPTGEFISFLLLTSMPVFNLLFWFKNTTFDIKKHTLFSEVYTTNERHIELARYFR

SEQ ID NO: 37111 - protein, 85 aa, unidentified
  REGION 1..85: note = Description of Unknown:cds_NC_030656.1_cds_YP_009268751.1_36 target sequence
KSGDYKPIFSRLDQDAIYTNPVTNIATVGNPGPLGNLFPSDYETLANLSTILYFTNYDPVLMFLMFYVPGLSITTKITPAVEYLM

SEQ ID NO: 37112 - protein, 84 aa, unidentified
  REGION 1..84: note = Description of Unknown:cds_NC_030656.1_cds_YP_009268751.1_36 target sequence
DAIYTNPVTNIATVGNPGPLGNLFPSDYETLANLSTILYFTNYDPVLMFLMFYVPGLSITTKITPAVEYLMSKLSLTKKDIVLV

SEQ ID NO: 37113 - protein, 85 aa, unidentified
  REGION 1..85: note = Description of Unknown:cds_NC_030656.1_cds_YP_009268751.1_36 target sequence
SPVMKHTYLFHNYAYGWIPETALWSSRFADFSLLDYYPISLEFIKKIEFMLSLYKGPVPDYESKLNTEFVDRGSFSGRYNDFLKR

SEQ ID NO: 37114 - protein, 85 aa, unidentified
  REGION 1..85: note = Description of Unknown:cds_NC_030656.1_cds_YP_009268751.1_36 target sequence
FVILPTGEFISFLLLTSMPVFNLLFWFKNTTFDIKKHTLFSEVYTTNERHIELARYFRKSGDYKPIFSRLDQDAIYTNPVTNIAT

SEQ ID NO: 37115 - protein, 85 aa, unidentified
  REGION 1..85: note = Description of Unknown:hvTR_Q8QMY7 target sequence
SKVIKKRVETSPRPTASDSLQTCAGVIEYAKSISKSNTKCIEYVTLNASQYANCSSISIKLTDSLSSQMTSTFIMLEGETKLYKN

SEQ ID NO: 37116 - protein, 85 aa, unidentified
  REGION 1..85: note = Description of Unknown:hvTR_Q8QMY7 target sequence
KSKQDRSDGYFLKIKVTAASPMLYQLLEAVYGNIKHKERIPNSLHSLSVETITEKTFKDESIFINKINGAMVEYVSAGESSILRS

SEQ ID NO: 37117 - protein, 85 aa, unidentified
  REGION 1..85: note = Description of Unknown:hvTR_Q8QMY7 target sequence
IEGELEALSKRERQLAKAIITPVVFYRSGTETKITFALKKLIIDREVVANVIGLSGDSERVSMTENVEEDLARNLGLVDIEDEYD

SEQ ID NO: 37118 - protein, 84 aa, unidentified
  REGION 1..84: note = Description of Unknown:hvTR_Q8QMY7 target sequence
QLAKAIITPVVFYRSGTETKITFALKKLIIDREVVANVIGLSGDSERVSMTENVEEDLARNLGLVDIEDEYDEDSDKEKPIFNV

SEQ ID NO: 37119 - protein, 85 aa, unidentified
  REGION 1..85: note = Description of Unknown:hvTR_Q8QMY7 target sequence
EYAKSISKSNTKCIEYVTLNASQYANCSSISIKLTDSLSSQMTSTFIMLEGETKLYKNKSKQDRSDGYFLKIKVTAASPMLYQLL

SEQ ID NO: 37120 - protein, 85 aa, unidentified
  REGION 1..85: note = Description of Unknown:hvTR_Q8QMY7 target sequence
EAVYGNIKHKERIPNSLHSLSVETITEKTFKDESIFINKINGAMVEYVSAGESSILRSIEGELEALSKRERQLAKAIITPVVFYR

SEQ ID NO: 37121 - protein, 85 aa, unidentified
  REGION 1..85: note = Description of Unknown:cds_NZ_WFIY01000004.1_cds_WP_155862649.1_436 target sequence
LGDVLKVIKKSDAVLEIVDSREPDLTRSKKIESIVKKEGKGILIVINKGDLVPREVLEKWKRYIEKEDGIKTVYISATSHLGTKI

SEQ ID NO: 37122 - protein, 85 aa, unidentified
  REGION 1..85: note = Description of Unknown:cds_NZ_WFIY01000004.1_cds_WP_155862649.1_436 target sequence
LRNAIKEVLKGNEGTICLVGYPKTGKSSIINALKGRHSASTSAHPMAYGYTKTIQKFKVDSKIYAWDTPGIIPPDGSPLEKAIRG

SEQ ID NO: 37123 - protein, 85 aa, unidentified
  REGION 1..85: note = Description of Unknown:cds_NZ_WFIY01000004.1_cds_WP_155862649.1_436 target sequence
QAVEKIEDPVKVALLLIDRIEKFDKNALKSAYKLDYSDGLDLLQKIAIKRGWFYKKDKEPLIEEAARQLIRDYHEGKIIYFTLPP

SEQ ID NO: 37124 - protein, 84 aa, unidentified
  REGION 1..84: note = Description of Unknown:cds_NZ_WFIY01000004.1_cds_WP_155862649.1_436 target sequence
LLLIDRIEKFDKNALKSAYKLDYSDGLDLLQKIAIKRGWFYKKDKEPLIEEAARQLIRDYHEGKIIYFTLPPSESNDENKSSNI

SEQ ID NO: 37125 - protein, 85 aa, unidentified
  REGION 1..85: note = Description of Unknown:cds_NZ_WFIY01000004.1_cds_WP_155862649.1_436 target sequence
SKKIESIVKKEGKGILIVINKGDLVPREVLEKWKRYIEKEDGIKTVYISATSHLGTKILRNAIKEVLKGNEGTICLVGYPKTGKS

SEQ ID NO: 37126 - protein, 85 aa, unidentified
  REGION 1..85: note = Description of Unknown:cds_NZ_WFIY01000004.1_cds_WP_155862649.1_436 target sequence
SIINALKGRHSASTSAHPMAYGYTKTIQKFKVDSKIYAWDTPGIIPPDGSPLEKAIRGQAVEKIEDPVKVALLLIDRIEKFDKNA

SEQ ID NO: 37127 - protein, 85 aa, unidentified
  REGION 1..85: note = Description of Unknown:cds_NZ_WFIY01000004.1_cds_WP_155863109.1_1026 target sequence
RTYPAEILTIGNEILSGRTVNTNASHIARRLTSLGFTVRRITVVMDELDEISQGFKEAIQRNPRVIISTGGLGPTYDDKTAEGLS

SEQ ID NO: 37128 - protein, 85 aa, unidentified
  REGION 1..85: note = Description of Unknown:cds_NZ_WFIY01000004.1_cds_WP_155863109.1_1026 target sequence
LALGRKLVINQKALEEIENKYKQLGLQLTEERRKMAMMPEGSIAVENSKGIAPGIYIEYNGIEILATPGVPREMEDILETFIKKY

SEQ ID NO: 37129 - protein, 85 aa, unidentified
  REGION 1..85: note = Description of Unknown:cds_NZ_WFIY01000004.1_cds_WP_155863109.1_1026 target sequence
LKTKPEVKYVEETIYADKVMESVLAPYVRQLVKKYDLYIKTHPKGYELSNPSLEIQIAGSSEDEGEIRKRINACIKELEEYIKNL

SEQ ID NO: 37130 - protein, 84 aa, unidentified
  REGION 1..84: note = Description of Unknown:cds_NZ_WFIY01000004.1_cds_WP_155863109.1_1026 target sequence
IYADKVMESVLAPYVRQLVKKYDLYIKTHPKGYELSNPSLEIQIAGSSEDEGEIRKRINACIKELEEYIKNLGGIIKNSQQENQ

SEQ ID NO: 37131 - protein, 85 aa, unidentified
  REGION 1..85: note = Description of Unknown:cds_NZ_WFIY01000004.1_cds_WP_155863109.1_1026 target sequence
ARRLTSLGFTVRRITVVMDELDEISQGFKEAIQRNPRVIISTGGLGPTYDDKTAEGLSLALGRKLVINQKALEEIENKYKQLGLQ

SEQ ID NO: 37132 - protein, 85 aa, unidentified
  REGION 1..85: note = Description of Unknown:cds_NZ_WFIY01000004.1_cds_WP_155863109.1_1026 target sequence
LTEERRKMAMMPEGSIAVENSKGIAPGIYIEYNGIEILATPGVPREMEDILETFIKKYLKTKPEVKYVEETIYADKVMESVLAPY

SEQ ID NO: 37133 - protein, 85 aa, unidentified
  REGION 1..85: note = Description of Unknown:cds_NZ_WFIY01000004.1_cds_WP_155864402.1_1128 target sequence
KIYNPVLDDYVEIKRPLKKIVSLDPATTETLFFLGLGDKIIATDAFSYRPEEARKLPKIGSYTHVNLDFLEENRPDLIFSTMGAQ

SEQ ID NO: 37134 - protein, 85 aa, unidentified
  REGION 1..85: note = Description of Unknown:cds_NZ_WFIY01000004.1_cds_WP_155864402.1_1128 target sequence
KDLTKKLINLGFTVYPMQVATSVSKIIDNVIIIAEVVDRKNEGRELVNMLRKKIAENYNPGNIKVYVEFDLGGPITIGFPSHVSD

SEQ ID NO: 37135 - protein, 85 aa, unidentified
  REGION 1..85: note = Description of Unknown:cds_NZ_WFIY01000004.1_cds_WP_155864402.1_1128 target sequence
AISIVGGKNIFDDKDEAYFTPEDKEILNRNPDLFIYEPKRLTAYEKERFLKKMEERGLQQFRARLVFTKGDYLAHMGPSFILDSI

SEQ ID NO: 37136 - protein, 84 aa, unidentified
  REGION 1..84: note = Description of Unknown:cds_NZ_WFIY01000004.1_cds_WP_155864402.1_1128 target sequence
KDEAYFTPEDKEILNRNPDLFIYEPKRLTAYEKERFLKKMEERGLQQFRARLVFTKGDYLAHMGPSFILDSIPWLRSLFTSPNR

SEQ ID NO: 37137 - protein, 85 aa, unidentified
  REGION 1..85: note = Description of Unknown:cds_NZ_WFIY01000004.1_cds_WP_155864402.1_1128 target sequence
TETLFFLGLGDKIIATDAFSYRPEEARKLPKIGSYTHVNLDFLEENRPDLIFSTMGAQKDLTKKLINLGFTVYPMQVATSVSKII

SEQ ID NO: 37138 - protein, 85 aa, unidentified
  REGION 1..85: note = Description of Unknown:cds_NZ_WFIY01000004.1_cds_WP_155864402.1_1128 target sequence
DNVIIIAEVVDRKNEGRELVNMLRKKIAENYNPGNIKVYVEFDLGGPITIGFPSHVSDAISIVGGKNIFDDKDEAYFTPEDKEIL

SEQ ID NO: 37139 - protein, 85 aa, unidentified
  REGION 1..85: note = Description of Unknown:cds_NZ_WFIY01000004.1_cds_WP_155863819.1_1712 target sequence
GIIRSSIILRPYDTLLYATKIMIMEYVPKAIITDEKGFPLGALTQKDIIKFVYEKGEEISFDKVYVSEVMRKDIVCVNESIDPLE

SEQ ID NO: 37140 - protein, 85 aa, unidentified
  REGION 1..85: note = Description of Unknown:cds_NZ_WFIY01000004.1_cds_WP_155863819.1_1712 target sequence
AAEIIIDKKQPLLVVCNDDGKALGMIIKSDLTQYYASQIRGLQKTEEYMTSPAITISKSDSLINAVKTLVEKDVSRLIVVDEDKI

SEQ ID NO: 37141 - protein, 85 aa, unidentified
  REGION 1..85: note = Description of Unknown:cds_NZ_WFIY01000004.1_cds_WP_155863819.1_1712 target sequence
EGQLTTTDLLYMAPSIKYKECKINVSEVMSPNIIVVDAGEDLASAAKLMASRKIKGIPVVKGDKLAGVITTTDVTRALLDDRVRK

SEQ ID NO: 37142 - protein, 84 aa, unidentified
  REGION 1..84: note = Description of Unknown:cds_NZ_WFIY01000004.1_cds_WP_155863819.1_1712 target sequence
PSIKYKECKINVSEVMSPNIIVVDAGEDLASAAKLMASRKIKGIPVVKGDKLAGVITTTDVTRALLDDRVRKYLYEIKMYTSTF

SEQ ID NO: 37143 - protein, 85 aa, unidentified
  REGION 1..85: note = Description of Unknown:cds_NZ_WFIY01000004.1_cds_WP_155863819.1_1712 target sequence
PKAIITDEKGFPLGALTQKDIIKFVYEKGEEISFDKVYVSEVMRKDIVCVNESIDPLEAAEIIIDKKQPLLVVCNDDGKALGMII

SEQ ID NO: 37144 - protein, 85 aa, unidentified
  REGION 1..85: note = Description of Unknown:cds_NZ_WFIY01000004.1_cds_WP_155863819.1_1712 target sequence
KSDLTQYYASQIRGLQKTEEYMTSPAITISKSDSLINAVKTLVEKDVSRLIVVDEDKIEGQLTTTDLLYMAPSIKYKECKINVSE

SEQ ID NO: 37145 - protein, 85 aa, unidentified
  REGION 1..85: note = Description of Unknown:cds_NZ_WFIY01000004.1_cds_WP_155863822.1_1715 target sequence
RSIIGFWGVFVFLVITSILAKSAVLISEAIHVFLDALIVSLSFYFLKLVNKVNSYYTYGLHRLEVISSLLNVSIIILGSIIGVII

SEQ ID NO: 37146 - protein, 85 aa, unidentified
  REGION 1..85: note = Description of Unknown:cds_NZ_WFIY01000004.1_cds_WP_155863822.1_1715 target sequence
SVIYLMMGIKDDPFYVLFASLISALILSFSHEHEEKGNSVKESINVHVISDVLSYVLGALAGFLIILTGYYQFDPIFSFIILGTM

SEQ ID NO: 37147 - protein, 85 aa, unidentified
  REGION 1..85: note = Description of Unknown:cds_NZ_WFIY01000004.1_cds_WP_155863822.1_1715 target sequence
IIYNFKYFNTYLDIIMEKSPIDTKRIEDDLKSVFPKVHHIHVWIICDHYKVATLHIEEDPNITLKELDDKREVAEKILSEKYGIN

SEQ ID NO: 37148 - protein, 84 aa, unidentified
  REGION 1..84: note = Description of Unknown:cds_NZ_WFIY01000004.1_cds_WP_155863822.1_1715 target sequence
IIMEKSPIDTKRIEDDLKSVFPKVHHIHVWIICDHYKVATLHIEEDPNITLKELDDKREVAEKILSEKYGINHVTVQFESKRTD

SEQ ID NO: 37149 - protein, 85 aa, unidentified
  REGION 1..85: note = Description of Unknown:cds_NZ_WFIY01000004.1_cds_WP_155863822.1_1715 target sequence
EAIHVFLDALIVSLSFYFLKLVNKVNSYYTYGLHRLEVISSLLNVSIIILGSIIGVIISVIYLMMGIKDDPFYVLFASLISALIL

SEQ ID NO: 37150 - protein, 85 aa, unidentified
  REGION 1..85: note = Description of Unknown:cds_NZ_WFIY01000004.1_cds_WP_155863822.1_1715 target sequence
SFSHEHEEKGNSVKESINVHVISDVLSYVLGALAGFLIILTGYYQFDPIFSFIILGTMIIYNFKYFNTYLDIIMEKSPIDTKRIE

SEQ ID NO: 37151 - protein, 85 aa, unidentified
  REGION 1..85: note = Description of Unknown:cds_NZ_WFIY01000004.1_cds_WP_155864165.1_2120 target sequence
KKFKHFTISDLALGTWKMGGGFWTPSYENDEKDVSAIKKAIELGITTIDTAEMYGGGHAEELVGKAIKDFKRDDVFIITKVWPNH

SEQ ID NO: 37152 - protein, 85 aa, unidentified
  REGION 1..85: note = Description of Unknown:cds_NZ_WFIY01000004.1_cds_WP_155864165.1_2120 target sequence
AKYDDVIKSAKASSSRLGTFIDLYLLHWPSSSVPICETMSAFEKLVEDGIVKFIGLSNFKPEGIQKANECLKKNEITAIENHYSL

SEQ ID NO: 37153 - protein, 85 aa, unidentified
  REGION 1..85: note = Description of Unknown:cds_NZ_WFIY01000004.1_cds_WP_155864165.1_2120 target sequence
LDRSDEDTLEYAKKNGIAYFSYTPLEKGRISEIKILDKIAKKYNKTPIQVALNWYISIDVMVPIVKASNIKHLEENAGAMGWKLS

SEQ ID NO: 37154 - protein, 84 aa, unidentified
  REGION 1..84: note = Description of Unknown:cds_NZ_WFIY01000004.1_cds_WP_155864165.1_2120 target sequence
KNGIAYFSYTPLEKGRISEIKILDKIAKKYNKTPIQVALNWYISIDVMVPIVKASNIKHLEENAGAMGWKLSKEDWEAIAKARD

SEQ ID NO: 37155 - protein, 85 aa, unidentified
  REGION 1..85: note = Description of Unknown:cds_NZ_WFIY01000004.1_cds_WP_155864165.1_2120 target sequence
ENDEKDVSAIKKAIELGITTIDTAEMYGGGHAEELVGKAIKDFKRDDVFIITKVWPNHAKYDDVIKSAKASSSRLGTFIDLYLLH

SEQ ID NO: 37156 - protein, 85 aa, unidentified
  REGION 1..85: note = Description of Unknown:cds_NZ_WFIY01000004.1_cds_WP_155864165.1_2120 target sequence
WPSSSVPICETMSAFEKLVEDGIVKFIGLSNFKPEGIQKANECLKKNEITAIENHYSLLDRSDEDTLEYAKKNGIAYFSYTPLEK

SEQ ID NO: 37157 - protein, 85 aa, unidentified
  REGION 1..85: note = Description of Unknown:cds_NZ_WFIY01000004.1_cds_WP_155863400.1_1377 target sequence
ILDLIKKNVSEYLEKHELSLKIVDAIVGYFYTIVVTEDENGEKYIGLNVTPSFEISEIVERRNRPKFYPSIQEEIELLTSDSWIE

SEQ ID NO: 37158 - protein, 85 aa, unidentified
  REGION 1..85: note = Description of Unknown:cds_NZ_WFIY01000004.1_cds_WP_155863400.1_1377 target sequence
RSLALATVNSLSQKLLRIQQVNNTNEWIIRKLYEARSSKVAIIGNMPPVVKELKKYFVVYTFDKKPCGEVMSEPLEKRILPQVDA

SEQ ID NO: 37159 - protein, 85 aa, unidentified
  REGION 1..85: note = Description of Unknown:cds_NZ_WFIY01000004.1_cds_WP_155863400.1_1377 target sequence
VIMSGAVIINESIDEILEYARNSRLNVIIGPSAQVHPMFIKGVKIHYLGSTAITNNKGEAVQLLKLGYTRGVFYDPKYSVQYFVS

SEQ ID NO: 37160 - protein, 84 aa, unidentified
  REGION 1..84: note = Description of Unknown:cds_NZ_WFIY01000004.1_cds_WP_155863400.1_1377 target sequence
IDEILEYARNSRLNVIIGPSAQVHPMFIKGVKIHYLGSTAITNNKGEAVQLLKLGYTRGVFYDPKYSVQYFVSNEYSFMTITEQ

SEQ ID NO: 37161 - protein, 85 aa, unidentified
  REGION 1..85: note = Description of Unknown:cds_NZ_WFIY01000004.1_cds_WP_155863400.1_1377 target sequence
GYFYTIVVTEDENGEKYIGLNVTPSFEISEIVERRNRPKFYPSIQEEIELLTSDSWIERSLALATVNSLSQKLLRIQQVNNTNEW

SEQ ID NO: 37162 - protein, 85 aa, unidentified
  REGION 1..85: note = Description of Unknown:cds_NZ_WFIY01000004.1_cds_WP_155863400.1_1377 target sequence
IIRKLYEARSSKVAIIGNMPPVVKELKKYFVVYTFDKKPCGEVMSEPLEKRILPQVDAVIMSGAVIINESIDEILEYARNSRLNV

SEQ ID NO: 37163 - protein, 85 aa, unidentified
  REGION 1..85: note = Description of Unknown:cds_NZ_WFIY01000004.1_cds_WP_155863509.1_1460 target sequence
KRFVAKTVFLTRKFMISLAIYMIFMIFLYIYSSYFLHKLPSEARLFILSYLSYNLWFYISLISSALASVTISEDLEEKAHYIFLK

SEQ ID NO: 37164 - protein, 85 aa, unidentified
  REGION 1..85: note = Description of Unknown:cds_NZ_WFIY01000004.1_cds_WP_155863509.1_1460 target sequence
SIYRNSFRNYVWNKVMIELTFLTILSIISSLILFITISSPVEKFTVDDYERLSILLLLLSTIPITSTIAFSSFIPDQKSALLFSV

SEQ ID NO: 37165 - protein, 85 aa, unidentified
  REGION 1..85: note = Description of Unknown:cds_NZ_WFIY01000004.1_cds_WP_155863509.1_1460 target sequence
TLYFFGNVLIDYYLQKYAPHLMLYVLFTLPYYFPTAFHNWREIYFQTKIVYYGLYGTNLPYVKYCTILEVLILYAIVSAISMVVG

SEQ ID NO: 37166 - protein, 84 aa, unidentified
  REGION 1..84: note = Description of Unknown:cds_NZ_WFIY01000004.1_cds_WP_155863509.1_1460 target sequence
YLQKYAPHLMLYVLFTLPYYFPTAFHNWREIYFQTKIVYYGLYGTNLPYVKYCTILEVLILYAIVSAISMVVGIEFNLRKRIKD

SEQ ID NO: 37167 - protein, 85 aa, unidentified
  REGION 1..85: note = Description of Unknown:cds_NZ_WFIY01000004.1_cds_WP_155863509.1_1460 target sequence
LYIYSSYFLHKLPSEARLFILSYLSYNLWFYISLISSALASVTISEDLEEKAHYIFLKSIYRNSFRNYVWNKVMIELTFLTILSI

SEQ ID NO: 37168 - protein, 85 aa, unidentified
  REGION 1..85: note = Description of Unknown:cds_NZ_WFIY01000004.1_cds_WP_155863509.1_1460 target sequence
ISSLILFITISSPVEKFTVDDYERLSILLLLLSTIPITSTIAFSSFIPDQKSALLFSVTLYFFGNVLIDYYLQKYAPHLMLYVLF

SEQ ID NO: 37169 - protein, 85 aa, unidentified
  REGION 1..85: note = Description of Unknown:cds_NZ_WFIY01000004.1_cds_WP_155863784.1_1665 target sequence
DIELAQIRPKLGDVEYNLEKHLEIIQTSSADCIIFPELSLTGYVLRDLVYEVFKEAEKAVTKIVDNSKCVIFGTIKEVRSGILRN

SEQ ID NO: 37170 - protein, 85 aa, unidentified
  REGION 1..85: note = Description of Unknown:cds_NZ_WFIY01000004.1_cds_WP_155863784.1_1665 target sequence
SAVISIEGNYDYIYKFYLPTYGLFEERRYFQPGDPLSDVKIFKYKGINFGVVICEDAWHPEPIEALALKGADAVFIPASSPMRRL

SEQ ID NO: 37171 - protein, 85 aa, unidentified
  REGION 1..85: note = Description of Unknown:cds_NZ_WFIY01000004.1_cds_WP_155863784.1_1665 target sequence
EENLLIENNWESLIKAHSLMYGIWTAFVNAVGSQEEEYFWGGSMVSSPQGTIKVRARKFEEDRIFTKIDLEDVRKARFFSSFRDH

SEQ ID NO: 37172 - protein, 84 aa, unidentified
  REGION 1..84: note = Description of Unknown:cds_NZ_WFIY01000004.1_cds_WP_155863784.1_1665 target sequence
LIKAHSLMYGIWTAFVNAVGSQEEEYFWGGSMVSSPQGTIKVRARKFEEDRIFTKIDLEDVRKARFFSSFRDHNRDFHRLLSNL

SEQ ID NO: 37173 - protein, 85 aa, unidentified
  REGION 1..85: note = Description of Unknown:cds_NZ_WFIY01000004.1_cds_WP_155863784.1_1665 target sequence
SSADCIIFPELSLTGYVLRDLVYEVFKEAEKAVTKIVDNSKCVIFGTIKEVRSGILRNSAVISIEGNYDYIYKFYLPTYGLFEER

SEQ ID NO: 37174 - protein, 85 aa, unidentified
  REGION 1..85: note = Description of Unknown:cds_NZ_WFIY01000004.1_cds_WP_155863784.1_1665 target sequence
RYFQPGDPLSDVKIFKYKGINFGVVICEDAWHPEPIEALALKGADAVFIPASSPMRRLEENLLIENNWESLIKAHSLMYGIWTAF

SEQ ID NO: 37175 - protein, 85 aa, unidentified
  REGION 1..85: note = Description of Unknown:cds_NZ_WFIY01000004.1_cds_WP_155863910.1_1822 target sequence
DNTQARNERGIRNLIPLNHPRRESLLVREKLVEALENDILVPQGLIAHGRGECFDYLIGEKTQVFAENAINAAAATLLLAKYPVI

SEQ ID NO: 37176 - protein, 85 aa, unidentified
  REGION 1..85: note = Description of Unknown:cds_NZ_WFIY01000004.1_cds_WP_155863910.1_1822 target sequence
SVNGNMAALVAKDIVDLSNEINCKIEINLFYRDEKRVKAIKKALENAGAKEVLGDDDLTTIPELFSERRKVSKKGIYIADVVLLG

SEQ ID NO: 37177 - protein, 85 aa, unidentified
  REGION 1..85: note = Description of Unknown:cds_NZ_WFIY01000004.1_cds_WP_155863910.1_1822 target sequence
LEDGDRTEALVRMNKKVIAIDLNPLSRTSMAASITIVDNITRAIPLLVKKVKELRSKDKVELEEIVKNFDNKKNLAEAIKFISSR

SEQ ID NO: 37178 - protein, 84 aa, unidentified
  REGION 1..84: note = Description of Unknown:cds_NZ_WFIY01000004.1_cds_WP_155863910.1_1822 target sequence
MNKKVIAIDLNPLSRTSMAASITIVDNITRAIPLLVKKVKELRSKDKVELEEIVKNFDNKKNLAEAIKFISSRLEALSEDLLGH

SEQ ID NO: 37179 - protein, 85 aa, unidentified
  REGION 1..85: note = Description of Unknown:cds_NZ_WFIY01000004.1_cds_WP_155863910.1_1822 target sequence
REKLVEALENDILVPQGLIAHGRGECFDYLIGEKTQVFAENAINAAAATLLLAKYPVISVNGNMAALVAKDIVDLSNEINCKIEI

SEQ ID NO: 37180 - protein, 85 aa, unidentified
  REGION 1..85: note = Description of Unknown:cds_NZ_WFIY01000004.1_cds_WP_155863910.1_1822 target sequence
NLFYRDEKRVKAIKKALENAGAKEVLGDDDLTTIPELFSERRKVSKKGIYIADVVLLGLEDGDRTEALVRMNKKVIAIDLNPLSR

SEQ ID NO: 37181 - protein, 85 aa, unidentified
  REGION 1..85: note = Description of Unknown:cds_NZ_WFIY01000004.1_cds_WP_155864011.1_1939 target sequence
RTSGHIDLTLAAFFWGTIGIVVNYFYLLGGNQFAMVIIRSVVSAVVSLFIVKKIVVNKYAIGMGFVSSLFYLTYIYTIPVDGPSL

SEQ ID NO: 37182 - protein, 85 aa, unidentified
  REGION 1..85: note = Description of Unknown:cds_NZ_WFIY01000004.1_cds_WP_155864011.1_1939 target sequence
SAVLLYTAPLWVSIFSYFLVKEKTTLGKIISSIMILAGLYIMYLGVPTLQQFLLGLASGLTYAGLISFSRLLQKKGMNDWEIIFS

SEQ ID NO: 37183 - protein, 85 aa, unidentified
  REGION 1..85: note = Description of Unknown:cds_NZ_WFIY01000004.1_cds_WP_155864011.1_1939 target sequence
QSLWSIPFSLPFVRVLNLPSVYAGIYLAIFATVIPYFFFYRGMKKTDSITASIITALEPVFTIILSMIIFKEFLNIYETIGTIII

SEQ ID NO: 37184 - protein, 84 aa, unidentified
  REGION 1..84: note = Description of Unknown:cds_NZ_WFIY01000004.1_cds_WP_155864011.1_1939 target sequence
VRVLNLPSVYAGIYLAIFATVIPYFFFYRGMKKTDSITASIITALEPVFTIILSMIIFKEFLNIYETIGTIIILSAIFLSVKIH

SEQ ID NO: 37185 - protein, 85 aa, unidentified
  REGION 1..85: note = Description of Unknown:cds_NZ_WFIY01000004.1_cds_WP_155864011.1_1939 target sequence
LGGNQFAMVIIRSVVSAVVSLFIVKKIVVNKYAIGMGFVSSLFYLTYIYTIPVDGPSLSAVLLYTAPLWVSIFSYFLVKEKTTLG

SEQ ID NO: 37186 - protein, 85 aa, unidentified
  REGION 1..85: note = Description of Unknown:cds_NZ_WFIY01000004.1_cds_WP_155864011.1_1939 target sequence
KIISSIMILAGLYIMYLGVPTLQQFLLGLASGLTYAGLISFSRLLQKKGMNDWEIIFSQSLWSIPFSLPFVRVLNLPSVYAGIYL

SEQ ID NO: 37187 - protein, 85 aa, unidentified
  REGION 1..85: note = Description of Unknown:cds_NZ_WFIY01000004.1_cds_WP_155864188.1_2148 target sequence
LYAFLRRRFLKLVGQKSFIIYLFVQPFLWLLTVGISLNTAFSSVNLGYKFISYIALNLISIVSITLPIFFSNQLIFEFTYGSLKV

SEQ ID NO: 37188 - protein, 85 aa, unidentified
  REGION 1..85: note = Description of Unknown:cds_NZ_WFIY01000004.1_cds_WP_155864188.1_2148 target sequence
VRLMGIKYWKAYLLLSDSLVFLAITFLNLTIVLLVLYLLYKVTINLLGIIISLPILFIAMIISYSIGIIISSFFTGGSLNILLPL

SEQ ID NO: 37189 - protein, 85 aa, unidentified
  REGION 1..85: note = Description of Unknown:cds_NZ_WFIY01000004.1_cds_WP_155864188.1_2148 target sequence
VQLILLLFSGTYYPLEFLPKPERIISFLTPYTHILALVRYFTIGYAASQLKYIYNNLFTPPIQVILSAVYVLVFTLIITYLAVRR

SEQ ID NO: 37190 - protein, 84 aa, unidentified
  REGION 1..84: note = Description of Unknown:cds_NZ_WFIY01000004.1_cds_WP_155864188.1_2148 target sequence
YPLEFLPKPERIISFLTPYTHILALVRYFTIGYAASQLKYIYNNLFTPPIQVILSAVYVLVFTLIITYLAVRRLDSLQFNLPLG

SEQ ID NO: 37191 - protein, 85 aa, unidentified
  REGION 1..85: note = Description of Unknown:cds_NZ_WFIY01000004.1_cds_WP_155864188.1_2148 target sequence
LWLLTVGISLNTAFSSVNLGYKFISYIALNLISIVSITLPIFFSNQLIFEFTYGSLKVVRLMGIKYWKAYLLLSDSLVFLAITFL

SEQ ID NO: 37192 - protein, 85 aa, unidentified
  REGION 1..85: note = Description of Unknown:cds_NZ_WFIY01000004.1_cds_WP_155864188.1_2148 target sequence
NLTIVLLVLYLLYKVTINLLGIIISLPILFIAMIISYSIGIIISSFFTGGSLNILLPLVQLILLLFSGTYYPLEFLPKPERIISF

SEQ ID NO: 37193 - protein, 85 aa, unidentified
  REGION 1..85: note = Description of Unknown:cds_NC_003214.2_cds_NP_445726.1_61 target sequence
GYMVKLIYTQCKNCGYEWVVDQTIYYMKKYHDMVLTKTYFKPARFYVGDCNTIFNIAYDGIAWCDTPNNIVTKPSNSLKVITTSI

SEQ ID NO: 37194 - protein, 85 aa, unidentified
  REGION 1..85: note = Description of Unknown:cds_NC_003214.2_cds_NP_445726.1_61 target sequence
WLKEHMEKKGIYVEQVIPRGINDEMAKKHVNFDFNARRGYVIIARNLPYKRIDNTLKMFEGKRKELTLISDHSNADFDFFSLSED

SEQ ID NO: 37195 - protein, 85 aa, unidentified
  REGION 1..85: note = Description of Unknown:cds_NC_003214.2_cds_NP_445726.1_61 target sequence
VKYYLLSHALFYIAVSDAEGFSIPPVEAMSVGTPLIYIKKHTYKEYGCGIEMDSIEDLRKIEISKEEWEDLSYKCWYKSLRYHYI

SEQ ID NO: 37196 - protein, 84 aa, unidentified
  REGION 1..84: note = Description of Unknown:cds_NC_003214.2_cds_NP_445726.1_61 target sequence
IAVSDAEGFSIPPVEAMSVGTPLIYIKKHTYKEYGCGIEMDSIEDLRKIEISKEEWEDLSYKCWYKSLRYHYITVGQELWDWFK

SEQ ID NO: 37197 - protein, 85 aa, unidentified
  REGION 1..85: note = Description of Unknown:cds_NC_003214.2_cds_NP_445726.1_61 target sequence
KKYHDMVLTKTYFKPARFYVGDCNTIFNIAYDGIAWCDTPNNIVTKPSNSLKVITTSIWLKEHMEKKGIYVEQVIPRGINDEMAK

SEQ ID NO: 37198 - protein, 85 aa, unidentified
  REGION 1..85: note = Description of Unknown:cds_NC_003214.2_cds_NP_445726.1_61 target sequence
KHVNFDFNARRGYVIIARNLPYKRIDNTLKMFEGKRKELTLISDHSNADFDFFSLSEDVKYYLLSHALFYIAVSDAEGFSIPPVE

SEQ ID NO: 37199 - protein, 85 aa, unidentified
  REGION 1..85: note = Description of Unknown:hvTR_P03259.1 target sequence
RTEMTPLVLSYQEADDILEHLVDNFFNEVPSDDDLYVPSLYELYDLDVESAGEDNNEQAVNEFFPESLILAASEGLFLPEPPVLS

SEQ ID NO: 37200 - protein, 85 aa, unidentified
  REGION 1..85: note = Description of Unknown:hvTR_P03259.1 target sequence
PVCEPIGGECMPQLHPEDMDLLCYEMGFPCSDSEDEQDENGMAHVSASAAAAAADREREEFQLDHPELPGHNCKSCEHHRNSTGN

SEQ ID NO: 37201 - protein, 85 aa, unidentified
  REGION 1..85: note = Description of Unknown:hvTR_P03259.1 target sequence
TDLMCSLCYLRAYNMFIYSPVSDNEPEPNSTLDGDERPSPPKLGSAVPEGVIKPVPQRVTGRRRCAVESILDLIQEEEREQTVPV

SEQ ID NO: 37202 - protein, 84 aa, unidentified
  REGION 1..84: note = Description of Unknown:hvTR_P03259.1 target sequence
AYNMFIYSPVSDNEPEPNSTLDGDERPSPPKLGSAVPEGVIKPVPQRVTGRRRCAVESILDLIQEEEREQTVPVDLSVKRPRCN

SEQ ID NO: 37203 - protein, 85 aa, unidentified
  REGION 1..85: note = Description of Unknown:hvTR_P03259.1 target sequence
EVPSDDDLYVPSLYELYDLDVESAGEDNNEQAVNEFFPESLILAASEGLFLPEPPVLSPVCEPIGGECMPQLHPEDMDLLCYEMG

SEQ ID NO: 37204 - protein, 85 aa, unidentified
  REGION 1..85: note = Description of Unknown:hvTR_P03259.1 target sequence
FPCSDSEDEQDENGMAHVSASAAAAAADREREEFQLDHPELPGHNCKSCEHHRNSTGNTDLMCSLCYLRAYNMFIYSPVSDNEPE

SEQ ID NO: 37205 - protein, 85 aa, unidentified
  REGION 1..85: note = Description of Unknown:hvTR_Q6TVE3 target sequence
ALRIKLEKLKQIVTYFSEFSEEVSVNVDVADGLMYIFAALGGSVNIWTIIPLSASVVYDGEVSRVFNVPVLKVKSCLCSFHPDSV

SEQ ID NO: 37206 - protein, 85 aa, unidentified
  REGION 1..85: note = Description of Unknown:hvTR_Q6TVE3 target sequence
VCLEPDLEDNVIRLSSHHVVSVDCENEPIAHRTNTSICLGINQRKSYVFNFRRYEEKCCGRTIVNLDLLLGFIKCIHQYQYITVC

SEQ ID NO: 37207 - protein, 85 aa, unidentified
  REGION 1..85: note = Description of Unknown:hvTR_Q6TVE3 target sequence
FRDKKMVLHTPGKVDNYFREYSMTEWAPDLERFSFKIPISSINKLRGFKKRVVMFEARVVMDADDNIIGMLFTDRVGVYRVNVFM

SEQ ID NO: 37208 - protein, 84 aa, unidentified
  REGION 1..84: note = Description of Unknown:hvTR_Q6TVE3 target sequence
GKVDNYFREYSMTEWAPDLERFSFKIPISSINKLRGFKKRVVMFEARVVMDADDNIIGMLFTDRVGVYRVNVFMSFQDRCLSCD

SEQ ID NO: 37209 - protein, 85 aa, unidentified
  REGION 1..85: note = Description of Unknown:hvTR_Q6TVE3 target sequence
DVADGLMYIFAALGGSVNIWTIIPLSASVVYDGEVSRVFNVPVLKVKSCLCSFHPDSVVCLEPDLEDNVIRLSSHHVVSVDCENE

SEQ ID NO: 37210 - protein, 85 aa, unidentified
  REGION 1..85: note = Description of Unknown:hvTR_Q6TVE3 target sequence
PIAHRTNTSICLGINQRKSYVFNFRRYEEKCCGRTIVNLDLLLGFIKCIHQYQYITVCFRDKKMVLHTPGKVDNYFREYSMTEWA

SEQ ID NO: 37211 - protein, 85 aa, unidentified
  REGION 1..85: note = Description of Unknown:hvTR_Q6TVS5 target sequence
TLRIKLEKLKQIVTYFSEFSEEVSVNVDVGDGLMYIFAALGGSVNIWTIVPLSASVVYDGDVSRVFNLPVLKVKACLCSFHPDSV

SEQ ID NO: 37212 - protein, 85 aa, unidentified
  REGION 1..85: note = Description of Unknown:hvTR_Q6TVS5 target sequence
VSLEPDLEDNVVRLSSHHVVSVDCDNEPVAHRTNTAICLGINQRKSYVFNFRRYEEKCCGRTIVNLDLLLGFIKCIHQYQYITVC

SEQ ID NO: 37213 - protein, 85 aa, unidentified
  REGION 1..85: note = Description of Unknown:hvTR_Q6TVS5 target sequence
FRDKKMVLHTPGKVDNFFREYSMTEWAPDLERFSFKIPISSVNKLRGFKKRVVMFESRVVMDADDNIIGMLFTDRVGMYRVNVFM

SEQ ID NO: 37214 - protein, 84 aa, unidentified
  REGION 1..84: note = Description of Unknown:hvTR_Q6TVS5 target sequence
GKVDNFFREYSMTEWAPDLERFSFKIPISSVNKLRGFKKRVVMFESRVVMDADDNIIGMLFTDRVGMYRVNVFMSFQDRSLSCD

SEQ ID NO: 37215 - protein, 85 aa, unidentified
  REGION 1..85: note = Description of Unknown:hvTR_Q6TVS5 target sequence
DVGDGLMYIFAALGGSVNIWTIVPLSASVVYDGDVSRVFNLPVLKVKACLCSFHPDSVVSLEPDLEDNVVRLSSHHVVSVDCDNE

SEQ ID NO: 37216 - protein, 85 aa, unidentified
  REGION 1..85: note = Description of Unknown:hvTR_Q6TVS5 target sequence
PVAHRTNTAICLGINQRKSYVFNFRRYEEKCCGRTIVNLDLLLGFIKCIHQYQYITVCFRDKKMVLHTPGKVDNFFREYSMTEWA

SEQ ID NO: 37217 - protein, 85 aa, unidentified
  REGION 1..85: note = Description of Unknown:hvTR_D3IZJ2 target sequence
TLRIKLEKLKQIVTYFSEFSEEVSVNVDVGDGFMYIFAALGGSVNIWTIVPLSASVVYDGEVSRVFNLPVLKVKACLCSFHPDSV

SEQ ID NO: 37218 - protein, 85 aa, unidentified
  REGION 1..85: note = Description of Unknown:hvTR_D3IZJ2 target sequence
VSLEPDLDDNVVRLSSHHVVSVDCENEPVAHRTNTSICLGINQRKSYVFNFRRYEEKCCGRTIVNLDLLLGFIKCIHQYQYITVC

SEQ ID NO: 37219 - protein, 85 aa, unidentified
  REGION 1..85: note = Description of Unknown:hvTR_D3IZJ2 target sequence
FRDKKMVLHTPGKVDNFFREYSMTEWAPDLERFSFKIPIASVNKLRGFKKRVIMFEARVVMDSDDNIIGMLFTDRVGMYRVNVFM

SEQ ID NO: 37220 - protein, 84 aa, unidentified
  REGION 1..84: note = Description of Unknown:hvTR_D3IZJ2 target sequence
GKVDNFFREYSMTEWAPDLERFSFKIPIASVNKLRGFKKRVIMFEARVVMDSDDNIIGMLFTDRVGMYRVNVFMSFQDRSLSCD

SEQ ID NO: 37221 - protein, 85 aa, unidentified
  REGION 1..85: note = Description of Unknown:hvTR_D3IZJ2 target sequence
DVGDGFMYIFAALGGSVNIWTIVPLSASVVYDGEVSRVFNLPVLKVKACLCSFHPDSVVSLEPDLDDNVVRLSSHHVVSVDCENE

SEQ ID NO: 37222 - protein, 85 aa, unidentified
  REGION 1..85: note = Description of Unknown:hvTR_D3IZJ2 target sequence
PVAHRTNTSICLGINQRKSYVFNFRRYEEKCCGRTIVNLDLLLGFIKCIHQYQYITVCFRDKKMVLHTPGKVDNFFREYSMTEWA

SEQ ID NO: 37223 - protein, 85 aa, unidentified
  REGION 1..85: note = Description of Unknown:hvTR_A7XCG4 target sequence
RKSIPNKMVKKDEESKDYNTCSSVIEYTKSLSKSTEKCIESVTLSSSQYPSCSTIIINLVNSLASKMTSTYIAIEGEAKIYKNKK

SEQ ID NO: 37224 - protein, 85 aa, unidentified
  REGION 1..85: note = Description of Unknown:hvTR_A7XCG4 target sequence
CESKSDPYFLKVKPTAASPMLYQLLDNIYSNIRDNKKIPSSLCNLSVGNIEEKTFNKECIYINKMNGAIIEYTVQGGKSTVQSIA

SEQ ID NO: 37225 - protein, 85 aa, unidentified
  REGION 1..85: note = Description of Unknown:hvTR_A7XCG4 target sequence
DEMEKLSKRDRQIAKVIIVPIVFYRNGNSTKVTFALKKLIIERDFSANVININGKSERVSMAETSEEEIGKGLGIIEDVDDEATD

SEQ ID NO: 37226 - protein, 84 aa, unidentified
  REGION 1..84: note = Description of Unknown:hvTR_A7XCG4 target sequence
QIAKVIIVPIVFYRNGNSTKVTFALKKLIIERDFSANVININGKSERVSMAETSEEEIGKGLGIIEDVDDEATDDEAESTLFNV

SEQ ID NO: 37227 - protein, 85 aa, unidentified
  REGION 1..85: note = Description of Unknown:hvTR_A7XCG4 target sequence
TKSLSKSTEKCIESVTLSSSQYPSCSTIIINLVNSLASKMTSTYIAIEGEAKIYKNKKCESKSDPYFLKVKPTAASPMLYQLLDN

SEQ ID NO: 37228 - protein, 85 aa, unidentified
  REGION 1..85: note = Description of Unknown:hvTR_A7XCG4 target sequence
IYSNIRDNKKIPSSLCNLSVGNIEEKTFNKECIYINKMNGAIIEYTVQGGKSTVQSIADEMEKLSKRDRQIAKVIIVPIVFYRNG

SEQ ID NO: 37229 - protein, 85 aa, unidentified; identical to SEQ ID NO: 37223
  REGION 1..85: note = Description of Unknown:hvTR_Q9DHR7 target sequence

SEQ ID NO: 37230 - protein, 85 aa, unidentified; identical to SEQ ID NO: 37224
  REGION 1..85: note = Description of Unknown:hvTR_Q9DHR7 target sequence

SEQ ID NO: 37231 - protein, 85 aa, unidentified
  REGION 1..85: note = Description of Unknown:hvTR_Q9DHR7 target sequence
DEMEKLSKRDRQIAKVIIVPIVFYRNGNSTKVTFALKKLIIERDFSANVININGKSERVSMAETSEEEIGKGLGIIEDIDDEATD

SEQ ID NO: 37232 - protein, 84 aa, unidentified
  REGION 1..84: note = Description of Unknown:hvTR_Q9DHR7 target sequence
QIAKVIIVPIVFYRNGNSTKVTFALKKLIIERDFSANVININGKSERVSMAETSEEEIGKGLGIIEDIDDEATDDEAESTLFNV

SEQ ID NO: 37233 - protein, 85 aa, unidentified; identical to SEQ ID NO: 37227
  REGION 1..85: note = Description of Unknown:hvTR_Q9DHR7 target sequence

SEQ ID NO: 37234 - protein, 85 aa, unidentified; identical to SEQ ID NO: 37228
  REGION 1..85: note = Description of Unknown:hvTR_Q9DHR7 target sequence

SEQ ID NO: 37235 - protein, 85 aa, unidentified
  REGION 1..85: note = Description of Unknown:cds_NZ_WFIY01000004.1_cds_WP_155862311.1_29 target sequence
KFGYIAVIIFSIYFLLPLYILVMIAFSPAKYTIGSLYPPLTFKAFTLNNLIYAFTQYDFLHPFIKSLSVATLVGIMGLALGIPAG

SEQ ID NO: 37236 - protein, 85 aa, unidentified
  REGION 1..85: note = Description of Unknown:cds_NZ_WFIY01000004.1_cds_WP_155862311.1_29 target sequence
YGLSRLPGRIAYPILVLLLITNMIPGIVVAIPISAEFIRLHLFDTIPGLALVQELITLPLATFIIQGTFSAIPREIEYQARIDGA

SEQ ID NO: 37237 - protein, 85 aa, unidentified
  REGION 1..85: note = Description of Unknown:cds_NZ_WFIY01000004.1_cds_WP_155862311.1_29 target sequence
STLSYFKNVLIPSALPGIVSAFLISWMFSWDEFTYAVIISPIHPTLPVEIYLNITRGNELAAVAFSLVFTIPVIILTLFLQKYLK

SEQ ID NO: 37238 - protein, 84 aa, unidentified
  REGION 1..84: note = Description of Unknown:cds_NZ_WFIY01000004.1_cds_WP_155862311.1_29 target sequence
PSALPGIVSAFLISWMFSWDEFTYAVIISPIHPTLPVEIYLNITRGNELAAVAFSLVFTIPVIILTLFLQKYLKGEYLAGGVKA

SEQ ID NO: 37239 - protein, 85 aa, unidentified
  REGION 1..85: note = Description of Unknown:cds_NZ_WFIY01000004.1_cds_WP_155862311.1_29 target sequence
PAKYTIGSLYPPLTFKAFTLNNLIYAFTQYDFLHPFIKSLSVATLVGIMGLALGIPAGYGLSRLPGRIAYPILVLLLITNMIPGI

SEQ ID NO: 37240 - protein, 85 aa, unidentified
  REGION 1..85: note = Description of Unknown:cds_NZ_WFIY01000004.1_cds_WP_155862311.1_29 target sequence
VVAIPISAEFIRLHLFDTIPGLALVQELITLPLATFIIQGTFSAIPREIEYQARIDGASTLSYFKNVLIPSALPGIVSAFLISWM

SEQ ID NO: 37241 - protein, 85 aa, unidentified
  REGION 1..85: note = Description of Unknown:cds_NZ_WFIY01000004.1_cds_WP_155862337.1_63 target sequence
GFNGIAGAVNEPGEIPWELVLLYFLVALAIAFLLGKRSGGLKAFNTLDLIYIGIGSAFAVAWEFYIAGFLDRFIPSNPFVSVGFW

SEQ ID NO: 37242 - protein, 85 aa, unidentified
  REGION 1..85: note = Description of Unknown:cds_NZ_WFIY01000004.1_cds_WP_155862337.1_63 target sequence
GRIIIVFIVAALVRKVGVGMLTLFIFDVLSDIFHYGFGGEPMYFIYETFTYGLFVDLMIAATGGRIFGLPNFATTKPPTQNISKD

SEQ ID NO: 37243 - protein, 85 aa, unidentified
  REGION 1..85: note = Description of Unknown:cds_NZ_WFIY01000004.1_cds_WP_155862337.1_63 target sequence
TMQSAEEEEKDTPTRSTLITKLTFIVGAIEGAIIGILWAFPDPVFYDGFFRPFIEAKIVNWGYIYYHIYAYMPGDALAGIIGAII

SEQ ID NO: 37244 - protein, 84 aa, unidentified
  REGION 1..84: note = Description of Unknown:cds_NZ_WFIY01000004.1_cds_WP_155862337.1_63 target sequence
TPTRSTLITKLTFIVGAIEGAIIGILWAFPDPVFYDGFFRPFIEAKIVNWGYIYYHIYAYMPGDALAGIIGAIIAIIVARAVGS

SEQ ID NO: 37245 - protein, 85 aa, unidentified
  REGION 1..85: note = Description of Unknown:cds_NZ_WFIY01000004.1_cds_WP_155862337.1_63 target sequence
LAIAFLLGKRSGGLKAFNTLDLIYIGIGSAFAVAWEFYIAGFLDRFIPSNPFVSVGFWGRIIIVFIVAALVRKVGVGMLTLFIFD

SEQ ID NO: 37246 - protein, 85 aa, unidentified
  REGION 1..85: note = Description of Unknown:cds_NZ_WFIY01000004.1_cds_WP_155862337.1_63 target sequence
VLSDIFHYGFGGEPMYFIYETFTYGLFVDLMIAATGGRIFGLPNFATTKPPTQNISKDTMQSAEEEEKDTPTRSTLITKLTFIVG

SEQ ID NO: 37247 - protein, 85 aa, unidentified
  REGION 1..85: note = Description of Unknown:cds_NZ_WFIY01000004.1_cds_155 target sequence
VNKSYVILIIGGISFGTAAIFIKFSDLTPGAIAFFRFLVAGLILSLGRIDLKKIIKYSPFGLLLSLHMITFILGVYNTTIIDTTV

SEQ ID NO: 37248 - protein, 85 aa, unidentified
  REGION 1..85: note = Description of Unknown:cds_NZ_WFIY01000004.1_cds_155 target sequence
LVSTSPFFAILLSPLSKFKAERIDLVITAIGFSGILIMNYPLQLGYLYGNIMSLISAFLISLYTTLLSRNEENPLVLTSSIYISS

SEQ ID NO: 37249 - protein, 85 aa, unidentified
  REGION 1..85: note = Description of Unknown:cds_NZ_WFIY01000004.1_cds_155 target sequence
SIFSLPFVIYQGIGKIDLTSILSLLGLIFIPTLIGHTSVIYASNKVKPQYIETIGLLEPVVASIIAIFTFNQIPNLFEVLGSALI

SEQ ID NO: 37250 - protein, 84 aa, unidentified
  REGION 1..84: note = Description of Unknown:cds_NZ_WFIY01000004.1_cds_155 target sequence
IGKIDLTSILSLLGLIFIPTLIGHTSVIYASNKVKPQYIETIGLLEPVVASIIAIFTFNQIPNLFEVLGSALIVSSIIFVINKK

SEQ ID NO: 37251 - protein, 85 aa, unidentified
  REGION 1..85: note = Description of Unknown:cds_NZ_WFIY01000004.1_cds_155 target sequence
TPGAIAFFRFLVAGLILSLGRIDLKKIIKYSPFGLLLSLHMITFILGVYNTTIIDTTVLVSTSPFFAILLSPLSKFKAERIDLVI

SEQ ID NO: 37252 - protein, 85 aa, unidentified
  REGION 1..85: note = Description of Unknown:cds_NZ_WFIY01000004.1_cds_155 target sequence
TAIGFSGILIMNYPLQLGYLYGNIMSLISAFLISLYTTLLSRNEENPLVLTSSIYISSSIFSLPFVIYQGIGKIDLTSILSLLGL

SEQ ID NO: 37253 - protein, 85 aa, unidentified
  REGION 1..85: note = Description of Unknown:cds_NZ_WFIY01000004.1_cds_WP_155862757.1_570 target sequence
VTRYWLRYYIVSFASIAIIDIIVSSIVVSIPFFYIFQIIMIFGLWYFISPFTMIALLKMRKGGEELVEVVDKISKKFGVKTPRVY

SEQ ID NO: 37254 - protein, 85 aa, unidentified
  REGION 1..85: note = Description of Unknown:cds_NZ_WFIY01000004.1_cds_WP_155862757.1_570 target sequence
ISYVDFPNALAFGNILFRGMAVTSPLLDLLNDQELEAVIAHEISHLKNHDPEVLILTIVGINSVYSFLIYSFPPYLSIIIIFYFF

SEQ ID NO: 37255 - protein, 85 aa, unidentified
  REGION 1..85: note = Description of Unknown:cds_NZ_WFIY01000004.1_cds_WP_155862757.1_570 target sequence
GLFPLFFAIHRRVEKRADITAVKEDKSYAIPLETALIKIAYLSDKLPSYILKNFPELQILLMKYDIISSNYGNGGLFRTHPSLSE

SEQ ID NO: 37256 - protein, 84 aa, unidentified
  REGION 1..84: note = Description of Unknown:cds_NZ_WFIY01000004.1_cds_WP_155862757.1_570 target sequence
RVEKRADITAVKEDKSYAIPLETALIKIAYLSDKLPSYILKNFPELQILLMKYDIISSNYGNGGLFRTHPSLSERLRYLSNYEY

SEQ ID NO: 37257 - protein, 85 aa, unidentified
  REGION 1..85: note = Description of Unknown:cds_NZ_WFIY01000004.1_cds_WP_155862757.1_570 target sequence
VSIPFFYIFQIIMIFGLWYFISPFTMIALLKMRKGGEELVEVVDKISKKFGVKTPRVYISYVDFPNALAFGNILFRGMAVTSPLL

SEQ ID NO: 37258 - protein, 85 aa, unidentified
  REGION 1..85: note = Description of Unknown:cds_NZ_WFIY01000004.1_cds_WP_155862757.1_570 target sequence
DLLNDQELEAVIAHEISHLKNHDPEVLILTIVGINSVYSFLIYSFPPYLSIIIIFYFFGLFPLFFAIHRRVEKRADITAVKEDKS

SEQ ID NO: 37259 - protein, 85 aa, unidentified
  REGION 1..85: note = Description of Unknown:cds_NZ_WFIY01000004.1_cds_WP_155862842.1_675 target sequence
TWSESVIHEVLKLINEAHDFFMSNPLLLELPEKDSVAFIGDTHGALDVTEKVFRELYDKVDVLIFLGDYVDRGSQGIENLKLILR

SEQ ID NO: 37260 - protein, 85 aa, unidentified
  REGION 1..85: note = Description of Unknown:cds_NZ_WFIY01000004.1_cds_WP_155862842.1_675 target sequence
KMLENPKKVIVLRGNHESPLTNEFYGFKEEVLEKMGDYYEDFVNMFSVMPYAATINGYFCVHGGIARNLEDIKQINSLRRPDVNP

SEQ ID NO: 37261 - protein, 85 aa, unidentified
  REGION 1..85: note = Description of Unknown:cds_NZ_WFIY01000004.1_cds_WP_155862842.1_675 target sequence
DDEIAFEMLWNDPREELEGFVPNIRGEGTYFYGKDVTLKFLERNNLKGIIRGHEAVDGIRFEMDNRVITVFSSRYHGLGAGALVF

SEQ ID NO: 37262 - protein, 84 aa, unidentified
  REGION 1..84: note = Description of Unknown:cds_NZ_WFIY01000004.1_cds_WP_155862842.1_675 target sequence
DPREELEGFVPNIRGEGTYFYGKDVTLKFLERNNLKGIIRGHEAVDGIRFEMDNRVITVFSSRYHGLGAGALVFNRGKLCKVPL

SEQ ID NO: 37263 - protein, 85 aa, unidentified
  REGION 1..85: note = Description of Unknown:cds_NZ_WFIY01000004.1_cds_WP_155862842.1_675 target sequence
LELPEKDSVAFIGDTHGALDVTEKVFRELYDKVDVLIFLGDYVDRGSQGIENLKLILRKMLENPKKVIVLRGNHESPLTNEFYGF

SEQ ID NO: 37264 - protein, 85 aa, unidentified
  REGION 1..85: note = Description of Unknown:cds_NZ_WFIY01000004.1_cds_WP_155862842.1_675 target sequence
KEEVLEKMGDYYEDFVNMFSVMPYAATINGYFCVHGGIARNLEDIKQINSLRRPDVNPDDEIAFEMLWNDPREELEGFVPNIRGE

SEQ ID NO: 37265 - protein, 85 aa, unidentified
  REGION 1..85: note = Description of Unknown:cds_NZ_WFIY01000004.1_cds_WP_155862883.1_724 target sequence
RKISIGIMGSYTIDEIHENNIIYEKAGGPPIYSSLGVYIAGGEPHVYSIKGEDFKFELPDYIKEDFIINIKNNLRFEIIINNGKR

SEQ ID NO: 37266 - protein, 85 aa, unidentified
  REGION 1..85: note = Description of Unknown:cds_NZ_WFIY01000004.1_cds_WP_155862883.1_724 target sequence
TLKLKSPGSKIDFNKVSLGNIDGLIINPVCNEIDLDQVNVLNIPLAVDFQGIIRKCETDKEITYKEINYIPYKPNYMVAHANIEE

SEQ ID NO: 37267 - protein, 85 aa, unidentified
  REGION 1..85: note = Description of Unknown:cds_NZ_WFIY01000004.1_cds_WP_155862883.1_724 target sequence
KNNGKLDIKKLLDVGFKEIIISYGDLGFEIYSKNGILKETVENRGNYEVGNGDFLLGFYFTLRVKGVKIEEAARLSKLASQKFSI

SEQ ID NO: 37268 - protein, 84 aa, unidentified
  REGION 1..84: note = Description of Unknown:cds_NZ_WFIY01000004.1_cds_WP_155862883.1_724 target sequence
LDVGFKEIIISYGDLGFEIYSKNGILKETVENRGNYEVGNGDFLLGFYFTLRVKGVKIEEAARLSKLASQKFSIYGPNLQLLLS

SEQ ID NO: 37269 - protein, 85 aa, unidentified
  REGION 1..85: note = Description of Unknown:cds_NZ_WFIY01000004.1_cds_WP_155862883.1_724 target sequence
GPPIYSSLGVYIAGGEPHVYSIKGEDFKFELPDYIKEDFIINIKNNLRFEIIINNGKRTLKLKSPGSKIDFNKVSLGNIDGLIIN

SEQ ID NO: 37270 - protein, 85 aa, unidentified
  REGION 1..85: note = Description of Unknown:cds_NZ_WFIY01000004.1_cds_WP_155862883.1_724 target sequence
PVCNEIDLDQVNVLNIPLAVDFQGIIRKCETDKEITYKEINYIPYKPNYMVAHANIEEKNNGKLDIKKLLDVGFKEIIISYGDLG

SEQ ID NO: 37271 - protein, 85 aa, unidentified
  REGION 1..85: note = Description of Unknown:cds_NZ_WFIY01000004.1_cds_WP_155863237.1_1185 target sequence
DSLKFHVLYEARYEYEDVVTSNDNILKIVPYDGDNQELLEENVDTEPKGYKTRYKDMFGNIVYRIKVIEPHYSLVIRSESSVNVK

SEQ ID NO: 37272 - protein, 85 aa, unidentified
  REGION 1..85: note = Description of Unknown:cds_NZ_WFIY01000004.1_cds_WP_155863237.1_1185 target sequence
LKEIEDCVLPCQIEDGIFLNSSRLIDVEYFKPIAKELLKSSKSLDDLIKNTVEFVRNRLKYKKGITNVDTSAKESFEIGMGVCQD

SEQ ID NO: 37273 - protein, 85 aa, unidentified
  REGION 1..85: note = Description of Unknown:cds_NZ_WFIY01000004.1_cds_WP_155863237.1_1185 target sequence
FAQVTIGILRASGIPARYVMGLVNDNPISTHAWVEFKSPSGWIPVDPTTRKFYNIPYVKFAIGRDYYDTPPILGTFVSKGKGWLK

SEQ ID NO: 37274 - protein, 84 aa, unidentified
  REGION 1..84: note = Description of Unknown:cds_NZ_WFIY01000004.1_cds_WP_155863237.1_1185 target sequence
SGIPARYVMGLVNDNPISTHAWVEFKSPSGWIPVDPTTRKFYNIPYVKFAIGRDYYDTPPILGTFVSKGKGWLKKLTVMVRRID

SEQ ID NO: 37275 - protein, 85 aa, unidentified
  REGION 1..85: note = Description of Unknown:cds_NZ_WFIY01000004.1_cds_WP_155863237.1_1185 target sequence
IVPYDGDNQELLEENVDTEPKGYKTRYKDMFGNIVYRIKVIEPHYSLVIRSESSVNVKLKEIEDCVLPCQIEDGIFLNSSRLIDV

SEQ ID NO: 37276 - protein, 85 aa, unidentified
  REGION 1..85: note = Description of Unknown:cds_NZ_WFIY01000004.1_cds_WP_155863237.1_1185 target sequence
EYFKPIAKELLKSSKSLDDLIKNTVEFVRNRLKYKKGITNVDTSAKESFEIGMGVCQDFAQVTIGILRASGIPARYVMGLVNDNP

SEQ ID NO: 37277 - protein, 85 aa, unidentified
  REGION 1..85: note = Description of Unknown:cds_NZ_WFIY01000004.1_cds_WP_155864451.1_1649 target sequence
YLFAYGTLRYGFELHHLLKDSRFVGLGFIEGYKMYDIGNYPGVVRGDGIVWGEVYEIKDELINLLDEVEDYKGRPDDLYIREKTR

SEQ ID NO: 37278 - protein, 85 aa, unidentified
  REGION 1..85: note = Description of Unknown:cds_NZ_WFIY01000004.1_cds_WP_155864451.1_1649 target sequence
VYFDQKRRYYIDNVNFYRYNHGIEFRDEIESGDYSRWVGMPVIVNYFAYAENTNPEILKERGVKEILKEIEAYLEDYKIIFNIKC

SEQ ID NO: 37279 - protein, 85 aa, unidentified
  REGION 1..85: note = Description of Unknown:cds_NZ_WFIY01000004.1_cds_WP_155864451.1_1649 target sequence
KYGLCANLKEFKGGKVYGYIYVMLEDELNSLDKAEEHLIKYVRDVIKVKDKEGKEYFAQAYISDYKDGEGEPTDFYKNSIIEGLK

SEQ ID NO: 37280 - protein, 84 aa, unidentified
  REGION 1..84: note = Description of Unknown:cds_NZ_WFIY01000004.1_cds_WP_155864451.1_1649 target sequence
KGGKVYGYIYVMLEDELNSLDKAEEHLIKYVRDVIKVKDKEGKEYFAQAYISDYKDGEGEPTDFYKNSIIEGLKRKWDKISTGL

SEQ ID NO: 37281 - protein, 85 aa, unidentified
  REGION 1..85: note = Description of Unknown:cds_NZ_WFIY01000004.1_cds_WP_155864451.1_1649 target sequence
FIEGYKMYDIGNYPGVVRGDGIVWGEVYEIKDELINLLDEVEDYKGRPDDLYIREKTRVYFDQKRRYYIDNVNFYRYNHGIEFRD

SEQ ID NO: 37282 - protein, 85 aa, unidentified
  REGION 1..85: note = Description of Unknown:cds_NZ_WFIY01000004.1_cds_WP_155864451.1_1649 target sequence
EIESGDYSRWVGMPVIVNYFAYAENTNPEILKERGVKEILKEIEAYLEDYKIIFNIKCKYGLCANLKEFKGGKVYGYIYVMLEDE

SEQ ID NO: 37283 - protein, 85 aa, unidentified
  REGION 1..85: note = Description of Unknown:cds_NZ_WFIY01000004.1_cds_WP_155863778.1_1657 target sequence
DYIGLALKNGIDKEKAIYVYKILNGGYFMKLYYAKTPIINELKNWPTLYLKKKKYFPKIASPEYNEAMQLLITLDIYSILGTSFR

SEQ ID NO: 37284 - protein, 85 aa, unidentified
  REGION 1..85: note = Description of Unknown:cds_NZ_WFIY01000004.1_cds_WP_155863778.1_1657 target sequence
LLKTNLEKKRLEDELKKVYDKISETCNNENIFPCPMRTFDVNINQDFEPFIQDLFEKRLRDQKADVMSTIEEIAYNSEFFEELKK

SEQ ID NO: 37285 - protein, 85 aa, unidentified
  REGION 1..85: note = Description of Unknown:cds_NZ_WFIY01000004.1_cds_WP_155863778.1_1657 target sequence
EVNWLKAIKVENTIRGIALAGKLEEFLDNIQDIVYLLSSERTLYFDELLLSNSIEDSIKKILEDGRKAIKNEINNEFSKDVNYIY

SEQ ID NO: 37286 - protein, 84 aa, unidentified
  REGION 1..84: note = Description of Unknown:cds_NZ_WFIY01000004.1_cds_WP_155863778.1_1657 target sequence
NTIRGIALAGKLEEFLDNIQDIVYLLSSERTLYFDELLLSNSIEDSIKKILEDGRKAIKNEINNEFSKDVNYIYTLIRQQGSYI

SEQ ID NO: 37287 - protein, 85 aa, unidentified
  REGION 1..85: note = Description of Unknown:cds_NZ_WFIY01000004.1_cds_WP_155863778.1_1657 target sequence
FMKLYYAKTPIINELKNWPTLYLKKKKYFPKIASPEYNEAMQLLITLDIYSILGTSFRLLKTNLEKKRLEDELKKVYDKISETCN

SEQ ID NO: 37288 - protein, 85 aa, unidentified
  REGION 1..85: note = Description of Unknown:cds_NZ_WFIY01000004.1_cds_WP_155863778.1_1657 target sequence
NENIFPCPMRTFDVNINQDFEPFIQDLFEKRLRDQKADVMSTIEEIAYNSEFFEELKKEVNWLKAIKVENTIRGIALAGKLEEFL

SEQ ID NO: 37289 - protein, 85 aa, unidentified
  REGION 1..85: note = Description of Unknown:hvTR_P21698 target sequence
DYFPVISVDLQSGRRVVSVEYFRGDGPPRIPYSMVGPCCVFLMHHRPSHEVRLRFSDFYNVGEFPYRVGLGDFASNVAPPPAKPF

SEQ ID NO: 37290 - protein, 85 aa, unidentified
  REGION 1..85: note = Description of Unknown:hvTR_P21698 target sequence
QRLIDLIGHMTLSDFTRFPNLKEAISWPLGEPSLAFFDLSSTRVHRNDDIRRDQIATLAMRSCKITNDLEDSFVGLHRMIATEAI

SEQ ID NO: 37291 - protein, 85 aa, unidentified
  REGION 1..85: note = Description of Unknown:hvTR_P21698 target sequence
LRGIDLCLLPGFDLMYEVAHVQCVRLLQAAKEDISNAVVPNSALIVLMEESLMLRSSLPSMMGRNNWIPVIPPIPDVEMESEEES

SEQ ID NO: 37292 - protein, 84 aa, unidentified
  REGION 1..84: note = Description of Unknown:hvTR_P21698 target sequence
GFDLMYEVAHVQCVRLLQAAKEDISNAVVPNSALIVLMEESLMLRSSLPSMMGRNNWIPVIPPIPDVEMESEEESDDDGFVEVD

SEQ ID NO: 37293 - protein, 85 aa, unidentified
  REGION 1..85: note = Description of Unknown:hvTR_P21698 target sequence
PRIPYSMVGPCCVFLMHHRPSHEVRLRFSDFYNVGEFPYRVGLGDFASNVAPPPAKPFQRLIDLIGHMTLSDFTRFPNLKEAISW

SEQ ID NO: 37294 - protein, 85 aa, unidentified
  REGION 1..85: note = Description of Unknown:hvTR_P21698 target sequence
PLGEPSLAFFDLSSTRVHRNDDIRRDQIATLAMRSCKITNDLEDSFVGLHRMIATEAILRGIDLCLLPGFDLMYEVAHVQCVRLL

SEQ ID NO: 37295 - protein, 85 aa, unidentified
  REGION 1..85: note = Description of Unknown:hvTR_P03520 target sequence
DNLTKVREYLKSYSRLDQAVGEIDEIEAQRAEKSNYELFQEDGVEEHTKPSYFQAADDSDTESEPEIEDNQGLYAQDPEAEQVEG

SEQ ID NO: 37296 - protein, 85 aa, unidentified
  REGION 1..85: note = Description of Unknown:hvTR_P03520 target sequence
FIQGPLDDYADEEVDVVFTSDWKPPELESDEHGKTLRLTSPEGLSGEQKSQWLSTIKAVVQSAKYWNLAECTFEASGEGVIMKER

SEQ ID NO: 37297 - protein, 85 aa, unidentified
  REGION 1..85: note = Description of Unknown:hvTR_P03520 target sequence
QITPDVYKVTPVMNTHPSQSEAVSDVWSLSKTSMTFQPKKASLQPLTISLDELFSSRGEFISVGGDGRMSHKEAILLGLRYKKLY

SEQ ID NO: 37298 - protein, 84 aa, unidentified
  REGION 1..84: note = Description of Unknown:hvTR_P03520 target sequence
PVMNTHPSQSEAVSDVWSLSKTSMTFQPKKASLQPLTISLDELFSSRGEFISVGGDGRMSHKEAILLGLRYKKLYNQARVKYSL

SEQ ID NO: 37299 - protein, 85 aa, unidentified
  REGION 1..85: note = Description of Unknown:hvTR_P03520 target sequence
AQRAEKSNYELFQEDGVEEHTKPSYFQAADDSDTESEPEIEDNQGLYAQDPEAEQVEGFIQGPLDDYADEEVDVVFTSDWKPPEL

SEQ ID NO: 37300 - protein, 85 aa, unidentified
  REGION 1..85: note = Description of Unknown:hvTR_P03520 target sequence
ESDEHGKTLRLTSPEGLSGEQKSQWLSTIKAVVQSAKYWNLAECTFEASGEGVIMKERQITPDVYKVTPVMNTHPSQSEAVSDVW

SEQ ID NO: 37301 - protein, 85 aa, unidentified; identical to SEQ ID NO: 37289
  REGION 1..85: note = Description of Unknown:cds_NC_014395.1_cds_YP_003848706.1_3 target sequence

SEQ ID NO: 37302 - protein, 85 aa, unidentified; identical to SEQ ID NO: 37290
  REGION 1..85: note = Description of Unknown:cds_NC_014395.1_cds_YP_003848706.1_3 target sequence

SEQ ID NO: 37303 - protein, 85 aa, unidentified; identical to SEQ ID NO: 37291
  REGION 1..85: note = Description of Unknown:cds_NC_014395.1_cds_YP_003848706.1_3 target sequence

SEQ ID NO: 37304 - protein, 84 aa, unidentified; identical to SEQ ID NO: 37292
  REGION 1..84: note = Description of Unknown:cds_NC_014395.1_cds_YP_003848706.1_3 target sequence

SEQ ID NO: 37305 - protein, 85 aa, unidentified; identical to SEQ ID NO: 37293
  REGION 1..85: note = Description of Unknown:cds_NC_014395.1_cds_YP_003848706.1_3 target sequence

SEQ ID NO: 37306 - protein, 85 aa, unidentified; identical to SEQ ID NO: 37294
  REGION 1..85: note = Description of Unknown:cds_NC_014395.1_cds_YP_003848706.1_3 target sequence

SEQ ID NO: 37307 - protein, 85 aa, unidentified
  REGION 1..85: note = Description of Unknown:cds_NZ_WFIY01000004.1_cds_WP_155862305.1_21 target sequence
RGFSTQCKSEPTPRNVGEKRKVHVKISVVSEYFHVSQNPKPMPLIVEKNADAIISQFLGTGRAEVQAERDAVYFTRVSDDIVIPA

SEQ ID NO: 37308 - protein, 85 aa, unidentified
  REGION 1..85: note = Description of Unknown:cds_NZ_WFIY01000004.1_cds_WP_155862305.1_21 target sequence
NTVRGAVRSRLEVLFDCSCYNSLGNKPSTSVSKKYKEIFKPRRKYSDDLENEGKVCPVCNVFGTAGLASRITFTDFKLTAGKVSY

SEQ ID NO: 37309 - protein, 85 aa, unidentified
  REGION 1..85: note = Description of Unknown:cds_NZ_WFIY01000004.1_cds_WP_155862305.1_21 target sequence
VNVQGYTYEVATKNSVFEGDVIGNLSREEWGMVLWGMGCRKGKFKVILMGRFKFQRRDFARVKFEVNDQDLIKACEEFETKYSKY

SEQ ID NO: 37310 - protein, 84 aa, unidentified
  REGION 1..84: note = Description of Unknown:cds_NZ_WFIY01000004.1_cds_WP_155862305.1_21 target sequence
ATKNSVFEGDVIGNLSREEWGMVLWGMGCRKGKFKVILMGRFKFQRRDFARVKFEVNDQDLIKACEEFETKYSKYLHDVEEDWE

SEQ ID NO: 37311 - protein, 85 aa, unidentified
  REGION 1..85: note = Description of Unknown:cds_NZ_WFIY01000004.1_cds_WP_155862305.1_21 target sequence
VVSEYFHVSQNPKPMPLIVEKNADAIISQFLGTGRAEVQAERDAVYFTRVSDDIVIPANTVRGAVRSRLEVLFDCSCYNSLGNKP

SEQ ID NO: 37312 - protein, 85 aa, unidentified
  REGION 1..85: note = Description of Unknown:cds_NZ_WFIY01000004.1_cds_WP_155862305.1_21 target sequence
STSVSKKYKEIFKPRRKYSDDLENEGKVCPVCNVFGTAGLASRITFTDFKLTAGKVSYVNVQGYTYEVATKNSVFEGDVIGNLSR

SEQ ID NO: 37313 - protein, 85 aa, unidentified
  REGION 1..85: note = Description of Unknown:cds_NZ_WFIY01000004.1_cds_WP_155862870.1_708 target sequence
KLSKNVEVIPGSPNTLIYDERVVIDQGGKNADLNINAEVQLATHGHMDHIAGLFKNAKIKFLPKEDYWSLNIIGRRAITYGFSAK

SEQ ID NO: 37314 - protein, 85 aa, unidentified
  REGION 1..85: note = Description of Unknown:cds_NZ_WFIY01000004.1_cds_WP_155862870.1_708 target sequence
NSSIFTYDLIKEELKDEFTDSEVEKIKLPGHTPGHVAYKIDNVLYCGDAFFGQKVLESFIFPFYTDFWAAQDSLDKLKELVKSVD

SEQ ID NO: 37315 - protein, 85 aa, unidentified
  REGION 1..85: note = Description of Unknown:cds_NZ_WFIY01000004.1_cds_WP_155862870.1_708 target sequence
FIIISHGPIYKKEKMIELLNFNIDYNKKLVEEIKDIIRGNPMTAEEVVIKLMIKRGKNEINPTSVILNEITAKSILSEVAKNIKV

SEQ ID NO: 37316 - protein, 84 aa, unidentified
  REGION 1..84: note = Description of Unknown:cds_NZ_WFIY01000004.1_cds_WP_155862870.1_708 target sequence
KKEKMIELLNFNIDYNKKLVEEIKDIIRGNPMTAEEVVIKLMIKRGKNEINPTSVILNEITAKSILSEVAKNIKVESKGVTFEI

SEQ ID NO: 37317 - protein, 85 aa, unidentified
  REGION 1..85: note = Description of Unknown:cds_NZ_WFIY01000004.1_cds_WP_155862870.1_708 target sequence
GKNADLNINAEVQLATHGHMDHIAGLFKNAKIKFLPKEDYWSLNIIGRRAITYGFSAKNSSIFTYDLIKEELKDEFTDSEVEKIK

SEQ ID NO: 37318 - protein, 85 aa, unidentified
  REGION 1..85: note = Description of Unknown:cds_NZ_WFIY01000004.1_cds_WP_155862870.1_708 target sequence
LPGHTPGHVAYKIDNVLYCGDAFFGQKVLESFIFPFYTDFWAAQDSLDKLKELVKSVDFIIISHGPIYKKEKMIELLNFNIDYNK

SEQ ID NO: 37319 - protein, 85 aa, unidentified
  REGION 1..85: note = Description of Unknown:cds_NZ_WFIY01000004.1_cds_WP_155862908.1_759 target sequence
YIQLQQKKADVIDLEGKKLKEIDLPLIFSYPVRKDLINRAFRSSFTKSLQPKGRDPMAGKRTTARSFGINLGLARVPRIRGSGEA

SEQ ID NO: 37320 - protein, 85 aa, unidentified
  REGION 1..85: note = Description of Unknown:cds_NZ_WFIY01000004.1_cds_WP_155862908.1_759 target sequence
ALAPNTVGGRLAFPPSPMERIVEEINKKEMRLAIISAISATAIKDLVKRRGHRLPDGLSLPIVVTDDLERLSKSKDIIEFIEKLG

SEQ ID NO: 37321 - protein, 85 aa, unidentified
  REGION 1..85: note = Description of Unknown:cds_NZ_WFIY01000004.1_cds_WP_155862908.1_759 target sequence
LEDELERCKVKKIRAGKGKMRGRRYKIPKGPLFVIKDEKSPVIKAIRNIQGFDVITAKELSVMHLAPGGHPGRLTIFTEGAIQVL

SEQ ID NO: 37322 - protein, 84 aa, unidentified
  REGION 1..84: note = Description of Unknown:cds_NZ_WFIY01000004.1_cds_WP_155862908.1_759 target sequence
KKIRAGKGKMRGRRYKIPKGPLFVIKDEKSPVIKAIRNIQGFDVITAKELSVMHLAPGGHPGRLTIFTEGAIQVLNERFGGELK

SEQ ID NO: 37323 - protein, 85 aa, unidentified
  REGION 1..85: note = Description of Unknown:cds_NZ_WFIY01000004.1_cds_WP_155862908.1_759 target sequence
FSYPVRKDLINRAFRSSFTKSLQPKGRDPMAGKRTTARSFGINLGLARVPRIRGSGEAALAPNTVGGRLAFPPSPMERIVEEINK

SEQ ID NO: 37324 - protein, 85 aa, unidentified
  REGION 1..85: note = Description of Unknown:cds_NZ_WFIY01000004.1_cds_WP_155862908.1_759 target sequence
KEMRLAIISAISATAIKDLVKRRGHRLPDGLSLPIVVTDDLERLSKSKDIIEFIEKLGLEDELERCKVKKIRAGKGKMRGRRYKI

SEQ ID NO: 37325 - protein, 85 aa, unidentified
  REGION 1..85: note = Description of Unknown:cds_NZ_WFIY01000004.1_cds_WP_155863735.1_1604 target sequence
NPSSLYKLLDSPIKKNVEDVINYCKNNQLVPLLSFYLEDELLNNLVKSLDKDFYNLYMEYKYNKTFFLKKVKEKFNTEKDYEDFP

SEQ ID NO: 37326 - protein, 85 aa, unidentified
  REGION 1..85: note = Description of Unknown:cds_NZ_WFIY01000004.1_cds_WP_155863735.1_1604 target sequence
YYLVPIGENNKIMIVNNDNVPPKAVPIEGKFRLTFLIHSSFDELNHDILSQSDDDIVLEFKNSGLVNIEKKRNIFMDSRSVEKIE

SEQ ID NO: 37327 - protein, 85 aa, unidentified
  REGION 1..85: note = Description of Unknown:cds_NZ_WFIY01000004.1_cds_WP_155863735.1_1604 target sequence
ESRIFKSNLIIPGYLLLVSVISNNLFPYHNALTINIGENGKVSISIDSGKATQEDVINGKTLTAEEKAKIYFEYKQKQIIKEEIL

SEQ ID NO: 37328 - protein, 84 aa, unidentified
  REGION 1..84: note = Description of Unknown:cds_NZ_WFIY01000004.1_cds_WP_155863735.1_1604 target sequence
IPGYLLLVSVISNNLFPYHNALTINIGENGKVSISIDSGKATQEDVINGKTLTAEEKAKIYFEYKQKQIIKEEILKSIIWKLSQ

SEQ ID NO: 37329 - protein, 85 aa, unidentified
  REGION 1..85: note = Description of Unknown:cds_NZ_WFIY01000004.1_cds_WP_155863735.1_1604 target sequence
QLVPLLSFYLEDELLNNLVKSLDKDFYNLYMEYKYNKTFFLKKVKEKFNTEKDYEDFPYYLVPIGENNKIMIVNNDNVPPKAVPI

SEQ ID NO: 37330 - protein, 85 aa, unidentified
  REGION 1..85: note = Description of Unknown:cds_NZ_WFIY01000004.1_cds_WP_155863735.1_1604 target sequence
EGKFRLTFLIHSSFDELNHDILSQSDDDIVLEFKNSGLVNIEKKRNIFMDSRSVEKIEESRIFKSNLIIPGYLLLVSVISNNLFP

SEQ ID NO: 37331 - protein, 85 aa, unidentified
  REGION 1..85: note = Description of Unknown:cds_NZ_WFIY01000004.1_cds_WP_155863770.1_1645 target sequence
DTSLIIGLILLLIIILIFVGMSLRQVKEWERAVVLRLGRILGVKGPGIIFLIPFIDRPVIVDLRIVTVDIPPQTIITKDNVTISI

SEQ ID NO: 37332 - protein, 85 aa, unidentified
  REGION 1..85: note = Description of Unknown:cds_NZ_WFIY01000004.1_cds_WP_155863770.1_1645 target sequence
DAVVYYKVLDPIKAVSMVYDYRSAVLNISQTSLRDIVGQMELDEVLSKREEINKKLQEILDNYTEAWGIKVTAVTVRDIKLSQDL

SEQ ID NO: 37333 - protein, 85 aa, unidentified
  REGION 1..85: note = Description of Unknown:cds_NZ_WFIY01000004.1_cds_WP_155863770.1_1645 target sequence
LSAMARQAEAERQRRARVILSEGERQASTILAEASQAYKNNPAALQLRFLETLSDISQKGGLIIVVPAGQELYPTISLASFAASY

SEQ ID NO: 37334 - protein, 84 aa, unidentified
  REGION 1..84: note = Description of Unknown:cds_NZ_WFIY01000004.1_cds_WP_155863770.1_1645 target sequence
ERQRRARVILSEGERQASTILAEASQAYKNNPAALQLRFLETLSDISQKGGLIIVVPAGQELYPTISLASFAASYVKQQEIGQK

SEQ ID NO: 37335 - protein, 85 aa, unidentified
  REGION 1..85: note = Description of Unknown:cds_NZ_WFIY01000004.1_cds_WP_155863770.1_1645 target sequence
EWERAVVLRLGRILGVKGPGIIFLIPFIDRPVIVDLRIVTVDIPPQTIITKDNVTISIDAVVYYKVLDPIKAVSMVYDYRSAVLN

SEQ ID NO: 37336 - protein, 85 aa, unidentified
  REGION 1..85: note = Description of Unknown:cds_NZ_WFIY01000004.1_cds_WP_155863770.1_1645 target sequence
ISQTSLRDIVGQMELDEVLSKREEINKKLQEILDNYTEAWGIKVTAVTVRDIKLSQDLLSAMARQAEAERQRRARVILSEGERQA

SEQ ID NO: 37337 - protein, 85 aa, unidentified
  REGION 1..85: note = Description of Unknown:cds_NZ_WFIY01000004.1_cds_WP_155864137.1_2090 target sequence
KSSSFFSSSLLRYLFLMLAGFFIIYISPSSPDYFLYSTVGNLIFWSSLLILLIKTVLRKPIRYLKKGRTALTIFFSYLSVHYFVY

SEQ ID NO: 37338 - protein, 85 aa, unidentified
  REGION 1..85: note = Description of Unknown:cds_NZ_WFIY01000004.1_cds_WP_155864137.1_2090 target sequence
SIALERLLTGFYGILFTVQNPFITFSFTPLYPAGLYAAIMNLVFNPSIAGGFPPNYYFELSLYAMIMGLIIATLVTANIMRVLEV

SEQ ID NO: 37339 - protein, 85 aa, unidentified
  REGION 1..85: note = Description of Unknown:cds_NZ_WFIY01000004.1_cds_WP_155864137.1_2090 target sequence
SSRLTRAKVILLAPLLGVIGGGSCCISIPILLATVIPAANSLLFLPIGDAALFLAYILLPPITAIGLKLNYDALFPKVPKEFRIK

SEQ ID NO: 37340 - protein, 84 aa, unidentified
  REGION 1..84: note = Description of Unknown:cds_NZ_WFIY01000004.1_cds_WP_155864137.1_2090 target sequence
LLAPLLGVIGGGSCCISIPILLATVIPAANSLLFLPIGDAALFLAYILLPPITAIGLKLNYDALFPKVPKEFRIKNEMLTKRKN

SEQ ID NO: 37341 - protein, 85 aa, unidentified
  REGION 1..85: note = Description of Unknown:cds_NZ_WFIY01000004.1_cds_WP_155864137.1_2090 target sequence
PSSPDYFLYSTVGNLIFWSSLLILLIKTVLRKPIRYLKKGRTALTIFFSYLSVHYFVYSIALERLLTGFYGILFTVQNPFITFSF

SEQ ID NO: 37342 - protein, 85 aa, unidentified
  REGION 1..85: note = Description of Unknown:cds_NZ_WFIY01000004.1_cds_WP_155864137.1_2090 target sequence
TPLYPAGLYAAIMNLVFNPSIAGGFPPNYYFELSLYAMIMGLIIATLVTANIMRVLEVSSRLTRAKVILLAPLLGVIGGGSCCIS

SEQ ID NO: 37343 - protein, 85 aa, unidentified
  REGION 1..85: note = Description of Unknown:cds_NZ_WFIY01000004.1_cds_WP_155864482.1_2125 target sequence
NFFVSILLGIIQGIAEWLPISSKTQELIASHYLLGLDVSIAYTFGLFMEMGSIGSALIYFRHDVKKVFNDKFLLKFLIVVTVFTG

SEQ ID NO: 37344 - protein, 85 aa, unidentified
  REGION 1..85: note = Description of Unknown:cds_NZ_WFIY01000004.1_cds_WP_155864482.1_2125 target sequence
IVGVPLYIISDKLLQNAYNPSIPMIFLGIALIADGIYIRYSRTRTREFKNLSTKEMILIGIAQGIAALPGVSRSGMTVSTMLILG

SEQ ID NO: 37345 - protein, 85 aa, unidentified
  REGION 1..85: note = Description of Unknown:cds_NZ_WFIY01000004.1_cds_WP_155864482.1_2125 target sequence
INPEDAFHYSYLAYIPAAIGAVGTTLLFTRHHVTYVISLIGVDGIVLAVISALLTGLVVISFLLRIAKTKKVYLIDFMLGGIAIL

SEQ ID NO: 37346 - protein, 84 aa, unidentified
  REGION 1..84: note = Description of Unknown:cds_NZ_WFIY01000004.1_cds_WP_155864482.1_2125 target sequence
YLAYIPAAIGAVGTTLLFTRHHVTYVISLIGVDGIVLAVISALLTGLVVISFLLRIAKTKKVYLIDFMLGGIAILVSVLGLILS

SEQ ID NO: 37347 - protein, 85 aa, unidentified
  REGION 1..85: note = Description of Unknown:cds_NZ_WFIY01000004.1_cds_WP_155864482.1_2125 target sequence
IASHYLLGLDVSIAYTFGLFMEMGSIGSALIYFRHDVKKVFNDKFLLKFLIVVTVFTGIVGVPLYIISDKLLQNAYNPSIPMIFL

SEQ ID NO: 37348 - protein, 85 aa, unidentified
  REGION 1..85: note = Description of Unknown:cds_NZ_WFIY01000004.1_cds_WP_155864482.1_2125 target sequence
GIALIADGIYIRYSRTRTREFKNLSTKEMILIGIAQGIAALPGVSRSGMTVSTMLILGINPEDAFHYSYLAYIPAAIGAVGTTLL

SEQ ID NO: 37349 - protein, 85 aa, unidentified
  REGION 1..85: note = Description of Unknown:cds_NC_003214.2_cds_NP_445695.1_30 target sequence
VLIAQVIKKGWYIDFKVSSLVDIPTKYLLYTKTIGEEKYGTDAMCHIVFPLRRMEPSFIRGGYNLPTIDKRKRPNQGDGGGIRGH

SEQ ID NO: 37350 - protein, 85 aa, unidentified
  REGION 1..85: note = Description of Unknown:cds_NC_003214.2_cds_NP_445695.1_30 target sequence
DIGSVWYSSIIFIRGRGGMVWGCSGTTDYMVPPVSGRRGRVYMVDAKQILKLDIDVDVNFYDPNWLLQKKLDMLHALGYQEEEAW

SEQ ID NO: 37351 - protein, 85 aa, unidentified
  REGION 1..85: note = Description of Unknown:cds_NC_003214.2_cds_NP_445695.1_30 target sequence
WEYSPSGKHIHVIIVLKDPISTKELFDLQFLLGDDHKRVYFNYLRYSVMKEDAVHFNVLYTYKKSLTFSDKLKAIFRHWFKSKQY

SEQ ID NO: 37352 - protein, 84 aa, unidentified
  REGION 1..84: note = Description of Unknown:cds_NC_003214.2_cds_NP_445695.1_30 target sequence
VIIVLKDPISTKELFDLQFLLGDDHKRVYFNYLRYSVMKEDAVHFNVLYTYKKSLTFSDKLKAIFRHWFKSKQYSKNLRLGQTT

SEQ ID NO: 37353 - protein, 85 aa, unidentified
  REGION 1..85: note = Description of Unknown:cds_NC_003214.2_cds_NP_445695.1_30 target sequence
LLYTKTIGEEKYGTDAMCHIVFPLRRMEPSFIRGGYNLPTIDKRKRPNQGDGGGIRGHDIGSVWYSSIIFIRGRGGMVWGCSGTT

SEQ ID NO: 37354 - protein, 85 aa, unidentified
  REGION 1..85: note = Description of Unknown:cds_NC_003214.2_cds_NP_445695.1_30 target sequence
DYMVPPVSGRRGRVYMVDAKQILKLDIDVDVNFYDPNWLLQKKLDMLHALGYQEEEAWWEYSPSGKHIHVIIVLKDPISTKELFD

SEQ ID NO: 37355 - protein, 85 aa, unidentified
  REGION 1..85: note = Description of Unknown:cds_NC_030656.1_cds_YP_009268799.1_84 target sequence
DIYTVKDNLYPDSISNKCYVLLGNHDIFIKKSLNSLSDIVMFSKFEISARSPCDFLANIVHSSAVLNNRFLSPVEFLEASCPAFC

SEQ ID NO: 37356 - protein, 85 aa, unidentified
  REGION 1..85: note = Description of Unknown:cds_NC_030656.1_cds_YP_009268799.1_84 target sequence
SNVSVDDLEKHISCNNTTISVYVTVFKDVYKNWKSVVFVQCPSEISVPNNITINNIKISNLDIILSNPYLAFTSSLDSDTNQRLF

SEQ ID NO: 37357 - protein, 85 aa, unidentified
  REGION 1..85: note = Description of Unknown:cds_NC_030656.1_cds_YP_009268799.1_84 target sequence
NNLVLRASVNEMIIYNNKSKLVSFLKKIIPNSFDVNFIALVNESDTSNVKLALLNNNSNALKAFTHAWFSGQLSANDEENIKITN

SEQ ID NO: 37358 - protein, 84 aa, unidentified
  REGION 1..84: note = Description of Unknown:cds_NC_030656.1_cds_YP_009268799.1_84 target sequence
EMIIYNNKSKLVSFLKKIIPNSFDVNFIALVNESDTSNVKLALLNNNSNALKAFTHAWFSGQLSANDEENIKITNTYKSVITLF

SEQ ID NO: 37359 - protein, 85 aa, unidentified
  REGION 1..85: note = Description of Unknown:cds_NC_030656.1_cds_YP_009268799.1_84 target sequence
FIKKSLNSLSDIVMFSKFEISARSPCDFLANIVHSSAVLNNRFLSPVEFLEASCPAFCSNVSVDDLEKHISCNNTTISVYVTVFK

SEQ ID NO: 37360 - protein, 85 aa, unidentified
  REGION 1..85: note = Description of Unknown:cds_NC_030656.1_cds_YP_009268799.1_84 target sequence
DVYKNWKSVVFVQCPSEISVPNNITINNIKISNLDIILSNPYLAFTSSLDSDTNQRLFNNLVLRASVNEMIIYNNKSKLVSFLKK

SEQ ID NO: 37361 - protein, 85 aa, unidentified
  REGION 1..85: note = Description of Unknown:hvTR_Q6TUW8 target sequence
RKSTPKTAKKDEENKDYNTCSGIVEYTKSLSKSTERCIESVTLTSSQYPSCSNIIINLVSSLASKMTSTYVAIEGEAKIYKNKKC

SEQ ID NO: 37362 - protein, 85 aa, unidentified
  REGION 1..85: note = Description of Unknown:hvTR_Q6TUW8 target sequence
ESKLDPYFLKIKPTAASPMLYQLLENIYGNIRDNKKIPSCLCNLSVENIEEKTFNKECIYINKMSGAIIEYTVQGGRSTVQSIFD

SEQ ID NO: 37363 - protein, 85 aa, unidentified
  REGION 1..85: note = Description of Unknown:hvTR_Q6TUW8 target sequence
EMEKLSKRDRQMAKVIIVPIVFYRNGNLTKITFALKKLIIERDFSANVININGKTERVSMAETSEEEIGRGLGITEDIDDAIDDD

SEQ ID NO: 37364 - protein, 84 aa, unidentified
  REGION 1..84: note = Description of Unknown:hvTR_Q6TUW8 target sequence
RQMAKVIIVPIVFYRNGNLTKITFALKKLIIERDFSANVININGKTERVSMAETSEEEIGRGLGITEDIDDAIDDDAESTLFNV

SEQ ID NO: 37365 - protein, 85 aa, unidentified
  REGION 1..85: note = Description of Unknown:hvTR_Q6TUW8 target sequence
KSLSKSTERCIESVTLTSSQYPSCSNIIINLVSSLASKMTSTYVAIEGEAKIYKNKKCESKLDPYFLKIKPTAASPMLYQLLENI

SEQ ID NO: 37366 - protein, 85 aa, unidentified
  REGION 1..85: note = Description of Unknown:hvTR_Q6TUW8 target sequence
YGNIRDNKKIPSCLCNLSVENIEEKTFNKECIYINKMSGAIIEYTVQGGRSTVQSIFDEMEKLSKRDRQMAKVIIVPIVFYRNGN

SEQ ID NO: 37367 - protein, 85 aa, unidentified
  REGION 1..85: note = Description of Unknown:cds_NC_024711.1_cds_YP_009052526.1_48 target sequence
IQYRDRQRQKAFIGAIIGAAASIAGGIIKGNKQKKAQEKAQAEAQAAQDHKDALQNAQALTSAYANQDYVGQYNDKLTLKCGGRV

SEQ ID NO: 37368 - protein, 85 aa, unidentified
  REGION 1..85: note = Description of Unknown:cds_NC_024711.1_cds_YP_009052526.1_48 target sequence
RRKAGFGTEFADALPGLGSLASSITGVQELGELGTAIGQGISANQQINENKRIAQEAEQRKQLQAGQQQLNITSDKMTNPMTMYQ

SEQ ID NO: 37369 - protein, 85 aa, unidentified
  REGION 1..85: note = Description of Unknown:cds_NC_024711.1_cds_YP_009052526.1_48 target sequence
RSSFINKYKCGGRRKAWIGAAIGAAGSLIGGMFGSKGQQPIQVKQADQASYSAPKTGLERPEWITNGTVQQPVMPQSVYRDRLNV

SEQ ID NO: 37370 - protein, 84 aa, unidentified
  REGION 1..84: note = Description of Unknown:cds_NC_024711.1_cds_YP_009052526.1_48 target sequence
CGGRRKAWIGAAIGAAGSLIGGMFGSKGQQPIQVKQADQASYSAPKTGLERPEWITNGTVQQPVMPQSVYRDRLNVYRCGGHRR

SEQ ID NO: 37371 - protein, 85 aa, unidentified
  REGION 1..85: note = Description of Unknown:cds_NC_024711.1_cds_YP_009052526.1_48 target sequence
IKGNKQKKAQEKAQAEAQAAQDHKDALQNAQALTSAYANQDYVGQYNDKLTLKCGGRVRRKAGFGTEFADALPGLGSLASSITGV

SEQ ID NO: 37372 - protein, 85 aa, unidentified
  REGION 1..85: note = Description of Unknown:cds_NC_024711.1_cds_YP_009052526.1_48 target sequence
QELGELGTAIGQGISANQQINENKRIAQEAEQRKQLQAGQQQLNITSDKMTNPMTMYQRSSFINKYKCGGRRKAWIGAAIGAAGS

SEQ ID NO: 37373 - protein, 85 aa, unidentified
  REGION 1..85: note = Description of Unknown:cds_NZ_WFIY01000004.1_cds_WP_155863030.1_917 target sequence
QSIRIKQVNEVKISKYILKYTFEDWNNLVESDVVIVGAGPSGMTAAYYLAKAGLKTVIFERRLSFGGGIGGGAMNFHKIVIETPA

SEQ ID NO: 37374 - protein, 85 aa, unidentified
  REGION 1..85: note = Description of Unknown:cds_NZ_WFIY01000004.1_cds_WP_155863030.1_917 target sequence
DEIIKELKIRYIEPEEGIFVIDSSEFMAKLATAAIDAGAKIIHGVTVDDVIFRENPLRVAGVAVEWTSTQMSGLHVDPLFISAKA

SEQ ID NO: 37375 - protein, 85 aa, unidentified
  REGION 1..85: note = Description of Unknown:cds_NZ_WFIY01000004.1_cds_WP_155863030.1_917 target sequence
VVDATGHDAEIISVASRKVPELGISVPGEKSAYSEIAEELVVENTGKVAPGLYATGMAVCEVKSLPRMGPIFGAMILSGKKVAEE

SEQ ID NO: 37376 - protein, 84 aa, unidentified
  REGION 1..84: note = Description of Unknown:cds_NZ_WFIY01000004.1_cds_WP_155863030.1_917 target sequence
EIISVASRKVPELGISVPGEKSAYSEIAEELVVENTGKVAPGLYATGMAVCEVKSLPRMGPIFGAMILSGKKVAEEIIKDLRNS

SEQ ID NO: 37377 - protein, 85 aa, unidentified
  REGION 1..85: note = Description of Unknown:cds_NZ_WFIY01000004.1_cds_WP_155863030.1_917 target sequence
LVESDVVIVGAGPSGMTAAYYLAKAGLKTVIFERRLSFGGGIGGGAMNFHKIVIETPADEIIKELKIRYIEPEEGIFVIDSSEFM

SEQ ID NO: 37378 - protein, 85 aa, unidentified
  REGION 1..85: note = Description of Unknown:cds_NZ_WFIY01000004.1_cds_WP_155863030.1_917 target sequence
AKLATAAIDAGAKIIHGVTVDDVIFRENPLRVAGVAVEWTSTQMSGLHVDPLFISAKAVVDATGHDAEIISVASRKVPELGISVP

SEQ ID NO: 37379 - protein, 85 aa, unidentified
  REGION 1..85: note = Description of Unknown:cds_NZ_WFIY01000004.1_cds_WP_155863214.1_1157 target sequence
RIAIIGAGKIGFTILSALKKMPNIELIATGRSSSTLEKIKSIGVEATTDNDYAVSSSDYIILSVKPQHFPSVLKSVKSWEGKKVI

SEQ ID NO: 37380 - protein, 85 aa, unidentified
  REGION 1..85: note = Description of Unknown:cds_NZ_WFIY01000004.1_cds_WP_155863214.1_1157 target sequence
SVMAGIRISTLSSFLKGSKVYRAMPNINAMVGKSTTALAEERDETVEKIFLQIGKVYWVPEELMDVWTALIGSGPAFMAEIIDAL

SEQ ID NO: 37381 - protein, 85 aa, unidentified
  REGION 1..85: note = Description of Unknown:cds_NZ_WFIY01000004.1_cds_WP_155863214.1_1157 target sequence
SLGAVECGMPRELSYNAILDMIEGTVELLRKCRHPALLRDQVTTPAGTTIRGLMTMESEGIKSALIKTVEAAYKRSVEIGEQIDR

SEQ ID NO: 37382 - protein, 84 aa, unidentified
  REGION 1..84: note = Description of Unknown:cds_NZ_WFIY01000004.1_cds_WP_155863214.1_1157 target sequence
PRELSYNAILDMIEGTVELLRKCRHPALLRDQVTTPAGTTIRGLMTMESEGIKSALIKTVEAAYKRSVEIGEQIDRKLRTSFPT

SEQ ID NO: 37383 - protein, 85 aa, unidentified
  REGION 1..85: note = Description of Unknown:cds_NZ_WFIY01000004.1_cds_WP_155863214.1_1157 target sequence
ATGRSSSTLEKIKSIGVEATTDNDYAVSSSDYIILSVKPQHFPSVLKSVKSWEGKKVISVMAGIRISTLSSFLKGSKVYRAMPNI

SEQ ID NO: 37384 - protein, 85 aa, unidentified
  REGION 1..85: note = Description of Unknown:cds_NZ_WFIY01000004.1_cds_WP_155863214.1_1157 target sequence
NAMVGKSTTALAEERDETVEKIFLQIGKVYWVPEELMDVWTALIGSGPAFMAEIIDALSLGAVECGMPRELSYNAILDMIEGTVE

SEQ ID NO: 37385 - protein, 85 aa, unidentified
  REGION 1..85: note = Description of Unknown:cds_NZ_WFIY01000004.1_cds_WP_155864421.1_1343 target sequence
LSHIAELAMRLRRGLISLFLAFIIFFAFGYTTINIDGYTIPILYPSLFHSLADSLMLFFIHHELPKGMKLLNLNPFDPLYASAYT

SEQ ID NO: 37386 - protein, 85 aa, unidentified
  REGION 1..85: note = Description of Unknown:cds_NZ_WFIY01000004.1_cds_WP_155864421.1_1343 target sequence
SFYLALFISLPIIFRELWGFVSPGLYEHEKKLVKYIVFPAALLFVSGSLFAYFIIVPLMMKFVVLYTTALGVEPTLSLRAFVSTV

SEQ ID NO: 37387 - protein, 85 aa, unidentified
  REGION 1..85: note = Description of Unknown:cds_NZ_WFIY01000004.1_cds_WP_155864421.1_1343 target sequence
VSLMMVTGIAFEYPLVMSILTYIGMVKADSWRKNWRWGVLGAFIIAWIISPGTTGGVIETTIGVILSVLYFVGVTSAKIIEKRRS

SEQ ID NO: 37388 - protein, 84 aa, unidentified
  REGION 1..84: note = Description of Unknown:cds_NZ_WFIY01000004.1_cds_WP_155864421.1_1343 target sequence
FEYPLVMSILTYIGMVKADSWRKNWRWGVLGAFIIAWIISPGTTGGVIETTIGVILSVLYFVGVTSAKIIEKRRSERNEQTIQR

SEQ ID NO: 37389 - protein, 85 aa, unidentified
  REGION 1..85: note = Description of Unknown:cds_NZ_WFIY01000004.1_cds_WP_155864421.1_1343 target sequence
FGYTTINIDGYTIPILYPSLFHSLADSLMLFFIHHELPKGMKLLNLNPFDPLYASAYTSFYLALFISLPIIFRELWGFVSPGLYE

SEQ ID NO: 37390 - protein, 85 aa, unidentified
  REGION 1..85: note = Description of Unknown:cds_NZ_WFIY01000004.1_cds_WP_155864421.1_1343 target sequence
HEKKLVKYIVFPAALLFVSGSLFAYFIIVPLMMKFVVLYTTALGVEPTLSLRAFVSTVVSLMMVTGIAFEYPLVMSILTYIGMVK

SEQ ID NO: 37391 - protein, 85 aa, unidentified
  REGION 1..85: note = Description of Unknown:cds_NZ_WFIY01000004.1_cds_WP_155863606.1_1511 target sequence
LEKITFKSFLKKKERKEKITMLTAYDYPTAKIISLTELDGILVGDSLAMVVLGLENTLKVGMKEMLHHLDAVVRAKPRQLIVADM

SEQ ID NO: 37392 - protein, 85 aa, unidentified
  REGION 1..85: note = Description of Unknown:cds_NZ_WFIY01000004.1_cds_WP_155863606.1_1511 target sequence
PFLSYETGDAVKNAGLFAKHGADAVKLEGGEEFSDVVKKIVRAGIPVMGHIGLTPQRFLRLGGYRTIGKTESEEEQLLRDAKALE

SEQ ID NO: 37393 - protein, 85 aa, unidentified
  REGION 1..85: note = Description of Unknown:cds_NZ_WFIY01000004.1_cds_WP_155863606.1_1511 target sequence
EAGVFSIVIENVYSSIAKRITENLSIPTICIGAGPYCDGQILVIHDLLGLSDFKPYFAKAYVDLREIISKAISEYVREVKEGKFP

SEQ ID NO: 37394 - protein, 84 aa, unidentified
  REGION 1..84: note = Description of Unknown:cds_NZ_WFIY01000004.1_cds_WP_155863606.1_1511 target sequence
ENVYSSIAKRITENLSIPTICIGAGPYCDGQILVIHDLLGLSDFKPYFAKAYVDLREIISKAISEYVREVKEGKFPSKEYYKEK

SEQ ID NO: 37395 - protein, 85 aa, unidentified
  REGION 1..85: note = Description of Unknown:cds_NZ_WFIY01000004.1_cds_WP_155863606.1_1511 target sequence
PTAKIISLTELDGILVGDSLAMVVLGLENTLKVGMKEMLHHLDAVVRAKPRQLIVADMPFLSYETGDAVKNAGLFAKHGADAVKL

SEQ ID NO: 37396 - protein, 85 aa, unidentified
  REGION 1..85: note = Description of Unknown:cds_NZ_WFIY01000004.1_cds_WP_155863606.1_1511 target sequence
EGGEEFSDVVKKIVRAGIPVMGHIGLTPQRFLRLGGYRTIGKTESEEEQLLRDAKALEEAGVFSIVIENVYSSIAKRITENLSIP

SEQ ID NO: 37397 - protein, 85 aa, unidentified
  REGION 1..85: note = Description of Unknown:cds_NC_035460.1_cds_YP_009408107.1_156 target sequence
GLKNIFILTTFIIPLMCKNLPNYLIIEKGKNVSLTCKENMSSVVKLSWYNNNNALFTWQMINNITINNETNNYIFILRDNFTTLT

SEQ ID NO: 37398 - protein, 85 aa, unidentified
  REGION 1..85: note = Description of Unknown:cds_NC_035460.1_cds_YP_009408107.1_156 target sequence
IKNVSTNFKYSCNFTSLNNINNNNAYDNNQSFIITVVNKMPIINMFNNNNNNNINITCKIISDPISIVTWNTSNSFNVVNNYTIN

SEQ ID NO: 37399 - protein, 85 aa, unidentified
  REGION 1..85: note = Description of Unknown:cds_NC_035460.1_cds_YP_009408107.1_156 target sequence
NTVINTISIHNLNSSVTCIGTFLNNITIIKTYNKNDYNNNSNNITNNKLLNLDLHYAIMIFSIMLISIIIIFIYISIRLYNCSKN

SEQ ID NO: 37400 - protein, 84 aa, unidentified
  REGION 1..84: note = Description of Unknown:cds_NC_035460.1_cds_YP_009408107.1_156 target sequence
HNLNSSVTCIGTFLNNITIIKTYNKNDYNNNSNNITNNKLLNLDLHYAIMIFSIMLISIIIIFIYISIRLYNCSKNNYKKNDFL

SEQ ID NO: 37401 - protein, 85 aa, unidentified
  REGION 1..85: note = Description of Unknown:cds_NC_035460.1_cds_YP_009408107.1_156 target sequence
KGKNVSLTCKENMSSVVKLSWYNNNNALFTWQMINNITINNETNNYIFILRDNFTTLTIKNVSTNFKYSCNFTSLNNINNNNAYD

SEQ ID NO: 37402 - protein, 85 aa, unidentified
  REGION 1..85: note = Description of Unknown:cds_NC_035460.1_cds_YP_009408107.1_156 target sequence
NNQSFIITVVNKMPIINMFNNNNNNNINITCKIISDPISIVTWNTSNSFNVVNNYTINNTVINTISIHNLNSSVTCIGTFLNNIT

SEQ ID NO: 37403 - protein, 85 aa, unidentified
  REGION 1..85: note = Description of Unknown:cds_NZ_WFIY01000004.1_cds_WP_155862605.1_382 target sequence
FIDYSTKLFGIIGKKISYTLSPAIHNYSFEKLGINAVYLAFDIQEEEKFDLIVKGLLEVGEGFNVTIPYKEKIIPLLEGLSKEAE

SEQ ID NO: 37404 - protein, 85 aa, unidentified
  REGION 1..85: note = Description of Unknown:cds_NZ_WFIY01000004.1_cds_WP_155862605.1_382 target sequence
EIGAVNTIFRKKGFNTDYLAVKSLVLEKGEKIEKSLIFGAGGAAKAASFALSSLGSEIFIINRTRDKAQELVDRLTEKGYYAKVV

SEQ ID NO: 37405 - protein, 85 aa, unidentified
  REGION 1..85: note = Description of Unknown:cds_NZ_WFIY01000004.1_cds_WP_155862605.1_382 target sequence
ESCNFSYDAVVNSTPNPSYIPDECIKGKLAIEFVYSPLNTEFLIKASEKGLRVINGLEILVRQALEAQKIWFGKSLNDKEVVDFL

SEQ ID NO: 37406 - protein, 84 aa, unidentified
  REGION 1..84: note = Description of Unknown:cds_NZ_WFIY01000004.1_cds_WP_155862605.1_382 target sequence
AVVNSTPNPSYIPDECIKGKLAIEFVYSPLNTEFLIKASEKGLRVINGLEILVRQALEAQKIWFGKSLNDKEVVDFLYARELVR

SEQ ID NO: 37407 - protein, 85 aa, unidentified
  REGION 1..85: note = Description of Unknown:cds_NZ_WFIY01000004.1_cds_WP_155862605.1_382 target sequence
SFEKLGINAVYLAFDIQEEEKFDLIVKGLLEVGEGFNVTIPYKEKIIPLLEGLSKEAEEIGAVNTIFRKKGFNTDYLAVKSLVLE

SEQ ID NO: 37408 - protein, 85 aa, unidentified
  REGION 1..85: note = Description of Unknown:cds_NZ_WFIY01000004.1_cds_WP_155862605.1_382 target sequence
KGEKIEKSLIFGAGGAAKAASFALSSLGSEIFIINRTRDKAQELVDRLTEKGYYAKVVESCNFSYDAVVNSTPNPSYIPDECIKG

SEQ ID NO: 37409 - protein, 85 aa, unidentified
  REGION 1..85: note = Description of Unknown:cds_NZ_WFIY01000004.1_cds_839 target sequence
DPNGIYYLGPKGSFSHEAALKISNAIYVEAQSISEIFYKVSSEGKLGIVPIENSLEGPINETLDNLFKFDDVFVNKIIELKINLV

SEQ ID NO: 37410 - protein, 85 aa, unidentified
  REGION 1..85: note = Description of Unknown:cds_NZ_WFIY01000004.1_cds_839 target sequence
LASKGDINIKHIKNIYTHLYAYKEAQNSLLKLGIVNNVIPVESTSKAAILALSDPNSAALCSEFAARLYGLKILAYGVQDYNNNI

SEQ ID NO: 37411 - protein, 85 aa, unidentified
  REGION 1..85: note = Description of Unknown:cds_NZ_WFIY01000004.1_cds_839 target sequence
TKFALISKNVSFRGERSMILFTVPDLPGSLYKVLEKFYTFNKNLKMIYSRPVRSIPWNYYFYVEYEGSYEKELLDELKKVTTSLK

SEQ ID NO: 37412 - protein, 84 aa, unidentified
  REGION 1..84: note = Description of Unknown:cds_NZ_WFIY01000004.1_cds_839 target sequence
VSFRGERSMILFTVPDLPGSLYKVLEKFYTFNKNLKMIYSRPVRSIPWNYYFYVEYEGSYEKELLDELKKVTTSLKFKGSYNIT

SEQ ID NO: 37413 - protein, 85 aa, unidentified
  REGION 1..85: note = Description of Unknown:cds_NZ_WFIY01000004.1_cds_839 target sequence
VEAQSISEIFYKVSSEGKLGIVPIENSLEGPINETLDNLFKFDDVFVNKIIELKINLVLASKGDINIKHIKNIYTHLYAYKEAQN

SEQ ID NO: 37414 - protein, 85 aa, unidentified
  REGION 1..85: note = Description of Unknown:cds_NZ_WFIY01000004.1_cds_839 target sequence
SLLKLGIVNNVIPVESTSKAAILALSDPNSAALCSEFAARLYGLKILAYGVQDYNNNITKFALISKNVSFRGERSMILFTVPDLP

SEQ ID NO: 37415 - protein, 85 aa, unidentified
  REGION 1..85: note = Description of Unknown:cds_NZ_WFIY01000004.1_cds_WP_155863024.1_907 target sequence
RFIHVPIQEGDPVTIWIDNKRAFLIKVKKGKRLDTDKGYILHDQLIGKEYGEIIKISKGEAYLLKPTPMDIYTTLPRPSQVVYPK

SEQ ID NO: 37416 - protein, 85 aa, unidentified
  REGION 1..85: note = Description of Unknown:cds_NZ_WFIY01000004.1_cds_WP_155863024.1_907 target sequence
DASYIIYASGIQPGDTVVEAGTGSGFLTITLAYFLGPNGKVISYDVREDMQNKAKQNALMLNLLDRIEFKIKDIRQGIDEKEVSA

SEQ ID NO: 37417 - protein, 85 aa, unidentified
  REGION 1..85: note = Description of Unknown:cds_NZ_WFIY01000004.1_cds_WP_155863024.1_907 target sequence
VILDMPDPWNVVSKAYEALKPSGSLIVFVPTVNQIEKTVLQMRNEGFIDIHAEELILREYQVKENAVRPKNIGVMHTGYLIRGRK

SEQ ID NO: 37418 - protein, 84 aa, unidentified
  REGION 1..84: note = Description of Unknown:cds_NZ_WFIY01000004.1_cds_WP_155863024.1_907 target sequence
WNVVSKAYEALKPSGSLIVFVPTVNQIEKTVLQMRNEGFIDIHAEELILREYQVKENAVRPKNIGVMHTGYLIRGRKYIKGTSL

SEQ ID NO: 37419 - protein, 85 aa, unidentified
  REGION 1..85: note = Description of Unknown:cds_NZ_WFIY01000004.1_cds_WP_155863024.1_907 target sequence
KKGKRLDTDKGYILHDQLIGKEYGEIIKISKGEAYLLKPTPMDIYTTLPRPSQVVYPKDASYIIYASGIQPGDTVVEAGTGSGFL

SEQ ID NO: 37420 - protein, 85 aa, unidentified
  REGION 1..85: note = Description of Unknown:cds_NZ_WFIY01000004.1_cds_WP_155863024.1_907 target sequence
TITLAYFLGPNGKVISYDVREDMQNKAKQNALMLNLLDRIEFKIKDIRQGIDEKEVSAVILDMPDPWNVVSKAYEALKPSGSLIV

SEQ ID NO: 37421 - protein, 85 aa, unidentified
  REGION 1..85: note = Description of Unknown:cds_NZ_WFIY01000004.1_cds_WP_155863163.1_1092 target sequence
KILVNGLLPFDSGKTTFSLMLIRELKAVGIKLFPLKPVAGHNAWYSFNTLLRSYDLGILVGNDALKYYDETKEDIRKINPFAVLL

SEQ ID NO: 37422 - protein, 85 aa, unidentified
  REGION 1..85: note = Description of Unknown:cds_NZ_WFIY01000004.1_cds_WP_155863163.1_1092 target sequence
SPVDLEILNFNVEYYNSLMANGYPVMIRISCGNNDKYYATETHLIPKTMKDVLQQIYERFKPEIVSSNELRETINNSWYITESCI

SEQ ID NO: 37423 - protein, 85 aa, unidentified
  REGION 1..85: note = Description of Unknown:cds_NZ_WFIY01000004.1_cds_WP_155863163.1_1092 target sequence
QHREDEIIESYNDASAPIPSAINVDYVFLVSPAKAFAIKGEEFRKVVSLFSLPPWIIRTSNLIKYLKIEKSFDLEIFTSKNDKII

SEQ ID NO: 37424 - protein, 84 aa, unidentified
  REGION 1..84: note = Description of Unknown:cds_NZ_WFIY01000004.1_cds_WP_155863163.1_1092 target sequence
ESYNDASAPIPSAINVDYVFLVSPAKAFAIKGEEFRKVVSLFSLPPWIIRTSNLIKYLKIEKSFDLEIFTSKNDKIIDYLIHDL

SEQ ID NO: 37425 - protein, 85 aa, unidentified
  REGION 1..85: note = Description of Unknown:cds_NZ_WFIY01000004.1_cds_WP_155863163.1_1092 target sequence
VGIKLFPLKPVAGHNAWYSFNTLLRSYDLGILVGNDALKYYDETKEDIRKINPFAVLLSPVDLEILNFNVEYYNSLMANGYPVMI

SEQ ID NO: 37426 - protein, 85 aa, unidentified
  REGION 1..85: note = Description of Unknown:cds_NZ_WFIY01000004.1_cds_WP_155863163.1_1092 target sequence
RISCGNNDKYYATETHLIPKTMKDVLQQIYERFKPEIVSSNELRETINNSWYITESCIQHREDEIIESYNDASAPIPSAINVDYV

SEQ ID NO: 37427 - protein, 85 aa, unidentified
  REGION 1..85: note = Description of Unknown:cds_NZ_WFIY01000004.1_cds_WP_155863513.1_1462 target sequence
IRESLRIMFARRRFLIIVVIYIFLNALFTYTSISTNPYPYVKFAVIPSIASLMLSDVFFILTIFLSDIISEEKNFARVVFLKSLF

SEQ ID NO: 37428 - protein, 85 aa, unidentified
  REGION 1..85: note = Description of Unknown:cds_NZ_WFIY01000004.1_cds_WP_155863513.1_1462 target sequence
KNNIKRYLSSKVLSAIILMSALSIALSVTIVGVVNYYLVGLSFMQMLEISLILSITLIVINIQMVGIGSLFSDPRISIVFNFIFY

SEQ ID NO: 37429 - protein, 85 aa, unidentified
  REGION 1..85: note = Description of Unknown:cds_NZ_WFIY01000004.1_cds_WP_155863513.1_1462 target sequence
SLFYNGIILNIIGTHYLSYYYLDLGNLIEFLIIKTIEKQSISEIVAVWGYKVPPHQVTISLTWATIGILINLVIGVIPIVYNVIK

SEQ ID NO: 37430 - protein, 84 aa, unidentified
  REGION 1..84: note = Description of Unknown:cds_NZ_WFIY01000004.1_cds_WP_155863513.1_1462 target sequence
LNIIGTHYLSYYYLDLGNLIEFLIIKTIEKQSISEIVAVWGYKVPPHQVTISLTWATIGILINLVIGVIPIVYNVIKIVGKKED

SEQ ID NO: 37431 - protein, 85 aa, unidentified
  REGION 1..85: note = Description of Unknown:cds_NZ_WFIY01000004.1_cds_WP_155863513.1_1462 target sequence
FTYTSISTNPYPYVKFAVIPSIASLMLSDVFFILTIFLSDIISEEKNFARVVFLKSLFKNNIKRYLSSKVLSAIILMSALSIALS

SEQ ID NO: 37432 - protein, 85 aa, unidentified
  REGION 1..85: note = Description of Unknown:cds_NZ_WFIY01000004.1_cds_WP_155863513.1_1462 target sequence
VTIVGVVNYYLVGLSFMQMLEISLILSITLIVINIQMVGIGSLFSDPRISIVFNFIFYSLFYNGIILNIIGTHYLSYYYLDLGNL

SEQ ID NO: 37433 - protein, 85 aa, unidentified
  REGION 1..85: note = Description of Unknown:cds_NZ_WFIY01000004.1_cds_WP_155864021.1_1952 target sequence
PCTGIHAVPSGPIEFPELVYSFIVCDEKVVMIDGGVANSIMDVSFLDKLDYLVITHLHIDHIGLIPDIVSTYKPKILVYEGYKKY

SEQ ID NO: 37434 - protein, 85 aa, unidentified
  REGION 1..85: note = Description of Unknown:cds_NZ_WFIY01000004.1_cds_WP_155864021.1_1952 target sequence
LENPDKINKTARQVLGELVDIYGEVKPINGDILEVKGGEEIKIGKNTMKIFYTPGHARHHISVMIGDMLYTGDSAGGRYNGIPFP

SEQ ID NO: 37435 - protein, 85 aa, unidentified
  REGION 1..85: note = Description of Unknown:cds_NZ_WFIY01000004.1_cds_WP_155864021.1_1952 target sequence
TTPPPLDLEKYISSLEFQISLKPRLIGLSHGGFTSSSHLLEHLEQIKNNQHVDINLGGTQGEILRRHLEINYKGLEEARLKAVGN

SEQ ID NO: 37436 - protein, 84 aa, unidentified
  REGION 1..84: note = Description of Unknown:cds_NZ_WFIY01000004.1_cds_WP_155864021.1_1952 target sequence
EKYISSLEFQISLKPRLIGLSHGGFTSSSHLLEHLEQIKNNQHVDINLGGTQGEILRRHLEINYKGLEEARLKAVGNKGLSQKP

SEQ ID NO: 37437 - protein, 85 aa, unidentified
  REGION 1..85: note = Description of Unknown:cds_NZ_WFIY01000004.1_cds_WP_155864021.1_1952 target sequence
KVVMIDGGVANSIMDVSFLDKLDYLVITHLHIDHIGLIPDIVSTYKPKILVYEGYKKYLENPDKINKTARQVLGELVDIYGEVKP

SEQ ID NO: 37438 - protein, 85 aa, unidentified
  REGION 1..85: note = Description of Unknown:cds_NZ_WFIY01000004.1_cds_WP_155864021.1_1952 target sequence
INGDILEVKGGEEIKIGKNTMKIFYTPGHARHHISVMIGDMLYTGDSAGGRYNGIPFPTTPPPLDLEKYISSLEFQISLKPRLIG

SEQ ID NO: 37439 - protein, 85 aa, unidentified
  REGION 1..85: note = Description of Unknown:cds_NC_035460.1_cds_YP_009408125.1_174 target sequence
VKYLFFLTLVINYVKCTPCSFCLSNKIVTVHMNPVNKLEEVYFEGDTVEFKCVLGFSSYGKKLTTTCTKNKWTPFTTTCKAKLCS

SEQ ID NO: 37440 - protein, 85 aa, unidentified
  REGION 1..85: note = Description of Unknown:cds_NC_035460.1_cds_YP_009408125.1_174 target sequence
RPIEPENGYINNYEGCKFGDIISYACNDGFILIGYSTNKCIVTSDNKLNWEHKTPLCVRSFCKPPKHIENGYYTPQQEEYIENSV

SEQ ID NO: 37441 - protein, 85 aa, unidentified
  REGION 1..85: note = Description of Unknown:cds_NC_035460.1_cds_YP_009408125.1_174 target sequence
VTYICENKYTLVGHKQNVCQNAKWLYNSPMCKIVKCPYPYINNGIINTPGTKFTLNDKITYFCKNGYTSNSKYTSSICNENNKWL

SEQ ID NO: 37442 - protein, 84 aa, unidentified
  REGION 1..84: note = Description of Unknown:cds_NC_035460.1_cds_YP_009408125.1_174 target sequence
YTLVGHKQNVCQNAKWLYNSPMCKIVKCPYPYINNGIINTPGTKFTLNDKITYFCKNGYTSNSKYTSSICNENNKWLPPLPTCL

SEQ ID NO: 37443 - protein, 85 aa, unidentified
  REGION 1..85: note = Description of Unknown:cds_NC_035460.1_cds_YP_009408125.1_174 target sequence
VTVHMNPVNKLEEVYFEGDTVEFKCVLGFSSYGKKLTTTCTKNKWTPFTTTCKAKLCSRPIEPENGYINNYEGCKFGDIISYACN

SEQ ID NO: 37444 - protein, 85 aa, unidentified
  REGION 1..85: note = Description of Unknown:cds_NC_035460.1_cds_YP_009408125.1_174 target sequence
DGFILIGYSTNKCIVTSDNKLNWEHKTPLCVRSFCKPPKHIENGYYTPQQEEYIENSVVTYICENKYTLVGHKQNVCQNAKWLYN

SEQ ID NO: 37445 - protein, 85 aa, unidentified
  REGION 1..85: note = Description of Unknown:hvTR_Q89478 target sequence
YVCCGRGEKLQPVGYVRNRAAPSDLNSLRVLLIARDGAMYVHHMRTARLCRLASSVTEFARRGLQRESEVYEDDVSLPDRRVGSA

SEQ ID NO: 37446 - protein, 85 aa, unidentified
  REGION 1..85: note = Description of Unknown:hvTR_Q89478 target sequence
TAIHLFDVITQAADVHDLLTVAGLCQTHTGVSCQLWYTDHDPHTVAGAARFTLTVARQQYRLWPNARRKLLQHLHPDHPLGLWLL

SEQ ID NO: 37447 - protein, 85 aa, unidentified
  REGION 1..85: note = Description of Unknown:hvTR_Q89478 target sequence
CAVLTYDAKETNRAVPPVTPGAETVWVIVTGRGAILGFWPESAKMCRLASSMKGLWKNGARALKGHWTYAAPGRHRAGEAWPLCA

SEQ ID NO: 37448 - protein, 84 aa, unidentified
  REGION 1..84: note = Description of Unknown:hvTR_Q89478 target sequence
AKETNRAVPPVTPGAETVWVIVTGRGAILGFWPESAKMCRLASSMKGLWKNGARALKGHWTYAAPGRHRAGEAWPLCAHYQSPR

SEQ ID NO: 37449 - protein, 85 aa, unidentified
  REGION 1..85: note = Description of Unknown:hvTR_Q89478 target sequence
LRVLLIARDGAMYVHHMRTARLCRLASSVTEFARRGLQRESEVYEDDVSLPDRRVGSATAIHLFDVITQAADVHDLLTVAGLCQT

SEQ ID NO: 37450 - protein, 85 aa, unidentified
  REGION 1..85: note = Description of Unknown:hvTR_Q89478 target sequence
HTGVSCQLWYTDHDPHTVAGAARFTLTVARQQYRLWPNARRKLLQHLHPDHPLGLWLLCAVLTYDAKETNRAVPPVTPGAETVWV

SEQ ID NO: 37451 - protein, 85 aa, unidentified
  REGION 1..85: note = Description of Unknown:cds_NZ_WFIY01000004.1_cds_WP_155862577.1_349 target sequence
IYNKHPLPREGDILIATVKQVFDYGSYVTLDEYGNLQAFLPWSEISTRWVKNIRDVIKEGRKIVVKVIRVDRKKGTVDVSLKKVN

SEQ ID NO: 37452 - protein, 85 aa, unidentified
  REGION 1..85: note = Description of Unknown:cds_NZ_WFIY01000004.1_cds_WP_155862577.1_349 target sequence
DDERRKKNAEWKKLQKTDKILEIVSQKLGKTEKEAWEQVAWKLESKYGDVFDALQKAVKEGDKILRDAGVPEIWIKPLIEEASKH

SEQ ID NO: 37453 - protein, 85 aa, unidentified
  REGION 1..85: note = Description of Unknown:cds_NZ_WFIY01000004.1_cds_WP_155862577.1_349 target sequence
SEEKKVKESKVVVVKTLDPNGVEKIRSLFGKAVEGEEDTDFTIKIYTIGAPRYRVDVTGTEPKAVAERLNSIIEKLQEIAKEEGV

SEQ ID NO: 37454 - protein, 84 aa, unidentified
  REGION 1..84: note = Description of Unknown:cds_NZ_WFIY01000004.1_cds_WP_155862577.1_349 target sequence
ESKVVVVKTLDPNGVEKIRSLFGKAVEGEEDTDFTIKIYTIGAPRYRVDVTGTEPKAVAERLNSIIEKLQEIAKEEGVEISVQK

SEQ ID NO: 37455 - protein, 85 aa, unidentified
  REGION 1..85: note = Description of Unknown:cds_NZ_WFIY01000004.1_cds_WP_155862577.1_349 target sequence
VTLDEYGNLQAFLPWSEISTRWVKNIRDVIKEGRKIVVKVIRVDRKKGTVDVSLKKVNDDERRKKNAEWKKLQKTDKILEIVSQK

SEQ ID NO: 37456 - protein, 85 aa, unidentified
  REGION 1..85: note = Description of Unknown:cds_NZ_WFIY01000004.1_cds_WP_155862577.1_349 target sequence
LGKTEKEAWEQVAWKLESKYGDVFDALQKAVKEGDKILRDAGVPEIWIKPLIEEASKHSEEKKVKESKVVVVKTLDPNGVEKIRS

SEQ ID NO: 37457 - protein, 85 aa, unidentified
  REGION 1..85: note = Description of Unknown:cds_NZ_WFIY01000004.1_cds_WP_155862878.1_718 target sequence
IVVKAGGRVIKNSLQNLIDSIISYNGKLIFVHGGGDIVTEYSKRMGIEPRFVTSPEGIRSRYTTREELDVYVMAMALINKNIVTA

SEQ ID NO: 37458 - protein, 85 aa, unidentified
  REGION 1..85: note = Description of Unknown:cds_NZ_WFIY01000004.1_cds_WP_155862878.1_718 target sequence
LSTRGKLAIGISGADSAIVKANRKKRIMIIDDRGKKRIIDGGYTGKIYEVNANLLNTISNVFDYIILSPIAIDISEGIMLNVDGD

SEQ ID NO: 37459 - protein, 85 aa, unidentified
  REGION 1..85: note = Description of Unknown:cds_NZ_WFIY01000004.1_cds_WP_155862878.1_718 target sequence
QMAFSVASAIKADTLVILTDVKGVLQDGEVVKKISKYEAEEFAKKVGAGMNRKILMAAEAVKNGVNKVIISSGLEKDAINKALSG

SEQ ID NO: 37460 - protein, 84 aa, unidentified
  REGION 1..84: note = Description of Unknown:cds_NZ_WFIY01000004.1_cds_WP_155862878.1_718 target sequence
SAIKADTLVILTDVKGVLQDGEVVKKISKYEAEEFAKKVGAGMNRKILMAAEAVKNGVNKVIISSGLEKDAINKALSGEGTVIE

SEQ ID NO: 37461 - protein, 85 aa, unidentified
  REGION 1..85: note = Description of Unknown:cds_NZ_WFIY01000004.1_cds_WP_155862878.1_718 target sequence
LIFVHGGGDIVTEYSKRMGIEPRFVTSPEGIRSRYTTREELDVYVMAMALINKNIVTALSTRGKLAIGISGADSAIVKANRKKRI

SEQ ID NO: 37462 - protein, 85 aa, unidentified
  REGION 1..85: note = Description of Unknown:cds_NZ_WFIY01000004.1_cds_WP_155862878.1_718 target sequence
MIIDDRGKKRIIDGGYTGKIYEVNANLLNTISNVFDYIILSPIAIDISEGIMLNVDGDQMAFSVASAIKADTLVILTDVKGVLQD

SEQ ID NO: 37463 - protein, 85 aa, unidentified
  REGION 1..85: note = Description of Unknown:cds_NZ_WFIY01000004.1_cds_WP_155862887.1_731 target sequence
LFNIGEMLFLASSLGALTYFIGTLIMGLPIPIYGVKRWGPKLILDGLYVTALINAYGSILTLSSMIQSYLGATWCNYFKWVCCLI

SEQ ID NO: 37464 - protein, 85 aa, unidentified
  REGION 1..85: note = Description of Unknown:cds_NZ_WFIY01000004.1_cds_WP_155862887.1_731 target sequence
IQEIALNTFLRTIYGIIAVASGPAAGVLLSEVGVLFSLFGSLITTSETLLIIARIVYEYSQVFVALGILLISIPFRVGRGVGGSL

SEQ ID NO: 37465 - protein, 85 aa, unidentified
  REGION 1..85: note = Description of Unknown:cds_NZ_WFIY01000004.1_cds_WP_155862887.1_731 target sequence
IGFSIVFYAGLPYLPNFLTSLGVNVLQGLNNIPNNNVCCIIIYLMTKVVPLLIEGTIVFPIAYMIILSGISVGVGAAISGYSSRL

SEQ ID NO: 37466 - protein, 84 aa, unidentified
  REGION 1..84: note = Description of Unknown:cds_NZ_WFIY01000004.1_cds_WP_155862887.1_731 target sequence
AGLPYLPNFLTSLGVNVLQGLNNIPNNNVCCIIIYLMTKVVPLLIEGTIVFPIAYMIILSGISVGVGAAISGYSSRLPIPIEIF

SEQ ID NO: 37467 - protein, 85 aa, unidentified
  REGION 1..85: note = Description of Unknown:cds_NZ_WFIY01000004.1_cds_WP_155862887.1_731 target sequence
LPIPIYGVKRWGPKLILDGLYVTALINAYGSILTLSSMIQSYLGATWCNYFKWVCCLIIQEIALNTFLRTIYGIIAVASGPAAGV

SEQ ID NO: 37468 - protein, 85 aa, unidentified
  REGION 1..85: note = Description of Unknown:cds_NZ_WFIY01000004.1_cds_WP_155862887.1_731 target sequence
LLSEVGVLFSLFGSLITTSETLLIIARIVYEYSQVFVALGILLISIPFRVGRGVGGSLIGFSIVFYAGLPYLPNFLTSLGVNVLQ

SEQ ID NO: 37469 - protein, 85 aa, unidentified
  REGION 1..85: note = Description of Unknown:cds_NC_029316.1_cds_YP_009230260.1_7 target sequence
SEIVSRWDVSEDPLVASLKLLYSLNIVSANDLTKLCDVLGLDANQIISSKYLSVTTLIGKIEGFTPIVIVANTKQFEILIFSLRA

SEQ ID NO: 37470 - protein, 85 aa, unidentified
  REGION 1..85: note = Description of Unknown:cds_NC_029316.1_cds_YP_009230260.1_7 target sequence
NKINYKIYDGSFHNDVTLITPAQFLNAIANLNIPFKKFTIVNFFSSSSFDSYLFAVTNYSYYYKIALSNYLPTNGDVPSSWLAHY

SEQ ID NO: 37471 - protein, 85 aa, unidentified
  REGION 1..85: note = Description of Unknown:cds_NC_029316.1_cds_YP_009230260.1_7 target sequence
LKMQSRYVSIPQELLQRFNNDTDWWKYPWIRSNSNNGVDIKKLKDVSIRYGIPLQLLKSISRSRDYAERMLKLNGYSEDVINKVI

SEQ ID NO: 37472 - protein, 84 aa, unidentified
  REGION 1..84: note = Description of Unknown:cds_NC_029316.1_cds_YP_009230260.1_7 target sequence
VSIPQELLQRFNNDTDWWKYPWIRSNSNNGVDIKKLKDVSIRYGIPLQLLKSISRSRDYAERMLKLNGYSEDVINKVIAELFPS

SEQ ID NO: 37473 - protein, 85 aa, unidentified
  REGION 1..85: note = Description of Unknown:cds_NC_029316.1_cds_YP_009230260.1_7 target sequence
SANDLTKLCDVLGLDANQIISSKYLSVTTLIGKIEGFTPIVIVANTKQFEILIFSLRANKINYKIYDGSFHNDVTLITPAQFLNA

SEQ ID NO: 37474 - protein, 85 aa, unidentified
  REGION 1..85: note = Description of Unknown:cds_NC_029316.1_cds_YP_009230260.1_7 target sequence
IANLNIPFKKFTIVNFFSSSSFDSYLFAVTNYSYYYKIALSNYLPTNGDVPSSWLAHYLKMQSRYVSIPQELLQRFNNDTDWWKY

SEQ ID NO: 37475 - protein, 85 aa, unidentified
  REGION 1..85: note = Description of Unknown:cds_NC_030656.1_cds_YP_009268813.1_98 target sequence
DLRSKFAETLKKAQMVTFPQSSVLYTLNQPPPVPPKTCPSMNIDAPHNATEQYYQSLLRSNQQPSCPAPSTSQRGVRVLPPLPPT

SEQ ID NO: 37476 - protein, 85 aa, unidentified
  REGION 1..85: note = Description of Unknown:cds_NC_030656.1_cds_YP_009268813.1_98 target sequence
YDDAKCMPTPNTQPTCPMQPPTCPINPSLPPAPPLPSPRQFPQNPLPLLPQPFSQDNIYDIPVCRTTVEKDVTVSEQAKNTVDNI

SEQ ID NO: 37477 - protein, 85 aa, unidentified
  REGION 1..85: note = Description of Unknown:cds_NC_030656.1_cds_YP_009268813.1_98 target sequence
KTSIKQSSAEAKDNPIVYPSSVESPGAIAAKPLTPVDPPQSVKDLTSAMRTIESSNKVKQVDISGLHAALMNRMRSLNPDLKPDD

SEQ ID NO: 37478 - protein, 84 aa, unidentified
  REGION 1..84: note = Description of Unknown:cds_NC_030656.1_cds_YP_009268813.1_98 target sequence
SAEAKDNPIVYPSSVESPGAIAAKPLTPVDPPQSVKDLTSAMRTIESSNKVKQVDISGLHAALMNRMRSLNPDLKPDDDNDDFN

SEQ ID NO: 37479 - protein, 85 aa, unidentified
  REGION 1..85: note = Description of Unknown:cds_NC_030656.1_cds_YP_009268813.1_98 target sequence
NQPPPVPPKTCPSMNIDAPHNATEQYYQSLLRSNQQPSCPAPSTSQRGVRVLPPLPPTYDDAKCMPTPNTQPTCPMQPPTCPINP

SEQ ID NO: 37480 - protein, 85 aa, unidentified
  REGION 1..85: note = Description of Unknown:cds_NC_030656.1_cds_YP_009268813.1_98 target sequence
SLPPAPPLPSPRQFPQNPLPLLPQPFSQDNIYDIPVCRTTVEKDVTVSEQAKNTVDNIKTSIKQSSAEAKDNPIVYPSSVESPGA

SEQ ID NO: 37481 - protein, 85 aa, unidentified
  REGION 1..85: note = Description of Unknown:hvTR_P03256.1 target sequence
RHLRFLPQEIISSETGIEILEFVVNTLMGDDPEPPVQPFDPPTLHDLYDLEVDGPEDPNEGAVNGFFTDSMLLAADEGLDINPPP

SEQ ID NO: 37482 - protein, 85 aa, unidentified
  REGION 1..85: note = Description of Unknown:hvTR_P03256.1 target sequence
ETLVTPGVVVESGRGGKKLPDLGAAEMDLRCYEEGFPPSDDEDGETEQSIHTAVNEGVKAASDVFKLDCPELPGHGCKSCEFHRN

SEQ ID NO: 37483 - protein, 85 aa, unidentified
  REGION 1..85: note = Description of Unknown:hvTR_P03256.1 target sequence
NTGMKELLCSLCYMRMHCHFIYSPVSDDESPSPDSTTSPPEIQAPAPANVCKPIPVKPKPGKRPAVDKLEDLLEGGDGPLDLSTR

SEQ ID NO: 37484 - protein, 84 aa, unidentified
  REGION 1..84: note = Description of Unknown:hvTR_P03256.1 target sequence
LLCSLCYMRMHCHFIYSPVSDDESPSPDSTTSPPEIQAPAPANVCKPIPVKPKPGKRPAVDKLEDLLEGGDGPLDLSTRKLPRQ

SEQ ID NO: 37485 - protein, 85 aa, unidentified
  REGION 1..85: note = Description of Unknown:hvTR_P03256.1 target sequence
MGDDPEPPVQPFDPPTLHDLYDLEVDGPEDPNEGAVNGFFTDSMLLAADEGLDINPPPETLVTPGVVVESGRGGKKLPDLGAAEM

SEQ ID NO: 37486 - protein, 85 aa, unidentified
  REGION 1..85: note = Description of Unknown:hvTR_P03256.1 target sequence
DLRCYEEGFPPSDDEDGETEQSIHTAVNEGVKAASDVFKLDCPELPGHGCKSCEFHRNNTGMKELLCSLCYMRMHCHFIYSPVSD

SEQ ID NO: 37487 - protein, 85 aa, unidentified
  REGION 1..85: note = Description of Unknown:cds_NZ_WFIY01000004.1_cds_WP_155862372.1_106 target sequence
DELDKKILLYLFRDGRISIRSLASLLNLTPPTVLYRIKNLEKEEILEGFQLLVNPNFYGKYYSFISFKNLMDMDDKWVFLKFKCV

SEQ ID NO: 37488 - protein, 85 aa, unidentified
  REGION 1..85: note = Description of Unknown:cds_NZ_WFIY01000004.1_cds_WP_155862372.1_106 target sequence
EWLNVYGIVGESTAEIEDRISFMRKTLGEPVMQYTPPQQPLPPKELDIKIVKALQEDPRASTADISKELGIDSKIVIKRLKIMKN

SEQ ID NO: 37489 - protein, 85 aa, unidentified
  REGION 1..85: note = Description of Unknown:cds_NZ_WFIY01000004.1_cds_WP_155862372.1_106 target sequence
RGYISVIPKINIPKSGMSVFSMFSKRIPEIRDILSHCRVLEIVDKYNVGIEVCLTENIENVRNYVRAVREKDKEADVMIIYDIIT

SEQ ID NO: 37490 - protein, 84 aa, unidentified
  REGION 1..84: note = Description of Unknown:cds_NZ_WFIY01000004.1_cds_WP_155862372.1_106 target sequence
IPKINIPKSGMSVFSMFSKRIPEIRDILSHCRVLEIVDKYNVGIEVCLTENIENVRNYVRAVREKDKEADVMIIYDIITKGIVE

SEQ ID NO: 37491 - protein, 85 aa, unidentified
  REGION 1..85: note = Description of Unknown:cds_NZ_WFIY01000004.1_cds_WP_155862372.1_106 target sequence
LTPPTVLYRIKNLEKEEILEGFQLLVNPNFYGKYYSFISFKNLMDMDDKWVFLKFKCVEWLNVYGIVGESTAEIEDRISFMRKTL

SEQ ID NO: 37492 - protein, 85 aa, unidentified
  REGION 1..85: note = Description of Unknown:cds_NZ_WFIY01000004.1_cds_WP_155862372.1_106 target sequence
GEPVMQYTPPQQPLPPKELDIKIVKALQEDPRASTADISKELGIDSKIVIKRLKIMKNRGYISVIPKINIPKSGMSVFSMFSKRI

SEQ ID NO: 37493 - protein, 85 aa, unidentified
  REGION 1..85: note = Description of Unknown:cds_NZ_WFIY01000004.1_cds_WP_155864158.1_2112 target sequence
TYRNEIVVNANRSTVMGVLINPFFFAGIVGHIGILRVKDKLKGEYVTPEYLNSPENDFEVAYVFGTPENYRVTLGYMRGPEISSG

SEQ ID NO: 37494 - protein, 85 aa, unidentified
  REGION 1..85: note = Description of Unknown:cds_NZ_WFIY01000004.1_cds_WP_155864158.1_2112 target sequence
EIKYKGGTFDGKFEWEISFILTPLGDNKTRISFLVKAQYKSSVLSRIFGRSEFDLATHIVEGHFIPFIRFYFKPSEEFELNKVEV

SEQ ID NO: 37495 - protein, 85 aa, unidentified
  REGION 1..85: note = Description of Unknown:cds_NZ_WFIY01000004.1_cds_WP_155864158.1_2112 target sequence
LSEEGDSNKVIGKFKEVIHKLEAGIVKIFGKNLECLVVVLNREIKKASCITGNDIKTGSEALSLLLLYNGELKMKAYELQLEDLI

SEQ ID NO: 37496 - protein, 84 aa, unidentified
  REGION 1..84: note = Description of Unknown:cds_NZ_WFIY01000004.1_cds_WP_155864158.1_2112 target sequence
SNKVIGKFKEVIHKLEAGIVKIFGKNLECLVVVLNREIKKASCITGNDIKTGSEALSLLLLYNGELKMKAYELQLEDLIEKLET

SEQ ID NO: 37497 - protein, 85 aa, unidentified
  REGION 1..85: note = Description of Unknown:cds_NZ_WFIY01000004.1_cds_WP_155864158.1_2112 target sequence
IVGHIGILRVKDKLKGEYVTPEYLNSPENDFEVAYVFGTPENYRVTLGYMRGPEISSGEIKYKGGTFDGKFEWEISFILTPLGDN

SEQ ID NO: 37498 - protein, 85 aa, unidentified
  REGION 1..85: note = Description of Unknown:cds_NZ_WFIY01000004.1_cds_WP_155864158.1_2112 target sequence
KTRISFLVKAQYKSSVLSRIFGRSEFDLATHIVEGHFIPFIRFYFKPSEEFELNKVEVLSEEGDSNKVIGKFKEVIHKLEAGIVK

SEQ ID NO: 37499 - protein, 85 aa, unidentified
  REGION 1..85: note = Description of Unknown:cds_NZ_WFIY01000004.1_cds_WP_155864185.1_2144 target sequence
LRLPALLLLFLSALLLPLFHSSTGVINVYYNGTVTAYLYNVSSINLIGTNVTCIKVEGAKYIVQGNTLIIQGKSAIITYRTTLPK

SEQ ID NO: 37500 - protein, 85 aa, unidentified
  REGION 1..85: note = Description of Unknown:cds_NZ_WFIY01000004.1_cds_WP_155864185.1_2144 target sequence
GVIETEQPENLTVNILIPAGSSITYLYPQPSSFTVVGSLYNITFENTSKVTVLYTYYSQTNLRTSSFFSPEFFILLIVLSDSSLL

SEQ ID NO: 37501 - protein, 85 aa, unidentified
  REGION 1..85: note = Description of Unknown:cds_NZ_WFIY01000004.1_cds_WP_155864185.1_2144 target sequence
FFFLYYIRRNKRTKEEEEIQIGLDERDKVVLDAIKKSGGTSTLSELVKQTNLPKTTVYRRLKRLITIGYVEEVREKGKVRYVLKK

SEQ ID NO: 37502 - protein, 84 aa, unidentified
  REGION 1..84: note = Description of Unknown:cds_NZ_WFIY01000004.1_cds_WP_155864185.1_2144 target sequence
IRRNKRTKEEEEIQIGLDERDKVVLDAIKKSGGTSTLSELVKQTNLPKTTVYRRLKRLITIGYVEEVREKGKVRYVLKKDYVEK

SEQ ID NO: 37503 - protein, 85 aa, unidentified
  REGION 1..85: note = Description of Unknown:cds_NZ_WFIY01000004.1_cds_WP_155864185.1_2144 target sequence
VYYNGTVTAYLYNVSSINLIGTNVTCIKVEGAKYIVQGNTLIIQGKSAIITYRTTLPKGVIETEQPENLTVNILIPAGSSITYLY

SEQ ID NO: 37504 - protein, 85 aa, unidentified
  REGION 1..85: note = Description of Unknown:cds_NZ_WFIY01000004.1_cds_WP_155864185.1_2144 target sequence
PQPSSFTVVGSLYNITFENTSKVTVLYTYYSQTNLRTSSFFSPEFFILLIVLSDSSLLFFFLYYIRRNKRTKEEEEIQIGLDERD

SEQ ID NO: 37505 - protein, 85 aa, unidentified
  REGION 1..85: note = Description of Unknown:cds_NZ_WFIY01000004.1_cds_WP_155864488.1_2265 target sequence
LLSHLTELAIRLRRAFITLFIAFILFFAFGYTTISVSGHVVPIIYPNLFHSFSDELMLFFIHHELPPQLKLLNLNPFDPLYASAY

SEQ ID NO: 37506 - protein, 85 aa, unidentified
  REGION 1..85: note = Description of Unknown:cds_NZ_WFIY01000004.1_cds_WP_155864488.1_2265 target sequence
VSFYMSIFISLPIFLKEFWGFVSPGLYEHEKRLIKYTIVPAILLFVSGSLFAYFIIVPLMMKFVVLYTTALGVEPTLSLRAFVST

SEQ ID NO: 37507 - protein, 85 aa, unidentified
  REGION 1..85: note = Description of Unknown:cds_NZ_WFIY01000004.1_cds_WP_155864488.1_2265 target sequence
VVSLMMVTGIAFEYPLVMASLTYVKVVKADSWRKNWRWGVLGAFIIAWIISPGTTGGVIETTIGVILSVLYFVGVASAKIIEKRS

SEQ ID NO: 37508 - protein, 84 aa, unidentified
  REGION 1..84: note = Description of Unknown:cds_NZ_WFIY01000004.1_cds_WP_155864488.1_2265 target sequence
TGIAFEYPLVMASLTYVKVVKADSWRKNWRWGVLGAFIIAWIISPGTTGGVIETTIGVILSVLYFVGVASAKIIEKRSLRNTKI

SEQ ID NO: 37509 - protein, 85 aa, unidentified
  REGION 1..85: note = Description of Unknown:cds_NZ_WFIY01000004.1_cds_WP_155864488.1_2265 target sequence
AFGYTTISVSGHVVPIIYPNLFHSFSDELMLFFIHHELPPQLKLLNLNPFDPLYASAYVSFYMSIFISLPIFLKEFWGFVSPGLY

SEQ ID NO: 37510 - protein, 85 aa, unidentified
  REGION 1..85: note = Description of Unknown:cds_NZ_WFIY01000004.1_cds_WP_155864488.1_2265 target sequence
EHEKRLIKYTIVPAILLFVSGSLFAYFIIVPLMMKFVVLYTTALGVEPTLSLRAFVSTVVSLMMVTGIAFEYPLVMASLTYVKVV

SEQ ID NO: 37511 - protein, 85 aa, unidentified
  REGION 1..85: note = Description of Unknown:cds_NC_035460.1_cds_YP_009408043.1_92 target sequence
TNLHQSKIYSSIIKYNRRLTKTYTWSDNVQRIYATGFNNQLLWCPKRISICAILATTDDKYVACMRKSSFLFTEIIRSRNDFRKR

SEQ ID NO: 37512 - protein, 85 aa, unidentified
  REGION 1..85: note = Description of Unknown:cds_NC_035460.1_cds_YP_009408043.1_92 target sequence
RLFTKYSNFLKKRERKYLSTKLNIDCEELNISEEHNDIIFPGGLPKSGEDAISCLSRELKEEINIDCKDISIDSRFFVHLLIEDL

SEQ ID NO: 37513 - protein, 85 aa, unidentified
  REGION 1..85: note = Description of Unknown:cds_NC_035460.1_cds_YP_009408043.1_92 target sequence
LTDRVFDSILFLGKVMLSSEQILKQFSSNREIKSLVFLDKVGNSVANEIVNYAVTLSKFKCTGSSGCKTDALYKYSKHNIKELNI

SEQ ID NO: 37514 - protein, 84 aa, unidentified
  REGION 1..84: note = Description of Unknown:cds_NC_035460.1_cds_YP_009408043.1_92 target sequence
DSILFLGKVMLSSEQILKQFSSNREIKSLVFLDKVGNSVANEIVNYAVTLSKFKCTGSSGCKTDALYKYSKHNIKELNICQNVH

SEQ ID NO: 37515 - protein, 85 aa, unidentified
  REGION 1..85: note = Description of Unknown:cds_NC_035460.1_cds_YP_009408043.1_92 target sequence
NVQRIYATGFNNQLLWCPKRISICAILATTDDKYVACMRKSSFLFTEIIRSRNDFRKRRLFTKYSNFLKKRERKYLSTKLNIDCE

SEQ ID NO: 37516 - protein, 85 aa, unidentified
  REGION 1..85: note = Description of Unknown:cds_NC_035460.1_cds_YP_009408043.1_92 target sequence
ELNISEEHNDIIFPGGLPKSGEDAISCLSRELKEEINIDCKDISIDSRFFVHLLIEDLLTDRVFDSILFLGKVMLSSEQILKQFS

SEQ ID NO: 37517 - protein, 85 aa, unidentified
  REGION 1..85: note = Description of Unknown:cds_NC_029316.1_cds_YP_009230347.1_94 target sequence
NEKITVILTLRMQKVPTPEELNRSFYKLFHIKTSFKEKPLPSTEEVKKAFYTFINSDLADYMKKYGINNDVITFYTHTERYIKWF

SEQ ID NO: 37518 - protein, 85 aa, unidentified
  REGION 1..85: note = Description of Unknown:cds_NC_029316.1_cds_YP_009230347.1_94 target sequence
NELFNSKNFTIEVKGSIIILKYVLDNENEINVLLLLHHIIDPGYEGTIFTDFGNIRFIASVIAEAIRKYISRDISVSNNFLVKIK

SEQ ID NO: 37519 - protein, 85 aa, unidentified
  REGION 1..85: note = Description of Unknown:cds_NC_029316.1_cds_YP_009230347.1_94 target sequence
EGDLPDEAKELVEQIPKEGGFAVAREGKELRQIPGIPFYRLTIRGNHVTCYVFGFERGFAWYGNPAEEKIREIKEKLRQIMRERG

SEQ ID NO: 37520 - protein, 84 aa, unidentified
  REGION 1..84: note = Description of Unknown:cds_NC_029316.1_cds_YP_009230347.1_94 target sequence
EAKELVEQIPKEGGFAVAREGKELRQIPGIPFYRLTIRGNHVTCYVFGFERGFAWYGNPAEEKIREIKEKLRQIMRERGYIKYV

SEQ ID NO: 37521 - protein, 85 aa, unidentified
  REGION 1..85: note = Description of Unknown:cds_NC_029316.1_cds_YP_009230347.1_94 target sequence
LFHIKTSFKEKPLPSTEEVKKAFYTFINSDLADYMKKYGINNDVITFYTHTERYIKWFNELFNSKNFTIEVKGSIIILKYVLDNE

SEQ ID NO: 37522 - protein, 85 aa, unidentified
  REGION 1..85: note = Description of Unknown:cds_NC_029316.1_cds_YP_009230347.1_94 target sequence
NEINVLLLLHHIIDPGYEGTIFTDFGNIRFIASVIAEAIRKYISRDISVSNNFLVKIKEGDLPDEAKELVEQIPKEGGFAVAREG

SEQ ID NO: 37523 - protein, 85 aa, unidentified
  REGION 1..85: note = Description of Unknown:hvTR_Q05323 target sequence
TLCAVMTRKFSKSQLSLLCETHLRREGLGQDQAEPVLEVYQRLHSDKGGSFEAALWQQWDRQSLIMFITAFLNIALQLPCESSAA

SEQ ID NO: 37524 - protein, 84 aa, unidentified
  REGION 1..84: note = Description of Unknown:hvTR_Q05323 target sequence
MTRKFSKSQLSLLCETHLRREGLGQDQAEPVLEVYQRLHSDKGGSFEAALWQQWDRQSLIMFITAFLNIALQLPCESSAALFQG

SEQ ID NO: 37525 - protein, 85 aa, unidentified
  REGION 1..85: note = Description of Unknown:hvTR_Q76QK3 target sequence
SIRIKIDKLRQIVAYFSEFSEEVSINVDSTDELMYIFAALGGSVNIWAIIPLSASVFYRGAENIVFNLPVSKVKSCLCSFHNDAI

SEQ ID NO: 37526 - protein, 85 aa, unidentified
  REGION 1..85: note = Description of Unknown:hvTR_Q76QK3 target sequence
IDIEPDLENNLVKLSSYHVVSVDCNKELMPIRTDTTICLSIDQKKSYVFNFHKYEEKCCGRTVIHLEWLLGFIKCISQHQHLAIM

SEQ ID NO: 37527 - protein, 85 aa, unidentified
  REGION 1..85: note = Description of Unknown:hvTR_Q76QK3 target sequence
FKDDNIIMKTPGNTDAFSREYSMTECSQELQKFSFKIAISSLNKLRGFKKRVNVFETRIVMDNDDNILGMLFSDRVQSFKINIFM

SEQ ID NO: 37528 - protein, 84 aa, unidentified
  REGION 1..84: note = Description of Unknown:hvTR_Q76QK3 target sequence
IIMKTPGNTDAFSREYSMTECSQELQKFSFKIAISSLNKLRGFKKRVNVFETRIVMDNDDNILGMLFSDRVQSFKINIFMAFLD

SEQ ID NO: 37529 - protein, 85 aa, unidentified
  REGION 1..85: note = Description of Unknown:hvTR_Q76QK3 target sequence
DSTDELMYIFAALGGSVNIWAIIPLSASVFYRGAENIVFNLPVSKVKSCLCSFHNDAIIDIEPDLENNLVKLSSYHVVSVDCNKE

SEQ ID NO: 37530 - protein, 85 aa, unidentified
  REGION 1..85: note = Description of Unknown:hvTR_Q76QK3 target sequence
LMPIRTDTTICLSIDQKKSYVFNFHKYEEKCCGRTVIHLEWLLGFIKCISQHQHLAIMFKDDNIIMKTPGNTDAFSREYSMTECS

SEQ ID NO: 37531 - protein, 85 aa, unidentified
  REGION 1..85: note = Description of Unknown:hvTR_Q98235 target sequence
SVRIKIDKLRQIVTYFSEFSEEVSVNVDARSELMYIFSTLGGAVNIWAIVPLNANVFYDGGENCVFNIPVLKIKSCLCSFHNDAV

SEQ ID NO: 37532 - protein, 85 aa, unidentified
  REGION 1..85: note = Description of Unknown:hvTR_Q98235 target sequence
VTIEPDLQNDAVRLSSDHMVSVDCNHEPIPHRTGTVISLGIDQKKSYIFNFQRYEEKCCGRTVIHLELLLGFIKCISQYQYLSIG

SEQ ID NO: 37533 - protein, 85 aa, unidentified
  REGION 1..85: note = Description of Unknown:hvTR_Q98235 target sequence
FADKNLVLKTPGTRDTFVRRYSMTEWSPALQAYSFKIAIFSLNKLRGFKKKVVMFETKIVMDADDNILGLLFRDRIGTYRVNVFM

SEQ ID NO: 37534 - protein, 84 aa, unidentified
  REGION 1..84: note = Description of Unknown:hvTR_Q98235 target sequence
LVLKTPGTRDTFVRRYSMTEWSPALQAYSFKIAIFSLNKLRGFKKKVVMFETKIVMDADDNILGLLFRDRIGTYRVNVFMAFQD

SEQ ID NO: 37535 - protein, 85 aa, unidentified
  REGION 1..85: note = Description of Unknown:hvTR_Q98235 target sequence
DARSELMYIFSTLGGAVNIWAIVPLNANVFYDGGENCVFNIPVLKIKSCLCSFHNDAVVTIEPDLQNDAVRLSSDHMVSVDCNHE

SEQ ID NO: 37536 - protein, 85 aa, unidentified
  REGION 1..85: note = Description of Unknown:hvTR_Q98235 target sequence
PIPHRTGTVISLGIDQKKSYIFNFQRYEEKCCGRTVIHLELLLGFIKCISQYQYLSIGFADKNLVLKTPGTRDTFVRRYSMTEWS

SEQ ID NO: 37537 - protein, 85 aa, unidentified; identical to SEQ ID NO: 37525
  REGION 1..85: note = Description of Unknown:hvTR_Q5IXU7 target sequence

SEQ ID NO: 37538 - protein, 85 aa, unidentified; identical to SEQ ID NO: 37526
  REGION 1..85: note = Description of Unknown:hvTR_Q5IXU7 target sequence

SEQ ID NO: 37539 - protein, 85 aa, unidentified; identical to SEQ ID NO: 37527
  REGION 1..85: note = Description of Unknown:hvTR_Q5IXU7 target sequence

SEQ ID NO: 37540 - protein, 84 aa, unidentified; identical to SEQ ID NO: 37528
  REGION 1..84: note = Description of Unknown:hvTR_Q5IXU7 target sequence

SEQ ID NO: 37541 - protein, 85 aa, unidentified; identical to SEQ ID NO: 37529
  REGION 1..85: note = Description of Unknown:hvTR_Q5IXU7 target sequence

SEQ ID NO: 37542 - protein, 85 aa, unidentified; identical to SEQ ID NO: 37530
  REGION 1..85: note = Description of Unknown:hvTR_Q5IXU7 target sequence

SEQ ID NO: 37543 - protein, 85 aa, unidentified
  REGION 1..85: note = Description of Unknown:hvTR_A7XCH9 target sequence
SLRIKIDKLRQIVAYFSEFSEEVSINVDASSNLMYIFAALGGSVNIWAIVPLSSSVFYEGEKNKVFNLPVSKVKSCLCSFHNDAI

SEQ ID NO: 37544 - protein, 85 aa, unidentified
  REGION 1..85: note = Description of Unknown:hvTR_A7XCH9 target sequence
IEIEPNIDNDLVKLSSYHIVSVNCNKELMPIRTDTCISLKINQKKSYVFNFHKYDEKCCARTVIHLELLLGFIKCISQYQHLTVL

SEQ ID NO: 37545 - protein, 85 aa, unidentified
  REGION 1..85: note = Description of Unknown:hvTR_A7XCH9 target sequence
FKNDNIILKTPGNLDTFSREYSMTECSPDLQKFSFKMAIASLNKLRGFKKRVNVFETKIVMDNDDNVLGMLFSDRLQSFRINIFM

SEQ ID NO: 37546 - protein, 84 aa, unidentified
  REGION 1..84: note = Description of Unknown:hvTR_A7XCH9 target sequence
IILKTPGNLDTFSREYSMTECSPDLQKFSFKMAIASLNKLRGFKKRVNVFETKIVMDNDDNVLGMLFSDRLQSFRINIFMSFQD

SEQ ID NO: 37547 - protein, 85 aa, unidentified
  REGION 1..85: note = Description of Unknown:hvTR_A7XCH9 target sequence
DASSNLMYIFAALGGSVNIWAIVPLSSSVFYEGEKNKVFNLPVSKVKSCLCSFHNDAIIEIEPNIDNDLVKLSSYHIVSVNCNKE

SEQ ID NO: 37548 - protein, 85 aa, unidentified
  REGION 1..85: note = Description of Unknown:hvTR_A7XCH9 target sequence
LMPIRTDTCISLKINQKKSYVFNFHKYDEKCCARTVIHLELLLGFIKCISQYQHLTVLFKNDNIILKTPGNLDTFSREYSMTECS

SEQ ID NO: 37549 - protein, 85 aa, unidentified; identical to SEQ ID NO: 37525
  REGION 1..85: note = Description of Unknown:hvTR_P68613 target sequence

SEQ ID NO: 37550 - protein, 85 aa, unidentified; identical to SEQ ID NO: 37526
  REGION 1..85: note = Description of Unknown:hvTR_P68613 target sequence

SEQ ID NO: 37551 - protein, 85 aa, unidentified; identical to SEQ ID NO: 37527
  REGION 1..85: note = Description of Unknown:hvTR_P68613 target sequence

SEQ ID NO: 37552 - protein, 84 aa, unidentified; identical to SEQ ID NO: 37528
  REGION 1..84: note = Description of Unknown:hvTR_P68613 target sequence

SEQ ID NO: 37553 - protein, 85 aa, unidentified; identical to SEQ ID NO: 37529
  REGION 1..85: note = Description of Unknown:hvTR_P68613 target sequence

SEQ ID NO: 37554 - protein, 85 aa, unidentified; identical to SEQ ID NO: 37530
  REGION 1..85: note = Description of Unknown:hvTR_P68613 target sequence

SEQ ID NO: 37555 - protein, 85 aa, unidentified; identical to SEQ ID NO: 37525
  REGION 1..85: note = Description of Unknown:hvTR_P32990 target sequence

SEQ ID NO: 37556 - protein, 85 aa, unidentified
  REGION 1..85: note = Description of Unknown:hvTR_P32990 target sequence
IDIEPDLENNLVKLSSYHVVSVDCNKELMPIRTDTTICLSIDQKKSYVFNFHKYEEKCCGRTVIHLEWLLGFIKCISQHQHLTIM

SEQ ID NO: 37557 - protein, 85 aa, unidentified; identical to SEQ ID NO: 37527
  REGION 1..85: note = Description of Unknown:hvTR_P32990 target sequence

SEQ ID NO: 37558 - protein, 84 aa, unidentified; identical to SEQ ID NO: 37528
  REGION 1..84: note = Description of Unknown:hvTR_P32990 target sequence

SEQ ID NO: 37559 - protein, 85 aa, unidentified; identical to SEQ ID NO: 37529
  REGION 1..85: note = Description of Unknown:hvTR_P32990 target sequence

SEQ ID NO: 37560 - protein, 85 aa, unidentified
  REGION 1..85: note = Description of Unknown:hvTR_P32990 target sequence
LMPIRTDTTICLSIDQKKSYVFNFHKYEEKCCGRTVIHLEWLLGFIKCISQHQHLTIMFKDDNIIMKTPGNTDAFSREYSMTECS

SEQ ID NO: 37561 - protein, 85 aa, unidentified
  REGION 1..85: note = Description of Unknown:hvTR_Q6TUV5 target sequence
SLRIKIDKLRQIVAYFSEFSEEVSINVDASSNIMYIFAALGGSVNIWAMVPLSSSVFYEGENNKVFNLPVSKVKSCLCSFHNDAI

SEQ ID NO: 37562 - protein, 85 aa, unidentified
  REGION 1..85: note = Description of Unknown:hvTR_Q6TUV5 target sequence
IEIEPNIENDLVKLSSYHIVSVSCNKELMPIRTDTCISLKINQKKSYVFNFHKYDEKCCARTVIHLELLLGFIKCISQYQHLTVL

SEQ ID NO: 37563 - protein, 85 aa, unidentified
  REGION 1..85: note = Description of Unknown:hvTR_Q6TUV5 target sequence
FKNDNIILKTPGNLDTFSREYSMTECSPDLQKFSFKMAIASLNKLRGFKKRVNVFETKIVMDNDDNVLGMLFSDRLQSFKINIFM

SEQ ID NO: 37564 - protein, 84 aa, unidentified
  REGION 1..84: note = Description of Unknown:hvTR_Q6TUV5 target sequence
IILKTPGNLDTFSREYSMTECSPDLQKFSFKMAIASLNKLRGFKKRVNVFETKIVMDNDDNVLGMLFSDRLQSFKINIFMSFQD

SEQ ID NO: 37565 - protein, 85 aa, unidentified
  REGION 1..85: note = Description of Unknown:hvTR_Q6TUV5 target sequence
DASSNIMYIFAALGGSVNIWAMVPLSSSVFYEGENNKVFNLPVSKVKSCLCSFHNDAIIEIEPNIENDLVKLSSYHIVSVSCNKE

SEQ ID NO: 37566 - protein, 85 aa, unidentified; identical to SEQ ID NO: 37548
  REGION 1..85: note = Description of Unknown:hvTR_Q6TUV5 target sequence

SEQ ID NO: 37567 - protein, 85 aa, unidentified; identical to SEQ ID NO: 37543
  REGION 1..85: note = Description of Unknown:hvTR_Q9DHQ5 target sequence

SEQ ID NO: 37568 - protein, 85 aa, unidentified; identical to SEQ ID NO: 37544
  REGION 1..85: note = Description of Unknown:hvTR_Q9DHQ5 target sequence

SEQ ID NO: 37569 - protein, 85 aa, unidentified; identical to SEQ ID NO: 37545
  REGION 1..85: note = Description of Unknown:hvTR_Q9DHQ5 target sequence

SEQ ID NO: 37570 - protein, 84 aa, unidentified; identical to SEQ ID NO: 37546
  REGION 1..84: note = Description of Unknown:hvTR_Q9DHQ5 target sequence

SEQ ID NO: 37571 - protein, 85 aa, unidentified; identical to SEQ ID NO: 37548
  REGION 1..85: note = Description of Unknown:hvTR_Q9DHQ5 target sequence

SEQ ID NO: 37572 - protein, 85 aa, unidentified
  REGION 1..85: note = Description of Unknown:cds_NZ_WFIY01000004.1_cds_WP_155862322.1_47 target sequence
EKKPFIIGMIHLPPLPGSPNNKMSLDEIVNYAITEAQKLQEAGVDGVIVENLGDYPFFKDNIPPITIASMSIIVREVRKNFYFDA

SEQ ID NO: 37573 - protein, 85 aa, unidentified
  REGION 1..85: note = Description of Unknown:cds_NZ_WFIY01000004.1_cds_WP_155862322.1_47 target sequence
VGVNVLRNGCIDAFSIAHVTGSQFIRCNVLIGAYVTDQGIIEGKAAELLRLKKFLNSNVMVFADIHVKHAYPLYNLPIELAAQDL

SEQ ID NO: 37574 - protein, 85 aa, unidentified
  REGION 1..85: note = Description of Unknown:cds_NZ_WFIY01000004.1_cds_WP_155862322.1_47 target sequence
AERGGADAVIVSGPRSSIPPSADTVKKVKASVNLPVIVGSGISLENFKEFCKIADGLIIGEKDFKEGGAIGGPSKKEAYEYLVKE

SEQ ID NO: 37575 - protein, 84 aa, unidentified
  REGION 1..84: note = Description of Unknown:cds_NZ_WFIY01000004.1_cds_WP_155862322.1_47 target sequence
ADAVIVSGPRSSIPPSADTVKKVKASVNLPVIVGSGISLENFKEFCKIADGLIIGEKDFKEGGAIGGPSKKEAYEYLVKECRQK

SEQ ID NO: 37576 - protein, 85 aa, unidentified
  REGION 1..85: note = Description of Unknown:cds_NZ_WFIY01000004.1_cds_WP_155862322.1_47 target sequence
IVNYAITEAQKLQEAGVDGVIVENLGDYPFFKDNIPPITIASMSIIVREVRKNFYFDAVGVNVLRNGCIDAFSIAHVTGSQFIRC

SEQ ID NO: 37577 - protein, 85 aa, unidentified
  REGION 1..85: note = Description of Unknown:cds_NZ_WFIY01000004.1_cds_WP_155862322.1_47 target sequence
NVLIGAYVTDQGIIEGKAAELLRLKKFLNSNVMVFADIHVKHAYPLYNLPIELAAQDLAERGGADAVIVSGPRSSIPPSADTVKK

SEQ ID NO: 37578 - protein, 85 aa, unidentified
  REGION 1..85: note = Description of Unknown:cds_NZ_WFIY01000004.1_cds_WP_155862607.1_384 target sequence
QAYGGVSIVNAIPSWYGSSMAVNLKVNVEITKGKYNGGSKLISTIITYLKEKFNLEDFDVKISSEIPQESGLKSSSAVSTALIGE

SEQ ID NO: 37579 - protein, 85 aa, unidentified
  REGION 1..85: note = Description of Unknown:cds_NZ_WFIY01000004.1_cds_WP_155862607.1_384 target sequence
VKRKFGLNIDVVKYSAILSILAGVSYTGALDDAVSAYYGGISYTYNKEFKIIKKSNPPLDISIIILPKGGRGKVNLNKLRSYELI

SEQ ID NO: 37580 - protein, 85 aa, unidentified
  REGION 1..85: note = Description of Unknown:cds_NZ_WFIY01000004.1_cds_WP_155862607.1_384 target sequence
FYEIFKLSLSDPITAMKYNGILVGEILGYDLTPVKKALEKGALASGISGNGPSIFAVTKEGEEGPIIDEFNLYGKVILTKAVGLD

SEQ ID NO: 37581 - protein, 84 aa, unidentified
  REGION 1..84: note = Description of Unknown:cds_NZ_WFIY01000004.1_cds_WP_155862607.1_384 target sequence
KLSLSDPITAMKYNGILVGEILGYDLTPVKKALEKGALASGISGNGPSIFAVTKEGEEGPIIDEFNLYGKVILTKAVGLDSEDK

SEQ ID NO: 37582 - protein, 85 aa, unidentified
  REGION 1..85: note = Description of Unknown:cds_NZ_WFIY01000004.1_cds_WP_155862607.1_384 target sequence
VEITKGKYNGGSKLISTIITYLKEKFNLEDFDVKISSEIPQESGLKSSSAVSTALIGEVKRKFGLNIDVVKYSAILSILAGVSYT

SEQ ID NO: 37583 - protein, 85 aa, unidentified
  REGION 1..85: note = Description of Unknown:cds_NZ_WFIY01000004.1_cds_WP_155862607.1_384 target sequence
GALDDAVSAYYGGISYTYNKEFKIIKKSNPPLDISIIILPKGGRGKVNLNKLRSYELIFYEIFKLSLSDPITAMKYNGILVGEIL

SEQ ID NO: 37584 - protein, 85 aa, unidentified
  REGION 1..85: note = Description of Unknown:cds_NZ_WFIY01000004.1_cds_WP_155862612.1_391 target sequence
KVEIFTHKNCTECNLLLEYLDQKGLLGRVQIIDTELYPFLALERGVISTPSVFIDGKLVYAGTVDFQEFEKLLQGEKVIKKINKD

SEQ ID NO: 37585 - protein, 85 aa, unidentified
  REGION 1..85: note = Description of Unknown:cds_NZ_WFIY01000004.1_cds_WP_155862612.1_391 target sequence
ELVDKLMYGIVDSFAATAWLYVNLDFDSFMAQKDFVMAVTGLVFSEDAEELYNYLRNLMIKNGLEYVKKWEDKMLRNISSNFVRE

SEQ ID NO: 37586 - protein, 85 aa, unidentified
  REGION 1..85: note = Description of Unknown:cds_NZ_WFIY01000004.1_cds_WP_155862612.1_391 target sequence
IYWLYGSKLSLEQIKAKYPLEVFAHWLMVRGGSTGRVGLRIHPLSEKDTMERISKAYMYMINNYDQLWEKVEKEQKSLKSMEVER

SEQ ID NO: 37587 - protein, 84 aa, unidentified
  REGION 1..84: note = Description of Unknown:cds_NZ_WFIY01000004.1_cds_WP_155862612.1_391 target sequence
GSKLSLEQIKAKYPLEVFAHWLMVRGGSTGRVGLRIHPLSEKDTMERISKAYMYMINNYDQLWEKVEKEQKSLKSMEVERKAIL

SEQ ID NO: 37588 - protein, 85 aa, unidentified
  REGION 1..85: note = Description of Unknown:cds_NZ_WFIY01000004.1_cds_WP_155862612.1_391 target sequence
RVQIIDTELYPFLALERGVISTPSVFIDGKLVYAGTVDFQEFEKLLQGEKVIKKINKDELVDKLMYGIVDSFAATAWLYVNLDFD

SEQ ID NO: 37589 - protein, 85 aa, unidentified
  REGION 1..85: note = Description of Unknown:cds_NZ_WFIY01000004.1_cds_WP_155862612.1_391 target sequence
SFMAQKDFVMAVTGLVFSEDAEELYNYLRNLMIKNGLEYVKKWEDKMLRNISSNFVREIYWLYGSKLSLEQIKAKYPLEVFAHWL

SEQ ID NO: 37590 - protein, 85 aa, unidentified
  REGION 1..85: note = Description of Unknown:cds_NZ_WFIY01000004.1_cds_WP_155863052.1_949 target sequence
IDVIKKEGNFISLSLDGYPLEFVNAIRRACMLYVPVMAVDDVYIIENNSPLYDEILAHRLGLIPFSSDEAIDHYRPPEECANCQE

SEQ ID NO: 37591 - protein, 85 aa, unidentified
  REGION 1..85: note = Description of Unknown:cds_NZ_WFIY01000004.1_cds_WP_155863052.1_949 target sequence
NCDGCFSKIYLDVEAKDSEVMVYSKDIKSDDPAVVPISKDIPIVLLGKNQKVSLEARLRLGYGIEHAKFNPVTIAVLRYYPHIEL

SEQ ID NO: 37592 - protein, 85 aa, unidentified
  REGION 1..85: note = Description of Unknown:cds_NZ_WFIY01000004.1_cds_WP_155863052.1_949 target sequence
KDDSCVKAADVCPEKVFAVKDGKIVIANEIACTLCEECLRYCEGIKISSVENKYILEIESVGSLKPERILLEAGKSIVRKLEELK

SEQ ID NO: 37593 - protein, 84 aa, unidentified
  REGION 1..84: note = Description of Unknown:cds_NZ_WFIY01000004.1_cds_WP_155863052.1_949 target sequence
VKAADVCPEKVFAVKDGKIVIANEIACTLCEECLRYCEGIKISSVENKYILEIESVGSLKPERILLEAGKSIVRKLEELKKVIS

SEQ ID NO: 37594 - protein, 85 aa, unidentified
  REGION 1..85: note = Description of Unknown:cds_NZ_WFIY01000004.1_cds_WP_155863052.1_949 target sequence
RACMLYVPVMAVDDVYIIENNSPLYDEILAHRLGLIPFSSDEAIDHYRPPEECANCQENCDGCFSKIYLDVEAKDSEVMVYSKDI

SEQ ID NO: 37595 - protein, 85 aa, unidentified
  REGION 1..85: note = Description of Unknown:cds_NZ_WFIY01000004.1_cds_WP_155863052.1_949 target sequence
KSDDPAVVPISKDIPIVLLGKNQKVSLEARLRLGYGIEHAKFNPVTIAVLRYYPHIELKDDSCVKAADVCPEKVFAVKDGKIVIA

SEQ ID NO: 37596 - protein, 85 aa, unidentified
  REGION 1..85: note = Description of Unknown:cds_NZ_WFIY01000004.1_cds_WP_155863179.1_1110 target sequence
DLGIKNKRVIVTASSKGIGFATAKRFLEEGAKVVISSHDERNLVKSYEKLKEISDEVYYVKADLTKPDEVKNLIDKGSSILGGLD

SEQ ID NO: 37597 - protein, 85 aa, unidentified
  REGION 1..85: note = Description of Unknown:cds_NZ_WFIY01000004.1_cds_WP_155863179.1_1110 target sequence
VLAYVTGSPKPGNIFELSDEDWYQGFNLLLMSAVVAVRQSAKKMSKGGRIILSTSITLRQPLDNLDLSNVIRLSLAGLIKSAARQ

SEQ ID NO: 37598 - protein, 85 aa, unidentified
  REGION 1..85: note = Description of Unknown:cds_NZ_WFIY01000004.1_cds_WP_155863179.1_1110 target sequence
LAPKGILVNGVMPGWTLTERVDQLVKDKARREGKTEEEALKEIIKDVPLGRPANPEEIANVIIFLASTLSTYVTGAIIPVDGGYL

SEQ ID NO: 37599 - protein, 84 aa, unidentified
  REGION 1..84: note = Description of Unknown:cds_NZ_WFIY01000004.1_cds_WP_155863179.1_1110 target sequence
ILVNGVMPGWTLTERVDQLVKDKARREGKTEEEALKEIIKDVPLGRPANPEEIANVIIFLASTLSTYVTGAIIPVDGGYLKAIF

SEQ ID NO: 37600 - protein, 85 aa, unidentified
  REGION 1..85: note = Description of Unknown:cds_NZ_WFIY01000004.1_cds_WP_155863179.1_1110 target sequence
EEGAKVVISSHDERNLVKSYEKLKEISDEVYYVKADLTKPDEVKNLIDKGSSILGGLDVLAYVTGSPKPGNIFELSDEDWYQGFN

SEQ ID NO: 37601 - protein, 85 aa, unidentified
  REGION 1..85: note = Description of Unknown:cds_NZ_WFIY01000004.1_cds_WP_155863179.1_1110 target sequence
LLLMSAVVAVRQSAKKMSKGGRIILSTSITLRQPLDNLDLSNVIRLSLAGLIKSAARQLAPKGILVNGVMPGWTLTERVDQLVKD

SEQ ID NO: 37602 - protein, 85 aa, unidentified
  REGION 1..85: note = Description of Unknown:cds_NZ_WFIY01000004.1_cds_WP_155863729.1_1594 target sequence
ITEGYFVRYKGVIWAVKGCYHPEGYVVAVPRKFGEKKIKKMSEAIQLVREKFPQLLKYVDEIGFEVPLVPLSEVEVLDPFKVSIP

SEQ ID NO: 37603 - protein, 85 aa, unidentified
  REGION 1..85: note = Description of Unknown:cds_NZ_WFIY01000004.1_cds_WP_155863729.1_1594 target sequence
QFNDFINNFLNVGITGSYLYEGKGNDLDLISFNSKNYYILMDMRKRGITSPLVEVKDNEIEGLSKQDFLRLKVKRVLEGNYKGIP

SEQ ID NO: 37604 - protein, 85 aa, unidentified
  REGION 1..85: note = Description of Unknown:cds_NZ_WFIY01000004.1_cds_WP_155863729.1_1594 target sequence
YTFKIIECEDFGKVIRKGKFEGIIKIDKALKPFSLPVKYLTEEGYVLTSFRTRYTELEEGLRLYIKGTLLSREKFEDLDLDIAQE

SEQ ID NO: 37605 - protein, 84 aa, unidentified
  REGION 1..84: note = Description of Unknown:cds_NZ_WFIY01000004.1_cds_WP_155863729.1_1594 target sequence
IECEDFGKVIRKGKFEGIIKIDKALKPFSLPVKYLTEEGYVLTSFRTRYTELEEGLRLYIKGTLLSREKFEDLDLDIAQEVKIM

SEQ ID NO: 37606 - protein, 85 aa, unidentified
  REGION 1..85: note = Description of Unknown:cds_NZ_WFIY01000004.1_cds_WP_155863729.1_1594 target sequence
AVPRKFGEKKIKKMSEAIQLVREKFPQLLKYVDEIGFEVPLVPLSEVEVLDPFKVSIPQFNDFINNFLNVGITGSYLYEGKGNDL

SEQ ID NO: 37607 - protein, 85 aa, unidentified
  REGION 1..85: note = Description of Unknown:cds_NZ_WFIY01000004.1_cds_WP_155863729.1_1594 target sequence
DLISFNSKNYYILMDMRKRGITSPLVEVKDNEIEGLSKQDFLRLKVKRVLEGNYKGIPYTFKIIECEDFGKVIRKGKFEGIIKID

SEQ ID NO: 37608 - protein, 85 aa, unidentified
  REGION 1..85: note = Description of Unknown:cds_NZ_WFIY01000004.1_cds_WP_155863898.1_1804 target sequence
LINTLRKIGEEATKYLRELHEKKGIDEIIGYHQGDTTRRVDKFSEQYIFDLLDHSGYKFSFVSEESGSIFRENYEYIAIIDPLDG

SEQ ID NO: 37609 - protein, 85 aa, unidentified
  REGION 1..85: note = Description of Unknown:cds_NZ_WFIY01000004.1_cds_WP_155863898.1_1804 target sequence
STNYITGIPWSSVSIAVYKKIEEGKFLPYAGIVAEVFGNNIYSYDENGAYINNVKVDKRKPTDKIVLPYYNKDKINEAYSIISKV

SEQ ID NO: 37610 - protein, 85 aa, unidentified
  REGION 1..85: note = Description of Unknown:cds_NZ_WFIY01000004.1_cds_WP_155863898.1_1804 target sequence
GNGIKIRTLGSASLDMILVCTGRAYLYFDIRGKLRNVDIASSKGFCEKLGIRSLDLKGREVTFSLKYVDVIPEIIVTSDSEFQNS

SEQ ID NO: 37611 - protein, 84 aa, unidentified
  REGION 1..84: note = Description of Unknown:cds_NZ_WFIY01000004.1_cds_WP_155863898.1_1804 target sequence
RTLGSASLDMILVCTGRAYLYFDIRGKLRNVDIASSKGFCEKLGIRSLDLKGREVTFSLKYVDVIPEIIVTSDSEFQNSFSSYS

SEQ ID NO: 37612 - protein, 85 aa, unidentified
  REGION 1..85: note = Description of Unknown:cds_NZ_WFIY01000004.1_cds_WP_155863898.1_1804 target sequence
IIGYHQGDTTRRVDKFSEQYIFDLLDHSGYKFSFVSEESGSIFRENYEYIAIIDPLDGSTNYITGIPWSSVSIAVYKKIEEGKFL

SEQ ID NO: 37613 - protein, 85 aa, unidentified
  REGION 1..85: note = Description of Unknown:cds_NZ_WFIY01000004.1_cds_WP_155863898.1_1804 target sequence
PYAGIVAEVFGNNIYSYDENGAYINNVKVDKRKPTDKIVLPYYNKDKINEAYSIISKVGNGIKIRTLGSASLDMILVCTGRAYLY

SEQ ID NO: 37614 - protein, 85 aa, unidentified
  REGION 1..85: note = Description of Unknown:cds_NZ_WFIY01000004.1_cds_WP_155864463.1_1858 target sequence
LDYDLIISDVDGVIVREGEPIWENIFAIRKLKEEGKKIILVTNNSGFSRVLLSRQLNYLGLEITPNDIITSGLSAAIYMKRNTKV

SEQ ID NO: 37615 - protein, 85 aa, unidentified
  REGION 1..85: note = Description of Unknown:cds_NZ_WFIY01000004.1_cds_WP_155864463.1_1858 target sequence
KSVYVIGEEGLVEEMKNFNFRVLSTEEVEENNPDAVVLGLDRLATYDKLSTGMRCVARGSMFIVTNMDRLWPSKDGLKLGAGALA

SEQ ID NO: 37616 - protein, 85 aa, unidentified
  REGION 1..85: note = Description of Unknown:cds_NZ_WFIY01000004.1_cds_WP_155864463.1_1858 target sequence
SSIIYALKREPDFIAGKPNKWIIQVAMELTGIRDLSKVLVIGDQLETDIKMGNDIGADTVLVLTGISRKEDVEKSNIKPKIVVEN

SEQ ID NO: 37617 - protein, 84 aa, unidentified
  REGION 1..84: note = Description of Unknown:cds_NZ_WFIY01000004.1_cds_WP_155864463.1_1858 target sequence
LKREPDFIAGKPNKWIIQVAMELTGIRDLSKVLVIGDQLETDIKMGNDIGADTVLVLTGISRKEDVEKSNIKPKIVVENLSLLI

SEQ ID NO: 37618 - protein, 85 aa, unidentified
  REGION 1..85: note = Description of Unknown:cds_NZ_WFIY01000004.1_cds_WP_155864463.1_1858 target sequence
IRKLKEEGKKIILVTNNSGFSRVLLSRQLNYLGLEITPNDIITSGLSAAIYMKRNTKVKSVYVIGEEGLVEEMKNFNFRVLSTEE

SEQ ID NO: 37619 - protein, 85 aa, unidentified
  REGION 1..85: note = Description of Unknown:cds_NZ_WFIY01000004.1_cds_WP_155864463.1_1858 target sequence
VEENNPDAVVLGLDRLATYDKLSTGMRCVARGSMFIVTNMDRLWPSKDGLKLGAGALASSIIYALKREPDFIAGKPNKWIIQVAM

SEQ ID NO: 37620 - protein, 85 aa, unidentified
  REGION 1..85: note = Description of Unknown:cds_NZ_WFIY01000004.1_cds_2321 target sequence
VFSIQIPALHGKYLREVFESIRRQTFQDYEVVVVNSGGGVISDIVHEYGFKEVRKDVKLLEARYLANKESRGDYAFLLDETRPLR

SEQ ID NO: 37621 - protein, 85 aa, unidentified
  REGION 1..85: note = Description of Unknown:cds_NZ_WFIY01000004.1_cds_2321 target sequence
KDALEILSKNLHDMVIIGERELGDSFWSMAAQLDKENIMECNSPEAVRGFALPRLFKRELLTASLEKLRENLREKFSQVVFPDHE

SEQ ID NO: 37622 - protein, 85 aa, unidentified
  REGION 1..85: note = Description of Unknown:cds_NZ_WFIY01000004.1_cds_2321 target sequence
LIYYEASGFSNDIFVIKDELVYHYGDFNLKEVVRKYYRYGKSLKILKDTQYSFFLSVKRRNICKGGIYGRFMLYTLYLARAVPFL

SEQ ID NO: 37623 - protein, 84 aa, unidentified
  REGION 1..84: note = Description of Unknown:cds_NZ_WFIY01000004.1_cds_2321 target sequence
SGFSNDIFVIKDELVYHYGDFNLKEVVRKYYRYGKSLKILKDTQYSFFLSVKRRNICKGGIYGRFMLYTLYLARAVPFLLGELL

SEQ ID NO: 37624 - protein, 85 aa, unidentified
  REGION 1..85: note = Description of Unknown:cds_NZ_WFIY01000004.1_cds_2321 target sequence
DYEVVVVNSGGGVISDIVHEYGFKEVRKDVKLLEARYLANKESRGDYAFLLDETRPLRKDALEILSKNLHDMVIIGERELGDSFW

SEQ ID NO: 37625 - protein, 85 aa, unidentified
  REGION 1..85: note = Description of Unknown:cds_NZ_WFIY01000004.1_cds_2321 target sequence
SMAAQLDKENIMECNSPEAVRGFALPRLFKRELLTASLEKLRENLREKFSQVVFPDHELIYYEASGFSNDIFVIKDELVYHYGDF

SEQ ID NO: 37626 - protein, 85 aa, unidentified
  REGION 1..85: note = Description of Unknown:cds_NZ_WFIY01000001.1_cds_WP_155862278.1_2388 target sequence
KISVVIPTLNSEKTIKLAVSSSLKLADEVIVVDSFSTDRTVEIAEKEGAKVLQVKGSRLIARIEGAKHAKGEYVVNLDSDMYFSE

SEQ ID NO: 37627 - protein, 85 aa, unidentified
  REGION 1..85: note = Description of Unknown:cds_NZ_WFIY01000001.1_cds_WP_155862278.1_2388 target sequence
NFKGFEEKVIALGEITVGKGIVYKLMSADREIVHEKWAENLSVNKGGIIPRMYDRQLLLKAYEMIPPSLRDKLNAFEDSVIYYNV

SEQ ID NO: 37628 - protein, 85 aa, unidentified
  REGION 1..85: note = Description of Unknown:cds_NZ_WFIY01000001.1_cds_WP_155862278.1_2388 target sequence
MKLYKGKVQFIPGAVYHIEDDSLWRFMKKWYKYGKNAKLLRGTEYERIIYERKSRPGLTLGEKVKLFPLMVIKGIPFALGYYLNI

SEQ ID NO: 37629 - protein, 84 aa, unidentified
  REGION 1..84: note = Description of Unknown:cds_NZ_WFIY01000001.1_cds_WP_155862278.1_2388 target sequence
GKVQFIPGAVYHIEDDSLWRFMKKWYKYGKNAKLLRGTEYERIIYERKSRPGLTLGEKVKLFPLMVIKGIPFALGYYLNIGNKV

SEQ ID NO: 37630 - protein, 85 aa, unidentified
  REGION 1..85: note = Description of Unknown:cds_NZ_WFIY01000001.1_cds_WP_155862278.1_2388 target sequence
EVIVVDSFSTDRTVEIAEKEGAKVLQVKGSRLIARIEGAKHAKGEYVVNLDSDMYFSENFKGFEEKVIALGEITVGKGIVYKLMS

SEQ ID NO: 37631 - protein, 85 aa, unidentified
  REGION 1..85: note = Description of Unknown:cds_NZ_WFIY01000001.1_cds_WP_155862278.1_2388 target sequence
ADREIVHEKWAENLSVNKGGIIPRMYDRQLLLKAYEMIPPSLRDKLNAFEDSVIYYNVMKLYKGKVQFIPGAVYHIEDDSLWRFM

SEQ ID NO: 37632 - protein, 85 aa, unidentified
  REGION 1..85: note = Description of Unknown:cds_NC_035460.1_cds_YP_009408013.1_62 target sequence
TLRIKIEKLRQIVAYFSEFSEEVSINVDASNNLMYIFAALAGSVNIWAIVPLSASVFYGGTTNTVFNLPVTKVKACLCSFHNDAV

SEQ ID NO: 37633 - protein, 85 aa, unidentified
  REGION 1..85: note = Description of Unknown:cds_NC_035460.1_cds_YP_009408013.1_62 target sequence
IEIEPDMENNLVKLSSFHIVSVDCNKELMPIRTDTSISLQIDQDKSYVFNFLKYEEKCCARTVIHLELLLGFIKCISQYQDLSIM

SEQ ID NO: 37634 - protein, 85 aa, unidentified
  REGION 1..85: note = Description of Unknown:cds_NC_035460.1_cds_YP_009408013.1_62 target sequence
FKDNNIIFKTPGNFDTFSREYSMTECSPDLEKFSFRMPISSLNKLRGFKKRVNVFETKIVMDKDDNILGALFSDKVASFHINIFM

SEQ ID NO: 37635 - protein, 84 aa, unidentified
  REGION 1..84: note = Description of Unknown:cds_NC_035460.1_cds_YP_009408013.1_62 target sequence
IIFKTPGNFDTFSREYSMTECSPDLEKFSFRMPISSLNKLRGFKKRVNVFETKIVMDKDDNILGALFSDKVASFHINIFMAFRD

SEQ ID NO: 37636 - protein, 85 aa, unidentified
  REGION 1..85: note = Description of Unknown:cds_NC_035460.1_cds_YP_009408013.1_62 target sequence
DASNNLMYIFAALAGSVNIWAIVPLSASVFYGGTTNTVFNLPVTKVKACLCSFHNDAVIEIEPDMENNLVKLSSFHIVSVDCNKE

SEQ ID NO: 37637 - protein, 85 aa, unidentified
  REGION 1..85: note = Description of Unknown:cds_NC_035460.1_cds_YP_009408013.1_62 target sequence
LMPIRTDTSISLQIDQDKSYVFNFLKYEEKCCARTVIHLELLLGFIKCISQYQDLSIMFKDNNIIFKTPGNFDTFSREYSMTECS

SEQ ID NO: 37638 - protein, 85 aa, unidentified
  REGION 1..85: note = Description of Unknown:cds_NC_029316.1_cds_YP_009230341.1_88 target sequence
DLLAVKEEAKKILLGFKEIYVMFSGGRDSLVALHLTHSIYPEKTKALFINTGIATPGLLDYVEGVTKELGIELTIIGSKYNYFEL

SEQ ID NO: 37639 - protein, 85 aa, unidentified
  REGION 1..85: note = Description of Unknown:cds_NC_029316.1_cds_YP_009230341.1_88 target sequence
VNKIGFPTLTKRWCKRYLKLEPLQDFVKDKKDIILITGVRKSESWMKSRASKLYYNEKIGALSYAIVYDFTEQDVEEYIKANGLK

SEQ ID NO: 37640 - protein, 85 aa, unidentified
  REGION 1..85: note = Description of Unknown:cds_NC_029316.1_cds_YP_009230341.1_88 target sequence
KNYLYDIYGKAYDCWCSAYKTPADFAVLALKNPEFFQKFVEAEAKLRKGGSGLFYNHQRIYFRDIQKDPKLYLESYERNYKCPLC

SEQ ID NO: 37641 - protein, 84 aa, unidentified
  REGION 1..84: note = Description of Unknown:cds_NC_029316.1_cds_YP_009230341.1_88 target sequence
DIYGKAYDCWCSAYKTPADFAVLALKNPEFFQKFVEAEAKLRKGGSGLFYNHQRIYFRDIQKDPKLYLESYERNYKCPLCRTLI

SEQ ID NO: 37642 - protein, 85 aa, unidentified
  REGION 1..85: note = Description of Unknown:cds_NC_029316.1_cds_YP_009230341.1_88 target sequence
DSLVALHLTHSIYPEKTKALFINTGIATPGLLDYVEGVTKELGIELTIIGSKYNYFELVNKIGFPTLTKRWCKRYLKLEPLQDFV

SEQ ID NO: 37643 - protein, 85 aa, unidentified
  REGION 1..85: note = Description of Unknown:cds_NC_029316.1_cds_YP_009230341.1_88 target sequence
KDKKDIILITGVRKSESWMKSRASKLYYNEKIGALSYAIVYDFTEQDVEEYIKANGLKKNYLYDIYGKAYDCWCSAYKTPADFAV

SEQ ID NO: 37644 - protein, 85 aa, unidentified
  REGION 1..85: note = Description of Unknown:cds_NC_030656.1_cds_YP_009268778.1_63 target sequence
SLRIKLDRLRQIVIYFSEFSEEVSINVDAANGQMYIFAALGGSVNIWAIIPLSASVYYDGVDNCVFNIPVIKVKACLCSFHNDAI

SEQ ID NO: 37645 - protein, 85 aa, unidentified
  REGION 1..85: note = Description of Unknown:cds_NC_030656.1_cds_YP_009268778.1_63 target sequence
ICIEPDKENNLVTLSSYHVVSVDCNREPIPHRTDTCISLSIDQKKSYVFNFHLYENKCCGRTVVHLDLLLGFIKCISQYQFLTVG

SEQ ID NO: 37646 - protein, 85 aa, unidentified
  REGION 1..85: note = Description of Unknown:cds_NC_030656.1_cds_YP_009268778.1_63 target sequence
FSDKNLILKTPGKKDTFLREYSMTEWSPELERFNFKMAISSLNKLRGFKKRVSMFETKIVMDKDDNILGMLFSDKIASYRINIFM

SEQ ID NO: 37647 - protein, 84 aa, unidentified
  REGION 1..84: note = Description of Unknown:cds_NC_030656.1_cds_YP_009268778.1_63 target sequence
LILKTPGKKDTFLREYSMTEWSPELERFNFKMAISSLNKLRGFKKRVSMFETKIVMDKDDNILGMLFSDKIASYRINIFMAFQD

SEQ ID NO: 37648 - protein, 85 aa, unidentified
  REGION 1..85: note = Description of Unknown:cds_NC_030656.1_cds_YP_009268778.1_63 target sequence
DAANGQMYIFAALGGSVNIWAIIPLSASVYYDGVDNCVFNIPVIKVKACLCSFHNDAIICIEPDKENNLVTLSSYHVVSVDCNRE

SEQ ID NO: 37649 - protein, 85 aa, unidentified
  REGION 1..85: note = Description of Unknown:cds_NC_030656.1_cds_YP_009268778.1_63 target sequence
PIPHRTDTCISLSIDQKKSYVFNFHLYENKCCGRTVVHLDLLLGFIKCISQYQFLTVGFSDKNLILKTPGKKDTFLREYSMTEWS

SEQ ID NO: 37650 - protein, 85 aa, unidentified
  REGION 1..85: note = Description of Unknown:hvTR_Q6TVS0 target sequence
TNLLSLVDQEDLAFCAGFPSFDETMLVIAGARVRFPRSLLSLFNVVPRTMTRYETELVGTEMVVGAVFTTAYNIRRNLGLGEDPV

SEQ ID NO: 37651 - protein, 85 aa, unidentified
  REGION 1..85: note = Description of Unknown:hvTR_Q6TVS0 target sequence
TMRDIEKYFLDSDNEVLTLIVHNTDFSAMSGVRRRGGRRITNPVIFRSGSTPLLIVMESRKKTNIYRERTAEQANASYREVGSSL

SEQ ID NO: 37652 - protein, 85 aa, unidentified
  REGION 1..85: note = Description of Unknown:hvTR_Q6TVS0 target sequence
ALVTRYAGLQLVDVHTPSSVLTVSAVYGFTEDKGLKKLGSDKELADYQSTPLTDPIRLSDFSKLFDGVKKSIQLTNVPVPSAGAE

SEQ ID NO: 37653 - protein, 84 aa, unidentified
  REGION 1..84: note = Description of Unknown:hvTR_Q6TVS0 target sequence
RYAGLQLVDVHTPSSVLTVSAVYGFTEDKGLKKLGSDKELADYQSTPLTDPIRLSDFSKLFDGVKKSIQLTNVPVPSAGAEAAP

SEQ ID NO: 37654 - protein, 85 aa, unidentified
  REGION 1..85: note = Description of Unknown:hvTR_Q6TVS0 target sequence
IAGARVRFPRSLLSLFNVVPRTMTRYETELVGTEMVVGAVFTTAYNIRRNLGLGEDPVTMRDIEKYFLDSDNEVLTLIVHNTDFS

SEQ ID NO: 37655 - protein, 85 aa, unidentified
  REGION 1..85: note = Description of Unknown:hvTR_Q6TVS0 target sequence
AMSGVRRRGGRRITNPVIFRSGSTPLLIVMESRKKTNIYRERTAEQANASYREVGSSLALVTRYAGLQLVDVHTPSSVLTVSAVY

SEQ ID NO: 37656 - protein, 85 aa, unidentified
  REGION 1..85: note = Description of Unknown:hvTR_D3IZJ7 target sequence
ANLLSLVDTEDLAFCAGFPSFDETMLVIAGARVRFPRSLLSLFNVVPRTMTRYETELVGTEMVVGAIFTTAYNIRRNLGLGEEPV

SEQ ID NO: 37657 - protein, 85 aa, unidentified
  REGION 1..85: note = Description of Unknown:hvTR_D3IZJ7 target sequence
TMRDIEKYFLDSENEVLTLVVHNTDFSTMTGIRRRGGRRIANPVIFRSGSTPLLIVMESRKKTNIYRERTADPANASYKEVGSSL

SEQ ID NO: 37658 - protein, 85 aa, unidentified
  REGION 1..85: note = Description of Unknown:hvTR_D3IZJ7 target sequence
ALVTRYAGLQLVDVHTPSAVLTVSAIYGFTEDKGLKKLGSDKELAEYQSAPLTDPIRLGDFSKLFDGVKKSIQLTNVPVPSADAE

SEQ ID NO: 37659 - protein, 84 aa, unidentified
  REGION 1..84: note = Description of Unknown:hvTR_D3IZJ7 target sequence
RYAGLQLVDVHTPSAVLTVSAIYGFTEDKGLKKLGSDKELAEYQSAPLTDPIRLGDFSKLFDGVKKSIQLTNVPVPSADAEPAS

SEQ ID NO: 37660 - protein, 85 aa, unidentified
  REGION 1..85: note = Description of Unknown:hvTR_D3IZJ7 target sequence
IAGARVRFPRSLLSLFNVVPRTMTRYETELVGTEMVVGAIFTTAYNIRRNLGLGEEPVTMRDIEKYFLDSENEVLTLVVHNTDFS

SEQ ID NO: 37661 - protein, 85 aa, unidentified
  REGION 1..85: note = Description of Unknown:hvTR_D3IZJ7 target sequence
TMTGIRRRGGRRIANPVIFRSGSTPLLIVMESRKKTNIYRERTADPANASYKEVGSSLALVTRYAGLQLVDVHTPSAVLTVSAIY

SEQ ID NO: 37662 - protein, 85 aa, unidentified
  REGION 1..85: note = Description of Unknown:cds_NC_024711.1_cds_YP_009052509.1_31 target sequence
ANIYNITAELEDIFLELEENGGELTPELEERLAITQDNLKSKLDGYRKAYTVLNLEAESCKKEEQRLAVLRKTKENNAERLKGVM

SEQ ID NO: 37663 - protein, 85 aa, unidentified
  REGION 1..85: note = Description of Unknown:cds_NC_024711.1_cds_YP_009052509.1_31 target sequence
LDAVIAYGDLGKSGNKVINLVDSKLYTKNSKCIEIDENLNQIFIDLVLEHLQSLWDNDMIDSNFSFSRDVLLEQINDKFTERYPE

SEQ ID NO: 37664 - protein, 85 aa, unidentified
  REGION 1..85: note = Description of Unknown:cds_NC_024711.1_cds_YP_009052509.1_31 target sequence
QSARLREETGGYFTFDDLDCIKVKFEIEKPVGDLANKINFDLLNTFFNHQHEMTRSSSVNKTTMKNILNDGRDISIAKLVENTSL

SEQ ID NO: 37665 - protein, 84 aa, unidentified
  REGION 1..84: note = Description of Unknown:cds_NC_024711.1_cds_YP_009052509.1_31 target sequence
LREETGGYFTFDDLDCIKVKFEIEKPVGDLANKINFDLLNTFFNHQHEMTRSSSVNKTTMKNILNDGRDISIAKLVENTSLIIK

SEQ ID NO: 37666 - protein, 85 aa, unidentified
  REGION 1..85: note = Description of Unknown:cds_NC_024711.1_cds_YP_009052509.1_31 target sequence
LEERLAITQDNLKSKLDGYRKAYTVLNLEAESCKKEEQRLAVLRKTKENNAERLKGVMLDAVIAYGDLGKSGNKVINLVDSKLYT

SEQ ID NO: 37667 - protein, 85 aa, unidentified
  REGION 1..85: note = Description of Unknown:cds_NC_024711.1_cds_YP_009052509.1_31 target sequence
KNSKCIEIDENLNQIFIDLVLEHLQSLWDNDMIDSNFSFSRDVLLEQINDKFTERYPEQSARLREETGGYFTFDDLDCIKVKFEI

SEQ ID NO: 37668 - protein, 85 aa, unidentified
  REGION 1..85: note = Description of Unknown:cds_NZ_WFIY01000004.1_cds_WP_155863983.1_1907 target sequence
ARLSTGIPDFDKLIEGGIPQGFFVAATGEPGTGKTIFSLSFINEGLKEGDIGIYVTTEESRDSILRQAKQFNWDLESYLDKKLII

SEQ ID NO: 37669 - protein, 85 aa, unidentified
  REGION 1..85: note = Description of Unknown:cds_NZ_WFIY01000004.1_cds_WP_155863983.1_1907 target sequence
IDALMKEKEDEWSLEEVTPEEMVKKVIAAKQKLGYGRARLVIDSVSAFFLDKPAMARKISYYLKRVLYKWKFTIIATSQYAITTS

SEQ ID NO: 37670 - protein, 85 aa, unidentified
  REGION 1..85: note = Description of Unknown:cds_NZ_WFIY01000004.1_cds_WP_155863983.1_1907 target sequence
QAFGFGVEHVADGIIRFRRVVKDGMLHRYVLIEKMRQTNHDKYVWEIDIVPGKGIVLLGKVQERKEDYALPKKVMEKIKEANKDE

SEQ ID NO: 37671 - protein, 84 aa, unidentified
  REGION 1..84: note = Description of Unknown:cds_NZ_WFIY01000004.1_cds_WP_155863983.1_1907 target sequence
FGVEHVADGIIRFRRVVKDGMLHRYVLIEKMRQTNHDKYVWEIDIVPGKGIVLLGKVQERKEDYALPKKVMEKIKEANKDEFQS

SEQ ID NO: 37672 - protein, 85 aa, unidentified
  REGION 1..85: note = Description of Unknown:cds_NZ_WFIY01000004.1_cds_WP_155863983.1_1907 target sequence
GEPGTGKTIFSLSFINEGLKEGDIGIYVTTEESRDSILRQAKQFNWDLESYLDKKLIIIDALMKEKEDEWSLEEVTPEEMVKKVI

SEQ ID NO: 37673 - protein, 85 aa, unidentified
  REGION 1..85: note = Description of Unknown:cds_NZ_WFIY01000004.1_cds_WP_155863983.1_1907 target sequence
AAKQKLGYGRARLVIDSVSAFFLDKPAMARKISYYLKRVLYKWKFTIIATSQYAITTSQAFGFGVEHVADGIIRFRRVVKDGMLH

SEQ ID NO: 37674 - protein, 85 aa, unidentified
  REGION 1..85: note = Description of Unknown:hvTR_P52469 target sequence
TQIGQYIKLNDAVPNLILHITTKLLRNENLTSFKQEELLLIQHVCTSMLSHGIKILLLRESLYNSGIGDIVILNRKISNNYWFRI

SEQ ID NO: 37675 - protein, 85 aa, unidentified
  REGION 1..85: note = Description of Unknown:hvTR_P52469 target sequence
FSILKQHSDAELLRHMFNESHSAYISKKLHYSGNVSHMINFLFMDEFGVNLKIPEELICEGNIVFSVGAIYNHRLLKICRFFNRF

SEQ ID NO: 37676 - protein, 85 aa, unidentified
  REGION 1..85: note = Description of Unknown:hvTR_P52469 target sequence
WGDQEREPTVRLICKHLWFAYLIMFGKFEISTLAYSQQRAEHKAGLFSFLQNDFKVFCGMSENPQLLDSSAIFDLTGISAEDLFS

SEQ ID NO: 37677 - protein, 84 aa, unidentified
  REGION 1..84: note = Description of Unknown:hvTR_P52469 target sequence
QEREPTVRLICKHLWFAYLIMFGKFEISTLAYSQQRAEHKAGLFSFLQNDFKVFCGMSENPQLLDSSAIFDLTGISAEDLFSYE

SEQ ID NO: 37678 - protein, 85 aa, unidentified
  REGION 1..85: note = Description of Unknown:hvTR_P52469 target sequence
ENLTSFKQEELLLIQHVCTSMLSHGIKILLLRESLYNSGIGDIVILNRKISNNYWFRIFSILKQHSDAELLRHMFNESHSAYISK

SEQ ID NO: 37679 - protein, 85 aa, unidentified
  REGION 1..85: note = Description of Unknown:hvTR_P52469 target sequence
KLHYSGNVSHMINFLFMDEFGVNLKIPEELICEGNIVFSVGAIYNHRLLKICRFFNRFWGDQEREPTVRLICKHLWFAYLIMFGK

SEQ ID NO: 37680 - protein, 85 aa, unidentified
  REGION 1..85: note = Description of Unknown:hvTR_P52548 target sequence
TQIGQYIKLNDAVPNLILHITTKLLRNENLTSFKQEELLLIQHVCTSMLSHGIKILLLRESLYNSGIGDIVILNRKISNNYWFRL

SEQ ID NO: 37681 - protein, 85 aa, unidentified
  REGION 1..85: note = Description of Unknown:hvTR_P52548 target sequence
FSILKQHSDAELLRHMFNESHSAYISKKLHYSGNVSHIINFLFMDEFGLSLKIPEEIICEGNIVFSVGAIYNHRLLKICRFFNRF

SEQ ID NO: 37682 - protein, 85 aa, unidentified
  REGION 1..85: note = Description of Unknown:hvTR_P52548 target sequence
WGDQEREPAVRLICKHLWFAYLIMFGKFEISTLAYNQQRAEHKAGLFSFLQNDFKVFCGMSENPQLLDSSAIFDLTGISAEDLFS

SEQ ID NO: 37683 - protein, 84 aa, unidentified
  REGION 1..84: note = Description of Unknown:hvTR_P52548 target sequence
QEREPAVRLICKHLWFAYLIMFGKFEISTLAYNQQRAEHKAGLFSFLQNDFKVFCGMSENPQLLDSSAIFDLTGISAEDLFSYE

SEQ ID NO: 37684 - protein, 85 aa, unidentified
  REGION 1..85: note = Description of Unknown:hvTR_P52548 target sequence
ENLTSFKQEELLLIQHVCTSMLSHGIKILLLRESLYNSGIGDIVILNRKISNNYWFRLFSILKQHSDAELLRHMFNESHSAYISK

SEQ ID NO: 37685 - protein, 85 aa, unidentified
  REGION 1..85: note = Description of Unknown:hvTR_P52548 target sequence
KLHYSGNVSHIINFLFMDEFGLSLKIPEEIICEGNIVFSVGAIYNHRLLKICRFFNRFWGDQEREPAVRLICKHLWFAYLIMFGK

SEQ ID NO: 37686 - protein, 85 aa, unidentified
  REGION 1..85: note = Description of Unknown:cds_NZ_WFIY01000004.1_cds_WP_155862508.1_268 target sequence
LEKLPIFSRFNGDKKKRAQLGKLLTEISIKLKDQQSKLEEGMHRLKERDKELFEKLVRAQIEGDTARATIYAQEISDIRKMIKII

SEQ ID NO: 37687 - protein, 85 aa, unidentified
  REGION 1..85: note = Description of Unknown:cds_NZ_WFIY01000004.1_cds_WP_155862508.1_268 target sequence
YTAFLAIEKVRLKLDTVQELQGVSLVLFPVVKILGELKDQIKGIAPEVALALDSITSSVNSIAVETGALSDKTVLPSTIDEQAKK

SEQ ID NO: 37688 - protein, 85 aa, unidentified
  REGION 1..85: note = Description of Unknown:cds_NZ_WFIY01000004.1_cds_WP_155862508.1_268 target sequence
IMEEAQRTAEIKIKEMLPDLPHPPSTTQVKLQYEKKKLDERELLNYINSNGGFLDVEYVVKKYGVEKDEVMGLLKEMANKGLISI

SEQ ID NO: 37689 - protein, 84 aa, unidentified
  REGION 1..84: note = Description of Unknown:cds_NZ_WFIY01000004.1_cds_WP_155862508.1_268 target sequence
EAQRTAEIKIKEMLPDLPHPPSTTQVKLQYEKKKLDERELLNYINSNGGFLDVEYVVKKYGVEKDEVMGLLKEMANKGLISIEA

SEQ ID NO: 37690 - protein, 85 aa, unidentified
  REGION 1..85: note = Description of Unknown:cds_NZ_WFIY01000004.1_cds_WP_155862508.1_268 target sequence
SIKLKDQQSKLEEGMHRLKERDKELFEKLVRAQIEGDTARATIYAQEISDIRKMIKIIYTAFLAIEKVRLKLDTVQELQGVSLVL

SEQ ID NO: 37691 - protein, 85 aa, unidentified
  REGION 1..85: note = Description of Unknown:cds_NZ_WFIY01000004.1_cds_WP_155862508.1_268 target sequence
FPVVKILGELKDQIKGIAPEVALALDSITSSVNSIAVETGALSDKTVLPSTIDEQAKKIMEEAQRTAEIKIKEMLPDLPHPPSTT

SEQ ID NO: 37692 - protein, 85 aa, unidentified
  REGION 1..85: note = Description of Unknown:cds_NZ_WFIY01000004.1_cds_WP_162309157.1_1242 target sequence
VYILEGKDITVIFKTKKGEKIALNNVSVNISNNENISIIGESGSGKTTLSLVLAGVQKPNKGNVLYNGKNVYKLKGKEYKEFRRS

SEQ ID NO: 37693 - protein, 85 aa, unidentified
  REGION 1..85: note = Description of Unknown:cds_NZ_WFIY01000004.1_cds_WP_162309157.1_1242 target sequence
VQYIMQNPYSAFNPFRKVSDSFKTVISEYKLAKGNEADNLIDKYLQMVGLDESIKTKYPHQLSGGQLQRAALARALLLKPKILFA

SEQ ID NO: 37694 - protein, 85 aa, unidentified
  REGION 1..85: note = Description of Unknown:cds_NZ_WFIY01000004.1_cds_WP_162309157.1_1242 target sequence
DEVVSMLDASLRIDIINLLKEIRETYNISIILITHDIGIAKYFSEDRGRIIVMYDGKIIEEGYAEEIIKSPKNEYTKLLLESYLD

SEQ ID NO: 37695 - protein, 84 aa, unidentified
  REGION 1..84: note = Description of Unknown:cds_NZ_WFIY01000004.1_cds_WP_162309157.1_1242 target sequence
SMLDASLRIDIINLLKEIRETYNISIILITHDIGIAKYFSEDRGRIIVMYDGKIIEEGYAEEIIKSPKNEYTKLLLESYLDPFR

SEQ ID NO: 37696 - protein, 85 aa, unidentified
  REGION 1..85: note = Description of Unknown:cds_NZ_WFIY01000004.1_cds_WP_162309157.1_1242 target sequence
VNISNNENISIIGESGSGKTTLSLVLAGVQKPNKGNVLYNGKNVYKLKGKEYKEFRRSVQYIMQNPYSAFNPFRKVSDSFKTVIS

SEQ ID NO: 37697 - protein, 85 aa, unidentified
  REGION 1..85: note = Description of Unknown:cds_NZ_WFIY01000004.1_cds_WP_162309157.1_1242 target sequence
EYKLAKGNEADNLIDKYLQMVGLDESIKTKYPHQLSGGQLQRAALARALLLKPKILFADEVVSMLDASLRIDIINLLKEIRETYN

SEQ ID NO: 37698 - protein, 85 aa, unidentified
  REGION 1..85: note = Description of Unknown:cds_NZ_WFIY01000004.1_cds_WP_155863402.1_1379 target sequence
LEELIGKYVEVKGIKIYYEKIGNGKPLVMISPSGFDGRFYHKLLNFITRDITTIIVDLPGHGKSDVDPNQLSEKGNAKVEFYGDY

SEQ ID NO: 37699 - protein, 85 aa, unidentified
  REGION 1..85: note = Description of Unknown:cds_NZ_WFIY01000004.1_cds_WP_155863402.1_1379 target sequence
IIQFIKNLGLTKFSVLGTSLGGDIALDVGMRGNAENIIMISSSINTRNTFTEKDIENASNSDPQRIIRFAGPNVDRKLVEELNWI

SEQ ID NO: 37700 - protein, 85 aa, unidentified
  REGION 1..85: note = Description of Unknown:cds_NZ_WFIY01000004.1_cds_WP_155863402.1_1379 target sequence
RSTNSLEILRWDLYAWNNFDYTKKLEREINMLIIRGEYDPLVSKKMMEDTCKYVSQCISLEFKGVGHYVPAEDPKTTARELEKFI

SEQ ID NO: 37701 - protein, 84 aa, unidentified
  REGION 1..84: note = Description of Unknown:cds_NZ_WFIY01000004.1_cds_WP_155863402.1_1379 target sequence
NSLEILRWDLYAWNNFDYTKKLEREINMLIIRGEYDPLVSKKMMEDTCKYVSQCISLEFKGVGHYVPAEDPKTTARELEKFILS

SEQ ID NO: 37702 - protein, 85 aa, unidentified
  REGION 1..85: note = Description of Unknown:cds_NZ_WFIY01000004.1_cds_WP_155863402.1_1379 target sequence
VMISPSGFDGRFYHKLLNFITRDITTIIVDLPGHGKSDVDPNQLSEKGNAKVEFYGDYIIQFIKNLGLTKFSVLGTSLGGDIALD

SEQ ID NO: 37703 - protein, 85 aa, unidentified
  REGION 1..85: note = Description of Unknown:cds_NZ_WFIY01000004.1_cds_WP_155863402.1_1379 target sequence
VGMRGNAENIIMISSSINTRNTFTEKDIENASNSDPQRIIRFAGPNVDRKLVEELNWIRSTNSLEILRWDLYAWNNFDYTKKLER

SEQ ID NO: 37704 - protein, 85 aa, unidentified
  REGION 1..85: note = Description of Unknown:cds_NZ_WFIY01000004.1_cds_WP_155863804.1_1689 target sequence
KKRTPKLRELVEGVSSYYIIGNIVILSPKKKDIDKEKLAKAIMQINPKVKAVYIKRKVSGELRISELELIGGENISRTIFKENGL

SEQ ID NO: 37705 - protein, 85 aa, unidentified
  REGION 1..85: note = Description of Unknown:cds_NZ_WFIY01000004.1_cds_WP_155863804.1_1689 target sequence
LFVVDVKKVYVNPSLGGERNKIKEEVKENEKILDAFCGYGGIAIHASTISRYVVAGDLNIEGLEMLRESLSLNKKKIHLIDIVQY

SEQ ID NO: 37706 - protein, 85 aa, unidentified
  REGION 1..85: note = Description of Unknown:cds_NZ_WFIY01000004.1_cds_WP_155863804.1_1689 target sequence
DAHNLPFRDKAFDKVYADNPTMILEFLNELCRVTNGELIIYILTTKDGISLIPAYKWLRVNDYSKDLFIFKGYIRCNDKNFSLIT

SEQ ID NO: 37707 - protein, 84 aa, unidentified
  REGION 1..84: note = Description of Unknown:cds_NZ_WFIY01000004.1_cds_WP_155863804.1_1689 target sequence
NLPFRDKAFDKVYADNPTMILEFLNELCRVTNGELIIYILTTKDGISLIPAYKWLRVNDYSKDLFIFKGYIRCNDKNFSLITLS

SEQ ID NO: 37708 - protein, 85 aa, unidentified
  REGION 1..85: note = Description of Unknown:cds_NZ_WFIY01000004.1_cds_WP_155863804.1_1689 target sequence
PKKKDIDKEKLAKAIMQINPKVKAVYIKRKVSGELRISELELIGGENISRTIFKENGLLFVVDVKKVYVNPSLGGERNKIKEEVK

SEQ ID NO: 37709 - protein, 85 aa, unidentified
  REGION 1..85: note = Description of Unknown:cds_NZ_WFIY01000004.1_cds_WP_155863804.1_1689 target sequence
ENEKILDAFCGYGGIAIHASTISRYVVAGDLNIEGLEMLRESLSLNKKKIHLIDIVQYDAHNLPFRDKAFDKVYADNPTMILEFL

SEQ ID NO: 37710 - protein, 85 aa, unidentified
  REGION 1..85: note = Description of Unknown:cds_NZ_WFIY01000004.1_cds_WP_155864135.1_2088 target sequence
HIQKGDTEAEILDKGAYLYSFKVKSKDILLEGRERQTRGGMALLIPFANRIKGGEYYWRGKKYELPKNSEGNAIHGLVRDKIWDV

SEQ ID NO: 37711 - protein, 85 aa, unidentified
  REGION 1..85: note = Description of Unknown:cds_NZ_WFIY01000004.1_cds_WP_155864135.1_2088 target sequence
ESLKSDEVTLSLYLTDPGYPSPLFIKVKYSLDSSSLTTVITVKNEGEDAPLVVGAHPYFMVKGNWRIFPNKAKRLIMKDKIPTGE

SEQ ID NO: 37712 - protein, 85 aa, unidentified
  REGION 1..85: note = Description of Unknown:cds_NZ_WFIY01000004.1_cds_WP_155864135.1_2088 target sequence
MEDFTITQGEYDDCFLLKGNVTLISDYSKVMIEKENMDFVQIYTGQPSAVAVEPMSGAPDAFHNGIGLIILKEGETATFTFKISV

SEQ ID NO: 37713 - protein, 84 aa, unidentified
  REGION 1..84: note = Description of Unknown:cds_NZ_WFIY01000004.1_cds_WP_155864135.1_2088 target sequence
FTITQGEYDDCFLLKGNVTLISDYSKVMIEKENMDFVQIYTGQPSAVAVEPMSGAPDAFHNGIGLIILKEGETATFTFKISVRL

SEQ ID NO: 37714 - protein, 85 aa, unidentified
  REGION 1..85: note = Description of Unknown:cds_NZ_WFIY01000004.1_cds_WP_155864135.1_2088 target sequence
ILLEGRERQTRGGMALLIPFANRIKGGEYYWRGKKYELPKNSEGNAIHGLVRDKIWDVESLKSDEVTLSLYLTDPGYPSPLFIKV

SEQ ID NO: 37715 - protein, 85 aa, unidentified
  REGION 1..85: note = Description of Unknown:cds_NZ_WFIY01000004.1_cds_WP_155864135.1_2088 target sequence
KYSLDSSSLTTVITVKNEGEDAPLVVGAHPYFMVKGNWRIFPNKAKRLIMKDKIPTGEMEDFTITQGEYDDCFLLKGNVTLISDY

SEQ ID NO: 37716 - protein, 85 aa, unidentified
  REGION 1..85: note = Description of Unknown:cds_NC_034440.1_cds_YP_009361860.1_6 target sequence
QPAELCGCSIEMEEYPMDVHSTCVTPASSRMFRKRRHSPSRNLRYVKRRFSSLRPEDISLVTEPTHYLRVIFHSPNTWYIRSGHD

SEQ ID NO: 37717 - protein, 85 aa, unidentified
  REGION 1..85: note = Description of Unknown:cds_NC_034440.1_cds_YP_009361860.1_6 target sequence
LDSVHKWLKPYGGIPVNEYHITLALLSLSEQHLAMDISPIAIFLRNVRFELFDFTLLRKTLALKASEICCDNLHRFQPITRVNMA

SEQ ID NO: 37718 - protein, 85 aa, unidentified
  REGION 1..85: note = Description of Unknown:cds_NC_034440.1_cds_YP_009361860.1_6 target sequence
LPLIKEWLRVQGFPIYNSHLPLHMSVSKLHALDDNTCEYVANMSCFKQYPTQMFVRPIAVELVSIRQSSNAPRCIVHSVPILHAP

SEQ ID NO: 37719 - protein, 84 aa, unidentified
  REGION 1..84: note = Description of Unknown:cds_NC_034440.1_cds_YP_009361860.1_6 target sequence
IKEWLRVQGFPIYNSHLPLHMSVSKLHALDDNTCEYVANMSCFKQYPTQMFVRPIAVELVSIRQSSNAPRCIVHSVPILHAPGF

SEQ ID NO: 37720 - protein, 85 aa, unidentified
  REGION 1..85: note = Description of Unknown:cds_NC_034440.1_cds_YP_009361860.1_6 target sequence
SSRMFRKRRHSPSRNLRYVKRRFSSLRPEDISLVTEPTHYLRVIFHSPNTWYIRSGHDLDSVHKWLKPYGGIPVNEYHITLALLS

SEQ ID NO: 37721 - protein, 85 aa, unidentified
  REGION 1..85: note = Description of Unknown:cds_NC_034440.1_cds_YP_009361860.1_6 target sequence
LSEQHLAMDISPIAIFLRNVRFELFDFTLLRKTLALKASEICCDNLHRFQPITRVNMALPLIKEWLRVQGFPIYNSHLPLHMSVS

SEQ ID NO: 37722 - protein, 85 aa, unidentified
  REGION 1..85: note = Description of Unknown:cds_NC_029316.1_cds_YP_009230306.1_53 target sequence
FVITMHGVDEIDELKAYLFFSSIGVYPNIKFDGKNNVISIHIPKYRDFIRVLSEIDKPFIPSVLRLDNEIEKNAKLDLSMKENTI

SEQ ID NO: 37723 - protein, 85 aa, unidentified
  REGION 1..85: note = Description of Unknown:cds_NC_029316.1_cds_YP_009230306.1_53 target sequence
SRKLHVIIKLMKLGSTYTRLVLDVNVAGIERDILEYILRNLIGDEDLYVTSTASRHIVVWGKADKIRLLRSVNLTRYIYGSHEYE

SEQ ID NO: 37724 - protein, 85 aa, unidentified
  REGION 1..85: note = Description of Unknown:cds_NC_029316.1_cds_YP_009230306.1_53 target sequence
CPVCGYKSQTLAELQLHYFTEHNSGVCPLDGLPTDEHMLSDMKHLAYAFLALLPMNSHLNRTKLYKKSYILAKFTFNVKPLIVQR

SEQ ID NO: 37725 - protein, 84 aa, unidentified
  REGION 1..84: note = Description of Unknown:cds_NC_029316.1_cds_YP_009230306.1_53 target sequence
CGYKSQTLAELQLHYFTEHNSGVCPLDGLPTDEHMLSDMKHLAYAFLALLPMNSHLNRTKLYKKSYILAKFTFNVKPLIVQRDL

SEQ ID NO: 37726 - protein, 85 aa, unidentified
  REGION 1..85: note = Description of Unknown:cds_NC_029316.1_cds_YP_009230306.1_53 target sequence
NIKFDGKNNVISIHIPKYRDFIRVLSEIDKPFIPSVLRLDNEIEKNAKLDLSMKENTISRKLHVIIKLMKLGSTYTRLVLDVNVA

SEQ ID NO: 37727 - protein, 85 aa, unidentified
  REGION 1..85: note = Description of Unknown:cds_NC_029316.1_cds_YP_009230306.1_53 target sequence
GIERDILEYILRNLIGDEDLYVTSTASRHIVVWGKADKIRLLRSVNLTRYIYGSHEYECPVCGYKSQTLAELQLHYFTEHNSGVC

SEQ ID NO: 37728 - protein, 85 aa, unidentified
  REGION 1..85: note = Description of Unknown:cds_NC_009884.1_cds_YP_001496962.1_37 target sequence
RTEVKGKVVIVTEKGEMKEYDNQIQSSFISSLINYARIGGTISNYSYNIQLLNQNTLLGSYTGGLQYKQVSSSLQAIFTFVIPTV

SEQ ID NO: 37729 - protein, 85 aa, unidentified
  REGION 1..85: note = Description of Unknown:cds_NC_009884.1_cds_YP_001496962.1_37 target sequence
PPSVNTLQLYVSSSLGTFLVATLNNVSLPISSAIQIIWAISFSISSSDYFTPYLVFAFFAPPSSTIPFVNTPLPNVQSAITSIQN

SEQ ID NO: 37730 - protein, 85 aa, unidentified
  REGION 1..85: note = Description of Unknown:cds_NC_009884.1_cds_YP_001496962.1_37 target sequence
VGYLTSPPTYYATYNGQYVQVAPTFTNNTISIEYTIPNINTTSTFTNVTIVTTATSGYVNLLAQEQQITVQVGQVLSIEYNTTWS

SEQ ID NO: 37731 - protein, 84 aa, unidentified
  REGION 1..84: note = Description of Unknown:cds_NC_009884.1_cds_YP_001496962.1_37 target sequence
LTSPPTYYATYNGQYVQVAPTFTNNTISIEYTIPNINTTSTFTNVTIVTTATSGYVNLLAQEQQITVQVGQVLSIEYNTTWSTS

SEQ ID NO: 37732 - protein, 85 aa, unidentified
  REGION 1..85: note = Description of Unknown:cds_NC_009884.1_cds_YP_001496962.1_37 target sequence
FISSLINYARIGGTISNYSYNIQLLNQNTLLGSYTGGLQYKQVSSSLQAIFTFVIPTVPPSVNTLQLYVSSSLGTFLVATLNNVS

SEQ ID NO: 37733 - protein, 85 aa, unidentified
  REGION 1..85: note = Description of Unknown:cds_NC_009884.1_cds_YP_001496962.1_37 target sequence
LPISSAIQIIWAISFSISSSDYFTPYLVFAFFAPPSSTIPFVNTPLPNVQSAITSIQNVGYLTSPPTYYATYNGQYVQVAPTFTN

SEQ ID NO: 37734 - protein, 85 aa, unidentified
  REGION 1..85: note = Description of Unknown:hvTR_P10407 target sequence
RHLRDLPDEEIIIASGSEILELVVNATMGDDHPEPPTPFGTPSLHDLYDLEVDVPEDDPNEKAVNDLFSDAALLAAEEASSPSSD

SEQ ID NO: 37735 - protein, 85 aa, unidentified
  REGION 1..85: note = Description of Unknown:hvTR_P10407 target sequence
SDSSLHTPRHDRGEKEIPGLKWEKMDLRCYEECLPPSDDEDEQAIQNAASHGVQAVSESFALDCPPLPGHGCKSCEFHRINTGDK

SEQ ID NO: 37736 - protein, 85 aa, unidentified
  REGION 1..85: note = Description of Unknown:hvTR_P10407 target sequence
AVLCALCYMRAYNHCVYSPVSDADDETPTTESTLSPPEIGTSPSDNIVRPVPVRATGRRAAVECLDDLLQGGDEPLDLCTRKRPR

SEQ ID NO: 37737 - protein, 84 aa, unidentified
  REGION 1..84: note = Description of Unknown:hvTR_P10407 target sequence
LCALCYMRAYNHCVYSPVSDADDETPTTESTLSPPEIGTSPSDNIVRPVPVRATGRRAAVECLDDLLQGGDEPLDLCTRKRPRH

SEQ ID NO: 37738 - protein, 85 aa, unidentified
  REGION 1..85: note = Description of Unknown:hvTR_P10407 target sequence
MGDDHPEPPTPFGTPSLHDLYDLEVDVPEDDPNEKAVNDLFSDAALLAAEEASSPSSDSDSSLHTPRHDRGEKEIPGLKWEKMDL

SEQ ID NO: 37739 - protein, 85 aa, unidentified
  REGION 1..85: note = Description of Unknown:hvTR_P10407 target sequence
RCYEECLPPSDDEDEQAIQNAASHGVQAVSESFALDCPPLPGHGCKSCEFHRINTGDKAVLCALCYMRAYNHCVYSPVSDADDET

SEQ ID NO: 37740 - protein, 85 aa, unidentified
  REGION 1..85: note = Description of Unknown:hvTR_Q2HRB4 target sequence
LGKYVCETEPLSPGLRRLMWRFLQNKNLNTFHAQELRFIHLVLCKMYNFGLNVYLLREATANAGTYDEVVLGRKVPAEVWKLVYD

SEQ ID NO: 37741 - protein, 85 aa, unidentified
  REGION 1..85: note = Description of Unknown:hvTR_Q2HRB4 target sequence
GLEEMGVSSEMLLCEAYRDSLWMHLNDKVGLLRGLANYLFHRLGVTHDVRIAPENLVDGNFLFNLGSVLPCRLLLAAGYCLAFWG

SEQ ID NO: 37742 - protein, 85 aa, unidentified
  REGION 1..85: note = Description of Unknown:hvTR_Q2HRB4 target sequence
SDEHERWVRFFAQKLFICYLIVSGRLMPQRSLLVWASETGYPGPVEAVCRDIRSMYGIRTYAVSGYLPAPSEAQLAYLGAFNNNA

SEQ ID NO: 37743 - protein, 84 aa, unidentified
  REGION 1..84: note = Description of Unknown:hvTR_Q2HRB4 target sequence
EHERWVRFFAQKLFICYLIVSGRLMPQRSLLVWASETGYPGPVEAVCRDIRSMYGIRTYAVSGYLPAPSEAQLAYLGAFNNNAV

SEQ ID NO: 37744 - protein, 85 aa, unidentified
  REGION 1..85: note = Description of Unknown:hvTR_Q2HRB4 target sequence
LNTFHAQELRFIHLVLCKMYNFGLNVYLLREATANAGTYDEVVLGRKVPAEVWKLVYDGLEEMGVSSEMLLCEAYRDSLWMHLND

SEQ ID NO: 37745 - protein, 85 aa, unidentified
  REGION 1..85: note = Description of Unknown:hvTR_Q2HRB4 target sequence
KVGLLRGLANYLFHRLGVTHDVRIAPENLVDGNFLFNLGSVLPCRLLLAAGYCLAFWGSDEHERWVRFFAQKLFICYLIVSGRLM

SEQ ID NO: 37746 - protein, 85 aa, unidentified
  REGION 1..85: note = Description of Unknown:cds_NC_024711.1_cds_YP_009052538.1_61 target sequence
QVIEKVKVVPEGYNGAGMNYDGGNRRDVNGKANAGLTLGIIGTALGAWALFGNRRSAGASILGGAGGGGMLGDGSTNINVFGATA

SEQ ID NO: 37747 - protein, 85 aa, unidentified
  REGION 1..85: note = Description of Unknown:cds_NC_024711.1_cds_YP_009052538.1_61 target sequence
GSGSGAPTAFQAWKKSCEDTLALQGGLYQWALTQQNQRFEDRERLNSELFGVYIDGRNRTDALIEKNNTDHFNLYKYTRDADDDI

SEQ ID NO: 37748 - protein, 85 aa, unidentified
  REGION 1..85: note = Description of Unknown:cds_NC_024711.1_cds_YP_009052538.1_61 target sequence
RKELSDLKAELAVTKAIRPYQDKLIQCEMEKMFTAGINYTDRKTCNVIYGVVTLPNEPTVTGLVGRNACGCLPCGFTQPASGTPA

SEQ ID NO: 37749 - protein, 84 aa, unidentified
  REGION 1..84: note = Description of Unknown:cds_NC_024711.1_cds_YP_009052538.1_61 target sequence
ELSDLKAELAVTKAIRPYQDKLIQCEMEKMFTAGINYTDRKTCNVIYGVVTLPNEPTVTGLVGRNACGCLPCGFTQPASGTPAQ

SEQ ID NO: 37750 - protein, 85 aa, unidentified
  REGION 1..85: note = Description of Unknown:cds_NC_024711.1_cds_YP_009052538.1_61 target sequence
VNGKANAGLTLGIIGTALGAWALFGNRRSAGASILGGAGGGGMLGDGSTNINVFGATAGSGSGAPTAFQAWKKSCEDTLALQGGL

SEQ ID NO: 37751 - protein, 85 aa, unidentified
  REGION 1..85: note = Description of Unknown:cds_NC_024711.1_cds_YP_009052538.1_61 target sequence
YQWALTQQNQRFEDRERLNSELFGVYIDGRNRTDALIEKNNTDHFNLYKYTRDADDDIRKELSDLKAELAVTKAIRPYQDKLIQC

SEQ ID NO: 37752 - protein, 85 aa, unidentified
  REGION 1..85: note = Description of Unknown:cds_NZ_WFIY01000004.1_cds_WP_155862430.1_173 target sequence
KRALITASTEGIGKGIAKALAKQSFSLVITSRSEEKVKKTVEELRAINPSIWGKTSDMTNLKSLEELVSFSIDKLGGIDLLVVNT

SEQ ID NO: 37753 - protein, 85 aa, unidentified
  REGION 1..85: note = Description of Unknown:cds_NZ_WFIY01000004.1_cds_WP_155862430.1_173 target sequence
GNPSKEPSLFEETTDEDWEYSVKLYLLSAVKLTKLVLPKMKEQRFGRIIYLSSWTVKEPQDIFVLADVSRAPLIQLAKILSKDYG

SEQ ID NO: 37754 - protein, 85 aa, unidentified
  REGION 1..85: note = Description of Unknown:cds_NZ_WFIY01000004.1_cds_WP_155862430.1_173 target sequence
KYNITFNVILMGSFNTPGARRGIERLAKARKKSFEEVWKEEVLDRIPLGRIGDPEKDLGKLILFLYDSDYITGTSILIDGGNTRA

SEQ ID NO: 37755 - protein, 84 aa, unidentified
  REGION 1..84: note = Description of Unknown:cds_NZ_WFIY01000004.1_cds_WP_155862430.1_173 target sequence
NITFNVILMGSFNTPGARRGIERLAKARKKSFEEVWKEEVLDRIPLGRIGDPEKDLGKLILFLYDSDYITGTSILIDGGNTRAV

SEQ ID NO: 37756 - protein, 85 aa, unidentified
  REGION 1..85: note = Description of Unknown:cds_NZ_WFIY01000004.1_cds_WP_155862430.1_173 target sequence
VITSRSEEKVKKTVEELRAINPSIWGKTSDMTNLKSLEELVSFSIDKLGGIDLLVVNTGNPSKEPSLFEETTDEDWEYSVKLYLL

SEQ ID NO: 37757 - protein, 85 aa, unidentified
  REGION 1..85: note = Description of Unknown:cds_NZ_WFIY01000004.1_cds_WP_155862430.1_173 target sequence
SAVKLTKLVLPKMKEQRFGRIIYLSSWTVKEPQDIFVLADVSRAPLIQLAKILSKDYGKYNITFNVILMGSFNTPGARRGIERLA

SEQ ID NO: 37758 - protein, 85 aa, unidentified
  REGION 1..85: note = Description of Unknown:cds_NZ_WFIY01000004.1_cds_WP_155862705.1_505 target sequence
ETIETKIENGIGWIILNRPDKLNAINLKMLEELEEVTKNFEENNDVKVIIFTGNGKAFSAGADISQFKELNSISAWNFAKKGRKV

SEQ ID NO: 37759 - protein, 85 aa, unidentified
  REGION 1..85: note = Description of Unknown:cds_NZ_WFIY01000004.1_cds_WP_155862705.1_505 target sequence
MDYIESISKPTIAMINGYALGGGLELALACDFRIAAEEASLGLPEINLGIYPGFGGTQRLVRAIGKAKAMELMMTGDRISAKEAE

SEQ ID NO: 37760 - protein, 85 aa, unidentified
  REGION 1..85: note = Description of Unknown:cds_NZ_WFIY01000004.1_cds_WP_155862705.1_505 target sequence
RIGLVNKVTPLSSLKEETIKFAGKLMEKSPIALAILKSVILYGNDSPLLDGLNMESLGWGVVFSTEDEKEGVNAFLEKRKAVFKG

SEQ ID NO: 37761 - protein, 84 aa, unidentified
  REGION 1..84: note = Description of Unknown:cds_NZ_WFIY01000004.1_cds_WP_155862705.1_505 target sequence
GLVNKVTPLSSLKEETIKFAGKLMEKSPIALAILKSVILYGNDSPLLDGLNMESLGWGVVFSTEDEKEGVNAFLEKRKAVFKGK

SEQ ID NO: 37762 - protein, 85 aa, unidentified
  REGION 1..85: note = Description of Unknown:cds_NZ_WFIY01000004.1_cds_WP_155862705.1_505 target sequence
KMLEELEEVTKNFEENNDVKVIIFTGNGKAFSAGADISQFKELNSISAWNFAKKGRKVMDYIESISKPTIAMINGYALGGGLELA

SEQ ID NO: 37763 - protein, 85 aa, unidentified
  REGION 1..85: note = Description of Unknown:cds_NZ_WFIY01000004.1_cds_WP_155862705.1_505 target sequence
LACDFRIAAEEASLGLPEINLGIYPGFGGTQRLVRAIGKAKAMELMMTGDRISAKEAERIGLVNKVTPLSSLKEETIKFAGKLME

SEQ ID NO: 37764 - protein, 85 aa, unidentified
  REGION 1..85: note = Description of Unknown:cds_NZ_WFIY01000004.1_cds_WP_155862873.1_712 target sequence
LQRLLKPVYVIYEKWLWNQIKSGPIPRHVGIIPDGNRRWARENNSSFNEAYLQGYRKLKEVLIWLAELGVKDVTVFALSTENCDK

SEQ ID NO: 37765 - protein, 85 aa, unidentified
  REGION 1..85: note = Description of Unknown:cds_NZ_WFIY01000004.1_cds_WP_155862873.1_712 target sequence
RSSQELSVILKYIKMGIDDLLTEDYIYKYKVKVRAIGQLHKLPEDLRLSISRVVEKSSSFNERSLTLAICYGGRQEILDAVAKLL

SEQ ID NO: 37766 - protein, 85 aa, unidentified
  REGION 1..85: note = Description of Unknown:cds_NZ_WFIY01000004.1_cds_WP_155862873.1_712 target sequence
DEYKKGLVKDIVLNEDTFRKYFYDKELEDIDLVIRTSGEMRISNFLLWHLAYSELFFCDAYWPEFRKIDLWRAIRSYQRRKRNFG

SEQ ID NO: 37767 - protein, 84 aa, unidentified
  REGION 1..84: note = Description of Unknown:cds_NZ_WFIY01000004.1_cds_WP_155862873.1_712 target sequence
YKKGLVKDIVLNEDTFRKYFYDKELEDIDLVIRTSGEMRISNFLLWHLAYSELFFCDAYWPEFRKIDLWRAIRSYQRRKRNFGA

SEQ ID NO: 37768 - protein, 85 aa, unidentified
  REGION 1..85: note = Description of Unknown:cds_NZ_WFIY01000004.1_cds_WP_155862873.1_712 target sequence
HVGIIPDGNRRWARENNSSFNEAYLQGYRKLKEVLIWLAELGVKDVTVFALSTENCDKRSSQELSVILKYIKMGIDDLLTEDYIY

SEQ ID NO: 37769 - protein, 85 aa, unidentified
  REGION 1..85: note = Description of Unknown:cds_NZ_WFIY01000004.1_cds_WP_155862873.1_712 target sequence
KYKVKVRAIGQLHKLPEDLRLSISRVVEKSSSFNERSLTLAICYGGRQEILDAVAKLLDEYKKGLVKDIVLNEDTFRKYFYDKEL

SEQ ID NO: 37770 - protein, 85 aa, unidentified
  REGION 1..85: note = Description of Unknown:cds_NZ_WFIY01000004.1_cds_WP_155863108.1_1025 target sequence
FVILDDAKIYYEIRGEGKPVILIHHLAGSYKSWSDIAYQLSQKFTVISYDLRGHGRSSILPYEYRIEDHSKDLKGLIEYLRLDSP

SEQ ID NO: 37771 - protein, 85 aa, unidentified
  REGION 1..85: note = Description of Unknown:cds_NZ_WFIY01000004.1_cds_WP_155863108.1_1025 target sequence
IIIGHSLGTLVAIEYALRNVVDKLILIGALYKAPNPEPYEKYVSVALNFGMEALAEYRKTIGDFADSLVLNPVAWRKLLEVYNEN

SEQ ID NO: 37772 - protein, 85 aa, unidentified
  REGION 1..85: note = Description of Unknown:cds_NZ_WFIY01000004.1_cds_WP_155863108.1_1025 target sequence
NPLGYKYAVEGLLRARDYSKDLNKIDIKGGTLVIYGSEDKLKQNLNTMLTIPNSSYRILNGYGHFLNFEAPDELYASIIDFLVGN

SEQ ID NO: 37773 - protein, 84 aa, unidentified
  REGION 1..84: note = Description of Unknown:cds_NZ_WFIY01000004.1_cds_WP_155863108.1_1025 target sequence
LGYKYAVEGLLRARDYSKDLNKIDIKGGTLVIYGSEDKLKQNLNTMLTIPNSSYRILNGYGHFLNFEAPDELYASIIDFLVGNS

SEQ ID NO: 37774 - protein, 85 aa, unidentified
  REGION 1..85: note = Description of Unknown:cds_NZ_WFIY01000004.1_cds_WP_155863108.1_1025 target sequence
GSYKSWSDIAYQLSQKFTVISYDLRGHGRSSILPYEYRIEDHSKDLKGLIEYLRLDSPIIIGHSLGTLVAIEYALRNVVDKLILI

SEQ ID NO: 37775 - protein, 85 aa, unidentified
  REGION 1..85: note = Description of Unknown:cds_NZ_WFIY01000004.1_cds_WP_155863108.1_1025 target sequence
GALYKAPNPEPYEKYVSVALNFGMEALAEYRKTIGDFADSLVLNPVAWRKLLEVYNENNPLGYKYAVEGLLRARDYSKDLNKIDI

SEQ ID NO: 37776 - protein, 85 aa, unidentified
  REGION 1..85: note = Description of Unknown:cds_NZ_WFIY01000004.1_cds_WP_155863699.1_1556 target sequence
VIITFAPLPSYGKSHVISFLAIGLSKRGKKVLIIDLDPKLFITSFFVKQRNIYSGINSFQDIDIVSLPFFEYSFSTLNYNILSKM

SEQ ID NO: 37777 - protein, 85 aa, unidentified
  REGION 1..85: note = Description of Unknown:cds_NZ_WFIY01000004.1_cds_WP_155863699.1_1556 target sequence
MQDTKINTSNYDFVFIDFKPGVSIVSMNAASFSNFILSTISTAKIKEFREGVQSIFQWMSYFNLDLKYLGNIIIAETKPEELAQQ

SEQ ID NO: 37778 - protein, 85 aa, unidentified
  REGION 1..85: note = Description of Unknown:cds_NZ_WFIY01000004.1_cds_WP_155863699.1_1556 target sequence
AYLGIIDALKLLPDEKINEVKKRIYPFDGTLDFVNFNTIIPVRRDLNDLKFTDKRKYPPVYRLLNYERTRSIINNLVDEFLNRIN

SEQ ID NO: 37779 - protein, 84 aa, unidentified
  REGION 1..84: note = Description of Unknown:cds_NZ_WFIY01000004.1_cds_WP_155863699.1_1556 target sequence
GIIDALKLLPDEKINEVKKRIYPFDGTLDFVNFNTIIPVRRDLNDLKFTDKRKYPPVYRLLNYERTRSIINNLVDEFLNRINMA

SEQ ID NO: 37780 - protein, 85 aa, unidentified
  REGION 1..85: note = Description of Unknown:cds_NZ_WFIY01000004.1_cds_WP_155863699.1_1556 target sequence
GKKVLIIDLDPKLFITSFFVKQRNIYSGINSFQDIDIVSLPFFEYSFSTLNYNILSKMMQDTKINTSNYDFVFIDFKPGVSIVSM

SEQ ID NO: 37781 - protein, 85 aa, unidentified
  REGION 1..85: note = Description of Unknown:cds_NZ_WFIY01000004.1_cds_WP_155863699.1_1556 target sequence
NAASFSNFILSTISTAKIKEFREGVQSIFQWMSYFNLDLKYLGNIIIAETKPEELAQQAYLGIIDALKLLPDEKINEVKKRIYPF

SEQ ID NO: 37782 - protein, 44 aa, unidentified
  REGION 1..44: note = Description of Unknown:cds_NZ_WFIY01000001.1_cds_2379 target sequence
LEYDENVLTRYKLMFPSTSSNTGGNYSKRRMLRPSTSQRSSTTF

SEQ ID NO: 37783 - protein, 6 aa, unidentified
  REGION 1..6: note = Description of Unknown:cds_NZ_WFIY01000001.1_cds_2379 target sequence
EEDNTL

SEQ ID NO: 37784 - protein, 15 aa, unidentified
  REGION 1..15: note = Description of Unknown:cds_NZ_WFIY01000001.1_cds_2379 target sequence
PPRISDLVILLGVKL

SEQ ID NO: 37785 - protein, 12 aa, unidentified
  REGION 1..12: note = Description of Unknown:cds_NZ_WFIY01000001.1_cds_2379 target sequence
ISDLVILLGVKL

SEQ ID NO: 37786 - protein, 17 aa, unidentified
  REGION 1..17: note = Description of Unknown:cds_NZ_WFIY01000001.1_cds_2379 target sequence
KRRMLRPSTSQRSSTTF

SEQ ID NO: 37787 - protein, 4 aa, unidentified
  REGION 1..4: note = Description of Unknown:cds_NZ_WFIY01000001.1_cds_2379 target sequence
SRSK

SEQ ID NO: 37788 - protein, 85 aa, unidentified
  REGION 1..85: note = Description of Unknown:hvTR_Q6TVD8 target sequence
ASLLSLVDADPLFCAGLPSRDETMLVIAGARVRFPRSLLSLFHVVPRTMTRYETELVGTEMLVGAIFSTAYNVRRNLGLGEEPVT

SEQ ID NO: 37789 - protein, 85 aa, unidentified
  REGION 1..85: note = Description of Unknown:hvTR_Q6TVD8 target sequence
MRDLERYFLDSENEVLTLVVNNTDFSNLSGVKKRGRRIPNPVIFRSGSIPILMVLESRKKVNIYRERTDEQANSSYKEVGSNLAI

SEQ ID NO: 37790 - protein, 85 aa, unidentified
  REGION 1..85: note = Description of Unknown:hvTR_Q6TVD8 target sequence
VTRYAGLQLVDVHTPSSMLTVSAVYGVTEDKALKKIGNDKELADYQSTPLSDPIRLSDFTKLFDGVKKSIQLTNVPVPAAADTVS

SEQ ID NO: 37791 - protein, 84 aa, unidentified
  REGION 1..84: note = Description of Unknown:hvTR_Q6TVD8 target sequence
TRYAGLQLVDVHTPSSMLTVSAVYGVTEDKALKKIGNDKELADYQSTPLSDPIRLSDFTKLFDGVKKSIQLTNVPVPAAADTVS

SEQ ID NO: 37792 - protein, 85 aa, unidentified
  REGION 1..85: note = Description of Unknown:hvTR_Q6TVD8 target sequence
AGARVRFPRSLLSLFHVVPRTMTRYETELVGTEMLVGAIFSTAYNVRRNLGLGEEPVTMRDLERYFLDSENEVLTLVVNNTDFSN

SEQ ID NO: 37793 - protein, 85 aa, unidentified
  REGION 1..85: note = Description of Unknown:hvTR_Q6TVD8 target sequence
LSGVKKRGRRIPNPVIFRSGSIPILMVLESRKKVNIYRERTDEQANSSYKEVGSNLAIVTRYAGLQLVDVHTPSSMLTVSAVYGV

SEQ ID NO: 37794 - protein, 85 aa, unidentified
  REGION 1..85: note = Description of Unknown:cds_NZ_WFIY01000004.1_cds_WP_155862309.1_25 target sequence
VSYLFRLYFKPVSPLLIGGIREGVETYFLEERGEKIIPFSSWKGAFKRVSELVAKSYNDPILKSHIDDGHENPPSDEAEKIAEKV

SEQ ID NO: 37795 - protein, 85 aa, unidentified
  REGION 1..85: note = Description of Unknown:cds_NZ_WFIY01000004.1_cds_WP_155862309.1_25 target sequence
CEKSCKGSELKKTEYGFLFSAGGSYNKKEVVDLISKFLAYKQCPIEGIYGSELFAGKVVFSDSLISSSTLIELTRTTIDRKTWTV

SEQ ID NO: 37796 - protein, 85 aa, unidentified
  REGION 1..85: note = Description of Unknown:cds_NZ_WFIY01000004.1_cds_WP_155862309.1_25 target sequence
KERHLYTEELLFPDKIEVKVLLRNPNDKEIKLWKETLDFIEKLGLQIGNGKSKGQGLLNLDVKESTFRKVDGTKISPEENIEKFR

SEQ ID NO: 37797 - protein, 84 aa, unidentified
  REGION 1..84: note = Description of Unknown:cds_NZ_WFIY01000004.1_cds_WP_155862309.1_25 target sequence
ERHLYTEELLFPDKIEVKVLLRNPNDKEIKLWKETLDFIEKLGLQIGNGKSKGQGLLNLDVKESTFRKVDGTKISPEENIEKFR

SEQ ID NO: 37798 - protein, 85 aa, unidentified
  REGION 1..85: note = Description of Unknown:cds_NZ_WFIY01000004.1_cds_WP_155862309.1_25 target sequence
FLEERGEKIIPFSSWKGAFKRVSELVAKSYNDPILKSHIDDGHENPPSDEAEKIAEKVCEKSCKGSELKKTEYGFLFSAGGSYNK

SEQ ID NO: 37799 - protein, 85 aa, unidentified
  REGION 1..85: note = Description of Unknown:cds_NZ_WFIY01000004.1_cds_WP_155862309.1_25 target sequence
KEVVDLISKFLAYKQCPIEGIYGSELFAGKVVFSDSLISSSTLIELTRTTIDRKTWTVKERHLYTEELLFPDKIEVKVLLRNPND

SEQ ID NO: 37800 - protein, 85 aa, unidentified
  REGION 1..85: note = Description of Unknown:cds_NZ_WFIY01000004.1_cds_WP_155862417.1_158 target sequence
LIDPIVLAEEKGNKFVWLSIDEAEMDKGIITNQYLLTVKDKGILMDPGGPLVFERVYNVMQKFIKPEDVEYIFLSHEDPDIVSGI

SEQ ID NO: 37801 - protein, 85 aa, unidentified
  REGION 1..85: note = Description of Unknown:cds_NZ_WFIY01000004.1_cds_WP_155862417.1_158 target sequence
TLWLNYCPNAKILISDLWDRFLPHLGVDIKMNVIRIPIQGMQINLNGDNLKIIPAHFLHSVGNFHLYDPITKVYFSGDLGAAVFP

SEQ ID NO: 37802 - protein, 85 aa, unidentified
  REGION 1..85: note = Description of Unknown:cds_NZ_WFIY01000004.1_cds_WP_155862417.1_158 target sequence
KGSWYIIVDNFDEHKKYMENFHKKYMANKKAIELWLKQIQGLDIRIIAPQHGAVIEGDNVRKFIEWIKSLDKIGIDLLEEELNTN

SEQ ID NO: 37803 - protein, 84 aa, unidentified
  REGION 1..84: note = Description of Unknown:cds_NZ_WFIY01000004.1_cds_WP_155862417.1_158 target sequence
SWYIIVDNFDEHKKYMENFHKKYMANKKAIELWLKQIQGLDIRIIAPQHGAVIEGDNVRKFIEWIKSLDKIGIDLLEEELNTNT

SEQ ID NO: 37804 - protein, 85 aa, unidentified
  REGION 1..85: note = Description of Unknown:cds_NZ_WFIY01000004.1_cds_WP_155862417.1_158 target sequence
GIITNQYLLTVKDKGILMDPGGPLVFERVYNVMQKFIKPEDVEYIFLSHEDPDIVSGITLWLNYCPNAKILISDLWDRFLPHLGV

SEQ ID NO: 37805 - protein, 85 aa, unidentified
  REGION 1..85: note = Description of Unknown:cds_NZ_WFIY01000004.1_cds_WP_155862417.1_158 target sequence
DIKMNVIRIPIQGMQINLNGDNLKIIPAHFLHSVGNFHLYDPITKVYFSGDLGAAVFPKGSWYIIVDNFDEHKKYMENFHKKYMA

SEQ ID NO: 37806 - protein, 85 aa, unidentified
  REGION 1..85: note = Description of Unknown:cds_NZ_WFIY01000004.1_cds_WP_155864140.1_2093 target sequence
RKEKIAIALVFFTVTVITYFMSFSRGAIFITSAISSLSFWAGVLILIPSKFFRMILNVKKTRAYWISFGLYLFFHVMLYGFFYGI

SEQ ID NO: 37807 - protein, 85 aa, unidentified
  REGION 1..85: note = Description of Unknown:cds_NZ_WFIY01000004.1_cds_WP_155864140.1_2093 target sequence
ILGLDIFIPEVSVSYGVGIPPSSILLLPYWESLSPALNIVIFGYEDIISPFITFIGIILALLIGANIEKILELKREVSKRRANAV

SEQ ID NO: 37808 - protein, 85 aa, unidentified
  REGION 1..85: note = Description of Unknown:cds_NZ_WFIY01000004.1_cds_WP_155864140.1_2093 target sequence
LVGVPIIGVVSGTSCCLSLPSIIIYFTALDLGIVYSVLPILASPIYFSFVWYGLPIGSAVLLFENFREMNKILQRLNKKKVCEVK

SEQ ID NO: 37809 - protein, 84 aa, unidentified
  REGION 1..84: note = Description of Unknown:cds_NZ_WFIY01000004.1_cds_WP_155864140.1_2093 target sequence
VGVPIIGVVSGTSCCLSLPSIIIYFTALDLGIVYSVLPILASPIYFSFVWYGLPIGSAVLLFENFREMNKILQRLNKKKVCEVK

SEQ ID NO: 37810 - protein, 85 aa, unidentified
  REGION 1..85: note = Description of Unknown:cds_NZ_WFIY01000004.1_cds_WP_155864140.1_2093 target sequence
IFITSAISSLSFWAGVLILIPSKFFRMILNVKKTRAYWISFGLYLFFHVMLYGFFYGIILGLDIFIPEVSVSYGVGIPPSSILLL

SEQ ID NO: 37811 - protein, 85 aa, unidentified
  REGION 1..85: note = Description of Unknown:cds_NZ_WFIY01000004.1_cds_WP_155864140.1_2093 target sequence
PYWESLSPALNIVIFGYEDIISPFITFIGIILALLIGANIEKILELKREVSKRRANAVLVGVPIIGVVSGTSCCLSLPSIIIYFT

SEQ ID NO: 37812 - protein, 85 aa, unidentified
  REGION 1..85: note = Description of Unknown:cds_NC_029316.1_cds_YP_009230274.1_21 target sequence
VESPSPSPYTVSKEAMNFLNVFFSNKPIKNEKVIINALKNGFVSSVILDISPNALSEFEDIIKKYFDVDLIDDEYYKTVELGIIA

SEQ ID NO: 37813 - protein, 85 aa, unidentified
  REGION 1..85: note = Description of Unknown:cds_NC_029316.1_cds_YP_009230274.1_21 target sequence
MVITLLAHRVRLIELQDLAEPLNKYASYLSSLRFKAPKKDVMPLLALGLVTEEGGGFYKVTGLALYLINFLLTVNMSITLPKACL

SEQ ID NO: 37814 - protein, 85 aa, unidentified
  REGION 1..85: note = Description of Unknown:cds_NC_029316.1_cds_YP_009230274.1_21 target sequence
KELIEDLNNILLFHKFMVERVTSLLYEAPWSLYSAYHGSSSYDDLMAELDFESILNTLNLLREKLKPPYKYEIPVIMGERKLSQL

SEQ ID NO: 37815 - protein, 84 aa, unidentified
  REGION 1..84: note = Description of Unknown:cds_NC_029316.1_cds_YP_009230274.1_21 target sequence
LIEDLNNILLFHKFMVERVTSLLYEAPWSLYSAYHGSSSYDDLMAELDFESILNTLNLLREKLKPPYKYEIPVIMGERKLSQLI

SEQ ID NO: 37816 - protein, 85 aa, unidentified
  REGION 1..85: note = Description of Unknown:cds_NC_029316.1_cds_YP_009230274.1_21 target sequence
IKNEKVIINALKNGFVSSVILDISPNALSEFEDIIKKYFDVDLIDDEYYKTVELGIIAMVITLLAHRVRLIELQDLAEPLNKYAS

SEQ ID NO: 37817 - protein, 85 aa, unidentified
  REGION 1..85: note = Description of Unknown:cds_NC_029316.1_cds_YP_009230274.1_21 target sequence
YLSSLRFKAPKKDVMPLLALGLVTEEGGGFYKVTGLALYLINFLLTVNMSITLPKACLKELIEDLNNILLFHKFMVERVTSLLYE

SEQ ID NO: 37818 - protein, 85 aa, unidentified
  REGION 1..85: note = Description of Unknown:cds_NZ_WFIY01000004.1_cds_WP_155862327.1_53 target sequence
DQEKIFFILTFLLILSSLVLIIYSAHVIRISHEKLTPPSARVVSVYLCNGKIIISLLLNNTTPYPITINGGKINIVQTNQTILVG

SEQ ID NO: 37819 - protein, 85 aa, unidentified
  REGION 1..85: note = Description of Unknown:cds_NZ_WFIY01000004.1_cds_WP_155862327.1_53 target sequence
PSTLVKEEIINVSAPLLPSYAYYSTIGIKGLICGNISQNKVYITFYCVSPIHIVSYVKVIHLTYFNGTANVTFLVSTPVNSTVNF

SEQ ID NO: 37820 - protein, 84 aa, unidentified
  REGION 1..84: note = Description of Unknown:cds_NZ_WFIY01000004.1_cds_WP_155862327.1_53 target sequence
IRYIQLANDNLSRFVAENLGEIYIDRSLPAGTHNFTVSIEFPIVFCNSLKKGYTYTFFTYLNLTCHYLYENVTKCLQIYYILRN

SEQ ID NO: 37821 - protein, 85 aa, unidentified
  REGION 1..85: note = Description of Unknown:cds_NZ_WFIY01000004.1_cds_WP_155862327.1_53 target sequence
IRISHEKLTPPSARVVSVYLCNGKIIISLLLNNTTPYPITINGGKINIVQTNQTILVGPSTLVKEEIINVSAPLLPSYAYYSTIG

SEQ ID NO: 37822 - protein, 85 aa, unidentified
  REGION 1..85: note = Description of Unknown:cds_NZ_WFIY01000004.1_cds_WP_155862327.1_53 target sequence
IKGLICGNISQNKVYITFYCVSPIHIVSYVKVIHLTYFNGTANVTFLVSTPVNSTVNFIRYIQLANDNLSRFVAENLGEIYIDRS

SEQ ID NO: 37823 - protein, 85 aa, unidentified
  REGION 1..85: note = Description of Unknown:cds_NZ_WFIY01000004.1_cds_WP_155862568.1_338 target sequence
SVNLKVHKPYVLYEEGDHKFVWLGLDESEHEKGILTNQYLIVDGDEGALLDPGGYFVFERVYENVKEFIKPENIKYLLFSHQDPD

SEQ ID NO: 37824 - protein, 85 aa, unidentified
  REGION 1..85: note = Description of Unknown:cds_NZ_WFIY01000004.1_cds_WP_155862568.1_338 target sequence
VIGSLNLWLDVAPNAKIYVSALWERFLPHLGFEAGGRIIDIPDQGMSIKFGKSEIKAVPAHFMHSVGNFHYYDPISKIYFSGDLG

SEQ ID NO: 37825 - protein, 84 aa, unidentified
  REGION 1..84: note = Description of Unknown:cds_NZ_WFIY01000004.1_cds_WP_155862568.1_338 target sequence
AAVFPAGKWYLFVENFDEHVKYMEPFHRRYIVSKKAIDHWLEQIKGLDIKIIAPQHGSIFQGENVKKFIEWLKSLDKVGIDYIW

SEQ ID NO: 37826 - protein, 85 aa, unidentified
  REGION 1..85: note = Description of Unknown:cds_NZ_WFIY01000004.1_cds_WP_155862568.1_338 target sequence
SEHEKGILTNQYLIVDGDEGALLDPGGYFVFERVYENVKEFIKPENIKYLLFSHQDPDVIGSLNLWLDVAPNAKIYVSALWERFL

SEQ ID NO: 37827 - protein, 85 aa, unidentified
  REGION 1..85: note = Description of Unknown:cds_NZ_WFIY01000004.1_cds_WP_155862568.1_338 target sequence
PHLGFEAGGRIIDIPDQGMSIKFGKSEIKAVPAHFMHSVGNFHYYDPISKIYFSGDLGAAVFPAGKWYLFVENFDEHVKYMEPFH

SEQ ID NO: 37828 - protein, 85 aa, unidentified
  REGION 1..85: note = Description of Unknown:cds_NZ_WFIY01000004.1_cds_WP_155862569.1_339 target sequence
KIETMDIEDKRSNAIIAWAKNPSNIISVLPNVVGIENNVVKLKFTRFLLFSFEGEFVVEPSFIGSGIVEYKLTDKKGNEIKIIIS

SEQ ID NO: 37829 - protein, 85 aa, unidentified
  REGION 1..85: note = Description of Unknown:cds_NZ_WFIY01000004.1_cds_WP_155862569.1_339 target sequence
AEGKSGVKLSVSYSGEKEWIVGKGLHKILEEISNGIKNELSKLPEVEQQTVGSKNFSLSLSKISSISKLIMKSKLAKTEDITLKE

SEQ ID NO: 37830 - protein, 84 aa, unidentified
  REGION 1..84: note = Description of Unknown:cds_NZ_WFIY01000004.1_cds_WP_155862569.1_339 target sequence
GEVLSYVEGIISDFANYPLIYISGSGSSTFRLLFLNGELKGIYILKDGKDSFNEDDLNHLSGEFKIHVYVGISPRILEVLEQER

SEQ ID NO: 37831 - protein, 85 aa, unidentified
  REGION 1..85: note = Description of Unknown:cds_NZ_WFIY01000004.1_cds_WP_155862569.1_339 target sequence
VLPNVVGIENNVVKLKFTRFLLFSFEGEFVVEPSFIGSGIVEYKLTDKKGNEIKIIISAEGKSGVKLSVSYSGEKEWIVGKGLHK

SEQ ID NO: 37832 - protein, 85 aa, unidentified
  REGION 1..85: note = Description of Unknown:cds_NZ_WFIY01000004.1_cds_WP_155862569.1_339 target sequence
ILEEISNGIKNELSKLPEVEQQTVGSKNFSLSLSKISSISKLIMKSKLAKTEDITLKEGEVLSYVEGIISDFANYPLIYISGSGS

SEQ ID NO: 37833 - protein, 85 aa, unidentified
  REGION 1..85: note = Description of Unknown:cds_NZ_WFIY01000004.1_cds_WP_155862620.1_399 target sequence
KVELVSYTKDGERVVAIASKMSRSRKGWDYHEKTMTDEEVEVWIRDAIIHGYWSPLEHSVYTFSIEGISRVASHQLVRHRIASYT

SEQ ID NO: 37834 - protein, 85 aa, unidentified
  REGION 1..85: note = Description of Unknown:cds_NZ_WFIY01000004.1_cds_WP_155862620.1_399 target sequence
QMSHRFAKPVDEYYQPVIPPSAEKRNEEVVKKAYDDAYKYYYELLQNGVPEEDARYVLPNGVNTNIVVTMNARELYNFFSLRLCS

SEQ ID NO: 37835 - protein, 84 aa, unidentified
  REGION 1..84: note = Description of Unknown:cds_NZ_WFIY01000004.1_cds_WP_155862620.1_399 target sequence
RAQWEIRAIAWKMLEEVKKVHPRLFKYAGPNCIIHENFIRETPISLEEINEKTEFISQRCVEGVPRDGIYKCIQNAKSILNKIK

SEQ ID NO: 37836 - protein, 85 aa, unidentified
  REGION 1..85: note = Description of Unknown:cds_NZ_WFIY01000004.1_cds_WP_155862620.1_399 target sequence
WDYHEKTMTDEEVEVWIRDAIIHGYWSPLEHSVYTFSIEGISRVASHQLVRHRIASYTQMSHRFAKPVDEYYQPVIPPSAEKRNE

SEQ ID NO: 37837 - protein, 85 aa, unidentified
  REGION 1..85: note = Description of Unknown:cds_NZ_WFIY01000004.1_cds_WP_155862620.1_399 target sequence
EVVKKAYDDAYKYYYELLQNGVPEEDARYVLPNGVNTNIVVTMNARELYNFFSLRLCSRAQWEIRAIAWKMLEEVKKVHPRLFKY

SEQ ID NO: 37838 - protein, 85 aa, unidentified
  REGION 1..85: note = Description of Unknown:cds_NZ_WFIY01000004.1_cds_WP_155862767.1_581 target sequence
IEGLEALYMREVKRIYRSIYMWIMIVSQPVMWLIFFGSSLSGLPKEVLISFFHTTNYIAFILPGELSVSMLFVGMFSSMSLIQDK

SEQ ID NO: 37839 - protein, 85 aa, unidentified
  REGION 1..85: note = Description of Unknown:cds_NZ_WFIY01000004.1_cds_WP_155862767.1_581 target sequence
RFGYMKRIFITPVPKYYVFLAKVFGGITRGLLQVPILIGTAVAMGVSLNINLISILTLLLSLTFLGMGFSSLYAIFTIRTSDWQA

SEQ ID NO: 37840 - protein, 84 aa, unidentified
  REGION 1..84: note = Description of Unknown:cds_NZ_WFIY01000004.1_cds_WP_155862767.1_581 target sequence
PGVIANLLNLPLMFSSTALFPRAFFPSWLAAISDVNPITYSAELGRQALLTGDPNWYYLGYLAAFGLIMLVVGSYLTNKYMQAE

SEQ ID NO: 37841 - protein, 85 aa, unidentified
  REGION 1..85: note = Description of Unknown:cds_NZ_WFIY01000004.1_cds_WP_155862767.1_581 target sequence
QPVMWLIFFGSSLSGLPKEVLISFFHTTNYIAFILPGELSVSMLFVGMFSSMSLIQDKRFGYMKRIFITPVPKYYVFLAKVFGGI

SEQ ID NO: 37842 - protein, 85 aa, unidentified
  REGION 1..85: note = Description of Unknown:cds_NZ_WFIY01000004.1_cds_WP_155862767.1_581 target sequence
TRGLLQVPILIGTAVAMGVSLNINLISILTLLLSLTFLGMGFSSLYAIFTIRTSDWQAPGVIANLLNLPLMFSSTALFPRAFFPS

SEQ ID NO: 37843 - protein, 85 aa, unidentified
  REGION 1..85: note = Description of Unknown:cds_NZ_WFIY01000004.1_cds_WP_155863746.1_1617 target sequence
FVNKEYKDNFILLTFNTGTKYNVFNVKFMTELLDTLSEIEKEKKYRFIVFKGENGNFGSGADIRELNRASIDKEFASSFFNYMKD

SEQ ID NO: 37844 - protein, 85 aa, unidentified
  REGION 1..85: note = Description of Unknown:cds_NZ_WFIY01000004.1_cds_WP_155863746.1_1617 target sequence
LYLKLINIDKITIAQVEGIAYGASLELLLVMDFVIASKSAKFAAPGGKIGVFPPVLLTLGPYIIGLNNVRRLAMLGEEITAEEAE

SEQ ID NO: 37845 - protein, 84 aa, unidentified
  REGION 1..84: note = Description of Unknown:cds_NZ_WFIY01000004.1_cds_WP_155863746.1_1617 target sequence
KIGLITKATDEIDKETANLIYKMSFMAPSSLMLMKRHIMKYLDRDLSEVFKSLTIQVGGDESREGINAFLAKIKPSWLVNLSKL

SEQ ID NO: 37846 - protein, 85 aa, unidentified
  REGION 1..85: note = Description of Unknown:cds_NZ_WFIY01000004.1_cds_WP_155863746.1_1617 target sequence
FMTELLDTLSEIEKEKKYRFIVFKGENGNFGSGADIRELNRASIDKEFASSFFNYMKDLYLKLINIDKITIAQVEGIAYGASLEL

SEQ ID NO: 37847 - protein, 85 aa, unidentified
  REGION 1..85: note = Description of Unknown:cds_NZ_WFIY01000004.1_cds_WP_155863746.1_1617 target sequence
LLVMDFVIASKSAKFAAPGGKIGVFPPVLLTLGPYIIGLNNVRRLAMLGEEITAEEAEKIGLITKATDEIDKETANLIYKMSFMA

SEQ ID NO: 37848 - protein, 85 aa, unidentified
  REGION 1..85: note = Description of Unknown:cds_NZ_WFIY01000004.1_cds_WP_155864030.1_1963 target sequence
DQINKKILFYLLKDYRTSQRSIAKMIGISSPAVNYRIDKLIQDKVIKKVSLYVNPNFYGKYHAYVAFKNIKDWEGEYVFKVNCLE

SEQ ID NO: 37849 - protein, 85 aa, unidentified
  REGION 1..85: note = Description of Unknown:cds_NZ_WFIY01000004.1_cds_WP_155864030.1_1963 target sequence
ETNIYEIEGNTLDDLKKKIDIMSESLGYPRMIYIPKQQPYNPSNFDLKLVSIMKEEPTLDTMYLADKMKVSTKTIRRHIRYLYSR

SEQ ID NO: 37850 - protein, 84 aa, unidentified
  REGION 1..84: note = Description of Unknown:cds_NZ_WFIY01000004.1_cds_WP_155864030.1_1963 target sequence
NFIRLIPEIDLTKAGLVMYAVFTHNVEIGRKFFSRQMFREISDNTAGIFVNIGDSLEEVKEEFFKFREFDKDADLMIAIDYSVS

SEQ ID NO: 37851 - protein, 85 aa, unidentified
  REGION 1..85: note = Description of Unknown:cds_NZ_WFIY01000004.1_cds_WP_155864030.1_1963 target sequence
ISSPAVNYRIDKLIQDKVIKKVSLYVNPNFYGKYHAYVAFKNIKDWEGEYVFKVNCLEETNIYEIEGNTLDDLKKKIDIMSESLG

SEQ ID NO: 37852 - protein, 85 aa, unidentified
  REGION 1..85: note = Description of Unknown:cds_NZ_WFIY01000004.1_cds_WP_155864030.1_1963 target sequence
YPRMIYIPKQQPYNPSNFDLKLVSIMKEEPTLDTMYLADKMKVSTKTIRRHIRYLYSRNFIRLIPEIDLTKAGLVMYAVFTHNVE

SEQ ID NO: 37853 - protein, 85 aa, unidentified
  REGION 1..85: note = Description of Unknown:cds_NZ_WFIY01000004.1_cds_2214 target sequence
VQIKRVSLERIREEEEISGEDYVAVEEPMHLEICKDNCETFAIIMRTPGNDKELSLGFLYSEGVINGIEDVEKVVQKDKNTVEVW

SEQ ID NO: 37854 - protein, 85 aa, unidentified
  REGION 1..85: note = Description of Unknown:cds_NZ_WFIY01000004.1_cds_2214 target sequence
VNRLMKVKTRELIVNSSCGVCGRALLYTISILKSNLKVSKKLIFSLPSILRENQNAFNVTGGLHASALFDASGKLLKIYEDVGRH

SEQ ID NO: 37855 - protein, 85 aa, unidentified
  REGION 1..85: note = Description of Unknown:cds_NZ_WFIY01000004.1_cds_2214 target sequence
NAVDKIVGSLLIEKEIPAEKSILLVSGRLGYEIVSKGIKAGIPIIAGISAPTSLAVEIAEEAGVTLIGFLRGDSFNIYSHKERLI

SEQ ID NO: 37856 - protein, 84 aa, unidentified
  REGION 1..84: note = Description of Unknown:cds_NZ_WFIY01000004.1_cds_2214 target sequence
AVDKIVGSLLIEKEIPAEKSILLVSGRLGYEIVSKGIKAGIPIIAGISAPTSLAVEIAEEAGVTLIGFLRGDSFNIYSHKERLI

SEQ ID NO: 37857 - protein, 85 aa, unidentified
  REGION 1..85: note = Description of Unknown:cds_NZ_WFIY01000004.1_cds_2214 target sequence
PMHLEICKDNCETFAIIMRTPGNDKELSLGFLYSEGVINGIEDVEKVVQKDKNTVEVWVNRLMKVKTRELIVNSSCGVCGRALLY

SEQ ID NO: 37858 - protein, 85 aa, unidentified
  REGION 1..85: note = Description of Unknown:cds_NZ_WFIY01000004.1_cds_2214 target sequence
TISILKSNLKVSKKLIFSLPSILRENQNAFNVTGGLHASALFDASGKLLKIYEDVGRHNAVDKIVGSLLIEKEIPAEKSILLVSG

SEQ ID NO: 37859 - protein, 85 aa, unidentified
  REGION 1..85: note = Description of Unknown:cds_NZ_WFIY01000004.1_cds_WP_155864338.1_2351 target sequence
FSSYTLTVKMKYERNGDNKFNNFTGKISKIVVLTELPELEVLFRPTKGFFKPIHVSPPINKEAVYPYYERGVLKEVPLDGEYKIR

SEQ ID NO: 37860 - protein, 85 aa, unidentified
  REGION 1..85: note = Description of Unknown:cds_NZ_WFIY01000004.1_cds_WP_155864338.1_2351 target sequence
VGLPNELSKGFEEKVKGDLGVRTRIKVEGGLLEFVIERIEKDTFNFGNRVKLCFSPTLLANPFITNRDYRKFFPSPSAVFWIPYA

SEQ ID NO: 37861 - protein, 84 aa, unidentified
  REGION 1..84: note = Description of Unknown:cds_NZ_WFIY01000004.1_cds_WP_155864338.1_2351 target sequence
LMKNKNNLTPQELAEIESRITESWKTRIKTIWIPYDNGKEPVMIGKVEYRLLKNDDETRKLVETALIIGVGSSRASGFGHVELC

SEQ ID NO: 37862 - protein, 85 aa, unidentified
  REGION 1..85: note = Description of Unknown:cds_NZ_WFIY01000004.1_cds_WP_155864338.1_2351 target sequence
SKIVVLTELPELEVLFRPTKGFFKPIHVSPPINKEAVYPYYERGVLKEVPLDGEYKIRVGLPNELSKGFEEKVKGDLGVRTRIKV

SEQ ID NO: 37863 - protein, 85 aa, unidentified
  REGION 1..85: note = Description of Unknown:cds_NZ_WFIY01000004.1_cds_WP_155864338.1_2351 target sequence
EGGLLEFVIERIEKDTFNFGNRVKLCFSPTLLANPFITNRDYRKFFPSPSAVFWIPYALMKNKNNLTPQELAEIESRITESWKTR

SEQ ID NO: 37864 - protein, 85 aa, unidentified
  REGION 1..85: note = Description of Unknown:cds_NZ_WFIY01000003.1_cds_WP_155862281.1_2366 target sequence
FSSYTLTVKMKYERNGNNKFNNFTGKISKIVVLTELPELEVLFRPTKGFFKPIHVSPPINKEAVYPYYERGVLKEVPLDGEYKIR

SEQ ID NO: 37865 - protein, 85 aa, unidentified
  REGION 1..85: note = Description of Unknown:cds_NZ_WFIY01000003.1_cds_WP_155862281.1_2366 target sequence
VGLPNELSKGFEEKVKGDLGVRTRIKVEGGLLEFVIERIEKDTFNFGNKVKLCFSPTLLANPFITNRDYRKFFPSPSAVFWIPYA

SEQ ID NO: 37866 - protein, 84 aa, unidentified; identical to SEQ ID NO: 37861
  REGION 1..84: note = Description of Unknown:cds_NZ_WFIY01000003.1_cds_WP_155862281.1_2366 target sequence

SEQ ID NO: 37867 - protein, 85 aa, unidentified; identical to SEQ ID NO: 37862
  REGION 1..85: note = Description of Unknown:cds_NZ_WFIY01000003.1_cds_WP_155862281.1_2366 target sequence

SEQ ID NO: 37868 - protein, 85 aa, unidentified
  REGION 1..85: note = Description of Unknown:cds_NZ_WFIY01000003.1_cds_WP_155862281.1_2366 target sequence
EGGLLEFVIERIEKDTFNFGNKVKLCFSPTLLANPFITNRDYRKFFPSPSAVFWIPYALMKNKNNLTPQELAEIESRITESWKTR

SEQ ID NO: 37869 - protein, 85 aa, unidentified
  REGION 1..85: note = Description of Unknown:hvTR_P52470 target sequence
TQVGQYIISNNSTSNLILHITKKLVSGESLFNLKQEEILIIQNVCTLMFSHGIQILLLRETLHNIGVSDLVVLNRKVPDEFWFKI

SEQ ID NO: 37870 - protein, 85 aa, unidentified
  REGION 1..85: note = Description of Unknown:hvTR_P52470 target sequence
FCMIKQRSGSEILKHIFSEENAAQLSKKLHHTGIVKQIIESFFLDEFGLSITIPAEIIHDGNIMFSIGAIYNHRLLKLCRYFNKF

SEQ ID NO: 37871 - protein, 84 aa, unidentified
  REGION 1..84: note = Description of Unknown:hvTR_P52470 target sequence
FWGQEVYEPFIRKICKHLWFGYLIFFDKIKISHGAFSQQKPEHRNGLFTFIQNDFKVFCGIVEKEAKVTECNLSDLFSIGPLQF

SEQ ID NO: 37872 - protein, 85 aa, unidentified
  REGION 1..85: note = Description of Unknown:hvTR_P52470 target sequence
ESLFNLKQEEILIIQNVCTLMFSHGIQILLLRETLHNIGVSDLVVLNRKVPDEFWFKIFCMIKQRSGSEILKHIFSEENAAQLSK

SEQ ID NO: 37873 - protein, 85 aa, unidentified
  REGION 1..85: note = Description of Unknown:hvTR_P52470 target sequence
KLHHTGIVKQIIESFFLDEFGLSITIPAEIIHDGNIMFSIGAIYNHRLLKLCRYFNKFWGQEVYEPFIRKICKHLWFGYLIFFDK

SEQ ID NO: 37874 - protein, 85 aa, unidentified
  REGION 1..85: note = Description of Unknown:hvTR_Q98241 target sequence
NALFENLFDEDAVCAGSVSREDFLLVVAGAKVKFPRSLLSMYRVVPRTMSRYELALVQSETVTGVVFTTVYNVRRNLGLEEREAL

SEQ ID NO: 37875 - protein, 85 aa, unidentified
  REGION 1..85: note = Description of Unknown:hvTR_Q98241 target sequence
SLPALEKYYLDKANDVLTLMVNNTNLEHIAAYRMRSRRLLNPVVFRAGAVPLALVFTSRKKLSIYREDTSQAAEDSTYTKIAANV

SEQ ID NO: 37876 - protein, 84 aa, unidentified
  REGION 1..84: note = Description of Unknown:hvTR_Q98241 target sequence
VALAGKYAGLLLLDVHTPGTALMLTAVYGLDDRRELRKLADSTALENHQQSGALSEAMKLSDFRAVFEGLKKSVPLTNLEMINE

SEQ ID NO: 37877 - protein, 85 aa, unidentified
  REGION 1..85: note = Description of Unknown:hvTR_Q98241 target sequence
AGAKVKFPRSLLSMYRVVPRTMSRYELALVQSETVTGVVFTTVYNVRRNLGLEEREALSLPALEKYYLDKANDVLTLMVNNTNLE

SEQ ID NO: 37878 - protein, 85 aa, unidentified
  REGION 1..85: note = Description of Unknown:hvTR_Q98241 target sequence
HIAAYRMRSRRLLNPVVFRAGAVPLALVFTSRKKLSIYREDTSQAAEDSTYTKIAANVALAGKYAGLLLLDVHTPGTALMLTAVY

SEQ ID NO: 37879 - protein, 85 aa, unidentified
  REGION 1..85: note = Description of Unknown:cds_NZ_WFIY01000004.1_cds_WP_155862574.1_345 target sequence
NWFKLLGIFLSIILAVPVLFLIYMGFFVFKSSQAFSQTFYAGVELSLLSSAAAVVIDFALFTPLAYYLSREKDFITDSLVDVPAS

SEQ ID NO: 37880 - protein, 85 aa, unidentified
  REGION 1..85: note = Description of Unknown:cds_NZ_WFIY01000004.1_cds_WP_155862574.1_345 target sequence
IPHPIVGVALVFLDSPYSPFYKVFQGLGISLFDTYYGLISALVIVSAPIYIRSMKSYFDSMPRVYEEYARSLGAGMGRVYLMVLR

SEQ ID NO: 37881 - protein, 84 aa, unidentified
  REGION 1..84: note = Description of Unknown:cds_NZ_WFIY01000004.1_cds_WP_155862574.1_345 target sequence
RNSLKGALSSSLTSMSRAMSEFGSIAIVAYYVLYGPLAGTSPASILIYEYYGYYGPQVAVTASAIMIVVGIILLIILKTIQYLK

SEQ ID NO: 37882 - protein, 85 aa, unidentified
  REGION 1..85: note = Description of Unknown:cds_NZ_WFIY01000004.1_cds_WP_155862574.1_345 target sequence
VFKSSQAFSQTFYAGVELSLLSSAAAVVIDFALFTPLAYYLSREKDFITDSLVDVPASIPHPIVGVALVFLDSPYSPFYKVFQGL

SEQ ID NO: 37883 - protein, 85 aa, unidentified
  REGION 1..85: note = Description of Unknown:cds_NZ_WFIY01000004.1_cds_WP_155862574.1_345 target sequence
GISLFDTYYGLISALVIVSAPIYIRSMKSYFDSMPRVYEEYARSLGAGMGRVYLMVLRNSLKGALSSSLTSMSRAMSEFGSIAIV

SEQ ID NO: 37884 - protein, 85 aa, unidentified
  REGION 1..85: note = Description of Unknown:cds_NZ_WFIY01000004.1_cds_WP_155862582.1_355 target sequence
YYIFFTGTAGSGKTTLVKEFQDYLLDQELDTAVINLDPAVEKLPYTPDFDVRDYVDAFEVMEKYGLGPNSSLIASIDLLMTKAVE

SEQ ID NO: 37885 - protein, 85 aa, unidentified
  REGION 1..85: note = Description of Unknown:cds_NZ_WFIY01000004.1_cds_WP_155862582.1_355 target sequence
IKNEVSEIEANYVLIDTPGQVELFAYRDTGRLISSLIVGDNKAANVFLMDSFLAREARTYVSLLLLSSAIRFRMNLPQVNVLSKI

SEQ ID NO: 37886 - protein, 84 aa, unidentified
  REGION 1..84: note = Description of Unknown:cds_NZ_WFIY01000004.1_cds_WP_155862582.1_355 target sequence
IDLLTPKELEEIKNWSNGEELIDRLGEVDDYSFELVKTLIESLDSAPVPVSSTNDEGFDELYAELQRIFAGGEDYLTEENSPRL

SEQ ID NO: 37887 - protein, 85 aa, unidentified
  REGION 1..85: note = Description of Unknown:cds_NZ_WFIY01000004.1_cds_WP_155862582.1_355 target sequence
ELDTAVINLDPAVEKLPYTPDFDVRDYVDAFEVMEKYGLGPNSSLIASIDLLMTKAVEIKNEVSEIEANYVLIDTPGQVELFAYR

SEQ ID NO: 37888 - protein, 85 aa, unidentified
  REGION 1..85: note = Description of Unknown:cds_NZ_WFIY01000004.1_cds_WP_155862582.1_355 target sequence
DTGRLISSLIVGDNKAANVFLMDSFLAREARTYVSLLLLSSAIRFRMNLPQVNVLSKIDLLTPKELEEIKNWSNGEELIDRLGEV

SEQ ID NO: 37889 - protein, 85 aa, unidentified
  REGION 1..85: note = Description of Unknown:cds_NZ_WFIY01000004.1_cds_WP_155862833.1_662 target sequence
QYTEEVTVPIGKTYINTVLSNPYYISGILGHVTLLKVYDKVKNNYFPPSEVKEADNKFLSALVLQDEKGKVIVYQGEFIGPNVLP

SEQ ID NO: 37890 - protein, 85 aa, unidentified
  REGION 1..85: note = Description of Unknown:cds_NZ_WFIY01000004.1_cds_WP_155862833.1_662 target sequence
NYIEYYLKTNDEKIEIKLNFQLKERTDGTKINIGCEFIQRKGFFDFFSKNYGKFDEHLVKGHIIPFINSSLTKFIVMRKIYDETL

SEQ ID NO: 37891 - protein, 84 aa, unidentified
  REGION 1..84: note = Description of Unknown:cds_NZ_WFIY01000004.1_cds_WP_155862833.1_662 target sequence
LELNEALIKLRELPKTTGVIMIKSDSLDFTGYFNYNGMIGSELKYNDKLYNNAEALAELFKVRNEKVKMVIYEMPIHDIRLTFS

SEQ ID NO: 37892 - protein, 85 aa, unidentified
  REGION 1..85: note = Description of Unknown:cds_NZ_WFIY01000004.1_cds_WP_155862833.1_662 target sequence
ILGHVTLLKVYDKVKNNYFPPSEVKEADNKFLSALVLQDEKGKVIVYQGEFIGPNVLPNYIEYYLKTNDEKIEIKLNFQLKERTD

SEQ ID NO: 37893 - protein, 85 aa, unidentified
  REGION 1..85: note = Description of Unknown:cds_NZ_WFIY01000004.1_cds_WP_155862833.1_662 target sequence
GTKINIGCEFIQRKGFFDFFSKNYGKFDEHLVKGHIIPFINSSLTKFIVMRKIYDETLELNEALIKLRELPKTTGVIMIKSDSLD

SEQ ID NO: 37894 - protein, 85 aa, unidentified
  REGION 1..85: note = Description of Unknown:cds_NZ_WFIY01000004.1_cds_WP_155863567.1_1491 target sequence
RVLFYENDENPYFSMAFEESLWRNLKEGKVDNTLRFWRHKNVAIIGYFQLAEEELNFDVIRKYKIDVVRRFTGGGAVYQDMGCLI

SEQ ID NO: 37895 - protein, 85 aa, unidentified
  REGION 1..85: note = Description of Unknown:cds_NZ_WFIY01000004.1_cds_WP_155863567.1_1491 target sequence
WTIAVKGPKDGGVNYLYDFLLKGFVNALKHFANVRVENVNDVVVNERKVSGTSATFQEDYYLLHGTLLINTNLELMGKVLKVSKA

SEQ ID NO: 37896 - protein, 84 aa, unidentified
  REGION 1..84: note = Description of Unknown:cds_NZ_WFIY01000004.1_cds_WP_155863567.1_1491 target sequence
AKLSDKGVSEVKYRVTNLVDALGRKIDTSEIIDAIIKEYSSLLGEKAYFDLPTTDEIKLAEELYEKKYSKPEWNLLRLPSSYFE

SEQ ID NO: 37897 - protein, 85 aa, unidentified
  REGION 1..85: note = Description of Unknown:cds_NZ_WFIY01000004.1_cds_WP_155863567.1_1491 target sequence
GKVDNTLRFWRHKNVAIIGYFQLAEEELNFDVIRKYKIDVVRRFTGGGAVYQDMGCLIWTIAVKGPKDGGVNYLYDFLLKGFVNA

SEQ ID NO: 37898 - protein, 85 aa, unidentified
  REGION 1..85: note = Description of Unknown:cds_NZ_WFIY01000004.1_cds_WP_155863567.1_1491 target sequence
LKHFANVRVENVNDVVVNERKVSGTSATFQEDYYLLHGTLLINTNLELMGKVLKVSKAKLSDKGVSEVKYRVTNLVDALGRKIDT

SEQ ID NO: 37899 - protein, 85 aa, unidentified
  REGION 1..85: note = Description of Unknown:cds_NZ_WFIY01000004.1_cds_WP_155863686.1_1550 target sequence
RISVLSTKGGVGKSTIALLLSKYFSQNGVKTLLIDRDPLGWASNLAKIKGKGLLASIVDKEEDKQTYFKEVKTKDGGDFYILKLY

SEQ ID NO: 37900 - protein, 85 aa, unidentified
  REGION 1..85: note = Description of Unknown:cds_NZ_WFIY01000004.1_cds_WP_155863686.1_1550 target sequence
GDGARLYVDLDIIKRDEKLYKKLREKYQEILRNRFQAFIVDNPSMVQWNEDEVQYELRIFRENFPDEKIFRLYISDSSEISIEST

SEQ ID NO: 37901 - protein, 84 aa, unidentified
  REGION 1..84: note = Description of Unknown:cds_NZ_WFIY01000004.1_cds_WP_155863686.1_1550 target sequence
TLKYIKEIEQNPHKIGQYLGIVINLVPPFPEDLDKAMRLANKFEGIKVIIPFIESLFMLNDINVEIPEQVKYLGKEILKLNNKV

SEQ ID NO: 37902 - protein, 85 aa, unidentified
  REGION 1..85: note = Description of Unknown:cds_NZ_WFIY01000004.1_cds_WP_155863686.1_1550 target sequence
GVKTLLIDRDPLGWASNLAKIKGKGLLASIVDKEEDKQTYFKEVKTKDGGDFYILKLYGDGARLYVDLDIIKRDEKLYKKLREKY

SEQ ID NO: 37903 - protein, 85 aa, unidentified
  REGION 1..85: note = Description of Unknown:cds_NZ_WFIY01000004.1_cds_WP_155863686.1_1550 target sequence
QEILRNRFQAFIVDNPSMVQWNEDEVQYELRIFRENFPDEKIFRLYISDSSEISIESTLKYIKEIEQNPHKIGQYLGIVINLVPP

SEQ ID NO: 37904 - protein, 85 aa, unidentified
  REGION 1..85: note = Description of Unknown:cds_NZ_WFIY01000004.1_cds_WP_155864046.1_1980 target sequence
EKSPESRLKIVAILLAISTGVFYISYALIFYFIYVLKNNFFIEMIFPGTIGVSLVTLLPIGFLTRGLRNTNFNIGYLMYVTGIIL

SEQ ID NO: 37905 - protein, 85 aa, unidentified
  REGION 1..85: note = Description of Unknown:cds_NZ_WFIY01000004.1_cds_WP_155864046.1_1980 target sequence
FEFIPIPFLIFLGNFFLGITYRDIGRLEKNKKLENAGWVASVPFVSFIGFSLCYAYYKSPEEVEKEEEKKKEMEEIKPSPVPYQI

SEQ ID NO: 37906 - protein, 84 aa, unidentified
  REGION 1..84: note = Description of Unknown:cds_NZ_WFIY01000004.1_cds_WP_155864046.1_1980 target sequence
IRIGKMTSNGDFEFSFYSPREDKILSIKFEDKTINTEIPVKVGKNMVKSRVQIDPLKMIAGNLYNITITFSNGETFTAVVEYMP

SEQ ID NO: 37907 - protein, 85 aa, unidentified
  REGION 1..85: note = Description of Unknown:cds_NZ_WFIY01000004.1_cds_WP_155864046.1_1980 target sequence
LIFYFIYVLKNNFFIEMIFPGTIGVSLVTLLPIGFLTRGLRNTNFNIGYLMYVTGIILFEFIPIPFLIFLGNFFLGITYRDIGRL

SEQ ID NO: 37908 - protein, 85 aa, unidentified
  REGION 1..85: note = Description of Unknown:cds_NZ_WFIY01000004.1_cds_WP_155864046.1_1980 target sequence
EKNKKLENAGWVASVPFVSFIGFSLCYAYYKSPEEVEKEEEKKKEMEEIKPSPVPYQIRIGKMTSNGDFEFSFYSPREDKILSIK

SEQ ID NO: 37909 - protein, 85 aa, unidentified
  REGION 1..85: note = Description of Unknown:cds_NZ_WFIY01000004.1_cds_WP_155864163.1_2118 target sequence
IELNDVHVYYDREVIKGVNMKVDGEKVLLLGPNGSGKSTLLSAIAGIIPYKGSIKIDGMEVRNVKNYNEVATNLPQAFSIGLTID

SEQ ID NO: 37910 - protein, 85 aa, unidentified
  REGION 1..85: note = Description of Unknown:cds_NZ_WFIY01000004.1_cds_WP_155864163.1_2118 target sequence
DIIEIYGELKGLKIDVKAELEKLGIKTKKKIYQLSAGQSVIVRTLIALATDPKVILIDEPFENVDVAKRKIVVNWLKEHGKEGII

SEQ ID NO: 37911 - protein, 84 aa, unidentified
  REGION 1..84: note = Description of Unknown:cds_NZ_WFIY01000004.1_cds_WP_155864163.1_2118 target sequence
IVTHEVDIARQFSDYKAFIILEGKVFGPITVSDLLSSSVVMGEDPSALLTLEINGKKVSLVRGDKGYKMDMIGSLERLYNLLEV

SEQ ID NO: 37912 - protein, 85 aa, unidentified
  REGION 1..85: note = Description of Unknown:cds_NZ_WFIY01000004.1_cds_WP_155864163.1_2118 target sequence
LLLGPNGSGKSTLLSAIAGIIPYKGSIKIDGMEVRNVKNYNEVATNLPQAFSIGLTIDDIIEIYGELKGLKIDVKAELEKLGIKT

SEQ ID NO: 37913 - protein, 85 aa, unidentified
  REGION 1..85: note = Description of Unknown:cds_NZ_WFIY01000004.1_cds_WP_155864163.1_2118 target sequence
KKKIYQLSAGQSVIVRTLIALATDPKVILIDEPFENVDVAKRKIVVNWLKEHGKEGIIVTHEVDIARQFSDYKAFIILEGKVFGP

SEQ ID NO: 37914 - protein, 85 aa, unidentified
  REGION 1..85: note = Description of Unknown:cds_NZ_WFIY01000004.1_cds_WP_162309170.1_2119 target sequence
LLTNPYALGWGIAFMFFWIVMGAFIESASVPKSSAVYYTASWYGIIALLSTSSFATSIAFMIYYQSGSLPYFMRFSKLTPKYYLF

SEQ ID NO: 37915 - protein, 85 aa, unidentified
  REGION 1..85: note = Description of Unknown:cds_NZ_WFIY01000004.1_cds_WP_162309170.1_2119 target sequence
SLYFTMLVTTIIVSIIMGLGVISLFSYHFGETIAPKNWGLFFLDAILAGVFYLPLSLLLEELTIVTTRRLREAISYIPLVLAYLF

SEQ ID NO: 37916 - protein, 84 aa, unidentified
  REGION 1..84: note = Description of Unknown:cds_NZ_WFIY01000004.1_cds_WP_162309170.1_2119 target sequence
GLSYTNINLGNLVYYSPFLSIQVLGVQSFFTGSIPLNFNDFKGPTLNVDYVIISAIGWSIVLSFASMLLFRRLYYKSLEEARIV

SEQ ID NO: 37917 - protein, 85 aa, unidentified
  REGION 1..85: note = Description of Unknown:cds_NZ_WFIY01000004.1_cds_WP_162309170.1_2119 target sequence
ASVPKSSAVYYTASWYGIIALLSTSSFATSIAFMIYYQSGSLPYFMRFSKLTPKYYLFSLYFTMLVTTIIVSIIMGLGVISLFSY

SEQ ID NO: 37918 - protein, 85 aa, unidentified
  REGION 1..85: note = Description of Unknown:cds_NZ_WFIY01000004.1_cds_WP_162309170.1_2119 target sequence
HFGETIAPKNWGLFFLDAILAGVFYLPLSLLLEELTIVTTRRLREAISYIPLVLAYLFGLSYTNINLGNLVYYSPFLSIQVLGVQ

SEQ ID NO: 37919 - protein, 85 aa, unidentified
  REGION 1..85: note = Description of Unknown:cds_NC_035460.1_cds_YP_009408080.1_129 target sequence
NRFQEKQFNRVSLLQAPFRIALVGGSGSGKTTYLLSLFSTLVNKYKHIFLFTPVYNSDYDSYIWPDHVNKVTTTEELDYALITIK

SEQ ID NO: 37920 - protein, 85 aa, unidentified
  REGION 1..85: note = Description of Unknown:cds_NC_035460.1_cds_YP_009408080.1_129 target sequence
NKIEKYIETKGTKQADLFLFIFDDMGDKQTKSTVLLDFLNHGRHLNTSIILLCQTYKHVPLNGRTSITHFCCCNVSDSDIENMLR

SEQ ID NO: 37921 - protein, 84 aa, unidentified
  REGION 1..84: note = Description of Unknown:cds_NC_035460.1_cds_YP_009408080.1_129 target sequence
RSMSITGSKKDVIKSISLLRSVSSNKRRVLIIEDSVFSECEQRICYDTADENVINNKINPLILLKQFSHMKKKLSKILQEEEKK

SEQ ID NO: 37922 - protein, 85 aa, unidentified
  REGION 1..85: note = Description of Unknown:cds_NC_035460.1_cds_YP_009408080.1_129 target sequence
SGKTTYLLSLFSTLVNKYKHIFLFTPVYNSDYDSYIWPDHVNKVTTTEELDYALITIKNKIEKYIETKGTKQADLFLFIFDDMGD

SEQ ID NO: 37923 - protein, 85 aa, unidentified
  REGION 1..85: note = Description of Unknown:cds_NC_035460.1_cds_YP_009408080.1_129 target sequence
KQTKSTVLLDFLNHGRHLNTSIILLCQTYKHVPLNGRTSITHFCCCNVSDSDIENMLRSMSITGSKKDVIKSISLLRSVSSNKRR

SEQ ID NO: 37924 - protein, 85 aa, unidentified
  REGION 1..85: note = Description of Unknown:cds_NC_009884.1_cds_YP_001496969.1_44 target sequence
KRQYILHVKPNIHARISSIHQSSGGVFEVEDVNNVQYNVNDNELSVKGNYIGGEYGEMIWNIINTTNVTQYVALVRGATIKLQDS

SEQ ID NO: 37925 - protein, 85 aa, unidentified
  REGION 1..85: note = Description of Unknown:cds_NC_009884.1_cds_YP_001496969.1_44 target sequence
SSSQEVTIPDYLFGRAFAEVYFNLGISQFGDDATAFETPYTLAVYNGDTIGFVFAVKPYTVIHVPEYGFTNLVSYTARLLPVKLG

SEQ ID NO: 37926 - protein, 84 aa, unidentified
  REGION 1..84: note = Description of Unknown:cds_NC_009884.1_cds_YP_001496969.1_44 target sequence
GGINTYIDFYDYSEVVQYQSQTGYNINYMPDPIVFSSIQVKADANLLGYGFHERLLLPIPTQWLNIANDVATALEKLKSLSKLL

SEQ ID NO: 37927 - protein, 85 aa, unidentified
  REGION 1..85: note = Description of Unknown:cds_NC_009884.1_cds_YP_001496969.1_44 target sequence
EVEDVNNVQYNVNDNELSVKGNYIGGEYGEMIWNIINTTNVTQYVALVRGATIKLQDSSSSQEVTIPDYLFGRAFAEVYFNLGIS

SEQ ID NO: 37928 - protein, 85 aa, unidentified
  REGION 1..85: note = Description of Unknown:cds_NC_009884.1_cds_YP_001496969.1_44 target sequence
QFGDDATAFETPYTLAVYNGDTIGFVFAVKPYTVIHVPEYGFTNLVSYTARLLPVKLGGINTYIDFYDYSEVVQYQSQTGYNINY

SEQ ID NO: 37929 - protein, 85 aa, unidentified
  REGION 1..85: note = Description of Unknown:cds_NC_001608.3_cds_YP_001531158.1_6 target sequence
AELSTRYNLPANVTENSINLDLNSTARWIKEPSVGGWTVKWGNFVFHIPNTGMTLLHHLKSNFVVPEWQQTRNLFSHLFKNPKST

SEQ ID NO: 37930 - protein, 85 aa, unidentified
  REGION 1..85: note = Description of Unknown:cds_NC_001608.3_cds_YP_001531158.1_6 target sequence
IIEPFLALRILLGVALKDQELQQSLIPGFRSIVHMLSEWLLLEVTSAIHISPNLLGIYLTSDMFKILMAGVKNFFNKMFTLHVVN

SEQ ID NO: 37931 - protein, 84 aa, unidentified
  REGION 1..84: note = Description of Unknown:cds_NC_001608.3_cds_YP_001531158.1_6 target sequence
VNDHGKPSSIEIKLTGQQIIITRVNMGFLVEVRRIDIEPCCGETVLSESVVFGLVAEAVLREHSQMEKGQPLNLTQYMNSKIAI

SEQ ID NO: 37932 - protein, 85 aa, unidentified
  REGION 1..85: note = Description of Unknown:cds_NC_001608.3_cds_YP_001531158.1_6 target sequence
WIKEPSVGGWTVKWGNFVFHIPNTGMTLLHHLKSNFVVPEWQQTRNLFSHLFKNPKSTIIEPFLALRILLGVALKDQELQQSLIP

SEQ ID NO: 37933 - protein, 85 aa, unidentified
  REGION 1..85: note = Description of Unknown:cds_NC_001608.3_cds_YP_001531158.1_6 target sequence
GFRSIVHMLSEWLLLEVTSAIHISPNLLGIYLTSDMFKILMAGVKNFFNKMFTLHVVNDHGKPSSIEIKLTGQQIIITRVNMGFL

SEQ ID NO: 37934 - protein, 85 aa, unidentified
  REGION 1..85: note = Description of Unknown:cds_NZ_WFIY01000004.1_cds_WP_155864415.1_1245 target sequence
LPSSIISRSQVICTPCSWQYGIESPQPNKTIYGGFIIIKTPKKLEDLDCLIVIWPSLTTSTGYFYQVSLGYHPEWGWHVSAGSTN

SEQ ID NO: 37935 - protein, 85 aa, unidentified
  REGION 1..85: note = Description of Unknown:cds_NZ_WFIY01000004.1_cds_WP_155864415.1_1245 target sequence
PQLFCGLSCGPFAVNNELFRPKPDSLYELGIRLIPKEDTNEVWLYVVDWQTKILYTIFKLTDPGTVATPIGGILEGFTKSEEALS

SEQ ID NO: 37936 - protein, 84 aa, unidentified
  REGION 1..84: note = Description of Unknown:cds_NZ_WFIY01000004.1_cds_WP_155864415.1_1245 target sequence
SNISGDNAFEIITANWLITPWSSELWPHGYVYGPTPQTCTPTNNGFSGYESVPSSIQIKPLKPGKIVIGANVGGQQYGSGYQLW

SEQ ID NO: 37937 - protein, 85 aa, unidentified
  REGION 1..85: note = Description of Unknown:cds_NZ_WFIY01000004.1_cds_WP_155864415.1_1245 target sequence
NKTIYGGFIIIKTPKKLEDLDCLIVIWPSLTTSTGYFYQVSLGYHPEWGWHVSAGSTNPQLFCGLSCGPFAVNNELFRPKPDSLY

SEQ ID NO: 37938 - protein, 85 aa, unidentified
  REGION 1..85: note = Description of Unknown:cds_NZ_WFIY01000004.1_cds_WP_155864415.1_1245 target sequence
ELGIRLIPKEDTNEVWLYVVDWQTKILYTIFKLTDPGTVATPIGGILEGFTKSEEALSNISGDNAFEIITANWLITPWSSELWPH

SEQ ID NO: 37939 - protein, 85 aa, unidentified
  REGION 1..85: note = Description of Unknown:cds_NZ_WFIY01000004.1_cds_WP_155863961.1_1883 target sequence
IKVYVILLSLIIALSLFFTFYELPKGKPLHCPCPSYPLGTYINGDNMINMNAEAIINTLIFGVVVGIVETFIAVIYGSVSGLMGG

SEQ ID NO: 37940 - protein, 85 aa, unidentified
  REGION 1..85: note = Description of Unknown:cds_NZ_WFIY01000004.1_cds_WP_155863961.1_1883 target sequence
KIRIIMVRISDSINTVPRILLLLSIALIYGIPTGTSLKANFFITAIIVGLTGWANYSRQVSEYLFTSSSSTLSRIVPKTPFSLLF

SEQ ID NO: 37941 - protein, 84 aa, unidentified
  REGION 1..84: note = Description of Unknown:cds_NZ_WFIY01000004.1_cds_WP_155863961.1_1883 target sequence
LFFSNKEEIYNLSKKFIIPAMIDGISTYTAMGVIAGVGDPRFPTLTTLLTVASRYLPYWWLYLPPALFRAIVIVLLYLISDNLK

SEQ ID NO: 37942 - protein, 85 aa, unidentified
  REGION 1..85: note = Description of Unknown:cds_NZ_WFIY01000004.1_cds_WP_155863961.1_1883 target sequence
PLHCPCPSYPLGTYINGDNMINMNAEAIINTLIFGVVVGIVETFIAVIYGSVSGLMGGKIRIIMVRISDSINTVPRILLLLSIAL

SEQ ID NO: 37943 - protein, 85 aa, unidentified
  REGION 1..85: note = Description of Unknown:cds_NZ_WFIY01000004.1_cds_WP_155863961.1_1883 target sequence
IYGIPTGTSLKANFFITAIIVGLTGWANYSRQVSEYLFTSSSSTLSRIVPKTPFSLLFFSNKEEIYNLSKKFIIPAMIDGISTYT

SEQ ID NO: 37944 - protein, 85 aa, unidentified
  REGION 1..85: note = Description of Unknown:cds_NZ_WFIY01000004.1_cds_WP_155864052.1_1988 target sequence
GKIYVVGIGPGGKETRTLEMLKAIKESDVIVAYTTYARLIQDLTDGKEVITAKMKEEVFRAKVAIEKALQGHTVAVVSSGDPQVY

SEQ ID NO: 37945 - protein, 85 aa, unidentified
  REGION 1..85: note = Description of Unknown:cds_NZ_WFIY01000004.1_cds_WP_155864052.1_1988 target sequence
GMAGLIFDMACKNNINVEIQIIPGITAANAVAAKLGSPLSMDFAVISLSDLLIPSEEILNRVRKAAEGDFVIVLYNPINKPLLLE

SEQ ID NO: 37946 - protein, 84 aa, unidentified
  REGION 1..84: note = Description of Unknown:cds_NZ_WFIY01000004.1_cds_WP_155864052.1_1988 target sequence
LEAMRIIKEVKGTDVPVGIVKSAYREDEEIMIATLSTWEKFLNKINMITTIIVGNSKSYICNNKIITPRGYERRYDLHVIDSNS

SEQ ID NO: 37947 - protein, 85 aa, unidentified
  REGION 1..85: note = Description of Unknown:cds_NZ_WFIY01000004.1_cds_WP_155864052.1_1988 target sequence
DVIVAYTTYARLIQDLTDGKEVITAKMKEEVFRAKVAIEKALQGHTVAVVSSGDPQVYGMAGLIFDMACKNNINVEIQIIPGITA

SEQ ID NO: 37948 - protein, 85 aa, unidentified
  REGION 1..85: note = Description of Unknown:cds_NZ_WFIY01000004.1_cds_WP_155864052.1_1988 target sequence
ANAVAAKLGSPLSMDFAVISLSDLLIPSEEILNRVRKAAEGDFVIVLYNPINKPLLLEAMRIIKEVKGTDVPVGIVKSAYREDEE

SEQ ID NO: 37949 - protein, 85 aa, unidentified
  REGION 1..85: note = Description of Unknown:cds_NC_030656.1_cds_YP_009268783.1_68 target sequence
SLILEHIIDDDSVFSGGAAIPCLEDMPIVIAGARVKFPKSMLSLFHIIPRTMSRYNLELVNTENIVGGTFTTAYNIRRNMGITSD

SEQ ID NO: 37950 - protein, 85 aa, unidentified
  REGION 1..85: note = Description of Unknown:cds_NC_030656.1_cds_YP_009268783.1_68 target sequence
PLTIKLIEKYFLDSANEVLTLMIRNTSFSNLKQFKKKGKRNNNPVIFRSGSSPLLLIIESKTKQISIYKEDTSKQNDSYTPVGEN

SEQ ID NO: 37951 - protein, 84 aa, unidentified
  REGION 1..84: note = Description of Unknown:cds_NC_030656.1_cds_YP_009268783.1_68 target sequence
ENVALVSKYAGITLLDVHTPSKFMELTAIYGIKGNNTLKKLSTDKDLKEYQESPLSEPVRLNDFINLFESIKQNIPMTSVPVSD

SEQ ID NO: 37952 - protein, 85 aa, unidentified
  REGION 1..85: note = Description of Unknown:cds_NC_030656.1_cds_YP_009268783.1_68 target sequence
IVIAGARVKFPKSMLSLFHIIPRTMSRYNLELVNTENIVGGTFTTAYNIRRNMGITSDPLTIKLIEKYFLDSANEVLTLMIRNTS

SEQ ID NO: 37953 - protein, 85 aa, unidentified
  REGION 1..85: note = Description of Unknown:cds_NC_030656.1_cds_YP_009268783.1_68 target sequence
FSNLKQFKKKGKRNNNPVIFRSGSSPLLLIIESKTKQISIYKEDTSKQNDSYTPVGENVALVSKYAGITLLDVHTPSKFMELTAI

SEQ ID NO: 37954 - protein, 85 aa, unidentified
  REGION 1..85: note = Description of Unknown:hvTR_Q6TUV0 target sequence
SLILENLFDDDTLFYAGGSLDYEYFESIIAGAKVRYPRSFLSIFNIIPRNMTKYELELVQTENITGAVFTTAFNIKKNLGMNDEN

SEQ ID NO: 37955 - protein, 85 aa, unidentified
  REGION 1..85: note = Description of Unknown:hvTR_Q6TUV0 target sequence
LTIEAIEGYYLDPNNDILTLMINNTSLMEVVPKRKSKRNKNPVLFRQGSVPLFFIFESRKKVDIYKENIENKKDSTSYSQIDENI

SEQ ID NO: 37956 - protein, 84 aa, unidentified
  REGION 1..84: note = Description of Unknown:hvTR_Q6TUV0 target sequence
ENIALISKYSNMQLLDVHSPSAFMKLNGVYGFTHKNELRKLSSNKEIEEYSNKPLQEPVRLNDFINLFDCVKKNIPLTNVIDDE

SEQ ID NO: 37957 - protein, 85 aa, unidentified
  REGION 1..85: note = Description of Unknown:hvTR_Q6TUV0 target sequence
IIAGAKVRYPRSFLSIFNIIPRNMTKYELELVQTENITGAVFTTAFNIKKNLGMNDENLTIEAIEGYYLDPNNDILTLMINNTSL

SEQ ID NO: 37958 - protein, 85 aa, unidentified
  REGION 1..85: note = Description of Unknown:hvTR_Q6TUV0 target sequence
MEVVPKRKSKRNKNPVLFRQGSVPLFFIFESRKKVDIYKENIENKKDSTSYSQIDENIALISKYSNMQLLDVHSPSAFMKLNGVY

SEQ ID NO: 37959 - protein, 85 aa, unidentified
  REGION 1..85: note = Description of Unknown:cds_NZ_WFIY01000004.1_cds_WP_155862449.1_200 target sequence
LYFIGLGLAKKFLTQASIDAMRKVDVLYLDAYTSLSCDINKEYLEKLLGRQIILADRNTLENNSKSIIKLLEDGKSVGIATIGDP

SEQ ID NO: 37960 - protein, 85 aa, unidentified
  REGION 1..85: note = Description of Unknown:cds_NZ_WFIY01000004.1_cds_WP_155862449.1_200 target sequence
MIATTHVSLATEAKNKGYNVMIIPGISVHCYVISKSMLSSYKFGRSVTVVYPYDKILDTTPYEVIKDNSSRGLHTILYLDLKEGK

SEQ ID NO: 37961 - protein, 84 aa, unidentified
  REGION 1..84: note = Description of Unknown:cds_NZ_WFIY01000004.1_cds_WP_155862449.1_200 target sequence
EGKPMSAKDAISLLLQMEEIKKEGIITPSTQIIIGQRLGCEDEEVKALTISEALEYKYKDPPHIIIVPSKNLHYMEVEALKCLH

SEQ ID NO: 37962 - protein, 85 aa, unidentified
  REGION 1..85: note = Description of Unknown:cds_NZ_WFIY01000004.1_cds_WP_155862449.1_200 target sequence
YLDAYTSLSCDINKEYLEKLLGRQIILADRNTLENNSKSIIKLLEDGKSVGIATIGDPMIATTHVSLATEAKNKGYNVMIIPGIS

SEQ ID NO: 37963 - protein, 85 aa, unidentified
  REGION 1..85: note = Description of Unknown:cds_NZ_WFIY01000004.1_cds_WP_155862449.1_200 target sequence
VHCYVISKSMLSSYKFGRSVTVVYPYDKILDTTPYEVIKDNSSRGLHTILYLDLKEGKPMSAKDAISLLLQMEEIKKEGIITPST

SEQ ID NO: 37964 - protein, 85 aa, unidentified
  REGION 1..85: note = Description of Unknown:cds_NZ_WFIY01000004.1_cds_WP_155862715.1_516 target sequence
LKEISLLASIFAGITIVLGGIVEGYGYGLSLGTNWPYTRDIMQLAAKKDPEAIHRISATIVGIISLVFLILRFSVVSLVGFLGVI

SEQ ID NO: 37965 - protein, 85 aa, unidentified
  REGION 1..85: note = Description of Unknown:cds_NZ_WFIY01000004.1_cds_WP_155862715.1_516 target sequence
ATALLGMATLYVLAGKLPAVFQGLHDIAAYSVFATYFVIFLKGFNVNIIQFFLYAVLPPHFLYFVIFMGGVVTGMRKMKFQIGDV

SEQ ID NO: 37966 - protein, 84 aa, unidentified
  REGION 1..84: note = Description of Unknown:cds_NZ_WFIY01000004.1_cds_WP_155862715.1_516 target sequence
GDVRKPKNWLQGAWLIHSVLAAIFVIALILEALWIPLLLTIAEVVVGLLVYVGANKNPVKPGISVGLHQLFSLLIVASLIYYAL

SEQ ID NO: 37967 - protein, 85 aa, unidentified
  REGION 1..85: note = Description of Unknown:cds_NZ_WFIY01000004.1_cds_WP_155862715.1_516 target sequence
GLSLGTNWPYTRDIMQLAAKKDPEAIHRISATIVGIISLVFLILRFSVVSLVGFLGVIATALLGMATLYVLAGKLPAVFQGLHDI

SEQ ID NO: 37968 - protein, 85 aa, unidentified
  REGION 1..85: note = Description of Unknown:cds_NZ_WFIY01000004.1_cds_WP_155862715.1_516 target sequence
AAYSVFATYFVIFLKGFNVNIIQFFLYAVLPPHFLYFVIFMGGVVTGMRKMKFQIGDVRKPKNWLQGAWLIHSVLAAIFVIALIL

SEQ ID NO: 37969 - protein, 85 aa, unidentified
  REGION 1..85: note = Description of Unknown:cds_NZ_WFIY01000004.1_cds_WP_155862721.1_523 target sequence
IRKAVITAAGKGSRMRYITSVLPKALLPLFKQEDGKRVMRPIIDLIMSSLSSVGVNSFCIVVGKHGKLLMDYLYERRGVTFVFQE

SEQ ID NO: 37970 - protein, 85 aa, unidentified
  REGION 1..85: note = Description of Unknown:cds_NZ_WFIY01000004.1_cds_WP_155862721.1_523 target sequence
QPKGFGDAVLRAENFIYNEPFFVHADDGILTGGYLEASELYEQNKPEGVLLLRKVENPFRYGIVKAEEKGIFLNHKLYRIIDAQE

SEQ ID NO: 37971 - protein, 84 aa, unidentified
  REGION 1..84: note = Description of Unknown:cds_NZ_WFIY01000004.1_cds_WP_155862721.1_523 target sequence
AQEKPKNPFSNLAISAVYIFKPSIFKALKEVDNYEGELELTYGIKKILDQGGEIYAILLEKEKWLNVGDPEHYYEALKYSFYRI

SEQ ID NO: 37972 - protein, 85 aa, unidentified
  REGION 1..85: note = Description of Unknown:cds_NZ_WFIY01000004.1_cds_WP_155862721.1_523 target sequence
PLFKQEDGKRVMRPIIDLIMSSLSSVGVNSFCIVVGKHGKLLMDYLYERRGVTFVFQEQPKGFGDAVLRAENFIYNEPFFVHADD

SEQ ID NO: 37973 - protein, 85 aa, unidentified
  REGION 1..85: note = Description of Unknown:cds_NZ_WFIY01000004.1_cds_WP_155862721.1_523 target sequence
GILTGGYLEASELYEQNKPEGVLLLRKVENPFRYGIVKAEEKGIFLNHKLYRIIDAQEKPKNPFSNLAISAVYIFKPSIFKALKE

SEQ ID NO: 37974 - protein, 85 aa, unidentified
  REGION 1..85: note = Description of Unknown:cds_NZ_WFIY01000004.1_cds_WP_155862848.1_681 target sequence
LENKVTDIKSALDLIREGDTITISGMSIHRNPMGFIFELIKSGIRNLNFIDREPGLGLEVLLQNNVLKKVRIAMATLEWFGMLPS

SEQ ID NO: 37975 - protein, 85 aa, unidentified
  REGION 1..85: note = Description of Unknown:cds_NZ_WFIY01000004.1_cds_WP_155862848.1_681 target sequence
FRRKAESGEIEILEDTCGAFIAGIRAGAFGVPFMPVKGIIGSDLIKLHEKEGTWKIVDDPFSGEKIVLVKAITPDVAIIHVNKAD

SEQ ID NO: 37976 - protein, 84 aa, unidentified
  REGION 1..84: note = Description of Unknown:cds_NZ_WFIY01000004.1_cds_WP_155862848.1_681 target sequence
ADPEGNAEIEGPVYEDEYKARASKKVIITAEELVDKSYFYKKRPNIYAEHVTAVVHMPRGAEPTSMFPLYDADYEKILNILGMT

SEQ ID NO: 37977 - protein, 85 aa, unidentified
  REGION 1..85: note = Description of Unknown:cds_NZ_WFIY01000004.1_cds_WP_155862848.1_681 target sequence
IHRNPMGFIFELIKSGIRNLNFIDREPGLGLEVLLQNNVLKKVRIAMATLEWFGMLPSFRRKAESGEIEILEDTCGAFIAGIRAG

SEQ ID NO: 37978 - protein, 85 aa, unidentified
  REGION 1..85: note = Description of Unknown:cds_NZ_WFIY01000004.1_cds_WP_155862848.1_681 target sequence
AFGVPFMPVKGIIGSDLIKLHEKEGTWKIVDDPFSGEKIVLVKAITPDVAIIHVNKADPEGNAEIEGPVYEDEYKARASKKVIIT

SEQ ID NO: 37979 - protein, 85 aa, unidentified
  REGION 1..85: note = Description of Unknown:cds_NZ_WFIY01000004.1_cds_WP_155863007.1_886 target sequence
SASQYNPYNWKFLLFTQVWLIIISIVLTYYPQYYFEIIILYIIVIFGFTFFMTYKSNPVFRDRKLLYEIVNARTIYEEKDVTKLI

SEQ ID NO: 37980 - protein, 85 aa, unidentified
  REGION 1..85: note = Description of Unknown:cds_NZ_WFIY01000004.1_cds_WP_155863007.1_886 target sequence
MADQEYQKQYMDSIKRNFRMLGFYIVYLAILFFAYQYIIKFADSQAMSYRLLVYLAYFEALFGIGFFVSRKILAPSMSNMAPMAL

SEQ ID NO: 37981 - protein, 84 aa, unidentified
  REGION 1..84: note = Description of Unknown:cds_NZ_WFIY01000004.1_cds_WP_155863007.1_886 target sequence
MALPSYKITEKGIVSGKGYSVFLHAKYLLNSEITINREKHYIEIDSTKQKLPYKVRLYSQDIDRVLDYIERVKRLELKRQSSEG

SEQ ID NO: 37982 - protein, 85 aa, unidentified
  REGION 1..85: note = Description of Unknown:cds_NZ_WFIY01000004.1_cds_WP_155863007.1_886 target sequence
TYYPQYYFEIIILYIIVIFGFTFFMTYKSNPVFRDRKLLYEIVNARTIYEEKDVTKLIMADQEYQKQYMDSIKRNFRMLGFYIVY

SEQ ID NO: 37983 - protein, 85 aa, unidentified
  REGION 1..85: note = Description of Unknown:cds_NZ_WFIY01000004.1_cds_WP_155863007.1_886 target sequence
LAILFFAYQYIIKFADSQAMSYRLLVYLAYFEALFGIGFFVSRKILAPSMSNMAPMALPSYKITEKGIVSGKGYSVFLHAKYLLN

SEQ ID NO: 37984 - protein, 85 aa, unidentified
  REGION 1..85: note = Description of Unknown:cds_NZ_WFIY01000004.1_cds_WP_155863440.1_1413 target sequence
SIPISSPQKKVNFENLAKDYLKIWDSIYTELKRRNSKALIYGSIALYYRLMNSRDSIELLKLGRNNGPQDLNVLVPIKYRDVFKE

SEQ ID NO: 37985 - protein, 85 aa, unidentified
  REGION 1..85: note = Description of Unknown:cds_NZ_WFIY01000004.1_cds_WP_155863440.1_1413 target sequence
VVINEGFTPYYHLEVTIGDKAGMFFMNEMIIKAYYMDKISFNHDFEVDWSQEYSLSLTDLLLTKLQIHYALDKDIADIIAILLKY

SEQ ID NO: 37986 - protein, 84 aa, unidentified
  REGION 1..84: note = Description of Unknown:cds_NZ_WFIY01000004.1_cds_WP_155863440.1_1413 target sequence
LKYDDIDKEKIARILSNDWGFWKDAVSNLNKIRELIKKIEANNPNTKLRDIIPLSLKLIGYINNYPKSDNWKPLGDDEKYWKDF

SEQ ID NO: 37987 - protein, 85 aa, unidentified
  REGION 1..85: note = Description of Unknown:cds_NZ_WFIY01000004.1_cds_WP_155863440.1_1413 target sequence
YTELKRRNSKALIYGSIALYYRLMNSRDSIELLKLGRNNGPQDLNVLVPIKYRDVFKEVVINEGFTPYYHLEVTIGDKAGMFFMN

SEQ ID NO: 37988 - protein, 85 aa, unidentified
  REGION 1..85: note = Description of Unknown:cds_NZ_WFIY01000004.1_cds_WP_155863440.1_1413 target sequence
EMIIKAYYMDKISFNHDFEVDWSQEYSLSLTDLLLTKLQIHYALDKDIADIIAILLKYDDIDKEKIARILSNDWGFWKDAVSNLN

SEQ ID NO: 37989 - protein, 85 aa, unidentified
  REGION 1..85: note = Description of Unknown:cds_NZ_WFIY01000004.1_cds_WP_155863950.1_1871 target sequence
LQLIKNRISVNSISIPKDFSVIAYGKGMELPAYTLERSIINLEGKIVKTVPIHELALVEDAYAEPGKVIFFINDQNESREILDNA

SEQ ID NO: 37990 - protein, 85 aa, unidentified
  REGION 1..85: note = Description of Unknown:cds_NZ_WFIY01000004.1_cds_WP_155863950.1_1871 target sequence
WALNLEGYLFSCNEIKPKGRIEVMSFKGEMCEVNLSLSILYSEVSSIKGVRSNRILKELDFSDIDDFLAEKSKEIDLSLPQIILS

SEQ ID NO: 37991 - protein, 84 aa, unidentified
  REGION 1..84: note = Description of Unknown:cds_NZ_WFIY01000004.1_cds_WP_155863950.1_1871 target sequence
LSPILLPSRYFVEKNLNKDVKDYYSMNFLNDANIIYTGVDSIPMRRISFELRKKGKKVKEILLDVEPLLAPIYLSLMTYYMMEG

SEQ ID NO: 37992 - protein, 85 aa, unidentified
  REGION 1..85: note = Description of Unknown:cds_NZ_WFIY01000004.1_cds_WP_155863950.1_1871 target sequence
MELPAYTLERSIINLEGKIVKTVPIHELALVEDAYAEPGKVIFFINDQNESREILDNAWALNLEGYLFSCNEIKPKGRIEVMSFK

SEQ ID NO: 37993 - protein, 85 aa, unidentified
  REGION 1..85: note = Description of Unknown:cds_NZ_WFIY01000004.1_cds_WP_155863950.1_1871 target sequence
GEMCEVNLSLSILYSEVSSIKGVRSNRILKELDFSDIDDFLAEKSKEIDLSLPQIILSPILLPSRYFVEKNLNKDVKDYYSMNFL

SEQ ID NO: 37994 - protein, 85 aa, unidentified
  REGION 1..85: note = Description of Unknown:cds_NC_035460.1_cds_YP_009408018.1_67 target sequence
SRILENLFDEDMLFCAGSAVDYDNIDIMIAGAKVKYPRSFLSIFNIIPRTMTKYQLELIQTENITGAVFSTAYNIKKNLSMGDDK

SEQ ID NO: 37995 - protein, 85 aa, unidentified
  REGION 1..85: note = Description of Unknown:cds_NC_035460.1_cds_YP_009408018.1_67 target sequence
LTIEAITNYYLDPNNEVLTLMVNNTSLANVTPRKKSKRNKNPVVFRQGSVPLLFIFESKKKMSVYKEDPNKLTSDGTYTKISDSI

SEQ ID NO: 37996 - protein, 84 aa, unidentified
  REGION 1..84: note = Description of Unknown:cds_NC_035460.1_cds_YP_009408018.1_67 target sequence
DSIALINKYATMTLADIHTPSVSMKLNAIYGFTHKHELRKLSTNKELDEYSKMPLQEPVRLNDFVTLYDSIKKNISLTNIPTID

SEQ ID NO: 37997 - protein, 85 aa, unidentified
  REGION 1..85: note = Description of Unknown:cds_NC_035460.1_cds_YP_009408018.1_67 target sequence
MIAGAKVKYPRSFLSIFNIIPRTMTKYQLELIQTENITGAVFSTAYNIKKNLSMGDDKLTIEAITNYYLDPNNEVLTLMVNNTSL

SEQ ID NO: 37998 - protein, 85 aa, unidentified
  REGION 1..85: note = Description of Unknown:cds_NC_035460.1_cds_YP_009408018.1_67 target sequence
ANVTPRKKSKRNKNPVVFRQGSVPLLFIFESKKKMSVYKEDPNKLTSDGTYTKISDSIALINKYATMTLADIHTPSVSMKLNAIY

SEQ ID NO: 37999 - protein, 85 aa, unidentified
  REGION 1..85: note = Description of Unknown:cds_NC_030656.1_cds_YP_009268842.1_127 target sequence
ERVLEKTFNRASLLSAPFRMALVGGSGSGKTAYLLSLFSTLVKGYKHVLLFLPVYNPAYNQYVWPDHIQKVTSAEELEYALSSTK

SEQ ID NO: 38000 - protein, 85 aa, unidentified
  REGION 1..85: note = Description of Unknown:cds_NC_030656.1_cds_YP_009268842.1_127 target sequence
MKIEKYATKGSHKNKFLIILDDMGDMQTKSKTLLGLLNYGRHINTSIILLCQTYKHVPINGRASITHLCCCNVSESDVENMLRSM

SEQ ID NO: 38001 - protein, 84 aa, unidentified
  REGION 1..84: note = Description of Unknown:cds_NC_030656.1_cds_YP_009268842.1_127 target sequence
RSMSIKGSKKELLRAMSIMRSAVTDRRVHIIEDSVFCNGEQRICYDRADADVLNKTLNPSILLSQFSHMKSKLSEIISKESTET

SEQ ID NO: 38002 - protein, 85 aa, unidentified
  REGION 1..85: note = Description of Unknown:cds_NC_030656.1_cds_YP_009268842.1_127 target sequence
SGKTAYLLSLFSTLVKGYKHVLLFLPVYNPAYNQYVWPDHIQKVTSAEELEYALSSTKMKIEKYATKGSHKNKFLIILDDMGDMQ

SEQ ID NO: 38003 - protein, 85 aa, unidentified
  REGION 1..85: note = Description of Unknown:cds_NC_030656.1_cds_YP_009268842.1_127 target sequence
TKSKTLLGLLNYGRHINTSIILLCQTYKHVPINGRASITHLCCCNVSESDVENMLRSMSIKGSKKELLRAMSIMRSAVTDRRVHI

SEQ ID NO: 38004 - protein, 85 aa, unidentified
  REGION 1..85: note = Description of Unknown:cds_NC_025410.1_cds_YP_009094494.1_3 target sequence
EISPSDEEINIWMDKALDTVDHFTSIPVNPQSSLGKNTIKAGNTKSIIKSAERKARAVPDHANAAPNATVEPATDRPYQTVQPVT

SEQ ID NO: 38005 - protein, 85 aa, unidentified
  REGION 1..85: note = Description of Unknown:cds_NC_025410.1_cds_YP_009094494.1_3 target sequence
KPKQPRKARALPCPSSAPPVPPRVSEPQEEPYEELGAPAQEDTPLLKQAVPQSPSSGKLKSSQLPPLDNSNDSSNPSLSDQNIFK

SEQ ID NO: 38006 - protein, 84 aa, unidentified
  REGION 1..84: note = Description of Unknown:cds_NC_025410.1_cds_YP_009094494.1_3 target sequence
IFKRGISKSAGRNEQKITRHRREFNFVWSGSRPVLIEWCNPICTPITPNPRRQSCRCGRCPSVCKLCEGDYHNLARYGSEDESD

SEQ ID NO: 38007 - protein, 85 aa, unidentified
  REGION 1..85: note = Description of Unknown:cds_NC_025410.1_cds_YP_009094494.1_3 target sequence
VNPQSSLGKNTIKAGNTKSIIKSAERKARAVPDHANAAPNATVEPATDRPYQTVQPVTKPKQPRKARALPCPSSAPPVPPRVSEP

SEQ ID NO: 38008 - protein, 85 aa, unidentified
  REGION 1..85: note = Description of Unknown:cds_NC_025410.1_cds_YP_009094494.1_3 target sequence
QEEPYEELGAPAQEDTPLLKQAVPQSPSSGKLKSSQLPPLDNSNDSSNPSLSDQNIFKRGISKSAGRNEQKITRHRREFNFVWSG

SEQ ID NO: 38009 - protein, 85 aa, unidentified
  REGION 1..85: note = Description of Unknown:hvTR_G0XUM9 target sequence
SLLLENLIEEDTIFFAGSIYEYDDLQMVIAGAKSKFPRSMLSIFNIVPRTMSKYELELIHNENITGAMFTTMYNIRNNLGLGDDK

SEQ ID NO: 38010 - protein, 85 aa, unidentified
  REGION 1..85: note = Description of Unknown:hvTR_G0XUM9 target sequence
LTIEAIENYFLDPNNEVMPLIINNTDMTAVIPKKSGRRKNKNMVIFRQGSSPILCIFETRKKINIYKENMESASTEYTPIGDNKA

SEQ ID NO: 38011 - protein, 84 aa, unidentified
  REGION 1..84: note = Description of Unknown:hvTR_G0XUM9 target sequence
DNKALISKYAGINILNVYSPSTSMRLNAIYGFTNKNKLEKLSTNKELESYSSSPLQEPIRLNDFLGLLECVKKNIPLTDIPTKD

SEQ ID NO: 38012 - protein, 85 aa, unidentified
  REGION 1..85: note = Description of Unknown:hvTR_G0XUM9 target sequence
VIAGAKSKFPRSMLSIFNIVPRTMSKYELELIHNENITGAMFTTMYNIRNNLGLGDDKLTIEAIENYFLDPNNEVMPLIINNTDM

SEQ ID NO: 38013 - protein, 85 aa, unidentified
  REGION 1..85: note = Description of Unknown:hvTR_G0XUM9 target sequence
TAVIPKKSGRRKNKNMVIFRQGSSPILCIFETRKKINIYKENMESASTEYTPIGDNKALISKYAGINILNVYSPSTSMRLNAIYG

SEQ ID NO: 38014 - protein, 85 aa, unidentified
  REGION 1..85: note = Description of Unknown:hvTR_Q5IXU2 target sequence
SLLLENLIEEDTIFFAGSISEYDDLQMVIAGAKSKFPRSMLSIFNIVPRTMSKYELELIHNENITGAMFTTMYNIRNNLGLGDDK

SEQ ID NO: 38015 - protein, 85 aa, unidentified
  REGION 1..85: note = Description of Unknown:hvTR_Q5IXU2 target sequence
LTIEAIENYFLDPNNEVMPLIINNTDMTTVIPKKSGRRKNKNMVIFRQGSSPILCIFETRKKINIYKENMESVSTEYTPIGDNKA

SEQ ID NO: 38016 - protein, 84 aa, unidentified; identical to SEQ ID NO: 38011
  REGION 1..84: note = Description of Unknown:hvTR_Q5IXU2 target sequence

SEQ ID NO: 38017 - protein, 85 aa, unidentified; identical to SEQ ID NO: 38012
  REGION 1..85: note = Description of Unknown:hvTR_Q5IXU2 target sequence

SEQ ID NO: 38018 - protein, 85 aa, unidentified
  REGION 1..85: note = Description of Unknown:hvTR_Q5IXU2 target sequence
TTVIPKKSGRRKNKNMVIFRQGSSPILCIFETRKKINIYKENMESVSTEYTPIGDNKALISKYAGINILNVYSPSTSMRLNAIYG

SEQ ID NO: 38019 - protein, 85 aa, unidentified; identical to SEQ ID NO: 38014
  REGION 1..85: note = Description of Unknown:hvTR_P03295 target sequence

SEQ ID NO: 38020 - protein, 85 aa, unidentified; identical to SEQ ID NO: 38010
  REGION 1..85: note = Description of Unknown:hvTR_P03295 target sequence

SEQ ID NO: 38021 - protein, 84 aa, unidentified
  REGION 1..84: note = Description of Unknown:hvTR_P03295 target sequence
DNKALISKYAGINILNVYSPSTSIRLNAIYGFTNKNKLEKLSTNKELESYSSSPLQEPIRLNDFLGLLECVKKNIPLTDIPTKD

SEQ ID NO: 38022 - protein, 85 aa, unidentified; identical to SEQ ID NO: 38012
  REGION 1..85: note = Description of Unknown:hvTR_P03295 target sequence

SEQ ID NO: 38023 - protein, 85 aa, unidentified
  REGION 1..85: note = Description of Unknown:hvTR_P03295 target sequence
TAVIPKKSGRRKNKNMVIFRQGSSPILCIFETRKKINIYKENMESASTEYTPIGDNKALISKYAGINILNVYSPSTSIRLNAIYG

SEQ ID NO: 38024 - protein, 85 aa, unidentified; identical to SEQ ID NO: 38014
  REGION 1..85: note = Description of Unknown:hvTR_P0DSW9 target sequence

SEQ ID NO: 38025 - protein, 85 aa, unidentified; identical to SEQ ID NO: 38010
  REGION 1..85: note = Description of Unknown:hvTR_P0DSW9 target sequence

SEQ ID NO: 38026 - protein, 84 aa, unidentified
  REGION 1..84: note = Description of Unknown:hvTR_P0DSW9 target sequence
DNKALISKYAGINVLNVYSPSTSMRLNAIYGFTNKNKLEKLSTNKELELYSSSPLQEPIRLNDFLGLLECVKKNIPLTDIPTKD

SEQ ID NO: 38027 - protein, 85 aa, unidentified; identical to SEQ ID NO: 38012
  REGION 1..85: note = Description of Unknown:hvTR_P0DSW9 target sequence

SEQ ID NO: 38028 - protein, 85 aa, unidentified
  REGION 1..85: note = Description of Unknown:hvTR_P0DSW9 target sequence
TAVIPKKSGRRKNKNMVIFRQGSSPILCIFETRKKINIYKENMESASTEYTPIGDNKALISKYAGINVLNVYSPSTSMRLNAIYG

SEQ ID NO: 38029 - protein, 85 aa, unidentified
  REGION 1..85: note = Description of Unknown:cds_NZ_WFIY01000004.1_cds_WP_155862329.1_55 target sequence
IPIWLLIIIGIAVGALTGITGSSGVLIVVPALSYLGLSFQDAIGSSLLVDVITTLSVIFVYFMHGNVDLKISLILGLGAVIGAQV

SEQ ID NO: 38030 - protein, 85 aa, unidentified
  REGION 1..85: note = Description of Unknown:cds_NZ_WFIY01000004.1_cds_WP_155862329.1_55 target sequence
GSAIAFAVPDRALESVFVVFTAYMAYVSFKRSRNPKLNIKRLNLRTASYVIAPMLAFLIGIVTGTLGASGGIMFIAVMMLLFSID

SEQ ID NO: 38031 - protein, 84 aa, unidentified
  REGION 1..84: note = Description of Unknown:cds_NZ_WFIY01000004.1_cds_WP_155862329.1_55 target sequence
FSIDVKRMIGTATLAMLFSAISGAAAYAISGRSDIIASVIIGLTALVSGYYFAKLANKMRPSYIYIFLGSVFVVTSISELFKVI

SEQ ID NO: 38032 - protein, 85 aa, unidentified
  REGION 1..85: note = Description of Unknown:cds_NZ_WFIY01000004.1_cds_WP_155862329.1_55 target sequence
VVPALSYLGLSFQDAIGSSLLVDVITTLSVIFVYFMHGNVDLKISLILGLGAVIGAQVGSAIAFAVPDRALESVFVVFTAYMAYV

SEQ ID NO: 38033 - protein, 85 aa, unidentified
  REGION 1..85: note = Description of Unknown:cds_NZ_WFIY01000004.1_cds_WP_155862329.1_55 target sequence
SFKRSRNPKLNIKRLNLRTASYVIAPMLAFLIGIVTGTLGASGGIMFIAVMMLLFSIDVKRMIGTATLAMLFSAISGAAAYAISG

SEQ ID NO: 38034 - protein, 85 aa, unidentified
  REGION 1..85: note = Description of Unknown:cds_NZ_WFIY01000004.1_cds_WP_155862659.1_451 target sequence
TTKRIIACLDVKNGRVVKGVNFLNLKDKGDPVELAAKYEEEGADEIVFLDISATIEGRRTLLDVVRNTASVLSIPLTVGGGIRSL

SEQ ID NO: 38035 - protein, 85 aa, unidentified
  REGION 1..85: note = Description of Unknown:cds_NZ_WFIY01000004.1_cds_WP_155862659.1_451 target sequence
EDVSRILSSGADKVSINTAAVENKQIITQASEEFGAQAVVVAIDAKIEGNSWIVYTKSGTFRTGLEAVNWAKEVESLGAGEILLT

SEQ ID NO: 38036 - protein, 84 aa, unidentified
  REGION 1..84: note = Description of Unknown:cds_NZ_WFIY01000004.1_cds_WP_155862659.1_451 target sequence
ILLTSIDKDGTRSGYDIKLTRAIAEAVNIPVIASGGAGKPEHFFEVLTEGKADAALAAGVFHDGIIRIKDLKYYLKTKGVDVRI

SEQ ID NO: 38037 - protein, 85 aa, unidentified
  REGION 1..85: note = Description of Unknown:cds_NZ_WFIY01000004.1_cds_WP_155862659.1_451 target sequence
KGDPVELAAKYEEEGADEIVFLDISATIEGRRTLLDVVRNTASVLSIPLTVGGGIRSLEDVSRILSSGADKVSINTAAVENKQII

SEQ ID NO: 38038 - protein, 85 aa, unidentified
  REGION 1..85: note = Description of Unknown:cds_NZ_WFIY01000004.1_cds_WP_155862659.1_451 target sequence
TQASEEFGAQAVVVAIDAKIEGNSWIVYTKSGTFRTGLEAVNWAKEVESLGAGEILLTSIDKDGTRSGYDIKLTRAIAEAVNIPV

SEQ ID NO: 38039 - protein, 85 aa, unidentified
  REGION 1..85: note = Description of Unknown:cds_NZ_WFIY01000004.1_cds_WP_155863407.1_1385 target sequence
NSIFLFIIFILTWILSALFAVAGVGAANTLIPIYYSLGIPFSIAAAAGLLLNVFSLSSATVNNGKRGRVLWKLGTIFLIPAVIMA

SEQ ID NO: 38040 - protein, 85 aa, unidentified
  REGION 1..85: note = Description of Unknown:cds_NZ_WFIY01000004.1_cds_WP_155863407.1_1385 target sequence
PVGAFIGIHTPRKILLWIFVAFLGYTLYNLIRGRVKEETNKFSGNIKGYILGITVGAIAGFLGGLLGVGGGMIILPVLALIEKDY

SEQ ID NO: 38041 - protein, 84 aa, unidentified
  REGION 1..84: note = Description of Unknown:cds_NZ_WFIY01000004.1_cds_WP_155863407.1_1385 target sequence
EKDYKKVSATAGYVALFSSASGFTSYLFLLRGISYELWLVILIGGILGGFSGSYLMNKMKTLYVKYTIVSIITFVLIKILIGVI

SEQ ID NO: 38042 - protein, 85 aa, unidentified
  REGION 1..85: note = Description of Unknown:cds_NZ_WFIY01000004.1_cds_WP_155863407.1_1385 target sequence
NTLIPIYYSLGIPFSIAAAAGLLLNVFSLSSATVNNGKRGRVLWKLGTIFLIPAVIMAPVGAFIGIHTPRKILLWIFVAFLGYTL

SEQ ID NO: 38043 - protein, 85 aa, unidentified
  REGION 1..85: note = Description of Unknown:cds_NZ_WFIY01000004.1_cds_WP_155863407.1_1385 target sequence
YNLIRGRVKEETNKFSGNIKGYILGITVGAIAGFLGGLLGVGGGMIILPVLALIEKDYKKVSATAGYVALFSSASGFTSYLFLLR

SEQ ID NO: 38044 - protein, 85 aa, unidentified
  REGION 1..85: note = Description of Unknown:cds_NZ_WFIY01000004.1_cds_WP_155863582.1_1498 target sequence
VSGKTVVVTGGTRGIGRAIAEKFFSSGNKVIVLYNSSDQEAEKMKERGFYVLKCDVSKRDQVIATAKKVSEITKTVDILVNNAGI

SEQ ID NO: 38045 - protein, 85 aa, unidentified
  REGION 1..85: note = Description of Unknown:cds_NZ_WFIY01000004.1_cds_WP_155863582.1_1498 target sequence
WYLMSFEEFDDEKYRRMLEINLNGTIYVTHEFLPLMKEKGGAIINIASNAGLGTSAFGNTFYSITKAGIIILTRRLAYELGKYNI

SEQ ID NO: 38046 - protein, 84 aa, unidentified
  REGION 1..84: note = Description of Unknown:cds_NZ_WFIY01000004.1_cds_WP_155863582.1_1498 target sequence
KYNIRVNAVAPGWVETEMTIGGKSEEEIEKLRQWFRERTMLHTTGKPEDIANIVYFLASDEARYITGQVIVADGGRIDYLTHGI

SEQ ID NO: 38047 - protein, 85 aa, unidentified
  REGION 1..85: note = Description of Unknown:cds_NZ_WFIY01000004.1_cds_WP_155863582.1_1498 target sequence
NKVIVLYNSSDQEAEKMKERGFYVLKCDVSKRDQVIATAKKVSEITKTVDILVNNAGIWYLMSFEEFDDEKYRRMLEINLNGTIY

SEQ ID NO: 38048 - protein, 85 aa, unidentified
  REGION 1..85: note = Description of Unknown:cds_NZ_WFIY01000004.1_cds_WP_155863582.1_1498 target sequence
VTHEFLPLMKEKGGAIINIASNAGLGTSAFGNTFYSITKAGIIILTRRLAYELGKYNIRVNAVAPGWVETEMTIGGKSEEEIEKL

SEQ ID NO: 38049 - protein, 85 aa, unidentified
  REGION 1..85: note = Description of Unknown:cds_NZ_WFIY01000004.1_cds_WP_155863862.1_1765 target sequence
KTLLLFSLLAFILIPSLTSLASTNVIYFKYPGNVVILDCSSKVVFIPKCAAHIVANVSYISNGSCKIILTRLPANISFIYHPQGV

SEQ ID NO: 38050 - protein, 85 aa, unidentified
  REGION 1..85: note = Description of Unknown:cds_NZ_WFIY01000004.1_cds_WP_155863862.1_1765 target sequence
IKFSEPFDSKIIIELPCCTKIEYINTPPISFNISNGKIFITFYSDNITILYYINVQNRNNILYNPFLYLGIISTAGSIIITYKIM

SEQ ID NO: 38051 - protein, 84 aa, unidentified
  REGION 1..84: note = Description of Unknown:cds_NZ_WFIY01000004.1_cds_WP_155863862.1_1765 target sequence
YKIMKGRSKIEVQTQEIDERDKKIIEAIKSGADNLTKIAELSSLPRTTVYRRVKKLVSLGIVNEIRENGKVRYEIKGDKNEKGK

SEQ ID NO: 38052 - protein, 85 aa, unidentified
  REGION 1..85: note = Description of Unknown:cds_NZ_WFIY01000004.1_cds_WP_155863862.1_1765 target sequence
FKYPGNVVILDCSSKVVFIPKCAAHIVANVSYISNGSCKIILTRLPANISFIYHPQGVIKFSEPFDSKIIIELPCCTKIEYINTP

SEQ ID NO: 38053 - protein, 85 aa, unidentified
  REGION 1..85: note = Description of Unknown:cds_NZ_WFIY01000004.1_cds_WP_155863862.1_1765 target sequence
PISFNISNGKIFITFYSDNITILYYINVQNRNNILYNPFLYLGIISTAGSIIITYKIMKGRSKIEVQTQEIDERDKKIIEAIKSG

SEQ ID NO: 38054 - protein, 85 aa, unidentified
  REGION 1..85: note = Description of Unknown:cds_NC_002549.1_cds_NP_066250.1_8 target sequence
AKATGRYNLISPKKDLEKGVVLSDLCNFLVSQTIQGWKVYWAGIEFDVTHKGMALLHRLKTNDFAPAWSMTRNLFPHLFQNPNST

SEQ ID NO: 38055 - protein, 85 aa, unidentified
  REGION 1..85: note = Description of Unknown:cds_NC_002549.1_cds_NP_066250.1_8 target sequence
IESPLWALRVILAAGIQDQLIDQSLIEPLAGALGLISDWLLTTNTNHFNMRTQRVKEQLSLKMLSLIRSNILKFINKLDALHVVN

SEQ ID NO: 38056 - protein, 84 aa, unidentified
  REGION 1..84: note = Description of Unknown:cds_NC_002549.1_cds_NP_066250.1_8 target sequence
HVVNYNGLLSSIEIGTQNHTIIITRTNMGFLVELQEPDKSAMNRMKPGPAKFSLLHESTLKAFTQGSSTRMQSLILEFNSSLAI

SEQ ID NO: 38057 - protein, 85 aa, unidentified
  REGION 1..85: note = Description of Unknown:cds_NC_002549.1_cds_NP_066250.1_8 target sequence
FLVSQTIQGWKVYWAGIEFDVTHKGMALLHRLKTNDFAPAWSMTRNLFPHLFQNPNSTIESPLWALRVILAAGIQDQLIDQSLIE

SEQ ID NO: 38058 - protein, 85 aa, unidentified
  REGION 1..85: note = Description of Unknown:cds_NC_002549.1_cds_NP_066250.1_8 target sequence
PLAGALGLISDWLLTTNTNHFNMRTQRVKEQLSLKMLSLIRSNILKFINKLDALHVVNYNGLLSSIEIGTQNHTIIITRTNMGFL

SEQ ID NO: 38059 - protein, 85 aa, unidentified
  REGION 1..85: note = Description of Unknown:cds_NC_039345.1_cds_YP_009513281.1_8 target sequence
AKATGRYNLISPKQELEKGVVFSDLCNFVVSQTVQGWRVYWAGIEFEVTQKGMALLSRLKTNDFAPAWAMTRNLFPHLFQNPNSV

SEQ ID NO: 38060 - protein, 85 aa, unidentified
  REGION 1..85: note = Description of Unknown:cds_NC_039345.1_cds_YP_009513281.1_8 target sequence
IEHPLWALRVILAAGIYDQLIEQSLIEPLAGALGLIADWLLVTSTAHLNLRARSVKEQLSLKMLSLIRSNILKFIGKLDALHVVN

SEQ ID NO: 38061 - protein, 84 aa, unidentified
  REGION 1..84: note = Description of Unknown:cds_NC_039345.1_cds_YP_009513281.1_8 target sequence
HVVNYNGLLSSIEVNTNMHAVIITRTNMGYLVELQEPDKSALDPRHPGPVKFSLLHESTLKAFTEKSTSGIQNLILEFNSSLAI

SEQ ID NO: 38062 - protein, 85 aa, unidentified
  REGION 1..85: note = Description of Unknown:cds_NC_039345.1_cds_YP_009513281.1_8 target sequence
FVVSQTVQGWRVYWAGIEFEVTQKGMALLSRLKTNDFAPAWAMTRNLFPHLFQNPNSVIEHPLWALRVILAAGIYDQLIEQSLIE

SEQ ID NO: 38063 - protein, 85 aa, unidentified
  REGION 1..85: note = Description of Unknown:cds_NC_039345.1_cds_YP_009513281.1_8 target sequence
PLAGALGLIADWLLVTSTAHLNLRARSVKEQLSLKMLSLIRSNILKFIGKLDALHVVNYNGLLSSIEVNTNMHAVIITRTNMGYL

SEQ ID NO: 38064 - protein, 85 aa, unidentified
  REGION 1..85: note = Description of Unknown:cds_NC_009489.1_cds_YP_001249272.1_3 target sequence
DLTFSPSEIDDLFGTGLDTIQFITDQKSKQNDAHGSAKDSPPQTQNGPDSGPSDPTQVQGAKPKSHGIYPPIPTAPPVPTARHPG

SEQ ID NO: 38065 - protein, 85 aa, unidentified
  REGION 1..85: note = Description of Unknown:cds_NC_009489.1_cds_YP_001249272.1_3 target sequence
SRVDDPVLYDYPRRGKVTTHEPKESSQADGYEYDSYLAQNAKTNILKRWTDVSGDVEPIPMNPEVFKRGADLTKPTNPNPGHRRE

SEQ ID NO: 38066 - protein, 84 aa, unidentified
  REGION 1..84: note = Description of Unknown:cds_NC_009489.1_cds_YP_001249272.1_3 target sequence
HRREWSIGWVGSTVKVLEWCNPTCSPITATSRYYECVCGICPKICPRCVGDYGHVETAGRKDWLSRGEDGSDSSSRGDCESDQE

SEQ ID NO: 38067 - protein, 85 aa, unidentified
  REGION 1..85: note = Description of Unknown:cds_NC_009489.1_cds_YP_001249272.1_3 target sequence
SKQNDAHGSAKDSPPQTQNGPDSGPSDPTQVQGAKPKSHGIYPPIPTAPPVPTARHPGSRVDDPVLYDYPRRGKVTTHEPKESSQ

SEQ ID NO: 38068 - protein, 85 aa, unidentified
  REGION 1..85: note = Description of Unknown:cds_NC_009489.1_cds_YP_001249272.1_3 target sequence
ADGYEYDSYLAQNAKTNILKRWTDVSGDVEPIPMNPEVFKRGADLTKPTNPNPGHRREWSIGWVGSTVKVLEWCNPTCSPITATS

SEQ ID NO: 38069 - protein, 85 aa, unidentified
  REGION 1..85: note = Description of Unknown:cds_NC_010438.1_cds_YP_001718615.1_6 target sequence
IFLILLGIICACSANGDNTTTAPPTVPQSIPVEQVVEHLRNWNFSWNVILTVFLIVLQYGNFKYSKLLYGLKMVILWLLWPLVLA

SEQ ID NO: 38070 - protein, 85 aa, unidentified
  REGION 1..85: note = Description of Unknown:cds_NC_010438.1_cds_YP_001718615.1_6 target sequence
LSIFDAWASFGVNWTFFAFSIVMACTTLMLWIMYFVNSFRLYRRCQSFWAFNPETDAVITLSVFGKIVAIPVMTPPTGITLTILS

SEQ ID NO: 38071 - protein, 84 aa, unidentified
  REGION 1..84: note = Description of Unknown:cds_NC_010438.1_cds_YP_001718615.1_6 target sequence
TILSGKLLVEGIPVANGVSVTQLPSYVTVAKATTTIIYQRVGKSLNAASQTGWAFYVRAKNGDYSAVSNPSDSYTDTDRLLHLV

SEQ ID NO: 38072 - protein, 85 aa, unidentified
  REGION 1..85: note = Description of Unknown:cds_NC_010438.1_cds_YP_001718615.1_6 target sequence
QSIPVEQVVEHLRNWNFSWNVILTVFLIVLQYGNFKYSKLLYGLKMVILWLLWPLVLALSIFDAWASFGVNWTFFAFSIVMACTT

SEQ ID NO: 38073 - protein, 85 aa, unidentified
  REGION 1..85: note = Description of Unknown:cds_NC_010438.1_cds_YP_001718615.1_6 target sequence
LMLWIMYFVNSFRLYRRCQSFWAFNPETDAVITLSVFGKIVAIPVMTPPTGITLTILSGKLLVEGIPVANGVSVTQLPSYVTVAK

SEQ ID NO: 38074 - protein, 85 aa, unidentified
  REGION 1..85: note = Description of Unknown:cds_NZ_WFIY01000004.1_cds_WP_155863009.1_888 target sequence
LNSIMKFSYDDVRDFKNILTALAKLVDEASLKIKPDGVELVAIDRAHISLVKLQIPKEAFKDYDVQEEFNFGFNTQYLLKILSTS

SEQ ID NO: 38075 - protein, 85 aa, unidentified
  REGION 1..85: note = Description of Unknown:cds_NZ_WFIY01000004.1_cds_WP_155863009.1_888 target sequence
KRKESIELEANDPSQVIIRISGGFNRDYIIRNLDVSPPEVPELNLEFDVNASINSSGFKKAVSQISAVSDTILFKADENGITLKS

SEQ ID NO: 38076 - protein, 84 aa, unidentified
  REGION 1..84: note = Description of Unknown:cds_NZ_WFIY01000004.1_cds_WP_155863009.1_888 target sequence
ITLKSKSETDVEVEFTKESGGLQDIELSKPAESTYSCDYLDDILALTKLSGLMKVSFSDQKPLQIQFNMESGGNVVYLLAPQMG

SEQ ID NO: 38077 - protein, 85 aa, unidentified
  REGION 1..85: note = Description of Unknown:cds_NZ_WFIY01000004.1_cds_WP_155863009.1_888 target sequence
EASLKIKPDGVELVAIDRAHISLVKLQIPKEAFKDYDVQEEFNFGFNTQYLLKILSTSKRKESIELEANDPSQVIIRISGGFNRD

SEQ ID NO: 38078 - protein, 85 aa, unidentified
  REGION 1..85: note = Description of Unknown:cds_NZ_WFIY01000004.1_cds_WP_155863009.1_888 target sequence
YIIRNLDVSPPEVPELNLEFDVNASINSSGFKKAVSQISAVSDTILFKADENGITLKSKSETDVEVEFTKESGGLQDIELSKPAE

SEQ ID NO: 38079 - protein, 85 aa, unidentified
  REGION 1..85: note = Description of Unknown:cds_NZ_WFIY01000004.1_cds_WP_155863346.1_1314 target sequence
DVVEIILGIALLPLFILNESKVQSPIINLRVFKIKLLSFSLLASLFQGIGALSITFLLIMYLQGVRGLTPLQSSLLLTPGYVVAS

SEQ ID NO: 38080 - protein, 85 aa, unidentified
  REGION 1..85: note = Description of Unknown:cds_NZ_WFIY01000004.1_cds_WP_155863346.1_1314 target sequence
VLAPFMGRIADKGRPGLLAGIGLLFIFSSLMLYYFILTPSTPYFTILWITAITGIGSAMFWPSNATAVMFSAPKEYYGSVSGVSR

SEQ ID NO: 38081 - protein, 84 aa, unidentified
  REGION 1..84: note = Description of Unknown:cds_NZ_WFIY01000004.1_cds_WP_155863346.1_1314 target sequence
SGVSRTLGSIGTTLSYVMSITIATLVVPRQVAFEIFLGTNVLEGGVSNAFVNGLHFAFLISAIIIIIAALFSVLGGSTNVKRSY

SEQ ID NO: 38082 - protein, 85 aa, unidentified
  REGION 1..85: note = Description of Unknown:cds_NZ_WFIY01000004.1_cds_WP_155863346.1_1314 target sequence
NLRVFKIKLLSFSLLASLFQGIGALSITFLLIMYLQGVRGLTPLQSSLLLTPGYVVASVLAPFMGRIADKGRPGLLAGIGLLFIF

SEQ ID NO: 38083 - protein, 85 aa, unidentified
  REGION 1..85: note = Description of Unknown:cds_NZ_WFIY01000004.1_cds_WP_155863346.1_1314 target sequence
SSLMLYYFILTPSTPYFTILWITAITGIGSAMFWPSNATAVMFSAPKEYYGSVSGVSRTLGSIGTTLSYVMSITIATLVVPRQVA

SEQ ID NO: 38084 - protein, 85 aa, unidentified
  REGION 1..85: note = Description of Unknown:cds_NC_035460.1_cds_YP_009408090.1_139 target sequence
IISSSNLYYCFCHLEKQHSGFINYFLHLSKLCKRCSKIKCCICLKNNKNYNILCVIRHVLTCFITDDEAFYILNKYIINLLPTSL

SEQ ID NO: 38085 - protein, 85 aa, unidentified
  REGION 1..85: note = Description of Unknown:cds_NC_035460.1_cds_YP_009408090.1_139 target sequence
TNIIYIYFLRVIQHYIWDKRTTLLIPINVNKLTFLWNKGLIFHNIIGMLLPNYITKKQLFITLQNNKTKCYICEVNNYYSKYKNI

SEQ ID NO: 38086 - protein, 84 aa, unidentified
  REGION 1..84: note = Description of Unknown:cds_NC_035460.1_cds_YP_009408090.1_139 target sequence
KYKNINIFCDYEQYLSSPKSFMQKIKHLFCLHCVTKTFLCSELQDTFMYKNIIKKNTLYSLKDLCSITVSNYIKNIINQLYYFT

SEQ ID NO: 38087 - protein, 85 aa, unidentified
  REGION 1..85: note = Description of Unknown:cds_NC_035460.1_cds_YP_009408090.1_139 target sequence
LSKLCKRCSKIKCCICLKNNKNYNILCVIRHVLTCFITDDEAFYILNKYIINLLPTSLTNIIYIYFLRVIQHYIWDKRTTLLIPI

SEQ ID NO: 38088 - protein, 85 aa, unidentified
  REGION 1..85: note = Description of Unknown:cds_NC_035460.1_cds_YP_009408090.1_139 target sequence
NVNKLTFLWNKGLIFHNIIGMLLPNYITKKQLFITLQNNKTKCYICEVNNYYSKYKNINIFCDYEQYLSSPKSFMQKIKHLFCLH

SEQ ID NO: 38089 - protein, 85 aa, unidentified
  REGION 1..85: note = Description of Unknown:cds_NC_016144.1_cds_YP_004928142.1_8 target sequence
ARPSGRYNILQTDTFHENTVVKHDLCNFLVTTTITGWDVYWAGHLFHVPNKGIALLTRLKTSDFAPAWTLTKNLFPHLFHNPTST

SEQ ID NO: 38090 - protein, 85 aa, unidentified
  REGION 1..85: note = Description of Unknown:cds_NC_016144.1_cds_YP_004928142.1_8 target sequence
LKDPVWGLRVILAAALYDQVMEQSLIKPLSETLTLLGDWLLTTETQKFNLRTPRAQEQISLRMLSLVKKHVDNFILKLLELHVIN

SEQ ID NO: 38091 - protein, 84 aa, unidentified
  REGION 1..84: note = Description of Unknown:cds_NC_016144.1_cds_YP_004928142.1_8 target sequence
LHVINNRGFTSSIEIGNKCNTIIISRTNMGYLVEQQEPDKSALRKTKPGPVKFTLVHEDAFRDFKPERSSINLLIMEFNSSLAI

SEQ ID NO: 38092 - protein, 85 aa, unidentified
  REGION 1..85: note = Description of Unknown:cds_NC_016144.1_cds_YP_004928142.1_8 target sequence
FLVTTTITGWDVYWAGHLFHVPNKGIALLTRLKTSDFAPAWTLTKNLFPHLFHNPTSTLKDPVWGLRVILAAALYDQVMEQSLIK

SEQ ID NO: 38093 - protein, 85 aa, unidentified
  REGION 1..85: note = Description of Unknown:cds_NC_016144.1_cds_YP_004928142.1_8 target sequence
PLSETLTLLGDWLLTTETQKFNLRTPRAQEQISLRMLSLVKKHVDNFILKLLELHVINNRGFTSSIEIGNKCNTIIISRTNMGYL

SEQ ID NO: 38094 - protein, 85 aa, unidentified
  REGION 1..85: note = Description of Unknown:cds_NC_003214.2_cds_NP_445681.1_16 target sequence
YIFLMYGLEVKQLKLLYNLPKVFLTPNLNKFSITRNYVDCAYYESRSGLTREGCIIFDGNVHRTRGIYYIPVPSAVELSYRRKMI

SEQ ID NO: 38095 - protein, 85 aa, unidentified
  REGION 1..85: note = Description of Unknown:cds_NC_003214.2_cds_NP_445681.1_16 target sequence
KDEQDVKQIIEKINLYGATLNTNKLLVKWNNYEIILYDRFIKGGMYEFPLLFSQGHLYVYNIPRVREAYRIIYENDNQKEEIDSE

SEQ ID NO: 38096 - protein, 84 aa, unidentified
  REGION 1..84: note = Description of Unknown:cds_NC_003214.2_cds_NP_445681.1_16 target sequence
EIDSEMFEEINEFSVYNHAIKFDKKVLKLKELYVSPGQGVVIYTLDDVTLVSESPDHNKIEKFVYKNSWILFSHRAPRNQDQRD

SEQ ID NO: 38097 - protein, 85 aa, unidentified
  REGION 1..85: note = Description of Unknown:cds_NC_003214.2_cds_NP_445681.1_16 target sequence
LNKFSITRNYVDCAYYESRSGLTREGCIIFDGNVHRTRGIYYIPVPSAVELSYRRKMIKDEQDVKQIIEKINLYGATLNTNKLLV

SEQ ID NO: 38098 - protein, 85 aa, unidentified
  REGION 1..85: note = Description of Unknown:cds_NC_003214.2_cds_NP_445681.1_16 target sequence
KWNNYEIILYDRFIKGGMYEFPLLFSQGHLYVYNIPRVREAYRIIYENDNQKEEIDSEMFEEINEFSVYNHAIKFDKKVLKLKEL

SEQ ID NO: 38099 - protein, 85 aa, unidentified
  REGION 1..85: note = Description of Unknown:hvTR_P10541.1 target sequence
RMLPDFFTGNWDDMFQGLLETEYVFDFPEPSEASEEISLHDLFDVEVDGFEEDANQEAVDGMFPERLLSEAESAAESGSGDSGVG

SEQ ID NO: 38100 - protein, 85 aa, unidentified
  REGION 1..85: note = Description of Unknown:hvTR_P10541.1 target sequence
EELLPVDLDLKCYEDGLPPSDPETDEATEAEEEAAMPTYVNENENELVLDCPENPGRGCRACDFHRGTSGNPEAMCALCYMRLTG

SEQ ID NO: 38101 - protein, 84 aa, unidentified
  REGION 1..84: note = Description of Unknown:hvTR_P10541.1 target sequence
YMRLTGHCIYSPISDAEGESESGSPEDTDFPHPLTATPPHGIVRTTPCRVSCRRRPAVECIEDLLEEDPTDEPLNLSLKRPKCS

SEQ ID NO: 38102 - protein, 85 aa, unidentified
  REGION 1..85: note = Description of Unknown:hvTR_P10541.1 target sequence
PEPSEASEEISLHDLFDVEVDGFEEDANQEAVDGMFPERLLSEAESAAESGSGDSGVGEELLPVDLDLKCYEDGLPPSDPETDEA

SEQ ID NO: 38103 - protein, 85 aa, unidentified
  REGION 1..85: note = Description of Unknown:hvTR_P10541.1 target sequence
TEAEEEAAMPTYVNENENELVLDCPENPGRGCRACDFHRGTSGNPEAMCALCYMRLTGHCIYSPISDAEGESESGSPEDTDFPHP

SEQ ID NO: 38104 - protein, 85 aa, unidentified
  REGION 1..85: note = Description of Unknown:hvTR_A7XCI6 target sequence
SLILENLFDDDILFAGSLENNYEYFESIIAGAKVKYPRSFLSIFNIIPRNMTKYELDLVQTENITGAVFTTAFNIKKNLGMGDEK

SEQ ID NO: 38105 - protein, 85 aa, unidentified
  REGION 1..85: note = Description of Unknown:hvTR_A7XCI6 target sequence
LTIEAIEGYYLDPNNDILTLMINNTSLSEVVPKRKSKRNKNPVLFRQGSVPLFFIFESRKKVEIYKENMESQKDSSYSQINENIA

SEQ ID NO: 38106 - protein, 84 aa, unidentified
  REGION 1..84: note = Description of Unknown:hvTR_A7XCI6 target sequence
INENIALISKYSNMHLLDIHSPSAFMKLNGVYGFTHKNELRKLSSNKEIEEYSNKPLQEPVRLNDFINLFDCVKKNIPLTNVID

SEQ ID NO: 38107 - protein, 85 aa, unidentified
  REGION 1..85: note = Description of Unknown:hvTR_A7XCI6 target sequence
IIAGAKVKYPRSFLSIFNIIPRNMTKYELDLVQTENITGAVFTTAFNIKKNLGMGDEKLTIEAIEGYYLDPNNDILTLMINNTSL

SEQ ID NO: 38108 - protein, 85 aa, unidentified
  REGION 1..85: note = Description of Unknown:hvTR_A7XCI6 target sequence
SEVVPKRKSKRNKNPVLFRQGSVPLFFIFESRKKVEIYKENMESQKDSSYSQINENIALISKYSNMHLLDIHSPSAFMKLNGVYG

SEQ ID NO: 38109 - protein, 85 aa, unidentified
  REGION 1..85: note = Description of Unknown:hvTR_Q9DHQ0 target sequence
SLILENLFDDDILFAGSSENDYEYFESIIAGAKVKYPRSFLSIFNIIPRNMTKYELDLVQTENITGAVFTTAFNIKKNLGMGDEK

SEQ ID NO: 38110 - protein, 85 aa, unidentified; identical to SEQ ID NO: 38105
  REGION 1..85: note = Description of Unknown:hvTR_Q9DHQ0 target sequence

SEQ ID NO: 38111 - protein, 84 aa, unidentified; identical to SEQ ID NO: 38106
  REGION 1..84: note = Description of Unknown:hvTR_Q9DHQ0 target sequence

SEQ ID NO: 38112 - protein, 85 aa, unidentified; identical to SEQ ID NO: 38107
  REGION 1..85: note = Description of Unknown:hvTR_Q9DHQ0 target sequence

SEQ ID NO: 38113 - protein, 85 aa, unidentified; identical to SEQ ID NO: 38108
  REGION 1..85: note = Description of Unknown:hvTR_Q9DHQ0 target sequence

SEQ ID NO: 38114 - protein, 85 aa, unidentified
  REGION 1..85: note = Description of Unknown:cds_NC_024711.1_cds_YP_009052485.1_2 target sequence
PDVKDLAQAAQGAAAPESVNVVEPTTSVNQPVQPTVDTDNQSSAQVETIDDVVRRICTDGHSYVMTTVITNIDCQERTGRNGKSY

SEQ ID NO: 38115 - protein, 85 aa, unidentified
  REGION 1..85: note = Description of Unknown:cds_NC_024711.1_cds_YP_009052485.1_2 target sequence
LNAFVTIASPVKGAQSMPDGTHRMGMLGAVQMPFNQILLVMRKDKFYGRFVNYVGEAAEAGFASMYLTGVAVKVLCQFVPAGVQD

SEQ ID NO: 38116 - protein, 84 aa, unidentified
  REGION 1..84: note = Description of Unknown:cds_NC_024711.1_cds_YP_009052485.1_2 target sequence
PAGVQDHNPFTRKDNLYNVVDYDRYVYHIVGIEQPADPILVGAYNVLIKQIMEDARAAIAAKREAKAKAASFVATAMSDDDLPF

SEQ ID NO: 38117 - protein, 85 aa, unidentified
  REGION 1..85: note = Description of Unknown:cds_NC_024711.1_cds_YP_009052485.1_2 target sequence
VNQPVQPTVDTDNQSSAQVETIDDVVRRICTDGHSYVMTTVITNIDCQERTGRNGKSYLNAFVTIASPVKGAQSMPDGTHRMGML

SEQ ID NO: 38118 - protein, 85 aa, unidentified
  REGION 1..85: note = Description of Unknown:cds_NC_024711.1_cds_YP_009052485.1_2 target sequence
GAVQMPFNQILLVMRKDKFYGRFVNYVGEAAEAGFASMYLTGVAVKVLCQFVPAGVQDHNPFTRKDNLYNVVDYDRYVYHIVGIE

SEQ ID NO: 38119 - protein, 85 aa, unidentified
  REGION 1..85: note = Description of Unknown:cds_NZ_WFIY01000004.1_cds_WP_155862473.1_228 target sequence
LICTKCGKNQAEVLISGKYLCVYCARSEIVKRFRKELSLSKFLDREDKVMILTTENFMDVANLIEKLLYNICKSCKLDVLIDKID

SEQ ID NO: 38120 - protein, 85 aa, unidentified
  REGION 1..85: note = Description of Unknown:cds_NZ_WFIY01000004.1_cds_WP_155862473.1_228 target sequence
EEEDINKTLWKLMIKIRESDFKKIILPFTADFFLSYLIYSISTGYMGYLDLYSQSIQLYSKKIFIPFYSTPRFELLGFSEITGEL

SEQ ID NO: 38121 - protein, 84 aa, unidentified
  REGION 1..84: note = Description of Unknown:cds_NZ_WFIY01000004.1_cds_WP_155862473.1_228 target sequence
ITGELKTKDAFLNEIIKWESKQFVDNEIYHTFGNSINIIKLENRRRCKICNAIIEHGDCCKYCSESFSHLCSKQSQKQELAEKV

SEQ ID NO: 38122 - protein, 85 aa, unidentified
  REGION 1..85: note = Description of Unknown:cds_NZ_WFIY01000004.1_cds_WP_155862473.1_228 target sequence
EIVKRFRKELSLSKFLDREDKVMILTTENFMDVANLIEKLLYNICKSCKLDVLIDKIDEEEDINKTLWKLMIKIRESDFKKIILP

SEQ ID NO: 38123 - protein, 85 aa, unidentified
  REGION 1..85: note = Description of Unknown:cds_NZ_WFIY01000004.1_cds_WP_155862473.1_228 target sequence
FTADFFLSYLIYSISTGYMGYLDLYSQSIQLYSKKIFIPFYSTPRFELLGFSEITGELKTKDAFLNEIIKWESKQFVDNEIYHTF

SEQ ID NO: 38124 - protein, 85 aa, unidentified
  REGION 1..85: note = Description of Unknown:cds_NZ_WFIY01000004.1_cds_WP_155863927.1_1841 target sequence
LFEKKKVEKRIKDEDLFKVVDSTLSPRTYVLLEEIASKLNIDYYLGAISSGKEAKVYPAKTMDGKYYAVKIYYVSTSASKRAIQK

SEQ ID NO: 38125 - protein, 85 aa, unidentified
  REGION 1..85: note = Description of Unknown:cds_NZ_WFIY01000004.1_cds_WP_155863927.1_1841 target sequence
YTFGDKRFEDIKATNTRKLIITWARKEFKNLSIMYEAGVNVPKPILVEENILVMDFIGENGKRAPLLKELPEEEITKDLYDEVIN

SEQ ID NO: 38126 - protein, 84 aa, unidentified
  REGION 1..84: note = Description of Unknown:cds_NZ_WFIY01000004.1_cds_WP_155863927.1_1841 target sequence
DEVINQLEIMVNKAKLVHGDLSEYNIMVWDKVYIIDVSQAISIESENATDLLIRDIENVNRFFSSKGIEVYPTEDILKRLNITK

SEQ ID NO: 38127 - protein, 85 aa, unidentified
  REGION 1..85: note = Description of Unknown:cds_NZ_WFIY01000004.1_cds_WP_155863927.1_1841 target sequence
TYVLLEEIASKLNIDYYLGAISSGKEAKVYPAKTMDGKYYAVKIYYVSTSASKRAIQKYTFGDKRFEDIKATNTRKLIITWARKE

SEQ ID NO: 38128 - protein, 85 aa, unidentified
  REGION 1..85: note = Description of Unknown:cds_NZ_WFIY01000004.1_cds_WP_155863927.1_1841 target sequence
FKNLSIMYEAGVNVPKPILVEENILVMDFIGENGKRAPLLKELPEEEITKDLYDEVINQLEIMVNKAKLVHGDLSEYNIMVWDKV

SEQ ID NO: 38129 - protein, 85 aa, unidentified
  REGION 1..85: note = Description of Unknown:cds_NZ_WFIY01000004.1_cds_WP_155864145.1_2098 target sequence
KGYYISHGSPLLLIEENKWKETLRNLGRKIRKEIDPEVAIIISPHFFSWNGKFLIETQEKLECIQDYYGFPEETYKYCYSAENDT

SEQ ID NO: 38130 - protein, 85 aa, unidentified
  REGION 1..85: note = Description of Unknown:cds_NZ_WFIY01000004.1_cds_WP_155864145.1_2098 target sequence
DTVNNLLSTGLFTPDNNWGLDHGAWIPLYYMFPEGIKVVTISINDKPVEEHYKIGEAIAKVVNKRAIIIGTGSPTHRLDLYYFKV

SEQ ID NO: 38131 - protein, 84 aa, unidentified
  REGION 1..84: note = Description of Unknown:cds_NZ_WFIY01000004.1_cds_WP_155864145.1_2098 target sequence
LYYFKVSPKESKFDMILKDLLLKGDFSGIMKLEGSKEWKEAQPEGFLRPLYIVMGAVKPRKASIIDYSIPWPGVSMIAVEFFDK

SEQ ID NO: 38132 - protein, 85 aa, unidentified
  REGION 1..85: note = Description of Unknown:cds_NZ_WFIY01000004.1_cds_WP_155864145.1_2098 target sequence
RKIRKEIDPEVAIIISPHFFSWNGKFLIETQEKLECIQDYYGFPEETYKYCYSAENDTDTVNNLLSTGLFTPDNNWGLDHGAWIP

SEQ ID NO: 38133 - protein, 85 aa, unidentified
  REGION 1..85: note = Description of Unknown:cds_NZ_WFIY01000004.1_cds_WP_155864145.1_2098 target sequence
LYYMFPEGIKVVTISINDKPVEEHYKIGEAIAKVVNKRAIIIGTGSPTHRLDLYYFKVSPKESKFDMILKDLLLKGDFSGIMKLE

SEQ ID NO: 38134 - protein, 85 aa, unidentified
  REGION 1..85: note = Description of Unknown:cds_NC_035460.1_cds_YP_009408015.1_64 target sequence
GAAASIQTTVNTLSEKISNKLEQTAEATASTNCDIEIGNIIFRQNKGCNVTVKNLCSSKADAQLDAVVKAAAETFETLTPEQKAY

SEQ ID NO: 38135 - protein, 85 aa, unidentified
  REGION 1..85: note = Description of Unknown:cds_NC_035460.1_cds_YP_009408015.1_64 target sequence
VPSLFTAALNIQTSVNTVVKDFETYVKQKCKSDSVIKNKLKVQNILIDECASPPGTTTNFEFINSGTSQGICAIKTLMDVTTKAS

SEQ ID NO: 38136 - protein, 84 aa, unidentified
  REGION 1..84: note = Description of Unknown:cds_NC_035460.1_cds_YP_009408015.1_64 target sequence
VTTKASTNISPKQSTGFGYQYYIIAAVVVILALLFVYYTKRMFFMSTQDKIKVILASKPDVHWTSYIDTFFSHVPTVVDVSRQN

SEQ ID NO: 38137 - protein, 85 aa, unidentified
  REGION 1..85: note = Description of Unknown:cds_NC_035460.1_cds_YP_009408015.1_64 target sequence
TASTNCDIEIGNIIFRQNKGCNVTVKNLCSSKADAQLDAVVKAAAETFETLTPEQKAYVPSLFTAALNIQTSVNTVVKDFETYVK

SEQ ID NO: 38138 - protein, 85 aa, unidentified
  REGION 1..85: note = Description of Unknown:cds_NC_035460.1_cds_YP_009408015.1_64 target sequence
QKCKSDSVIKNKLKVQNILIDECASPPGTTTNFEFINSGTSQGICAIKTLMDVTTKASTNISPKQSTGFGYQYYIIAAVVVILAL

SEQ ID NO: 38139 - protein, 85 aa, unidentified
  REGION 1..85: note = Description of Unknown:cds_NZ_WFIY01000004.1_cds_WP_155862450.1_201 target sequence
IEIEKGIYIEGDIPGIYIKSINTAIISDVHIGYEEEMARKGIFLPRVQKKKFLDIVNKIIREFNTYNIIIDGDFKHIFNGLGKQE

SEQ ID NO: 38140 - protein, 85 aa, unidentified
  REGION 1..85: note = Description of Unknown:cds_NZ_WFIY01000004.1_cds_WP_155862450.1_201 target sequence
KEDLTSALSTIKDLGVKLTLIRGNHDNYISLVTDKFDIEIKDEIVTDNMIIFHGHKDIEPKENVIYIIGHEHPRISLRDKLGFSR

SEQ ID NO: 38141 - protein, 84 aa, unidentified
  REGION 1..84: note = Description of Unknown:cds_NZ_WFIY01000004.1_cds_WP_155862450.1_201 target sequence
DKLGFSRKLQAFLLVPLKNGSKALILPAIGSYQAGNDISLIHNNYMSPLIRNYGILEEAKPYVIIEGEGIMEFPKLELLKNIVV

SEQ ID NO: 38142 - protein, 85 aa, unidentified
  REGION 1..85: note = Description of Unknown:cds_NZ_WFIY01000004.1_cds_WP_155862450.1_201 target sequence
DVHIGYEEEMARKGIFLPRVQKKKFLDIVNKIIREFNTYNIIIDGDFKHIFNGLGKQEKEDLTSALSTIKDLGVKLTLIRGNHDN

SEQ ID NO: 38143 - protein, 85 aa, unidentified
  REGION 1..85: note = Description of Unknown:cds_NZ_WFIY01000004.1_cds_WP_155862450.1_201 target sequence
YISLVTDKFDIEIKDEIVTDNMIIFHGHKDIEPKENVIYIIGHEHPRISLRDKLGFSRKLQAFLLVPLKNGSKALILPAIGSYQA

SEQ ID NO: 38144 - protein, 85 aa, unidentified
  REGION 1..85: note = Description of Unknown:cds_NZ_WFIY01000004.1_cds_WP_155862494.1_253 target sequence
VRFLTGWLKDVVNNAYNRPYVHKIRDKPIYSLIEAIRKAKEENKNPIIAEYKRASPSGFSADRDPIEYAKEMESSGAVGISVLTE

SEQ ID NO: 38145 - protein, 85 aa, unidentified
  REGION 1..85: note = Description of Unknown:cds_NZ_WFIY01000004.1_cds_WP_155862494.1_253 target sequence
DKFFSGSYDYLFAISHNVKIPVLMKDFIVSERQIDNAYNLGADSILLIVRILTERELESLILYARSYRLEPLVEIFDEKELEIAL

SEQ ID NO: 38146 - protein, 84 aa, unidentified
  REGION 1..84: note = Description of Unknown:cds_NZ_WFIY01000004.1_cds_WP_155862494.1_253 target sequence
KELEIALNAGAKIIGVNSRDLLTFAIGQERVKRVLQKIPSNIIRVAESGITSREQIEELKKYGADAFLIGSSLMKEPSKIKELI

SEQ ID NO: 38147 - protein, 85 aa, unidentified
  REGION 1..85: note = Description of Unknown:cds_NZ_WFIY01000004.1_cds_WP_155862494.1_253 target sequence
PIYSLIEAIRKAKEENKNPIIAEYKRASPSGFSADRDPIEYAKEMESSGAVGISVLTEDKFFSGSYDYLFAISHNVKIPVLMKDF

SEQ ID NO: 38148 - protein, 85 aa, unidentified
  REGION 1..85: note = Description of Unknown:cds_NZ_WFIY01000004.1_cds_WP_155862494.1_253 target sequence
IVSERQIDNAYNLGADSILLIVRILTERELESLILYARSYRLEPLVEIFDEKELEIALNAGAKIIGVNSRDLLTFAIGQERVKRV

SEQ ID NO: 38149 - protein, 85 aa, unidentified
  REGION 1..85: note = Description of Unknown:cds_NZ_WFIY01000004.1_cds_WP_155862527.1_291 target sequence
LPFFGIFKRNKEREHYIYDELGEWIIISGNSKLGFLYSVISKTVSKLAKYYDLYILQFLEDSEIRNFYTIKAMISTRSPIKDSLL

SEQ ID NO: 38150 - protein, 85 aa, unidentified
  REGION 1..85: note = Description of Unknown:cds_NZ_WFIY01000004.1_cds_WP_155862527.1_291 target sequence
SSKLSQNLSKHGTLGQIDVVKLRYCGMNYLFFKFNILIKKSKNVKEDVKVLLPPLGVSTSGIPYSVKDLFKSIFEYNSNAVCQSI

SEQ ID NO: 38151 - protein, 84 aa, unidentified
  REGION 1..84: note = Description of Unknown:cds_NZ_WFIY01000004.1_cds_WP_155862527.1_291 target sequence
AVCQSILEFKDDNTVKILANCSDYVDLEGIKYSLSYFSKDFKTSVKSSIRSVEVEIEAKDFNRHALIPLLWNNFLDIYSTSSSC

SEQ ID NO: 38152 - protein, 85 aa, unidentified
  REGION 1..85: note = Description of Unknown:cds_NZ_WFIY01000004.1_cds_WP_155862527.1_291 target sequence
SGNSKLGFLYSVISKTVSKLAKYYDLYILQFLEDSEIRNFYTIKAMISTRSPIKDSLLSSKLSQNLSKHGTLGQIDVVKLRYCGM

SEQ ID NO: 38153 - protein, 85 aa, unidentified
  REGION 1..85: note = Description of Unknown:cds_NZ_WFIY01000004.1_cds_WP_155862527.1_291 target sequence
NYLFFKFNILIKKSKNVKEDVKVLLPPLGVSTSGIPYSVKDLFKSIFEYNSNAVCQSILEFKDDNTVKILANCSDYVDLEGIKYS

SEQ ID NO: 38154 - protein, 85 aa, unidentified
  REGION 1..85: note = Description of Unknown:cds_NZ_WFIY01000004.1_cds_WP_155862958.1_821 target sequence
KEKISKYIQQLSEEGALHFSLIDPDKISNLDKLDSLARKLYEAGTSAFLIGGTLGVSKDKLDNVLEILSDIKIPKIIFPSNINLI

SEQ ID NO: 38155 - protein, 85 aa, unidentified
  REGION 1..85: note = Description of Unknown:cds_NZ_WFIY01000004.1_cds_WP_155862958.1_821 target sequence
SEKADAILFLSLLNSDDIYYVIGAQVVAAPLIKKLGIEVLPTGYLIIGYGGTAGHIGRARIIPFDNNDLALSYALAAEFMGMKFL

SEQ ID NO: 38156 - protein, 84 aa, unidentified
  REGION 1..84: note = Description of Unknown:cds_NZ_WFIY01000004.1_cds_WP_155862958.1_821 target sequence
FMGMKFLYLEAGSGSPEPVKPEMVSLIRRFANLTIIVGGGIRTQETAIKLVEAGAHIIVTGNIIEDNPEKAIKIIESIRNYRRV

SEQ ID NO: 38157 - protein, 85 aa, unidentified
  REGION 1..85: note = Description of Unknown:cds_NZ_WFIY01000004.1_cds_WP_155862958.1_821 target sequence
SNLDKLDSLARKLYEAGTSAFLIGGTLGVSKDKLDNVLEILSDIKIPKIIFPSNINLISEKADAILFLSLLNSDDIYYVIGAQVV

SEQ ID NO: 38158 - protein, 85 aa, unidentified
  REGION 1..85: note = Description of Unknown:cds_NZ_WFIY01000004.1_cds_WP_155862958.1_821 target sequence
AAPLIKKLGIEVLPTGYLIIGYGGTAGHIGRARIIPFDNNDLALSYALAAEFMGMKFLYLEAGSGSPEPVKPEMVSLIRRFANLT

SEQ ID NO: 38159 - protein, 85 aa, unidentified
  REGION 1..85: note = Description of Unknown:cds_NZ_WFIY01000004.1_cds_878 target sequence
VFKVVYGSSLDFYRLITAMSKLVDSPILNLTEDGVVAKHLTDDKVLMGVINIPKDVLDDYEIEKPLSLKITISDLKKVLSKAKSK

SEQ ID NO: 38160 - protein, 85 aa, unidentified
  REGION 1..85: note = Description of Unknown:cds_NZ_WFIY01000004.1_cds_878 target sequence
NSSIEISETDYGVKITIRDEKSGTRSTMNLKAEKGELQVLKEPNVKLPVSIVFEGDILKTIISDASEIGEEVEFSAEGEEVTIST

SEQ ID NO: 38161 - protein, 84 aa, unidentified
  REGION 1..84: note = Description of Unknown:cds_NZ_WFIY01000004.1_cds_878 target sequence
EVTISTEESGKSYKAILKKDQPLKEVSIESSAKAVYSLEVLKTVATASSFTDTLKISFGNNLPMKVEAYTDKGAMLIFWVAPRM

SEQ ID NO: 38162 - protein, 85 aa, unidentified
  REGION 1..85: note = Description of Unknown:cds_NZ_WFIY01000004.1_cds_878 target sequence
LNLTEDGVVAKHLTDDKVLMGVINIPKDVLDDYEIEKPLSLKITISDLKKVLSKAKSKNSSIEISETDYGVKITIRDEKSGTRST

SEQ ID NO: 38163 - protein, 85 aa, unidentified
  REGION 1..85: note = Description of Unknown:cds_NZ_WFIY01000004.1_cds_878 target sequence
MNLKAEKGELQVLKEPNVKLPVSIVFEGDILKTIISDASEIGEEVEFSAEGEEVTISTEESGKSYKAILKKDQPLKEVSIESSAK

SEQ ID NO: 38164 - protein, 85 aa, unidentified
  REGION 1..85: note = Description of Unknown:cds_NZ_WFIY01000004.1_cds_1073 target sequence
LINRALEVVEKAKEKGIVLRLIGGAAVAVIAPKGSELFSRTYKDADYFGLSSQRKEITSLLEGLNMEPNKRFNALHGYNRLMFYD

SEQ ID NO: 38165 - protein, 85 aa, unidentified
  REGION 1..85: note = Description of Unknown:cds_NZ_WFIY01000004.1_cds_1073 target sequence
PVLNSTIDVFLDEFVMCHKLILKDRLKIYYPSIPPSDLLLTKMQIINLTENDKKDIAALLYDFEIGDKDEDKTLDGNYIAKLLSD

SEQ ID NO: 38166 - protein, 84 aa, unidentified
  REGION 1..84: note = Description of Unknown:cds_NZ_WFIY01000004.1_cds_1073 target sequence
AKLLSDDWGFYKTFTINHDRMKEYLKGNVYASNILPKLDKLREMIESHPKSLKWKMRAKIGERVKWYEEPEEVNTNFQGAGSGI

SEQ ID NO: 38167 - protein, 85 aa, unidentified
  REGION 1..85: note = Description of Unknown:cds_NZ_WFIY01000004.1_cds_1073 target sequence
AVIAPKGSELFSRTYKDADYFGLSSQRKEITSLLEGLNMEPNKRFNALHGYNRLMFYDPVLNSTIDVFLDEFVMCHKLILKDRLK

SEQ ID NO: 38168 - protein, 85 aa, unidentified
  REGION 1..85: note = Description of Unknown:cds_NZ_WFIY01000004.1_cds_1073 target sequence
IYYPSIPPSDLLLTKMQIINLTENDKKDIAALLYDFEIGDKDEDKTLDGNYIAKLLSDDWGFYKTFTINHDRMKEYLKGNVYASN

SEQ ID NO: 38169 - protein, 85 aa, unidentified
  REGION 1..85: note = Description of Unknown:cds_NZ_WFIY01000004.1_cds_WP_155863417.1_1399 target sequence
GSKVIDSLISYAKENDSDVKNVTVGVTWTCVLSKYCGVSMTYNTGNEDLDVKGFGHLEEKRVGELAEYLRSWNLLEASVGLAAIN

SEQ ID NO: 38170 - protein, 85 aa, unidentified
  REGION 1..85: note = Description of Unknown:cds_NZ_WFIY01000004.1_cds_WP_155863417.1_1399 target sequence
SVIEPKGNGEANGLDVALEISKGKKIVMIGKFPRLQKFKEVAKEFIVLELNPFLIDPSQGILPSTAAETVIEDSQVVIITATTII

SEQ ID NO: 38171 - protein, 84 aa, unidentified
  REGION 1..84: note = Description of Unknown:cds_NZ_WFIY01000004.1_cds_WP_155863417.1_1399 target sequence
ITATTIINKSIDRLLELSKRANAYVILLGPSTPMLDLMFDFGVDVLAGVKVNKPYSFIKKISQGCGMVDPSKLEGDVSFIVRTR

SEQ ID NO: 38172 - protein, 85 aa, unidentified
  REGION 1..85: note = Description of Unknown:cds_NZ_WFIY01000004.1_cds_WP_155863417.1_1399 target sequence
WTCVLSKYCGVSMTYNTGNEDLDVKGFGHLEEKRVGELAEYLRSWNLLEASVGLAAINSVIEPKGNGEANGLDVALEISKGKKIV

SEQ ID NO: 38173 - protein, 85 aa, unidentified
  REGION 1..85: note = Description of Unknown:cds_NZ_WFIY01000004.1_cds_WP_155863417.1_1399 target sequence
MIGKFPRLQKFKEVAKEFIVLELNPFLIDPSQGILPSTAAETVIEDSQVVIITATTIINKSIDRLLELSKRANAYVILLGPSTPM

SEQ ID NO: 38174 - protein, 85 aa, unidentified
  REGION 1..85: note = Description of Unknown:cds_NZ_WFIY01000004.1_cds_WP_155863858.1_1758 target sequence
EKEIKEPVKHYTNEADTFRTKVFGIQDGLIGIGSIAIGAAGFSQEPLLVVITGLIATIGQAFSMGIGEYISTRVRMQVIQNEIKK

SEQ ID NO: 38175 - protein, 85 aa, unidentified
  REGION 1..85: note = Description of Unknown:cds_NZ_WFIY01000004.1_cds_WP_155863858.1_1758 target sequence
EKYEIDNFPEKEREELIDFYIKKGLSREDSEKIADIFMKDKETVLREMMLNELKITPEEFESPVKLGFLMSLYLIIGGLLPLIPF

SEQ ID NO: 38176 - protein, 84 aa, unidentified
  REGION 1..84: note = Description of Unknown:cds_NZ_WFIY01000004.1_cds_WP_155863858.1_1758 target sequence
LLPLIPFIISLFVRIPFYASLLSSMGIMLASLGIFGSMATKYTGLSKPRGALEQIGTGLIALIGSYVAGLLLAHFITIPPGLGY

SEQ ID NO: 38177 - protein, 85 aa, unidentified
  REGION 1..85: note = Description of Unknown:cds_NZ_WFIY01000004.1_cds_WP_155863858.1_1758 target sequence
GLIGIGSIAIGAAGFSQEPLLVVITGLIATIGQAFSMGIGEYISTRVRMQVIQNEIKKEKYEIDNFPEKEREELIDFYIKKGLSR

SEQ ID NO: 38178 - protein, 85 aa, unidentified
  REGION 1..85: note = Description of Unknown:cds_NZ_WFIY01000004.1_cds_WP_155863858.1_1758 target sequence
EDSEKIADIFMKDKETVLREMMLNELKITPEEFESPVKLGFLMSLYLIIGGLLPLIPFIISLFVRIPFYASLLSSMGIMLASLGI

SEQ ID NO: 38179 - protein, 85 aa, unidentified
  REGION 1..85: note = Description of Unknown:cds_NZ_WFIY01000004.1_cds_WP_155863879.1_1783 target sequence
LEKWKRIEIVGDIAIIGIPFDKKPEDLKDYAKEIMSKHPYIKSVWGRYRDTKGDFRLPTYYHILGEERSETVYKEHGCRYYLDFT

SEQ ID NO: 38180 - protein, 85 aa, unidentified
  REGION 1..85: note = Description of Unknown:cds_NZ_WFIY01000004.1_cds_WP_155863879.1_1783 target sequence
KVFFSSKLSFEHLRIAKEVKKGEIIINMFAGYGPFSILSAKLGKPKLVYSIDINPYAYYYMMANIDLNKTYNVIPIYGDAFKKIY

SEQ ID NO: 38181 - protein, 84 aa, unidentified
  REGION 1..84: note = Description of Unknown:cds_NZ_WFIY01000004.1_cds_WP_155863879.1_1783 target sequence
AFKKIYYLENADRIISPLPEKAKEAYEVALQKIKPGGIIHLFVEIETKENPVKEAMKLYPKAFFGRIVRSVKPFKYHVILDIKA

SEQ ID NO: 38182 - protein, 85 aa, unidentified
  REGION 1..85: note = Description of Unknown:cds_NZ_WFIY01000004.1_cds_WP_155863879.1_1783 target sequence
KDYAKEIMSKHPYIKSVWGRYRDTKGDFRLPTYYHILGEERSETVYKEHGCRYYLDFTKVFFSSKLSFEHLRIAKEVKKGEIIIN

SEQ ID NO: 38183 - protein, 85 aa, unidentified
  REGION 1..85: note = Description of Unknown:cds_NZ_WFIY01000004.1_cds_WP_155863879.1_1783 target sequence
MFAGYGPFSILSAKLGKPKLVYSIDINPYAYYYMMANIDLNKTYNVIPIYGDAFKKIYYLENADRIISPLPEKAKEAYEVALQKI

SEQ ID NO: 38184 - protein, 85 aa, unidentified
  REGION 1..85: note = Description of Unknown:cds_NC_030656.1_cds_YP_009268716.1_1 target sequence
ACENSGAKWSEIVEAADSSIGNEEQQPGASAPATPLASERAAVPPVNADERKRRRSRSRCGGRSDEGCTPCSKHPDYSKLRVSVR

SEQ ID NO: 38185 - protein, 85 aa, unidentified
  REGION 1..85: note = Description of Unknown:cds_NC_030656.1_cds_YP_009268716.1_1 target sequence
NYGSCKQLTSVFSAEAHPNELTSLNFYNEPAMFAPDSYDKTTLPKLTCVREGNLFAGSVRLTPCRFLLRGSFVCWIEMGYNCVRM

SEQ ID NO: 38186 - protein, 84 aa, unidentified
  REGION 1..84: note = Description of Unknown:cds_NC_030656.1_cds_YP_009268716.1_1 target sequence
GYNCVRMAAANVGLTDVTISHSQTPEQIRHGSQTCRISFAVRASGTSWVLPFLQTLETVVSESDPHPRIPGKFKVTFIDPVESE

SEQ ID NO: 38187 - protein, 85 aa, unidentified
  REGION 1..85: note = Description of Unknown:cds_NC_030656.1_cds_YP_009268716.1_1 target sequence
GASAPATPLASERAAVPPVNADERKRRRSRSRCGGRSDEGCTPCSKHPDYSKLRVSVRNYGSCKQLTSVFSAEAHPNELTSLNFY

SEQ ID NO: 38188 - protein, 85 aa, unidentified
  REGION 1..85: note = Description of Unknown:cds_NC_030656.1_cds_YP_009268716.1_1 target sequence
NEPAMFAPDSYDKTTLPKLTCVREGNLFAGSVRLTPCRFLLRGSFVCWIEMGYNCVRMAAANVGLTDVTISHSQTPEQIRHGSQT

SEQ ID NO: 38189 - protein, 85 aa, unidentified
  REGION 1..85: note = Description of Unknown:cds_NC_030656.1_cds_YP_009268780.1_65 target sequence
GASVSVQTVVNTINDKIRTKLEQQASASATAVCDVTIGSLIIRKNLGCSVSVRNLCSAQADAQLDAILSAVTDVYNNLSDSQKAY

SEQ ID NO: 38190 - protein, 85 aa, unidentified
  REGION 1..85: note = Description of Unknown:cds_NC_030656.1_cds_YP_009268780.1_65 target sequence
VPELLTASLNIQTTVNTAVKDFETYLKQTCNSDAIIHNKIKVQNVVMDECASPPGAITHIDFTNTGTAKGNCGVKAVLDVLTKAS

SEQ ID NO: 38191 - protein, 84 aa, unidentified
  REGION 1..84: note = Description of Unknown:cds_NC_030656.1_cds_YP_009268780.1_65 target sequence
DVLTKASTKESSSQIANIPTYYLIIAIVLVIFAMIFLYYAKHMLVTSTTDKIKLILASKPDVHWTTYLDTFYTYSPSVLSNKQV

SEQ ID NO: 38192 - protein, 85 aa, unidentified
  REGION 1..85: note = Description of Unknown:cds_NC_030656.1_cds_YP_009268780.1_65 target sequence
SATAVCDVTIGSLIIRKNLGCSVSVRNLCSAQADAQLDAILSAVTDVYNNLSDSQKAYVPELLTASLNIQTTVNTAVKDFETYLK

SEQ ID NO: 38193 - protein, 85 aa, unidentified
  REGION 1..85: note = Description of Unknown:cds_NC_030656.1_cds_YP_009268780.1_65 target sequence
QTCNSDAIIHNKIKVQNVVMDECASPPGAITHIDFTNTGTAKGNCGVKAVLDVLTKASTKESSSQIANIPTYYLIIAIVLVIFAM

SEQ ID NO: 38194 - protein, 85 aa, unidentified
  REGION 1..85: note = Description of Unknown:cds_NC_030656.1_cds_YP_009268858.1_143 target sequence
ACENSGAKWSEIVEAADSSIGNEEQQPGASAPATPPVSERAAVPPVNADERKRRRSRSRCGGRSDEGCTPCSKHPDYSKLRVSVR

SEQ ID NO: 38195 - protein, 85 aa, unidentified
  REGION 1..85: note = Description of Unknown:cds_NC_030656.1_cds_YP_009268858.1_143 target sequence
GASAPATPPVSERAAVPPVNADERKRRRSRSRCGGRSDEGCTPCSKHPDYSKLRVSVRNYGSCKQLTSVFSAEAHPNELTSLNFY

SEQ ID NO: 38196 - protein, 85 aa, unidentified
  REGION 1..85: note = Description of Unknown:cds_NC_010438.1_cds_YP_001718617.1_8 target sequence
FLRKTRTSKSSLIRLMLIWILLVRKNQKSSVNPRKRRRKKHLLNSTLQHLCLHHQLCCQMLLPMLSLTWWMRLLMPIMSLLHELS

SEQ ID NO: 38197 - protein, 85 aa, unidentified
  REGION 1..85: note = Description of Unknown:cds_NC_010438.1_cds_YP_001718617.1_8 target sequence
TNKMFVLALFAVLAIVNSAPIVNHKVLNPYDTPHSGFRGSCEQLALTCRLNVQPDAFHAAATTGSPVQIPRACVSFRTVCSAWPK

SEQ ID NO: 38198 - protein, 84 aa, unidentified
  REGION 1..84: note = Description of Unknown:cds_NC_010438.1_cds_YP_001718617.1_8 target sequence
VCSAWPKYDFGYLMSPDVYVVTTTPDGRYKYELNSLAFTPEGAQLFYTLVDGYAHERRKLIKEGRREELPNLDAEYIIHPTESQ

SEQ ID NO: 38199 - protein, 85 aa, unidentified
  REGION 1..85: note = Description of Unknown:cds_NC_010438.1_cds_YP_001718617.1_8 target sequence
KSSVNPRKRRRKKHLLNSTLQHLCLHHQLCCQMLLPMLSLTWWMRLLMPIMSLLHELSTNKMFVLALFAVLAIVNSAPIVNHKVL

SEQ ID NO: 38200 - protein, 85 aa, unidentified
  REGION 1..85: note = Description of Unknown:cds_NC_010438.1_cds_YP_001718617.1_8 target sequence
NPYDTPHSGFRGSCEQLALTCRLNVQPDAFHAAATTGSPVQIPRACVSFRTVCSAWPKYDFGYLMSPDVYVVTTTPDGRYKYELN

SEQ ID NO: 38201 - protein, 85 aa, unidentified
  REGION 1..85: note = Description of Unknown:cds_NZ_WFIY01000004.1_cds_WP_155862923.1_775 target sequence
DSNQNSNNKIYFKSRSIVVPGDLIAEGNFQIPWSPYIYKLGNKYYSTVIGIVDPKDSTFEIIPLEGSHYYPRVGDTVIGLIEDVE

SEQ ID NO: 38202 - protein, 85 aa, unidentified
  REGION 1..85: note = Description of Unknown:cds_NZ_WFIY01000004.1_cds_WP_155862923.1_775 target sequence
LYGWIVDIKAPYSAYLPALSLLGRPVNIGEDLRKYLDIGDYVIARVESFDRTINPVLTVKGKGLGRLNNGKIIDIMPVKVPRVIG

SEQ ID NO: 38203 - protein, 84 aa, unidentified
  REGION 1..84: note = Description of Unknown:cds_NZ_WFIY01000004.1_cds_WP_155862923.1_775 target sequence
VKVPRVIGKNKSMYELLTSETGCEMIVAQNGRIWANCPSKDMEEVLFLSIKTIERESHIKGLTDRIKELIERKKGELNVTNSKA

SEQ ID NO: 38204 - protein, 85 aa, unidentified
  REGION 1..85: note = Description of Unknown:cds_NZ_WFIY01000004.1_cds_WP_155862923.1_775 target sequence
NFQIPWSPYIYKLGNKYYSTVIGIVDPKDSTFEIIPLEGSHYYPRVGDTVIGLIEDVELYGWIVDIKAPYSAYLPALSLLGRPVN

SEQ ID NO: 38205 - protein, 85 aa, unidentified
  REGION 1..85: note = Description of Unknown:cds_NZ_WFIY01000004.1_cds_WP_155862923.1_775 target sequence
IGEDLRKYLDIGDYVIARVESFDRTINPVLTVKGKGLGRLNNGKIIDIMPVKVPRVIGKNKSMYELLTSETGCEMIVAQNGRIWA

SEQ ID NO: 38206 - protein, 85 aa, unidentified
  REGION 1..85: note = Description of Unknown:cds_NZ_WFIY01000004.1_cds_WP_155863802.1_1685 target sequence
RIKIVSKPSGQILEIVQKIISTAKSQGFEIDEQNPDIIIAVGGDGTLLKAIKLNKPVIAIKAGRRGFLMDVNPESIDEVFKRLKE

SEQ ID NO: 38207 - protein, 85 aa, unidentified
  REGION 1..85: note = Description of Unknown:cds_NZ_WFIY01000004.1_cds_WP_155863802.1_1685 target sequence
NDYKIQEYPLLETNICGISSLAFNEAGILADQPETILLTLSFLNSEIQIEGDGVLISTPQGTTGWSLSATGNILYGINAMEIAFI

SEQ ID NO: 38208 - protein, 84 aa, unidentified
  REGION 1..84: note = Description of Unknown:cds_NZ_WFIY01000004.1_cds_WP_155863802.1_1685 target sequence
NAMEIAFINPVLSPLRSIVLPPTEIKVKVESKGYPQKIRVTTDGDLLKVINEGSEIKVKLSSKKAIIYRFFDIDPLRRILNGDK

SEQ ID NO: 38209 - protein, 85 aa, unidentified
  REGION 1..85: note = Description of Unknown:cds_NZ_WFIY01000004.1_cds_WP_155863802.1_1685 target sequence
FEIDEQNPDIIIAVGGDGTLLKAIKLNKPVIAIKAGRRGFLMDVNPESIDEVFKRLKENDYKIQEYPLLETNICGISSLAFNEAG

SEQ ID NO: 38210 - protein, 85 aa, unidentified
  REGION 1..85: note = Description of Unknown:cds_NZ_WFIY01000004.1_cds_WP_155863802.1_1685 target sequence
ILADQPETILLTLSFLNSEIQIEGDGVLISTPQGTTGWSLSATGNILYGINAMEIAFINPVLSPLRSIVLPPTEIKVKVESKGYP

SEQ ID NO: 38211 - protein, 85 aa, unidentified
  REGION 1..85: note = Description of Unknown:cds_NZ_WFIY01000004.1_cds_WP_155864040.1_1974 target sequence
RLISWNVNGLKAIMSKGFIDTVKSFNADILMFQEIKTDVIPLDLQSLGYEIYVFPAKRKGYSGTMSMTRIHPISVSYGLGKEEYD

SEQ ID NO: 38212 - protein, 85 aa, unidentified
  REGION 1..85: note = Description of Unknown:cds_NZ_WFIY01000004.1_cds_WP_155864040.1_1974 target sequence
SEGRVIILEYPAYYVINTYFPNAGEGLKRLDFKLSFNRDFEKFVTSLKKPCIICGDFNVAHQEIDIARPKDNINHAGFTPQEREW

SEQ ID NO: 38213 - protein, 84 aa, unidentified
  REGION 1..84: note = Description of Unknown:cds_NZ_WFIY01000004.1_cds_WP_155864040.1_1974 target sequence
FTPQEREWFSHFLSLGYVDTYRMFVKEGGHYSWWSYRFHAREKNIGWRIDYCVVSQSLKDRVIKADILEKVMGSDHAPILLEIQ

SEQ ID NO: 38214 - protein, 85 aa, unidentified
  REGION 1..85: note = Description of Unknown:cds_NZ_WFIY01000004.1_cds_WP_155864040.1_1974 target sequence
DILMFQEIKTDVIPLDLQSLGYEIYVFPAKRKGYSGTMSMTRIHPISVSYGLGKEEYDSEGRVIILEYPAYYVINTYFPNAGEGL

SEQ ID NO: 38215 - protein, 85 aa, unidentified
  REGION 1..85: note = Description of Unknown:cds_NZ_WFIY01000004.1_cds_WP_155864040.1_1974 target sequence
KRLDFKLSFNRDFEKFVTSLKKPCIICGDFNVAHQEIDIARPKDNINHAGFTPQEREWFSHFLSLGYVDTYRMFVKEGGHYSWWS

SEQ ID NO: 38216 - protein, 85 aa, unidentified
  REGION 1..85: note = Description of Unknown:cds_NZ_WFIY01000004.1_cds_WP_155864127.1_2079 target sequence
ENVVELLLSSTYAIAFTGAGISTASGIPDFRGPNGLWKKYSPEIASIDYLNRDPKGFWEFYSQRMRGLFEAKPNEAHYALAKLEK

SEQ ID NO: 38217 - protein, 85 aa, unidentified
  REGION 1..85: note = Description of Unknown:cds_NZ_WFIY01000004.1_cds_WP_155864127.1_2079 target sequence
MGIIKYVITQNIDGLHQKAGSQNVIELHGTMQRSYCSSCFRQYDSREVLKMIDEGNLPPKCSCGGIIRPDVVLFGEPVKDFELAV

SEQ ID NO: 38218 - protein, 84 aa, unidentified
  REGION 1..84: note = Description of Unknown:cds_NZ_WFIY01000004.1_cds_WP_155864127.1_2079 target sequence
VKDFELAVRIAYEADLALVIGSSLTVYPANLIPQIVKEERGGSLIIINADETPLDQEADVIIREPIEVALPRIVNEIEKEITGK

SEQ ID NO: 38219 - protein, 85 aa, unidentified
  REGION 1..85: note = Description of Unknown:cds_NZ_WFIY01000004.1_cds_WP_155864127.1_2079 target sequence
PDFRGPNGLWKKYSPEIASIDYLNRDPKGFWEFYSQRMRGLFEAKPNEAHYALAKLEKMGIIKYVITQNIDGLHQKAGSQNVIEL

SEQ ID NO: 38220 - protein, 85 aa, unidentified
  REGION 1..85: note = Description of Unknown:cds_NZ_WFIY01000004.1_cds_WP_155864127.1_2079 target sequence
HGTMQRSYCSSCFRQYDSREVLKMIDEGNLPPKCSCGGIIRPDVVLFGEPVKDFELAVRIAYEADLALVIGSSLTVYPANLIPQI

SEQ ID NO: 38221 - protein, 85 aa, unidentified
  REGION 1..85: note = Description of Unknown:cds_NC_035460.1_cds_YP_009408036.1_85 target sequence
DNEIIYIDNYSYPIIKKNNNVIYLCFINNDFFINNIIQSLSKHKTFFAEYEIYPNNKGTLYLKQINSSRKINNRFLNIEEFIQTN

SEQ ID NO: 38222 - protein, 85 aa, unidentified
  REGION 1..85: note = Description of Unknown:cds_NC_035460.1_cds_YP_009408036.1_85 target sequence
YSIYYLNNNINITFLKNVDKIIITDILYLDESIWKRLTIIQCPTIVDTTYENYLINPFLLLDKNEIIFKNIMLLSSINSLFHNKN

SEQ ID NO: 38223 - protein, 84 aa, unidentified
  REGION 1..84: note = Description of Unknown:cds_NC_035460.1_cds_YP_009408036.1_85 target sequence
NSLFHNKNSSFKMLLNEIIKSHKVNMINVFINNKNKYDNKYINYNYNRNTFKAFIHAWFSNQLSSDNKENEKVEKVFQSLNNTI

SEQ ID NO: 38224 - protein, 85 aa, unidentified
  REGION 1..85: note = Description of Unknown:cds_NC_035460.1_cds_YP_009408036.1_85 target sequence
NNDFFINNIIQSLSKHKTFFAEYEIYPNNKGTLYLKQINSSRKINNRFLNIEEFIQTNYSIYYLNNNINITFLKNVDKIIITDIL

SEQ ID NO: 38225 - protein, 85 aa, unidentified
  REGION 1..85: note = Description of Unknown:cds_NC_035460.1_cds_YP_009408036.1_85 target sequence
YLDESIWKRLTIIQCPTIVDTTYENYLINPFLLLDKNEIIFKNIMLLSSINSLFHNKNSSFKMLLNEIIKSHKVNMINVFINNKN

SEQ ID NO: 38226 - protein, 85 aa, unidentified
  REGION 1..85: note = Description of Unknown:cds_NC_030656.1_cds_YP_009268747.1_32 target sequence
ESEQYDMVSIISKYISNSELISNVVSWATVSASKNMIKNISNSKVNIEEPKFNHIHNIGIEYSKDSKNKLLYKTKPTIEVDTKYK

SEQ ID NO: 38227 - protein, 85 aa, unidentified
  REGION 1..85: note = Description of Unknown:cds_NC_030656.1_cds_YP_009268747.1_32 target sequence
YISDLIKTTSGIEKEVLRYILFALKCIDAKVEYDIEKLQDYDYSKYFNVLDQSKNIRCPGCKGKNTIPLMIQHRAADEAPLVIHV

SEQ ID NO: 38228 - protein, 84 aa, unidentified
  REGION 1..84: note = Description of Unknown:cds_NC_030656.1_cds_YP_009268747.1_32 target sequence
EAPLVIHVCKDCKKRFKPPKFKANPKTKELREEDEEIELEADNDYASDNESLDEFKNEDNEMQEIESLMVTPNGNQDGSPYELN

SEQ ID NO: 38229 - protein, 85 aa, unidentified
  REGION 1..85: note = Description of Unknown:cds_NC_030656.1_cds_YP_009268747.1_32 target sequence
ATVSASKNMIKNISNSKVNIEEPKFNHIHNIGIEYSKDSKNKLLYKTKPTIEVDTKYKYISDLIKTTSGIEKEVLRYILFALKCI

SEQ ID NO: 38230 - protein, 85 aa, unidentified
  REGION 1..85: note = Description of Unknown:cds_NC_030656.1_cds_YP_009268747.1_32 target sequence
DAKVEYDIEKLQDYDYSKYFNVLDQSKNIRCPGCKGKNTIPLMIQHRAADEAPLVIHVCKDCKKRFKPPKFKANPKTKELREEDE

SEQ ID NO: 38231 - protein, 85 aa, unidentified
  REGION 1..85: note = Description of Unknown:cds_NZ_WFIY01000004.1_cds_WP_155862416.1_157 target sequence
VIKLTEEIETTDDDSSKLWFYDKKNIIDCIPNLVGFSENKVKLRVKNFFFLNKILEYEITSFIGGEYIEHKFKNEDSFATLLITF

SEQ ID NO: 38232 - protein, 85 aa, unidentified
  REGION 1..85: note = Description of Unknown:cds_NZ_WFIY01000004.1_cds_WP_155862416.1_157 target sequence
NKNRKIISLSLSYSGKFEKQMNKILEKMMKNLKIKYLEQKTALQKKNNESLSSKLASLSFVAKLVSTSKLIYSDKLDTGKIDITP

SEQ ID NO: 38233 - protein, 84 aa, unidentified
  REGION 1..84: note = Description of Unknown:cds_NZ_WFIY01000004.1_cds_WP_155862416.1_157 target sequence
DTGKIDITPFIENLLHKFSQYPIIYISGFNEENTFRLLFVNGELKGIYVKISDKEFYSEEELLKLKGLFHVSVYANLLKPSMVT

SEQ ID NO: 38234 - protein, 85 aa, unidentified
  REGION 1..85: note = Description of Unknown:cds_NZ_WFIY01000004.1_cds_WP_155862416.1_157 target sequence
DCIPNLVGFSENKVKLRVKNFFFLNKILEYEITSFIGGEYIEHKFKNEDSFATLLITFNKNRKIISLSLSYSGKFEKQMNKILEK

SEQ ID NO: 38235 - protein, 85 aa, unidentified
  REGION 1..85: note = Description of Unknown:cds_NZ_WFIY01000004.1_cds_WP_155862416.1_157 target sequence
MMKNLKIKYLEQKTALQKKNNESLSSKLASLSFVAKLVSTSKLIYSDKLDTGKIDITPFIENLLHKFSQYPIIYISGFNEENTFR

SEQ ID NO: 38236 - protein, 85 aa, unidentified
  REGION 1..85: note = Description of Unknown:cds_NZ_WFIY01000004.1_cds_WP_155862517.1_278 target sequence
LSFEIRESYIPQLTKPSYMIIGLPDAGLVGEIATEFLIEKGGFKEYGEVFSKKYIPPVMHVTNGVAKSPLRVYHNINTIILHAWT

SEQ ID NO: 38237 - protein, 85 aa, unidentified
  REGION 1..85: note = Description of Unknown:cds_NZ_WFIY01000004.1_cds_WP_155862517.1_278 target sequence
ALPASSAYPLAEFIVDYAKKYGIDTIISITGVPIPNRLDIEKPTAYWIASEEGLSEELSKTNLMQKFDDGYIAGPYAPILLEASR

SEQ ID NO: 38238 - protein, 84 aa, unidentified
  REGION 1..84: note = Description of Unknown:cds_NZ_WFIY01000004.1_cds_WP_155862517.1_278 target sequence
PILLEASRKNVRNFVVVVESFLDIPDPEASAVALDIISKYIGFSIDVSSLLKEAEEIRAKIKGLMEQTKKELPSYSSVRPMSYA

SEQ ID NO: 38239 - protein, 85 aa, unidentified
  REGION 1..85: note = Description of Unknown:cds_NZ_WFIY01000004.1_cds_WP_155862517.1_278 target sequence
LVGEIATEFLIEKGGFKEYGEVFSKKYIPPVMHVTNGVAKSPLRVYHNINTIILHAWTALPASSAYPLAEFIVDYAKKYGIDTII

SEQ ID NO: 38240 - protein, 85 aa, unidentified
  REGION 1..85: note = Description of Unknown:cds_NZ_WFIY01000004.1_cds_WP_155862517.1_278 target sequence
SITGVPIPNRLDIEKPTAYWIASEEGLSEELSKTNLMQKFDDGYIAGPYAPILLEASRKNVRNFVVVVESFLDIPDPEASAVALD

SEQ ID NO: 38241 - protein, 85 aa, unidentified
  REGION 1..85: note = Description of Unknown:cds_NZ_WFIY01000004.1_cds_WP_155862519.1_281 target sequence
STLKIEDLHVEVEGKEIIKGISLEIKSGEVHAIMGPNGSGKTTLSLAIMGHPKYKITKGRILLDGEDITNLETDQKVKKGLFLAF

SEQ ID NO: 38242 - protein, 85 aa, unidentified
  REGION 1..85: note = Description of Unknown:cds_NZ_WFIY01000004.1_cds_WP_155862519.1_281 target sequence
QNPIEISGVKLSTLLVAEYNRIYGSNESVTQVFSKIASLSKSVGISDSLLNRGVFEGFSGGEKKRVEILQLQILKPKFAILDEPD

SEQ ID NO: 38243 - protein, 84 aa, unidentified
  REGION 1..84: note = Description of Unknown:cds_NZ_WFIY01000004.1_cds_WP_155862519.1_281 target sequence
KFAILDEPDSGVDVDGLKIISDVIKKVKEENNTGYLIITHYRRILDYVNADKIHVLYKGRIVASGSMELAKLIDEKGYEGVIKQ

SEQ ID NO: 38244 - protein, 85 aa, unidentified
  REGION 1..85: note = Description of Unknown:cds_NZ_WFIY01000004.1_cds_WP_155862519.1_281 target sequence
GEVHAIMGPNGSGKTTLSLAIMGHPKYKITKGRILLDGEDITNLETDQKVKKGLFLAFQNPIEISGVKLSTLLVAEYNRIYGSNE

SEQ ID NO: 38245 - protein, 85 aa, unidentified
  REGION 1..85: note = Description of Unknown:cds_NZ_WFIY01000004.1_cds_WP_155862519.1_281 target sequence
SVTQVFSKIASLSKSVGISDSLLNRGVFEGFSGGEKKRVEILQLQILKPKFAILDEPDSGVDVDGLKIISDVIKKVKEENNTGYL

SEQ ID NO: 38246 - protein, 85 aa, unidentified
  REGION 1..85: note = Description of Unknown:cds_NZ_WFIY01000004.1_cds_WP_155864329.1_2338 target sequence
FPTSLPPDLNYALMEIKQKIINYAIESEKENREIRCIFFYVKYSKGIEEICVKGEEGRVKAEPLYEELYNRITEYDKYRGKVSEI

SEQ ID NO: 38247 - protein, 85 aa, unidentified
  REGION 1..85: note = Description of Unknown:cds_NZ_WFIY01000004.1_cds_WP_155864329.1_2338 target sequence
ILEFHTRPTSTSSLKKLYGDLTEDEIIAMKKIDSTFSPQDLAPTIFSYMSVKETLDVEIKYTSVAAYIAEENKVYFTYLDVRKLM

SEQ ID NO: 38248 - protein, 84 aa, unidentified
  REGION 1..84: note = Description of Unknown:cds_NZ_WFIY01000004.1_cds_WP_155864329.1_2338 target sequence
TYLDVRKLMKEAAGKIGVQEIRTVEDIRRFGTYMQNNFANKAAEVMEKIVKAPKDEKDKYIRELEKIVLRLESEFTIGSTSFSS

SEQ ID NO: 38249 - protein, 85 aa, unidentified
  REGION 1..85: note = Description of Unknown:cds_NZ_WFIY01000004.1_cds_WP_155864329.1_2338 target sequence
EKENREIRCIFFYVKYSKGIEEICVKGEEGRVKAEPLYEELYNRITEYDKYRGKVSEIILEFHTRPTSTSSLKKLYGDLTEDEII

SEQ ID NO: 38250 - protein, 85 aa, unidentified
  REGION 1..85: note = Description of Unknown:cds_NZ_WFIY01000004.1_cds_WP_155864329.1_2338 target sequence
AMKKIDSTFSPQDLAPTIFSYMSVKETLDVEIKYTSVAAYIAEENKVYFTYLDVRKLMKEAAGKIGVQEIRTVEDIRRFGTYMQN

SEQ ID NO: 38251 - protein, 85 aa, unidentified
  REGION 1..85: note = Description of Unknown:cds_NC_019843.3_cds_YP_009047207.1_6 target sequence
EESLMDVPSTSGTQVYSRKARKRSHSPTKKLRYVKRRFSLLRHEDLSVIVQPTHYVRVTFSDPNMWYLRSGHHLHSVHNWLKPYG

SEQ ID NO: 38252 - protein, 85 aa, unidentified
  REGION 1..85: note = Description of Unknown:cds_NC_019843.3_cds_YP_009047207.1_6 target sequence
GQPVSEYHITLALLNLTDEDLARDFSPIALFLRNVRFELHEFALLRKTLVLNASEIYCANIHRFKPVYRVNTAIPTIKDWLLVQG

SEQ ID NO: 38253 - protein, 84 aa, unidentified
  REGION 1..84: note = Description of Unknown:cds_NC_019843.3_cds_YP_009047207.1_6 target sequence
IKDWLLVQGFSLYHSGLPLHMSISKLHALDDVTRNYIITMPCFRTYPQQMFVTPLAVDVVSIRSSNQGNKQIVHSYPILHHPGF

SEQ ID NO: 38254 - protein, 85 aa, unidentified
  REGION 1..85: note = Description of Unknown:cds_NC_019843.3_cds_YP_009047207.1_6 target sequence
TKKLRYVKRRFSLLRHEDLSVIVQPTHYVRVTFSDPNMWYLRSGHHLHSVHNWLKPYGGQPVSEYHITLALLNLTDEDLARDFSP

SEQ ID NO: 38255 - protein, 85 aa, unidentified
  REGION 1..85: note = Description of Unknown:cds_NC_019843.3_cds_YP_009047207.1_6 target sequence
IALFLRNVRFELHEFALLRKTLVLNASEIYCANIHRFKPVYRVNTAIPTIKDWLLVQGFSLYHSGLPLHMSISKLHALDDVTRNY

SEQ ID NO: 38256 - protein, 85 aa, unidentified
  REGION 1..85: note = Description of Unknown:cds_NC_009884.1_cds_YP_001496966.1_41 target sequence
TLSNEYLNAVSMMIVYGQDNSGTDFNYYYYSATTYSTYAPTGVVAVLKNSGNVVATLTGYQISLSTSSVKFIFYDTSNNEYSFDE

SEQ ID NO: 38257 - protein, 85 aa, unidentified
  REGION 1..85: note = Description of Unknown:cds_NC_009884.1_cds_YP_001496966.1_41 target sequence
VDIYTEMNGTLALLVSRTTGLSYSKSASEAVVAYFTLSLSQSPSLYINYAFMYLLVPRLVLQNVFPFSNYVGITSYSVSQVSGTI

SEQ ID NO: 38258 - protein, 84 aa, unidentified
  REGION 1..84: note = Description of Unknown:cds_NC_009884.1_cds_YP_001496966.1_41 target sequence
SVSQVSGTISFDGAGYSNGELIIFLTLSTTGGANPIITAVTTQASTTTPSISSNQVLQAILPAPLPSTSSPVQYPIQIGVQYEE

SEQ ID NO: 38259 - protein, 85 aa, unidentified
  REGION 1..85: note = Description of Unknown:cds_NC_009884.1_cds_YP_001496966.1_41 target sequence
YYYSATTYSTYAPTGVVAVLKNSGNVVATLTGYQISLSTSSVKFIFYDTSNNEYSFDEVDIYTEMNGTLALLVSRTTGLSYSKSA

SEQ ID NO: 38260 - protein, 85 aa, unidentified
  REGION 1..85: note = Description of Unknown:cds_NC_009884.1_cds_YP_001496966.1_41 target sequence
SEAVVAYFTLSLSQSPSLYINYAFMYLLVPRLVLQNVFPFSNYVGITSYSVSQVSGTISFDGAGYSNGELIIFLTLSTTGGANPI

SEQ ID NO: 38261 - protein, 85 aa, unidentified
  REGION 1..85: note = Description of Unknown:hvTR_P03206 target sequence
MDPNSTSEDVKFTPDPYQVPFVQAFDQATRVYQDLGGPSQAPLPCVLWPVLPEPLPQGQLTAYHVSTAPTGSWFSAPQPAPENAY

SEQ ID NO: 38262 - protein, 85 aa, unidentified
  REGION 1..85: note = Description of Unknown:hvTR_P03206 target sequence
QAYAAPQLFPVSDITQNQQTNQAGGEAPQPGDNSTVQTAAAVVFACPGANQGQQLADIGVPQPAPVAAPARRTRKPQQPESLEEC

SEQ ID NO: 38263 - protein, 84 aa, unidentified
  REGION 1..84: note = Description of Unknown:hvTR_P03206 target sequence
PQQPESLEECDSELEIKRYKNRVASRKCRAKFKQLLQHYREVAAAKSSENDRLRLLLKQMCPSLDVDSIIPRTPDVLHEDLLNF

SEQ ID NO: 38264 - protein, 85 aa, unidentified
  REGION 1..85: note = Description of Unknown:hvTR_P03206 target sequence
ATRVYQDLGGPSQAPLPCVLWPVLPEPLPQGQLTAYHVSTAPTGSWFSAPQPAPENAYQAYAAPQLFPVSDITQNQQTNQAGGEA

SEQ ID NO: 38265 - protein, 85 aa, unidentified
  REGION 1..85: note = Description of Unknown:hvTR_P03206 target sequence
PQPGDNSTVQTAAAVVFACPGANQGQQLADIGVPQPAPVAAPARRTRKPQQPESLEECDSELEIKRYKNRVASRKCRAKFKQLLQ

SEQ ID NO: 38266 - protein, 85 aa, unidentified
  REGION 1..85: note = Description of Unknown:cds_NC_014395.1_cds_YP_003848707.1_4 target sequence
DNYQELAIQFAAQAVDRNEIEQWVREFAYQGFDARRVIELLKQYGGADWEKDAKKMIVLALTRGNKPRRMMMKMSKEGKATVEAL

SEQ ID NO: 38267 - protein, 85 aa, unidentified
  REGION 1..85: note = Description of Unknown:cds_NC_014395.1_cds_YP_003848707.1_4 target sequence
INKYKLKEGNPSRDELTLSRVAAALAGWTCQALVVLSEWLPVTGTTMDGLSPAYPRHMMHPSFAGMVDPSLPGDYLRAILDAHSL

SEQ ID NO: 38268 - protein, 84 aa, unidentified
  REGION 1..84: note = Description of Unknown:cds_NC_014395.1_cds_YP_003848707.1_4 target sequence
LRAILDAHSLYLLQFSRVINPNLRGRTKEEVAATFTQPMNAAVNSNFISHEKRREFLKAFGLVDSNGKPSAAVMAAAQAYKTAA

SEQ ID NO: 38269 - protein, 85 aa, unidentified
  REGION 1..85: note = Description of Unknown:cds_NC_014395.1_cds_YP_003848707.1_4 target sequence
AYQGFDARRVIELLKQYGGADWEKDAKKMIVLALTRGNKPRRMMMKMSKEGKATVEALINKYKLKEGNPSRDELTLSRVAAALAG

SEQ ID NO: 38270 - protein, 85 aa, unidentified
  REGION 1..85: note = Description of Unknown:cds_NC_014395.1_cds_YP_003848707.1_4 target sequence
WTCQALVVLSEWLPVTGTTMDGLSPAYPRHMMHPSFAGMVDPSLPGDYLRAILDAHSLYLLQFSRVINPNLRGRTKEEVAATFTQ

SEQ ID NO: 38271 - protein, 85 aa, unidentified
  REGION 1..85: note = Description of Unknown:cds_NZ_WFIY01000004.1_cds_WP_155862349.1_80 target sequence
ELEKSMIKRFAFSPTAISYLLAMLMLDSVELYFALDSVKSIGLGIIWYSVAIILLLASLSTGFSITLVYHSSALAYYLRFSKLKM

SEQ ID NO: 38272 - protein, 85 aa, unidentified
  REGION 1..85: note = Description of Unknown:cds_NZ_WFIY01000004.1_cds_WP_155862349.1_80 target sequence
YNYVMSLFLGAIVSTIIYSLVFTIFVAPLVTKVTLNQIYQVIKLSNIAQFIISVLISSFFILSLTFTITLTLLIKVGANASKYAN

SEQ ID NO: 38273 - protein, 84 aa, unidentified
  REGION 1..84: note = Description of Unknown:cds_NZ_WFIY01000004.1_cds_WP_155862349.1_80 target sequence
VGANASKYANYIFFGLLVISELSPSAPSPLNPFYEAENIISYSLIHYSISVYTIEVALLALLLLFLGNLALRKIRALRLEEVVW

SEQ ID NO: 38274 - protein, 85 aa, unidentified
  REGION 1..85: note = Description of Unknown:cds_NZ_WFIY01000004.1_cds_WP_155862349.1_80 target sequence
SVELYFALDSVKSIGLGIIWYSVAIILLLASLSTGFSITLVYHSSALAYYLRFSKLKMYNYVMSLFLGAIVSTIIYSLVFTIFVA

SEQ ID NO: 38275 - protein, 85 aa, unidentified
  REGION 1..85: note = Description of Unknown:cds_NZ_WFIY01000004.1_cds_WP_155862349.1_80 target sequence
PLVTKVTLNQIYQVIKLSNIAQFIISVLISSFFILSLTFTITLTLLIKVGANASKYANYIFFGLLVISELSPSAPSPLNPFYEAE

SEQ ID NO: 38276 - protein, 85 aa, unidentified
  REGION 1..85: note = Description of Unknown:cds_NZ_WFIY01000004.1_cds_WP_155862910.1_761 target sequence
FPFKRRRELNIAFFSSIFSIERTLTEKTLKASLLFRFFIEYRITNVYVICSSDKEYELLREISEYALTPPYLKKYIPISPNLRKA

SEQ ID NO: 38277 - protein, 85 aa, unidentified
  REGION 1..85: note = Description of Unknown:cds_NZ_WFIY01000004.1_cds_WP_155862910.1_761 target sequence
GLLPPMNLPSHLVHRFPVEGEIRLGKNQDFGLHKKIRTKYRSIMFTDSVKGSFIQYPMIYYDGFKLHKVRFEEILEKNNLIIGSR

SEQ ID NO: 38278 - protein, 84 aa, unidentified
  REGION 1..84: note = Description of Unknown:cds_NZ_WFIY01000004.1_cds_WP_155862910.1_761 target sequence
EKNNLIIGSRNGKNPLKYKEEIISIYEEKGLTLLIGPPEGMLLKKLGEKFLEKSYNFIIKQGVSDVRAEEAIISSLSLLNAILE

SEQ ID NO: 38279 - protein, 85 aa, unidentified
  REGION 1..85: note = Description of Unknown:cds_NZ_WFIY01000004.1_cds_WP_155862910.1_761 target sequence
TLKASLLFRFFIEYRITNVYVICSSDKEYELLREISEYALTPPYLKKYIPISPNLRKAGLLPPMNLPSHLVHRFPVEGEIRLGKN

SEQ ID NO: 38280 - protein, 85 aa, unidentified
  REGION 1..85: note = Description of Unknown:cds_NZ_WFIY01000004.1_cds_WP_155862910.1_761 target sequence
QDFGLHKKIRTKYRSIMFTDSVKGSFIQYPMIYYDGFKLHKVRFEEILEKNNLIIGSRNGKNPLKYKEEIISIYEEKGLTLLIGP

SEQ ID NO: 38281 - protein, 85 aa, unidentified
  REGION 1..85: note = Description of Unknown:cds_NZ_WFIY01000004.1_cds_WP_162309154.1_1197 target sequence
KVGEVMSKIVVTVRPEDSGKEVIEALSSTPSGRVIVMSGDEPVGIISSRDVVKAYSKMEDNVFDARADEIATRGVITADENEEVG

SEQ ID NO: 38282 - protein, 85 aa, unidentified
  REGION 1..85: note = Description of Unknown:cds_NZ_WFIY01000004.1_cds_WP_162309154.1_1197 target sequence
NAVRIMASKKIGSLVITSGKVLRGIFTERDVIRILSRMTFSGLVESIMSTDVITIPSDVDLLFASKLMEYEGVRRLPVVRGKEVE

SEQ ID NO: 38283 - protein, 84 aa, unidentified
  REGION 1..84: note = Description of Unknown:cds_NZ_WFIY01000004.1_cds_WP_162309154.1_1197 target sequence
LPVVRGKEVEGIITAADIVKALAKGLHMVNEIETRNPIGVRSDDPIMKAVRIMNEKRIGSLLVDGIKGIVTERDVLYASLNEIR

SEQ ID NO: 38284 - protein, 85 aa, unidentified
  REGION 1..85: note = Description of Unknown:cds_NZ_WFIY01000004.1_cds_WP_162309154.1_1197 target sequence
STPSGRVIVMSGDEPVGIISSRDVVKAYSKMEDNVFDARADEIATRGVITADENEEVGNAVRIMASKKIGSLVITSGKVLRGIFT

SEQ ID NO: 38285 - protein, 85 aa, unidentified
  REGION 1..85: note = Description of Unknown:cds_NZ_WFIY01000004.1_cds_WP_162309154.1_1197 target sequence
ERDVIRILSRMTFSGLVESIMSTDVITIPSDVDLLFASKLMEYEGVRRLPVVRGKEVEGIITAADIVKALAKGLHMVNEIETRNP

SEQ ID NO: 38286 - protein, 85 aa, unidentified
  REGION 1..85: note = Description of Unknown:cds_NZ_WFIY01000004.1_cds_WP_155863911.1_1823 target sequence
LEVMVPLSISGVWYPVFSNNPDKSGSIGLTMVLEPYSRVEIKRGNAEIILNGKKIDFPNLDFLKNNLGNLHLEIKSEVPLGFGYG

SEQ ID NO: 38287 - protein, 85 aa, unidentified
  REGION 1..85: note = Description of Unknown:cds_NZ_WFIY01000004.1_cds_WP_155863911.1_1823 target sequence
LSGSISLAYALGASEIFGIIEREAIKIAHESEVINKNGLGDVISQYVGGGLVYRKTPGIYGEVETIKIDWRPVCSKPLEKLPTTS

SEQ ID NO: 38288 - protein, 84 aa, unidentified
  REGION 1..84: note = Description of Unknown:cds_NZ_WFIY01000004.1_cds_WP_155863911.1_1823 target sequence
KPLEKLPTTSLLKNSESALFYIQQFLKERTIDKFFEVARKFTEELGFHSPYKKSFRKKGIIVRLDECEEGWTIHKPAMKGAYVI

SEQ ID NO: 38289 - protein, 85 aa, unidentified
  REGION 1..85: note = Description of Unknown:cds_NZ_WFIY01000004.1_cds_WP_155863911.1_1823 target sequence
GLTMVLEPYSRVEIKRGNAEIILNGKKIDFPNLDFLKNNLGNLHLEIKSEVPLGFGYGLSGSISLAYALGASEIFGIIEREAIKI

SEQ ID NO: 38290 - protein, 85 aa, unidentified
  REGION 1..85: note = Description of Unknown:cds_NZ_WFIY01000004.1_cds_WP_155863911.1_1823 target sequence
AHESEVINKNGLGDVISQYVGGGLVYRKTPGIYGEVETIKIDWRPVCSKPLEKLPTTSLLKNSESALFYIQQFLKERTIDKFFEV

SEQ ID NO: 38291 - protein, 85 aa, unidentified
  REGION 1..85: note = Description of Unknown:cds_NZ_WFIY01000004.1_cds_WP_155863996.1_1921 target sequence
MRSRNYQIFSVIFKERFREPTLEFTIPLMFSSNVFINAFYERGNFTIYGIILAFIPLISVSETIAFALALRNIIFVTGDHIYRGS

SEQ ID NO: 38292 - protein, 85 aa, unidentified
  REGION 1..85: note = Description of Unknown:cds_NZ_WFIY01000004.1_cds_WP_155863996.1_1921 target sequence
IISFLTFPIKRTSLFLMMYFSDVITPYIIWLSTTEAYILLSGIPVPQFLILIYTIGYFFTENIILSIALTFKSAGIATLLSSFII

SEQ ID NO: 38293 - protein, 84 aa, unidentified
  REGION 1..84: note = Description of Unknown:cds_NZ_WFIY01000004.1_cds_WP_155863996.1_1921 target sequence
IATLLSSFIIGLLFIFGGMLNYYELIQGSNVLGITSSLNPYVLLLYEAVNRKTLPCIYEGITIELIIATFTFFFSLNKFKRLEI

SEQ ID NO: 38294 - protein, 85 aa, unidentified
  REGION 1..85: note = Description of Unknown:cds_NZ_WFIY01000004.1_cds_WP_155863996.1_1921 target sequence
LMFSSNVFINAFYERGNFTIYGIILAFIPLISVSETIAFALALRNIIFVTGDHIYRGSIISFLTFPIKRTSLFLMMYFSDVITPY

SEQ ID NO: 38295 - protein, 85 aa, unidentified
  REGION 1..85: note = Description of Unknown:cds_NZ_WFIY01000004.1_cds_WP_155863996.1_1921 target sequence
IIWLSTTEAYILLSGIPVPQFLILIYTIGYFFTENIILSIALTFKSAGIATLLSSFIIGLLFIFGGMLNYYELIQGSNVLGITSS

SEQ ID NO: 38296 - protein, 85 aa, unidentified
  REGION 1..85: note = Description of Unknown:cds_NZ_WFIY01000004.1_cds_WP_155864085.1_2030 target sequence
ITLKLLNSQITYDGEVILIKENIPNSETNVEIFADGISKLSLETPHYRITGKNLYLPSREINLADVKSFAYSAVRNLIREDKEPI

SEQ ID NO: 38297 - protein, 85 aa, unidentified
  REGION 1..85: note = Description of Unknown:cds_NZ_WFIY01000004.1_cds_WP_155864085.1_2030 target sequence
IALSGEGLVYDFSVNCHEVKIIEKTLNGIHFLSAALQKPLLPSSVSVQLPPWATPFKLLSAVILLSEKPQDVLKKHFQQITKIVT

SEQ ID NO: 38298 - protein, 84 aa, unidentified
  REGION 1..84: note = Description of Unknown:cds_NZ_WFIY01000004.1_cds_WP_155864085.1_2030 target sequence
HFQQITKIVTDSGYIEKNGLRLVKLYYGGVNKVLCYSQLTGYLCFEEEEKVKEIRPSDKDIEKLANNILKGYGKCVIEKGMIVI

SEQ ID NO: 38299 - protein, 85 aa, unidentified
  REGION 1..85: note = Description of Unknown:cds_NZ_WFIY01000004.1_cds_WP_155864085.1_2030 target sequence
TNVEIFADGISKLSLETPHYRITGKNLYLPSREINLADVKSFAYSAVRNLIREDKEPIIALSGEGLVYDFSVNCHEVKIIEKTLN

SEQ ID NO: 38300 - protein, 85 aa, unidentified
  REGION 1..85: note = Description of Unknown:cds_NZ_WFIY01000004.1_cds_WP_155864085.1_2030 target sequence
GIHFLSAALQKPLLPSSVSVQLPPWATPFKLLSAVILLSEKPQDVLKKHFQQITKIVTDSGYIEKNGLRLVKLYYGGVNKVLCYS

SEQ ID NO: 38301 - protein, 85 aa, unidentified
  REGION 1..85: note = Description of Unknown:cds_NZ_WFIY01000004.1_cds_2138 target sequence
VKIVTWNVNGLKAITRKGSLDEVLKYDVVMLQEIRTSDLPLDLLFSGLTIESFSAKKKGYSGVMTLTRYKPINVIKGLNVEEFDE

SEQ ID NO: 38302 - protein, 85 aa, unidentified
  REGION 1..85: note = Description of Unknown:cds_NZ_WFIY01000004.1_cds_2138 target sequence
EGRVLTLEFDKLFLVNSYFPRAGDELKRLDFKIKFDKAMEEFMTKLRERKPVIICGDFNAVRDKKDSSFWDEKEPALTPQEREWL

SEQ ID NO: 38303 - protein, 84 aa, unidentified
  REGION 1..84: note = Description of Unknown:cds_NZ_WFIY01000004.1_cds_2138 target sequence
LTPQEREWLNHVVNDLGFIDAYKLVNPNKNEFTWRSYRFKWKAMRIDYCLVSSELKNEIKNCEVLKIEGSDHYPLLLELNIERP

SEQ ID NO: 38304 - protein, 85 aa, unidentified
  REGION 1..85: note = Description of Unknown:cds_NZ_WFIY01000004.1_cds_2138 target sequence
VVMLQEIRTSDLPLDLLFSGLTIESFSAKKKGYSGVMTLTRYKPINVIKGLNVEEFDEEGRVLTLEFDKLFLVNSYFPRAGDELK

SEQ ID NO: 38305 - protein, 85 aa, unidentified
  REGION 1..85: note = Description of Unknown:cds_NZ_WFIY01000004.1_cds_2138 target sequence
RLDFKIKFDKAMEEFMTKLRERKPVIICGDFNAVRDKKDSSFWDEKEPALTPQEREWLNHVVNDLGFIDAYKLVNPNKNEFTWRS

SEQ ID NO: 38306 - protein, 85 aa, unidentified
  REGION 1..85: note = Description of Unknown:cds_NZ_WFIY01000004.1_cds_WP_155864232.1_2202 target sequence
TKVIYKNEGLLSWIIFNREEKLNALDMESWAELRDSLRKADEDPSTAIIITGKGRAFSAGDDIYAMEGLSNADEAEKFFNTLYSA

SEQ ID NO: 38307 - protein, 85 aa, unidentified
  REGION 1..85: note = Description of Unknown:cds_NZ_WFIY01000004.1_cds_WP_155864232.1_2202 target sequence
IKALIEVKKPVIALVNGLAYGGGCEILLLSDIVISSEDAVFSISEGKLGLIPPMACAIGYKALGRRITRLLLTAEAITAKEAKEI

SEQ ID NO: 38308 - protein, 84 aa, unidentified
  REGION 1..84: note = Description of Unknown:cds_NZ_WFIY01000004.1_cds_WP_155864232.1_2202 target sequence
AITAKEAKEIGLVDYVVPKEKIMEELDKVVKMISQLDLNSIRSMKAWTRADLKMIEKAVKELSLLCLTSPAKDRMREFVSKHTS

SEQ ID NO: 38309 - protein, 85 aa, unidentified
  REGION 1..85: note = Description of Unknown:cds_NZ_WFIY01000004.1_cds_WP_155864232.1_2202 target sequence
ESWAELRDSLRKADEDPSTAIIITGKGRAFSAGDDIYAMEGLSNADEAEKFFNTLYSAIKALIEVKKPVIALVNGLAYGGGCEIL

SEQ ID NO: 38310 - protein, 85 aa, unidentified
  REGION 1..85: note = Description of Unknown:cds_NZ_WFIY01000004.1_cds_WP_155864232.1_2202 target sequence
LLSDIVISSEDAVFSISEGKLGLIPPMACAIGYKALGRRITRLLLTAEAITAKEAKEIGLVDYVVPKEKIMEELDKVVKMISQLD

SEQ ID NO: 38311 - protein, 85 aa, unidentified
  REGION 1..85: note = Description of Unknown:cds_NZ_WFIY01000004.1_cds_WP_155862490.1_248 target sequence
SKMLVSYATLGYPKENEYLEFIDGCVKGGSDILEIGVPPKYAKYDGPVIRRSYKQVSSWLKDIWPLLKETRDRVKIPIIILTYLE

SEQ ID NO: 38312 - protein, 85 aa, unidentified
  REGION 1..85: note = Description of Unknown:cds_NZ_WFIY01000004.1_cds_WP_155862490.1_248 target sequence
DWLPVLDDFLSNLAKIGIDGILFPDLIIDYVDDYEKYVKKIKDHGLKAVIFTAPSVPDPMIQRVSKISDIFLYYGVRPTTGVPIP

SEQ ID NO: 38313 - protein, 84 aa, unidentified
  REGION 1..84: note = Description of Unknown:cds_NZ_WFIY01000004.1_cds_WP_155862490.1_248 target sequence
GVRPTTGVPIPVSVDSLITRIRILVDNKLVVGFGLSDVEDMRKALRAGADGIAIGTAYIEAIEKGGVQEAINLVKYFRGVLNEF

SEQ ID NO: 38314 - protein, 85 aa, unidentified
  REGION 1..85: note = Description of Unknown:cds_NZ_WFIY01000004.1_cds_WP_155862490.1_248 target sequence
GGSDILEIGVPPKYAKYDGPVIRRSYKQVSSWLKDIWPLLKETRDRVKIPIIILTYLEDWLPVLDDFLSNLAKIGIDGILFPDLI

SEQ ID NO: 38315 - protein, 85 aa, unidentified
  REGION 1..85: note = Description of Unknown:cds_NZ_WFIY01000004.1_cds_WP_155862490.1_248 target sequence
IDYVDDYEKYVKKIKDHGLKAVIFTAPSVPDPMIQRVSKISDIFLYYGVRPTTGVPIPVSVDSLITRIRILVDNKLVVGFGLSDV

SEQ ID NO: 38316 - protein, 85 aa, unidentified
  REGION 1..85: note = Description of Unknown:cds_NZ_WFIY01000004.1_cds_WP_155862572.1_343 target sequence
LAVVTGASKGIGKATAIKLKDLGYTVVAISRSSPEVGDEKIQVDVSNKEDVFKTVNYLITKFGFIDVLVNNAGFGVYGSFLETDL

SEQ ID NO: 38317 - protein, 85 aa, unidentified
  REGION 1..85: note = Description of Unknown:cds_NZ_WFIY01000004.1_cds_WP_155862572.1_343 target sequence
NEEEYMIKTNLLGPIYFMKAVLPYMVKERKGSIVNIISEAAYVSSPKLLVYSATKAALAHITNGLWAEMRKYGVKVSGIYPGPVK

SEQ ID NO: 38318 - protein, 84 aa, unidentified
  REGION 1..84: note = Description of Unknown:cds_NZ_WFIY01000004.1_cds_WP_155862572.1_343 target sequence
KVSGIYPGPVKTNFTSHPSFKGVKDSFSKFAVEPEKVANAVVKAIKTGKREIYVPSKLALDPYFLKLSYIMQSITYRVIGKYFG

SEQ ID NO: 38319 - protein, 85 aa, unidentified
  REGION 1..85: note = Description of Unknown:cds_NZ_WFIY01000004.1_cds_WP_155862572.1_343 target sequence
AISRSSPEVGDEKIQVDVSNKEDVFKTVNYLITKFGFIDVLVNNAGFGVYGSFLETDLNEEEYMIKTNLLGPIYFMKAVLPYMVK

SEQ ID NO: 38320 - protein, 85 aa, unidentified
  REGION 1..85: note = Description of Unknown:cds_NZ_WFIY01000004.1_cds_WP_155862572.1_343 target sequence
ERKGSIVNIISEAAYVSSPKLLVYSATKAALAHITNGLWAEMRKYGVKVSGIYPGPVKTNFTSHPSFKGVKDSFSKFAVEPEKVA

SEQ ID NO: 38321 - protein, 85 aa, unidentified
  REGION 1..85: note = Description of Unknown:cds_NZ_WFIY01000004.1_cds_WP_155862581.1_354 target sequence
KFKALDAPAFVYIIKTISEFMDEGAIVSTNDGIRINGIDPSRVVFLDIFLPARYFENYESKDKEVIGINLEDLSSILARVKKDDT

SEQ ID NO: 38322 - protein, 85 aa, unidentified
  REGION 1..85: note = Description of Unknown:cds_NZ_WFIY01000004.1_cds_WP_155862581.1_354 target sequence
LSFETDGSNLKIIIEGSFQRIFSLPLLSMEEQKNPSLNLEFPFKAKMLTVTFSDVIDGLADLGDTLTVSSEGGKLYLSVEGDMGE

SEQ ID NO: 38323 - protein, 84 aa, unidentified
  REGION 1..84: note = Description of Unknown:cds_NZ_WFIY01000004.1_cds_WP_155862581.1_354 target sequence
LYLSVEGDMGESKVELSTDNGALLEASGNDAKSTYGMEYVLNTTKMRKASDTMELYFGSQIPLKLHYELPQGGYGEFYIAPRVE

SEQ ID NO: 38324 - protein, 85 aa, unidentified
  REGION 1..85: note = Description of Unknown:cds_NZ_WFIY01000004.1_cds_WP_155862581.1_354 target sequence
STNDGIRINGIDPSRVVFLDIFLPARYFENYESKDKEVIGINLEDLSSILARVKKDDTLSFETDGSNLKIIIEGSFQRIFSLPLL

SEQ ID NO: 38325 - protein, 85 aa, unidentified
  REGION 1..85: note = Description of Unknown:cds_NZ_WFIY01000004.1_cds_WP_155862581.1_354 target sequence
SMEEQKNPSLNLEFPFKAKMLTVTFSDVIDGLADLGDTLTVSSEGGKLYLSVEGDMGESKVELSTDNGALLEASGNDAKSTYGME

SEQ ID NO: 38326 - protein, 85 aa, unidentified
  REGION 1..85: note = Description of Unknown:cds_NZ_WFIY01000004.1_cds_WP_155862726.1_531 target sequence
KALKGVLSQLSFFTIIPSVNTSLEEIAEYSFISPIFIGIITGIIDFVAYFSLFHILGYSSRFVIIIIVEVIRGFNHLDGLLDLGD

SEQ ID NO: 38327 - protein, 85 aa, unidentified
  REGION 1..85: note = Description of Unknown:cds_NZ_WFIY01000004.1_cds_WP_155862726.1_531 target sequence
AIMIKGDYERKLKALKDVAVGSGGIGSAIVYFSIFLISLCGFPYPSIGTLLILISAEVLSRDLGILTLSILEPMESSYLGKLFHD

SEQ ID NO: 38328 - protein, 84 aa, unidentified
  REGION 1..84: note = Description of Unknown:cds_NZ_WFIY01000004.1_cds_WP_155862726.1_531 target sequence
ESSYLGKLFHDKLKDKWVIIIAEGIPFLLFYPFSVIIFFTLFVIFYEIGKKVLRGSSGDLTGAIITISFPLFLIVERLFSFLIF

SEQ ID NO: 38329 - protein, 85 aa, unidentified
  REGION 1..85: note = Description of Unknown:cds_NZ_WFIY01000004.1_cds_WP_155862726.1_531 target sequence
EYSFISPIFIGIITGIIDFVAYFSLFHILGYSSRFVIIIIVEVIRGFNHLDGLLDLGDAIMIKGDYERKLKALKDVAVGSGGIGS

SEQ ID NO: 38330 - protein, 85 aa, unidentified
  REGION 1..85: note = Description of Unknown:cds_NZ_WFIY01000004.1_cds_WP_155862726.1_531 target sequence
AIVYFSIFLISLCGFPYPSIGTLLILISAEVLSRDLGILTLSILEPMESSYLGKLFHDKLKDKWVIIIAEGIPFLLFYPFSVIIF

SEQ ID NO: 38331 - protein, 85 aa, unidentified
  REGION 1..85: note = Description of Unknown:cds_NZ_WFIY01000004.1_cds_WP_155863868.1_1772 target sequence
DLTLQLFDVLEDIWGDTSGVKMSFAGNQWFAAKDVLELLKSKGYKVYLETIPPGMVRKRAEGESLKVGNLYISFIPEIVSLPPSL

SEQ ID NO: 38332 - protein, 85 aa, unidentified
  REGION 1..85: note = Description of Unknown:cds_NZ_WFIY01000004.1_cds_WP_155863868.1_1772 target sequence
LEGLKIRKKVEYAENDIVIVYRGAEINNLCELKGRRVAIPNPSIEGIGQLFKELYEEECGDYEELINYGGVYITKVHHREIPHML

SEQ ID NO: 38333 - protein, 84 aa, unidentified
  REGION 1..84: note = Description of Unknown:cds_NZ_WFIY01000004.1_cds_WP_155863868.1_1772 target sequence
KVHHREIPHMLKLGDIDAGIMWRTEAIYWTFKYTVPQHNKKGKLAFALLDNASEKAEEVFNLLISPEVKQIYEKYGFKWIANIN

SEQ ID NO: 38334 - protein, 85 aa, unidentified
  REGION 1..85: note = Description of Unknown:cds_NZ_WFIY01000004.1_cds_WP_155863868.1_1772 target sequence
QWFAAKDVLELLKSKGYKVYLETIPPGMVRKRAEGESLKVGNLYISFIPEIVSLPPSLLEGLKIRKKVEYAENDIVIVYRGAEIN

SEQ ID NO: 38335 - protein, 85 aa, unidentified
  REGION 1..85: note = Description of Unknown:cds_NZ_WFIY01000004.1_cds_WP_155863868.1_1772 target sequence
NLCELKGRRVAIPNPSIEGIGQLFKELYEEECGDYEELINYGGVYITKVHHREIPHMLKLGDIDAGIMWRTEAIYWTFKYTVPQH

SEQ ID NO: 38336 - protein, 85 aa, unidentified
  REGION 1..85: note = Description of Unknown:cds_NC_025350.1_cds_YP_009094076.1_3 target sequence
EPTPSDAEISAWIEKGLATAKHFAPNPVSSQSSLGKSTIKKGNTKVLVSSAEQIASSQPAASHTVKVQAQVHPQQPTASQPCTGA

SEQ ID NO: 38337 - protein, 85 aa, unidentified
  REGION 1..85: note = Description of Unknown:cds_NC_025350.1_cds_YP_009094076.1_3 target sequence
RPKTKRTATPAPTPSVQQAVKIEPVYEDIVSNPTHQAENAPLIATQSSAKQSLLCTEPLPSQPSSATRCGEQSFKRGRFSSCSTG

SEQ ID NO: 38338 - protein, 84 aa, unidentified
  REGION 1..84: note = Description of Unknown:cds_NC_025350.1_cds_YP_009094076.1_3 target sequence
KRGRFSSCSTGKRSNSHPGHRREFDLVWGSGKFEVREWCNPTCSPITPIPRRYQCRCGECPRICKQCEGDYQVLESHGGQNDTN

SEQ ID NO: 38339 - protein, 85 aa, unidentified
  REGION 1..85: note = Description of Unknown:cds_NC_025350.1_cds_YP_009094076.1_3 target sequence
VSSQSSLGKSTIKKGNTKVLVSSAEQIASSQPAASHTVKVQAQVHPQQPTASQPCTGARPKTKRTATPAPTPSVQQAVKIEPVYE

SEQ ID NO: 38340 - protein, 85 aa, unidentified
  REGION 1..85: note = Description of Unknown:cds_NC_025350.1_cds_YP_009094076.1_3 target sequence
DIVSNPTHQAENAPLIATQSSAKQSLLCTEPLPSQPSSATRCGEQSFKRGRFSSCSTGKRSNSHPGHRREFDLVWGSGKFEVREW

SEQ ID NO: 38341 - protein, 85 aa, unidentified
  REGION 1..85: note = Description of Unknown:hvTR_P03255.4 target sequence
PGSPEPPHLSRQPEQPEQRALGPVSMPNLVPEVIDLTCHEAGFPPSDDEDEEGPVSEPEPEPEPEPEPARPTRRPKMAPAILRRP

SEQ ID NO: 38342 - protein, 85 aa, unidentified
  REGION 1..85: note = Description of Unknown:hvTR_P03255.4 target sequence
NLVPEVIDLTCHEAGFPPSDDEDEEGPVSEPEPEPEPEPEPARPTRRPKMAPAILRRPTSPVSRECNSSTDSCDSGPSNTPPEIH

SEQ ID NO: 38343 - protein, 85 aa, unidentified
  REGION 1..85: note = Description of Unknown:cds_NZ_WFIY01000004.1_cds_WP_155862922.1_774 target sequence
LQIQKPKLILDNGLRLDGRRPDELRPMKMEVGVLKNADGSAIVEVGNTKILAAVYGPREMHPRHLALPNRAVLRVRYHMTPFSTD

SEQ ID NO: 38344 - protein, 85 aa, unidentified
  REGION 1..85: note = Description of Unknown:cds_NZ_WFIY01000004.1_cds_WP_155862922.1_774 target sequence
ERKNPAPSRREIELSKVIREALEAQILVEQFPRTSIDVFMEVLQADAGTRLASLMAASLAVVDAGIPVRDLIAAVAVGKADGVVV

SEQ ID NO: 38345 - protein, 84 aa, unidentified
  REGION 1..84: note = Description of Unknown:cds_NZ_WFIY01000004.1_cds_WP_155862922.1_774 target sequence
AVAVGKADGVVVLDLNEPEDMWGEADMPVAMMPSIGQINLLQLNGNMTPEEFRQGMELAMKGINIIYNLEKETLKNKYAELKEE

SEQ ID NO: 38346 - protein, 85 aa, unidentified
  REGION 1..85: note = Description of Unknown:cds_NZ_WFIY01000004.1_cds_WP_155862922.1_774 target sequence
KMEVGVLKNADGSAIVEVGNTKILAAVYGPREMHPRHLALPNRAVLRVRYHMTPFSTDERKNPAPSRREIELSKVIREALEAQIL

SEQ ID NO: 38347 - protein, 85 aa, unidentified
  REGION 1..85: note = Description of Unknown:cds_NZ_WFIY01000004.1_cds_WP_155862922.1_774 target sequence
VEQFPRTSIDVFMEVLQADAGTRLASLMAASLAVVDAGIPVRDLIAAVAVGKADGVVVLDLNEPEDMWGEADMPVAMMPSIGQIN

SEQ ID NO: 38348 - protein, 85 aa, unidentified
  REGION 1..85: note = Description of Unknown:cds_NZ_WFIY01000004.1_cds_WP_155863128.1_1047 target sequence
LIDIHAHLNSDELKDKIDEILSKCSIKIINAGVDLDSDIETLELARKYKDIIYPAIGFHPEYIEKAEKEVDKILPLIDKAIAISE

SEQ ID NO: 38349 - protein, 85 aa, unidentified
  REGION 1..85: note = Description of Unknown:cds_NZ_WFIY01000004.1_cds_WP_155863128.1_1047 target sequence
VGLDYYWIKDEKLRKKEIEVLSAFLEIGEKSRKPVILHIRGGMNDFLQLVSSYKLTFIIHAFEGSIKIARKILDLGGYLSFPPII

SEQ ID NO: 38350 - protein, 84 aa, unidentified
  REGION 1..84: note = Description of Unknown:cds_NZ_WFIY01000004.1_cds_WP_155863128.1_1047 target sequence
DLGGYLSFPPIIVRDKLRRQIAKEVPIDRLFTETDSPFLGPEKGKMNEPCNVNITLDELSIIKGLSKDEIEKQIEKNFYRVFIQ

SEQ ID NO: 38351 - protein, 85 aa, unidentified
  REGION 1..85: note = Description of Unknown:cds_NZ_WFIY01000004.1_cds_WP_155863128.1_1047 target sequence
IINAGVDLDSDIETLELARKYKDIIYPAIGFHPEYIEKAEKEVDKILPLIDKAIAISEVGLDYYWIKDEKLRKKEIEVLSAFLEI

SEQ ID NO: 38352 - protein, 85 aa, unidentified
  REGION 1..85: note = Description of Unknown:cds_NZ_WFIY01000004.1_cds_WP_155863128.1_1047 target sequence
GEKSRKPVILHIRGGMNDFLQLVSSYKLTFIIHAFEGSIKIARKILDLGGYLSFPPIIVRDKLRRQIAKEVPIDRLFTETDSPFL

SEQ ID NO: 38353 - protein, 85 aa, unidentified
  REGION 1..85: note = Description of Unknown:cds_NZ_WFIY01000004.1_cds_WP_155863780.1_1661 target sequence
SEIFPGIFESDFYINEMIKLWDEGEKWAKWLDELAKKYNLERKVLDVPCGIGRVSYFLNKLGYEIVGVDISEKMIKMAKNNVPNG

SEQ ID NO: 38354 - protein, 85 aa, unidentified
  REGION 1..85: note = Description of Unknown:cds_NZ_WFIY01000004.1_cds_WP_155863780.1_1661 target sequence
RFYRADMRYLKDVLNGEKFDLVINIFNSLGYYSEEDDLEILKSIKEATNKIAVINLDNRDYIIYNKPEVYYTYVHPYLVEDHNYF

SEQ ID NO: 38355 - protein, 84 aa, unidentified
  REGION 1..84: note = Description of Unknown:cds_NZ_WFIY01000004.1_cds_WP_155863780.1_1661 target sequence
VHPYLVEDHNYFDPYTSRLKIRRTYMNQKGEIIGSIEYTQRFYSLHEIVNLVKKAGFKILDVVTAYSWKKFEVTDPQITIIAGI

SEQ ID NO: 38356 - protein, 85 aa, unidentified
  REGION 1..85: note = Description of Unknown:cds_NZ_WFIY01000004.1_cds_WP_155863780.1_1661 target sequence
AKWLDELAKKYNLERKVLDVPCGIGRVSYFLNKLGYEIVGVDISEKMIKMAKNNVPNGRFYRADMRYLKDVLNGEKFDLVINIFN

SEQ ID NO: 38357 - protein, 85 aa, unidentified
  REGION 1..85: note = Description of Unknown:cds_NZ_WFIY01000004.1_cds_WP_155863780.1_1661 target sequence
SLGYYSEEDDLEILKSIKEATNKIAVINLDNRDYIIYNKPEVYYTYVHPYLVEDHNYFDPYTSRLKIRRTYMNQKGEIIGSIEYT

SEQ ID NO: 38358 - protein, 85 aa, unidentified
  REGION 1..85: note = Description of Unknown:cds_NZ_WFIY01000004.1_cds_WP_155863908.1_1820 target sequence
TMEEIAVSVTNLRKSFGNKEILKGLTFRVPKNIIFGIIGPNGAGKTTTLRVLAGIIRHYQGEVNILGLPPTKAREKGYISYMPED

SEQ ID NO: 38359 - protein, 85 aa, unidentified
  REGION 1..85: note = Description of Unknown:cds_NZ_WFIY01000004.1_cds_WP_155863908.1_1820 target sequence
AFPYDRLTGLENLEFYAKIYAKNKDEFEEFLEKGIQIADLGDRIYDKTQEYSRGMKRRLMIARTLMVMPKVAILDEPTSALDVES

SEQ ID NO: 38360 - protein, 84 aa, unidentified
  REGION 1..84: note = Description of Unknown:cds_NZ_WFIY01000004.1_cds_WP_155863908.1_1820 target sequence
LDEPTSALDVESSVKIRKLIREMKGETTIILSSHNMLEVEYLCDEIVLLNHGEIIASGTPKEIVNKLGVKNLEEAFLVATGGKI

SEQ ID NO: 38361 - protein, 85 aa, unidentified
  REGION 1..85: note = Description of Unknown:cds_NZ_WFIY01000004.1_cds_WP_155863908.1_1820 target sequence
RVPKNIIFGIIGPNGAGKTTTLRVLAGIIRHYQGEVNILGLPPTKAREKGYISYMPEDAFPYDRLTGLENLEFYAKIYAKNKDEF

SEQ ID NO: 38362 - protein, 85 aa, unidentified
  REGION 1..85: note = Description of Unknown:cds_NZ_WFIY01000004.1_cds_WP_155863908.1_1820 target sequence
EEFLEKGIQIADLGDRIYDKTQEYSRGMKRRLMIARTLMVMPKVAILDEPTSALDVESSVKIRKLIREMKGETTIILSSHNMLEV

SEQ ID NO: 38363 - protein, 85 aa, unidentified
  REGION 1..85: note = Description of Unknown:cds_NZ_WFIY01000004.1_cds_WP_155864075.1_2014 target sequence
GDFFLLSIIAGVMVAIIVFLLHEAERVKSKLGFSLVIFGFVMMITMFLGASFYLLFPSKLSLAEAILINNFTMVAYILLVFPFIK

SEQ ID NO: 38364 - protein, 85 aa, unidentified
  REGION 1..85: note = Description of Unknown:cds_NZ_WFIY01000004.1_cds_WP_155864075.1_2014 target sequence
KFKVKFEMNSISSLSISLLAVANEILMSLTFNIACEVNNLFYFTFNGGWFFYPMMVEMLSIYLIHYIEGEFRKDLFPLIGITSFP

SEQ ID NO: 38365 - protein, 84 aa, unidentified
  REGION 1..84: note = Description of Unknown:cds_NZ_WFIY01000004.1_cds_WP_155864075.1_2014 target sequence
DLFPLIGITSFPPTLIDNIKWFYSSLAISLALSGLGVINSKGFIRWIYVILILSLLLLLFKVYIIYDVAITVSMITYYFSLLSQ

SEQ ID NO: 38366 - protein, 85 aa, unidentified
  REGION 1..85: note = Description of Unknown:cds_NZ_WFIY01000004.1_cds_WP_155864075.1_2014 target sequence
KSKLGFSLVIFGFVMMITMFLGASFYLLFPSKLSLAEAILINNFTMVAYILLVFPFIKKFKVKFEMNSISSLSISLLAVANEILM

SEQ ID NO: 38367 - protein, 85 aa, unidentified
  REGION 1..85: note = Description of Unknown:cds_NZ_WFIY01000004.1_cds_WP_155864075.1_2014 target sequence
SLTFNIACEVNNLFYFTFNGGWFFYPMMVEMLSIYLIHYIEGEFRKDLFPLIGITSFPPTLIDNIKWFYSSLAISLALSGLGVIN

SEQ ID NO: 38368 - protein, 85 aa, unidentified
  REGION 1..85: note = Description of Unknown:cds_NC_035460.1_cds_YP_009408085.1_134 target sequence
ANIVAIYCIVAATCCILIAYITFIFKDKIKKFCNKKQKRIRFNSIIYTATKTFSINSNTSSTVSSSESKDWTNDENPTIYANFRS

SEQ ID NO: 38369 - protein, 85 aa, unidentified
  REGION 1..85: note = Description of Unknown:cds_NC_035460.1_cds_YP_009408085.1_134 target sequence
SKRVKGFIASTNNEKIDEDKISISTSLSSWEEDDAIYVNTPYVKEIEYNEEHVYSLPPKEDIENEYSLPPKEDDIENEYSLPPKE

SEQ ID NO: 38370 - protein, 84 aa, unidentified
  REGION 1..84: note = Description of Unknown:cds_NC_035460.1_cds_YP_009408085.1_134 target sequence
DIENEYSLPPKEDIEDDYDIPYDSIKYELPPPTVNYEDFDTISLNTVDNETISINIETINNKCNESDYYDCCWVNTKELDEKFV

SEQ ID NO: 38371 - protein, 85 aa, unidentified
  REGION 1..85: note = Description of Unknown:cds_NC_035460.1_cds_YP_009408085.1_134 target sequence
KIKKFCNKKQKRIRFNSIIYTATKTFSINSNTSSTVSSSESKDWTNDENPTIYANFRSSKRVKGFIASTNNEKIDEDKISISTSL

SEQ ID NO: 38372 - protein, 85 aa, unidentified
  REGION 1..85: note = Description of Unknown:cds_NC_035460.1_cds_YP_009408085.1_134 target sequence
SSWEEDDAIYVNTPYVKEIEYNEEHVYSLPPKEDIENEYSLPPKEDDIENEYSLPPKEDIEDDYDIPYDSIKYELPPPTVNYEDF

SEQ ID NO: 38373 - protein, 85 aa, unidentified
  REGION 1..85: note = Description of Unknown:cds_NC_030656.1_cds_YP_009268805.1_90 target sequence
SSVKPRSVLSTISKTNRRLARTYNFSDDEQRLRVTGFVNNKMYNSKLVSVCAILSTLDGKYLACLRRNSFLYSEIRKSKSRKRNI

SEQ ID NO: 38374 - protein, 85 aa, unidentified
  REGION 1..85: note = Description of Unknown:cds_NC_030656.1_cds_YP_009268805.1_90 target sequence
NLLTKYSKFLRPGELKELKTLHSINKTFVDGNNKGNVIFPGGSPKRGENAVKCISRELKEETNIDSKHVSLDTRFFVYVNIDDLL

SEQ ID NO: 38375 - protein, 84 aa, unidentified
  REGION 1..84: note = Description of Unknown:cds_NC_030656.1_cds_YP_009268805.1_90 target sequence
RFFVYVNIDDLLTGKEYDAIFFLGTVNLTSDEIVDNFFSNDEVVTLLFLSPYGQGIACDIIRYALSIQQLDCWGTRGYKNSYLS

SEQ ID NO: 38376 - protein, 85 aa, unidentified
  REGION 1..85: note = Description of Unknown:cds_NC_030656.1_cds_YP_009268805.1_90 target sequence
DEQRLRVTGFVNNKMYNSKLVSVCAILSTLDGKYLACLRRNSFLYSEIRKSKSRKRNINLLTKYSKFLRPGELKELKTLHSINKT

SEQ ID NO: 38377 - protein, 85 aa, unidentified
  REGION 1..85: note = Description of Unknown:cds_NC_030656.1_cds_YP_009268805.1_90 target sequence
FVDGNNKGNVIFPGGSPKRGENAVKCISRELKEETNIDSKHVSLDTRFFVYVNIDDLLTGKEYDAIFFLGTVNLTSDEIVDNFFS

SEQ ID NO: 38378 - protein, 85 aa, unidentified
  REGION 1..85: note = Description of Unknown:hvTR_Q6TVC7 target sequence
SSWRLSMNKCSSGVQTLDSLRQRLKTEAMLCDEATEQYEVRDSLFPCDEVCLEIDGPRATEPSDDICQQVQLPVPPPEDVLSPPP

SEQ ID NO: 38379 - protein, 85 aa, unidentified
  REGION 1..85: note = Description of Unknown:hvTR_Q6TVC7 target sequence
APVKQPKRRTKKAAEKKPKAVEKLCEDDDRDNKNGEKEPTEEAQRNVSDVESSPKVEEELQNQDVASGGAAAGDDELDELGESDL

SEQ ID NO: 38380 - protein, 84 aa, unidentified
  REGION 1..84: note = Description of Unknown:hvTR_Q6TVC7 target sequence
GDDELDELGESDLDLAFAAILADFKHLTGRVKALSSVLTDVQASGVRRSFAGLSKALTEAAAIAAGGSKVPVAPRKKKAAAGKK

SEQ ID NO: 38381 - protein, 85 aa, unidentified
  REGION 1..85: note = Description of Unknown:hvTR_Q6TVC7 target sequence
AMLCDEATEQYEVRDSLFPCDEVCLEIDGPRATEPSDDICQQVQLPVPPPEDVLSPPPAPVKQPKRRTKKAAEKKPKAVEKLCED

SEQ ID NO: 38382 - protein, 85 aa, unidentified
  REGION 1..85: note = Description of Unknown:hvTR_Q6TVC7 target sequence
DDRDNKNGEKEPTEEAQRNVSDVESSPKVEEELQNQDVASGGAAAGDDELDELGESDLDLAFAAILADFKHLTGRVKALSSVLTD

SEQ ID NO: 38383 - protein, 85 aa, unidentified
  REGION 1..85: note = Description of Unknown:cds_NZ_WFIY01000004.1_cds_WP_155862316.1_40 target sequence
LSIVIPAYNEERRIGNTLSKLKSWYSSSEIIVVFDGNDNTPEVVKEYNVKLYVSKERLGKGASLRRGIEFSSYEKILLIDADLPV

SEQ ID NO: 38384 - protein, 85 aa, unidentified
  REGION 1..85: note = Description of Unknown:cds_NZ_WFIY01000004.1_cds_WP_155862316.1_40 target sequence
TREDLDKIITTDADLVITNRKIVGMPWKRRFLHKGFIVLTKLFFPSLRKFKDFQSGVKLINREKVLSVLDNLIINDFLFDINLIY

SEQ ID NO: 38385 - protein, 84 aa, unidentified
  REGION 1..84: note = Description of Unknown:cds_NZ_WFIY01000004.1_cds_WP_155862316.1_40 target sequence
IINDFLFDINLIYEFKRRGYSVKEVEITYIHDETDSKISSKLFKIIIFMFLSLLKLRVYYSPFKGILKTKAFLKAQDLILRILR

SEQ ID NO: 38386 - protein, 85 aa, unidentified
  REGION 1..85: note = Description of Unknown:cds_NZ_WFIY01000004.1_cds_WP_155862316.1_40 target sequence
SEIIVVFDGNDNTPEVVKEYNVKLYVSKERLGKGASLRRGIEFSSYEKILLIDADLPVTREDLDKIITTDADLVITNRKIVGMPW

SEQ ID NO: 38387 - protein, 85 aa, unidentified
  REGION 1..85: note = Description of Unknown:cds_NZ_WFIY01000004.1_cds_WP_155862316.1_40 target sequence
KRRFLHKGFIVLTKLFFPSLRKFKDFQSGVKLINREKVLSVLDNLIINDFLFDINLIYEFKRRGYSVKEVEITYIHDETDSKISS

SEQ ID NO: 38388 - protein, 85 aa, unidentified
  REGION 1..85: note = Description of Unknown:cds_NZ_WFIY01000004.1_cds_WP_155862925.1_777 target sequence
LAFGPAAMGYDRAITIFSPDGSLYQVDYAFEAVKKGWTTLGIKTKSAVVVLGEKKKASQLLDLDSIEKVFLLDDHVGCSFAGLAS

SEQ ID NO: 38389 - protein, 85 aa, unidentified
  REGION 1..85: note = Description of Unknown:cds_NZ_WFIY01000004.1_cds_WP_155862925.1_777 target sequence
DGRVLIDYARNSALQHRLIYDEPITVDYLTKLISDVKQMYTQHGGVRPFGVALIIGGVDNGVTKLFMTEPSGQFMPYQAVAIGQG

SEQ ID NO: 38390 - protein, 84 aa, unidentified
  REGION 1..84: note = Description of Unknown:cds_NZ_WFIY01000004.1_cds_WP_155862925.1_777 target sequence
FMPYQAVAIGQGGYTATEYLEKNYKEDLNVEDTILLALNALKSTLKPGEKLGPSNVEIGYAAADTGIFRKLTTEEKIQYLQKLG

SEQ ID NO: 38391 - protein, 85 aa, unidentified
  REGION 1..85: note = Description of Unknown:cds_NZ_WFIY01000004.1_cds_WP_155862925.1_777 target sequence
YAFEAVKKGWTTLGIKTKSAVVVLGEKKKASQLLDLDSIEKVFLLDDHVGCSFAGLASDGRVLIDYARNSALQHRLIYDEPITVD

SEQ ID NO: 38392 - protein, 85 aa, unidentified
  REGION 1..85: note = Description of Unknown:cds_NZ_WFIY01000004.1_cds_WP_155862925.1_777 target sequence
YLTKLISDVKQMYTQHGGVRPFGVALIIGGVDNGVTKLFMTEPSGQFMPYQAVAIGQGGYTATEYLEKNYKEDLNVEDTILLALN

SEQ ID NO: 38393 - protein, 85 aa, unidentified
  REGION 1..85: note = Description of Unknown:cds_NZ_WFIY01000004.1_cds_WP_155863023.1_905 target sequence
DSNPLEDTLARVSRFASILGISRAELRIYSTLLLEGQMTARQLAERLGISYTKIYSLLTKLEERGWIKRLGKKPAVYEAIPLRDL

SEQ ID NO: 38394 - protein, 85 aa, unidentified
  REGION 1..85: note = Description of Unknown:cds_NZ_WFIY01000004.1_cds_WP_155863023.1_905 target sequence
WASIKKMIEIKVDEFEKEFIEPLSSLLSPSSTYSITMIPSDKIKSTFYEILDEGNKVSIAISYPELLSEDIIQAIKAKSYTSPDL

SEQ ID NO: 38395 - protein, 84 aa, unidentified
  REGION 1..84: note = Description of Unknown:cds_NZ_WFIY01000004.1_cds_WP_155863023.1_905 target sequence
QAIKAKSYTSPDLRVIIQSDINIPEISGLQIRKLSNMFGSGLITSTAVLLIIKNADKLSGLFSNHKYIVDIATVYFNHLWTQAK

SEQ ID NO: 38396 - protein, 85 aa, unidentified
  REGION 1..85: note = Description of Unknown:cds_NZ_WFIY01000004.1_cds_WP_155863023.1_905 target sequence
IYSTLLLEGQMTARQLAERLGISYTKIYSLLTKLEERGWIKRLGKKPAVYEAIPLRDLWASIKKMIEIKVDEFEKEFIEPLSSLL

SEQ ID NO: 38397 - protein, 85 aa, unidentified
  REGION 1..85: note = Description of Unknown:cds_NZ_WFIY01000004.1_cds_WP_155863023.1_905 target sequence
SPSSTYSITMIPSDKIKSTFYEILDEGNKVSIAISYPELLSEDIIQAIKAKSYTSPDLRVIIQSDINIPEISGLQIRKLSNMFGS

SEQ ID NO: 38398 - protein, 85 aa, unidentified
  REGION 1..85: note = Description of Unknown:cds_NZ_WFIY01000004.1_cds_WP_155863378.1_1351 target sequence
NEVKVSNEELQRIYNDLPKFYDRANAMISFFQDVKWRAELIKTVKSYCNNPKRILDVASGKGELSYVISKLIKTDIVMVDYAENM

SEQ ID NO: 38399 - protein, 85 aa, unidentified
  REGION 1..85: note = Description of Unknown:cds_NZ_WFIY01000004.1_cds_WP_155863378.1_1351 target sequence
LKSSLIEGDKVLASFYNLPFRDNVFDAVVSSFALHAADDIGAVVKEMTRVSRKVVGVIAMGKSDNWLLRNYVAFYLRFIQPYLAA

SEQ ID NO: 38400 - protein, 84 aa, unidentified
  REGION 1..84: note = Description of Unknown:cds_NZ_WFIY01000004.1_cds_WP_155863378.1_1351 target sequence
AFYLRFIQPYLAALVGAKPLDYKYIYYIYRKIPTNSQLKSIISKIFDLKVFKVKALGSVYIFVGLKKREQGKEGEKSIKEEKIV

SEQ ID NO: 38401 - protein, 85 aa, unidentified
  REGION 1..85: note = Description of Unknown:cds_NZ_WFIY01000004.1_cds_WP_155863378.1_1351 target sequence
ISFFQDVKWRAELIKTVKSYCNNPKRILDVASGKGELSYVISKLIKTDIVMVDYAENMLKSSLIEGDKVLASFYNLPFRDNVFDA

SEQ ID NO: 38402 - protein, 85 aa, unidentified
  REGION 1..85: note = Description of Unknown:cds_NZ_WFIY01000004.1_cds_WP_155863378.1_1351 target sequence
VVSSFALHAADDIGAVVKEMTRVSRKVVGVIAMGKSDNWLLRNYVAFYLRFIQPYLAALVGAKPLDYKYIYYIYRKIPTNSQLKS

SEQ ID NO: 38403 - protein, 85 aa, unidentified
  REGION 1..85: note = Description of Unknown:cds_NC_035460.1_cds_YP_009407989.1_38 target sequence
ENITENEYSSYNNMATLQEIRDIVNKYISNKDIVEKLFNWATDKAEKYFIKNINNTKTNIEETKFDPKNNIGIEYSKDSKNKLSY

SEQ ID NO: 38404 - protein, 85 aa, unidentified
  REGION 1..85: note = Description of Unknown:cds_NC_035460.1_cds_YP_009407989.1_38 target sequence
RNKPLILTNVKYSDLCNMIRITSGVEKEILRYLLFGIKCIEAGADYNIDVLQDLDYEKYFNVLDVKYNIPCPACKSKNTTPMMIQ

SEQ ID NO: 38405 - protein, 84 aa, unidentified
  REGION 1..84: note = Description of Unknown:cds_NC_035460.1_cds_YP_009407989.1_38 target sequence
ACKSKNTTPMMIQTRAADEPPLVRHACRDCKKHFRPPKFRDFDYKTYKKEDTLDDAPSPPDSPTPPSPIEDLIISQNDDYNPPE

SEQ ID NO: 38406 - protein, 85 aa, unidentified
  REGION 1..85: note = Description of Unknown:cds_NC_035460.1_cds_YP_009407989.1_38 target sequence
ISNKDIVEKLFNWATDKAEKYFIKNINNTKTNIEETKFDPKNNIGIEYSKDSKNKLSYRNKPLILTNVKYSDLCNMIRITSGVEK

SEQ ID NO: 38407 - protein, 85 aa, unidentified
  REGION 1..85: note = Description of Unknown:cds_NC_035460.1_cds_YP_009407989.1_38 target sequence
EILRYLLFGIKCIEAGADYNIDVLQDLDYEKYFNVLDVKYNIPCPACKSKNTTPMMIQTRAADEPPLVRHACRDCKKHFRPPKFR

SEQ ID NO: 38408 - protein, 85 aa, unidentified
  REGION 1..85: note = Description of Unknown:cds_NC_029316.1_cds_YP_009230342.1_89 target sequence
DKDELKQIIQNLPDNSPKLLEYLKEAKEKGWKDIVDMIAVKLGLKEEGKKEKREKTEILKNILKPLGKKKIEHAWDYSVDFIEAK

SEQ ID NO: 38409 - protein, 85 aa, unidentified
  REGION 1..85: note = Description of Unknown:cds_NC_029316.1_cds_YP_009230342.1_89 target sequence
KVLTSAYKQLFDMNLMPYEAYVAILLIQLVNGARIGEAIRAFKTFVESGQREFQLQAEKHGNTRFFVIPDIIRTKITYRTMLTID

SEQ ID NO: 38410 - protein, 84 aa, unidentified
  REGION 1..84: note = Description of Unknown:cds_NC_029316.1_cds_YP_009230342.1_89 target sequence
RTKITYRTMLTIDDTLLEDRIRKFARKYLKTNTHSLRYALISYLAKNAVDPAIIAKITGHKKLDRIIQYTQTKDAIDILRKLSD

SEQ ID NO: 38411 - protein, 85 aa, unidentified
  REGION 1..85: note = Description of Unknown:cds_NC_029316.1_cds_YP_009230342.1_89 target sequence
EKGWKDIVDMIAVKLGLKEEGKKEKREKTEILKNILKPLGKKKIEHAWDYSVDFIEAKKVLTSAYKQLFDMNLMPYEAYVAILLI

SEQ ID NO: 38412 - protein, 85 aa, unidentified
  REGION 1..85: note = Description of Unknown:cds_NC_029316.1_cds_YP_009230342.1_89 target sequence
QLVNGARIGEAIRAFKTFVESGQREFQLQAEKHGNTRFFVIPDIIRTKITYRTMLTIDDTLLEDRIRKFARKYLKTNTHSLRYAL

SEQ ID NO: 38413 - protein, 85 aa, unidentified
  REGION 1..85: note = Description of Unknown:hvTR_P03421 target sequence
EKFAPEFHGEDANNRATKFLESIKGKFTSPKDPKKKDSIISVNSIDIEVTKESPITSNSTIINPTNETDDTAGNKPNYQRKPLVS

SEQ ID NO: 38414 - protein, 85 aa, unidentified
  REGION 1..85: note = Description of Unknown:hvTR_P03421 target sequence
FKEDPTPSDNPFSKLYKETIETFDNNEEESSYSYEEINDQTNDNITARLDRIDEKLSEILGMLHTLVVASAGPTSARDGIRDAMI

SEQ ID NO: 38415 - protein, 84 aa, unidentified
  REGION 1..84: note = Description of Unknown:hvTR_P03421 target sequence
GPTSARDGIRDAMIGLREEMIEKIRTEALMTNDRLEAMARLRNEESEKMAKDTSDEVSLNPTSEKLNNLLEGNDSDNDLSLEDF

SEQ ID NO: 38416 - protein, 85 aa, unidentified
  REGION 1..85: note = Description of Unknown:hvTR_P03421 target sequence
TSPKDPKKKDSIISVNSIDIEVTKESPITSNSTIINPTNETDDTAGNKPNYQRKPLVSFKEDPTPSDNPFSKLYKETIETFDNNE

SEQ ID NO: 38417 - protein, 85 aa, unidentified
  REGION 1..85: note = Description of Unknown:hvTR_P03421 target sequence
EESSYSYEEINDQTNDNITARLDRIDEKLSEILGMLHTLVVASAGPTSARDGIRDAMIGLREEMIEKIRTEALMTNDRLEAMARL

SEQ ID NO: 38418 - protein, 85 aa, unidentified
  REGION 1..85: note = Description of Unknown:cds_NC_024711.1_cds_YP_009052506.2_26 target sequence
AINKVTIVGIKGFKGSGKDTVASMISYILHDGIMKANYDTWLLYHKNGFVENDEIIIHFADKLKDDIAAFCNIDRKLLDRQDIKE

SEQ ID NO: 38419 - protein, 85 aa, unidentified
  REGION 1..85: note = Description of Unknown:cds_NC_024711.1_cds_YP_009052506.2_26 target sequence
ENYYNFKTGIVSTNIKDTDRVINNIGEINYDNLSTLLLLNTNVSIKIRTLLQYYGTNVIRNHFWHKAFINYTMNKAFDIRNSKGQ

SEQ ID NO: 38420 - protein, 84 aa, unidentified
  REGION 1..84: note = Description of Unknown:cds_NC_024711.1_cds_YP_009052506.2_26 target sequence
TMNKAFDIRNSKGQCIIADARFEDECMAIKYYGGKIIRVDRRVNNDNHESEQIKISQDDYVIDNTGTLVGLFYKVLKFVTDYMV

SEQ ID NO: 38421 - protein, 85 aa, unidentified
  REGION 1..85: note = Description of Unknown:cds_NC_024711.1_cds_YP_009052506.2_26 target sequence
ILHDGIMKANYDTWLLYHKNGFVENDEIIIHFADKLKDDIAAFCNIDRKLLDRQDIKEENYYNFKTGIVSTNIKDTDRVINNIGE

SEQ ID NO: 38422 - protein, 85 aa, unidentified
  REGION 1..85: note = Description of Unknown:cds_NC_024711.1_cds_YP_009052506.2_26 target sequence
INYDNLSTLLLLNTNVSIKIRTLLQYYGTNVIRNHFWHKAFINYTMNKAFDIRNSKGQCIIADARFEDECMAIKYYGGKIIRVDR

SEQ ID NO: 38423 - protein, 85 aa, unidentified
  REGION 1..85: note = Description of Unknown:cds_NZ_WFIY01000004.1_cds_WP_155862319.1_43 target sequence
NIIALFKIVPDDTLIKISGNSLDLNVPNKISTYDKNAIEEAIRIKEKHGGKAYGITAGITDRKTIREALAMGLDEVISIDMKEMD

SEQ ID NO: 38424 - protein, 85 aa, unidentified
  REGION 1..85: note = Description of Unknown:cds_NZ_WFIY01000004.1_cds_WP_155862319.1_43 target sequence
VMTTAEAIAEEVNQIKPNIILAGESTTDSSGGVLPSYLAAILNYPIVSYAKSISIEGDKVKVERNLTTLTEIVEAPMPAVISVVG

SEQ ID NO: 38425 - protein, 84 aa, unidentified
  REGION 1..84: note = Description of Unknown:cds_NZ_WFIY01000004.1_cds_WP_155862319.1_43 target sequence
IVEAPMPAVISVVGEINTPRIPTVRQILESAKKPVRSLTFNKTPKVKIVSISPYVIQRKKIIIEGKMEEAVDKLLSYLRGEGVL

SEQ ID NO: 38426 - protein, 85 aa, unidentified
  REGION 1..85: note = Description of Unknown:cds_NZ_WFIY01000004.1_cds_WP_155862319.1_43 target sequence
NKISTYDKNAIEEAIRIKEKHGGKAYGITAGITDRKTIREALAMGLDEVISIDMKEMDVMTTAEAIAEEVNQIKPNIILAGESTT

SEQ ID NO: 38427 - protein, 85 aa, unidentified
  REGION 1..85: note = Description of Unknown:cds_NZ_WFIY01000004.1_cds_WP_155862319.1_43 target sequence
DSSGGVLPSYLAAILNYPIVSYAKSISIEGDKVKVERNLTTLTEIVEAPMPAVISVVGEINTPRIPTVRQILESAKKPVRSLTFN

SEQ ID NO: 38428 - protein, 85 aa, unidentified
  REGION 1..85: note = Description of Unknown:cds_NZ_WFIY01000004.1_cds_WP_155862786.1_602 target sequence
DLGFPLNSSELVRKCIAILGIRGSGKSNTAKILGKELIKEGFPIVVIDPDGEYDFQDALRIEDFNLDPEFVVKDVLERKRSVIID

SEQ ID NO: 38429 - protein, 85 aa, unidentified
  REGION 1..85: note = Description of Unknown:cds_NZ_WFIY01000004.1_cds_WP_155862786.1_602 target sequence
MNEWSDEAFNFLFKFLDSFWNLSKVYRTNVFLVLEEAHEFIPQGERTKISEEITRFALRGRKRGIGMIMISQRSARVNKDVLTQS

SEQ ID NO: 38430 - protein, 84 aa, unidentified
  REGION 1..84: note = Description of Unknown:cds_NZ_WFIY01000004.1_cds_WP_155862786.1_602 target sequence
QRSARVNKDVLTQSEVYFLHKVVHPVDLKVYREILPLKTKEVADVVKSLDVGEALFYMNGRVEKVRIKKYEEDLADTQLAENLA

SEQ ID NO: 38431 - protein, 85 aa, unidentified
  REGION 1..85: note = Description of Unknown:cds_NZ_WFIY01000004.1_cds_WP_155862786.1_602 target sequence
NTAKILGKELIKEGFPIVVIDPDGEYDFQDALRIEDFNLDPEFVVKDVLERKRSVIIDMNEWSDEAFNFLFKFLDSFWNLSKVYR

SEQ ID NO: 38432 - protein, 85 aa, unidentified
  REGION 1..85: note = Description of Unknown:cds_NZ_WFIY01000004.1_cds_WP_155862786.1_602 target sequence
TNVFLVLEEAHEFIPQGERTKISEEITRFALRGRKRGIGMIMISQRSARVNKDVLTQSEVYFLHKVVHPVDLKVYREILPLKTKE

SEQ ID NO: 38433 - protein, 85 aa, unidentified
  REGION 1..85: note = Description of Unknown:cds_NZ_WFIY01000004.1_cds_WP_155863393.1_1369 target sequence
TILQKLAEKILEYSEGFKVIDYCACLRATYVIVEDKEERRFLGMSHIAHENLHNQGKIIAPNVDNLTELTSSINIINRSFGLSLI

SEQ ID NO: 38434 - protein, 85 aa, unidentified
  REGION 1..85: note = Description of Unknown:cds_NZ_WFIY01000004.1_cds_WP_155863393.1_1369 target sequence
NAISQKFIKPTQEFPEIRDPVCIVGNMKPLVKEFSNRKVYVFEKSTELRDDALSDAEEELLLQECKTVFITGVTLLNFTLERILE

SEQ ID NO: 38435 - protein, 84 aa, unidentified
  REGION 1..84: note = Description of Unknown:cds_NZ_WFIY01000004.1_cds_WP_155863393.1_1369 target sequence
GVTLLNFTLERILEISKGTNILIGPSASIIPDLMRDFNIHYIQSMIFNDVDKIRDHLRLGNFVSLKINKELGVNFSAKVNRSFA

SEQ ID NO: 38436 - protein, 85 aa, unidentified
  REGION 1..85: note = Description of Unknown:cds_NZ_WFIY01000004.1_cds_WP_155863393.1_1369 target sequence
ATYVIVEDKEERRFLGMSHIAHENLHNQGKIIAPNVDNLTELTSSINIINRSFGLSLINAISQKFIKPTQEFPEIRDPVCIVGNM

SEQ ID NO: 38437 - protein, 85 aa, unidentified
  REGION 1..85: note = Description of Unknown:cds_NZ_WFIY01000004.1_cds_WP_155863393.1_1369 target sequence
KPLVKEFSNRKVYVFEKSTELRDDALSDAEEELLLQECKTVFITGVTLLNFTLERILEISKGTNILIGPSASIIPDLMRDFNIHY

SEQ ID NO: 38438 - protein, 85 aa, unidentified
  REGION 1..85: note = Description of Unknown:cds_NZ_WFIY01000004.1_cds_WP_155863411.1_1392 target sequence
RKDLLIAVIISFALAIAILSLPDILEPIAKTILTYLGAYWVLALFIIGIIHGLKPDEHTWPITVSYGLMQRSVRKALLSTSVFAG

SEQ ID NO: 38439 - protein, 85 aa, unidentified
  REGION 1..85: note = Description of Unknown:cds_NZ_WFIY01000004.1_cds_WP_155863411.1_1392 target sequence
ALTLVWASLSALESEILPFFSSYNLDPYVDIIVGITMISVALFILNAGRKGKVESADYRVIWIHGLAAAFGGDFIVVLVLTALLI

SEQ ID NO: 38440 - protein, 84 aa, unidentified
  REGION 1..84: note = Description of Unknown:cds_NZ_WFIY01000004.1_cds_WP_155863411.1_1392 target sequence
GDFIVVLVLTALLISMIPANLGFMIGLLFGLGSFISQALVVVLVYKGVLKASRDFTIMERAGKYALFILGVFMIFLGVYSLVTS

SEQ ID NO: 38441 - protein, 85 aa, unidentified
  REGION 1..85: note = Description of Unknown:cds_NZ_WFIY01000004.1_cds_WP_155863411.1_1392 target sequence
IAKTILTYLGAYWVLALFIIGIIHGLKPDEHTWPITVSYGLMQRSVRKALLSTSVFAGALTLVWASLSALESEILPFFSSYNLDP

SEQ ID NO: 38442 - protein, 85 aa, unidentified
  REGION 1..85: note = Description of Unknown:cds_NZ_WFIY01000004.1_cds_WP_155863411.1_1392 target sequence
YVDIIVGITMISVALFILNAGRKGKVESADYRVIWIHGLAAAFGGDFIVVLVLTALLISMIPANLGFMIGLLFGLGSFISQALVV

SEQ ID NO: 38443 - protein, 85 aa, unidentified
  REGION 1..85: note = Description of Unknown:cds_NZ_WFIY01000004.1_cds_WP_155863883.1_1788 target sequence
IGKVYLVGAGPGDPDLITLKALKILKQADVVIYDRLVSKELLKECKPNSELIYLGKSLGEAELQDKINSTLVEKAKEGKIVVRLK

SEQ ID NO: 38444 - protein, 85 aa, unidentified
  REGION 1..85: note = Description of Unknown:cds_NZ_WFIY01000004.1_cds_WP_155863883.1_1788 target sequence
GGDPYVFGRGEEECAFVMEQGIPCEVIPGISSAIGVPAYAGIPVTSRWYSSGFTVITGTRAGDKIIDLDYIPKKGTIVILMGINK

SEQ ID NO: 38445 - protein, 84 aa, unidentified
  REGION 1..84: note = Description of Unknown:cds_NZ_WFIY01000004.1_cds_WP_155863883.1_1788 target sequence
PKKGTIVILMGINKIDELQESLEKVRSPECPVAIIQNGTLPSQRVVITSLSKLKEAVRKENISSPAIIIVGEVVKLRNKLWKLS

SEQ ID NO: 38446 - protein, 85 aa, unidentified
  REGION 1..85: note = Description of Unknown:cds_NZ_WFIY01000004.1_cds_WP_155863883.1_1788 target sequence
ADVVIYDRLVSKELLKECKPNSELIYLGKSLGEAELQDKINSTLVEKAKEGKIVVRLKGGDPYVFGRGEEECAFVMEQGIPCEVI

SEQ ID NO: 38447 - protein, 85 aa, unidentified
  REGION 1..85: note = Description of Unknown:cds_NZ_WFIY01000004.1_cds_WP_155863883.1_1788 target sequence
PGISSAIGVPAYAGIPVTSRWYSSGFTVITGTRAGDKIIDLDYIPKKGTIVILMGINKIDELQESLEKVRSPECPVAIIQNGTLP

SEQ ID NO: 38448 - protein, 85 aa, unidentified
  REGION 1..85: note = Description of Unknown:cds_NC_007409.1_cds_YP_319903.1_72 target sequence
DKDELKEIIKNLPDNSPKILEYLKLAKEKGWKDIVNMIAQKLGLEEEEKKKTDETDVLKKILKPLGKGKIKGTWDYSVDFVEAKK

SEQ ID NO: 38449 - protein, 85 aa, unidentified
  REGION 1..85: note = Description of Unknown:cds_NC_007409.1_cds_YP_319903.1_72 target sequence
TLVSAYKQLYDTNLMPYEAYVAILLIQLVNGCRIREAIRAFKTFIESGEREFQLQAQKHGNIRFMIIPDVVKKKATYNAVLTIDD

SEQ ID NO: 38450 - protein, 84 aa, unidentified
  REGION 1..84: note = Description of Unknown:cds_NC_007409.1_cds_YP_319903.1_72 target sequence
KKKATYNAVLTIDDEKLSARIRMFALHYLKANTHSLRYALISYLAKNGIDPAIIAKITGHKRLDRIITYTQTKDAIEMLRKLAD

SEQ ID NO: 38451 - protein, 85 aa, unidentified
  REGION 1..85: note = Description of Unknown:cds_NC_007409.1_cds_YP_319903.1_72 target sequence
EKGWKDIVNMIAQKLGLEEEEKKKTDETDVLKKILKPLGKGKIKGTWDYSVDFVEAKKTLVSAYKQLYDTNLMPYEAYVAILLIQ

SEQ ID NO: 38452 - protein, 85 aa, unidentified
  REGION 1..85: note = Description of Unknown:cds_NC_007409.1_cds_YP_319903.1_72 target sequence
LVNGCRIREAIRAFKTFIESGEREFQLQAQKHGNIRFMIIPDVVKKKATYNAVLTIDDEKLSARIRMFALHYLKANTHSLRYALI

SEQ ID NO: 38453 - protein, 85 aa, unidentified
  REGION 1..85: note = Description of Unknown:cds_NC_025348.1_cds_YP_009094063.1_3 target sequence
DPSPSDEEISAWIDKGMDTVQHFISQPVNPQSSLGKNTIKSGNTKILIKSAEKKSKATKDNVTQESAPTPPPRDYQSEKKEVVRP

SEQ ID NO: 38454 - protein, 85 aa, unidentified
  REGION 1..85: note = Description of Unknown:cds_NC_025348.1_cds_YP_009094063.1_3 target sequence
KIRKTQGERPRPLPPIPQQEESIYEEVSREVVEEDQPLLQQQQAHVLKGKQKILSTSPVNQEPDLPTGPGGQGFKRGSRSHISTT

SEQ ID NO: 38455 - protein, 84 aa, unidentified
  REGION 1..84: note = Description of Unknown:cds_NC_025348.1_cds_YP_009094063.1_3 target sequence
QGFKRGSRSHISTTGLVHLRPRHRREFDIRWYGNKPCVREWCNPGCSPIRPTPMRYTCTCGECPAVCSMCEGDPQILESAGEPI

SEQ ID NO: 38456 - protein, 85 aa, unidentified
  REGION 1..85: note = Description of Unknown:cds_NC_025348.1_cds_YP_009094063.1_3 target sequence
VNPQSSLGKNTIKSGNTKILIKSAEKKSKATKDNVTQESAPTPPPRDYQSEKKEVVRPKIRKTQGERPRPLPPIPQQEESIYEEV

SEQ ID NO: 38457 - protein, 85 aa, unidentified
  REGION 1..85: note = Description of Unknown:cds_NC_025348.1_cds_YP_009094063.1_3 target sequence
SREVVEEDQPLLQQQQAHVLKGKQKILSTSPVNQEPDLPTGPGGQGFKRGSRSHISTTGLVHLRPRHRREFDIRWYGNKPCVREW

SEQ ID NO: 38458 - protein, 85 aa, unidentified
  REGION 1..85: note = Description of Unknown:cds_NZ_WFIY01000004.1_cds_WP_155863536.1_1475 target sequence
LSKIVKLPITDREFIKSWFSDLNNIVNCIPSALKDGNSVLIEIPSIIINKKIKMKYYIRIDKNFCQLTLEGKEDKMKITVILDDE

SEQ ID NO: 38459 - protein, 85 aa, unidentified
  REGION 1..85: note = Description of Unknown:cds_NZ_WFIY01000004.1_cds_WP_155863536.1_1475 target sequence
PFAQIYYEGNNEANFYKIFDEIGRKLKEKIYFDYVNYKENFRNANLSEHLKRISFVTKLVAKSKLILEKEINTNDLISSLEELIA

SEQ ID NO: 38460 - protein, 84 aa, unidentified
  REGION 1..84: note = Description of Unknown:cds_NZ_WFIY01000004.1_cds_WP_155863536.1_1475 target sequence
INTNDLISSLEELIASCNNYPVLYISAYGDGIFRLIFVNGEFRGIYINYGGKESYVEEDLKNLKGKFKISVYATKLGDILPTEE

SEQ ID NO: 38461 - protein, 85 aa, unidentified
  REGION 1..85: note = Description of Unknown:cds_NZ_WFIY01000004.1_cds_WP_155863536.1_1475 target sequence
CIPSALKDGNSVLIEIPSIIINKKIKMKYYIRIDKNFCQLTLEGKEDKMKITVILDDEPFAQIYYEGNNEANFYKIFDEIGRKLK

SEQ ID NO: 38462 - protein, 85 aa, unidentified
  REGION 1..85: note = Description of Unknown:cds_NZ_WFIY01000004.1_cds_WP_155863536.1_1475 target sequence
EKIYFDYVNYKENFRNANLSEHLKRISFVTKLVAKSKLILEKEINTNDLISSLEELIASCNNYPVLYISAYGDGIFRLIFVNGEF

SEQ ID NO: 38463 - protein, 85 aa, unidentified
  REGION 1..85: note = Description of Unknown:cds_NZ_WFIY01000004.1_cds_WP_155863677.1_1546 target sequence
RKSDFILAFAWFYGYSNIRRAPIYILAYLSLPLSLLFFIYMISKGELLAYGILGGLISVIVSNSISLIGDFAFLRLQLRLQDLLV

SEQ ID NO: 38464 - protein, 85 aa, unidentified
  REGION 1..85: note = Description of Unknown:cds_NZ_WFIY01000004.1_cds_WP_155863677.1_1546 target sequence
ATEIGPMDYILGLTLGNFIFTLPGLLVYIIMGLIFHVFSALQLLAILGISGILLISTTSLSITLASLIKHTRHSWGLSTFLSLIF

SEQ ID NO: 38465 - protein, 84 aa, unidentified
  REGION 1..84: note = Description of Unknown:cds_NZ_WFIY01000004.1_cds_WP_155863677.1_1546 target sequence
TRHSWGLSTFLSLIFTILPPLYYPYSILPRDILYALMLSPSTPASMIIQGLLNLQKMNLLAVAVFILESIVFISLPRYAMKWRE

SEQ ID NO: 38466 - protein, 85 aa, unidentified
  REGION 1..85: note = Description of Unknown:cds_NZ_WFIY01000004.1_cds_WP_155863677.1_1546 target sequence
YLSLPLSLLFFIYMISKGELLAYGILGGLISVIVSNSISLIGDFAFLRLQLRLQDLLVATEIGPMDYILGLTLGNFIFTLPGLLV

SEQ ID NO: 38467 - protein, 85 aa, unidentified
  REGION 1..85: note = Description of Unknown:cds_NZ_WFIY01000004.1_cds_WP_155863677.1_1546 target sequence
YIIMGLIFHVFSALQLLAILGISGILLISTTSLSITLASLIKHTRHSWGLSTFLSLIFTILPPLYYPYSILPRDILYALMLSPST

SEQ ID NO: 38468 - protein, 85 aa, unidentified
  REGION 1..85: note = Description of Unknown:cds_NZ_WFIY01000004.1_cds_WP_155863744.1_1615 target sequence
ITISVEGLWKSYKDKEVLKGISFTVNDGEIFSLLGPNGAGKTTTIRILSCVSKPDRGKIEILDMKVPEDCEKIRRIIGIVPQDFQ

SEQ ID NO: 38469 - protein, 85 aa, unidentified
  REGION 1..85: note = Description of Unknown:cds_NZ_WFIY01000004.1_cds_WP_155863744.1_1615 target sequence
GFSDLTVKDNIEYFANIYGGDKSQINEVIEELDLEDYKNTRFKKLSGGLKRRVAIACALVGNPRIIYLDEPTVGLDPKARRNVWD

SEQ ID NO: 38470 - protein, 84 aa, unidentified
  REGION 1..84: note = Description of Unknown:cds_NZ_WFIY01000004.1_cds_WP_155863744.1_1615 target sequence
PTVGLDPKARRNVWDIMKKLKDKKLTILLTTHYLDEAQKLSDRIAIIYSGKILRLSTPEDLMKEFEKPTLEEAYLALLESIGEE

SEQ ID NO: 38471 - protein, 85 aa, unidentified
  REGION 1..85: note = Description of Unknown:cds_NZ_WFIY01000004.1_cds_WP_155863744.1_1615 target sequence
GEIFSLLGPNGAGKTTTIRILSCVSKPDRGKIEILDMKVPEDCEKIRRIIGIVPQDFQGFSDLTVKDNIEYFANIYGGDKSQINE

SEQ ID NO: 38472 - protein, 85 aa, unidentified
  REGION 1..85: note = Description of Unknown:cds_NZ_WFIY01000004.1_cds_WP_155863744.1_1615 target sequence
VIEELDLEDYKNTRFKKLSGGLKRRVAIACALVGNPRIIYLDEPTVGLDPKARRNVWDIMKKLKDKKLTILLTTHYLDEAQKLSD

SEQ ID NO: 38473 - protein, 85 aa, unidentified
  REGION 1..85: note = Description of Unknown:cds_NZ_WFIY01000004.1_cds_WP_155864476.1_2028 target sequence
EKYKFFDLPEFSTVKDILENERKNYVITLFGLCKILYAGRASSIATYSSRLITFKPDGSVLVHSNKKLKPVNWQPSSSEVKVEIG

SEQ ID NO: 38474 - protein, 85 aa, unidentified
  REGION 1..85: note = Description of Unknown:cds_NZ_WFIY01000004.1_cds_WP_155864476.1_2028 target sequence
DELNIYVERKRPKEVLEILMPIVYYLSLSKVDEGEFHLFGSESEMVEEVVKNPELISRDFIPLEREYQTPFGKIDLLGVTSTGYL

SEQ ID NO: 38475 - protein, 84 aa, unidentified
  REGION 1..84: note = Description of Unknown:cds_NZ_WFIY01000004.1_cds_WP_155864476.1_2028 target sequence
FGKIDLLGVTSTGYLILEFKRAQAGLEAVSQLKRYVDYLSWKGERVRGGIVAPSISKSALKLLKKYGLEYFQLSPKLLPTIRLK

SEQ ID NO: 38476 - protein, 85 aa, unidentified
  REGION 1..85: note = Description of Unknown:cds_NZ_WFIY01000004.1_cds_WP_155864476.1_2028 target sequence
TLFGLCKILYAGRASSIATYSSRLITFKPDGSVLVHSNKKLKPVNWQPSSSEVKVEIGDELNIYVERKRPKEVLEILMPIVYYLS

SEQ ID NO: 38477 - protein, 85 aa, unidentified
  REGION 1..85: note = Description of Unknown:cds_NZ_WFIY01000004.1_cds_WP_155864476.1_2028 target sequence
LSKVDEGEFHLFGSESEMVEEVVKNPELISRDFIPLEREYQTPFGKIDLLGVTSTGYLILEFKRAQAGLEAVSQLKRYVDYLSWK

SEQ ID NO: 38478 - protein, 85 aa, unidentified
  REGION 1..85: note = Description of Unknown:cds_NC_030656.1_cds_YP_009268849.1_134 target sequence
GIKQVILLLSLFSIGYSQFLSSDFIKSPLCTKAVRRRNFAVHVFVVKNKTEEYSPGCNVTLNKHRASVHGGGLKIKVTSNDCFKD

SEQ ID NO: 38479 - protein, 85 aa, unidentified
  REGION 1..85: note = Description of Unknown:cds_NC_030656.1_cds_YP_009268849.1_134 target sequence
FKNVSENIVNNTVSALFTTNRYPSLVYLHNSVSKFTSPSKLCNVRVTIICDSFVRPTIPPTNETEDDFNFTNTAPTNVKLSDMNW

SEQ ID NO: 38480 - protein, 84 aa, unidentified
  REGION 1..84: note = Description of Unknown:cds_NC_030656.1_cds_YP_009268849.1_134 target sequence
TNTAPTNVKLSDMNWRTSTESNIKTRLKVNTYGNCIESFYVSFSVFEFCKADEKTNGHMDVFGTRPTVTEYNMPQPNDKCSVVE

SEQ ID NO: 38481 - protein, 85 aa, unidentified
  REGION 1..85: note = Description of Unknown:cds_NC_030656.1_cds_YP_009268849.1_134 target sequence
PLCTKAVRRRNFAVHVFVVKNKTEEYSPGCNVTLNKHRASVHGGGLKIKVTSNDCFKDFKNVSENIVNNTVSALFTTNRYPSLVY

SEQ ID NO: 38482 - protein, 85 aa, unidentified
  REGION 1..85: note = Description of Unknown:cds_NC_030656.1_cds_YP_009268849.1_134 target sequence
LHNSVSKFTSPSKLCNVRVTIICDSFVRPTIPPTNETEDDFNFTNTAPTNVKLSDMNWRTSTESNIKTRLKVNTYGNCIESFYVS

SEQ ID NO: 38483 - protein, 85 aa, unidentified
  REGION 1..85: note = Description of Unknown:cds_NC_007409.1_cds_YP_319852.1_21 target sequence
GEGKGENKWGAAQMSNNPIRNKDFKVFGLVEKIYEQKGEFVKLFAEIKKKLYSMSIEQLLLMPSYARSKLKDEYGHIEFEYAGYG

SEQ ID NO: 38484 - protein, 85 aa, unidentified
  REGION 1..85: note = Description of Unknown:cds_NC_007409.1_cds_YP_319852.1_21 target sequence
DRIVIVKLEDPWTDDTNKRQGKTAFLVYFSYQTSKPLVPAQITYKIRSIFKTMKELNQKGYRVFPALFANSITPGALKILQNPKI

SEQ ID NO: 38485 - protein, 84 aa, unidentified
  REGION 1..84: note = Description of Unknown:cds_NC_007409.1_cds_YP_319852.1_21 target sequence
SITPGALKILQNPKINIRFFSDVNDLLNWIYSKVLNRLKKIVEIAKFTLKFDKIFTFLKTIIAGLGYEVPSDILMAWASKPVRP

SEQ ID NO: 38486 - protein, 85 aa, unidentified
  REGION 1..85: note = Description of Unknown:cds_NC_007409.1_cds_YP_319852.1_21 target sequence
GLVEKIYEQKGEFVKLFAEIKKKLYSMSIEQLLLMPSYARSKLKDEYGHIEFEYAGYGDRIVIVKLEDPWTDDTNKRQGKTAFLV

SEQ ID NO: 38487 - protein, 85 aa, unidentified
  REGION 1..85: note = Description of Unknown:cds_NC_007409.1_cds_YP_319852.1_21 target sequence
YFSYQTSKPLVPAQITYKIRSIFKTMKELNQKGYRVFPALFANSITPGALKILQNPKINIRFFSDVNDLLNWIYSKVLNRLKKIV

SEQ ID NO: 38488 - protein, 85 aa, unidentified
  REGION 1..85: note = Description of Unknown:cds_NZ_WFIY01000004.1_cds_WP_155862915.1_766 target sequence
QEYNIFYGTRAVIFDFDNTLVEFNYYSRKALEAVAKDMSDYFNDISFSPGYEKILSILISVSEKLDSEGVYDRTKWWEEALKELN

SEQ ID NO: 38489 - protein, 85 aa, unidentified
  REGION 1..85: note = Description of Unknown:cds_NZ_WFIY01000004.1_cds_WP_155862915.1_766 target sequence
LKVEKDQLYDWTSLYWSIASNNPVYDDTREIIEYLKSKGYKLGILTNDDGEGGNKLQRIKKVDISSYFDKIVIAGTNGVKPKPNI

SEQ ID NO: 38490 - protein, 84 aa, unidentified
  REGION 1..84: note = Description of Unknown:cds_NZ_WFIY01000004.1_cds_WP_155862915.1_766 target sequence
KIVIAGTNGVKPKPNIQPFVYICEQLNEKVENCTMIGDDPVKDCLAAKKAGLKSILIDRESKVKFAELYADYVIRSLRELEEFL

SEQ ID NO: 38491 - protein, 85 aa, unidentified
  REGION 1..85: note = Description of Unknown:cds_NZ_WFIY01000004.1_cds_WP_155862915.1_766 target sequence
RKALEAVAKDMSDYFNDISFSPGYEKILSILISVSEKLDSEGVYDRTKWWEEALKELNLKVEKDQLYDWTSLYWSIASNNPVYDD

SEQ ID NO: 38492 - protein, 85 aa, unidentified
  REGION 1..85: note = Description of Unknown:cds_NZ_WFIY01000004.1_cds_WP_155862915.1_766 target sequence
TREIIEYLKSKGYKLGILTNDDGEGGNKLQRIKKVDISSYFDKIVIAGTNGVKPKPNIQPFVYICEQLNEKVENCTMIGDDPVKD

SEQ ID NO: 38493 - protein, 85 aa, unidentified
  REGION 1..85: note = Description of Unknown:cds_NZ_WFIY01000004.1_cds_WP_155863457.1_1423 target sequence
VYMIGNTYCKLCQTDEEQLKRELVNSVKTLYWKGMVSNAGGNQSARLPGQNKIWITPSGYPRVSLEPQDLIAVDLDGNVIEGDLR

SEQ ID NO: 38494 - protein, 85 aa, unidentified
  REGION 1..85: note = Description of Unknown:cds_NZ_WFIY01000004.1_cds_WP_155863457.1_1423 target sequence
PSIETRMHLEIYKNRPDVNAVIHAHSPYTMGAAISGYLDITHGEAAAILGEIKIIPYSHPGTIELAKSVGEALRGEGAKVPRIVI

SEQ ID NO: 38495 - protein, 84 aa, unidentified
  REGION 1..84: note = Description of Unknown:cds_NZ_WFIY01000004.1_cds_WP_155863457.1_1423 target sequence
GEALRGEGAKVPRIVILMNHGIVSVGACIHEARAFAEIMEEWARFNIAARALGGIKYSLKPQDLRKPGARYIRAVKFGGRPGSY

SEQ ID NO: 38496 - protein, 85 aa, unidentified
  REGION 1..85: note = Description of Unknown:cds_NZ_WFIY01000004.1_cds_WP_155863457.1_1423 target sequence
KTLYWKGMVSNAGGNQSARLPGQNKIWITPSGYPRVSLEPQDLIAVDLDGNVIEGDLRPSIETRMHLEIYKNRPDVNAVIHAHSP

SEQ ID NO: 38497 - protein, 85 aa, unidentified
  REGION 1..85: note = Description of Unknown:cds_NZ_WFIY01000004.1_cds_WP_155863457.1_1423 target sequence
YTMGAAISGYLDITHGEAAAILGEIKIIPYSHPGTIELAKSVGEALRGEGAKVPRIVILMNHGIVSVGACIHEARAFAEIMEEWA

SEQ ID NO: 38498 - protein, 85 aa, unidentified
  REGION 1..85: note = Description of Unknown:cds_NZ_WFIY01000004.1_cds_WP_155863597.1_1505 target sequence
VIRLFYFILIFSITIISPLLVFSTSHTPGLFKGSFLVYNDTVFTYVNGKIIVNKIILIQKVICVFPNGSILLNNTIIAFNESSYF

SEQ ID NO: 38499 - protein, 85 aa, unidentified
  REGION 1..85: note = Description of Unknown:cds_NZ_WFIY01000004.1_cds_WP_155863597.1_1505 target sequence
CPSISIQNYSHPNGMFYICPYLLGKNISCNNLIFNGTTPSGLYIYYHCTHFFGAKNELILYFNSSGIAISGVDVQCKCRINESVA

SEQ ID NO: 38500 - protein, 84 aa, unidentified
  REGION 1..84: note = Description of Unknown:cds_NZ_WFIY01000004.1_cds_WP_155863597.1_1505 target sequence
GVDVQCKCRINESVAYYKLWKTNIITNESLPSFTGFTKARVLTYNLSCDLTREFHDISFTILSLGLSGILIILIFRPQTKLNDK

SEQ ID NO: 38501 - protein, 85 aa, unidentified
  REGION 1..85: note = Description of Unknown:cds_NZ_WFIY01000004.1_cds_WP_155863597.1_1505 target sequence
PGLFKGSFLVYNDTVFTYVNGKIIVNKIILIQKVICVFPNGSILLNNTIIAFNESSYFCPSISIQNYSHPNGMFYICPYLLGKNI

SEQ ID NO: 38502 - protein, 85 aa, unidentified
  REGION 1..85: note = Description of Unknown:cds_NZ_WFIY01000004.1_cds_WP_155863597.1_1505 target sequence
SCNNLIFNGTTPSGLYIYYHCTHFFGAKNELILYFNSSGIAISGVDVQCKCRINESVAYYKLWKTNIITNESLPSFTGFTKARVL

SEQ ID NO: 38503 - protein, 85 aa, unidentified
  REGION 1..85: note = Description of Unknown:cds_NZ_WFIY01000004.1_cds_WP_155863734.1_1603 target sequence
KIAIVQSSSVSSALVLTEKALLSGAKLVLLPEKWVKTIEELPLNEFQRLAIKYTAYIIPGAVEDGVSIISPIIDSNGNIKGLAKK

SEQ ID NO: 38504 - protein, 85 aa, unidentified
  REGION 1..85: note = Description of Unknown:cds_NZ_WFIY01000004.1_cds_WP_155863734.1_1603 target sequence
LHLFNKEREKLIPGTYSTIFSISGIKVGIAICYDLDFPEVIRKMVLKGAEIILVPSKISYNGIEIWREYLRVRSLENRVAIVNAN

SEQ ID NO: 38505 - protein, 84 aa, unidentified
  REGION 1..84: note = Description of Unknown:cds_NZ_WFIY01000004.1_cds_WP_155863734.1_1603 target sequence
LRVRSLENRVAIVNANVYSPPDYPGKSVIFVPYKRSDNIVDLLTLAELGEEENFAIADINPLSYFHIRLERIKEIKDFDVMELQ

SEQ ID NO: 38506 - protein, 85 aa, unidentified
  REGION 1..85: note = Description of Unknown:cds_NZ_WFIY01000004.1_cds_WP_155863734.1_1603 target sequence
VLLPEKWVKTIEELPLNEFQRLAIKYTAYIIPGAVEDGVSIISPIIDSNGNIKGLAKKLHLFNKEREKLIPGTYSTIFSISGIKV

SEQ ID NO: 38507 - protein, 85 aa, unidentified
  REGION 1..85: note = Description of Unknown:cds_NZ_WFIY01000004.1_cds_WP_155863734.1_1603 target sequence
GIAICYDLDFPEVIRKMVLKGAEIILVPSKISYNGIEIWREYLRVRSLENRVAIVNANVYSPPDYPGKSVIFVPYKRSDNIVDLL

SEQ ID NO: 38508 - protein, 85 aa, unidentified
  REGION 1..85: note = Description of Unknown:cds_NZ_WFIY01000004.1_cds_WP_155863758.1_1632 target sequence
RLKDKAILIVGVSKGLGYALAYFLLKEGAKVIVNSGNKEKLQEIVDSLKNLGEINYIAERVVDLSSAKDVLSKSYELIKRKLDGI

SEQ ID NO: 38509 - protein, 85 aa, unidentified
  REGION 1..85: note = Description of Unknown:cds_NZ_WFIY01000004.1_cds_WP_155863758.1_1632 target sequence
VISIGGYIEDNVENLTGLDEMINNHVKYPLYIISAALNYLNEGSTIVLVSAMRGIDKALPNQLSYSISKSATAKAVEVLASELLD

SEQ ID NO: 38510 - protein, 84 aa, unidentified
  REGION 1..84: note = Description of Unknown:cds_NZ_WFIY01000004.1_cds_WP_155863758.1_1632 target sequence
SATAKAVEVLASELLDKQIRVVGIAPSWIYGDFQPNRDWKKLRKLGDVKAPPEDFARVITWLLTDEAEWINGVVIPVDGGARLK

SEQ ID NO: 38511 - protein, 85 aa, unidentified
  REGION 1..85: note = Description of Unknown:cds_NZ_WFIY01000004.1_cds_WP_155863758.1_1632 target sequence
GAKVIVNSGNKEKLQEIVDSLKNLGEINYIAERVVDLSSAKDVLSKSYELIKRKLDGIVISIGGYIEDNVENLTGLDEMINNHVK

SEQ ID NO: 38512 - protein, 85 aa, unidentified
  REGION 1..85: note = Description of Unknown:cds_NZ_WFIY01000004.1_cds_WP_155863758.1_1632 target sequence
YPLYIISAALNYLNEGSTIVLVSAMRGIDKALPNQLSYSISKSATAKAVEVLASELLDKQIRVVGIAPSWIYGDFQPNRDWKKLR

SEQ ID NO: 38513 - protein, 85 aa, unidentified
  REGION 1..85: note = Description of Unknown:cds_NZ_WFIY01000001.1_cds_WP_155862272.1_2381 target sequence
IFTYGKTKLKVPEGYEYVYYATFIAAEWDFLKVKDMDTVLDAGAFIGDFTVKVARKAKEVVAVEPLPWAFKLLKENVEINNLKNV

SEQ ID NO: 38514 - protein, 85 aa, unidentified
  REGION 1..85: note = Description of Unknown:cds_NZ_WFIY01000001.1_cds_WP_155862272.1_2381 target sequence
VLVNKALYDVDGVKLKIVDEGTGSRIGESGVEVDSVSVNSLGKFSVVKMDIEGAEGRVMKSGEWLDYVKQIAVELHGRENIEIIP

SEQ ID NO: 38515 - protein, 84 aa, unidentified
  REGION 1..84: note = Description of Unknown:cds_NZ_WFIY01000001.1_cds_WP_155862272.1_2381 target sequence
QIAVELHGRENIEIIPHLLRERSFVIRFMTRGDLVRNTVRNALLHPISFIKAETRTKVVLKYFKRKYYVPALSGDEYKIVYGRR

SEQ ID NO: 38516 - protein, 85 aa, unidentified
  REGION 1..85: note = Description of Unknown:cds_NZ_WFIY01000001.1_cds_WP_155862272.1_2381 target sequence
WDFLKVKDMDTVLDAGAFIGDFTVKVARKAKEVVAVEPLPWAFKLLKENVEINNLKNVVLVNKALYDVDGVKLKIVDEGTGSRIG

SEQ ID NO: 38517 - protein, 85 aa, unidentified
  REGION 1..85: note = Description of Unknown:cds_NZ_WFIY01000001.1_cds_WP_155862272.1_2381 target sequence
ESGVEVDSVSVNSLGKFSVVKMDIEGAEGRVMKSGEWLDYVKQIAVELHGRENIEIIPHLLRERSFVIRFMTRGDLVRNTVRNAL

SEQ ID NO: 38518 - protein, 85 aa, unidentified
  REGION 1..85: note = Description of Unknown:cds_NC_010495.1_cds_YP_001742066.1_29 target sequence
AICANEKGVLVGRMTRLFLAEGCGDAVPKAEDWKYLGSTTSKGVDYSPQTTTSEADTAGGFVSTLVTSSDMTISAEVEIRKNDPS

SEQ ID NO: 38519 - protein, 85 aa, unidentified
  REGION 1..85: note = Description of Unknown:cds_NC_010495.1_cds_YP_001742066.1_29 target sequence
DEFGFHRLVEIYTTELKARRQPSLWVRQVTGATIVTAYCNITSISYEGGTNDIVTGSLEFKVYDSDSVTVESLEPLKFTTDLNST

SEQ ID NO: 38520 - protein, 84 aa, unidentified
  REGION 1..84: note = Description of Unknown:cds_NC_010495.1_cds_YP_001742066.1_29 target sequence
VESLEPLKFTTDLNSTAANTIDTLTVAVEGGVSPYTYVWRKDGAVLSGKSEATLASPKAGVYTVTVTDSSTDPEIIISKACTVS

SEQ ID NO: 38521 - protein, 85 aa, unidentified
  REGION 1..85: note = Description of Unknown:cds_NC_010495.1_cds_YP_001742066.1_29 target sequence
PKAEDWKYLGSTTSKGVDYSPQTTTSEADTAGGFVSTLVTSSDMTISAEVEIRKNDPSDEFGFHRLVEIYTTELKARRQPSLWVR

SEQ ID NO: 38522 - protein, 85 aa, unidentified
  REGION 1..85: note = Description of Unknown:cds_NC_010495.1_cds_YP_001742066.1_29 target sequence
QVTGATIVTAYCNITSISYEGGTNDIVTGSLEFKVYDSDSVTVESLEPLKFTTDLNSTAANTIDTLTVAVEGGVSPYTYVWRKDG

SEQ ID NO: 38523 - protein, 85 aa, unidentified
  REGION 1..85: note = Description of Unknown:vpeps_2X3M_1 target sequence
GMSAFDEFNEGFGLDVSDTPEELAFETESAIEEIESETSPGDQPKGSEPEEIRVWAEEKARKAVEEGREVTNWADWIMGWRTPNA

SEQ ID NO: 38524 - protein, 85 aa, unidentified
  REGION 1..85: note = Description of Unknown:vpeps_2X3M_1 target sequence
SEKKMEFMYWYTRTYLEEAKDIRPDIADALARGMAGLAFGRTDWVASMLDPQIMRHIYTDPEVARIYSETRDMLRRVSDYYISLT

SEQ ID NO: 38525 - protein, 85 aa, unidentified
  REGION 1..85: note = Description of Unknown:vpeps_2X3M_1 target sequence
TRDMLRRVSDYYISLTTMELGKVADIIAEAKAKGENPEVVAREIAEAVPRLSPKSLYFNLYYIGRSIGDNYVLEVARVLSKMRRR

SEQ ID NO: 38526 - protein, 85 aa, unidentified
  REGION 1..85: note = Description of Unknown:vpeps_2X3M_1 target sequence
ESAIEEIESETSPGDQPKGSEPEEIRVWAEEKARKAVEEGREVTNWADWIMGWRTPNASEKKMEFMYWYTRTYLEEAKDIRPDIA

SEQ ID NO: 38527 - protein, 85 aa, unidentified
  REGION 1..85: note = Description of Unknown:vpeps_2X3M_1 target sequence
DALARGMAGLAFGRTDWVASMLDPQIMRHIYTDPEVARIYSETRDMLRRVSDYYISLTTMELGKVADIIAEAKAKGENPEVVARE

SEQ ID NO: 38528 - protein, 85 aa, unidentified
  REGION 1..85: note = Description of Unknown:cds_NZ_WFIY01000004.1_cds_WP_155864357.1_145 target sequence
ASDYVIELIAKRIAGDIVWSSNIGLSMKKWREMFGISQSELARVLGISQTVIADYERGRRQPGSAFVKKFVQGLIEIDERRGFKV

SEQ ID NO: 38529 - protein, 85 aa, unidentified
  REGION 1..85: note = Description of Unknown:cds_NZ_WFIY01000004.1_cds_WP_155864357.1_145 target sequence
ISELSKSFTLNFPFIIDMRDFETPICFDELTIAVDGIPLNSTINLKKIYGYVVVDSLAAITTLSGMEFYQFLSLVFNRVIVFTKV

SEQ ID NO: 38530 - protein, 84 aa, unidentified
  REGION 1..84: note = Description of Unknown:cds_NZ_WFIY01000004.1_cds_WP_155864357.1_145 target sequence
YQFLSLVFNRVIVFTKVTSGRSPIIALKISPVKPDVIVLHRPLKMDPLSIDLADKEGINIIISTKRNEGELIKSLRTLVHSKSL

SEQ ID NO: 38531 - protein, 85 aa, unidentified
  REGION 1..85: note = Description of Unknown:cds_NZ_WFIY01000004.1_cds_WP_155864357.1_145 target sequence
KKWREMFGISQSELARVLGISQTVIADYERGRRQPGSAFVKKFVQGLIEIDERRGFKVISELSKSFTLNFPFIIDMRDFETPICF

SEQ ID NO: 38532 - protein, 85 aa, unidentified
  REGION 1..85: note = Description of Unknown:cds_NZ_WFIY01000004.1_cds_WP_155864357.1_145 target sequence
DELTIAVDGIPLNSTINLKKIYGYVVVDSLAAITTLSGMEFYQFLSLVFNRVIVFTKVTSGRSPIIALKISPVKPDVIVLHRPLK

SEQ ID NO: 38533 - protein, 85 aa, unidentified
  REGION 1..85: note = Description of Unknown:cds_NZ_WFIY01000004.1_cds_WP_155862847.1_680 target sequence
IDHVIKAIALSLDNGEKVYVGLNSIPAILGAFMARDFYGKTIRILGVAEADNPSEIKITPSTGNPFYVNDTPVLPTFESFDLAQK

SEQ ID NO: 38534 - protein, 85 aa, unidentified
  REGION 1..85: note = Description of Unknown:cds_NZ_WFIY01000004.1_cds_WP_155862847.1_680 target sequence
GKLDVMFLGPAQIDEETNVNLSVIGEYSKPKVRLPGGAATAYILPLVKKAILWNLKHSKSTLVKKVDFATGSAKFSKNRVIVVTN

SEQ ID NO: 38535 - protein, 84 aa, unidentified
  REGION 1..84: note = Description of Unknown:cds_NZ_WFIY01000004.1_cds_WP_155862847.1_680 target sequence
ATGSAKFSKNRVIVVTNLGVLEYSREDKKWYVKYVYPWSNFTKIAENTAFQVYNAIQGVIDVNEEEKNFITKLDPDDLRSSLEY

SEQ ID NO: 38536 - protein, 85 aa, unidentified
  REGION 1..85: note = Description of Unknown:cds_NZ_WFIY01000004.1_cds_WP_155862847.1_680 target sequence
ILGAFMARDFYGKTIRILGVAEADNPSEIKITPSTGNPFYVNDTPVLPTFESFDLAQKGKLDVMFLGPAQIDEETNVNLSVIGEY

SEQ ID NO: 38537 - protein, 85 aa, unidentified
  REGION 1..85: note = Description of Unknown:cds_NZ_WFIY01000004.1_cds_WP_155862847.1_680 target sequence
SKPKVRLPGGAATAYILPLVKKAILWNLKHSKSTLVKKVDFATGSAKFSKNRVIVVTNLGVLEYSREDKKWYVKYVYPWSNFTKI

SEQ ID NO: 38538 - protein, 85 aa, unidentified
  REGION 1..85: note = Description of Unknown:cds_NZ_WFIY01000004.1_cds_WP_152940192.1_748 target sequence
PHITRFEAPWFLKISKKEYKWTVRANPGPHPLSKSIPLSLILRDYLKVAATLSEAKKVISEGKVYVDGIIRKDYRFPVGLMDIIS

SEQ ID NO: 38539 - protein, 85 aa, unidentified
  REGION 1..85: note = Description of Unknown:cds_NZ_WFIY01000004.1_cds_WP_152940192.1_748 target sequence
IPSAGLYYVMFPDKSRYISPKQISEAEAKYKLVRIMNKTMVKGDKLQLNLEDGRNILVNKEDSSKYPTLSTLKIEIPSQNIISVY

SEQ ID NO: 38540 - protein, 84 aa, unidentified
  REGION 1..84: note = Description of Unknown:cds_NZ_WFIY01000004.1_cds_WP_152940192.1_748 target sequence
LSTLKIEIPSQNIISVYPLVENMYGIIIGGKNTGLHGKIVKIQRAQYKTRKYSIVTIQKDNESYETNLLNTMVIGEQNPEIKVE

SEQ ID NO: 38541 - protein, 85 aa, unidentified
  REGION 1..85: note = Description of Unknown:cds_NZ_WFIY01000004.1_cds_WP_152940192.1_748 target sequence
GPHPLSKSIPLSLILRDYLKVAATLSEAKKVISEGKVYVDGIIRKDYRFPVGLMDIISIPSAGLYYVMFPDKSRYISPKQISEAE

SEQ ID NO: 38542 - protein, 85 aa, unidentified
  REGION 1..85: note = Description of Unknown:cds_NZ_WFIY01000004.1_cds_WP_152940192.1_748 target sequence
AKYKLVRIMNKTMVKGDKLQLNLEDGRNILVNKEDSSKYPTLSTLKIEIPSQNIISVYPLVENMYGIIIGGKNTGLHGKIVKIQR

SEQ ID NO: 38543 - protein, 85 aa, unidentified
  REGION 1..85: note = Description of Unknown:cds_NZ_WFIY01000004.1_cds_WP_155862907.1_757 target sequence
LGKSLLQQRAGRGNINFRNPGWLRVGKVRYPKIEGNHVGKVIDILHNPGMLAPVAKVKLDTGDVFYMQAVQGMTVGQKIEIGSNV

SEQ ID NO: 38544 - protein, 85 aa, unidentified
  REGION 1..85: note = Description of Unknown:cds_NZ_WFIY01000004.1_cds_WP_155862907.1_757 target sequence
NPATGNIVEVGNLPEGAIICNVEEHYGDGGRYARAAGSYATVIGKSGDKVLIRLPSGKIKEVLSNARATVGMVAGGGVYDKPMLK

SEQ ID NO: 38545 - protein, 84 aa, unidentified
  REGION 1..84: note = Description of Unknown:cds_NZ_WFIY01000004.1_cds_WP_155862907.1_757 target sequence
VGMVAGGGVYDKPMLKAGNAYWKYKVKATKWPIVKGVAMNAVDHPHGGGLHTSVSRPSTVSRNAPPGRKVGHIAARRTGRKERK

SEQ ID NO: 38546 - protein, 85 aa, unidentified
  REGION 1..85: note = Description of Unknown:cds_NZ_WFIY01000004.1_cds_WP_155862907.1_757 target sequence
VRYPKIEGNHVGKVIDILHNPGMLAPVAKVKLDTGDVFYMQAVQGMTVGQKIEIGSNVNPATGNIVEVGNLPEGAIICNVEEHYG

SEQ ID NO: 38547 - protein, 85 aa, unidentified
  REGION 1..85: note = Description of Unknown:cds_NZ_WFIY01000004.1_cds_WP_155862907.1_757 target sequence
DGGRYARAAGSYATVIGKSGDKVLIRLPSGKIKEVLSNARATVGMVAGGGVYDKPMLKAGNAYWKYKVKATKWPIVKGVAMNAVD

SEQ ID NO: 38548 - protein, 85 aa, unidentified
  REGION 1..85: note = Description of Unknown:cds_NZ_WFIY01000004.1_cds_WP_155862943.1_801 target sequence
KVILKGITEDELKGSTFITGFRTIGETGYLASRYIVLKRKLQRIGFITTKYLRDVTFLDEYGIATPFDLFYDKELHTIVLLNHLL

SEQ ID NO: 38549 - protein, 85 aa, unidentified
  REGION 1..85: note = Description of Unknown:cds_NZ_WFIY01000004.1_cds_WP_155862943.1_801 target sequence
PFQREWNSFAKDTIMWLKKLEVKNIILIGGLDKRYKESSEELRWLKTSKSTINLPYPELEKQLIMVGPLALFTIYSEIEDLPAIV

SEQ ID NO: 38550 - protein, 84 aa, unidentified
  REGION 1..84: note = Description of Unknown:cds_NZ_WFIY01000004.1_cds_WP_155862943.1_801 target sequence
LALFTIYSEIEDLPAIVLLPYADRERIDPAAAAIAVDAINKILGTNIDVTELYEDAKKLEEELQKQLENIQKEISRSGLDRHYM

SEQ ID NO: 38551 - protein, 85 aa, unidentified
  REGION 1..85: note = Description of Unknown:cds_NZ_WFIY01000004.1_cds_WP_155862943.1_801 target sequence
GYLASRYIVLKRKLQRIGFITTKYLRDVTFLDEYGIATPFDLFYDKELHTIVLLNHLLPFQREWNSFAKDTIMWLKKLEVKNIIL

SEQ ID NO: 38552 - protein, 85 aa, unidentified
  REGION 1..85: note = Description of Unknown:cds_NZ_WFIY01000004.1_cds_WP_155862943.1_801 target sequence
IGGLDKRYKESSEELRWLKTSKSTINLPYPELEKQLIMVGPLALFTIYSEIEDLPAIVLLPYADRERIDPAAAAIAVDAINKILG

SEQ ID NO: 38553 - protein, 85 aa, unidentified
  REGION 1..85: note = Description of Unknown:cds_NC_035460.1_cds_YP_009407988.1_37 target sequence
EGVLTISYKNVVQQVKDYLNSLRGQKSTCFKISKFLGIDQNCVYMALDKLKNENIICYYYEDEDDVLYVYLPKFDKDKANEYEKL

SEQ ID NO: 38554 - protein, 85 aa, unidentified
  REGION 1..85: note = Description of Unknown:cds_NC_035460.1_cds_YP_009407988.1_37 target sequence
IIKEDHEDKTTDIGFINNDDDDDYSYDYGTYTYVNFTKESRLHKQCTSDLTKLFMDKVSHEQYNLWKNLNCYDTLDEYCKFTDRS

SEQ ID NO: 38555 - protein, 84 aa, unidentified
  REGION 1..84: note = Description of Unknown:cds_NC_035460.1_cds_YP_009407988.1_37 target sequence
LNCYDTLDEYCKFTDRSYLVSVFCDYYGGNNKNLYHARVIINYSDKLSDELNFIVCKTMFGDTKEEASKNAVQAVINFLFSMFC

SEQ ID NO: 38556 - protein, 85 aa, unidentified
  REGION 1..85: note = Description of Unknown:cds_NC_035460.1_cds_YP_009407988.1_37 target sequence
TCFKISKFLGIDQNCVYMALDKLKNENIICYYYEDEDDVLYVYLPKFDKDKANEYEKLIIKEDHEDKTTDIGFINNDDDDDYSYD

SEQ ID NO: 38557 - protein, 85 aa, unidentified
  REGION 1..85: note = Description of Unknown:cds_NC_035460.1_cds_YP_009407988.1_37 target sequence
YGTYTYVNFTKESRLHKQCTSDLTKLFMDKVSHEQYNLWKNLNCYDTLDEYCKFTDRSYLVSVFCDYYGGNNKNLYHARVIINYS

SEQ ID NO: 38558 - protein, 85 aa, unidentified
  REGION 1..85: note = Description of Unknown:cds_NC_009884.1_cds_YP_001496957.1_32 target sequence
TRVITFVGNVTLLSKVIVKNKLTDVYVDQSYLYKVSDNGVKLPSTNEKAIFFKQDDINIQNLVSEGDGEITKGVGEKVRFHFVDT

SEQ ID NO: 38559 - protein, 85 aa, unidentified
  REGION 1..85: note = Description of Unknown:cds_NC_009884.1_cds_YP_001496957.1_32 target sequence
GIPPFKTSPSLMYSDGSDNEIVEMINRRVRIAKLISLIVNEIDDDLMFIDSDITVNNIDALLYSMSNRTKIGTLCIPAIAKPYNF

SEQ ID NO: 38560 - protein, 84 aa, unidentified
  REGION 1..84: note = Description of Unknown:cds_NC_009884.1_cds_YP_001496957.1_32 target sequence
TKIGTLCIPAIAKPYNFVIMFCASTNFYLPREMRNDLLNVIQRYIASAKYVNTPVDIFINRELGSTPITWFGVCHHKYDKEWCI

SEQ ID NO: 38561 - protein, 85 aa, unidentified
  REGION 1..85: note = Description of Unknown:cds_NC_009884.1_cds_YP_001496957.1_32 target sequence
DQSYLYKVSDNGVKLPSTNEKAIFFKQDDINIQNLVSEGDGEITKGVGEKVRFHFVDTGIPPFKTSPSLMYSDGSDNEIVEMINR

SEQ ID NO: 38562 - protein, 85 aa, unidentified
  REGION 1..85: note = Description of Unknown:cds_NC_009884.1_cds_YP_001496957.1_32 target sequence
RVRIAKLISLIVNEIDDDLMFIDSDITVNNIDALLYSMSNRTKIGTLCIPAIAKPYNFVIMFCASTNFYLPREMRNDLLNVIQRY

SEQ ID NO: 38563 - protein, 85 aa, unidentified
  REGION 1..85: note = Description of Unknown:cds_NC_010495.1_cds_YP_001742069.1_32 target sequence
QNMSNRTPLTEIGEMRISLSDGSFFFKPSFRAMNEIGTPKEIVEVYAKLNGIDYVAPLQHVEYLPFGAQMQVMKTISKPVYGRHV

SEQ ID NO: 38564 - protein, 85 aa, unidentified
  REGION 1..85: note = Description of Unknown:cds_NC_010495.1_cds_YP_001742069.1_32 target sequence
LSAAYIVMQSCCEDDISVLIGGWKPTPRGVRYVPGIMPVSDIIIIARNLMQHGIIGKSPLKVPERLEEQGKKTTNEFHASQYIIS

SEQ ID NO: 38565 - protein, 84 aa, unidentified
  REGION 1..84: note = Description of Unknown:cds_NC_010495.1_cds_YP_001742069.1_32 target sequence
QGKKTTNEFHASQYIISARTHFDMTRDDAENLSMTEFQMMIKNKYPEPKGLTKEERAAEYDQAKADRERMKALAERKAKKARNT

SEQ ID NO: 38566 - protein, 85 aa, unidentified
  REGION 1..85: note = Description of Unknown:cds_NC_010495.1_cds_YP_001742069.1_32 target sequence
PSFRAMNEIGTPKEIVEVYAKLNGIDYVAPLQHVEYLPFGAQMQVMKTISKPVYGRHVLSAAYIVMQSCCEDDISVLIGGWKPTP

SEQ ID NO: 38567 - protein, 85 aa, unidentified
  REGION 1..85: note = Description of Unknown:cds_NC_010495.1_cds_YP_001742069.1_32 target sequence
RGVRYVPGIMPVSDIIIIARNLMQHGIIGKSPLKVPERLEEQGKKTTNEFHASQYIISARTHFDMTRDDAENLSMTEFQMMIKNK

SEQ ID NO: 38568 - protein, 85 aa, unidentified
  REGION 1..85: note = Description of Unknown:cds_NZ_WFIY01000004.1_cds_WP_155862509.1_269 target sequence
ISAEILMKYIGQKVKDPYGRDFGYIVHVYTEVDGSVTGIEVAQGNSFNTIDPSRIKIDGDNIVVLPDWKAEAIKTLTYMEKIRKR

SEQ ID NO: 38569 - protein, 85 aa, unidentified
  REGION 1..85: note = Description of Unknown:cds_NZ_WFIY01000004.1_cds_WP_155862509.1_269 target sequence
QRALEELYAKQEIPKSTYDDMKRKLDTEMVKIRDDYTKIKNKLKQRLNDVEDQLTQIDKAMIAVKMSYIAAEMSESSYKNSIEIL

SEQ ID NO: 38570 - protein, 84 aa, unidentified
  REGION 1..84: note = Description of Unknown:cds_NZ_WFIY01000004.1_cds_WP_155862509.1_269 target sequence
YIAAEMSESSYKNSIEILRQAKDSYTMEKDDIRKTLDKLDLLDKEGLDLKTPTPIGNTSDQSNKNDQNKSDIPMPIPVKVINTL

SEQ ID NO: 38571 - protein, 85 aa, unidentified
  REGION 1..85: note = Description of Unknown:cds_NZ_WFIY01000004.1_cds_WP_155862509.1_269 target sequence
VYTEVDGSVTGIEVAQGNSFNTIDPSRIKIDGDNIVVLPDWKAEAIKTLTYMEKIRKRQRALEELYAKQEIPKSTYDDMKRKLDT

SEQ ID NO: 38572 - protein, 85 aa, unidentified
  REGION 1..85: note = Description of Unknown:cds_NZ_WFIY01000004.1_cds_WP_155862509.1_269 target sequence
EMVKIRDDYTKIKNKLKQRLNDVEDQLTQIDKAMIAVKMSYIAAEMSESSYKNSIEILRQAKDSYTMEKDDIRKTLDKLDLLDKE

SEQ ID NO: 38573 - protein, 85 aa, unidentified
  REGION 1..85: note = Description of Unknown:cds_NZ_WFIY01000004.1_cds_WP_155862980.1_850 target sequence
IKVSKDKEIRNRLLAIDILRELKNSYTYRELSEIFGIQETLICRYVNGNTVPSDVQSMEIISKVKNKEFLLKFFRNKIKVLEDGY

SEQ ID NO: 38574 - protein, 85 aa, unidentified
  REGION 1..85: note = Description of Unknown:cds_NZ_WFIY01000004.1_cds_WP_155862980.1_850 target sequence
IDSSQLLLYPNLLKLLLELYLTKVLQQDAVDKIFSIATNGVPFATIASLILDKPLLIAKKHKDSINLEYYEESLKETDSVVNNIY

SEQ ID NO: 38575 - protein, 84 aa, unidentified
  REGION 1..84: note = Description of Unknown:cds_NZ_WFIY01000004.1_cds_WP_155862980.1_850 target sequence
EYYEESLKETDSVVNNIYLRKDLIRKNDRILIVDDVIKSGKTISSSIKLLQKAGARVVGILVLVGNLDNIKYLKDENIQVIFNI

SEQ ID NO: 38576 - protein, 85 aa, unidentified
  REGION 1..85: note = Description of Unknown:cds_NZ_WFIY01000004.1_cds_WP_155862980.1_850 target sequence
YRELSEIFGIQETLICRYVNGNTVPSDVQSMEIISKVKNKEFLLKFFRNKIKVLEDGYIDSSQLLLYPNLLKLLLELYLTKVLQQ

SEQ ID NO: 38577 - protein, 85 aa, unidentified
  REGION 1..85: note = Description of Unknown:cds_NZ_WFIY01000004.1_cds_WP_155862980.1_850 target sequence
DAVDKIFSIATNGVPFATIASLILDKPLLIAKKHKDSINLEYYEESLKETDSVVNNIYLRKDLIRKNDRILIVDDVIKSGKTISS

SEQ ID NO: 38578 - protein, 85 aa, unidentified
  REGION 1..85: note = Description of Unknown:cds_NZ_WFIY01000004.1_cds_WP_155863813.1_1703 target sequence
NIKVIISNVDAVGKTVKKLGYKFEEINEDVIDFKYNSGDAIVVICRHESSAKIPSLTVHHPGNIGNKTMGGEANKLGVAFPRLIT

SEQ ID NO: 38579 - protein, 85 aa, unidentified
  REGION 1..85: note = Description of Unknown:cds_NZ_WFIY01000004.1_cds_WP_155863813.1_1703 target sequence
SIYREISKIDVNIDKVFEATHHGPTYQTVPVIFAEVGSSEEFWNNEKLVKNLVDAVLRGIERLEETTCDNVILAFGGPHYAHNVS

SEQ ID NO: 38580 - protein, 84 aa, unidentified
  REGION 1..84: note = Description of Unknown:cds_NZ_WFIY01000004.1_cds_WP_155863813.1_1703 target sequence
CDNVILAFGGPHYAHNVSKLAMKSCISHIISKHNISELNSNIIQQALEKTINRIDTILFDSLNQKTREKILSLINSNNISIKSI

SEQ ID NO: 38581 - protein, 85 aa, unidentified
  REGION 1..85: note = Description of Unknown:cds_NZ_WFIY01000004.1_cds_WP_155863813.1_1703 target sequence
EDVIDFKYNSGDAIVVICRHESSAKIPSLTVHHPGNIGNKTMGGEANKLGVAFPRLITSIYREISKIDVNIDKVFEATHHGPTYQ

SEQ ID NO: 38582 - protein, 85 aa, unidentified
  REGION 1..85: note = Description of Unknown:cds_NZ_WFIY01000004.1_cds_WP_155863813.1_1703 target sequence
TVPVIFAEVGSSEEFWNNEKLVKNLVDAVLRGIERLEETTCDNVILAFGGPHYAHNVSKLAMKSCISHIISKHNISELNSNIIQQ

SEQ ID NO: 38583 - protein, 85 aa, unidentified
  REGION 1..85: note = Description of Unknown:cds_NZ_WFIY01000004.1_cds_WP_155864335.1_2347 target sequence
LTEFVNLIIMQIKMIKAYLPVFLFFSILFPIGFMLVFGYISIHSLTPYIVAGTITFYISVGVLTSVAQSLAFERNAGRFSLMVAT

SEQ ID NO: 38584 - protein, 85 aa, unidentified
  REGION 1..85: note = Description of Unknown:cds_NZ_WFIY01000004.1_cds_WP_155864335.1_2347 target sequence
GIPRELYAISIALSNGLATLIMIPIILILGEYLLHVEIKSIPYLIVALISSIFMGSMMGMTLGLGIKNMYAANQYSVIIGFVLSF

SEQ ID NO: 38585 - protein, 84 aa, unidentified
  REGION 1..84: note = Description of Unknown:cds_NZ_WFIY01000004.1_cds_WP_155864335.1_2347 target sequence
NMYAANQYSVIIGFVLSFFAPVYFPITFIPLPYRYITFLEPTTYVSQALYYSFAGNIESLLWSFGIIVFGFIFVILSRYVVKRQ

SEQ ID NO: 38586 - protein, 85 aa, unidentified
  REGION 1..85: note = Description of Unknown:cds_NZ_WFIY01000004.1_cds_WP_155864335.1_2347 target sequence
LFPIGFMLVFGYISIHSLTPYIVAGTITFYISVGVLTSVAQSLAFERNAGRFSLMVATGIPRELYAISIALSNGLATLIMIPIIL

SEQ ID NO: 38587 - protein, 85 aa, unidentified
  REGION 1..85: note = Description of Unknown:cds_NZ_WFIY01000004.1_cds_WP_155864335.1_2347 target sequence
ILGEYLLHVEIKSIPYLIVALISSIFMGSMMGMTLGLGIKNMYAANQYSVIIGFVLSFFAPVYFPITFIPLPYRYITFLEPTTYV

SEQ ID NO: 38588 - protein, 85 aa, unidentified
  REGION 1..85: note = Description of Unknown:cds_NC_035460.1_cds_YP_009408112.1_161 target sequence
NYKNSFTIFILLYTVNYCTATCEPFSFKYSYIVNDKKNNYKIGEQIVYGCKYIPRGDGFIPNDKLSLVGEDTYTCSELGWLPITS

SEQ ID NO: 38589 - protein, 85 aa, unidentified
  REGION 1..85: note = Description of Unknown:cds_NC_035460.1_cds_YP_009408112.1_161 target sequence
IPECKIIRCPFPAIQNGYIKTGMASNRRFYYKDEVTFKCNAFYILEGSDKSTCLLNKTWYPHVPKCIPTKPINDVIVGEVAEFAD

SEQ ID NO: 38590 - protein, 84 aa, unidentified
  REGION 1..84: note = Description of Unknown:cds_NC_035460.1_cds_YP_009408112.1_161 target sequence
PTKPINDVIVGEVAEFADLDYNTFEKKQEYFKKHPNATDEYHNNNKSIINVYYLLGCIGIIFILGCLFLCWACICINKQLYDKL

SEQ ID NO: 38591 - protein, 85 aa, unidentified
  REGION 1..85: note = Description of Unknown:cds_NC_035460.1_cds_YP_009408112.1_161 target sequence
KYSYIVNDKKNNYKIGEQIVYGCKYIPRGDGFIPNDKLSLVGEDTYTCSELGWLPITSIPECKIIRCPFPAIQNGYIKTGMASNR

SEQ ID NO: 38592 - protein, 85 aa, unidentified
  REGION 1..85: note = Description of Unknown:cds_NC_035460.1_cds_YP_009408112.1_161 target sequence
RFYYKDEVTFKCNAFYILEGSDKSTCLLNKTWYPHVPKCIPTKPINDVIVGEVAEFADLDYNTFEKKQEYFKKHPNATDEYHNNN

SEQ ID NO: 38593 - protein, 85 aa, unidentified
  REGION 1..85: note = Description of Unknown:cds_NZ_WFIY01000004.1_cds_WP_155862383.1_120 target sequence
PVHILANKGDVAERVLIVGDPGRAKLLSSLLQNPKLVNENRSFLVYTGKYNGVDISIATHGIGGPSAAIVLEELIMLGGRTFIRY

SEQ ID NO: 38594 - protein, 85 aa, unidentified
  REGION 1..85: note = Description of Unknown:cds_NZ_WFIY01000004.1_cds_WP_155862383.1_120 target sequence
GTTGALVPDINLGEYIIVAGASYNHGGVIYQYLREDSCIAATPDFYILNSLVQNFQKEGLKFHIGNVFSSDAFYAEDEEFVKRWS

SEQ ID NO: 38595 - protein, 84 aa, unidentified
  REGION 1..84: note = Description of Unknown:cds_NZ_WFIY01000004.1_cds_WP_155862383.1_120 target sequence
VFSSDAFYAEDEEFVKRWSSRGNIAVEMECATIFAIGRMKGVRTGAVLVVSDNLAKGGVWISKEELENSVMKGAKAILDTLSKL

SEQ ID NO: 38596 - protein, 85 aa, unidentified
  REGION 1..85: note = Description of Unknown:cds_NZ_WFIY01000004.1_cds_WP_155862383.1_120 target sequence
SSLLQNPKLVNENRSFLVYTGKYNGVDISIATHGIGGPSAAIVLEELIMLGGRTFIRYGTTGALVPDINLGEYIIVAGASYNHGG

SEQ ID NO: 38597 - protein, 85 aa, unidentified
  REGION 1..85: note = Description of Unknown:cds_NZ_WFIY01000004.1_cds_WP_155862383.1_120 target sequence
VIYQYLREDSCIAATPDFYILNSLVQNFQKEGLKFHIGNVFSSDAFYAEDEEFVKRWSSRGNIAVEMECATIFAIGRMKGVRTGA

SEQ ID NO: 38598 - protein, 85 aa, unidentified
  REGION 1..85: note = Description of Unknown:cds_NZ_WFIY01000004.1_cds_WP_155862736.1_543 target sequence
CRLLAFKDREKINGEVLKAFVNSARYDPFSPYKSHPDGWGFIIFIKKNGIWRSLYYRSPEPIFQDDLSTLTSIKGEEIMGIIHAR

SEQ ID NO: 38599 - protein, 85 aa, unidentified
  REGION 1..85: note = Description of Unknown:cds_NZ_WFIY01000004.1_cds_WP_155862736.1_543 target sequence
KAGKKFLQGLAHAHPYHIRAGVYDLYFAHNGSILRNTFENPSLPYTDSYMFLLKIAEGIGKSNDVKESFRFTFNSLKEYSTSLNS

SEQ ID NO: 38600 - protein, 84 aa, unidentified
  REGION 1..84: note = Description of Unknown:cds_NZ_WFIY01000004.1_cds_WP_155862736.1_543 target sequence
ESFRFTFNSLKEYSTSLNSALLSYSEGEGPLIQIGYYYNKKEALDASEEYFKLYTWRNYVFSSTIKYYLGNADNELVYGDIIYL

SEQ ID NO: 38601 - protein, 85 aa, unidentified
  REGION 1..85: note = Description of Unknown:cds_NZ_WFIY01000004.1_cds_WP_155862736.1_543 target sequence
PFSPYKSHPDGWGFIIFIKKNGIWRSLYYRSPEPIFQDDLSTLTSIKGEEIMGIIHARKAGKKFLQGLAHAHPYHIRAGVYDLYF

SEQ ID NO: 38602 - protein, 85 aa, unidentified
  REGION 1..85: note = Description of Unknown:cds_NZ_WFIY01000004.1_cds_WP_155862736.1_543 target sequence
AHNGSILRNTFENPSLPYTDSYMFLLKIAEGIGKSNDVKESFRFTFNSLKEYSTSLNSALLSYSEGEGPLIQIGYYYNKKEALDA

SEQ ID NO: 38603 - protein, 85 aa, unidentified
  REGION 1..85: note = Description of Unknown:cds_NZ_WFIY01000004.1_cds_WP_155863086.1_999 target sequence
SEEEYAELFTDEVRDALKDALKDMKNPVDVYVFIDSKDVNCNYCGLTKKLLEFISEAAPQNEGKSLLQVHIEDRGNGDPEVEKVF

SEQ ID NO: 38604 - protein, 85 aa, unidentified
  REGION 1..85: note = Description of Unknown:cds_NZ_WFIY01000004.1_cds_WP_155863086.1_999 target sequence
KEFKVERVPTVAFCKGYIRWTGAPVGEEIRALVETIVRLSQGESGLSQETIQAIKDKLNGEVKVEVVVTPSCPYCPYAALLSHMV

SEQ ID NO: 38605 - protein, 84 aa, unidentified
  REGION 1..84: note = Description of Unknown:cds_NZ_WFIY01000004.1_cds_WP_155863086.1_999 target sequence
VVTPSCPYCPYAALLSHMVAYEACKANKCNILSEVVEAYENQDIADKYQVMSVPTLAINESVEFIGVPNEENFVNTILEKQKVK

SEQ ID NO: 38606 - protein, 85 aa, unidentified
  REGION 1..85: note = Description of Unknown:cds_NZ_WFIY01000004.1_cds_WP_155863086.1_999 target sequence
VDVYVFIDSKDVNCNYCGLTKKLLEFISEAAPQNEGKSLLQVHIEDRGNGDPEVEKVFKEFKVERVPTVAFCKGYIRWTGAPVGE

SEQ ID NO: 38607 - protein, 85 aa, unidentified
  REGION 1..85: note = Description of Unknown:cds_NZ_WFIY01000004.1_cds_WP_155863086.1_999 target sequence
EIRALVETIVRLSQGESGLSQETIQAIKDKLNGEVKVEVVVTPSCPYCPYAALLSHMVAYEACKANKCNILSEVVEAYENQDIAD

SEQ ID NO: 38608 - protein, 85 aa, unidentified
  REGION 1..85: note = Description of Unknown:cds_NZ_WFIY01000004.1_cds_WP_155864168.1_2123 target sequence
IKVGTCGFTNKHFKYFNVLEVQQTFYDVVSETTLSRWRKMAEENGVELTLKALQVITHEYNTSTYKRMKKFQGNKENFGSFKETK

SEQ ID NO: 38609 - protein, 85 aa, unidentified
  REGION 1..85: note = Description of Unknown:cds_NZ_WFIY01000004.1_cds_WP_155864168.1_2123 target sequence
EVEEATEITLKEAKELNARIIVFQSPASFKPSEENVKRLIDYFSTLEKGFIYAWEPRGSWYDNESLLKEVLERTGVVHVVDPFRH

SEQ ID NO: 38610 - protein, 84 aa, unidentified
  REGION 1..84: note = Description of Unknown:cds_NZ_WFIY01000004.1_cds_WP_155864168.1_2123 target sequence
LKEVLERTGVVHVVDPFRHNSLTQMKYYRLHGIGKGEVNYSYKFTDEDLQKLKDIVKASSSTTYVLFNNIYSFDDALRFKKMLG

SEQ ID NO: 38611 - protein, 85 aa, unidentified
  REGION 1..85: note = Description of Unknown:cds_NZ_WFIY01000004.1_cds_WP_155864168.1_2123 target sequence
VVSETTLSRWRKMAEENGVELTLKALQVITHEYNTSTYKRMKKFQGNKENFGSFKETKEVEEATEITLKEAKELNARIIVFQSPA

SEQ ID NO: 38612 - protein, 85 aa, unidentified
  REGION 1..85: note = Description of Unknown:cds_NZ_WFIY01000004.1_cds_WP_155864168.1_2123 target sequence
SFKPSEENVKRLIDYFSTLEKGFIYAWEPRGSWYDNESLLKEVLERTGVVHVVDPFRHNSLTQMKYYRLHGIGKGEVNYSYKFTD

SEQ ID NO: 38613 - protein, 85 aa, unidentified
  REGION 1..85: note = Description of Unknown:cds_NC_003214.2_cds_NP_445729.1_64 target sequence
RKLRADVSKVKVLSEIPSGAKLLWESNELALYYTYNATQGEVDWILVNRTSDKKYVSLLRGAELIYNNNVVTVPSYVFGNAFADV

SEQ ID NO: 38614 - protein, 85 aa, unidentified
  REGION 1..85: note = Description of Unknown:cds_NC_003214.2_cds_NP_445729.1_64 target sequence
YFANGLSNYINDLNNIPLYSLAVLRDSSGKNIVGFVFSLPPNSMIEVPEYGFVNLQKIWGQLLEVYPGNLNLYVIIYDYNEIIEY

SEQ ID NO: 38615 - protein, 84 aa, unidentified
  REGION 1..84: note = Description of Unknown:cds_NC_003214.2_cds_NP_445729.1_64 target sequence
PGNLNLYVIIYDYNEIIEYEQESGVNVQSPPDPYAVFSYQFSISELGAIMTPRVIIEIPQSDVNFANTLIADFKKFVSSIKHML

SEQ ID NO: 38616 - protein, 85 aa, unidentified
  REGION 1..85: note = Description of Unknown:cds_NC_003214.2_cds_NP_445729.1_64 target sequence
ELALYYTYNATQGEVDWILVNRTSDKKYVSLLRGAELIYNNNVVTVPSYVFGNAFADVYFANGLSNYINDLNNIPLYSLAVLRDS

SEQ ID NO: 38617 - protein, 85 aa, unidentified
  REGION 1..85: note = Description of Unknown:cds_NC_003214.2_cds_NP_445729.1_64 target sequence
SGKNIVGFVFSLPPNSMIEVPEYGFVNLQKIWGQLLEVYPGNLNLYVIIYDYNEIIEYEQESGVNVQSPPDPYAVFSYQFSISEL

SEQ ID NO: 38618 - protein, 85 aa, unidentified
  REGION 1..85: note = Description of Unknown:cds_NC_030656.1_cds_YP_009268742.1_27 target sequence
KKHHYYSKNTITKMKTLKPSVIVLSDNDLYFSRNKFKLLACLKYCKNNFLKNVAQITISGHVSPKKLAISVSDHLKSGVLDFVLY

SEQ ID NO: 38619 - protein, 85 aa, unidentified
  REGION 1..85: note = Description of Unknown:cds_NC_030656.1_cds_YP_009268742.1_27 target sequence
SPKDVLTSTRDMFKLINNTNEKICVHSVVNNAKYTKNKCFLNEETKKKIKDLIKLLNIKSCSKSLIKSHINKNFNNISELINIVK

SEQ ID NO: 38620 - protein, 84 aa, unidentified
  REGION 1..84: note = Description of Unknown:cds_NC_030656.1_cds_YP_009268742.1_27 target sequence
KSHINKNFNNISELINIVKKHVLWTSVTVYKLSNPYTFCKYKKRKVKLTASTVYKKFVNKLIMLKKSESESINEICYDLEHIII

SEQ ID NO: 38621 - protein, 85 aa, unidentified
  REGION 1..85: note = Description of Unknown:cds_NC_030656.1_cds_YP_009268742.1_27 target sequence
DLYFSRNKFKLLACLKYCKNNFLKNVAQITISGHVSPKKLAISVSDHLKSGVLDFVLYSPKDVLTSTRDMFKLINNTNEKICVHS

SEQ ID NO: 38622 - protein, 85 aa, unidentified
  REGION 1..85: note = Description of Unknown:cds_NC_030656.1_cds_YP_009268742.1_27 target sequence
VVNNAKYTKNKCFLNEETKKKIKDLIKLLNIKSCSKSLIKSHINKNFNNISELINIVKKHVLWTSVTVYKLSNPYTFCKYKKRKV

SEQ ID NO: 38623 - protein, 85 aa, unidentified
  REGION 1..85: note = Description of Unknown:cds_NC_030656.1_cds_YP_009268852.1_137 target sequence
ESVIRNDYFYKETKYVFLNYLNTNLIILEVTGYVNISRLCSEYNKCFSVWKKINGKKTISKTAASLCLPKSALMFKVYKTSKTEL

SEQ ID NO: 38624 - protein, 85 aa, unidentified
  REGION 1..85: note = Description of Unknown:cds_NC_030656.1_cds_YP_009268852.1_137 target sequence
IHGVYMHKDLVGPFAEWISPTASKIVNHMLIEYYNSYALFWSLNTDEDYIYTAIKFKNKDSIKYEKYSEMLGDVFTEYEEKFNSC

SEQ ID NO: 38625 - protein, 84 aa, unidentified
  REGION 1..84: note = Description of Unknown:cds_NC_030656.1_cds_YP_009268852.1_137 target sequence
YSEMLGDVFTEYEEKFNSCREITCGICLESPYDHEKLSNQYFGVLSCCNHPFCRECITEWYKKGNKTCPMCRREFFKIFIKRFL

SEQ ID NO: 38626 - protein, 85 aa, unidentified
  REGION 1..85: note = Description of Unknown:cds_NC_030656.1_cds_YP_009268852.1_137 target sequence
LEVTGYVNISRLCSEYNKCFSVWKKINGKKTISKTAASLCLPKSALMFKVYKTSKTELIHGVYMHKDLVGPFAEWISPTASKIVN

SEQ ID NO: 38627 - protein, 85 aa, unidentified
  REGION 1..85: note = Description of Unknown:cds_NC_030656.1_cds_YP_009268852.1_137 target sequence
HMLIEYYNSYALFWSLNTDEDYIYTAIKFKNKDSIKYEKYSEMLGDVFTEYEEKFNSCREITCGICLESPYDHEKLSNQYFGVLS

SEQ ID NO: 38628 - protein, 85 aa, unidentified
  REGION 1..85: note = Description of Unknown:hvTR_P03259.2 target sequence
PVCEPIGGECMPQLHPEDMDLLCYEMGFPCSDSEDEQDENGMAHVSASAAAAAADREREEFQLDHPELPGHNCPVSDNEPEPNST

SEQ ID NO: 38629 - protein, 84 aa, unidentified
  REGION 1..84: note = Description of Unknown:hvTR_P03259.2 target sequence
PELPGHNCPVSDNEPEPNSTLDGDERPSPPKLGSAVPEGVIKPVPQRVTGRRRCAVESILDLIQEEEREQTVPVDLSVKRPRCN

SEQ ID NO: 38630 - protein, 85 aa, unidentified
  REGION 1..85: note = Description of Unknown:hvTR_P03259.2 target sequence
FPCSDSEDEQDENGMAHVSASAAAAAADREREEFQLDHPELPGHNCPVSDNEPEPNSTLDGDERPSPPKLGSAVPEGVIKPVPQR

SEQ ID NO: 38631 - protein, 85 aa, unidentified
  REGION 1..85: note = Description of Unknown:cds_NZ_WFIY01000004.1_cds_WP_155862684.1_481 target sequence
ETLIGEGKTKQVFSYDSDHVLLRFKDTITAGDGAKVDIMENKGVINAQTSALIFRLLERNGIRTHYVGMYDERTMIAKKLKMIPV

SEQ ID NO: 38632 - protein, 85 aa, unidentified
  REGION 1..85: note = Description of Unknown:cds_NZ_WFIY01000004.1_cds_WP_155862684.1_481 target sequence
EVVLRNIATGSIVKRLPIKEGEIFDPPIIEYFLKDDSMHDPMLNYYHLEYFKLMNRKEAEVVESVMMRVNEVLRDVIRKMGFELY

SEQ ID NO: 38633 - protein, 84 aa, unidentified
  REGION 1..84: note = Description of Unknown:cds_NZ_WFIY01000004.1_cds_WP_155862684.1_481 target sequence
MMRVNEVLRDVIRKMGFELYDFKLEFGRLGNELIIGDEITLDSMRVRDPKTGRILDKDLYRKGYDLKTVKEAYEEFLSKLEKVV

SEQ ID NO: 38634 - protein, 85 aa, unidentified
  REGION 1..85: note = Description of Unknown:cds_NZ_WFIY01000004.1_cds_WP_155862684.1_481 target sequence
ITAGDGAKVDIMENKGVINAQTSALIFRLLERNGIRTHYVGMYDERTMIAKKLKMIPVEVVLRNIATGSIVKRLPIKEGEIFDPP

SEQ ID NO: 38635 - protein, 85 aa, unidentified
  REGION 1..85: note = Description of Unknown:cds_NZ_WFIY01000004.1_cds_WP_155862684.1_481 target sequence
IIEYFLKDDSMHDPMLNYYHLEYFKLMNRKEAEVVESVMMRVNEVLRDVIRKMGFELYDFKLEFGRLGNELIIGDEITLDSMRVR

SEQ ID NO: 38636 - protein, 85 aa, unidentified
  REGION 1..85: note = Description of Unknown:cds_NZ_WFIY01000004.1_cds_WP_155862730.1_537 target sequence
ENVQVNKRVTIVIPTFNERDNIIRLLPLLNKVIRASIIIVDDNSQDGTAEAIRSLNSPNIQVIVRKKERGLGSAIRTGIQKAIEN

SEQ ID NO: 38637 - protein, 85 aa, unidentified
  REGION 1..85: note = Description of Unknown:cds_NZ_WFIY01000004.1_cds_WP_155862730.1_537 target sequence
GTDYVVTMDADLSHDPIYLPAMYEKAREGFDLVIGSRYIKGGGIENWPIKRRIISWGANFLVRLLLRSPLHDNTSNYRIYSTRAA

SEQ ID NO: 38638 - protein, 84 aa, unidentified
  REGION 1..84: note = Description of Unknown:cds_NZ_WFIY01000004.1_cds_WP_155862730.1_537 target sequence
LRSPLHDNTSNYRIYSTRAAKEVLKCESADGYEFQICAVYRVLKANLPVAEVPIIFKDREIGKSKLTTGQIYKWFKYVISLSRS

SEQ ID NO: 38639 - protein, 85 aa, unidentified
  REGION 1..85: note = Description of Unknown:cds_NZ_WFIY01000004.1_cds_WP_155862730.1_537 target sequence
LLNKVIRASIIIVDDNSQDGTAEAIRSLNSPNIQVIVRKKERGLGSAIRTGIQKAIENGTDYVVTMDADLSHDPIYLPAMYEKAR

SEQ ID NO: 38640 - protein, 85 aa, unidentified
  REGION 1..85: note = Description of Unknown:cds_NZ_WFIY01000004.1_cds_WP_155862730.1_537 target sequence
EGFDLVIGSRYIKGGGIENWPIKRRIISWGANFLVRLLLRSPLHDNTSNYRIYSTRAAKEVLKCESADGYEFQICAVYRVLKANL

SEQ ID NO: 38641 - protein, 85 aa, unidentified
  REGION 1..85: note = Description of Unknown:cds_NZ_WFIY01000004.1_cds_638 target sequence
SVINERGVSSTIIRLASSNKCAFNLKISAIDGSLHEINSDEGTISFVIAGAVNFTLNQGRLNYLNSIIETRICNSKGEEIMRELE

SEQ ID NO: 38642 - protein, 85 aa, unidentified
  REGION 1..85: note = Description of Unknown:cds_NZ_WFIY01000004.1_cds_638 target sequence
YKLANEINADIIFMDRKFSMDKKLGMQIPKNSIGIVKDFNREEVNINEEPPWITINKEEDFYTGYYKITSWIFRYETNLDNLELL

SEQ ID NO: 38643 - protein, 84 aa, unidentified
  REGION 1..84: note = Description of Unknown:cds_NZ_WFIY01000004.1_cds_638 target sequence
KITSWIFRYETNLDNLELLQCLIYNLSQEPIPEALGYNYPLFLADKLVKYYRDKYAKVLDFTSNKELSRYRDFRRIVEHVRRFV

SEQ ID NO: 38644 - protein, 85 aa, unidentified
  REGION 1..85: note = Description of Unknown:cds_NZ_WFIY01000004.1_cds_638 target sequence
SAIDGSLHEINSDEGTISFVIAGAVNFTLNQGRLNYLNSIIETRICNSKGEEIMRELEYKLANEINADIIFMDRKFSMDKKLGMQ

SEQ ID NO: 38645 - protein, 85 aa, unidentified
  REGION 1..85: note = Description of Unknown:cds_NZ_WFIY01000004.1_cds_638 target sequence
IPKNSIGIVKDFNREEVNINEEPPWITINKEEDFYTGYYKITSWIFRYETNLDNLELLQCLIYNLSQEPIPEALGYNYPLFLADK

SEQ ID NO: 38646 - protein, 85 aa, unidentified
  REGION 1..85: note = Description of Unknown:cds_NZ_WFIY01000004.1_cds_WP_155862995.1_872 target sequence
TYITKAGKEYICVMETHEKVDLSIVKKIAEEFKGTIYQRPPVRSSVKRRLRTRKVFDIEVLEGKDDKLFLLRISSEPGTYMRKIC

SEQ ID NO: 38647 - protein, 85 aa, unidentified
  REGION 1..85: note = Description of Unknown:cds_NZ_WFIY01000004.1_cds_WP_155862995.1_872 target sequence
HDMGIILGIGAHMRELRRIRSGIFTESGLVTLQEVSEALYMWKNCKDETDLRKILLPMEIGLCGIPKIILDDNAVNAIAYGATAN

SEQ ID NO: 38648 - protein, 84 aa, unidentified
  REGION 1..84: note = Description of Unknown:cds_NZ_WFIY01000004.1_cds_WP_155862995.1_872 target sequence
PKIILDDNAVNAIAYGATANAPGIVAYQNFKKGDLVGLITLKGEGVAIGRALVDSDNIQQMKKGEVIKPNRILIKRDVYPRAWK

SEQ ID NO: 38649 - protein, 85 aa, unidentified
  REGION 1..85: note = Description of Unknown:cds_NZ_WFIY01000004.1_cds_WP_155862995.1_872 target sequence
IAEEFKGTIYQRPPVRSSVKRRLRTRKVFDIEVLEGKDDKLFLLRISSEPGTYMRKICHDMGIILGIGAHMRELRRIRSGIFTES

SEQ ID NO: 38650 - protein, 85 aa, unidentified
  REGION 1..85: note = Description of Unknown:cds_NZ_WFIY01000004.1_cds_WP_155862995.1_872 target sequence
GLVTLQEVSEALYMWKNCKDETDLRKILLPMEIGLCGIPKIILDDNAVNAIAYGATANAPGIVAYQNFKKGDLVGLITLKGEGVA

SEQ ID NO: 38651 - protein, 85 aa, unidentified
  REGION 1..85: note = Description of Unknown:cds_NZ_WFIY01000004.1_cds_WP_155863002.1_880 target sequence
KILLIEFIGYKEWTESLGYDREWKIQDIQSSIYKIVNDEISRVGGFALPVRYDGLIILADGIPNKHLLEIYTKVKEISPTKISAC

SEQ ID NO: 38652 - protein, 85 aa, unidentified
  REGION 1..85: note = Description of Unknown:cds_NZ_WFIY01000004.1_cds_WP_155863002.1_880 target sequence
IGFGKTPREAEINAHNCILNSLSDEPKFSIIHDENVVACHFDYNNFTSLTHELSFYAAYMRVMRLYSKLSDSIYDFGGISQYLGG

SEQ ID NO: 38653 - protein, 84 aa, unidentified
  REGION 1..84: note = Description of Unknown:cds_NZ_WFIY01000004.1_cds_WP_155863002.1_880 target sequence
YSKLSDSIYDFGGISQYLGGDNMIAFIDEDTIDKIIKIVENMDEIKVGIGIGKNARSAMAGATRALDEIRSKREDRWKIVKFSM

SEQ ID NO: 38654 - protein, 85 aa, unidentified
  REGION 1..85: note = Description of Unknown:cds_NZ_WFIY01000004.1_cds_WP_155863002.1_880 target sequence
IQSSIYKIVNDEISRVGGFALPVRYDGLIILADGIPNKHLLEIYTKVKEISPTKISACIGFGKTPREAEINAHNCILNSLSDEPK

SEQ ID NO: 38655 - protein, 85 aa, unidentified
  REGION 1..85: note = Description of Unknown:cds_NZ_WFIY01000004.1_cds_WP_155863002.1_880 target sequence
FSIIHDENVVACHFDYNNFTSLTHELSFYAAYMRVMRLYSKLSDSIYDFGGISQYLGGDNMIAFIDEDTIDKIIKIVENMDEIKV

SEQ ID NO: 38656 - protein, 85 aa, unidentified
  REGION 1..85: note = Description of Unknown:cds_NZ_WFIY01000004.1_cds_WP_155863119.1_1038 target sequence
LSQRFKLIKSFNIESFENINEKNFTELENLSIKILLFNYLTFISSLIYLRLSIQLITIALLASMLSLIYLLVKRKVNFTQNINLL

SEQ ID NO: 38657 - protein, 85 aa, unidentified
  REGION 1..85: note = Description of Unknown:cds_NZ_WFIY01000004.1_cds_WP_155863119.1_1038 target sequence
SLTAVAPLLLPMPIEVRISTSLAIFSMLNWNFNKEDIYHQFLKKKREKILEMKRKLLQGSKTYRVTIKRLNKLEKKFYGLYQKLQ

SEQ ID NO: 38658 - protein, 84 aa, unidentified
  REGION 1..84: note = Description of Unknown:cds_NZ_WFIY01000004.1_cds_WP_155863119.1_1038 target sequence
IKRLNKLEKKFYGLYQKLQVFYIVLYFLPLLTLPFIKYETIAYEEGILTILILSSIISLLLRNSLFDFKNILYISLISVLIWFI

SEQ ID NO: 38659 - protein, 85 aa, unidentified
  REGION 1..85: note = Description of Unknown:cds_NZ_WFIY01000004.1_cds_WP_155863119.1_1038 target sequence
ENLSIKILLFNYLTFISSLIYLRLSIQLITIALLASMLSLIYLLVKRKVNFTQNINLLSLTAVAPLLLPMPIEVRISTSLAIFSM

SEQ ID NO: 38660 - protein, 85 aa, unidentified
  REGION 1..85: note = Description of Unknown:cds_NZ_WFIY01000004.1_cds_WP_155863119.1_1038 target sequence
LNWNFNKEDIYHQFLKKKREKILEMKRKLLQGSKTYRVTIKRLNKLEKKFYGLYQKLQVFYIVLYFLPLLTLPFIKYETIAYEEG

SEQ ID NO: 38661 - protein, 85 aa, unidentified
  REGION 1..85: note = Description of Unknown:cds_NZ_WFIY01000004.1_cds_WP_155863399.1_1375 target sequence
IDVSYEFEYHEKPSVLMEYLSNPENWVKYFKPAKKLEKIGPDEWILYLHWFKTVKSKLTRVISNNESEFIINSLGWPKFKMVLKT

SEQ ID NO: 38662 - protein, 85 aa, unidentified
  REGION 1..85: note = Description of Unknown:cds_NZ_WFIY01000004.1_cds_WP_155863399.1_1375 target sequence
YILPAGNATKVRLEFIYDGPLEGTSKKEMEEAYKTLAISLDADIKKYCEENKCYDKKEVDHSEKIVDTVSLKGLKIYEMRTLLKK

SEQ ID NO: 38663 - protein, 84 aa, unidentified
  REGION 1..84: note = Description of Unknown:cds_NZ_WFIY01000004.1_cds_WP_155863399.1_1375 target sequence
VDTVSLKGLKIYEMRTLLKKEIKKSELDEILEKALAYSIDKDVVVIIEDGNEIVKFHFSNGDLVEKEGNLDSLGDTLKVLVKST

SEQ ID NO: 38664 - protein, 85 aa, unidentified
  REGION 1..85: note = Description of Unknown:cds_NZ_WFIY01000004.1_cds_WP_155863399.1_1375 target sequence
KYFKPAKKLEKIGPDEWILYLHWFKTVKSKLTRVISNNESEFIINSLGWPKFKMVLKTYILPAGNATKVRLEFIYDGPLEGTSKK

SEQ ID NO: 38665 - protein, 85 aa, unidentified
  REGION 1..85: note = Description of Unknown:cds_NZ_WFIY01000004.1_cds_WP_155863399.1_1375 target sequence
EMEEAYKTLAISLDADIKKYCEENKCYDKKEVDHSEKIVDTVSLKGLKIYEMRTLLKKEIKKSELDEILEKALAYSIDKDVVVII

SEQ ID NO: 38666 - protein, 85 aa, unidentified
  REGION 1..85: note = Description of Unknown:cds_NZ_WFIY01000004.1_cds_WP_155863571.1_1493 target sequence
KCSTEEIKEMRGFQFFVNNCDKDELYKRISDIKSISDSSGKTYILRLAESNYFRFELLFIPNTVTLISVATARGTNNINLRDFES

SEQ ID NO: 38667 - protein, 85 aa, unidentified
  REGION 1..85: note = Description of Unknown:cds_NZ_WFIY01000004.1_cds_WP_155863571.1_1493 target sequence
LDDLISLSCCASTNEQLREASKNFLNERTNEAEIVDLFSQKEEFEVNVDCSKVSWNEIKFPETVEGKWNTTELATVGKLSLKALA

SEQ ID NO: 38668 - protein, 84 aa, unidentified
  REGION 1..84: note = Description of Unknown:cds_NZ_WFIY01000004.1_cds_WP_155863571.1_1493 target sequence
GKWNTTELATVGKLSLKALAGQIKFLAISTERPQNSIKFTNFERFSSLCCFLNIVKKKLDECSAIVEAIKPFLAQEKKKRSRKQ

SEQ ID NO: 38669 - protein, 85 aa, unidentified
  REGION 1..85: note = Description of Unknown:cds_NZ_WFIY01000004.1_cds_WP_155863571.1_1493 target sequence
RISDIKSISDSSGKTYILRLAESNYFRFELLFIPNTVTLISVATARGTNNINLRDFESLDDLISLSCCASTNEQLREASKNFLNE

SEQ ID NO: 38670 - protein, 85 aa, unidentified
  REGION 1..85: note = Description of Unknown:cds_NZ_WFIY01000004.1_cds_WP_155863571.1_1493 target sequence
RTNEAEIVDLFSQKEEFEVNVDCSKVSWNEIKFPETVEGKWNTTELATVGKLSLKALAGQIKFLAISTERPQNSIKFTNFERFSS

SEQ ID NO: 38671 - protein, 85 aa, unidentified
  REGION 1..85: note = Description of Unknown:cds_NZ_WFIY01000004.1_cds_WP_155863756.1_1630 target sequence
LKRLSPFSLLILLKIKAMIKKALPLFLLFLISTATVLEASSTYEVNILFQGKGISAIVEYCNHIELITTNKTLYLPNTSVTITAY

SEQ ID NO: 38672 - protein, 85 aa, unidentified
  REGION 1..85: note = Description of Unknown:cds_NZ_WFIY01000004.1_cds_WP_155863756.1_1630 target sequence
ETIIGYNISINGMNVSSLTFNPNNLSKIVIKAFPIYVWINIKINGTGKVIVNFQNGSKEIVNQSTKLKVLYGSLITLSARGTNGE

SEQ ID NO: 38673 - protein, 84 aa, unidentified
  REGION 1..84: note = Description of Unknown:cds_NZ_WFIY01000004.1_cds_WP_155863756.1_1630 target sequence
KLKVLYGSLITLSARGTNGESFISWNNNYTYPTMWLIASNNTCVIANFGKAKSPIFSSVNFLGIGLLVILGGIYIYIKRKHSPT

SEQ ID NO: 38674 - protein, 85 aa, unidentified
  REGION 1..85: note = Description of Unknown:cds_NZ_WFIY01000004.1_cds_WP_155863756.1_1630 target sequence
LFLISTATVLEASSTYEVNILFQGKGISAIVEYCNHIELITTNKTLYLPNTSVTITAYETIIGYNISINGMNVSSLTFNPNNLSK

SEQ ID NO: 38675 - protein, 85 aa, unidentified
  REGION 1..85: note = Description of Unknown:cds_NZ_WFIY01000004.1_cds_WP_155863756.1_1630 target sequence
IVIKAFPIYVWINIKINGTGKVIVNFQNGSKEIVNQSTKLKVLYGSLITLSARGTNGESFISWNNNYTYPTMWLIASNNTCVIAN

SEQ ID NO: 38676 - protein, 85 aa, unidentified
  REGION 1..85: note = Description of Unknown:cds_NC_035460.1_cds_YP_009408121.1_170 target sequence
EQSIDNVLLIKKYVKMIKHEHYNEFVSIFKTIMNFAKYDRDPYEDEIIYILTTEEPTHALHIIDYIIKRITYCYITYISKSLKET

SEQ ID NO: 38677 - protein, 85 aa, unidentified
  REGION 1..85: note = Description of Unknown:cds_NC_035460.1_cds_YP_009408121.1_170 target sequence
YNLSFSMKCPFNDLKNAHLFTSVKNVNINDFLAAYFDYRSKKISGCVNSIFNELFTYDILARYYYGNDYIKNTIKQLSNNDNYVF

SEQ ID NO: 38678 - protein, 84 aa, unidentified
  REGION 1..84: note = Description of Unknown:cds_NC_035460.1_cds_YP_009408121.1_170 target sequence
GNDYIKNTIKQLSNNDNYVFTFYKRTKRTVDGTFKVDIETIKRFIGFIAILFEHVPNLNKLTFFDNVSFFHRMDFKQYLVKKYN

SEQ ID NO: 38679 - protein, 85 aa, unidentified
  REGION 1..85: note = Description of Unknown:cds_NC_035460.1_cds_YP_009408121.1_170 target sequence
IFKTIMNFAKYDRDPYEDEIIYILTTEEPTHALHIIDYIIKRITYCYITYISKSLKETYNLSFSMKCPFNDLKNAHLFTSVKNVN

SEQ ID NO: 38680 - protein, 85 aa, unidentified
  REGION 1..85: note = Description of Unknown:cds_NC_035460.1_cds_YP_009408121.1_170 target sequence
INDFLAAYFDYRSKKISGCVNSIFNELFTYDILARYYYGNDYIKNTIKQLSNNDNYVFTFYKRTKRTVDGTFKVDIETIKRFIGF

SEQ ID NO: 38681 - protein, 85 aa, unidentified
  REGION 1..85: note = Description of Unknown:vpeps_6AX6_1 target sequence
GSSHHHHHHASGLVPRGSVPTEVTLYDLPTRKEEWEKKYLHPEFLSHLQNFKDFDYTEICNDVYSFPLFTPAFCKEVIEVMDKAN

SEQ ID NO: 38682 - protein, 85 aa, unidentified
  REGION 1..85: note = Description of Unknown:vpeps_6AX6_1 target sequence
LWSKGGDSYFDPRIGGVESYPTQDTQLYEVGLDKQWHYVVFNYVAPFVRHLYNNYKTKDINLAFVVKYDMERQSELAPHHDSSTY

SEQ ID NO: 38683 - protein, 85 aa, unidentified
  REGION 1..85: note = Description of Unknown:vpeps_6AX6_1 target sequence
VVKYDMERQSELAPHHDSSTYTLNIALNEYGKEYTAGGCEFIRHKFIWQGQKVGYATIHAGKLLAYHRALPITSGKRYILVSFVN

SEQ ID NO: 38684 - protein, 85 aa, unidentified
  REGION 1..85: note = Description of Unknown:vpeps_6AX6_1 target sequence
LPTRKEEWEKKYLHPEFLSHLQNFKDFDYTEICNDVYSFPLFTPAFCKEVIEVMDKANLWSKGGDSYFDPRIGGVESYPTQDTQL

SEQ ID NO: 38685 - protein, 85 aa, unidentified
  REGION 1..85: note = Description of Unknown:vpeps_6AX6_1 target sequence
YEVGLDKQWHYVVFNYVAPFVRHLYNNYKTKDINLAFVVKYDMERQSELAPHHDSSTYTLNIALNEYGKEYTAGGCEFIRHKFIW

SEQ ID NO: 38686 - protein, 85 aa, unidentified
  REGION 1..85: note = Description of Unknown:cds_NC_024711.1_cds_YP_009052530.1_52 target sequence
ASLNQLVSEFAHAVGNPNSIPLRRNLRYAILHGRNELIRKSYENHKYVDKGLQQRIRVSIINVPDGDLYNSQTLGLPAIKRTKQE

SEQ ID NO: 38687 - protein, 85 aa, unidentified
  REGION 1..85: note = Description of Unknown:cds_NC_024711.1_cds_YP_009052530.1_52 target sequence
VPKPVRFINNLPFQSIRTTGHTGIEIPFAKEASAKFYHYLAGMCNLPVYDYINGYIYFFSNNKDWFQNIGSIIIESPFEIPYLVP

SEQ ID NO: 38688 - protein, 84 aa, unidentified
  REGION 1..84: note = Description of Unknown:cds_NC_024711.1_cds_YP_009052530.1_52 target sequence
WFQNIGSIIIESPFEIPYLVPTETVEKAKDVNYDPIDDEAKYDDDEFLIPEDMIGTLKEIVFKRNLIEVPRQTNETPIDNFVTR

SEQ ID NO: 38689 - protein, 85 aa, unidentified
  REGION 1..85: note = Description of Unknown:cds_NC_024711.1_cds_YP_009052530.1_52 target sequence
YAILHGRNELIRKSYENHKYVDKGLQQRIRVSIINVPDGDLYNSQTLGLPAIKRTKQEVPKPVRFINNLPFQSIRTTGHTGIEIP

SEQ ID NO: 38690 - protein, 85 aa, unidentified
  REGION 1..85: note = Description of Unknown:cds_NC_024711.1_cds_YP_009052530.1_52 target sequence
FAKEASAKFYHYLAGMCNLPVYDYINGYIYFFSNNKDWFQNIGSIIIESPFEIPYLVPTETVEKAKDVNYDPIDDEAKYDDDEFL

SEQ ID NO: 38691 - protein, 85 aa, unidentified
  REGION 1..85: note = Description of Unknown:cds_NZ_WFIY01000004.1_cds_WP_155862412.1_152 target sequence
VELIDTKKLLEGYKLKDGDSVLIDSDSLSIIKYFHGLKKINLIADDNFIFETLEIAGFLREHQVKTSVNNFPPSYEPKLIRHKKL

SEQ ID NO: 38692 - protein, 85 aa, unidentified
  REGION 1..85: note = Description of Unknown:cds_NZ_WFIY01000004.1_cds_WP_155862412.1_152 target sequence
EFPITRSKGKGLTWKVSGVDFLPGNFVLGKDFPVSDERTGILGYMVNKKVVVIFKKSNGDYIEGRIIGKLDGDEEYLVRPNKWLT

SEQ ID NO: 38693 - protein, 84 aa, unidentified
  REGION 1..84: note = Description of Unknown:cds_NZ_WFIY01000004.1_cds_WP_155862412.1_152 target sequence
IIGKLDGDEEYLVRPNKWLTDLVVFKATFKKGKAIASKKLLFCRPLGSVFLPLNRRDIYNILLKLKIRSSGYPVECYDYQSSWN

SEQ ID NO: 38694 - protein, 85 aa, unidentified
  REGION 1..85: note = Description of Unknown:cds_NZ_WFIY01000004.1_cds_WP_155862412.1_152 target sequence
LSIIKYFHGLKKINLIADDNFIFETLEIAGFLREHQVKTSVNNFPPSYEPKLIRHKKLEFPITRSKGKGLTWKVSGVDFLPGNFV

SEQ ID NO: 38695 - protein, 85 aa, unidentified
  REGION 1..85: note = Description of Unknown:cds_NZ_WFIY01000004.1_cds_WP_155862412.1_152 target sequence
LGKDFPVSDERTGILGYMVNKKVVVIFKKSNGDYIEGRIIGKLDGDEEYLVRPNKWLTDLVVFKATFKKGKAIASKKLLFCRPLG

SEQ ID NO: 38696 - protein, 85 aa, unidentified
  REGION 1..85: note = Description of Unknown:cds_NZ_WFIY01000004.1_cds_WP_155863642.1_1530 target sequence
DKEEIRQKIWKLMEETNIASFPRPVFGRIPNFKGSEKAAELLSTLPEFKKAEVIKVNPDSPQRKVRELVLSAGKKLLVPTPRLKG

SEQ ID NO: 38697 - protein, 85 aa, unidentified
  REGION 1..85: note = Description of Unknown:cds_NZ_WFIY01000004.1_cds_WP_155863642.1_1530 target sequence
EFFLLYNVNPKLASTISGFTKLGKRISYKEIPTVDFIVVGSVAVTRSGDRVGKGEGYSELEYAILRELGKVNEKTPVATTVHSIQ

SEQ ID NO: 38698 - protein, 84 aa, unidentified
  REGION 1..84: note = Description of Unknown:cds_NZ_WFIY01000004.1_cds_WP_155863642.1_1530 target sequence
LRELGKVNEKTPVATTVHSIQIVDEIPSQPFDVPVDIIVTEKEIIRTKPNREKPKGIYMEYLTKEKIEETPYLKYYLMETGRLK

SEQ ID NO: 38699 - protein, 85 aa, unidentified
  REGION 1..85: note = Description of Unknown:cds_NZ_WFIY01000004.1_cds_WP_155863642.1_1530 target sequence
RIPNFKGSEKAAELLSTLPEFKKAEVIKVNPDSPQRKVRELVLSAGKKLLVPTPRLKGEFFLLYNVNPKLASTISGFTKLGKRIS

SEQ ID NO: 38700 - protein, 85 aa, unidentified
  REGION 1..85: note = Description of Unknown:cds_NZ_WFIY01000004.1_cds_WP_155863642.1_1530 target sequence
YKEIPTVDFIVVGSVAVTRSGDRVGKGEGYSELEYAILRELGKVNEKTPVATTVHSIQIVDEIPSQPFDVPVDIIVTEKEIIRTK

SEQ ID NO: 38701 - protein, 85 aa, unidentified
  REGION 1..85: note = Description of Unknown:cds_NZ_WFIY01000004.1_cds_WP_155863922.1_1835 target sequence
PKKFCIVCGREDVELIDRMCPSCYIKTKRLVEFPPVILGKICKICNAEWIDGKWVRLAETEYDAVRDVVLRYLAKEMIIDRNVKD

SEQ ID NO: 38702 - protein, 85 aa, unidentified
  REGION 1..85: note = Description of Unknown:cds_NZ_WFIY01000004.1_cds_WP_155863922.1_1835 target sequence
YRIDMIKKWKERGGRSFAEIVAEGKVGNQAFRLKKKVELRLTYSICDDCLKRKSGYYEAIIQLRGRKEFSEEKRALFESFFTNEI

SEQ ID NO: 38703 - protein, 84 aa, unidentified
  REGION 1..84: note = Description of Unknown:cds_NZ_WFIY01000004.1_cds_WP_155863922.1_1835 target sequence
GRKEFSEEKRALFESFFTNEIVHSISDVKISKDGIDYYFINKTAAKRLVSTITSIVNAEITESYENETIKNGKREAKLVISVRI

SEQ ID NO: 38704 - protein, 85 aa, unidentified
  REGION 1..85: note = Description of Unknown:cds_NZ_WFIY01000004.1_cds_WP_155863922.1_1835 target sequence
KRLVEFPPVILGKICKICNAEWIDGKWVRLAETEYDAVRDVVLRYLAKEMIIDRNVKDYRIDMIKKWKERGGRSFAEIVAEGKVG

SEQ ID NO: 38705 - protein, 85 aa, unidentified
  REGION 1..85: note = Description of Unknown:cds_NZ_WFIY01000004.1_cds_WP_155863922.1_1835 target sequence
NQAFRLKKKVELRLTYSICDDCLKRKSGYYEAIIQLRGRKEFSEEKRALFESFFTNEIVHSISDVKISKDGIDYYFINKTAAKRL

SEQ ID NO: 38706 - protein, 85 aa, unidentified
  REGION 1..85: note = Description of Unknown:hvTR_D3IZI6 target sequence
TFRELILFHAATHVVTGDPEAPRRAASLCRGFGVDFRALHAEFARRYPRTAAAVERAQPLPEVEAAFPPDARRRVVRLRLEAAAL

SEQ ID NO: 38707 - protein, 85 aa, unidentified
  REGION 1..85: note = Description of Unknown:hvTR_D3IZI6 target sequence
AVKESRALSASMRGVAVVDGCCVRVSRANDELLEFLARRYDPAVYRYAEVPVPSVRPGSKVFACAGRSVTFAAAHRSRITANRPL

SEQ ID NO: 38708 - protein, 84 aa, unidentified
  REGION 1..84: note = Description of Unknown:hvTR_D3IZI6 target sequence
CAGRSVTFAAAHRSRITANRPLRVVVTEACVDAVLARGAAEVFDRGSGVLPRALREIFYRLGEDEEGWPTGQTPNLADSMVSRS

SEQ ID NO: 38709 - protein, 85 aa, unidentified
  REGION 1..85: note = Description of Unknown:hvTR_D3IZI6 target sequence
LCRGFGVDFRALHAEFARRYPRTAAAVERAQPLPEVEAAFPPDARRRVVRLRLEAAALAVKESRALSASMRGVAVVDGCCVRVSR

SEQ ID NO: 38710 - protein, 85 aa, unidentified
  REGION 1..85: note = Description of Unknown:hvTR_D3IZI6 target sequence
ANDELLEFLARRYDPAVYRYAEVPVPSVRPGSKVFACAGRSVTFAAAHRSRITANRPLRVVVTEACVDAVLARGAAEVFDRGSGV

SEQ ID NO: 38711 - protein, 85 aa, unidentified
  REGION 1..85: note = Description of Unknown:cds_NZ_WFIY01000004.1_cds_WP_155862460.1_212 target sequence
SESIKSVKETKMENVFECEYEDGTTRLCTKNLAPGYSVYGERLIKYNGIEYREWNAFRSKLAGAILKGLKENPVKKGVKVLYLGA

SEQ ID NO: 38712 - protein, 85 aa, unidentified
  REGION 1..85: note = Description of Unknown:cds_NZ_WFIY01000004.1_cds_WP_155862460.1_212 target sequence
ASGTTPSHVSDIVEKEGKVYGVEFSPRVVRELILVAQRRPNLFPILADARFPQSYMPLIENVDVLYVDIAQPDQTDIAIYNAKIF

SEQ ID NO: 38713 - protein, 84 aa, unidentified
  REGION 1..84: note = Description of Unknown:cds_NZ_WFIY01000004.1_cds_WP_155862460.1_212 target sequence
VLYVDIAQPDQTDIAIYNAKIFLKEGGSLLLAIKARSIDVTKNPEEIFKEEASKLERSNFDVKQVINLDPYDKDHAMVLARFKG

SEQ ID NO: 38714 - protein, 85 aa, unidentified
  REGION 1..85: note = Description of Unknown:cds_NZ_WFIY01000004.1_cds_WP_155862460.1_212 target sequence
CTKNLAPGYSVYGERLIKYNGIEYREWNAFRSKLAGAILKGLKENPVKKGVKVLYLGAASGTTPSHVSDIVEKEGKVYGVEFSPR

SEQ ID NO: 38715 - protein, 85 aa, unidentified
  REGION 1..85: note = Description of Unknown:cds_NZ_WFIY01000004.1_cds_WP_155862460.1_212 target sequence
VVRELILVAQRRPNLFPILADARFPQSYMPLIENVDVLYVDIAQPDQTDIAIYNAKIFLKEGGSLLLAIKARSIDVTKNPEEIFK

SEQ ID NO: 38716 - protein, 85 aa, unidentified
  REGION 1..85: note = Description of Unknown:cds_NZ_WFIY01000004.1_cds_622 target sequence
TEELYLKDSYIKEFEAKVTKVNGNEVILDKTAFYPGGGGLENDVGKLIKNNGEVLNVKEVKRQGDDIVHIIEGGELREGDNVKGV

SEQ ID NO: 38717 - protein, 85 aa, unidentified
  REGION 1..85: note = Description of Unknown:cds_NZ_WFIY01000004.1_cds_622 target sequence
IDWNRRYKMMRLHTASHVMAAVAYSQFNALITGGHISPEYAKDDFNLENKDLIPQIVEKANEILSKGIEVKVYFLPREEALKIPG

SEQ ID NO: 38718 - protein, 84 aa, unidentified
  REGION 1..84: note = Description of Unknown:cds_NZ_WFIY01000004.1_cds_622 target sequence
SKGIEVKVYFLPREEALKIPGIVKLAERNPPSIPIWRIVEIPGVDIQADGGPHVKNTSEVGKIHIIKIENRGKNRKRVYYTVES

SEQ ID NO: 38719 - protein, 85 aa, unidentified
  REGION 1..85: note = Description of Unknown:cds_NZ_WFIY01000004.1_cds_622 target sequence
LDKTAFYPGGGGLENDVGKLIKNNGEVLNVKEVKRQGDDIVHIIEGGELREGDNVKGVIDWNRRYKMMRLHTASHVMAAVAYSQF

SEQ ID NO: 38720 - protein, 85 aa, unidentified
  REGION 1..85: note = Description of Unknown:cds_NZ_WFIY01000004.1_cds_622 target sequence
NALITGGHISPEYAKDDFNLENKDLIPQIVEKANEILSKGIEVKVYFLPREEALKIPGIVKLAERNPPSIPIWRIVEIPGVDIQA

SEQ ID NO: 38721 - protein, 85 aa, unidentified
  REGION 1..85: note = Description of Unknown:cds_NZ_WFIY01000004.1_cds_WP_155864383.1_686 target sequence
SPDVIKVTKDTKIYDALNIMIRNNIRRLVVESNGIVTIRDIVYNWEKIDDTVDKIMTSDLQFIDKNSDLKEACRIVTAKGIGSLV

SEQ ID NO: 38722 - protein, 85 aa, unidentified
  REGION 1..85: note = Description of Unknown:cds_NZ_WFIY01000004.1_cds_WP_155864383.1_686 target sequence
VGNGDNIEGIITERDLIRYCKADINSFVQDIMNKNPLIISTDTTLAEVVEFMKQKYVRHAIVACNNLPCGVISTKDIGKALLAKK

SEQ ID NO: 38723 - protein, 84 aa, unidentified
  REGION 1..84: note = Description of Unknown:cds_NZ_WFIY01000004.1_cds_WP_155864383.1_686 target sequence
CNNLPCGVISTKDIGKALLAKKDLTKTEVSGFMSNNVFKVYPDDKIETARILMAEKNIGFLPVTSPKEILGSLSEREILAVLSI

SEQ ID NO: 38724 - protein, 85 aa, unidentified
  REGION 1..85: note = Description of Unknown:cds_NZ_WFIY01000004.1_cds_WP_155864383.1_686 target sequence
LVVESNGIVTIRDIVYNWEKIDDTVDKIMTSDLQFIDKNSDLKEACRIVTAKGIGSLVVGNGDNIEGIITERDLIRYCKADINSF

SEQ ID NO: 38725 - protein, 85 aa, unidentified
  REGION 1..85: note = Description of Unknown:cds_NZ_WFIY01000004.1_cds_WP_155864383.1_686 target sequence
VQDIMNKNPLIISTDTTLAEVVEFMKQKYVRHAIVACNNLPCGVISTKDIGKALLAKKDLTKTEVSGFMSNNVFKVYPDDKIETA

SEQ ID NO: 38726 - protein, 85 aa, unidentified
  REGION 1..85: note = Description of Unknown:cds_NZ_WFIY01000004.1_cds_WP_155863135.1_1056 target sequence
LQINGSKIISISCESTIDEAIFFMARNNIRRIVIYCNNKIYGIFTVDEALRNLLFKSEARLRDVELKKAVKIPSTDIIHIVKSMV

SEQ ID NO: 38727 - protein, 85 aa, unidentified
  REGION 1..85: note = Description of Unknown:cds_NZ_WFIY01000004.1_cds_WP_155863135.1_1056 target sequence
ENNVDSVIYDDKIITEKDVVFSYHFPKEVDVNNIAKDALNIPPYTNLISAIEIMVKNHIRHLPVIEKEPIGMLSARDIIYYYAQK

SEQ ID NO: 38728 - protein, 84 aa, unidentified
  REGION 1..84: note = Description of Unknown:cds_NZ_WFIY01000004.1_cds_WP_155863135.1_1056 target sequence
IEKEPIGMLSARDIIYYYAQKYTVDVPVMEVMNPHLICVDENYSMSEAVKVMKEYNIGSLCVNKNKIVTLKDFIRYIFTTFQIK

SEQ ID NO: 38729 - protein, 85 aa, unidentified
  REGION 1..85: note = Description of Unknown:cds_NZ_WFIY01000004.1_cds_WP_155863135.1_1056 target sequence
NIRRIVIYCNNKIYGIFTVDEALRNLLFKSEARLRDVELKKAVKIPSTDIIHIVKSMVENNVDSVIYDDKIITEKDVVFSYHFPK

SEQ ID NO: 38730 - protein, 85 aa, unidentified
  REGION 1..85: note = Description of Unknown:cds_NZ_WFIY01000004.1_cds_WP_155863135.1_1056 target sequence
EVDVNNIAKDALNIPPYTNLISAIEIMVKNHIRHLPVIEKEPIGMLSARDIIYYYAQKYTVDVPVMEVMNPHLICVDENYSMSEA

SEQ ID NO: 38731 - protein, 85 aa, unidentified
  REGION 1..85: note = Description of Unknown:cds_NZ_WFIY01000004.1_cds_WP_155863372.1_1345 target sequence
SFEVTLKVRRYSKEKGSWWQEYKLKVDRFTTVVEALRRIKTEQDPTLSFRASCHMGVCGSCGMKINGKPKLACKTLIVNEGRKEI

SEQ ID NO: 38732 - protein, 85 aa, unidentified
  REGION 1..85: note = Description of Unknown:cds_NZ_WFIY01000004.1_cds_WP_155863372.1_1345 target sequence
TIEPMDNFPVIKDLIVDLDSVYRKMNKIIPRVTPPEEVIQGRAETRLKPEDQKELWSFAQCIICGLCYSACPVVETNKDFLGPAV

SEQ ID NO: 38733 - protein, 84 aa, unidentified
  REGION 1..84: note = Description of Unknown:cds_NZ_WFIY01000004.1_cds_WP_155863372.1_1345 target sequence
CGLCYSACPVVETNKDFLGPAVLAMAYRFSADPRDTLGKKRLEIIDNPIIGIWNCRVAGSCSVVCPRNVDPSLAIQRLKEMSMK

SEQ ID NO: 38734 - protein, 85 aa, unidentified
  REGION 1..85: note = Description of Unknown:cds_NZ_WFIY01000004.1_cds_WP_155863372.1_1345 target sequence
RFTTVVEALRRIKTEQDPTLSFRASCHMGVCGSCGMKINGKPKLACKTLIVNEGRKEITIEPMDNFPVIKDLIVDLDSVYRKMNK

SEQ ID NO: 38735 - protein, 85 aa, unidentified
  REGION 1..85: note = Description of Unknown:cds_NZ_WFIY01000004.1_cds_WP_155863372.1_1345 target sequence
IIPRVTPPEEVIQGRAETRLKPEDQKELWSFAQCIICGLCYSACPVVETNKDFLGPAVLAMAYRFSADPRDTLGKKRLEIIDNPI

SEQ ID NO: 38736 - protein, 85 aa, unidentified
  REGION 1..85: note = Description of Unknown:cds_NZ_WFIY01000004.1_cds_WP_155863490.1_1442 target sequence
HLLYSTRDEVFNKISLLPIGSIEQHGPHLPMGTDAIIAEEIAKRVESEFKNDVLLFPTIYYSCSIEHSGLPYVGVSYITFYNYLV

SEQ ID NO: 38737 - protein, 85 aa, unidentified
  REGION 1..85: note = Description of Unknown:cds_NZ_WFIY01000004.1_cds_WP_155863490.1_1442 target sequence
EVIKKALELTKAVIIVNAHGGNQAILEVIKREINLNRGDKKESYDNKKVYIFYPDYNFFQGEDLHAGTVETSTIKYLHPSIVKEN

SEQ ID NO: 38738 - protein, 84 aa, unidentified
  REGION 1..84: note = Description of Unknown:cds_NZ_WFIY01000004.1_cds_WP_155863490.1_1442 target sequence
LHAGTVETSTIKYLHPSIVKENKVGKDFSVKEGVFNTITTAEANPQGIINIGEFKIDINIGESFIRHNVNKLKELVLKILKENK

SEQ ID NO: 38739 - protein, 85 aa, unidentified
  REGION 1..85: note = Description of Unknown:cds_NZ_WFIY01000004.1_cds_WP_155863490.1_1442 target sequence
HLPMGTDAIIAEEIAKRVESEFKNDVLLFPTIYYSCSIEHSGLPYVGVSYITFYNYLVEVIKKALELTKAVIIVNAHGGNQAILE

SEQ ID NO: 38740 - protein, 85 aa, unidentified
  REGION 1..85: note = Description of Unknown:cds_NZ_WFIY01000004.1_cds_WP_155863490.1_1442 target sequence
VIKREINLNRGDKKESYDNKKVYIFYPDYNFFQGEDLHAGTVETSTIKYLHPSIVKENKVGKDFSVKEGVFNTITTAEANPQGII

SEQ ID NO: 38741 - protein, 85 aa, unidentified
  REGION 1..85: note = Description of Unknown:cds_NZ_WFIY01000004.1_cds_WP_155864070.1_2009 target sequence
IGRILVSSVLITLIGLGVIYFTLSSLYSSLCYAKIIQFNEFTYKYVKYNATEFLYNGSVFLCYSINASKLVYVEGILNCGFKEIV

SEQ ID NO: 38742 - protein, 85 aa, unidentified
  REGION 1..85: note = Description of Unknown:cds_NZ_WFIY01000004.1_cds_WP_155864070.1_2009 target sequence
KICKLVYGCLRCFKRIPGIANVTYLKILIGNYSEFKCVKPRIENAIIKLKGEILNCDSILKYIVTNCGNVPIYLLKLYVHIICEE

SEQ ID NO: 38743 - protein, 84 aa, unidentified
  REGION 1..84: note = Description of Unknown:cds_NZ_WFIY01000004.1_cds_WP_155864070.1_2009 target sequence
VTNCGNVPIYLLKLYVHIICEEYVKEGNKTVTKYVYKDYNINIYNWLNPGKIYRYCTLICKLVCASITLCYKALCNTMYSTVNT

SEQ ID NO: 38744 - protein, 85 aa, unidentified
  REGION 1..85: note = Description of Unknown:cds_NZ_WFIY01000004.1_cds_WP_155864070.1_2009 target sequence
SSLCYAKIIQFNEFTYKYVKYNATEFLYNGSVFLCYSINASKLVYVEGILNCGFKEIVKICKLVYGCLRCFKRIPGIANVTYLKI

SEQ ID NO: 38745 - protein, 85 aa, unidentified
  REGION 1..85: note = Description of Unknown:cds_NZ_WFIY01000004.1_cds_WP_155864070.1_2009 target sequence
LIGNYSEFKCVKPRIENAIIKLKGEILNCDSILKYIVTNCGNVPIYLLKLYVHIICEEYVKEGNKTVTKYVYKDYNINIYNWLNP

SEQ ID NO: 38746 - protein, 85 aa, unidentified
  REGION 1..85: note = Description of Unknown:cds_NZ_WFIY01000004.1_cds_WP_155864082.1_2025 target sequence
ECISLRNVVKRFGSIIALNNLSFTIPCDGRFALLGPNGAGKSTTMKILAGLLKPDYGEVEIMGMKPGTKEVKRFLGYLPEDPMPY

SEQ ID NO: 38747 - protein, 85 aa, unidentified
  REGION 1..85: note = Description of Unknown:cds_NZ_WFIY01000004.1_cds_WP_155864082.1_2025 target sequence
RILTVRENLEYIASLRGVKKERVDEMLDLLDLRQYERVQAGKLSRGNQQKLSLALILIHNPKIILLDEPLNYLDIPTQEKVINVL

SEQ ID NO: 38748 - protein, 84 aa, unidentified
  REGION 1..84: note = Description of Unknown:cds_NZ_WFIY01000004.1_cds_WP_155864082.1_2025 target sequence
ILLDEPLNYLDIPTQEKVINVLRDMKSTFLISTHIMSIATRLTDHVIIISRGTVIWQGSIDELRALGREDETIESVVARMMRNA

SEQ ID NO: 38749 - protein, 85 aa, unidentified
  REGION 1..85: note = Description of Unknown:cds_NZ_WFIY01000004.1_cds_WP_155864082.1_2025 target sequence
DGRFALLGPNGAGKSTTMKILAGLLKPDYGEVEIMGMKPGTKEVKRFLGYLPEDPMPYRILTVRENLEYIASLRGVKKERVDEML

SEQ ID NO: 38750 - protein, 85 aa, unidentified
  REGION 1..85: note = Description of Unknown:cds_NZ_WFIY01000004.1_cds_WP_155864082.1_2025 target sequence
DLLDLRQYERVQAGKLSRGNQQKLSLALILIHNPKIILLDEPLNYLDIPTQEKVINVLRDMKSTFLISTHIMSIATRLTDHVIII

SEQ ID NO: 38751 - protein, 85 aa, unidentified
  REGION 1..85: note = Description of Unknown:cds_NZ_WFIY01000004.1_cds_WP_155864344.1_2357 target sequence
LGKTYYCVKPNITGEITYPIKVEDVCGNVIDLVYSLKVNPDPVVIITPSRNATDVGIPISFNATVIGGTKPYIKVWYVNGTPVSN

SEQ ID NO: 38752 - protein, 85 aa, unidentified
  REGION 1..85: note = Description of Unknown:cds_NZ_WFIY01000004.1_cds_WP_155864344.1_2357 target sequence
EDVLYYNFTSPGVYNVTLKVVDSVNFTAVNSVTIKVNDYPTLNVSYNLHYDFLVYASSVNLSSKVFGGTPPYTYTVYVNGREYYV

SEQ ID NO: 38753 - protein, 84 aa, unidentified
  REGION 1..84: note = Description of Unknown:cds_NZ_WFIY01000004.1_cds_WP_155864344.1_2357 target sequence
VFGGTPPYTYTVYVNGREYYVGNNLSINVPIDAGKNNITVVVKDSLGLTKAETILVYGGFNWFLILVIITLIVVITIILMKRRR

SEQ ID NO: 38754 - protein, 85 aa, unidentified
  REGION 1..85: note = Description of Unknown:cds_NZ_WFIY01000004.1_cds_WP_155864344.1_2357 target sequence
NVIDLVYSLKVNPDPVVIITPSRNATDVGIPISFNATVIGGTKPYIKVWYVNGTPVSNEDVLYYNFTSPGVYNVTLKVVDSVNFT

SEQ ID NO: 38755 - protein, 85 aa, unidentified
  REGION 1..85: note = Description of Unknown:cds_NZ_WFIY01000004.1_cds_WP_155864344.1_2357 target sequence
AVNSVTIKVNDYPTLNVSYNLHYDFLVYASSVNLSSKVFGGTPPYTYTVYVNGREYYVGNNLSINVPIDAGKNNITVVVKDSLGL

SEQ ID NO: 38756 - protein, 85 aa, unidentified
  REGION 1..85: note = Description of Unknown:cds_NZ_WFIY01000003.1_cds_WP_155862284.1_2369 target sequence
LGKTYYCVKPNITGEITYPIKVEDVCGKVIDLVYSLKVNPDPVVIITPSMNVTDVGIPISFNATVIGGTKPYIKVWYVNGTPVSN

SEQ ID NO: 38757 - protein, 85 aa, unidentified
  REGION 1..85: note = Description of Unknown:cds_NZ_WFIY01000003.1_cds_WP_155862284.1_2369 target sequence
EDVLYYNFTSPGVYNVTLKVVDSVNFTAVNSVTIKVNNYPTLNVSYNLCYDFLVYASSVNLSSKVFGGTPPYTYTVYVNGREYYV

SEQ ID NO: 38758 - protein, 84 aa, unidentified
  REGION 1..84: note = Description of Unknown:cds_NZ_WFIY01000003.1_cds_WP_155862284.1_2369 target sequence
VFGGTPPYTYTVYVNGREYYVGNNLSINVPIDAGKNNITVVVKDSLGLTKAETILVYGGFNWFRILVIITLIVVITIILMKRRR

SEQ ID NO: 38759 - protein, 85 aa, unidentified
  REGION 1..85: note = Description of Unknown:cds_NZ_WFIY01000003.1_cds_WP_155862284.1_2369 target sequence
KVIDLVYSLKVNPDPVVIITPSMNVTDVGIPISFNATVIGGTKPYIKVWYVNGTPVSNEDVLYYNFTSPGVYNVTLKVVDSVNFT

SEQ ID NO: 38760 - protein, 85 aa, unidentified
  REGION 1..85: note = Description of Unknown:cds_NZ_WFIY01000003.1_cds_WP_155862284.1_2369 target sequence
AVNSVTIKVNNYPTLNVSYNLCYDFLVYASSVNLSSKVFGGTPPYTYTVYVNGREYYVGNNLSINVPIDAGKNNITVVVKDSLGL

SEQ ID NO: 38761 - protein, 85 aa, unidentified
  REGION 1..85: note = Description of Unknown:cds_NC_010495.1_cds_YP_001742065.1_28 target sequence
NELMNTKNEVMISSREIAEATGKKPHHVNRDIQDMLDALGYNPNLDNDDFKGFFFKYKEYNGRNVIDEILLNKELTMCLITGYDV

SEQ ID NO: 38762 - protein, 85 aa, unidentified
  REGION 1..85: note = Description of Unknown:cds_NC_010495.1_cds_YP_001742065.1_28 target sequence
KQRMRVINRVKELEEAQNKSILPNFSNPAEAARAWANEYEQKLIAQEKLAIAAPKADVYDKIVDKNNLYIATHVGQKVKMSAKKL

SEQ ID NO: 38763 - protein, 84 aa, unidentified
  REGION 1..84: note = Description of Unknown:cds_NC_010495.1_cds_YP_001742065.1_28 target sequence
DKNNLYIATHVGQKVKMSAKKLNQYLDTLNVYNRSVKRCRTFQQWFVDAGYGIMRETSTGHSQAMFTAEGEMWVVKTFMERGIV

SEQ ID NO: 38764 - protein, 85 aa, unidentified
  REGION 1..85: note = Description of Unknown:cds_NC_010495.1_cds_YP_001742065.1_28 target sequence
VNRDIQDMLDALGYNPNLDNDDFKGFFFKYKEYNGRNVIDEILLNKELTMCLITGYDVKQRMRVINRVKELEEAQNKSILPNFSN

SEQ ID NO: 38765 - protein, 85 aa, unidentified
  REGION 1..85: note = Description of Unknown:cds_NC_010495.1_cds_YP_001742065.1_28 target sequence
PAEAARAWANEYEQKLIAQEKLAIAAPKADVYDKIVDKNNLYIATHVGQKVKMSAKKLNQYLDTLNVYNRSVKRCRTFQQWFVDA

SEQ ID NO: 38766 - protein, 85 aa, unidentified
  REGION 1..85: note = Description of Unknown:hvTR_D3IZK8 target sequence
SSWRLKMSKCTGTSGVQTLEDLRNRLRTEAMCGNDCEEPRDDLFPNGEECLDIDGPPCEQVEQEIQQEQLPVPEHVPVPTKTPAK

SEQ ID NO: 38767 - protein, 85 aa, unidentified
  REGION 1..85: note = Description of Unknown:hvTR_D3IZK8 target sequence
RRTTKKEKTEKTEKAKSAKAVQKLCPPADDEDKPEDEPKSDDIEHTYESGDAEGGASGRSPSDLDNLDEMDDSDLMLAFSTILAD

SEQ ID NO: 38768 - protein, 84 aa, unidentified
  REGION 1..84: note = Description of Unknown:hvTR_D3IZK8 target sequence
DLDNLDEMDDSDLMLAFSTILADFKDLTHRVKCLSTVLTDVQAAGVRRSFSALGKALNEAAAIASTGAKPAAAPRKKKAAASKK

SEQ ID NO: 38769 - protein, 85 aa, unidentified
  REGION 1..85: note = Description of Unknown:hvTR_D3IZK8 target sequence
TEAMCGNDCEEPRDDLFPNGEECLDIDGPPCEQVEQEIQQEQLPVPEHVPVPTKTPAKRRTTKKEKTEKTEKAKSAKAVQKLCPP

SEQ ID NO: 38770 - protein, 85 aa, unidentified
  REGION 1..85: note = Description of Unknown:hvTR_D3IZK8 target sequence
ADDEDKPEDEPKSDDIEHTYESGDAEGGASGRSPSDLDNLDEMDDSDLMLAFSTILADFKDLTHRVKCLSTVLTDVQAAGVRRSF

SEQ ID NO: 38771 - protein, 85 aa, unidentified
  REGION 1..85: note = Description of Unknown:cds_NC_038931.1_cds_YP_009509140.1_24 target sequence
DVAVVILYSRDDALDLLYRTLHYWWKRSDGLRGQIYVVSNTNVLLPRYAKLIQQKRKGVGGARCDAIESTSEDYIIFSDGHVTPP

SEQ ID NO: 38772 - protein, 85 aa, unidentified
  REGION 1..85: note = Description of Unknown:cds_NC_038931.1_cds_YP_009509140.1_24 target sequence
REISKMLVEPWSSVPINHIILPFGTSGRVAYSLPFMPDERQFLWCSCSKYKEEITTTGEPIVAMSRKYISMSKCYTSYGLDLFQF

SEQ ID NO: 38773 - protein, 84 aa, unidentified
  REGION 1..84: note = Description of Unknown:cds_NC_038931.1_cds_YP_009509140.1_24 target sequence
AMSRKYISMSKCYTSYGLDLFQFTLRMPPGQLIGDEGIHFIEAKKLISNRKPNKDEMKDFYDTIYIKRKSEIEEEIKECFCRAL

SEQ ID NO: 38774 - protein, 85 aa, unidentified
  REGION 1..85: note = Description of Unknown:cds_NC_038931.1_cds_YP_009509140.1_24 target sequence
SDGLRGQIYVVSNTNVLLPRYAKLIQQKRKGVGGARCDAIESTSEDYIIFSDGHVTPPREISKMLVEPWSSVPINHIILPFGTSG

SEQ ID NO: 38775 - protein, 85 aa, unidentified
  REGION 1..85: note = Description of Unknown:cds_NC_038931.1_cds_YP_009509140.1_24 target sequence
RVAYSLPFMPDERQFLWCSCSKYKEEITTTGEPIVAMSRKYISMSKCYTSYGLDLFQFTLRMPPGQLIGDEGIHFIEAKKLISNR

SEQ ID NO: 38776 - protein, 85 aa, unidentified
  REGION 1..85: note = Description of Unknown:cds_NC_024711.1_cds_YP_009052549.1_72 target sequence
NIGEMHVTFRELAQQMGMQTVRAILMEDIDICLNAAIIEKARNVIVENVGPVPYNDKVARQNASISPVNALRTLYTAGTVNGGDI

SEQ ID NO: 38777 - protein, 85 aa, unidentified
  REGION 1..85: note = Description of Unknown:cds_NC_024711.1_cds_YP_009052549.1_72 target sequence
TGGGTEVDPYKINIDSDGIMLYTGFQVSYNGKTIYDCRIIEAEDLGQTLRDFCNRAAKDAPIVTIFGDESGINVDIYTGRNNTVK

SEQ ID NO: 38778 - protein, 84 aa, unidentified
  REGION 1..84: note = Description of Unknown:cds_NC_024711.1_cds_YP_009052549.1_72 target sequence
VTIFGDESGINVDIYTGRNNTVKPQLVKYLYIKEPAKVKFDEDREEDWVNCDLPPYLHMEIVMRAVQIYLASIGATSNGADKQS

SEQ ID NO: 38779 - protein, 85 aa, unidentified
  REGION 1..85: note = Description of Unknown:cds_NC_024711.1_cds_YP_009052549.1_72 target sequence
DIDICLNAAIIEKARNVIVENVGPVPYNDKVARQNASISPVNALRTLYTAGTVNGGDITGGGTEVDPYKINIDSDGIMLYTGFQV

SEQ ID NO: 38780 - protein, 85 aa, unidentified
  REGION 1..85: note = Description of Unknown:cds_NC_024711.1_cds_YP_009052549.1_72 target sequence
SYNGKTIYDCRIIEAEDLGQTLRDFCNRAAKDAPIVTIFGDESGINVDIYTGRNNTVKPQLVKYLYIKEPAKVKFDEDREEDWVN

SEQ ID NO: 38781 - protein, 85 aa, unidentified
  REGION 1..85: note = Description of Unknown:cds_NZ_WFIY01000004.1_cds_WP_155862303.1_19 target sequence
VDFSIFQVLYEITGKLTNLSPLRIGTGKVARFDEPTDNPIITINGKPYVPGSTMKGALRNLVEMYSKTKGWKVIYPYDFSKDESE

SEQ ID NO: 38782 - protein, 85 aa, unidentified
  REGION 1..85: note = Description of Unknown:cds_NZ_WFIY01000004.1_cds_WP_155862303.1_19 target sequence
IYKDCVPCYLFGSTESASRVFVFDSPISSEYVRTYRTMVSINRTFGAQQPGNLYTLDYIEPGASFDFRMRVFNLDLESPTEDTEK

SEQ ID NO: 38783 - protein, 84 aa, unidentified
  REGION 1..84: note = Description of Unknown:cds_NZ_WFIY01000004.1_cds_WP_155862303.1_19 target sequence
SFDFRMRVFNLDLESPTEDTEKKAVEALRFALSLLMNEGIMIGNRKSIGLGLVKLESPKVRKFTLKDGGLKEEEVDIKRILGEK

SEQ ID NO: 38784 - protein, 85 aa, unidentified
  REGION 1..85: note = Description of Unknown:cds_NZ_WFIY01000004.1_cds_WP_155862303.1_19 target sequence
KVARFDEPTDNPIITINGKPYVPGSTMKGALRNLVEMYSKTKGWKVIYPYDFSKDESEIYKDCVPCYLFGSTESASRVFVFDSPI

SEQ ID NO: 38785 - protein, 85 aa, unidentified
  REGION 1..85: note = Description of Unknown:cds_NZ_WFIY01000004.1_cds_WP_155862303.1_19 target sequence
SSEYVRTYRTMVSINRTFGAQQPGNLYTLDYIEPGASFDFRMRVFNLDLESPTEDTEKKAVEALRFALSLLMNEGIMIGNRKSIG

SEQ ID NO: 38786 - protein, 85 aa, unidentified
  REGION 1..85: note = Description of Unknown:cds_NZ_WFIY01000004.1_cds_231 target sequence
DVEKLAEELTKQLEGSPRSKLVEAIIILLHARPLRTSEIASNLGYQTKYISSYLSYWKKKGLVYQDGGRWYLTPQGENLAKAIID

SEQ ID NO: 38787 - protein, 85 aa, unidentified
  REGION 1..85: note = Description of Unknown:cds_NZ_WFIY01000004.1_cds_231 target sequence
SYSNSRFKEMLVIAKQMLEQVKEPMNNKNEQKEEREKKVVLSFIDSKTSNTVKKQQNKDPTVCIKEILEKLDDDEKDILLYLINK

SEQ ID NO: 38788 - protein, 84 aa, unidentified
  REGION 1..84: note = Description of Unknown:cds_NZ_WFIY01000004.1_cds_231 target sequence
IKEILEKLDDDEKDILLYLINKYKQWGSTYVYIDQIQEEYKADPGWLFKVLRQLQTKRIVYLYQDPKLGLRIGFSKSFKEKLNC

SEQ ID NO: 38789 - protein, 85 aa, unidentified
  REGION 1..85: note = Description of Unknown:cds_NZ_WFIY01000004.1_cds_231 target sequence
LLHARPLRTSEIASNLGYQTKYISSYLSYWKKKGLVYQDGGRWYLTPQGENLAKAIIDSYSNSRFKEMLVIAKQMLEQVKEPMNN

SEQ ID NO: 38790 - protein, 85 aa, unidentified
  REGION 1..85: note = Description of Unknown:cds_NZ_WFIY01000004.1_cds_231 target sequence
KNEQKEEREKKVVLSFIDSKTSNTVKKQQNKDPTVCIKEILEKLDDDEKDILLYLINKYKQWGSTYVYIDQIQEEYKADPGWLFK

SEQ ID NO: 38791 - protein, 85 aa, unidentified
  REGION 1..85: note = Description of Unknown:cds_NZ_WFIY01000004.1_cds_WP_155862743.1_553 target sequence
KRKNLIILAVVVAFVVLFTLPYILYPFEVPLDSFFKVSNEDLAKPGYVCIIFISWYGCPFGAADSWVLYSFLSHYGKIVYNFSYS

SEQ ID NO: 38792 - protein, 85 aa, unidentified
  REGION 1..85: note = Description of Unknown:cds_NZ_WFIY01000004.1_cds_WP_155862743.1_553 target sequence
DPQDVYPNIPAIIFKEFYPNSSVLFRFVYLYNRYLNATACCKVVSNYVSFGLSKISSCFPQYCPLVKEYVINKWAQGGYFQSAAY

SEQ ID NO: 38793 - protein, 84 aa, unidentified
  REGION 1..84: note = Description of Unknown:cds_NZ_WFIY01000004.1_cds_WP_155862743.1_553 target sequence
CPLVKEYVINKWAQGGYFQSAAYMGNPPHIPTTIIISSSKGTYMLIGYIYNPSCISGMTPSYILSHLNSLSFIQNGIEKIENLI

SEQ ID NO: 38794 - protein, 85 aa, unidentified
  REGION 1..85: note = Description of Unknown:cds_NZ_WFIY01000004.1_cds_WP_155862743.1_553 target sequence
EVPLDSFFKVSNEDLAKPGYVCIIFISWYGCPFGAADSWVLYSFLSHYGKIVYNFSYSDPQDVYPNIPAIIFKEFYPNSSVLFRF

SEQ ID NO: 38795 - protein, 85 aa, unidentified
  REGION 1..85: note = Description of Unknown:cds_NZ_WFIY01000004.1_cds_WP_155862743.1_553 target sequence
VYLYNRYLNATACCKVVSNYVSFGLSKISSCFPQYCPLVKEYVINKWAQGGYFQSAAYMGNPPHIPTTIIISSSKGTYMLIGYIY

SEQ ID NO: 38796 - protein, 85 aa, unidentified
  REGION 1..85: note = Description of Unknown:cds_NZ_WFIY01000004.1_cds_WP_155862862.1_700 target sequence
KKPIILINFKAYENSFGKKGIDIAKKIEKVSIEYSTEVILSVPATMIPILSQEVSLPIYAQHVDPYPLGAHTGSLLPEMIKEAGA

SEQ ID NO: 38797 - protein, 85 aa, unidentified
  REGION 1..85: note = Description of Unknown:cds_NZ_WFIY01000004.1_cds_WP_155862862.1_700 target sequence
KGTLLNHSEKRIRADEIHDALIRLNRLGLESVVCVDRYELVEPMALLKPTAILIEPPELIGSGISVSKAKPEVITNAVKEISKVP

SEQ ID NO: 38798 - protein, 84 aa, unidentified
  REGION 1..84: note = Description of Unknown:cds_NZ_WFIY01000004.1_cds_WP_155862862.1_700 target sequence
GISVSKAKPEVITNAVKEISKVPGVFIIAGAGISSGDDVYTAVKLGADGIGVASAVMKAKEPEKVVEDFIKSGIKAMEEKNDRN

SEQ ID NO: 38799 - protein, 85 aa, unidentified
  REGION 1..85: note = Description of Unknown:cds_NZ_WFIY01000004.1_cds_WP_155862862.1_700 target sequence
EKVSIEYSTEVILSVPATMIPILSQEVSLPIYAQHVDPYPLGAHTGSLLPEMIKEAGAKGTLLNHSEKRIRADEIHDALIRLNRL

SEQ ID NO: 38800 - protein, 85 aa, unidentified
  REGION 1..85: note = Description of Unknown:cds_NZ_WFIY01000004.1_cds_WP_155862862.1_700 target sequence
GLESVVCVDRYELVEPMALLKPTAILIEPPELIGSGISVSKAKPEVITNAVKEISKVPGVFIIAGAGISSGDDVYTAVKLGADGI

SEQ ID NO: 38801 - protein, 85 aa, unidentified
  REGION 1..85: note = Description of Unknown:cds_NZ_WFIY01000004.1_cds_WP_155862924.1_776 target sequence
AKQDYVVIKYESHGERFEILAKPKEAMAFRSGKSISISDVVISDTIYKDVKKGLKASPSALKKVFGTTDFETVAREILLKGEMPI

SEQ ID NO: 38802 - protein, 85 aa, unidentified
  REGION 1..85: note = Description of Unknown:cds_NZ_WFIY01000004.1_cds_WP_155862924.1_776 target sequence
TAEQRKEMLESKKKQLIDFIHRNAIDPKTHLPIPPARIEAAMEEAKVQIDLNKDIESQALQIIHEIARIIPIKVARATLEIKVPA

SEQ ID NO: 38803 - protein, 84 aa, unidentified
  REGION 1..84: note = Description of Unknown:cds_NZ_WFIY01000004.1_cds_WP_155862924.1_776 target sequence
IHEIARIIPIKVARATLEIKVPAKYSSKVKSQLSNLGSVKKTNWLNDGTLIAEIEIPAGAQEEVIDKLNSLTKGEVEVKVLQVV

SEQ ID NO: 38804 - protein, 85 aa, unidentified
  REGION 1..85: note = Description of Unknown:cds_NZ_WFIY01000004.1_cds_WP_155862924.1_776 target sequence
AFRSGKSISISDVVISDTIYKDVKKGLKASPSALKKVFGTTDFETVAREILLKGEMPITAEQRKEMLESKKKQLIDFIHRNAIDP

SEQ ID NO: 38805 - protein, 85 aa, unidentified
  REGION 1..85: note = Description of Unknown:cds_NZ_WFIY01000004.1_cds_WP_155862924.1_776 target sequence
KTHLPIPPARIEAAMEEAKVQIDLNKDIESQALQIIHEIARIIPIKVARATLEIKVPAKYSSKVKSQLSNLGSVKKTNWLNDGTL

SEQ ID NO: 38806 - protein, 85 aa, unidentified
  REGION 1..85: note = Description of Unknown:cds_NZ_WFIY01000004.1_cds_WP_155863113.1_1031 target sequence
VKEIYKGRIKVITDLWGKILDEWESLNRDSLISLVQKIYEDNKIKPFRGFKSTNLYEKELISVYVVGKEGLGLFNDYKQVFDKLF

SEQ ID NO: 38807 - protein, 85 aa, unidentified
  REGION 1..85: note = Description of Unknown:cds_NZ_WFIY01000004.1_cds_WP_155863113.1_1031 target sequence
SMEENYENIANLILNSPEEAFKKANEDKDLLARALRLIFVEVIFSFADESKLIDALRRLDSSTNDAIKHTAKSFSRFYTAFKLAE

SEQ ID NO: 38808 - protein, 84 aa, unidentified
  REGION 1..84: note = Description of Unknown:cds_NZ_WFIY01000004.1_cds_WP_155863113.1_1031 target sequence
TNDAIKHTAKSFSRFYTAFKLAEGIAEGSIRDKMNYIAMKKAISINIGIEYPLPKANYVALISQEVFNVKPKLIKKILEVSAKT

SEQ ID NO: 38809 - protein, 85 aa, unidentified
  REGION 1..85: note = Description of Unknown:cds_NZ_WFIY01000004.1_cds_WP_155863113.1_1031 target sequence
RDSLISLVQKIYEDNKIKPFRGFKSTNLYEKELISVYVVGKEGLGLFNDYKQVFDKLFSMEENYENIANLILNSPEEAFKKANED

SEQ ID NO: 38810 - protein, 85 aa, unidentified
  REGION 1..85: note = Description of Unknown:cds_NZ_WFIY01000004.1_cds_WP_155863113.1_1031 target sequence
KDLLARALRLIFVEVIFSFADESKLIDALRRLDSSTNDAIKHTAKSFSRFYTAFKLAEGIAEGSIRDKMNYIAMKKAISINIGIE

SEQ ID NO: 38811 - protein, 85 aa, unidentified
  REGION 1..85: note = Description of Unknown:cds_NZ_WFIY01000004.1_cds_WP_155863347.1_1317 target sequence
NEREEILRKIKNPELAEAFKKVDRAKFLPDNLKSYAYTYVDEPLPILPGVTTTALSLGIYMLDELNLHKGQKVLEIGTGIGYYTA

SEQ ID NO: 38812 - protein, 85 aa, unidentified
  REGION 1..85: note = Description of Unknown:cds_NZ_WFIY01000004.1_cds_WP_155863347.1_1317 target sequence
LIAEIVDKVVSVEINEEMYRYSSRLLSEYQNVKLVLGDGTLGYEEEKPFDRVIAWASTPTLLCKPYEQLEEGGIMILPMGVGKVQ

SEQ ID NO: 38813 - protein, 84 aa, unidentified
  REGION 1..84: note = Description of Unknown:cds_NZ_WFIY01000004.1_cds_WP_155863347.1_1317 target sequence
CKPYEQLEEGGIMILPMGVGKVQRLYKVIKKGYTPILENLGEVVFSRIRGLFGFYDDYEDDFESRLSRLERQVRSILSRLEKKV

SEQ ID NO: 38814 - protein, 85 aa, unidentified
  REGION 1..85: note = Description of Unknown:cds_NZ_WFIY01000004.1_cds_WP_155863347.1_1317 target sequence
LPDNLKSYAYTYVDEPLPILPGVTTTALSLGIYMLDELNLHKGQKVLEIGTGIGYYTALIAEIVDKVVSVEINEEMYRYSSRLLS

SEQ ID NO: 38815 - protein, 85 aa, unidentified
  REGION 1..85: note = Description of Unknown:cds_NZ_WFIY01000004.1_cds_WP_155863347.1_1317 target sequence
EYQNVKLVLGDGTLGYEEEKPFDRVIAWASTPTLLCKPYEQLEEGGIMILPMGVGKVQRLYKVIKKGYTPILENLGEVVFSRIRG

SEQ ID NO: 38816 - protein, 85 aa, unidentified
  REGION 1..85: note = Description of Unknown:cds_NZ_WFIY01000004.1_cds_WP_155863625.1_1522 target sequence
IGITDEGELARALTNTIDDEFIFIDSPKKVYETKPEIVIHTLEDNSNNASMWNLNTWFAINIAKAANKIGSLNVYFSTFMIYDGK

SEQ ID NO: 38817 - protein, 85 aa, unidentified
  REGION 1..85: note = Description of Unknown:cds_NZ_WFIY01000004.1_cds_WP_155863625.1_1522 target sequence
RGYYSETSTPSPLNYYGMTKLVGETAIASLGNYLILRLGAVYSPSYRGILFHIIKALIKKGIAKCNTNLYLSPISVKDVAYAVKY

SEQ ID NO: 38818 - protein, 84 aa, unidentified
  REGION 1..84: note = Description of Unknown:cds_NZ_WFIY01000004.1_cds_WP_155863625.1_1522 target sequence
AKCNTNLYLSPISVKDVAYAVKYLLKKDARGVINLAGKRFSEYDICRKFSDDYGGLIIPVEGKYFDFSLDNWLLRSFGLKIDGI

SEQ ID NO: 38819 - protein, 85 aa, unidentified
  REGION 1..85: note = Description of Unknown:cds_NZ_WFIY01000004.1_cds_WP_155863625.1_1522 target sequence
KKVYETKPEIVIHTLEDNSNNASMWNLNTWFAINIAKAANKIGSLNVYFSTFMIYDGKRGYYSETSTPSPLNYYGMTKLVGETAI

SEQ ID NO: 38820 - protein, 85 aa, unidentified
  REGION 1..85: note = Description of Unknown:cds_NZ_WFIY01000004.1_cds_WP_155863625.1_1522 target sequence
ASLGNYLILRLGAVYSPSYRGILFHIIKALIKKGIAKCNTNLYLSPISVKDVAYAVKYLLKKDARGVINLAGKRFSEYDICRKFS

SEQ ID NO: 38821 - protein, 85 aa, unidentified
  REGION 1..85: note = Description of Unknown:cds_NZ_WFIY01000004.1_cds_WP_155863764.1_1639 target sequence
KIEYAKNIFPKIMELLNRATDEITIATGGFSEDFIEAIINRAASGVQTTIITSDKNWARWLANQKISYKKDEENKIKKSYLRLRD

SEQ ID NO: 38822 - protein, 85 aa, unidentified
  REGION 1..85: note = Description of Unknown:cds_NZ_WFIY01000004.1_cds_WP_155863764.1_1639 target sequence
KIIIYSRLRYIILIISISILIVLLIRNTIHSLVTLISSIIIIIINIIQFIYIRNMIKVEESKLNMLNIEVQKTLDELTSTRNILA

SEQ ID NO: 38823 - protein, 84 aa, unidentified
  REGION 1..84: note = Description of Unknown:cds_NZ_WFIY01000004.1_cds_WP_155863764.1_1639 target sequence
LNMLNIEVQKTLDELTSTRNILAKKLNIIESNALSFSIVIIDNKSLLLSCNLNSKNSSDIIIYDEIQKNDAIKLISYITNLGKS

SEQ ID NO: 38824 - protein, 85 aa, unidentified
  REGION 1..85: note = Description of Unknown:cds_NZ_WFIY01000004.1_cds_WP_155863764.1_1639 target sequence
GGFSEDFIEAIINRAASGVQTTIITSDKNWARWLANQKISYKKDEENKIKKSYLRLRDKIIIYSRLRYIILIISISILIVLLIRN

SEQ ID NO: 38825 - protein, 85 aa, unidentified
  REGION 1..85: note = Description of Unknown:cds_NZ_WFIY01000004.1_cds_WP_155863764.1_1639 target sequence
TIHSLVTLISSIIIIIINIIQFIYIRNMIKVEESKLNMLNIEVQKTLDELTSTRNILAKKLNIIESNALSFSIVIIDNKSLLLSC

SEQ ID NO: 38826 - protein, 85 aa, unidentified
  REGION 1..85: note = Description of Unknown:cds_NZ_WFIY01000004.1_cds_1931 target sequence
VLKKKIIRAIDDFFQYKKSGDDEILNEVLDKIEYKNKYVIIDGEERIKVEKKKDVVGVFLANIPYIILGPGEIHDDLPEKVRKIQ

SEQ ID NO: 38827 - protein, 85 aa, unidentified
  REGION 1..85: note = Description of Unknown:cds_NZ_WFIY01000004.1_cds_1931 target sequence
SGAIKLLEIGGFNEIATLEIYLVMEMSLRALYSEWLKKAEYIKYGKTKVKVKNLDYRRLKLLLKRKGWSKYKVKVNGEVFPYSQG

SEQ ID NO: 38828 - protein, 84 aa, unidentified
  REGION 1..84: note = Description of Unknown:cds_NZ_WFIY01000004.1_cds_1931 target sequence
KRKGWSKYKVKVNGEVFPYSQGSLLAWAERFMDDKTSLAFRLAINVRNLLAHGEFEWNLYPTMKSLESASQASWLLFEKLRRAS

SEQ ID NO: 38829 - protein, 85 aa, unidentified
  REGION 1..85: note = Description of Unknown:cds_NZ_WFIY01000004.1_cds_1931 target sequence
VLDKIEYKNKYVIIDGEERIKVEKKKDVVGVFLANIPYIILGPGEIHDDLPEKVRKIQSGAIKLLEIGGFNEIATLEIYLVMEMS

SEQ ID NO: 38830 - protein, 85 aa, unidentified
  REGION 1..85: note = Description of Unknown:cds_NZ_WFIY01000004.1_cds_1931 target sequence
LRALYSEWLKKAEYIKYGKTKVKVKNLDYRRLKLLLKRKGWSKYKVKVNGEVFPYSQGSLLAWAERFMDDKTSLAFRLAINVRNL

SEQ ID NO: 38831 - protein, 85 aa, unidentified
  REGION 1..85: note = Description of Unknown:cds_NZ_WFIY01000004.1_cds_WP_155864065.1_2002 target sequence
LEINIFLPHLAYVEIDSMIFFPALLISILFKVKRYYKSLAFSIGIVAPLYIVWDFLATLKGSWSFNPKWILGIRIIDLPIEEVLF

SEQ ID NO: 38832 - protein, 85 aa, unidentified
  REGION 1..85: note = Description of Unknown:cds_NZ_WFIY01000004.1_cds_WP_155864065.1_2002 target sequence
FIVTPFATLLIYDFVMAKVSDRELNWITRKLMILIASLLLVIDLFLTRFSYTFIVLIYASLSILLVEFLDPEMFRSRNYWIFLGL

SEQ ID NO: 38833 - protein, 84 aa, unidentified
  REGION 1..84: note = Description of Unknown:cds_NZ_WFIY01000004.1_cds_WP_155864065.1_2002 target sequence
LLVEFLDPEMFRSRNYWIFLGLTYIPFLIFDYFLTSLPVVIYGPHSILGIRIFTIPIEDAIYSFSMINFYTLFYRRGVKLWNSA

SEQ ID NO: 38834 - protein, 85 aa, unidentified
  REGION 1..85: note = Description of Unknown:cds_NZ_WFIY01000004.1_cds_WP_155864065.1_2002 target sequence
ILFKVKRYYKSLAFSIGIVAPLYIVWDFLATLKGSWSFNPKWILGIRIIDLPIEEVLFFIVTPFATLLIYDFVMAKVSDRELNWI

SEQ ID NO: 38835 - protein, 85 aa, unidentified
  REGION 1..85: note = Description of Unknown:cds_NZ_WFIY01000004.1_cds_WP_155864065.1_2002 target sequence
TRKLMILIASLLLVIDLFLTRFSYTFIVLIYASLSILLVEFLDPEMFRSRNYWIFLGLTYIPFLIFDYFLTSLPVVIYGPHSILG

SEQ ID NO: 38836 - protein, 85 aa, unidentified
  REGION 1..85: note = Description of Unknown:cds_NC_003214.2_cds_NP_445671.1_6 target sequence
FTKRNKQKDNRRKNGKGVMQMIKEEIIKAFKKMHEQHPPRGEKTVYVTDLLHCVLRPEEEIPPIQLIRGTVIHEGIEKLLKHYSE

SEQ ID NO: 38837 - protein, 85 aa, unidentified
  REGION 1..85: note = Description of Unknown:cds_NC_003214.2_cds_NP_445671.1_6 target sequence
LEIEFEKEVKKQYGEYTLMGRLDGITKDGTIIEFKSVHVPPEFPYEQHIYQVLIYIHMTEAKQGIIVYIGSNEIEEFLIKRDKVG

SEQ ID NO: 38838 - protein, 84 aa, unidentified
  REGION 1..84: note = Description of Unknown:cds_NC_003214.2_cds_NP_445671.1_6 target sequence
QGIIVYIGSNEIEEFLIKRDKVGKIETWVVERMETGEITFAQYDINDEWIYKQIIAYVTKTLIAPFQECKFCKLNKSCKFSKIR

SEQ ID NO: 38839 - protein, 85 aa, unidentified
  REGION 1..85: note = Description of Unknown:cds_NC_003214.2_cds_NP_445671.1_6 target sequence
KAFKKMHEQHPPRGEKTVYVTDLLHCVLRPEEEIPPIQLIRGTVIHEGIEKLLKHYSELEIEFEKEVKKQYGEYTLMGRLDGITK

SEQ ID NO: 38840 - protein, 85 aa, unidentified
  REGION 1..85: note = Description of Unknown:cds_NC_003214.2_cds_NP_445671.1_6 target sequence
DGTIIEFKSVHVPPEFPYEQHIYQVLIYIHMTEAKQGIIVYIGSNEIEEFLIKRDKVGKIETWVVERMETGEITFAQYDINDEWI

SEQ ID NO: 38841 - protein, 85 aa, unidentified
  REGION 1..85: note = Description of Unknown:cds_NC_003214.2_cds_NP_445714.1_49 target sequence
SYTTPTYTASVSNDILRYMMAYATGNDGCIQSMSALFQSSGESIIAYNVSASSTTQAGFFFQLQNVPQGIGVQIVFFSTTIPQNT

SEQ ID NO: 38842 - protein, 85 aa, unidentified
  REGION 1..85: note = Description of Unknown:cds_NC_003214.2_cds_NP_445714.1_49 target sequence
FFIDLRFTTTQGNTYQLAQVNTLPPNTNYALVIIVSLTITVQPASNVNISPLLQAFTSFASNQCATAQPPSLSYTGNGFTVFYEN

SEQ ID NO: 38843 - protein, 84 aa, unidentified
  REGION 1..84: note = Description of Unknown:cds_NC_003214.2_cds_NP_445714.1_49 target sequence
QCATAQPPSLSYTGNGFTVFYENTYTSGITFNAILIAQNTLTSSNTIQITATINGNVVATATISTPALGYAYFLFTLTLVFTSE

SEQ ID NO: 38844 - protein, 85 aa, unidentified
  REGION 1..85: note = Description of Unknown:cds_NC_003214.2_cds_NP_445714.1_49 target sequence
GCIQSMSALFQSSGESIIAYNVSASSTTQAGFFFQLQNVPQGIGVQIVFFSTTIPQNTFFIDLRFTTTQGNTYQLAQVNTLPPNT

SEQ ID NO: 38845 - protein, 85 aa, unidentified
  REGION 1..85: note = Description of Unknown:cds_NC_003214.2_cds_NP_445714.1_49 target sequence
NYALVIIVSLTITVQPASNVNISPLLQAFTSFASNQCATAQPPSLSYTGNGFTVFYENTYTSGITFNAILIAQNTLTSSNTIQIT

SEQ ID NO: 38846 - protein, 85 aa, unidentified
  REGION 1..85: note = Description of Unknown:hvTR_Q6TVT1 target sequence
TFRELILFHAATHVVTGDPEAPRRAASLCHGFGVDFRAIHAEFARRYPRTAAAVERAQPLPEVDAAFPPDARRQVVRLRLEAAAL

SEQ ID NO: 38847 - protein, 85 aa, unidentified
  REGION 1..85: note = Description of Unknown:hvTR_Q6TVT1 target sequence
VVKESRALSASMRGVAVVDGCCVRVCRANDELLEFLARRYDPAVYRYAEVPSPSVRPGSKVFACAGRSVTFAAAHQSRITANRPL

SEQ ID NO: 38848 - protein, 84 aa, unidentified
  REGION 1..84: note = Description of Unknown:hvTR_Q6TVT1 target sequence
FACAGRSVTFAAAHQSRITANRPLRVVVTEACVDGVLARGAAEVFDRGSGVLPRALREIFYRLDEDGCPTGQTPGFADSMASRS

SEQ ID NO: 38849 - protein, 85 aa, unidentified
  REGION 1..85: note = Description of Unknown:hvTR_Q6TVT1 target sequence
LCHGFGVDFRAIHAEFARRYPRTAAAVERAQPLPEVDAAFPPDARRQVVRLRLEAAALVVKESRALSASMRGVAVVDGCCVRVCR

SEQ ID NO: 38850 - protein, 85 aa, unidentified
  REGION 1..85: note = Description of Unknown:hvTR_Q6TVT1 target sequence
ANDELLEFLARRYDPAVYRYAEVPSPSVRPGSKVFACAGRSVTFAAAHQSRITANRPLRVVVTEACVDGVLARGAAEVFDRGSGV

SEQ ID NO: 38851 - protein, 85 aa, unidentified
  REGION 1..85: note = Description of Unknown:cds_NZ_WFIY01000004.1_cds_WP_162309142.1_8 target sequence
YLIAEVYVSPSNNAVIPPFTSKVGKTMLGGVKDGISVSPLKKGGKYLVKYSNLPTLMEVEEGEIYSFEVGGKSEDVVEALINLQE

SEQ ID NO: 38852 - protein, 85 aa, unidentified
  REGION 1..85: note = Description of Unknown:cds_NZ_WFIY01000004.1_cds_WP_162309142.1_8 target sequence
RKAFNTTWKVENVKMREVKVERKDLVEVELLTPALLVDPFKKDRKKRFTNAFFVTFAVNYMDHFHVSREEYVRVALSLEEKVREE

SEQ ID NO: 38853 - protein, 84 aa, unidentified
  REGION 1..84: note = Description of Unknown:cds_NZ_WFIY01000004.1_cds_WP_162309142.1_8 target sequence
DHFHVSREEYVRVALSLEEKVREEPSTMKYVKVTYAGKEVLGMMGKFRYSILEKDEEIYAVLENALAKGIGSSRKNGFGRISLK

SEQ ID NO: 38854 - protein, 85 aa, unidentified
  REGION 1..85: note = Description of Unknown:cds_NZ_WFIY01000004.1_cds_WP_162309142.1_8 target sequence
LGGVKDGISVSPLKKGGKYLVKYSNLPTLMEVEEGEIYSFEVGGKSEDVVEALINLQERKAFNTTWKVENVKMREVKVERKDLVE

SEQ ID NO: 38855 - protein, 85 aa, unidentified
  REGION 1..85: note = Description of Unknown:cds_NZ_WFIY01000004.1_cds_WP_162309142.1_8 target sequence
VELLTPALLVDPFKKDRKKRFTNAFFVTFAVNYMDHFHVSREEYVRVALSLEEKVREEPSTMKYVKVTYAGKEVLGMMGKFRYSI

SEQ ID NO: 38856 - protein, 85 aa, unidentified
  REGION 1..85: note = Description of Unknown:cds_NZ_WFIY01000004.1_cds_WP_155862869.1_707 target sequence
LVTTPFAGPVSFPLLVAKELGGEQINLKNSCETNEIGDIVLDSITNIAKLKVKGYKIVAGVYIDMYSILGNKNSTKLYTIRAGTL

SEQ ID NO: 38857 - protein, 85 aa, unidentified
  REGION 1..85: note = Description of Unknown:cds_NZ_WFIY01000004.1_cds_WP_155862869.1_707 target sequence
ADINARLYAKYTSKEVINTDAETAVKKSEEGNLAIVGIEIKLGEKLEDELDKLGLRAPSCVIYSKVDPTSLLKIYEKGINIIRKD

SEQ ID NO: 38858 - protein, 84 aa, unidentified
  REGION 1..84: note = Description of Unknown:cds_NZ_WFIY01000004.1_cds_WP_155862869.1_707 target sequence
IYSKVDPTSLLKIYEKGINIIRKDPKNSARVISSLSKYYTLNVMENIIEHYNHRLTTNFHELKKSIEVYSQIVPSVADLQLGFS

SEQ ID NO: 38859 - protein, 85 aa, unidentified
  REGION 1..85: note = Description of Unknown:cds_NZ_WFIY01000004.1_cds_WP_155862869.1_707 target sequence
KNSCETNEIGDIVLDSITNIAKLKVKGYKIVAGVYIDMYSILGNKNSTKLYTIRAGTLADINARLYAKYTSKEVINTDAETAVKK

SEQ ID NO: 38860 - protein, 85 aa, unidentified
  REGION 1..85: note = Description of Unknown:cds_NZ_WFIY01000004.1_cds_WP_155862869.1_707 target sequence
SEEGNLAIVGIEIKLGEKLEDELDKLGLRAPSCVIYSKVDPTSLLKIYEKGINIIRKDPKNSARVISSLSKYYTLNVMENIIEHY

SEQ ID NO: 38861 - protein, 85 aa, unidentified
  REGION 1..85: note = Description of Unknown:cds_NZ_WFIY01000004.1_cds_WP_155863065.1_970 target sequence
FKDNDFVYIDYVSKIKDTGEVIDTTIEEEAKKANIYNPEKKYKPLLVIIGEHRVLEGLEEALRNFNEGEQKEIEIPPSKAYGERD

SEQ ID NO: 38862 - protein, 85 aa, unidentified
  REGION 1..85: note = Description of Unknown:cds_NZ_WFIY01000004.1_cds_WP_155863065.1_970 target sequence
PSKVKLVSLGELKRQGINPRPNMVIRLAEGGYATVKSVSGGRVILDLNHPYAGKTIVYNVKVVKVLKDEKEKIQALVERWFGENS

SEQ ID NO: 38863 - protein, 84 aa, unidentified
  REGION 1..84: note = Description of Unknown:cds_NZ_WFIY01000004.1_cds_WP_155863065.1_970 target sequence
VVKVLKDEKEKIQALVERWFGENSKMTFELTEDKKSVKFEVPKDYFLLEDLQTRKYVLAKDIITFVLPESVVSFVENYNKDTFK

SEQ ID NO: 38864 - protein, 85 aa, unidentified
  REGION 1..85: note = Description of Unknown:cds_NZ_WFIY01000004.1_cds_WP_155863065.1_970 target sequence
EEAKKANIYNPEKKYKPLLVIIGEHRVLEGLEEALRNFNEGEQKEIEIPPSKAYGERDPSKVKLVSLGELKRQGINPRPNMVIRL

SEQ ID NO: 38865 - protein, 85 aa, unidentified
  REGION 1..85: note = Description of Unknown:cds_NZ_WFIY01000004.1_cds_WP_155863065.1_970 target sequence
AEGGYATVKSVSGGRVILDLNHPYAGKTIVYNVKVVKVLKDEKEKIQALVERWFGENSKMTFELTEDKKSVKFEVPKDYFLLEDL

SEQ ID NO: 38866 - protein, 85 aa, unidentified
  REGION 1..85: note = Description of Unknown:cds_NZ_WFIY01000004.1_cds_WP_155863136.1_1057 target sequence
RFICPYDGTPVNDKLECGKGHKFMYHDGIYDFLVNSDVKGDKLLERIAPIYDKIWAPLGFFLTSFYSYNKIFKDAGEFLSSQSFL

SEQ ID NO: 38867 - protein, 85 aa, unidentified
  REGION 1..85: note = Description of Unknown:cds_NZ_WFIY01000004.1_cds_WP_155863136.1_1057 target sequence
DIGTGPGIIFKYVKCEYCVGLDISTKFLSILKKKFSHVIAVRADAISLPIESASMDSVSSFLVLHMLSNPSLAIKEISRVLKPNG

SEQ ID NO: 38868 - protein, 84 aa, unidentified
  REGION 1..84: note = Description of Unknown:cds_NZ_WFIY01000004.1_cds_WP_155863136.1_1057 target sequence
LVLHMLSNPSLAIKEISRVLKPNGRCEILVLVKSNFISSFLSKWWKIELRHKDYYLSAIRENKLTLLESKKYGPWLLLKCKKTN

SEQ ID NO: 38869 - protein, 85 aa, unidentified
  REGION 1..85: note = Description of Unknown:cds_NZ_WFIY01000004.1_cds_WP_155863136.1_1057 target sequence
GIYDFLVNSDVKGDKLLERIAPIYDKIWAPLGFFLTSFYSYNKIFKDAGEFLSSQSFLDIGTGPGIIFKYVKCEYCVGLDISTKF

SEQ ID NO: 38870 - protein, 85 aa, unidentified
  REGION 1..85: note = Description of Unknown:cds_NZ_WFIY01000004.1_cds_WP_155863136.1_1057 target sequence
LSILKKKFSHVIAVRADAISLPIESASMDSVSSFLVLHMLSNPSLAIKEISRVLKPNGRCEILVLVKSNFISSFLSKWWKIELRH

SEQ ID NO: 38871 - protein, 85 aa, unidentified
  REGION 1..85: note = Description of Unknown:hvTR_P03256.2 target sequence
ETLVTPGVVVESGRGGKKLPDLGAAEMDLRCYEEGFPPSDDEDGETEQSIHTAVNEGVKAASDVFKLDCPELPGHGCPVSDDESP

SEQ ID NO: 38872 - protein, 84 aa, unidentified
  REGION 1..84: note = Description of Unknown:hvTR_P03256.2 target sequence
ASDVFKLDCPELPGHGCPVSDDESPSPDSTTSPPEIQAPAPANVCKPIPVKPKPGKRPAVDKLEDLLEGGDGPLDLSTRKLPRQ

SEQ ID NO: 38873 - protein, 85 aa, unidentified
  REGION 1..85: note = Description of Unknown:hvTR_P03256.2 target sequence
DLRCYEEGFPPSDDEDGETEQSIHTAVNEGVKAASDVFKLDCPELPGHGCPVSDDESPSPDSTTSPPEIQAPAPANVCKPIPVKP

SEQ ID NO: 38874 - protein, 85 aa, unidentified
  REGION 1..85: note = Description of Unknown:hvTR_P03496 target sequence
DPNTVSSFQVDCFLWHVRKRVADQELGDAPFLDRLRRDQKSLRGRGSTLGLDIETATRAGKQIVERILKEESDEALKMTMASVPA

SEQ ID NO: 38875 - protein, 85 aa, unidentified
  REGION 1..85: note = Description of Unknown:hvTR_P03496 target sequence
SRYLTDMTLEEMSREWSMLIPKQKVAGPLCIRMDQAIMDKNIILKANFSVIFDRLETLILLRAFTEEGAIVGEISPLPSLPGHTA

SEQ ID NO: 38876 - protein, 84 aa, unidentified
  REGION 1..84: note = Description of Unknown:hvTR_P03496 target sequence
LRAFTEEGAIVGEISPLPSLPGHTAEDVKNAVGVLIGGLEWNDNTVRVSETLQRFAWRSSNENGRPPLTPKQKREMAGTIRSEV

SEQ ID NO: 38877 - protein, 85 aa, unidentified
  REGION 1..85: note = Description of Unknown:hvTR_P03496 target sequence
DAPFLDRLRRDQKSLRGRGSTLGLDIETATRAGKQIVERILKEESDEALKMTMASVPASRYLTDMTLEEMSREWSMLIPKQKVAG

SEQ ID NO: 38878 - protein, 85 aa, unidentified
  REGION 1..85: note = Description of Unknown:hvTR_P03496 target sequence
PLCIRMDQAIMDKNIILKANFSVIFDRLETLILLRAFTEEGAIVGEISPLPSLPGHTAEDVKNAVGVLIGGLEWNDNTVRVSETL

SEQ ID NO: 38879 - protein, 85 aa, unidentified
  REGION 1..85: note = Description of Unknown:cds_NZ_WFIY01000004.1_cds_WP_155862330.1_56 target sequence
ALITAKPGDLGEKAIIVGNLQRMRTVSSLLEDSKLVSEFAGYYTYVGKYKGEKVSVVFHGIGIPSLTLVTHDLYNLGVKEIIRFG

SEQ ID NO: 38880 - protein, 85 aa, unidentified
  REGION 1..85: note = Description of Unknown:cds_NZ_WFIY01000004.1_cds_WP_155862330.1_56 target sequence
SATGLKDVKPGEVVVPIGYSYNLGGTFYQYLNGEFTAYALTPDYELLNKVVNNLKAKQLKVRVGNVFTSDALFTHSKEFLDKLSS

SEQ ID NO: 38881 - protein, 84 aa, unidentified
  REGION 1..84: note = Description of Unknown:cds_NZ_WFIY01000004.1_cds_WP_155862330.1_56 target sequence
VRVGNVFTSDALFTHSKEFLDKLSSRNHIAVELEGAGLYFLSNLLGFKAVSVHLIYRNANGESMPAEDINKTEKIIAEALLESL

SEQ ID NO: 38882 - protein, 85 aa, unidentified
  REGION 1..85: note = Description of Unknown:cds_NZ_WFIY01000004.1_cds_WP_155862330.1_56 target sequence
SLLEDSKLVSEFAGYYTYVGKYKGEKVSVVFHGIGIPSLTLVTHDLYNLGVKEIIRFGSATGLKDVKPGEVVVPIGYSYNLGGTF

SEQ ID NO: 38883 - protein, 85 aa, unidentified
  REGION 1..85: note = Description of Unknown:cds_NZ_WFIY01000004.1_cds_WP_155862330.1_56 target sequence
YQYLNGEFTAYALTPDYELLNKVVNNLKAKQLKVRVGNVFTSDALFTHSKEFLDKLSSRNHIAVELEGAGLYFLSNLLGFKAVSV

SEQ ID NO: 38884 - protein, 85 aa, unidentified
  REGION 1..85: note = Description of Unknown:cds_NZ_WFIY01000004.1_cds_WP_155862353.1_84 target sequence
NIFEEFYLKTQNFTFTVIPDNYPKEYNNVKIIPLPKPREIVESFHKVITTRSSVRRFTEEKVDINVISDLLYYSVGVRKKEGEVI

SEQ ID NO: 38885 - protein, 85 aa, unidentified
  REGION 1..85: note = Description of Unknown:cds_NZ_WFIY01000004.1_cds_WP_155862353.1_84 target sequence
YRMFPSAGGLAETEVYLVPFISDLEVGIYHYNPLSHSLEKLNTEIELEILKSDIVSSIPDINVIPLLIILTARYWKTLAKYGNRG

SEQ ID NO: 38886 - protein, 84 aa, unidentified
  REGION 1..84: note = Description of Unknown:cds_NZ_WFIY01000004.1_cds_WP_155862353.1_84 target sequence
INVIPLLIILTARYWKTLAKYGNRGARFVFIDIGIVMENFYLVATALKLGICAVGGFNDYIFNRALDLKNNEAVLGILVVGKRN

SEQ ID NO: 38887 - protein, 85 aa, unidentified
  REGION 1..85: note = Description of Unknown:cds_NZ_WFIY01000004.1_cds_WP_155862353.1_84 target sequence
NVKIIPLPKPREIVESFHKVITTRSSVRRFTEEKVDINVISDLLYYSVGVRKKEGEVIYRMFPSAGGLAETEVYLVPFISDLEVG

SEQ ID NO: 38888 - protein, 85 aa, unidentified
  REGION 1..85: note = Description of Unknown:cds_NZ_WFIY01000004.1_cds_WP_155862353.1_84 target sequence
IYHYNPLSHSLEKLNTEIELEILKSDIVSSIPDINVIPLLIILTARYWKTLAKYGNRGARFVFIDIGIVMENFYLVATALKLGIC

SEQ ID NO: 38889 - protein, 85 aa, unidentified
  REGION 1..85: note = Description of Unknown:cds_NZ_WFIY01000004.1_cds_WP_155862735.1_542 target sequence
KITFLGTGSGSTVGSRRAKSSIMISEGGDSIILDMGNGANSNLEDLGFPDINSVFLTHLHIDHINGIFDYLVQRKIRRMNDVKIY

SEQ ID NO: 38890 - protein, 85 aa, unidentified
  REGION 1..85: note = Description of Unknown:cds_NZ_WFIY01000004.1_cds_WP_155862735.1_542 target sequence
SPPGFSKLLNTYKDIGNNISAEVYESNLPKAKIGNLEVYSVEACHAIYAVAYVVTNGEKKIVYSGDTSEPCEGIIEESKDADLII

SEQ ID NO: 38891 - protein, 84 aa, unidentified
  REGION 1..84: note = Description of Unknown:cds_NZ_WFIY01000004.1_cds_WP_155862735.1_542 target sequence
IVYSGDTSEPCEGIIEESKDADLIIHEATCIEGCEIYGHTPLPKLKEIFNKKRIIITHIPSQIEDKYSNLGDFILAFDGLIWNV

SEQ ID NO: 38892 - protein, 85 aa, unidentified
  REGION 1..85: note = Description of Unknown:cds_NZ_WFIY01000004.1_cds_WP_155862735.1_542 target sequence
GDSIILDMGNGANSNLEDLGFPDINSVFLTHLHIDHINGIFDYLVQRKIRRMNDVKIYSPPGFSKLLNTYKDIGNNISAEVYESN

SEQ ID NO: 38893 - protein, 85 aa, unidentified
  REGION 1..85: note = Description of Unknown:cds_NZ_WFIY01000004.1_cds_WP_155862735.1_542 target sequence
LPKAKIGNLEVYSVEACHAIYAVAYVVTNGEKKIVYSGDTSEPCEGIIEESKDADLIIHEATCIEGCEIYGHTPLPKLKEIFNKK

SEQ ID NO: 38894 - protein, 85 aa, unidentified
  REGION 1..85: note = Description of Unknown:cds_NZ_WFIY01000004.1_cds_WP_155862917.1_768 target sequence
LRIYVDNREKNSGIPEILKDMGISVIIEQLDVADYVLADGVAVERKSVSDLVNSVFDKRFFDQIDRLTSAYETSFLLIEGNLNRI

SEQ ID NO: 38895 - protein, 85 aa, unidentified
  REGION 1..85: note = Description of Unknown:cds_NZ_WFIY01000004.1_cds_WP_155862917.1_768 target sequence
REITEKWKAINSALISIIVDYDVKVIYSSDKRDTAEVLVKLAEKFQEHRSKNRIINLHDKPKFESIKDIQLYVVESFPNIGEVNA

SEQ ID NO: 38896 - protein, 84 aa, unidentified
  REGION 1..84: note = Description of Unknown:cds_NZ_WFIY01000004.1_cds_WP_155862917.1_768 target sequence
PKFESIKDIQLYVVESFPNIGEVNAKKLLEKFSTIRNICNASISDLERALGSRKRAEELYKILITPYSPQSSNSNNKKSLMDFI

SEQ ID NO: 38897 - protein, 85 aa, unidentified
  REGION 1..85: note = Description of Unknown:cds_NZ_WFIY01000004.1_cds_WP_155862917.1_768 target sequence
EQLDVADYVLADGVAVERKSVSDLVNSVFDKRFFDQIDRLTSAYETSFLLIEGNLNRIREITEKWKAINSALISIIVDYDVKVIY

SEQ ID NO: 38898 - protein, 85 aa, unidentified
  REGION 1..85: note = Description of Unknown:cds_NZ_WFIY01000004.1_cds_WP_155862917.1_768 target sequence
SSDKRDTAEVLVKLAEKFQEHRSKNRIINLHDKPKFESIKDIQLYVVESFPNIGEVNAKKLLEKFSTIRNICNASISDLERALGS

SEQ ID NO: 38899 - protein, 85 aa, unidentified
  REGION 1..85: note = Description of Unknown:cds_NZ_WFIY01000004.1_cds_WP_155863085.1_998 target sequence
KTLVIKLTDEEYKQLEEEASRQGFAILSYYVKYKLLSSPLNDGMNISTTTSSNITPQIIDEITKKLERKIQDMVNPFTAEVENLK

SEQ ID NO: 38900 - protein, 85 aa, unidentified
  REGION 1..85: note = Description of Unknown:cds_NZ_WFIY01000004.1_cds_WP_155863085.1_998 target sequence
QKIADLSEKIDEIESKKSEESEAKYEKTRQYSQPTGEKKKTVMDILKSQGAIYESEVKLKNPDLFFEKIEKQGGKVLYTDKERIA

SEQ ID NO: 38901 - protein, 84 aa, unidentified
  REGION 1..84: note = Description of Unknown:cds_NZ_WFIY01000004.1_cds_WP_155863085.1_998 target sequence
NPDLFFEKIEKQGGKVLYTDKERIAVDVDFFNNFVKKLSDIHTPDDVEAQKYLTKQEHKLFQKLRQLGIIYFDNNAKAWKLSGI

SEQ ID NO: 38902 - protein, 85 aa, unidentified
  REGION 1..85: note = Description of Unknown:cds_NZ_WFIY01000004.1_cds_WP_155863085.1_998 target sequence
SYYVKYKLLSSPLNDGMNISTTTSSNITPQIIDEITKKLERKIQDMVNPFTAEVENLKQKIADLSEKIDEIESKKSEESEAKYEK

SEQ ID NO: 38903 - protein, 85 aa, unidentified
  REGION 1..85: note = Description of Unknown:cds_NZ_WFIY01000004.1_cds_WP_155863085.1_998 target sequence
TRQYSQPTGEKKKTVMDILKSQGAIYESEVKLKNPDLFFEKIEKQGGKVLYTDKERIAVDVDFFNNFVKKLSDIHTPDDVEAQKY

SEQ ID NO: 38904 - protein, 85 aa, unidentified
  REGION 1..85: note = Description of Unknown:cds_NZ_WFIY01000004.1_cds_WP_155863143.1_1066 target sequence
LKFKLSKVTSTQDFAEAISSMLYEDFLVTAEEQTKARGRYKRAWYSPKGGLWFTYVKKNFNVEEIPVATLKVSLAVRDVLSSFFD

SEQ ID NO: 38905 - protein, 85 aa, unidentified
  REGION 1..85: note = Description of Unknown:cds_NZ_WFIY01000004.1_cds_WP_155863143.1_1066 target sequence
AKIRWPNDVVVNDKKVSGILIEAIYAGDVTDLFIGVGINTNVKEFPPDIKATSILMETGKEVNNDELLNEVISKIDYYLSLKEDF

SEQ ID NO: 38906 - protein, 84 aa, unidentified
  REGION 1..84: note = Description of Unknown:cds_NZ_WFIY01000004.1_cds_WP_155863143.1_1066 target sequence
EVNNDELLNEVISKIDYYLSLKEDFEEIVSKINNYLSIKNKKVVITRRDETKVECTALFVDKFGRLVTDCGIFEVEDILRVESK

SEQ ID NO: 38907 - protein, 85 aa, unidentified
  REGION 1..85: note = Description of Unknown:cds_NZ_WFIY01000004.1_cds_WP_155863143.1_1066 target sequence
VTAEEQTKARGRYKRAWYSPKGGLWFTYVKKNFNVEEIPVATLKVSLAVRDVLSSFFDAKIRWPNDVVVNDKKVSGILIEAIYAG

SEQ ID NO: 38908 - protein, 85 aa, unidentified
  REGION 1..85: note = Description of Unknown:cds_NZ_WFIY01000004.1_cds_WP_155863143.1_1066 target sequence
DVTDLFIGVGINTNVKEFPPDIKATSILMETGKEVNNDELLNEVISKIDYYLSLKEDFEEIVSKINNYLSIKNKKVVITRRDETK

SEQ ID NO: 38909 - protein, 85 aa, unidentified
  REGION 1..85: note = Description of Unknown:cds_NZ_WFIY01000004.1_cds_WP_155864250.1_2241 target sequence
LPIPELEKPIIKGVIEKEKVVVDGIELDGTWNAFLVERTQTGYDPSVWDEIANTLEGVTISACWQCGTCTSGCTMREYDPNFGPR

SEQ ID NO: 38910 - protein, 85 aa, unidentified
  REGION 1..85: note = Description of Unknown:cds_NZ_WFIY01000004.1_cds_WP_155864250.1_2241 target sequence
KFIDLARKGDKQALAELQDSLWRCVSCQKCTHRCPKGVMVEEVVHAIHNYALKHGLVKKDPGTVFDELFLDTVMKNGGRISELLL

SEQ ID NO: 38911 - protein, 84 aa, unidentified
  REGION 1..84: note = Description of Unknown:cds_NZ_WFIY01000004.1_cds_WP_155864250.1_2241 target sequence
GTVFDELFLDTVMKNGGRISELLLGSAAAKAGFVTMSLRDLITMSVPLIKSGLIKDLLKPNKVKNWDRIKTVLEEAMKEEVRPE

SEQ ID NO: 38912 - protein, 85 aa, unidentified
  REGION 1..85: note = Description of Unknown:cds_NZ_WFIY01000004.1_cds_WP_155864250.1_2241 target sequence
DGTWNAFLVERTQTGYDPSVWDEIANTLEGVTISACWQCGTCTSGCTMREYDPNFGPRKFIDLARKGDKQALAELQDSLWRCVSC

SEQ ID NO: 38913 - protein, 85 aa, unidentified
  REGION 1..85: note = Description of Unknown:cds_NZ_WFIY01000004.1_cds_WP_155864250.1_2241 target sequence
QKCTHRCPKGVMVEEVVHAIHNYALKHGLVKKDPGTVFDELFLDTVMKNGGRISELLLGSAAAKAGFVTMSLRDLITMSVPLIKS

SEQ ID NO: 38914 - protein, 85 aa, unidentified
  REGION 1..85: note = Description of Unknown:cds_NZ_WFIY01000004.1_cds_WP_155864294.1_2287 target sequence
LLTKGIRIIELFEPEFFGTVLNHNVTIVEKGPSGGLMMIDTGLPGYLDIIEKGLKSFGYSLEDISDVVITHYHIDHSGNAEEIKK

SEQ ID NO: 38915 - protein, 85 aa, unidentified
  REGION 1..85: note = Description of Unknown:cds_NZ_WFIY01000004.1_cds_WP_155864294.1_2287 target sequence
ISKAKVYAHENEIPYLSKNEQKFNLKYDDVKDELKVSEEDFERTMKRINSMKFSPVSVDVKLKGGEKIGSFKVINVPGHTPGHIA

SEQ ID NO: 38916 - protein, 84 aa, unidentified
  REGION 1..84: note = Description of Unknown:cds_NZ_WFIY01000004.1_cds_WP_155864294.1_2287 target sequence
KLKGGEKIGSFKVINVPGHTPGHIALYDGNLLIVGDAVRNIKGKILPPFKFFCWNYEKAVNSFNNLLSMKFKYLVPFHGDIIFF

SEQ ID NO: 38917 - protein, 85 aa, unidentified
  REGION 1..85: note = Description of Unknown:cds_NZ_WFIY01000004.1_cds_WP_155864294.1_2287 target sequence
VEKGPSGGLMMIDTGLPGYLDIIEKGLKSFGYSLEDISDVVITHYHIDHSGNAEEIKKISKAKVYAHENEIPYLSKNEQKFNLKY

SEQ ID NO: 38918 - protein, 85 aa, unidentified
  REGION 1..85: note = Description of Unknown:cds_NZ_WFIY01000004.1_cds_WP_155864294.1_2287 target sequence
DDVKDELKVSEEDFERTMKRINSMKFSPVSVDVKLKGGEKIGSFKVINVPGHTPGHIALYDGNLLIVGDAVRNIKGKILPPFKFF

SEQ ID NO: 38919 - protein, 85 aa, unidentified
  REGION 1..85: note = Description of Unknown:cds_NC_035460.1_cds_YP_009407958.1_7 target sequence
KTFIVFVFGISTLFAKPVIESTCNEKYENIWINSLHFCIEKNPSYISDDEHCSAIYGAGGMTAFGYGYSFTIYNNCEETATTNSF

SEQ ID NO: 38920 - protein, 85 aa, unidentified
  REGION 1..85: note = Description of Unknown:cds_NC_035460.1_cds_YP_009407958.1_7 target sequence
YGFKENEHTFVSYTDDDTTSGNPKAKCSKNFTAVIGCNKGVSELNYKSKLYNIQERGIQLLVVYDITCVNDINAEINLLNLCDAT

SEQ ID NO: 38921 - protein, 84 aa, unidentified
  REGION 1..84: note = Description of Unknown:cds_NC_035460.1_cds_YP_009407958.1_7 target sequence
LVVYDITCVNDINAEINLLNLCDATTKSFDHSYSSNGNSFTCGNINLYKGKYCPKFSNKHTDTYYKTTKQKSKEVAQTFNREEL

SEQ ID NO: 38922 - protein, 85 aa, unidentified
  REGION 1..85: note = Description of Unknown:cds_NC_035460.1_cds_YP_009407958.1_7 target sequence
ENIWINSLHFCIEKNPSYISDDEHCSAIYGAGGMTAFGYGYSFTIYNNCEETATTNSFYGFKENEHTFVSYTDDDTTSGNPKAKC

SEQ ID NO: 38923 - protein, 85 aa, unidentified
  REGION 1..85: note = Description of Unknown:cds_NC_035460.1_cds_YP_009407958.1_7 target sequence
SKNFTAVIGCNKGVSELNYKSKLYNIQERGIQLLVVYDITCVNDINAEINLLNLCDATTKSFDHSYSSNGNSFTCGNINLYKGKY

SEQ ID NO: 38924 - protein, 85 aa, unidentified
  REGION 1..85: note = Description of Unknown:cds_NZ_WFIY01000004.1_cds_WP_155862392.1_129 target sequence
KAVILAGGYGKRLRPLTDDKPKPLIEIAGKPILEWQILWLKSFGISSFIILAGYKKEVLVEWVTKNKTRLGIECLFSMEEEPLGT

SEQ ID NO: 38925 - protein, 85 aa, unidentified
  REGION 1..85: note = Description of Unknown:cds_NZ_WFIY01000004.1_cds_WP_155862392.1_129 target sequence
GGAIYQVKSFLNEDFIAVNGDILTNLDIRELKQVDENAIASISLVPLRSPYGVVQTEDDKIIKFVEKPVLKDYWINAGVYFLKPT

SEQ ID NO: 38926 - protein, 84 aa, unidentified
  REGION 1..84: note = Description of Unknown:cds_NZ_WFIY01000004.1_cds_WP_155862392.1_129 target sequence
KIIKFVEKPVLKDYWINAGVYFLKPTIFEYLPEKGDIERITFPTLAEKGLLRGKKFENVYWRSIDSVKDVEEASNEIPQVFNFE

SEQ ID NO: 38927 - protein, 85 aa, unidentified
  REGION 1..85: note = Description of Unknown:cds_NZ_WFIY01000004.1_cds_WP_155862392.1_129 target sequence
AGKPILEWQILWLKSFGISSFIILAGYKKEVLVEWVTKNKTRLGIECLFSMEEEPLGTGGAIYQVKSFLNEDFIAVNGDILTNLD

SEQ ID NO: 38928 - protein, 85 aa, unidentified
  REGION 1..85: note = Description of Unknown:cds_NZ_WFIY01000004.1_cds_WP_155862392.1_129 target sequence
IRELKQVDENAIASISLVPLRSPYGVVQTEDDKIIKFVEKPVLKDYWINAGVYFLKPTIFEYLPEKGDIERITFPTLAEKGLLRG

SEQ ID NO: 38929 - protein, 85 aa, unidentified
  REGION 1..85: note = Description of Unknown:cds_NZ_WFIY01000004.1_cds_WP_155862657.1_449 target sequence
YVIPSIDISQGKAVKRVRGVKGTGIIIGDPIKVAEEIYSLGYDAVHIVDLDAAENSGNNEDKIASIARIGFKRIEVGGGIRSIEK

SEQ ID NO: 38930 - protein, 85 aa, unidentified
  REGION 1..85: note = Description of Unknown:cds_NZ_WFIY01000004.1_cds_WP_155862657.1_449 target sequence
ANRILSLGITEIVVSSILFTNKEEFDKMSELLGDRLFFSIDYCGGKTLIKGWREEAKSVDETISLLKNYDIKGVIFTYVCNEGTK

SEQ ID NO: 38931 - protein, 84 aa, unidentified
  REGION 1..84: note = Description of Unknown:cds_NZ_WFIY01000004.1_cds_WP_155862657.1_449 target sequence
DETISLLKNYDIKGVIFTYVCNEGTKKGIDENISIYSSRVNKLKGYAGGVNNINDLLKLKESKIDFTIVGMSFYSGNLKGVKYV

SEQ ID NO: 38932 - protein, 85 aa, unidentified
  REGION 1..85: note = Description of Unknown:cds_NZ_WFIY01000004.1_cds_WP_155862657.1_449 target sequence
GDPIKVAEEIYSLGYDAVHIVDLDAAENSGNNEDKIASIARIGFKRIEVGGGIRSIEKANRILSLGITEIVVSSILFTNKEEFDK

SEQ ID NO: 38933 - protein, 85 aa, unidentified
  REGION 1..85: note = Description of Unknown:cds_NZ_WFIY01000004.1_cds_WP_155862657.1_449 target sequence
MSELLGDRLFFSIDYCGGKTLIKGWREEAKSVDETISLLKNYDIKGVIFTYVCNEGTKKGIDENISIYSSRVNKLKGYAGGVNNI

SEQ ID NO: 38934 - protein, 85 aa, unidentified
  REGION 1..85: note = Description of Unknown:cds_NZ_WFIY01000004.1_cds_WP_155863100.1_1017 target sequence
LIKLLLTDLDGTLTEDRGIYKVSLDAIKYLRLLEERGIKVALVSGNSYPVLRGLHNYLGFTGGVVAENGCIVFYKQKIRVCKPMD

SEQ ID NO: 38935 - protein, 85 aa, unidentified
  REGION 1..85: note = Description of Unknown:cds_NZ_WFIY01000004.1_cds_WP_155863100.1_1017 target sequence
RQILEEFREKFKLKDSWQNDYRECDFGFTPPDITEDMIKWAEEKGLYINSSGYALHIAFKPAGKTVGVRKLIELHGVKKEEVIGI

SEQ ID NO: 38936 - protein, 84 aa, unidentified
  REGION 1..84: note = Description of Unknown:cds_NZ_WFIY01000004.1_cds_WP_155863100.1_1017 target sequence
PAGKTVGVRKLIELHGVKKEEVIGIGDSLTDLDMFKEVGIKVAVGNAEEELKKEADIILNLKSGEGVKELVTMILEGKLDGRDR

SEQ ID NO: 38937 - protein, 85 aa, unidentified
  REGION 1..85: note = Description of Unknown:cds_NZ_WFIY01000004.1_cds_WP_155863100.1_1017 target sequence
KYLRLLEERGIKVALVSGNSYPVLRGLHNYLGFTGGVVAENGCIVFYKQKIRVCKPMDRQILEEFREKFKLKDSWQNDYRECDFG

SEQ ID NO: 38938 - protein, 85 aa, unidentified
  REGION 1..85: note = Description of Unknown:cds_NZ_WFIY01000004.1_cds_WP_155863100.1_1017 target sequence
FTPPDITEDMIKWAEEKGLYINSSGYALHIAFKPAGKTVGVRKLIELHGVKKEEVIGIGDSLTDLDMFKEVGIKVAVGNAEEELK

SEQ ID NO: 38939 - protein, 85 aa, unidentified
  REGION 1..85: note = Description of Unknown:cds_NZ_WFIY01000004.1_cds_WP_155863419.1_1401 target sequence
EPLRQLAKDKLAGKKVYAVMSAKGGVGKSVISSLLALTMGGTTLIDLDIHTMAIPKLFGLEGKLHEVSKNGIEPFEIKTTKIVSL

SEQ ID NO: 38940 - protein, 85 aa, unidentified
  REGION 1..85: note = Description of Unknown:cds_NZ_WFIY01000004.1_cds_WP_155863419.1_1401 target sequence
SGIVKDNYVILPGGNQSSIMESLIAYSHIDTNTVIFDLPPGLGDEILVLERITDFTPIVVTTPSKISKKVVDYLMRYLRERGKEP

SEQ ID NO: 38941 - protein, 84 aa, unidentified
  REGION 1..84: note = Description of Unknown:cds_NZ_WFIY01000004.1_cds_WP_155863419.1_1401 target sequence
VTTPSKISKKVVDYLMRYLRERGKEPKILVNLAYMDCDGKVVKPFGEYEGFGLPIDPSIEEYIGRIQDYEGAVKEKLKEFIQSL

SEQ ID NO: 38942 - protein, 85 aa, unidentified
  REGION 1..85: note = Description of Unknown:cds_NZ_WFIY01000004.1_cds_WP_155863419.1_1401 target sequence
KSVISSLLALTMGGTTLIDLDIHTMAIPKLFGLEGKLHEVSKNGIEPFEIKTTKIVSLSGIVKDNYVILPGGNQSSIMESLIAYS

SEQ ID NO: 38943 - protein, 85 aa, unidentified
  REGION 1..85: note = Description of Unknown:cds_NZ_WFIY01000004.1_cds_WP_155863419.1_1401 target sequence
HIDTNTVIFDLPPGLGDEILVLERITDFTPIVVTTPSKISKKVVDYLMRYLRERGKEPKILVNLAYMDCDGKVVKPFGEYEGFGL

SEQ ID NO: 38944 - protein, 85 aa, unidentified
  REGION 1..85: note = Description of Unknown:cds_NZ_WFIY01000004.1_cds_WP_155863433.1_1410 target sequence
LDLTDSDNNITSLLGYVDSKVVIFMDSALSELANTIFLELKENYIKSLIEILPSGIIMKQIFNEDVKFGNLIYDKPPRILILPSS

SEQ ID NO: 38945 - protein, 85 aa, unidentified
  REGION 1..85: note = Description of Unknown:cds_NZ_WFIY01000004.1_cds_WP_155863433.1_1410 target sequence
EISSLKQWELLLAVANFVKIKMFIATELDDICKAKRIAIVNPEYSVFSINFIKSYKCHGELVLVKNDGEVIKELKKGNVDAGVTW

SEQ ID NO: 38946 - protein, 84 aa, unidentified
  REGION 1..84: note = Description of Unknown:cds_NZ_WFIY01000004.1_cds_WP_155863433.1_1410 target sequence
ELVLVKNDGEVIKELKKGNVDAGVTWFHSAKANGLKGYELNKTFTIQIGLFKGADKTLINAFEILRNSHAIREYAEKIGMVWLG

SEQ ID NO: 38947 - protein, 85 aa, unidentified
  REGION 1..85: note = Description of Unknown:cds_NZ_WFIY01000004.1_cds_WP_155863433.1_1410 target sequence
ALSELANTIFLELKENYIKSLIEILPSGIIMKQIFNEDVKFGNLIYDKPPRILILPSSEISSLKQWELLLAVANFVKIKMFIATE

SEQ ID NO: 38948 - protein, 85 aa, unidentified
  REGION 1..85: note = Description of Unknown:cds_NZ_WFIY01000004.1_cds_WP_155863433.1_1410 target sequence
LDDICKAKRIAIVNPEYSVFSINFIKSYKCHGELVLVKNDGEVIKELKKGNVDAGVTWFHSAKANGLKGYELNKTFTIQIGLFKG

SEQ ID NO: 38949 - protein, 85 aa, unidentified
  REGION 1..85: note = Description of Unknown:cds_NZ_WFIY01000004.1_cds_WP_155863914.1_1826 target sequence
IKIKYFAFIKDITGKDEETLDLNCNTVDCVIKFLSEKYGRKMEEILKNGINGVKVTILVNGKISNIIADGDEVAIFPPPAGGELV

SEQ ID NO: 38950 - protein, 85 aa, unidentified
  REGION 1..85: note = Description of Unknown:cds_NZ_WFIY01000004.1_cds_WP_155863914.1_1826 target sequence
KNKFDLLEEIRKFRENAPPEAGSLVVYLGFVKGLVDGHRVYELRYEAYEDYTIRRLKEIEDELMKKYHDIVKIKIIHVISNMKPG

SEQ ID NO: 38951 - protein, 84 aa, unidentified
  REGION 1..84: note = Description of Unknown:cds_NZ_WFIY01000004.1_cds_WP_155863914.1_1826 target sequence
EDELMKKYHDIVKIKIIHVISNMKPGDDVLLIMCMGRGRKDTIRAVEEAVELVKNTTGIWKLEIRDDGEFWVVAGNTRVKRIND

SEQ ID NO: 38952 - protein, 85 aa, unidentified
  REGION 1..85: note = Description of Unknown:cds_NZ_WFIY01000004.1_cds_WP_155863914.1_1826 target sequence
DCVIKFLSEKYGRKMEEILKNGINGVKVTILVNGKISNIIADGDEVAIFPPPAGGELVKNKFDLLEEIRKFRENAPPEAGSLVVY

SEQ ID NO: 38953 - protein, 85 aa, unidentified
  REGION 1..85: note = Description of Unknown:cds_NZ_WFIY01000004.1_cds_WP_155863914.1_1826 target sequence
LGFVKGLVDGHRVYELRYEAYEDYTIRRLKEIEDELMKKYHDIVKIKIIHVISNMKPGDDVLLIMCMGRGRKDTIRAVEEAVELV

SEQ ID NO: 38954 - protein, 85 aa, unidentified
  REGION 1..85: note = Description of Unknown:cds_NZ_WFIY01000004.1_cds_WP_155864249.1_2240 target sequence
LDVDINNTVSGNAKKSLQTILDAMELKSKTLRSLEISTEEDARKLFESVFYARKHFSDVISKTSIPELSYAFSQLKDPSLSYSER

SEQ ID NO: 38955 - protein, 85 aa, unidentified
  REGION 1..85: note = Description of Unknown:cds_NZ_WFIY01000004.1_cds_WP_155864249.1_2240 target sequence
VEKFKSTVKGGEREDIEDMAKEIIHFLEPEKYPLWTRWIWNKERGTGSINYVIKDDVKINDEKELFSTIDELRNVLEIFGLESKG

SEQ ID NO: 38956 - protein, 84 aa, unidentified
  REGION 1..84: note = Description of Unknown:cds_NZ_WFIY01000004.1_cds_WP_155864249.1_2240 target sequence
NDEKELFSTIDELRNVLEIFGLESKGKYYITSVFLVYAYVRYLDYTTHLAVDKKAAGLIPTHLSTTALVLGLKPYLKVIKLANT

SEQ ID NO: 38957 - protein, 85 aa, unidentified
  REGION 1..85: note = Description of Unknown:cds_NZ_WFIY01000004.1_cds_WP_155864249.1_2240 target sequence
SKTLRSLEISTEEDARKLFESVFYARKHFSDVISKTSIPELSYAFSQLKDPSLSYSERVEKFKSTVKGGEREDIEDMAKEIIHFL

SEQ ID NO: 38958 - protein, 85 aa, unidentified
  REGION 1..85: note = Description of Unknown:cds_NZ_WFIY01000004.1_cds_WP_155864249.1_2240 target sequence
EPEKYPLWTRWIWNKERGTGSINYVIKDDVKINDEKELFSTIDELRNVLEIFGLESKGKYYITSVFLVYAYVRYLDYTTHLAVDK

SEQ ID NO: 38959 - protein, 48 aa, unidentified
  REGION 1..48: note = Description of Unknown:cds_NZ_WFIY01000004.1_cds_2320 target sequence
LNLLVNFVADKYLSVFINYTTFENWHSVMLSTHKERIKCKLRNGQLLI

SEQ ID NO: 38960 - protein, 37 aa, unidentified
  REGION 1..37: note = Description of Unknown:cds_NZ_WFIY01000004.1_cds_2320 target sequence
DYWRIDVRGKRVLDIGAGIGDSPIFHCRSERGSSSRE

SEQ ID NO: 38961 - protein, 7 aa, unidentified
  REGION 1..7: note = Description of Unknown:cds_NZ_WFIY01000004.1_cds_2320 target sequence
GLRHKGR

SEQ ID NO: 38962 - protein, 21 aa, unidentified
  REGION 1..21: note = Description of Unknown:cds_NZ_WFIY01000004.1_cds_2320 target sequence
VMLSTHKERIKCKLRNGQLLI

SEQ ID NO: 38963 - protein, 10 aa, unidentified
  REGION 1..10: note = Description of Unknown:cds_NZ_WFIY01000004.1_cds_2320 target sequence
RSERGSSSRE

SEQ ID NO: 38964 - protein, 85 aa, unidentified
  REGION 1..85: note = Description of Unknown:cds_NC_003214.2_cds_NP_445730.1_65 target sequence
VVRYQDIVDDVYSKLFLLEQWKKVYPLTEYYDVYIDVCYGHRVRAFIQNLGFTLEQESFTIHIEYDLPCIPGLAEFLRLWNNFDL

SEQ ID NO: 38965 - protein, 85 aa, unidentified
  REGION 1..85: note = Description of Unknown:cds_NC_003214.2_cds_NP_445730.1_65 target sequence
RGKYIYRATTKKYINEYVLAFTPFMIVNEPYEKENKYLSYWSVSPYTSNYFVRAYVERYGVNPKEIVVLVAPYDDRICSKDWYDN

SEQ ID NO: 38966 - protein, 84 aa, unidentified
  REGION 1..84: note = Description of Unknown:cds_NC_003214.2_cds_NP_445730.1_65 target sequence
VNPKEIVVLVAPYDDRICSKDWYDNFSPEYTIIQDGKPTNFGDMRYLRELEVRCFKYSVSRLIYQLPYSDFLELMKLLPSKYVY

SEQ ID NO: 38967 - protein, 85 aa, unidentified
  REGION 1..85: note = Description of Unknown:cds_NC_003214.2_cds_NP_445730.1_65 target sequence
TEYYDVYIDVCYGHRVRAFIQNLGFTLEQESFTIHIEYDLPCIPGLAEFLRLWNNFDLRGKYIYRATTKKYINEYVLAFTPFMIV

SEQ ID NO: 38968 - protein, 85 aa, unidentified
  REGION 1..85: note = Description of Unknown:cds_NC_003214.2_cds_NP_445730.1_65 target sequence
NEPYEKENKYLSYWSVSPYTSNYFVRAYVERYGVNPKEIVVLVAPYDDRICSKDWYDNFSPEYTIIQDGKPTNFGDMRYLRELEV

SEQ ID NO: 38969 - protein, 85 aa, unidentified
  REGION 1..85: note = Description of Unknown:hvTR_Q98271 target sequence
PGMNALRHCHGCKHNGLVLEQGYEFCIFCQAVFQHCAKVAKRSNFHVSNKLIHLRNVLRRLLSKQCSGDIIAELRALMARNQLAP

SEQ ID NO: 38970 - protein, 85 aa, unidentified
  REGION 1..85: note = Description of Unknown:hvTR_Q98271 target sequence
ADIDANFVSSFLKAHEKINKKDYKLVFEIINQIKDERLELDTQKINEVIEIFKHLVFFCQENTPSKTINYSFFLDKIFTLTSVTR

SEQ ID NO: 38971 - protein, 84 aa, unidentified
  REGION 1..84: note = Description of Unknown:hvTR_Q98271 target sequence
CQENTPSKTINYSFFLDKIFTLTSVTRNLRPQTVKNYTKNNSNQLIWENFLVYMRGKKLNTCVHDYGHEYVFVDHGFAACSLEL

SEQ ID NO: 38972 - protein, 85 aa, unidentified
  REGION 1..85: note = Description of Unknown:hvTR_Q98271 target sequence
FCQAVFQHCAKVAKRSNFHVSNKLIHLRNVLRRLLSKQCSGDIIAELRALMARNQLAPADIDANFVSSFLKAHEKINKKDYKLVF

SEQ ID NO: 38973 - protein, 85 aa, unidentified
  REGION 1..85: note = Description of Unknown:hvTR_Q98271 target sequence
EIINQIKDERLELDTQKINEVIEIFKHLVFFCQENTPSKTINYSFFLDKIFTLTSVTRNLRPQTVKNYTKNNSNQLIWENFLVYM

SEQ ID NO: 38974 - protein, 85 aa, unidentified
  REGION 1..85: note = Description of Unknown:cds_NZ_WFIY01000004.1_cds_WP_155862359.1_90 target sequence
CRMFAYVGDSKEELTKLYEALKESAKNDIIASKYGLNPVHGDGWGYVIYDGERIYFYKSKNPIFNESLVLPSIEGKFYAIFHARQ

SEQ ID NO: 38975 - protein, 85 aa, unidentified
  REGION 1..85: note = Description of Unknown:cds_NZ_WFIY01000004.1_cds_WP_155862359.1_90 target sequence
ATDKSTVSARFAHPFYGDDENYFYFFAHNGSVDKEKLAQVLNFQGQTTIDSELALKFLIKNGLDKGIDLLMKDYTKSALNVFILR

SEQ ID NO: 38976 - protein, 84 aa, unidentified
  REGION 1..84: note = Description of Unknown:cds_NZ_WFIY01000004.1_cds_WP_155862359.1_90 target sequence
IKNGLDKGIDLLMKDYTKSALNVFILRISRSDGSAELYYVNYYTRKDRSEYYKFYKNENAVFSSTLAYYGIRGVEVEEGKLLRL

SEQ ID NO: 38977 - protein, 85 aa, unidentified
  REGION 1..85: note = Description of Unknown:cds_NZ_WFIY01000004.1_cds_WP_155862359.1_90 target sequence
DIIASKYGLNPVHGDGWGYVIYDGERIYFYKSKNPIFNESLVLPSIEGKFYAIFHARQATDKSTVSARFAHPFYGDDENYFYFFA

SEQ ID NO: 38978 - protein, 85 aa, unidentified
  REGION 1..85: note = Description of Unknown:cds_NZ_WFIY01000004.1_cds_WP_155862359.1_90 target sequence
HNGSVDKEKLAQVLNFQGQTTIDSELALKFLIKNGLDKGIDLLMKDYTKSALNVFILRISRSDGSAELYYVNYYTRKDRSEYYKF

SEQ ID NO: 38979 - protein, 85 aa, unidentified
  REGION 1..85: note = Description of Unknown:cds_NZ_WFIY01000004.1_cds_WP_155862789.1_605 target sequence
KTAAVEKITSKIDEKKAEELSKFLDYLPTINDFLEKIKELKESGALDAIINFSYAIKSLKDALNDDSIQNLGNMLSTFMALLSTT

SEQ ID NO: 38980 - protein, 85 aa, unidentified
  REGION 1..85: note = Description of Unknown:cds_NZ_WFIY01000004.1_cds_WP_155862789.1_605 target sequence
SEHTNDVNQIINQANTISYTITKLKELKESGAFDVLVNFAYALKSLRDALTDDAITNIGTTLSLLLDFLPRAQEFLNYALNPSIL

SEQ ID NO: 38981 - protein, 84 aa, unidentified
  REGION 1..84: note = Description of Unknown:cds_NZ_WFIY01000004.1_cds_WP_155862789.1_605 target sequence
GTTLSLLLDFLPRAQEFLNYALNPSILKIIKALSSDEATKLLANPPKVTLGGIVKQMTDDDVQKGIGVLFTIAKIIGKSYSQQK

SEQ ID NO: 38982 - protein, 85 aa, unidentified
  REGION 1..85: note = Description of Unknown:cds_NZ_WFIY01000004.1_cds_WP_155862789.1_605 target sequence
PTINDFLEKIKELKESGALDAIINFSYAIKSLKDALNDDSIQNLGNMLSTFMALLSTTSEHTNDVNQIINQANTISYTITKLKEL

SEQ ID NO: 38983 - protein, 85 aa, unidentified
  REGION 1..85: note = Description of Unknown:cds_NZ_WFIY01000004.1_cds_WP_155862789.1_605 target sequence
KESGAFDVLVNFAYALKSLRDALTDDAITNIGTTLSLLLDFLPRAQEFLNYALNPSILKIIKALSSDEATKLLANPPKVTLGGIV

SEQ ID NO: 38984 - protein, 85 aa, unidentified
  REGION 1..85: note = Description of Unknown:cds_NZ_WFIY01000004.1_cds_WP_155862932.1_785 target sequence
LRVVLVEPEGEYNVGFVARLCKNFEVDELFIVRPKCDINSAIKFSAKGESILRNAKIVDNYDDALKDVEIKIATSSIANNKGDIL

SEQ ID NO: 38985 - protein, 85 aa, unidentified
  REGION 1..85: note = Description of Unknown:cds_NZ_WFIY01000004.1_cds_WP_155862932.1_785 target sequence
RKAVFPWELPSIMKSEKIALIFGRESVGLTREEISKADFLLFIPANPNYPTLNLSHAVGIALYEIWKAKHEIKPKITKESIDLLD

SEQ ID NO: 38986 - protein, 84 aa, unidentified
  REGION 1..84: note = Description of Unknown:cds_NZ_WFIY01000004.1_cds_WP_155862932.1_785 target sequence
GIALYEIWKAKHEIKPKITKESIDLLDKYAKILYDLIKRSEEDYVLYIALKRALIKGINDEEEARTVIKFLRRLYTRILHEDKE

SEQ ID NO: 38987 - protein, 85 aa, unidentified
  REGION 1..85: note = Description of Unknown:cds_NZ_WFIY01000004.1_cds_WP_155862932.1_785 target sequence
ELFIVRPKCDINSAIKFSAKGESILRNAKIVDNYDDALKDVEIKIATSSIANNKGDILRKAVFPWELPSIMKSEKIALIFGRESV

SEQ ID NO: 38988 - protein, 85 aa, unidentified
  REGION 1..85: note = Description of Unknown:cds_NZ_WFIY01000004.1_cds_WP_155862932.1_785 target sequence
GLTREEISKADFLLFIPANPNYPTLNLSHAVGIALYEIWKAKHEIKPKITKESIDLLDKYAKILYDLIKRSEEDYVLYIALKRAL

SEQ ID NO: 38989 - protein, 85 aa, unidentified
  REGION 1..85: note = Description of Unknown:cds_NZ_WFIY01000004.1_cds_WP_155863056.1_957 target sequence
DMGLKMGFTYRIIKLGGSLITNKNIPYSYNEEIVRRIAREIRQFYPLIVIHGGGSFGHYEASKGDKIKTVIAMQELNLKIMKIFY

SEQ ID NO: 38990 - protein, 85 aa, unidentified
  REGION 1..85: note = Description of Unknown:cds_NZ_WFIY01000004.1_cds_WP_155863056.1_957 target sequence
NEGIKAFPLPGRFFSIDTVKRYLQEGLVPVIYGDITESGKIISGDDIAILLGKKFNSRVFFATDVDGVFINGRVAKEVNSPFIDD

SEQ ID NO: 38991 - protein, 84 aa, unidentified
  REGION 1..84: note = Description of Unknown:cds_NZ_WFIY01000004.1_cds_WP_155863056.1_957 target sequence
VFFATDVDGVFINGRVAKEVNSPFIDDLSSSSFDVTGGMKAKIQKILENCVEALIFNGKIEGNIYKALEGKNIGTLVRCKNDNK

SEQ ID NO: 38992 - protein, 85 aa, unidentified
  REGION 1..85: note = Description of Unknown:cds_NZ_WFIY01000004.1_cds_WP_155863056.1_957 target sequence
SYNEEIVRRIAREIRQFYPLIVIHGGGSFGHYEASKGDKIKTVIAMQELNLKIMKIFYNEGIKAFPLPGRFFSIDTVKRYLQEGL

SEQ ID NO: 38993 - protein, 85 aa, unidentified
  REGION 1..85: note = Description of Unknown:cds_NZ_WFIY01000004.1_cds_WP_155863056.1_957 target sequence
VPVIYGDITESGKIISGDDIAILLGKKFNSRVFFATDVDGVFINGRVAKEVNSPFIDDLSSSSFDVTGGMKAKIQKILENCVEAL

SEQ ID NO: 38994 - protein, 85 aa, unidentified
  REGION 1..85: note = Description of Unknown:cds_NZ_WFIY01000004.1_cds_WP_155863623.1_1521 target sequence
VDYLSLLSSQNPYDRLDGWFKIDWLIQNGIVTKEKLIKMKDKFLDLLNYNDDTVKLHAWRMVPQLINKGIITINDVKKYDFLSLL

SEQ ID NO: 38995 - protein, 85 aa, unidentified
  REGION 1..85: note = Description of Unknown:cds_NZ_WFIY01000004.1_cds_WP_155863623.1_1521 target sequence
YDSEAWLLVKDLVNSGAIDIESVKKEKEKYIALLKGNELDRIASWSLILDILNLGIIDKNDVENNKKYLLELFNFPAYDIRFNLL

SEQ ID NO: 38996 - protein, 84 aa, unidentified
  REGION 1..84: note = Description of Unknown:cds_NZ_WFIY01000004.1_cds_WP_155863623.1_1521 target sequence
KNDVENNKKYLLELFNFPAYDIRFNLLFLIAELVSKGVLSPKELEPYEEKIEEIVKDKDFSQFVKIYEKDTRELESIGIHFFNS

SEQ ID NO: 38997 - protein, 85 aa, unidentified
  REGION 1..85: note = Description of Unknown:cds_NZ_WFIY01000004.1_cds_WP_155863623.1_1521 target sequence
NGIVTKEKLIKMKDKFLDLLNYNDDTVKLHAWRMVPQLINKGIITINDVKKYDFLSLLYDSEAWLLVKDLVNSGAIDIESVKKEK

SEQ ID NO: 38998 - protein, 85 aa, unidentified
  REGION 1..85: note = Description of Unknown:cds_NZ_WFIY01000004.1_cds_WP_155863623.1_1521 target sequence
EKYIALLKGNELDRIASWSLILDILNLGIIDKNDVENNKKYLLELFNFPAYDIRFNLLFLIAELVSKGVLSPKELEPYEEKIEEI

SEQ ID NO: 38999 - protein, 85 aa, unidentified
  REGION 1..85: note = Description of Unknown:cds_NZ_WFIY01000004.1_cds_WP_155864050.1_1986 target sequence
TLYVIGVGPGDPELITLKGIEKIKNAEVVTGWGSVIERFSKYTEGKKVIPLNYKEESKLLGEVMNLAKDKEVAFLNHGDPAVSDY

SEQ ID NO: 39000 - protein, 85 aa, unidentified
  REGION 1..85: note = Description of Unknown:cds_NZ_WFIY01000004.1_cds_WP_155864050.1_1986 target sequence
QLLDKLKKLAKEYGVSLEIIPGVSSIIRALQIVERDLTQVIVVTLHVRGEINYSKLKDLIKTGRDLLIIPEPYPDGVKRIALQFE

SEQ ID NO: 39001 - protein, 84 aa, unidentified
  REGION 1..84: note = Description of Unknown:cds_NZ_WFIY01000004.1_cds_WP_155864050.1_1986 target sequence
LIKTGRDLLIIPEPYPDGVKRIALQFEKEDPTLTIMEKLTYPDEKVWKFKCSEIIKGDIKFGDLTIVYVPSVTEMGVKGMKGDG

SEQ ID NO: 39002 - protein, 85 aa, unidentified
  REGION 1..85: note = Description of Unknown:cds_NZ_WFIY01000004.1_cds_WP_155864050.1_1986 target sequence
VVTGWGSVIERFSKYTEGKKVIPLNYKEESKLLGEVMNLAKDKEVAFLNHGDPAVSDYQLLDKLKKLAKEYGVSLEIIPGVSSII

SEQ ID NO: 39003 - protein, 85 aa, unidentified
  REGION 1..85: note = Description of Unknown:cds_NZ_WFIY01000004.1_cds_WP_155864050.1_1986 target sequence
RALQIVERDLTQVIVVTLHVRGEINYSKLKDLIKTGRDLLIIPEPYPDGVKRIALQFEKEDPTLTIMEKLTYPDEKVWKFKCSEI

SEQ ID NO: 39004 - protein, 85 aa, unidentified
  REGION 1..85: note = Description of Unknown:cds_NZ_WFIY01000004.1_cds_WP_155864489.1_2310 target sequence
LKALSYNWNYRGGYWEKGNIKFKHIHAEIIATFEDEEYGYADVKNKSVVDIGAFVGETAIYFALKGAKKVYAIEPHPGAYEELVE

SEQ ID NO: 39005 - protein, 85 aa, unidentified
  REGION 1..85: note = Description of Unknown:cds_NZ_WFIY01000004.1_cds_WP_155864489.1_2310 target sequence
NIRINALEEKIFPLNIAVGDKEGYTVISNVETSQAPVTLFNESDGNGIKVKKEILNNIIKKYNIETNVLKMDCEGCEYNLILNDY

SEQ ID NO: 39006 - protein, 84 aa, unidentified
  REGION 1..84: note = Description of Unknown:cds_NZ_WFIY01000004.1_cds_WP_155864489.1_2310 target sequence
KKYNIETNVLKMDCEGCEYNLILNDYEAVSKFEQLVFEYHAYNTGIPVRSLIELLKRVYNCEFVNEHIYKKNDPNWDKNRIGML

SEQ ID NO: 39007 - protein, 85 aa, unidentified
  REGION 1..85: note = Description of Unknown:cds_NZ_WFIY01000004.1_cds_WP_155864489.1_2310 target sequence
EIIATFEDEEYGYADVKNKSVVDIGAFVGETAIYFALKGAKKVYAIEPHPGAYEELVENIRINALEEKIFPLNIAVGDKEGYTVI

SEQ ID NO: 39008 - protein, 85 aa, unidentified
  REGION 1..85: note = Description of Unknown:cds_NZ_WFIY01000004.1_cds_WP_155864489.1_2310 target sequence
SNVETSQAPVTLFNESDGNGIKVKKEILNNIIKKYNIETNVLKMDCEGCEYNLILNDYEAVSKFEQLVFEYHAYNTGIPVRSLIE

SEQ ID NO: 39009 - protein, 85 aa, unidentified
  REGION 1..85: note = Description of Unknown:cds_NC_035460.1_cds_YP_009408124.1_173 target sequence
SRISFIIFSLYVLYVQTDAIQKCSKNKNRFWQTEAVIELGLKYPETPRLGGCVVNITNNTDKHSVHITGYGINMDYVSIGSNEDI

SEQ ID NO: 39010 - protein, 85 aa, unidentified
  REGION 1..85: note = Description of Unknown:cds_NC_035460.1_cds_YP_009408124.1_173 target sequence
VGVAQGIYNDYILVTAIFTAAKLSNPIIKVTSTDLTITCTELDCNGVITNMHSRSITIIGTCIHCVNVTTYPDYMGKIGDKPYNV

SEQ ID NO: 39011 - protein, 84 aa, unidentified
  REGION 1..84: note = Description of Unknown:cds_NC_035460.1_cds_YP_009408124.1_173 target sequence
IGTCIHCVNVTTYPDYMGKIGDKPYNVNLLQLPRLKNTNNVNNTTTSKCNVPFDDVQFYLCDRIDMKYPYVGHPRLPYETMKNL

SEQ ID NO: 39012 - protein, 85 aa, unidentified
  REGION 1..85: note = Description of Unknown:cds_NC_035460.1_cds_YP_009408124.1_173 target sequence
NRFWQTEAVIELGLKYPETPRLGGCVVNITNNTDKHSVHITGYGINMDYVSIGSNEDIVGVAQGIYNDYILVTAIFTAAKLSNPI

SEQ ID NO: 39013 - protein, 85 aa, unidentified
  REGION 1..85: note = Description of Unknown:cds_NC_035460.1_cds_YP_009408124.1_173 target sequence
IKVTSTDLTITCTELDCNGVITNMHSRSITIIGTCIHCVNVTTYPDYMGKIGDKPYNVNLLQLPRLKNTNNVNNTTTSKCNVPFD

SEQ ID NO: 39014 - protein, 85 aa, unidentified
  REGION 1..85: note = Description of Unknown:cds_NC_004074.1_cds_NP_665866.1_3 target sequence
DPSPSDAEISAWIDKGLDTVEHFLSASTQSVRSLGKSTIKPGNTEELVAAAEKVAANTAKGILSGVRGTNPDPATRPKEKQKGSP

SEQ ID NO: 39015 - protein, 85 aa, unidentified
  REGION 1..85: note = Description of Unknown:cds_NC_004074.1_cds_NP_665866.1_3 target sequence
VKMQHQEQESVYEEVIPTESAPLIPKTTPKKPPRNKEKVMSMMALSPPDESLDETHEAVFKRGSTSTTWPRRHRTGGHRREIAIS

SEQ ID NO: 39016 - protein, 84 aa, unidentified
  REGION 1..84: note = Description of Unknown:cds_NC_004074.1_cds_NP_665866.1_3 target sequence
VFKRGSTSTTWPRRHRTGGHRREIAISWATGTPRVTEWCNPICHPISQFTYRGTCRCGCCPDVCSLCERDYALLADIRDPDCES

SEQ ID NO: 39017 - protein, 85 aa, unidentified
  REGION 1..85: note = Description of Unknown:cds_NC_004074.1_cds_NP_665866.1_3 target sequence
TQSVRSLGKSTIKPGNTEELVAAAEKVAANTAKGILSGVRGTNPDPATRPKEKQKGSPVKMQHQEQESVYEEVIPTESAPLIPKT

SEQ ID NO: 39018 - protein, 85 aa, unidentified
  REGION 1..85: note = Description of Unknown:cds_NC_004074.1_cds_NP_665866.1_3 target sequence
TPKKPPRNKEKVMSMMALSPPDESLDETHEAVFKRGSTSTTWPRRHRTGGHRREIAISWATGTPRVTEWCNPICHPISQFTYRGT

SEQ ID NO: 39019 - protein, 85 aa, unidentified
  REGION 1..85: note = Description of Unknown:hvTR_Q6TVQ9 target sequence
SSWRLKMSKCSGSSSVQTLEDLRNRLRSEALGSDCQEPRDDLFPNGEECLDIDGPCSPCDEAEQELDQEQLPVPETVPELPAKTP

SEQ ID NO: 39020 - protein, 85 aa, unidentified
  REGION 1..85: note = Description of Unknown:hvTR_Q6TVQ9 target sequence
KRRPAKKDKADKPEKSTKGAKKLCPPDDKDDELESNDVDNNEESGDAEGGASARSPSDIDNVDEMDDSDLMVAFSAILADFKDLT

SEQ ID NO: 39021 - protein, 84 aa, unidentified
  REGION 1..84: note = Description of Unknown:hvTR_Q6TVQ9 target sequence
DIDNVDEMDDSDLMVAFSAILADFKDLTQRVKALSSVLTDVQATGIRRSFSTLGKALTEAAHIANTGAKPVTAPRKKKAATCKK

SEQ ID NO: 39022 - protein, 85 aa, unidentified
  REGION 1..85: note = Description of Unknown:hvTR_Q6TVQ9 target sequence
SEALGSDCQEPRDDLFPNGEECLDIDGPCSPCDEAEQELDQEQLPVPETVPELPAKTPKRRPAKKDKADKPEKSTKGAKKLCPPD

SEQ ID NO: 39023 - protein, 85 aa, unidentified
  REGION 1..85: note = Description of Unknown:hvTR_Q6TVQ9 target sequence
DKDDELESNDVDNNEESGDAEGGASARSPSDIDNVDEMDDSDLMVAFSAILADFKDLTQRVKALSSVLTDVQATGIRRSFSTLGK

SEQ ID NO: 39024 - protein, 85 aa, unidentified
  REGION 1..85: note = Description of Unknown:cds_NZ_WFIY01000004.1_cds_WP_155862617.1_396 target sequence
ILDEIIDELSYDLKQRKIINICVGTSYTAVILDDQSMGISHTIAEGEVDYAGEMIGKNAYDVAVDVDNPLKRSISVAILNSITTG

SEQ ID NO: 39025 - protein, 85 aa, unidentified
  REGION 1..85: note = Description of Unknown:cds_NZ_WFIY01000004.1_cds_WP_155862617.1_396 target sequence
KLTAGDPLTLYSGGKVCAFGYYPYISAGNFSSVVLYDFSTQPQNNAKPFSQFNGETCDVAVIFGSALINNTIDKIVKNVKANHLI

SEQ ID NO: 39026 - protein, 84 aa, unidentified
  REGION 1..84: note = Description of Unknown:cds_NZ_WFIY01000004.1_cds_WP_155862617.1_396 target sequence
DVAVIFGSALINNTIDKIVKNVKANHLILTGISAVEAISTLKKYGFEAVGKIVPVDQYRAFRTICEGGSAKQLSRYVTKMYLKI

SEQ ID NO: 39027 - protein, 85 aa, unidentified
  REGION 1..85: note = Description of Unknown:cds_NZ_WFIY01000004.1_cds_WP_155862617.1_396 target sequence
TAVILDDQSMGISHTIAEGEVDYAGEMIGKNAYDVAVDVDNPLKRSISVAILNSITTGKLTAGDPLTLYSGGKVCAFGYYPYISA

SEQ ID NO: 39028 - protein, 85 aa, unidentified
  REGION 1..85: note = Description of Unknown:cds_NZ_WFIY01000004.1_cds_WP_155862617.1_396 target sequence
GNFSSVVLYDFSTQPQNNAKPFSQFNGETCDVAVIFGSALINNTIDKIVKNVKANHLILTGISAVEAISTLKKYGFEAVGKIVPV

SEQ ID NO: 39029 - protein, 85 aa, unidentified
  REGION 1..85: note = Description of Unknown:cds_NZ_WFIY01000004.1_cds_WP_155862742.1_552 target sequence
SEAYRIPLIGEKFPEMEVDTTHGKIKLPDAYKGKWFVLFSHPGDFTPVCTTEFVSFAKKYEEFKKLNTELIGLSVDSNISHIEWV

SEQ ID NO: 39030 - protein, 85 aa, unidentified
  REGION 1..85: note = Description of Unknown:cds_NZ_WFIY01000004.1_cds_WP_155862742.1_552 target sequence
NWIEQNLKVEVPFPIIADPMGNVAKRLGMIHAESSTAAVRAVFIVDDKGTIRLIMYYPLEIGRNINEILRSIKALQIVDRTGAVV

SEQ ID NO: 39031 - protein, 84 aa, unidentified
  REGION 1..84: note = Description of Unknown:cds_NZ_WFIY01000004.1_cds_WP_155862742.1_552 target sequence
PLEIGRNINEILRSIKALQIVDRTGAVVPANWPKNEIIGDNLLNPPPRTVKESKLRLQQFKGYAWWLTYREADKKDVEETEKYI

SEQ ID NO: 39032 - protein, 85 aa, unidentified
  REGION 1..85: note = Description of Unknown:cds_NZ_WFIY01000004.1_cds_WP_155862742.1_552 target sequence
PDAYKGKWFVLFSHPGDFTPVCTTEFVSFAKKYEEFKKLNTELIGLSVDSNISHIEWVNWIEQNLKVEVPFPIIADPMGNVAKRL

SEQ ID NO: 39033 - protein, 85 aa, unidentified
  REGION 1..85: note = Description of Unknown:cds_NZ_WFIY01000004.1_cds_WP_155862742.1_552 target sequence
GMIHAESSTAAVRAVFIVDDKGTIRLIMYYPLEIGRNINEILRSIKALQIVDRTGAVVPANWPKNEIIGDNLLNPPPRTVKESKL

SEQ ID NO: 39034 - protein, 85 aa, unidentified
  REGION 1..85: note = Description of Unknown:cds_NZ_WFIY01000004.1_cds_WP_155862904.1_754 target sequence
VNIKQYFLQKSMTKVMLDEYLAKQFYNAEYAGVDIIKTPMGTRIIIYAGRPAMIIGKGGKTIKQLAQVFEKFFNLENPQITVTNV

SEQ ID NO: 39035 - protein, 85 aa, unidentified
  REGION 1..85: note = Description of Unknown:cds_NZ_WFIY01000004.1_cds_WP_155862904.1_754 target sequence
DNPELNARVMAFRLAVALEKGYHFRRAAFITIRRIMNAGALGAEVVVSGKITSERAKYEKLKEGTVYKTGNSLETMIDRAIAIAK

SEQ ID NO: 39036 - protein, 84 aa, unidentified
  REGION 1..84: note = Description of Unknown:cds_NZ_WFIY01000004.1_cds_WP_155862904.1_754 target sequence
YEKLKEGTVYKTGNSLETMIDRAIAIAKLKPGIYGVEIIIAKPLRPVDKISFKETPAPSAGEVTVTNVKIIDENTGGAQNAAGS

SEQ ID NO: 39037 - protein, 85 aa, unidentified
  REGION 1..85: note = Description of Unknown:cds_NZ_WFIY01000004.1_cds_WP_155862904.1_754 target sequence
AEYAGVDIIKTPMGTRIIIYAGRPAMIIGKGGKTIKQLAQVFEKFFNLENPQITVTNVDNPELNARVMAFRLAVALEKGYHFRRA

SEQ ID NO: 39038 - protein, 85 aa, unidentified
  REGION 1..85: note = Description of Unknown:cds_NZ_WFIY01000004.1_cds_WP_155862904.1_754 target sequence
AFITIRRIMNAGALGAEVVVSGKITSERAKYEKLKEGTVYKTGNSLETMIDRAIAIAKLKPGIYGVEIIIAKPLRPVDKISFKET

SEQ ID NO: 39039 - protein, 85 aa, unidentified
  REGION 1..85: note = Description of Unknown:cds_NZ_WFIY01000004.1_cds_WP_155862955.1_817 target sequence
DAKEIVAKYSIDYIKDKKIIGIGTGKTIRKLIETISDIDIFKTKQYIASSIDSEIELSKRGFSVISLFSGIIPDVYIDSFDFLIR

SEQ ID NO: 39040 - protein, 85 aa, unidentified
  REGION 1..85: note = Description of Unknown:cds_NZ_WFIY01000004.1_cds_WP_155862955.1_817 target sequence
ENNGKIILIKGGGGALLREKLLTVSSKERIFIGEISKLKVPKLLQIPIEIVPVSLSYVLTNLTSQGFRVKIRESQGKIGPLISDN

SEQ ID NO: 39041 - protein, 84 aa, unidentified
  REGION 1..84: note = Description of Unknown:cds_NZ_WFIY01000004.1_cds_WP_155862955.1_817 target sequence
VLTNLTSQGFRVKIRESQGKIGPLISDNGNIILDMEVDNTQDLCKLNNELSNIVGVIETGIFCNLYDTIILADNDGRLEIIKKS

SEQ ID NO: 39042 - protein, 85 aa, unidentified
  REGION 1..85: note = Description of Unknown:cds_NZ_WFIY01000004.1_cds_WP_155862955.1_817 target sequence
IRKLIETISDIDIFKTKQYIASSIDSEIELSKRGFSVISLFSGIIPDVYIDSFDFLIRENNGKIILIKGGGGALLREKLLTVSSK

SEQ ID NO: 39043 - protein, 85 aa, unidentified
  REGION 1..85: note = Description of Unknown:cds_NZ_WFIY01000004.1_cds_WP_155862955.1_817 target sequence
ERIFIGEISKLKVPKLLQIPIEIVPVSLSYVLTNLTSQGFRVKIRESQGKIGPLISDNGNIILDMEVDNTQDLCKLNNELSNIVG

SEQ ID NO: 39044 - protein, 85 aa, unidentified
  REGION 1..85: note = Description of Unknown:cds_NZ_WFIY01000004.1_cds_WP_155863201.1_1141 target sequence
LQYQIVGDDIQYVKVFLNPGEKIYADAGHIMSKSSSVTIQAKMRGGILSAIKRELTGATFFVTELIGPGEVNIAGVFPGKIVPIQ

SEQ ID NO: 39045 - protein, 85 aa, unidentified
  REGION 1..85: note = Description of Unknown:cds_NZ_WFIY01000004.1_cds_WP_155863201.1_1141 target sequence
LNGKGILVESHSFLFAEDSVNYDARLAPLAPAILGGEGLFLATFNGVGLVFLHAYGGLYEINLMPGQSIDIEASHLLALEEGMQF

SEQ ID NO: 39046 - protein, 84 aa, unidentified
  REGION 1..84: note = Description of Unknown:cds_NZ_WFIY01000004.1_cds_WP_155863201.1_1141 target sequence
YEINLMPGQSIDIEASHLLALEEGMQFTVTRVGGFKTMLFGGEGLYFVRVVGPGKVWIHSITAQQMASALMPFLPGGQKGGLPF

SEQ ID NO: 39047 - protein, 85 aa, unidentified
  REGION 1..85: note = Description of Unknown:cds_NZ_WFIY01000004.1_cds_WP_155863201.1_1141 target sequence
GHIMSKSSSVTIQAKMRGGILSAIKRELTGATFFVTELIGPGEVNIAGVFPGKIVPIQLNGKGILVESHSFLFAEDSVNYDARLA

SEQ ID NO: 39048 - protein, 85 aa, unidentified
  REGION 1..85: note = Description of Unknown:cds_NZ_WFIY01000004.1_cds_WP_155863201.1_1141 target sequence
PLAPAILGGEGLFLATFNGVGLVFLHAYGGLYEINLMPGQSIDIEASHLLALEEGMQFTVTRVGGFKTMLFGGEGLYFVRVVGPG

SEQ ID NO: 39049 - protein, 85 aa, unidentified
  REGION 1..85: note = Description of Unknown:cds_NZ_WFIY01000004.1_cds_WP_155863382.1_1355 target sequence
TENPYLAFGNNRSCKKWGFVVRVDQCLGCMACMAACAIENQTPFWEELWRTHVEDLEVGEFPNSQRMFVPRLCMQCENPPCYYVC

SEQ ID NO: 39050 - protein, 85 aa, unidentified
  REGION 1..85: note = Description of Unknown:cds_NZ_WFIY01000004.1_cds_WP_155863382.1_1355 target sequence
PTGATQIVDGGIVVVDEYKCMGCLYCVEACPFGARYFYTYDDIQKAKEYYGDNLIHVVPHVDKCTFCYGTAPGGTYTPACVRTCV

SEQ ID NO: 39051 - protein, 84 aa, unidentified
  REGION 1..84: note = Description of Unknown:cds_NZ_WFIY01000004.1_cds_WP_155863382.1_1355 target sequence
VPHVDKCTFCYGTAPGGTYTPACVRTCVGGARVFGCLDDPNSEVSVLVNTGQAVVLNPQLNVQPKVFYVFNKQSGRYAQGGDNS

SEQ ID NO: 39052 - protein, 85 aa, unidentified
  REGION 1..85: note = Description of Unknown:cds_NZ_WFIY01000004.1_cds_WP_155863382.1_1355 target sequence
GCMACMAACAIENQTPFWEELWRTHVEDLEVGEFPNSQRMFVPRLCMQCENPPCYYVCPTGATQIVDGGIVVVDEYKCMGCLYCV

SEQ ID NO: 39053 - protein, 85 aa, unidentified
  REGION 1..85: note = Description of Unknown:cds_NZ_WFIY01000004.1_cds_WP_155863382.1_1355 target sequence
EACPFGARYFYTYDDIQKAKEYYGDNLIHVVPHVDKCTFCYGTAPGGTYTPACVRTCVGGARVFGCLDDPNSEVSVLVNTGQAVV

SEQ ID NO: 39054 - protein, 85 aa, unidentified
  REGION 1..85: note = Description of Unknown:cds_NZ_WFIY01000004.1_cds_WP_155864141.1_2094 target sequence
NKAVSTSVVIVVAIALILVAVAGYYLATRSPIPVGTTTLPPSTVSTVTMSTTPVTTTTTSVTTSVLPPGARPLPYNPSTKTVYLY

SEQ ID NO: 39055 - protein, 85 aa, unidentified
  REGION 1..85: note = Description of Unknown:cds_NZ_WFIY01000004.1_cds_WP_155864141.1_2094 target sequence
IASLDSGSPYNFNGTSDGELHIFIPAGWKVCVIYTNYEPIDHNFIIVKNTTAVPHCSIIPSSNIILYVGVSSSNYFDSGISSGAS

SEQ ID NO: 39056 - protein, 84 aa, unidentified
  REGION 1..84: note = Description of Unknown:cds_NZ_WFIY01000004.1_cds_WP_155864141.1_2094 target sequence
IIPSSNIILYVGVSSSNYFDSGISSGASATGSIVLSPGYYWFACGYEDHAESGMWGVIECSSSITQPYYEVTNEEIEEDEEDEE

SEQ ID NO: 39057 - protein, 85 aa, unidentified
  REGION 1..85: note = Description of Unknown:cds_NZ_WFIY01000004.1_cds_WP_155864141.1_2094 target sequence
TRSPIPVGTTTLPPSTVSTVTMSTTPVTTTTTSVTTSVLPPGARPLPYNPSTKTVYLYIASLDSGSPYNFNGTSDGELHIFIPAG

SEQ ID NO: 39058 - protein, 85 aa, unidentified
  REGION 1..85: note = Description of Unknown:cds_NZ_WFIY01000004.1_cds_WP_155864141.1_2094 target sequence
WKVCVIYTNYEPIDHNFIIVKNTTAVPHCSIIPSSNIILYVGVSSSNYFDSGISSGASATGSIVLSPGYYWFACGYEDHAESGMW

SEQ ID NO: 39059 - protein, 85 aa, unidentified
  REGION 1..85: note = Description of Unknown:cds_NZ_WFIY01000004.1_cds_WP_155864343.1_2356 target sequence
LYGSQEYWLQNVINFMTNTSEYRFVDNIWNFTSCYSELNSSSIIGKGGVSWFIEGLGINDYYSYATEWFNMSYPLNVALFIRVST

SEQ ID NO: 39060 - protein, 85 aa, unidentified
  REGION 1..85: note = Description of Unknown:cds_NZ_WFIY01000004.1_cds_WP_155864343.1_2356 target sequence
VPQGVEVLFGYINSTSCVIYDNVTIKVPCVTSAYLLVSGYNTTGSGNAYDTEFVFGGEKCVTSFNSLNAIIYMFYVNGKDIFTPK

SEQ ID NO: 39061 - protein, 84 aa, unidentified
  REGION 1..84: note = Description of Unknown:cds_NZ_WFIY01000004.1_cds_WP_155864343.1_2356 target sequence
KCVTSFNSLNAIIYMFYVNGKDIFTPKTLFPFGIDTAEASNNLFTVPYNGAYKVEVGECNEVVLTNSGSPIVVKVNGSRARANC

SEQ ID NO: 39062 - protein, 85 aa, unidentified
  REGION 1..85: note = Description of Unknown:cds_NZ_WFIY01000004.1_cds_WP_155864343.1_2356 target sequence
IWNFTSCYSELNSSSIIGKGGVSWFIEGLGINDYYSYATEWFNMSYPLNVALFIRVSTVPQGVEVLFGYINSTSCVIYDNVTIKV

SEQ ID NO: 39063 - protein, 85 aa, unidentified
  REGION 1..85: note = Description of Unknown:cds_NZ_WFIY01000004.1_cds_WP_155864343.1_2356 target sequence
PCVTSAYLLVSGYNTTGSGNAYDTEFVFGGEKCVTSFNSLNAIIYMFYVNGKDIFTPKTLFPFGIDTAEASNNLFTVPYNGAYKV

SEQ ID NO: 39064 - protein, 85 aa, unidentified
  REGION 1..85: note = Description of Unknown:cds_NC_035460.1_cds_YP_009407954.1_3 target sequence
DVLTTFRIKAYLDELTPISLNEFIHLFKINTNFAKNDRDPSKEEIVYILQEEYSDCCIRLIYDIVNNISNADNIINMIKHEHKNI

SEQ ID NO: 39065 - protein, 85 aa, unidentified
  REGION 1..85: note = Description of Unknown:cds_NC_035460.1_cds_YP_009407954.1_3 target sequence
NTINYSIKENLDYYYIDSIRDGIGIDDVIFSYFYWRRYKHKTPNKIFKEFTTYDQLALDYYKKEINEAIFAFNNGEKNYIIDINF

SEQ ID NO: 39066 - protein, 84 aa, unidentified
  REGION 1..84: note = Description of Unknown:cds_NC_035460.1_cds_YP_009407954.1_3 target sequence
LDYYKKEINEAIFAFNNGEKNYIIDINFNNMDTDSITLCKCAIGTIALLFDKVDYDINFETYFFNQVSIFTRLEFKKIIKRKYK

SEQ ID NO: 39067 - protein, 85 aa, unidentified
  REGION 1..85: note = Description of Unknown:cds_NC_035460.1_cds_YP_009407954.1_3 target sequence
KINTNFAKNDRDPSKEEIVYILQEEYSDCCIRLIYDIVNNISNADNIINMIKHEHKNINTINYSIKENLDYYYIDSIRDGIGIDD

SEQ ID NO: 39068 - protein, 85 aa, unidentified
  REGION 1..85: note = Description of Unknown:cds_NC_035460.1_cds_YP_009407954.1_3 target sequence
VIFSYFYWRRYKHKTPNKIFKEFTTYDQLALDYYKKEINEAIFAFNNGEKNYIIDINFNNMDTDSITLCKCAIGTIALLFDKVDY

SEQ ID NO: 39069 - protein, 85 aa, unidentified
  REGION 1..85: note = Description of Unknown:cds_NC_007409.1_cds_YP_319883.1_52 target sequence
FDVKSIKVPLPPEDPDKILFRIFTSDLLDGESQVDVMTHKTSNAKYPMLVYLNANELVANALRGGPTSAGFALRLITPLFVPDYP

SEQ ID NO: 39070 - protein, 85 aa, unidentified
  REGION 1..85: note = Description of Unknown:cds_NC_007409.1_cds_YP_319883.1_52 target sequence
LVLVRSILCRGTVCVGVDHKLNVEFLETFIQSDKLLYLVALNYLGYSEDGALFFEDVKTYELDISNEQREVAKQYLEVMKKTTTD

SEQ ID NO: 39071 - protein, 84 aa, unidentified
  REGION 1..84: note = Description of Unknown:cds_NC_007409.1_cds_YP_319883.1_52 target sequence
KTYELDISNEQREVAKQYLEVMKKTTTDKINKAYDVYAKEKRHRAGYGSLLAKMAEKLGTNMESLSLIGVEPFMSSKNEGTSTS

SEQ ID NO: 39072 - protein, 85 aa, unidentified
  REGION 1..85: note = Description of Unknown:cds_NC_007409.1_cds_YP_319883.1_52 target sequence
LDGESQVDVMTHKTSNAKYPMLVYLNANELVANALRGGPTSAGFALRLITPLFVPDYPLVLVRSILCRGTVCVGVDHKLNVEFLE

SEQ ID NO: 39073 - protein, 85 aa, unidentified
  REGION 1..85: note = Description of Unknown:cds_NC_007409.1_cds_YP_319883.1_52 target sequence
TFIQSDKLLYLVALNYLGYSEDGALFFEDVKTYELDISNEQREVAKQYLEVMKKTTTDKINKAYDVYAKEKRHRAGYGSLLAKMA

SEQ ID NO: 39074 - protein, 85 aa, unidentified
  REGION 1..85: note = Description of Unknown:cds_NZ_WFIY01000004.1_cds_WP_155862429.1_171 target sequence
KLILKLSGKIFDEEDPQKLLTLKEVVKELVNEGNRVGIVTGGGSTARKYISLARRMGSNEAYLDLLGIWASRLNAYLVVFSLNDL

SEQ ID NO: 39075 - protein, 85 aa, unidentified
  REGION 1..85: note = Description of Unknown:cds_NZ_WFIY01000004.1_cds_WP_155862429.1_171 target sequence
AYMKVPESLEDFIQAWSYGKVVVTGGFQPGQSTAAVSALVAEASNADLLIIATNVDGVYDRDPRIYKDARLLTKINTEKLKEILE

SEQ ID NO: 39076 - protein, 84 aa, unidentified
  REGION 1..84: note = Description of Unknown:cds_NZ_WFIY01000004.1_cds_WP_155862429.1_171 target sequence
GVYDRDPRIYKDARLLTKINTEKLKEILERTQSVKAGTYELLDPMAIKIVERSKIKVIVMNYNKLGKLKDIIAGKEISTLVEPE

SEQ ID NO: 39077 - protein, 85 aa, unidentified
  REGION 1..85: note = Description of Unknown:cds_NZ_WFIY01000004.1_cds_WP_155862429.1_171 target sequence
ELVNEGNRVGIVTGGGSTARKYISLARRMGSNEAYLDLLGIWASRLNAYLVVFSLNDLAYMKVPESLEDFIQAWSYGKVVVTGGF

SEQ ID NO: 39078 - protein, 85 aa, unidentified
  REGION 1..85: note = Description of Unknown:cds_NZ_WFIY01000004.1_cds_WP_155862429.1_171 target sequence
QPGQSTAAVSALVAEASNADLLIIATNVDGVYDRDPRIYKDARLLTKINTEKLKEILERTQSVKAGTYELLDPMAIKIVERSKIK

SEQ ID NO: 39079 - protein, 85 aa, unidentified
  REGION 1..85: note = Description of Unknown:cds_NZ_WFIY01000004.1_cds_WP_155862575.1_346 target sequence
DKADLLFNAYKSRKEIDPFEVNEKEAEEIFKKFSSRLVEEEGLGGYKISLVTQEHLKRFHGKEPMYGILTKPMIVSENEIELWFN

SEQ ID NO: 39080 - protein, 85 aa, unidentified
  REGION 1..85: note = Description of Unknown:cds_NZ_WFIY01000004.1_cds_WP_155862575.1_346 target sequence
HNFAEVEVVFFADSCRNDNFPQCIKETRLGVELPATRFNTWNLNALQLKADDSAAGRLYIGEEVSLPIKGVEMLINDKLVGRGVP

SEQ ID NO: 39081 - protein, 84 aa, unidentified
  REGION 1..84: note = Description of Unknown:cds_NZ_WFIY01000004.1_cds_WP_155862575.1_346 target sequence
RLYIGEEVSLPIKGVEMLINDKLVGRGVPNLIYGGPMDMVKWLISKIGEVNGYVSSGVFIGPFEVKKGDKITILGDVNFEIKLV

SEQ ID NO: 39082 - protein, 85 aa, unidentified
  REGION 1..85: note = Description of Unknown:cds_NZ_WFIY01000004.1_cds_WP_155862575.1_346 target sequence
EIFKKFSSRLVEEEGLGGYKISLVTQEHLKRFHGKEPMYGILTKPMIVSENEIELWFNHNFAEVEVVFFADSCRNDNFPQCIKET

SEQ ID NO: 39083 - protein, 85 aa, unidentified
  REGION 1..85: note = Description of Unknown:cds_NZ_WFIY01000004.1_cds_WP_155862575.1_346 target sequence
RLGVELPATRFNTWNLNALQLKADDSAAGRLYIGEEVSLPIKGVEMLINDKLVGRGVPNLIYGGPMDMVKWLISKIGEVNGYVSS

SEQ ID NO: 39084 - protein, 85 aa, unidentified
  REGION 1..85: note = Description of Unknown:cds_NZ_WFIY01000004.1_cds_WP_013775459.1_954 target sequence
SEEENKGTELSEAEKAELQKSEKGAVIELLAPLENYLSAGVHIGTHTCTKYMEKFIYRVRPEGLYVLDVRKIDERLRIAAKFLSR

SEQ ID NO: 39085 - protein, 85 aa, unidentified
  REGION 1..85: note = Description of Unknown:cds_NZ_WFIY01000004.1_cds_WP_013775459.1_954 target sequence
FTPSGILAVASRPYAFTPVQKFAEVVGGRAITGRLVPGTLTNAYLDRFIEPEVLLVSDPRTDTQAIKEAADMGIPVVAFADTDAK

SEQ ID NO: 39086 - protein, 84 aa, unidentified
  REGION 1..84: note = Description of Unknown:cds_NZ_WFIY01000004.1_cds_WP_013775459.1_954 target sequence
SDPRTDTQAIKEAADMGIPVVAFADTDAKIEYVDLVIPANNKGRKSLALLYWLLARQILRERKQIPMDADIPVKVEEFEVKLVQ

SEQ ID NO: 39087 - protein, 85 aa, unidentified
  REGION 1..85: note = Description of Unknown:cds_NZ_WFIY01000004.1_cds_WP_013775459.1_954 target sequence
ELLAPLENYLSAGVHIGTHTCTKYMEKFIYRVRPEGLYVLDVRKIDERLRIAAKFLSRFTPSGILAVASRPYAFTPVQKFAEVVG

SEQ ID NO: 39088 - protein, 85 aa, unidentified
  REGION 1..85: note = Description of Unknown:cds_NZ_WFIY01000004.1_cds_WP_013775459.1_954 target sequence
GRAITGRLVPGTLTNAYLDRFIEPEVLLVSDPRTDTQAIKEAADMGIPVVAFADTDAKIEYVDLVIPANNKGRKSLALLYWLLAR

SEQ ID NO: 39089 - protein, 85 aa, unidentified
  REGION 1..85: note = Description of Unknown:cds_NZ_WFIY01000004.1_cds_WP_155863105.1_1022 target sequence
PSLRWLGHAAIELNLQGKKIVIDPFIKNNPTAPVKLSYFDDFDLIAVTHDHYDHLGDTVEIMNKNKKALLFATWDLENYLNKEYN

SEQ ID NO: 39090 - protein, 85 aa, unidentified
  REGION 1..85: note = Description of Unknown:cds_NZ_WFIY01000004.1_cds_WP_155863105.1_1022 target sequence
IPWDRMIPANVGGYIEYQGIKLALTQAIHSSEHSDPTGVIISAEGITIYHAGDTGLFEGMKIIGEVFKPDYALLPIGGRFTMDPY

SEQ ID NO: 39091 - protein, 84 aa, unidentified
  REGION 1..84: note = Description of Unknown:cds_NZ_WFIY01000004.1_cds_WP_155863105.1_1022 target sequence
FEGMKIIGEVFKPDYALLPIGGRFTMDPYQASIAVDMIKPKKGVIPIHYNTWDLIKVDPRDFERYVKEKGYKPIILQPGQSIEL

SEQ ID NO: 39092 - protein, 85 aa, unidentified
  REGION 1..85: note = Description of Unknown:cds_NZ_WFIY01000004.1_cds_WP_155863105.1_1022 target sequence
NNPTAPVKLSYFDDFDLIAVTHDHYDHLGDTVEIMNKNKKALLFATWDLENYLNKEYNIPWDRMIPANVGGYIEYQGIKLALTQA

SEQ ID NO: 39093 - protein, 85 aa, unidentified
  REGION 1..85: note = Description of Unknown:cds_NZ_WFIY01000004.1_cds_WP_155863105.1_1022 target sequence
IHSSEHSDPTGVIISAEGITIYHAGDTGLFEGMKIIGEVFKPDYALLPIGGRFTMDPYQASIAVDMIKPKKGVIPIHYNTWDLIK

SEQ ID NO: 39094 - protein, 85 aa, unidentified
  REGION 1..85: note = Description of Unknown:cds_NZ_WFIY01000004.1_cds_WP_155864004.1_1932 target sequence
PGGRGRIGVIIPANNAAMEYDLWKMAPEGVTIHVTRMKPTKGCEPTDVEAFRQEIKETYYLLHEVSDVIIYGRTYGTHKHGNIIK

SEQ ID NO: 39095 - protein, 85 aa, unidentified
  REGION 1..85: note = Description of Unknown:cds_NZ_WFIY01000004.1_cds_WP_155864004.1_1932 target sequence
EIIKDVVIPEEAVVEILRKLGVKKVWVGTPYIKERTLEEVSWIRSQGFEVTGFDGLGKIKGVDISNTPVFTIYRLVKRNLEDVLK

SEQ ID NO: 39096 - protein, 84 aa, unidentified
  REGION 1..84: note = Description of Unknown:cds_NZ_WFIY01000004.1_cds_WP_155864004.1_1932 target sequence
GKIKGVDISNTPVFTIYRLVKRNLEDVLKADAVYIACTALSTFEASQYLHEDLGMPIVTENVAAMWKALQKIKVKGITPGFELR

SEQ ID NO: 39097 - protein, 85 aa, unidentified
  REGION 1..85: note = Description of Unknown:cds_NZ_WFIY01000004.1_cds_WP_155864004.1_1932 target sequence
EGVTIHVTRMKPTKGCEPTDVEAFRQEIKETYYLLHEVSDVIIYGRTYGTHKHGNIIKEIIKDVVIPEEAVVEILRKLGVKKVWV

SEQ ID NO: 39098 - protein, 85 aa, unidentified
  REGION 1..85: note = Description of Unknown:cds_NZ_WFIY01000004.1_cds_WP_155864004.1_1932 target sequence
GTPYIKERTLEEVSWIRSQGFEVTGFDGLGKIKGVDISNTPVFTIYRLVKRNLEDVLKADAVYIACTALSTFEASQYLHEDLGMP

SEQ ID NO: 39099 - protein, 85 aa, unidentified
  REGION 1..85: note = Description of Unknown:cds_NZ_WFIY01000004.1_cds_1993 target sequence
VVLVKGIKVKLEDKEILHGISFSTEGGINVILGPNGSGKTTLLRTLIGMIKPTEGEIQINKRISYVPSEFFPAQMRVKDVLLSGE

SEQ ID NO: 39100 - protein, 85 aa, unidentified
  REGION 1..85: note = Description of Unknown:cds_NZ_WFIY01000004.1_cds_1993 target sequence
KRRKIDDYIENAKILGVEDFLDREFYSLSSGEKRLVLICKALTEGDLVIMDEPLSNLDLANKTRIMNIMKEVSKTKEFLITSHEL

SEQ ID NO: 39101 - protein, 84 aa, unidentified
  REGION 1..84: note = Description of Unknown:cds_NZ_WFIY01000004.1_cds_1993 target sequence
DLANKTRIMNIMKEVSKTKEFLITSHELDVINISNKVIIIKNGEVVYQGKPSDVTEEVLSEVYGVRIKKYEIDGNIIFVVKSSF

SEQ ID NO: 39102 - protein, 85 aa, unidentified
  REGION 1..85: note = Description of Unknown:cds_NZ_WFIY01000004.1_cds_1993 target sequence
INVILGPNGSGKTTLLRTLIGMIKPTEGEIQINKRISYVPSEFFPAQMRVKDVLLSGEKRRKIDDYIENAKILGVEDFLDREFYS

SEQ ID NO: 39103 - protein, 85 aa, unidentified
  REGION 1..85: note = Description of Unknown:cds_NZ_WFIY01000004.1_cds_1993 target sequence
LSSGEKRLVLICKALTEGDLVIMDEPLSNLDLANKTRIMNIMKEVSKTKEFLITSHELDVINISNKVIIIKNGEVVYQGKPSDVT

SEQ ID NO: 39104 - protein, 85 aa, unidentified
  REGION 1..85: note = Description of Unknown:cds_NC_035460.1_cds_YP_009407984.1_33 target sequence
DTCAIITSIISLFDTSIEYQLQICRSVASKLSIEIYTEINEHGFITESDLNTNIWKRIIYSSVNTLIFYKTKQISSSVEQFYHAY

SEQ ID NO: 39105 - protein, 85 aa, unidentified
  REGION 1..85: note = Description of Unknown:cds_NC_035460.1_cds_YP_009407984.1_33 target sequence
TQLKEHFINIIFAKDNLLFSGEPPQFSIINFTLQSVDKVKIKDLLTLLDIETCNYKIVIEYINSNFGSIDALLKLFKNNKSIIMS

SEQ ID NO: 39106 - protein, 84 aa, unidentified
  REGION 1..84: note = Description of Unknown:cds_NC_035460.1_cds_YP_009407984.1_33 target sequence
IVIEYINSNFGSIDALLKLFKNNKSIIMSILAKSKLNIKTPKKAMIKYKKIIYKIKSLQSNYIQPIEDICLKFNNISLESNYTQ

SEQ ID NO: 39107 - protein, 85 aa, unidentified
  REGION 1..85: note = Description of Unknown:cds_NC_035460.1_cds_YP_009407984.1_33 target sequence
ASKLSIEIYTEINEHGFITESDLNTNIWKRIIYSSVNTLIFYKTKQISSSVEQFYHAYTQLKEHFINIIFAKDNLLFSGEPPQFS

SEQ ID NO: 39108 - protein, 85 aa, unidentified
  REGION 1..85: note = Description of Unknown:cds_NC_035460.1_cds_YP_009407984.1_33 target sequence
IINFTLQSVDKVKIKDLLTLLDIETCNYKIVIEYINSNFGSIDALLKLFKNNKSIIMSILAKSKLNIKTPKKAMIKYKKIIYKIK

SEQ ID NO: 39109 - protein, 85 aa, unidentified
  REGION 1..85: note = Description of Unknown:cds_NC_039198.1_cds_YP_009512974.1_3 target sequence
DASPSDAEISAWIDKGLDTVEHFLSVATPPVRSLGKSSIKPGNTGELISAAEKLVSNMEGITASSPTMKGPDPAVRPKERTKPPQ

SEQ ID NO: 39110 - protein, 85 aa, unidentified
  REGION 1..85: note = Description of Unknown:cds_NC_039198.1_cds_YP_009512974.1_3 target sequence
DNAQNQEQDDIYEEVIPSESTALIPKSAPKKPSRNKEKVMSMMALSPPEDNSAKEKPSVFKRGDSSATWPRRHRQGGHRREIAIS

SEQ ID NO: 39111 - protein, 84 aa, unidentified
  REGION 1..84: note = Description of Unknown:cds_NC_039198.1_cds_YP_009512974.1_3 target sequence
PSVFKRGDSSATWPRRHRQGGHRREIAISWATGVPRVTEWCNPICHPISQSTYRGSCRCGFCPDVCSLCEGDYALLTDIRDSDY

SEQ ID NO: 39112 - protein, 85 aa, unidentified
  REGION 1..85: note = Description of Unknown:cds_NC_039198.1_cds_YP_009512974.1_3 target sequence
TPPVRSLGKSSIKPGNTGELISAAEKLVSNMEGITASSPTMKGPDPAVRPKERTKPPQDNAQNQEQDDIYEEVIPSESTALIPKS

SEQ ID NO: 39113 - protein, 85 aa, unidentified
  REGION 1..85: note = Description of Unknown:cds_NC_039198.1_cds_YP_009512974.1_3 target sequence
APKKPSRNKEKVMSMMALSPPEDNSAKEKPSVFKRGDSSATWPRRHRQGGHRREIAISWATGVPRVTEWCNPICHPISQSTYRGS

SEQ ID NO: 39114 - protein, 85 aa, unidentified
  REGION 1..85: note = Description of Unknown:cds_NC_030656.1_cds_YP_009268746.1_31 target sequence
ACCSCTGSSALVAFDVRRLKDKISVLLDAAPEPYLAKDVAFMLRCPVKQVNICLYSMEKECSVKRLENCHGSAPLWVCTSQKNNN

SEQ ID NO: 39115 - protein, 85 aa, unidentified
  REGION 1..85: note = Description of Unknown:cds_NC_030656.1_cds_YP_009268746.1_31 target sequence
EEEKEESKEEEEKNKETEDVANNNYRKRFNPFGDELTKEKIEHLKCVPPASAINEYCQLTARTQSFIFSQVETVPCPKFSCLALI

SEQ ID NO: 39116 - protein, 84 aa, unidentified
  REGION 1..84: note = Description of Unknown:cds_NC_030656.1_cds_YP_009268746.1_31 target sequence
CQLTARTQSFIFSQVETVPCPKFSCLALIDNIILASACGFSKRSAKNLACAEALKVLLEKFVKVNQPQRQRSVSVESYGPEFYI

SEQ ID NO: 39117 - protein, 85 aa, unidentified
  REGION 1..85: note = Description of Unknown:cds_NC_030656.1_cds_YP_009268746.1_31 target sequence
DAAPEPYLAKDVAFMLRCPVKQVNICLYSMEKECSVKRLENCHGSAPLWVCTSQKNNNEEEKEESKEEEEKNKETEDVANNNYRK

SEQ ID NO: 39118 - protein, 85 aa, unidentified
  REGION 1..85: note = Description of Unknown:cds_NC_030656.1_cds_YP_009268746.1_31 target sequence
RFNPFGDELTKEKIEHLKCVPPASAINEYCQLTARTQSFIFSQVETVPCPKFSCLALIDNIILASACGFSKRSAKNLACAEALKV

SEQ ID NO: 39119 - protein, 85 aa, unidentified
  REGION 1..85: note = Description of Unknown:hvTR_P0CK56 target sequence
SDQGRLSLPRGEGGTDEPNPRHLCSYSKLEFHLPLPESMASVFACWGCGEYHVCDGSSECTLIETHEGVVCALTGNYMGPHFQPA

SEQ ID NO: 39120 - protein, 85 aa, unidentified
  REGION 1..85: note = Description of Unknown:hvTR_P0CK56 target sequence
LRPWTEIRQDTQDQRDKWEPEQVQGLVKTVVNHLYHYFLNENVISGVSEALFDQEGALRPHIPALVSFVFPCCLMLFRGASSEKV

SEQ ID NO: 39121 - protein, 84 aa, unidentified
  REGION 1..84: note = Description of Unknown:hvTR_P0CK56 target sequence
GALRPHIPALVSFVFPCCLMLFRGASSEKVVDVVLSLYIHVIISIYSQKTVYGALLFKSTRNKRYDAVAKRMRELWMSTLTTKC

SEQ ID NO: 39122 - protein, 85 aa, unidentified
  REGION 1..85: note = Description of Unknown:hvTR_P0CK56 target sequence
KLEFHLPLPESMASVFACWGCGEYHVCDGSSECTLIETHEGVVCALTGNYMGPHFQPALRPWTEIRQDTQDQRDKWEPEQVQGLV

SEQ ID NO: 39123 - protein, 85 aa, unidentified
  REGION 1..85: note = Description of Unknown:hvTR_P0CK56 target sequence
KTVVNHLYHYFLNENVISGVSEALFDQEGALRPHIPALVSFVFPCCLMLFRGASSEKVVDVVLSLYIHVIISIYSQKTVYGALLF

SEQ ID NO: 39124 - protein, 85 aa, unidentified
  REGION 1..85: note = Description of Unknown:cds_NC_002645.1_cds_NP_073555.1_7 target sequence
SNDNCTGDIVTHLKNWNFGWNVILTIFIVILQFGHYKYSRLFYGLKMLVLWLLWPLVLALSIFDTWANWDSNWAFVAFSFFMAVS

SEQ ID NO: 39125 - protein, 85 aa, unidentified
  REGION 1..85: note = Description of Unknown:cds_NC_002645.1_cds_NP_073555.1_7 target sequence
TLVMWVMYFANSFRLFRRARTFWAWNPEVNAITVTTVLGQTYYQPIQQAPTGITVTLLSGVLYVDGHRLASGVQVHNLPEYMTVA

SEQ ID NO: 39126 - protein, 84 aa, unidentified
  REGION 1..84: note = Description of Unknown:cds_NC_002645.1_cds_NP_073555.1_7 target sequence
TLLSGVLYVDGHRLASGVQVHNLPEYMTVAVPSTTIIYSRVGRSVNSQNSTGWVFYVRVKHGDFSAVSSPMSNMTENERLLHFF

SEQ ID NO: 39127 - protein, 85 aa, unidentified
  REGION 1..85: note = Description of Unknown:cds_NC_002645.1_cds_NP_073555.1_7 target sequence
IVILQFGHYKYSRLFYGLKMLVLWLLWPLVLALSIFDTWANWDSNWAFVAFSFFMAVSTLVMWVMYFANSFRLFRRARTFWAWNP

SEQ ID NO: 39128 - protein, 85 aa, unidentified
  REGION 1..85: note = Description of Unknown:cds_NC_002645.1_cds_NP_073555.1_7 target sequence
EVNAITVTTVLGQTYYQPIQQAPTGITVTLLSGVLYVDGHRLASGVQVHNLPEYMTVAVPSTTIIYSRVGRSVNSQNSTGWVFYV

SEQ ID NO: 39129 - protein, 85 aa, unidentified
  REGION 1..85: note = Description of Unknown:cds_NZ_WFIY01000004.1_cds_WP_155862388.1_125 target sequence
IHEILKIIDENREFLKKMGWIVSDPYSFEWWGGLKSADEIAISAFLVQMTKWETVAKVIENLRRKGLNYIDKIAELPLSVLEDQI

SEQ ID NO: 39130 - protein, 85 aa, unidentified
  REGION 1..85: note = Description of Unknown:cds_NZ_WFIY01000004.1_cds_WP_155862388.1_125 target sequence
RSVNFYKTKARRLKNFSEIVSENGGLKNFLTVENRDKILEIEGIGEETADSLLLFANNQLVFPQSEYLRRVLSRVLNKKMSKKEA

SEQ ID NO: 39131 - protein, 84 aa, unidentified
  REGION 1..84: note = Description of Unknown:cds_NZ_WFIY01000004.1_cds_WP_155862388.1_125 target sequence
ANNQLVFPQSEYLRRVLSRVLNKKMSKKEAKNYVEENLKKDLFLYKLFHAGVVSIGKAFCYLNKPKCDKCILKPLCRSKYNETL

SEQ ID NO: 39132 - protein, 85 aa, unidentified
  REGION 1..85: note = Description of Unknown:cds_NZ_WFIY01000004.1_cds_WP_155862388.1_125 target sequence
FEWWGGLKSADEIAISAFLVQMTKWETVAKVIENLRRKGLNYIDKIAELPLSVLEDQIRSVNFYKTKARRLKNFSEIVSENGGLK

SEQ ID NO: 39133 - protein, 85 aa, unidentified
  REGION 1..85: note = Description of Unknown:cds_NZ_WFIY01000004.1_cds_WP_155862388.1_125 target sequence
NFLTVENRDKILEIEGIGEETADSLLLFANNQLVFPQSEYLRRVLSRVLNKKMSKKEAKNYVEENLKKDLFLYKLFHAGVVSIGK

SEQ ID NO: 39134 - protein, 85 aa, unidentified
  REGION 1..85: note = Description of Unknown:cds_NZ_WFIY01000004.1_cds_WP_155863096.1_1010 target sequence
KDEVLERISSKKNLQVALDFISLDDAMKVAKMAIEGGVDIVEVGTPLVKAEGIRGIKQLRELAKDKILLADTKTADAGDVEVEIA

SEQ ID NO: 39135 - protein, 85 aa, unidentified
  REGION 1..85: note = Description of Unknown:cds_NZ_WFIY01000004.1_cds_WP_155863096.1_1010 target sequence
KLGNADIMTVLGIMSDSTIKSAVDKAKELGIVVQADLINVNDPVKRAKRLKELGVDIIGLHVGLDVQKERGITVTSLKNEIKQIS

SEQ ID NO: 39136 - protein, 84 aa, unidentified
  REGION 1..84: note = Description of Unknown:cds_NZ_WFIY01000004.1_cds_WP_155863096.1_1010 target sequence
DIIGLHVGLDVQKERGITVTSLKNEIKQISEFSLVSVAGGLNEKNIVDLLDLPINIYVVGGAITRSSDPLLVTKRLINIIGGHK

SEQ ID NO: 39137 - protein, 85 aa, unidentified
  REGION 1..85: note = Description of Unknown:cds_NZ_WFIY01000004.1_cds_WP_155863096.1_1010 target sequence
KVAKMAIEGGVDIVEVGTPLVKAEGIRGIKQLRELAKDKILLADTKTADAGDVEVEIAKLGNADIMTVLGIMSDSTIKSAVDKAK

SEQ ID NO: 39138 - protein, 85 aa, unidentified
  REGION 1..85: note = Description of Unknown:cds_NZ_WFIY01000004.1_cds_WP_155863096.1_1010 target sequence
ELGIVVQADLINVNDPVKRAKRLKELGVDIIGLHVGLDVQKERGITVTSLKNEIKQISEFSLVSVAGGLNEKNIVDLLDLPINIY

SEQ ID NO: 39139 - protein, 85 aa, unidentified
  REGION 1..85: note = Description of Unknown:cds_NC_035460.1_cds_YP_009408122.1_171 target sequence
KHFIFTCVIMYSLFNFYSTEYNKTSKVNNYRYWNLAMSLTVGLTYPITPLERECKVNIVNASKVLIIGYGLQVELNIINSIDGDI

SEQ ID NO: 39140 - protein, 85 aa, unidentified
  REGION 1..85: note = Description of Unknown:cds_NC_035460.1_cds_YP_009408122.1_171 target sequence
VSVSEGVQNNNTLVILIFIGNDKTTKENTIIPKTNITITCIEMDCSNTKYNFTNSINSINSNADYLTIYGDCVKCVNLDTYPSTL

SEQ ID NO: 39141 - protein, 84 aa, unidentified
  REGION 1..84: note = Description of Unknown:cds_NC_035460.1_cds_YP_009408122.1_171 target sequence
INSINSNADYLTIYGDCVKCVNLDTYPSTLYGYTPPKGYHASAYKNVKRSGYGNSILTNNMCDFLTNVTYTSCAKYSNTYFKIF

SEQ ID NO: 39142 - protein, 85 aa, unidentified
  REGION 1..85: note = Description of Unknown:cds_NC_035460.1_cds_YP_009408122.1_171 target sequence
NNYRYWNLAMSLTVGLTYPITPLERECKVNIVNASKVLIIGYGLQVELNIINSIDGDIVSVSEGVQNNNTLVILIFIGNDKTTKE

SEQ ID NO: 39143 - protein, 85 aa, unidentified
  REGION 1..85: note = Description of Unknown:cds_NC_035460.1_cds_YP_009408122.1_171 target sequence
NTIIPKTNITITCIEMDCSNTKYNFTNSINSINSNADYLTIYGDCVKCVNLDTYPSTLYGYTPPKGYHASAYKNVKRSGYGNSIL

SEQ ID NO: 39144 - protein, 85 aa, unidentified
  REGION 1..85: note = Description of Unknown:cds_NC_034440.1_cds_YP_009361861.1_7 target sequence
AFSLALFKPISLVPAFPEAHGGEPAQFANVFTCIPTVGYIAALTVNVCILPLLLLIPQDTCRRSIFKTSILYGLFVYNFILAITL

SEQ ID NO: 39145 - protein, 85 aa, unidentified
  REGION 1..85: note = Description of Unknown:cds_NC_034440.1_cds_YP_009361861.1_7 target sequence
INGVYTPTGGTLVAFLVVLMITWLADRVRFCLLLRSYIPLFDMRSHFIRVSTVSSYGMVPVNQTKPLFIRNFDQRCRCSRCFYVH

SEQ ID NO: 39146 - protein, 84 aa, unidentified
  REGION 1..84: note = Description of Unknown:cds_NC_034440.1_cds_YP_009361861.1_7 target sequence
YGMVPVNQTKPLFIRNFDQRCRCSRCFYVHSSHYLECTYISRFTKVSLVAVTDFSLNGITSTVFVPSTRDSVPLHIIAPSVLSV

SEQ ID NO: 39147 - protein, 85 aa, unidentified
  REGION 1..85: note = Description of Unknown:cds_NC_034440.1_cds_YP_009361861.1_7 target sequence
ANVFTCIPTVGYIAALTVNVCILPLLLLIPQDTCRRSIFKTSILYGLFVYNFILAITLINGVYTPTGGTLVAFLVVLMITWLADR

SEQ ID NO: 39148 - protein, 85 aa, unidentified
  REGION 1..85: note = Description of Unknown:cds_NC_034440.1_cds_YP_009361861.1_7 target sequence
VRFCLLLRSYIPLFDMRSHFIRVSTVSSYGMVPVNQTKPLFIRNFDQRCRCSRCFYVHSSHYLECTYISRFTKVSLVAVTDFSLN

SEQ ID NO: 39149 - protein, 85 aa, unidentified
  REGION 1..85: note = Description of Unknown:cds_NC_035464.1_cds_YP_009408159.1_13 target sequence
ACQTIQDLSIGPYTIESGQVCVEGTTSGTASLTMKVGPFTYTKTIPWGAVNPQQTLGTSSGRVYLIGTNPLSSLLVDDVLTVAEY

SEQ ID NO: 39150 - protein, 85 aa, unidentified
  REGION 1..85: note = Description of Unknown:cds_NC_035464.1_cds_YP_009408159.1_13 target sequence
AQKVASYLGYSGSFSIVNVGLTNGSDCNDCVVYVDYVASSPPLAVALVIALVIVFVIAIVLGIYFISAAIESFQPAPPTPPPPGS

SEQ ID NO: 39151 - protein, 84 aa, unidentified
  REGION 1..84: note = Description of Unknown:cds_NC_035464.1_cds_YP_009408159.1_13 target sequence
VIAIVLGIYFISAAIESFQPAPPTPPPPGSPPSLYQQYYQEYAQYLKEKQTASITGGVFGTSTALVALGIAILAFLAFTDHGGK

SEQ ID NO: 39152 - protein, 85 aa, unidentified
  REGION 1..85: note = Description of Unknown:cds_NC_035464.1_cds_YP_009408159.1_13 target sequence
GTASLTMKVGPFTYTKTIPWGAVNPQQTLGTSSGRVYLIGTNPLSSLLVDDVLTVAEYAQKVASYLGYSGSFSIVNVGLTNGSDC

SEQ ID NO: 39153 - protein, 85 aa, unidentified
  REGION 1..85: note = Description of Unknown:cds_NC_035464.1_cds_YP_009408159.1_13 target sequence
NDCVVYVDYVASSPPLAVALVIALVIVFVIAIVLGIYFISAAIESFQPAPPTPPPPGSPPSLYQQYYQEYAQYLKEKQTASITGG

SEQ ID NO: 39154 - protein, 85 aa, unidentified
  REGION 1..85: note = Description of Unknown:hvTR_Q6TVB1 target sequence
NLRLCGSCRRNGLVSDTDYDFCLFCETVFPMGIRVQKRSNFHVSNKLIHLRNVLRRLLSKQCSEDVIRELREIMDRHQIRPVDVD

SEQ ID NO: 39155 - protein, 85 aa, unidentified
  REGION 1..85: note = Description of Unknown:hvTR_Q6TVB1 target sequence
ANYVSSFLKDSDMINKKDYKLVFEIINQVKNEKLNLSTEKINEVIEIFKQLVFFCQESTPSKTINYSFFLDKIFEVTGVTSNLRP

SEQ ID NO: 39156 - protein, 84 aa, unidentified
  REGION 1..84: note = Description of Unknown:hvTR_Q6TVB1 target sequence
CQESTPSKTINYSFFLDKIFEVTGVTSNLRPQTVKNYAKNNSNQLTWENFLAHMRARKRAAQIQEFGHDYVFRHARFAACSLDP

SEQ ID NO: 39157 - protein, 85 aa, unidentified
  REGION 1..85: note = Description of Unknown:hvTR_Q6TVB1 target sequence
VFPMGIRVQKRSNFHVSNKLIHLRNVLRRLLSKQCSEDVIRELREIMDRHQIRPVDVDANYVSSFLKDSDMINKKDYKLVFEIIN

SEQ ID NO: 39158 - protein, 85 aa, unidentified
  REGION 1..85: note = Description of Unknown:hvTR_Q6TVB1 target sequence
QVKNEKLNLSTEKINEVIEIFKQLVFFCQESTPSKTINYSFFLDKIFEVTGVTSNLRPQTVKNYAKNNSNQLTWENFLAHMRARK

SEQ ID NO: 39159 - protein, 85 aa, unidentified
  REGION 1..85: note = Description of Unknown:hvTR_Q76QJ1 target sequence
NLRLCSGCRHNGIVSEQGYEYCIFCESVFQKCTKVQKKSNFHVSNKLIHLRNVLRRLLSHQCSGEIISELLDIMEKNQISTDDVD

SEQ ID NO: 39160 - protein, 85 aa, unidentified
  REGION 1..85: note = Description of Unknown:hvTR_Q76QJ1 target sequence
ANFVSSFLKANERINKKDYKLVFEIINQVKDEKLNLSTEKINEVVEIFKHLVFFCQENTPSKTINYSFFLDKIFDITSVTKNLKP

SEQ ID NO: 39161 - protein, 84 aa, unidentified
  REGION 1..84: note = Description of Unknown:hvTR_Q76QJ1 target sequence
CQENTPSKTINYSFFLDKIFDITSVTKNLKPQTVKNYTKNNSNQLVWENFLAHMRSKKRVTMVEDYGHEYVFVDERFSTCSLEV

SEQ ID NO: 39162 - protein, 85 aa, unidentified
  REGION 1..85: note = Description of Unknown:hvTR_Q76QJ1 target sequence
VFQKCTKVQKKSNFHVSNKLIHLRNVLRRLLSHQCSGEIISELLDIMEKNQISTDDVDANFVSSFLKANERINKKDYKLVFEIIN

SEQ ID NO: 39163 - protein, 85 aa, unidentified
  REGION 1..85: note = Description of Unknown:hvTR_Q76QJ1 target sequence
QVKDEKLNLSTEKINEVVEIFKHLVFFCQENTPSKTINYSFFLDKIFDITSVTKNLKPQTVKNYTKNNSNQLVWENFLAHMRSKK

SEQ ID NO: 39164 - protein, 85 aa, unidentified
  REGION 1..85: note = Description of Unknown:hvTR_Q5IXR3 target sequence
NLRLCSCCRHNGIVSEQGYEYCIFCESVFQKCTKVQKKSNFHVSNKLIHLRNVLRRLLSHQCSGEIISELLDIMEKNQISTDDVD

SEQ ID NO: 39165 - protein, 85 aa, unidentified; identical to SEQ ID NO: 39160
  REGION 1..85: note = Description of Unknown:hvTR_Q5IXR3 target sequence

SEQ ID NO: 39166 - protein, 84 aa, unidentified; identical to SEQ ID NO: 39161
  REGION 1..84: note = Description of Unknown:hvTR_Q5IXR3 target sequence

SEQ ID NO: 39167 - protein, 85 aa, unidentified; identical to SEQ ID NO: 39162
  REGION 1..85: note = Description of Unknown:hvTR_Q5IXR3 target sequence

SEQ ID NO: 39168 - protein, 85 aa, unidentified; identical to SEQ ID NO: 39163
  REGION 1..85: note = Description of Unknown:hvTR_Q5IXR3 target sequence

SEQ ID NO: 39169 - protein, 85 aa, unidentified
  REGION 1..85: note = Description of Unknown:hvTR_Q6TVP3 target sequence
NLRMCGGCRRNGLVSDADYEFCLFCETVFPMGIRVQKRSNFHVSNKLIHLRNVLRRLLSKQCSEEVIRDLRAMMDRHQIRPEDVD

SEQ ID NO: 39170 - protein, 85 aa, unidentified
  REGION 1..85: note = Description of Unknown:hvTR_Q6TVP3 target sequence
ANYVSSFLKDSEMINKKDYKLVFEIINQVKNEKLDLSTEKINEVIEIFKQLVFFCQEITPTKTINYSFFLDKIFEVTGVTRNLRP

SEQ ID NO: 39171 - protein, 84 aa, unidentified
  REGION 1..84: note = Description of Unknown:hvTR_Q6TVP3 target sequence
CQEITPTKTINYSFFLDKIFEVTGVTRNLRPQTVKNYAKNNSNQLTWENFLAHMRARKRAAQIPEFGHEYVFSPARFAACSLDL

SEQ ID NO: 39172 - protein, 85 aa, unidentified
  REGION 1..85: note = Description of Unknown:hvTR_Q6TVP3 target sequence
VFPMGIRVQKRSNFHVSNKLIHLRNVLRRLLSKQCSEEVIRDLRAMMDRHQIRPEDVDANYVSSFLKDSEMINKKDYKLVFEIIN

SEQ ID NO: 39173 - protein, 85 aa, unidentified
  REGION 1..85: note = Description of Unknown:hvTR_Q6TVP3 target sequence
QVKNEKLDLSTEKINEVIEIFKQLVFFCQEITPTKTINYSFFLDKIFEVTGVTRNLRPQTVKNYAKNNSNQLTWENFLAHMRARK

SEQ ID NO: 39174 - protein, 85 aa, unidentified
  REGION 1..85: note = Description of Unknown:hvTR_D3IZ94 target sequence
NLRMCGGCRRNGLVSDADYEFCLFCETVFPMGIRVQKRSNFHVSNKLIHLRNVLRRLLSKQCSEEVIRDLREMMDRHQIRPEDVD

SEQ ID NO: 39175 - protein, 85 aa, unidentified; identical to SEQ ID NO: 39170
  REGION 1..85: note = Description of Unknown:hvTR_D3IZ94 target sequence

SEQ ID NO: 39176 - protein, 84 aa, unidentified; identical to SEQ ID NO: 39171
  REGION 1..84: note = Description of Unknown:hvTR_D3IZ94 target sequence

SEQ ID NO: 39177 - protein, 85 aa, unidentified
  REGION 1..85: note = Description of Unknown:hvTR_D3IZ94 target sequence
VFPMGIRVQKRSNFHVSNKLIHLRNVLRRLLSKQCSEEVIRDLREMMDRHQIRPEDVDANYVSSFLKDSEMINKKDYKLVFEIIN

SEQ ID NO: 39178 - protein, 85 aa, unidentified; identical to SEQ ID NO: 39173
  REGION 1..85: note = Description of Unknown:hvTR_D3IZ94 target sequence

SEQ ID NO: 39179 - protein, 85 aa, unidentified
  REGION 1..85: note = Description of Unknown:hvTR_A7XCM0 target sequence
NLKLCSGCSHNGIVSENGYEFCIFCDAVFQKCSKISKRSNFHVSNKLIHLRNVLRRLLSNQCSGEIISEILLLMKKNQISTDDVD

SEQ ID NO: 39180 - protein, 85 aa, unidentified
  REGION 1..85: note = Description of Unknown:hvTR_A7XCM0 target sequence
ANFVSSFLKAHEKINKKDYKLVFEIINHVKDEKLNLTTEKINEVVEIFKHLVFFCQENTPSKTINYSFFLDKIFDITFVTKNLKP

SEQ ID NO: 39181 - protein, 84 aa, unidentified
  REGION 1..84: note = Description of Unknown:hvTR_A7XCM0 target sequence
CQENTPSKTINYSFFLDKIFDITFVTKNLKPQTVKNYTKNNSNQLIWENFLDHMKNKKRASVIVDFGHDYVFNNERFVSCSLEV

SEQ ID NO: 39182 - protein, 85 aa, unidentified
  REGION 1..85: note = Description of Unknown:hvTR_A7XCM0 target sequence
VFQKCSKISKRSNFHVSNKLIHLRNVLRRLLSNQCSGEIISEILLLMKKNQISTDDVDANFVSSFLKAHEKINKKDYKLVFEIIN

SEQ ID NO: 39183 - protein, 85 aa, unidentified
  REGION 1..85: note = Description of Unknown:hvTR_A7XCM0 target sequence
HVKDEKLNLTTEKINEVVEIFKHLVFFCQENTPSKTINYSFFLDKIFDITFVTKNLKPQTVKNYTKNNSNQLIWENFLDHMKNKK

SEQ ID NO: 39184 - protein, 85 aa, unidentified; identical to SEQ ID NO: 39159
  REGION 1..85: note = Description of Unknown:hvTR_P68319 target sequence

SEQ ID NO: 39185 - protein, 85 aa, unidentified; identical to SEQ ID NO: 39160
  REGION 1..85: note = Description of Unknown:hvTR_P68319 target sequence

SEQ ID NO: 39186 - protein, 84 aa, unidentified; identical to SEQ ID NO: 39161
  REGION 1..84: note = Description of Unknown:hvTR_P68319 target sequence

SEQ ID NO: 39187 - protein, 85 aa, unidentified; identical to SEQ ID NO: 39162
  REGION 1..85: note = Description of Unknown:hvTR_P68319 target sequence

SEQ ID NO: 39188 - protein, 85 aa, unidentified; identical to SEQ ID NO: 39163
  REGION 1..85: note = Description of Unknown:hvTR_P68319 target sequence

SEQ ID NO: 39189 - protein, 85 aa, unidentified; identical to SEQ ID NO: 39159
  REGION 1..85: note = Description of Unknown:hvTR_P0DOT5 target sequence

SEQ ID NO: 39190 - protein, 85 aa, unidentified; identical to SEQ ID NO: 39160
  REGION 1..85: note = Description of Unknown:hvTR_P0DOT5 target sequence

SEQ ID NO: 39191 - protein, 84 aa, unidentified; identical to SEQ ID NO: 39161
  REGION 1..84: note = Description of Unknown:hvTR_P0DOT5 target sequence

SEQ ID NO: 39192 - protein, 85 aa, unidentified; identical to SEQ ID NO: 39162
  REGION 1..85: note = Description of Unknown:hvTR_P0DOT5 target sequence

SEQ ID NO: 39193 - protein, 85 aa, unidentified; identical to SEQ ID NO: 39163
  REGION 1..85: note = Description of Unknown:hvTR_P0DOT5 target sequence

SEQ ID NO: 39194 - protein, 85 aa, unidentified
  REGION 1..85: note = Description of Unknown:hvTR_Q6TUS6 target sequence
NLKLCSGCSHNGIVSENGYEFCIFCDAVFQKCSKIPKRSNFHVSNKLIHLRNVLRRLLSNQCSGEIISEILSLMEKNQISTDDVD

SEQ ID NO: 39195 - protein, 85 aa, unidentified
  REGION 1..85: note = Description of Unknown:hvTR_Q6TUS6 target sequence
ANFVSSFLKAHEKINKKDYKLVFEIINHVKDEKINLTTEKINEVVEIFKHLVFFCQENTPSKTINYSFFLDKIFDITSVTKNLKP

SEQ ID NO: 39196 - protein, 84 aa, unidentified
  REGION 1..84: note = Description of Unknown:hvTR_Q6TUS6 target sequence
CQENTPSKTINYSFFLDKIFDITSVTKNLKPQTVKNYTKNNSNQLIWENFLDHMKNKKKASVIVDFGHDYVFNDERFVTCSLDV

SEQ ID NO: 39197 - protein, 85 aa, unidentified
  REGION 1..85: note = Description of Unknown:hvTR_Q6TUS6 target sequence
VFQKCSKIPKRSNFHVSNKLIHLRNVLRRLLSNQCSGEIISEILSLMEKNQISTDDVDANFVSSFLKAHEKINKKDYKLVFEIIN

SEQ ID NO: 39198 - protein, 85 aa, unidentified
  REGION 1..85: note = Description of Unknown:hvTR_Q6TUS6 target sequence
HVKDEKINLTTEKINEVVEIFKHLVFFCQENTPSKTINYSFFLDKIFDITSVTKNLKPQTVKNYTKNNSNQLIWENFLDHMKNKK

SEQ ID NO: 39199 - protein, 85 aa, unidentified; identical to SEQ ID NO: 39179
  REGION 1..85: note = Description of Unknown:hvTR_Q9DHM1 target sequence

SEQ ID NO: 39200 - protein, 85 aa, unidentified; identical to SEQ ID NO: 39180
  REGION 1..85: note = Description of Unknown:hvTR_Q9DHM1 target sequence

SEQ ID NO: 39201 - protein, 84 aa, unidentified; identical to SEQ ID NO: 39181
  REGION 1..84: note = Description of Unknown:hvTR_Q9DHM1 target sequence

SEQ ID NO: 39202 - protein, 85 aa, unidentified; identical to SEQ ID NO: 39182
  REGION 1..85: note = Description of Unknown:hvTR_Q9DHM1 target sequence

SEQ ID NO: 39203 - protein, 85 aa, unidentified; identical to SEQ ID NO: 39183
  REGION 1..85: note = Description of Unknown:hvTR_Q9DHM1 target sequence

SEQ ID NO: 39204 - protein, 85 aa, unidentified
  REGION 1..85: note = Description of Unknown:cds_NZ_WFIY01000004.1_cds_WP_155862296.1_10 target sequence
NTTDRNSKIIPHSKSSGYYVVDGISLLPILEKEIRVDEEVELRRIEPKSPLVNSVSSIANDICGISTPPMVTYTIEDAMKKKLKV

SEQ ID NO: 39205 - protein, 85 aa, unidentified
  REGION 1..85: note = Description of Unknown:cds_NZ_WFIY01000004.1_cds_WP_155862296.1_10 target sequence
PNFSRKLEYDGIYGKPDIITVEGDIIELKSTTRKSPSDLTMCKGSIQSMIYGVLKVMSDKEKVHYPRLYVAVGYYKRSNDFTAIL

SEQ ID NO: 39206 - protein, 84 aa, unidentified
  REGION 1..84: note = Description of Unknown:cds_NZ_WFIY01000004.1_cds_WP_155862296.1_10 target sequence
KVMSDKEKVHYPRLYVAVGYYKRSNDFTAILNRIEIYTVNIKIEGLSLLNNVMTQYKAEYILNKLKSKVIKKHKASIPAIPVRP

SEQ ID NO: 39207 - protein, 85 aa, unidentified
  REGION 1..85: note = Description of Unknown:cds_NZ_WFIY01000004.1_cds_WP_155862296.1_10 target sequence
PILEKEIRVDEEVELRRIEPKSPLVNSVSSIANDICGISTPPMVTYTIEDAMKKKLKVPNFSRKLEYDGIYGKPDIITVEGDIIE

SEQ ID NO: 39208 - protein, 85 aa, unidentified
  REGION 1..85: note = Description of Unknown:cds_NZ_WFIY01000004.1_cds_WP_155862296.1_10 target sequence
LKSTTRKSPSDLTMCKGSIQSMIYGVLKVMSDKEKVHYPRLYVAVGYYKRSNDFTAILNRIEIYTVNIKIEGLSLLNNVMTQYKA

SEQ ID NO: 39209 - protein, 85 aa, unidentified
  REGION 1..85: note = Description of Unknown:cds_NZ_WFIY01000004.1_cds_WP_155862821.1_650 target sequence
QLLAEVHPKTKIEKIKKEIQDLSSFDGFDIPDSPLGLPSVKPTSIAALIREKYEHKRIIINQRLLDVNELYVHSLSLTAKAFNLN

SEQ ID NO: 39210 - protein, 85 aa, unidentified
  REGION 1..85: note = Description of Unknown:cds_NZ_WFIY01000004.1_cds_WP_155862821.1_650 target sequence
IAFTKGDKPKIGKEVGYLSSEEAVNIAKGYGVSSGMMISLRKSRTEILARLESNADFYLALHFYGVESIKGLEESFPKIIPYIIV

SEQ ID NO: 39211 - protein, 84 aa, unidentified
  REGION 1..84: note = Description of Unknown:cds_NZ_WFIY01000004.1_cds_WP_155862821.1_650 target sequence
ADFYLALHFYGVESIKGLEESFPKIIPYIIVKTEKNKEILSNISQPSFEGSKVRDLLYELESVGIKSVLISSPGDLNYLANFKF

SEQ ID NO: 39212 - protein, 85 aa, unidentified
  REGION 1..85: note = Description of Unknown:cds_NZ_WFIY01000004.1_cds_WP_155862821.1_650 target sequence
FDIPDSPLGLPSVKPTSIAALIREKYEHKRIIINQRLLDVNELYVHSLSLTAKAFNLNIAFTKGDKPKIGKEVGYLSSEEAVNIA

SEQ ID NO: 39213 - protein, 85 aa, unidentified
  REGION 1..85: note = Description of Unknown:cds_NZ_WFIY01000004.1_cds_WP_155862821.1_650 target sequence
KGYGVSSGMMISLRKSRTEILARLESNADFYLALHFYGVESIKGLEESFPKIIPYIIVKTEKNKEILSNISQPSFEGSKVRDLLY

SEQ ID NO: 39214 - protein, 85 aa, unidentified
  REGION 1..85: note = Description of Unknown:cds_NZ_WFIY01000004.1_cds_WP_155863793.1_1675 target sequence
LFLVASDYDRTLASEKNGFTISDEVKEKVNEFSKKYPFVVVTGRERKFIDVLAKGLNPTAWVLENGPLLLIGEKEIHLVDKDWFE

SEQ ID NO: 39215 - protein, 85 aa, unidentified
  REGION 1..85: note = Description of Unknown:cds_NZ_WFIY01000004.1_cds_WP_155863793.1_1675 target sequence
IRQSIIEKLEKLGLRYSVGKIIIYLDNVGNFSNKLRFDCARVEWNRNDAMIMPKNMDKGKGLLELVKILNFKGKIIAIGDSQNDI

SEQ ID NO: 39216 - protein, 84 aa, unidentified
  REGION 1..84: note = Description of Unknown:cds_NZ_WFIY01000004.1_cds_WP_155863793.1_1675 target sequence
MDKGKGLLELVKILNFKGKIIAIGDSQNDIPLFNVADYKVAVANALDEVKKIADLVLDEENGKGVISLLEMIESGNLFKKIDIN

SEQ ID NO: 39217 - protein, 85 aa, unidentified
  REGION 1..85: note = Description of Unknown:cds_NZ_WFIY01000004.1_cds_WP_155863793.1_1675 target sequence
KVNEFSKKYPFVVVTGRERKFIDVLAKGLNPTAWVLENGPLLLIGEKEIHLVDKDWFEIRQSIIEKLEKLGLRYSVGKIIIYLDN

SEQ ID NO: 39218 - protein, 85 aa, unidentified
  REGION 1..85: note = Description of Unknown:cds_NZ_WFIY01000004.1_cds_WP_155863793.1_1675 target sequence
VGNFSNKLRFDCARVEWNRNDAMIMPKNMDKGKGLLELVKILNFKGKIIAIGDSQNDIPLFNVADYKVAVANALDEVKKIADLVL

SEQ ID NO: 39219 - protein, 85 aa, unidentified
  REGION 1..85: note = Description of Unknown:cds_NZ_WFIY01000004.1_cds_WP_155864120.1_2071 target sequence
YEVERLRQLGYNLNSKYLVHSIENYSYISSNGLGEFKYTINFTLKEDLKKDLFIFSLFPVEKIQIIEKNIKLFENNIEKLCNFNI

SEQ ID NO: 39220 - protein, 85 aa, unidentified
  REGION 1..85: note = Description of Unknown:cds_NZ_WFIY01000004.1_cds_WP_155864120.1_2071 target sequence
NLSNLEMIYVFSLKLECNLAKNRNYLLLFNIKYKNSLDNPDKLYKVLKRIYGETSIANFFILTRNFPVMRYSVWLKYEGFEISRS

SEQ ID NO: 39221 - protein, 84 aa, unidentified
  REGION 1..84: note = Description of Unknown:cds_NZ_WFIY01000004.1_cds_WP_155864120.1_2071 target sequence
SIANFFILTRNFPVMRYSVWLKYEGFEISRSELVITDKINQYGKPENIIYKNDIKIFNDEVRATIDFPIPDTAYVILTKLCSKK

SEQ ID NO: 39222 - protein, 85 aa, unidentified
  REGION 1..85: note = Description of Unknown:cds_NZ_WFIY01000004.1_cds_WP_155864120.1_2071 target sequence
ISSNGLGEFKYTINFTLKEDLKKDLFIFSLFPVEKIQIIEKNIKLFENNIEKLCNFNINLSNLEMIYVFSLKLECNLAKNRNYLL

SEQ ID NO: 39223 - protein, 85 aa, unidentified
  REGION 1..85: note = Description of Unknown:cds_NZ_WFIY01000004.1_cds_WP_155864120.1_2071 target sequence
LFNIKYKNSLDNPDKLYKVLKRIYGETSIANFFILTRNFPVMRYSVWLKYEGFEISRSELVITDKINQYGKPENIIYKNDIKIFN

SEQ ID NO: 39224 - protein, 85 aa, unidentified
  REGION 1..85: note = Description of Unknown:cds_NC_035460.1_cds_YP_009408048.1_97 target sequence
NLRLCCGCNHNGVVSEQGYEYCIFCDAIFQKCTKVQKKSNFHVSNKLIHLRNVLRRLLSHQCSGEIISELMDLMKKNQISSKDVD

SEQ ID NO: 39225 - protein, 85 aa, unidentified
  REGION 1..85: note = Description of Unknown:cds_NC_035460.1_cds_YP_009408048.1_97 target sequence
ANFVSSFLKAHEKINKKDYKLVFEIINQVKDEKLNLTTEKINEVVEIFKHLVFFCQENTPSKTINYSFFLDKIFAITSVTNNLKP

SEQ ID NO: 39226 - protein, 84 aa, unidentified
  REGION 1..84: note = Description of Unknown:cds_NC_035460.1_cds_YP_009408048.1_97 target sequence
CQENTPSKTINYSFFLDKIFAITSVTNNLKPQTVKNYTKNNSNQLVWENFLSYMRTRKKASMIYDYGHEYVFKDERFVTCSLDI

SEQ ID NO: 39227 - protein, 85 aa, unidentified
  REGION 1..85: note = Description of Unknown:cds_NC_035460.1_cds_YP_009408048.1_97 target sequence
IFQKCTKVQKKSNFHVSNKLIHLRNVLRRLLSHQCSGEIISELMDLMKKNQISSKDVDANFVSSFLKAHEKINKKDYKLVFEIIN

SEQ ID NO: 39228 - protein, 85 aa, unidentified
  REGION 1..85: note = Description of Unknown:cds_NC_035460.1_cds_YP_009408048.1_97 target sequence
QVKDEKLNLTTEKINEVVEIFKHLVFFCQENTPSKTINYSFFLDKIFAITSVTNNLKPQTVKNYTKNNSNQLVWENFLSYMRTRK

SEQ ID NO: 39229 - protein, 85 aa, unidentified
  REGION 1..85: note = Description of Unknown:cds_NC_019843.3_cds_YP_009047208.1_7 target sequence
AFSASLFKPVQLVPVSPAFHRIESTDSIVFTYIPASGYVAALAVNVCLIPLLLLLRQDTCRRSIIRTMVLYFLVLYNFLLAIVLV

SEQ ID NO: 39230 - protein, 85 aa, unidentified
  REGION 1..85: note = Description of Unknown:cds_NC_019843.3_cds_YP_009047208.1_7 target sequence
NGVHYPTGSCLIAFLVILIILWFVDRIRFCLMLNSYIPLFDMRSHFIRVSTVSSHGMVPVIHTKPLFIRNFDQRCSCSRCFYLHS

SEQ ID NO: 39231 - protein, 84 aa, unidentified
  REGION 1..84: note = Description of Unknown:cds_NC_019843.3_cds_YP_009047208.1_7 target sequence
HGMVPVIHTKPLFIRNFDQRCSCSRCFYLHSSTYIECTYISRFSKISLVSVTDFSLNGNVSTVFVPATRDSVPLHIIAPSSLIV

SEQ ID NO: 39232 - protein, 85 aa, unidentified
  REGION 1..85: note = Description of Unknown:cds_NC_019843.3_cds_YP_009047208.1_7 target sequence
IVFTYIPASGYVAALAVNVCLIPLLLLLRQDTCRRSIIRTMVLYFLVLYNFLLAIVLVNGVHYPTGSCLIAFLVILIILWFVDRI

SEQ ID NO: 39233 - protein, 85 aa, unidentified
  REGION 1..85: note = Description of Unknown:cds_NC_019843.3_cds_YP_009047208.1_7 target sequence
RFCLMLNSYIPLFDMRSHFIRVSTVSSHGMVPVIHTKPLFIRNFDQRCSCSRCFYLHSSTYIECTYISRFSKISLVSVTDFSLNG

SEQ ID NO: 39234 - protein, 85 aa, unidentified
  REGION 1..85: note = Description of Unknown:cds_NC_030656.1_cds_YP_009268810.1_95 target sequence
NLKMCKVCKHNGIVSEEGFDVCIFCDTVFTQNLKTFKKSNFHVSNKLIHLRNVLRRLLSHQCSDEVINELKVVMSSCDIDAEDVD

SEQ ID NO: 39235 - protein, 85 aa, unidentified
  REGION 1..85: note = Description of Unknown:cds_NC_030656.1_cds_YP_009268810.1_95 target sequence
ANFVSSFLKANSKINKKDYKLVFEIINNVKNEKLNLTTDKINEVIEIFKYLVFFCQENTPSKTINYSFFLDKIFDITNVTQNLKP

SEQ ID NO: 39236 - protein, 84 aa, unidentified
  REGION 1..84: note = Description of Unknown:cds_NC_030656.1_cds_YP_009268810.1_95 target sequence
CQENTPSKTINYSFFLDKIFDITNVTQNLKPQTVKNYAKNNSNQLVWENFLVYMRDKKKSGIVVDFGHEYVFKPDMFVECSLDL

SEQ ID NO: 39237 - protein, 85 aa, unidentified
  REGION 1..85: note = Description of Unknown:cds_NC_030656.1_cds_YP_009268810.1_95 target sequence
VFTQNLKTFKKSNFHVSNKLIHLRNVLRRLLSHQCSDEVINELKVVMSSCDIDAEDVDANFVSSFLKANSKINKKDYKLVFEIIN

SEQ ID NO: 39238 - protein, 85 aa, unidentified
  REGION 1..85: note = Description of Unknown:cds_NC_030656.1_cds_YP_009268810.1_95 target sequence
NVKNEKLNLTTDKINEVIEIFKYLVFFCQENTPSKTINYSFFLDKIFDITNVTQNLKPQTVKNYAKNNSNQLVWENFLVYMRDKK

SEQ ID NO: 39239 - protein, 85 aa, unidentified
  REGION 1..85: note = Description of Unknown:cds_NC_005830.1_cds_YP_003761.1_36 target sequence
RAIRPFKYFPYSRREDEITVEQTNESKLYVTGTYVGGQYGKMIWNLVNGTDDIRYVGLIRGAELNINGQIVKVPDYLFGRAFGDV

SEQ ID NO: 39240 - protein, 85 aa, unidentified
  REGION 1..85: note = Description of Unknown:cds_NC_005830.1_cds_YP_003761.1_36 target sequence
YYLLGMSTYMTNPADVPLYTLSVYNNETIGFVFALPPKTTVHVPEYGFIGLINYNAKLIEVKPKELGTYVIIYSPEEYMIYYEEI

SEQ ID NO: 39241 - protein, 84 aa, unidentified
  REGION 1..84: note = Description of Unknown:cds_NC_005830.1_cds_YP_003761.1_36 target sequence
NAKLIEVKPKELGTYVIIYSPEEYMIYYEEIGQNLGILPTVYMVNSYNVEAGYTGYGFHERVILKIPKSWLNFAVDLTRLLGKI

SEQ ID NO: 39242 - protein, 85 aa, unidentified
  REGION 1..85: note = Description of Unknown:cds_NC_005830.1_cds_YP_003761.1_36 target sequence
LYVTGTYVGGQYGKMIWNLVNGTDDIRYVGLIRGAELNINGQIVKVPDYLFGRAFGDVYYLLGMSTYMTNPADVPLYTLSVYNNE

SEQ ID NO: 39243 - protein, 85 aa, unidentified
  REGION 1..85: note = Description of Unknown:cds_NC_005830.1_cds_YP_003761.1_36 target sequence
TIGFVFALPPKTTVHVPEYGFIGLINYNAKLIEVKPKELGTYVIIYSPEEYMIYYEEIGQNLGILPTVYMVNSYNVEAGYTGYGF

SEQ ID NO: 39244 - protein, 85 aa, unidentified
  REGION 1..85: note = Description of Unknown:cds_NZ_WFIY01000004.1_cds_WP_155862544.1_312 target sequence
NIQRLSIFGTDNIGVYIFSNDKYTFVPKNLDNETKRIIQENLGTEIIETTIADSFLIGIFMTGNNKALLLPKNIRDDELKIVKEL

SEQ ID NO: 39245 - protein, 85 aa, unidentified
  REGION 1..85: note = Description of Unknown:cds_NZ_WFIY01000004.1_cds_WP_155862544.1_312 target sequence
AKDIRVEVLNLKTTALGNVILTNDNAALVYPEFSDAEVKQIKEALQVDEIKKGRIAHVSVVGSVGVVTDKGGIVHIDATDDEIKE

SEQ ID NO: 39246 - protein, 84 aa, unidentified
  REGION 1..84: note = Description of Unknown:cds_NZ_WFIY01000004.1_cds_WP_155862544.1_312 target sequence
RIAHVSVVGSVGVVTDKGGIVHIDATDDEIKELSKLFKINIDIGTVNFGSAFVRSGLVANDKGILVGSSTTGPEILRIQKALGE

SEQ ID NO: 39247 - protein, 85 aa, unidentified
  REGION 1..85: note = Description of Unknown:cds_NZ_WFIY01000004.1_cds_WP_155862544.1_312 target sequence
KNLDNETKRIIQENLGTEIIETTIADSFLIGIFMTGNNKALLLPKNIRDDELKIVKELAKDIRVEVLNLKTTALGNVILTNDNAA

SEQ ID NO: 39248 - protein, 85 aa, unidentified
  REGION 1..85: note = Description of Unknown:cds_NZ_WFIY01000004.1_cds_WP_155862544.1_312 target sequence
LVYPEFSDAEVKQIKEALQVDEIKKGRIAHVSVVGSVGVVTDKGGIVHIDATDDEIKELSKLFKINIDIGTVNFGSAFVRSGLVA

SEQ ID NO: 39249 - protein, 85 aa, unidentified
  REGION 1..85: note = Description of Unknown:cds_NZ_WFIY01000004.1_cds_342 target sequence
YDAHCHYSLLKKKYEGYFIAAVSMDYNSSVETLSLNDKNILKGVAIHPWNVHKEKIESVLPLINKADFIGEIGLDYKYSEAPKEL

SEQ ID NO: 39250 - protein, 85 aa, unidentified
  REGION 1..85: note = Description of Unknown:cds_NZ_WFIY01000004.1_cds_342 target sequence
QIRYFEEFLKNSQDKTVNVHAVNSWSDVLNLLIKHDIKRAIFHWYSGPKELLRDIEGAGYFITINPSVTFQEKHKIIAENAPSNI

SEQ ID NO: 39251 - protein, 84 aa, unidentified
  REGION 1..84: note = Description of Unknown:cds_NZ_WFIY01000004.1_cds_342 target sequence
IEGAGYFITINPSVTFQEKHKIIAENAPSNIVLTESDGGYVYKGKLLEPTDIPSTIKFLSKIWNEDERQVEKKIEINFRKAFNL

SEQ ID NO: 39252 - protein, 85 aa, unidentified
  REGION 1..85: note = Description of Unknown:cds_NZ_WFIY01000004.1_cds_342 target sequence
SSVETLSLNDKNILKGVAIHPWNVHKEKIESVLPLINKADFIGEIGLDYKYSEAPKELQIRYFEEFLKNSQDKTVNVHAVNSWSD

SEQ ID NO: 39253 - protein, 85 aa, unidentified
  REGION 1..85: note = Description of Unknown:cds_NZ_WFIY01000004.1_cds_342 target sequence
VLNLLIKHDIKRAIFHWYSGPKELLRDIEGAGYFITINPSVTFQEKHKIIAENAPSNIVLTESDGGYVYKGKLLEPTDIPSTIKF

SEQ ID NO: 39254 - protein, 85 aa, unidentified
  REGION 1..85: note = Description of Unknown:cds_NZ_WFIY01000004.1_cds_WP_155862685.1_483 target sequence
LKTAVIKFPGTTCEIDVLKALKEAGVESNIVGYKDFDPDKFNAVVIPGGFSFGDYLRAGSIAANTETMKKIKEMANEGKIVLGIC

SEQ ID NO: 39255 - protein, 85 aa, unidentified
  REGION 1..85: note = Description of Unknown:cds_NZ_WFIY01000004.1_cds_WP_155862685.1_483 target sequence
NGFQILVESGLLRGALLPNLKMRFISKWVYVKVVRFDTAITKGLEKKVLRMPIAHAEGRYYLDNLEEAEKLAVFKYSDEKGNVKE

SEQ ID NO: 39256 - protein, 84 aa, unidentified
  REGION 1..84: note = Description of Unknown:cds_NZ_WFIY01000004.1_cds_WP_155862685.1_483 target sequence
HAEGRYYLDNLEEAEKLAVFKYSDEKGNVKEEVNPNGSILNIAGIANEEGNVIGLMPHPERASFKLTSPDSQTDGLLLLRGLRK

SEQ ID NO: 39257 - protein, 85 aa, unidentified
  REGION 1..85: note = Description of Unknown:cds_NZ_WFIY01000004.1_cds_WP_155862685.1_483 target sequence
SNIVGYKDFDPDKFNAVVIPGGFSFGDYLRAGSIAANTETMKKIKEMANEGKIVLGICNGFQILVESGLLRGALLPNLKMRFISK

SEQ ID NO: 39258 - protein, 85 aa, unidentified
  REGION 1..85: note = Description of Unknown:cds_NZ_WFIY01000004.1_cds_WP_155862685.1_483 target sequence
WVYVKVVRFDTAITKGLEKKVLRMPIAHAEGRYYLDNLEEAEKLAVFKYSDEKGNVKEEVNPNGSILNIAGIANEEGNVIGLMPH

SEQ ID NO: 39259 - protein, 85 aa, unidentified
  REGION 1..85: note = Description of Unknown:cds_NZ_WFIY01000004.1_cds_WP_155862851.1_685 target sequence
IEIKFFHDVLCPYCFIATRRLMNVVKDYKDQVIVRHKSFMMISSLEDLKDIAPTIEEVRELFKNEFSILKKYIPDYDPEKVINKG

SEQ ID NO: 39260 - protein, 85 aa, unidentified
  REGION 1..85: note = Description of Unknown:cds_NZ_WFIY01000004.1_cds_WP_155862851.1_685 target sequence
KIGYVWSLPPQMACKAAEFQKGDEGHWEYYKRAQEKLFFEGEDITSDDVLIEIAKEVGLDVERFKEDFKSKKAKLAVIQDEEEAH

SEQ ID NO: 39261 - protein, 84 aa, unidentified
  REGION 1..84: note = Description of Unknown:cds_NZ_WFIY01000004.1_cds_WP_155862851.1_685 target sequence
AKEVGLDVERFKEDFKSKKAKLAVIQDEEEAHAMGIHGVPAVLINDKWLIRGVQTEDYYRQVIEDLIKNGGEPKNVNLKAYWEQ

SEQ ID NO: 39262 - protein, 85 aa, unidentified
  REGION 1..85: note = Description of Unknown:cds_NZ_WFIY01000004.1_cds_WP_155862851.1_685 target sequence
YKDQVIVRHKSFMMISSLEDLKDIAPTIEEVRELFKNEFSILKKYIPDYDPEKVINKGKIGYVWSLPPQMACKAAEFQKGDEGHW

SEQ ID NO: 39263 - protein, 85 aa, unidentified
  REGION 1..85: note = Description of Unknown:cds_NZ_WFIY01000004.1_cds_WP_155862851.1_685 target sequence
EYYKRAQEKLFFEGEDITSDDVLIEIAKEVGLDVERFKEDFKSKKAKLAVIQDEEEAHAMGIHGVPAVLINDKWLIRGVQTEDYY

SEQ ID NO: 39264 - protein, 85 aa, unidentified
  REGION 1..85: note = Description of Unknown:cds_NZ_WFIY01000004.1_cds_WP_155864401.1_1126 target sequence
LIHVSILDLKYREVDFKIWLIYLPLVVFFIFYVHKIDLFLYSYSLGVSVFVLYMFYKLSLMGGADLMAILIIGLSNPSVYPLFFP

SEQ ID NO: 39265 - protein, 85 aa, unidentified
  REGION 1..85: note = Description of Unknown:cds_NZ_WFIY01000004.1_cds_WP_155864401.1_1126 target sequence
TFSELGMEPLVVILYSSISVFLVSLYNLAKYFKYTKGMPFSKRIILALSAKRMKVKDFLNSSFLFPLTQVDDDGNVTLRSTFSIE

SEQ ID NO: 39266 - protein, 84 aa, unidentified
  REGION 1..84: note = Description of Unknown:cds_NZ_WFIY01000004.1_cds_WP_155864401.1_1126 target sequence
KVKDFLNSSFLFPLTQVDDDGNVTLRSTFSIEEDDKEWKQKFRKLVEERRISEDSYIWVAWGVPVLPFMLIGYLLSLVIGFPFT

SEQ ID NO: 39267 - protein, 85 aa, unidentified
  REGION 1..85: note = Description of Unknown:cds_NZ_WFIY01000004.1_cds_WP_155864401.1_1126 target sequence
FFIFYVHKIDLFLYSYSLGVSVFVLYMFYKLSLMGGADLMAILIIGLSNPSVYPLFFPTFSELGMEPLVVILYSSISVFLVSLYN

SEQ ID NO: 39268 - protein, 85 aa, unidentified
  REGION 1..85: note = Description of Unknown:cds_NZ_WFIY01000004.1_cds_WP_155864401.1_1126 target sequence
LAKYFKYTKGMPFSKRIILALSAKRMKVKDFLNSSFLFPLTQVDDDGNVTLRSTFSIEEDDKEWKQKFRKLVEERRISEDSYIWV

SEQ ID NO: 39269 - protein, 85 aa, unidentified
  REGION 1..85: note = Description of Unknown:cds_NZ_WFIY01000004.1_cds_WP_155863398.1_1374 target sequence
KESKWKKIIETYDIIAPVYERGNKFVTLGNIERWRKATIKMLLQDCKGVNKVLDAGSGPGNMTKTLLKYKNVKVVLLDQSEIMIK

SEQ ID NO: 39270 - protein, 85 aa, unidentified
  REGION 1..85: note = Description of Unknown:cds_NZ_WFIY01000004.1_cds_WP_155863398.1_1374 target sequence
EANLPADKVIGTFEYMPFRDNSFDAVIMGFSFHASSNMRMTIEELNRISRCIGIVSIGKPKNIIKKSLLYIYMKYFIPILSFLST

SEQ ID NO: 39271 - protein, 84 aa, unidentified
  REGION 1..84: note = Description of Unknown:cds_NZ_WFIY01000004.1_cds_WP_155863398.1_1374 target sequence
IVSIGKPKNIIKKSLLYIYMKYFIPILSFLSTGPKYYKGYARIFDIYTSVPYNSEIGKIISTKFKIARFKEVGLGSVYIIIGFK

SEQ ID NO: 39272 - protein, 85 aa, unidentified
  REGION 1..85: note = Description of Unknown:cds_NZ_WFIY01000004.1_cds_WP_155863398.1_1374 target sequence
LGNIERWRKATIKMLLQDCKGVNKVLDAGSGPGNMTKTLLKYKNVKVVLLDQSEIMIKEANLPADKVIGTFEYMPFRDNSFDAVI

SEQ ID NO: 39273 - protein, 85 aa, unidentified
  REGION 1..85: note = Description of Unknown:cds_NZ_WFIY01000004.1_cds_WP_155863398.1_1374 target sequence
MGFSFHASSNMRMTIEELNRISRCIGIVSIGKPKNIIKKSLLYIYMKYFIPILSFLSTGPKYYKGYARIFDIYTSVPYNSEIGKI

SEQ ID NO: 39274 - protein, 85 aa, unidentified
  REGION 1..85: note = Description of Unknown:cds_NC_005830.1_cds_YP_003742.1_17 target sequence
QEGNSFTELLKNIIAETFKELSKPVDKLQYLTVTQISQCPRRSWYELKKGGLDLASEYADMGMVFHSLLEDAVKNRQELGKCYTE

SEQ ID NO: 39275 - protein, 85 aa, unidentified
  REGION 1..85: note = Description of Unknown:cds_NC_005830.1_cds_YP_003742.1_17 target sequence
VDIAKPFYGIEIRGRIDTLCISRDAYRIIEFKTTNMQDGFKGIETAHLRQVSLYWYLTGSQPMRKEIYLVYIDRKTGEVKVINMR

SEQ ID NO: 39276 - protein, 84 aa, unidentified
  REGION 1..84: note = Description of Unknown:cds_NC_005830.1_cds_YP_003742.1_17 target sequence
YWYLTGSQPMRKEIYLVYIDRKTGEVKVINMRHESILKKRELGNRIKYLVRSFNENKVPKPEPGRSCIFCPYKTVCKAWKRSRY

SEQ ID NO: 39277 - protein, 85 aa, unidentified
  REGION 1..85: note = Description of Unknown:cds_NC_005830.1_cds_YP_003742.1_17 target sequence
LQYLTVTQISQCPRRSWYELKKGGLDLASEYADMGMVFHSLLEDAVKNRQELGKCYTEVDIAKPFYGIEIRGRIDTLCISRDAYR

SEQ ID NO: 39278 - protein, 85 aa, unidentified
  REGION 1..85: note = Description of Unknown:cds_NC_005830.1_cds_YP_003742.1_17 target sequence
IIEFKTTNMQDGFKGIETAHLRQVSLYWYLTGSQPMRKEIYLVYIDRKTGEVKVINMRHESILKKRELGNRIKYLVRSFNENKVP

SEQ ID NO: 39279 - protein, 85 aa, unidentified
  REGION 1..85: note = Description of Unknown:cds_NC_024711.1_cds_YP_009052512.2_34 target sequence
EVKVFKLKEIKLLSGDVVDVKKCCMVQPILPTYGKEGDACMDIYPICYEYDVDKDRFIYHTGLAFNIGNDANGEPNEMSLRPRSN

SEQ ID NO: 39280 - protein, 85 aa, unidentified
  REGION 1..85: note = Description of Unknown:cds_NC_024711.1_cds_YP_009052512.2_34 target sequence
LTKSDFYMPNAPGTLDMGYRGELLIIFKNRTSRDLVHAVSTLAEIVDKLREHMHLPDSMIGNARLKLNKVRTTVTNILDKLYTPP

SEQ ID NO: 39281 - protein, 84 aa, unidentified
  REGION 1..84: note = Description of Unknown:cds_NC_024711.1_cds_YP_009052512.2_34 target sequence
MHLPDSMIGNARLKLNKVRTTVTNILDKLYTPPYNCDGEDRCCQLIINSAERISWKEVESIEELGESERGNKGFGEGTGGGAKA

SEQ ID NO: 39282 - protein, 85 aa, unidentified
  REGION 1..85: note = Description of Unknown:cds_NC_024711.1_cds_YP_009052512.2_34 target sequence
PILPTYGKEGDACMDIYPICYEYDVDKDRFIYHTGLAFNIGNDANGEPNEMSLRPRSNLTKSDFYMPNAPGTLDMGYRGELLIIF

SEQ ID NO: 39283 - protein, 85 aa, unidentified
  REGION 1..85: note = Description of Unknown:cds_NC_024711.1_cds_YP_009052512.2_34 target sequence
KNRTSRDLVHAVSTLAEIVDKLREHMHLPDSMIGNARLKLNKVRTTVTNILDKLYTPPYNCDGEDRCCQLIINSAERISWKEVES

SEQ ID NO: 39284 - protein, 85 aa, unidentified
  REGION 1..85: note = Description of Unknown:cds_NZ_WFIY01000004.1_cds_WP_155862448.1_199 target sequence
SSLRDRVIKYINGMNDRLSKISMPDYQKIIDLAKQYTEDAKYYLDKGDIDTAIVDIAYAEGLLDAVLIINNKDPDSDISKKVFVG

SEQ ID NO: 39285 - protein, 85 aa, unidentified
  REGION 1..85: note = Description of Unknown:cds_NZ_WFIY01000004.1_cds_WP_155862448.1_199 target sequence
GTFDIIHPGHIEFLREASRLGRVYVSVARDKNSEKIKGRKPINDEEQRLEVVKSIRYVYDAFLGDEKDFIKSVERVKPDIIFLGP

SEQ ID NO: 39286 - protein, 84 aa, unidentified
  REGION 1..84: note = Description of Unknown:cds_NZ_WFIY01000004.1_cds_WP_155862448.1_199 target sequence
KSIRYVYDAFLGDEKDFIKSVERVKPDIIFLGPDQRVNIEELKKELEKRGINAEIVKMPERINKWKHSSTTSIINEIISRYCKS

SEQ ID NO: 39287 - protein, 85 aa, unidentified
  REGION 1..85: note = Description of Unknown:cds_NZ_WFIY01000004.1_cds_WP_155862448.1_199 target sequence
KIIDLAKQYTEDAKYYLDKGDIDTAIVDIAYAEGLLDAVLIINNKDPDSDISKKVFVGGTFDIIHPGHIEFLREASRLGRVYVSV

SEQ ID NO: 39288 - protein, 85 aa, unidentified
  REGION 1..85: note = Description of Unknown:cds_NZ_WFIY01000004.1_cds_WP_155862448.1_199 target sequence
ARDKNSEKIKGRKPINDEEQRLEVVKSIRYVYDAFLGDEKDFIKSVERVKPDIIFLGPDQRVNIEELKKELEKRGINAEIVKMPE

SEQ ID NO: 39289 - protein, 85 aa, unidentified
  REGION 1..85: note = Description of Unknown:cds_NZ_WFIY01000004.1_cds_WP_155862676.1_472 target sequence
SAKRQVLSKNEISLKMSKLYELLTIAEDAHEILGYPPTTDFNFIYVKKKTEELSEYDLIKEGNAPYEYRQLYEKIKELYMEFLVK

SEQ ID NO: 39290 - protein, 85 aa, unidentified
  REGION 1..85: note = Description of Unknown:cds_NZ_WFIY01000004.1_cds_WP_155862676.1_472 target sequence
VMANYADETMRTQIEYINFVLKSGEYVIFEGDIDKVTMPMPSGIASVHTHPGICIFSAPDIETADSLFVKGYVVIAVMNNECISY

SEQ ID NO: 39291 - protein, 84 aa, unidentified
  REGION 1..84: note = Description of Unknown:cds_NZ_WFIY01000004.1_cds_WP_155862676.1_472 target sequence
ICIFSAPDIETADSLFVKGYVVIAVMNNECISYFLRKGPYTPEDQQELRKLQKKVKKAKTFDELKEGYTSFNSENVIFRTPLFS

SEQ ID NO: 39292 - protein, 85 aa, unidentified
  REGION 1..85: note = Description of Unknown:cds_NZ_WFIY01000004.1_cds_WP_155862676.1_472 target sequence
DAHEILGYPPTTDFNFIYVKKKTEELSEYDLIKEGNAPYEYRQLYEKIKELYMEFLVKVMANYADETMRTQIEYINFVLKSGEYV

SEQ ID NO: 39293 - protein, 85 aa, unidentified
  REGION 1..85: note = Description of Unknown:cds_NZ_WFIY01000004.1_cds_WP_155862676.1_472 target sequence
IFEGDIDKVTMPMPSGIASVHTHPGICIFSAPDIETADSLFVKGYVVIAVMNNECISYFLRKGPYTPEDQQELRKLQKKVKKAKT

SEQ ID NO: 39294 - protein, 85 aa, unidentified
  REGION 1..85: note = Description of Unknown:cds_NZ_WFIY01000004.1_cds_WP_155863130.1_1051 target sequence
KVCVLYSGGKDSTYALHWAVFKGFEVISLLTLLPKREDSWMFQYPNVEYTKYQAEVMGINIIQMPTSGEKNNELEDLYVAFKKCK

SEQ ID NO: 39295 - protein, 85 aa, unidentified
  REGION 1..85: note = Description of Unknown:cds_NZ_WFIY01000004.1_cds_WP_155863130.1_1051 target sequence
DLGAQGIVTGALLSDYQRLNANIIAEKLSLKTYSPLWRKDQEKYMYELIDEGFEFIITSTSAYGFPHELLGKVIKREDVDLIIRR

SEQ ID NO: 39296 - protein, 84 aa, unidentified
  REGION 1..84: note = Description of Unknown:cds_NZ_WFIY01000004.1_cds_WP_155863130.1_1051 target sequence
FEFIITSTSAYGFPHELLGKVIKREDVDLIIRRAREYGFNPAFEGGEAETFVTYAPLFKRRLKVFGEIKRLGEDNWRFLIKRIL

SEQ ID NO: 39297 - protein, 85 aa, unidentified
  REGION 1..85: note = Description of Unknown:cds_NZ_WFIY01000004.1_cds_WP_155863130.1_1051 target sequence
SLLTLLPKREDSWMFQYPNVEYTKYQAEVMGINIIQMPTSGEKNNELEDLYVAFKKCKDLGAQGIVTGALLSDYQRLNANIIAEK

SEQ ID NO: 39298 - protein, 85 aa, unidentified
  REGION 1..85: note = Description of Unknown:cds_NZ_WFIY01000004.1_cds_WP_155863130.1_1051 target sequence
LSLKTYSPLWRKDQEKYMYELIDEGFEFIITSTSAYGFPHELLGKVIKREDVDLIIRRAREYGFNPAFEGGEAETFVTYAPLFKR

SEQ ID NO: 39299 - protein, 85 aa, unidentified
  REGION 1..85: note = Description of Unknown:cds_NZ_WFIY01000004.1_cds_WP_205737146.1_1612 target sequence
GLILVLISIGYFKDLLLFVGVSRKLSYLFAFEISFLSLLLSPVNFVIKEVKKRAIAPRYDVVYVFGIPFYVPRVDIEYFTTQVAI

SEQ ID NO: 39300 - protein, 85 aa, unidentified
  REGION 1..85: note = Description of Unknown:cds_NZ_WFIY01000004.1_cds_WP_205737146.1_1612 target sequence
NFGGALIPLMLSISLLFLLYKYLLPIFINIILLIIISKYFSKVIEGVGVVMHPFIPPLFSVLFSYLLFFKMPQLIPVSAYISSVL

SEQ ID NO: 39301 - protein, 84 aa, unidentified
  REGION 1..84: note = Description of Unknown:cds_NZ_WFIY01000004.1_cds_WP_205737146.1_1612 target sequence
PFIPPLFSVLFSYLLFFKMPQLIPVSAYISSVLGTLIGADLLNLRKIIDASPQIVSIGGMGSFDGIFLSGLFSVLLGELLISIF

SEQ ID NO: 39302 - protein, 85 aa, unidentified
  REGION 1..85: note = Description of Unknown:cds_NZ_WFIY01000004.1_cds_WP_205737146.1_1612 target sequence
LFAFEISFLSLLLSPVNFVIKEVKKRAIAPRYDVVYVFGIPFYVPRVDIEYFTTQVAINFGGALIPLMLSISLLFLLYKYLLPIF

SEQ ID NO: 39303 - protein, 85 aa, unidentified
  REGION 1..85: note = Description of Unknown:cds_NZ_WFIY01000004.1_cds_WP_205737146.1_1612 target sequence
INIILLIIISKYFSKVIEGVGVVMHPFIPPLFSVLFSYLLFFKMPQLIPVSAYISSVLGTLIGADLLNLRKIIDASPQIVSIGGM

SEQ ID NO: 39304 - protein, 85 aa, unidentified
  REGION 1..85: note = Description of Unknown:cds_NZ_WFIY01000004.1_cds_WP_155863752.1_1625 target sequence
NLVDILLKIQNEKNSLDWENLKKEYMEQGEIIKSLEFTVSKIHSIKQELRKCSLNEVSEEYLTIKNYLIKAKNSDNPREIISYIN

SEQ ID NO: 39305 - protein, 85 aa, unidentified
  REGION 1..85: note = Description of Unknown:cds_NZ_WFIY01000004.1_cds_WP_155863752.1_1625 target sequence
NAYEELKHCLKLSEDIVKEKIQKYKEIIEENNRKLKTYLKIFLTILGESKDLRLFEITDNLEELERNAKESEEEARKIYEELKDK

SEQ ID NO: 39306 - protein, 84 aa, unidentified
  REGION 1..84: note = Description of Unknown:cds_NZ_WFIY01000004.1_cds_WP_155863752.1_1625 target sequence
RLFEITDNLEELERNAKESEEEARKIYEELKDKLSRLNIEGKRLEILLSLLDQGQVIITKRNSKDVIELLRFLSEKGIIITVKI

SEQ ID NO: 39307 - protein, 85 aa, unidentified
  REGION 1..85: note = Description of Unknown:cds_NZ_WFIY01000004.1_cds_WP_155863752.1_1625 target sequence
QGEIIKSLEFTVSKIHSIKQELRKCSLNEVSEEYLTIKNYLIKAKNSDNPREIISYINNAYEELKHCLKLSEDIVKEKIQKYKEI

SEQ ID NO: 39308 - protein, 85 aa, unidentified
  REGION 1..85: note = Description of Unknown:cds_NZ_WFIY01000004.1_cds_WP_155863752.1_1625 target sequence
IEENNRKLKTYLKIFLTILGESKDLRLFEITDNLEELERNAKESEEEARKIYEELKDKLSRLNIEGKRLEILLSLLDQGQVIITK

SEQ ID NO: 39309 - protein, 85 aa, unidentified
  REGION 1..85: note = Description of Unknown:cds_NZ_WFIY01000003.1_cds_WP_155862288.1_2373 target sequence
ILVLTNPLKIDRKSRSELIVSFKDYSRNYNLRDITGVVILGSSTLIPSGVVSLLSSMNIPLIISNKLGVAVCSPTLVVMLSEVRE

SEQ ID NO: 39310 - protein, 85 aa, unidentified
  REGION 1..85: note = Description of Unknown:cds_NZ_WFIY01000003.1_cds_WP_155862288.1_2373 target sequence
KQYKLTDEEKLEIARNFILARFSGLSNLLKYYKLDPPQLVDNNDLLVWEAINSRLFWDKIFNLFPKEVRDIGRKPRHSDPFNKSL

SEQ ID NO: 39311 - protein, 84 aa, unidentified
  REGION 1..84: note = Description of Unknown:cds_NZ_WFIY01000003.1_cds_WP_155862288.1_2373 target sequence
SRLFWDKIFNLFPKEVRDIGRKPRHSDPFNKSLSLAYALLYANVLGLYFPSVLIQLMGSCTSLGTLQPYPLTFQKCLSQLQFTP

SEQ ID NO: 39312 - protein, 85 aa, unidentified
  REGION 1..85: note = Description of Unknown:cds_NZ_WFIY01000003.1_cds_WP_155862288.1_2373 target sequence
NYNLRDITGVVILGSSTLIPSGVVSLLSSMNIPLIISNKLGVAVCSPTLVVMLSEVREKQYKLTDEEKLEIARNFILARFSGLSN

SEQ ID NO: 39313 - protein, 85 aa, unidentified
  REGION 1..85: note = Description of Unknown:cds_NZ_WFIY01000003.1_cds_WP_155862288.1_2373 target sequence
LLKYYKLDPPQLVDNNDLLVWEAINSRLFWDKIFNLFPKEVRDIGRKPRHSDPFNKSLSLAYALLYANVLGLYFPSVLIQLMGSC

SEQ ID NO: 39314 - protein, 85 aa, unidentified
  REGION 1..85: note = Description of Unknown:cds_NC_035460.1_cds_YP_009408007.1_56 target sequence
SFRDLILFNLIRFILLEDEDSMLLVSSLCRSFNIDVRELKNEIIDKRYFKYIDAIFNCKKLNTNILLNYPENIIYELVYLRLYKF

SEQ ID NO: 39315 - protein, 85 aa, unidentified
  REGION 1..85: note = Description of Unknown:cds_NC_035460.1_cds_YP_009408007.1_56 target sequence
SKFIKPSFKLSPTMKGTAIIKDNTISIRGLNEEFLNFLVKEYDPSIYIYTSTLPKSLYKSKIICCNYNKVTYYAYSIAHIITNIK

SEQ ID NO: 39316 - protein, 84 aa, unidentified
  REGION 1..84: note = Description of Unknown:cds_NC_035460.1_cds_YP_009408007.1_56 target sequence
LPKSLYKSKIICCNYNKVTYYAYSIAHIITNIKTDIIVTNKCINSLLLSDNEQILKSLFDKGEGIINKILKKIFYSVFSGGQTL

SEQ ID NO: 39317 - protein, 85 aa, unidentified
  REGION 1..85: note = Description of Unknown:cds_NC_035460.1_cds_YP_009408007.1_56 target sequence
LCRSFNIDVRELKNEIIDKRYFKYIDAIFNCKKLNTNILLNYPENIIYELVYLRLYKFSKFIKPSFKLSPTMKGTAIIKDNTISI

SEQ ID NO: 39318 - protein, 85 aa, unidentified
  REGION 1..85: note = Description of Unknown:cds_NC_035460.1_cds_YP_009408007.1_56 target sequence
RGLNEEFLNFLVKEYDPSIYIYTSTLPKSLYKSKIICCNYNKVTYYAYSIAHIITNIKTDIIVTNKCINSLLLSDNEQILKSLFD

SEQ ID NO: 39319 - protein, 85 aa, unidentified
  REGION 1..85: note = Description of Unknown:cds_NC_035460.1_cds_YP_009408042.1_91 target sequence
SETSSSIIYFDTPRESISIESVSNIQRAKNTHVFAICITSDNKPIIAARRSSFAFQEIMAKRTTPETILKVPKKLLSYMYQNEIQ

SEQ ID NO: 39320 - protein, 85 aa, unidentified
  REGION 1..85: note = Description of Unknown:cds_NC_035460.1_cds_YP_009408042.1_91 target sequence
EINRRLSNSSTILFSNIDFEELILLGGKINKQESINDCILREIKEESDSSLTIKKIGNKSLKLTIYDKLFNKTYISYCTICYVKE

SEQ ID NO: 39321 - protein, 84 aa, unidentified
  REGION 1..84: note = Description of Unknown:cds_NC_035460.1_cds_YP_009408042.1_91 target sequence
IKKIGNKSLKLTIYDKLFNKTYISYCTICYVKENLNEVLQSRIYNVEIRELKLLFDCINNDKYEYLFYIYNTLYLLNNDEPTPI

SEQ ID NO: 39322 - protein, 85 aa, unidentified
  REGION 1..85: note = Description of Unknown:cds_NC_035460.1_cds_YP_009408042.1_91 target sequence
AKNTHVFAICITSDNKPIIAARRSSFAFQEIMAKRTTPETILKVPKKLLSYMYQNEIQEINRRLSNSSTILFSNIDFEELILLGG

SEQ ID NO: 39323 - protein, 85 aa, unidentified
  REGION 1..85: note = Description of Unknown:cds_NC_035460.1_cds_YP_009408042.1_91 target sequence
KINKQESINDCILREIKEESDSSLTIKKIGNKSLKLTIYDKLFNKTYISYCTICYVKENLNEVLQSRIYNVEIRELKLLFDCINN

SEQ ID NO: 39324 - protein, 85 aa, unidentified
  REGION 1..85: note = Description of Unknown:cds_NC_010438.1_cds_YP_001718613.1_4 target sequence
FGGLFTYSIESVRTAVKELDLPPAKEHDLLEHVVPVAHATSFAGYLLTSLFVLYFALFKAVTIRGNYACFIARILLILVYCPLIA

SEQ ID NO: 39325 - protein, 85 aa, unidentified
  REGION 1..85: note = Description of Unknown:cds_NC_010438.1_cds_YP_001718613.1_4 target sequence
YCGAYLDSCIIFTALLVRFFWTGYYACRYRTFLFVILNDTTLAFVNGKAWYYSSQPYMVLPGGEHYVQLGPHFIPFVGAKELYVA

SEQ ID NO: 39326 - protein, 84 aa, unidentified
  REGION 1..84: note = Description of Unknown:cds_NC_010438.1_cds_YP_001718613.1_4 target sequence
SSQPYMVLPGGEHYVQLGPHFIPFVGAKELYVAVRGMNDENLELVRCVELINGSFFYIFAREPVVGVVNMKFTEIQLYEDVNID

SEQ ID NO: 39327 - protein, 85 aa, unidentified
  REGION 1..85: note = Description of Unknown:cds_NC_010438.1_cds_YP_001718613.1_4 target sequence
DLLEHVVPVAHATSFAGYLLTSLFVLYFALFKAVTIRGNYACFIARILLILVYCPLIAYCGAYLDSCIIFTALLVRFFWTGYYAC

SEQ ID NO: 39328 - protein, 85 aa, unidentified
  REGION 1..85: note = Description of Unknown:cds_NC_010438.1_cds_YP_001718613.1_4 target sequence
RYRTFLFVILNDTTLAFVNGKAWYYSSQPYMVLPGGEHYVQLGPHFIPFVGAKELYVAVRGMNDENLELVRCVELINGSFFYIFA

SEQ ID NO: 39329 - protein, 85 aa, unidentified
  REGION 1..85: note = Description of Unknown:hvTR_P10541.2 target sequence
RMLPDFFTGNWDDMFQGLLETEYVFDFPEPSEASEEMSLHDLFDVEVDGFEEDANQEAVDGMFPERLLSEAESAAESGSGDSGVG

SEQ ID NO: 39330 - protein, 85 aa, unidentified
  REGION 1..85: note = Description of Unknown:hvTR_P10541.2 target sequence
EELLPVDLDLKCYEDGLPPSDPETDEATEAEEEAAMPTYVNENENELVLDCPENPGRGCRACPISDAEGESESGSPEDTDFPHPL

SEQ ID NO: 39331 - protein, 84 aa, unidentified
  REGION 1..84: note = Description of Unknown:hvTR_P10541.2 target sequence
PENPGRGCRACPISDAEGESESGSPEDTDFPHPLTATPPHGIVRTIPCRVSCRRRPAVECIEDLLEEDPTDEPLNLSLKRPKCS

SEQ ID NO: 39332 - protein, 85 aa, unidentified
  REGION 1..85: note = Description of Unknown:hvTR_P10541.2 target sequence
PEPSEASEEMSLHDLFDVEVDGFEEDANQEAVDGMFPERLLSEAESAAESGSGDSGVGEELLPVDLDLKCYEDGLPPSDPETDEA

SEQ ID NO: 39333 - protein, 85 aa, unidentified
  REGION 1..85: note = Description of Unknown:hvTR_P10541.2 target sequence
TEAEEEAAMPTYVNENENELVLDCPENPGRGCRACPISDAEGESESGSPEDTDFPHPLTATPPHGIVRTIPCRVSCRRRPAVECI

SEQ ID NO: 39334 - protein, 85 aa, unidentified
  REGION 1..85: note = Description of Unknown:hvTR_P33062 target sequence
AWSITNKADTSSFTKMAEIRAHLRNSAENKDKNDDIFPEDVIIPSTKPKTKRATTPRKPAATKRSTKKDKEKEEVEEEEVVIEEY

SEQ ID NO: 39335 - protein, 85 aa, unidentified
  REGION 1..85: note = Description of Unknown:hvTR_P33062 target sequence
HQTTEENSPPPSSSPGVGNIVESVTAVELDDSNGDDDNDNDNDDNEPMVQVEAGKVNHSARSDLSDLKVATDNIVKDLKKIITRI

SEQ ID NO: 39336 - protein, 84 aa, unidentified
  REGION 1..84: note = Description of Unknown:hvTR_P33062 target sequence
EAGKVNHSARSDLSDLKVATDNIVKDLKKIITRISAVSTVLEDVQAAGISRQFTSMTKSITTLSDLVTEGKSKVVRKKVKTCKK

SEQ ID NO: 39337 - protein, 85 aa, unidentified
  REGION 1..85: note = Description of Unknown:hvTR_P33062 target sequence
ENKDKNDDIFPEDVIIPSTKPKTKRATTPRKPAATKRSTKKDKEKEEVEEEEVVIEEYHQTTEENSPPPSSSPGVGNIVESVTAV

SEQ ID NO: 39338 - protein, 85 aa, unidentified
  REGION 1..85: note = Description of Unknown:hvTR_P33062 target sequence
ELDDSNGDDDNDNDNDDNEPMVQVEAGKVNHSARSDLSDLKVATDNIVKDLKKIITRISAVSTVLEDVQAAGISRQFTSMTKSIT

SEQ ID NO: 39339 - protein, 85 aa, unidentified
  REGION 1..85: note = Description of Unknown:cds_NZ_WFIY01000004.1_cds_WP_155862350.1_81 target sequence
VKSLFTYFLKQLTLSEPAAYNMLLGFIIALIIWRIIKPNIALNVSEILILSILSVGVSFILLYNSSALPFLMRFGNLRIGIYLAL

SEQ ID NO: 39340 - protein, 85 aa, unidentified
  REGION 1..85: note = Description of Unknown:cds_NZ_WFIY01000004.1_cds_WP_155862350.1_81 target sequence
LYLSGEIAALLYTTLLIILYYLFSNSIAIIDMIPFILTALLVFLFLESISMFLSLLLTNGRLDCYIIVIIYPIVVVPAFIISFLK

SEQ ID NO: 39341 - protein, 84 aa, unidentified
  REGION 1..84: note = Description of Unknown:cds_NZ_WFIY01000004.1_cds_WP_155862350.1_81 target sequence
LSLLLTNGRLDCYIIVIIYPIVVVPAFIISFLKSSFNPLWIFGMLIEKTTISSSVIILSVTISILVYLNLRIINNLVKIREVIP

SEQ ID NO: 39342 - protein, 85 aa, unidentified
  REGION 1..85: note = Description of Unknown:cds_NZ_WFIY01000004.1_cds_WP_155862350.1_81 target sequence
IALIIWRIIKPNIALNVSEILILSILSVGVSFILLYNSSALPFLMRFGNLRIGIYLALLYLSGEIAALLYTTLLIILYYLFSNSI

SEQ ID NO: 39343 - protein, 85 aa, unidentified
  REGION 1..85: note = Description of Unknown:cds_NZ_WFIY01000004.1_cds_WP_155862350.1_81 target sequence
AIIDMIPFILTALLVFLFLESISMFLSLLLTNGRLDCYIIVIIYPIVVVPAFIISFLKSSFNPLWIFGMLIEKTTISSSVIILSV

SEQ ID NO: 39344 - protein, 85 aa, unidentified
  REGION 1..85: note = Description of Unknown:cds_NZ_WFIY01000004.1_cds_WP_155862401.1_138 target sequence
IRITFVSPKGGVGKSTIIYYVAKLLSDKFKTLIVDLTDSATLSRLFGVQNNILADNGYFADKGNIGVISFSRISNDETLDLEKIT

SEQ ID NO: 39345 - protein, 85 aa, unidentified
  REGION 1..85: note = Description of Unknown:cds_NZ_WFIY01000004.1_cds_WP_155862401.1_138 target sequence
LRYKEVLGDYSLVLVEYPIHFYSKSIKTEYMIFNSLLKTKNYLFSVTIPQDIVIKSTLNYTSSLISYLSSINKDIYDEALIINMI

SEQ ID NO: 39346 - protein, 84 aa, unidentified
  REGION 1..84: note = Description of Unknown:cds_NZ_WFIY01000004.1_cds_WP_155862401.1_138 target sequence
IVIKSTLNYTSSLISYLSSINKDIYDEALIINMIKDDETKDITRYHSNVFSIKFNYDLIFKGFYNVNPPNDFLQISKFIENLIE

SEQ ID NO: 39347 - protein, 85 aa, unidentified
  REGION 1..85: note = Description of Unknown:cds_NZ_WFIY01000004.1_cds_WP_155862401.1_138 target sequence
KFKTLIVDLTDSATLSRLFGVQNNILADNGYFADKGNIGVISFSRISNDETLDLEKITLRYKEVLGDYSLVLVEYPIHFYSKSIK

SEQ ID NO: 39348 - protein, 85 aa, unidentified
  REGION 1..85: note = Description of Unknown:cds_NZ_WFIY01000004.1_cds_WP_155862401.1_138 target sequence
TEYMIFNSLLKTKNYLFSVTIPQDIVIKSTLNYTSSLISYLSSINKDIYDEALIINMIKDDETKDITRYHSNVFSIKFNYDLIFK

SEQ ID NO: 39349 - protein, 85 aa, unidentified
  REGION 1..85: note = Description of Unknown:cds_NZ_WFIY01000004.1_cds_WP_155863087.1_1000 target sequence
SLVTIQELGIEEGKTLVKIARQAIMKKLGLQSSINYKESEVLNKKGLAFVTLETLLGETTTLRGCIGYVEAVAPLKEIVKNAAIA

SEQ ID NO: 39350 - protein, 85 aa, unidentified
  REGION 1..85: note = Description of Unknown:cds_NZ_WFIY01000004.1_cds_WP_155863087.1_1000 target sequence
AAFSDPRFPPLMKDEINNIIIEVTVLTKPEEVVVDDRKELPKVIKVGRDGLIVEKGILYSGLLLPQVPMEYCWDEETFLAETCLK

SEQ ID NO: 39351 - protein, 84 aa, unidentified
  REGION 1..84: note = Description of Unknown:cds_NZ_WFIY01000004.1_cds_WP_155863087.1_1000 target sequence
IVEKGILYSGLLLPQVPMEYCWDEETFLAETCLKAGLSPDCWLDKSVRIKRFEGIIFREKYPNSDEILMIKPSDVKCKPFDFSE

SEQ ID NO: 39352 - protein, 85 aa, unidentified
  REGION 1..85: note = Description of Unknown:cds_NZ_WFIY01000004.1_cds_WP_155863087.1_1000 target sequence
LGLQSSINYKESEVLNKKGLAFVTLETLLGETTTLRGCIGYVEAVAPLKEIVKNAAIAAAFSDPRFPPLMKDEINNIIIEVTVLT

SEQ ID NO: 39353 - protein, 85 aa, unidentified
  REGION 1..85: note = Description of Unknown:cds_NZ_WFIY01000004.1_cds_WP_155863087.1_1000 target sequence
KPEEVVVDDRKELPKVIKVGRDGLIVEKGILYSGLLLPQVPMEYCWDEETFLAETCLKAGLSPDCWLDKSVRIKRFEGIIFREKY

SEQ ID NO: 39354 - protein, 85 aa, unidentified
  REGION 1..85: note = Description of Unknown:cds_NZ_WFIY01000004.1_cds_WP_155863216.1_1161 target sequence
EIYVGTSGWMYDWNPKKNLSWYVENSGFNAVELNASFYRFPTRKQVESWKKYKIRWAVKVNRIITHVKRLKDVGLWKKFEEIFHD

SEQ ID NO: 39355 - protein, 85 aa, unidentified
  REGION 1..85: note = Description of Unknown:cds_NZ_WFIY01000004.1_cds_WP_155863216.1_1161 target sequence
LNPDFYLFQLPPNFKYSEDNLRRVKEFEKEVGKKMAVEFRDLSWFNKDINLEEATIVSIDSPIGVYIINNSGTVYLRMHGRDNWY

SEQ ID NO: 39356 - protein, 84 aa, unidentified
  REGION 1..84: note = Description of Unknown:cds_NZ_WFIY01000004.1_cds_WP_155863216.1_1161 target sequence
EEATIVSIDSPIGVYIINNSGTVYLRMHGRDNWYLYDYSEEELREDAKKAISLNPEKLYVFFNNDLWMLDNGRKMLKILHELSI

SEQ ID NO: 39357 - protein, 85 aa, unidentified
  REGION 1..85: note = Description of Unknown:cds_NZ_WFIY01000004.1_cds_WP_155863216.1_1161 target sequence
FNAVELNASFYRFPTRKQVESWKKYKIRWAVKVNRIITHVKRLKDVGLWKKFEEIFHDLNPDFYLFQLPPNFKYSEDNLRRVKEF

SEQ ID NO: 39358 - protein, 85 aa, unidentified
  REGION 1..85: note = Description of Unknown:cds_NZ_WFIY01000004.1_cds_WP_155863216.1_1161 target sequence
EKEVGKKMAVEFRDLSWFNKDINLEEATIVSIDSPIGVYIINNSGTVYLRMHGRDNWYLYDYSEEELREDAKKAISLNPEKLYVF

SEQ ID NO: 39359 - protein, 85 aa, unidentified
  REGION 1..85: note = Description of Unknown:cds_NZ_WFIY01000004.1_cds_WP_155863517.1_1464 target sequence
KINLNNKTVIMVISFLIFLMFLVFFSVLGHIIGYSYYSAIAQIYYIVSYILDLYFSIIIFDYITKFNVRYNNIQKREKILLIKYL

SEQ ID NO: 39360 - protein, 85 aa, unidentified
  REGION 1..85: note = Description of Unknown:cds_NZ_WFIY01000004.1_cds_WP_155863517.1_1464 target sequence
SIYSLVIIIYGYFTLNLEQKLFSNELVWAISSALQNPKYSLIYNLLMSFIVPKLEIEFFYKRLYTYLGFIRAALFYSIIEMLGGL

SEQ ID NO: 39361 - protein, 84 aa, unidentified
  REGION 1..84: note = Description of Unknown:cds_NZ_WFIY01000004.1_cds_WP_155863517.1_1464 target sequence
PKLEIEFFYKRLYTYLGFIRAALFYSIIEMLGGLNILIMLYQFAINFVFYSILIYFYRKINNFDYLLIPFYLYEIYEIIFTYFL

SEQ ID NO: 39362 - protein, 85 aa, unidentified
  REGION 1..85: note = Description of Unknown:cds_NZ_WFIY01000004.1_cds_WP_155863517.1_1464 target sequence
LGHIIGYSYYSAIAQIYYIVSYILDLYFSIIIFDYITKFNVRYNNIQKREKILLIKYLSIYSLVIIIYGYFTLNLEQKLFSNELV

SEQ ID NO: 39363 - protein, 85 aa, unidentified
  REGION 1..85: note = Description of Unknown:cds_NZ_WFIY01000004.1_cds_WP_155863517.1_1464 target sequence
WAISSALQNPKYSLIYNLLMSFIVPKLEIEFFYKRLYTYLGFIRAALFYSIIEMLGGLNILIMLYQFAINFVFYSILIYFYRKIN

SEQ ID NO: 39364 - protein, 85 aa, unidentified
  REGION 1..85: note = Description of Unknown:cds_NZ_WFIY01000004.1_cds_WP_155863794.1_1677 target sequence
KAIFVDMGETLVKFTPRYYEAVTNAIREKGFDVDEREVFRALMQQLGNHHFPHPEVGGLSNIDFRDLFYRLGLVANDKVIKDLES

SEQ ID NO: 39365 - protein, 85 aa, unidentified
  REGION 1..85: note = Description of Unknown:cds_NZ_WFIY01000004.1_cds_WP_155863794.1_1677 target sequence
RSYLSNKYELFDDAIPFLEEVKKMRLKVILVSNATSSIHKIIRELNLIKYLDGVVASCDLGVMKPHPKIFYYAKRIAGGDGIHIG

SEQ ID NO: 39366 - protein, 84 aa, unidentified
  REGION 1..84: note = Description of Unknown:cds_NZ_WFIY01000004.1_cds_WP_155863794.1_1677 target sequence
DGVVASCDLGVMKPHPKIFYYAKRIAGGDGIHIGDVYEIDVVGARRAFLKAILLDRFNYYPEIKENKVNNLLQAAKLIKEMLNY

SEQ ID NO: 39367 - protein, 85 aa, unidentified
  REGION 1..85: note = Description of Unknown:cds_NZ_WFIY01000004.1_cds_WP_155863794.1_1677 target sequence
EKGFDVDEREVFRALMQQLGNHHFPHPEVGGLSNIDFRDLFYRLGLVANDKVIKDLESRSYLSNKYELFDDAIPFLEEVKKMRLK

SEQ ID NO: 39368 - protein, 85 aa, unidentified
  REGION 1..85: note = Description of Unknown:cds_NZ_WFIY01000004.1_cds_WP_155863794.1_1677 target sequence
VILVSNATSSIHKIIRELNLIKYLDGVVASCDLGVMKPHPKIFYYAKRIAGGDGIHIGDVYEIDVVGARRAFLKAILLDRFNYYP

SEQ ID NO: 39369 - protein, 85 aa, unidentified
  REGION 1..85: note = Description of Unknown:cds_NZ_WFIY01000004.1_cds_WP_205737149.1_1909 target sequence
LLMLTEKMWNAIQDIYNAILSHPFIKGLVEGSLAEEKFKYYILQDYLYLREFSKALAIISAKAEKQNEAMLFSSHLQSIMRVENE

SEQ ID NO: 39370 - protein, 85 aa, unidentified
  REGION 1..85: note = Description of Unknown:cds_NZ_WFIY01000004.1_cds_WP_205737149.1_1909 target sequence
LHNFFMNAWNITEEEKAKLIPSPTNLLYTSFLLSTVLYKPYFEAVSAVLPCYWIYMEVGKELLKKGSPNPLYDRWIKTYGGEEYE

SEQ ID NO: 39371 - protein, 84 aa, unidentified
  REGION 1..84: note = Description of Unknown:cds_NZ_WFIY01000004.1_cds_WP_205737149.1_1909 target sequence
WIYMEVGKELLKKGSPNPLYDRWIKTYGGEEYEKGVRAVLDVVNSFKLTQEEEARAVRTFRIASIMEYMFWDSAYKLEKFPFNF

SEQ ID NO: 39372 - protein, 85 aa, unidentified
  REGION 1..85: note = Description of Unknown:cds_NZ_WFIY01000004.1_cds_WP_205737149.1_1909 target sequence
LVEGSLAEEKFKYYILQDYLYLREFSKALAIISAKAEKQNEAMLFSSHLQSIMRVENELHNFFMNAWNITEEEKAKLIPSPTNLL

SEQ ID NO: 39373 - protein, 85 aa, unidentified
  REGION 1..85: note = Description of Unknown:cds_NZ_WFIY01000004.1_cds_WP_205737149.1_1909 target sequence
YTSFLLSTVLYKPYFEAVSAVLPCYWIYMEVGKELLKKGSPNPLYDRWIKTYGGEEYEKGVRAVLDVVNSFKLTQEEEARAVRTF

SEQ ID NO: 39374 - protein, 85 aa, unidentified
  REGION 1..85: note = Description of Unknown:cds_NZ_WFIY01000004.1_cds_WP_155864033.1_1967 target sequence
DLYDAIKGRRDIRSYYKPDPIPDEVLAKILLAAHLAPSVGYSQPWNFIIIKDENIKRKVKEEVERQRLRYRELLDEGRRKLFDTI

SEQ ID NO: 39375 - protein, 85 aa, unidentified
  REGION 1..85: note = Description of Unknown:cds_NZ_WFIY01000004.1_cds_WP_155864033.1_1967 target sequence
KIEGIMEAPINIAVTCDPSRFGPHVLGRITMPETCNYSTVLAIENLWLAARAENLGMGWVSFLDKNRIKEILGIPSNVEFIAYLT

SEQ ID NO: 39376 - protein, 84 aa, unidentified
  REGION 1..84: note = Description of Unknown:cds_NZ_WFIY01000004.1_cds_WP_155864033.1_1967 target sequence
AENLGMGWVSFLDKNRIKEILGIPSNVEFIAYLTLGYVIKFPERPELEEKGWNYRLPLSEVVFEDRWGNKPNEKLLEKLNSAKI

SEQ ID NO: 39377 - protein, 85 aa, unidentified
  REGION 1..85: note = Description of Unknown:cds_NZ_WFIY01000004.1_cds_WP_155864033.1_1967 target sequence
KILLAAHLAPSVGYSQPWNFIIIKDENIKRKVKEEVERQRLRYRELLDEGRRKLFDTIKIEGIMEAPINIAVTCDPSRFGPHVLG

SEQ ID NO: 39378 - protein, 85 aa, unidentified
  REGION 1..85: note = Description of Unknown:cds_NZ_WFIY01000004.1_cds_WP_155864033.1_1967 target sequence
RITMPETCNYSTVLAIENLWLAARAENLGMGWVSFLDKNRIKEILGIPSNVEFIAYLTLGYVIKFPERPELEEKGWNYRLPLSEV

SEQ ID NO: 39379 - protein, 85 aa, unidentified
  REGION 1..85: note = Description of Unknown:cds_NZ_WFIY01000004.1_cds_WP_155864292.1_2285 target sequence
LTDKNKVTLFRSIYSVFLGFMSFGYIAIMSKSGVPYTQISLLVTLNFLFQIVSYLIFSIVRIRKGLIISSFLNLTVILILLSERN

SEQ ID NO: 39380 - protein, 85 aa, unidentified
  REGION 1..85: note = Description of Unknown:cds_NZ_WFIY01000004.1_cds_WP_155864292.1_2285 target sequence
FLSFFIISLILGLAEALFSSIVIIQKDFKKKDYSVLMSLTFVANILGLGLYYFSFYIGLEYVIILLAGISSVNLFVSLSLKYEEE

SEQ ID NO: 39381 - protein, 84 aa, unidentified
  REGION 1..84: note = Description of Unknown:cds_NZ_WFIY01000004.1_cds_WP_155864292.1_2285 target sequence
YFSFYIGLEYVIILLAGISSVNLFVSLSLKYEEEDLQFEEFLQFMKINGKFLITLQNWGLRGRKASQAGMDSPLIDLKTSFPNQ

SEQ ID NO: 39382 - protein, 85 aa, unidentified
  REGION 1..85: note = Description of Unknown:cds_NZ_WFIY01000004.1_cds_WP_155864292.1_2285 target sequence
IMSKSGVPYTQISLLVTLNFLFQIVSYLIFSIVRIRKGLIISSFLNLTVILILLSERNFLSFFIISLILGLAEALFSSIVIIQKD

SEQ ID NO: 39383 - protein, 85 aa, unidentified
  REGION 1..85: note = Description of Unknown:cds_NZ_WFIY01000004.1_cds_WP_155864292.1_2285 target sequence
FKKKDYSVLMSLTFVANILGLGLYYFSFYIGLEYVIILLAGISSVNLFVSLSLKYEEEDLQFEEFLQFMKINGKFLITLQNWGLR

SEQ ID NO: 39384 - protein, 85 aa, unidentified
  REGION 1..85: note = Description of Unknown:cds_NZ_WFIY01000004.1_cds_WP_155864348.1_2362 target sequence
IYKAELTVHSIFWFNSLTYPHSTGYVQKVMPVIHNYPLTIAFLGKLVEDSYVGPYNRPSYKGIQALYEEGGIYVYPAVFDRTFYM

SEQ ID NO: 39385 - protein, 85 aa, unidentified
  REGION 1..85: note = Description of Unknown:cds_NZ_WFIY01000004.1_cds_WP_155864348.1_2362 target sequence
RLTMSMGETDYILYKPQTRWAVPILTTNNVISVGSKATTYVISSSPLDVKYIRLGVKRGIMKVYLKEIKDYEELKTSFSPNVAYN

SEQ ID NO: 39386 - protein, 84 aa, unidentified
  REGION 1..84: note = Description of Unknown:cds_NZ_WFIY01000004.1_cds_WP_155864348.1_2362 target sequence
IRLGVKRGIMKVYLKEIKDYEELKTSFSPNVAYNNKDVKSEGGFTLLRHREGDVVFGGSAGRGIRFKDEDEEIYLPLPEFVEQL

SEQ ID NO: 39387 - protein, 85 aa, unidentified
  REGION 1..85: note = Description of Unknown:cds_NZ_WFIY01000004.1_cds_WP_155864348.1_2362 target sequence
KVMPVIHNYPLTIAFLGKLVEDSYVGPYNRPSYKGIQALYEEGGIYVYPAVFDRTFYMRLTMSMGETDYILYKPQTRWAVPILTT

SEQ ID NO: 39388 - protein, 85 aa, unidentified
  REGION 1..85: note = Description of Unknown:cds_NZ_WFIY01000004.1_cds_WP_155864348.1_2362 target sequence
NNVISVGSKATTYVISSSPLDVKYIRLGVKRGIMKVYLKEIKDYEELKTSFSPNVAYNNKDVKSEGGFTLLRHREGDVVFGGSAG

SEQ ID NO: 39389 - protein, 85 aa, unidentified
  REGION 1..85: note = Description of Unknown:cds_NC_003214.2_cds_NP_445709.1_44 target sequence
VRVVTFFGNSTYLDEVVQKNKVTDVYIDRSYTYKLGSKWQGVPDSLLPEDTIFLNPSDIEELSEKLASYGVHSVISDTGIKYSGV

SEQ ID NO: 39390 - protein, 85 aa, unidentified
  REGION 1..85: note = Description of Unknown:cds_NC_003214.2_cds_NP_445709.1_44 target sequence
EREVMNRRLRIAKMITTILNDIYDDILFVDSDVVLNENVFKEISSSTSPMPMSICIPALMKPSTFVVFIFCYSTNFYLPLSLHDK

SEQ ID NO: 39391 - protein, 84 aa, unidentified
  REGION 1..84: note = Description of Unknown:cds_NC_003214.2_cds_NP_445709.1_44 target sequence
MSICIPALMKPSTFVVFIFCYSTNFYLPLSLHDKLYDAMKMYIDRQIYTTYPVDLYIHNSVLNTRKIILNRGVCHYIRGNVYCI

SEQ ID NO: 39392 - protein, 85 aa, unidentified
  REGION 1..85: note = Description of Unknown:cds_NC_003214.2_cds_NP_445709.1_44 target sequence
DRSYTYKLGSKWQGVPDSLLPEDTIFLNPSDIEELSEKLASYGVHSVISDTGIKYSGVEREVMNRRLRIAKMITTILNDIYDDIL

SEQ ID NO: 39393 - protein, 85 aa, unidentified
  REGION 1..85: note = Description of Unknown:cds_NC_003214.2_cds_NP_445709.1_44 target sequence
FVDSDVVLNENVFKEISSSTSPMPMSICIPALMKPSTFVVFIFCYSTNFYLPLSLHDKLYDAMKMYIDRQIYTTYPVDLYIHNSV

SEQ ID NO: 39394 - protein, 85 aa, unidentified
  REGION 1..85: note = Description of Unknown:cds_NC_030656.1_cds_YP_009268772.1_57 target sequence
SFRELILFNVLKFIIMSDTKSLKTLASLSLAFGSDIVEKNLSKFNKRYYKHILQITQCTEYVPILDLEFDSDVIREIIKLRLLSF

SEQ ID NO: 39395 - protein, 85 aa, unidentified
  REGION 1..85: note = Description of Unknown:cds_NC_030656.1_cds_YP_009268772.1_57 target sequence
NHTIKPLSKLKLTMKGVITVSRNKVYIYDANDELLEMVMKQYNPSMYNYISSKKPKVIKGSNILVCGFPKISYFAYSISKIYVNV

SEQ ID NO: 39396 - protein, 84 aa, unidentified
  REGION 1..84: note = Description of Unknown:cds_NC_030656.1_cds_YP_009268772.1_57 target sequence
SKKPKVIKGSNILVCGFPKISYFAYSISKIYVNVPTTVVVTDTCISTLLKDKHCDILKNIFNNGSGVLNESFKQLFYFLYDQSP

SEQ ID NO: 39397 - protein, 85 aa, unidentified
  REGION 1..85: note = Description of Unknown:cds_NC_030656.1_cds_YP_009268772.1_57 target sequence
LSLAFGSDIVEKNLSKFNKRYYKHILQITQCTEYVPILDLEFDSDVIREIIKLRLLSFNHTIKPLSKLKLTMKGVITVSRNKVYI

SEQ ID NO: 39398 - protein, 85 aa, unidentified
  REGION 1..85: note = Description of Unknown:cds_NC_030656.1_cds_YP_009268772.1_57 target sequence
YDANDELLEMVMKQYNPSMYNYISSKKPKVIKGSNILVCGFPKISYFAYSISKIYVNVPTTVVVTDTCISTLLKDKHCDILKNIF

SEQ ID NO: 39399 - protein, 85 aa, unidentified
  REGION 1..85: note = Description of Unknown:cds_NC_005830.1_cds_YP_003747.1_22 target sequence
YAPIRSPITELNESTPSSIPVATSYATCSASFAKLVALLVDDMAGLSIVLSEIYIYFKLLFLIVITESIQNKLEDIVKEYKKRGI

SEQ ID NO: 39400 - protein, 85 aa, unidentified
  REGION 1..85: note = Description of Unknown:cds_NC_005830.1_cds_YP_003747.1_22 target sequence
DLGIITNVDEVSLFFDTSQYAEAIKKKVIEIVRQSGTGRAKIDFKTNGYVIKFAIQRGYYNRNTIEKLKSLVDYLHEQKIRCGYE

SEQ ID NO: 39401 - protein, 84 aa, unidentified
  REGION 1..84: note = Description of Unknown:cds_NC_005830.1_cds_YP_003747.1_22 target sequence
KFAIQRGYYNRNTIEKLKSLVDYLHEQKIRCGYEIKGDLIFVMSLTDFLQKISEDVKEKLKDERVKIASKQEYTKYIVVIKVEQ

SEQ ID NO: 39402 - protein, 85 aa, unidentified
  REGION 1..85: note = Description of Unknown:cds_NC_005830.1_cds_YP_003747.1_22 target sequence
CSASFAKLVALLVDDMAGLSIVLSEIYIYFKLLFLIVITESIQNKLEDIVKEYKKRGIDLGIITNVDEVSLFFDTSQYAEAIKKK

SEQ ID NO: 39403 - protein, 85 aa, unidentified
  REGION 1..85: note = Description of Unknown:cds_NC_005830.1_cds_YP_003747.1_22 target sequence
VIEIVRQSGTGRAKIDFKTNGYVIKFAIQRGYYNRNTIEKLKSLVDYLHEQKIRCGYEIKGDLIFVMSLTDFLQKISEDVKEKLK

SEQ ID NO: 39404 - protein, 85 aa, unidentified
  REGION 1..85: note = Description of Unknown:cds_NC_038931.1_cds_YP_009509153.1_37 target sequence
VPSFSTQSITRPSVGVAIGPDGIYRALYGWYGNEQPLEIDKCSYDLSTCSPVVSSGPTIGDGYGGFYDGTNIWFSGSDEANDQGV

SEQ ID NO: 39405 - protein, 85 aa, unidentified
  REGION 1..85: note = Description of Unknown:cds_NC_038931.1_cds_YP_009509153.1_37 target sequence
VASYNPSTGAFNYAYYPGNSTKYVIKIFYYNGYYYLITCCDPGTLLKCTNPLNPSTCTQLNINAPTSFTVQEYYMYTQGSYALLS

SEQ ID NO: 39406 - protein, 84 aa, unidentified
  REGION 1..84: note = Description of Unknown:cds_NC_038931.1_cds_YP_009509153.1_37 target sequence
LNPSTCTQLNINAPTSFTVQEYYMYTQGSYALLSYFQKNMNNKLFSLCNFDGTNLYNCINIYSTTGILHYLHHSLLEEQYVEII

SEQ ID NO: 39407 - protein, 85 aa, unidentified
  REGION 1..85: note = Description of Unknown:cds_NC_038931.1_cds_YP_009509153.1_37 target sequence
YGWYGNEQPLEIDKCSYDLSTCSPVVSSGPTIGDGYGGFYDGTNIWFSGSDEANDQGVVASYNPSTGAFNYAYYPGNSTKYVIKI

SEQ ID NO: 39408 - protein, 85 aa, unidentified
  REGION 1..85: note = Description of Unknown:cds_NC_038931.1_cds_YP_009509153.1_37 target sequence
FYYNGYYYLITCCDPGTLLKCTNPLNPSTCTQLNINAPTSFTVQEYYMYTQGSYALLSYFQKNMNNKLFSLCNFDGTNLYNCINI

SEQ ID NO: 39409 - protein, 85 aa, unidentified
  REGION 1..85: note = Description of Unknown:cds_NZ_WFIY01000004.1_cds_WP_155862554.1_323 target sequence
KFEDVIKSLYLQSKLIKLEEKEYVIKCYSTSAGIKWYFISSFFKSYPYASSPRERMNREIDFFTRKWDGIGTPKIIDMDYDTNCI

SEQ ID NO: 39410 - protein, 85 aa, unidentified
  REGION 1..85: note = Description of Unknown:cds_NZ_WFIY01000004.1_cds_WP_155862554.1_323 target sequence
MRDYIKGRPIETEEDFLMLGKAFKIIHENGLSLGDTKMENFIVNEKIYVIDAEQAIQTKEEKYFAWDILVFLLFLSYKYINDLKN

SEQ ID NO: 39411 - protein, 84 aa, unidentified
  REGION 1..84: note = Description of Unknown:cds_NZ_WFIY01000004.1_cds_WP_155862554.1_323 target sequence
DAEQAIQTKEEKYFAWDILVFLLFLSYKYINDLKNFEKMARVFLNSYKPTQKEISYILDIRNIGILTLFPPMSLNLIKKITAEL

SEQ ID NO: 39412 - protein, 85 aa, unidentified
  REGION 1..85: note = Description of Unknown:cds_NZ_WFIY01000004.1_cds_WP_155862554.1_323 target sequence
YSTSAGIKWYFISSFFKSYPYASSPRERMNREIDFFTRKWDGIGTPKIIDMDYDTNCIMRDYIKGRPIETEEDFLMLGKAFKIIH

SEQ ID NO: 39413 - protein, 85 aa, unidentified
  REGION 1..85: note = Description of Unknown:cds_NZ_WFIY01000004.1_cds_WP_155862554.1_323 target sequence
ENGLSLGDTKMENFIVNEKIYVIDAEQAIQTKEEKYFAWDILVFLLFLSYKYINDLKNFEKMARVFLNSYKPTQKEISYILDIRN

SEQ ID NO: 39414 - protein, 85 aa, unidentified
  REGION 1..85: note = Description of Unknown:cds_NZ_WFIY01000004.1_cds_WP_155862709.1_509 target sequence
NIVVSEDCKNLGIFVAHTEILGVTNSKGKLEEEMRKVEEMYSQEDPEKLKLNPIVRAYRDFYWKIGIDPTKVRPAGEALRRRINR

SEQ ID NO: 39415 - protein, 85 aa, unidentified
  REGION 1..85: note = Description of Unknown:cds_NZ_WFIY01000004.1_cds_WP_155862709.1_509 target sequence
SGKLPRINDIVDAGNIASSSTLVPIGIYDISKIIGEPSIILSKGGEEFYAIGKDKPEILQKGIPIMVDKEKVMHIYPHRDSKITS

SEQ ID NO: 39416 - protein, 84 aa, unidentified
  REGION 1..84: note = Description of Unknown:cds_NZ_WFIY01000004.1_cds_WP_155862709.1_509 target sequence
IGKDKPEILQKGIPIMVDKEKVMHIYPHRDSKITSVTDTTKDILIVGAGVPGVPQELVGNAVNIVVELVLKYLGGKQTHQVVFS

SEQ ID NO: 39417 - protein, 85 aa, unidentified
  REGION 1..85: note = Description of Unknown:cds_NZ_WFIY01000004.1_cds_WP_155862709.1_509 target sequence
GKLEEEMRKVEEMYSQEDPEKLKLNPIVRAYRDFYWKIGIDPTKVRPAGEALRRRINRSGKLPRINDIVDAGNIASSSTLVPIGI

SEQ ID NO: 39418 - protein, 85 aa, unidentified
  REGION 1..85: note = Description of Unknown:cds_NZ_WFIY01000004.1_cds_WP_155862709.1_509 target sequence
YDISKIIGEPSIILSKGGEEFYAIGKDKPEILQKGIPIMVDKEKVMHIYPHRDSKITSVTDTTKDILIVGAGVPGVPQELVGNAV

SEQ ID NO: 39419 - protein, 85 aa, unidentified
  REGION 1..85: note = Description of Unknown:cds_NZ_WFIY01000004.1_cds_WP_155862843.1_676 target sequence
TWKCPVCGYENLDDALFCIQCGTKKPDNIQQLTVPQQVTEQSSQSANQTTQAPKEQSIQQPTILESQSAQANNDQNQSSQQGTLQ

SEQ ID NO: 39420 - protein, 85 aa, unidentified
  REGION 1..85: note = Description of Unknown:cds_NZ_WFIY01000004.1_cds_WP_155862843.1_676 target sequence
ATQATASQSLQSVQNAQQVLQTQASTGKYYIIFIATPVSALNKSKLPLDFDVFESISIGRSPENVIVIPDPEISRRHAIISLEKD

SEQ ID NO: 39421 - protein, 84 aa, unidentified
  REGION 1..84: note = Description of Unknown:cds_NZ_WFIY01000004.1_cds_WP_155862843.1_676 target sequence
DVFESISIGRSPENVIVIPDPEISRRHAIISLEKDKLYIEDLNSTNGTYIYDGKIFQPIKGKQEIRPGSIIKLGSNTMLKIVIE

SEQ ID NO: 39422 - protein, 85 aa, unidentified
  REGION 1..85: note = Description of Unknown:cds_NZ_WFIY01000004.1_cds_WP_155862843.1_676 target sequence
NIQQLTVPQQVTEQSSQSANQTTQAPKEQSIQQPTILESQSAQANNDQNQSSQQGTLQATQATASQSLQSVQNAQQVLQTQASTG

SEQ ID NO: 39423 - protein, 85 aa, unidentified
  REGION 1..85: note = Description of Unknown:cds_NZ_WFIY01000004.1_cds_WP_155862843.1_676 target sequence
KYYIIFIATPVSALNKSKLPLDFDVFESISIGRSPENVIVIPDPEISRRHAIISLEKDKLYIEDLNSTNGTYIYDGKIFQPIKGK

SEQ ID NO: 39424 - protein, 85 aa, unidentified
  REGION 1..85: note = Description of Unknown:cds_NZ_WFIY01000004.1_cds_935 target sequence
VEIEYTEEQWKLFNEKRKRAKEILETLYYKGIKGYAYGSIARGDVKKTSDIDIIVFEPNILELDLLEADHKYIIQATPISTPKAY

SEQ ID NO: 39425 - protein, 85 aa, unidentified
  REGION 1..85: note = Description of Unknown:cds_NZ_WFIY01000004.1_cds_935 target sequence
ISLNPEETEVISFPLSKLKKDEEEFYYFGGLVSLEDIINGVRKPGINKELKLIIPNKNGHDEIPLKGNEDYATRLLKISIATINE

SEQ ID NO: 39426 - protein, 84 aa, unidentified
  REGION 1..84: note = Description of Unknown:cds_NZ_WFIY01000004.1_cds_935 target sequence
LIIPNKNGHDEIPLKGNEDYATRLLKISIATINEREKLLMKREDKGRTGVFLKYELAANENFEEAIRELSRRNKFFRRVLNDSR

SEQ ID NO: 39427 - protein, 85 aa, unidentified
  REGION 1..85: note = Description of Unknown:cds_NZ_WFIY01000004.1_cds_935 target sequence
YYKGIKGYAYGSIARGDVKKTSDIDIIVFEPNILELDLLEADHKYIIQATPISTPKAYISLNPEETEVISFPLSKLKKDEEEFYY

SEQ ID NO: 39428 - protein, 85 aa, unidentified
  REGION 1..85: note = Description of Unknown:cds_NZ_WFIY01000004.1_cds_935 target sequence
FGGLVSLEDIINGVRKPGINKELKLIIPNKNGHDEIPLKGNEDYATRLLKISIATINEREKLLMKREDKGRTGVFLKYELAANEN

SEQ ID NO: 39429 - protein, 85 aa, unidentified
  REGION 1..85: note = Description of Unknown:cds_NZ_WFIY01000004.1_cds_WP_155863078.1_990 target sequence
RILFLRPEGSKIPKVDFAEVINIPIFSPVCIDYPPLPLTEAYAFTSSNAVKCFHDFDKIKGKQIFSIGKSTAKELINYGINSLYP

SEQ ID NO: 39430 - protein, 85 aa, unidentified
  REGION 1..85: note = Description of Unknown:cds_NZ_WFIY01000004.1_cds_WP_155863078.1_990 target sequence
PNYDSLDLAEFIKSKGIKSLTAIRSKKASNDLKNSLQNIEYHEIYDYDTIINKEELEKSKDYLENCKIDVVVLTSSEIAKAVASS

SEQ ID NO: 39431 - protein, 84 aa, unidentified
  REGION 1..84: note = Description of Unknown:cds_NZ_WFIY01000004.1_cds_WP_155863078.1_990 target sequence
INKEELEKSKDYLENCKIDVVVLTSSEIAKAVASSLKNCYKIISIGPMTTKTILSLRPDLKIFQSKIYDIEGVIDLIKKEVKFQ

SEQ ID NO: 39432 - protein, 85 aa, unidentified
  REGION 1..85: note = Description of Unknown:cds_NZ_WFIY01000004.1_cds_WP_155863078.1_990 target sequence
PVCIDYPPLPLTEAYAFTSSNAVKCFHDFDKIKGKQIFSIGKSTAKELINYGINSLYPPNYDSLDLAEFIKSKGIKSLTAIRSKK

SEQ ID NO: 39433 - protein, 85 aa, unidentified
  REGION 1..85: note = Description of Unknown:cds_NZ_WFIY01000004.1_cds_WP_155863078.1_990 target sequence
ASNDLKNSLQNIEYHEIYDYDTIINKEELEKSKDYLENCKIDVVVLTSSEIAKAVASSLKNCYKIISIGPMTTKTILSLRPDLKI

SEQ ID NO: 39434 - protein, 85 aa, unidentified
  REGION 1..85: note = Description of Unknown:cds_NZ_WFIY01000004.1_cds_WP_155863788.1_1669 target sequence
VNEVYMMVYSIKFDKDWWRLNHEARKSILSKAEEVANEFKKDVISIKKFSSLSQESNIIYWLSSFSTSPFLEFRSAILSAFEGYA

SEQ ID NO: 39435 - protein, 85 aa, unidentified
  REGION 1..85: note = Description of Unknown:cds_NZ_WFIY01000004.1_cds_WP_155863788.1_1669 target sequence
LESNLFLSVFKPSPYMKSNFDPKVVLGREQLKYFVAYPMKKSPEWYLLPFEEREKIMKEHIDMAINNPKNNGIKSYTTYSFGIGD

SEQ ID NO: 39436 - protein, 84 aa, unidentified
  REGION 1..84: note = Description of Unknown:cds_NZ_WFIY01000004.1_cds_WP_155863788.1_1669 target sequence
EEREKIMKEHIDMAINNPKNNGIKSYTTYSFGIGDYEFVVIYEIPDLFNWVDVVEKLREAKARKWIVKEEPLIVGETKSFDFLA

SEQ ID NO: 39437 - protein, 85 aa, unidentified
  REGION 1..85: note = Description of Unknown:cds_NZ_WFIY01000004.1_cds_WP_155863788.1_1669 target sequence
ILSKAEEVANEFKKDVISIKKFSSLSQESNIIYWLSSFSTSPFLEFRSAILSAFEGYALESNLFLSVFKPSPYMKSNFDPKVVLG

SEQ ID NO: 39438 - protein, 85 aa, unidentified
  REGION 1..85: note = Description of Unknown:cds_NZ_WFIY01000004.1_cds_WP_155863788.1_1669 target sequence
REQLKYFVAYPMKKSPEWYLLPFEEREKIMKEHIDMAINNPKNNGIKSYTTYSFGIGDYEFVVIYEIPDLFNWVDVVEKLREAKA

SEQ ID NO: 39439 - protein, 85 aa, unidentified
  REGION 1..85: note = Description of Unknown:cds_NZ_WFIY01000004.1_cds_WP_155864055.1_1991 target sequence
LIYVIGLGPGDPELITVKAQRILSEAEVIFVPYSTGTNRSLALRIVEKFTKGEIVMLGFPMKKDVKDEELKEIAKIICEKSNGRK

SEQ ID NO: 39440 - protein, 85 aa, unidentified
  REGION 1..85: note = Description of Unknown:cds_NZ_WFIY01000004.1_cds_WP_155864055.1_1991 target sequence
VSAFVTLGDATLYSTFFRLFNFLNCQKIEIIPGISSITACPSKVKIPLALKNEAIAIIPADRLDLIKLAKGKFETILVMKANENL

SEQ ID NO: 39441 - protein, 84 aa, unidentified
  REGION 1..84: note = Description of Unknown:cds_NZ_WFIY01000004.1_cds_WP_155864055.1_1991 target sequence
NEAIAIIPADRLDLIKLAKGKFETILVMKANENLEEIKELLSPYYNIIYAKRCYMEGEDIHELKGDEDKDYFSTLICKVKENER

SEQ ID NO: 39442 - protein, 85 aa, unidentified
  REGION 1..85: note = Description of Unknown:cds_NZ_WFIY01000004.1_cds_WP_155864055.1_1991 target sequence
VIFVPYSTGTNRSLALRIVEKFTKGEIVMLGFPMKKDVKDEELKEIAKIICEKSNGRKVSAFVTLGDATLYSTFFRLFNFLNCQK

SEQ ID NO: 39443 - protein, 85 aa, unidentified
  REGION 1..85: note = Description of Unknown:cds_NZ_WFIY01000004.1_cds_WP_155864055.1_1991 target sequence
IEIIPGISSITACPSKVKIPLALKNEAIAIIPADRLDLIKLAKGKFETILVMKANENLEEIKELLSPYYNIIYAKRCYMEGEDIH

SEQ ID NO: 39444 - protein, 85 aa, unidentified
  REGION 1..85: note = Description of Unknown:cds_NC_007409.1_cds_YP_319866.1_35 target sequence
PSKTTSSTNVREELIKRSLDETVAQYMTLCFDPKHRFSSPVQTFNTLLLIASQHVINVSPDSKKMIEEIVNNAQNAQNYDELRGY

SEQ ID NO: 39445 - protein, 85 aa, unidentified
  REGION 1..85: note = Description of Unknown:cds_NC_007409.1_cds_YP_319866.1_35 target sequence
IEELCAKMYPYIFRLNVKVNTISVKFKSLPPSTANEVLLGVASEIIRQLYSTAVFDENIEVVTEKFVKLRDITLKLLRSIQNTTL

SEQ ID NO: 39446 - protein, 84 aa, unidentified
  REGION 1..84: note = Description of Unknown:cds_NC_007409.1_cds_YP_319866.1_35 target sequence
STAVFDENIEVVTEKFVKLRDITLKLLRSIQNTTLYQYMKSIGLDENYVMKPCESELPVQCFLEIQSRLLEVVEFIATHMNARF

SEQ ID NO: 39447 - protein, 85 aa, unidentified
  REGION 1..85: note = Description of Unknown:cds_NC_007409.1_cds_YP_319866.1_35 target sequence
TLCFDPKHRFSSPVQTFNTLLLIASQHVINVSPDSKKMIEEIVNNAQNAQNYDELRGYIEELCAKMYPYIFRLNVKVNTISVKFK

SEQ ID NO: 39448 - protein, 85 aa, unidentified
  REGION 1..85: note = Description of Unknown:cds_NC_007409.1_cds_YP_319866.1_35 target sequence
SLPPSTANEVLLGVASEIIRQLYSTAVFDENIEVVTEKFVKLRDITLKLLRSIQNTTLYQYMKSIGLDENYVMKPCESELPVQCF

SEQ ID NO: 39449 - protein, 85 aa, unidentified
  REGION 1..85: note = Description of Unknown:cds_NC_010495.1_cds_YP_001742079.1_42 target sequence
IFSEQKANLIKALVEARKVMSSGAKKNAKNPHLKSNYANLESFLDAIRPALEANGLIIIQNAIDGDSMDVLKLETTIMHESGEYM

SEQ ID NO: 39450 - protein, 85 aa, unidentified
  REGION 1..85: note = Description of Unknown:cds_NC_010495.1_cds_YP_001742079.1_42 target sequence
SSVMPMPVAKKDAQGYGSAMTYARRYSIAAMFGIAQADDDGNAARKSPKDAVALIRNAASMEELTSIYGEEYKAFRGDDAATRVI

SEQ ID NO: 39451 - protein, 84 aa, unidentified
  REGION 1..84: note = Description of Unknown:cds_NC_010495.1_cds_YP_001742079.1_42 target sequence
AVALIRNAASMEELTSIYGEEYKAFRGDDAATRVIVGAYQEMKAKFMVSGESFNPAKLAKPQPQQPESQEETKTEHKPTPIEGF

SEQ ID NO: 39452 - protein, 85 aa, unidentified
  REGION 1..85: note = Description of Unknown:cds_NC_010495.1_cds_YP_001742079.1_42 target sequence
AKNPHLKSNYANLESFLDAIRPALEANGLIIIQNAIDGDSMDVLKLETTIMHESGEYMSSVMPMPVAKKDAQGYGSAMTYARRYS

SEQ ID NO: 39453 - protein, 85 aa, unidentified
  REGION 1..85: note = Description of Unknown:cds_NC_010495.1_cds_YP_001742079.1_42 target sequence
IAAMFGIAQADDDGNAARKSPKDAVALIRNAASMEELTSIYGEEYKAFRGDDAATRVIVGAYQEMKAKFMVSGESFNPAKLAKPQ

SEQ ID NO: 39454 - protein, 19 aa, unidentified
  REGION 1..19: note = Description of Unknown:cds_NZ_WFIY01000004.1_cds_17 target sequence
EKAYDFEVEALQRWLEIIS

SEQ ID NO: 39455 - protein, 7 aa, unidentified
  REGION 1..7: note = Description of Unknown:cds_NZ_WFIY01000004.1_cds_17 target sequence
PSKEELL

SEQ ID NO: 39456 - protein, 84 aa, unidentified
  REGION 1..84: note = Description of Unknown:cds_NZ_WFIY01000004.1_cds_17 target sequence
EEQKGVKGEVSIYKMKTIFSGKINKDELEKYLEIAMVKSVNSTVVVILSDERNIVEIKFKGGELVAQKGDLDSLSSPITILIKQ

SEQ ID NO: 39457 - protein, 5 aa, unidentified
  REGION 1..5: note = Description of Unknown:cds_NZ_WFIY01000004.1_cds_17 target sequence
GFKTS

SEQ ID NO: 39458 - protein, 14 aa, unidentified
  REGION 1..14: note = Description of Unknown:cds_NZ_WFIY01000004.1_cds_17 target sequence
LRSIERERKCLKLK

SEQ ID NO: 39459 - protein, 85 aa, unidentified
  REGION 1..85: note = Description of Unknown:cds_NZ_WFIY01000004.1_cds_WP_155862675.1_471 target sequence
LKGRIIFSMDEEIPQHVLLKISGYFHGIKIGYPLLLRKGIDGVKEILRKLEINEIIMDLKLADIDNTMINIVKQLDFANSFIAHS

SEQ ID NO: 39460 - protein, 85 aa, unidentified
  REGION 1..85: note = Description of Unknown:cds_NZ_WFIY01000004.1_cds_WP_155862675.1_471 target sequence
FIGIDGALGELKNFLDNNGKKLYLLASMSHKGWNDDFYPYIKTVIKSLNPYGIVAPATKPNVIRIVRDDFPDKIIISPGVGAQGG

SEQ ID NO: 39461 - protein, 84 aa, unidentified
  REGION 1..84: note = Description of Unknown:cds_NZ_WFIY01000004.1_cds_WP_155862675.1_471 target sequence
PYGIVAPATKPNVIRIVRDDFPDKIIISPGVGAQGGKIGDALCNGADYEIIGRTIYTSSDPENKVKEIIKIQEEKINECKKTST

SEQ ID NO: 39462 - protein, 85 aa, unidentified
  REGION 1..85: note = Description of Unknown:cds_NZ_WFIY01000004.1_cds_WP_155862675.1_471 target sequence
IKIGYPLLLRKGIDGVKEILRKLEINEIIMDLKLADIDNTMINIVKQLDFANSFIAHSFIGIDGALGELKNFLDNNGKKLYLLAS

SEQ ID NO: 39463 - protein, 85 aa, unidentified
  REGION 1..85: note = Description of Unknown:cds_NZ_WFIY01000004.1_cds_WP_155862675.1_471 target sequence
MSHKGWNDDFYPYIKTVIKSLNPYGIVAPATKPNVIRIVRDDFPDKIIISPGVGAQGGKIGDALCNGADYEIIGRTIYTSSDPEN

SEQ ID NO: 39464 - protein, 85 aa, unidentified
  REGION 1..85: note = Description of Unknown:cds_NZ_WFIY01000004.1_cds_WP_155862935.1_788 target sequence
MAENRRPYERKVERRVERREKFAYVLDYLREGNPLDKHKIHKNRPFAQLLGTDYFMLMEASTIKELQIEEKVDLENPSFGIKVDF

SEQ ID NO: 39465 - protein, 85 aa, unidentified
  REGION 1..85: note = Description of Unknown:cds_NZ_WFIY01000004.1_cds_WP_155862935.1_788 target sequence
IISYDDLTSVAKDTLNRVIKKIIEEKEKLFVEFFNKSEPLTLKLHALELLPGIGKKTLREILEERKKKPFESFKDIEDRTGIKNI

SEQ ID NO: 39466 - protein, 84 aa, unidentified
  REGION 1..84: note = Description of Unknown:cds_NZ_WFIY01000004.1_cds_WP_155862935.1_788 target sequence
LPGIGKKTLREILEERKKKPFESFKDIEDRTGIKNIIDIIAERILIEIERKDKYYLFAYPIDHKKPQATQQQEIIYVGYLEKLK

SEQ ID NO: 39467 - protein, 85 aa, unidentified
  REGION 1..85: note = Description of Unknown:cds_NZ_WFIY01000004.1_cds_WP_155862935.1_788 target sequence
YLREGNPLDKHKIHKNRPFAQLLGTDYFMLMEASTIKELQIEEKVDLENPSFGIKVDFIISYDDLTSVAKDTLNRVIKKIIEEKE

SEQ ID NO: 39468 - protein, 85 aa, unidentified
  REGION 1..85: note = Description of Unknown:cds_NZ_WFIY01000004.1_cds_WP_155862935.1_788 target sequence
KLFVEFFNKSEPLTLKLHALELLPGIGKKTLREILEERKKKPFESFKDIEDRTGIKNIIDIIAERILIEIERKDKYYLFAYPIDH

SEQ ID NO: 39469 - protein, 85 aa, unidentified
  REGION 1..85: note = Description of Unknown:cds_NZ_WFIY01000004.1_cds_WP_155863004.1_883 target sequence
IPKEEIRKNLEDGLPILIYDFDGREEETDMMFYAGVIDWKKIYILRKEAGGLICYATGSEEGKKLGLKFQTDILLNSEYKQLVKL

SEQ ID NO: 39470 - protein, 85 aa, unidentified
  REGION 1..85: note = Description of Unknown:cds_NZ_WFIY01000004.1_cds_WP_155863004.1_883 target sequence
PQYGDKPAFSLWVNHVNTRTGISDNDRALTILKLHEIISELKEDEKSAVKRFYTEFYAPGHVPILLSRGIGERHGHTELSTTLAE

SEQ ID NO: 39471 - protein, 84 aa, unidentified
  REGION 1..84: note = Description of Unknown:cds_NZ_WFIY01000004.1_cds_WP_155863004.1_883 target sequence
KRFYTEFYAPGHVPILLSRGIGERHGHTELSTTLAEYVGLERSVVIAEMLDEGKSLSKEKVIKYARNMGFLLIEGKEILKEVIA

SEQ ID NO: 39472 - protein, 85 aa, unidentified
  REGION 1..85: note = Description of Unknown:cds_NZ_WFIY01000004.1_cds_WP_155863004.1_883 target sequence
TDMMFYAGVIDWKKIYILRKEAGGLICYATGSEEGKKLGLKFQTDILLNSEYKQLVKLPQYGDKPAFSLWVNHVNTRTGISDNDR

SEQ ID NO: 39473 - protein, 85 aa, unidentified
  REGION 1..85: note = Description of Unknown:cds_NZ_WFIY01000004.1_cds_WP_155863004.1_883 target sequence
ALTILKLHEIISELKEDEKSAVKRFYTEFYAPGHVPILLSRGIGERHGHTELSTTLAEYVGLERSVVIAEMLDEGKSLSKEKVIK

SEQ ID NO: 39474 - protein, 85 aa, unidentified
  REGION 1..85: note = Description of Unknown:cds_NZ_WFIY01000004.1_cds_WP_155863737.1_1606 target sequence
IITVINQKGGVGKTTTAVNLSYILSKSKNVALLDMDPEGGSTTSFGMKREKKELEIGSKSVNIFNVEVFPAHLGLLKAELNGDVE

SEQ ID NO: 39475 - protein, 85 aa, unidentified
  REGION 1..85: note = Description of Unknown:cds_NZ_WFIY01000004.1_cds_WP_155863737.1_1606 target sequence
DVVNKIKETAKNFDILVIDTPPNLGTLAVASMIAADKILSPVTPQPLALEAAKNLDGRLQSLNKKALAFTNLSNKAISIELPSVQ

SEQ ID NO: 39476 - protein, 84 aa, unidentified
  REGION 1..84: note = Description of Unknown:cds_NZ_WFIY01000004.1_cds_WP_155863737.1_1606 target sequence
EAAKNLDGRLQSLNKKALAFTNLSNKAISIELPSVQFLNIHIPQSRLFIEASRLGVPATRYEEVRLKKPKLSHFFEELAKVTLE

SEQ ID NO: 39477 - protein, 85 aa, unidentified
  REGION 1..85: note = Description of Unknown:cds_NZ_WFIY01000004.1_cds_WP_155863737.1_1606 target sequence
KNVALLDMDPEGGSTTSFGMKREKKELEIGSKSVNIFNVEVFPAHLGLLKAELNGDVEDVVNKIKETAKNFDILVIDTPPNLGTL

SEQ ID NO: 39478 - protein, 85 aa, unidentified
  REGION 1..85: note = Description of Unknown:cds_NZ_WFIY01000004.1_cds_WP_155863737.1_1606 target sequence
AVASMIAADKILSPVTPQPLALEAAKNLDGRLQSLNKKALAFTNLSNKAISIELPSVQFLNIHIPQSRLFIEASRLGVPATRYEE

SEQ ID NO: 39479 - protein, 85 aa, unidentified
  REGION 1..85: note = Description of Unknown:cds_NZ_WFIY01000004.1_cds_WP_155863974.1_1898 target sequence
LKFSINKEELLFSKLLEIAENIKDSTSLLNSLYLDIFNTNYQNATAKMVKIKGIYERIALIREDIISMLYGEAFLPDFKESMLTL

SEQ ID NO: 39480 - protein, 85 aa, unidentified
  REGION 1..85: note = Description of Unknown:cds_NZ_WFIY01000004.1_cds_WP_155863974.1_1898 target sequence
TQSLYEIMKSIKDAGRAITSRKPDEKLCATLQSNFVSYLSLIQDGAEKLVLMISLLKKDIKEAIRIGKEIQLIERNGDEIKDLMI

SEQ ID NO: 39481 - protein, 84 aa, unidentified
  REGION 1..84: note = Description of Unknown:cds_NZ_WFIY01000004.1_cds_WP_155863974.1_1898 target sequence
VLMISLLKKDIKEAIRIGKEIQLIERNGDEIKDLMIQRLYENEKESDIISILQLKDVITFLDDILDGMEDSTLSVETLYATLKS

SEQ ID NO: 39482 - protein, 85 aa, unidentified
  REGION 1..85: note = Description of Unknown:cds_NZ_WFIY01000004.1_cds_WP_155863974.1_1898 target sequence
LLNSLYLDIFNTNYQNATAKMVKIKGIYERIALIREDIISMLYGEAFLPDFKESMLTLTQSLYEIMKSIKDAGRAITSRKPDEKL

SEQ ID NO: 39483 - protein, 85 aa, unidentified
  REGION 1..85: note = Description of Unknown:cds_NZ_WFIY01000004.1_cds_WP_155863974.1_1898 target sequence
CATLQSNFVSYLSLIQDGAEKLVLMISLLKKDIKEAIRIGKEIQLIERNGDEIKDLMIQRLYENEKESDIISILQLKDVITFLDD

SEQ ID NO: 39484 - protein, 85 aa, unidentified
  REGION 1..85: note = Description of Unknown:cds_NZ_WFIY01000004.1_cds_WP_155864167.1_2122 target sequence
NASSLVYEFKEELHEEIVESRLNRFLVQTKSGKLCHLHDPGRLKELIYPGNKILVRQVEKGKRKTSCQVTAAWDGRWVITDSSIH

SEQ ID NO: 39485 - protein, 85 aa, unidentified
  REGION 1..85: note = Description of Unknown:cds_NZ_WFIY01000004.1_cds_WP_155864167.1_2122 target sequence
NAIARKFLPGARQEVKLGKSRIDFFYDNTYVEVKGCTLVNDGVALFPDAPTERGRKHLEELIRAMERGMRAKLLVLVMRDDAVCF

SEQ ID NO: 39486 - protein, 84 aa, unidentified
  REGION 1..84: note = Description of Unknown:cds_NZ_WFIY01000004.1_cds_WP_155864167.1_2122 target sequence
PTERGRKHLEELIRAMERGMRAKLLVLVMRDDAVCFSPNAETDRKFAETFYLALTKGLEVEVKEFKLEGNKVYYVRDIPLCGKG

SEQ ID NO: 39487 - protein, 85 aa, unidentified
  REGION 1..85: note = Description of Unknown:cds_NZ_WFIY01000004.1_cds_WP_155864167.1_2122 target sequence
QTKSGKLCHLHDPGRLKELIYPGNKILVRQVEKGKRKTSCQVTAAWDGRWVITDSSIHNAIARKFLPGARQEVKLGKSRIDFFYD

SEQ ID NO: 39488 - protein, 85 aa, unidentified
  REGION 1..85: note = Description of Unknown:cds_NZ_WFIY01000004.1_cds_WP_155864167.1_2122 target sequence
NTYVEVKGCTLVNDGVALFPDAPTERGRKHLEELIRAMERGMRAKLLVLVMRDDAVCFSPNAETDRKFAETFYLALTKGLEVEVK

SEQ ID NO: 39489 - protein, 85 aa, unidentified
  REGION 1..85: note = Description of Unknown:cds_NC_019843.3_cds_YP_009047210.1_9 target sequence
SNMTQLTEAQIIAIIKDWNFAWSLIFLLITIVLQYGYPSRSMTVYVFKMFVLWLLWPSSMALSIFSAVYPIDLASQIISGIVAAV

SEQ ID NO: 39490 - protein, 85 aa, unidentified
  REGION 1..85: note = Description of Unknown:cds_NC_019843.3_cds_YP_009047210.1_9 target sequence
SAMMWISYFVQSIRLFMRTGSWWSFNPETNCLLNVPFGGTTVVRPLVEDSTSVTAVVTNGHLKMAGMHFGACDYDRLPNEVTVAK

SEQ ID NO: 39491 - protein, 84 aa, unidentified
  REGION 1..84: note = Description of Unknown:cds_NC_019843.3_cds_YP_009047210.1_9 target sequence
STSVTAVVTNGHLKMAGMHFGACDYDRLPNEVTVAKPNVLIALKMVKRQSYGTNSGVAIYHRYKAGNYRSPPITADIELALLRA

SEQ ID NO: 39492 - protein, 85 aa, unidentified
  REGION 1..85: note = Description of Unknown:cds_NC_019843.3_cds_YP_009047210.1_9 target sequence
LITIVLQYGYPSRSMTVYVFKMFVLWLLWPSSMALSIFSAVYPIDLASQIISGIVAAVSAMMWISYFVQSIRLFMRTGSWWSFNP

SEQ ID NO: 39493 - protein, 85 aa, unidentified
  REGION 1..85: note = Description of Unknown:cds_NC_019843.3_cds_YP_009047210.1_9 target sequence
ETNCLLNVPFGGTTVVRPLVEDSTSVTAVVTNGHLKMAGMHFGACDYDRLPNEVTVAKPNVLIALKMVKRQSYGTNSGVAIYHRY

SEQ ID NO: 39494 - protein, 85 aa, unidentified
  REGION 1..85: note = Description of Unknown:cds_NC_034440.1_cds_YP_009361863.1_9 target sequence
SNMTQLTEQQIISIIKDWNFAWSLIFLLITIVLQYGYPSRSMTVYVFKMFVLWLLWPSSMALSIFSAVYPIDLASQIISGIIAGV

SEQ ID NO: 39495 - protein, 85 aa, unidentified
  REGION 1..85: note = Description of Unknown:cds_NC_034440.1_cds_YP_009361863.1_9 target sequence
SALMWISYFVQSIRLFMRTGSWWSFNPETNCLLNVPLGGTTVVRPLVEDSTSVTAVVANGYLKMAGMHFGACDYDRLPSEVTVAK

SEQ ID NO: 39496 - protein, 84 aa, unidentified
  REGION 1..84: note = Description of Unknown:cds_NC_034440.1_cds_YP_009361863.1_9 target sequence
STSVTAVVANGYLKMAGMHFGACDYDRLPSEVTVAKPNVLIALKMVKRQSYGTNSGVAIYHRYKAGNYRSPPITADSELALLRA

SEQ ID NO: 39497 - protein, 85 aa, unidentified
  REGION 1..85: note = Description of Unknown:cds_NC_034440.1_cds_YP_009361863.1_9 target sequence
LITIVLQYGYPSRSMTVYVFKMFVLWLLWPSSMALSIFSAVYPIDLASQIISGIIAGVSALMWISYFVQSIRLFMRTGSWWSFNP

SEQ ID NO: 39498 - protein, 85 aa, unidentified
  REGION 1..85: note = Description of Unknown:cds_NC_034440.1_cds_YP_009361863.1_9 target sequence
ETNCLLNVPLGGTTVVRPLVEDSTSVTAVVANGYLKMAGMHFGACDYDRLPSEVTVAKPNVLIALKMVKRQSYGTNSGVAIYHRY

SEQ ID NO: 39499 - protein, 85 aa, unidentified
  REGION 1..85: note = Description of Unknown:cds_NC_029316.1_cds_YP_009230276.1_23 target sequence
VSVVDLIKEHLDFLSIKYIITREADTEFTFHLDYISKNKVNVLSKILSENGFFVTFNNSQYIVMMDKNGQRVSFMFGDDLLYKIR

SEQ ID NO: 39500 - protein, 85 aa, unidentified
  REGION 1..85: note = Description of Unknown:cds_NC_029316.1_cds_YP_009230276.1_23 target sequence
VYTTAKPKHFAVKVHRLRSVRVQYRDDIVEHNNIIITLKISKKIKDLLILYSRKIGKTAGELIRCTLANTILKEFDADYDDKKLL

SEQ ID NO: 39501 - protein, 84 aa, unidentified
  REGION 1..84: note = Description of Unknown:cds_NC_029316.1_cds_YP_009230276.1_23 target sequence
LYSRKIGKTAGELIRCTLANTILKEFDADYDDKKLLDGDISVLSLKINKKLLEKLDNFATNHKVTRSAVVRYIVYLILKNAGVF

SEQ ID NO: 39502 - protein, 85 aa, unidentified
  REGION 1..85: note = Description of Unknown:cds_NC_029316.1_cds_YP_009230276.1_23 target sequence
FTFHLDYISKNKVNVLSKILSENGFFVTFNNSQYIVMMDKNGQRVSFMFGDDLLYKIRVYTTAKPKHFAVKVHRLRSVRVQYRDD

SEQ ID NO: 39503 - protein, 85 aa, unidentified
  REGION 1..85: note = Description of Unknown:cds_NC_029316.1_cds_YP_009230276.1_23 target sequence
IVEHNNIIITLKISKKIKDLLILYSRKIGKTAGELIRCTLANTILKEFDADYDDKKLLDGDISVLSLKINKKLLEKLDNFATNHK

SEQ ID NO: 39504 - protein, 85 aa, unidentified
  REGION 1..85: note = Description of Unknown:cds_NC_030656.1_cds_YP_009268800.1_85 target sequence
RVIELTVSPYKLEYHEDWEPIIEQLVDGYTEIAPWILQHETSPPPDKFFVQLKEPLRNKRLCVCGIDPYPTGATGVPFESPSFVK

SEQ ID NO: 39505 - protein, 85 aa, unidentified
  REGION 1..85: note = Description of Unknown:cds_NC_030656.1_cds_YP_009268800.1_85 target sequence
KTIIAFAEAASKATKVTSYSGYNVAQIPGVLAWNYYLSCRVGETKSHAIHWEKISKLLLQHITKYISVLYCLGRTDFSNLKARLN

SEQ ID NO: 39506 - protein, 84 aa, unidentified
  REGION 1..84: note = Description of Unknown:cds_NC_030656.1_cds_YP_009268800.1_85 target sequence
HWEKISKLLLQHITKYISVLYCLGRTDFSNLKARLNKPITIVSGYHPAARNGQFLKERALEIVNVLLELNNHEPVDWAKGFLYN

SEQ ID NO: 39507 - protein, 85 aa, unidentified
  REGION 1..85: note = Description of Unknown:cds_NC_030656.1_cds_YP_009268800.1_85 target sequence
GYTEIAPWILQHETSPPPDKFFVQLKEPLRNKRLCVCGIDPYPTGATGVPFESPSFVKKTIIAFAEAASKATKVTSYSGYNVAQI

SEQ ID NO: 39508 - protein, 85 aa, unidentified
  REGION 1..85: note = Description of Unknown:cds_NC_030656.1_cds_YP_009268800.1_85 target sequence
PGVLAWNYYLSCRVGETKSHAIHWEKISKLLLQHITKYISVLYCLGRTDFSNLKARLNKPITIVSGYHPAARNGQFLKERALEIV

SEQ ID NO: 39509 - protein, 85 aa, unidentified
  REGION 1..85: note = Description of Unknown:hvTR_Q9QJ21 target sequence
EMALPRKYDRVTGRILTHKNNQMCTTECSQMYNLHNPITFELGLGNVFVCMRCLTVHHCDMQTDCTIVNTHEGYVCAKTGLFYSG

SEQ ID NO: 39510 - protein, 85 aa, unidentified
  REGION 1..85: note = Description of Unknown:hvTR_Q9QJ21 target sequence
WMPTYADCFLEPICEPNIETVNVVVVLLSYVYSFLMENKERYAAIIDSIIKDGKFIKNVEDAVFYTFNAVFTNSTFNKIPLTTIS

SEQ ID NO: 39511 - protein, 84 aa, unidentified
  REGION 1..84: note = Description of Unknown:hvTR_Q9QJ21 target sequence
IIKDGKFIKNVEDAVFYTFNAVFTNSTFNKIPLTTISRLFVQLIIGGHAKGTIYDSNVIRVSRRKREDSLLKKMRLEYGNALIL

SEQ ID NO: 39512 - protein, 85 aa, unidentified
  REGION 1..85: note = Description of Unknown:hvTR_Q9QJ21 target sequence
CSQMYNLHNPITFELGLGNVFVCMRCLTVHHCDMQTDCTIVNTHEGYVCAKTGLFYSGWMPTYADCFLEPICEPNIETVNVVVVL

SEQ ID NO: 39513 - protein, 85 aa, unidentified
  REGION 1..85: note = Description of Unknown:hvTR_Q9QJ21 target sequence
LSYVYSFLMENKERYAAIIDSIIKDGKFIKNVEDAVFYTFNAVFTNSTFNKIPLTTISRLFVQLIIGGHAKGTIYDSNVIRVSRR

SEQ ID NO: 39514 - protein, 85 aa, unidentified
  REGION 1..85: note = Description of Unknown:cds_NC_024711.1_cds_YP_009052563.1_88 target sequence
TFKEDFKPTKVYNKLVNDVCYNADCLEEFKKQRLVVANPFSYNKSTRTGIVAEFDNGYHLSKEVGIKRNFVTIGMRVWDIIRKNR

SEQ ID NO: 39515 - protein, 85 aa, unidentified
  REGION 1..85: note = Description of Unknown:cds_NC_024711.1_cds_YP_009052563.1_88 target sequence
YAVIISFIGYIAENIKFNSNVIYISHDLIKGYGLVKPNYRDYYNAIAYLEDENIIKRTNIRNIYVVNPIYIFRGDVNKLINIISE

SEQ ID NO: 39516 - protein, 84 aa, unidentified
  REGION 1..84: note = Description of Unknown:cds_NC_024711.1_cds_YP_009052563.1_88 target sequence
LEDENIIKRTNIRNIYVVNPIYIFRGDVNKLINIISEAKLIKTFDDKDRLIVDKFILFKNDTDKGIVIANKDLYATEVIDIGED

SEQ ID NO: 39517 - protein, 85 aa, unidentified
  REGION 1..85: note = Description of Unknown:cds_NC_024711.1_cds_YP_009052563.1_88 target sequence
EFKKQRLVVANPFSYNKSTRTGIVAEFDNGYHLSKEVGIKRNFVTIGMRVWDIIRKNRYAVIISFIGYIAENIKFNSNVIYISHD

SEQ ID NO: 39518 - protein, 85 aa, unidentified
  REGION 1..85: note = Description of Unknown:cds_NC_024711.1_cds_YP_009052563.1_88 target sequence
LIKGYGLVKPNYRDYYNAIAYLEDENIIKRTNIRNIYVVNPIYIFRGDVNKLINIISEAKLIKTFDDKDRLIVDKFILFKNDTDK

SEQ ID NO: 39519 - protein, 85 aa, unidentified
  REGION 1..85: note = Description of Unknown:cds_NZ_WFIY01000004.1_cds_WP_155862447.1_198 target sequence
LTEICTLSRIINLVKERGEITQQILAKEFNISQQSVSRKLKELEDANLIIRIETKDGEIIRLTEKGENFLLNCLNEISSAIAFQH

SEQ ID NO: 39520 - protein, 85 aa, unidentified
  REGION 1..85: note = Description of Unknown:cds_NZ_WFIY01000004.1_cds_WP_155862447.1_198 target sequence
EIRIKGKVTSGLGEGKLFLSLPYYENSFKKFLGFTPFPGTLNIVIYDRISFENRLLLDTSRYINIPEYRDENRVLGAVKAYPARI

SEQ ID NO: 39521 - protein, 84 aa, unidentified
  REGION 1..84: note = Description of Unknown:cds_NZ_WFIY01000004.1_cds_WP_155862447.1_198 target sequence
ISFENRLLLDTSRYINIPEYRDENRVLGAVKAYPARINDLEPAAIVIPLRTTHPKSVIEIISPYYLREKLSLKDGDEVVIEALI

SEQ ID NO: 39522 - protein, 85 aa, unidentified
  REGION 1..85: note = Description of Unknown:cds_NZ_WFIY01000004.1_cds_WP_155862447.1_198 target sequence
EFNISQQSVSRKLKELEDANLIIRIETKDGEIIRLTEKGENFLLNCLNEISSAIAFQHEIRIKGKVTSGLGEGKLFLSLPYYENS

SEQ ID NO: 39523 - protein, 85 aa, unidentified
  REGION 1..85: note = Description of Unknown:cds_NZ_WFIY01000004.1_cds_WP_155862447.1_198 target sequence
FKKFLGFTPFPGTLNIVIYDRISFENRLLLDTSRYINIPEYRDENRVLGAVKAYPARINDLEPAAIVIPLRTTHPKSVIEIISPY

SEQ ID NO: 39524 - protein, 85 aa, unidentified
  REGION 1..85: note = Description of Unknown:cds_NZ_WFIY01000004.1_cds_WP_155862486.1_242 target sequence
AKMEEFVKGWNGKQEPSLADKIKGAFKSKEPLRYKLIMAQYKLRTTLSRLDVYISKMQERDRTLFERVVEAQMNKDEARAAMYAN

SEQ ID NO: 39525 - protein, 85 aa, unidentified
  REGION 1..85: note = Description of Unknown:cds_NZ_WFIY01000004.1_cds_WP_155862486.1_242 target sequence
EIAEIRKVSKQLITTQIALEQVELRLETVTELGDVFTNLIPVVGVIKELRESMKGMMPELGLELEEIEEGLQEVVIEAGDFTGGN

SEQ ID NO: 39526 - protein, 84 aa, unidentified
  REGION 1..84: note = Description of Unknown:cds_NZ_WFIY01000004.1_cds_WP_155862486.1_242 target sequence
LRESMKGMMPELGLELEEIEEGLQEVVIEAGDFTGGNIDYVASNPEAKKILQEASVIAEQRMKENFPELPSMVTTTQKAAPTQK

SEQ ID NO: 39527 - protein, 85 aa, unidentified
  REGION 1..85: note = Description of Unknown:cds_NZ_WFIY01000004.1_cds_WP_155862486.1_242 target sequence
SKEPLRYKLIMAQYKLRTTLSRLDVYISKMQERDRTLFERVVEAQMNKDEARAAMYANEIAEIRKVSKQLITTQIALEQVELRLE

SEQ ID NO: 39528 - protein, 85 aa, unidentified
  REGION 1..85: note = Description of Unknown:cds_NZ_WFIY01000004.1_cds_WP_155862486.1_242 target sequence
TVTELGDVFTNLIPVVGVIKELRESMKGMMPELGLELEEIEEGLQEVVIEAGDFTGGNIDYVASNPEAKKILQEASVIAEQRMKE

SEQ ID NO: 39529 - protein, 85 aa, unidentified
  REGION 1..85: note = Description of Unknown:cds_NZ_WFIY01000004.1_cds_WP_155862539.1_305 target sequence
IVPKDNLIEGLKEALSEKNNPKRKFTQSVDLIVTFKDVDMKKGDVKLREMVVLPKVPSKVKKVLVIPSFEQLESAKKAEPNVILT

SEQ ID NO: 39530 - protein, 85 aa, unidentified
  REGION 1..85: note = Description of Unknown:cds_NZ_WFIY01000004.1_cds_WP_155862539.1_305 target sequence
KEELQKLMGQKRIIKKYARQNDWFLISSESMALAGRILGPALGPRGKFPTPLPSTSDVAEYIIRFKHTTIVKTKDQPHTQIFIGT

SEQ ID NO: 39531 - protein, 84 aa, unidentified
  REGION 1..84: note = Description of Unknown:cds_NZ_WFIY01000004.1_cds_WP_155862539.1_305 target sequence
PTPLPSTSDVAEYIIRFKHTTIVKTKDQPHTQIFIGTEDQKPEDLAENANAVLTAIEGKIRSPSIIRAIYVKTTMGKPVEIKLK

SEQ ID NO: 39532 - protein, 85 aa, unidentified
  REGION 1..85: note = Description of Unknown:cds_NZ_WFIY01000004.1_cds_WP_155862539.1_305 target sequence
SVDLIVTFKDVDMKKGDVKLREMVVLPKVPSKVKKVLVIPSFEQLESAKKAEPNVILTKEELQKLMGQKRIIKKYARQNDWFLIS

SEQ ID NO: 39533 - protein, 85 aa, unidentified
  REGION 1..85: note = Description of Unknown:cds_NZ_WFIY01000004.1_cds_WP_155862539.1_305 target sequence
SESMALAGRILGPALGPRGKFPTPLPSTSDVAEYIIRFKHTTIVKTKDQPHTQIFIGTEDQKPEDLAENANAVLTAIEGKIRSPS

SEQ ID NO: 39534 - protein, 85 aa, unidentified
  REGION 1..85: note = Description of Unknown:cds_NZ_WFIY01000004.1_cds_WP_013775626.1_781 target sequence
ALSMYHYLAKVWQDEEWKKSVLRKRMIEWRNEENTVVRIEKPTRLDRARAIGYKAKQGFVVVRVRVRKGGLNKPRPNKGRRQKRM

SEQ ID NO: 39535 - protein, 85 aa, unidentified
  REGION 1..85: note = Description of Unknown:cds_NZ_WFIY01000004.1_cds_WP_013775626.1_781 target sequence
GVYGFSPSKGYRWIAEEKAARRYPNLEVLGSYFVGDDGLYKYYEVILVDPAHPVIKNDPNLKWLQDPANRRRVFRGLTAAGKKAR

SEQ ID NO: 39536 - protein, 84 aa, unidentified
  REGION 1..84: note = Description of Unknown:cds_NZ_WFIY01000004.1_cds_WP_013775626.1_781 target sequence
DPAHPVIKNDPNLKWLQDPANRRRVFRGLTAAGKKARGLLKSRGLKYTVRHKFVKKQKEREAKKRHEANKYYRLQNYDRIPGKG

SEQ ID NO: 39537 - protein, 85 aa, unidentified
  REGION 1..85: note = Description of Unknown:cds_NZ_WFIY01000004.1_cds_WP_013775626.1_781 target sequence
EWRNEENTVVRIEKPTRLDRARAIGYKAKQGFVVVRVRVRKGGLNKPRPNKGRRQKRMGVYGFSPSKGYRWIAEEKAARRYPNLE

SEQ ID NO: 39538 - protein, 85 aa, unidentified
  REGION 1..85: note = Description of Unknown:cds_NZ_WFIY01000004.1_cds_WP_013775626.1_781 target sequence
VLGSYFVGDDGLYKYYEVILVDPAHPVIKNDPNLKWLQDPANRRRVFRGLTAAGKKARGLLKSRGLKYTVRHKFVKKQKEREAKK

SEQ ID NO: 39539 - protein, 85 aa, unidentified
  REGION 1..85: note = Description of Unknown:cds_NZ_WFIY01000004.1_cds_WP_155862934.1_787 target sequence
KLSQNFLVNEFFISKFSSYVKKDIKPVVEVGCGKGNISRLIDPDLCIEIDDKFIRYLKAYNLIIADARFLPIKRGQIVSSLPYSI

SEQ ID NO: 39540 - protein, 85 aa, unidentified
  REGION 1..85: note = Description of Unknown:cds_NZ_WFIY01000004.1_cds_WP_155862934.1_787 target sequence
TEDFFLEVSKLDQVVSLVLILQKDFMDKILNYATYISFLLNYIFDIKTHEVIPPSAFTPSPRVYSIIVTFMRKRVYNAKVDEYLK

SEQ ID NO: 39541 - protein, 84 aa, unidentified
  REGION 1..84: note = Description of Unknown:cds_NZ_WFIY01000004.1_cds_WP_155862934.1_787 target sequence
HEVIPPSAFTPSPRVYSIIVTFMRKRVYNAKVDEYLKCVSRFRNKKLKNVGEYCGFTSNSEKRVREFKPCQVIELLNLMGLNYV

SEQ ID NO: 39542 - protein, 85 aa, unidentified
  REGION 1..85: note = Description of Unknown:cds_NZ_WFIY01000004.1_cds_WP_155862934.1_787 target sequence
VEVGCGKGNISRLIDPDLCIEIDDKFIRYLKAYNLIIADARFLPIKRGQIVSSLPYSITEDFFLEVSKLDQVVSLVLILQKDFMD

SEQ ID NO: 39543 - protein, 85 aa, unidentified
  REGION 1..85: note = Description of Unknown:cds_NZ_WFIY01000004.1_cds_WP_155862934.1_787 target sequence
KILNYATYISFLLNYIFDIKTHEVIPPSAFTPSPRVYSIIVTFMRKRVYNAKVDEYLKCVSRFRNKKLKNVGEYCGFTSNSEKRV

SEQ ID NO: 39544 - protein, 85 aa, unidentified
  REGION 1..85: note = Description of Unknown:cds_NZ_WFIY01000004.1_cds_WP_155863749.1_1621 target sequence
NLDCQGKGIPFKFYAAYYPPIYTKVKANSLSELIKGVSIVDKNSIFYHVFHPMLSSHVVPEDLPNDFAFWLRESLHDEYLAEVVA

SEQ ID NO: 39545 - protein, 85 aa, unidentified
  REGION 1..85: note = Description of Unknown:cds_NZ_WFIY01000004.1_cds_WP_155863749.1_1621 target sequence
DIKGREPLTIEDIRKEILELLNTSTHLDKTADYPFVFISFIPVVYPLNVEVRTLAEFMDAIAKVPVRSLFYHFVYKRVMGLSKRN

SEQ ID NO: 39546 - protein, 84 aa, unidentified
  REGION 1..84: note = Description of Unknown:cds_NZ_WFIY01000004.1_cds_WP_155863749.1_1621 target sequence
VEVRTLAEFMDAIAKVPVRSLFYHFVYKRVMGLSKRNDFTTWLEENFGLIDLGEKIAKIDPQTYTEEEDFRQDLLKILEGELLK

SEQ ID NO: 39547 - protein, 85 aa, unidentified
  REGION 1..85: note = Description of Unknown:cds_NZ_WFIY01000004.1_cds_WP_155863749.1_1621 target sequence
NSLSELIKGVSIVDKNSIFYHVFHPMLSSHVVPEDLPNDFAFWLRESLHDEYLAEVVADIKGREPLTIEDIRKEILELLNTSTHL

SEQ ID NO: 39548 - protein, 85 aa, unidentified
  REGION 1..85: note = Description of Unknown:cds_NZ_WFIY01000004.1_cds_WP_155863749.1_1621 target sequence
DKTADYPFVFISFIPVVYPLNVEVRTLAEFMDAIAKVPVRSLFYHFVYKRVMGLSKRNDFTTWLEENFGLIDLGEKIAKIDPQTY

SEQ ID NO: 39549 - protein, 85 aa, unidentified
  REGION 1..85: note = Description of Unknown:cds_NZ_WFIY01000004.1_cds_WP_155863776.1_1654 target sequence
EEEFTLLLPSFNAYDFFSNPSNIMKFIPLFKSISQISDNEFIVSIGWILNVKINVKRILAKNRISYIISRSEQPRITGKLDHIFE

SEQ ID NO: 39550 - protein, 85 aa, unidentified
  REGION 1..85: note = Description of Unknown:cds_NZ_WFIY01000004.1_cds_WP_155863776.1_1654 target sequence
PLQGNTNLTKVKIIFYYKGPLEKLVKIESRRFYNKVKDEIDQHNKEEVSDIEFDNILNQMKTILSGIIKTDDEFDMLINKAVMES

SEQ ID NO: 39551 - protein, 84 aa, unidentified
  REGION 1..84: note = Description of Unknown:cds_NZ_WFIY01000004.1_cds_WP_155863776.1_1654 target sequence
SDIEFDNILNQMKTILSGIIKTDDEFDMLINKAVMESINSEIALIIGSDRNSMKFLFDKGNLIKEKGSVENIKSGMKFVMKKKE

SEQ ID NO: 39552 - protein, 85 aa, unidentified
  REGION 1..85: note = Description of Unknown:cds_NZ_WFIY01000004.1_cds_WP_155863776.1_1654 target sequence
PLFKSISQISDNEFIVSIGWILNVKINVKRILAKNRISYIISRSEQPRITGKLDHIFEPLQGNTNLTKVKIIFYYKGPLEKLVKI

SEQ ID NO: 39553 - protein, 85 aa, unidentified
  REGION 1..85: note = Description of Unknown:cds_NZ_WFIY01000004.1_cds_WP_155863776.1_1654 target sequence
ESRRFYNKVKDEIDQHNKEEVSDIEFDNILNQMKTILSGIIKTDDEFDMLINKAVMESINSEIALIIGSDRNSMKFLFDKGNLIK

SEQ ID NO: 39554 - protein, 85 aa, unidentified
  REGION 1..85: note = Description of Unknown:cds_NC_035460.1_cds_YP_009408037.1_86 target sequence
KSVTVNYSPFIIEYHEDWDNIMPQFVDLYNEIAEWLLKDETSPIPENFFVQLKQPLKNKRVCICGIDPYPRDATGVPFESPNFSK

SEQ ID NO: 39555 - protein, 85 aa, unidentified
  REGION 1..85: note = Description of Unknown:cds_NC_035460.1_cds_YP_009408037.1_86 target sequence
KTIKEIAASVSKITGVVEYKNYNLNNIDGVFPWNYYLSCKVGETKSHAMHWKRISKLLLQYITKYVNVLYCLGKTDFTNIRSMLD

SEQ ID NO: 39556 - protein, 84 aa, unidentified
  REGION 1..84: note = Description of Unknown:cds_NC_035460.1_cds_YP_009408037.1_86 target sequence
MHWKRISKLLLQYITKYVNVLYCLGKTDFTNIRSMLDTPITTIIGYHPAARDKQFEKDKAFEIINILLELNNKEPINWRQGFSY

SEQ ID NO: 39557 - protein, 85 aa, unidentified
  REGION 1..85: note = Description of Unknown:cds_NC_035460.1_cds_YP_009408037.1_86 target sequence
LYNEIAEWLLKDETSPIPENFFVQLKQPLKNKRVCICGIDPYPRDATGVPFESPNFSKKTIKEIAASVSKITGVVEYKNYNLNNI

SEQ ID NO: 39558 - protein, 85 aa, unidentified
  REGION 1..85: note = Description of Unknown:cds_NC_035460.1_cds_YP_009408037.1_86 target sequence
DGVFPWNYYLSCKVGETKSHAMHWKRISKLLLQYITKYVNVLYCLGKTDFTNIRSMLDTPITTIIGYHPAARDKQFEKDKAFEII

SEQ ID NO: 39559 - protein, 85 aa, unidentified
  REGION 1..85: note = Description of Unknown:cds_NC_030656.1_cds_YP_009268724.1_9 target sequence
LNFNPVVARGDVFRREENEENEENEQREQNLNAPYSLLQNELDESYFIQSDKCDLYLALSLYIKEKELQGLRGALSPNAEALYKA

SEQ ID NO: 39560 - protein, 85 aa, unidentified
  REGION 1..85: note = Description of Unknown:cds_NC_030656.1_cds_YP_009268724.1_9 target sequence
IKNTCDKTDVQFNAAFRFIENMVDEENIMNTSDTYNSFVEDLTTQTLTPGKAIATVTLWGRMFSKWCEHGYVVRSAAISQPLIIK

SEQ ID NO: 39561 - protein, 84 aa, unidentified
  REGION 1..84: note = Description of Unknown:cds_NC_030656.1_cds_YP_009268724.1_9 target sequence
PGKAIATVTLWGRMFSKWCEHGYVVRSAAISQPLIIKLLNASPSNLQRFIQDYSKINNKFNYGFLAATIAAGTVVFLGIKCFFK

SEQ ID NO: 39562 - protein, 85 aa, unidentified
  REGION 1..85: note = Description of Unknown:cds_NC_030656.1_cds_YP_009268724.1_9 target sequence
EQNLNAPYSLLQNELDESYFIQSDKCDLYLALSLYIKEKELQGLRGALSPNAEALYKAIKNTCDKTDVQFNAAFRFIENMVDEEN

SEQ ID NO: 39563 - protein, 85 aa, unidentified
  REGION 1..85: note = Description of Unknown:cds_NC_030656.1_cds_YP_009268724.1_9 target sequence
IMNTSDTYNSFVEDLTTQTLTPGKAIATVTLWGRMFSKWCEHGYVVRSAAISQPLIIKLLNASPSNLQRFIQDYSKINNKFNYGF

SEQ ID NO: 39564 - protein, 85 aa, unidentified
  REGION 1..85: note = Description of Unknown:cds_NZ_WFIY01000004.1_cds_WP_155862351.1_82 target sequence
QASLKVSPFFSIYRNGNKYIAYAEASGLIELSEDEFNNLLSLDVKELKEIRMLIPEKEKKINAVVNGIRLLNQEAINFFESDKEL

SEQ ID NO: 39565 - protein, 85 aa, unidentified
  REGION 1..85: note = Description of Unknown:cds_NZ_WFIY01000004.1_cds_WP_155862351.1_82 target sequence
PKGETALIISSNIDFLLTIDLSKFEKVLIAYVMDPYRFFIYVMTKNNPCIYEIYLWLKNSRLILDVKVDGEIVREKSPTLSEFTE

SEQ ID NO: 39566 - protein, 84 aa, unidentified
  REGION 1..84: note = Description of Unknown:cds_NZ_WFIY01000004.1_cds_WP_155862351.1_82 target sequence
PCIYEIYLWLKNSRLILDVKVDGEIVREKSPTLSEFTEFLLLGLAKMLLNGNRYDGKLIYVDMMDGELIVNTPLKIPGCPKCKI

SEQ ID NO: 39567 - protein, 85 aa, unidentified
  REGION 1..85: note = Description of Unknown:cds_NZ_WFIY01000004.1_cds_WP_155862351.1_82 target sequence
LIELSEDEFNNLLSLDVKELKEIRMLIPEKEKKINAVVNGIRLLNQEAINFFESDKELPKGETALIISSNIDFLLTIDLSKFEKV

SEQ ID NO: 39568 - protein, 85 aa, unidentified
  REGION 1..85: note = Description of Unknown:cds_NZ_WFIY01000004.1_cds_WP_155862351.1_82 target sequence
LIAYVMDPYRFFIYVMTKNNPCIYEIYLWLKNSRLILDVKVDGEIVREKSPTLSEFTEFLLLGLAKMLLNGNRYDGKLIYVDMMD

SEQ ID NO: 39569 - protein, 85 aa, unidentified
  REGION 1..85: note = Description of Unknown:cds_NZ_WFIY01000004.1_cds_WP_155863202.1_1142 target sequence
PYAISVDFGETLVGFRPRSYEYMIGILKDYGYEIDERTFFRALVKVLGKSNFANEEGLNPLNLHELFYELGIHPCRKIIEEIANK

SEQ ID NO: 39570 - protein, 85 aa, unidentified
  REGION 1..85: note = Description of Unknown:cds_NZ_WFIY01000004.1_cds_WP_155863202.1_1142 target sequence
DKYQDYFLYEDAIDFLKEVKKKYKVVIVSNSTKRIHKIVKEFELDKYVDKVIASCDIGVVKPNPKIFAYAKRYVGDILLHVGDIY

SEQ ID NO: 39571 - protein, 84 aa, unidentified
  REGION 1..84: note = Description of Unknown:cds_NZ_WFIY01000004.1_cds_WP_155863202.1_1142 target sequence
VDKVIASCDIGVVKPNPKIFAYAKRYVGDILLHVGDIYELDVIGAKRAFINGILLDRFNFYPEIKIKAKTLYDILRYMEIKGLI

SEQ ID NO: 39572 - protein, 85 aa, unidentified
  REGION 1..85: note = Description of Unknown:cds_NZ_WFIY01000004.1_cds_WP_155863202.1_1142 target sequence
KDYGYEIDERTFFRALVKVLGKSNFANEEGLNPLNLHELFYELGIHPCRKIIEEIANKDKYQDYFLYEDAIDFLKEVKKKYKVVI

SEQ ID NO: 39573 - protein, 85 aa, unidentified
  REGION 1..85: note = Description of Unknown:cds_NZ_WFIY01000004.1_cds_WP_155863202.1_1142 target sequence
VSNSTKRIHKIVKEFELDKYVDKVIASCDIGVVKPNPKIFAYAKRYVGDILLHVGDIYELDVIGAKRAFINGILLDRFNFYPEIK

SEQ ID NO: 39574 - protein, 85 aa, unidentified
  REGION 1..85: note = Description of Unknown:cds_NZ_WFIY01000004.1_cds_1693 target sequence
SVKLNFILLDSALELVPKEILNDPSVIKNAERRGKKPQDTILDISLHYHAMRKLKDWQKRGRPDIVHMAMIMILSEKEILGDFYI

SEQ ID NO: 39575 - protein, 85 aa, unidentified
  REGION 1..85: note = Description of Unknown:cds_NZ_WFIY01000004.1_cds_1693 target sequence
HTYDSRIIKVEKDMNPPKNYNRFIGLMEQLLKLGQIPPNSSRPLMKILNVKLSDIVKKYKPVLLSEDGSKIDPTYLCNENFLLGI

SEQ ID NO: 39576 - protein, 84 aa, unidentified
  REGION 1..84: note = Description of Unknown:cds_NZ_WFIY01000004.1_cds_1693 target sequence
NVKLSDIVKKYKPVLLSEDGSKIDPTYLCNENFLLGIGAFQHGDFSEEVKGIFTEHYSISKRSLETQQVVCRIISSCNYLLGWP

SEQ ID NO: 39577 - protein, 85 aa, unidentified
  REGION 1..85: note = Description of Unknown:cds_NZ_WFIY01000004.1_cds_1693 target sequence
KNAERRGKKPQDTILDISLHYHAMRKLKDWQKRGRPDIVHMAMIMILSEKEILGDFYIHTYDSRIIKVEKDMNPPKNYNRFIGLM

SEQ ID NO: 39578 - protein, 85 aa, unidentified
  REGION 1..85: note = Description of Unknown:cds_NZ_WFIY01000004.1_cds_1693 target sequence
EQLLKLGQIPPNSSRPLMKILNVKLSDIVKKYKPVLLSEDGSKIDPTYLCNENFLLGIGAFQHGDFSEEVKGIFTEHYSISKRSL

SEQ ID NO: 39579 - protein, 85 aa, unidentified
  REGION 1..85: note = Description of Unknown:cds_NZ_WFIY01000004.1_cds_WP_155864480.1_2099 target sequence
RALSKIGAVILILIFGGTAVMAGFLAYNFAKVTYPVHCYHPTVSTTTPVTTTVSTTQITHNLLPYNPSTKTVYLYIASLDSGFPY

SEQ ID NO: 39580 - protein, 85 aa, unidentified
  REGION 1..85: note = Description of Unknown:cds_NZ_WFIY01000004.1_cds_WP_155864480.1_2099 target sequence
NFNGTSDGELHIFIPAGWKVCVIYTNYEPIDHNFIIVKNTTAVPHCSIIPSSNIILYVGVSSSNYFDSGISSGASATGSIVLSPG

SEQ ID NO: 39581 - protein, 85 aa, unidentified
  REGION 1..85: note = Description of Unknown:cds_NZ_WFIY01000004.1_cds_WP_155864480.1_2099 target sequence
NFAKVTYPVHCYHPTVSTTTPVTTTVSTTQITHNLLPYNPSTKTVYLYIASLDSGFPYNFNGTSDGELHIFIPAGWKVCVIYTNY

SEQ ID NO: 39582 - protein, 85 aa, unidentified
  REGION 1..85: note = Description of Unknown:cds_NZ_WFIY01000004.1_cds_WP_155864480.1_2099 target sequence
EPIDHNFIIVKNTTAVPHCSIIPSSNIILYVGVSSSNYFDSGISSGASATGSIVLSPGYYWFACGYEDHAESGMWGVIECSSSIT

SEQ ID NO: 39583 - protein, 85 aa, unidentified
  REGION 1..85: note = Description of Unknown:cds_NC_035460.1_cds_YP_009408031.1_80 target sequence
SWTMQIGESGTYKSLEEIRAHIKATATESIDDEVQHDDLFPEDVEIPPNKPKTTKKPPIPKKRATTNSGTKPKTTRKKVKTESDE

SEQ ID NO: 39584 - protein, 85 aa, unidentified
  REGION 1..85: note = Description of Unknown:cds_NC_035460.1_cds_YP_009408031.1_80 target sequence
EKSDDDVKSYSSSSSKVDSSTKMIKSYSPKIDLETEVEESDMYAGTTVENDQTDDKMECDDLKTATDNVIKFLKDINTRVNAIST

SEQ ID NO: 39585 - protein, 84 aa, unidentified
  REGION 1..84: note = Description of Unknown:cds_NC_035460.1_cds_YP_009408031.1_80 target sequence
VENDQTDDKMECDDLKTATDNVIKFLKDINTRVNAISTVLTDVQAASCSRQYTTLIKSIDNLKIIAESGKVTVSRKKTRQTTKK

SEQ ID NO: 39586 - protein, 85 aa, unidentified
  REGION 1..85: note = Description of Unknown:cds_NC_035460.1_cds_YP_009408031.1_80 target sequence
ESIDDEVQHDDLFPEDVEIPPNKPKTTKKPPIPKKRATTNSGTKPKTTRKKVKTESDEEKSDDDVKSYSSSSSKVDSSTKMIKSY

SEQ ID NO: 39587 - protein, 85 aa, unidentified
  REGION 1..85: note = Description of Unknown:cds_NC_035460.1_cds_YP_009408031.1_80 target sequence
SPKIDLETEVEESDMYAGTTVENDQTDDKMECDDLKTATDNVIKFLKDINTRVNAISTVLTDVQAASCSRQYTTLIKSIDNLKII

SEQ ID NO: 39588 - protein, 85 aa, unidentified
  REGION 1..85: note = Description of Unknown:cds_NC_035460.1_cds_YP_009408097.1_146 target sequence
GNSTSVSKSCNNAVTHVSANSIRQHILFNNFETLHKDIQSKIDLVNTFTPQTKNLIFRNLLIVITNSYHLQNLLDALEQLEPMYV

SEQ ID NO: 39589 - protein, 85 aa, unidentified
  REGION 1..85: note = Description of Unknown:cds_NC_035460.1_cds_YP_009408097.1_146 target sequence
TDAYSEAILNEIGLCDKGIPNLSSIHFMIYLVSGLTKLTTKQSKILMEIVTDAKIFCHHVNVLEYIIKKNVEKLETVTSTLLEKY

SEQ ID NO: 39590 - protein, 84 aa, unidentified
  REGION 1..84: note = Description of Unknown:cds_NC_035460.1_cds_YP_009408097.1_146 target sequence
EIVTDAKIFCHHVNVLEYIIKKNVEKLETVTSTLLEKYTKLPLEVTLFKESGLKIQGNTYIWDPEHKKSICNLYTVIKIMSYIM

SEQ ID NO: 39591 - protein, 85 aa, unidentified
  REGION 1..85: note = Description of Unknown:cds_NC_035460.1_cds_YP_009408097.1_146 target sequence
FNNFETLHKDIQSKIDLVNTFTPQTKNLIFRNLLIVITNSYHLQNLLDALEQLEPMYVTDAYSEAILNEIGLCDKGIPNLSSIHF

SEQ ID NO: 39592 - protein, 85 aa, unidentified
  REGION 1..85: note = Description of Unknown:cds_NC_035460.1_cds_YP_009408097.1_146 target sequence
MIYLVSGLTKLTTKQSKILMEIVTDAKIFCHHVNVLEYIIKKNVEKLETVTSTLLEKYTKLPLEVTLFKESGLKIQGNTYIWDPE

SEQ ID NO: 39593 - protein, 85 aa, unidentified
  REGION 1..85: note = Description of Unknown:cds_NC_009884.1_cds_YP_001496946.1_21 target sequence
SSEPTPSPICPPGFVKVDITIPPYYVCAPTRAVTTTTRPVVTTNCYTAYAPTIIIYNTQLPLVYQVVAFTFDIYNTPVKVPKYVL

SEQ ID NO: 39594 - protein, 85 aa, unidentified
  REGION 1..85: note = Description of Unknown:cds_NC_009884.1_cds_YP_001496946.1_21 target sequence
TKKARRKGAELIEVNASTILDALSRLLVISTENSFGRVPVASVKVSKVFSPLCPRSYVLLKIVGTVTVRAVIRPVAISGSDAVLT

SEQ ID NO: 39595 - protein, 84 aa, unidentified
  REGION 1..84: note = Description of Unknown:cds_NC_009884.1_cds_YP_001496946.1_21 target sequence
VFSPLCPRSYVLLKIVGTVTVRAVIRPVAISGSDAVLTTFVSAGILGNIHTPTRATSFQVVEVPVQFITSPEQLTAFIQTLTGK

SEQ ID NO: 39596 - protein, 85 aa, unidentified
  REGION 1..85: note = Description of Unknown:cds_NC_009884.1_cds_YP_001496946.1_21 target sequence
APTRAVTTTTRPVVTTNCYTAYAPTIIIYNTQLPLVYQVVAFTFDIYNTPVKVPKYVLTKKARRKGAELIEVNASTILDALSRLL

SEQ ID NO: 39597 - protein, 85 aa, unidentified
  REGION 1..85: note = Description of Unknown:cds_NC_009884.1_cds_YP_001496946.1_21 target sequence
VISTENSFGRVPVASVKVSKVFSPLCPRSYVLLKIVGTVTVRAVIRPVAISGSDAVLTTFVSAGILGNIHTPTRATSFQVVEVPV

SEQ ID NO: 39598 - protein, 85 aa, unidentified
  REGION 1..85: note = Description of Unknown:cds_NC_009884.1_cds_YP_001496956.1_31 target sequence
TLKKHRGKMSEKSNVNKKFTNSTQNNSNWSNSPSMINPESFINNPNLIVFKNWVDKLQQEFPTCDVVDSKNNSITIKIRYDDVFR

SEQ ID NO: 39599 - protein, 85 aa, unidentified
  REGION 1..85: note = Description of Unknown:cds_NC_009884.1_cds_YP_001496956.1_31 target sequence
SIYKEVKKSVPDSKVSLKPCNDDKKYGMCMVVKSKTIIVGWEEWGFGKPIEISGEGEFTYYIPLENVINAFDSAWRMNNKGKPLH

SEQ ID NO: 39600 - protein, 84 aa, unidentified
  REGION 1..84: note = Description of Unknown:cds_NC_009884.1_cds_YP_001496956.1_31 target sequence
KPIEISGEGEFTYYIPLENVINAFDSAWRMNNKGKPLHFKFMTRRLTPRDATTKGVSAEALSSPPTVGEIWHYITIEFVTVTTT

SEQ ID NO: 39601 - protein, 85 aa, unidentified
  REGION 1..85: note = Description of Unknown:cds_NC_009884.1_cds_YP_001496956.1_31 target sequence
NWSNSPSMINPESFINNPNLIVFKNWVDKLQQEFPTCDVVDSKNNSITIKIRYDDVFRSIYKEVKKSVPDSKVSLKPCNDDKKYG

SEQ ID NO: 39602 - protein, 85 aa, unidentified
  REGION 1..85: note = Description of Unknown:cds_NC_009884.1_cds_YP_001496956.1_31 target sequence
MCMVVKSKTIIVGWEEWGFGKPIEISGEGEFTYYIPLENVINAFDSAWRMNNKGKPLHFKFMTRRLTPRDATTKGVSAEALSSPP

SEQ ID NO: 39603 - protein, 85 aa, unidentified
  REGION 1..85: note = Description of Unknown:hvTR_P24440 target sequence
ELPRKYDRVTGRILTHKNNQMCTTECSQMYNLHNPITFELGLGNVFVCMRCLTVHHCDMQTDCTIVNTHEGYVCAKTGLFYSGWM

SEQ ID NO: 39604 - protein, 85 aa, unidentified
  REGION 1..85: note = Description of Unknown:hvTR_P24440 target sequence
PAYADCFLEPICEPNIETVNVVVVLLSYVYSFLMENKERYAAIIDSIIKDGKFIKNVEDAVFYTFNAVFTNSTFNKIPLTTISRL

SEQ ID NO: 39605 - protein, 84 aa, unidentified; identical to SEQ ID NO: 39511
  REGION 1..84: note = Description of Unknown:hvTR_P24440 target sequence

SEQ ID NO: 39606 - protein, 85 aa, unidentified
  REGION 1..85: note = Description of Unknown:hvTR_P24440 target sequence
QMYNLHNPITFELGLGNVFVCMRCLTVHHCDMQTDCTIVNTHEGYVCAKTGLFYSGWMPAYADCFLEPICEPNIETVNVVVVLLS

SEQ ID NO: 39607 - protein, 85 aa, unidentified
  REGION 1..85: note = Description of Unknown:hvTR_P24440 target sequence
YVYSFLMENKERYAAIIDSIIKDGKFIKNVEDAVFYTFNAVFTNSTFNKIPLTTISRLFVQLIIGGHAKGTIYDSNVIRVSRRKR

SEQ ID NO: 39608 - protein, 85 aa, unidentified
  REGION 1..85: note = Description of Unknown:cds_NZ_WFIY01000004.1_cds_WP_155862978.1_848 target sequence
YVIIFSTITIDGKLASKDYYSELSCKYDKVRQHILRSEVDAIMIGGNTVRIDNPSLTLKYAHGKNPIRVIISNSLNFDINYKIFN

SEQ ID NO: 39609 - protein, 85 aa, unidentified
  REGION 1..85: note = Description of Unknown:cds_NZ_WFIY01000004.1_cds_WP_155862978.1_848 target sequence
IPPQTIIYTSNSSENKDIENKLKEKGVIIRKLDNFNICNVMNDLESNFNVHKVMIEGGGKLIWSVIKENCFDELRITISPRIFGN

SEQ ID NO: 39610 - protein, 84 aa, unidentified
  REGION 1..84: note = Description of Unknown:cds_NZ_WFIY01000004.1_cds_WP_155862978.1_848 target sequence
NFNVHKVMIEGGGKLIWSVIKENCFDELRITISPRIFGNGVSLANGEGFLGKNSPKLDLEDVKICECKEEVHLIYKNHNKIKNL

SEQ ID NO: 39611 - protein, 85 aa, unidentified
  REGION 1..85: note = Description of Unknown:cds_NZ_WFIY01000004.1_cds_WP_155862978.1_848 target sequence
DKVRQHILRSEVDAIMIGGNTVRIDNPSLTLKYAHGKNPIRVIISNSLNFDINYKIFNIPPQTIIYTSNSSENKDIENKLKEKGV

SEQ ID NO: 39612 - protein, 85 aa, unidentified
  REGION 1..85: note = Description of Unknown:cds_NZ_WFIY01000004.1_cds_WP_155862978.1_848 target sequence
IIRKLDNFNICNVMNDLESNFNVHKVMIEGGGKLIWSVIKENCFDELRITISPRIFGNGVSLANGEGFLGKNSPKLDLEDVKICE

SEQ ID NO: 39613 - protein, 85 aa, unidentified
  REGION 1..85: note = Description of Unknown:cds_NZ_WFIY01000004.1_cds_WP_155862983.1_853 target sequence
PLFLLSSPLSLHILTQIRNKDTDQINFRKGLVRLGRLIGYEIANTMDYEIIEVETPLGVKTKGVRIYDLENVIIINILRAATPLV

SEQ ID NO: 39614 - protein, 85 aa, unidentified
  REGION 1..85: note = Description of Unknown:cds_NZ_WFIY01000004.1_cds_WP_155862983.1_853 target sequence
EGLLKAFPAARQGVVTARRKEFEGKEPPKEMEVEIFYEKIPKIRKGIDNVIISDPMVATSSTMLKVLEKVAKEEPKRIYIASVIA

SEQ ID NO: 39615 - protein, 84 aa, unidentified
  REGION 1..84: note = Description of Unknown:cds_NZ_WFIY01000004.1_cds_WP_155862983.1_853 target sequence
IDNVIISDPMVATSSTMLKVLEKVAKEEPKRIYIASVIASEYGVKRILELYPQVYFFTISIDPELNNKGYIVPGLGDAGDRSFG

SEQ ID NO: 39616 - protein, 85 aa, unidentified
  REGION 1..85: note = Description of Unknown:cds_NZ_WFIY01000004.1_cds_WP_155862983.1_853 target sequence
RKGLVRLGRLIGYEIANTMDYEIIEVETPLGVKTKGVRIYDLENVIIINILRAATPLVEGLLKAFPAARQGVVTARRKEFEGKEP

SEQ ID NO: 39617 - protein, 85 aa, unidentified
  REGION 1..85: note = Description of Unknown:cds_NZ_WFIY01000004.1_cds_WP_155862983.1_853 target sequence
PKEMEVEIFYEKIPKIRKGIDNVIISDPMVATSSTMLKVLEKVAKEEPKRIYIASVIASEYGVKRILELYPQVYFFTISIDPELN

SEQ ID NO: 39618 - protein, 85 aa, unidentified
  REGION 1..85: note = Description of Unknown:cds_NZ_WFIY01000004.1_cds_WP_155863027.1_913 target sequence
LEELKLLKRGAESQIYETYFLGIHAIVKKRISKAYRDPKLDRKINLERTIMEAKLMYNALKSGINVPAILYIDKDNFSIIMEFIE

SEQ ID NO: 39619 - protein, 85 aa, unidentified
  REGION 1..85: note = Description of Unknown:cds_NZ_WFIY01000004.1_cds_WP_155863027.1_913 target sequence
GITVKEVLWKNLYDPKKIGEMIGEIALRLHSSQIAHGDLTTNNLILKGNQLFLIDFGLSKRSNDVEDFATDVHVFLRSLESVHPD

SEQ ID NO: 39620 - protein, 84 aa, unidentified
  REGION 1..84: note = Description of Unknown:cds_NZ_WFIY01000004.1_cds_WP_155863027.1_913 target sequence
GNQLFLIDFGLSKRSNDVEDFATDVHVFLRSLESVHPDKKDEVFEGFKLTYSKFKLYEKVMETLKDIRMRGRYVEERRSKSSNR

SEQ ID NO: 39621 - protein, 85 aa, unidentified
  REGION 1..85: note = Description of Unknown:cds_NZ_WFIY01000004.1_cds_WP_155863027.1_913 target sequence
KKRISKAYRDPKLDRKINLERTIMEAKLMYNALKSGINVPAILYIDKDNFSIIMEFIEGITVKEVLWKNLYDPKKIGEMIGEIAL

SEQ ID NO: 39622 - protein, 85 aa, unidentified
  REGION 1..85: note = Description of Unknown:cds_NZ_WFIY01000004.1_cds_WP_155863027.1_913 target sequence
RLHSSQIAHGDLTTNNLILKGNQLFLIDFGLSKRSNDVEDFATDVHVFLRSLESVHPDKKDEVFEGFKLTYSKFKLYEKVMETLK

SEQ ID NO: 39623 - protein, 85 aa, unidentified
  REGION 1..85: note = Description of Unknown:cds_NZ_WFIY01000004.1_cds_WP_155863275.1_1230 target sequence
LNSEEAHCNKKSKPIKASPSLRVLGYAMPIVSIISLTATFLYFVSLYPKALSIAFNQSFKPINFNDLPIFLIFLTSNIHATQIIS

SEQ ID NO: 39624 - protein, 85 aa, unidentified
  REGION 1..85: note = Description of Unknown:cds_NZ_WFIY01000004.1_cds_WP_155863275.1_1230 target sequence
WPDIMRFGKSFKHMLVGQVGLPIFYTLVVAYGAIMSAITKVVTNSVTYDPSLLVVRFITEPLIAILILLAYSFTMLNTNIFSNVV

SEQ ID NO: 39625 - protein, 84 aa, unidentified
  REGION 1..84: note = Description of Unknown:cds_NZ_WFIY01000004.1_cds_WP_155863275.1_1230 target sequence
YDPSLLVVRFITEPLIAILILLAYSFTMLNTNIFSNVVPPVYDLNNTFPSKLSWYKGTIIVTLLGIMIGAWSLYLKGAYVYFST

SEQ ID NO: 39626 - protein, 85 aa, unidentified
  REGION 1..85: note = Description of Unknown:cds_NZ_WFIY01000004.1_cds_WP_155863275.1_1230 target sequence
MPIVSIISLTATFLYFVSLYPKALSIAFNQSFKPINFNDLPIFLIFLTSNIHATQIISWPDIMRFGKSFKHMLVGQVGLPIFYTL

SEQ ID NO: 39627 - protein, 85 aa, unidentified
  REGION 1..85: note = Description of Unknown:cds_NZ_WFIY01000004.1_cds_WP_155863275.1_1230 target sequence
VVAYGAIMSAITKVVTNSVTYDPSLLVVRFITEPLIAILILLAYSFTMLNTNIFSNVVPPVYDLNNTFPSKLSWYKGTIIVTLLG

SEQ ID NO: 39628 - protein, 85 aa, unidentified
  REGION 1..85: note = Description of Unknown:cds_NZ_WFIY01000004.1_cds_WP_155863760.1_1634 target sequence
LWIKEISIKFTCKPQSLNFYCNNRGNVIELTASSSCRYLRLFTKDFRLTFSNGKLFDFNNLSTKKGKDAITEINSILNSLKPGIV

SEQ ID NO: 39629 - protein, 85 aa, unidentified
  REGION 1..85: note = Description of Unknown:cds_NZ_WFIY01000004.1_cds_WP_155863760.1_1634 target sequence
EDLNENSLRYEIPVSLLKNFVEDLNVENVSPERYLDFNIDYIDYDIGRDFLKNSPRFESERRLKMSLSVNNKCLRIIYWLDSSSV

SEQ ID NO: 39630 - protein, 84 aa, unidentified
  REGION 1..84: note = Description of Unknown:cds_NZ_WFIY01000004.1_cds_WP_155863760.1_1634 target sequence
RDFLKNSPRFESERRLKMSLSVNNKCLRIIYWLDSSSVETFSSEDCVNWMPNTKVSTIISNISTFDERYLEIKRFLEKITANSS

SEQ ID NO: 39631 - protein, 85 aa, unidentified
  REGION 1..85: note = Description of Unknown:cds_NZ_WFIY01000004.1_cds_WP_155863760.1_1634 target sequence
IELTASSSCRYLRLFTKDFRLTFSNGKLFDFNNLSTKKGKDAITEINSILNSLKPGIVEDLNENSLRYEIPVSLLKNFVEDLNVE

SEQ ID NO: 39632 - protein, 85 aa, unidentified
  REGION 1..85: note = Description of Unknown:cds_NZ_WFIY01000004.1_cds_WP_155863760.1_1634 target sequence
NVSPERYLDFNIDYIDYDIGRDFLKNSPRFESERRLKMSLSVNNKCLRIIYWLDSSSVETFSSEDCVNWMPNTKVSTIISNISTF

SEQ ID NO: 39633 - protein, 85 aa, unidentified
  REGION 1..85: note = Description of Unknown:cds_NZ_WFIY01000004.1_cds_WP_205737151.1_1998 target sequence
RKLTVEEYFNSYLPKPNEKETYLFYLISRCREAKEQGLKIDKVLYRLWGVEPLKAVKILSAIRDNVEFEVRGIKIRKEWIKIMHV

SEQ ID NO: 39634 - protein, 85 aa, unidentified
  REGION 1..85: note = Description of Unknown:cds_NZ_WFIY01000004.1_cds_WP_205737151.1_1998 target sequence
LNPVNISKVSKETVIRYMHECERKPDISMILYSELPRHIDFKIFMIDVDSKDPKVLEQMKGLKPRLVITTKRGFHIHFWKEDLED

SEQ ID NO: 39635 - protein, 84 aa, unidentified
  REGION 1..84: note = Description of Unknown:cds_NZ_WFIY01000004.1_cds_WP_205737151.1_1998 target sequence
DVDSKDPKVLEQMKGLKPRLVITTKRGFHIHFWKEDLEDPQLLFKLKDVEVKTRDSIEYVPITQGSFTPEAFEINDVEEIINLI

SEQ ID NO: 39636 - protein, 85 aa, unidentified
  REGION 1..85: note = Description of Unknown:cds_NZ_WFIY01000004.1_cds_WP_205737151.1_1998 target sequence
SRCREAKEQGLKIDKVLYRLWGVEPLKAVKILSAIRDNVEFEVRGIKIRKEWIKIMHVLNPVNISKVSKETVIRYMHECERKPDI

SEQ ID NO: 39637 - protein, 85 aa, unidentified
  REGION 1..85: note = Description of Unknown:cds_NZ_WFIY01000004.1_cds_WP_205737151.1_1998 target sequence
SMILYSELPRHIDFKIFMIDVDSKDPKVLEQMKGLKPRLVITTKRGFHIHFWKEDLEDPQLLFKLKDVEVKTRDSIEYVPITQGS

SEQ ID NO: 39638 - protein, 85 aa, unidentified
  REGION 1..85: note = Description of Unknown:cds_NZ_WFIY01000004.1_cds_WP_155864255.1_2246 target sequence
SLEYMVKNKVDKIIINDGEKRKLVTLKGLIFGKEETVYEINEGETWKKEEIYYLISKYHFLFFTSSNLLIDAKDFIKSERAKEIE

SEQ ID NO: 39639 - protein, 85 aa, unidentified
  REGION 1..85: note = Description of Unknown:cds_NZ_WFIY01000004.1_cds_WP_155864255.1_2246 target sequence
VGEVMNVEPIISPPEESVYNVLQKMRERDEEYAIIVCDSLPCGILDLFGIGKAILEGRLKESVMNFAEKDFFKVTPESSLETARK

SEQ ID NO: 39640 - protein, 84 aa, unidentified
  REGION 1..84: note = Description of Unknown:cds_NZ_WFIY01000004.1_cds_WP_155864255.1_2246 target sequence
LFGIGKAILEGRLKESVMNFAEKDFFKVTPESSLETARKLMVLSSRFFLPVVDFRTLLGSVSWKEVFDNLNRKLMFHEFHRKNF

SEQ ID NO: 39641 - protein, 85 aa, unidentified
  REGION 1..85: note = Description of Unknown:cds_NZ_WFIY01000004.1_cds_WP_155864255.1_2246 target sequence
GLIFGKEETVYEINEGETWKKEEIYYLISKYHFLFFTSSNLLIDAKDFIKSERAKEIEVGEVMNVEPIISPPEESVYNVLQKMRE

SEQ ID NO: 39642 - protein, 85 aa, unidentified
  REGION 1..85: note = Description of Unknown:cds_NZ_WFIY01000004.1_cds_WP_155864255.1_2246 target sequence
RDEEYAIIVCDSLPCGILDLFGIGKAILEGRLKESVMNFAEKDFFKVTPESSLETARKLMVLSSRFFLPVVDFRTLLGSVSWKEV

SEQ ID NO: 39643 - protein, 85 aa, unidentified
  REGION 1..85: note = Description of Unknown:cds_NC_035460.1_cds_YP_009408104.1_153 target sequence
DMAKITVKVTDENIIINVSETSLPILVTTDGSLQPLTVVNISKYSNISSNLLANENTDDYTPDYKEDFLESEDIFDFNNISNIIH

SEQ ID NO: 39644 - protein, 85 aa, unidentified
  REGION 1..85: note = Description of Unknown:cds_NC_035460.1_cds_YP_009408104.1_153 target sequence
NYFWYRGFVGIHNKNFGRVFKELKLYDNEARRKYGSIETLFKILDLTSTNAVKNFCNFIKFQKNIIKTVSEFDAIEMIGLCALVL

SEQ ID NO: 39645 - protein, 84 aa, unidentified
  REGION 1..84: note = Description of Unknown:cds_NC_035460.1_cds_YP_009408104.1_153 target sequence
TSTNAVKNFCNFIKFQKNIIKTVSEFDAIEMIGLCALVLEKWRHLDLKLNWFTVVSEFFNYTSLEVRKKLKSSLQQKLAYEELN

SEQ ID NO: 39646 - protein, 85 aa, unidentified
  REGION 1..85: note = Description of Unknown:cds_NC_035460.1_cds_YP_009408104.1_153 target sequence
TTDGSLQPLTVVNISKYSNISSNLLANENTDDYTPDYKEDFLESEDIFDFNNISNIIHNYFWYRGFVGIHNKNFGRVFKELKLYD

SEQ ID NO: 39647 - protein, 85 aa, unidentified
  REGION 1..85: note = Description of Unknown:cds_NC_035460.1_cds_YP_009408104.1_153 target sequence
NEARRKYGSIETLFKILDLTSTNAVKNFCNFIKFQKNIIKTVSEFDAIEMIGLCALVLEKWRHLDLKLNWFTVVSEFFNYTSLEV

SEQ ID NO: 39648 - protein, 85 aa, unidentified
  REGION 1..85: note = Description of Unknown:cds_NC_010495.1_cds_YP_001742071.1_34 target sequence
KLQTLEFPYGEITFDRENFINVNELVNQMNRWRLDNGMGTREIRQVMATDAFKDFKAECEKQLGIDSAIKSTRGRNGSTFACLHL

SEQ ID NO: 39649 - protein, 85 aa, unidentified
  REGION 1..85: note = Description of Unknown:cds_NC_010495.1_cds_YP_001742071.1_34 target sequence
AVYIAEQYSTYFHFLVIDRFITQRQVELRNIGAVSFVELNAAVSRMLERTEGRIGHSGHFIQVAKTVKESIDIREVTGFDTWDSQ

SEQ ID NO: 39650 - protein, 84 aa, unidentified
  REGION 1..84: note = Description of Unknown:cds_NC_010495.1_cds_YP_001742071.1_34 target sequence
LERTEGRIGHSGHFIQVAKTVKESIDIREVTGFDTWDSQDAKTNQLRSDIQKSLVTLLDMEAVNSWDELKETIPRVVRKCADKI

SEQ ID NO: 39651 - protein, 85 aa, unidentified
  REGION 1..85: note = Description of Unknown:cds_NC_010495.1_cds_YP_001742071.1_34 target sequence
QMNRWRLDNGMGTREIRQVMATDAFKDFKAECEKQLGIDSAIKSTRGRNGSTFACLHLAVYIAEQYSTYFHFLVIDRFITQRQVE

SEQ ID NO: 39652 - protein, 85 aa, unidentified
  REGION 1..85: note = Description of Unknown:cds_NC_010495.1_cds_YP_001742071.1_34 target sequence
LRNIGAVSFVELNAAVSRMLERTEGRIGHSGHFIQVAKTVKESIDIREVTGFDTWDSQDAKTNQLRSDIQKSLVTLLDMEAVNSW

SEQ ID NO: 39653 - protein, 85 aa, unidentified
  REGION 1..85: note = Description of Unknown:cds_NZ_WFIY01000004.1_cds_WP_155863808.1_1697 target sequence
LKTEESLLKEQLLKIKNLSFTPVYSSSIIKINFDGLPIRKSIKSNLSISLSLNEGFRIKEFINYSGIPEYYDEKYDKWKMSLDKR

SEQ ID NO: 39654 - protein, 85 aa, unidentified
  REGION 1..85: note = Description of Unknown:cds_NZ_WFIY01000004.1_cds_WP_155863808.1_1697 target sequence
AEGLKVEVKYSGYAQPLIFSSLKSFSSFNEILKGMYNHTVIESFIIDYGNRDVILDIFHNSKKVLECLELIPFIRFSILIEIDNN

SEQ ID NO: 39655 - protein, 84 aa, unidentified
  REGION 1..84: note = Description of Unknown:cds_NZ_WFIY01000004.1_cds_WP_155863808.1_1697 target sequence
DYGNRDVILDIFHNSKKVLECLELIPFIRFSILIEIDNNEELYITELSLPFTYLNYVSELLSELKSEIDIIFTLNKFPYISKIL

SEQ ID NO: 39656 - protein, 85 aa, unidentified
  REGION 1..85: note = Description of Unknown:cds_NZ_WFIY01000004.1_cds_WP_155863808.1_1697 target sequence
IIKINFDGLPIRKSIKSNLSISLSLNEGFRIKEFINYSGIPEYYDEKYDKWKMSLDKRAEGLKVEVKYSGYAQPLIFSSLKSFSS

SEQ ID NO: 39657 - protein, 85 aa, unidentified
  REGION 1..85: note = Description of Unknown:cds_NZ_WFIY01000004.1_cds_WP_155863808.1_1697 target sequence
FNEILKGMYNHTVIESFIIDYGNRDVILDIFHNSKKVLECLELIPFIRFSILIEIDNNEELYITELSLPFTYLNYVSELLSELKS

SEQ ID NO: 39658 - protein, 85 aa, unidentified
  REGION 1..85: note = Description of Unknown:cds_NZ_WFIY01000004.1_cds_WP_155863978.1_1902 target sequence
VKVYQKFPDTQVLTTKGPIDFYKDIFGKGKWLFLYAHPADFTPVCTTEFVAFAQAQPEFEKLGVQLMGLSVDSVYSHIAWLNDIE

SEQ ID NO: 39659 - protein, 85 aa, unidentified
  REGION 1..85: note = Description of Unknown:cds_NZ_WFIY01000004.1_cds_WP_155863978.1_1902 target sequence
QRYGVKINFPVIADPDKKLSRMLDLVEENSGVTVRGVFIVDPEGTIRFMAQYPIEAGRKIDEMLRITKAIIVAYKAKVATPANWE

SEQ ID NO: 39660 - protein, 84 aa, unidentified
  REGION 1..84: note = Description of Unknown:cds_NZ_WFIY01000004.1_cds_WP_155863978.1_1902 target sequence
IRFMAQYPIEAGRKIDEMLRITKAIIVAYKAKVATPANWEPGQDVVLGAPTTLDEAELRMKMPNAKAWYLVFKKYNELPANQKV

SEQ ID NO: 39661 - protein, 85 aa, unidentified
  REGION 1..85: note = Description of Unknown:cds_NZ_WFIY01000004.1_cds_WP_155863978.1_1902 target sequence
KGKWLFLYAHPADFTPVCTTEFVAFAQAQPEFEKLGVQLMGLSVDSVYSHIAWLNDIEQRYGVKINFPVIADPDKKLSRMLDLVE

SEQ ID NO: 39662 - protein, 85 aa, unidentified
  REGION 1..85: note = Description of Unknown:cds_NZ_WFIY01000004.1_cds_WP_155863978.1_1902 target sequence
ENSGVTVRGVFIVDPEGTIRFMAQYPIEAGRKIDEMLRITKAIIVAYKAKVATPANWEPGQDVVLGAPTTLDEAELRMKMPNAKA

SEQ ID NO: 39663 - protein, 85 aa, unidentified
  REGION 1..85: note = Description of Unknown:cds_NC_035460.1_cds_YP_009407976.1_25 target sequence
ENDPIVVDTLYNLFINRYLQKLGQYSIPTNIACGIHIGKIIGEFDRCALRVTNKCFNNSKLSFKIMIESLKEILLLVSEKEKIKI

SEQ ID NO: 39664 - protein, 85 aa, unidentified
  REGION 1..85: note = Description of Unknown:cds_NC_035460.1_cds_YP_009407976.1_25 target sequence
LEEIGIDLNNDDKSISKLERNCKAYAETSNFIDIDVFNAGICKAPPGKFILLQVLNSGTVEANCGLETIMKSLNKKILPSYNTNN

SEQ ID NO: 39665 - protein, 84 aa, unidentified
  REGION 1..84: note = Description of Unknown:cds_NC_035460.1_cds_YP_009407976.1_25 target sequence
PGKFILLQVLNSGTVEANCGLETIMKSLNKKILPSYNTNNKLDLTSRPWFIAGGVLILLIIIFAICSIKKRISVKYNYGKYLYV

SEQ ID NO: 39666 - protein, 85 aa, unidentified
  REGION 1..85: note = Description of Unknown:cds_NC_035460.1_cds_YP_009407976.1_25 target sequence
PTNIACGIHIGKIIGEFDRCALRVTNKCFNNSKLSFKIMIESLKEILLLVSEKEKIKILEEIGIDLNNDDKSISKLERNCKAYAE

SEQ ID NO: 39667 - protein, 85 aa, unidentified
  REGION 1..85: note = Description of Unknown:cds_NC_035460.1_cds_YP_009407976.1_25 target sequence
TSNFIDIDVFNAGICKAPPGKFILLQVLNSGTVEANCGLETIMKSLNKKILPSYNTNNKLDLTSRPWFIAGGVLILLIIIFAICS

SEQ ID NO: 39668 - protein, 85 aa, unidentified
  REGION 1..85: note = Description of Unknown:cds_NZ_WFIY01000004.1_cds_WP_155862802.1_624 target sequence
LGKDFQKYWAGPEEKNGIVSGIKGAFKPKEPLKYRLVQAHYQISSMISRLDAYISRMQERDKTLFERVVEAQMAKDTARAAMYAN

SEQ ID NO: 39669 - protein, 85 aa, unidentified
  REGION 1..85: note = Description of Unknown:cds_NZ_WFIY01000004.1_cds_WP_155862802.1_624 target sequence
EVAEVRKITKQLIMTQIALEQVELRLETVSELGDVFVNLVPVVGVINELRNVIRGVMPELSVELGELGEGLQEVVIEAGDFTGVS

SEQ ID NO: 39670 - protein, 84 aa, unidentified
  REGION 1..84: note = Description of Unknown:cds_NZ_WFIY01000004.1_cds_WP_155862802.1_624 target sequence
VINELRNVIRGVMPELSVELGELGEGLQEVVIEAGDFTGVSGISAAPTAEARKILEEAAAVAEQKMKEKFPELPVSSSTISQKA

SEQ ID NO: 39671 - protein, 85 aa, unidentified
  REGION 1..85: note = Description of Unknown:cds_NZ_WFIY01000004.1_cds_WP_155862802.1_624 target sequence
PKEPLKYRLVQAHYQISSMISRLDAYISRMQERDKTLFERVVEAQMAKDTARAAMYANEVAEVRKITKQLIMTQIALEQVELRLE

SEQ ID NO: 39672 - protein, 85 aa, unidentified
  REGION 1..85: note = Description of Unknown:cds_NZ_WFIY01000004.1_cds_WP_155862802.1_624 target sequence
TVSELGDVFVNLVPVVGVINELRNVIRGVMPELSVELGELGEGLQEVVIEAGDFTGVSGISAAPTAEARKILEEAAAVAEQKMKE

SEQ ID NO: 39673 - protein, 85 aa, unidentified
  REGION 1..85: note = Description of Unknown:cds_NZ_WFIY01000004.1_cds_WP_155862894.1_740 target sequence
AEGVPTANIEEWKPRTKLGQLVKEGKITSIKEIFEKNLVITEPEIIDALLPNLKYEVIDIKMVQKQTDAGELSRYKVLVIMGNFD

SEQ ID NO: 39674 - protein, 85 aa, unidentified
  REGION 1..85: note = Description of Unknown:cds_NZ_WFIY01000004.1_cds_WP_155862894.1_740 target sequence
GYVGIGMGKAKQLRVAIQKAIRDAKMNIIPVRRGCGSWECTCGEPHSLPFTVTGKAGSVEVTLKPAPKGTGLVVGSVLKTLLSYA

SEQ ID NO: 39675 - protein, 84 aa, unidentified
  REGION 1..84: note = Description of Unknown:cds_NZ_WFIY01000004.1_cds_WP_155862894.1_740 target sequence
PHSLPFTVTGKAGSVEVTLKPAPKGTGLVVGSVLKTLLSYAGIKDVWSSSKGETRTTENFIKAGYNALYNTYKFVTPADWARKR

SEQ ID NO: 39676 - protein, 85 aa, unidentified
  REGION 1..85: note = Description of Unknown:cds_NZ_WFIY01000004.1_cds_WP_155862894.1_740 target sequence
TSIKEIFEKNLVITEPEIIDALLPNLKYEVIDIKMVQKQTDAGELSRYKVLVIMGNFDGYVGIGMGKAKQLRVAIQKAIRDAKMN

SEQ ID NO: 39677 - protein, 85 aa, unidentified
  REGION 1..85: note = Description of Unknown:cds_NZ_WFIY01000004.1_cds_WP_155862894.1_740 target sequence
IIPVRRGCGSWECTCGEPHSLPFTVTGKAGSVEVTLKPAPKGTGLVVGSVLKTLLSYAGIKDVWSSSKGETRTTENFIKAGYNAL

SEQ ID NO: 39678 - protein, 85 aa, unidentified
  REGION 1..85: note = Description of Unknown:cds_NZ_WFIY01000004.1_cds_WP_155863245.1_1193 target sequence
KLYQKFPDVQVLTTKGVIDFYKDIFGKGKWLFLFAHPADFTPVCTTEFVAFAKAYEEFKRLNVELVGMSVDSIYSHIAWLSDIEQ

SEQ ID NO: 39679 - protein, 85 aa, unidentified
  REGION 1..85: note = Description of Unknown:cds_NZ_WFIY01000004.1_cds_WP_155863245.1_1193 target sequence
RYGIKIPFPLIADPDKKLARTLDIIDENSGVTIRAVFLVNPEGTIRFMAYYPIEYGRKIEELLRITKAAIVNYKAKVSLPVDWEP

SEQ ID NO: 39680 - protein, 84 aa, unidentified
  REGION 1..84: note = Description of Unknown:cds_NZ_WFIY01000004.1_cds_WP_155863245.1_1193 target sequence
IRFMAYYPIEYGRKIEELLRITKAAIVNYKAKVSLPVDWEPGDDVIIPAPTTLDEAELRMKLPNAKAWYLAFKKYEELPPDQRV

SEQ ID NO: 39681 - protein, 85 aa, unidentified
  REGION 1..85: note = Description of Unknown:cds_NZ_WFIY01000004.1_cds_WP_155863245.1_1193 target sequence
GKWLFLFAHPADFTPVCTTEFVAFAKAYEEFKRLNVELVGMSVDSIYSHIAWLSDIEQRYGIKIPFPLIADPDKKLARTLDIIDE

SEQ ID NO: 39682 - protein, 85 aa, unidentified
  REGION 1..85: note = Description of Unknown:cds_NZ_WFIY01000004.1_cds_WP_155863245.1_1193 target sequence
NSGVTIRAVFLVNPEGTIRFMAYYPIEYGRKIEELLRITKAAIVNYKAKVSLPVDWEPGDDVIIPAPTTLDEAELRMKLPNAKAW

SEQ ID NO: 39683 - protein, 85 aa, unidentified
  REGION 1..85: note = Description of Unknown:cds_NZ_WFIY01000004.1_cds_WP_155863401.1_1378 target sequence
NYKYLFRAFNGVLGLITLYSFIHTLFVPPPFPLFVKIAGPGGLFLGGTIGLTSALAPNKLYALFTNKKYGKIIRGAIILFAIYML

SEQ ID NO: 39684 - protein, 85 aa, unidentified
  REGION 1..85: note = Description of Unknown:cds_NZ_WFIY01000004.1_cds_WP_155863401.1_1378 target sequence
STVEIFFAPRNFVGELSGVLASLSFAVLLPLIVFYYNKINKKIVYIMIFSLILLLAFSLPNIESLPNIESFAELLGLGPAKPPGL

SEQ ID NO: 39685 - protein, 84 aa, unidentified
  REGION 1..84: note = Description of Unknown:cds_NZ_WFIY01000004.1_cds_WP_155863401.1_1378 target sequence
YIMIFSLILLLAFSLPNIESLPNIESFAELLGLGPAKPPGLYFTVALIYLHHFEHTYTLVFANVIALKPKVLQSLSRLKEMLSR

SEQ ID NO: 39686 - protein, 85 aa, unidentified
  REGION 1..85: note = Description of Unknown:cds_NZ_WFIY01000004.1_cds_WP_155863401.1_1378 target sequence
PPPFPLFVKIAGPGGLFLGGTIGLTSALAPNKLYALFTNKKYGKIIRGAIILFAIYMLSTVEIFFAPRNFVGELSGVLASLSFAV

SEQ ID NO: 39687 - protein, 85 aa, unidentified
  REGION 1..85: note = Description of Unknown:cds_NZ_WFIY01000004.1_cds_WP_155863401.1_1378 target sequence
LLPLIVFYYNKINKKIVYIMIFSLILLLAFSLPNIESLPNIESFAELLGLGPAKPPGLYFTVALIYLHHFEHTYTLVFANVIALK

SEQ ID NO: 39688 - protein, 85 aa, unidentified
  REGION 1..85: note = Description of Unknown:cds_NZ_WFIY01000004.1_cds_WP_155863627.1_1523 target sequence
FDEEIISCYKCPRLRQYSEMIGKIKVKRFRDWEYWGKPLPGYGDENASLLIVGLAPAAHGGNRTGRVFTGDESGKWVIKALYELG

SEQ ID NO: 39689 - protein, 85 aa, unidentified
  REGION 1..85: note = Description of Unknown:cds_NZ_WFIY01000004.1_cds_WP_155863627.1_1523 target sequence
LSNLEFSLRREDNLILRGVYLTNAVKCAPPKNKPLREEILNCNYFLRKEIMSLRNLKVILALGKIAFDSVCMVFNEKCKFSHGVI

SEQ ID NO: 39690 - protein, 84 aa, unidentified
  REGION 1..84: note = Description of Unknown:cds_NZ_WFIY01000004.1_cds_WP_155863627.1_1523 target sequence
FLRKEIMSLRNLKVILALGKIAFDSVCMVFNEKCKFSHGVIYDIEGKKIVGSYHPSAQNTKTGRLTWESFMQVVRKAYELSKAS

SEQ ID NO: 39691 - protein, 85 aa, unidentified
  REGION 1..85: note = Description of Unknown:cds_NZ_WFIY01000004.1_cds_WP_155863627.1_1523 target sequence
RFRDWEYWGKPLPGYGDENASLLIVGLAPAAHGGNRTGRVFTGDESGKWVIKALYELGLSNLEFSLRREDNLILRGVYLTNAVKC

SEQ ID NO: 39692 - protein, 85 aa, unidentified
  REGION 1..85: note = Description of Unknown:cds_NZ_WFIY01000004.1_cds_WP_155863627.1_1523 target sequence
APPKNKPLREEILNCNYFLRKEIMSLRNLKVILALGKIAFDSVCMVFNEKCKFSHGVIYDIEGKKIVGSYHPSAQNTKTGRLTWE

SEQ ID NO: 39693 - protein, 85 aa, unidentified
  REGION 1..85: note = Description of Unknown:cds_NZ_WFIY01000004.1_cds_WP_155863977.1_1901 target sequence
LIAATSDIHSPRYLNDFFIALRYLPQHVDLVLLAGDLTDRGKFMHFDPVYNALRRFQIVAVFGNEDFREEREKYKEKFPDVIWLD

SEQ ID NO: 39694 - protein, 85 aa, unidentified
  REGION 1..85: note = Description of Unknown:cds_NZ_WFIY01000004.1_cds_WP_155863977.1_1901 target sequence
DEKKQLGDVTIIGSEGVIKKPTIWQKMKGIDEKFYTERKKKIEEMLCSSSGFKILLTHYAPTYKTVYGERPSAYPGLGDELIEEL

SEQ ID NO: 39695 - protein, 84 aa, unidentified
  REGION 1..84: note = Description of Unknown:cds_NZ_WFIY01000004.1_cds_WP_155863977.1_1901 target sequence
MLCSSSGFKILLTHYAPTYKTVYGERPSAYPGLGDELIEELQCKPNLAVHGHAHYAKVTFAKIDDTKVYNVALPANKKFVIIEI

SEQ ID NO: 39696 - protein, 85 aa, unidentified
  REGION 1..85: note = Description of Unknown:cds_NZ_WFIY01000004.1_cds_WP_155863977.1_1901 target sequence
VDLVLLAGDLTDRGKFMHFDPVYNALRRFQIVAVFGNEDFREEREKYKEKFPDVIWLDDEKKQLGDVTIIGSEGVIKKPTIWQKM

SEQ ID NO: 39697 - protein, 85 aa, unidentified
  REGION 1..85: note = Description of Unknown:cds_NZ_WFIY01000004.1_cds_WP_155863977.1_1901 target sequence
KGIDEKFYTERKKKIEEMLCSSSGFKILLTHYAPTYKTVYGERPSAYPGLGDELIEELQCKPNLAVHGHAHYAKVTFAKIDDTKV

SEQ ID NO: 39698 - protein, 85 aa, unidentified
  REGION 1..85: note = Description of Unknown:cds_NC_029316.1_cds_YP_009230348.1_95 target sequence
EITYFLCKFLEENKVFEGRFRACRGYIYVGNNVKIGEEYAGYKEGYICSEEIIWKKDGTLEWRRRKLRKRTLEIVEEIRPLWGLK

SEQ ID NO: 39699 - protein, 85 aa, unidentified
  REGION 1..85: note = Description of Unknown:cds_NC_029316.1_cds_YP_009230348.1_95 target sequence
IDDIYLKDIDEDIHIKVNRFQYKTFWKSKFIIAEAEDNKYIIVDNPYLDSIKKEKYIEIDIKKGTYPVVKVYNKEYMSEYLGVIG

SEQ ID NO: 39700 - protein, 84 aa, unidentified
  REGION 1..84: note = Description of Unknown:cds_NC_029316.1_cds_YP_009230348.1_95 target sequence
NPYLDSIKKEKYIEIDIKKGTYPVVKVYNKEYMSEYLGVIGKIILHEYHGYNPAYEDYLATLFVHYVGYLFSLKEKSGKDIARL

SEQ ID NO: 39701 - protein, 85 aa, unidentified
  REGION 1..85: note = Description of Unknown:cds_NC_029316.1_cds_YP_009230348.1_95 target sequence
YVGNNVKIGEEYAGYKEGYICSEEIIWKKDGTLEWRRRKLRKRTLEIVEEIRPLWGLKIDDIYLKDIDEDIHIKVNRFQYKTFWK

SEQ ID NO: 39702 - protein, 85 aa, unidentified
  REGION 1..85: note = Description of Unknown:cds_NC_029316.1_cds_YP_009230348.1_95 target sequence
SKFIIAEAEDNKYIIVDNPYLDSIKKEKYIEIDIKKGTYPVVKVYNKEYMSEYLGVIGKIILHEYHGYNPAYEDYLATLFVHYVG

SEQ ID NO: 39703 - protein, 85 aa, unidentified
  REGION 1..85: note = Description of Unknown:cds_NZ_WFIY01000004.1_cds_WP_155862642.1_423 target sequence
SSNKVLPTKLNLIRFKNELKLVSTIKRLLESKREVLLIYLRTYAAEYEKLYSEVNEALKKTYNSYMQAVVDEGITTIEKIADSQS

SEQ ID NO: 39704 - protein, 85 aa, unidentified
  REGION 1..85: note = Description of Unknown:cds_NZ_WFIY01000004.1_cds_WP_155862642.1_423 target sequence
HSLSVSSSLKVIFGVKIPVIQLNESSIPEKPFSEIETSPYLSEAYDEMREALVKVVQLVELESTIRSLAAELRKTQRLINAIDTS

SEQ ID NO: 39705 - protein, 84 aa, unidentified
  REGION 1..84: note = Description of Unknown:cds_NZ_WFIY01000004.1_cds_WP_155862642.1_423 target sequence
AYDEMREALVKVVQLVELESTIRSLAAELRKTQRLINAIDTSILPFYRGSVKYIKSVLDDKAREEFVRLKITRRILERRRQSGE

SEQ ID NO: 39706 - protein, 85 aa, unidentified
  REGION 1..85: note = Description of Unknown:cds_NZ_WFIY01000004.1_cds_WP_155862642.1_423 target sequence
LLESKREVLLIYLRTYAAEYEKLYSEVNEALKKTYNSYMQAVVDEGITTIEKIADSQSHSLSVSSSLKVIFGVKIPVIQLNESSI

SEQ ID NO: 39707 - protein, 85 aa, unidentified
  REGION 1..85: note = Description of Unknown:cds_NZ_WFIY01000004.1_cds_WP_155862642.1_423 target sequence
PEKPFSEIETSPYLSEAYDEMREALVKVVQLVELESTIRSLAAELRKTQRLINAIDTSILPFYRGSVKYIKSVLDDKAREEFVRL

SEQ ID NO: 39708 - protein, 85 aa, unidentified
  REGION 1..85: note = Description of Unknown:cds_NZ_WFIY01000004.1_cds_985 target sequence
YFPVILDLEKFRILVIGGGKVGSKRALKFHKYSKNVTVISENFSEDLLNSPIEKIKMNAENLSEDFLKRYDIIVTATNNKELNSK

SEQ ID NO: 39709 - protein, 85 aa, unidentified
  REGION 1..85: note = Description of Unknown:cds_NZ_WFIY01000004.1_cds_985 target sequence
LCDLAKKLGKLCNNPTNPEDSNFIVPIFYSDENYEIAVTTYGKSSLVSEFILNEILDNLSHKKDFVNLLTNAMARVKEIAKKKIN

SEQ ID NO: 39710 - protein, 84 aa, unidentified
  REGION 1..84: note = Description of Unknown:cds_NZ_WFIY01000004.1_cds_985 target sequence
SLVSEFILNEILDNLSHKKDFVNLLTNAMARVKEIAKKKINDPSLRFTLYYKIFYDKLFSDFLINGKYNEAINRAEEIMNEYIK

SEQ ID NO: 39711 - protein, 85 aa, unidentified
  REGION 1..85: note = Description of Unknown:cds_NZ_WFIY01000004.1_cds_985 target sequence
KFHKYSKNVTVISENFSEDLLNSPIEKIKMNAENLSEDFLKRYDIIVTATNNKELNSKLCDLAKKLGKLCNNPTNPEDSNFIVPI

SEQ ID NO: 39712 - protein, 85 aa, unidentified
  REGION 1..85: note = Description of Unknown:cds_NZ_WFIY01000004.1_cds_985 target sequence
FYSDENYEIAVTTYGKSSLVSEFILNEILDNLSHKKDFVNLLTNAMARVKEIAKKKINDPSLRFTLYYKIFYDKLFSDFLINGKY

SEQ ID NO: 39713 - protein, 85 aa, unidentified
  REGION 1..85: note = Description of Unknown:cds_NZ_WFIY01000004.1_cds_WP_155863281.1_1237 target sequence
LLGEKDYAGIITSMKNHYEIRGSYLYERHTFTHYKNVGSSNITGYSDTRLIFSDDASIIYYKIKVRSTDNNVVSSNIEVRKFGNK

SEQ ID NO: 39714 - protein, 85 aa, unidentified
  REGION 1..85: note = Description of Unknown:cds_NZ_WFIY01000004.1_cds_WP_155863281.1_1237 target sequence
LHFYIYSEMEKPFKPKSKITTDVELIIYDNGLRNLAELIKNRKLYFIENSNYPVEKYMATFQLPIINLDVDLIKSKNYTPGELPK

SEQ ID NO: 39715 - protein, 84 aa, unidentified
  REGION 1..84: note = Description of Unknown:cds_NZ_WFIY01000004.1_cds_WP_155863281.1_1237 target sequence
LYFIENSNYPVEKYMATFQLPIINLDVDLIKSKNYTPGELPKEFIVVKDYIKICNLNSIMIKTSLEPKVGYFFIIKGKEYDYSY

SEQ ID NO: 39716 - protein, 85 aa, unidentified
  REGION 1..85: note = Description of Unknown:cds_NZ_WFIY01000004.1_cds_WP_155863281.1_1237 target sequence
RHTFTHYKNVGSSNITGYSDTRLIFSDDASIIYYKIKVRSTDNNVVSSNIEVRKFGNKLHFYIYSEMEKPFKPKSKITTDVELII

SEQ ID NO: 39717 - protein, 85 aa, unidentified
  REGION 1..85: note = Description of Unknown:cds_NZ_WFIY01000004.1_cds_WP_155863281.1_1237 target sequence
YDNGLRNLAELIKNRKLYFIENSNYPVEKYMATFQLPIINLDVDLIKSKNYTPGELPKEFIVVKDYIKICNLNSIMIKTSLEPKV

SEQ ID NO: 39718 - protein, 85 aa, unidentified
  REGION 1..85: note = Description of Unknown:cds_NZ_WFIY01000004.1_cds_WP_155863810.1_1700 target sequence
KPLLIGVDGLSYSSFMKCNPRFLLTLFSSAFRGVVVNRKPQHPASSWMSILEMKDISGNSFYKVEEKPTLIKETNAVAINLPITN

SEQ ID NO: 39719 - protein, 85 aa, unidentified
  REGION 1..85: note = Description of Unknown:cds_NZ_WFIY01000004.1_cds_WP_155863810.1_1700 target sequence
PTYGELGFPYDSNLTAKDEIDKVIEAILDSLEEQPVIADITAIDRLVRVNPQKKCEIYKEVDDGLRKLLRKVDDFILFSPYGEPK

SEQ ID NO: 39720 - protein, 84 aa, unidentified
  REGION 1..84: note = Description of Unknown:cds_NZ_WFIY01000004.1_cds_WP_155863810.1_1700 target sequence
DRLVRVNPQKKCEIYKEVDDGLRKLLRKVDDFILFSPYGEPKSDKMCDHEDYGVYLSTVPRPNEHDTVKLPEIGLLFKRLVSQS

SEQ ID NO: 39721 - protein, 85 aa, unidentified
  REGION 1..85: note = Description of Unknown:cds_NZ_WFIY01000004.1_cds_WP_155863810.1_1700 target sequence
SSAFRGVVVNRKPQHPASSWMSILEMKDISGNSFYKVEEKPTLIKETNAVAINLPITNPTYGELGFPYDSNLTAKDEIDKVIEAI

SEQ ID NO: 39722 - protein, 85 aa, unidentified
  REGION 1..85: note = Description of Unknown:cds_NZ_WFIY01000004.1_cds_WP_155863810.1_1700 target sequence
LDSLEEQPVIADITAIDRLVRVNPQKKCEIYKEVDDGLRKLLRKVDDFILFSPYGEPKSDKMCDHEDYGVYLSTVPRPNEHDTVK

SEQ ID NO: 39723 - protein, 85 aa, unidentified
  REGION 1..85: note = Description of Unknown:cds_NC_007409.1_cds_YP_319889.1_58 target sequence
DEKRVYITMYIKFAQKVLSLLSLKYASQKSVETYLYMFLYFGLGLRRNVTTLSLSQFDAKNLRFYPRPYAIYNDSPLYMIVPRHL

SEQ ID NO: 39724 - protein, 85 aa, unidentified
  REGION 1..85: note = Description of Unknown:cds_NC_007409.1_cds_YP_319889.1_58 target sequence
VDIIVLYTRRFKIGLDQPLFRDIERPSVYERKIFEITGILPQDLVNACIATMIEYSKNPKQVARLLYLNKVYLDFIVRKLGFKLT

SEQ ID NO: 39725 - protein, 84 aa, unidentified
  REGION 1..84: note = Description of Unknown:cds_NC_007409.1_cds_YP_319889.1_58 target sequence
LVNACIATMIEYSKNPKQVARLLYLNKVYLDFIVRKLGFKLTNDFKLMTADGRILEPSPEVLHPFLYLAKKTKQQQEQGAGSLA

SEQ ID NO: 39726 - protein, 85 aa, unidentified
  REGION 1..85: note = Description of Unknown:cds_NC_007409.1_cds_YP_319889.1_58 target sequence
QKSVETYLYMFLYFGLGLRRNVTTLSLSQFDAKNLRFYPRPYAIYNDSPLYMIVPRHLVDIIVLYTRRFKIGLDQPLFRDIERPS

SEQ ID NO: 39727 - protein, 85 aa, unidentified
  REGION 1..85: note = Description of Unknown:cds_NC_007409.1_cds_YP_319889.1_58 target sequence
VYERKIFEITGILPQDLVNACIATMIEYSKNPKQVARLLYLNKVYLDFIVRKLGFKLTNDFKLMTADGRILEPSPEVLHPFLYLA

SEQ ID NO: 39728 - protein, 85 aa, unidentified
  REGION 1..85: note = Description of Unknown:hvTR_Q9W9H8 target sequence
RAARLCRLASNVTEFARRGLQRDPVAYEEDLELPDRRMCGTNVRHLFDVIAAAADEHDLLTVGGLCQTHAGVSCELLETVRDPWT

SEQ ID NO: 39729 - protein, 85 aa, unidentified
  REGION 1..85: note = Description of Unknown:hvTR_Q9W9H8 target sequence
AVPGVRMTLTVARAQYRLWPDARRQLRLHLYAGHPLGPWIVCAVLSRERETQTPSPPIGSGGVTLGNVPTPGPREVETAWVIVTW

SEQ ID NO: 39730 - protein, 84 aa, unidentified
  REGION 1..84: note = Description of Unknown:hvTR_Q9W9H8 target sequence
AVLSRERETQTPSPPIGSGGVTLGNVPTPGPREVETAWVIVTWRDRCYRSGPITARSAVWRTRSPPCGGWAAGHERTLDVFGPG

SEQ ID NO: 39731 - protein, 85 aa, unidentified
  REGION 1..85: note = Description of Unknown:hvTR_Q9W9H8 target sequence
EEDLELPDRRMCGTNVRHLFDVIAAAADEHDLLTVGGLCQTHAGVSCELLETVRDPWTAVPGVRMTLTVARAQYRLWPDARRQLR

SEQ ID NO: 39732 - protein, 85 aa, unidentified
  REGION 1..85: note = Description of Unknown:hvTR_Q9W9H8 target sequence
LHLYAGHPLGPWIVCAVLSRERETQTPSPPIGSGGVTLGNVPTPGPREVETAWVIVTWRDRCYRSGPITARSAVWRTRSPPCGGW

SEQ ID NO: 39733 - protein, 85 aa, unidentified
  REGION 1..85: note = Description of Unknown:cds_NZ_WFIY01000004.1_cds_WP_155862558.1_327 target sequence
ETSISQEKLVEEIAKRVREILELLGEDPNREGLRETPERVARALIEMTSGLRSPPPKIKVFNAKDIDEDITEDENGDQVILIRDI

SEQ ID NO: 39734 - protein, 85 aa, unidentified
  REGION 1..85: note = Description of Unknown:cds_NZ_WFIY01000004.1_cds_WP_155862558.1_327 target sequence
QFSSLCEHHLLPFIGRIHVAYVANDDGKVAGFSKIIRIVNYYSARPQIQERLVSQIADAIMNSEIKPKGVMVIGNGTHMCAYVRG

SEQ ID NO: 39735 - protein, 84 aa, unidentified
  REGION 1..84: note = Description of Unknown:cds_NZ_WFIY01000004.1_cds_WP_155862558.1_327 target sequence
SARPQIQERLVSQIADAIMNSEIKPKGVMVIGNGTHMCAYVRGVKDKEAKLVSVATRGVFKTNRALVNQVFRLLDTTHERSLRL

SEQ ID NO: 39736 - protein, 85 aa, unidentified
  REGION 1..85: note = Description of Unknown:cds_NZ_WFIY01000004.1_cds_WP_155862558.1_327 target sequence
PNREGLRETPERVARALIEMTSGLRSPPPKIKVFNAKDIDEDITEDENGDQVILIRDIQFSSLCEHHLLPFIGRIHVAYVANDDG

SEQ ID NO: 39737 - protein, 85 aa, unidentified
  REGION 1..85: note = Description of Unknown:cds_NZ_WFIY01000004.1_cds_WP_155862558.1_327 target sequence
KVAGFSKIIRIVNYYSARPQIQERLVSQIADAIMNSEIKPKGVMVIGNGTHMCAYVRGVKDKEAKLVSVATRGVFKTNRALVNQV

SEQ ID NO: 39738 - protein, 85 aa, unidentified
  REGION 1..85: note = Description of Unknown:cds_NZ_WFIY01000004.1_cds_WP_155863014.1_894 target sequence
LPDFKIVISDPETKQLKIMKVKVKVDENVKSIDGEKDGKALPIAKLNSKLKQALNLDKLLTLQIEKQEGDKKVKIKVHFLVQIDD

SEQ ID NO: 39739 - protein, 85 aa, unidentified
  REGION 1..85: note = Description of Unknown:cds_NZ_WFIY01000004.1_cds_WP_155863014.1_894 target sequence
SLPDNEVHISKNIAEKFGAEDFEALAYRTKAFQISIDQSKLNLFGTKIGDKINLVISDTPFTLKITGGSDNTGFAMRPDISGPAK

SEQ ID NO: 39740 - protein, 84 aa, unidentified
  REGION 1..84: note = Description of Unknown:cds_NZ_WFIY01000004.1_cds_WP_155863014.1_894 target sequence
FGTKIGDKINLVISDTPFTLKITGGSDNTGFAMRPDISGPAKRRVLVSGPPGYIPREDGERKRKMLRGDTISNEIVQINTVIVR

SEQ ID NO: 39741 - protein, 85 aa, unidentified
  REGION 1..85: note = Description of Unknown:cds_NZ_WFIY01000004.1_cds_WP_155863014.1_894 target sequence
NVKSIDGEKDGKALPIAKLNSKLKQALNLDKLLTLQIEKQEGDKKVKIKVHFLVQIDDSLPDNEVHISKNIAEKFGAEDFEALAY

SEQ ID NO: 39742 - protein, 85 aa, unidentified
  REGION 1..85: note = Description of Unknown:cds_NZ_WFIY01000004.1_cds_WP_155863014.1_894 target sequence
RTKAFQISIDQSKLNLFGTKIGDKINLVISDTPFTLKITGGSDNTGFAMRPDISGPAKRRVLVSGPPGYIPREDGERKRKMLRGD

SEQ ID NO: 39743 - protein, 85 aa, unidentified
  REGION 1..85: note = Description of Unknown:cds_NZ_WFIY01000004.1_cds_WP_155863034.1_922 target sequence
SIANITLEEKLQQITVKLIDETRALYEFLTVDDNKINPMQIYAKINGIKDSVENEKYLTGEYIMKVREGLDYVDLYIDILNNLEK

SEQ ID NO: 39744 - protein, 85 aa, unidentified
  REGION 1..85: note = Description of Unknown:cds_NZ_WFIY01000004.1_cds_WP_155863034.1_922 target sequence
IAQNIDAATYRLSVLLTRSSKIDNIMHGLIVVMCEKILASLTHLIESIKTLSSNAKKSIESARNILKLEEDVDDLYRNIELKLFE

SEQ ID NO: 39745 - protein, 84 aa, unidentified
  REGION 1..84: note = Description of Unknown:cds_NZ_WFIY01000004.1_cds_WP_155863034.1_922 target sequence
HLIESIKTLSSNAKKSIESARNILKLEEDVDDLYRNIELKLFEKPHDDLVYVMLMKDIADRLEDSEDLIRDSANSITYIAFSRT

SEQ ID NO: 39746 - protein, 85 aa, unidentified
  REGION 1..85: note = Description of Unknown:cds_NZ_WFIY01000004.1_cds_WP_155863034.1_922 target sequence
FLTVDDNKINPMQIYAKINGIKDSVENEKYLTGEYIMKVREGLDYVDLYIDILNNLEKIAQNIDAATYRLSVLLTRSSKIDNIMH

SEQ ID NO: 39747 - protein, 85 aa, unidentified
  REGION 1..85: note = Description of Unknown:cds_NZ_WFIY01000004.1_cds_WP_155863034.1_922 target sequence
GLIVVMCEKILASLTHLIESIKTLSSNAKKSIESARNILKLEEDVDDLYRNIELKLFEKPHDDLVYVMLMKDIADRLEDSEDLIR

SEQ ID NO: 39748 - protein, 85 aa, unidentified
  REGION 1..85: note = Description of Unknown:cds_NZ_WFIY01000004.1_cds_1036 target sequence
KEYVAYDVWINFKDPFKVLIATLLSQNSTDKGTYKAFYTLQEKIGVTPDNLIKANLEDIASCIRNIGIYRIKAERIKELAKIIKE

SEQ ID NO: 39749 - protein, 85 aa, unidentified
  REGION 1..85: note = Description of Unknown:cds_NZ_WFIY01000004.1_cds_1036 target sequence
KYNGDLNKILDKDPQEAREELLSLPGVGEKTADVVLLTCKGYPYFPVDTHIKRISQRLGIASGSYEQISASLMKLFDPKDYLEAH

SEQ ID NO: 39750 - protein, 84 aa, unidentified
  REGION 1..84: note = Description of Unknown:cds_NZ_WFIY01000004.1_cds_1036 target sequence
YFPVDTHIKRISQRLGIASGSYEQISASLMKLFDPKDYLEAHHLLIAHGRNVCKAKNPLCEKCVLNDCCEYYARINKNKPNNNS

SEQ ID NO: 39751 - protein, 85 aa, unidentified
  REGION 1..85: note = Description of Unknown:cds_NZ_WFIY01000004.1_cds_1036 target sequence
STDKGTYKAFYTLQEKIGVTPDNLIKANLEDIASCIRNIGIYRIKAERIKELAKIIKEKYNGDLNKILDKDPQEAREELLSLPGV

SEQ ID NO: 39752 - protein, 85 aa, unidentified
  REGION 1..85: note = Description of Unknown:cds_NZ_WFIY01000004.1_cds_1036 target sequence
GEKTADVVLLTCKGYPYFPVDTHIKRISQRLGIASGSYEQISASLMKLFDPKDYLEAHHLLIAHGRNVCKAKNPLCEKCVLNDCC

SEQ ID NO: 39753 - protein, 85 aa, unidentified
  REGION 1..85: note = Description of Unknown:cds_NZ_WFIY01000004.1_cds_WP_155863210.1_1151 target sequence
LKGILIAFEGIDGSGKSSQASLLKDWIEMKRDAYLTEWNSSEWIHDIIKEAKKKGLLTPITFSLIHATDFTDRYERFILPMLKTG

SEQ ID NO: 39754 - protein, 85 aa, unidentified
  REGION 1..85: note = Description of Unknown:cds_NZ_WFIY01000004.1_cds_WP_155863210.1_1151 target sequence
FVVISDRYIYTAYARDSVRGVDIEWVKKLYSFAVKPDVTFYIRVSAEVALERIKKARRNIKPQEAGYDVFPNLPPEEGFLKYQTM

SEQ ID NO: 39755 - protein, 84 aa, unidentified
  REGION 1..84: note = Description of Unknown:cds_NZ_WFIY01000004.1_cds_WP_155863210.1_1151 target sequence
VSAEVALERIKKARRNIKPQEAGYDVFPNLPPEEGFLKYQTMILNAYDKIAKEENFVVIDGNKTPREIQMEIRKVLGEILDNSL

SEQ ID NO: 39756 - protein, 85 aa, unidentified
  REGION 1..85: note = Description of Unknown:cds_NZ_WFIY01000004.1_cds_WP_155863210.1_1151 target sequence
EMKRDAYLTEWNSSEWIHDIIKEAKKKGLLTPITFSLIHATDFTDRYERFILPMLKTGFVVISDRYIYTAYARDSVRGVDIEWVK

SEQ ID NO: 39757 - protein, 85 aa, unidentified
  REGION 1..85: note = Description of Unknown:cds_NZ_WFIY01000004.1_cds_WP_155863210.1_1151 target sequence
KLYSFAVKPDVTFYIRVSAEVALERIKKARRNIKPQEAGYDVFPNLPPEEGFLKYQTMILNAYDKIAKEENFVVIDGNKTPREIQ

SEQ ID NO: 39758 - protein, 85 aa, unidentified
  REGION 1..85: note = Description of Unknown:cds_NZ_WFIY01000004.1_cds_WP_155863759.1_1633 target sequence
NSDILREKAGKLWENYVRHEFVIKMKEGSLDLESFRYYLIQDSKYVEIMLKSLLRASSLAPLSHSTKILKSIFDTRDKGIEVHSW

SEQ ID NO: 39759 - protein, 85 aa, unidentified
  REGION 1..85: note = Description of Unknown:cds_NZ_WFIY01000004.1_cds_WP_155863759.1_1633 target sequence
LLSRLGISHEEIRNTGYSLVNYAYTRHLYYYSTRSWEEFLAAWAPCMWGYYEVGKFVKDSPNELYSKWAEFYASDEYKSRVDAIL

SEQ ID NO: 39760 - protein, 84 aa, unidentified
  REGION 1..84: note = Description of Unknown:cds_NZ_WFIY01000004.1_cds_WP_155863759.1_1633 target sequence
WAPCMWGYYEVGKFVKDSPNELYSKWAEFYASDEYKSRVDAILEALNSIKYSESLVTPFINSVRFEIMFWESALKREPTLIIGD

SEQ ID NO: 39761 - protein, 85 aa, unidentified
  REGION 1..85: note = Description of Unknown:cds_NZ_WFIY01000004.1_cds_WP_155863759.1_1633 target sequence
GSLDLESFRYYLIQDSKYVEIMLKSLLRASSLAPLSHSTKILKSIFDTRDKGIEVHSWLLSRLGISHEEIRNTGYSLVNYAYTRH

SEQ ID NO: 39762 - protein, 85 aa, unidentified
  REGION 1..85: note = Description of Unknown:cds_NZ_WFIY01000004.1_cds_WP_155863759.1_1633 target sequence
LYYYSTRSWEEFLAAWAPCMWGYYEVGKFVKDSPNELYSKWAEFYASDEYKSRVDAILEALNSIKYSESLVTPFINSVRFEIMFW

SEQ ID NO: 39763 - protein, 85 aa, unidentified
  REGION 1..85: note = Description of Unknown:cds_NZ_WFIY01000004.1_cds_WP_155863849.1_1745 target sequence
LVDKLKLKDLKSPKQEIRKKAWEEVINIIKSGYYSNLLENRGFFRSLLWFPLQGVRDDAWNHLEVYKMLTIEGIEKTLVANSDKI

SEQ ID NO: 39764 - protein, 85 aa, unidentified
  REGION 1..85: note = Description of Unknown:cds_NZ_WFIY01000004.1_cds_WP_155863849.1_1745 target sequence
KISAWEHVEELLKYELVPKEIIVSSRYSFWRLLRSYYPTIRKKAWKLFPKLVELGIIQPSDKDRYYEFLSHKKPSVRIYAWKYSL

SEQ ID NO: 39765 - protein, 84 aa, unidentified
  REGION 1..84: note = Description of Unknown:cds_NZ_WFIY01000004.1_cds_WP_155863849.1_1745 target sequence
AWKLFPKLVELGIIQPSDKDRYYEFLSHKKPSVRIYAWKYSLDLIKQGFITKENILNQIKYLEELSTKESNIKKLAVKILSELK

SEQ ID NO: 39766 - protein, 85 aa, unidentified
  REGION 1..85: note = Description of Unknown:cds_NZ_WFIY01000004.1_cds_WP_155863849.1_1745 target sequence
IIKSGYYSNLLENRGFFRSLLWFPLQGVRDDAWNHLEVYKMLTIEGIEKTLVANSDKIKISAWEHVEELLKYELVPKEIIVSSRY

SEQ ID NO: 39767 - protein, 85 aa, unidentified
  REGION 1..85: note = Description of Unknown:cds_NZ_WFIY01000004.1_cds_WP_155863849.1_1745 target sequence
SFWRLLRSYYPTIRKKAWKLFPKLVELGIIQPSDKDRYYEFLSHKKPSVRIYAWKYSLDLIKQGFITKENILNQIKYLEELSTKE

SEQ ID NO: 39768 - protein, 85 aa, unidentified
  REGION 1..85: note = Description of Unknown:cds_NZ_WFIY01000004.1_cds_WP_155863867.1_1771 target sequence
QIIAAPGPVSYPIIAASTKNKDIKIIFSKEGKADVILDSTVSLVKRGLRINYITIKELLSVYPNVGKKIGVWRKGSAADVLIRAL

SEQ ID NO: 39769 - protein, 85 aa, unidentified
  REGION 1..85: note = Description of Unknown:cds_NZ_WFIY01000004.1_cds_WP_155863867.1_1771 target sequence
LATKGINAELVYADDMRKILEMFKNKEIDSAVVASAFGKGITFESSLGIPGNCGAHVISNEDEFVSAYNEGIDMFKSDPEGFANA

SEQ ID NO: 39770 - protein, 84 aa, unidentified
  REGION 1..84: note = Description of Unknown:cds_NZ_WFIY01000004.1_cds_WP_155863867.1_1771 target sequence
FESSLGIPGNCGAHVISNEDEFVSAYNEGIDMFKSDPEGFANAVSSTLKVDKEFVINTMKNSVLKVEKLNDDKDFAELVKKFIN

SEQ ID NO: 39771 - protein, 85 aa, unidentified
  REGION 1..85: note = Description of Unknown:cds_NZ_WFIY01000004.1_cds_WP_155863867.1_1771 target sequence
SKEGKADVILDSTVSLVKRGLRINYITIKELLSVYPNVGKKIGVWRKGSAADVLIRALLATKGINAELVYADDMRKILEMFKNKE

SEQ ID NO: 39772 - protein, 85 aa, unidentified
  REGION 1..85: note = Description of Unknown:cds_NZ_WFIY01000004.1_cds_WP_155863867.1_1771 target sequence
IDSAVVASAFGKGITFESSLGIPGNCGAHVISNEDEFVSAYNEGIDMFKSDPEGFANAVSSTLKVDKEFVINTMKNSVLKVEKLN

SEQ ID NO: 39773 - protein, 85 aa, unidentified
  REGION 1..85: note = Description of Unknown:cds_NZ_WFIY01000004.1_cds_WP_155863909.1_1821 target sequence
IGGVRDRTTEALLRFGERCKLILKAAISIAESNDKKELGDFDYKTLVEKLQEVGLDKDPKMILRALERDYGIIETTYKSANQHWW

SEQ ID NO: 39774 - protein, 85 aa, unidentified
  REGION 1..85: note = Description of Unknown:cds_NZ_WFIY01000004.1_cds_WP_155863909.1_1821 target sequence
RFINIEEVKEAIGDEIEDPEIQLIKIQANSLNLAELERKLRFMLNKPVLSEVDRALFKKIAFDELNYVMEVYRKASMYEETYDIA

SEQ ID NO: 39775 - protein, 84 aa, unidentified
  REGION 1..84: note = Description of Unknown:cds_NZ_WFIY01000004.1_cds_WP_155863909.1_1821 target sequence
MLNKPVLSEVDRALFKKIAFDELNYVMEVYRKASMYEETYDIAEKIKTILALATKVSMKIGKNYVQNRVNDLVDPQKEPQAYLK

SEQ ID NO: 39776 - protein, 85 aa, unidentified
  REGION 1..85: note = Description of Unknown:cds_NZ_WFIY01000004.1_cds_WP_155863909.1_1821 target sequence
SIAESNDKKELGDFDYKTLVEKLQEVGLDKDPKMILRALERDYGIIETTYKSANQHWWRFINIEEVKEAIGDEIEDPEIQLIKIQ

SEQ ID NO: 39777 - protein, 85 aa, unidentified
  REGION 1..85: note = Description of Unknown:cds_NZ_WFIY01000004.1_cds_WP_155863909.1_1821 target sequence
ANSLNLAELERKLRFMLNKPVLSEVDRALFKKIAFDELNYVMEVYRKASMYEETYDIAEKIKTILALATKVSMKIGKNYVQNRVN

SEQ ID NO: 39778 - protein, 85 aa, unidentified
  REGION 1..85: note = Description of Unknown:cds_NZ_WFIY01000004.1_cds_WP_155864181.1_2140 target sequence
DPNWANTPVEIREGIRYLSAHFYPEGIMDRWKELKKLSFNAAKMIKLYSLQQVIEEIEHFDFFKEYFKEEPLKDVKLPASYIELF

SEQ ID NO: 39779 - protein, 85 aa, unidentified
  REGION 1..85: note = Description of Unknown:cds_NZ_WFIY01000004.1_cds_WP_155864181.1_2140 target sequence
DGLIEDFKTPKWKDNVATRFHMITEGILATVGLKILNEVSRKYNLKQFNEGIRIIIEDEARHVNFGFSLIDDKEYAIKRIEELYP

SEQ ID NO: 39780 - protein, 84 aa, unidentified
  REGION 1..84: note = Description of Unknown:cds_NZ_WFIY01000004.1_cds_WP_155864181.1_2140 target sequence
YNLKQFNEGIRIIIEDEARHVNFGFSLIDDKEYAIKRIEELYPLAVRIVKDGREKIEPLGYSLDELIGLMEELKNARIEKLSRE

SEQ ID NO: 39781 - protein, 85 aa, unidentified
  REGION 1..85: note = Description of Unknown:cds_NZ_WFIY01000004.1_cds_WP_155864181.1_2140 target sequence
MDRWKELKKLSFNAAKMIKLYSLQQVIEEIEHFDFFKEYFKEEPLKDVKLPASYIELFDGLIEDFKTPKWKDNVATRFHMITEGI

SEQ ID NO: 39782 - protein, 85 aa, unidentified
  REGION 1..85: note = Description of Unknown:cds_NZ_WFIY01000004.1_cds_WP_155864181.1_2140 target sequence
LATVGLKILNEVSRKYNLKQFNEGIRIIIEDEARHVNFGFSLIDDKEYAIKRIEELYPLAVRIVKDGREKIEPLGYSLDELIGLM

SEQ ID NO: 39783 - protein, 85 aa, unidentified
  REGION 1..85: note = Description of Unknown:cds_NC_003214.2_cds_NP_445721.1_56 target sequence
SSNLAYLVYESMTSGLSSVSFYVLDTSNNQHPFHVLVTSENTYYYFDSSESVYIATSFNISVNGNVILTVSLNNLQKTGNMTLIV

SEQ ID NO: 39784 - protein, 85 aa, unidentified
  REGION 1..85: note = Description of Unknown:cds_NC_003214.2_cds_NP_445721.1_56 target sequence
VVTLDIGTSLPGNLGTYVIQAIQALFAGVLINLGCSATAYYTIVNEQTGSSSTGSTGLSFSLTNDSQFVASGSISYSQYEVVNIT

SEQ ID NO: 39785 - protein, 84 aa, unidentified
  REGION 1..84: note = Description of Unknown:cds_NC_003214.2_cds_NP_445721.1_56 target sequence
IVNEQTGSSSTGSTGLSFSLTNDSQFVASGSISYSQYEVVNITQIIISCSTINVKENMITNTLTSSECTSSSGCTYTITITFTS

SEQ ID NO: 39786 - protein, 85 aa, unidentified
  REGION 1..85: note = Description of Unknown:cds_NC_003214.2_cds_NP_445721.1_56 target sequence
NNQHPFHVLVTSENTYYYFDSSESVYIATSFNISVNGNVILTVSLNNLQKTGNMTLIVVVTLDIGTSLPGNLGTYVIQAIQALFA

SEQ ID NO: 39787 - protein, 85 aa, unidentified
  REGION 1..85: note = Description of Unknown:cds_NC_003214.2_cds_NP_445721.1_56 target sequence
GVLINLGCSATAYYTIVNEQTGSSSTGSTGLSFSLTNDSQFVASGSISYSQYEVVNITQIIISCSTINVKENMITNTLTSSECTS

SEQ ID NO: 39788 - protein, 85 aa, unidentified
  REGION 1..85: note = Description of Unknown:cds_NC_029316.1_cds_YP_009230267.1_14 target sequence
INERWDTENRLSQYIPLYLLRFTLPSKFLAKERTSVDKKEDYTNILITINNALASKLESIRRSVYEEIGKGFVYIELMGWIAVDD

SEQ ID NO: 39789 - protein, 85 aa, unidentified
  REGION 1..85: note = Description of Unknown:cds_NC_029316.1_cds_YP_009230267.1_14 target sequence
NGVNHANIANKRIVDELTKVVESGKVTFRDGRVILIPPQLIEKLRRTIANHYYVKAIRILVDYDNAKEIIEQALSQLREGIETLQ

SEQ ID NO: 39790 - protein, 84 aa, unidentified
  REGION 1..84: note = Description of Unknown:cds_NC_029316.1_cds_YP_009230267.1_14 target sequence
KLRRTIANHYYVKAIRILVDYDNAKEIIEQALSQLREGIETLQQKIQEAEAEKKLASLRKYQSDRQKIERLYESFLDFYKARFS

SEQ ID NO: 39791 - protein, 85 aa, unidentified
  REGION 1..85: note = Description of Unknown:cds_NC_029316.1_cds_YP_009230267.1_14 target sequence
FLAKERTSVDKKEDYTNILITINNALASKLESIRRSVYEEIGKGFVYIELMGWIAVDDNGVNHANIANKRIVDELTKVVESGKVT

SEQ ID NO: 39792 - protein, 85 aa, unidentified
  REGION 1..85: note = Description of Unknown:cds_NC_029316.1_cds_YP_009230267.1_14 target sequence
FRDGRVILIPPQLIEKLRRTIANHYYVKAIRILVDYDNAKEIIEQALSQLREGIETLQQKIQEAEAEKKLASLRKYQSDRQKIER

SEQ ID NO: 39793 - protein, 85 aa, unidentified
  REGION 1..85: note = Description of Unknown:cds_NC_030656.1_cds_YP_009268732.1_17 target sequence
AATKPVKTLYDMFADRYMELLAIYAVPTNITCAIHIGNISGTLNGCALKIINRCNNNTKLSYSLLTQAFLETISKLPINEQKKIA

SEQ ID NO: 39794 - protein, 85 aa, unidentified
  REGION 1..85: note = Description of Unknown:cds_NC_030656.1_cds_YP_009268732.1_17 target sequence
DKVGIDLNLKPGETSKLEQQCSATASVTSIIDVQNLNIGTCVSPPGQHILIQFINTGSASANCGINTILQALVNNYEIPIIKPTI

SEQ ID NO: 39795 - protein, 84 aa, unidentified
  REGION 1..84: note = Description of Unknown:cds_NC_030656.1_cds_YP_009268732.1_17 target sequence
SPPGQHILIQFINTGSASANCGINTILQALVNNYEIPIIKPTISFNNPWIIALSVIITFIIIISVSSLRRRIKLAYKYGATLRV

SEQ ID NO: 39796 - protein, 85 aa, unidentified
  REGION 1..85: note = Description of Unknown:cds_NC_030656.1_cds_YP_009268732.1_17 target sequence
TNITCAIHIGNISGTLNGCALKIINRCNNNTKLSYSLLTQAFLETISKLPINEQKKIADKVGIDLNLKPGETSKLEQQCSATASV

SEQ ID NO: 39797 - protein, 85 aa, unidentified
  REGION 1..85: note = Description of Unknown:cds_NC_030656.1_cds_YP_009268732.1_17 target sequence
TSIIDVQNLNIGTCVSPPGQHILIQFINTGSASANCGINTILQALVNNYEIPIIKPTISFNNPWIIALSVIITFIIIISVSSLRR

SEQ ID NO: 39798 - protein, 85 aa, unidentified
  REGION 1..85: note = Description of Unknown:cds_NC_003243.1_cds_NP_478341.1_3 target sequence
RKTVNTTDKMNFLRKIVRNCKDEDDQKPPLASTLPNDDDLWLPPPEYVPLTEITGKKNMRNLCINGEVKVCSPNGYSFRILRHIL

SEQ ID NO: 39799 - protein, 85 aa, unidentified
  REGION 1..85: note = Description of Unknown:cds_NC_003243.1_cds_NP_478341.1_3 target sequence
ESLDEIYSGNHRMIGLVKVVMDLTLSGAPCPEGMNWVYKLRRTLIFQWAESRGPLDGEELEYSQEITWDDDSEFVGLQIRVSARQ

SEQ ID NO: 39800 - protein, 84 aa, unidentified
  REGION 1..84: note = Description of Unknown:cds_NC_003243.1_cds_NP_478341.1_3 target sequence
TLIFQWAESRGPLDGEELEYSQEITWDDDSEFVGLQIRVSARQCHIQGRIWCINMNSRACQLWSDMSLKTQQSEDHKNSSLLLE

SEQ ID NO: 39801 - protein, 85 aa, unidentified
  REGION 1..85: note = Description of Unknown:cds_NC_003243.1_cds_NP_478341.1_3 target sequence
PPLASTLPNDDDLWLPPPEYVPLTEITGKKNMRNLCINGEVKVCSPNGYSFRILRHILESLDEIYSGNHRMIGLVKVVMDLTLSG

SEQ ID NO: 39802 - protein, 85 aa, unidentified
  REGION 1..85: note = Description of Unknown:cds_NC_003243.1_cds_NP_478341.1_3 target sequence
APCPEGMNWVYKLRRTLIFQWAESRGPLDGEELEYSQEITWDDDSEFVGLQIRVSARQCHIQGRIWCINMNSRACQLWSDMSLKT

SEQ ID NO: 39803 - protein, 85 aa, unidentified
  REGION 1..85: note = Description of Unknown:hvTR_P52471 target sequence
NKKKMDLPKCQSITVACEGECSQMYNLHNPLTFEMGLGNIFICVRCFKIHFCNMLEDCNLINTHEGCVCSKTGLFYNGWMPAYSH

SEQ ID NO: 39804 - protein, 85 aa, unidentified
  REGION 1..85: note = Description of Unknown:hvTR_P52471 target sequence
TCMEPTEEPNMETVNVVVVLLSYVYSFLIQNKARYSNIIRDIIKDGKFIEQVENAVFCTFNKVFKNSTLNKLPLTTVSQLFVQLI

SEQ ID NO: 39805 - protein, 84 aa, unidentified
  REGION 1..84: note = Description of Unknown:hvTR_P52471 target sequence
IIKDGKFIEQVENAVFCTFNKVFKNSTLNKLPLTTVSQLFVQLIIGGHAEGTIYDNNVIRVSRRKREDNILKKMRIEYGNALAL

SEQ ID NO: 39806 - protein, 85 aa, unidentified
  REGION 1..85: note = Description of Unknown:hvTR_P52471 target sequence
HNPLTFEMGLGNIFICVRCFKIHFCNMLEDCNLINTHEGCVCSKTGLFYNGWMPAYSHTCMEPTEEPNMETVNVVVVLLSYVYSF

SEQ ID NO: 39807 - protein, 85 aa, unidentified
  REGION 1..85: note = Description of Unknown:hvTR_P52471 target sequence
LIQNKARYSNIIRDIIKDGKFIEQVENAVFCTFNKVFKNSTLNKLPLTTVSQLFVQLIIGGHAEGTIYDNNVIRVSRRKREDNIL

SEQ ID NO: 39808 - protein, 85 aa, unidentified
  REGION 1..85: note = Description of Unknown:vpeps_4KFR_1 target sequence
NPDDIVVLVGRKKSGKSYLIKHYFIPVLKAHKISYIIDDHNLLRSGSEYSKFGYNATSLSDIVSKQYVVVYDRAKNDDFFEKLWQ

SEQ ID NO: 39809 - protein, 85 aa, unidentified
  REGION 1..85: note = Description of Unknown:vpeps_4KFR_1 target sequence
ASKLHSKKYGTTVLIIDEAYYHFKYKQKVTPAIDEALHANRHAGLGLILSTQRVYDLMPIVYKQADLIIMFYTREPNELRWISKY

SEQ ID NO: 39810 - protein, 85 aa, unidentified
  REGION 1..85: note = Description of Unknown:vpeps_4KFR_1 target sequence
HAGLGLILSTQRVYDLMPIVYKQADLIIMFYTREPNELRWISKYISAEAAEKVKTLKQYHFLIYDVNSQTIKIHKPILEHHHHHH

SEQ ID NO: 39811 - protein, 85 aa, unidentified
  REGION 1..85: note = Description of Unknown:vpeps_4KFR_1 target sequence
LKAHKISYIIDDHNLLRSGSEYSKFGYNATSLSDIVSKQYVVVYDRAKNDDFFEKLWQASKLHSKKYGTTVLIIDEAYYHFKYKQ

SEQ ID NO: 39812 - protein, 85 aa, unidentified
  REGION 1..85: note = Description of Unknown:vpeps_4KFR_1 target sequence
KVTPAIDEALHANRHAGLGLILSTQRVYDLMPIVYKQADLIIMFYTREPNELRWISKYISAEAAEKVKTLKQYHFLIYDVNSQTI

SEQ ID NO: 39813 - protein, 85 aa, unidentified
  REGION 1..85: note = Description of Unknown:vpeps_2W8M_1 target sequence
TETDFKLKYWGNQEQDYILPTVGLGREYLVLGKLLISLSKWRAKGLIDFDVYLRPTGVGTLTNTINYEYYKGLEDKYDLTLYIRA

SEQ ID NO: 39814 - protein, 85 aa, unidentified
  REGION 1..85: note = Description of Unknown:vpeps_2W8M_1 target sequence
KDSYYPLLWIDITGSSWTEEQSKERYGESIYAILSVKVETAKKYDVLGRVFFIHYNDTEDKLKCISALQILNLERQNKIKKDKFE

SEQ ID NO: 39815 - protein, 85 aa, unidentified
  REGION 1..85: note = Description of Unknown:vpeps_2W8M_1 target sequence
KKYDVLGRVFFIHYNDTEDKLKCISALQILNLERQNKIKKDKFERGAKSEYYLIPTSYWKNLTELRIALRGFYQSFKEYLARSNK

SEQ ID NO: 39816 - protein, 85 aa, unidentified
  REGION 1..85: note = Description of Unknown:vpeps_2W8M_1 target sequence
YLVLGKLLISLSKWRAKGLIDFDVYLRPTGVGTLTNTINYEYYKGLEDKYDLTLYIRAKDSYYPLLWIDITGSSWTEEQSKERYG

SEQ ID NO: 39817 - protein, 85 aa, unidentified
  REGION 1..85: note = Description of Unknown:vpeps_2W8M_1 target sequence
ESIYAILSVKVETAKKYDVLGRVFFIHYNDTEDKLKCISALQILNLERQNKIKKDKFERGAKSEYYLIPTSYWKNLTELRIALRG

SEQ ID NO: 39818 - protein, 85 aa, unidentified
  REGION 1..85: note = Description of Unknown:cds_NZ_WFIY01000004.1_cds_WP_155862615.1_394 target sequence
SSLTYLKKYELPPLPYNLDALEPYISKEIIDVHYNGHHKGYVNGANSFVDRVNKILKGEISSGQYDIQGLLRGLVFNINGHKLHS

SEQ ID NO: 39819 - protein, 85 aa, unidentified
  REGION 1..85: note = Description of Unknown:cds_NZ_WFIY01000004.1_cds_WP_155862615.1_394 target sequence
LYWQSMAPAGKGGGKPGGVIGDLIEKQYGSFEKFKALFTEAANSLPGTGWTVLYYEVENGNLQIMTFENHFQNHIAELPILLILD

SEQ ID NO: 39820 - protein, 84 aa, unidentified
  REGION 1..84: note = Description of Unknown:cds_NZ_WFIY01000004.1_cds_WP_155862615.1_394 target sequence
ANSLPGTGWTVLYYEVENGNLQIMTFENHFQNHIAELPILLILDEFEHAYYLQYKNKRADYVNNWWNLVNWDFADKKLQQYMKK

SEQ ID NO: 39821 - protein, 85 aa, unidentified
  REGION 1..85: note = Description of Unknown:cds_NZ_WFIY01000004.1_cds_WP_155862615.1_394 target sequence
EIIDVHYNGHHKGYVNGANSFVDRVNKILKGEISSGQYDIQGLLRGLVFNINGHKLHSLYWQSMAPAGKGGGKPGGVIGDLIEKQ

SEQ ID NO: 39822 - protein, 85 aa, unidentified
  REGION 1..85: note = Description of Unknown:cds_NZ_WFIY01000004.1_cds_WP_155862615.1_394 target sequence
YGSFEKFKALFTEAANSLPGTGWTVLYYEVENGNLQIMTFENHFQNHIAELPILLILDEFEHAYYLQYKNKRADYVNNWWNLVNW

SEQ ID NO: 39823 - protein, 85 aa, unidentified
  REGION 1..85: note = Description of Unknown:cds_NZ_WFIY01000004.1_cds_WP_155862790.1_608 target sequence
ISLILSEENPTLPNDIKLVFNDVKVFYMKYYPGHGIRKDEQERMYKELSIIKNEVEKGDVIVYARSYGVFYRDGMNRLKKFFSKP

SEQ ID NO: 39824 - protein, 85 aa, unidentified
  REGION 1..85: note = Description of Unknown:cds_NZ_WFIY01000004.1_cds_WP_155862790.1_608 target sequence
VVISTEAIIDRLRELGAKKVYVVTPYNQRRHDYEIKWIQGFGFQVVGSIALGRTGGHAIASTPHELVINAVKVAQESYADAIYVA

SEQ ID NO: 39825 - protein, 84 aa, unidentified
  REGION 1..84: note = Description of Unknown:cds_NZ_WFIY01000004.1_cds_WP_155862790.1_608 target sequence
GFQVVGSIALGRTGGHAIASTPHELVINAVKVAQESYADAIYVACTILSTLPILDKLSGKLPVVTAASAIVDKVKEIINLRNNV

SEQ ID NO: 39826 - protein, 85 aa, unidentified
  REGION 1..85: note = Description of Unknown:cds_NZ_WFIY01000004.1_cds_WP_155862790.1_608 target sequence
MKYYPGHGIRKDEQERMYKELSIIKNEVEKGDVIVYARSYGVFYRDGMNRLKKFFSKPVVISTEAIIDRLRELGAKKVYVVTPYN

SEQ ID NO: 39827 - protein, 85 aa, unidentified
  REGION 1..85: note = Description of Unknown:cds_NZ_WFIY01000004.1_cds_WP_155862790.1_608 target sequence
QRRHDYEIKWIQGFGFQVVGSIALGRTGGHAIASTPHELVINAVKVAQESYADAIYVACTILSTLPILDKLSGKLPVVTAASAIV

SEQ ID NO: 39828 - protein, 85 aa, unidentified
  REGION 1..85: note = Description of Unknown:cds_NZ_WFIY01000004.1_cds_WP_155862837.1_669 target sequence
EANLVSLCKKCKALGYFGSYVRKEDYVEGVSDINIFAISDDKSLLLELGSYNGISPIVISEEKFREICESGDIICYYILYDSKLI

SEQ ID NO: 39829 - protein, 85 aa, unidentified
  REGION 1..85: note = Description of Unknown:cds_NZ_WFIY01000004.1_cds_WP_155862837.1_669 target sequence
CGELPKVEFTINVNTCERLKMSSLSFIKLSFEAFKRNDEIGTLENAYRAIRSLIQHISCSSLRKIPISNSEIKETCIKLNLNFCK

SEQ ID NO: 39830 - protein, 84 aa, unidentified
  REGION 1..84: note = Description of Unknown:cds_NZ_WFIY01000004.1_cds_WP_155862837.1_669 target sequence
TLENAYRAIRSLIQHISCSSLRKIPISNSEIKETCIKLNLNFCKEFDNLILLRNMKSPLTLWALNRIYNIINSQIKMDFSSTPI

SEQ ID NO: 39831 - protein, 85 aa, unidentified
  REGION 1..85: note = Description of Unknown:cds_NZ_WFIY01000004.1_cds_WP_155862837.1_669 target sequence
EGVSDINIFAISDDKSLLLELGSYNGISPIVISEEKFREICESGDIICYYILYDSKLICGELPKVEFTINVNTCERLKMSSLSFI

SEQ ID NO: 39832 - protein, 85 aa, unidentified
  REGION 1..85: note = Description of Unknown:cds_NZ_WFIY01000004.1_cds_WP_155862837.1_669 target sequence
KLSFEAFKRNDEIGTLENAYRAIRSLIQHISCSSLRKIPISNSEIKETCIKLNLNFCKEFDNLILLRNMKSPLTLWALNRIYNII

SEQ ID NO: 39833 - protein, 85 aa, unidentified
  REGION 1..85: note = Description of Unknown:cds_NZ_WFIY01000004.1_cds_WP_013775315.1_1096 target sequence
EEELKDKLKEVLKDKRYLQVLQHLKKANVDYGKSIMLNTKIPIQEVVDILDKLEALGLIERVHGATLKNTEAKFKLSSEVHKHHT

SEQ ID NO: 39834 - protein, 85 aa, unidentified
  REGION 1..85: note = Description of Unknown:cds_NZ_WFIY01000004.1_cds_WP_013775315.1_1096 target sequence
YYRLTREGDHLLRNLDEKELIKAYIDLVKNDDLAKDILRLAEELNADHALTYAKLTHKTLEEVTPKLEELERMGLLEEAKAKIIK

SEQ ID NO: 39835 - protein, 84 aa, unidentified
  REGION 1..84: note = Description of Unknown:cds_NZ_WFIY01000004.1_cds_WP_013775315.1_1096 target sequence
EELNADHALTYAKLTHKTLEEVTPKLEELERMGLLEEAKAKIIKFGDRKSKPKKETRTHHKYYGLSRIGELVVREMKRRGIIPK

SEQ ID NO: 39836 - protein, 85 aa, unidentified
  REGION 1..85: note = Description of Unknown:cds_NZ_WFIY01000004.1_cds_WP_013775315.1_1096 target sequence
NVDYGKSIMLNTKIPIQEVVDILDKLEALGLIERVHGATLKNTEAKFKLSSEVHKHHTYYRLTREGDHLLRNLDEKELIKAYIDL

SEQ ID NO: 39837 - protein, 85 aa, unidentified
  REGION 1..85: note = Description of Unknown:cds_NZ_WFIY01000004.1_cds_WP_013775315.1_1096 target sequence
VKNDDLAKDILRLAEELNADHALTYAKLTHKTLEEVTPKLEELERMGLLEEAKAKIIKFGDRKSKPKKETRTHHKYYGLSRIGEL

SEQ ID NO: 39838 - protein, 85 aa, unidentified
  REGION 1..85: note = Description of Unknown:cds_NC_007409.1_cds_YP_319849.1_18 target sequence
VLELFRKKKVEPPKITVTLTDLMMFLPTLRKHVIPYQIKCDYCSGIVTDANGFVLYRRIPIPDAVLRALINFSNAIDQQLKDTIF

SEQ ID NO: 39839 - protein, 85 aa, unidentified
  REGION 1..85: note = Description of Unknown:cds_NC_007409.1_cds_YP_319849.1_18 target sequence
YFSMAKREVIGRMVYKAKLNALKKGNTKNIQKITAELPRLLYRILYPYKATTSILYIDGAVYPDIVDFVALREEEKTYISNNFSF

SEQ ID NO: 39840 - protein, 84 aa, unidentified
  REGION 1..84: note = Description of Unknown:cds_NC_007409.1_cds_YP_319849.1_18 target sequence
RILYPYKATTSILYIDGAVYPDIVDFVALREEEKTYISNNFSFYLYADSSYVYAIMLTTREQILRIKTLLANRDVPLRSLDGQQ

SEQ ID NO: 39841 - protein, 85 aa, unidentified
  REGION 1..85: note = Description of Unknown:cds_NC_007409.1_cds_YP_319849.1_18 target sequence
TLRKHVIPYQIKCDYCSGIVTDANGFVLYRRIPIPDAVLRALINFSNAIDQQLKDTIFYFSMAKREVIGRMVYKAKLNALKKGNT

SEQ ID NO: 39842 - protein, 85 aa, unidentified
  REGION 1..85: note = Description of Unknown:cds_NC_007409.1_cds_YP_319849.1_18 target sequence
KNIQKITAELPRLLYRILYPYKATTSILYIDGAVYPDIVDFVALREEEKTYISNNFSFYLYADSSYVYAIMLTTREQILRIKTLL

SEQ ID NO: 39843 - protein, 85 aa, unidentified
  REGION 1..85: note = Description of Unknown:hvTR_Q0NPX3 target sequence
AWSITNKADTSSFTKMAEIRAHLRNSAENKDKNEDIFPEDVIIPSTKPKTKRAAAPRKPAATKRSTKKDKEKEEVEEEVVIEEYH

SEQ ID NO: 39844 - protein, 85 aa, unidentified
  REGION 1..85: note = Description of Unknown:hvTR_Q0NPX3 target sequence
QTTEENSPPPSSSPGVGDIVESVAAVELDDSDGDDEPMAQAGAKVNHSARSDLSDLKVATDNIVKDLKKIITRISAVSTVLEDVQ

SEQ ID NO: 39845 - protein, 84 aa, unidentified
  REGION 1..84: note = Description of Unknown:hvTR_Q0NPX3 target sequence
AGAKVNHSARSDLSDLKVATDNIVKDLKKIITRISAVSTVLEDVQAAGISRQFTSMTKAITTLSDLVTEGKSKVVRKKVKTCKK

SEQ ID NO: 39846 - protein, 85 aa, unidentified
  REGION 1..85: note = Description of Unknown:hvTR_Q0NPX3 target sequence
ENKDKNEDIFPEDVIIPSTKPKTKRAAAPRKPAATKRSTKKDKEKEEVEEEVVIEEYHQTTEENSPPPSSSPGVGDIVESVAAVE

SEQ ID NO: 39847 - protein, 85 aa, unidentified
  REGION 1..85: note = Description of Unknown:hvTR_Q0NPX3 target sequence
LDDSDGDDEPMAQAGAKVNHSARSDLSDLKVATDNIVKDLKKIITRISAVSTVLEDVQAAGISRQFTSMTKAITTLSDLVTEGKS

SEQ ID NO: 39848 - protein, 85 aa, unidentified
  REGION 1..85: note = Description of Unknown:hvTR_Q5IXT0 target sequence
AWSITNKADTSSFTKMAEIRAHLRNSAENKDKNEDIFPEDVIIPSTKPKTKRTTTPRKPAATKRSTKKDKEKEEVEEVIIEEYHQ

SEQ ID NO: 39849 - protein, 85 aa, unidentified
  REGION 1..85: note = Description of Unknown:hvTR_Q5IXT0 target sequence
TTEENSPPPSSSPGVGDIVESVAAVELDDSDGDDEPMVQVEAGKVNHSTRSDLSDLKVATDNIVKDLKKIITRISAVSTVLEDVQ

SEQ ID NO: 39850 - protein, 84 aa, unidentified
  REGION 1..84: note = Description of Unknown:hvTR_Q5IXT0 target sequence
EAGKVNHSTRSDLSDLKVATDNIVKDLKKIITRISAVSTVLEDVQAAGISRQFTSMTKAITTLSDLVTEGKSKVVRKKVKTCKK

SEQ ID NO: 39851 - protein, 85 aa, unidentified
  REGION 1..85: note = Description of Unknown:hvTR_Q5IXT0 target sequence
ENKDKNEDIFPEDVIIPSTKPKTKRTTTPRKPAATKRSTKKDKEKEEVEEVIIEEYHQTTEENSPPPSSSPGVGDIVESVAAVEL

SEQ ID NO: 39852 - protein, 85 aa, unidentified
  REGION 1..85: note = Description of Unknown:hvTR_Q5IXT0 target sequence
DDSDGDDEPMVQVEAGKVNHSTRSDLSDLKVATDNIVKDLKKIITRISAVSTVLEDVQAAGISRQFTSMTKAITTLSDLVTEGKS

SEQ ID NO: 39853 - protein, 85 aa, unidentified
  REGION 1..85: note = Description of Unknown:cds_NZ_WFIY01000004.1_cds_WP_155862609.1_386 target sequence
RPLIVASLPIYKEDDLLKARNIKEADMIELRLDYSQKLISLEKIKEILGDLKEKLILTIRDVNEGGVYKIADSEKAKYLQEADLE

SEQ ID NO: 39854 - protein, 85 aa, unidentified
  REGION 1..85: note = Description of Unknown:cds_NZ_WFIY01000004.1_cds_WP_155862609.1_386 target sequence
GFIYDVEASFLERFDVPFKGKIVSAHYFNELPKYEEVEKIIKKYSQDALFIKIATIGKGEYKELLTKLLKFDKIIVLPMGVDPLE

SEQ ID NO: 39855 - protein, 84 aa, unidentified
  REGION 1..84: note = Description of Unknown:cds_NZ_WFIY01000004.1_cds_WP_155862609.1_386 target sequence
IKKYSQDALFIKIATIGKGEYKELLTKLLKFDKIIVLPMGVDPLERIALGILGSRLIYTFVETQTAPGQMHYSKAFKIISCLYD

SEQ ID NO: 39856 - protein, 85 aa, unidentified
  REGION 1..85: note = Description of Unknown:cds_NZ_WFIY01000004.1_cds_WP_155862609.1_386 target sequence
IELRLDYSQKLISLEKIKEILGDLKEKLILTIRDVNEGGVYKIADSEKAKYLQEADLEGFIYDVEASFLERFDVPFKGKIVSAHY

SEQ ID NO: 39857 - protein, 85 aa, unidentified
  REGION 1..85: note = Description of Unknown:cds_NZ_WFIY01000004.1_cds_WP_155862609.1_386 target sequence
FNELPKYEEVEKIIKKYSQDALFIKIATIGKGEYKELLTKLLKFDKIIVLPMGVDPLERIALGILGSRLIYTFVETQTAPGQMHY

SEQ ID NO: 39858 - protein, 85 aa, unidentified
  REGION 1..85: note = Description of Unknown:cds_NZ_WFIY01000004.1_cds_WP_155862681.1_478 target sequence
LYKLIRYIKSGMDDWELWKKKAYERMIRDKEIGYLDPDIYDVLVTFFKREKSFTYSSCSGRITIIDSYLPWIRKNSTIIFKNHLG

SEQ ID NO: 39859 - protein, 85 aa, unidentified
  REGION 1..85: note = Description of Unknown:cds_NZ_WFIY01000004.1_cds_WP_155862681.1_478 target sequence
ITEDDVKDILEKPQVYRLWLVSQGPILHVYTKDWEEAWDIIKIARNAGFKHSGVLTVNNKGILVELKTGIKLVQLLRENSEQQVS

SEQ ID NO: 39860 - protein, 84 aa, unidentified
  REGION 1..84: note = Description of Unknown:cds_NZ_WFIY01000004.1_cds_WP_155862681.1_478 target sequence
IKIARNAGFKHSGVLTVNNKGILVELKTGIKLVQLLRENSEQQVSEDQIKTLVKISNEVLKKGKDKLWELQKLVEESLKAKVTA

SEQ ID NO: 39861 - protein, 85 aa, unidentified
  REGION 1..85: note = Description of Unknown:cds_NZ_WFIY01000004.1_cds_WP_155862681.1_478 target sequence
RDKEIGYLDPDIYDVLVTFFKREKSFTYSSCSGRITIIDSYLPWIRKNSTIIFKNHLGITEDDVKDILEKPQVYRLWLVSQGPIL

SEQ ID NO: 39862 - protein, 85 aa, unidentified
  REGION 1..85: note = Description of Unknown:cds_NZ_WFIY01000004.1_cds_WP_155862681.1_478 target sequence
HVYTKDWEEAWDIIKIARNAGFKHSGVLTVNNKGILVELKTGIKLVQLLRENSEQQVSEDQIKTLVKISNEVLKKGKDKLWELQK

SEQ ID NO: 39863 - protein, 85 aa, unidentified
  REGION 1..85: note = Description of Unknown:cds_NZ_WFIY01000004.1_cds_WP_205737134.1_689 target sequence
VRIDVHQHLGIKWVNAKEISEYFDIILLNPAYKYSCQCCVDGFYQQYLWLTNKNEHREKYRLLGIYNPKCRVPLEVELGRQYEKG

SEQ ID NO: 39864 - protein, 85 aa, unidentified
  REGION 1..85: note = Description of Unknown:cds_NZ_WFIY01000004.1_cds_WP_205737134.1_689 target sequence
IVGIVLTPEKHGYKIQDIDKVLEFAEDHKMPIFIKTMQDLTQKIQEFTHLTFVVLGSYYPMEERLYNLLKYDNVFFETSGVPESF

SEQ ID NO: 39865 - protein, 84 aa, unidentified
  REGION 1..84: note = Description of Unknown:cds_NZ_WFIY01000004.1_cds_WP_205737134.1_689 target sequence
QKIQEFTHLTFVVLGSYYPMEERLYNLLKYDNVFFETSGVPESFLNKIPTDRLIYGSGYPYLPFKNVHLIDVISKNALKIISIH

SEQ ID NO: 39866 - protein, 85 aa, unidentified
  REGION 1..85: note = Description of Unknown:cds_NZ_WFIY01000004.1_cds_WP_205737134.1_689 target sequence
LNPAYKYSCQCCVDGFYQQYLWLTNKNEHREKYRLLGIYNPKCRVPLEVELGRQYEKGIVGIVLTPEKHGYKIQDIDKVLEFAED

SEQ ID NO: 39867 - protein, 85 aa, unidentified
  REGION 1..85: note = Description of Unknown:cds_NZ_WFIY01000004.1_cds_WP_205737134.1_689 target sequence
HKMPIFIKTMQDLTQKIQEFTHLTFVVLGSYYPMEERLYNLLKYDNVFFETSGVPESFLNKIPTDRLIYGSGYPYLPFKNVHLID

SEQ ID NO: 39868 - protein, 85 aa, unidentified
  REGION 1..85: note = Description of Unknown:cds_NZ_WFIY01000004.1_cds_WP_155863032.1_919 target sequence
DETVVKKTRANKKKVVIGISGASGIIYGLRAVEVLNEYGYDQYVIITNAAIKVAEKENGIDLVHEVRKFTSNIFMENEIDAPTSS

SEQ ID NO: 39869 - protein, 85 aa, unidentified
  REGION 1..85: note = Description of Unknown:cds_NZ_WFIY01000004.1_cds_WP_155863032.1_919 target sequence
SSFTVTTKGMIIIPCSINTLAYIAHGFASNLLARSAINYLRSRQKLVLVIRETPLGQIELYNALKIAKAGGIIMPASPGFYIKPT

SEQ ID NO: 39870 - protein, 84 aa, unidentified
  REGION 1..84: note = Description of Unknown:cds_NZ_WFIY01000004.1_cds_WP_155863032.1_919 target sequence
RSRQKLVLVIRETPLGQIELYNALKIAKAGGIIMPASPGFYIKPTKIQDLIDFIVGKALDLLGIRNELYKRWSKSDQDPSYQVS

SEQ ID NO: 39871 - protein, 85 aa, unidentified
  REGION 1..85: note = Description of Unknown:cds_NZ_WFIY01000004.1_cds_WP_155863032.1_919 target sequence
GLRAVEVLNEYGYDQYVIITNAAIKVAEKENGIDLVHEVRKFTSNIFMENEIDAPTSSSSFTVTTKGMIIIPCSINTLAYIAHGF

SEQ ID NO: 39872 - protein, 85 aa, unidentified
  REGION 1..85: note = Description of Unknown:cds_NZ_WFIY01000004.1_cds_WP_155863032.1_919 target sequence
ASNLLARSAINYLRSRQKLVLVIRETPLGQIELYNALKIAKAGGIIMPASPGFYIKPTKIQDLIDFIVGKALDLLGIRNELYKRW

SEQ ID NO: 39873 - protein, 85 aa, unidentified
  REGION 1..85: note = Description of Unknown:cds_NZ_WFIY01000004.1_cds_WP_155863139.1_1061 target sequence
ELSEALENYIKEIYELEEVKGQAKVTDLIIAFQVSPGTISKALDRLESLGLITRSNRKLKLTDDGRKIAERLIRSHRLSERLLTD

SEQ ID NO: 39874 - protein, 85 aa, unidentified
  REGION 1..85: note = Description of Unknown:cds_NZ_WFIY01000004.1_cds_WP_155863139.1_1061 target sequence
VIGVDWIRAHEIAHRLEHIWPDDVLDKIDAILGFPSTCPHGHPIPGRMKIPTGKLLSEVNEGEYKVIMIVKEEEWILRNMEMLGI

SEQ ID NO: 39875 - protein, 84 aa, unidentified
  REGION 1..84: note = Description of Unknown:cds_NZ_WFIY01000004.1_cds_WP_155863139.1_1061 target sequence
GHPIPGRMKIPTGKLLSEVNEGEYKVIMIVKEEEWILRNMEMLGIKPGETIKLLKKDEDKFIVQINGKISEITKTLADQVVVNV

SEQ ID NO: 39876 - protein, 85 aa, unidentified
  REGION 1..85: note = Description of Unknown:cds_NZ_WFIY01000004.1_cds_WP_155863139.1_1061 target sequence
LIIAFQVSPGTISKALDRLESLGLITRSNRKLKLTDDGRKIAERLIRSHRLSERLLTDVIGVDWIRAHEIAHRLEHIWPDDVLDK

SEQ ID NO: 39877 - protein, 85 aa, unidentified
  REGION 1..85: note = Description of Unknown:cds_NZ_WFIY01000004.1_cds_WP_155863139.1_1061 target sequence
IDAILGFPSTCPHGHPIPGRMKIPTGKLLSEVNEGEYKVIMIVKEEEWILRNMEMLGIKPGETIKLLKKDEDKFIVQINGKISEI

SEQ ID NO: 39878 - protein, 85 aa, unidentified
  REGION 1..85: note = Description of Unknown:cds_NZ_WFIY01000004.1_cds_WP_155863731.1_1597 target sequence
KRDNYTKDLHNIKCRIISNYGNLPQIDEIYKRLIDFHKLGFVNITHSALELIVAAYLIKEGFKVSVEHESNGKIIDVYAIKGIDV

SEQ ID NO: 39879 - protein, 85 aa, unidentified
  REGION 1..85: note = Description of Unknown:cds_NZ_WFIY01000004.1_cds_WP_155863731.1_1597 target sequence
GIEVETGFVPPSFAGKQEDFLMSRMALKIARYSNLASQFYIAVPSYYIPPVPVELLKDKEKRSEDEIRNLMRLIRKYHNSLDVNL

SEQ ID NO: 39880 - protein, 84 aa, unidentified
  REGION 1..84: note = Description of Unknown:cds_NZ_WFIY01000004.1_cds_WP_155863731.1_1597 target sequence
IAVPSYYIPPVPVELLKDKEKRSEDEIRNLMRLIRKYHNSLDVNLFSLKSAKIDGIIIINTTDLKLKIFDYEDFLKIKKYYSDI

SEQ ID NO: 39881 - protein, 85 aa, unidentified
  REGION 1..85: note = Description of Unknown:cds_NZ_WFIY01000004.1_cds_WP_155863731.1_1597 target sequence
EIYKRLIDFHKLGFVNITHSALELIVAAYLIKEGFKVSVEHESNGKIIDVYAIKGIDVGIEVETGFVPPSFAGKQEDFLMSRMAL

SEQ ID NO: 39882 - protein, 85 aa, unidentified
  REGION 1..85: note = Description of Unknown:cds_NZ_WFIY01000004.1_cds_WP_155863731.1_1597 target sequence
KIARYSNLASQFYIAVPSYYIPPVPVELLKDKEKRSEDEIRNLMRLIRKYHNSLDVNLFSLKSAKIDGIIIINTTDLKLKIFDYE

SEQ ID NO: 39883 - protein, 85 aa, unidentified
  REGION 1..85: note = Description of Unknown:cds_NZ_WFIY01000004.1_cds_WP_155863814.1_1704 target sequence
VLVLFVRHGHSVSNQNKILSHDINNYPLTEEGQIQAKNTAKELSKLKITKIFTSPILRAYQTATIIANELGLIPIIDDRLRERYL

SEQ ID NO: 39884 - protein, 85 aa, unidentified
  REGION 1..85: note = Description of Unknown:cds_NZ_WFIY01000004.1_cds_WP_155863814.1_1704 target sequence
GDLNNKKFDPSDHWKIKLIKGQIEVKGLEPWESMQRRMIEFVNSIKNEEGAVVAVSHYDPIRALIGYILGLDDISVFGISLPNAS

SEQ ID NO: 39885 - protein, 84 aa, unidentified
  REGION 1..84: note = Description of Unknown:cds_NZ_WFIY01000004.1_cds_WP_155863814.1_1704 target sequence
FVNSIKNEEGAVVAVSHYDPIRALIGYILGLDDISVFGISLPNASITAIEMIDGKFRLHSIGSPILSQELLNRLNRYIITINQR

SEQ ID NO: 39886 - protein, 85 aa, unidentified
  REGION 1..85: note = Description of Unknown:cds_NZ_WFIY01000004.1_cds_WP_155863814.1_1704 target sequence
LTEEGQIQAKNTAKELSKLKITKIFTSPILRAYQTATIIANELGLIPIIDDRLRERYLGDLNNKKFDPSDHWKIKLIKGQIEVKG

SEQ ID NO: 39887 - protein, 85 aa, unidentified
  REGION 1..85: note = Description of Unknown:cds_NZ_WFIY01000004.1_cds_WP_155863814.1_1704 target sequence
LEPWESMQRRMIEFVNSIKNEEGAVVAVSHYDPIRALIGYILGLDDISVFGISLPNASITAIEMIDGKFRLHSIGSPILSQELLN

SEQ ID NO: 39888 - protein, 85 aa, unidentified
  REGION 1..85: note = Description of Unknown:cds_NZ_WFIY01000004.1_cds_WP_155863905.1_1813 target sequence
KWISFYSKIREWLRFSYAKDYYSASLLNQLIVEDYTYLLEEIKGKEVAIVGAGPSLTSIKEIDADIIISADGATNYLVKKGIIPD

SEQ ID NO: 39889 - protein, 85 aa, unidentified
  REGION 1..85: note = Description of Unknown:cds_NZ_WFIY01000004.1_cds_WP_155863905.1_1813 target sequence
IVVTDLDGIEIFPEKSVYVVLAHGDNIDKIQKVKKMKYVIGTCQVMPFGRLKMFGGFTDGDRAVILAKIYGAKKILLYAMDFDSN

SEQ ID NO: 39890 - protein, 84 aa, unidentified
  REGION 1..84: note = Description of Unknown:cds_NZ_WFIY01000004.1_cds_WP_155863905.1_1813 target sequence
GTCQVMPFGRLKMFGGFTDGDRAVILAKIYGAKKILLYAMDFDSNYIGKFSKPWYDTDVPISWIKREKLKIAKNIVKEALQQSL

SEQ ID NO: 39891 - protein, 85 aa, unidentified
  REGION 1..85: note = Description of Unknown:cds_NZ_WFIY01000004.1_cds_WP_155863905.1_1813 target sequence
NQLIVEDYTYLLEEIKGKEVAIVGAGPSLTSIKEIDADIIISADGATNYLVKKGIIPDIVVTDLDGIEIFPEKSVYVVLAHGDNI

SEQ ID NO: 39892 - protein, 85 aa, unidentified
  REGION 1..85: note = Description of Unknown:cds_NZ_WFIY01000004.1_cds_WP_155863905.1_1813 target sequence
DKIQKVKKMKYVIGTCQVMPFGRLKMFGGFTDGDRAVILAKIYGAKKILLYAMDFDSNYIGKFSKPWYDTDVPISWIKREKLKIA

SEQ ID NO: 39893 - protein, 85 aa, unidentified
  REGION 1..85: note = Description of Unknown:cds_NC_003214.2_cds_NP_445704.1_39 target sequence
LPQWNLATFVKLLEYAKKNGIVKRYNTYYIKGVALVQCNQVSINVTVAKDHLHMFYDPVMNMYFAYSMPFFYQYPNAQQLFTEGK

SEQ ID NO: 39894 - protein, 85 aa, unidentified
  REGION 1..85: note = Description of Unknown:cds_NC_003214.2_cds_NP_445704.1_39 target sequence
KLCEELEKLTPSATLTPPKNADLDLDRILAKLSITNDKVLTKGEEYKKAKEYTRTHYPECYAIVKEMGTNKDTVKLIEAIFAREW

SEQ ID NO: 39895 - protein, 84 aa, unidentified
  REGION 1..84: note = Description of Unknown:cds_NC_003214.2_cds_NP_445704.1_39 target sequence
KGEEYKKAKEYTRTHYPECYAIVKEMGTNKDTVKLIEAIFAREWETAERTLTLIAMDCVEPECISRLGKFIDLCRETISRREVR

SEQ ID NO: 39896 - protein, 85 aa, unidentified
  REGION 1..85: note = Description of Unknown:cds_NC_003214.2_cds_NP_445704.1_39 target sequence
YYIKGVALVQCNQVSINVTVAKDHLHMFYDPVMNMYFAYSMPFFYQYPNAQQLFTEGKKLCEELEKLTPSATLTPPKNADLDLDR

SEQ ID NO: 39897 - protein, 85 aa, unidentified
  REGION 1..85: note = Description of Unknown:cds_NC_003214.2_cds_NP_445704.1_39 target sequence
ILAKLSITNDKVLTKGEEYKKAKEYTRTHYPECYAIVKEMGTNKDTVKLIEAIFAREWETAERTLTLIAMDCVEPECISRLGKFI

SEQ ID NO: 39898 - protein, 85 aa, unidentified
  REGION 1..85: note = Description of Unknown:vpeps_4R2H_1 target sequence
NPDDIVVIIGRKRSGKSYLIKHYFIPVLKAHKISYIIDDHNLLRSGSEYSKFGYNVVTLSDIVSKQYVVVYDREKNDVFFEKLWN

SEQ ID NO: 39899 - protein, 85 aa, unidentified
  REGION 1..85: note = Description of Unknown:vpeps_4R2H_1 target sequence
GAKLHAKKWGTSVLIIDEAYYHFKYRQKVTPAIDEALHANRHAGIGLILSTQRVYDLMPIVYKQADLIIMFYTREPNELKWISKY

SEQ ID NO: 39900 - protein, 85 aa, unidentified
  REGION 1..85: note = Description of Unknown:vpeps_4R2H_1 target sequence
NRHAGIGLILSTQRVYDLMPIVYKQADLIIMFYTREPNELKWISKYISTEAAEKVKTLKQYYFLIYDVNSQMIKIHKPIHHHHHH

SEQ ID NO: 39901 - protein, 85 aa, unidentified
  REGION 1..85: note = Description of Unknown:vpeps_4R2H_1 target sequence
LKAHKISYIIDDHNLLRSGSEYSKFGYNVVTLSDIVSKQYVVVYDREKNDVFFEKLWNGAKLHAKKWGTSVLIIDEAYYHFKYRQ

SEQ ID NO: 39902 - protein, 85 aa, unidentified
  REGION 1..85: note = Description of Unknown:vpeps_4R2H_1 target sequence
KVTPAIDEALHANRHAGIGLILSTQRVYDLMPIVYKQADLIIMFYTREPNELKWISKYISTEAAEKVKTLKQYYFLIYDVNSQMI

SEQ ID NO: 39903 - protein, 85 aa, unidentified
  REGION 1..85: note = Description of Unknown:cds_NZ_WFIY01000004.1_cds_WP_155863123.1_1042 target sequence
LKLTLAYSKEEELLPILPILDKEIDKGIEIEAIKVKEEEIKFKYTNFDLYYLPLPDLNYIETKILSNGAYAVNSLGLDSLKNEVC

SEQ ID NO: 39904 - protein, 85 aa, unidentified
  REGION 1..85: note = Description of Unknown:cds_NZ_WFIY01000004.1_cds_WP_155863123.1_1042 target sequence
INSNSTEFYLLKVLMNYRGIPNGRDNCNGSKFTTKDFKISLSDKWKETCGDLPIILNVIGSNLPEDVISKVKIVIRESASLQEAK

SEQ ID NO: 39905 - protein, 84 aa, unidentified
  REGION 1..84: note = Description of Unknown:cds_NZ_WFIY01000004.1_cds_WP_155863123.1_1042 target sequence
LSDKWKETCGDLPIILNVIGSNLPEDVISKVKIVIRESASLQEAKGAITSVSKELGLKGRKAIDCFFNLCRKKNLCNVNNYVIL

SEQ ID NO: 39906 - protein, 85 aa, unidentified
  REGION 1..85: note = Description of Unknown:cds_NZ_WFIY01000004.1_cds_WP_155863123.1_1042 target sequence
IEIEAIKVKEEEIKFKYTNFDLYYLPLPDLNYIETKILSNGAYAVNSLGLDSLKNEVCINSNSTEFYLLKVLMNYRGIPNGRDNC

SEQ ID NO: 39907 - protein, 85 aa, unidentified
  REGION 1..85: note = Description of Unknown:cds_NZ_WFIY01000004.1_cds_WP_155863123.1_1042 target sequence
NGSKFTTKDFKISLSDKWKETCGDLPIILNVIGSNLPEDVISKVKIVIRESASLQEAKGAITSVSKELGLKGRKAIDCFFNLCRK

SEQ ID NO: 39908 - protein, 85 aa, unidentified
  REGION 1..85: note = Description of Unknown:cds_NZ_WFIY01000004.1_cds_WP_155863162.1_1091 target sequence
ETPKIKPWKGTTTVGILAKDGVVLAADRRASEGFFVANKMVRKILYITDNIGITTAGSVADLQFLYYVLKNLYHYNYISGNRPTT

SEQ ID NO: 39909 - protein, 85 aa, unidentified
  REGION 1..85: note = Description of Unknown:cds_NZ_WFIY01000004.1_cds_WP_155863162.1_1091 target sequence
VKALATYLANTLSQTKYFPYLVQILIGGYDTQPRLYNLDYFGDMTEEKYVATGSGSPVAMGVLEDEYREDLTADQAMDIAARAVL

SEQ ID NO: 39910 - protein, 84 aa, unidentified
  REGION 1..84: note = Description of Unknown:cds_NZ_WFIY01000004.1_cds_WP_155863162.1_1091 target sequence
YFGDMTEEKYVATGSGSPVAMGVLEDEYREDLTADQAMDIAARAVLSAIKRDSYTGTGVIVSKITKTGHVEKEVYLRKGAVNAS

SEQ ID NO: 39911 - protein, 85 aa, unidentified
  REGION 1..85: note = Description of Unknown:cds_NZ_WFIY01000004.1_cds_WP_155863162.1_1091 target sequence
RRASEGFFVANKMVRKILYITDNIGITTAGSVADLQFLYYVLKNLYHYNYISGNRPTTVKALATYLANTLSQTKYFPYLVQILIG

SEQ ID NO: 39912 - protein, 85 aa, unidentified
  REGION 1..85: note = Description of Unknown:cds_NZ_WFIY01000004.1_cds_WP_155863162.1_1091 target sequence
GYDTQPRLYNLDYFGDMTEEKYVATGSGSPVAMGVLEDEYREDLTADQAMDIAARAVLSAIKRDSYTGTGVIVSKITKTGHVEKE

SEQ ID NO: 39913 - protein, 85 aa, unidentified
  REGION 1..85: note = Description of Unknown:cds_NZ_WFIY01000004.1_cds_WP_155863668.1_1542 target sequence
KYRTVKLRMIISLILVVIAFTLAFMLLPYLNMTNNTSINSVIVVNSQIVDKYFGGKWNENNSLSGYVEPEKSYYIIHFYNGTTDN

SEQ ID NO: 39914 - protein, 85 aa, unidentified
  REGION 1..85: note = Description of Unknown:cds_NZ_WFIY01000004.1_cds_WP_155863668.1_1542 target sequence
VSSGNFTLINPTISKYLGIIEVELRNINFTTFYNGNQTLSIIILNYTSTMEPKNIYNTIYTAFKDNSKVIALSFHNISSNAFIAS

SEQ ID NO: 39915 - protein, 84 aa, unidentified
  REGION 1..84: note = Description of Unknown:cds_NZ_WFIY01000004.1_cds_WP_155863668.1_1542 target sequence
SIIILNYTSTMEPKNIYNTIYTAFKDNSKVIALSFHNISSNAFIASINCYQFSIGYSGNEIVIVFYKGYEDESLAITDLTNYIL

SEQ ID NO: 39916 - protein, 85 aa, unidentified
  REGION 1..85: note = Description of Unknown:cds_NZ_WFIY01000004.1_cds_WP_155863668.1_1542 target sequence
PYLNMTNNTSINSVIVVNSQIVDKYFGGKWNENNSLSGYVEPEKSYYIIHFYNGTTDNVSSGNFTLINPTISKYLGIIEVELRNI

SEQ ID NO: 39917 - protein, 85 aa, unidentified
  REGION 1..85: note = Description of Unknown:cds_NZ_WFIY01000004.1_cds_WP_155863668.1_1542 target sequence
NFTTFYNGNQTLSIIILNYTSTMEPKNIYNTIYTAFKDNSKVIALSFHNISSNAFIASINCYQFSIGYSGNEIVIVFYKGYEDES

SEQ ID NO: 39918 - protein, 85 aa, unidentified
  REGION 1..85: note = Description of Unknown:cds_NZ_WFIY01000004.1_cds_WP_155864139.1_2092 target sequence
STEKKNEGKKPDPDRRAIIIGGAAAVAGVAAGIVIGSQAFPKLLTKTEVQPEVTKEVVPQYITKTVTQVEKYVKQLVANVSDFPT

SEQ ID NO: 39919 - protein, 85 aa, unidentified
  REGION 1..85: note = Description of Unknown:cds_NZ_WFIY01000004.1_cds_WP_155864139.1_2092 target sequence
AGTTKMTTYMGYQVILIKTGVPSIGGVGPDNDIVGFSGYCAHMGYPLSYDPNTNCLLCTMHFSQYDVTKGGMQVIGHPNQYLAQL

SEQ ID NO: 39920 - protein, 84 aa, unidentified
  REGION 1..84: note = Description of Unknown:cds_NZ_WFIY01000004.1_cds_WP_155864139.1_2092 target sequence
CAHMGYPLSYDPNTNCLLCTMHFSQYDVTKGGMQVIGHPNQYLAQLILEYDSSSGNIYALGFNKLVYGAYNNVLQGTTSGGVSS

SEQ ID NO: 39921 - protein, 85 aa, unidentified
  REGION 1..85: note = Description of Unknown:cds_NZ_WFIY01000004.1_cds_WP_155864139.1_2092 target sequence
GVAAGIVIGSQAFPKLLTKTEVQPEVTKEVVPQYITKTVTQVEKYVKQLVANVSDFPTAGTTKMTTYMGYQVILIKTGVPSIGGV

SEQ ID NO: 39922 - protein, 85 aa, unidentified
  REGION 1..85: note = Description of Unknown:cds_NZ_WFIY01000004.1_cds_WP_155864139.1_2092 target sequence
GPDNDIVGFSGYCAHMGYPLSYDPNTNCLLCTMHFSQYDVTKGGMQVIGHPNQYLAQLILEYDSSSGNIYALGFNKLVYGAYNNV

SEQ ID NO: 39923 - protein, 85 aa, unidentified
  REGION 1..85: note = Description of Unknown:cds_NC_007409.1_cds_YP_319840.1_9 target sequence
LEILPKYKPEEILAIIHTHPKGPAEPSINDLLMARHVLTNNKNTIHGVLAENDGKLQLIMYNYWTIDGSKLAKMLSRFLDNGVKP

SEQ ID NO: 39924 - protein, 85 aa, unidentified
  REGION 1..85: note = Description of Unknown:cds_NC_007409.1_cds_YP_319840.1_9 target sequence
PREEKLKVAHAYVTNIEDFDVSKIPEIADHFALWRYYWLIDTSDLFVFDPSNIDIYKKLKEKALFIPTGRDEGWLVLGVDTSGAE

SEQ ID NO: 39925 - protein, 84 aa, unidentified
  REGION 1..84: note = Description of Unknown:cds_NC_007409.1_cds_YP_319840.1_9 target sequence
DTSDLFVFDPSNIDIYKKLKEKALFIPTGRDEGWLVLGVDTSGAEPIVYKVKECKDKVTLRSTGHEFSPIIVEWCKEKPMCRVA

SEQ ID NO: 39926 - protein, 85 aa, unidentified
  REGION 1..85: note = Description of Unknown:cds_NC_007409.1_cds_YP_319840.1_9 target sequence
INDLLMARHVLTNNKNTIHGVLAENDGKLQLIMYNYWTIDGSKLAKMLSRFLDNGVKPPREEKLKVAHAYVTNIEDFDVSKIPEI

SEQ ID NO: 39927 - protein, 85 aa, unidentified
  REGION 1..85: note = Description of Unknown:cds_NC_007409.1_cds_YP_319840.1_9 target sequence
ADHFALWRYYWLIDTSDLFVFDPSNIDIYKKLKEKALFIPTGRDEGWLVLGVDTSGAEPIVYKVKECKDKVTLRSTGHEFSPIIV

SEQ ID NO: 39928 - protein, 85 aa, unidentified
  REGION 1..85: note = Description of Unknown:cds_NC_024711.1_cds_YP_009052488.1_6 target sequence
VNFDNVTSNVQSKPRKKTMAESLEEAKQEGKLVVPEEDTQVNAVVSSETVQPKNKARKKKQSKVRKQEEQTTVVSQANEDNDFKD

SEQ ID NO: 39929 - protein, 85 aa, unidentified
  REGION 1..85: note = Description of Unknown:cds_NC_024711.1_cds_YP_009052488.1_6 target sequence
AKTDKRGIPVGINVPQHILDVVCIVKFNAAFRRHTSLNILHALEDDGRICNSKGAYVDFLWNKFRVTADGGLRREYRYTDDLFID

SEQ ID NO: 39930 - protein, 84 aa, unidentified
  REGION 1..84: note = Description of Unknown:cds_NC_024711.1_cds_YP_009052488.1_6 target sequence
ILHALEDDGRICNSKGAYVDFLWNKFRVTADGGLRREYRYTDDLFIDALVKAHADVASDSQRVIGIMIDTETELHKKNKDSEAS

SEQ ID NO: 39931 - protein, 85 aa, unidentified
  REGION 1..85: note = Description of Unknown:cds_NC_024711.1_cds_YP_009052488.1_6 target sequence
QEGKLVVPEEDTQVNAVVSSETVQPKNKARKKKQSKVRKQEEQTTVVSQANEDNDFKDAKTDKRGIPVGINVPQHILDVVCIVKF

SEQ ID NO: 39932 - protein, 85 aa, unidentified
  REGION 1..85: note = Description of Unknown:cds_NC_024711.1_cds_YP_009052488.1_6 target sequence
NAAFRRHTSLNILHALEDDGRICNSKGAYVDFLWNKFRVTADGGLRREYRYTDDLFIDALVKAHADVASDSQRVIGIMIDTETEL

SEQ ID NO: 39933 - protein, 85 aa, unidentified
  REGION 1..85: note = Description of Unknown:cds_NZ_WFIY01000004.1_cds_WP_155862348.1_79 target sequence
LEIKHLSVSFDDFTVLKDINLELDKEVYIILGPNGSGKTTLLRAISGIIPYKGSIKINGMEVRSAKSLLEYSTNLQEVYTIGNSV

SEQ ID NO: 39934 - protein, 85 aa, unidentified
  REGION 1..85: note = Description of Unknown:cds_NZ_WFIY01000004.1_cds_WP_155862348.1_79 target sequence
LETAKIISEIKEGDLKEFFKILDYLNLDRRVIHKPIYKLSTGQKALVSLALALFTRPQIVTIDEPIENVDINRLDKVISLLRERV

SEQ ID NO: 39935 - protein, 84 aa, unidentified
  REGION 1..84: note = Description of Unknown:cds_NZ_WFIY01000004.1_cds_WP_155862348.1_79 target sequence
LSTGQKALVSLALALFTRPQIVTIDEPIENVDINRLDKVISLLRERVNEGIIVTHQKELIKRLEKNVRVYNMVNGELVEDNKMQ

SEQ ID NO: 39936 - protein, 85 aa, unidentified
  REGION 1..85: note = Description of Unknown:cds_NZ_WFIY01000004.1_cds_WP_155862348.1_79 target sequence
YIILGPNGSGKTTLLRAISGIIPYKGSIKINGMEVRSAKSLLEYSTNLQEVYTIGNSVLETAKIISEIKEGDLKEFFKILDYLNL

SEQ ID NO: 39937 - protein, 85 aa, unidentified
  REGION 1..85: note = Description of Unknown:cds_NZ_WFIY01000004.1_cds_WP_155862348.1_79 target sequence
DRRVIHKPIYKLSTGQKALVSLALALFTRPQIVTIDEPIENVDINRLDKVISLLRERVNEGIIVTHQKELIKRLEKNVRVYNMVN

SEQ ID NO: 39938 - protein, 85 aa, unidentified
  REGION 1..85: note = Description of Unknown:cds_NZ_WFIY01000004.1_cds_WP_155864356.1_102 target sequence
DIAVLLASLGISILELSEAGAVAVIFNGIYKNGKPYIYGLAGVLTVLIPVFTLGRYIVLLPLEYVLIVAGVILFYFGYKLIRSAR

SEQ ID NO: 39939 - protein, 85 aa, unidentified
  REGION 1..85: note = Description of Unknown:cds_NZ_WFIY01000004.1_cds_WP_155864356.1_102 target sequence
RYFKGIKIVHKEEGEETLTTVYVVGFTEALEAGLVILALIPQSYISALTGTLLASILVVALLFVLKAQIMKIRVPQLKYVLSALL

SEQ ID NO: 39940 - protein, 84 aa, unidentified
  REGION 1..84: note = Description of Unknown:cds_NZ_WFIY01000004.1_cds_WP_155864356.1_102 target sequence
LIPQSYISALTGTLLASILVVALLFVLKAQIMKIRVPQLKYVLSALLFSLGTLFFGEAFFDIDELYLGLFFVIYLGLNYVVIKM

SEQ ID NO: 39941 - protein, 85 aa, unidentified
  REGION 1..85: note = Description of Unknown:cds_NZ_WFIY01000004.1_cds_WP_155864356.1_102 target sequence
GIYKNGKPYIYGLAGVLTVLIPVFTLGRYIVLLPLEYVLIVAGVILFYFGYKLIRSARRYFKGIKIVHKEEGEETLTTVYVVGFT

SEQ ID NO: 39942 - protein, 85 aa, unidentified
  REGION 1..85: note = Description of Unknown:cds_NZ_WFIY01000004.1_cds_WP_155864356.1_102 target sequence
EALEAGLVILALIPQSYISALTGTLLASILVVALLFVLKAQIMKIRVPQLKYVLSALLFSLGTLFFGEAFFDIDELYLGLFFVIY

SEQ ID NO: 39943 - protein, 85 aa, unidentified
  REGION 1..85: note = Description of Unknown:cds_NZ_WFIY01000004.1_cds_WP_155862370.1_104 target sequence
ILVTTFGFDEKFQIRAVLNYGKSIEKVIIVTSITDSDKVKKALSSFTTFLDNLSISYEIVKVDPINFINSVALIAYYLPTDKKII

SEQ ID NO: 39944 - protein, 85 aa, unidentified
  REGION 1..85: note = Description of Unknown:cds_NZ_WFIY01000004.1_cds_WP_155862370.1_104 target sequence
ANLSGGMRAIIMETLTALALKGVDADVEIETEDFQGKISFKVSDLTRGDINTDHLLILREIWRGNRSIYRLAKATGMSTSAVSRK

SEQ ID NO: 39945 - protein, 84 aa, unidentified
  REGION 1..84: note = Description of Unknown:cds_NZ_WFIY01000004.1_cds_WP_155862370.1_104 target sequence
SFKVSDLTRGDINTDHLLILREIWRGNRSIYRLAKATGMSTSAVSRKLSKLLKYGYIRREDTSYILNNKGMIMALMMEMSDENV

SEQ ID NO: 39946 - protein, 85 aa, unidentified
  REGION 1..85: note = Description of Unknown:cds_NZ_WFIY01000004.1_cds_WP_155862370.1_104 target sequence
IIVTSITDSDKVKKALSSFTTFLDNLSISYEIVKVDPINFINSVALIAYYLPTDKKIIANLSGGMRAIIMETLTALALKGVDADV

SEQ ID NO: 39947 - protein, 85 aa, unidentified
  REGION 1..85: note = Description of Unknown:cds_NZ_WFIY01000004.1_cds_WP_155862370.1_104 target sequence
EIETEDFQGKISFKVSDLTRGDINTDHLLILREIWRGNRSIYRLAKATGMSTSAVSRKLSKLLKYGYIRREDTSYILNNKGMIMA

SEQ ID NO: 39948 - protein, 85 aa, unidentified
  REGION 1..85: note = Description of Unknown:cds_NZ_WFIY01000004.1_cds_WP_155862807.1_633 target sequence
LSKLDELEWRFRNINEVVAFLLAIFSISTFGIGELIYSIIKGYPLYFSLLIVLFTLIAATIAVIPHELAHRQVARKYGCFSRFSL

SEQ ID NO: 39949 - protein, 85 aa, unidentified
  REGION 1..85: note = Description of Unknown:cds_NZ_WFIY01000004.1_cds_WP_155862807.1_633 target sequence
SFSGFLATSIINLFGLAIVFFSGYTLISCNFFRANKKLDGITATAGPATNLVISAIFYLAYLFSQSLVGLLFFYIAMFNSVVAFF

SEQ ID NO: 39950 - protein, 84 aa, unidentified
  REGION 1..84: note = Description of Unknown:cds_NZ_WFIY01000004.1_cds_WP_155862807.1_633 target sequence
GITATAGPATNLVISAIFYLAYLFSQSLVGLLFFYIAMFNSVVAFFNLLPFWVLDGMKIMRWNVKIWAVMIALSLVLMYLTHVL

SEQ ID NO: 39951 - protein, 85 aa, unidentified
  REGION 1..85: note = Description of Unknown:cds_NZ_WFIY01000004.1_cds_WP_155862807.1_633 target sequence
STFGIGELIYSIIKGYPLYFSLLIVLFTLIAATIAVIPHELAHRQVARKYGCFSRFSLSFSGFLATSIINLFGLAIVFFSGYTLI

SEQ ID NO: 39952 - protein, 85 aa, unidentified
  REGION 1..85: note = Description of Unknown:cds_NZ_WFIY01000004.1_cds_WP_155862807.1_633 target sequence
SCNFFRANKKLDGITATAGPATNLVISAIFYLAYLFSQSLVGLLFFYIAMFNSVVAFFNLLPFWVLDGMKIMRWNVKIWAVMIAL

SEQ ID NO: 39953 - protein, 85 aa, unidentified
  REGION 1..85: note = Description of Unknown:cds_NZ_WFIY01000004.1_cds_WP_155862816.1_645 target sequence
RLLRRNNELELKIELPEDLVIPPLDEFSYICNGEVTKVKCNNTIYRDEDKIIATPYDIIYSISLENLIRNKTRGRKYNRWSYYIN

SEQ ID NO: 39954 - protein, 85 aa, unidentified
  REGION 1..85: note = Description of Unknown:cds_NZ_WFIY01000004.1_cds_WP_155862816.1_645 target sequence
KYKIAIEPIEFSTIIRTGAIITIFVDGLDINGTAGDVAIKEFKISGSKDCEKIVDKLQDVNPRLIVVKKDSFVFTASAYKVVYID

SEQ ID NO: 39955 - protein, 84 aa, unidentified
  REGION 1..84: note = Description of Unknown:cds_NZ_WFIY01000004.1_cds_WP_155862816.1_645 target sequence
IKEFKISGSKDCEKIVDKLQDVNPRLIVVKKDSFVFTASAYKVVYIDRNLQNTMKEFIGYKRMECEKLVIKDYTRICYISSTFS

SEQ ID NO: 39956 - protein, 85 aa, unidentified
  REGION 1..85: note = Description of Unknown:cds_NZ_WFIY01000004.1_cds_WP_155862816.1_645 target sequence
SYICNGEVTKVKCNNTIYRDEDKIIATPYDIIYSISLENLIRNKTRGRKYNRWSYYINKYKIAIEPIEFSTIIRTGAIITIFVDG

SEQ ID NO: 39957 - protein, 85 aa, unidentified
  REGION 1..85: note = Description of Unknown:cds_NZ_WFIY01000004.1_cds_WP_155862816.1_645 target sequence
LDINGTAGDVAIKEFKISGSKDCEKIVDKLQDVNPRLIVVKKDSFVFTASAYKVVYIDRNLQNTMKEFIGYKRMECEKLVIKDYT

SEQ ID NO: 39958 - protein, 85 aa, unidentified
  REGION 1..85: note = Description of Unknown:cds_NZ_WFIY01000004.1_cds_WP_155862931.1_784 target sequence
SSKSTSAIRDKWKLKKWYTILAPKVFGEVVLGSTPAFDVSYTIGRKVETTLYDLTGDFSMVYVHLYFKVVSHDGDKLITSFYGHE

SEQ ID NO: 39959 - protein, 85 aa, unidentified
  REGION 1..85: note = Description of Unknown:cds_NZ_WFIY01000004.1_cds_WP_155862931.1_784 target sequence
LSRDYVRSLVRRKSSKINEITDVRTKDGYLLRVKGLALTTYRVHREQRTAIRKIMEDLIKKDAEGRTFDEFVQDMVFGKLANDIF

SEQ ID NO: 39960 - protein, 84 aa, unidentified
  REGION 1..84: note = Description of Unknown:cds_NZ_WFIY01000004.1_cds_WP_155862931.1_784 target sequence
TTYRVHREQRTAIRKIMEDLIKKDAEGRTFDEFVQDMVFGKLANDIFNEAKKIAPLRKVEIEKSKLLEAPSQEVTVASSNPSSG

SEQ ID NO: 39961 - protein, 85 aa, unidentified
  REGION 1..85: note = Description of Unknown:cds_NZ_WFIY01000004.1_cds_WP_155862931.1_784 target sequence
EVVLGSTPAFDVSYTIGRKVETTLYDLTGDFSMVYVHLYFKVVSHDGDKLITSFYGHELSRDYVRSLVRRKSSKINEITDVRTKD

SEQ ID NO: 39962 - protein, 85 aa, unidentified
  REGION 1..85: note = Description of Unknown:cds_NZ_WFIY01000004.1_cds_WP_155862931.1_784 target sequence
GYLLRVKGLALTTYRVHREQRTAIRKIMEDLIKKDAEGRTFDEFVQDMVFGKLANDIFNEAKKIAPLRKVEIEKSKLLEAPSQEV

SEQ ID NO: 39963 - protein, 85 aa, unidentified
  REGION 1..85: note = Description of Unknown:cds_NZ_WFIY01000004.1_cds_WP_155863981.1_1905 target sequence
WEKEDYLLNFLILFQRLIAKNVKLTHLGLENVKTLCAVDVAYDKEEGYAVAVKQEGNKIEYKVTRGKVTFPYIPGFLFMREAPIM

SEQ ID NO: 39964 - protein, 85 aa, unidentified
  REGION 1..85: note = Description of Unknown:cds_NZ_WFIY01000004.1_cds_WP_155863981.1_1905 target sequence
IKAIEGYQCDLLLVDGHGLAHPRKSGIATVIGVLLDIPTMGIAKSKLAGEVVEENGILYVVINGEKVGVKAGKYFYSPGNKTDLQ

SEQ ID NO: 39965 - protein, 84 aa, unidentified
  REGION 1..84: note = Description of Unknown:cds_NZ_WFIY01000004.1_cds_WP_155863981.1_1905 target sequence
TMGIAKSKLAGEVVEENGILYVVINGEKVGVKAGKYFYSPGNKTDLQDVIEMSKRGYPEILKIADKLSKQAKKDKNMSSDYKIW

SEQ ID NO: 39966 - protein, 85 aa, unidentified
  REGION 1..85: note = Description of Unknown:cds_NZ_WFIY01000004.1_cds_WP_155863981.1_1905 target sequence
GLENVKTLCAVDVAYDKEEGYAVAVKQEGNKIEYKVTRGKVTFPYIPGFLFMREAPIMIKAIEGYQCDLLLVDGHGLAHPRKSGI

SEQ ID NO: 39967 - protein, 85 aa, unidentified
  REGION 1..85: note = Description of Unknown:cds_NZ_WFIY01000004.1_cds_WP_155863981.1_1905 target sequence
ATVIGVLLDIPTMGIAKSKLAGEVVEENGILYVVINGEKVGVKAGKYFYSPGNKTDLQDVIEMSKRGYPEILKIADKLSKQAKKD

SEQ ID NO: 39968 - protein, 85 aa, unidentified
  REGION 1..85: note = Description of Unknown:cds_NZ_WFIY01000004.1_cds_WP_155864170.1_2126 target sequence
KVYEIPLRFVKSFLIDYDKGYILVDAGTPGSGKRIAEFLNSKGVKLDYVIFTHSHPDHIGGAYELRNYTNAKFAIDANGVDYLRE

SEQ ID NO: 39969 - protein, 85 aa, unidentified
  REGION 1..85: note = Description of Unknown:cds_NZ_WFIY01000004.1_cds_WP_155864170.1_2126 target sequence
GKIREPVLHSTFLKVLFALGKPFFFKKFSGVKEDLILKEGELVEGVEVLRTPGHTNDSISLYLPTINSVIVGDTLQGTNKGLKYP

SEQ ID NO: 39970 - protein, 84 aa, unidentified
  REGION 1..84: note = Description of Unknown:cds_NZ_WFIY01000004.1_cds_WP_155864170.1_2126 target sequence
EGELVEGVEVLRTPGHTNDSISLYLPTINSVIVGDTLQGTNKGLKYPLIYENLEELIKSVEKIKSLKPSFVYVSHGKSGSNFLV

SEQ ID NO: 39971 - protein, 85 aa, unidentified
  REGION 1..85: note = Description of Unknown:cds_NZ_WFIY01000004.1_cds_WP_155864170.1_2126 target sequence
TPGSGKRIAEFLNSKGVKLDYVIFTHSHPDHIGGAYELRNYTNAKFAIDANGVDYLREGKIREPVLHSTFLKVLFALGKPFFFKK

SEQ ID NO: 39972 - protein, 85 aa, unidentified
  REGION 1..85: note = Description of Unknown:cds_NZ_WFIY01000004.1_cds_WP_155864170.1_2126 target sequence
FSGVKEDLILKEGELVEGVEVLRTPGHTNDSISLYLPTINSVIVGDTLQGTNKGLKYPLIYENLEELIKSVEKIKSLKPSFVYVS

SEQ ID NO: 39973 - protein, 85 aa, unidentified
  REGION 1..85: note = Description of Unknown:cds_NC_035460.1_cds_YP_009408101.1_150 target sequence
DSLPSCSYSINCLNNKIYDILILHNKENHQYDVSIITNNITTSSMDLTDNDDNDDDYFNFDTSTLYFTYDMHDFITNSDNVTDII

SEQ ID NO: 39974 - protein, 85 aa, unidentified
  REGION 1..85: note = Description of Unknown:cds_NC_035460.1_cds_YP_009408101.1_150 target sequence
EEYISWRAHIGRLGFIPKAIGKLYISMMQLDIEASNVFGNYTSLIKAYNLNDNVNAIYNLKSFIESLKYKFLDDKSLLLVGLFGY

SEQ ID NO: 39975 - protein, 84 aa, unidentified
  REGION 1..84: note = Description of Unknown:cds_NC_035460.1_cds_YP_009408101.1_150 target sequence
GNYTSLIKAYNLNDNVNAIYNLKSFIESLKYKFLDDKSLLLVGLFGYMAQYWSSKKMYSFIPKLFTLLLDCVSKESLNSIKYYE

SEQ ID NO: 39976 - protein, 85 aa, unidentified
  REGION 1..85: note = Description of Unknown:cds_NC_035460.1_cds_YP_009408101.1_150 target sequence
NHQYDVSIITNNITTSSMDLTDNDDNDDDYFNFDTSTLYFTYDMHDFITNSDNVTDIIEEYISWRAHIGRLGFIPKAIGKLYISM

SEQ ID NO: 39977 - protein, 85 aa, unidentified
  REGION 1..85: note = Description of Unknown:cds_NC_035460.1_cds_YP_009408101.1_150 target sequence
MQLDIEASNVFGNYTSLIKAYNLNDNVNAIYNLKSFIESLKYKFLDDKSLLLVGLFGYMAQYWSSKKMYSFIPKLFTLLLDCVSK

SEQ ID NO: 39978 - protein, 85 aa, unidentified
  REGION 1..85: note = Description of Unknown:cds_NC_035460.1_cds_YP_009408120.1_169 target sequence
NNNECNNNRIERLQKSLELCSKGEEIFQYIKYDDVDGVKLYIDQVNTKTSGFDETPLHVCLEQETTNLEILKLLLDNGANVNSVN

SEQ ID NO: 39979 - protein, 85 aa, unidentified
  REGION 1..85: note = Description of Unknown:cds_NC_035460.1_cds_YP_009408120.1_169 target sequence
SEAEGEYTPLHKYFMHCLQLNIDVINLLMDRGLDLTMRDEFGSTAFVKLIERDDSHKYIKLIMYMIEKGCDPYILDNVENNIAHN

SEQ ID NO: 39980 - protein, 84 aa, unidentified
  REGION 1..84: note = Description of Unknown:cds_NC_035460.1_cds_YP_009408120.1_169 target sequence
DEFGSTAFVKLIERDDSHKYIKLIMYMIEKGCDPYILDNVENNIAHNYLMTNSHPDMINFLKKDLKIDFEQKNLYGMTPLYFIK

SEQ ID NO: 39981 - protein, 85 aa, unidentified
  REGION 1..85: note = Description of Unknown:cds_NC_035460.1_cds_YP_009408120.1_169 target sequence
QYIKYDDVDGVKLYIDQVNTKTSGFDETPLHVCLEQETTNLEILKLLLDNGANVNSVNSEAEGEYTPLHKYFMHCLQLNIDVINL

SEQ ID NO: 39982 - protein, 85 aa, unidentified
  REGION 1..85: note = Description of Unknown:cds_NC_035460.1_cds_YP_009408120.1_169 target sequence
LMDRGLDLTMRDEFGSTAFVKLIERDDSHKYIKLIMYMIEKGCDPYILDNVENNIAHNYLMTNSHPDMINFLKKDLKIDFEQKNL

SEQ ID NO: 39983 - protein, 85 aa, unidentified
  REGION 1..85: note = Description of Unknown:cds_NC_009884.1_cds_YP_001496973.1_48 target sequence
KVVTFGGHFHHFREIYDVLHHDVVIVDDNHLDGVTENTFDNVNITHYKTNVDDNKNVSIAKTLIYIYSTVNDDVIVLDSDVYVPI

SEQ ID NO: 39984 - protein, 85 aa, unidentified
  REGION 1..85: note = Description of Unknown:cds_NC_009884.1_cds_YP_001496973.1_48 target sequence
RDKPLPNSPTIFCIPAVNWGNKKYVLYCDSTNVFVPRLYLNPLVDMLELYLKGDIDMPIDTYQSRYTIAFNKIVVPGTFHYLPSS

SEQ ID NO: 39985 - protein, 84 aa, unidentified
  REGION 1..84: note = Description of Unknown:cds_NC_009884.1_cds_YP_001496973.1_48 target sequence
YLNPLVDMLELYLKGDIDMPIDTYQSRYTIAFNKIVVPGTFHYLPSSPGDYANTKKWVVTSDDILSVNIANTWYSMLPCDYVLK

SEQ ID NO: 39986 - protein, 85 aa, unidentified
  REGION 1..85: note = Description of Unknown:cds_NC_009884.1_cds_YP_001496973.1_48 target sequence
DNHLDGVTENTFDNVNITHYKTNVDDNKNVSIAKTLIYIYSTVNDDVIVLDSDVYVPIRDKPLPNSPTIFCIPAVNWGNKKYVLY

SEQ ID NO: 39987 - protein, 85 aa, unidentified
  REGION 1..85: note = Description of Unknown:cds_NC_009884.1_cds_YP_001496973.1_48 target sequence
CDSTNVFVPRLYLNPLVDMLELYLKGDIDMPIDTYQSRYTIAFNKIVVPGTFHYLPSSPGDYANTKKWVVTSDDILSVNIANTWY

SEQ ID NO: 39988 - protein, 85 aa, unidentified
  REGION 1..85: note = Description of Unknown:cds_NZ_WFIY01000004.1_cds_WP_155863178.1_1109 target sequence
SLEEIAKQVRECTKCKLHLTRKNAVPGEGNPKAEVMLIGEAPGANEDEEGRPFVGAAGKLLTELLSSIGLSRKDVFITNLVKCRP

SEQ ID NO: 39989 - protein, 85 aa, unidentified
  REGION 1..85: note = Description of Unknown:cds_NZ_WFIY01000004.1_cds_WP_155863178.1_1109 target sequence
PNNRDPEEDEIIACSPYLDEQIRIIKPKIIVTLGKHSTTYILGKIGIKVKSISAVRGKFFTWNYGDIKISVFPTYHPAAALYNPS

SEQ ID NO: 39990 - protein, 84 aa, unidentified
  REGION 1..84: note = Description of Unknown:cds_NZ_WFIY01000004.1_cds_WP_155863178.1_1109 target sequence
TTYILGKIGIKVKSISAVRGKFFTWNYGDIKISVFPTYHPAAALYNPSLRDELFSDFKKISERLNSKVFTLDYFLEKNGSGNKK

SEQ ID NO: 39991 - protein, 85 aa, unidentified
  REGION 1..85: note = Description of Unknown:cds_NZ_WFIY01000004.1_cds_WP_155863178.1_1109 target sequence
EGNPKAEVMLIGEAPGANEDEEGRPFVGAAGKLLTELLSSIGLSRKDVFITNLVKCRPPNNRDPEEDEIIACSPYLDEQIRIIKP

SEQ ID NO: 39992 - protein, 85 aa, unidentified
  REGION 1..85: note = Description of Unknown:cds_NZ_WFIY01000004.1_cds_WP_155863178.1_1109 target sequence
KIIVTLGKHSTTYILGKIGIKVKSISAVRGKFFTWNYGDIKISVFPTYHPAAALYNPSLRDELFSDFKKISERLNSKVFTLDYFL

SEQ ID NO: 39993 - protein, 85 aa, unidentified
  REGION 1..85: note = Description of Unknown:cds_NZ_WFIY01000004.1_cds_WP_155863986.1_1910 target sequence
VTVLTPPGPVAYPIIASTMKRRDVKVVFEGNAEVKLNAIPLLNEVNYVLVARMLVITPGLGKKIAVWKKGSANHILLDTVLKLYS

SEQ ID NO: 39994 - protein, 85 aa, unidentified
  REGION 1..85: note = Description of Unknown:cds_NZ_WFIY01000004.1_cds_WP_155863986.1_1910 target sequence
HNAEVVFTDDPAEVYKLYKEGKADSAVVTTAVTKDGLYFEDLLSAKGFYLPGICGAEGLNEDFETAYLEGIDLFKEDPEGTSEYV

SEQ ID NO: 39995 - protein, 84 aa, unidentified
  REGION 1..84: note = Description of Unknown:cds_NZ_WFIY01000004.1_cds_WP_155863986.1_1910 target sequence
YFEDLLSAKGFYLPGICGAEGLNEDFETAYLEGIDLFKEDPEGTSEYVADNLPIYRPSTFIESIFKNSEYNLRRLDKPYVFRKA

SEQ ID NO: 39996 - protein, 85 aa, unidentified
  REGION 1..85: note = Description of Unknown:cds_NZ_WFIY01000004.1_cds_WP_155863986.1_1910 target sequence
FEGNAEVKLNAIPLLNEVNYVLVARMLVITPGLGKKIAVWKKGSANHILLDTVLKLYSHNAEVVFTDDPAEVYKLYKEGKADSAV

SEQ ID NO: 39997 - protein, 85 aa, unidentified
  REGION 1..85: note = Description of Unknown:cds_NZ_WFIY01000004.1_cds_WP_155863986.1_1910 target sequence
VTTAVTKDGLYFEDLLSAKGFYLPGICGAEGLNEDFETAYLEGIDLFKEDPEGTSEYVADNLPIYRPSTFIESIFKNSEYNLRRL

SEQ ID NO: 39998 - protein, 85 aa, unidentified
  REGION 1..85: note = Description of Unknown:cds_NZ_WFIY01000001.1_cds_WP_205737125.1_2384 target sequence
VKSINPYKHTKYFIVNAGVDLDLFKAGSENRENIIMVILRDEPIKNPDLAIRTLNIVSQREKIKVVFVINNVNLIKKYKLNFDYE

SEQ ID NO: 39999 - protein, 85 aa, unidentified
  REGION 1..85: note = Description of Unknown:cds_NZ_WFIY01000001.1_cds_WP_205737125.1_2384 target sequence
IYYRIPYEKLAELYRKAKVFLYTSRLEGFSLPPLEAMASGTAVVSTDNIGIREYAINGYNCLLDKEHNEENLANYVLELLRNDKL

SEQ ID NO: 40000 - protein, 84 aa, unidentified
  REGION 1..84: note = Description of Unknown:cds_NZ_WFIY01000001.1_cds_WP_205737125.1_2384 target sequence
ASGTAVVSTDNIGIREYAINGYNCLLDKEHNEENLANYVLELLRNDKLRGKIVKNGLETAKKFSWENITEKWINMLNRIEEDLK

SEQ ID NO: 40001 - protein, 85 aa, unidentified
  REGION 1..85: note = Description of Unknown:cds_NZ_WFIY01000001.1_cds_WP_205737125.1_2384 target sequence
SENRENIIMVILRDEPIKNPDLAIRTLNIVSQREKIKVVFVINNVNLIKKYKLNFDYEIYYRIPYEKLAELYRKAKVFLYTSRLE

SEQ ID NO: 40002 - protein, 85 aa, unidentified
  REGION 1..85: note = Description of Unknown:cds_NZ_WFIY01000001.1_cds_WP_205737125.1_2384 target sequence
GFSLPPLEAMASGTAVVSTDNIGIREYAINGYNCLLDKEHNEENLANYVLELLRNDKLRGKIVKNGLETAKKFSWENITEKWINM

SEQ ID NO: 40003 - protein, 85 aa, unidentified
  REGION 1..85: note = Description of Unknown:cds_NC_030656.1_cds_YP_009268794.1_79 target sequence
AWTITPTAGSSFQTLDSLREHLKESVENPQDEEEGPDNVDCLFPADEITKPKRKPRVTKTKKQSPPKSEEDSACLKPKRTPKMAS

SEQ ID NO: 40004 - protein, 85 aa, unidentified
  REGION 1..85: note = Description of Unknown:cds_NC_030656.1_cds_YP_009268794.1_79 target sequence
KEISSSDEEDDCGTSPQPSCPRNSFENIQNQEKDFCEEQDISTDVDEFTDLTVAVTEITKALKAITVKVTAVSSVLSDVQAASVT

SEQ ID NO: 40005 - protein, 84 aa, unidentified
  REGION 1..84: note = Description of Unknown:cds_NC_030656.1_cds_YP_009268794.1_79 target sequence
EQDISTDVDEFTDLTVAVTEITKALKAITVKVTAVSSVLSDVQAASVTRTYTSLQKAVNNLSDLANCGKSLTTRSKRKAAPKKR

SEQ ID NO: 40006 - protein, 85 aa, unidentified
  REGION 1..85: note = Description of Unknown:cds_NC_030656.1_cds_YP_009268794.1_79 target sequence
NPQDEEEGPDNVDCLFPADEITKPKRKPRVTKTKKQSPPKSEEDSACLKPKRTPKMASKEISSSDEEDDCGTSPQPSCPRNSFEN

SEQ ID NO: 40007 - protein, 85 aa, unidentified
  REGION 1..85: note = Description of Unknown:cds_NC_030656.1_cds_YP_009268794.1_79 target sequence
IQNQEKDFCEEQDISTDVDEFTDLTVAVTEITKALKAITVKVTAVSSVLSDVQAASVTRTYTSLQKAVNNLSDLANCGKSLTTRS

SEQ ID NO: 40008 - protein, 85 aa, unidentified
  REGION 1..85: note = Description of Unknown:cds_NZ_WFIY01000004.1_cds_WP_155864407.1_1153 target sequence
LKNLRPEDYANKNLREALSISGISKEDIHDRRVKLRKYFDVLYSLYPVYENPDCLLKAKDLIHKLGVIRDMDVICYQPNRDKLAE

SEQ ID NO: 40009 - protein, 85 aa, unidentified
  REGION 1..85: note = Description of Unknown:cds_NZ_WFIY01000004.1_cds_WP_155864407.1_1153 target sequence
RVSKKIHVMNYCFLPKVYGSRLLVFNRILSLQKKIEKTEDFHELRKIVRTARNLVESLGYKNKELSNLAKEMGDLRDEILKMECE

SEQ ID NO: 40010 - protein, 84 aa, unidentified
  REGION 1..84: note = Description of Unknown:cds_NZ_WFIY01000004.1_cds_WP_155864407.1_1153 target sequence
TEDFHELRKIVRTARNLVESLGYKNKELSNLAKEMGDLRDEILKMECEGRKVNIDVENYKKRANNIIVSFIIYQDEFHHFSLQQ

SEQ ID NO: 40011 - protein, 85 aa, unidentified
  REGION 1..85: note = Description of Unknown:cds_NZ_WFIY01000004.1_cds_WP_155864407.1_1153 target sequence
IHDRRVKLRKYFDVLYSLYPVYENPDCLLKAKDLIHKLGVIRDMDVICYQPNRDKLAERVSKKIHVMNYCFLPKVYGSRLLVFNR

SEQ ID NO: 40012 - protein, 85 aa, unidentified
  REGION 1..85: note = Description of Unknown:cds_NZ_WFIY01000004.1_cds_WP_155864407.1_1153 target sequence
ILSLQKKIEKTEDFHELRKIVRTARNLVESLGYKNKELSNLAKEMGDLRDEILKMECEGRKVNIDVENYKKRANNIIVSFIIYQD

SEQ ID NO: 40013 - protein, 85 aa, unidentified
  REGION 1..85: note = Description of Unknown:cds_NZ_WFIY01000004.1_cds_WP_155863548.1_1482 target sequence
IKEEIIELISVIIIITAFYIQGQAYYKPLVKMSGIQSIILAILSTSLGIITGIVDYFILAIIIVALRGIITPYVLIKMLGNKFGE

SEQ ID NO: 40014 - protein, 85 aa, unidentified
  REGION 1..85: note = Description of Unknown:cds_NZ_WFIY01000004.1_cds_WP_155863548.1_1482 target sequence
RERIKGVASLLVIDLAFFFIAIIVIYEFIIGRVFHQVELLFPLSLFFQGLYLIVSRNSTPAQIIGYIEEENGIVMLGLFLIPLPL

SEQ ID NO: 40015 - protein, 84 aa, unidentified
  REGION 1..84: note = Description of Unknown:cds_NZ_WFIY01000004.1_cds_WP_155863548.1_1482 target sequence
VELLFPLSLFFQGLYLIVSRNSTPAQIIGYIEEENGIVMLGLFLIPLPLLVEASVFLDVLGLVVISSLLIFEKREHKALEELKG

SEQ ID NO: 40016 - protein, 85 aa, unidentified
  REGION 1..85: note = Description of Unknown:cds_NZ_WFIY01000004.1_cds_WP_155863548.1_1482 target sequence
PLVKMSGIQSIILAILSTSLGIITGIVDYFILAIIIVALRGIITPYVLIKMLGNKFGERERIKGVASLLVIDLAFFFIAIIVIYE

SEQ ID NO: 40017 - protein, 85 aa, unidentified
  REGION 1..85: note = Description of Unknown:cds_NZ_WFIY01000004.1_cds_WP_155863548.1_1482 target sequence
FIIGRVFHQVELLFPLSLFFQGLYLIVSRNSTPAQIIGYIEEENGIVMLGLFLIPLPLLVEASVFLDVLGLVVISSLLIFEKREH

SEQ ID NO: 40018 - protein, 85 aa, unidentified
  REGION 1..85: note = Description of Unknown:cds_NZ_WFIY01000004.1_cds_WP_155863906.1_1815 target sequence
IEYFGHSMFLIDRKIVIDPHDGGSIGLPKPSIDKVDLVLITHDHYDHNAYEILSYNDMKMKYYGYISYQNYKITSYKAYHDKEKG

SEQ ID NO: 40019 - protein, 85 aa, unidentified
  REGION 1..85: note = Description of Unknown:cds_NZ_WFIY01000004.1_cds_WP_155863906.1_1815 target sequence
RRRGETAIYKIEDSEGNVIVHLGDLGEYPLKEDLIKEISSPTVLMIPVGGLITIDYKEAASLVKDLKPQVVIPMHYWVRGHLMPL

SEQ ID NO: 40020 - protein, 84 aa, unidentified
  REGION 1..84: note = Description of Unknown:cds_NZ_WFIY01000004.1_cds_WP_155863906.1_1815 target sequence
EISSPTVLMIPVGGLITIDYKEAASLVKDLKPQVVIPMHYWVRGHLMPLDPVDNFIKELGWKVVEGKKGIEKIEDKEAIYLLTV

SEQ ID NO: 40021 - protein, 85 aa, unidentified
  REGION 1..85: note = Description of Unknown:cds_NZ_WFIY01000004.1_cds_WP_155863906.1_1815 target sequence
PKPSIDKVDLVLITHDHYDHNAYEILSYNDMKMKYYGYISYQNYKITSYKAYHDKEKGRRRGETAIYKIEDSEGNVIVHLGDLGE

SEQ ID NO: 40022 - protein, 85 aa, unidentified
  REGION 1..85: note = Description of Unknown:cds_NZ_WFIY01000004.1_cds_WP_155863906.1_1815 target sequence
YPLKEDLIKEISSPTVLMIPVGGLITIDYKEAASLVKDLKPQVVIPMHYWVRGHLMPLDPVDNFIKELGWKVVEGKKGIEKIEDK

SEQ ID NO: 40023 - protein, 85 aa, unidentified
  REGION 1..85: note = Description of Unknown:cds_NZ_WFIY01000004.1_cds_WP_155863952.1_1873 target sequence
LPKIPVKVVKWEEIVDLSFRLADILKKENFNPDVIIAIARGGLVPARLVADAMGVYDVLSLKVEHWIVTASHTPEAKIKYPYKVD

SEQ ID NO: 40024 - protein, 85 aa, unidentified
  REGION 1..85: note = Description of Unknown:cds_NZ_WFIY01000004.1_cds_WP_155863952.1_1873 target sequence
LQGRKVLIIDDITDTGDSLILAEKHVKENFNAGEIKTATLQYIKGSKYVPNFYADIITDWTWFMYPWNYWEDEINLLKKVMDEMG

SEQ ID NO: 40025 - protein, 84 aa, unidentified
  REGION 1..84: note = Description of Unknown:cds_NZ_WFIY01000004.1_cds_WP_155863952.1_1873 target sequence
ATLQYIKGSKYVPNFYADIITDWTWFMYPWNYWEDEINLLKKVMDEMGTTDIAKLKEGFKESYNIDPPIPLEKIMEEMKRRKII

SEQ ID NO: 40026 - protein, 85 aa, unidentified
  REGION 1..85: note = Description of Unknown:cds_NZ_WFIY01000004.1_cds_WP_155863952.1_1873 target sequence
ENFNPDVIIAIARGGLVPARLVADAMGVYDVLSLKVEHWIVTASHTPEAKIKYPYKVDLQGRKVLIIDDITDTGDSLILAEKHVK

SEQ ID NO: 40027 - protein, 85 aa, unidentified
  REGION 1..85: note = Description of Unknown:cds_NZ_WFIY01000004.1_cds_WP_155863952.1_1873 target sequence
ENFNAGEIKTATLQYIKGSKYVPNFYADIITDWTWFMYPWNYWEDEINLLKKVMDEMGTTDIAKLKEGFKESYNIDPPIPLEKIM

SEQ ID NO: 40028 - protein, 85 aa, unidentified
  REGION 1..85: note = Description of Unknown:cds_NZ_WFIY01000004.1_cds_WP_155864010.1_1938 target sequence
SLILLITNYIGIIAFSISGSMKAIEKKMDLLGVITLGFSTSLAGGILADLLLGITPPTNLIYIPYPTASFITSIVTFAFYKKFTH

SEQ ID NO: 40029 - protein, 85 aa, unidentified
  REGION 1..85: note = Description of Unknown:cds_NZ_WFIY01000004.1_cds_WP_155864010.1_1938 target sequence
VSKPLIYADALGLGAFTASGASLAFSLRPDPLLVIMVGTITAVGGGVLRDILANEIPLVLTKEFYASASIIGSTIYYGLAELGVQ

SEQ ID NO: 40030 - protein, 84 aa, unidentified
  REGION 1..84: note = Description of Unknown:cds_NZ_WFIY01000004.1_cds_WP_155864010.1_1938 target sequence
VGTITAVGGGVLRDILANEIPLVLTKEFYASASIIGSTIYYGLAELGVQTGFLTTLVLLLTFTLRLLAIRMKWKLPSSAVFDKS

SEQ ID NO: 40031 - protein, 85 aa, unidentified
  REGION 1..85: note = Description of Unknown:cds_NZ_WFIY01000004.1_cds_WP_155864010.1_1938 target sequence
MDLLGVITLGFSTSLAGGILADLLLGITPPTNLIYIPYPTASFITSIVTFAFYKKFTHVSKPLIYADALGLGAFTASGASLAFSL

SEQ ID NO: 40032 - protein, 85 aa, unidentified
  REGION 1..85: note = Description of Unknown:cds_NZ_WFIY01000004.1_cds_WP_155864010.1_1938 target sequence
RPDPLLVIMVGTITAVGGGVLRDILANEIPLVLTKEFYASASIIGSTIYYGLAELGVQTGFLTTLVLLLTFTLRLLAIRMKWKLP

SEQ ID NO: 40033 - protein, 85 aa, unidentified
  REGION 1..85: note = Description of Unknown:cds_NZ_WFIY01000004.1_cds_WP_155864289.1_2282 target sequence
LEREVKGTIEEDEMKILSDVYDINNLREWWMFLRKIEKIDEENYRAEFRVFMTFKFHMKRTLGSHEVIHEGTMRFPRAYFRFIVE

SEQ ID NO: 40034 - protein, 85 aa, unidentified
  REGION 1..85: note = Description of Unknown:cds_NZ_WFIY01000004.1_cds_WP_155864289.1_2282 target sequence
TIPYKKDKKVDVIIRGQYKGPLERLARLPMDIFLKNFFQKLAERYKTKTEEEKQNILSLINEQLEASREYNGRILLHIDECTIVF

SEQ ID NO: 40035 - protein, 84 aa, unidentified
  REGION 1..84: note = Description of Unknown:cds_NZ_WFIY01000004.1_cds_WP_155864289.1_2282 target sequence
FFQKLAERYKTKTEEEKQNILSLINEQLEASREYNGRILLHIDECTIVFEGGKIGEVSCNGLKGEDALKELTKKENAKIKVEYK

SEQ ID NO: 40036 - protein, 85 aa, unidentified
  REGION 1..85: note = Description of Unknown:cds_NZ_WFIY01000004.1_cds_WP_155864289.1_2282 target sequence
EWWMFLRKIEKIDEENYRAEFRVFMTFKFHMKRTLGSHEVIHEGTMRFPRAYFRFIVETIPYKKDKKVDVIIRGQYKGPLERLAR

SEQ ID NO: 40037 - protein, 85 aa, unidentified
  REGION 1..85: note = Description of Unknown:cds_NZ_WFIY01000004.1_cds_WP_155864289.1_2282 target sequence
LPMDIFLKNFFQKLAERYKTKTEEEKQNILSLINEQLEASREYNGRILLHIDECTIVFEGGKIGEVSCNGLKGEDALKELTKKEN

SEQ ID NO: 40038 - protein, 85 aa, unidentified
  REGION 1..85: note = Description of Unknown:cds_NC_030656.1_cds_YP_009268804.1_89 target sequence
EECSITFETEREKVILTPTPKPTSISGVRVFAICVTTDNVPIVAQRRTSFVFQHIVSTSSKKNTTKVSKHLLQYMYENEVRELAC

SEQ ID NO: 40039 - protein, 85 aa, unidentified
  REGION 1..85: note = Description of Unknown:cds_NC_030656.1_cds_YP_009268804.1_89 target sequence
RSSVRKIEWDNNFCELIMIGGKANKSESVNSCLRREIREESDSTVSVKSISDKFFHVSIYDKLIQKCFECYCTLCYINQSLEDIT

SEQ ID NO: 40040 - protein, 84 aa, unidentified
  REGION 1..84: note = Description of Unknown:cds_NC_030656.1_cds_YP_009268804.1_89 target sequence
IREESDSTVSVKSISDKFFHVSIYDKLIQKCFECYCTLCYINQSLEDITSTRIFNIEVRSLCPLYSYKNNDKFEYLNFIYKSLS

SEQ ID NO: 40041 - protein, 85 aa, unidentified
  REGION 1..85: note = Description of Unknown:cds_NC_030656.1_cds_YP_009268804.1_89 target sequence
VRVFAICVTTDNVPIVAQRRTSFVFQHIVSTSSKKNTTKVSKHLLQYMYENEVRELACRSSVRKIEWDNNFCELIMIGGKANKSE

SEQ ID NO: 40042 - protein, 85 aa, unidentified
  REGION 1..85: note = Description of Unknown:cds_NC_030656.1_cds_YP_009268804.1_89 target sequence
SVNSCLRREIREESDSTVSVKSISDKFFHVSIYDKLIQKCFECYCTLCYINQSLEDITSTRIFNIEVRSLCPLYSYKNNDKFEYL

SEQ ID NO: 40043 - protein, 85 aa, unidentified
  REGION 1..85: note = Description of Unknown:cds_NZ_WFIY01000004.1_cds_WP_155862477.1_233 target sequence
DILTIITEATKPRQGNKPKYDESHVLHALLIIQKEQPIGRPTLEKRLQLGDATVRTLLRRLRELGVIKVDKVGGAEITEEGKKAL

SEQ ID NO: 40044 - protein, 85 aa, unidentified
  REGION 1..85: note = Description of Unknown:cds_NZ_WFIY01000004.1_cds_WP_155862477.1_233 target sequence
QEWNSVIKIGEAELKSINWNCSMIIVKGGSKILEKQKVIELRDKIIKLGADSVLISVILNNRVELPPKTEEFGMKELLEDIKNSC

SEQ ID NO: 40045 - protein, 84 aa, unidentified
  REGION 1..84: note = Description of Unknown:cds_NZ_WFIY01000004.1_cds_WP_155862477.1_233 target sequence
QKVIELRDKIIKLGADSVLISVILNNRVELPPKTEEFGMKELLEDIKNSCKLCENNDLITYILPKDLHLAYKVGLLLFENWINS

SEQ ID NO: 40046 - protein, 85 aa, unidentified
  REGION 1..85: note = Description of Unknown:cds_NZ_WFIY01000004.1_cds_WP_155862477.1_233 target sequence
ALLIIQKEQPIGRPTLEKRLQLGDATVRTLLRRLRELGVIKVDKVGGAEITEEGKKALQEWNSVIKIGEAELKSINWNCSMIIVK

SEQ ID NO: 40047 - protein, 85 aa, unidentified
  REGION 1..85: note = Description of Unknown:cds_NZ_WFIY01000004.1_cds_WP_155862477.1_233 target sequence
GGSKILEKQKVIELRDKIIKLGADSVLISVILNNRVELPPKTEEFGMKELLEDIKNSCKLCENNDLITYILPKDLHLAYKVGLLL

SEQ ID NO: 40048 - protein, 85 aa, unidentified
  REGION 1..85: note = Description of Unknown:cds_NZ_WFIY01000004.1_cds_WP_155862480.1_236 target sequence
KFDFHTHTNYSDGKENPKALVEYAKRKGIYIAITDHDTSKGYEKVKEEAVIPGEEVTTQFGHVVILCNFPPNPPKDISSLVDYSK

SEQ ID NO: 40049 - protein, 85 aa, unidentified
  REGION 1..85: note = Description of Unknown:cds_NZ_WFIY01000004.1_cds_WP_155862480.1_236 target sequence
ENSCIIFPSHPFDIFRKGIGNKVFEYKFDAIEIFNSKAPKSANEKASNAARELKLPGLANSDSHVKEAIGSAYNEIEINEFNIDE

SEQ ID NO: 40050 - protein, 84 aa, unidentified
  REGION 1..84: note = Description of Unknown:cds_NZ_WFIY01000004.1_cds_WP_155862480.1_236 target sequence
SKAPKSANEKASNAARELKLPGLANSDSHVKEAIGSAYNEIEINEFNIDEVLESIKKGKVKPVGIGLTITAKFKILQWYIERKI

SEQ ID NO: 40051 - protein, 85 aa, unidentified
  REGION 1..85: note = Description of Unknown:cds_NZ_WFIY01000004.1_cds_WP_155862480.1_236 target sequence
GIYIAITDHDTSKGYEKVKEEAVIPGEEVTTQFGHVVILCNFPPNPPKDISSLVDYSKENSCIIFPSHPFDIFRKGIGNKVFEYK

SEQ ID NO: 40052 - protein, 85 aa, unidentified
  REGION 1..85: note = Description of Unknown:cds_NZ_WFIY01000004.1_cds_WP_155862480.1_236 target sequence
FDAIEIFNSKAPKSANEKASNAARELKLPGLANSDSHVKEAIGSAYNEIEINEFNIDEVLESIKKGKVKPVGIGLTITAKFKILQ

SEQ ID NO: 40053 - protein, 85 aa, unidentified
  REGION 1..85: note = Description of Unknown:cds_NZ_WFIY01000004.1_cds_WP_155862536.1_301 target sequence
ILRKELKEAYIDYKYLLNRGYNRKPALDLVTGRYSLSFKERLLLYRCTHSDEEIKEIKEKTILEKNVVIDGYNVAITILNALDND

SEQ ID NO: 40054 - protein, 85 aa, unidentified
  REGION 1..85: note = Description of Unknown:cds_NZ_WFIY01000004.1_cds_WP_155862536.1_301 target sequence
EAFICDDGFVRDLGLGSKKGDDRIEDILILFAEFCYALGLSFTIILDSQISHSGELASNLRKRGINAKTVNKADKTVMSSELTII

SEQ ID NO: 40055 - protein, 84 aa, unidentified
  REGION 1..84: note = Description of Unknown:cds_NZ_WFIY01000004.1_cds_WP_155862536.1_301 target sequence
YALGLSFTIILDSQISHSGELASNLRKRGINAKTVNKADKTVMSSELTIISNDFVIMKNSAKLFDLVGLFLKSYIDLPKIPEDI

SEQ ID NO: 40056 - protein, 85 aa, unidentified
  REGION 1..85: note = Description of Unknown:cds_NZ_WFIY01000004.1_cds_WP_155862536.1_301 target sequence
DLVTGRYSLSFKERLLLYRCTHSDEEIKEIKEKTILEKNVVIDGYNVAITILNALDNDEAFICDDGFVRDLGLGSKKGDDRIEDI

SEQ ID NO: 40057 - protein, 85 aa, unidentified
  REGION 1..85: note = Description of Unknown:cds_NZ_WFIY01000004.1_cds_WP_155862536.1_301 target sequence
LILFAEFCYALGLSFTIILDSQISHSGELASNLRKRGINAKTVNKADKTVMSSELTIISNDFVIMKNSAKLFDLVGLFLKSYIDL

SEQ ID NO: 40058 - protein, 85 aa, unidentified
  REGION 1..85: note = Description of Unknown:cds_NZ_WFIY01000004.1_cds_WP_155862806.1_632 target sequence
RETLILAFLVVLGYVIGLLTSIYYPSIFIYLIQVNYLVFKGDYISLLTSIFVTNSLLDAGFNTIALLVIYSLFGSKAGKMEYVVF

SEQ ID NO: 40059 - protein, 85 aa, unidentified
  REGION 1..85: note = Description of Unknown:cds_NZ_WFIY01000004.1_cds_WP_155862806.1_632 target sequence
LFSGLLGNIFSLFLFPPNTASAGASGGIFGILSFYIIYDMLKDRKFYFYEFLILIIVFVLSDILPNVDYFAHIGGILGGVILAFI

SEQ ID NO: 40060 - protein, 84 aa, unidentified
  REGION 1..84: note = Description of Unknown:cds_NZ_WFIY01000004.1_cds_WP_155862806.1_632 target sequence
IIYDMLKDRKFYFYEFLILIIVFVLSDILPNVDYFAHIGGILGGVILAFIASWLKRDEKEDTHYEFNRRNFNDNWNDYAALWIV

SEQ ID NO: 40061 - protein, 85 aa, unidentified
  REGION 1..85: note = Description of Unknown:cds_NZ_WFIY01000004.1_cds_WP_155862806.1_632 target sequence
FIYLIQVNYLVFKGDYISLLTSIFVTNSLLDAGFNTIALLVIYSLFGSKAGKMEYVVFLFSGLLGNIFSLFLFPPNTASAGASGG

SEQ ID NO: 40062 - protein, 85 aa, unidentified
  REGION 1..85: note = Description of Unknown:cds_NZ_WFIY01000004.1_cds_WP_155862806.1_632 target sequence
IFGILSFYIIYDMLKDRKFYFYEFLILIIVFVLSDILPNVDYFAHIGGILGGVILAFIASWLKRDEKEDTHYEFNRRNFNDNWND

SEQ ID NO: 40063 - protein, 85 aa, unidentified
  REGION 1..85: note = Description of Unknown:cds_NZ_WFIY01000004.1_cds_WP_155863211.1_1152 target sequence
LIIAFEGIEGSGRTAHLESVKRYLEKEGYGVVTFGIQMSKLIGERIAQVKKEIVFERRTLFLAYVTDLADQIENVVKPAIDSGFI

SEQ ID NO: 40064 - protein, 85 aa, unidentified
  REGION 1..85: note = Description of Unknown:cds_NZ_WFIY01000004.1_cds_WP_155863211.1_1152 target sequence
ALADGYVLTLMAYGLARGLEKEWMSEVLSIFPKPSLSFSLVSTPEEIMKRIIKKRGYLDPLSAGIDICVKEDVFSAYNEYIERFQ

SEQ ID NO: 40065 - protein, 84 aa, unidentified
  REGION 1..84: note = Description of Unknown:cds_NZ_WFIY01000004.1_cds_WP_155863211.1_1152 target sequence
SFSLVSTPEEIMKRIIKKRGYLDPLSAGIDICVKEDVFSAYNEYIERFQKYLVELSITSKVINTARDFNEVNKEIVSEIEKLEA

SEQ ID NO: 40066 - protein, 85 aa, unidentified
  REGION 1..85: note = Description of Unknown:cds_NZ_WFIY01000004.1_cds_WP_155863211.1_1152 target sequence
GYGVVTFGIQMSKLIGERIAQVKKEIVFERRTLFLAYVTDLADQIENVVKPAIDSGFIALADGYVLTLMAYGLARGLEKEWMSEV

SEQ ID NO: 40067 - protein, 85 aa, unidentified
  REGION 1..85: note = Description of Unknown:cds_NZ_WFIY01000004.1_cds_WP_155863211.1_1152 target sequence
LSIFPKPSLSFSLVSTPEEIMKRIIKKRGYLDPLSAGIDICVKEDVFSAYNEYIERFQKYLVELSITSKVINTARDFNEVNKEIV

SEQ ID NO: 40068 - protein, 85 aa, unidentified
  REGION 1..85: note = Description of Unknown:cds_NZ_WFIY01000004.1_cds_WP_155863406.1_1384 target sequence
EQKRIHEIPEWAFEFHGHRCPAMPLGYLAGEYALKLLGIEKEKDTNTYVFSETGDEHHQGCFDDGVQAATGCTYGKGNYKRLQYG

SEQ ID NO: 40069 - protein, 85 aa, unidentified
  REGION 1..85: note = Description of Unknown:cds_NZ_WFIY01000004.1_cds_WP_155863406.1_1384 target sequence
KMAIIVYKPGKGAVRIRPKPEILDGCSKFEFFKYRKSGIPASQVPREVSDEVINYVLSKDFEELFYYEFLKDFTYSSPKKTMARI

SEQ ID NO: 40070 - protein, 84 aa, unidentified
  REGION 1..84: note = Description of Unknown:cds_NZ_WFIY01000004.1_cds_WP_155863406.1_1384 target sequence
KSGIPASQVPREVSDEVINYVLSKDFEELFYYEFLKDFTYSSPKKTMARIVCDDCGEPTYENYIKIFNGKKLCPRCYEIERNKR

SEQ ID NO: 40071 - protein, 85 aa, unidentified
  REGION 1..85: note = Description of Unknown:cds_NZ_WFIY01000004.1_cds_WP_155863406.1_1384 target sequence
LAGEYALKLLGIEKEKDTNTYVFSETGDEHHQGCFDDGVQAATGCTYGKGNYKRLQYGKMAIIVYKPGKGAVRIRPKPEILDGCS

SEQ ID NO: 40072 - protein, 85 aa, unidentified
  REGION 1..85: note = Description of Unknown:cds_NZ_WFIY01000004.1_cds_WP_155863406.1_1384 target sequence
KFEFFKYRKSGIPASQVPREVSDEVINYVLSKDFEELFYYEFLKDFTYSSPKKTMARIVCDDCGEPTYENYIKIFNGKKLCPRCY

SEQ ID NO: 40073 - protein, 85 aa, unidentified
  REGION 1..85: note = Description of Unknown:cds_NZ_WFIY01000004.1_cds_WP_155863856.1_1754 target sequence
NAVILDLDGTLVTTVKVHRMAWELSLKDLGIKISVDLDKLMGRKTEEIAKLLAKDRWKELYERKNTYFDNLVKIYAKPTPCAIDL

SEQ ID NO: 40074 - protein, 85 aa, unidentified
  REGION 1..85: note = Description of Unknown:cds_NZ_WFIY01000004.1_cds_WP_155863856.1_1754 target sequence
VNKLKKEKIKTAVVTSSLRRSAIESLKILNFEPDILIAGDDVKKGKPDPEPVLKALSLLGEDPRNVFGVGDTLQDVIAYYNSGIR

SEQ ID NO: 40075 - protein, 84 aa, unidentified
  REGION 1..84: note = Description of Unknown:cds_NZ_WFIY01000004.1_cds_WP_155863856.1_1754 target sequence
LIAGDDVKKGKPDPEPVLKALSLLGEDPRNVFGVGDTLQDVIAYYNSGIREIYLVKGDLKIDYDEAMRKYNAKVIETLCCIINN

SEQ ID NO: 40076 - protein, 85 aa, unidentified
  REGION 1..85: note = Description of Unknown:cds_NZ_WFIY01000004.1_cds_WP_155863856.1_1754 target sequence
DLGIKISVDLDKLMGRKTEEIAKLLAKDRWKELYERKNTYFDNLVKIYAKPTPCAIDLVNKLKKEKIKTAVVTSSLRRSAIESLK

SEQ ID NO: 40077 - protein, 85 aa, unidentified
  REGION 1..85: note = Description of Unknown:cds_NZ_WFIY01000004.1_cds_WP_155863856.1_1754 target sequence
ILNFEPDILIAGDDVKKGKPDPEPVLKALSLLGEDPRNVFGVGDTLQDVIAYYNSGIREIYLVKGDLKIDYDEAMRKYNAKVIET

SEQ ID NO: 40078 - protein, 85 aa, unidentified
  REGION 1..85: note = Description of Unknown:cds_NZ_WFIY01000004.1_cds_WP_155864178.1_2136 target sequence
LPISEIFVSLQGEGPFSGRRALFIRFFGCNLRCSWCDTKYSYYGKPKILEELDVFDDFIILTGGEPTLYQDILKNFLTRAKSKGS

SEQ ID NO: 40079 - protein, 85 aa, unidentified
  REGION 1..85: note = Description of Unknown:cds_NZ_WFIY01000004.1_cds_WP_155864178.1_2136 target sequence
EILVETNGTVVLKDTFVDYVDYFSISPKLSNAGVKYRVEVLKKNVEKLTNKDKFYYLKFPVMWEDDINEVKKMVEYLGVEKRQVW

SEQ ID NO: 40080 - protein, 84 aa, unidentified
  REGION 1..84: note = Description of Unknown:cds_NZ_WFIY01000004.1_cds_WP_155864178.1_2136 target sequence
YRVEVLKKNVEKLTNKDKFYYLKFPVMWEDDINEVKKMVEYLGVEKRQVWLQPIDNRRIDYWWDIAVKAGYNLSIQLHKFVSKP

SEQ ID NO: 40081 - protein, 85 aa, unidentified
  REGION 1..85: note = Description of Unknown:cds_NZ_WFIY01000004.1_cds_WP_155864178.1_2136 target sequence
GCNLRCSWCDTKYSYYGKPKILEELDVFDDFIILTGGEPTLYQDILKNFLTRAKSKGSEILVETNGTVVLKDTFVDYVDYFSISP

SEQ ID NO: 40082 - protein, 85 aa, unidentified
  REGION 1..85: note = Description of Unknown:cds_NZ_WFIY01000004.1_cds_WP_155864178.1_2136 target sequence
KLSNAGVKYRVEVLKKNVEKLTNKDKFYYLKFPVMWEDDINEVKKMVEYLGVEKRQVWLQPIDNRRIDYWWDIAVKAGYNLSIQL

SEQ ID NO: 40083 - protein, 85 aa, unidentified
  REGION 1..85: note = Description of Unknown:cds_NZ_WFIY01000004.1_cds_WP_155864205.1_2171 target sequence
LIMAKFIIEHLDVLGKWILIEYKHSYEIAKREGVDLLICGLKLEGIPSTEKRFYEIFDPKNVIILDPQANEPLKTEDFDGIDAVI

SEQ ID NO: 40084 - protein, 85 aa, unidentified
  REGION 1..85: note = Description of Unknown:cds_NZ_WFIY01000004.1_cds_WP_155864205.1_2171 target sequence
IGGILGDHPPRGRTKSLLSDRFPQSKKRNIGKLQFAIDGALYVAIQVMKGKKLEEIPTINGLKIISEFKGVEDEIILPFGYPLVN

SEQ ID NO: 40085 - protein, 84 aa, unidentified
  REGION 1..84: note = Description of Unknown:cds_NZ_WFIY01000004.1_cds_WP_155864205.1_2171 target sequence
IDGALYVAIQVMKGKKLEEIPTINGLKIISEFKGVEDEIILPFGYPLVNGKPLISEELIKYLIGNRPHRIKWGEDEYISYWQHV

SEQ ID NO: 40086 - protein, 85 aa, unidentified
  REGION 1..85: note = Description of Unknown:cds_NZ_WFIY01000004.1_cds_WP_155864205.1_2171 target sequence
IAKREGVDLLICGLKLEGIPSTEKRFYEIFDPKNVIILDPQANEPLKTEDFDGIDAVIIGGILGDHPPRGRTKSLLSDRFPQSKK

SEQ ID NO: 40087 - protein, 85 aa, unidentified
  REGION 1..85: note = Description of Unknown:cds_NZ_WFIY01000004.1_cds_WP_155864205.1_2171 target sequence
RNIGKLQFAIDGALYVAIQVMKGKKLEEIPTINGLKIISEFKGVEDEIILPFGYPLVNGKPLISEELIKYLIGNRPHRIKWGEDE

SEQ ID NO: 40088 - protein, 85 aa, unidentified
  REGION 1..85: note = Description of Unknown:cds_NZ_WFIY01000004.1_cds_WP_155862503.1_262 target sequence
LRNLVKNVKLRAKVLERAEEFKLNNKAGEDVWFRELVLCILTSNSSFISAYIALNNLYDKLFSLDEDGISKNLKNSGYRFYNLKA

SEQ ID NO: 40089 - protein, 85 aa, unidentified
  REGION 1..85: note = Description of Unknown:cds_NZ_WFIY01000004.1_cds_WP_155862503.1_262 target sequence
KYLFNVRKYYGMLKAWIYPIANKDEYEAREELLQIDGIGMKEASHFLRNVGYFDLAILDRHILKFLSSYYFSYNKKYLQKKDYIY

SEQ ID NO: 40090 - protein, 84 aa, unidentified
  REGION 1..84: note = Description of Unknown:cds_NZ_WFIY01000004.1_cds_WP_155862503.1_262 target sequence
IDGIGMKEASHFLRNVGYFDLAILDRHILKFLSSYYFSYNKKYLQKKDYIYIESVLKSISISLNLPVGLLDLFIWYKATNKLVK

SEQ ID NO: 40091 - protein, 85 aa, unidentified
  REGION 1..85: note = Description of Unknown:cds_NZ_WFIY01000004.1_cds_WP_155862503.1_262 target sequence
GEDVWFRELVLCILTSNSSFISAYIALNNLYDKLFSLDEDGISKNLKNSGYRFYNLKAKYLFNVRKYYGMLKAWIYPIANKDEYE

SEQ ID NO: 40092 - protein, 85 aa, unidentified
  REGION 1..85: note = Description of Unknown:cds_NZ_WFIY01000004.1_cds_WP_155862503.1_262 target sequence
AREELLQIDGIGMKEASHFLRNVGYFDLAILDRHILKFLSSYYFSYNKKYLQKKDYIYIESVLKSISISLNLPVGLLDLFIWYKA

SEQ ID NO: 40093 - protein, 85 aa, unidentified
  REGION 1..85: note = Description of Unknown:cds_NZ_WFIY01000004.1_cds_WP_155862561.1_330 target sequence
TIEAKVVKKLGNFYLNAQIKEQGIVCITGKNGSGKTTFLRSLAGFLNIDEGYVKINNVDVTKLPPEKRGTVIITPDSYIPGLKVK

SEQ ID NO: 40094 - protein, 85 aa, unidentified
  REGION 1..85: note = Description of Unknown:cds_NZ_WFIY01000004.1_cds_WP_155862561.1_330 target sequence
SHLMWGAKIRKIKYDINELDEKYKDLLDGISLDEKVDKLSLGQRERVSIITAIIAKPKVILIDEAFSNINNKEDFIERIIEILRK

SEQ ID NO: 40095 - protein, 84 aa, unidentified
  REGION 1..84: note = Description of Unknown:cds_NZ_WFIY01000004.1_cds_WP_155862561.1_330 target sequence
KVDKLSLGQRERVSIITAIIAKPKVILIDEAFSNINNKEDFIERIIEILRKNSIELIFTTQDINDSQFANSHLRMEDGKLLKIF

SEQ ID NO: 40096 - protein, 85 aa, unidentified
  REGION 1..85: note = Description of Unknown:cds_NZ_WFIY01000004.1_cds_WP_155862561.1_330 target sequence
TGKNGSGKTTFLRSLAGFLNIDEGYVKINNVDVTKLPPEKRGTVIITPDSYIPGLKVKSHLMWGAKIRKIKYDINELDEKYKDLL

SEQ ID NO: 40097 - protein, 85 aa, unidentified
  REGION 1..85: note = Description of Unknown:cds_NZ_WFIY01000004.1_cds_WP_155862561.1_330 target sequence
DGISLDEKVDKLSLGQRERVSIITAIIAKPKVILIDEAFSNINNKEDFIERIIEILRKNSIELIFTTQDINDSQFANSHLRMEDG

SEQ ID NO: 40098 - protein, 85 aa, unidentified
  REGION 1..85: note = Description of Unknown:cds_NZ_WFIY01000004.1_cds_WP_155862808.1_634 target sequence
VLFEISIDKLQQEEKGVNFISNSGHLVSFSSSLFNELNRLGIDKRTFAEIVIDFLNEGTKYYSTYIKPISNIEECKYYSRIFEFW

SEQ ID NO: 40099 - protein, 85 aa, unidentified
  REGION 1..85: note = Description of Unknown:cds_NZ_WFIY01000004.1_cds_WP_155862808.1_634 target sequence
ITSSLTSKQMFAVITNYDEISEVLIIDPQVFNYAVEKLLNYASTKDCMKFSMPFIYKFVVFETFNIFKKKFNANSEKIIGKNNEK

SEQ ID NO: 40100 - protein, 84 aa, unidentified
  REGION 1..84: note = Description of Unknown:cds_NZ_WFIY01000004.1_cds_WP_155862808.1_634 target sequence
EKLLNYASTKDCMKFSMPFIYKFVVFETFNIFKKKFNANSEKIIGKNNEKFLIAKNVEDNALIWKIEAPQFSYVSNYEENKANV

SEQ ID NO: 40101 - protein, 85 aa, unidentified
  REGION 1..85: note = Description of Unknown:cds_NZ_WFIY01000004.1_cds_WP_155862808.1_634 target sequence
SFSSSLFNELNRLGIDKRTFAEIVIDFLNEGTKYYSTYIKPISNIEECKYYSRIFEFWITSSLTSKQMFAVITNYDEISEVLIID

SEQ ID NO: 40102 - protein, 85 aa, unidentified
  REGION 1..85: note = Description of Unknown:cds_NZ_WFIY01000004.1_cds_WP_155862808.1_634 target sequence
PQVFNYAVEKLLNYASTKDCMKFSMPFIYKFVVFETFNIFKKKFNANSEKIIGKNNEKFLIAKNVEDNALIWKIEAPQFSYVSNY

SEQ ID NO: 40103 - protein, 85 aa, unidentified
  REGION 1..85: note = Description of Unknown:cds_NZ_WFIY01000004.1_cds_WP_155864099.1_2045 target sequence
NQEEALIFSSISLVLSIILSYLSWRRYERSKSLMWFFWFLGFVFYFIAALEQEIFAIGYCNYTLAAIYMFIVAELVLVLSLGSVQ

SEQ ID NO: 40104 - protein, 85 aa, unidentified
  REGION 1..85: note = Description of Unknown:cds_NZ_WFIY01000004.1_cds_WP_155864099.1_2045 target sequence
QVPEKWKKIYYYYSAFATAVLIITIVYKPFTIVVNYVPTNFPALPAGASSMVTIPASGLILFLAARALLFKGNKVKMISTILAIV

SEQ ID NO: 40105 - protein, 84 aa, unidentified
  REGION 1..84: note = Description of Unknown:cds_NZ_WFIY01000004.1_cds_WP_155864099.1_2045 target sequence
NYVPTNFPALPAGASSMVTIPASGLILFLAARALLFKGNKVKMISTILAIVILGFGGMLSASGFVLALYLSQIIGMSLFLYGIS

SEQ ID NO: 40106 - protein, 85 aa, unidentified
  REGION 1..85: note = Description of Unknown:cds_NZ_WFIY01000004.1_cds_WP_155864099.1_2045 target sequence
ERSKSLMWFFWFLGFVFYFIAALEQEIFAIGYCNYTLAAIYMFIVAELVLVLSLGSVQQVPEKWKKIYYYYSAFATAVLIITIVY

SEQ ID NO: 40107 - protein, 85 aa, unidentified
  REGION 1..85: note = Description of Unknown:cds_NZ_WFIY01000004.1_cds_WP_155864099.1_2045 target sequence
KPFTIVVNYVPTNFPALPAGASSMVTIPASGLILFLAARALLFKGNKVKMISTILAIVILGFGGMLSASGFVLALYLSQIIGMSL

SEQ ID NO: 40108 - protein, 85 aa, unidentified
  REGION 1..85: note = Description of Unknown:cds_NC_003214.2_cds_NP_445701.1_36 target sequence
AGRQSHKKIDVRNDTSTRYKGKLYGIFVNYMGEKYAQQLVENMYSNYNDVFVEIYNKMHNALRPTLVKLAGAGATFPLWQLVNEA

SEQ ID NO: 40109 - protein, 85 aa, unidentified
  REGION 1..85: note = Description of Unknown:cds_NC_003214.2_cds_NP_445701.1_36 target sequence
IYAVYLTHKETASFLVTKYVARGVPAMTVKTLLAEVGNQLKELVPAVAEQIGSVTLDHTNVVSTVDNIVTSMPALPNSYAGVLMK

SEQ ID NO: 40110 - protein, 84 aa, unidentified
  REGION 1..84: note = Description of Unknown:cds_NC_003214.2_cds_NP_445701.1_36 target sequence
EVGNQLKELVPAVAEQIGSVTLDHTNVVSTVDNIVTSMPALPNSYAGVLMKTKVPTVTPHYAGTGTFSSMESAYKALEDIERGL

SEQ ID NO: 40111 - protein, 85 aa, unidentified
  REGION 1..85: note = Description of Unknown:cds_NC_003214.2_cds_NP_445701.1_36 target sequence
VNYMGEKYAQQLVENMYSNYNDVFVEIYNKMHNALRPTLVKLAGAGATFPLWQLVNEAIYAVYLTHKETASFLVTKYVARGVPAM

SEQ ID NO: 40112 - protein, 85 aa, unidentified
  REGION 1..85: note = Description of Unknown:cds_NC_003214.2_cds_NP_445701.1_36 target sequence
TVKTLLAEVGNQLKELVPAVAEQIGSVTLDHTNVVSTVDNIVTSMPALPNSYAGVLMKTKVPTVTPHYAGTGTFSSMESAYKALE

SEQ ID NO: 40113 - protein, 85 aa, unidentified
  REGION 1..85: note = Description of Unknown:hvTR_Q76RC5 target sequence
AWSITNKADTSSFTKMAEIRAHLKNSAENKDKNEDIFPEDVIIPSTKPKTKRATTPRKPAATKRSTKKEEVEEEVVIEEYHQTTE

SEQ ID NO: 40114 - protein, 85 aa, unidentified
  REGION 1..85: note = Description of Unknown:hvTR_Q76RC5 target sequence
KNSPSPGVSDIVESVAAVELDDSDGDDEPMVQVEAGKVNHSARSDLSDLKVATDNIVKDLKKIITRISAVSTVLEDVQAAGISRQ

SEQ ID NO: 40115 - protein, 84 aa, unidentified
  REGION 1..84: note = Description of Unknown:hvTR_Q76RC5 target sequence
EAGKVNHSARSDLSDLKVATDNIVKDLKKIITRISAVSTVLEDVQAAGISRQFTSMTKAITTLSDLVTEGKSKVVRKKVKTCKK

SEQ ID NO: 40116 - protein, 85 aa, unidentified
  REGION 1..85: note = Description of Unknown:hvTR_Q76RC5 target sequence
ENKDKNEDIFPEDVIIPSTKPKTKRATTPRKPAATKRSTKKEEVEEEVVIEEYHQTTEKNSPSPGVSDIVESVAAVELDDSDGDD

SEQ ID NO: 40117 - protein, 85 aa, unidentified
  REGION 1..85: note = Description of Unknown:hvTR_Q76RC5 target sequence
EPMVQVEAGKVNHSARSDLSDLKVATDNIVKDLKKIITRISAVSTVLEDVQAAGISRQFTSMTKAITTLSDLVTEGKSKVVRKKV

SEQ ID NO: 40118 - protein, 85 aa, unidentified
  REGION 1..85: note = Description of Unknown:cds_NZ_WFIY01000004.1_cds_WP_162309153.1_1154 target sequence
IIDLSVPIENGMPYFPGDPQPKIEKIEKEDYVIHSLLLSTHTGTHVDVPFHFISNGKKLDEIDLTRFSGKAYVLDAEGKNIHSIE

SEQ ID NO: 40119 - protein, 85 aa, unidentified
  REGION 1..85: note = Description of Unknown:cds_NZ_WFIY01000004.1_cds_WP_162309153.1_1154 target sequence
LPSNVDILLIYTGTSKLWKNGWTMDNYATIDEEFAKLLVRKGYKLVGIDSPSIGNSKVHRILLSNDVLIVENLSSNLEKIKGKVV

SEQ ID NO: 40120 - protein, 84 aa, unidentified
  REGION 1..84: note = Description of Unknown:cds_NZ_WFIY01000004.1_cds_WP_162309153.1_1154 target sequence
FAKLLVRKGYKLVGIDSPSIGNSKVHRILLSNDVLIVENLSSNLEKIKGKVVDFISLPLPIKGVDGSPIRAIAVVRNDETHPGK

SEQ ID NO: 40121 - protein, 85 aa, unidentified
  REGION 1..85: note = Description of Unknown:cds_NZ_WFIY01000004.1_cds_WP_162309153.1_1154 target sequence
KEDYVIHSLLLSTHTGTHVDVPFHFISNGKKLDEIDLTRFSGKAYVLDAEGKNIHSIELPSNVDILLIYTGTSKLWKNGWTMDNY

SEQ ID NO: 40122 - protein, 85 aa, unidentified
  REGION 1..85: note = Description of Unknown:cds_NZ_WFIY01000004.1_cds_WP_162309153.1_1154 target sequence
ATIDEEFAKLLVRKGYKLVGIDSPSIGNSKVHRILLSNDVLIVENLSSNLEKIKGKVVDFISLPLPIKGVDGSPIRAIAVVRNDE

SEQ ID NO: 40123 - protein, 85 aa, unidentified
  REGION 1..85: note = Description of Unknown:cds_NZ_WFIY01000004.1_cds_WP_155863542.1_1479 target sequence
SWFLKGIKRGIRTEKFPKEKPLEVAPWSTKIEGEGNVNCPTNAIEDNKWAQEKCVFCRRCFPSYKPTGDVNIFKVEKRNPTFRKS

SEQ ID NO: 40124 - protein, 85 aa, unidentified
  REGION 1..85: note = Description of Unknown:cds_NZ_WFIY01000004.1_cds_WP_155863542.1_1479 target sequence
FYIYPIDVGTCGGCNLELKLLTSPQYDMSRFGIFFTNTPRHADALLVMGIMTEGMREALMRAYEAMPEPKLIILLGACAISGGLL

SEQ ID NO: 40125 - protein, 84 aa, unidentified
  REGION 1..84: note = Description of Unknown:cds_NZ_WFIY01000004.1_cds_WP_155863542.1_1479 target sequence
FFTNTPRHADALLVMGIMTEGMREALMRAYEAMPEPKLIILLGACAISGGLLGLPPEIKGDVRIAGCPPNPYTILKALVETKGD

SEQ ID NO: 40126 - protein, 85 aa, unidentified
  REGION 1..85: note = Description of Unknown:cds_NZ_WFIY01000004.1_cds_WP_155863542.1_1479 target sequence
STKIEGEGNVNCPTNAIEDNKWAQEKCVFCRRCFPSYKPTGDVNIFKVEKRNPTFRKSFYIYPIDVGTCGGCNLELKLLTSPQYD

SEQ ID NO: 40127 - protein, 85 aa, unidentified
  REGION 1..85: note = Description of Unknown:cds_NZ_WFIY01000004.1_cds_WP_155863542.1_1479 target sequence
MSRFGIFFTNTPRHADALLVMGIMTEGMREALMRAYEAMPEPKLIILLGACAISGGLLGLPPEIKGDVRIAGCPPNPYTILKALV

SEQ ID NO: 40128 - protein, 85 aa, unidentified
  REGION 1..85: note = Description of Unknown:cds_NZ_WFIY01000004.1_cds_WP_155864346.1_2360 target sequence
QDINVLNDILKQENIPVDITPVYLSWIFFHELTHHVLEDMRVSTYLDLGTSGKIYDTEDEKLCEYAAFILTGQLVEKCLISSIDF

SEQ ID NO: 40129 - protein, 85 aa, unidentified
  REGION 1..85: note = Description of Unknown:cds_NZ_WFIY01000004.1_cds_WP_155864346.1_2360 target sequence
NKNSNKISFSYLYNNPNIIDSNGYILGYPLPGFFLEHPLNQNYQIDAKNLRKYIHDMLALLYYYYHLDKDPMYNPEVPDWVDPKL

SEQ ID NO: 40130 - protein, 84 aa, unidentified
  REGION 1..84: note = Description of Unknown:cds_NZ_WFIY01000004.1_cds_WP_155864346.1_2360 target sequence
FLEHPLNQNYQIDAKNLRKYIHDMLALLYYYYHLDKDPMYNPEVPDWVDPKLFTQYLAQNLSVVLDSAWSPKHLPSVYTRVFYI

SEQ ID NO: 40131 - protein, 85 aa, unidentified
  REGION 1..85: note = Description of Unknown:cds_NZ_WFIY01000004.1_cds_WP_155864346.1_2360 target sequence
FFHELTHHVLEDMRVSTYLDLGTSGKIYDTEDEKLCEYAAFILTGQLVEKCLISSIDFNKNSNKISFSYLYNNPNIIDSNGYILG

SEQ ID NO: 40132 - protein, 85 aa, unidentified
  REGION 1..85: note = Description of Unknown:cds_NZ_WFIY01000004.1_cds_WP_155864346.1_2360 target sequence
YPLPGFFLEHPLNQNYQIDAKNLRKYIHDMLALLYYYYHLDKDPMYNPEVPDWVDPKLFTQYLAQNLSVVLDSAWSPKHLPSVYT

SEQ ID NO: 40133 - protein, 85 aa, unidentified
  REGION 1..85: note = Description of Unknown:cds_NC_035460.1_cds_YP_009408022.1_71 target sequence
GITHQMDVHVCSENISIVGAAPKKGDYFGMKMNITSTEEHEISLVIIIYPDWSEVPGIRPFIVTVNDVKIPVKRAYESLYKVIFT

SEQ ID NO: 40134 - protein, 85 aa, unidentified
  REGION 1..85: note = Description of Unknown:cds_NC_035460.1_cds_YP_009408022.1_71 target sequence
CKFIVMGNVYVTMYSKNDEEYLYDKRCAEIDINIDEKEFNLISEGYTYAYAYSPIDEENKKECLTALNESKVTGDYDDDDNDDDI

SEQ ID NO: 40135 - protein, 84 aa, unidentified
  REGION 1..84: note = Description of Unknown:cds_NC_035460.1_cds_YP_009408022.1_71 target sequence
IDEKEFNLISEGYTYAYAYSPIDEENKKECLTALNESKVTGDYDDDDNDDDINDIGNIVYKEQEFEYDSDENDFDNTTDSDNYD

SEQ ID NO: 40136 - protein, 85 aa, unidentified
  REGION 1..85: note = Description of Unknown:cds_NC_035460.1_cds_YP_009408022.1_71 target sequence
FGMKMNITSTEEHEISLVIIIYPDWSEVPGIRPFIVTVNDVKIPVKRAYESLYKVIFTCKFIVMGNVYVTMYSKNDEEYLYDKRC

SEQ ID NO: 40137 - protein, 85 aa, unidentified
  REGION 1..85: note = Description of Unknown:cds_NC_035460.1_cds_YP_009408022.1_71 target sequence
AEIDINIDEKEFNLISEGYTYAYAYSPIDEENKKECLTALNESKVTGDYDDDDNDDDINDIGNIVYKEQEFEYDSDENDFDNTTD

SEQ ID NO: 40138 - protein, 85 aa, unidentified
  REGION 1..85: note = Description of Unknown:vpeps_2C0N_1 target sequence
RTLFFIPSMGSVRLPLIDFLVKNDIEYVILSRRNHVAVQREIALDMFLEMKDYDTLAFLDEDVVPIEIDFQKVEAKFNEGYDVVC

SEQ ID NO: 40139 - protein, 85 aa, unidentified
  REGION 1..85: note = Description of Unknown:vpeps_2C0N_1 target sequence
GYYYLKTLRGYSVYRKDWEKEIFDGEVNGCGLGFTFIKREFLEKIKRPAFLAFKPIESPHWIGEDVYFFSTHKPRTYALSSLKAY

SEQ ID NO: 40140 - protein, 85 aa, unidentified
  REGION 1..85: note = Description of Unknown:vpeps_2C0N_1 target sequence
GFTFIKREFLEKIKRPAFLAFKPIESPHWIGEDVYFFSTHKPRTYALSSLKAYHFIDERLALSPDRKLILQNDHVARIKHHHHHH

SEQ ID NO: 40141 - protein, 85 aa, unidentified
  REGION 1..85: note = Description of Unknown:vpeps_2C0N_1 target sequence
VILSRRNHVAVQREIALDMFLEMKDYDTLAFLDEDVVPIEIDFQKVEAKFNEGYDVVCGYYYLKTLRGYSVYRKDWEKEIFDGEV

SEQ ID NO: 40142 - protein, 85 aa, unidentified
  REGION 1..85: note = Description of Unknown:vpeps_2C0N_1 target sequence
NGCGLGFTFIKREFLEKIKRPAFLAFKPIESPHWIGEDVYFFSTHKPRTYALSSLKAYHFIDERLALSPDRKLILQNDHVARIKH

SEQ ID NO: 40143 - protein, 85 aa, unidentified
  REGION 1..85: note = Description of Unknown:cds_NC_025251.1_cds_YP_009091811.1_3 target sequence
NFFRKIVKSCKDEEDQKPALMSAPPDDDDLWLPPPEYVPLTEITAKKNMRNFCVNGEIKICSPNGYSFRILRHILRSFDGVYSGN

SEQ ID NO: 40144 - protein, 85 aa, unidentified
  REGION 1..85: note = Description of Unknown:cds_NC_025251.1_cds_YP_009091811.1_3 target sequence
RRMIGLVKVVIGLALSGAPVPEGMNWVYKIRRTLVFQWAESHGPLDGEELEYSQEITWDDDSEFIGLQIRISARQCHIQGRIWCI

SEQ ID NO: 40145 - protein, 84 aa, unidentified
  REGION 1..84: note = Description of Unknown:cds_NC_025251.1_cds_YP_009091811.1_3 target sequence
TLVFQWAESHGPLDGEELEYSQEITWDDDSEFIGLQIRISARQCHIQGRIWCINMNSRACQLWSDMSLKTQQADEDRNTSLLLE

SEQ ID NO: 40146 - protein, 85 aa, unidentified
  REGION 1..85: note = Description of Unknown:cds_NC_025251.1_cds_YP_009091811.1_3 target sequence
DDLWLPPPEYVPLTEITAKKNMRNFCVNGEIKICSPNGYSFRILRHILRSFDGVYSGNRRMIGLVKVVIGLALSGAPVPEGMNWV

SEQ ID NO: 40147 - protein, 85 aa, unidentified
  REGION 1..85: note = Description of Unknown:cds_NC_025251.1_cds_YP_009091811.1_3 target sequence
YKIRRTLVFQWAESHGPLDGEELEYSQEITWDDDSEFIGLQIRISARQCHIQGRIWCINMNSRACQLWSDMSLKTQQADEDRNTS

SEQ ID NO: 40148 - protein, 85 aa, unidentified
  REGION 1..85: note = Description of Unknown:cds_NC_001542.1_cds_NP_056795.1_3 target sequence
NFLRKIVKNCRDEDTQKPSPVSAPLDDDDLWLPPPEYVPLKELTSKKNRRNFCINGGVKVCSPNGYSFGILRHILRSFDEIYSGN

SEQ ID NO: 40149 - protein, 85 aa, unidentified
  REGION 1..85: note = Description of Unknown:cds_NC_001542.1_cds_NP_056795.1_3 target sequence
HRMVGLVKVVIGLALSGAPVPEGMNWVYKLRRTLIFQWADSRGPLEGEELEYSQEITWDDNTEFVGLQIRVSAKQCHIRGRIWCI

SEQ ID NO: 40150 - protein, 84 aa, unidentified
  REGION 1..84: note = Description of Unknown:cds_NC_001542.1_cds_NP_056795.1_3 target sequence
TLIFQWADSRGPLEGEELEYSQEITWDDNTEFVGLQIRVSAKQCHIRGRIWCINMNSRAGQLWSDMSLQTQRSEEDKDSSLLLE

SEQ ID NO: 40151 - protein, 85 aa, unidentified
  REGION 1..85: note = Description of Unknown:cds_NC_001542.1_cds_NP_056795.1_3 target sequence
DDLWLPPPEYVPLKELTSKKNRRNFCINGGVKVCSPNGYSFGILRHILRSFDEIYSGNHRMVGLVKVVIGLALSGAPVPEGMNWV

SEQ ID NO: 40152 - protein, 85 aa, unidentified
  REGION 1..85: note = Description of Unknown:cds_NC_001542.1_cds_NP_056795.1_3 target sequence
YKLRRTLIFQWADSRGPLEGEELEYSQEITWDDNTEFVGLQIRVSAKQCHIRGRIWCINMNSRAGQLWSDMSLQTQRSEEDKDSS

SEQ ID NO: 40153 - protein, 85 aa, unidentified
  REGION 1..85: note = Description of Unknown:cds_NC_031955.1_cds_YP_009325414.1_3 target sequence
NFLRRIVRNCRDESPPKENIASAPPEDDDIWMPPPEYVPLGDVTGGSSSRNFCINGEVKICSPNGYSFKIIRHILKSFEGVYSGN

SEQ ID NO: 40154 - protein, 85 aa, unidentified
  REGION 1..85: note = Description of Unknown:cds_NC_031955.1_cds_YP_009325414.1_3 target sequence
RRMIGLVKVVIGLALSGSPVPEGMNWAYRFRRTLVFQWADSAGPLEGEELEYSQEITWEDDNEFVGLQIRVSAKQCHIMGRSWCI

SEQ ID NO: 40155 - protein, 84 aa, unidentified
  REGION 1..84: note = Description of Unknown:cds_NC_031955.1_cds_YP_009325414.1_3 target sequence
TLVFQWADSAGPLEGEELEYSQEITWEDDNEFVGLQIRVSAKQCHIMGRSWCININSRACQFWSDMQLRTKQSDEDENTSVLTE

SEQ ID NO: 40156 - protein, 85 aa, unidentified
  REGION 1..85: note = Description of Unknown:cds_NC_031955.1_cds_YP_009325414.1_3 target sequence
DDIWMPPPEYVPLGDVTGGSSSRNFCINGEVKICSPNGYSFKIIRHILKSFEGVYSGNRRMIGLVKVVIGLALSGSPVPEGMNWA

SEQ ID NO: 40157 - protein, 85 aa, unidentified
  REGION 1..85: note = Description of Unknown:cds_NC_031955.1_cds_YP_009325414.1_3 target sequence
YRFRRTLVFQWADSAGPLEGEELEYSQEITWEDDNEFVGLQIRVSAKQCHIMGRSWCININSRACQFWSDMQLRTKQSDEDENTS

SEQ ID NO: 40158 - protein, 85 aa, unidentified
  REGION 1..85: note = Description of Unknown:cds_NZ_WFIY01000004.1_cds_WP_162309141.1_3 target sequence
LEIARNFILARFSGLSNLLKYYKLDPPQLVDNNDLLVWEAINSRLFWDKIFNLFPKEVRDIGRKPRHSDPFNKSLSLAYALLYAI

SEQ ID NO: 40159 - protein, 85 aa, unidentified
  REGION 1..85: note = Description of Unknown:cds_NZ_WFIY01000004.1_cds_WP_162309141.1_3 target sequence
CTRALLSFGFDPTYGFMHKSRYSTALSFDFSEMFKPIAIHAVIRAYKKGLSLDKEGELSKDSVNKVSKEFFDLISKKQNNESIYK

SEQ ID NO: 40160 - protein, 84 aa, unidentified
  REGION 1..84: note = Description of Unknown:cds_NZ_WFIY01000004.1_cds_WP_162309141.1_3 target sequence
FKPIAIHAVIRAYKKGLSLDKEGELSKDSVNKVSKEFFDLISKKQNNESIYKAIYNRALKLSQYIRKKDKSIKYTFTYDPRKLS

SEQ ID NO: 40161 - protein, 85 aa, unidentified
  REGION 1..85: note = Description of Unknown:cds_NZ_WFIY01000004.1_cds_WP_162309141.1_3 target sequence
QLVDNNDLLVWEAINSRLFWDKIFNLFPKEVRDIGRKPRHSDPFNKSLSLAYALLYAICTRALLSFGFDPTYGFMHKSRYSTALS

SEQ ID NO: 40162 - protein, 85 aa, unidentified
  REGION 1..85: note = Description of Unknown:cds_NZ_WFIY01000004.1_cds_WP_162309141.1_3 target sequence
FDFSEMFKPIAIHAVIRAYKKGLSLDKEGELSKDSVNKVSKEFFDLISKKQNNESIYKAIYNRALKLSQYIRKKDKSIKYTFTYD

SEQ ID NO: 40163 - protein, 85 aa, unidentified
  REGION 1..85: note = Description of Unknown:cds_NZ_WFIY01000004.1_cds_WP_155863821.1_1714 target sequence
EIFNDPQGYLQWYKRNKIIYESELRAVKRLNLSNCLDIGAGPSVFHEAISGRIISLDISDAMLKLTNPTEDKIQADALYLPLRNK

SEQ ID NO: 40164 - protein, 85 aa, unidentified
  REGION 1..85: note = Description of Unknown:cds_NZ_WFIY01000004.1_cds_WP_155863821.1_1714 target sequence
AVECTFISVTICFISDVEKLLQEVQRVTKKEFAVCIVPEDSTWGQYYTELGKRGHKYYSKAHFISKKEFISLIQQYFEIKDTVST

SEQ ID NO: 40165 - protein, 84 aa, unidentified
  REGION 1..84: note = Description of Unknown:cds_NZ_WFIY01000004.1_cds_WP_155863821.1_1714 target sequence
AVCIVPEDSTWGQYYTELGKRGHKYYSKAHFISKKEFISLIQQYFEIKDTVSTLRYSPFDEPKVEDPEEGLEGSYICVKAKPKS

SEQ ID NO: 40166 - protein, 85 aa, unidentified
  REGION 1..85: note = Description of Unknown:cds_NZ_WFIY01000004.1_cds_WP_155863821.1_1714 target sequence
KRLNLSNCLDIGAGPSVFHEAISGRIISLDISDAMLKLTNPTEDKIQADALYLPLRNKAVECTFISVTICFISDVEKLLQEVQRV

SEQ ID NO: 40167 - protein, 85 aa, unidentified
  REGION 1..85: note = Description of Unknown:cds_NZ_WFIY01000004.1_cds_WP_155863821.1_1714 target sequence
TKKEFAVCIVPEDSTWGQYYTELGKRGHKYYSKAHFISKKEFISLIQQYFEIKDTVSTLRYSPFDEPKVEDPEEGLEGSYICVKA

SEQ ID NO: 40168 - protein, 85 aa, unidentified
  REGION 1..85: note = Description of Unknown:cds_NZ_WFIY01000004.1_cds_WP_155863833.1_1727 target sequence
VKVKLTWIYIPSDLLPHDEKDDDNDMEVIADGILEEFEKGEKEELEIDEKILIPASILSSRIIEDLPSNLSYFLGRWGGKYYSGD

SEQ ID NO: 40169 - protein, 85 aa, unidentified
  REGION 1..85: note = Description of Unknown:cds_NZ_WFIY01000004.1_cds_WP_155863833.1_1727 target sequence
ISGALGEIIIYTILEEKFGVKLLDILPLREVKFMGMITDTFIHVGKYGKLKEFLGDKDGKSLLFVNVRSSVKFDKAIVRKNIIRD

SEQ ID NO: 40170 - protein, 84 aa, unidentified
  REGION 1..84: note = Description of Unknown:cds_NZ_WFIY01000004.1_cds_WP_155863833.1_1727 target sequence
MGMITDTFIHVGKYGKLKEFLGDKDGKSLLFVNVRSSVKFDKAIVRKNIIRDLITSESLRYPDNYSLLSYVFGDGNIMMVVVRP

SEQ ID NO: 40171 - protein, 85 aa, unidentified
  REGION 1..85: note = Description of Unknown:cds_NZ_WFIY01000004.1_cds_WP_155863833.1_1727 target sequence
VIADGILEEFEKGEKEELEIDEKILIPASILSSRIIEDLPSNLSYFLGRWGGKYYSGDISGALGEIIIYTILEEKFGVKLLDILP

SEQ ID NO: 40172 - protein, 85 aa, unidentified
  REGION 1..85: note = Description of Unknown:cds_NZ_WFIY01000004.1_cds_WP_155863833.1_1727 target sequence
LREVKFMGMITDTFIHVGKYGKLKEFLGDKDGKSLLFVNVRSSVKFDKAIVRKNIIRDLITSESLRYPDNYSLLSYVFGDGNIMM

SEQ ID NO: 40173 - protein, 85 aa, unidentified
  REGION 1..85: note = Description of Unknown:cds_NC_031988.1_cds_YP_009325516.1_3 target sequence
NFLRKIVKNCRDDDDQKPPLVSAPPDDDDLWLPPPEYVPLTEVTGKKNMRNFCINGEVKICSPNGYSFRVIRHILRSFDEIYSGN

SEQ ID NO: 40174 - protein, 85 aa, unidentified
  REGION 1..85: note = Description of Unknown:cds_NC_031988.1_cds_YP_009325516.1_3 target sequence
HRMIGLVKVVIGLALSGAPVPEGMNWVYKLRRTLIFQWAESRGPLDGEELEYSQEITWDDDTEFIGLQIRVSARQCHIQGRIWCI

SEQ ID NO: 40175 - protein, 84 aa, unidentified
  REGION 1..84: note = Description of Unknown:cds_NC_031988.1_cds_YP_009325516.1_3 target sequence
TLIFQWAESRGPLDGEELEYSQEITWDDDTEFIGLQIRVSARQCHIQGRIWCINMNSRACQLWSDMSLKTQQSEEDRNTSLLLE

SEQ ID NO: 40176 - protein, 85 aa, unidentified
  REGION 1..85: note = Description of Unknown:cds_NC_031988.1_cds_YP_009325516.1_3 target sequence
DDLWLPPPEYVPLTEVTGKKNMRNFCINGEVKICSPNGYSFRVIRHILRSFDEIYSGNHRMIGLVKVVIGLALSGAPVPEGMNWV

SEQ ID NO: 40177 - protein, 85 aa, unidentified
  REGION 1..85: note = Description of Unknown:cds_NC_031988.1_cds_YP_009325516.1_3 target sequence
YKLRRTLIFQWAESRGPLDGEELEYSQEITWDDDTEFIGLQIRVSARQCHIQGRIWCINMNSRACQLWSDMSLKTQQSEEDRNTS

SEQ ID NO: 40178 - protein, 85 aa, unidentified
  REGION 1..85: note = Description of Unknown:cds_NC_020808.1_cds_YP_007641394.1_3 target sequence
NILRKIVKSCKDEEDQKPALVSAPPDDDDLWLPPPEYVPLTEITGKKNMRNFCVNGEIKICSPNGYSFRILRHILKSFDGVYSGN

SEQ ID NO: 40179 - protein, 85 aa, unidentified
  REGION 1..85: note = Description of Unknown:cds_NC_020808.1_cds_YP_007641394.1_3 target sequence
RRMIGLVKVVIGLALSGAPVPEGMNWVYKIRRTLVFQWAESRGPLDGEELEYSQEITWDDDSEFIGLQIRVSARQCHIQGRVWCI

SEQ ID NO: 40180 - protein, 84 aa, unidentified
  REGION 1..84: note = Description of Unknown:cds_NC_020808.1_cds_YP_007641394.1_3 target sequence
TLVFQWAESRGPLDGEELEYSQEITWDDDSEFIGLQIRVSARQCHIQGRVWCINMNSRACQLWSDMSLKTQQSDEDKNTSLLLE

SEQ ID NO: 40181 - protein, 85 aa, unidentified
  REGION 1..85: note = Description of Unknown:cds_NC_020808.1_cds_YP_007641394.1_3 target sequence
DDLWLPPPEYVPLTEITGKKNMRNFCVNGEIKICSPNGYSFRILRHILKSFDGVYSGNRRMIGLVKVVIGLALSGAPVPEGMNWV

SEQ ID NO: 40182 - protein, 85 aa, unidentified
  REGION 1..85: note = Description of Unknown:cds_NC_020808.1_cds_YP_007641394.1_3 target sequence
YKIRRTLVFQWAESRGPLDGEELEYSQEITWDDDSEFIGLQIRVSARQCHIQGRVWCINMNSRACQLWSDMSLKTQQSDEDKNTS

SEQ ID NO: 40183 - protein, 85 aa, unidentified
  REGION 1..85: note = Description of Unknown:cds_NC_025385.1_cds_YP_009094329.1_3 target sequence
NFLRKIVKSCKDEEDQKPALVSAPPDDDDLWLPPPESVPLTEISGKKNMRNFCINGEVKICSPNGYSFKILRHILKSFDGIYSGN

SEQ ID NO: 40184 - protein, 85 aa, unidentified; identical to SEQ ID NO: 40179
  REGION 1..85: note = Description of Unknown:cds_NC_025385.1_cds_YP_009094329.1_3 target sequence

SEQ ID NO: 40185 - protein, 84 aa, unidentified; identical to SEQ ID NO: 40180
  REGION 1..84: note = Description of Unknown:cds_NC_025385.1_cds_YP_009094329.1_3 target sequence

SEQ ID NO: 40186 - protein, 85 aa, unidentified
  REGION 1..85: note = Description of Unknown:cds_NC_025385.1_cds_YP_009094329.1_3 target sequence
DDLWLPPPESVPLTEISGKKNMRNFCINGEVKICSPNGYSFKILRHILKSFDGIYSGNRRMIGLVKVVIGLALSGAPVPEGMNWV

SEQ ID NO: 40187 - protein, 85 aa, unidentified; identical to SEQ ID NO: 40182
  REGION 1..85: note = Description of Unknown:cds_NC_025385.1_cds_YP_009094329.1_3 target sequence

SEQ ID NO: 40188 - protein, 85 aa, unidentified
  REGION 1..85: note = Description of Unknown:cds_NC_020809.1_cds_YP_007641399.1_3 target sequence
NIIRKIVKSCKDEEEHKPNPVSAPPDDDDLWLPPPEYVPLAEITGKKNMRNFCINGEVKVCSPNGYSFRILRHILKSFEGVYSGN

SEQ ID NO: 40189 - protein, 85 aa, unidentified
  REGION 1..85: note = Description of Unknown:cds_NC_020809.1_cds_YP_007641399.1_3 target sequence
RRMIGLVKVVIGLAQSGAPVPEGMNWVYKIRRTLVFQWAESSGPLDGEELEYSQEITWDDDSEFVGLQIRVSARQCHIQGRLWCI

SEQ ID NO: 40190 - protein, 84 aa, unidentified
  REGION 1..84: note = Description of Unknown:cds_NC_020809.1_cds_YP_007641399.1_3 target sequence
TLVFQWAESSGPLDGEELEYSQEITWDDDSEFVGLQIRVSARQCHIQGRLWCINMNSRACQLWADMSLKTQQSNEDKNTSLLLE

SEQ ID NO: 40191 - protein, 85 aa, unidentified
  REGION 1..85: note = Description of Unknown:cds_NC_020809.1_cds_YP_007641399.1_3 target sequence
DDLWLPPPEYVPLAEITGKKNMRNFCINGEVKVCSPNGYSFRILRHILKSFEGVYSGNRRMIGLVKVVIGLAQSGAPVPEGMNWV

SEQ ID NO: 40192 - protein, 85 aa, unidentified
  REGION 1..85: note = Description of Unknown:cds_NC_020809.1_cds_YP_007641399.1_3 target sequence
YKIRRTLVFQWAESSGPLDGEELEYSQEITWDDDSEFVGLQIRVSARQCHIQGRLWCINMNSRACQLWADMSLKTQQSNEDKNTS

SEQ ID NO: 40193 - protein, 85 aa, unidentified
  REGION 1..85: note = Description of Unknown:cds_NC_025377.1_cds_YP_009094270.1_3 target sequence
NFLRKMMKTCRDDESSKPLDPSAPPDDDDLWLPPPEYVPLHEISSKGNTRNFCISGEVKICSPNGYSFKIIRHILRSFESVYSGN

SEQ ID NO: 40194 - protein, 85 aa, unidentified
  REGION 1..85: note = Description of Unknown:cds_NC_025377.1_cds_YP_009094270.1_3 target sequence
RRMIGLVKVVIGLTLSGSPVPEGMNWVYKLRKTLVFQWSNSSGPLEGEELEYSQEITWDDDSEYVGLQIRVNAKQCHIAGRSWCV

SEQ ID NO: 40195 - protein, 84 aa, unidentified
  REGION 1..84: note = Description of Unknown:cds_NC_025377.1_cds_YP_009094270.1_3 target sequence
TLVFQWSNSSGPLEGEELEYSQEITWDDDSEYVGLQIRVNAKQCHIAGRSWCVNMNSRACQLWSDMTLKTQQSEEDEHTSVLIE

SEQ ID NO: 40196 - protein, 85 aa, unidentified
  REGION 1..85: note = Description of Unknown:cds_NC_025377.1_cds_YP_009094270.1_3 target sequence
DDLWLPPPEYVPLHEISSKGNTRNFCISGEVKICSPNGYSFKIIRHILRSFESVYSGNRRMIGLVKVVIGLTLSGSPVPEGMNWV

SEQ ID NO: 40197 - protein, 85 aa, unidentified
  REGION 1..85: note = Description of Unknown:cds_NC_025377.1_cds_YP_009094270.1_3 target sequence
YKLRKTLVFQWSNSSGPLEGEELEYSQEITWDDDSEYVGLQIRVNAKQCHIAGRSWCVNMNSRACQLWSDMTLKTQQSEEDEHTS

SEQ ID NO: 40198 - protein, 85 aa, unidentified
  REGION 1..85: note = Description of Unknown:cds_NC_009884.1_cds_YP_001496974.1_49 target sequence
NTHYLTINLLRAIAFGLAYSILEVNVPLFHYIPVVDYRVFYLIIFAIANMTLPLSLFLGNFFLSMASEDMFYWIIKAQTPFQYAW

SEQ ID NO: 40199 - protein, 85 aa, unidentified
  REGION 1..85: note = Description of Unknown:cds_NC_009884.1_cds_YP_001496974.1_49 target sequence
YYPVIDGIPIADVIEVIISVFSYYYYVRHHNETTNIFHFIFVDTDNTSSSQQQQCGMWYAFTHGKAHDEYGALTLVLVSVLAILS

SEQ ID NO: 40200 - protein, 84 aa, unidentified
  REGION 1..84: note = Description of Unknown:cds_NC_009884.1_cds_YP_001496974.1_49 target sequence
TTNIFHFIFVDTDNTSSSQQQQCGMWYAFTHGKAHDEYGALTLVLVSVLAILSSHSLSLTAFATLSLIVGTGIFVDLWAHCFHH

SEQ ID NO: 40201 - protein, 85 aa, unidentified
  REGION 1..85: note = Description of Unknown:cds_NC_009884.1_cds_YP_001496974.1_49 target sequence
LFHYIPVVDYRVFYLIIFAIANMTLPLSLFLGNFFLSMASEDMFYWIIKAQTPFQYAWYYPVIDGIPIADVIEVIISVFSYYYYV

SEQ ID NO: 40202 - protein, 85 aa, unidentified
  REGION 1..85: note = Description of Unknown:cds_NC_009884.1_cds_YP_001496974.1_49 target sequence
RHHNETTNIFHFIFVDTDNTSSSQQQQCGMWYAFTHGKAHDEYGALTLVLVSVLAILSSHSLSLTAFATLSLIVGTGIFVDLWAH

SEQ ID NO: 40203 - protein, 85 aa, unidentified
  REGION 1..85: note = Description of Unknown:cds_NC_020807.1_cds_YP_007641389.1_3 target sequence
NFLKKIVKTCKDEETPKYGAASAPPDDDDLWMPPPEYVPLTQVKGKASVRNFCINGEIKTCSPNGYSFRILRHILKSFDNVYSGN

SEQ ID NO: 40204 - protein, 85 aa, unidentified
  REGION 1..85: note = Description of Unknown:cds_NC_020807.1_cds_YP_007641389.1_3 target sequence
RRMIGLVKIVIGLVLSGSPIPEGMNWVYKLRRTLIFQWAESHGPLEGEELEYSQEITWDDEAEFVGLQIRVSARQCHIQGRLWCI

SEQ ID NO: 40205 - protein, 84 aa, unidentified
  REGION 1..84: note = Description of Unknown:cds_NC_020807.1_cds_YP_007641389.1_3 target sequence
TLIFQWAESHGPLEGEELEYSQEITWDDEAEFVGLQIRVSARQCHIQGRLWCINMNSRACQLWADMALKTQQSQEDENTSLLLE

SEQ ID NO: 40206 - protein, 85 aa, unidentified
  REGION 1..85: note = Description of Unknown:cds_NC_020807.1_cds_YP_007641389.1_3 target sequence
DDLWMPPPEYVPLTQVKGKASVRNFCINGEIKTCSPNGYSFRILRHILKSFDNVYSGNRRMIGLVKIVIGLVLSGSPIPEGMNWV

SEQ ID NO: 40207 - protein, 85 aa, unidentified
  REGION 1..85: note = Description of Unknown:cds_NC_020807.1_cds_YP_007641389.1_3 target sequence
YKLRRTLIFQWAESHGPLEGEELEYSQEITWDDEAEFVGLQIRVSARQCHIQGRLWCINMNSRACQLWADMALKTQQSQEDENTS

SEQ ID NO: 40208 - protein, 85 aa, unidentified
  REGION 1..85: note = Description of Unknown:cds_NC_020810.1_cds_YP_007641404.1_3 target sequence
NIIRKIVKSCKEEEEQKPSPVSAPPDDDDLWLPPPEYVPLSEIANKKNMRNFCVNGEIKVCSPNGYSFRILRHILRSFEGVYSGN

SEQ ID NO: 40209 - protein, 85 aa, unidentified
  REGION 1..85: note = Description of Unknown:cds_NC_020810.1_cds_YP_007641404.1_3 target sequence
RRMIGLVKVVIGLALSGAPVPDGMNWVYKIRRTLIFQWADSSGPLDGEELEYPQEITWDDDSEFVGLQIRVSARQCHIQGRIWCI

SEQ ID NO: 40210 - protein, 84 aa, unidentified
  REGION 1..84: note = Description of Unknown:cds_NC_020810.1_cds_YP_007641404.1_3 target sequence
TLIFQWADSSGPLDGEELEYPQEITWDDDSEFVGLQIRVSARQCHIQGRIWCINMNSRACQLWSDMSLKTQQSDEDKNTSLLLE

SEQ ID NO: 40211 - protein, 85 aa, unidentified
  REGION 1..85: note = Description of Unknown:cds_NC_020810.1_cds_YP_007641404.1_3 target sequence
DDLWLPPPEYVPLSEIANKKNMRNFCVNGEIKVCSPNGYSFRILRHILRSFEGVYSGNRRMIGLVKVVIGLALSGAPVPDGMNWV

SEQ ID NO: 40212 - protein, 85 aa, unidentified
  REGION 1..85: note = Description of Unknown:cds_NC_020810.1_cds_YP_007641404.1_3 target sequence
YKIRRTLIFQWADSSGPLDGEELEYPQEITWDDDSEFVGLQIRVSARQCHIQGRIWCINMNSRACQLWSDMSLKTQQSDEDKNTS

SEQ ID NO: 40213 - protein, 85 aa, unidentified
  REGION 1..85: note = Description of Unknown:cds_NC_025365.1_cds_YP_009094181.1_3 target sequence
NFLRRIVKNCKDEDAPKLGTPSAPPDDDDLWLPPPEYMPLAQIKGKESVRNFCINGEVKICSPNGYSFRIIRHILKSFDNVYSGN

SEQ ID NO: 40214 - protein, 85 aa, unidentified
  REGION 1..85: note = Description of Unknown:cds_NC_025365.1_cds_YP_009094181.1_3 target sequence
RRMIGLAKVVIGLALSGSPVPEGMNWVYKLRRTLIFQWAESQGPLEGEELEYSQEITWDDESEFVGLQIRISAKQCHIQGRLWCI

SEQ ID NO: 40215 - protein, 84 aa, unidentified
  REGION 1..84: note = Description of Unknown:cds_NC_025365.1_cds_YP_009094181.1_3 target sequence
TLIFQWAESQGPLEGEELEYSQEITWDDESEFVGLQIRISAKQCHIQGRLWCINMNSRACQLWADMALKTQQSKDDENTSLLLE

SEQ ID NO: 40216 - protein, 85 aa, unidentified
  REGION 1..85: note = Description of Unknown:cds_NC_025365.1_cds_YP_009094181.1_3 target sequence
DDLWLPPPEYMPLAQIKGKESVRNFCINGEVKICSPNGYSFRIIRHILKSFDNVYSGNRRMIGLAKVVIGLALSGSPVPEGMNWV

SEQ ID NO: 40217 - protein, 85 aa, unidentified
  REGION 1..85: note = Description of Unknown:cds_NC_025365.1_cds_YP_009094181.1_3 target sequence
YKLRRTLIFQWAESQGPLEGEELEYSQEITWDDESEFVGLQIRISAKQCHIQGRLWCINMNSRACQLWADMALKTQQSKDDENTS

SEQ ID NO: 40218 - protein, 85 aa, unidentified
  REGION 1..85: note = Description of Unknown:hvTR_P0C799 target sequence
ATRPSSLVDSLEDEEDPQTLRRERPGSPRPRKVPRNALTQPVDQLLKDLRKNPSMISDPDQRTGREQLSNDELIKKLVTELAENS

SEQ ID NO: 40219 - protein, 85 aa, unidentified
  REGION 1..85: note = Description of Unknown:hvTR_P0C799 target sequence
MIEAEEVRGTLGDISARIEAGFESLSALQVETIQTAQRCDHSDSIRILGENIKILDRSMKTMMETMKLMMEKVDLLYASTAVGTS

SEQ ID NO: 40220 - protein, 84 aa, unidentified
  REGION 1..84: note = Description of Unknown:hvTR_P0C799 target sequence
TIQTAQRCDHSDSIRILGENIKILDRSMKTMMETMKLMMEKVDLLYASTAVGTSAPMLPSHPAPPRIYPQLPSAPTTDEWDIIP

SEQ ID NO: 40221 - protein, 85 aa, unidentified
  REGION 1..85: note = Description of Unknown:hvTR_P0C799 target sequence
PRPRKVPRNALTQPVDQLLKDLRKNPSMISDPDQRTGREQLSNDELIKKLVTELAENSMIEAEEVRGTLGDISARIEAGFESLSA

SEQ ID NO: 40222 - protein, 85 aa, unidentified
  REGION 1..85: note = Description of Unknown:hvTR_P0C799 target sequence
LQVETIQTAQRCDHSDSIRILGENIKILDRSMKTMMETMKLMMEKVDLLYASTAVGTSAPMLPSHPAPPRIYPQLPSAPTTDEWD

SEQ ID NO: 40223 - protein, 85 aa, unidentified
  REGION 1..85: note = Description of Unknown:hvTR_Q9Q9U9 target sequence
ATRPSSLVDSLEDEEDPQTLRRARSGSPRPRKIPKNALTQPVDQLLRDLRKNPSMISDPDQRTGREQLSNDELIKKLVTELAENS

SEQ ID NO: 40224 - protein, 85 aa, unidentified
  REGION 1..85: note = Description of Unknown:hvTR_Q9Q9U9 target sequence
MIEAEEVRGTLGDISARLEAGFESLSALQVETIQTAQRCDHSDSIRVLGENIKILDRSMKTMMETMKLMMEKVDLLYASTAVGTS

SEQ ID NO: 40225 - protein, 84 aa, unidentified
  REGION 1..84: note = Description of Unknown:hvTR_Q9Q9U9 target sequence
TIQTAQRCDHSDSIRVLGENIKILDRSMKTMMETMKLMMEKVDLLYASTAVGTSAPMLPSHPAPPRIYPQLPSAPTADEWDIIP

SEQ ID NO: 40226 - protein, 85 aa, unidentified
  REGION 1..85: note = Description of Unknown:hvTR_Q9Q9U9 target sequence
PRPRKIPKNALTQPVDQLLRDLRKNPSMISDPDQRTGREQLSNDELIKKLVTELAENSMIEAEEVRGTLGDISARLEAGFESLSA

SEQ ID NO: 40227 - protein, 85 aa, unidentified
  REGION 1..85: note = Description of Unknown:hvTR_Q9Q9U9 target sequence
LQVETIQTAQRCDHSDSIRVLGENIKILDRSMKTMMETMKLMMEKVDLLYASTAVGTSAPMLPSHPAPPRIYPQLPSAPTADEWD

SEQ ID NO: 40228 - protein, 85 aa, unidentified
  REGION 1..85: note = Description of Unknown:hvTR_P16798 target sequence
CDASGACDMRHVQNAFTEEIQLHSLYACTRCFRTHLCDLGSGCALVSTLEGSVCVKTGLVYEALYPVARSHLLEPIEEAALDDVN

SEQ ID NO: 40229 - protein, 85 aa, unidentified
  REGION 1..85: note = Description of Unknown:hvTR_P16798 target sequence
IISAVLSGVYSYLMTHAGRYADVIQEVVERDRLKKQVEDSIYFTFNKVFRSMHNVNRISVPVISQLFIQLIIGIYSKQTKYDACV

SEQ ID NO: 40230 - protein, 84 aa, unidentified
  REGION 1..84: note = Description of Unknown:hvTR_P16798 target sequence
RLKKQVEDSIYFTFNKVFRSMHNVNRISVPVISQLFIQLIIGIYSKQTKYDACVIKVSRKKREDALLKQMRSEYGNAPVFGSGV

SEQ ID NO: 40231 - protein, 85 aa, unidentified
  REGION 1..85: note = Description of Unknown:hvTR_P16798 target sequence
CTRCFRTHLCDLGSGCALVSTLEGSVCVKTGLVYEALYPVARSHLLEPIEEAALDDVNIISAVLSGVYSYLMTHAGRYADVIQEV

SEQ ID NO: 40232 - protein, 85 aa, unidentified
  REGION 1..85: note = Description of Unknown:hvTR_P16798 target sequence
VERDRLKKQVEDSIYFTFNKVFRSMHNVNRISVPVISQLFIQLIIGIYSKQTKYDACVIKVSRKKREDALLKQMRSEYGNAPVFG

SEQ ID NO: 40233 - protein, 85 aa, unidentified
  REGION 1..85: note = Description of Unknown:cds_NZ_WFIY01000004.1_cds_WP_155862590.1_363 target sequence
LVEINKFIYPKYSKDVEEELKSAGIYYAYSFGKVSLGKVNVIGKGKTGIVVYIGEGKVVKIRRTDSPKNSLELEAKIQEISYPSA

SEQ ID NO: 40234 - protein, 85 aa, unidentified
  REGION 1..85: note = Description of Unknown:cds_NZ_WFIY01000004.1_cds_WP_155862590.1_363 target sequence
PKVFDYGVNYIIMEYVNGNHLTRYNLRYLEDLLIRAKYLEDVHVQHEEISRPWKNVLVTQARTYIIDYDSASIKEKPLNVTKILS

SEQ ID NO: 40235 - protein, 84 aa, unidentified
  REGION 1..84: note = Description of Unknown:cds_NZ_WFIY01000004.1_cds_WP_155862590.1_363 target sequence
LIRAKYLEDVHVQHEEISRPWKNVLVTQARTYIIDYDSASIKEKPLNVTKILSAFGFYQLGEKYKRNEIGFEEIINFIKELRSS

SEQ ID NO: 40236 - protein, 85 aa, unidentified
  REGION 1..85: note = Description of Unknown:cds_NZ_WFIY01000004.1_cds_WP_155862590.1_363 target sequence
AYSFGKVSLGKVNVIGKGKTGIVVYIGEGKVVKIRRTDSPKNSLELEAKIQEISYPSAPKVFDYGVNYIIMEYVNGNHLTRYNLR

SEQ ID NO: 40237 - protein, 85 aa, unidentified
  REGION 1..85: note = Description of Unknown:cds_NZ_WFIY01000004.1_cds_WP_155862590.1_363 target sequence
YLEDLLIRAKYLEDVHVQHEEISRPWKNVLVTQARTYIIDYDSASIKEKPLNVTKILSAFGFYQLGEKYKRNEIGFEEIINFIKE

SEQ ID NO: 40238 - protein, 85 aa, unidentified
  REGION 1..85: note = Description of Unknown:cds_NZ_WFIY01000004.1_cds_WP_155862667.1_462 target sequence
ELYQTVIIAIKLFAIMDPFSIIPYLLAIFEEYSQSSDTKVSWNYLINKVELAVIILLVFFSLIGKAFLDFLGLTPASLEIGGGII

SEQ ID NO: 40239 - protein, 85 aa, unidentified
  REGION 1..85: note = Description of Unknown:cds_NZ_WFIY01000004.1_cds_WP_155862667.1_462 target sequence
LVYLGIDTMGGFQQLKFLGRSIVEAAVTPIATPLIVGPGTMAALVTLSVSFPVYYLLIGSLIASGITYLVLRLGPLLVKILGRTG

SEQ ID NO: 40240 - protein, 84 aa, unidentified
  REGION 1..84: note = Description of Unknown:cds_NZ_WFIY01000004.1_cds_WP_155862667.1_462 target sequence
TPLIVGPGTMAALVTLSVSFPVYYLLIGSLIASGITYLVLRLGPLLVKILGRTGTVAAGRFTAIIIAAFGVQLILQGISQINLV

SEQ ID NO: 40241 - protein, 85 aa, unidentified
  REGION 1..85: note = Description of Unknown:cds_NZ_WFIY01000004.1_cds_WP_155862667.1_462 target sequence
IFEEYSQSSDTKVSWNYLINKVELAVIILLVFFSLIGKAFLDFLGLTPASLEIGGGIILVYLGIDTMGGFQQLKFLGRSIVEAAV

SEQ ID NO: 40242 - protein, 85 aa, unidentified
  REGION 1..85: note = Description of Unknown:cds_NZ_WFIY01000004.1_cds_WP_155862667.1_462 target sequence
TPIATPLIVGPGTMAALVTLSVSFPVYYLLIGSLIASGITYLVLRLGPLLVKILGRTGTVAAGRFTAIIIAAFGVQLILQGISQI

SEQ ID NO: 40243 - protein, 85 aa, unidentified
  REGION 1..85: note = Description of Unknown:cds_NZ_WFIY01000004.1_cds_WP_155864395.1_956 target sequence
LEVNNPVLINFAIVKVREVKRKPKIDKFLEYFREATGFSCNIDYDIEGNLPFSSYYVYVTRKLVDLSINKCKIPMNENDVRETLE

SEQ ID NO: 40244 - protein, 85 aa, unidentified
  REGION 1..85: note = Description of Unknown:cds_NZ_WFIY01000004.1_cds_WP_155864395.1_956 target sequence
MIDDAMFDSRLIRALRKAQELNSPILYRDGEDPVPLSGKEVRINLLTSFPLPKPRFLESSLIHLAGILPVEISKDSSLIQFENGL

SEQ ID NO: 40245 - protein, 84 aa, unidentified
  REGION 1..84: note = Description of Unknown:cds_NZ_WFIY01000004.1_cds_WP_155864395.1_956 target sequence
PVPLSGKEVRINLLTSFPLPKPRFLESSLIHLAGILPVEISKDSSLIQFENGLWSSLYGLPYPMNNSWKWIWDLKWASLIELLN

SEQ ID NO: 40246 - protein, 85 aa, unidentified
  REGION 1..85: note = Description of Unknown:cds_NZ_WFIY01000004.1_cds_WP_155864395.1_956 target sequence
FLEYFREATGFSCNIDYDIEGNLPFSSYYVYVTRKLVDLSINKCKIPMNENDVRETLEMIDDAMFDSRLIRALRKAQELNSPILY

SEQ ID NO: 40247 - protein, 85 aa, unidentified
  REGION 1..85: note = Description of Unknown:cds_NZ_WFIY01000004.1_cds_WP_155864395.1_956 target sequence
RDGEDPVPLSGKEVRINLLTSFPLPKPRFLESSLIHLAGILPVEISKDSSLIQFENGLWSSLYGLPYPMNNSWKWIWDLKWASLI

SEQ ID NO: 40248 - protein, 85 aa, unidentified
  REGION 1..85: note = Description of Unknown:cds_NZ_WFIY01000004.1_cds_WP_155863117.1_1035 target sequence
TVANITPELIRINQIITHEDIDIVNLDKVISCIKKTKEINPIIVDEETFMVIDGHHRFYAMKLLGFSKIPAYLINYRKDYVKVNK

SEQ ID NO: 40249 - protein, 85 aa, unidentified
  REGION 1..85: note = Description of Unknown:cds_NZ_WFIY01000004.1_cds_WP_155863117.1_1035 target sequence
WFRKIVFGKGNNVDRILSLVIPDSEGKVCINFFSKRFCSNSEYTLYWKLNIIEKYLLSIGINVIKNPKEGIEPPSLDKEYVLSIA

SEQ ID NO: 40250 - protein, 84 aa, unidentified
  REGION 1..84: note = Description of Unknown:cds_NZ_WFIY01000004.1_cds_WP_155863117.1_1035 target sequence
FFSKRFCSNSEYTLYWKLNIIEKYLLSIGINVIKNPKEGIEPPSLDKEYVLSIAKKGLRFPPKTTRHSYEFIIPSYRISLNEFV

SEQ ID NO: 40251 - protein, 85 aa, unidentified
  REGION 1..85: note = Description of Unknown:cds_NZ_WFIY01000004.1_cds_WP_155863117.1_1035 target sequence
KVISCIKKTKEINPIIVDEETFMVIDGHHRFYAMKLLGFSKIPAYLINYRKDYVKVNKWFRKIVFGKGNNVDRILSLVIPDSEGK

SEQ ID NO: 40252 - protein, 85 aa, unidentified
  REGION 1..85: note = Description of Unknown:cds_NZ_WFIY01000004.1_cds_WP_155863117.1_1035 target sequence
VCINFFSKRFCSNSEYTLYWKLNIIEKYLLSIGINVIKNPKEGIEPPSLDKEYVLSIAKKGLRFPPKTTRHSYEFIIPSYRISLN

SEQ ID NO: 40253 - protein, 85 aa, unidentified
  REGION 1..85: note = Description of Unknown:cds_NZ_WFIY01000004.1_cds_WP_155863218.1_1164 target sequence
RKYWLFLIFFVLLSILIKIFGEDNPINVYLFELINYHQVSYLNAFMVDLSKYGRCYVWIPLNALLLIFKKTRRTGITLAGSFILA

SEQ ID NO: 40254 - protein, 85 aa, unidentified
  REGION 1..85: note = Description of Unknown:cds_NZ_WFIY01000004.1_cds_WP_155863218.1_1164 target sequence
IILGEASKYIMAEPRPFYFIHSNLLIPRPHDYSYPSGHALIVGDGATVLALTSPKWLWIPLLIEALLVSYSRVYVGVHWPADILG

SEQ ID NO: 40255 - protein, 84 aa, unidentified
  REGION 1..84: note = Description of Unknown:cds_NZ_WFIY01000004.1_cds_WP_155863218.1_1164 target sequence
YSYPSGHALIVGDGATVLALTSPKWLWIPLLIEALLVSYSRVYVGVHWPADILGGWLLALWIAYFSVEEERKGLLATIEKIFKA

SEQ ID NO: 40256 - protein, 85 aa, unidentified
  REGION 1..85: note = Description of Unknown:cds_NZ_WFIY01000004.1_cds_WP_155863218.1_1164 target sequence
VYLFELINYHQVSYLNAFMVDLSKYGRCYVWIPLNALLLIFKKTRRTGITLAGSFILAIILGEASKYIMAEPRPFYFIHSNLLIP

SEQ ID NO: 40257 - protein, 85 aa, unidentified
  REGION 1..85: note = Description of Unknown:cds_NZ_WFIY01000004.1_cds_WP_155863218.1_1164 target sequence
RPHDYSYPSGHALIVGDGATVLALTSPKWLWIPLLIEALLVSYSRVYVGVHWPADILGGWLLALWIAYFSVEEERKGLLATIEKI

SEQ ID NO: 40258 - protein, 85 aa, unidentified
  REGION 1..85: note = Description of Unknown:cds_NZ_WFIY01000004.1_cds_WP_155863363.1_1335 target sequence
SEISASGFTGYFTVRLNNEPDLYAMAGRLAGLGYSVCQIRLSGATGYVIIPLEDGSFAKKNFADIYYQPRTFTVVSHEFGNFQLS

SEQ ID NO: 40259 - protein, 85 aa, unidentified
  REGION 1..85: note = Description of Unknown:cds_NZ_WFIY01000004.1_cds_WP_155863363.1_1335 target sequence
AGELVRALRESGNIGVDYAELNVNYEKNFDLNLPKIEDWDVRGFNISKGRVEDRNYTLVSFTRINDANPRFLISIYYRGSYEEIS

SEQ ID NO: 40260 - protein, 84 aa, unidentified
  REGION 1..84: note = Description of Unknown:cds_NZ_WFIY01000004.1_cds_WP_155863363.1_1335 target sequence
NLPKIEDWDVRGFNISKGRVEDRNYTLVSFTRINDANPRFLISIYYRGSYEEISKIVQSLRAEMESINSFIIKIFKDGKLLIRW

SEQ ID NO: 40261 - protein, 85 aa, unidentified
  REGION 1..85: note = Description of Unknown:cds_NZ_WFIY01000004.1_cds_WP_155863363.1_1335 target sequence
RLAGLGYSVCQIRLSGATGYVIIPLEDGSFAKKNFADIYYQPRTFTVVSHEFGNFQLSAGELVRALRESGNIGVDYAELNVNYEK

SEQ ID NO: 40262 - protein, 85 aa, unidentified
  REGION 1..85: note = Description of Unknown:cds_NZ_WFIY01000004.1_cds_WP_155863363.1_1335 target sequence
NFDLNLPKIEDWDVRGFNISKGRVEDRNYTLVSFTRINDANPRFLISIYYRGSYEEISKIVQSLRAEMESINSFIIKIFKDGKLL

SEQ ID NO: 40263 - protein, 85 aa, unidentified
  REGION 1..85: note = Description of Unknown:cds_NZ_WFIY01000004.1_cds_WP_155863652.1_1535 target sequence
RRQTLVFFILFIIELIIFIGTSALPVNQPQLASQFQSERSSIVSLPYPLEALSIFTHNYEIALAEFIPALGVGIMGFSIGSTGYV

SEQ ID NO: 40264 - protein, 85 aa, unidentified
  REGION 1..85: note = Description of Unknown:cds_NZ_WFIY01000004.1_cds_WP_155863652.1_1535 target sequence
LSAVSNAQGVPGWIPAIFLLTLPHSWLELPSYAFAATAGLFLLIDRNWKRFLYMIGFVGLELFFAASVEAGEIVLENVNAIYSYL

SEQ ID NO: 40265 - protein, 84 aa, unidentified
  REGION 1..84: note = Description of Unknown:cds_NZ_WFIY01000004.1_cds_WP_155863652.1_1535 target sequence
YAFAATAGLFLLIDRNWKRFLYMIGFVGLELFFAASVEAGEIVLENVNAIYSYLFWIPAALLLYVLYEVYEYIMDITEKPKVQY

SEQ ID NO: 40266 - protein, 85 aa, unidentified
  REGION 1..85: note = Description of Unknown:cds_NZ_WFIY01000004.1_cds_WP_155863652.1_1535 target sequence
QPQLASQFQSERSSIVSLPYPLEALSIFTHNYEIALAEFIPALGVGIMGFSIGSTGYVLSAVSNAQGVPGWIPAIFLLTLPHSWL

SEQ ID NO: 40267 - protein, 85 aa, unidentified
  REGION 1..85: note = Description of Unknown:cds_NZ_WFIY01000004.1_cds_WP_155863652.1_1535 target sequence
ELPSYAFAATAGLFLLIDRNWKRFLYMIGFVGLELFFAASVEAGEIVLENVNAIYSYLFWIPAALLLYVLYEVYEYIMDITEKPK

SEQ ID NO: 40268 - protein, 85 aa, unidentified
  REGION 1..85: note = Description of Unknown:cds_NZ_WFIY01000004.1_cds_WP_155863790.1_1671 target sequence
RVFYLIIILVISIVTNATPFFGTPYTLVTTTLLLKCGITPINLAEAIILTGVGAAVAKSFMYFIGLGARKGLKRNKNVIFFSRFT

SEQ ID NO: 40269 - protein, 85 aa, unidentified
  REGION 1..85: note = Description of Unknown:cds_NZ_WFIY01000004.1_cds_WP_155863790.1_1671 target sequence
SKKSFYIILFLTSIFPFLPLDDLVYLIGGTTKTSLISMLKISLLAKIIKSSIEIPIEAFGILQISEAIGISPFETGVISTVIMTI

SEQ ID NO: 40270 - protein, 84 aa, unidentified
  REGION 1..84: note = Description of Unknown:cds_NZ_WFIY01000004.1_cds_WP_155863790.1_1671 target sequence
KTSLISMLKISLLAKIIKSSIEIPIEAFGILQISEAIGISPFETGVISTVIMTILAIILFKIDWESIYRKIEKYLTNNKYFRLP

SEQ ID NO: 40271 - protein, 85 aa, unidentified
  REGION 1..85: note = Description of Unknown:cds_NZ_WFIY01000004.1_cds_WP_155863790.1_1671 target sequence
VTTTLLLKCGITPINLAEAIILTGVGAAVAKSFMYFIGLGARKGLKRNKNVIFFSRFTSKKSFYIILFLTSIFPFLPLDDLVYLI

SEQ ID NO: 40272 - protein, 85 aa, unidentified
  REGION 1..85: note = Description of Unknown:cds_NZ_WFIY01000004.1_cds_WP_155863790.1_1671 target sequence
GGTTKTSLISMLKISLLAKIIKSSIEIPIEAFGILQISEAIGISPFETGVISTVIMTILAIILFKIDWESIYRKIEKYLTNNKYF

SEQ ID NO: 40273 - protein, 85 aa, unidentified
  REGION 1..85: note = Description of Unknown:cds_NC_043030.1_cds_YP_009664542.1_7 target sequence
VNLKAWAISIGVGVGLLVILPTLAGLLDMAVNSIPAPSTINWSKVGTIDPNNNTSIQVSTTTPMLIKLEVTEWNLVIVMKQYKDT

SEQ ID NO: 40274 - protein, 85 aa, unidentified
  REGION 1..85: note = Description of Unknown:cds_NC_043030.1_cds_YP_009664542.1_7 target sequence
DGAIRASHEYIDDPNGYVTGWNWDPNEGVIMTSPKIGFDTTEGSGQVEWYYGAGALEYNLTTLPASVDVYIAEGVDKYDPMAESG

SEQ ID NO: 40275 - protein, 84 aa, unidentified
  REGION 1..84: note = Description of Unknown:cds_NC_043030.1_cds_YP_009664542.1_7 target sequence
SPKIGFDTTEGSGQVEWYYGAGALEYNLTTLPASVDVYIAEGVDKYDPMAESGLGDLGILARVVAVFGLLAALAVAFHKVGGGL

SEQ ID NO: 40276 - protein, 85 aa, unidentified
  REGION 1..85: note = Description of Unknown:cds_NC_043030.1_cds_YP_009664542.1_7 target sequence
DMAVNSIPAPSTINWSKVGTIDPNNNTSIQVSTTTPMLIKLEVTEWNLVIVMKQYKDTDGAIRASHEYIDDPNGYVTGWNWDPNE

SEQ ID NO: 40277 - protein, 85 aa, unidentified
  REGION 1..85: note = Description of Unknown:cds_NC_043030.1_cds_YP_009664542.1_7 target sequence
GVIMTSPKIGFDTTEGSGQVEWYYGAGALEYNLTTLPASVDVYIAEGVDKYDPMAESGLGDLGILARVVAVFGLLAALAVAFHKV

SEQ ID NO: 40278 - protein, 85 aa, unidentified
  REGION 1..85: note = Description of Unknown:cds_NZ_WFIY01000004.1_cds_WP_155862289.1_2 target sequence
RYCKLTATELSWAKLCPMMKYQILENCGQLNYTTPLYVNHLKPIHDRISEMVINSLREALKNKLLVDKVEPEFTLSYVRDKVFVI

SEQ ID NO: 40279 - protein, 85 aa, unidentified
  REGION 1..85: note = Description of Unknown:cds_NZ_WFIY01000004.1_cds_WP_155862289.1_2 target sequence
RGKPDYFAIIKTKKDYVSLIAEVTISDTVRHLEGEMLFYMASAIYYTSHPVIGLIIYNKGIRWLKYSNFPRKIRSLFTTPKNPEE

SEQ ID NO: 40280 - protein, 84 aa, unidentified
  REGION 1..84: note = Description of Unknown:cds_NZ_WFIY01000004.1_cds_WP_155862289.1_2 target sequence
HLEGEMLFYMASAIYYTSHPVIGLIIYNKGIRWLKYSNFPRKIRSLFTTPKNPEEAAERIYNKIKWACSNCDLMNTCPVYSIHR

SEQ ID NO: 40281 - protein, 85 aa, unidentified
  REGION 1..85: note = Description of Unknown:cds_NZ_WFIY01000004.1_cds_WP_155862289.1_2 target sequence
GQLNYTTPLYVNHLKPIHDRISEMVINSLREALKNKLLVDKVEPEFTLSYVRDKVFVIRGKPDYFAIIKTKKDYVSLIAEVTISD

SEQ ID NO: 40282 - protein, 85 aa, unidentified
  REGION 1..85: note = Description of Unknown:cds_NZ_WFIY01000004.1_cds_WP_155862289.1_2 target sequence
TVRHLEGEMLFYMASAIYYTSHPVIGLIIYNKGIRWLKYSNFPRKIRSLFTTPKNPEEAAERIYNKIKWACSNCDLMNTCPVYSI

SEQ ID NO: 40283 - protein, 85 aa, unidentified
  REGION 1..85: note = Description of Unknown:cds_NZ_WFIY01000004.1_cds_WP_155863673.1_1544 target sequence
QTQIPPGQRYIKKFIYYAALGVPEVNIQQYRLKISGLVENPIEYTYDQLLTMIDTRYTRDFHCVTGWSVKDVYWEGVKIKTLVEK

SEQ ID NO: 40284 - protein, 85 aa, unidentified
  REGION 1..85: note = Description of Unknown:cds_NZ_WFIY01000004.1_cds_WP_155863673.1_1544 target sequence
AKVKEEAKWVIFYSLDGYTSVVPKEDALAEDSIIALKINGKPLSIEQGFPARPFMPHLYGWKSAKWLTEIEFTSRYVDGYWEERG

SEQ ID NO: 40285 - protein, 84 aa, unidentified
  REGION 1..84: note = Description of Unknown:cds_NZ_WFIY01000004.1_cds_WP_155863673.1_1544 target sequence
DSIIALKINGKPLSIEQGFPARPFMPHLYGWKSAKWLTEIEFTSRYVDGYWEERGYNERGNVWEEERFKGQGGKHHLPRRPILT

SEQ ID NO: 40286 - protein, 85 aa, unidentified
  REGION 1..85: note = Description of Unknown:cds_NZ_WFIY01000004.1_cds_WP_155863673.1_1544 target sequence
QQYRLKISGLVENPIEYTYDQLLTMIDTRYTRDFHCVTGWSVKDVYWEGVKIKTLVEKAKVKEEAKWVIFYSLDGYTSVVPKEDA

SEQ ID NO: 40287 - protein, 85 aa, unidentified
  REGION 1..85: note = Description of Unknown:cds_NZ_WFIY01000004.1_cds_WP_155863673.1_1544 target sequence
LAEDSIIALKINGKPLSIEQGFPARPFMPHLYGWKSAKWLTEIEFTSRYVDGYWEERGYNERGNVWEEERFKGQGGKHHLPRRPI

SEQ ID NO: 40288 - protein, 85 aa, unidentified
  REGION 1..85: note = Description of Unknown:cds_NZ_WFIY01000003.1_cds_WP_155862286.1_2371 target sequence
RYCKLTATELSWAKLCPMMKYQILENCGQLNYTTPLYVKHLKPIHDRINEMVINSLREALKNKLLVDKVEPEFTLSYVRDKVFVI

SEQ ID NO: 40289 - protein, 85 aa, unidentified; identical to SEQ ID NO: 40279
  REGION 1..85: note = Description of Unknown:cds_NZ_WFIY01000003.1_cds_WP_155862286.1_2371 target sequence

SEQ ID NO: 40290 - protein, 84 aa, unidentified; identical to SEQ ID NO: 40280
  REGION 1..84: note = Description of Unknown:cds_NZ_WFIY01000003.1_cds_WP_155862286.1_2371 target sequence

SEQ ID NO: 40291 - protein, 85 aa, unidentified
  REGION 1..85: note = Description of Unknown:cds_NZ_WFIY01000003.1_cds_WP_155862286.1_2371 target sequence
GQLNYTTPLYVKHLKPIHDRINEMVINSLREALKNKLLVDKVEPEFTLSYVRDKVFVIRGKPDYFAIIKTKKDYVSLIAEVTISD

SEQ ID NO: 40292 - protein, 85 aa, unidentified; identical to SEQ ID NO: 40282
  REGION 1..85: note = Description of Unknown:cds_NZ_WFIY01000003.1_cds_WP_155862286.1_2371 target sequence

SEQ ID NO: 40293 - protein, 85 aa, unidentified
  REGION 1..85: note = Description of Unknown:cds_NC_030656.1_cds_YP_009268855.1_140 target sequence
VAMNTKLVIATLSVILVYEYVSTQTPPVKNKDVKLDICVPPNASLPIKITCSAKVKSKSSFDNLYWLECDNNISKYDYGSDDGLD

SEQ ID NO: 40294 - protein, 85 aa, unidentified
  REGION 1..85: note = Description of Unknown:cds_NC_030656.1_cds_YP_009268855.1_140 target sequence
YDYGSGSGGDLEEDDEPDNCIFPKSSCCNENYKRIKPTKSRRWNHELKNTLVIRNITEIKPIFKCVYTSSNPSLIKSINVTKFIN

SEQ ID NO: 40295 - protein, 84 aa, unidentified
  REGION 1..84: note = Description of Unknown:cds_NC_030656.1_cds_YP_009268855.1_140 target sequence
NYKRIKPTKSRRWNHELKNTLVIRNITEIKPIFKCVYTSSNPSLIKSINVTKFINEGDPQGYRVCKRYDDDHADFVSKLKQLFE

SEQ ID NO: 40296 - protein, 85 aa, unidentified
  REGION 1..85: note = Description of Unknown:cds_NC_030656.1_cds_YP_009268855.1_140 target sequence
VKNKDVKLDICVPPNASLPIKITCSAKVKSKSSFDNLYWLECDNNISKYDYGSDDGLDYDYGSGSGGDLEEDDEPDNCIFPKSSC

SEQ ID NO: 40297 - protein, 85 aa, unidentified
  REGION 1..85: note = Description of Unknown:cds_NC_030656.1_cds_YP_009268855.1_140 target sequence
CNENYKRIKPTKSRRWNHELKNTLVIRNITEIKPIFKCVYTSSNPSLIKSINVTKFINEGDPQGYRVCKRYDDDHADFVSKLKQL

SEQ ID NO: 40298 - protein, 85 aa, unidentified
  REGION 1..85: note = Description of Unknown:cds_NZ_WFIY01000004.1_cds_WP_155862326.1_52 target sequence
TRMTRINKKVLLTLIFLSALIPVVAADVIYYYHGSITVYTTTMPIELKVGPNGDETGYITTTVGNAGGNFGYCFSSTIYITNSTY

SEQ ID NO: 40299 - protein, 85 aa, unidentified
  REGION 1..85: note = Description of Unknown:cds_NZ_WFIY01000004.1_cds_WP_155862326.1_52 target sequence
SYFHHFLTIKACKPGYLFVTNISTTTGTYIKCAWLIIQCASTGKTIGEFKIISNGAPYKCTTAISLTNGDSYCVSLLVEPNNPLP

SEQ ID NO: 40300 - protein, 84 aa, unidentified
  REGION 1..84: note = Description of Unknown:cds_NZ_WFIY01000004.1_cds_WP_155862326.1_52 target sequence
IKCAWLIIQCASTGKTIGEFKIISNGAPYKCTTAISLTNGDSYCVSLLVEPNNPLPSSGTDLGTITVYLGYNVISASAICLPPT

SEQ ID NO: 40301 - protein, 85 aa, unidentified
  REGION 1..85: note = Description of Unknown:cds_NZ_WFIY01000004.1_cds_WP_155862326.1_52 target sequence
VIYYYHGSITVYTTTMPIELKVGPNGDETGYITTTVGNAGGNFGYCFSSTIYITNSTYSYFHHFLTIKACKPGYLFVTNISTTTG

SEQ ID NO: 40302 - protein, 85 aa, unidentified
  REGION 1..85: note = Description of Unknown:cds_NZ_WFIY01000004.1_cds_WP_155862326.1_52 target sequence
TYIKCAWLIIQCASTGKTIGEFKIISNGAPYKCTTAISLTNGDSYCVSLLVEPNNPLPSSGTDLGTITVYLGYNVISASAICLPP

SEQ ID NO: 40303 - protein, 85 aa, unidentified
  REGION 1..85: note = Description of Unknown:cds_NZ_WFIY01000004.1_cds_WP_155862646.1_429 target sequence
KIGVLAYQGSFEEHALQTKRALDKLKIDGEVIAVKRVNDLDVDGVIIPGGESTTIGIVAQRMGLLEPLKEKIMEGLPVLGTCAGA

SEQ ID NO: 40304 - protein, 85 aa, unidentified
  REGION 1..85: note = Description of Unknown:cds_NZ_WFIY01000004.1_cds_WP_155862646.1_429 target sequence
IMLAKDVSDAKVGKKSQPLIGVMDISVIRNYYGRQRESFEANVDLRSIGGGIEKVVFIRAPAIVKVFGNAKSLSQFKDVHVMVQE

SEQ ID NO: 40305 - protein, 84 aa, unidentified
  REGION 1..84: note = Description of Unknown:cds_NZ_WFIY01000004.1_cds_WP_155862646.1_429 target sequence
NYYGRQRESFEANVDLRSIGGGIEKVVFIRAPAIVKVFGNAKSLSQFKDVHVMVQENNLLATTFHPELSGTTIVHEYFISMIKK

SEQ ID NO: 40306 - protein, 85 aa, unidentified
  REGION 1..85: note = Description of Unknown:cds_NZ_WFIY01000004.1_cds_WP_155862646.1_429 target sequence
DGEVIAVKRVNDLDVDGVIIPGGESTTIGIVAQRMGLLEPLKEKIMEGLPVLGTCAGAIMLAKDVSDAKVGKKSQPLIGVMDISV

SEQ ID NO: 40307 - protein, 85 aa, unidentified
  REGION 1..85: note = Description of Unknown:cds_NZ_WFIY01000004.1_cds_WP_155862646.1_429 target sequence
IRNYYGRQRESFEANVDLRSIGGGIEKVVFIRAPAIVKVFGNAKSLSQFKDVHVMVQENNLLATTFHPELSGTTIVHEYFISMIK

SEQ ID NO: 40308 - protein, 85 aa, unidentified
  REGION 1..85: note = Description of Unknown:cds_NZ_WFIY01000004.1_cds_WP_155864442.1_1598 target sequence
IVTLYISKYVARKTTIYVARKTIHILGGGLVAVVSPFVFSSPLLPIILSYLLTGYLIFHRERQPLSWFQDKENRGEVWFTFSFGT

SEQ ID NO: 40309 - protein, 85 aa, unidentified
  REGION 1..85: note = Description of Unknown:cds_NZ_WFIY01000004.1_cds_WP_155864442.1_1598 target sequence
ILLLSWILIRNFWDPGSRDIYVALLPLFYMSFGDGVTGIIRNYVYKRRVKGWWGSLGMFIVSSFLGYYFLSIPGLISGILATIVE

SEQ ID NO: 40310 - protein, 84 aa, unidentified
  REGION 1..84: note = Description of Unknown:cds_NZ_WFIY01000004.1_cds_WP_155864442.1_1598 target sequence
MSFGDGVTGIIRNYVYKRRVKGWWGSLGMFIVSSFLGYYFLSIPGLISGILATIVERIGKVDDNILVPFVPFILLYITVVLLNL

SEQ ID NO: 40311 - protein, 85 aa, unidentified
  REGION 1..85: note = Description of Unknown:cds_NZ_WFIY01000004.1_cds_WP_155864442.1_1598 target sequence
GGLVAVVSPFVFSSPLLPIILSYLLTGYLIFHRERQPLSWFQDKENRGEVWFTFSFGTILLLSWILIRNFWDPGSRDIYVALLPL

SEQ ID NO: 40312 - protein, 85 aa, unidentified
  REGION 1..85: note = Description of Unknown:cds_NZ_WFIY01000004.1_cds_WP_155864442.1_1598 target sequence
FYMSFGDGVTGIIRNYVYKRRVKGWWGSLGMFIVSSFLGYYFLSIPGLISGILATIVERIGKVDDNILVPFVPFILLYITVVLLN

SEQ ID NO: 40313 - protein, 85 aa, unidentified
  REGION 1..85: note = Description of Unknown:cds_NZ_WFIY01000004.1_cds_WP_155864182.1_2141 target sequence
KLLLLYSGGINSTIALYKFKDVVDCLFIDYGQRSARMQREMARYHCEKLGKKLIEIRIPSLGKAFYDGLGIRLNEPIVHRNVILL

SEQ ID NO: 40314 - protein, 85 aa, unidentified
  REGION 1..85: note = Description of Unknown:cds_NZ_WFIY01000004.1_cds_WP_155864182.1_2141 target sequence
SIALTYAKERNYEEVIFATASEECLFEKDKPLILSTMKRLAEIYGIKLSMPFVNLSKSLLVKIGAKQGIELDKTYSCLLGHKYHC

SEQ ID NO: 40315 - protein, 84 aa, unidentified
  REGION 1..84: note = Description of Unknown:cds_NZ_WFIY01000004.1_cds_WP_155864182.1_2141 target sequence
KPLILSTMKRLAEIYGIKLSMPFVNLSKSLLVKIGAKQGIELDKTYSCLLGHKYHCGVCSQCQARKIAFKEAGIKDETVYKTGG

SEQ ID NO: 40316 - protein, 85 aa, unidentified
  REGION 1..85: note = Description of Unknown:cds_NZ_WFIY01000004.1_cds_WP_155864182.1_2141 target sequence
IDYGQRSARMQREMARYHCEKLGKKLIEIRIPSLGKAFYDGLGIRLNEPIVHRNVILLSIALTYAKERNYEEVIFATASEECLFE

SEQ ID NO: 40317 - protein, 85 aa, unidentified
  REGION 1..85: note = Description of Unknown:cds_NZ_WFIY01000004.1_cds_WP_155864182.1_2141 target sequence
KDKPLILSTMKRLAEIYGIKLSMPFVNLSKSLLVKIGAKQGIELDKTYSCLLGHKYHCGVCSQCQARKIAFKEAGIKDETVYKTG

SEQ ID NO: 40318 - protein, 85 aa, unidentified
  REGION 1..85: note = Description of Unknown:cds_NC_035460.1_cds_YP_009408128.1_177 target sequence
KHIQTIIFMYSLTLTYSLTYSSNLPPYKTINGKCRDYLHYYNENINMCCSQCFPGQYHKEECTNNKDTVCERCENGTYTSIYNYI

SEQ ID NO: 40319 - protein, 85 aa, unidentified
  REGION 1..85: note = Description of Unknown:cds_NC_035460.1_cds_YP_009408128.1_177 target sequence
PHCLSCTVCTSDQVEIKPCTKTQNRVCVCDIEHYCILKSRNNGCKVCAPKRKCPVGEGVSGFDSMGNVICKECPHGSYSDKVSAT

SEQ ID NO: 40320 - protein, 84 aa, unidentified
  REGION 1..84: note = Description of Unknown:cds_NC_035460.1_cds_YP_009408128.1_177 target sequence
DIEHYCILKSRNNGCKVCAPKRKCPVGEGVSGFDSMGNVICKECPHGSYSDKVSATEWCMPHFRCPKEYLRLLSGTKDKNTVCA

SEQ ID NO: 40321 - protein, 85 aa, unidentified
  REGION 1..85: note = Description of Unknown:cds_NC_035460.1_cds_YP_009408128.1_177 target sequence
KTINGKCRDYLHYYNENINMCCSQCFPGQYHKEECTNNKDTVCERCENGTYTSIYNYIPHCLSCTVCTSDQVEIKPCTKTQNRVC

SEQ ID NO: 40322 - protein, 85 aa, unidentified
  REGION 1..85: note = Description of Unknown:cds_NC_035460.1_cds_YP_009408128.1_177 target sequence
VCDIEHYCILKSRNNGCKVCAPKRKCPVGEGVSGFDSMGNVICKECPHGSYSDKVSATEWCMPHFRCPKEYLRLLSGTKDKNTVC

SEQ ID NO: 40323 - protein, 84 aa, unidentified
  REGION 1..84: note = Description of Unknown:hvTR_P03259.4 target sequence
PCSDSEDEQDENGMAHVSASAAAAAADREREEFQLDHPELPGHNCKSCEHHRNSTGNTDLMCSLCYLRAYNMFIYSKCAMGGGR

SEQ ID NO: 40324 - protein, 85 aa, unidentified
  REGION 1..85: note = Description of Unknown:hvTR_P03259.4 target sequence
FPCSDSEDEQDENGMAHVSASAAAAAADREREEFQLDHPELPGHNCKSCEHHRNSTGNTDLMCSLCYLRAYNMFIYSKCAMGGGR

SEQ ID NO: 40325 - protein, 85 aa, unidentified
  REGION 1..85: note = Description of Unknown:hvTR_P68950 target sequence
SILISPSNNTGWGLRFPSKMFGGAKKRSDQHPVRVRGHYRAPWGAHKRGRTGRTTVDDAIDAVVEEARNYTPTPPPVSTVDAAIQ

SEQ ID NO: 40326 - protein, 85 aa, unidentified
  REGION 1..85: note = Description of Unknown:hvTR_P68950 target sequence
TVVRGARRYAKMKRRRRRVARRHRRRPGTAAQRAAAALLNRARRTGRRAAMRAARRLAAGIVTVPPRSRRRAAAAAAAAISAMTQ

SEQ ID NO: 40327 - protein, 84 aa, unidentified
  REGION 1..84: note = Description of Unknown:hvTR_P68950 target sequence
TAAQRAAAALLNRARRTGRRAAMRAARRLAAGIVTVPPRSRRRAAAAAAAAISAMTQGRRGNVYWVRDSVSGLRVPVRTRPPRN

SEQ ID NO: 40328 - protein, 85 aa, unidentified
  REGION 1..85: note = Description of Unknown:hvTR_P68950 target sequence
SDQHPVRVRGHYRAPWGAHKRGRTGRTTVDDAIDAVVEEARNYTPTPPPVSTVDAAIQTVVRGARRYAKMKRRRRRVARRHRRRP

SEQ ID NO: 40329 - protein, 85 aa, unidentified
  REGION 1..85: note = Description of Unknown:hvTR_P68950 target sequence
GTAAQRAAAALLNRARRTGRRAAMRAARRLAAGIVTVPPRSRRRAAAAAAAAISAMTQGRRGNVYWVRDSVSGLRVPVRTRPPRN

SEQ ID NO: 40330 - protein, 85 aa, unidentified
  REGION 1..85: note = Description of Unknown:cds_NZ_WFIY01000004.1_cds_WP_155862347.1_78 target sequence
ARRLMNREIDIQKSLEISQTLYYRVMLNISETVLDFIGVGSIITFLLVSLLQNPLTLNISLIVFSTTYVVISLKMSRYIYPFVKT

SEQ ID NO: 40331 - protein, 85 aa, unidentified
  REGION 1..85: note = Description of Unknown:cds_NZ_WFIY01000004.1_cds_WP_155862347.1_78 target sequence
FASKPSLIAKNFPFLIKLTYILSLILLNVIFLLSFYVHSLSILPAFLIGGYISFIGSQLISVIRFLKERTIEYFLVLSYIISGIS

SEQ ID NO: 40332 - protein, 84 aa, unidentified
  REGION 1..84: note = Description of Unknown:cds_NZ_WFIY01000004.1_cds_WP_155862347.1_78 target sequence
VIFLLSFYVHSLSILPAFLIGGYISFIGSQLISVIRFLKERTIEYFLVLSYIISGISIAISPFSTITILIPSLLALLYRLVRRA

SEQ ID NO: 40333 - protein, 85 aa, unidentified
  REGION 1..85: note = Description of Unknown:cds_NZ_WFIY01000004.1_cds_WP_155862347.1_78 target sequence
NISETVLDFIGVGSIITFLLVSLLQNPLTLNISLIVFSTTYVVISLKMSRYIYPFVKTFASKPSLIAKNFPFLIKLTYILSLILL

SEQ ID NO: 40334 - protein, 85 aa, unidentified
  REGION 1..85: note = Description of Unknown:cds_NZ_WFIY01000004.1_cds_WP_155862347.1_78 target sequence
NVIFLLSFYVHSLSILPAFLIGGYISFIGSQLISVIRFLKERTIEYFLVLSYIISGISIAISPFSTITILIPSLLALLYRLVRRA

SEQ ID NO: 40335 - protein, 85 aa, unidentified
  REGION 1..85: note = Description of Unknown:cds_NZ_WFIY01000004.1_cds_WP_155863715.1_1578 target sequence
EKAEQLFQAYKERKEIDPFPLTEEEGKKVGEEFSKMLIDYEGLGGYKIAKGGIIGVLTKAMITSSEDVELWFKTHKVEVELIALV

SEQ ID NO: 40336 - protein, 85 aa, unidentified
  REGION 1..85: note = Description of Unknown:cds_NZ_WFIY01000004.1_cds_WP_155863715.1_1578 target sequence
KSGRISKVYLGLEIPATRFKTWDLPAQYIIADDAFAGRLFVGKEIEPPYGSFKLFINDKYIATGSPTYSPQSLIKDFMEGYVALG

SEQ ID NO: 40337 - protein, 84 aa, unidentified
  REGION 1..84: note = Description of Unknown:cds_NZ_WFIY01000004.1_cds_WP_155863715.1_1578 target sequence
IIADDAFAGRLFVGKEIEPPYGSFKLFINDKYIATGSPTYSPQSLIKDFMEGYVALGAFLGPYKISKGDKIRVEGKKTISVKMV

SEQ ID NO: 40338 - protein, 85 aa, unidentified
  REGION 1..85: note = Description of Unknown:cds_NZ_WFIY01000004.1_cds_WP_155863715.1_1578 target sequence
KVGEEFSKMLIDYEGLGGYKIAKGGIIGVLTKAMITSSEDVELWFKTHKVEVELIALVKSGRISKVYLGLEIPATRFKTWDLPAQ

SEQ ID NO: 40339 - protein, 85 aa, unidentified
  REGION 1..85: note = Description of Unknown:cds_NZ_WFIY01000004.1_cds_WP_155863715.1_1578 target sequence
YIIADDAFAGRLFVGKEIEPPYGSFKLFINDKYIATGSPTYSPQSLIKDFMEGYVALGAFLGPYKISKGDKIRVEGKKTISVKMV

SEQ ID NO: 40340 - protein, 85 aa, unidentified
  REGION 1..85: note = Description of Unknown:cds_NZ_WFIY01000004.1_cds_WP_155863980.1_1904 target sequence
VEVPKIPEEKEIELNPRDTALIIVDMQNDFVRKEGKLPVPTAESTIKPIKDLLKKARDSSALVIYTQDWHMKDDPEFKIWGEHAL

SEQ ID NO: 40341 - protein, 85 aa, unidentified
  REGION 1..85: note = Description of Unknown:cds_NZ_WFIY01000004.1_cds_WP_155863980.1_1904 target sequence
AGTWGAEIIDELKPEKDDFIIKKYRYDAFFETPLDYILRVKGIKNLIITGTVANICVLHTAGSAALRWYNVIMPKDGISAITDFD

SEQ ID NO: 40342 - protein, 84 aa, unidentified
  REGION 1..84: note = Description of Unknown:cds_NZ_WFIY01000004.1_cds_WP_155863980.1_1904 target sequence
FFETPLDYILRVKGIKNLIITGTVANICVLHTAGSAALRWYNVIMPKDGISAITDFDYYATLRQVDFLYKGKITTSAGIKFNTK

SEQ ID NO: 40343 - protein, 85 aa, unidentified
  REGION 1..85: note = Description of Unknown:cds_NZ_WFIY01000004.1_cds_WP_155863980.1_1904 target sequence
NDFVRKEGKLPVPTAESTIKPIKDLLKKARDSSALVIYTQDWHMKDDPEFKIWGEHALAGTWGAEIIDELKPEKDDFIIKKYRYD

SEQ ID NO: 40344 - protein, 85 aa, unidentified
  REGION 1..85: note = Description of Unknown:cds_NZ_WFIY01000004.1_cds_WP_155863980.1_1904 target sequence
AFFETPLDYILRVKGIKNLIITGTVANICVLHTAGSAALRWYNVIMPKDGISAITDFDYYATLRQVDFLYKGKITTSAGIKFNTK

SEQ ID NO: 40345 - protein, 85 aa, unidentified
  REGION 1..85: note = Description of Unknown:cds_NC_040407.1_cds_YP_009551533.1_11 target sequence
SLSIDVTSLPSITSSIYKNESSPASSTLSGKSIGRNEQYVSADADAFSKYMLSRSPEDIGPSDSASNDPLTSFSIKSNAVKTNAD

SEQ ID NO: 40346 - protein, 85 aa, unidentified
  REGION 1..85: note = Description of Unknown:cds_NC_040407.1_cds_YP_009551533.1_11 target sequence
AGVSMDSSTQSRPSSSVGCDQVDFSLSKGVKISANLDSNLSISTEVKEPKLKAEKKSRKHYPRIEAESDSEEFVLDDSDSDDGKC

SEQ ID NO: 40347 - protein, 84 aa, unidentified
  REGION 1..84: note = Description of Unknown:cds_NC_040407.1_cds_YP_009551533.1_11 target sequence
GVKISANLDSNLSISTEVKEPKLKAEKKSRKHYPRIEAESDSEEFVLDDSDSDDGKCKNCKYKKKYFALRLKMKKVAIQLIEDV

SEQ ID NO: 40348 - protein, 85 aa, unidentified
  REGION 1..85: note = Description of Unknown:cds_NC_040407.1_cds_YP_009551533.1_11 target sequence
LSGKSIGRNEQYVSADADAFSKYMLSRSPEDIGPSDSASNDPLTSFSIKSNAVKTNADAGVSMDSSTQSRPSSSVGCDQVDFSLS

SEQ ID NO: 40349 - protein, 85 aa, unidentified
  REGION 1..85: note = Description of Unknown:cds_NC_040407.1_cds_YP_009551533.1_11 target sequence
KGVKISANLDSNLSISTEVKEPKLKAEKKSRKHYPRIEAESDSEEFVLDDSDSDDGKCKNCKYKKKYFALRLKMKKVAIQLIEDV

SEQ ID NO: 40350 - protein, 85 aa, unidentified
  REGION 1..85: note = Description of Unknown:cds_NC_029316.1_cds_YP_009230305.1_52 target sequence
QNYTELEGLFTKIVDVCLSNEIDLHPVQSFYKLIILSSPIPGIDTILNNTKKELVLASTKQQQSKVIRSFCINLVRKMNSLSSVD

SEQ ID NO: 40351 - protein, 85 aa, unidentified
  REGION 1..85: note = Description of Unknown:cds_NC_029316.1_cds_YP_009230305.1_52 target sequence
SSIIDGIEGDISTYNIDSVINESNRIMQRVEEAFTTKNVRDSIKQFELAVIETKALLIRIKDSMIYEEVTKLTGINENNITDVLH

SEQ ID NO: 40352 - protein, 84 aa, unidentified
  REGION 1..84: note = Description of Unknown:cds_NC_029316.1_cds_YP_009230305.1_52 target sequence
RVEEAFTTKNVRDSIKQFELAVIETKALLIRIKDSMIYEEVTKLTGINENNITDVLHFNDYTEGKYTIAEKLMQILLFIKTHFK

SEQ ID NO: 40353 - protein, 85 aa, unidentified
  REGION 1..85: note = Description of Unknown:cds_NC_029316.1_cds_YP_009230305.1_52 target sequence
QSFYKLIILSSPIPGIDTILNNTKKELVLASTKQQQSKVIRSFCINLVRKMNSLSSVDSSIIDGIEGDISTYNIDSVINESNRIM

SEQ ID NO: 40354 - protein, 85 aa, unidentified
  REGION 1..85: note = Description of Unknown:cds_NC_029316.1_cds_YP_009230305.1_52 target sequence
QRVEEAFTTKNVRDSIKQFELAVIETKALLIRIKDSMIYEEVTKLTGINENNITDVLHFNDYTEGKYTIAEKLMQILLFIKTHFK

SEQ ID NO: 40355 - protein, 85 aa, unidentified
  REGION 1..85: note = Description of Unknown:cds_NC_011505.2_cds_YP_002302224.1_11 target sequence
SLSIDVTSLPSIPSTIYKNESSSTTSTLSGKSIGRSEQYISPDAEAFNKYMLSKSPEDIGPSDSASNDPLTSFSIRSNAVKTNAD

SEQ ID NO: 40356 - protein, 85 aa, unidentified
  REGION 1..85: note = Description of Unknown:cds_NC_011505.2_cds_YP_002302224.1_11 target sequence
AGVSMDSSAQSRPSSNVGCDQVDFSLNKGLKVKANLDSSISISTDTKKEKSKQNHKSRKHYPRIEAESDSDDYVLDDSDSDDGKC

SEQ ID NO: 40357 - protein, 84 aa, unidentified
  REGION 1..84: note = Description of Unknown:cds_NC_011505.2_cds_YP_002302224.1_11 target sequence
GLKVKANLDSSISISTDTKKEKSKQNHKSRKHYPRIEAESDSDDYVLDDSDSDDGKCKNCKYKKKYFALRMRMKQVAMQLIEDL

SEQ ID NO: 40358 - protein, 85 aa, unidentified
  REGION 1..85: note = Description of Unknown:cds_NC_011505.2_cds_YP_002302224.1_11 target sequence
LSGKSIGRSEQYISPDAEAFNKYMLSKSPEDIGPSDSASNDPLTSFSIRSNAVKTNADAGVSMDSSAQSRPSSNVGCDQVDFSLN

SEQ ID NO: 40359 - protein, 85 aa, unidentified
  REGION 1..85: note = Description of Unknown:cds_NC_011505.2_cds_YP_002302224.1_11 target sequence
KGLKVKANLDSSISISTDTKKEKSKQNHKSRKHYPRIEAESDSDDYVLDDSDSDDGKCKNCKYKKKYFALRMRMKQVAMQLIEDL

SEQ ID NO: 40360 - protein, 85 aa, unidentified
  REGION 1..85: note = Description of Unknown:cds_NC_024711.1_cds_YP_009052517.1_38 target sequence
VKIEFYYKSADKDKTEAMQEAIDIALFGTNVQCNFKNLPDHLILEDMILEKAVAGKNITEYPTCIIYRDDTEYKRYSNSVTWEEL

SEQ ID NO: 40361 - protein, 85 aa, unidentified
  REGION 1..85: note = Description of Unknown:cds_NC_024711.1_cds_YP_009052517.1_38 target sequence
RNDINYLTGDEPTRQTNNIFVEAFIDEHDCITRAKCADAIAWMWKYQNTKVEYIQTNVDNPNKFAVVIKDSWRTYATYVYSDSLT

SEQ ID NO: 40362 - protein, 84 aa, unidentified
  REGION 1..84: note = Description of Unknown:cds_NC_024711.1_cds_YP_009052517.1_38 target sequence
HDCITRAKCADAIAWMWKYQNTKVEYIQTNVDNPNKFAVVIKDSWRTYATYVYSDSLTTEMIKNTLLRVPNTIKEAVKNNAIVL

SEQ ID NO: 40363 - protein, 85 aa, unidentified
  REGION 1..85: note = Description of Unknown:cds_NC_024711.1_cds_YP_009052517.1_38 target sequence
GTNVQCNFKNLPDHLILEDMILEKAVAGKNITEYPTCIIYRDDTEYKRYSNSVTWEELRNDINYLTGDEPTRQTNNIFVEAFIDE

SEQ ID NO: 40364 - protein, 85 aa, unidentified
  REGION 1..85: note = Description of Unknown:cds_NZ_WFIY01000004.1_cds_WP_155862639.1_420 target sequence
ELNDLLDYATKKVMEEIRENLEQALAEANKIIENKYNDILSDYDKKIRDLISKRKEQIEGEKAKLDVENKRAILNEENYWLQKVY

SEQ ID NO: 40365 - protein, 85 aa, unidentified
  REGION 1..85: note = Description of Unknown:cds_NZ_WFIY01000004.1_cds_WP_155862639.1_420 target sequence
DEVVKNINVVTSSKEYAEGLQSIIKKEISSSITKAKIICNKNDVEVVKKILKDNKLSADVEEDDNLLGGIKIYYPDVGLVKDYSL

SEQ ID NO: 40366 - protein, 84 aa, unidentified
  REGION 1..84: note = Description of Unknown:cds_NZ_WFIY01000004.1_cds_WP_155862639.1_420 target sequence
ISSSITKAKIICNKNDVEVVKKILKDNKLSADVEEDDNLLGGIKIYYPDVGLVKDYSLNLILSQVFESVKPKVAEILFGGENGR

SEQ ID NO: 40367 - protein, 85 aa, unidentified
  REGION 1..85: note = Description of Unknown:cds_NZ_WFIY01000004.1_cds_WP_155862639.1_420 target sequence
ANKIIENKYNDILSDYDKKIRDLISKRKEQIEGEKAKLDVENKRAILNEENYWLQKVYDEVVKNINVVTSSKEYAEGLQSIIKKE

SEQ ID NO: 40368 - protein, 85 aa, unidentified
  REGION 1..85: note = Description of Unknown:cds_NZ_WFIY01000004.1_cds_WP_155862913.1_764 target sequence
ELHEAIKNIFPSSGIYEVILGTKGIRDNISPIGVIVDGSQLKVKLYKCTTTYQNILVYPYCSINVVIDNPKMFYLALFNKPVKYT

SEQ ID NO: 40369 - protein, 85 aa, unidentified
  REGION 1..85: note = Description of Unknown:cds_NZ_WFIY01000004.1_cds_WP_155862913.1_764 target sequence
LIHGLPVVSDNVIFSNCKIIEDHTEYVILSLDPFDVKYSRHKISAFNRGNCLFIDLLVNVTRLDIFSREELDSMLKVISYEIKVI

SEQ ID NO: 40370 - protein, 84 aa, unidentified
  REGION 1..84: note = Description of Unknown:cds_NZ_WFIY01000004.1_cds_WP_155862913.1_764 target sequence
ILSLDPFDVKYSRHKISAFNRGNCLFIDLLVNVTRLDIFSREELDSMLKVISYEIKVIKRTQPNLLDIIREIEDLIISKGYKLE

SEQ ID NO: 40371 - protein, 85 aa, unidentified
  REGION 1..85: note = Description of Unknown:cds_NZ_WFIY01000004.1_cds_WP_155862913.1_764 target sequence
NISPIGVIVDGSQLKVKLYKCTTTYQNILVYPYCSINVVIDNPKMFYLALFNKPVKYTLIHGLPVVSDNVIFSNCKIIEDHTEYV

SEQ ID NO: 40372 - protein, 85 aa, unidentified
  REGION 1..85: note = Description of Unknown:cds_NZ_WFIY01000004.1_cds_WP_155862933.1_786 target sequence
SSYRTIEFNGIKLCINDEVYEPAEDTELLLSIVKVKKGEKVIEIGSGSGIFSIISAKMGGKVYSIDINPFASLATLCSSKLNNLD

SEQ ID NO: 40373 - protein, 85 aa, unidentified
  REGION 1..85: note = Description of Unknown:cds_NZ_WFIY01000004.1_cds_WP_155862933.1_786 target sequence
IDVINCDMLTCLRNITFDVGIFNPPYLPFEEYDDWIKYSWSGGKSGSEVLVNFINTISARRLYILYSSLSNEDKILEAIRRRKMV

SEQ ID NO: 40374 - protein, 84 aa, unidentified
  REGION 1..84: note = Description of Unknown:cds_NZ_WFIY01000004.1_cds_WP_155862933.1_786 target sequence
PFEEYDDWIKYSWSGGKSGSEVLVNFINTISARRLYILYSSLSNEDKILEAIRRRKMVINRKIEKTFGFERLIALELNAEGSVS

SEQ ID NO: 40375 - protein, 85 aa, unidentified
  REGION 1..85: note = Description of Unknown:cds_NZ_WFIY01000004.1_cds_WP_155862933.1_786 target sequence
LLLSIVKVKKGEKVIEIGSGSGIFSIISAKMGGKVYSIDINPFASLATLCSSKLNNLDIDVINCDMLTCLRNITFDVGIFNPPYL

SEQ ID NO: 40376 - protein, 85 aa, unidentified
  REGION 1..85: note = Description of Unknown:cds_NZ_WFIY01000004.1_cds_WP_155863921.1_1834 target sequence
VIAGVIIDEKIEGILKEVGVKDSKMLSREKREKLYDIISEFAEAYIVNKAYPNEIDSNNLNELTYTKVIQIIYASLPLRPKIVTI

SEQ ID NO: 40377 - protein, 85 aa, unidentified
  REGION 1..85: note = Description of Unknown:cds_NZ_WFIY01000004.1_cds_WP_155863921.1_1834 target sequence
DKVGNEDIVIMKIRELGLKDNVVFNADVKYIEASAASIIAKVTRDRIIDSLKKIYGDFGSGYPSDPKTRKWIIEMYEKDKNNPPP

SEQ ID NO: 40378 - protein, 84 aa, unidentified
  REGION 1..84: note = Description of Unknown:cds_NZ_WFIY01000004.1_cds_WP_155863921.1_1834 target sequence
VKYIEASAASIIAKVTRDRIIDSLKKIYGDFGSGYPSDPKTRKWIIEMYEKDKNNPPPIIRRTWKTLLKIAPNYYINKGGLYGY

SEQ ID NO: 40379 - protein, 85 aa, unidentified
  REGION 1..85: note = Description of Unknown:cds_NZ_WFIY01000004.1_cds_WP_155863921.1_1834 target sequence
REKREKLYDIISEFAEAYIVNKAYPNEIDSNNLNELTYTKVIQIIYASLPLRPKIVTIDKVGNEDIVIMKIRELGLKDNVVFNAD

SEQ ID NO: 40380 - protein, 85 aa, unidentified
  REGION 1..85: note = Description of Unknown:cds_NZ_WFIY01000004.1_cds_WP_155863988.1_1913 target sequence
NADEVNILTKRALRADIESLRKVVNFLSQYDAPIAKFAIYSIIYQFAMNNVIDLGKECETCGGKCCKAGYPVPVYDFDFKEMKRK

SEQ ID NO: 40381 - protein, 85 aa, unidentified
  REGION 1..85: note = Description of Unknown:cds_NZ_WFIY01000004.1_cds_WP_155863988.1_1913 target sequence
IKDLRLEKKDGFYLLPRPCQFQKGWICTINSFKPYACLSYPFATEDEQEELLKSYDGNGIPDFKVPEFCIAGKKVKEFMNKLVEE

SEQ ID NO: 40382 - protein, 84 aa, unidentified
  REGION 1..84: note = Description of Unknown:cds_NZ_WFIY01000004.1_cds_WP_155863988.1_1913 target sequence
TINSFKPYACLSYPFATEDEQEELLKSYDGNGIPDFKVPEFCIAGKKVKEFMNKLVEELRKEKGREPTPTELLERVISLYERRR

SEQ ID NO: 40383 - protein, 85 aa, unidentified
  REGION 1..85: note = Description of Unknown:cds_NZ_WFIY01000004.1_cds_WP_155863988.1_1913 target sequence
SQYDAPIAKFAIYSIIYQFAMNNVIDLGKECETCGGKCCKAGYPVPVYDFDFKEMKRKIKDLRLEKKDGFYLLPRPCQFQKGWIC

SEQ ID NO: 40384 - protein, 85 aa, unidentified
  REGION 1..85: note = Description of Unknown:cds_NZ_WFIY01000004.1_cds_WP_155864162.1_2117 target sequence
EKDIVKESREVAEKIIKGEFRLTLAKYYLLWSTFPIVSFALYLINTRYPFLNYPIALFGYLYYNFKIFSDFSKIVERVYGIKKYN

SEQ ID NO: 40385 - protein, 85 aa, unidentified
  REGION 1..85: note = Description of Unknown:cds_NZ_WFIY01000004.1_cds_WP_155864162.1_2117 target sequence
KYSDIIYTAVWSIPTAMIFIGYEFNYPYLALAGFAILGINYSFFVYFCLKKSFHDFHYYDLLVMMTFIAYIVSVGICVTLNICLT

SEQ ID NO: 40386 - protein, 84 aa, unidentified
  REGION 1..84: note = Description of Unknown:cds_NZ_WFIY01000004.1_cds_WP_155864162.1_2117 target sequence
YLALAGFAILGINYSFFVYFCLKKSFHDFHYYDLLVMMTFIAYIVSVGICVTLNICLTKIMWIPFTLSWIYASYASFMEVIEGE

SEQ ID NO: 40387 - protein, 85 aa, unidentified
  REGION 1..85: note = Description of Unknown:cds_NZ_WFIY01000004.1_cds_WP_155864162.1_2117 target sequence
YLLWSTFPIVSFALYLINTRYPFLNYPIALFGYLYYNFKIFSDFSKIVERVYGIKKYNKYSDIIYTAVWSIPTAMIFIGYEFNYP

SEQ ID NO: 40388 - protein, 85 aa, unidentified
  REGION 1..85: note = Description of Unknown:cds_NC_030656.1_cds_YP_009268841.1_126 target sequence
AVFDFNEPLDGLVQRSDNEDVNVQAKELTSDFNMIPESTHLIKYDVFNILLFLEQRQYDMHKKLLKTITDSSITLKNYTINVCKY

SEQ ID NO: 40389 - protein, 85 aa, unidentified
  REGION 1..85: note = Description of Unknown:cds_NC_030656.1_cds_YP_009268841.1_126 target sequence
SKSHIIKNMSSCGIRHSDYVVIGNVTINDYKMILFYMDLLYWGVTEHGTVYKLGKDFRSLSLKKRVCFPNYDSPDISYETEDSEE

SEQ ID NO: 40390 - protein, 84 aa, unidentified
  REGION 1..84: note = Description of Unknown:cds_NC_030656.1_cds_YP_009268841.1_126 target sequence
NDYKMILFYMDLLYWGVTEHGTVYKLGKDFRSLSLKKRVCFPNYDSPDISYETEDSEEDVEYSFYTDESEDEYQSDDSTFQCFP

SEQ ID NO: 40391 - protein, 85 aa, unidentified
  REGION 1..85: note = Description of Unknown:cds_NC_030656.1_cds_YP_009268841.1_126 target sequence
LTSDFNMIPESTHLIKYDVFNILLFLEQRQYDMHKKLLKTITDSSITLKNYTINVCKYSKSHIIKNMSSCGIRHSDYVVIGNVTI

SEQ ID NO: 40392 - protein, 85 aa, unidentified
  REGION 1..85: note = Description of Unknown:cds_NC_043030.1_cds_YP_009664545.1_10 target sequence
LRLWYSLRYTPLPLLLLPVLVVAGVVLAGPGPADANTSPTLSVFPTNIETYDVFTVQYYIPSGYTGNLYVYDPYDNVVYQHLNVD

SEQ ID NO: 40393 - protein, 85 aa, unidentified
  REGION 1..85: note = Description of Unknown:cds_NC_043030.1_cds_YP_009664545.1_10 target sequence
PDISHKVDIQADKVGIWRVEFHVTNTADNTQSVMPAFVDVAGRPSPDTFTLIKDISGNIISGVKDQLGVVSLFAVLIPVWIVANL

SEQ ID NO: 40394 - protein, 84 aa, unidentified
  REGION 1..84: note = Description of Unknown:cds_NC_043030.1_cds_YP_009664545.1_10 target sequence
NTQSVMPAFVDVAGRPSPDTFTLIKDISGNIISGVKDQLGVVSLFAVLIPVWIVANLDRPSYLIDLTIKVISLIVRVIDAILPF

SEQ ID NO: 40395 - protein, 85 aa, unidentified
  REGION 1..85: note = Description of Unknown:cds_NC_043030.1_cds_YP_009664545.1_10 target sequence
AGPGPADANTSPTLSVFPTNIETYDVFTVQYYIPSGYTGNLYVYDPYDNVVYQHLNVDPDISHKVDIQADKVGIWRVEFHVTNTA

SEQ ID NO: 40396 - protein, 85 aa, unidentified
  REGION 1..85: note = Description of Unknown:cds_NC_043030.1_cds_YP_009664545.1_10 target sequence
DNTQSVMPAFVDVAGRPSPDTFTLIKDISGNIISGVKDQLGVVSLFAVLIPVWIVANLDRPSYLIDLTIKVISLIVRVIDAILPF

SEQ ID NO: 40397 - protein, 85 aa, unidentified
  REGION 1..85: note = Description of Unknown:hvTR_B9A5B6 target sequence
SILISPSNNTGWGLTRPSTMYGGAKKRSDQHPVRVRGHFRAPWGAYKRGRTSAPAAVRTTVDDVIDSVVADARNYTPAPSTVDAV

SEQ ID NO: 40398 - protein, 85 aa, unidentified
  REGION 1..85: note = Description of Unknown:hvTR_B9A5B6 target sequence
IDSVVADARDYARRKSRRRRIARRHRSTPAMRAARALLRRARRTGRRAMLQAARRAAAAPTPTGRTRRRAAVAAAAAISSMTRPR

SEQ ID NO: 40399 - protein, 84 aa, unidentified
  REGION 1..84: note = Description of Unknown:hvTR_B9A5B6 target sequence
STPAMRAARALLRRARRTGRRAMLQAARRAAAAPTPTGRTRRRAAVAAAAAISSMTRPRRGNVYWVRDSITGVRVPVRTRPPRP

SEQ ID NO: 40400 - protein, 85 aa, unidentified
  REGION 1..85: note = Description of Unknown:hvTR_B9A5B6 target sequence
SDQHPVRVRGHFRAPWGAYKRGRTSAPAAVRTTVDDVIDSVVADARNYTPAPSTVDAVIDSVVADARDYARRKSRRRRIARRHRS

SEQ ID NO: 40401 - protein, 85 aa, unidentified
  REGION 1..85: note = Description of Unknown:cds_NZ_WFIY01000004.1_cds_WP_155862334.1_60 target sequence
KVLITYGKDFPALKFDKKVIIKSGEEYRAFDFSIIKDFDQIYTYVDSPAYAFATSLLYSKDYFIVKNPYTMPTKIPRVQVKEIKD

SEQ ID NO: 40402 - protein, 85 aa, unidentified
  REGION 1..85: note = Description of Unknown:cds_NZ_WFIY01000004.1_cds_WP_155862334.1_60 target sequence
ELETTKEKTVIIAGRDLVKSVVEIYGGRKIDEKEPEINLLKMKKYEGYAIIFTPTTPSVILDTLNVADKYNVEVFLVAPVIDTTK

SEQ ID NO: 40403 - protein, 84 aa, unidentified
  REGION 1..84: note = Description of Unknown:cds_NZ_WFIY01000004.1_cds_WP_155862334.1_60 target sequence
GRKIDEKEPEINLLKMKKYEGYAIIFTPTTPSVILDTLNVADKYNVEVFLVAPVIDTTKEGRITCYLMDKEINNINAIKFLKLH

SEQ ID NO: 40404 - protein, 85 aa, unidentified
  REGION 1..85: note = Description of Unknown:cds_NZ_WFIY01000004.1_cds_WP_155862334.1_60 target sequence
RAFDFSIIKDFDQIYTYVDSPAYAFATSLLYSKDYFIVKNPYTMPTKIPRVQVKEIKDELETTKEKTVIIAGRDLVKSVVEIYGG

SEQ ID NO: 40405 - protein, 85 aa, unidentified
  REGION 1..85: note = Description of Unknown:cds_NZ_WFIY01000004.1_cds_WP_013776290.1_116 target sequence
DFLDKKKRLVLIAIAQKGTSGLTYDELLSTFLIFMTRNTLQSIIEDLYFSGYINILRDDKEVRLIASRKVRSSLVALDFQRYKLL

SEQ ID NO: 40406 - protein, 85 aa, unidentified
  REGION 1..85: note = Description of Unknown:cds_NZ_WFIY01000004.1_cds_WP_013776290.1_116 target sequence
KFLEEVKKKSEEISKLQDKNSQLEEIKKIGKEGLELISSGLLTLYKEFPEFTIPEYIEIVEVINNEVLAKLSPLITQQMTEEDLK

SEQ ID NO: 40407 - protein, 84 aa, unidentified
  REGION 1..84: note = Description of Unknown:cds_NZ_WFIY01000004.1_cds_WP_013776290.1_116 target sequence
KKIGKEGLELISSGLLTLYKEFPEFTIPEYIEIVEVINNEVLAKLSPLITQQMTEEDLKQFLNLTSKYLGEKEAEVLSEALKRI

SEQ ID NO: 40408 - protein, 85 aa, unidentified
  REGION 1..85: note = Description of Unknown:cds_NZ_WFIY01000004.1_cds_WP_013776290.1_116 target sequence
LSTFLIFMTRNTLQSIIEDLYFSGYINILRDDKEVRLIASRKVRSSLVALDFQRYKLLKFLEEVKKKSEEISKLQDKNSQLEEIK

SEQ ID NO: 40409 - protein, 85 aa, unidentified
  REGION 1..85: note = Description of Unknown:cds_NZ_WFIY01000004.1_cds_WP_155862696.1_496 target sequence
IEEIQSYLVRIEKKLTERFDNREKLLLLSRELIRVCGETISLSHRQKKEEALKKYEEAVQKAKEIEQIVNQYPELLYGDVGTSFQ

SEQ ID NO: 40410 - protein, 85 aa, unidentified
  REGION 1..85: note = Description of Unknown:cds_NZ_WFIY01000004.1_cds_WP_155862696.1_496 target sequence
ELAEASVVINMYFGGKLYLADELGIPDMYYVLGIADAVGEMRRAILEFLRKGDYENADKFFNYMETIYEELWKFEYPKSLIPGLR

SEQ ID NO: 40411 - protein, 84 aa, unidentified
  REGION 1..84: note = Description of Unknown:cds_NZ_WFIY01000004.1_cds_WP_155862696.1_496 target sequence
DMYYVLGIADAVGEMRRAILEFLRKGDYENADKFFNYMETIYEELWKFEYPKSLIPGLRQKIDALRRILEETRHDLFLAKLGKV

SEQ ID NO: 40412 - protein, 85 aa, unidentified
  REGION 1..85: note = Description of Unknown:cds_NZ_WFIY01000004.1_cds_WP_155862696.1_496 target sequence
LSRELIRVCGETISLSHRQKKEEALKKYEEAVQKAKEIEQIVNQYPELLYGDVGTSFQELAEASVVINMYFGGKLYLADELGIPD

SEQ ID NO: 40413 - protein, 85 aa, unidentified
  REGION 1..85: note = Description of Unknown:cds_NZ_WFIY01000004.1_cds_WP_155862895.1_741 target sequence
ALGPNYKVKPRRRREGKTNYYKRYIYVLSRAIRLVVRLTNEYVIVSVMKFDPKGDITIASAHSIELVKKYGWKGDTNNTPAAYLT

SEQ ID NO: 40414 - protein, 85 aa, unidentified
  REGION 1..85: note = Description of Unknown:cds_NZ_WFIY01000004.1_cds_WP_155862895.1_741 target sequence
GFLAGLRAKKAGIESAVADIGLFTPTKGARVFYAIKGALDAGLKVPMGDIELDENRIKGVHISEYAKKLEAENPEKFNKLFSRYL

SEQ ID NO: 40415 - protein, 84 aa, unidentified
  REGION 1..84: note = Description of Unknown:cds_NZ_WFIY01000004.1_cds_WP_155862895.1_741 target sequence
KGARVFYAIKGALDAGLKVPMGDIELDENRIKGVHISEYAKKLEAENPEKFNKLFSRYLSRGLNPKDLPSHFEEVLNKIKSSGE

SEQ ID NO: 40416 - protein, 85 aa, unidentified
  REGION 1..85: note = Description of Unknown:cds_NZ_WFIY01000004.1_cds_WP_155862895.1_741 target sequence
LSRAIRLVVRLTNEYVIVSVMKFDPKGDITIASAHSIELVKKYGWKGDTNNTPAAYLTGFLAGLRAKKAGIESAVADIGLFTPTK

SEQ ID NO: 40417 - protein, 85 aa, unidentified
  REGION 1..85: note = Description of Unknown:cds_NZ_WFIY01000004.1_cds_WP_155862946.1_805 target sequence
EELPSTAVGIKLNDGIILAAERRLSYGGYVLSKSAKKVHIIGRFGIAGAGLFGDLQALTRIMNAEIKYYELYNEKPISTKAAAKL

SEQ ID NO: 40418 - protein, 85 aa, unidentified
  REGION 1..85: note = Description of Unknown:cds_NZ_WFIY01000004.1_cds_WP_155862946.1_805 target sequence
LSIILYQYKYMPFISEILFAGVDNGIPQLYVLDPLGSLLDDVYAAVGSGARVAIGVLEAEYDQNMSLDKGKEIAIKSIKASIERD

SEQ ID NO: 40419 - protein, 84 aa, unidentified
  REGION 1..84: note = Description of Unknown:cds_NZ_WFIY01000004.1_cds_WP_155862946.1_805 target sequence
PQLYVLDPLGSLLDDVYAAVGSGARVAIGVLEAEYDQNMSLDKGKEIAIKSIKASIERDVTSGDGIDILILDKSGKTYTEYIPY

SEQ ID NO: 40420 - protein, 85 aa, unidentified
  REGION 1..85: note = Description of Unknown:cds_NZ_WFIY01000004.1_cds_WP_155862946.1_805 target sequence
GYVLSKSAKKVHIIGRFGIAGAGLFGDLQALTRIMNAEIKYYELYNEKPISTKAAAKLLSIILYQYKYMPFISEILFAGVDNGIP

SEQ ID NO: 40421 - protein, 85 aa, unidentified
  REGION 1..85: note = Description of Unknown:cds_NZ_WFIY01000004.1_cds_WP_155863617.1_1517 target sequence
YEFTSQLSYIVIFILMVLEGMSLPIPSEIIMPLVGYYSFKGYINIEIGIISGTIGSLIGSLIDYFIAEKLGIPFLSKYGKIFGID

SEQ ID NO: 40422 - protein, 85 aa, unidentified
  REGION 1..85: note = Description of Unknown:cds_NZ_WFIY01000004.1_cds_WP_155863617.1_1517 target sequence
DNKLNMLSTWFDKYGIFAVFGFRFIPLFRALISFPAGLARMKMAKFILATFSGHIIWNTALALIGYEFATQWETIINQIEKLGYI

SEQ ID NO: 40423 - protein, 84 aa, unidentified
  REGION 1..84: note = Description of Unknown:cds_NZ_WFIY01000004.1_cds_WP_155863617.1_1517 target sequence
LFRALISFPAGLARMKMAKFILATFSGHIIWNTALALIGYEFATQWETIINQIEKLGYIIAGIIILVIFTYIITILIKRRRNLR

SEQ ID NO: 40424 - protein, 85 aa, unidentified
  REGION 1..85: note = Description of Unknown:cds_NZ_WFIY01000004.1_cds_WP_155863617.1_1517 target sequence
EIIMPLVGYYSFKGYINIEIGIISGTIGSLIGSLIDYFIAEKLGIPFLSKYGKIFGIDDNKLNMLSTWFDKYGIFAVFGFRFIPL

SEQ ID NO: 40425 - protein, 85 aa, unidentified
  REGION 1..85: note = Description of Unknown:cds_NZ_WFIY01000004.1_cds_WP_155863866.1_1769 target sequence
KFFKPVKSFKDVNVAIEIFAELSASRLSKIMGFPLLDLKITEKEGKIGLLMDHLPEKANESVINIDKIRSALAFEEVILNIDLKE

SEQ ID NO: 40426 - protein, 85 aa, unidentified
  REGION 1..85: note = Description of Unknown:cds_NZ_WFIY01000004.1_cds_WP_155863866.1_1769 target sequence
EHVLSKERIAYIIDHGHSFNAWKPLYYIQEIIDKKVSRFNLWSNREKFMEGVEIINSVDDKNILEILRDTAEEVYQYNFCKLFDR

SEQ ID NO: 40427 - protein, 84 aa, unidentified
  REGION 1..84: note = Description of Unknown:cds_NZ_WFIY01000004.1_cds_WP_155863866.1_1769 target sequence
YIQEIIDKKVSRFNLWSNREKFMEGVEIINSVDDKNILEILRDTAEEVYQYNFCKLFDRKAMEETIDLSFRIFRYRKRILPSLF

SEQ ID NO: 40428 - protein, 85 aa, unidentified
  REGION 1..85: note = Description of Unknown:cds_NZ_WFIY01000004.1_cds_WP_155863866.1_1769 target sequence
SKIMGFPLLDLKITEKEGKIGLLMDHLPEKANESVINIDKIRSALAFEEVILNIDLKEEHVLSKERIAYIIDHGHSFNAWKPLYY

SEQ ID NO: 40429 - protein, 85 aa, unidentified
  REGION 1..85: note = Description of Unknown:cds_NC_035460.1_cds_YP_009408111.1_160 target sequence
SATTVAFYPHSLCEYDSNLHAFPGLSSTKAINVSTIKYVIVEGKKYKVYKYIWASSIVENRYIGGFLPYFKSKQQHKPGIIIYNE

SEQ ID NO: 40430 - protein, 85 aa, unidentified
  REGION 1..85: note = Description of Unknown:cds_NC_035460.1_cds_YP_009408111.1_160 target sequence
ENEPISCITNFINNLYVISGIGYETFDIDVSESIEIKHHILKDGNSIYGSIQNKYPIIKPIAQEKSKLKSGPIVKYNIWVGKDIT

SEQ ID NO: 40431 - protein, 84 aa, unidentified
  REGION 1..84: note = Description of Unknown:cds_NC_035460.1_cds_YP_009408111.1_160 target sequence
DIDVSESIEIKHHILKDGNSIYGSIQNKYPIIKPIAQEKSKLKSGPIVKYNIWVGKDITQITAVDNQDKEVMRTRIKHGGYIIE

SEQ ID NO: 40432 - protein, 85 aa, unidentified
  REGION 1..85: note = Description of Unknown:cds_NC_035460.1_cds_YP_009408111.1_160 target sequence
TKAINVSTIKYVIVEGKKYKVYKYIWASSIVENRYIGGFLPYFKSKQQHKPGIIIYNEENEPISCITNFINNLYVISGIGYETFD

SEQ ID NO: 40433 - protein, 85 aa, unidentified
  REGION 1..85: note = Description of Unknown:cds_NC_003214.2_cds_NP_445731.1_66 target sequence
FAELYIMSVESKHYASGTIYTPDGIQQFNGIFDDFDDVFNIKPTFATRIHCSHDEYCIDNGKTSFYYLTYKDIEDLKRMLTFMSG

SEQ ID NO: 40434 - protein, 85 aa, unidentified
  REGION 1..85: note = Description of Unknown:cds_NC_003214.2_cds_NP_445731.1_66 target sequence
DSSAYLVYVPSDVIKELGINHSSSEITFSDVSIPRLEYIPCKFLGNIPTYIKLIGNTVYVNGVNVNMTVSDPDQLKELVNEIFRI

SEQ ID NO: 40435 - protein, 84 aa, unidentified
  REGION 1..84: note = Description of Unknown:cds_NC_003214.2_cds_NP_445731.1_66 target sequence
TFSDVSIPRLEYIPCKFLGNIPTYIKLIGNTVYVNGVNVNMTVSDPDQLKELVNEIFRIYIIKYYKGLLTWSLILKMWCGIKIS

SEQ ID NO: 40436 - protein, 85 aa, unidentified
  REGION 1..85: note = Description of Unknown:cds_NC_003214.2_cds_NP_445731.1_66 target sequence
FNGIFDDFDDVFNIKPTFATRIHCSHDEYCIDNGKTSFYYLTYKDIEDLKRMLTFMSGDSSAYLVYVPSDVIKELGINHSSSEIT

SEQ ID NO: 40437 - protein, 85 aa, unidentified
  REGION 1..85: note = Description of Unknown:cds_NC_030656.1_cds_YP_009268846.1_131 target sequence
EVTVLAYTSVGVSACLLIVYIVLEIKNCCNKNKKKIRANLEVPLDTYSIQISKTKNSYGYGSSSESSTEWETDSEEELSASRIYV

SEQ ID NO: 40438 - protein, 85 aa, unidentified
  REGION 1..85: note = Description of Unknown:cds_NC_030656.1_cds_YP_009268846.1_131 target sequence
NPNRGSGRRVTAGNKKVTIPQQFSPVVDNNNFNSNNNYSASVSDDHVVNIQEEDNYLVPDNEGLNENTSEVQNNQKAVDEAFSFV

SEQ ID NO: 40439 - protein, 84 aa, unidentified
  REGION 1..84: note = Description of Unknown:cds_NC_030656.1_cds_YP_009268846.1_131 target sequence
VDNNNFNSNNNYSASVSDDHVVNIQEEDNYLVPDNEGLNENTSEVQNNQKAVDEAFSFVQCMYEEDNEGYFYENYCCTDATACK

SEQ ID NO: 40440 - protein, 85 aa, unidentified
  REGION 1..85: note = Description of Unknown:cds_NC_030656.1_cds_YP_009268846.1_131 target sequence
CCNKNKKKIRANLEVPLDTYSIQISKTKNSYGYGSSSESSTEWETDSEEELSASRIYVNPNRGSGRRVTAGNKKVTIPQQFSPVV

SEQ ID NO: 40441 - protein, 85 aa, unidentified
  REGION 1..85: note = Description of Unknown:hvTR_P0C6L3 target sequence
SRPEGRKNRGGREEVLEQWVSGRKKLEELERDLRKVKKKIKKLEDEHPWLGNIKGILGKKDKDGEGAPPAKRARTDQMEVDSGPR

SEQ ID NO: 40442 - protein, 85 aa, unidentified
  REGION 1..85: note = Description of Unknown:hvTR_P0C6L3 target sequence
KRPSRGGFTDKERQDHRRRKALENKRKQLSAGGKNLSKEEEEELRRLTEEDERRERRIAGPQVGGVNPLEGGTRGAPGGGFVPSM

SEQ ID NO: 40443 - protein, 84 aa, unidentified
  REGION 1..84: note = Description of Unknown:hvTR_P0C6L3 target sequence
RKQLSAGGKNLSKEEEEELRRLTEEDERRERRIAGPQVGGVNPLEGGTRGAPGGGFVPSMQGVPESPFTRTGEGLDIRGSQGFP

SEQ ID NO: 40444 - protein, 85 aa, unidentified
  REGION 1..85: note = Description of Unknown:hvTR_P0C6L3 target sequence
ELERDLRKVKKKIKKLEDEHPWLGNIKGILGKKDKDGEGAPPAKRARTDQMEVDSGPRKRPSRGGFTDKERQDHRRRKALENKRK

SEQ ID NO: 40445 - protein, 85 aa, unidentified
  REGION 1..85: note = Description of Unknown:hvTR_O42050 target sequence
SRRNPCKFEIRGHCLNGRRCHYSHNYFEWPPHALLVRQNFMLNKILKSMDKSIDTLSEISGAAELDRTEEYALGIVGVLESYIGS

SEQ ID NO: 40446 - protein, 85 aa, unidentified
  REGION 1..85: note = Description of Unknown:hvTR_O42050 target sequence
INNITKQSACVAMSKLLIEINSDDIKKLRDNEEPNSPKIRVYNTVISYIESNRKNNKQTIHLLKRLPADVLKKTIKNTLDIHKSI

SEQ ID NO: 40447 - protein, 84 aa, unidentified
  REGION 1..84: note = Description of Unknown:hvTR_O42050 target sequence
KKLRDNEEPNSPKIRVYNTVISYIESNRKNNKQTIHLLKRLPADVLKKTIKNTLDIHKSIIISNPKESTVNDQNDQTKNNDITG

SEQ ID NO: 40448 - protein, 85 aa, unidentified
  REGION 1..85: note = Description of Unknown:hvTR_O42050 target sequence
EWPPHALLVRQNFMLNKILKSMDKSIDTLSEISGAAELDRTEEYALGIVGVLESYIGSINNITKQSACVAMSKLLIEINSDDIKK

SEQ ID NO: 40449 - protein, 85 aa, unidentified
  REGION 1..85: note = Description of Unknown:cds_NZ_WFIY01000004.1_cds_WP_155862425.1_167 target sequence
PKKSKDRQLLPYILTPLLEKTIREYKQLYSRLCSVEPQNEYCKNPKGFYNFLSDILQELIPLISSFEVLKDIKALNYLKSQGFYL

SEQ ID NO: 40450 - protein, 85 aa, unidentified
  REGION 1..85: note = Description of Unknown:cds_NZ_WFIY01000004.1_cds_WP_155862425.1_167 target sequence
IPVHKQDLGDGLIKENTIEKLVNSYLNIAQPKNLADGIGLLNLISAGATITTRKDGICEELNITFKYKQEEEKVNDLVIKYAQSI

SEQ ID NO: 40451 - protein, 84 aa, unidentified
  REGION 1..84: note = Description of Unknown:cds_NZ_WFIY01000004.1_cds_WP_155862425.1_167 target sequence
LNIAQPKNLADGIGLLNLISAGATITTRKDGICEELNITFKYKQEEEKVNDLVIKYAQSIANKMGYVIKEMQVDSTLIKLRCCK

SEQ ID NO: 40452 - protein, 85 aa, unidentified
  REGION 1..85: note = Description of Unknown:cds_NZ_WFIY01000004.1_cds_WP_155862425.1_167 target sequence
LYSRLCSVEPQNEYCKNPKGFYNFLSDILQELIPLISSFEVLKDIKALNYLKSQGFYLIPVHKQDLGDGLIKENTIEKLVNSYLN

SEQ ID NO: 40453 - protein, 85 aa, unidentified
  REGION 1..85: note = Description of Unknown:cds_NZ_WFIY01000004.1_cds_250 target sequence
VTKLKICGISTISDILELSKMNIDYLGVVTDIISKRYVKDEFIGFVKKISEKPIVSVKVNGKISELIEKAKYADLLQIHRVLSDS

SEQ ID NO: 40454 - protein, 85 aa, unidentified
  REGION 1..85: note = Description of Unknown:cds_NZ_WFIY01000004.1_cds_250 target sequence
ELEELNSYDKRIILYVPASEKYLAYLDKAIRYSDMILLDSPRKGVQIDLNFARKIAKEYDVGIGGGININNIDKVIEINPKWIDI

SEQ ID NO: 40455 - protein, 84 aa, unidentified
  REGION 1..84: note = Description of Unknown:cds_NZ_WFIY01000004.1_cds_250 target sequence
DKAIRYSDMILLDSPRKGVQIDLNFARKIAKEYDVGIGGGININNIDKVIEINPKWIDISSGVEIYPGKKDMQKVMEIVRRVKV

SEQ ID NO: 40456 - protein, 85 aa, unidentified
  REGION 1..85: note = Description of Unknown:cds_NZ_WFIY01000004.1_cds_250 target sequence
VVTDIISKRYVKDEFIGFVKKISEKPIVSVKVNGKISELIEKAKYADLLQIHRVLSDSELEELNSYDKRIILYVPASEKYLAYLD

SEQ ID NO: 40457 - protein, 85 aa, unidentified
  REGION 1..85: note = Description of Unknown:cds_NZ_WFIY01000004.1_cds_WP_155862654.1_446 target sequence
VFLERLLDKKSLVISYYYSVNLTLLMNFASLYYRKTGKNICIGNFGKIKWEFYPKDVDFPVKCDENSAFLVFEAENESELPEKFI

SEQ ID NO: 40458 - protein, 85 aa, unidentified
  REGION 1..85: note = Description of Unknown:cds_NZ_WFIY01000004.1_cds_WP_155862654.1_446 target sequence
FATSYKNLKVNAIKVRVEKFEFNVYKAIIEDEIIPFKIVKGEINEVKLTNDYTELLNIIKELGGECEMRDLVNIASKRLNIPRDE

SEQ ID NO: 40459 - protein, 84 aa, unidentified
  REGION 1..84: note = Description of Unknown:cds_NZ_WFIY01000004.1_cds_WP_155862654.1_446 target sequence
AIIEDEIIPFKIVKGEINEVKLTNDYTELLNIIKELGGECEMRDLVNIASKRLNIPRDEVKEKILFLKEIDKIDIEGKKIKLIL

SEQ ID NO: 40460 - protein, 85 aa, unidentified
  REGION 1..85: note = Description of Unknown:cds_NZ_WFIY01000004.1_cds_WP_155862654.1_446 target sequence
FASLYYRKTGKNICIGNFGKIKWEFYPKDVDFPVKCDENSAFLVFEAENESELPEKFIFATSYKNLKVNAIKVRVEKFEFNVYKA

SEQ ID NO: 40461 - protein, 85 aa, unidentified
  REGION 1..85: note = Description of Unknown:cds_NZ_WFIY01000004.1_cds_WP_155862662.1_454 target sequence
KALVVNYGVGNLFSISSGLERAGFEVEISKEIKDADLIVFPGVGAFSAVSKFIQINLDKINDLRKSGVHFLGVCLGLQIMFEKGT

SEQ ID NO: 40462 - protein, 85 aa, unidentified
  REGION 1..85: note = Description of Unknown:cds_NZ_WFIY01000004.1_cds_WP_155862662.1_454 target sequence
EGGKSKGLGWFRGTVDKIHANVKLPHIGWDKIYVSGDCELTEGLDGKYAYYVHSYVAYTNDHVVMKSSYGIEYPAMVCKENVVGT

SEQ ID NO: 40463 - protein, 84 aa, unidentified
  REGION 1..84: note = Description of Unknown:cds_NZ_WFIY01000004.1_cds_WP_155862662.1_454 target sequence
HIGWDKIYVSGDCELTEGLDGKYAYYVHSYVAYTNDHVVMKSSYGIEYPAMVCKENVVGTQFHPEKSSETGRVFFENLKRWMSR

SEQ ID NO: 40464 - protein, 85 aa, unidentified
  REGION 1..85: note = Description of Unknown:cds_NZ_WFIY01000004.1_cds_WP_155862662.1_454 target sequence
ISKEIKDADLIVFPGVGAFSAVSKFIQINLDKINDLRKSGVHFLGVCLGLQIMFEKGTEGGKSKGLGWFRGTVDKIHANVKLPHI

SEQ ID NO: 40465 - protein, 85 aa, unidentified
  REGION 1..85: note = Description of Unknown:cds_NZ_WFIY01000004.1_cds_WP_155862881.1_722 target sequence
YDLAEFVIRAAQLIKPDQVEKMIDTLENFYKNNRNGKVLVMGAGRSGLVGRAFAMRLLHLGYNAYVLGETIVPAIGKNDLAIAIS

SEQ ID NO: 40466 - protein, 85 aa, unidentified
  REGION 1..85: note = Description of Unknown:cds_NZ_WFIY01000004.1_cds_WP_155862881.1_722 target sequence
GSGRTRLILTAAEAAKEAKATLIAVTSYADSPIGKIADVVVEVPGRTKYSQFEDYFARQILGITEPLAPLGTLFEDTTQMFLDGV

SEQ ID NO: 40467 - protein, 84 aa, unidentified
  REGION 1..84: note = Description of Unknown:cds_NZ_WFIY01000004.1_cds_WP_155862881.1_722 target sequence
TSYADSPIGKIADVVVEVPGRTKYSQFEDYFARQILGITEPLAPLGTLFEDTTQMFLDGVVAELMLRLKKTEEDLRQIHANIEL

SEQ ID NO: 40468 - protein, 85 aa, unidentified
  REGION 1..85: note = Description of Unknown:cds_NZ_WFIY01000004.1_cds_WP_155862881.1_722 target sequence
NFYKNNRNGKVLVMGAGRSGLVGRAFAMRLLHLGYNAYVLGETIVPAIGKNDLAIAISGSGRTRLILTAAEAAKEAKATLIAVTS

SEQ ID NO: 40469 - protein, 85 aa, unidentified
  REGION 1..85: note = Description of Unknown:cds_NZ_WFIY01000004.1_cds_WP_155862891.1_736 target sequence
KMGIVTGIPGVGKTTVLSKVSEILSSENRKYKIMNYGDYMLNTAISEGFVSNRDEMRKLPLSKQRELQLIAAKKIVEDAEKLGED

SEQ ID NO: 40470 - protein, 85 aa, unidentified
  REGION 1..85: note = Description of Unknown:cds_NZ_WFIY01000004.1_cds_WP_155862891.1_736 target sequence
GLAFIDTHAVIRTPAGYLPGLPKHVIEILSPQVIFLLESNPEDILNRQKRDKGRIRSDYADINVINETINFARYAAMASAVLVGA

SEQ ID NO: 40471 - protein, 84 aa, unidentified
  REGION 1..84: note = Description of Unknown:cds_NZ_WFIY01000004.1_cds_WP_155862891.1_736 target sequence
IEILSPQVIFLLESNPEDILNRQKRDKGRIRSDYADINVINETINFARYAAMASAVLVGASVKIVINKEGDPTIAAKEIISSMM

SEQ ID NO: 40472 - protein, 85 aa, unidentified
  REGION 1..85: note = Description of Unknown:cds_NZ_WFIY01000004.1_cds_WP_155862891.1_736 target sequence
NRKYKIMNYGDYMLNTAISEGFVSNRDEMRKLPLSKQRELQLIAAKKIVEDAEKLGEDGLAFIDTHAVIRTPAGYLPGLPKHVIE

SEQ ID NO: 40473 - protein, 85 aa, unidentified
  REGION 1..85: note = Description of Unknown:cds_NZ_WFIY01000004.1_cds_WP_155863132.1_1053 target sequence
KEEKKSSCKDFFDAIILAGGESRRFGTDKCSFEIDGKTMLQRVAENFERPIIVTRIPRNCGIEIIDEGIGPIRALEIAVKRIEKD

SEQ ID NO: 40474 - protein, 85 aa, unidentified
  REGION 1..85: note = Description of Unknown:cds_NZ_WFIY01000004.1_cds_WP_155863132.1_1053 target sequence
KVFVTGCDFPFLKRRVVEYICSKDYEIAMPLLEYPQPLLGCYNTRFLKNNISKVNSLQELIGIANSAYLIGTEEIKMIDLSLDSL

SEQ ID NO: 40475 - protein, 84 aa, unidentified
  REGION 1..84: note = Description of Unknown:cds_NZ_WFIY01000004.1_cds_WP_155863132.1_1053 target sequence
EIAMPLLEYPQPLLGCYNTRFLKNNISKVNSLQELIGIANSAYLIGTEEIKMIDLSLDSLRNINRLTDFYTKVKIFTKSKILLR

SEQ ID NO: 40476 - protein, 85 aa, unidentified
  REGION 1..85: note = Description of Unknown:cds_NZ_WFIY01000004.1_cds_WP_155863132.1_1053 target sequence
DKCSFEIDGKTMLQRVAENFERPIIVTRIPRNCGIEIIDEGIGPIRALEIAVKRIEKDKVFVTGCDFPFLKRRVVEYICSKDYEI

SEQ ID NO: 40477 - protein, 85 aa, unidentified
  REGION 1..85: note = Description of Unknown:cds_NZ_WFIY01000004.1_cds_WP_155863166.1_1095 target sequence
QLEDKFIEVKGAKIHYLEEGSGRPVVLHHGARFNAYTWKEVGTISAIAEVGYRAISIDFPGFGKSEEGNFSSLSEFIGDFIETMK

SEQ ID NO: 40478 - protein, 85 aa, unidentified
  REGION 1..85: note = Description of Unknown:cds_NZ_WFIY01000004.1_cds_WP_155863166.1_1095 target sequence
LEKPILLGASMGGEAVLGYAVDHADKLGGLILVGAVGVSSYESKLKNLDGLPILLIWGRHDTTSPKRNAELIMKYVKTAKFVNVG

SEQ ID NO: 40479 - protein, 84 aa, unidentified
  REGION 1..84: note = Description of Unknown:cds_NZ_WFIY01000004.1_cds_WP_155863166.1_1095 target sequence
KLGGLILVGAVGVSSYESKLKNLDGLPILLIWGRHDTTSPKRNAELIMKYVKTAKFVNVGNQHACYLDDPEGFNSQIKDFLKGL

SEQ ID NO: 40480 - protein, 85 aa, unidentified
  REGION 1..85: note = Description of Unknown:cds_NZ_WFIY01000004.1_cds_WP_155863166.1_1095 target sequence
HHGARFNAYTWKEVGTISAIAEVGYRAISIDFPGFGKSEEGNFSSLSEFIGDFIETMKLEKPILLGASMGGEAVLGYAVDHADKL

SEQ ID NO: 40481 - protein, 85 aa, unidentified
  REGION 1..85: note = Description of Unknown:cds_NZ_WFIY01000004.1_cds_WP_155863732.1_1599 target sequence
VRAFKYNKTEEGLLIPDEKNGKIIVYVDNWLVKAFEGNKEITDLQFYVDNEERILINRIREINPSVNILPALAYPNKERKIRLNQ

SEQ ID NO: 40482 - protein, 85 aa, unidentified
  REGION 1..85: note = Description of Unknown:cds_NZ_WFIY01000004.1_cds_WP_155863732.1_1599 target sequence
LLGKVFEDYVYSILSRKYSVERNKEIYSTIKGISIHNKPDFIVENKIAIEAKVRESNLEQVTQYAKKFKYGAIVFPYSGKCRVPK

SEQ ID NO: 40483 - protein, 84 aa, unidentified
  REGION 1..84: note = Description of Unknown:cds_NZ_WFIY01000004.1_cds_WP_155863732.1_1599 target sequence
YSTIKGISIHNKPDFIVENKIAIEAKVRESNLEQVTQYAKKFKYGAIVFPYSGKCRVPKNWICLFYLMKDYNRLYEWIDSHLLD

SEQ ID NO: 40484 - protein, 85 aa, unidentified
  REGION 1..85: note = Description of Unknown:cds_NZ_WFIY01000004.1_cds_WP_155863732.1_1599 target sequence
DNWLVKAFEGNKEITDLQFYVDNEERILINRIREINPSVNILPALAYPNKERKIRLNQLLGKVFEDYVYSILSRKYSVERNKEIY

SEQ ID NO: 40485 - protein, 85 aa, unidentified
  REGION 1..85: note = Description of Unknown:cds_NZ_WFIY01000004.1_cds_1694 target sequence
VARVNIAADAEIVKELEKEAKSRGYTIFSLTNIALKSMLELIRSGEDSTTLSHLVEFYKITKDLDIIPVTSWYIENLVKLAYEKD

SEQ ID NO: 40486 - protein, 85 aa, unidentified
  REGION 1..85: note = Description of Unknown:cds_NZ_WFIY01000004.1_cds_1694 target sequence
QKALEEICDGAGQQISSYLRSRASTFDELLQIYDTIKSVLPIKDIRIKRVNDEIIEIRITGSGFSSESTLCTSKVFRKILEAYYF

SEQ ID NO: 40487 - protein, 84 aa, unidentified
  REGION 1..84: note = Description of Unknown:cds_NZ_WFIY01000004.1_cds_1694 target sequence
DELLQIYDTIKSVLPIKDIRIKRVNDEIIEIRITGSGFSSESTLCTSKVFRKILEAYYFEILEMTYSPGGIIFTRVKYQGQPNK

SEQ ID NO: 40488 - protein, 85 aa, unidentified
  REGION 1..85: note = Description of Unknown:cds_NZ_WFIY01000004.1_cds_1694 target sequence
FSLTNIALKSMLELIRSGEDSTTLSHLVEFYKITKDLDIIPVTSWYIENLVKLAYEKDQKALEEICDGAGQQISSYLRSRASTFD

SEQ ID NO: 40489 - protein, 85 aa, unidentified
  REGION 1..85: note = Description of Unknown:cds_NZ_WFIY01000004.1_cds_WP_155863882.1_1787 target sequence
DKLDLTKYLAIIFAGISGIIYVIGDPLDKLLSYQGPVFSGALLGWYVINKYTPKDKFVEFEDSLVPVTSILIRNKSWIGFTISAF

SEQ ID NO: 40490 - protein, 85 aa, unidentified
  REGION 1..85: note = Description of Unknown:cds_NZ_WFIY01000004.1_cds_WP_155863882.1_1787 target sequence
LIAFWLTPFIFKIAQEYPELYFAAFISDFIGGFIAGYLIPSLKFMEKVIIYSLGFAADIFYVMLLYIYSVMYNISQNSLLDHVLG

SEQ ID NO: 40491 - protein, 84 aa, unidentified
  REGION 1..84: note = Description of Unknown:cds_NZ_WFIY01000004.1_cds_WP_155863882.1_1787 target sequence
ISDFIGGFIAGYLIPSLKFMEKVIIYSLGFAADIFYVMLLYIYSVMYNISQNSLLDHVLGFVYIVKFSEGILFAVYIIKKVNAI

SEQ ID NO: 40492 - protein, 85 aa, unidentified
  REGION 1..85: note = Description of Unknown:cds_NZ_WFIY01000004.1_cds_WP_155863882.1_1787 target sequence
DKLLSYQGPVFSGALLGWYVINKYTPKDKFVEFEDSLVPVTSILIRNKSWIGFTISAFLIAFWLTPFIFKIAQEYPELYFAAFIS

SEQ ID NO: 40493 - protein, 85 aa, unidentified
  REGION 1..85: note = Description of Unknown:cds_NZ_WFIY01000004.1_cds_WP_155864012.1_1940 target sequence
LEFEDVKIDIEDEKTRKEIQNFFSIFIYISNFYEKNCIIHFHCNGVQIEGKPGFVIVNNFPRIYSRGADKLRALAYLSLFREEKP

SEQ ID NO: 40494 - protein, 85 aa, unidentified
  REGION 1..85: note = Description of Unknown:cds_NZ_WFIY01000004.1_cds_WP_155864012.1_1940 target sequence
IVESDIQAISSISFVPLYFSIKMKEKGITKFLSSLTHYYSAIYNQLTNEKIREDFKEVLNSFWAIDIKYLENIKNSYLTHLELYI

SEQ ID NO: 40495 - protein, 84 aa, unidentified
  REGION 1..84: note = Description of Unknown:cds_NZ_WFIY01000004.1_cds_WP_155864012.1_1940 target sequence
KGITKFLSSLTHYYSAIYNQLTNEKIREDFKEVLNSFWAIDIKYLENIKNSYLTHLELYIKLLGFSTGVSLSYNDILKKYGIIS

SEQ ID NO: 40496 - protein, 85 aa, unidentified
  REGION 1..85: note = Description of Unknown:cds_NZ_WFIY01000004.1_cds_WP_155864012.1_1940 target sequence
YISNFYEKNCIIHFHCNGVQIEGKPGFVIVNNFPRIYSRGADKLRALAYLSLFREEKPIVESDIQAISSISFVPLYFSIKMKEKG

SEQ ID NO: 40497 - protein, 85 aa, unidentified
  REGION 1..85: note = Description of Unknown:cds_NZ_WFIY01000004.1_cds_WP_155864234.1_2205 target sequence
VNILVLFYGYGSIVDLAKEIAKGAEEEGAETRIRKVRETLYPELIQQFHIPVDNTKDIPEVTLDDLKWADGIAIGSPTRYGNMAG

SEQ ID NO: 40498 - protein, 85 aa, unidentified
  REGION 1..85: note = Description of Unknown:cds_NZ_WFIY01000004.1_cds_WP_155864234.1_2205 target sequence
GMKTFLDSTAPLWRNGDLYGKPVTFFTEASTVHGGHETTILTMSTYAYHFGMIIVTLGYGIPEISKSTTGGSPYGASHLGSKKEL

SEQ ID NO: 40499 - protein, 84 aa, unidentified
  REGION 1..84: note = Description of Unknown:cds_NZ_WFIY01000004.1_cds_WP_155864234.1_2205 target sequence
FTEASTVHGGHETTILTMSTYAYHFGMIIVTLGYGIPEISKSTTGGSPYGASHLGSKKELDEDEIKIARFQGKRLAQVAKKLLS

SEQ ID NO: 40500 - protein, 85 aa, unidentified
  REGION 1..85: note = Description of Unknown:cds_NZ_WFIY01000004.1_cds_WP_155864234.1_2205 target sequence
GAETRIRKVRETLYPELIQQFHIPVDNTKDIPEVTLDDLKWADGIAIGSPTRYGNMAGGMKTFLDSTAPLWRNGDLYGKPVTFFT

SEQ ID NO: 40501 - protein, 85 aa, unidentified
  REGION 1..85: note = Description of Unknown:cds_NC_035460.1_cds_YP_009408065.1_114 target sequence
SYLSYYNMLDDFSAGAGVLDKDLFTKEEENAFLPKVDNNGGSFNPFNNNIFSEIFLYNDVKTLIGLILFVLAITTPPIIAIIMII

SEQ ID NO: 40502 - protein, 85 aa, unidentified
  REGION 1..85: note = Description of Unknown:cds_NC_035460.1_cds_YP_009408065.1_114 target sequence
GASTLLPFPSLVIAYCLSTQILNVNANKSIGMAIFCVVMAIISIIVSITMSTVAYTISYIILAILFCVYIFNLAKLSMPYSSLSS

SEQ ID NO: 40503 - protein, 84 aa, unidentified
  REGION 1..84: note = Description of Unknown:cds_NC_035460.1_cds_YP_009408065.1_114 target sequence
ANKSIGMAIFCVVMAIISIIVSITMSTVAYTISYIILAILFCVYIFNLAKLSMPYSSLSSSTIRCTKDFRAGDKYMKNPSFMED

SEQ ID NO: 40504 - protein, 85 aa, unidentified
  REGION 1..85: note = Description of Unknown:cds_NC_035460.1_cds_YP_009408065.1_114 target sequence
EENAFLPKVDNNGGSFNPFNNNIFSEIFLYNDVKTLIGLILFVLAITTPPIIAIIMIIGASTLLPFPSLVIAYCLSTQILNVNAN

SEQ ID NO: 40505 - protein, 85 aa, unidentified
  REGION 1..85: note = Description of Unknown:cds_NC_035460.1_cds_YP_009408098.1_147 target sequence
EGKLIVFEGLDKSGKSTQCKKLYNYMLNNNIKCILMTFPNRSTDIGNIIDKYLKKEINLPDESIHLLFSANRWEFNNILKKHIDE

SEQ ID NO: 40506 - protein, 85 aa, unidentified
  REGION 1..85: note = Description of Unknown:cds_NC_035460.1_cds_YP_009408098.1_147 target sequence
GVHVILDRYTFSGIAFSAAKGLDINWCKECDKGLKKADIVFYLETNFKNLTREMFGNERYETYTFQHKVKYMYDYLINNYSLDSQ

SEQ ID NO: 40507 - protein, 84 aa, unidentified
  REGION 1..84: note = Description of Unknown:cds_NC_035460.1_cds_YP_009408098.1_147 target sequence
WCKECDKGLKKADIVFYLETNFKNLTREMFGNERYETYTFQHKVKYMYDYLINNYSLDSQIEIIDASLSINDVFKNIKNKLTFL

SEQ ID NO: 40508 - protein, 85 aa, unidentified
  REGION 1..85: note = Description of Unknown:cds_NC_035460.1_cds_YP_009408098.1_147 target sequence
NNNIKCILMTFPNRSTDIGNIIDKYLKKEINLPDESIHLLFSANRWEFNNILKKHIDEGVHVILDRYTFSGIAFSAAKGLDINWC

SEQ ID NO: 40509 - protein, 85 aa, unidentified
  REGION 1..85: note = Description of Unknown:cds_NC_005830.1_cds_YP_003746.1_21 target sequence
SFRQRILEHRLEDSLEKLFSAFLSFCLEYHIPYAETISKQNHSIVAVTFDETYGLDIYQTMKERLPLDKQFYYINRKTDTYTIRG

SEQ ID NO: 40510 - protein, 85 aa, unidentified
  REGION 1..85: note = Description of Unknown:cds_NC_005830.1_cds_YP_003746.1_21 target sequence
YDVAVRALEELATVISPLEILDKIHIFNISFVRSTNILYLGYTKIIKLSTVYSAVYQNKLYRLFAIYNRDITMLSRIRKYIITDY

SEQ ID NO: 40511 - protein, 84 aa, unidentified
  REGION 1..84: note = Description of Unknown:cds_NC_005830.1_cds_YP_003746.1_21 target sequence
IFNISFVRSTNILYLGYTKIIKLSTVYSAVYQNKLYRLFAIYNRDITMLSRIRKYIITDYPKLFEQYFSLLPKFITDNYEVEQT

SEQ ID NO: 40512 - protein, 85 aa, unidentified
  REGION 1..85: note = Description of Unknown:cds_NC_005830.1_cds_YP_003746.1_21 target sequence
EYHIPYAETISKQNHSIVAVTFDETYGLDIYQTMKERLPLDKQFYYINRKTDTYTIRGYDVAVRALEELATVISPLEILDKIHIF

SEQ ID NO: 40513 - protein, 85 aa, unidentified
  REGION 1..85: note = Description of Unknown:hvTR_Q2HRA1 target sequence
KSVASPLCQFHGVFCLYQCRQCLAYHVCDGGAECVLLHTPESVICELTGNCMLGNIQEGQFLGPVPYRTLDNQVDRDAYHGMLAC

SEQ ID NO: 40514 - protein, 85 aa, unidentified
  REGION 1..85: note = Description of Unknown:hvTR_Q2HRA1 target sequence
LKRDIVRYLQTWPDTTVIVQEIALGDGVTDTISAIIDETFGECLPVLGEAQGGYALVCSMYLHVIVSIYSTKTVYNSMLFKCTKN

SEQ ID NO: 40515 - protein, 84 aa, unidentified
  REGION 1..84: note = Description of Unknown:hvTR_Q2HRA1 target sequence
GDGVTDTISAIIDETFGECLPVLGEAQGGYALVCSMYLHVIVSIYSTKTVYNSMLFKCTKNKKYDCIAKRVRTKWMRMLSTKDT

SEQ ID NO: 40516 - protein, 85 aa, unidentified
  REGION 1..85: note = Description of Unknown:hvTR_Q2HRA1 target sequence
CDGGAECVLLHTPESVICELTGNCMLGNIQEGQFLGPVPYRTLDNQVDRDAYHGMLACLKRDIVRYLQTWPDTTVIVQEIALGDG

SEQ ID NO: 40517 - protein, 85 aa, unidentified
  REGION 1..85: note = Description of Unknown:hvTR_A5HBD7 target sequence
DKTLSRNEAKELMQLLGLDMTCWGNLPLMRTKYLSKCKEFHPDKGGNEEKMKKLNSLYLKLQECVSTVHQLNEEEDEVWSSSQVE

SEQ ID NO: 40518 - protein, 85 aa, unidentified
  REGION 1..85: note = Description of Unknown:hvTR_A5HBD7 target sequence
CTELCCNFPPRKYRLVGEVYGDVFEEYILKDWDICLKGFYYLCNCFYCFLDKRHKQKYKIFRKPPMWIECYCYRCYREWFGFEIS

SEQ ID NO: 40519 - protein, 84 aa, unidentified
  REGION 1..84: note = Description of Unknown:hvTR_A5HBD7 target sequence
EEYILKDWDICLKGFYYLCNCFYCFLDKRHKQKYKIFRKPPMWIECYCYRCYREWFGFEISAETFFYWKKIIFLTTMQGVGLTR

SEQ ID NO: 40520 - protein, 85 aa, unidentified
  REGION 1..85: note = Description of Unknown:hvTR_A5HBD7 target sequence
LMRTKYLSKCKEFHPDKGGNEEKMKKLNSLYLKLQECVSTVHQLNEEEDEVWSSSQVECTELCCNFPPRKYRLVGEVYGDVFEEY

SEQ ID NO: 40521 - protein, 85 aa, unidentified
  REGION 1..85: note = Description of Unknown:cds_NZ_WFIY01000004.1_cds_WP_155862671.1_467 target sequence
IYGKILQIKEKKTIFEVSMEVHFNPLPGQYVSLVLPSENEIPLGIGDYYEDVLTLFIESEKIVNKIRNKKFVILKGPLGKRIDLG

SEQ ID NO: 40522 - protein, 85 aa, unidentified
  REGION 1..85: note = Description of Unknown:cds_NZ_WFIY01000004.1_cds_WP_155862671.1_467 target sequence
RRILGIAEGNLYYDLLFPLRQAKRQGKEVKVLCKDCESEFEEPSRDEDFDTILAAIDYKEIKYLPREAYVYVRWVKMNCNMGVCG

SEQ ID NO: 40523 - protein, 84 aa, unidentified
  REGION 1..84: note = Description of Unknown:cds_NZ_WFIY01000004.1_cds_WP_155862671.1_467 target sequence
QGKEVKVLCKDCESEFEEPSRDEDFDTILAAIDYKEIKYLPREAYVYVRWVKMNCNMGVCGVCNINGHLPCIEGPFMKVKDLVD

SEQ ID NO: 40524 - protein, 85 aa, unidentified
  REGION 1..85: note = Description of Unknown:cds_NZ_WFIY01000004.1_cds_WP_155862671.1_467 target sequence
GQYVSLVLPSENEIPLGIGDYYEDVLTLFIESEKIVNKIRNKKFVILKGPLGKRIDLGRRILGIAEGNLYYDLLFPLRQAKRQGK

SEQ ID NO: 40525 - protein, 85 aa, unidentified
  REGION 1..85: note = Description of Unknown:cds_NZ_WFIY01000004.1_cds_WP_155862835.1_664 target sequence
TKILSKSKIGNKLVVKFDTKLQFNPGNTIDVIIDNDRRTFSIASAPWENFTMIATNIRNSPFKQKLLMLKEGDEVKIEGPYQDEF

SEQ ID NO: 40526 - protein, 85 aa, unidentified
  REGION 1..85: note = Description of Unknown:cds_NZ_WFIY01000004.1_cds_WP_155862835.1_664 target sequence
VIKDSPKHVFVTKGIGITPVRSMALYLLKNSQNVTIYYQPDEDGVILFKEDLGDIMKIEQISDKIFKENQDAMFYISGEPEFTKV

SEQ ID NO: 40527 - protein, 84 aa, unidentified
  REGION 1..84: note = Description of Unknown:cds_NZ_WFIY01000004.1_cds_WP_155862835.1_664 target sequence
LYLLKNSQNVTIYYQPDEDGVILFKEDLGDIMKIEQISDKIFKENQDAMFYISGEPEFTKVSTKIAVDNGIKPGKIVVEPFSGY

SEQ ID NO: 40528 - protein, 85 aa, unidentified
  REGION 1..85: note = Description of Unknown:cds_NZ_WFIY01000004.1_cds_WP_155862835.1_664 target sequence
TIDVIIDNDRRTFSIASAPWENFTMIATNIRNSPFKQKLLMLKEGDEVKIEGPYQDEFVIKDSPKHVFVTKGIGITPVRSMALYL

SEQ ID NO: 40529 - protein, 85 aa, unidentified
  REGION 1..85: note = Description of Unknown:cds_NZ_WFIY01000004.1_cds_WP_155862991.1_867 target sequence
SDYELSKLDIRIFGKWDTKVEIRDPSLKKYISLMPVYLPHTGGRHEHRRFGKSRVPIVERLINQLMRPGRNKGKKFLAYNIVRAA

SEQ ID NO: 40530 - protein, 85 aa, unidentified
  REGION 1..85: note = Description of Unknown:cds_NZ_WFIY01000004.1_cds_WP_155862991.1_867 target sequence
FEIIAARTGQNPIQILVRAIENSAPREEVTRIMYGGIVYYVAVDVAPQRRVDLALRYLVEGARTASFNNPKPIDEALAEEIIAAS

SEQ ID NO: 40531 - protein, 84 aa, unidentified
  REGION 1..84: note = Description of Unknown:cds_NZ_WFIY01000004.1_cds_WP_155862991.1_867 target sequence
PREEVTRIMYGGIVYYVAVDVAPQRRVDLALRYLVEGARTASFNNPKPIDEALAEEIIAASSNDPKSYAIRKKEEIERIALSSR

SEQ ID NO: 40532 - protein, 85 aa, unidentified
  REGION 1..85: note = Description of Unknown:cds_NZ_WFIY01000004.1_cds_WP_155862991.1_867 target sequence
KKYISLMPVYLPHTGGRHEHRRFGKSRVPIVERLINQLMRPGRNKGKKFLAYNIVRAAFEIIAARTGQNPIQILVRAIENSAPRE

SEQ ID NO: 40533 - protein, 85 aa, unidentified
  REGION 1..85: note = Description of Unknown:cds_NZ_WFIY01000004.1_cds_WP_205737141.1_1305 target sequence
KDFRSKKVAIVANCILNQNSKVIGFAKYKGMVKEIVDLLYEYNYGILQLPCPETLFAGARRWWQVRDQYDTEGYREHCRMLAKPI

SEQ ID NO: 40534 - protein, 85 aa, unidentified
  REGION 1..85: note = Description of Unknown:cds_NZ_WFIY01000004.1_cds_WP_205737141.1_1305 target sequence
ITMLKEYQKEGYDVVLIGVDGSPSCGINLSPTSKKWGGPPTLRDEDAWNAEMINKPGIFMEVLMEEIKKAGLKEPKVIGVGLDLK

SEQ ID NO: 40535 - protein, 84 aa, unidentified
  REGION 1..84: note = Description of Unknown:cds_NZ_WFIY01000004.1_cds_WP_205737141.1_1305 target sequence
CGINLSPTSKKWGGPPTLRDEDAWNAEMINKPGIFMEVLMEEIKKAGLKEPKVIGVGLDLKDAEHWNNEEITNIIAELKEKLSK

SEQ ID NO: 40536 - protein, 85 aa, unidentified
  REGION 1..85: note = Description of Unknown:cds_NZ_WFIY01000004.1_cds_WP_205737141.1_1305 target sequence
YKGMVKEIVDLLYEYNYGILQLPCPETLFAGARRWWQVRDQYDTEGYREHCRMLAKPIITMLKEYQKEGYDVVLIGVDGSPSCGI

SEQ ID NO: 40537 - protein, 85 aa, unidentified
  REGION 1..85: note = Description of Unknown:cds_NC_035460.1_cds_YP_009408088.1_137 target sequence
DKLFIFCFILQNTILTNKTTQQKTTNVCNLNIETIIFISCPIINIILLSCNILTLTKRIAHIKKVLHLYVGCLWVTFITFTGLCL

SEQ ID NO: 40538 - protein, 85 aa, unidentified
  REGION 1..85: note = Description of Unknown:cds_NC_035460.1_cds_YP_009408088.1_137 target sequence
SLTDIDNDLIKIYGISLIMFSSILIIVIQYNILYNIKFTYIFLIYLLQIIGYGINFIFYICYMIYNYKVYFTVALIGQCLIALQE

SEQ ID NO: 40539 - protein, 84 aa, unidentified
  REGION 1..84: note = Description of Unknown:cds_NC_035460.1_cds_YP_009408088.1_137 target sequence
IIVIQYNILYNIKFTYIFLIYLLQIIGYGINFIFYICYMIYNYKVYFTVALIGQCLIALQECLCLIILFFYPIKTIYEYTSIPF

SEQ ID NO: 40540 - protein, 85 aa, unidentified
  REGION 1..85: note = Description of Unknown:cds_NC_035460.1_cds_YP_009408088.1_137 target sequence
CNLNIETIIFISCPIINIILLSCNILTLTKRIAHIKKVLHLYVGCLWVTFITFTGLCLSLTDIDNDLIKIYGISLIMFSSILIIV

SEQ ID NO: 40541 - protein, 85 aa, unidentified
  REGION 1..85: note = Description of Unknown:cds_NC_029316.1_cds_YP_009230291.1_38 target sequence
LRPKEVCQRLGISYATLREYVKKGYIKPVILQSGKWRFKEEDVERLMGIVRKRKVVLYARVSSNTQKDDLINQVKYLEENVKDYD

SEQ ID NO: 40542 - protein, 85 aa, unidentified
  REGION 1..85: note = Description of Unknown:cds_NC_029316.1_cds_YP_009230291.1_38 target sequence
QVITDIGSGLNMKRKGFIKLLKMILNNEVSKVVVAYPDRLVRFGFEILEEVCKAHNCEIVVINKEDKTPEQELIEDLISILVSFS

SEQ ID NO: 40543 - protein, 84 aa, unidentified
  REGION 1..84: note = Description of Unknown:cds_NC_029316.1_cds_YP_009230291.1_38 target sequence
LNNEVSKVVVAYPDRLVRFGFEILEEVCKAHNCEIVVINKEDKTPEQELIEDLISILVSFSGKLYGMRSHKYEKVKKCVEELKA

SEQ ID NO: 40544 - protein, 85 aa, unidentified
  REGION 1..85: note = Description of Unknown:cds_NC_029316.1_cds_YP_009230291.1_38 target sequence
PVILQSGKWRFKEEDVERLMGIVRKRKVVLYARVSSNTQKDDLINQVKYLEENVKDYDQVITDIGSGLNMKRKGFIKLLKMILNN

SEQ ID NO: 40545 - protein, 85 aa, unidentified
  REGION 1..85: note = Description of Unknown:cds_NC_030656.1_cds_YP_009268718.1_3 target sequence
AAAKFLPHLDADAAVNKLHCFPGLSSNKAVDVTQFSHVVVNGCRYETHRYMWVSSTIGERYIGGFLPYILIEGANKPEVGDLIYS

SEQ ID NO: 40546 - protein, 85 aa, unidentified
  REGION 1..85: note = Description of Unknown:cds_NC_030656.1_cds_YP_009268718.1_3 target sequence
EDGEPISCITRSKGDAFCVSGIGYETLDLQSNVRVHHRTIVDKHSVYGGQQGPYCVIKQYALEKAARSSGSVTDYYVWIGDNITH

SEQ ID NO: 40547 - protein, 84 aa, unidentified
  REGION 1..84: note = Description of Unknown:cds_NC_030656.1_cds_YP_009268718.1_3 target sequence
ETLDLQSNVRVHHRTIVDKHSVYGGQQGPYCVIKQYALEKAARSSGSVTDYYVWIGDNITHIVGTCANGKEVSRVRIKHGGIFS

SEQ ID NO: 40548 - protein, 85 aa, unidentified
  REGION 1..85: note = Description of Unknown:cds_NC_030656.1_cds_YP_009268718.1_3 target sequence
KAVDVTQFSHVVVNGCRYETHRYMWVSSTIGERYIGGFLPYILIEGANKPEVGDLIYSEDGEPISCITRSKGDAFCVSGIGYETL

SEQ ID NO: 40549 - protein, 85 aa, unidentified
  REGION 1..85: note = Description of Unknown:hvTR_Q2KSF2 target sequence
SILISPSNNTGWGLHAPSKMYGGARQRSTQHPVRVRGHFRAPWGALKGRVRSRTTVDDVIDQVVADARNYTPAAAPVSTVDAVID

SEQ ID NO: 40550 - protein, 85 aa, unidentified
  REGION 1..85: note = Description of Unknown:hvTR_Q2KSF2 target sequence
SVVADARRYARAKSRRRRIARRHRSTTAMRAAQALLRRARRTGRRAMLRAARRAASGASAGRTRRRAATAAAAAIASMSRPRRGN

SEQ ID NO: 40551 - protein, 84 aa, unidentified
  REGION 1..84: note = Description of Unknown:hvTR_Q2KSF2 target sequence
RSTTAMRAAQALLRRARRTGRRAMLRAARRAASGASAGRTRRRAATAAAAAIASMSRPRRGNVYWVRDAATGVRVPVRTRPPRT

SEQ ID NO: 40552 - protein, 85 aa, unidentified
  REGION 1..85: note = Description of Unknown:hvTR_Q2KSF2 target sequence
STQHPVRVRGHFRAPWGALKGRVRSRTTVDDVIDQVVADARNYTPAAAPVSTVDAVIDSVVADARRYARAKSRRRRIARRHRSTT

SEQ ID NO: 40553 - protein, 85 aa, unidentified
  REGION 1..85: note = Description of Unknown:cds_NC_024711.1_cds_YP_009052490.1_8 target sequence
ENINIKVILDEVFGKSCNTSNNIACDTCKYKEDCNLLNKFINDIKDKGLSPDQYVRGLALFVYVLKEQKYINDFGKTQEDIIKLV

SEQ ID NO: 40554 - protein, 85 aa, unidentified
  REGION 1..85: note = Description of Unknown:cds_NC_024711.1_cds_YP_009052490.1_8 target sequence
TEDGFELDWLINRWDSIIEDKDILKPIIAVFPKYAKDMIINIVEANTKINHFISQHIVDSSYKERNEIIKMVNQSVDNNKQENKF

SEQ ID NO: 40555 - protein, 84 aa, unidentified
  REGION 1..84: note = Description of Unknown:cds_NC_024711.1_cds_YP_009052490.1_8 target sequence
LKPIIAVFPKYAKDMIINIVEANTKINHFISQHIVDSSYKERNEIIKMVNQSVDNNKQENKFKNVSDDKIYAELKRRKANKSAK

SEQ ID NO: 40556 - protein, 85 aa, unidentified
  REGION 1..85: note = Description of Unknown:cds_NC_024711.1_cds_YP_009052490.1_8 target sequence
CKYKEDCNLLNKFINDIKDKGLSPDQYVRGLALFVYVLKEQKYINDFGKTQEDIIKLVTEDGFELDWLINRWDSIIEDKDILKPI

SEQ ID NO: 40557 - protein, 85 aa, unidentified
  REGION 1..85: note = Description of Unknown:cds_NZ_WFIY01000004.1_cds_WP_155862493.1_252 target sequence
DITLIIDNYDSFVYNIAQAVGELGSYPIVIRNDEITVKGIERINPDRIIISPGPGSPDKKEDIGIVIDVIKQLGKRIPILGICLG

SEQ ID NO: 40558 - protein, 85 aa, unidentified
  REGION 1..85: note = Description of Unknown:cds_NZ_WFIY01000004.1_cds_WP_155862493.1_252 target sequence
HQAIGYAFNAKIRKAKVVFHGKLSTIIQNSSAVIYEGLPNEFKATRYHSLVIDDVKPPLIIDAYSKEDNEIMGVHHEEYKIFGVQ

SEQ ID NO: 40559 - protein, 84 aa, unidentified
  REGION 1..84: note = Description of Unknown:cds_NZ_WFIY01000004.1_cds_WP_155862493.1_252 target sequence
STIIQNSSAVIYEGLPNEFKATRYHSLVIDDVKPPLIIDAYSKEDNEIMGVHHEEYKIFGVQFHPESIGTQVGQKIFYNFLNRV

SEQ ID NO: 40560 - protein, 85 aa, unidentified
  REGION 1..85: note = Description of Unknown:cds_NZ_WFIY01000004.1_cds_WP_155862493.1_252 target sequence
IVIRNDEITVKGIERINPDRIIISPGPGSPDKKEDIGIVIDVIKQLGKRIPILGICLGHQAIGYAFNAKIRKAKVVFHGKLSTII

SEQ ID NO: 40561 - protein, 85 aa, unidentified
  REGION 1..85: note = Description of Unknown:cds_NZ_WFIY01000004.1_cds_WP_155862658.1_450 target sequence
SRYATVKRDTKETEIEVYLDIDTPGNVEVSTPIPFFNHMLNSMLFHMNSSAKIFAKDKQNYDDHHIVEDTAIVLGEAFKEALGDK

SEQ ID NO: 40562 - protein, 85 aa, unidentified
  REGION 1..85: note = Description of Unknown:cds_NZ_WFIY01000004.1_cds_WP_155862658.1_450 target sequence
RGIRRFFSIFTPMDEALVLVAVDISGRGMGIIDLDLKREEIGGLSMENVPHFFRTFAYNAGITLHIRKFSGENEHHIVEAAFKGL

SEQ ID NO: 40563 - protein, 84 aa, unidentified
  REGION 1..84: note = Description of Unknown:cds_NZ_WFIY01000004.1_cds_WP_155862658.1_450 target sequence
ISGRGMGIIDLDLKREEIGGLSMENVPHFFRTFAYNAGITLHIRKFSGENEHHIVEAAFKGLGISLYEASRIVNNRLPTTKGLL

SEQ ID NO: 40564 - protein, 85 aa, unidentified
  REGION 1..85: note = Description of Unknown:cds_NZ_WFIY01000004.1_cds_WP_155862658.1_450 target sequence
EVSTPIPFFNHMLNSMLFHMNSSAKIFAKDKQNYDDHHIVEDTAIVLGEAFKEALGDKRGIRRFFSIFTPMDEALVLVAVDISGR

SEQ ID NO: 40565 - protein, 85 aa, unidentified
  REGION 1..85: note = Description of Unknown:cds_NZ_WFIY01000004.1_cds_WP_155862674.1_470 target sequence
DFAESLLQRKLLLIGNFILTSGKTSPYYLDLRRLPNYPEFFTVVDKAIDELRNIKFDMIIGIATGGIPLASFVACKLGKPMGYVR

SEQ ID NO: 40566 - protein, 85 aa, unidentified
  REGION 1..85: note = Description of Unknown:cds_NZ_WFIY01000004.1_cds_WP_155862674.1_470 target sequence
LEKKGYGTDKLLEADVKDKEIVIVDDVATTGGSIERSAEEIIRNGGKVSHALVIVDRKEGAKERLEKMGITLHYLYSIHDILKSI

SEQ ID NO: 40567 - protein, 84 aa, unidentified
  REGION 1..84: note = Description of Unknown:cds_NZ_WFIY01000004.1_cds_WP_155862674.1_470 target sequence
VDDVATTGGSIERSAEEIIRNGGKVSHALVIVDRKEGAKERLEKMGITLHYLYSIHDILKSILPKLNDNERRMIEEYLVKNVER

SEQ ID NO: 40568 - protein, 85 aa, unidentified
  REGION 1..85: note = Description of Unknown:cds_NZ_WFIY01000004.1_cds_WP_155862674.1_470 target sequence
YLDLRRLPNYPEFFTVVDKAIDELRNIKFDMIIGIATGGIPLASFVACKLGKPMGYVRLEKKGYGTDKLLEADVKDKEIVIVDDV

SEQ ID NO: 40569 - protein, 85 aa, unidentified
  REGION 1..85: note = Description of Unknown:cds_NC_034440.1_cds_YP_009944307.1_11 target sequence
TTPIITSLEEEEETLNLDLHQITLSPGTRGLPNTGKSLFPSHLDRAYLLMPILPLRKMLGIGGDRTEKLIQEMEPSHWLPGGTST

SEQ ID NO: 40570 - protein, 85 aa, unidentified
  REGION 1..85: note = Description of Unknown:cds_NC_034440.1_cds_YP_009944307.1_11 target sequence
TLEPDLRPTSLSELSRTESSGSMRMAPLMLLQLLGRGTLTMMLLLLRNSRPVLSFLKTSTLKGLEAIANHLQERLVPAETLLDPI

SEQ ID NO: 40571 - protein, 84 aa, unidentified
  REGION 1..84: note = Description of Unknown:cds_NC_034440.1_cds_YP_009944307.1_11 target sequence
RMAPLMLLQLLGRGTLTMMLLLLRNSRPVLSFLKTSTLKGLEAIANHLQERLVPAETLLDPIPEVPDLVTPPAALPQVHLESEL

SEQ ID NO: 40572 - protein, 85 aa, unidentified
  REGION 1..85: note = Description of Unknown:cds_NC_034440.1_cds_YP_009944307.1_11 target sequence
TRGLPNTGKSLFPSHLDRAYLLMPILPLRKMLGIGGDRTEKLIQEMEPSHWLPGGTSTTLEPDLRPTSLSELSRTESSGSMRMAP

SEQ ID NO: 40573 - protein, 85 aa, unidentified
  REGION 1..85: note = Description of Unknown:cds_NC_029316.1_cds_YP_009230303.1_50 target sequence
LFLKKKNNIDYSPYVKYVAHAFLLDRKITWNATSFVRSKFGFGFIVFGKQRKNFSFNKAYIDDLDVLKMFILLYNNTTHNTVFFY

SEQ ID NO: 40574 - protein, 85 aa, unidentified
  REGION 1..85: note = Description of Unknown:cds_NC_029316.1_cds_YP_009230303.1_50 target sequence
YTTKLTKKVINYSIKTQKKNKDLSVNTIRKLLLMCGERYLCTIDENYNISEGFDYKKYVNDENGEERLKTKLLLFSKTDITTLRN

SEQ ID NO: 40575 - protein, 84 aa, unidentified
  REGION 1..84: note = Description of Unknown:cds_NC_029316.1_cds_YP_009230303.1_50 target sequence
SVNTIRKLLLMCGERYLCTIDENYNISEGFDYKKYVNDENGEERLKTKLLLFSKTDITTLRNYTIFISLRSLYTHSKQEQIFSS

SEQ ID NO: 40576 - protein, 85 aa, unidentified
  REGION 1..85: note = Description of Unknown:cds_NC_029316.1_cds_YP_009230303.1_50 target sequence
ITWNATSFVRSKFGFGFIVFGKQRKNFSFNKAYIDDLDVLKMFILLYNNTTHNTVFFYYTTKLTKKVINYSIKTQKKNKDLSVNT

SEQ ID NO: 40577 - protein, 85 aa, unidentified
  REGION 1..85: note = Description of Unknown:cds_NC_007409.1_cds_YP_319872.1_41 target sequence
VSARQPQNNNQQNNNSILQALQQVQQQNRPIVANIARIDPYMANMAYKMYNEIDVSINESVSTIDITNKMLRIAKGMIRSIEQGH

SEQ ID NO: 40578 - protein, 85 aa, unidentified
  REGION 1..85: note = Description of Unknown:cds_NC_007409.1_cds_YP_319872.1_41 target sequence
AKMSATPFTLKESFKSLVMELLDVAYTDINTFMTQKYLELQENLTNNDLKKIHELNKTVMEYGLIYINAIHFVLLDTQGFLNEKL

SEQ ID NO: 40579 - protein, 84 aa, unidentified
  REGION 1..84: note = Description of Unknown:cds_NC_007409.1_cds_YP_319872.1_41 target sequence
AYTDINTFMTQKYLELQENLTNNDLKKIHELNKTVMEYGLIYINAIHFVLLDTQGFLNEKLPTQLISPVDSARLLGHFHLKHKT

SEQ ID NO: 40580 - protein, 85 aa, unidentified
  REGION 1..85: note = Description of Unknown:cds_NC_007409.1_cds_YP_319872.1_41 target sequence
NRPIVANIARIDPYMANMAYKMYNEIDVSINESVSTIDITNKMLRIAKGMIRSIEQGHAKMSATPFTLKESFKSLVMELLDVAYT

SEQ ID NO: 40581 - protein, 85 aa, unidentified
  REGION 1..85: note = Description of Unknown:hvTR_P03273.2 target sequence
SILISPSNNTGWGLYAPTKMYGGARIRATQHPVRVRGHFRAPWGALKGRTRTRTTVDDVIDQVVADARNYTPTAPTSTVDAVIDS

SEQ ID NO: 40582 - protein, 85 aa, unidentified
  REGION 1..85: note = Description of Unknown:hvTR_P03273.2 target sequence
VVADARAYARRKSRRRRIARRHRATTAMRAAKAILRRAKRVGRRAMLRAARRAASGASSGRSRRRAATAAAAAIANMAQPRRGNV

SEQ ID NO: 40583 - protein, 84 aa, unidentified
  REGION 1..84: note = Description of Unknown:hvTR_P03273.2 target sequence
RATTAMRAAKAILRRAKRVGRRAMLRAARRAASGASSGRSRRRAATAAAAAIANMAQPRRGNVYWVRDATTGQRVPVRTRPPRT

SEQ ID NO: 40584 - protein, 85 aa, unidentified
  REGION 1..85: note = Description of Unknown:hvTR_P03273.2 target sequence
ATQHPVRVRGHFRAPWGALKGRTRTRTTVDDVIDQVVADARNYTPTAPTSTVDAVIDSVVADARAYARRKSRRRRIARRHRATTA

SEQ ID NO: 40585 - protein, 85 aa, unidentified
  REGION 1..85: note = Description of Unknown:cds_NZ_WFIY01000004.1_cds_WP_155862799.1_619 target sequence
LYVSFKVNHEDWSKGIDYSRNSLSVLDIKPSANGARLLIEFKGKEEDAKKLKWNLSRVSKFKYLGTIIVNEPIERILSNYIIMNG

SEQ ID NO: 40586 - protein, 85 aa, unidentified
  REGION 1..85: note = Description of Unknown:cds_NZ_WFIY01000004.1_cds_WP_155862799.1_619 target sequence
TATNDGMYWTVILSDYTELKKMLRDFVEHHIEVKVVKVIKVKSEDVLTARQEQILKIAFEAGYFDYPKKIRIKELAEKLNMSVSN

SEQ ID NO: 40587 - protein, 84 aa, unidentified
  REGION 1..84: note = Description of Unknown:cds_NZ_WFIY01000004.1_cds_WP_155862799.1_619 target sequence
LRDFVEHHIEVKVVKVIKVKSEDVLTARQEQILKIAFEAGYFDYPKKIRIKELAEKLNMSVSNLSEILRRAERNVIETFFRERS

SEQ ID NO: 40588 - protein, 85 aa, unidentified
  REGION 1..85: note = Description of Unknown:cds_NZ_WFIY01000004.1_cds_WP_155862799.1_619 target sequence
IKPSANGARLLIEFKGKEEDAKKLKWNLSRVSKFKYLGTIIVNEPIERILSNYIIMNGTATNDGMYWTVILSDYTELKKMLRDFV

SEQ ID NO: 40589 - protein, 85 aa, unidentified
  REGION 1..85: note = Description of Unknown:cds_NZ_WFIY01000004.1_cds_WP_155863486.1_1440 target sequence
SSIFDSINSWNYRPFRRMGVTICEELRIGKLVSSIIKRINPKKALEIGCGNCLVTLSVEKETKLPSLISIEVWKDEITDKEVKDY

SEQ ID NO: 40590 - protein, 85 aa, unidentified
  REGION 1..85: note = Description of Unknown:cds_NZ_WFIY01000004.1_cds_WP_155863486.1_1440 target sequence
LRGEDYNLVENLFPLPFKEKSFDLAYSVLYFYNKIRKERNYLANEISKVIKDNGYFILIEPEIVRNMRKDFFNAGFSEVEYHVDQ

SEQ ID NO: 40591 - protein, 84 aa, unidentified
  REGION 1..84: note = Description of Unknown:cds_NZ_WFIY01000004.1_cds_WP_155863486.1_1440 target sequence
DLAYSVLYFYNKIRKERNYLANEISKVIKDNGYFILIEPEIVRNMRKDFFNAGFSEVEYHVDQGIFFSLMKKVDTDNQKTTGIT

SEQ ID NO: 40592 - protein, 85 aa, unidentified
  REGION 1..85: note = Description of Unknown:cds_NZ_WFIY01000004.1_cds_WP_155863486.1_1440 target sequence
IGKLVSSIIKRINPKKALEIGCGNCLVTLSVEKETKLPSLISIEVWKDEITDKEVKDYLRGEDYNLVENLFPLPFKEKSFDLAYS

SEQ ID NO: 40593 - protein, 85 aa, unidentified
  REGION 1..85: note = Description of Unknown:cds_NZ_WFIY01000004.1_cds_WP_155863508.1_1459 target sequence
EIRNLTVKRGNTTILENVNIIEDNNPICLTGPNGSGKTSLLLAIAKVIPAEGEVKFGGRELSQDEISFHVEGMKPYEHLTVKDYY

SEQ ID NO: 40594 - protein, 85 aa, unidentified
  REGION 1..85: note = Description of Unknown:cds_NZ_WFIY01000004.1_cds_WP_155863508.1_1459 target sequence
NLVKELYNTEVKDIFGIYEKWKNTKFSKLSQGTKKKLLLELVISQPHKLLLIDEPYANLDDESKKTLASYIMKEAEKSIVILALP

SEQ ID NO: 40595 - protein, 84 aa, unidentified
  REGION 1..84: note = Description of Unknown:cds_NZ_WFIY01000004.1_cds_WP_155863508.1_1459 target sequence
NTKFSKLSQGTKKKLLLELVISQPHKLLLIDEPYANLDDESKKTLASYIMKEAEKSIVILALPSKEMGNEVCRAFYDVSKWRVY

SEQ ID NO: 40596 - protein, 85 aa, unidentified
  REGION 1..85: note = Description of Unknown:cds_NZ_WFIY01000004.1_cds_WP_155863508.1_1459 target sequence
CLTGPNGSGKTSLLLAIAKVIPAEGEVKFGGRELSQDEISFHVEGMKPYEHLTVKDYYNLVKELYNTEVKDIFGIYEKWKNTKFS

SEQ ID NO: 40597 - protein, 85 aa, unidentified
  REGION 1..85: note = Description of Unknown:cds_NZ_WFIY01000004.1_cds_WP_155864119.1_2070 target sequence
VNKYFIQEVLEYFKIPRSTRELRKINYEKETLINNLISIRVLLKKGQYVILNPSIDVLLYDVNINDYRRSCEISLDLIEIKDDEK

SEQ ID NO: 40598 - protein, 85 aa, unidentified
  REGION 1..85: note = Description of Unknown:cds_NZ_WFIY01000004.1_cds_WP_155864119.1_2070 target sequence
LKAKILMIIRNRKVDNIEVKDGKQTCKVSSLLYPEDVILYSSISLPYPVINFTFKTEFSKTLYIMNSISLPYYLPPKLSNDEAFT

SEQ ID NO: 40599 - protein, 84 aa, unidentified
  REGION 1..84: note = Description of Unknown:cds_NZ_WFIY01000004.1_cds_WP_155864119.1_2070 target sequence
QTCKVSSLLYPEDVILYSSISLPYPVINFTFKTEFSKTLYIMNSISLPYYLPPKLSNDEAFTNKDTVSLNFIQPSTIFIYYKKY

SEQ ID NO: 40600 - protein, 85 aa, unidentified
  REGION 1..85: note = Description of Unknown:cds_NZ_WFIY01000004.1_cds_WP_155864119.1_2070 target sequence
EKETLINNLISIRVLLKKGQYVILNPSIDVLLYDVNINDYRRSCEISLDLIEIKDDEKLKAKILMIIRNRKVDNIEVKDGKQTCK

SEQ ID NO: 40601 - protein, 85 aa, unidentified
  REGION 1..85: note = Description of Unknown:cds_NZ_WFIY01000004.1_cds_WP_155864333.1_2342 target sequence
QVIEYPISTYLPRDVVYFDGTSATLPQDYVIKEGNLRLFVPKNKINDVVNALKSEGFKEEKLEFYKGEKYSLSTKFFNIWELHVR

SEQ ID NO: 40602 - protein, 85 aa, unidentified
  REGION 1..85: note = Description of Unknown:cds_NZ_WFIY01000004.1_cds_WP_155864333.1_2342 target sequence
IYDDGFIDGHFEVSRDYLEHLPYDTIPSIYEVFEFYRTAYDKLHIFDNGAKKWIKEVKTHYFVTLNPPKSITAWQPIIVSVGALS

SEQ ID NO: 40603 - protein, 84 aa, unidentified
  REGION 1..84: note = Description of Unknown:cds_NZ_WFIY01000004.1_cds_WP_155864333.1_2342 target sequence
YDTIPSIYEVFEFYRTAYDKLHIFDNGAKKWIKEVKTHYFVTLNPPKSITAWQPIIVSVGALSAIGILAYLLSRLDKGEELVET

SEQ ID NO: 40604 - protein, 85 aa, unidentified
  REGION 1..85: note = Description of Unknown:cds_NZ_WFIY01000004.1_cds_WP_155864333.1_2342 target sequence
DYVIKEGNLRLFVPKNKINDVVNALKSEGFKEEKLEFYKGEKYSLSTKFFNIWELHVRIYDDGFIDGHFEVSRDYLEHLPYDTIP

SEQ ID NO: 40605 - protein, 85 aa, unidentified
  REGION 1..85: note = Description of Unknown:cds_NC_029316.1_cds_YP_009230334.1_81 target sequence
LDYCRNNHDAMLECVVSHSPDLLSVFINSYLKNKKAIENSDQKFWESVKKEYEKLWKKWMREEVAYYLGDILVPVDIIQNNELNN

SEQ ID NO: 40606 - protein, 85 aa, unidentified
  REGION 1..85: note = Description of Unknown:cds_NC_029316.1_cds_YP_009230334.1_81 target sequence
ACKVGYLKAYEEVLNEFADRIKSALQEGVPLCGEYLYDWYMKMADVVPIKRPEYNEQVSYFLDFYNMFDDSEKLEVLSILLDEID

SEQ ID NO: 40607 - protein, 84 aa, unidentified
  REGION 1..84: note = Description of Unknown:cds_NC_029316.1_cds_YP_009230334.1_81 target sequence
ALQEGVPLCGEYLYDWYMKMADVVPIKRPEYNEQVSYFLDFYNMFDDSEKLEVLSILLDEIDSALYEIEEEYERNLEALINNNS

SEQ ID NO: 40608 - protein, 85 aa, unidentified
  REGION 1..85: note = Description of Unknown:cds_NC_029316.1_cds_YP_009230334.1_81 target sequence
NSYLKNKKAIENSDQKFWESVKKEYEKLWKKWMREEVAYYLGDILVPVDIIQNNELNNACKVGYLKAYEEVLNEFADRIKSALQE

SEQ ID NO: 40609 - protein, 85 aa, unidentified
  REGION 1..85: note = Description of Unknown:cds_NC_007409.1_cds_YP_319900.1_69 target sequence
VRIIAMGQSPLCNFIKEQLKMNIIVYPEFFDNKKLLLQRRVRDYIISLLRNYRKIRYALYPDYYYRDINLPAEITEKITFIYPVH

SEQ ID NO: 40610 - protein, 85 aa, unidentified
  REGION 1..85: note = Description of Unknown:cds_NC_007409.1_cds_YP_319900.1_69 target sequence
SKNEVEFIAKLKSKYNIIPGFASDSRYRDYDIYWFVNTFREEKWYLGISTWRELREAKRFEFYGGDITGFVLGNHEDRKNPEVLR

SEQ ID NO: 40611 - protein, 84 aa, unidentified
  REGION 1..84: note = Description of Unknown:cds_NC_007409.1_cds_YP_319900.1_69 target sequence
SDSRYRDYDIYWFVNTFREEKWYLGISTWRELREAKRFEFYGGDITGFVLGNHEDRKNPEVLRRKLKEIIEYVSRPQGKQLTLF

SEQ ID NO: 40612 - protein, 85 aa, unidentified
  REGION 1..85: note = Description of Unknown:cds_NC_007409.1_cds_YP_319900.1_69 target sequence
EFFDNKKLLLQRRVRDYIISLLRNYRKIRYALYPDYYYRDINLPAEITEKITFIYPVHSKNEVEFIAKLKSKYNIIPGFASDSRY

SEQ ID NO: 40613 - protein, 85 aa, unidentified
  REGION 1..85: note = Description of Unknown:hvTR_P0DOI9 target sequence
DKTLSREEAKQLMQLLCLDMSCWGNLPLMRRQYLVKCKEYHPDKGGNEESMKLLNSLYLKLQDSVSSVHDLNEEEDNIWQSSQVY

SEQ ID NO: 40614 - protein, 85 aa, unidentified
  REGION 1..85: note = Description of Unknown:hvTR_P0DOI9 target sequence
CKDLCCNKFRLVGAIYGDYYEAYIMKQWDVCIHGYNHECQCIHCILSKYHKEKYKIYRKPPVWIECYCYKCYREWFFFPISMQTF

SEQ ID NO: 40615 - protein, 84 aa, unidentified
  REGION 1..84: note = Description of Unknown:hvTR_P0DOI9 target sequence
AYIMKQWDVCIHGYNHECQCIHCILSKYHKEKYKIYRKPPVWIECYCYKCYREWFFFPISMQTFFFWKVIIFNTEIRAVQPLLR

SEQ ID NO: 40616 - protein, 85 aa, unidentified
  REGION 1..85: note = Description of Unknown:hvTR_P0DOI9 target sequence
LMRRQYLVKCKEYHPDKGGNEESMKLLNSLYLKLQDSVSSVHDLNEEEDNIWQSSQVYCKDLCCNKFRLVGAIYGDYYEAYIMKQ

SEQ ID NO: 40617 - protein, 85 aa, unidentified
  REGION 1..85: note = Description of Unknown:cds_NC_024711.1_cds_YP_009052535.1_58 target sequence
REMPYIQPYNVGNRRGGNQNILDEFREFLDARGGRGGRGSRGGMRNRIGYDTYDTYGRPTNKNDREEKILTMLMSGGYNDDGYHF

SEQ ID NO: 40618 - protein, 85 aa, unidentified
  REGION 1..85: note = Description of Unknown:cds_NC_024711.1_cds_YP_009052535.1_58 target sequence
NEYEAKEVVEQMYHVKDNKKYIGEKYDMNKAHEICERYKEVLPNDVEPCDVYVAINAQYHDYAKLFEEWFGGNIDNKVFESAITF

SEQ ID NO: 40619 - protein, 84 aa, unidentified
  REGION 1..84: note = Description of Unknown:cds_NC_024711.1_cds_YP_009052535.1_58 target sequence
IGEKYDMNKAHEICERYKEVLPNDVEPCDVYVAINAQYHDYAKLFEEWFGGNIDNKVFESAITFWFKDVDFDGDKVWEYFHMNN

SEQ ID NO: 40620 - protein, 85 aa, unidentified
  REGION 1..85: note = Description of Unknown:cds_NC_024711.1_cds_YP_009052535.1_58 target sequence
FLDARGGRGGRGSRGGMRNRIGYDTYDTYGRPTNKNDREEKILTMLMSGGYNDDGYHFNEYEAKEVVEQMYHVKDNKKYIGEKYD

SEQ ID NO: 40621 - protein, 85 aa, unidentified
  REGION 1..85: note = Description of Unknown:cds_NC_024711.1_cds_YP_009052559.1_84 target sequence
LTIDETGMPKAPTLKQLLDRDVSLLYTRDKSPNKEMYVKEVGVIYYLGDPKGPCLPKGLSEKEALKKAIENFDLPKNYQPDILVW

SEQ ID NO: 40622 - protein, 85 aa, unidentified
  REGION 1..85: note = Description of Unknown:cds_NC_024711.1_cds_YP_009052559.1_84 target sequence
KLIKRYYNQKAGAGMEAVLNIKRGIHNVALAASKLNELLNDKLSDGASLEDVPVVIGYMKQINDLANQFPNTIKALNVAKENLLY

SEQ ID NO: 40623 - protein, 84 aa, unidentified
  REGION 1..84: note = Description of Unknown:cds_NC_024711.1_cds_YP_009052559.1_84 target sequence
KRGIHNVALAASKLNELLNDKLSDGASLEDVPVVIGYMKQINDLANQFPNTIKALNVAKENLLYEQENVAGRGGVEITSSMIEE

SEQ ID NO: 40624 - protein, 85 aa, unidentified
  REGION 1..85: note = Description of Unknown:cds_NC_024711.1_cds_YP_009052559.1_84 target sequence
RDKSPNKEMYVKEVGVIYYLGDPKGPCLPKGLSEKEALKKAIENFDLPKNYQPDILVWKLIKRYYNQKAGAGMEAVLNIKRGIHN

SEQ ID NO: 40625 - protein, 85 aa, unidentified
  REGION 1..85: note = Description of Unknown:cds_NZ_WFIY01000004.1_cds_WP_155862634.1_415 target sequence
ITRLRRESKRILRPIANVLAKNGVKANEITIIGLVLSIVYFIILYISKNPLYGAILLAISSFSDALDGEVARISGTAGNKGAFLD

SEQ ID NO: 40626 - protein, 85 aa, unidentified
  REGION 1..85: note = Description of Unknown:cds_NZ_WFIY01000004.1_cds_WP_155862634.1_415 target sequence
SSLDRVEDTLFLSPLVLYFQPLLVSLLVGISLIIPYLRARAEALGIKAEGRGIIERGERIIFTMIILILIFFNFTFTIYIFYLFI

SEQ ID NO: 40627 - protein, 84 aa, unidentified
  REGION 1..84: note = Description of Unknown:cds_NZ_WFIY01000004.1_cds_WP_155862634.1_415 target sequence
LLVSLLVGISLIIPYLRARAEALGIKAEGRGIIERGERIIFTMIILILIFFNFTFTIYIFYLFIVLSIVTVIQRFQLILSNLPK

SEQ ID NO: 40628 - protein, 85 aa, unidentified
  REGION 1..85: note = Description of Unknown:cds_NZ_WFIY01000004.1_cds_WP_155862634.1_415 target sequence
EITIIGLVLSIVYFIILYISKNPLYGAILLAISSFSDALDGEVARISGTAGNKGAFLDSSLDRVEDTLFLSPLVLYFQPLLVSLL

SEQ ID NO: 40629 - protein, 85 aa, unidentified
  REGION 1..85: note = Description of Unknown:cds_NZ_WFIY01000004.1_cds_WP_155862827.1_656 target sequence
KIVIFTSSKEAQMEEPVICDRDTVKIDASKCIGRSLGIAPYVVKYLKDLGFYVIVIDPFAEDNDYEADEVIKGEVFSVPDELIKG

SEQ ID NO: 40630 - protein, 85 aa, unidentified
  REGION 1..85: note = Description of Unknown:cds_NZ_WFIY01000004.1_cds_WP_155862827.1_656 target sequence
NYVVISTKHVYDTWAIMKSILAGAKAIQVVMSIKRAKVILGRLIKAGISKEELKKLRIPAGLDIGAKTEKEIALSIVTEILAMER

SEQ ID NO: 40631 - protein, 84 aa, unidentified
  REGION 1..84: note = Description of Unknown:cds_NZ_WFIY01000004.1_cds_WP_155862827.1_656 target sequence
AGAKAIQVVMSIKRAKVILGRLIKAGISKEELKKLRIPAGLDIGAKTEKEIALSIVTEILAMERGTSGLPLSKVKEFEKVVDGL

SEQ ID NO: 40632 - protein, 85 aa, unidentified
  REGION 1..85: note = Description of Unknown:cds_NZ_WFIY01000004.1_cds_WP_155862827.1_656 target sequence
ASKCIGRSLGIAPYVVKYLKDLGFYVIVIDPFAEDNDYEADEVIKGEVFSVPDELIKGNYVVISTKHVYDTWAIMKSILAGAKAI

SEQ ID NO: 40633 - protein, 85 aa, unidentified
  REGION 1..85: note = Description of Unknown:cds_NZ_WFIY01000004.1_cds_WP_155863171.1_1101 target sequence
VSPLLMVIIGLAFAIIIAFFVVLMMPVEFYSQPSNKQYGNLYMLAYYRNLEINYSEAGITYYIPASLSNVTVDNFILGPPNVTLV

SEQ ID NO: 40634 - protein, 85 aa, unidentified
  REGION 1..85: note = Description of Unknown:cds_NZ_WFIY01000004.1_cds_WP_155863171.1_1101 target sequence
GNIIAGPAEYSNVCFNILPRFVCTNSGNSKITFNISIHVYSNICDIHVSIPAGEGYYHICSIYENMTNNKILLSITIKLNNLQKD

SEQ ID NO: 40635 - protein, 84 aa, unidentified
  REGION 1..84: note = Description of Unknown:cds_NZ_WFIY01000004.1_cds_WP_155863171.1_1101 target sequence
CTNSGNSKITFNISIHVYSNICDIHVSIPAGEGYYHICSIYENMTNNKILLSITIKLNNLQKDSLLIIPIKVNSCTQYLQIYVN

SEQ ID NO: 40636 - protein, 85 aa, unidentified
  REGION 1..85: note = Description of Unknown:cds_NZ_WFIY01000004.1_cds_WP_155863171.1_1101 target sequence
EFYSQPSNKQYGNLYMLAYYRNLEINYSEAGITYYIPASLSNVTVDNFILGPPNVTLVGNIIAGPAEYSNVCFNILPRFVCTNSG

SEQ ID NO: 40637 - protein, 85 aa, unidentified
  REGION 1..85: note = Description of Unknown:cds_NC_030656.1_cds_YP_009268791.1_76 target sequence
TDYTTLTVRGLDLNYVNTQEVKGISAVRTSTLCFFTLILAVSALILWLYVSNNTVLEELSRYVRIKNTVRGWKPLVNAKSNLESD

SEQ ID NO: 40638 - protein, 85 aa, unidentified
  REGION 1..85: note = Description of Unknown:cds_NC_030656.1_cds_YP_009268791.1_76 target sequence
RGRQISADRPELFKFQCVDFGTYFLPVRLNKDNYLPEAIQRGTGDGWVIQKAAKVDLSAQQFCQYVIQKYSQNTITCGNEMMKKI

SEQ ID NO: 40639 - protein, 84 aa, unidentified
  REGION 1..84: note = Description of Unknown:cds_NC_030656.1_cds_YP_009268791.1_76 target sequence
TYFLPVRLNKDNYLPEAIQRGTGDGWVIQKAAKVDLSAQQFCQYVIQKYSQNTITCGNEMMKKIGYSGFFEGDHWCALYHNLLT

SEQ ID NO: 40640 - protein, 85 aa, unidentified
  REGION 1..85: note = Description of Unknown:cds_NC_030656.1_cds_YP_009268791.1_76 target sequence
RTSTLCFFTLILAVSALILWLYVSNNTVLEELSRYVRIKNTVRGWKPLVNAKSNLESDRGRQISADRPELFKFQCVDFGTYFLPV

SEQ ID NO: 40641 - protein, 85 aa, unidentified
  REGION 1..85: note = Description of Unknown:cds_NC_043030.1_cds_YP_009664549.1_14 target sequence
VELVFFEPVHVTTIAGVMGTGKTSLALALVGAFEADTAVVLWPENIEYIRELRGRRLAVVLDDITYSFSRVDKRLQYIARIRHLA

SEQ ID NO: 40642 - protein, 85 aa, unidentified
  REGION 1..85: note = Description of Unknown:cds_NC_043030.1_cds_YP_009664549.1_14 target sequence
RAETYLIVNIIHYIRGAPVFFRISHSQVATSCLNKKDSEVLGEFFNYAGDYCRVYRSRFRERPVLINWLGQEFLDFVDFSRNPGL

SEQ ID NO: 40643 - protein, 84 aa, unidentified
  REGION 1..84: note = Description of Unknown:cds_NC_043030.1_cds_YP_009664549.1_14 target sequence
ISHSQVATSCLNKKDSEVLGEFFNYAGDYCRVYRSRFRERPVLINWLGQEFLDFVDFSRNPGLYKLYLKGLEVAEFQGPERPGP

SEQ ID NO: 40644 - protein, 85 aa, unidentified
  REGION 1..85: note = Description of Unknown:cds_NC_043030.1_cds_YP_009664549.1_14 target sequence
ALVGAFEADTAVVLWPENIEYIRELRGRRLAVVLDDITYSFSRVDKRLQYIARIRHLARAETYLIVNIIHYIRGAPVFFRISHSQ

SEQ ID NO: 40645 - protein, 85 aa, unidentified
  REGION 1..85: note = Description of Unknown:cds_NC_024711.1_cds_YP_009052492.1_10 target sequence
NYITYKQIDGTITSGFKVKLYDIVTLNTGYWKDKLAIVLYINEDKKQIKVRIIECGMNLTLKVKDVQFVNHNNRTAARSYIDLCN

SEQ ID NO: 40646 - protein, 85 aa, unidentified
  REGION 1..85: note = Description of Unknown:cds_NC_024711.1_cds_YP_009052492.1_10 target sequence
KLSKTFRDKYTDKQYIKDNWFTDKFIINDITADTIAKGIGQYITNTDSDRYSVSAIMWLSDIKDYIDALLKYGDFDFVAKAFKIY

SEQ ID NO: 40647 - protein, 84 aa, unidentified
  REGION 1..84: note = Description of Unknown:cds_NC_024711.1_cds_YP_009052492.1_10 target sequence
FTDKFIINDITADTIAKGIGQYITNTDSDRYSVSAIMWLSDIKDYIDALLKYGDFDFVAKAFKIYNITDTRFELIRKLYHYFYD

SEQ ID NO: 40648 - protein, 85 aa, unidentified
  REGION 1..85: note = Description of Unknown:cds_NC_024711.1_cds_YP_009052492.1_10 target sequence
TGYWKDKLAIVLYINEDKKQIKVRIIECGMNLTLKVKDVQFVNHNNRTAARSYIDLCNKLSKTFRDKYTDKQYIKDNWFTDKFII

SEQ ID NO: 40649 - protein, 85 aa, unidentified
  REGION 1..85: note = Description of Unknown:cds_NZ_WFIY01000004.1_cds_WP_155862307.1_23 target sequence
IIRVKAKTLNSLTVGGNTSIGSVDISFNELGIPGSSIKGAMRTAISKAIEEGEVSGYSSCGEIEPSKMRDCDVCRVFGYPNHEGI

SEQ ID NO: 40650 - protein, 85 aa, unidentified
  REGION 1..85: note = Description of Unknown:cds_NZ_WFIY01000004.1_cds_WP_155862307.1_23 target sequence
VNVHGVKIAPHAVLTRVKIDDATLKAMDKSLFKQEVIKPNTEFEFIVEVKDNASCREIKLVLLSLFYLRLWRLGRGGMIDLKVEE

SEQ ID NO: 40651 - protein, 84 aa, unidentified
  REGION 1..84: note = Description of Unknown:cds_NZ_WFIY01000004.1_cds_WP_155862307.1_23 target sequence
DATLKAMDKSLFKQEVIKPNTEFEFIVEVKDNASCREIKLVLLSLFYLRLWRLGRGGMIDLKVEEFPQGCDFSDLESLKRWLWE

SEQ ID NO: 40652 - protein, 85 aa, unidentified
  REGION 1..85: note = Description of Unknown:cds_NZ_WFIY01000004.1_cds_WP_155862307.1_23 target sequence
NELGIPGSSIKGAMRTAISKAIEEGEVSGYSSCGEIEPSKMRDCDVCRVFGYPNHEGIVNVHGVKIAPHAVLTRVKIDDATLKAM

SEQ ID NO: 40653 - protein, 85 aa, unidentified
  REGION 1..85: note = Description of Unknown:cds_NZ_WFIY01000004.1_cds_WP_155862960.1_823 target sequence
IPDFSELKKLRQIAGLTQAELAKRVGVSQSFIAKIENGKIDPKFSVIKKIYDELLLMINVQDTAEKIMHTPVIVSHEKDDIFSVV

SEQ ID NO: 40654 - protein, 85 aa, unidentified
  REGION 1..85: note = Description of Unknown:cds_NZ_WFIY01000004.1_cds_WP_155862960.1_823 target sequence
NKMENYNISQIPVVNNDEKLIGIIYDYVLLRKIISNNIKKLTASKVMSPLPPLIQKTEPINGILRLFSKYSVVLVIDDKLHPLGI

SEQ ID NO: 40655 - protein, 84 aa, unidentified
  REGION 1..84: note = Description of Unknown:cds_NZ_WFIY01000004.1_cds_WP_155862960.1_823 target sequence
IGIIYDYVLLRKIISNNIKKLTASKVMSPLPPLIQKTEPINGILRLFSKYSVVLVIDDKLHPLGIITRSDLIGFLVKYKLEEPQ

SEQ ID NO: 40656 - protein, 85 aa, unidentified
  REGION 1..85: note = Description of Unknown:cds_NZ_WFIY01000004.1_cds_WP_155862960.1_823 target sequence
SQSFIAKIENGKIDPKFSVIKKIYDELLLMINVQDTAEKIMHTPVIVSHEKDDIFSVVNKMENYNISQIPVVNNDEKLIGIIYDY

SEQ ID NO: 40657 - protein, 85 aa, unidentified
  REGION 1..85: note = Description of Unknown:cds_NZ_WFIY01000004.1_cds_WP_155864054.1_1990 target sequence
LGIPDEMFIRNEKIPMTKEEIRVLALSKAKLFHGAKFVDIGSGTGSVTVEAGLYVGSKGKVYAIEKDPNAVELTRKNVEKFDLHN

SEQ ID NO: 40658 - protein, 85 aa, unidentified
  REGION 1..85: note = Description of Unknown:cds_NZ_WFIY01000004.1_cds_WP_155864054.1_1990 target sequence
VTIIQGESPDVLKEIREEVDAIFVGGSERLEDSLVASNEILKKKGRIVIDAILLETAVKAMEVLNSMNYNPQIIEVIIAKGMKTS

SEQ ID NO: 40659 - protein, 84 aa, unidentified
  REGION 1..84: note = Description of Unknown:cds_NZ_WFIY01000004.1_cds_WP_155864054.1_1990 target sequence
AIFVGGSERLEDSLVASNEILKKKGRIVIDAILLETAVKAMEVLNSMNYNPQIIEVIIAKGMKTSKGYAMLSRNPIFIVYGEKP

SEQ ID NO: 40660 - protein, 85 aa, unidentified
  REGION 1..85: note = Description of Unknown:cds_NZ_WFIY01000004.1_cds_WP_155864054.1_1990 target sequence
KAKLFHGAKFVDIGSGTGSVTVEAGLYVGSKGKVYAIEKDPNAVELTRKNVEKFDLHNVTIIQGESPDVLKEIREEVDAIFVGGS

SEQ ID NO: 40661 - protein, 85 aa, unidentified
  REGION 1..85: note = Description of Unknown:cds_NZ_WFIY01000004.1_cds_WP_013776510.1_2211 target sequence
NLPILPLAIGFFGLGTGYFVYGGVEVSGYPQSSESLNKSLGQWGIWMPGFMQFITAIILWAYIAMYDVTPPNALYMAAVAFTAYG

SEQ ID NO: 40662 - protein, 85 aa, unidentified
  REGION 1..85: note = Description of Unknown:cds_NZ_WFIY01000004.1_cds_WP_013776510.1_2211 target sequence
VHWFALGLNRHYGGDARVDGYMAVAFLWISIIGALVFYEVKDNPVGILFTLLALVYISDIPASLLASRQWTKVKGYFHLITGVWL

SEQ ID NO: 40663 - protein, 84 aa, unidentified
  REGION 1..84: note = Description of Unknown:cds_NZ_WFIY01000004.1_cds_WP_013776510.1_2211 target sequence
YMAVAFLWISIIGALVFYEVKDNPVGILFTLLALVYISDIPASLLASRQWTKVKGYFHLITGVWLMYLTFAAVTSFALGWSLPL

SEQ ID NO: 40664 - protein, 85 aa, unidentified
  REGION 1..85: note = Description of Unknown:cds_NZ_WFIY01000004.1_cds_WP_013776510.1_2211 target sequence
GYPQSSESLNKSLGQWGIWMPGFMQFITAIILWAYIAMYDVTPPNALYMAAVAFTAYGVHWFALGLNRHYGGDARVDGYMAVAFL

SEQ ID NO: 40665 - protein, 85 aa, unidentified
  REGION 1..85: note = Description of Unknown:cds_NC_035460.1_cds_YP_009408028.1_77 target sequence
DKTTLNVNSLNLEYAREHEIKSIQAAKTSTLCFFVLILAISALLLWFQVSDNSFFSELAKYTRIKNSIKGWRPLVESKTQLESDK

SEQ ID NO: 40666 - protein, 85 aa, unidentified
  REGION 1..85: note = Description of Unknown:cds_NC_035460.1_cds_YP_009408028.1_77 target sequence
GRMMAAGRPELLDFSCIDFGSYFLAIRLDKKSYLPQAIRRGTGDAWMVQKANKIDPSAEQFCKHLIQTKSTNTITCGTQMMDLLG

SEQ ID NO: 40667 - protein, 84 aa, unidentified
  REGION 1..84: note = Description of Unknown:cds_NC_035460.1_cds_YP_009408028.1_77 target sequence
SYFLAIRLDKKSYLPQAIRRGTGDAWMVQKANKIDPSAEQFCKHLIQTKSTNTITCGTQMMDLLGYSGYFIDSHWCSKYTNLLS

SEQ ID NO: 40668 - protein, 85 aa, unidentified
  REGION 1..85: note = Description of Unknown:cds_NC_035460.1_cds_YP_009408028.1_77 target sequence
TSTLCFFVLILAISALLLWFQVSDNSFFSELAKYTRIKNSIKGWRPLVESKTQLESDKGRMMAAGRPELLDFSCIDFGSYFLAIR

SEQ ID NO: 40669 - protein, 85 aa, unidentified
  REGION 1..85: note = Description of Unknown:cds_NC_035460.1_cds_YP_009408051.1_100 target sequence
DFMQKFSQQLASTVKISTEDENINITTEKVEVNPLPIKNQETYFQKMLIEQLRSRNQLKINPVCFDESIYTPKNSAYDTRPLLPM

SEQ ID NO: 40670 - protein, 85 aa, unidentified
  REGION 1..85: note = Description of Unknown:cds_NC_035460.1_cds_YP_009408051.1_100 target sequence
IPNSIPSPPSYDTSNSLPSSAYDFSPPQTLIDINTDVDTLQSTDINSTDNCSRSAQSNINSLIGITNTKTDSSQNSSSNIDIARE

SEQ ID NO: 40671 - protein, 84 aa, unidentified
  REGION 1..84: note = Description of Unknown:cds_NC_035460.1_cds_YP_009408051.1_100 target sequence
AYDFSPPQTLIDINTDVDTLQSTDINSTDNCSRSAQSNINSLIGITNTKTDSSQNSSSNIDIARELKKALDDHFKNNTAAVTNI

SEQ ID NO: 40672 - protein, 85 aa, unidentified
  REGION 1..85: note = Description of Unknown:cds_NC_035460.1_cds_YP_009408051.1_100 target sequence
EKVEVNPLPIKNQETYFQKMLIEQLRSRNQLKINPVCFDESIYTPKNSAYDTRPLLPMIPNSIPSPPSYDTSNSLPSSAYDFSPP

SEQ ID NO: 40673 - protein, 85 aa, unidentified
  REGION 1..85: note = Description of Unknown:cds_NC_005830.1_cds_YP_003727.1_2 target sequence
EKKVDKNEFLNMVLLKLEEGKVFLGKHGLKINISLDNVRINSGSVSITVGDIYLKVDMRNSELVLNDLENHEVYIYSYANDEVKI

SEQ ID NO: 40674 - protein, 85 aa, unidentified
  REGION 1..85: note = Description of Unknown:cds_NC_005830.1_cds_YP_003727.1_2 target sequence
RITQNTFYLYMQIDELKPVTQEVMLRAIEALRIPFSKREGLRIDIDLTQYHEIEYTSEDGLQLRYGVDDIQIKDDKLVMNGLAID

SEQ ID NO: 40675 - protein, 84 aa, unidentified
  REGION 1..84: note = Description of Unknown:cds_NC_005830.1_cds_YP_003727.1_2 target sequence
QEVMLRAIEALRIPFSKREGLRIDIDLTQYHEIEYTSEDGLQLRYGVDDIQIKDDKLVMNGLAIDILNNDWFISFEKNVMSMIL

SEQ ID NO: 40676 - protein, 85 aa, unidentified
  REGION 1..85: note = Description of Unknown:cds_NC_005830.1_cds_YP_003727.1_2 target sequence
GLKINISLDNVRINSGSVSITVGDIYLKVDMRNSELVLNDLENHEVYIYSYANDEVKIRITQNTFYLYMQIDELKPVTQEVMLRA

SEQ ID NO: 40677 - protein, 85 aa, unidentified
  REGION 1..85: note = Description of Unknown:hvTR_Q9YLA0 target sequence
RHLRLLPSTVPGELAVLMLEDFVDTVLEDELHPSPFELGPTLQDLYDLEVDAHDDDPNEEAVNLIFPESMILQADIANESTPLHT

SEQ ID NO: 40678 - protein, 85 aa, unidentified
  REGION 1..85: note = Description of Unknown:hvTR_Q9YLA0 target sequence
PTLSPIPELEEEDELDLRCYEEGFPPSDSEDERGPVSEDELSPSEEDHPSPPELSGETPLQVFRPTPVRPSGERRAAVDKIEDLL

SEQ ID NO: 40679 - protein, 84 aa, unidentified
  REGION 1..84: note = Description of Unknown:hvTR_Q9YLA0 target sequence
YEEGFPPSDSEDERGPVSEDELSPSEEDHPSPPELSGETPLQVFRPTPVRPSGERRAAVDKIEDLLQDMGGDEPLDLSLKRPRN

SEQ ID NO: 40680 - protein, 85 aa, unidentified
  REGION 1..85: note = Description of Unknown:hvTR_Q9YLA0 target sequence
EDELHPSPFELGPTLQDLYDLEVDAHDDDPNEEAVNLIFPESMILQADIANESTPLHTPTLSPIPELEEEDELDLRCYEEGFPPS

SEQ ID NO: 40681 - protein, 85 aa, unidentified
  REGION 1..85: note = Description of Unknown:cds_NZ_WFIY01000004.1_cds_WP_155862849.1_683 target sequence
KVGLLEDFKGNVTALWNAENLVVINGKEEEISLAYGRLSNFMDLDILIGKNFLDGEINFLRQVYGIIIDGSNIAKKINFENFKAE

SEQ ID NO: 40682 - protein, 85 aa, unidentified
  REGION 1..85: note = Description of Unknown:cds_NZ_WFIY01000004.1_cds_WP_155862849.1_683 target sequence
LTLGNIAISSAKVFDDFVTFFFPFPIRNCSINYSIVYEVLDYDIMRELHRITKLGGKVRIIIKDKLHGGLSVDDIMKFIIKFDVE

SEQ ID NO: 40683 - protein, 84 aa, unidentified
  REGION 1..84: note = Description of Unknown:cds_NZ_WFIY01000004.1_cds_WP_155862849.1_683 target sequence
FFFPFPIRNCSINYSIVYEVLDYDIMRELHRITKLGGKVRIIIKDKLHGGLSVDDIMKFIIKFDVEKISWKDGFWIIDVIKKRR

SEQ ID NO: 40684 - protein, 85 aa, unidentified
  REGION 1..85: note = Description of Unknown:cds_NZ_WFIY01000004.1_cds_WP_155862849.1_683 target sequence
EEEISLAYGRLSNFMDLDILIGKNFLDGEINFLRQVYGIIIDGSNIAKKINFENFKAELTLGNIAISSAKVFDDFVTFFFPFPIR

SEQ ID NO: 40685 - protein, 85 aa, unidentified
  REGION 1..85: note = Description of Unknown:cds_NZ_WFIY01000004.1_cds_WP_155863063.1_968 target sequence
ENENNGKRQPCFMRKDIYDEIRRLTELNGSSIYNYTNDLLAASIQMEKNGVDIKNEISTFILLSKLMNNYKGFMILVPFDFLRDS

SEQ ID NO: 40686 - protein, 85 aa, unidentified
  REGION 1..85: note = Description of Unknown:cds_NZ_WFIY01000004.1_cds_WP_155863063.1_968 target sequence
QMSLEKWKELGKSLMSYVSQLMNNVEVSFLSILRFFLLFIGDVNVDYNGKYIESFSPYFQGRIIDFIKSLVDGMLEVSNLKADVS

SEQ ID NO: 40687 - protein, 84 aa, unidentified
  REGION 1..84: note = Description of Unknown:cds_NZ_WFIY01000004.1_cds_WP_155863063.1_968 target sequence
QLMNNVEVSFLSILRFFLLFIGDVNVDYNGKYIESFSPYFQGRIIDFIKSLVDGMLEVSNLKADVSATTGMIRVKLISTKGIKV

SEQ ID NO: 40688 - protein, 85 aa, unidentified
  REGION 1..85: note = Description of Unknown:cds_NZ_WFIY01000004.1_cds_WP_155863063.1_968 target sequence
NGSSIYNYTNDLLAASIQMEKNGVDIKNEISTFILLSKLMNNYKGFMILVPFDFLRDSQMSLEKWKELGKSLMSYVSQLMNNVEV

SEQ ID NO: 40689 - protein, 85 aa, unidentified
  REGION 1..85: note = Description of Unknown:cds_NZ_WFIY01000004.1_cds_WP_155863148.1_1076 target sequence
LIAIEGIDGSGKTTLAKELKKWLENEKKKKVLLTAEPFTEEISKLIQEEGWKDPVTLTLLFSADRGVHVNWIMKQNQYNIIITDR

SEQ ID NO: 40690 - protein, 85 aa, unidentified
  REGION 1..85: note = Description of Unknown:cds_NZ_WFIY01000004.1_cds_WP_155863148.1_1076 target sequence
YYYSTIAYQSAMGIDKNWIVEVNKFFPKPELTLLLDIPAEIAITRIKKDDKFNFKEKLSLLQKVRENYLEIAKNENSIKIINSTK

SEQ ID NO: 40691 - protein, 84 aa, unidentified
  REGION 1..84: note = Description of Unknown:cds_NZ_WFIY01000004.1_cds_WP_155863148.1_1076 target sequence
VEVNKFFPKPELTLLLDIPAEIAITRIKKDDKFNFKEKLSLLQKVRENYLEIAKNENSIKIINSTKTFEEVLSEAKNYVEELIS

SEQ ID NO: 40692 - protein, 85 aa, unidentified
  REGION 1..85: note = Description of Unknown:cds_NZ_WFIY01000004.1_cds_WP_155863148.1_1076 target sequence
KKKVLLTAEPFTEEISKLIQEEGWKDPVTLTLLFSADRGVHVNWIMKQNQYNIIITDRYYYSTIAYQSAMGIDKNWIVEVNKFFP

SEQ ID NO: 40693 - protein, 85 aa, unidentified
  REGION 1..85: note = Description of Unknown:cds_NZ_WFIY01000004.1_cds_WP_155863492.1_1443 target sequence
TKVIKRSGEEEEYLSDKLYNALIRAGASDEVAKEIVKEIDERVKEREKISTDEIRRYVLTRLQQLEPEVADAWQFYDRVFKGRIT

SEQ ID NO: 40694 - protein, 85 aa, unidentified
  REGION 1..85: note = Description of Unknown:cds_NZ_WFIY01000004.1_cds_WP_155863492.1_1443 target sequence
FENGKAIVVDKGKLYLGRKVKDFNGKGLENAEQVKEILDELKEDMDYGLSPKVINARLYALFMGVLHKKDMPEGEKEKAIKYIND

SEQ ID NO: 40695 - protein, 84 aa, unidentified
  REGION 1..84: note = Description of Unknown:cds_NZ_WFIY01000004.1_cds_WP_155863492.1_1443 target sequence
VKDFNGKGLENAEQVKEILDELKEDMDYGLSPKVINARLYALFMGVLHKKDMPEGEKEKAIKYINDFRESLGWKPYELKYPLQS

SEQ ID NO: 40696 - protein, 85 aa, unidentified
  REGION 1..85: note = Description of Unknown:cds_NZ_WFIY01000004.1_cds_WP_155863492.1_1443 target sequence
SDEVAKEIVKEIDERVKEREKISTDEIRRYVLTRLQQLEPEVADAWQFYDRVFKGRITFENGKAIVVDKGKLYLGRKVKDFNGKG

SEQ ID NO: 40697 - protein, 85 aa, unidentified
  REGION 1..85: note = Description of Unknown:cds_NZ_WFIY01000004.1_cds_WP_155863762.1_1636 target sequence
SYDERTTAEAVIEIHFNLYEFRDSISKYTIVSDDDWQIISGKEGKYMTKEFDTYGILIYPIETSEDIKYAFSNKIEKIDKFREAL

SEQ ID NO: 40698 - protein, 85 aa, unidentified
  REGION 1..85: note = Description of Unknown:cds_NZ_WFIY01000004.1_cds_WP_155863762.1_1636 target sequence
YKPRYWREFITIMIEGNKLYTSPDLGLQTFNGVDLVNDIARSKGIEYEDIDDYLRISIDLSRPLTKESLNDAMERLSKALLLYYK

SEQ ID NO: 40699 - protein, 84 aa, unidentified
  REGION 1..84: note = Description of Unknown:cds_NZ_WFIY01000004.1_cds_WP_155863762.1_1636 target sequence
YTSPDLGLQTFNGVDLVNDIARSKGIEYEDIDDYLRISIDLSRPLTKESLNDAMERLSKALLLYYKIKEYQEDIASKLASQMLS

SEQ ID NO: 40700 - protein, 85 aa, unidentified
  REGION 1..85: note = Description of Unknown:cds_NZ_WFIY01000004.1_cds_WP_155863762.1_1636 target sequence
YTIVSDDDWQIISGKEGKYMTKEFDTYGILIYPIETSEDIKYAFSNKIEKIDKFREALYKPRYWREFITIMIEGNKLYTSPDLGL

SEQ ID NO: 40701 - protein, 5 aa, unidentified
  REGION 1..5: note = Description of Unknown:cds_NZ_WFIY01000004.1_cds_2150 target sequence
LGKQL

SEQ ID NO: 40702 - protein, 9 aa, unidentified
  REGION 1..9: note = Description of Unknown:cds_NZ_WFIY01000004.1_cds_2150 target sequence
HKENDSLIL

SEQ ID NO: 40703 - protein, 13 aa, unidentified
  REGION 1..13: note = Description of Unknown:cds_NZ_WFIY01000004.1_cds_2150 target sequence
YMRQGKLCSRHRQ

SEQ ID NO: 40704 - protein, 6 aa, unidentified
  REGION 1..6: note = Description of Unknown:cds_NZ_WFIY01000004.1_cds_2150 target sequence
LREFLE

SEQ ID NO: 40705 - protein, 85 aa, unidentified
  REGION 1..85: note = Description of Unknown:cds_NC_016144.1_cds_YP_004928141.1_7 target sequence
LYLPDGRAMVGQPFVWDFVWVCPVGLLMQALNCGGPLSRSSLRWCLVLGCPTSGAVFGCADLSGSMFCLGFGGVGGLGSWEEPLS

SEQ ID NO: 40706 - protein, 85 aa, unidentified
  REGION 1..85: note = Description of Unknown:cds_NC_016144.1_cds_YP_004928141.1_7 target sequence
FVCRQLVGTSAQPGSSCGVWTGSEGWMLGVPGLCSCSFVCSGGALEWFRGLLVLEGVVETVWLVPYGRGRSFPVCWLLLDGWLIA

SEQ ID NO: 40707 - protein, 84 aa, unidentified
  REGION 1..84: note = Description of Unknown:cds_NC_016144.1_cds_YP_004928141.1_7 target sequence
WTGSEGWMLGVPGLCSCSFVCSGGALEWFRGLLVLEGVVETVWLVPYGRGRSFPVCWLLLDGWLIALGIYTPPKGGLLFCSLVW

SEQ ID NO: 40708 - protein, 85 aa, unidentified
  REGION 1..85: note = Description of Unknown:cds_NC_016144.1_cds_YP_004928141.1_7 target sequence
MQALNCGGPLSRSSLRWCLVLGCPTSGAVFGCADLSGSMFCLGFGGVGGLGSWEEPLSFVCRQLVGTSAQPGSSCGVWTGSEGWM

SEQ ID NO: 40709 - protein, 85 aa, unidentified
  REGION 1..85: note = Description of Unknown:cds_NC_030656.1_cds_YP_009268729.1_14 target sequence
MAQILNFVSNRFYYDRGNFELEIQEGILDLARSIEAVANLPRQEGAVRTIHGDEYFVIETARRQNGDREENNQQILQPDNQFDNL

SEQ ID NO: 40710 - protein, 85 aa, unidentified
  REGION 1..85: note = Description of Unknown:cds_NC_030656.1_cds_YP_009268729.1_14 target sequence
DGNVEIPLVQQNQQPVQPVLLPPPNQLVDDVQDQADSPMLAQSSNHMNTQEDVLSSDMLNLFDDIEWNDEFIQQVLNNPETIFPI

SEQ ID NO: 40711 - protein, 84 aa, unidentified
  REGION 1..84: note = Description of Unknown:cds_NC_030656.1_cds_YP_009268729.1_14 target sequence
LLPPPNQLVDDVQDQADSPMLAQSSNHMNTQEDVLSSDMLNLFDDIEWNDEFIQQVLNNPETIFPISEFDPNMDISCYENLDDM

SEQ ID NO: 40712 - protein, 85 aa, unidentified
  REGION 1..85: note = Description of Unknown:cds_NC_030656.1_cds_YP_009268729.1_14 target sequence
LDLARSIEAVANLPRQEGAVRTIHGDEYFVIETARRQNGDREENNQQILQPDNQFDNLDGNVEIPLVQQNQQPVQPVLLPPPNQL

SEQ ID NO: 40713 - protein, 85 aa, unidentified
  REGION 1..85: note = Description of Unknown:cds_NC_007409.1_cds_YP_319859.1_28 target sequence
KVLSFLIRQDHLLYLDIFAKQNNLTRSDAIRYAISVLDEESTPVSLVGFPGIKLVRTSVKLAENVISRIDRLAILSKITRSDVIR

SEQ ID NO: 40714 - protein, 85 aa, unidentified
  REGION 1..85: note = Description of Unknown:cds_NC_007409.1_cds_YP_319859.1_28 target sequence
NAIYHLLINNAPKQLPPVTAQTEKKYGYVCPYCVSRFPTVRALKIHLKRRHNGFPWCPVCYKPLKNKNATNHFRRFTDPQHQFWY

SEQ ID NO: 40715 - protein, 84 aa, unidentified
  REGION 1..84: note = Description of Unknown:cds_NC_007409.1_cds_YP_319859.1_28 target sequence
AQTEKKYGYVCPYCVSRFPTVRALKIHLKRRHNGFPWCPVCYKPLKNKNATNHFRRFTDPQHQFWYMISRKRYLSSHRKEAVKQ

SEQ ID NO: 40716 - protein, 85 aa, unidentified
  REGION 1..85: note = Description of Unknown:cds_NC_007409.1_cds_YP_319859.1_28 target sequence
DAIRYAISVLDEESTPVSLVGFPGIKLVRTSVKLAENVISRIDRLAILSKITRSDVIRNAIYHLLINNAPKQLPPVTAQTEKKYG

SEQ ID NO: 40717 - protein, 85 aa, unidentified
  REGION 1..85: note = Description of Unknown:cds_NC_024711.1_cds_YP_009052560.1_85 target sequence
DFKTNTSFNIANTSSHEDFDDDYILIYKDINNILDDIGFQGDDRILCKSIIESLEKEASINIRKDKCVAIPHIGTIQKNWYRSKL

SEQ ID NO: 40718 - protein, 85 aa, unidentified
  REGION 1..85: note = Description of Unknown:cds_NC_024711.1_cds_YP_009052560.1_85 target sequence
ISHYKDFKEARKTMTREEYKEYTAKVMEEEKQKHYEEEEKIKTELKFKKKLLPIWIKLSKKHSAAYANLWLYAMGKLEIIEFDEE

SEQ ID NO: 40719 - protein, 84 aa, unidentified
  REGION 1..84: note = Description of Unknown:cds_NC_024711.1_cds_YP_009052560.1_85 target sequence
YKEYTAKVMEEEKQKHYEEEEKIKTELKFKKKLLPIWIKLSKKHSAAYANLWLYAMGKLEIIEFDEEVEEIYERFGIGLDADHR

SEQ ID NO: 40720 - protein, 85 aa, unidentified
  REGION 1..85: note = Description of Unknown:cds_NC_024711.1_cds_YP_009052560.1_85 target sequence
KDINNILDDIGFQGDDRILCKSIIESLEKEASINIRKDKCVAIPHIGTIQKNWYRSKLISHYKDFKEARKTMTREEYKEYTAKVM

SEQ ID NO: 40721 - protein, 85 aa, unidentified
  REGION 1..85: note = Description of Unknown:cds_NZ_WFIY01000004.1_cds_WP_155862595.1_370 target sequence
KDQGEITFPGDLLGVIEEFSPGEGSYEEDGNVRSSTIGKVFYDMINRRSNVLSPRKSIMVTLRKAKYVYGIVTLIKEDVANVDIV

SEQ ID NO: 40722 - protein, 85 aa, unidentified
  REGION 1..85: note = Description of Unknown:cds_NZ_WFIY01000004.1_cds_WP_155862595.1_370 target sequence
SIEEKFITPITGLLHISQISNKRLNSILEAIRVGDVIKAKPLTFTPPISLTIKQKDLGVIFAQCSICGHTMIKLDEEHLKCVYCG

SEQ ID NO: 40723 - protein, 84 aa, unidentified
  REGION 1..84: note = Description of Unknown:cds_NZ_WFIY01000004.1_cds_WP_155862595.1_370 target sequence
ISNKRLNSILEAIRVGDVIKAKPLTFTPPISLTIKQKDLGVIFAQCSICGHTMIKLDEEHLKCVYCGNVEQRKVGNYVVKKYAN

SEQ ID NO: 40724 - protein, 85 aa, unidentified
  REGION 1..85: note = Description of Unknown:cds_NZ_WFIY01000004.1_cds_WP_155862595.1_370 target sequence
EDGNVRSSTIGKVFYDMINRRSNVLSPRKSIMVTLRKAKYVYGIVTLIKEDVANVDIVSIEEKFITPITGLLHISQISNKRLNSI

SEQ ID NO: 40725 - protein, 85 aa, unidentified
  REGION 1..85: note = Description of Unknown:cds_NZ_WFIY01000004.1_cds_WP_155862805.1_631 target sequence
TRIVISGTPGVGKTAVSKLLSTKFSLEYFHVSSFIIQNKLYESYDPLRNTYNIDDEKVAKVINSYLSSKKDVVIETIYPSLIDYA

SEQ ID NO: 40726 - protein, 85 aa, unidentified
  REGION 1..85: note = Description of Unknown:cds_NZ_WFIY01000004.1_cds_WP_155862805.1_631 target sequence
DKVIILRKYPLVLYEELKRRGWNEIKVAENVEAEILGVILQEAIDWFKDKRPCQINTTNRTAEEIVNRIMNDSCEEIDWLSDEKV

SEQ ID NO: 40727 - protein, 84 aa, unidentified
  REGION 1..84: note = Description of Unknown:cds_NZ_WFIY01000004.1_cds_WP_155862805.1_631 target sequence
RRGWNEIKVAENVEAEILGVILQEAIDWFKDKRPCQINTTNRTAEEIVNRIMNDSCEEIDWLSDEKVQDLLFTLDKVISLTENK

SEQ ID NO: 40728 - protein, 85 aa, unidentified
  REGION 1..85: note = Description of Unknown:cds_NZ_WFIY01000004.1_cds_WP_155862805.1_631 target sequence
YFHVSSFIIQNKLYESYDPLRNTYNIDDEKVAKVINSYLSSKKDVVIETIYPSLIDYADKVIILRKYPLVLYEELKRRGWNEIKV

SEQ ID NO: 40729 - protein, 85 aa, unidentified
  REGION 1..85: note = Description of Unknown:cds_NZ_WFIY01000004.1_cds_WP_155862965.1_833 target sequence
QMADIIEREVKLKLESPTLAELYAKLLNDGMQLIKKETEEDIYFNSEFRDFRKTDEALRIRKTDSGIEFTYKGPKIGKISKSREE

SEQ ID NO: 40730 - protein, 85 aa, unidentified
  REGION 1..85: note = Description of Unknown:cds_NZ_WFIY01000004.1_cds_WP_155862965.1_833 target sequence
ITVNVNNADNLIKILERLGFKPVYTVVKNRIFLKDGEFIICLDSVKDLGEFIEIEIPNSTEEKLIEYVNLFLEKYKIKATQIKKS

SEQ ID NO: 40731 - protein, 84 aa, unidentified
  REGION 1..84: note = Description of Unknown:cds_NZ_WFIY01000004.1_cds_WP_155862965.1_833 target sequence
GFKPVYTVVKNRIFLKDGEFIICLDSVKDLGEFIEIEIPNSTEEKLIEYVNLFLEKYKIKATQIKKSYLELLVSKNEENNSNSN

SEQ ID NO: 40732 - protein, 85 aa, unidentified
  REGION 1..85: note = Description of Unknown:cds_NZ_WFIY01000004.1_cds_WP_155862965.1_833 target sequence
NDGMQLIKKETEEDIYFNSEFRDFRKTDEALRIRKTDSGIEFTYKGPKIGKISKSREEITVNVNNADNLIKILERLGFKPVYTVV

SEQ ID NO: 40733 - protein, 85 aa, unidentified
  REGION 1..85: note = Description of Unknown:cds_NC_003214.2_cds_NP_445676.1_11 target sequence
VSSKDKIKEELKQEEPEENVEIANTETQKIEMVEEAKSDEFVLPFQRENLKNYLWRLLIIKKVEIRDVILKNSNEPAQVSYIDGY

SEQ ID NO: 40734 - protein, 85 aa, unidentified
  REGION 1..85: note = Description of Unknown:cds_NC_003214.2_cds_NP_445676.1_11 target sequence
VIDNNELEQRLIKEIVNNQTIPINLLKEVNNHKKEVYLFSTSQGVYYSLLRSVVPKLKNGAVIVGIALQQSDYPQPMVTLVHPSR

SEQ ID NO: 40735 - protein, 84 aa, unidentified
  REGION 1..84: note = Description of Unknown:cds_NC_003214.2_cds_NP_445676.1_11 target sequence
QTIPINLLKEVNNHKKEVYLFSTSQGVYYSLLRSVVPKLKNGAVIVGIALQQSDYPQPMVTLVHPSRLEELKTQYEALSKTKKG

SEQ ID NO: 40736 - protein, 85 aa, unidentified
  REGION 1..85: note = Description of Unknown:cds_NC_003214.2_cds_NP_445676.1_11 target sequence
QKIEMVEEAKSDEFVLPFQRENLKNYLWRLLIIKKVEIRDVILKNSNEPAQVSYIDGYVIDNNELEQRLIKEIVNNQTIPINLLK
